United States Patent Application Publication US 2011/0183924 A1 - sequence listing, part 39

SEQ ID NO: 91703 - DNA, 339 bp, Homo sapiens
ctgttcaggtttaaaagtagcaatctgtcttcaggtgttcttaaccactacagaaccctgtctttgctaccatctcttttctcctttctgcgtttttacctgtgacctagtctgtgatttttatattgatgctgctctctgctctcatctcctttaataagtttgtcctactccctttttccttctagcctatccaaccctgctctttatctactttactgaatttcttggtcctattttctttattatatctcctaaactaacttcagaatacatgtttgtatgtcaaaacaaccgtagaaggggaggcttaatattccaggtttaccttttagcaca

SEQ ID NO: 91704 - DNA, 369 bp, Homo sapiens
gaagtgcagcctcacaactgctggggattttccatcccaccaggatttccgcgggacaccccaagtccagcctttgaggctcctcaggaaccagagtttggcctggagccagttggggcagaggaggggggccaggctgggtggcctaggggtgtggttaggcctgctaaggggctcctcttctcagtctccccatgatttgctggttactggcttgaaatctgggcccagacccattccaacactgaaccctgagctccctgagacctggctggcaaggacaggtcccaatttttacaggggcctgagaggaatggagaagggatctctgccccttcctttctcagtcacacctccttgacagggggt

SEQ ID NO: 91705 - DNA, 491 bp, Homo sapiens
ggaaaatggaagaaaattcagtgttcaaataaagagattaaactaaacttaaaatttgggaacagaaataaaatttgagaataatataagtaactaagaagcactgaaataatttaaatattatagtgtaactatggttattaaaacaaaacaaattcctttttttttttttgacacagtctcactctattggccaggatggattgcaatggcacaatcttggctcattgctatctccacctcctgggttcaagtaattttcctgcctcagcctcccaagtagctgggattacaggcacacaccaccatgcccagctaatttttgtatttttagtagagatgtttcaccatgtcagtcaggctggtgttgaactcctgacctcaggtgatccacccgtcttggcctcccaaaggcctgggattacaggcatgagccaccgtgcctggcctaaaacaaattctaataattgttcttgtaaaagaaatgacat

SEQ ID NO: 91706 - DNA, 281 bp, Homo sapiens
atcactgaggccatgcattacaaatatagaaaaaaataaattaatagatacagacttctaattgcagctccagtatataaggaccataaaagtcatcactctttccatacaacaggaaaaaatatggccaatctgaaaatccatcactttccttggacttctcagacaaccaaggttgtagggaaaatcatcatcctgatatctgaagaacaatatcctgagatactgcaactgagatgtacttaagcagagcagaagctactggagccataaactaatat

SEQ ID NO: 91707 - DNA, 191 bp, Homo sapiens
agccgctgtggtgtgtgtggttttggaggtacccattttggagtgcgatgagtactgtggggtccacggtgagcacgtactgcgcagtgggtgtaatgtggagttcatagtagcctgcagcttgggagaggggtctggacggggtccatgcatttgggagatatcagtgtatagatagtgtttaaaatttt

SEQ ID NO: 91708 - DNA, 551 bp, Homo sapiens
accccgtctctactaaaaacacaaaaattagccaatcttggtggcgggcacctggaatcccagctacttgggaggctgaggcaggagaatcatttgaacctaggaggcagaggttgcagtgagccgagatctcaccactgcactccagcctgcgcaacagagcgagactccatctcaaaaaataataaataagagctaattttattgtgggtgaaaatttttaaacgtctttctctataataaaataatttccttaaattttatatatactttatcatatataatgtgtgaatgattttaaagttctgtgtaaataacaatattggtaaaatgagttacattttcaacttacttaaatatgtaatgtcacctggtgattttatctttattcttcagtgtattttcttccatttacacatttagctagcctccctaaagtgtactctaccaataattgaaatcttgttaaacaaaattaaaaccatttatatattatgctgctttctttaaaatgcaaaataaaaataagattggggacttgagaatcagat

SEQ ID NO: 91709 - DNA, 814 bp, Homo sapiens
tccttctgctaagtaaaaacgaaaactctagatattatatatgaaacaaacataagaagactctaaaaagtaaagagaaaaagacagactggttagacatctcaagacccaagaagcaataggatggtcagttcttttggacttatatattccagagttagagctaaagaaggtggcaatctggaaaccctaataggccatggacaatgaaagctccaagaacaccaaaagacaaggaaaggggcagcctcacaagacaaaaatattttagacaataactgctgtactctagccaaacaccactgaaaaactgtgaactcacccccagtcactctaaagccaagttgggagcctagacttctacccttgtcagggtataatgagacactccaacccccctgacagggtgttcagagaaggccaaataaagaactaggactttcatctctgccaggctgagaccacatagggaggctggaattttccctctactcagtagtagcaaggcccccttctgtgatgtcggtgccacatgaggaataggacaaagattttttgccccttccattcagggcaattttaagtggagacctactgggaagccagaactcccactcctacctagtgatgagtggtttcctcctctccagaaggtctaacataggccaaatggggaacctagacttctactctaacctgccagtacaggggtggctgtattgaagcagagttagatgaagccagctaaaacagaaggtttaaataaggtccagagtcacataacataatacccaaattgtgtaagcttcaaaaa

SEQ ID NO: 91710 - DNA, 767 bp, Homo sapiens
gacatgctagtgctcggcccacccttctgtttttgtagccaaggcttgattggattttctgtatgtataatgggctgtttcaaaatggtcttgcctcattgtttcttcatatcttattgaaaccaacccactgttgatctcaatctgtgtaaggagaatgcggagtatggcattcgcaggactgaatccctagattttaagtttggaaggagatccaaccgggcagatgaattgaccggtggtgaatattctgtagcattttcctccctggagaggaatgccgccaccgctgggaaccgtggactggcatgtgagccagtggctgtgaaaggcgctgtgccctgtgtcctccgtgtactttagagcaggagcgtcacacatggtggagccgggtgatatcccgggcaggctcccgaaagctcctggtggcccatcaggggctggtttttccaccttttttttttttttttttttcctcgagacaaggtctcactctgtcacccaggcaggagtgcagtggcatgatcttgactcactgcaacctttgcctcctgggttcaagcaattctcgtgccttagcctcccgagtagctggcattacaggcactcgtcaccatgcccggctcgtttttttttttttgtatttttagtagagacagggtttcaccatgttggccaggctggtcttgaactcctgaccccaaaatgatctgcccgcctcagcctcccagaatgctgggattacaagcacgagccaccgtgccagg

SEQ ID NO: 91711 - DNA, 649 bp, Homo sapiens
ctgtgtcccaacaatggatgaatttctagatacacactgctcaccaagacttactcatgaagaagtagaaacactaagacgagtaacaaataaggagattgaattagttatcaaataactactaacaaaaacaagtaatgaaccagatgacttcactgtaaaacgctatcaaatactgaaaaaggatttaacaccaacactcttaaaaatgttccatgtgatggacaaaacactccctctctcattcaataaggctagtgtcaccttgacagaaaaggcacacaaaggctctaagaaaactacagagcaatattcctcatcaatctaatgcaaatatccacaacaaaatgctagcaagcaagttcagcagtatattaaaatggaccacacactatgatcatgtgaaagtcactcctggaatgcaacgatgttgcaacttaggaacattgatccctgcaatactccacaaaaacagaataaaaacaaaaacccacttgataggctcatcagatgcagaaaaaacatttgaaaaacatcaacaactactgatgatagaaacactctacacattaggaatacgaggaatctactttacatacagaagccttatataaaaagccaaaaggtaacatcatactcagtgttgaaa

SEQ ID NO: 91712 - DNA, 492 bp, Homo sapiens
agaaaaagtatttagtgataactagttcacttgaagtctcagctataccaaaacctcctaaattaaaaacaggatttcagttctgataataactctgtcctttaccagataaagtagtatttctccttcagtgacatgagactatgggtataaattgagttgggatagatgaatagttgtcatcattatagttatggtgcattaaaatccacatggcagcaagtagtagctgaggcagcagttcaattgaggttgtacaaataaatctactgcattgctatagtatcatactttactggagggaacatttgctgaattgtgccctagtcagtgacacttaactgaataaattttttttttaaattggctgggcaccatgtctgacgcctgaaatctgtaatcccagcactttgggaggctgaggtgggaggattgcttgagccctggagttcaagaccagcccaggcgacatagtgagaccccatctctgta

SEQ ID NO: 91713 - DNA, 916 bp, Homo sapiens
tatcaaaggagatagatgtacataaggggaattatggagaagtgaaaatttgtctaaggttcattttttcagtagcttaattttaatagtaaactcttttaaggaatgaatggccacaggcagagactaatggtgtactttcagtgttctcagtgagtgcttcacagattaggtttccaagagaagaagattgcctctgaggaagaagagatggggtagcaagaggcatatatgagaccgttcttgggaccaacacctatggaggggagggaagaaggcagaattatgggaccagatagaagaagttggtctgcaatgcagtcttgaggaaggcctcagcagagccaatagacagttccgaagctggcatgcccttgagagttgtcctaaattcgggtgagagggttaggcctttatatccttggtcacttgatagtagatgctggaacaaaatggtgctctttagctaaggcaatttacagagggctgacagctgagagcacttgtagaatctaggaaaatgagtctttcattcttgaaggggaatcttcacatcatccactacaaatggtgctatattttgggaccagcagacactgagaaatgccaggtggatagaatccttccttcttttattctatctttttttctttctttctgtctcctaatctagtgcttctccaaaaatacttttaagaattagaattaggccattagttattataaggaaggaagggaaataatcattttcataaaactcagcaattcttttaatgtcaagatatggattattattacactcaacaattataattattaatattttccacggaaaagtttcatatattgaatgacccaagtactccatgtgaccttccctgtctatgtaacctagcatctgtcagcacctaaaatt

SEQ ID NO: 91714 - DNA, 357 bp, Homo sapiens
ggatctgcttatgagtcttagatgcaaaactgacatatctttaattgggtgtgccatcgtatctgtcctcaggcttgttagctaagcccagttagtgatttgccaccactgccattgcttggtggtagaatagggtaaaggattatcatgccagcatcccttgtccgctgtgaccttagtcttagtgaacaaattttcttgtgtgctttctaaaatgcccatgacccttatttcatacttaggaaatagaagtcacaaagatttcctgaggacctcatcattatgtggagctaggaaaagtactgtggtttatagctctgtggtttacacaaagggaaatccaattgatttgcacaa

SEQ ID NO: 91715 - DNA, 509 bp, Homo sapiens
gtaatcccagcactttgagagactgaggcaggcagatcacttgaggtcaggagttcgagaccagcctggccaacatggtaaaacccgtctctgctaaatatacaaaattagccaggtgtggttgttgaggtgatcagaaccaacatcgggtgtgggggtgacaaagtctggcagagtcaaaggattgagaaaaagacagtttaagaagtaaagtaggaccaaggggctatcatgatggtggaggctgcaaaggccctgaactctgggggcccatggtattttttggtaatccaacaaagaaacaggtggtgagaaggtggaggtcaaaaggtcacgttgcatcaagtacatgatttacagctgtgatagtttagcatttgctctgctgcttgagataatggagagcaggttcttttaactcaagatacaatcaatcctaggagagcaaggagcaaggagccagcaagtctagacacattccagagccacgagccctggattctatccaa

SEQ ID NO: 91716 - DNA, 339 bp, Homo sapiens
aagttgtaaatgacgttttggttttatgaaaatagttttgatttcccggatcccctgaaagtgtctcagaccccacagacgtcctcagactacactttgagaccaccgtttttgtttttgtttttgtttggagacggagtttcgctcttgtcgcccaagctggagcgcaatggcacgatctcggctcactacagcctccacctcccgggttcaagtgattctcctacctcagcctcccgagcagctggaattacagtcatgcgtcaccatgcccagctagtatttgtatgtttagcagagacggggtttcaccatgtcggtcaggctggtctcgaactc

SEQ ID NO: 91717 - DNA, 367 bp, Homo sapiens
caagggcccacaggcccaccacaggattggtgaccagcattgaggggacactgagaaaagttcttcaggctgtttcttcccagccccgccacaggctatgctggcacctgagagagttcttatcccaccctgtgcggaactcctgctgagcagagtggctttgtattcttccttccaactcaggctgttggtgcactgctagagggctgctgtctctgacactgcagtagccacagtcgagcttgagctggctggtccagcaggggctgctccgcagccctggggctcagaccagagcaatgctgtgagagtcctggtactggccagtgcagagactgcacatagcaagggctcaatgaagtttacc

SEQ ID NO: 91718 - DNA, 1703 bp, Homo sapiens
gaggaagaggccgggagaagagggctagagcaaagaccgagagccggagaaaggcgaaaggcgcggtgagcaatcgccgacgtagagagggcagccctccgcgctgcaatattgagaaggcacccgcgggacgcatgcgcacggcggacggaggcgagccggccggggcttcctccccggccggcagggtggacggtgggctccagatgggatcagagcggatggagatgcggaagcggcagatgcccgccgcccaggacacaccaggcgccgccccaggccagcccggagcggggagtcgcgggtccaacgcatgctgcttctgctggtgctgctgttgtagctgctcgtgtctcactgttagaaaccaggaagatcagaggcccacaatagcttcccacgaactcagagcagatcttccaacctgggaagaaagccctgctcctactctggaagaagtcaacgcctgggctcagtcatttgacaaattaatggtcactccagcaggaaggaatgcattccgtgaattcctccgaacagaattcagtgaggaaaatatgctcttctggatggcctgtgaggaactgaaaaaggaagctaataaaaacattattgaagagaaagcaaggataatctatgaagactacatttctatactttctcctaaggaggtgagcttagactcccgggtgagagaagtgatcaacagaaacatggtggagccatcccaacacatattcgatgatgctcaacttcagatttacaccctgatgcacagagactcatatcctcgattcatgaactctgctgtctataaggacttgcttcagtccttatcggagaaatctattgaagcataggatttttcaaatatatttattattaataaaataataaaagaattcatgggctacaactagcacagggaatttagaggttgtagcatcttctgctggagtaatactcaggctattctaataacagatgattccttcaacagactgctatatattcaccatgtaaactgcagccacctttagtgatacttttaaaaaaaaaaataaagggatatggctgttgtagaaagatagcgtatttgcatttacaataacagtagcatgttgtcagtggccaaggctacacagaaggctccctgctgcccggagcaggtacatccacagagcaaagggaaccacttttattttgcatgagtttggtaactgattactctcccctcaaagaaaagacattcaggtgtttctcaacgacatcttctgtccagcaagctcggtttgaatacgtcacttaccagtgccattgcaggacccaaattcacagttcataaaagatgtgaccactacatgtaaaaatagcattctacttgatcttacagtatgtatgtatgtatgtatggagacatatgtgtgcgtgtggatgtctacatggttaatggaaagcactgtgctctgaagtggatcagtctcaagtgtctggtaacagcagcaatgcttagaaaattcttttgttgaaaagagttactgttattatcagaatttgccaacctaaagaatgaatttttaaattcataacttggtcatgttcacaacaaaactgtcaaataagcatatttccatttttattactgaaagaaatatgggcattttcattctttaaagaaataaagcacaagaattttatctcaa

SEQ ID NO: 91719 - DNA, 2101 bp, Homo sapiens
cattaaccaaacaaagagaagcagagtggatcctgtgctaatattgggaaaaccaggcaacaggactcatttggggcctttattgtgaaaacatgccccagctttcccaagataaccaagagtgcctccagaaacatttctccaggccgtctatatggacacagtttctgcccctgttcagggctcagagatataatacagacattcaccaaatcacagaaaatgaaggagacctcagggctgttcctgatatcaagtccttcccgcctgcacagctcccagactcgcccgccgccccgaagctgttcggcctcctttctagcccgctttccagcctcgcaaggttcttctctcaccttctccggcgaccccctcccgaggctccccggaggcgcctggacttctcccccctgcttcccgccctgccggccgcccgctctcgagggggcacgaggagctgccgggccgcctctcgctcctgctcggggcggcgctggcactgcccggccgaccctcggggggtcgtccgctgaggcccccccatccggtagccaagcccagggaagaagacgccaccgctgggcagagctcgcctatgccgcagatgggatcagagcggatggagatgcggaagcggcagatgcccgccgcccaggacacaccaggcgccgccccaggccagcccggagcggggagtcgcgggtccaacgcatgctgcttctgctggtgctgctgttgtagctgctcgtgtctcactgttagaaaccaggaagatcagaggcccacaatagcttcccacgaactcagagcagatcttccaacctgggaagaaagccctgctcctactctggaagaagtcaacgcctgggctcagtcatttgacaaattaatggtcactccagcaggaaggaatgcattccgtgaattcctccgaacagaattcagtgaggaaaatatgctcttctggatggcctgtgaggaactgaaaaaggaagctaataaaaacattattgaagagaaagcaaggataatctatgaagactacatttctatactttctcctaaggaggtgagcttagactcccgggtgagagaagtgatcaacagaaacatggtggagccatcccaacacatattcgatgatgctcaacttcagatttacaccctgatgcacagagactcatatcctcgattcatgaactctgctgtctataaggacttgcttcagtccttatcggagaaatctattgaagcataggatttttcaaatatatttattattaataaaataataaaagaattcatgggctacaactagcacagggaatttagaggttgtagcatcttctgctggagtaatactcaggctattctaataacagatgattccttcaacagactgctatatattcaccatgtaaactgcagccacctttagtgatacttttaaaaaaaaaaataaagggatatggctgttgtagaaagatagcgtatttgcatttacaataacagtagcatgttgtcagtggccaaggctacacagaaggctccctgctgcccggagcaggtacatccacagagcaaagggaaccacttttattttgcatgagtttggtaactgattactctcccctcaaagaaaagacattcaggtgtttctcaacgacatcttctgtccagcaagctcggtttgaatacgtcacttaccagtgccattgcaggacccaaattcacagttcataaaagatgtgaccactacatgtaaaaatagcattctacttgatcttacagtatgtatgtatgtatgtatggagacatatgtgtgcgtgtggatgtctacatggttaatggaaagcactgtgctctgaagtggatcagtctcaagtgtctggtaacagcagcaatgcttagaaaattcttttgttgaaaagagttactgttattatcagaatttgccaacctaaagaatgaatttttaaattcataacttggtcatgttcacaacaaaactgtcaaataagcatatttccatttttattactgaaagaaatatgggcattttcattctttaaagaaataaagcacaagaattttatctcaa

SEQ ID NO: 91720 - DNA, 1608 bp, Homo sapiens
cattaaccaaacaaagagaagcagagtggatcctgtgctaatattgggaaaaccaggcaacaggactcatttggggcctttattgtgaaaacatgccccagctttcccaagataaccaagagtgcctccagaaacatttctccaggccgtctatatggacacagtttctgcccctgttcagggctcagagatataatacagacattcaccaaatcacagaaaatgaaggagacctcagggctgttcctgatatcaagtctcactgttagaaaccaggaagatcagaggcccacaatagcttcccacgaactcagagcagatcttccaacctgggaagaaagccctgctcctactctggaagaagtcaacgcctgggctcagtcatttgacaaattaatggtcactccagcaggaaggaatgcattccgtgaattcctccgaacagaattcagtgaggaaaatatgctcttctggatggcctgtgaggaactgaaaaaggaagctaataaaaacattattgaagagaaagcaaggataatctatgaagactacatttctatactttctcctaaggaggtgagcttagactcccgggtgagagaagtgatcaacagaaacatggtggagccatcccaacacatattcgatgatgctcaacttcagatttacaccctgatgcacagagactcatatcctcgattcatgaactctgctgtctataaggacttgcttcagtccttatcggagaaatctattgaagcataggatttttcaaatatatttattattaataaaataataaaagaattcatgggctacaactagcacagggaatttagaggttgtagcatcttctgctggagtaatactcaggctattctaataacagatgattccttcaacagactgctatatattcaccatgtaaactgcagccacctttagtgatacttttaaaaaaaaaaataaagggatatggctgttgtagaaagatagcgtatttgcatttacaataacagtagcatgttgtcagtggccaaggctacacagaaggctccctgctgcccggagcaggtacatccacagagcaaagggaaccacttttattttgcatgagtttggtaactgattactctcccctcaaagaaaagacattcaggtgtttctcaacgacatcttctgtccagcaagctcggtttgaatacgtcacttaccagtgccattgcaggacccaaattcacagttcataaaagatgtgaccactacatgtaaaaatagcattctacttgatcttacagtatgtatgtatgtatgtatggagacatatgtgtgcgtgtggatgtctacatggttaatggaaagcactgtgctctgaagtggatcagtctcaagtgtctggtaacagcagcaatgcttagaaaattcttttgttgaaaagagttactgttattatcagaatttgccaacctaaagaatgaatttttaaattcataacttggtcatgttcacaacaaaactgtcaaataagcatatttccatttttattactgaaagaaatatgggcattttcattctttaaagaaataaagcacaagaattttatctcaa

SEQ ID NO: 91721 - DNA, 519 bp, Homo sapiens
gaggaagaggccgggagaagagggctagagcaaagaccgagagccggagaaaggcgaaaggcgcggtgagcaatcgccgacgtagagagggcagccctccgcgctgcaatattgagaaggcacccgcgggacgcatgcgcacggcggacggaggcgagccggccggggcttcctccccggccggcagggtggacggtgggctcggtctttgcatgcaccaccacatctggctaatcaagtgaagatgaggccaaactggatgaaggcgggcctgaaatccaacgactggtgaccttataaggagggagagcttcaaagacccaggcagtcatagagggaagaagggcaagtggcaaagaagacagagattgggtttctgttgccaccgaggctgccagaagaggcaaggaagaatcctcccctagagccttcagaggcagatgcctggccctgctgacggtttggttttgaacttttagcctccagaactgtgcaagaataaatttctgttgttttaag

SEQ ID NO: 91722 - DNA, 797 bp, Homo sapiens
  misc_feature (682)..(682): n is a, c, g, or t
  misc_feature (715)..(715): n is a, c, g, or t
aatagtagaaaccacaacgtttatttatatttctagtaccttattgtcacacttttggtttgcttgggaaaactaactggggtcatttttttttccaagtagaggaagaaattctattaatacttggggatctgaagttctctttaaagtatttgtaaaaaatcttttcttggcagggactgagctgtcaacatgtgaatgtcttttttttgcagtctcactgttagaaaccaggaagatcagaggcccacaatagcttcccacgaactcagagcagatcttccaacctgggaagaaagtccatcgatttccacattcattacagacaacaaatgttgtcattggttcatcagcactacgggtttgtacctgtgtgtaagtgcaattcttctttttacatttgccacatgtgaacaagtcagtctgggtcccaccagtcttggccatctgatgctctctgatggcttctttggtcaagtttttccgcatctctttcagctcatcactagccatttcctctgctgtcattctagcaaataagtcaggacgaatattcccacagaggacattttcccttaaatcaggattttctgcatctttacgacttgatatgctactccgtactctattgttgcatctcatgtctgtattccttatttcttgatatatagctccttcaatntgagatcctaattcttcctcatcagctccaatnggcatgtagtcatcccctgggtcgagagctgcagcaggcattcttctacacttcacctgacagaatcagagtgcttggtgcc

SEQ ID NO: 91723 - DNA, 496 bp, Homo sapiens
attaaaatgtccagtcatctaatgcacttgacagttcgggacagaagcattaaagtggcttcacaggagatcctattcctcactccacgttggacattgttatgggttgaattgtgtccccccagaatatatgttgaagttctaaccatgatacctgtgaatatcaccttatttggaaacagggtctttgcatgcaccaccacatctggctaatcaagtgaagatgaggccaaactggatgaaggcgggcctgaaatccaacgactggtgaccttataaggagggagagcttcaaagacccaggcagtcatagagggaagaagggcaagtggcaaagaagacagagattgggtttctgttgccaccgaggctgccagaagaggcaaggaagaatcctcccctagagccttcagaggcagatgcctggccctgctgacggtttggttttgaacttttagcctccagaactgtgcaagaataaatttctgttgtttta

SEQ ID NO: 91724 - DNA, 1757 bp, Homo sapiens
cattaaccaaacaaagagaagcagagtggatcctgtgctaatattgggaaaaccaggcaacaggactcatttggggcctttattgtgaaaacatgccccagctttcccaagataaccaagagtgcctccagaaacatttctccaggccgtctatatggacacagtttctgcccctgttcagggctcagagatataatacagacattcaccaaatcacagaaaatgaaggagacctcagggctgttcctgatatcaagcagatgggatcagagcggatggagatgcggaagcggcagatgcccgccgcccaggacacaccaggcgccgccccaggccagcccggagcggggagtcgcgggtccaacgcatgctgcttctgctggtgctgctgttgtagctgctcgtgtctcactgttagaaaccaggaagatcagaggcccacaatagcttcccacgaactcagagcagatcttccaacctgggaagaaagccctgctcctactctggaagaagtcaacgcctgggctcagtcatttgacaaattaatggtcactccagcaggaaggaatgcattccgtgaattcctccgaacagaattcagtgaggaaaatatgctcttctggatggcctgtgaggaactgaaaaaggaagctaataaaaacattattgaagagaaagcaaggataatctatgaagactacatttctatactttctcctaaggaggtgagcttagactcccgggtgagagaagtgatcaacagaaacatggtggagccatcccaacacatattcgatgatgctcaacttcagatttacaccctgatgcacagagactcatatcctcgattcatgaactctgctgtctataaggacttgcttcagtccttatcggagaaatctattgaagcataggatttttcaaatatatttattattaataaaataataaaagaattcatgggctacaactagcacagggaatttagaggttgtagcatcttctgctggagtaatactcaggctattctaataacagatgattccttcaacagactgctatatattcaccatgtaaactgcagccacctttagtgatacttttaaaaaaaaaaataaagggatatggctgttgtagaaagatagcgtatttgcatttacaataacagtagcatgttgtcagtggccaaggctacacagaaggctccctgctgcccggagcaggtacatccacagagcaaagggaaccacttttattttgcatgagtttggtaactgattactctcccctcaaagaaaagacattcaggtgtttctcaacgacatcttctgtccagcaagctcggtttgaatacgtcacttaccagtgccattgcaggacccaaattcacagttcataaaagatgtgaccactacatgtaaaaatagcattctacttgatcttacagtatgtatgtatgtatgtatggagacatatgtgtgcgtgtggatgtctacatggttaatggaaagcactgtgctctgaagtggatcagtctcaagtgtctggtaacagcagcaatgcttagaaaattcttttgttgaaaagagttactgttattatcagaatttgccaacctaaagaatgaatttttaaattcataacttggtcatgttcacaacaaaactgtcaaataagcatatttccatttttattactgaaagaaatatgggcattttcattctttaaagaaataaagcacaagaattttatctcaa

SEQ ID NO: 91725 - DNA, 1524 bp, Homo sapiens
cattaaccaaacaaagagaagcagagtggatcctgtgctaatattgggaaaaccaggcaacaggactcatttggggcctttattgtgaaaacatgccccagctttcccaagataaccaagagtgcctccagaaacatttctccaggccgtctatatggacacagtttctgcccctgttcagggctcagagatataatacagacattcaccaaatcacagaaaatgaaggagacctcagggctgttcctgatatcaagccctgctcctactctggaagaagtcaacgcctgggctcagtcatttgacaaattaatggtcactccagcaggaaggaatgcattccgtgaattcctccgaacagaattcagtgaggaaaatatgctcttctggatggcctgtgaggaactgaaaaaggaagctaataaaaacattattgaagagaaagcaaggataatctatgaagactacatttctatactttctcctaaggaggtgagcttagactcccgggtgagagaagtgatcaacagaaacatggtggagccatcccaacacatattcgatgatgctcaacttcagatttacaccctgatgcacagagactcatatcctcgattcatgaactctgctgtctataaggacttgcttcagtccttatcggagaaatctattgaagcataggatttttcaaatatatttattattaataaaataataaaagaattcatgggctacaactagcacagggaatttagaggttgtagcatcttctgctggagtaatactcaggctattctaataacagatgattccttcaacagactgctatatattcaccatgtaaactgcagccacctttagtgatacttttaaaaaaaaaaataaagggatatggctgttgtagaaagatagcgtatttgcatttacaataacagtagcatgttgtcagtggccaaggctacacagaaggctccctgctgcccggagcaggtacatccacagagcaaagggaaccacttttattttgcatgagtttggtaactgattactctcccctcaaagaaaagacattcaggtgtttctcaacgacatcttctgtccagcaagctcggtttgaatacgtcacttaccagtgccattgcaggacccaaattcacagttcataaaagatgtgaccactacatgtaaaaatagcattctacttgatcttacagtatgtatgtatgtatgtatggagacatatgtgtgcgtgtggatgtctacatggttaatggaaagcactgtgctctgaagtggatcagtctcaagtgtctggtaacagcagcaatgcttagaaaattcttttgttgaaaagagttactgttattatcagaatttgccaacctaaagaatgaatttttaaattcataacttggtcatgttcacaacaaaactgtcaaataagcatatttccatttttattactgaaagaaatatgggcattttcattctttaaagaaataaagcacaagaattttatctcaa

SEQ ID NO: 91726 - DNA, 1554 bp, Homo sapiens
gaggaagaggccgggagaagagggctagagcaaagaccgagagccggagaaaggcgaaaggcgcggtgagcaatcgccgacgtagagagggcagccctccgcgctgcaatattgagaaggcacccgcgggacgcatgcgcacggcggacggaggcgagccggccggggcttcctccccggccggcagggtggacggtgggctctctcactgttagaaaccaggaagatcagaggcccacaatagcttcccacgaactcagagcagatcttccaacctgggaagaaagccctgctcctactctggaagaagtcaacgcctgggctcagtcatttgacaaattaatggtcactccagcaggaaggaatgcattccgtgaattcctccgaacagaattcagtgaggaaaatatgctcttctggatggcctgtgaggaactgaaaaaggaagctaataaaaacattattgaagagaaagcaaggataatctatgaagactacatttctatactttctcctaaggaggtgagcttagactcccgggtgagagaagtgatcaacagaaacatggtggagccatcccaacacatattcgatgatgctcaacttcagatttacaccctgatgcacagagactcatatcctcgattcatgaactctgctgtctataaggacttgcttcagtccttatcggagaaatctattgaagcataggatttttcaaatatatttattattaataaaataataaaagaattcatgggctacaactagcacagggaatttagaggttgtagcatcttctgctggagtaatactcaggctattctaataacagatgattccttcaacagactgctatatattcaccatgtaaactgcagccacctttagtgatacttttaaaaaaaaaaataaagggatatggctgttgtagaaagatagcgtatttgcatttacaataacagtagcatgttgtcagtggccaaggctacacagaaggctccctgctgcccggagcaggtacatccacagagcaaagggaaccacttttattttgcatgagtttggtaactgattactctcccctcaaagaaaagacattcaggtgtttctcaacgacatcttctgtccagcaagctcggtttgaatacgtcacttaccagtgccattgcaggacccaaattcacagttcataaaagatgtgaccactacatgtaaaaatagcattctacttgatcttacagtatgtatgtatgtatgtatggagacatatgtgtgcgtgtggatgtctacatggttaatggaaagcactgtgctctgaagtggatcagtctcaagtgtctggtaacagcagcaatgcttagaaaattcttttgttgaaaagagttactgttattatcagaatttgccaacctaaagaatgaatttttaaattcataacttggtcatgttcacaacaaaactgtcaaataagcatatttccatttttattactgaaagaaatatgggcattttcattctttaaagaaataaagcacaagaattttatctcaa

SEQ ID NO: 91727 - DNA, 167 bp, Homo sapiens
accagtagaagagccacctggctgagctcagcccaatttgctgacccatagaattgtgaacaaataaaatggttgtagttataagccattaagtttcagagtttgttacacggtaacatgtaactgatacaactcttggagccagttgttcagccattctcaaccac

SEQ ID NO: 91728 - DNA, 1068 bp, Homo sapiens
  misc_feature (55)..(58): n is a, c, g, or t
gcttaacgcgcaggaggtctcacgagagtggaagcaactctcgcgaattttaaannnnatcttttgcctagcgactgacaacaggctggttgcttggcgtggaatcctaaagtggcctggctttgagactggagtgagaccccagccctaggctggggttctttccattatagaggagacggattcagaagggctacagaccaaggttgttgaaaaccagacatatgatgagcgtctagagattaacgactccgaagaggttgcaagtatttatactccaaccccaagacaccaaggacttcctcgttctgcccatcttcctaacaaggctatggctgataacagcagtgatgagtgtgaagaggaaaataacaaggtcctaagggagggcatgccacaggctccaggccacagaggcaaagacatggaccctgttccacctgcccctgcaagtctcaagtgccaccagaccccttctcatgtacttgagagggtgggatggtacagagagagccagaagcacagaaaggagaagaagaagacctcacagttgacacctcaacggggctttagtgaaaatgaggatgacgatgatgatgatgatgattcatctgaaactgattctgattctgatgatgatgatgaagagcatggagcccctctggaaggggcctatgaccctgcagactatgagcatttgccagtttctgctgaaattaaggaactcttccagtacatcagtaggtacacacctcagttgattgacctggaccacaaactgaagcctttcattcctgattttatcccagctgtcggggatattgatgcattcttaaaggtcccacgtcctgatggaaagcctgacaaccttggcctattggtattggatgaaccttctacaaagcagtcagaccctacggtgctctcactctggttaacagagaatttagcgccaatctcaaatgaagtaagctaatatggaaaaacccagacctagggctgagaattataaaggctagcccgagggaaacgccccataatataaagcgagaaatgagacccaattgg

SEQ ID NO: 91729 - DNA, 1338 bp, Homo sapiens
  misc_feature (55)..(58): n is a, c, g, or t
gcttaacgcgcaggaggtctcacgagagtggaagcaactctcgcgaattttaaannnnatcttttgcctagcgactgacaacaggctggttgcttggcgtggaatcctaaagtggcctggctttgagactggagtgagaccccagccctaggctggggttctttccattatagaggagacggattcagaagggctacagaccaaggttgttgaaaaccagacatatgatgagcgtctagagattaacgactccgaagaggttgcaagtatttatactccaaccccaagacaccaaggacttcctcgttctgcccatcttcctaacaaggctatggctgataacagcagtgatgagtgtgaagaggaaaataacaaggagaagaagaagacctcacagttgacacctcaacggggctttagtgaaaatgaggatgacgatgatgatgatgatgattcatctgaaactgattctgattctgatgatgatgatgaagagcatggagcccctctggaaggggcctatgaccctgcagactatgagcatttgccagtttctgctgaaattaaggaactcttccagtacatcagtaggtacacacctcagttgattgacctggaccacaaactgaagcctttcattcctgattttatcccagctgtcggggatattgatgcattcttaaaggtcccacgtcctgatggaaagcctgacaaccttggcctattggtattggatgaaccttctacaaagcagtcagaccctacggtgctctcactctggttaacagagaattctaagcagcacaacatcacacaacatatgaaagtaaaaagcctagaagatgcagaaaagaatcccaaagccattgacacgtggattgagagcatctctgaattacaccgttctaagccccctgcgactgtgcactacaccaggcccatgcccgacattgacacgctgatgcaggaatggtccccggagtttgaagagcttttgggcaaggtaagcctgcccacggcagagattgattgcagctggagagtacatgagatgatctgtgccattctagacatccctgtctacaagagtcggatccagtcctccatctgctctttttcctctaatcaagaattcagaactcacaggatttaaagtctcgtgaggagaagatcatctttatccatgcactccagtgaaatgggaattactcagtgagacctccagtgtgttaggtggatggcccgccagcatgcagtgtgagatgagcggcagccgtgtcggggttgtggctctgaagaaatataacggatgcggagatcggaaatatgcctgaattg

SEQ ID NO: 91730 - DNA, 1491 bp, Homo sapiens
  misc_feature (55)..(58): n is a, c, g, or t
gcttaacgcgcaggaggtctcacgagagtggaagcaactctcgcgaattttaaannnnatcttttgcctagcgactgacaacaggctggttgcttggcgtggaatcctaaagtggcctggctttgagactggagtgagaccccagccctaggctggggttctttccattatagaggagacggattcagaagggctacagaccaaggttgttgaaaaccagacatatgatgagcgtctagagattaacgactccgaagaggttgcaagtatttatactccaaccccaagacaccaaggacttcctcgttctgcccatcttcctaacaaggctatggctgataacagcagtgatgagtgtgaagaggaaaataacaaggtcctaagggagggcatgccacaggctccaggccacagaggcaaagacatggaccctgttccacctgcccctgcaagtctcaagtgccaccagaccccttctcatgtacttgagagggtgggatggtacagagagagccagaagcacagaaaggagaagaagaagacctcacagttgacacctcaacggggctttagtgaaaatgaggatgacgatgatgatgatgatgattcatctgaaactgattctgattctgatgatgatgatgaagagcatggagcccctctggaaggggcctatgaccctgcagactatgagcatttgccagtttctgctgaaattaaggaactcttccagtacatcagtaggtacacacctcagttgattgacctggaccacaaactgaagcctttcattcctgattttatcccagctgtcggggatattgatgcattcttaaaggtcccacgtcctgatggaaagcctgacaaccttggcctattggtattggatgaaccttctacaaagcagtcagaccctacggtgctctcactctggttaacagagaattctaagcagcacaacatcacacaacatatgaaagtaaaaagcctagaagatgcagaaaagaatcccaaagccattgacacgtggattgagagcatctctgaattacaccgttctaagccccctgcgactgtgcactacaccaggcccatgcccgacattgacacgctgatgcaggaatggtccccggagtttgaagagcttttgggcaaggtaagcctgcccacggcagagattgattgcagctggagagtacatgagatgatctgtgccattctagacatccctgtctacaagagtcggatccagtcctccatctgctctttttcctctaatcaagaattcagaactcacaggatttaaagtctcgtgaggagaagatcatctttatccatgcactccagtgaaatgggaattactcagtgagacctccagtgtgttaggtggatggcccgccagcatgcagtgtgagatgagcggcagccgtgtcggggttgtggctctgaagaaatataacggatgcggagatcggaaatatgcctgaattg

SEQ ID NO: 91731 - DNA, 505 bp, Homo sapiens
gggggtagctcaaacgggtcagaacctatgttcaggttgcgggtgagctgccctctccaaatccagccagagatgcacattcctcggccagtctcagccaacagtaccaaaagtgatttttgagtgtgccagggtaaaggcttccagttcagcctcagttattttagacaatctcgccatctttaatttcttagcttcctgttctaataaatgcacggctttacctttcctgtcagaaataaaccaaggctctaaaagatgatttcccttctgtaactccctagagccacaggttctcattccttttcccattatacttctcacaattcagtttctatgagtttgatcacctgatttttttaacaaaatatttctaacgggaatgggtgggagtgctggtgaaaagaggtgaaatgtggttgtatgagccaatcatatttgtgattttttaaaaaaagtttaaaaggaaatatctgttctgatacggttttgaggggatcctcta

SEQ ID NO: 91732 - DNA, 3123 bp, Homo sapiens
cactccatctgagggtggctgcgtgtccacatacgaggggacagggctgaggatgaggagaaccctggggacccagaagaccgtgccttgcccggaagtcctgcctgtaggcctgaaggacttgccctaacagagcctcaacaactacctggtgattcctacttcagccccttggtgtgagcagcttctcaacatgaactacagcctccacttggccttcgtgtgtctgagtctcttcactgagaggatgtgcatccaggggagtcagttcaacgtcgaggtcggcagaagtgacaagctttccctgcctggctttgagaacctcacagcaggatataacaaatttctcaggcccaattttggtggagaacccgtacagatagcgctgactctggacattgcaagtatctctagcatttcagagagtaacatggactacacagccaccatatacctccgacagcgctggatggaccagcggctggtgtttgaaggcaacaagagcttcactctggatgcccgcctcgtggagttcctctgggtgccagatacttacattgtggagtccaagaagtccttcctccatgaagtcactgtgggaaacaggctcatccgcctcttctccaatggcacggtcctgtatgccctcagaatcacgacaactgttgcatgtaacatggatctgtctaaataccccatggacacacagacatgcaagttgcagctggaaagctggggctatgatggaaatgatgtggagttcacctggctgagagggaacgactctgtgcgtggactggaacacctgcggcttgctcagtacaccatagagcggtatttcaccttagtcaccagatcgcagcaggagacaggaaattacactagattggtcttacagtttgagcttcggaggaatgttctgtatttcattttggaaacctacgttccttccactttcctggtggtgttgtcctgggtttcattttggatctctctcgattcagtccctgcaagaacctgcattggggacaacaaaggaagtagaagaagtcagtattactaatatcatcaacagctccatctccagctttaaacggaagatcagctttgccagcattgaaatttccagcgacaacgttgactacagtgacttgacaatgaaaaccagcgacaagttaaagtttgtcttccgagaaaagatgggcaggattgttgattatttcacaattcaaaaccccagtaatgttgatcactattccaaactactgtttcctttgatttttatgctagccaatgtattttactgggcatactacatgtatttttgagtcaatgttaaatttcttgcatgccataggtcttcaacaggacaagataatgatgtaaatggtattttaggccaagtgtgcacccacatccaatggtgctacaagtgactgaaataatatttgagtctttctgctcaaagaatgaagctccaaccattgttctaagctgtgtagaagtcctagcattataggatcttgtaatagaaacatcagtccattcctctttcatcttaatcaaggacattcccatggagcccaagattacaaatgtactcagggctgtttattcggtggctccctggtttgcatttacctcatataaagaatgggaaggagaccattgggtaaccctcaagtgtcagaagttgtttctaaagtaactatacatgttttttactaaatctctgcagtgcttataaaatacattgttgcctatttagggagtaacattttctagtttttgtttctggttaaaatgaaatatgggcttatgtcaattcattggaagtcaatgcactaactcaataccaagatgagtttttaaataatgaatattatttaataccacaacagaattatccccaatttccaataagtcctatcattgaaaattcaaatataagtgaagaaaaaattagtagatcaacaatctaaacaaatccctcggttctaagatacaatggattccccatactggaaggactctgaggctttattcccccactatgcatatcttatcattttattattatacacacatccatcctaaactatactaaagcccttttcccatgcatggatggaaatggaagatttttttttaacttgttctagaagtcttaatatgggctgttgccatgaaggcttgcagaattgagtccattttctagctgcctttattcacatagtgatggggtactaaaagtactgggttgactcagagagtcgctgtcattctgtcattgctgctactctaacactgagcaacactctcccagtggcagatcccctgtatcattccaagaggagcattcatccctttgctctaatgatcaggaatgatgcttattagaaaacaaactgcttgacccaggaacaagtggcttagcttaagtaaacttggctttgctcagatccctgatccttccagctggtctgctctgagtggcttatcccgcatgagcaggagcgtgctggccctgagtactgaactttctgagtaacaatgagacacgttacagaacctatgttcaggttgcgggtgagctgccctctccaaatccagccagagatgcacattcctcggccagtctcagccaacagtaccaaaagtgatttttgagtgtgccagggtaaaggcttccagttcagcctcagttattttagacaatctcgccatctttaatttcttagcttcctgttctaataaatgcacggctttacctttcctgtcagaaataaaccaaggctctaaaagatgatttcccttctgtaactccctagagccacaggttctcattccttttcccattatacttctcacaattcagtttctatgagtttgatcacctgatttttttaacaaaatatttctaacgggaatgggtgggagtgctggtgaaaagaggtgaaatgtggttgtatgagccaatcatatttgtgattttttaaaaaaagtttaaaaggaaatatctgttctgaaaccccacttaagcattgtttttatataaaaacaatgataaagatgtgaaactgtgaaataaatataccatattagctacccaccaaaaaaaat

SEQ ID NO: 91733 - DNA, 3240 bp, Homo sapiens
cactccatctgagggtggctgcgtgtccacatacgaggggacagggctgaggatgaggagaaccctggggacccagaagaccgtgccttgcccggaagtcctgcctgtaggcctgaaggacttgccctaacagagcctcaacaactacctggtgattcctacttcagccccttggtgtgagcagcttctcaacatgaactacagcctccacttggccttcgtgtgtctgagtctcttcactgagaggatgtgcatccaggggagtcagttcaacgtcgaggtcggcagaagtgacaagctttccctgcctggctttgagaacctcacagcaggatataacaaatttctcaggcccaattttggtggagaacccgtacagatagcgctgactctggacattgcaagtatctctagcatttcagagagtaacatggactacacagccaccatatacctccgacagcgctggatggaccagcggctggtgtttgaaggcaacaagagcttcactctggatgcccgcctcgtggagttcctctgggtgccagatacttacattgtggagtccaagaagtccttcctccatgaagtcactgtgggaaacaggctcatccgcctcttctccaatggcacggtcctgtatgccctcagaatcacgacaactgttgcatgtaacatggatctgtctaaataccccatggacacacagacatgcaagttgcagctggaaagctggggctatgatggaaatgatgtggagttcacctggctgagagggaacgactctgtgcgtggactggaacacctgcggcttgctcagtacaccatagagcggtatttcaccttagtcaccagatcgcagcaggagacaggaaattacactagattggtcttacagtttgagcttcggaggaatgttctgtatttcattttggaaacctacgttccttccactttcctggtggtgttgtcctgggtttcattttggatctctctcgattcagtccctgcaagaacctgcattggagtgacgaccgtgttatcaatgaccacactgatgatcgggtcccgcacttctcttcccaacaccaactgcttcatcaaggccatcgatgtgtacctggggatctgctttagctttgtgtttggggccttgctagaatatgcagttgctcactacagttccttacagcagatggcagccaaagatagggggacaacaaaggaagtagaagaagtcagtattactaatatcatcaacagctccatctccagctttaaacggaagatcagctttgccagcattgaaatttccagcgacaacgttgactacagtgacttgacaatgaaaaccagcgacaagttaaagtttgtcttccgagaaaagatgggcaggattgttgattatttcacaattcaaaaccccagtaatgttgatcactattccaaactactgtttcctttgatttttatgctagccaatgtattttactgggcatactacatgtatttttgagtcaatgttaaatttcttgcatgccataggtcttcaacaggacaagataatgatgtaaatggtattttaggccaagtgtgcacccacatccaatggtgctacaagtgactgaaataatatttgagtctttctgctcaaagaatgaagctccaaccattgttctaagctgtgtagaagtcctagcattataggatcttgtaatagaaacatcagtccattcctctttcatcttaatcaaggacattcccatggagcccaagattacaaatgtactcagggctgtttattcggtggctccctggtttgcatttacctcatataaagaatgggaaggagaccattgggtaaccctcaagtgtcagaagttgtttctaaagtaactatacatgttttttactaaatctctgcagtgcttataaaatacattgttgcctatttagggagtaacattttctagtttttgtttctggttaaaatgaaatatgggcttatgtcaattcattggaagtcaatgcactaactcaataccaagatgagtttttaaataatgaatattatttaataccacaacagaattatccccaatttccaataagtcctatcattgaaaattcaaatataagtgaagaaaaaattagtagatcaacaatctaaacaaatccctcggttctaagatacaatggattccccatactggaaggactctgaggctttattcccccactatgcatatcttatcattttattattatacacacatccatcctaaactatactaaagcccttttcccatgcatggatggaaatggaagatttttttttaacttgttctagaagtcttaatatgggctgttgccatgaaggcttgcagaattgagtccattttctagctgcctttattcacatagtgatggggtactaaaagtactgggttgactcagagagtcgctgtcattctgtcattgctgctactctaacactgagcaacactctcccagtggcagatcccctgtatcattccaagaggagcattcatccctttgctctaatgatcaggaatgatgcttattagaaaacaaactgcttgacccaggaacaagtggcttagcttaagtaaacttggctttgctcagatccctgatccttccagctggtctgctctgagtggcttatcccgcatgagcaggagcgtgctggccctgagtactgaactttctgagtaacaatgagacacgttacagaacctatgttcaggttgcgggtgagctgccctctccaaatccagccagagatgcacattcctcggccagtctcagccaacagtaccaaaagtgatttttgagtgtgccagggtaaaggcttccagttcagcctcagttattttagacaatctcgccatctttaatttcttagcttcctgttctaataaatgcacggctttacctttcctgtcagaaataaaccaaggctctaaaagatgatttcccttctgtaactccctagagccacaggttctcattccttttcccattatacttctcacaattcagtttctatgagtttgatcacctgatttttttaacaaaatatttctaacgggaatgggtgggagtgctggtgaaaagaggtgaaatgtggttgtatgagccaatcatatttgtgattttttaaaaaaagtttaaaaggaaatatctgttctgatacggttttgaggggatcctcta

SEQ ID NO: 91734 - DNA, 1707 bp, Homo sapiens
tgggtgatctacaggatcctgtgtcatcaaaccctcatcaatacatggagatttacagaaatagtcaaaccacatctacaaaatgccagtatcaggcggcggcttcgaagccaaagtgatgtttggatgtaaagtgaaatattagtttggcggatgaagcagatagtgaggagggtttcgatgagtcatcaaaccctgttcgtggggaacctggtttgcatttacctcatataaagaatgggaaggagaccattgggtaaccctcaagtgtcagaagttgtttctaaagtaactatacatgttttttactaaatctctgcagtgcttataaaatacattgttgcctatttagggagtaacattttctagtttttgtttctggttaaaatgaaatatgggcttatgtcaattcattggaagtcaatgcactaactcaataccaagatgagtttttaaataatgaatattatttaataccacaacagaattatccccaatttccaataagtcctatcattgaaaattcaaatataagtgaagaaaaaattagtagatcaacaatctaaacaaatccctcggttctaagatacaatggattccccatactggaaggactctgaggctttattcccccactatgcatatcttatcattttattattatacacacatccatcctaaactatactaaagcccttttcccatgcatggatggaaatggaagatttttttttaacttgttctagaagtcttaatatgggctgttgccatgaaggcttgcagaattgagtccattttctagctgcctttattcacatagtgatggggtactaaaagtactgggttgactcagagagtcgctgtcattctgtcattgctgctactctaacactgagcaacactctcccagtggcagatcccctgtatcattccaagaggagcattcatccctttgctctaatgatcaggaatgatgcttattagaaaacaaactgcttgacccaggaacaagtggcttagcttaagtaaacttggctttgctcagatccctgatccttccagctggtctgctctgagtggcttatcccgcatgagcaggagcgtgctggccctgagtactgaactttctgagtaacaatgagacacgttacagaacctatgttcaggttgcgggtgagctgccctctccaaatccagccagagatgcacattcctcggccagtctcagccaacagtaccaaaagtgatttttgagtgtgccagggtaaaggcttccagttcagcctcagttattttagacaatctcgccatctttaatttcttagcttcctgttctaataaatgcacggctttacctttcctgtcagaaataaaccaaggctctaaaagatgatttcccttctgtaactccctagagccacaggttctcattccttttcccattatacttctcacaattcagtttctatgagtttgatcacctgatttttttaacaaaatatttctaacgggaatgggtgggagtgctggtgaaaagaggtgaaatgtggttgtatgagccaatcatatttgtgattttttaaaaaaagtttaaaaggaaatatctgttctgaaaccccacttaagcattgtttttatataaaaacaatgataaagatgtgaaactgtgaaataaatataccatattagctacccaccaaaaaaaat

SEQ ID NO: 91735 - DNA, 576 bp, Homo sapiens
gggggtagctcaaacgggtcagaacctatgttcaggttgcgggtgagctgccctctccaaatccagccagagatgcacattcctcggccagtctcagccaacagtaccaaaagtgatttttgagtgtgccagggtaaaggcttccagttcagcctcagttattttagacaatctcgccatctttaatttcttagcttcctgttctaataaatgcacggctttacctttcctgtcagaaataaaccaaggctctaaaagatgatttcccttctgtaactccctagagccacaggttctcattccttttcccattatacttctcacaattcagtttctatgagtttgatcacctgatttttttaacaaaatatttctaacgggaatgggtgggagtgctggtgaaaagaggtgaaatgtggttgtatgagccaatcatatttgtgattttttaaaaaaagtttaaaaggaaatatctgttctgaaaccccacttaagcattgtttttatataaaaacaatgataaagatgtgaaactgtgaaataaatataccatattagctacccaccaaaaaaaat

SEQ ID NO: 91736 - DNA, 521 bp, Homo sapiens
cactccatctgagggtggctgcgtgtccacatacgaggggacagggctgaggatgaggagaaccctggggacccagaagaccgtgccttgcccggaagtcctgcctgtaggcctgaaggacttgccctaacagagcctcaacaactacctggtgattcctacttcagccccttggtgtgagcagcttctcaacatgaactacagcctccacttggccttcgtgtgtctgagtctcttcactgagaggatgtgcatccaggggagtcagttcaacgtcgaggtcggcagaagtgacaagctttccctgcctggctttgagaacctcacagcaggatataacaaatttctcaggcccaattttggtggagaacccgtacagatagcgctgactctggacattgcaagtatctctagcatttcagagagtaacatggtaagcgctgttcctttgtactctacccaagtagtccctctctgtgtgtttaaaggggatatgctttctagccgctcaaaaaaaaaaa

SEQ ID NO: 91737 - DNA, 496 bp, Homo sapiens
ccagtcactttgtaggaacatcccctgcctgttttcccaggagtgacgaccgtgttatcaatgaccacactgatgatcgggtcccgcacttctcttcccaacaccaactgcttcatcaaggccatcgatgtgtacctggggatctgctttagctttgtgtttggggccttgctagaatatgcagttgctcactacagttccttacagcagatggcagccaaagatagggtaagagtcttgagggccctgtgtatgatccatcactggtgccgtgtgctgatctgtagacatgggctggacctggcttctatccccaccccacccgcagtgattccctgtgctccagtgagtcttatccttgttcaggtgggagcagctggaagtcatggtgccccttgaaaaagaccattcttttcaccaaatacaatgagatattaatatgtttaattttccagcagaaaatatgttatctgtatgcagcataaaatcacaacca

SEQ ID NO: 91738 - DNA, 3311 bp, Homo sapiens
cactccatctgagggtggctgcgtgtccacatacgaggggacagggctgaggatgaggagaaccctggggacccagaagaccgtgccttgcccggaagtcctgcctgtaggcctgaaggacttgccctaacagagcctcaacaactacctggtgattcctacttcagccccttggtgtgagcagcttctcaacatgaactacagcctccacttggccttcgtgtgtctgagtctcttcactgagaggatgtgcatccaggggagtcagttcaacgtcgaggtcggcagaagtgacaagctttccctgcctggctttgagaacctcacagcaggatataacaaatttctcaggcccaattttggtggagaacccgtacagatagcgctgactctggacattgcaagtatctctagcatttcagagagtaacatggactacacagccaccatatacctccgacagcgctggatggaccagcggctggtgtttgaaggcaacaagagcttcactctggatgcccgcctcgtggagttcctctgggtgccagatacttacattgtggagtccaagaagtccttcctccatgaagtcactgtgggaaacaggctcatccgcctcttctccaatggcacggtcctgtatgccctcagaatcacgacaactgttgcatgtaacatggatctgtctaaataccccatggacacacagacatgcaagttgcagctggaaagctggggctatgatggaaatgatgtggagttcacctggctgagagggaacgactctgtgcgtggactggaacacctgcggcttgctcagtacaccatagagcggtatttcaccttagtcaccagatcgcagcaggagacaggaaattacactagattggtcttacagtttgagcttcggaggaatgttctgtatttcattttggaaacctacgttccttccactttcctggtggtgttgtcctgggtttcattttggatctctctcgattcagtccctgcaagaacctgcattggagtgacgaccgtgttatcaatgaccacactgatgatcgggtcccgcacttctcttcccaacaccaactgcttcatcaaggccatcgatgtgtacctggggatctgctttagctttgtgtttggggccttgctagaatatgcagttgctcactacagttccttacagcagatggcagccaaagatagggggacaacaaaggaagtagaagaagtcagtattactaatatcatcaacagctccatctccagctttaaacggaagatcagctttgccagcattgaaatttccagcgacaacgttgactacagtgacttgacaatgaaaaccagcgacaagttaaagtttgtcttccgagaaaagatgggcaggattgttgattatttcacaattcaaaaccccagtaatgttgatcactattccaaactactgtttcctttgatttttatgctagccaatgtattttactgggcatactacatgtatttttgagtcaatgttaaatttcttgcatgccataggtcttcaacaggacaagataatgatgtaaatggtattttaggccaagtgtgcacccacatccaatggtgctacaagtgactgaaataatatttgagtctttctgctcaaagaatgaagctccaaccattgttctaagctgtgtagaagtcctagcattataggatcttgtaatagaaacatcagtccattcctctttcatcttaatcaaggacattcccatggagcccaagattacaaatgtactcagggctgtttattcggtggctccctggtttgcatttacctcatataaagaatgggaaggagaccattgggtaaccctcaagtgtcagaagttgtttctaaagtaactatacatgttttttactaaatctctgcagtgcttataaaatacattgttgcctatttagggagtaacattttctagtttttgtttctggttaaaatgaaatatgggcttatgtcaattcattggaagtcaatgcactaactcaataccaagatgagtttttaaataatgaatattatttaataccacaacagaattatccccaatttccaataagtcctatcattgaaaattcaaatataagtgaagaaaaaattagtagatcaacaatctaaacaaatccctcggttctaagatacaatggattccccatactggaaggactctgaggctttattcccccactatgcatatcttatcattttattattatacacacatccatcctaaactatactaaagcccttttcccatgcatggatggaaatggaagatttttttttaacttgttctagaagtcttaatatgggctgttgccatgaaggcttgcagaattgagtccattttctagctgcctttattcacatagtgatggggtactaaaagtactgggttgactcagagagtcgctgtcattctgtcattgctgctactctaacactgagcaacactctcccagtggcagatcccctgtatcattccaagaggagcattcatccctttgctctaatgatcaggaatgatgcttattagaaaacaaactgcttgacccaggaacaagtggcttagcttaagtaaacttggctttgctcagatccctgatccttccagctggtctgctctgagtggcttatcccgcatgagcaggagcgtgctggccctgagtactgaactttctgagtaacaatgagacacgttacagaacctatgttcaggttgcgggtgagctgccctctccaaatccagccagagatgcacattcctcggccagtctcagccaacagtaccaaaagtgatttttgagtgtgccagggtaaaggcttccagttcagcctcagttattttagacaatctcgccatctttaatttcttagcttcctgttctaataaatgcacggctttacctttcctgtcagaaataaaccaaggctctaaaagatgatttcccttctgtaactccctagagccacaggttctcattccttttcccattatacttctcacaattcagtttctatgagtttgatcacctgatttttttaacaaaatatttctaacgggaatgggtgggagtgctggtgaaaagaggtgaaatgtggttgtatgagccaatcatatttgtgattttttaaaaaaagtttaaaaggaaatatctgttctgaaaccccacttaagcattgtttttatataaaaacaatgataaagatgtgaaactgtgaaataaatataccatattagctacccaccaaaaaaaat

SEQ ID NO: 91739 - DNA, 3094 bp, Homo sapiens
atcccccgcgcggagagcgctggtcgagcatttaattgtcagcctgtttggaagcatctgaaacgcatgtcatacgggagagccttggcctaacgcagagcaacctcctaagggacaggaagggctcgagtgaggctgagtcctgagaatgtcctatgaaggatgaatctgtgagaagtgtgcatggtaacacagaggagcagtgccaaggcacactgttacggggtgagtgtgtacaggctctttcctgcactgattcatcggctggtgtttgaaggcaacaagagcttcactctggatgcccgcctcgtggagttcctctgggtgccagatacttacattgtggagtccaagaagtccttcctccatgaagtcactgtgggaaacaggctcatccgcctcttctccaatggcacggtcctgtatgccctcagaatcacgacaactgttgcatgtaacatggatctgtctaaataccccatggacacacagacatgcaagttgcagctggaaagctggggctatgatggaaatgatgtggagttcacctggctgagagggaacgactctgtgcgtggactggaacacctgcggcttgctcagtacaccatagagcggtatttcaccttagtcaccagatcgcagcaggagacaggaaattacactagattggtcttacagtttgagcttcggaggaatgttctgtatttcattttggaaacctacgttccttccactttcctggtggtgttgtcctgggtttcattttggatctctctcgattcagtccctgcaagaacctgcattggagtgacgaccgtgttatcaatgaccacactgatgatcgggtcccgcacttctcttcccaacaccaactgcttcatcaaggccatcgatgtgtacctggggatctgctttagctttgtgtttggggccttgctagaatatgcagttgctcactacagttccttacagcagatggcagccaaagatagggggacaacaaaggaagtagaagaagtcagtattactaatatcatcaacagctccatctccagctttaaacggaagatcagctttgccagcattgaaatttccagcgacaacgttgactacagtgacttgacaatgaaaaccagcgacaagttaaagtttgtcttccgagaaaagatgggcaggattgttgattatttcacaattcaaaaccccagtaatgttgatcactattccaaactactgtttcctttgatttttatgctagccaatgtattttactgggcatactacatgtatttttgagtcaatgttaaatttcttgcatgccataggtcttcaacaggacaagataatgatgtaaatggtattttaggccaagtgtgcacccacatccaatggtgctacaagtgactgaaataatatttgagtctttctgctcaaagaatgaagctccaaccattgttctaagctgtgtagaagtcctagcattataggatcttgtaatagaaacatcagtccattcctctttcatcttaatcaaggacattcccatggagcccaagattacaaatgtactcagggctgtttattcggtggctccctggtttgcatttacctcatataaagaatgggaaggagaccattgggtaaccctcaagtgtcagaagttgtttctaaagtaactatacatgttttttactaaatctctgcagtgcttataaaatacattgttgcctatttagggagtaacattttctagtttttgtttctggttaaaatgaaatatgggcttatgtcaattcattggaagtcaatgcactaactcaataccaagatgagtttttaaataatgaatattatttaataccacaacagaattatccccaatttccaataagtcctatcattgaaaattcaaatataagtgaagaaaaaattagtagatcaacaatctaaacaaatccctcggttctaagatacaatggattccccatactggaaggactctgaggctttattcccccactatgcatatcttatcattttattattatacacacatccatcctaaactatactaaagcccttttcccatgcatggatggaaatggaagatttttttttaacttgttctagaagtcttaatatgggctgttgccatgaaggcttgcagaattgagtccattttctagctgcctttattcacatagtgatggggtactaaaagtactgggttgactcagagagtcgctgtcattctgtcattgctgctactctaacactgagcaacactctcccagtggcagatcccctgtatcattccaagaggagcattcatccctttgctctaatgatcaggaatgatgcttattagaaaacaaactgcttgacccaggaacaagtggcttagcttaagtaaacttggctttgctcagatccctgatccttccagctggtctgctctgagtggcttatcccgcatgagcaggagcgtgctggccctgagtactgaactttctgagtaacaatgagacacgttacagaacctatgttcaggttgcgggtgagctgccctctccaaatccagccagagatgcacattcctcggccagtctcagccaacagtaccaaaagtgatttttgagtgtgccagggtaaaggcttccagttcagcctcagttattttagacaatctcgccatctttaatttcttagcttcctgttctaataaatgcacggctttacctttcctgtcagaaataaaccaaggctctaaaagatgatttcccttctgtaactccctagagccacaggttctcattccttttcccattatacttctcacaattcagtttctatgagtttgatcacctgatttttttaacaaaatatttctaacgggaatgggtgggagtgctggtgaaaagaggtgaaatgtggttgtatgagccaatcatatttgtgattttttaaaaaaagtttaaaaggaaatatctgttctgaaaccccacttaagcattgtttttatataaaaacaatgataaagatgtgaaactgtgaaataaatataccatattagctacccaccaaaaaaaat

SEQ ID NO: 91740 - DNA, 1282 bp, Homo sapiens
cactccatctgagggtggctgcgtgtccacatacgaggggacagggctgaggatgaggagaaccctggggacccagaagaccgtgccttgcccggaagtcctgcctgtaggcctgaaggacttgccctaacagagcctcaacaactacctggtgattcctacttcagccccttggtgtgagcagcttctcaacatgaactacagcctccacttggccttcgtgtgtctgagtctcttcactgagaggatgtgcatccaggggagtcagttcaacgtcgaggtcggcagaagtgacaagctttccctgcctggctttgagaacctcacagcaggatataacaaatttctcaggcccaattttggtggagaacccgtacagatagcgctgactctggacattgcaagtatctctagcatttcagagagtaacatggactacacagccaccatatacctccgacagcgctggatggaccagcggctggtgtttgaaggcaacaagagcttcactctggatgcccgcctcgtggagttcctctgggtgccagatacttacattgtggagtccaagaagtccttcctccatgaagtcactgtgggaaacaggctcatccgcctcttctccaatggcacggtcctgtatgccctcagaatcacgacaactgttgcatgtaacatggatctgtctaaataccccatggacacacagacatgcaagttgcagctggaaagctggggctatgatggaaatgatgtggagttcacctggctgagagggaacgactctgtgcgtggactggaacacctgcggcttgctcagtacaccatagagcggtatttcaccttagtcaccagatcgcagcaggagacaggaaattacactagattggtcttacagtttgagcttcggaggaatgttctgtatttcattttggaaacctacgttccttccactttcctggtggtgttgtcctgggtttcattttggatctctctcgattcagtccctgcaagaacctgcattggagtgacgaccgtgttatcaatgaccacactgatgatcgggtcccgcacttctcttcccaacaccaactgcttcatcaaggccatcgatgtgtacctggggatctgctttagctttgtgtttggggccttgctagaatatgcagttgctcactacagttccttacagcagatggcagccaaagataggcagaaaatatgttatctgtatgcagcataaaatcacaaccacaggagcaagcatccatgaagaatccaa

SEQ ID NO: 91741 - DNA, 396 bp, Homo sapiens
acatcctggtgccctggatagctgggaggctgaggtctggaccaagacatacaccatggtgccctaggagccctgcaaacatcatatggggaactcactcaatcttggggttgtgacattatcactaggccttgaaggctgaaagagatcatctcttattggtgatttggggagttggggggcagttggaaagggaatttcaggcagaatgaataaccctttggaaagacaggtgatgtgctcagcaaaatttaatactacttttggtgcctggtgctcttgagagaagaaaaggagaacctgctcttccctcagttctgtgctctgccagagcatcattgccagggatactggtacatgccaaaggcttaccagaagtcagtgtttcattccctt

SEQ ID NO: 91742 - DNA, 1749 bp, Homo sapiens
gggctgccaccccacttctccccacagagaatggggaaggaaggctgcgggtcatcgtgggaagggaggctgactcctcctctgaggcctgtgttggcctggagcctccccaggatgttacagaaacttcgtggcaaattgagatcaatgaggccaaaaggaaactgatggagaatattctgctctacaaagaggaaaaagtggacagcattgagctctttggcccctgatgaccggaacacagctgaggacccttgtcctcagttggaaagatgagcatcagatcaagaaaaaggtctgaggcagaatccaagatctgccaggaaacacacaacaaaacatctgctgtcctgggtgggagggaaacttcatttcactggaatgagttgggagagaaaggccctcagcttttagagacacaaaaatccatgaagtctcttcctttctgggctttgttagtcagagcaggggatcagaggagactgaagcagaaaccctgcacacgggcccaggatgtggctgattttgtggttccggggagtatgtgatgataatcacccccagcagattccattacctcagcagctcttgttcccccgccactggcagttctgcaatgccatagcattttccagagctaagatctctgggttgtatttgctgacagcctgcaagcttgcatgctctgaaagattttttttagtttttaatttttttgtagagatggggtctcgctttgttggcgcaatcctcccacctcagactcccaaagtgctggaattacagttgggagccactgtgcctggcctggaagactttcaacttgtgtctcagtgcagttcttgactcacctctctgggcctcaggttctacaaatgccagacacctagcgaagagctctgcaggctttccactgcctgtattggaaatcttgcaattcacataattattcagtcactgcctggtacctttatcttcccatcccactaatgttagtgttttttaatggagcttttattctgagaatatgtgtttgtctgtttgtttgttttttgagacagagtctcactttgtcacccaggctggagtgcagtggcacgatctcagctcactgcaagctctgcctctcaggttcaagtgattctcctgcctcagcctcctgagtagatgggactgtaggcacctgccactatgcctggctaatttttgtgtttttagtagagacagggtttcaccatattggccaggctggtctcgaactactgacctcgtgatctgcccgccttggcctatcaaagtgttgggattacaggcttgagccaccgcacccggccgagaatatgtgttgttatttatgactggattatgaagaatcaggagaatgcatttcatgtctgattctgctgctaattaagtcaatcatttaatttttgggacctcagtttctttgtaagtaaaataacacctgcttgttcttcatccctgggctgttgggaggaacagatgagacagtggctatagaagcacttggaaaatgcacttgtcctgttttgtaaaataaaaaggtattaaatgtgtatttctgccatgtacctaatgattattcagtgcgtatatatctgaaaagtcatgttgcaaatctttctgtgaaacagatgctattttaaattcactgggagaaatatcctatttaaagtaatctatagtaatttctttttatataataaaaatatatttgtaaagtcgaca

SEQ ID NO: 91743 - DNA, 1913 bp, Homo sapiens
gaattcagttatagaaaaaaaaggcaagcttggtttatttctctttatttggtttattctcattattatttttcttgccttttctacctctaattccttcttagcccttccctttctgcttccatttctatcccaaaatatgagccacaaagagaaatttggggaattagaaggaagagacttaagggaaaatgtatatgtcattggtgtatgtgtcagttttcagtcataacttgggttgggggaagtcagtgtaccctttactcttgctgaggaaatttcttctgagccttagccacatcccacttgcccagggcatcattcttttcttttttttttctggcatatatctctacttcagattcaaacttggccattacctctggccagccaagcagctgtcccctgagaggggggccaactctcctgcccctcactgcctgcctcccaaggctgccctagggctcagctgaagaaggcggttgtgctttgctgccccctgttgctcaagtcctgcttttccataggagctgccgggctgtatgtctggatgtgacttctccaggcaggtcctcctctcctgcccgcagtgctctggctcctcagggtaggtttctgtccaggacatggcccctgaaagggcttggaaaaagcccccttgcgtagtactggctgagcttctacttgctgccccaggaacctccagagagtgacccaaacatctggtatagcctctaatcttacctagtcagtcatgtttctcttcaggcctcttctaagaacagtttcctggagaaacagaatagagttgtggtcactacactggagtcttcctggggtaggagtgggtcctttctaaagtagaaggggctgtgtagcaagggggctgtgtgagcatttctagaaatgttgtctgctgaattttccactgggaaagagcaagtcctggcggagttagcagcagctgggcagtaggcaatagatagcatcagggtctctggatgctcagtgggggtggcatcagggaacactggtttccccagtaacgggcgcctgggcctgcagtggcagtcaattccacagaggatgccccggagcttggcatctctcactgtgctgtcttcccattcctgagactggaatatggagctcatgtgggctgggcagcttcccagcagtggttggtcaggatgtgagagtgctgtggtccaggtacctgtggacaagtgacctgccacactgcaagacccaaaatgacactggactacattcgttgacacagttacagctgtaccaaaattttttttccaaggttcaagttggaacatttgtaagccaagccctcatgggtccaagcctattttcttcaccacaccacactgagtgagggcagtggctcattacagaccacagtatctccccacctccacccatgtagatgagaacctggagcctgccaaggactagtgtccagaatggtgcccaagtcacctcctgataggtaggaagtggccaaaatgaggtgtaggacctcatgtcctagaggtcaaagctaagagtccaaggcaaatggccacaaggcagaaagagccaaaccagagcccccctaaaatggggagaccaggatggatagataagaagaagggcaggctttggctgggcgtggtggctcacacctgtaatcccagccctttgggaggccaaggggggtggatcacgaggtcaggagatcaagaccatcctggctaagactgtgaaaccccgtctctactaaaaaatacaaaaaaaattagccgggcatggtggcgggcgcctgtagtcccagctactctggaggcggaggcagaggttgcagtgagccgagatcgtgccactgcactccagcctgggcgacagagcgagactccgtctca

SEQ ID NO: 91744 - DNA, 297 bp, Homo sapiens
gtcagaagaacagaccttgacattgggagaaaaacagaagtcacttttgtcgcattggcaattatttttaattttttagttagtagtaaaaaatcttatttggatatatttaatttgatcatattatcttatagctttttacatagtatatacttacaaaaacagaatttgctttttgcctgactcatctgtcatttctcaattgaaaaaaacacagttgtaacaaaatatgctttatctatttctgattcttatgattagtataagggtggtgtttttaaaattaataaaagtaaa

SEQ ID NO: 91745 - DNA, 5865 bp, Homo sapiens
cggccgtcgacacggcagcggccccggcctccctctccgccgcgcttcagcctcccgctccgccgcgctccagcctcgctctccgccgcccgcaccgccgcccgcgccctcaccagagcagccatggaggaggtggtgattgccggcatgtccgggaagctgccagagtcggagaacttgcaggagttctgggacaacctcatcggcggtgtggacatggtcacggacgatgaccgtcgctggaaggcggggctctacggcctgccccggcggtccggcaagctgaaggacctgtctaggtttgatgcctccttcttcggagtccaccccaagcaggcacacacgatggaccctcagctgcggctgctgctggaagtcacctatgaagccatcgtggacggaggcatcaacccagattcactccgaggaacacacactggcgtctgggtgggcgtgagcggctctgagacctcggaggccctgagccgagaccccgagacactcgtgggctacagcatggtgggctgccagcgagcgatgatggccaaccggctctccttcttcttcgacttcagagggcccagcatcgcactggacacagcctgctcctccagcctgatggccctgcagaacgcctaccaggccatccacagcgggcagtgccctgccgccatcgtggggggcatcaatgtcctgctgaagcccaacacctccgtgcagttcttgaggctggggatgctcagccccgagggcacctgcaaggccttcgacacagcggggaatgggtactgccgctcggagggtgtggtggccgtcctgctgaccaagaagtccctggcccggcgggtgtacgccaccatcctgaacgccggcaccaatacagatggcttcaaggagcaaggcgtgaccttcccctcaggggatatccaggagcagctcatccgctcgttgtaccagtcggccggagtggcccctgagtcatttgaatacatcgaagcccacggcacaggcaccaaggtgggcgacccccaggagctgaatggcatcacccgagccctgtgcgccacccgccaggagccgctgctcatcggctccaccaagtccaacatggggcacccggagccagcctcggggctggcagccctggccaaggtgctgctgtccctggagcacgggctctgggcccccaacctgcacttccatagccccaaccctgagatcccagcgctgttggatgggcggctgcaggtggtggaccagcccctgcccgtccgtggcggcaacgtgggcatcaactcctttggcttcgggggctccaacgtgcacatcatcctgaggcccaacacgcagccgccccccgcacccgccccacatgccaccctgccccgtctgctgcgggccagcggacgcacccctgaggccgtgcagaagctgctggagcagggcctccggcacagccaggacctggctttcctgagcatgctgaacgacatcgcgctgtccccgaccaccgccatgcccttccgtggctacgctgtgctgggtggtgagcgcggtggcccagaggtgcagcaggtgcccgctggcgagcgcccgctctggttcatctgctctgggatgggcacacagtggcgcgggatggggctgagcctcatgcgcctggaccgcttccgagattccatcctacgctccgatgaggctgtgaaccgattcggcctgaaggtgtcacagctgctgctgagcacagacgagagcacctttgatgacatcgtccattcgtttgtgagcctgactgccatccagataggcctcatagacctgctgagctgcatggggctgaggccagatggcatcgtcggccactccctgggggaggtggcctgtggctacgccgacggctgcctgtcccaggaggaggccgtcctcgctgcctactggaggggacagtgcatcaaagaagcccatctcccgccgggcgccatggcagccgtgggcttgtcctgggaggagtgtaaacagcgctgccccccggcggtggtgcccgcctgccacaactccaaggacacagtcaccatctcgggacctcaggccccggtgtttgagttcgtggagcagctgaggaaggagggtgtgtttgccaaggaggtgcggaccggcggtatggccttccactcctacttcatggaggccatcgcacccccactgctgcaggagctcaagaaggtgatccgggagccgaagccacgttcagcccgctggctcagcacctctatccccgaggcccagtggcacagcagcctggcacgcacgtcctccgccgagtacaatgtcaacaacctggtgagccctgtgctgttccaggaggccctgtggcacgtgcctgagcacgcggtggtgctggagatcgcgccccacgccctgctgcaggctgtcctgaagcgtggcctgaagccgagctgcaccatcatccccctgatgaagaaggatcacagggacaacctggagttcttcctggccggcatccggaggctgcacctctcaggcatcgacgccaaccccaatgccttgttcccacctgtggagttcccagctccccgaggaactcccctcatctccccactcatcaagtgggaccacagcctggcctgggacgtgccggccgccgaggacttccccaacggttcaggttccccctcagccgccatctacaacatcgacaccagctccgagtctcctgaccactacctggtggaccacaccctcgacggtcgcgtcctcttccccgccactggctacctgagcatagtgtggaagacgctggcccgacccctgggcctgggcgtcgagcagctgcctgtggtgtttgaggatgtggtgctgcaccaggccaccatcctgcccaagactgggacagtgtccctggaggtacggctcctggaggcctcccgtgccttcgaggtgtcagagaacggcaacctggtagtgagtgggaaggtgtaccagtgggatgaccctgaccccaggctcttcgaccacccggaaagccccacccccaaccccacggagcccctcttcctggcccaggctgaagtttacaaggagctgcgtctgcgtggctacgactacggccctcatttccagggcatcctggaggccagcctggaaggtgactcggggaggctgctgtggaaggataactgggtgagcttcatggacaccatgctgcagatgtccatcctgggctcggccaagcacggcctgtacctgcccacccgtgtcaccgccatccacatcgaccctgccacccacaggcagaagctgtacacactgcaggacaaggcccaagtggctgacgtggtggtgagcaggtggctgagggtcacagtggccggaggcgtccacatctccgggctccacactgagtcggccccgcggcggcagcaggagcagcaggtgcccatcctggagaagttttgcttcacttcccacacggaggaggggtgcctgtctgagcgcgctgccctgcaggaggagctgcaactgtgcaaggggctggtgcaggcactgcagaccaaggtgacccagcaggggctgaagatggtggtgcccggactggatggggcccagatcccccgggacccctcacagcaggaactgccccggctgttgtcggctgcctgcaggcttcagctcaacgggaacctgcagctggagctggcgcaggtgctggcccaggagaggcccaagctgccagaggaccctctgctcagcggcctcctggactccccggcactcaaggcctgcctggacactgccgtggagaacatgcccagcctgaagatgaaggtggtggaggtgctggccggccacggtcacctgtattcccgcatcccaggcctgctcagcccccatcccctgctgcagctgagctacacggccaccgaccgccacccccaggccctggaggctgcccaggccgagctgcagcagcacgacgttgcccagggccagtgggatcccgcagaccctgcccccagcgccctgggcagcgccgacctcctggtgtgcaactgtgctgtggctgccctcggggacccggcctcagctctcagcaacatggtggctgccctgagagaagggggctttctgctcctgcacacactgctccgggggcacccctcgggacatgtggccttcctcacctccactgagccgcagtatggccagggcatcctgagccaggacgcgtgggagagcctcttctccagggtgtccgtgcgcctggtgggcctgaagaagtccttctacggctccacgctcttcctgtgccgccggcccaccccgcaggacagccccatcttcctgccggtggacgataccagcttccgctgggtggagtctctgaagggcatcctggctgacgaagactcttcccggcctgtgtggctgaaggccatcaactgtgccacctcgggcgtggtgggcttggtgaactgtctccgccgagagcccggcggaacgctccggtgtgtgctgctctccaacctcagcagcacctcccacgtcccggaggtggacccgggctccgcagaactgcagaaggtgttgcagggagacctggtgatgaacgtctaccgcgacggggcctggggggctttccgccacttcctgctggaggaggacaagcctgaggagccgacggcacatgcctttgtgagcaccctcacccggggggacctgtcctccatccgctgggtctgctcctcgctgcgccatgcccagcccacctgccctggcgcccagctctgcacggtctactacgcctccctcaacttccgcgacatcatgctggccactggcaagctgtcccctgatgccatcccagggaagtggacctcccaggacagcctgctaggtatggagttctcgggccgagacgccagcggcaagcgtgtgatgggactggtgcctgccaagggcctggccacctctgtcctgctgtcaccggacttcctctgggatgtgccttccaactggacgctggaggaggcggcctcggtgcctgtcgtctacagcacggcctactacgcgctggtggtgcgtgggcgggtgcgccccggggagacgctgctcatccactcgggctcgggcggcgtgggccaggccgccatcgccatcgccctcagtctgggctgccgcgtcttcaccaccgtggggtcggctgagaagcgggcgtacctccaggccaggttcccccagctcgacagcaccagcttcgccaactcccgggacacatccttcgagcagcatgtgctgtggcacacgggcgggaagggcgttgacctggtcttgaactccttggcggaagagaagctgcaggccagcgtgaggtgcttggctacgcacggtcgcttcctggaaattggcaaattcgacctttctcagaaccacccgctcggcatggctatcttcctgaagaacgtgacattccacgagccacccaagcctgctggctgcggccccctctcggccaggcattggctcagcccgctgagtggggggtcgtgggccagtccccgaggagctgggcccctgcacaggcacacagggcccggccacacccagcggccccccgcacagccacccgtggggtgctgcccttatgcccggcgccgggcaccaactccatgtttggtgtttgtctgtgtttgtttttcaagaaatgattcaaattgctgcttggattttgaaatttactgtaactgtcagtgtacacgtctggaccccgtttcatttttacaccaatttggtaaaaatgctgctctcagcctcccacaattaaaccgcatgtgatctccaaaaaaa

SEQ ID NO: 91746 - DNA, 8065 bp, Homo sapiens
  misc_feature (6519)..(6519): n is a, c, g, or t
cggccgtcgacacggcagcggccccggcctccctctccgccgcgcttcagcctcccgctccgccgcgctccagcctcgctctccgccgcccgcaccgccgcccgcgccctcaccagagcagccatggaggaggtggtgattgccggcatgtccgggaagctgccagagtcggagaacttgcaggagttctgggacaacctcatcggcggtgtggacatggtcacggacgatgaccgtcgctggaaggcggggctctacggcctgccccggcggtccggcaagctgaaggacctgtctaggtttgatgcctccttcttcggagtccaccccaagcaggcacacacgatggaccctcagctgcggctgctgctggaagtcacctatgaagccatcgtggacggaggcatcaacccagattcactccgaggaacacacactggcgtctgggtgggcgtgagcggctctgagacctcggaggccctgagccgagaccccgagacactcgtgggctacagcatggtgggctgccagcgagcgatgatggccaaccggctctccttcttcttcgacttcagagggcccagcatcgcactggacacagcctgctcctccagcctgatggccctgcagaacgcctaccaggccatccacagcgggcagtgccctgccgccatcgtggggggcatcaatgtcctgctgaagcccaacacctccgtgcagttcttgaggctggggatgctcagccccgagggcacctgcaaggccttcgacacagcggggaatgggtactgccgctcggagggtgtggtggccgtcctgctgaccaagaagtccctggcccggcgggtgtacgccaccatcctgaacgccggcaccaatacagatggcttcaaggagcaaggcgtgaccttcccctcaggggatatccaggagcagctcatccgctcgttgtaccagtcggccggagtggcccctgagtcatttgaatacatcgaagcccacggcacaggcaccaaggtgggcgacccccaggagctgaatggcatcacccgagccctgtgcgccacccgccaggagccgctgctcatcggctccaccaagtccaacatggggcacccggagccagcctcggggctggcagccctggccaaggtgctgctgtccctggagcacgggctctgggcccccaacctgcacttccatagccccaaccctgagatcccagcgctgttggatgggcggctgcaggtggtggaccagcccctgcccgtccgtggcggcaacgtgggcatcaactcctttggcttcgggggctccaacgtgcacatcatcctgaggcccaacacgcagccgccccccgcacccgccccacatgccaccctgccccgtctgctgcgggccagcggacgcacccctgaggccgtgcagaagctgctggagcagggcctccggcacagccaggacctggctttcctgagcatgctgaacgacatcgcgctgtccccgaccaccgccatgcccttccgtggctacgctgtgctgggtggtgagcgcggtggcccagaggtgcagcaggtgcccgctggcgagcgcccgctctggttcatctgctctgggatgggcacacagtggcgcgggatggggctgagcctcatgcgcctggaccgcttccgagattccatcctacgctccgatgaggctgtgaaccgattcggcctgaaggtgtcacagctgctgctgagcacagacgagagcacctttgatgacatcgtccattcgtttgtgagcctgactgccatccagataggcctcatagacctgctgagctgcatggggctgaggccagatggcatcgtcggccactccctgggggaggtggcctgtggctacgccgacggctgcctgtcccaggaggaggccgtcctcgctgcctactggaggggacagtgcatcaaagaagcccatctcccgccgggcgccatggcagccgtgggcttgtcctgggaggagtgtaaacagcgctgccccccggcggtggtgcccgcctgccacaactccaaggacacagtcaccatctcgggacctcaggccccggtgtttgagttcgtggagcagctgaggaaggagggtgtgtttgccaaggaggtgcggaccggcggtatggccttccactcctacttcatggaggccatcgcacccccactgctgcaggagctcaagaaggtgatccgggagccgaagccacgttcagcccgctggctcagcacctctatccccgaggcccagtggcacagcagcctggcacgcacgtcctccgccgagtacaatgtcaacaacctggtgagccctgtgctgttccaggaggccctgtggcacgtgcctgagcacgcggtggtgctggagatcgcgccccacgccctgctgcaggctgtcctgaagcgtggcctgaagccgagctgcaccatcatccccctgatgaagaaggatcacagggacaacctggagttcttcctggccggcatccggaggctgcacctctcaggcatcgacgccaaccccaatgccttgttcccacctgtggagttcccagctccccgaggaactcccctcatctccccactcatcaagtgggaccacagcctggcctgggacgtgccggccgccgaggacttccccaacggttcaggttccccctcagccgccatctacaacatcgacaccagctccgagtctcctgaccactacctggtggaccacaccctcgacggtcgcgtcctcttccccgccactggctacctgagcatagtgtggaagacgctggcccgacccctgggcctgggcgtcgagcagctgcctgtggtgtttgaggatgtggtgctgcaccaggccaccatcctgcccaagactgggacagtgtccctggaggtacggctcctggaggcctcccgtgccttcgaggtgtcagagaacggcaacctggtagtgagtgggaaggtgtaccagtgggatgaccctgaccccaggctcttcgaccacccggaaagccccacccccaaccccacggagcccctcttcctggcccaggctgaagtttacaaggagctgcgtctgcgtggctacgactacggccctcatttccagggcatcctggaggccagcctggaaggtgactcggggaggctgctgtggaaggataactgggtgagcttcatggacaccatgctgcagatgtccatcctgggctcggccaagcacggcctgtacctgcccacccgtgtcaccgccatccacatcgaccctgccacccacaggcagaagctgtacacactgcaggacaaggcccaagtggctgacgtggtggtgagcaggtggctgagggtcacagtggccggaggcgtccacatctccgggctccacactgagtcggccccgcggcggcagcaggagcagcaggtgcccatcctggagaagttttgcttcacttcccacacggaggaggggtgcctgtctgagcgcgctgccctgcaggaggagctgcaactgtgcaaggggctggtgcaggcactgcagaccaaggtgacccagcaggggctgaagatggtggtgcccggactggatggggcccagatcccccgggacccctcacagcaggaactgccccggctgttgtcggctgcctgcaggcttcagctcaacgggaacctgcagctggagctggcgcaggtgctggcccaggagaggcccaagctgccagaggaccctctgctcagcggcctcctggactccccggcactcaaggcctgcctggacactgccgtggagaacatgcccagcctgaagatgaaggtggtggaggtgctggccggccacggtcacctgtattcccgcatcccaggcctgctcagcccccatcccctgctgcagctgagctacacggccaccgaccgccacccccaggccctggaggctgcccaggccgagctgcagcagcacgacgttgcccagggccagtgggatcccgcagaccctgcccccagcgccctgggcagcgccgacctcctggtgtgcaactgtgctgtggctgccctcggggacccggcctcagctctcagcaacatggtggctgccctgagagaagggggctttctgctcctgcacacactgctccgggggcacccctcgggacatgtggccttcctcacctccactgagccgcagtatggccagggcatcctgagccaggacgcgtgggagagcctcttctccagggtgtccgtgcgcctggtgggcctgaagaagtccttctacggctccacgctcttcctgtgccgccggcccaccccgcaggacagccccatcttcctgccggtggacgataccagcttccgctgggtggagtctctgaagggcatcctggctgacgaagactcttcccggcctgtgtggctgaaggccatcaactgtgccacctcgggcgtggtgggcttggtgaactgtctccgccgagagcccggcggaacgctccggtgtgtgctgctctccaacctcagcagcacctcccacgtcccggaggtggacccgggctccgcagaactgcagaaggtgttgcagggagacctggtgatgaacgtctaccgcgacggggcctggggggctttccgccacttcctgctggaggaggacaagcctgaggagccgacggcacatgcctttgtgagcaccctcacccggggggacctgtcctccatccgctgggtctgctcctcgctgcgccatgcccagcccacctgccctggcgcccagctctgcacggtctactacgcctccctcaacttccgcgacatcatgctggccactggcaagctgtcccctgatgccatcccagggaagtggacctcccaggacagcctgctaggtatggagttctcgggccgagacgccagcggcaagcgtgtgatgggactggtgcctgccaagggcctggccacctctgtcctgctgtcaccggacttcctctgggatgtgccttccaactggacgctggaggaggcggcctcggtgcctgtcgtctacagcacggcctactacgcgctggtggtgcgtgggcgggtgcgccccggggagacgctgctcatccactcgggctcgggcggcgtgggccaggccgccatcgccatcgccctcagtctgggctgccgcgtcttcaccaccgtggggtcggctgagaagcgggcgtacctccaggccaggttcccccagctcgacagcaccagcttcgccaactcccgggacacatccttcgagcagcatgtgctgtggcacacgggcgggaagggcgttgacctggtcttgaactccttggcggaagagaagctgcaggccagcgtgaggtgcttggctacgcacggtcgcttcctggaaattggcaaattcgacctttctcagaaccacccgctcggcatggctatcttcctgaagaacgtgacattccacggggtcctactggatgcgttcttcaacgagagcagtgctgactggcgggaggtgtgggcgcttgtgcaggccggcatccgggatggggtggtacggcccctcaagtgcacggtgttccatggggcccaggtggaggacgccttccgctacatggcccaagggaagcacattggcaaagtcgtcgtgcaggtgcttgcggaggagccggaggcagtgctgaagggggccaaacccaagctgatgtcggccatctccaagaccttctgcccggcccacaagagctacatcatcgctggtggtctgggtggcttcggcctggagttggcgcagtggctgatacagcgtggggtgcagaagctcgtgttgacttctcgctccgggatccggacaggctaccaggccaagcaggtccgccggtggaggcgccagggcgtacaggtgcaggtgtccaccagcaacatcagctcactggagggggcccggggcctcattgccgaggcggcgcagcttgggcccgtgggcggcgtcttcaacctggccgtggtcttgagagatggcttgctggagaaccagaccccagagttcttccaggacgtctgcaagcccaagtacagcggcaccctgaacctggacagggtgacccgagaggcgtgccctgagctggactactttgtggtcttctcctctgtgagctgcgggcgtggcaatgcgggacagagcaactacggctttgccaattccgccatggagcgtatctgtgagaaacgccggcacgaaggcctcccaggcctggccgtgcagtggggcgccatcggcgacgtgggcattttggtggagacgatgagcaccaacgacacgatcgtcagtggcacgctgccccagcgcatggcgtcctgcctggaggtgctggacctcttcctgaaccagccccacatggtcctgagcagctttgtgctggctgagaaggctgcggcctatagggacagggacagccagcgggacctggtggaggccgtggcacacatnctgggcatccgcgacttggctgctgtcaacctggacagctcactggcggacctgggcctggactcgctcatgagcgtggaggtgcgccagacgctggagcgtgagctcaacctggtgctgtccgtgcgcgaggtgcggcaactcacgctccggaaactgcaggagctgtcctcaaaggcggatgaggccagcgagctggcatgccccacgcccaaggaggatggtctggcccagcagcagactcagctgaacctgcgctccctgctggtgaacccggagggccccaccctgatgcggctcaactccgtgcagagctcggagcggcccctgttcctggtgcacccaatcgagggctccaccaccgtgttccacagcctggcctcccggctcagcatccccacctatggcctgcagtgcacccgagctgcgccccttgacagcatccacagcctggctgcctactacatcgactgcatcaggcaggtgcagcccgagggcccctaccgcgtggccggctactcctacggggcctgcgtggcctttgaaatgtgctcccagctgcaggcccagcagagcccagcccccacccacaacagcctcttcctgttcgacggctcgcccacctacgtactggcctacacccagagctaccgggcaaagctgaccccaggctgtgaggctgaggctgagacggaggccatatgcttcttcgtgcagcagttcacggacatggagcacaacagggtgctggaggcgctgctgccgctgaagggcctagaggagcgtgtggcagccgccgtggacctgatcatcaagagccaccagggcctggaccgccaggagctgagctttgcggcccggtccttctactacaagctgcgtgccgctgagcagtacacacccaaggccaagtaccatggcaacgtgatgctactgcgcgccaagacgggtggcgcctacggcgaggacctgggcgcggactacaacctctcccaggtatgcgacgggaaagtatccgtccacgtcatcgagggtgaccaccgcacgctgctggagggcagcggcctggagtccatcatcagcatcatccacagctccctggctgagccacgcgtgagcgtgcgggagggctaggcccgtgcccccgcctgccaccggaggtcactccaccatccagccacccaagcctgctggctgcggccccctctcggccaggcattggctcagcccgctgagtggggggtcgtgggccagtccccgaggagctgggcccctgcacaggcacacagggcccggccacacccagcggccccccgcacagccacccgtggggtgctgcccttatgcccggcgccgggcaccaactccatgtttggtgtttgtctgtgtttgtttttcaagaaatgattcaaattgctgcttggattttgaaatttactgtaactgtcagtgtacacgtctggaccccgtttcatttttacaccaatttggtaaaaatgctgctctcagcctcccacaattaaaccgcatgtgatctccaaaaaaa

SEQ ID NO: 91747 - DNA, 8464 bp, Homo sapiens
  misc_feature (6519)..(6519): n is a, c, g, or t
cggccgtcgacacggcagcggccccggcctccctctccgccgcgcttcagcctcccgctccgccgcgctccagcctcgctctccgccgcccgcaccgccgcccgcgccctcaccagagcagccatggaggaggtggtgattgccggcatgtccgggaagctgccagagtcggagaacttgcaggagttctgggacaacctcatcggcggtgtggacatggtcacggacgatgaccgtcgctggaaggcggggctctacggcctgccccggcggtccggcaagctgaaggacctgtctaggtttgatgcctccttcttcggagtccaccccaagcaggcacacacgatggaccctcagctgcggctgctgctggaagtcacctatgaagccatcgtggacggaggcatcaacccagattcactccgaggaacacacactggcgtctgggtgggcgtgagcggctctgagacctcggaggccctgagccgagaccccgagacactcgtgggctacagcatggtgggctgccagcgagcgatgatggccaaccggctctccttcttcttcgacttcagagggcccagcatcgcactggacacagcctgctcctccagcctgatggccctgcagaacgcctaccaggccatccacagcgggcagtgccctgccgccatcgtggggggcatcaatgtcctgctgaagcccaacacctccgtgcagttcttgaggctggggatgctcagccccgagggcacctgcaaggccttcgacacagcggggaatgggtactgccgctcggagggtgtggtggccgtcctgctgaccaagaagtccctggcccggcgggtgtacgccaccatcctgaacgccggcaccaatacagatggcttcaaggagcaaggcgtgaccttcccctcaggggatatccaggagcagctcatccgctcgttgtaccagtcggccggagtggcccctgagtcatttgaatacatcgaagcccacggcacaggcaccaaggtgggcgacccccaggagctgaatggcatcacccgagccctgtgcgccacccgccaggagccgctgctcatcggctccaccaagtccaacatggggcacccggagccagcctcggggctggcagccctggccaaggtgctgctgtccctggagcacgggctctgggcccccaacctgcacttccatagccccaaccctgagatcccagcgctgttggatgggcggctgcaggtggtggaccagcccctgcccgtccgtggcggcaacgtgggcatcaactcctttggcttcgggggctccaacgtgcacatcatcctgaggcccaacacgcagccgccccccgcacccgccccacatgccaccctgccccgtctgctgcgggccagcggacgcacccctgaggccgtgcagaagctgctggagcagggcctccggcacagccaggacctggctttcctgagcatgctgaacgacatcgcgctgtccccgaccaccgccatgcccttccgtggctacgctgtgctgggtggtgagcgcggtggcccagaggtgcagcaggtgcccgctggcgagcgcccgctctggttcatctgctctgggatgggcacacagtggcgcgggatggggctgagcctcatgcgcctggaccgcttccgagattccatcctacgctccgatgaggctgtgaaccgattcggcctgaaggtgtcacagctgctgctgagcacagacgagagcacctttgatgacatcgtccattcgtttgtgagcctgactgccatccagataggcctcatagacctgctgagctgcatggggctgaggccagatggcatcgtcggccactccctgggggaggtggcctgtggctacgccgacggctgcctgtcccaggaggaggccgtcctcgctgcctactggaggggacagtgcatcaaagaagcccatctcccgccgggcgccatggcagccgtgggcttgtcctgggaggagtgtaaacagcgctgccccccggcggtggtgcccgcctgccacaactccaaggacacagtcaccatctcgggacctcaggccccggtgtttgagttcgtggagcagctgaggaaggagggtgtgtttgccaaggaggtgcggaccggcggtatggccttccactcctacttcatggaggccatcgcacccccactgctgcaggagctcaagaaggtgatccgggagccgaagccacgttcagcccgctggctcagcacctctatccccgaggcccagtggcacagcagcctggcacgcacgtcctccgccgagtacaatgtcaacaacctggtgagccctgtgctgttccaggaggccctgtggcacgtgcctgagcacgcggtggtgctggagatcgcgccccacgccctgctgcaggctgtcctgaagcgtggcctgaagccgagctgcaccatcatccccctgatgaagaaggatcacagggacaacctggagttcttcctggccggcatccggaggctgcacctctcaggcatcgacgccaaccccaatgccttgttcccacctgtggagttcccagctccccgaggaactcccctcatctccccactcatcaagtgggaccacagcctggcctgggacgtgccggccgccgaggacttccccaacggttcaggttccccctcagccgccatctacaacatcgacaccagctccgagtctcctgaccactacctggtggaccacaccctcgacggtcgcgtcctcttccccgccactggctacctgagcatagtgtggaagacgctggcccgacccctgggcctgggcgtcgagcagctgcctgtggtgtttgaggatgtggtgctgcaccaggccaccatcctgcccaagactgggacagtgtccctggaggtacggctcctggaggcctcccgtgccttcgaggtgtcagagaacggcaacctggtagtgagtgggaaggtgtaccagtgggatgaccctgaccccaggctcttcgaccacccggaaagccccacccccaaccccacggagcccctcttcctggcccaggctgaagtttacaaggagctgcgtctgcgtggctacgactacggccctcatttccagggcatcctggaggccagcctggaaggtgactcggggaggctgctgtggaaggataactgggtgagcttcatggacaccatgctgcagatgtccatcctgggctcggccaagcacggcctgtacctgcccacccgtgtcaccgccatccacatcgaccctgccacccacaggcagaagctgtacacactgcaggacaaggcccaagtggctgacgtggtggtgagcaggtggctgagggtcacagtggccggaggcgtccacatctccgggctccacactgagtcggccccgcggcggcagcaggagcagcaggtgcccatcctggagaagttttgcttcacttcccacacggaggaggggtgcctgtctgagcgcgctgccctgcaggaggagctgcaactgtgcaaggggctggtgcaggcactgcagaccaaggtgacccagcaggggctgaagatggtggtgcccggactggatggggcccagatcccccgggacccctcacagcaggaactgccccggctgttgtcggctgcctgcaggcttcagctcaacgggaacctgcagctggagctggcgcaggtgctggcccaggagaggcccaagctgccagaggaccctctgctcagcggcctcctggactccccggcactcaaggcctgcctggacactgccgtggagaacatgcccagcctgaagatgaaggtggtggaggtgctggccggccacggtcacctgtattcccgcatcccaggcctgctcagcccccatcccctgctgcagctgagctacacggccaccgaccgccacccccaggccctggaggctgcccaggccgagctgcagcagcacgacgttgcccagggccagtgggatcccgcagaccctgcccccagcgccctgggcagcgccgacctcctggtgtgcaactgtgctgtggctgccctcggggacccggcctcagctctcagcaacatggtggctgccctgagagaagggggctttctgctcctgcacacactgctccgggggcacccctcgggacatgtggccttcctcacctccactgagccgcagtatggccagggcatcctgagccaggacgcgtgggagagcctcttctccagggtgtccgtgcgcctggtgggcctgaagaagtccttctacggctccacgctcttcctgtgccgccggcccaccccgcaggacagccccatcttcctgccggtggacgataccagcttccgctgggtggagtctctgaagggcatcctggctgacgaagactcttcccggcctgtgtggctgaaggccatcaactgtgccacctcgggcgtggtgggcttggtgaactgtctccgccgagagcccggcggaacgctccggtgtgtgctgctctccaacctcagcagcacctcccacgtcccggaggtggacccgggctccgcagaactgcagaaggtgttgcagggagacctggtgatgaacgtctaccgcgacggggcctggggggctttccgccacttcctgctggaggaggacaagcctgaggagccgacggcacatgcctttgtgagcaccctcacccggggggacctgtcctccatccgctgggtctgctcctcgctgcgccatgcccagcccacctgccctggcgcccagctctgcacggtctactacgcctccctcaacttccgcgacatcatgctggccactggcaagctgtcccctgatgccatcccagggaagtggacctcccaggacagcctgctaggtatggagttctcgggccgagacgccagcggcaagcgtgtgatgggactggtgcctgccaagggcctggccacctctgtcctgctgtcaccggacttcctctgggatgtgccttccaactggacgctggaggaggcggcctcggtgcctgtcgtctacagcacggcctactacgcgctggtggtgcgtgggcgggtgcgccccggggagacgctgctcatccactcgggctcgggcggcgtgggccaggccgccatcgccatcgccctcagtctgggctgccgcgtcttcaccaccgtggggtcggctgagaagcgggcgtacctccaggccaggttcccccagctcgacagcaccagcttcgccaactcccgggacacatccttcgagcagcatgtgctgtggcacacgggcgggaagggcgttgacctggtcttgaactccttggcggaagagaagctgcaggccagcgtgaggtgcttggctacgcacggtcgcttcctggaaattggcaaattcgacctttctcagaaccacccgctcggcatggctatcttcctgaagaacgtgacattccacggggtcctactggatgcgttcttcaacgagagcagtgctgactggcgggaggtgtgggcgcttgtgcaggccggcatccgggatggggtggtacggcccctcaagtgcacggtgttccatggggcccaggtggaggacgccttccgctacatggcccaagggaagcacattggcaaagtcgtcgtgcaggtgcttgcggaggagccggaggcagtgctgaagggggccaaacccaagctgatgtcggccatctccaagaccttctgcccggcccacaagagctacatcatcgctggtggtctgggtggcttcggcctggagttggcgcagtggctgatacagcgtggggtgcagaagctcgtgttgacttctcgctccgggatccggacaggctaccaggccaagcaggtccgccggtggaggcgccagggcgtacaggtgcaggtgtccaccagcaacatcagctcactggagggggcccggggcctcattgccgaggcggcgcagcttgggcccgtgggcggcgtcttcaacctggccgtggtcttgagagatggcttgctggagaaccagaccccagagttcttccaggacgtctgcaagcccaagtacagcggcaccctgaacctggacagggtgacccgagaggcgtgccctgagctggactactttgtggtcttctcctctgtgagctgcgggcgtggcaatgcgggacagagcaactacggctttgccaattccgccatggagcgtatctgtgagaaacgccggcacgaaggcctcccaggcctggccgtgcagtggggcgccatcggcgacgtgggcattttggtggagacgatgagcaccaacgacacgatcgtcagtggcacgctgccccagcgcatggcgtcctgcctggaggtgctggacctcttcctgaaccagccccacatggtcctgagcagctttgtgctggctgagaaggctgcggcctatagggacagggacagccagcgggacctggtggaggccgtggcacacatnctgggcatccgcgacttggctgctgtcaacctggacagctcactggcggacctgggcctggactcgctcatgagcgtggaggtgcgccagacgctggagcgtgagctcaacctggtgctgtccgtgcgcgaggtgcggcaactcacgctccggaaactgcaggagctgtcctcaaaggcggatgaggccagcgagctggcatgccccacgcccaaggaggatggtctggcccagcagcagactcagctgaacctgcgctccctgctggtgaacccggagggccccaccctgatgcggctcaactccgtgcagagctcggagcggcccctgttcctggtgcacccaatcgagggctccaccaccgtgttccacagcctggcctcccggctcagcatccccacctatggcctgcagtgcacccgagctgcgccccttgacagcatccacagcctggctgcctactacatcgactgcatcaggcaggtgcagcccgagggcccctaccgcgtggccggctactcctacggggcctgcgtggcctttgaaatgtgctcccagctgcaggcccagcagagcccagcccccacccacaacagcctcttcctgttcgacggctcgcccacctacgtactggcctacacccagagctaccgggcaaagctgaccccaggctgtgaggctgaggctgagacggaggccatatgcttcttcgtgcagcagttcacggacatggagcacaacagggtgctggaggcgctgctgccgctgaagggcctagaggagcgtgtggcagccgccgtggacctgatcatcaagagccaccagggcctggaccgccaggagctgagctttgcggcccggtccttctactacaagctgcgtgccgctgagcagtacacacccaaggccaagtaccatggcaacgtgatgctactgcgcgccaagacgggtggcgcctacggcgaggacctgggcgcggactacaacctctcccaggtatgcgacgggaaagtatccgtccacgtcatcgagggtgaccaccgcacgctgctggagggcagcggcctggagtccatcatcagcatcatccacagctccctggctgagccacgcgtgagcgtgcgggagggctaggcccgtgcccccgcctgccaccggaggtcactccaccatccccaccccaccccaccccacccccgccatgcaacgggattgaagggtcctgccggtgggaccctgtccggcccagtgccactgccccccgaggctgctagacgtaggtgttaggcatgtcccacccacccgccgcctcccacggcacctcggggacaccagagctgccgacttggagactcctggtctgtgaagagccggtggtgcccgtgcccgcaggaactgggctgggcctcgtgcgcccgtggggtctgcgcttggtctttctgtgcttggatttgcatatttattgcattgctggtagagacccccaggcctgtccaccctgccaagactcctcaggcagcgtgtgggtcccgcactctgcccccatttccccgatgtcccctgcgggcgcgggcagccacccaagcctgctggctgcggccccctctcggccaggcattggctcagcccgctgagtggggggtcgtgggccagtccccgaggagctgggcccctgcacaggcacacagggcccggccacacccagcggccccccgcacagccacccgtggggtgctgcccttatgcccggcgccgggcaccaactccatgtttggtgtttgtctgtgtttgtttttcaagaaatgattcaaattgctgcttggattttgaaatttactgtaactgtcagtgtacacgtctggaccccgtttcatttttacaccaatttggtaaaaatgctgctctcagcctcccacaattaaaccgcatgtgatctccaaaaaaa

SEQ ID NO: 91748 - DNA, 7136 bp, Homo sapiens
  misc_feature (6519)..(6519): n is a, c, g, or t
cggccgtcgacacggcagcggccccggcctccctctccgccgcgcttcagcctcccgctccgccgcgctccagcctcgctctccgccgcccgcaccgccgcccgcgccctcaccagagcagccatggaggaggtggtgattgccggcatgtccgggaagctgccagagtcggagaacttgcaggagttctgggacaacctcatcggcggtgtggacatggtcacggacgatgaccgtcgctggaaggcggggctctacggcctgccccggcggtccggcaagctgaaggacctgtctaggtttgatgcctccttcttcggagtccaccccaagcaggcacacacgatggaccctcagctgcggctgctgctggaagtcacctatgaagccatcgtggacggaggcatcaacccagattcactccgaggaacacacactggcgtctgggtgggcgtgagcggctctgagacctcggaggccctgagccgagaccccgagacactcgtgggctacagcatggtgggctgccagcgagcgatgatggccaaccggctctccttcttcttcgacttcagagggcccagcatcgcactggacacagcctgctcctccagcctgatggccctgcagaacgcctaccaggccatccacagcgggcagtgccctgccgccatcgtggggggcatcaatgtcctgctgaagcccaacacctccgtgcagttcttgaggctggggatgctcagccccgagggcacctgcaaggccttcgacacagcggggaatgggtactgccgctcggagggtgtggtggccgtcctgctgaccaagaagtccctggcccggcgggtgtacgccaccatcctgaacgccggcaccaatacagatggcttcaaggagcaaggcgtgaccttcccctcaggggatatccaggagcagctcatccgctcgttgtaccagtcggccggagtggcccctgagtcatttgaatacatcgaagcccacggcacaggcaccaaggtgggcgacccccaggagctgaatggcatcacccgagccctgtgcgccacccgccaggagccgctgctcatcggctccaccaagtccaacatggggcacccggagccagcctcggggctggcagccctggccaaggtgctgctgtccctggagcacgggctctgggcccccaacctgcacttccatagccccaaccctgagatcccagcgctgttggatgggcggctgcaggtggtggaccagcccctgcccgtccgtggcggcaacgtgggcatcaactcctttggcttcgggggctccaacgtgcacatcatcctgaggcccaacacgcagccgccccccgcacccgccccacatgccaccctgccccgtctgctgcgggccagcggacgcacccctgaggccgtgcagaagctgctggagcagggcctccggcacagccaggacctggctttcctgagcatgctgaacgacatcgcgctgtccccgaccaccgccatgcccttccgtggctacgctgtgctgggtggtgagcgcggtggcccagaggtgcagcaggtgcccgctggcgagcgcccgctctggttcatctgctctgggatgggcacacagtggcgcgggatggggctgagcctcatgcgcctggaccgcttccgagattccatcctacgctccgatgaggctgtgaaccgattcggcctgaaggtgtcacagctgctgctgagcacagacgagagcacctttgatgacatcgtccattcgtttgtgagcctgactgccatccagataggcctcatagacctgctgagctgcatggggctgaggccagatggcatcgtcggccactccctgggggaggtggcctgtggctacgccgacggctgcctgtcccaggaggaggccgtcctcgctgcctactggaggggacagtgcatcaaagaagcccatctcccgccgggcgccatggcagccgtgggcttgtcctgggaggagtgtaaacagcgctgccccccggcggtggtgcccgcctgccacaactccaaggacacagtcaccatctcgggacctcaggccccggtgtttgagttcgtggagcagctgaggaaggagggtgtgtttgccaaggaggtgcggaccggcggtatggccttccactcctacttcatggaggccatcgcacccccactgctgcaggagctcaagaaggtgatccgggagccgaagccacgttcagcccgctggctcagcacctctatccccgaggcccagtggcacagcagcctggcacgcacgtcctccgccgagtacaatgtcaacaacctggtgagccctgtgctgttccaggaggccctgtggcacgtgcctgagcacgcggtggtgctggagatcgcgccccacgccctgctgcaggctgtcctgaagcgtggcctgaagccgagctgcaccatcatccccctgatgaagaaggatcacagggacaacctggagttcttcctggccggcatccggaggctgcacctctcaggcatcgacgccaaccccaatgccttgttcccacctgtggagttcccagctccccgaggaactcccctcatctccccactcatcaagtgggaccacagcctggcctgggacgtgccggccgccgaggacttccccaacggttcaggttccccctcagccgccatctacaacatcgacaccagctccgagtctcctgaccactacctggtggaccacaccctcgacggtcgcgtcctcttccccgccactggctacctgagcatagtgtggaagacgctggcccgacccctgggcctgggcgtcgagcagctgcctgtggtgtttgaggatgtggtgctgcaccaggccaccatcctgcccaagactgggacagtgtccctggaggtacggctcctggaggcctcccgtgccttcgaggtgtcagagaacggcaacctggtagtgagtgggaaggtgtaccagtgggatgaccctgaccccaggctcttcgaccacccggaaagccccacccccaaccccacggagcccctcttcctggcccaggctgaagtttacaaggagctgcgtctgcgtggctacgactacggccctcatttccagggcatcctggaggccagcctggaaggtgactcggggaggctgctgtggaaggataactgggtgagcttcatggacaccatgctgcagatgtccatcctgggctcggccaagcacggcctgtacctgcccacccgtgtcaccgccatccacatcgaccctgccacccacaggcagaagctgtacacactgcaggacaaggcccaagtggctgacgtggtggtgagcaggtggctgagggtcacagtggccggaggcgtccacatctccgggctccacactgagtcggccccgcggcggcagcaggagcagcaggtgcccatcctggagaagttttgcttcacttcccacacggaggaggggtgcctgtctgagcgcgctgccctgcaggaggagctgcaactgtgcaaggggctggtgcaggcactgcagaccaaggtgacccagcaggggctgaagatggtggtgcccggactggatggggcccagatcccccgggacccctcacagcaggaactgccccggctgttgtcggctgcctgcaggcttcagctcaacgggaacctgcagctggagctggcgcaggtgctggcccaggagaggcccaagctgccagaggaccctctgctcagcggcctcctggactccccggcactcaaggcctgcctggacactgccgtggagaacatgcccagcctgaagatgaaggtggtggaggtgctggccggccacggtcacctgtattcccgcatcccaggcctgctcagcccccatcccctgctgcagctgagctacacggccaccgaccgccacccccaggccctggaggctgcccaggccgagctgcagcagcacgacgttgcccagggccagtgggatcccgcagaccctgcccccagcgccctgggcagcgccgacctcctggtgtgcaactgtgctgtggctgccctcggggacccggcctcagctctcagcaacatggtggctgccctgagagaagggggctttctgctcctgcacacactgctccgggggcacccctcgggacatgtggccttcctcacctccactgagccgcagtatggccagggcatcctgagccaggacgcgtgggagagcctcttctccagggtgtccgtgcgcctggtgggcctgaagaagtccttctacggctccacgctcttcctgtgccgccggcccaccccgcaggacagccccatcttcctgccggtggacgataccagcttccgctgggtggagtctctgaagggcatcctggctgacgaagactcttcccggcctgtgtggctgaaggccatcaactgtgccacctcgggcgtggtgggcttggtgaactgtctccgccgagagcccggcggaacgctccggtgtgtgctgctctccaacctcagcagcacctcccacgtcccggaggtggacccgggctccgcagaactgcagaaggtgttgcagggagacctggtgatgaacgtctaccgcgacggggcctggggggctttccgccacttcctgctggaggaggacaagcctgaggagccgacggcacatgcctttgtgagcaccctcacccggggggacctgtcctccatccgctgggtctgctcctcgctgcgccatgcccagcccacctgccctggcgcccagctctgcacggtctactacgcctccctcaacttccgcgacatcatgctggccactggcaagctgtcccctgatgccatcccagggaagtggacctcccaggacagcctgctaggtatggagttctcgggccgagacgccagcggcaagcgtgtgatgggactggtgcctgccaagggcctggccacctctgtcctgctgtcaccggacttcctctgggatgtgccttccaactggacgctggaggaggcggcctcggtgcctgtcgtctacagcacggcctactacgcgctggtggtgcgtgggcgggtgcgccccggggagacgctgctcatccactcgggctcgggcggcgtgggccaggccgccatcgccatcgccctcagtctgggctgccgcgtcttcaccaccgtggggtcggctgagaagcgggcgtacctccaggccaggttcccccagctcgacagcaccagcttcgccaactcccgggacacatccttcgagcagcatgtgctgtggcacacgggcgggaagggcgttgacctggtcttgaactccttggcggaagagaagctgcaggccagcgtgaggtgcttggctacgcacggtcgcttcctggaaattggcaaattcgacctttctcagaaccacccgctcggcatggctatcttcctgaagaacgtgacattccacggggtcctactggatgcgttcttcaacgagagcagtgctgactggcgggaggtgtgggcgcttgtgcaggccggcatccgggatggggtggtacggcccctcaagtgcacggtgttccatggggcccaggtggaggacgccttccgctacatggcccaagggaagcacattggcaaagtcgtcgtgcaggtgcttgcggaggagccggaggcagtgctgaagggggccaaacccaagctgatgtcggccatctccaagaccttctgcccggcccacaagagctacatcatcgctggtggtctgggtggcttcggcctggagttggcgcagtggctgatacagcgtggggtgcagaagctcgtgttgacttctcgctccgggatccggacaggctaccaggccaagcaggtccgccggtggaggcgccagggcgtacaggtgcaggtgtccaccagcaacatcagctcactggagggggcccggggcctcattgccgaggcggcgcagcttgggcccgtgggcggcgtcttcaacctggccgtggtcttgagagatggcttgctggagaaccagaccccagagttcttccaggacgtctgcaagcccaagtacagcggcaccctgaacctggacagggtgacccgagaggcgtgccctgagctggactactttgtggtcttctcctctgtgagctgcgggcgtggcaatgcgggacagagcaactacggctttgccaattccgccatggagcgtatctgtgagaaacgccggcacgaaggcctcccaggcctggccgtgcagtggggcgccatcggcgacgtgggcattttggtggagacgatgagcaccaacgacacgatcgtcagtggcacgctgccccagcgcatggcgtcctgcctggaggtgctggacctcttcctgaaccagccccacatggtcctgagcagctttgtgctggctgagaaggctgcggcctatagggacagggacagccagcgggacctggtggaggccgtggcacacatnctgggcatccgcgacttggctgctgtcaacctggacagctcactggcggacctgggcctggactcgctcatgagcgtggaggtgcgccagacgctggagcgtgagctcaacctggtgctgtccgtgcgcgaggtgcggcaactcacgctccggaaactgcaggagctgtcctcaaaggcggatgaggccagcgagctggcatgccccacgcccaaggaggatggtctggcccagcagcagactcagagccacccaagcctgctggctgcggccccctctcggccaggcattggctcagcccgctgagtggggggtcgtgggccagtccccgaggagctgggcccctgcacaggcacacagggcccggccacacccagcggccccccgcacagccacccgtggggtgctgcccttatgcccggcgccgggcaccaactccatgtttggtgtttgtctgtgtttgtttttcaagaaatgattcaaattgctgcttggattttgaaatttactgtaactgtcagtgtacacgtctggaccccgtttcatttttacaccaatttggtaaaaatgctgctctcagcctcccacaattaaaccgcatgtgatctccaaaaaaa

SEQ ID NO: 91749 - DNA, 556 bp, Homo sapiens
agagagactcaggtattaacttacccgggaatgacaagatgctaagtcagtttagcgagactccccacccttgctatctgaccatcctcaatacggatcaaaccttcatcccccacccttgctatctaatcatcctgaccctccttcagtaaaaatcctaacaactcagtttgggcacaatcaccactaacttctcacatctgacgccctccactgacgcccactctgctcttggccaaattttccgtcttgctcatgctacattcagaactgagcccagttctgcatcaaggttctttccctcattgcaatagccctaaatacaatctggctttaatgctttaactactttctttgacaggggttattatttttttgttgtaaagaattagaactctcaaacaataatactcaggaactgtatggttttgttgaagttttcagtgttcttttataactatttcatttttattctccacaacgcactgcgaggcagtaaaggcaggcatttttaccccctttcttccaggttacaaaattgaggtgcaaagaggcc

SEQ ID NO: 91750 - DNA, 120 bp, Homo sapiens
gcataagcatgtgtgtgctgtcctctacttgccctgtcacctccagcatcttgaacatatggaacatggtcacagcataagcatgtgtgtgctgtcctctacttgccctgtcacctccag

SEQ ID NO: 91751 - DNA, 570 bp, Homo sapiens
cagaagtttcgagttcttagtatgcaggtctgttagtgatcagcaacaggattgcatcatcaggaaaattctcttcatcttttcctcagaatagtaaagtcctaaagctttcccagtccctgtcaaccctttctggattcagacttggctgtggtgttagtgtgggaggctcagccatgtcctgaaaagtgctgccccaggctttgaatccagcttttctctcatttgctttgggatcttgtaggcgttctctgagctggctttcccatctgtaagtggggatgatgccaacttccaaagcctattagaattaaatgtggtgatttgttgtctaagatagggcctggcacagggtaggtacttaaatgggtgcttgctttcatatacaaccactcagtgatcccctgctctctcactggggaaggaactagggatttggtggagcctgaaacatgacagtttcccttcgtgtagttcaagccccatggaggcctcagacaggaggataagttatagcccaggaaggtaactgcagaagcacactgaagggggacatcttttccactttgg

SEQ ID NO: 91752 - DNA, 469 bp, Homo sapiens
aactcgaggtctgatgttcaagggcaggaagtatccagcacgggagaaagatgtagcctgggaggctaagccagtctagccttttcacattcttctgcctgctttttaatctggccactggccgagctggcagctgattagattgtgcccatccagattaagggtgggtctgcctttcccagtccactgactcaaatgtggcaacaccctcacaaacacacgcaggaacaatactttgcctccttcagtgcaatcaagttgacactcagtattaaccatcacaacctccttccttatacaaccttaacattgtacctgcagttaacagttgccctttttctggcccattttttaaagcattctttttgctcctcctccccacatgttccagcactcctgttgtgtgcttcttggtaatactttgaaagtgctcaagttcattgatgagaattttaaaaaggagaagaaa

SEQ ID NO: 91753 - DNA, 783 bp, Homo sapiens
tatacctcataatgcaagaatgattggacaagatccctgtcttatgggagtaacaaggcatttagctggcatgagctgaaactccagaaatgcatgtccaacgagatggaggatatgcttccttccatatcctattctgaagtggatttttataaattatttgttatctctacaattccagaaatgtttatggtagcagtgcctggtctacattgtttattttcaacagagaaatatttttttttcaaagcactatatttctgtaggtgtgttgtcaaaatgctgactcattcactcaagtataaaatttactatatgaattgccttaggagcctgaatattttccaaattccatgtcttaaatcaacatgtgaagatttcagttccataatttctgtgatttagtctcaagaaattcacagtaaaaattcaacattaaagttttggtaacatcacaaaaagaaggaggaagagaaggatgagaaagaggaaaaggataggaaggagaggagaagaggaaatgcaggcaagcaggttggctcacaacacatgaaggtcaactttggacacagactcaaaacccatgagaacatttatgggtacatttagagctttggatttgtaagattagaatttgaagctttactatttcctcctagaaactttgtctacaataaaattaaattgtcaccctatgacagagtcactgagaaggaatgttcaagttttggcttttttggtaggtgtgatttaactcagcggtctccagcctttttggtgcca

SEQ ID NO: 91754 - DNA, 970 bp, Homo sapiens
  misc_feature (880)..(880): n is a, c, g, or t
tctgatttaaatactgcttttattgagtttgaagttaacagttgtttttaaaacattttaatgaaaataattgacatgtttaataattaggtgagttgatctcaccttttaatcaaaagatgagctgtttcccccattacgcctaacgtgtagtactccatcctccaaatagttgtttggattattctaaagcattggagatgaactttctaaaaaatcatctactgcagcaaaataaatctttcctcttcagagctttaccctcgtagcagaaaaggatgtagcctgccttaagatgtattccataagcacagatgctgatttttatgagctatttgtagcttgggctttagaggttccaagagtaggtgcagcatgaaaacaaaaacggaaagctgaggaagacaactggaagataagttatgactagtgggattttctgtttgtgttcctcctataattgcaccttgaatgatttactcttcttaaattggagaccacagtcagcactaataagattttataccggttgcctttgaaaatctaataagcagcaggatatgttaatagtaatatattaattaacattaaatattagcgttaaaattgttagtgtttattatggtaatatggttatatcattaaactatacatgcatacctgcacttcaccatcatgctgattagaagcatctgcagaaacttgtggggggcatagtgagggtaattgtgacagcaatccttttcagaaaatgaaggaaaccagccagtgtggtggctcatacctgtaatcccaaactcctgggctcaagcaatttgcccaactcagcttcccaaaatgctggtactacaggtgtgagccactgtgcccagcctaaagnatcttttcatatgcttgctgtttattttgatttgctgttctgtgaattgcttaggtcatatctttttggcttattttctgttagggcttc

SEQ ID NO: 91755 - DNA, 213 bp, Homo sapiens
tttatatgagtaatagactaatgtaattttaatagcactttgtaatttataaaatgtattcacacacacagtgtttcacttgggttttagaatccctatgtggtagctaaggattacctttttctaagtatatcagtaaagaaatttatgttcaaggaagtgacattcaaggtcacaaaataaatgtcagtatggtagaagggaaaaagctgg

SEQ ID NO: 91756 - DNA, 770 bp, Homo sapiens
ccagactcctgaccacagtcttcctgtcactccttccacatcctcaacaggatcagggaaaaggatgccctggtctgtgtcccactgaaacacatagaatttccaggggtcagtacaaacagtcaagaacagagatttctgtgctctgttcctagttctgagagactatggacacgttcctgtaactattccatgagtcagtgtctataataaaggtgaatggaacaatgtttagaaatagaaaaccatgggaaaacaagagcacctatgccacacatcttggctggcagtgccatcttcggtgtcctaggagtgtgttgatgggaaaagacaaggagggttatggaatgattgaaatgttattatttacttaggttttactaaattaataaacccacctttcaggcatgtaaggtgagaattattgctagcttttgtaatgtgctctatagagtaagatggagttgaaataataaatagtatagcaacccatagtaaaatgcaaatgttagtatttagggaatttgaaaaagtgaatacagtttactctctttttagtgtactttcttcactcagaaaaaatgactttgagccttgtccaaagtctcagacatttatcagatgtatttaattcctctggatgccgaagatgctttttaaaaaatgtctacaacagatgttaaaatgctgtcagctgaatgattcgctgctgggacatcagagagtaataccctgctgatctgtggcaattacctaggtagggaacaatg

SEQ ID NO: 91757 - DNA, 452 bp, Homo sapiens
cttaaccccatgctgaaacaaaatacaactaattctccaggtgacgttcaaatgctccaccaggaaagggaaaaaagcagtagctgcagataatttattatgtatataataatacgtccaatgcacttaaactcttaatttttatactatctacactgttaggtaaacaatattagctcctatcttaaaatgagagaaagggatgcagggaataacagctggaatttgaaccacatctgactccaaaaatgttctcttaacacaactctgctgccttgacaagatggcagatagatacaatgccgtctagtgtagctatgtggctacctgatctctgctgaagaaaactaaatgacagcaccatacccaaccctagaacctacaaaatgtccccttacaaaacagacacttaacaggaaattctttttccaaagaaattgtagtggtatcag

SEQ ID NO: 91758 - DNA, 301 bp, Homo sapiens
tcagtttacatataatccttttttcagccagctgaaattatatgcagtaacactgggatatgaacatgaatagtaagaacttggtcctttgatcctagaggaactcagaaccagatgggaaagcacaatgaggcaggtgtgaaatgaggacatgacccaagtcagttgtcatggtgagaaaaattgataggccaggcatggtggctcatgcttgtaatcccaacagtttgggaggccaaggcgggaggattgtttgagctcaggagttcaagaccagcctgggcaacatagcaagaccttg

SEQ ID NO: 91759 - DNA, 928 bp, Homo sapiens
gctgttccttcactgagacatcagattctgtcagttcttccctttgcatctattcctttcccatttcattgttatcatccatttcaggccttttctgcccctctttttccttggtgggttgtagtagcttaactggctttctggcctctagtttctgccctgcctctcctcccgatctccccccaagctactcacaagagcctggtcctgaagcacagccacaacactcccctgttcaagtacctttaatgacacctattggttaatgcattcacaattcctagttggcattcaagactgtatcatttggcactgaatgttctccagttttgatgcctgtatatagaccagttctaactcagttggacttgatgcttttccctgaatatgctccaagtttctccatctcctactagtcctcctatctcaaatgcctcctctccatctcttttattgaaatgccacatcattcaaggacttgcttagatgctttttctcaagagtctcttgactgccagggataaaagggaccccttcctcctcaaattaccaaaatatcttctttttgcatttatcacgtggttatttctgcatatcttctttcctcaacagagtctgagagcgaagagaccagatttttgtggcagctgaattctccattctctctagcacagtcatacttctagtatgctgtacagcattcacagaacaccttcaagtttacaaagcatgttcacattcaacatctcattcgttttatttggggattaagttattacaggtagtattcaagtcttgcgatttgatttctgtggcttactgcaattcttagagctatctctaattttctaccttataaattaaacaaacatatttcttaaattactttacttttgaatacccacagtcttctgtggcctacaaagct

SEQ ID NO: 91760 - DNA, 1896 bp, Homo sapiens
  misc_feature (1)..(3): n is a, c, g, or t
nnngagagaacccaaaatagcattgagtaagcagtgacatactgacagtgttgtggtactaaaagcacaagcgtctgtaactctgggcaatggggcacatcgagagtttgctgagaagactgtgaagcaaaaagaagaaagtttttcctactcttccttatgtgtccaacacgaagtttgctgttcagttttcacagaacttctagaagttgaagttacaaaggaattcctctcctatggccttgtcttggagcaacagaaaactctcaaacaaagaaagtcaagcagccagtgcgatctcatttgagagtgaagcgtggctgggtgtggaaccaattttttgtaccagaggaaatgaatacgactagtcatcacatcggccagctaagatctgatttagacaatggaaacaattctttccagtacaagcttttgggagctggagctggaagtacttttatcattgatgaaagaacaggtgacatatatgccatacagaagcttgatagagaggagcgatccctctacatcttaagagcccaggtaatagacatcgctactggaagggctgtggaacctgagtctgagtttgtcatcaaagtttcggatatcaatgacaatgaaccaaaattcctagatgaaccttatgaggccattgtaccagagatgtctccagaaggaacattagttatccaggtgacagcaagtgatgctgacgatccctcaagtggtaataatgctcgtctcctctacagcttacttcaaggccagccatatttttctgttgaaccaacaacaggagtcataagaatatcttctaaaatggatagagaactgcaagatgagtattgggtaatcattcaagccaaggacatgattggtcagccaggagcgttgtctggaacaacaagtgtattaattaaactttcagatgttaatgacaataagcctatatttaaagaaagtttataccgcttgactgtctctgaatctgcacccactgggacttctataggaacaatcatggcatatgataatgacataggagagaatgcagaaatggattacagcattgaagaggatgattcgcaaacatttgacattattactaatcatgaaactcaagaaggaatagttatattaaaaaagaaagtggattttgagcaccagaaccactacggtattagagcaaaagttaaaaaccatcatgttcctgagcagctcatgaagtaccacactgaggcttccaccactttcattaagatccaggtggaagatgttgatgagcctcctcttttcctccttccatattatgtatttgaagtttttgaagaaaccccacagggatcatttgtaggcgtggtgtctgccacagacccagacaataggaaatctcctatcaggtattctattactaggagcaaagtgttcaatatcaatgataatggtacaatcactacaagtaactcactggatcgtgaaatcagtgcttggtacaacctaagtattacagccacagaaaaatgatatagggatgctgtattccttgaagattacatttcaaagagatggtcaccattacttgataaatacaatcctggatcctaaagcttccaagaaacttgttgaacttttgaaagatttccatacgcttcaaagggacaaagaaaaaacttacatacaaagctttttttttccctctctctctctctttctctgtgtgtgtgtgtgtgtgtgtgtgtgtgtgtatgaatgctctgagaaaaggaaggaaagaaaaaatattttcccttgctttcaacaagtacaaggcctctaatttttaatttgttttgttctttcaaattatcattgcaaatagtacatatattttaaataaaaacactaaaacaaact

SEQ ID NO: 91761 - DNA, 3361 bp, Homo sapiens
  misc_feature (1)..(3): n is a, c, g, or t
nnngagagaacccaaaatagcattgagtaagcagtgacatactgacagtgttgtggtactaaaagcacaagcgtctgtaactctgggcaatggggcacatcgagagtttgctgagaagactgtgaagcaaaaagaagaaagtttttcctactcttccttatgtgtccaacacgaagtttgctgttcagttttcacagaacttctagaagttgaagttacaaaggtatatagaaggtacacagaatcagaaaagattataaaagaaagcaagatttttgttagtgacgtcctgtttcctctgaagagtaatagttggaatcaaaagagtcaacgcaatgaactgttatttactgctgcgttttatgttgggaattcctctcctatggccttgtcttggagcaacagaacgtggctgggtgtggaaccaattttttgtaccagaggaaatgaatacgactagtcatcacatcggccagctaagatctgatttagacaatggaaacaattctttccagtacaagcttttgggagctggagctggaagtacttttatcattgatgaaagaacaggtgacatatatgccatacagaagcttgatagagaggagcgatccctctacatcttaagagcccaggtaatagacatcgctactggaagggctgtggaacctgagtctgagtttgtcatcaaagtttcggatatcaatgacaatgaaccaaaattcctagatgaaccttatgaggccattgtaccagagatgtctccagaaggaacattagttatccaggtgacagcaagtgatgctgacgatccctcaagtggtaataatgctcgtctcctctacagcttacttcaaggccagccatatttttctgttgaaccaacaacaggagtcataagaatatcttctaaaatggatagagaactgcaagatgagtattgggtaatcattcaagccaaggacatgattggtcagccaggagcgttgtctggaacaacaagtgtattaattaaactttcagatgttaatgacaataagcctatatttaaagaaagtttataccgcttgactgtctctgaatctgcacccactgggacttctataggaacaatcatggcatatgataatgacataggagagaatgcagaaatggattacagcattgaagaggatgattcgcaaacatttgacattattactaatcatgaaactcaagaaggaatagttatattaaaaaagaaagtggattttgagcaccagaaccactacggtattagagcaaaagttaaaaaccatcatgttcctgagcagctcatgaagtaccacactgaggcttccaccactttcattaagatccaggtggaagatgttgatgagcctcctcttttcctccttccatattatgtatttgaagtttttgaagaaaccccacagggatcatttgtaggcgtggtgtctgccacagacccagacaataggaaatctcctatcaggtattctattactaggagcaaagtgttcaatatcaatgataatggtacaatcactacaagtaactcactggatcgtgaaatcagtgcttggtacaacctaagtattacagccacagaaaaatacaatatagaacagatctcttcgatcccactgtatgtgcaagttcttaacatcaatgatcatgctcctgagttctctcaatactatgagacttatgtttgtgaaaatgcaggctctggtcaggtaattcagactatcagtgcagtggatagagatgaatccatagaagagcaccatttttactttaatctatctgtagaagacactaacaattcaagttttacaatcatagataatcaagataacacagctgtcattttgactaatagaactggttttaaccttcaagaagaacctgtcttctacatctccatcttaattgccgacaatggaatcccgtcacttacaagtacaaacacacttaccatccatgtctgtgactgtggtgacagtgggagcacacagacctgccagtaccaggagcttgtgctttccatgggattcaagacagaagtcatcattgctattctcatttgcattatgatcatatttgggtttatttttttgactttgggtttaaaacaacggagaaaacagattctatttcctgagaaaagtgaagatttcagagagaatatattccaatatgatgatgaagggggtggagaagaagatacagaggcctttgatatagcagagctgaggagtagtaccataatgcgggaacgcaagactcggaaaaccacaagcgctgagatcaggagcctatacaggcagtctttgcaagttggccccgacagtgccatattcaggaaattcattctggaaaagctcgaagaagctaatactgatccgtgtgcccctccttttgattccctccagacctacgcttttgagggaacagggtcattagctggatccctgagctccttagaatcagcagtctctgatcaggatgaaagctatgattaccttaatgagttgggacctcgctttaaaagattagcatgcatgtttggttctgcagtgcagtcaaataattagggctttttaccatcaaaatttttaaaagtgctaatgtgtattcgaacccaatggtagtcttaaagagttttgtgccctggctctatggcggggaaagccctagtctatggagttttctgatttccctggagtaaatactccatggttattttaagctacctacatgctgtcattgaacagagatgtggggagaaatgtaaacaatcagctcacaggcatcaatacaaccagatttgaagtaaaataatttaggaagatattaaaagtagatgagaggacacaagatgtagtcgatccttatgcgattatatcattatttacttaggaaagagtaaaaataccaaacgagaaaatttaaaggagcaaaaatttgcaagtcaaatagaaatgtacaaatcgagataacatttacatttctatcatattgacatgaaaattgaaaatgtatagtcagagaaattttcatgaattattccatgaagtattgtttcctttatttaaaaaaaaaaaaaaaaaaaaaaagaatgctaggtaatcttagtagaaaactagaaagtatgataaacaacagttggaggaatccatggaaaatagacgagaaaatgtaaataaggctttctggggatcacagaacttttgtatgaataaaagccttataaaaccagctctggcatatgactaaaatattcctctactatttttcaatgtcatctaatgcaaacgctcaacctttttaaatggttaatgtgagaaaggcactg

SEQ ID NO: 91762 - DNA, 3415 bp, Homo sapiens
  misc_feature (1)..(3): n is a, c, g, or t
nnngagagaacccaaaatagcattgagtaagcagtgacatactgacagtgttgtggtactaaaagcacaagcgtctgtaactctgggcaatggggcacatcgagagtttgctgagaagactgtgaagcaaaaagaagaaagtttttcctactcttccttatgtgtccaacacgaagtttgctgttcagttttcacagaacttctagaagttgaagttacaaaggtatatagaaggtacacagaatcagaaaagattataaaagaaagcaagatttttgttagtgacgtcctgtttcctctgaagagtaatagttggaatcaaaagagtcaacgcaatgaactgttatttactgctgcgttttatgttgggaattcctctcctatggccttgtcttggagcaacagaaaactctcaaacaaagaaagtcaagcagccagtgcgatctcatttgagagtgaagcgtggctgggtgtggaaccaattttttgtaccagaggaaatgaatacgactagtcatcacatcggccagctaagatctgatttagacaatggaaacaattctttccagtacaagcttttgggagctggagctggaagtacttttatcattgatgaaagaacaggtgacatatatgccatacagaagcttgatagagaggagcgatccctctacatcttaagagcccaggtaatagacatcgctactggaagggctgtggaacctgagtctgagtttgtcatcaaagtttcggatatcaatgacaatgaaccaaaattcctagatgaaccttatgaggccattgtaccagagatgtctccagaaggaacattagttatccaggtgacagcaagtgatgctgacgatccctcaagtggtaataatgctcgtctcctctacagcttacttcaaggccagccatatttttctgttgaaccaacaacaggagtcataagaatatcttctaaaatggatagagaactgcaagatgagtattgggtaatcattcaagccaaggacatgattggtcagccaggagcgttgtctggaacaacaagtgtattaattaaactttcagatgttaatgacaataagcctatatttaaagaaagtttataccgcttgactgtctctgaatctgcacccactgggacttctataggaacaatcatggcatatgataatgacataggagagaatgcagaaatggattacagcattgaagaggatgattcgcaaacatttgacattattactaatcatgaaactcaagaaggaatagttatattaaaaaagaaagtggattttgagcaccagaaccactacggtattagagcaaaagttaaaaaccatcatgttcctgagcagctcatgaagtaccacactgaggcttccaccactttcattaagatccaggtggaagatgttgatgagcctcctcttttcctccttccatattatgtatttgaagtttttgaagaaaccccacagggatcatttgtaggcgtggtgtctgccacagacccagacaataggaaatctcctatcaggtattctattactaggagcaaagtgttcaatatcaatgataatggtacaatcactacaagtaactcactggatcgtgaaatcagtgcttggtacaacctaagtattacagccacagaaaaatacaatatagaacagatctcttcgatcccactgtatgtgcaagttcttaacatcaatgatcatgctcctgagttctctcaatactatgagacttatgtttgtgaaaatgcaggctctggtcaggtaattcagactatcagtgcagtggatagagatgaatccatagaagagcaccatttttactttaatctatctgtagaagacactaacaattcaagttttacaatcatagataatcaagataacacagctgtcattttgactaatagaactggttttaaccttcaagaagaacctgtcttctacatctccatcttaattgccgacaatggaatcccgtcacttacaagtacaaacacacttaccatccatgtctgtgactgtggtgacagtgggagcacacagacctgccagtaccaggagcttgtgctttccatgggattcaagacagaagtcatcattgctattctcatttgcattatgatcatatttgggtttatttttttgactttgggtttaaaacaacggagaaaacagattctatttcctgagaaaagtgaagatttcagagagaatatattccaatatgatgatgaagggggtggagaagaagatacagaggcctttgatatagcagagctgaggagtagtaccataatgcgggaacgcaagactcggaaaaccacaagcgctgagatcaggagcctatacaggcagtctttgcaagttggccccgacagtgccatattcaggaaattcattctggaaaagctcgaagaagctaatactgatccgtgtgcccctccttttgattccctccagacctacgcttttgagggaacagggtcattagctggatccctgagctccttagaatcagcagtctctgatcaggatgaaagctatgattaccttaatgagttgggacctcgctttaaaagattagcatgcatgtttggttctgcagtgcagtcaaataattagggctttttaccatcaaaatttttaaaagtgctaatgtgtattcgaacccaatggtagtcttaaagagttttgtgccctggctctatggcggggaaagccctagtctatggagttttctgatttccctggagtaaatactccatggttattttaagctacctacatgctgtcattgaacagagatgtggggagaaatgtaaacaatcagctcacaggcatcaatacaaccagatttgaagtaaaataatttaggaagatattaaaagtagatgagaggacacaagatgtagtcgatccttatgcgattatatcattatttacttaggaaagagtaaaaataccaaacgagaaaatttaaaggagcaaaaatttgcaagtcaaatagaaatgtacaaatcgagataacatttacatttctatcatattgacatgaaaattgaaaatgtatagtcagagaaattttcatgaattattccatgaagtattgtttcctttatttaaaaaaaaaaaaaaaaaaaaaaagaatgctaggtaatcttagtagaaaactagaaagtatgataaacaacagttggaggaatccatggaaaatagacgagaaaatgtaaataaggctttctggggatcacagaacttttgtatgaataaaagccttataaaaccagctctggcatatgactaaaatattcctctactatttttcaatgtcatctaatgcaaacgctcaacctttttaaatggttaatgtgagaaaggcactg

SEQ ID NO: 91763 - DNA, 3269 bp, Homo sapiens
  misc_feature (1)..(3): n is a, c, g, or t
nnngagagaacccaaaatagcattgagtaagcagtgacatactgacagtgttgtggtactaaaagcacaagcgtctgtaactctgggcaatggggcacatcgagagtttgctgagaagactgtgaagcaaaaagaagaaagtttttcctactcttccttatgtgtccaacacgaagtttgctgttcagttttcacagaacttctagaagttgaagttacaaaggaattcctctcctatggccttgtcttggagcaacagaaaactctcaaacaaagaaagtcaagcagccagtgcgatctcatttgagagtgaagcgtggctgggtgtggaaccaattttttgtaccagaggaaatgaatacgactagtcatcacatcggccagctaagatctgatttagacaatggaaacaattctttccagtacaagcttttgggagctggagctggaagtacttttatcattgatgaaagaacaggtgacatatatgccatacagaagcttgatagagaggagcgatccctctacatcttaagagcccaggtaatagacatcgctactggaagggctgtggaacctgagtctgagtttgtcatcaaagtttcggatatcaatgacaatgaaccaaaattcctagatgaaccttatgaggccattgtaccagagatgtctccagaaggaacattagttatccaggtgacagcaagtgatgctgacgatccctcaagtggtaataatgctcgtctcctctacagcttacttcaaggccagccatatttttctgttgaaccaacaacaggagtcataagaatatcttctaaaatggatagagaactgcaagatgagtattgggtaatcattcaagccaaggacatgattggtcagccaggagcgttgtctggaacaacaagtgtattaattaaactttcagatgttaatgacaataagcctatatttaaagaaagtttataccgcttgactgtctctgaatctgcacccactgggacttctataggaacaatcatggcatatgataatgacataggagagaatgcagaaatggattacagcattgaagaggatgattcgcaaacatttgacattattactaatcatgaaactcaagaaggaatagttatattaaaaaagaaagtggattttgagcaccagaaccactacggtattagagcaaaagttaaaaaccatcatgttcctgagcagctcatgaagtaccacactgaggcttccaccactttcattaagatccaggtggaagatgttgatgagcctcctcttttcctccttccatattatgtatttgaagtttttgaagaaaccccacagggatcatttgtaggcgtggtgtctgccacagacccagacaataggaaatctcctatcaggtattctattactaggagcaaagtgttcaatatcaatgataatggtacaatcactacaagtaactcactggatcgtgaaatcagtgcttggtacaacctaagtattacagccacagaaaaatacaatatagaacagatctcttcgatcccactgtatgtgcaagttcttaacatcaatgatcatgctcctgagttctctcaatactatgagacttatgtttgtgaaaatgcaggctctggtcaggtaattcagactatcagtgcagtggatagagatgaatccatagaagagcaccatttttactttaatctatctgtagaagacactaacaattcaagttttacaatcatagataatcaagataacacagctgtcattttgactaatagaactggttttaaccttcaagaagaacctgtcttctacatctccatcttaattgccgacaatggaatcccgtcacttacaagtacaaacacacttaccatccatgtctgtgactgtggtgacagtgggagcacacagacctgccagtaccaggagcttgtgctttccatgggattcaagacagaagtcatcattgctattctcatttgcattatgatcatatttgggtttatttttttgactttgggtttaaaacaacggagaaaacagattctatttcctgagaaaagtgaagatttcagagagaatatattccaatatgatgatgaagggggtggagaagaagatacagaggcctttgatatagcagagctgaggagtagtaccataatgcgggaacgcaagactcggaaaaccacaagcgctgagatcaggagcctatacaggcagtctttgcaagttggccccgacagtgccatattcaggaaattcattctggaaaagctcgaagaagctaatactgatccgtgtgcccctccttttgattccctccagacctacgcttttgagggaacagggtcattagctggatccctgagctccttagaatcagcagtctctgatcaggatgaaagctatgattaccttaatgagttgggacctcgctttaaaagattagcatgcatgtttggttctgcagtgcagtcaaataattagggctttttaccatcaaaatttttaaaagtgctaatgtgtattcgaacccaatggtagtcttaaagagttttgtgccctggctctatggcggggaaagccctagtctatggagttttctgatttccctggagtaaatactccatggttattttaagctacctacatgctgtcattgaacagagatgtggggagaaatgtaaacaatcagctcacaggcatcaatacaaccagatttgaagtaaaataatttaggaagatattaaaagtagatgagaggacacaagatgtagtcgatccttatgcgattatatcattatttacttaggaaagagtaaaaataccaaacgagaaaatttaaaggagcaaaaatttgcaagtcaaatagaaatgtacaaatcgagataacatttacatttctatcatattgacatgaaaattgaaaatgtatagtcagagaaattttcatgaattattccatgaagtattgtttcctttatttaaaaaaaaaaaaaaaaaaaaaaagaatgctaggtaatcttagtagaaaactagaaagtatgataaacaacagttggaggaatccatggaaaatagacgagaaaatgtaaataaggctttctggggatcacagaacttttgtatgaataaaagccttataaaaccagctctggcatatgactaaaatattcctctactatttttcaatgtcatctaatgcaaacgctcaacctttttaaatggttaatgtgagaaaggcactg

SEQ ID NO: 91764 - DNA, 366 bp, Homo sapiens
aattaacaagtcctctattactaaatagcctggcctagaacagtggtttgtgatcccaccggcttgtttgtgcttggcttttttaaccccagtgtgaaataatcttatagtgcccctaaaggatgattctattctgtcctttgcctaatgttaataattatattagagctagcacacagcagagcctagtctgtcaaaccttccaagtctgtactactcttaattgggggccttctcaccagtcaacagacagaaaaacttcctacaactgcttcggacagtccctgttatgcaacccctcagcattccacaggatttgctgatagtgcaggagatgcaccattgctgatggtgccttctcattgt

SEQ ID NO: 91765 - DNA, 486 bp, Homo sapiens
gctccttgcagagcagggctgtgccataggcagtatgcctagagtagtagcctgttgaagagattttcttttctctattggattgtgttgatatttttatgaaaattacatgattcgtgtgtatgtatatatgcagtcagtcctctgcatctgtgcattcaaacaactgtggatcaaaagtatctgcgggaggaggatggggggaaattgcatctatactaaatttgtacagatttttttggtcattactccttaaacaatacagtacaactatttacatagtattagttattattagtaatctggagatgatttaaggtatgtgggaggatgtgcacaggttgtatgcaaatgctacaccatttcctgtaggattactgagcatctgcagattctggtatctgagggaggtcctggaaccaatcccccatggataccgagggatgactatatacatacatgcacatacacacacacacacacaca

SEQ ID NO: 91766 - DNA, 475 bp, Homo sapiens
atgaaattaagaatctggggtgtgcaagcactcatgcatatgtgtcttcattttgaaaagcaagaccttaattagccaagaaaactggtattttggactcacctattaatcaattgtcagggcaaagtaccagctgcaatctctctcaattatattgaaaaattatatggactttatggtcagctgtgccctaagcactttgtatacattatctcatttattatttaaaacaacactgtcttatttaagggcttgtgtttttgatggctcatcttgtctactgatgccacaatagctggcttagcagcggagtgggaggtgttatggcagatacatagggacagagaaagagcttacaattcttctaccaacccatgttagccttgtgcaaccactgagctgggaagacaaacagataaagggatataaagacggatgtaccgaggcaggagatgggcagggcttgtgttctggt

SEQ ID NO: 91767 - DNA, 307 bp, Homo sapiens
  misc_feature (1)..(1): n is a, c, g, or t
  misc_feature (167)..(167): n is a, c, g, or t
  misc_feature (171)..(171): n is a, c, g, or t
  misc_feature (187)..(187): n is a, c, g, or t
  misc_feature (198)..(198): n is a, c, g, or t
  misc_feature (202)..(202): n is a, c, g, or t
  misc_feature (288)..(288): n is a, c, g, or t
  misc_feature (306)..(307): n is a, c, g, or t
naactgacacacaatggagtaacatgcagctattcaaaagaatggggacagtatctatgtagtaatatggaaaattcatctgagtgtattgcaaagtgaaaacaggaaagcgtagaagagttataatatgctaccttttgtgtaagggaagaaaatatgaacctctntatntttcatatatctgcancagagcgaaanacangagaatgtacaaaactaataaagtagttaccttataggaaatgcattgggatatatgtaagggaaagagaccttctttgtgtatanctttcataccatcatgcnn

SEQ ID NO: 91768 - DNA, 313 bp, Homo sapiens
acactgtcctgggtgctgggaattcatgagtgaacaaaacaatgtcctgacctcatgcagctcacattctcataggagaggcagaccatacacaaatagacaagtaaacttacactataatgtcaggtagtagtaagtactagtggaaaaaaatgaagcactgtgtcaccagacatttgcacatgtgggatgtggtttgcctgggaagccttattcagcaagcctgagatttgctaatttaagtgtttcacaataaaataagagctttttagaaaaataatattttttatttgagacagagtttcactcttgt

SEQ ID NO: 91769 - DNA, 412 bp, Homo sapiens
attaactaaaaatgataatgcattataacttccaggtaagagataatatgactgcacctcctgaatccctcaatcctaattactcataaagtgagaaacagaatttaaaaattggaaaatcaagcataaggaatggaagccacagaaggatgacacctacacgtcaaaaatttctgggctttcaacccatatttctatgagatgtatcacagataggaatatggaataaagggataaataatgtcttctcaaatatacttgtgaagaaagactgaaaagccaagagagtggcaggagtatcccactactgccccacaatgagagagaaagctggtgaactgaatgaagcgacaacacttgtcagaagctgtggaagattttcttggcttcaggactaatctgagaagggtgt

SEQ ID NO: 91770 - DNA, 374 bp, Homo sapiens
cgctcgcgggcttcagcgaggcgggagggcggccctgttgccctggagacgctttccctgctgccggccgcgaccgcaacccgctaggccttcatcgcgagctacgcccggaccgagaagccccggcatggccacgtccatcggagtgtccttctcggtgggcgacggggtgcctgaggctgagaagaacgcaggggagcccgagaacacctatattctgcggcctgttttccagcagaggttcaggccctctgtggttaaagactgtatccatgctgtgctcaaggaggaactggcaaatgctgaatattctccagaagaaatgcctcagcttacaaaacatttatcagaaaacattaaagataaattaaaag

SEQ ID NO: 91771 - DNA, 938 bp, Homo sapiens
ggacgcgtgggtcgacccacgcgtcgcggacgcgtggctctccggggagcggaagcgccttcaatgcaggcctgtgggcaggggcgtgggggcgcgcacacacacacgcctgggtgacctctacgtatatacagagcctccctggccctcctggaaagagtcctggaaagacaaccttcaggtccagccctggagctggaggagtggagccccactctgaagacgcagcctttctccaggttctgtctctcccattctgattcttgacaccagatgcaggatggtgtcctctccctgcacgccggcaagctcacggacttgctcccgtatcctgggactgagccttgggactgcagccctgtttgctgctggggccaacgtggcactcctccttcctaactgggatgtcacctacctgttgaggggcctccttggcaggcatgccatgctgggaactgggctctggggaggaggcctcatggtgcttactgctctgttgtcaggtggcctggctttacttggagccctgatttgctttgtcacttctggagttgctctgaaagatggtcctttttgcatgtttgatgtttcatccttcaatcagacacaagcttggaaatatggttacccattcaaagacctgcatagtaggaattatctgtatgaacggttcgtctggaactcgttgctggagccttgagtgtgtatggacgtgtgcgtttttcgcctttgtgatacgctggcaggtgctctggggcgtatgtataaaagcgccggggcgtttggacctgggaagtagaggaattaatagcggggggacaaggcgggaagtaaaagagggagaagaaaaacgcggtggggggagaaaacgggggcagagaacagacacgaggagaaataagtagaaacaaggggggatagtcagagtaggataattc

SEQ ID NO: 91772 - DNA, 448 bp, Homo sapiens
cgctcgcgggcttcagcgaggcgggagggcggccctgttgccctggagacgctttccctgctgccggccgcgaccgcaacccgctaggccttcatcgcgagctacgcccggaccgagaagccccggcatggccacgtccatcggagtgtccttctcggtgggcgacggggtgcctgaggctgagaagaacgcaggggagcccgagaacacctatattctgcggcctgttttccagcagaggcgggtagaggacgggctgtggcggggcgacctcgagcgcgctggtctgaggggcggagctcgcctgggacctgggccacggaaggagcgcgggggacgcgcggggtccgcggggcgggaggcgggaggccgcgaggcgggcgggcggccctgctgtgacgtccgggcgcccctcccgctgcaggggccgcaggggaccccacccgct

SEQ ID NO: 91773 - DNA, 470 bp, Homo sapiens
tcctttgggtcacacatcctagcatcttgctcctctgatactcagaaaattgcaaatggagcagtaacggtcaccctcatgagcccagtcccatgacccggtcaggggagaccccagttttctactggggttgcctgtttggctttccttacttatcgcctgacccctggtctccttattttttgggataggaattatctgtatgaccgttcgctctggaactccgtctgcctggagccctctgcagctgttgtctggcacgtgtccctcttctccgcccttctgtgcatcagcctgctccagcttctcctggtggtcgttcatgtcatcaacagcctcctgggccttttctgcagcctctgcgagaagtgacaggcagaaccttcacttgcaagcatgggtgttttcatcatcggctgtcttgaatcctttctacaactcaagtccaggagcctcaggccccgcgtcta

SEQ ID NO: 91774 - DNA, 802 bp, Homo sapiens
ttattttattttattttattttgtgaaagcgtgcagaacaaaattaacaacaagtatatattttgttttgggggagaggggagtatgagaagctcattattggatgtattgagttgcctaataaacattcatatggagcatgagttggaatgtgttgaagttcagtgcaggtccaggttgaagatacacatgtggcctatgatttgtcttaatttgtttatattttataataaaaaatatgaaaaagaaggattaagtggtactaatgacaaaaagatgggagaagttgcggtatgaaggtaagctggggttgtggagtcaccgactggatgttcacaaattgttccattcaggttcaggccctctgtggttaaagactgtatccatgctgtgctcaaggaggaactggcaaatgctgaatattctccagaagaaatgcctcagcttacaaaacatttatcagaaaacattaaagataaattaaaagaaatgggatttgaccgatacaaaatggtggtgcaagtagtgattggagaacaaagaggtgaaggagtattcatggcttctcgctgtttctgggatgctgacactgacaactatactcatgatgttttcatgaatgacagtttattctgcgttgtagcagcatttggctgtttctactactgaatgaatctttgaaaagctggtaaaagacatgaccatgaagaaatctgaactttttaatattgttaaatatcttgacaaaataaagatgttagtagtttgacaactgaaataaaaaaaaaaactctcccgcgct

SEQ ID NO: 91775 - DNA, 2005 bp, Homo sapiens
ggacgcgtgggtcgacccacgcgtcgcggacgcgtggctctccggggagcggaagcgccttcaatgcaggcctgtgggcaggggcgtgggggcgcgcacacacacacgcctgggtgacctctacgtatatacagagcctccctggccctcctggaaagagtcctggaaagacaaccttcaggtccagccctggagctggaggagtggagccccactctgaagacgcagcctttctccaggttctgtctctcccattctgattcttgacaccagatgcaggatggtgtcctctccctgcacgccggcaagctcacggacttgctcccgtatcctgggactgagccttgggactgcagccctgtttgctgctggggccaacgtggcactcctccttcctaactgggatgtcacctacctgttgaggggcctccttggcaggcatgccatgctgggaactgggctctggggaggaggcctcatggtactcactgcagctatcctcatctccttgatgggctggagatacggctgcttcagtaagagtgggctctgtcgaagcgtgcttactgctctgttgtcaggtggcctggctttacttggagccctgatttgctttgtcacttctggagttgctctgaaagatggtcctttttgcatgtttgatgtttcatccttcaatcagacacaagcttggaaatatggttacccattcaaagacctgcatagtaggaattatctgtatgaccgttcgctctggaactccgtctgcctggagccctctgcagctgttgtctggcacgtgtccctcttctccgcccttctgtgcatcagcctgctccagcttctcctggtggtcgttcatgtcatcaacagcctcctgggccttttctgcagcctctgcgagaagtgacaggcagaaccttcacttgcaagcatgggtgttttcatcatcggctgtcttgaatcctttctacaaggagtgggtacgaattataaacaaacttcccctttaggtatccctggagtaataatgacaacaaaattcactgcaggtcggtggaatgatagaatgcattttaaatcacattgtaaacttccaggtgatccatggataggataaataactaagttattataattgtttaggaatttatagtccataaaatatcctccagccaggtctcatttcagcttcttgacaatcccataaagttggccatttgttacacatagagaagttgaggctcacagagggtaacaggcttgctgtaaaagcacacagtgaagttaaggtgaagtcagcacctgaccccctatctccctgttgttttgttgttgctgagacagggtcttgctctgttcccctgtctggagtacagtggcacaatcatagcttactgtaacctacaacccatgcactcaagcgatcctcctgccttagcctccgagtagctgggactacaggcacacaccactacacctggctaatttttaaattttctgtagagagggagtctcgctatattgcccagtctggtcttgaactcctgacctcaagtgatcctcccaccttggtctcccaaagcgctggattacaggcatgagtcactgtgcctggccccaacccccatcttctaaattcaacttctccagttattgtggactaaatagtgtttcctccaaatcttacagtaaagccctaacccccaatatgacagtctttggtggtggcactttttttttttttttttgagacagtctcgctctgtcacccaggctggagtgcagtggcgtgatctcggctcactgcaacctccacctcccaggttcaagtgattctcctgcctcagcctcctgagtagctgggatacagggcatgtgccaccacacccagctaatttttgtatttctagtagagacgggggtttcaccatgttggccaggctggtctcgaactcctggctgcaagtgatccgcccaccttggcctccaaaagtgctgggat

SEQ ID NO: 91776 - DNA, 701 bp, Homo sapiens
cgctcgcgggcttcagcgaggcgggagggcggccctgttgccctggagacgctttccctgctgccggccgcgaccgcaacccgctaggccttcatcgcgagctacgcccggaccgagaagccccggcatggccacgtccatcggagtgtccttctcggtgggcgacggggtgcctgaggctgagaagaacgcaggggagcccgagaacacctatattctgcggcctgttttccagcagaggttcaggccctctgtggttaaagactgtatccatgctgtgctcaaggaggaactggcaaatgctgaatattctccagaagaaatgcctcagcttacaaaacatttatcagaaaacattaaagataaattaaaagaaatgggatttgaccgatacaaaatggtggtgcaagtagtgattggagaacaaagaggtgaaggagtattcatggcttctcgctgtttctgggatgctgacactgacaactatactcatgatgttttcatgaatgacagtttattctgcgttgtagcagcatttggctgtttctactactgaatgaatctttgaaaagctggtaaaagacatgaccatgaagaaatctgaactttttaatattgttaaatatcttgacaaaataaagaaggcacgcgcgccgggcccccacctaaataatcttccccccccttcttttcaatacgcc

SEQ ID NO: 91777 - DNA, 473 bp, Homo sapiens
cctggctggtcacctctagttgcaagcagcttcatctgactctagtttctccggtttacccagtatactctctggtacaaatacaatactctgtgggtacctacctgtgaaaggtttggaagtacagatctatgagaatgtattaaggaacactgtttctcgtggcagatatgtgtcgtttaggtccttgttagattgttgataattcttcattcttggattttttagcatggcttctcgctgtttctgggatgctgacactgacaactatactcatgatgttttcatgaatgacagtttattctgcgttgtagcagcatttggctgtttctactactgaatgaatctttgaaaagctggtaaaagacatgaccatgaagaaatctgaactttttaatattgttaaatatcttgacaaaataaagatgttagtagtttgacaactgaaataaaaaaaaaaactctcccgcgct

SEQ ID NO: 91778 - DNA, 384 bp, Homo sapiens
tatgttcctttttttcatttcatgttctgagttacctatttttattgcattttacaaaagcatccttccatgaaggaccggaagttaaaaacaaagcaggtcctttatcacagcactgtcgtagaacacagttcagagttatccacccaaggagccagggagctgggctaaaccaaagaattttgcttttggttaatcatcaggacagtttattctgcgttgtagcagcatttggctgtttctactactgaatgaatctttgaaaagctggtaaaagacatgaccatgaagaaatctgaactttttaatattgttaaatatcttgacaaaataaagatgttagtagtttgacaactgaaataaaaaaaaaaactctcccgcgct

SEQ ID NO: 91779 - DNA, 323 bp, Homo sapiens
cctggaaagacaaccttcaggtccagccctggagctggaggagtggagccccactctgaagacgcagcctttctccaggttctgtctctcccattctgattcttgacaccagatgcaggtaagcagagatgaaagggtgaggtgacggccagggaacagcctagcctcacagatgagagtgcacgcttccactccagtgagcctggctctgcagcttggcgtctgtgtgactttgcgccattcacttaccttctcctgttgcctcagtctgtcaacttctggcctttgcacctagaatactcttcctgcctagtatctcatcg

SEQ ID NO: 91780 - DNA, 530 bp, Homo sapiens
gtatgttcctttttttcatttcatgttctgagttacctatttttattgcattttacaaaagcatccttccatgaaggaccggaagttaaaaacaaagcaggtcctttatcacagcactgtcgtagaacacagttcagagttatccacccaaggagccagggagctgggctaaaccaaagaattttgcttttggttaatcatcaggtacttgagttggaattgttttaatcccatcattaccaggctggaggtgaggttagtggtgcaggagttgctgaggcaggtggaaatcttgtaataaatgcctaaaaatgttttaagcaatttgactgggctctggaaagcattttgtgattctgaactaaaagatggacaagtaaattttatcaattaagaacaaacacccagagactatttctcttatccagaatttatgacaaggtcctgttgttcttattatcagtgatacttataatatggtttcttgggatgagtaatggagtttactccaagaaactcaaagcatttca

SEQ ID NO: 91781 - DNA, 329 bp, Homo sapiens
taacaagctgatcttgggtctgtagaagctctaagagacaggaagcctagcttgggaccaggcaggtcgggtgtgaaagttaacatccacagcgttagatcaggctcgtcatacaaatgtgggtccccagagtcagagtcaacaggactgcgttcatgtgagctgccagccactctaacagctgtgggcagcacctagaaacagccggcaaagtcgatttccccatctcaacattcttctctctcctgcaggtactcactgcagctatcctcatctccttgatgggctggagatacggctgcttcagtaagagtgggctctgtcgaagc

SEQ ID NO: 91782 - DNA, 689 bp, Homo sapiens
cgctcgcgggcttcagcgaggcgggagggcggccctgttgccctggagacgctttccctgctgccggccgcgaccgcaacccgctaggccttcatcgcgagctacgcccggaccgagaagccccggcatggccacgtccatcggagtgtccttctcggtgggcgacggggtgcctgaggctgagaagaacgcaggggagcccgagaacacctatattctgcggcctgttttccagcagaggttcaggccctctgtggttaaagactgtatccatgctgtgctcaaggaggaactggcaaatgctgaatattctccagaagaaatgcctcagcttacaaaacatttatcagaaaacattaaagataaattaaaagaaatgggatttgaccgatacaaaatggtggtgcaagtagtgattggagaacaaagaggtgaaggagtattcatggcttctcgctgtttctgggatgctgacactgacaactatactcatgatgttttcatgaatgacagtttattctgcgttgtagcagcatttggctgtttctactactgaatgaatctttgaaaagctggtaaaagacatgaccatgaagaaatctgaactttttaatattgttaaatatcttgacaaaataaagatgttagtagtttgacaactgaaataaaaaaaaaaactctcccgcgct

SEQ ID NO: 91783 - DNA, 1110 bp, Homo sapiens
ggacgcgtgggtcgacccacgcgtcgcggacgcgtggctctccggggagcggaagcgccttcaatgcaggcctgtgggcaggggcgtgggggcgcgcacacacacacgcctgggtgacctctacgtatatacagagcctccctggccctcctggaaagagtcctggaaagacaaccttcaggtccagccctggagctggaggagtggagccccactctgaagacgcagcctttctccaggttctgtctctcccattctgattcttgacaccagatgcaggatggtgtcctctccctgcacgccggcaagctcacggacttgctcccgtatcctgggactgagccttgggactgcagccctgtttgctgctggggccaacgtggcactcctccttcctaactgggatgtcacctacctgttgaggggcctccttggcaggcatgccatgctgggaactgggctctggggaggaggcctcatggtactcactgcagctatcctcatctccttgatgggctggagatacggctgcttcagtaagagtgggctctgtcgaagcgtgcttactgctctgttgtcaggtggcctggctttacttggagccctgatttgctttgtcacttctggagttgctctgaaagatggtcctttttgcatgtttgatgtttcatccttcaatcagacacaagcttggaaatatggttacccattcaaagacctgcatagtaggaattatctgtatgaccgttcgctctggaactccgtctgcctggagccctctgcagctgttgtctggcacgtgtccctcttctccgcccttctgtgcatcagcctgctccagcttctcctggtggtcgttcatgtcatcaacagcctcctgggccttttctgcagcctctgcgagaagtgacaggcagaaccttcacttgcaagcatgggtgttttcatcatcggctgtcttgaatcctttctacaagttcaggccctctgtggttaaagactgtatccatgctgtgctcaaggaggaactggcaaatgctgaatattctccagaagaaatgcctcagcttacaaaacatttatcagaaaacattaaagataaattaaaag

SEQ ID NO: 91784 - DNA, 1927 bp, Homo sapiens
ggacgcgtgggtcgacccacgcgtcgcggacgcgtggctctccggggagcggaagcgccttcaatgcaggcctgtgggcaggggcgtgggggcgcgcacacacacacgcctgggtgacctctacgtatatacagagcctccctggccctcctggaaagagtcctggaaagacaaccttcaggtccagccctggagctggaggagtggagccccactctgaagacgcagcctttctccaggttctgtctctcccattctgattcttgacaccagatgcaggatggtgtcctctccctgcacgccggcaagctcacggacttgctcccgtatcctgggactgagccttgggactgcagccctgtttgctgctggggccaacgtggcactcctccttcctaactgggatgtcacctacctgttgaggggcctccttggcaggcatgccatgctgggaactgggctctggggaggaggcctcatggtgcttactgctctgttgtcaggtggcctggctttacttggagccctgatttgctttgtcacttctggagttgctctgaaagatggtcctttttgcatgtttgatgtttcatccttcaatcagacacaagcttggaaatatggttacccattcaaagacctgcatagtaggaattatctgtatgaccgttcgctctggaactccgtctgcctggagccctctgcagctgttgtctggcacgtgtccctcttctccgcccttctgtgcatcagcctgctccagcttctcctggtggtcgttcatgtcatcaacagcctcctgggccttttctgcagcctctgcgagaagtgacaggcagaaccttcacttgcaagcatgggtgttttcatcatcggctgtcttgaatcctttctacaaggagtgggtacgaattataaacaaacttcccctttaggtatccctggagtaataatgacaacaaaattcactgcaggtcggtggaatgatagaatgcattttaaatcacattgtaaacttccaggtgatccatggataggataaataactaagttattataattgtttaggaatttatagtccataaaatatcctccagccaggtctcatttcagcttcttgacaatcccataaagttggccatttgttacacatagagaagttgaggctcacagagggtaacaggcttgctgtaaaagcacacagtgaagttaaggtgaagtcagcacctgaccccctatctccctgttgttttgttgttgctgagacagggtcttgctctgttcccctgtctggagtacagtggcacaatcatagcttactgtaacctacaacccatgcactcaagcgatcctcctgccttagcctccgagtagctgggactacaggcacacaccactacacctggctaatttttaaattttctgtagagagggagtctcgctatattgcccagtctggtcttgaactcctgacctcaagtgatcctcccaccttggtctcccaaagcgctggattacaggcatgagtcactgtgcctggccccaacccccatcttctaaattcaacttctccagttattgtggactaaatagtgtttcctccaaatcttacagtaaagccctaacccccaatatgacagtctttggtggtggcactttttttttttttttttgagacagtctcgctctgtcacccaggctggagtgcagtggcgtgatctcggctcactgcaacctccacctcccaggttcaagtgattctcctgcctcagcctcctgagtagctgggatacagggcatgtgccaccacacccagctaatttttgtatttctagtagagacgggggtttcaccatgttggccaggctggtctcgaactcctggctgcaagtgatccgcccaccttggcctccaaaagtgctgggat

SEQ ID NO: 91785 - DNA, 495 bp, Homo sapiens
tggaaagagagagactggagtgagagagaaggagttaagaaggcttgagagacagctacaggaacagatgggtagaggcaaaagcttgggcagggtgtggcactggaatatgatatatgggggatgtctggaaggaagactttatcagaagtagtgactcatggactgtgtagatttactcattcaatcaccaaatgttcctacatgacctctcacagcacctctccaggcactgatagagataatgcagtggataagacaatgaacctgctgtcaaggcatttatagtctaccaggagagatagacgacacatttatttattttattttattttttacataactagacatctttatcttttgacaaatagcttttacaaacataattttcaagctctttccacaatataaatcattacttgggctccccttatttcattaaaaaaaaaaggattcattctgacttctctttccttttttttttttttttttttt

SEQ ID NO: 91786 - DNA, 459 bp, Homo sapiens
agtatacttgtatacgtataaacaattctaggacaagaaactggagaagtcaggatattagagacttttcactctatacccttttttattatgattgaattttttaattctacacagttttctcactttaaattacatatatacgaatattctacataagaccatttaaaataaacttttattcataggaaatgtaatggtttgtttgaaatttagtcataacatccctgtaagtttcatgcaattaaatgcttatcgtatgctaaacatttgatgagacgaccttaaatccaaggtagtcagagagcatatttgtagaccaagttttacatgggatacaatcaaaagaaggactacgtaatttgctgtattaggaacatttagcaaaaggctaacactcagctcagagtaattcaagcgaaagagtaaagttattatcatactgaggtccttcataga

SEQ ID NO: 91787 - DNA, 153 bp, Homo sapiens
aaaagatcgtagatcaacctaggaactgtggtagatgaaaggctcaagtcaatgagcgataggttggccagcagaatatacatgggggagtgtaagtgaggatcaaagatcactgtgaacacaatgaagaggtttcccaggataattcccaca

SEQ ID NO: 91788 - DNA, 420 bp, Homo sapiens
tggtctagcagtcaggcccacatgtgctggaggcagtggcctggggccgggtgtgggagtgagaggtgaccaggcaggctttcacagagaagacatctcaggaggggacccggaggaggtgtgggacttccccagtgccattactggcctgagcaaaggaggctgagggagggaactaatgttccctggacgtttgttatttgaacattttcagaggggaccacccaagggcacagttgtgagtcagagctaggatttgattgccttttcctctctggctgtgggcaggggacagtcagagggcagtgaagggttggaccaccccatcctcccccttcccctcccaccagatcccctacacttgctctaggagccaccgcaggaagtccagagtcaccaaatcatccctcgccatctcct

SEQ ID NO: 91789 - DNA, 282 bp, Homo sapiens
attatatagacaaaaacgcgtgcgtaactttgagacgccacggctgctgtttctaggtagctagcatccgccagggattgtggacgatggaggccgaggctctttgtcatagtattagctagctggtgtcgttttgacaacctgacttgacgggttttgagtgtatcttggcaagtgaggtgacatgaaagccattatctccggtttcacttgggtaatgaggatagcgatggaaatgaaattatctcctcatttagaaggcatttattccgtactccccaa

SEQ ID NO: 91790 - DNA, 726 bp, Homo sapiens
cttttttccccatcttttttcttttatttttgggacggagtctcgccctgtctcccaggctggagttgcagtgagctgagattgcaccactgcaccccagccttggtgacagagcaagactctgtctcaaaaacaaaaacaaaccataaactgggcgacttagaaacaacagaaatttctcacactcctggaggatgggaagtccaagatcaaggaaggcactggcagatttggcatctggtgagggagtctttctggttcgtggatgggcccagctctgtcctcacatggtggaaggagctagctctctgtggtctcttttatgtgggtgctaatttcaacctcccaaaggccccacctcttaatatcattacattaagactgaggatttcaacgtatgagttttgagggggaagacatcataaacatttagacatagtaataacataaaagactttggcctaatcttggagaggggagaatctttagaaccatgacaaaaaaatcagcgccataaaggaaatattaagtaaatttgacaatccaaaactgaaattttctatagccaaaaaaaaaaaaactataaaccaagccaaaagaaaaattacacactgatgaaaaatatttgtcataaaaatgataatccaatataacaacccaatataaaaatggtcaaaagacataagcaggcattttccagaaaaaaggataagcaggcaatgtacc

SEQ ID NO: 91791 - DNA, 407 bp, Homo sapiens
agctttggtcagtgggagctctcttagttagctcctatatccttttgacatatcctcatcaatagacgtttttgtttttcttgtttgttttgaatacttctttattactggcattaagagatggtccaggtccatcttgtgtatttcttgccccagtcctagaatcaaccatttctccaaggagccctggtaccttttattggagaatgatattagaaaccaagatatgggtactaggtgagctcattgctactgggatgtcattgcttatagaccctttcagctgagaaagccaagaaatacacacactaacccatgtatatacacttatctataaatatttctatatgtaactaaccatctatattgtattaaggtacacgagttcatgctgtttccagcccttt

SEQ ID NO: 91792 - DNA, 374 bp, Homo sapiens
atctagtttcagagataacaaaaatcgccttgtttcatgccttttatttaataacactcctttctttacctggcatgcccttgtctcatgagtaaatacattgcaagattcattaggtatccctaggggtagaaagaagtacaatctgattttaagcaaaaataaggttggttcataggtggtttgggacctgtctcaagtgtcaatttgtcattaagagtaaaggctcgataattgactggaaagagctttttaaagtttcaggatcaacttaaaatttactttgctcagaatatctatttaatgtttagttctcactcctgcaaaaatatactaaatcaggatctagttgtttgacaaaactgaagcaaagg

SEQ ID NO: 91793 - DNA, 346 bp, Homo sapiens
taccacccacgctggagtgcagcggcatgactatgcctcactgcagctttgaactcccaggctcaagccatccttccacctcagcctccggagtagctgggactacaggcacgtgccaccatgcctggctaatttttttattttttgtagagacggggtgttgctatgttgtcagggctggtctcaaactcaagggctcaagctatcctcccacttcagctttccaaagttttgggattacaggcatgagccactgcacctaactgctttcttctttcaatagatatttttcacttttaagaaaaaaacccctgcagcacatgctaaaataacactaaggaagggt

SEQ ID NO: 91794 - DNA, 458 bp, Homo sapiens
tgttgcattactgtatgctgggtttttggtactctttctcaaggctctgttattagttggtaggctccagtaatgaatatagaggactgacagagtgggattaacttatttgcaattgtttcctactgaaatcaaatgcacggttttcccaatttaagacttggtcccttgtaccttgatttgattcagaaagccatctgtgatgtttttgtttcctggcgcctgcaggaaaactcatttgtcatgagttacaattaccttgcagtcattgctatgtggttgtagcacactcattgctaagaatggtttatgagtgtcaccttaatccatgagctcaactgggtgtcagacgtctaggaagggagggacttggtaggtacttaaatggtaaactcagggtgctgcatggaggtgattaaggaggtggcatttggtttgagtcagggcttttagtgcta

SEQ ID NO: 91795 - DNA, 450 bp, Homo sapiens
ccccactgcataatgggaataacgaaagtatctactgccttggggtgctgtgggaattccataaccttcttgcgtgatgtctggtgtgcagggctgacagtggcttgaaccatggagggaccagatgtgatcagctgccctcatgtcagtaacacaccccacagccgccacatcaccaagccctgccacagactgtttcctcctcactcaaggatgcctcacgttttctttctccatctgaaatcactaacccatctgctcttaaaagctgagctcagcctgggcgcggtggctcacacctgtaatcccagcactttgggaggccaaggcgggtggatcacttgaggtcaggagttcaagaccagcctgaccaacatggtgaaaccccatctctactaaaaatacaaaaactagccaggtgtgatggcgggtgcctgtaatcccaactac

SEQ ID NO: 91796 - DNA, 500 bp, Homo sapiens
ggaagaaagtgttctagctggaatgatgacagtcacacggcttcccaaaagttctgaggagaagcacaacatggagaagtacaggtcaattttgccaatttgaaacgctctgcagccctttgcctgccatgggcctggtcagagctctcaaatggccccatctctcttatctcagacaacaaatgctctgtgctgctttcctgagtctccatttttctacctgggattaaagagttccaagggccccttcagctccaaaaaactgggttgcaaatagaacccgagctctagttcatttactaaactgcactgcacatccagaccacttatcctgagcttaaagtttcaacagtccgcgtaggaatccattgactagaaatacttaacagaatgtcagttgaatagagaccttataaagcacttctgttcaatataagtagtctctgatctgcacttttatcattgctactaaatgctcctgaccctagtaaataataaat

SEQ ID NO: 91797 - DNA, 1913 bp, Homo sapiens
gccaagctgaaagttctactctttctagtggaatatcaataggtagcagcgatggttctgaactaagtgaagagacctcatggcctgcttttgaaagttctgcagaatcagaagatttggcagtacatttatatccaggagctgttactattcaaggtgttctcaggagaaaaactttgttaaaagaaggcaaaaagcctacagtagcatcttggacaaaatattgggcagctttgtgtgggacacagcttttttactatgctgccaaatctctaaaggctaccgaaagaaaacatttcaaatcaacatccaataagaacgtatctgtgataggatggatggtgatgatggctgatgaccctgaacatcctgatctcttcctgctgactgactctgagaaaggaaattcgtacaagtttcaagctggcaatagaatgaatgcaatgttatggtttaagcatttgagtgcagcctgccaaagtaacaaacaacaggttcctacaaacttgatgacttttgagtagaagcctgagaaaaaaagagaggtgaactgttgcttctacgtgagcatgaggacctgataaaagagcgccagctataaaccatcctgtgccaggaagagcccagaggctctgtctcagtcgttggagttctcaaccaaaaaagcactaatttcagggaatgatttgagatattcccagagaacaaattggagttgcaaaacaaactgccatgaaccatgcttcttatctcagaactgacctgtggaaaccactgccttaaaagaatgaaaggaaaaccaacatgaaacaccaaatagtgtgtgtgaatcttctggcggtgctgtgcttggaatagatcgtagctaatttgcatttcttttaactttgtaataattttagaggggggaattgccttttttagatatgctttaaaaaggaaaaacatactcttgtggattccatcaggagctggttttgaaccgaggtgaagagacttagcagggattgtaccagcagcccacctgcaaggtttgttctccctctagtagtctgcaacctcactggctttctcacagcaagagtgtaggaatgagaaatgttagtcatgtgagttcttgggtttgtttgggattgggtgggggtgtttgttttgttttggatgaggggagaatttttttaaacactaaacttctgaaatgtagtactgtaaggggaacattatttcctgcaggaggtacaaaggctgtgtgttcatttgccagacgctttttttttaaataggttccagaaaacatggttgtttctaactagggttaaagtttagctttctatatgaattcattgttggaccacagatctgcttaagtaaagagctataatcccaacctaaacttttctgagattttacaataattagatctttttccaagttaattgggttttcccttctcccagtcataggtggtttttatcatcaagacagactgatattttgtcaggatattttcttttacagtgtttgatgtgcataatgccagagttatttttttattattcattttctctctttttgttcaatatgagattcaggatcatatttgtttaaaaggtaacacatagagatgtatgtatatattttgttataagacatacaaaataattttaagagggataaaggtgaaaatatcagattctggaaattttaagtatctaaactttatacttgtatgatttaccataaacataccaaaacatttttctgaaaatttactgtcggtctctgacatgaaaccgtattttgtcagtagttgaccaagcagttttatgagaactcttctatgcaatgatgcatttaatttctaaagtaaatgttgaattattaaaaaaaaagtttgaaggtaagatgcctta

SEQ ID NO: 91798 - DNA, 1897 bp, Homo sapiens
ataattacattttatttaagtacctacttgatgactattgtagacaaaagctcttatgtgttcttttcttcgttattatagttctgcagaatcagaagatttggcagtacatttatatccaggagctgttactattcaaggtgttctcaggagaaaaactttgttaaaagaaggcaaaaagcctacagtagcatcttggacaaaatattgggcagctttgtgtgggacacagcttttttactatgctgccaaatctctaaaggctaccgaaagaaaacatttcaaatcaacatccaataagaacgtatctgtgataggatggatggtgatgatggctgatgaccctgaacatcctgatctcttcctgctgactgactctgagaaaggaaattcgtacaagtttcaagctggcaatagaatgaatgcaatgttatggtttaagcatttgagtgcagcctgccaaagtaacaaacaacaggttcctacaaacttgatgacttttgagtagaagcctgagaaaaaaagagaggtgaactgttgcttctacgtgagcatgaggacctgataaaagagcgccagctataaaccatcctgtgccaggaagagcccagaggctctgtctcagtcgttggagttctcaaccaaaaaagcactaatttcagggaatgatttgagatattcccagagaacaaattggagttgcaaaacaaactgccatgaaccatgcttcttatctcagaactgacctgtggaaaccactgccttaaaagaatgaaaggaaaaccaacatgaaacaccaaatagtgtgtgtgaatcttctggcggtgctgtgcttggaatagatcgtagctaatttgcatttcttttaactttgtaataattttagaggggggaattgccttttttagatatgctttaaaaaggaaaaacatactcttgtggattccatcaggagctggttttgaaccgaggtgaagagacttagcagggattgtaccagcagcccacctgcaaggtttgttctccctctagtagtctgcaacctcactggctttctcacagcaagagtgtaggaatgagaaatgttagtcatgtgagttcttgggtttgtttgggattgggtgggggtgtttgttttgttttggatgaggggagaatttttttaaacactaaacttctgaaatgtagtactgtaaggggaacattatttcctgcaggaggtacaaaggctgtgtgttcatttgccagacgctttttttttaaataggttccagaaaacatggttgtttctaactagggttaaagtttagctttctatatgaattcattgttggaccacagatctgcttaagtaaagagctataatcccaacctaaacttttctgagattttacaataattagatctttttccaagttaattgggttttcccttctcccagtcataggtggtttttatcatcaagacagactgatattttgtcaggatattttcttttacagtgtttgatgtgcataatgccagagttatttttttattattcattttctctctttttgttcaatatgagattcaggatcatatttgtttaaaaggtaacacatagagatgtatgtatatattttgttataagacatacaaaataattttaagagggataaaggtgaaaatatcagattctggaaattttaagtatctaaactttatacttgtatgatttaccataaacataccaaaacatttttctgaaaatttactgtcggtctctgacatgaaaccgtattttgtcagtagttgaccaagcagttttatgagaactcttctatgcaatgatgcatttaatttctaaagtaaatgttgaattattaaaaaaaaagtttgaaggtaagatgcctta

SEQ ID NO: 91799 - DNA, 709 bp, Homo sapiens
actctgtcactcaccgggcgggccaggccgggcagccatggctgagacactcttctggactcctctcctcgtgggtcacagcctacaatcgggacagctttgataccactcggcagaggctggtgctggagattggggacccagaaggccccctgctgccataccaagccgagttcctggtgcgcagccacgatgcggaggaggtgctgccctcaacacctgccagccgcttcctctcagccttggggggactctgggagcccggagagcttcagctgctcaacgtcacctctgccttggaccgtgggggccgtgtcccccttcccattgagggccgaaaagaagggctgaagagagacctggctacctccgacatccagatggtccaccactgcaccatccacgggaacacagaggagctgcggcagatggcggccagccgcgaggtgccccggccactctccaccctgcccatgttcaatgtgcacacagtggttccaggtccagccctgacttcatcctcccttctctgtccacaccacgagtggcacatcccacctgctgattccagctcctggccctcctggaacccaggctctaaacaagcagggagagggggtggggtggggtgagagtgtgtggagtaaggacattcagaataaatatctgctgctctgctcaccaattgctgctggcagcctctcccgtc

SEQ ID NO: 91800 - DNA, 1430 bp, Homo sapiens
actctgtcactcaccgggcgggccaggccgggcagccatggctgagacactcttctggactcctctcctcgtggttctcctggcagggctgggggacaccgaggcccagcagaccacgctacacccacttgtgggccgtgtctttgtgcacaccttggaccatgagacgtttctgagccttcctgagcatgtcgctgtcccacccgctgtccacatcacctaccacgcccacctccagggacacccagacctgccccggtggctccgctacacccagcgcagcccccaccaccctggcttcctctacggctctgccaccccagaagatcgtgggctccaggtcattgaggtcacagcctacaatcgggacagctttgataccactcggcagaggctggtgctggagattggggacccagaaggccccctgctgccataccaagccgagttcctggtgcgcagccacgatgcggaggaggtgctgccctcaacacctgccagccgcttcctctcagccttggggggactctgggagcccggagagcttcagctgctcaacgtcacctctgccttggaccgtgggggccgtgtcccccttcccattgagggccgaaaagaaggggtatacattaaggtgggttctgcctcacctttttctacttgcctgaagatggtggcatcccccgatagccacgcccgctgtgcccagggccagcctccacttctgtcttgctacgacaccttggcaccccacttccgcgttgactggtgcaatgtgaccctggtggataagtcagtgccggagcctgcagatgaggtgcccaccccaggtgatgggatcctggagcatgacccgttcttctgcccacccactgaggccccagaccgtgacttcttggtggatgctctggtcaccctcctggtgcccctgctggtggccctgcttctcaccttgctgctggcctatgtcatgtgctgccggcgggagggaaggctgaagagagacctggctacctccgacatccagatggtccaccactgcaccatccacgggaacacagaggagctgcggcagatggcggccagccgcgaggtgccccggccactctccaccctgcccatgttcaatgtgcacacaggtgagcggctgcctccccgcgtggacagcgcccaggtgcccctcattctggaccagcactgacagcccagccagtggttccaggtccagccctgacttcatcctcccttctctgtccacaccacgagtggcacatcccacctgctgattccagctcctggccctcctggaacccaggctctaaacaagcagggagagggggtggggtggggtgagagtgtgtggagtaaggacattcagaataaatatctgctgctctgctcaccaattgctgctggcagcctctcccgtc

SEQ ID NO: 91801 - DNA, 1058 bp, Homo sapiens
actctgtcactcaccgggcgggccaggccgggcagccatggctgagacactcttctggactcctctcctcgtggttctcctggcagggctgggggacaccgaggcccagcagaccacgctacacccacttgtgggccgtgtctttgtgcacaccttggaccatgagacgtttctgagccttcctgagcatgtcgctgtcccacccgctgtccacatcacctaccacgcccacctccagggacacccagacctgccccggtggctccgctacacccagcgcagcccccaccaccctggcttcctctacggctctgccaccccagaagatcgtgggctccaggtcattgaggtcacagcctacaatcgggacagctttgataccactcggcagaggctggtgctggagattggggacccagaaggccccctgctgccataccaagccgagttcctggtgcgcagccacgatgcggaggaggtgctgccctcaacacctgccagccgcttcctctcagccttggggggactctgggagcccggagagcttcagctgctcaacgtcacctctgccttggaccgtgggggccgtgtcccccttcccattgagggccgaaaagaagggctgaagagagacctggctacctccgacatccagatggtccaccactgcaccatccacgggaacacagaggagctgcggcagatggcggccagccgcgaggtgccccggccactctccaccctgcccatgttcaatgtgcacacaggtgagcggctgcctccccgcgtggacagcgcccaggtgcccctcattctggaccagcactgacagcccagccagtggttccaggtccagccctgacttcatcctcccttctctgtccacaccacgagtggcacatcccacctgctgattccagctcctggccctcctggaacccaggctctaaacaagcagggagagggggtggggtggggtgagagtgtgtggagtaaggacattcagaataaatatctgctgctctgctcaccaattgctgctggcagcctctcccgtc

SEQ ID NO: 91802 - DNA, 654 bp, Homo sapiens
gcaacttgcccaagacacacagccttgaacccaggctgtctacacccacagcccatgtcttgaccactgggcactgagcaggcaccatagagctttctgtttgttttctgcccctgcatcatgtgtctgagtctctccccacataagtggtggggaggaccgcagggtggctcagaggcagttccaggctgtactccagggcagctgactcccagagctgatgactccccacctgtgcctccagcatccagatggtccaccactgcaccatccacgggaacacagaggagctgcggcagatggcggccagccgcgaggtgccccggccactctccaccctgcccatgttcaatgtgcacacaggtgagcggctgcctccccgcgtggacagcgcccaggtgcccctcattctggaccagcactgacagcccagccagtggttccaggtccagccctgacttcatcctcccttctctgtccacaccacgagtggcacatcccacctgctgattccagctcctggccctcctggaacccaggctctaaacaagcagggagagggggtggggtggggtgagagtgtgtggagtaaggacattcagaataaatatctgctgctctgctcaccaattgctgctggcagcctctcccgtc

SEQ ID NO: 91803 - DNA, 903 bp, Homo sapiens
actctgtcactcaccgggcgggccaggccgggcagccatggctgagacactcttctggactcctctcctcgtggttctcctggcagggctgggggacaccgaggcccagcagaccacgctacacccacttgtgggccgtgtctttgtgcacaccttggaccatgagacgtttctgagccttcctgagcatgtcggtcacagcctacaatcgggacagctttgataccactcggcagaggctggtgctggagattggggacccagaaggccccctgctgccataccaagccgagttcctggtgcgcagccacgatgcggaggaggtgctgccctcaacacctgccagccgcttcctctcagccttggggggactctgggagcccggagagcttcagctgctcaacgtcacctctgccttggaccgtgggggccgtgtcccccttcccattgagggccgaaaagaagggctgaagagagacctggctacctccgacatccagatggtccaccactgcaccatccacgggaacacagaggagctgcggcagatggcggccagccgcgaggtgccccggccactctccaccctgcccatgttcaatgtgcacacaggtgagcggctgcctccccgcgtggacagcgcccaggtgcccctcattctggaccagcactgacagcccagccagtggttccaggtccagccctgacttcatcctcccttctctgtccacaccacgagtggcacatcccacctgctgattccagctcctggccctcctggaacccaggctctaaacaagcagggagagggggtggggtggggtgagagtgtgtggagtaaggacattcagaataaatatctgctgctctgctcaccaattgctgctggcagcctctcccgtc

SEQ ID NO: 91804 - DNA, 2810 bp, Homo sapiens
agattcgcggccgcgtcgacggtgcgcccaccggtcccgccgggcgcccgcgggacgcgccgccagggccctctccgccgggggctcggcgctcgcccacctcttccaaatttaaccattacctaaatccgaagggaaatgagcaaacctctcggattgggtgtcaaggtctcctccgggctggggctgagcaagccctcggagtgaccgtgggtgacagcggctccagggactcttggggcgcagtggggaaagtgccggaccaccatgccgcgctcatttctcgtcaaaagcaagaaggctcacagctaccaccagccgcgctccccaggaccagactattccctccgtttagagaatgtaccggcgcctagccgagcagacagcacttcaaatgcaggcggggcgaaagcggagccccgggaccgtttgtcccccgaatcgcagctgaccgaagccccagacagagcctccgcatcccccagacagctgcgaagcagcgtctgcgaacggagctcggagtttgaggacttctggaggcccccgtcaccctccgcgtctccagcctcggagaagtcaatgtgcccatcgctggacgaagcccagcccttccccctgcctttcaaaccgtactcatggagcggcctggcgggttctgacctgcggcacctggtgcagagctaccgaccgtgtggggccctggagcgtggcgctggcctgggcctcttctgtgaacccgccccggagcctggccacccggccgcgctgtacggcccgaagcgggctgccggcggcgcgggggccggggcgccagggaactgcatcgcaggggccggtgccaccgctggccctggcctagggctctacggcgacttcgggtctgcggcagccgggctgtatgaaaagcccacggcagcggcgggcttgctgtaccccgagcgtggccaccggctgcacgcaaacaaaggcgctggcgtcaaggtggagtcggagctgctgtgcacccgcctgctgctgggcggcggctcctacaagtgcatcaagtgcagcaaggtgttttccacgccgcacgggctcgaggtgcacgtgcgcaggtcccacagcggtaccagaccctttgcctgcgagatgtgcggcaagaccttcgggcacgcggtgagcctggagcagcacaaagccgtgcactcgcaggaacggagctttgactgtaagatctgtgggaagagcttcaagaggtcatccacactgtccacacacctgcttatccactcagacactcggccctacccctgtcagtactgtggcaagaggttccaccagaagtcagacatgaagaaacacactttcatccacactggtgagaagcttcacaagtgccaggtgtgcggcaaggcattcagccagagctccaacctcatcacccacagccgcaaacacacaggcttcaagcccttcggctgcgacctctgtgggaagggtttccagaggaaggtggacctccgaaggcaccgggagacgcagcatgggctcaaatgagcaccctggctggctgcaagcagcagctacacaacactacagagggcagcctccctgcttgccaccactctgctccctgcttgcctccactcccttctgactttccagaccccaggtccagtctgcagatcctaccaggttgctcctccttcgccttacctcctggagctgccagaagaaatgaggtaccttttcaaagtgcagccgagagtgagaaccaagtgactccctaggcttcggacacaaataggctcctctacacctgaagacaaaggcaaagtcaaatggggaccagaataaatcttagaccccacagtccttcccatttccagccctaatctacagacaggaatgcccttcaggtttcttccctcccccctcttgacctaccccagatatttgtgtggaagaggaggaatcaccatttacaaggtggacaaatgctaatatttttatctagaaagaagagtgagtgttaacttttatttttttccttctggggggtctgttgactcctttcttttgggtgctgcctataaatcttggaggaatcatttctcctcctcaaaaactgattcagaaactgacttggggaaggaatttaatactttgaagtcatgagatgcaccatcgaggctacccccaagaagaagcagaagagaagttggtaatgagaggggattagaggtcctcccttcagtagggctgtgaaaacctcatcactggaggtaaaagcacaagcaatgcctgtggacaagatgtcattcattcactcagcaaatgttcatggatcaccggctaccaaggtaccaggcaccatgctaggtattggggaagagagactgaagtcacaacccctgactgctcctcaaaagctaacggttgcacctccaagtggctgggtctgttcttactcttggagggaattctgagaagacagcacagaattgtaaaccttcccttttgacccttttggattttatcaggtgtaaacaaaaagctgaacagttacttcaaagatatgtgtgtatattcagttttttattgttaagctgatattttaaagatttctgagctagcaggcatgtgggaaggaaggctctgtcttcaactctttgaccctccatgtgtaccatagaggggggaaaggtggtattttcactttgatgaggttggtaaatgtttttagatcttctggtaagcattatgtttgttaatacatatttattagagtgatgttttaagttaataaagtattaagagtaaaaaaaaaa

SEQ ID NO: 91805 - DNA, 495 bp, Homo sapiens
ggggcagaacctggagcacacacaaggatagcagatgaagagtcttcacattagctcgatgaaggttgtgggaaactggggacagagctcgacaaagcacacgtaacaacaagtgcatagggagacctggtctttgtagagtgactatgagggtgggctggtgcattcccatctaggtgcctgtgcagttgcctgcttctatcaggcctggtatagaaagcagagtgctccagcctagggctgacaagcaccagctccagttaagctgaggaaaatgtcctgtttcaatcaattacatgaatcccatatattacttgggtacatctttatggttgcttttccctgctgggaaaatggtttccaatgagtaaaatttcataaattatattatagttatacttccaacaagctaattaattgtgttttattactattacttctgccttgatgatagtccattaaaggtcattaataaatgcagctgtgttgagattt

SEQ ID NO: 91806 - DNA, 6010 bp, Homo sapiens
aaaaataatgccattttttgaatgatgaactatggtataatgcatttagtgttcattccaaccgtcaatcaataaataacatgggcctctagctataagggcaattctataggtaaaagaactgattgacccccacccccataggtgctgtcctgctatggaatccctttgctcagttttctcctgtccaatcaggtggaatgtttcacaggcacatggtttatacagctcaaaataacttgggacctgtgagctgacaaatgctctggctccggtggtgacaggttgtccagcttcttacagccatcttcactgaaactaaggttaactcctcactctctatggacggctactctctatttccaagggcgtgaagaatttccctcttctcctgtgctttcatctaaaagttctccctggataattatcattgcagtggagtgcctggattggacatcctcatctgggtcaactaaaaaaagaaagcatgcaagacgacagcatagaagcttctacttccatatctcagcttctaagagagagctatttagctgaaaccagacatcggggaaacaatgagaggagtcgagcggagccctcctccaacccttgccatttcggcagtccttctggggccgctgaaggaggcggaggccaagatgaccttccagatctttcagcctttctgagccaagaagaattagacgaaagtgtcaatttggcaagactggccatcaattacgaccctttggagaaggcagatgaaactcaagctagaaaacgactttctcctgatcagatgaaacactcacctaatttaagttttgagcctaacttctgccaggataaccctcgaagtcccaccagctctaaagaaagcccccaggaggcaaaaaggccacagtattgttctgaaacccagtccaaaaaagtatttttaaataaggctgccgacttcattgaagagctatcctcccttttcaaatcccacagctccaaaaggattagacctcgtgcctgcaaaaaccacaagagtaaactggaatctcaaaacaaagttatgcaggaaaacagctccagtttctcagatctgtcagaaagacgagaaagatcttctgttcccatccctatccctgcggataccagggataatgaagtgaatcacgccctggaacagcaggaagccaagaggcgtgaagcggagcaggctgccagtgaggcggctggtggagacactacaccagggtcttccccttcatctctgtactatgaagaacctctggggcaacctccccggttcactcaaaagttacggagcagagaagttccagaaggaactcgagtacagttggattgcatagtggtaggaattccaccacctcaagtaaggtggtactgtgaaggcaaggagcttgaaaattccccagatattcacatcgtccaggcaggaaatctgcactcactgaccattgcggaagcctttgaagaggacacaggacgctattcctgctttgcttctaacatctatgggacagattcgacttctgctgagatttatatagaaggggtttcttcttctgactcagaaggcgaccctaacaaggaagagatgaatcgaatccagaagccaaatgaggtgtcatctcctcccactacctctgcagtcattcctccagcagtaccccaagcccagcatttggtggcccaacctcgtgtggcaaccatccagcagtgtcagagccccaccaattacttgcagggattggatggaaaacctatcattgcagctcctgtgtttacaaagatgctacaaaatttgtcagcttctgagggtcagctggttgtctttgaatgcagagtaaaaggagctccatctcctaaggttgagtggtatagagaagggactttaatagaagattctccagattttaggattttacagaaaaaacctcgatccatggcagagccagaggagatttgcaccttggtcattgctgaggtgtttgcagaagattctgggtgcttcacatgtactgcaagcaacaaatacggcacagtgtcaagcattgcacagctgcacgtgagaggaaatgaggacctcagcaacaacgggtctcttcactcagccaactctaccaccaacctggcagctattgagccacagccctccccaccccactcagagcctccatctgtggaacaaccccccaaacccaaactcgagggggttctggtgaaccacaatgagccccggtccagctccaggattgggcttcgtgtgcacttcaacctgcctgaagatgacaaaggaagtgaagcatcctccgaggctggtgtggtgaccaccagacagaccaggcccgattctttccaggagaggttcaacggacaggcaacaaaaaccccagagccttcttcccccgtgaaagagccccctccagttctggccaaacccaaacttgattccactcagttacaacagcttcataaccaagtcttactggaacaacaccaattgcaaaacccacctccttcatctcctaaggagtttcctttcaacatgactgttttgaactccaatgctcccccagcggtgacaacatccaataagcaggtgaaggctccttcatcacagacgttcagcttggcccggccgaagtatttcttcccctccacgaacaccaccgcagcaactgtggccccttccagctctccggtgttcactttgagcagcactcctcaaactattcagaggacagtgagcaaagaaagcctcttagtgtctcacccctctgtgcaaaccaaatctccaggagggctttccatccaaaatgagccactcccaccaggcccaacagaaccaacaccaccaccattcacattttccatccccaggggaaaccagtttcagccccgctgtgtgtccccaattcctgtctctcctaccagccggattcagaacccagtggctttcctcagctctgttctgccttctctccctgccatcccacccacaaatgccatggggctgcctagaagtgcaccatccatgccatcccagggattagcgaagaaaaatacaaagtctcctcaaccagtgaatgatgataacattcgtgaaactaagaacgcagtgattcgagacttgggaaaaaaaataactttcagtgatgtcagaccaaaccagcaggagtacaaaatttcaagctttgagcagaggctgatgaatgaaatagagtttcgcttggaacgtactcctgttgatgaatcagatgatgaaattcaacatgatgagatccccacgggcaagtgtattgctcccatctttgacaagagactcaagcacttccgggtcacagaaggctctccagtcacattcacctgcaaaattgttgggatacctgttccaaaggtttactggttcaaagatgggaagcagatttctaagagaaatgagcactgcaaaatgaggcgagaaggagatgggacatgctctctgcacattgaatccactaccagtgatgacgatggcaactacaccatcatggcagccaacccccaggggagaatcagctgttctggccacttgatggtacaaagtttgcccattcgcagtcggctaacctctgctggtcagtctcacaggggaagatcccgagtgcaagaaagagacaaagagcccctacaggaacgctttttccgaccacatttcctgcaggctcctggggatatggtagctcatgaggggcgcctctgtcggctggactgtaaggtgagtggtttaccgcccccggagctgacatggctactcaatggccaacctgtgctaccagatgcctcccacaagatgctggtcagggagaccggagtccactctctgctcattgacccactcactcagcgcgacgcagggacctataagtgcatcgctaccaacaaaaccgggcagaattcttttagtctggagctctctgtagtagccaaagaggtgaagaaagcacctgtgatcctggagaaactacagaactgcggtgttcccgaaggccaccccgtgagactggagtgccgcgtgataggcatgcccccacctgtgttctactggaagaaagacaatgagaccatcccttgcaccagagagaggatcagtatgcaccaggacacaacagggtatgcctgccttctcattcagccagccaagaaatcagacgctggatggtacacgttgtcagccaagaatgaagccggcatcgtgtcgtgcactgccaggctggatatatacgctcagtggcaccatcagatcccaccgcccatgtctgtccggcccagtggcagtcgctacggatctctcaccagtaaaggacttgacatattttctgccttttcctccatggaaagcacgatggtgtattcatgctcttctcggagtgtagtggagagtgatgaactttaagaatgtctaggtacctgctgtgtaagagagcggactgtggagggggaatgagaacaagccagacttggtggtttccaagcaaccgaagttgagtaagttcccacactgctggacctgtggcaaagagtgctttgaataagtcagctagggattcttgcagtctcagctgagggagaaaggtagggctgtgccttctaaagattccaacagagatgtgagaagataatacagatgaaccaaagatgtcacacagttgccatccactgctttgggaaaaaactagcatgctcccctgctccctgttgtgttagggatgtttaggtcatactaggagcaattaggagccatatgcctgggctgagaagagctaggcagtagtgaccttaggatatgactaactcaccaaacaatgccaaggagaaaggcggacaggtcaccatcacctttcatcgattacatgtatagcagtagttttggtgaattcaccaaatcagcttccacttagcattaggaggtcatgccatacaactcacgtatgcgggcaaacacttttgatttgcatatcctgggtgtactgagccacataataaggtgtcaaaatgtgcttgagattccaaaaacttgctgaaacacttgatattgcacagtgcacttattttgtggccaaagcatggccttaccagcttgtctgcactattttcttttgggtggtgactgtttttttctgactttgcatatccctagacactagaactaaaggattggtaataaaccaatcagaaagaaatcctctgtggggtcactttaaaaactactagcttcaactaccacttacaaaatgtgcaagagtcatcatttgcccataaaatacacctcatgggctcctacccctttccccaaaagtctgaaagtgtaggaggaaggaagagatacaaacaaggagaggaaatgatgggagagtgttgtttttgtcacttgccccagcagagcaggggttttggaaggagaggtctttaatagctttgaaatgctttgagatcattggtcaaattgcattttctatgtagagaatattctgctaggtggaaaagttgggagaaaggggaatatgcatctttactctaatcaccaattcaaaccctgcctcttaaggaatttttagacttaagttcactgtgatatccctagtacctagaagagtacctagcacaaagtagacattcaataaatatttgctggttgaatgaatcttctgttattatgtctattataagataacctaatcttatattctgcaggaatatgccacccacacaccagtccaaacactgccctgggaatgctcatcacagcatagtttgctctaggctgtgcagggaaatgaattgcaggtgtctgttttcaattccctgtgctggaatccctggtgctgtctgtgcgaagcacactcagctggcattgtatttgtgtgaacagacagtaactgcttagaaaggcttgaaactgtcttcacttcaaggcaaggatttccagcataaaaataaattcattcactggaga

SEQ ID NO: 91807 - DNA, 2384 bp, Homo sapiens
  misc_feature (1975)..(1975): n is a, c, g, or t
  misc_feature (2194)..(2194): n is a, c, g, or t
  misc_feature (2364)..(2364): n is a, c, g, or t
  misc_feature (2368)..(2368): n is a, c, g, or t
aaaaataatgccattttttgaatgatgaactatggtataatgcatttagtgttcattccaaccgtcaatcaataaataacatgggcctctagctataagggcaattctataggtaaaagaactgattgacccccacccccataggtgctgtcctgctatggaatccctttgctcagttttctcctgtccaatcaggtggaatgtttcacaggcacatggtttatacagctcaaaataacttgggacctgtgagctgacaaatgctctggctccggtggtgacaggttgtccagcttcttacagccatcttcactgaaactaaggttaactcctcactctctatggacggctactctctatttccaagggcgtgaagaatttccctcttctcctgtgctttcatctaaaagttctccctggataattatcattgcagtggagtgcctggattggacatcctcatctgggtcaactaaaaaaagaaagcatgcaagacgacagcatagaagcttctacttccatatctcagcttctaagagagagctatttagctgaaaccagacatcggggaaacaatgagaggagtcgagcggagccctcctccaacccttgccatttcggcagtccttctggggccgctgaaggaggcggaggccaagatgaccttccagatctttcagcctttctgagccaagaagaattagacgaaagtgtcaatttggcaagactggccatcaattacgaccctttggagaaggcagatgaaactcaagctagaaaacgactttctcctgatcagatgaaacactcacctaatttaagttttgagcctaacttctgccaggataaccctcgaagtcccaccagctctaaagaaagcccccaggaggcaaaaaggccacagtattgttctgaaacccagtccaaaaaagtatttttaaataaggctgccgacttcattgaagagctatcctcccttttcaaatcccacagctccaaaaggattagacctcgtgcctgcaaaaaccacaagagtaaactggaatctcaaaacaaagttatgcaggaaaacagctccagtttctcagatctgtcagaaagacgagaaagatcttctgttcccatccctatccctgcggataccagggataatgaagtgaatcacgccctggaacagcaggaagccaagaggcgtgaagcggagcaggctgccagtgaggcggctggtggagacactacaccagggtcttccccttcatctctgtactatgaagaacctctggggcaacctccccggttcactcaaaagttacggagcagagaagttccagaaggaactcgagtacagttggattgcatagtggtaggaattccaccacctcaagtaaggtggtactgtgaaggcaaggagcttgaaaattccccagatattcacatcgtccaggcaggaaatctgcactcactgaccattgcggaagcctttgaagaggacacaggacgctattcctgctttgcttctaacatctatgggacagattcgacttctgctgagatttatatagaaggggtttcttcttctgactcagaaggcgaccctaacaaggaagagatgaatcgaatccagaagccaaatgaggtgtcatctcctcccactacctctgcagtcattcctccagcagtaccccaagcccagcatttggtggcccaacctcgtgtggcaaccatccagcagtgtcagagccccaccaattacttgcagggattggatggaaaacctatcattgcagctcctgtgtttacaaagatgctacaaaatttgtcagcttctgagggtcagctggttgtctttgaatgcagagtaaaaggagctccatctcctaaggttgagtggtatagagaagggactttaatagaagattctccagattttaggattttacagaaaaaacctcgatccatggcagagccaggtaangatgatttcaactttaatttattagtatatgagtgattttatatatacaagaatacataatgaagttacactgagatgaataaaaagtgaaaaataaagttttaggaaaaaaagatccaaatgggccgggtgcagtggctcatgtctgtaattccagcactttgcgaggccgaggcgggcggattacttgagatcagaagttcaagaccagcctggccnacatgacaaaatgaaaccccatctctactaaaaatataaaaattagccaggcatagtggcgcacgtctgtaatcccagctacctgggaggctgaggcaggagaatcacttgagcctgggaggtggaggttgcagtgagccgagatcgtgacactacagtccagctgcgcnacanaacaagaatctgtctc

SEQ ID NO: 91808 - DNA, 415 bp, Homo sapiens
ctcacctagtctcatggcttgaagtattgtttgtttgctgatgcctccactggaatgaaagctccatttaaaccccgtgggtgcagcatgtttttgtctgttttgcacactgctatatccatagaatctagaacagtgcctggcacacctagtaagcactcagtaaatatttgttgagtgaaatgattctattattgttatttttattcccattttacagatgaggaaacaggtttagagacaataaataaattaccagagttttgtagctaggaaattgaactgggattcaaaaccatattcttaacctctacatgtactgccttccttaaatttgatgtaattgttagtgtttttctgtatgtttagttgaaacctgcctctcagtaacttccaccacaatatatatgtatga

SEQ ID NO: 91809 - DNA, 372 bp, Homo sapiens
aaacatctgtcatggaggcaggtcattatgaggaatcttttcctgcctaaaggtgccttagaaaggagcatgtttgggaaaacaggaagtaggtaagttcagagtaactgccagtgccacagatgtgcagatcaaatatcatgattagttcagccaacttctctcctctgtcctagaccagcccaagcctgggacacggggaaggcaccaaaaaactccggtgttgtgaggtattttattcacctcgtaggggagtgttttagttagaccttatttattttatctattttgaggttaaaactgatgtcggtattatgatccctccaaaacagagcttccaaaaaattctgttgtttcataacattagtactt

SEQ ID NO: 91810 - DNA, 542 bp, Homo sapiens
aactggggaaatcaaaatttggcagatcgtatcaaaatctgggttgcgacattgtactatagttctgcaagaagttaccattgttggaatggcatacagaatctctctgccttgcttctggcatgtgaacctacaattatctcaaaaatttcaattaaaaaaagagagcttcaaacattgactcatcttttggtctcctgtttgaaattttgtcaaggactcctactttaaatcattttctttatgaaagtcacgttaagagtcaaaaggaatttgagaaatcatttagtccccacattacagaaatagatttccaaaaatactctagaatctacacttcatcttaacatgctcaaattgttagtttaatcgatcaagtattccttaagtatagcaggaatagacagatagccacaagggtatttaaaatgctcctctgacacataattcacaatacaattcttttcccaggaattttagtggtgtactagtcactgagctattatctcacttcgtggtagtatcttcatcagctcagtcaa

SEQ ID NO: 91811 - DNA, 663 bp, Homo sapiens
ttattcctctgtatatgtttcctccacacatacagagctacttttaccattttttctttatcactggtttgcagtaatttgattaaaatattccttggtgtggttccctccccctccacttttcttctgtttcttggatctgacaatgtaaagttttcctcaaatttggaaaaaaaaattgtttaagagatggggtcttgctgtgttgcctaggctggactcgaactcctgggttcaagtgatccctccacctcctgagtagctgggattacaggcacacaccactgtgcacagctcaaatctgggaaatttttggccattatttcttcaaacatttatctgtctccccttctttctcctttgcttgagactccagttacatctgtgtgagacttctagatgttgtcccctaattcactgttctgttttttttgtttgtttgtttttctttgtctttttctctctgcgattcattttggttagtttctattgctgttttcaaatttagtaatcttcttcagtgtctaatctgctattaattccaatcagaatatttgtgtttcatatattgtatttttaatcaattaaagttcagttcaatttgtgtcttttgaaaaaaaatagtatcttccatttctctcctcctcatgatcattctttcct

SEQ ID NO: 91812 - DNA, 628 bp, Homo sapiens
gcggccgcggcgcggagccgagcgggcgtccgtcgccggagctgcaatgagcggcgcccggaggctgtgacctgcgcgcggcggcccgaccggggcccctgaatggcggctcgctgaggcggcggcggcggcggcggctcaggctcctcggggcgtggcgtggcggtgaaggggtgatgctgttcaagctcctgcagagacagacctatacctgcctgtcccacaggtatgggctctacgtgtgcttcttgggcgtcgttgtcaccatcgtctccgccttccagttcggagaggtggttctggaatggagccgagatcaataccatgttttgtttgattcctatagagacaatattgctggaaagtcctttcagaatcggtaagatctattttggagaaatctattatttggacctaaatcgtaagtcatgaaatagccatcctgtaaatatgacagtttaaggggtctttctgagttatagatatggtttaatttactcaggagtatgcccatctgatgtgttcactttagcagcacatatactaaaaaaaaggaaaaaaaaactggaacgatacagagaagattagtgtggcccctgtgcaagggtgacacaccaattcatgaagt

SEQ ID NO: 91813 - DNA, 561 bp, Homo sapiens
gcggccgcggcgcggagccgagcgggcgtccgtcgccggagctgcaatgagcggcgcccggaggctgtgacctgcgcgcggcggcccgaccggggcccctgaatggcggctcgctgaggcggcggcggcggcggcggctcaggctcctcggggcgtggcgtggcggtgaaggggtgatgctgttcaagctcctgcagagacagacctatacctgcctgtcccacaggtggttctggaatggagccgagatcaataccatgttttgtttgattcctatagagacaatattgctggaaagtcctttcagaatcggtaagatctattttggagaaatctattatttggacctaaatcgtaagtcatgaaatagccatcctgtaaatatgacagtttaaggggtctttctgagttatagatatggtttaatttactcaggagtatgcccatctgatgtgttcactttagcagcacatatactaaaaaaaaggaaaaaaaaactggaacgatacagagaagattagtgtggcccctgtgcaagggtgacacaccaattcatgaagt

SEQ ID NO: 91814 - DNA, 347 bp, Homo sapiens
atttctctagcaattctaatgaaattaaaatgaaatgaaagttatatactcttagtctttgatgcgaagaaaacgtttctttttctttgttctaggtggttctggaatggagccgagatcaataccatgttttgtttgattcctatagagacaatattgctggaaagtcctttcagaatcggtaagatctattttggagaaatctattatttggacctaaatcgtaagtcatgaaatagccatcctgtaaatatgacagtttaaggggtctttctgagttatagatatggtttaatttactcaggagtatgcccatctgatgtgttcactttagcagcacatatact

SEQ ID NO: 91815 - DNA, 812 bp, Homo sapiens
gcggccgcggcgcggagccgagcgggcgtccgtcgccggagctgcaatgagcggcgcccggaggctgtgacctgcgcgcggcggcccgaccggggcccctgaatggcggctcgctgaggcggcggcggcggcggcggctcaggctcctcggggcgtggcgtggcggtgaaggggtgatgctgttcaagctcctgcagagacagacctatacctgcctgtcccacaggtatgggctctacgtgtgcttcttgggcgtcgttgtcaccatcgtctccgccttccagttcggagaggtggttctggaatggagccgagatcaataccatgttttgtttgattcctatagagacaatattgctggaaagtcctttcagaatcggctttgtctgcccatgccgattgacgttgtttacacctgggtgaatggcacagatcttgaactactgaaggaactacagcaggtcagagaacagatggaggaggagcagaaagcaatgagagaaatccttgggaaaaacacaacggaacctactaagaagagtgagaagcagttagagtgtttgctaacacactgcattaaggtgccaatgcttgtcctggacccagccctgccagccaacatcaccctgaaggacctgccatctctttatccttcttttcattctgccagtgacattttcaatgttgcaaaaccaaaaaacccttctaccaatgtctcagttgttgtttttgacagtactaaggatgttgaagatgcccactctggactgcttaaaggaaatagcagacagacagtatggaggggctacttg

SEQ ID NO: 91816 - DNA, 777 bp, Homo sapiens
gcggccgcggcgcggagccgagcgggcgtccgtcgccggagctgcaatgagcggcgcccggaggctgtgacctgcgcgcggcggcccgaccggggcccctgaatggcggctcgctgaggcggcggcggcggcggcggctcaggctcctcggggcgtggcgtggcggtgaaggggtgatgctgttcaagctcctgcagagacagacctatacctgcctgtcccacaggtatgggctctacgtgtgcttcttgggcgtcgttgtcaccatcgtctccgccttccagttcggagaggtggttctggaatggagccgagatcaataccatgttttgtttgattcctatagagacaatattgctggaaagtcctttcagaatcggtctgtgaggtaaagggaatttcatccccctgtaggatgaggaaaccaggtggctactacacagcggtttctgagccctggccggaattctgttgacagcgtcctgtgaaatgggaccactccccagtaaaccactggggctgaaccccactccattggtcactcttgctgcttacctatgagggaggagcaaacagcctcatacctcattagtgtgggtctttcccttggaaggccaagcttcttagtgccgccattctggaacgcagtcttcaccatttcttgtctttggggattttttttttcctcttcacaagacagacctcagaatggaaacaatttttttcaacaccctccttccctttttgcagataaaatgaatcacacaagtcctttct

SEQ ID NO: 91817 - DNA, 511 bp, Homo sapiens
ttttttttttacaaagaaccatgtggtatctacattttgggttttgcaggtcacataggtctctgtggcatattcctctttgttttgtaacaatcctgtaaaaatgtgaaaaccattcttagtcctggggttgtacaaaaacaggccagggcaggctttgaaccatgggctgtagttggtgatttctgacccattgaaaacaagttgctattcattttattttggaaagcaattttttcctaggtggtagaagacacaactgtcaattcagcaacgtgacataagaggtacactcagataaaacaaaaacaaaacaaaacaaaaagggtatcatgatcaggttggaaaatcagagcccaggagagtatctgtgggactgagaggtctggggtctaacaggagagcagagggcaccactgtcaccgcagcctccacctcccacaggaagcaactcagatccggccaactggacacttgaggatgactgtgtgtggggccaggcgcaggggct

SEQ ID NO: 91818 - DNA, 451 bp, Homo sapiens
ccctggtctccacgctcttgcccatggccccctccaggctattcccgggtttctcagccttggcactattgactttttgggccaggtaattttttgttgtgggcagccatcctgtgcattggaggatgtgtgtgtctagcatttctggctttaacctgctagatgccataatcgtcaaccccctccccagctgacataaccaaaaatgtctccagacgttaccaaatgtcccctggggaaacatcaccctggcttgagaaccagtggtctagtctcaacacagtcaccagagaaatcttattaacattgaagtctgcctgtgtcccttacagccctcccatcctacgccagtaaacaccaaagctctccaatgggccgcaggccctcgtgagctccctaactcatctcacgccatccctgctgtagccagtgactgtgccatcctatctca

SEQ ID NO: 91819 - DNA, 138 bp, Homo sapiens
accacaagctaaaatttattaacctttgttcacaatcctgaattaatccctatttactgtgatgacagtctgaaattaaaacttttgaaaagaagaatacctaggccgggtgtggtggctcaagctgtaatcccagca

SEQ ID NO: 91820 - DNA, 181 bp, Homo sapiens
atttttgtatttttagtagagatggggtttcaccatgttggccaggctagtctcgaactcctgtcctcaagtgatccacacgcctcagcctcccaaagtgcttagattacaggcgtgagccaccgtacccagccaaaatgcttatgttatacgttatttaaaaagaataccagtagtccac

SEQ ID NO: 91821 - DNA, 399 bp, Homo sapiens
acctattatgtgccatgcatgatgccagggacaaagtaggaacctgatctactcctggggaccaaggaggcttcctttcgagaagtgatctggagctgaggtgtgggggctgagtaagagtaacctaggtggagggtgctcctaactttaagaacagtctctgtgctgggcctgtggagggagtgtgctgcgtacccaaaagacttgaggaaagaccagactggagaccagaataccagcaggaaatggctgccatagtcacacaagcaagatgatggtcacttggactagggtgggtgccagaggagacagaaacatgaaattatgagatgatttgtagctagaatcaacagtacttgctgactaactgaatgtgggaagtggagtaagaaagaaaga

SEQ ID NO: 91822 - DNA, 227 bp, Homo sapiens
  misc_feature (36)..(37): n is a, c, g, or t
tgtcaccagtcactgctgggatgggagaggggtccnnatggggccgggaagccatgaccatgggagaacatgggatgaactcagcacacacactttactcaggttggaagcagaacgaaaacccaacaccactggcgggcgatgtggaggggcagggaaggaggaaggtgctggggccaggcctgcggggacaaggtgatcagcaaaaaacagcagggagggcagga

SEQ ID NO: 91823 - DNA, 771 bp, Homo sapiens
  misc_feature (771)..(771): n is a, c, g, or t
cagctgggaaagcaaagagataataaaaaacagaggtaatggcatggcacaatggctcaatgcctgcaatcccagcactaatgggaggccgaggcgggcagatcacctgaggtcaagagttcaagaccggccgggtgcggtggctcacgcctgtaatcccagcactttgggaggccaaggtggaaggtttgtttgagctcaagagtttgagaccagcctgggcaacatggtgaaaccccgtgtctactaaagacacagaaaaatagccaggtgtcgtggtgtgtccttgtaattccagttactcaggaggctgaggtgggagaatcgcttgagcctggggaggttgaggctgcagtgagctgtgatcacgctgttgcattccagtctgggtgacagaaggaaaccctgtttccataaaaaaaagaaaaagattgctgaccctggattgagagatttttattagatttttttttttggcaagtaaacttattaggtgttggtgtatatttgcatatgtggcgtagaatatttggtgtagaacattcatctttttgttatattaacagccattgaagaccatttcttatacgtactactttttcattgatcagctacatttttgatggttacttttcctacatttttgatggatgtttttgctatatcattttaggttactatttttcttttactatcttctggcttccattctttatcacttattgttagctataagccttatcatcatccttttaaaggtaatctgtcccn

SEQ ID NO: 91824 - DNA, 707 bp, Homo sapiens
  misc_feature (692)..(692): n is a, c, g, or t
cagctgggaaagcaaagagataataaaaaacagaggtaatggcatggcacaatggctcaatgcctgcaatcccagcactaatgggaggccgaggcgggcagatcacctgaggtcaagagttcaagaccggccgggtgcggtggctcacgcctgtaatcccagcactttgggaggccaaggtggaaggtttgtttgagctcaagagtttgagaccagcctgggcaacatggtgaaaccccgtgtctactaaagacacagaaaaatagccaggtgtcgtggtgtgtccttgtaattccagttactcaggaggctgaggtgggagaatcgcttgagcctggggaggttgaggctgcagtgagctgtgatcacgctgttgcattccagtctgggtgacagaaggaaaccctgtttccataaaaaaaagaaaaagattgctgaccctggattgagagatttttattagatttttttttttggcaagtaaacttattaggtgttggtgtatatttgcatatgtggcgtagaatatttggtgtagaacattcatctttttgttatattaacagccattgaagaccatttcttatacgtactactttttcattgatcagctacatttttgatggttacttttcctacatttttgatggatgttggctgaccagatgcgtggactgaccccggatgttggntgggggtcctctaga

SEQ ID NO: 91825 - DNA, 184 bp, Homo sapiens
cactcttaccttttcttccttttaattctagtgaggatgctgacacaacctgtgaccttaggcaaattacttaaaactaagtctacatttcttggttgtttttttttgtgtgtgtttgagtctccattttcttaactataaaatgggatattagtatctgccttgcaactttattgtaatgtat

SEQ ID NO: 91826 - DNA, 332 bp, Homo sapiens
tgctctacagtaaatatccctgggatgagtatcttgttcatagctgaaaatgcagaagttctggctcattccataaaatgtctttgaagattatattatatccctgtctgcctccaagtgccacccctaaacactacttcagtttgttagttaggtaacttgtgttttggatgctatttatgtcatatttgtaaatgacaagaattgatcattggtaaaatgttacataagttagtacagaattgtattcttacagtgaaggacatacaaaaattgtgtctgagttatgacacactttcatttcggtaaatcgtgattttgtcaccttatga

SEQ ID NO: 91827 - DNA, 492 bp, Homo sapiens
aggaatctctgatcccagaaagcagcacagtttgcagttgtaagagcaattctgtctacactgacccagacatccctttccccaatctgggaccttctgagaccagcaggatgagaagcagtgttggcccagatgctaggggtgggtcaggtgtgacagtgaatggctggcaagcatcccaacagctggaaacagctgcaacttctgaatggcagggaaacttaatttggtgatgtcagtttctctgggcagttggatgaagacttgaacccgtattgtcaggagtttcaaaggtgaccaagcaaaatgaacacgtattccttactctctcttctacactcaccatgtactatatgtgaggcccgtctaaactctagggatcagctgggagccagacagaaagagtattccccttttaaaggatgccacattccagtgctggagctggacaggacacctggacagggtaattgcatgtcctggtcagtgctg

SEQ ID NO: 91828 - DNA, 1722 bp, Homo sapiens
atttaaaaaaaaaaaaacaacaaaagagtttgtgtgtggccaggactaaacagctgcttcttaatttttgaattttaaaactaatctattttatttaaaaaaaatcaagtactttggaagtgaataaagtaagagatagcctgtctcactttccagaggtagcagtcactaatactgtggtgagtgattttactcaaaggaaatcacactattaagcagcttggttttgacatgttatgttgtggtcatcttttcatgtcaatacatagattaatcttttatttcaaatgtctacataaaatatcactacccacataacctataatttgtgtggccagcaatttattgaacactaaaatgttttaagttttcttattgctaacaatgtcacagtgaacatttatatattcattaaatccttttcctcatgtatctttgcactcttgtgctagtatgtctatagtgtgaatacattcataaatttcttgatcaaagctaggtcaaagttacattcattttaattttggtacatatccataaattctccataaaagtaggaccaacttacattaccaccaatagtgtatgtgagccttatttttatgtatgataggactttttttagtccaaatgttcctatagattttctgggttttttttttttttttgtccttggaagaataaccttccttccaccaagtccaagaacctgagaattttaatcatataggttttagatttcctttagcagcagagactgacttgctgtatagagggaagtcaagtagtgactaactcactatatgtcaaacacatcattactcttctcttttcctactttacatgtaatggttgcgaggaccaactttcaaatgagctaacttgggtgagacgttcactaaagtaccaagcacaatacaaatgcatcttcgagttctttgggcctcactttccctatctgaataataaggatagtaatcccttgccttttctcaaaccagttcaactcagcaaacacttcctgagcacctgctacatgccaggcaaaatgtgaaatttgcatgctatgaggctaaatggtactgattctcaaaacaaggagctcatagtctaaaaccatttttctttcttttttttccccctaaacaacctcttaaaggggtaagaagttagggggttgtttattaagaacccctgaagagcaaccctttaccactctcttaaatttgaaaaattccaaaataatattaacacctcttgactagaaaaggaaaaaaaaaggaacatgccgtatgaagagcctctccaataataaatgcaaagcagctgtcaaaatatagagtcaagtgatactttcataaagtgtttgcacaattagaaaatgttatcctttttctcgggagaaatgggacatttttattttctctgctaagtgaaatgcaactttttgaagaatcaacatgcttgacatttttacaatgtacataaagaactgaactattattaaaacaacttacacactccattgcttataacttttgagagaatgaaaagaaccttaaacagaatgtgcctgtggagcttcgctttagaaatgaaatacccaaggtgttttaactacaactgtctacatgtaatagtgtgtctgcataatgactttgtaaatattaactgcaattctgtatttgctttcttgatatgacttttaacatttaaactata

SEQ ID NO: 91829 - DNA, 356 bp, Homo sapiens
gaacataccagtaagcctagtagataataaaaagggtaaaaactgaaggaagaaagaaaatggtcattatttatagctcaaattactgtctatgtagaaaatccaacaaaatctatagaaaatgttttggaaataacaggagagttcagcaaaattgtgggtaaaagatataaaaattaacagcattcccatatgccagcaacaaacaattagaaattgtatttttaaagagatactatttataaaaaggaaaaggaaagtttcaaaagtattgacccacagataatttattcattataaaatgaaggaaaaaaaaaaacactgtgcaatctgccttttaccaagccaaccgaatg

SEQ ID NO: 91830 - DNA, 106 bp, Homo sapiens
ctctgaaagggagacaaactgcccatcctctgaggacttggggtggattatctccacaccctcccaagcagcgtggtgaaggcagagggtggcctgcggcggcgcg

SEQ ID NO: 91831 - DNA, 179 bp, Homo sapiens
agagggaaattctgtctcaaaaaaaaaagtgttgactagacagaaggtgatattgctgttggggaggatggggctgaaccctggagggcaggggtgctaggtactttttcctacattgacttgatagaaattaggaggccacaggccaggtgtggtggctcacgcctgtaatcccagca

SEQ ID NO: 91832 - DNA, 210 bp, Homo sapiens
gtttctgtatcgttttgtttcaactcatgtattcactgaactaaatttggacacttaacagcaaattgtgttgtggttaacccttgatgcttgtctttctaacacactattaattatgatgattctaatggatttcattataaaaatatttctggcatgatttttaagttaaatgcttctctgttctttaacatgactgatgtataaaat

SEQ ID NO: 91833 - DNA, 226 bp, Homo sapiens
ggctaattttttgcattttttagtagagatggaagattttgttttaaaagagatgggttgtgtgtgtgtgtgtgtgtgtgtgtgtgtgcgtatgtgtgtgtactggtcaccgtgtctgtggtgtattttatgtgtcaacttgacaggccaagggttacccagattatttatttttgagacagggtcttgctctgtcacccaggctggagtgcagtgacaccatctc

SEQ ID NO: 91834 - DNA, 428 bp, Homo sapiens
ctaccttaagagcaacaggttaccttagctttatggaggcaaccgtatgtggttgtgtgtcggcgaggaggtggaaacagcactggcatttgttttctagcaacgtgctcaaacagccattgtcttgaacttggtgcagacttccgccaagctacatcacctcttaattgatacagcttgagactatctcccatcacaaagaatgcttctagatctgcctggggacctgggacattccatttctcgtgccagagaaccacaatatagctatccttctagttaaactatccttctagggtcctgttaaacctagtaacagaaacttggtatcaccacagcaaatattaatcaatataatagttagtctctgcattctttgttattccatcccttactgcctagagaatttgcatgtcacattaagcagt

SEQ ID NO: 91835 - DNA, 639 bp, Homo sapiens
ataattacaggccactcttgctctcaagtcccattgtaaaggaaaaatacctattaccctgtcttcattccaggtattgaaatgcttcttacaaagggatctaacagatttcttagcaggggcccagggaaacacatttatttaatttttttattttttcaaaagcaatattactgctttgaaatctttcaaagtgaaggctgttatagagcttaataatggatctccttttacttgcctgaaattattctgaagcctgttaagagcatgccccgtattatccaaatagccatacagttaaatcaattttaaaacattgtaaaaggctgttttaacatcaatttttattttaattgaagcaacatacacatgtggtttagaaaaccaaattgtaaaaagacagcagctttgaatccctcctccccaccctgccccttccacacagtctgttactggagactgttgttcggtggaggattttgtgactatacctctgtcttagtcagggttctctagagggacagaactaataggatagatgtacatatataggggagtttattaaggaatattaactcacgcaatcacaggtttccacaacaggccgtctgcaggctgaggagcaaggaagccagtcca

SEQ ID NO: 91836 - DNA, 527 bp, Homo sapiens
caagaatctggagttctgaggtacaagggcaagagaagaagggtgtcttagtgagagagagagagggagtgcactccagttcacctttcctttgcttttttgttctatacaagcccctcaacactggatagtgcccacccacattggatgaaagtggttcttatttattcagtccactgatttaaatgccagtctcttctggaaacaccgtcacagacatggcctaaaataatgctttatcagctatcagggtattccctaacccatcaagttgacacctgaaattaaccatcagagtgtagaagtgatacagagttccccacctctgcccaccctcctaagctttcacctagttcgagtacaattgtgagaactaggcatatagctttgcaggaaaaagtacagcagagttaaattgatgaagaagttctaatccctggctgcttttcatgctacaagtagatgcagcaaactgaaaacttgccaattatctgaaggtctattgagatgttgcagctgcatgtgtt

SEQ ID NO: 91837 - DNA, 398 bp, Homo sapiens
caccctaaggggcagatatattattctcctgtatactggatcgaatagtgtctctgaaaatgaatgtccatctggagcctgtgaatgtgaccttatttggaaatacggtatttgcagatgtaatcaagttaaaattagatcatactggattagtgtgggccctaatccagtgacagacatggcaaagtctaggagtccccacagttactctcttgcaggtgctatcagtgctactcaactttttatgtttctctcttcacgatccccatcactactgcctttgttccaggtctccttggcttgtgcctggaccatcgcctaacttctaacggcctctgtgtttcctctggcctctcctcactcaaacccattgtaatcagatcacagtcccagaacca

SEQ ID NO: 91838 - DNA, 328 bp, Homo sapiens
acgcccatctctgggggtcctgccatctctttacaccttccgctccgtgggcaccttcaatatcatcgtcacagctgagaacgaggtgggctccgcccaggacagcatcttcgtctatgtcctgcagctcatagaggggctgcaggtggtgggcggtggccgctacttccccaccaaccacacggtacagctgcaggccgtggtcagggatggcaccaacatctacagctggactgcctggagggacaggggcccggccctggccggcagcggcaaaggcttctcgctcactgcgctcgaggccggcacctaccatgtgcagctgcgg

SEQ ID NO: 91839 - DNA, 376 bp, Homo sapiens
aacacagatgcaaatggtatctattttttatggagaagaaaggacttctcagaggacaaaaagcccacagttcagagtcaagagatgtggagaagaatggactagagaaacattcagaggaagtggtaagaggcaatgtactgaggagccactcagtaggaaccaagtgactcctagtcaaagaatatttccaggcctgcgtgtagggcaacctgtcaacttatgctctacaagacttcagaatgataatgaagcagtaatactatgtgcctcccactggaataggaatactgatttccattttctaccattgtaacttaggtttgtgcggatcagacaaattgtaatttttagttcatatacatcaagaggatcc

SEQ ID NO: 91840 - DNA, 226 bp, Homo sapiens
cacccaaacctgggcaagctgtgttagtcaggaagaggctgcagcatacggagaagcctcacttgtgggtcctgagtccctctctcccacactaagcatgctttggtttgcaggaaggtcatgcattcagattacaccctgataggggcacccggccatggagttgtgtgggactgaagcctgacccactgtttgcatatccagccatgcttcctggtacagaaac

SEQ ID NO: 91841 - DNA, 574 bp, Homo sapiens
  misc_feature (282)..(282): n is a, c, g, or t
tatttagctgaatcaaaactccttcaatgtcccataccaacttgttggtgggaaattttcctaactccactgacttggaaaaattcttctattacacgcacaaaaaatacagcagtaatattaaaagaagccaaaataggaaaacaaattcaagctagcttctcacccataacttgattaatgcctttagtttttctacatttcagtttcagtctcgaactcctgacctcatgatctgcccacctcagcctcctaaagtgctaggattacaggcgtgacacncgcgcccggctggaccccgacttcttgtgtggctttgggcgaggcttgccctcctctgggccccacttgctcctctgtaggacaatccgatggttttccaggtcttatccaatggctctaagcggaaggagggacaacattttctgaggcctccagcatgtccagcctgtgtcaaatgcgtgactcgaattgtctcatttatatcccccataacccctgagaggcagctgctatcactcccagctcacgcaggtccacagagtttaagctccatggctcccaaatacatatt

SEQ ID NO: 91842 - DNA, 514 bp, Homo sapiens
ctttcccgttgtagcaccgtctgctctttctgtgaacaatctccaggtctctcctaggatcatctttatttgttctctttattttaagctttcacaataaatactttagttaggctcactatctctttttattcaccccactccgactcttggaattcctgtaatctggcttcctacgtctagctctctagtgattgatttctcaaagttatcagcattccttgtattcttgatcttcattttggtaattatgggtttctccagtgggaattatttctatgtatttgcagtgggaggataaggatggcagaccttgctttgtgttgtttctctttgtgtacttgcctgagtacatcaattagactgtgagcctccagagggtaaggatcaaccattagacattttaaagcataatctccccctaatagatcttccataattatttgtatggtcaatagtattatgttgggctcaggattttggctgaaagttgaataaaagtacatagaaaaag

SEQ ID NO: 91843 - DNA, 435 bp, Homo sapiens
aatgtgtgttcctccagggtagaaatcagatttggagtcatagcagtagccagagaccctggttctgctgtcactagggcttaattctgttgtcagcaatcatcaggagagtagctccatcatatggcttcccagcctcatcattttgacttaaaaaggatgtattcggaaaaatagggggaagtatattcttctgatagggcagccataacaaaataccacagactggatataaacagtagaaagtggtccagattaaggtgccatcagggttgggttttcttcctgacttggggagggctttcttcctgacttacagatggctgcctccttactgtgtcctcacattgcctttcttctgttcacgtggagaaagagagagatcgctgctaggtcttcctcttcttatgaagatagcagttctactgaattggg

SEQ ID NO: 91844 - DNA, 479 bp, Homo sapiens
atgcgggtggatcacctgaggtcgggagtttgagaccagcctggccaagatggtgaaactctatctctactaataatagaaaaattagctaggcatggtggtacacgcctcagtctctgcaactgagacttttatttagttccagttctaaggatctgcctttacaaaataagcaaagaagtaaataaagttttatgcatacagatctagtttagagcaaaacattagaaatagcctaagtgctcacccgtagaagctcaaataagtatcagtacatcacatacactggaatatatccaaatgacaataaagcattaaaagtctcattaactaattaatcttatggaaaattgatcaaaatcaattaagtgataaatgcaatgtttaacaccatatttacaattacaatccaaattgtgtaaagaaaaaaaatgagatctggatgaaaatgtataaaataaaaatgaattttctctaat

SEQ ID NO: 91845 - DNA, 370 bp, Homo sapiens
tagtagagctgaataggttgttagcaatgacttataaatatccctgtgttattactactttctctgctggcagggtttagcccgggatccatggaatccccctgccgtctgcagacagacttcaggggcgggtcagcctcctgaaatgctgggctgtgtttgtgtgtttgtggctgtgagcatttctcaggcaggactgtcattagattcccaaaaggagcattaggttgtcaggcaggagcattcattagattcccaaaagggtctaagaatttaaaaaaggtgaaaaaaggtgacaaactactgatcaggtttaaagcctaccctcatccccagtacacatagcactcacacactcacatgcacacac

SEQ ID NO: 91846 - DNA, 319 bp, Homo sapiens
gtttgaagcacagaatatgagggaaaaaaagggaaaagaagaaaactagagcagcaaggggaaataagatcaatcttttataccatgcttcccttccctttacctttaggctaaaggcaaagtttaagaattgacatgacctcatctgacagaaatgggtgtgggtttttaataaaagtaacaggtacagggattttttaatggctgaagtccatttgctctcctatttcttggttaaatagctcttgcctggtcatttcacaagaattgcaaggcagagtggaaatgtagagaacaatgcaaacaccagtaatactaa

SEQ ID NO: 91847 - DNA, 386 bp, Homo sapiens
ctcccaattaattattttaacaagtgtgtgcagtgattcatgattttcttgatacttctcttcatgcatattgttcagtttttccactatattctttaacatgtcgatatggtttggctgtgtccccacccaaatctcatcttgaattcccacgtgttgtgggagggacccggtgggaggtaatcaaatcataagggcaggtgtttcccctgctgttctcgtgatagtgaataagtctcatgagatctgatggttctatgaaggggagtttccctgcacaagctctctctctttttgcttgctgccatccatgtaagatgtgacttgctcctccttgccttccaccatgattgtgaggcttccccagtcatgtggaactgtaagtc

SEQ ID NO: 91848 - DNA, 185 bp, Homo sapiens
tgagatggagtttcactcttgttgcccaggctggagtgcaatggtgtaatcttggctcaccgcaaccttgtggaagaaatttctaagcagcaaagcattcaagtgtgacctggctgcttctaacagcatatgttcatatgcatgcacaaataaatgacccaaaaccggaacttatatttaaaagg

SEQ ID NO: 91849 - DNA, 415 bp, Homo sapiens
ctcggcaaaaccgctcccacagaggccaccgactttttaccagttggatgcattggctcccagaaacccagccagcttagtgcacttctgcagccgtccttggagctgtgaacatacctggaggggtcagcaagaaactgaaatcaaattcagatcaaatagaagttaagaaatagaaatctcaacacacaggatgtagatctaaatactcacaaaatattgataatgcgcttcagccttctgtgccttgaaagaggttgttctctcgagttcctgatgtttcctcagggcctcagaataaaaaagggactgagaaaggaactagcatttttggggcacctgctgcgtatcccactgtaactaaagcatatcatttaaccttcacgccagctgagggtaggtattatcccacttg

SEQ ID NO: 91850 - DNA, 513 bp, Homo sapiens
taatgtcatcagttaaggcaggaaatggccattttcacttcttttgtgattcttcagttactttgggccatctggatgtatacatgcaggcttgggctcagaggcctgacataacagtcacgtggtaaaaaaagaaaaaaagtgtgtgttggtacagaagtctttttagaggtgcagtgctaagtatttttgccatcttttaacatttgaaatttacatttggtggctgtttacctattaatgcttattttaaattgaattactatgaatgtcttattattctgaagagcatcccatttttattaagaaaattcttgttaagtgtgtgagacttggcctctattagctgatatataaagaggaattaattgcaaaatttacctttggccctagcgctggtgagcaaggcaagacccaggaagcccccaggaacccccaccttcctattttgattctgtcagtgttgagagcattgagagcatcattcaagaatgaatgcattctggctgggcg

SEQ ID NO: 91851 - DNA, 373 bp, Homo sapiens
ctgccaagacttgcagtggcttctgtcactatggaaaccatgtatgatctctgacctccaccagggccaacttcagcctttaaaaccacctggaaataaggaagtgctgagttctagaaaatgtaactttctctttcatctgtatgtaaaaaggtagttgaaaaacagaaccgtgactaaatttagatcatttagccaatcttgatactagtaggggtttttgtataaaacacagtgtgttgttagcattttcttggaagttagcctttggtgcttccaggtaagagcaccaaatctgcttatctctagggttgggaataagaatagatgatattgcttccgttgtgagattttggtccaagtcgggctggta

SEQ ID NO: 91852 - DNA, 773 bp, Homo sapiens
cgcttgtccatgtgctgaaaagaggcacaaatgtccgaacctactgagaatcatgccagtgtaggatgagaacattcctaaagcctcagccctcgagggctacatatttgtttaaggaaaataaggcatgtgcatacactaatgaacaataaaatggaacagtgcaaggtatgattcggggcaatattttataaaggtcaagtacacataggtgggaaacacatctaggaactctcatgagcagggtgggaattaaatgttaaggtgggtgtgagtttatatataatacagagggggtgtattttgaagaagaaatcatgaaaaaaatcacatttagctgtcagccacctcctcatctgcatgttttgccaatcaaggacataaaatctatcattctgtgcttcaagtctccacatagtaactagaagacacagaaaattcttattcattttgaattctgataatttagtgcaggaaatgggtgatggcaaactgattatgtatgaagagccctcattttgctggtgaagcctgggtatgcccagctactaataacaagtggtcaggcaaccatgacagcctccctatgtgaatataatgctaaatgtatctaagcgaatttaggaccacctgttctgatttattttttaatccttcaaatacaacatggagttagatggcttctccatcaagacttcaatctcaaagggcaatactgtgcggcaaaagaagagctggctcctggaggacttctggggccccaggcatggatc

SEQ ID NO: 91853 - DNA, 523 bp, Homo sapiens
tcaaaaacagtgccacagacatgggaaaactcgacaaatattttatcagaacaatcaagtgatttgacttacagcaaaacacaaattagtgtgacttcagaaaatattttcatcatatcttggtcatattttttcatcatatataatccctagcaaagaaacagaggacatgcagaccatatgacatgaggtttcacattagcttgatttgacaaagatgcaaataatgcacagaccatctgtacatgagaaccagatgtctcatttgcatttggatttttccagtagaaatgaatgtggaggctttgagaaatgcattaaatttattttaattgacatagacttagaatgttgagacaaattattttccaggcatcaaatgcaaaggtcagtgtgtgcacttgaagggataaaaataacaatgaaagaagggcaaggcagctgaggtcggcactagaagcatctggaggatatggaaactataaggaggcagatattggaggcacagataaacacccaactt

SEQ ID NO: 91854 - DNA, 660 bp, Homo sapiens
attaaaaccatgtaaggccataaatctagtaatatgatacctgctcagagacttccttagcttgcacggaaaatgcatagacgttgccaacatctcctacgtgcatttctaaaataatacagttggccattgaacaacacaggtttgaacttctcaagtccaatgttatgcagagttttaaaaataaatatattggaaaattttttggaggtatgtgacaatttgaaaaaaacagatgaacctcatagccaagaaataaaaaaattaagaaagtgagatatgtcatgaatatataaaatatatgttggtagtctattttatcatttactaccataaaatgaacacagatctattacagaaagttaaaatttgccaggcgtggtggctcacgcctgtaatgttagtactttgggaagccaaggcaggtgggtcacgaggtcaggagtttgagaccagcctggccaacttggtgaaaccccatctctactaaaaatacaaaaataaattcgccaggcgtggtggcacacgcctgtaatcccagctactccggaggctgaggcagaagaatcacttaaacccaggaggtggaggctgccatgagccaagactgcgccattgcactccagcctgggcaacagagcaagactctgtctcaggggg

SEQ ID NO: 91855 - DNA, 1221 bp, Homo sapiens
ggatgagttcatgtcctttgcaggggacttgggtgaagctggaaaccatcattctcagcaaactaacacagaaatagaaaaccaaacaccgcatgttctcactcataagtgggagttgaataatgagaacacatggacacagggcgggtaacatcacacaccagggcctgttggggggtgggggcctaggggaaggatagcattaggagaaatacctaatgtggatgatggattgatgggtgcagcaaaccaccatggcacgtatatacctatgtaacaaatctgcacatgtatcccagaacttaaagtataatttaaaaaaacaaaagaaaagaagtctcaaaataattttaactcctacttcaagaacccaaagcaaaataaaccataaaaaagaaaaacccaaaataaatagaaaggagggaatattaaagataagagcagagattaattaagttgaaaacaaaaatcagtgaaacaaagagctggattttttaaaaacttcagtaaaattggcagacctctagcaaaactgacagaaaaggtgcaagttaccaattatcagtaacaaaacagaagctatcactacagattctccagacataaaagaggtaattagggaatgctgtgaatagctttacccacataaatgtgacaacttagatgactaatagaccagtttatccaaaaacacaaattgctacacccagccagtatgaaaaagttaatttgagcctgggcaacatggtgaaaccctgtctctactgaaaatacaaaaagtagctgggcgtggtacaggagcctgtaatcccggctactcgggaggctaaggcaggaaaatcgcttgaacccaggaggcagaggttgcagtgagccgagaggcaccattgcactccagcctgggcaacaagagtgaaactacgtctcacaaaaaagaaaaaaattgaatagccctataaactacaacggaaattgaattcatagttttaaaactccccaaaaacgaaacctctaggtccaaatggtttcactgcggaattctaccagacgtttaaaaaaggaatgaacaccaattctagaccatcttttgcagaaaatagatgtaacacttccctatttattttataaaactgattttactctgacactaaaaccaaagacaatacaaaaaaaggaaaagtacaaaccaatagcctttataaatatataagcaaaactcct

SEQ ID NO: 91856 - DNA, 242 bp, Homo sapiens
cgagcgcgaggatccccgttatttgccttctttatggtccaaatggtttcactgcggaattctaccagacgtttaaaaaaggaatgaacaccaattctagaccatcttttgcagaaaatagatgtaacacttccctatttattttataaaactgattttactctgacactaaaaccaaagacaatacaaaaaaaggaaaagtacaaaccaatagcctttataaatatataagcaaaactcct

SEQ ID NO: 91857 - DNA, 236 bp, Homo sapiens
gtctgagctcaggaaagaggtctggctggagtagtttggcgagtcaacgctgaaaagctgataacgcaagagatggagtgcgccgagtagaagggagctttctactgccaaggactgagttaggagaacggacagggagtcgctgaagccaagtgaggagagcggtgccagaggtagagggacatttttaaatccaatgcaagaaaaggaaaaaacaaaaaagctttccaactttc

SEQ ID NO: 91858 - DNA, 371 bp, Homo sapiens
  misc_feature (341)..(341): n is a, c, g, or t
ctcagcctactttttaagcagttgtttcctatgtacagaaatatactcaattattttaaatcgggggaaaaatcctcaaccacaagtaggaacacacccagcactccgaagaggccccttaattgacacattcacctccttagatatctcagctacacgtttgcctggggattgatttttggccattgtgcgacgtctagtgacatgaacactggatgtggaatgtgagcattccctttgtacgtatggtctgcgtggtgtgtgtgtgtgtgtgtgtgtgtgtgtgtgtgtttggcttatttcacttagcataatggtgaggaactgaagttttcattctnctggatattaatttctatttcaattgcccc

SEQ ID NO: 91859 - DNA, 767 bp, Homo sapiens
taataagtctggcattcctgcccttggcagtgtgagatggaagatgatgtcgcaagggtggccgagaagcagctgggctgagctgctaaaagcacagagaccggggccagactcctcagcctgaaatcctgcttccactaagtaccagctgggtaacttcaggtggagcccagttgacaggaaatgtttctccagaagctgaaaagctgcctggtaaaggcctttcataaaatggtctgcgtttgggaccaggaagacagaagactcctcaagaagagaactggaaccttaacccacttcagacttcttcatgtctgaagcttatttccaccatcccattgagaaccaaagaagcgagctccttggagaatcggctcccacctggaccttctgtttatccttccaatagctgctgcattcatccttcccagctaatgacacttccagcctttcgtgtttcaaagtatcacggactttgcaaaagattccaggtttctatggagcagatagtacttttaacaatcaacatgtgcattattatttcctcctaaggcatacttagacatcaatgcatgctacagcaaggcaacttatctcaccctcaccaaggtatgaacttcagaatttgaacttgttcctttggggtaagttgtatcaccagcactcactaacagactgtattttccagtgaggtttcattctgtttcagatattctgcactttcagtggcaaaattttaaagaaaaggagacaaaatggaacacaaa

SEQ ID NO: 91860 - DNA, 364 bp, Homo sapiens
tatctcagagatgaatgtcacctgggtatctggtctcacctttcccccaggctatctaaacagaccggcctaactccagaggtaatgagttcatcaccatgaatgtgcaaagcacagtaatcatgattactttcctatgtaccaagtattagaccaagtgccttacatatagaatctcaattcatcctctttaaattccaggcgagaagcataaaatgattaccactttacgatggtaataattcattgggggatatcatttattgctccccacccaccataccttggtcagataaagatctagaactgagcttaagggaaacagctgtctctcacctcccctattcctccccagacccagcaa

SEQ ID NO: 91861 - DNA, 393 bp, Homo sapiens
ggcagggagctcagtggtagacacaccggtcatcatgctggtgtgggaaagatttcaaagcctggccatagctcccactgaagctcctttctgcaccttactgcttccttgtacaagtcaaaccagggcctttagagcagggaccttcattgcactgccctctcctcgcctcccaaatgataatatccagctttcaaggtctgcctgatgtcccagggttaggagggcagagaccaggcagtttatgtcatgtcacttcttttttttttttgtcttttaaaaaatttattatactttaaggtctggggtacatgtgcacaacatgcaggtttgttacataggtatacatgtgctatgttggtttgctgcacccactaacttgtcatttacatt

SEQ ID NO: 91862 - DNA, 270 bp, Homo sapiens
ctagttgatagtccatatctaatatataatgaatgtacagttgtttctgttggagttcacatatgatgccttgtttcctttgtagttttgtgattgatagcttcgaactgctcatttaccttgaccttttgaattctttgaaaactgagttaagtctgattttccagagtttttatgtttgcttctgtcagttgcagagaatcaatgagaagaacactttaaattcttgttttcggtttttttccaatcacataagtaggatttacctga

SEQ ID NO: 91863 - DNA, 400 bp, Homo sapiens
ctttcctttactctgcaaactgcccttggtcattcctgggcttggaccaagctaactttcaaagaaatttggattatagtttaagttataacagcccttccccaaaactaaaccagctttgtaaaactaatgaaagacaccacattagcaggatgagaggagcctgaattctgctaagatgtaggcgtaaatgattgccagccattattcaagaggtcacaagatttgcaactgccccagttactcctgcagataacatcactattataaaatcaaagactggcttttggttttacaaaacccaatgagatggcttttgtaagataatgtcctttgaggcttttgcatttctgatgacccaagacccaagaattttgatttaactgctcctctggcccat

SEQ ID NO: 91864 - DNA, 136 bp, Homo sapiens
cgatctcctgacctcgtgatccgcccgcctgggactcccaaagtgctggggattacaggcgtgagccacagcgcccggcctgagtctacagctttttaaaatctgaattcagttactttctatgtggaaaagaatg

SEQ ID NO: 91865 - DNA, 409 bp, Homo sapiens
tttcataatatggttaaaaagccctagtaaatcttctcttagaagatttcttacattcaccctttcctttcagttttcacatcactgccctgtgaaacactcatgttcagggcctctgtctcaggcttggactggttttaagatcttcctcattgccctaagtctctctcttccatactatacttcatatttttgtgatgttgagcttcctaaagtactctaaatataagccttcatctcttaaaaagctttgaaaggaatatgacctaaaagatattaataccctaatactccgtaaaatcttcctagttgtaggaagatctagttatatactagaaaactttatttcagaagacatgtatagcctacatgtaaaagtttttagcagcactgtaatagtaaaacactg

SEQ ID NO: 91866 - DNA, 565 bp, Homo sapiens
cacaccttctagaagcagactctatgaattcaaatcctgggtctaccatttataagctgtactttcctctgtaaaatatgaatctacagtacctacttctcacagattgttataaagatgagatgtgttaatatagataaagtaagcactcagtgaatatgaggcattaaccagaacccaacaaggtgccatcatcaaatataataattgagtgcataacttttttcagtttacaaagcaaatttacatatagcatttcttttggatctcacaaaactccatgagagctggcaaaatacttccccccattttctttgaagctcatactctccttgtttactcccttacaagtcacacttgaacaaagtgaccaggcagatttgggaaaaagcaaacaaacaaaaaacaccagatagacctttaagaaattaaaaaacaaaaaacaaaaaacaaaaaactgttaacacagaaatctcagttgatgggctaaatggcccatcattctaagaatagttgggaagacaatgctttagatgccatctacacgctgttagttccatctcag

SEQ ID NO: 91867 - DNA, 420 bp, Homo sapiens
ggctagagatcgggtttgaggataactgtaagataactgcagctgccacagagacgctgacgtttagaagatgaagaggggaagcatgcagcccagttaggaggcccctgatgacctgaatcagtgaggcagcagtagagatggaataaagcacgtgactctaggacgttggtggaagagtaaaaggccttaccaggcagttgagggcaataaaaagtgagaccccaaggatgccgcctaactttttgtcttgagtaactgggtggatagtgccatctactgaaatggaagaaatctgaggaaagaagatggaaggagaaaggaagggaatgaagaatttccttttagacatgttaaattcaagatgtttcttgaacatccaagtgtgataccatctggagatacgaatctgagcactga

SEQ ID NO: 91868 - DNA, 297 bp, Homo sapiens
aacaagcaaacttcatactgatggggataaatcaaaggagcataagagccaactgaaagagctcctagtggacaaaactttgagcgtaaagaggactttttaaaaaattgaccattaaaataaacgaagtagtattgcattacaactaagagtgtaaaatatcaataagtccatactgatagaaataaatgactgaataaataagtaaatgggggagaacagacaaatctctgtgcagaagaacttcaaatactttacacagataatctgccatcaaggagagtgagccttaactct

SEQ ID NO: 91869 - DNA, 163 bp, Homo sapiens
aaataaattttactctgttgctggcttttgaagaaaatcatttagatattaaatctatagatagaacatttctctgcctcatgtaatattttattcttagttaaaagttttgaggtataaagtaatgcattgtatttctttgtatatcctcccagttatagat

SEQ ID NO: 91870 - DNA, 478 bp, Homo sapiens
cttacaaagtaatataaataaaataagacatttaaataacatgtagaagcaggagcagagtaggtatgattcaaaataaatactaaatgattaattggacaagacacacagtaacaaatgaagtgagaaagcattacagtgatggaaatattagaccaataaattctgtagagtgaatcatcatatcacgtaaagtgaatacaatcactgatgtagcaggataaggaactattacattgcactgatattagatcaaatctcggctctgccaattattttaactttagacatgcaattttgccttttcgtaccaatgtttttcatcttaaattaaactaattcctactttgtatagtgttgcatgtttaagtaaggtgatatatttgaaagcaccagacagattcaaactacaatcactgttgttgctgtcgctgttgttcatttcacttttactatttatatccaattatcatattcc

SEQ ID NO: 91871 - DNA, 593 bp, Homo sapiens
tctcaagcccattccctgcagctgaggtggggctcaggctgtggctcctgcagccatgtgggagaggctgataggactttcctctctcccattgctcagcaccctccagtgtgtcatgtggagactcacctgggaatgcaagtggccaacagtagtgaagaggatgagcttgtgtggtcaaaatgggatgtggatgtgaaatttatcctgtgctgtgcaaagtaccacagagtgagtcaccttcctcaccagtagtgttagaaagaggctgtgaaagttgtcagaatcaaaatagatccacttgtgttaaaaccctgacaaatggaactaggaatgaccatgaaggaggtttcccatgcacatactcctgataacaagaacgaccatgaatggattctgcttaaccacaacctttgatagaagccaccatgaccttataaaaatcacatctacaaggacatcttcccagcaaatcactgtttaaccctatattgatgccaaccttggtattgactctacaagcaaggaaaatactctcaaaacaatttatgtaacccacctcattttcactaataaacctatggattgacatc

SEQ ID NO: 91872 - DNA, 209 bp, Homo sapiens
tacaaacacctgtcttatccatagccagaccaaattctttacttttctgtacctttatagcatagaactatttttagcacttgctgaaggatagttagaataaagttatatgacttaaccaggtctgagtatcacttccagagtactaaaaacgtttttcaaaagtactttatcagaccatagtttcacccgtatgttgaatataacaa

SEQ ID NO: 91873 - DNA, 616 bp, Homo sapiens
aactgcattcagggcaaatattagttggtttgccgtcagttgccattcacatgttcctgtccatttggaaggaattgttcctggctttcaaaggtgagacatccactgcttgaaagttggttctttattagcaaaaaccaagcttcctggccatgattagtactaccacccctaatacccaggtgtattagtcagttcttgcattgctataaagaaatacttctgaaactaggtaatttatcaagaaaagaggtttaattgactcacagttatgcaggctgtacaggaagcatggtggcatgagcttctggagaggcttcaggaaacttacaatcatagcagaaggccaagggaaaacagtcacatcttacatggccagaccaggagcaaagggaggtgccacacacttttcaatgaccagatctcagggtagcttgctcactatttcaacaacagcaccaaaggtggatggtgttgaaaccatgagaaaccacccctgtgatgcagtcacctcccacaaggccccatctccaacttggaggattacaagtctacatgagatttgggtggggatgcagatcgagatgatatcaccaggtgtcaggaggagaggcaa

SEQ ID NO: 91874 - DNA, 241 bp, Homo sapiens
ggctggtgctggaacgtaacaggacaaggtaagcaaaggtatctgacacacacccaaacagctgggaaaaagggggagcggggcaagagctttcctgacacatttggtcctgtacaggatagggttcgcagtcttctggagcatcaaaaagaagatactgtgacagggatacagaaaccaaccaggtgaccaaaggtggtagatcactccagaaaaacgtggtataacaaagcaaccaatc

SEQ ID NO: 91875 - DNA, 565 bp, Homo sapiens
ctttaaatcataaatgttggtaattgttaatgtattatgtgctaaaaataacaatggtaacacaggcgataacattgtatattctgctttaaaattttcagactacttttacatctgttaactcatcgtatcaatcaataaattaccttatctgaaatggaaatttgttcaagctgagtaacactgatcccctgaatatttccccaaatgccatctactttcaccatccagaatatgtattaagttttatttggtttcatgaagaaataagtacttttagtttccctctttctcattagcatatctttgaattatctatgtaatgttcaatactctgtgcagatctgttgatgattaggacctgttcatttgaaaccaacaaaccaaccaaccaacaaacaaaatctgtcctaagaaggctacacaaatttaagagatgcacgagtttttctcactagtgttagcataagacttttacagacatccaaatttttcatgtaggtgagtcaaagggattgactggagtgactttgttactgtaaaaagagaccttttaaaaaaaaaa

SEQ ID NO: 91876 - DNA, 308 bp, Homo sapiens
acctacaaactagtagatcattctaaggttagctggttggcttctttacactctggtcattctatttgcgaagtgtagtagctgatatttaggggcctagcattattgatagctcatccctattttcctaggaggtaggtatggggaatgaattagtaaaggtgaacttaaaattctcatccacaaacatgctagcctaagctccaaattaaatgtaaccaaaaccgtgtggttttccccaactctgttttattcccaagatttgttgtccttgtattttgaaaacggggaaggagaacttttaaatt

SEQ ID NO: 91877 - DNA, 1951 bp, Homo sapiens
  misc_feature (1071)..(1071): n is a, c, g, or t
  misc_feature (1944)..(1951): n is a, c, g, or t
ccgccgccgccgcaaccccagcctccccagcagccgtcgccgccgccacagcagccgccgccgccgccgccgcagccgccgcagcagcagcagccgccgccccaggccccccccatggagcccgaggccccggattcccgcaagaggcccctcgaaacgccccccgaggtggtctgcaccaagcgcagcaacacgggagaggaaggcgaatacttcctgaaggtgctgatccccagctacgcggcgggctccatcattggcaagggcgggcagaccatcgtgcagctgcagaaggagaccggagccaccatcaagctctccaagtccaaagacttctaccccggaaccacagagcgggtatgcctagtacagggcacggcagaggccttgaatgctgtgcacagctttattgccgagaaggtccgagaaatcccacaagcgatgaccaagcctgaggtggtcaacatccttcaaccccaaaccacgatgaaccccgacagagccaagcaggccaagctgatcgtccccaacagcacggcgggcctgatcatcggcaagggaggcgccacggtgaaagccgtgatggaacagtcaggagcatgggtgcagctgtcccagaagccggagggcatcaacctgcaggagcgcgtggtgacggtcagcggcgagcccgagcaggtgcacaaggccgtgagcgccatcgtgcagaaggtacaagaagacccccagagcagcagctgcctcaacatcagctacgccaacgtggcaggccccgtggccaactccaaccccaccggctctccgtacgccagccccgcggatgtgcttccagccgcggccgcagcgtcggccgccgccgcctccggcctgctgggccccgccgggctggctggcgtgggggcctttcccgccgcgctgcccgccttctcaggcaccgacctgctggccatcagcacggcgcttaacacgctggccagttacggctacaacaccaactccctgggcctgggcctcaactcggccgcagcttccggcgtcctggccgccgtggccgccggggccaacccagcngccgccgccgccgccaacctcctggcatcctacgcgggcgaggccggggccgggccagccggaggggccgccccgccgccgcccccgcctcccggagccctggggtcctttgcgttggccgcagccgccaacggctacctcggggccggggcgggcggcggggcgggcggagggggcggcccgctggtggccgctgcagccgcggccggggcggccgggggcttcctgacggcggagaagctggcggctgagagtgccaaggagctggtggagattgcggtgcctgagaacctggtgggagccatcctggggaaggggggcaagacgttggtggagtaccaggagctgacgggcgctcgcatccagatctccaagaagggcgagttcctgccaggcacgcggaaccggcgggtcaccatcacgggcagccccgcggccacgcaagccgctcaatacctcatcagtcagcgggtcacctacgagcagggagtgagggcctcaaacccccagaaagtgggatgaggcctgtggtgtgtgctcccacccttttctctcctcccatctcctcctcttccctctcctcctcccccccaactcctgacctcagcttggtgtagtcctgctcctcttgggatggggctggggtaggcccgactgcaccctccccttctggtagtcataggcaggattgagtgacggttgggaagggggctcagaagccccctccccagcccggaactgacccctccttcctccctccctgtgcttggctgggcctgacccttcctgtcccagggcccaggtctgtgtgatatctgtatatattgcattttgttgattttaatagaaaacaaagcgttattttctctttcnnnnnnnn

SEQ ID NO: 91878 - DNA, 2101 bp, Homo sapiens
  misc_feature (1221)..(1221): n is a, c, g, or t
  misc_feature (2094)..(2101): n is a, c, g, or t
aaattggcctataacaaagaatggccaaaactccacaagctgccgctggcactgcatctaggtcttcgaggctgtccttcatcgtgttggtccccccaggagtggagggtgttaagcaatgatgggaggagactgaatcagaattggatttgaatctgagcccagtagctgtgttcgtgtccttgggctggtgatgaccgtgggctggtaccttcacttctctgtgcccctctgtgcctcagtttcctcttgtgtaaaaatggagctcattccacccgcctcaccgggaggttgtgaggaacggacgagatcaagctcacaaagcactcagcacagcgcctgatcaaaaaggaaggcgaatacttcctgaaggtgctgatccccagctacgcggcgggctccatcattggcaagggcgggcagaccatcgtgcagctgcagaaggagaccggagccaccatcaagctctccaagtccaaagacttctaccccggaaccacagagcgggtatgcctagtacagggcacggcagaggccttgaatgctgtgcacagctttattgccgagaaggtccgagaaatcccacaagcgatgaccaagcctgaggtggtcaacatccttcaaccccaaaccacgatgaaccccgacagagccaagcaggccaagctgatcgtccccaacagcacggcgggcctgatcatcggcaagggaggcgccacggtgaaagccgtgatggaacagtcaggagcatgggtgcagctgtcccagaagccggagggcatcaacctgcaggagcgcgtggtgacggtcagcggcgagcccgagcaggtgcacaaggccgtgagcgccatcgtgcagaaggtacaagaagacccccagagcagcagctgcctcaacatcagctacgccaacgtggcaggccccgtggccaactccaaccccaccggctctccgtacgccagccccgcggatgtgcttccagccgcggccgcagcgtcggccgccgccgcctccggcctgctgggccccgccgggctggctggcgtgggggcctttcccgccgcgctgcccgccttctcaggcaccgacctgctggccatcagcacggcgcttaacacgctggccagttacggctacaacaccaactccctgggcctgggcctcaactcggccgcagcttccggcgtcctggccgccgtggccgccggggccaacccagcngccgccgccgccgccaacctcctggcatcctacgcgggcgaggccggggccgggccagccggaggggccgccccgccgccgcccccgcctcccggagccctggggtcctttgcgttggccgcagccgccaacggctacctcggggccggggcgggcggcggggcgggcggagggggcggcccgctggtggccgctgcagccgcggccggggcggccgggggcttcctgacggcggagaagctggcggctgagagtgccaaggagctggtggagattgcggtgcctgagaacctggtgggagccatcctggggaaggggggcaagacgttggtggagtaccaggagctgacgggcgctcgcatccagatctccaagaagggcgagttcctgccaggcacgcggaaccggcgggtcaccatcacgggcagccccgcggccacgcaagccgctcaatacctcatcagtcagcgggtcacctacgagcagggagtgagggcctcaaacccccagaaagtgggatgaggcctgtggtgtgtgctcccacccttttctctcctcccatctcctcctcttccctctcctcctcccccccaactcctgacctcagcttggtgtagtcctgctcctcttgggatggggctggggtaggcccgactgcaccctccccttctggtagtcataggcaggattgagtgacggttgggaagggggctcagaagccccctccccagcccggaactgacccctccttcctccctccctgtgcttggctgggcctgacccttcctgtcccagggcccaggtctgtgtgatatctgtatatattgcattttgttgattttaatagaaaacaaagcgttattttctctttcnnnnnnnn

SEQ ID NO: 91879 - DNA, 1467 bp, Homo sapiens
  misc_feature (587)..(587): n is a, c, g, or t
  misc_feature (1460)..(1467): n is a, c, g, or t
gaccctcccttttgctccccacgcaggccaagctgatcgtccccaacagcacggcgggcctgatcatcggcaagggaggcgccacggtgaaagccgtgatggaacagtcaggagcatgggtgcagctgtcccagaagccggagggcatcaacctgcaggagcgcgtggtgacggtcagcggcgagcccgagcaggtgcacaaggccgtgagcgccatcgtgcagaaggtacaagaagacccccagagcagcagctgcctcaacatcagctacgccaacgtggcaggccccgtggccaactccaaccccaccggctctccgtacgccagccccgcggatgtgcttccagccgcggccgcagcgtcggccgccgccgcctccggcctgctgggccccgccgggctggctggcgtgggggcctttcccgccgcgctgcccgccttctcaggcaccgacctgctggccatcagcacggcgcttaacacgctggccagttacggctacaacaccaactccctgggcctgggcctcaactcggccgcagcttccggcgtcctggccgccgtggccgccggggccaacccagcngccgccgccgccgccaacctcctggcatcctacgcgggcgaggccggggccgggccagccggaggggccgccccgccgccgcccccgcctcccggagccctggggtcctttgcgttggccgcagccgccaacggctacctcggggccggggcgggcggcggggcgggcggagggggcggcccgctggtggccgctgcagccgcggccggggcggccgggggcttcctgacggcggagaagctggcggctgagagtgccaaggagctggtggagattgcggtgcctgagaacctggtgggagccatcctggggaaggggggcaagacgttggtggagtaccaggagctgacgggcgctcgcatccagatctccaagaagggcgagttcctgccaggcacgcggaaccggcgggtcaccatcacgggcagccccgcggccacgcaagccgctcaatacctcatcagtcagcgggtcacctacgagcagggagtgagggcctcaaacccccagaaagtgggatgaggcctgtggtgtgtgctcccacccttttctctcctcccatctcctcctcttccctctcctcctcccccccaactcctgacctcagcttggtgtagtcctgctcctcttgggatggggctggggtaggcccgactgcaccctccccttctggtagtcataggcaggattgagtgacggttgggaagggggctcagaagccccctccccagcccggaactgacccctccttcctccctccctgtgcttggctgggcctgacccttcctgtcccagggcccaggtctgtgtgatatctgtatatattgcattttgttgattttaatagaaaacaaagcgttattttctctttcnnnnnnnn

SEQ ID NO: 91880 - DNA, 1139 bp, Homo sapiens
aaattggcctataacaaagaatggccaaaactccacaagctgccgctggcactgcatctaggtcttcgaggctgtccttcatcgtgttggtccccccaggagtggagggtgttaagcaatgatgggaggagactgaatcagaattggatttgaatctgagcccagtagctgtgttcgtgtccttgggctggtgatgaccgtgggctggtaccttcacttctctgtgcccctctgtgcctcagtttcctcttgtgtaaaaatggagctcattccacccgcctcaccgggaggttgtgaggaacggacgagatcaagctcacaaagcactcagcacagcgcctgatcaaaaaggaaggcgaatacttcctgaaggtgctgatccccagctacgcggcgggctccatcattggcaagggcgggcagaccatcgtgcagctgcagaaggagaccggagccaccatcaagctctccaagtccaaagacttctaccccggaaccacagagcgggtatgcctagtacagggcacggcagaggccttgaatgctgtgcacagctttattgccgagaaggtccgagaaatcccacaagcgatgaccaagcctgaggtggtcaacatccttcaaccccaaaccacgatgaaccccgacagagccaagcaggtcagctggggcagagactgggttgctgtaaagctgttgacattcacaaagaaacattcctcccacatcactgcttactgtgaggttcaatgggacaaagctgataaaaatctcatcagtcaaagaccacatggtagtggttagtattatttttagggagtcagctctaatagaatagaaaggactccagaacatttagagtgggcttgattcagagagggagtgaaggtctgggagaatgtggcatgattccctattgttcgatcctttcttcctaggattctctagttcctcttctctcttccacctcatcccattgtctctctgaacgacctgcctcccacttcctgctatcaccggaagtgacctcagtgacagttcagccacatccagaagagtttacaaatggcctctcatcctccttccctccataattaacgtatgggggtagaggtggtgtttcattagcgagagaagag

SEQ ID NO: 91881 - DNA, 380 bp, Homo sapiens
ggaggcacttaagagctttttaatttcaatattctaaccattagtgagggtgtgctgctgggtacatgtctgcccataaataaacatggactgttcattgaaacttgcatttttatgtagaaaagctcatgctaccttatcactttttgcacaaaagttgacacattatgaatgctttaaaaaaaaaattataccttactcccatacactgaacatatctttcctcatctaaaactatccaagcagccaactttttaaaattaatggaaggagagggtctacagcatgtattctcaatgggggcaatgtagccccctaagggagccaaaattggttctgggttgggagtggtgaaaaaagtctttaaaaaaataaattgc

SEQ ID NO: 91882 - DNA, 259 bp, Homo sapiens
cgaggaacagatatccaggactgtggtataagccagcgatccactaattcggtgcgggaggtggccacctagagagattgtgcagagatagcacagcttccctcacagccctctgcttagccatgccacctggaggagcaggtgtggaggcacacagcgatgaggaccgtggcctccacatgttggatgccacattcacgatgtccatttgagttttttaaaagtttgccccctcatgtgattgttcttatgacctttg

SEQ ID NO: 91883 - DNA, 391 bp, Homo sapiens
aggcctggggtgacaaaaatctgggttggggagatgggaggctgaccatgtgctcatcaaagccggccaggcggatgagtttttcagccactgctgccgtgcgtgggtcccgctccacagtaagaaggcgacccccagggggcagggctcgggcaataagcagggtagagtatccacagtaggttcccaattccagcacacaagcaggggccttctcctccaccagccgcatcaggatctgacctatgaggggagatggctgttgcagaagacatgggagatggatgcagggcccctgataaaagatatctcaaatgcctacctgcctcactgcagctcccaaccagccggggtctcatctgtctcttgtaccatagccccagctgccctc

SEQ ID NO: 91884 - DNA, 674 bp, Homo sapiens
tgtgttttagatctcattcccttctttttctacatttgttccattgtctaactaagagactcagggcatcaggcaagtcatgtcagaaaggttggctttagaagccacatcccagaattcctaaacttaatcatggaaggagggggcagactgacaacgcattccctatgtcctctaaagagatttctcccgttgggattgctttatccccagaggtgtgctgtagaaccagcctgtgttcacagtaaatctctgcttccgcaacagcggtgagctctcagccctccctgccctggtcttgtctctagggcctgtgggtctttgtggactgatggtgtgggtgggtttctgagggtctgcatggactcatggtgtggatgggtttctgagggtgttggtagcagtaacggttccacatgatgaaacccagatggctgctccccactgtgcatccacccggattcacccgctgctttgctggctgatgtctacaaggacatagatggcctgcatctggcgggggctgcaggagagctggcaggacatggggccattagaagaggtgtgagactgtcatcagcagtaaaaagtggaacagcccagggagccctcttgtgagtttatggcttaaagtccaagtacaacttcgtttgaaagaaatgccttcctcctga

SEQ ID NO: 91885 - DNA, 1437 bp, Homo sapiens
cggccgccgggcccggcgcgcggcgccgccttcttggagagcggtaggcgcgggagcgcggcccctccgaggtccgcccgcggccggggagctgcctggcacccgcggcttccaaaggggaaagaaagttgcgcccgcgccaggcgcagcgcgctcggcggacgcggcctttcgggcgaaagttaggaggggccgggctggcgggcgggcgggttccgggggctcctttccgcaccagcggcggtcgctccccgtgggcgggacctcgggcgtgatcgtcgaggagaccgcggctccctcacctgccggcttgttcctcggggtccgcggagcgagcccagctctcggcgcgtgtcggagtctcccagccccgcggccccgagcgcacgatgcgcggacccgggcaccccctcctcctggggctgctgctggtgctgggggcggcggggcgcggccgggggggcgcggagccccgggagccggcggacggacaggcgctgctgcggctggtggtggaactcgtccaggagctgcggaagcaccactcggcggagcacaagggcctgcagctcctcgggcgggactgcgccctgggccgcgcggaggcggcggggctggggccttcgccggagcagcgagtggaaattgttcctcgagatctgaggatgaaggacaagtttctaaaacaccttacaggccctctttattttagtccaaagtgcagcaaacacttccatagactttatcacaacaccagagactgcaccattcctgcatactataaaagatgcgccaggcttcttacccggctggctgtcagtccagtgtgcatggaggataagtgagcagaccgtacaggagcagcacaccaggagccatgagaagtgccttggaaaccaacagggaaacagaactatctttatacacatcccctcatggacaagagatttatttttgcagacagactcttccataagtcctttgagttttgtatgttgttgacagtttgcagatatatattcgataaatcagtgtacttgacagtgttatctgtcacttatttaaaaaaaaaacacaaaaggaatgctccacatttgacgtgtagtgctataaaacacagaatatttcattgtcttcattaggtgaaatcgcaaaaaatatttctttagaaacataagcagaatcttaaagtatattttcatataacataatttgatattctgtattactttcactgttaaattctcagagtattatttggaacggcatgaaaaattaaaatttcggtcatgttttagagacagtggagtgtaaatctgtggctaattctgttggtcgtttgtattataaatgtaaaatagtattccagctattgtgcaatatgtaaatagtgtaaataaacacaagtaataaatgaagtgtttgttataatgacta

SEQ ID NO: 91886 - DNA, 932 bp, Homo sapiens
caaagctttcccaactgaaaaggaagcatccaggctccttcatggccctgcccagagtggtggcccacggggaatttcccaggaaagcatgaaagcgtctaatgcttttgtgacacaatcaggtcaaacatgataagaaattgttcctcgagatctgaggatgaaggacaagtttctaaaacaccttacaggccctctttattttagtccaaagtgcagcaaacacttccatagactttatcacaacaccagagactgcaccattcctgcatactataaaagatgcgccaggcttcttacccggctggctgtcagtccagtgtgcatggaggataagtgagcagaccgtacaggagcagcacaccaggagccatgagaagtgccttggaaaccaacagggaaacagaactatctttatacacatcccctcatggacaagagatttatttttgcagacagactcttccataagtcctttgagttttgtatgttgttgacagtttgcagatatatattcgataaatcagtgtacttgacagtgttatctgtcacttatttaaaaaaaaaacacaaaaggaatgctccacatttgacgtgtagtgctataaaacacagaatatttcattgtcttcattaggtgaaatcgcaaaaaatatttctttagaaacataagcagaatcttaaagtatattttcatataacataatttgatattctgtattactttcactgttaaattctcagagtattatttggaacggcatgaaaaattaaaatttcggtcatgttttagagacagtggagtgtaaatctgtggctaattctgttggtcgtttgtattataaatgtaaaatagtattccagctattgtgcaatatgtaaatagtgtaaataaacacaagtaataaatgaagtgtttgttataatgacta

SEQ ID NO: 91887 - DNA, 845 bp, Homo sapiens
gaagtttgcttggcagagtctttccctgggattcttaccctacaaaccagaaattgttcctcgagatctgaggatgaaggacaagtttctaaaacaccttacaggccctctttattttagtccaaagtgcagcaaacacttccatagactttatcacaacaccagagactgcaccattcctgcatactataaaagatgcgccaggcttcttacccggctggctgtcagtccagtgtgcatggaggataagtgagcagaccgtacaggagcagcacaccaggagccatgagaagtgccttggaaaccaacagggaaacagaactatctttatacacatcccctcatggacaagagatttatttttgcagacagactcttccataagtcctttgagttttgtatgttgttgacagtttgcagatatatattcgataaatcagtgtacttgacagtgttatctgtcacttatttaaaaaaaaaacacaaaaggaatgctccacatttgacgtgtagtgctataaaacacagaatatttcattgtcttcattaggtgaaatcgcaaaaaatatttctttagaaacataagcagaatcttaaagtatattttcatataacataatttgatattctgtattactttcactgttaaattctcagagtattatttggaacggcatgaaaaattaaaatttcggtcatgttttagagacagtggagtgtaaatctgtggctaattctgttggtcgtttgtattataaatgtaaaatagtattccagctattgtgcaatatgtaaatagtgtaaataaacacaagtaataaatgaagtgtttgttataatgacta

SEQ ID NO: 91888 - DNA, 774 bp, Homo sapiens
ggtatttttaaaaatacaatagactacactttttggatcacagagaaatacagatgcactctgagactgcctatgtttataaacatgttgtgtcccctaactgaagtgacaggtcttctggaattgacattaagaagtgtggatagtcatatcacacgcaatgtatttgttttcagcagtgagcagaccgtacaggagcagcacaccaggagccatgagaagtgccttggaaaccaacagggaaacagaactatctttatacacatcccctcatggacaagagatttatttttgcagacagactcttccataagtcctttgagttttgtatgttgttgacagtttgcagatatatattcgataaatcagtgtacttgacagtgttatctgtcacttatttaaaaaaaaaacacaaaaggaatgctccacatttgacgtgtagtgctataaaacacagaatatttcattgtcttcattaggtgaaatcgcaaaaaatatttctttagaaacataagcagaatcttaaagtatattttcatataacataatttgatattctgtattactttcactgttaaattctcagagtattatttggaacggcatgaaaaattaaaatttcggtcatgttttagagacagtggagtgtaaatctgtggctaattctgttggtcgtttgtattataaatgtaaaatagtattccagctattgtgcaatatgtaaatagtgtaaataaacacaagtaataaatgaagtgtttgttataatgacta

SEQ ID NO: 91889 - DNA, 461 bp, Homo sapiens
cctgcagattagactccgtattgcttccagggaattcagatatttgaagaaataaatggctttagtagctgatatacttgcaaaaaaatgcgatttatttgttttttaagtaactgacaagagtctgatatattttcaccgtagactataaaagatgcgccaggcttcttacccggctggctgtcagtccagtgtgcatggaggataaggtaagcttggacagacacacactggagcacataccaaagatgggaatcccgcttgggacatgaaaaattcatgggagtttaggaacactcattctttggctgaagtagccatattctaagtagagatggcacaacactcatctcacagtgctgaaagccaccctactggcttgtctacagggccccggcagctgttgttaactgctcactgcatggcacacgggcactaagtgggtcctgctctgaaacaca

SEQ ID NO: 91890 - DNA, 889 bp, Homo sapiens
cgcctgacgtcggcgggcgcggggataagaagctccccgaggtctgaggcgggactcggagccggcgcaccccaggtcggccgtgggtccagcgaaattgttcctcgagatctgaggatgaaggacaagtttctaaaacaccttacaggccctctttattttagtccaaagtgcagcaaacacttccatagactttatcacaacaccagagactgcaccattcctgcatactataaaagatgcgccaggcttcttacccggctggctgtcagtccagtgtgcatggaggataagtgagcagaccgtacaggagcagcacaccaggagccatgagaagtgccttggaaaccaacagggaaacagaactatctttatacacatcccctcatggacaagagatttatttttgcagacagactcttccataagtcctttgagttttgtatgttgttgacagtttgcagatatatattcgataaatcagtgtacttgacagtgttatctgtcacttatttaaaaaaaaaacacaaaaggaatgctccacatttgacgtgtagtgctataaaacacagaatatttcattgtcttcattaggtgaaatcgcaaaaaatatttctttagaaacataagcagaatcttaaagtatattttcatataacataatttgatattctgtattactttcactgttaaattctcagagtattatttggaacggcatgaaaaattaaaatttcggtcatgttttagagacagtggagtgtaaatctgtggctaattctgttggtcgtttgtattataaatgtaaaatagtattccagctattgtgcaatatgtaaatagtgtaaataaacacaagtaataaatgaagtgtttgttataatgacta

SEQ ID NO: 91891 - DNA, 1383 bp, Homo sapiens
cggccgccgggcccggcgcgcggcgccgccttcttggagagcggtaggcgcgggagcgcggcccctccgaggtccgcccgcggccggggagctgcctggcacccgcggcttccaaaggggaaagaaagttgcgcccgcgccaggcgcagcgcgctcggcggacgcggcctttcgggcgaaagttaggaggggccgggctggcgggcgggcgggttccgggggctcctttccgcaccagcggcggtcgctccccgtgggcgggacctcgggcgtgatcgtcgaggagaccgcggctccctcacctgccggcttgttcctcggggtccgcggagcgagcccagctctcggcgcgtgtcggagtctcccagccccgcggccccgagcgcacgatgcgcggacccgggcaccccctcctcctggggctgctgctggtgctgggggcggcggggcgcggccgggggggcgcggagccccgggagccggcggacggacaggcgctgctgcggctggtggtggaactcgtccaggagctgcggaagcaccactcggcggagcacaagggcctgcagctcctcgggcgggactgcgccctgggccgcgcggaggcggcggggctggggccttcgccggagcagcgagtggaaattgttcctcgagatctgaggatgaaggacaagtttctaaaacaccttacaggccctctttattttagtccaaagtgcagcaaacacttccatagactttatcacaacaccagagactgcaccattcctgcatactataaaagatgcgccaggcttcttacccggctggctgtcagtccagtgtgcatggaggataagtgagcagaccgtacaggagcagcacaccaggagccatgagaagtgccttggaaaccaacagggaaacagaactatctttatacacatcccctcatggacaagagatttatttttgcagacagactcttccataagtcctttgagttttgtatgttgttgacagtttgcagatatatattcgataaatcagtgtacttgacagtgttatctgtcacttatttaaaaaaaaaacacaaaaggaatgctccacatttgacgtgtagtgctataaaacacagaatatttcattgtcttcattaggtgaaatcgcaataatttgatattctgtattactttcactgttaaattctcagagtattatttggaacggcatgaaaaattaaaatttcggtcatgttttagagacagtggagtgtaaatctgtggctaattctgttggtcgtttgtattataaatgtaaaatagtattccagctattgtgcaatatgtaaatagtgtaaataaacacaagtaataaatgaagtgtttgttataatgacta

SEQ ID NO: 91892 - DNA, 726 bp, Homo sapiens
aactataggaagtctctcttagtcttcctttcagtcacttgttttattaagacagtaaaacactctgatccagaggttttaaatagagatgctttgttttcaattaaagttgaagatttaagttatttaaaactgaaccgtaattattgaagggaaggagagtttgagggcctattcaaagattcgtagaaaattcccattttggtgtagtagtaccattaaataatgcatatctaatgtgcataaatacttgtctgcagaaatcatgtctgctataaataggtgtcagacatggagaaatgcaggtccttcatgggtgggaacagccttcggtggtgttcctgggcttctcttgtatgtgttaatgacacagccgtgaaagtatcatttttcactttcgactgtcgaagcccagcttatattcccatatgcttttgtgtgtctttgtagagcactcttagggtggatttttgcaatttcatcacttttcttactctgccttcaggggccagaaacactgaagtttcacatgtgacctgtacactcttacagctcttatacatggctgaggggccaggagaggaaaacaccacagtccatttgtcaggaaaaaaagacacacatggggaaaaaggtcctgaaaagacccactttacactcttcatagtgattacttcaggaggattataagaaataatattaatatggaatatggcctgtgtacta

SEQ ID NO: 91893 - DNA, 390 bp, Homo sapiens
tcatttgtgttatataccagaacatttttatttctatggttttaatgccacctaatatgattatcaatgtgtcattctccataaatcattgtgttatacatgttaaacgattaggtattaagtgtataggtataaatcacttagaataatgactaacacattgtatgaactaaataagtactgattcatctgattcatcaaatttccattattcataccattcattatttattaagtggtgtagtatttgttcttatcaacatttgcttttctgtcctatctaaatattaatgaaacagtggatgtgggctcagtgtgctgtcttgaaataatccaaagtcaaatggcatgcttcactggtttcctttagatgcaataactcatttgact

SEQ ID NO: 91894 - DNA, 158 bp, Homo sapiens
atgttattatctataggagcaactggggaggttagtaattttgtggcctctgattgcatgactcctgagccacaatttctaatcttgtggataatttgttggttttacaaaggctgtctctcagcaaagagggggtttgcttgggggaagggctgtta

SEQ ID NO: 91895 - DNA, 320 bp, Homo sapiens
cccaggtgggtttcttttaatgtttgttttaatgatgatttttttttttcaagagatggggtctcgctttgttacccaggctggtctcaaactcctgggctcaaataatcctaccacctcagccttccaaaatgctgattataaaatgacattacaggcaggagccaactgcacttggcctggatgttttctttcttttttttagagatgggggtctcacctcagtccctgaagtagctggcattacaggcctgtgccactatgtcgagccaataatggcatagttttctaagcaaagaataatttcaggatccttccaa

SEQ ID NO: 91896 - DNA, 283 bp, Homo sapiens
ttgtattactactcttgtgctgtgagctgtgttactctgtgcctcacctggcacagccttggagacctggatgctaatcaggccgctccttgtctttgaggcactcacacattctctgggaggggcagaagctcgggctggcatgtaccctgtgtcttagtttatcatgcctgctctagcctacacaagagagaaatgtgtggtgagagaaatgggcgcacagtgatgaggctggggtctgcctccccaggccccagccttgcccactgttctgggctcacgc

SEQ ID NO: 91897 - DNA, 632 bp, Homo sapiens
acaggcagaagaatgaggaacatctttcaggcaaacgtcagcgcatgagcactagccaaaaatcagaaatgacctgccacaggtggggagcattcaaatggatttttaggtgcagtctgttaatcaatgactgtgaatgccagctggaacctggataggagctatatagtatagcactggaaaacaagcagagctttaagaaatataaacatggctgggcccccctcctgcagattctatttcaagaagcctagagtgatacccagggatctgtatttagaaatcattcccaggtgactttgatctccacccctagtgcaaaaccatattaatgacatcatatgaaccttctatcttcccaatgagcttctcctagcaagcaaggacaaagtacttgacggagtccctcatggagatgactaacaataggaattgctttagattgtttagcgtggtgatgacttaaaggatgagagagctaagcaagattaatctgacagcaggttcaggaatgaattcagaaaggagaaaacactggcaacagcggcagtgaagaagcataggcacacagtgtggatagtctcagtaaggattaaggcagcaggcatgaaggagactaaataggaagaatt

SEQ ID NO: 91898 - DNA, 1989 bp, Homo sapiens
attttttatgaatatttaaaattgaaaaagtttatttatctttgaatatatcacaagtatactcaactggcaatattttttttaattaggtaaaatgtacaaggtgtatcttcccacaaattaatgaaactgattttgaacaaacaaaattgacacacagatacattttctaagtgatgcacttttccaatgatgtcagcattactcaaaacattttttagaatataaacatataattgattttataattgctgtcagaaacaaaggcacattcttttactgtcccagaacattcaagatgctttcaatttattacaagtaccaaaagcagccacaactcaaatggctcaagcagttaaaggaattattctttcccataaaagcggtcctgaggtagggctacagtggctgaacttctgctatgataagtattcaggggtttcccaggacacagcatcaatgctaaaactggcaaaatcccaatggactgatcccttcaatggatgacaggaccctctatggctgaaagactctaaagttcttagttcttagctgtgacaggacagagaaccgacatgtcccacctgcagccacacccatccccttattattactagatcttatcaaaagctgacttgaagaggaaaaaaggccaaaagacttcttttcttcacctaaccgccgatgccctccttttggttttatggttccaacctgacagctactctgggctacaaagagccccttcttgacagatgactgccagctgcaggctagatcagactggtctctggagattgcacagatcgtgaacttgtgccctatgtttcacctttttgcatttacagcctaattataatacatttaaatgttaaatcttcaccccagagtgaacacaggtcatccgcttttggatattcttcatatgtaagcccagtgcgtgtctctaacgagtttcctccatgaattttcataggcttctcctgtatgctacagaatacgtatatcctacctctccacctagcataaatacctaccttttctccttcaaagtatgctttatggcctcaggtagaggcctgcttcctgcctgcaagttgtaacctcttagaaatagttatattttgtttattttgattcttttcagtcgacacatgcaaacaggaacgagttggctacttgagggttggttccttgtgcatctcagtgagtcttgaaaaaccccagatccgtccttccttcctgccgcatgtcatcctaaggccagtgtctgtcagggaggcaaggcagcagcagtacttttgggaaacatccagaataacattaaaaagcccctttttccccacacgtgtcttttatccagagggtctgttttccacaagttcttcagtgatttctccccagtctcattggctgggattggctttcacgcctcttaacaggattgaccatggttcatcaagggtcaacttgaaagctgaaccctgccaactttccctgaatctcctgactatggtggaggagtgtggatcctggaactaaactgaggtgatagggaggaaaagagagaaatcaacagtaaacgctgcacatcctctgtctggtaaatgtgcatcactgattgtatccaatctagattcaaccagagagacggaagcattaagaatgacatagaatatggaatttgctatagggatttgagcttctacatttgcgggaaggagcgagttgaacacttaggaacagctgttgctgccgtgtctggtggggggcctgagagtggcaggacaagcagcctgccccagaagtggaagaaactgaaagtggagtcctgagagctgaatctgccgcaggcccgcgggccgcccgggaattaggaaagttagaggggatccacgcccacaaggtaagccagcagatggggacaattccccgggctgcgacagtccctaatgtcgggcacctacctttcaagcctacgagacgaca

SEQ ID NO: 91899 - DNA, 2605 bp, Homo sapiens
attttttatgaatatttaaaattgaaaaagtttatttatctttgaatatatcacaagtatactcaactggcaatattttttttaattaggtaaaatgtacaaggtgtatcttcccacaaattaatgaaactgattttgaacaaacaaaattgacacacagatacattttctaagtgatgcacttttccaatgatgtcagcattactcaaaacattttttagaatataaacatataattgattttataattgctgtcagaaacaaaggcacattcttttactgtcccagaacattcaagatgctttcaatttattacaagtaccaaaagcagccacaactcaaatggctcaagcagttaaaggaattattctttcccataaaagcggtcctgaggtagggctacagtggctgaacttctgctatgataagtattcaggggtttcccaggacacagcatcaatgctaaaactggcaaaatcccaatggactgatcccttcaatggatgacaggaccctctatggctgaaagactctaaagttcttagttcttagctgtgacaggacagagaaccgacatgtcccacctgcagccacacccatccccttattattactagatcttatcaaaagctgacttgaagaggaaaaaaggccaaaagacttcttttcttcacctaaccgccgatgccctccttttggttttatggttccaacctgacagctactctgggctacaaagagccccttcttgacagatgactgccagctgcaggctagatcagactggtctctggagattgcacagatcgtgaacttgtgccctatgtttcacctttttgcatttacagcctaattataatacatttaaatgttaaatcttcaccccagagtgaacacaggtcatccgcttttggatattcttcatatgtaagcccagtgcgtgtctctaacgagtttcctccatgaattttcataggcttctcctgtatgctacagaatacgtatatcctacctctccacctagcataaatacctaccttttctccttcaaagtatgctttatggcctcaggtagaggcctgcttcctgcctgcaagttgtaacctcttagaaatagttatattttgtttattttgattcttttcagtcgacacatgcaaacaggaacgagttggctacttgagggttggttccttgtgcatctcagtgagtcttgaaaaaccccagatccgtccttccttcctgccgcatgtcatcctaaggccagtgtctgtcagggaggcaaggcagcagcagtacttttgggaaacatccagaataacattaaaaagcccctttttccccacacgtgtcttttatccagagggtctgttttccacaagttcttcagtgatttctccccagtctcattggctgggattggctttcacgcctcttaacaggattgaccatggttcatcaagggtcaacttgaaagctgaaccctgccaactttccctgaatctcctgactatggtggaggagtgtggatcctggaactaaactgaggtgatagggaggaaaagagagaaatcaacagtaaacgctgcacatcctctgtctggtaaatgtgcatcactgattgtatccaatctagattcaaccagagagacggaagcattaagaatgacatagaatatggaatttgctatagggatttgagcttctacatttgcgggaaggagcgagttgaacacttaggaacagctgttgctgccgtgtctggtggggggcctgagagtggcaggacaagcagcctgccccagaagtggaagaaactgaaagtggagtcctgagagctgaatctgccgcaggcccgcgggccgcccgggaattaggaaagttagaggggatccacgcccacaagtgctatggactctgatcgcccaaccagagcaaacccagaaggacaactctccaagcctttcaatcactcccactaacccgtattgtggacacactattgtgaggcctactaaggatgtactgctgatgaccttttgaaggccagtggacctgctctgcagacccaggctcctctcccatggagcatcccaagtctgtccttatgggaagaagcaggagccctgtctggctgtaccccaagctgctttctctggaccaatgctgtcagcgatagagggaacccttccaccatcatgtgaagaagcctggtctagcctgctggaggatgagagatcacatggaatgaggccacaatcgttccagccaaagccccagtaatagaattaagatcatccaagaccatggcatcccgcctgagaagttcagatgagaagggccacctgaacaaccaacagaatcttaaaaagtaaaaaatgagtgttgccactatgcatctattagaatggcagaaatcgaagacactgacaacaaattatgtggtgctgtgtaggtgaaacttttaagaaatatttttgaagcatatgttattatttgcactgctattgtgtgtgtgtgtgtgtgtcttgaatatatgtagaatgtgtgttgtgtgagagccagagagaggaaactcaagagagtgttgtcttagactgtctcc

SEQ ID NO: 91900 - DNA, 2995 bp, Homo sapiens
attttttatgaatatttaaaattgaaaaagtttatttatctttgaatatatcacaagtatactcaactggcaatattttttttaattaggtaaaatgtacaaggtgtatcttcccacaaattaatgaaactgattttgaacaaacaaaattgacacacagatacattttctaagtgatgcacttttccaatgatgtcagcattactcaaaacattttttagaatataaacatataattgattttataattgctgtcagaaacaaaggcacattcttttactgtcccagaacattcaagatgctttcaatttattacaagtaccaaaagcagccacaactcaaatggctcaagcagttaaaggaattattctttcccataaaagcggtcctgaggtagggctacagtggctgaacttctgctatgataagtattcaggggtttcccaggacacagcatcaatgctaaaactggcaaaatcccaatggactgatcccttcaatggatgacaggaccctctatggctgaaagactctaaagttcttagttcttagctgtgacaggacagagaaccgacatgtcccacctgcagccacacccatccccttattattactagatcttatcaaaagctgacttgaagaggaaaaaaggccaaaagacttcttttcttcacctaaccgccgatgccctccttttggttttatggttccaacctgacagctactctgggctacaaagagccccttcttgacagatgactgccagctgcaggctagatcagactggtctctggagattgcacagatcgtgaacttgtgccctatgtttcacctttttgcatttacagcctaattataatacatttaaatgttaaatcttcaccccagagtgaacacaggtcatccgcttttggatattcttcatatgtaagcccagtgcgtgtctctaacgagtttcctccatgaattttcataggcttctcctgtatgctacagaatacgtatatcctacctctccacctagcataaatacctaccttttctccttcaaagtatgctttatggcctcaggtagaggcctgcttcctgcctgcaagttgtaacctcttagaaatagttatattttgtttattttgattcttttcagtcgacacatgcaaacaggaacgagttggctacttgagggttggttccttgtgcatctcagtgagtcttgaaaaaccccagatccgtccttccttcctgccgcatgtcatcctaaggccagtgtctgtcagggaggcaaggcagcagcagtacttttgggaaacatccagaataacattaaaaagcccctttttccccacacgtgtcttttatccagagggtctgttttccacaagttcttcagtgatttctccccagtctcattggctgggattggctttcacgcctcttaacaggattgaccatggttcatcaagggtcaacttgaaagctgaaccctgccaactttccctgaatctcctgactatggtggaggagtgtggatcctggaactaaactgaggtgatagggaggaaaagagagaaatcaacagtaaacgctgcacatcctctgtctggtaaatgtgcatcactgattgtatccaatctagattcaaccagagagacggaagcattaagaatgacatagaatatggaatttgctatagggatttgagcttctacatttgcgggaaggagcgagttgaacacttaggaacagctgttgctgccgtgtctggtggggggcctgagagtggcaggacaagcagcctgccccagaagtggaagaaactgaaagtggagtcctgagagctgaatctgccgcaggcccgcgggccgcccgggaattaggaaagttagaggggatccacgcccacaagtgctatggactctgatcgcccaaccagagcaaacccagaaggacaactctccaagcctttcaatcactcccactaacccgtattgtggacacactattgtgaggcctactaaggatgtactgctgatgaccttttgaagagtggctagtggttggcccatgtaggctgagctcagctggtccatccttcttggacccacagactccctggggcatgttcttctcatgatgatgactgcaacacagagggcaagacatcctacacaagcacatttcaagattttgctcgcatcatctctgctaaaattcctttatccaaagcaaggaacacaactggttcaaataagcacaggcctccaaatatccagatctaaaaatggagtgttcacctcagctccttatttatcactgcaagagattctggggctggcagctagtgacatgagctggaatcctcttcctgaaattgctgtcttcttggatgggctctccacatcttccaccacgaagtaaaaacaattcttgtgggtgccagtggacctgctctgcagacccaggctcctctcccatggagcatcccaagtctgtccttatgggaagaagcaggagccctgtctggctgtaccccaagctgctttctctggaccaatgctgtcagcgatagagggaacccttccaccatcatgtgaagaagcctggtctagcctgctggaggatgagagatcacatggaatgaggccacaatcgttccagccaaagccccagtaatagaattaagatcatccaagaccatggcatcccgcctgagaagttcagatgagaagggccacctgaacaaccaacagaatcttaaaaagtaaaaaatgagtgttgccactatgcatctattagaatggcagaaatcgaagacactgacaacaaattatgtggtgctgtgtaggtgaaacttttaagaaatatttttgaagcatatgttattatttgcactgctattgtgtgtgtgtgtgtgtgtcttgaatatatgtagaatgtgtgttgtgtgagagccagagagaggaaactcaagagagtgttgtcttagactgtctcc

SEQ ID NO: 91901 - DNA, 954 bp, Homo sapiens
agcgggtggttcccgcttagctaggttgacatggtacaaagccacattaccacgctaagtgtggctttgatttttagaaacgcctcatgctaagtctagggaatacagtggttgaatggggtgagcgctgacgtttagctattctggaggaacatgtcactttcacttattttctttcatgttttcccacccagtgctatggactctgatcgcccaaccagagcaaacccagaaggacaactctccaagcctttcaatcactcccactaacccgtattgtggacacactattgtgaggcctactaaggatgtactgctgatgaccttttgaaggccagtggacctgctctgcagacccaggctcctctcccatggagcatcccaagtctgtccttatgggaagaagcaggagccctgtctggctgtaccccaagctgctttctctggaccaatgctgtcagcgatagagcaaacaagccaaacagcagcttgaaaaatgctttctacttggacataccctcttgctacagggaacccttccaccatcatgtgaagaagcctggtctagcctgctggaggatgagagatcacatggaatgaggccacaatcgttccagccaaagccccagtaatagaattaagatcatccaagaccatggcatcccgcctgagaagttcagatgagaagggccacctgaacaaccaacagaatcttaaaaagtaaaaaatgagtgttgccactatgcatctattagaatggcagaaatcgaagacactgacaacaaattatgtggtgctgtgtaggtgaaacttttaagaaatatttttgaagcatatgttattatttgcactgctattgtgtgtgtgtgtgtgtgtcttgaatatatgtagaatgtgtgttgtgtgagagccagagagaggaaactcaagagagtgttgtcttagactgtctcc

SEQ ID NO: 91902 - DNA, 263 bp, Homo sapiens
tgatagggtgcaaaatgcttcctttctagaggttgaaattatagtaagcaagattatccatcattcatttggaagatgactggggtggaggcagcatgagttgtgttgctggggcagacatgacataaagggtagagtcagtacacatacttgcaaagatgtagttatgagacctaatagggacctctctcctgtcttcctgtcctgtcccatctctccttccttcccctcctgtcatctccacatgactcccctctaatctt

SEQ ID NO: 91903 - DNA, 407 bp, Homo sapiens
tcctacagcacattgaaagttcctgcttacttttagagagtaagaccagcaactgattttaccacaaactcaccccagaaaagtccatccccagttgccaaaccctggcccctgctcacatgcctgcacaatctccccgctttccctcagtccgtggtgacaggagcagctgagaggagtgtttccgtttactgctggaacagcctttaggtctccatgtttgatgtcttcttgtttacactacaaaatagcagtttggagacacaaattgagacacatgcagtactgacatatatagatatctctcagtctgggatctttgcattaaatccagttcatgaaagacttggtgaagttgggggagttcctaggccctgacatggatcagagagtagtcctgggaagca

SEQ ID NO: 91904 - DNA, 433 bp, Homo sapiens
gcatattttgaaagttggtgctaatatttgtgctttggattaggccaaccacgattcagttacgggctttgcaacttactcatgtaaatttggaaaaggtatctaactctctaaactgcatatttctcatctgtaaaatgctgataaaacttttctcataaccttattataaagatataatatattttaaatgcccaagcatacatacagcatgtaataattatgtagtaaatgtgagatgcaattaacgtcagaaaactaagcgtagaaaaatagaaagctgatatcattgtaaagtccattacaatgtctgtgttttgtgtgcctggaacacaatatacttcatttttctaggttcaaggaccttgtaatttttttttatttttctatcatctcactgatatctccattaaaacatcatttatttgtttct

SEQ ID NO: 91905 - DNA, 167 bp, Homo sapiens
ataaagaaaagaggtttaattgcctcatggttccacaggctgtacaggaagcatagtgctggcctctactcagcttctgaggaggcctcagggagttttcacttgatgaaagcaggagcaagagagagtggggagggaggtgctgtgtacttttaaacaatcagatc

SEQ ID NO: 91906 - DNA, 1039 bp, Homo sapiens
  misc_feature (1036)..(1037): n is a, c, g, or t
  misc_feature (1039)..(1039): n is a, c, g, or t
ggggattatccacacagtgcaataccattcagtaattaaaaagaaatggaatactgatacatgctgcaacatggatgaacctggaagacattgtgctaaatgacagaagccagacacagaaagccatacataatacaattctatttctatgaagggtccaaaataggcaaatccatagatacagaaaggagagtagtggttctccagggtagtggaaaagggggtagtgaccgctattgggtatgaggtttctttttggggtaatgaaaatgttctaaaattgattgtgctgatggctgcaaaactctgtgaatatataaaaaaaattaattgtatattttaagtgggtgaattacatggtacataaattttaccccaatgaagttattttaaaaaatgaaacaaagtgtgaatgcagggatggctaaataaactgggagtgacgtcagcccctgatacacacattcttggtctacagcataagggctgtttcacgagagacactatcactggggttatgaacaagacagaagaaggcaaagaaaacaggagcccatctctagcaaaagagggccaaaacccaacttctcctgttagaacagcagggggtttcctggacagagaccctaaaaatatccaagtacatatcttaacacacactagactatatccctgacatagaaaggataacttctagaatcctgctaaaaatttagaagtgaagaaaagtttacacccttatcaagcaatccttagctctaggctgatattattaacacccctgtgtcccaaggccaggcatggttgccacgtaattggctgagctcattcaataattaggtcctcccttagccatagtcccaacttcagtggggaatggagcagcactaaaaggtcttgctcggctgggcacagtggctcacgcctgtaatcccagcactttgggaggccgagaccggcggatcacgaggtcaggagatcgagaccatcctggctaacatggtgaaaccccgtctccactaaaaatacaaaaaannan

SEQ ID NO: 91907 - DNA, 227 bp, Homo sapiens
tgcacctttaagttgggggagtttgaagacgttgccaagacacgtgctgcagcatttgatcttttctgccgcactggcttctgcaattaacatgctttcaccagtgaaactcaggttgcggggagagcattcttccaggttcatgcctgttgtcatggagtaattataattcatgtctccgttcacagtgtcctggtttgtagaataaaatatctggtccacccacc

SEQ ID NO: 91908 - DNA, 773 bp, Homo sapiens
aggaggggctagatcacacagcacctaaacatgttcggaatgtagattttatcccacaggcaacaaagaaacattcagagagtttgagcaaggatgtgacatgatgatgttagaattatttattatttatttgagacagggtctctgtcacccaggctggatgcagtggtgtgatcacagatcactgcagcctcaacctcctgggttcaaacaatcctcccacctcagtctcccgagtaattgggaccacaggcacaggccaccaaacccagctaattttaatttttccttctttctttctttcttttttttttttttgtagacagggtctcactatgttgcccaggctggtgtcgaactcctgggctcaggcagtcctcccacctcagcctccccaagtgttgagattacaggtgtgagccaccatgcccggccatgataggaattttttaaagaccactcagactgctgagaggtgaagagattagaaaggagtagaggtagatgagggcaggtcagtgaggggctgctggagtattccaagcaaaaagatggttgtttgcaccaaactagaacagtggcagagaagcttcagagaaaagaaccatccaagagtcgtttataagataaaaatcagcagtatttggtgcaggactagataagggcgaaaggagggaggtcgagcttgcattcgtagtgaggagaaatgtcaattacctctggcagaaagcacaggctgaacaaactctgcagctcacgtcgagcactgcact

SEQ ID NO: 91909 - DNA, 468 bp, Homo sapiens
gcctgtttgttttttcagattatagcatacagttgttgaggggtggactgtatcatctttatcttgtaattccagtgcttgtcctagtaccttagcacatggttgctgaatacatgaatgaagagtgagaaaccagaagctctgatacttaactgccatgataatgaattcagtgtgcaactatgggcaaattatatttaatagtaattgcatattgtacatatttttcattcttattaacactgataaacttttcaacatatactgactttctcttagttaactgtgaaatcatttaggataaaggaatataattctttttcattgtaacttctggaatttaaatctggaatcctctatagcaggggtccccaacccccgggtcacaggacagggtccctggacctgtttaggggaccaggggtgcacagcaggaggtgagtggcaggcaagcgagtgaagcttcat

SEQ ID NO: 91910 - DNA, 455 bp, Homo sapiens
agagagcaagctgacctcatgataaacactgcatgtgctgcaagcctcgtttattttcgtttctcccccctcttcttccccgatgaatttcatacagtttatagggacagtttcaaaataacagattaacaggagggaaaaacagtttatttacatgtgcaatgtgcatacacatggaagaactcagtggtgggtaactcaaaggagtagttagttagaatttggggccaatatgctatctaactcattctacaaagccagtctcaccctgataccaaagccaggaaaggacacaacaaaaaaagaaaactgcagaccagtatccctgatgaacatagatgcaaaagtcctcaacaaagtactagcaaaaccaaattgaacagcatatcaaaaagataattcagcacaatcgagtgggcttcatcccagtgaggcaaggatggctcagcatacac

SEQ ID NO: 91911 - DNA, 298 bp, Homo sapiens
tggcagcacacagatcagagggtgggctcctgtgggacagggtcacgcccacgggtggctgtgctcagttcttgattatcctccacctaccagctgcgtgaccgacattggtgtcatcaaaactcttcatttgggcataagagtggtgtttctcggccaggcgcagtggcttacgtctgtaatcccagcactttgggaggctgaggcaggtggatcacttgaggtcaggagttcaagaccagcctggccaacatggtgaaaccccgtctctactaaaaatacaaaaaaatagctgggc

SEQ ID NO: 91912 - DNA, 409 bp, Homo sapiens
cgcaacatgcttttaaataaccagatcgcatgagaactcactcactatcacaagaacagcaagggggaaatccacccccatgattcagtcacctcccaccagacccctccttcaacactagagattaaaatttgacatgagatttgggcagggacacaaatccaaaccatatcaactgtgacacaacttgctttcaccttatagctgaggaaatggggcataaaccacattcgttcattcacttcatacttagtgagggcctgtcatcactaccccatcttacctgatgaaatgattatcctgtgtccagaaataaatgtggaggtgaagtcatcagattaaaatattttgagaaaataggtacagatggttgagcatttctgtaacactttctcaaacttctttcatc

SEQ ID NO: 91913 - DNA, 174 bp, Homo sapiens
atcaggatgtgtgaaactacagggggataaatgaacgatgtacagaatgtgatgaaaaaattatatgaagtataaaatgggaatgaagccatcaggagccaaagaaatatttatgaatttaagagaatgaaaagcatattattattttcagatattttataaagtgaacccaaa

SEQ ID NO: 91914 - DNA, 102 bp, Homo sapiens
tgggtggaaccccatggtggtgtgacccctgccccttggatgcttatggcccagcaggggagtcgcgtgtgaatccagacaaacagaaacacccactgcagg

SEQ ID NO: 91915 - DNA, 415 bp, Homo sapiens
gtgtagctctagctgctggatttgaaacctacttccctgtggtagaaaactcttgaccatgatcaaagggctggtatctggtaaaggagacacctgggaagaactgtttttcgaaggtgagtcagaaagcttggctcatggctggggcaggggctcacatctgtaatgccagcactttgggaggctgaggtgggcggatcacgaggtcagattgagaccatcctggctacagcaaaaccccatctctactaaaaatacaaaaaattagtcgggcgtggtggcggttgactatagtcccagctacttgggaggctgaggcaggagaatggcacgaacctgggaggcggaggttgcagtgagccgagattatgccactgcactccagcctgggtgacagagcgagactccatctcaa

SEQ ID NO: 91916 - DNA, 484 bp, Homo sapiens
tgtcgcccaggctggagtgcagtggcgcaatctcggctcactgcaaactccgcctcctgggttcacgccattctcctgcctcagcctcccaagtagctgggactacaggcatgggccaccgcacccggctaatttttgtatttttaatagagatggagtttcgcagtgttggccaggctggtctcgaacttctggcctcaagtgatccacccacctccacctcccaaagtgctgggattacaggtcaccgcgcccggcccgagtctggacatgtacaggtttcttgctaggcatgaatgcagtaaatctaagatgcatgtagagagccagggttttcggcttggttgaagtagagtgagtctagaaggacacatagaagatgagggtggagaggtaggacgtggctgtgatgtggaatactgtgatacctgttccttttggggggcttttggctaaaatcatggtcatagttaggatgattaat

SEQ ID NO: 91917 - DNA, 412 bp, Homo sapiens
ttggcaataaatattatgggatggaaaagacctcttatggtctaaagaaaagcttcacaggctattaaaaatactatgattaaaacgcatactggtcctggatggcaaatttacttcccaacttgtgaaactaaagtaggtggctcatgttccaccaaatataaacagcccatttaatactcgttaaaaaatattaaactataatactttacacaatgctataaacgagaaaaacaccctacagaagttgtttttcaacttttgacactcagcttcacaggattattttacaggaatacacatgtgtcgagctgaatcaacacgctattttgtattcaatggaatattttctactttttaaaaaattcggatcaccacccactaaagtgacttcatgaccctataactcagg

SEQ ID NO: 91918 - DNA, 326 bp, Homo sapiens
gaaaaacaaggaaaataggcaacaacctgcaatggacacttttctctacagaaccttttcaaccctgaattgaattgtttcctattcattttttaataaaaagttactttgcaagatataaggaaatactgtcccaaagattttcactagtcattcaatccattaataggatttgaaaaggcatcattacacagggttgaaaatactctggaatgagactgctttacagtcagaatgcctgagttttgaggcactgttacttctaaacatctctaagtttctattttctcatctaaaggagtaatattactttccttaaaaggttg

SEQ ID NO: 91919 - DNA, 263 bp, Homo sapiens
gggtccatccacattttaccctggaggacccagaagcccagtcactctctacaaaaccccagccttgatacagacctctctgcgcgccccccaactgccccaaccctgattcatcccgctagggcccagtaagaacattcaccctccccaaggacctgcccccactcacgttccgcacatagactcccaggccgcacgctccggctctgaccccaatccctaaggaatttacacatttttcccttcccgaggccacgcccccc

SEQ ID NO: 91920 - DNA, 491 bp, Homo sapiens
tctgggtggaggacttaaaatttgtttttcaggcagcagatttaacccatggcaactgtaactcatcttgtgtgagtggcggtttatagtattgtatcctgtggcatcatacaaggggtgcaagttaaactctttaaagttaatcacgatttttgctcgtggccttctgggtttatccgtacgccgaagacaggcacctgtattacatgctaaggaaatgtgaataccaaaaattgatcctgaggaaagtcttgattaggtttttttggaatcgcctttgaaatgtaatttccctcaccttggcagtgcagaaagtttgtgatttttattgccgaaatagctttcaacattttgaaattgacttaagagaatgttggctgtgtatgtctgtatcttgcatttctattggctttgtgaacctaattgttttggatttagtctgatctttaaataaatgatttctttgtgttctctctaatggaagtctgtga

SEQ ID NO: 91921 - DNA, 447 bp, Homo sapiens
agaaaaatggcaggtatctggcaagatcaccctttgatgcaaggatccatcttcaaggaatttacctgctccatatagtcacaatatgcaaaatgactgatgtccatgtttgtattaacgagagactgggaaaaacccaaacttccatcagtctggaactggctaggacccatgtgccatccacgcaatgggaataccatgcagctcattaacaaacaaaaatccaggacactccacagacagatacgaaaatatctcagccgagcgcagtggctcatacctgtaatcccagcactttgggaggctgaggcaggtggatcactcgagatcaggagttccagagcagcctggccaatatgacaaaaccccatctctactgaaaatacaaaagttagctgggcatggtggcacaccactgcactccagcctgggtgacagagcaagact

SEQ ID NO: 91922 - DNA, 501 bp, Homo sapiens
agttccaggtacttccgggtcctgcgcgcttctcgcctgccctgcggaggtgcaaatggggaccctgagtggaagctgctgggcttgagccctgaccaccaatcccagctcccagaaggaagtttaacatgttttctggaacttgtttcttcagacttcaataaaaatactgggactcgaggcctgtgaattcccgtctcttctgatttggagggctatagatacagcattcccactcccatccgatcgatgcccctgaccctgctctggggaccaccaggaaggctggtcatgcccgctttgttcccaggatccctgtggccacaggttcctttccaggtgagcagctgctccatccgaaagatctcgtgggttgagaagtccttggagccccggggtggccagggacgcagataatagctggcattcctgctgagggtgatcaggccactagggtgcagaggggtaggagcgggtgtgagggagctctttccccatccc

SEQ ID NO: 91923 - DNA, 290 bp, Homo sapiens
gttgagactcagaagctctaagtgtttacccaagggcatactgctaattagaagcaggcctgagattataaagagtgctcgtctgcctcttccgttgatggtcagtttgatcatcataaagcttttgcccatttcctattaccagtttgtgcataacccgattaatggtgaatttaacttgatatatatatatgggtatctgtactgattgttataataataataaacaatttctaatatagatcttaccaggtatctggttttttttaaaggatttttatatataaatt

SEQ ID NO: 91924 - DNA, 557 bp, Homo sapiens
gattacaggcatgagctgctgcacccagccagtttccctgtttttaaatttttcttcatgttccatttcctggttttgtttattctaatttacaagagattttcctgagctgtatcccctggttcttctattgaattttttcatttctgctacaaaaatgttaatttccaagagtttttgtttgatccccgactttcctttttggtagcctcttgctcttatgttgtggattcaggatcttctcttatttcatatttctgaggattccagttgtaattttctgctgttttcttctgcttcctagattgtctctgttgtttattttggtctctggctttcaagttggagcttatcctcagacaataacagctaccattgagtatcagcccctattttaagtattttgcatgttttagctaatttaatccttacaacaaccccgggaggtagagccaggccctggtccctcccatcccaagcctggaaggttctcagttgagaatcagctttcttcttgctgatgtcaagggttgatgtcaggaaccctttatctgatg

SEQ ID NO: 91925 - DNA, 504 bp, Homo sapiens
aagccactgaacatcaggtacccattcagtattcaaatttccaactatctcataaacacctgtttttgtttgcttccgtgtttgaatctagatctaagtaaggtgtacacattgcagctagtttatcttgtctctttcaatttagtattctccctatacctttcccctcactggtaatttatttgaagaaacaaggttatttgttttgtacaattttctacagtctgggtttttatgattataggcccctggtatagcttaatttgttcttctatctgtactttttaaaaaaaataaattggtagttgtatctagacggggctcatttttgcttttggtgatgggcagggtggggtgcaggttagttcataagtggtattgtgttctccaataacacaggagacaacatatggttgcctctctaacatatacactttgaaaagctgatccatttatcacattaactgcaatgatcacctcaaagatgttttatcctaatttctg

SEQ ID NO: 91926 - DNA, 767 bp, Homo sapiens
gcctgggtgcaagtcactcaccttccacctgtggggccttgtgtccggcaagcgtagtggtcctgtggccccactcagagctagtggaggagaacagctgccgtttcctgcgtatttaggtggctaagcaggctgtcccagccacacggcctcaggcaagttcttaacctctgcctctgtttcctcatctgtacaacagggagagctggatattcacctggctgggactctcagaggcctcaggctatgaggggccggtagggggctttcctgctctcatttgttgtcatggcgatcctggcagatggggaactgcccccatttcacagaagacactggggccccaaagggttggagaatgggctaaggtcagagcaggaatgtggccagggcctggcccacctagctgacccctgctccacagtcaccgcaccacagaactggaaattactctgcagacaggcctgttccgtcagtgccccttctgttcccggctctcctgcccctatccgaaatccttcagcctcccaaggtgctgggattataggcatgagccgccacgcctggctgtcatctgtaatctttactcctgacctagtatgcctctccccactgccacctcactcctccagggtcttgaggtatccccacctgacctgggggcagctctgggctttggtgatgctcagaatgcccaggcactctgatcacagcctatcttaccctaggcctttccggattccgtcctctcgttcccttactcgctt

SEQ ID NO: 91927 - DNA, 486 bp, Homo sapiens
ggttgggaaaaaaacaaaaaaaccaaaaaaaaaaaaaattttaaaaccaccaccctccctgcactatcaccccattccccagaccttcttgcccccgccctcctggtctgtggacttccctctgctctgagcccagggagggggaagaagccagggggtagggtggccctgggaacctggctctgggtccccacttcctctcccagtgccgggctgggtggggtgtcaggtttatttatgtacctcttgcacactcatcaacctatgcaagtcccccaccccggccctccatgtttctgtgcctttgctcatcccctcaatctcccagggcttctccagtccccctcccactagctgcaggaagtgggatggatgggccacctcgtttggaatcagcagggtgtccctctcatgggaccctcccctctccccagcctgtcctgtcttgttcactctccatcagggtgagctgactgtgcctggcac

SEQ ID NO: 91928 - DNA, 308 bp, Homo sapiens
aggtaatatttagttaattgttcaagtacacaggttgacctaaaagcagaaaatataagagccttggtcttctgcctccctactgagcttggggttccatatcactttgtagagatgatcaataacaacaaatggcagaaagcagctgagacatttacattcaaatcacacactagaaaggaaaagaaaacaaaaaagagttccttttaaatggtttccaactccaaatttcctatgaagtttgacttaaaaagaaatatacttagcttcattctcggctctccaaaatcttggtcattcctaaaagc

SEQ ID NO: 91929 - DNA, 744 bp, Homo sapiens
  misc_feature (7)..(8): n is a, c, g, or t
cgaggtnntctagaggatcccttcgattggcgggcacttagggagacccgatctctacaaaaatatttaaaaattcgctggatgtgatggcacatgacgggttccagccattccagaggctgaagtagaagggacactggagtccaggaggtcaaggctgcagtgagccacagtcatgccactgcactccagcttgagtgacagagtgagaccatgtctcaaaaacataaagaaaggcagcttcaactcatgcactgagccctgaggttactgggaacggcaggtgcaaatatctcatgaggagatagaaagttggcataatttggatgagaaaggctactatggctgcaatatggtgagggaggaggttggagcttcagaagcaggtggaggacagatgtgcatgatttagagaaccaagggaaggagttgggtttttatctgaaatctgatgagaaattatgtttgcaattgatttctcatcagattttactaaaatacagagaatcagtaggaagggtactagctgtactctgatagatttctaagtactgcaaatggtgctaagtgctttgtagccgttctcttatttaatccttagaacaatcctgtgaagaaccttctaaatctgatggtatttatggctgtaagttgcccgctgtcgattggcgggcactcttagatgtagtgcgacagagcagtctacgctcgccgtacatctacatgagcgcccagagtctggac

SEQ ID NO: 91930 - DNA, 928 bp, Homo sapiens
tttttttctttttaagtagagatgaggtctcactatgttgcccaggttggtttcaaactcctgagctcaagtgatcctccagcctcccgaagtgctgggattacaggtgtgagccaccatgcctaacctcacatttgttaaggaatttagaaggcaactttgctaggcacggtgactcacacttgtgatcccatcactgagaaactgaggcaggagtatcacttgagtccacgagttcgagaccagcctgggcaacatggggagacccgatctctacaaaaatatttaaaaattcgctggatgtgatggcacatgacgggttccagccattccagaggctgaagtagaagggacactggagtccaggaggtcaaggctgcagtgagccacagtcatgccactgcactccagcttgagtgacagagtgagaccatgtctcaaaaacataaagaaaggcagcttcaactcatgcactgagccctgaggttactgggaacggcaggtgcaaatatctcatgaggagatagaaagttggcataatttggatgagaaaggctactatggctgcaatatggtgagggaggaggttggagcttcagaagcaggtggaggacagatgtgcatgatttagagaaccaagggaaggagttgggtttttatctgaaatctgatgagaaattatgtttgcaattgatttctcatcagattttactaaaatacagagaatcagtaggaagggtactagctgtactctgatagatttctaagtactgcaaatggtgctaagtgctttgtagccgttctcttatttaatccttagaacaatcctgtgaagaaccttctaaatctgatggtatttatggctgtaagttgctggcaatgttttaatctctttgtataaataaagtcattttagccttacaactac

SEQ ID NO: 91931 - DNA, 341 bp, Homo sapiens
agtgtagtggtgcgatcttggctcactgcaacctccgcctcctgggttccagtgattctcctgcctaagcctcccaagtagctgggattacaggtgcccaccagaacgcccagctcatttttgtgcttctagaagagacagggtttcaccatgttggccaggctggtctccaactcctggcctcaagtgatctgcctgcctggcctcccaaagtgctgggattacaggtgtgagccactgcaccctgcctcagtacctccattcttcccacacaccctcctcacgtgctccttcctgacttctgggcccttccttccttcttttttttttttttttttttt

SEQ ID NO: 91932 - DNA, 446 bp, Homo sapiens
tttttaaaaaggcagttatgcttttagaatgtgaaatcccttggggagccaccgtaggttggatggtaagtagaatatcaattttgtgtgttattgctgaaatgcctaggacagttctgttaatttagattttcttttcagggtcatttgctgttaacttgtaatatccttgaagaaaaaaagatttccccaaaatatcaatttctacacagtttctctgtaaattttctaaactttgaaattaaaagaaaaagtaatgcacttttaattctggttaaatcctttgaacatatactactagataaatgtgtttgttttgttataggtaaaaagaagcctttcttgttaactgccaagatttgtagtcattttcatttctaacatagcagcaagatggggaactcctgctattttggtttctacacaattgcataagtctcttcttg

SEQ ID NO: 91933 - DNA, 373 bp, Homo sapiens
ggatttgactattttcattaagccaacaatatttcataagcatacgaaagctaagattattctgttttcggatgggctttctagttttataacccttatggtcaatcttatagtattctgcaggaatacataaaaccacatgaccaataaatgcaaaaaaatgcaaacaattcttaggacatttttaatatcattttaccaataactttaaagccaattatttattaaagatttttcttaagtcacgtgaacttggaaaaagcatttgactagtctttttttaaagtatctgatttaagcacttttattttttaagccaattaattagagctcttttatgtatttttagtagtgaaacgttgtgtacacaaca

SEQ ID NO: 91934 - DNA, 565 bp, Homo sapiens
gaaatacagtggcctttcacaataaaagactagattttaagagtctcttaattatttggtgagagacacaggacagtacaatctgtgaatttctattcttttgaactatggagattttatcatgactggacaatgagaagaaatgttatagctgtagcttgatggttttgcttttataaaattcttctggtattgaagagaaaaagattattaatgggtaaagtaagaaaaattaactccattcctactgggtgacttttattatcagatagcaatctgataactgattattattagtttggtgacaataattatttttggatgcttggttgctaataatttgcctgatgcctagaaaattctgatttggggtctgtattctagtgggcatatagcccaaattagcaatcagattcttctactaaaattatctgatcaagctttcagataattcatgcatttacatagaatacatatcagtggtttaaacagaatttcacagacgctttcccattgaagctgattgtttggcaaaatggtgagtcatgctttactggccaactca

SEQ ID NO: 91935 - DNA, 295 bp, Homo sapiens
cctaaacttaagggttaaattataaaattcttagagaaaatatagaggaaaacctttatgacattgaatttggcacggaattacttggatttgtcaccaaaaacacaggtaaaaaagaaaaaatagataaactggtctccatcaaaatttaaaacttttgggagagatttgttaaaggatacaaaattacagctagataggaggaataagttctataccattgtaagatgactataattaacgataatatatagtttcaaatagctagaagatactgacggttcccaacacaaag

SEQ ID NO: 91936 - DNA, 1778 bp, Homo sapiens
ttgccattacccacagaataaagaaaggggccctgttattcaacaataggggaaaagacagagacaatgggaaattgtgcttccgatggggtggggactgagaaggaaaggacagacagacagacagacagggggttgtacagaagaggtccggtttcttgaagcagctggaagtcctggatagttcccacctgaaagtctgtttgcaaaggcaatgcgcactcaggcaccagagggcagaggggctcaagttccagggttttaaggtgcttggaactcccaggagcctggcaaaccttcatccagaacctcttcctcaagcaagacaaaaagctgctaagcactgctccctccgtctctgtgaagagaccagcttctaacagacggtgccgggctgaccccccatcatgccaggctggctcaccctccccacactctgccgcttccttctttgggccttcaccatcttccacaaagcccaaggagacccagcatcccacccgggcccccactacctcctgccccccatccacgaggtcattcactctcatcgtggggccacggccacgctgccctgcgtcctgggcaccacgcctcccagctacaaggtgcgctggagcaaggtggagcctggggagctccgggaaacgctgatcctcatcaccaacggactgcacgcccgggggtatgggcccctgggagggcgcgccaggatgcggagggggcatcgactagacgcctccctggtcatcgcgggcgtgcgcctggaggacgagggccggtaccgctgcgagctcatcaacggcatcgaggacgagagcgtggcgctgaccttgagcttggagggtgtggtgtttccgtaccaacccagccggggccggtaccagttcaattactacgaggcgaagcaggcgtgcgaggagcaggacggacgcctggccacctactcccagctctaccaggcttggaccgagggtctggactggtgtaacgcgggctggctgctcgagggctccgtgcgctaccctgtgctcaccgcacgcgccccgtgcggcggccgaggccggcccgggatccgcagctacggaccccgcgaccggatgcgcgaccgctacgacgccttctgcttcacctccgcgctggcgggccaagtgttcttcgtgcccgggcggctgacgctgtctgaagcccacgcggcgtgccggcgacgcggcgccgtggtggccaaggttgggcacctctacgccgcctggaagttttcggggctagaccagtgcgacggcggctggctggctgacggcagtgtgcgcttcccaatcaccacgccgaggccgcgctgcggggggctcccggatcccggagtgcgcagtttcggcttccccaggccccaacaggcagcctatgggacctactgctacgccgagaattaggcgcccaccgtgtcccctccagcgcgcgcgaagaagcttgggagtcgtggcgggggtctctcgccacccctttccggagagcctcccctccctccagacccggagcggcctctccagacctgccttcccagccgggggctgcgggcctcggaccccggctggcccggcggcggggaggggaggcgggggcgcctccggcggcgagatgcagaggtgaccctcggacccgctgccgttcgcgaaccctagcagaggactcagccaccgccgaggggagggtgaggcggccgggggcattaactgacctctgagtacagcaataaaataacctggggatcttttaaattg

SEQ ID NO: 91937 - DNA, 1044 bp, Homo sapiens
ttgccattacccacagaataaagaaaggggccctgttattcaacaataggggaaaagacagagacaatgggaaattgtgcttccgatggggtggggactgagaaggaaaggacagacagacagacagacagggggttgtacagaagaggtccggtttcttgaagcagctggaagtcctggatagttcccacctgaaagtctgtttgcaaaggcaatgcgcactcaggcaccagagggcagaggggctcaagttccagggttttaaggtgcttggaactcccaggagcctggcaaaccttcatccagaacctcttcctcaagcaagacaaaaagctgctaagcactgctccctccgtctctgtgaagagaccagcttctaacagacggtgccgggctgaccccccatcatgccaggctggctcaccctccccacactctgccgcttccttctttgggccttcaccatcttccacaaagcccaaggagacccagctacaaggtgcgctggagcaaggtggagcctggggagctccgggaaacgctgatcctcatcaccaacggactgcacgcccgggggtatgggcccctgggagggcgcgccaggatgcggagggggcatcgactagacgcctccctggtcatcgcgggcgtgcgcctggaggacgagggccggtaccgctgcgagctcatcaacggcatcgaggacgagagcgtggcgctgaccttgagcttggaggttcaattactacgaggcgaagcaggcgtgcgaggagcaggacggacgcctggccacctactcccagctctaccaggcttggaccgagggtctggactggtgtaacgcgggctggctgctcgagggctccgtgcgctaccctgtgctcaccgcacgcgccccgtgcggcggccgaggccggcccgggatccgcagctacggaccccgcgaccggatgcgcgaccgctacgacgccttctgcttcacctccgcgctggcggggccaaggtgtctttcgtgccccgggcggttgacgctgtttgagccca

SEQ ID NO: 91938 - DNA, 1716 bp, Homo sapiens
ttgccattacccacagaataaagaaaggggccctgttattcaacaataggggaaaagacagagacaatgggaaattgtgcttccgatggggtggggactgagaaggaaaggacagacagacagacagacagggggttgtacagaagaggtccggtttcttgaagcagctggaagtcctggatagttcccacctgaaagtctgtttgcaaaggcaatgcgcactcaggcaccagagggcagaggggctcaagttccagggttttaaggtgcttggaactcccaggagcctggcaaaccttcatccagaacctcttcctcaagcaagacaaaaagctgctaagcactgctccctccgtctctgtgaagagaccagcttctaacagacggtgccgggctgaccccccatcatgccaggctggctcaccctccccacactctgccgcttccttctttgggccttcaccatcttccacaaagcccaaggagacccagcatcccacccgggcccccactacctcctgccccccatccacgaggtcattcactctcatcgtggggccacggccacgctgccctgcgtcctgggcaccacgcctcccagctacaaggtgcgctggagcaaggtggagcctggggagctccgggaaacgctgatcctcatcaccaacggactgcacgcccgggggtatgggcccctgggagggcgcgccaggatgcggagggggcatcgactagacgcctccctggtcatcgcgggcgtgcgcctggaggacgagggccggtaccgctgcgagctcatcaacggcatcgaggacgagagcgtggcgctgaccttgagcttggagggtgtggtgtttccgtaccaacccagccggggccggtaccagttcaattactacgaggcgaagcaggcgtgcgaggagcaggacggacgcctggccacctactcccagctctaccaggcttggaccgagggtctggactggtgtaacgcgggctggctgctcgagggctccgtgcgctaccctgtgctcaccgcacgcgccccgtgcggcggccgaggccggcccgggatccgcagctacggaccccgcgaccggatgcgcgaccgctacgacgccttctgcttcacctccgcgctggcgggccaagtgttcttcgtgcccgggcggctgacgctgtctgaagcccacgcggcgtgccggcgacgcggcgccgtggtggccaaggttgggcacctctacgccgcctggaagttttcggggctagaccagtgcgacggcggctggctggctgacggcagtgtgcgcttcccaatcaccacgccgaggccgcgctgcggggggctcccggatcccggagtgcgcagtttcggcttccccaggccccaacaggcagcctatgggacctactgctacgccgagaattaggcgcccaccgtgtcccctccagcgcgcgcgaagaagcttgggagtcgtggcgggggtctctcgccacccctttccggagagcctcccctccctccagacccggagcggcggggaggggaggcgggggcgcctccggcggcgagatgcagaggtgaccctcggacccgctgccgttcgcgaaccctagcagaggactcagccaccgccgaggggagggtgaggcggccgggggcattaactgacctctgagtacagcaataaaataacctggggatcttttaaattg

SEQ ID NO: 91939 - DNA, 2017 bp, Homo sapiens
ttgccattacccacagaataaagaaaggggccctgttattcaacaataggggaaaagacagagacaatgggaaattgtgcttccgatggggtggggactgagaaggaaaggacagacagacagacagacagggggttgtacagaagaggtccggtttcttgaagcagctggaagtcctggatagttcccacctgaaagtctgtttgcaaaggcaatgcgcactcaggcaccagagggcagaggacagaagcttttcctcaaaggtgcaaaaggagcaactgtgttgaacaggggctcaagttccagggttttaaggtgcttggaactcccaggagcctggcaaaccttcatccagaacctcttcctcaagcaagacaaaaagctgctaagcactgctccctccgtctctgtgaagagaccagcttctaacagacggtgccgggctgaccccccatcatgccaggctggctcaccctccccacactctgccgcttccttctttgggccttcaccatcttccacaaagcccaaggagacccagcatcccacccgggcccccactacctcctgccccccatccacgaggtcattcactctcatcgtggggccacggccacgctgccctgcgtcctgggcaccacgcctcccagctacaaggtgcgctggagcaaggtggagcctggggagctccgggaaacgctgatcctcatcaccaacggactgcacgcccgggggtatgggcccctgggagggcgcgccaggatgcggagggggcatcgactagacgcctccctggtcatcgcgggcgtgcgcctggaggacgagggccggtaccgctgcgagctcatcaacggcatcgaggacgagagcgtggcgctgaccttgagcttggagggtgaggcccttccgctcccgccccattcctgtgtagcagcgggtccgcctcgcctgggtctcccagggctccttcccagtatctcctccgcacccctggggaccccagctccctctcccaggccgcgccgcccttcctccccctccgctcccatccgctggccctccccaggatccccgccaccccctaggtgtggtgtttccgtaccaacccagccggggccggtaccagttcaattactacgaggcgaagcaggcgtgcgaggagcaggacggacgcctggccacctactcccagctctaccaggcttggaccgagggtctggactggtgtaacgcgggctggctgctcgagggctccgtgcgctaccctgtgctcaccgcacgcgccccgtgcggcggccgaggccggcccgggatccgcagctacggaccccgcgaccggatgcgcgaccgctacgacgccttctgcttcacctccgcgctggcgggccaagtgttcttcgtgcccgggcggctgacgctgtctgaagcccacgcggcgtgccggcgacgcggcgccgtggtggccaaggttgggcacctctacgccgcctggaagttttcggggctagaccagtgcgacggcggctggctggctgacggcagtgtgcgcttcccaatcaccacgccgaggccgcgctgcggggggctcccggatcccggagtgcgcagtttcggcttccccaggccccaacaggcagcctatgggacctactgctacgccgagaattaggcgcccaccgtgtcccctccagcgcgcgcgaagaagcttgggagtcgtggcgggggtctctcgccacccctttccggagagcctcccctccctccagacccggagcggcctctccagacctgccttcccagccgggggctgcgggcctcggaccccggctggcccggcggcggggaggggaggcgggggcgcctccggcggcgagatgcagaggtgaccctcggacccgctgccgttcgcgaaccctagcagaggactcagccaccgccgaggggagggtgaggcggccgggggcattaactgacctctgagtacagcaataaaataacctggggatcttttaaattg

SEQ ID NO: 91940 - DNA, 504 bp, Homo sapiens
cagccgcccctctccgcccaccctgccctcggtcggtgacccgctgtggtccccaggccaagtgttcttcgtgcccgggcggctgacgctgtctgaagcccacgcggcgtgccggcgacgcggcgccgtggtggccaaggttgggcacctctacgccgcctggaagttttcggggctagaccagtgcgacggcggctggctggctgacggcagtgtgcgcttcccaatcaccacgccgaggccgcgctgcggggggctcccggatcccggagtgcgcagtttcggcttccccaggccccaacaggcagcctatgggacctactgctacgccgagaattaggcgcccaccgtgtcccctccagcgcgcgcgaagaagcttgggagtcgtggcgggggtctctcgccacccctttccggagagcctcccctccctccagacccggagcggcctctccagacctgccttcccagccgggggctgcgggcctcggaccccggctggcc

SEQ ID NO: 91941 - DNA, 729 bp, Homo sapiens
ttgccattacccacagaataaagaaaggggccctgttattcaacaataggggaaaagacagagacaatgggaaattgtgcttccgatggggtggggactgagaaggaaaggacagacagacagacagacagggggttgtacagaagaggtccggtttcttgaagcagctggaagtcctggatagttcccacctgaaagtctgtttgcaaaggcaatgcgcactcaggcaccagagggcagaggacagaagcttttcctcaaaggtgcaaaaggagcaactgtgttgaacaggggctcaagttccagggttttaaggtgcttggaactcccaggagcctggcaaaccttcatccagaacctcttcctcaagcaagacaaaaagctgctaagcactgctccctccgtctctgtgaagagaccagcttctaacagacggtgccgggctgaccccccatcatgccaggctggctcaccctccccacactctgccgcttccttctttgggccttcaccatcttccacaaagcccaaggagacccaggtaagaccccagcccaggccagaatctgggggaggcttggggagactgcaagggtggggaaaggggaaagggcagttgttgcaggtacccagggactgaaagtcattgctgagaaggcaatggaggagagggttggggggctctggagaaagcatttggggagcagggtctgatgggcacttggggca

SEQ ID NO: 91942 - DNA, 1968 bp, Homo sapiens
ttgccattacccacagaataaagaaaggggccctgttattcaacaataggggaaaagacagagacaatgggaaattgtgcttccgatggggtggggactgagaaggaaaggacagacagacagacagacagggggttgtacagaagaggtccggtttcttgaagcagctggaagtcctggatagttcccacctgaaagtctgtttgcaaaggcaatgcgcactcaggcaccagagggcagaggggctcaagttccagggttttaaggtgcttggaactcccaggagcctggcaaaccttcatccagaacctcttcctcaagcaagacaaaaagctgctaagcactgctccctccgtctctgtgaagagaccagcttctaacagacggtgccgggctgaccccccatcatgccaggctggctcaccctccccacactctgccgcttccttctttgggccttcaccatcttccacaaagcccaaggagacccagcatcccacccgggcccccactacctcctgccccccatccacgaggtcattcactctcatcgtggggccacggccacgctgccctgcgtcctgggcaccacgcctcccagctacaaggtgcgctggagcaaggtggagcctggggagctccgggaaacgctgatcctcatcaccaacggactgcacgcccgggggtatgggcccctgggagggcgcgccaggatgcggagggggcatcgactagacgcctccctggtcatcgcgggcgtgcgcctggaggacgagggccggtaccgctgcgagctcatcaacggcatcgaggacgagagcgtggcgctgaccttgagcttggagggtgaggcccttccgctcccgccccattcctgtgtagcagcgggtccgcctcgcctgggtctcccagggctccttcccagtatctcctccgcacccctggggaccccagctccctctcccaggccgcgccgcccttcctccccctccgctcccatccgctggccctccccaggatccccgccaccccctaggtgtggtgtttccgtaccaacccagccggggccggtaccagttcaattactacgaggcgaagcaggcgtgcgaggagcaggacggacgcctggccacctactcccagctctaccaggcttggaccgagggtctggactggtgtaacgcgggctggctgctcgagggctccgtgcgctaccctgtgctcaccgcacgcgccccgtgcggcggccgaggccggcccgggatccgcagctacggaccccgcgaccggatgcgcgaccgctacgacgccttctgcttcacctccgcgctggcgggccaagtgttcttcgtgcccgggcggctgacgctgtctgaagcccacgcggcgtgccggcgacgcggcgccgtggtggccaaggttgggcacctctacgccgcctggaagttttcggggctagaccagtgcgacggcggctggctggctgacggcagtgtgcgcttcccaatcaccacgccgaggccgcgctgcggggggctcccggatcccggagtgcgcagtttcggcttccccaggccccaacaggcagcctatgggacctactgctacgccgagaattaggcgcccaccgtgtcccctccagcgcgcgcgaagaagcttgggagtcgtggcgggggtctctcgccacccctttccggagagcctcccctccctccagacccggagcggcctctccagacctgccttcccagccgggggctgcgggcctcggaccccggctggcccggcggcggggaggggaggcgggggcgcctccggcggcgagatgcagaggtgaccctcggacccgctgccgttcgcgaaccctagcagaggactcagccaccgccgaggggagggtgaggcggccgggggcattaactgacctctgagtacagcaataaaataacctggggatcttttaaattg

SEQ ID NO: 91943 - DNA, 1978 bp, Homo sapiens
gagggctgggaacccatgaaggggagtggaataatttgagcaacccaggaatgatgacctggaagagtgcagaaagtgaggtgcttcattttttctcgatgcctttgaaccagagaggtgtagattgatcggtggatatgaaggtgttggactgatgggggtgggggtcgttcttggcaccttggcttcttctttgagcacaggacagaagcttttcctcaaaggtgcaaaaggagcaactgtgttgaacaggggctcaagttccagggttttaaggtgcttggaactcccaggagcctggcaaaccttcatccagaacctcttcctcaagcaagacaaaaagctgctaagcactgctccctccgtctctgtgaagagaccagcttctaacagacggtgccgggctgaccccccatcatgccaggctggctcaccctccccacactctgccgcttccttctttgggccttcaccatcttccacaaagcccaaggagacccagcatcccacccgggcccccactacctcctgccccccatccacgaggtcattcactctcatcgtggggccacggccacgctgccctgcgtcctgggcaccacgcctcccagctacaaggtgcgctggagcaaggtggagcctggggagctccgggaaacgctgatcctcatcaccaacggactgcacgcccgggggtatgggcccctgggagggcgcgccaggatgcggagggggcatcgactagacgcctccctggtcatcgcgggcgtgcgcctggaggacgagggccggtaccgctgcgagctcatcaacggcatcgaggacgagagcgtggcgctgaccttgagcttggagggtgaggcccttccgctcccgccccattcctgtgtagcagcgggtccgcctcgcctgggtctcccagggctccttcccagtatctcctccgcacccctggggaccccagctccctctcccaggccgcgccgcccttcctccccctccgctcccatccgctggccctccccaggatccccgccaccccctaggtgtggtgtttccgtaccaacccagccggggccggtaccagttcaattactacgaggcgaagcaggcgtgcgaggagcaggacggacgcctggccacctactcccagctctaccaggcttggaccgagggtctggactggtgtaacgcgggctggctgctcgagggctccgtgcgctaccctgtgctcaccgcacgcgccccgtgcggcggccgaggccggcccgggatccgcagctacggaccccgcgaccggatgcgcgaccgctacgacgccttctgcttcacctccgcgctggcgggccaagtgttcttcgtgcccgggcggctgacgctgtctgaagcccacgcggcgtgccggcgacgcggcgccgtggtggccaaggttgggcacctctacgccgcctggaagttttcggggctagaccagtgcgacggcggctggctggctgacggcagtgtgcgcttcccaatcaccacgccgaggccgcgctgcggggggctcccggatcccggagtgcgcagtttcggcttccccaggccccaacaggcagcctatgggacctactgctacgccgagaattaggcgcccaccgtgtcccctccagcgcgcgcgaagaagcttgggagtcgtggcgggggtctctcgccacccctttccggagagcctcccctccctccagacccggagcggcctctccagacctgccttcccagccgggggctgcgggcctcggaccccggctggcccggcggcggggaggggaggcgggggcgcctccggcggcgagatgcagaggtgaccctcggacccgctgccgttcgcgaaccctagcagaggactcagccaccgccgaggggagggtgaggcggccgggggcattaactgacctctgagtacagcaataaaataacctggggatcttttaaattg

SEQ ID NO: 91944 - DNA, 409 bp, Homo sapiens
gaccctaatagttaggagtatcatcgcccctattcagcatgaagttacagaagatggaccttcatccttctgcaacccctaggattaagggtccccttgtaaaagggaaaggtggggaggtatgtgggaagcattcaaactagagcaactctagtttgaataagagctaagaaaaatatagctggatcaccaaccagtaattaagggctgcacagcctgcaactgccttgttccattagaaggccaccttctatgctagtaatgataccttctcttttacaaaaaaaaaagaggaggggcatgttgggaaaaagctgagtgttggaagggaaactgaggcagggcattcatgtctgacataatgtcctctggactgtgtctagacttgctggctccttgctactagccc

SEQ ID NO: 91945 - DNA, 679 bp, Homo sapiens
gctgtctgtagaatgaaatgacacattgccatcagacgcagtgaagcatgtcatacagtgagtgtctggtcacagcaggaagatggtgaatgtcagctaatgagtattcatcaccaatgaatagtaacagttttttttactaaggctatgtaatgtagcctcagaatcccactcagcatagccccctggcagcggtgcctctgagagctggcatgatggagagagcctggttggccttactggtgtggttggggcacttgggagaacgccttcctcacaaagctcatctggagggttttcggacttgtaggatagctttttcaggggccttgcctttggcagggcagggacgtgtactgctgcagtctagggtatgggataactttctaaaccagacccagaacttcatggccgcaggggccttttagccatgcggggctaggagctgacacagcgtcagcagcatgagggcctgtggtgctgggcggcagagcccagagggagcccctgctggtgtgactttagtgtaaaggctgggggataccagattcttacagaagacttaagacgggcacagtgatgtctgctctttgacccttgcagtatgaattagtaaaactgaaattattacatttcctttattaggattataaaagcaatgatgacttattgaagaaaa

SEQ ID NO: 91946 - DNA, 343 bp, Homo sapiens
ccttgtttttaagaccttatcttttcctatccctcttgtaaaaattcttttctcctcaagttacagctaaatctcagacttacttttaattgctttccttttttaattcccaagtttattttgtttaaaatatctggccatcaaaactttctgagagtttggaaagaaatataactcttttagaattagagaattgttaaaccttaaacatttttctcctttgatcctaaaagtaaaatgtcttcccactacttcgaatatggtcttctataaagattaaatgtgggtactgaatacatttgaggaaaagattttaaaagctaaaaaaaaaaaatcataatct

SEQ ID NO: 91947 - DNA, 124 bp, Homo sapiens
cgattgtgtctgtggataaggctcggatgcgcttctgtaaactggttagagagattgtaatagaacggaatgatggaataaatctgcttctggtcacagcacatgtccttctcaaataaggact

SEQ ID NO: 91948 - DNA, 597 bp, Homo sapiens
actagttctagatcgcgagcggcgcccttttttttttttaatgggggtattgggtgggacagacggggtcagggaggccccaccatggcttgtcgagggcacgggcacctgcatggcggcgctctccctgcctcccctgccgggctgcaagcctgaggtctgtgctgccggacggggatgctcagggctggggctgcagagccgctgccctggccagggcaccctcatgcaccgacccaacccaggcctgggacgcacgtgtcctctcacagcgtcgtgcctgtgaaggtgggtcaaagggtgagagggcttccttctcacccttctctccataagtatcttgaagatccatggtttgttttgctctattgtttagtttttacttgggtgcaatgtgtacgtcaaaagtttttattttgatatttgaaagagaccaaatcaggcccagaccgcctctctggaaggtgttgtaggccattcaaaacgcctccggagtgtcgcaaaccaagtgcggaggggccctgaggttgtactgtaaacatcatagtgacttgtcttttcaaatatattcccactattttcgcagaaaaaaaaaag

SEQ ID NO: 91949 - DNA, 2338 bp, Homo sapiens
  misc_feature (1509)..(1509): n is a, c, g, or t
ggccccgaggcaccttccacaagggcagcgccaccaagcctgcgggctgccagagctcatcaaaggacaggtcggcagcatccacccccagcaaagcactcaagttcccagtgcacccaaggaaggcggtggggagcctggcacccggggagctggccctgtggcacagagaatgggatgaagcccgcacccccaaagccaaacccggccccagctcccagggcagtggaagccctcgccccggcaccaagacaggaggtggcagccagccccagccagccagcgggcagctccagagcgagacagcaccaccccagacaagcccagcttccccagccggagccctgcaccagagaggctccccgctcgagcccaagccaagagctgcaccaaggggccaagggaagctggtgagcaggggccccacgggagcctaggtcccaaggagaagggagagagcagtacgaagaggaaaaagggccaggtcccagggccagccaggagtgaaagtgtggggagcttcgggagagccccctcagcccctgacaagcccccccggacccctcggaagcaggcaactcccagccgcgtgctcccgaccaagcccaagcccaacagccagaacaaacccaggccgccaccatcagagcagcggaaggcagagccgggccacacacagaggaaggacagactgggcaaggccttcccccaggggagacccctgctcaggccccccaagaggggcacagctgtccacggtgctgaacctgccgagccgcacacccaccggacggccgaggcccagagtgacctcctcagccagctcttcgggcagagactaactggcttcaaaatccctttaaagaaagatgcttctgagtaatttctaggagcaagagcctgggaccggagctgggcgttcctgtctcggcctgcctccttggccagctccggctccctgagatggtccactctgtggccacttgacttcttgtgcaactgctcaggccttgatgtcagagctgaggtggtgatgctttgaacagggcccaggtgggcagcattccctttcttgctggaaggctgggggtgaaagacggggccactgcagcccttttgagaccacacagctgttttcttggtaccaagtacttgaagagacagcagcccatcccctcagcccacacccctgcgccctgtgggcaccgacaccacagaagccaatgtttggagatttgcacaacctcccgttcccccacatggagaagggaagtaagttgaggcagccgtgggatggtggtaggttccctcttagtcttgctgctgttgctggaattccaaagtgaccttagaaaccacgtgggggaaggcagtgctcactacttagaagggttgcttctgagccgcctggtcccccaagagcacaacaggcctcctccctctgaccacagggtcatgcctcctccctctgaccacagggtcatgcctcctccctctgaccacagggtnatgccagcctccatttgcgctgcgggagaaaagcccatctctagcacaccttgaccccaggaaccgggttcccgtatggaactgggaagaaaccgcccctgtgccagctcccgcgggccctcctcgttccctcccagcctccatggccgccctctagagcctccctgctgtacggagctctgggctccacctatttgcaatgttactctgaagtttctggtgctatttttgtgttgtaatgtgaacacaggcttccttgatttttttttttaatgggggtattgggtgggacagacggggtcagggaggccccaccatggcttgtcgagggcacgggcacctgcatggcggcgctctccctgcctcccctgccgggctgcaagcctgaggtctgtgctgccggacggggatgctcagggctggggctgcagagccgctgccctggccagggcaccctcatgcaccgacccaacccaggcctgggacgcacgtgtcctctcacagcgtcgtgcctgtgaaggtgggtcaaagggtgagagggcttccttctcacccttctctccataagtatcttgaagatccatggtttgttttgctctattgtttagtttttacttgggtgcaatgtgtacgtcaaaagtttttattttgatatttgaaagagaccaaatcaggcccagaccgcctctctggaaggtgttgtaggccattcaaaacgcctccggagtgtcgcaaaccaagtgcggaggggccctgaggttgtactgtaaacatcatagtgacttgtcttttcaaatatattcccactattttcgcagaaaaaaaaaag

SEQ ID NO: 91950 - DNA, 2311 bp, Homo sapiens
ggccccgaggcaccttccacaagggcagcgccaccaagcctgcgggctgccagagctcatcaaaggacaggtcggcagcatccacccccagcaaagcactcaagttcccagtgcacccaaggaaggcggtggggagcctggcacccggggagctggccctgtggcacagagaatgggatgaagcccgcacccccaaagccaaacccggccccagctcccagggcagtggaagccctcgccccggcaccaagacaggaggtggcagccagccccagccagccagcgggcagctccagagcgagacagcaccaccccagacaagcccagcttccccagccggagccctgcaccagagaggctccccgctcgagcccaagccaagagctgcaccaaggggccaagggaagctggtgagcaggggccccacgggagcctaggtcccaaggagaagggagagagcagtacgaagaggaaaaagggccaggtcccagggccagccaggagtgaaagtgtggggagcttcgggagagccccctcagcccctgacaagcccccccggacccctcggaagcaggcaactcccagccgcgtgctcccgaccaagcccaagcccaacagccagaacaaacccaggccgccaccatcagagcagcggaaggcagagccgggccacacacagaggaaggacagactgggcaaggccttcccccaggggagacccctgctcaggccccccaagaggggcacagctgtccacggtgctgaacctgccgagccgcacacccaccggacggccgaggcccagagtgacctcctcagccagctcttcgggcagagactaactggcttcaaaatccctttaaagaaagatgcttctgagtaatttctaggagcaagagcctgggaccggagctgggcgttcctgtctcggcctgcctccttggccagctccggctccctgagatggtccactctgtggccacttgacttcttgtgcaactgctcaggccttgatgtcagagctgaggtggtgatgctttgaacagggcccaggtgggcagcattccctttcttgctggaaggctgggggtgaaagacggggccactgcagcccttttgagaccacacagctgttttcttggtaccaagtacttgaagagacagcagcccatcccctcagcccacacccctgcgccctgtgggcaccgacaccacagaagccaatgtttggagatttgcacaacctcccgttcccccacatggagaagggaagtaagttgaggcagccgtgggatggtggtaggttccctcttagtcttgctgctgttgctggaattccaaagtgaccttagaaaccacgtgggggaaggcagtgctcactacttagaagggttgcttctgagccgcctggtcccccaagagcacaacaggcctcctccctctgaccacagggtcatgcctcctccctctgaccacagggtcatgccagcctccatttgcgctgcgggagaaaagcccatctctagcacaccttgaccccaggaaccgggttcccgtatggaactgggaagaaaccgcccctgtgccagctcccgcgggccctcctcgttccctcccagcctccatggccgccctctagagcctccctgctgtacggagctctgggctccacctatttgcaatgttactctgaagtttctggtgctatttttgtgttgtaatgtgaacacaggcttccttgatttttttttttaatgggggtattgggtgggacagacggggtcagggaggccccaccatggcttgtcgagggcacgggcacctgcatggcggcgctctccctgcctcccctgccgggctgcaagcctgaggtctgtgctgccggacggggatgctcagggctggggctgcagagccgctgccctggccagggcaccctcatgcaccgacccaacccaggcctgggacgcacgtgtcctctcacagcgtcgtgcctgtgaaggtgggtcaaagggtgagagggcttccttctcacccttctctccataagtatcttgaagatccatggtttgttttgctctattgtttagtttttacttgggtgcaatgtgtacgtcaaaagtttttattttgatatttgaaagagaccaaatcaggcccagaccgcctctctggaaggtgttgtaggccattcaaaacgcctccggagtgtcgcaaaccaagtgcggaggggccctgaggttgtactgtaaacatcatagtgacttgtcttttcaaatatattcccactattttcgcagaaaaaaaaaag

SEQ ID NO: 91951 - DNA, 404 bp, Homo sapiens
gcagcgtggagaggagctctgctgtatcactgctgcgcctgctcccctgagccccacctgttcctgctctgctcagcagctcacctaaatgctcccaagcaggtgctcggcacacacttcagcaagcagcatgatgaaagaatgacgagtaagtcactggttctctattcatctttacaccgcctcatacacactgacctcattggtcttacctgattttcctcaatttgattctcagtttatcctcgcttatctgtgatgtttttggagcagactcccatttttatatctctgttccttgacactctaccctgcttctagaatgcccttcatctctattttaatcttttttttgaaaccaagtctcactctgttgcccggctggagtgcagtggtgcgatctt

SEQ ID NO: 91952 - DNA, 311 bp, Homo sapiens
acttatgtttaccagtttaattgtaaaggatatcacaatagatacagatgaagaaatgcatagggcaaggtatggggaagggacacggagcttccatgcccttcctgggcaccctgccctcctggaacctccacatgctccgctatccagaagctccccaaactctgtcttcttgggccttctatgaaggcttcattggataggcacgtttgacgaccatgtagaaatgaaattaaacaaaaatggtttggccgggcacagtggctcacacctgtaatcccagcactttgggaggccaaggcaggtggatc

SEQ ID NO: 91953 - DNA, 398 bp, Homo sapiens
tggcaaaaacagtatttgatgaagcaattactgaattggatacactgaatgaagagtcttataaagacagcactctgatcatgcaattacttgggacagtgttactctgtggacatcggaaaaccaggaagatgaaggagatgctggggagggagagaagtaatgtttcttgtgctttgtaatctgttcaatgtcactctgtaccctccacgtatatcccttgtgtggtaaaaaataattgtatgttgactttggatttttcacagcctcagcctagcaaaaatggttcatgggataaacagctggtgtttgtattctaaaactcagattggtcacataaatgccacggcattctgaagttttgattttgattaacattgacaggattactgtgtgtt

SEQ ID NO: 91954 - DNA, 1237 bp, Homo sapiens
gcagccagatctgctgggacacctttcccaaggaagagcccgttgcactgggctttgaaggataagcaggagcttgttactcaggcagaggaagaaagagcatcccaggcggggggagcagcatatgcaaaggcacgaaggggccccaggagcctagggagtctggggaagtgtgagcactttggagagtggaggctggagcgctgtggagagtgggggctggtggccgggaatgaagctgcagctggctgggccacatggtaaaggctgacaactggacccagaggccaactagcctatgatcagcatttcccaaaatctgtttcccgactcatggttctgtgagatgtgacaagggctcctttttcattcctgagacgccggttttcatctgtgatgcggggacagctgcgctccttgctgcgaggcgtcaggacccaggtgatagtgaagggagggtggcgcccgcggttcccggcggccactgatgcctgtctctctgtcgtgtgtacgtgcgtgtgtgctccacgcctggcttctcaggctttcaaatgtgtgtcagcagcagcagcagcagccacgacgaggcccccgtcctgaacgacaagcacctggacgtgcccgacatcatcatcacgccccccacccccacgggcatgatgctgccgagggacttggggagcacagtctggctggatgagacagggtcgtgcccagatgatggagaaatcgacccagaagcctgaggaggtgtcctgggtttggctggctggctcctgctccagcggcccggcttcaggtgtccgggggcgtggctgcctggagcaggtgtgctgaataccctggatgggaactgagcgaacccgggcctccgctcagagagacgtggcaggaccagcgaggaatccagcctgtccacttccagaacagtgtttcccaggccccgctgagtggaccggacctctgacacctccaggttcttgctgactccggcctggtgaaagggagcgccatggtcctggctgttggggtcccagggagaggctctcttctggacaaacacaccctcccagcccccagggctgtgcaaacacatgcccctgccataagcaccaacaagaacttcttgcaggtggagtggctgttttttataagttgttttacagatacggaaacagtccaaaatgggatttataatttcttttttgcattataaataaagatcctctgtaacaaa

SEQ ID NO: 91955 - DNA, 908 bp, Homo sapiens
agcggggcgggaccgcgggaggcgcgcggctgcccgagcgccggccgggccatgacccccgctgctctgtcttgcaggctcgtcgccgcggccccccgagcccgaccgccgccgccaccaccaccagcgcccgggcgggcctcgcgcgcctcgggcgcggctccgcagtgagcccaccaagaaggaagcggcctgcagaggtgccgacatggggcttaagatgtcctgcctgaaagcagcagcagcagccacgacgaggcccccgtcctgaacgacaagcacctggacgtgcccgacatcatcatcacgccccccacccccacgggcatgatgctgccgagggacttggggagcacagtctggctggatgagacagggtcgtgcccagatgatggagaaatcgacccagaagcctgaggaggtgtcctgggtttggctggctggctcctgctccagcggcccggcttcaggtgtccgggggcgtggctgcctggagcaggtgtgctgaataccctggatgggaactgagcgaacccgggcctccgctcagagagacgtggcaggaccagcgaggaatccagcctgtccacttccagaacagtgtttcccaggccccgctgagtggaccggacctctgacacctccaggttcttgctgactccggcctggtgaaagggagcgccatggtcctggctgttggggtcccagggagaggctctcttctggacaaacacaccctcccagcccccagggctgtgcaaacacatgcccctgccataagcaccaacaagaacttcttgcaggtggagtggctgttttttataagttgttttacagatacggaaacagtccaaaatgggatttataatttcttttttgcattataaataaagatcctctgtaacaaa

SEQ ID NO: 91956 - DNA, 1408 bp, Homo sapiens
gcagccagatctgctgggacacctttcccaaggaagagcccgttgcactgggctttgaaggataagcaggagcttgttactcaggcagaggaagaaagagcatcccaggcggggggagcagcatatgcaaaggcacgaaggggccccaggagcctagggagtctggggaagtgtgagcactttggagagtggaggctggagcgctgtggagagtgggggctggtggccgggaatgaagctgcagctggctgggccacatggtaaaggctgacaactggacccagaggccaactagcctatgatcagcatttcccaaaatctgtttcccgactcatggttctgtgagatgtgacaagggctcctttttcattcctgagacgccggttttcatctgtgatgcggggacagctgcgctccttgctgcgaggcgtcaggacccaggtgatagtgaagggagggtggcgcccgcggttcccggcggccactgatgcctgtctctctgtcgtgtgtacgtgcgtgtgtgctccacgcctggcttctcaggctttcaaatgtgtgtcagcagcagcagcagcagccacgacgaggcccccgtcctgaacgacaagcacctggacgtgcccgacatcatcatcacgccccccacccccacgggcatgatgctgccgagggacttggggagcacagtctggctggatgagacagggtcgtgcccagatgatggagaaatcgacccagaagcctgaggaggtgtcctgggtttggctggctggctcctgctccagcggcccggcttcaggtgtccgggggcgtggctgcctggagcaggtgtgctgaataccctggatgggaactgagcgaacccgggcctccgctcagagagacgtggcaggaccagcgaggaatccagcctgtccacttccagaacagtgtttcccaggccccgctgagtggaccggacctctgacacctccaggttcttgctgactccggcctggtgaaagggagcgccatggtcctggctgttggggtcccagggagaggctctcttctggacaaacacaccctcccagcccccagggctgtgcaaacacatgcccctgccataagcaccaacaagaacttcttgcaggtggagtggctgttttttataagttgttttacagatacggaaacagtccaaaatgggatttataatttcttttttgcattataaataaagatcctctgtaacaaaaaaaaaaaaaaggaaaaaaaaaataaaaaaacaaggggggacgaaaaagaaagaaggaaaagaggagaaaaaaagaaaaagggggtgaaaaggagggggggtgaaaaagggggtggacaagggggggaaataaggtgagagcggaaggggaaaaaagggaaaagggagaag

SEQ ID NO: 91957 - DNA, 972 bp, Homo sapiens
agcggggcgggaccgcgggaggcgcgcggctgcccgagcgccggccgggccatgacccccgctgctctgtcttgcaggctcgtcgccgcggccccccgagcccgaccgccgccgccaccaccaccagcgcccgggcgggcctcgcgcgcctcgggcgcggctccgcagtgagcccaccaagaaggaagcggcctgcagaggtgccgacatggggcttaagatgtcctgcctgaaagacgccggttttcatctgtgatgcggggacagctgcgctccttgctgcgaggcgtcaggacccagcagcagcagcagccacgacgaggcccccgtcctgaacgacaagcacctggacgtgcccgacatcatcatcacgccccccacccccacgggcatgatgctgccgagggacttggggagcacagtctggctggatgagacagggtcgtgcccagatgatggagaaatcgacccagaagcctgaggaggtgtcctgggtttggctggctggctcctgctccagcggcccggcttcaggtgtccgggggcgtggctgcctggagcaggtgtgctgaataccctggatgggaactgagcgaacccgggcctccgctcagagagacgtggcaggaccagcgaggaatccagcctgtccacttccagaacagtgtttcccaggccccgctgagtggaccggacctctgacacctccaggttcttgctgactccggcctggtgaaagggagcgccatggtcctggctgttggggtcccagggagaggctctcttctggacaaacacaccctcccagcccccagggctgtgcaaacacatgcccctgccataagcaccaacaagaacttcttgcaggtggagtggctgttttttataagttgttttacagatacggaaacagtccaaaatgggatttataatttcttttttgcattataaataaagatcctctgtaacaaa

SEQ ID NO: 91958 - DNA, 995 bp, Homo sapiens
agcggggcgggaccgcgggaggcgcgcggctgcccgagcgccggccgggccatgacccccgctgctctgtcttgcaggctcgtcgccgcggccccccgagcccgaccgccgccgccaccacccaccgagtcggcgccgtggtcgggcccttcgacagccgccgttcgggggcgcggggcatcccggccaaggtgttgaggtccccacccaaaccccaaaaaaagggggccaacaaaaacggggggggaaaaaaggggccgggggccccttgggccaaggaggggtggcccgagatgggggcttaagatgtcctgcctggaaagcagcagcagcagccacgacgaggcccccgtcctgaacgacaagcacctggacgtgcccgacatcatcatcacgccccccacccccacgggcatgatgctgccgagggacttggggagcacagtctggctggatgagacagggtcgtgcccagatgatggagaaatcgacccagaagcctgaggaggtgtcctgggtttggctggctggctcctgctccagcggcccggcttcaggtgtccgggggcgtggctgcctggagcaggtgtgctgaataccctggatgggaactgagcgaacccgggcctccgctcagagagacgtggcaggaccagcgaggaatccagcctgtccacttccagaacagtgtttcccaggccccgctgagtggaccggacctctgacacctccaggttcttgctgactccggcctggtgaaagggagcgccatggtcctggctgttggggtcccagggagaggctctcttctggacaaacacaccctcccagcccccagggctgtgcaaacacatgcccctgccataagcaccaacaagaacttcttgcaggtggagtggctgttttttataagttgttttacagatacggaaacagtccaaaatgggatttataatttcttttttgcattataaataaagatcctctgtaacaaa

SEQ ID NO: 91959 - DNA, 189 bp, Homo sapiens
catgtctgagtcagcctctccgtatcccctttatctcctggcagaatctctggttcctggctcaggcacatccatgtttttgatttttgatttttggttttggaattatcttttgacttaagaagtcacaaaaataatacagagttctccagtacccttcactcaccttcccttatgttaatgccttac

SEQ ID NO: 91960 - DNA, 198 bp, Homo sapiens
ctttctattcccttttcttcatgtcgtttatgatcaagatttctacaatttattattcttccttgaagactgatcaacttgagatagtactgggagcattcaaaataatgcccttatcctgtcatctcctgtgatctcttccttctgtcaaattacctgtttcatacagatctcctgaattaaagggtggagtctgtc

SEQ ID NO: 91961 - DNA, 296 bp, Homo sapiens
ctggcctgaacttccagtacaatactgaatagaagtggtgagaccaggcatccttcactatttcctgatcttaggggaaagcattcagtgtttcacaataacattagctgtggaatttttgtagctgccttttatcaggttgaggaaatcctcttctgtattcgtttcctcgggcttctgtaattaagtgtcacaatttgcgtagctgggtagacaaaactcattgtctcagacttctggaggctagatccaaaatcaagattccagcaggcccatactcctgctgaaacctgtag

SEQ ID NO: 91962 - DNA, 364 bp, Homo sapiens
ccgaagacagcttatttttcataagcaacagtctggaaatttaattgatatgccattcctgccccccagtccaaacccctgcccagtctatcctttttacctactttgactttgattcttttagttcttcctattttacaatcaccagccattccagaaaaacatctgctaaaaagatccgttccctgtagtgggaattaagtacatattttaacttcagacaattttacttaatgttttctacattgcatggagcagaggattaatgcagacgtccctgaaaagctcctatgcaaccttaagctgtgtcttcaatcattcaaactgttcaagggctggaatttgaaagagggtgaggaagtac

SEQ ID NO: 91963 - DNA, 387 bp, Homo sapiens
gaagagggaggaaatacgggaggaagagggaatggcgaggaagagagagaggaaataaaaagaaccaaaatggaagaaagacaaaagacaaaaaagtggttagagaaagaatagaaacaagacatttaacttcaaagaggaaggggcctatcactttgaattagaataaaagtaaataagctggtgatgtggtccctcactcacagctgtcacctgctcagtatagtttcaaattcattagaattcagaacatgaagcagctgaaacttctaagggagttcaacttgaggctaattcaatgagatagcactccagacacccagaggcattagaggttctcatcacaagacacttggttgacagtactctggccagagccctccttgg

SEQ ID NO: 91964 - DNA, 494 bp, Homo sapiens
agttctattattattgcatattcattgtctcagtttgtatattgtatctctcaattccatttatataacattcttgcaaagacaaaattataggattggagaacagattagtagttgccaaggcttaaggagggggtttaagtgagaggaaagtagatgtaaaagggcagcatagggatccttgtggggatggaaatgttctctgtctttattgtatcaatgtcaatatttggttgtgatagtatattatagttttgcaagaagttactattgagataagttgggaaaaggatacaagtgttctctgtgtattatttctttcaagtgcttatgaacccacaattatctcaaaggaaaaaatatttaattaaacaaaaaaattccaagagataggagactggttatcttccaaagaatatcagactcacaaccgaattctcgaaaacaataaaagccagaaaaaaattctttaagtaatagattcaaactgctga

SEQ ID NO: 91965 - DNA, 139 bp, Homo sapiens
gaaggtgctgttcccgcaagaggcacactctactgtcgtcgccagtgttcttcttccgcgaatccccatgtgagcgtattttttccagcggctgctaagccagatttagccaccagggggcaaaaaagcagcccttaag

SEQ ID NO: 91966 - DNA, 287 bp, Homo sapiens
gaccggaaggatctgtgggcatggagagggtgcagttggagtgtgaatctggggctcaggagagaaacctgggctggaaatacaaacgtggagttgtctgcatactcatgggccagaggtcagaaccgaggcaggtggctgggggagctggcctctggcccatgagtatgcatacaactcatctttattcatttgccatccctttttgtgtatttatctccctttggagcctcatgagatttatagtagaggaaggtatgaggactcttgggtttcttagtccagtg

SEQ ID NO: 91967 - DNA, 603 bp, Homo sapiens
gcttaagcttctaatggatcaacactctatgagtcagctcttatataagtatcaaaaaaatgcatctagactgggcactgtggcctgcaatcccagcactttgggagacttaggtgggaggatcccttaagcccaggagttggagaccagcccaggcaacatggtgaaaccctgtctctacaaaaaattggctaggtgtggtggctcacgcctgtactcccaaagtgctgggatgacaggtgtgagccaccgtgcctggacacccaggctgtttcagactcctggactcaagtgatccctccgcctccgcctatcaaagtgctgggattataggcatgagccacggcacccagcaaggcagcctctttcatgagccactaggttctggggggtctcagtcctggttaagccctttgatgagtggggcttgaggtcttactccatttactggtttgaacctggagaagccttttgtcttaaacagtttttgtttctagggacatggatgccccattgactcctggggagatcctggtctggtggggaggaggccctggagagccccccacctaactttggcctcatcctcttgtggtttctttc

SEQ ID NO: 91968 - DNA, 118 bp, Homo sapiens
cataaaacagggacctctgacgcttcacattatcaggtaagaaatgtttcttgcccagcagcccccagaggatgaacagctccctccacctgaaaggggaagagggcccaagctgcag

SEQ ID NO: 91969 - DNA, 686 bp, Homo sapiens
aaaagagggaggttgctacatgggtgtctgatggaagagggtgccaaccagagggaagagccagtgcagaggtcctgtggtgggagtgtgtctgatacgttggaggcaagtgtgtctgaggcagagtgagcgaggaggcagtggaaaaaaaggagggagcgaggtgacaggcagctcatgtaagggctcatagaccattaggccatgatcaaggttggctttaggcctcagtttacatctggcttcctaggacgggacaagcatcattgggctggaaggaaactcatccataaagggcttgtgtagcctcatggctaaaattcctgtctctgaagccagacagctgggtccataatccagctctgatctttctagattgggagaccctagccaagtcactcctctctgggccttggcttccccgtctctgaaatgggcctagtaaaaaccgtattcccaagggctgatctgacgaactggcaaaacaattcagggaagctaagggcattgaaaccttggtcggtgaacaaaaatgcatttctgggacaggtatagtggctcatgcccaacacactttgggaggctgagagggaggcggatcacttgagcctgggaggtggaggttgcagtgagccaatatcatgtcacttgcactgcagtctgggtgacagagtgagaccctgtca

SEQ ID NO: 91970 - DNA, 865 bp, Homo sapiens
ttcacagaatcatagttgtcccaatgtgatactttatgaaaacagtatatttcaggatattacaaccagactaaatccaactgaaagtcaaataaaggaagaaagacgctaggaatgaaataaattttggatcaatccagattcatcaccaactgatatgattgggatctgtgtcaccaccaaatctcatgttgaattgcaatccgtaaagttggaggtggggcctggtgagaggtgataggatcatgggggcagtttctgttgaatggtttaacaccatttcccttggtactgttgtcacgataataagctcttttgagatctggttgtttgaaagtgtgtagcacctcccccacccatgctccagcgatttgaatactggctccccctttgccctccaccatgactgcaagtttcctgaggcctccccaggagctgaggagatgctagcatcacgcttcctgtacaggctgcagaactgtgagccagttaaacctcatttgtttataaattacccagtctcaggtatttatttatagcaatgcaggaacgatctattacattatccattgtcataattgaaccagaactctcctatagctattgaggatcttaacatgttgtttcaaataaaaataaagacaccattctgaaccaactttacatttagaatatgccagtttctatattaatccaggaaactcagcatctaagtttcccctaaagcatctgttcctggggtgtacccacaaatttataaagttataaagcccaaagagatggcccacatgaattcacttcagcctgagtgatgactacctgattcctccagttattagcaaatttttctgtttgctctctcttg

SEQ ID NO: 91971 - DNA, 316 bp, Homo sapiens
taaaattttccacaatctccagggagactgttttcccctggcattttccaaatatatgggatgccggatctcaaatcctccaccctcataccacagcctgactcttcaagggcttgcagtgaaatctgtgtctgaacatttcacatgagaggaaagcagtgaataaccactagacattttcccgaaaaatcctttctgcctctcctccttttatctttcctagacacagtcaccttatcaggatgtctttgggatgcggttcctttctggaaacattacagggtgatgtgtcttcagtgcaccctcctatcttttc

SEQ ID NO: 91972 - DNA, 377 bp, Homo sapiens
gagattgtgccactgcactccagcttgaacaaaaagagtgagactatgtctcaaaaaaatgaagtcattaagtgtctatttgatgcttttagctaatcaaataaatatcactagttttgttgttgttttgagatggggtttcactttttcgcccaggctagagtacagtggtgcaatcctggctcactaaagcctcaagctcctgggctcaagtgatcctcccacctcagcttcacaagtatgcgggactacaggcttatgccaccatgccaggctaataatagttttgactttgatcaactgtattacccatttttaatgttaacttttctaatccattattagattttgtgggtttttttagagtaattccagtt

SEQ ID NO: 91973 - DNA, 1129 bp, Homo sapiens
taaatgagtagtgaattaattcattaaaaacatttattttatgtccgttatgtactagacactgttttaggtgtttgggttgtattactgagtcctgtatatgacagtaccaatttgtaatactgaaatattaacaaacttgttttatacattatggtataaaaatagtcttgcactgtttaaattatgctcaaaacatgagttccttgaggtcagagattgtcttactcatccttgtaggccagttacttaagcatagcacctgatgtttaataggtatgttcatgaaatgtttgaattactgaaactgttaaataacagaataattctgtaagatttttacatggaattactatctgtgttttgtaaaagatggaagaaaaacagtattaaaattatatatatagcattacagaactttttaatgaaaaagattacttttttaaaaatatcactgagttctaaattcttgctataaaggcaaaatatagtaaaattgtgaaatgtattcttaaattatttcccttctctagtataacctttcccgcatgaaacaggaagtctttcacgtgggtatttttttagtgcatggtattactacaattatgataagtgatcttagtatactttactaaatatagacgtgaatctttttctcaccagcaaggaatggacctgtaagactcagtcgtcactaaggatgctttccatgctttaactattttaaccaagaattttagaagaaagaattaggaagtagagttgaagtagccttgatctgaactcccatctctgcattcttgccaggcatagatgtcattcttgtgtacagatctatatttttttcatttgaatctgtgatgtatacagctcattttgctgaaattttctactcagttgcttccacatgtcattccttttagagttaaaaaagaactttttgttgtcaaagtatgtatcattggttcttcattgttgccacaagagtgataacttcatttatttactgcttatgttttctgcttgtgagactacaaagtttagcttgtttgcttcttcccaataatgaaattaatgctgtaactatgcatctaagaatgctgcttactaccaattatgtattacttat

SEQ ID NO: 91974 - DNA, 662 bp, Homo sapiens
tcagtgtaccttccttgtactatttacatagtttttatgaccatcctttttttcattagttgtatatgtacttaagatatttctaaagttttgtttttatagataatgctgtgataaacattgtactgtataaaatatgttctaagaattctcagtggaaggattattgggataaaggatatgaatattgtgatggtctttgatacatgttgacaagtcacttttgtaaagtagactaattgtacctttaaagaaaattcaatatctaaaaaatcctaagtccaggtttatcatcaggaatatataccttgttttgaatgttcccattttatatttgtatttattaaacagaaaactttgctatttaagagatgagacatggccgggcgcggtggctcacgcctgtaatcccagcactttgggaggccgaggcgggcggatcacgaggtcaggagatcgagaccatcctggctaacacggtgaaaccccgtctctactaaaaatacaaaaaattagccgggcgtggtggtgggcgcctgtagtcccagctactcgggaggctgaggcaggagaatggcatgaacccaagaggcggagcttgcagtgagccgggatagcgccactgcagtccagcttgggcgaaagagtgagactccgtctca

SEQ ID NO: 91975 - DNA, 214 bp, Homo sapiens
aaacagaagagaggggcatgaaagagcgggaaaaggcatcatgtataacagtccagtatgaagaggaagacgccaacggggctccaggctgaatggtgaagcagaatgaaaagttattttttagaaaaagaggatgcagcttataaacacttttcagtaagtttagcagactccttttagcattacagtgggtgatgtcagagtgaaatgtgcc

SEQ ID NO: 91976 - DNA, 541 bp, Homo sapiens
ggacatagggctgaacagttcacattgttaaaaataaataagttcctcgtttataattctgattaacacagaacatttataaaatacagcctctggaaaagtgacacaaaatgcattacaatatgtcattctcaatcttttaataatgaaaaatgtgagacgcccaagatcaaaggaggcacatgttcagggaactgtttcatctcagagcttgatggggacaggatgatggactgggttttaaaaatggactacctggtcagtttcatgtcttttgacctacctcggtatgggctgttttcctcatgtttataatctagtttaggagctttttcccatcctggctcgttggctggtttgaagcctcactttattcttcagaagggccttggtctgtccaccaccagatgtctcatgtgttatctgacacataccagcttcgtggatatcaaagggggaggattacagggccattgagatcaaaacagagcaaatttgatgatgaaccaggggaaacaggccaagatgtgtccctaatggg

SEQ ID NO: 91977 - DNA, 887 bp, Homo sapiens
gtaggaaggatttcatgtgaaactacaatttgataaaaaatgagagataatcactatgctttgctccagtcactaaaattaggtcccataggatcatatctttggtacaatgaatataggactgcataaatcaggaagtacagtaaataaggctttcaattcaatttaatatatgaccagctctcttttatcactgaccttcataccactgaatgtttacagatgtgtcatttatttaagattgctaagtgttggactgacttacaaaaattaatgtatgactcactcaaaatgggatacacattctcaggacagttttaggtatcttaaaaaacaaatgcactagctgtaaactttttcctagattatgaaatttcttttgacagaaaacataatccacaaaattgtctttatattttgaggaaggaggtatggcaactactttcaaaattacgtaaaaatgtcttgctgttaactactgctagtttacattgatgtcatttttctttaatgctctttttttttccagaaggaaatataaaagacaaatgtattaatttgtcaaccagttgggtaatacctctgtttaaatttcattcttaagcatactagtttaacaaaaaagtttaaatgataatttactctttgggaggtggaagcaggagtatcacttgagcccaggagttcaagatcagcctgggcaacatagtaagacccccatctctaaaaaacaacaacaaaaaattaggcgcggtggcacgcacctgtagttccagctacttgggaggctgaggtggaagatctcttgaggctaggaggttgaggcagcagtgagccgtgatcctgccactgcactcctgcctgggtgacagagtaagaccatatca

SEQ ID NO: 91978 - DNA, 106 bp, Homo sapiens
gtaggataacagcctttattcatatcactaattgtaatatgtactaattgtaaatgtggaaactgaagccccattccagagaagacattgctttttatgatagatc

SEQ ID NO: 91979 - DNA, 346 bp, Homo sapiens
gtggttttgatttgcatttccttgataactaatagtgttgaacaccttttcatgtgcttatgagccttttgcgtatgttctctggagaaatatctattcaaacactttgccaaatatttaattatttgtcttttcattattggtatgtaggagttgttcatttttaaaaccccactgactcctcttaattcccccaaccccctctgcatcccttaaggtagcagattaaggaacagaagtagcattgagtcaggagacacttctattgcttcaagagacagggtctcactacgttgccctgactgtatgtcgtgcagtggctattcacaggcccatgatcacagcg

SEQ ID NO: 91980 - DNA, 322 bp, Homo sapiens
gcatgtagcaggagattctaggctagttttctcagataatatataccttaaaaggaacttcaaataataaccccccccccccaaaaaaaagtggtatttttttacataccactccccaatgaacttgactttccttgagggtaggaatagggtctcttgtttacctctgtagccttagtgcctaaggcctcaataccttttcattgaatgtcaatgaatggatgagcagacaatgacaggtagaatgaagacatcaacatattgtagtagtgaaaaccataagctttggaggcagacaatcctgggtttgaatcatgctgct

SEQ ID NO: 91981 - DNA, 591 bp, Homo sapiens
aatttctaacatcataatttttaaaaaatatcggcgtgtaattcacataccatcagttgtacccatttaaagtgtacaaaggttgtcagcatattcacagttacacaaccatcaccacagtcttagaacactttcgtcattccaaaaaagaaccccgtttgcctgtgtttaacaatttgcctgtttataaatggaatcaaacagtatgtgcttgacttctttggctcagcttaggggttctgatacttactcatccccaatgtgtgtagttgtggtttttcagtcttgatgctgtgtctcacaatttattctactgatgatggacatgtgagttgtttctggtttttgcatggatgttttatatgtgtttcttggtgaatatacatctctctatttatattcacaagaatatataccaaggtatgaaatttctgggacatagggtatgtataaacttggctattagagttattgtcaaagagttttccaaaggaaaaccttataccagttaacacattcccacagcaggagttgagagttccagttactctgcctccttgccacacttgatatatcctctgtcattttcat

SEQ ID NO: 91982 - DNA, 1141 bp, Homo sapiens
atagggagggctcggccttggctccacactgcgctgcccagaggccccgctgactcctgccagcctccaggtccccgtggtaccaaagctgaacatggatgtgaccatccagcacccctggttcaagcgcaccctggggcccttctaccccagccggctgttcgaccagtttttcggcgagggcctttttgagtatgacctgctgcccttcctgtcgtccaccatcagcccctactaccgccagtccctcttccgcaccgtgctggactccggcatctctgaggttcgatccgaccgggacaagttcgtcatcttcctcgatgtgaagcacttctccccggaggacctcaccgtgaaggtgcaggacgactttgtggagatccacggaaagcacaacgagcgccaggacgaccacggctacatttcccgtgagttccaccgccgctaccgcctgccgtccaacgtggaccagtcggccctctcttgctccctgtctgccgatggcatgctgaccttctgtggccccaagatccagactggcctggatgccacccacgccgagcgagccatccccgtgtcgcgggaggagaagcccacctcggctccctcgtcctaagcaggcattgcctcggctggctcccctgcagccctggcccatcatggggggagcaccctgagggcggggtgtctgtcttcctttgcttcccttttttcctttccaccttctcacatggaatgagggtttgagagagcagccaggagagcttagggtctcagggtgtcccagaccccgacaccggccagtggcggaagtgaccgcacctcacactcctttagatagcagcctggctcccctggggtgcaggcgcctcaactctgctgagggtccagaaggagggggtgacctccggccaggtgcctcctgacacacctgcagcctccctccgcggcgggccctgcccacacctcctggggcgcgtgaggcccgtggggccggggcttctgtgcacctgggctctcgcggcctcttctctcagaccgtcttcctccaacccctctatgtagtgccgctcttggggacatgggtcgcccatgagagcgcagcccgcggcaatcaataaacagcaggtgatacaagcaa

SEQ ID NO: 91983 - DNA, 1497 bp, Homo sapiens
atagggagggctcggccttggctccacactgcgctgcccagaggccccgctgactcctgccagcctccaggtccccgtggtaccaaagctgaacatggatgtgaccatccagcacccctggttcaagcgcaccctggggcccttctaccccagccggctgttcgaccagtttttcggcgagggcctttttgagtatgacctgctgcccttcctgtcgtccaccatcagcccctactaccgccagtccctcttccgcaccgtgctggactccggcatctctgaggttcgatccgaccgggacaagttcgtcatcttcctcgatgtgaagcacttctccccggaggacctcaccgtgaaggtgcaggacgactttgtggagatccacggaaagcacaacgagcgccaggacgaccacggctacatttcccgtgagttccaccgccgctaccgcctgccgtccaacgtggaccagtcggccctctcttgctccctgtctgccgatggcatgctgaccttctgtggccccaagatccagactggcctggatgccacccacgccgagcgagccatccccgtgtcgcgggaggagaagcccacctcggctccctcgtcctaagcaggcattgcctcggctggctcccctgcagccctggcccatcatggggggagcaccctgagggcggggtgtctgtcttcctttgcttcccttttttcctttccaccttctcacatggaatgagggtttgagagagcagccaggagagcttagggtctcagggtgtcccagaccccgacaccggccagtggcggaagtgaccgcacctcacactcctttagatagcagcctggctcccctggggtgcaggcgcctcaactctgctgagggtccagaaggagggggtgacctccggccaggtgcctcctgacacacctgcagcctccctccgcggcgggccctgcccacacctcctggggcgcgtgaggcccgtggggccggggcttctgtgcacctgggctctcgcggcctcttctctcagaccgtcttcctccaacccctctatgtagtgccgctcttggggacatgggtcgcccatgagagcgcagcccgcggcaatcaataaacagcaggtgatacaagcaaaaaaaaaaaaaaaaaaaaaaaaaaaaaaaaaaaaaaaaaaaaaaaaaaaaaaaaaaaaaaaaaaaaaaaaaaaaaaaaaaaaaaaaaaaaaaaaaaaaaaaaaaaaaaaaaaaaaaaaaaaaaaaaaaaaaaaaaaaaaaaaaaaaaaaaaaaaaaagggggggcccttttaaaaaaacccccgggggggccaaatttttccccccccccttttttttgaaaaaagggccccctttggggggggtatataaaaccagggccaggccccggtttaaaaaacccttgggggggaaaaaattttttgggggaatttttggaaaaaaccccttttttggggggggaaaaaaatgggaaaa

SEQ ID NO: 91984 - DNA, 1192 bp, Homo sapiens
atagggagggctcggccttggctccacactgcgctgcccagaggccccgctgactcctgccagcctccaggtccccgtggtaccaaagctgaacatggatgtgaccatccagcacccctggttcaagcgcaccctggggcccttctaccccagccggctgttcgaccagtttttcggcgagggcctttttgagtatgacctgctgcccttcctgtcgtccaccatcagcccctactaccgccagtccctcttccgcaccgtgctggactccggcatctctgaggttcgatccgaccgggacaagttcgtcatcttcctcgatgtgaagcacttctccccggaggacctcaccgtgaaggtgcaggacgactttgtggagatccacggaaagcacaacgagcgccaggacgaccacggctacatttcccgtgagttccaccgccgctaccgcctgccgtccaacgtggaccagtcggccctctcttgctccctgtctgccgatggcatgctgaccttctgtggccccaagatccagactggcctggatgccacccacgccgagcgagccatccccgtgtcgcgggaggagaagcccacctcggctccctcgtcctaagcaggcattgcctcggctggctcccctgcagccctggcccatcatggggggagcaccctgagggcggggtgtctgtcttcctttgcttcccttttttcctttccaccttctctcagaccgtcttcctccaacccctctatgtagtgccgctcttggggacatgggtcgcccatgagagcgcagcccgcggcaatcaataaacagcaggtgatacaagcaaaaaaaaaaaaaaaaaaaaaaaaaaaaaaaaaaaaaaaaaaaaaaaaaaaaaaaaaaaaaaaaaaaaaaaaaaaaaaaaaaaaaaaaaaaaaaaaaaaaaaaaaaaaaaaaaaaaaaaaaaaaaaaaaaaaaaaaaaaaaaaaaaaaaaaaaaaaaaagggggggcccttttaaaaaaacccccgggggggccaaatttttccccccccccttttttttgaaaaaagggccccctttggggggggtatataaaaccagggccaggccccggtttaaaaaacccttgggggggaaaaaattttttgggggaatttttggaaaaaaccccttttttggggggggaaaaaaatgggaaaa

SEQ ID NO: 91985 - DNA, 2260 bp, Homo sapiens
  misc_feature (741)..(741): n is a, c, g, or t
atagggagggctcggccttggctccacactgcgctgcccagaggccccgctgactcctgccagcctccaggtccccgtggtaccaaagctgaacatggatgtgaccatccagcacccctggttcaagcgcaccctggggcccttctaccccagccggctgttcgaccagtttttcggcgagggcctttttgagtatgacctgctgcccttcctgtcgtccaccatcagcccctactaccgccagtccctcttccgcaccgtgctggactccggcatctctgaggtaagacgtggcccgtggtgctggcctctcctcgctgctcagagggtggtggcctcggtgggtggagagcgatggactctggtcttgctccgtcaggcaggtggcctcgtcccacttcatccccttgcagaggctgggcgagagcctgtgtccccactgcagccacgtggcagagcttcccctggcactggggagagggtggacaagggagcagcctgaatccacctttgctttcctccatcagctcatgacccatgtgtgctttgtaaggcaccagccacatactggaaaccccaagagcagcccatccaggcatgcgtggtggcgaatgccagctcccgggttcctctggtctcctgagtcccggagacctgggagcaggtgggggtcatagtcctgaaagccagagagcagggcgttcctagcacctcctccaatgagctcggcctgcccacggntagcaaagctcttggcaagtttacttaggtgccctgcaaggctaaaaggacaggcaatggacgcccccccccccacccaaccacaggcctcctctctgagccacgggtgagcggtgcaggttctgctgttctggagggcctgagtcccacccagcacctcataaacagggtcctccccagggctgctgcagtaggcatcaacgccagggtgcaaaatgcctcagggagccaaggctgagccaggggagtgagaaggagcatgtggaagtgcgttttggagaggcagctgcgcaggctgtcagcaggctccggccgcttctatagacagcatgacaccaagggcagtgacctcattccacaggctgagtccagccagccagccaagcatcaccagccagacgattgacctaacggaccaaccaacccgtaacgacccctcctaccataaccagtagccagccagcccataaccagccaacttatctataaccagccacctgaccatagccaaacaaccagccggcccaccagtagcattcagcccctcagctggccctgagggtttggagacaggtcgagggtcatgcctgtctgtccaggagacagtcacaggcccccgaaagctctgccccacttggtgtgtgggagaagaggccggcaggttcgatccgaccgggacaagttcgtcatcttcctcgatgtgaagcacttctccccggaggacctcaccgtgaaggtgcaggacgactttgtggagatccacggaaagcacaacgagcgccaggacgaccacggctacatttcccgtgagttccaccgccgctaccgcctgccgtccaacgtggaccagtcggccctctcttgctccctgtctgccgatggcatgctgaccttctgtggccccaagatccagactggcctggatgccacccacgccgagcgagccatccccgtgtcgcgggaggagaagcccacctcggctccctcgtcctaagcaggcattgcctcggctggctcccctgcagccctggcccatcatggggggagcaccctgagggcggggtgtctgtcttcctttgcttcccttttttcctttccaccttctcacatggaatgagggtttgagagagcagccaggagagcttagggtctcagggtgtcccagaccccgacaccggccagtggcggaagtgaccgcacctcacactcctttagatagcagcctggctcccctggggtgcaggcgcctcaactctgctgagggtccagaaggagggggtgacctccggccaggtgcctcctgacacacctgcagcctccctccgcggcgggccctgcccacacctcctggggcgcgtgaggcccgtggggccggggcttctgtgcacctgggctctcgcggcctcttctctcagaccgtcttcctccaacccctctatgtagtgccgctcttggggacatgggtcgcccatgagagcgcagcccgcggcaatcaataaacagcaggtgatacaagcaa

SEQ ID NO: 91986 - DNA, 1534 bp, Homo sapiens
atagggagggctcggccttggctccacactgcgctgcccagaggccccgctgactcctgccagcctccaggtccccgtggtaccaaagctgaacatggatgtgaccatccagcacccctggttcaagcgcaccctggggcccttctaccccagccggctgttcgaccagtttttcggcgagggcctttttgagtatgacctgctgcccttcctgtcgtccaccatcagcccctactaccgccagtccctcttccgcaccgtgctggactccggcatctctgaggttcgatccgaccgggacaagttcgtcatcttcctcgatgtgaagcacttctccccggaggacctcaccgtgaaggtgcaggacgactttgtggagatccacggaaagcacaacgagcgccaggacgaccacggctacatttcccgtgagttccaccgccgctaccgcctgccgtccaacgtggaccagtcggccctctcttgctccctgtctgccgatggcatgctgaccttctgtggccccaagatccagactggcctggatgccacccacgccgagcgagccatccccgtgtcgcgggaggagaagcccacctcggctccctcgtcctaagcaggcattgcctcggctggctcccctgcagccctggcccatcatggggggagcaccctgagggcggggtgtctgtcttcctttgcttcccttttttcctttccaccttctcacatggaatgagggtttgagagagcagccaggagagcttagggtctcagggtgtcccagaccccgacaccggccagtggcggaagtgaccgcacctcacactcctttagatagcagcctggctcccctggggtgcaggcgcctcaactctgctgagggtccagaaggagggggtgacctccggccaggtgcctcctgacacacctgcagcctccctccgcggcgggccctgcccacacctcctggggcgcgtgaggcccgtggggccggggcttctgtgcacctgggctctcgcggcctcttctctcagaccgtcttcctccaacccctctatgtagtgccgctcttggggacatgggtcgcccatgagagcgcagcccgcggcaatcaataaacagcaggtgatacaagcaaaggcaccacgagacacaaagaagacagacaacaaacagaagaagaaggagcaaccacgcagcagagagccgggcagaggcggggcccccagacagcaccgccccccgggggacacaagtaagaacgatggcacgagaagcacgcggcagacaccgcgaggaacaaaatggggagcagggagcgagaagccatagacacagaccagagacgccgcagagcgagccgccccgggcgacgcccgcgcccgcacggcggcaagacaggggcacagacgagaagacgagacgagagacgggaacacacgggcgaccgcgcccccggatccgaacaccgaccaacgaaggcgcgcagcagcgacgaagacgaaaacaaaagccccagcgccagacacca

SEQ ID NO: 91987 - DNA, 1876 bp, Homo sapiens
  misc_feature (741)..(741): n is a, c, g, or t
  misc_feature (1659)..(1659): n is a, c, g, or t
atagggagggctcggccttggctccacactgcgctgcccagaggccccgctgactcctgccagcctccaggtccccgtggtaccaaagctgaacatggatgtgaccatccagcacccctggttcaagcgcaccctggggcccttctaccccagccggctgttcgaccagtttttcggcgagggcctttttgagtatgacctgctgcccttcctgtcgtccaccatcagcccctactaccgccagtccctcttccgcaccgtgctggactccggcatctctgaggtaagacgtggcccgtggtgctggcctctcctcgctgctcagagggtggtggcctcggtgggtggagagcgatggactctggtcttgctccgtcaggcaggtggcctcgtcccacttcatccccttgcagaggctgggcgagagcctgtgtccccactgcagccacgtggcagagcttcccctggcactggggagagggtggacaagggagcagcctgaatccacctttgctttcctccatcagctcatgacccatgtgtgctttgtaaggcaccagccacatactggaaaccccaagagcagcccatccaggcatgcgtggtggcgaatgccagctcccgggttcctctggtctcctgagtcccggagacctgggagcaggtgggggtcatagtcctgaaagccagagagcagggcgttcctagcacctcctccaatgagctcggcctgcccacggntagcaaagctcttggcaagtttacttaggtgccctgcaaggctaaaaggacaggcaatggacgcccccccccccacccaaccacaggcctcctctctgagccacgggtgagcggtgcaggttctgctgttctggagggcctgagtcccacccagcacctcataaacagggtcctccccagggctgctgcagtaggcatcaacgccagggtgcaaaatgcctcagggagccaaggctgagccaggggagtgagaaggagcatgtggaagtgcgttttggagaggcagctgcgcaggctgtcagcaggctccggccgcttctatagacagcatgacaccaagggcagtgacctcattccacaggctgagtccagccagccagccaagcatcaccagccagacgattgacctaacggaccaaccaacccgtaacgacccctcctaccataaccagtagccagccagcccataaccagccaacttatctataaccagccacctgaccatagccaaacaaccagccggcccaccagtagcattcagcccctcagctggccctgagggtttggagacaggtcgagggtcatgcctgtctgtccaggagacagtcacaggcccccgaaagctctgccccacttggtgtgtgggagaagaggccggcaggtgaccgaagcatctctgttctgataaccgggacccgccctgtctctgccaaccccagcagggacggcaccctctgggcagctccacatggcacgtttggatttcaggttcgatccgaccgggacaagttcgtcatcttcctcgatgtgaagcacttctccccggaggacctcaccgtgaaggtgcaggacgactttgtggagatccacggaaagcacaacgagcgccaggtgagcccaggcactgagaggtggganaggggggcgagttgggcgcgaggacaagggggtcacggcgggcacgaccgggcctgcacacctgcaccatgccttcaaccctgggagagggacgctctccaggggaccccgaatcaggcctggcttttccccaagggaggggccgtgcccacctgagcacagccagcccctcccgtgacagaggtcaccattcccgagctaatgtggctcagggatc

SEQ ID NO: 91988 - DNA, 2367 bp, Homo sapiens
  misc_feature (741)..(741): n is a, c, g, or t
atagggagggctcggccttggctccacactgcgctgcccagaggccccgctgactcctgccagcctccaggtccccgtggtaccaaagctgaacatggatgtgaccatccagcacccctggttcaagcgcaccctggggcccttctaccccagccggctgttcgaccagtttttcggcgagggcctttttgagtatgacctgctgcccttcctgtcgtccaccatcagcccctactaccgccagtccctcttccgcaccgtgctggactccggcatctctgaggtaagacgtggcccgtggtgctggcctctcctcgctgctcagagggtggtggcctcggtgggtggagagcgatggactctggtcttgctccgtcaggcaggtggcctcgtcccacttcatccccttgcagaggctgggcgagagcctgtgtccccactgcagccacgtggcagagcttcccctggcactggggagagggtggacaagggagcagcctgaatccacctttgctttcctccatcagctcatgacccatgtgtgctttgtaaggcaccagccacatactggaaaccccaagagcagcccatccaggcatgcgtggtggcgaatgccagctcccgggttcctctggtctcctgagtcccggagacctgggagcaggtgggggtcatagtcctgaaagccagagagcagggcgttcctagcacctcctccaatgagctcggcctgcccacggntagcaaagctcttggcaagtttacttaggtgccctgcaaggctaaaaggacaggcaatggacgcccccccccccacccaaccacaggcctcctctctgagccacgggtgagcggtgcaggttctgctgttctggagggcctgagtcccacccagcacctcataaacagggtcctccccagggctgctgcagtaggcatcaacgccagggtgcaaaatgcctcagggagccaaggctgagccaggggagtgagaaggagcatgtggaagtgcgttttggagaggcagctgcgcaggctgtcagcaggctccggccgcttctatagacagcatgacaccaagggcagtgacctcattccacaggctgagtccagccagccagccaagcatcaccagccagacgattgacctaacggaccaaccaacccgtaacgacccctcctaccataaccagtagccagccagcccataaccagccaacttatctataaccagccacctgaccatagccaaacaaccagccggcccaccagtagcattcagcccctcagctggccctgagggtttggagacaggtcgagggtcatgcctgtctgtccaggagacagtcacaggcccccgaaagctctgccccacttggtgtgtgggagaagaggccggcaggtgaccgaagcatctctgttctgataaccgggacccgccctgtctctgccaaccccagcagggacggcaccctctgggcagctccacatggcacgtttggatttcaggttcgatccgaccgggacaagttcgtcatcttcctcgatgtgaagcacttctccccggaggacctcaccgtgaaggtgcaggacgactttgtggagatccacggaaagcacaacgagcgccaggacgaccacggctacatttcccgtgagttccaccgccgctaccgcctgccgtccaacgtggaccagtcggccctctcttgctccctgtctgccgatggcatgctgaccttctgtggccccaagatccagactggcctggatgccacccacgccgagcgagccatccccgtgtcgcgggaggagaagcccacctcggctccctcgtcctaagcaggcattgcctcggctggctcccctgcagccctggcccatcatggggggagcaccctgagggcggggtgtctgtcttcctttgcttcccttttttcctttccaccttctcacatggaatgagggtttgagagagcagccaggagagcttagggtctcagggtgtcccagaccccgacaccggccagtggcggaagtgaccgcacctcacactcctttagatagcagcctggctcccctggggtgcaggcgcctcaactctgctgagggtccagaaggagggggtgacctccggccaggtgcctcctgacacacctgcagcctccctccgcggcgggccctgcccacacctcctggggcgcgtgaggcccgtggggccggggcttctgtgcacctgggctctcgcggcctcttctctcagaccgtcttcctccaacccctctatgtagtgccgctcttggggacatgggtcgcccatgagagcgcagcccgcggcaatcaataaacagcaggtgatacaagcaa

SEQ ID NO: 91989 - DNA, 389 bp, Homo sapiens
tccgcctcctgggttccagcagttcttgtgccacagcctcctgagtagccgggaatacaggcatgcactaccacacctggctaatttttgtatttttagtagaggcaagagtttcaccatcttggccaggctggtctcaaactctcctgacctcaagtgatccgcccacctcagccttccaatgtgttgggattacaggcgtgagccaccgcgccttgctctatttattttcttgatcgtgatggtggttttacaggtgtctacatatgttaaagctcattaaaattgtgtactctagatacgtgcagttttaaatatgtcagagaaagaaagaaaaggatacttcaaaataccagaaatgggcaacagagcgagactctgtctcaaaa

SEQ ID NO: 91990 - DNA, 276 bp, Homo sapiens
tgggcaggtcagcaggtgcaggagaggctaggagggcggtgactggatgatgaaggggcatttgtttatttatcctttgtttttgttttttgttgtttaaattgagaccagctctcacaatgttgcccaggctcgtctcgccaactgtctgcccactcctggcctcaaacgatcttcctgcctcagcctccaaaagtgttgggattacaggcataagccaatgtttattcgtcctgagccttccctggacacctgatatgtagctgctttgtggtg

SEQ ID NO: 91991 - DNA, 335 bp, Homo sapiens
atgagtagataccatgagaattaagtgactcaatatagatgacttgcactcataaaatgctagtgctttgttattattattgttattattcagaatcccttgttcaacctgccttgatccatgaccattctggcagatattatcagggaacaatattgtttcatgggccagtgacccatgaagagtcatgctccatccttccctagaactctgtcttcctgaggcaagaccataggctttccaccagtgtcctccgtgacagtgttccaccatgacaatcatgctgtcctctgattgtcagaagttatttatagggaaggaaaggaaaaggaagg

SEQ ID NO: 91992 - DNA, 299 bp, Homo sapiens
atctattgaagatgactgctttcttctactgtagctggcaattttatgaaatgaagaaaatttgctctagttgcaagtgacacacacctcttaaatgtctgctatcaattaaaagtaaaatactggttacttgcaactatcaattagatacaatgcactccaggagatcaggagccttggcattcagacataggagcatttttttggctttgccatttacttgcaatgtgaccttggtaagtgacttaacctctttttcagtttctttatctataaaatgaaacctcatacagtacctg

SEQ ID NO: 91993 - DNA, 599 bp, Homo sapiens
gattatagacatgagccactgtgcctggcccagtgtggaaaattaagtgaggcatgtatgatgagaacggctgcacgtgggagatgctccgtggatgtttgtagaacgctggcttccgtgtttcctcgttgtggctgtggtggtgtgggtctttgcctgtggacccgtggaagacaaagaagacagttttggatggtcaagctattttcttgcttcagggctccctcccctgctttttgaagcctcacaaaccaggactgtgagggcaggaaggcttggggtctttgtgtgctgagcctcattagggttttaagaacctccctcctttcatctctagcttacgagagggatgattcattatcttccctcctcaggctgcagtagaagcagacagtctctgcctccctgcttgcctttcctccctcccattcactgttgattattgccctcaagaataacaggttgcccagctactcgagaagcttaagtgggaggattgcttgaccccaggagttcgaggctgcagtgagctatgatcgcttcactgcgctatagcctggcagacacagagagaccctatctcaagcaaacagacaaac

SEQ ID NO: 91994 - DNA, 295 bp, Homo sapiens
aaaagtgatatcttagttctaactacctaagtcagcagcaaagtttaaacagtacagatttaaaaattttttataaaggaatttaactcttgttaactatattatatttagctttattgtactggatatctgtatttactgagtatacctatatgggagtcccttatattactttggaataacagtttttcatatataaaaaatgttgtgaaacttactgggagtgtatgtaatatgctttctaaggtaaattataaaaattaaaaccaaagtgtgaactactgagtactgcata

SEQ ID NO: 91995 - DNA, 144 bp, Homo sapiens
gacattgacactaagctttatttaataacctttaactgcaatggcatttttctctctccttttttttttgttatccagttaggttccctctattctttattttcttatctagagaaatttggcaactgtctgtaagttcagatc

SEQ ID NO: 91996 - DNA, 435 bp, Homo sapiens
acctgaaattatcaggaagtaattaaccttaatatggaactttctacactgctgtgtatttatgtctagattttgtgaaaataaaagtagtaatatggctgatttttggacaagtgagtttgaaccttgggattaacattttatttttattttttagtctgtaaaatggtttttttgtgctagatgaatgtatcagcttatgtaaatacgaatttaataaaattgccaaggtgtatggtttatttgggtgaggcactgtgtgattattgaacctcttaagcaagagaatatcttgatgatcatctagttccactctcatttatacatgaggaacctggtattgaaactaatatcagtatcccgaaggaaggagggtaattggagaaaaatcagaaataaaaggtaattgattagaaggtgaaagttaaaaaaaaa

SEQ ID NO: 91997 - DNA, 213 bp, Homo sapiens
tgggagatgtgatgggtgcactgtggcctccggatcagcggaacctcaggccctcctggttaacaggaactgccattggccccagccaaaaggcaggtgagggcagggccctgtgctgccatctccccttcctgcctcatgggtctcactgcccaggctcagggagcgcataagtaatcctaactgagcactatggctgctctgagacagtgg

SEQ ID NO: 91998 - DNA, 558 bp, Homo sapiens
ggcgcagtgagcactgagccacggaaactcaactctgccatgtcccacaggcaagcatgaatcaggatgacagtcaatgccacaaaatccaaagccgtgtgggtgcttttttgactagagacagagcaagggcaggagtgaagcttaggcttctgcaccaacccagcgagacatcagtcatctctaagcactgcagctctctgcccctctgattctcaaaggaagaccacaaggaccatattccatggagtcatagctacaggataatatgaagtttatattgccattgaagaggcagagaggagctgcagcatgtattcacaactgagaacttgtcctgtgaaggaagaaaacaatgccccttggagcaaagaattaagagatgacttatatttgaaaaaccacccacagctgcatgttgatgtgctcgagtggcttgttgatgctgcctgaagttggggttctggctgtaccagttatttaccctttgattaaaaaaatactttaattctgattgaaaatcaccagaaatgaaataaaaagacaaaacagaattcc

SEQ ID NO: 91999 - DNA, 377 bp, Homo sapiens
tagagactgggtcttgctctgttgtccaagttggtctcaaactcctgggctcaagctctcctcccaccttgacctcccaaagtgctgggattacaggcatgatccaccatgtgctgccaaaatatttaccttaggggaaaaaacagggcttgaataaacactattaaaaacctatataaccccatactagtagagatcaggatgcagggaatctggggtttgactcaagtccactaatcttcatcctacttctgaatattcctatcatgatatatagtatttcatgttttccattcttctaagtgacacaaaaatatctagtttttgtgtttgcacagtgcctttcagaatgtcccacccatagagtagcagttatg

SEQ ID NO: 92000 - DNA, 232 bp, Homo sapiens
atagaaaagcccaaaccatcagaaatgagttacggtgcataactggatcaagacttttttacacaaaaaccaaataacatgtacaagtttaatgccaacgtatttgaaaatcttaggtaagatagatacttttctgaaaaaatataaatttaaaatatagtcatatggtagtagaagatcctaaactacgtagaaaaaatcgaaaaggtgttatgagatttgtccctaagaa

SEQ ID NO: 92001 - DNA, 504 bp, Homo sapiens
gtacattgttggccatgcttggacatcagcaccaatatatattttgtaagaaaaaatattagatctcactaaattagttgtaacagactttattcataacctaatttcaagcagcaaagagattgtttggaaaacagttcttgctaatactttaagatgcttctccttcctgatgaagtgcctactttttttttttaacccacaaaaaggttaatagggctatatttgcatatcagttccatttttagaaggttaatagtctccaagttacaaagttgtgatctcattgccatcctagaaactgttgaaatgacgatgttaaaactaagaaattatagactaaataaagtgctttttgagcactttaagccatgaaacagtggcgagaaaacagaagtcctcttctctaccacaggaggcacagtgatacaatactgccacctcacagagcctgaataggtgaatatttactttcttacatctaagacctaaatatttcctggg

SEQ ID NO: 92002 - DNA, 567 bp, Homo sapiens
ggcagaatatgaaacttcctccttcttcctgatacctttcccagaggcagccctgtgacatctcctatgccagcataggaggagaatcttccctgtccatctgttttctcctaaataattgttttcatgtttctcagagactgggtcttgaaccccagggctcaagtgatccacccacctctgcctcccaaagtgctgggattacaggcgtgcgacactgcacttggctctcttcctctatttttaatagaatccattaacatacctgccatacttattgtctttttttctctcaactttttatgaaaaatggcaaagacacattttgctgtgtttgctttgtcactatacatccccacggacgcacacacgcttccgtctggccatttgacttcacaacccttcactcctaaatacttcaacgtgcctaataaggtttttctcccatggagccataagagcaccatcagatctaaaataagatcaatagtcccacctaacaaccacttttattcactccagcccgggcaacaagagcaaaactccgtctccaggaaaaaaaaaaaa

SEQ ID NO: 92003 - DNA, 816 bp, Homo sapiens
ggcagaatatgaaacttcctccttcttcctgatacctttcccagaggcagccctgtgacatctcctatgccagcataggaggagaatcttccctgtccatctgttttctcctaaataattgttttcatgtttctcagagactgggtcttgaaccccagggctcaagtgatccacccacctctgcctcccaaagtgctgggattacaggcgtgcgacactgcacttggctctcttcctctatttttaatagaatccattaacatacctgccatacttattgtctttttttctctcaactttttatgaaaaatggcaaagacacattttgctgtgtttgctttgtcactatacatccccacggacgcacacacgcttccgtctggccatttgacttcacaacccttcactcctaaatacttcaacgtgcctaataaggtttttctcccatggagccataagagcaccatcagatctaaaataagatcaatagtcccacctaacaaccacttttattcactcatcccaaatgtctctctttatttttttgagacagtctctatcgcccaggctggagtgcagtggcactatctcatctcactgcaacgtccgcctcctgagttcaagcgattctcctgcctccagctccagagtaactgggattacaggtgcccgccaccacacccagctaatttttttatttttagtagagatgagatttcaccatgttggccaggctggtatcgaactcctgacctcaagtgatctgcccacttcggcctcccaaagtgctgggattacaggcaagagccaccgtgt

SEQ ID NO: 92004 - DNA, 434 bp, Homo sapiens
tgtggtgggatacctgtaatcccagctactccagaggctgaggcaggagaatcacttgaatctgagaggcagaggttgaagtgagcagagatcataccattgcactccttccagcctgggcaacagagcaagactccgtctcaaaaaaaataaaataaaatttgaatgggatacttctaagactgctgacaaagaggggacatcgtttgcccctccctggttcttcttactctgctaaatccaataatcccagaggtgcagttttgacctcagccgtggccctggggtgttctgcagccacctgctggggagcagggccaccttggccacctcagctggttgttgactccagggaaggctggctgccagtggtggctgccatgccaccaccatctccggcctgcctgccgtcgctctcccttgcttaatcccag

SEQ ID NO: 92005 - DNA, 577 bp, Homo sapiens
aattaaatgcattgtaatatgaaaggcagagtgtaaataaagtgttcatgtttactaagaaaacagactaagatattccaggtagctgaacacactttgataataaaatttgaaacagcttcttggctttcattctatttaaaatatttatgtagttaaaaaaaaaaattgactatttattttctatctaaatgcaggaaatgctgagacattttaaatgagtagagattgaacatacataaataagcgtcctgtttcagctacggaattataatacttccgagctgctccattcatacctcagcaaacaaccagtccaattcaatttagagaagaatgccagcctcaaattcaatttatttaatatttaagttttgtgaaagtgctgagttaaaggagttatctcagcgaaattaaaacactgctaatctcaattcaaaatcaattttctttccaggacaattcttgggaacctcaagaatctcttgctgtatatcataaggagtatacattcaagaactgatatctaaaagaataagtacattcgtataaaaaagattccttataaaataggatc

SEQ ID NO: 92006 - DNA, 319 bp, Homo sapiens
tttttgtagagacagggtttcactatgttgcccaggctagtcttgaactcctggcctcaagttattctcctaactcagccttctgaagtgtgggattacaggcatgagccaccgtgcatagccaaaattcaggctttctatgcccatgatacaagaagtagtagctcatgttttaggggctggtagtatacaagaaaatttgaaacagaattttgacaaatgtgaatgtatgcagggaatgaagctaatatatcccttcattcttatatcccaataagtaaacagaactggagcctttagttattattatgaacatgtg

SEQ ID NO: 92007 - DNA, 387 bp, Homo sapiens
ggttcaagcaattctcctgcctcagcttccagagtagctgggactagaggcatatgccaccatgcctggctaggttttttgtatttttagtagagatggggtttcaccatgctggtcaggctggtctcaaactcctgacctcaaataatctgcctgcctcggcctcccaaaatgctagggttataggtgtgagccaccatgctcagacaaaaacaagttttaaaaaagtcattaagaactggtttgttacagcagtgtatcttatctgttgactataccacagctttgaattgtataaccgcttaatgtctgttcattcacagagctaaccagcagataacataatgttaacaaaaataaccagaaaattaatatcacttgtccttc

SEQ ID NO: 92008 - DNA, 356 bp, Homo sapiens
gcaaaactgtgtacatttcttttagtacatctatctctactacctggttgctcacatcctaggtatagacaactgcaaagaactggtgtcattagtttttaaagaacttttgaccagagaggccaaatgttgtttaaggtaactttatgataacaaaggaatgtaacatttattgaacatctgctttatggaggtacttttgcttagtagttttgtgaattacgttattcaacttttcagcccagtgaagtgaatgtcttgatatccacattttacaaatgataaaattaggaaaacgacagcaaagttaaagactgatcagggtaggttgaatagttatctattgaacagtttct

SEQ ID NO: 92009 - DNA, 581 bp, Homo sapiens
ttcttattatttatccagatttatcaaaagtttattaaatagaatacaatggcaaaattcaaggcttttaacaattgagtggtaaagttcaagtggaagaaagcaaaactcagaggagtaagagaagaaaagaacaatattttgcctatgccatttaattcccacaaatttgcaaagtgagcattgttattctcagtttccagatgaatgcactgaaataatttggatatttatcctctccaaatttcatgttgaaatttggaggtggggtctggtgggaggtgttttggtttactcagccaaagaatttagcttctttgatttgaagctgagatttgaacccagggtcctttgattccaagcccagatatttaccacaatatctctgtgatcatccaatttatatgtctcaagtatctgtgccattgacaaattgtaaaactgtgcatgtatacattatacctcctaaggttgagacatagatggaagtgcccagcaaaacgtctggcacaaaggcattattttttgttttggctttgggctaaaaaaacatagataacaagcaaatgctttggagccct

SEQ ID NO: 92010 - DNA, 356 bp, Homo sapiens
accttctgatctgtttctatcaaaccaaacctgtttctcctagagtcatccccaccccattaaatggactttacatttttttctattgcttgggtcaaaaacttggagtcatccataacacctgtctttctgtctgcccacatcctatctaccatcaaatcctgtgtgctctaccttcagaatagatctaatgattacttctcactctctctactcttaccaccctgatctaagccactttcacctctcatctagaatattgcagtagcctcctaactgatcttcttgcttccattctcacccctcattttcaacccaacagccagagtggtcctatgaaaatatagttacatcac

SEQ ID NO: 92011 - DNA, 229 bp, Homo sapiens
aagcaggtcaaggctgcagtgagctgtgattgcaccactgcaccccagcctgtctcaaaaacaaaaacaaaaaacgaacctggggcctgggaaattgtgtgttaattcccttgaggtgacttttgcattggctacagtatgagaaccactggactggttcaccagaagggactgaaaggtttcagggaaggatggggcatatttggtattttcagggtggttatacagc

SEQ ID NO: 92012 - DNA, 308 bp, Homo sapiens
agcatttctacccagtcaatgttatcttggaggagaagacaagggaagatggaaagccattcactcatttattcattaaattgatagatttgggatatatctaataggttctagccactctgaggtgctgaccttttaatggtgaacaaatacagatacagtttccatgacatatattttaaaattatcatacaaataaacatattacaactggaaatgaatgctaggaaggaaaagagacatttgaactgtcccttcttaacagtgcccagaattctgcagtagatttgaaaatatttcatcatttt

SEQ ID NO: 92013 - DNA, 276 bp, Homo sapiens
catatacttgcatttgttcaagaagttgatgaggaacatgaggagagtgttacaacttagcccaagctctatgactacgggtggctctggactgatgagaccacttcctctcatctatccatagcccctacagacgccactccagctgccctccctactccacctcagccacagaacaagcccagcccacccacgtagctacccttggtcaccacattactgccaccttgtctaaataatccgcggcgcgggtggggcaggctccggtctccttgc

SEQ ID NO: 92014 - DNA, 944 bp, Homo sapiens
ctggtttgtagggaatcaaactccctcattatttgtgttcacttctggtaattaagcatttaaacagcacttgacattcagcaaccatttttataagcattcctcttaagaacctagaacaccatcaattcgatagcactgtctttgtaaggcacaaactgatggtggctaaggaccaagaaagcttctcccttctgtgtgaaggtgatgctactccccttagggaaaccactaagcttcttttccaacagcagtttctggtttgtgctaatttgtggacagtctttctggtctcctcttgacagatggcaggtgtttcagaactttgaccctgtcctgaaaatgccaagcatcatatggccaaagtggaacacaacatactgacttagaaataatggtcatgtaatgaccccatgttaagctgctctaggaggttataattttttgtttgtttgtttttgagatggagtttcgctcttttcgcccaggctggagtgcaatggcgcggtctcagctcactgcaacctccacctcctggggtcaagcaattttcctgcctcaacctcctgagtagctgggattacaggcttccaccaacatgcccggctaatttttgtatttttagtagagatgtggtttcaccatgctggccaggctggtctcaaactcctgacctcaggtgatccacccacctcggcctcccaaggaggttatgatttaaagggaacttacacattttgttttgtttaaatcatggagaacaatgaaaagaactattatttatatttggagcaagccaaccactaaaggaataaactcagtgcttaaaatggattgttttctccctcacctgttgaggaaaagattctttaaatgaatttaataaatgtactgtgcactaaccacaagccagcacttggaagaaaacagtgacccaggatcaa

SEQ ID NO: 92015 - DNA, 391 bp, Homo sapiens
cctcaacctcctgggctcaagcgatcctccccaagttgctgggactacaggtacacgccgctgtgcctggctaatttttgtattttctgtagagacagggtttcatcatgttgtgcagtttcagtccataaaaagtaaggagtgattattattaaaagagggattggtgtcgagaaggcagcctcttgatatttcagcagtgaggaagtactgatggcatcgtggtaatcttgcactcttgttaatgcaaacttcttttgagagcttaagctttagaaaggctggcagttctgggttttaattctctgtcaccttgtgacatcagacatgttacttaatttctctgcttcactttcctcatctgcaacatgggaactctgcaacacagcta

SEQ ID NO: 92016 - DNA, 485 bp, Homo sapiens
ggggacaggcaagagggaagaaagtgatatgtattagactgttctattcctggccacagagagagaaattctgaggcatgtcacagtgcttgatgtgaaagcctagtaagtcaaaacgggaagaaatactttcagaatcctaatggtcctattgccagagtataagttatgaggaatctggtgtatctatcatctagaaaccaaacaaaactaaaaatcacaggggaattactacaggttaaaaaaaaatgtctattttaaagatttagagatagattcaaatagctagaggagggtctgagctatttttttattacaataaggcacacttttaaatgcctaatgtccttttgttttaggggggcttgtttgttgttttgtttgtttgttttgagacagggtctggctctgtcacccaggctggagttcagtggtgtgaccttgcctcactgcagcctcctccaacccttctccacacaacttcc

SEQ ID NO: 92017 - DNA, 169 bp, Homo sapiens
ttcctctactccttcccacctccccttaggaattaacctaatagaacatattaagactattatgaggctaggtgcagtggctcatgcctgtaatcccacacttagggaggctgaggtgggaagattacttaagcccaagagtttgggattagcctgggcaagatgacaa

SEQ ID NO: 92018 - DNA, 365 bp, Homo sapiens
agaagtttcatagtaggctgtctgcaaactggagaaccagggaagctggtagcattcagtccaactcagaaagcctcagaaccacggaagccagtggagtaactctcaatccaaggctgaaggcctgggaatctggtaagggttggaggacactggtatgagtcctcaagtccagaggccatgaagcctggagttctaatgtccaagagtaggagaagaaggtaaggtattccagctccaggagagaacacaatttgcctttcctctgcctttttgttgtatccaggcccccagcctattggatggtacctacgcaaactgagggtggatcctcccactcagtccacccactcacacaccagtat

SEQ ID NO: 92019 - DNA, 709 bp, Homo sapiens
tatttagtatatatttaaggttgtgattttctcctaagcacagggttattagcccatggatttttatacttatcactctttttaaacctagatgttctaaagcaagcttgtccaacttgcagtccatgggctgcatgcaacccaggatggcttcgaatgcagcccaacacaaattcatactttcttaaaatattatgagattttttttttggaattttttttttagcctatcaatcagctatcattagtgttactgtattttatgtgtggtctaagacaactattcttcttccagtgtgggtccagggaaaccaaaagactggacaaccctgtcttaaagtttgatttctctttaatccaggattttttaggcatatgtaaatttttagatagttaagagactttgttgtttccatgtttatattaatttctagttttattctattttagagaatttagcctatagtatttcaacgttttggagttccttcctctattaatatataactaacttttgtaaatgcccaattagcactgaaaggtatatttcttttttccaagagtatcagttcttcttaaccctttttacttgtctattgcacaattaaaaaggtatgacacattttgggaggctgagacaggatgatcgcttgagtccaagagttggagaccagcctgggcaacatagagaaagccggtctccaaaaaa

SEQ ID NO: 92020 - DNA, 408 bp, Homo sapiens
cccttcacagccccaacagcgcctccactggcattctttcccccaaggcaactagctagggggaaggaagagctccctccctccccaggtcccagaaccccaccctcatccctctgctcttagagtcttatttctaccaggagcccagctggaaaagctccttgtcatgtcatcccatttgtccttacccctgctgaggggacaacagcttccctggggccttcagtccctaaacaatagccagaccgtttctcagcacctcatcattttctttttcaatttttaaaaattagcacataattgtacatatttttagaatacacagtgatgttttgatacatacaatgtatagtgatcagatcagggtaattagcatacccattatctcaaacatttctcatttatttg

SEQ ID NO: 92021 - DNA, 416 bp, Homo sapiens
tcagtagagacagagtttcaccatgttggccaggctggtctcaaactcctgacctcagttgatccacctgctttggcctcccaaagtgctgggattacagctgcgagccaccgcacccagccagagaattcttaaaatgcagataactggtaagggtcttggggaggagctacccaaactcatttctccccttagccaccaaagaacagggatgagtgagtctggagagttttttcctaacaccaaatacatggtattgtcagaggcgtttgaatcagagagactccatcttgaataggagctgggtaaaataaggctgagacctgctgggctgctttcccaggaggttaggcattctaagtcacagagtgagacaggaggtcggtacaaggtataggccacaaagaccttgctga

SEQ ID NO: 92022 - DNA, 390 bp, Homo sapiens
atcttgctaacttataactctagcacttagcagtatttgacacccaacaaataaacggtttttgcaaaaaagaagctcacaatgtattagggagattattaggcaaatatccagaagcagttaagttacttctctaatacagtctagcatcggtcataaaaaaaatagcattaggccaatcatcttttctcccttacagaaatgaaagacatgaattaaggtagtacaattcctattccatttctacctccctgagctcagtgacccaagactagactcagttgagctgtatatccaataaagctttgttgaagaagaatctttatttgccttccaggaaaagaatttcttctttaagctaacgcagttaatgtcaactttgaaagatag

SEQ ID NO: 92023 - DNA, 4395 bp, Homo sapiens
ccagctacgagtggcagcaagaaggcaattcctggctggcggttggcatctaagcaggcatcaggatgttgggctgggtccagagggtgctgcctcagcccccagggacccctcggaagaccaagatgcaggaggaagaggaagtggaaccagagccagagatggaggcggaggtggaaccagaaccgaatcctgaggaggccgagacagagtccgagtccatgccccccgaagagtcattcaaggaggaggaagtggctgtggcagacccaagccctcaggagaccaaggaggctgcccttacttccaccatatccctccgggcccagggcgctgagatttctgaaatgaatagtcccagccacagggtactgacctggctcatgaagggcgtagagaaggtgatcccgcagcctgttcacagcatcacggaggacccggctcagatcctggggcatggcagcactggggacacagggtgcacagatgaacccaatgaggcccttgaggcccaagacactaggcctgggctgcggctgcttctgtggctggagcagaatctggaaagagtgcttcctcagccccccaaatcctctgaggtctggagagatgagcctgcagttgctacaggtgctgcctcagacccagcgcctccaggacgcccccaggaaatggggcccaagctgcaggcccgggagaccccctccctgcccacacccatccccctgcagcccaaggaggaacccaaggaggcaccagctccagagccccagcccggctcccaggcccagacctcctccctgccaccaaccagggaccctgccaggctggtggcatgggtcctgcacaggctggagatggccttgccgcagccagtgctacatgggaaaataggggaacaggagcctgactcccctgggatatgtgatgtgcagaccatcagcatccttcctggaggacaagtggagcctgaccttgtcctagaggaggttgaaccgccctgggaggatgcccaccaggatgtcagtaccagcccacagggtacagaggtggttccagcttatgaagaagagaacaaagctgtggagaagatgcccagagagctgtcccggattgaagaggagaaagaagatgaggaggaggaagaggaagaggaggaggaggaggaagaggaggaggtgactgaggtgctgctggatagctgtgtggtgtcgcaggtgggcgtgggccagagtgaagaagacgggacccggccccagagcacttcagatcagaagctgtgggaggaagttggggaggaggccaagaaggaggctgaagagaaggccaaggaggaggccgaggaggtggctgaagaggaggctgaaaaggagccccaggactgggcggagaccaaggaggagcctgaggctgaggccgaggctgccagttcaggagtgcctgccacgaaacagcacccagaagtgcaggtggaagatactgatgctgatagctgccccctcatggcagaagagaatccaccctcaaccgtgttgccgccaccgtctcctgccaaatcagacacccttatagtcccaagctcagcctcggggacacacaggaagaagctgccctctgaggatgatgaggctgaagagctcaaggcgttgtcaccagcagagtccccagtggttgcctggtctgaccccaccaccccgaaggacactgatggccaggaccgtgcggcctccacggccagcacaaatagcgccatcatcaacgaccggctccaggagctggtgaagctcttcaaggagcggacagagaaagtgaaggagaaactcattgaccctgacgtcacctctgatgaggagagccccaagccctccccagccaagaaagccccagagccagctccagacacaaagcccgctgaagccgagccagtggaagaggagcactattgcgacatgctctgctgcaagttcaaacaccgcccctggaagaagtaccagtttccccagagcattgacccgctgaccaacctgatgtatgtcctatggctgttcttcgtggtgatggcctggaattggaactgttggctgattcccgtgcgctgggccttcccctaccagaccccggacaacatccaccactggctgctgatggattacctatgcgacctcatctacttcctggacatcaccgtgttccagacacgcctgcagtttgtcagaggcggggacatcattacggacaaaaaggacatgcgaaataactacctgaagtctcgccgcttcaagatggacctgctcagcctcctgcccttggattttctctatttgaaagtcggtgtgaaccccctcctccgcctgccccgctgtttaaagtacatggccttcttcgagtttaacagccgcctggaatccatcctcagcaaagcctacgtgtacagggtcatcaggaccacagcctaccttctctacagcctgcatttgaattcctgtctttattactgggcatcggcctatcagggcctcggctccactcactgggtttacgatggcgtgggaaacagttatattcgctgttactactttgctgtgaagaccctcatcaccatcggggggctgcctgaccccaagacactctttgaaattgtcttccagctgctgaattatttcacgggcgtctttgctttctctgtgatgatcggacagatgagagatgtggtaggggccgccaccgcgggacagacctactaccgcagctgcatggacagcacggtgaagtacatgaatttctacaagatccccaagtccgtgcagaaccgcgtcaagacctggtacgagtacacctggcactcgcaaggcatgctggatgagtcagagctgatggtgcagcttccagacaagatgcggctggacctcgccatcgacgtgaactacaacatcgttagcaaagtcgcactctttcagggctgtgaccggcagatgatctttgacatgctgaagaggcttcgctctgttgtctacctgcccaacgactatgtgtgcaagaagggggagatcggccgtgagatgtacatcatccaggcagggcaagtgcaggtcttgggcggccctgatgggaaatctgtgctggtgacgctgaaagctggatctgtgtttggagaaataagcttgctggctgttgggggcgggaaccggcgcacggccaacgtggtggcgcacgggtttaccaacctcttcatcctggataagaaggacctgaatgagattttggtgcattatcctgagtctcagaagttactccggaagaaagccaggcgcatgctgagaagcaacaataagcccaaggaggagaagagcgtgctgatccttccaccccgggcgggcaccccaaagctcttcaacgctgccctcgctatgacaggaaagatgggtggcaagggggcaaaaggcggcaaacttgctcacctccgggcccggctcaaagaactggccgcgctggaggcggctgcaaagcagcaagagttggtggaacaggccaagagctcgcaagacgtcaagggagaggaaggctccgccgccccagaccagcacacgcacccaaaggaggccgccaccgacccacccgcgccccggacgccccccgagcccccggggtctccaccgagctctccaccgcctgcctcccttgggaggccggagggagaggaggaggggccggccgagcccgaagagcactcggtgaggatctgcatgagcccgggcccggagccgggagagcagatcctgtcggtgaagatgccggaggaaagggaggagaaggcggagtaaggtggggtgaggcggatcccgcgcgcagttccagcaggtgtgtccccagcgcccgctgcgcccctcgccccagcgccccaccttcccccacggctcaagagaagatgcttttccgtagtcgtgacctcagtggctgcagctctgaccgtcccgccagcacgccagccccgactcagctcctcgcggggctgggcctgagctcgacaagttgcatcaagtgttcgagtccctgagctctcactatcatttgagagccctaccttttcctgactgttcctctttttaagaacaaaatgattttccacttttaaagttcatgggtgagggataaaatgaggctccaatacatgggaagctttgctgaaaaagtaaagtgttattgaatgtgtggggtttcccctcaggaatttgtctaacacatttcaaggatagaaaatacttcactgccgggcatggtggctcatgcctataatcccagtgctttgggaagccgaagcaggaggatcactggaggccaagagttggagagcagactgggcaacatagcgagacctcatctcaaaccggaattcgg

SEQ ID NO: 92024 - DNA, 3453 bp, Homo sapiens
ctgccattccctgcacatctcctcaatctgattagaagcaggaaggattgctggctcctctgccactggagccaccctggctcgggagctgggctcccacttgcatgcaccgacccaggcttgggatgaacgccacagcccccagctgaacccctgcaccatgggcatcctgactggtcccgaccgagagatccaaggtgctgctggatagctgtgtggtgtcgcaggtgggcgtgggccagagtgaagaagacgggacccggccccagagcacttcagatcagaagctgtgggaggaagttggggaggaggccaagaaggaggctgaagagaaggccaaggaggaggccgaggaggtggctgaagaggaggctgaaaaggagccccaggactgggcggagaccaaggaggagcctgaggctgaggccgaggctgccagttcaggagtccccagggtcactcctctgcctgagactctctggccccagcaccatggctacaccatgtcagaacatggagctgaatcgcctagtccaggaccagatacctggccaggtggcctctgcctctgccctccaaaacctggtagagcatctccctaatgtgcccagctaccgcatcccaatcacccgcatccctgtcctcacctcccggagaaccagcttgtccaactccagcttcgccaaggagaccaggagctccatccggcaactagtgcctgccacgaaacagcacccagaagtgcaggtggaagatactgatgctgatagctgccccctcatggcagaagagaatccaccctcaaccgtgttgccgccaccgtctcctgccaaatcagacacccttatagtcccaagctcagcctcggggacacacaggaagaagctgccctctgaggatgatgaggctgaagagctcaaggcgttgtcaccagcagagtccccagtggttgcctggtctgaccccaccaccccgaaggacactgatggccaggaccgtgcggcctccacggccagcacaaatagcgccatcatcaacgaccggctccaggagctggtgaagctcttcaaggagcggacagagaaagtgaaggagaaactcattgaccctgacgtcacctctgatgaggagagccccaagccctccccagccaagaaagccccagagccagctccagacacaaagcccgctgaagccgagccagtggaagaggagcactattgcgacatgctctgctgcaagttcaaacaccgcccctggaagaagtaccagtttccccagagcattgacccgctgaccaacctgatgtatgtcctatggctgttcttcgtggtgatggcctggaattggaactgttggctgattcccgtgcgctgggccttcccctaccagaccccggacaacatccaccactggctgctgatggattacctatgcgacctcatctacttcctggacatcaccgtgttccagacacgcctgcagtttgtcagaggcggggacatcattacggacaaaaaggacatgcgaaataactacctgaagtctcgccgcttcaagatggacctgctcagcctcctgcccttggattttctctatttgaaagtcggtgtgaaccccctcctccgcctgccccgctgtttaaagtacatggccttcttcgagtttaacagccgcctggaatccatcctcagcaaagcctacgtgtacagggtcatcaggaccacagcctaccttctctacagcctgcatttgaattcctgtctttattactgggcatcggcctatcagggcctcggctccactcactgggtttacgatggcgtgggaaacagttatattcgctgttactactttgctgtgaagaccctcatcaccatcggggggctgcctgaccccaagacactctttgaaattgtcttccagctgctgaattatttcacgggcgtctttgctttctctgtgatgatcggacagatgagagatgtggtaggggccgccaccgcgggacagacctactaccgcagctgcatggacagcacggtgaagtacatgaatttctacaagatccccaagtccgtgcagaaccgcgtcaagacctggtacgagtacacctggcactcgcaaggcatgctggatgagtcagagctgatggtgcagcttccagacaagatgcggctggacctcgccatcgacgtgaactacaacatcgttagcaaagtcgcactctttcagggctgtgaccggcagatgatctttgacatgctgaagaggcttcgctctgttgtctacctgcccaacgactatgtgtgcaagaagggggagatcggccgtgagatgtacatcatccaggcagggcaagtgcaggtcttgggcggccctgatgggaaatctgtgctggtgacgctgaaagctggatctgtgtttggagaaataagcttgctggctgttgggggcgggaaccggcgcacggccaacgtggtggcgcacgggtttaccaacctcttcatcctggataagaaggacctgaatgagattttggtgcattatcctgagtctcagaagttactccggaagaaagccaggccaagagctcgcaagacgtcaagggagaggaaggctccgccgccccagaccagcacacgcacccaaaggaggccgccaccgacccacccgcgccccggacgccccccgagcccccggggtctccaccgagctctccaccgcctgcctcccttgggaggccggagggagaggaggaggggccggccgagcccgaagagcactcggtgaggatctgcatgagcccgggcccggagccgggagagcagatcctgtcggtgaagatgccggaggaaagggaggagaaggcggagtaaggtggggtgaggcggatcccgcgcgcagttccagcaggtgtgtccccagcgcccgctgcgcccctcgccccagcgccccaccttcccccacggctcaagagaagatgcttttccgtagtcgtgacctcagtggctgcagctctgaccgtcccgccagcacgccagccccgactcagctcctcgcggggctgggcctgagctcgacaagttgcatcaagtgttcgagtccctgagctctcactatcatttgagagccctaccttttcctgactgttcctctttttaagaacaaaatgattttccacttttaaagttcatgggtgagggataaaatgaggctccaatacatgggaagctttgctgaaaaagtaaagtgttattgaatgtgtggggtttcccctcaggaatttgtctaacacatttcaaggatagaaaatacttcactgccgggcatggtggctcatgcctataatcccagtgctttgggaagccgaagcaggaggatcactggaggccaagagttggagagcagactgggcaacatagcgagacctcatctcaaaccggaattcgg

SEQ ID NO: 92025 - DNA, 1767 bp, Homo sapiens
gttcatgcgctgtgttccttctgcagggtcatcaggaccacagcctaccttctctacagcctgcatttgaattcctgtctttattactgggcatcggcctatcagggcctcggctccactcactgggtttacgatggcgtgggaaacagttatattcgctgttactactttgctgtgaagaccctcatcaccatcggggggctgcctgaccccaagacactctttgaaattgtcttccagctgctgaattatttcacgggcgtctttgctttctctgtgatgatcggacagatgagagatgtggtaggggccgccaccgcgggacagacctactaccgcagctgcatggacagcacggtgaagtacatgaatttctacaagatccccaagtccgtgcagaaccgcgtcaagacctggtacgagtacacctggcactcgcaaggcatgctggatgagtcagagctgatggtgcagcttccagacaagatgcggctggacctcgccatcgacgtgaactacaacatcgttagcaaagtcgcactctttcagggctgtgaccggcagatgatctttgacatgctgaagaggcttcgctctgttgtctacctgcccaacgactatgtgtgcaagaagggggagatcggccgtgagatgtacatcatccaggcagggcaagtgcaggtcttgggcggccctgatgggaaatctgtgctggtgacgctgaaagctggatctgtgtttggagaaataagcttgctggctgttgggggcgggaaccggcgcacggccaacgtggtggcgcacgggtttaccaacctcttcatcctggataagaaggacctgaatgagattttggtgcattatcctgagtctcagaagttactccggaagaaagccaggccaagagctcgcaagacgtcaagggagaggaaggctccgccgccccagaccagcacacgcacccaaaggaggccgccaccgacccacccgcgccccggacgccccccgagcccccggggtctccaccgagctctccaccgcctgcctcccttgggaggccggagggagaggaggaggggccggccgagcccgaagagcactcggtgaggatctgcatgagcccgggcccggagccgggagagcagatcctgtcggtgaagatgccggaggaaagggaggagaaggcggagtaaggtggggtgaggcggatcccgcgcgcagttccagcaggtgtgtccccagcgcccgctgcgcccctcgccccagcgccccaccttcccccacggctcaagagaagatgcttttccgtagtcgtgacctcagtggctgcagctctgaccgtcccgccagcacgccagccccgactcagctcctcgcggggctgggcctgagctcgacaagttgcatcaagtgttcgagtccctgagctctcactatcatttgagagccctaccttttcctgactgttcctctttttaagaacaaaatgattttccacttttaaagttcatgggtgagggataaaatgaggctccaatacatgggaagctttgctgaaaaagtaaagtgttattgaatgtgtggggtttcccctcaggaatttgtctaacacatttcaaggatagaaaatacttcactgccgggcatggtggctcatgcctataatcccagtgctttgggaagccgaagcaggaggatcactggaggccaagagttggagagcagactgggcaacatagcgagacctcatctcaaaccggaattcgg

SEQ ID NO: 92026 - DNA, 466 bp, Homo sapiens
aagcagacattgaaacatccaactggcccagaaacagctcatttggggcagcttctgagaagcagttccagactgtaattggtaagaacttctgggtgggcacccaggttgctgttgctgttgaggagggttgtggagttcactccagaagagcaccttgggttctgcacacagagcttgcagtagcttgtataatggtgccagggtcctctcagatctggatccaaggtctgcagttgggacccttctctctgcatcctctacctgggcctcagggctggttcagatggtcaccaatgtcatcccacagccccagccaagaaagccccagagccagctccagacacaaagcccgctgaagccgagccagtggaagaggagcactattgcgacatgctctgctgcaagttcaaacaccgcccctggaagaagtaccagtttccccagagcattgacccgctgacca

SEQ ID NO: 92027 - DNA, 4382 bp, Homo sapiens
gaattccgatggcagaagagaatccacctgcaattcctggctggcggttggcatctaagcaggcatcaggatgttgggctgggtccagagggtgctgcctcagcccccagggacccctcggaagaccaagatgcaggaggaagaggaagtggaaccagagccagagatggaggcggaggtggaaccagaaccgaatcctgaggaggccgagacagagtccgagtccatgccccccgaagagtcattcaaggaggaggaagtggctgtggcagacccaagccctcaggagaccaaggaggctgcccttacttccaccatatccctccgggcccagggcgctgagatttctgaaatgaatagtcccagccacagggtactgacctggctcatgaagggcgtagagaaggtgatcccgcagcctgttcacagcatcacggaggacccggctcagatcctggggcatggcagcactggggacacagggtgcacagatgaacccaatgaggcccttgaggcccaagacactaggcctgggctgcggctgcttctgtggctggagcagaatctggaaagagtgcttcctcagccccccaaatcctctgaggtctggagagatgagcctgcagttgctacagcgcctccaggacgcccccaggaaatggggcccaagctgcaggcccgggagaccccctccctgcccacacccatccccctgcagcccaaggaggaacccaaggaggcaccagctccagagccccagcccggctcccaggcccagacctcctccctgccaccaaccagggaccctgccaggctggtggcatgggtcctgcacaggctggagatggccttgccgcagccagtgctacatgggaaaataggggaacaggagcctgactcccctgggatatgtgatgtgcagaccatcagcatccttcctggaggacaagtggagcctgaccttgtcctagaggaggttgaaccgccctgggaggatgcccaccaggatgtcagtaccagcccacagggtacagaggtggttccagcttatgaagaagagaacaaagctgtggagaagatgcccagagagctgtcccggattgaagaggagaaagaagatgaggaggaggaagaggaagaggaggaggaggaggaagaggaggaggtgactgaggtgctgctggatagctgtgtggtgtcgcaggtgggcgtgggccagagtgaagaagacgggacccggccccagagcacttcagatcagaagctgtgggaggaagttggggaggaggccaagaaggaggctgaagagaaggccaaggaggaggccgaggaggtggctgaagaggaggctgaaaaggagccccaggactgggcggagaccaaggaggagcctgaggctgaggccgaggctgccagttcaggagtgcctgccacgaaacagcacccagaagtgcaggtggaagatactgatgctgatagctgccccctcatggcagaagagaatccaccctcaaccgtgttgccgccaccgtctcctgccaaatcagacacccttatagtcccaagctcagcctcggggacacacaggaagaagctgccctctgaggatgatgaggctgaagagctcaaggcgttgtcaccagcagagtccccagtggttgcctggtctgaccccaccaccccgaaggacactgatggccaggaccgtgcggcctccacggccagcacaaatagcgccatcatcaacgaccggctccaggagctggtgaagctcttcaaggagcggacagagaaagtgaaggagaaactcattgaccctgacgtcacctctgatgaggagagccccaagccctccccagccaagaaagccccagagccagctccagacacaaagcccgctgaagccgagccagtggaagaggagcactattgcgacatgctctgctgcaagttcaaacaccgcccctggaagaagtaccagtttccccagagcattgacccgctgaccaacctgatgtatgtcctatggctgttcttcgtggtgatggcctggaattggaactgttggctgattcccgtgcgctgggccttcccctaccagaccccggacaacatccaccactggctgctgatggattacctatgcgacctcatctacttcctggacatcaccgtgttccagacacgcctgcagtttgtcagaggcggggacatcattacggacaaaaaggacatgcgaaataactacctgaagtctcgccgcttcaagatggacctgctcagcctcctgcccttggattttctctatttgaaagtcggtgtgaaccccctcctccgcctgccccgctgtttaaagtacatggccttcttcgagtttaacagccgcctggaatccatcctcagcaaagcctacgtgtacagggtcatcaggaccacagcctaccttctctacagcctgcatttgaattcctgtctttattactgggcatcggcctatcagggcctcggctccactcactgggtttacgatggcgtgggaaacagttatattcgctgttactactttgctgtgaagaccctcatcaccatcggggggctgcctgaccccaagacactctttgaaattgtcttccagctgctgaattatttcacgggcgtctttgctttctctgtgatgatcggacagatgagagatgtggtaggggccgccaccgcgggacagacctactaccgcagctgcatggacagcacggtgaagtacatgaatttctacaagatccccaagtccgtgcagaaccgcgtcaagacctggtacgagtacacctggcactcgcaaggcatgctggatgagtcagagctgatggtgcagcttccagacaagatgcggctggacctcgccatcgacgtgaactacaacatcgttagcaaagtcgcactctttcagggctgtgaccggcagatgatctttgacatgctgaagaggcttcgctctgttgtctacctgcccaacgactatgtgtgcaagaagggggagatcggccgtgagatgtacatcatccaggcagggcaagtgcaggtcttgggcggccctgatgggaaatctgtgctggtgacgctgaaagctggatctgtgtttggagaaataagcttgctggctgttgggggcgggaaccggcgcacggccaacgtggtggcgcacgggtttaccaacctcttcatcctggataagaaggacctgaatgagattttggtgcattatcctgagtctcagaagttactccggaagaaagccaggcgcatgctgagaagcaacaataagcccaaggaggagaagagcgtgctgatccttccaccccgggcgggcaccccaaagctcttcaacgctgccctcgctatgacaggaaagatgggtggcaagggggcaaaaggcggcaaacttgctcacctccgggcccggctcaaagaactggccgcgctggaggcggctgcaaagcagcaagagttggtggaacaggccaagagctcgcaagacgtcaagggagaggaaggctccgccgccccagaccagcacacgcacccaaaggaggccgccaccgacccacccgcgccccggacgccccccgagcccccggggtctccaccgagctctccaccgcctgcctcccttgggaggccggagggagaggaggaggggccggccgagcccgaagagcactcggtgaggatctgcatgagcccgggcccggagccgggagagcagatcctgtcggtgaagatgccggaggaaagggaggagaaggcggagtaaggtggggtgaggcggatcccgcgcgcagttccagcaggtgtgtccccagcgcccgctgcgcccctcgccccagcgccccaccttcccccacggctcaagagaagatgcttttccgtagtcgtgacctcagtggctgcagctctgaccgtcccgccagcacgccagccccgactcagctcctcgcggggctgggcctgagctcgacaagttgcatcaagtgttcgagtccctgagctctcactatcatttgagagccctaccttttcctgactgttcctctttttaagaacaaaatgattttccacttttaaagttcatgggtgagggataaaatgaggctccaatacatgggaagctttgctgaaaaagtaaagtgttattgaatgtgtggggtttcccctcaggaatttgtctaacacatttcaaggatagaaaatacttcactgccgggcatggtggctcatgcctataatcccagtgctttgggaagccgaagcaggaggatcactggaggccaagagttggagagcagactgggcaacatagcgagacctcatctcaaaccggaattcgg

SEQ ID NO: 92028 - DNA, 1631 bp, Homo sapiens
  misc_feature (1305)..(1305): n is a, c, g, or t
ccagctacgagtggcagcaagaaggcaattcctggctggcggttggcatctaagcaggcatcaggatgttgggctgggtccagagggtgctgcctcagcccccagggacccctcggaagaccaagatgcaggaggaagaggaagtggaaccagagccagagatggaggcggaggtggaaccagaaccgaatcctgaggaggccgagacagagtccgagtccatgccccccgaagagtcattcaaggaggaggaagtggctgtggcagacccaagccctcaggagaccaaggaggctgcccttacttccaccatatccctccgggcccagggcgctgagatttctgaaatgaatagtcccagccacagggtactgacctggctcatgaagggcgtagagaaggtgatcccgcagcctgttcacagcatcacggaggacccggctcagatcctggggcatggcagcactggggacacagggtgcacagatgaacccaatgaggcccttgaggcccaagacactaggcctgggctgcggctgcttctgtggctggagcagaatctggaaagagtgcttcctcagccccccaaatcctctgaggtctggagagatgagcctgcagttgctacaggtgctgcctcagacccagcgcctccaggacgcccccaggaaatggggcccaagctgcaggcccgggagaccccctccctgcccacacccatccccctgcagcccaaggaggaacccaaggaggcaccagctccagagccccagcccggctcccaggcccagacctcctccctgccaccaaccagggaccctgccaggctggtggcatgggtcctgcacaggctggagatggccttgccgcagccagtgctacatgggaaaataggggaacaggagcctgactcccctgggatatgtgatgtgcagaccagggtgatgggagctggaggtctctgaaataagggagaagggaatctgggagagctcagatggacacatggatggaaggaaagaaggatgccctgaagagaagaccttcccgggggaggtggccactgacaccccaccctatttgaacagcgaacccctccctctccacacactcccaggcaggacaaggggagccagagtcacctgcaccagccccagagcctcccagaccagaacaaggggaaggccagccatgggcagcctgcaagatttaggctagacagcaggacttacccccagagggctgtggaaaaggcccatagccgggcgtggtggctcacgcctgtaatcccagcactttgggagnctgaggcaggaggattgcttgagccccgaagttcgagaccaccgtgggcaacacagtgagaccctgtctctaaaaaaccttttttaaattaataaattaaaaagccccatggatggaggactcagtattgagcatctctttgagaggacgcgtgcacagcccccagtgtggtacctggcaccgtcagcacctcgacaggatacagtttttcccagaagaggttctccctaggcctggccacactctctccttccaaggcttggggacaccaatgagcagcaacaaatgttttcattaacattaaaagagtgtaaatgagcacatca

SEQ ID NO: 92029 - DNA, 1378 bp, Homo sapiens
ctgccattccctgcacatctcctcaatctgattagaagcaggaaggattgctggctcctctgccactggagccaccctggctcgggagctgggctcccacttgcatgcaccgacccaggcttgggatgaacgccacagcccccagctgaacccctgcaccatgggcatcctgactggtcccgaccgagagatccaaggtgctgctggatagctgtgtggtgtcgcaggtgggcgtgggccagagtgaagaagacgggacccggccccagagcacttcagatcagaagctgtgggaggaagttggggaggaggccaagaaggaggctgaagagaaggccaaggaggaggccgaggaggtggctgaagaggaggctgaaaaggagccccaggactgggcggagaccaaggaggagcctgaggctgaggccgaggctgccagttcaggagtccccagggtcactcctctgcctgagactctctggccccagcaccatggctacaccatgtcagaacatggagctgaatcgcctagtccaggaccagatacctggccaggtggcctctgcctctgccctccaaaacctggtagagcatctccctaatgtgcccagctaccgcatcccaatcacccgcatccctgtcctcacctcccggagaaccagcttgtccaactccagcttcgccaaggagaccaggagctccatccggcaactagtgcctgccacgaaacagcacccagaagtgcaggtggaagatactgatgctgatagctgccccctcatggcagaagagaatccaccctcaaccgtgttgccgccaccgtctcctgccaaatcagacacccttatagtcccaagctcagcctcggggacacacaggaagaagctgccctctgaggatgatgaggctgaagagctcaaggcgttgtcaccagcagagtccccagtggttgcctggtctgaccccaccaccccgaaggacactgagtgagacccctctggggtctcagaaaattgaaagactgcggggagggtgggggatgtgggggggctagtgtggatgcttttagaaccttcttaccgcaaggcagactttgccagtggcttccgagcagtaagtcgggatcggtcgcctgcccaggctgcttctggctggcccaggagtcctgttaaatccagtgggctcaacctctgggcccagctgtgtccacggccagcagtgctcagagagggagggatctctaggcagaggtccccttgtgaaggagaggctgaggggagctgcctgcagggctcctgctgctgaacttctgaaaggtcagtggggacagggaggaccaccaggatctccagtgggttctgccctggggagtttgtga

SEQ ID NO: 92030 - DNA, 1942 bp, Homo sapiens
gaattccgatggcagaagagaatccacctgcaattcctggctggcggttggcatctaagcaggcatcaggatgttgggctgggtccagagggtgctgcctcagcccccagggacccctcggaagaccaagatgcaggaggaagaggaagtggaaccagagccagagatggaggcggaggtggaaccagaaccgaatcctgaggaggccgagacagagtccgagtccatgccccccgaagagtcattcaaggaggaggaagtggctgtggcagacccaagccctcaggagaccaaggaggctgcccttacttccaccatatccctccgggcccagggcgctgagatttctgaaatgaatagtcccagccacagggtactgacctggctcatgaagggcgtagagaaggtgatcccgcagcctgttcacagcatcacggaggacccggctcagatcctggggcatggcagcactggggacacagggtgcacagatgaacccaatgaggcccttgaggcccaagacactaggcctgggctgcggctgcttctgtggctggagcagaatctggaaagagtgcttcctcagccccccaaatcctctgaggtctggagagatgagcctgcagttgctacaggtgctgcctcagacccagcgcctccaggacgcccccaggaaatggggcccaagctgcaggcccgggagaccccctccctgcccacacccatccccctgcagcccaaggaggaacccaaggaggcaccagctccagagccccagcccggctcccaggcccagacctcctccctgccaccaaccagggaccctgccaggctggtggcatgggtcctgcacaggctggagatggccttgccgcagccagtgctacatgggaaaataggggaacaggagcctgactcccctgggatatgtgatgtgcagaccatcagcatccttcctggaggacaagtggagcctgaccttgtcctagaggaggttgaaccgccctgggaggatgcccaccaggatgtcagtaccagcccacagggtacagaggtggttccagcttatgaagaagagaacaaagctgtggagaagatgcccagagagctgtcccggattgaagaggagaaagaagatgaggaggaggaagaggaagaggaggaggaggaggaagaggaggaggtgactgaggtgctgctggatagctgtgtggtgtcgcaggtgggcgtgggccagagtgaagaagacgggacccggccccagagcacttcagatcagaagctgtgggaggaagttggggaggaggccaagaaggaggctgaagagaaggccaaggaggaggccgaggaggtggctgaagaggaggctgaaaaggagccccaggactgggcggagaccaaggaggagcctgaggctgaggccgaggctgccagttcaggaggaagaagctgccctctgaggatgatgaggctgaagagctcaaggcgttgtcaccagcagagtccccagtggttgcctggtctgaccccaccaccccgaaggacactgagtgagacccctctggggtctcagaaaattgaaagactgcggggagggtgggggatgtgggggggctagtgtggatgcttttagaaccttcttaccgcaaggcagactttgccagtggcttccgagcagtaagtcgggatcggtcgcctgcccaggctgcttctggctggcccaggagtcctgttaaatccagtgggctcaacctctgggcccagctgtgtccacggccagcagtgctcagagagggagggatctctaggcagaggtccccttgtgaaggagaggctgaggggagctgcctgcagggctcctgctgctgaacttctgaaaggtcagtggggacagggaggaccaccaggatctccagtgggttctgccctggggagtttgtga

SEQ ID NO: 92031 - DNA, 342 bp, Homo sapiens
gcaagtagggaggatatcgctaaattcttttcctagcaagcaatattaatattaataccctgggaaaggaatgcattcctggggagaggtctataaacagctgctctgggaatgtctgtcttacgtggttgagataaggactgagatacgccctgatctcctgcagtaccctcaggcttactacggtggggaaaaactccaccctggtgaatttgtggtcagacgtttccctattttttgttcaagatgtttatcaagataatacgtgcaccgctgaacatggacccttatcagtagttctgtgttgccttttctcctgttccctcagaagcaagtgatctt

SEQ ID NO: 92032 - DNA, 384 bp, Homo sapiens
agtaacatcacaaatcattcatcaccataacagataaaataataatgaaaaagtttgaaatattgcaagaattaccagattgtgacccagaagacacaaaatggacacatcctgttggacaaatagctccaaaagacttgctcagcacagggttgccacaaaccttcagtttgtaaaaaaacacaattacgtgtgaagcttgataaagtgaaatgcagtgaaatgaaggctgccggtattaggttgtttatactgagatctttctgggcagctgatggtttgattttcttttttattctgatgagtgttctgttacctagtagggtaggtcttttctctgtacacttactaaaaaccaaaaaagttcttctcccttatatttta

SEQ ID NO: 92033 - DNA, 546 bp, Homo sapiens
agaacatccagcctctccagtactgaggcctctctgggattctttatcttttgtctgaaagcattatgaggcttaattcccataaaaataaaacacattccaaagccaaggccagggtttgggcattctctgctggtttatactgaccactcccccaggtcccgttcatgagcatggagaatagagaactgatggtagggctgatattgtgcaggcatggccctttcatggaaacagagggctaaggaggccttaaaaagccttcggggccagtcctttgtctccaagaggtcttgcttagcacgaatagatcagaccactctccccctattttcctcccagacagtaagacttgctaaggtcttaggaatataaatattccacctgggccgggtgtggtggctcatgcctgtaattccagcactttgggaagttgaggtgggcggctcacgaggtcaagagatcgagaccatcttggccaacatggtgaaactccgtctctactaaaaatacaaaaattagctgggcatggtggcgcgtgcctgt

SEQ ID NO: 92034 - DNA, 364 bp, Homo sapiens
tggaaaaggagtttggctctgttgcccaggttggagtgcagtgttttttggggggtcttggtttatgctccctgcccttgagcccctcagccgtttgccctgcccccacctcggctccatggtgggagggggctctggtcttttctaaagtgggcggtttgtcttttgatctttcccttttggatgtgcgtgtgtgtctgcgtgtgccatgtgcgtggcacgcatatgagtgtgtgtgcgtgtgaacggctttgggtcctgctggttttgctgtgagctgcagtgttctgtgggtctgtggtatctgacactgtggacattaatgtacttcttggacattttaataaattttttaacagttcaa

SEQ ID NO: 92035 - DNA, 3384 bp, Homo sapiens
caccttctccacaaggcagcaggagagagagagagagagagcttctgggaggaggtggcaagtggagaggagccagccctgccagggacccctatgaatgcaggtgcggaggaggtgcactcagatccctgtgagaacaacccttgtcttcatggagggacatgtaatgccaatggcaccatgtatggctgtagctgtgatcagggcttcgccggggagaactgtgagattgacattgatgactgcctctgcagcccctgtgagaatggaggcacctgtattgatgaggtcaatggctttgtctgcctttgcctccccagctatgggggcagcttttgtgagaaagacaccgagggctgtgaccgcggctggcataagttccagggccactgttaccgctattttgcccaccggagggcatgggaagatgccgagaaggactgccgccgccgctccggccacctgaccagcgtccactcaccggaggaacacagcttcattaatagctttgggcatgaaaacacgtggatcggcctgaacgacaggatcgtggagagagatttccagtggacggacaacaccgggctgcaatttgagaactggcgagagaaccagccggacaatttcttcgcgggtggcgaggactgtgtggtgatggtggcgcatgaaagcgggcgctggaacgatgtcccctgcaactacaacctaccctatgtctgcaagaagggcacagtgctctgtggtccccctccggcagtggagaatgcctcactcatcggtgcccgcaaggccaagtacaatgtccatgccactgtaaggtaccagtgcaatgaaggatttgcccagcaccatgtggccaccattcgatgccggagcaatggcaagtgggacaggccccaaattgtctgcaccaaacccagacgttcacatcggatgcggcgacaccaccaccaccaccaacaccaccaccagcatcaccaccacaaatcccgcaaggagcgcagaaaacacaagaaacacccaacggaggactgggagaaggacgaagggaatttctgctgaagaaccagaaaaaagaaagcacaacacctttcccatgcctcctctggagccttcgcctggggagacagaacccagagagaaacaagagagtccagaagtccctgaaccccaaaccacatcccccacacacataatcctttgtacaaagctcctcttttccctttttttacatacacaagatcctcttggcaggtggagccaggtgtctgaaaagttcattctcgtctggctgaactctgggagtgtgtcccagctgagggaagcacaagtagcaaagctcattggtctggtctcttgtttgccaggctgattgaagcaggccttgatgagggtgcatgagtgtatgtttgcattcacatgaaggaattgcttttcacaccagaaattcagacttagtcaatgttggctgaattcctaaatccaggaagaagcctggacgtagggtcattagctttgggaatagaaggctacacagaagcacactgtttttgaacttgacaacagctctccctttaccctggacttcagcccaagttccgtctttggtcttggtggataaacacacagtgtggagatcccacgtactgcattttagggatgtttttaggacaacctccctccatgccttcagagttaggagtgagaatgatcaaagcaatatgtaggtgatggagggagagtgtattgctaacccttccaggtctagtccagcgctgagatttggtggttctgcatgtgtgatgaatctctttcacacaaatagacgagaggatatttagggctagatgagcccagatttcttccccctccatctctcagggagacaaagaacctccttcctggaccaaggaggtgctgccaagttttctagcccagtgcacatacccagtccttaagcagacattggtagtgcccctgccctgggtcccactcctgccccaccccacccttgtccctggccattgcctggtggtctagaaacacttaaaacttgaagtagtgacacctacctgcggtcatattgtagagagatgctcagtgttaaaactgaaacacacaaacacacacacacacacatttttctcttgtagattttaattttttaagtgggaaagaactcaccttgccttcctcccccaaatgtgcaacctgtaaaaggtctctccacaccaggggccaggatccagttccctcatctctggcaggaaagatccacagcttttcctccatgtctgttactcactttcagcagtccgggtaaaatctgtggatcagggttaaaaaagcaccgtggagaatggccctcttcaggaaagaaaaataagcaaatgaatggtccacctaggggttcagtaaagaaagaaatgtgttaactgagcctgaatcccttctgggaagtaataatgaccattgacaactaagaagtagacaccatgctaaagacttacatacaatctccttgaatcttctcaatagcccattgacttagaaactgttactttcccattttacacacagtgaaactgaggctcagatataaaggaaaggtactggcttgaagtcacaaccacgacaggagtaaggatttggaataaggatttggtcctgttttctggaccaaatccttactctggctctgcttacactttctctccatcaccaaatccttactccaaatccagaagtcagagccaactcccatcttggttctgacccaaatcctgctctggactctggagaggagattgaaatataattgcaccctcatacacatttaggaaatggttaagaagtgtaaactgaacccttatccttgtcttcaatcttcctccctgtagacatctatcttattatggttattattcagaaaacccagggatacaggtttgtcttcttactttgataactcttcttagtttaaaataataataataacacatctttggtcatctatgtcacacaaaaattttcctttgtttgcggggggctggggatgcagtgttttttggggggtcttggtttatgctccctgcccttgagcccctcagccgtttgccctgcccccacctcggctccatggtgggagggggctctggtcttttctaaagtgggcggtttgtcttttgatctttcccttttggatgtgcgtgtgtgtctgcgtgtgccatgtgcgtggcacgcatatgagtgtgtgtgcgtgtgaacggctttgggtcctgctggttttgctgtgagctgcagtgttctgtgggtctgtggtatctgacactgtggacattaatgtacttcttggacattttaataaattttttaacagttcaa

SEQ ID NO: 92036 - DNA, 2979 bp, Homo sapiens
gctggtacgcgccggaatttagggatcgagaaggactgccgccgccgctccggccacctgaccagcgtccactcaccggaggaacacagcttcattaatagctttgggcatgaaaacacgtggatcggcctgaacgacaggatcgtggagagagatttccagtggacggacaacaccgggctgcaatttgagaactggcgagagaaccagccggacaatttcttcgcgggtggcgaggactgtgtggtgatggtggcgcatgaaagcgggcgctggaacgatgtcccctgcaactacaacctaccctatgtctgcaagaagggcacagtgctctgtggtccccctccggcagtggagaatgcctcactcatcggtgcccgcaaggccaagtacaatgtccatgccactgtaaggtaccagtgcaatgaaggatttgcccagcaccatgtggccaccattcgatgccggagcaatggcaagtgggacaggccccaaattgtctgcaccaaacccagacgttcacatcggatgcggcgacaccaccaccaccaccaacaccaccaccagcatcaccaccacaaatcccgcaaggagcgcagaaaacacaagaaacacccaacggaggactgggagaaggacgaagggaatttctgctgaagaaccagaaaaaagaaagcacaacacctttcccatgcctcctctggagccttcgcctggggagacagaacccagagagaaacaagagagtccagaagtccctgaaccccaaaccacatcccccacacacataatcctttgtacaaagctcctcttttccctttttttacatacacaagatcctcttggcaggtggagccaggtgtctgaaaagttcattctcgtctggctgaactctgggagtgtgtcccagctgagggaagcacaagtagcaaagctcattggtctggtctcttgtttgccaggctgattgaagcaggccttgatgagggtgcatgagtgtatgtttgcattcacatgaaggaattgcttttcacaccagaaattcagacttagtcaatgttggctgaattcctaaatccaggaagaagcctggacgtagggtcattagctttgggaatagaaggctacacagaagcacactgtttttgaacttgacaacagctctccctttaccctggacttcagcccaagttccgtctttggtcttggtggataaacacacagtgtggagatcccacgtactgcattttagggatgtttttaggacaacctccctccatgccttcagagttaggagtgagaatgatcaaagcaatatgtaggtgatggagggagagtgtattgctaacccttccaggtctagtccagcgctgagatttggtggttctgcatgtgtgatgaatctctttcacacaaatagacgagaggatatttagggctagatgagcccagatttcttccccctccatctctcagggagacaaagaacctccttcctggaccaaggaggtgctgccaagttttctagcccagtgcacatacccagtccttaagcagacattggtagtgcccctgccctgggtcccactcctgccccaccccacccttgtccctggccattgcctggtggtctagaaacacttaaaacttgaagtagtgacacctacctgcggtcatattgtagagagatgctcagtgttaaaactgaaacacacaaacacacacacacacacatttttctcttgtagattttaattttttaagtgggaaagaactcaccttgccttcctcccccaaatgtgcaacctgtaaaaggtctctccacaccaggggccaggatccagttccctcatctctggcaggaaagatccacagcttttcctccatgtctgttactcactttcagcagtccgggtaaaatctgtggatcagggttaaaaaagcaccgtggagaatggccctcttcaggaaagaaaaataagcaaatgaatggtccacctaggggttcagtaaagaaagaaatgtgttaactgagcctgaatcccttctgggaagtaataatgaccattgacaactaagaagtagacaccatgctaaagacttacatacaatctccttgaatcttctcaatagcccattgacttagaaactgttactttcccattttacacacagtgaaactgaggctcagatataaaggaaaggtactggcttgaagtcacaaccacgacaggagtaaggatttggaataaggatttggtcctgttttctggaccaaatccttactctggctctgcttacactttctctccatcaccaaatccttactccaaatccagaagtcagagccaactcccatcttggttctgacccaaatcctgctctggactctggagaggagattgaaatataattgcaccctcatacacatttaggaaatggttaagaagtgtaaactgaacccttatccttgtcttcaatcttcctccctgtagacatctatcttattatggttattattcagaaaacccagggatacaggtttgtcttcttactttgataactcttcttagtttaaaataataataataacacatctttggtcatctatgtcacacaaaaattttcctttgtttgcggggggctggggatgcagtgttttttggggggtcttggtttatgctccctgcccttgagcccctcagccgtttgccctgcccccacctcggctccatggtgggagggggctctggtcttttctaaagtgggcggtttgtcttttgatctttcccttttggatgtgcgtgtgtgtctgcgtgtgccatgtgcgtggcacgcatatgagtgtgtgtgcgtgtgaacggctttgggtcctgctggttttgctgtgagctgcagtgttctgtgggtctgtggtatctgacactgtggacattaatgtacttcttggacattttaataaattttttaacagttcaa

SEQ ID NO: 92037 - DNA, 2611 bp, Homo sapiens
agtgttgcaagaagggcacagtggtatgtggtcccctcgaatgagacggcaagtacaatgtcatgcactgtaggtaatagatggcaccattcgatgccggagcaatggcaagtgggacaggccccaaattgtctgcaccaaacccagacgttcacatcggatgcggcgacaccaccaccaccaccaacaccaccaccagcatcaccaccacaaatcccgcaaggagcgcagaaaacacaagaaacacccaacggaggactgggagaaggacgaagggaatttctgctgaagaaccagaaaaaagaaagcacaacacctttcccatgcctcctctggagccttcgcctggggagacagaacccagagagaaacaagagagtccagaagtccctgaaccccaaaccacatcccccacacacataatcctttgtacaaagctcctcttttccctttttttacatacacaagatcctcttggcaggtggagccaggtgtctgaaaagttcattctcgtctggctgaactctgggagtgtgtcccagctgagggaagcacaagtagcaaagctcattggtctggtctcttgtttgccaggctgattgaagcaggccttgatgagggtgcatgagtgtatgtttgcattcacatgaaggaattgcttttcacaccagaaattcagacttagtcaatgttggctgaattcctaaatccaggaagaagcctggacgtagggtcattagctttgggaatagaaggctacacagaagcacactgtttttgaacttgacaacagctctccctttaccctggacttcagcccaagttccgtctttggtcttggtggataaacacacagtgtggagatcccacgtactgcattttagggatgtttttaggacaacctccctccatgccttcagagttaggagtgagaatgatcaaagcaatatgtaggtgatggagggagagtgtattgctaacccttccaggtctagtccagcgctgagatttggtggttctgcatgtgtgatgaatctctttcacacaaatagacgagaggatatttagggctagatgagcccagatttcttccccctccatctctcagggagacaaagaacctccttcctggaccaaggaggtgctgccaagttttctagcccagtgcacatacccagtccttaagcagacattggtagtgcccctgccctgggtcccactcctgccccaccccacccttgtccctggccattgcctggtggtctagaaacacttaaaacttgaagtagtgacacctacctgcggtcatattgtagagagatgctcagtgttaaaactgaaacacacaaacacacacacacacacatttttctcttgtagattttaattttttaagtgggaaagaactcaccttgccttcctcccccaaatgtgcaacctgtaaaaggtctctccacaccaggggccaggatccagttccctcatctctggcaggaaagatccacagcttttcctccatgtctgttactcactttcagcagtccgggtaaaatctgtggatcagggttaaaaaagcaccgtggagaatggccctcttcaggaaagaaaaataagcaaatgaatggtccacctaggggttcagtaaagaaagaaatgtgttaactgagcctgaatcccttctgggaagtaataatgaccattgacaactaagaagtagacaccatgctaaagacttacatacaatctccttgaatcttctcaatagcccattgacttagaaactgttactttcccattttacacacagtgaaactgaggctcagatataaaggaaaggtactggcttgaagtcacaaccacgacaggagtaaggatttggaataaggatttggtcctgttttctggaccaaatccttactctggctctgcttacactttctctccatcaccaaatccttactccaaatccagaagtcagagccaactcccatcttggttctgacccaaatcctgctctggactctggagaggagattgaaatataattgcaccctcatacacatttaggaaatggttaagaagtgtaaactgaacccttatccttgtcttcaatcttcctccctgtagacatctatcttattatggttattattcagaaaacccagggatacaggtttgtcttcttactttgataactcttcttagtttaaaataataataataacacatctttggtcatctatgtcacacaaaaattttcctttgtttgcggggggctggggatgcagtgttttttggggggtcttggtttatgctccctgcccttgagcccctcagccgtttgccctgcccccacctcggctccatggtgggagggggctctggtcttttctaaagtgggcggtttgtcttttgatctttcccttttggatgtgcgtgtgtgtctgcgtgtgccatgtgcgtggcacgcatatgagtgtgtgtgcgtgtgaacggctttgggtcctgctggttttgctgtgagctgcagtgttctgtgggtctgtggtatctgacactgtggacattaatgtacttcttggacattttaataaattttttaacagttcaa

SEQ ID NO: 92038 - DNA, 5054 bp, Homo sapiens
gatgggggccccgtttgtctgggccttgggccttttgatgctgcagatgctgctctttgtggctggggaacagggcacacaggatatcaccgatgccagcgaaagggggctccacatgcagaagctggggtctgggtcagtgcaggctgcgctggcggagctggtggccctgccctgtctctttaccctgcagccacggccaagcgcagcccgagatgcccctcggataaagtggaccaaggtgcggactgcgtcgggccagcgacaggacttgcccatcctggtggccaaggacaatgtcgtgagggtggccaaaagctggcagggacgagtgtcactgccttcctacccccggcgccgagccaacgccacgctacttctggggccactgagggccagtgactctgggctgtaccgctgccaggtggtgaggggcatcgaggatgagcaggacctggtgcccttggaggtgacaggtgttgtgttccactaccgatcagcccgggaccgctatgcactgaccttcgctgaggcccaggaggcctgccgtctcagctcagccatcattgcagcccctcggcatctacaggctgcctttgaggatggctttgacaactgtgatgctggctggctctctgaccgcactgttcggtatcctatcacccagtcccgtcctggttgctatggcgaccgtagcagccttccaggggttcggagctatgggaggcgcaacccacaggaactctacgatgtgtattgctttgcccgggagctggggggcgaggtcttctacgtgggcccggcccgccgcctgacactggccggcgcgcgtgcacagtgccgccgccagggtgccgcgctggcctcggtgggacagctgcacctggcctggcatgagggcctggaccagtgcgacccgggctggctggccgacggcagcgtgcgctacccgatccagacgccgcgccggcgctgcgggggcccagccccgggcgtgcgcaccgtctaccgcttcgctaaccggaccggcttcccctcacccgccgagcgcttcgacgcctactgcttccgagctcatcaccccacgtcacaacatggagacctagagaccccatcctctggggatgagggggagattctgtcagcagaggggcccccagttagagaactggagcccaccctggaggaggaagaggtggtcacccctgacttccaggagcctctggtgtccagtggggaagaagaaaccctgattttggaggagaagcaggagtctcaacagaccctcagccctacccctggggaccccatgctggcctcatggcccactggggaagtgtggctaagcacggtggcccccagccctagcgacatgggggcaggcactgcagcaagttcacacacggaggtggccccaactgaccctatgcctaggagaagggggcgcttcaaagggttgaatgggcgctacttccagcagcaggaaccggagccggggctgcaaggggggatggaggccagcgcccagccccccacctcagaggctgcagtgaaccaaatggagcctccgttggccatggcagtcacagagatgttgggcagtggccagagccggagcccctgggctgatctgaccaatgaggtggatatgcctggagctggttctgctggtggcaagagctccccagagccctggctgtggccccctaccatggtcccacccagcatctcaggccacagcagggcccctgtcctggagctagagaaagccgagggccccagtgccaggccagccaccccagacctgttttggtcccccttggaggccactgtctcagctcccagccctgccccctgggaggcattccctgtggccacctccccagatctccctatgatggccatgctgcgtggtcccaaagagtggatgctaccacaccccacccccatctccaccgaggccaatagagttgaggcacatggtgaggccaccgccacggctccaccctcccctgctgcagagaccaaggtgtattccctgcctctctctttgaccccaacaggacagggtggagaggccatgcccacaacacctgagtcccccagggcagacttcagagaaactggggagaccagccctgctcaggtcaacaaagctgagcactccagctccagcccatggccttctgtaaacaggaatgtggctgtaggttttgtccccactgagactgccactgagccaacgggcctcaggggtatcccggggtctgagtctggggtcttcgacacagcagaaagccccacttctggcttgcaggccactgtagatgaggtgcaggacccctggccctcagtgtacagcaaagggctggatgcaagttccccatctgcccccctggggagccctggagtcttcttggtacccaaagtcaccccaaatttggagccttgggttgctacagatgaaggacccactgtgaatcccatggattccacagtcacgccggcccccagtgatgctagtggaatttgggaacctggatcccaggtgtttgaagaagccgaaagcaccaccttgagccctcaggtggccctggatacaagcattgtgacgcccctcacgaccctggagcagggggacaaggttggagttccagccatgtctacactgggctcctcaagctcccaaccccacccagagccagaggatcaggtggagacccagggaacatcaggagcttcagtgcctccgcatcagagcagtcccctagggaaaccggctgttcctcctgggacaccgactgcagccagtgtgggcgagtctgcctcagtttcctcaggggagcctacggtaccgtgggacccctccagcaccctgctgcctgtcaccctgggcatagaggacttcgaactggaggtcctggcagggagcccgggtgtagagagcttctgggaggaggtggcaagtggagaggagccagccctgccagggacccctatgaatgcaggtgcggaggaggtgcactcagatccctgtgagaacaacccttgtcttcatggagggacatgtaatgccaatggcaccatgtatggctgtagctgtgatcagggcttcgccggggagaactgtgagattgacattgatgactgcctctgcagcccctgtgagaatggaggcacctgtattgatgaggtcaatggctttgtctgcctttgcctccccagctatgggggcagcttttgtgagaaagacaccgagggctgtgaccgcggctggcataagttccagggccactgttaccgctattttgcccaccggagggcatgggaagatgccgagaaggactgccgccgccgctccggccacctgaccagcgtccactcaccggaggaacacagcttcattaatagctttgggcatgaaaacacgtggatcggcctgaacgacaggatcgtggagagagatttccagtggacggacaacaccgggctgcaatttgagaactggcgagagaaccagccggacaatttcttcgcgggtggcgaggactgtgtggtgatggtggcgcatgaaagcgggcgctggaacgatgtcccctgcaactacaacctaccctatgtctgcaagaagggcacagtgctctgtggtccccctccggcagtggagaatgcctcactcatcggtgcccgcaaggccaagtacaatgtccatgccactgtaaggtaccagtgcaatgaaggatttgcccagcaccatgtggccaccattcgatgccggagcaatggcaagtgggacaggccccaaattgtctgcaccaaacccagacgttcacatcggatgcggcgacaccaccaccaccaccaacaccaccaccagcatcaccaccacaaatcccgcaaggagcgcagaaaacacaagaaacacccaacggaggactgggagaaggacgaagggaatttctgctgaagaaccagaaaaaagaaagcacaacacctttcccatgcctcctctggagccttcgcctggggagacagaacccagagagaaacaagagagtccagaagtccctgaaccccaaaccacatcccccacacacataatcctttgtacaaagctcctcttttccctttttttacatacacaagatcctcttggcaggtggagccaggtgtctgaaaagttcattctcgtctggctgaactctgggagtgtgtcccagctgagggaagcacaagtagcaaagctcattggtctggtctcttgtttgccaggctgattgaagcaggccttgatgagggtgcatgagtgtatgtttgcattcacatgaaggaattgcttttcacaccagaaattcagacttagtcaatgttggctgaattcctaaatccaggaagaagcctggacgtagggtcattagctttgggaatagaaggctacacagaagcacactgtttttgaacttgacaacagctctccctttaccctggacttcagcccaagttccgtctttggtcttggtggataaacacacagtgtggagatcccacgtactgcattttagggatgtttttaggacaacctccctccatgccttcagagttaggagtgagaatgatcaaagcaatatgtaggtgatggagggagagtgtattgctaacccttccaggtctagtccagcgctgagatttggtggttctgcatgtgtgatgaatctctttcacacaaatagacgagaggatatttagggctagatgagcccagatttcttccccctccatctctcagggagacaaagaacctccttcctggaccaaggaggtgctgccaagttttctaaagtgggcggtttgtcttttgatctttcccttttggatgtgcgtgtgtgtctgcgtgtgccatgtgcgtggcacgcatatgagtgtgtgtgcgtgtgaacggctttgggtcctgctggttttgctgtgagctgcagtgttctgtgggtctgtggtatctgacactgtggacattaatgtacttcttggacattttaataaattttttaacagttcaa

SEQ ID NO: 92039 - DNA, 4728 bp, Homo sapiens
gatgggggccccgtttgtctgggccttgggccttttgatgctgcagatgctgctctttgtggctggggaacagggcacacaggatatcaccgatgccagcgaaagggggctccacatgcagaagctggggtctgggtcagtgcaggctgcgctggcggagctggtggccctgccctgtctctttaccctgcagccacggccaagcgcagcccgagatgcccctcggataaagtggaccaaggtgcggactgcgtcgggccagcgacaggacttgcccatcctggtggccaaggacaatgtcgtgagggtggccaaaagctggcagggacgagtgtcactgccttcctacccccggcgccgagccaacgccacgctacttctggggccactgagggccagtgactctgggctgtaccgctgccaggtggtgaggggcatcgaggatgagcaggacctggtgcccttggaggtgacaggtgttgtgttccactaccgatcagcccgggaccgctatgcactgaccttcgctgaggcccaggaggcctgccgtctcagctcagccatcattgcagcccctcggcatctacaggctgcctttgaggatggctttgacaactgtgatgctggctggctctctgaccgcactgttcggtatcctatcacccagtcccgtcctggttgctatggcgaccgtagcagccttccaggggttcggagctatgggaggcgcaacccacaggaactctacgatgtgtattgctttgcccgggagctggggggcgaggtcttctacgtgggcccggcccgccgcctgacactggccggcgcgcgtgcacagtgccgccgccagggtgccgcgctggcctcggtgggacagctgcacctggcctggcatgagggcctggaccagtgcgacccgggctggctggccgacggcagcgtgcgctacccgatccagacgccgcgccggcgctgcgggggcccagccccgggcgtgcgcaccgtctaccgcttcgctaaccggaccggcttcccctcacccgccgagcgcttcgacgcctactgcttccgagctcatcaccccacgtcacaacatggagacctagagaccccatcctctggggatgagggggagattctgtcagcagaggggcccccagttagagaactggagcccaccctggaggaggaagaggtggtcacccctgacttccaggagcctctggtgtccagtggggaagaagaaaccctgattttggaggagaagcaggagtctcaacagaccctcagccctacccctggggaccccatgctggcctcatggcccactggggaagtgtggctaagcacggtggcccccagccctagcgacatgggggcaggcactgcagcaagttcacacacggaggtggccccaactgaccctatgcctaggagaagggggcgcttcaaagggttgaatgggcgctacttccagcagcaggaaccggagccggggctgcaaggggggatggaggccagcgcccagccccccacctcagaggctgcagtgaaccaaatggagcctccgttggccatggcagtcacagagatgttgggcagtggccagagccggagcccctgggctgatctgaccaatgaggtggatatgcctggagctggttctgctggtggcaagagctccccagagccctggctgtggccccctaccatggtcccacccagcatctcaggccacagcagggcccctgtcctggagctagagaaagccgagggccccagtgccaggccagccaccccagacctgttttggtcccccttggaggccactgtctcagctcccagccctgccccctgggaggcattccctgtggccacctccccagatctccctatgatggccatgctgcgtggtcccaaagagtggatgctaccacaccccacccccatctccaccgaggccaatagagttgaggcacatggtgaggccaccgccacggctccaccctcccctgctgcagagaccaaggtgtattccctgcctctctctttgaccccaacaggacagggtggagaggccatgcccacaacacctgagtcccccagggcagacttcagagaaactggggagaccagccctgctcaggtcaacaaagctgagcactccagctccagcccatggccttctgtaaacaggaatgtggctgtaggttttgtccccactgagactgccactgagccaacgggcctcaggggtatcccggggtctgagtctggggtcttcgacacagcagaaagccccacttctggcttgcaggccactgtagatgaggtgcaggacccctggccctcagtgtacagcaaagggctggatgcaagttccccatctgcccccctggggagccctggagtcttcttggtacccaaagtcaccccaaatttggagccttgggttgctacagatgaaggacccactgtgaatcccatggattccacagtcacgccggcccccagtgatgctagtggaatttgggaacctggatcccaggtgtttgaagaagccgaaagcaccaccttgagccctcaggtggccctggatacaagcattgtgacgcccctcacgaccctggagcagggggacaaggttggagttccagccatgtctacactgggctcctcaagctcccaaccccacccagagccagaggatcaggtggagacccagggaacatcaggagcttcagtgcctccgcatcagagcagtcccctagggaaaccggctgttcctcctgggacaccgactgcagccagtgtgggcgagtctgcctcagtttcctcaggggagcctacggtaccgtgggacccctccagcaccctgctgcctgtcaccctgggcatagaggacttcgaactggaggtcctggcagggagcccgggtgtagagagcttctgggaggaggtggcaagtggagaggagccagccctgccagggacccctatgaatgcaggtgcggaggaggtgcactcagatccctgtgagaacaacccttgtcttcatggagggacatgtaatgccaatggcaccatgtatggctgtagctgtgatcagggcttcgccggggagaactgtgagattgacattgatgactgcctctgcagcccctgtgagaatggaggcacctgtattgatgaggtcaatggctttgtctgcctttgcctccccagctatgggggcagcttttgtgagaaagacaccgagggctgtgaccgcggctggcataagttccagggccactgttaccgctattttgcccaccggagggcatgggaagatgccgagaaggactgccgccgccgctccggccacctgaccagcgtccactcaccggaggaacacagcttcattaatagctttgggcatgaaaacacgtggatcggcctgaacgacaggatcgtggagagagatttccagtggacggacaacaccgggctgcaatttgagaactggcgagagaaccagccggacaatttcttcgcgggtggcgaggactgtgtggtgatggtggcgcatgaaagcgggcgctggaacgatgtcccctgcaactacaacctaccctatgtctgcaagaagggcacagtgctctgtggtccccctccggcagtggagaatgcctcactcatcggtgcccgcaaggccaagtacaatgtccatgccactgtaaggtaccagtgcaatgaaggatttgcccagcaccatgtggccaccattcgatgccggagcaatggcaagtgggacaggccccaaattgtctgcaccaaacccagacgttcacatcggatgcggcgacaccaccaccaccaccaacaccaccaccagcatcaccaccacaaatcccgcaaggagcgcagaaaacacaagaaacacccaacggaggactgggagaaggacgaagggaatttctgctgaagaaccagaaaaaagaaagcacaacacctttcccatgcctcctctggagccttcgcctggggagacagaacccagagagaaacaagagagtccagaagtccctgaaccccaaaccacatcccccacacacataatcctttgtacaaagctcctcttttccctttttttacatacacaagatcctcttggcaggtgaaaaaaaaaaaaaaaaaaaaaaaaaaaaaaaaaaaaaaaaaaaaaaaaaggggggggggccaaaaaaatccccccggggggccccaatagcgcgcgcacccccgcgcgtttttgtggccaacacaagggggcccccactaagagagaggagagcgccgtttattattacacgacgcgcgaagagcacgagcgggccgcggcggttataaccaaggcgcgcagagcaagggggacaaacaccgctgcaaaccggggggaaaccctttgggagagaagagagaacccccttaatctcggcggggcggggagaggccccaaatatggtgtggcaaacacaccctcccctctaacaggcagagtatttatgaagggcgctctctagagaggggcagcaatatattaaaaagattgttgaagagggggtgtacataaagggggtcgttgtaacaaccacatagcacggagataatattgtcgcttgggcgtggtgtagcaaaaatttttgttggcactatagaggggagtatattattatttgtgtggaaaaattttttacaaccgggggg

SEQ ID NO: 92040 - DNA, 3958 bp, Homo sapiens
gatgggggccccgtttgtctgggccttgggccttttgatgctgcagatgctgctctttgtggctggggaacagggcacacaggatatcaccgatgccagcgaaagggggctccacatgcagaagctggggtctgggtcagtgcaggctgcgctggcggagctggtggccctgccctgtctctttaccctgcagccacggccaagcgcagcccgagatgcccctcggataaagtggaccaaggtgcggactgcgtcgggccagcgacaggacttgcccatcctggtggccaaggacaatgtcgtgagggtggccaaaagctggcagggacgagtgtcactgccttcctacccccggcgccgagccaacgccacgctacttctggggccactgagggccagtgactctgggctgtaccgctgccaggtggtgaggggcatcgaggatgagcaggacctggtgcccttggaggtgacaggtgttgtgttccactaccgatcagcccgggaccgctatgcactgaccttcgctgaggcccaggaggcctgccgtctcagctcagccatcattgcagcccctcggcatctacaggctgcctttgaggatggctttgacaactgtgatgctggctggctctctgaccgcactgttcggtatcctatcacccagtcccgtcctggttgctatggcgaccgtagcagccttccaggggttcggagctatgggaggcgcaacccacaggaactctacgatgtgtattgctttgcccgggagctggggggcgaggtcttctacgtgggcccggcccgccgcctgacactggccggcgcgcgtgcacagtgccgccgccagggtgccgcgctggcctcggtgggacagctgcacctggcctggcatgagggcctggaccagtgcgacccgggctggctggccgacggcagcgtgcgctacccgatccagacgccgcgccggcgctgcgggggcccagccccgggcgtgcgcaccgtctaccgcttcgctaaccggaccggcttcccctcacccgccgagcgcttcgacgcctactgcttccgagctcatcaccccacgtcacaacatggagacctagagaccccatcctctggggatgagggggagattctgtcagcagaggggcccccagttagagaactggagcccaccctggaggaggaagaggtggtcacccctgacttccaggagcctctggtgtccagtggggaagaagaaaccctgattttggaggagaagcaggagtctcaacagaccctcagccctacccctggggaccccatgctggcctcatggcccactggggaagtgtggctaagcacggtggcccccagccctagcgacatgggggcaggcactgcagcaagttcacacacggaggtggccccaactgaccctatgcctaggagaagggggcgcttcaaagggttgaatgggcgctacttccagcagcaggaaccggagccggggctgcaaggggggatggaggccagcgcccagccccccacctcagaggctgcagtgaaccaaatggagcctccgttggccatggcagtcacagagatgttgggcagtggccagagccggagcccctgggctgatctgaccaatgaggtggatatgcctggagctggttctgctggtggcaagagctccccagagccctggctgtggccccctaccatggtcccacccagcatctcaggccacagcagggcccctgtcctggagctagagaaagccgagggccccagtgccaggccagccaccccagacctgttttggtcccccttggaggccactgtctcagctcccagccctgccccctgggaggcattccctgtggccacctccccagatctccctatgatggccatgctgcgtggtcccaaagagtggatgctaccacaccccacccccatctccaccgaggccaatagagttgaggcacatggtgaggccaccgccacggctccaccctcccctgctgcagagaccaaggtgtattccctgcctctctctttgaccccaacaggacagggtggagaggccatgcccacaacacctgagtcccccagggcagacttcagagaaactggggagaccagccctgctcaggtcaacaaagctgagcactccagctccagcccatggccttctgtaaacaggaatgtggctgtaggttttgtccccactgagactgccactgagccaacgggcctcaggggtatcccggggtctgagtctggggtcttcgacacagcagaaagccccacttctggcttgcaggccactgtagatgaggtgcaggacccctggccctcagtgtacagcaaagggctggatgcaagttccccatctgcccccctggggagccctggagtcttcttggtacccaaagtcaccccaaatttggagccttgggttgctacagatgaaggacccactgtgaatcccatggattccacagtcacgccggcccccagtgatgctagtggaatttgggaacctggatcccaggtgtttgaagaagccgaaagcaccaccttgagccctcaggtggccctggatacaagcattgtgacgcccctcacgaccctggagcagggggacaaggttggagttccagccatgtctacactgggctcctcaagctcccaaccccacccagagccagaggatcaggtggagacccagggaacatcaggagcttcagtgcctccgcatcagagcagtcccctagggaaaccggctgttcctcctgggacaccgactgcagccagtgtgggcgagtctgcctcagtttcctcaggggagcctacggtaccgtgggacccctccagcaccctgctgcctgtcaccctgggcatagaggacttcgaactggaggtcctggcagggagcccgggtgtagagagcttctgggaggaggtggcaagtggagaggagccagccctgccagggacccctatgaatgcaggtgcggaggaggtgcactcagatccctgtgagaacaacccttgtcttcatggagggacatgtaatgccaatggcaccatgtatggctgtagctgtgatcagggcttcgccggggagaactgtgagattgacattgatgactgcctctgcagcccctgtgagaatggaggcacctgtattgatgaggtcaatggctttgtctgcctttgcctccccagctatgggggcagcttttgtgagaaagacaccgagggctgtgaccgcggctggcataagttccagggccactgttaccgctattttgcccaccggagggcatgggaagatgccgagaaggactgccgccgccgctccggccacctgaccagcgtccactcaccggaggaacacagcttcattaatagctttgggcatgaaaacacgtggatcggcctgaacgacaggatcgtggagagagatttccagtggacggacaacaccgggctgcaatttgagaactggcgagagaaccagccggacaatttcttcgcgggtggcgaggactgtgtggtgatggtggcgcatgaaagcgggcgctggaacgatgtcccctgcaactacaacctaccctatgtctgcaagaagggcacagtgctctgtggtccccctccggcagtggagaatgcctcactcatcggtgcccgcaaggccaagtacaatgtccatgccactgtaaggtaccagtgcaatgaaggatttgcccagcaccatgtggccaccattcgatgccggagcaatggcaagtgggacaggccccaaattgtctgcaccaaacgtaagtagcttctcccagagatctcaacataggtttttggtatttctagtttccaagtaagacatcctatttctccacacattgatctggcttaatgtctgcctgataatacagccttgcagataagtgagaactta

SEQ ID NO: 92041 - DNA, 314 bp, Homo sapiens
ctctccacctcaacctccagcccacctccaggctggggaaggggctgagtcttcccctcccatacatacctcacccggcccccagcccacagagaggctgagggaggggctctgggtcctcctccatccctgtacctgcttcttccctcttcatttccaccttctagatctttccccccacccagcccacctccaggctggggaaggtgaggaattctttcctcccacaccctaccccacctcacctgcagcctgtgccctgggccaggagaggcatgggtgaacacccagacccacaacccccgaccctgcag

SEQ ID NO: 92042 - DNA, 6289 bp, Homo sapiens
gatgggggccccgtttgtctgggccttgggccttttgatgctgcagatgctgctctttgtggctggggaacagggcacacaggatatcaccgatgccagcgaaagggggctccacatgcagaagctggggtctgggtcagtgcaggctgcgctggcggagctggtggccctgccctgtctctttaccctgcagccacggccaagcgcagcccgagatgcccctcggataaagtggaccaaggtgcggactgcgtcgggccagcgacaggacttgcccatcctggtggccaaggacaatgtcgtgagggtggccaaaagctggcagggacgagtgtcactgccttcctacccccggcgccgagccaacgccacgctacttctggggccactgagggccagtgactctgggctgtaccgctgccaggtggtgaggggcatcgaggatgagcaggacctggtgcccttggaggtgacaggtgttgtgttccactaccgatcagcccgggaccgctatgcactgaccttcgctgaggcccaggaggcctgccgtctcagctcagccatcattgcagcccctcggcatctacaggctgcctttgaggatggctttgacaactgtgatgctggctggctctctgaccgcactgttcggtatcctatcacccagtcccgtcctggttgctatggcgaccgtagcagccttccaggggttcggagctatgggaggcgcaacccacaggaactctacgatgtgtattgctttgcccgggagctggggggcgaggtcttctacgtgggcccggcccgccgcctgacactggccggcgcgcgtgcacagtgccgccgccagggtgccgcgctggcctcggtgggacagctgcacctggcctggcatgagggcctggaccagtgcgacccgggctggctggccgacggcagcgtgcgctacccgatccagacgccgcgccggcgctgcgggggcccagccccgggcgtgcgcaccgtctaccgcttcgctaaccggaccggcttcccctcacccgccgagcgcttcgacgcctactgcttccgagctcatcaccccacgtcacaacatggagacctagagaccccatcctctggggatgagggggagattctgtcagcagaggggcccccagttagagaactggagcccaccctggaggaggaagaggtggtcacccctgacttccaggagcctctggtgtccagtggggaagaagaaaccctgattttggaggagaagcaggagtctcaacagaccctcagccctacccctggggaccccatgctggcctcatggcccactggggaagtgtggctaagcacggtggcccccagccctagcgacatgggggcaggcactgcagcaagttcacacacggaggtggccccaactgaccctatgcctaggagaagggggcgcttcaaagggttgaatgggcgctacttccagcagcaggaaccggagccggggctgcaaggggggatggaggccagcgcccagccccccacctcagaggctgcagtgaaccaaatggagcctccgttggccatggcagtcacagagatgttgggcagtggccagagccggagcccctgggctgatctgaccaatgaggtggatatgcctggagctggttctgctggtggcaagagctccccagagccctggctgtggccccctaccatggtcccacccagcatctcaggccacagcagggcccctgtcctggagctagagaaagccgagggccccagtgccaggccagccaccccagacctgttttggtcccccttggaggccactgtctcagctcccagccctgccccctgggaggcattccctgtggccacctccccagatctccctatgatggccatgctgcgtggtcccaaagagtggatgctaccacaccccacccccatctccaccgaggccaatagagttgaggcacatggtgaggccaccgccacggctccaccctcccctgctgcagagaccaaggtgtattccctgcctctctctttgaccccaacaggacagggtggagaggccatgcccacaacacctgagtcccccagggcagacttcagagaaactggggagaccagccctgctcaggtcaacaaagctgagcactccagctccagcccatggccttctgtaaacaggaatgtggctgtaggttttgtccccactgagactgccactgagccaacgggcctcaggggtatcccggggtctgagtctggggtcttcgacacagcagaaagccccacttctggcttgcaggccactgtagatgaggtgcaggacccctggccctcagtgtacagcaaagggctggatgcaagttccccatctgcccccctggggagccctggagtcttcttggtacccaaagtcaccccaaatttggagccttgggttgctacagatgaaggacccactgtgaatcccatggattccacagtcacgccggcccccagtgatgctagtggaatttgggaacctggatcccaggtgtttgaagaagccgaaagcaccaccttgagccctcaggtggccctggatacaagcattgtgacgcccctcacgaccctggagcagggggacaaggttggagttccagccatgtctacactgggctcctcaagctcccaaccccacccagagccagaggatcaggtggagacccagggaacatcaggagcttcagtgcctccgcatcagagcagtcccctagggaaaccggctgttcctcctgggacaccgactgcagccagtgtgggcgagtctgcctcagtttcctcaggggagcctacggtaccgtgggacccctccagcaccctgctgcctgtcaccctgggcatagaggacttcgaactggaggtcctggcagggagcccgggtgtagagagcttctgggaggaggtggcaagtggagaggagccagccctgccagggacccctatgaatgcaggtgcggaggaggtgcactcagatccctgtgagaacaacccttgtcttcatggagggacatgtaatgccaatggcaccatgtatggctgtagctgtgatcagggcttcgccggggagaactgtgagattgacattgatgactgcctctgcagcccctgtgagaatggaggcacctgtattgatgaggtcaatggctttgtctgcctttgcctccccagctatgggggcagcttttgtgagaaagacaccgagggctgtgaccgcggctggcataagttccagggccactgttaccgctattttgcccaccggagggcatgggaagatgccgagaaggactgccgccgccgctccggccacctgaccagcgtccactcaccggaggaacacagcttcattaatagctttgggcatgaaaacacgtggatcggcctgaacgacaggatcgtggagagagatttccagtggacggacaacaccgggctgcaatttgagaactggcgagagaaccagccggacaatttcttcgcgggtggcgaggactgtgtggtgatggtggcgcatgaaagcgggcgctggaacgatgtcccctgcaactacaacctaccctatgtctgcaagaagggcacagtgctctgtggtccccctccggcagtggagaatgcctcactcatcggtgcccgcaaggccaagtacaatgtccatgccactgtaaggtaccagtgcaatgaaggatttgcccagcaccatgtggccaccattcgatgccggagcaatggcaagtgggacaggccccaaattgtctgcaccaaacccagacgttcacatcggatgcggcgacaccaccaccaccaccaacaccaccaccagcatcaccaccacaaatcccgcaaggagcgcagaaaacacaagaaacacccaacggaggactgggagaaggacgaagggaatttctgctgaagaaccagaaaaaagaaagcacaacacctttcccatgcctcctctggagccttcgcctggggagacagaacccagagagaaacaagagagtccagaagtccctgaaccccaaaccacatcccccacacacataatcctttgtacaaagctcctcttttccctttttttacatacacaagatcctcttggcaggtggagccaggtgtctgaaaagttcattctcgtctggctgaactctgggagtgtgtcccagctgagggaagcacaagtagcaaagctcattggtctggtctcttgtttgccaggctgattgaagcaggccttgatgagggtgcatgagtgtatgtttgcattcacatgaaggaattgcttttcacaccagaaattcagacttagtcaatgttggctgaattcctaaatccaggaagaagcctggacgtagggtcattagctttgggaatagaaggctacacagaagcacactgtttttgaacttgacaacagctctccctttaccctggacttcagcccaagttccgtctttggtcttggtggataaacacacagtgtggagatcccacgtactgcattttagggatgtttttaggacaacctccctccatgccttcagagttaggagtgagaatgatcaaagcaatatgtaggtgatggagggagagtgtattgctaacccttccaggtctagtccagcgctgagatttggtggttctgcatgtgtgatgaatctctttcacacaaatagacgagaggatatttagggctagatgagcccagatttcttccccctccatctctcagggagacaaagaacctccttcctggaccaaggaggtgctgccaagttttctagcccagtgcacatacccagtccttaagcagacattggtagtgcccctgccctgggtcccactcctgccccaccccacccttgtccctggccattgcctggtggtctagaaacacttaaaacttgaagtagtgacacctacctgcggtcatattgtagagagatgctcagtgttaaaactgaaacacacaaacacacacacacacacatttttctcttgtagattttaattttttaagtgggaaagaactcaccttgccttcctcccccaaatgtgcaacctgtaaaaggtctctccacaccaggggccaggatccagttccctcatctctggcaggaaagatccacagcttttcctccatgtctgttactcactttcagcagtccgggtaaaatctgtggatcagggttaaaaaagcaccgtggagaatggccctcttcaggaaagaaaaataagcaaatgaatggtccacctaggggttcagtaaagaaagaaatgtgttaactgagcctgaatcccttctgggaagtaataatgaccattgacaactaagaagtagacaccatgctaaagacttacatacaatctccttgaatcttctcaatagcccattgacttagaaactgttactttcccattttacacacagtgaaactgaggctcagatataaaggaaaggtactggcttgaagtcacaaccacgacaggagtaaggatttggaataaggatttggtcctgttttctggaccaaatccttactctggctctgcttacactttctctccatcaccaaatccttactccaaatccagaagtcagagccaactcccatcttggttctgacccaaatcctgctctggactctggagaggagattgaaatataattgcaccctcatacacatttaggaaatggttaagaagtgtaaactgaacccttatccttgtcttcaatcttcctccctgtagacatctatcttattatggttattattcagaaaacccagggatacaggtttgtcttcttactttgataactcttcttagtttaaaataataataataacacatctttggtcatctatgtcacacaaaaattttcctttgtttgcggggggctggggatgcagtgttttttggggggtcttggtttatgctccctgcccttgagcccctcagccgtttgccctgcccccacctcggctccatggtgggagggggctctggtcttttctaaagtgggcggtttgtcttttgatctttcccttttggatgtgcgtgtgtgtctgcgtgtgccatgtgcgtggcacgcatatgagtgtgtgtgcgtgtgaacggctttgggtcctgctggttttgctgtgagctgcagtgttctgtgggtctgtggtatctgacactgtggacattaatgtacttcttggacattttaataaattttttaacagttcaa

SEQ ID NO: 92043 - DNA, 6106 bp, Homo sapiens
gatgggggccccgtttgtctgggccttgggccttttgatgctgcagatgctgctctttgtggctggggaacagggcacacaggatatcaccgatgccagcgaaagggggctccacatgcagaagctggggtctgggtcagtgcaggctgcgctggcggagctggtggccctgccctgtctctttaccctgcagccacggccaagcgcagcccgagatgcccctcggataaagtggaccaaggtgcggactgcgtcgggccagcgacaggacttgcccatcctggtggccaaggacaatgtcgtgagggtggccaaaagctggcagggacgagtgtcactgccttcctacccccggcgccgagccaacgccacgctacttctggggccactgagggccagtgactctgggctgtaccgctgccaggtggtgaggggcatcgaggatgagcaggacctggtgcccttggaggtgacaggtgttgtgttccactaccgatcagcccgggaccgctatgcactgaccttcgctgaggcccaggaggcctgccgtctcagctcagccatcattgcagcccctcggcatctacaggctgcctttgaggatggctttgacaactgtgatgctggctggctctctgaccgcactgttcggtatcctatcacccagtcccgtcctggttgctatggcgaccgtagcagccttccaggggttcggagctatgggaggcgcaacccacaggaactctacgatgtgtattgctttgcccgggagctggggggcgaggtcttctacgtgggcccggcccgccgcctgacactggccggcgcgcgtgcacagtgccgccgccagggtgccgcgctggcctcggtgggacagctgcacctggcctggcatgagggcctggaccagtgcgacccgggctggctggccgacggcagcgtgcgctacccgatccagacgccgcgccggcgctgcgggggcccagccccgggcgtgcgcaccgtctaccgcttcgctaaccggaccggcttcccctcacccgccgagcgcttcgacgcctactgcttccgagctcatcaccccacgtcacaacatggagacctagagaccccatcctctggggatgagggggagattctgtcagcagaggggcccccagttagagaactggagcccaccctggaggaggaagaggtggtcacccctgacttccaggagcctctggtgtccagtggggaagaagaaaccctgattttggaggagaagcaggagtctcaacagaccctcagccctacccctggggaccccatgctggcctcatggcccactggggaagtgtggctaagcacggtggcccccagccctagcgacatgggggcaggcactgcagcaagttcacacacggaggtggccccaactgaccctatgcctaggagaagggggcgcttcaaagggttgaatgggcgctacttccagcagcaggaaccggagccggggctgcaaggggggatggaggccagcgcccagccccccacctcagaggctgcagtgaaccaaatggagcctccgttggccatggcagtcacagagatgttgggcagtggccagagccggagcccctgggctgatctgaccaatgaggtggatatgcctggagctggttctgctggtggcaagagctccccagagccctggctgtggccccctaccatggtcccacccagcatctcaggccacagcagggcccctgtcctggagctagagaaagccgagggccccagtgccaggccagccaccccagacctgttttggtcccccttggaggccactgtctcagctcccagccctgccccctgggaggcattccctgtggccacctccccagatctccctatgatggccatgctgcgtggtcccaaagagtggatgctaccacaccccacccccatctccaccgaggccaatagagttgaggcacatggtgaggccaccgccacggctccaccctcccctgctgcagagaccaaggtgtattccctgcctctctctttgaccccaacaggacagggtggagaggccatgcccacaacacctgagtcccccagggcagacttcagagaaactggggagaccagccctgctcaggtcaacaaagctgagcactccagctccagcccatggccttctgtaaacaggaatgtggctgtaggttttgtccccactgagactgccactgagccaacgggcctcaggggtatcccggggtctgagtctggggtcttcgacacagcagaaagccccacttctggcttgcaggccactgtagatgaggtgcaggacccctggccctcagtgtacagcaaagggctggatgcaagttccccatctgcccccctggggagccctggagtcttcttggtacccaaagtcaccccaaatttggagccttgggttgctacagatgaaggacccactgtgaatcccatggattccacagtcacgccggcccccagtgatgctagtggaatttgggaacctggatcccaggtgtttgaagaagccgaaagcaccaccttgagccctcaggtggccctggatacaagcattgtgacgcccctcacgaccctggagcagggggacaaggttggagttccagccatgtctacactgggctcctcaagctcccaaccccacccagagccagaggatcaggtggagacccagggaacatcaggagcttcagtgcctccgcatcagagcagtcccctagggaaaccggctgttcctcctgggacaccgactgcagccagtgtgggcgagtctgcctcagtttcctcaggggagcctacggtaccgtgggacccctccagcaccctgctgcctgtcaccctgggcatagaggacttcgaactggaggtcctggcagggagcccgggtgtagagagcttctgggaggaggtggcaagtggagaggagccagccctgccagggacccctatgaatgcaggtgcggaggaggtgcactcagatccctgtgagaacaacccttgtcttcatggagggacatgtaatgccaatggcaccatgtatggctgtagctgtgatcagggcttcgccggggagaactgtgagattgacattgatgactgcctctgcagcccctgtgagaatggaggcacctgtattgatgaggtcaatggctttgtctgcctttgcctccccagctatgggggcagcttttgtgagaaagacaccgagggctgtgaccgcggctggcataagttccagggccactgttaccgctattttgcccaccggagggcatgggaagatgccgagaaggactgccgccgccgctccggccacctgaccagcgtccactcaccggaggaacacagcttcattaatagctttgggcatgaaaacacgtggatcggcctgaacgacaggatcgtggagagagatttccagtggacggacaacaccgggctgcaatttgagaactggcgagagaaccagccggacaatttcttcgcgggtggcgaggactgtgtggtgatggtggcgcatgaaagcgggcgctggaacgatgtcccctgcaactacaacctaccctatgtctgcaagaagggcacagccagacgttcacatcggatgcggcgacaccaccaccaccaccaacaccaccaccagcatcaccaccacaaatcccgcaaggagcgcagaaaacacaagaaacacccaacggaggactgggagaaggacgaagggaatttctgctgaagaaccagaaaaaagaaagcacaacacctttcccatgcctcctctggagccttcgcctggggagacagaacccagagagaaacaagagagtccagaagtccctgaaccccaaaccacatcccccacacacataatcctttgtacaaagctcctcttttccctttttttacatacacaagatcctcttggcaggtggagccaggtgtctgaaaagttcattctcgtctggctgaactctgggagtgtgtcccagctgagggaagcacaagtagcaaagctcattggtctggtctcttgtttgccaggctgattgaagcaggccttgatgagggtgcatgagtgtatgtttgcattcacatgaaggaattgcttttcacaccagaaattcagacttagtcaatgttggctgaattcctaaatccaggaagaagcctggacgtagggtcattagctttgggaatagaaggctacacagaagcacactgtttttgaacttgacaacagctctccctttaccctggacttcagcccaagttccgtctttggtcttggtggataaacacacagtgtggagatcccacgtactgcattttagggatgtttttaggacaacctccctccatgccttcagagttaggagtgagaatgatcaaagcaatatgtaggtgatggagggagagtgtattgctaacccttccaggtctagtccagcgctgagatttggtggttctgcatgtgtgatgaatctctttcacacaaatagacgagaggatatttagggctagatgagcccagatttcttccccctccatctctcagggagacaaagaacctccttcctggaccaaggaggtgctgccaagttttctagcccagtgcacatacccagtccttaagcagacattggtagtgcccctgccctgggtcccactcctgccccaccccacccttgtccctggccattgcctggtggtctagaaacacttaaaacttgaagtagtgacacctacctgcggtcatattgtagagagatgctcagtgttaaaactgaaacacacaaacacacacacacacacatttttctcttgtagattttaattttttaagtgggaaagaactcaccttgccttcctcccccaaatgtgcaacctgtaaaaggtctctccacaccaggggccaggatccagttccctcatctctggcaggaaagatccacagcttttcctccatgtctgttactcactttcagcagtccgggtaaaatctgtggatcagggttaaaaaagcaccgtggagaatggccctcttcaggaaagaaaaataagcaaatgaatggtccacctaggggttcagtaaagaaagaaatgtgttaactgagcctgaatcccttctgggaagtaataatgaccattgacaactaagaagtagacaccatgctaaagacttacatacaatctccttgaatcttctcaatagcccattgacttagaaactgttactttcccattttacacacagtgaaactgaggctcagatataaaggaaaggtactggcttgaagtcacaaccacgacaggagtaaggatttggaataaggatttggtcctgttttctggaccaaatccttactctggctctgcttacactttctctccatcaccaaatccttactccaaatccagaagtcagagccaactcccatcttggttctgacccaaatcctgctctggactctggagaggagattgaaatataattgcaccctcatacacatttaggaaatggttaagaagtgtaaactgaacccttatccttgtcttcaatcttcctccctgtagacatctatcttattatggttattattcagaaaacccagggatacaggtttgtcttcttactttgataactcttcttagtttaaaataataataataacacatctttggtcatctatgtcacacaaaaattttcctttgtttgcggggggctggggatgcagtgttttttggggggtcttggtttatgctccctgcccttgagcccctcagccgtttgccctgcccccacctcggctccatggtgggagggggctctggtcttttctaaagtgggcggtttgtcttttgatctttcccttttggatgtgcgtgtgtgtctgcgtgtgccatgtgcgtggcacgcatatgagtgtgtgtgcgtgtgaacggctttgggtcctgctggttttgctgtgagctgcagtgttctgtgggtctgtggtatctgacactgtggacattaatgtacttcttggacattttaataaattttttaacagttcaa

SEQ ID NO: 92044 - DNA, 2935 bp, Homo sapiens
cacgcgtcgggaaaagtccagctcggccacgcgtccgcacacgcttcattaactatgctttgggcatgaaaacacgtggatcggcctgaacgacaggatcgtggagagagatttccagtggacggacaacaccgggctgcaatttgagaactggcgagagaaccagccggacaatttcttcgcgggtggcgaggactgtgtggtgatggtggcgcatgaaagcgggcgctggaacgatgtcccctgcaactacaacctaccctatgtctgcaagaagggcacagtgctctgtggtccccctccggcagtggagaatgcctcactcatcggtgcccgcaaggccaagtacaatgtccatgccactgtaaggtaccagtgcaatgaaggatttgcccagcaccatgtggccaccattcgatgccggagcaatggcaagtgggacaggccccaaattgtctgcaccaaacccagacgttcacatcggatgcggcgacaccaccaccaccaccaacaccaccaccagcatcaccaccacaaatcccgcaaggagcgcagaaaacacaagaaacacccaacggaggactgggagaaggacgaagggaatttctgctgaagaaccagaaaaaagaaagcacaacacctttcccatgcctcctctggagccttcgcctggggagacagaacccagagagaaacaagagagtccagaagtccctgaaccccaaaccacatcccccacacacataatcctttgtacaaagctcctcttttccctttttttacatacacaagatcctcttggcaggtggagccaggtgtctgaaaagttcattctcgtctggctgaactctgggagtgtgtcccagctgagggaagcacaagtagcaaagctcattggtctggtctcttgtttgccaggctgattgaagcaggccttgatgagggtgcatgagtgtatgtttgcattcacatgaaggaattgcttttcacaccagaaattcagacttagtcaatgttggctgaattcctaaatccaggaagaagcctggacgtagggtcattagctttgggaatagaaggctacacagaagcacactgtttttgaacttgacaacagctctccctttaccctggacttcagcccaagttccgtctttggtcttggtggataaacacacagtgtggagatcccacgtactgcattttagggatgtttttaggacaacctccctccatgccttcagagttaggagtgagaatgatcaaagcaatatgtaggtgatggagggagagtgtattgctaacccttccaggtctagtccagcgctgagatttggtggttctgcatgtgtgatgaatctctttcacacaaatagacgagaggatatttagggctagatgagcccagatttcttccccctccatctctcagggagacaaagaacctccttcctggaccaaggaggtgctgccaagttttctagcccagtgcacatacccagtccttaagcagacattggtagtgcccctgccctgggtcccactcctgccccaccccacccttgtccctggccattgcctggtggtctagaaacacttaaaacttgaagtagtgacacctacctgcggtcatattgtagagagatgctcagtgttaaaactgaaacacacaaacacacacacacacacatttttctcttgtagattttaattttttaagtgggaaagaactcaccttgccttcctcccccaaatgtgcaacctgtaaaaggtctctccacaccaggggccaggatccagttccctcatctctggcaggaaagatccacagcttttcctccatgtctgttactcactttcagcagtccgggtaaaatctgtggatcagggttaaaaaagcaccgtggagaatggccctcttcaggaaagaaaaataagcaaatgaatggtccacctaggggttcagtaaagaaagaaatgtgttaactgagcctgaatcccttctgggaagtaataatgaccattgacaactaagaagtagacaccatgctaaagacttacatacaatctccttgaatcttctcaatagcccattgacttagaaactgttactttcccattttacacacagtgaaactgaggctcagatataaaggaaaggtactggcttgaagtcacaaccacgacaggagtaaggatttggaataaggatttggtcctgttttctggaccaaatccttactctggctctgcttacactttctctccatcaccaaatccttactccaaatccagaagtcagagccaactcccatcttggttctgacccaaatcctgctctggactctggagaggagattgaaatataattgcaccctcatacacatttaggaaatggttaagaagtgtaaactgaacccttatccttgtcttcaatcttcctccctgtagacatctatcttattatggttattattcagaaaacccagggatacaggtttgtcttcttactttgataactcttcttagtttaaaataataataataacacatctttggtcatctatgtcacacaaaaattttcctttgtttgcggggggctggggatgcagtgttttttggggggtcttggtttatgctccctgcccttgagcccctcagccgtttgccctgcccccacctcggctccatggtgggagggggctctggtcttttctaaagtgggcggtttgtcttttgatctttcccttttggatgtgcgtgtgtgtctgcgtgtgccatgtgcgtggcacgcatatgagtgtgtgtgcgtgtgaacggctttgggtcctgctggttttgctgtgagctgcagtgttctgtgggtctgtggtatctgacactgtggacattaatgtacttcttggacattttaataaattttttaacagttcaa

SEQ ID NO: 92045 - DNA, 6258 bp, Homo sapiens
gatgggggccccgtttgtctgggccttgggccttttgatgctgcagatgctgctctttgtggctggggaacagggcacacaggatatcaccgatgccagcgaaagggggctccacatgcagaagctggggtctgggtcagtgcaggctgcgctggcggagctggtggccctgccctgtctctttaccctgcagccacggccaagcgcagcccgagatgcccctcggataaagtggaccaaggtgcggactgcgtcgggccagcgacaggacttgcccatcctggtggccaaggacaatgtcgtgagggtggccaaaagctggcagggacgagtgtcactgccttcctacccccggcgccgagccaacgccacgctacttctggggccactgagggccagtgactctgggctgtaccgctgccaggtggtgaggggcatcgaggatgagcaggacctggtgcccttggaggtgacaggtgttgtgttccactaccgatcagcccgggaccgctatgcactgaccttcgctgaggcccaggaggcctgccgtctcagctcagccatcattgcagcccctcggcatctacaggctgcctttgaggatggctttgacaactgtgatgctggctggctctctgaccgcactgttcggtatcctatcacccagtcccgtcctggttgctatggcgaccgtagcagccttccaggggttcggagctatgggaggcgcaacccacaggaactctacgatgtgtattgctttgcccgggagctggggggcgaggtcttctacgtgggcccggcccgccgcctgacactggccggcgcgcgtgcacagtgccgccgccagggtgccgcgctggcctcggtgggacagctgcacctggcctggcatgagggcctggaccagtgcgacccgggctggctggccgacggcagcgtgcgctacccgatccagacgccgcgccggcgctgcgggggcccagccccgggcgtgcgcaccgtctaccgcttcgctaaccggaccggcttcccctcacccgccgagcgcttcgacgcctactgcttccgagctcatcaccccacgtcacaacatggagacctagagaccccatcctctggggatgagggggagattctgtcagcagaggggcccccagttagagaactggagcccaccctggaggaggaagaggtggtcacccctgacttccaggagcctctggtgtccagtggggaagaagaaaccctgattttggaggagaagcaggagtctcaacagaccctcagccctacccctggggaccccatgctggcctcatggcccactggggaagtgtggctaagcacggtggcccccagccctagcgacatgggggcaggcactgcagcaagttcacacacggaggtggccccaactgaccctatgcctaggagaagggggcgcttcaaagggttgaatgggcgctacttccagcagcaggaaccggagccggggctgcaaggggggatggaggccagcgcccagccccccacctcagaggctgcagtgaaccaaatggagcctccgttggccatggcagtcacagagatgttgggcagtggccagagccggagcccctgggctgatctgaccaatgaggtggatatgcctggagctggttctgctggtggcaagagctccccagagccctggctgtggccccctaccatggtcccacccagcatctcaggccacagcagggcccctgtcctggagctagagaaagccgagggccccagtgccaggccagccaccccagacctgttttggtcccccttggaggccactgtctcagctcccagccctgccccctgggaggcattccctgtggccacctccccagatctccctatgatggccatgctgcgtggtcccaaagagtggatgctaccacaccccacccccatctccaccgaggccaatagagttgaggcacatggtgaggccaccgccacggctccaccctcccctgctgcagagaccaaggtgtattccctgcctctctctttgaccccaacaggacagggtggagaggccatgcccacaacacctgagtcccccagggcagacttcagagaaactggggagaccagccctgctcaggtcaacaaagctgagcactccagctccagcccatggccttctgtaaacaggaatgtggctgtaggttttgtccccactgagactgccactgagccaacgggcctcaggggtatcccggggtctgagtctggggtcttcgacacagcagaaagccccacttctggcttgcaggccactgtagatgaggtgcaggacccctggccctcagtgtacagcaaagggctggatgcaagttccccatctgcccccctggggagccctggagtcttcttggtacccaaagtcaccccaaatttggagccttgggttgctacagatgaaggacccactgtgaatcccatggattccacagtcacgccggcccccagtgatgctagtggaatttgggaacctggatcccaggtgtttgaagaagccgaaagcaccaccttgagccctcaggtggccctggatacaagcattgtgacgcccctcacgaccctggagcagggggacaaggttggagttccagccatgtctacactgggctcctcaagctcccaaccccacccagagccagaggatcaggtggagacccagggaacatcaggagcttcagtgcctccgcatcagagcagtcccctagggaaaccggctgttcctcctgggacaccgactgcagccagtgtgggcgagtctgcctcagtttcctcaggggagcctacggtaccgtgggacccctccagcaccctgctgcctgtcaccctgggcatagaggacttcgaactggaggtcctggcagggagcccgggtgtagagagcttctgggaggaggtggcaagtggagaggagccagccctgccagggacccctatgaatgcaggtgcggaggaggtgcactcagatccctgtgagaacaacccttgtcttcatggagggacatgtaatgccaatggcaccatgtatggctgtagctgtgatcagggcttcgccggggagaactgtgagattgacattgatgactgcctctgcagcccctgtgagaatggaggcacctgtattgatgaggtcaatggctttgtctgcctttgcctccccagctatgggggcagcttttgtgagaaagacaccgagggctgtgaccgcggctggcataagttccagggccactgttaccgctattttgcccaccggagggcatgggaagatgccgagaaggactgccgccgccgctccggccacctgaccagcgtccactcaccggaggaacacagcttcattaatagctttgggcatgaaaacacgtggatcggcctgaacgacaggatcgtggagagagatttccagtggacggacaacaccgggctgcaatttgagaactggcgagagaaccagccggacaatttcttcgcgggtggcgaggactgtgtggtgatggtggcgcatgaaagcgggcgctggaacgatgtcccctgcaactacaacctaccctatgtctgcaagaagggcacagtgctctgtggtccccctccggcagtggagaatgcctcactcatcggtgcccgcaaggccaagtacaatgtccatgccactgtaaggtaccagtgcaatgaaggatttgcccagcaccatgtggccaccattcgatgccggagcaatggcaagtgggacaggccccaaattgtctgcaccaaacccagacgttcacatcggatgcggcgacaccaccaccaccaccaacaccaccaccagcatcaccaccacaaatcccgcaaggagcgcagaaaacacaagaaacacccaacggaggactgggagaaggacgaagggaatttctgctgaagaaccagaaaaaagaaagcacaacacctttcccatgcctcctctggagccttcgcctggggagacagaacccagagagaaacaagagagtccagaagtccctgaaccccaaaccacatcccccacacacataatcctttgtacaaagctcctcttttccctttttttacatacacaagatcctcttggcaggtggagccaggtgtctgaaaagttcattctcgtctggctgaactctgggagtgtgtcccagctgagggaagcacaagtagcaaagctcattggtctggtctcttgtttgccaggctgattgaagcaggccttgatgagggtgcatgagtgtatgtttgcattcacatgaaggaattgcttttcacaccagaaattcagacttagtcaatgttggctgaattcctaaatccaggaagaagcctggacgtagggtcattagctttgggaatagaaggctacacagaagcacactgtttttgaacttgacaacagctctccctttaccctggacttcagcccaagttccgtctttggtcttggtggataaacacacagtgtggagatcccacgtactgcattttagggatgtttttaggacaacctccctccatgccttcagagttaggagtgagaatgatcaaagcaatatgtaggtgatggagggagagtgtattgctaacccttccaggtctagtccagcgctgagatttggtggttctgcatgtgtgatgaatctctttcacacaaatagacgagaggatatttagggctagatgagcccagatttcttccccctccatctctcagggagacaaagaacctccttcctggaccaaggaggtgctgccaagttttctagcccagtgcacatacccagtccttaagcagacattggtagtgcccctgccctgggtcccactcctgccccaccccacccttgtccctggccattgcctggtggtctagaaacacttaaaacttgaagtagtgacacctacctgcggtcatattgtagagagatgctcagtgttaaaactgaaacacacaaacacacacacacacacatttttctcttgtagattttaattttttaagtgggaaagaactcaccttgccttcctcccccaaatgtgcaacctgtaaaaggtctctccacaccaggggccaggatccagttccctcatctctggcaggaaagatccacagcttttcctccatgtctgttactcactttcagcagtccgggtaaaatctgtggatcagggttaaaaaagcaccgtggagaatggccctcttcaggaaagaaaaataagcaaatgaatggtccacctaggggttcagtaaagaaagaaatgtgttaactgagcctgaatcccttctgggaagtaataatgaccattgacaactaagaagtagacaccatgctaaagacttacatacaatctccttgaatcttctcaatagcccattgacttagaaactgttactttcccattttacacacagtgaaactgaggctcagatataaaggaaaggtactggcttgaagtcacaaccacgacaggagtaaggatttggaataaggatttggtcctgttttctggaccaaatccttactctggctctgcttacactttctctccatcaccaaatccttactccaaatccagaagtcagagccaactcccatcttggttctgacccaaatcctgctctggactctggagaggagattgaaatataattgcaccctcatacacatttaggaaatggttaagaagtgtaaactgaacccttatccttgtcttcaatcttcctccctgtagacatctatcttattatggttattattcagaaaacccagggatacaggtttgtcttcttactttgataactcttcttagtttaaaataataataataacacatctttggtcatctatgtcacacaatgcagtgttttttggggggtcttggtttatgctccctgcccttgagcccctcagccgtttgccctgcccccacctcggctccatggtgggagggggctctggtcttttctaaagtgggcggtttgtcttttgatctttcccttttggatgtgcgtgtgtgtctgcgtgtgccatgtgcgtggcacgcatatgagtgtgtgtgcgtgtgaacggctttgggtcctgctggttttgctgtgagctgcagtgttctgtgggtctgtggtatctgacactgtggacattaatgtacttcttggacattttaataaattttttaacagttcaa

SEQ ID NO: 92046 - DNA, 4381 bp, Homo sapiens
gatgggggccccgtttgtctgggccttgggccttttgatgctgcagatgctgctctttgtggctggggaacagggcacacaggatatcaccgatgccagcgaaagggggctccacatgcagaagctggggtctgggtcagtgcaggctgcgctggcggagctggtggccctgccctgtctctttaccctgcagccacggccaagcgcagcccgagatgcccctcggataaagtggaccaaggtgcggactgcgtcgggccagcgacaggacttgcccatcctggtggccaaggacaatgtcgtgagggtggccaaaagctggcagggacgagtgtcactgccttcctacccccggcgccgagccaacgccacgctacttctggggccactgagggccagtgactctgggctgtaccgctgccaggtggtgaggggcatcgaggatgagcaggacctggtgcccttggaggtgacaggtgttgtgttccactaccgatcagcccgggaccgctatgcactgaccttcgctgaggcccaggaggcctgccgtctcagctcagccatcattgcagcccctcggcatctacaggctgcctttgaggatggctttgacaactgtgatgctggctggctctctgaccgcactgttcggtatcctatcacccagtcccgtcctggttgctatggcgaccgtagcagccttccaggggttcggagctatgggaggcgcaacccacaggaactctacgatgtgtattgctttgcccgggagctggggggcgaggtcttctacgtgggcccggcccgccgcctgacactggccggcgcgcgtgcacagtgccgccgccagggtgccgcgctggcctcggtgggacagctgcacctggcctggcatgagggcctggaccagtgcgacccgggctggctggccgacggcagcgtgcgctacccgatccagacgccgcgccggcgctgcgggggcccagccccgggcgtgcgcaccgtctaccgcttcgctaaccggaccggcttcccctcacccgccgagcgcttcgacgcctactgcttccgagctcatcaccccacgtcacaacatggagacctagagaccccatcctctggggatgagggggagattctgtcagcagaggggcccccagttagagaactggagcccaccctggaggaggaagaggtggtcacccctgacttccaggagcctctggtgtccagtggggaagaagaaaccctgattttggaggagaagcaggagtctcaacagaccctcagccctacccctggggaccccatgctggcctcatggcccactggggaagtgtggctaagcacggtggcccccagccctagcgacatgggggcaggcactgcagcaagttcacacacggaggtggccccaactgaccctatgcctaggagaagggggcgcttcaaagggttgaatgggcgctacttccagcagcaggaaccggagccggggctgcaaggggggatggaggccagcgcccagccccccacctcagaggctgcagtgaaccaaatggagcctccgttggccatggcagtcacagagatgttgggcagtggccagagccggagcccctgggctgatctgaccaatgaggtggatatgcctggagctggttctgctggtggcaagagctccccagagccctggctgtggccccctaccatggtcccacccagcatctcaggccacagcagggcccctgtcctggagctagagaaagccgagggccccagtgccaggccagccaccccagacctgttttggtcccccttggaggccactgtctcagctcccagccctgccccctgggaggcattccctgtggccacctccccagatctccctatgatggccatgctgcgtggtcccaaagagtggatgctaccacaccccacccccatctccaccgaggccaatagagttgaggcacatggtgaggccaccgccacggctccaccctcccctgctgcagagaccaaggtgtattccctgcctctctctttgaccccaacaggacagggtggagaggccatgcccacaacacctgagtcccccagggcagacttcagagaaactggggagaccagccctgctcaggtcaacaaagctgagcactccagctccagcccatggccttctgtaaacaggaatgtggctgtaggttttgtccccactgagactgccactgagccaacgggcctcaggggtatcccggggtctgagtctggggtcttcgacacagcagaaagccccacttctggcttgcaggccactgtagatgaggtgcaggacccctggccctcagtgtacagcaaagggctggatgcaagttccccatctgcccccctggggagccctggagtcttcttggtacccaaagtcaccccaaatttggagccttgggttgctacagatgaaggacccactgtgaatcccatggattccacagtcacgccggcccccagtgatgctagtggaatttgggaacctggatcccaggtgtttgaagaagccgaaagcaccaccttgagccctcaggtggccctggatacaagcattgtgacgcccctcacgaccctggagcagggggacaaggttggagttccagccatgtctacactgggctcctcaagctcccaaccccacccagagccagaggatcaggtggagacccagggaacatcaggagcttcagtgcctccgcatcagagcagtcccctagggaaaccggctgttcctcctgggacaccgactgcagccagtgtgggcgagtctgcctcagtttcctcaggggagcctacggtaccgtgggacccctccagcaccctgctgcctgtcaccctgggcatagaggacttcgaactggaggtcctggcagggagcccgggtgtagagagcttctgggaggaggtggcaagtggagaggagccagccctgccagggacccctatgaatgcaggtgcggaggaggtgcactcagatccctgtgagaacaacccttgtcttcatggagggacatgtaatgccaatggcaccatgtatggctgtagctgtgatcagggcttcgccggggagaactgtgagattgacattgatgactgcctctgcagcccctgtgagaatggaggcacctgtattgatgaggtcaatggctttgtctgcctttgcctccccagctatgggggcagcttttgtgagaaagacaccgagggctgtgaccgcggctggcataagttccagggccactgttaccgctattttgcccaccggagggcatgggaagatgccgagaaggactgccgccgccgctccggccacctgaccagcgtccactcaccggaggaacacagcttcattaatagctttgggcatgaaaacacgtggatcggcctgaacgacaggatcgtggagagagatttccagtggacggacaacaccgggctgcaatttgagaactggcgagagaaccagccggacaatttcttcgcgggtggcgaggactgtgtggtgatggtggcgcatgaaagcgggcgctggaacgatgtcccctgcaactacaacctaccctatgtctgcaagaagggcacagtgctctgtggtccccctccggcagtggagaatgcctcactcatcggtgcccgcaaggccaagtacaatgtccatgccactgtaaggtaccagtgcaatgaaggatttgcccagcaccatgtggccaccattcgatgccggagcaatggcaagtgggacaggccccaaattgtctgcaccaaacccagacgttcacatcggatgcggcgacaccaccaccaccaccaacaccaccaccagcatcaccaccacaaatcccgcaaggagcgcagaaaacacaagaaacacccaacggaggactgggagaaggacgaagggaatttctgctgaagaaccagaaaaaagaaagcacaacacctttcccatgcctcctctggagccttcgcctggggagacagaacccagagagaaacaagagagtccagaagtccctgaaccccaaaccacatcccccacacacataatcctttgtacaaagctcctcttttccctttttttacatacacaagatcctcttggcaggtggagccaggtgtctgaaaagttcattctcgtctggctgaactctgggagtgtgtcccagctgagggaagcacaagtagcaaagctcattggtctgtacaattaaaattaagtttgacattaaatctaaaacaaaattctttgaaaataaaaaggctggacatggtggctcacatctgtaataccagcacgtgggccagtctgagatgggagggtcatcag

SEQ ID NO: 92047 - DNA, 1461 bp, Homo sapiens
gattatttcttttttcatcttttcaatcctgcttacttttatcctcacttttctttctgccatgaaaactgcacctaatttaccacacttaagattggcaatttttgattcattgatgggagaagtacagtagaaaggccctgcagtttagaattaagttgtgtttgtttatttacatgtatgcccatttcttctaaattaaatctagaatgtgagactttgacatataaaagcatgataagtattttcttaaaaaataagactattgatacataatgaaaccaccattggtaattgaattttaaaatgatatgcaaaaatatttagaaatccagttgggaaatgtgtttttgcatatgtcaccagatacacattaggcagtactacaaatgttaattcttaaacaatactgtggtgatggcaatcagtaatttatttctttgtcctgtaacttatcattcttgtcttttgtaatgtcttacacagtattaacataactgtaccttttttttgttcttggtatccatacattttaagatggaaaatcagttcatagttgatatgatattgtatatgggcaaaatgtccgttaaactaaaattcagtaaaaaaggtaatataaactggcttgatttataaaagatgttttgtttggcagttatcagtcattataagcaattatcttcaaagacaaaaaaactggactaatttgttgccattctttatgggatgtttacaataaaattccaagttgtttggaatcaattgcactcttgctgctttatgccttaatttatgtaccagagaaaaattaaccagaagaaagaaatatggagttacctattcagctttagagattgtaacatgtaactcttaggtctttcttgtttctttgtcatagaatattttattactattactttttaatctgagaaactaggatgcttcttcctatcaaagaaaaggttttgttttttgttttcatcttagacattgcaaatattctttgggtcacttttaggataataaatatgatgtttacactttaaatgtgggctgcttggtgcattcaataacagcctgcaaagcatttgtcaacattttgttttgcagagcttttcaaaatgaatagatctctaacatatttatgacttacaacttttaacagctgagttatatgtacctgacattttaaaatgtatagtaagattacctacattgtaaatggtgctttaattcagtgtaagtgtaggagagagagaagtgaggtgagatgatctgaatgctctaacaggaacattcataactatatagttacccagaatttgtctcccagtggcaaacattccactaggttcaagataaataagctggccaaagactggactgtatctttgatatatatatactgtgtattttgtgtatttagaataaaaaaaatgcatttaggaaaaaagtaga

SEQ ID NO: 92048 - DNA, 1429 bp, Homo sapiens
cccgcgtggcgctgagccaatgagagttgacgccggcctggagggcggggacacaccgtgcaggccccgcctctttcctcccttttctcagaaacccgacggcgcggacccaacctggctgctgcagtacttgctctaactttgccgcagctgcctcccttctctcggaacccactctcctaacccacccccgagaggcggagagaatgtgggagcacttcagagaggcctaggctccggagatcgggccatctgggctctgaaagcaaattagttttccaactcatgtctggctccggcgttacccagacgcctggaaggtccttcctgcagtctgatcaccatttttcctgctgcactgaccaatcagctccccttggccttcaacctcgggaatgatggattaggggagtctagaaatggacgaagccctagaaacgcagctgaagacgagcagaggacgcttctcggctacagaatccctccccaccttggagctcttatctcaggtggacatggactgcagggtccacatgcgacccatcggcctgacgtgggtgctgcaactgaccttggcatggatcctgctagaagcctgtggagggagccgcccactccaagccaggtcccagcaacaccatgggctggcagctgatctgggcaaaggcaagctgcacctggcaggaccttgttgtccctcagagatggacacaacagagacatcgggccctggaaaccatccagaacgctgtggagtgccgagccctgaatgcgaatccttcctggaacacctccaacgtgcccttcgcagtcgcttccgcctgcggctattgggggtacgccaggcacagccgctctgcgaggagctctgccaggcctggttcgccaactgcgaagatgatatcacctgcggcccgacttggctcccactctcagaaaaaaggggctgtgagcccagctgccttacctatggacagaccttcgcagacgggacggacctttgtcgctcggctctgggccacgccctaccggtggctgctcctggagcccgtcactgcttcaacatctccatctccgcggtacctcgtcccagaccaggacgacggggccgggaagctccctcccggcgttcccgcagccctcgcacctccatcctggacgctgcgggcagcgggagtggcagtggaagcggcagcggcccctagcggacgcgtggccctgagttgggggagcgacccttcccccagccccgcccctcaggacacccagaaccccacccctcgtcctctcggccttctgtaatagttttgagatgtctgtccctcctccctggagctccagagacccacccctctccaggttatcccagaaatgacccaactctctcacttttccctctcccctttgaataaagtcgccagctagagca

SEQ ID NO: 92049 - DNA, 1010 bp, Homo sapiens
aggtggaatgaagagtgagaaagctgtctaggtgcctgtccaattagggcagtaggaagaatcctgatggccaggcagctcttatctcaggtggacatggactgcagggtccacatgcgacccatcggcctgacgtgggtgctgcaactgaccttggcatggatcctgctagaagcctgtggagggagccgcccactccaagccaggtcccagcaacaccatgggctggcagctgatctgggcaaaggcaagctgcacctggcaggaccttgttgtccctcagagatggacacaacagagacatcgggccctggaaaccatccagaacgctgtggagtgccgagccctgaatgcgaatccttcctggaacacctccaacgtgcccttcgcagtcgcttccgcctgcggctattgggggtacgccaggcacagccgctctgcgaggagctctgccaggcctggttcgccaactgcgaagatgatatcacctgcggcccgacttggctcccactctcagaaaaaaggggctgtgagcccagctgccttacctatggacagaccttcgcagacgggacggacctttgtcgctcggctctgggccacgccctaccggtggctgctcctggagcccgtcactgcttcaacatctccatctccgcggtacctcgtcccagaccaggacgacggggccgggaagctccctcccggcgttcccgcagccctcgcacctccatcctggacgctgcgggcagcgggagtggcagtggaagcggcagcggcccctagcggacgcgtggccctgagttgggggagcgacccttcccccagccccgcccctcaggacacccagaaccccacccctcgtcctctcggccttctgtaatagttttgagatgtctgtccctcctccctggagctccagagacccacccctctccaggttatcccagaaatgacccaactctctcacttttccctctcccctttgaataaagtcgccagctagagca

SEQ ID NO: 92050 - DNA, 1411 bp, Homo sapiens
cccgcgtggcgctgagccaatgagagttgacgccggcctggagggcggggacacaccgtgcaggccccgcctctttcctcccttttctcagaaacccgacggcgcggacccaacctggctgctgcagtacttgctctaactttgccgcagctgcctcccttctctcggaacccactctcctaacccacccccgagaggcggagagaatgtgggagcacttcagagaggcctaggctccggagatcgggccatctgggctctgaaagcaaattagttttccaactcatgtctggctccggcgttacccagacgcctggaaggtccttcctgcagtctgatcaccatttttcctgctgcactgaccaatcagctccccttggccttcaacctcgggaatgatggattaggggagtctagaaatggacgaagccctagaaacgcagctgaagacgagcagaggacgcttctcggctacagaatccctccccaccttggagctcttatctcaggtggacatggactgcagggtccacatgcgacccatcggcctgacgtgggtgctgcaactgaccttggcatggatcctgctagaagcctgtggagggagccgcccactccaagccaggtcccagcaacaccatgggctggcagctgatctgggcaaaggcaagctgcacctggcagagatggacacaacagagacatcgggccctggaaaccatccagaacgctgtggagtgccgagccctgaatgcgaatccttcctggaacacctccaacgtgcccttcgcagtcgcttccgcctgcggctattgggggtacgccaggcacagccgctctgcgaggagctctgccaggcctggttcgccaactgcgaagatgatatcacctgcggcccgacttggctcccactctcagaaaaaaggggctgtgagcccagctgccttacctatggacagaccttcgcagacgggacggacctttgtcgctcggctctgggccacgccctaccggtggctgctcctggagcccgtcactgcttcaacatctccatctccgcggtacctcgtcccagaccaggacgacggggccgggaagctccctcccggcgttcccgcagccctcgcacctccatcctggacgctgcgggcagcgggagtggcagtggaagcggcagcggcccctagcggacgcgtggccctgagttgggggagcgacccttcccccagccccgcccctcaggacacccagaaccccacccctcgtcctctcggccttctgtaatagttttgagatgtctgtccctcctccctggagctccagagacccacccctctccaggttatcccagaaatgacccaactctctcacttttccctctcccctttgaataaagtcgccagctagagca

SEQ ID NO: 92051 - DNA, 1056 bp, Homo sapiens
tggatcctgaggtgtcttagcggcctctagaccccaatccagccaacagctcttatctcaggtggacatggactgcagggtccacatgcgacccatcggcctgacgtgggtgctgcaactgaccttggcatggatcctgctagaagcctgtggagggagccgcccactccaagccaggtcccagcaacaccatgggctggcagctgatctgggcaaaggcaagctgcacctggcaggggatccccaggcctcagttcccaaaccttacctgaatatccaagaccctagctcacagggttcccctttgccaggaccttgttgtccctcagagatggacacaacagagacatcgggccctggaaaccatccagaacgctgtggagtgccgagccctgaatgcgaatccttcctggaacacctccaacgtgcccttcgcagtcgcttccgcctgcggctattgggggtacgccaggcacagccgctctgcgaggagctctgccaggcctggttcgccaactgcgaagatgatatcacctgcggcccgacttggctcccactctcagaaaaaaggggctgtgagcccagctgccttacctatggacagaccttcgcagacgggacggacctttgtcgctcggctctgggccacgccctaccggtggctgctcctggagcccgtcactgcttcaacatctccatctccgcggtacctcgtcccagaccaggacgacggggccgggaagctccctcccggcgttcccgcagccctcgcacctccatcctggacgctgcgggcagcgggagtggcagtggaagcggcagcggcccctagcggacgcgtggccctgagttgggggagcgacccttcccccagccccgcccctcaggacacccagaaccccacccctcgtcctctcggccttctgtaatagttttgagatgtctgtccctcctccctggagctccagagacccacccctctccaggttatcccagaaatgacccaactctctcacttttccctctcccctttgaataaagtcgccagctagagca

SEQ ID NO: 92052 - DNA, 1057 bp, Homo sapiens
agagagggaggagggaggccgcatagaagagagggaggaattactgaacaggagagggggattggaagacctagggaggtccccttcattctgagaaaagaaggggtctcttgaagactaaaaagctcttatctcaggtggacatggactgcagggtccacatgcgacccatcggcctgacgtgggtgctgcaactgaccttggcatggatcctgctagaagcctgtggagggagccgcccactccaagccaggtcccagcaacaccatgggctggcagctgatctgggcaaaggcaagctgcacctggcaggaccttgttgtccctcagagatggacacaacagagacatcgggccctggaaaccatccagaacgctgtggagtgccgagccctgaatgcgaatccttcctggaacacctccaacgtgcccttcgcagtcgcttccgcctgcggctattgggggtacgccaggcacagccgctctgcgaggagctctgccaggcctggttcgccaactgcgaagatgatatcacctgcggcccgacttggctcccactctcagaaaaaaggggctgtgagcccagctgccttacctatggacagaccttcgcagacgggacggacctttgtcgctcggctctgggccacgccctaccggtggctgctcctggagcccgtcactgcttcaacatctccatctccgcggtacctcgtcccagaccaggacgacggggccgggaagctccctcccggcgttcccgcagccctcgcacctccatcctggacgctgcgggcagcgggagtggcagtggaagcggcagcggcccctagcggacgcgtggccctgagttgggggagcgacccttcccccagccccgcccctcaggacacccagaaccccacccctcgtcctctcggccttctgtaatagttttgagatgtctgtccctcctccctggagctccagagacccacccctctccaggttatcccagaaatgacccaactctctcacttttccctctcccctttgaataaagtcgccagctagagca

SEQ ID NO: 92053 - DNA, 1647 bp, Homo sapiens
cccgcgtggcgctgagccaatgagagttgacgccggcctggagggcggggacacaccgtgcaggccccgcctctttcctcccttttctcagaaacccgacggcgcggacccaacctggctgctgcagtacttgctctaactttgccgcagctgcctcccttctctcggaacccactctcctaacccacccccgagaggcggagagaatgtgggagcacttcagagaggcctaggctccggagatcgggccatctgggctctgaaagcaaattagttttccaactcatgtctggctccggcgttacccagacgcctggaaggtccttcctgcagtctgatcaccatttttcctgctgcactgaccaatcagctccccttggccttcaacctcgggaatgatggattaggggagtctagaaatggacgaagccctaggtgagggtttgaatcctcttttcccaagattcaggctggggatggagcctgagtctgggcccattctcggctttatctaaactccagattaccaagcctggggctgagccccaaggaggctcagaagggccagaccccaggcagggccttggggcacagatatcatcaccttcccctctgggatgtttgggaccggacctccgtattaaccctgaacttccgtactaacccctcagaaacgcagctgaagacgagcagaggacgcttctcggctacagaatccctccccaccttggagctcttatctcaggtggacatggactgcagggtccacatgcgacccatcggcctgacgtgggtgctgcaactgaccttggcatggatcctgctagaagcctgtggagggagccgcccactccaagccaggtcccagcaacaccatgggctggcagctgatctgggcaaaggcaagctgcacctggcagagatggacacaacagagacatcgggccctggaaaccatccagaacgctgtggagtgccgagccctgaatgcgaatccttcctggaacacctccaacgtgcccttcgcagtcgcttccgcctgcggctattgggggtacgccaggcacagccgctctgcgaggagctctgccaggcctggttcgccaactgcgaagatgatatcacctgcggcccgacttggctcccactctcagaaaaaaggggctgtgagcccagctgccttacctatggacagaccttcgcagacgggacggacctttgtcgctcggctctgggccacgccctaccggtggctgctcctggagcccgtcactgcttcaacatctccatctccgcggtacctcgtcccagaccaggacgacggggccgggaagctccctcccggcgttcccgcagccctcgcacctccatcctggacgctgcgggcagcgggagtggcagtggaagcggcagcggcccctagcggacgcgtggccctgagttgggggagcgacccttcccccagccccgcccctcaggacacccagaaccccacccctcgtcctctcggccttctgtaatagttttgagatgtctgtccctcctccctggagctccagagacccacccctctccaggttatcccagaaatgacccaactctctcacttttccctctcccctttgaataaagtcgccagctagagca

SEQ ID NO: 92054 - DNA, 435 bp, Homo sapiens
gtctctgcaggtgaggactccatcagcaccttgggcctgatccttggcgtggggctcttgctgctgctcgtgtccatcctcggctacagcctggccaagtggtaccagcgcgggtactgctgggaggggcctaattttgtcttcaacttatatcaaatccggaacctgaaggatctggagatgggtccacccttcaccatcagtggtcacatcagcagcacagatggtggctacatgaagttctccaacgggctagtctgatgcagagacagcaacttgtgaagccctggggagaacttccttgacctccaaatcaccaaattctgcccattcttcatgccagctcaaatttcccttctccagggagacttctgtaagacccatggatcttgtgctctgctgattttaaatacagatagtctcaggcccccataa

SEQ ID NO: 92055 - DNA, 305 bp, Homo sapiens
tgcagttttaccaaaagaaaaatctgaaaatttctattcaggctactggaattggttattaaaagaaaaaggaaaaagaagaatcttgctgctttcagtatttcctgatttttttgtaaatataaagaggaacttcaattatgaaaaatttttaaaagatatatatatctatatatctatatatatgtactgttttgtttcctgtcttgaagattttgagttatggttattggtttcagattgattaattcacatatgctgtgttttgaaatgagatcccattagcttttttttttttttttttt

SEQ ID NO: 92056 - DNA, 263 bp, Homo sapiens
aaaaggaaaactaaaacctatgcaggttgctctcagtgaagatgacttgacagttttaatgaaaattttgctagaaaatcttggagaagcttcctcacaaccaagccctacacagtctgtgcaggagactgtaagagtgagaaaagttgatgtttcaagtgtacctgaccatctcaaagaacaagaagattggacagactcaaagctctctatgaaccagattgtcagtctccaatttgactttcactttgaatctctttcca

SEQ ID NO: 92057 - DNA, 919 bp, Homo sapiens
atctcattaggataaaattctgtgggggagttggaatggaaatacaagattgaaagaaagtaatatctctgactgctgaagaggttatttctatttttaaatagattatgatagaattcaaattgttgtagtatctccagtcaaaggaacttaggcttcttgagaaagtggttgattgcaggtctaaggcaggaaaatacaagatgaaactggaatatcttgtgatggcagaaaataaggaggtgctcacaaaaagatggcacatgtctgaaggctacaggaaccaacctgaaggagctctccagtggaaatgctggaacaatttgagcaaacaataaaaaattataatattggattataacccacacaataaatatctgtgtgtccatactgatgtaaacaattgaatgagtgaatgaatgaatgaaaagaagaaacagttcttctccccagtaaattccaattgataaatgtagaagaaatgggagaaacaaaaatcactatcaggaaaacacaacagtaataattgttggcaagacctaccagttggtgcaaaagttagtgggtgaatgtttgaggaaaaacagaatatttgcataaccttagagtattttccccaaaataatcactaattacaaagagaaagtaataactttacagtagagaaacttctttaatcaagggatcaaggttaacagaagcagtaataagccacatcagcatcatgtaccccctggtatggcattgagaagggcacatgacttctttggtatcctccccaaaatgcataatctcaatcatgaaaaaacattagacaaatccaagttgagggacattccacaagataaatgatcacttcaaaagtgtcctggtcatgaaagataaggaaagattgaggaaatgtcaaggattggaggac

SEQ ID NO: 92058 - DNA, 558 bp, Homo sapiens
ggggaaatggaaaacagctgaccactgattccttgaaatcacctactcagacactccagggtctgtgtgggattaagtcgtccgcagtctttccctcccttaatctcttctaaccttcctcgaaagtgccgtttcccaccccattttaatcatgccctttgctctcgcctggacatctccaggggctccagtgcctctctaagtgaagggtttggggccacacacatggctgtctgttctctccaggcccacatgcagaatccagcagccccctggcctcacacctgcttttcagtagtggctgggactgccagatgaataggcttgaggcagcatacgagtttgctatacacttgctcaaaacattagtggactcaaaaccaaaaagacaacccagtttcagaatgggcagaagacttgaacacacatttttccagagaagttatataaatggccaataaacacatgaaaagaggctcagtacccatggttgttagggaaatgcaaattaaacccatgaaatcccccttcacacaaaataggagggctgtaataaaa

SEQ ID NO: 92059 - DNA, 496 bp, Homo sapiens
atatgccccaaacatcagatttataatagaaaaaaaattgggtttaaacaatttgtctttattcccaggcagttcggtatagtaaattaggggtatttggtttctgttcattcaaaatcttggtactcaaactggtgtcttcagaagctgttcctctattgaagcgtttgttgataaaataggcaaaggttcacatgtaagtgttgcaagttttcttctccttgtctgatgacaaattaggaactcacctactgcgttttgaatagtagttgtctggaacacataaaggatcactgccaagttttttgagtttccaggatctaagtttaagccaagatttttgtttcccagaagtttatgaattcatttgaaattagatttttctcttattatgtggccggcagtgcttgcaagcacaacgccaaatcgactggacgtggaaagtgaaatactacagaagtcacaatctattaaataaaatgttaacataataaaa

SEQ ID NO: 92060 - DNA, 514 bp, Homo sapiens
actatttttatgctgtggctgtgctgtgcaggagctgggcttttcgtgcattttagacagaattgaccttggttaatgcttgacttgggaactatgcagaaacatccaggaagtggtggtggctgatcctgaccgtcctcagttttgtgaagcaacagcctctgtgcctctttctctgcatgctctgttgacggtctagtcttgagagagaacctgctgctgtcccgtctgtcatagccttcctagcaactcttaggcctgcgtgctgtgttttcatgatctcccccaaagcggcactttgatgttttttcagagtcaaagtatcactgtggatatttatcccaaacaaaattgcaaactgatcaaatgttatgtcttttgataccaaatcaaaaacgattcttggtggctgatcaggttgtctcctaaaaatttgccttttgaacctatactgcctttatgagatgattatgaaagtagaaaatagcctgtgaaaaatggtacctttgctaaa

SEQ ID NO: 92061 - DNA, 215 bp, Homo sapiens
aacccagatcaacaaatcagaatctctagggaaacccagactttggtatttttatgaggtccacaggtgagcatagacctgcagccagggttgagaacccccactgcagggaaagggagatagatcctccccccagtgccctcaggggcctcagagctggcgaagggaaaggcagtagtagtcatgattagcatttactgagtactgttccactg

SEQ ID NO: 92062 - DNA, 795 bp, Homo sapiens
gtgacatagtgctaccttttttttaaaacctgtcttgcccaggcattattgagtgccccctggtgccagcatgtgtatttcacgactgtatcaacaaatcatgatcatcttctctggccattgtgccctttcagattccaaacttgttacctctcagtccttcctacaaacttagaaagtctaatatcttaatgtttacttatgtagcaagcctccctttctcccatccctaaatcctcttgtaattaattattttcctttggaactttttaaatctacaatttccttataatatggtaaccaatattaattttcttgttctgcgccaagtttgattttatacaaattgtttccagtttgggtcatgagcacaaaaccaggtatttttaaaaatctatataacccttcaatgaggcagtattaattttattaactcattaattcaaccaataattcttgattgtttactgtgttagatattggggtatccccaatacctgacagctgtgagcaaaacaaatgccctacacacatgaggtgtacagtccagtagaaaagataaacaataagcaaattaatagataatatgatgtccaataaggacttcaaaggaaaataaagcagagtaaagagccagagaatgacagtgagctgtttttcacatgagtcatcagaaaaggcctctttaaagaattgacatttgaacagaaaaacgaatcaagggcgtcaactgtttattgcttttattgcttaccatttgaccaagcaattctacacataggattcaccctaaaa

SEQ ID NO: 92063 - DNA, 418 bp, Homo sapiens
gcgagagaaaaccacgtgcaccaaactttaggggaggaaaaatgggaacgtggggagaagacgtgaggcggcagatctgaaaaagatggtcattccggactcctgacgccgccagtcccgcggtgagacgtgagcgccattggcgtccgtggcctctgtttccgtggcaacctagtaaccattaattttcaattaaaggagacaaaaagctcgatgacagctccaggtctgctgaagatgtcaagaatctgtattaatatacagcaagagagcataattgtgtgtccatcttccagagcagcgaaaaatggagggataattaccagctcgaaagccactctgtaatttagttcttactgtcaccacagccctacacattagcataaattaaaagcagagtttattgttatcaaagtgc

SEQ ID NO: 92064 - DNA, 407 bp, Homo sapiens
accccagggattcaccctggcctcggactaatcctatggggcgcttgcaaaccccggccatcccctggagtctgaaggtcattccggactcctgacgccgccagtcccgcggtgagacgtgagcgccattggcgtccgtggcctctgtttccgtggcaacctagtaaccattaattttcaattaaaggagacaaaaagctcgatgacagctccaggtctgctgaagatgtcaagaatctgtattaatatacagcaagagagcataattgtgtgtccatcttccagagcagcgaaaaatggagggataattaccagctcgaaagccactctgtaatttagttcttactgtcaccacagccctacacattagcataaattaaaagcagagtttattgttatcaaagtgc

SEQ ID NO: 92065 - DNA, 574 bp, Homo sapiens
ccctggttttctgtggaaagtgagcttctgggttcgacagtgggaccggcacagaccttcccgcagctacaggccatacgacaaccccgctgctctttctttctgcgggcactcgggccagtcctaacaattgcccctcaagctgtgtgtgctgccctaaccctcaatcccgaacccgaaacagtgcgtgctgggacgaatctaggcaggtctccgaaaccggggtgaagatgctgaagttcaggtcattccggactcctgacgccgccagtcccgcggtgagacgtgagcgccattggcgtccgtggcctctgtttccgtggcaacctagtaaccattaattttcaattaaaggagacaaaaagctcgatgacagctccaggtctgctgaagatgtcaagaatctgtattaatatacagcaagagagcataattgtgtgtccatcttccagagcagcgaaaaatggagggataattaccagctcgaaagccactctgtaatttagttcttactgtcaccacagccctacacattagcataaattaaaagcagagtttattgttatcaaagtgc

SEQ ID NO: 92066 - DNA, 684 bp, Homo sapiens
catgtacagaaccaaagagcaaaagctgaaatcagtgggagctgggtggggttctgccaccagagagcatgaaaaagacgatgagaatgatgatggaaaacaaaggcttaatttacattttccattctaaaacataatgctcaatggggatttactttcttgctaaggggtaatgaatagtcaatttcagactaaagattttctgcattcatcttccccaagtgtttcatatctttacattacatttttcagatatagatattttcatcactaatattgttcctctcaatttcccctttctcattttttgtaaaatggcaaaatgaacaaaatattcaaatatttgtgtcaatttacaatagactaaaattaaaatgctggctaccaaacagtattaccaaaacaacagtttacaataatcatttcccaggtgaggcgttaagagtccaggtgaggtgcttacagatgcttggttaaagctcaaggacagtggctacatgaaggggagacagctccctgcaggaaagagactgcagacagggaccgggaaaggtcacgtgtgacctaagaggagaaaaggacattccttcctaggactgaatgaacaggaaacaaattcagtaccccgaaagtctacacaaatctgaactttgcatatatcaatgacaaaaattcacttaactg

SEQ ID NO: 92067 - DNA, 101 bp, Homo sapiens
tgggagaattctgtggcaaaagaaaagtttcaatcctgagatctctgaagggacatctttctttgccctcacttatccctctgctctttccttatttactt

SEQ ID NO: 92068 - DNA, 174 bp, Homo sapiens
ttctaatgttaaactactcaacaataaagttacatagcatcctgttcacttgttctgggcctaatctattgcttgagattctaaattttttagctgacttttaaattattttcttagttgttttgtacaccttctcctctttttgctatgactaaaatcatctgaagcctcttg

SEQ ID NO: 92069 - DNA, 379 bp, Homo sapiens
ccgggatacacacagtcccaccgtttgaatagcagaattgcgagtcttaatttggaaagggcaaggctgctgcctctttaacagtggaagaagacaaaatggaaacaaagtagttacggtttaagttttacctgaccaagcaaacaaagatttacttttagatctgcaaagttaatggaaataattatttacacactttagaagcgtctgtttatgatgtggagcttaggcatatatcctagtactcagaaataatctgttcttgagaacctacagactgtggcaggagaagcaaactgctcatctaagatctagaatctcagtgtttattgtgaaccaaccccagagacttgaactgtgtccagagagaactgcattt

SEQ ID NO: 92070 - DNA, 294 bp, Homo sapiens
aaatgggaatagggcagggtacataggggatgccagctgtatttgtttttatttaaagcaaaaatggcagaatgttaggatctgattgttgggtggtggatacacgtatatttttgtgctgttttctgtattttgcagtattttatttttgaaaattaccaaaacaggccgaacacagtggctcatggctttaaccctggcactttgggagggcgaggcaggcagatcacttgaggccaggagtttgagactagcctggccaacaaagtaaaaacccatttctactagaaatac

SEQ ID NO: 92071 - DNA, 237 bp, Homo sapiens
ttaaccactgcactcagtgctctgttattgaggactgacataggaatacttatgtgctctttggttaacacagcacagactttgtttcatgtattatgtggagggttagaggtgagaacctgattgtgttaacatgctagcgagtcattcagaagatatttagtggttggataataacggggcatcgttaaatgtcaggctgaggtgttgggactctctaagcattggggagcccca

SEQ ID NO: 92072 - DNA, 289 bp, Homo sapiens
gtagaatcagaaattgaaattccctcttcgccttgtttgagttgcatccttatttaaaatattgtagggtgatctgagtcctgaaatagcttattggagacattgaatgcaattctgtagtataaatgtctatcctacgtcttctttttgtatgggatctttgagaagggaacttatactttgtttgaatgaagtcaccagaacagcattgtccattagaactttctgcacaaatggaaatgtgccgtatctgtattgtccaagggcactagctacatgtagctgttga

SEQ ID NO: 92073 - DNA, 872 bp, Homo sapiens
agcgggcacttcctgcgacgcccctgcagcagcagcagcgtggtcagagcgagcttctgagcggtggtgggttccatgtgatggtggagtaggagacaggtctccgcggtcagtggcgggggcgtggaccccaccgggaaccctccctgctccttccctgcctctccctgttttcgtgcccgcacttcttcgtgggcatctgggcccgagtcctccgcttgggggcggttgtgcggtcctggctactgcagcgtccgcaccccggccgggaaggctatgccaatgtccgacccgcgtccagcgtataggagcgccctggcccacagctggcggtaaaacgcgggacctgggtccctcggagccccaggggcctctgagctggagtctaggattatttttgatgcctcagcacctttaaaaagagacctcgctagagcagggggcatctgtattttcagttctttgaggagtctccagctatttagctgttttccatggttcatctgcgttgctctaaatgggactgtttcattattttgatggctgaagaatatttcctagtgtatgtatatgagagtttcttgatctctttatctgtggatgaacagctactttgaaatatatgatacatttgtgttaaggctagtcacgctgctgtggaatagaaggtcagaattgatcactatcatctgagagtaactttgtacccatcactgattccttccgagactgcctccacttccccagcagcctctgatttcttcatgtggctgcagatggcaggatttcccaaaggtttaatggctgcaacatattccgtggtgtatctgtacagcagtttcctcattcctgcagctgtgtttgaacaggta

SEQ ID NO: 92074 - DNA, 441 bp, Homo sapiens
agcgggcacttcctgcgacgcccctgcagcagcagcagcgtggtcagagcgagcttctgagcggtggttcatctgcgttgctctaaatgggactgtttcattattttgatggctgaagaatatttcctagtgtatgtatatgagagtttcttgatctctttatctgtggatgaacagctactttgaaatatatgatacatttgtgttaaggctagtcacgctgctgtggaatagaaggtcagaattgatcactatcatctgagagtaactttgtacccatcactgattccttccgagactgcctccacttccccagcagcctctgatttcttcatgtggctgcagatggcaggatttcccaaaggtttaatggctgcaacatattccgtggtgtatctgtacagcagtttcctcattcctgcagctgtgtttgaacaggta

SEQ ID NO: 92075 - DNA, 397 bp, Homo sapiens
agctcgctggtgctctctgcaaacttgcagtgcaagtctatgatataagtggtgtagagtggttttgttgctaagagaaaagtgctaaaaaggaaaaaaaaaaaaaaggagggcctatatctcttgtgtagctcagatcctttgggtatttaatgtacagtttcagcaaaagacactcagaattatacctctggttggttcaaaattgcttaaatgttgaaacatatggtctcatgttccatttgttagcaaacaaccagctgttctcagcctgccaaatccaagtaaacatccactgtgtggaagagtgaatctgaaatggttcagtaaaaacataaaagctgtttttgctgaagaagaagaaaaaaaaaaggccaccccgaaacaacagctagtg

SEQ ID NO: 92076 - DNA, 325 bp, Homo sapiens
ccgcccgctccagtccccgccactcctgactctgagggcctggggactcctcctcccccgacatcacaaatcgtcccaaccctggtcagtcaagcggaagcggcgacctagttcctccttccagtctcagcccagggagctgcctccagcttcacccactgggggtggatggcacaggacacctgtgggacagcccaggaccctgagcaatctgcttgccccagagatttctgcgggtgggtagaggggggtgtgcacagctgtgcctatgtgagagatccaccccacaggagttgtgtcagggcaggatgtgcaggaggggtac

SEQ ID NO: 92077 - DNA, 469 bp, Homo sapiens
ctcttaaacccgggaggcagaggttgcagtgagccaagaccattgcactccagcctgggcaacaagagcgagactccgtctcaaaaaaatacaaaaaatcatctgggcttggtggtgaacgcctgtaatcccagttactcaggaggctaaaccacaagaatcacttgaacctgggaggcagaggttgcagtgagcaaactccactccacgtcactgcactccagcctgggtaacagagcgaggctctgtctcaaaaacaacaactacaacaaaaaagataggacagtagattttattagaccctgaagcatactggaggctttttcatttctgcattccctgacagtgctccatagagtaggtcttcaaaggtagatagtaatctcattaccctggactgttctcataatgtaacagatcactaacactgaatcttaaaaataaagttcttttagtaattttaaaaaaa

SEQ ID NO: 92078 - DNA, 687 bp, Homo sapiens
agctaggaacatgtagcttgaccttaatgttgagtgccagatagagactgtggtgtgaactgtttcctaaagaaatctaaggctaagaaagattatgattgtagtgtcttactgtgtgtgttcaaccttgtgcttagagtatcagaaatatctctcttcaaatccagagctctatactatgcatcttttattcttggtagtttttgggatccccggatgctttttccttgggtgactgatgcatttcaattcccacctagctctttgacaggacacttttacttaaatggaaaatctagtgttttgcttagtaatgttttgtgctatgggattgaaagttgtatttggaaggtctgcatagggattttctttctagaaaggttattttctgttgtcatcttactttggaatagatttttaaaaatatgaaaataagcactagattttcatatctttaaaagtcacttacgtgtttttacttcttaaaaatttccctttaaaatctctattttatacaaaaattatctgggtgtgttggcgagcgcctgtaattccagctacttgggaggctgagtcaggagacttgcttgaatctgggaggtggaggttgcagtgagctgagatcataccactgcactccagctgtcactcttggatgacagagtgagactctgtctcaaaaaaaaa

SEQ ID NO: 92079 - DNA, 425 bp, Homo sapiens
agctaggaacatgtagcttgaccttaatgttgagtgccagatagagactgtggtgtgaactgtttcctaaagaaatctaaggctaagaaagattatgattgtagtgtcttactgtgtgtgttcaaccttgtgcttagagtatcagaaatatctctcttcaaatccagagctctatactatgcatcttttattcttggtagtttttgggatccccggatgctttttccttgggtgactgatgcatttcaattcccacctagctctttgacaggacacttttacttaaatggaaaatctagtgttttgcttagtaatgttttgtgctatgggattgaaagttgtatttggaaggtctgcatagggattttctttctagaaaggttattttctgttgtcatcagacaatgtatgggtaccgagctcgg

SEQ ID NO: 92080 - DNA, 431 bp, Homo sapiens
gtaatgagtgagaaagtttgattctgttttacatcaaggcctggaacaaagagtcacaggacaaagctataagtaagaggcaggccctgggaagcctcctttaacctccatagagaagtctctcttgatcctctagataagcttggcctttgttgaaacaaagatcacactgaatttgtctatatgaagatggcagaaaactgtgaggttcttcagggaaagaatacattatttatctatattccaatattcagtacacattcagtatttacagaatgaagttcaatcagaataaatgttcaaacaaacagacccctacagtagtggaaacagcacaaatgtccattgtttagggaattcatccagtgaggccagggctggaggagatgaccttctaatagttgttctaattctgcttctagccttctgca

SEQ ID NO: 92081 - DNA, 475 bp, Homo sapiens
agcatgcttaattcgtttcatttttcttctatttttgacactaaaagcatttaatgctgtttttacctctgcatatagctttggctgttaatcctactttttaaattattttctaaatcgtctgttttttaatttttttaactcttgatttacatcttgtcctaaggataatttgaggtgctacttacgtttcaaaatttctaagtggtatgttttacattattgttagttgtattgcattttgatctgagaatggtttctagaatttctacttttcaaaatttaccaaaatattctttgtagcttaataattatttaattttgtccactgtccatgaaacttgaaaagaaggtgtactgtttgttttcagggtaagaaatttatatgttcatattttctatgtccttatttattttttgattatttgttcagaaaatgtgttagaatatttccaataaaactgtttctcatgtt

SEQ ID NO: 92082 - DNA, 697 bp, Homo sapiens
gtgaagcgctgtgtgcagcagctgggcctggcgctggacttcatgcacgggcggcagctggtgcaccgcgacatcaagcccgagaacgtgctgctgttcgaccgcgagtgccgccgcgtaaagctggccgacttcggcatgacgcgccgcgtgggctgccgcgtcaagcgcgtgagcggcaccatcccttacacggcgcctgaggtgtgccaggcgggccgcgccgacgggctggcggtggacacgggcgtggacgtgtgggccttcggcgtgctcatcttctgcgtgctcaccggcaacttcccgtgggaggcggcgtcgggcgccgacgccttcttcgaggagttcgtgcgctggcagccggggccgcctgccggggctgccttcgcagtggcgccgcttcaccgagcccgcgctgcgcatgttccagcgcttactggccctggagcccgagcgccgcggcccagccaaggaggtgttccgcttcctcaagcacgagctcacgtccgagctgcgccgccggccctcgcaccgcgcgcgcaagccccccggggaccgcccgcccgccgccgggccactgcgcctcgaggcgcctgggccgctcaagcggacggtgctgaccgagcgcggcagcggctcccggcccgcgccccccgcggacgggtcggcgcccaagcccgagccggtgccggcgcca

SEQ ID NO: 92083 - DNA, 366 bp, Homo sapiens
cccaagggcttcagccagctccaatgcccaagggcccatggcatgtttgatttgccagcacatgatcccacaaaacattgcatcagaccaagtgtccgaccttgcaacagaggtggcacagcatgggatcatgaaatccgtggccatccttttgggtcctaccaccatccagaaagctgctggcctgataaaaccatggaactgtctttgaaagatgtagctgaggctgggcacagtggctcacacctgtaatgccagcactttgggaggtggaggtgggcagatcactcgtggtcaggagttcaagaccagcctggccaacatggtgaaactccatctctactaaaaaatacaaaatacatggtg

SEQ ID NO: 92084 - DNA, 243 bp, Homo sapiens
ggtttatgtaagattttaaggggaaatgtgaattaccctcagtagtacgaactgacccttggtgaaatggccatgtgccttctttcctacctatctcctaatattttcccatgaacaccctacattccagctctaaggaactacctggttctcctggaggaggccgtgttgttttaggtttggggggttttgcatgctttcttcttaatctggattgcccctgccctagctaactcccatcca

SEQ ID NO: 92085 - DNA, 298 bp, Homo sapiens
atgaggctgggctgcgggccctcgcacctcccaccacccgcctgcccctccagactccgccttttgaggcccctcaccctgaggccatgtcaggcacagaccctctgggctcaccactacacttgagcctcccatcccctgaactgtgcgcccatcccctggacggcagccatcatctgaactgtgcacccatgccctgaactgtgcacccatacgctgaactgcacccatacgctgagccgcatccatcccttggactgcagccatcatctgaactacacccatcccctgcactgca

SEQ ID NO: 92086 - DNA, 379 bp, Homo sapiens
gtagctcctgtctcctggtggacgtccttcacagaattgtcttcttggtcctctagagagctttgtgggtggaaagtggcattttcctccttacaggaagagaaattgagagaagggggttatttcacttgatgagatcacactttggtgctcagcctgcactgagcctaggagtgtgaattcctaagttcacataggcattctagagagaccacagcatcacatagtcattctagctagcgaccgcagcatcacacagacactctagagagaccacagcatcacaagacacgctagagagaccacagtgtcacacaggcattctagagagaccacagcgtcacacaggcattctagagagaccacagtgtcacacaga

SEQ ID NO: 92087 - DNA, 196 bp, Homo sapiens
gtgtagtgagatccccggtgacatgaagggccctcttgaagattgtgatcatgaattgaaagtgagattagttggtgtgattgtgtctttttctccagcgattttgagctgcatagttgtagaggcagaagaggtgaatttaaccagaggtccaaacttccggagaacacgcagctgaagaggtccaatcttccgg

SEQ ID NO: 92088 - DNA, 128 bp, Homo sapiens
gagtcctgtgccccgggccggtgggatgttgacagctcctttggttgtcgaggcggctgggctgagcacatggcggcattgggagggcctgcaggaagactcatttcctgactgactgacaaacagag

SEQ ID NO: 92089 - DNA, 425 bp, Homo sapiens
ggattttaggcagattagactaggggatcctttatttgttgttcctaatcatgagatatgccacatctacaaagttttacaaagaaatgaaaatttaaataaattttactttgactatctggttagcatgaattacaagctaaaacatccagtgataagactacttaataaatgtattcttttaattgtagataggagcaaaagtacatgctggggtggactagcaagtgatatggcagattaacattctaaaagggtcaatgctttttcccagaaagcatgcttttgttgtacactcctgtggtgccactaaatttttggaaattaattcagaaagttgaaatagaattgtcagatttcagtcttgtttttttcatttttttaatttctttcttgttcttgtctgctttatgccctctctaatg

SEQ ID NO: 92090 - DNA, 474 bp, Homo sapiens
tacaataaaacatgtttatgataaagtattaaatgttctcagaaattaaggttttaggccggccatggtggctcacacccgtaatcccagcatttggcaggccaaggcaggtaaatcacttgagatcaggagttcatgaccagcctggccaacatggtgaaaccccatctctactaaaaatatgaaaaattagccgggtgtgctggtgcatgcctgtaatcccagtcactcgggaggctgaagcagaagactagcatgaacccaggaggcagaggtttcagtgagccgagattatgtcactgtgctccagcctgggtaaacagaacgagactccatctcaaaaaaaaaaaaaaaaaaattaaggttttcagtggaaaagaggaaaaaaaatcaaagaaattttgaaaaacaacttaaattggaaatctatgaactttatttttgaatatatttgcttactctgttttttaaagg

SEQ ID NO: 92091 - DNA, 667 bp, Homo sapiens
gcattgggtactctgccatttgtcttcagtttttagaattagaaggagattgcaattcatgctataggcaaacagtgatttctgccgcacttttgaaagactgattgcatgaggcattgtacttttattatattttctatatcgacagtttacattttgtgcctaacagtaacatttgttgaatgtttacttatgtgtcaggcacaattctaatacttgacatgaatcagaccatttaatcttcataacagctcttatgaggtagtttcaattattatttccatttttctgatgtggaaactaaagtaccgggaggttaaataattaggtcagtgttgtaagtttcatagtgaaggatctggccgggtgtgatggctcatgcctgtaatcccagcactttgggaggccaagacgggcagatcacttgaagtcaggagaccagcctggccaacatggcaaaacctcctctctactaaaaatacaaaaaaactagatgggtgtggtggctggagcctgtaattctagctactcaggaggctgaagcaggagaatcgctgaaacccaggaggctgagattgcagtgagccaagattgcgccactgcactgcagcctgggaaaaaaaaaaaaaattcgtagtgaaggatctgaatgacttccagagatctg

SEQ ID NO: 92092 - DNA, 509 bp, Homo sapiens
gttaggagtgccccgggtcaccacgagcagccctcggagggaggggctgtgcttcccaggtggggctctgagccagccccaggagcccctggtcacggcactgactctgttcccccacttgggatctgccctgggtggtctgcattcctgccacgcccccaggtggccctggagcagcacagaagcctgctttggagacacacgtggtccggacctgtcagagctggggagctgccacctccgggctgtgctcagtgagtcaggtggtacggccgccttcacccacggcagggtgtaactgcgaatgcccttctgggcagtggcagacagaaggaaggtgccctgaaaagctccctgccttggatccagtgagcccacgtggggcagtttattgcaagggagggaaagagagggaggcctgcacgaaggcccgtgtaggacagacacacatcgattcaggagactgaaacaccacagagccaataactagcggccggttaaaccaatca

SEQ ID NO: 92093 - DNA, 419 bp, Homo sapiens
gagaaacggcccccatgattcaattatctccaccaggttcctcccacatgtggggattatggaaactacaattcaagatgagatttgggtagggacacaaagcctaaccatatcacttgtttaagtttatccagcccaatttttactttgacaaccatcagacatcagaagtcacctttcaaaaaaaatgtgacatgcatttcaacaataatttaaaaattctcaggatgacctttgtctttaggctaccacatgcttatggtaccaaacttgttaatctcatcggatttacaacatggtatctacattaaggatgttggccaacattcctggctgctattagaatgatatgtccagataaccccatctttagaaatcatatgtaagtaccttttcagttatggaaccaaacttgcctt

SEQ ID NO: 92094 - DNA, 430 bp, Homo sapiens
cagggacagtggctcatgcctgcaatcccagcactttgggaggccgaggtgggcagatcatctgaggccaggagtttaagaccagcctggccaatgtggtgaaaccccatctctactaaaaaaaatacaaaaattagctgggtgtgttggcacgtgcctgtaatttcagctactcgggaggctgaggcaggagcatcccttgaacccctggaaggcagaggttgcagtgagctgagattgctgccattgcattccagcttgggcaacaagagtgaaactctgtctcaaaaaaaaacaaacaaacaaacaaaaaaaacccactttagtgcattttaaaggatgtccttttgttttagtatttttccagtttggacaaagctgtcccacagtgaccaataatcaggaagtttgcttattggcttgaccgtct

SEQ ID NO: 92095 - DNA, 441 bp, Homo sapiens
ctttttagtttcctttaaaacagaacagttcctcagccttttgtatgtgtcgtaacaatgtcacttttcaaaagttaagtctagctgtttgcggaacgaccctcaacttgaatttgattattttttcatgattagattcaggttagacagttttgtcagcaatactacataaacaatgtatcttttttagtgcatcacaccatgagtcaataaataatgcaaaatatttagaagaattggactctgaagaaattatagaaataactttttcttattttcttttcatatatgcacaagagtgatatataataaatctgaatgagctataaatagttttaaaaatatgcataatattccgggcgtgagcaccgcgcccggccgcaagtttttttttccaacaacctcaccatcacttatgttttgtcttttggtaatagccat

SEQ ID NO: 92096 - DNA, 454 bp, Homo sapiens
tcagagaagcaatagatgaccatgggaatgttaacactgttgttggagagactctagatatgcagccaaaggaacttttggagatatttcacaacatcaaaagttcagaggacaaagtactgaaagtgtgtcaagtagacagtattatgacaatttgccaaggcaagaaatgaagctcatttggtattctaagctgtaccacggggaggaggcaagcaccgtttaaactactcataatgagttttcacaagaaaataaaacatttaaattctcagtgtttctaatgttttgaattacaggatacaaaatcctatattagctttactatttttttcatttccttttacctttataagagacagtaaaggaaattcttaatgttttgacaataaatttaaaggtcatgggaacaaccataatttttcctattaatcatcaagatcctgcacaattt

SEQ ID NO: 92097 - DNA, 412 bp, Homo sapiens
tagttatgtgccagacactgtgctaaacacttagatggaatattttattccatattagctctatgaggtagggacaattattatccccatttacagatgacaaaattgaaagttaggggagtcatgtagcttacctaatgttacagaggtaaagtggctgagatgaattctgatccctggaatgggcatcatttagaggggtggttcccaaaagccagtccacagactgtcttgttctctaatatataaaaaataattcagcaacatctaggagcataaatccagagattctgaatcagtagttcttggatggggcccagaaatctgaatttttttttccttttcaatgattacattttagtttactgtacaatgaaacagagaaaactacttttttttttttttttttttt

SEQ ID NO: 92098 - DNA, 1102 bp, Homo sapiens
  misc_feature (417)..(417): n is a, c, g, or t
tgtgatgtttcttttttagcctgttgatgtggtgaattgtactgattgatatttgaatattaaactggctttgcatccctagaatatacctcaccaggtcactgtgtactaggttggtgcaaaagtgcttgccattttggaccatgaattttgaatcattaaaactaggctcaaacacatctgtattaatcaaagtaagaaccattacaatcaacacaattttgccaacaagaaataagtttgtttactcctgtagcataaaaatccgtgctttgagattcgaggaacttttggaaagcactttctgcatcctgctggttgtggaagcgttttccctgcaaaaagttgtcaagatgcttgaagaagtggtagtcggttggtgagaggtcaggtgaatatggtggataaggcaaaacntcatagcccaattagttcaacttttgaagcgttggttgtgcaacatgcagtcaggcattattgtggagaataactcggccctttctgttgactaatgccagctgcagggattacagttttcagtgcatcctatcgatttgctgagcaaacttctcagctataatggtttcaccaggaatcagaaagctgtagtggatcagaccggcagcagaccaccaaacagtgaccatgacctattttgggtgcaagtttggcttggggaattgctttggagcttcttctcagtccaaccctgagctggtcatcacaggttgttgtataaaatccacttttcgtcacacgtcacaatctgatcaagaaatggctcattgatgttgtgtaaaataagtgaagatgacactccaaaacgacgatttctttgattttcactcagctcatgagacacccacttatcgagattttcacctttccaatttgcttcaaatgccaaaagaccatagaatggtcgacgtcgagttctttggcaacttctcatatagttgtaagaggatcagcttctcaattggtcattgttaactcccaatggccagccaatatgctcctcatcttcaaggctcttgtctcctgtgcaaaacttcttgaacatgactgtactgtaggcttattagcagttcctgggccaaag

SEQ ID NO: 92099 - DNA, 151 bp, Homo sapiens
tcccgtcacagcattaccgtgtgagctccgcctcccgccagagcattaccgtgtgagctccgcctcccgtccgagcattaccgtgtgagctccgcctcccgccagagcattaccgtgtgagctccgcctcccgccacagcattaccgtgtg

SEQ ID NO: 92100 - DNA, 280 bp, Homo sapiens
taccaatcagagttgtgtcatcaacctatatgaagatagtataaaaaaagtaattgtggcagtgatggctgtatttactgcaccgatgttgaagatatcacttaatacagattaattgtgcacactttctgaaaaatcacaggagacatttgttctgttctcagagaatattataattctcacagcaactgatctgtttagttgatgggtactgtaaattatgataatgctcattttctctcttgctttggctttcagaaagaccacagccaactttcta

SEQ ID NO: 92101 - DNA, 586 bp, Homo sapiens
taggaattattaaagtcctgtcagagtttatactgaacctctgacttgattttatccagctcatcaaagcaaaattgtcttagtagcactcttttgtagctgtttaatatttaatattcagtgggctccttaaggtgagttcttgaaggcttgtgagtagttgaagagctgtgaatggtggttaacaagctattatcatctccttgaaaagcataacatgaagcagagattcaggaaaatcttagacagtgattagtctatctgacagtgcatcaaaactaaattagttggccaagcacggtggctcacgcctgtaatgccagtactttgagaggccaaggcaggtgggtcatttgaggtcaggagttcgagaacagcctggccagcatggtgaaggcctgtctactaaaaatacaaaaattagctgggtgtggttgtgcacgcctgtagtcccagctacttgggaggctgagccaggataattgctcaaacccgggaggtggaggttgcagtgagccaagattgcgccactacaatccagccttccagcctgggcaacagagtgagattccatctcaaaaaaaaa

SEQ ID NO: 92102 - DNA, 305 bp, Homo sapiens
gtgagctaggattgtgccgctttactccagcctgggtgacagagcaagacccccgtctcagaaaaaagggaaacaaactgaaaacatgattgtaatgcagagaactgcaaaagacaactttaaaaacaatgctgaagcagtaaattacataaccgatgatacaaaaatttaagttgctgataaaacatacactggagaaaaacaatactaaagaatagataatggggtgatgtatctgaagaataaagtttgtaaaactagtaataacaggaggcctaaaagaaaaacagatagtaaaattggca

SEQ ID NO: 92103 - DNA, 642 bp, Homo sapiens
aaaatacattgacactgaaatgtcaatgggcaaacaccaatttcgccgttcattatgaaatacatcaaacaaaacttgccaaaaatacaaccataaaaatatagcaaatgtatgtatgagcaaactaatgctaaaaatgtctaattttcttggctagtctttcaaggaccagattcatgagtgttatttgaagggaaaaagtgaaatacttggaattattttgagtgatgtgctcctgagcttgttcttaaaatctaccagtggtagcttttggaaagaatgtgtttcataccgatgtgcaggcctcactggaagagcttcaagaggagtttgtgaaactcaaagtctaatggttttgattagaaacttccaggcaaatactctagagaaacttgggtgtaaaatgactaaacagatgaaaaggctttatccactattccatttgctccttacaccttaaaaagcttttttattttttaatgttttgatatatctagctttggggagaaagcagtgcaagagtgttattaaaagcagcttgtgttttcttgcacctttcacaccacccaggaaagaaaagttcaggcttaacagtgacatggctatcacatcatctgaataaattttttccttctaaaatta

SEQ ID NO: 92104 - DNA, 637 bp, Homo sapiens
ggtttcttaagtggggtgactttatggcatctttaatcatcgatcaatgggcagcaatcagaaacaaagttctcagcattatgcagttaatgtccttcatctacttctaacacttagtaaaggaattgattggctaggtataaaaagagaattaacgaaacctattttattggatctttaagtaataatatctaaatacatttcgttcaaacatacatatgtagctgtttggacattttggacaaagacacattgagttgatttttatttgtttttctgttccagaaacttcatcaagttacgggcctggtctaagaaaacacattgcaatctattttggcagacttctttcaaataaaatactaatttcattagctgatagtatagtaattggcaaacatttcctctttggaaataccaatttgggctagccattttgcagaaatttgtgtagttttgattataacctgttggagagcatttctaaattacttatacataaaagataatcttttttttgtttgtttttttgaggggaagtctcggtctgttgcccaggctggagagcagtggtgcgatctcggctctctgcaacctccgccccttgggttcaagcgattcttgtgcctcagcctcc

SEQ ID NO: 92105 - DNA, 828 bp, Homo sapiens
ggtttcttaagtggggtgactttatggcatctttaatcatcgatcaatgggcagcaatcagaaacaaagttctcagcattatgcagttaatgtccttcatctacttctaacacttagtaaaggaattgattggctaggtataaaaagagaattaacgaaacctattttattggatctttaagtaataatatctaaatacatttcgttcaaacatacatatgtagctgtttggacattttggacaaagacacattgagttgatttttatttgtttttctgttccagaaacttcatcaagttacgggcctggtctaagaaaacacattgcaatctattttggcagacttctttcaaataaaatactaatttcattagctgatagtatagtaattggcaaacatttcctctttggaaataccaatttgggctagccattttgcagaaatttgtgtagttttgattataacctgttggagagcatttctaaattacttatacataaaagataatcttttttttgtttgtttttttgaggggaagtctcggtctgttgcccaggctggagagcatgagccgagatcacgccagcgtactccagcctgggcgacagagcaagactccgtctcttcaaaaaaaaaaaaaaaaaagaaaaagaaaaaggaaaaaaaaaaagaatcatggctaggtaataaagtaaactggagattcactctcttcattagggtgggagccaagaatgtgcattgttgttgtgtatcctcagtgattcttataaggtggtccccacactacactttgagaaacagcaaataaaaggacttctttctc

SEQ ID NO: 92106 - DNA, 404 bp, Homo sapiens
gaaaaagaaagcagactacacccccgggtacttacataaatgagatcatttctgtaaacacagcgcagtagcagcatctagtataataagcactcaataaatacgagctattattgctgaggcaatgcatattggggctctttttctccatcctcttgtgtagcctaagtttgcagctgtgtttggcagccgcctcatactaatgaagcacactgggcttgggatcatttcagacctgcagatctcttttgcatgaaatgcaatggggccggggctccctcttctgcatttgtgcacctgcttttaagaacataatgaatgattggcatttgtctcttttcatttcatctaggctttggcccatcatcctaacctgttggcttcattttgaattttggattttg

SEQ ID NO: 92107 - DNA, 371 bp, Homo sapiens
tggctttttcctaaaaactaaaacaaaaacattcatagcaaagcagtttagcccagtgactaagagtatagacattggaatctgaaagatctgggttggaattctgcttcagccatttactaattatgtaacttcacatctctgagaatgggggaaattttctttgcagggttgttacaaagcttaaaagagttaagtcaagtgccctggaacagaacagccattcaataaatcatagaaatttttgtttttacacaaatttttaaaaagtaatattttttgcatttgttagaaagactatattttctgtttagtggatgacatcatcatcataaaaatcactgttacaagttttgttttgagaattaaaa

SEQ ID NO: 92108 - DNA, 365 bp, Homo sapiens
gaagtgccatttatatttatacaaaaatattacataattcagttagtattggtgacataatttagttagtatgggtgatataatggtcataatttttagcatctaataaagatctttttatgagtcccatataaaatatgtgaacaaagcaatcttgtcataagatttgtgatgatttaggagaaagtactttgagataatttttttctgtctctttgtgaactctctcaacagtagttctctttagattagagccagcaggtcggccataacagttttcttcaaatttgggcaacagttatacaaatgcttgaatttcaagacaacatattaaagggtctatgaactgaaaatctaacctggtt

SEQ ID NO: 92109 - DNA, 294 bp, Homo sapiens
tatagttccagaatatttttgtctttaacattactatatgtatttctaacatgtttcaagcacagtgtgttcaaaatagagtccttttttcccctctcattccaatctatcccatcttgagtctcctttatttcagtcaataaaacagaatcatcaaaattcatacatgtacatataattaattgtttctcaaataaaaaacataatccttatagtttttgttcctcagtttctctcaaacttcaattcttttataaaactttacatgcaaacagtagcagacatctgtatatt

SEQ ID NO: 92110 - DNA, 147 bp, Homo sapiens
cagagggatctgacctcccctcccccttagattataaggccttctagggggtggaatcttatttgattcctattgcacatggaccaacatgcactaacatcatgaactagaagtttcattgctgctagctgcagtgcctggagcatc

SEQ ID NO: 92111 - DNA, 206 bp, Homo sapiens
gtgctgaaattaaagctgtgagctgctgtgctggcctcatcctttccttttgataccaggtgcacatcttggagtttgtcttgaaaacctctgcctttcattcctgtgatcctcagcttttcttgatttcttctgactgtgaagactcctcctttacccagggtttagccccacagggtttctttctcagccctccacaggcctct

SEQ ID NO: 92112 - DNA, 543 bp, Homo sapiens
  misc_feature (58)..(58): n is a, c, g, or t
  misc_feature (209)..(209): n is a, c, g, or t
  misc_feature (249)..(249): n is a, c, g, or t
ggggtttcctgcttcaacagtgcttggacggaacccggcgctcgttccccaccccggncgccgcccatagccagccctccgtcacctcttcaccgcaccctcggactgccccaaggcccccgccgccgctccagcgccgcgcagccaccgccgccgccgccgcctctccttagtcggcggcggcggcggtggttctccttagtcgccgncatgacgaccgcgtccacctcgcaggtgcgccagaactancaccaggactcagaggccgccatcaaccgccagatcaacctggagctctacgcctcctacgtttacctgtccatgtcttactactttgaccgcgatgatgtggctttgaagaactttgccaaatactttcttcaccaatctcatgaggagagggaacatgctgagaaactgatgaagctgcagaaccaacgaggtggccgaatcttccttcaggatatcaagaaaccagactgtgatgactgggagagcgggctgaatgcgatggagtgtgcattacatttggaaaaaagtgtg

SEQ ID NO: 92113 - DNA, 477 bp, Homo sapiens
  misc_feature (58)..(58): n is a, c, g, or t
  misc_feature (143)..(143): n is a, c, g, or t
  misc_feature (183)..(183): n is a, c, g, or t
ggggtttcctgcttcaacagtgcttggacggaacccggcgctcgttccccaccccggncgccgcccatagccagccctccgtcacctcttcaccgcaccctcggactgccccaaggcccccgccgcctctccttagtcgccgncatgacgaccgcgtccacctcgcaggtgcgccagaactancaccaggactcagaggccgccatcaaccgccagatcaacctggagctctacgcctcctacgtttacctgtccatgtcttactactttgaccgcgatgatgtggctttgaagaactttgccaaatactttcttcaccaatctcatgaggagagggaacatgctgagaaactgatgaagctgcagaaccaacgaggtggccgaatcttccttcaggatatcaagaaaccagactgtgatgactgggagagcgggctgaatgcgatggagtgtgcattacatttggaaaaaagtgtg

SEQ ID NO: 92114 - DNA, 226 bp, Homo sapiens
ggtgtggcgctctgaggatccccctctcctcatgagatggtgaagaaagtattggcaatttcttcaccaatctcatgaggagagggaacatgctgagaaactgatgaagctgcagaaccaacgaggtggccgaatcttccttcaggatatcaagaaaccagactgtgatgactgggagagcgggctgaatgcgatggagtgtgcattacatttggaaaaaagtgtg

SEQ ID NO: 92115 - DNA, 1870 bp, Homo sapiens
tccattcttttcaatataggctttaattcaaaatgcactcaaggagagggaagggagggactaggacactgtttagaaggggtaattacactaaatacactgaccttcgctgaaaaatagaagggacaggtggctacagaagccagctcttaccccttttgccgtccccaccccataccccaaaccatcttggtttcttgactcctctggtccagtaagaacctacaaacgtgtttgtttgtttttgttttaacacttgaggttgtgattaaacaatccccaactcgtcttcatctcttttttctgaagttgcttttattaattgaatttttaaaaatctggtttcatctccacgtgcattttcccatcgttcttcagatttaggagaaacccacggaggcgcggcgctctccacagccgtctctaatgaagggaagcgtgcctcgaagtcagtcccggtgcgccccctcctcccccggcgccccttcccaaaccccgtcggatctccaaaggctggaataggcggtgcggctgtagcccgcgctgtaatcgtaggacacctgatggggcggcggcggcgggggcagggcgcagtctggaaagaagggggcgaaagaggccaaatggccccggcccgtcctccccgccgggagaatccgcagcggcggggtacagggggctcaagggctcgttcaaggtcaagccgccgcggggggcagtcagggggctctttttggtcggggagcagcccgggacgctccagggctcggggtacagtaggtttcccaccactgccggcggcggctcaaagaggccgggctccagctccgggggtccccgcagtacggaggctccggcggggaacacgtcgagaggctcggcggcaagcaagactgccgcctccgtgccggcgccgtagtcgggccccagcagctcaaagaactccacggcctccgcgcccttctccaggtcgcccaagctcacgtccggccccgacgggccacacccgccgccgcctgcccgggacggctccgtgaagaaggacggaggcagattgcgtgcccgcagcgggaccttcctggcccctgggatcgccgtggcccccgcggggcctgccacgtcccctcccgcgcccccagtgcccgcacctcctagcccggccgccggcgcagccacctcaccccccgccggctcggcacccccggggacgtggcgcagcgagtcgaagagcgcggccagacttcggctttgcaagctggcggccgcggcggcctgcgacgcctcccgccggggggcagccttgccgtgggccggggccgcgactgtcggggcgctaggggcggccagcggccgtttggctggcgtgtcggcggcgctcggggagggcgggccggggggcgcggcgcccatgaggccgctgcagcgcttgatctgcttctgcaggtacttgcggtggttcaccttccgcttcgacttgcccggcttgtccagcgccagcttgatgttgctggacgccgagtcaatgaagctgagtagatcgcgggtggcctcgcgcacgtcccctccttcggctcccgacagcagcgcacccgccggagccccggtctcatcgtcctcgaaacagcagcccttgtccagggctccgaaggcgccccctagcccgtccggggagcccccgaagccgaagggcacgaaagggtgcgtgctgaggagcgccgcctgcaccgccatcgccgcggctcccgggctgtccgcagcgctgcccgtgcgcccccgccagctcctgcccgccgcccagacccagctcccgccccggcgcggcgcgcgcggcgcagcctactagttccgggcctggctcgctgcgctgcct

SEQ ID NO: 92116 - DNA, 1895 bp, Homo sapiens
ccaccccagaagtttgttaaataaataatttcaatgcaaaaagggctttaattcaaaacccatccaagaaatggaaagcgatttaatagaaaagcttttaatacgggtaattacactaaatacactgaccttcgctgaaaaatagaagggacaggtggctacagaagccagctcttaccccttttgccgtccccaccccataccccaaaccatcttggtttcttgactcctctggtccagtaagaacctacaaacgtgtttgtttgtttttgttttaacacttgaggttgtgattaaacaatccccaactcgtcttcatctcttttttctgaagttgcttttattaattgaatttttaaaaatctggtttcatctccacgtgcattttcccatcgttcttcagatttaggagaaacccacggaggcgcggcgctctccacagccgtctctaatgaagggaagcgtgcctcgaagtcagtcccggtgcgccccctcctcccccggcgccccttcccaaaccccgtcggatctccaaaggctggaataggcggtgcggctgtagcccgcgctgtaatcgtaggacacctgatggggcggcggcggcgggggcagggcgcagtctggaaagaagggggcgaaagaggccaaatggccccggcccgtcctccccgccgggagaatccgcagcggcggggtacagggggctcaagggctcgttcaaggtcaagccgccgcggggggcagtcagggggctctttttggtcggggagcagcccgggacgctccagggctcggggtacagtaggtttcccaccactgccggcggcggctcaaagaggccgggctccagctccgggggtccccgcagtacggaggctccggcggggaacacgtcgagaggctcggcggcaagcaagactgccgcctccgtgccggcgccgtagtcgggccccagcagctcaaagaactccacggcctccgcgcccttctccaggtcgcccaagctcacgtccggccccgacgggccacacccgccgccgcctgcccgggacggctccgtgaagaaggacggaggcagattgcgtgcccgcagcgggaccttcctggcccctgggatcgccgtggcccccgcggggcctgccacgtcccctcccgcgcccccagtgcccgcacctcctagcccggccgccggcgcagccacctcaccccccgccggctcggcacccccggggacgtggcgcagcgagtcgaagagcgcggccagacttcggctttgcaagctggcggccgcggcggcctgcgacgcctcccgccggggggcagccttgccgtgggccggggccgcgactgtcggggcgctaggggcggccagcggccgtttggctggcgtgtcggcggcgctcggggagggcgggccggggggcgcggcgcccatgaggccgctgcagcgcttgatctgcttctgcaggtacttgcggtggttcaccttccgcttcgacttgcccggcttgtccagcgccagcttgatgttgctggacgccgagtcaatgaagctgagtagatcgcgggtggcctcgcgcacgtcccctccttcggctcccgacagcagcgcacccgccggagccccggtctcatcgtcctcgaaacagcagcccttgtccagggctccgaaggcgccccctagcccgtccggggagcccccgaagccgaagggcacgaaagggtgcgtgctgaggagcgccgcctgcaccgccatcgccgcggctcccgggctgtccgcagcgctgcccgtgcgcccccgccagctcctgcccgccgcccagacccagctcccgccccggcgcggcgcgcgcggcgcagcctactagttccgggcctggctcgctgcgctgcct

SEQ ID NO: 92117 - DNA, 1059 bp, Homo sapiens
tccattcttttcaatataggctttaattcaaaatgcactcaaggagagggaagggagggactaggacactgtttagaaggggtaattacactaaatacactgaccttcgctgaaaaatagaagggacaggtggctacagaagccagctcttaccccttttgccgtccccaccccataccccaaaccatcttggtttcttgactcctctggtccagtaagaacctacaaacgtgtttgtttgtttttgttttaacacttgaggttgtgattaaacaatccccaactcgtcttcatctcttttttctgaagttgcttttattaattgaatttttaaaaatctggtttcatctccacgtgcattttcccatcgttcttcagatttaggagaaacccacggaggcgcggcgctctccacagccgtctctaatgaagggaagcgtgcctcgaagtcagtcccggtgcgccccctcctcccccggcgccccttcccaaaccccgtcggatctccaaaggctggaataggcggtgcggctgtagcccgcgctgtaatcgtaggacacctgatggggcggcggcggcgggggcagggcgcagtctggaaagaagggggcgaaagaggccaaatggccccggcccgtcctccccgccgggagaatccgcagcggcggggtacagggggctcaagggctcgttcaaggtcaagccgccgcggggggcagtcagggggctctttttggtcggggagcagcccgggacgctccagggctcggggtacagtaggtttcccaccactgccggcggcggctcaaagaggccgggctccagctccgggggtccccgcagtacggaggctccggcggggaacacgtcgagaggctcggcggcaagcaagactgccgcctccgtgccggcgccgtaatcgccgcggctcccgggctgtccgcagcgctgcccgtgcgcccccgccagctcctgcccgccgcccagacccagctcccgccccggcgcggcgcgcgcggcgcagcctactagttccgggcctggctcgctgcgctgcct

SEQ ID NO: 92118 - DNA, 621 bp, Homo sapiens
taagcattaacattttcctatcagttaagctttgtagctcccaggttaaaaaagcacctgatcttcaaaaaatacagttgaatgagtcatctaattaataaatagtatttaatgatgctttagatcattttcatttttaaaagttataatgaatataaagaatctatcagtaagatgttgtgtccatcagtaaaagctattggaatggaaatttgattttggcttgtaaagcaaaatgtatctgaaacagatctcagtcaatttagtttattttgccaaggttaagggcatgcacctaggagacaggtctgtgcctttctctgaagatgagaatattgagacttcatatttaaagggaaaaggcaggctggaggggaaagaagaaggtggtcacattactgaatccacatgttgcaagagtgaacactttacagacaataaggtgaacatagagtaactacctgtggagatatttaacctcttatctgtagctctctgcttaggagcaaaaggaaaggcagcttcttgcgtgactcagctttcagcttaatcttcttccctttggcagagtgaattgggggtcccaagtttttattttcctttcacagacataatttcatg

SEQ ID NO: 92119 - DNA, 675 bp, Homo sapiens
taagcattaacattttcctatcagttaagctttgtagctcccaggttaaaaaagcacctgatcttcaaaaaatacagttgaatgagtcatctaattaataaatagtatttaatgatgctttagatcattttcatttttaaaagttataatgaatataaagaatctatcagtaagatgttgtgtccatcagtaaaagctattggaatggaaatttgattttggcttgtaaagcaaaatgtatctgaaacagatctcagtcaatttagtttattttgccaaggttaagggcatgcacctaggagacaggtctgtgcctttctctgaagatgagaatattgagacttcatatttaaagggaaaaggcaggctggaggggaaagaagaaggtggtcacattactgaatccacatgttgcaagagaaaagaaatagataggggaatagtcaattatgtattcatctcacgctcagtaaatgaacactttacagacaataaggtgaacatagagtaactacctgtggagatatttaacctcttatctgtagctctctgcttaggagcaaaaggaaaggcagcttcttgcgtgactcagctttcagcttaatcttcttccctttggcagagtgaattgggggtcccaagtttttattttcctttcacagacataatttcatg

SEQ ID NO: 92120 - DNA, 370 bp, Homo sapiens
aataattaccgggtaattagatggcaggcatgataggtgccgggtactggtttccaaggggacttcgaaaaggtattctgccgccctatgcctcctcccagtacaaggcacagttaatgcctcagatcccacaccgcctctctcgtggaagtgtgctctgagccactggggcctaagccgagttgacaggctccattagagagcgactctgtcatggaaattgtgatcttaacagagggacatgtggcagataccaattccactcacatccttgtactacgtggctttcccagggggctacttgatgggatcaagggatgttcacaccaccagtccccaactgccttcatctgacctgacctgtacggcc

SEQ ID NO: 92121 - DNA, 288 bp, Homo sapiens
ggcagtggggaagaggagagacacactgttcagagctctggcaagatcagacactgaggaagtacagtgtctgtgaggctctgatgaagggcgcaggtttcctctctgttaacagctagccgggcacaggtggagctgctgaacctgaggctcaggcctcagttctctgcctgtgcttgctgcatcccctggctcacaagtcaaacttcaggcaggcaagaaggggaagaggtgtcttccttaaaatagcttgcacttgaatttgaaattgtctcagtccctgggcta

SEQ ID NO: 92122 - DNA, 906 bp, Homo sapiens
attcacaggaagtcaaaaaaggacctatttcaattatgtctgcttgaatcctgtttaattgtttccctggctgagtagctagtgtgacacagcagcaagactaaaggggctctgtggtccacattgtcctcgagtctattcttgcccattatagacctgcccattggtgctcactcactgcatcccaggaggcttgactgtcctcaggaagcatgttggggtgcccttaagggtaagtatcccggggagcacagtttggagaaaaccaatacgtcttcatgtatgttgagaagcgctgggccaaagtacagactttttttttttttttttttttgggggaaaaaacctgggttttgtcccccgaggggggggggcggggggccccccgggcgtggtgggcaccctccaacgcctcccgggggtcacaacggcacactccctcccacctataaagctccccgggaggaaagcggggagacaacggggggtgcatatttcacaatgtgccggagctaaaactttccacgcggagtattttactcaacataaaggcaaggaggggcacacatatatggttagccccagggctgtcgcctcgggagaactctctggggggcacaaggaaagccctcccaactcggggcccccccaaaaggggctgggatatcaggcaccggctttgacccaccaaaagctggggcctaactgtggcgagaatttgcggaactcttggtggcctgccacccccagaaggcagaagaattcccctgggagcgaagccaaactatcattcagggcgagaggtcttcgagaaaccgggggtgcgaactgtaaacagtgattcaacaacagttcccgggcacaacaggggggcggcccctctaaatcatggaaagagacgggttg

SEQ ID NO: 92123 - DNA, 843 bp, Homo sapiens
gaaatccacgcatttacagccaactcatttttgaaaaaggcaagaagaataatcactggggaaaggacagtctcttcaataaatccagctgggaaaactatatgaccatacacagaagaataaagctagatccctatttctcatcatatacagaaatcaactcaaaatggatttaaaaacttaaatctggctaggcgtaatggctcacacctgtaagcccagcactttgggagaccaaggcgggcagactgcttgagctcaggagtttgggaccagcctggtgaaaccaggtctttatccaaaatacagaaaattagctggatgtggcagtgcatgtttgtggtcccagctacttaggaggctgaggtgggaggatcacttgagccccggagttcaaggctacagtgagctgtgattgtgccataattcactgcagcttgaatgacagagtgagaccttgtcttaaaaaaaaaaaaaaaaaaaaagtgtaaatctcatacctgaaactattaaactactagaagaaaacactgcaaaaatgcctcaggacattggtctgggcaaaaactttttgggttggacctcaaaaacacaggcaacaaaggtaaatgtaggcaaatgggagcacatcaagctaaaaagcttctgcagagcaaaggaaacaacaaagtgaagagataacctgtttataataggagaaaacacctgtaaactatccatccaatgaaggattaataaccagaattacaaggaactcaaaagcaaaacaacaaataatccaattgtaaaatgggctaaagatttcaataaaaagaagacatacaaatagccaacacgtacatg

SEQ ID NO: 92124 - DNA, 2275 bp, Homo sapiens
gagtaaggtaatgctttgtgactgatatctactaatagacttctgttactttgggcctcacataaaatttctcacattcgtattcttagagaattttatacttttttattataagtattttgcccttgagtccatgaaacttcaatagaaaatattgcttatacaataattagcttaaaatccatccaaaggaaaagagaagagctttttttgagtgttaagttttttaatttagttttctgtttggaaaagatgttaagagttcaaatatgcttcttatgtaacagaaataccattatttctggggtttagtgacacaggctggagaggacaaaagtttcctgtcctgaatgatttttcaattaatgctctaagcttaacccatgttgggtaatagaaagacatagccagcagtattactacgtagaccttgcacatcttacttttgttttgcatttttaaaaatttcttaatttgtttatttctcttcagaaatagcgtttttaacagtgtatgtgcttttttaaaaagtattgtgaatgagaaccctgtggattttttttatttcatttgtttgtcataataagctaacgtagaaatgttgtaggttaaccatatctgtggaaatatgcagttggaagtcagagcctgacatcacatagtttgccaaagggagagagctaagctggaagatgtttttgatactttcggctctaaacattaatggatgtttgcgtagagtaagatagcgttcaaatttggttaatagtttatagatagacttgtggcctctgactgactaaatttcttaacagcacagaagtcgttgtttttctgtctttaaaatttattcattcagaaaattagtcattgctttttaagattattttagcatttgaagcaaattgaaaacagaaaagtgacttaaaatagtgtaggtgaattttttatctataatttaccaaataatacctgataataattcaaagaaaatatgttaccaaaatatattaaatatataggtagttcattcgtgggaagatgaatcttcttattaagcctgccctcaattgtaaataagtgactcaaaaactcaaaatgttcatcagcattcaggtcatttgtttcacccttagccaagaagaactcattagaaattcagttataatttcaatttaagcctgtttatgataagcataatgattggcatgttatatagcctgttgaaaataactacagaatgaccttccagagcactgtttttggcctcgtgcccgctctgttcaggctctgcttgtttttcagaatatgatttttacctccagacagtaagaattgaacaagaactgatcaaacacaccttcctattttgttttcttcactatgtaaatattatttgggcaaacattacaaaaagggatccaaacaatttgagtttcagtatttttttctccctaggcatgtgcttcaatttcaaatatttttttctgtgtggaaaatgccatgtaactattgcactaccttctgtgtggactgtgttggtattggttctttctgtatatcaaaagtcagggtgtttataactgcaaagtttgtataagtggctttattcctcttctagaagatttatgaggagcctaggaagcactattggtacaggaggaaaaaagaatggaaaacatgtttacagactctagctttccttattagcttaaactggggccctcaaagagcagcctgttgatcttttggccaaatgacttgagcataagtcttttatttctttttaaggttaaatcgtaaactgtatacctttactactgaaaacaaaactatagggcatcatactaattgaaaatcaatagtaatgggttccatccattagctttttaaatgaatagatctggtattgatttccttcctgtttttttgaggcacattcctttacaaccagtgtttaaaccaccacgtaatcatcttctgcaaacaaggggtgccagtgttgcctaacagaagataatctttaataaagcaaatcctctgcttcaaaggtttttgaaataattggatccctttttgaaaaggaagatgagtttaactgtgtccaggtggagtaatagtactgctgttgcatgaatagatgatacaaagcaagtgatgaggttggtatgacttctttagtgaccttttagggtttgcttttattttcctctcttttttgtattatttctttcaaacatagtaaatatatgattttacagccaaaaaaaaaaaa

SEQ ID NO: 92125 - DNA, 2258 bp, Homo sapiens
gagtaaggtaatgctttgtgactgatatctactaatagacttctgttactttgggcctcacataaaatttctcacattcgtattcttagagaattttatacttttttattataagtattttgcccttgagtccatgaaacttcaatagaaaatattgcttatacaataattagcttaaaatccatccaaaggaaaagagaagagctttttttgagtgttaagttttttaatttagttttctgtttggaaaagatgttaagagttcaaatatgcttcttatgtaacagaaataccattatttctggggtttagtgacacaggctggagaggacaaaagtttcctgtcctgaatgatttttcaattaatgctctaagcttaacccatgttgggtaatagaaagacatagccagcagtattactacgtagaccttgcacatcttacttttgttttgcatttttaaaaatttcttaatttgtttatttctcttcagaaatagcgtttttaacagtgtatgtgcttttttaaaaagtattgtgaatgagaaccctgtggattttttttatttcatttgtttgtcataataagctaacgtagaaatgttgtaggttaaccatatctgtggaaatatgcagttggaagtcagagcctgacatcacatagtttgccaaagggagagagctaagctggaagatgtttttgatactttcggctctaaacattaatggatgtttgcgtagagtaagatagcgttcaaatttggttaatagtttatagatagacttgtggcctctgactgactaaatttcttaacagcacagaagtcgttgtttttctgtctttaaaatttattcattcagaaaattagtcattgctttttaagattattttagcatttgaagcaaattgaaaacagaaaagtgacttaaaatagtgtaggtgaattttttatctataatttaccaaataatacctgataataattcaaagaaaatatgttaccaaaatatattaaatatataggtagttcattcgtgggaagatgaatcttcttattaagcctgccctcaattgtaaataagtgactcaaaaactcaaaatgttcatcagcattcaggtcatttgtttcacccttagccaagaagaactcattagaaattcagttataatttcaatttaagcctgtttatgataagcataatgattggcatgttatatagcctgttgaaaataactacagaatgaccttccagagcactgtttttggcctcgtgcccgctctgttcaggctctgcttgtttttcagaatatgatttttacctccagacagtaagaattgaacaagaactgatcaaacacaccttcctattttgttttcttcactatgtaaatattatttgggcaaacattacaaaaagggatccaaacaatttgagtttcagtatttttttctccctaggcatgtgcttcaatttcaaatatttttttctgtgtggaaaatgccatgtaactattgcactaccttctgtgtggactgtgttggtattggttctttctgtatatcaaaagtcagggtgtttataactgcaaagtttgtataagtggctttattcctcttctagaagatttatgaggagcctaggaagcactattggtacaggaggaaaaaagaatggaaaacatgtttacagactctagctttccttattagcttaaactggggccctcaaagagcagcctgttgatcttttggccaaatgacttgagcataagtcttttatttctttttaaggttaaatcgtaaactgtatacctttactactgaaaacaaaactatagggcatcatactaattgaaaatcaatagtaatgggttccatccattagctttttaaatgaatagatctggtattgatttccttcctgtttttttgaggcacattcctttacaaccagtgtttaaaccaccacgtaatcatcttctgcaaacaaggggtgccagtgttgcctaacagaagataatctttaataaagcaaatcctctgcttcaaaggtttttgaaataattggatccctttttgaaaaggaagatgagtttaactgtgtccaggtggagtaatagtactgctgttgcatgaatagatgatacaaagcaagtgatgaggttggtatgacttctttagtgaccttttagggtttgcttttattttcctctcttttttggctgtaaaatcatatatttactatgtttgaaagaaat

SEQ ID NO: 92126 - DNA, 404 bp, Homo sapiens
gtgttaaattaattttaataaattatataattactacatattgtaaaataaagaccggtattttattttctgccccccgcaaaaaaaaaaaaaaaaaaatttttgcccccccccccttttttccccttttggggggccccttttttttccccaaaaaaaaagggggcctttttcttcttttggggaaaaataattggatccctttttgaaaaggaagatgagtttaactgtgtccaggtggagtaatagtactgctgttgcatgaatagatgatacaaagcaagtgatgaggttggtatgacttctttagtgaccttttagggtttgcttttattttcctctcttttttgtattatttctttcaaacatagtaaatatatgattttacagccaaaaaaaaaaaa

SEQ ID NO: 92127 - DNA, 2221 bp, Homo sapiens
gagtaaggtaatgctttgtgactgatatctactaatagacttctgttactttgggcctcacataaaatttctcacattcgtattcttagagaattttatacttttttattataagtattttgcccttgagtccatgaaacttcaatagaaaatattgcttatacaataattagcttaaaatccatccaaaggaaaagagaagagctttttttgagtgttaagttttttaatttagttttctgtttggaaaagatgttaagagttcaaatatgcttcttatgtaacagaaataccattatttctggggtttagtgacacaggctggagaggacaaaagtttcctgtcctgaatgatttttcaattaatgctctaagcttaacccatgttgggtaatagaaagacatagccagcagtattactacgtagaccttgcacatcttacttttgttttgcatttttaaaaatttcttaatttgtttatttctcttcagaaatagcgtttttaacagtgtatgtgcttttttaaaaagtattgtgaatgagaaccctgtggattttttttatttcatttgtttgtcataataagctaacgtagaaatgttgtaggttaaccatatctgtggaaatatgcagttggaagtcagagcctgacatcacatagtttgccaaagggagagagctaagctggaagatgtttttgatactttcggctctaaacattaatggatgtttgcgtagagtaagatagcgttcaaatttggttaatagtttatagatagacttgtggcctctgactgactaaatttcttaacagcacagaagtcgttgtttttctgtctttaaaatttattcattcagaaaattagtcattgctttttaagattattttagcatttgaagcaaattgaaaacagaaaagtgacttaaaatagtgtaggtgaattttttatctataatttaccaaataatacctgataataattcaaagaaaatatgttaccaaaatatattaaatatataggtagttcattcgtgggaagatgaatcttcttattaagcctgccctcaattgtaaataagtgactcaaaaactcaaaatgttcatcagcattcaggtcatttgtttcacccttagccaagaagaactcattagaaattcagttataatttcaatttaagcctgtttatgataagcataatgattggcatgttatatagcctgttgaaaataactacagaatgaccttccagagcactgtttttggcctcgtgcccgctctgttcaggctctgcttgtttttcagaatatgatttttacctccagacagtaagaattgaacaagaactgatcaaacacaccttcctattttgttttcttcactatgtaaatattatttgggcaaacattacaaaaagggatccaaacaatttgagtttcagtatttttttctccctaggcatgtgcttcaatttcaaatatttttttctgtgtggaaaatgccatgtaactattgcactaccttctgtgtggactgtgttggtattggttctttctgtatatcaaaagtcagggtgtttataactgcaaagtttgtataagtggctttattcctcttctagaagatttatgaggagcctaggaagcactattggtacaggaggaaaaaagaatggaaaacatgtttacagactctagctttccttattagcttaaactggggccctcaaagagcagcctgttgatcttttggccaaatgacttgagcataagtcttttatttctttttaaggttaaatcgtaaactgtatacctttactactgaaaacaaaactatagggcatcatactaattgattgatttccttcctgtttttttgaggcacattcctttacaaccagtgtttaaaccaccacgtaatcatcttctgcaaacaaggggtgccagtgttgcctaacagaagataatctttaataaagcaaatcctctgcttcaaaggtttttgaaataattggatccctttttgaaaaggaagatgagtttaactgtgtccaggtggagtaatagtactgctgttgcatgaatagatgatacaaagcaagtgatgaggttggtatgacttctttagtgaccttttagggtttgcttttattttcctctcttttttgtattatttctttcaaacatagtaaatatatgattttacagccaaaaaaaaaaaa

SEQ ID NO: 92128 - DNA, 286 bp, Homo sapiens
gacggttaggaacaggtaactaaaggtgacttaggtcagagcaggtgaccaggggtgactcaggtccaacaggtgactgggatgagtcaggatgaagcaggtgaccaggggaacaaatgtgaactactgattaggactggtgggaatgctgtttactgaaactaggagcaaggagacgaagagaaccagaaagttaaactttaaaatggagaatcaaagaataggagacctgaacgtactgacatactgattctttgaagagaaacttggggttcactatatttaa

SEQ ID NO: 92129 - DNA, 793 bp, Homo sapiens
agaaaatgtatgcataaatgttttgcacctggaaggccctcagtaaatgctgttccgcttttttccttaaaaggctgctgctccttcaatttggtatgctgacatccagtggtggtgctgtggcattagtgtgtgagtttcacaggagccacactgcttagtcttgcatcctggctcatccgtagctcaccctgtaactttgggcaaggttacctcactgtcttgtatttcagttttctcatctataaaattaagatgataataatcatagtacctgccctacagggacattgcaaaaattaaatgagttaggcccttagaaatgggcctggtatatgctaggtacagttggcccttgaacaaaatgagtttgaactttggattttattctgcctctgcctgtccaagacagtaagaccaacccctcttcttcctcctccgcagcctactgaatgtgaagactatgaagatgaagacctttatgatgatccactttcacttaatgaaggaaattcttcctgcttctccatgctcttgatttggaggcaggaaaggactgtgaatgttgcaatggaatgcgtttgaaggcaagggccccagtctccactcctagcctctttcacttccccttcctcgcaattactctttattgccaagagaagattacgcagaagacagcctctccatgaagcatcttccaagtggctgatactacgaagactccataaagtcccacttaccagcacaggatggaacagatcctatgtcaatacatccagacttttggctagaa

SEQ ID NO: 92130 - DNA, 444 bp, Homo sapiens
tactgtgatcacaaataccaccatgatctatgaaaggacgatgatctgatttagacttgccaaattgccgttgcagaaattcttcctgcttctccatgctcttgatttggaggcaggaaaggactgtgaatgttgcaatggaatgcgtttgaaggcaagggccccaggtgaggagtgtatatggttttgtgtgttgcacatatgtgggtgccatcccatgaagctcattttggaatgtctcttttccccagtctccactcctagcctctttcacttccccttcctcgcaattactctttattgccaagagaagattacgcagaagacagcctctccatgaagcatcttccaagtggctgatactacgaagactccataaagtcccacttaccagcacaggatggaacagatcctatgtcaatacatccagacttttggctagaa

SEQ ID NO: 92131 - DNA, 902 bp, Homo sapiens
agaaaatgtatgcataaatgttttgcacctggaaggccctcagtaaatgctgttccgcttttttccttaaaaggctgctgctccttcaatttggtatgctgacatccagtggtggtgctgtggcattagtgtgtgagtttcacaggagccacactgcttagtcttgcatcctggctcatccgtagctcaccctgtaactttgggcaaggttacctcactgtcttgtatttcagttttctcatctataaaattaagatgataataatcatagtacctgccctacagggacattgcaaaaattaaatgagttaggcccttagaaatgggcctggtatatgctaggtacagttggcccttgaacaaaatgagtttgaactttggattttattctgcctctgcctgtccaagacagtaagaccaacccctcttcttcctcctccgcagcctactgaatgtgaagactatgaagatgaagacctttatgatgatccactttcacttaatgaagggtcaatatattttctctttcttatgattttcttaatcatgttttttctctagcttactttaagaatacagtgtataatacatataacatatacaatatgtgttaattgactgtttatattatcaataaggcttccagtcaacagtgggctatcagcagctgagtttttggggagtcaaaaatcatatgtggatttttgactttgcagggctcagtgcccatcatgtccacattgttcaaagctcaactgtactttattacagtgtcttttattgttaatttgcaatctaataagatctggactgttttttttgggcctaccagatctgactatagattttttgttcttgatacctgtataggacaggaatgatgattaaaacatacttctcaa

SEQ ID NO: 92132 - DNA, 296 bp, Homo sapiens
ggatggtagatttctatgtaaacattgttggggtttattgttgttgttattggtttttaagtgacaaatggtacagacttggaagtcttcaaatattaaaagcaaacaaaaccaaaagaatccctttaggaaaagtcagctaatgtttttgttccttttctgatggttttttgtcttactacttttacccattgctcaaatcatgttgaaggttttatcaaggtccagtttatggacttcatctcgtactacatcaaatagggcctaaggagcccatctgatcatctgatctcatt

SEQ ID NO: 92133 - DNA, 233 bp, Homo sapiens
tgggctggatttggttattcacttacaacaaatagaatattgcaaagtgatgcgacgttacttctgaaattaagttataaaaactttgtggcttccatcgtatgggccttttctctaagatccctcactctggaggaaacaagctactgtgttgtcagccactttatggagaggcccacatggcaaggaactgatatctctgggcaacaaccagccagtgaaaatctggcctg

SEQ ID NO: 92134 - DNA, 380 bp, Homo sapiens
ctttgtgctttaaagtgggacattcatgctcttcctgcccaggctgatccaggtatcctgaagatcaaatctgttaatgctgcagagttcaattcagtaaatgtttaagtgccccctatgtgccatgcttatgaaaacactttggaaattatgcaactacaaggtaatgcaatcataactgtttggctagagattatgagtaagggttgcattttgtttcttcccagtatacacagtccacattgatgttaacctgccaccactcagcatggaatcttgtatttcagtgacttggttgaatgtatgtgtatgtatggcttttgccttttatgtatattcgctgtggagtacaaaggaaaaacttggttttaattaaaaac

SEQ ID NO: 92135 - DNA, 3621 bp, Homo sapiens
atgaagaagctagggagaattcatccaaacaggcaagtgttggcctttattttgatggtgttcttgtctcaggttcgcctcgagcctattcgttattctgtgttggaggaaacagagagcggctcctttgtagcccatctggccaaggatctgggcctgggaattggggaactggcctcccggtcagcccgggtgctgtctgacgatgacaagcagcgtttgcagctggatcgtcagactggagatttgcttctgagggagaaactagaccgggaagagctctgtggtcctattgaaccgtgtgtactgcatttccaagtgttcctggaaatgccggtgcaattttttcaaggagaattattgatccaggacataaatgatcactctccaatattccctgaaagggaagtgctcttgaaaatactagaaaatagccagccgggtactctatttccgttgctaatagctgaggatttggatgtgggcagcaatggtcttcaaaaatacacaatcagccccaattctcattttcacattctcactcgaaatcatagtgagggcaagaaatacccagatttggtgcaggacaaaccactggatcgagaggagcagcctgagttcagcttaaccctcgtggcgctggatggtgggtcaccacctaggtctggcacggtcatggttcgaatcctgatcatggacatcaatgacaatgctcctgagtttgtgcacactccatatggggtgcaggtcctggaaaacagccccctagactctccaattgttagggtcttagctagagatatagatgctggaaacttcgggagtgtttcttatggcttattccaagcatcagatgaaattaaacaaactttctcaataaatgaagtcacgggagaaatactgttgaaaaaaaaattggatttcgaaaaaattaaatcttaccatgtagaaattgaggccacagatggaggaggcctttctggaaaaggcactgtagtcatagaggtggtggatgtgaatgacaatcccccagaacttatcatatcttcactcaccagctccatcccagaaaatgctcctgagacggtagtctctatcttccgaattcgagatagagattccggagaaaatggaaagatgatttgctctattccagataatctaccgtttattctaaaaccaactttgaagaatttttacaccctggtaacagagagaccactggaccgagagaccagcgctgagtacaacatcaccatcgccgtcactgacttggggacacccaggctgaaaacccagcagaacataaccgtgcaggtctccgacgtcaatgacaacgcccccgccttcacccaaacctcctacaccctgttcgtccgcgagaacaacagccccgccctgcacatcggcagtgtcagcgccacagacagagactcgggcaccaacgcccaggtcacctactcgctgctgccgccccaggacccgcacctgcccctcgcctccctggtctccatcaacgcagacaacggccacctgttcgccctcaggtcgctggactacgaggccctgcaggcgttcgagttccgcgtgggcgcctcagaccgcggttctccggctttgagcagcgaggcgctggtgcgcgtgctggtgctggacaccaacgacaactcgcccttcgtgctgtacccgctgcagaatggctccgcgccctgcaccgagctggtgccccgggcggccgagccgggctacctggtgaccaaggtggtggcggtggacggcgactcgggccagaacgcctggctgtcgtaccagctgctcaaggccacggagcctgggctgttcggcgtgtgggcgcacaatggcgaggtgcgcaccgccaggctgctgagcgagcgcgacgcagccaagcacaggctcgtggtgcttgtcaaggacaatggcgagcctccgcgctcggccaccgccacgctgcacgtgctcctggtggatggcttctcccagccctacctgcctctccctgaggcggccccggcccaggcccaggccgactctctcaccgtctacctggtggtggcgttggcctcggtgtcgtcgctcttcctcttctcggtgctcctgttcgtggcggtgcggctgtgcaggaggagcagggcggcctcggtgggtcgctgctcggtgcccgagggccctttccagggcatctggtggacgtaagcggcaccgggaccctgtcccagagctaccagtacgaggtgtgtctgacaggagactctgggactggtgagttcaagttcctgaagccaatatttcctaatctcttggttcaggacaccgggagggaagttaaggaaaaccccaagttcagaaatagcttggtattcagttaagtattgtatttagttcagtgaaccgcccgttagttttgtcaaacttcccactgcaatgcctttatttaaaaaaattgtctacttatctaaatattcataccacaatttcaaacctactcatgtccctgataaagctaaatttgtcccttttttattgttattaattgcacttaacatttttagttatactggatattgagtatggattttctctatatttgatctattggtgattaatctttttgtaatcataaattactcaattaggataaaaataaattatgttttaatgaaattcttaaattaacatctttttaatggaacatttaagtgaatatatgaatattgaatttctaaatatttgttgtgcctgtctttaccatgtaacttaatgtttgcaaggccagagtgtttgaaagttttgtatttaactttataattaccttgtcctttctggttgactatactaggctaagccctcttaatagccatgagtgtaaaatttagtttactcatttttcacaaattgtatataaacatgcacttcactacattggtaatacactaaaattgtggtccttttcctcttgtgaccaccacatgtctagtgattattttgtttatttggttgctacttacctagcacattgtaatgttccatgaatgctaatattaaattttgtaaaaataacttatttataaataatttttaaagagaaaaatctcatataatttgtcataacctttcaataaataaaactgttaaatcatggcctgatatcatcttaaaaaaaaatctcagaatctgaaataagccctaaatttctccccaaaatcaagactcttgagagcatcataggtctccttgtgctaccttttactccctataaatagaaatccaagtatactttaatatgtgtatattttttggttttcctacagcttctccccatctttcaaaagaatcacgaaatttcttctgcaccttggctattctgtttaaatctgataatcagttgatctcaggtttttcactgtacattactttgcagatatggacagcctttacaaaaataatttttaaatgcttaattattttaatttgttctttaaggtaaccttcagttattttgaattaatttaacttctcaattatgccaaagttgcacttgcatgaaataaatattattttgtccttgtatagactggaacagtaataaatttatctgaatta

SEQ ID NO: 92136 - DNA, 2809 bp, Homo sapiens
ttttttaaacacatttttttcctggcttcggacctcagactgctgcagccctaaccttcccagggctcagctctttggagctgcccattcctccggctgcgagaaaggacgcgcgccctgcgtcgggcgaagaaaagaagcaaaacttgtcgggagggtttcgtcatcaacctccttcccgcaaacctaaacctcctgccggggccatccctagacagaggaaagttcctgcagagccgaccagccctagtggatctggggcaggcagcggcgctggctgtggaattagatctgttttgaacccagtggagcgcatcgctggggctcggaagtcaccgtccgcgggcaccgggttggcgctgcccgagtggaaccgacagtttgcgagcctcggctgcaagtggcctctcctccccgcggttgttgttcagtgtcgggtgagggctgcgagtgtggcaagttgcaaagagagcctcagaggtccgaagagcgctgcgctcctactcgcgttcgcttcttcctcttctcggttccctactgtgaaatcgcagcgacatttacaaaggcctccgggtcctaccgagaccgatccgcagcgtttggcccggtcgtgcctattgcatcgggagcccccgagcaccggcgaaggactggcgggtggggtagggaggtggcggcggcggcatggcgaggttcccgaaggccgacctggccgctgcaggagttatgttactttgccacttcttcacggaccagtttcagttcgccgatgggaaacccggagaccaaatccttgattggcagtatggagttactcaggccttccctcacacagaggaggaggtggaagttgattcacacgcgtacagccacaggtggaaaagaaacttggactttctcaaggcggtagacacgaaccgagcaagcgtcggccaagactctcctgagcccagaagcttcacagacctgctgctggatgatgggcaggacaataacactcagatcgaggaggatacagaccacaattactatatatctcgaatatatggtccatctgattctgccagccgggatttatgggtgaacatagaccaaatggaaaaagataaagtgaagattcatggaatattgtccaatactcatcggcaagctgcaagagtgaatctgtccttcgattttccattttatggccacttcctacgtgaaatcactgtggcaaccgggggtttcatatacactggagaagtcgtacatcgaatgctaacagccacacagtacatagcacctttaatggcaaatttcgatcccagtgtatccagaaattcaactgtcagatattttgataatggcacagcacttgtggtccagtgggaccatgtacatctccaggataattataacctgggaagcttcacattccaggcaaccctgctcatggatggacgaatcatctttggatacaaagaaattcctgtcttggtcacacagataagttcaaccaatcatccagtgaaagtcggactgtccgatgcatttgtcgttgtccacaggatccaacaaattcccaatgttcgaagaagaacaatttatgaataccaccgagtagagctacaaatgtcaaaaattaccaacatttcggctgtggagatgaccccattacccacatgcctccagtttaacagatgtggcccctgtgtatcttctcagattggcttcaactgcagttggtgtagtaaacttcaaagatgttccagtggatttgatcgtcatcggcaggactgggtggacagtggatgccctgaagagtcaaaagagaagatgtgtgagaatacagaaccagtggaaacttcttctcgaaccaccacaaccataggagcgacaaccacccagttcagggtcctaactaccaccagaagagcagtgacttctcagtttcccaccagcctccctacagaagatgataccaagatagcactacatctaaaagataatggagcttctacagatgacagtgcagctgagaagaaagggggaaccctccacgctggcctcatcgttggaatcctcatcctggtcctcattgtagccacagccattcttgtgacagtctatatgtatcaccacccaacatcagcagccagcatcttctttattgagagacgcccaagcagatggcctgcgatgaagtttagaagaggctctggacatcctgcctatgctgaagttgaaccagttggagagaaagaaggctttattgtatcagagcagtgctaaaatttctaggacagaacaacaccagtactggtttacaggtgttaagactaaaattttgcctatacctttaagacaaacaaacaaacacacacacaaacaagctctaagctgctgtagcctgaagaagacaagatttctggacaagctcagcccaggaaacaaagggtaaacaaaaaactaaaacttatacaagataccatttacactgaacatagaattccctagtggaatgtcatctatagttcactcggaacatctcccgtggacttatctgaagtatgacaagattataatgcttttggcttaggtgcagggttgcaaagggatcagaaaaaaaaaatcataataaagctttagttcatgagggatcgacacctttggttcaaatgttctctgatgtctcaaagataactgttttccaaagcctgaaccctttcactcaaaagagcaatgatgaatgtctcaagattgctaagaaaaacagcccatgcaagagtgagaacaaacacaaaataagagattttctacattttca

SEQ ID NO: 92137 - DNA, 2495 bp, Homo sapiens
ttttttaaacacatttttttcctggcttcggacctcagactgctgcagccctaaccttcccagggctcagctctttggagctgcccattcctccggctgcgagaaaggacgcgcgccctgcgtcgggcgaagaaaagaagcaaaacttgtcgggagggtttcgtcatcaacctccttcccgcaaacctaaacctcctgccggggccatccctagacagaggaaagttcctgcagagccgaccagccctagtggatctggggcaggcagcggcgctggctgtggaattagatctgttttgaacccagtggagcgcatcgctggggctcggaagtcaccgtccgcgggcaccgggttggcgctgcccgagtggaaccgacagtttgcgagcctcggctgcaagtggcctctcctccccgcggttgttgttcagtgtcgggtgagggctgcgagtgtggcaagttgcaaagagagcctcagaggtccgaagagcgctgcgctcctactcgcgttcgcttcttcctcttctcggttccctactgtgaaatcgcagcgacatttacaaaggcctccgggtcctaccgagaccgatccgcagcgtttggcccggtcgtgcctattgcatcgggagcccccgagcaccggcgaaggactggcgggtggggtagggaggtggcggcggcggcatggcgaggttcccgaaggccgacctggccgctgcaggagttatgttactttgccacttcttcacggaccagtttcagttcgccgatgggaaacccggagaccaaatccttgattggcagtatggagttactcaggccttccctcacacagaggaggaggtggaagttgattcacacgcgtacagccacaggtggaaaagaaacttggactttctcaaggcggtagacacgaaccgagcaagcgtcggccaagactctcctgagcccagaagcttcacagacctgctgctggatgatgggcaggacaataacactcagatcgagagagtgaatctgtccttcgattttccattttatggccacttcctacgtgaaatcactgtggcaaccgggggtttcatatacactggagaagtcgtacatcgaatgctaacagccacacagtacatagcacctttaatggcaaatttcgatcccagtgtatccagaaattcaactgtcagatattttgataatggcacagcacttgtggtccagtgggaccatgtacatctccaggataattataacctgggaagcttcacattccaggcaaccctgctcatggatggacgaatcatctttggatacaaagaaattcctgtcttggtcacacagataagttcaaccaatcatccagtgaaagtcggactgtccgatgcatttgtcgttgtccacaggatccaacaaattcccaatgttcgaagaagaacaatttatgaataccaccgagtagagctacaaatgtcaaaaattaccaacatttcggctgtggagatgaccccattacccacatgcctccagtttaacagatgtggcccctgtgtatcttctcagattggcttcaactgcagttggtgtagtaaacttcaaagatgttccagtggatttgatcgtcatcggcaggactgggtggacagtggatgccctgaagagtcaaaagagaagatgtgtgagaatacagaaccagtggaaacttcttctcgaaccaccacaaccataggagcgacaaccacccagttcagggtcctaactaccaccagaagagcagtgacttctcagtttcccaccagcctccctacagaagatgataccaagatagcactacatctaaaagataatggagcttctacagatgacagtgcagctgagaagaaagggggaaccctccacgctggcctcatcgttggaatcctcatcctggtcctcattgtagccacagccattcttgtgacagtctatatgtatcaccacccaacatcagcagccagcatcttctttattgagagacgcccaagcagatggcctgcgatgaagtttagaagaggctctggacatcctgcctatgctgaagttgaaccagttggagagaaagaaggctttattgtatcagagcagtgctaaaatttctaggacagaacaacaccagtactggtttacaggtgttaagactaaaattttgcctatacctttaagacaaacaaacaaacacacacacaaacaagctctaagctgctgtagcctgaagaagacaagatttctggacaagctcagcccaggaaacaaagggtaaacaaaaaactaaaacttatacaagataccatttacactgaacatagaattccctagtggaatgtcatctatagttcactcggaacatctcccgtggacttatctgaagtatgacaagattataatgcttttggcttaggtgcagggttgcaaagggatcagaaaaaaaaaatcataataaagctttagttcatgaggga

SEQ ID NO: 92138 - DNA, 2748 bp, Homo sapiens
ttttttaaacacatttttttcctggcttcggacctcagactgctgcagccctaaccttcccagggctcagctctttggagctgcccattcctccggctgcgagaaaggacgcgcgccctgcgtcgggcgaagaaaagaagcaaaacttgtcgggagggtttcgtcatcaacctccttcccgcaaacctaaacctcctgccggggccatccctagacagaggaaagttcctgcagagccgaccagccctagtggatctggggcaggcagcggcgctggctgtggaattagatctgttttgaacccagtggagcgcatcgctggggctcggaagtcaccgtccgcgggcaccgggttggcgctgcccgagtggaaccgacagtttgcgagcctcggctgcaagtggcctctcctccccgcggttgttgttcagtgtcgggtgagggctgcgagtgtggcaagttgcaaagagagcctcagaggtccgaagagcgctgcgctcctactcgcgttcgcttcttcctcttctcggttccctactgtgaaatcgcagcgacatttacaaaggcctccgggtcctaccgagaccgatccgcagcgtttggcccggtcgtgcctattgcatcgggagcccccgagcaccggcgaaggactggcgggtggggtagggaggtggcggcggcggcatggcgaggttcccgaaggccgacctggccgctgcaggagttatgttactttgccacttcttcacggaccagtttcagttcgccgatgggaaacccggagaccaaatccttgattggcagtatggagttactcaggccttccctcacacagaggaggaggtggaagttgattcacacgcgtacagccacaggtggaaaagaaacttggactttctcaaggcggtagacacgaaccgagcaagcgtcggccaagactctcctgagcccagaagcttcacagacctgctgctggatgatgggcaggacaataacactcagatcgaggaggatacagaccacaattactatatatctcgaatatatggtccatctgattctgccagccgggatttatgggtgaacatagaccaaatggaaaaagataaagtgaagattcatggaatattgtccaatactcatcggcaagctgcaagagtgaatctgtccttcgattttccattttatggccacttcctacgtgaaatcactgtggcaaccgggggtttcatatacactggagaagtcgtacatcgaatgctaacagccacacagtacatagcacctttaatggcaaatttcgatcccagtgtatccagaaattcaactgtcagatattttgataatggcacagcacttgtggtccagtgggaccatgtacatctccaggataattataacctgggaagcttcacattccaggcaaccctgctcatggatggacgaatcatctttggatacaaagaaattcctgtcttggtcacacagataagttcaaccaatcatccagtgaaagtcggactgtccgatgcatttgtcgttgtccacaggatccaacaaattcccaatgttcgaagaagaacaatttatgaataccaccgagtagagctacaaatgtcaaaaattaccaacatttcggctgtggagatgaccccattacccacatgcctccagtttaacagatgtggcccctgtgtatcttctcagattggcttcaactgcagttggtgtagtaaacttcaaagtcaaaagagaagatgtgtgagaatacagaaccagtggaaacttcttctcgaaccaccacaaccataggagcgacaaccacccagttcagggtcctaactaccaccagaagagcagtgacttctcagtttcccaccagcctccctacagaagatgataccaagatagcactacatctaaaagataatggagcttctacagatgacagtgcagctgagaagaaagggggaaccctccacgctggcctcatcgttggaatcctcatcctggtcctcattgtagccacagccattcttgtgacagtctatatgtatcaccacccaacatcagcagccagcatcttctttattgagagacgcccaagcagatggcctgcgatgaagtttagaagaggctctggacatcctgcctatgctgaagttgaaccagttggagagaaagaaggctttattgtatcagagcagtgctaaaatttctaggacagaacaacaccagtactggtttacaggtgttaagactaaaattttgcctatacctttaagacaaacaaacaaacacacacacaaacaagctctaagctgctgtagcctgaagaagacaagatttctggacaagctcagcccaggaaacaaagggtaaacaaaaaactaaaacttatacaagataccatttacactgaacatagaattccctagtggaatgtcatctatagttcactcggaacatctcccgtggacttatctgaagtatgacaagattataatgcttttggcttaggtgcagggttgcaaagggatcagaaaaaaaaaatcataataaagctttagttcatgagggatcgacacctttggttcaaatgttctctgatgtctcaaagataactgttttccaaagcctgaaccctttcactcaaaagagcaatgatgaatgtctcaagattgctaagaaaaacagcccatgcaagagtgagaacaaacacaaaataagagattttctacattttca

SEQ ID NO: 92139 - DNA, 1841 bp, Homo sapiens
gtttttggcaggtctgatttaagaaaaactgaaggtgtattttcacatagtatgtcagtggtagacttcgtaattagactaaatcgtgtatatttttgcaggaggatacagaccacaattactatatatctcgaatatatggtccatctgattctgccagccgggatttatgggtgaacatagaccaaatggaaaaagataaagtgaagattcatggaatattgtccaatactcatcggcaagctgcaagagtgaatctgtccttcgattttccattttatggccacttcctacgtgaaatcactgtggcaaccgggggtttcatatacactggagaagtcgtacatcgaatgctaacagccacacagtacatagcacctttaatggcaaatttcgatcccagtgtatccagaaattcaactgtcagatattttgataatggcacagcacttgtggtccagtgggaccatgtacatctccaggataattataacctgggaagcttcacattccaggcaaccctgctcatggatggacgaatcatctttggatacaaagaaattcctgtcttggtcacacagataagttcaaccaatcatccagtgaaagtcggactgtccgatgcatttgtcgttgtccacaggatccaacaaattcccaatgttcgaagaagaacaatttatgaataccaccgagtagagctacaaatgtcaaaaattaccaacatttcggctgtggagatgaccccattacccacatgcctccagtttaacagatgtggcccctgtgtatcttctcagattggcttcaactgcagttggtgtagtaaacttcaaagtcaaaagagaagatgtgtgagaatacagaaccagtggaaacttcttctcgaaccaccacaaccataggagcgacaaccacccagttcagggtcctaactaccaccagaagagcagtgacttctcagtttcccaccagcctccctacagaagatgataccaagatagcactacatctaaaagataatggagcttctacagatgacagtgcagctgagaagaaagggggaaccctccacgctggcctcatcgttggaatcctcatcctggtcctcattgtagccacagccattcttgtgacagtctatatgtatcaccacccaacatcagcagccagcatcttctttattgagagacgcccaagcagatggcctgcgatgaagtttagaagaggctctggacatcctgcctatgctgaagttgaaccagttggagagaaagaaggctttattgtatcagagcagtgctaaaatttctaggacagaacaacaccagtactggtttacaggtgttaagactaaaattttgcctatacctttaagacaaacaaacaaacacacacacaaacaagctctaagctgctgtagcctgaagaagacaagatttctggacaagctcagcccaggaaacaaagggtaaacaaaaaactaaaacttatacaagataccatttacactgaacatagaattccctagtggaatgtcatctatagttcactcggaacatctcccgtggacttatctgaagtatgacaagattataatgcttttggcttaggtgcagggttgcaaagggatcagaaaaaaaaaatcataataaagctttagttcatgagggatcgacacctttggttcaaatgttctctgatgtctcaaagataactgttttccaaagcctgaaccctttcactcaaaagagcaatgatgaatgtctcaagattgctaagaaaaacagcccatgcaagagtgagaacaaacacaaaataagagattttctacattttca

SEQ ID NO: 92140 - DNA, 2222 bp, Homo sapiens
ttttttaaacacatttttttcctggcttcggacctcagactgctgcagccctaaccttcccagggctcagctctttggagctgcccattcctccggctgcgagaaaggacgcgcgccctgcgtcgggcgaagaaaagaagcaaaacttgtcgggagggtttcgtcatcaacctccttcccgcaaacctaaacctcctgccggggccatccctagacagaggaaagttcctgcagagccgaccagccctagtggatctggggcaggcagcggcgctggctgtggaattagatctgttttgaacccagtggagcgcatcgctggggctcggaagtcaccgtccgcgggcaccgggttggcgctgcccgagtggaaccgacagtttgcgagcctcggctgcaagtggcctctcctccccgcggttgttgttcagtgtcgggtgagggctgcgagtgtggcaagttgcaaagagagcctcagaggtccgaagagcgctgcgctcctactcgcgttcgcttcttcctcttctcggttccctactgtgaaatcgcagcgacatttacaaaggcctccgggtcctaccgagaccgatccgcagcgtttggcccggtcgtgcctattgcatcgggagcccccgagcaccggcgaaggactggcgggtggggtagggaggtggcggcggcggcatggcgaggttcccgaaggccgacctggccgctgcaggagttatgttactttgccacttcttcacggaccagtttcagttcgccgatgggaaacccggagaccaaatccttgattggcagtatggagttactcaggccttccctcacacagaggaggaggtggaagttgattcacacgcgtacagccacaggtggaaaagaaacttggactttctcaaggcggtagacacgaaccgagcaagcgtcggccaagactctcctgagcccagaagcttcacagacctgctgctggatgatgggcaggacaataacactcagatcgaggaggatacagaccacaattactatatatctcgaatatatggtccatctgattctgccagccgggatttatgggtgaacatagaccaaatggaaaaagataaagtgaagattcatggaatattgtccaatactcatcggcaagctgcaagagtgaatctgtccttcgattttccattttatggccacttcctacgtgaaatcactgtggcaaccgggggtttcatatacactggagaagtcgtacatcgaatgctaacagccacacagtacatagcacctttaatggcaaatttcgatcccagtgtatccagaaattcaactgtcagatattttgataatggcacagcacttgtggtccagtgggaccatgtacatctccaggataattataacctgggaagcttcacattccaggcaaccctgctcatggatggacgaatcatctttggatacaaagaaattcctgtcttggtcacacagataagttcaaccaatcatccagtgaaagtcggactgtccgatgcatttgtcgttgtccacaggatccaacaaattcccaatgttcgaagaagaacaatttatgaataccaccgagtagagctacaaatgtcaaaaattaccaacatttcggctgtggagatgaccccattacccacatgcctccagtttaacagatgtggcccctgtgtatcttctcagattggcttcaactgcagttggtgtagtaaacttcaaagatgttccagtggatttgatcgtcatcggcaggactgggtggacagtggatgccctgaagagtcaaaagagaagatgtgtgagaatacagaaccagtggaaacttcttctcgaaccaccacaaccataggagcgacaaccacccagttcagggtcctaactaccaccagaagagcagtgacttctcagtttcccaccagcctccctacagaagatgataccaagatagcactacatctaaaagataatggagcttctacagatgacagtgcagctgagaagaaagggggaaccctccacgctggcctcatcgttggaatcctcatcctggtcctcattgtagccacagccattcttgtgacagtctatatgtatcaccacccaacatcagcagccagcatcttctttattgaggtaagtgttgagtttaacacatgaaaaccacgccagttgatgaactgtatccgtttgctaacacc

SEQ ID NO: 92141 - DNA, 360 bp, Homo sapiens
taacatatagttacctgctttgtttttttccagattcctgtcttggtcacacagataagttcaaccaatcatccagtgaaagtcggactgtccgatgcatttgtcgttgtccacaggatccaacaaattcccagtacgtagaagaagggcagtcgcaatgagtgagcctctgtgggggtaaatttaaaggagattggtctatggcagctgtacctgaattaaaaaaaaaatagctaatcgattagctgattaatgcttgttaattctgttgtttgctttataactccgattgggctatctctgtcacccttgagctaactcaggtaaagacaaattaaatagtgaagccaaaaatgtgta

SEQ ID NO: 92142 - DNA, 490 bp, Homo sapiens
agacttttgctgtgcagacgctgtttagttaagtcccatttgtctatctttgattttgtggcatttgcttttgagatctttataataatttatttgcccagggcaatgtctagaagagtatatcctagattttcttctagaacttttatagttcgtggtcttacatttcagtcttaattttgagttaatttttgtatatggtgagagacagggatccagtttcattcttctgcatatggttagctatttattgaatagggtgtcctttctccattggttattttggtggactttatcaaagatgagttggttgtaggtgtgaagctttatttcaggggtctttattctgttccattggtctacgtgtctatttttgtatcagtactatgttttggttactgtagccttgaagtatagcttgaaatgcagtaatgtggtgtaaggctccctatcctgttttgttctttttgtttaggattgccttggctat

SEQ ID NO: 92143 - DNA, 462 bp, Homo sapiens
tgggtagggaaggaggaccaatatcagaaggtgacatttgaacagtgactaaatgaggggccggagggagccacgtggcctagcggaagagcactccaggcagagggaacacaacaaattcgaaggctcaaaggtggaggtgtgcaagggcaagaaggggagtgaagggcgtgtgaaggatggagaggaggtgggggcagatggtggggcctgccacactgtgtaagtttcacttggttctaagcaagactggggccactggagagtttgggcaaaagaatggcatagtctggccaggcgcggtggctcatgcatgtaatcccagtgctttgggaggccgaggcaagtggatcacctgaggtcaggagttcgagaccagcctggccaaatgaaaccccgtctctactaaaaatacaaaaattagccaggcatggtgtcgagcgcctgcaatcccagctactc

SEQ ID NO: 92144 - DNA, 457 bp, Homo sapiens
ctctacttcaagggcacccctactcacacacacatagctccattgccaccacccttagctatcatttttacatagctcaaaaatcacttcttcatagcaatctcccttgacattccagataagattagtctcctgcaattgactttcatagtattacatatatgtttttcataaaagctggtttaacaagtaagtgtgtattgatccaatgataaaattccatggcaaacaatcagttcaattcagtaaacatttactgagtgcctactatatgcctgacccagtgtattgttctcacaaccagagaagacagccacatcttttaaaataaggaaaattatgctttcaaagaaaagtacaaccctcatttcaactgactgaatgtttatcaagtacttatcatatgcaagatacaagggaaagaaactctctctggagggactcatagactagcaaa

SEQ ID NO: 92145 - DNA, 410 bp, Homo sapiens
aaacaaaaccacaaacatttgtaatatatttttatagagcaaaatgtaaaacctttgtacagccacatcacatagctttttcttcttgacaaactccccacccaaccctcagagcttaaagaggttgaaggccctgttcaaagagaagacaactattttttaatgatattttccacaactaagtcaatgtctatacagcattttgatttaataaaaacattatctcttggcacatatcttaaaggatcatgattttaaaaatatatgctagtcagcaacaggccaggacaaaaacaccacactcaactttgaaaagcaaacggttccaggctagagggccttacattgctcagctttgggtacatttttcaattaattaattgacatttatgttggctgtatttgctatg

SEQ ID NO: 92146 - DNA, 410 bp, Homo sapiens
tttaacaacctgcaactttggatgatcatatgattggtcttcatttcttgattattctgactggtgtttctttaaaagtgccaatctttaaaaagataaatgctgtttgtctctcaaaacagtcataaattgtgggaaaggaaacaaagacgaaaacattagtttttcagaaatgaggctttttgttaaaagtaaaataaaaatagcaacacaacttcctgattttctgagtgaagttatttcatgtgctagttatttggtgtggctcctcaagcccattttaattgagatggtgtaggcagctaaaagaaatgcactggtaaaaccacaactaggtttcatcttgataggcaggagcaaaaacagaaaggaaagaggccagcctaatttccagagactggggggttaca

SEQ ID NO: 92147 - DNA, 635 bp, Homo sapiens
gactgaattcagccagctctccttagaagttattttctcagatcttattgccatcttttcattctttctgatctgcattagtcttactttgtggaacatggcagtaggcctgggactcttagagagtccccatccttgtaatgagcaaaaagaatattgttgcgcattcctatcgggctcttaagatttcttcccaaccatactgctttctaggtaccactgtagtgcccttgtaacccttagatcttttcttgctgtgttcaacacagagcctggcatactataactgtagctggtttctcccatttccttctggattccacatggccccctattctatttcatccttttgggaatgtgtaatctttgacacttatattcctaaacccactttggtataatctggaaactttatggcatgctctagtctgtgacaatcaggataaccctgattataccagcttctaatcaactacataaagcgggtgaacaccagggtcaccaacacccatttcccaactgcggtgcacagcagctttttagctttgccaacatttgggccggcacatgtgtttgtgcgtgattatttgtctcatgtactattgaataaacgtctttgtaagtaactatgaatg

SEQ ID NO: 92148 - DNA, 450 bp, Homo sapiens
accttatcttatgtaaagtgcccacttaactgagcatgagacaaatacatcattgactattcccttacctgctccttttctctggcaacatgtggattcaatagtgtcaccagaccctccctctttcctctctagaccgcttttctcttttaagtattgaaggcttcgggctgggcatggtggctcatgcctaataaaagagggcttatggcctcttttatttatgttttgagacgggatcttgctctgtcacccaggctggagtgcaatggtgtgatcacagctcacgatagccttgatctccagggctcatgcgatcctctcacctcagcctcctgtgtagctgggaccacaggctcacgctaccatgctcaggtaattttcttttttttttgagatggagtctcactctgtcgcccaggctggagtgcagtggcaccatcttgggtc

SEQ ID NO: 92149 - DNA, 841 bp, Homo sapiens
cataatttaaggctctaagaaggtggctgcacttggatctcttacaaagcatcatattttcaatgaggagaccattgaagtgatgtcacgtggctgttcatctgacctgagggaagaatgaaaaggaagcccctgcccctccaatggagcctgaagtccccgagatgtctcaaagcaaaactgaacatatgaaaactccagaagaggagctgcagccagaaagctctcctgctgaaacttcagcctgcaaagatcctctgaaacctttaaagatcaggccagtctcccagcccttcgtgaatccagctgtgaagaacaaggctgaggaatgtgagacgtggatagacaggttcaggaagctggaaaatgccctctacctgtgtgatctgagtaacacaggagttctggagaaggaacgagccagacgcctcattcacaactacaatctcatttacaacctgtccctgagccctcagaaaatcgaccaggccttgcgcagattccgttcgggagaaaatatgctcttggagccagcactgcggtacttaaaggagctatgataacaagcccatattgtgagaacagatgtttcccttatctccctttttacccagacacatgtttctccccagcctaagtgtagtggcggaggcattgtcagagtggaggccgatgcagctattgtagatgcttttgatttggacttagtttctggctatgatgctcactcataagcagttcaaagtgatcagaggaaacctagttttatcttttgatgtggcaagaacccagctacttagaatctccttctgttttaataaaacttattattaatattaaa

SEQ ID NO: 92150 - DNA, 790 bp, Homo sapiens
agcttcctggggagaagcacggaccgcgcacctctgagctgccagggtggggacgctgccctagcgggatctgaagggattttgaaaggaatcatgtcttcagcctggaagactccccgtggatcagatgcaatgcctgagatcatggtgaaaatcattggaagtaaacactttcaatacctcgtggagaagccaaagatcaaggagaatgacagcttgaaaacagaaacccaaacaatgcaccagaaaccaatgactgataatgcaaggcagatgagcagagacaccccagttcccattaacttcactgatcagcaaaccactgataatccagatgatgtgaaagagaaaaagcacccagagaacaaccagaaatcagaaaacaaccagaaactactaacaggggcaaacagtagcagattcctggatggcaatattcccagtcaagcaaatgtccactgcagctctgtaccaaccggagaccagtccttatcctatgtgcatggcattcccaggagaaagcttagagactggtccttggaacagatggtgagaggcagctctgaccaacctgaggatattggccagagcccaagtgggacaacaaatgaagacgcttttcttcttgccctggtcagaagagaactcaagtcacgtcctttgagttccaacttattagaaaagcttcagaaagagctgaagatcctggacccaatctcttcaggatttcttctccaatctcagctgagccgcctctttttgaagcatgaagtccctctacagttaccaa

SEQ ID NO: 92151 - DNA, 1328 bp, Homo sapiens
agcttcctggggagaagcacggaccgcgcacctctgagctgccagggtggggacgctgccctagcgggatctgaagggattttgaaaggaatcatgtcttcagcctggaagactccccgtggatcagatgcaatgcctgagatcatggtgaaaatcattggaagtaaacactttcaatacctcgtggagaagccaaagatcaaggagaatgacagcttgaaaacagaaacccaaacaatgcaccagaaaccaatgactgataatgcaaggcagatgagcagagacaccccagttcccattaacttcactgatcagcaaaccactgataatccagatgatgtgaaagagaaaaagcacccagagaacaaccagaaatcagaaaacaaccagaaactactaacaggggcaaacagtagcagattcctggatggcaatgtcagggctatatgtgggaagcatggattatatctgaccctgagcctgctggaaacattgcttaaccatcaagatttgggttaccaaaatgaaataaaatggcagaattttgttgagatgctgaccagagcttcttctgatttgttatctgatttgcctacagggaagaatgaaaaggaagcccctgcccctccaatggagcctgaagtccccgagatgtctcaaagcaaaactgaacatatgaaaactccagaagaggagctgcagccagaaagctctcctgctgaaacttcagcctgcaaagatcctctgaaacctttaaagatcaggccagtctcccagcccttcgtgaatccagctgtgaagaacaaggctgaggaatgtgagacgtggatagacaggttcaggaagctggaaaatgccctctacctgtgtgatctgagtaacacaggagttctggagaaggaacgagccagacgcctcattcacaactacaatctcatttacaacctgtccctgagccctcagaaaatcgaccaggccttgcgcagattccgttcgggagaaaatatgctcttggagccagcactgcggtacttaaaggagctatgataacaagcccatattgtgagaacagatgtttcccttatctccctttttacccagacacatgtttctccccagcctaagtgtagtggcggaggcattgtcagagtggaggccgatgcagctattgtagatgcttttgatttggacttagtttctggctatgatgctcactcataagcagttcaaagtgatcagaggaaacctagttttatcttttgatgtggcaagaacccagctacttagaatctccttctgttttaataaaacttattattaatattaaa

SEQ ID NO: 92152 - DNA, 905 bp, Homo sapiens
gcagaagcagtggtgagaggccagtggcacggagacagtttttatttatttatttatttatttatttatttatttatttatatcaacagcagtagcaactgcagaaactgatggcagaattttgttgagatgctgaccagagcttcttctgatttgttatctgatttgcctacagggaagaatgaaaaggaagcccctgcccctccaatggagcctgaagtccccgagatgtctcaaagcaaaactgaacatatgaaaactccagaagaggagctgcagccagaaagctctcctgctgaaacttcagcctgcaaagatcctctgaaacctttaaagatcaggccagtctcccagcccttcgtgaatccagctgtgaagaacaaggctgaggaatgtgagacgtggatagacaggttcaggaagctggaaaatgccctctacctgtgtgatctgagtaacacaggagttctggagaaggaacgagccagacgcctcattcacaactacaatctcatttacaacctgtccctgagccctcagaaaatcgaccaggccttgcgcagattccgttcgggagaaaatatgctcttggagccagcactgcggtacttaaaggagctatgataacaagcccatattgtgagaacagatgtttcccttatctccctttttacccagacacatgtttctccccagcctaagtgtagtggcggaggcattgtcagagtggaggccgatgcagctattgtagatgcttttgatttggacttagtttctggctatgatgctcactcataagcagttcaaagtgatcagaggaaacctagttttatcttttgatgtggcaagaacccagctacttagaatctccttctgttttaataaaacttattattaatattaaa

SEQ ID NO: 92153 - DNA, 338 bp, Homo sapiens
cctactgaaaaacagagtcattcaactataagattattgagtgatttaaactctgaaagtcaaaatgagatttgagctaatatttcaattattttcaaacccagtatattacaactgctattaaactgtaactttaccacaatgcactatgctaaagcacaaagcctcaacagtacataaatccctcttggcctcatttggtagaatttctctacccatgagacagtctgaagaggtcacttcctacaagtcagggaaacaaaggttgtacacctacagatcaaagccaataacaaaacatcaggtcccaagacaatatttagcacagaaggaccttt

SEQ ID NO: 92154 - DNA, 189 bp, Homo sapiens
tactgcctaatcaacatctctacttatatttaacccactgcatctcaaacttaacatgtccaaaactgaacttttgattctttccatttctctacacctgttcctcctttagtattccccagtgttgctcagaccaaaaatctaggggtcatgactgactcctctctttctttctcacagccaacttct

SEQ ID NO: 92155 - DNA, 589 bp, Homo sapiens
ctgaaatcaacagaagacaggcagagcaagatggaagaatagaagtctccacccatcaacctccacccgacccatgccccacaagaacaggaagttaataactatctacacagaaaaaaatacctttagaagagccaaaaatcaggtaggccctcgtagtacctggttttatcttcatattgctgaaagaagcactgaggagtcagaagaatagtcccgaatcaccacacatttaaaccagcccaagcctgaggggaatctctgattccagcagtgggaaattgagttcccccaaacctcgccactgtgggctacagtgctctgtgtctttaaatcagcttgaaagtccgtctaggccataaggactgcaacacttaggtgagtcctagtgctgaactaggcccagagacagtggattcggggggcacgtggactactgagacatcagccaagggagtggtggcatcacccctgccctaaccccaggctgcacagctcatggctccaaaagagacctcttccttcagtttgaagagaggagaagaaaaagtgggaagagcttcgtcttgcatcttggataccagctcag

SEQ ID NO: 92156 - DNA, 108 bp, Homo sapiens
tcattcactaaggaaagcccattctattttgttttccttgtttaaaaagtaataactttactttaatataactacaaaaaattatttttccaagagcaaaaacattag

SEQ ID NO: 92157 - DNA, 377 bp, Homo sapiens
ccagcaatccctccttggtctcctaaagtattggaattacagctgtgagccgctgcacctggcctcatacacttgttgagttcccctgaccaggactgggacttagctgagaggaatgagatgcccagggcaaaatgtaaggaggcgctgatgctcagggtcctgcggtgccacctgaagatgagcgcctcctgcattttccttccctaggtgcctcacctgactcaccctcatcctggccccacctccactctgaaccaggcactattctcaattctggggaagtaacagtgaaccaaacaggtagagctccctgcctacacggaccttccattatagaaggggaggcaggcagagctagtacccactgaggctcc

SEQ ID NO: 92158 - DNA, 156 bp, Homo sapiens
gtcagggtatagaattatttgaggatgctttaaaaatgaagattctgagcctcactttcaatctgctgtgtgagggcttccaagaatggtgaccagaaaactcagcatctttaacaagcacctgaaaaactgagaccattttcccacgtcttaatt

SEQ ID NO: 92159 - DNA, 433 bp, Homo sapiens
ggaacgaggagtaatgtgataagtgaagccagccctttcctggtcttcagggagtaattcttacatggcatacaattgtaacattcttataatacttgatacagtgttatggttgcacattcttgagtcatatgatctcagatggttaggaagtgaagtatttgtaagaacctcaagaatttagctttgagctcttcctgccacagatggcccttagagtttcacatcacttattgaaatgccatctgagtagacaaatatgtggaagcaagctttcatcttcagtttacattctccagttcttagaatcattccgtggcatgtccttttctgtattgcataaaaacacagcctagtatacatgagtataccatgcgctctaaaagtctaagtggattcagtgctttaagaagttaactaaagaaaatcccag

SEQ ID NO: 92160 - DNA, 324 bp, Homo sapiens
ctccaggtcacctttacagtgtcagttatataggaaaaagaatacaaataaattagggaagaggacctgtggatactgaggtcaaagacagagaggaagagggagatagagaatttgaatgagaaatatgaatgagatagagagcatacccttgtgaaagctcaccttttaataatctgacctactgttgtgatgacaaaagctccattcctcagcaccatggctcagtaaagccctttggacttatgctaccatatcaactctgttcctcactagagatagagacataggaggaacctgggggtagagagtacagacctgctt

SEQ ID NO: 92161 - DNA, 625 bp, Homo sapiens
  misc_feature (284)..(284): n is a, c, g, or t
gaagcacctacagatcaactggactggcctgaccaacctgctggatgcgccgggaatcaatgatgtgtcagacagcttactggaggacctcattgccacccacctggtgctgcccaaccgtgtgactgtgcctgtgaagaaggggctggatctgaccaacctgcgcttccctctgccctgtggggtgatcagagtgcactttgctgaggcagagcagctggccagaagggacactttctggggctcggaggcagtcagatccctacgccaaggtgagcattcgngcctacagcatttccggagtaggaccatctacaggaacctgaaccccacctggaacgaagtgtttgagttcatggtgtacgaagtccctggacaggacctggaggtagacctgtatgatgaggataccgacagggatgacttcctgggcagcctgcagatctgccttggagatgtcatgaccaacagagtggtggatgagtggtttgtcctgaatgacacaaccagcgggcggctgcacctgcggctggagtggctttcattgcttactgaccaagaagttctgactgaggaccatggtggcctttccactgccattctcgtggtcttcttggagagtgcc

SEQ ID NO: 92162 - DNA, 428 bp, Homo sapiens
gggccctgtacccttaggcaacacccatgctctccctaccaggtcggtgccctggttcatcccctgagcctctggaggcagagtactagggagctgggcttctcagtgaggggaaccttcccattcccccctcctcacagctcccacctcagaggatgctgggtaacaggagcacacacagagtgtcccccaacccccaccagctgagaaaaccttggtgaaggccagaggcccacgcaccctgggtgctcctgccccaagaggagagagagagagagagagttgggggagggattcctgcaggtgaacagatcaaattttggtcaaattccaataaattctcacttaattttaacatttaatgttgaaaaatcctaatggtgacctgattccctcttttgaattccagccctcccagataacctatc

SEQ ID NO: 92163 - DNA, 978 bp, Homo sapiens
gttaaattctgaatatcttcccactaaaagcacaacaaatctatttacagtgcctgaagcctgggagagccacatgagtaaaaactcgtacgtggtttagatttgttccatttacatttttcttgggatttgttgtgcttaaacctttgcagttcccacagatctgaaaagaaagcatttttcactgtaatacattaagagagagagaaaaaagtcatattgactattttacttgtttgaatcgctgtttttattacaatgacatgaaatacaacgtgtaaaagtctttaacctgtgttgggtaagggtaggactgtttcaccaccctgaatttgaaatttgaaaaagtcttaaagtggtagggtacttaaatttttaaaaaaatgaccatgggagcagtttttctctgttaaatcctggtaaacttcgggtttttgaagactttaaaagatgaaaatgaccttgagcatctttattcctttcctctgccccttaatgttgggatggggttcaggatgaaagggaggtgggattctaattcatgtgccagtgacaatcctgcatgcatatagaaatttttatttattgaatgtacacaagtaatgatggagtttgattatatggttcattttcatttatcctatgcagatcacaaagagtaaactgaaaggaacaaacgctaagtaaaataagggccagaaatctgtaaatttggtattagattaagaaaaaaagaattgccagttttttcctggactctttccttgcagaagcgattttcaggacaactcaagccaattaaaaaaaagaaaatcactttccctatctgtttggatgaagttaactagctagtcactaagtgaattttgaaacctcttacctaaatgatagctgctcttggtgtttctttatgctctacgtttggtcatgtaacatgcataatctctgttctctgaagttgattaaagttctaaactt

SEQ ID NO: 92164 - DNA, 528 bp, Homo sapiens
ctaagttttgcgggccaatgcttaatttagtgaacaaaatttgaccgaaaacagtattttctaaacatgttttgtaggaattccttatattctcctaatccctagggtctcgtcctgcccaagaaaagacaaccataaagagggaaggactaacaactcaagttaaaaatgaatcagatttttacttttggggtgaatgaatcacttccagaaacttggggtggtgcctctaaaatatgtacacgggttaaagcttctctcggtttgtttcactctcctccattccctcgcacactgatctcatgttctctctttgctggacgaattcaagttccccaggcgcacagtgtgacttccaattgcgggtcgggggcacacatgtgggcggcgtggcgtgcacacggtacttcgtcctgacacctgggcagacacctgggaggcacttccccgctagcccaaggttccctgcacgcccggagtccgctctgcggcggcttcccattcatgcttttgacaactctgcggccg

SEQ ID NO: 92165 - DNA, 503 bp, Homo sapiens
gctcagggcagggaagtggaaaacaggccagagcgtgatgaggctgcatgttctcatctgtcccctgagaccctggccgcacaaggcatctctccacactgaggccatgggctgctctctgggccttgagccgaagtcctgtcccgccttgggccagggtgggtgaggggcttccctcctttcaagtctggccagcgacagccggggaagcgacttggagagacgtctggctggccaggccccggggccgtaggtagcggattgataggtgccctctgcctggtcccgagagactccccctctcctcccacacctaggcctctgcacctagggctgtggaggagttaatctgccagtcacccccgttcctgtcctccaggctgggaagcgcagcccaggagttgcctccactctcctggcaggcttgctgggctgggtgggtgagtggggctgagtgtgttatggtggggggcgctgctgggtataggaggagggtgtgcttg

SEQ ID NO: 92166 - DNA, 118 bp, Homo sapiens
tgggagcctagaattttggcacatgctaggaaggatccccactaaaaaccttggacactgagactgggcccagtggctcatgcctgtaattccagcactttggtaggccaaggcagga

SEQ ID NO: 92167 - DNA, 667 bp, Homo sapiens
ctgcagagtgcccccaagcctgtgttcactgaggtctccactctgacaacactttcatctggaatcctgcctcctgcaggtgtgtgagtgggtcagggcttttctcttcatgggaccctaatcccttcccctcccagtttgggggaaaccaaccccagggattgagtcacttccagctgtgttcccacaggcccacaaccttcacacttgcagctctgggctccagcacctaattccttcagtctctgccttcaaaacacaaaggtctcaggttagacatacctcatacatggggaatgttcctctttttttctaaaaccacaacaaaaatctgtttataactacaaccaacatttattgtgtgcttactacttggagtcaggcactattgtagaagacagttaagtgtcttcaattcaatttacttaacaatccttatgggtataaacaggaataatatattcacacatactgtattattcctgtttataaggaaattggggctcataagattggatcaggagcctacagctagggagtggaagaatctgaatttgaacttagatctctttatttagtaaaccatggaaacctggctactgagttctcactttgccaacaacctgtttcatcttgcgtatatttcttgtttcttaaatatatttcc

SEQ ID NO: 92168 - DNA, 589 bp, Homo sapiens
gttatttgtactatcagttcatatgtcataaattggggaatacatttataacatcaaaatcattggtttataataatgtttttctcacacattactcatgtgaatacaaagcacgttaacacagttaattacagtaagccttggaagaagtgttacgtatgatgttcagttgcccctgtattcttcctttcgactcagtttggccacataccctttgtccagaagagagcttactgtgcagttctcccaggtcttggtacatattttctgcataactttgcagaccttttcacagaagagcaattgaatgagctcctgctgtacatatctaccagatctacctcaaaatgtaaagtcagtgaagagagcctgtcaaaaaatgtatactgattgataccatttctgtgaatttcagaaacatatataactgaattattaagaatatgtttcacatagtataagttcaatgaaaagtgtagcaggataagtacaattcagaatagtggttgccccatggttgggtactgaaggaggaatatgtgaggaaagagtgatacagttgagaaagaacacacagagcctttccaag

SEQ ID NO: 92169 - DNA, 452 bp, Homo sapiens
ttaagaaaattaaatgaagtgatatgatattatataaaactaatacacttatttgaaagagtagtaattagattcagatctttattctctaaaatcataaataaaagtataacgtacagaagagacaaagacttagagtaacaaagtaatggttggagattgtattgaaaggaggaacctctttttaatgagactcaaaaatacttgacatttcataagaaagtccccaaatgaaatctctgtaatatacaaatatggtatttagtttccaaatgttcaattattactacttattttgtacctagagggctgactttagcatctaaatgactctaagagacatgaaattaaaagaaatatgggccatgcgtatagtcatatcagcaaatcagaaagaaagaacttacaagagccccctggccttattctcatgaaaagtgataaaacagacc

SEQ ID NO: 92170 - DNA, 234 bp, Homo sapiens
aagtctaaggtctgacagaagcctttgcagagacacctgctgctttcaggactgcctgggactgagggaatcccccacacaaaaggcttctgttggatttctatgtgtagttgagaatgcttaaatgacaagggaagaaaaccacaagtgaaagggaaagacggactaggagaagtaaatggaaatacggttgacaaaaggctatgccagtgcaaaaagtgagtatgaagcacc

SEQ ID NO: 92171 - DNA, 206 bp, Homo sapiens
tgagtcttaccctgtcactcaggctggagcatagcaactctgtcatgcttcactgcagcctcaaactcctgggctcagacagtcttcccacctcaggctcctcagtacctaggactacagatgtatatcactatgcctagctaatttttgattttttgtagagatagggtctccctatgttgagtaggctggtcttgaactcttgg

SEQ ID NO: 92172 - DNA, 446 bp, Homo sapiens
ctcattaatatctattgtgtatttactctgtgctaggtgttgctctaagtgcttttgtatgtattgtttgtatttaattcttagacttaactaaataaggagggactactgttatccccattttacagatggaggaattctcataggtagcaagtggtagagccaagatttctcgggcagttattattgagcctgtgcacttaccgttattctaacaaattattgtggaaaatcaatcaaaatcttagatcaccacaacattatatacttctcttgagagattcctcaaacaatattggtgaccatgacaattaactcttttatttaagattaataaattgcaactttgctttagacacaagtaaggactcagtaataaatcatttacaactaacaagttcattttgttttagagtgagaaaaatataccatgcataaatggaaaa

SEQ ID NO: 92173 - DNA, 499 bp, Homo sapiens
gcacaccctccttcatccccaaccctttcactggaagttccctccacttccttgccctaactgaatgccagcaaatcccctgtgagcacttgccatcaagcagaaggtatttattttcacacattcttaaaagctcacacctggcatgtgaagtgggcaacttcctgctttccacaggcgctacacgcgtcattacctctccgttactcctctagaaggtttcactacttgagatccattccattaacatttaacactttgctccctcatcattactggcttttactgaactccttgtcatttcctttctgttattgatgttttaaagacctgggtcacgatctcctcatcacacttttcatgacaggatgttgagttattttaatatttacaagaacagtcctccgatactctgacttctcaaccccttgagccctgtctcactccaacaccattttgatgaatctctcaggatgcttttaattgctctttagcccag

SEQ ID NO: 92174 - DNA, 346 bp, Homo sapiens
aggcattcgtgggcctgagaaagctgaataccagatactgcagaaaagcatgccaagaagagatagcccattcatgctgcacagctctggagaggctggcagatggaggggtctgcttccaccacaggtgagtgtgagttggggggttaatcaaaatctctgtagcaagcaatgtaatcccaggtcccacccctattcctgaagccaactacctctcccactcaggaaaaaactggaggattatgacgtgaaaaactgacatggagcagctgctaatgtggggttagtaggtatcatgaaagagggctatgctgaaaacaagaaaattaagtgaaagtttacatat

SEQ ID NO: 92175 - DNA, 448 bp, Homo sapiens
ttcctcctggctctctccagggttccacccagaacttgtggctgcccagagctcagctccgaatcccaacctggaacctccgctgggggaatgagtcacagccccacccaggggagcgctccgcgtggctgctccataggacatgtattgtgcaccatttaagagacccctggcaacacagactcacttgcccctgcaaacactgttttggacctactacgaaccaggaattgtgccaaagagatcataacaagcccctttggcttgtcatatatgtaaggggagactgatccacataaatgcagtggtcccctctaagaagcaccctgttggagaagtgggggcccatattatgtctttctggagaggagataagaaattaaaccttatttccatgggtcaggtactagcctaggtgctgggatctttcacattagaagcctctctg

SEQ ID NO: 92176 - DNA, 163 bp, Homo sapiens
aggaggaagtgagtgggcaccacactggcaggctaaacatggctcctggcccagctctcaatcattttgaatcccctggaggcatttgctgcaagactgagcttctggtcactcccagttaagggtgctgtgcatttctggggtcccagttatcagcagcagt

SEQ ID NO: 92177 - DNA, 379 bp, Homo sapiens
aagatgtacaattttaaggacaatattttgtgcttggactagaattcagcttttgaggcacatgttaaataggcatattttaggacaaggtaaacgccacagaaattgattttttagtatcttttaaagatgcctttcagtgcaatctgaaatcattaaattttactgtactgaaacatattattttatgagtgatgtgcttaaaattacacatataaaactagaaatacatttgagaccatgcaaatataaggaaaaatagatttttgataggaatgttaatatagcagtttccactaactgaagacagagtcctctgtcatctgtcacattgttccaggtgctgtgtaaaccactgaagagtttataggctttttat

SEQ ID NO: 92178 - DNA, 220 bp, Homo sapiens
cttttaatatggttactgactaatatttcttcaattaaatacccccttttatctagtgatttatgccagtaccaacaataagataatttttggtatttgacttgtgctatatttgtttagaatataacttgcaaagccttcagcttcttgcatttccaggaagccattagattttatttagaagtgcctctgccactgtacataattgttgatcttattt

SEQ ID NO: 92179 - DNA, 246 bp, Homo sapiens
gcattcttgtgttataccagctaattgagatttgactgtggacttttggagtgattcagaaagaagggtaatgtcaaatgagtcattttcctctactccggtctcagtcttagctcttggccaagataacacatcctgacttgccttcataaaagctttatctgccctaagattctaatgaagcaggccaggtgcagtggctcacgcccgtaatcccggcactttgggaggccgaggccggtggat

SEQ ID NO: 92180 - DNA, 610 bp, Homo sapiens
  misc_feature (348)..(348): n is a, c, g, or t
  misc_feature (551)..(551): n is a, c, g, or t
tggaggatttggaaaactttttttttgtcaaggaccagatagtaaatattttagactttatgagtcagacagttgctgttgcaattatacaattccactgtggtagcttgaaagcagacctagacaatgtatgaatgagtattgctatgttctgataaaactgtatttgcacagataggtgtcacgggctgtagtctgctgatacctgctctagatcagccacctctaatgtggaatgtatgtacctagagaaaaatccaagatgggctacaaaaaagtagtggaactttatattattgacttattttaatatttctccttgttttatgatatgtgtataaatattantatggtagtctttggaatgcaataactaaatattaaaaaatagatggtattcaaaacaattttttactgttttttttactagtcttactattaaaattagagccaggttatatatatgaagagactgttctcagtccttttagatgggctttgatagtattttgctaattgaattacaacaaattttattggctgattatttngatgtagtagaagcttcaacatgctaattcatgaaagtatcagtctgcacttaaatggt

SEQ ID NO: 92181 - DNA, 353 bp, Homo sapiens
gcaacaaaaatctttaatttgactgtgtataattttttagtctttgatgataaattcagagttcagggatagtgttaatttgaacctaaaaaaaaaaagaaaaaaaaaaacccaaacaccaaaaactgaggttggtaaactacatatcaaaattcctagtacagtctgggagtatgtagactcaagatattctgcataaagatgatcataacttccgttagaaaggatatatgcagcctgggttaagaggaatattagttgggaggcgggagggatagcattaggagatatacctaatgttaaatgacgagttaatgggtgcagcacaccaacatggcacatgtatacatatg

SEQ ID NO: 92182 - DNA, 387 bp, Homo sapiens
taggcagctgactggttaactgcagtcaaggatataaacaatggcctcctctaaggaaaaaaattacattgctgacatccaaggccccatcatctctcaccaggctcttactggtttccgtgtctccagtgtctttctcacccttcttcccacaaatctgtcttccaccctgccagaataactctcagaatctcatacttggcatgatgctacttctcctcttaaaacaaaagaaaacaaactcagggtcccataagacttatggtaaggtccattcttcttagcaatataaccctcatctgtactttcagctttcttgccagctgcttctgtatcctatcctctgtcctggaatctcaccaggcatctcatttttatttattttcc

SEQ ID NO: 92183 - DNA, 540 bp, Homo sapiens
cacgctcagataattttgtatttttagtagagatggggtttctccatgttggtcaggctggtctcaaattcctgacctcaggtaatctgcccgcctcggcctcccaaagtgctggtattataggcgtgagccactgtacccggctggcagtggttttcttagcccacctctggtcccctccagtggtggctttccccaaggaggatcttttcttaactttgcataagtttgggacacagcattagggagtacagctaaattcttagagattagaatctcttctgagatgttcaagccagaaggaagaaggcgttaatcatgcagcatggcttttcctgaatgcaaagaccagcctgggcaacatgacacatgcaaggtcaacaaggatattcctggacttttgaagatgtccccctccttatcatggtgagattatggaaagcaatacctggactccagggccagctttgtctctaacttgcttcatggtcttggaaaactcaatccttctctctgggcctcagattcttcatttgtaac

SEQ ID NO: 92184 - DNA, 752 bp, Homo sapiens
tttcacaagatcatggagctttgccagaaagggacttcacaactgtcataacattttaatctctccaggcctgggacaaggtggaaacctacaggttcccaaggagattgttttcatcattagcatttcagccaaagccttaatgctgcaaaaagaaagcataatgtggagcaagagttcctgctttggcctattctgactctagctctccagggctctgatgaagtccattgtgatctagcattagaaaaaaaataaaaaataaaaaaaattttttaaaaagccttctctcttaagccttgctgctattcgtactggctcaaagtgcatggtttaatacttgtagctatgaatacttgcatatttccaaaggccttaccgtacacatttattgggaaaaatctctattttctcccaagtgggtttgaggtaaaaagaatccagtaaatagctacgcatttcattagactggatgagggtgtggattgctgtcattgtttgcccaagtgaactgctgctgtaaagaagccccttacaaaatgttacctgcgggactgctttcatgtcttcattaacaacagacacttggcattagtgaatcaaccactgtgttaattagaactcagacttgcagcctatcctcagctcatagaataaacactgttttcctttgacctaattacaagatgttcttaaacatcatcattttgtaaaagaaaccatgactacaaattgctttgtgaaccatgcac

SEQ ID NO: 92185 - DNA, 261 bp, Homo sapiens
caggctttctatgtgtcagggcagggccagatccagccccacatgcctacacttcatctgccccctctcaccctgtttaattgcaggcaagtagctttatttttttagggttccagctcctgcttctgcaaaaggcagggttgaaccagacgaccgacttccaagcttaagactgtacatttttcgaattgataatggggacccaaaatgccactatctttttctacttcttggcagccttgcgtacgtctgatgattgtc

SEQ ID NO: 92186 - DNA, 782 bp, Homo sapiens
atatatatatatatatatatatatgtcttaatgttaataacaattccctaggtcactagtaataagaagctatgggctttaaacttaaaaggtgctaaaccagtttaaatgtaaaacattctcataatagaattgcactgtatttcttttctactttgatgcttttccaaagtgctatagttcctgtgagatttgtgtcctgcacagaatcaaatgctaggtctttcacttttggatggctgagtaccataaaacatgatttatttggtaacaaaaatgtttccaggagtttaaaaagggaccactactcagagctaaaaaagttctaacagtcactttttaaaaaagctagtttatcatttgtttataaagaaaaacacaactctgtcctacttcctctaataaaaatggaaaatattaagatgagctgtgtgcttataaagaggtgctacacaagtcatcttacgtttctagtcaacacaaacattgcttcagtgacacttaatattcaatacatgatgcattactcttagcatttttgcatttactctccgcatataacaaggtcagatatcaaaacagtcctgatcttagacaactcactaccaatatttaaagctgtttcctcctaggactacagttcctaaactatgcacagggagcaaagtggtattcccttaggataaacttggtcaaggctcagataaccctgagatgaacttagcaaagtccttgtaaagaaatcttcagatgggaaactccacctatgtgaattttaaagc

SEQ ID NO: 92187 - DNA, 793 bp, Homo sapiens
cttataacttcagctcccaataactcactctcagccttttccattgtgacgctgcagaaaactatgtgttgcttcactaatgccatatctcttttaatgccatagaaggaaggaaaatttaacagggagagaggtcatactttttgaagtataagtttatgtttttttccagggcttctatatcattagtgggagattgaaccacttatatcataaataaaatatcacttataccttatatttgaataggagtttatagtttaagagctacataaaatcacaaatggtgtggtctcagtctgcaggtgtggaaatgagaggtaaatgacctggccaaggtcacacagttaacatgtaaggggatggatctgggactcgaacccatgagctcaggtttagggttgttggttttttattttctgactgtttcagtaattcttagactttcacagcgaaagactcctgatggcagaagagagtacacaaatgtctcttgggaatacagaaagcaagcttaaagagataacagcaaacataaaaatgtctgaactattttaaaaattcatgtaaatataaccctatgtttcagcatatcctgatatatttaacacaacaaagcttccttcttttgttctagactgcatttatgtacatcttctcattctatgaagtgaccaagagttgtgatttggctggttcattattgtcctttagtactagccaagaactatttaagatcagaaattaatgtttcttcctagaaaatcaagaagagagagacagacagatgaga

SEQ ID NO: 92188 - DNA, 356 bp, Homo sapiens
tctgtgtcttggatgctgggtgtgcttggtggtctgtctgtctgtctgtgccttggatgctggatctgtttggtggtctgtctgtgtcttggatgcttggtctgcttggtggtctgtctgtctgtgtcttggatgttggatctgtttggtggtctgtctgtctgtgtctcagatgctgggtctgcttggtggtctgtctgtctgtgtcttggatgctgggtctgcttggtggtctgtctgtctgtgccttggatactggatctgtttagtggtctgtctgtctgtctgtgtcttggatgctgggtgtgcttggtggtctgtctgtctgtctgtctgtgccttggatgctggatctg

SEQ ID NO: 92189 - DNA, 581 bp, Homo sapiens
tggggcagcagtaatttttgattgggagtttgcagacctttgtgaagcctcgggctgttgcctattctgacaagttttcacagattgcaggtgagagatcagagggaagtgagcgggtagtgttttgagaaagtccaggaaggggaatttccttctaaccattggatagacgtgagcattgtaagtcgtattgttgcctatctcaggtccttagagactgaagaagtatagggtgggcttgtttgcttgtagtgagttatttgaagaaatagagtatttcaggtatagacttgaagtaaaggtacatgagtcactagggattttaaaaaatattccttagacgtaactagatatttaaagtaaacccttcctctgtgatttcaggtcaacaacgagataatcactgaagttcctttgttctgtgaaattttgtgacttttatttttttgaacaaccattacatgcactgattgtttcttgctgttgtacaagcactgttgttagtggaggggagctaagggtttactctactgcataacacatttgctctcttatgtctttcacagagacccatgggggaa

SEQ ID NO: 92190 - DNA, 642 bp, Homo sapiens
tgaaggttttctaaaaagaaaatgggattggattggtcagggctacgtactccgatttgtgaggcagtggtgtctttgtaggcttggctgttaatgaggtggtttatactctacaaggcatgtgaaattatttgagggagagaggagaatgtgtttttctaacccttactatgtcctaaacacagagggtaatcaataaccaactgttgaggatgtagtttttcttaacactaaatcattccctgagagaagtccgtaagcttgactgattttaactgcctgtgagttggaaatctttgataaatgctctgagggataggaagtcagtctgggatgatacagggcatgggatctcaccatcgggagagtggtcccattcgataatgggaaaaactcatgttggatggaatggaaatgttcccagtcaagataccctcatgcccagagccaggagaaactttagaccaacctccgtcggcttcagtttctccttcctcagtttcttgatgctcctccccgagccccctcccctatcacgtatgttttgcgggttgttctgttgtttgtctttgaaaagattgatttatacatttgtacagaaaatcccagagccttttcctcttaatgctataaagttgctat

SEQ ID NO: 92191 - DNA, 422 bp, Homo sapiens
aattattttaataattaatgatgataatgagtccgaattttaagtatgaaaattattatataaagagtaaaaattacaggcatagattgagaattaatgttgagagagtgtgattgctagtaattctggggaatccattgtattctttgtgggactactttcagtgacattatatcatcatcattaagcaaatattcaggcccaggagatgaagagattaagtcttgacctcagttggttcctatcagggaggaaggatagcttactaatgtgctggcagcgtcacttccggcagcagtgactctggcagagctagcgcaagaacatcttgctttttctacagaccttgttttagagagaggatttgtttagttttacagaagtcccatcaggctgcagttaacagtaccaaggaattacca

SEQ ID NO: 92192 - DNA, 437 bp, Homo sapiens
tgggtaaagaaaaggattaagtcagggattccaagtttttaatacaagtactgcattaatatcctaaaaatttatatgtagccctgaagaagatacttaactcctgcagcttcagggctcaaaatgctgaaaagaaatcatagcatctcatcccataactggctgaattacaacaaaaattaaattcccaggcttgcaggatgcctacttttaaagtgggggtattcattcagaaaacattggatattaaaaagttaaaatgagggccaggtgcggtggctcacacctgtaatcccagcattttgggaggctgaggtgggaggatcacctgaggttgggagttcgagaccagcctggccaacatggagaaaccccttctctactaaaaatacaaaattagctgggtgtagtggtgcatgtctgtaatcccagctact

SEQ ID NO: 92193 - DNA, 394 bp, Homo sapiens
actcaaattgaggaaaacagtttagtagttaccttagcccattaatgaatacctccctcctcccagtgaaattactgaagaaaaaagtatgaaatcagattatgctaataaatataatttctacattatcaagtaatgaggcggttaaatctcaccaatatttgagaaaacttggtaatagtttttattttaagatttttttccatattttgaaaaggcttgaaatcaactctaagtaatactattccaactttcaaagtacacatctccagaaatggaaaagattctaccaagcactgacagtagatagtggcttcttcattccatgggatattttagaatgattttaactatagtctcaatatcactatcactttgccttgtgaaggctctg

SEQ ID NO: 92194 - DNA, 441 bp, Homo sapiens
ttttaacaaatatagctgtttttaacacttatattcaacttaatggctctgcttgtataagttaggctttatatacattggcggttttatttatgtctgtttaacttaggactgtgtacctaagtacagtccatcctcattattcttggattctgtatttgtgaactgcgtacttgctttatttgtaatcccccaaacagtactctcagagccttttggtcatttctggacatgctcagggtggtgaaaaatttgacttgcctgacgagcatgtttctagttgaggttgaacaaggtgttgctctgcctttttttttttttaagctctcgcactgcaaacaagtgtccttttcatggtctattcagtgccacatgttttccatttttgtgctttttctggtgactttgctgtttaaaatggcccctaagcgtagtgctgac

SEQ ID NO: 92195 - DNA, 397 bp, Homo sapiens
tggagaataaacaagtctaaactgaacccactctctccctcagcactgtagggtccctcctgatcagcatggtgcctgacacatagtaggggctcgaatatttcctgcaagaatgaacaaagtgtccagcatccctaacacttctgatattcctcgaatgcataggcgtagcagaatatccagaaagctttcaagagctggcattttctgtatcccccaacatactcccaccctccagtgctgggtttagaatcagctagaccggtctggctctgccccttcctcgctgcgttgcttcacctctctgagcctcagtttccttttctattccatacagataatcaggactctctgaggaagagaacaacagggacgccctcccggaggagttgggtgg

SEQ ID NO: 92196 - DNA, 465 bp, Homo sapiens
ctatttctgccattgccaccatcgttctccctgtctcccaaactaaaaacctcaggcattcctgactcttacttcacccctaggccccacacccatctcggcagctcatcttcccatcttagtggtatctcctgattacagtgtggtcaaacataagatccaagataaaagaaccagcaggctttagagttggacagacctgagctgcagtccccattccatcatgggtcaccatcacctcggatcatctgcctgactcaaatttcttgttcagtaaatggggactcgcaattccctcacaggtgactccagtaattgatcacatttaacagcatgtttgcagcacccaccacaaggcctggtatgctgtgtgggcaggaacaagcctcttgcccccagccaggcaactcagagcaaccagggagtccctctgaaatgacttcatcacacttcatcactcttcaa

SEQ ID NO: 92197 - DNA, 209 bp, Homo sapiens
tgggtagatcacttgagtccaggaatttgagaccagcctgggcaacatggcgagaccttgtctctgctaaaaagttagctgagcatggtggtgcttgtccatagtcccagctacctgggaggctgaggtgggaggatagcttaagcccaggaggttgaggctgcagtgatccaagatcatgctgctatactccagccttggctacagag

SEQ ID NO: 92198 - DNA, 461 bp, Homo sapiens
tttaggttagagctctaacaaccaaattgcaaagagatatttcagtcttttgagaaatgtcatacccaagtgagaataagccattatgaattttgacattttctgaattattactttatgtactattttgtatgttagagccttatattcagatataatttaaatgtcaaccaaaacaagtgttttctgctatcaatattaaaacattttgatgtgcttggagcatttgctttcagttaggcttctaaccttgccagggtaccataacagttctgtcttctccatggtctgttgcaaaagttaccagatcataacctaatcacggggggccagaggggagtgatgtggttagaatttgtgtccccacccaaatctcatcttgaattgtgatccccaggtgttgagggacagacctggtgtgaggtgattggatcatgggggcagatcccccccatgctgtt

SEQ ID NO: 92199 - DNA, 464 bp, Homo sapiens
tgtgttcagctatctagaagctccccaaacccagttcttttggggttttatggaagcttcattatgtaggtacgattgattaagtcatttgccattgatgaccagcttaactctcagttcttctcccttcccagagttttcaggggtggtgctgaaagtcctaatgttctagtcaggttttggtctttttttatgaccagcccccatcctgatgttactgaggggctcccagccatcagtcaactcatgcatatgaaaagataccacaatagggataaagaccaaatatatattttacaatatcacaatgttattgcacagtggagtaaatatcattcttattataaagaggcagagagctgaattgcattcctgccctagtgttttgtgaaagatagaacttataggaatgaagttgaatctttgaggaaatatttaagaaaagtattgaaggtatggcttgg

SEQ ID NO: 92200 - DNA, 127 bp, Homo sapiens
taatgaatatataattattaatatatatttgcatggacagtagagttttcactttttttagttcttctgagagtaaatgtaatgtgttaagatttttgtttcttcctttaggctggctttttgataa

SEQ ID NO: 92201 - DNA, 472 bp, Homo sapiens
acacacatacacgtgcatgcacgtctcagatgtaaaaagcattttctaaccagccacctatattccaaatgcccctcaaaagatagctgtgcaatatcaattgcagtcacttgggaatggcaacagaggcccacaacatatgaagttgctagtgatgctgtggaagtattatacaaatctgaaccgtgtgggcaaggaaggtgtaacacgcaggagtcaaacacttagctgaccagtaggaggacaagtaagagtttccttcttgaagaatcttttgctctcacatcttttcctcagtagagtattctccactgttacaaatgcaggttcttgagccagactacctaggtttgaatcctggctccacctctaactagctggatgaccctaggcaacctaggcaagttacttaacctccctgggccttgatttcatcatctgaacattggaaacaataccaccacctcatagg

SEQ ID NO: 92202 - DNA, 418 bp, Homo sapiens
aaacaaaatcgtattttttttccagtggattttgttcattgtatcttgcaaaatttagaagtcttgggaaatattcaaattcaattgtaaagaatgaacatcattaagtgcttaagctgttagaatgtgcttttaactccagttaaagtgttcttgggatgaattttgaggctatctgcaatatatttaaatatatgaaaaggaagtcatttttaagagttaatatttcttacaattttctctttgatttgctctcagtggacctttcttcaagtgcaatgaattattgggcaatatttcagagatagaagatatactaataaacaattgtgattcctccatcaccacattcttcaaattcctgaataaacaattttccagtataagctaaaacacaggcttaacagaaataactctt

SEQ ID NO: 92203 - DNA, 424 bp, Homo sapiens
gtaaactgttactagaatttgaactccttgacaggtgggatgttgaatgcctcatctctgctgtcccccactgtgaaaagcacagtacaaaaccttggacaaggcaggcttcagtaattatgtcctataatggaaagtgaagttgtaccaggtgggctccaagttaaggatttatctgtattagccttggctcttaactacttacttgtttcaaaggatattatgaaaaagaaagaattgtgaaggttaaatccaaatgatgcaatttaaaaattcaagcccagctaggcatggtggctcatgcttataatcccagtgctttggcaggccaaggtgggaggatcttgagaccaagagttcaagaccagcctggacaacatagccagacccctatttcttaaaacaaaaacaaaaaaaccacaag

SEQ ID NO: 92204 - DNA, 937 bp, Homo sapiens
gaatctgaagtgggagttgggcttcctgtctgcaaagtccaggctgggagatgaaatggatgagtgcatggcagaaaatatcatcacatactgaagaagctgactgctaaacttagcctaacatgttttaaattgtaacttttccagattctctttcatagcagaatgtcactgacagtccacagatattgtctccaaaatggcaattaatactgaatacagcaattctagcctctttcaaggagaaccatctgacccagaagctgaaaagaatttacttaagaaggcaccaatttaataagcatccatgattttacatttaattaactttttgagaaaattgtgctttccaaaatctagttaaacaaaagaggtagttaaatctctttaatgcctcaacatcaaattccaatggagtatgatttttttttaaagtttcaggatttttttttctgagaaatatcaaactgcttttattatccgtctcggcaacctataatatataaggaaacagatcaaactaataatcttaaacatgtcttaaaaatgtaaatttctagtcttgatttctgacctccagcttaatgaattattatgccttgcttgtattttcaaatccaaaccatttagtagtttataactggatttttataaaatttgacattttatttatttatttatttaagacagagtctcttgctctacccaggctggagtgcagtggcatgatctcagtttactgcagcctctgcctcccgggttccagtgattctcctgcctcagcctcccaagtagctgggattacaggtgtgtgccaccatgcctggcaaatttttgtatttttaatagagattgggtttcgccatcttggccaggctggtctccaactcctggcctcaagtgatctgcctaccctggcctcccaaagtgcgggcgc

SEQ ID NO: 92205 - DNA, 293 bp, Homo sapiens
gagattgcaccactgcactccagcctgggtgacagagcgagagtccgcttgaaaaaaaaaaaaaagagggtaaccaattgtctagaattgcatgcctagcaaaaatggtcttcaaaattaaaagggaaataaaggcatttcaggacaaaaagaatttatcacaagtaggactgcattaaaaaaatgctaaagacatcttcaggcatgagccactgtgcccagcctagaagcaacttttgaaaagataatagctgaggactttcaaaactggtgaaaagcattgtcacagttta

SEQ ID NO: 92206 - DNA, 382 bp, Homo sapiens
agatttcaggtcgtgcagcaggtgatgtctatgccagttgcagaaaagagcaggaggagaaaacgtgttgaaagagaaaggggaaggtggtgcatccagtttggggcatgaggcattagacgtgcccaggaactttctggggaagaatggcaaggatctggggcagtcatgactgggtcacagtcagcgaggagataggtatggaggctgatgagggaagaggatgctcacagggcgggaaaattgaggaacatcagtcatccaggttgataaaagaagaggagcttgcaaaggagaagagaggaaggaaggaaggaaacatgggcaggggggtcatgggagacacagagggacaatgtcccaggatgcatgtgtgctcacg

SEQ ID NO: 92207 - DNA, 694 bp, Homo sapiens
cggaagggaagacaagtatcaacaccactggcatcatttccaaactgatcttatgttgaataatttccaccacattgaagtacctttcgactctatccagtttttgggttttgttttttttaattcatcaagcctttcgttttcaaaccaccatttgtcagccttgaggtagagagacatatagatttgaaaatactttcttaagagatcatgtaactatataactctgaatttaaaaattgaggggggagggataatttcaacccactgcctcttaccagaaacatttttttaaatctgtaactgctttagtgttaacagggtgcaaggtggtttttgtcccgtattgttcttaaaaggttctcatttattgtgattgtattgtactgtatgagaacaaatcataaattgccttgtattgtttataatagaccataccacgtactacttcagtttttatgttccaagtttttcagtgatgcatgttaacagttaggtcctaaaattctgtggtgctaattctcccatacccaatggtgcttttgtggatgctaactgcacacatgctgaacaaagcttgaagtttaaaactttcctcccttcctctgtttatatgaagtaaaatgaaataacttgaatttgtctcaaagtatcactgacaatctaataaacttgtttatatgtgtgaaaagtt

SEQ ID NO: 92208 - DNA, 420 bp, Homo sapiens
cttcaactctcccacctcttccccattaaaagtcactgcaattcctaggaagcagtcttctcttatccctttgccttcgtggcagaccctgtgccatgctttaaggaccacaaagctacgtgatgaaacagacaggagaaagggaggatgggactatgtttactgtttgtactcagagaagtgttcaaacaagaaaagggaggatcccttcctgtgagtgttattttatcttaaatacctttccagttgtcatctttggactgttctcagacactgaaagacttgagctccttcctgcatgccacagaagtataggaacattcttcgcgttgcacttatggctgaactgcacaggctaaattatagcccgctctactagccacacaatccaatctcgtatttataattctcttctatctc

SEQ ID NO: 92209 - DNA, 518 bp, Homo sapiens
gtgagttccatgacccccctctgtgtgcagcctcaggacactgcttcctgcatccctgcagctccagctccagctccagctccagccatgactgaaagatgcacaggtacagcttgggtcactgctacagagggtgccgcctagaagccttggtaacttcctcatagtgttaagccactggtggacgcagcatgagactagaggcttgggaaccttgctatagattttggaagatatatggaaatgactggctgtccaggcaaaagcatcccaaaaaggcagagccttatatgaaacttctactagggcaacacagaaggaaaatatggtgttggagcccccacactggaggccaccatcatgcagacccgagatgtgggaccagtccaagatccggggtaacagggtgaaacccggtctctactaaaagcacaaaaaactagctgagggtgggggggggacctgtagtcccagctactcagggggctgaggcaggagaatggtgtgaacccaggagg

SEQ ID NO: 92210 - DNA, 697 bp, Homo sapiens
gtgagttccatgacccccctctgtgtgcagcctcaggacactgcttcctgcatccctgcagctccagctccagctccagctccagccatgactgaaagatgcacaggtacagcttgggtcactgctacagagggtgccgcctagaagccttggtaacttcctcatagtgttaagccactggtggacgcagcatgagactagaggcttgggaaccttgctatagattttggaagatatatggaaatgactggctgtccaggcaaaagcatcccaaaaaggcagagccttatatgaaacttctactagggcaacacagaaggaaaatatggtgttggagcccccacactggaggccaccatcatgcagacccgagattcatagaccccccaacaacttgtattctcagtggggaaaagtcacaggcactcaacaccagccgagcccctgagggcagccgtggggcataaaccctgcaaagccacaggtgccaagctgcccaaggccttgtgagcctagccctcacacccctgtgccctggatgtgggacaaggtttcaaaaaggctgattttggagctgtaggatggaatgactggccttctgggtttggagtttcatggggccgggcctcagtgcatgggcggtgtccaacctctggtgctgaatcagccaagagatccaagcctgcttggctgcctc

SEQ ID NO: 92211 - DNA, 286 bp, Homo sapiens
atatactcatactgggtaaccaacctgcttggtttgtccagaactttcaatgctaaaaccgggaaatcctgagcaaaacaggacaagttagacattcttacaattgaggactgtaaaactgtaaaggaggaatgagcactatctctttatactagtgtggagtgatcatcagaatacatagttacatttaaaaaatgcaagctagaggaaagtatttagagtgtactactgtgtaagtaaagggtgaatatgaaacatacacagacacacacacctgcttatatta

SEQ ID NO: 92212 - DNA, 610 bp, Homo sapiens
cagatacatttgcttctggcttaaaatcactggctgtaggaggaaactccagcagagggcatcgtaaggatttcatagtgtctatggtcatcttggtaattcctcagataattcctggcaattctattaggtcttgaacttcacttacttcttacatgtttaataaaaagaagttcaaaacattgccatggctgttgaattcccacaggcttgtcttccctttaaaattcatcacatggtttgtactcttttgcagatataatacgtaagtttgcaggtggatgctttcagccaataagttcaaaagtactgctacaagggccaggcatggtggctcacaccagtaatcccaaccctttgggaggccaaagcaggtggatcacggtatcaggaaactgagaccatcctagccaacatggtgaaaccccatctgtactaaaaatacaaaaattagctgagtgtggtagtgtgtgcctgtcgtcccagctactcaggaggccgaggcaggaggattgcttgaacccgggaggcagaggttgcagtgagctgagattgcgccattgcagcacagcctggttacagagtgagattccgtcccccaccgccaaaa

SEQ ID NO: 92213 - DNA, 589 bp, Homo sapiens
agatattgtaatacaatattacaaaaggtattacttttgtaatacccaaaggccaagtaattttcctttctatactgattgagacttgagtgattttttttgaaaatgaaaaattcttttagatttgataaatagtgaaaaagctgaaagaaatttttgttttccttggcattatatgcattcgcctcttatgagaagaaaatttaaatttcacagaaaaaaaagttacatgtgacctataacttgttggcctgtgttaacttttttctaggaaggattgaaaaaccaactagaaacttgacagctgggcgtggtggctcatgcctgtaatcccagccctttgggaggctgaggcaggcagatcacttgaggtcaggagttcgagaccagcctggccaatatggtgagaccctgtctctactaaaaatacaaaaactaaccaggtgtggtggcatgcacctgtaatcccaggtacttgggaggctgaggcacagaatcacttgaacacaggaggcggaagttgcagtgagccaagattgcaccattgcattccagcctggatgacagagcgagactcttgtctccaaaa

SEQ ID NO: 92214 - DNA, 548 bp, Homo sapiens
ggaaaagaggaggattctgggtacaggaacagttgcaggggagggcatggaatgatttgaaagaacatagggggtgctagggacaataaagacaaactccatctccactaaacttgactggggactggcctcttcatcccagtttaacaacgggatagatggttgtgaagacagactctggaatcaggccctggaatttgaattccagtgtgaatgtctcctcaatgtgtggcccttctaggctttggtattcccaattacacagtgaggatgatggtggactctgactctccaggtagttgagaggattaaagaagaatgtgtgtggagcagcagagtggtgctgagcacagcaggctagcggtggacactggagatacggcacaagggctgggagtgaaaatgcctgggattgagcctggcttttcccctagctctgtgaccttattcaagacatttgaccaccttcagcctcagggcctccatctgtgcaatgggcgcattcgttcacagattactgagtgaagtgctggcaggcttcccaggct

SEQ ID NO: 92215 - DNA, 318 bp, Homo sapiens
gatctctaatttcgtatgtctgataagtagacacacattccaataactcccgagacatcctttcagtgattaatgacagactacaactatatctggaattagtgttttcaatggaagtaaatgctgcttattctgaagaaatgtaactgggatacttctgataaaagatgtttcctaagtttcccatttgtatttgaaaagcacatgatcgtgaccatcattgtatacttctctttaacccatgtttctcctccagcaaaacaatcacacatttgaaaatcccacatagtttatggcatctccatgtctctaaaatga

SEQ ID NO: 92216 - DNA, 478 bp, Homo sapiens
cgagagttgagaacaagcaagtggaatgatccaatttcctttatgaaaggatcagtcttatttttctgcggagaacagactgcagtaacataaaaacagaaatggttaacgggctactgcaatagtccagaagagaggctagcttggactaggggagtgaaatgtacagtagggggagtgaaatgtacagtaggggaagtgaaaagtggtcatattcaggatttattttagaatgcaaagtaaataggatttgctaatgaattatatgtgcaatatgacagcagactttctgtatgctttgctgccttagcaactaggtgaatgatagtgaccatttactgaaaagggaaacacaagaaaagtgcaggttgagaggaaggtacgtagggaggggatcagaagttgtttgaggagtatccaattttattcacctaacagacatccaactggagataacaagtgataaggtatatttaaa

SEQ ID NO: 92217 - DNA, 440 bp, Homo sapiens
gaactagcatttaagctatttcattatggggtgaaaaaaatcatcatttagaaataaaagtaccaattagtaacaaattatgtacaagtcactctagcacagtgtatttcaatcacttcagtaatttttagcctcccaaaaaaaagtgtcagaaatgaggcatgaaaagctattaaatgaatcattcacacgttgaatagatgttgtcgtcagtttgttctctcaatggaaataatgaacaactgatttatttataactggtcattatgataatacaccttcatgttccacccttttcaatatattatggatatgttataactgtcttattttatagctgatctaaaatcatatgcttccattaaaatttcttcttttccaggctttcccttaattttaatgttcctttggcttggggtgtaattaaaatgtttttactg

SEQ ID NO: 92218 - DNA, 184 bp, Homo sapiens
tattcagaagaaataagtaatgtctccttttttctactttaggaaatttctagaaaatctatcattagaaacatcacaaaataattatttacttctgtaaatattacttaaccctttagaagggaaatatatactttttcttcatacctaggaccacatttacaagatgtttccatataaccaa

SEQ ID NO: 92219 - DNA, 759 bp, Homo sapiens
gggggtccccagagctgtgattggtgttggcccgagggtcacccctaaggattggacaccttgggtctgggtgggcagacagccttggaacctcgggatagctgaacttggagctgacccagaaggcgttttctcagaaagcttatcgcttctaagggtagaatcccatattctggaacaacggggacagcagagaacttgatcttacatcagagtcggcccagtctgcctttgtgaaggactccccagtgtgaacccggaaacagacaacactgtgaccctaggggagccctgggtgccgggtggggcgggcatggggctcagagaacgcggggagccctgggtgccgcgtggggttcagagtacgtgagaacagaacgtgggagaggaagaaaaaggcaacggcagagggggcctctgtggggcgggagaggagcatggaagggcctgagctcagagagagaggggccaggacagagggggcctctgtggggcgggagaggagcatggaagggcctgagctcagagagagaggggccaggatgcacaagggaaatggaggggcttccaggggcagacagctagctactcctctcccattttttcaggtttatgtggacgtgaggtgggcagagtcaggcatttctgcaggtgtctgaacagcggcttttcctgttccatgggggctgcagaatagtgctcccttcttcatccagccagctgttctgaaactttgttgctcaaaatgtaacgtctccg

SEQ ID NO: 92220 - DNA, 604 bp, Homo sapiens
gacagagttttactctgttgcccaggctggagtacagtggaacgatctcagctcactgcaacccctgcctcctgggttcaagcgattctcgtgcctcagccccccaagtacccgggattacaccatgcctgactaagttttctattttttttagttgagactgggtttcactgtgttggccaggctagtctcgaactcctgacctcaagtgatccacctgcctcggcctcccaaagtgctggaattgcaggcatgagccaccacgcccagccaggatattgatttgatgacaaacttatcatcgttcagtgatgtacctccgtgtcaaacttagatatccaagataggttattcttttttttcttgagacagaatttcactcttgttgcccaggatggagtgcaatggcacgatcttggttcaccacaacctccgcttcccaggttcaagcgattcacctgcctcagcctcctgagtagctgggattacaggcacgtgccaccatgccggctaattttgtatttttagtagagacagggttttactatgctggccaggctggtctcgaactcctgacctcaagtgatccacccacctcagcctc

SEQ ID NO: 92221 - DNA, 629 bp, Homo sapiens
atgtgtgcggtgttctagaggatcccgacgaggggtgtccagccccttgggtctttggtgtcttccctgaggttgaggacgtggcctgtacctgctcctgtcccccgtaggctgggctgctctctgctgggcaccaggcctcacctctttgctgtgggtgggaagcgtcgagtggtcacacgatctggcttggccacctggtgttgccatgcaggatgtggttgctccattttccttggacgacactgggtggtggcagctacacccgacactgtcctctcatcctggtttgtcctgcctggaggggctgcgtgaaaccacacgagaggctcaggtggtgtcatcactccgagccacgggtggtggaagctgcacccccacactgtcctctgcgtgaaaccacacgagaggctcaggaggtgtcatcactccgagccacatgctcgcccctgggtttctttcccaggcaatgagatgaggttggggttcagcctcatttcctctccccattctgtggatttgtgaagccatggaaggccctcgccctgtgactctgcccccaggatccccactgactgcagaggagggaagtcgcctgatgctttccaagtgaacaaagatgacaacac

SEQ ID NO: 92222 - DNA, 257 bp, Homo sapiens
accccaagtgtacatagatgggtgaatggtatgatggctaattttatatgagactgggaaataaggtaaccagatatttgattaaatattattctgggtgtgactgtgaggatgtttctggataggattaacatctgaatgggtagacttagtaaagcagattccctcctcaatttgtatgagcctcatccaactggatgaaagtgtgcacagagcaacaacgctgagtaaaggagaattcactctctctgccgatc

SEQ ID NO: 92223 - DNA, 907 bp, Homo sapiens
agaaaatactactttttaataaataggaactttatatatataagtggaagtattttacttcagacttagaaacatgttttaaatagcctttttgttaccaacacactattttttgtctacatgaattggttagttataaaatcattttagcatcattagccttgcttgtcttttccagcttatcttttgctgcttaatattgaactctaggaatcttttatccagtttttgaagtgtcagtattaaacagattagtaaattcacattcatgaagttttactgtatatttaatgaaatggctatacacacaaacagtgcatgtttaacttttttttccccttctactagaaatgttttaaccattcagtcagaatttgttttgtagcaacagttggcctcagaatatattttttttctcagaagaggttgagctgctttcagagattttgttcatcttctatagagtgttagaccacttcagtttcacgttttctgatgttgtccatcatacttctaagagggttgggttcacttttcaagtctttcacggttttgttttttacacagcagcagcagtcaagcacttcataaaggaaagccagcaccactaaagataccactgtaaatataaataaaagcaggatgacaaagcaggcagtgttccagttgtcatggaaagggtaaattttttgaacttgaaaaccaaggtactgataaacagaggtagtggtttcattccagtggctggaagccattcttagagattccacttgctcttttgaatctataaaaaaggtagaaaatgaatttatgtagcaaactacagatctgttaattcaaatctcagtactaagatttcttagtaaatttgtataggcaacatgaatcttccttaattaatgcctaa

SEQ ID NO: 92224 - DNA, 2939 bp, Homo sapiens
gagatgcttatgagaacctttctggggtgctggggggttccgtcccgaaatgctcagcccaatccatgagtcagcagcggcgagaggaggaagcaacggtaatcagtccaaaaaccagcgtgccaaagcgtttccccagggctctgtccggactctgaagcactgcataaaggggtctgtctgagcccaatttacttccggtggggaagggaaagggaagacaccaccggaagcaaggaaggtgctgtgtaatcattaaggagcggaggcttttggagctgctaaaatgccggattacctcggtgccgatcagcggaagaccaaagaggatgagaaggacgacaagcccatccgagctctggatgagggggatattgccttgttgaaaacttatggtcagagcacttactctaggcagatcaagcaagttgaagatgacattcagcaacttctcaagaaaattaatgagctcactggtattaaagaatctgacactggcctggccccaccagcactctgggatttggctgcagataagcagacactccagagtgaacagcctttacaggttgccaggtgtacaaagataatcaatgctgattcggaggacccaaaatacattatcaacgtaaagcagtttgccaagtttgtggtggaccttagtgatcaggtggcacctactgacattgaagaagggatgagagtgggcgtggatagaaataaatatcaaattcacattccattgcctcctaagattgacccaacagttaccatgatgcaggtggaagagaaacctgatgtcacatacagtgatgttggtggctgtaaggaacagattgagaaactgcgagaagtagttgaaaccccattacttcatccagagaggtttgtgaaccttggcattgagcctcccaagggcgtgctgctctttggtccacccggtacaggcaagacactctgtgcgcgggcagttgctaatcggactgatgcgtgcttcattcgagttattggatctgagcttgtacagaaatacgtcggtgagggggctcgaatggttcgtgaactctttgaaatggccagaacaaaaaaagcctgccttatcttctttgatgaaattgatgctattggaggggctcgttttgatgatggtgctggaggtgacaatgaagtgcagagaacaatgttggaactgatcaatcagcttgatggttttgatcctcgaggcaatattaaagtgctgatggccactaacagacctgatactttggatccagcactgatgaggccagggagattggatagaaaaattgaatttagcttgcccgatctagagggtcggacccacatatttaagattcacgctcgttcaatgagtgttgaaagagatatcagatttgaactgttagcacgactgtgtccaaatagcactggtgctgagattagaagcgtctgcacagaggctggtatgtttgccatcagagcacggcgaaaaattgctaccgagaaggatttcttggaagctgtaaataaggtcattaagtcttatgccaaattcagtgctactcctcgttacatgacatacaactgaaccctgaaggctttcaagtgaaaactttaaattggaatcctaaccttatatagacttgttaataaccaattcataaacaaataaatggcttcaaaattgtatgcttttttccatatctcttcttgtaatataataaaaggtgatttctaatgttattaggcagaaaagcttgttagaatatattttgactatttttttgacccacacccgtttaaggatttcacatcatacaaagcgcttgcttagatggcttctatcctaggcatatgctggccgggtgctctacatataaattctcattgtatcctcccatctgtccactgaggaagattatcaaatggatcttcatccaatggatgcataaactttcctacttacttgtagtggcaaagctggctttcaagtacaagtttgttggctccattacctatgctcctattatccgcttctgtcccgcaacaaagtagctcacttaggcgtatgaccacatgcattatgatagtttcccaccaccatattgaataataaaagctttggccaaagcttttttaaagtaggagaaacattggatgtatatgttttgcattgccatttgatttcaaattaatcaggaagaattagtgattttaatgagcagtaaagtggtgcaataaagcagaaagaaaaatgttcagccagaagtgaaagactagtaaaaaaagaaaaaaaaaatatttgtacatatgatctaatttagaaagtccagaattggcttcatacagaaaagtgattactttcattttacaaattactttaaaattttggtaaagtttctgttaggcttctggtctacagtgaggtattttaaaaataaaggttatattagaatcctcaacagatctctttaaaattacctcctgtgtaaccaccaccaaatcctatcttctaccacaattaccccttcccccaatgccaagaccaaagcacaataatgaatatttttattgaagttcgatattcataaataagttgcaaaataagagttggatatatttttaattcacaatagaaaaagttgacaacatagaaaatgctgctttgcactgaaatacttaaaattatgaaagttttcaagtaaagaaattaaagccttttataaaatccaaccaacattcttgatttttcatttttatgaacttgatcagaaaaattcatcttttttaaccctgccctaatttttcttgaggaattaaatagagcaaactattttcaggttatgcttacaataaaatatacttaagaaaatgactgaagatgtatgtttttgaatgttttgattaaataaatgtacacatttagaacacactctgaa

SEQ ID NO: 92225 - DNA, 2733 bp, Homo sapiens
  misc_feature (12)..(13): n is a, c, g, or t
aaataggctagnnacgaggctggggtgcaaggaaggtgctgtgtaatcattaaggagcggaggcttttggagctgctaaaatgccggattacctcggtgccgatcagcggaagaccaaagaggatgagaaggacgacaagcccatccgagctctggatgagggggatattgccttgttgaaaacttatggtcagagcacttactctaggcagatcaagcaagttgaagatgacattcagcaacttctcaagaaaattaatgagctcactggtattaaagaatctgacactggcctggccccaccagcactctgggatttggctgcagataagcagacactccagagtgaacagcctttacaggttgccaggtgtacaaagataatcaatgctgattcggaggacccaaaatacattatcaacgtaaagcagtttgccaagtttgtggtggaccttagtgatcaggtggcacctactgacattgaagaagggatgagagtgggcgtggatagaaataaatatcaaattcacattccattgcctcctaagattgacccaacagttaccatgatgcaggtggaagagaaacctgatgtcacatacagtgatgttggtggctgtaaggaacagattgagaaactgcgagaagtagttgaaaccccattacttcatccagagaggtttgtgaaccttggcattgagcctcccaagggcgtgctgctctttggtccacccggtacaggcaagacactctgtgcgcgggcagttgctaatcggactgatgcgtgcttcattcgagttattggatctgagcttgtacagaaatacgtcggtgagggggctcgaatggttcgtgaactctttgaaatggccagaacaaaaaaagcctgccttatcttctttgatgaaattgatgctattggaggggctcgttttgatgatggtgctggaggtgacaatgaagtgcagagaacaatgttggaactgatcaatcagcttgatggttttgatcctcgaggcaatattaaagtgctgatggccactaacagacctgatactttggatccagcactgatgaggccagggagattggatagaaaaattgaatttagcttgcccgatctagagggtcggacccacatatttaagattcacgctcgttcaatgagtgttgaaagagatatcagatttgaactgttagcacgactgtgtccaaatagcactggtgctgagattagaagcgtctgcacagaggctggtatgtttgccatcagagcacggcgaaaaattgctaccgagaaggatttcttggaagctgtaaataaggtcattaagtcttatgccaaattcagtgctactcctcgttacatgacatacaactgaaccctgaaggctttcaagtgaaaactttaaattggaatcctaaccttatatagacttgttaataaccaattcataaacaaataaatggcttcaaaattgtatgcttttttccatatctcttcttgtaatataataaaaggtgatttctaatgttattaggcagaaaagcttgttagaatatattttgactatttttttgacccacacccgtttaaggatttcacatcatacaaagcgcttgcttagatggcttctatcctaggcatatgctggccgggtgctctacatataaattctcattgtatcctcccatctgtccactgaggaagattatcaaatggatcttcatccaatggatgcataaactttcctacttacttgtagtggcaaagctggctttcaagtacaagtttgttggctccattacctatgctcctattatccgcttctgtcccgcaacaaagtagctcacttaggcgtatgaccacatgcattatgatagtttcccaccaccatattgaataataaaagctttggccaaagcttttttaaagtaggagaaacattggatgtatatgttttgcattgccatttgatttcaaattaatcaggaagaattagtgattttaatgagcagtaaagtggtgcaataaagcagaaagaaaaatgttcagccagaagtgaaagactagtaaaaaaagaaaaaaaaaatatttgtacatatgatctaatttagaaagtccagaattggcttcatacagaaaagtgattactttcattttacaaattactttaaaattttggtaaagtttctgttaggcttctggtctacagtgaggtattttaaaaataaaggttatattagaatcctcaacagatctctttaaaattacctcctgtgtaaccaccaccaaatcctatcttctaccacaattaccccttcccccaatgccaagaccaaagcacaataatgaatatttttattgaagttcgatattcataaataagttgcaaaataagagttggatatatttttaattcacaatagaaaaagttgacaacatagaaaatgctgctttgcactgaaatacttaaaattatgaaagttttcaagtaaagaaattaaagccttttataaaatccaaccaacattcttgatttttcatttttatgaacttgatcagaaaaattcatcttttttaaccctgccctaatttttcttgaggaattaaatagagcaaactattttcaggttatgcttacaataaaatatacttaagaaaatgactgaagatgtatgtttttgaatgttttgattaaataaatgtacacatttagaacacactctgaa

SEQ ID NO: 92226 - DNA, 2172 bp, Homo sapiens
gagatgcttatgagaacctttctggggtgctggggggttccgtcccgaaatgctcagcccaatccatgagtcagcagcggcgagaggaggaagcaacggtaatcagtccaaaaaccagcgtgccaaagcgtttccccagggctctgtccggactctgaagcactgcataaaggggtctgtctgagcccaatttacttccggtggggaagggaaagggaagacaccaccggaagcaaggaaggtgctgtgtaatcattaaggagcggaggcttttggagctgctaaaatgccggattacctcggtgccgatcagcggaagaccaaagaggatgagaaggacgacaagcccatccgagctctggatgagggggatattgccttgttgaaaacttatggtcagagcacttactctaggcagatcaagcaagttgaagatgacattcagcaacttctcaagaaaattaatgagctcactggtattaaagaatctgacactggcctggccccaccagcactctgggatttggctgcagataagcagacactccagagtgaacagcctttacaggttgccaggtgtacaaagataatcaatgctgattcggaggacccaaaatacattatcaacgtaaagcagtttgccaagtttgtggtggaccttagtgatcaggtggcacctactgacattgaagaagggatgagagtgggcgtggatagaaataaatatcaaattcacattccattgcctcctaagattgacccaacagttaccatgatgcaggtggaagagaaacctgatgtcacatacagtgatgttggtggctgtaaggaacagattgagaaactgcgagaagtagttgaaaccccattacttcatccagagaggtttgtgaaccttggcattgagcctcccaagggcgtgctgctctttggtccacccggtacaggcaagacactctgtgcgcgggcagttgctaatcggactgatgcgtgcttcattcgagttattggatctgagcttgtacagaaatacgtcggtgagggggctcgaatggttcgtgaactctttgaaatggccagaacaaaaaaagcctgccttatcttctttgatgaaattgatgctattggaggggctcgttttgatgatggtgctggaggtgacaatgaagtgcagagaacaatgttggaactgatcaatcagcttgatggttttgatcctcgaggcaatattaaagtgctgatggccactaacagacctgatactttggatccagcactgatgaggccagggagattggatagaaaaattgaatttagcttgcccgatctagagggtcggacccacatatttaagattcacgctcgttcaatgagtgttgaaagagatatcagatttgaactgttagcacgactgtgtccaaatagcactggtgctgagattagaagcgtctgcacagaggctggtatgtttgccatcagagcacggcgaaaaattgctaccgagaaggatttcttggaagctgtaaataaggtcattaagtcttatgccaaattcagtgctactcctcgttacatgacatacaactgaaccctgaaggctttcaagtgaaaactttaaattggaatcctaaccttatatagacttgttaataaccaattcataaacaaataaatggcttcaaaattgtatgcttttttccatatctcttcttgtaatataataaaaggtgatttctaatgttattaggcagaaaagcttgttagaatatattttgactatttttttgacccacacccgtttaaggatttcacatcatacaaagcgcttgcttagatggcttctatcctaggcatatgctggccgggtgctctacatataaattctcattgtatcctcccatctgtccactgaggaagattatcaaatggatcttcatccaatggatgcataaactttcctacttacttgtagggaagtggttcagtacaagttgtggtccatactatgtctatatcgtttgtcgaaagtagtcacttaggttgccctgtttttgtttttcaccatgaaaaagtggcagttaaaggaacagggttttgtggggaaaggaaggtttggggtaaaaagggggaaaaaaaaagggggatgggggatgttttacgagtgtaggttac

SEQ ID NO: 92227 - DNA, 1930 bp, Homo sapiens
gagatgcttatgagaacctttctggggtgctggggggttccgtcccgaaatgctcagcccaatccatgagtcagcagcggcgagaggaggaagcaacggtaatcagtccaaaaaccagcgtgccaaagcgtttccccagggctctgtccggactctgaagcactgcataaaggggtctgtctgagcccaatttacttccggtggggaagggaaagggaagacaccaccggaagcaaggaaggtgctgtgtaatcattaaggagcggaggcttttggagctgctaaaatgccggattacctcggtgccgatcagcggaagaccaaagaggatgagaaggacgacaagcccatccgagctctggatgagggggatattgccttgttgaaaacttatggtcagagcacttactctaggcagatcaagcaagttgaagatgacattcagcaacttctcaagaaaattaatgagctcactggtattaaagaatctgacactggcctggccccaccagcactctgggatttggctgcagataagcagacactccagagtgaacagcctttacaggttgccaggtgtacaaagataatcaatgctgattcggaggacccaaaatacattatcaacgtaaagcagtttgccaagtttgtggtggaccttagtgatcaggtggcacctactgacattgaagaagggatgagagtgggcgtggatagaaataaatatcaaattcacattccattgcctcctaagattgacccaacagttaccatgatgcaggtggaagagaaacctgatgtcacatacagtgatgttggtggctgtaaggaacagattgagaaactgcgagaagtagttgaaaccccattacttcatccagagaggtttgtgaaccttggcattgagcctcccaagggcgtgctgctctttggtccacccggtacaggcaagacactctgtgcgcgggcagttgctaatcggactgatgcgtgcttcattcgagttattggatctgagcttgtacagaaatacgtcggtgagggggctcgaatggttcgtgaactctttgaaatggccagaacaaaaaaagcctgccttatcttctttgatgaaattgatgctattggaggggctcgttttgatgatggtgctggaggtgacaatgaagtgcagagaacaatgttggaactgatcaatcagcttgatggttttgatcctcgaggcaatattaaagtgctgatggccactaacagacctgatactttggatccagcactgatgaggccagggagattggatagaaaaattgaatttagcttgcccgatctagagggtcggacccacatatttaagattcacgctcgttcaatgagtgttgaaagagatatcagatttgaactgttagcacgactgtgtccaaatagcactggtgctgagattagaagcgtctgcacagaggctggtatgtttgccatcagagcacggcgaaaaattgctaccgagaaggatttcttggaagctgtaaataaggtcattaagtcttatgccaaattcagtgctactcctcgttacatgacatacaactgaaccctgaaggctttcaagtgaaaactttaaattggaatcctaaccttatatagacttgttaataaccaattcataaatgttgtaccaagtgctgtcttgaagactgctgatgttctggaatggaaaattaagttgtttagtgtttatggctttgtgagataaaactctccttttccttaccataccactttgacacgcttcaaggatatactgcagctttactgccttcctccttatcctacagtacaatcagcagtctagttcttttcatttggaatgaatacagcattaagcttgttccactgcaaataaagccttttaaatcagcggaaagtaatacat

SEQ ID NO: 92228 - DNA, 2727 bp, Homo sapiens
aaggaagagagaacacgaggagcccagttactcggccgaggcataatcgagcggaggcttttggagctgctaaaatgccggattacctcggtgccgatcagcggaagaccaaagaggatgagaaggacgacaagcccatccgagctctggatgagggggatattgccttgttgaaaacttatggtcagagcacttactctaggcagatcaagcaagttgaagatgacattcagcaacttctcaagaaaattaatgagctcactggtattaaagaatctgacactggcctggccccaccagcactctgggatttggctgcagataagcagacactccagagtgaacagcctttacaggttgccaggtgtacaaagataatcaatgctgattcggaggacccaaaatacattatcaacgtaaagcagtttgccaagtttgtggtggaccttagtgatcaggtggcacctactgacattgaagaagggatgagagtgggcgtggatagaaataaatatcaaattcacattccattgcctcctaagattgacccaacagttaccatgatgcaggtggaagagaaacctgatgtcacatacagtgatgttggtggctgtaaggaacagattgagaaactgcgagaagtagttgaaaccccattacttcatccagagaggtttgtgaaccttggcattgagcctcccaagggcgtgctgctctttggtccacccggtacaggcaagacactctgtgcgcgggcagttgctaatcggactgatgcgtgcttcattcgagttattggatctgagcttgtacagaaatacgtcggtgagggggctcgaatggttcgtgaactctttgaaatggccagaacaaaaaaagcctgccttatcttctttgatgaaattgatgctattggaggggctcgttttgatgatggtgctggaggtgacaatgaagtgcagagaacaatgttggaactgatcaatcagcttgatggttttgatcctcgaggcaatattaaagtgctgatggccactaacagacctgatactttggatccagcactgatgaggccagggagattggatagaaaaattgaatttagcttgcccgatctagagggtcggacccacatatttaagattcacgctcgttcaatgagtgttgaaagagatatcagatttgaactgttagcacgactgtgtccaaatagcactggtgctgagattagaagcgtctgcacagaggctggtatgtttgccatcagagcacggcgaaaaattgctaccgagaaggatttcttggaagctgtaaataaggtcattaagtcttatgccaaattcagtgctactcctcgttacatgacatacaactgaaccctgaaggctttcaagtgaaaactttaaattggaatcctaaccttatatagacttgttaataaccaattcataaacaaataaatggcttcaaaattgtatgcttttttccatatctcttcttgtaatataataaaaggtgatttctaatgttattaggcagaaaagcttgttagaatatattttgactatttttttgacccacacccgtttaaggatttcacatcatacaaagcgcttgcttagatggcttctatcctaggcatatgctggccgggtgctctacatataaattctcattgtatcctcccatctgtccactgaggaagattatcaaatggatcttcatccaatggatgcataaactttcctacttacttgtagtggcaaagctggctttcaagtacaagtttgttggctccattacctatgctcctattatccgcttctgtcccgcaacaaagtagctcacttaggcgtatgaccacatgcattatgatagtttcccaccaccatattgaataataaaagctttggccaaagcttttttaaagtaggagaaacattggatgtatatgttttgcattgccatttgatttcaaattaatcaggaagaattagtgattttaatgagcagtaaagtggtgcaataaagcagaaagaaaaatgttcagccagaagtgaaagactagtaaaaaaagaaaaaaaaaatatttgtacatatgatctaatttagaaagtccagaattggcttcatacagaaaagtgattactttcattttacaaattactttaaaattttggtaaagtttctgttaggcttctggtctacagtgaggtattttaaaaataaaggttatattagaatcctcaacagatctctttaaaattacctcctgtgtaaccaccaccaaatcctatcttctaccacaattaccccttcccccaatgccaagaccaaagcacaataatgaatatttttattgaagttcgatattcataaataagttgcaaaataagagttggatatatttttaattcacaatagaaaaagttgacaacatagaaaatgctgctttgcactgaaatacttaaaattatgaaagttttcaagtaaagaaattaaagccttttataaaatccaaccaacattcttgatttttcatttttatgaacttgatcagaaaaattcatcttttttaaccctgccctaatttttcttgaggaattaaatagagcaaactattttcaggttatgcttacaataaaatatacttaagaaaatgactgaagatgtatgtttttgaatgttttgattaaataaatgtacacatttagaacacactctgaa

SEQ ID NO: 92229 - DNA, 1191 bp, Homo sapiens
  misc_feature (1059)..(1059): n is a, c, g, or t
  misc_feature (1089)..(1089): n is a, c, g, or t
  misc_feature (1108)..(1109): n is a, c, g, or t
  misc_feature (1113)..(1113): n is a, c, g, or t
gagatgcttatgagaacctttctggggtgctggggggttccgtcccgaaatgctcagcccaatccatgagtcagcagcggcgagaggaggaagcaacggtaatcagtccaaaaaccagcgtgccaaagcgtttccccagggctctgtccggactctgaagcactgcataaaggggtctgtctgagcccaatttacttccggtggggaagggaaagggaagacaccaccggaagcaaggaaggtgctgtgtaatcattaaggagcggaggcttttggagctgctaaaatgccggattacctcggtgccgatcagcggaagaccaaagaggatgagaaggacgacaagcccatccgagctctggatgagggggatattgccttgttgaaaacttatggtcagagcacttactctaggcagatcaagcaagttgaagatgacattcagcaacttctcaagaaaattaatgagctcactggtattaaagaatctgacactggcctggccccaccagcactctgggatttggctgcagataagcagacactccagagtgaacagcctttacaggttgccaggtgtacaaagataatcaatgctgattcggaggacccaaaatacattatcaacgtaaagcagtttgccaagtttgtggtggaccttagtgatcaggtggcacctactgacattgaagaagggatgagagtgggcgtggatagaaataaatatcaaattcacattccattgcctcctaagattgacccaacagttaccatgatgcaggtggaagagaaacctgatgtcacatacagtgatgttggtggctgtaaggaacagattgagaaactgcgagaagtagttgaaaccccattacttcatccagagaggtttgtgaaccttggcattgagcctcccaagggcgtgctgctctttggtccacccggtacaggcaagacactctgtgcgcgggcagttgctaatcggactgatgcgtgcttcattcgagttattggatctgagcttgtacagaaatacgtcggtgaggggctcgaatggttcgngactcttggaatggccgaaaaaaaagcggnctatttcttgagaatgggnnaggnggggcgtgaaaggggggggacaaggggacaaagtgggcggcacacacaggttggtcggagaaagggggaactctttgt

SEQ ID NO: 92230 - DNA, 2710 bp, Homo sapiens
  misc_feature (112)..(112): n is a, c, g, or t
  misc_feature (120)..(120): n is a, c, g, or t
  misc_feature (141)..(142): n is a, c, g, or t
tttaaggagctgggaggcttttggagactgctaacacggtgtccgtgtaattacgctacgcgctgtccgattcgagcgagtaatgaccgaagaagattgactgaagaaggangagaaggncatccgagctctggatgaggnngatatggcttgttgaaaacttatggtcagagcacttactctaggcagatcaagcaagttgaagatgacattcagcaacttctcaagaaaattaatgagctcactggtattaaagaatctgacactggcctggccccaccagcactctgggatttggctgcagataagcagacactccagagtgaacagcctttacaggttgccaggtgtacaaagataatcaatgctgattcggaggacccaaaatacattatcaacgtaaagcagtttgccaagtttgtggtggaccttagtgatcaggtggcacctactgacattgaagaagggatgagagtgggcgtggatagaaataaatatcaaattcacattccattgcctcctaagattgacccaacagttaccatgatgcaggtggaagagaaacctgatgtcacatacagtgatgttggtggctgtaaggaacagattgagaaactgcgagaagtagttgaaaccccattacttcatccagagaggtttgtgaaccttggcattgagcctcccaagggcgtgctgctctttggtccacccggtacaggcaagacactctgtgcgcgggcagttgctaatcggactgatgcgtgcttcattcgagttattggatctgagcttgtacagaaatacgtcggtgagggggctcgaatggttcgtgaactctttgaaatggccagaacaaaaaaagcctgccttatcttctttgatgaaattgatgctattggaggggctcgttttgatgatggtgctggaggtgacaatgaagtgcagagaacaatgttggaactgatcaatcagcttgatggttttgatcctcgaggcaatattaaagtgctgatggccactaacagacctgatactttggatccagcactgatgaggccagggagattggatagaaaaattgaatttagcttgcccgatctagagggtcggacccacatatttaagattcacgctcgttcaatgagtgttgaaagagatatcagatttgaactgttagcacgactgtgtccaaatagcactggtgctgagattagaagcgtctgcacagaggctggtatgtttgccatcagagcacggcgaaaaattgctaccgagaaggatttcttggaagctgtaaataaggtcattaagtcttatgccaaattcagtgctactcctcgttacatgacatacaactgaaccctgaaggctttcaagtgaaaactttaaattggaatcctaaccttatatagacttgttaataaccaattcataaacaaataaatggcttcaaaattgtatgcttttttccatatctcttcttgtaatataataaaaggtgatttctaatgttattaggcagaaaagcttgttagaatatattttgactatttttttgacccacacccgtttaaggatttcacatcatacaaagcgcttgcttagatggcttctatcctaggcatatgctggccgggtgctctacatataaattctcattgtatcctcccatctgtccactgaggaagattatcaaatggatcttcatccaatggatgcataaactttcctacttacttgtagtggcaaagctggctttcaagtacaagtttgttggctccattacctatgctcctattatccgcttctgtcccgcaacaaagtagctcacttaggcgtatgaccacatgcattatgatagtttcccaccaccatattgaataataaaagctttggccaaagcttttttaaagtaggagaaacattggatgtatatgttttgcattgccatttgatttcaaattaatcaggaagaattagtgattttaatgagcagtaaagtggtgcaataaagcagaaagaaaaatgttcagccagaagtgaaagactagtaaaaaaagaaaaaaaaaatatttgtacatatgatctaatttagaaagtccagaattggcttcatacagaaaagtgattactttcattttacaaattactttaaaattttggtaaagtttctgttaggcttctggtctacagtgaggtattttaaaaataaaggttatattagaatcctcaacagatctctttaaaattacctcctgtgtaaccaccaccaaatcctatcttctaccacaattaccccttcccccaatgccaagaccaaagcacaataatgaatatttttattgaagttcgatattcataaataagttgcaaaataagagttggatatatttttaattcacaatagaaaaagttgacaacatagaaaatgctgctttgcactgaaatacttaaaattatgaaagttttcaagtaaagaaattaaagccttttataaaatccaaccaacattcttgatttttcatttttatgaacttgatcagaaaaattcatcttttttaaccctgccctaatttttcttgaggaattaaatagagcaaactattttcaggttatgcttacaataaaatatacttaagaaaatgactgaagatgtatgtttttgaatgttttgattaaataaatgtacacatttagaacacactctgaa

SEQ ID NO: 92231 - DNA, 3536 bp, Homo sapiens
gagatgcttatgagaacctttctggggtgctggggggttccgtcccgaaatgctcagcccaatccatgagtcagcagcggcgagaggaggaagcaacggtaatcagtccaaaaaccagcgtgccaaagcgtttccccagggctctgtccggactctgaagcactgcataaaggggtctgtctgagcccaatttacttccggtggggaagggaaagggaagacaccaccggaagcaaggaaggtgctgtgtaatcattaaggagcggaggcttttggagctgctaaaatgccggattacctcggtgccgatcagcggaagaccaaagaggatgagaaggacgacaagcccatccgagctctggatgagggggatattgccttgttgaaaacttatggtcagagcacttactctaggcagatcaagcaagttgaagatgacattcagcaacttctcaagaaaattaatgagctcactggtattaaagaatctgacactggcctggccccaccagcactctgggatttggctgcagataagcagacactccagagtgaacagcctttacaggttgccaggtgtacaaagataatcaatgctgattcggaggacccaaaatacattatcaacgtaaagcagtttgccaagtttgtggtggaccttagtgatcaggtggcacctactgacattgaagaagggatgagagtggggtaagatttctatttacaataaatacttttctttcactaaggatactgtctcacattcatatccttggctttgtagtgaataaatggactgagttccttggaataccaaaggatgatctagtaatgtactatagttgaaaattctgtcttctgcatctgcttcctaacttcccatcggcttcgctgactcccctactcccactgttgtttattatgaatggcttcaaatttcagagttgaggttaccagtccatttaaggtaacatggtataggttgggggagtacttgctttaggatagttgtgatgctaagtgtgttaatgtctatagaatacataacaactcacttagtaaattaaaaaaaaatctcccctccctcctcaaaggtttgattgctgttggataggttgtttgcgacattagacatgtagtttagtatcctcagatttcatgctctctttatttctctttatataattagggactctgtctctctcttgttttcttaaagtatggttttggggataaaggactaaacataaaagcactttgaaagcttaaagaatgtattaatgactatcttttttacttccttagcgtggatagaaataaatatcaaattcacattccattgcctcctaagattgacccaacagttaccatgatgcaggtggaagagaaacctgatgtcacatacagtgatgttggtggctgtaaggaacagattgagaaactgcgagaagtagttgaaaccccattacttcatccagagaggtttgtgaaccttggcattgagcctcccaagggcgtgctgctctttggtccacccggtacaggcaagacactctgtgcgcgggcagttgctaatcggactgatgcgtgcttcattcgagttattggatctgagcttgtacagaaatacgtcggtgagggggctcgaatggttcgtgaactctttgaaatggccagaacaaaaaaagcctgccttatcttctttgatgaaattgatgctattggaggggctcgttttgatgatggtgctggaggtgacaatgaagtgcagagaacaatgttggaactgatcaatcagcttgatggttttgatcctcgaggcaatattaaagtgctgatggccactaacagacctgatactttggatccagcactgatgaggccagggagattggatagaaaaattgaatttagcttgcccgatctagagggtcggacccacatatttaagattcacgctcgttcaatgagtgttgaaagagatatcagatttgaactgttagcacgactgtgtccaaatagcactggtgctgagattagaagcgtctgcacagaggctggtatgtttgccatcagagcacggcgaaaaattgctaccgagaaggatttcttggaagctgtaaataaggtcattaagtcttatgccaaattcagtgctactcctcgttacatgacatacaactgaaccctgaaggctttcaagtgaaaactttaaattggaatcctaaccttatatagacttgttaataaccaattcataaacaaataaatggcttcaaaattgtatgcttttttccatatctcttcttgtaatataataaaaggtgatttctaatgttattaggcagaaaagcttgttagaatatattttgactatttttttgacccacacccgtttaaggatttcacatcatacaaagcgcttgcttagatggcttctatcctaggcatatgctggccgggtgctctacatataaattctcattgtatcctcccatctgtccactgaggaagattatcaaatggatcttcatccaatggatgcataaactttcctacttacttgtagtggcaaagctggctttcaagtacaagtttgttggctccattacctatgctcctattatccgcttctgtcccgcaacaaagtagctcacttaggcgtatgaccacatgcattatgatagtttcccaccaccatattgaataataaaagctttggccaaagcttttttaaagtaggagaaacattggatgtatatgttttgcattgccatttgatttcaaattaatcaggaagaattagtgattttaatgagcagtaaagtggtgcaataaagcagaaagaaaaatgttcagccagaagtgaaagactagtaaaaaaagaaaaaaaaaatatttgtacatatgatctaatttagaaagtccagaattggcttcatacagaaaagtgattactttcattttacaaattactttaaaattttggtaaagtttctgttaggcttctggtctacagtgaggtattttaaaaataaaggttatattagaatcctcaacagatctctttaaaattacctcctgtgtaaccaccaccaaatcctatcttctaccacaattaccccttcccccaatgccaagaccaaagcacaataatgaatatttttattgaagttcgatattcataaataagttgcaaaataagagttggatatatttttaattcacaatagaaaaagttgacaacatagaaaatgctgctttgcactgaaatacttaaaattatgaaagttttcaagtaaagaaattaaagccttttataaaatccaaccaacattcttgatttttcatttttatgaacttgatcagaaaaattcatcttttttaaccctgccctaatttttcttgaggaattaaatagagcaaactattttcaggttatgcttacaataaaatatacttaagaaaatgactgaagatgtatgtttttgaatgttttgattaaataaatgtacacatttagaacacactctgaa

SEQ ID NO: 92232 - DNA, 2885 bp, Homo sapiens
gagatgcttatgagaacctttctggggtgctggggggttccgtcccgaaatgctcagcccaatccatgagtcagcagcggcgagaggaggaagcaacggtaatcagtccaaaaaccagcgtgccaaagcgtttccccagggctctgtccggactctgaagcactgcataaaggggtctgtctgagcccaatttacttccggtggggaagggaaagggaagacaccaccggaagcaaggaaggtgctgtgtaatcattaaggagcggaggcttttggagctgctaaaatgccggattacctcggtgccgatcagcggaagaccaaagaggatgagaaggacgacaagcccatccgagctctggatgagggggatattgccttgttgaaaacttatggtcagagcacttactctaggcagatcaagcaagttgaagatgacattcagcaacttctcaagacactctgggatttggctgcagataagcagacactccagagtgaacagcctttacaggttgccaggtgtacaaagataatcaatgctgattcggaggacccaaaatacattatcaacgtaaagcagtttgccaagtttgtggtggaccttagtgatcaggtggcacctactgacattgaagaagggatgagagtgggcgtggatagaaataaatatcaaattcacattccattgcctcctaagattgacccaacagttaccatgatgcaggtggaagagaaacctgatgtcacatacagtgatgttggtggctgtaaggaacagattgagaaactgcgagaagtagttgaaaccccattacttcatccagagaggtttgtgaaccttggcattgagcctcccaagggcgtgctgctctttggtccacccggtacaggcaagacactctgtgcgcgggcagttgctaatcggactgatgcgtgcttcattcgagttattggatctgagcttgtacagaaatacgtcggtgagggggctcgaatggttcgtgaactctttgaaatggccagaacaaaaaaagcctgccttatcttctttgatgaaattgatgctattggaggggctcgttttgatgatggtgctggaggtgacaatgaagtgcagagaacaatgttggaactgatcaatcagcttgatggttttgatcctcgaggcaatattaaagtgctgatggccactaacagacctgatactttggatccagcactgatgaggccagggagattggatagaaaaattgaatttagcttgcccgatctagagggtcggacccacatatttaagattcacgctcgttcaatgagtgttgaaagagatatcagatttgaactgttagcacgactgtgtccaaatagcactggtgctgagattagaagcgtctgcacagaggctggtatgtttgccatcagagcacggcgaaaaattgctaccgagaaggatttcttggaagctgtaaataaggtcattaagtcttatgccaaattcagtgctactcctcgttacatgacatacaactgaaccctgaaggctttcaagtgaaaactttaaattggaatcctaaccttatatagacttgttaataaccaattcataaacaaataaatggcttcaaaattgtatgcttttttccatatctcttcttgtaatataataaaaggtgatttctaatgttattaggcagaaaagcttgttagaatatattttgactatttttttgacccacacccgtttaaggatttcacatcatacaaagcgcttgcttagatggcttctatcctaggcatatgctggccgggtgctctacatataaattctcattgtatcctcccatctgtccactgaggaagattatcaaatggatcttcatccaatggatgcataaactttcctacttacttgtagtggcaaagctggctttcaagtacaagtttgttggctccattacctatgctcctattatccgcttctgtcccgcaacaaagtagctcacttaggcgtatgaccacatgcattatgatagtttcccaccaccatattgaataataaaagctttggccaaagcttttttaaagtaggagaaacattggatgtatatgttttgcattgccatttgatttcaaattaatcaggaagaattagtgattttaatgagcagtaaagtggtgcaataaagcagaaagaaaaatgttcagccagaagtgaaagactagtaaaaaaagaaaaaaaaaatatttgtacatatgatctaatttagaaagtccagaattggcttcatacagaaaagtgattactttcattttacaaattactttaaaattttggtaaagtttctgttaggcttctggtctacagtgaggtattttaaaaataaaggttatattagaatcctcaacagatctctttaaaattacctcctgtgtaaccaccaccaaatcctatcttctaccacaattaccccttcccccaatgccaagaccaaagcacaataatgaatatttttattgaagttcgatattcataaataagttgcaaaataagagttggatatatttttaattcacaatagaaaaagttgacaacatagaaaatgctgctttgcactgaaatacttaaaattatgaaagttttcaagtaaagaaattaaagccttttataaaatccaaccaacattcttgatttttcatttttatgaacttgatcagaaaaattcatcttttttaaccctgccctaatttttcttgaggaattaaatagagcaaactattttcaggttatgcttacaataaaatatacttaagaaaatgactgaagatgtatgtttttgaatgttttgattaaataaatgtacacatttagaacacactctgaa

SEQ ID NO: 92233 - DNA, 2757 bp, Homo sapiens
gagatgcttatgagaacctttctggggtgctggggggttccgtcccgaaatgctcagcccaatccatgagtcagcagcggcgagaggaggaagcaacggtaatcagtccaaaaaccagcgtgccaaagcgtttccccagggctctgtccggactctgaagcactgcataaaggggtctgtctgagcccaatttacttccggtggggaagggaaagggaagacaccaccggaagcaaggaaggtgctgtgtaatcattaaggagcggaggcttttggagctgctaaaatgccggattacctcggtgccgatcagcggaagaccaaagaggatgagaaggacgacaagcccatccgagctctggatgagggggatattgccttgttgaaaacttatgtgtacaaagataatcaatgctgattcggaggacccaaaatacattatcaacgtaaagcagtttgccaagtttgtggtggaccttagtgatcaggtggcacctactgacattgaagaagggatgagagtgggcgtggatagaaataaatatcaaattcacattccattgcctcctaagattgacccaacagttaccatgatgcaggtggaagagaaacctgatgtcacatacagtgatgttggtggctgtaaggaacagattgagaaactgcgagaagtagttgaaaccccattacttcatccagagaggtttgtgaaccttggcattgagcctcccaagggcgtgctgctctttggtccacccggtacaggcaagacactctgtgcgcgggcagttgctaatcggactgatgcgtgcttcattcgagttattggatctgagcttgtacagaaatacgtcggtgagggggctcgaatggttcgtgaactctttgaaatggccagaacaaaaaaagcctgccttatcttctttgatgaaattgatgctattggaggggctcgttttgatgatggtgctggaggtgacaatgaagtgcagagaacaatgttggaactgatcaatcagcttgatggttttgatcctcgaggcaatattaaagtgctgatggccactaacagacctgatactttggatccagcactgatgaggccagggagattggatagaaaaattgaatttagcttgcccgatctagagggtcggacccacatatttaagattcacgctcgttcaatgagtgttgaaagagatatcagatttgaactgttagcacgactgtgtccaaatagcactggtgctgagattagaagcgtctgcacagaggctggtatgtttgccatcagagcacggcgaaaaattgctaccgagaaggatttcttggaagctgtaaataaggtcattaagtcttatgccaaattcagtgctactcctcgttacatgacatacaactgaaccctgaaggctttcaagtgaaaactttaaattggaatcctaaccttatatagacttgttaataaccaattcataaacaaataaatggcttcaaaattgtatgcttttttccatatctcttcttgtaatataataaaaggtgatttctaatgttattaggcagaaaagcttgttagaatatattttgactatttttttgacccacacccgtttaaggatttcacatcatacaaagcgcttgcttagatggcttctatcctaggcatatgctggccgggtgctctacatataaattctcattgtatcctcccatctgtccactgaggaagattatcaaatggatcttcatccaatggatgcataaactttcctacttacttgtagtggcaaagctggctttcaagtacaagtttgttggctccattacctatgctcctattatccgcttctgtcccgcaacaaagtagctcacttaggcgtatgaccacatgcattatgatagtttcccaccaccatattgaataataaaagctttggccaaagcttttttaaagtaggagaaacattggatgtatatgttttgcattgccatttgatttcaaattaatcaggaagaattagtgattttaatgagcagtaaagtggtgcaataaagcagaaagaaaaatgttcagccagaagtgaaagactagtaaaaaaagaaaaaaaaaatatttgtacatatgatctaatttagaaagtccagaattggcttcatacagaaaagtgattactttcattttacaaattactttaaaattttggtaaagtttctgttaggcttctggtctacagtgaggtattttaaaaataaaggttatattagaatcctcaacagatctctttaaaattacctcctgtgtaaccaccaccaaatcctatcttctaccacaattaccccttcccccaatgccaagaccaaagcacaataatgaatatttttattgaagttcgatattcataaataagttgcaaaataagagttggatatatttttaattcacaatagaaaaagttgacaacatagaaaatgctgctttgcactgaaatacttaaaattatgaaagttttcaagtaaagaaattaaagccttttataaaatccaaccaacattcttgatttttcatttttatgaacttgatcagaaaaattcatcttttttaaccctgccctaatttttcttgaggaattaaatagagcaaactattttcaggttatgcttacaataaaatatacttaagaaaatgactgaagatgtatgtttttgaatgttttgattaaataaatgtacacatttagaacacactctgaa

SEQ ID NO: 92234 - DNA, 2408 bp, Homo sapiens
cggacgcgtgggtccggacgcgtgggagcctttacaggttgccaggtgtacaaagataatcaatgctgattcggaggacccaaaatacattatcaacgtaaagcagtttgccaagtttgtggtggaccttagtgatcaggtggcacctactgacattgaagaagggatgagagtgggcgtggatagaaataaatatcaaattcacattccattgcctcctaagattgacccaacagttaccatgatgcaggtggaagagaaacctgatgtcacatacagtgatgttggtggctgtaaggaacagattgagaaactgcgagaagtagttgaaaccccattacttcatccagagaggtttgtgaaccttggcattgagcctcccaagggcgtgctgctctttggtccacccggtacaggcaagacactctgtgcgcgggcagttgctaatcggactgatgcgtgcttcattcgagttattggatctgagcttgtacagaaatacgtcggtgagggggctcgaatggttcgtgaactctttgaaatggccagaacaaaaaaagcctgccttatcttctttgatgaaattgatgctattggaggggctcgttttgatgatggtgctggaggtgacaatgaagtgcagagaacaatgttggaactgatcaatcagcttgatggttttgatcctcgaggcaatattaaagtgctgatggccactaacagacctgatactttggatccagcactgatgaggccagggagattggatagaaaaattgaatttagcttgcccgatctagagggtcggacccacatatttaagattcacgctcgttcaatgagtgttgaaagagatatcagatttgaactgttagcacgactgtgtccaaatagcactggtgctgagattagaagcgtctgcacagaggctggtatgtttgccatcagagcacggcgaaaaattgctaccgagaaggatttcttggaagctgtaaataaggtcattaagtcttatgccaaattcagtgctactcctcgttacatgacatacaactgaaccctgaaggctttcaagtgaaaactttaaattggaatcctaaccttatatagacttgttaataaccaattcataaacaaataaatggcttcaaaattgtatgcttttttccatatctcttcttgtaatataataaaaggtgatttctaatgttattaggcagaaaagcttgttagaatatattttgactatttttttgacccacacccgtttaaggatttcacatcatacaaagcgcttgcttagatggcttctatcctaggcatatgctggccgggtgctctacatataaattctcattgtatcctcccatctgtccactgaggaagattatcaaatggatcttcatccaatggatgcataaactttcctacttacttgtagtggcaaagctggctttcaagtacaagtttgttggctccattacctatgctcctattatccgcttctgtcccgcaacaaagtagctcacttaggcgtatgaccacatgcattatgatagtttcccaccaccatattgaataataaaagctttggccaaagcttttttaaagtaggagaaacattggatgtatatgttttgcattgccatttgatttcaaattaatcaggaagaattagtgattttaatgagcagtaaagtggtgcaataaagcagaaagaaaaatgttcagccagaagtgaaagactagtaaaaaaagaaaaaaaaaatatttgtacatatgatctaatttagaaagtccagaattggcttcatacagaaaagtgattactttcattttacaaattactttaaaattttggtaaagtttctgttaggcttctggtctacagtgaggtattttaaaaataaaggttatattagaatcctcaacagatctctttaaaattacctcctgtgtaaccaccaccaaatcctatcttctaccacaattaccccttcccccaatgccaagaccaaagcacaataatgaatatttttattgaagttcgatattcataaataagttgcaaaataagagttggatatatttttaattcacaatagaaaaagttgacaacatagaaaatgctgctttgcactgaaatacttaaaattatgaaagttttcaagtaaagaaattaaagccttttataaaatccaaccaacattcttgatttttcatttttatgaacttgatcagaaaaattcatcttttttaaccctgccctaatttttcttgaggaattaaatagagcaaactattttcaggttatgcttacaataaaatatacttaagaaaatgactgaagatgtatgtttttgaatgttttgattaaataaatgtacacatttagaacacactctgaa

SEQ ID NO: 92235 - DNA, 2786 bp, Homo sapiens
gaaaaacggatttaaagtataaactcaggaaaagaatgaaaacccatttattactgaatttggtgtaagacaagatgaccatctttttgtagggaaaataaaaacgagagcaacttaagatatacaggagcatcactaataataaaggaatacaaactatggaaatcaagaaatcagagaacttcttaatgatgagatatttgggtttaattttccaggagaatgtatttgaaaattttatgacttggctaaagtcgaatggacctttggagttgggtatagaaaaggatctttaacagtgtcccagtttctgtagttctagtttatacctgtatattgcacactcaggatataatctagttagttgaattcattattagtggcttaggttccttattctaatcaagctttttgctgtgttaggtgtacaaagataatcaatgctgattcggaggacccaaaatacattatcaacgtaaagcagtttgccaagtttgtggtggaccttagtgatcaggtggcacctactgacattgaagaagggatgagagtgggcgtggatagaaataaatatcaaattcacattccattgcctcctaagattgacccaacagttaccatgatgcaggtggaagagaaacctgatgtcacatacagtgatgttggtggctgtaaggaacagattgagaaactgcgagaagtagttgaaaccccattacttcatccagagaggtttgtgaaccttggcattgagcctcccaagggcgtgctgctctttggtccacccggtacaggcaagacactctgtgcgcgggcagttgctaatcggactgatgcgtgcttcattcgagttattggatctgagcttgtacagaaatacgtcggtgagggggctcgaatggttcgtgaactctttgaaatggccagaacaaaaaaagcctgccttatcttctttgatgaaattgatgctattggaggggctcgttttgatgatggtgctggaggtgacaatgaagtgcagagaacaatgttggaactgatcaatcagcttgatggttttgatcctcgaggcaatattaaagtgctgatggccactaacagacctgatactttggatccagcactgatgaggccagggagattggatagaaaaattgaatttagcttgcccgatctagagggtcggacccacatatttaagattcacgctcgttcaatgagtgttgaaagagatatcagatttgaactgttagcacgactgtgtccaaatagcactggtgctgagattagaagcgtctgcacagaggctggtatgtttgccatcagagcacggcgaaaaattgctaccgagaaggatttcttggaagctgtaaataaggtcattaagtcttatgccaaattcagtgctactcctcgttacatgacatacaactgaaccctgaaggctttcaagtgaaaactttaaattggaatcctaaccttatatagacttgttaataaccaattcataaacaaataaatggcttcaaaattgtatgcttttttccatatctcttcttgtaatataataaaaggtgatttctaatgttattaggcagaaaagcttgttagaatatattttgactatttttttgacccacacccgtttaaggatttcacatcatacaaagcgcttgcttagatggcttctatcctaggcatatgctggccgggtgctctacatataaattctcattgtatcctcccatctgtccactgaggaagattatcaaatggatcttcatccaatggatgcataaactttcctacttacttgtagtggcaaagctggctttcaagtacaagtttgttggctccattacctatgctcctattatccgcttctgtcccgcaacaaagtagctcacttaggcgtatgaccacatgcattatgatagtttcccaccaccatattgaataataaaagctttggccaaagcttttttaaagtaggagaaacattggatgtatatgttttgcattgccatttgatttcaaattaatcaggaagaattagtgattttaatgagcagtaaagtggtgcaataaagcagaaagaaaaatgttcagccagaagtgaaagactagtaaaaaaagaaaaaaaaaatatttgtacatatgatctaatttagaaagtccagaattggcttcatacagaaaagtgattactttcattttacaaattactttaaaattttggtaaagtttctgttaggcttctggtctacagtgaggtattttaaaaataaaggttatattagaatcctcaacagatctctttaaaattacctcctgtgtaaccaccaccaaatcctatcttctaccacaattaccccttcccccaatgccaagaccaaagcacaataatgaatatttttattgaagttcgatattcataaataagttgcaaaataagagttggatatatttttaattcacaatagaaaaagttgacaacatagaaaatgctgctttgcactgaaatacttaaaattatgaaagttttcaagtaaagaaattaaagccttttataaaatccaaccaacattcttgatttttcatttttatgaacttgatcagaaaaattcatcttttttaaccctgccctaatttttcttgaggaattaaatagagcaaactattttcaggttatgcttacaataaaatatacttaagaaaatgactgaagatgtatgtttttgaatgttttgattaaataaatgtacacatttagaacacactctgaa

SEQ ID NO: 92236 - DNA, 2107 bp, Homo sapiens
gagatgatctagtaatgtactatagttgaaaccccattacttcatccagagaggtttgtgaaccttggcattgagcctcccaagggcgtgctgctctttggtccacccggtacaggcaagacactctgtgcgcgggcagttgctaatcggactgatgcgtgcttcattcgagttattggatctgagcttgtacagaaatacgtcggtgagggggctcgaatggttcgtgaactctttgaaatggccagaacaaaaaaagcctgccttatcttctttgatgaaattgatgctattggaggggctcgttttgatgatggtgctggaggtgacaatgaagtgcagagaacaatgttggaactgatcaatcagcttgatggttttgatcctcgaggcaatattaaagtgctgatggccactaacagacctgatactttggatccagcactgatgaggccagggagattggatagaaaaattgaatttagcttgcccgatctagagggtcggacccacatatttaagattcacgctcgttcaatgagtgttgaaagagatatcagatttgaactgttagcacgactgtgtccaaatagcactggtgctgagattagaagcgtctgcacagaggctggtatgtttgccatcagagcacggcgaaaaattgctaccgagaaggatttcttggaagctgtaaataaggtcattaagtcttatgccaaattcagtgctactcctcgttacatgacatacaactgaaccctgaaggctttcaagtgaaaactttaaattggaatcctaaccttatatagacttgttaataaccaattcataaacaaataaatggcttcaaaattgtatgcttttttccatatctcttcttgtaatataataaaaggtgatttctaatgttattaggcagaaaagcttgttagaatatattttgactatttttttgacccacacccgtttaaggatttcacatcatacaaagcgcttgcttagatggcttctatcctaggcatatgctggccgggtgctctacatataaattctcattgtatcctcccatctgtccactgaggaagattatcaaatggatcttcatccaatggatgcataaactttcctacttacttgtagtggcaaagctggctttcaagtacaagtttgttggctccattacctatgctcctattatccgcttctgtcccgcaacaaagtagctcacttaggcgtatgaccacatgcattatgatagtttcccaccaccatattgaataataaaagctttggccaaagcttttttaaagtaggagaaacattggatgtatatgttttgcattgccatttgatttcaaattaatcaggaagaattagtgattttaatgagcagtaaagtggtgcaataaagcagaaagaaaaatgttcagccagaagtgaaagactagtaaaaaaagaaaaaaaaaatatttgtacatatgatctaatttagaaagtccagaattggcttcatacagaaaagtgattactttcattttacaaattactttaaaattttggtaaagtttctgttaggcttctggtctacagtgaggtattttaaaaataaaggttatattagaatcctcaacagatctctttaaaattacctcctgtgtaaccaccaccaaatcctatcttctaccacaattaccccttcccccaatgccaagaccaaagcacaataatgaatatttttattgaagttcgatattcataaataagttgcaaaataagagttggatatatttttaattcacaatagaaaaagttgacaacatagaaaatgctgctttgcactgaaatacttaaaattatgaaagttttcaagtaaagaaattaaagccttttataaaatccaaccaacattcttgatttttcatttttatgaacttgatcagaaaaattcatcttttttaaccctgccctaatttttcttgaggaattaaatagagcaaactattttcaggttatgcttacaataaaatatacttaagaaaatgactgaagatgtatgtttttgaatgttttgattaaataaatgtacacatttagaacacactctgaa

SEQ ID NO: 92237 - DNA, 1468 bp, Homo sapiens
tctagaggttccccgtagtcgctaaaacgcgagaaggatttcttggaagctgtaaataaggtcattaagtcttatgccaaattcagtgctactcctcgttacatgacatacaactgaaccctgaaggctttcaagtgaaaactttaaattggaatcctaaccttatatagacttgttaataaccaattcataaacaaataaatggcttcaaaattgtatgcttttttccatatctcttcttgtaatataataaaaggtgatttctaatgttattaggcagaaaagcttgttagaatatattttgactatttttttgacccacacccgtttaaggatttcacatcatacaaagcgcttgcttagatggcttctatcctaggcatatgctggccgggtgctctacatataaattctcattgtatcctcccatctgtccactgaggaagattatcaaatggatcttcatccaatggatgcataaactttcctacttacttgtagtggcaaagctggctttcaagtacaagtttgttggctccattacctatgctcctattatccgcttctgtcccgcaacaaagtagctcacttaggcgtatgaccacatgcattatgatagtttcccaccaccatattgaataataaaagctttggccaaagcttttttaaagtaggagaaacattggatgtatatgttttgcattgccatttgatttcaaattaatcaggaagaattagtgattttaatgagcagtaaagtggtgcaataaagcagaaagaaaaatgttcagccagaagtgaaagactagtaaaaaaagaaaaaaaaaatatttgtacatatgatctaatttagaaagtccagaattggcttcatacagaaaagtgattactttcattttacaaattactttaaaattttggtaaagtttctgttaggcttctggtctacagtgaggtattttaaaaataaaggttatattagaatcctcaacagatctctttaaaattacctcctgtgtaaccaccaccaaatcctatcttctaccacaattaccccttcccccaatgccaagaccaaagcacaataatgaatatttttattgaagttcgatattcataaataagttgcaaaataagagttggatatatttttaattcacaatagaaaaagttgacaacatagaaaatgctgctttgcactgaaatacttaaaattatgaaagttttcaagtaaagaaattaaagccttttataaaatccaaccaacattcttgatttttcatttttatgaacttgatcagaaaaattcatcttttttaaccctgccctaatttttcttgaggaattaaatagagcaaactattttcaggttatgcttacaataaaatatacttaagaaaatgactgaagatgtatgtttttgaatgttttgattaaataaatgtacacatttagaacacactctgaa

SEQ ID NO: 92238 - DNA, 444 bp, Homo sapiens
gtataatttaaccaagatccttaatggatgtgttttatgtatgtactatataaaataggtcatcacgtatattatgtacttttaaaaacctattttcctcccagttagataaaaattccttgagtccaggaactatttgattgaatatgtatcatcataatcttgcttgatttttgacactcacttaaaacaatttgaatcgaacagaaaaaaagctctagtttcttttttaaaaattttaattctagtttctttttgaatctcacgtattgtctctcttctttcagctctggatgagggggatattgccttgttgaaaacttatgtaagtcctttcagtgtctacaaactatagatgttttatgttgaaataaaaactgttttggtattgtccttccaaaataattagaagaagttaagaaaccaaaaattaaaaaaccaaac

SEQ ID NO: 92239 - DNA, 985 bp, Homo sapiens
  misc_feature (12)..(13): n is a, c, g, or t
  misc_feature (853)..(853): n is a, c, g, or t
  misc_feature (883)..(883): n is a, c, g, or t
  misc_feature (902)..(903): n is a, c, g, or t
  misc_feature (907)..(907): n is a, c, g, or t
aaataggctagnnacgaggctggggtgcaaggaaggtgctgtgtaatcattaaggagcggaggcttttggagctgctaaaatgccggattacctcggtgccgatcagcggaagaccaaagaggatgagaaggacgacaagcccatccgagctctggatgagggggatattgccttgttgaaaacttatggtcagagcacttactctaggcagatcaagcaagttgaagatgacattcagcaacttctcaagaaaattaatgagctcactggtattaaagaatctgacactggcctggccccaccagcactctgggatttggctgcagataagcagacactccagagtgaacagcctttacaggttgccaggtgtacaaagataatcaatgctgattcggaggacccaaaatacattatcaacgtaaagcagtttgccaagtttgtggtggaccttagtgatcaggtggcacctactgacattgaagaagggatgagagtgggcgtggatagaaataaatatcaaattcacattccattgcctcctaagattgacccaacagttaccatgatgcaggtggaagagaaacctgatgtcacatacagtgatgttggtggctgtaaggaacagattgagaaactgcgagaagtagttgaaaccccattacttcatccagagaggtttgtgaaccttggcattgagcctcccaagggcgtgctgctctttggtccacccggtacaggcaagacactctgtgcgcgggcagttgctaatcggactgatgcgtgcttcattcgagttattggatctgagcttgtacagaaatacgtcggtgaggggctcgaatggttcgngactcttggaatggccgaaaaaaaagcggnctatttcttgagaatgggnnaggnggggcgtgaaaggggggggacaaggggacaaagtgggcggcacacacaggttggtcggagaaagggggaactctttgt

SEQ ID NO: 92240 - DNA, 1742 bp, Homo sapiens
gagatgcttatgagaacctttctggggtgctggggggttccgtcccgaaatgctcagcccaatccatgagtcagcagcggcgagaggaggaagcaacggtaatcagtccaaaaaccagcgtgccaaagcgtttccccagggctctgtccggactctgaagcactgcataaaggggtctgtctgagcccaatttacttccggtggggaagggaaagggaagacaccaccggaagcaaggaaggtgctgtgtaatcattaaggagcggaggcttttggagctgctaaaatgccggattacctcggtgccgatcagcggaagaccaaagaggatgagaaggacgacaagcccatccgagctctggatgagggggatattgccttgttgaaaacttatggtcagagcacttactctaggcagatcaagcaagttgaagatgacattcagcaacttctcaagaaaattaatgagctcactggtattaaagaatctgacactggcctggccccaccagcactctgggatttggctgcagataagcagacactccagagtgaacagcctttacaggttgccaggtgtacaaagataatcaatgctgattcggaggacccaaaatacattatcaacgtaaagcagtttgccaagtttgtggtggaccttagtgatcaggtggcacctactgacattgaagaagggatgagagtgggcgtggatagaaataaatatcaaattcacattccattgcctcctaagattgacccaacagttaccatgatgcaggtggaagagaaacctgatgtcacatacagtgatgttggtggctgtaaggaacagattgagaaactgcgagaagtagttgaaaccccattacttcatccagagaggtttgtgaaccttggcattgagcctcccaagggcgtgctgctctttggtccacccggtacaggcaagacactctgtgcgcgggcagttgctaatcggactgatgcgtgcttcattcgagttattggatctgagcttgtacagaaatacgtcggtgagggggctcgaatggttcgtgaactctttgaaatggccagaacaaaaaaagcctgccttatcttctttgatgaaattgatgctattggaggggctcgttttgatgatggtgctggaggtgacaatgaagtgcagagaacaatgttggaactgatcaatcagcttgatggttttgatcctcgaggcaatattaaagtgctgatggccactaacagacctgatactttggatccagcactgatgaggccagggagattggatagaaaaattgaatttagcttgcccgatctagagggtcggacccacatatttaagattcacgctcgttcaatgagtgttgaaagagatatcagatttgaactgttagcacgactgtgtccaaatagcactggtgctgagattagaagcgtctgcacagaggctggtatgtttgccatcagagcacggcgaaaaattgctaccgagaaggatttcttggaagctgtaaataaggtcattaagtcttatgccaaattcagtgctactcctcgttacatgacatacaactgaaccctgaaggctttcaagtgaaaactttaaattggaatcctaaccttatatagacttgttaataaccaattcataaacaaataaatggcttcaaaattgtatgcttttttccatatctcttcttgtaatataataaaaggtgatttctaatgtt

SEQ ID NO: 92241 - DNA, 1731 bp, Homo sapiens
gagatgcttatgagaacctttctggggtgctggggggttccgtcccgaaatgctcagcccaatccatgagtcagcagcggcgagaggaggaagcaacggtaatcagtccaaaaaccagcgtgccaaagcgtttccccagggctctgtccggactctgaagcactgcataaaggggtctgtctgagcccaatttacttccggtggggaagggaaagggaagacaccaccggaagcaaggaaggtgctgtgtaatcattaaggagcggaggcttttggagctgctaaaatgccggattacctcggtgccgatcagcggaagaccaaagaggatgagaaggacgacaagcccatccgagctctggatgagggggatattgccttgttgaaaacttatggtcagagcacttactctaggcagatcaagcaagttgaagatgacattcagcaacttctcaagaaaattaatgagctcactggtattaaagaatctgacactggcctggccccaccagcactctgggatttggctgcagataagcagacactccagagtgaacagcctttacaggttgccaggtgtacaaagataatcaatgctgattcggaggacccaaaatacattatcaacgtaaagcagtttgccaagtttgtggtggaccttagtgatcaggtggcacctactgacattgaagaagggatgagagtgggcgtggatagaaataaatatcaaattcacattccattgcctcctaagattgacccaacagttaccatgatgcaggtggaagagaaacctgatgtcacatacagtgatgttggtggctgtaaggaacagattgagaaactgcgagaagtagttgaaaccccattacttcatccagagaggtttgtgaaccttggcattgagcctcccaagggcgtgctgctctttggtccacccggtacaggcaagacactctgtgcgcgggcagttgctaatcggactgatgcgtgcttcattcgagttattggatctgagcttgtacagaaatacgtcggtgagggggctcgaatggttcgtgaactctttgaaatggccagaacaaaaaaagcctgccttatcttctttgatgaaattgatgctattggaggggctcgttttgatgatggtgctggaggtgacaatgaagtgcagagaacaatgttggaactgatcaatcagcttgatggttttgatcctcgaggcaatattaaagtgctgatggccactaacagacctgatactttggatccagcactgatgaggccagggagattggatagaaaaattgaatttagcttgcccgatctagagggtcggacccacatatttaagattcacgctcgttcaatgagtgttgaaagagatatcagatttgaactgttagcacgactgtgtccaaatagcactggtgctgagattagaagcgtctgcacagaggctggtatgtttgccatcagagcacggcgaaaaattgctaccgagaaggatttcttggaagctgtaaataaggtcattaagtcttatgccaaattcagtgctactcctcgttacatgacatacaactgaaccctgaaggctttcaagtgaaaactttaaattggaatcctaaccttatatagacttgttaataaccaattcataaacaaataaatggcttcaaaattgtaaaaagaaaaaataaaaacaaactacataaaaaaaaaccatgt

SEQ ID NO: 92242 - DNA, 1722 bp, Homo sapiens
  misc_feature (1587)..(1587): n is a, c, g, or t
gagatgcttatgagaacctttctggggtgctggggggttccgtcccgaaatgctcagcccaatccatgagtcagcagcggcgagaggaggaagcaacggtaatcagtccaaaaaccagcgtgccaaagcgtttccccagggctctgtccggactctgaagcactgcataaaggggtctgtctgagcccaatttacttccggtggggaagggaaagggaagacaccaccggaagcaaggaaggtgctgtgtaatcattaaggagcggaggcttttggagctgctaaaatgccggattacctcggtgccgatcagcggaagaccaaagaggatgagaaggacgacaagcccatccgagctctggatgagggggatattgccttgttgaaaacttatggtcagagcacttactctaggcagatcaagcaagttgaagatgacattcagcaacttctcaagaaaattaatgagctcactggtattaaagaatctgacactggcctggccccaccagcactctgggatttggctgcagataagcagacactccagagtgaacagcctttacaggttgccaggtgtacaaagataatcaatgctgattcggaggacccaaaatacattatcaacgtaaagcagtttgccaagtttgtggtggaccttagtgatcaggtggcacctactgacattgaagaagggatgagagtgggcgtggatagaaataaatatcaaattcacattccattgcctcctaagattgacccaacagttaccatgatgcaggtggaagagaaacctgatgtcacatacagtgatgttggtggctgtaaggaacagattgagaaactgcgagaagtagttgaaaccccattacttcatccagagaggtttgtgaaccttggcattgagcctcccaagggcgtgctgctctttggtccacccggtacaggcaagacactctgtgcgcgggcagttgctaatcggactgatgcgtgcttcattcgagttattggatctgagcttgtacagaaatacgtcggtgagggggctcgaatggttcgtgaactctttgaaatggccagaacaaaaaaagcctgccttatcttctttgatgaaattgatgctattggaggggctcgttttgatgatggtgctggaggtgacaatgaagtgcagagaacaatgttggaactgatcaatcagcttgatggttttgatcctcgaggcaatattaaagtgctgatggccactaacagacctgatactttggatccagcactgatgaggccagggagattggatagaaaaattgaatttagcttgcccgatctagagggtcggacccacatatttaagattcacgctcgttcaatgagtgttgaaagagatatcagatttgaactgttagcacgactgtgtccaaatagcactggtgctgagattagaagcgtctgcacagaggctggtatgtttgccatcagagcacggcgaaaaattgctaccgagaaggatttcttggaagctgtaaataaggtcattaagtcttatgccaaattcagtgctactcctcgttacttgattactgaccngaggttccgggaattaatggtcctacctatgctgtttaccttctacctttggcctgttcacagaaaaaaaaatgtccggccattaactgggccaataagctcagctgggtgcaacgggagtgtgttcaacgcgag

SEQ ID NO: 92243 - DNA, 2680 bp, Homo sapiens
  misc_feature (82)..(82): n is a, c, g, or t
  misc_feature (90)..(90): n is a, c, g, or t
  misc_feature (111)..(112): n is a, c, g, or t
ggacttaaaggcatgtgctcgagatgcgtgattaactcgggtagcagattgagtggagagaccgaaagaggatgagaaggangagaaggncatccgagctctggatgaggnngatatggcttgttgaaaacttatggtcagagcacttactctaggcagatcaagcaagttgaagatgacattcagcaacttctcaagaaaattaatgagctcactggtattaaagaatctgacactggcctggccccaccagcactctgggatttggctgcagataagcagacactccagagtgaacagcctttacaggttgccaggtgtacaaagataatcaatgctgattcggaggacccaaaatacattatcaacgtaaagcagtttgccaagtttgtggtggaccttagtgatcaggtggcacctactgacattgaagaagggatgagagtgggcgtggatagaaataaatatcaaattcacattccattgcctcctaagattgacccaacagttaccatgatgcaggtggaagagaaacctgatgtcacatacagtgatgttggtggctgtaaggaacagattgagaaactgcgagaagtagttgaaaccccattacttcatccagagaggtttgtgaaccttggcattgagcctcccaagggcgtgctgctctttggtccacccggtacaggcaagacactctgtgcgcgggcagttgctaatcggactgatgcgtgcttcattcgagttattggatctgagcttgtacagaaatacgtcggtgagggggctcgaatggttcgtgaactctttgaaatggccagaacaaaaaaagcctgccttatcttctttgatgaaattgatgctattggaggggctcgttttgatgatggtgctggaggtgacaatgaagtgcagagaacaatgttggaactgatcaatcagcttgatggttttgatcctcgaggcaatattaaagtgctgatggccactaacagacctgatactttggatccagcactgatgaggccagggagattggatagaaaaattgaatttagcttgcccgatctagagggtcggacccacatatttaagattcacgctcgttcaatgagtgttgaaagagatatcagatttgaactgttagcacgactgtgtccaaatagcactggtgctgagattagaagcgtctgcacagaggctggtatgtttgccatcagagcacggcgaaaaattgctaccgagaaggatttcttggaagctgtaaataaggtcattaagtcttatgccaaattcagtgctactcctcgttacatgacatacaactgaaccctgaaggctttcaagtgaaaactttaaattggaatcctaaccttatatagacttgttaataaccaattcataaacaaataaatggcttcaaaattgtatgcttttttccatatctcttcttgtaatataataaaaggtgatttctaatgttattaggcagaaaagcttgttagaatatattttgactatttttttgacccacacccgtttaaggatttcacatcatacaaagcgcttgcttagatggcttctatcctaggcatatgctggccgggtgctctacatataaattctcattgtatcctcccatctgtccactgaggaagattatcaaatggatcttcatccaatggatgcataaactttcctacttacttgtagtggcaaagctggctttcaagtacaagtttgttggctccattacctatgctcctattatccgcttctgtcccgcaacaaagtagctcacttaggcgtatgaccacatgcattatgatagtttcccaccaccatattgaataataaaagctttggccaaagcttttttaaagtaggagaaacattggatgtatatgttttgcattgccatttgatttcaaattaatcaggaagaattagtgattttaatgagcagtaaagtggtgcaataaagcagaaagaaaaatgttcagccagaagtgaaagactagtaaaaaaagaaaaaaaaaatatttgtacatatgatctaatttagaaagtccagaattggcttcatacagaaaagtgattactttcattttacaaattactttaaaattttggtaaagtttctgttaggcttctggtctacagtgaggtattttaaaaataaaggttatattagaatcctcaacagatctctttaaaattacctcctgtgtaaccaccaccaaatcctatcttctaccacaattaccccttcccccaatgccaagaccaaagcacaataatgaatatttttattgaagttcgatattcataaataagttgcaaaataagagttggatatatttttaattcacaatagaaaaagttgacaacatagaaaatgctgctttgcactgaaatacttaaaattatgaaagttttcaagtaaagaaattaaagccttttataaaatccaaccaacattcttgatttttcatttttatgaacttgatcagaaaaattcatcttttttaaccctgccctaatttttcttgaggaattaaatagagcaaactattttcaggttatgcttacaataaaatatacttaagaaaatgactgaagatgtatgtttttgaatgttttgattaaataaatgtacacatttagaacacactctgaa

SEQ ID NO: 92244 - DNA, 3335 bp, Homo sapiens
atccttaattaaattaatcccccccccccccgcaaggaaggtgctgtgtaatcattaaggagcggaggcttttggagctgctaaaatgccggattacctcggtgccgatcagcggaagaccaaagaggatgagaaggacgacaagcccatccgagctctggatgagggggatattgccttgttgaaaacttatggtcagagcacttactctaggcagatcaagcaagttgaagatgacattcagcaacttctcaagaaaattaatgagctcactggtattaaagaatctgacactggcctggccccaccagcactctgggatttggctgcagataagcagacactccagagtgaacagcctttacaggttgccaggtgtacaaagataatcaatgctgattcggaggacccaaaatacattatcaacgtaaagcagtttgccaagtttgtggtggaccttagtgatcaggtggcacctactgacattgaagaagggatgagagtggggtaagatttctatttacaataaatacttttctttcactaaggatactgtctcacattcatatccttggctttgtagtgaataaatggactgagttccttggaataccaaaggatgatctagtaatgtactatagttgaaaattctgtcttctgcatctgcttcctaacttcccatcggcttcgctgactcccctactcccactgttgtttattatgaatggcttcaaatttcagagttgaggttaccagtccatttaaggtaacatggtataggttgggggagtacttgctttaggatagttgtgatgctaagtgtgttaatgtctatagaatacataacaactcacttagtaaattaaaaaaaaatctcccctccctcctcaaaggtttgattgctgttggataggttgtttgcgacattagacatgtagtttagtatcctcagatttcatgctctctttatttctctttatataattagggactctgtctctctcttgttttcttaaagtatggttttggggataaaggactaaacataaaagcactttgaaagcttaaagaatgtattaatgactatcttttttacttccttagcgtggatagaaataaatatcaaattcacattccattgcctcctaagattgacccaacagttaccatgatgcaggtggaagagaaacctgatgtcacatacagtgatgttggtggctgtaaggaacagattgagaaactgcgagaagtagttgaaaccccattacttcatccagagaggtttgtgaaccttggcattgagcctcccaagggcgtgctgctctttggtccacccggtacaggcaagacactctgtgcgcgggcagttgctaatcggactgatgcgtgcttcattcgagttattggatctgagcttgtacagaaatacgtcggtgagggggctcgaatggttcgtgaactctttgaaatggccagaacaaaaaaagcctgccttatcttctttgatgaaattgatgctattggaggggctcgttttgatgatggtgctggaggtgacaatgaagtgcagagaacaatgttggaactgatcaatcagcttgatggttttgatcctcgaggcaatattaaagtgctgatggccactaacagacctgatactttggatccagcactgatgaggccagggagattggatagaaaaattgaatttagcttgcccgatctagagggtcggacccacatatttaagattcacgctcgttcaatgagtgttgaaagagatatcagatttgaactgttagcacgactgtgtccaaatagcactggtgctgagattagaagcgtctgcacagaggctggtatgtttgccatcagagcacggcgaaaaattgctaccgagaaggatttcttggaagctgtaaataaggtcattaagtcttatgccaaattcagtgctactcctcgttacatgacatacaactgaaccctgaaggctttcaagtgaaaactttaaattggaatcctaaccttatatagacttgttaataaccaattcataaacaaataaatggcttcaaaattgtatgcttttttccatatctcttcttgtaatataataaaaggtgatttctaatgttattaggcagaaaagcttgttagaatatattttgactatttttttgacccacacccgtttaaggatttcacatcatacaaagcgcttgcttagatggcttctatcctaggcatatgctggccgggtgctctacatataaattctcattgtatcctcccatctgtccactgaggaagattatcaaatggatcttcatccaatggatgcataaactttcctacttacttgtagtggcaaagctggctttcaagtacaagtttgttggctccattacctatgctcctattatccgcttctgtcccgcaacaaagtagctcacttaggcgtatgaccacatgcattatgatagtttcccaccaccatattgaataataaaagctttggccaaagcttttttaaagtaggagaaacattggatgtatatgttttgcattgccatttgatttcaaattaatcaggaagaattagtgattttaatgagcagtaaagtggtgcaataaagcagaaagaaaaatgttcagccagaagtgaaagactagtaaaaaaagaaaaaaaaaatatttgtacatatgatctaatttagaaagtccagaattggcttcatacagaaaagtgattactttcattttacaaattactttaaaattttggtaaagtttctgttaggcttctggtctacagtgaggtattttaaaaataaaggttatattagaatcctcaacagatctctttaaaattacctcctgtgtaaccaccaccaaatcctatcttctaccacaattaccccttcccccaatgccaagaccaaagcacaataatgaatatttttattgaagttcgatattcataaataagttgcaaaataagagttggatatatttttaattcacaatagaaaaagttgacaacatagaaaatgctgctttgcactgaaatacttaaaattatgaaagttttcaagtaaagaaattaaagccttttataaaatccaaccaacattcttgatttttcatttttatgaacttgatcagaaaaattcatcttttttaaccctgccctaatttttcttgaggaattaaatagagcaaactattttcaggttatgcttacaataaaatatacttaagaaaatgactgaagatgtatgtttttgaatgttttgattaaataaatgtacacatttagaacacactctgaa

SEQ ID NO: 92245 - DNA, 2513 bp, Homo sapiens
  misc_feature (12)..(13): n is a, c, g, or t
aaataggctagnnacgaggctggggtgcaaggaaggtgctgtgtaatcattaaggagcggaggcttttggagctgctaaaatgccggattacctcggtgccgatcagcggaagaccaaagaggatgagaaggacgacaagcccatccgaggtgtacaaagataatcaatgctgattcggaggacccaaaatacattatcaacgtaaagcagtttgccaagtttgtggtggaccttagtgatcaggtggcacctactgacattgaagaagggatgagagtgggcgtggatagaaataaatatcaaattcacattccattgcctcctaagattgacccaacagttaccatgatgcaggtggaagagaaacctgatgtcacatacagtgatgttggtggctgtaaggaacagattgagaaactgcgagaagtagttgaaaccccattacttcatccagagaggtttgtgaaccttggcattgagcctcccaagggcgtgctgctctttggtccacccggtacaggcaagacactctgtgcgcgggcagttgctaatcggactgatgcgtgcttcattcgagttattggatctgagcttgtacagaaatacgtcggtgagggggctcgaatggttcgtgaactctttgaaatggccagaacaaaaaaagcctgccttatcttctttgatgaaattgatgctattggaggggctcgttttgatgatggtgctggaggtgacaatgaagtgcagagaacaatgttggaactgatcaatcagcttgatggttttgatcctcgaggcaatattaaagtgctgatggccactaacagacctgatactttggatccagcactgatgaggccagggagattggatagaaaaattgaatttagcttgcccgatctagagggtcggacccacatatttaagattcacgctcgttcaatgagtgttgaaagagatatcagatttgaactgttagcacgactgtgtccaaatagcactggtgctgagattagaagcgtctgcacagaggctggtatgtttgccatcagagcacggcgaaaaattgctaccgagaaggatttcttggaagctgtaaataaggtcattaagtcttatgccaaattcagtgctactcctcgttacatgacatacaactgaaccctgaaggctttcaagtgaaaactttaaattggaatcctaaccttatatagacttgttaataaccaattcataaacaaataaatggcttcaaaattgtatgcttttttccatatctcttcttgtaatataataaaaggtgatttctaatgttattaggcagaaaagcttgttagaatatattttgactatttttttgacccacacccgtttaaggatttcacatcatacaaagcgcttgcttagatggcttctatcctaggcatatgctggccgggtgctctacatataaattctcattgtatcctcccatctgtccactgaggaagattatcaaatggatcttcatccaatggatgcataaactttcctacttacttgtagtggcaaagctggctttcaagtacaagtttgttggctccattacctatgctcctattatccgcttctgtcccgcaacaaagtagctcacttaggcgtatgaccacatgcattatgatagtttcccaccaccatattgaataataaaagctttggccaaagcttttttaaagtaggagaaacattggatgtatatgttttgcattgccatttgatttcaaattaatcaggaagaattagtgattttaatgagcagtaaagtggtgcaataaagcagaaagaaaaatgttcagccagaagtgaaagactagtaaaaaaagaaaaaaaaaatatttgtacatatgatctaatttagaaagtccagaattggcttcatacagaaaagtgattactttcattttacaaattactttaaaattttggtaaagtttctgttaggcttctggtctacagtgaggtattttaaaaataaaggttatattagaatcctcaacagatctctttaaaattacctcctgtgtaaccaccaccaaatcctatcttctaccacaattaccccttcccccaatgccaagaccaaagcacaataatgaatatttttattgaagttcgatattcataaataagttgcaaaataagagttggatatatttttaattcacaatagaaaaagttgacaacatagaaaatgctgctttgcactgaaatacttaaaattatgaaagttttcaagtaaagaaattaaagccttttataaaatccaaccaacattcttgatttttcatttttatgaacttgatcagaaaaattcatcttttttaaccctgccctaatttttcttgaggaattaaatagagcaaactattttcaggttatgcttacaataaaatatacttaagaaaatgactgaagatgtatgtttttgaatgttttgattaaataaatgtacacatttagaacacactctgaa

SEQ ID NO: 92246 - DNA, 2434 bp, Homo sapiens
ccaggcgtgagccactgagcccggcagtattttatatatatattttttgagacagagtctcagcctgtctttattttactagtttgtttttcattcattagtgtcataacaagttaatacagcaagtagttccagggcactgggcaatgtattcaatttttattaaaattctcacttgtgagtttttcttttaaggtattaggtctattctattgaatttggacagtatccaaaaagcctgtgactgtatgttgtacatttctgtccctctcttaggtggaagagaaacctgatgtcacatacagtgatgttggtggctgtaaggaacagattgagaaactgcgagaagtagttgaaaccccattacttcatccagagaggtttgtgaaccttggcattgagcctcccaagggcgtgctgctctttggtccacccggtacaggcaagacactctgtgcgcgggcagttgctaatcggactgatgcgtgcttcattcgagttattggatctgagcttgtacagaaatacgtcggtgagggggctcgaatggttcgtgaactctttgaaatggccagaacaaaaaaagcctgccttatcttctttgatgaaattgatgctattggaggggctcgttttgatgatggtgctggaggtgacaatgaagtgcagagaacaatgttggaactgatcaatcagcttgatggttttgatcctcgaggcaatattaaagtgctgatggccactaacagacctgatactttggatccagcactgatgaggccagggagattggatagaaaaattgaatttagcttgcccgatctagagggtcggacccacatatttaagattcacgctcgttcaatgagtgttgaaagagatatcagatttgaactgttagcacgactgtgtccaaatagcactggtgctgagattagaagcgtctgcacagaggctggtatgtttgccatcagagcacggcgaaaaattgctaccgagaaggatttcttggaagctgtaaataaggtcattaagtcttatgccaaattcagtgctactcctcgttacatgacatacaactgaaccctgaaggctttcaagtgaaaactttaaattggaatcctaaccttatatagacttgttaataaccaattcataaacaaataaatggcttcaaaattgtatgcttttttccatatctcttcttgtaatataataaaaggtgatttctaatgttattaggcagaaaagcttgttagaatatattttgactatttttttgacccacacccgtttaaggatttcacatcatacaaagcgcttgcttagatggcttctatcctaggcatatgctggccgggtgctctacatataaattctcattgtatcctcccatctgtccactgaggaagattatcaaatggatcttcatccaatggatgcataaactttcctacttacttgtagtggcaaagctggctttcaagtacaagtttgttggctccattacctatgctcctattatccgcttctgtcccgcaacaaagtagctcacttaggcgtatgaccacatgcattatgatagtttcccaccaccatattgaataataaaagctttggccaaagcttttttaaagtaggagaaacattggatgtatatgttttgcattgccatttgatttcaaattaatcaggaagaattagtgattttaatgagcagtaaagtggtgcaataaagcagaaagaaaaatgttcagccagaagtgaaagactagtaaaaaaagaaaaaaaaaatatttgtacatatgatctaatttagaaagtccagaattggcttcatacagaaaagtgattactttcattttacaaattactttaaaattttggtaaagtttctgttaggcttctggtctacagtgaggtattttaaaaataaaggttatattagaatcctcaacagatctctttaaaattacctcctgtgtaaccaccaccaaatcctatcttctaccacaattaccccttcccccaatgccaagaccaaagcacaataatgaatatttttattgaagttcgatattcataaataagttgcaaaataagagttggatatatttttaattcacaatagaaaaagttgacaacatagaaaatgctgctttgcactgaaatacttaaaattatgaaagttttcaagtaaagaaattaaagccttttataaaatccaaccaacattcttgatttttcatttttatgaacttgatcagaaaaattcatcttttttaaccctgccctaatttttcttgaggaattaaatagagcaaactattttcaggttatgcttacaataaaatatacttaagaaaatgactgaagatgtatgtttttgaatgttttgattaaataaatgtacacatttagaacacactctgaa

SEQ ID NO: 92247 - DNA, 2028 bp, Homo sapiens
tgggcctcatcttcttgatattgagctgaaaatgacctcactgaaacttcccaccacaagacaggttctgccctctggctctgttatatttagctgttgtacttgagcgagttagagaatacgccggtgagggggctcgaatggttcgtgaactctttgaaatggccagaacaaaaaaagcctgccttatcttctttgatgaaattgatgctattggaggggctcgttttgatgatggtgctggaggtgacaatgaagtgcagagaacaatgttggaactgatcaatcagcttgatggttttgatcctcgaggcaatattaaagtgctgatggccactaacagacctgatactttggatccagcactgatgaggccagggagattggatagaaaaattgaatttagcttgcccgatctagagggtcggacccacatatttaagattcacgctcgttcaatgagtgttgaaagagatatcagatttgaactgttagcacgactgtgtccaaatagcactggtgctgagattagaagcgtctgcacagaggctggtatgtttgccatcagagcacggcgaaaaattgctaccgagaaggatttcttggaagctgtaaataaggtcattaagtcttatgccaaattcagtgctactcctcgttacatgacatacaactgaaccctgaaggctttcaagtgaaaactttaaattggaatcctaaccttatatagacttgttaataaccaattcataaacaaataaatggcttcaaaattgtatgcttttttccatatctcttcttgtaatataataaaaggtgatttctaatgttattaggcagaaaagcttgttagaatatattttgactatttttttgacccacacccgtttaaggatttcacatcatacaaagcgcttgcttagatggcttctatcctaggcatatgctggccgggtgctctacatataaattctcattgtatcctcccatctgtccactgaggaagattatcaaatggatcttcatccaatggatgcataaactttcctacttacttgtagtggcaaagctggctttcaagtacaagtttgttggctccattacctatgctcctattatccgcttctgtcccgcaacaaagtagctcacttaggcgtatgaccacatgcattatgatagtttcccaccaccatattgaataataaaagctttggccaaagcttttttaaagtaggagaaacattggatgtatatgttttgcattgccatttgatttcaaattaatcaggaagaattagtgattttaatgagcagtaaagtggtgcaataaagcagaaagaaaaatgttcagccagaagtgaaagactagtaaaaaaagaaaaaaaaaatatttgtacatatgatctaatttagaaagtccagaattggcttcatacagaaaagtgattactttcattttacaaattactttaaaattttggtaaagtttctgttaggcttctggtctacagtgaggtattttaaaaataaaggttatattagaatcctcaacagatctctttaaaattacctcctgtgtaaccaccaccaaatcctatcttctaccacaattaccccttcccccaatgccaagaccaaagcacaataatgaatatttttattgaagttcgatattcataaataagttgcaaaataagagttggatatatttttaattcacaatagaaaaagttgacaacatagaaaatgctgctttgcactgaaatacttaaaattatgaaagttttcaagtaaagaaattaaagccttttataaaatccaaccaacattcttgatttttcatttttatgaacttgatcagaaaaattcatcttttttaaccctgccctaatttttcttgaggaattaaatagagcaaactattttcaggttatgcttacaataaaatatacttaagaaaatgactgaagatgtatgtttttgaatgttttgattaaataaatgtacacatttagaacacactctgaa

SEQ ID NO: 92248 - DNA, 552 bp, Homo sapiens
caacatttgaagcctcctggtatgtgaaatataaaacacacttgaaatagctattgagctggagaggaaaactccagaatggctgcggtggaaatcatcgtggcatcaggaatcatcctgtgacatacacacaggcaaaaatgataaaaattcttagtagaaacaaagtttgttcaaagaaataattatgtgacttcttcaaatggtgagtccacttacatagaacaggaaagcttcctcctgaaactccttctccagcactggtctgtctatcccagcatgaggaagtccttgtaaacattgcctgcaaatcatgtcgctgccactagagaaccggagagcattcctaagctccatttctagctcagaactaatattttactctcagtgtatttcattctattttattcattttaaaacttaaataacatcattcaaatataaaagtatttcttaagctacctctctgggtcaagtcctatgcagcatgatgagaaaacagagataaaaggtacaaaaatgtgttgtacagaaatatatcctgtgctccag

SEQ ID NO: 92249 - DNA, 375 bp, Homo sapiens
agaggaagacacaatgagatgtcatcagccccagcacaatggctaagttaaagaaccggcactgcccagtattggtgaagatgagggatatccagggcccttgtcctctgctgcaggatgtgtgacttggggcaaccaaccatttaggacaactgctcagcagtgtctcctaaagctgaacacacgctcatcctgcgagctaaaccctcagctccttggcacgcacctaagaaaaacaagcgcattcgccaatagataggcaaggaggctcctggggcctgacggatcccagccccacactgaaagcagtcccaaagtccacggctgggagaaaggatctgtgagccggcagcaggcacacaccacagtgacaaa

SEQ ID NO: 92250 - DNA, 493 bp, Homo sapiens
gtaaaaacaggttcatgttaagtaagaacctttgctaggctttgtttcttgaaatcaatactcaattgcctaacaagagggtatttatgggtaatgtgtaggagacggtctgtattgggcgcaggggcagaagtcaggagctttgtactgtttttatatgatctcaactgtttttgtgacttattacctgggaatggctgtctagaagagtcagttgttgcaccactagtgtctgttttatttctacatgggtgttatgggcgatgcaaacctgattttcttcgaatcggcctggcttcaaacagaaagaaaagaccaatttcaattttcccaccacatttagaagactgtattttaaaagaggaaaactgacggcaaattaattcttaatatgagtgcagaagaaaagagccttaggtgactttacctttagaacttgtgtaaaaatagatgggcaatgagaacgccttcaagtccagaaactgggtcagac

SEQ ID NO: 92251 - DNA, 327 bp, Homo sapiens
ttgcgtctccttccatctgtcttcccgctgtttccctgctcattaacacctctactagaaagtgggcagggtgatgacaagaaataaaaatacaagttgaactgcaactaagaatttaacatttaaaaaatgccaacgtaagaatgatataaatatctcaattgtgaaaatagactgcgaccctggttagtatatggtattttaaatatgtgaaaaatgtgaggaattggagcacatcccataaaaaagaacaagttcacagaatgttatcaagggaaaggactgcagagatagactgcaggagcatctttccatacaggtgggaaa

SEQ ID NO: 92252 - DNA, 239 bp, Homo sapiens
gctgggattacagcagcctgccactacgcctggctaactttttgtatttttagtagagatagggtttcaccatattggctaggctggtctggaactcctgactttaggtgatccacccgtctcggcctcccaaagtgctgagattacaagtgtgagccaccatacccggccacatattagaattgtatcatttcgttttcccttcatccattatttggttacccagtgatacagcttat

SEQ ID NO: 92253 - DNA, 225 bp, Homo sapiens
ttatctgagacaccgtttacttcaaccaagtcacaaataacctgattttgttattaaataacctctcaaaaaaaaaattcaagttctactgtgtttagctagcaagagttctgttttgcatttaacatatctaaaaggcctcatgcacaatataagtaaataactcttctcactacacaagtagatgctaaagcaacctagagattgaataacttctgtgagatc

SEQ ID NO: 92254 - DNA, 385 bp, Homo sapiens
tttatttatttctatttttaggggagagtgtagagaatgcttgagggcactaaaggtgaaaacaatatacaagaaattttatgacattttctctcaatagatatttctagttttagagccacattatacagtgcagagaaaaaaaaaatcttttttatttaatgttgatgtagccacttggccagcagagggagaaaatacaatacaaaatacatgcagtgatatttagctctctccattataaatgatgtgatattttatgttttcttttccatcactttcaggtcagaatatgtatgaaattatccaagaatatgtagttatctaaatcatctctaccatcttcccccaaatgttaaagtctgcctttatttttctttaggtt

SEQ ID NO: 92255 - DNA, 497 bp, Homo sapiens
gactgttgtggggtggggggagggaggagggatagcattaggagatatacctaatgctaaatgacgagttaatgggtgcagcacaccaacatggcacgtgtatacatatgtaacaaacctgcacgttgtgtacatgtaccctaaaacttaaagtataataataaaaaaacaaaaaacaaaatacaaaaaaagatatctattctggctttttcttttaaacagttccttattttttattttatgtttcaaaatttctcatcctgaaagcagtggtgattttagcctaatcactgaactgggtataaacaaaaataaaaaatatattctttacacaagcatgcagattaaaagcttttagagaaaaatcaagggacaaaaaattaaatcattttattttttcttatgaaaaaataataatggatacttcctatgaaaatatataaatacagaatgttatgttaaaacacaactgttacaaatactattttactgtagat

SEQ ID NO: 92256 - DNA, 428 bp, Homo sapiens
cctcactctgcgacctctgctgctgctgtgagagctccttctctgcctctgagtctcctgcttctctttttgttgagacacagtcttgctctgtagctcaggctggagtacagtggtaccatcttggctcactgcaacccccacctcccgggttcaagagattctcctgcctcagcctcccaagtagctgggactccagacgcatgccaccacgcctggctaatttttgtatttttagtagagatggggttttaccacgttggctaggctgaactcgaactcctgacctcaggtgattcacctggctcggccccccaaagtgctggaattacaggcatgagccactgcgcctggccaagatcttcaatttcatcacacccacaagcccctttggcatagaggttagcctgttcacatatctgggatta

SEQ ID NO: 92257 - DNA, 109 bp, Homo sapiens
catgggcctgggtaactgctccataagcaaacaatgtgcagtgaactggctcccttctgtgcctctcaccgtgcaaagacacttctgccccccgaatgcatatggccct

SEQ ID NO: 92258 - DNA, 735 bp, Homo sapiens
aatatgactgtgtcaaccacaaaagaggaaaagaatgggctttaaatcccgcctttacagccatccaaggcaggtaatactggagaattagggagatatgatgttttaaagtacagattctgtctccttttacaatactaaaccctagatcactgttctctgattgactttaccggttttgttgttgttgttgttgttgttgtggaactgcatcagaattttctatctaggttaaaatgccattctaccttacaatagcaccaaaggactaactaaaccctctatgaagtgattctccaaaggaaactgatagcctgcccactctatccagtctgtagatatttatttttgccttcagtatatttttaaaatttaaactagtcaccaattcttaaaaatagagacatttaacatcacattttaaaaatctaatttccagcttctcttcaaaaatcgttaagccttggccacattccaacatggcaacatttcacaggagccgtgtagtgatgtctttttctagacaaactctgtgatctccattttccacagtttccacccagctaatttcattcatttatgttgtgttttagtctctttagcatttgcatttgaggtcttggctctaaagattaagcgtgaaaattcttgataaaggtagaaaaattaagccatatcacaagaacatcctccctcaaatacctcacaaaataaagaaaaggagttttgaaagaa

SEQ ID NO: 92259 - DNA, 557 bp, Homo sapiens
aggtttcaaacctaaacagcgctcttcatcctggacgtgcgatgggggaggagtcggcctgctcagtccccacgacatagcaggactaggttgacaaacaaccgagatgggacacatcttgagaccctcacagtccttggaggaaggcagacgagaaaaagacaagaaaagtgttgattggctgcccttcttattaaacatcgacgcgttcactgacgaggacgtaaacaccgatctggcgtaccacgagcgtgtgtattttcgtttcacaaatactgcttcattttgagcatcaattctgaggtgggacgttatcaccactttttccactgagaggtgacaggttcagaggttgtttgtccacgtttgcacagcgtgtgaaggggaactgaaattgggatctactttccatacctttattctaagcaattatcaaatgcaaaaaagggaggagaggaggagaaacagaaaaaaatgaagataaacctcatcccctcctcaaggttatatataattctcctttgaagataaaatagcatttgttacagaaaaaaagt

SEQ ID NO: 92260 - DNA, 213 bp, Homo sapiens
ctgtaaagaaactcaaagttcagagctacactggtgacaaaggcaaaaagagtagcccgaggctgacattgccacaaaccccagtccctttgcaacagtggaagaaaaggcacttcagagatcaatgtacaatccagggcagcaaccagcgcctgttttaactgttaagattaatgctttgagcactggaactgctcctctaaatacccaatt

SEQ ID NO: 92261 - DNA, 342 bp, Homo sapiens
gcagactggcaatgcctttggtccccattccctcagtgcagccccatttagtgcagctgaggtgggaagcagaacagggttgccttgtcgctcaacctgtcacaggctgtggagcgcctgttgtctctggctccttcctttcacccagtttctaccctccgagaagatgcggcactgggagggaaaggaggggaagataggcacatctgcaggggtccagggctccggagatgggcttcccagagactgtgcctgagttttgaggagattaccacagggctcttggagaaatggggagactctccctctagggacagctttcagtaactcacaaagccgagc

SEQ ID NO: 92262 - DNA, 511 bp, Homo sapiens
tatgaatgacttaatagtcacagagacaccattaccttcatccccattttacagatgaggaaactgagggacagagtctaaatgacttgccaggggtcgccctgctggcaggagatgcagctaggattcgaacccaggcgatccctgctcttccccactggtgactctgcctgtccaggcaagcagctgccattggggcctgtcggtcggaacacatgggagccagctcttcctggcacgcacccccagcactagcttcaggaagggaatcattttctgttaccagctgctctcagataccattctcacctctgttttaaagctgaagactagctgggcatggtggttcacgctggtaatcccagcattttgggaggccaaggtgggtggatcatttgaggccaggagttcaagaccagcctggccaacatggtgaaaccccgtctctactaaaaatacaaaaattagttgggcgtggtggtgtgtgcctgtaatcccagctactcaggag

SEQ ID NO: 92263 - DNA, 365 bp, Homo sapiens
tgcctcttccagaacaattaaatacactattagccatgctagcccttacttattcatgactccctacctctagacagaaaactctgaggaacaactagtccctatatctcgctgcttactagatgtgcatgttctatagacactaaattcaatttgtctaaccatattcatccattaatttaacaagccattattagccaatgtataagacattggaggttcaatggtgaaagtcataccaattgaatttttggtacaattacttcaataatgtcaaacattacaaaattacaaactgaagcatactctgatggaaggaatgaatgtccttctcagagggtatgtaagcagcaagctttcccaca

SEQ ID NO: 92264 - DNA, 326 bp, Homo sapiens
  misc_feature (288)..(288): n is a, c, g, or t
tgcctcttccagaacaattaaatacactattagccatgctagcccttacttattcatgactccctacctctagacagaaaactctgaggaacaactagtccctatatctcgctgcttactagatgtgcatgttctatagacactaaattcaatttgtctaaccatattcatccattaatttaacaagccattattagccaatgtataagacattggaggttcaatggtgaaagtcataccaattgaatttttgcggcacgagctcgtccaaaaacattctttggatgntattcaaagccttattagcactgcacctgaataatagg

SEQ ID NO: 92265 - DNA, 315 bp, Homo sapiens
  misc_feature (290)..(290): n is a, c, g, or t
  misc_feature (294)..(294): n is a, c, g, or t
  misc_feature (309)..(309): n is a, c, g, or t
  misc_feature (312)..(312): n is a, c, g, or t
cttcagcctcctgagtagctggggctataggtgtgtactaccacacctgactaattttttataatttcttttgtagagaaggggtctcatcatcttgttgaggctgatctcaaacttctgagctcaagcaatcctcccgtctaggcctcccaaatggttcaacatctaaaaagaaacaatgtaaacagataattacaaaacaatgtaaataaacaagtcaaccaaaagatgacagaatgaatagagaggggtaaatacctgcggacgcgtggtcgaaaaagggcccggtncccnttcgccgtgttgtgngtngta

SEQ ID NO: 92266 - DNA, 620 bp, Homo sapiens
  misc_feature (3)..(3): n is a, c, g, or t
  misc_feature (7)..(7): n is a, c, g, or t
  misc_feature (14)..(14): n is a, c, g, or t
  misc_feature (34)..(34): n is a, c, g, or t
  misc_feature (44)..(44): n is a, c, g, or t
  misc_feature (396)..(396): n is a, c, g, or t
  misc_feature (490)..(490): n is a, c, g, or t
  misc_feature (574)..(574): n is a, c, g, or t
ttngacncctcttntttgaaacccgtttgcaaanccagctcggntcccggtggtgaataacgatggcctttacacacaagttaggaaagacgaagggattattgcattgccttcttttcctttgctccttatttcaagtaatcagcacaacccatctttaggtttcaacctttgcattttattcttggtagtagtttaatctttctacagatcttctcaggagaacacagtcccaaacaaattgggcttcgagtatatccaaatcagagtctgagaaaatttctcccaaaatattgtatgtaggtgatctatcttcctccctccttcactccctgtgtacctccctccctccctccgccatcgttattcaccacccggttgggtgaataaccgatnggcctcctagcggcaacaagggcaaatcaagcccaattaagggtctccaccccttgacttcccctcagccataagtaagggccccaccccaagncttaagccctactccactcaagcactatagttggtaagcaagggaaatctttcttactcatcccgctttcacccccctaagcanaaaaataggcccactaattccaaactctaacactatggcttaaggg

SEQ ID NO: 92267 - DNA, 977 bp, Homo sapiens
  misc_feature (753)..(753): n is a, c, g, or t
  misc_feature (847)..(847): n is a, c, g, or t
  misc_feature (931)..(931): n is a, c, g, or t
ttgtttaaatagtgagcattgtcatacaatctaaataaccatttgatttttaataatagctaacatttgttaattgcttatcatgtgctaggcattgtgctaaatactttaaagcctacatttgcttgcattagggtttagtttatatacagcaatgtttcagcaacacagtcatctttgtattctctgtgcatgctagctcagagccttacaaatgcaataaactcaaaatgtttgcatgagtgaaagaatgaatgaatgaatgaatgaatgaaatgctcagaaacagatgtcctggcatggcatctcaacacatcagggcgttgctgtctccttatctttgtgtcagtcttctctcaggcctactaaacaattctggctcatacagggattaggggagaaattattctgacttgcttttgccatttacacacaagttaggaaagacgaagggattattgcattgccttcttttcctttgctccttatttcaagtaatcagcacaacccatctttaggtttcaacctttgcattttattcttggtagtagtttaatctttctacagatcttctcaggagaacacagtcccaaacaaattgggcttcgagtatatccaaatcagagtctgagaaaatttctcccaaaatattgtatgtaggtgatctatcttcctccctccttcactccctgtgtacctccctccctccctccgccatcgttattcaccacccggttgggtgaataaccgatnggcctcctagcggcaacaagggcaaatcaagcccaattaagggtctccaccccttgacttcccctcagccataagtaagggccccaccccaagncttaagccctactccactcaagcactatagttggtaagcaagggaaatctttcttactcatcccgctttcacccccctaagcanaaaaataggcccactaattccaaactctaacactatggcttaaggg

SEQ ID NO: 92268 - DNA, 1032 bp, Homo sapiens
  misc_feature (808)..(808): n is a, c, g, or t
  misc_feature (902)..(902): n is a, c, g, or t
  misc_feature (986)..(986): n is a, c, g, or t
ttgtttaaatagtgagcattgtcatacaatctaaataaccatttgatttttaataatagctaacatttgttaattgcttatcatgtgctaggcattgtgctaaatactttaaagcctacatttgcttgcattagggtttagtttatatacagcaatgtttcagcaacacagtcatctttgtattctctgtgcatgctagctcagagccttacaaatgcaataaactcaaaatgtttgcatgagtgaaagaatgaatgaatgaatgaatgaatgaaatgctcagaaacagatgtcctggcatggcatctcaacacatcagggcgttgctgtctccttatctttgtgtcagtcttctctcaggcctactaaacaattctggctcatacagggattaggggagaaattattctgacttgcttttgccatgattacttgaaataaggagcaaaggaaaagaaggcaatgcaataatcccttcgttttacacacaagttaggaaagacgaagggattattgcattgccttcttttcctttgctccttatttcaagtaatcagcacaacccatctttaggtttcaacctttgcattttattcttggtagtagtttaatctttctacagatcttctcaggagaacacagtcccaaacaaattgggcttcgagtatatccaaatcagagtctgagaaaatttctcccaaaatattgtatgtaggtgatctatcttcctccctccttcactccctgtgtacctccctccctccctccgccatcgttattcaccacccggttgggtgaataaccgatnggcctcctagcggcaacaagggcaaatcaagcccaattaagggtctccaccccttgacttcccctcagccataagtaagggccccaccccaagncttaagccctactccactcaagcactatagttggtaagcaagggaaatctttcttactcatcccgctttcacccccctaagcanaaaaataggcccactaattccaaactctaacactatggcttaaggg

SEQ ID NO: 92269 - DNA, 377 bp, Homo sapiens
gcacaacccatctttaggtttcaacctttgcattttattcttggtagtagtttaatctttctacagatcttctcaggagaacacagtcccaaacaaattgggcttcgagtatatccaaatcagagtctgagaaaatttctcccaaaatattgtatgtaggtgatctatcttcctccctccttcactccctgtgtacctccctccctccctccgccaccctcctcttcccagttttagagtagaaataagaaatcttcaaactcttaaagtgagggtctgatttcttatttttagacaatagaattaggataattagttggatactgactaaagtcaggaagaatatagttgagctccataacccagaaccccctgga

SEQ ID NO: 92270 - DNA, 374 bp, Homo sapiens
gtatttttagtaaagacagggttttaccacactggccaggctggtctcaactcctgtcctcaagtgatccacccaccttggcctcccggaatggtgggattgcgggtgtgaaccactgcgcccggcctgacttatttgttcaaacagcctatgtaggtagaaaatttctaggtatgtaattccaaggtaataggtaaattgtgcctgattaagcatgaattttatttccctatacattagtaatttctgagagttgtatttaaattcgatttcagggtccttaggtaggaccttaggacactacacacagttcagtcttcattgcttgttatttaaatttttccacactttccagggcaactggttccccctta

SEQ ID NO: 92271 - DNA, 471 bp, Homo sapiens
attggaaaaataacgaaaaaaaaattaaaagaaaaaccgaccaacttcatgatcccacattttcattttaaagatctagcagttgatacatgtaaagagatgggattgaatgctgaccactacattttaatcagtttatgatcctaataagaatttaccagaatgtttattatcttaggtattaaaatggcaaaggagaaaaacattcgttttctaatacttatatagtaatacaagtattacttggggaatgtgtttgggctttggaggaattttactattattgtacaatttttgtttgaattatatacgatggtttgaaaagaggtaatttagctattctgataaaatttaggttagggaatttgtggaggaaggaatacaaccagggaattagtttctataaggacatgggaaatgctagtgacttcacctgccaagggagtgctttaaagttgggatttataaaat

SEQ ID NO: 92272 - DNA, 527 bp, Homo sapiens
gcatcctcatcttattctcttgttttcagtttatttacctacacttgatttttccttgttctgagtgtgctcagtatctcattttatcctttaagtaagatatatttaagtaagctgcttttaaatcctttctaaaaaataagatagagcataaatataaaagtatttctgtatctagccgttaacagcataatccttctgtcctccattgacaggtagaataactttgatgcttgtctcctccctaccctactttttgatacagtatgattttatgacctatttttctaggatcaacaaaacttggggagaattaacaccacctgaccagccatttggtgaccatcttgagctccgagtgctgtgttaatgacatgcataggcgggtcacaaactgtaacaaatccaccagctgaacacatgctgtaataagaataccagacaacttctccaaattttcccagacaaaatcaaccttgggaaccttgataccagacatcagcatgctctctagtttcaaaaccaga

SEQ ID NO: 92273 - DNA, 442 bp, Homo sapiens
ggggcatttaaagcatgacagtgttaaagtatgccccggctggcaaagcggacttcctgtggctaactgaggtgctcattaaacagatcaggtggccgtggctgggtgagggagcagtcatgtactctgtgttttgcagagatgctgttaaagtgtcacaggacctccctttctacgatcatgccaaaccagtttctgttgtcaatgcagagataggctgtagctggaagtcccccagctgaccaccaacagaccacctgacaccaaccaactgaccactgaaccagccaattaagaaagactggtgatttagggcttaaaggtcatccagtcaatactattcctcactcccctgactctcctcctctgtcctacagtttttgcttggttttagtttggaggggaacttaagtacacagatccttatctctccccatcccct

SEQ ID NO: 92274 - DNA, 761 bp, Homo sapiens
ctggtctataaatgcagatatgtgtgtgcgcttctatgtatggatgcttacatgtacatgcataggtagagaggagagtgcctaggccagatcactcagagaaagtgttaaattacaccattttgttgtttcagttacagaaatcttaaactaagcacagcttctctgacaccagtatcaatttcattactgagccatgagataacagcggtttacaagagaagatggtgaaaagattgagaattcaaatgatgaatgggatgcacacagaaaagacatcactgtgcgcgtcttcatgaggaaactgaattgagactactgtgccacaaatcaagtaatgtgtaatttttctttgaaagcatgtagaggctttaaagataacaactagcttttgagaaaacctaggattaaaaaaataatagaataagattagaatcttcatcatgtattcagtactttacatgctatattaatagtgaactaatacagattgaattgcatataatgcatttcaaacaatttgggattgaagcagaatattaatatgactacagaaattcagtccatttttttactaatgcaaaatatttgaaaaaatatttacattatatatcagccattatccattcattacattaatgatttttagtaataccttctttttagttatgtatttaatttaacttataaatttaacacaatattagagacatgcaaaaacatattagaaaaaacacaatatacattggcaaatacagaac

SEQ ID NO: 92275 - DNA, 424 bp, Homo sapiens
gggctgggctgggctggacaggcgctgggtggctggcgagaatctggacttggtcctggagtagcatgaagccactagggttctgtcttcttcttataaacaccaacaagttcattcagcacaaaaaggatctaatgtgtctcctctagcgcgtcttcctaacactggggctgggtgcagcttaaatgccaggaatgacatcagcttactaggagccagctgggaagatgactcccatctgaatcattcttccagtttaagcagggtcagcggcaatgaagagccacactgcctggagttaaatctcacctgctggcaggatgacctcgatcctctctaagcctgtgtttgcccatctgcaaaatgggaataaccacataacaccgacttcccagcttggtgtgaggagtaaacaaggtaataa

SEQ ID NO: 92276 - DNA, 514 bp, Homo sapiens
cccacggatgcagagagtctatgtatgtgcaatgtacttggaacagtgcctggcatctaataatatgactatataagtctttgtttttattgtgattaggaatattattattatgactccttgaggaagtcatatagtcctcagagaatttacttaggggaattacagagaaggaaagcatgctttcagataatcaacagctgttcttcatttcaccgtacacggtgacctgtagtccttttctacctgacagaggtgatattttccaacaccatccatctaattgtgatgcacagctggggactgagttccattatgctccagaaccccttcctaaaacatccattgctctgcaaccaagataaagggtaactcatgaactcattccttgtctccaaaagttgatttattactgtcaaggtcaatacaatactaaaatacctggccttgaaccaccattgggagtatttgagcaaccatgtagctgagaccacaccagcacaggggagccaac

SEQ ID NO: 92277 - DNA, 206 bp, Homo sapiens
tttaattaaatatctctgatggttagaaaatcagtgtcaaatatgaacaccgatatatagcttaaaatacaaacctccataattattaaagagcatggttaataactgttccaagtaagtgcttgataagaaacattttgcaggaggcgagtcacaggtctccttggaccggggttacggctgatggcgcagcctgccgtgtgcat

SEQ ID NO: 92278 - DNA, 678 bp, Homo sapiens
tatgtactaggcaccttgctagccatttcaggctttcttcagcatctgtggttgttctctggccaactatccttttctttttagtcatttaatatttgtgcccttgagggctctctcattattcttttgtctgtttatcccctcttgatattgtccctgagtggtaacacctgctctgttgactacatttacattcatataccaatgatatccatagctttaataagttgactgctccgtggttccctgtggatgtcatgtaagtaccaaaaataacaagtcttcgaagtgttgcctacctcctcatggtgtcatcattcaccagtttcagagtgtgggtgatagctctgagagagagagagagaaagagagacagacacacacacacacagacacagatagagacagagagagaaaccagaggacttttctgcttttgtttttcttttaggaggtaataaaaccgtgaatttatttaaatgctaatgtgtaggatttacttgagacaggaaaattggatgggagagtaaaggagtgtgatgatttgagtttcttgagatgacaggagttagtgagatttagaacatagattgggcttttttatataataaggaataatttctttgtataggaaagaataggggttaattatagaaataggtgtgtctctttaatatt

SEQ ID NO: 92279 - DNA, 338 bp, Homo sapiens
gacattttcatttataaaataaatttagggagaattatcttcttgatgttgagtcttaatcagtactgtgctatgtctttccattctcttaggtctacttttgttgactttaagtagtagtttatcatttttgttatgcaaattttggacatttattattaagtttatgcttagatatgtcatagtaaaatttattttgctatcataaatggaattttcccttctactttttatatgaagcctattggtttgacaacctgctacttcaataagttctctcattgcttgttagttgttgtcccatattatttagggcttttcagacacattgtatcctc

SEQ ID NO: 92280 - DNA, 311 bp, Homo sapiens
cttatttaaccaaattcctagtgttagacatctagatccttcccatgtctccaaaaagcatggtgttccctaaagcaacatcaccagaccacccaagtaaaccacttgctgtctcctacctggattcctggacctccttcatgggtgatcccccttgcttcctgccaccagcccaactccaatggggacttcttttggtcactccgagcctcacttgtatcagaacttctggtgccatagctcatgttgggtcaacttccaactcacctcatgaacttccaccagctttgtatgaaaagtcagtcccaagg

SEQ ID NO: 92281 - DNA, 211 bp, Homo sapiens
atctttcgctctatgtgccatcacctggacactctaggtaataccccctgttgggcaggggtgagctcccaaggcctcaggcaacccagctcccatgactttgctgggctcagcccacataactgttctcacaggatagagttgtacactggtgcttacagctttcctgggccagtgttgcatgctgccagtggctgcagcagcagcccca

SEQ ID NO: 92282 - DNA, 490 bp, Homo sapiens
atccattgatcatttcccttcaagaactcattgcatttcttgtttttaccattcatttgacatatctaatagttatatttttcttcctctactgaatccacatctttcctttttaatcagattaaaaaggctctcttgaggaccatttcttacatgtctttaaatttctcacaactagtctttaagcctttggagagaaggaactatggcttatttatggtgcctgtctcttcccctaaactcacagagtttggcagtatgcacttaataaatatgttttgaacaaatgagtagtagatactctatacatatctattgattgatttaagatttgctatagactgaatgtttatgtcccccctaccccatattcatatgttgaaagccagtccccaatgtgatggtatttggagatggaggctttgggaagtaattaagtcatgatagcagagccctcatgaatggaattagtgcccttgtaaaagaggcc

SEQ ID NO: 92283 - DNA, 383 bp, Homo sapiens
aacttggatgcaccttaacatatttgacgtgatttgaggtggagctgccaaaagtggatgacctcgagcctacggaggccttaaactggtcctgtggtttcctaagtacatttggcttcacagtatgaaactgattaagcattaagcaggaaatcaaaatcactgcaaaactgatacatgtgggcctcttatttagttcaaatgttctctttcaaaatcctttcttaattttggcaaagactaacttagtatatgacaaaaattaactttaagaaaagaagctggcttatttccttttatctttcctcaaccttttaaatgttccttaggtttatcaacgttttccacaggtcatgaatgaccctgaggtattggggaggaag

SEQ ID NO: 92284 - DNA, 507 bp, Homo sapiens
ccacaagtgctgcaccctgtgctaacaccaccaccagcaggaccacatgcacagttgccagtggagggccccggctccctgagccattctgtctctgctgctgctgtgaatgcccacagggagacaggcaccctgacacctgctagcacccttccacagctgacaagtctgcacccctccacactgccactccaccaccactgccgctgctggcacatgcaagcaaggatggatctgctgccaccatcctacaaaatggtatggctggcaccatccatcagagtgtagtgaccagctgtccaggagcacattggcccccccagcgcaatgagttgacgaccttgaggagccagagagcaaaattggggcccagtacaagtctcccagagttagagcacacagcccaggagctgggagctgagcactggctgcctaaaattttccagaaacaaaaccagtctactgaatccaccttataacacaatcaaaccctcaaagttatcaagt

SEQ ID NO: 92285 - DNA, 235 bp, Homo sapiens
atcattaatacttaacgtattagaacttaaaattgagaaacttaaaaaatagttttttatttgaagatgagcaatattgagtgcattacatttagcatagaaaacatcttagtattaatatgaaaatcattttgactggccaggcgcggtggctcacacttgtaatctcagcactttgggaggccaaggtgggtggatcatgaggtcagaagattgagacatacagtgaaacccc

SEQ ID NO: 92286 - DNA, 510 bp, Homo sapiens
cagacaagagcgcagtcatacatttgataacagttcctactgtttcctgaaaattatatagcatattgtgatttaagatataaaaggggagactgcgccttaggacttgcctggacatgagatcttttgcatagacttggtacctaggcttatggtgaacctagaaatgtggaggtgccctgaacaaaaggtagcatggaatgaataagcaaagtctttgggaggtgaggatttttcttggccttctagttgccaggttcccaggtttaacccctgtgttcttattttcagagcctcagttgaatggggtagagatgctttcccagaggcccagactgcctactgtctttgagaggagaagttgtactgtggcagtccttatatcattaggatgtgtgtgtcatctgggtggtgttttaatttaacactccattgtacacgatagcaataagtaataaataaaatctgttctacttaagaatgtttgtgtctagaggccacgtgtttatt

SEQ ID NO: 92287 - DNA, 2171 bp, Homo sapiens
  misc_feature (5)..(5): n is a, c, g, or t
  misc_feature (19)..(19): n is a, c, g, or t
  misc_feature (22)..(22): n is a, c, g, or t
  misc_feature (31)..(31): n is a, c, g, or t
  misc_feature (77)..(77): n is a, c, g, or t
  misc_feature (93)..(93): n is a, c, g, or t
  misc_feature (107)..(107): n is a, c, g, or t
  misc_feature (191)..(191): n is a, c, g, or t
  misc_feature (208)..(208): n is a, c, g, or t
  misc_feature (440)..(440): n is a, c, g, or t
  misc_feature (481)..(481): n is a, c, g, or t
  misc_feature (602)..(602): n is a, c, g, or t
  misc_feature (705)..(705): n is a, c, g, or t
  misc_feature (783)..(783): n is a, c, g, or t
  misc_feature (1234)..(1234): n is a, c, g, or t
  misc_feature (1241)..(1241): n is a, c, g, or t
  misc_feature (1391)..(1391): n is a, c, g, or t
  misc_feature (1426)..(1426): n is a, c, g, or t
  misc_feature (1441)..(1441): n is a, c, g, or t
  misc_feature (1624)..(1624): n is a, c, g, or t
  misc_feature (1684)..(1684): n is a, c, g, or t
  misc_feature (1765)..(1765): n is a, c, g, or t
ggctncaaatgtccacttncanattctacanaaagagtgtttcaaagctgctcaatgaaaagtaaggttcaactctntgagatgaatgcacanatcacaaagaagtntgtcagaatgcttctgtctaggttttatgtgaagatatttccttttccatgataggccccaaagcactccacaggtccagttgnagattctacaaaaagantgtttcaaagctgctcaatcaaaagaaacgttcatctctgtgacatgaatgcacacatcacaatgaaatttatcagaatgcttctgtctagtttttttgtgaaaatatttccttttccaccataggcctcaaagtgctccaaatgtccacttgtagattctacaaacagagtgtttaaaaactgctaaatgaaaagaaagattcaactctgtgagatgaatacacacatcangaagaagtttgtcagaatgcttctgtctagtttttatatgntgatatgtccttttccacaataggccagaaagtgctccaaatgtccacttgcagattcaacaaaaagagtgtttcaaagctgctcaatgtaaagaaaggttcaacactgtgagctgaatgnccacatctcaaagaagtttgtaagaatgcttctgtctagtttttatgtgaacatatttccttttccaccataggcctcaaagggctccacatgtcctcttgcngattctacaaaaagagggtttcaaagctgctcaattaaaagaacagttcaactctgtgtgagatgaatgcaaacatcncaaagaagtttctcataatgcttctgtctagttttgttgggaagatatttccttttccaccatatgcctcaaagcgctccaaatgcacacttgcagattctacaaaaatggtgtttcaaaactgaccaatcaaaagtaaggttcaactctttgagatgaatgcagacatcacaaagtagtttttcagaatgcttctgtccagtttttatgtgaagatagtccttttctactataggcctcaaagcactcgaaatgtacacttgcagattctacaaaaagtgtgtttcaaagctgctcaatcaaaagaaaggttcaattctgtgagatgaatgcatgcatcatgaagaagtttgtcagaatgcttttgtctattttttttttttttttgtgagcaacaaggctgtttatttcacctgagtgcaggtgggctgagtccaaaaagagagcaaanggtgatnggattatcattagttcttataggttttggaataggcagtggagttaggagcaatgttttgcgggcaggagttggatctcacaaagtacattctcaagggtggggagaattacaaattacaaagaaccttctcaaaggtgagggagattanaaagaactttcttaagggtgggggagattacaaantacatcagttagtgngaagcagaaacaaaacacaatggtggaatgtcatcagttaaggctattttcacttcttttgtggatctgggacgtgaggagtgcctctgcctggacgcccattgtctgggatgtgaggagcgcctctgcccggccgccccatctgggaagtgaggagctcctctgcctggccaccccgtctgngaagtgaggagcgcctctgcccggccgccccatatgggaagtgaggagcgcctctgcctngccaccctgtctgggaggtctaccacagaggccagacgcagtgtgggggctggacgtggtggctcacgcctgtaatcccancactctgggaggccaaggtgggttgatcacttggggctaggggttcgagaccagcctggccaacatggcaaaacatatgaaaattacaacaaaccaaacaaccaatcaaccaacccagcaacaacaaaacaggtctaccctggagtcatactctaaatttttctattttcctccctttctgatcctttatcccactttctttttcttcctcttccttctccttcttgtcaaagacatagaggattgagttattatcattgatcaatacaaagtccctctctcatttattttctttcattcccaccccccatttctattccccatcttcctgtgtgcaaccttcctaatatgtttgatatgcttctttttgtatatatttttagaaaatgttaaataaaaaaaattt

SEQ ID NO: 92288 - DNA, 924 bp, Homo sapiens
taatatgtggaatctgtttccaagtatcaagtcttctgtacgctttcacacaatgtacataatagctgcaactcggcttttgtaatcagtggaatatatttcagatctgtccaggttgacacagtttggtcatctttgttttgttttatgactgcaccacatatttgatttgttttatgactgcaccacaattaattaaagtctcttcatgctgatacaaaatgaacataaatatgatgacataccaacatagatttgcttatgtggttgcctttattgatttgtactataaagaaattaaatagaagtatttcagatacccatagtatagctgtatacactgccatagctgtattgagtacattcattaccccttagagccatgtttttccatcatgttatgactctgaaaaactccagtgtatgcttttcagagaatgacattggaaagaagaaatggccaaagtatcatttggtaccttggcttccttacatagatgttgaactccaggaatgatcaaatcacagtttaggacccctttgttgggccctataaagggtttccagatgtcaaatgatagtctccagatgaagaaatgctctataatgcctcaccgctgtgttttcctgtattttgtgcttttctgaaaactttaaatacacgaatttttggtagaaatgaaaatctttctgttttatatatttgtttttgtccatggcactctgatctctttgaatctggtaaggatctagccttgtcttgtttataccagcaagcagtgttgtcacttaatgctctcatttttcacgtaaatgactgacattttcccaagtcttcacaagtgatttctgaagatgttgctgcattgagcagagactatgtcattgtaattgcagaagttttaaaattaaacatgtttaata

SEQ ID NO: 92289 - DNA, 831 bp, Homo sapiens
tggtattaccattataaataggatacatgtgcacatttttggtgaaacaagaaaagggaaacccccatggtttcattgtctttaaatatatattttctcatgttacgaggtccttgtttctatcaaaaagggttggatagaaagtaaaaatgatggctactgttagattatctttagaagagatatatattattaaaaataccattaacttttaattttgaaataattgtagattcacaggaaggtgccaagatagtacagagcggtcccatataccccctttttttgttttctctagtggttccatcttacaggattacagtacaatatcaaaaccaggagtttgatattggcacaatatatgtttgtaggtcgtggacattttatctcatatatggtgtaaccactgctgaagtccagatactggatgattcccatgtcacaaagatttccctcattctacccctttataattgcaaacatcctttcctctactatctccaaatggtggcatccactaatctgtcttacatctctctcatttcgtcattttgagaatattgggctgggccctgtggctcatgcctataatcccagcactttgggaggctgaggcgggtggatcacttgaggtcaagagtttgagaccagtctgaccaatatggtgaaaccttgtctctactaaaaatacgaaaattagcctgggtgtggcagttggcgtctgtaaccccagctacttgggaggctgaggcactggagggggaggttgcagtgagctgagatcatgccactgtactccagcctgggtgacagagtgagactcccatctcc

SEQ ID NO: 92290 - DNA, 171 bp, Homo sapiens
agaacatcaggggggaggaaacagagaggagggaacagcatggagagggaacagcataggggaggataaccaggtggatggatggatagatgtatgggtggatggatgagtgggtgggtggatagatggataatgaatgaggtaccgagctgacagggtggggtaggtgcg

SEQ ID NO: 92291 - DNA, 435 bp, Homo sapiens
tcctgcataggtctgagatgtgggcttcatgtatgtctggcaggcatccaggctttcccatcatgtgtctgtcccctgggtcacatccatgtcaggtgggtaccacagtctaaagtccttgtattctcttccacataccagggctgataatttatcagttgccattgatcaaagttcacaaggcaaatcttcataaacttctaaagctgcctacagtttcccgtaaacaaatctctaaatttacaaaagcaatgcttgctgattgtaaaaaacacacagtgccaaagcatacaaaggaagaagacccgcttgcaatttgctacctacatcccactcttggggccaacaactattggaagtgtggtgagtgattgacttacatccttctagatcttatctacatatttgcaaagaaaaaatatacatatataaaat

SEQ ID NO: 92292 - DNA, 723 bp, Homo sapiens
tcacatgtaaatctatgcaggtcttttttattcttttttgttatacagaaataaaagcgtactatatattctatacctttttaaagttaatgtgttttagatttgcatgtgatcacatgtttatctacctcattgctctagtagtagacattctaagttgtctgtagtgttgttgtgaagcagatagctttccaagacagcgtaagcaaacgacacaaggcttctattaccagggtttagttgatagtgatgtattggacacattttattttctaaacttacgtaaaactattttctgtttatttgcagtcataattttttgagctagagttcacatagaggtgatctaatctgtcttataccaggaagtctgaggcccagagaagtgaattcgcttgcccagaggcacacagtaagtgccagagataggactaaaacctgggacttctatttagaatttttggcgtacatattttccagctgcaaattttgctgtaattttgttagatccaaggaatagcagggatggaggaagcgttttgtgtgttggaggctttttaaaatcatgtaaggaatataattctgcttactcccaatatcagtctttgatgggcttatccatgttatgtcattttaacgtccgagaaatcgtccgtcaagtgggtaattcatgccgtcgtggtgactcttatctgaatggactgtcagcagtaacttgggttg

SEQ ID NO: 92293 - DNA, 526 bp, Homo sapiens
gtcagggggtggggggcaaggagagagagagcattaggacaaatagctaatgcatgggttgataggtgcagcaaaccaccatggcacatgtacacctatgtaacaaatctgcaccttctgcacgtgtatcccagaacttaaagtaaaacaaaataaataataaataaagggaaccatgtggatttacagcatgtaaagacaccagaaaacaagacaaaggaccatatggacaactgcttcaatgccctctggctcctactggaagttggcttgggaagctgttccctggacccaaggttaagttcaggagttacatatcctcttggagtagtgtttccaaattttgactaaattttcctgattatggaaatttttcaggttctggtaaaaattatatatttcatgtcccaccccagacctatcaaattggatgaggattatattaatatatttaatccaacaatgaggcatgattgataaatactaactcttagaggagctgaacaatttcacttgcaggggggcc

SEQ ID NO: 92294 - DNA, 236 bp, Homo sapiens
gcacgaagctgcatttccagcctgagtggccagctagagacgcacttaatcctgaggtctgtgggcagaggccacgtccttcaaagtcaagtggttattaaagaaccggcactgccagctccaccagcgaagtcctcctggttcccaaaatgaggagactgaggagctggggttggcagacccttgccccagagccagagacgtggggcccatctggggaacaacatgccagcctt

SEQ ID NO: 92295 - DNA, 408 bp, Homo sapiens
gacatgcatggagctactctggttatagtcctgccgggcaggtcagattaatcactgagtctgatgcacctggcaaccatcaaacagcaaaaccaaaaccaactctttccttatgtaagtcaatcagagtttctgttgactgcattcaaggaagcccagccaattcaggaggaaatgccgttttatttcaaaagcacaggcacagttcgtacatttgccgagggaggtaacggaaggtgtcagctgagactgatcaagtgcaccctggttcaacggactcttaactggtctttccccatcagtctcgcttgaccccaaagccttcaggaatacactggattccagaataaatcaatttattccagatacatctccagaaaacactttttggggaacaggtgactagca

SEQ ID NO: 92296 - DNA, 306 bp, Homo sapiens
taacaagctgtagagccttcaggccaggggtacagaaaagtgtaaaggaaggagctatgttaaaacaaaatgtatatgggccaattttcagtacttatctcagccttgcagccctactgcctgcctgtctcagggtcatacaaggatttagagtttagggggtgagtggtctcatggcatttaactctttggatattcctctcatcatttattgggtatcattcgagtttggtggagcccaatgtctggatttctaccaggtcatgcatctgcaggaagagctattcttccactgagttttcaaaa

SEQ ID NO: 92297 - DNA, 415 bp, Homo sapiens
tgcacgtgctgtgttctgagaggcgaggttagagcccagatcatctctattcatgtgacacagccattcccaaaaggacttagagcagagggaacttgacccccatcttaactgtctcttttgaggatgagcagagttctcaggtgtgcccccagcctggtttatataaatgtagctttaatctaggtgtgagcagatgtctgttggggatctctggacaccaggcctactctggagtcagagaggggacccgccatttggctctctggtacagtgtggacagtgtctgctcctctacttgtcatggctgaaagtactgcagtgccaggaaaccctctgggaagttctttcttctacaaccagagaatgtcatgacagctgcagtactttcagccatgacaagtagacgagcggg

SEQ ID NO: 92298 - DNA, 487 bp, Homo sapiens
ccatgtgcgtgtctgtttccaagaaaaggtgactgtggaaataggaaaagacttctgctgaaatgctgaatgttatactgttttcttgggcccatcttaataatcatctacaaagctgcaattttggcaatatgagctggcggcctgacctaacatcattgtactttggatcactgaagtgtctcctcacatgccaaaacctgctgcactttcttcctacttcgttgcggccttcatcaaccttgtccacctctttcagtcacctgagtctctacgtgcactgttcagtatggcagccatgagccaatgtggccaccaagtatgaagaagggagccttctgaattgaatgtaaaatgtacactggctttccaagacttagcatgaaaaaaaaatgtggaataactcaataatctttgatattgcttgcaggttgaaatgataatattttggatatagtgatttaaataaaatatattattaaaatta

SEQ ID NO: 92299 - DNA, 345 bp, Homo sapiens
gaaagaatgattcctccctgtcccacaccttactgccacatcaacatggctcataaataataacagggaatcacaactaaaataactgtaaggctcagattgtttaggagtcccttagggaaacctgaagacagcaaggatgtgaaaaacaaagatagagaaaattataacctctgacacctatggtttgtacacaaacattaaacatagtcttatgccttgccaggtctacataaaacttcacaccaaaggcatatttatttctttcttttacccagtatatcatatccagcatttagcaaaaaattacaagacgtgtcgaaaggcagtaaacacaatttgaag

SEQ ID NO: 92300 - DNA, 231 bp, Homo sapiens
tttattctgggaatacaaggctggttcaaaatttgaaaatcagtcaggataatttagtctattagtagactaaggaaaaccatatgatcatctctttagatggagaataagtatttgacaaactccagtatactttcatgataatttttacaggccaagcgtggtggctcatgcctgtaatcccatcactttgggaggctgaggcaggagtatctcttgagcctaggagat

SEQ ID NO: 92301 - DNA, 371 bp, Homo sapiens
gattgataaatgaatgaaagaataaatgaagggaggaaggaacaagcatactgcatgtcagaagggcatactcaaccacagatcaaatgtacagctttgagatggaaattgtattaatttgggatatctatctacttcaattcttagatatacttcaatctttttagctgctgtacagtatcccacagtatgaatgtgctgcaggtaatttagccatacccttaatggtgggcatttaggtcacttcacacatttttctgctgcaagcaaatgttgcagtgagcattctcgtacaaacatccttgcaggcacatacatgcaagcattttgctagggtgaatactgagaaattgccggtggataacctatgg

SEQ ID NO: 92302 - DNA, 470 bp, Homo sapiens
agcacgagaccctcagcagaaggtgagcagatgccagcactatgctccttggacttcccagcctccagaatcctgagctaaataaatctcttttcaagtaaatcacccagtttcaagtattctgttaaagcaacagcaaacagactaagacacttggagaggtctccctaataccctctctggagtaggtcttccgggctgttccagttctcatttccctctttggccttcttagctcttgtcaaatttgtaattactcatttgtgtgcttctttgtttattacggtccccaccagattgtaaacccacgagggcaggggctgtctctgtttggttcactgtgcatatctagcatctggcacattgtgggaatctattcatagctgttggatgaatgactgagggcagagtcagaacagaggatgaggataaagaggatgaaaataaagtggaggggacaggtggctgac

SEQ ID NO: 92303 - DNA, 592 bp, Homo sapiens
ttttttggtaaactttataacttgtgaaattatctacacctgacggaagttaaaatttgatgaagtctgttgttttggaatgccctttcttctgtgcagataagccataatataattttagctaagtgttgaactcagaaaggaattgtaatcacagaaactggaggaatacaaaacttattttgcacttgtgcccctccccgccatgcccccactaaagtctcagttttaaaatgtaactgttttcattcccaggttgagcccttttttatcaatcttgccttatttgatgtaaagaacaattgtaagatttcagcagactttcatgtagacctgaatcccccatctgtccgtgaaatgctgtggggctcttcaacccaactggccagtgacggtagcccaaagggctcttcacccgaatcttacattcatggaattgccgaatctcagttacgctacatacaacaggtaacgaatgacctttagtcttagcagcgtattcagaataagaaacagaaatattcttgtattatttcatggtttcaggccaatgttttcatggcattctctctcttgtaaggtctgtcgatag

SEQ ID NO: 92304 - DNA, 1065 bp, Homo sapiens
ttttttggtaaactttataacttgtgaaattatctacacctgacggaagttaaaatttgatgaagtctgttgttttggaatgccctttcttctgtgcagataagccataatataattttagctaagtgttgaactcagaaaggaattgtaatcacagaaactggaggaatacaaaacttattttgcacttgtgcccctccccgccatgcccccactaaagtctcagttttaaaatgtaactgttttcattcccaggttgagcccttttttatcaatcttgccttatttgatgtaaagaacaattgtaagatttcagcagactttcatgtagacctgaatcccccatctgtccgtgaaatgctgtggggctcttcaacccaactggccagtgacggtagcccaaagggctcttcacccgaatcttacattcatggaattgccgaatctcagttacgctacatacaacagggaattttctcagtgacgaatccacatcctgaaatttttctagttgccagaattgaaaaggtactacagggaaacattacacactgtgcagaaccctatatcaaaaattctgatccagtaaagacggcccagaaggtgcacaggacagctaaacaagtgtgtagccgccttggacaatacagaatgcccttcgcttgggctgccagacccattttcaaagatactcaaggctctcttgatctggatgggagattttctcctctgtataaacaagacagtagcaagctttcaagtgaagacattctcaagttgctctcagaatataagaagccagaaaagaccaaactgcagattattcctgggcagctaaacatcacagtagaatgtgttcctgtggatttatcaacctgtttttttccctgctatagattgtattacttcttcatatgtgcccttgaagccttttgaaaagaattgccaaaatattactgtggaggttgaagagtttgttccagaaatgacaaaatattgttatccatttactatttacaaaaaccatctgtatgtatatcccctgcaattaaaatacgatagcca

SEQ ID NO: 92305 - DNA, 433 bp, Homo sapiens
aaatgtactcacttcgcatacacaaccaaaccaaagaggcaaagcagcaacggtgacacctgcgctatggagactaacagatgtgaggttggtgacaaaatataaaatccattttgaaaggaacgttggaagctttgaaaactctatgaaaggaaattctatctatttctagggtcctggacatgatcctttgttgaatatgaacattgtttactaaaaatcgttaaccataaacaaccatatgcacaagattacataagaaagtctaacggaagtacttttttcccagggaattttctcagtgacgaatccacatcctgaaatttttctagttgccagaattgaaaaggtactacagggaaacattacacactgtgcagaaccctatatcaaaaattctgatccagtaaaggtaatttataaaggttgttga

SEQ ID NO: 92306 - DNA, 320 bp, Homo sapiens
gcaggatacttactttctacatgtactttataaaaattatttttccattttattgtgagattagtttaagtgccagaaatttttttgtgtggaatattttactaactcctgacagaaaatgcagaacttcccaactgttaattaaatctttataacatcctgaggatatagaagggagctcatgatctccctagagcatctttgactccagcaggagtaaaatacccagtaggttttcctttttacaggcaatgactcaggctaaacgtatatgtgttcatgtatttacttagcctctgctttctttcatatttcttctc

SEQ ID NO: 92307 - DNA, 456 bp, Homo sapiens
ttgaactcccgacctcaagtgatctgcccacctcagcctcccaaagtgctgtaattataggcatgagccactgtacccagccttaagcaattatattctgaatcataaaagaatgtgtcagggtccagtcatgaaacagcctgggcgacagagcgagacttctccaaaaagaaaaaaaaagtcttgacccttgagaacgcatatttttaatattctgtgtgatgaatgggaagtgtacataaagcatttctgctgcatatcaaagaactatgattgtctcaaggaaatagccctgtgggaatttcttacttgtattttcctggaatggactagattttaacttgaaaaaaaatgactgacaaactgtggttattcagatttgggtgtttggcacatgttttcacaaaaatgaacagattgagctgtagggtgaccagctgttttagcacctcaagt

SEQ ID NO: 92308 - DNA, 511 bp, Homo sapiens
tctggcgtaccgggcttgcggcagatcctgctgtttctccacccacccgcctttccctctccttgtttccgaaggagagcctgcctctcgccccgaggttgaacattccagctccttgctctccccggcaggaagccccaattctgccctgcagtggttgcctggacaccctcgtaacccagctgagcctgcacccccggggcctgggccactctgctgctctgtcttgcacccttgacttcctttgagggttgactctggacccttaagcctcctccttccttgcctggagtttacccacctaggccggccgcctggcaaggactggctggtgcggggcctgaaagcctggccctcgcctcaaggtgggactgtctgggctgtcactgatgccccagagctcccgagggatcctttgcctggcttcttcccgtcgtccccgtcctgtttccccactctcttcccgcctgtcccagactgctaccttcctaataaatggcttgtacagaaa

SEQ ID NO: 92309 - DNA, 400 bp, Homo sapiens
gaatatcccttaatcattataaaataaattgcaattaagtctggggtaagttgttttaacctctctgagtctcagtttcctcatctgaaaaacagtattattattactattttgcaagtttgagcatatggatgagaactaacacaggcaaagtccctcacttagcatatcttgaaagagagtggtggctctacaaagggtggatgactgaaaaacaaggcataattttcagtttagattttagagtctgacatgccctttcacatacattacttaatttcatttttaaaaatatagtaccattattggggttcttcttcatatggcatccctggagtcatcaaagtaaaaatgaaagaaatcaatctagcttggaaaatcttaaggaacttaataattg

SEQ ID NO: 92310 - DNA, 392 bp, Homo sapiens
aatgagttaaaactttggaggctgttaggatggaatgaacttattttgtatgtaaggatatgaatagagtggctaggagtggaatgttatagaatgaatatttatgttgaagccctaaccccaaatgttatatttgggggtggggggcctttggaaaataactaggattggagtaggtcatgagaatggggctgtcactctcactaacgcccttaaaagacttggaagaggcaccagtgctcttgctctctgaaatttgaggacacaggaaaaagggggccatctgcaaaccaggaagagagccctcaccagcactcaaccattctggcatcttgatgttgaattatgaagactacagaactgtgagaaataaatgtctgttgtttaagcca

SEQ ID NO: 92311 - DNA, 246 bp, Homo sapiens
ggcctctcctgagaggcagtgaagggaggtaccagcagactctgagggaggcagaccactgcgtagatgacagtcccatggggcaattacagggacttcctggatacacagacaagtggccctcagagaggttttggttccagaagcctctccttgaaggagcccattcagaatttttcagtaactttgtctgatgacattcacttagctgtgggctctccttcaaccctgaatgaggacatggtg

SEQ ID NO: 92312 - DNA, 458 bp, Homo sapiens
tatacagctcgtgccgaattcggcacgagctttaccttttttcttaccttattgcactggttagcaaccccaatacagagaccaccagatcaggtatagactcctgaaagacaatataatgaagtgctccagtcaggcctatctaaactggattcacagctctgtcacttaattgctacatgatctagagccagttactttgtgtttcagccatgtatttgcagctgagagaaaataatcattcttatttcatgaaaattgtggggatgatgaaataagttaacacctttaaagtgtgtagtaaagtatcaggatactatattttaggtcttaatacacacagttatgccgctagatacatgctttttaatgagataatgtgatattatacataacacatatcgatttttaaaaattaaatcaaccttgctttgatggaataaactccatttagtcac

SEQ ID NO: 92313 - DNA, 3514 bp, Homo sapiens
ggtaaatatgtgttcattaactgagattaaccttccctgagttttctcacaccaaggtgaggaccatgtccctgtttccatcactccctctccttctcctgagtatggtggcagcgtcttactcagaaactgtgacctgtgaggatgcccaaaagacctgccctgcagtgattgcctgtagctctccaggcatcaacggcttcccaggcaaagatgggcgtgatggcaccaagggagaaaagggggaaccaggccaagggctcagaggcttacagggcccccctggaaagttggggcctccaggaaatccagggccttctgggtcaccaggaccaaagggccaaaaaggagaccctggaaaaagtccggatggtgatagtagcctggctgcctcagaaagaaaagctctgcaaacagaaatggcacgtatcaaaaagtggctgaccttctctctgggcaaacaagttgggaacaagttcttcctgaccaatggtgaaataatgacctttgaaaaagtgaaggccttgtgtgtcaagttccaggcctctgtggccacccccaggaatgctgcagagaatggagccattcagaatctcatcaaggaggaagccttcctgggcatcactgatgagaagacagaagggcagtttgtggatctgacaggaaatagactgacctacacaaactggaacgagggtgaacccaacaatgctggttctgatgaagattgtgtattgctactgaaaaatggccagtggaatgacgtcccctgctccacctcccatctggccgtctgtgagttccctatctgaagggtcatatcactcaggccctccttgtctttttactgcaacccacaggcccacagtatgcttgaaaagataaattatatcaatttcctcatatccagtattgttccttttgtgggcaatcactaagcagcagtagtagtcatgctaattatataatatttttaatatatactatgaggccctatcttttgcatcctacattaattatctagtttaattaatctgtaatgctttcgatagtgttaacttgctgcagtatgaaaataagacggatttatttttccatttacaacaaacacctgtgctctgttgagccttcctttctgtttgggtagagggctcccctaatgacatcaccacagtttaataccacagctttttaccaagtttcaggtattaagaaaatctattttgtaactttctctatgaactctgttttctttctaatgagatattaaaccatgtaaagaacataaataacaaatctcaagcaaacagcttcacaaattctcacacacatacatacctatatactcactttctagattaagatatgggacatttttgactccctagaagccccgttataactcctcctagtactaactcctaggaaaatactattctgacctccatgactgcacagtaatttcgtctgtttataaacattgtatagttggaatcatattgtgtgtaatgttgtatgtcttgcttactcagaattaagtctgtgagattcattcatgtcatgtgtacaaaagtttcatccttttcattgccatgtagggttcccttatattaatattcctcagttcatccattctattgttaataggcacttaagtggcttccaatttttggccatgaggaagagaacccacgaacattcctggacttgtcttttggtggacatggtgcactaatttcactacctatccaggagtggaactggtagaggatgaggaaagcatgtattcagctttagtagatattaccagttttcctaagtgattgtatgaatttatgctcctaccggcaatgtgtggcagtcctagatgctctatgtgcttgtaaaaagtcaatgttttcagttctcttgattttcattattcctgtggatgtaaagtgatatttccccatggttttaatctgtatttccccaacatgtaataaggttgaacacttttttatatgcttattgggcacttgggtatcttcttctgtgaagtacccgttcacatttttgtattttgtttaaattagttagccaatatttttcttactgatttttaagttatttttacattctgaatatgtcctttttaatgtgtattacaaatattttgctagtttttgacttgctcctaatgttgaattttgatgaacaaaatttcctaattttgagaaagtcttatttattcatattttctttcaaaattagtgctttttgtgtcatgtttaagaaatttttgcccatcccaaaatcataagatatttttcatgattttgaaaccatgaagagatttttcatgattttgaaatcatgaagatatttttccatttttttctaatagttttattaataaacattctatctattcctggtagaatagatatccacttgagacagcactatgtaggaaagaccatttttcctccactgaactagggtggtgcatttttgtaagttaggtaactgtatgtgtgtgtgtctgtttctgggctgtctattctagtctatttgttgatgcttgtgtcaaacagtacactatcttaattattgtacatttatagttgtaactgtagtccagctttgttcttcttcaagtcaagatttccatataaatattagaaacagtttctcaatttctacaaaatcctgatgaggtttctactgggaccacattgagtctatcaatcaacttatgcagaactggcaacttactactgaatctctaatcaatgttcatcatgtatcgcttcatttaactaggatttctttaacttaattgctatgttttgacatttttagtttaaaaaccttgtatatcttgttttggtggttttagtgattttaataatatattttaaatattttttcttttctattgttgtacacagaaatacagttaagttttgtgtgtagtcttacgatgtttagtaacctcaataagtttatttcttaaatctagtaatttgtagattcctctggattttgtatatgcatagtcatgtaagctgaaaatatggcaatacttgcttcttcccaattgctttaccttttttcttaccttattgcactggttagcaaccccaatacagagaccaccagatcaggtatagactcctgaaagacaatataatgaagtgctccagtcaggcctatctaaactggattcacagctctgtcacttaattgctacatgatctagagccagttactttgtgtttcagccatgtatttgcagctgagagaaaataatcattcttatttcatgaaaattgtggggatgatgaaataagttaacacctttaaagtgtgtagtaaagtatcaggatactatattttaggtcttaatacacacagttatgccgctagatacatgctttttaatgagataatgtgatattatacataacacatatcgatttttaaaaattaaatcaaccttgctttgatggaataaactccatttagtcac

SEQ ID NO: 92314 - DNA, 3514 bp, Homo sapiens
ggtaaatatgtgttcattaactgagattaaccttccctgagttttctcacaccaaggtgaggaccatgtccctgtttccatcactccctctccttctcctgagtatggtggcagcgtcttactcagaaactgtgacctgtgaggatgcccaaaagacctgccctgcagtgattgcctgtagctctccaggcatcaacggcttcccaggcaaagatgggcgtgatggcaccaagggagaaaagggggaaccaggccaagggctcagaggcttacagggcccccctggaaagttggggcctccaggaaatccagggccttctgggtcaccaggaccaaagggccaaaaaggagaccctggaaaaagtccggatggtgatagtagcctggctgcctcagaaagaaaagctctgcaaacagaaatggcacgtatcaaaaagtggctgaccttctctctgggcaaacaagttgggaacaagttcttcctgaccaatggtgaaataatgacctttgatgctgcagagaatggagccattcagaatctcatcaaggaggaagccttcctgggcatcactgatgagaagacagaagggcagtttgtggatctgacaggaaatagactgacctacacaaactggaacgagggtgaacccaacaatgctggttctgatgaagattgtgtattgctactgaaaaatggccagtggaatgacgtcccctgctccacctcccatctggccgtctgtgagttccctatctgaagggtcatatcactcaggccctccttgtctttttactgcaacccacaggcccacagtatgcttgaaaagataaattatatcaatttcctcatatccagtattgttccttttgtgggcaatcactaaaaatgatcactaacagcaccaacaaagcaataatagtagtagtagtagttagcagcagcagtagtagtcatgctaattatataatatttttaatatatactatgaggccctatcttttgcatcctacattaattatctagtttaattaatctgtaatgctttcgatagtgttaacttgctgcagtatgaaaataagacggatttatttttccatttacaacaaacacctgtgctctgttgagccttcctttctgtttgggtagagggctcccctaatgacatcaccacagtttaataccacagctttttaccaagtttcaggtattaagaaaatctattttgtaactttctctatgaactctgttttctttctaatgagatattaaaccatgtaaagaacataaataacaaatctcaagcaaacagcttcacaaattctcacacacatacatacctatatactcactttctagattaagatatgggacatttttgactccctagaagccccgttataactcctcctagtactaactcctaggaaaatactattctgacctccatgactgcacagtaatttcgtctgtttataaacattgtatagttggaatcatattgtgtgtaatgttgtatgtcttgcttactcagaattaagtctgtgagattcattcatgtcatgtgtacaaaagtttcatccttttcattgccatgtagggttcccttatattaatattcctcagttcatccattctattgttaataggcacttaagtggcttccaatttttggccatgaggaagagaacccacgaacattcctggacttgtcttttggtggacatggtgcactaatttcactacctatccaggagtggaactggtagaggatgaggaaagcatgtattcagctttagtagatattaccagttttcctaagtgattgtatgaatttatgctcctaccggcaatgtgtggcagtcctagatgctctatgtgcttgtaaaaagtcaatgttttcagttctcttgattttcattattcctgtggatgtaaagtgatatttccccatggttttaatctgtatttccccaacatgtaataaggttgaacacttttttatatgcttattgggcacttgggtatcttcttctgtgaagtacccgttcacatttttgtattttgtttaaattagttagccaatatttttcttactgatttttaagttatttttacattctgaatatgtcctttttaatgtgtattacaaatattttgctagtttttgacttgctcctaatgttgaattttgatgaacaaaatttcctaattttgagaaagtcttatttattcatattttctttcaaaattagtgctttttgtgtcatgtttaagaaatttttgcccatcccaaaatcataagatatttttcatgattttgaaaccatgaagagatttttcatgattttgaaatcatgaagatatttttccatttttttctaatagttttattaataaacattctatctattcctggtagaatagatatccacttgagacagcactatgtaggaaagaccatttttcctccactgaactagggtggtgcatttttgtaagttaggtaactgtatgtgtgtgtgtctgtttctgggctgtctattctagtctatttgttgatgcttgtgtcaaacagtacactatcttaattattgtacatttatagttgtaactgtagtccagctttgttcttcttcaagtcaagatttccatataaatattagaaacagtttctcaatttctacaaaatcctgatgaggtttctactgggaccacattgagtctatcaatcaacttatgcagaactggcaacttactactgaatctctaatcaatgttcatcatgtatcgcttcatttaactaggatttctttaacttaattgctatgttttgacatttttagtttaaaaaccttgtatatcttgttttggtggttttagtgattttaataatatattttaaatattttttcttttctattgttgtacacagaaatacagttaagttttgtgtgtagtcttacgatgtttagtaacctcaataagtttatttcttaaatctagtaatttgtagattcctctggattttgtatatgcatagtcatgtaagctgaaaatatggcaatacttgcttcttcccaattgctttaccttttttcttaccttattgcactggttagcaaccccaatacagagaccaccagatcaggtatagactcctgaaagacaatataatgaagtgctccagtcaggcctatctaaactggattcacagctctgtcacttaattgctacatgatctagagccagttactttgtgtttcagccatgtatttgcagctgagagaaaataatcattcttatttcatgaaaattgtggggatgatgaaataagttaacacctttaaagtgtgtagtaaagtatcaggatactatattttaggtcttaatacacacagttatgccgctagatacatgctttttaatgagataatgtgatattatacataacacatatcgatttttaaaaattaaatcaaccttgctttgatggaataaactccatttagtcac

SEQ ID NO: 92315 - DNA, 3568 bp, Homo sapiens
ggtaaatatgtgttcattaactgagattaaccttccctgagttttctcacaccaaggtgaggaccatgtccctgtttccatcactccctctccttctcctgagtatggtggcagcgtcttactcagaaactgtgacctgtgaggatgcccaaaagacctgccctgcagtgattgcctgtagctctccaggcatcaacggcttcccaggcaaagatgggcgtgatggcaccaagggagaaaagggggaaccaggccaagggctcagaggcttacagggcccccctggaaagttggggcctccaggaaatccagggccttctgggtcaccaggaccaaagggccaaaaaggagaccctggaaaaagtccggatggtgatagtagcctggctgcctcagaaagaaaagctctgcaaacagaaatggcacgtatcaaaaagtggctgaccttctctctgggcaaacaagttgggaacaagttcttcctgaccaatggtgaaataatgacctttgaaaaagtgaaggccttgtgtgtcaagttccaggcctctgtggccacccccaggaatgctgcagagaatggagccattcagaatctcatcaaggaggaagccttcctgggcatcactgatgagaagacagaagggcagtttgtggatctgacaggaaatagactgacctacacaaactggaacgagggtgaacccaacaatgctggttctgatgaagattgtgtattgctactgaaaaatggccagtggaatgacgtcccctgctccacctcccatctggccgtctgtgagttccctatctgaagggtcatatcactcaggccctccttgtctttttactgcaacccacaggcccacagtatgcttgaaaagataaattatatcaatttcctcatatccagtattgttccttttgtgggcaatcactaaaaatgatcactaacagcaccaacaaagcaataatagtagtagtagtagttagcagcagcagtagtagtcatgctaattatataatatttttaatatatactatgaggccctatcttttgcatcctacattaattatctagtttaattaatctgtaatgctttcgatagtgttaacttgctgcagtatgaaaataagacggatttatttttccatttacaacaaacacctgtgctctgttgagccttcctttctgtttgggtagagggctcccctaatgacatcaccacagtttaataccacagctttttaccaagtttcaggtattaagaaaatctattttgtaactttctctatgaactctgttttctttctaatgagatattaaaccatgtaaagaacataaataacaaatctcaagcaaacagcttcacaaattctcacacacatacatacctatatactcactttctagattaagatatgggacatttttgactccctagaagccccgttataactcctcctagtactaactcctaggaaaatactattctgacctccatgactgcacagtaatttcgtctgtttataaacattgtatagttggaatcatattgtgtgtaatgttgtatgtcttgcttactcagaattaagtctgtgagattcattcatgtcatgtgtacaaaagtttcatccttttcattgccatgtagggttcccttatattaatattcctcagttcatccattctattgttaataggcacttaagtggcttccaatttttggccatgaggaagagaacccacgaacattcctggacttgtcttttggtggacatggtgcactaatttcactacctatccaggagtggaactggtagaggatgaggaaagcatgtattcagctttagtagatattaccagttttcctaagtgattgtatgaatttatgctcctaccggcaatgtgtggcagtcctagatgctctatgtgcttgtaaaaagtcaatgttttcagttctcttgattttcattattcctgtggatgtaaagtgatatttccccatggttttaatctgtatttccccaacatgtaataaggttgaacacttttttatatgcttattgggcacttgggtatcttcttctgtgaagtacccgttcacatttttgtattttgtttaaattagttagccaatatttttcttactgatttttaagttatttttacattctgaatatgtcctttttaatgtgtattacaaatattttgctagtttttgacttgctcctaatgttgaattttgatgaacaaaatttcctaattttgagaaagtcttatttattcatattttctttcaaaattagtgctttttgtgtcatgtttaagaaatttttgcccatcccaaaatcataagatatttttcatgattttgaaaccatgaagagatttttcatgattttgaaatcatgaagatatttttccatttttttctaatagttttattaataaacattctatctattcctggtagaatagatatccacttgagacagcactatgtaggaaagaccatttttcctccactgaactagggtggtgcatttttgtaagttaggtaactgtatgtgtgtgtgtctgtttctgggctgtctattctagtctatttgttgatgcttgtgtcaaacagtacactatcttaattattgtacatttatagttgtaactgtagtccagctttgttcttcttcaagtcaagatttccatataaatattagaaacagtttctcaatttctacaaaatcctgatgaggtttctactgggaccacattgagtctatcaatcaacttatgcagaactggcaacttactactgaatctctaatcaatgttcatcatgtatcgcttcatttaactaggatttctttaacttaattgctatgttttgacatttttagtttaaaaaccttgtatatcttgttttggtggttttagtgattttaataatatattttaaatattttttcttttctattgttgtacacagaaatacagttaagttttgtgtgtagtcttacgatgtttagtaacctcaataagtttatttcttaaatctagtaatttgtagattcctctggattttgtatatgcatagtcatgtaagctgaaaatatggcaatacttgcttcttcccaattgctttaccttttttcttaccttattgcactggttagcaaccccaatacagagaccaccagatcaggtatagactcctgaaagacaatataatgaagtgctccagtcaggcctatctaaactggattcacagctctgtcacttaattgctacatgatctagagccagttactttgtgtttcagccatgtatttgcagctgagagaaaataatcattcttatttcatgaaaattgtggggatgatgaaataagttaacacctttaaagtgtgtagtaaagtatcaggatactatattttaggtcttaatacacacagttatgccgctagatacatgctttttaatgagataatgtgatattatacataacacatatcgatttttaaaaattaaatcaaccttgctttgatggaataaactccatttagtcac

SEQ ID NO: 92316 - DNA, 3514 bp, Homo sapiens
ggtaaatatgtgttcattaactgagattaaccttccctgagttttctcacaccaaggtgaggaccatgtccctgtttccatcactccctctccttctcctgagtatggtggcagcgtcttactcagaaactgtgacctgtgaggatgcccaaaagacctgccctgcagtgattgcctgtagctctccaggcatcaacggcttcccaggcaaagatgggcgtgatggcaccaagggagaaaagggggaaccaggccaagggctcagaggcttacagggcccccctggaaagttggggcctccaggaaatccagggccttctgggtcaccaggaccaaagggccaaaaaggagaccctggaaaaagtccggatggtgatagtagcctggctgcctcagaaagaaaagctctgcaaacagaaatggcacgtatcaaaaagtggctgaccttctctctgggcaaacaagttgggaacaagttcttcctgaccaatggtgaaataatgacctttgaaaaagtgaaggccttgtgtgtcaagttccaggcctctgtggccacccccaggaatgctgcagagaatggagccattcagaatctcatcaaggaggaagccttcctgggcatcactgatgagaagacagaagggcagtttgtggatctgacaggaaatagactgacctacacaaactggaacgagggtgaacccaacaatgctggttctgatgaagattgtgtattgctactgaaaaatggccagtggaatgacgtcccctgctccacctcccatctggccgtctgtgagttccctatctgaagggtcatatcactcaggccctccttgtctttttactgcaacccacaggcccacagtatgcttgaaaagataaattatatcaatttcctcatatccagtattgttccttttgtgggcaatcactaaaaatgatcactaacagcaccaacaaagcaataatagtagtagtagtagttagcagcagcagtagtagtcatgctaattatataatatttttaatatatactatgaggccctatcttttgcatcctacattaattatctagtttaattaatctgtaatgctttcgatagtgttaacttgctgcagtatgaaaataagacggatttatttttccatttacaacaaacacctgtgctctgttgagccttcctttctgtttgggtagagggctcccctaatgacatcaccacagtttaataccacagctttttaccaagtttcaggtattaagaaaatctattttgtaactttctctatgaactctgttttctttctaatgagatattaaaccatgtaaagaacataaataacaaatctcaagcaaacagcttcacaaattctcacacacatacatacctatatactcactttctagattaagatatgggacatttttgactccctagaagccccgttataactcctcctagtactaactcctaggaaaatactattctgacctccatgactgcacagtaatttcgtctgtttataaacattgtatagttggaatcatattgtgtgtaatgttgtatgtcttgcttactcagaattaagtctgtgagattcattcatgtcatgtgtacaaaagtttcatccttttcattgccatgtagggttcccttatattaatattcctcagttcatccattctattgttaataggcacttaagtggcttccaatttttggccatgaggaagagaacccacgaacattcctggacttgtcttttggtggacatggtgcactaatttcactacctatccaggagtggaactggtagaggatgaggaaagcatgtattcagctttagtagatattaccagttttcctaagtgattgtatgaatttatgctcctaccggcaatgtgtggcagtcctagatgctctatgtgcttgtaaaaagtcaatgttttcagttctcttgattttcattattcctgtggatgtaaagtgatatttccccatggttttaatctgtatttccccaacatgtaataaggttgaacacttttttatatgcttattgggcacttgggtatcttcttctgtgaagtacccgttcacatttttgtattttgtttaaattagttagccaatatttttcttactgatttttaagttatttttacattctgaatatgtcctttttaatgtgtattacaaatattttgctagtttttgacttgctcctaatgttgaattttgatgaacaaaatttcctaattttgagaaagtcttatttattcatattttctttcaaaattagtgctttttgtgtcatgtttaagaaatttttgcccatcccaaaatcataagatatttttcatgattttgaaaccatgaagagatttttcatgattttgaaatcatgaagatatttttccatttttttctaatagttttattaataaacattctatctattcctggtagaatagatatccacttgagacagcactatgtaggaaagaccatttttcctccactgaactagggtggtgcatttttgtaagttaggtaactgtatgtgtgtgtgtctgtttctgggctgtctattctagtctatttgttgatgcttgtgtcaaacagtacactatcttaattattgtacatttatagttgtaactgtagtccagctttgttcttcttcaagtcaagatttccatataaatattagaaacagtttctcaatttctacaaaatcctgatgaggtttctactgggaccacattgagtctatcaatcaacttatgcagaactggcaacttactactgaatctctaatcaatgttcatcatgtatcgcttcatttaactaggatttctttaacttaattgctatgttttgacatttttagtttaaaaaccttgtatatcttgttttggtggttttagtgattttaataatatattttaaatattttttcttttctattgttgtacacagaaatacagttaagttttgtgtgtagtcttacgatgtttagtaacctcaataagtttatttcttaaatctagtaatttgtagattcctctggattttgtatatgcatagtcatgtaagctgaaaatatggcaatacttgcttcttcccaattgctttaccttttttcttaccttattgcactggttagcaaccccaatacagagaccaccagatcaggtatagactcctgaaagacaatataatgaagtgctccagtcaggcctatctaaactggattcacagctctgtcacttaattgctacatgatctagagccagttactttgtgtttcagccatgtatttgcagctgagagcctttaaagtgtgtagtaaagtatcaggatactatattttaggtcttaatacacacagttatgccgctagatacatgctttttaatgagataatgtgatattatacataacacatatcgatttttaaaaattaaatcaaccttgctttgatggaataaactccatttagtcac

SEQ ID NO: 92317 - DNA, 188 bp, Homo sapiens
aaaaaataaataagacagtctccctctgtctccaaggttggagtacagtagtgcagtcatagctcactgcagcctccaacgcctgggctcatgcagtcctcccgagtagctgcaccacaggcatgagccacagcccccagcttccagaacctttttgttttccaaaactgaaatgctgtactttaccc

SEQ ID NO: 92318 - DNA, 385 bp, Homo sapiens
ggtggtgttgccagaaggtgactgggctgtagaaacgaaataagacagtcctatggtaaagaaaagctagagcggaaaggaggggaaccaagtcctgtgaatagaggtagcaccctgagaaacccatgtcatcccaagggtgcccaaacccatagctggccccaggtctgtgcacttaaggctgggatgcttagactttcctgggtttctgtgtctgtatagcctcttaatgtttcttgagataatttgaatgattttactttcatctacaataacccaactgattgggcaggttcttatgggtagaattacatggtcaaaaataggaacatatttaagttgttgatatcttaaatttcctttgaaaaatataaatttatatccc

SEQ ID NO: 92319 - DNA, 160 bp, Homo sapiens
acaacaacaacaaaaattgtttctaagtgaaggagaaatactttctcagacaaaaaaaattaagggaatctattaccttgcaagaaatgttaaaagaagttctttagagagaagggaaacaaaatatagatcagaaaccaggatctacataaggaaggaa

SEQ ID NO: 92320 - DNA, 333 bp, Homo sapiens
ggcaacacatagaaactatgatagctgtttttattccagaggatgaagttttaaagaaatataacacagtttagttatagagactatttgaagagatagacaatgataaacgaatgctatgatatagaaacaataggatcaataatgagtatttaaggagctcagagagagttttctggaagaagcaaaatgtgatgtttccatagggtaatgagcctgtctctccccttcctcctatatgacttttttgtttcttatttgaccttcacagtggtatgggacaagaatcaaacatcctaattaaaagacagaaaaacagacccccgcaaaatc

SEQ ID NO: 92321 - DNA, 568 bp, Homo sapiens
tcaggcttttcctctctctattttatgaggttttacaattctcaaatcatccatgacaatttttaagcattgggtatggggtctggattaaataacttgcctttgctatctgattactttttttttttttttttttttgagatggagtcttgctcttgttgcccagtctagagtgcagtggcacaatctcagctcaccacaaccttcacctcctgggttcaagcaattctcctgccttagcctccggagtagctaggattacaggcatgtggcaccacgcccggctaattttgtagttttagtagagatggggtttctccatgttggtcaggctggtctcaaactcccgacgtcaggtgatccacccatctctgcctcccaaagtgctgggattgattacaggcgtgagccaccgcgcccagtctagtctgattacttttttcctaccttaaatatcatgatcttaggatcttagattttgttattgcccaagatttaggatgctttgcattgtgtattcagcttattagctttgtgttaattttgaaaaaaaaaaaagccaaaagaa

SEQ ID NO: 92322 - DNA, 181 bp, Homo sapiens
caaaaaaaaaggcaatgaataattggacaaggaaccaaaacttttattctgaaaagagaaaattccagtctatagcaagggcagttttccttctaaggaacagtactgatatatcatggctaaagaagcaggctcagcttctttgtccctttcactaatttgctatggcttctaacatagg

SEQ ID NO: 92323 - DNA, 433 bp, Homo sapiens
atgcagtgtagattaccactgtactagccaacattttcctgggcccaccattttggggttgtattcacatttttgttttatcttttaccaactttatgccttctgccctttgccttttgttgtaagtctagaattcatagggtggctttcacgctgtacctgattctgttctgctccgtatatactagtccccccttacctgcggccagttgcaatccaacatataaataacatattttggccaatcgcagtggctcacacctgtaatctcaacacttaggtaagctgaggcaggaggatacttgagcgcaggagttcaagaccagcctgggcaacatggcaagtgcctatagtcccaggtactcaggaggctgaaatgggaggatagcttgaacccaggaagttgagatgccatgagccgtgatggtgtcac

SEQ ID NO: 92324 - DNA, 218 bp, Homo sapiens
acaatggttgtgccaaaaagggccacagccacgtgcagcctgtttgctgcacgaaccgtgcctgatgcgtgcccaaggacaaggccattaagaaattcgtcatttgaaacacagtgaaggtcgcagcagtcagggacatttccgaagcgagtgtctttgatgtctatgtgcttcccaagctgttatgtgaagctatattactgtgtgagttgtgcaac

SEQ ID NO: 92325 - DNA, 359 bp, Homo sapiens
aggggaggagcagttaagtatctggtgagactacagacaagggggaggcaacaaggaagttggacacagaagcagccgaggttcacccctaagcccctgacactaacagatgccacatgtatgcggcggttcagatctgccatttagggcaacaggcctagatcaaagcgttgaggaaaaacaccagtaggcaggtaggacttggtgtctaaagtgagggcaacacacatcaggagatgctgtaggcaagagtagacactgaggaagttggacagaaaagcagctcaaacacatccctgcccttggccttgcacgggcctactcgccaaggggttcagacaggtgcccagaggcttttc

SEQ ID NO: 92326 - DNA, 151 bp, Homo sapiens
aaaataaacaataagagaggaaaaaaggaaatagaaaacaagaagaaaacaatcaataaaatgacaggagaaggcctcacttatcaataatcaccttgaatgtaaacggattaaattccccatttaatcaaaaaggagacttttcaacaga

SEQ ID NO: 92327 - DNA, 440 bp, Homo sapiens
ctggggtgtgagcgggctctgatgaaatgcaccatgttcactggaggacaggatctgccttggggctccttaagtcctagcacatggaagaggaaggcatggattggaaggaaggccaccaaggctcctgcctgctgaccacatccagtggctccagagcgccaatgtggagtgccagccctccgtggagaaggggagggtgaaggaaagccttggcatcgcctctccaggccgtgagagcagggctcgggaggtgccgtcgtaaagcactggagtgactccccagaggaagagggattttgggggcccacttgtggctctgcctaatttctgttggagagacggagctggggcatcattcatggaggacagccagagccacgggcactcagggcggggctgagcactcgctccaggtgggaggcaacattggcatgggg

SEQ ID NO: 92328 - DNA, 168 bp, Homo sapiens
attacagagatgggggagttgactgattgatagcttcagttgaactgggattgagagaggtgtggttgtgagttattattgaggtcttggcctcttgtcactgttcataatccaggcctgtttttgtaaacaataggccactggcctccatgtcctgtccagatgcat

SEQ ID NO: 92329 - DNA, 676 bp, Homo sapiens
cactctgtcatctggagtgcagtggtgcaatcttggctagctgcaacctccacctcccgggttcaagcgattctcgtgcctcaggctcccaagtagctgggactacaggtgtgtgccaccacgcgcagctaatttttgtatttttagtagagacggggttttgccacgttggccaggctggtctggaactcccggcctcaagtgatctgcccgccttggcctcccaaagtactaggataacaggcatgagccacagtgcctggccatcagcagggtatttttaatagggaaaagactaccttctaagtaaattctaacacatatacaactctctccagtccatctctgttatacaagagcaaaaataaagaaataattctagcaacctggtttcaaacattgtattaactgctcctgccagaaaacaatatggcagcctgtatcccaaatatgaaacatccttatacttattaaaacacattaattttcatctggaaatctattctaagaaaacaaatacagaaaaagtttcatgcacaaatatgtccatagcagcataatctgtgataatgattcacatgaaacagcctaaatgtccaatgacatggttgtcactaaattatttaatactgtaataataaaaaaatgatgatgataatggcagctgacatatatt

SEQ ID NO: 92330 - DNA, 1282 bp, Homo sapiens
aggggtcccaggccaccgagccaagccaccctggtcaccttctggctcccgcctctgtgctgcacctgagtgtgatgccctgggacccccattaagtcaggctgagtcttgcacccacaccctgcgactccattttctgctacaaaggatctctctgatgttgacgagcagcatggagacttgggggacccccccaagcgcctcctccatgtcatccttgggctccagcttggcgctcacacacacaggaaaggacttcagcttctcctgggagggctggctggctgaggggtggtggatttcggagttggaccagcagctggcctagaggctactggggaggagggagcagggagcacccactgctgatccagattcactccttccctcgcctctgtcatgaccccaaagaagcagatcctgaacctgggctcttgtcttcacctttgttctcttccactctggggtaattaagaatgatttgctggccaggcgcggtggctcatgcctgtaatcccagcactttgggaggctgaggcaggtggatcacaaggtcaggagatcaacaccatcctggctaacacggtgaaaccctgtctctactaaaaatacaaaaaaattagccggtcgtggtggcgcgcatctgtagtctcagctactcgggaggctgaggcaggaggatggcgtgaacctgggaggcggagtttgcagtgagtggagattgcgccactgcactccagcctgggcgacagagtgagactccgtctcaaaaaagaaaaaaagaatgatttgctaattatgcaggcagctgatccagtgctgtgtaaccttgggggccaccagatgccaatcagtagaatgggagagaaggaaggatggaggaagtgaggacaaggggcaaggaggaaggtctgtccacctgtctcttttgtgcaggaggtgtccaagcaggaggagcacgtcacatccccactgaaaaagcccacagaaaatgaaaagcccacatgcttgtccattgctgcaggatgggggcaagtggagagggagaggtgtcaatgctcccaccttactcccagtcatggctgactcctccctttccttcgttcttgttcctaatctgtcaccatgtcctgtcgttttctttgtctcacccaaccctctgtgcctgcaaatcccctgactgcagcctcatccctgtcacctcctgactgtagttggtgacagaagaggaggctgcaccagtgaaggagcagggactccaggtctggcaacaaccagggat

SEQ ID NO: 92331 - DNA, 364 bp, Homo sapiens
cagcacaaggaatacttgcagagtggacttccctatggtaaaacagcatggacagctcccaacactgcaatcaaggacgcctctaaaagctttaatttaaaaataataataataataataagtctgcatgaagatgatggagccctctaaggcacatgggcttagagaattattcccatctgcaaccccctccccctacttagtagccctttccagggttatgattactggaaaatggctgttaatcaccagaattttttttgactgcagctgcttcagtcagactactaatctattaaacaacttcatcttcagtttaaaatttgcattgtaactgtatagaataaattttcattgtaatcag

SEQ ID NO: 92332 - DNA, 306 bp, Homo sapiens
aaggagatgatgaaggttaagtgaggtcataagggtgggccctgatccaacaggattcgtgtccttataagagaccagagagcttgggtgctacctccccatgggaggacatggtgagaaggtggctgtgtgcaaaccaggaagagaggcctctggggcttttagcctccagaactgtgagaaaataaaaccctgctgtttaagccactcagtcagtggtattttttagggtgcctggggctaatacagaaggattcaccctcctggggagaaggggccagtggcctcctctgattttcccggctg

SEQ ID NO: 92333 - DNA, 456 bp, Homo sapiens
agagcttgcagtgagccaagatcccgccactgcactccagcctgggcgacagagcgagactcggtctcaaaaaataataattaacaaaaaaaaatacaaaagttagatgcgcatgttgccatatgctcgtggtcccagctactcggcaagctgaggttgggagatcacttgagcccagaaggtggaggttgcagtgagctgagaacccaccattgtactccagcctgcgtgtcagtgagattctgtctcaaaaaaaagaaaagaaaaaaaatctaggctatgctccctagtatgggaaatctagtctagtcatttggcagaatcaggctttgcgggccatattgtctctgtcgtaactaccaactctgctggttaaaagggaagtagccacaaacaatgtctgaatgatggattatggctgtgttccaataaaactttatttgcaaaaacaggttg

SEQ ID NO: 92334 - DNA, 476 bp, Homo sapiens
gcttgctaagtcgcaggaaatgggaggtcgcagcacgccgctacctgcaagcccgaaagctgaatgcagctctagtgtggcgcgtagtcttactgggtactattttacttaatcgctgacgttgagtgagaggtgaccaagctcagatgctgagattaaggcggccgggcgaaactcgcgacaccctgcgattccctcttagccagctgcgtaaagttgcctacgccaagcgggtagcgtcctgctcggccacctggcggcgggcgtggagttggcaggcaggcagtgggggtcacgccggcatgaaaggccagatcacctgcaggtcgccaagttgccgggaatcccccgctccgagcagtgtcatgcccatcacaaataaccctatcgcagccgggaggtaagccctggcttccgagtaaaggccctgttcagagcagcctgggggtctagaagggaaacgggtggcgggttag

SEQ ID NO: 92335 - DNA, 487 bp, Homo sapiens
gaggaaggaatgggggcgagaaaggccaaagcattctgggggtagagaacaaagagtaaaaaggaccagcgaggcttctatctgtagatgggggaagaggaacatatgtgtcgtctagaacatggcatctcaggcagcctgctgatccaagtctgccctccccagcttcccataactgggccttctcctgcctgtcactttcactggctccccactgtccagtcaaataggagccatctcctcacaccagttctcaggaccccaccagccaggcctcccctaccaatctggccttaattctcacaattccctgcccactctccaagcctttgttcctattgcttctctcacttagaaatgctcctagaatgcacttccacatcccgccatgcagagactcccacgagtctttctcctctctcaacaactccaggaatctcccaattctccagccagaacgctgcacttgtctcaacacaccagtttc

SEQ ID NO: 92336 - DNA, 318 bp, Homo sapiens
ctgctcaggcatagatgaattgagtctacttcatttatcaagtgcattttttaaaatgtgtgaatgaatccactcagaccaacaagtttaagaagtaaattggtgttttctgtccctttctgatagccctgcaatataaatggggttgcaggtgcatttttggggaccacattttctgcttatgcttttctatttaaacactgctacacaatttaatgattttaagcatttagaagtctgctacatcagaaggttggtggttgggaggagttactattttatgagttcattctaatagaggttattattgtctgtata

SEQ ID NO: 92337 - DNA, 507 bp, Homo sapiens
tagttgtcccaacagaaaagatatatcataaaggaaaaggaaaaaaagttgaaatagacagtgactagatctgtgagatgaaggatttggttcatatgcacatgttcagagaactaagcatggtctagctgcagcaggggcatttaaacaagaataagaagtttgcaagtgagtctgatctgttttttttgtttttgtttttgtttttgtttttccatcagctagtcactatagcatctgctgtaagctctggttagaagttgatgagatttgtgatgtttaaagatgaagatctataaattatatctgtaggttatttgaactgtattacattactatggcagaaactagtagcagttcccctagatccatctttattgttaccaataaaatttttatctgagcatttcactgctcagaatagaggttaccttccctagtttgccttgcagctgtctgtgtccatataactaagttctggccaatgggttgtaaatagaaatatcc

SEQ ID NO: 92338 - DNA, 381 bp, Homo sapiens
catcctgctgagggcctctgtacagtattctttcctagaaaacaccctccccaccatcctcgctccccactgcagatcttacttgactaaagcccattattcttacaggcctcagttcagaggcctgagacctagagcaatgtttttcaaactgtgggtcatgacccattagtagcttgtgtaattaatttagtaggttacattgagcattaccgtcccccacaccctccagaaaaacaaagacaaaaagattaaaggaaatagaaaagaggctatctgagcacattagacaccatgaagttaagtgctgtttgttatgtggatgcgggatcatgatataaaaagccaaattcttactggtgattgcgattaaaaaaaaaa

SEQ ID NO: 92339 - DNA, 862 bp, Homo sapiens
tcacttgtgtagtttgaaaagggccacatacccacaactgagtttaacttatccctttctctgcgtccatctaaaaagtgtaagtgggcagctgtgaaggtatgtgcctctctccaggagccaagaggtctatccaggcaggagccattaacacctggtggagtagctgtggtcattgttggatataaaatgatacaaagcaggccaggcgcaaggtgggaggatcacttgaatccaggagtttgagaccagcctgggcaacatagcaagatcttatctctaccaaaaataaaaataaaataaaatggtataaagtaatcagcaatgtgtgtacagccaccgtttcaggcatgttgggggagggtgcagtggcaagctctgaatggacactccagtgtttgacagctaggcctgcgcagggttggtgaggtgctgtatgctcttgggccctggaagcagggtaaggcggtgtcgggtgggaaccgccccgtcagccactctggtatgttgctcggctgtgtctctacaacctgttcactagtttggaattgtgaaaaaaatgggtacctgagaattgaagccactgtccaaagaccaccctattggctttttgggacccaaattgatctcagatggtccttctagtgctaagaaatgtgctaaaaatgaaagtctggattggcactatactaaaagtaatataaaaccaaactgaaggtatacagttaaaactgagttctgggcagagtgcagtggctcacacctgtaatcccagcaccttgggaggccgaggagggtaggatgcttgaggttggtagtttgagaacagcctgggcaacacagtgagactctcatctctaca

SEQ ID NO: 92340 - DNA, 330 bp, Homo sapiens
attcagctctacggcagccagccgtcggcacaaggcctgagaggtgagctgcctgttccctcctcccccatttccagcctctctctaggaagccaggtgggctaagtagctacagaggctcaggtcctgagtcaagcacaactgagttggaatcccagctcttgaaatacattgtttgagtggcctttgccaagttactctcagagcctcagtttccctctctgtacaacagggaaaacagtgcttgcctcacaaggttactgtatctgatgaaaacagagcccaagtcctttgcccagtgtctcgcgcatccagggagagtgctcaatc

SEQ ID NO: 92341 - DNA, 606 bp, Homo sapiens
ctatctcattctcagggaaggactctggctctgcttgagtgatagagtgacatgttcaccccttggcctccaaaactgttgccaggagaattagggtgctatattgagcaagtgtactgtaatgggcagccataaggaatggaagaggtatcttgtccaaaggaattaggggtgcgagggaggcaagaataacacaacactctcagccgggcccccaccaaccagagacaaccagtgttcacatttttagtacaattcttccagattttttggatgcgtatacatatacatccttctgcagcccccagtcccgatgagcacatttcaaagtactaatcaaaaagtgagtgaagggccaggcgtggggaggccaaggtgggcagatcatctgaggtcaggagtttaagaccagcctggccaacgtggtgaaaccctgtctctactaaaaatacaaaaattagctgggtgtggtggcatgcacctgtatccccagccacttgggacgctgaggcaggagaattgcttgaacccaggagatggaagttgcagtgagctgagattgcaccattgtactccagcctgggtgacacggcaagactacatctc

SEQ ID NO: 92342 - DNA, 352 bp, Homo sapiens
gaagacaaaccagacagacatctgggaaaagagggttccaggcaggagaagccccaagtcagggctgtgcttggacttggaattgaaataagtcctggaaaattggttaatccccgcttggcatacatattatgtaaagtgtgttgggagaggtacttgaaggttttcctgttgaaataaattccctacaaccttagccttccagtccctctgcctgacactcccatggcagttggtgcacttgcgttttgccctgttgaagatgcctgtgccattagctcgcatttgttgggtatctttcttgcaccaggcaccatgctgggaactatgctattactgcgtggtcctcaca

SEQ ID NO: 92343 - DNA, 224 bp, Homo sapiens
acagtggccatatcttagcttactaccacctcaaactcctgggctccagaaatcctccagcctcagcctcctgagtaactgggactacatgcacacgtcaccacgcccagctaattttattttttagttttatttttgtatagaaacggtcttgtcatcttggccaagcaggtctcaaactcctgggctcagcaatcctcctgtcttggctcccaaagttcagg

SEQ ID NO: 92344 - DNA, 244 bp, Homo sapiens
cggaatctgggctccggctactagtgagtagacaccaggtgctgctaaacatcctactgcttattcgactgcccccaacaatacaaaattaactggtcccaaatgtcagtagtatagaagttgagatacactggcttaactagaattcttccttccacttcttaaaatttgctgccacggtagtcttgccagtgactgctttaataatttatcacagtatgcaaaatcgagtccgtactcccca

SEQ ID NO: 92345 - DNA, 384 bp, Homo sapiens
ccacaaaaacaggagataaataaatttatctttaggctagataattagaattcataaaggtatgccagagcacagaaaatatgtttaatgataactctgccttcctttcccatgatgtagtagagtctaagtgattggttttacttagggatatctgtatttgtttcttcactgatgtttctctatgtgtatgtatgcatgtgtcaggggaggggaatgggaagcaagtagaatgagataggcttcagagaaacgaaggcttaagaggtatacatatttcttaaagtcatccaaatgccgaagataaataaggccatggtaaattaagagtcgggttagtatctaaatatatgtacctaggaagacctgattaggatgaccctt

SEQ ID NO: 92346 - DNA, 496 bp, Homo sapiens
tcaggttcaactaacttattttcagagcttcttctgcaggcacacgcacacccgaatagctaaacaaaactggaagatggaaagaataaccatattaaataaagaagcgaacaaatagttctaacatggcaataatcaagagcaagtgaacgtagagtagttataatggtttactagaggtattcttttatgagaagtctatgtaacacattttgtatggtacattgtcctttggaatgaatcatctttcctgatagaaaattgggaaaatacaaggagaaataattgagctcagaagttagtactacatgtgtgcagttacatatctgaattggacttttgtctggaaagtaacaagcaaaataatagtaataaccaatacaccaaattaaaaagaagaagagaataatataatgtaaaaagaattttgcaatgtcgcctccatccacagacaactgtgaaacatcagctcaataaacgcatttcctttttaaaa

SEQ ID NO: 92347 - DNA, 271 bp, Homo sapiens
aaggatcacagagtggaacctcttcagaaccaaataacttcagaaggaatttaacatttttccacttaaaaaaattgttaacaggcattattattataaattagaatgcagttcatagagtgcatttctattgtagaagttgaatatgggtttcctgaggagcaagttacttgaatatattagacccttcttggtgatgttatttgctgtaacttctcctagattattttacaaattattctacattggatgtaatgttttaaaagtctta

SEQ ID NO: 92348 - DNA, 306 bp, Homo sapiens
atacaaaattaaaaagcaaatatgaaaaataatttcctgcatgcaaacaggcttttacaaaacaataaaagaaatactgggaaatgctcaaaaaatattaaaaagcaattaataaaaagaagtcagagctgggcacagtaactaacgcctgtaatcccagcactgagaggtggaggttggaggatcgcttaaccccaggagttcgagactagcctgggcaacatagtgatacctcatctctaaaaaagtaaataaactaattcacattttcaatttccatatcactattccaacatcaactacaat

SEQ ID NO: 92349 - DNA, 1576 bp, Homo sapiens
gtcttactcaagggctgtggaaaaggatagacatttatgtcatttaagctgtctctccccaccagacaggacttttgaacctctctaaccaacttttaaagaccattcacctcccataccctcccatcttattagaagggctcttgtcctttaacaggttttggcctataggtcaagggttacgtttagggttacatttaactgctagagtaacccatagcaaggctgaatataattggtctccttttaagtttccttgtatgtgagttagtagccttggtcactttctagcatcacaattctgattgtccatgaggtcttagagccttaaagaagtgatgattttaagcaaaagtcatggtgggtaagcagcggatattgctgcaagctgttactcttttcctccaggtttgcccaggaatcacagtgggacctgtttaagcactatttctccaacgcttgcagttggtgaaaagaaccaatgcctcgctatttggtgcacatggctttgtccgattcctagaatgccatgtgttaatgttacagaaaatgccagagggtatcttcatgcatattcctctagagcttcacagccaaacccttgaggtacctgtttctcagctgtcctttgactaacacctgattcacttagttctaccctatggtgctctttctaccacctgcatctcttccttttttcccttttactggctctgtttccctttactctttgaatcctttgtttctccacctagaaagtttctacctaccttatgtatccttcccgatattattgcatctagttctggactgggtttcttaactttccacctttgccagctgctacccagtatcattaaaatattaacatttagccttgctcaatggacctgtagtctatggttcagtctataatttgatacagctccctccagcccttctgagtctaaaacacattccaattcctctgttttccaggcttattttgccatcagtaactccttcctgttcccccagccatgagtgaatatgctgaatgaggacctttgtaagttctgatgaagtagcatgttaggagaatgaagcactaatcccagagctaatggaccttcctttcctttcagtactgtaaggagttcttctctcaatgtgtgacctgccctgtctatcaccagtgggtatctgagcttaaggcctctgtaatgagatgtgaaaagagagaattgatgtccctgactaacagcatcagaccttttgacacctgcttgaccaggatttggataaaaggagaatttctgcaggaaaataactcttagaaaagaaacttaggaatacagagatttgacagagtggctgatgtcaaggagaacaaggatgcagaagaaactcaagatgtatgtattaaaacaaaagaacaataacctgaagggaccatgattctgttattgtatataacacaaggaaatgccccagattctcctttaaaagatataatgtacatattaagtatactagcctttatagttactgctatctacatgtttatcaaaataaaagactatttttttctaaaaca

SEQ ID NO: 92350 - DNA, 1712 bp, Homo sapiens
gtcttactcaagggctgtggaaaaggatagacatttatgtcatttaagctgtctctccccaccagacaggacttttgaacctctctaaccaacttttaaagaccattcacctcccataccctcccatcttattagaagggctcttgtcctttaacaggttttggcctataggtcaagggttacgtttagggttacatttaactgctagagtaacccatagcaaggctgaatataattggtctccttttaagtttccttgtatgtgagttagtagccttggtcactttctagcatcacaattctgattgtccatgaggtcttagagccttaaagaagtgatgattttaagcaaaagtcatggtgggtaagcagcggatattgctgcaagctgttactcttttcctccaggtttgcccaggaatcacagtgggacctgtttaagcactatttctccaacgcttgcagttggtgaaaagaaccaatgcctcgctatttggtgcacatggctttgtccgattcctagaatgccatgtgttaatgttacagaaaatgccagagggtatcttcatgcatattcctctagagcttcacagccaaacccttgaggtacctgtttctcagctgtcctttgactaacacctgattcacttagttctaccctatggtgctctttctaccacctgcatctcttccttttttcccttttactggctctgtttccctttactctttgaatcctttgtttctccacctagaaagtttctacctaccttatgtatccttcccgatattattgcatctagttctggactgggtttcttaactttccacctttgccagctgctacccagtatcattaaaatattaacatttagccttgctcaatggacctgtagtctatggttcagtctataatttgatacagctccctccagcccttctgagtctaaaacacattccaattcctctgttttccaggcttattttgccatcagtaactccttcctgttcccccagccatgagtgaatatgctgaatgaggacctttgtaagttctgatgaagtagcatgttaggagaatgaagcactaatcccagagctaatggaccttcctttcctttcagtactgtaaggagttcttctctcaatgtgtgacctgccctgtctatcaccagtgggtatctgagcttaaggcctctgtaatgagatgtgaaaagagagaattgatgtccctgactaacagcatcagaccttttgacacctgcttgaccaggatttggataaaaggagaatttctgcaggaaaataactcttagaaaagaaacttaggaatacagagtaagcatttcttcctggaagccttgtgtgagagacataaagacagtctcagattcttactcacaagcagtcaaaggctgcacctctgaaataaaaagggacacacagatgtaaggagttagtccttgctccagaggatttgacagagtggctgatgtcaaggagaacaaggatgcagaagaaactcaagatgtatgtattaaaacaaaagaacaataacctgaagggaccatgattctgttattgtatataacacaaggaaatgccccagattctcctttaaaagatataatgtacatattaagtatactagcctttatagttactgctatctacatgtttatcaaaataaaagactatttttttctaaaaca

SEQ ID NO: 92351 - DNA, 111 bp, Homo sapiens
aaatcttctttcccatggctgctatttaactttgtaattgctgaggacattctttgtatttgtgacattctttgtgttccttctttcaggatttgacagagtggctgatgt

SEQ ID NO: 92352 - DNA, 216 bp, Homo sapiens
catgatgccctgcctacgtactggtattcttgattcattgttttctaaggacttgtcccattcaaacacatctgtgtacattagaattctgataatgtctgttgaggctcagagcttaagtttcaaagccatgtgcagtcagaagcaaggcaagaaaacttgggaagcacatttcataaagcctccaaatagagaaaaatcatagattaggaataa

SEQ ID NO: 92353 - DNA, 651 bp, Homo sapiens
ggcgacatctacatgatgtgcagacaggtgttcattgtgttctccattcagcttctcctggaatttgcaattctttagcataggtagcatggggcaggtgggaggagatcatacctgtgcacaccaggtgaatcccagttgggaaacggcaggtgagtcctggggacatatgtgtctctgctagagcatccttctctttgctccagtgctatggggtgcagacgggggacatccattcatgcttttccttcttcacacattcccctggtacctttttgctggcagggaacacagtccagtgtctgggctgcagatccctcatggtcagaagaggggtttggtgagaagtgggagactggttgctagtcctgtgagtgcatgccagaggccatctccttggttcatccctgtttccccagttctgggcacaacttgcctgtgtttgccaggaatgcatagcttatctgagcttcctcatggggtgagtgggtgaggagagatggtgttatcatcaactgtcaaagctggaggcttccagaaatgacactgctgtccagggtggatggcagatgccatctggactgtctcatctcagtgtgcaggcctctagggacatcctgccctgggcgtggggcttctctgccatgaggg

SEQ ID NO: 92354 - DNA, 447 bp, Homo sapiens
ttagttcccgggcctgctcaggccccccgccccggagccccagggcatgcagggctgtctctcgcgagataacattggcgtcggccgtgcatttgggaggggtcgttccccaacagcaggctttccaagatgcagcgctgggggttgcgaggtagggttggcgcccctgctcgatgttccacctctctgattgagcttctttctcccatcccgctgggaattcctccacgagttgggaccggattcttcgagcctcgtgcgaatggctgaggcgcgggtgtcagaggttttgcccctgcagtccctgcctgagtagtgttcgcgcgatgcccgtgggtggctgttggggtcacagtccctctccccgcctcaggggtgctgggatgaaagactagctagtcactacccttgtgtctttactcctcttctctgtccgggtcaaccagc

SEQ ID NO: 92355 - DNA, 344 bp, Homo sapiens
gccgttccaaatgtgggctgcttccggtgctcctttccttcctcctgccagcctctcactgtctacattctctggcgggaggcaggcaccagcctctatgttcatataaacccctaaattctagcttatccatgtcatgctctccagagagcaattccaccgtatccttctttagggacttaagaattgctgcaactgcttagcaagcccccagctgagcgtgagatactgttatgggttgaactgtgtttccccaaaattcatatgttgaattcctaacccttagtacctcagcaggtgactgtatttggagatagggtctgttaaaagaaaaaagtgattaa

SEQ ID NO: 92356 - DNA, 398 bp, Homo sapiens
aacaatgtgagatggagattctgtgtccgtgttctcattttctgggagagctgagtgacaagagaagagttagggacagagaagaccaatgacttctcttacaccgacagccccagttgggaaacactgtaataactgccagttttactttcctggacaaagccacttgagaattctgcagcccaagaattattttactcactgactccaccaaaacccgggtagaacacaaacagtgaccccagtgcaaaacctgtgtgtacgttatatacctgcatgcatgcatccacttctacatcccagcctctgtgttgcaactccctgggtctctggtcattccagagtaactcttgaagttctcaaagcccttacctctaaatttaattctaatgtagttt

SEQ ID NO: 92357 - DNA, 513 bp, Homo sapiens
ctttgaagattatgctacacacccacccacccacacacacatacacacagacacacacacacacagagcttctaatctactaacaggaacagctaacaatattttttgtaaatttttgcttccaacaagggttgctatataaaatgcaagatgcacatttaatttggatttcagaaaagcaccaaataatatgttttggtgtaagtatgtcacatgtaatatttgggacaagcctacatgcaaaaaattaactatttatctgaaattcaaattaaactaaatgtcttgtttcttgtattttttcttaatctgaaaaccctacttccaacgtctgttaatgaatgcatttagaagaggaagtatttcaatgaataagtagttctcaagatcctatcatgtagtttctaagaacaaagagatctctttaggtacttacattccactcaggatataagactaacatgtgaagaatgcaatatagtttaattgttaaactgtgtttactatctataa

SEQ ID NO: 92358 - DNA, 333 bp, Homo sapiens
ccaggaccaccagagaaagagacaacacccacattcacctaggaccatcagagacagaccccgcattcatcagaggccaccagaaacagacctccacatgcacccagggccaccagagacagaccccacatgcacccaggatcaccaagctgctgtctggaatgacactctgcaagtgttctaatttccccacaacttcagttagaagtatttttgactttcatactttttgtccgaatgatggttgtaatgcaatagatagttcgttttatttttaattttcatttctctgacagctggtgagtttgatcatttcaacatatttgctagccg

SEQ ID NO: 92359 - DNA, 421 bp, Homo sapiens
aagtatttgtatcagtttacttgctaaatgatagcagttataatagcaatttctggcttaaaaaaaaaacagggttaggatggaagggcaatagcatttttatactgaatcctaaaacatcagttataggcaagttttaaaacttaatcatacgttgcaaacacttgaagatgaaatggaaggcttataaggttaagtgttaggttttatgtgtcattctagtattggctgaaaagtgagtgctatagggatggtggaatgatgcagatatttgcatcattttctatgctgttatgcttctaaaaagaagaggctatgttttcctaaataggttagtagagtgcttctcaaggcttcccaaatgaaaagtcagacaaaaatatgtatttgttcttcagtgaagattgttgggttttcaaac

SEQ ID NO: 92360 - DNA, 794 bp, Homo sapiens
gagattcagatcttttcattaaggccaagtttaaaaaatctgtttaaacatgccaagaaagtaaaaattggcaaaattataggttttcctgtttttatattacagattacctgttggaattttaagtcttggatttgttttccctaaatagaaagtgcattactggggccagttattgtccactaaatgaatgaaaattaatttaaacattgtaaccttatggaaaatataattggaagggttaaattgttgttctttatgtccttgtacatcctctctcctgcactcatctctcagggctggtaggagtgggatagatgtgtgtttccaaaccgaatagaaatatatcttgatccatccatgattctgttctgtatattattgtgtggacattcatgagtctctaattcagtttgtcaaatatttacttaaatgtatatacagaacattgtagcaggaaatttaagaggtgcaaagaatgagactcatgtcttgttcttatggagctgtgctccagtaaaagaataacatgtatgttgtgtatgtgtgtctatgaatagctctaaaaatctgtgatagaaattatgaaaggcaaatagaagctgtttgaggttttaatgtcactcaggtggacattgttttcattctaacaacctgcagtttttgtttaccatgtcctggatgtggttctgtacagtgggtaatacaggtaagggtaagatatgcagctcctatatccaaggaaattctagtctaattggtcatattttagtgagaacagagttttaagagaa

SEQ ID NO: 92361 - DNA, 410 bp, Homo sapiens
ctttggttttctcttgccatgagttttgatgttttgttttgataattttcttttaatgtatctgtaatcttcatatataatgttaggtgaatacattgggtttctcttttaaatgcattgtttacccccaaaccattaaataaatattcatgtgctactcttttgaatggctttatcataacttatgtactgatatacagttgtctcttcctagaatatatttataacatttattaatttttaaattttattgcagtctggtatatctaaaatattactcttgccttattcttatcattaatggaaatccttgtagtatttcattatttgaaattatgtcaactttcgggttgctgtatcatgttagcgaagtatccttgtgttcctcctttgctagtcagattattatt

SEQ ID NO: 92362 - DNA, 366 bp, Homo sapiens
agctctattgcaaatatggtcaatgtgcctaaaaccagaagagctttctgtaagaagtgtggcaagcatcagccttacaaagtgccccagtataagggcaaggattcctcctatgcccaggggaagatgcgctgtgatcagaagcagagtggctacggtgggcagacaaaactgattttctggaagaaggctgaaactacccagatgattgtgctaaggctggaatgtagggagcctaactgcagatccaaggggatgctagccattcagaaatgcaaacttttttttttttttaagacagggcctcactctgtttctcaggctggagtgcaatcatggctcactgcagccttgacctccctagct

SEQ ID NO: 92363 - DNA, 312 bp, Homo sapiens
ggggattggaatccaggtctgttcaattgcaaatcccctcttgtgccttttacaggtcagatgattttgtttttataggctctagcaggtcccttctctttgcgtcaccagagaggaagatcccctaagacaaagcattccctgtagtttttagcataactagtactggctcagtaagtatccactggggttcggaatacaactgccctgcctcttgagcagccatgcctgcttccgaggtggtgctgaatgctattcaggaggacagaccatggatgggaatcctgagccagaactccttagcctcatgac

SEQ ID NO: 92364 - DNA, 1078 bp, Homo sapiens
agcggaactgacttgaagatgtgtgattattttcagtaggcagacatctaaccctgaaaaccactcgcttgcagagcgctggatcagcaatgcctactagttcttcattcaaacaccggattaaagagcaggaagactacatccgagattggactgctcatcgagaagagatagccaggatcagccaagatcttgctctcattgctcgggagatcaacgatgtagcaggagagatagattcagtgacttcatcaggcactgcccctagtaccacattggttgatcgtgtttttgatgaaagcctcaacttccaaaagattcctccattagttcattccaaaacaccagaaggaaacaacggtcgatctggtgatccaagacctcaagcagcagagcctcccgatcacttaacaattacaaggcggagaacctggagcagggatgaagtcatgggagataatctgctgctgtcatccgtctttcagttctctaagaagataagacaatctatagataagacagctggaaagatcagaatattatttaaagacaaagatcggaattgggatgacatagaaagcaaattaagagccgaaagtgaagtccctattgtgaaaacctcgagcatggagatttcttctatcttacaggaactgaaaagagtagaaaagcagctacaagcaatcaatgctatgattgatcctgatggaactttggaggctctgaacaacatgggatttcccagtgctatgttgccatctccaccgaaacagaagtccagccctgtgaataaccaccacagcccgggtcagacaccaacacttggccaaccagaagctagggctcttcatcctgctgctgtttcagccgcagctgaatttgagaatgctgaatctgaggctgatttcagtatacatttcaatagagtcaaccctgatggggaagaggaagatgttacagtacataaatgactttctcttgattgttgaaaaatcattacctgtggaatgactaggaatattggaagcagcatagtgttgacgtacgcaaaacaagacagcttggtcagctacaaaat

SEQ ID NO: 92365 - DNA, 1347 bp, Homo sapiens
gattgatttattggctcagcctcgtagaacacgacttggctcactgtcagctcgtagtgactctgaagcaacaatttctagaagtagtgcctcttcgaggaccgcagaagccatcattagaagtggagccagactagtaccatcagataaattttctcctagaattagagctaacagtatctctcgactctcagactccaaggttaaaagtatgacctcagctcatggctctgcttcagccctgaaaaccactcgcttgcagagcgctggatcagcaatgcctactagttcttcattcaaacaccggattaaagagcaggaagactacatccgagattggactgctcatcgagaagagatagccaggatcagccaagatcttgctctcattgctcgggagatcaacgatgtagcaggagagatagattcagtgacttcatcaggcactgcccctagtaccacagtaagcactgctgccaccacccctggctctgccatagacactagagaagaggtaggagatcttcatggagaaatgcataagttggttgatcgtgtttttgatgaaagcctcaacttccaaaagattcctccattagttcattccaaaacaccagaaggaaacaacggtcgatctggtgatccaagacctcaagcagcagagcctcccgatcacttaacaattacaaggcggagaacctggagcagggatgaagtcatgggagataatctgctgctgtcatccgtctttcagttctctaagaagataagacaatctatagataagacagctggaaagatcagaatattatttaaagacaaagatcggaattgggatgacatagaaagcaaattaagagccgaaagtgaagtccctattgtgaaaacctcgagcatggagatttcttctatcttacaggaactgaaaagagtagaaaagcagctacaagcaatcaatgctatgattgatcctgatggaactttggaggctctgaacaacatgggatttcccagtgctatgttgccatctccaccgaaacagaagtccagccctgtgaataaccaccacagcccgggtcagacaccaacacttggccaaccagaagctagggctcttcatcctgctgctgtttcagccgcagctgaatttgagaatgctgaatctgaggctgatttcagtatacatttcaatagagtcaaccctgatggggaagaggaagatgttacagtacataaatgactttctcttgattgttgaaaaatcattacctgtggaatgactaggaatattggaagcagcatagtgttgacgtacgcaaaacaagacagcttggtcagctacaaaat

SEQ ID NO: 92366 - DNA, 1317 bp, Homo sapiens
gattgatttattggctcagcctcgtagaacacgacttggctcactgtcagctcgtagtgactctgaagcaacaatttctagaagtagtgcctcttcgaggaccgcagaagccatcattagaagtggagccagactagtaccatcagataaattttctcctagaattagagctaacagtatctctcgactctcagactccaaggttaaaagtatgacctcagctcatggctctgcttcagccctgaaaaccactcgcttgcagagcgctggatcagcaatgcctactagttcttcattcaaacaccggattaaagagcaggaagactacatccgagattggactgctcatcgagaagagatagccaggatcagccaagatcttgctctcattgctcgggagatcaacgatgtagcaggagagatagattcagtgacttcatcaggcactgcccctagtaccacagtaagcactgctgccaccacccctggctctgccatagacactagagaagagttggttgatcgtgtttttgatgaaagcctcaacttccaaaagattcctccattagttcattccaaaacaccagaaggaaacaacggtcgatctggtgatccaagacctcaagcagcagagcctcccgatcacttaacaattacaaggcggagaacctggagcagggatgaagtcatgggagataatctgctgctgtcatccgtctttcagttctctaagaagataagacaatctatagataagacagctggaaagatcagaatattatttaaagacaaagatcggaattgggatgacatagaaagcaaattaagagccgaaagtgaagtccctattgtgaaaacctcgagcatggagatttcttctatcttacaggaactgaaaagagtagaaaagcagctacaagcaatcaatgctatgattgatcctgatggaactttggaggctctgaacaacatgggatttcccagtgctatgttgccatctccaccgaaacagaagtccagccctgtgaataaccaccacagcccgggtcagacaccaacacttggccaaccagaagctagggctcttcatcctgctgctgtttcagccgcagctgaatttgagaatgctgaatctgaggctgatttcagtatacatttcaatagagtcaaccctgatggggaagaggaagatgttacagtacataaatgactttctcttgattgttgaaaaatcattacctgtggaatgactaggaatattggaagcagcatagtgttgacgtacgcaaaacaagacagcttggtcagctacaaaat

SEQ ID NO: 92367 - DNA, 330 bp, Homo sapiens
aaacatctcacattttaattatctgaaaagttgtaagtaacacaagtagaattttaaaaagaattctagagctagcacagtggtgcacacctgtagtcccagctacttgggtggctgaagagggaggatcacctgtaagcccagcacttcgggaggccagggcaggaggattggttgagcctaggagttcaagattagcctgggcagcaaagggagactctgtctctataaaaaatttttaaaatatcaaaatttttaatactacaagcacatgcctgtagtccagggaggaatgcttgagttcaggaggtgaggctacagtgagccgtg

SEQ ID NO: 92368 - DNA, 470 bp, Homo sapiens
ggaggaagggaaggaagctgtgcagtgtgtactgcttgcttatcaggaatcacgtcatttcctgtgtaaaggggctgtgtggtctccaggggcactgggaagccttggatggcatgatttcaccttcttcttgctcatcattgaggagctctcattagttaatgctagccctattcatttcatcatacatctattgtgttcatactgtgttctgagctccgtgtttaatcttcgcaggctcatgaagaggagttaaggatacttttgtcttgaaaatgctaacagtccctcatgtgcttgggaccagggctgctggaaaacccactaagcagcacacgggaaactagaaaagcagaggaacaaagttttggggtttttgggagagggggtgaagaatgacatattttattccaaaagcataaaatatttaatagtggaaactatgaatgatactgtttaatttttaggag

SEQ ID NO: 92369 - DNA, 389 bp, Homo sapiens
agtttattaagataaagctctcccaaggagggagtatgtctaatactgccaaaagatctagtaagatggagaagaaaaatatattcgcaatctcaaaactgggctcaagtgtgctccccagacctctgtcaggaagtagaaccaggacagctgctgggctccacatgcgacgagcccctaaatcataaatcgccatctggtacctgcttcactgtcactcacctcacaatagtgttttctacaaagattcctagacaaaataagtagacatgagagcaaatgtccccagtgtctcatgccccaacctcccctactcctgtgggcagacaagcacccgggggctgtttaccatattggaacattatattgtcacttttgtagtattcctg

SEQ ID NO: 92370 - DNA, 441 bp, Homo sapiens
ggtaaagagagataggaataggcaaatagcactttgcttcttagcaagaaattgcagcaggtaagtttggagtatagaaagaggaaagatggttttaagtgtttaagcaactctccaaagattacaaactttcatgagaataagtgaattttctggttcagagattgcagttgaaatctgttccaccttgtaggcaatttgatccatgccgaacagaaatgtaatagaggaacggaagggcgctaacttaagtcacgacttggattaaattgagaaattcaggtcttgttgttagaaagtatggctcccatctcataaacaattctgaatctgcagcctgcaagccccatcctgggcctgtccttgactgagtttgttcccatcagatactcattgcaaagcttttgggggacgtagcacttgtgttctaagcgggctctg

SEQ ID NO: 92371 - DNA, 291 bp, Homo sapiens
caccatgttggccatgctggtctcgaactcctggcctcaagtgatccgtccaccttggcctcccaaagtgctgggattacaggtgtgagccactgcgctcggccttaaaaattggcttatcttttaattcatcttgactcatgtttactgttttttggtttctgaaaaatagatttaataaataataacattttatcaaagttattagtatagagaaataaattgagtgttgttattattctatgatcatgatgacagcacagaagttaatgtggccagcatatagttttg

SEQ ID NO: 92372 - DNA, 481 bp, Homo sapiens
ggagaagcttaggagaaaaaataatggaacaagtatcaggaaagctggactccattccatacctgcctccaaccagctgtggaaccccaggcaaagttattttgcccctgagcctcagttttctcattgaaaaatcgagaatgactaggtgttcctttcaggctctaaaaagtagagacagagtttcatcacgtggccaggttggtttcaagctcctgacctcaagtgatccgcccatctcagcctcccaaagtgctaggattatagacgtgagcccccgtgcccagctgattttacattttcaattgtctgtttcactagattgtctgctacctaccttgtatcctctaacagatagtgttcagtcccctacccccaactctaaaatctaaaaaactctgaaaacagaagtttatgaaaagttgttacaaactcattcagaagcaaaaacttgaactgaaataaagacaatttaaaaatc

SEQ ID NO: 92373 - DNA, 1441 bp, Homo sapiens
atctaacaaggagaattggtttctcctaacaattctattatcttgtaggtggctgtgtccattcttaaaacttttggctcatcttaccagattttttacaaagatgcagatgttccttaaaagtggctgaaagattaggagttccttaaaagtggctgaaagattagggactttgtgcctgatgtgctggaatatgcccgagttctgttaaatctgatttaaccatattaaatcaaatcttttctgatgtattcttatgccctcattttcatgtaatgttactactatgaagaagtgtaattaagactttgatatgagccttcacagtctaaagagtgcttcagtgacaacagttttattagattatggtgatgggcctggctgtgaaattcccacattcatgaacgactctgctttttactggctaaaaacaggattttaaaatgcaatgacctttgggactctcagataagttgcctcttcaaccctgaggttatttgatgaattgctggggacatacagaaggatggattaatgaatgctgtgctcatcttgtctactggcaccatctgagggactgaagatcagggtgcctctttagactttggcttgagattacaatgttacccccctctttgctctagtaactccatcctctccactccatcactctctattatctctaggatgccgtaaagcacttacagttatttttcctcacagtggaaaatctctttatacaaactatataaactgagacccactgtccttatacaatcagggccaacctctttcccaccaaagactaattctgcccggatgcccaggatagttattttacgtacatacactatccataccctaatcccaagccaggtaaatatatatgtaatatccgaggtggatgtttttattacatggtgcctacatttagaagtataaaatctcttaattggttcccatcctgatttttttataaactcaagcttttcgggtctttactttgattttccatatttttcttttctctttgtacttgctaacagaactctggtttcttttcagataccatgcaaaaaataggctcagataaggcacacgtatgcccatgagtcataattcatctatccctttcatcataattccattctcctttgccagggattggtttagggacgggcatgtgactcattcaccaaatgaacataaaaagaaatctgttgggattgattttccttttgtaaaaaataaaagagacaaactcatgaggaaaatctcatgttcctccatgtttttaaatcttatttcatgaggatgggggcttggagttgtggcaacaataacagagaagccaagagaatcctaaaaaagctgacccagagatgtgacatttgtgagatgttaattaaccaccttggaaactgtcacttctagacttctt

SEQ ID NO: 92374 - DNA, 818 bp, Homo sapiens
aagaagtaattatttatttggaagcctttctaatcagagtttttggatactgtgtcagaaatgaaaactattgatgtagtcttttttacgatgctgtgattttggttattttccaagtttagtagcttgggttcctttcagcatgataaaagcatgttaaatgtcataaacatgaacctaaacagcagggaaaagcactgcagcaatctgcaaggatcttaagcatgcttaaatttgtcatcacctaagagtcattcttcaggcaaaagcaagctggtcagtgctctaacactgagatagggcaatggcagctcctggagggttttattataatatctggagatggacaatagaagacaacaaattaggcctcagccagtgagggaaacaggaagaacttggccctagagggctccagttttcctgggacatgctgagaaaaagagaataacagcaacagtaacaaaacaaaacaaaaacaggccagggactggaagttaccctgcaagtaaacaggtgctgaaaagtcatctactcaactcaggatgacttttggtctaaatatgcttctgtttcaaccctctctattatggtcattgaaagggtattccattttgctcagagaaaaactcaactgctgctttccatttttatggtcttttcctgtttcccaagagaatacattggataatttcataactcagaaaaatagcattgaatctcatcttaactaattaatcactgtgaacaaatttcttaacctattatttgggcctctgatgctcagtttgtaagaaagggagtctttctaggaatta

SEQ ID NO: 92375 - DNA, 467 bp, Homo sapiens
gagcttgtacaggtgtaccctctttataaaacctgcaagagaaagacaggacttcttgagatgatgacaaacctacagttctatttctgaggcatcatggttataggaagtattaagcacctaagtttaaaacagaaaaggaaatgaaaaatgctttttgtaatttactttttactttatgacaagtttagatttatcaaattattgtgaagatggtacagaaatctcataagccctagactcagtttcccctattattaacatcttgtataagtatggtacctttgttataattaatgaactaatactgatatactaaccaactaaagtccatactttattcaaattttctcagtttttccttaagttacttttactgttccaggaccctatcctaaatgtcacattacatttaggatacagtctttttaggcttcacttgcctgggacagtttctcagactttgt

SEQ ID NO: 92376 - DNA, 2583 bp, Homo sapiens
  misc_feature (1010)..(1010): n is a, c, g, or t
  misc_feature (1342)..(1342): n is a, c, g, or t
cttttagtgagagtaactgccaaaatatcaaaagatcctttaattatcaggtatttgaatccaggagttctctgcttaaaaagaataccagttaccagactattgtatgagtatttaaaaaatcaggaaaagcagcaaaaacagatttcaaagttattatattcattttaaaaaagtagattcttgaaattaatattagtggaaagcaatatttcaaactacacccatttcatttatagtatatgacgaattatgtagccacggctggccttagggaaacttggggcgtaggtagttctttctggtgttctgcttggctgtgttgtcaggaggtttctttttctcagtctcctagggttgcccacggctttctgtcagtctggtggcttacaaggcttcacactctctatcctcttccagaaccaagcctttctctttcctccctttcttttaatatataacatctgcatctagaaaaatgtccttgcatttgatagcacaatagattaaatgagatacaaattggaaataaacaggtagtcttggtgggaaactctttttaggtaggagtatcattcccagggccttagatcaagatctagaagctataaagggttatagtggtgttgtagaactttgtctttagttgagctaaaaacggggttctcgtcacacaaccatgacaaattaggctcacagacactttgaagggtgaccaggacagggtttattggatgaaaagggaaagaaggactatcagcaaagcgagaagccggctagccagttttccacctcgcacactgaattccaggttactatgctgcaacaggagaggccaggctcctccccactgcaaaaggcgtgaacttcctgaggctccaccccagtgcgcattcctcccagtgctcaggcctgtgggagcttctgccagggagccctttttacttggctgtctcagtagtagtgacagtgatgttaatagtatgttcgtggttcctcaagcacactancattttccttagatagagccctcgtaatattttctctccttgaaacactaacctattctccttttgccattgtcccgtgtgcctcgcggtattagcattgtggacactgaaacctagtctaaactagcacaagcaaagggattttcttgactcacaaaatgaaagtccaggagcatattaggccttaagcacagatagatccagggctgaaaccatgtctcatgtcagcaggacactcttactatcttaaaatctcaactctgattttctctcttctcatctcattccttttctttttctaacatttattttaagttctggggtacaagtgnaggtttgttacacaggtaaacttttgtaacggaggtctgttgtacagattatttcatagcccaggtattaagcctcgtgcccattaggtgtttttactgatcctctccctccttccatgctccaccctccaaaaggccccagtgcgtgttgttgccctctatgtgtccgtgtgttttcatcatttaactcccacttataagtgaaaacatgttaagtatttcatgttagtttgctcaggataatggcttccaactccatccatgtccctgcaaaggacataatgtcgttcttttttattggcctaattcttaggcagtcttttctggaattgtgacagaaaaggttcaaagcagttattttttttcatattatatccatagttgtgtttttattgcaaagagcacgcctcttactggatacctcctatcactattgatagggaaataaggtcatctcattgactagcgatgaagcctgttaggttaccccctgtttggagtaggcagagggatcagttcacaagaatcttttggagcagattcattttaaaacataaaaaattatgttaatagaaaggtgaacaaaaagcatatttgagaggcaaaactatggctactactgtttgtgacaaaaattatcaaaagttatacttacatatgggtttctgtctgtcttctcacctatagctctgtgaaaaataagtgttgctcactgctgagtactcttacaagtgtgactggctggggctggtgttgccggtggtaaaggaatttaccaagacagttgtagggggagaaaaataaaggcacatttattagagaaagtatgaaaattcattgcaagggtgcaatatgtagcactacagagaaggggctgtctgcaaagaggcaggggctggagggaagttttataaggtcttctggagggggctacatgctgatcgaggttgtgccatttgggctacctgtggagcaaggtcgttgtgtcagcgcgttgtttatggttacttgtctctcagaacaattgttctctcctaccttgggcccctccctggtggttatcaagactccacaaatatccagtgcctcttgcgctttaggatatatattaagaagtcactggctgtgcacggtggctcacgcccgtaatcccagtactttgggaggcagaggctggcggatcgcttgagttcagaagttggggaacagcgtgggcaacatggcggaaatcccgtctctac

SEQ ID NO: 92377 - DNA, 274 bp, Homo sapiens
ggggaatgttactattctgctagcattaggggaccaggaactagcatttacgctttcactgcaggtgcctgggacctaagattcctctttcactgaacctcgcaggaactagttcccctcccttccccagcctggtgatccagctgggcagactaacaataacttagtagcgaccacatgcctggcattttaccttatttaatcctcacccctggatgatgatgctcactattcccatgcagactcagctgccataaaaccattggagagcccc

SEQ ID NO: 92378 - DNA, 1226 bp, Homo sapiens
ctacaggatgtgatgtgagcgatgccagacagctctctctgaccccaggtaatgccctgaatctggtgatcctggctgatctgtgaccaatagagattagctccttgggatttggggtcctaaaaggtccctgaaaaaatgcaccccttgtctttaagccaacattggtgaaggaactgagaactcttagggttacataaaaaaagacccctgttgagatagtttatgcagatacctggaaggaactagagatgccaggaggaagactgagacccagaatgaagcaaggcatgagggctccaaagtgaactgcaccatcccagagtctcagccaagatggccctttcctagagggacgggcaccttccacctgcccacaggcactgctacctatgggaattgcagaaggccgttgtacacacgcgcatgcacgcagtggccctctgccctttagaatatggaagcaaagtctgggtgcagtgactcacacttgtaatcccaacactttgggaggccgagacgggcagatcacctgagttcaggagttcaagaccagcctggccaacgtggcaaaaccccatctctactaaaaatacaaaaattagctgggcgtggtggcagtctcctgtaatcccagctacctaggaggctgaggcagagagagaatcgcttgaacccaggaggcggaggttgcagtgagctgagatcgcgcgactgcactccagcctgggcgacagagggaaactctgtctcaacaaaaaaataaataaaataaaaaataaaaaaagaatatggaagcaaatggagaaagggaggaaactgaggtcaggcaaaccttccagcaatcagttctgcccagagaacatactgacgacagagaacacactgagcgtatctgcttctagttagagcattgccgattgccttcataattcataatgtgctgtgctcctctgagggtctatctgtatttctcttcaaagaattccctttttaaattcttgcagctgggttttaagacacaataatggggcaaattaagttttataaacttggagatttttatgcagtaaataaaaaaataatatgtactagtcacccctgaaactgcattcttagaactcgactcttgttttatttaaatacgtgcgtagatatctgtgaagattttcatgtacctatttaccttgtcactaataaaattaaaactgaaagactaaaaagca

SEQ ID NO: 92379 - DNA, 543 bp, Homo sapiens
ggcagggtgatgagcttccacaaagaaaagcagtcttccaaggactagtttttcctccaagggtctcagcactgaggtgacatttataactttctgacttaaagtcaatcccattgttctacgcagccccacattcctccctcagaaggagccctaatcgatgtggcatggaagaacttgtggtcctcttggcagccaccccaacttccgttcaggcctccgcacctcccccagtgttgtggggcactgaccgcctccccagaagtggcccaggctggaggttattgcctcatcctctccaatggccatggtcacatcacagcataggccagcgattcagtttgggccaatgaaacacagggaaaggtttgctgtggcttctgggagaatagctccctcacttctctgaaagagcttccagaaacacatcactcactccaaacaaggctgaatgtattagctgtttactgctgcttaacaaattatcccaaaatttagtggcttaaaacaataaatgtttattatctcacagcttccgagggt

SEQ ID NO: 92380 - DNA, 273 bp, Homo sapiens
cagaagcattgtttcttctgggagggtatccatttcacccccaaacctttggattttattttgtgttatttatttatttttgagaccagcctggccaacatggtgaaacctcgtctctactaaaaatacaaaaattagccaggtgtggtggtgggtgcctgtaatcccagctactcaggaggctgaggcaggagaatcacttgaacctgggaggtggaggttgcagtgagccgagattgcgccactgtactctagcctgggcgacagagtctc

SEQ ID NO: 92381 - DNA, 369 bp, Homo sapiens
tatgagttgtactaaccataatagttgtaaaattgtctagggaaagtcaggaagcatctttttatctgtctatatgccacagaactattcttgatcatggagtatataacctgcatcagaatgacatcggattaatctctgtgcttgtttaaacacagagtatagagttctagccagaaatagtgaatcaacatttccagtggtagatcccagaaatggatatttaacaagcatactaaataataactatttccaataaagcttgagaacaactgcctcacagtccctgccacagtgcctccaaacatgaggcatttaatgaatgtgttctgaagtgcaagaatgcctgcatgtaatccacacatctct

SEQ ID NO: 92382 - DNA, 391 bp, Homo sapiens
tctgtgctttcgttgcttcacatacacacacacacacacacacacacacacacacacacacacacacgaaaggggaggttggttagataaataacactaagctggtaatacagtaatgtatttgttgacccagaagcatatttacaatattaaataaaaaaataggttaccaatggcatatattttatgatcctatcacagatagaaatatctgaaaatattgtcaagtcaagcagacatcacagacaaaagtgaattagaaattaaaggaatatgaatacatataacaaaataaaaacaacaaaacttcaaatctgaaaaaagtttataatttgttgattaaagtttcttatattgttttcttattagaaaatcagtatattctctgcag

SEQ ID NO: 92383 - DNA, 3076 bp, Homo sapiens
caccagccgacccgtcagtgacaccgctgtgccgtccccaaaaccagccgagacagctggcccccacccttccacccattgggcaggccgcacgggggcgcggcccggagtcctggtccctttgttgggcgcgcaccccctcccttaggtggcaacaaagtcgtgcagtgggagccgccgcgatagggcggggagtggccagggcgggactccaagaactgcccgggggcagcggggccaaaaagtgggaagaaggaaaaaaggcaggaggcatctggggacaggcgcgagggcagccggctctgaagtatgcggagggcctcctcccggccccgggcattcgcggagaacgagcctcgcagaagtttggctgcagctgcccgggcggcgtcgatggctgcgcgccccgcgccgcgcgggggctgagcgggcgccacttcccctccgggccggcttttgtgtctggcatctcctcctcatgctgcgtctggccacctactgcggcggccgctgctgagacgctcgctcggaccaaggggaggagacggcgggggcggccgcggctttgggtccaggcgggactatgggaaacgggatgtgctcccgaaagcagaagcggattttccagacgctgctgctgctgaccgtcgtgttcggctttctctacggcgcgatgctctactacgagctgcagacgcagctgcggaaagccgaggcggtggcgctcaagtaccagcagcaccaggagtccctctccgcccagttacaagttgtatatgaacacagatcaagattagagaaatccttgcaaaaagaaagacttgaacataaaaaagcaaaggaagattttcttgtttataagttagaagcacaagaaacattaaataaaggaaggcaagattccaatagcagatacagtgcactgaatgtccaacatcagatgttgaaaagccaacacgaggagctaaagaaacagcacagtgacttggaagaggaacatcgcaaacaaggggaagacttcagtagaacatttaatgaccataagcaaaaatacttgcagctccagcaagaaaaagaacaagaactttctaagctaaaagagactgtatacaatttgagagaagagaatagacaactaaggaaagcacaccaagacatacatacacagcttcaagatgtcaagcaacagcataagaatttactctccgagcatgaacaacttgtagtgactttggaagaccacaagagtgcactagctgctgcacagactcaagttgcagaatataaacaactgaaagatactctgaataggattccaagccttcgaaaacctgatccagcagaacagcaaaatgtgacccaggtggcacattctccacaaggttacaacacagcaagggagaagccaacccgagaggtgcaggaggtgtctcgaaataatgatgtgtggcagaaccatgaagcagttcctggaagagcagaagacacaaaactctatgctcccacccataaggaggcagaatttcaggctcccccagagccaatccaacaagaagtggaacgcagagaacctgaggagcatcaggtggaagaggagcacagaaaggccctggaggaggaagaaatggagcaggtcgggcaagcagaacatcttgaggaggaacacgatccatcaccagaggagcaggatcgggagtggaaagagcagcatgagcaacgagaagcagccaacctcctggaagggcacgcgcgtgctgaggtgtacccttcagccaagccaatgatcaaattccaatcaccctatgaggaacagttggaacagcagagactggcagtgcagcaggtggaggaggcccagcagctgcgggaacaccaggaagctttgcaccagcagaggctgcaggggcacttactacggcagcaggaacagcagcagcagcaggtggcaagagagatggccctgcagaggcaggctgagcttgaggagggccggccgcagcaccaggagcagctccggcagcaagctcattatgatgctatggataatgatatcgttcagggagcagaggaccagggaatccaaggagaggaaggagcctatgaaagagacaaccagcaccaagatgaagcagaaggagatccaggtaatagacatgagcctcgtgaacaaggaccccgagaagccgacccagaatctgaggcagatagggcagctgtagaagatataaacccagcagatgaccctaataatcaaggtgaggatgaatttgaagaagccgagcaagtgagagaagaaaatttgccagatgaaaatgaagagcaaaaacaaagtaatcaaaagcaagagaatacagaagtggaggaacatttggtgatggcaggaaatccagaccagcaggaggacaatgttgatgaacagtaccaggaagaggcagaagaggaggttcaggaagatttgactgaagagaaaaaaagggaactggagcataatgctgaagagacctatggtgaaaatgatgaaaatactgatgataaaaataatgatggagaagagcaagaagttcgagatgacaaccgccccaaaggccgagaggaacactacgaggaggaagaagaggaggaagaagacggggctgcagttgctgagaaatcacatcgaagagctgaaatgtagcagcacccaatttctagacaacgctcagccaacggattcttttcaagctgctcaaacataaatctgcctactgaactctaggatatttaattacaaaaattaagaacttagacttttttaaaactttgtattagaaatgcgcatacatttatatgaatatattttgataacataggtctagagcttcttttatattcaagctaaacatgaaaaagaagaaaaacaataaagtaaacctgagcccccacgtcccaatttttttaatagattatgtgatgttggaaagctcattgatttgtatatgtttcagtgtgttacctttctggcttccagttcccaggtgttctttgtttgcctttgataaaatacaggatttaagaacagaaagtagctgcaaaatgc

SEQ ID NO: 92384 - DNA, 3008 bp, Homo sapiens
caccagccgacccgtcagtgacaccgctgtgccgtccccaaaaccagccgagacagctggcccccacccttccacccattgggcaggccgcacgggggcgcggcccggagtcctggtccctttgttgggcgcgcaccccctcccttaggtggcaacaaagtcgtgcagtgggagccgccgcgatagggcggggagtggccagggcgggactccaagaactgcccgggggcagcggggccaaaaagtgggaagaaggaaaaaaggcaggaggcatctggggacaggcgcgagggcagccggctctgaagtatgcggagggcctcctcccggccccgggcattcgcggagaacgagcctcgcagaagtttggctgcagctgcccgggcggcgtcgatggctgcgcgccccgcgccgcgcgggggctgagcgggcgccacttcccctccgggccggcttttgtgtctggcatctcctcctcatgctgcgtctggccacctactgcggcggccgctgctgagacgctcgctcggaccaaggggaggagacggcgggggcggccgcggctttgggtccaggcgggactatgggaaacgggatgtgctcccgaaagcagaagcggattttccagacgctgctgctgctgaccgtcggtggcgctcaagtaccagcagcaccaggagtccctctccgcccagttacaagttgtatatgaacacagatcaagattagagaaatccttgcaaaaagaaagacttgaacataaaaaagcaaaggaagattttcttgtttataagttagaagcacaagaaacattaaataaaggaaggcaagattccaatagcagatacagtgcactgaatgtccaacatcagatgttgaaaagccaacacgaggagctaaagaaacagcacagtgacttggaagaggaacatcgcaaacaaggggaagacttcagtagaacatttaatgaccataagcaaaaatacttgcagctccagcaagaaaaagaacaagaactttctaagctaaaagagactgtatacaatttgagagaagagaatagacaactaaggaaagcacaccaagacatacatacacagcttcaagatgtcaagcaacagcataagaatttactctccgagcatgaacaacttgtagtgactttggaagaccacaagagtgcactagctgctgcacagactcaagttgcagaatataaacaactgaaagatactctgaataggattccaagccttcgaaaacctgatccagcagaacagcaaaatgtgacccaggtggcacattctccacaaggttacaacacagcaagggagaagccaacccgagaggtgcaggaggtgtctcgaaataatgatgtgtggcagaaccatgaagcagttcctggaagagcagaagacacaaaactctatgctcccacccataaggaggcagaatttcaggctcccccagagccaatccaacaagaagtggaacgcagagaacctgaggagcatcaggtggaagaggagcacagaaaggccctggaggaggaagaaatggagcaggtcgggcaagcagaacatcttgaggaggaacacgatccatcaccagaggagcaggatcgggagtggaaagagcagcatgagcaacgagaagcagccaacctcctggaagggcacgcgcgtgctgaggtgtacccttcagccaagccaatgatcaaattccaatcaccctatgaggaacagttggaacagcagagactggcagtgcagcaggtggaggaggcccagcagctgcgggaacaccaggaagctttgcaccagcagaggctgcaggggcacttactacggcagcaggaacagcagcagcagcaggtggcaagagagatggccctgcagaggcaggctgagcttgaggagggccggccgcagcaccaggagcagctccggcagcaagctcattatgatgctatggataatgatatcgttcagggagcagaggaccagggaatccaaggagaggaaggagcctatgaaagagacaaccagcaccaagatgaagcagaaggagatccaggtaatagacatgagcctcgtgaacaaggaccccgagaagccgacccagaatctgaggcagatagggcagctgtagaagatataaacccagcagatgaccctaataatcaaggtgaggatgaatttgaagaagccgagcaagtgagagaagaaaatttgccagatgaaaatgaagagcaaaaacaaagtaatcaaaagcaagagaatacagaagtggaggaacatttggtgatggcaggaaatccagaccagcaggaggacaatgttgatgaacagtaccaggaagaggcagaagaggaggttcaggaagatttgactgaagagaaaaaaagggaactggagcataatgctgaagagacctatggtgaaaatgatgaaaatactgatgataaaaataatgatggagaagagcaagaagttcgagatgacaaccgccccaaaggccgagaggaacactacgaggaggaagaagaggaggaagaagacggggctgcagttgctgagaaatcacatcgaagagctgaaatgtagcagcacccaatttctagacaacgctcagccaacggattcttttcaagctgctcaaacataaatctgcctactgaactctaggatatttaattacaaaaattaagaacttagacttttttaaaactttgtattagaaatgcgcatacatttatatgaatatattttgataacataggtctagagcttcttttatattcaagctaaacatgaaaaagaagaaaaacaataaagtaaacctgagcccccacgtcccaatttttttaatagattatgtgatgttggaaagctcattgatttgtatatgtttcagtgtgttacctttctggcttccagttcccaggtgttctttgtttgcctttgataaaatacaggatttaagaacagaaagtagctgcaaaatgc

SEQ ID NO: 92385 - DNA, 2954 bp, Homo sapiens
gcgccgagcgccgccgccgccgccgccgccgccgctccgctgcccgcgccgcccgcggctcccgatggagactgacgcgccccagcccggcctcgcctccccggactcgccgcacgacccctgcaagatgttcatcgggggactcagttggcagactacgcaggaagggctgcgcgaatacttcggccagttcggggaggtgaaggagtgtctggtgatgcgggaccccctgaccaagagatccaggggtttcggcttcgtcactttcatggaccaggcgggggtggataaagtgctggcgcaatcgcggcacgagctcgactccaaaacaattgaccctaaggtggccttccctcggcgagcacagcccaagatggtgactcgaacgaagaagatctttgtgggggggctgtcggtgaacaccacggtggaggacgtgaagcaatattttgagcagtttgggaaggtggacgacgccatgctgatgtttgacaaaaccaccaaccggcaccgagggttcgggtttgtcacgtttgagagtgaggacatcgtggagaaagtgtgtgaaattcattttcatgaaatcaacaacaaaatggtggaatgtaagaaagctcagccaaaggaggtgatgtcgccaacgggctcagcccgggggaggtctcgagtcatgccctacggaatggacgccttcatgctgggcatcggcatgctgggttacccaggtttccaagccacaacctacgccagccggagttatacaggcctcgcccctggctacacctaccagttccccgaattccgtgtagagcggacccctctcccgagcgccccagtcctccccgagcttacagccattcctctcactgcctacggaccaatggcggcggcagcggcggcagcggctgtggttcgagggacaggctctcacccctggacgatggctccccctccaggttcgactcccagccgcacagggggcttcctggggaccaccagccccggccccatggccgagctctacggggcggccaaccaggactcgggggtcagcagttacatcagcgccgccagccctgcccccagcaccggcttcggccacagtcttgggggccctttgattgccacagccttcaccaatgggtaccactgaagcaggggacggtggcaggagcgccccagcctgcagctgactgaggaccacgagtgagccagcgagggggcgggagacctcagccgcagccgccgccccctcccctgcagcgactcggacccgctactgcctgcccccaactccccgggcccggcccctgccctgctgcccccaacagcgtctggctcccctactaacgtccccctcttcgcccttgcccccatccccacccgcccctctcccggccctgcttttatttattttggattagccggttgcccaccccagccctctggtccatccctccctccgtgccgcgcccccctaggaccgccccctccccaaaaggcttttggatttgtgcatagctggagtgaaggcggagggagcctgctacaggccgcagcccaacccctgttttttattcagatttcccctcctttaccctttcccttttttttttttttttttttttgtttaaagaaaccttttttaaactatttctaggtttgtgaatgtgaagccccaggccgcagggggcaaggggccaggtgccccccaccagctgagaacaaagtgtctatctgggtgtgggcccctggccgcctccctccagccctggagaggagggcagggctgcggggaggccaggccgagcccctggaaccatcccgtcctgtatcatatgtaaatactgtgaggtgatgtgcccacccctctctaagacccctcgggggtgaggggctcccccctcccctgtttctgtcccctcagacaccgttactgtaagcttgcaggcctcagctgtggccacggcaggcccgctctctcaggccctcagggtcaaggccttggttggacctgcccactccaaaaacccagtgtgggggcaaagggcgtgggaagagcagggcttgcccagcgacactgctggacaggaattaactctccaaaggtctcccctgctccctacctaggttggggcttcatggtttctgctccgtctgtcccccttccccctcgacccccgcaatgagtgggcaccaggggacgctctggcgagggcagaccccaggggaaagcaaagggcgtctcagggaacccccacattctctcactgaagtttcccaccaggatgaccccacagccagagtcccttggcagcccctcaccccagaccccccttctaaggaaaaagagaggttcagagcgttggaccttcatgaacagtggcctggctggcgtggcagggccaaggcccacccactgccatcccccttctgtgtgtccctctcccccagttatgaggcccagggcctgagctctcttccccagcattgcccccacccggaaaccccacctttggagagttaattgtctgtgtgaggtgcttaacctatcagccctgagaacacaaagcaataatctttgttactgagatgcgcggctgttcgtgttttgggttttttttttttttaatgtttcctaataaaagagaagctgcattttattggtttttatttttaattttctacacgtttgagctgagtcctgagacacttagcttccctctccctcattcccggacccttccaccccactgggcccaaccatgggctcaggaccctggaattccgttttctgatttgctttgggattttttttttttttaagatgttacatggtgtttcgaagccagcaagttaccatcctccggtgtctcttctctccacatctgtaacttctttttccaggttttattttcagttttaaattcctaataaattatttgaaaacgtta

SEQ ID NO: 92386 - DNA, 198 bp, Homo sapiens
gaggctggtgaagaagagggagaaggagaagagagactgagggatgaggggaggaaggaggcgagagagatccttagtgatagtattctgattggtcagtaatagcttcaagggaggctcagcctctgtagcacctatggttcaaaaaaatcatgaggctgtctgttaggctgttcttacattgctgtaaagaaatat

SEQ ID NO: 92387 - DNA, 330 bp, Homo sapiens
ggaaggagtcatgtgggcaccgagttttatgctgtattgattaactttccatttcccttggttcaattttagtttctctcttagaattatgtttctaccctttgcattctcaccgccaatcatttattgctgcacgtgtctttccccctccatatactgtgctccttaattcactaagggactgtactaacatagcctaaatacccaccttccagccacccttcaggagggtattagctgtatttgtgcacagcgagagtgccttcaaggcagagggcttcctcccctatacttcacctccaaatctctttcctttccacaaatccttag

SEQ ID NO: 92388 - DNA, 442 bp, Homo sapiens
tcaagcccccaagggcataaaacaaggtggagacatcatccagtttttttgtttaagggacctgtattcaagtttgttactgaccaacttgctggcttgtctggaaaagtgggcttacaggtgttctaagcccgtgttttaccctgaagtacccctcgacacagaacgactaattcatagcacaaaatacaccagcttaagactagccttagaattctttttcgcattaatcaaagctttacagaggagataaacgctgattttttttttaaaccattcatggacccgtttgcacagagaggaagaagccagaaatctgactggaaagaaattcttacccttttgtcagcatgccaggcttctggattccctttccctgagcggccccagtgatccagcttgcagcaccattgccctgggggccaagctgcatcataaagga

SEQ ID NO: 92389 - DNA, 314 bp, Homo sapiens
tgtagccactgacactactgaccacattgttaaccttttctaccttagcacctgtaataccacaccatcctggctttcctcccacatttacggtcattcgctctgtgtctcctctttgtctccacccacccccaaatgttgatattcttcaagtttcagctgctgccctctcttttttcttgacaagctcttgatagcagatgacctacagatgcttagaatatcaacaatctttcttctctagatgaacagctcccacctgtgacttcatttccaattaccaaaactgttttttctgtctggatgtggattag

SEQ ID NO: 92390 - DNA, 470 bp, Homo sapiens
aattattgcacatatttttataggtgagattggcctataatgttctcctttactgtctcatccagctgtagcctcctaaaatcaatgtaatttttcttctttttcatgtttctgaaacattttgaataagattgtaacataaaatttatctatagtgaaaatatgttacgattctaggctttcttttaacatctttcttagccttagatttcttttatcttttcaaaatggtttttcaagaaccattttgtatgaaagagatttggatagcactttgtccggtactggatagcaccatccagtagtttactggttgtcttcacctaaaatccagggagctttggtccgaaaccaaggcttatagtatctgaagacgtttctcagtgacactggggacctctcggagcctagtcagtgggtttcctcctgcctctcagttcttaatagagccctggctgagtgccttatat

SEQ ID NO: 92391 - DNA, 476 bp, Homo sapiens
cgacagagcgagactccgtctcaaaaaaaaaaaaaaaaaatttacctaaggaatctccatctggattggcatcatttatttttatatattactctcatttaccccatatgaaaacagatagcttctagggacctatacccagcattaagcttttccatttcattgtgtaaataattccaactcttttaacctgtcctcagaaatttcaagtccaaccaacttcatgacttttttctgaaacttttaagatttcttttcctctaaactgtagggtcaaatatgatactcagatggggaacttaatattactaagtaggaggaaattacatcagtttccagtacatctacctgtggaattaaaattgtggtggctcatgcctctaatcctaacactttggaaggccacggtgggaggatcacttgaggccaggaggtcaagaccagcctgggcaacacagtgagaccccgtctctaca

SEQ ID NO: 92392 - DNA, 364 bp, Homo sapiens
acctctgcctcctgggctcaagtgatcctcccacgcagcctcccgagtagctgggattacaggtgcatgccaccacacccggctaatttttgtattttcagtgtagacagggctacaccatgttggccaggctggtctcaaactcctgggctcaagcaatctgcccacctcagccacccaaagtgctgggattacaggtgggaatcaccacacccggcctaggaaagcctttttcttccagagttgccactgctttggaactgcatagactctgaaagcagacttcctggattcaaacccaagctttgcctcttaccaactatacgacctcaggcagatcacttaatccctctgtgcttcactt

SEQ ID NO: 92393 - DNA, 530 bp, Homo sapiens
gtgtgtgtgtctaggtgtgtgtgtccaggtgtgtgtctctaggtgtgtgtgtctaggtgtgtgtgtccaggtgtgtgtgtctaggtgtgtgtgtccaggagtgtgtgtctaggtgtgtgtgtctaggtgtgtgtgtccaggtgtgtttgtctaggtgtgtgcgtccaggtgtgtgcgtctaggtgtgtgtgtccaggtgtgtgtgtctaggtgtttgtgtccaggtgtgtgtgtccaggtgtgtgtgtctaggtgtgtctctttgtgtagagctttttgggcttcttgaatgtgtaggttaacatttttcagcaaatttgggagcttttcagctattatctcttggacattttatctgcttggaactttttttctgcttctttctctctcacatctcctctggtactctcattaaggatgtcccaagcttctattcatttttcttaattatttatccctctctgtttttcaggttgtataatctctattgacataacttcaagtctgctggttctttcttctgactgttc

SEQ ID NO: 92394 - DNA, 740 bp, Homo sapiens
gctaatcaaaattccacggagtacccttgaaacaattgcatatataaggctgtttctcacttaaaagagacaatgcagtgtggggtgaattgtcttttgaagaactgtatgacacatgcccagttcaggtgaaaggtgagaaatggaatgtttctcagacctagcacagacacctagggacctagtttgggaagcttatcttgtcattttccttgccaaggataagtagaggatttcagctatcaacattgctaatccgttacctttcatgctgagcaatgtctctgccttcccacagacttagacaaagcttcttattttcttacaaagaggtcctattgaggaaatttgaattttttttttttttttaaacttagcagtactacatcctgtgcttttagataggtgagcaattttccatgttaacagctaggccaaaaatcatgactgccagtagaagtgggtaactagatagatagatagatggcctttgatttagcactgatgatagttattagcatgtagcaacttaagtaaaagcaactggaaaggcttgatagaaattctgagttgtttgaagtataatagattattaggatagtaatttctttgtgaattttactgtaaacaagcttgattctagtgaggacttatgctaattgctcacttatactaacagcaactacagagtttttatttaatactgtttcttatacaaatatcatcaaatgcacatccac

SEQ ID NO: 92395 - DNA, 721 bp, Homo sapiens
gctaatcaaaattccacggagtacccttgaaacaattgcatatataaggctgtttctcacttaaaagagacaatgcagtgtggggtgaattgtcttttgaagaactgtatgacacatgcccagttcaggtgaaaggtgagaaatggaatgtttctcagacctagcacagacacctagggacctagtttgggaagcttatcttgtcattttccttgccaaggataagtagaggatttcagctatcaacattgctaatccgttacctttcatgctgagcaatgtctctgccttcccacagacttagacaaagcttcttattttcttacaaagaggtcctattgaggaaatttgaattttttttttttttttaaacttagcagtactacatcctgtgcttttagataggtgagcaattttccatgttaacagctaggccaaaaatcatgactgccagtagaagtgggtaactagatagatagatagatggcctttgatttagcactgatgatagttattagcatgtagcaacttaagtaaaagcaactggaaaggcttgatagaaattctgagttgtttgaagtataatagattattaggatagtaatttctttgtgaattttactgtaaacaagcttgattctagtgaggacttatgctaattgctcacttatactaacagcacaggatgtagtactgctaagtttaaaaaaaaagtcgacgc

SEQ ID NO: 92396 - DNA, 247 bp, Homo sapiens
actatgctcactatctgggtgacaggaacattcatatgccaaacctgagaaacacaaaatgtacccatgtaacctgcgtatgtacccctgaacctcaaataaaagtaaaacaaagcaaaacagctttgagccttgcctataagcccatttattactcctggtgttccagaagtggcataattttaaagaagaaaacatgagaaatttaaaataaaatgcttcctggggcataatgtcatcctactcc

SEQ ID NO: 92397 - DNA, 475 bp, Homo sapiens
cagagcaagactctgtctcttaaaaaaaagaaaaacgaaaagtagttgtctgtggttccctaaaaatagcttcaaaacgcttggagttttctgtgtgatgggaatggttttgttttactgattagatgactcactgtgggccattagatagctttaggatgggaactgccctccaaaaagaccaggaataggattagagggttagaactttcagccacttgccctctagggcgggaaagtttggagattgagttcagttatgtgaccaatgatttaatcaatcatgcctaagtaataaaactccaataaaaactctgctcatggagacttgggggagcttcctggccggagaatacatcaatgtgccgagagcgtgtcatagcctgactgtattgggagaagctcttgtcctggactctcccagactttgccctatgtgtatcctttaaaataaaactgtaataataagtatagc

SEQ ID NO: 92398 - DNA, 549 bp, Homo sapiens
aacctgattaaagcagcagtggctctgaacaggaattccccaaaatagctcagctgatgattcacaatcttataaagcaggctgaacaagacctggactccggcccccatgcagctgccccgtgcctgggcgaccttgagtggctcccttaatatatctgggggtcacttcatgtttcaataaagagcctgcaacctagagggagaagacagacaagcacgcatgacctaaaagaggtgctgagggaacaacacagctcagaaaagagagcaggttcgacctcggcatgtgtttcatttttttctttccttatttgctgacagcatccatcctggctaacgggatgggtgatttttttctgaagttccagtgtgtttagaaaaacaaagactttttaagataacaggaatttttaaatggtggtatatttaaaatgtttacactcaccagattagtatttttatactaacaaaaagtgtgatgtcacataagtatgttattcgaaagataaatacacaatgtatttctaagtattttttatagcacatg

SEQ ID NO: 92399 - DNA, 391 bp, Homo sapiens
gcgaggacggactctctcttacggtgtttcatggatacatacagacccatccacggtcagatgcaccatcattatttttataccacgaagaaaggtgaaacactgccaatcaagactatgacactaaagtcaaaagccatcaatgataagacaatcctgatgtcagttcaactgtcagtgagaaatgtgcatcttggaatccattaaatatgatttcactcttacttacattgaacaagtcatttaacctggagcccagtttctgtatctataacatagagggctgaatacggtgattactaagatcacttccagtttgacaatgttcgatagatagaacaggggtgaggagaataaagtctctagggctcaaaatttaatgaagcactaa

SEQ ID NO: 92400 - DNA, 633 bp, Homo sapiens
agctctgagaatgctcatgcagaggagcatgcccctcctgcagctccagggccccatcagttgtgtcattatctgagacttcctcgggaactccaagtgcctttttgacagtgacaacagacagtccctcgctttttgttgttgttggttttcttaacccctttaatggaactgcctggattttatacagttattaaaggatgtctcttttgctttaaactgcatgctgccaagtgccatttggggtcagcatcctcgtttcaacacagtgtgctctctagttatcatgtgtaacgtgggttctgtttagcgaagatagactagaggacacgttagagatgcccttccctgctccatccctgtggcaccattatggttttttggctgtttgtatatacggttacgtattaactctggaatcctatgggctcatcttgctcacccaatgtgggagtctggtttgagcaagcgagctgaatgtgactattaaaaaaaatttaaaaaaaaaaaagaaaatcttatgtactatccaaaagtgccagaatgactcttctgtgcattcttcttaaagagctgcttggttatccaaaaatgaaaattcaaaataaactctgaagaaaaggaaaaaaaaat

SEQ ID NO: 92401 - DNA, 376 bp, Homo sapiens
aattcaagcttctaacgatgtacggggacatgtgtaacgtgggttctgtttagcgaagatagactagaggacacgttagagatgcccttccctgctccatccctgtggcaccattatggttttttggctgtttgtatatacggttacgtattaactctggaatcctatgggctcatcttgctcacccaatgtgggagtctggtttgagcaagcgagctgaatgtgactattaaaaaaaatttaaaaaaaaaaaagaaaatcttatgtactatccaaaagtgccagaatgactcttctgtgcattcttcttaaagagctgcttggttatccaaaaatgaaaattcaaaataaactctgaagaaaaggaaaaaaaaat

SEQ ID NO: 92402 - DNA, 3958 bp, Homo sapiens
  misc_feature (4)..(4): n is a, c, g, or t
  misc_feature (10)..(10): n is a, c, g, or t
gggnggagangagcaggtccgcgacgctgctgctgtgcctgctgggctgccacgtctggaaggcggtgacaagacgctgcgggagcccggcgccggagcccaagaggtgacgttaaaggtgcacatcagcgacgccagcacccaccagcccgtagcagatgcgctcatcgagatcttcaccaaccaggcctccatagcctctggcacctcggggactgatggcgtcgcctttatcaagttccagtataagctgggcagtcagttgattgtcaccgcctcgaagcatgcctacgtgccaaactctgccccatggaagccaatccggttacctgtattttcctctctgagccttggcctgcttccagaacgctctgccactctaatggtatatgaagatgtcgtccaaatagtatcaggattccaaggtgcccggccacagcctcgcgttcatttccagagaagggctctgaggttgcctgagaacaccagctacagtgacctgaccgcgtttctcacggccgccagctccccttcggaggtggacagttttccttatttgcgaggattagacggaaatggaacaggaaacagcaccaggcatgacctgaccccagtcacagccgtcagcgtccacttgctgagcagtaatggaacgccggtgctggtggatggtcccatctatgtcactgtgcccctggccacgcagagcagcctgaggcacaatgcctatgtcgcggcgtggcggtttgaccagaagctgggaacgtggctgaagagcggtctgggtcttgtgcaccaggaaggcagccagctgacgtggacatacattgccccccagttggggtactgggtggccgccatgtcccctcccatcccaggtcccgttgtaacacaggacattaccacgtatcacacggtgtttcttttggccattttaggaggaatggctttcatacttttggttttgctgtgtctccttttatattattgcaggaggaagtgcttgaaacctcgtcagcaccacagaaaactgcagctccctgcaggactggagagttccaaaagagaccagtccacgtccatgtcacacattaacttgctgttttcacgccgagcgtcagaattccctggcccgctgtccgtcaccagccacggccgccccgaggcccccggcacgaaggaactgatgagtggagtccatttggaaatgatgtctccgggcggcgaaggggacctgcacacccccatgctcaagctctcctacagcacctcccaggaatttagctcccgggaggagctcctctcttgcaaggaagaggataaaagccagatctcctttgataacctcactccaagtgggacgctggggaaagactaccataagtcagtggaggtttttcccttaaaggcaagaaaatctatggaaagagaaggctacgagtcctcgggcaatgatgactacaggggtagttacaacaccgtgctctcacagcctttatttgaaaagcaggacagagaaggtccagcctccacgggaagcaaactcaccattcaggaacatctgtaccccgcgccttcatcacctgagaaagaacagctgctggaccgcagacccactgaatgtatgatgtcgcgatcagtagatcacctcgagagacctacgtccttcccacggcccggccagttaatctgctgcagttctgtcgaccaggtcaatgacagcgtttacaggaaagtactgcctgccttggtcatcccggctcattatatgaaactccccggggaccactcctatgtcagccagcccctcgtcgtcccggctgatcagcagcttgagatagaaagactacaggctgagctgtccaatccccatgccgggatcttcccacacccgtcctcacagatccagccccagcccctgtcttcccaggccatctctcagcagcacctgcaggatgcgggcacccgggagtggagccctcagaacgcatccatgtcggagtctctctccatcccagcttccctgaacgacgcggctttggctcagatgaacagtgaggtgcagctcctgactgaaaaggccctgatggagcttgggggtgggaagccgcttccgcacccccgggcgtggttcgtctccttggatggcaggtccaacgctcacgttagacattcatacattgatctccaaagagctggaaggaacggaagtaatgatgccagtttggactctggcgtagatatgaatgaaccaaaatcagcccggaagggaaggggagatgctttgtctctgcagcagaactacccgcccgtccaagagcaccagcagaaagagcctcgagccccagacagcacggcctacacgcagctcgtgtacctggatgacgtggaacagagtggtagcgaatgtgggaccacggtctgtacccccgaggacagtgccctgcgatgcttgttggaggggtcgagtcggagaagtggtggccagctgcccagcctgcaggaggagacgaccagacggactgcggatgccccctcggagccagcagccagcccccaccagagaagatctgcccacgaggaagaggaagacgatgatgatgatgaccaaggagaagacaagaaaagcccctggcagaaacgggaggagaggcccctgatggcgtttaacattaaatgagctatcgcagacccacctgactgtggaatataaaattgccaaatatcctttctcatggaagcgcgtacccgttcgtggaggaaacggaacggcagcccagccgtgggacggacgtggacgtttactgcattcctgtttgccgtgtaaatgttagaaaggaattaaagttattactcggaataaaggatgactttggcggatgtcgcccctgcaaggaggtggctgaaagtggtgtccagatgtccttccgaggactcggcgtatccgccaccagggacattaagaaaccgcacgtgatgtcgctatgctctaacgatcacctcagttctccctcggattctgggaacagatgaaactttttgcatcgcttgagtcatttttatcacaataatcctactgtgaagctgtcgttgagaacttaggttggcacgtagcgtctcaaggtatgcgttctctcaaaggaaagctatgcatcgctgcttcgttgtctgattttgcttagattttgctttggttaggttgcgttttggggtttgcctttttttgttgtcgcttaaatgcaatttggttgtaaagatttgattcctttgtgttcatctgttccgcttctcagcggtccatctcagcgtctcccttcaggaaccgctgagtgtcctctcttaacatccaagccttttaatgaaatcgtactgaaatctgtatcagctaagagtcctccaatcctggtcccattaactccaagtgcctttttgacagtgacaacagacagtccctcgctttttgttgttgttggttttcttaacccctttaatggaactgcctggattttatacagttattaaaggatgtctcttttgctttaaactgcatgctgccaagtgccatttggggtcagcatcctcgtttcaacacagtgtgctctctagttatcatgtgtaacgtgggttctgtttagcgaagatagactagaggacacgttagagatgcccttccctgctccatccctgtggcaccattatggttttttggctgtttgtatatacggttacgtattaactctggaatcctatgggctcatcttgctcacccaatgtgggagtctggtttgagcaagcgagctgaatgtgactattaaaaaaaatttaaaaaaaaaaaagaaaatcttatgtactatccaaaagtgccagaatgactcttctgtgcattcttcttaaagagctgcttggttatccaaaaatgaaaattcaaaataaactctgaagaaaaggaaaaaaaaat

SEQ ID NO: 92403 - DNA, 3904 bp, Homo sapiens
  misc_feature (4)..(4): n is a, c, g, or t
  misc_feature (10)..(10): n is a, c, g, or t
gggnggagangagcaggtccgcgacgctgctgctgtgcctgctgggctgccacgtctggaaggcggtgacaagacgctgcgggagcccggcgccggagcccaagaggtgacgttaaaggtgcacatcagcgacgccagcacccaccagcccgtagcagatgcgctcatcgagatcttcaccaaccaggcctccatagcctctggcacctcggggactgatggcgtcgcctttatcaagttccagtataagctgggcagtcagttgattgtcaccgcctcgaagcatgcctacgtgccaaactctgccccatggaagccaatccggttacctgtattttcctctctgagccttggcctgcttccagaacgctctgccactctaatggtatatgaagatgtcgtccaaatagtatcaggattccaaggtgcccggccacagcctcgcgttcatttccagagaagggctctgaggttgcctgagaacaccagctacagtgacctgaccgcgtttctcacggccgccagctccccttcggaggtggacagttttccttatttgcgaggattagacggaaatggaacaggaaacagcaccaggcatgacctgaccccagtcacagccgtcagcgtccacttgctgagcagtaatggaacgccggtgctggtggatggtcccatctatgtcactgtgcccctggccacgcagagcagcctgaggcacaatgcctatgtcgcggcgtggcggtttgaccagaagctgggaacgtggctgaagagcggtctgggtcttgtgcaccaggaaggcagccagctgacgtggacatacattgccccccagttggggtactgggtggccgccatgtcccctcccatcccaggtcccgttgtaacacaggacattaccacgtatcacacggtgtttcttttggccattttaggaggaatggctttcatacttttggttttgctgtgtctccttttatattattgcaggaggaagtgcttgaaacctcgtcagcaccacagaaaactgcagctccctgcaggactggagagttccaaaagagaccagtccacgtccatgtcacacattaacttgctgttttcacgccgagcgtcagaattccctggcccgctgtccgtcaccagccacggccgccccgaggcccccggcacgaaggaactgatgagtggagtccatttggaaatgatgtctccgggcggcgaaggggacctgcacacccccatgctcaagctctcctacagcacctcccaggaatttagctcccgggaggagctcctctcttgcaaggaagaggataaaagccagatctcctttgataacctcactccaagtgggacgctggggaaagactaccataagtcagtggaggtttttcccttaaaggcaagaaaatctatggaaagagaaggctacgagtcctcgggcaatgatgactacaggggtagttacaacaccgtgctctcacagcctttatttgaaaagcaggacagagaaggtccagcctccacgggaagcaaactcaccattcaggaacatctgtaccccgcgccttcatcacctgagaaagaacagctgctggaccgcagacccactgaatgtatgatgtcgcgatcagtagatcacctcgagagacctacgtccttcccacggcccggccagttaatctgctgcagttctgtcgaccaggtcaatgacagcgtttacaggaaagtactgcctgccttggtcatcccggctcattatatgaaactccccggggaccactcctatgtcagccagcccctcgtcgtcccggctgatcagcagcttgagatagaaagactacaggctgagctgtccaatccccatgccgggatcttcccacacccgtcctcacagatccagccccagcccctgtcttcccaggccatctctcagcagcacctgcaggatgcgggcacccgggagtggagccctcagaacgcatccatgtcggagtctctctccatcccagcttccctgaacgacgcggctttggctcagatgaacagtgaggtgcagctcctgactgaaaaggccctgatggagcttgggggtgggaagccgcttccgcacccccgggcgtggttcgtctccttggatggcaggtccaacgctcacgttagacattcatacattgatctccaaagagctggaaggaacggaagtaatgatgccagtttggactctggcgtagatatgaatgaaccaaaatcagcccggaagggaaggggagatgctttgtctctgcagcagaactacccgcccgtccaagagcaccagcagaaagagcctcgagccccagacagcacggcctacacgcagctcgtgtacctggatgacgtggaacagagtggtagcgaatgtgggaccacggtctgtacccccgaggacagtgccctgcgatgcttgttggaggggtcgagtcggagaagtggtggccagctgcccagcctgcaggaggagacgaccagacggactgcggatgccccctcggagccagcagccagcccccaccagagaagatctgcccacgaggaagaggaagacgatgatgatgatgaccaaggagaagacaagaaaagcccctggcagaaacgggaggagaggcccctgatggcgtttaacattaaatgagctatcgcagacccacctgactgtggaatatggaacggcagcccagccgtgggacggacgtggacgtttactgcattcctgtttgccgtgtaaatgttagaaaggaattaaagttattactcggaataaaggatgactttggcggatgtcgcccctgcaaggaggtggctgaaagtggtgtccagatgtccttccgaggactcggcgtatccgccaccagggacattaagaaaccgcacgtgatgtcgctatgctctaacgatcacctcagttctccctcggattctgggaacagatgaaactttttgcatcgcttgagtcatttttatcacaataatcctactgtgaagctgtcgttgagaacttaggttggcacgtagcgtctcaaggtatgcgttctctcaaaggaaagctatgcatcgctgcttcgttgtctgattttgcttagattttgctttggttaggttgcgttttggggtttgcctttttttgttgtcgcttaaatgcaatttggttgtaaagatttgattcctttgtgttcatctgttccgcttctcagcggtccatctcagcgtctcccttcaggaaccgctgagtgtcctctcttaacatccaagccttttaatgaaatcgtactgaaatctgtatcagctaagagtcctccaatcctggtcccattaactccaagtgcctttttgacagtgacaacagacagtccctcgctttttgttgttgttggttttcttaacccctttaatggaactgcctggattttatacagttattaaaggatgtctcttttgctttaaactgcatgctgccaagtgccatttggggtcagcatcctcgtttcaacacagtgtgctctctagttatcatgtgtaacgtgggttctgtttagcgaagatagactagaggacacgttagagatgcccttccctgctccatccctgtggcaccattatggttttttggctgtttgtatatacggttacgtattaactctggaatcctatgggctcatcttgctcacccaatgtgggagtctggtttgagcaagcgagctgaatgtgactattaaaaaaaatttaaaaaaaaaaaagaaaatcttatgtactatccaaaagtgccagaatgactcttctgtgcattcttcttaaagagctgcttggttatccaaaaatgaaaattcaaaataaactctgaagaaaaggaaaaaaaaat

SEQ ID NO: 92404 - DNA, 3528 bp, Homo sapiens
  misc_feature (4)..(4): n is a, c, g, or t
  misc_feature (10)..(10): n is a, c, g, or t
gggnggagangagcaggtccgcgacgctgctgctgtgcctgctgggctgccacgtctggaaggcggtgacaagacgctgcgggagcccggcgccggagcccaagaggtgacgttaaaggtgcacatcagcgacgccagcacccaccagcccgtagcagatgcgctcatcgagatcttcaccaaccaggcctccatagcctctggcacctcggggactgatggcgtcgcctttatcaagttccagtataagctgggcagtcagttgattgtcaccgcctcgaagcatgcctacgtgccaaactctgccccatggaagccaatccggttacctgtattttcctctctgagccttggcctgcttccagaacgctctgccactctaatggtatatgaagatgtcgtccaaatagtatcaggattccaaggtgcccggccacagcctcgcgttcatttccagagaagggctctgaggttgcctgagaacaccagctacagtgacctgaccgcgtttctcacggccgccagctccccttcggaggtggacagttttccttatttgcgaggattagacggaaatggaacaggaaacagcaccaggcatgacctgaccccagtcacagccgtcagcgtccacttgctgagcagtaatggaacgccggtgctggtggatggtcccatctatgtcactgtgcccctggccacgcagagcagcctgaggcacaatgcctatgtcgcggcgtggcggtttgaccagaagctgggaacgtggctgaagagcggtctgggtcttgtgcaccaggaaggcagccagctgacgtggacatacattgccccccagttggggtactgggtggccgccatgtcccctcccatcccaggtcccgttgtaacacaggacattaccacgtatcacacggtgtttcttttggccattttaggaggaatggctttcatacttttggttttgctgtgtctccttttatattattgcaggaggaagtgcttgaaacctcgtcagcaccacagaaaactgcagctccctgcaggactggagagttccaaaagagaccagtccacgtccatgtcacacattaacttgctgttttcacgccgagcgtcagaattccctggcccgctgtccgtcaccagccacggccgccccgaggcccccggcacgaaggaactgatgagtggagtccatttggaaatgatgtctccgggcggcgaaggggacctgcacacccccatgctcaagctctcctacagcacctcccaggaatttagctcccgggaggagctcctctcttgcaaggaagaggataaaagccagatctcctttgataacctcactccaagtgggacgctggggaaagactaccataagtcagtggaggtttttcccttaaaggcaagaaaatctatggaaagagaaggctacgagtcctcgggcaatgatgactacaggggtagttacaacaccgtgctctcacagcctttatttgaaaagcaggacagagaaggtccagcctccacgggaagcaaactcaccattcaggaacatctgtaccccgcgccttcatcacctgagaaagaacagctgctggaccgcagacccactgaatgtatgatgtcgcgatcagtagatcacctcgagagacctacgtccttcccacggcccggccagttaatctgctgcagttctgtcgaccaggtcaatgacagcgtttacaggaaagtactgcctgccttggtcatcccggctcattatatgaaactccccggggaccactcctatgtcagccagcccctcgtcgtcccggctgatcagcagcttgagatagaaagactacaggctgagctgtccaatccccatgccgggatcttcccacacccgtcctcacagatccagccccagcccctgtcttcccaggccatctctcagcagcacctgcaggatgcgggcacccgggagtggagccctcagaacgcatccatgtcggagtctctctccatcccagcttccctgaacgacgcggctttggctcagatgaacagtgaggtgcagctcctgactgaaaaggccctgatggagcttgggggtgggaagccgcttccgcacccccgggcgtggttcgtctccttggatggcaggtccaacgctcacgttagacattcatacattgatctccaaagagctggaaggaacggaagtaatgatgccagtttggactctggcgtagatatgaatgaaccaaaatcagcccggaagggaaggggagatgctttgtctctgcagcagaactacccgcccgtccaagagcaccagcagaaagagcctcgagccccagacagcacggcctacacgcagctcgtgtacctggatgacgtggaacagagtggtagcgaatgtgggaccacggtctgtacccccgaggacagtgccctgcgatgcttgttggaggggtcgagtcggagaaagtggtgtccagatgtccttccgaggactcggcgtatccgccaccagggacattaagaaaccgcacgtgatgtcgctatgctctaacgatcacctcagttctccctcggattctgggaacagatgaaactttttgcatcgcttgagtcatttttatcacaataatcctactgtgaagctgtcgttgagaacttaggttggcacgtagcgtctcaaggtatgcgttctctcaaaggaaagctatgcatcgctgcttcgttgtctgattttgcttagattttgctttggttaggttgcgttttggggtttgcctttttttgttgtcgcttaaatgcaatttggttgtaaagatttgattcctttgtgttcatctgttccgcttctcagcggtccatctcagcgtctcccttcaggaaccgctgagtgtcctctcttaacatccaagccttttaatgaaatcgtactgaaatctgtatcagctaagagtcctccaatcctggtcccattaactccaagtgcctttttgacagtgacaacagacagtccctcgctttttgttgttgttggttttcttaacccctttaatggaactgcctggattttatacagttattaaaggatgtctcttttgctttaaactgcatgctgccaagtgccatttggggtcagcatcctcgtttcaacacagtgtgctctctagttatcatgtgtaacgtgggttctgtttagcgaagatagactagaggacacgttagagatgcccttccctgctccatccctgtggcaccattatggttttttggctgtttgtatatacggttacgtattaactctggaatcctatgggctcatcttgctcacccaatgtgggagtctggtttgagcaagcgagctgaatgtgactattaaaaaaaatttaaaaaaaaaaaagaaaatcttatgtactatccaaaagtgccagaatgactcttctgtgcattcttcttaaagagctgcttggttatccaaaaatgaaaattcaaaataaactctgaagaaaaggaaaaaaaaat

SEQ ID NO: 92405 - DNA, 981 bp, Homo sapiens
  misc_feature (4)..(4): n is a, c, g, or t
  misc_feature (10)..(10): n is a, c, g, or t
  misc_feature (890)..(890): n is a, c, g, or t
  misc_feature (898)..(898): n is a, c, g, or t
  misc_feature (935)..(935): n is a, c, g, or t
gggnggagangagcaggtccgcgacgctgctgctgtgcctgctgggctgccacgtctggaaggcggtgacaagacgctgcgggagcccggcgccggagcccaagaggtgacgttaaaggtgcacatcagcgacgccagcacccaccagcccgtagcagatgcgctcatcgagatcttcaccaaccaggcctccatagcctctggcacctcggggactgatggcgtcgcctttatcaagttccagtataagctgggcagtcagttgattgtcaccgcctcgaagcatgcctacgtgccaaactctgccccatggaagccaatccggttacctgtattttcctctctgagccttggcctgcttccagaacgctctgccactctaatggtatatgaagatgtcgtccaaatagtatcaggattccaaggtgcccggccacagcctcgcgttcatttccagagaagggctctgaggttgcctgagaacaccagctacagtgacctgaccgcgtttctcacggccgccagctccccttcggaggtggacagttttccttatttgcgaggattagacggaaatggaacaggaaacagcaccaggcatgacctgaccccagtcacagccgtcagcgtccacttgctgagcagtaatggaacgccggtgctggtggatggtcccatctatgtcactgtgcccctggccacgcagagcagcctgaggcacaatgcctatgtcgcggcgtggcggtttgaccagaagctgggaacgtggctgaagagcggtctgggtcttgtgcaccaggaaggcagccagctgacgtggacatacattgccccccagttggggtactgggtggggccggccaatgtttcccttcccatttcccaaggtncccggttnttaacaacaagggacattttaccaccgtttttcaacnacgggggggttttttttgggcccttttttaagggagggaaaggggg

SEQ ID NO: 92406 - DNA, 451 bp, Homo sapiens
tccactgttaaaagttcatgccatcattttgacatttagcgtcagactttctctttgtaaatccctcttcacgttaccaatgctggtctcagagctcaaactgtttcaaaaccataacatttcttagtgagtgattgatctgtattatgtgtccagccatcagggggatcttgggatgttgcttgtgtaaactgtaatccaatctgatgctgtgcgtttagttacagtctttcatagacctattggcgatactcagtcctcctggatttaggaatagggcttatctgataccttcagggggaaaaaaatccattcatttttctctcttccccacttaaataactcaactcatgtggtaacactgtaggatcattgtccttccagttcctctgcagctcatattgctacaatatttcttaagtatttggttacctgaaggacaatgtgattt

SEQ ID NO: 92407 - DNA, 469 bp, Homo sapiens
ggggccacagtgtatgtgagaatgtgatctcattcaaatgggtcagtcagtagagttaccaatagcaaatgtctttaggtttagatgtgtttatagttacaggaggctatggaaaggtgaatgttaaaaggctaaatgtctaaaacaaaacaaaacccttggagtttcaggtagtgccacgcaatgaatgcagaccccctattgactattgtttattcctttatctctatagttattactcaatttttttttttttttttgagacggagtctctctctgtcgcccaggctggaatgcagtggcacaatctcagctcactgcagcctccacctccctggttgaagcaattcccctgcctcagctactcgagtagctgggattacaggcgtccaccaccacgcccagctaatttttttgtatttttaatagagacggggtttcatcatgttggccagactggtctcaaact

SEQ ID NO: 92408 - DNA, 287 bp, Homo sapiens
ggcccctggctcactctccattgtcacccagcaacatacttgctgtactctggtcatactgctctttgtttggcccctcatattcaaaagactcccatccttatcacatgcttctctttcccctgatcaatgcatcagcccctattcatccttcagacctcatcctaatcattacatttttagtattcagccgtaagactcagagcctcatgtagctctcatagcagcagaactatggcatctgtttgcctcttctattgtcttttttcccttacaccataagctcc

SEQ ID NO: 92409 - DNA, 398 bp, Homo sapiens
gaagccccggtgggaatgtgcacagctcctagagtaccacagaggctggactcaacagagccttccatgacccgctcagctccaccctctgccccttcctgcagctccccagccatccctgcagtgcccccaaagctcctttacatgcaagcaaagcaagcccaagattaaccattagcttttcttttcctaggtttctctacagattaataaaatgtactttatgtacaattcttcccccaccccacccccaagcctggaaaaggcttttgctaacaaaataggaagaaacagattccagccacgcagtcttcagccctggagattcagatcgtgggcagtgccaaagatgctggaggctccgtgaaatctgtttctccctagaagctactgtttcg

SEQ ID NO: 92410 - DNA, 1887 bp, Homo sapiens
gacaaatataaaaaccaagactatcacccttctgtgccctccaatacttttgtagagttggctgttctaacacctaaagagcctagcgacactgctagttttaagccatctcatgagggacctttgtcgcattaggttacaacttgtgccaaaagaactagagggaaaagatgcggcctgagccacacgctactgtaagggccggagaggaaagcaggccttggcctcgcttgttcctgggctgtttttcgtaggatggatttcatttgtcagtcctgcagcgtggcacacttaagggaatggaatgtatcatagggtttcagtttcagtaaacattagcgggcattatctgtaaacagtaactagtttattttgtgttaaattgggaagaacctctttcttctgccacgggtgagatgatactaaaagcaggagaaaataacaaatgagaagagcccttctcttctcagcttctctcaagagtagagactggtgaaaaggggacaggaagaggaatccagctgaagagtggaaagttaacaagaacatcaagaggtacatccctagagagcatctctgggtcactcccaggatgacctcatttttctggaagaggtacatgtgctagctgcatagtaacctatggcacagcaaaagcacaaggaagcgccatttggttttgtttagggacaattattggtagcccaacctatctgaagaattacttttaattaaaaggatggttatttttaggggaccagaaattacttagttgtattcacttatgagttgagcagttagagcagactctgacatctgacacttgagtaaagggatgtttttctcagtactgggtcttttcattagacggatgcatttatatagtgtcagtttttatgcttcactaaatgataaggcctctgtttaaacatgaccattatttacctcacgatttatatttttctcaatgcctgaatacacccaatagcaagcaccaggtggaggttaagacccacaaaaatggaagcaagcttcaagtttataggacatttaaccatactaaccccaatgtcaaaaacaatgtaaattatactcctactgtaaaaggtcaactgatatggcacgtatgtaaaaaacctggcatacaggaaaaaattaatgcatgacagtctaatatattatcctgatacatggattaaattttctttccactaagtattaactatagttttaagcattgattctgcttaataactaaaatgtaaagaccttaccttgtagggttgtaatttctcattaacagaaatctgaacttatacaagtttaactgaaatttatctttatttcaagatatcagaagacatttacatatttgcattttctgtcttgctactatctgcgtatatgtaacagcttttctcaaggcttcaagataggaattgttttatgcctttgtatcacagacctaagagaccaaaattatttgaagatggagtggggacaaaactagggtctctgcagtccctactccatgtaccatccattagctcacctctgtaggtattactaaagtcatgagagttaaatccaacgtgcaactttaatattgcaattccaaaaaataaagctgtatacaactcttggaataactcaccaaaataaatagctttttaatataaaattggttagtgctgcttaacagtctgtgttcatgaagaataaggtgttaataattgtgctcacatttgtttaggagccttccaaagacagtatcacaccttgacgtgttcgacacttgatgtgtttgacaggcgatatgattgcttactcactcacataacccagtgtttggtacctactttcaaacagtaattaatgtgctcagtc

SEQ ID NO: 92411 - DNA, 831 bp, Homo sapiens
  misc_feature (744)..(744): n is a, c, g, or t
gacaaatataaaaaccaagactatcacccttctgtgccctccaatacttttgtagagttggctgttctaacacctaaagagcctagcgacactgctagttttaagccatctcatgagggacctttgtcgcattaggttacaacttgtgccaaaagaactagagggaaaagatgcggcctgagccacacgctactgtaagggccggagaggaaagcaggccttggcctcgcttgttcctgggctgtttttcgtaggatggatttcatttgtcagtcctgcagcgtggcacacttaagggaatggaatgtatcatagggtttcagtttcagtaaacattagcgggcattatctgtaaacagtaactagtttattttgtgttaaattgggaagaacctctttcttctgccacgggtgagatgatactaaaagcaggagaaaataacaaatgagaagagcccttctcttctcagcttctctcaagagtagagactggtgaaaaggggacaggaagaggaatccagctgaagagtggaaagttaacaagaacatcaagaggtacatccctagagagcatctctgggtcactcccaggatgacctcatttttctggaagaggtacatgtgctagctgcatagtaacctatggcacagcaaaagcacaaggaagcgccatttggttttgtttagggacaattattggtagcccaacctatctgaagaattacttttaatagcagtagagcnactctgacattgcactgagtaaaggatgttttctcgtactgggcttttataaaccgtggcctatatgggcagctttatgcttataac

SEQ ID NO: 92412 - DNA, 376 bp, Homo sapiens
tgcaacacacagatgcaacatggtcatctaggattagggaatgatttaggaatacagggacattttctgattttgaaacagcccaatttccaacctctgcatcagatctatccacaggtgggctgtgcgtggtggttcatgcctgtaatcccagcactttgggaggccgaggtgggaggatcacttgaggtcaggagttcaagaccagcctgggcaacatgaaaccctgtttttaccaaaaatacaaaaattagccaggcgtggtggtatacgcctataatcccagctactcaggaggctgaggcaggagaattgcttgaacccaggagatgaagattgcagtgagctatgatcccaccactgcactccagcttag

SEQ ID NO: 92413 - DNA, 226 bp, Homo sapiens
tgaggggggtagattggctaaaaggcccgtctgggctggggagggggctgcttgggcaggagggtggcaggctttagcagcaggcagcaggagaggcccaggagagtgacggagggagggaggaactgctctggaaatcccctaggccagggcctgctctctgggtcacattcttgcagccacctccctctctcccccagtatcccctcctcccacttcctcttcc

SEQ ID NO: 92414 - DNA, 238 bp, Homo sapiens
tacccgcctgggtcacagtgcctagtacttgggattcacaacggtaccgttaaccactgagctgtgctgcctgggccaagctcaggaatcattcatttctttgagttcttttattttcttagtcttaagagctgttcttcttggatggacagagtattagctgttaacatgggagaaaactacttgaaaaccagtttttcccttcatagaaagaaaatcattgttaatgttcagagca

SEQ ID NO: 92415 - DNA, 988 bp, Homo sapiens
tcatctgttttgatcactgaaaagttgtctaaaaactgtgctcattatacacagtttatagtattttaatactttgtttatagtatttaatagcttctgaaaactttaagagaacatactaaaccaaggaactatttattaatggtaatctatatttagtaataaatatatttgtaacttactaaatgtaagtttactaaatgtagattactaaatcactgagtaaatatttcttgaatatttggacaagagatggggggagggagaatgacttgaccctcaagaaacttaactgctacctttaaaaggttataatgaagctgggcacagtggtacacacctgtagtcccagctactcaggaggctgaggcaggaggaccccttgagccgaggagttcgaggctctgtctcttaaaacaaaaaaagttataaaaatattcagactggagggttcctaacttttaatacttaagcagggtctttaccacagagttaaatttaaaattctgtttagaatggtaacaaatttaattatgtacaaaacagcatcactttagtgttaggatcagtgttactcaaagtgttgtaatgttaataacaagcatttaaatcacattgtttgaaaactgggatctacaaaaaatatgattccaataattaactttttaattatgggaaaggcaagggaatgttcagtgaatgtaaaaaaaatatactactgagcaaacaaattgttttaatgaattttgattttctgttttaattttttggtacattgactcttcttgacatggcactttgctattaattaaaaaaaattaaaccccaaagacaaattaattctgtatttaatgcagatttaattcttgactagctgtaatgcttaaggagttggcagtcttgttggcaaaacaataaaataggaattaagctgaaatgtaaaattgtgtaataattaggtttcattaaagtatatatagtttcctta

SEQ ID NO: 92416 - DNA, 434 bp, Homo sapiens
tctaacatgtatagagtgcctgttgccatagtaatcactgatttagcacaacgtgttttttcctccttctttaaaaaaaaattagttcccattcctgccaaaaaggaacatattaatctacccatcatgctagcttggggaagttgaaggccacagaagttgtcatttgtgcaaagactcccagaaagtcagttgttagcatcttctgtgccaagaactctaccccaatcccagagaggaaatgagacactgaagtaaaagattctggagctgaggaggtaacatctctcttcttttctgcaaagtcccacaaaagatgtgcacaaatgctcatgtctgtgtaaacaaattcacctactgattatagatttaacagaccactgatgtccagaaaacagggactaactagacagtgctctttaagacaaaagttt

SEQ ID NO: 92417 - DNA, 370 bp, Homo sapiens
tttcttttttcagagttttgctagaccaagaatgataaggaaaactgcttcttctttctctgtaaagttttagttatgaaaaaggatttgtgaggttgggcttaagctttagccaatctggtgtgctttgcatgtctttctgtatggtcagtagcaaactttgctgcaggcctccatcttgttttacgtccttggaagtgtgacctgtaaccatgtggcaatgctttgtttagcctccgccattttacaatggtggcccaggctcaatcctagctcaggcagagtcctttctggtttgatatctatgtgacttttgctatttgtttattctcttcctccccaccaactgccttgggttttcctttctctg

SEQ ID NO: 92418 - DNA, 387 bp, Homo sapiens
  misc_feature (8)..(8): n is a, c, g, or t
tgtgtttntggattgctaccaaccttagccaagcgtggactagtggtgttgatctgatgccactactgatcagcacgggggttttgacctgctccgtttcctgacctgggccggttcacccctctttagccaatctggtgtgctttgcatgtctttctgtatggtcagtagcaaactttgctgcaggcctccatcttgttttacgtccttggaagtgtgacctgtaaccatgtggcaatgctttgtttagcctccgccattttacaatggtggcccaggctcaatcctagctcaggcagagtcctttctggtttgatatctatgtgacttttgctatttgtttattctcttcctccccaccaactgccttgggttttcctttctctg

SEQ ID NO: 92419 - DNA, 1723 bp, Homo sapiens
tgctacccgcgcccgggcttctggggtgttccccaaccacggcccagccctgccacaccccccgcccccggcctccgcagctcggcatgggcgcgggggtgctcgtcctgggcgcctccgagcccggtaacctgtcgtcggccgcaccgctccccgacggcgcggccaccgcggcgcggctgctggtgcccgcgtcgccgcccgcctcgttgctgcctcccgccagcgaaagccccgagccgctgtctcagcagtggacagcgggcatgggtctgctgatggcgctcatcgtgctgctcatcgtggcgggcaatgtgctggtgatcgtggccatcgccaagacgccgcggctgcagacgctcaccaacctcttcatcatgtccctggccagcgccgacctggtcatggggctgctggtggtgccgttcggggccaccatcgtggtgtggggccgctgggagtacggctccttcttctgcgagctgtggacctcagtggacgtgctgtgcgtgacggccagcatcgagaccctgtgtgtcattgccctggaccgctacctcgccatcacctcgcccttccgctaccagagcctgctgacgcgcgcgcgggcgcggggcctcgtgtgcaccgtgtgggccatctcggccctggtgtccttcctgcccatcctcatgcactggtggcgggcggagagcgacgaggcgcgccgctgctacaacgaccccaagtgctgcgacttcgtcaccaaccgggcctacgccatcgcctcgtccgtagtctccttctacgtgcccctgtgcatcatggccttcgtgtacctgcgggtgttccgcgaggcccagaagcaggtgaagaagatcgacagctgcgagcgccgtttcctcggcggcccagcgcggccgccctcgccctcgccctcgcccgtccccgcgcccgcgccgccgcccggacccccgcgccccgccgccgccgccgccaccgccccgctggccaacgggcgtgcgggtaagcggcggccctcgcgcctcgtggccctacgcgagcagaaggcgctcaagacgctgggcatcatcatgggcgtcttcacgctctgctggctgcccttcttcctggccaacgtggtgaaggccttccaccgcgagctggtgcccgaccgcctcttcgtcttcttcaactggctgggctacgccaactcggccttcaaccccatcatctactgccgcagccccgacttccgcaaggccttccagggactgctctgctgcgcgcgcagggctgcccgccggcgccacgcgacccacggagaccggccgcgcgcctcgggctgtctggcccggcccggacccccgccatcgcccggggccgcctcggacgacgacgacgacgatgtcgtcggggccacgccgcccgcgcgcctgctggagccctgggccggctgcaacggcggggcggcggcggacagcgactcgagcctggacgagccgtgccgccccggcttcgcctcggaatccaaggtgtagggcccggcgcggggcgcggactccgggcacggcttcccaggggaacgaggagatctgtgtttacttaagaccgatagcaggtgaactcgaagcccacaatcctcgtctgaatcatccgaggcaaagagaaaagccacggaccgttgcacaaaaaggaaagtttgggaagggatgggagagtggcttgctgatgttccttgttg

SEQ ID NO: 92420 - DNA, 682 bp, Homo sapiens
ctgtatgtgtttttaaaatcacaatgagaaattaaaaaataaaatgaaaataagaaatgcttagcatataagaaagtgaagcatcgaagcccacgaagatacagcgagtttgcttactcccagcttgtctggcactgtccagatcttactgccgatagccctgcaccctgagtataacctcagtcccaggcacaccaggtgttcggatattctatatgaaaaccagagcatttaaagaaatggtgtaaacagaataaaggtattttgttgaaagtaaagtataatgctatccttacttggtaatcccattgcctttaaagtgaagcatattactgggatgtaaacctgtatttttctctcttggctctttaacagattctccagatctgtcttatttatatttccttcaaaatacttctgtgatttctatcttttcttgtttccaagccacacttcagcttcattccttatgcacaggagagcctgttcttggtttcttttcttccaggttctgatttttaatctgcccaaattgtaactgggacatttattgacaaaaagaaatttgaacatgtaacagccttttttttccttctaatttttaagtggtttctaattaggtaatttcctgaaggttaaagttcttaaagtctctgatttattagttcatcattcttaattt

SEQ ID NO: 92421 - DNA, 628 bp, Homo sapiens
ggcaacatggtgaaacctgtctctactaaaatacaaagcaaaaggaaggggccggagcttacaaaagatttgcactggttatagtggaagcttttaagcatgtttcaagtgaaactgatgagagttgtaagaagcacagaagcacattggaagagtgttgtctatttgggaagaaaggtctgtttatgcaaatgatgtatttagaggccaggcgtggtggctcacgcctataatctaagcactttgggaggccaaagtgggaggatcactcaagctcagaaatttgagaccagccggggcaacatagctagactccatctctaaaaaaaaaaaaaatcagctgggcatggtggtgtgctccagtggtcccagctactcgggaggctgaggtgggaggatcacttccacccaggaggttgaggctttagtgagccatgatcgcaccactgtactccagcctgggcgacagagcaagaccctgtctcaaaaaaaccacaaacaagcaaacaaacaagaaacaatgaaacaatgtattagagcaacttaagctctgtgtggtgataagaagcctaggaagcaaatttataaacagataaagatgaatgaaaataaaaactgttcttctctg

SEQ ID NO: 92422 - DNA, 396 bp, Homo sapiens
gagaattctcatagttatactaaacctgaggaaaaataacataatattgactgtttaaagagaactctgttttcaagcctgtaaaactaattgatataattttctacctagaatttagatattatgaaatttttttttgttattgtttttttctttaggatcacagtatcacgtctcatattaacactttccttttggaacgcaagttagttttatcattgtttcctaaaagtaggttccttgctaattttaaataaattgtgtatatatgcatgcaagcatattatgtgtttaaaagtacagagaaaaggaaaagaaactacagaagctcaatttttatatgctggtgttatctaatgaacagactctttgctagttgctccttttaaatttctg

SEQ ID NO: 92423 - DNA, 389 bp, Homo sapiens
cctcgattctacctcagctcacgtttgttgctggcccactgtatgccatcacacaggtctcattttaaccctcacaccaccccacagatggggtcatccctcccattgtacagataagaaattgaggctgagagatgcccaaggccatgcatctaggaagtgcaacaccatgttttaagcctcagtttctccactttcagtccagagttcttcctgcaatgtatgcccatggccctgagccctgtactctgtgccggatggagcctgtaatggttggttatttcatgtctttgttgattgaggcacaaggaaagtcatgtgctttggagttggataggcctgggtgggaatcctggctttaccactgaacagctagagacgtgggcatg

SEQ ID NO: 92424 - DNA, 533 bp, Homo sapiens
gctacagttaacctctgggaggcagataccagaaaagctccatttcgcagcaaggtttctgcagatacagaacttatcttgcctgtctgccagtgtgggtcatggaaaaacttacggctgaacagactggggattaaacccccattctggcccaaagttgatgtttgagatttcaactcttaaggatggatcagtgatgtcatctacaaaatggggatgagcacttgggtaccacagtgagggctaccctaccccagaccttggggaataaaacgaatatggacacttcaaagacaagtgtggagaagccaaattaaagaaacagaatgagtcttcagccaggaagattcaaggattgcttgactgggtatctccagcatgtattaaaagttgtagttggccgggcgtggtggctcacgcctgtaatcccagcactttgggaggccgaggcgggcagatcacgaggtcaggagatcaagaccatcctggctaacatggtgaaaccccgtctctactaaaaatacaaaaaattt

SEQ ID NO: 92425 - DNA, 536 bp, Homo sapiens
ttctatgatgcatataagtaataattacattttttcatgtccctgaaagtaatacccaaggtgctgtccatttcgtgcttcgtgcctaaaaatgcctttcttttccatcagaaagcttatcagaagtataaatgagagtactcttcaagccaaatgcggtggctcatgcccataatcccaacactttgggaggccaaggtggaaggatcatgatcactcgagtccaggagtttgagaccagcctaggcaatatggtgagaccccattgctacaaaaaatacaaaaattagccggcataatggtgtgcacctgtggttccagcgactctggaggccaaggtggcaagatctctcgaacccgggaggctgaggctgcactgagctgtgattgcactactgcactctagcctaggcaacagagtgagaccctgtctcaaatacaataaagagagttctcttctggaaacttagaactgttttaatttagaaaacaaattattcatagttttaaataaataaatttaatgttaatcagta

SEQ ID NO: 92426 - DNA, 324 bp, Homo sapiens
aaagtctgaaaaagcacaaatagacaatataaggtcacacctcaagaagttcgagaatcgagaacaaaccaaacccaaacccagcagaagaaaagaaataaccaagattagagaagaacaaaataaaattgaaacaaaaactacaaaagataaatgaaacaaaagctggttccttgaaaagaaaaataaaattgatagaccattagcatgattaaccaagaagagagaagatccaaataatctgaattagaaatgaaatgggagatattacaaccaataccatagaaatataaaagattgttcaaggctactataaatagcttt

SEQ ID NO: 92427 - DNA, 1357 bp, Homo sapiens
gtggctgagctctcccggtgacagaaacccctgccttgtcgtttctgtaacacaccaccatctagctgtgtcgcaggccctgccctaagcctcagctctcgtggactagtcagagatgagaccgcggctcacagtgctgtctgccgtgatttctgttgtccccgagctttgctgctgtgaggagacccagcccaggccacctactcctcgcagtcctgcagccctctgaaactccctccctgtgccctgcccctcctggtcgctaaacccaagccatgtgttttccgtccttatcttacacttatcttaccgttcttatcttacagcccttaacgctgttgtatgctttttctggaatgttctctggccccggctgcttgacctgtgctctgtttgtcttctgcctcaccagctctttgcacccctcttctgcccatcaattaaacatcagtgttcttgggagtcaccctgggtccatccttcctgcctgtgctgggccatctcatccactcccatggcttgaaatacactgatgggctttgctgagcacctccatgccgaaaacccccaaatccgtattccagatcagatactaacagtagttattgcctagagactgtccaaaggactttgcattgattttttcacttaattctcacagcagacccatgaggtgggcccccactttaaaaaatgaggaaactggccgggcacggtggcttgtgcctgtaatcccagcactttgggagatggaggcaggaggattacttgaggccacaagttcaggaccagcctgcgcaacatagcaagatccccatctctacaaaaaaaataaacaattagccagggcatagtggcatatgcccattgtcccatctactctggaggctgaggcgggaggatcgaagttcacagaacccccataacccatccagctagccaggtagaaggcctccaggtccgacgttgcattccccagggtctgatgctgtctgcaatcttcatccctagcagaagagctaaaatgccattgtgctggggaacaaaaactgagtaacacttttaggatgttaaaatttcaagtgtttacatttttttttttttaactcttagctcattgctcactccagcttttgctagtctccaatttctttccttagattaaatcaatcaagagccagcccctaatttaaaaggtttcctctccttttgtcatgtcttttaaataattttttggccaggcgcaggggctcatgcctgtaatcccagcactttgggaggccgaggcgggcagatcacctgagatcaagagttcaagactagcctggccaacataatgaaaccccgtctctactaa

SEQ ID NO: 92428 - DNA, 547 bp, Homo sapiens
cagcagagaggcccccgaggctgcagggggcagtgggaagaggagcagaataggacaggaccaggcattgagagcatagggaccagatcgcactgggctttgtcagccctcacagggacttggttggaagtcactgagagattttaggcagaggacagaggtgatctgaacttctgtgttaataggctgacagctggtcagaatagacggaagtgagggtgggagaggaacaaaggcggggaagccagttagaaggtcattgcaatatcaggtgaaggtgactccgacggggcagcatcagtggagtgtatgaagcagtcagattctgaaagcagggtcgagagatgtgtagatggatcagatgtgggctgtgagaggagagagggggcatggatgacttcagagtttttgtcctgcacagtagaagaatggagtcctagtttcctagatctggaacattgcagggggggaagatgctggagagaagatcaggagcttggatttgggtgggttaaatcaaagatacttacacaagtccaggcagaga

SEQ ID NO: 92429 - DNA, 646 bp, Homo sapiens
atggaaggaggggtggattccaaagaggcaggagcaggcctcagggagtgtggaacgtgcttattattttcactgccgtgacggttccacgggaatacacatacgtcaaaactcatcagattgtacacttgaaacgttgtttattgtatgtcaattagggtttttcagaactgttaaaaaataataatggtgttggctcttgtaataggcagaactttgagggcaaaggacatgggatgggaatgtcttagacaaatgggaaacacccaaagaccagcggacgggcaacagggagggaagatggaagcctgagaagccaggggccccacaagatcttgtgtgtcttgagtgactgctaagaccacctctgtccactcctacgtagctgaggacgagtgagaccaggctcctcagctactttggtgaacaggcacagagaggcagccctcggagacagcccgtggacaagcggctgtaactgccactgccaccctgaccccagtggggcgaaggagcctcaaggccctgtgtgggctgtgccaaacagccacaagcactttttggagttctgagatgctagagttggtgtgtcgagtgtcaggttcgccgtgtaccctgcagatggtctctcctcatctgacaaggc

SEQ ID NO: 92430 - DNA, 1360 bp, Homo sapiens
cgcggccgccgcggccgaccccccgcgctgctggcctcggcgctgggcctgggcggctgcgtgccctggggtgccgggcgactgcggcgcggccacggccccgagcccgactcgcccttccgccgcagcccgccccgcggccccgcctccccgcagcgctgacctccacgcccggacccctggccaccccgacaagcttcgccgaggtgccgaccgaccgactgatcgcggacgccggctggaaggactacggatccgcaggaagaggcagttgggggccaggggcccagtagaggaggctgagctccttccaactcctcagaacctccactctatggatctggacctctggattcggctttctccctgggcactgccttcaggaagacgttgagaattgaccttacacaatcccagcgccctcctcacaggagcctttcactttacagtggcaaggggctggttctggagaactggctgatgctctgaatttcttcatataccccacatttgactttggcttacactgtacaattggagatgttgctacaggtccctgagatgcaatcagattaagcgtagcaagcattgccaatgggaaagtcaaaataatttattttttttccctttccccctaccccatccccagccaagaatttcttttcaagatatcgtcatcattcttaaacaacattcttaacccccagctggggtccccattttaatagatgtcattgcttcaagtctaacggcgccgggaggcctgtttgagggaaaacattagtttgaaaaatccccgttcccttcatccactgcccttgttctccacgtgggagtgtgcttgtggcccctcagaaagatagtctgctggctcctaggggttggggtgggggacacacctttttctcaggaagaggtgatggcaatgtaaaacatctaagcaaagttttaaatgaaaaaaaggaaacacatttaaacatcctgataatggagggaaggggggcacatttacacatagcccagaacttgtagaattctgcatagtgaatgtatattgaattagtctcctgccttatacattcaggaggaataaatttccataatgtaaggcaaatgcatggggttctgaggttcactttgcaagtgcccttgctgcctttcctctgtgtctattatggctctttaagttgacggttcctggagcagcttgtatttagtttcgtttggcagtctggccctgttgactttgatttgcagaccaattctcccttgacctgactcacagccgcctgctcttacccccctcctcaggaagtcttcctcattaaaggatgtgatgacggagctcagggatgagaat

SEQ ID NO: 92431 - DNA, 1107 bp, Homo sapiens
cgcggccgccgcggccgaccccccgcgctgctggcctcggcgctgggcctgggcggctgcgtgccctggggtgccgggcgactgcggcgcggccacggccccgagcccgactcgcccttccgccgcagcccgccccgcggccccgcctccccgcagcgctgacctccacgcccggacccctggccaccccgacaagcttcgccgaggtgccgaccgaccgactgatcgcggacgccggctggaaggactacggatccgcaggaagaggcagttgggggccaggggcccagtagaggaggctgagctccttccaactcctcagaacctccactctatggatctggacctctggattcggctttctccctgggcactgccttcaggaagacgttgagaattgaccttacacaatcccagcgccctcctcacaggagcctttcactttacagtggcaaggggctggttctggagaactggctgatgctctgaatttcttcatataccccacatttgactttggcttacactgtacaattggagatgttgctacaggtccctgagatgcaatcagattaagcgtagcaagcattgccaatgggaaagtcaaaataatttattttttttccctttccccctaccccatccccagccaagaatttcttttcaagatatcgtcatcattcttaaacaacattcttaacccccagctggggtccccattttaatagatgtcattgcttcaagtctaacggcgccgggaggcctgtttgagggaaaacattagtttgaaaaatccccgttcccttcatccactgcccttgttctccacgtgggagtgtgcttgtggcccctcagaaagatagtctgctggctcctaggggttggggtgggggacacacctttttctcaggaagaggtgatggcaatgtaaaacatctaagcaaagttttaaatgaaaaaaaggaaacacatttaaacatcctgataatggagggaaggggggcacatttacacatagcccagaacttgtagaattctgcatagtgaatgtatattgaattagtctcctgccttatacattcaggaggaataaatttccataatgta

SEQ ID NO: 92432 - DNA, 1378 bp, Homo sapiens
cgcggccgccgcggccgaccccccgcgctgctggcctcggcgctgggcctgggcggctgcgtgccctggggtgccgggcgactgcggcgcggccacggccccgagcccgactcgcccttccgccgcagcccgccccgcggccccgcctccccgcagcgctgacctccacgcccggacccctggccaccccgacaagcttcgccgaggtgccgaccgaccgactgatcgcggacgccggctggaaggactacggatccgcaggaagaggcagttgggggccaggggcccagtagaggaggctgaggtgcggtcttagcggctgctccttccaactcctcagaacctccactctatggatctggacctctggattcggctttctccctgggcactgccttcaggaagacgttgagaattgaccttacacaatcccagcgccctcctcacaggagcctttcactttacagtggcaaggggctggttctggagaactggctgatgctctgaatttcttcatataccccacatttgactttggcttacactgtacaattggagatgttgctacaggtccctgagatgcaatcagattaagcgtagcaagcattgccaatgggaaagtcaaaataatttattttttttccctttccccctaccccatccccagccaagaatttcttttcaagatatcgtcatcattcttaaacaacattcttaacccccagctggggtccccattttaatagatgtcattgcttcaagtctaacggcgccgggaggcctgtttgagggaaaacattagtttgaaaaatccccgttcccttcatccactgcccttgttctccacgtgggagtgtgcttgtggcccctcagaaagatagtctgctggctcctaggggttggggtgggggacacacctttttctcaggaagaggtgatggcaatgtaaaacatctaagcaaagttttaaatgaaaaaaaggaaacacatttaaacatcctgataatggagggaaggggggcacatttacacatagcccagaacttgtagaattctgcatagtgaatgtatattgaattagtctcctgccttatacattcaggaggaataaatttccataatgtaaggcaaatgcatggggttctgaggttcactttgcaagtgcccttgctgcctttcctctgtgtctattatggctctttaagttgacggttcctggagcagcttgtatttagtttcgtttggcagtctggccctgttgactttgatttgcagaccaattctcccttgacctgactcacagccgcctgctcttacccccctcctcaggaagtcttcctcattaaaggatgtgatgacggagctcagggatgagaat

SEQ ID NO: 92433 - DNA, 357 bp, Homo sapiens
cggccgccgcggccgaccccccgcgctgctggcctcggcgctgggcctgggcggctgcgtgccctggggtgccgggcgactgcggcgcggccacggccccgagcccgactcgcccttccgccgcagcccgccccgcggccccgcctccccgcagcgctgacctccacgcccggacccctggccaccccgacaagcttcgccgaggtgccgaccgaccgactgatcgcggacgccggctggaaggactacggatccgcaggaagaggcagttgggggccaggggcccagtagaggaggctgaggtgcggtcttagcggctggtgcgttcgagggtcggtcatggcgtgtggggggctg

SEQ ID NO: 92434 - DNA, 273 bp, Homo sapiens
gcacattttcattttgcgctaagccctgcaaattctgtagccagtcctaggcctaagaggccagggatcagggatggtgcagctctctgtcttcccgccttctccctcttcaggaatggctctcccaccccacagacactgggacatcagccttgacgcttcctttttccctcaccacgttcccttcatcccaccttcctaacatagctgagattagcttcctcacatcccctcaccattgctgtgtttgcggcctccatcatctcttgcctc

SEQ ID NO: 92435 - DNA, 521 bp, Homo sapiens
cagtctataaacaaacaagatttgactatatattacctataagaaatctactttaaatatagagaatcagaaaagtaaagagatggagaaaggcataccatgataacaacaatcaaaagaaagctgtagtatctacattaatttcaggaaaagcagacttcagaacaagaaatattgtcattgctaaagagcaacattacatactgataaaagcacaaggagtgaatgtatacaaatcagaaaatattaggagtgcaggaaatcacaggatgaaatgcagaacgtgccaaaaaattgaaccatattacaaatacatgaaacaacttctctgaagcttcagggatgggggttactgacctaaattactttggaagtttagtggagtctttaaaactcaacaaaatgtactgcacagaaacattgtactttatttgatagaactgtttttcacatgggttgatgttgacaattgtaaaaccactctaacatgtattctggaaataaatatgtaaatggactgt

SEQ ID NO: 92436 - DNA, 401 bp, Homo sapiens
aaattaattgtaaattgcattttcactacagctggaaaaataagaaaattttgcacagagccaagataaaaatagatgtcagaaataaatcattagtcttatatagcatttgtttcaaaaaaaaaattttttttttttgagacaaagtctcgctctctcacccaggctggaatgcattggtgtgatctcggggcattgcaacctctgcctcctgggttcaagtgattctcctgcctcagcctcctgagtagctgggatcacaggcacgtgccaccacacctggctaatttttgtatttttagtagagatggggtttcacgatattggccaagctggtctcgaactcctggccttgttatccacaagccttggcctcccaaagtgctgggattacaggcgtg

SEQ ID NO: 92437 - DNA, 402 bp, Homo sapiens
aactagcagtctctgagaactcttaaaggcctgaagatgcctgttaaaaatggacagatctaagatgcaatacagaggagatgctgggagattataaggatggagagtagatgagaccagttgtggttgctgggagtcttcattagtagtggtaagagctgattcaatgacagccaggcagaaagggaaggggaactgttttgtaggtttggggataggaaagaggggggtcaagtatagtcataagcagctgcctgcacatcagtagtggagcccaggagagcacaggccttgcaggtcctttggtgtgtggtacataaacgtgtggtaaatagagggattaatctgcagaaaactccctgcatctcagtagctctcaagtatgtccaggcccacttcttt

SEQ ID NO: 92438 - DNA, 224 bp, Homo sapiens
aaacattacaaattagtgattaattgcatttaaagcctagttaagactatttaagactattatgcataatacaggaaaactacctgtattatttatagtgggtgccttctgaaggatctgaaggagaatcagttctatgcctctctcctcattcccaggaggtgcctggcattccttggcttgtagacgcatcaccctaatctctacctctgccttcacatggt

SEQ ID NO: 92439 - DNA, 316 bp, Homo sapiens
gcgtgtatctcacacattgttccatgttcaatgtgcctaatacaaaacaagaatctacctacaaggggtttaccatcttgctgaggatgtaagacttgtgcacaaatacccgccatccaaagcagctcaagaggctatgctagtgttaataataataaataatagtagccatgtccctgaggaatgccaacccatctattctactgctggaggcaatacggagcctctgcagggctcagtgtccacatctgtgaaatggggttgtaggaacactgactaagataaggaatagagtaactactggcaggtaaaggca

SEQ ID NO: 92440 - DNA, 778 bp, Homo sapiens
agatgtcagttctgtttcattaacaggatactcagtcacattggcagaaaatcctgtggctactgtttgagaatgagtgatcattatttttagaattattgtgtattagaccagaaagtaactcaaaagacccaccagttttgccattagttatagatactgagaccattcattcattcattcattcattcaataatatctatgctctataaagcctgtgctggtctcaactagtcaaagacactgaccctaaatcacccagcaaatcagtgataaagctgtgattccaagccaagaactttggcagatcactgtaatcaatacacctagtaaaacaccaacttacactgtgacttcattaaaataatgtactatttataaattgtaagaatttatgaaaaacagaaacagtgtaagcagcgctggacatctagaatgcctcactgttttatgatctaaggcacatcagattgtttttcccaattatcatggagctagttccctacacttcacctcagtgctcttttgtcaaccaagataaacccctgatggcgaagcaggggcaggatagacagagtccccaggtggagtactagaactaacacttaccattatgtgtgacctctgacaggtcacttcacctgcaggcacagctagagcaagcagtgacgcatgcgcaggggtgtcccttgcctccaatgcagccaccatcccagctgtggtgctgaggatcacactagccccaactaagacctgcggctggactcctgcctctgct

SEQ ID NO: 92441 - DNA, 308 bp, Homo sapiens
gcctgaatgaagtttctctaatactcatattttttttgtaacgcacatcacagtcttcttgcactcaggaccactaggcagcgttttagcactaggggcttgttttaaacagtgaaaccacaaacaaaaagcacagaagcatgaaaaacatggcgccaaatagaagaccatgggagggatgcttgttcacagtgtgagagctgaaatgaggaggcagagcgttgccatgtttgaactcaggtgggaatgtgcatatcaggtggcttgaatttttttctgctctgtgagtgtctgaatgacagagtgcc

SEQ ID NO: 92442 - DNA, 148 bp, Homo sapiens
catctgtttctctttcattttctctatgtcaaatattccctgtgtcaggtcgggtgcgttggctcatgcctgtaatcccagcactttgggagtctaaggaggaaggattgctcgagctcaggagttcaagaccagcctgggcaacatt

SEQ ID NO: 92443 - DNA, 436 bp, Homo sapiens
ccctgagcatctatcctgtgtgatagtttcaactttgctgagatgtaattcttatgtaaacagaagacaagcgcttggaggcaggtgagtgagccccttctaacagtccagcaatctgcctttcagtgaggctttagagttcgccacctgcctccatgcatccgtgtggggaaggggagctacaggatcaggctgtttatgcatctggggacccctcaatggccagtggcatgtgccaacggcattctgcaagtgtccactggaccaggtatactgcggaactcagacacccggtctgaactacttttttaaattgtaaggtctggagctgttcaacattgggctcaagatcaactcatgttagagccttttctcatcatctcacacaaatcttattacatattaaacagacttcccaggtaataacctacattct

SEQ ID NO: 92444 - DNA, 600 bp, Homo sapiens
gctcagaaagatttgacttttttaaatgatgcattcttatgtcaatagactttaatctgcaaccaaaatgttttttttttaaataaaaatgaggcacatttgtgctttctcacttctgctccaattctaccttattctgcaagttgctattttttcctttagcagtacactatagatttaaaaattgtatggtattttctaatataaccatatcaatttatcagttttcctattgttggacatctaattcactcatatttgtgtcttcttcctttcccttacagagtttttgtaaagaaggctgagtgttttcaaaagttatgtttatatttacatgtgtgtgaactaccattttctgtatacccttgctgataactattaagaatcttggtctggcatggtggctcacgcctgtgatcccagcacttagggaggctgaggcggtggatcacccgaggtcaggctggcctcgaacttctgatctcaaatgatccacctgccttggcctcccaaagtgttggcgtgagccactgagcccagccagtaatggtatttaatgtataattattgtagctctttctccagtttgttatttgtaag

SEQ ID NO: 92445 - DNA, 439 bp, Homo sapiens
ctagaccctttggcccagggaaagggttaacctcctggacttttaactgagtgttttacatcttagcttttagattcttgtgccagagtagtttcacttccggtcattccttctggctgctggcctggattcccaggctctgttttctccttgtggaggccccggcagcacccgatccaagggccgcacacatctggatttggcttccacacgctgtactaactattcttgcccttttggcccctgaatcccctcatcctttgctttttccacctgagtaggtgtggcctcctggtctgcaatggatttcattgctgcgtgaatttcccctgctagtgacttatcattgagggccccattgcaggactctaagcggcaccgtgtaagacaccttagggacgacctttggccaccccaggactttgctgaaaatgccaaa

SEQ ID NO: 92446 - DNA, 2483 bp, Homo sapiens
gaattcggcacgagggcagtgggggttacagacagcaccagaggcactcagggcaggagggtagtgggtgctggtcaaggccgctttgcaggggattgggagtggatgctagtggcagtaaagggtaaagggagggcagtgggctctgagctaggaggaggtggcccagccacttctgcagagttcctaaccccagacagctctactgcaccaccccagcccttccccacagcccaaaggaacttaagagggagagcactgtgggcatgcagccaggatttccagcattgcttccaggctcctaggggaaacttaggcactagcgcagactacatccagacatggctatagggaaaagtttgccttgtggcacactgggtatgcctctctatcctctctcctcccccagcaggcatgaagacccccaacgcacaggaagccgaaggggcaacaaaccagggcagctgcaggacgggccactgggtctgcaaacatgacaaagaaaaaagtctcccaaaagaagcagagaggcagaccttcatcccaaccctgcaggaacatcgtgggctgcagaatttctcatggatggaaggaaggagatgagcccatcacgcagtggaaaggaaccgttctggatcaggtgcctataaatccctctctttatctggtgaaatatgatggaattgactgtgtctatggactggaacttcacagagatgaaagggttttgtctcttaaaattctttctgacagggtggcatcatctcacattagtgatgccaaccttgcaaataccataattggcaaagcagtggaacacatgtttgagggagagcatggttctaaggatgaatggagggggatggtcttagctcaagcacctatcatgaaagcctggttttatattacctatgagaaagatcctgtcttgtacatgtaccagcttctagatgattataaggaaggtgacctccgcatcatgccagaatccagtgagtctcctccaacagagagggagccaggaggagttgtagatggcctaataggtaagcatgtggaatataccaaagaagatggctccaaaaggatcggcatggtcattcaccaagtggaaaccaaaccctctgtgtatttcatcaagtttgatgatgatttccatatctatgtctacgatttggtgaaaaagtcctaactgttagggtaaaatttggcacatgtgtggaaacaaatgtataatttgtagacatgcaaaaaatgttgcctttcagtgtactgaaagcttatggaatccctgataactaaacatctttgccagcattaactgttgttttgctctaaaaaatacaaatttgtgaatacatgacatgctgtctgtaagccctttgtcttgttgaaaagttcgggtgtgtttggtagatggggcatggaaggaacgaacagctgtcaatttcggctgtgaataaagttcagctagaatcataatcagtcatttaaaaatggcactggatttagctggtctggtctggagggggcaggggaaggaacaagagattggctgtcttggggagagaggaggaggtgactgcttaggaagaggtggaaaagggccagaaagggaggggctccttgggggaggggatgacctatgagaaggaaacatccaactcagaaggaagactaacagagggagagtgagatcttggggcttagaggaaaatagaataaactgagtagagaggaacacaaagaagcttagaagagggtccagagtaaggtggagaaggatcaacctgacagggatctgggagaggctaaaggatacacaaaggaagaggctatgtgggttagggtgttggagggattagaagagggccactgaggaaggaggaattcaaagaagaaagactgacagagggagtgagaatacaggaaaagagttgtggggtatggggcccatgagagatcggaaggcccaggaaaatgttggacttctggtagtgtccacattgctcttcctggctctatgcacaaaggaagtggcaactgtcaaagatgccagatgcattggaggttcactagaagagcatgttgacaggaatgactcagtcaagttaatcaggagccaagtttatgcccataaggcttttcctgtttcagggagttaatgacacacttgtccagcagaaacccaatgctcagcctaaacacgctaacatggtgccccacatgtgctgggctgtgggctgcctcctcacatttgtcctgcgctagataagcaatcttggtagaggatgggttagtggggctctcagaacttaagagatgtgccatcttgcatttggaaagtactttatccagaaaaaatgaaatcttactgaactcaggtacagcagtctcatcactcctattccttctgctggaatgtttgttttctatctagagatgaggggcatcagaggactgagcctagtgtttctctcgag

SEQ ID NO: 92447 - DNA, 732 bp, Homo sapiens
tctcacattgcaaaatacagtcatgccttcccaatggtcctctaaagtcttaactcgttccagcattaactcaaaagtcccaaagaccaaagtctgatctgaaactcaagccaagttccttctacctatgagcctgtgaaataaaaaatcagttatttacttctaagagagaatggtgctacaggcataaggtaaacattcccattccaaaaggaagaaattggccagaacaaagtggcaataggccccatgcaagtctgaaacccagcagaacagtcattacatcttaaagctccagaataatatttgactccatgccccacatccaggacacactgtgcaaggggtaggctcgcaaggcccatcctagtggttttgcaaggtgcagcctctgtggctactctcgcaggttggagctgactgcctgtggatttccaggctcagggtgtatgctgccaatggatctaccattctgaggtctggacagtggtggcccctttcctacagctccactaggcagtgctccaaccccacatttctcctctgtagtgcctaagcagaggtttcctgcagggactgtgccccgtggcaggcttctgcctgggctcccagagtttccaatacatcctctgaaatctagggggaatctttcaagtctccttgactcttgcattctgttcacctgcaagcttaacacgatgtggaagccaccaaggcttatagctttcgccc

SEQ ID NO: 92448 - DNA, 157 bp, Homo sapiens
gtacaggggagagttgagctgtgacaaagtcacaacacaggccttggccacccacaggagctctgcagctggggtggtcttgaaagttgtctcagtgaaggcaaggtgctgagcttattaccccagcagtcattgtatttaggctccgtgtggtacc

SEQ ID NO: 92449 - DNA, 294 bp, Homo sapiens
gccatgggaaatggctgtgtgaagtcacagaaagggacaatgtgaagtcacaggaagaagcagagtgaagtcacaggaaggagcagtgtgaaacaataggaaggggctggaagatgtcataagaagaaattatgtgaagtcacaggaaggggctgtgtggagccagagaaaggggctacgtgacatcacaggaaggaactgtgtgaagccaagggaaggggctgtgtgaagtcacaggaggaggctgtgtgaagccacagggtcagtatgaagccacaggaagaggcagtgtga

SEQ ID NO: 92450 - DNA, 547 bp, Homo sapiens
actgatttatcacagcaaatcatgtgggtgagaggaacggaaacaggctgacttcttagttcaccttcctccttctcctttgtctgcgtgatcagagctcgcctggcctccagctggcacggattttgttttgtgtgtccaagggacgagacaagaggaacgtgcccatggaagcttttagcagatgtctcttttttgaactacatacttcatactggggtaatttatgaagttaatggaatgttacttgtattaagtaacagattggataatattaaactccaggtctaataaataaaatggcatactctctgaaactgctccctgtggtaaacaaaaccagctgttagtagtgtaaaaacagaagatgtgtactttttttccttttttgcaatgaaagaaaatatttaggaatccaattttcttgtcactgcaatagcattgtatttatactctacataatagcattcactttgctgaaaatagagactaaaaagaagtatttttcaaagaataggaggccgtgccaccagctaataatatgtaa

SEQ ID NO: 92451 - DNA, 494 bp, Homo sapiens
ggaccacaggcacgtaccaccatgcctggctatattttttgtatctttagtagagacagggtgtcattgtgttggccagactgatctcaaactcctggcctccagtgatctgcttgcctcagcctcccaaagtgctgggattgcaggtgtgagccaccctgcctagccacatataagaagtttaatttgcattttataatggtgaaagttaacatttttctatatgtgtgttaactgtttctttttgcatgattggtgtatgtgtatcctttgactacttggctagcagaaagtcaccatctttatctgttttgctgctgttcactttctcctgatggcaccagtctatcttctttattagtttctttcgttcctagtattctatggtttagccttttattacagtgttaaactactattggatgaatcttctgctgccacttcttatcagctctcataattctagctttcctcatctgttactataaattggt

SEQ ID NO: 92452 - DNA, 314 bp, Homo sapiens
ctaacaggcatttctctcttcttcttattttcgatctcacccccacccttaccccccacaccaatctctcctcccaactattgccagactgattgtcccctacacagccagaccatttcatgctattccctgccacctgcagaatttattcatttgcaaataccctctacctcgaccatcccaaattgctcacagttctccaaacactcactgttgttctcaactctgtggctctgtacactgttatcactgcccataatgctgtctcttcctcctcacccacctggagaagagctcatccttaagacttggtt

SEQ ID NO: 92453 - DNA, 300 bp, Homo sapiens
aattgccataacagtggtattaaacaagataaatctacaaactaatacctcaactggactctgcctatctcccctggttcacctcatgcttattcaccttcttattcttattgaaatttccagttcaccatttttacatatagcttagaatcttattatcctgtaattgtacatttgctgatctgccactttatcattttattgttgcttccttgtttttattatcagcttagcagtacactatctacaattttaagatatcactttgtactttatcaaagttagacctcagatcctggg

SEQ ID NO: 92454 - DNA, 162 bp, Homo sapiens
acttattaacaaaatcatttagaagacactggaatagtccaagctcttccattcactagctctgtgaacttgagcctcagtttcctaaccctcaaaatgacattgaattatatctccaagctctaaatcacctgttagctctacattgctgacttcatgatt

SEQ ID NO: 92455 - DNA, 294 bp, Homo sapiens
  misc_feature (281)..(281): n is a, c, g, or t
atggatatagagacatacagatagacaggcaggtagacaggtgacagatgatggatggatgcatagacagatgatggatggatggacaggtaggtagacagatacatagatggatgattgaacagacagacaatagatcaacaaatgaatggatagacgggtacacacatggatgatagatagatgcatacacagacataggtagatagatcggtagcagataggcaggcaggcaggcagacagaggaaactctggtggaggtccgtagcggtcctgtcgngctagtcggggga

SEQ ID NO: 92456 - DNA, 155 bp, Homo sapiens
ccttccctctctatccattctcccacacgccttgatggctttcacacagcttccaacccagcacaccatccccactgctacaaccccaggtttgtgcccccacccaattcacatgttgaaatcctaaccctcaggttgacagtattaggaaatga

SEQ ID NO: 92457 - DNA, 885 bp, Homo sapiens
ctgccccaggcccacacattggcattcttccctccctggccagcacctttgtgaccatcaggtcctttgcacacattgataccatttgcttagaatgctttcctttgtggctctttgcatccttgggaaatccaggattaagagtttactaggtgtggtggggtgtctggtagtggtcaggtcctctgctctgaccctctccccaggtcccccaatccagacatttgaaattagcataccctctaattcagatggacagaaatgtattgagagcctactgtgcagcagcagagttgtcaatactagagatacagcagggaatcaacaggggtgtctgtcctcaccaagcttatattctcatgggggaaaaataattaactatataagtgtgtgtctgtatagagaaagaggtaaaagggagtgatagaagctgctaagtgctatgaaggataaagaaataaagcagggagtgggggtaaaagaattagggagaaattggaatttgaaacgagaaagtcaggaaaggcctcattgagaattttacaactctctcccttctgtataagaactttgaaaatcagaaaactccaggtaatttccattcagggctggagtacattgagaggagagggaaatgagatgtcaagagtaggggctgaagtgtgtggatctttgatgtattctgctggcttgtgggttgccttcactggattcctcagcctgtggtgggcatagcctggcatggctcttatagacacaggatgtttggcaaacatattgacagctgaaagcagagctgctgagctgcattatcatgaatccaccgcaagcgtctagcctggagctgcttttcacccaagacaacagcagttggaacctgtgaat

SEQ ID NO: 92458 - DNA, 342 bp, Homo sapiens
ggctccagagccctggtgcccttctcctctgctgagcgtccacccagggttcacctcacccaaggtctcatttcctttgctgtcattccgttctctgctcaggaccttggcactccctgttcattttgatgatcattttgatcacctatttatagacctggcatgaagcaggcaggccaattagtgttcaagtggattgagttgtaataatgtgagtcaagtcctggtgcttgtgtgttaaagagcagtaagagattttctgcaggtgttagtgaatttcaaacttcacttttctcctttgcacagagctcagcacagtaaaaccaatttcaatgcaagagc

SEQ ID NO: 92459 - DNA, 385 bp, Homo sapiens
cgcttagttgctaccatgacctcataagctataattttaaatgattttttgaaatatttctgtattaaggttatggtattctgatttcttaaaagttcctatagccgggtgcggtggctcatgcctgtaatcccagcacttgggaggccaaggcaggcagatcacttgaggtcaggaatttgagaccagcctgaccaacatggagaaaccctgtctctactgaaaaaatacaaaattagccgggcgtggtggcacatccctgtaatcccagctactagggaggctgaggcaggagaatcgcttgaacctgggaggtggaggttgcagtgagccgagatcacaccattgcacttcagcccggggatcaagagtgaacctccgtctt

SEQ ID NO: 92460 - DNA, 480 bp, Homo sapiens
ctcacatcatgtgcttgggtttgttttctgcctgtcccttaaagctttcgaattctcaaacacagaatgaagtccagatttattggcctagcattcgaagacctacacgattggctcttgtgtttccctgacttttttttcatggcaatatcctcacaggtgattgcagttctctaaactgtatgcttttcaggagtataaaaagtaacaaacagtttggccaggcacagtggctcatgcctataatctcagcctcccaaaattcagggattacaggtgtgcaccactgtgcctggccatgtgtctgaatttttaagcaaagggagatgaatcatattccatatgcccatttcaaagctttcccctgtatatcgtgctcatattcccatattgtttaatagcttccttcagcgtgacttttgcaatgtttttaaagactgtgctgtgatacgaaaacatttttatggcacaataataaat

SEQ ID NO: 92461 - DNA, 274 bp, Homo sapiens
caggctggtctcgaattcctgacctcaggtgatccacctgcctcagcctcccaaaattcagggattacaggtgtgcaccactgtgcctggccatgtgtctgaatttttaagcaaagggagatgaatcatattccatatgcccatttcaaagctttcccctgtatatcgtgctcatattcccatattgtttaatagcttccttcagcgtgacttttgcaatgtttttaaagactgtgctgtgatacgaaaacatttttatggcacaataataaat

SEQ ID NO: 92462 - DNA, 441 bp, Homo sapiens
cttggtttgtcaacagcatctcttctttgatttgctgtcatcagattcactgccagataaaggttttctttttgtaccatctttttcttcaccagctttttgagaattaagaaatgcttcaattaactctggacaatctaaattttcttcaggttccaaagtattgtcagcatctgtaaattccttcaggaaatattccactttcccattccctgcgtgtctatctagtacattttccaccacaaattcttcaggctctgcctcttcaacttttttacttttccattctgtttctttcccatgttttgcaatgtggttttgttggaggccattttttattgcagacctgaagagctattattcactgcctccaagctgctctgggtcatgggtctgtggtgtctccagtcttgcatgtcaccagctcgagccacatccaag

SEQ ID NO: 92463 - DNA, 166 bp, Homo sapiens
tgagaccagcctgggcaagatgcaagatcccatctttattaaaaataaataaacaaaatttaaaaagaaaaaagaaaagcagttgctttgttggaaaatatcctctttgctttaaatctgaaatcctccaggccaggagcggtggctcacgcctgtaatcccaaca

SEQ ID NO: 92464 - DNA, 275 bp, Homo sapiens
aggggaaatacgtgtgtgtgtgtgtgtgtgtgtgtatgtatgtatgtctacatatacacacatatacacgcctcgcatagattataatcttaagtcctaaaaacaattcatccagccaggcgtggtgggtcacacctgtaacccagcactttgggaggccaatgctggtgaatcacctgaggtcaggagttcgggaccagcctggccaacatggtgaaaccccgtctctattaaaaatacaaaattagccaggtgtggtggcacatgcctgtaat

SEQ ID NO: 92465 - DNA, 370 bp, Homo sapiens
actggaatatattaaaatctctccaattttattttgctaataggcagggcaaagtctgtccataaatgtatcctgatttatcacaggtaatcccacactttagcattcatgtgttgtacttaacctcaatttaaatgtaaattttgggaaacttcgagtgctttatctgtgaactttgagagctctcttcattaatgaggcctgcactaaattataagcagttttatgaggtttccttaaaacaattgcagaattgaccccaaaatgaacaaatttagaatttatttgttttttttattaggttggtgcaaagaaattatgttttccacatttttaattgcaaaaccacaattaagtttttcatcaacct

SEQ ID NO: 92466 - DNA, 570 bp, Homo sapiens
tgagacggagtctcgctctgtcgcccgggctggagtgcagtggcgcaatctcggctcactgtaagctccgcctcctgggttcacgccattctcctgcctcagcctcctgagtagctgggactacaggtgcccaccaccacgcccggattttgttgtatctttagtagagatggggtttcagcgtgttagccaggatggtctcaatctcctgaccttgtgatctgcccgcctcagactcccaaagtgctgggattacaggcgtgagccactgcgcccggcccagaacttttgatttccctcccacaccatccaattcatacacaagtcctattatttaaacttaactatatcttgaactcaggaaaacttctctccatttccactactacctagttaaactaaagtcactactctttcctgcatcatttcaatagcttcctatttgttttctctgctgctactcttgtcccagtaaaccaaagtagccaaagtaggttttaaaaaatataaatcaggccactcatctgcttaaagtcctctagacacttcccattgcactttcagatcatt

SEQ ID NO: 92467 - DNA, 318 bp, Homo sapiens
cagcctggggccgctgtgatggctgctatatctatcctattaagttgataccctaaaactcagctctactcccccagctgtgctcaaaacaagaaatacagggaccaacaggaccatggtgtggttaagaagctaccagcaatccacatttatctcaacaagcagcgaagatctcaagaatcttctactttggtcacagaaggagctaggcaaccaatcacatttctctcttttctcttgtatccatgcatccaataaatgatattctcctcttttttaagtgtccagttctaaagagtacttaattcaattgagcat

SEQ ID NO: 92468 - DNA, 170 bp, Homo sapiens
taccatctgatataaaaataatgtagaattagaaggggtctttgctgaagacagtgagatcatttcagcaccaagcatgaggtgatggagcctagaccaaaggatgccatccaatgagtgggggtgacagagacaacaaatgtttggaaggtagcacagtggactgggtg

SEQ ID NO: 92469 - DNA, 216 bp, Homo sapiens
gttattccagctcagggtgccaggtgagaaccagccctggacagggcaccatcccattgcagggcgcactcacagtcactcattctggaaccgtttagactcatcaatgaacctagcatgcatagctttgggatgtgggaagagtacgcagaaaaaaaacaggtgtgcatggggagaaggtgtgaaccatatagacagtggcctcagttgggagtt

SEQ ID NO: 92470 - DNA, 360 bp, Homo sapiens
ctcccaggttcaagcgattctcctgcctcagcctccctaagtacctgggattacaggcatgtgccaccatgcccagctaatttttgtatttttagtagagatagagtttcaccatattggttaggctggtctcaaactcctgacctcaagtgatccaaccacctcggcctcccaaagtgctgggattacaggcgtgagccactgcaaccggccgagatcaccaactttaatcgtgaatctgccattttcttctttcacttttgtcagttttaatatcatgtcttttgaagcaagacaagggtttttaatgtcctctggatgtactgatgcctttattatcacaaaatgcccttctttatc

SEQ ID NO: 92471 - DNA, 893 bp, Homo sapiens
ctgtgacagtggtcgcaaatacagaagagataaaatatttcaacttgcaggatgatgtagagaaagtgagagttgtatatgtgaaaaaagccttttaaataccactttgattttaggtcatgtgccaaccaaggatgtagagaaagctgaaagaggacatgctaaggaaagtaagttagcaagtggtatagtgatgccctgggctcataagtcaacaaacagcatgaaatacagagacagttgtgcccatctgatacaaatgtcatgtgatgcagatgactcagtaacagcggaagtgctacaaaaagaaaaaaacttgtaagaacagccctacctctgcatataaaatacttgagtactttcagtttcaaaattaaagattgctcagaaaccacctgccatacagaagatatttaggatgaaaatttttgtcaaatgattgagaatgtgttaggccattcttacattgctgtaaggaaatatctgagactgggtaatttataaagaagaggtttaattggcttatgtttctacagactgtacaggaagcatagcactagcatctgctctgcttctgaggaggcctcagggagcttttactcatggcagaaggtgaagtgggagcaggcacgtcacatggcaaaagcaagagtgagagagagagttggggaaagggaagtaccacacacttttaaatgaccagactcacaagaactcactgtcacgacggcagcaccaagccacaaaggatccattcctacgacccaaacacctcccactaggccccacctccagcattggggattacaattcaacatgagatttgggtggggacaaatatccaaactattagattggtgcaaaagtaattgtgatttaatacgtcagagaat

SEQ ID NO: 92472 - DNA, 397 bp, Homo sapiens
gtgcaaagcaaacattgggttcacatcatgtacaaagtagatagatatttataagttttttttctggattgctgttctatgtcacttatctgtccttaaccttgttttagtagaactcaacctaatcagtactcagggagaactttgacagcagaattattaaatttaaactctagagatttagatttcaaggaattcttaagtcatttttaaaaccactcctttagtgggcacatacaacttggctgtgagaactacctccccttacccaaaccctggttactggagagagactatacttgaatgaaaactcttgtttctagtggtattttgaacagaaaagggaggaggacttaagcaaaatgttaaggtaatagaggcaattataaatcattaa

SEQ ID NO: 92473 - DNA, 460 bp, Homo sapiens
tccagtctatcactgatgggcatttgggttggttccaagtctgcaattgtaaatagtgctgcaataaacatacgtgtacatgtgtctttatagtagaatgatttagaatcctttgggtatatacccagtaatgggagattcctcaaggagctagaaccagaaataccatttgacccatgacttttgccatataaattaacctaatgagaggagtgacatttcctgacctttgccattttccactgattagaagcaagtcaccacctctgctcatactccaggggaggggactaaacaaggctgtggactccaggaggtgggaatcatggggccacctaacatctgcctgtcatacctatcttcatgtcctttcaatttggaagagtaccaataatttattctgtcaaatttccccccgctgggtttgtatgatgtgtttttataactgaaatgaggcatg

SEQ ID NO: 92474 - DNA, 852 bp, Homo sapiens
ttttactggaggagccccgccttgggttctttgaaagcctcacacatctcataggaaatcttgaaaagtattcattcaaaagttacataagaaccatccagtatgtggtagaaaatgaggtgaagatcgggagcatggggttttgttttcttttatttgctgggattattgagagttatattacggaactgaaagagaaatactagtaatctgcctaatttgaaaacaagtgggagtactgattagggcataattgaaactcctgatactcatagttactgttactaatgaggaaaatgtttcaactgatattttgctttttaatatatttacagaaagtggcattataaattcaggtacaaacacacatgaacacacacaaatctacacatagagtggggtgctggaggtggctagcactgtcttgaaagagacatttgtgcatatcttttcccaaatccagttcagtggctttaacttgatagcttgaaatttgccgtaatgggcatatttactctacaaaaatgagcaagggatacaaatcaatgtgtttgcttgtttttcatagagccagtttttaaacattaagcagtacacattgtcataacacgcattcttttctcaagtttccatgactgttgcggactgttcacatttatctgcaatggttttgcagagtcatttaattaagggtttgatttcttaatatctttctttctaatttctgtcccagagggtggcagcatagtgcagtaaaaagtacctgggggctttgtattgaaaggtgttaatccctgttctgtccctttggctctttgaccttgagaaagtcacctaagctttctgacccaa

SEQ ID NO: 92475 - DNA, 522 bp, Homo sapiens
gtgaacaggatgtgcctgaatgctgcaggggcagcaaggtgagccctgggctctgtcctctctgctaatgggagacctgaggaggaagcacccactccagccagaggcaacactcactggcccggggacgcgggcagggccagaaatgcaggtgcacccactgctctcgtgggccccaggttgaactgtctggtgggaaggccggagtttggggtggtgatgcagggggttgtggcccagctgttggggcacggccatgggccaagcctcagtggtgtgaggatcaggagggcgtgcgacaagcctgggactggcctccagatggcgcctgggtggtcccacgcctcggcgacaacaaggacctgcctttgatgaagagcagagggaggtgaagagcacagaagctggcaagccagggagcagtggtggcaggggcacctcccctctccagacactgggccacccagccactgagaggatagcgatcaccccggccacccttcccgaggtggggcgggaaga

SEQ ID NO: 92476 - DNA, 427 bp, Homo sapiens
atggcgtttgtatctgaggactgggccaagattacagagggagtgagcaacgcgtggctttggatatgcatcgaggttgtcagctctgtgtccagcctgcgtgtggtaagcagcaaccactctacaccagttgctgggcacccagcagggactgggacagacaggacaggtgaacagttaaatgagcaagaacattctggggcaggcacaggggctcacacctgtaatcccagcactttgagaggccaaggcgggcagatcacttgaagccaggtgttcgagaccagcctggccagcatggcgagccccatctctaccaaaaatacaaaaattagctgagcatggtggtacttgtctgtcgtcccagctacttagcaggctaaggtgggaggatctcctgagcccaggaattcgaggttgcattgag

SEQ ID NO: 92477 - DNA, 317 bp, Homo sapiens
ccttaatggtggccagagctaccatgcagtgcaaaaataaattaagtgaaaatgtattattgagattaacagtgcaaggccaatacattttataaatctgtcagtatctttttaatggactgtgtatgtgtagttatgttgaaagatacattgtgtatgtgtacatgcttttgtgtgaattcaaggcacactgtaagatgtatttcccttctctaaaatccatgttgaaatgtaagtacagattgatagaaataggtgttttacttaaactcatataatctgtttcagcaccttttttaaaatgtataattgtactg

SEQ ID NO: 92478 - DNA, 395 bp, Homo sapiens
acccgggaggcagaggttgcagtgaactgagatagtgccactgcactccagcctgggcaacagtgagagtccatctgaaaaaaaataaaataaaatgcagaggaagagaagtggagattcccccattccagcagcctccttcccacccacactggagttttggatttgggggtttgatggctctggcatgtctaggccctagaggggttcagaaggaggggtcttggggacacagagagtacttcaacaatcccactttaagacagttccctttgggccgggcacagtggctcacacctgtaatcctagcactttgggaggccgaggcgggcagatcaactgaggtcaggagttcgagaccagcccagccaacatggtgaaaccccgtctctact

SEQ ID NO: 92479 - DNA, 324 bp, Homo sapiens
ttcggaagtgcctgaatcattgacaaaatctgtcctttttttcttgtttttgcttgatgctactatgtctgtccctgacttctgctgaaaagctagttatgcatttcattgatcattccttgtgtggatacctgtattggctttattaacaatgtgtttatggccttcagtttcttccttatgggaaagagggactccaacttctctcaacatttaaatatatggacgttctgctgtattctctctctccttcatggtgaaaaaaaggggtgctgaagggtttgtaggaattcattagttttccagaataaaaattgtttgaaa

SEQ ID NO: 92480 - DNA, 339 bp, Homo sapiens
gcatagggctcggcgtgacgccccgcacccggcccagtgcagtggttcttaatcctgaagacatattagaataatctgagacattaaaaaaaataccaatccctgggcccaccccaaactaaataattcaaatctctgggcatgcagactgggtattggtatatttttaaaacactccctggctgactctaatctccaaaactctaacggaagagaattcggaggcaagtagggggccttgctgcaaaatgtggtctgcacatcaacatcacagggaggcttgatggaaatacaacctctcaggccccataccagacctactggaaagaatctaaaaat

SEQ ID NO: 92481 - DNA, 504 bp, Homo sapiens
cacataattcatcgaaggcagagttgtgcagcacaggatactgtggttggtgtggagacatgcaaagggggagaatgggcctgttttagttaattctgcgaagctacaacagggcaactgacacttccttcagccccaccctggggagggggtcagtacatattgtttggtgatatgagactgggaaacctctcactggtgactaatgcaactggatgccaaagtccagcaggattagattagttcggctcagctggtcccgtcttctaagtatttttttcccatgactcagggctgggagtaggggacaggattctcttcctccgtctgaccttgcaaacatgtcactgaaaaggagcctgatctgacagcatcactaccccagggagccagggaagaagtggggttttggggaagcctcaaagatatcagtaataatagaaagcacttgcatgccaagcaccatattaagcactttttacacatgattttatttaatcctta

SEQ ID NO: 92482 - DNA, 429 bp, Homo sapiens
  misc_feature (11)..(11): n is a, c, g, or t
  misc_feature (52)..(52): n is a, c, g, or t
  misc_feature (55)..(55): n is a, c, g, or t
  misc_feature (122)..(122): n is a, c, g, or t
  misc_feature (154)..(154): n is a, c, g, or t
aaaaaactttnaaggggcaaccctttccccctaccttttccttctttaatcnccnggtttaccattgatgacttcgcctctgcatctactgacttgatttttcattctgccactccatcttnaaaccccctcacctttcccatcctactcctgnccatgcattgaagggtcaatgcattttggggtgagctctgggtttaggggccccctccatccctcagctaccctggatctttgcccacctcttcctcagagcccccactgagggccgtagccctatctagggctgtggaaggagcagactggttcctaactctctccctcctcctgcccacacacatcaaaagaatcttccctacacccttctctgcctttattttttgatttgtgcaacttgtaactaggtgtttatggaataaaggagaatgg

SEQ ID NO: 92483 - DNA, 243 bp, Homo sapiens
cggagctcacacggtaatgctctgacgggaggcggagctcacacggtaatgctgtgacgggaggcggagctcacacggtaatgctctggcgggaggcggagctcacacggtaatgctctgccgggaggcggagctcacacggtaatgctctgacgggaggcggagctcacacggtaatgctctgccgggaggcggagctcacacggtaatgctctgccgggaggcggagctcacacggtaatg

SEQ ID NO: 92484 - DNA, 383 bp, Homo sapiens
gtactaatcaggctggaattctaggggcttcccatgtgacctcattacccttagcctcagcaaaaagctcaggactcctacactccctgggatgggcaggcagtgccaccacacagacagacagatactccctaagtatccccaacccagtcctgtacaaggcaagccagtcatatggctttagccacagaaggaaaccaagtaagagaacaatgataaagctacatgactccacgatgactactggaaaaacaactcaacaaactccagcaacagcaggttcgtaatcgctatttggagttggaatttcaacatgtatttatggctctgacatcggatgacaaaataatctactgaacaaagtgaaaactctctcccaccag

SEQ ID NO: 92485 - DNA, 478 bp, Homo sapiens
ctggaaggcaggagctggggaagcctggcctctccgcacagacatccttcatcctggtggggcagcctgccccgttttattcccacgtgaagcatcagacccagggcagtgggggcggggagcagctgtgagattagcaggcccctgccctctctgcaccttcaagttcagccttctcccctgcccctgcctgtaacactgctagagtgcccctcaatcaggtaaatggtgtttgtggtcagcaaggctgtgtgcaaagcctgcgccgagagctttgtcaagcatgagagaggcaggtcactctgacatgtcaaggagtaatctcccatttacatggctaaaactagcaggaaggcaggagctggagtcagggtgtctgtactcttggagcagcccaggaaaggggtcgttgggtctcaggtggctctccctggtctgcagccagctatgcccaaatgccaaggacctgtggaaccat

SEQ ID NO: 92486 - DNA, 225 bp, Homo sapiens
aagccattttagaaaaaaacctttgaccagaaaaggacagggactttgtcaaagttcttttaagaatcattacaggttacatccacttgaaatttaggaagaagaacacctcctggattagatcctccgtttctgcaacgggcagccctcaagaagcaggcagaagcagtgcttaataaaacggtattctcagatgagccaatgttatggaaaagagttgtacca

SEQ ID NO: 92487 - DNA, 1037 bp, Homo sapiens
acttgtatacttgaaatcatttaatccagactgaagttgtaaaagccagccagtgttttcaatatagacttccatgtttgaccatctgaaaatgaaaaacactaaaaacatcacatgctgtttaggagctggaaattttaatatttgacttcaagtagatggtttttaactcctgaaatcgaactacgtttaagtttgtatgtttattacctgtttgagcacttaggtgcaattgtgggagcggggatgtcaagttcatttatgtgactctttggctcaacttacataatctttgttttgatatcacagttgtctaattattttactttgtagcttaaggcaggctgaattgttgataaaatggaaaaagtagtatattgttatataagcttctgaggtgtgttttgttgtataagccctggaggttaaaaagtcatcccttatgtatagtagttaaaggcataaaactgtgacttttagatattccacagaaccagacttatttgatgtggataataaccaatgatttagcattttgtttgcttttgttttattttatccgggttcattttttactcttcccatgtacatgaaacaggtggtggcgtgtagagatcagctgatccttgttttatggttaattgaactactttgtatccagggtttctgcaaatccaaaagtgatttttcatctaggatctattcctaacagtctactccaatcccactttagttttccacaattttaaatcttaatagtgagaattcaaatgaaagtcatttcatttgactattctgatgacatgattgtggcagaataaattgggtcttaaaatgccctagaaaatggtaaatgataaaaaataatattttaaaattcaaccaaagaaatggcccattggccaggtgtggtggctcacacctgtaatcccagcacttttggaggctgaggcgggtggatcacctgagctcacgagtttgagaccagcctacccaacatggtaaaaccccatctctacaaaaaatacaaaaaaaaa

SEQ ID NO: 92488 - DNA, 992 bp, Homo sapiens
acttgtatacttgaaatcatttaatccagactgaagttgtaaaagccagccagtgttttcaatatagacttccatgtttgaccatctgaaaatgaaaaacactaaaaacatcacatgctgtttaggagctggaaattttaatatttgacttcaagtagatggtttttaactcctgaaatcgaactacgtttaagtttgtatgtttattacctgtttgagcacttaggtgcaattgtgggagcggggatgtcaagttcatttatgtgactctttggctcaacttacataatctttgttttgatatcacagttgtctaattattttactttgtagcttaaggcaggctgaattgttgataaaatggaaaaagtagtatattgttatataagcttctgaggtgtgttttgttgtataagccctggaggttaaaaagtcatcccttatgtatagtagttaaaggcataaaactgtgacttttagatattccacagaaccagacttatttgatgtggataataaccaatgatttagcattttgtttgcttttgttttattttatccgggttcattttttactcttcccatgtacatgaaacaggtggtggcgtgtagagatcagctgatccttgttttatggttaattgaactactttgtatccagggtttctgcaaatccaaaagtgatttttcatctaggatctattcctaacagtctactccaatcccactttagttttccacaattttaaatcttaatagtgagaattcaaatgaaagtcatttcatttgactattctgatgacatgattgtggcagaataaattgggtcttaaaatgccctagaaaatggtaaatgataaaaaataatattttaaaattcaaccaaagaaatggcccattggccaggcgggtggatcacctgagctcacgagtttgagaccagcctacccaacatggtaaaaccccatctctacaaaaaatacaaaaaaaaa

SEQ ID NO: 92489 - DNA, 196 bp, Homo sapiens
aggctgggttcccctcacctcatctgtctttggcagatagtcccaaggcctcaccacactgagcccatctcccccaaacgtctggggtccctgtgtggtcagggccgtggggcctttacactagcaaccagtgccagcgcccacacggcaaccccctggctctccagggcctgctctgcgccctgacactaagctg

SEQ ID NO: 92490 - DNA, 196 bp, Homo sapiens
ctccagcctgtctcaaaaaaataaaataaaatgacgttgagacatcattcactcatacttacaaaaatccaaaagtttggctgggcatggtggctcatgcctgtaatcccagcactttggtaggctgaggcgggaggatcacctgaggtcaggagttcgagaacagcctggccaacatggtaaaacccctatctct

SEQ ID NO: 92491 - DNA, 213 bp, Homo sapiens
tggattcacaccctattctgttcagtttcagaggctgcagtcttcgcaagggacttggtgcaatttataagatggagagattaccattgtctggggagtaactaaaaaggtttcataagagaagtggcattagtgtcacttttgaatgaagagtagcattttggctggtgaggtagatgtaaatccaggtagagggagtataatgaacaacca

SEQ ID NO: 92492 - DNA, 365 bp, Homo sapiens
gagtctgtgtgccccataagtctgtgtgccccgcgagtctgtgtgccctgtgagcctgtgtgccctgtgagccatgtgccccatgactctgtgccccataagcctgtgtgctctgtgagtctgtgcctcgtgagcctgtgccccttgagcctgtgtgccctgtgagcctgtgtgccctgtgagtctgtgcccccgagcctctgtgacccatgagcctgtgtgccctgtgagcctgtgacccatgagtctgtgtgccctgtgactctgtgacccgtgagcctgtgacccatgagcctgtgtaccccgtgactctgtgccccatgagcctgtgtgacccgtgaacctgtttgccccatgagcttgtg

SEQ ID NO: 92493 - DNA, 261 bp, Homo sapiens
gagtctgtgtgccccataagtctgtgtgccccgcgagtctgtgtgccctgtgagcctgtgtgccctgtgagccatgtgccccatgactctgtgccccataagcctgtgtgctctgtgagtctgtgcctcgtgagcctgtgccccttgagcctgtgtgccctgtgagcctgtgtgccctgtgagtctgtgcccccgagcctctgtgcactgatctcctggtggtcccatgaatgtttgctccatgaagctagtgtggcctga

SEQ ID NO: 92494 - DNA, 438 bp, Homo sapiens
taagatgtatatatagcttatatatgtgtatatacacatacatatatatatatacatacatatatatacataaaatgattcttgcaaaagtagttatgggtatttaagtgaaaaatttgtaagtttagaagttaagaaattggaaataatggaattggtttaaaaagctagtctctaaattaacttagaaacctaatagcaaatacagattttgattgctataactaaacactttaattttgaaaaagtttcagaatagaatttctattcccaggggaaaataaacttcatttaaaaatatatgtatacttattttgtgagtatttttttcttttccaaattccaaaaggtgtatactctatatttttgtcataaaaattctgcttgtcgaaaatattgtagtaattttataaattcaataaaacctgagtgatgtga

SEQ ID NO: 92495 - DNA, 700 bp, Homo sapiens
taaaataacgacttgaggtttaattcacatgctacacaattcacatgtctaaagtgtacaattcgatggtttttagtatattcatagatacgtgcaaccatcagcatgaccagcttcaggacattctcatcatctcaaaaggaaactctgtctccatcagcagtcactccccgttttcccccaactcctccagccctgggcaacaaccaatcgactttccttagacaacgttttgagcccttattgggaggaattatagtcgaatggaaaatccagtttgggacgtggtgtaaactggaattgctttcgtggtttttccttgtgccttggggtggggcactgccataagagcattgcatccatcctttcgtcggtactctgctgcacacggatggcatttctgcccttgttacagatgaggaaactgaggctcagagacattaagcaaggggcagagtggggcttgtccatgagaccccagagtctgtgctcttgcacatacattatcaggccaacatgatctatccatccgaattccaaataaataaataaaaatgcttataagaagtccccccatgctgcggggaggcagcggctcatgcctgtaatcccaacacttagggaggcacaggtgggaggattgcttgaacccaggagtttgagaccagcccaggcaacatgacaatacctgcatctctgc

SEQ ID NO: 92496 - DNA, 474 bp, Homo sapiens
aatcaggaaagtaaagttttaaggattgacatgaaaggttttttgaaaagccctttagaaagcagattacgtctccatttggtcttttgattcttagaaatgttatgacatggttagttttgggcaagtgaaaagttaaagccaaaagagtgaaccttagtattaggttttgggggcagttcaaaaaagaaaagatagattagtcattagtaaaaagttagtgggttcggggcccagtcctggttcagctccagtctagcccattttcagtaagtagaagaaaagatagctgaaaattgactgtggcttcttgctttgttagtgttttttaaaatatatgggattatttttaattggccttctctggaagggctatgtcctttctgggaacattgccaggcagtttttctatctcctaaaagtggttaaatggtatagattgcctgtttaacctgatactttagtcttgtttgc

SEQ ID NO: 92497 - DNA, 224 bp, Homo sapiens
ttaagcaaaaactgaagatagctatttcctttttgagataactgtttcttcaaagcaagatatttgcaattttaaaaactttctctagaggcgggcagatcatgaggtcaagagttcgagaccagcctgaccaacatggtgaaaccccatctctactaaaagtacaaaagttagccaggcgtggtggcacgcccctgtaatcccagctagtcaggaggctgagg

SEQ ID NO: 92498 - DNA, 462 bp, Homo sapiens
atcacttgaggtcaggagttcgagaccagcctggccaacatggtgaaactccgactccactaaaaatataaaaattagccagacatggtggcgggcatctgtaatcccagctactcgggagactgaggcaggggaatcacatgaactcaggaggcggaggttgcagtgagccaagattgcgccagtgcactccagcctgggcaacagagcaagactccatctgaaaaaaaagaaaaaaagaaaaagaaaaatctttgcctaacccaaatcctcctatgttgtttcctagactttttttttttcttttaaataagagaccaggtctctctgtgttgccctggctagtcttgaacttgtgggctcaggtgaccatcccacctcctctgcttcctgcatagctgggactctgctctcagttatcctaggctttcttttctgtttttgaaagagtctcactctgtc

SEQ ID NO: 92499 - DNA, 253 bp, Homo sapiens
ctttaggaggatttcctgttcttttcctgtactctgctgccaaggagaaacctgtcttgcaccaggcctgcagcttcctcagtcccccacatcatcaggcaatatctgcctggcactcctctttgttccttttctctgaccttcctttttgacatgatggttgacctgaagtcaccgaggcaggactgctcatctccaggtcctatgggaaacagtacctggtgaaaccagagacaataatctccataacgca

SEQ ID NO: 92500 - DNA, 427 bp, Homo sapiens
gtatttctctcaaagaactactttttcatttttctcctagagtgataagcattatttggcaaacctgtgcacaattgtgtctgcaaacctcttgagtgtagcagtgtagtttgaacaagctgtcatttagcaaaagcagggagatgtattgtacatgagatgaaagaaacctgcctctggaattattctggggtatgcaatgtttgtcagttaaaatggagctgtttaaaagctgttttttatagtaatctacgtatctaatagattactagaccagattatcagtctttgaaatgaagcttcattaaaacagaattcgttgctgaattaggccaagataaatagctattctcttgcattttcaacttctactccagtcagagcagagttaaaaacaatctttagtctatgaggaatgatagccatt

SEQ ID NO: 92501 - DNA, 320 bp, Homo sapiens
caatactgtacatattacctccgaactaagttgaaacagctttctgatatcaacagcaactcttattcagacaatcaagaacagaatgggcatcaggcagagagcctaatcaaatacacctgactttctatatgaactacttaagaataaatctagtgaaagaagtgcaagacctctaataatctttttaaagcaaacttaaataaatacacaagtttatgaactggcacactaaattccaaagatgtcaattctccccaaacccatttactaattcaatataatcacaagcccagtaagtttgtgagagagagcaagag

SEQ ID NO: 92502 - DNA, 433 bp, Homo sapiens
gattgtaactgtgttatcagttgtagtgtctccttttccacttctgattttatttgggtcccctttcttcttctcttgattagtctaggtggtggtttagttctgttctgattttttatttgttttagagatggcatcttgcgatgttgcctaagctggactcaaactcctgggctcaagtgatcctcccacgtcagcctcccaagtacctgggactgtaggtgtgcaccactgcacctggctgtctgctctgatctgcaccactgcacctggctgtctgctctgatctttattatttcttccactaattttggatttggtttgttcttgcttttgtagttcttgagatgtgcattgctagattgtttatttagactctttaagctttttaatgtagacatttattgctataaacttccctcttggcactgct

SEQ ID NO: 92503 - DNA, 566 bp, Homo sapiens
cctcctctctaagaactgtcaaatgtacagaaggaagcaagacaaaacaagatatctgcctatatttcaacacggatgtagaaacctgcctgtgtttacagaagcacttcagtttgaaacaaatgtaaacttaagattgcttcagagtacacagcgggtgggtgcatgcccgggtaactaccatatgctctgaaaagtgagatgtcaaaaaggtgtgacagcaggcatgcccttaggtgctcaaataaggaagctggcatgtgtgttactctcagccttctcaaaatggcccccagtggttctcttggggcagctattcatttaggagagggagggtcttctgatgtgggcgaaacttaagaacatgaatggcagggctgggcgtggtggctcatgtgtgtaatcccagcactttggaaggctgaggcgggcagatcaccagaggtcaggagtttgagaccagcctggccaacatagtgaaaccccatctctactaaaaatataaaaattagttgggcgtggtggcaggcacttgtagtcccagctacttaggaggctgaggcggg

SEQ ID NO: 92504 - DNA, 442 bp, Homo sapiens
agaccagagaagggtgatgacttttaccaagcatactgcgtgcaaacacatttttaacaaagcacatcctgcacagccctatatccattaaaccttgagtcaacacagcaaatatttctgtgaccacagggttggggctagcgttacagattaatagcatctcaaggcagaagaatttttcttactacagaacaaaatggagtttcttatgtcttcttctttctgcatagacacagtaacagcctgatctctctttatttcccccacagtcttggcaatgtgggctcttttttggttccatgtgaactttaaagtagctttttccaattctgtgaagacagtcattggtagcttgatggggatggcattaaatctataaattacctggggcagtatggccattttcatgatattgattcttcctaaccagggaacggggatg

SEQ ID NO: 92505 - DNA, 543 bp, Homo sapiens
atccaacagatatttttgagcacctgttatgcacaatacatttgggacatggtagtgaatacttctatgaagaactatacatggaaaaatgagtatattctatgcatagtgctccacagaattctttactactatacgtccactaattgaggacagaattcttgccctcataaaaccatttataatgctagtttgttggtaggtattaggccctatgttaaaaatgaaagattgaacttagagctgccaagcggcttatacaaattgacctagctaagttgcagagcagtggcttcacctaggtcttttgattctacatttctgccttttccccacttctcaacactgttgattattctgattaggaaggattaaagtagtgaaagcctggaaaagggagaccagatatgactattgcactagaaaattaaacaggctgtgggagacagtactaagatggcaacaatttgggatgaagagaagacaacagaatcaggaagaaggaaggatcagtgggatttaataattggctgtgtcaaggtt

SEQ ID NO: 92506 - DNA, 2529 bp, Homo sapiens
tgggaagtcggtgccgctgccgtctctgcgttcgccatgcgtcccggggcgccagggccactctggcctctgccctggggggccctggcttgggccgtgggcttcgtgagctccatgggctcggggaaccccgcgcccggtggtgtttgctggctccagcagggccaggaggccacctgcagcctggtgctccagactgatgtcacccgggccgagtgctgtgcctccggcaacattgacaccgcctggtccaacctcacccacccggggaacaagatcaacctcctcggcttcttgggccttgtccactgccttccctgcaaagattcgtgcgacggcgtggagtgcggcccgggcaaggcgtgccgcatgctggggggccgcccgcgctgcgagtgcgcgcccgactgctcggggctcccggcgcggctgcaggtctgcggctcagacggcgccacctaccgcgacgagtgcgagctgcgcgccgcgcgctgccgcggccacccggacctgagcgtcatgtaccggggccgctgccgcaagtcctgtgagcacgtggtgtgcccgcggccacagtcgtgcgtcgtggaccagacgggcagcgcccactgcgtggtgtgtcgagcggcgccctgccctgtgccctccagccccggccaggagctttgcggcaacaacaacgtcacctacatctcctcgtgccacatgcgccaggccacctgcttcctgggccgctccatcggcgtgcgccacgcgggcagctgcgcaggcacccctgaggagccgccaggtggtgagtctgcagaagaggaagagaacttcgtgtgagcctgcaggacaggcctgggcctggtgcccgaggccccccatcatcccctgttatttattgccacagcagagtctaatttatatgccacggacactccttagagcccggattcggaccacttggggatcccagaacctccctgacgatatcctggaaggactgaggaagggaggcctgggggccggctggtgggtgggatagacctgcgttccggacactgagcgcctgatttagggcccttctctaggatgccccagcccctaccctaagacctattgccggggaggattccacacttccgctcctttggggataaacctattaattattgctactatcaagagggctgggcattctctgctggtaattcctgaagaggcatgactgcttttctcagccccaagcctctagtctgggtgtgtacggagggtctagcctgggtgtgtacggagggtctagcctgggtgagtacggagggtctagcctgggtgagtacggagggtctagcctgggtgagtacggagagtctagcctgggtgtgtatggaggatctagcctgggtgagtatggagggtctagcctgggtgagtatggagggtctagcctgggtgtgtatggagggtctagcctgggtgagtatggagggtctagcctgggtgtgtatggagggtctagcctgggtgagtatggagggtctagcctgggtgtgtacggagggtctagtctgagtgcgtgtggggacctcagaacactgtgaccttagcccagcaagccaggcccttcatgaaggccaagaaggctgccaccattccctgccagcccaagaactccagcttccccactgcctctgtgtgcccctttgcgtcctgtgaaggccattgagaaatgcccagtgtgccccctgggaaagggcacggcctgtgctcctgacacgggctgtgcttggccacagaaccacccagcgtctcccctgctgctgtccacgtcagttcatgaggcaacgtcgcgtggtctcagacgtggagcagccagcggcagctcagagcagggcactgtgtccggcggagccaagtccactctgggggagctctggcggggaccacgggccactgctcacccactggccccgaggggggtgtagacgccaagactcacgcatgtgtgacatccggagtcctggagccgggtgtcccagtggcaccactaggtgcctgctgcctccacagtggggttcacacccagggctccttggtcccccacaacctgccccggccaggcctgcagacccagactccagccagacctgcctcacccaccaatgcagccggggctggcgacaccagccaggtgctggtcttgggccagttctcccacgacggctcaccctcccctccatctgcgttgatgctcagaatcgcctacctgtgcctgcgtgtaaaccacagcctcagaccagctatggggagaggacaacacggaggatatccagcttccccggtctggggtgaggagtgtggggagcttgggcatcctcctccagcctcctccagcccccaggcagtgccttacctgtggtgcccagaaaagtgcccctaggttggtgggtctacaggagcctcagccaggcagcccaccccaccctggggccctgcctcaccaaggaaataaagactcaaagaagccttttttttttttttttt

SEQ ID NO: 92507 - DNA, 756 bp, Homo sapiens
  misc_feature (628)..(628): n is a, c, g, or t
  misc_feature (737)..(737): n is a, c, g, or t
tgatctagagcgatccgtgatcatcccccttcgtaaattattgctactatcaagagggctgggcattctctgctggtaattcctgaagaggcatgactgcttttctcagccccaagcctctagtctgggtgtgtacggagggtctagcctgggtgtgtacggagggtctagcctgggtgagtatggagggtctagcctgggtgtgtatggagggtctagcctgggtgagtatggagggtctagcctgggtgtgtatggagggtctagcctgggtgagtatggagggtctagcctgggtgtgtacggagggtctagtctgagtgcgtgtggggacctcagaacactgtgaccttagcccagcaagccaggcccttcatgaaggccaagaaggctgccaccattccctgccagcccaagaactccagcttccccactgcctctgtgtgcccctttgcgtcctgtgaaggccattgagaaatgcccagtgtgccccctgggaaagggcacggcctgtgctcctgacacgggctgtgcttggccacagaaccacccagcgtctcccctgctgctgtccacgtcagttcatgaggcaacgtcgcgtggtctcagacgtggagcagccagcggnagtttcaaggagcaagggcattgtttttcccggcgacaaagtttccatttttggggggaattttttggcgggggaaccaaggggcattttttaaaccatttgggccccnagggggtttttagaagcaa

SEQ ID NO: 92508 - DNA, 2473 bp, Homo sapiens
tgggaagtcggtgccgctgccgtctctgcgttcgccatgcgtcccggggcgccagggccactctggcctctgccctggggggccctggcttgggccgtgggcttcgtgagctccatgggctcggggaaccccgcgcccggtggtgtttgctggctccagcagggccaggaggccacctgcagcctggtgctccagactgatgtcacccgggccgagtgctgtgcctccggcaacattgacaccgcctggtccaacctcacccacccggggaacaagatcaacctcctcggcttcttgggccttgtccactgccttccctgcaaagattcgtgcgacggcgtggagtgcggcccgggcaaggcgtgccgcatgctggggggccgcccgcgctgcgagtgcgcgcccgactgctcggggctcccggcgcggctgcaggtctgcggctcagacggcgccacctaccgcgacgagtgcgagctgcgcgccgcgcgctgccgcggccacccggacctgagcgtcatgtaccggggccgctgccgcaagtcctgtgagcacgtggtgtgcccgcggccacagtcgtgcgtcgtggaccagacgggcagcgcccactgcgtggtgtgtcgagcggcgccctgccctgtgccctccagccccggccaggagctttgcggcaacaacaacgtcacctacatctcctcgtgccacatgcgccaggccacctgcttcctgggccgctccatcggcgtgcgccacgcgggcagctgcgcaggcacccctgaggagccgccaggtggtgagtctgcagaagaggaagagaacttcgtgtgagcctgcaggacaggcctgggcctggtgcccgaggccccccatcatcccctgttatttattgccacagcagagtctaatttatatgccacggacactccttagagcccggattcggaccacttggggatcccagaacctccctgacgatatcctggaaggactgaggaagggaggcctgggggccggctggtgggtgggatagacctgcgttccggacactgagcgcctgatttagggcccttctctaggatgccccagcccctaccctaagacctattgccggggaggattccacacttccgctcctttggggataaacctattaattattgctactatcaagagggctgggcattctctgctggtaattcctgaagaggcatgactgcttttctcagccccaagcctctagtctgggtgtgtacggagggtctagcctgggtgtgtacggagggtctagcctgggtgagtacggagggtctagcctgggtgagtacggagggtctagcctgggtgagtacggagagtctagcctgggtgtgtatggaggatctagcctgggtgagtatggagggtctagcgtatggagggtctagcctgggtgtgtatggagggtctagcctgggtgagtatggagggtctagcctgggtgtgtacggagggtctagtctgagtgcgtgtggggacctcagaacactgtgaccttagcccagcaagccaggcccttcatgaaggccaagaaggctgccaccattccctgccagcccaagaactccagcttccccactgcctctgtgtgcccctttgcgtcctgtgaaggccattgagaaatgcccagtgtgccccctgggaaagggcacggcctgtgctcctgacacgggctgtgcttggccacagaaccacccagcgtctcccctgctgctgtccacgtcagttcatgaggcaacgtcgcgtggtctcagacgtggagcagccagcggcagctcagagcagggcactgtgtccggcggagccaagtccactctgggggagctctggcggggaccacgggccactgctcacccactggccccgaggggggtgtagacgccaagactcacgcatgtgtgacatccggagtcctggagccgggtgtcccagtggcaccactaggtgcctgctgcctccacagtggggttcacacccagggctccttggtcccccacaacctgccccggccaggcctgcagacccagactccagccagacctgcctcacccaccaatgcagccggggctggcgacaccagccaggtgctggtcttgggccagttctcccacgacggctcaccctcccctccatctgcgttgatgctcagaatcgcctacctgtgcctgcgtgtaaaccacagcctcagaccagctatggggagaggacaacacggaggatatccagcttccccggtctggggtgaggagtgtggggagcttgggcatcctcctccagcctcctccagcccccaggcagtgccttacctgtggtgcccagaaaagtgcccctaggttggtgggtctacaggagcctcagccaggcagcccaccccaccctggggccctgcctcaccaaggaaataaagactcaaagaagccttttttttttttttttt

SEQ ID NO: 92509 - DNA, 2529 bp, Homo sapiens
gaggagcggcccggggctgcgtagctccgctggaccccgattccgggcagagacccccccccgccccggcccgcgcgcaccgagcccagcccccgccccccagcgcaggcgcagcgcggacctcggccccaccggtcccgcgcccggaccctgagccctgcccctgggaacccgagggccccgactccgactgaccctgacctgggacggcgcccccgcctccgccctgcagaaggggcgcagggaggggccccgaggccttcgcgcggccccacgcccgggaccctcccgcgcccggccccacgcgcgtgtcctctgtccgcagattcgtgcgacggcgtggagtgcggcccgggcaaggcgtgccgcatgctggggggccgcccgcgctgcgagtgcgcgcccgactgctcggggctcccggcgcggctgcaggtctgcggctcagacggcgccacctaccgcgacgagtgcgagctgcgcgccgcgcgctgccgcggccacccggacctgagcgtcatgtaccggggccgctgccgcaagtcctgtgagcacgtggtgtgcccgcggccacagtcgtgcgtcgtggaccagacgggcagcgcccactgcgtggtgtgtcgagcggcgccctgccctgtgccctccagccccggccaggagctttgcggcaacaacaacgtcacctacatctcctcgtgccacatgcgccaggccacctgcttcctgggccgctccatcggcgtgcgccacgcgggcagctgcgcaggcacccctgaggagccgccaggtggtgagtctgcagaagaggaagagaacttcgtgtgagcctgcaggacaggcctgggcctggtgcccgaggccccccatcatcccctgttatttattgccacagcagagtctaatttatatgccacggacactccttagagcccggattcggaccacttggggatcccagaacctccctgacgatatcctggaaggactgaggaagggaggcctgggggccggctggtgggtgggatagacctgcgttccggacactgagcgcctgatttagggcccttctctaggatgccccagcccctaccctaagacctattgccggggaggattccacacttccgctcctttggggataaacctattaattattgctactatcaagagggctgggcattctctgctggtaattcctgaagaggcatgactgcttttctcagccccaagcctctagtctgggtgtgtacggagggtctagcctgggtgtgtacggagggtctagcctgggtgagtacggagggtctagcctgggtgagtacggagggtctagcctgggtgagtacggagagtctagcctgggtgtgtatggaggatctagcctgggtgagtatggagggtctagcctgggtgagtatggagggtctagcctgggtgtgtatggagggtctagcctgggtgagtatggagggtctagcctgggtgtgtatggagggtctagcctgggtgagtatggagggtctagcctgggtgtgtacggagggtctagtctgagtgcgtgtggggacctcagaacactgtgaccttagcccagcaagccaggcccttcatgaaggccaagaaggctgccaccattccctgccagcccaagaactccagcttccccactgcctctgtgtgcccctttgcgtcctgtgaaggccattgagaaatgcccagtgtgccccctgggaaagggcacggcctgtgctcctgacacgggctgtgcttggccacagaaccacccagcgtctcccctgctgctgtccacgtcagttcatgaggcaacgtcgcgtggtctcagacgtggagcagccagcggcagctcagagcagggcactgtgtccggcggagccaagtccactctgggggagctctggcggggaccacgggccactgctcacccactggccccgaggggggtgtagacgccaagactcacgcatgtgtgacatccggagtcctggagccgggtgtcccagtggcaccactaggtgcctgctgcctccacagtggggttcacacccagggctccttggtcccccacaacctgccccggccaggcctgcagacccagactccagccagacctgcctcacccaccaatgcagccggggctggcgacaccagccaggtgctggtcttgggccagttctcccacgacggctcaccctcccctccatctgcgttgatgctcagaatcgcctacctgtgcctgcgtgtaaaccacagcctcagaccagctatggggagaggacaacacggaggatatccagcttccccggtctggggtgaggagtgtggggagcttgggcatcctcctccagcctcctccagcccccaggcagtgccttacctgtggtgcccagaaaagtgcccctaggttggtgggtctacaggagcctcagccaggcagcccaccccaccctggggccctgcctcaccaaggaaataaagactcaaagaagccttttttttttttttttt

SEQ ID NO: 92510 - DNA, 2027 bp, Homo sapiens
ggctggtactgacccgggaattatgggatgtggggctgaagtcctgtgagcacgtggtgtgcccgcggccacagtcgtgcgtcgtggaccagacgggcagcgcccactgcgtggtgtgtcgagcggcgccctgccctgtgccctccagccccggccaggagctttgcggcaacaacaacgtcacctacatctcctcgtgccacatgcgccaggccacctgcttcctgggccgctccatcggcgtgcgccacgcgggcagctgcgcaggcacccctgaggagccgccaggtggtgagtctgcagaagaggaagagaacttcgtgtgagcctgcaggacaggcctgggcctggtgcccgaggccccccatcatcccctgttatttattgccacagcagagtctaatttatatgccacggacactccttagagcccggattcggaccacttggggatcccagaacctccctgacgatatcctggaaggactgaggaagggaggcctgggggccggctggtgggtgggatagacctgcgttccggacactgagcgcctgatttagggcccttctctaggatgccccagcccctaccctaagacctattgccggggaggattccacacttccgctcctttggggataaacctattaattattgctactatcaagagggctgggcattctctgctggtaattcctgaagaggcatgactgcttttctcagccccaagcctctagtctgggtgtgtacggagggtctagcctgggtgtgtacggagggtctagcctgggtgagtacggagggtctagcctgggtgagtacggagggtctagcctgggtgagtacggagagtctagcctgggtgtgtatggaggatctagcctgggtgagtatggagggtctagcctgggtgagtatggagggtctagcctgggtgtgtatggagggtctagcctgggtgagtatggagggtctagcctgggtgtgtatggagggtctagcctgggtgagtatggagggtctagcctgggtgtgtacggagggtctagtctgagtgcgtgtggggacctcagaacactgtgaccttagcccagcaagccaggcccttcatgaaggccaagaaggctgccaccattccctgccagcccaagaactccagcttccccactgcctctgtgtgcccctttgcgtcctgtgaaggccattgagaaatgcccagtgtgccccctgggaaagggcacggcctgtgctcctgacacgggctgtgcttggccacagaaccacccagcgtctcccctgctgctgtccacgtcagttcatgaggcaacgtcgcgtggtctcagacgtggagcagccagcggcagctcagagcagggcactgtgtccggcggagccaagtccactctgggggagctctggcggggaccacgggccactgctcacccactggccccgaggggggtgtagacgccaagactcacgcatgtgtgacatccggagtcctggagccgggtgtcccagtggcaccactaggtgcctgctgcctccacagtggggttcacacccagggctccttggtcccccacaacctgccccggccaggcctgcagacccagactccagccagacctgcctcacccaccaatgcagccggggctggcgacaccagccaggtgctggtcttgggccagttctcccacgacggctcaccctcccctccatctgcgttgatgctcagaatcgcctacctgtgcctgcgtgtaaaccacagcctcagaccagctatggggagaggacaacacggaggatatccagcttccccggtctggggtgaggagtgtggggagcttgggcatcctcctccagcctcctccagcccccaggcagtgccttacctgtggtgcccagaaaagtgcccctaggttggtgggtctacaggagcctcagccaggcagcccaccccaccctggggccctgcctcaccaaggaaataaagactcaaagaagccttttttttttttttttt

SEQ ID NO: 92511 - DNA, 2644 bp, Homo sapiens
  misc_feature (2515)..(2515): n is a, c, g, or t
  misc_feature (2521)..(2522): n is a, c, g, or t
tgggaagtcggtgccgctgccgtctctgcgttcgccatgcgtcccggggcgccagggccactctggcctctgccctggggggccctggcttgggccgtgggcttcgtgagctccatgggctcggggaaccccgcgcccggtggtgtttgctggctccagcagggccaggaggccacctgcagcctggtgctccagactgatgtcacccgggccgagtgctgtgcctccggcaacattgacaccgcctggtccaacctcacccacccggggaacaagatcaacctcctcggcttcttgggccttgtccactgccttccctgcaaagattcgtgcgacggcgtggagtgcggcccgggcaaggcgtgccgcatgctggggggccgcccgcgctgcgagtgcgcgcccgactgctcggggctcccggcgcggctgcaggtctgcggctcagacggcgccacctaccgcgacgagtgcgagctgcgcgccgcgcgctgccgcggccacccggacctgagcgtcatgtaccggggccgctgccgcaagtcctgtgagcacgtggtgtgcccgcggccacagtcgtgcgtcgtggaccagacgggcagcgcccactgcgtggtgtgtcgagcggcgccctgccctgtgccctccagccccggccaggagctttgcggcaacaacaacgtcacctacatctcctcgtgccacatgcgccaggccacctgcttcctgggccgctccatcggcgtgcgccacgcgggcagctgcgcaggcacccctgaggagccgccaggtggtgagtctgcagaagaggaagagaacttcgtgtgagcctgcaggacaggcctgggcctggtgcccgaggccccccatcatcccctgttatttattgccacagcagagtctaatttatatgccacggacactccttagagcccggattcggaccacttggggatcccagaacctccctgacgatatcctggaaggactgaggaagggaggcctgggggccggctggtgggtgggatagacctgcgttccggacactgagcgcctgatttagggcccttctctaggatgccccagcccctaccctaagacctattgccggggaggattccacacttccgctcctttggggataaacctattaattattgctactatcaagagggctgggcattctctgctggtaattcctgaagaggcatgactgcttttctcagccccaagcctctagtctgggtgtgtacggagggtctagcctgggtgtgtacggagggtctagcctgggtgagtacggagggtctagcctgggtgagtacggagggtctagcctgggtgagtacggagagtctagcctgggtgtgtatggaggatctagcctgggtgagtatggagggtctagcctgggtgagtatggagggtctagcctgggtgtgtatggagggtctagcctgggtgagtatggagggtctagcctgggtgtgtatggagggtctagcctgggtgagtatggagggtctagcctgggtgtgtacggagggtctagtctgagtgcgtgtggggacctcagaacactgtgaccttagcccagcaagccaggcccttcatgaaggccaagaaggctgccaccattccctgccagcccaagaactccagcttccccactgcctctgtgtgcccctttgcgtcctgtgaaggccattgagaaatgcccagtgtgccccctgggaaagggcacggcctgtgctcctgacacgggctgtgcttggccacagaaccacccagcgtctcccctgctgctgtccacgtcagttcatgaggcaacgtcgcgtggtctcagacgtggagcagccagcggcagctcagagcagggcactgtgtccggcggagccaagtccactctgggggagctctggcggggaccacgggccactgctcacccactggccccgaggggggtgtagacgccaagactcacgcatgtgtgacatccggagtcctggagccgggtgtcccagtggcaccactaggtgcctgctgcctccacagtggggttcacacccagggctccttggtcccccacaacctgccccggccaggcctgcagacccagactccagccagacctgcctcacccaccaatgcagccggggctggcgacaccagccaggtgctggtcttgggccagttctcccacgacggctcaccctcccctccatctgcgttgatgctcagaatcgcctacctgtgcctgcgtgtaaaccacagcctcagaccagctatggggagaggacaacacggaggatatccagcttccccggtctggggtgaggagtgtggggagcttgggcatcctcctccagcctcctccagcccccaggcagtgccttacctgtggtgcccagaaaagtgcccctaggttggtgggtctacaggagcctcagccaggcagcccaccccaccctggggccctgcctcaccaaggaaataaagactcaaaaaaaaaaanaaaaannaaaaaaaaaaaaaaaaaaaaaaggccgcgtttaaacgtggaaatggaaacctggcgtacccaactaacgcttggagcacatcccttttgcagtggcgaataccaaggccccacgatcctttc

SEQ ID NO: 92512 - DNA, 2794 bp, Homo sapiens
tgggaagtcggtgccgctgccgtctctgcgttcgccatgcgtcccggggcgccagggccactctggcctctgccctggggggccctggcttgggccgtgggcttcgtgagctccatgggctcggggaaccccgcgcccggtggtgtttgctggctccagcagggccaggaggccacctgcagcctggtgctccagactgatgtcacccgggccgagtgctgtgcctccggcaacattgacaccgcctggtccaacctcacccacccggggaacaagatcaacctcctcggcttcttgggccttgtccactgccttccctgcaaagattcgtgcgacggcgtggagtgcggcccgggcaaggcgtgccgcatgctggggggccgcccgcgctgcgagtgcgcgcccgactgctcggggctcccggcgcggctgcaggtctgcggctcagacggcgccacctaccgcgacgagtgcgagctgcgcgccgcgcgctgccgcggccacccggacctgagcgtcatgtaccggggccgctgccgcaagtcctgtgagcacgtggtgtgcccgcggccacagtcgtgcgtcgtggaccagacgggcagcgcccactgcgtggtgtgtcgagcggcgccctgccctgtgccctccagccccggccaggagctttgcggcaacaacaacgtcacctacatctcctcgtgccacatgcgccaggccacctgcttcctgggccgctccatcggcgtgcgccacgcgggcagctgcgcaggcacccctgaggagccgccaggtggtgagtctgcagaagaggaagagaacttcgtgtgagcctgcaggacaggcctgggcctggtgcccgaggccccccatcatcccctgttatttattgccacagcagagtctaatttatatgccacggacactccttagagcccggattcggaccacttggggatcccagaacctccctgacgatatcctggaaggactgaggaagggaggcctgggggccggctggtgggtgggatagacctgcgttccggacactgagcgcctgatttagggcccttctctaggatgccccagcccctaccctaagacctattgccggggaggattccacacttccgctcctttggggataaacctattaattattgctactatcaagagggctgggcattctctgctggtaattcctgaagaggcatgactgcttttctcagccccaagcctctagtctgggtgtgtacggagggtctagcctgggtgtgtacggagggtctagcctgggtgagtacggagggtctagcctgggtgagtacggagggtctagcctgggtgagtacggagagtctagcctgggtgtgtatggaggatctagcctgggtgagtatggagggtctagcctgggtgagtatggagggtctagcctgggtgtgtatggagggtctagcctgggtgagtatggagggtctagcctgggtgtgtatggagggtctagcctgggtgagtatggagggtctagcctgggtgtgtacggagggtctagtctgagtgcgtgtggggacctcagaacactgtgaccttagcccagcaagccaggcccttcatgaaggccaagaaggctgccaccattccctgccagcccaagaactccagcttccccactgcctctgtgtgcccctttgcgtcctgtgaaggccattgagaaatgcccagtgtgccccctgggaaagggcacggcctgtgctcctgacacgggctgtgcttggccacagaaccacccagcgtctcccctgctgctgtccacgtcagttcatgaggcaacgtcgcgtggtctcagacgtggagcagccagcggcagctcagagcagggcactgtgtccggcggagccaagtccactctgggggagctctggcggggaccacgggccactgctcacccactggccccgaggggggtgtagacgccaagactcacgcatgtgtgacatccggagtcctggagccgggtgtcccagtggcaccactaggtgcctgctgcctccacagtggggttcacacccagggctccttggtcccccacaacctgccccggccaggcctgcagacccagactccagccagacctgcctcacccaccaatgcagccggggctggcgacaccagccaggtgctggtcttgggccagttctcccacgacggctcaccctcccctccatctgcgttgatgctcagaatcgcctacctgtgcctgcgtgtaaaccacagcctcagaccagctatggggagaggacaacacggaggatatccagcttccccggtctggggtgaggagtgtggggagcttgggcatcctcctccagcctcctccagcccccaggcagtgccttacctgtggtgcccagaaaagtgcccctaggttggtgggtctacaggagcctcagccaggcagcccaccccaccctggggccctgcctcaccaaggaaataaagactcaaaaaaaaaaaaaatctgctcctagcccagcagagagagttgacccctcctgaactggccactccccagtgctcctgtgcagggagaggaagcaccccgtttgagagtgtacccagtcagactggctttatctccatggattttcatcagggcaaagatcacagcagtcagcttctggtggctgatgaggatcagagcatttgttcccccatgcctgcaggactcagcctgtacagggagatgaagtgccccaagttgggagcacacctagttagaggtattggtgttaat

SEQ ID NO: 92513 - DNA, 1993 bp, Homo sapiens
  misc_feature (1865)..(1865): n is a, c, g, or t
  misc_feature (1974)..(1974): n is a, c, g, or t
tgggaagtcggtgccgctgccgtctctgcgttcgccatgcgtcccggggcgccagggccactctggcctctgccctggggggccctggcttgggccgtgggcttcgtgagctccatgggctcggggaaccccgcgcccggtggtgtttgctggctccagcagggccaggaggccacctgcagcctggtgctccagactgatgtcacccgggccgagtgctgtgcctccggcaacattgacaccgcctggtccaacctcacccacccggggaacaagatcaacctcctcggcttcttgggccttgtccactgccttccctgcaaagattcgtgcgacggcgtggagtgcggcccgggcaaggcgtgccgcatgctggggggccgcccgcgctgcgagtgcgcgcccgactgctcggggctcccggcgcggctgcaggtctgcggctcagacggcgccacctaccgcgacgagtgcgagctgcgcgccgcgcgctgccgcggccacccggacctgagcgtcatgtaccggggccgctgccgcaagtcctgtgagcacgtggtgtgcccgcggccacagtcgtgcgtcgtggaccagacgggcagcgcccactgcgtggtgtgtcgagcggcgccctgccctgtgccctccagccccggccaggagctttgcggcaacaacaacgtcacctacatctcctcgtgccacatgcgccaggccacctgcttcctgggccgctccatcggcgtgcgccacgcgggcagctgcgcaggcacccctgaggagccgccaggtggtgagtctgcagaagaggaagagaacttcgtgtgagcctgcaggacaggcctgggcctggtgcccgaggccccccatcatcccctgttatttattgccacagcagagtctaatttatatgccacggacactccttagagcccggattcggaccacttggggatcccagaacctccctgacgatatcctggaaggactgaggaagggaggcctgggggccggctggtgggtgggatagacctgcgttccggacactgagcgcctgatttagggcccttctctaggatgccccagcccctaccctaagacctattgccggggaggattccacacttccgctcctttggggataaacctattaattattgctactatcaagagggctgggcattctctgctggtaattcctgaagaggcatgactgcttttctcagccccaagcctctagtctgggtgtgtacggagggtctagcctgggtgtgtacggagggtctagcctgggtgagtacggagggtctagcctgggtgagtacggagggtctagcctgggtgagtacggagagtctagcctgggtgtgtatggaggatctagcctgggtgagtatggagggtctagcctgggtgagtatggagggtctagcctgggtgtgtatggagggtctagcctgggtgagtatggagggtctagcctgggtgtgtatggagggtctagcctgggtgagtatggagggtctagcctgggtgtgtacggagggtctagtctgagtgcgtgtggggacctcagaacactgtgaccttagcccagcaagccaggcccttcatgaaggccaagaaggctgccaccattccctgccagcccaagaactccagcttccccactgcctctgtgtgcccctttgcgtcctgtgaaggccattgagaaatgcccagtgtgccccctgggaaagggcacggcctgtgctcctgacacgggctgtgcttggccacagaaccacccagcgtctcccctgctgctgtccacgtcagttcatgaggcaacgtcgcgtggtctcagacgtggagcagccagcggnagtttcaaggagcaagggcattgtttttcccggcgacaaagtttccatttttggggggaattttttggcgggggaaccaaggggcattttttaaaccatttgggccccnagggggtttttagaagcaa

SEQ ID NO: 92514 - DNA, 1625 bp, Homo sapiens
tgggaagtcggtgccgctgccgtctctgcgttcgccatgcgtcccggggcgccagggccactctggcctctgccctggggggccctggcttgggccgtgggcttcgtgagctccatgggctcggggaaccccgcgcccggtggtgtttgctggctccagcagggccaggaggccacctgcagcctggtgctccagactgatgtcacccgggccgagtgctgtgcctccggcaacattgacaccgcctggtccaacctcacccacccggggaacaagatcaacctcctcggcttcttgggccttgtccactgccttccctgcaaagattcgtgcgacggcgtggagtgcggcccgggcaaggcgtgccgcatgctggggggccgcccgcgctgcgagtgcgcgcccgactgctcggggctcccggcgcggctgcaggtctgcggctcagacggcgccacctaccgcgacgagtgcgagctgcgcgccgcgcgctgccgcggccacccggacctgagcgtcatgtaccggggccgctgccgcaagtcctgtgagcacgtggtgtgcccgcggccacagtcgtgcgtcgtggaccagacgggcagcgcccactgcgtggtgtgtcgagcggcgccctgccctgtgccctccagccccggccaggagctttgcggcaacaacaacgtcacctacatctcctcgtgccacatgcgccaggccacctgcttcctgggccgctccatcggcgtgcgccacgcgggcagctgcgcaggcacccctgaggagccgccaggtggtgagtctgcagaagaggaagagaacttcgtgtgagcctgcaggacaggcctgggcctggtgcccgaggccccccatcatcccctgttatttattgccacagcagagtctaatttatatgccacggacactccttagagcccggattcggaccacttggggatcccagaacctccctgacgatatcctggaaggactgaggaagggaggcctgggggccggctggtgggtgggatagacctgcgttccggacactgagcgcctgatttagggcccttctctaggatgccccagcccctaccctaagacctattgccggggaggattccacacttccgctcctttggggataaacctattaattattgctactatcaagagggctgggcattctctgctggtaattcctgaagaggcatgactgcttttctcagccccaagcctctagtctgggtgtgtacggagggtctagcctgggtgtgtacggagggtctagcctgggtgagtacggagggtctagcctgggtgagtacggagggtctagcctgggtgagtacggagagtctagcctgggtgtgtatggaggatctagcctgggtgagtatggagggtctagcctgggtgagtatggagggtctagcctgggtgtgtatggagggtctagcctgggtgaggaaggtgtcttgagattatcatcggctgatggttggaagcggaatccgcagacgctcagcaggtatcttgatatcatcatctgctgagagtggagctgagggtggccggggagtgagctgacgctcggaaggtgtcttgagataatcatccgctgaggg

SEQ ID NO: 92515 - DNA, 1248 bp, Homo sapiens
  misc_feature (1185)..(1186): n is a, c, g, or t
  misc_feature (1209)..(1209): n is a, c, g, or t
  misc_feature (1221)..(1221): n is a, c, g, or t
tgggaagtcggtgccgctgccgtctctgcgttcgccatgcgtcccggggcgccagggccactctggcctctgccctggggggccctggcttgggccgtgggcttcgtgagctccatgggctcggggaaccccgcgcccggtggtgtttgctggctccagcagggccaggaggccacctgcagcctggtgctccagactgatgtcacccgggccgagtgctgtgcctccggcaacattgacaccgcctggtccaacctcacccacccggggaacaagatcaacctcctcggcttcttgggccttgtccactgccttccctgcaaagattcgtgcgacggcgtggagtgcggcccgggcaaggcgtgccgcatgctggggggccgcccgcgctgcgagtgcgcgcccgactgctcggggctcccggcgcggctgcaggtctgcggctcagacggcgccacctaccgcgacgagtgcgagctgcgcgccgcgcgctgccgcggccacccggacctgagcgtcatgtaccggggccgctgccgcaagtcctgtgagcacgtggtgtgcccgcggccacagtcgtgcgtcgtggaccagacgggcagcgcccactgcgtggtgtgtcgagcggcgccctgccctgtgccctccagccccggccaggagctttgcggcaacaacaacgtcacctacatctcctcgtgccacatgcgccaggccacctgcttcctgggccgctccatcggcgtgcgccacgcgggcagctgcgcaggcacccctgaggagccgccaggtggtgagtctgcagaagaggaagagaacttcgtgtgagcctgcaggacaggcctgggcctggtgcccgaggccccccatcatcccctgttatttattgccacagcagagtctaatttatatgccacggacactccttagagcccggattcggaccacttggggatcccagaacctccctgacgatatcctggaaggactgaggaagggaggcctgggggccggctggtgggtgggatagacctgcgttccggacactgagcgcctgatttagggcccttctctaggatgccccagcccctaccctaagacctattgccggggaggattccacacttccgctcctttggggataaacctattaattattgctactatcaagagggctggggcatnntagagaagggccctaaatcaggngctcagtgtccngaacgcagtctatcccacccaccagcc

SEQ ID NO: 92516 - DNA, 2138 bp, Homo sapiens
ggcctccagcccaggacaggtcacatgggtggcggtggggcctgagtaagggcgtctttatacttccgagggagtatcacggggtagggtcttttgtagggttgggatttggaaaatagtgggcctctgggggctcacactgggcaagagagtcctgtgagcacgtggtgtgcccgcggccacagtcgtgcgtcgtggaccagacgggcagcgcccactgcgtggtgtgtcgagcggcgccctgccctgtgccctccagccccggccaggagctttgcggcaacaacaacgtcacctacatctcctcgtgccacatgcgccaggccacctgcttcctgggccgctccatcggcgtgcgccacgcgggcagctgcgcaggcacccctgaggagccgccaggtggtgagtctgcagaagaggaagagaacttcgtgtgagcctgcaggacaggcctgggcctggtgcccgaggccccccatcatcccctgttatttattgccacagcagagtctaatttatatgccacggacactccttagagcccggattcggaccacttggggatcccagaacctccctgacgatatcctggaaggactgaggaagggaggcctgggggccggctggtgggtgggatagacctgcgttccggacactgagcgcctgatttagggcccttctctaggatgccccagcccctaccctaagacctattgccggggaggattccacacttccgctcctttggggataaacctattaattattgctactatcaagagggctgggcattctctgctggtaattcctgaagaggcatgactgcttttctcagccccaagcctctagtctgggtgtgtacggagggtctagcctgggtgtgtacggagggtctagcctgggtgagtacggagggtctagcctgggtgagtacggagggtctagcctgggtgagtacggagagtctagcctgggtgtgtatggaggatctagcctgggtgagtatggagggtctagcctgggtgagtatggagggtctagcctgggtgtgtatggagggtctagcctgggtgagtatggagggtctagcctgggtgtgtatggagggtctagcctgggtgagtatggagggtctagcctgggtgtgtacggagggtctagtctgagtgcgtgtggggacctcagaacactgtgaccttagcccagcaagccaggcccttcatgaaggccaagaaggctgccaccattccctgccagcccaagaactccagcttccccactgcctctgtgtgcccctttgcgtcctgtgaaggccattgagaaatgcccagtgtgccccctgggaaagggcacggcctgtgctcctgacacgggctgtgcttggccacagaaccacccagcgtctcccctgctgctgtccacgtcagttcatgaggcaacgtcgcgtggtctcagacgtggagcagccagcggcagctcagagcagggcactgtgtccggcggagccaagtccactctgggggagctctggcggggaccacgggccactgctcacccactggccccgaggggggtgtagacgccaagactcacgcatgtgtgacatccggagtcctggagccgggtgtcccagtggcaccactaggtgcctgctgcctccacagtggggttcacacccagggctccttggtcccccacaacctgccccggccaggcctgcagacccagactccagccagacctgcctcacccaccaatgcagccggggctggcgacaccagccaggtgctggtcttgggccagttctcccacgacggctcaccctcccctccatctgcgttgatgctcagaatcgcctacctgtgcctgcgtgtaaaccacagcctcagaccagctatggggagaggacaacacggaggatatccagcttccccggtctggggtgaggagtgtggggagcttgggcatcctcctccagcctcctccagcccccaggcagtgccttacctgtggtgcccagaaaagtgcccctaggttggtgggtctacaggagcctcagccaggcagcccaccccaccctggggccctgcctcaccaaggaaataaagactcaaagaagccttttttttttttttttt

SEQ ID NO: 92517 - DNA, 2427 bp, Homo sapiens
tgggaagtcggtgccgctgccgtctctgcgttcgccatgcgtcccggggcgccagggccactctggcctctgccctggggggccctggcttgggccgtgggcttcgtgagctccatgggctcggggaaccccgcgcccggtggtgtttgctggctccagcagggccaggaggccacctgcagcctggtgctccagactgatgtcacccgggccgagtgctgtgcctccggcaacattgacaccgcctggtccaacctcacccacccggggaacaagatcaacctcctcggcttcttgggccttgtccactgccttccctgcaaagattcgtgcgacggcgtggagtgcggcccgggcaaggcgtgccgcatgctggggggccgcccgcgctgcgagtgcgcgcccgactgctcggggctcccggcgcggctgcaggtctgcggctcagacggcgccacctaccgcgacgagtgcgagctgcgcgccgcgcgctgccgcggccacccggacctgagcgtcatgtaccggggccgctgccgcaagtcctgtgagcacgtggtgtgcccgcggccacagtcgtgcgtcgtggaccagacgggcagcgcccactgcgtggtgtgtcgagcggcgccctgccctgtgccctccagccccggccaggagctttgcggcaacaacaacgtcacctacatctcctcgtgccacatgcgccaggccacctgcttcctgggccgctccatcggcgtgcgccacgcgggcagctgcgcaggcacccctgaggagccgccaggtgcagagtctaatttatatgccacggacactccttagagcccggattcggaccacttggggatcccagaacctccctgacgatatcctggaaggactgaggaagggaggcctgggggccggctggtgggtgggatagacctgcgttccggacactgagcgcctgatttagggcccttctctaggatgccccagcccctaccctaagacctattgccggggaggattccacacttccgctcctttggggataaacctattaattattgctactatcaagagggctgggcattctctgctggtaattcctgaagaggcatgactgcttttctcagccccaagcctctagtctgggtgtgtacggagggtctagcctgggtgtgtacggagggtctagcctgggtgagtacggagggtctagcctgggtgagtacggagggtctagcctgggtgagtacggagagtctagcctgggtgtgtatggaggatctagcctgggtgagtatggagggtctagcctgggtgagtatggagggtctagcctgggtgtgtatggagggtctagcctgggtgagtatggagggtctagcctgggtgtgtatggagggtctagcctgggtgagtatggagggtctagcctgggtgtgtacggagggtctagtctgagtgcgtgtggggacctcagaacactgtgaccttagcccagcaagccaggcccttcatgaaggccaagaaggctgccaccattccctgccagcccaagaactccagcttccccactgcctctgtgtgcccctttgcgtcctgtgaaggccattgagaaatgcccagtgtgccccctgggaaagggcacggcctgtgctcctgacacgggctgtgcttggccacagaaccacccagcgtctcccctgctgctgtccacgtcagttcatgaggcaacgtcgcgtggtctcagacgtggagcagccagcggcagctcagagcagggcactgtgtccggcggagccaagtccactctgggggagctctggcggggaccacgggccactgctcacccactggccccgaggggggtgtagacgccaagactcacgcatgtgtgacatccggagtcctggagccgggtgtcccagtggcaccactaggtgcctgctgcctccacagtggggttcacacccagggctccttggtcccccacaacctgccccggccaggcctgcagacccagactccagccagacctgcctcacccaccaatgcagccggggctggcgacaccagccaggtgctggtcttgggccagttctcccacgacggctcaccctcccctccatctgcgttgatgctcagaatcgcctacctgtgcctgcgtgtaaaccacagcctcagaccagctatggggagaggacaacacggaggatatccagcttccccggtctggggtgaggagtgtggggagcttgggcatcctcctccagcctcctccagcccccaggcagtgccttacctgtggtgcccagaaaagtgcccctaggttggtgggtctacaggagcctcagccaggcagcccaccccaccctggggccctgcctcaccaaggaaataaagactcaaagaagccttttttttttttttttt

SEQ ID NO: 92518 - DNA, 1847 bp, Homo sapiens
tgggaagtcggtgccgctgccgtctctgcgttcgccatgcgtcccggggcgccagggccactctggcctctgccctggggggccctggcttgggccgtgggcttcgtgagctccatgggctcggggaaccccgcgcccggtggtgtttgctggctccagcagggccaggaggccacctgcagcctggtgctccagactgatgtcacccgggccgagtgctgtgcctccggcaacattgacaccgcctggtccaacctcacccacccggggaacaagatcaacctccctgacgatatcctggaaggactgaggaagggaggcctgggggccggctggtgggtgggatagacctgcgttccggacactgagcgcctgatttagggcccttctctaggatgccccagcccctaccctaagacctattgccggggaggattccacacttccgctcctttggggataaacctattaattattgctactatcaagagggctgggcattctctgctggtaattcctgaagaggcatgactgcttttctcagccccaagcctctagtctgggtgtgtacggagggtctagcctgggtgtgtacggagggtctagcctgggtgagtacggagggtctagcctgggtgagtacggagggtctagcctgggtgagtacggagagtctagcctgggtgtgtatggaggatctagcctgggtgagtatggagggtctagcctgggtgagtatggagggtctagcctgggtgtgtatggagggtctagcctgggtgagtatggagggtctagcctgggtgtgtatggagggtctagcctgggtgagtatggagggtctagcctgggtgtgtacggagggtctagtctgagtgcgtgtggggacctcagaacactgtgaccttagcccagcaagccaggcccttcatgaaggccaagaaggctgccaccattccctgccagcccaagaactccagcttccccactgcctctgtgtgcccctttgcgtcctgtgaaggccattgagaaatgcccagtgtgccccctgggaaagggcacggcctgtgctcctgacacgggctgtgcttggccacagaaccacccagcgtctcccctgctgctgtccacgtcagttcatgaggcaacgtcgcgtggtctcagacgtggagcagccagcggcagctcagagcagggcactgtgtccggcggagccaagtccactctgggggagctctggcggggaccacgggccactgctcacccactggccccgaggggggtgtagacgccaagactcacgcatgtgtgacatccggagtcctggagccgggtgtcccagtggcaccactaggtgcctgctgcctccacagtggggttcacacccagggctccttggtcccccacaacctgccccggccaggcctgcagacccagactccagccagacctgcctcacccaccaatgcagccggggctggcgacaccagccaggtgctggtcttgggccagttctcccacgacggctcaccctcccctccatctgcgttgatgctcagaatcgcctacctgtgcctgcgtgtaaaccacagcctcagaccagctatggggagaggacaacacggaggatatccagcttccccggtctggggtgaggagtgtggggagcttgggcatcctcctccagcctcctccagcccccaggcagtgccttacctgtggtgcccagaaaagtgcccctaggttggtgggtctacaggagcctcagccaggcagcccaccccaccctggggccctgcctcaccaaggaaataaagactcaaagaagccttttttttttttttttt

SEQ ID NO: 92519 - DNA, 2356 bp, Homo sapiens
tgggaagtcggtgccgctgccgtctctgcgttcgccatgcgtcccggggcgccagggccactctggcctctgccctggggggccctggcttgggccgtgggcttcgtgagctccatgggctcggggaaccccgcgcccggtggtgtttgctggctccagcagggccaggaggccacctgcagcctggtgctccagactgatgtcacccgggccgagtgctgtgcctccggcaacattgacaccgcctggtccaacctcacccacccggggaacaagatcaacctcctcggcttcttgggccttgtccactgccttccctgcaaagattcgtgcgacggcgtggagtgcggcccgggcaaggcgtgccgcatgctggggggccgcccgcgctgcgagtgcgcgcccgactgctcggggctcccggcgcggctgcaggtctgcggctcagacggcgccacctaccgcgacgagtgcgagctgcgcgccgcgcgctgccgcggccacccggacctgagcgtcatgtaccggggccgctgccgcaagtcctgtgagcacgtggtgtgcccgcggccacagtcgtgcgtcgtggaccagacgggcagcgcccactgcgtggtgtgtcgagcggcgccctgccctgtgccctccagccccggccaggagctttgcggcaacaacaacgtcacctacatctcctcgtgccacatgcgccaggccacctgcttcctgggccgctccatcggcgtgcgccacgcgggcagctgcgcaggcacccctgaggagccgccaggtggtgagtctgcagaagaggaagagaacttcgtgtgagcctgcaggacaggcctgggcctggtgcccgaggccccccatcatcccctgttatttattgccacagcagagtctaatttatatgccacggacactccttagagcccggattcggaccacttggggatcccagaacctccctgacgatatcctggaaggactgaggaagggaggcctgggggccggctggtgggtgggatagacctgcgttccggacactgagcgcctgatttagggcccttctctaggatgccccagcccctaccctaagacctattgccggggaggattccacacttccgctcctttggggataaacctattaattattgctactatcaagagggctgggcattctctgctggtaattcctgaagaggcatgactgcttttctcagccccaagcctctagtctgggtgtgtacggagggtctagcctgggtgtgtacggagggtctagcctgggtgagtacggagggtctagcctgggtgagtacggagggtctagcctgggtgagtacggagagtctagcctgggtgtgtatggaggatctagcctgggtgagtatggagggtctagcctgggtgagtatggagggtctagcctgggtgtgtatggagggtctagcctgggtgagtatggagggtctagcctgggtgtgtatggagggtctagcctgggtgagtatggagggtctagcctgggtgtgtacggagggtctagtctgagtgcgtgtggggacctcagaacactgtgaccttagcccagcaagccaggcccttcatgaaggccaagaaggctgccaccattccctgccagcccaagaactccagcttccccactgcctctgtgtgcccctttgcgtcctgtgaaggccattgagaaatgcccagtgtgccccctgggaaagggcacggcctgtgggaccacgggccactgctcacccactggccccgaggggggtgtagacgccaagactcacgcatgtgtgacatccggagtcctggagccgggtgtcccagtggcaccactaggtgcctgctgcctccacagtggggttcacacccagggctccttggtcccccacaacctgccccggccaggcctgcagacccagactccagccagacctgcctcacccaccaatgcagccggggctggcgacaccagccaggtgctggtcttgggccagttctcccacgacggctcaccctcccctccatctgcgttgatgctcagaatcgcctacctgtgcctgcgtgtaaaccacagcctcagaccagctatggggagaggacaacacggaggatatccagcttccccggtctggggtgaggagtgtggggagcttgggcatcctcctccagcctcctccagcccccaggcagtgccttacctgtggtgcccagaaaagtgcccctaggttggtgggtctacaggagcctcagccaggcagcccaccccaccctggggccctgcctcaccaaggaaataaagactcaaagaagccttttttttttttttttt

SEQ ID NO: 92520 - DNA, 1765 bp, Homo sapiens
tgggaagtcggtgccgctgccgtctctgcgttcgccatgcgtcccggggcgccagggccactctggcctctgccctggggggccctggcttgggccgtgggcttcgtgagctccatgggctcggggaaccccgcgcccggtggtgtttgctggctccagcagggccaggaggccacctgcagcctggtgctccagactgatgtcacccgggccgagtgctgtgcctccggcaacattgacaccgcctggtccaacctcacccacccggggaacaagatcaacctcctcggcttcttgggccttgtccactgccttccctgcaaagattcgtgcgacggcgtggagtgcggcccgggcaaggcgtgccgcatgctggggggccgcccgcgctgcgagtgcgcgcccgactgctcggggctcccggcgcggctgcaggtctgcggctcagacggcgccacctaccgcgacgagtgcgagctgcgcgccgcgcgctgccgcggccacccggacctgagcgtcatgtaccggggccgctgccgcaagtcctgtgagcacgtggtgtgcccgcggccacagtcgtgcgtcgtggaccagacgggcagcgcccactgcgtggtgtgtcgagcggcgccctgccctgtgccctccagccccggccaggagctttgcggcaacaacaacgtcacctacatctcctcgtgccacatgcgccaggccacctgcttcctgggccgctccatcggcgtgcgccacgcgggcagctgcgcaggcacccctgaggagccgccaggtggtgagtctgcagaagaggaagagaacttcgtgtgagcctgcaggacaggcctgggcctggtgcccgaggccccccatcatcccctgttatttattgccacagcagagtctaatttatatgccacggacactccttagagcccggattcggaccacttggggatcccagaacctccctgacgatatcctggaaggactgaggaagggaggcctgggggccggctggtgggtgggatagacctgcgttccggacactgagcgcctgatttagggcccttctctaggatgccccagcccctaccctaagacctattgccggggaggattccacacttccgctcctttggggataaacctattaattattgctactatcaagagggctgggcattctctgctggtaattcctgaagaggcatgactgcttttctcagccccaagcctctagtctgggtgtgtacggagggtctagcctgggtgtgtacggagggtctagcctgggtgagtacggagggtctagcctgggtgagtacggagggtctagcctgggtgagtacggagagtctagcctgggtgtgtatggaggatctagcctgggtgagtatggagggtctagcctgggtgagtatggagggtctagcctgggtgtgtatggagggtctagcctgggtgaccaggtagacctaactgaacttggttattgctgcacctaataatcttctattaagaaaactaggatacgggagaaagagcactggcctgggagataagactcctgagttctactatgagtaattccatccacaaagccagtgacctggtcaagtcacccacctgctaaggcccagtctcttcccctagcaactgaggcagcaggagagaatccctgcaggctgttcctgcattactacgattctcccaggtcagatctaaggggcgaatcagcagacacttaaatgagagaacagaggtg

SEQ ID NO: 92521 - DNA, 851 bp, Homo sapiens
tgggaagtcggtgccgctgccgtctctgcgttcgccatgcgtcccggggcgccagggccactctggcctctgccctggggggccctggcttgggccgtgggcttcgtgagctccatgggctcggggaaccccgcgcccggtggtgtttgctggctccagcagggccaggaggccacctgcagcctggtgctccagactgatgtcacccgggccgagtgctgtgcctccggcaacattgacaccgcctggtccaacctcacccacccggggaacaagatcaacctcctcggcttcttgggccttgtccactgccttccctgcaaagattcgtgcgacggcgtggagtgcggcccgggcaaggcgtgccgcatgctggggggccgcccgcgctgcgagtgcgcgcccgactgctcggggctcccggcgcggctgcaggtctgcggctcagacggcgccacctaccgcgacgagtgcgagctgcgcgccgcgcgctgccgcggccacccggacctgagcgtcatgtaccggggccgctgccgcaagtcctgtgagcacgtggtgtgcccgcggccacagtcgtgcgtcgtggaccagacgggcagcgcccactgcgtggtgtgtcgagcggcgccctgccctgtgccctccagccccggccaggagctttgcggcaacaacaacgtcacctacatctcctccagcccccaggcagtgccttacctgtggtgcccagaaaagtgcccctaggttggtgggtctacaggagcctcagccaggcagcccaccccaccctggggccctgcctcaccaaggaaataaagactcaaagaagccttttttttttttttttt

SEQ ID NO: 92522 - DNA, 2347 bp, Homo sapiens
tgagctgagatcatgccactgcactccagcctgagtgacagacactttaaaaaaaaaatagattttgctattgggtaaggtatagtagtcggcagcagaatggactgattgaggacaactataaaattacaaaaaatatttaaatgcaacttattgctatagaagcaaagagaactaaaggagcaaaattctagagagtggtaaatcccagaaagcacatgcacagaatgcagctctttgctctggggaccctttccacttctggctatagggaagaacctgaatactgaacttggttcaggcagagggccataccctgggggtcaggggaaggcatgggggggaccagaaaccaggagaacaatcaagactgcaattaaaaaaaaatggatacattaggggcttcaaacacataatttctcaagaaatttccagatatctcatgctgcatagggcaggaggctgaaaagctaatttgagaagaaaacaagtaggatttttgttttgttttgcattttgcaatatggaggagaaatgattagaccttaggaagtgccagtgggttggtcctttcatgaacatgccatcagtaaaagccctggaaacaaggtcataccagagattcattgtaccttgtcacaactgcaaacaatatctgagtggaatattcaaaaacttgcttagaaagaaaactctaggacagatggctccactgaagttattccaaatatttaataaataaagcataccaggcttttataaactcttctagaagaaaaaagttggaacttttccaattcagtttttcaggccagtgcaaccttgataccaaaaccaataaaacaaacaaacaaacaaaaaacataaagctatagaccaaagtctcatagatttagatgcaaaatcctaaaattgaaaaaaaaagtctagtcatatccataaactgtatcatcaccaagagatgtttattagggcaatcaaaagatgatttattattttttaaaaaatcaatgtggccttcccttcctctttcttttgattcccctctttgagtttttatgtgtctcttttgccttcccttcccagagtggaggagttagacctgcattgtgggatgagaggagttgtggctatgtgtctgctggcaccaagagggctgagggtgaggtgtggaagggacagggggaggagatgggcagcattgttaagagattggtaccactgagcaaatatgttgagaatgatgatggcaaggtttctccctgttagagaaggtatttgtagaaataggaatgaggagagctagaaaacctggagtgtgggattagaatagaactcatatcttttaaatacataggaacaatagagaaattgttgggtgtgcccatatacatatattttgtgattcattctaccgagaggacataaatgcagtcacagctcagtaacagtaaacacaccaactgccaagttattatttcctaaatactatccacaaaaaaggggaccagggatgattcctagtcggagattgggagaaaaagaagatgagcctgaatcatttcatgtacctaacagaaagaaaatactctggctgggctcagtggctcatgtttgtaattctagcatgttaggaggtcgaggtgggtgtgttgcttgagcccaggagtttgagaccagcccaggcaacatggcaaaactgtctctacaaaaaatataaaaattagccaggcgtggtggcatgcacctgtcatccgagatactcaggaggcagagaggtgggaggatcacttgagcctgggagattgagactgcatcgagctgtgatcatgccactgcactccagcctggaagacagagtgagaccctgtctcaggaaaaaagaaaaaaaaaagatgttgctcagcaagttaatggacaaactgtgcaatatccagaaaactttaacattcttcaaagaaatagaaaacacaatcctaaaatttatatggaaaccacaaaagacctagaatagtcagagttatcctgagcaaaaggaatcaaactggagggatcatattacctgacttcaaattattctacagagctacagtaaccaaaacagcatgatactggcataaaaacagacacataggaacagaatagacaacccagaaacaaattcatacatctacagtgaactcacttttgacaaagttatgaagaacatacattggggtaaagatagtgtctttaataactggtgctgggaaagctggatatccgtatgcagaagaatgaaactagacccctatctcttaacatatacaaaaatcaaaattaattaaaaagttaaatctaagacctc

SEQ ID NO: 92523 - DNA, 913 bp, Homo sapiens
agcttgcatcctctagagcggccgcctactactactaaattcgcggccgcgtcgatatccacaaaaaaggggaccagggatgattcctagtcggagattgggagaaaaagaagatgagcctgaatcatttcatgtacctaacagaaagaaaatactctggctgggctcagtggctcatgtttgtaattctagcatgttaggaggtcgaggtgggtgtgttgcttgagcccaggagtttgagaccagcccaggcaacatggcaaaactgtctctacaaaaaatataaaaattagccaggcgtggtggcatgcacctgtcatccgagatactcaggaggcagagaggtgggaggatcacttgagcctgggagattgagactgcatcgagctgtgatcatgccactgcactccagcctggaagacagagtgagaccctgtctcaggaaaaaagaaaaaaaaaagatgttgctcagcaagttaatggacaaactgtgcaatatccagaaaactttaacattcttcaaagaaatagaaaacacaatcctaaaatttatatggaaaccacaaaagacctagaatagtcagagttatcctgagcaaaaggaatcaaactggagggatcatattacctgacttcaaattattctacagagctacagtaaccaaaacagcatgatactggcataaaaacagacacataggaacagaatagacaacccagaaacaaattcatacatctacagtgaactcacttttgacaaagttatgaagaacatacattggggtaaagatagtgtctttaataactggtgctgggaaagctggatatccgtatgcagaagaatgaaactagacccctatctcttaacatatacaaaaatcaaaattaattaaaaagttaaatctaagacctc

SEQ ID NO: 92524 - DNA, 2215 bp, Homo sapiens
  misc_feature (814)..(814): n is a, c, g, or t
aactgtttcagcatagatttttaaaaatcatgtgtgtaaaagagaatgaaatattaattatgatatttacaaagctctgtacattcagaattgaactctttctgcatctcttttttgaatcagagttgtcataaaccacaatttttcacggtaacaccctctctgccatcaggataaataacatttcttaaaggaatattctactgcagtctctgagatttttttccctgtcttagacatccattctacaactctgatgctggcacattttttatcttggcaaaaggacttaatagaaaaattttagataacaatcaggattcatactcttctcaatagtccttaaatggtttattgaccaaaaagtaaagaagtaacagtccagtcatatcatggaaagaacaaccaaattcatgcatgcacaggcaaagacaaccatatcactatgaccacctggctgacagtaactgcaggacatcaattattgtaagacacttcctgtaatatgtttaattcctctgacataaggatttatgtgaattaggaagtggcccaagggtgaaaagtaatagggaaatagagaaatagaaccgatccaaaggaaagggggaaaaaaacccacaaaaagtgtgatgtcaagcaaagcctattctggagatgactttggttcactcccacgggagagccctagagacaaaaaggttctacagtaggttcaagtcagaggccagagaacccagagtatttatacctctgcaccatcagttattgaatgggggtgggggtgggggtgggtgtaaatttccaggtgctnccagcctgcaatgcagtcaaagcatgttcctgtagcctgaggacagccgtccaacaaagaggtgcaggtgctgaatgttgagagtgaaagcacagggagctgtcatgcatgagagtggtagagggatctgaaagtgctagcagtgcctattatacatccaaatactaaagacgcttagatgtgaaaaatgtgtgtcttagaatcgataaaatatggtatagagaatcaagtctccttgttcctggtttatctcatagcatacttaaaattcagctaaagatgaaatgccttaacaagtgaaatgggctttctgaaaaattatttcaatcaaaattgtgttaaaagctatttctaaaaaccctaacattaaatacttagaagagatcaagtggtttgtccctggacattcaagcaattgaatgtctaaacaatccaagacagataattttgtagtatttactgtgtgaagtgaacctttaaggctgtggacaatgcaaactccctcatgtaccttgctccttgccaatttcaaacaaaccttctcacctatgatataaggcttccttagaattattgattaattatttaagatacaataaaaccaaagtatttttaaaacacagtaattatgttagtgcaggtacatgacatagatatcctcaaatattcttaggacatctataaatcaccacaaacattctggaaagcagtcttggaacatctatcaaaggccttaaaaatttcttcttctgtgaatttatcctcacaaatgaccccaagtttagaccaaaataaaaaaatgcttaaaaggcttattaaagcatgatttaaaatagaaatgattgcgtaaattcctgaaaacaggggaatgtctaaataaaatatggtatctaacatgatagaaaatgtttactaatgtttaatgataccaagaaagtatcacaataataacatcaagtggtaataacaggaaacagatctgtatacaatataaaaccaacagtattgtatatataaacaccatagaagatctgaaaaaaaattagatgacattatttgtgatatctattttatttattatatttttctgcatactactctacagtgagcatgtcctttataagaaaaaatgctaatgatttattgtgtatgaaaaaagtgtatctgatttgattatatatttttatttccacttatattttctaggattattttgctttagaattctatgtataatcctgtgaaaatttgtagtgttgtagggactggaaagatcagagattatgttatggccatgaatgaggcctgacctgcattgtcaataactaaattgattattgtggaaacaacaaaaaaattcattttttgaaatgaaaatctttattgaaataaaaaaattac

SEQ ID NO: 92525 - DNA, 416 bp, Homo sapiens
catgagctactgaggccgtcccaagctatttaaaatacttcagaattactttataccaaagcaagcaatcttagagattcttacaagtctacaaattaaaagatctagaagagttcacagtttcagccttgagttctgtctcagtccagactgtgggatcattcctggacttttccttgctgagccagctgccttaaaagaatcatttggcaagtcattcagccagtctctcagctgctcagtggcaagatgggaagcctaggctgagattttcttccctgacactctttagggagattgtgggacaagggggaaagtgggtagagcaagactgagtgaacctcctcatgctgggttgtgtgagagatttacatgcctatagtcaattcattctaacatccacagaatgcagatat

SEQ ID NO: 92526 - DNA, 337 bp, Homo sapiens
tacatttcaaatttgactgaattggttcttttaatgctttacactctaccgaagtataaaatactgcactgaccatgtttgttttgtttctggttcagatatttctagtttattctcagttttcttcgtttgtgaaatagagataataagtattactgagtaccatccatgacttttagtggagagatgccatcttgatgactgaaagctaaaccagagttttcttcctcattctcattacttagaaacctttgctgatgattaggtttggtgccctaatgggacaattgagactaacacggtctataagataacttgcttcaatttaaaaaggcaa

SEQ ID NO: 92527 - DNA, 667 bp, Homo sapiens
ccacagcctcctgggtagctgggacttcaggtgtgtgccaccacgcctggctaatttatgtatttttttgtagagacagggtctcactttgttgcccaggctggtctcaaactctcctgggttcaagtgatcctttggcctcccagagtgctgggattacaggtgtgagccaccatgcccagcctttcctcttaagttatgaccacagaggttgttaggttaggttccactctgatgactgcattttaacttaatcacctcttgaaagaccctatctctcaaatacactcacattctgaggttctggggattaggacttcaacagatgaaatttgtaggggacacaattgaacccttaacggcctctgagtgggaaggaagccgacttggagtctggctttcatttctaggcaaatacaagttggaactggggcccaggtacctctgggagaagcttgtggtgcccctgccaatcagagttacacacgaggtggctgtcccgggcttcctccgtccaggcaggctcagcttggcctcctcccagcctcagagtcacaggtttagacaggaggggccttatgggtcacctgctctaacccacatccccaccttgcacccccacccagcacctgtcatggcaccccctgaacatgagcactcaccttct

SEQ ID NO: 92528 - DNA, 329 bp, Homo sapiens
tcgtcggctcgggacccccgctggcctctgagtgggaaggaagccgacttggagtctggctttcatttctaggcaaatacaagttggaactggggcccaggtacctctgggagaagcttgtggtgcccctgccaatcagagttacacacgaggtggctgtcccgggcttcctccgtccaggcaggctcagcttggcctcctcccagcctcagagtcacaggtttagacaggaggggccttatgggtcacctgctctaacccacatccccaccttgcacccccacccagcacctgtcatggcaccccctgaacatgagcactcaccttct

SEQ ID NO: 92529 - DNA, 485 bp, Homo sapiens
caagaactaaactgctggttatgatgtggtataataggcactactaattcatctactaatttaaaattatgaaaaaaataaaaaagcaaacctattgacaggaaagagagaaggggaggaacggaggtaaaaacaaaagaagcttctgtagttttccatttaaagtcctgccaaacttctgtgctcctctggatgtgtctggatttccagatgttctgcagtggtattaatctggcaggtacggtagttcttctactaataaaacagaattagactgtggtagtcccttaattcattattcaccctgcattcaccattgcctacctaagtttcatactccatccaatatccaaattgatatttttaaaacacaaatttgcagatgcttttcttgtacaagaacaccttaatggtctcctgttgcttaaaagataaaatacaaaattcttaacattgctactcaaccctgtgtgatctggcctccg

SEQ ID NO: 92530 - DNA, 346 bp, Homo sapiens
gaggttgagggctgagaacaacaccatgcttatggctgtgggagcaaggagggataagagatgtttgtgggtcaggcactgtggcttgggctaggtgcggtggctcatgcctgtagtcctagcactttcggaggttgaggtgggcggatcacttgagcccaggtgtttgagaccagcctgggcaacacggcgagacctcatttctataaagaaatacaaaaattagctgggcatagtggcatgagcctgtagtcccagctactcgggaagttgagatgggaggatcacttgagcccagaagttcaaggctgtgagctgtgatggcgccactgcattccagcctggg

SEQ ID NO: 92531 - DNA, 503 bp, Homo sapiens
ttccccaaagtaatgggtcaaaacaacaaatactcattatctcagggggtttctgtgtgtcaggaatttgggagcagcttagctgaatggttctgccctggggtcttctcataaggctgctgtcatctgaaaatgacgggctgaatgatccacttgcaacgtagctaactcacatggctattggcaggaaacctcattccccacctcagctctactccactggtctgcttgaggctcctcacgacatggcagctggttgcctccagagcgagcaacctgagtcaaggaggaagctgaaatgcctttcatgatttggcctcagaacttacacactgctcacttaggctgcgttttgttagaatgagtcactaattcacaattgtaaagatatggaaccaatctaaatgcccattaaccaatgagtgcataaagaaaatgtggtatatatgcactatggaatactactcagccataaaaaagaataaaatcatgtattttgcagc

SEQ ID NO: 92532 - DNA, 108 bp, Homo sapiens
ccagacctcttcatctcccttctgcttcacagccactgttgcctacctggtctcccagcctcagcatcatccctctaatccattcttgcgccacatcagagtgccgtc

SEQ ID NO: 92533 - DNA, 383 bp, Homo sapiens
ttcctcccaaagtgctgggattacaggcgtgagccaccgtgcctggccaaaagtctttttttgagattaaaaacatccagaaagcagccggacggacatttccattgtattagtttcctgttgctgccataacaaattatcacaaatttagtggcttaagacaatatacattattatcttacagtttggaggccagaagtctggaatgggtctcactgggccaaaatgtatttcagcagggttgtgtttctttctggaggctctagggaaagatctacttccttacctttccagcttctaaaggctgcccacactccttggctcttagctccttcctgcatcttcaaagccagcagtggctgattgagtctcacctctcatca

SEQ ID NO: 92534 - DNA, 290 bp, Homo sapiens
tgtattggtggtgcttgctgtttcctgttgctgccataacaaattatcacaaatttagtggcttaagacaatatacattattatcttacagtttggaggccagaagtctggaatgggtctcactgggccaaaatgtatttcagcagggttgtgtttctttctggaggctctagggaaagatctacttccttacctttccagcttctaaaggctgcccacactccttggctcttagctccttcctgcatcttcaaagccagcagtggctgattgagtctcacctctcatca

SEQ ID NO: 92535 - DNA, 398 bp, Homo sapiens
tagactataatccatacattcaagctgatatagctatagtaaccactgtttcattctctgtgtaatggatgtaatacacagagatacagaatgaaacagtggttactacaggtcaggggagggaaaggaaatgggagatataggtcaagaggatacaaaatagcagatatataggacgaacaagtctaaatatctaatgtaccacataatgcctaaagttaatacagttgtgtcttattagggattttcgttaaataagtagatctttttctgatgccttttcctcctgcccaagtcaaggggttagagaagaaaaccatgggttcaaagagtgaactgtccctctgttagtgagctgagtgatttttgataatttactcacttgtcttacttgatga

SEQ ID NO: 92536 - DNA, 371 bp, Homo sapiens
ttttttttctgagacatgatctttccccattgcccaggctggagtgcagtggtgtgatcatagctcactgcagcctcaagtgatagctcgtagctcactgggctcaagtgatcctcctacctcatcgtgagtagctgggactacaggtgcccctccaccatactcacctaatgttttgaatattttgtagagatgaggtcttgctatgttgcccaggctggtctcaaactcctgggctcaagtgattctcccgccttggcttcccaaattgctgggattataggtatgagccaccaagcccagccctgacctgattaataacacccaagacacacagaggtgggaccgtaacatggggagcatcacgtcct

SEQ ID NO: 92537 - DNA, 442 bp, Homo sapiens
gacacagcaggcccctgcccctgaaggagactgcattggaatttttgccaggtggccctgacacataggaatgcccaactactgtgactaccctctgagataaaaagctgtcctactgattttagaaggccaaaattagaggtcattttggaggtcatgccagtggacatataacagtttgaaatgtttgttccccggtgccgtaaagaaatagtacttgaacttaaatttattcagcaaggccatttttattttctgcagaaagggtacacttggcagcagttttgccacgagagtaccccgaacaaaggagacagggtcatttataacctgacgcgtccacccttctgctgtgtccggtttccattggctggaacaggacctcacattctgtatttgtcccgattggctagcaacttagaacttattaaaagaggcaaag

SEQ ID NO: 92538 - DNA, 414 bp, Homo sapiens
tttttaaatgctatagaaaagataaatatatttagatctattaataatgaaaaaattggggaaacatctttctaaagaattattaaatgattttcatctacaaatagtcatattaaacagttcaaaattacctcccagcttgtcactagaaactggggttactaagagttaaaattcaaattaacacatgtaattaaaactactaaactaaaagaaataattctatatgcaaggtatataagaaaagcgagatatgtttttgattatgaaagttataaaggcataaaaatgtacatttgggaaaaaaatttgtctagtttagaagttatttaaaggttgcttcctattgaaagaataaaaattatatagataaaactaaatgaacatagaaaggtatgaaaagaaagaatacaa

SEQ ID NO: 92539 - DNA, 293 bp, Homo sapiens
tcaagcttatgttctgttgagaaataaataaataaataaaaataaaccaaataaataaggaaaacgtataatatattagatggtgataagtgctaggaggaaaaataaagagcaagggaaaaagggaacatttggggggcagtgacccagatggaacaattttaaatagggtgacatttgaaaaaagacctgaagaaggtgagctaactagccatacacacctctgggggaagaatggtccaggccaagggagcaggcagtagggagagcttaaacaggaagcatgcctggtg

SEQ ID NO: 92540 - DNA, 469 bp, Homo sapiens
ttggagaaaatcagatatacaaagaaggagtggatgggaatgatgagaaaaaggaaataagaggggaaaattaaggatcttgcggaaatgaaagaaaaacaagacaaccagcctccctcatctccctctatccattaaagaaacttcagaagagggcactttgaagctatttgtgatattactaggaatagaagagaacagaccacatccatataaaactactttacaaaacagaaaatgcaaatcagctcatttcaggtaatgaaaatatttcccagaaaatcagtcacaaagcagaagaaaattgtaacataacattccaaactgaatcagatatcctcaaacagttaaggaggatatgaaaaaaccatgtttaatcagaaatactaaaatcaagaacagagatggaccaaaaaaccccacaaagaaatgaaaccacaactgatttagctcaggatagaagtaaaag

SEQ ID NO: 92541 - DNA, 492 bp, Homo sapiens
cagagcacaaaagccatacagtacagtctaatgtatgcgtctttcctgcagaatcctaatggtgctgcactgaggggaatttacacaaaccttataggaattaaaaagagacatttatttcattcagagaatgcagtgacttccagtgcttgtgcggctaggaaagctcggctttcaaagggccttttattgtgcaggaagaaagcgcagctccagcgccgaggggacactttggaggccggctccgcgtgcctagcaactcctgggagcgcgctgcttttcccagtgccctgggccgggtctttccgtccatccttaattgattgggttaatataaaccccggcacggccggcgtttgtgcggcccccataataagactgttgtgggcttctctctgcccttgtgtccccccattaaggaatgtgtcactccgcacagttcaaaagtgtgagcaagtgaaaagggccacaatcacttcattaatgatttgt

SEQ ID NO: 92542 - DNA, 279 bp, Homo sapiens
ggaaagagcactggaccaccatgtgtattcattcactattttttggtataactgatatttattgggtacctcctctgtgccaggcactgttctaggcacttgggcacagtggtcagtaagacacgcaaagtcaacaaaataacagtaaaataaaaggcatgtttggtgaggtatgtgctgtggaaacatgtaaagtaggtggggaataaggatagcaatttgaaacaggaagttcagggaatgtctgtataagaaggatttgaaggaggtgaaatgtgg

SEQ ID NO: 92543 - DNA, 562 bp, Homo sapiens
ctccttttatcttcttcttcttcttttcaggctttccttacgcttctttaatactgacttccgtagatcttacttccaaccccctactccccagccccccacccgcacctatctactgccgcccccttgcctcccacacacagatgtgacacttttaatgcacattctgtagccctcatttttccttctccttagactctgctatgggaaatcttggtccctcactgcccccattcatctgcctctctgtttgcgtttacatgacttgagtggcctgtcagtcccgctagtaaagtctcctcatccatccactctgtttaaacaatcaaactctgaaacctgtgtctcctggaccatcctataatccctaaaataggctgttatgcttttcacctctgccctactctgttagcactaccttacttattgacctctttcaatcaaatcgttatctaaaggatacctgtaactcagataggttgcctactgggcctgtttagttttaagtaaaccccactgaatatgagagacccaccctctatttgtatgtagaggcagattg

SEQ ID NO: 92544 - DNA, 367 bp, Homo sapiens
ctcagtacatcatgtgcatttaatctattttctcaggccctgctcctagggaactggacctaagacaattagtcgtaagataaagtcaacaggacatatcaataagctcaacttgatagagctgcttctctgagcccagcactctgccatcagtgtgtgggtgtgcaatgacatgaggagcagcttctgctcccatcaagcttaccatgtagctcggaagtgaaaacataagagtgtgtacaatgtaagttgcatcataatgctagctctagataccaaattgacaagtggtaaaatttgaggtcagcaaacaggagtgttttcctcagagatctccataattgaaagtaagtatcaaaatgcttgt

SEQ ID NO: 92545 - DNA, 771 bp, Homo sapiens
cacagttctctcgtcagtcccatcccctcctgcttaagcttctgcacaccctaccataaaaacaagtccacttgaagcagctttattcataaccagaacctgccctccacacttcctcagatcatgcaccagggttgtggcttcacccagatggtagctgtggttgatcaactcaaccaaataattagtattgattggtttattttttttagtttccatggatgttcattttgttagagtacagtattttgcctcgctctacagcctgcaaatttaatgtataaaagtactccgttttctatactttttggaacttatagtgtagctgcacaattcctttcaatcccaactcagattagttgttagctaaaagtatatagaagaattctgagccatggtaagatgattcttttttaacattaattttctgaaaaaatgttgtatccatgtagcactaaggaaggagtttaaacattcacatgtagtacgtgtgcacacataaaatcactgcctcattcatgtgactttaagcaaatcacgtcatctctttaagtttcatcttcattatcgaaaaaactggtactaataatactcgttctgtcttcttagcggggttgttataaaataaatataaagtaattgtccttgagtacaatgcaaatgcaaatatcctccaaatgcggtgaaagtattttagacatgcaaggggacatattaaatgatttggggatggacagaagagcccttgaaagatggggatatcatcatcca

SEQ ID NO: 92546 - DNA, 298 bp, Homo sapiens
gtgtcagtagcataatgtattttcttcactggcatttagcatacttttaacctgtggtagcccataactctttactgtgtcagggccgggttccgtgcacctcctttatcagcctacaacactacgatgcccccagcctttccagtgccgcctcttcctgcccagcccagttcctggcccagaggccatggcagtttgcatggaagtgctgagtattgtttcatgtttgcaaagagaggacagctgtggatgaatggagaggaaataggagaaagtcattgtcagagactcgggattt

SEQ ID NO: 92547 - DNA, 421 bp, Homo sapiens
aaagtagctgcctcatagggtcataacgagaacaaaatgagtggatgcatatagcattaagcctaatacttggctcatataatgaacccagtaaatggttgctattattactataacaactacttctattactgttggtgctactattactattactactcttactactaaaacaagtactgttattcctcctcctgccagcaccatggggattacacaattcagctgaggacaggatgatgaatcactggcgactcagtcctctcccacgaatggtactggagtgcttgaatttgccagcacttttgtaaggagctgggagcaaaggctgagaagacacagtcactgcccagacacagtcactgccctcatagactgtgaatctagtgtccaacaaaggcatgactcaacaaacaaccag

SEQ ID NO: 92548 - DNA, 236 bp, Homo sapiens
gccagacctatctagctaagctgctgttgaattcttggaccatagagactatgagataatgaatatttattgttgtccagtgcagctaaaaattttggggtaagttgtttcatagcagtatataattctcttctgaagttgtgctgaaggggaaatttacacccaattcatgtattagaaagaagctgaaattcagtgatcacaagtgtatttctcaagaagttaggagaagaaca

SEQ ID NO: 92549 - DNA, 292 bp, Homo sapiens
taattattgtaataatacaacactaattattgtaaaataacacctataaattagtaatactttattattataaaatacagtcctatttgtattgtaacactccaacttgtatgtcggtgtaacttttaactttctggaaattcaagctaatctcaaaaggtatctctaaactatgggaggacttaattcttcttccacctttaagtttcacttaagtctcacctttcctgcaaggaacaacaaaagacaatagaaaacatggcagcatttgcttcttcctcatcagagtgtt

SEQ ID NO: 92550 - DNA, 396 bp, Homo sapiens
caaaccaaaagtaaataacctttagattatattgttttagctgatttgtgtatcacttccataagtatagctaatcgttgagtatagcttttattggacactgatttttaaatcagggtatttgcattaagaatacttaaggttggctgggggtgtggtggctcatgcctgtaatcgcaggccgaggcgggtggatcacctgaggtcaggagatcgagaccagcttggccaacacggtgaaaccccgtctctcctaaaattacaacaaattagctgggtgtggtggcatgtgcctgtaatcccagctacttgggagtctgaggcaggagaatcgcttgaactcaggaggtggaggttgcagtgagctgagattgtgccattgcactgtagcctggg

SEQ ID NO: 92551 - DNA, 472 bp, Homo sapiens
ccgatggatagaaagacagataaatatcccgatagcctactatcagcatcctactactgcttccctaaagcagaattgttattcatttaagaagtctaatatgatatacattcatcctagtataaataaataatctctaagttttctgaaatggaatatttaacgcacatagacagtggatatttactttaaatataatgttattaatcctctgcatttcttttatcttgataactcctagtgagggaatctaattaagatttcatgctgttctttgtaatgataaatgtttccggactaaacactctataatacaaatcaaaaaatcttccttcttataactgagaaatgtttcacccaaatttcctttgttattatatatttactacacatgttgaatttattattgtttatttccaaggcatgtattattcaatttctaattaaaatatatcagggcttatattttgca

SEQ ID NO: 92552 - DNA, 381 bp, Homo sapiens
ggggactctgggcagggaagcctctgaccctgtcctcatggagctcaccatgtaggagagagatgaagacagtactccgaggcaccaggcaggatttgcaaggtgccatctaagcagaattattctagagaatcccaaggtgctcaggagggagatcattgttttccctgaggcagtaggaagggcaggagatgcaagaacaggccctggactcaggcagacccaggttccaaccctgcttgcacactctgaactgggtagctttgagccaatcactggttgtctcatgcagaagatgggctaccagcacccaccccagggatgctatgggctgacaaccaacatatcatctatacctgtgggtggacttgcatggaatcg

SEQ ID NO: 92553 - DNA, 332 bp, Homo sapiens
gttcagaaaggaaacaaggaggagagagtttgagaggggagagatcataaaggcaaagtgtgaaaagatagagaacaggaagaaaaaagccacaaccaaaaactatgaaaacagagtaaagacagacagccctgtaatgaaaatgctcaggataccaccaaatagaaactccctttgtttactgctagtcattgcagctgcttccaccccaaagtaatgagaagggagaggtttttctttatgcctgtgaccttggttttgaagctttgcctcatagtgctctggtctgccatagtagacattagcatatatcattatatgcttagtcagcc

SEQ ID NO: 92554 - DNA, 530 bp, Homo sapiens
tacacttacaaaggcatatgtgcatttggaattctttaaaggacaacatcctcgagcttctcctggtagtatactctagatataacgtagtgtttgggcaatttgggatcaaataattcttacagctttatagaatcccttgtgtaattaaacttgaaccttgtataacttatgtaaaggtaccaaatcatctcttactcacagcttgcctccccctgagaatcataaatgcaatctttaaaaaccatttaccagcaagaccaaagctaatctgtaaggttggggcctcaaaactcaattctctatttcctttggaacatgaaagatgcagaaactgcctttttattgttcatctgacttaggtgggccccagggttttgtcctatttcctagatgttgatgagcttcttgggtttctttgatgattgcttttgctcttcagtggtcacatttggccttactcagtgtaggggtgtggagaggtggcaatttattgcttaaagatgttatagcaggtgttcctgggcgca

SEQ ID NO: 92555 - DNA, 512 bp, Homo sapiens
gtgaagtgttcaggctgtggagtcagacagacccaggttcaagtctcagctctgcctcctcctccctggctctgagaccttggccaagttgcttctttctctgagcttcggttttctcttattaatggaacacggagtcccccgggagttgtcccaagggttccagggcgcagtacgtagaaagcttgggctggtcatttgtgctgctgtgcggataagctgaggctgcccagagtacatgctgcctgccacagggtgacattcagtctcgacgttgtctccggtccacacccctgttatcctgccctcttatgtgctgagcaatttctactgtgagtaggaatgtcagaacaggcagacctcagagatagtctgctcgaccatggtgatctcacagatgggctgactgagtccagagagggagagccccctgcccccactccccgccatggttctccagctggccatcccctgggtgtggcgccctgtgctgagttgagtggtctcatggt

SEQ ID NO: 92556 - DNA, 261 bp, Homo sapiens
tcatagtgccatgctatagctgcctgtttccaatgcttgatcaaactctcaccactgtctatgtgaaagtgtttaaaatttggctgtatgagtcttcatactaagacaaagaaaatcctaagtttttagactgaggaaatcaatttgagcaagtgtacattcacttttctttcatttgtattatgactttgtcttctgtcttatgttcatatttaacaatagtatttttgttgaatacatgtgttctgacttggataataa

SEQ ID NO: 92557 - DNA, 206 bp, Homo sapiens
gcctcaacttaattagtacctatatcattttaaagtttagtcagatccatttaagtattctgccttattaagtcattcataaatattttccatattattgtataatttatctaataatgtctagtagtatatgtataaatatatgtttatatactattatatattatttatactgtacaatctacactaataaaagaggtatatat

SEQ ID NO: 92558 - DNA, 368 bp, Homo sapiens
gttcacatatgattaatgtgtagtatgtgctttgttatcatggaaataataatgaaataatattgtgcaccttaataagataataagattcagagaatatgattaaatgctgagtttatctgagcacatagtttgaggatagccactggggaaacagatatcctgaagagtggggtcagtgctccaacacggggaatttgagtcttctcttctatagggcaaaatgaagcttaacagggtgacattttccatacaaggccggtgcacacatttcagtgatttgataggttgcagctaccaaatttcaaggatgattgctttaacttttttttttggatggagtcttgttcggtcgcccaggctggagt

SEQ ID NO: 92559 - DNA, 249 bp, Homo sapiens
aatactggattgagggttcatgatgactgttttattctagttgttgaacatgtacagccatgtcgaaggaaaagttctatttctcacctctcataaaggatggcattttaaaggtgaattttaatgtcattcatctaataaatatttgttgcatgcaataagcacaatgttattcatatattcatagtaaagtaatagggagaaaggaagtacggaatatcctgaggatatcagctgtcatcagagatg

SEQ ID NO: 92560 - DNA, 433 bp, Homo sapiens
atcttactgtcttgccccctgggtttggggggctcacagtgacattgtgggccctgccataatttctccacttcccttcttgtcttctcccccgtgtcctctccctcctgtccttcttctcttccctcttgccatctgtcttccaattctgctgcacaccgactcttgctgcggctgccagaggacagagtgaggatggagcagagccacgttctgtaggggagggggaggccccacaggtagtgtcaggtctgcggcaggtgtgagaagagagagaggatggcggggttcaatgctcgggcagctggcctgggtgggagtgtgagagatgcctggactgcttgccctgtcagtgcagccaagattatgttggcatctgtggagtcatgcaggactgccagtctctgggctgaaggttaaccaaccccctttg

SEQ ID NO: 92561 - DNA, 505 bp, Homo sapiens
  misc_feature (1)..(1): n is a, c, g, or t
  misc_feature (65)..(65): n is a, c, g, or t
  misc_feature (109)..(109): n is a, c, g, or t
ncactggggctggaacccttgggggggaggccagtaaaaggaaaggataggcttctgagatctcnggaacaaaaaatgtcaggcaaaaggcttaccttcccactcaaangctcttcttcaaactgtgtgtgcttttgctgtgatttgccttcacaatgcattcttcttgtcaagttctgtgcagctgttaactgaattattgtggtaactttggccataagtgatggtcttggctaacagttactcgtaataagaagagattacaggcatgagccatcgtgcctgaccaaaaactatgcttcctaaacagatttttacagggaggaatttgctacctgagaagacatagttccatccagtggtaactaatccaactctaatcatatgctccggaatgatcctatagttaagacattcaaagtcaaagttaataatagctctttccagctaattccagataaaaacaatcactttcaatacgaattagctccaatgctctctatta

SEQ ID NO: 92562 - DNA, 225 bp, Homo sapiens
ggaaggtgaagtccattgttactcatgaaggattttgaccagtaacctcagaagagtcagaagaagagaaaaagcatgtgctctcctctttcctgctttgcttttctgcttccaagtccctcctccaagcaggaagatctttcctgagcagcagcgtacctgggtgtgagaacccagagggagtgtggtggagagacgtgaaggggtcagttcctggaacattct

SEQ ID NO: 92563 - DNA, 258 bp, Homo sapiens
actcaccctctctgtatacctctgagctccacatacaaaattggcaataataccacctattacacagaagggtttgaggattaaatgagatgaggagagcagagcttctctccaacagtactggaaactaagtattggctcctttctagtgtcctgggtgggtaaaaaggaagcatcttagaacttccacggtcccatttgtctctttctctgttgaaacttggcctttggcacataggagaagaaccaggtgaccct

SEQ ID NO: 92564 - DNA, 608 bp, Homo sapiens
tatctgtccccagtggaattaaggttgcaatctgtaatggaaagataatagggaaatcccaaatgtttggaacataagcagtaaccttatatgacatcacaatgaaatgatcaaaatacaaaaaaaaaaagatttaaaatcagtaaacagtaaatatcaaagctgaaaattatttttatagactattaaaactgataaatccttagtgataagttggtaaagacaaagataaaagcaaagtatgttacaaatacggaaatgaaaaatagcacatccctataaaacccatagccattaaaaagattacaagaggatgttatgtacaactttatggtcatatatttcaaaattttgatgaaatggacaaattataatccataactgttaatgaaagtaagtctttaaaaacctttttatgaagaaaatttcagtcccaggggttagggagggattacttaaataatacactaaatgtaccataagcaaaatgaataaattgtaatgtgttaagaatgagaacttctgttcattccaagacatccttgaaacagtgaaaaggcaagccacagactgaaaacatatttggtatacagctgataagggaatcc

SEQ ID NO: 92565 - DNA, 307 bp, Homo sapiens
acgtccctataacaatgtcacaatcttaaaataagactttctatcctttaattactaattttcacctggatatgctgtatgcatagcatttatttccataacgatggtcacttctttctccagagcaaaaaacaaacacaacaacaacaaaaacaaaaaaaacccaaaaaaactagaggttagaatattttccatatttagttcctcttgttatgtaacatggaatatttggaaagaattaagtcagctttgctgcagtaacaaccccaaatcttcatgtttataaggacaaaattttctcactaca

SEQ ID NO: 92566 - DNA, 257 bp, Homo sapiens
tgatacctacctgcaccaaatccattatcagtaatgggagagtctatctattatcttcgtaagggattctgagacttacttactctttacctttacgttaaatgtttctaaaagttttctttgggctttggcacagtgttaagagagtgcttgctattgattctttagcccctctcatccccaaatcttaccatgtcactcttctacataattctggctttccatgacccataaaccacatttctcaagtgtgctct

SEQ ID NO: 92567 - DNA, 532 bp, Homo sapiens
gctcacttaatcttttgttccttctacaaggaaaatcaaaataagagtattccatcatttttttgtatcagggaacaagcagggatagttatgcatttatccctgggcaataatgcccaaggtacaccagaggcaacaccaataacaaaaacagaaacgtggtgtgagtgtgaaaggaagtttgtgggtgcatttcattccagaaaacattgctgttaattttcctttgctacatttctgatatttcacctctgaaaacgcttttgtaagttctagacagtaagttagaaaaacatcagatggtaagacgtgtaataacattctaaatggagaataattctgcttacagagtacctaactgctcagagaaactgtcatagttatctctaggtcagatgtcagactcaacaagcttcttttttactaggatgaatctccaagaaagccttagagacccatttcttccaccaagattcaataaaataactcagcaccattcctaatgtgaatctaattgtgaaaaccagttttt

SEQ ID NO: 92568 - DNA, 356 bp, Homo sapiens
ttttcatgtgtgtggtgcctgtgtgtctgagtgcacattgtatggagggtctgggggctgcgtatgaggtaactgtgtgattctgtctgactctgggtgtgttttgtgttgggtgtgtctacgtgtgtgtctggcccacatatatgctggcccagggcaggatggaggggcctcctgtgtggtgctgctggactctgttgtggtcaccacggccccgtgggcttagcgtggggcactggtggggctgatgttgccacttaacctcagggtgggatggcatggagcaggcccatcccgatgtccctgggtggcctggtggaatgtgcccacgggatgcccaccactgggggacccca

SEQ ID NO: 92569 - DNA, 395 bp, Homo sapiens
aatctaggcagaatgttagaggcaagaggacgttgttttgaatggctcacttgagcctaagctgacttgaaattggccgcaaccagtgggagagaggctttggtgcaggacagggactggtgaatggtgaagtggtgaatggtgaagagcatattttggagggacagtagagcatgacagaagtgaaattgtcactgaactataattgcatatatagcccctgtggatattgtaggagcagaggatgtgggttgggtgttatagataggctggggaagagggaagtggttgactagttcggaagggtgatgggaagcatgaaatcagggcatgctatagacagaggagaaatagcttggtggtggtagattagtgattggaaataggagaattcg

SEQ ID NO: 92570 - DNA, 2380 bp, Homo sapiens
  misc_feature (1243)..(1243): n is a, c, g, or t
agcggggcggcgtcgcctagcaacgggaaatggcggaaccgggcggcgcggcgggccggtcccatccggaagatggatcggcttctgagggagagaaggaagggaataatgaaagccacatggtgtcaccaccagagaaggatgatggccagaaaggtgaagaagctgtcggtagcacagagcatcctgaggaagtcacaacccaagcggaagctgcaattgaagagggggaggtcgagacagaaggggaagcagcagtggaaggggaagaggaggctgtgtcctatggagatgctgaaagcgaagaggaatattactatacagaaacttcatccccggaagggcaaatcagtgctgcagatacgacttacccgtatttcagtcctcctcaggaactgcctggagaggaggcatacgatagtgttagcggggaggctggtctccaaggcttccagcaagaggccaccggtccaccagaatccagagaaaggagggtcacctccccagagccatcccacggagtcttaggcccgtcggagcaaatgggccaggtcacctctgggccagcagtgggcagattgacaggatccacagaggagccccaggggcaggtgctcccaatgggcgtccagcaccgcttccggctgagccacgggagcgacatcgagtcctcagacctggaggagttcgtctcgcaggagccagtgatccccccaggggtgcccgatgcccaccccagggaaggagacctgccagtgttccaggaccagatccagcagcccagcaccgaggagggggccatggcagagagagtggagtccgaggggagtgacgaggaagcagaagacgaagggtcccagctggtggttttggacccagaccaccccctgatggtaagattccaggctgccctgaagaactacctgaaccgacagatcgaaaagttgaagctggacctccaagagctggttgtggctaccaagcagagccgagcccagcggcaggagctgggggtgaatctctatgaggtgcagcagcacctggtacacctgcagaagctgctggagaagagtcacgaccgccacgcaatggcctcgagcgagcgcaggcagaaggaggaggagctgcaggccgcccgcgctctctacaccaagacctgcgcagccgccaacgaggagcgcaaaaagttggcggctctgcagactgagatggagaacttggccctgcatctcttctacatgcngaacatcgaccaggacatgcgtgacgacatccgcgtgatgacacaagtggtaaagaaggccgagacggagaggatccgggcagaaatcgagaagaaaaagcaggacctgtatgtggaccagctcaccactcgagcccagcaactggaagaagacattgccctgtttgaggctcagtacttggcccaagctgaggacacccggattttaaggaaagcagtgagtgaggcctgcaccgagatcgacgccatcagcgtggagaagaggcgcatcatgcagcaatgggccagcagcctggtgggcatgaagcaccgcgacgaggcgcacagggcggtgctggaggcgctcagcgtgtccctagagcgcttcccaagtcaaaatataaacaccgctcgttcccgcctttctaccacatggcattccgctgggatacttctacggggaagcttcctgcccggggcatcgagggcgttcgcgtccgtctgttatggcggtgctgctgtagataaccggatccgcgaatgctaacgctcaccaggatgctatatagccttttttatattgcctatcaagcccggaatgtctgggtctagcgggtattgctaagtaggattgtgacagtcacgcccccggcagcggtgtttcaaagtcccctgacagctcagcatgttgtcacacttcaggactgtgccaatccgattgatgaagaaaatagataatcttgttttataaaacgtgcatgcgcagaatgttgagtgaatattttagtggactatgtacacgcacaaacacttcacaacgagtgagagagcctctgacttcacctgcagcttgccacaccaaggccccggggaggagtgaggcccaacttttatttattatatttttgtggttcttgcaatggagtctcgctctgtcccccaggctggagtgcagtggcaccatctctgctcactgcgacctccgcctcctgggttcaagcgattctcctgcctcagcctcccaagtagctgggattacaggcgtgcaccaccacgcctggctaatttttgtatttttagtagagacggggtttcaccatgtgggccaggctgatcttgaacccctacctcaggtgatccacccgtcttggcctccca

SEQ ID NO: 92571 - DNA, 911 bp, Homo sapiens
ctaacttgtgtgcaattgcaagaaagcatatgcgttcacccggagtcttccttccctctcttgctccgtgggagcacaccacactcactgttctgcacctctttgctttttccatttaacagcgtgtccctagagcgcttcccaagtcaaaatataaacaccgctcgttcccgcctttctaccacatggcattccgctgggatacttctacggggaagcttcctgcccggggcatcgagggcgttcgcgtccgtctgttatggcggtgctgctgtagataaccggatccgcgaatgctaacgctcaccaggatgctatatagccttttttatattgcctatcaagcccggaatgtctgggtctagcgggtattgctaagtaggattgtgacagtcacgcccccggcagcggtgtttcaaagtcccctgacagctcagcatgttgtcacacttcaggactgtgccaatccgattgatgaagaaaatagataatcttgttttataaaacgtgcatgcgcagaatgttgagtgaatattttagtggactatgtacacgcacaaacacttcacaacgagtgagagagcctctgacttcacctgcagcttgccacaccaaggccccggggaggagtgaggcccaacttttatttattatatttttgtggttcttgcaatggagtctcgctctgtcccccaggctggagtgcagtggcaccatctctgctcactgcgacctccgcctcctgggttcaagcgattctcctgcctcagcctcccaagtagctgggattacaggcgtgcaccaccacgcctggctaatttttgtatttttagtagagacggggtttcaccatgtgggccaggctgatcttgaacccctacctcaggtgatccacccgtcttggcctccca

SEQ ID NO: 92572 - DNA, 1980 bp, Homo sapiens
  misc_feature (1243)..(1243): n is a, c, g, or t
agcggggcggcgtcgcctagcaacgggaaatggcggaaccgggcggcgcggcgggccggtcccatccggaagatggatcggcttctgagggagagaaggaagggaataatgaaagccacatggtgtcaccaccagagaaggatgatggccagaaaggtgaagaagctgtcggtagcacagagcatcctgaggaagtcacaacccaagcggaagctgcaattgaagagggggaggtcgagacagaaggggaagcagcagtggaaggggaagaggaggctgtgtcctatggagatgctgaaagcgaagaggaatattactatacagaaacttcatccccggaagggcaaatcagtgctgcagatacgacttacccgtatttcagtcctcctcaggaactgcctggagaggaggcatacgatagtgttagcggggaggctggtctccaaggcttccagcaagaggccaccggtccaccagaatccagagaaaggagggtcacctccccagagccatcccacggagtcttaggcccgtcggagcaaatgggccaggtcacctctgggccagcagtgggcagattgacaggatccacagaggagccccaggggcaggtgctcccaatgggcgtccagcaccgcttccggctgagccacgggagcgacatcgagtcctcagacctggaggagttcgtctcgcaggagccagtgatccccccaggggtgcccgatgcccaccccagggaaggagacctgccagtgttccaggaccagatccagcagcccagcaccgaggagggggccatggcagagagagtggagtccgaggggagtgacgaggaagcagaagacgaagggtcccagctggtggttttggacccagaccaccccctgatggtaagattccaggctgccctgaagaactacctgaaccgacagatcgaaaagttgaagctggacctccaagagctggttgtggctaccaagcagagccgagcccagcggcaggagctgggggtgaatctctatgaggtgcagcagcacctggtacacctgcagaagctgctggagaagagtcacgaccgccacgcaatggcctcgagcgagcgcaggcagaaggaggaggagctgcaggccgcccgcgctctctacaccaagacctgcgcagccgccaacgaggagcgcaaaaagttggcggctctgcagactgagatggagaacttggccctgcatctcttctacatgcngaacatcgaccaggacatgcgtgacgacatccgcgtgatgacacaagtggtaaagaaggccgagacggagaggatccgggcagaaatcgagaagaaaaagcaggacctgtatgtggaccagctcaccactcgagcccagcaactggaagaagacattgccctgtttgaggctcagtacttggcccaagctgaggacacccggattttaaggaaagcagtgagtgaggtaaaagcagtccccgcagctctcagtgttcgaccctccagtgagtgtccacgcacagggtgctggtgggtctactagactgcacctgcccgtctgctggatgagtgactgcagccagcttacatctgcaaacatcgggccctccccatggtggggccacagtagatactgacaggtggacagcccggattcctattccttccctggctagtgggtgacagaaggcctcgcagggttcaggtactctagtcgcttcatgaccgccaaggccagcttgctgcggggatgctcagcaagttccttagcctgcagggacctcttccggggaggactgaagtctttctaacaattctcacccccgtgggcagccggccttccgggtagctcctacatctctgcacctcgtggagtagggagtggaggggacgaagggggtgaaagctgctccctcttggccccagattcaggtctgtagtggtagcaccagaaaccaaagttactgcaacttaaa

SEQ ID NO: 92573 - DNA, 1686 bp, Homo sapiens
  misc_feature (1243)..(1243): n is a, c, g, or t
agcggggcggcgtcgcctagcaacgggaaatggcggaaccgggcggcgcggcgggccggtcccatccggaagatggatcggcttctgagggagagaaggaagggaataatgaaagccacatggtgtcaccaccagagaaggatgatggccagaaaggtgaagaagctgtcggtagcacagagcatcctgaggaagtcacaacccaagcggaagctgcaattgaagagggggaggtcgagacagaaggggaagcagcagtggaaggggaagaggaggctgtgtcctatggagatgctgaaagcgaagaggaatattactatacagaaacttcatccccggaagggcaaatcagtgctgcagatacgacttacccgtatttcagtcctcctcaggaactgcctggagaggaggcatacgatagtgttagcggggaggctggtctccaaggcttccagcaagaggccaccggtccaccagaatccagagaaaggagggtcacctccccagagccatcccacggagtcttaggcccgtcggagcaaatgggccaggtcacctctgggccagcagtgggcagattgacaggatccacagaggagccccaggggcaggtgctcccaatgggcgtccagcaccgcttccggctgagccacgggagcgacatcgagtcctcagacctggaggagttcgtctcgcaggagccagtgatccccccaggggtgcccgatgcccaccccagggaaggagacctgccagtgttccaggaccagatccagcagcccagcaccgaggagggggccatggcagagagagtggagtccgaggggagtgacgaggaagcagaagacgaagggtcccagctggtggttttggacccagaccaccccctgatggtaagattccaggctgccctgaagaactacctgaaccgacagatcgaaaagttgaagctggacctccaagagctggttgtggctaccaagcagagccgagcccagcggcaggagctgggggtgaatctctatgaggtgcagcagcacctggtacacctgcagaagctgctggagaagagtcacgaccgccacgcaatggcctcgagcgagcgcaggcagaaggaggaggagctgcaggccgcccgcgctctctacaccaagacctgcgcagccgccaacgaggagcgcaaaaagttggcggctctgcagactgagatggagaacttggccctgcatctcttctacatgcngaacatcgaccaggacatgcgtgacgacatccgcgtgatgacacaagtggtaaagaaggccgagacggagaggatccgggcagaaatcgagaagaaaaagcaggacctgtatgtggaccagctcaccactcgagcccagcaactggaagaagacattgccctgtttgaggctcagtacttggcccaagctgaggacacccggattttaaggaaagcagtgagtgaggtaaaagcagtccccgcagctctcagtgttcgaccctccagtgagtgtccacgcacagggtgctggtgggtctactagactgcacctgcccgtctgctggatgagtgactgcagccagcttacatctgcaaacatcgggccctccccatggtggggccacagtagatactgacaggtggacagcccggattcctataatatctgtaagattatcctc

SEQ ID NO: 92574 - DNA, 1452 bp, Homo sapiens
  misc_feature (1243)..(1243): n is a, c, g, or t
agcggggcggcgtcgcctagcaacgggaaatggcggaaccgggcggcgcggcgggccggtcccatccggaagatggatcggcttctgagggagagaaggaagggaataatgaaagccacatggtgtcaccaccagagaaggatgatggccagaaaggtgaagaagctgtcggtagcacagagcatcctgaggaagtcacaacccaagcggaagctgcaattgaagagggggaggtcgagacagaaggggaagcagcagtggaaggggaagaggaggctgtgtcctatggagatgctgaaagcgaagaggaatattactatacagaaacttcatccccggaagggcaaatcagtgctgcagatacgacttacccgtatttcagtcctcctcaggaactgcctggagaggaggcatacgatagtgttagcggggaggctggtctccaaggcttccagcaagaggccaccggtccaccagaatccagagaaaggagggtcacctccccagagccatcccacggagtcttaggcccgtcggagcaaatgggccaggtcacctctgggccagcagtgggcagattgacaggatccacagaggagccccaggggcaggtgctcccaatgggcgtccagcaccgcttccggctgagccacgggagcgacatcgagtcctcagacctggaggagttcgtctcgcaggagccagtgatccccccaggggtgcccgatgcccaccccagggaaggagacctgccagtgttccaggaccagatccagcagcccagcaccgaggagggggccatggcagagagagtggagtccgaggggagtgacgaggaagcagaagacgaagggtcccagctggtggttttggacccagaccaccccctgatggtaagattccaggctgccctgaagaactacctgaaccgacagatcgaaaagttgaagctggacctccaagagctggttgtggctaccaagcagagccgagcccagcggcaggagctgggggtgaatctctatgaggtgcagcagcacctggtacacctgcagaagctgctggagaagagtcacgaccgccacgcaatggcctcgagcgagcgcaggcagaaggaggaggagctgcaggccgcccgcgctctctacaccaagacctgcgcagccgccaacgaggagcgcaaaaagttggcggctctgcagactgagatggagaacttggccctgcatctcttctacatgcngaacatcgaccaggacatgcgtgacgacatccgcgtgatgacacaagtggtaaagaaggccgagacggagaggatccgggcagaaatcgagaagaaaaagcaggacctgtatgtggaccagctcaccactcgagcccagcaactggaagaagactgagatggagaacttggcctgcatctcttctacatgcagactcgaccaggacatg

SEQ ID NO: 92575 - DNA, 991 bp, Homo sapiens
agcggggcggcgtcgcctagcaacgggaaatggcggaaccgggcggcgcggcgggccggtcccatccggaagatggatcggcttctgagggagagaaggaagggaataatgaaagccacatggtgtcaccaccagagaaggatgatggccagaaaggtgaagaagctgtcggtagcacagagcatcctgaggaagtcacaacccaagcggaagctgcaattgaagagggggaggtcgagacagaaggggaagcagcagtggaaggggaagaggaggctgtgtcctatggagatgctgaaagcgaagaggaatattactatacagaaacttcatccccggaagggcaaatcagtgctgcagatacgacttacccgtatttcagtcctcctcaggaactgcctggagaggaggcatacgatagtgttagcggggaggctggtctccaaggcttccagcaagaggccaccggtccaccagaatccagagaaaggagggtcacctccccagagccatcccacggagtcttaggcccgtcggagcaaatgggccaggtcacctctgggccagcagtgggcagattggtgagtagccctgacttctgttttgtgccagtgtcgcacggcccacggggtttgtcaccctatgtgaggaacttgggaatacattataaatacaaattgcaatccctgttagaaatgtcttagcaaggctgggtgcggtggctcacgcctgtaatcccagcactttgggaggcgaaggtgggtgggtcacctgaggtcaggagttcgagaccagcctggccaacgtggtgaaatcctgtctctactaaatatgcaaaaattaggcaggcgtggtggcgcacgcctgtaatcccagctactcaggaggctgaggtgggagaattgcttgaacccgagaggcggaggctgcagtgagccaagatcgcaccattgcactatagcctgggcaacagagtgagaccttgtctcaa

SEQ ID NO: 92576 - DNA, 3799 bp, Homo sapiens
  misc_feature (751)..(751): n is a, c, g, or t
aacgggacgctttctctgggatgcattgagtcagggaatagaagatggggtgaatgatgtttctgacccacagaccgttgggatgcttttgctgtcactttcccatcatgctgcatgaggcatgacagcagctgtgccattgatgccccagaatagaatcactgaggcttctctccagcagctcctcaatggtgtcgctgtctctccccgcagtgatccccccaggggtgcccgatgcccaccccagggaaggagacctgccagtgttccaggaccagatccagcagcccagcaccgaggagggggccatggcagagagagtggagtccgaggggagtgacgaggaagcagaagacgaagggtcccagctggtggttttggacccagaccaccccctgatggtaagattccaggctgccctgaagaactacctgaaccgacagatcgaaaagttgaagctggacctccaagagctggttgtggctaccaagcagagccgagcccagcggcaggagctgggggtgaatctctatgaggtgcagcagcacctggtacacctgcagaagctgctggagaagagtcacgaccgccacgcaatggcctcgagcgagcgcaggcagaaggaggaggagctgcaggccgcccgcgctctctacaccaagacctgcgcagccgccaacgaggagcgcaaaaagttggcggctctgcagactgagatggagaacttggccctgcatctcttctacatgcngaacatcgaccaggacatgcgtgacgacatccgcgtgatgacacaagtggtaaagaaggccgagacggagaggatccgggcagaaatcgagaagaaaaagcaggacctgtatgtggaccagctcaccactcgagcccagcaactggaagaagacattgccctgtttgaggctcagtacttggcccaagctgaggacacccggattttaaggaaagcagtgagtgaggcctgcaccgagatcgacgccatcagcgtggagaagaggcgcatcatgcagcaatgggccagcagcctggtgggcatgaagcaccgcgacgaggcgcacagggcggtgctggaggcgctcagaggatgccagcatcaagccaaatccaccgacggcgagattgaggcctataagaaatccatcatgaaggaggaagaaaagaacgagaagctggcgagcatcctgaaccggacagagacggaagccacactgctgcagaagctcaccacccagtgcctgaccaagcaggtggccctgcagagccagttcaatacctacaggctcaccctgcaggacacagaggatgccctcagccaggaccagctggaacaaatgatactcacggaggagttgcaggccatccgccaagccatccagggcgagctggagctcaggaggaagacggatgctgccatccgggagaagctgcaggagcacatgacctccaacaagaccaccaaatacttcaaccagctcatcctgaggctgcagaaggagaagaccaacatgatgacacatctttccaaaatcaacggtgacattgcccagaccaccctggacatcacacacaccagcagcaggctggacgcacaccagaagaccctggtggagctggaccaggacgtgaagaaagtcaacgagctcatcaccaacagccagagcgagatctcccggcgcacgatcctgatcgagaggaagcaagggctcatcaacttcctcaacaagcagctggagcggatggtctccgagctggggggggaagaagtggggcccctggagcttgaaatcaaaaggctgagcaagctgatcgacgagcacgatggcaaggcggtccaggcccaggtgacctggctgcgcctgcagcaggagatggtcaaggtgacacaggagcaggaggagcagctggcctccctggacgcatccaagaaggagctccacatcatggagcagaagaaactacgagtagaaagcaagattgagcaggagaagaaggagcagaaggagatcgagcaccacatgaaggacctggacaacgacctgaagaagctcaacatgttgatgaataaaaaccggtgcagctcggaggagctggagcagaacaaccgggtgacagagaatgagttcgtgcgctcgctgaaggcctctgagagggagaccatcaagatgcaggacaagctgaaccagctcagcgaggagaaggcgaccctcctgaatcaactggtggaagcagaacaccagattatgctttgggagaaaaaaatccaactggcaaaagagatgcgttcctcagtggattccgagatcggccagacggagatccgggccatgaagggcgagatccacaggatgaaggtcaggctcgggcagctgctgaagcagcaggagaagatgatccgtgccatggagttggcggttgcccgcagagagaccgtcaccacccaggccgaggggcagcgcaagatggacaggaaggcgctcacccgcaccgacttccaccacaagcagcttgagctgcgccggaaaatcagggacgttcgcaaggccaccgacgagtgcaccaaaaccgtcctggaactggaagaaacacaaagaaatgtgagcagctccctcctagagaagcaggaaaagctgtcggtgattcaggcagacttcgacacactcgaggccgacctcacccggcttggggccctcaaacgacagaacctttcagagatcgtggccctgcagacacgccttaagcacctgcaggctgtgaaggaggggcgctacgtgttcctgttccgctccaagcagtccctagtgctggagcgccagcgcctggacaagcgactggctctcatcgccaccatcctggaccgcgtgcgggacgagtacccccagttccaggaggccctgcacaaggtcagccagatgatcgccaacaagctcgagtcaccagggccctcctagggagcagcctggaccccgccttgcaaggcctccaggaagagatccggaattgtgtttgtcatgagggacttggaatcttttgtgttcctaaaaaccacatgtaccctcagaagggcatcgtttaagagaaataagccagccccacccacaggaatctttttagccactcagcaatttaataaaccaggtaaaatcctagcgtttcccatggcatcccatcgcaaagacagagcctgtgactgcagacccacacacccacactcccacactgggcttactcgtccaggtaacactttggtttgcagcactcccaaatctgcacgtgcctctcacaacacaacgctgccacaggtccacaagctggtgggctgagcagaggtgggaaagttaaggcagctccagccagcctggcccgggaggctggtccccccagcacttccctctactaggtgcatctgaaaacccacaaaccaccttctttaccagttttcccatccccaccccttagaactctcaggtcccttttcctgcccccatgtccccatttgagttaaattcagatccacagcttgcaggagaaagtcagtggccccagacacacgtaacagggtgagcactgaaataagagcacgctggggcgtccacaccaagggactacgccccagtctgcccacctatcttttctccatcattaacccagcgctctttctccctggacttccaagtaccaatgaccttggggcttctttgcagtttaaagggaaaatgctctacaaaataatttcactttcaaacatttcagcagaagaataaaatcttttttctgaatatct

SEQ ID NO: 92577 - DNA, 417 bp, Homo sapiens
ttgagtctgacaactttcacaaatgtaatgagttaaaattgaataacttctcagtggcaattaagccctgttgacttagttttggttgttcttgccatagacaggatccacagaggagccccaggggcaggtgctcccaatgggcgtccagcaccgcttccggctgagccacgggagcgacatcgagtcctcagacctggaggagttcgtctcgcaggagccaggtgccacccacctgctgaggtcaccctgccctggcgatgagccacctgcacaggcccttctgtgcaagggatgccactcgtttgtcatccgttacctgtttcctgagtggctgtgagccaaaaatggcaggaagggtgcccagaacggctgttccctgcttcctcctgggtctctgcatgggggacgctggga

SEQ ID NO: 92578 - DNA, 2052 bp, Homo sapiens
  misc_feature (1243)..(1243): n is a, c, g, or t
agcggggcggcgtcgcctagcaacgggaaatggcggaaccgggcggcgcggcgggccggtcccatccggaagatggatcggcttctgagggagagaaggaagggaataatgaaagccacatggtgtcaccaccagagaaggatgatggccagaaaggtgaagaagctgtcggtagcacagagcatcctgaggaagtcacaacccaagcggaagctgcaattgaagagggggaggtcgagacagaaggggaagcagcagtggaaggggaagaggaggctgtgtcctatggagatgctgaaagcgaagaggaatattactatacagaaacttcatccccggaagggcaaatcagtgctgcagatacgacttacccgtatttcagtcctcctcaggaactgcctggagaggaggcatacgatagtgttagcggggaggctggtctccaaggcttccagcaagaggccaccggtccaccagaatccagagaaaggagggtcacctccccagagccatcccacggagtcttaggcccgtcggagcaaatgggccaggtcacctctgggccagcagtgggcagattgacaggatccacagaggagccccaggggcaggtgctcccaatgggcgtccagcaccgcttccggctgagccacgggagcgacatcgagtcctcagacctggaggagttcgtctcgcaggagccagtgatccccccaggggtgcccgatgcccaccccagggaaggagacctgccagtgttccaggaccagatccagcagcccagcaccgaggagggggccatggcagagagagtggagtccgaggggagtgacgaggaagcagaagacgaagggtcccagctggtggttttggacccagaccaccccctgatggtaagattccaggctgccctgaagaactacctgaaccgacagatcgaaaagttgaagctggacctccaagagctggttgtggctaccaagcagagccgagcccagcggcaggagctgggggtgaatctctatgaggtgcagcagcacctggtacacctgcagaagctgctggagaagagtcacgaccgccacgcaatggcctcgagcgagcgcaggcagaaggaggaggagctgcaggccgcccgcgctctctacaccaagacctgcgcagccgccaacgaggagcgcaaaaagttggcggctctgcagactgagatggagaacttggccctgcatctcttctacatgcngaacatcgaccaggacatgcgtgacgacatccgcgtgatgacacaagtggtaaagaaggccgagacggagaggatccgggcagaaatcgagaagaaaaagcaggacctgtatgtggaccagctcaccactcgagcccagcaactggaagaagacattgccctgtttgaggctcagtacttggcccaagctgaggacacccggattttaaggaaagcagtgagtgaggcctgcaccgagatcgacgccatcagcgtggagaagaggcgcatcatgcagcaatgggccagcagcctggtgggcatgaagcaccgcgacgaggcgcacagggcggtgctggaggcgctcaggtactgcagggccacaggcagcgaggatgtgcgggaaccccaggggtccgtggcaggcccgccccacaccccctctctctgggtccaccggatctctgggacagagggtgcaccttgatccccgggtccgggcttccgtccggaaagctccctcattgtttggtaagatttcagcgattcttaaatcctttccaacactgcggcgctgggaggagagaggcttttctgctcagatttcctggcaggattaagtagaaacagagcagggtaaagagaaagctatctttgggaggtaaaggtgtccctttgatttgcagtatcaccacctgagtgcggaaaccccatcccttctcgattgttctgcctgagggctgcattccaaccgaaatcctattttaatctccaaaggaaggggaggaagaggcctcctctgggcatcccctcacttctggggatggatg

SEQ ID NO: 92579 - DNA, 2900 bp, Homo sapiens
  misc_feature (1243)..(1243): n is a, c, g, or t
agcggggcggcgtcgcctagcaacgggaaatggcggaaccgggcggcgcggcgggccggtcccatccggaagatggatcggcttctgagggagagaaggaagggaataatgaaagccacatggtgtcaccaccagagaaggatgatggccagaaaggtgaagaagctgtcggtagcacagagcatcctgaggaagtcacaacccaagcggaagctgcaattgaagagggggaggtcgagacagaaggggaagcagcagtggaaggggaagaggaggctgtgtcctatggagatgctgaaagcgaagaggaatattactatacagaaacttcatccccggaagggcaaatcagtgctgcagatacgacttacccgtatttcagtcctcctcaggaactgcctggagaggaggcatacgatagtgttagcggggaggctggtctccaaggcttccagcaagaggccaccggtccaccagaatccagagaaaggagggtcacctccccagagccatcccacggagtcttaggcccgtcggagcaaatgggccaggtcacctctgggccagcagtgggcagattgacaggatccacagaggagccccaggggcaggtgctcccaatgggcgtccagcaccgcttccggctgagccacgggagcgacatcgagtcctcagacctggaggagttcgtctcgcaggagccagtgatccccccaggggtgcccgatgcccaccccagggaaggagacctgccagtgttccaggaccagatccagcagcccagcaccgaggagggggccatggcagagagagtggagtccgaggggagtgacgaggaagcagaagacgaagggtcccagctggtggttttggacccagaccaccccctgatggtaagattccaggctgccctgaagaactacctgaaccgacagatcgaaaagttgaagctggacctccaagagctggttgtggctaccaagcagagccgagcccagcggcaggagctgggggtgaatctctatgaggtgcagcagcacctggtacacctgcagaagctgctggagaagagtcacgaccgccacgcaatggcctcgagcgagcgcaggcagaaggaggaggagctgcaggccgcccgcgctctctacaccaagacctgcgcagccgccaacgaggagcgcaaaaagttggcggctctgcagactgagatggagaacttggccctgcatctcttctacatgcngaacatcgaccaggacatgcgtgacgacatccgcgtgatgacacaagtggtaaagaaggccgagacggagaggatccgggcagaaatcgagaagaaaaagcaggacctgtatgtggaccagctcaccactcgagcccagcaactggaagaagacattgccctgtttgaggctcagtacttggcccaagctgaggacacccggattttaaggaaagcagtgagtgaggcctgcaccgagatcgacgccatcagcgtggagaagaggcgcatcatgcagcaatgggccagcagcctggtgggcatgaagcaccgcgacgaggcgcacagggcggtgctggaggcgctcagaggatgccagcatcaagccaaatccaccgacggcgagattgaggcctataagaaatccatcatgaaggaggaagaaaagaacgagaagctggcgagcatcctgaaccggacagagacggaagccacactgctgcagaagctcaccacccagtgcctgaccaagcaggtggccctgcagagccagttcaatacctacaggctcaccctgcaggacacagaggatgccctcagccaggaccagctggaacaaatgatactcacggaggagttgcaggccatccgccaagccatccagggcgagctggagctcaggaggaagacggatgctgccatccgggagaagctgcaggagcacatgacctccaacaagaccaccaaatacttcaaccagctcatcctgaggctgcagaaggagaagaccaacatgatgacacatctttccaaaatcaacggtgacattgcccagaccaccctggacatcacacacaccagcagcaggctggacgcacaccagaagaccctggtggagctggaccaggacgtgaagaaagtcaacgagctcatcaccaacagccagagcgagatctcccggcgcacgatcctgatcgagaggaagcaagggctcatcaacttcctcaacaagcagctggagcggatggtctccgagctggggggggaagaagtggggcccctggagcttgaaatcaaaaggctgagcaagctgatcgacgagcacgatggcaaggcggtccaggcccaggtgacctggctgcgcctgcagcaggagatggtcaaggtgacacaggagcaggaggagcagctggcctccctggacgcatccaagaaggagctccacatcatggagcagaagaaactacgagtagaaagcaagattgagcaggagaagaaggagcagaaggagatcgagcaccacatgaaggacctggacaacgacctgaagaagctcaacatgttgatgaataaaaaccggtgcagctcggaggagctggagcagaacaaccgggtgacagagaatgagttcgtgcgctcgctgaaggtccggccgtgtccacgcagtcccggggctcaggacgatggagggcgggggcctctgagagggagaccatcaagatgcaggacaagctgaaccagctcagcgaggagaaggcgaccctcctgaatcaactggtggaagcagagtgagtcccagtctccagccacacgtgggtcatgaaggtcactgcacctacaggcctctgtccgttgaagaccatgtaggaggccaggtgtggcagctcacacccatatc

SEQ ID NO: 92580 - DNA, 244 bp, Homo sapiens
attcggaacgagggggaaagccgcccgtcgcctgctctgtgccttaacttattctcaagggaagaggccctccaggaccctcgaaaccccagcccctagggagtttgctcaggaagttcggggcatgcaggcctggccctgggaaagccgcccgtcgcctgctctgtgccttaacttattctcgggccgtgcggctgctaggttgctgttattttgtgctaataaaagagtaattaattccaca

SEQ ID NO: 92581 - DNA, 1113 bp, Homo sapiens
tttaaccttttatagagatggggatcttggtatgttgcccaggctggcttcaaactcctggcctcaagcgatcttcctgccttggctccctgaagcactgggattacaggcatgagccaccacacctggcccaccctttttgaagtagtctgggcaatgcacaaagcagtccatggtggccccccagtcccccaggcttactaccccccttgttgcagagcccaaagtccagctcctcattcccccatcactcttctaactggggacccaggactcctgcactgccctgttcttaccccctatatcccaatcacctgtactgttagctttcaggttcttattggttcctccactaaggacgggccatgagggcagggaccttatctgcccttcagggggaattcccagtaccaggcacgcagtaggtgttccataaatgtttgctgaatgactaaaagcccaccccaaggaacaaagaaaaatctctcctttcacacacttcccagggcctgctcagtgccttgctctggaaacagagcttggtgagcttcctggggagggtctctgcctagggcaccttcagctcaggtggtgggtgagccgggctgggggtgggagcccccgccctcaccactgctcctgcccccacccccgcggctccgtctgtgtgcagtgctgatcctggtcggcgtgggactggaggcgaccccctctccaggtgtctccagcgccatcttcttcgtgccgggcttcctgttgttggtgcctggagtctatcacgtgatcttcatctactgcgcggtcaagggccaccggggcttccagttcttctacctgccctacttcgagaagtgatcgcggcgcagcgtggaccccttgcgcccatgggggcgcccctcttgccctgttccgttcccctcatctcaagggaagaggccctccaggaccctcgaaaccccagcccctagggagtttgctcaggaagttcggggcatgcaggcctggccctgggaaagccgcccgtcgcctgctctgtgccttaacttattctcgggccgtgcggctgctaggttgctgttattttgtgctaataaaagagtaattaattccaca

SEQ ID NO: 92582 - DNA, 578 bp, Homo sapiens
acaatatttcttcacctacttttaagggaggcatctaggttttataaataccagctcttggcacaagaggcttagggtttgtacccccgccctcaccactgctcctgcccccacccccgcggctccgtctgtgtgcagtgctgatcctggtcggcgtgggactggaggcgaccccctctccaggtgtctccagcgccatcttcttcgtgccgggcttcctgttgttggtgcctggagtctatcacgtgatcttcatctactgcgcggtcaagggccaccggggcttccagttcttctacctgccctacttcgagaagtgatcgcggcgcagcgtggaccccttgcgcccatgggggcgcccctcttgccctgttccgttcccctcatctcaagggaagaggccctccaggaccctcgaaaccccagcccctagggagtttgctcaggaagttcggggcatgcaggcctggccctgggaaagccgcccgtcgcctgctctgtgccttaacttattctcgggccgtgcggctgctaggttgctgttattttgtgctaataaaagagtaattaattccaca

SEQ ID NO: 92583 - DNA, 210 bp, Homo sapiens
gcggccgcctactactactactgctcgaattcaagcttctaacgatgtacggggacatggtccagtgagctgccagggcatcaccggggcatgcaggcctggccctgggaaagccgcccgtcgcctgctctgtgccttaacttattctcgggccgtgcggctgctaggttgctgttattttgtgctaataaaagagtaattaattccaca

SEQ ID NO: 92584 - DNA, 169 bp, Homo sapiens
gcggccgcctactactactactgctcgaattcaagcttctaaccggggcatgcaggcctggccctgggaaagccgcccgtcgcctgctctgtgccttaacttattctcgggccgtgcggctgctaggttgctgttattttgtgctaataaaagagtaattaattccaca

SEQ ID NO: 92585 - DNA, 920 bp, Homo sapiens
aaaaaaaaaaaaaaaaaaacaatgcgggggcggggcagcggcgacgctgggtgtgtgggcgcagatggcggcggcgcacggcgcctgagcgggccggggccatgagcgccgcccggccccagttcagcattgatgatgccttcgagctgtccctggaggacgggggccctgggcccgagtccagcggggtcgcgcgctttgggccgctgcacttcgagcgtcgggcccggttcgaggtggctgacgaggacaagcagtcccggctgcgctaccagaacctggagaacgatgaggatggagcccaggcctctccggagccggatgggggagtcggcaccagctcccagtggtccttcagcaccatcagcagcagcacccagcgctcctacaacacctgctgcagctggacccaacaccctttgatccagaagaaccgccgagtggtgctggcctccttcctgctcctgctgctggggctggtgctgatcctggtcggcgtgggactggaggcgaccccctctccaggtgtctccagcgccatcttcttcgtgccgggcttcctgttgttggtgcctggagtctatcacgtgatcttcatctactgcgcggtcaagggccaccggggcttccagttcttctacctgccctacttcgagaagtgatcgcggcgcagcgtggaccccttgcgcccatgggggcgcccctcttgccctgttccgttcccctcatctcaagggaagaggccctccaggaccctcgaaaccccagcccctagggagtttgctcaggaagttcggggcatgcaggcctggccctgggaaagccgcccgtcgcctgctctgtgccttaacttattctcgggccgtgcggctgctaggttgctgttattttgtgctaataaaagagtaattaattccaca

SEQ ID NO: 92586 - DNA, 1087 bp, Homo sapiens
aaaaaaaaaaaaaaaaaaacaatgcgggggcggggcagcggcgacgctgggtgtgtgggcgcagatggcggcggcgcacggcgcctgagcgggccggggccatgagcgccgcccggccccagttcagcattgatgatgccttcgagctgtccctggaggacgggggccctgggcccgagtccagcggggtcgcgcgctttgggccgctgcacttcgagcgtcgggcccggttcgaggtggctgacgaggacaagcagtcccggctgcgctaccagaacctggagaacgatgaggatggagcccaggcctctccggagccggatgggggagtcggcaccagctcccagtggtccttcagcaccatcagcagcagcacccagcgctcctacaacacctgctgcagctggacccaacaccctttgatccagaagaaccgccgagtggtgctggcctccttcctgctcctgctgctggggctggggcctgctcagtgccttgctctggaaacagagcttggtgagcttcctggggagggtctctgcctagggcaccttcagctcaggtggtgggtgagccgggctgggggtgggagcccccgccctcaccactgctcctgcccccacccccgcggctccgtctgtgtgcagtgctgatcctggtcggcgtgggactggaggcgaccccctctccaggtgtctccagcgccatcttcttcgtgccgggcttcctgttgttggtgcctggagtctatcacgtgatcttcatctactgcgcggtcaagggccaccggggcttccagttcttctacctgccctacttcgagaagtgatcgcggcgcagcgtggaccccttgcgcccatgggggcgcccctcttgccctgttccgttcccctcatctcaagggaagaggccctccaggaccctcgaaaccccagcccctagggagtttgctcaggaagttcggggcatgcaggcctggccctgggaaagccgcccgtcgcctgctctgtgccttaacttattctcgggccgtgcggctgctaggttgctgttattttgtgctaataaaagagtaattaattccaca

SEQ ID NO: 92587 - DNA, 902 bp, Homo sapiens
aaaaaaaaaaaaaaaaaaacaatgcgggggcggggcagcggcgacgctgggtgtgtgggcgcagatggcggcggcgcacggcgcctgagcgggccggggccatgagcgccgcccggccccagttcagcattgatgatgccttcgagctgtccctggaggacgggggccctgggcccgagtccagcggggtcgcgcgctttgggccgctgcacttcgagcgtcgggcccggttcgaggtggctgacgaggacaagcagtcccggctgcgctaccagaacctggagaacgatgaggatggagcccaggcctctccggagccggatgggggagtcggcaccagggattccagccgaacttccatccgcagctcccagtggtccttcagcaccatcagcagcagcacccagcgctcctacaacacctgctgcagctggacccaacaccctttgatccagaagaaccgccgagtggtgctggcctccttcctgctcctgctgctggggctgggtgtctccagcgccatcttcttcgtgccgggcttcctgttgttggtgcctggagtctatcacgtgatcttcatctactgcgcggtcaagggccaccggggcttccagttcttctacctgccctacttcgagaagtgatcgcggcgcagcgtggaccccttgcgcccatgggggcgcccctcttgccctgttccgttcccctcatctcaagggaagaggccctccaggaccctcgaaaccccagcccctagggagtttgctcaggaagttcggggcatgcaggcctggccctgggaaagccgcccgtcgcctgctctgtgccttaacttattctcgggccgtgcggctgctaggttgctgttattttgtgctaataaaagagtaattaattccaca

SEQ ID NO: 92588 - DNA, 1419 bp, Homo sapiens
aaaaaaaaaaaaaaaaaaacaatgcgggggcggggcagcggcgacgctgggtgtgtgggcgcagatggcggcggcgcacggcgcctgagcgggccggggccatgagcgccgcccggccccagttcagcattgatgatgccttcgagctgtccctggaggacgggggccctgggcccgagtccagcggggtcgcgcgctttgggccgctgcacttcgagcgtcgggcccggttcgaggtggctgacgaggacaagcagtcccggctgcgctaccagaacctggagaacgatgaggatggagcccaggcctctccggagccggatgggggagtcggcaccagggattccagccgaacttccatccgcagctcccagtggtccttcagcaccatcagcagcagcacccagcgctcctacaacacctgctgcagctggacccaacaccctttgatccagaagaaccgccgagtggtgctggcctccttcctgctcctgctgctggggctggggcctgctcagtgccttgctctggaaacagagcttggtgagcttcctggggagggtctctgcctagggcaccttcagctcaggtggtgggtgagccgggctgggggtgggagcccccgccctcaccactgctcctgcccccacccccgcggctccgtctgtgtgcagtgctgatcctggtcggcgtgggactggaggcgaccccctctccaggtgagcgaccctcccgcccccacaggcagaggacacccctgtcttgtgtccacgggtccacggcaagccctcccacctcccggcagtacacggctccttttcagctgggagtgaggcttgcccgggcagtcagcggcagcccggaaggcctcgaagcctccgccccctcgccctgaccgggctctggtccctcccgcaggtgtctccagcgccatcttcttcgtgccgggcttcctgttgttggtgcctggaggtgcgagcgggcaccggggcggaaggggcgggggctgtggggcggcactgggggcggtgttgcggggaggggcggggcttctgcgctgacaggccccgccccgcagtctatcacgtgatcttcatctactgcgcggtcaagggccaccggggcttccagttcttctacctgccctacttcgagaagtgatcgcggcgcagcgtggaccccttgcgcccatgggggcgcccctcttgccctgttccgttcccctcatctcaagggaagaggccctccaggaccctcgaaaccccagcccctagggagtttgctcaggaagttcggggcatgcaggcctggccctgggaaagccgcccgtcgcctgctctgtgccttaacttattctcgggccgtgcggctgctaggttgctgttattttgtgctaataaaagagtaattaattccaca

SEQ ID NO: 92589 - DNA, 1692 bp, Homo sapiens
  misc_feature (1421)..(1421): n is a, c, g, or t
aaaaaaaaaaaaaaaaaaacaatgcgggggcggggcagcggcgacgctgggtgtgtgggcgcagatggcggcggcgcacggcgcctgagcgggccggggccatgagcgccgcccggccccagttcagcattgatgatgccttcgagctgtccctggaggacgggggccctgggcccgagtccagcggggtcgcgcgctttgggccgctgcacttcgagcgtcgggcccggttcgaggtggctgacgaggacaagcagtcccggctgcgctaccagaacctggagaacgatgaggatggagcccaggcctctccggagccggatgggggagtcggcaccagggattccagccgaacttccatccgcagctcccagtggtccttcagcaccatcagcagcagcacccagcgctcctacaacacctgctgcagctggacccaacaccctttgatccagaagaaccgccgagtggtgctggcctccttcctgctcctgctgctggggctggggcctgctcagtgccttgctctggaaacagagcttggtgagcttcctggggagggtctctgcctagggcaccttcagctcaggtggtgggtgagccgggctgggggtgggagcccccgccctcaccactgctcctgcccccacccccgcggctccgtctgtgtgcagtgctgatcctggtcggcgtgggactggaggcgaccccctctccaggtgagcgaccctcccgcccccacaggcagaggacacccctgtcttgtgtccacgggtccacggcaagccctcccacctcccggcagtacacggctccttttcagctgggagtgaggcttgcccgggcagtcagcggcagcccggaaggcctcgaagcctccgccccctcgccctgaccgggctctggtccctcccgcaggtgtctccagcgccatcttcttcgtgccgggcttcctgttgttggtgcctggaggtgcgagcgggcaccggggcggaaggggcgggggctgtggggcggcactgggggcggtgttgcggggaggggcggggcttctgcgctgacaggccccgccccgcagtctatcacgtgatcttcatctactgcgcggtcaagggccaccggggcttccagttcttctacctgccctacttcgagaagtgatcgcggcgcagcgtggaccccttgcgcccatgggggcgcccctcttgccctgttccgttcccctcatctcaagggaagaggccctccaggaccctcgaaaccccagcccctagggagtttgctcaggaagttcggggcatgcaggcctggccctgggaaagccgcccgtcgcctgctctgtgccttaacttattctcgggccgtgcggctgctaggttgctgttattttgtgctaataaaagagtaattaattccacaanaaaaaaaacaaaaaaaaacacacacacaaacaacaacaagaaaaaccacaaacataaaacaagaaggaaaaaaaaatataaaaaaaaccaaaggaaaaagagttccaagagccaaatattgcaccagggagacataagggagaccactaagaggagcacataaatgggaaacgcggggacctagaaaaggaaaacaaaacaaaagaaaacaatcaagacaaggaaaacaaaaagaaaaagatagggagaaaaaatagcaacaacataacta

SEQ ID NO: 92590 - DNA, 947 bp, Homo sapiens
aaaaaaaaaaaaaaaaaaacaatgcgggggcggggcagcggcgacgctgggtgtgtgggcgcagatggcggcggcgcacggcgcctgagcgggccggggccatgagcgccgcccggccccagttcagcattgatgatgccttcgagctgtccctggaggacgggggccctgggcccgagtccagcggggtcgcgcgctttgggccgctgcacttcgagcgtcgggcccggttcgaggtggctgacgaggacaagcagtcccggctgcgctaccagaacctggagaacgatgaggatggagcccaggcctctccggagccggatgggggagtcggcaccagggattccagccgaacttccatccgcagctcccagtggtccttcagcaccatcagcagcagcacccagcgctcctacaacacctgctgcagctggacccaacaccctttgatccagaagaaccgccgagtggtgctggcctccttcctgctcctgctgctggggctggtgctgatcctggtcggcgtgggactggaggcgaccccctctccaggtgtctccagcgccatcttcttcgtgccgggcttcctgttgttggtgcctggagtctatcacgtgatcttcatctactgcgcggtcaagggccaccggggcttccagttcttctacctgccctacttcgagaagtgatcgcggcgcagcgtggaccccttgcgcccatgggggcgcccctcttgccctgttccgttcccctcatctcaagggaagaggccctccaggaccctcgaaaccccagcccctagggagtttgctcaggaagttcggggcatgcaggcctggccctgggaaagccgcccgtcgcctgctctgtgccttaacttattctcgggccgtgcggctgctaggttgctgttattttgtgctaataaaagagtaattaattccaca

SEQ ID NO: 92591 - DNA, 1114 bp, Homo sapiens
aaaaaaaaaaaaaaaaaaacaatgcgggggcggggcagcggcgacgctgggtgtgtgggcgcagatggcggcggcgcacggcgcctgagcgggccggggccatgagcgccgcccggccccagttcagcattgatgatgccttcgagctgtccctggaggacgggggccctgggcccgagtccagcggggtcgcgcgctttgggccgctgcacttcgagcgtcgggcccggttcgaggtggctgacgaggacaagcagtcccggctgcgctaccagaacctggagaacgatgaggatggagcccaggcctctccggagccggatgggggagtcggcaccagggattccagccgaacttccatccgcagctcccagtggtccttcagcaccatcagcagcagcacccagcgctcctacaacacctgctgcagctggacccaacaccctttgatccagaagaaccgccgagtggtgctggcctccttcctgctcctgctgctggggctggggcctgctcagtgccttgctctggaaacagagcttggtgagcttcctggggagggtctctgcctagggcaccttcagctcaggtggtgggtgagccgggctgggggtgggagcccccgccctcaccactgctcctgcccccacccccgcggctccgtctgtgtgcagtgctgatcctggtcggcgtgggactggaggcgaccccctctccaggtgtctccagcgccatcttcttcgtgccgggcttcctgttgttggtgcctggagtctatcacgtgatcttcatctactgcgcggtcaagggccaccggggcttccagttcttctacctgccctacttcgagaagtgatcgcggcgcagcgtggaccccttgcgcccatgggggcgcccctcttgccctgttccgttcccctcatctcaagggaagaggccctccaggaccctcgaaaccccagcccctagggagtttgctcaggaagttcggggcatgcaggcctggccctgggaaagccgcccgtcgcctgctctgtgccttaacttattctcgggccgtgcggctgctaggttgctgttattttgtgctaataaaagagtaattaattccaca

SEQ ID NO: 92592 - DNA, 1261 bp, Homo sapiens
aaaaaaaaaaaaaaaaaaacaatgcgggggcggggcagcggcgacgctgggtgtgtgggcgcagatggcggcggcgcacggcgcctgagcgggccggggccatgagcgccgcccggccccagttcagcattgatgatgccttcgagctgtccctggaggacgggggccctgggcccgagtccagcggggtcgcgcgctttgggccgctgcacttcgagcgtcgggcccggttcgaggtggctgacgaggacaagcagtcccggctgcgctaccagaacctggagaacgatgaggatggagcccaggcctctccggagccggatgggggagtcggcaccagggattccagccgaacttccatccgcagctcccagtggtccttcagcaccatcagcagcagcacccagcgctcctacaacacctgctgcagctggacccaacaccctttgatccagaagaaccgccgagtggtgctggcctccttcctgctcctgctgctggggctgggtgagtggccctgagggttggggtcaagaggggccccgtgggaggctctgccctccttttgtacaggctctgcctcccccttgacactgagcctcccagcatcctgaggaggcagctggctgccatcatcacactcccattttacagggcctgctcagtgccttgctctggaaacagagcttggtgagcttcctggggagggtctctgcctagggcaccttcagctcaggtggtgggtgagccgggctgggggtgggagcccccgccctcaccactgctcctgcccccacccccgcggctccgtctgtgtgcagtgctgatcctggtcggcgtgggactggaggcgaccccctctccaggtgtctccagcgccatcttcttcgtgccgggcttcctgttgttggtgcctggagtctatcacgtgatcttcatctactgcgcggtcaagggccaccggggcttccagttcttctacctgccctacttcgagaagtgatcgcggcgcagcgtggaccccttgcgcccatgggggcgcccctcttgccctgttccgttcccctcatctcaagggaagaggccctccaggaccctcgaaaccccagcccctagggagtttgctcaggaagttcggggcatgcaggcctggccctgggaaagccgcccgtcgcctgctctgtgccttaacttattctcgggccgtgcggctgctaggttgctgttattttgtgctaataaaagagtaattaattccaca

SEQ ID NO: 92593 - DNA, 1912 bp, Homo sapiens
aaaaaaaaaaaaaaaaaaacaatgcgggggcggggcagcggcgacgctgggtgtgtgggcgcagatggcggcggcgcacggcgcctgagcgggccggggccatgagcgccgcccggccccagttcagcattgatgatgccttcgagctgtccctggaggacgggggccctgggcccgagtccagcggggtcgcgcgctttgggccgctgcacttcgagcgtcgggcccggttcgaggtggctgacgaggacaagcagtcccggctgcgctaccagaacctggagaacgatgaggatggagcccaggcctctccggagccggatgggggagtcggcaccagggattccagccgaacttccatccgcagctcccagtggtccttcagcaccatcagcagcagcacccagcgctcctacaacacctgctgcagctggacccaacaccctttgatccagaagaaccgccgagtggtgctggcctccttcctgctcctgctgctggggctgggtgagtggccctgagggttggggtcaagaggggccccgtgggaggctctgccctccttttgtacaggctctgcctcccccttgacactgagcctcccagcatcctgaggaggcagctggctgccatcatcacactcccattttacaggtgaggagacagaggccttgtgacctgggcacacagccaggaaatcacacatagctgaaaatggaacctggcttatcactgcaaagacttttccttttttaaaaaatttaacctgtttaaatccattagaggacagaagagtagcagctaccatttattctgtgtctactctgggcaaggtgcagggcagttttattttcccatcttacagaagtcctacaagtgaggtggtgcccagaagccacgtgtaggggctcagggatgccgagtgcccagccagtgcagagccgcagggcacctggcacttccccttgtctggcatctaagcactgacaagcacccctctcctacccattgctcagatgggggaacttttggtccagagcaggcagatctcacaccaggtgttctttggctcccaggcacctcgttctttggggtagaggaggcagagtccccagaaaggatccagggttggggtcacgagtgatccataagaagggactaactgtggctgctaccctggctcatctctccgcttctccaggaaggccaaggctccccagccagccaggcccctggcacagagtctggcctctgctcagggtgtttgagtgtgggggagggggctgccacttcccagcaccgctgtacactggccctggtagtgctgccaagttctttcatttttcccctcaacccagcaaggcaagcctggggctaccagagcgccttagagggcctttgtagggtgcagggagtgagtttcagcccccatcataccctatacccctttatttttatttatttattttttgaggaggagtcttgctctgtcgcccaggcaggagtgtagtggcgcaatctcggctcactgcaacctctgcctcctgggttcaagggattttcatgccttagcctccagagtagctgggattacaggcgcgcgccaccacacctggctaattttttgtatttttttagtagagatggggtttcaccatgttggcctcaggtgatccacccacctcagcttcccaaagtgttgggattacaggcgtgagccaccacgcccagccctttttattttttagagacagggtcttgttctgttgcccaagctggagagctgtggtatgatcactgcagcctcaaactcttggactcaagccatcctcccagctgagcctccctagtagctgggactacaggcatgtaccaccatgctcagctaatttttttttttttaaaataataa

SEQ ID NO: 92594 - DNA, 912 bp, Homo sapiens
aaaaaaaaaaaaaaaaaaacaatgcgggggcggggcagcggcgacgctgggtgtgtgggcgcagatggcggcggcgcacggcgcctgagcgggccggggccatgagcgccgcccggccccagttcagcattgatgatgccttcgagctgtccctggaggacgggggccctgggcccgagtccagcggggtcgcgcgctttgggccgctgcacttcgagcgtcgggcccggttcgaggtggctgacgaggacaagcagtcccggctgcgctaccagaacctggagaacgatgaggatggagcccaggcctctccggagccggatgggggagtcggcaccagggattccagccgaacttccatccgcagctcccagtggtccttcagcaccatcagcagcagcacccagcgctcctacaacacctgctgcagctggacccaacaccctttgatccagaagaaccgccgagtggtgctggcctccttcctgctcctgctgctggggctggtgctgatcctggtcggcgtgggactggaggcgaccccctctccaggtgtctccagcgccatcttcttcgtgccgggcttcctgttgttggtgcctggagggccaccggggcttccagttcttctacctgccctacttcgagaagtgatcgcggcgcagcgtggaccccttgcgcccatgggggcgcccctcttgccctgttccgttcccctcatctcaagggaagaggccctccaggaccctcgaaaccccagcccctagggagtttgctcaggaagttcggggcatgcaggcctggccctgggaaagccgcccgtcgcctgctctgtgccttaacttattctcgggccgtgcggctgctaggttgctgttattttgtgctaataaaagagtaattaattccaca

SEQ ID NO: 92595 - DNA, 639 bp, Homo sapiens
aaaaaaaaaaaaaaaaaaacaatgcgggggcggggcagcggcgacgctgggtgtgtgggcgcagatggcggcggcgcacggcgcctgagcgggccggggccatgagcgccgcccggccccagttcagcattgatgatgccttcgagctgtccctggaggacgggggccctgggcccgagtccagcggggtcgcgcgctttgggccgctgcacttcgagcgtcgggcccggttcgaggtggctgacgaggacaagcagtcccggctgcgctaccagaacctggagaacgatgaggatggagcccaggcctctccggagccggatgggggagtcggcaccagggattccagccgaacttccatccgcagctcccagtggtccttcagcaccatcagcagcagcacccagcgctcctacaacacctgctgcagctggacccaacaccctttgatccagaagaaccgccgagtggtgctggcctccttcctcccctagggagtttgctcaggaagttcggggcatgcaggcctggccctgggaaagccgcccgtcgcctgctctgtgccttaacttattctcgggccgtgcggctgctaggttgctgttattttgtgctaataaaagagtaattaattccaca

SEQ ID NO: 92596 - DNA, 488 bp, Homo sapiens
ccttcttcacatcaaaggagatgtctgtctcccactgggacctcctcagtggggagctcccagtgtagtgccatctgggccagggggtttttaacttggaagggaagcaaggctggatgatgagtgcgcagctgtaccacctcatagtagttatctgtagggacaaagagctcctcagggtctgggaatgtggggaaaaagatttgttgcttcccagtggctctattaccacccaggagcatgaggtctttcttggggacctgaaacctcactatctcttcccatccccattctctatgctccttcctgtctcataaggaaggggtcctggactgaggatgctgaagacaaacttcctagttccagatctgtcattagcttgctgtgtgtattaaagaaatctttccctctctgcacatgcaatcatgcacaatgcaaggattcagactgcttgatctttaagggcccttcaatgtaaaaaatgcaaa

SEQ ID NO: 92597 - DNA, 369 bp, Homo sapiens
tcctgccttagcctcccaagtaactgagtctacagcacacaccaccacacctaatttttgtagagatggggttttactatgttgcccaggctggtctcggactcctgagctcaagcaatctgcctgccttggcctcccaaaatgttagaattacaagcatgagccaccatgcctggcccctccaaagactaggtattgaggaagaacttaaaaggcattggtaatccatttcctagttctgggccctcactctcgaggtgaatttcctccatagcatatttacaccaagttgtgctttcctgtgtacaggttgctgttggcccaggatgtgcctctgtgcaaactggaaaaggcgccttcctcaagtaa

SEQ ID NO: 92598 - DNA, 492 bp, Homo sapiens
agatgtcagatgtcatacttctgttaagaatttaaattatttttagtctcaggctgtctacatgtgtacatctgtgtgaccttgcttggtaatgagagtcacagaaaaccgcctttcagaaaacacacagtcacacactggtgactctctgtgccctcttccattcctcagaaccccctcaaagtgtgcatgtcaattgcttcccagtactctggagatgcttttttgtcggaggtccacagactaatggcagcaactcatccttctagggggtatcacaaacacgttatcaggttcctaagataactctctcctgacttctatgctccttgagcaaggtagggaggagggtggcatccagagtcagtcagtgcttggtttgcatcacagttctgttttgattgtttacttgccaggtgacaatggcaaggctattgaatttcttgaaacctccattttctcatctgtaaaacaagggcaagaatgctactt

SEQ ID NO: 92599 - DNA, 429 bp, Homo sapiens
gaaggtatcgggtacccaatatgcttgtctacccttcattggtgccactaattatctcttttatctgctttaaaatggaacggtaacttcctaaaggcccttctcaatttaaggtctatgactgctaaacataatgaatgataactataaatgccccctaagatcacttacccaaggtcacacaaaactgggaagtgaacacagatctgcttgatgtataaatcatatgctcttttggtgccttactatgttacttaaacctctttgacactcatttataaaatttcctcatatataagatatggataacatacagctgagaattaaagaaaatataataaaagcctgacataaaataagtactcaataaatggtaaccattagcagtcacagtttcatttaattcgcatacttctataattctcgaca

SEQ ID NO: 92600 - DNA, 541 bp, Homo sapiens
cggctcacacctataatcccagcactttgggaggttgaggcaggaaaaagacttgagcccaggagttcgaggctgtagtgagttctgatcatgccactgcacttcagcctgagagacagagcgagaccctgtctccaaaaaaatttgaaaacagatttttaaaaactgttttggaacctcctcatacttgcacaaaaaaattcctcttgtacaaaggcttttctctagatttaatgttgactcttttatctttcttcataagatctacttttaatcctttgttcttttttgaaaagacagtatttcttttctatttgcatccagccatttttttatcctatatttgtgaatttgcaaaataaaatataagttgtttaattctgcccttcttttcttcagacagggtcttgctctgttgcctaggatggagtgcagtggtgccatcaaagttcactgcagcctcgaccccctgggctcaagtaatcctctcacctccacctcccaagtagctgggactacagatgcacgccatcacacctgg

SEQ ID NO: 92601 - DNA, 233 bp, Homo sapiens
ttgtcaggctgggtaagttccagaaccttctggagccaggattctctttcccagccctgggccctgagctcggcggatgggatctgcgaggctcggggcgcaggggaaatgggggcgtgttcctttaaggcggaaccaggcggggagtgggacgtcccccgcgggcacagcccgagccgcacctggggcccaattagcctggagcgcggccgggtgtgttgaacgtagcaacc

SEQ ID NO: 92602 - DNA, 410 bp, Homo sapiens
aaggaatttacatagttgaacaactattctttggacatcttttagtccagtagacggtgttaaacttgaagacaaataacgatttgacctgtgatatttgtttttccctcttatcctctaagcccattcatccagatcattcatcacctttaaaggcatccccagagggaggcaggtctggacagagctgaagattgcacaggccatttgcaggctggattcgttctgtggtgacccacctgtctgactcgagttatttttttcccatgtctggacaagactgacctctgcccagcaactcaggcctggatttagtccaagggccctcagtggctttttttgtttgtttgtttttttcaggaagtgaagaatttagagggataaaaggcggaaataacttttcagcctct

SEQ ID NO: 92603 - DNA, 192 bp, Homo sapiens
aaggaatttacatagttgaacaactattctttggacatcttttagtccagtagacggtgttaaacttgaagacaaataacgatttgacctgtgatatttgtttttccctcttatcctctaagcccattcatccagatcatgccactgcactccagcctgggtgatagagtgagtctcttctccaaaaacaaa

SEQ ID NO: 92604 - DNA, 304 bp, Homo sapiens
acatttggagatatacaggttttcccttacatgcatgcaaaacactaggccactgactcctaatagggatttttaagttcgaaattacaaaatgtaccaaatcacaccaaggaactaaatggagccttgttcttagaaaaagttaacttcagtagatctactttaaaaacatttaaattggaagaatattttttggaaaatgcttgacttgtactgatctaaaagctcttctccaaattcatcatgaatatctggtccaaagaatcggaaaacctttagtggtccccataaaacctgtaattcc

SEQ ID NO: 92605 - DNA, 393 bp, Homo sapiens
ccggatggacctctgactgggaacacgctaggctgctgcatcactctcaccagtggcagccagccttgccttaaaatttaaaaatcaggttctgaagtccatctctgccttctcttacctgactttttagcttctcaacctttccaaaaggcaggctgaggaacgtggtattggcaaagcaaaagcattctggggccggaagattggacctttatatcctgcatttctcagggttccaatggcagagcattccatgtcacctcctccaagagccctccctgactacccacagggcttagtgcttcctcgactacagagcttcatggatgctctgcccattcctttgttaggcagtgcagtcagcagcgtgccgcaattgcgcatttgcctgtc

SEQ ID NO: 92606 - DNA, 424 bp, Homo sapiens
ctcccagctgcttgggaggctgaggtaggaggattgcctgagcccaggagttagaggttgcaggagttagaggttccacgatcgcacctttcattccgttacatttgctgccttgagaacagaagacctgctggttttgttgccagtttgctcagtcatttttatgaaaaagccagtgctaactaggtgcttcttcgtgccttctctgagaatcaagaactctagtatgtttgcgtgtgttcagtctctcattaaatgttctcactatcccagagaaccatctcattggaccttggtctgtacataccttcatctttggctctgacttgtaattatttttagaacttctctttttttttttttggagacagagttttgctctagttgccagactggaatgcagtggcacgatctcagctcacct

SEQ ID NO: 92607 - DNA, 414 bp, Homo sapiens
taaaaacccacaatggcatgctgatattgacatggtttttgtgtcaaaactctgtaaccctacttgcttggcaacctggcccatacctgcctttccgactgtctcatgccacccccaccaaacaccttgcaccctagccatgccagatcacgtgacctttgtgcatgctggtcctactgtcttcctgcctttgttcatgtcctgctggctttgtgtggaatgctccccattcttttcctcctgaaattctgttcatccttgaagtctcaccattgcctccttgggaagctatctctaatcccatgcagaattcaatttacctttgtctgtgctgacatatcagtggggtaactaaaatactacctgctgttattcagcctcccttattaagcatacactgtgagcgggaaacta

SEQ ID NO: 92608 - DNA, 3265 bp, Homo sapiens
caacagtctgtcacctccgaccagccagacttcctctcaactgctgtgtcttttgtaaagctgatgaattgttcacagagtatgaatcaaagctattttccaacacagtcaaaggccagactgcaatatttgaggagatgatagaagatgaagaaggactggtggatgatcgagcacctaccaccacccggggtctctgggcaataagtgagacagagcgatctatgaaagcaatactatcatttgcaaaatcacataggtttgatgttgaatttgttgatgaaggaagcacttcaatggatctctttgaagcatggaagaaggaatataagttgcttcatgaatattggatggctctgaggaatcgtgtgtctgctgttgatgaacttgcaatggctacagaacgactaagagtgcgtgatcctagggagccaaagcctaatccgcctgttcttcatatcattgaaccacatgaggtagaacaaaaccgaataaaactactaaatgataaagctgttgctacatcacagcttcagaaaaaacttgggcagcttctttacctaactaatttggagaagtctcaagataaaacatcgggaggtgttaatccagaaccttgcccaatctgtgctcgacagctaggaaaacagtgggcggtactgacctgtggtcactgtttctgtaatgaatgcatttctataattattgaacaatacagcgtgggatctcacagaagctccattaagtgtgcaatctgccgccagaccacatctcacaaagaaatctcgtatgtctttacctcagagaaagcaaaccaggaggaggacatccctgtgaagggcagccattctacaaaagtggaagctgtggtcagaactctgatgaaaatacagcttagagatccaggggccaaagcactcgttttctcaacgtggcaagatgtattagatattatttcaaaagctcttactgacaacaacatggaatttgcacaaatcagtcgtgttaagacatttcaggagaacctttcagcatttaaacgtgatccccaaatcaatattttgctgctgcccctgcacacaggttctaatggattaactatcattgaagcaactcatgttctcttggtggagcccatattgaaccctgcccatgagcttcaggccatagggagggtgcaccgaattggacagacaaaacctactattgtacacagattcttaattaaagcaacaatagaagaaagaatgcaggcaatgctgaaaactgctgagagaagtcacacgaactcatcagcaaagcattcagaggcctctgtcttgactgtggctgacctggcagacctatttaccaaagaaactgaagagcttgaatgaactacacttgattcattccatggactttagtgtattaataaactttcatagctgtagagcaaagttacaagttttaaaaacccagtagataacagtaacactgttcctagttgaatgaatttgtttattgttctggttatacagtggcttagtacttattgagtccttttcaatatactgtttccaaaagatctataaagattcttaattttacactcctaataaaacatttattttttgtcccaaatagtatctatatctgatgatgcaagggaattaagagaggtaatgtgtacttttcttatgataagatcactcataaaaacagttggaataagaaagtaaactagtctagttttatacgacctggtatattgaacaaacatagatctcagttttggaagggccttcagtatctttagcacatgattcaccaatatcttgttagtaatattttaagtagatggtgaattatattaacccattttttgagtaggcttataccataactttacacctagtaattttgcagtaatacaactccttacaataagttaatgttagacagttatttgtttcttctgcatcttgctactgaaaacaaaaacaatgaaaatattcatatttctattatgtgtaaagtggtgttagtgtaaacagttaactccaaatagattttttaatgtattaatgattaccttaaaattatctgctttccctactcttaatttttcttattgttaaagtttttatatgttgtaagattgatgtatctgtaaatattgcagtttttatgattttgttttattataacatggaaatatggcagggttttttttttaatcattattatactgatgtcttggattctttttctttcccatgttcttgtgtaactagactttttagccagtgatatctgaattcatggtagagttgttatttcactccagttgttcctcccttaagcacgagtctttgaccttttgaacaagagaatgccatgttcacataagcaaatcgttgcaagtgataataacgaagtgtttcttcttctgtgaggaattaatggactttgaaattgctgaataaggagtagcttgttacatcctagccatttgatgtaatacaaatgttcttatttggcttccttttctttgagccttcagagttttaaaggaccctctttgaccctcaggacttattagctcccagttagctgcctggaaaactcatagaaccattccctagatcccatttgtccgagaggctttggtgcttagttaaggtgcattttcttactctaggtttatagagtgatgtaattcaactgaagaaaacacacacatgcttttggtgcttattcttcagttaaaaggaggtatccattgattcttttatatgaaattaaatcaaactgttatttttatagctcttcacatattaaaaagagctttcatgtacatttacgtgtttaatttacccaacaatcttgtgaagttgatataattaatatctttactgttttaaaggtagagaactgaagttcagatatattgaaactttcttaggacatgtagcaagtaaacagtggagcccaggtcccctgactccatatcttacattcttttactaataacatgtcatgctgagattcagaaggcccatgcttataatttaaaaatgagactatttcagtatttctttgtgtttgttttctactattcctttctgagctatgttttagagaaaacaatttgatatgcttcaattttgtaaaatcaaattacatatatataaaaaaacctatctgtattagacaaaaactgtttttatttatttctgtaagatatcaattaaataaatattttagtggaaaaaaaaaaaat

SEQ ID NO: 92609 - DNA, 2248 bp, Homo sapiens
agcagtagtcaagagttttattctttgttctattaattgcacagagaaaaaacactttgacaaacactaaaagtaatatatagaaatcttcactttgacaaggtataacaaagattttatcacttgctttcctctgggagtttcttatatcccaattacaaaaacttaagaaaaaatatgtgtctagttcgtattactacaaatataatcgctgatggcttggggtttctttctgactgtgctcatttgggaaaccttgcagtcacacgaactcatcagcaaagcattcagaggcctctgtcttgactgtggctgacctggcagacctatttaccaaagaaactgaagagcttgaatgaactacacttgattcattccatggactttagtgtattaataaactttcatagctgtagagcaaagttacaagttttaaaaacccagtagataacagtaacactgttcctagttgaatgaatttgtttattgttctggttatacagtggcttagtacttattgagtccttttcaatatactgtttccaaaagatctataaagattcttaattttacactcctaataaaacatttattttttgtcccaaatagtatctatatctgatgatgcaagggaattaagagaggtaatgtgtacttttcttatgataagatcactcataaaaacagttggaataagaaagtaaactagtctagttttatacgacctggtatattgaacaaacatagatctcagttttggaagggccttcagtatctttagcacatgattcaccaatatcttgttagtaatattttaagtagatggtgaattatattaacccattttttgagtaggcttataccataactttacacctagtaattttgcagtaatacaactccttacaataagttaatgttagacagttatttgtttcttctgcatcttgctactgaaaacaaaaacaatgaaaatattcatatttctattatgtgtaaagtggtgttagtgtaaacagttaactccaaatagattttttaatgtattaatgattaccttaaaattatctgctttccctactcttaatttttcttattgttaaagtttttatatgttgtaagattgatgtatctgtaaatattgcagtttttatgattttgttttattataacatggaaatatggcagggttttttttttaatcattattatactgatgtcttggattctttttctttcccatgttcttgtgtaactagactttttagccagtgatatctgaattcatggtagagttgttatttcactccagttgttcctcccttaagcacgagtctttgaccttttgaacaagagaatgccatgttcacataagcaaatcgttgcaagtgataataacgaagtgtttcttcttctgtgaggaattaatggactttgaaattgctgaataaggagtagcttgttacatcctagccatttgatgtaatacaaatgttcttatttggcttccttttctttgagccttcagagttttaaaggaccctctttgaccctcaggacttattagctcccagttagctgcctggaaaactcatagaaccattccctagatcccatttgtccgagaggctttggtgcttagttaaggtgcattttcttactctaggtttatagagtgatgtaattcaactgaagaaaacacacacatgcttttggtgcttattcttcagttaaaaggaggtatccattgattcttttatatgaaattaaatcaaactgttatttttatagctcttcacatattaaaaagagctttcatgtacatttacgtgtttaatttacccaacaatcttgtgaagttgatataattaatatctttactgttttaaaggtagagaactgaagttcagatatattgaaactttcttaggacatgtagcaagtaaacagtggagcccaggtcccctgactccatatcttacattcttttactaataacatgtcatgctgagattcagaaggcccatgcttataatttaaaaatgagactatttcagtatttctttgtgtttgttttctactattcctttctgagctatgttttagagaaaacaatttgatatgcttcaattttgtaaaatcaaattacatatatataaaaaaacctatctgtattagacaaaaactgtttttatttatttctgtaagatatcaattaaataaatattttagtggaaaaaaaaaaaat

SEQ ID NO: 92610 - DNA, 1526 bp, Homo sapiens
caacagtctgtcacctccgaccagccagacttcctctcaactgctgtgtcttttgtaaagctgatgaattgttcacagagtatgaatcaaagctattttccaacacagtcaaaggccagactgcaatatttgaggagatgatagaagatgaagaaggactggtggatgatcgagcacctaccaccacccggggtctctgggcaataagtgagacagagcgatctatgaaagcaatactatcatttgcaaaatcacataggtttgatgttgaatttgttgatgaaggaagcacttcaatggatctctttgaagcatggaagaaggaatataagttgcttcatgaatattggatggctctgaggaatcgtgtgtctgctgttgatgaacttgcaatggctacagaacgactaagagtgcgtgatcctagggagccaaagcctaatccgcctgttcttcatatcattgaaccacatgaggtagaacaaaaccgaataaaactactaaatgataaagctgttgctacatcacagcttcagaaaaaacttgggcagcttctttacctaactaatttggagaagtctcaagataaaacatcgggaggtgttaatccagaaccttgcccaatctgtgctcgacagctaggaaaacagtgggcggtactgacctgtggtcactgtttctgtaatgaatgcatttctataattattgaacaatacagcgtgggatctcacagaagctccattaagtgtgcaatctgccgccagaccacatctcacaaagaaatctcgtatgtctttacctcagagaaagcaaaccaggaggaggacatccctgtgaagggcagccattctacaaaagtggaagctgtggtcagaactctgatgaaaatacagcttagagatccaggggccaaagcactcgttttctcaacgtggcaagatgtattagatattatttcaaaagctcttactgacaacaacatggaatttgcacaaatcagtcgtgttaagacatttcaggagaacctttcagcatttaaacgtgatccccaaatcaatattttgctgctgcccctgcacacaggttctaatggattaactatcattgaagcaactcatgttctcttggtggagcccatattgaaccctgcccatgagcttcaggccatagggagggtgcaccgaattggacagacaaaacctactattgtacacagattcttaattaaagcaacaatagaagaaagaatgcaggcaatgctgaaaactgctgagagaaggttttttgaggaacaggcgttattttgttttcatgacatcaccccattctcccacccctggtccctgacaactgccattctacagttgagagatttggtgatttgtgagttgttttttatttactttaaaaattttttgatttgttttttatcatctttttcaatttagagatgttttgcacaagtaaaaattatggggcttattcagtaatacatgtctgtaaggaataaacattaagaaacccaa

SEQ ID NO: 92611 - DNA, 521 bp, Homo sapiens
gctgtggtcagaactctgatgaaaatacagcttagagatccaggggccaaagcactcgttttctcaacggtataatcaacattttcatcctcaatattaattcgaactgattttccctctctaatcagtttacagctgagaactaatttttgatgtttactcttagattttttttcccaaatccataagatagaattatttttagagaagatagaattatttttagagaaatgtgatgatgtttcacaaggcaatttgtatagctatatttcatgactttttattagtttcatttaaggattttcttagtttaatatttttaaaattggaatttctgactttgaaagtctcatttcacaaaaatttgggttgaaaaagacaatctactttataaagtgttgagtaaaacccttagttttcattttcgaaaactaagtaactatattccagtatgcactccattatgtattttctactgtttgtttatcttaattacattttcaaaaccagcatttgatgca

SEQ ID NO: 92612 - DNA, 1760 bp, Homo sapiens
caacagtctgtcacctccgaccagccagacttcctctcaactgctgtgtcttttgtaaagctgatgaattgttcacagagtatgaatcaaagctattttccaacacagtcaaaggccagactgcaatatttgaggagatgatagaagatgaagaaggactggtggatgatcgagcacctaccaccacccggggtctctgggcaataagtgagacagagcgatctatgaaagcaatactatcatttgcaaaatcacataggtttgatgttgaatttgttgatgaaggaagcacttcaatggatctctttgaagcatggaagaaggaatataagttgcttcatgaatattggatggctctgaggaatcgtgtgtctgctgttgatgaacttgcaatggctacagaacgactaagagtgcgtgatcctagggagccaaagcctaatccgcctgttcttcatatcattgaaccacatgaggtagaacaaaaccgaataaaactactaaatgataaagctgttgctacatcacagcttcagaaaaaacttgggcagcttctttacctaactaatttggagaagtctcaagataaaacatcgggaggtgttaatccagaaccttgcccaatctgtgctcgacagctaggaaaacagtgggcggtactgacctgtggtcactgtttctgtaatgaatgcatttctataattattgaacaatacagcgtgggatctcacagaagctccattaagtgtgcaatctgccgccagaccacatctcacaaagaaatctcgtatgtctttacctcagagaaagcaaaccaggaggaggacatccctgtgaagggcagccattctacaaaagtggaagctgtggtcagaactctgatgaaaatacagcttagagatccaggggccaaagcactcgttttctcaacgtggcaagatgtattagatattatttcaaaagctcttactgacaacaacatggaatttgcacaaatcagtcgtgttaagacatttcaggagaacctttcagcatttaaacgtgatccccaaatcaatattttgctgctgcccctgcacacaggttctaatggattaactatcattgaagcaactcatgttctcttggtggagcccatattgaaccctgcccatgagcttcaggccatagggagggtgcaccgaattggacagacaaaacctactattgtacacagattcttaattaaagcaacaatagaagaaagaatgcaggcaatgctgaaaactgctgagagaaggtaggtaataatttaccacaagtagaagggggaaggttttcctgttaaaagtttgtatctttagaacttcttcacttagatgacaacgaaaaatatagcacaaatacgtttttaaaagcaaagtctgacgttttgccttttcactgtttcccagtcagtgctccagactttgtatatttgaattaatttattaattgtaacatgtaaatataaactatcctacattcctttgccacattggatcactttctgaggctgggagttcgaaaccagcctggccaacatggtgaaaccccatctctactaaaaacacaaaaattagccaggcatggtgacacgcaccatagtcttagctagtcgggaggctgaagcaggagaatcgcttgaaccccggaggtggaggttgcagtgagccaagatcgtgccactgcactccagcctgggcaacagaacgagtctgtgtcaaaaaaaaaaaaaaaaa

SEQ ID NO: 92613 - DNA, 999 bp, Homo sapiens
  misc_feature (3)..(3): n is a, c, g, or t
tanaaaaagcaggctgtaccggtccgaatccccggatcagcaagcccaggcggcggttggaaaggctggaggacacacctaaacatgtggaatcccaatgccgccccaggagctccccatggcaatccagctttccccccaggtgggccccctcatcctgtgccacagccagggtatccaggatgccaaccgttgggtccctaccctcctccatacccaccgcctgcccctggaatccctcctgtgaatcccttggctcctggcatggttggaccagcagtgatagtagacaagaagatgcagaagaaaatgaagaaagctcataaaaagatgcacaagcaccaaaagcaccacaagtaccacaagcatggcaagcattcctcctcttcctcctcctcttccagcagtgattctgactgaatacaggccctggacccttccctcaagtctcaccagttctgctctcccatcaagcttcagatgccatgttgtactgggggaatgtagcccttgtgctccccaccccctacctccacctgagcctcaccctgctgttgagccctgagtggctaggggaaatgggaagaggattgccatggcctggccatcttgttgctgcttggttagatcatatagctaatgaattaggcaggggagctattttttgaagatgatgaactaaatgttgaagacaagtttgagatctgtaaaatgtgattttttacttccacttataatacttgtgattggggaggtttgtggaaattcaattatgatgaaaaacctatcttttttgtaatgttggcatacttggggaatttagtggcaaatacattccccagcaggccttttgttggttgcactaactgcaaggttgctgggaagtagagtccatttggttgatgagctttgactgcggttttggaaccttacctctcctccttagcccaatatgctgtcttgggtcctattcaaataaagttatttctcctggtctca

SEQ ID NO: 92614 - DNA, 1185 bp, Homo sapiens
  misc_feature (1)..(1): n is a, c, g, or t
  misc_feature (3)..(3): n is a, c, g, or t
  misc_feature (5)..(5): n is a, c, g, or t
  misc_feature (7)..(8): n is a, c, g, or t
ngncnanncatcagtcgagcggccacataattaccaattaggcagtagcagaggcgggtgccgaagcacggggtctgggtgactaggaagagccgagactgcgaaggagaacgcagcaagcccaggcggcggtggaaaggctggaggacacacctaaacatgtggaatcccaatgccgggcagccagggccaaatccatatccccccaatattgggtgccctggaggttccaatcctgcccacccaccacctattaatccaccctttcccccaggcccctgtcctcctcccccaggagctccccatggcaatccagctttccccccaggtgggccccctcatcctgtgccacagccagggtatccaggatgccaaccgttgggtccctaccctcctccatacccaccgcctgcccctggaatccctcctgtgaatcccttggctcctggcatggttggaccagcagtgatagtagacaagaagatgcagaagaaaatgaagaaagctcataaaaagatgcacaagcaccaaaagcaccacaagtaccacaagcatggcaagcattcctcctcttcctcctcctcttccagcagtgattctgactgaatacaggccctggacccttccctcaagtctcaccagttctgctctcccatcaagcttcagatgccatgttgtactgggggaatgtagcccttgtgctccccaccccctacctccacctgagcctcaccctgctgttgagccctgagtggctaggggaaatgggaagaggattgccatggcctggccatcttgttgctgcttggttagatcatatagctaatgaattaggcaggggagctattttttgaagatgatgaactaaatgttgaagacaagtttgagatctgtaaaatgtgattttttacttccacttataatacttgtgattggggaggtttgtggaaattcaattatgatgaaaaacctatcttttttgtaatgttggcatacttggggaatttagtggcaaatacattccccagcaggccttttgttggttgcactaactgcaaggttgctgggaagtagagtccatttggttgatgagctttgactgcggttttggaaccttacctctcctccttagcccaatatgctgtcttgggtcctattcaaataaagttatttctcctggtctca

SEQ ID NO: 92615 - DNA, 811 bp, Homo sapiens
gggtagggacccaacgggaaggcatctgaatacccaccgccagccccggaaaaggcaccagtaaaacccgtaactgaccagcggaccagcagtgatagtagacaagaagatgcagaagaaaatgaagaaagctcataaaaagatgcacaagcaccaaaagcaccacaagtaccacaagcatggcaagcattcctcctcttcctcctcctcttccagcagtgattctgactgaatacaggccctggacccttccctcaagtctcaccagttctgctctcccatcaagcttcagatgccatgttgtactgggggaatgtagcccttgtgctccccaccccctacctccacctgagcctcaccctgctgttgagccctgagtggctaggggaaatgggaagaggattgccatggcctggccatcttgttgctgcttggttagatcatatagctaatgaattaggcaggggagctattttttgaagatgatgaactaaatgttgaagacaagtttgagatctgtaaaatgtgattttttacttccacttataatacttgtgattggggaggtttgtggaaattcaattatgatgaaaaacctatcttttttgtaatgttggcatacttggggaatttagtggcaaatacattccccagcaggccttttgttggttgcactaactgcaaggttgctgggaagtagagtccatttggttgatgagctttgactgcggttttggaaccttacctctcctccttagcccaatatgctgtcttgggtcctattcaaataaagttatttctcctggtctca

SEQ ID NO: 92616 - DNA, 1387 bp, Homo sapiens
  misc_feature (1)..(1): n is a, c, g, or t
  misc_feature (3)..(3): n is a, c, g, or t
  misc_feature (5)..(5): n is a, c, g, or t
  misc_feature (7)..(8): n is a, c, g, or t
  misc_feature (1235)..(1235): n is a, c, g, or t
  misc_feature (1238)..(1238): n is a, c, g, or t
  misc_feature (1329)..(1329): n is a, c, g, or t
  misc_feature (1333)..(1333): n is a, c, g, or t
  misc_feature (1339)..(1339): n is a, c, g, or t
  misc_feature (1344)..(1344): n is a, c, g, or t
  misc_feature (1356)..(1356): n is a, c, g, or t
  misc_feature (1358)..(1358): n is a, c, g, or t
  misc_feature (1360)..(1360): n is a, c, g, or t
  misc_feature (1362)..(1362): n is a, c, g, or t
  misc_feature (1364)..(1364): n is a, c, g, or t
  misc_feature (1366)..(1366): n is a, c, g, or t
  misc_feature (1368)..(1369): n is a, c, g, or t
  misc_feature (1371)..(1371): n is a, c, g, or t
  misc_feature (1382)..(1382): n is a, c, g, or t
ngncnanncatcagtcgagcggccacataattaccaattaggcagtagcagaggcgggtgccgaagcacggggtctgggtgactaggaagagccgagactgcgaaggagaacgcagcaagcccaggcggcggtggaaaggctggaggacacacctaaacatgtggaatcccaatgccgggcagccagggccaaatccatatccccccaatattgggtgccctggaggttccaatcctgcccacccaccacctattaatccaccctttcccccaggcccctgtcctcctcccccaggagctccccatggcaatccagctttccccccaggtgggccccctcatcctgtgccacagccagggtatccaggatgccaaccgttgggtccctaccctcctccatacccaccgcctgcccctggaatccctcctgtgaatcccttggctcctggcatggttggaccagcagtgatagtagacaagaagatgcagaagaaaatgaagaaagctcataaaaagatgcacaagcaccaaaagcaccacaagtaccacaagcatggcaagcattcctcctcttcctcctcctcttccagcagtgattctgactgaatacaggccctggacccttccctcaagtctcaccagttctgctctcccatcaagcttcagatgccatgttgtactgggggaatgtagcccttgtgctccccaccccctacctccacctgagcctcaccctgctgttgagccctgagtggctaggggaaatgggaagaggattgccatggcctggccatcttgttgctgcttggttagatcatatagctaatgaattaggcaggggagctattttttgaagatgatgaactaaatgttgaagacaagtttgagatctgtaaaatgtgattttttacttccacttataatacttgtgattggggaggtttgtggaaattcaattatgatgaaaaacctatcttttttgtaatgttggcatacttggggaatttagtggcaaatacattccccagcaggccttttgttggttgcactaactgcaaggttgctgggaagtagagtccatttggttgatgagctttgactgcggttttggaaccttacctctcctccttagcccaatatgctgtcttgggtcctattcaaataaagttatttctcctggtctcacaaaaaaaaacaaaaaaaaaaaaaaaaaaaaaaaaaaaaaaaaaaaaaanaanataaaaaaaaaaaaaaaagcgcgcgcgacgcacgcgcacacgcgcacacagcaagcgcgcgcgcgcgcgcgcgcgcgcacacacacacacncacnctctcnctctntttttttttttntntntntntntnntntttttttttcncccac

SEQ ID NO: 92617 - DNA, 1731 bp, Homo sapiens
  misc_feature (1)..(1): n is a, c, g, or t
  misc_feature (3)..(3): n is a, c, g, or t
  misc_feature (5)..(5): n is a, c, g, or t
  misc_feature (7)..(8): n is a, c, g, or t
  misc_feature (1418)..(1418): n is a, c, g, or t
ngncnanncatcagtcgagcggccacataattaccaattaggcagtagcagaggcgggtgccgaagcacggggtctgggtgactaggaagagccgagactgcgaaggagaacgcagcaagcccaggcggcggtggaaaggctggaggacacacctaaacatgtggaatcccaatgccgggcagccagggccaaatccatatccccccaatattgggtgccctggaggttccaatcctgcccacccaccacctattaatccaccctttcccccaggcccctgtcctcctcccccaggagctccccatggcaatccagctttccccccaggtgggccccctcatcctgtgccacagccagggtatccaggatgccaaccgttgggtccctaccctcctccatacccaccgcctgcccctggaatccctcctgtgaatcccttggctcctggcatggttggaccagcagtgatagtagacaagaagatgcagaagaaaatgaagaaagctcataaaaagatgcacaagcaccaaaagcaccacaagtaccacaagcatggcaagcattcctcctcttcctcctcctcttccagcagtgattctgactgaatacaggccctggacccttccctcaagtctcaccagttctgctctcccatcaagcttcagatgccatgttgtactgggggaatgtagcccttgtgctccccaccccctacctccacctgagcctcaccctgctgttgagccctgagtggctaggggaaatgggaagaggattgccatggcctggccatcttgttgctgcttggttagatcatatagctaatgaattaggcaggggagctattttttgaagatgatgaactaaatgttgaagacaagtttgagatctgtaaaatgtgattttttacttccacttataatacttgtgattggggaggtttgtggaaattcaattatgatgaaaaacctatcttttttgtaatgttggcatacttggggaatttagtggcaaatacattccccagcaggccttttgttggttgcactaactgcaaggttgctgggaagtagagtccatttggttgatgagctttgactgcggttttggaaccttacctctcctccttagcccaatatgctgtcttgggtcctattcaaataaagttatttctcctggtctcacaaaaaaaaacaaaaaaaaaaaaaaaaaaaaaaaaaaaaaaccgcgggggctttttttgggggggggaaaaaaagggtttttaaaggggcaggggcaaggttttccggagacccctttttttttcaacaggggggaaaaatggggggcccccaaaaggggggggagcaatcaaaattttgaggataacccgcgggtttaactctcgttttgataattcgtcgcggaaaaacantggacagaacagagagcagagagcagacagagagaccgcagacgagaaccgacaggaacggaagacacagagaaacgaagagccaccacgaccgagcgagataggacacaaacgaacggagaaagacccagaaccgaaaagaaaccaaggtggaggcaaacaagcaaaacgctgagccaaccaacagcagcggcagacgagcacagctaactactggactaacgacaaagaagacactgtaatgagacagaacccaagagaacgagtagagagagaacatacaggcgaccgagcaacgaacatggagacaaca

SEQ ID NO: 92618 - DNA, 1624 bp, Homo sapiens
  misc_feature (1)..(1): n is a, c, g, or t
  misc_feature (3)..(3): n is a, c, g, or t
  misc_feature (5)..(5): n is a, c, g, or t
  misc_feature (7)..(8): n is a, c, g, or t
ngncnanncatcagtcgagcggccacataattaccaattaggcagtagcagaggcgggtgccgaagcacggggtctgggtgactaggaagagccgagactgcgaaggagaacgcagcaagcccaggcggcggtggaaaggctggaggacacacctaaacatgtggaatcccaatgccgggcagccagggccaaatccatatccccccaatattgggtgccctggaggttccaatcctgcccacccaccacctattaatccaccctttcccccaggcccctgtcctcctcccccaggagctccccatggcaatccagctttccccccaggtgggccccctcatcctgtgccacagccagggtatccaggatgccaaccgttgggtccctaccctcctccatacccaccgcctgcccctggaatccctcctgtgaatcccttggctcctggcatggttggaccagcagtgatagtagacaagaagatgcagaagaaaatgaagaaagctcataaaaagatgcacaagcaccaaaagcaccacaagtaccacaagcatggcaagcattcctcctcttcctcctcctcttccagcagtgattctgactgaatacaggccctggacccttccctcaagtctcaccagttctgctctcccatcaagcttcagatgccatgttgtactgggggaatgtagcccttgtgctccccaccccctacctccacctgagcctcaccctgctgttgagccctgagtggctaggggaaatgggaagaggattgccatggcctggccatcttgttgctgcttggttagatcatatagctaatgaattaggcaggggagctattttttgaagatgatgaactaaatgttgaagacaagtttgagatctgtaaaatgtgattttttacttccacttataatacttgtgattggggaggtttgtggaaattcaattatgatgaaaaacctatcttttttgtaatgttggcatacttggggaatttagtggcaaatacattccccagcaggccttttgttggttgcactaactgcaaggttgctgggaagtagagtccatttggttgatgagctttgactgcggttttggaaccttacctctcctccttagcccaatatgctgtcttgggtcctattcaaataaagttatttctcctggtctcatctcagctcacctgtgctatcaccttggctgggcatggcacattctactacttttgctaaccttccacagaccctttaaagtgtatcagtttcatagaagggaaccagagcatcagtgagaaagacactgtatgattcccatgttttttaagtgggaggactcttcaaaattggctcaggcagagtggcatgaatctttattgtcttcccttgggtgaatggatataggcctttagcttatatgttttcatatctgctacagagattcttaaccctggctgcccatcagctgtgagagagtaatttggggctttgccccaaatctactgaataatacttatttttatttttttttaaattttttcctaaaactttttatttttatttatgtatttacttattttgagatggagtttcgctcttattgcccaggttggag

SEQ ID NO: 92619 - DNA, 1178 bp, Homo sapiens
  misc_feature (1)..(1): n is a, c, g, or t
  misc_feature (3)..(3): n is a, c, g, or t
  misc_feature (5)..(5): n is a, c, g, or t
  misc_feature (7)..(8): n is a, c, g, or t
ngncnanncatcagtcgagcggccacataattaccaattaggcagtagcagaggcgggtgccgaagcacggggtctgggtgactaggaagagccgagactgcgaaggagaacgcagcaagcccaggcggcggtggaaaggctggaggacacacctaaacatgtggaatcccaatgccgggcagccagggccaaatccatatccccccaatattgggtgccctggaggttccaatcctgcccacccaccacctattaatccaccctttcccccaggcccctgtcctcctcccccaggagctccccatggcaatccagctttccccccaggtgggccccctcatcctgtgccacagccagggtatccaggatgccaaccgttgggtccctaccctcctccatacccaccgcctgcccctggaatccctcctgtgaatcccttggctcctggcatggttggaccagcagtgatagtagacaagaagatgcagaagaaaatgaagaaagctcataaaaagatgcacaagcaccaaaagcaccacaagtaccacaagcatggcaagcattcctcctcttcctcctcctcttccagcagtgattctgactgaatacaggccctggacccttccctcaagtctcaccagttctgctctcccatcaagcttcagatgccatgttgtactgggggaatgtagcccttgtgctccccaccccctacctccacctgagcctcaccctgctgttgagccctgagtggctaggggaaatgggaagaggattgccatggcctggccatcttgttgctgcttggttagatcatatagctaatgaattaggcaggggagctattttttgaagatgatgaactaaatgttgaagacaagtttgagatctgtaaaatgtgattttttacttccacttataatacttgtgattggggaggtttgtggaaattcaattatgatgaaaaacctatcttttttgtaatgttggcatacttggggaatttagtggcaaatacattccccagcaggccttttgttggttgcactaactgcaaggttgctgggaagtagagtccatttggttgatgagctttgactgcggttttggaaccttacctctcctccttagcccaatatgctgtctgtactacgctttggagggatcctctaggtca

SEQ ID NO: 92620 - DNA, 1090 bp, Homo sapiens
caatcagatatgtctagtacgagcctggtgttaggcggtgaaaggctggaggacacacctaaacatgtggaatcccaatgccgggcagccagggccaaatccatatccccccaatattgggtgccctggaggttccaatcctgcccacccaccacctattaatccaccctttcccccaggcccctgtcctcctcccccaggagctccccatggcaatccagctttccccccaggtgggccccctcatcctgtgccacagccagggtatccaggatgccaaccgttgggtccctaccctcctccatacccaccgcctgcccctggaatccctcctgtgaatcccttggctcctggcatggttggaccagcagtgatagtagacaagaagatgcagaagaaaatgaagaaagctcataaaaagatgcacaagcaccaaaagcaccacaagtaccacaagcatggcaagcattcctcctcttcctcctcctcttccagcagtgattctgactgaatacaggccctggacccttccctcaagtctcaccagttctgctctcccatcaagcttcagatgccatgttgtactgggggaatgtagcccttgtgctccccaccccctacctccacctgagcctcaccctgctgttgagccctgagtggctaggggaaatgggaagaggattgccatggcctggccatcttgttgctgcttggttagatcatatagctaatgaattaggcaggggagctattttttgaagatgatgaactaaatgttgaagacaagtttgagatctgtaaaatgtgattttttacttccacttataatacttgtgattggggaggtttgtggaaattcaattatgatgaaaaacctatcttttttgtaatgttggcatacttggggaatttagtggcaaatacattccccagcaggccttttgttggttgcactaactgcaaggttgctgggaagtagagtccatttggttgatgagctttgactgcggttttggaaccttacctctcctccttagcccaatatgctgtcttgggtcctattcaaataaagttatttctcctggtctca

SEQ ID NO: 92621 - DNA, 1159 bp, Homo sapiens
  misc_feature (1)..(1): n is a, c, g, or t
  misc_feature (3)..(3): n is a, c, g, or t
  misc_feature (5)..(5): n is a, c, g, or t
  misc_feature (7)..(8): n is a, c, g, or t
ngncnanncatcagtcgagcggccacataattaccaattaggcagtagcagaggcgggtgccgaagcacggggtctgggtgactaggaagagccgagactgcgaaggagaacgcagcaagcccaggcggcggtggaaaggctggaggacacacctaaacatgtggaatcccaatgccgggcagccagggccaaatccatatccccccaatattgggtgccctggaggttccaatcctgcccacccaccacctattaatccaccctttcccccaggcccctgtcctcctcccccaggagctccccatggcaatccagctttccccccaggtgggccccctcatcctgtgccacagccgtccctaccctcctccatacccaccgcctgcccctggaatccctcctgtgaatcccttggctcctggcatggttggaccagcagtgatagtagacaagaagatgcagaagaaaatgaagaaagctcataaaaagatgcacaagcaccaaaagcaccacaagtaccacaagcatggcaagcattcctcctcttcctcctcctcttccagcagtgattctgactgaatacaggccctggacccttccctcaagtctcaccagttctgctctcccatcaagcttcagatgccatgttgtactgggggaatgtagcccttgtgctccccaccccctacctccacctgagcctcaccctgctgttgagccctgagtggctaggggaaatgggaagaggattgccatggcctggccatcttgttgctgcttggttagatcatatagctaatgaattaggcaggggagctattttttgaagatgatgaactaaatgttgaagacaagtttgagatctgtaaaatgtgattttttacttccacttataatacttgtgattggggaggtttgtggaaattcaattatgatgaaaaacctatcttttttgtaatgttggcatacttggggaatttagtggcaaatacattccccagcaggccttttgttggttgcactaactgcaaggttgctgggaagtagagtccatttggttgatgagctttgactgcggttttggaaccttacctctcctccttagcccaatatgctgtcttgggtcctattcaaataaagttatttctcctggtctca

SEQ ID NO: 92622 - DNA, 1298 bp, Homo sapiens
gtcaacttagtgtacaatgctgtcagatgaaccttacccttgtaaggcttgtaacttggttcctccctttcttaagcccttatggctatctttcttcttttaatatttaaagtttttaatctttaaatttttaatttttaaaccatgcttgtttaacctgctggtaaaattcacgtctttcagactgtaatgctttcatgccaagtaaatggtcttgccaggcttccagcctgtttcagagaccactagcccagagccgtatcagccccttcagcaagccataagaaatttctactcctcctggaaatagatgtagagactatgtccatgcttagcaggaagtagttccagaagagacctttgctccttaagaataaggagaatgaggactgcgaaggagaacgcagcaagcccaggcggcggtggaaaggctggaggacacacctaaacatgtggaatcccaatgccgagggtatccaggatgccaaccgttgggtccctaccctcctccatacccaccgcctgcccctggaatccctcctgtgaatcccttggctcctggcatggttggaccagcagtgatagtagacaagaagatgcagaagaaaatgaagaaagctcataaaaagatgcacaagcaccaaaagcaccacaagtaccacaagcatggcaagcattcctcctcttcctcctcctcttccagcagtgattctgactgaatacaggccctggacccttccctcaagtctcaccagttctgctctcccatcaagcttcagatgccatgttgtactgggggaatgtagcccttgtgctccccaccccctacctccacctgagcctcaccctgctgttgagccctgagtggctaggggaaatgggaagaggattgccatggcctggccatcttgttgctgcttggttagatcatatagctaatgaattaggcaggggagctattttttgaagatgatgaactaaatgttgaagacaagtttgagatctgtaaaatgtgattttttacttccacttataatacttgtgattggggaggtttgtggaaattcaattatgatgaaaaacctatcttttttgtaatgttggcatacttggggaatttagtggcaaatacattccccagcaggccttttgttggttgcactaactgcaaggttgctgggaagtagagtccatttggttgatgagctttgactgcggttttggaaccttacctctcctccttagcccaatatgctgtcttgggtcctattcaaataaagttatttctcctggtctca

SEQ ID NO: 92623 - DNA, 1164 bp, Homo sapiens
  misc_feature (1)..(1): n is a, c, g, or t
  misc_feature (3)..(3): n is a, c, g, or t
  misc_feature (5)..(5): n is a, c, g, or t
  misc_feature (7)..(8): n is a, c, g, or t
ngncnanncatcagtcgagcggccacataattaccaattaggcagtagcagaggcgggtgccgaagcacggggtctgggtgactaggaagagccgagactgcgaaggagaacgcagcaagcccaggcggcggtggaaaggctggaggacacacctaaacatgtggaatcccaatgccgggcagccagggccaaatccatatccccccaatattgggtgccctggaggttccaatcctgcccacccaccacctattaatccaccctttcccccaggcccctgtcctcctcccccaggagctccccatggcaatccagctttccccccaggtgggccccctcatcctgtgccacagccagggtatccaggatgccaaccgttgggtccctaccctcctccatacccaccgcctgcccctggaatccctcctgtgaatcccttggctcctggcatggttggaccagcagtgatagtagacaagaagatgcagaagaaaatgaagaaagctcataaaaagatgcacaagcaccaaaagcaccacaagtaccacaagcatggcaagcattcctcctcttcctcctcctcttccagcagtgattctgactgaatacaggccctggacccttccctcaagtctcaccagttctgctctcccatcaagcttcagatgccatgttgtactgggggaatgtagcccttgtgctccccaccccctacctccacctgagcctcaccctgctgttgagccctgagtggctaggggaaatgggaagaggattgccatggcctggccatcttgttgctgcttggttagatcatatagctattttttgaagatgatgaactaaatgttgaagacaagtttgagatctgtaaaatgtgattttttacttccacttataatacttgtgattggggaggtttgtggaaattcaattatgatgaaaaacctatcttttttgtaatgttggcatacttggggaatttagtggcaaatacattccccagcaggccttttgttggttgcactaactgcaaggttgctgggaagtagagtccatttggttgatgagctttgactgcggttttggaaccttacctctcctccttagcccaatatgctgtcttgggtcctattcaaataaagttatttctcctggtctca

SEQ ID NO: 92624 - DNA, 1055 bp, Homo sapiens
  misc_feature (1)..(1): n is a, c, g, or t
  misc_feature (3)..(3): n is a, c, g, or t
  misc_feature (5)..(5): n is a, c, g, or t
  misc_feature (7)..(8): n is a, c, g, or t
ngncnanncatcagtcgagcggccacataattaccaattaggcagtagcagaggcgggtgccgaagcacggggtctgggtgactaggaagagccgagactgcgaaggagaacgcagcaagcccaggcggcggtggaaaggctggaggacacacctaaacatgtggaatcccaatgccgggcagccagggccaaatccatatccccccaatattgggtgccctggaggttccaatcctgcccacccaccacctattaatccaccctttcccccaggcccctgtcctcctcccccaggagctccccatggcaatccagctttccccccaggtgggccccctcatcctgtgccacagccagggtatccaggatgccaaccgttgggtccctaccctcctccatacccaccgcctgcccctggaatccctcctgtgaatcccttggctcctggcatggttggaccagcagtgatagtagacaagaagatgcagaagaaaatgaagaaagctcataaaaagatgcacaagcaccaaaagcaccacaagtaccacaagcatggcaagcattcctcctcttcctcctcctcttccagcagtgattctgactgaatacaggccctggacccttccctcaagtctcaccagttctgctctcccatcaagcttcagatgccatgttgtactgggggaatgtagcccttgtgctccccaccccctacctccacctgagcctcaccctgctgttgagccctgagtggctaggggaaatgggaagaggattgccatggcctggccatcttgttgctgcttggttagatcatatagctaatgaattaggcaggggagctattttttgaagatgatgaactaaatgttgaagacaagtttgagatctgtaaaatgtgattttttacttccacttataatacttgtgattggggaggtttgtggaaattcaattatgatgaaaaacctatcttttttgtaatgttggcatacttggggaatttagtggcaaatacattccccaagtatgccaacattactataaagatttg

SEQ ID NO: 92625 - DNA, 1058 bp, Homo sapiens
  misc_feature (1)..(1): n is a, c, g, or t
  misc_feature (3)..(3): n is a, c, g, or t
  misc_feature (5)..(5): n is a, c, g, or t
  misc_feature (7)..(8): n is a, c, g, or t
ngncnanncatcagtcgagcggccacataattaccaattaggcagtagcagaggcgggtgccgaagcacggggtctgggtgactaggaagagccgagactgcgaaggagaacgcagcaagcccaggcggcggtggaaaggctggaggacacacctaaacatgtggaatcccaatgccgggcagccagggccaaatccatatccccccaatattgggtgccctggaggttccaatcctgcccacccaccacctattaatccaccctttcccccaggcccctgtcctcctctggaatccctcctgtgaatcccttggctcctggcatggttggaccagcagtgatagtagacaagaagatgcagaagaaaatgaagaaagctcataaaaagatgcacaagcaccaaaagcaccacaagtaccacaagcatggcaagcattcctcctcttcctcctcctcttccagcagtgattctgactgaatacaggccctggacccttccctcaagtctcaccagttctgctctcccatcaagcttcagatgccatgttgtactgggggaatgtagcccttgtgctccccaccccctacctccacctgagcctcaccctgctgttgagccctgagtggctaggggaaatgggaagaggattgccatggcctggccatcttgttgctgcttggttagatcatatagctaatgaattaggcaggggagctattttttgaagatgatgaactaaatgttgaagacaagtttgagatctgtaaaatgtgattttttacttccacttataatacttgtgattggggaggtttgtggaaattcaattatgatgaaaaacctatcttttttgtaatgttggcatacttggggaatttagtggcaaatacattccccagcaggccttttgttggttgcactaactgcaaggttgctgggaagtagagtccatttggttgatgagctttgactgcggttttggaaccttacctctcctccttagcccaatatgctgtcttgggtcctattcaaataaagttatttctcctggtctca

SEQ ID NO: 92626 - DNA, 1198 bp, Homo sapiens
gtcaacttagtgtacaatgctgtcagatgaaccttacccttgtaaggcttgtaacttggttcctccctttcttaagcccttatggctatctttcttcttttaatatttaaagtttttaatctttaaatttttaatttttaaaccatgcttgtttaacctgctggtaaaattcacgtctttcagactgtaatgctttcatgccaagtaaatggtcttgccaggcttccagcctgtttcagagaccactagcccagagccgtatcagccccttcagcaagccataagaaatttctactcctcctggaaatagatgtagagactatgtccatgcttagcaggaagtagttccagaagagacctttgctccttaagaataaggagaatgaggactgcgaaggagaacgcagcaagcccaggcggcggtggaaaggctggaggacacacctaaacatgtggaatcccaatgccgggaccagcagtgatagtagacaagaagatgcagaagaaaatgaagaaagctcataaaaagatgcacaagcaccaaaagcaccacaagtaccacaagcatggcaagcattcctcctcttcctcctcctcttccagcagtgattctgactgaatacaggccctggacccttccctcaagtctcaccagttctgctctcccatcaagcttcagatgccatgttgtactgggggaatgtagcccttgtgctccccaccccctacctccacctgagcctcaccctgctgttgagccctgagtggctaggggaaatgggaagaggattgccatggcctggccatcttgttgctgcttggttagatcatatagctaatgaattaggcaggggagctattttttgaagatgatgaactaaatgttgaagacaagtttgagatctgtaaaatgtgattttttacttccacttataatacttgtgattggggaggtttgtggaaattcaattatgatgaaaaacctatcttttttgtaatgttggcatacttggggaatttagtggcaaatacattccccagcaggccttttgttggttgcactaactgcaaggttgctgggaagtagagtccatttggttgatgagctttgactgcggttttggaaccttacctctcctccttagcccaatatgctgtcttgggtcctattcaaataaagttatttctcctggtctca

SEQ ID NO: 92627 - DNA, 887 bp, Homo sapiens
  misc_feature (1)..(1): n is a, c, g, or t
  misc_feature (3)..(3): n is a, c, g, or t
  misc_feature (5)..(5): n is a, c, g, or t
  misc_feature (7)..(8): n is a, c, g, or t
ngncnanncatcagtcgagcggccacataattaccaattaggcagtagcagaggcgggtgccgaagcacggggtctgggtgactaggaagagccgagactgcgaaggagaacgcagcaagcccaggcggcggtggaaaggctggaggacacacctaaacatgtggaatcccaatgccgggcagccagggccaaatccatatccccccaatattgggtgccctggaggttccaatcctgcccacccaccacctattaatccaccctttcccccaggcccctgtcctcctcccccaggagctccccatggcaatccagctttccccccaggtgggccccctcatcctgtgccacagccagggtatccaggatgccaaccgttgggtccctaccctcctccatacccaccgcctgcccctggaatccctcctgtgaatcccttggctcctggcatggttggaccagcagtgatagtagacaagaagatgcagaagaaaatgaagaaagctcataaaaagatgcacaagcaccaaaagcaccacaagtaccacaagcatggcaagcattcctcctcttcctcctcctcttccagcagtgattctgactgaatacaggccctggacccttccctcaagtctcaccagttctgctctcccatcaagcttcagatgccatgttgtactgggggaatgtagcccttgtgctccccaccccctacctccacctgagcctcaccctgctgttgagccctgagtggctaggggaaatgggaagaggattgccatggcctggccatcttgttgctgcttggttagatcatatagctaatgaattaggcaggggagctattttttgaagatgatgaactaaatgttgaagacaagtttga

SEQ ID NO: 92628 - DNA, 1236 bp, Homo sapiens
aaaagcgggagaaattaccctggagagactgaaaaatgtttttatttaataactagcattgctgggagtatatgcttaaggaaccttgaatagaactcccagccttttcttacaccttccccactttttcccattgtgcttgggaaaaagtagagatacatgcacatacaactgctgtttctactgtcttttcttagatttgtagaatccaatttcttaaaatcataggactttgcacgcagctaatgaataagcattgaaaaggtaacagctgtttcctagcactatactatgcttgtgcctgtaatttattccttgcctaggcatcgattcaggtaaagaaagttggaaatttgctccaaaggcaatatgttaaattttttaaattccgtgtgataatttaggatggtttaatccattcctgtatgctcactgctgaaggaaacccttgcttttgtttaggtacagtctgttcaagactcctgaccttcttagggaagcaagggatacttgggtggaggggtggggcaccaaagaatggcccacggagtgattgaaaggtcatttggatctgatgctatcttctttcccctttcccctttccccttgcagcattcctcctcttcctcctcctcttccagcagtgattctgactgaatacaggccctggacccttccctcaagtctcaccagttctgctctcccatcaagcttcagatgccatgttgtactgggggaatgtagcccttgtgctccccaccccctacctccacctgagcctcaccctgctgttgagccctgagtggctaggggaaatgggaagaggattgccatggcctggccatcttgttgctgcttggttagatcatatagctaatgaattaggcaggggagctattttttgaagatgatgaactaaatgttgaagacaagtttgagatctgtaaaatgtgattttttacttccacttataatacttgtgattggggaggtttgtggaaattcaattatgatgaaaaacctatcttttttgtaatgttggcatacttggggaatttagtggcaaatacattccccagcaggccttttgttggttgcactaactgcaaggttgctgggaagtagagtccatttggttgatgagctttgactgcggttttggaaccttacctctcctccttagcccaatatgctgtcttgggtcctattcaaataaagttatttctcctggtctca

SEQ ID NO: 92629 - DNA, 955 bp, Homo sapiens
  misc_feature (1)..(1): n is a, c, g, or t
  misc_feature (3)..(3): n is a, c, g, or t
  misc_feature (5)..(5): n is a, c, g, or t
  misc_feature (7)..(8): n is a, c, g, or t
ngncnanncatcagtcgagcggccacataattaccaattaggcagtagcagaggcgggtgccgaagcacggggtctgggtgactaggaagagccgagactgcgaaggagaacgcagcaagcccaggcggcggtggaaaggctggaggacacacctaaacatgtggaatcccaatgccgggcagccagggccaaatccatatccccccaatattgggtgccctggaggttccaatcctgcccacccaccacctattaatccaccctttcccccaggcccctgtcctcctcccccaggagctccccatggcaatccagctttccccccaggtgggccccctcatcctgtgccacagccagggtatccaggatgccaaccgttgggtccctaccctcctccatacccaccgcctgcccctggaatccctcctgtgaatcccttggctcctggcatggttggaccagcagtgatagtagacaagaagatgcagaagaaaatgaagaaagctcataaaaagatgcacaagcaccaaaagcaccacaagtaccacaagcatggcaagcattcctcctcttcctcctcctcttccagcagtgattctgactgaatacaggccctggacccttccctcaagtctcaccagttctgctctcccatcaagcttcagatgccatgttgtactgggggaatgtagcccttgtgctccccaccccctacctccacctgagcctcaccctgctgttgagccctgagtggctaggggaaatgggaagaggattgccatggcctggccatcttgttgctgcttggttagatcatatagctaatgaattaggcaggggagctattttttgaagatgatgaactaaatgttgaagacaagtttgaggatgtgatgggttataaacactggactcagagagatgtgataagtggagaggtaaatggtattccag

SEQ ID NO: 92630 - DNA, 1069 bp, Homo sapiens
  misc_feature (1)..(1): n is a, c, g, or t
  misc_feature (3)..(3): n is a, c, g, or t
  misc_feature (5)..(5): n is a, c, g, or t
  misc_feature (7)..(8): n is a, c, g, or t
  misc_feature (917)..(917): n is a, c, g, or t
  misc_feature (920)..(920): n is a, c, g, or t
  misc_feature (1011)..(1011): n is a, c, g, or t
  misc_feature (1015)..(1015): n is a, c, g, or t
  misc_feature (1021)..(1021): n is a, c, g, or t
  misc_feature (1026)..(1026): n is a, c, g, or t
  misc_feature (1038)..(1038): n is a, c, g, or t
  misc_feature (1040)..(1040): n is a, c, g, or t
  misc_feature (1042)..(1042): n is a, c, g, or t
  misc_feature (1044)..(1044): n is a, c, g, or t
  misc_feature (1046)..(1046): n is a, c, g, or t
  misc_feature (1048)..(1048): n is a, c, g, or t
  misc_feature (1050)..(1051): n is a, c, g, or t
  misc_feature (1053)..(1053): n is a, c, g, or t
  misc_feature (1064)..(1064): n is a, c, g, or t
ngncnanncatcagtcgagcggccacataattaccaattaggcagtagcagaggcgggtgccgaagcacggggtctgggtgactaggaagagccgagactgcgaaggagaacgcagcaagcccaggcggcggtggaaaggctggaggacacacctaaacatgtggaatcccaatgccgggcagccagggccaaatccatatccccccaatattgggtgccctggaggttccaatcctgcccacccaccacctattaatccaccctttcccccaggcccctgtcctcctcccccaggagctccccatggcaatccagctttccccccaggtgggccccctcatcctgtgccacagccagggtatccaggatgccaaccgttgggtccctaccctcctccatacccaccgcctgcccctggaatccctcctgtgaatcccttggctcctggcatggttggaccagcagtgatagtagacaagaagatgcagaagaaaatgaagaaagctcataaaaagatgcacaagcaccaaaagcaccacaagtaccacaagcatggcaagcattcctcctcttcctcctcctcttccagcagtgattctgactgaatacaggccctggacccttccctcaagtctcaccagttctgctctcccatcaagcttcagatgccatgttgtactgggggaatgtagcccttgtgctccccaccccctacctccacctgagcctcaccctgctgttgagccctgagtggctaggggaaatgggaagaggattgccatggcctggccatcttgttgctgcttggttagatcatatagctaatgaattaggcaggggagctattttttgaagatgatgaactaaatgttgaagacaagtttgaaaaaaaaaaaaaaaaaaaaaaaaaaaaaanaanataaaaaaaaaaaaaaaagcgcgcgcgacgcacgcgcacacgcgcacacagcaagcgcgcgcgcgcgcgcgcgcgcgcacacacacacacncacnctctcnctctntttttttttttntntntntntntnntntttttttttcncccac

SEQ ID NO: 92631 - DNA, 214 bp, Homo sapiens
gtcaagagtctcttcgcagcttggggctaggatcttcatttgccttttttcttttttggaggaagggggctgtgtccacatatttaagtatttgaggttcttgggcaacttccttcttacttcgcctcgaggcgtatcctttttttagcctgaggtggggtcctccccagggagagagaaagttgtttgagatcctttcttactctgtgcgtgg

SEQ ID NO: 92632 - DNA, 1476 bp, Homo sapiens
gtcaacttagtgtacaatgctgtcagatgaaccttacccttgtaaggcttgtaacttggttcctccctttcttaagcccttatggctatctttcttcttttaatatttaaagtttttaatctttaaatttttaatttttaaaccatgcttgtttaacctgctggtaaaattcacgtctttcagactgtaatgctttcatgccaagtaaatggtcttgccaggcttccagcctgtttcagagaccactagcccagagccgtatcagccccttcagcaagccataagaaatttctactcctcctggaaatagatgtagagactatgtccatgcttagcaggaagtagttccagaagagacctttgctccttaagaataaggagaatgaggactgcgaaggagaacgcagcaagcccaggcggcggtggaaaggctggaggacacacctaaacatgtggaatcccaatgccgggcagccagggccaaatccatatccccccaatattgggtgccctggaggttccaatcctgcccacccaccacctattaatccaccctttcccccaggcccctgtcctcctcccccaggagctccccatggcaatccagctttccccccaggtgggccccctcatcctgtgccacagccagggtatccaggatgccaaccgttgggtccctaccctcctccatacccaccgcctgcccctggaatccctcctgtgaatcccttggctcctggcatggttggaccagcagtgatagtagacaagaagatgcagaagaaaatgaagaaagctcataaaaagatgcacaagcaccaaaagcaccacaagtaccacaagcatggcaagcattcctcctcttcctcctcctcttccagcagtgattctgactgaatacaggccctggacccttccctcaagtctcaccagttctgctctcccatcaagcttcagatgccatgttgtactgggggaatgtagcccttgtgctccccaccccctacctccacctgagcctcaccctgctgttgagccctgagtggctaggggaaatgggaagaggattgccatggcctggccatcttgttgctgcttggttagatcatatagctaatgaattaggcaggggagctattttttgaagatgatgaactaaatgttgaagacaagtttgagatctgtaaaatgtgattttttacttccacttataatacttgtgattggggaggtttgtggaaattcaattatgatgaaaaacctatcttttttgtaatgttggcatacttggggaatttagtggcaaatacattccccagcaggccttttgttggttgcactaactgcaaggttgctgggaagtagagtccatttggttgatgagctttgactgcggttttggaaccttacctctcctccttagcccaatatgctgtcttgggtcctattcaaataaagttatttctcctggtctca

SEQ ID NO: 92633 - DNA, 1220 bp, Homo sapiens
  misc_feature (1)..(1): n is a, c, g, or t
  misc_feature (3)..(3): n is a, c, g, or t
  misc_feature (5)..(5): n is a, c, g, or t
  misc_feature (7)..(8): n is a, c, g, or t
ngncnanncatcagtcgagcggccacataattaccaattaggcagtagcagaggcgggtgccgaagcacggggtctgggtgactaggaagagccgagactgcgaaggagaacgcagcaagcccaggcggcggtggaaaggctggaggacacacctaaacatgtggaatcccaatgccgggcagccagggccaaatccatatccccccaatattgggtgccctggaggttccaatcctgcccacccaccacctattaatccaccctttcccccaggcccctgtcctcctcccccaggagctccccatggcaatccagctttccccccaggtgggccccctcatcctgtgccacagccagggtatccaggatgccaaccgttgggtccctaccctcctccatacccaccgcctgcccctggaatccctcctgtgaatcccttggctcctggcatggttggaccagcagtgatagtagacaagaagatgcagaagaaaatgaagaaagctcataaaaagatgcacaagcaccaaaagcaccacaagtaccacaagcatggcaagcattcctcctcttcctcctcctcttccagcagtgattctgactgaatacaggccctggacccttccctcaagtctcaccagttctgctctcccatcaagcttcagatgccatgttgtactgggggaatgtagcccttgtgctccccaccccctacctccacctgagcctcaccctgctgttgagccctgagtggctaggggaaatgggaagaggattgccatggcctggccatcttgttgctgcttggttagatcatatagctaatgaattaggcaggggagctattttttgaagatgatgaactaaatgttgaagacaagtttgagatctgtaaaatgtgattttttacttccacttataatacttgtgattggggaggtttgtggaaattcaattatgatgaaaaacctatcttttttgtaatgttggcatacttggggaatttagtggcaaatacattccccagcaggccttttgttggttgcactaactgcaaggttgctgggaagtagagtccatttggttgatgagctttgactgcggttttggaaccttacctctcctccttagcccaatatgctgtcttgggtcctattcaaataaagttatttctcctggtctcaaaataaaaaatacatatcgggtacgagctgcgagt

SEQ ID NO: 92634 - DNA, 1151 bp, Homo sapiens
  misc_feature (1)..(1): n is a, c, g, or t
  misc_feature (3)..(3): n is a, c, g, or t
  misc_feature (5)..(5): n is a, c, g, or t
  misc_feature (7)..(8): n is a, c, g, or t
  misc_feature (1151)..(1151): n is a, c, g, or t
ngncnanncatcagtcgagcggccacataattaccaattaggcagtagcagaggcgggtgccgaagcacggggtctgggtgactaggaagagccgagactgcgaaggagaacgcagcaagcccaggcggcggtggaaaggctggaggacacacctaaacatgtggaatcccaatgccgggcagccagggccaaatccatatccccccaatattgggtgccctggaggttccaatcctgcccacccaccacctattaatccaccctttcccccaggcccctgtcctcctcccccaggagctccccatggcaatccagctttccccccaggtgggccccctcatcctgtgccacagccagggtatccaggatgccaaccgttgggtccctaccctcctccatacccaccgcctgcccctggaatccctcctgtgaatcccttggctcctggcatggttggaccagcagtgatagtagacaagaagatgcagaagaaaatgaagaaagctcataaaaagatgcacaagcaccaaaagcaccacaagtaccacaagcatggcaagcattcctcctcttcctcctcctcttccagcagtgattctgactgaatacaggccctggacccttccctcaagtctcaccagttctgctctcccatcaagcttcagatgccatgttgtactgggggaatgtagcccttgtgctccccaccccctacctccacctgagcctcaccctgctgttgagccctgagtggctaggggaaatgggaagaggattgccatggcctggccatcttgttgctgcttggttagatcatatagctaatgaattaggcaggggagctattttttgaagatgatgaactaaatgttgaagacaagtttgagatctgtaaaatgtgattttttacttccacttataatacttgtgattggggaggtttgtggaaattcaattatgatgaaaaacctatcttttttgtaatgttggcatacttggggaatttagtggcaaatacattccccagcaggccttttgttggttgcactaactgcaaggttgctgggaagtagagtccatttggttgatgagctttgactgcggttttggaacctaacactcatcccccccacccccccccccccccccn

SEQ ID NO: 92635 - DNA, 1520 bp, Homo sapiens
gtcaacttagtgtacaatgctgtcagatgaaccttacccttgtaaggcttgtaacttggttcctccctttcttaagcccttatggctatctttcttcttttaatatttaaagtttttaatctttaaatttttaatttttaaaccatgcttgtttaacctgctggtaaaattcacgtctttcagactgtaatgctttcatgccaagtaaatggtcttgccaggcttccagcctgtttcagagaccactagcccagagccgtatcagccccttcagcaagccataagaaatttctactcctcctggaaatagatgtagagactatgtccatgcttagcaggaagtagttccagaagagacctttgctccttaagaataaggagaatgaggactgcgaaggagaacgcagcaagcccaggcggcggtggaaagtggggtatctggattccataggtttttccttttccccttgctaggctggaggacacacctaaacatgtggaatcccaatgccgggcagccagggccaaatccatatccccccaatattgggtgccctggaggttccaatcctgcccacccaccacctattaatccaccctttcccccaggcccctgtcctcctcccccaggagctccccatggcaatccagctttccccccaggtgggccccctcatcctgtgccacagccagggtatccaggatgccaaccgttgggtccctaccctcctccatacccaccgcctgcccctggaatccctcctgtgaatcccttggctcctggcatggttggaccagcagtgatagtagacaagaagatgcagaagaaaatgaagaaagctcataaaaagatgcacaagcaccaaaagcaccacaagtaccacaagcatggcaagcattcctcctcttcctcctcctcttccagcagtgattctgactgaatacaggccctggacccttccctcaagtctcaccagttctgctctcccatcaagcttcagatgccatgttgtactgggggaatgtagcccttgtgctccccaccccctacctccacctgagcctcaccctgctgttgagccctgagtggctaggggaaatgggaagaggattgccatggcctggccatcttgttgctgcttggttagatcatatagctaatgaattaggcaggggagctattttttgaagatgatgaactaaatgttgaagacaagtttgagatctgtaaaatgtgattttttacttccacttataatacttgtgattggggaggtttgtggaaattcaattatgatgaaaaacctatcttttttgtaatgttggcatacttggggaatttagtggcaaatacattccccagcaggccttttgttggttgcactaactgcaaggttgctgggaagtagagtccatttggttgatgagctttgactgcggttttggaaccttacctctcctccttagcccaatatgctgtcttgggtcctattcaaataaagttatttctcctggtctca

SEQ ID NO: 92636 - DNA, 1131 bp, Homo sapiens
  misc_feature (1)..(1): n is a, c, g, or t
  misc_feature (3)..(3): n is a, c, g, or t
  misc_feature (5)..(5): n is a, c, g, or t
  misc_feature (7)..(8): n is a, c, g, or t
ngncnanncatcagtcgagcggccacataattaccaattaggcagtagcagaggcgggtgccgaagcacggggtctgggtgactaggaagagccgagactgcgaaggagaacgcagcaagcccaggcggcggtggaaaggctggaggacacacctaaacatgtggaatcccaatgccgggcagccagggccaaatccatatccccccaatattgggtgccctggaggttccaatcctgcccacccaccacctattaatccaccctttcccccaggcccctgtcctcctcccccaggagctccccatggcaatccagctttccccccaggtgggccccctcatcctgtgccacagccagggtatccaggatgccaaccgttgggtccctaccctcctccatacccaccgcctgcccctggaatccctcctgtgaatcccttggctcctggcatggttggaccagcagtgatagtagacaagaagatgcagaagaaaatgaagaaagctcataaaaagatgcacaagcacccttccagcagtgattctgactgaatacaggccctggacccttccctcaagtctcaccagttctgctctcccatcaagcttcagatgccatgttgtactgggggaatgtagcccttgtgctccccaccccctacctccacctgagcctcaccctgctgttgagccctgagtggctaggggaaatgggaagaggattgccatggcctggccatcttgttgctgcttggttagatcatatagctaatgaattaggcaggggagctattttttgaagatgatgaactaaatgttgaagacaagtttgagatctgtaaaatgtgattttttacttccacttataatacttgtgattggggaggtttgtggaaattcaattatgatgaaaaacctatcttttttgtaatgttggcatacttggggaatttagtggcaaatacattccccagcaggccttttgttggttgcactaactgcaaggttgctgggaagtagagtccatttggttgatgagctttgactgcggttttggaaccttacctctcctccttagcccaatatgctgtcttgggtcctattcaaataaagttatttctcctggtctca

SEQ ID NO: 92637 - DNA, 789 bp, Homo sapiens
gaatggctcgctttgctctatggaatccctcctgtgaatcccttggctcctggcatggttggaccagcagtgatagtagacaagaagatgcagaagaaaatgaagaaagctcataaaaagatgcacaagcaccaaaagcaccacaagtaccacaagcatggcaagcattcctcctcttcctcctcctcttccagcagtgattctgactgaatacaggccctggacccttccctcaagtctcaccagttctgctctcccatcaagcttcagatgccatgttgtactgggggaatgtagcccttgtgctccccaccccctacctccacctgagcctcaccctgctgttgagccctgagtggctaggggaaatgggaagaggattgccatggcctggccatcttgttgctgcttggttagatcatatagctaatgaattaggcaggggagctattttttgaagatgatgaactaaatgttgaagacaagtttgagatctgtaaaatgtgattttttacttccacttataatacttgtgattggggaggtttgtggaaattcaattatgatgaaaaacctatcttttttgtaatgttggcatacttggggaatttagtggcaaatacattccccagcaggccttttgttggttgcactaactgcaaggttgctgggaagtagagtccatttggttgatgagctttgactgcggttttggaaccttacctctcctccttagcccaatatgctgtcttgggtcctattcaaataaagttatttctcctggtctca

SEQ ID NO: 92638 - DNA, 1067 bp, Homo sapiens
gtcaacttagtgtacaatgctgtcagatgaaccttacccttgtaaggcttgtaacttggttcctccctttcttaagcccttatggctatctttcttcttttaatatttaaagtttttaatctttaaatttttaatttttaaaccatgcttgtttaacctgctggtaaaattcacgtctttcagactgtaatgctttcatgccaagtaaatggtcttgccaggcttccagcctgtttcagagaccactagcccagagccgtatcagccccttcagcaagccataagaaatttctactcctcctggaaatagatgtagagactatgtccatgcttagcaggaagtagttccagaagagacctttgctccttaagaataaggagaatgaggactgcgaaggagaacgcagcaagcccaggcggcggtggaaaggctggaggacacacctaaacatgtggaatcccaatgccgccccaggagctccccatggcaatccagctttccccccaggtgggccccctcatcctgtgccacagccagggtatccaggatgccaaccgttgggtccctaccctcctccatacccaccgcctgcccctggaatccctcctgtgaatcccttggctcctggcatggttggaccagcagtgatagtagacaagaagatgcagaagaaaatgaagaaagctcataaaaagatgcacaagcaccaaaagcaccacaagtaccacaagcatggcaagcattcctcctcttcctcctcctcttccagcagtgattctgactgaatacaggccctggacccttccctcaagtctcaccagttctgctctcccatcaagcttcagatgccatgttgtactgggggaatgtagcccttgtgctccccaccccctacctccacctgagcctcaccctgctgttgagccctgagtggctaggggaaatgggaagaggattgccatggcctggccatcttgttgctgcttggttagatcatatagctaatgaattaggcaggggagctattttttgaagatgatgaactaaatgttgaagacaagtttga

SEQ ID NO: 92639 - DNA, 380 bp, Homo sapiens
aaagtagcaaaggatgagtctgcagagattgacagggttcagctcacatcatagaaaaatattagacttctttatgacaatgattgagtcattgaggactttaaacaaggatagtgaaataattggatttttactttggaaatatcactctagtaaaagacagagaactagacagtaagcattttgcatctcacgatatatatactctctggcacaactattaaactgcttttgcagcagtgcaaaagcaaatataagcactatgtagtggatgggcatggctgaatttaaatttacagaaacagacaacaggtagtgtttaggccttagtttgccaacccctgatataaaatacacaagggaaagccaaacatagagaa

SEQ ID NO: 92640 - DNA, 407 bp, Homo sapiens
gaagaataaaatacaagctgtctagttcttaatatggtaaaactctctatcctcttacactctgctttcttatttatttatttatttatttatttatttatttatttatttattttgagatggagtctcgctctgtcgcccaggctggagtgcagtggcgcaatctcagctcactgaatgctccgcctcccgggttctcgccattcttctgccttagccttctgagtagctgggactacaggcgcccgccaccacgcccagctaattttttgtattttctttttagtagagacgggatttcaccatgttagccaggatggtctctatctcctgacctcgtgatccacccacctcggcctcccaaagtgctgggattacaggcgtgagccaccacgcccagccaattt

SEQ ID NO: 92641 - DNA, 310 bp, Homo sapiens
agcatagtaattgtgttacatttcagaatatgtttctactaatttgcttttaatatattttttgaggacttggctataattagaagaagtgaatcagcagcagagctagaatttactcataatctctctctctctctcttttttttggagatggagtctcgctctgtcgcccaggctggagtgcaatggcatgatcacagctaactgcagcctccacctcccgggtttaagtggccctcccacctcagcctcctgagtagctgggactacaggcacagaccaacacgcccggtcaatttttcaatttttt

SEQ ID NO: 92642 - DNA, 499 bp, Homo sapiens
gttagccaccctggctggtgtctcactaggttgtgtgccccccacatccactggctctgagcccatctcagcaataggacttgcctaggaattgcagttattgtggcctagactgccttacaagtttatttagaaccccagagcactttagcccgtggtggcaaggttttctggaactcagtttctgacccctgagatatgtgattcccctctggctagggctggtttaaatgctccctctgtgctgggtgtgggctgaatttagcctggttctgctttctgtggcaacagggaatcactgagctcgatggacagtcccaaagcactgcactttccctcccccaagctctcagattctctctccatgccacatagctgggggatgggaggcacagtgctgtcagtgattcagtactgtctctcttgccctcttcagtgcctcttccagcaatataaagttaaaagcagatactgtgattgcttatctgaattttggttc

SEQ ID NO: 92643 - DNA, 859 bp, Homo sapiens
gtttgatttaaaaggccgaatttaaataaacctgcagctcattggcttggcaaatccagagactttcaagttgtatatgccaatacagagagcacaggagccgggctcatttactttgcccacacaacaaaaaaatgttaattgatgtaaagttgcttggcacgtggataatttagtcttacctgcattttaattgaaagaaacctattcatgtttctgatagtcaggttttgccatttaattttgtttaaaggcacctttgtgtagttgttccctcccactcctgctttccatgtgaatcacgttttcattaaaggtttgactaagtaaaaaaaaacaaacaaaaaaaaaacaaaaaaaaaaaaaaaaaaaaaaaaaaaaaaaaaaaaaaaagagggggcgcgcgcgcgcgccaaaaaaaaccccccgcagggggcgcccacaacaccgcagatcccgaccacattcttgtggtaacaaacagggggccccacaaagaggggagccgagaataaattacacacgaggcaagcgggccgacgctataaacaaacagcacggagagggggaaaacacggcgcaccagtggacaactctgaggaagaaggcacccaaaacaacgggagggaggagacacaaaacatggggcgaaaacacacaccaaaagaaaaattaaaaacacaccaacgagagagaaaacacaccacaacaccgcaacgggagcaaaacaggggggcacacacacaccgagcaacaaaatcactgcgcgcgagcacaaaacaatatgccgccaacagggaaaaataaaataacagagaaaacatcaattacccaggggcgcacacaaaaaagaacgggg

SEQ ID NO: 92644 - DNA, 200 bp, Homo sapiens
aacatatgtggttttaggatactgatgctaatacattcctcttttttcaaagtaatgataaagttcaaaaaagaagagctaaccattagttggtatgtggccagaatattaaggagtatagatttccctagaaattaaacaataatcttcggtataattcaataatatatttccctactatgtaatcaaaaataatccta

SEQ ID NO: 92645 - DNA, 272 bp, Homo sapiens
taggggctggacacggtggctcactcctgtaatcccagcagttttggaagccaagttgggagaattgcttgaggccaggagttcaagatcagcctgagcaactagacctcatttctacaaaaaaatttttaaaatgagctggatgtggtagtgcatgtctatgggcatagctactcgggagtctgaggctggaggatcaatgcttgagcctgcttgagtttgaggctacattgagcaatgatcattccactgtgttccagcctagatgacag

SEQ ID NO: 92646 - DNA, 251 bp, Homo sapiens
aagtttggaaaatacacaataatcaaaagaatataaaataaaggttacctgccatcatggcggaccacacagtattaactactatggacttttcagtgtttccctctagtcttttttctgaggtggctttgctctcagaggtggctttctctccccctgggaagggatatagctgctctgtaggagatgtgggggcaccaggctctctccatgggctctttatcacttctgacttggaggtcctttctcca

SEQ ID NO: 92647 - DNA, 536 bp, Homo sapiens
tttaaagcaccatagaaagatttgttaagttctatgtatttttaatttttaattatgatttctttctcgactaacatatgtatgaggctttttttcccatttcctagcgtgtatatttttaaattctgtgtttattgattcctgttttaattgaatttgaattgtggacagaaaataggtacatgttaagactgatctgttaatatttgttgagatttgctttatgacctagattataacctgtttttgtaaatgtttcatgattgcttgaaaagtatgcttgttttttagttgttggatgtccattagaccaaagttgttaattttgtagttcaaattttttccattttactattcttttgtcttctacttgatctctcagactctgagatgtgttgaaattttctattctagtgaacttaccaatttctccctgtaattctgtcaattttagttttatatatttttatatattttgaagtcttgttataaataaataattataaatatatacataaatataaaaatacataaac

SEQ ID NO: 92648 - DNA, 337 bp, Homo sapiens
ccagcctcgcatgagattttaacagagcaaagtacctgttggaaatcttgcgcacaaagcctcctttattctgttattcccactgacaggaattcagatacctggatcaattctgtttcggttttgctaaaatctctaacttgatattttacttttctaaaaacctgtattatcaatgaaatggaattaggaaaacaggacctatagaagttaagaccgcttcaatctattgatgtttcatggtgccttttatattcaaaatgctttgttctcacaaaaataatactttttgtttggagaaaaaggctgtggggggtgtgtgtgtgtgtgtgtgtgt

SEQ ID NO: 92649 - DNA, 653 bp, Homo sapiens
ctaagcttgccttcatgccagccctcatccccctctgtccatggctgttttattttcatcactggattgttcatgggttaatatttcccggtcacttttttgtgtttctgtctctcccacgggaatgttgtgtctgcagttgcatacccagggcctggcacttagtaggtactcagcatgtttggcaaatgaaatgagcatttgagaatgagggttgtgagccccagaccaggtcccacttgacttgctggccacagttattggtcctgttggggtctagtggccaatgtggttcttcaagagaaggttctctgctccccagtgatgtttaggtcttgggattcccactctccacacagactcaaagtcatccaggcagagacctccaaaacacttgttcttgggaggtggggagctgctggcaggcttgccaagctttccctggttgcaaggggattccccaggggttcctccatcagcatcatggagaaagggctggaaagaaaataggctgtggagccagcaagacttgcactgtttgagtctccaaacccacaactgtaacgtattcatatgggcttcacagggacacggggatgtcataatttttatttttattttttgaaatggaatctcactcactctgtcaccca

SEQ ID NO: 92650 - DNA, 827 bp, Homo sapiens
gcctgagacagtatgctgcttttcccctcctcctcctctccctcctaccagggagggaactaacttaaccctgtgtgcgcctgacactccctagagaagctgggatcgactaggaaaccgcaggcagcggctcccgggggcgagagctttgttcacgtgcgtttccagtgggtgtgttgctgtctaggggcactcgcgtggcaagacgcccgtggctggcttccagcgcccaagattcaaggaagggaaggagccctagcgtttcatccggaccagacccagccctcggagtctattttttgcctccagttaccggatttattgaagttgccagcgaagttggttttattcctttacttctctgctctccgcccccgtccacatcccccaaccctgtattatttcctgtcctagctgcgctttaaagattcggaacttttcactcgttctagctacagattttaactgtgttccgtgtgcgagacgaattgtggagggcacccacccacccatgccaagtgtaaatgaaaccgcaagaaaagctgcctcccactcacccatccagtgtccgagtaagcctaatgacacacattcacataactaagaagacacgggaagataggggtgcggaggacggagtttgatgtgtgaatgggaaatggagagaggggacagcgcgcgcgagagaaacagcgcgagcctgagccttagaatggaataaacgggaaacacacacaagaatgacgatgcaaaaaatgtatctaagtcccaacattgacagcagagggtcagctttaagcgcctacattttgatccgcgaaatttcc

SEQ ID NO: 92651 - DNA, 452 bp, Homo sapiens
aatgattatattgcttcaaaatacaagtacattcacatgtcagtactttgaatttgaaagctagtatttgtcaatcctaaaagtaatttactttctaagtagtaaattatacctaattaacttcaattcaggaaactgtaaactcaggtctaacaccagatagatttattataacttgtttcaaccatgaattgctgtgtttaaagattatattctttcaattattcagcagtatttactgagtgtctactttgtgccagacattgtactaattgaggagaatatgaagattaattaatcatggcctggccatcaaggagtcaaatgagccaatagatggcaacacagtatgaatggtatgaacataggtatggggggacctgaaaggctgtggaagatgtgtataaccttacatgaggctgcaggcattgtcgaaaggtatgcattgttta

SEQ ID NO: 92652 - DNA, 381 bp, Homo sapiens
gacactgaggtctgagaggagactcctcacaggtcttctagggagacactgagtgatgttgggaatactagtgatatcctaagccctagcagtgatgctgggggtgatatccctgggagaaggagagagaggaatggtgagaagtctcttgggttttagcttggccgaggaggcagtaggatgaccttcctatgagtgcacagagaaaagagttcatggtctgcagtttgaggatgttgagactcaacatcagtggtagcctgcctgcctctcttcttcccccctacctccttcctccctttctcaccctctccttccttcctgagggtgaattaaagaagacaataattgactttaagagccatcttttgttttctgctt

SEQ ID NO: 92653 - DNA, 871 bp, Homo sapiens
acctgaggttgctcagaggctgcaggaccctccagggcctgcgggcataacctgatctgtagctgggctcagccacaggccttcctggttggagttctgggctctcccaggcctgggtggcctctgtagctggtctcactgcccagagggaactgcacacacagacttctctcttacgttcatggctggcttgagatgagttgaaaataacttcgccaggccagtgtgtagaacagctggtccaaccagacagactttcacaccacaattacttccatgcctgagcaggatagatttgaagtgcaagccggaggcagcagatcaggagtagggacaggaaggacaggggatgcctgacctgacaggtggcttcaggcctcgggaatcacaagacatcctgaacacattgcctcctcatcttcttcctgctcctccacctcctcctctccttgtccttctcctctttgtcctcctgctttccgtatccaagtcttgtacttgtttaaatttattcctaaatattttattctttttgataagtggagttactttcttaatttcatttagattattcattgctattttatagaaatacaatggatttttaaatgttgatcttgtattccgcaatcttgctgaagttgtttaccggctctaatacttttgcggatttcttagaattttctgtagacagatcatgccatctccaaatagagatggttttacttcttcctgtctgatctgaatgccttttatttatttttcccaattgccctgagcagtacaatgatgaacacacgtttcaagagcagacatcttgtcttgttcctgactctgacaagaaagcataagtctctcaccatttagtgtg

SEQ ID NO: 92654 - DNA, 181 bp, Homo sapiens
ccaggcctagtgctcactagcataaactctgcaccagtgttttctcaagcctcaggacacaccccagtcaccaggaaggcttgggaaaacacagaatgctgagcccaccctgaaacttctgatgtagtaagtagtgaggtaccaacaggaacagaaaaaggcagaaacactaaagaagatg

SEQ ID NO: 92655 - DNA, 1592 bp, Homo sapiens
gaagacaggccttgtgcctaggaaaacagaagctttcttcttccttctactagtattgcatacttgtttttctggaatagggtgttaagttccttgattcagtccttgacaaggaatctcctttatacaagtgccagtaatgttgtaaaggtacagacatacgcaaatcataatttgttacatgaagtaccagtgctttcgtttttgttgttttttgagacagagtctcgctctgtcgctcaggctggagtgcagtggcgcgatttcagttcactgcaacctccacctcccaggttcaagcattcttctgcctcagcctcccgagtagctgggattacaggcacccaccaccacgcctggctgattttttgtagagacagggtttcacttcaattccatgttagagagctccgtgcctgtgtatacatgcctttatgtaagcttgctcagctacagatcaacaatgctggcactaagcaaaagttcgagcctcagctttaccttctaccctttcccttctcttttgaatccattccttagctttccctagtcctctccggatagctgttactctcctcttgccagaaaaatgaaggagctggtatcatttatactttttgtttgattatacgtttaaccaaagaccatacagtctcgtacctgaatcagacatttgcactttatatctaaatgagaagaaggggctcagataagtcgtttgctgccatctggaggtagatggacaatagctgagaaggggagccatgaaaagaacatcaggagtgatggacgcatagtccttccccaaagcctcgctcatcactggtaggaggcaaagcagtgggtcctcctcaccagccgcttacgggaccctgccatgcctggacccctctatcaggaagacctaccccagcactactggaaaatcagccaatcttaacccaaagatggccatgatttctgtatgtgagacgtcttaagggtgtttttgtttgttttaatcagccctcttgtttgagatttggcaatacatttctgttttctaggtaatttctgtgtctgatggtagaggatctaataagtattggaatgcttcctatttgctgatagaagtaccaaatagtattattgaagtctaacaaagactttttgttgagaacaccttgtagtgttgtactatctggaactcttgagctgccatttatatcactttttgtggagagcacatcttgattttcagttgtccttactttagaatacaacacacataaattggagactatgtattcatttcaatggaggtggtaaattgcctgttttaagttttacttaatgttgggttttggtagatgaggaaagcattttggttatttgttttgttttaaataccaaatttcttatattttttctggaatattaatactattaccaagctattatttcatggaatttgggtttctttttttttgtttttttaaaattaagtgctgtttgttttcttggttattgaacataatccaaagtagagatgttattactcaattcaagaaaagaaagggctaataaaacttaacttcaagtcagttttcatt

SEQ ID NO: 92656 - DNA, 221 bp, Homo sapiens
gttatatgtgtgttgcctccagtggcctatgagttttttgatggcagggctgtatctcatcaatctttgtattcccatcacaccatataggcatgcgcttaataggctcttgctgatgaactttcttcatgaaatgaaaacttttatgattaggcttggctctgtttattgattttacaattttagttctaatagctgactggttaggcgagatttccttt

SEQ ID NO: 92657 - DNA, 647 bp, Homo sapiens
ctccaaatatataattggggtaaacattcttaagacacaacctcgcattggtccttgctgtattgtaagaactatcataacagggaattctcccaatcctggaaagatagtatatcaaaactgatattatatcctgaggcatggcaaaaattaatgccatctttaggtatctaatggatatagtctccattgtgtcatcacttaattcattggtctgtttcctccaaaaaccagataaatcctgtaggatgacaataaactaccacaaacttaactaagtagtatctccaatagcaaccttcatatcagatgtatctttgcttgctatgtggtatgtagccattgatttggcaaatgaattcttttcctataagaggatcaaaatcaattcacattcacatgaaaaggacaatagtacacaattacaatcttgctccaggcctatgttatttcttctgccctctatcaagtgcagtccaaagagatctggattatttgagtattctaaagattttcacaatgatctatcaatgacatcatgccaatttggctgggtaagcaaaaatggttagcatagtggaggtcttgatatcacacatgaactttagaggttgggagacatgtcctatgaattttcaggtgcattt

SEQ ID NO: 92658 - DNA, 332 bp, Homo sapiens
acttttacttttccacagggacttttactcttccacagggttgttgtgcacagtaacaaacaaaatgcttgtaaaggccttttgtacactgctgctaaagaagagctcagagaagctgtagctgtgggagtcctgctctggctaaacagcctcagttagcatgaggagcccctgaaatttgagagtagtgcagagtgaagtgtggatgatacaaacagagggaatgaggcaggagattccaaaaaagaaggggtgaggaagaaaggtggaattttccttgggtaccaaagactaccatttcctacttcaccactctaactcaggccagctct

SEQ ID NO: 92659 - DNA, 235 bp, Homo sapiens
gttgcttaatttctgaagcctttaatttcttgcttctgaaaatacgaatactatcattccccactctactagccaattaagctgggtgagggtcaaatttcaaattccttgtgaaaatagtttatgaactataacacaatattaacactccccccatctccaacagtgtaataaccaagcagctgattctttactactagtgatagaggggaaagaggagaactcttactacttt

SEQ ID NO: 92660 - DNA, 405 bp, Homo sapiens
acttcactcgtacccagcgccctagcctcatatgaacccttagctaactccaaagactccagttacactcttctttcctttccctttctgtcttcaggtcctgggctttattttctcccatggcctcttttatctcagcctcctcccttccatgcacttcttagtgggataaaccacacatccccataggcatttgtagtactggggctgatgggatggggttacttgctcagactcagatgaagggcattcacagtccaggagcacctgagtctaagcctcatgagaaaatgccatcgtgggtcataactgggctctgttcagggcccaataagcacagccttaaaatggagtctcaacctggtgtccaggcctgtagacagagttcaggggtctgcgaacttg

SEQ ID NO: 92661 - DNA, 536 bp, Homo sapiens
agagagggagagagagagagaacgaacaagaaaaaaacctggatttccccccaagactcgactttcaggcaatgctcctagtaatattccaggcagtcaatgccactttctccagctatacttttggtcaagttgatattcctttatcccaagctattgtaagatccttacttttccacagagagagagagaaagagaggttttttggttgttgataaaatatttgaaattatgtgggttcatgaggaggaagtggtccacagcgtcacgtaagttgtaagctgaaaagtgctctttggatttagcaattaaggtagactatttagctggaagcatccaaacagtggattttaaaaatactcatctaacattaatgttaatggtagctggtatttatagcatttcccatatacctggtactcttctaagctccttacatgtattaacagattgatcaggtaggtagtattgttatccccatttgatatgcgaggaaacacagaggaagcacagagaggttaagtaacttgcccaag

SEQ ID NO: 92662 - DNA, 403 bp, Homo sapiens
cattaacattaaactcatggccaaaaccaccataactcatgcctaaacaaagcttatatctaacactcgcatattttctctgtaagatatactccagcctgggcgacagagcgagactccatctcaaaataataataataatagcaagtaacttcaatacatcattctctgtaatggataaatcatccagtcagaaatcaataagcaaacaacagaactgaacaacactatgaacccaatggacctaatacgcatatacaaaactttttgccaaataacagaagaatagaattcttcccaagtgtacacagaatattctttaggctatataatcacaaagaagtatcaacaaacttaagaagatgtaaatcgtcctaagtatcttttcccaccataatggaat

SEQ ID NO: 92663 - DNA, 268 bp, Homo sapiens
atctccccgtgtcctgtgctaccttcccaggccctgtactatccctccgtgccctgtactacgttcccaggtcctgtattattcctcctcagggtcctctactaccttctcaggtcctgtcctatctctccatgtcctatacttccttcccaggccctgttactatacctccatgccctgtactaccttcgcagttcctgtatgatcattcccgtgtcctgtactaccttcccaggtcctgtactatccctccatgccctgtactacc

SEQ ID NO: 92664 - DNA, 478 bp, Homo sapiens
acccgcattgagaggggacccaacagggttgggccatggggtcactatcagataaagagcagaggcaagacgggctgataaccaccaaaggccattaaaacctggctgccccaatgcactagggctctaagagatttgtggcttccttttgggggggaaatcagggtctcttctgaactccctcctctgccagggaacccacactcaaatatattaaaagactaaatgattaataaataatcttcaggaattggagcaattcagagtctcaagccattacatgaaagtatttattttcttctaaaaaatgaaaaattatacatattgcttttatgagctgtcagaattctttctagcagaaaccataataaccatagagtttcctttttaaaatgacttttggcaattcacttaaaaacaattaatttgttttattgagtgataatctataggctactaaaaatccaaatacagagct

SEQ ID NO: 92665 - DNA, 122 bp, Homo sapiens
tagacaccagaggaggttgttaaagtaggggtgctttgggagcagttagaataggtagtcatggaatagcgtgatttatagggaatgaagtcttatatcttcactccagcacttgatgtatc

SEQ ID NO: 92666 - DNA, 265 bp, Homo sapiens
atcaaacatcatttaatttaatatagtttaactatggctaccttgctctttatgaaaagaacacctaatttttaaaacaactaataattttattagactcaaaagccttaggggaaggtactcatgatgccgagcaatgcggcccacagtcagggtgtgagagttagctgagtgtggagggtccttgcctccttcccccttggggcctctctccagctgtctggggatttcgttctctattttccagcactgagctaaggatatt

SEQ ID NO: 92667 - DNA, 210 bp, Homo sapiens
ggggtttaaatggcacgagtggggaatagtcatataccctttgaacataaaaggaagctgccccaaatcaaaagttttaacaaataatgttgagtgttcagctgggattgggaaccatgagtttgtaggaaaccactcttcttagttaagtgatttattatacagtgttcatttagcctgctataaccatagagaagtctgattatagaa

SEQ ID NO: 92668 - DNA, 236 bp, Homo sapiens
cctccagagtagctgggaatacaggcacccaccaccatgcccggctaatttccgcatttttagtagagacggggtttcaccatgttggccaggctggtcccgaactcctgacctcaggtgatccgcccaccttggcccccaaagtgctgggattacaggcatgagccaccgcgcctggccataaacagaaatttcttaatcaaagctggacacaatgacggccttgatttagtgca

SEQ ID NO: 92669 - DNA, 457 bp, Homo sapiens
gtcagatttcttaatcctttcctttatactttttgcattttgtgccttagatggctttctttccccaggattataagcctattcttctatatttttctttttataatgttataattttggtttttaagcttagccatctggaactcatctctaggaaacaagcgatgcgagactaatccctgggagaagggaaactcctgcagtgatggccagctcaccagctctctgcctgggaacaatatccacttcccagtgcagggagctggcctctgagcagagcacagcagccccactggctgaggaggcggtgatcagagaggggcagccaaagctgcacattttatggaatggggcatcagaaaggaggatgctgtgaagatagggggcccaggagtctatgtgcaggtctccacaagtcatggccaagggttgtgctgtccgtgtgcaggacgaggcc

SEQ ID NO: 92670 - DNA, 438 bp, Homo sapiens
tcaagcgattctactgcctcagcctcccaagtaactgggattacaggcacgtgccaccatacccagctaatttttgtatttttagtagagatgaggtttcaccatattggccaggctggtcttgaactcctgacctcaggtgatctgcccaccttggcctcccaaagcactgggattacaggtatgagccactgtgcgcatcagataacggaatgctgaacagtgatttagagggagcggcccaggcaaaggcctggcatccgggaatggcatcggagcaacattcctaaaattgaagcagactctgggaatccacccgtggagaccctaggctgagaacctcggagtcagggtggctgcgggagggcagacagggaggccaggacagggcagtgcgttcggccaggtcacaaaggcctcgaatgccaggtcaggagc

SEQ ID NO: 92671 - DNA, 103 bp, Homo sapiens
acccagcagagtatagcatacagtaagtgctcaactgaaagcagctaatcacttcaggcacaaggctgagctattttctagttgcagcggtccaatcttctta

SEQ ID NO: 92672 - DNA, 120 bp, Homo sapiens
acaagggaggttgggattctcatggtggatttctgcagagcacagttgagtttggttatctgggttcagtccgtgtcaggtcctacttgtccagatgcagtcccaaccctcttttctcgg

SEQ ID NO: 92673 - DNA, 345 bp, Homo sapiens
ttgtatttttagtagagatagggtttcaccacgttggccaggctggttttgaactcctgacctcaggtgatctgcctgcctcggcctcccaaagtgctgggattacaggcatgagccacagcgcccagccaggatgtcagcttttgagagcagaagctgcatctgtttttgtttgtcgctgaatccccagggcttagaagactgcttggcacattccctaaatgtttactgaatgaataattagcaacctgacattttgcacaaatttttccttgtaggacttcttgaaactgatttgtctgctgttatatctgacctatttcctgcttatagtttatattctcc

SEQ ID NO: 92674 - DNA, 161 bp, Homo sapiens
taaacctgtagtgatgctggagcactggatttcagagaaacactgggagttaagtgactgatgagttctgaagcattttagcttgaggcaaagattaagtaaacatttgtatgccaaacatcaactaagtgcatagggaagggcagatgtctctcttggga

SEQ ID NO: 92675 - DNA, 462 bp, Homo sapiens
tagaagactaacggggaaacatgaaagggtgaaaatcttctgtcatgacacatcgttgctttcaaataattcagtaaatgagagtaagggaacttttaagataatcaattatgtattccagctgtaaaaataaaaagaatcttagcacaatgcatttttaattttaacatatctattcaaatactgtgaaaactatgttgtagaatctctcacaggttgctttgatgcttcatttttagtctacaggtttggacctacaagggtggtttctaagagttgtctcttccctgtcatatatttgtcttatgactaggatattctgcttcttgggaaatactgtgctttgattatatataaccttctagtccaacagttaagctatctataggaatgtttgctttcagaaacaattaggcttaaaaataaagactgtgctcaaaaataataaacttacttaaaaat

SEQ ID NO: 92676 - DNA, 373 bp, Homo sapiens
tgtagagacagcgtcttgctacgttgcccagcctggtctctaactcctggcctcaaataatcctcccatcttgacctcccaaagtgttgggattacaggcgtgagccactacacaaggcataggagtctctggagaccacactggtccctgccacactcaccaccaactagactctttcctggttacaacagtgagacatccctaccttacagcgacactgtcagaatttgcaaaaccagggataactcggcagaatctgctatgccagagaccaagagatgtgaaatgttgaaaactgtgactgggctatgctggggaaaggagtatcagacccgcagccagtctccaatcagacaccagtgatccttgctt

SEQ ID NO: 92677 - DNA, 363 bp, Homo sapiens
ttagtttactgcgcggccaaaggactactccaggcaccagtgaggaagggtaatttagatttctagtgggcaccctgccggcccatttcataacaatcagggggcctggagtgggggggcttgcgggtagttgatatcaaatcccggtctctctcacttccgctcaatcggcttttggccaaagacgagtatcttcttcctggactgccttctcccaccccaacccagacaccaaggggacgcgacagcggttttgggacgctggctgatcatctgagaggaggcgatcccggcccgctgggcgttcaggatcccgatctggatgccgtccaccccgccccgccgggggctggggcgaaagcg

SEQ ID NO: 92678 - DNA, 375 bp, Homo sapiens
gtcattggcttgttttgataattttacaggctggcagtgacatggaacctattaggtttaggtccagatggtgtgcagctggtctggctgataggggaactagctgggtgaagaatctttcctgctgggtgggggccatatctggtgagagaaagcagggggactcagggtgagaccttttggatctcatgagggtcaaagacggtcaaggcagcagcacatgatatttcaggccttacaagatagtctgttacatttcttactgacaattttccttctctatctctatctcttcaatagtagcccaggattatctttgaggatatggaccaaatttctgccaactacagcctgaatacaagcatacaatcaaca

SEQ ID NO: 92679 - DNA, 654 bp, Homo sapiens
ggtccatgtgtctgaaaaagttcacattactagttaggaggctactgaggaaaaccagctgagcaatgaggaggacctaccattggcagatcctacctaccgtattcactggaagtgaatatggagaaggacagatgaatatatttatatatatatttacatttaggagataaaagtgaaataacctggagaaagactggtctagagtgatggtagcagagcagcagagataatagtattatctgaatctaagactctagagagaggaaaagattttgtggtgatggtggtgagggagtggtttaatagagcatttgagttcagttctgagctgaggtactgttaactattctggtagaaatgtccatcaggggctgggtgccgaggctcaggcctgtaatcccagcagtttgggaggctgaggtggatggatcacctgaggtcaggactttgagaccagcttggccaacatggcaaaaacccgtctctactaaaaatacaagaatcagctgggcatggtggtgcgtgcctgtagtcccagctacttgggaggctgaggcatgagaattgcttgaaccaggcagacagaggttgcagtgagctgagatcatgccattgcactccagcctgggtgacagagtgagactttgtctg

SEQ ID NO: 92680 - DNA, 791 bp, Homo sapiens
tcttcagaattgaaggagagatgttgtatcactgttagaaggctgctttgggacattctgcagcagggaggagggactgtcaacccctacaccatgaccaccaagttcctcaccttggctgagtccctaaaactctctgaacctcaggttcctccaagcataatgcagacttcacagagctgttgtaaagattaggtgaggtcaattgatactgcttaaaaggcccggtccgtagaagatgcccaataaacattactgctttccccctcaccctactgcctgaaaaaatattacacctgtgagactgactttgagaaccagtgtgggtggggagttgtgcatataaactatttaatgagtaccaaacacaaaagtcaagcttgtaaaatatcaggccttgccccagaaagacaaataccacatgatctcactgatatgtagaatcttaaaaagtcaaactcagaagcagagagtagaatgatggttatcaagggctgggggagggagggactggggagatgttggtcaaatgatacaaaggtttagttaggtggaataagttcagaaaatcaattgtacaatgtatcaattatagttaatagcaatataacatatacttgaaaattgctgagagtagtgtgagtgttctaccacaaaaaaatatgtgcagtaatagatgttaattaccttaatttagtcatttcacaatatgtacatatataaaaatatgttgtatgccatgagtatatataattattatttgtgaatttaaaaaataaaaataatttcca

SEQ ID NO: 92681 - DNA, 564 bp, Homo sapiens
cgagcggagggcccgatgggtgcccggacgcggaagaactggcccagcggaggttcccgcttctgaagcgtgggaggcggaagagactgcaggttgtagattttggtcttggccccaacgggttcccccagaccattagaacccgagagaggaagaggaggcaccgcggcggcggctgagaggccgaacccccaacctgtcctcgaggcgggaggggggcagggaggggagaagcaccgatcccagggctgaggagcctccgggaccgggtccgggagcatggggggctggaccgggtccccgagcatggggagctggagccgccaaggccgcccggccgggtcctacccgactgtcaggtcctcggtgctagcgctgcccgggcagccgcagcatctgtagcccggccccgcttgtggtcctcagccggaaagatagcagcatgagttccgccgctgcctagtttcctccccctcctcttctccctcctctctcctcttcccagaccacctccttctttcccgcccctgcgcttcttttcccttaccctctgtcctcctccct

SEQ ID NO: 92682 - DNA, 3570 bp, Homo sapiens
cgagcggagggcccgatgggtgcccggacgcggaagaactggcccagcggaggttcccgcttctgaagcgtgggaggcggaagagactgcagcccccgcccccgtccccaagcctccgccccttagcccccgcccccagctgccagtccccagcagctcagtcctgcagtgagagtcttgggagtccatagctaagcaccaggagctgagcactgcccgctgtgcctgcctgcaagtctgacatggctcaggagaaaatggagctggaccttgagcctgacacatcttatgggggaaccctgaggagatccagcagcgctcccctaatccatgggctcagtgacctttcacaggttttccaaccttacacacttagaactcggaggaatagtacaacaattatgagccgtcacagcctggaagaaggcctggatatggtgaacagagaaactgcacatgaaagggaaatgcaaacggcaatgcagataagccaatcatgggatgagagcttgagcctgagtgacagtgattttgacaagccggagaaattatattctcctaagagaattgacttcactccagtttctccagcaccttcacccaccaggggattcggaaagatgttcgtgagcagcagtggattgccaccaagtccagttcccagtccaagacgattttcaagcaggagaagtcagagtccagtcaagtgcattagacccagtgttcttggtcctcttaaaagaaaaggtgaaatggagacagaaagtcagcccaagagactcttccaaggcactaccaatatgttatctccagatgccgcgcaactgtctgatctcagttcatgttcagatattttggatggcagtagtagcagcagtggcttatcctcagacccgctggctaaaggcagcgctaccgcagagtctccagtagcatgctccaattcatgctcttcgttcatcttgatggatgatctctcacccaagtgacttaaccatttctgattcaacgttttaactgctgtttcctacataaaatgtttagtggggaacgcagagaactttgatccataatgaggattaaagttttacagatttcacacattctgatgctattattactctttggcatctctcttctccaaagttcaattttgtgagcctagtgaccttactagtatctggttttgctgatctcattttggatttagtgattaaatctcaaatgctgatttttgattgcttagaggaatcttttttcttagtgcctcaaaaaacacctattttgagtctatacatttaagaaaggcactgatgtgtattgcctttaatggtccttttccgcagcagtgatatgacagatttgatcagaaattctcttgcttgagagatttttttttgtcctctgttgactacatagtttcaaatctctctttatttcatgatgatatataaattgcttttaattatattaaatttttatttttctgcatcagcttcaagtacattattttgtttccctttcctgtttgagccgcttatgccatttctcacagaggggaagaaatacgtagttgctttcattactcttattgcttctttgctgttggggtgtgtgaagtgagcattgattttagtgctgagaatgtaaacggacttacaggatgcttggattagtcatcacaggttcttatgactttgctaccacagttgatatatttctcctcaaacctgttgccctaaggaatatataaaatattgttgatatttctaggtggtgttatcaaggagaagaaattcctgccttgaccagatgtgtggagcatctacaaatgaatgaatagttatttacacacaaaccactgtgtacaaaagcgtccatggagctgtcagtgtctcgagtggtattatgaggcctcaggtgccttggggtacattgtcatgctataagggatgtatatcataaggtatggtggaagaggggccttatgtgaatgattgccacatactgtttctgttgctgctttttttccgattcctttttgtcattggatttgtttgttttgtcatgtggtgaatggtgttttagttattgtgttgctgccagaatcagaatccagttcttgttcttactgccttatagttattgtgttgccaccagaatcagaatccagttcttgttcatactgccttgtagtgagggcagtttaatatctacaaagaagcttttagaagctgaaaaagtcaatgtgattgtgcattctgcttttaagaagctgtttcagctatgaactgtgtatgtgctataagtgtgaggtaccataagttatttaatttttaaaagaggaaactcctgagtgagctgtttaagaaatctgagtgtgatctattgttacgttatttataactaggtaaaatgtctgtcgtgatagatttcttttaacgttcagatactgtggttgggttgtctatatttaatatgcagatttgcctgctggaatcataatccatttttaagtgaatgtaagaaatgaaaactactgcatttgtgtcttttgaaggcaaggatccttggattttaaaggaagagtatgtgctttgaaggcactcagagactagtaatagcatatggtttgaagggaaacccattctctttcaattacaagagagcatcacttagcgtgcagtacttctgttacagcatccgatgtgtcctttattttaaattgtaaccataacagccattaatggctttatttcttgtattgctctcatctgggaaaagtctctacttcttcaaacgtaacataaatctattatgaagcttgtcccctagtatgccattataaagaaaaaattcttcgatggtatgcagtgtatctattctgtttgtaaaagatcatgtcaaaatgttctgcctctataatgataatagatggttttgtctttcaggatatttatccacctactgtcttctttgccttaaagggacacttggccatcatttttaggctcgaacttaacactgttaagaaataactgaaatatgatggtatttacattaatttttgaaattcaatggtgggatagaattaggtcaggaaatggaagttgttccaatggtgtgagaactaggagacaagatgattcactttattatttaaaccaagcttcatttttagtttttgttgtttaaatggactggaaagttaagtttttgcagggattgttttgaaataaagagatatgctaactcacagatgaactttgttaagacccctttatttttatataaagtctaatatttgaaaagcgattgttataaagtaaaattctctcttcctattctaatatatatcatatatttcaggcttctatttgaaaacaggtataagagatgatatgatacaaccctatagataatgttttttgcttgattgacttatataatcactgtttcatgattactgcttttggaataataggaagttttgtgaaatgctggccttgtgtatatcttagaatgcaaatttaataaagtgtgtatacatgcataaaatttaaaaaaaat

SEQ ID NO: 92683 - DNA, 3205 bp, Homo sapiens
cgagcggagggcccgatgggtgcccggacgcggaagaactggcccagcggaggttcccgcttctgaagcgtgggaggcggaagagactgcagcccccgcccccgtccccaagcctccgccccttagcccccgcccccagctgccagtccccagcagctcagtcctgcagtgagagtcttgggagtccatagctaagcaccaggagctgagcactgcccgctgtgcctgcctgcaagtctgacatggctcaggagaaaatggagctggaccttgagcctgacacatcttatgggggaaccctgaggagatccagcagcgctcccctaatccatgggctcagtgacctttcacaggttttccaaccttacacacttagaactcggaggaatagtacaacaattatgagccgtcacagcctggaagaaggcctggatatggtgaacagagaaactgcacatgaaagggaaatgcaaacggcaatgcagataagccaatcatgggatgagagcttgagcctgagtgacagtgattttgacaagccggagaaattatattctcctaagagaattgacttcactccagtttctccagcaccttcacccaccaggggattcggaaagatgttcgtgagcagcagtggattgccaccaagtccagttcccagtccaagacgattttcaagcaggagaagtcagagtccagtcaagtgcattagacccagtgttcttggtcctcttaaaagaaaaggtgaaatggagacagaaagtcagcccaagagactcttccaaggcactaccaatatgttatctccagatgccgcgcaactgtctgatctcagttcatgttcagatattttggatggcagtagtagcagcagtggcttatcctcagacccgctggctaaaggcagcgctaccgcagagtctccagtagcatgctccaattcatgctcttcgttcatcttgatggatgatctctcacccaagtgacttaaccatttctgattcaacgttttaactgctgtttcctacataaaatgtttagtggggaacgcagagaactttgatccataatgaggattaaagttttacagatttcacacattctgatgctattattactctttggcatctctcttctccaaagttcaattttgtgagcctagtgaccttactagtatctggttttgctgatctcattttggatttagtgattaaatctcaaatgctgatttttgattgcttagaggaatcttttttcttagtgcctcaaaaaacacctattttgagtctatacatttaagaaaggcactgatgtgtattgcctttaatggtccttttccgcagcagtgatatgacagatttgatcagaaattctcttgcttgagagatttttttttgtcctctgttgactacatagtttcaaatctctctttatttcatgatgatatataaattgcttttaattatattaaatttttatttttctgcatcagcttcaagtacattattttgtttccctttcctgtttgagccgcttatgccatttctcacagaggggaagaaatacgtagttgctttcattactcttattgcttctttgctgttggggtgtgtgaagtgagcattgattttagtgctgagaatgtaaacggacttacaggatgcttggattagtcatcacaggttcttatgactttgctaccacagttgatatatttctcctcaaacctgttgccctaaggaatatataaaatattgttgatatttctaggtggtgttatcaaggagaagaaattcctgccttgaccagatgtgtggagcatctacaaatgaatgaatagttatttacacacaaaccactgtgtacaaaagcgtccatggagctgtcagtgtctcgagtggtattatgaggcctcaggtgccttggggtacattgtcatgctataagggatgtatatcataaggtatggtggaagaggaaactcctgagtgagctgtttaagaaatctgagtgtgatctattgttacgttatttataactaggtaaaatgtctgtcgtgatagatttcttttaacgttcagatactgtggttgggttgtctatatttaatatgcagatttgcctgctggaatcataatccatttttaagtgaatgtaagaaatgaaaactactgcatttgtgtcttttgaaggcaaggatccttggattttaaaggaagagtatgtgctttgaaggcactcagagactagtaatagcatatggtttgaagggaaacccattctctttcaattacaagagagcatcacttagcgtgcagtacttctgttacagcatccgatgtgtcctttattttaaattgtaaccataacagccattaatggctttatttcttgtattgctctcatctgggaaaagtctctacttcttcaaacgtaacataaatctattatgaagcttgtcccctagtatgccattataaagaaaaaattcttcgatggtatgcagtgtatctattctgtttgtaaaagatcatgtcaaaatgttctgcctctataatgataatagatggttttgtctttcaggatatttatccacctactgtcttctttgccttaaagggacacttggccatcatttttaggctcgaacttaacactgttaagaaataactgaaatatgatggtatttacattaatttttgaaattcaatggtgggatagaattaggtcaggaaatggaagttgttccaatggtgtgagaactaggagacaagatgattcactttattatttaaaccaagcttcatttttagtttttgttgtttaaatggactggaaagttaagtttttgcagggattgttttgaaataaagagatatgctaactcacagatgaactttgttaagacccctttatttttatataaagtctaatatttgaaaagcgattgttataaagtaaaattctctcttcctattctaatatatatcatatatttcaggcttctatttgaaaacaggtataagagatgatatgatacaaccctatagataatgttttttgcttgattgacttatataatcactgtttcatgattactgcttttggaataataggaagttttgtgaaatgctggccttgtgtatatcttagaatgcaaatttaataaagtgtgtatacatgcataaaatttaaaaaaaat

SEQ ID NO: 92684 - DNA, 718 bp, Homo sapiens
ggcatgtcacgaggaacgtttattgtaggttaggcggtctggtgcctctaggggggacaatcaaatgatacaggacctcgaagagtcttactttggatttctgtggctttataatgtagtatattatgtagttcattgctgtggctttatgcttttttattatttacaagtgatttactgatttgtgagctcttgaaactgtgtcattgcatgttatgtttaccctgatagttgcatttgcttataattctttttgctttgtcttcagttcagatattttggatggcagtagtagcagcagtggcttatcctcagacccgctggctaaaggcagcgctaccgcagagtctccagtagcatgctccaattcatgctcttcgttcatcttgatggatgatctctcacccaagtgacttaaccatttctgattcaacgttttaactgctgtttcctacataaaatgtttagtggggaacgcagagaactttgatccataatgaggattaaagttttacagatttcacacattctgatgctattattactctttggcatctctcttctccaaagttcaattttgtgagcctagtgaccttactagtatctggttttgctgatctcattttggatttagtgattaaatctcaaatgctgatttttgattgcttagaggaatcttttttcttagtgcctcaaaaaacacctattttgagtctat

SEQ ID NO: 92685 - DNA, 2338 bp, Homo sapiens
aaaagaggaagaagttagaagaagccactgctgcccgggctgttgcgtttgctgctgcatctaggggagaatgcaccgaaaccttacggaatcggatcagagaactagaagcagagggcaagaagctcacgatggacatgaaggtgaaagaagaccaaatcagagaactagaactaaaagtccaggagcttcggaaatataaggaaaatgagaaggacactgaggtgttaatgtcagccctctcagccatgcaagacaaaacacagcacctggagaacagcttaagtgcagagacgagaatcaagctggacctgttctccgcactgggcgatgcaaagcggcagctcgagattgcccaaggacaaatccttcagaaagatcaggaaatcaaggacctaaaacagaagatagccgaagtcatggccgtcatgcccagcataacatacagtgccgccaccagccccctgagccctgtttccccccactactcttccaaatttgtggagaccagcccctctggacttgaccccaatgcctctgtttaccagcccctgaagaaatgaaggccagctgtgtgttgtgcccaaaaatttggttaccggaaggcattgcaaaggagcgtctctggcagtcaagataaaaaaacagtttctattgtattttgtggaactgtatctgttgtcatttttaaaaaggggggaaaagataacatccaagtctgattagaactgcccatcagtttttcttgtaaatttttagaagacctcacagaactttacagtttatttttctcggccaacacattaaaaccattcttggatttcaagtagccaactttgccttttatgtattcttacatagtttcctcttgaagaaaaaaaaagcagagtttttgtttttcaaccctttatgtttgttttgttttattcttaaataagcaagcaaaacctgcacattggattcacgtgagatgataatgaaaacttttagtttaagagtgaagggttaagtaacctaacagagctttgatgttatagctgcattaaagaaggtgattgtcaatattacagaaaacaaaaatggattgcccctccaaggaccaaacagattcaaggagcatcatttaagctaagaagagacctaagtgatgaaactagctgtaagaatgtaacaggggttgtgtttgaaatatttatattcccatcggtgtgtttagtcctagaaaattgctagcagcagtcttcttcacagtgccttgggaaaagacatttcaagaggaaacttgataattttaaactcttttccccctttaccgtcatctatcctctatctgtatcaagctcactgcggatcctgctgtaaaactggtgggtagctgggctgtccattaccaccacagctacatcttctgtttctttgaatagaaagcaccacagtgttttgcacttgcctccagtaaagtgccctgggaagggagctgggcagtgtttgtggacgagagactgtaacgatggctaataaaagctgcgggtctaggttttttttttttttttgttttttttttccatttcatttaactgtgctttctccacttttcatcattttgtgtttgatgatttaaaagaagcttgactattcctcagctcttgtgccaaggagggtttttttttttttaagactcttaaactcaaaactctgcacaaagatttcagtttcaaatgtgtattatacatgggtagaaaagtgtttgcacaggcaacttttggaagtgtttaagaatcagggtgggggtggcgggagggaccgggtgggggcaatgcaaaattgtatttggaaactaggaaaaataggggatagaattaggtcaggaaatggaagttgttccaatggtgtgagaactaggagacaagatgattcactttattatttaaaccaagcttcatttttagtttttgttgtttaaatggactggaaagttaagtttttgcagggattgttttgaaataaagagatatgctaactcacagatgaactttgttaagacccctttatttttatataaagtctaatatttgaaaagcgattgttataaagtaaaattctctcttcctattctaatatatatcatatatttcaggcttctatttgaaaacaggtataagagatgatatgatacaaccctatagataatgttttttgcttgattgacttatataatcactgtttcatgattactgcttttggaataataggaagttttgtgaaatgctggccttgtgtatatcttagaatgcaaatttaataaagtgtgtatacatgcataaaatttaaaaaaaat

SEQ ID NO: 92686 - DNA, 3627 bp, Homo sapiens
cgagcggagggcccgatgggtgcccggacgcggaagaactggcccagcggaggttcccgcttctgaagcgtgggaggcggaagagactgcagcccccgcccccgtccccaagcctccgccccttagcccccgcccccagctgccagtccccagcagctcagtcctgcagtgagagtcttgggagtccatagctaagcaccaggagctgagcactgcccgctgtgcctgcctgcaagtctgacatggctcaggagaaaatggagctggaccttgagcctgacacatcttatgggggaaccctgaggagatccagcagcgctcccctaatccatgggctcagtgacctttcacaggttttccaaccttacacacttagaactcggaggaatagtacaacaattatgagccgtcacagcctgttgctgtcatcctcacctaatcgtattcctagtagcagactgcatcagatcaaaagggaagaaggcctggatatggtgaacagagaaactgcacatgaaagggaaatgcaaacggcaatgcagataagccaatcatgggatgagagcttgagcctgagtgacagtgattttgacaagccggagaaattatattctcctaagagaattgacttcactccagtttctccagcaccttcacccaccaggggattcggaaagatgttcgtgagcagcagtggattgccaccaagtccagttcccagtccaagacgattttcaagcaggagaagtcagagtccagtcaagtgcattagacccagtgttcttggtcctcttaaaagaaaaggtgaaatggagacagaaagtcagcccaagagactcttccaaggcactaccaatatgttatctccagatgccgcgcaactgtctgatctcagttcatgttcagatattttggatggcagtagtagcagcagtggcttatcctcagacccgctggctaaaggcagcgctaccgcagagtctccagtagcatgctccaattcatgctcttcgttcatcttgatggatgatctctcacccaagtgacttaaccatttctgattcaacgttttaactgctgtttcctacataaaatgtttagtggggaacgcagagaactttgatccataatgaggattaaagttttacagatttcacacattctgatgctattattactctttggcatctctcttctccaaagttcaattttgtgagcctagtgaccttactagtatctggttttgctgatctcattttggatttagtgattaaatctcaaatgctgatttttgattgcttagaggaatcttttttcttagtgcctcaaaaaacacctattttgagtctatacatttaagaaaggcactgatgtgtattgcctttaatggtccttttccgcagcagtgatatgacagatttgatcagaaattctcttgcttgagagatttttttttgtcctctgttgactacatagtttcaaatctctctttatttcatgatgatatataaattgcttttaattatattaaatttttatttttctgcatcagcttcaagtacattattttgtttccctttcctgtttgagccgcttatgccatttctcacagaggggaagaaatacgtagttgctttcattactcttattgcttctttgctgttggggtgtgtgaagtgagcattgattttagtgctgagaatgtaaacggacttacaggatgcttggattagtcatcacaggttcttatgactttgctaccacagttgatatatttctcctcaaacctgttgccctaaggaatatataaaatattgttgatatttctaggtggtgttatcaaggagaagaaattcctgccttgaccagatgtgtggagcatctacaaatgaatgaatagttatttacacacaaaccactgtgtacaaaagcgtccatggagctgtcagtgtctcgagtggtattatgaggcctcaggtgccttggggtacattgtcatgctataagggatgtatatcataaggtatggtggaagaggggccttatgtgaatgattgccacatactgtttctgttgctgctttttttccgattcctttttgtcattggatttgtttgttttgtcatgtggtgaatggtgttttagttattgtgttgctgccagaatcagaatccagttcttgttcttactgccttatagttattgtgttgccaccagaatcagaatccagttcttgttcatactgccttgtagtgagggcagtttaatatctacaaagaagcttttagaagctgaaaaagtcaatgtgattgtgcattctgcttttaagaagctgtttcagctatgaactgtgtatgtgctataagtgtgaggtaccataagttatttaatttttaaaagaggaaactcctgagtgagctgtttaagaaatctgagtgtgatctattgttacgttatttataactaggtaaaatgtctgtcgtgatagatttcttttaacgttcagatactgtggttgggttgtctatatttaatatgcagatttgcctgctggaatcataatccatttttaagtgaatgtaagaaatgaaaactactgcatttgtgtcttttgaaggcaaggatccttggattttaaaggaagagtatgtgctttgaaggcactcagagactagtaatagcatatggtttgaagggaaacccattctctttcaattacaagagagcatcacttagcgtgcagtacttctgttacagcatccgatgtgtcctttattttaaattgtaaccataacagccattaatggctttatttcttgtattgctctcatctgggaaaagtctctacttcttcaaacgtaacataaatctattatgaagcttgtcccctagtatgccattataaagaaaaaattcttcgatggtatgcagtgtatctattctgtttgtaaaagatcatgtcaaaatgttctgcctctataatgataatagatggttttgtctttcaggatatttatccacctactgtcttctttgccttaaagggacacttggccatcatttttaggctcgaacttaacactgttaagaaataactgaaatatgatggtatttacattaatttttgaaattcaatggtgggatagaattaggtcaggaaatggaagttgttccaatggtgtgagaactaggagacaagatgattcactttattatttaaaccaagcttcatttttagtttttgttgtttaaatggactggaaagttaagtttttgcagggattgttttgaaataaagagatatgctaactcacagatgaactttgttaagacccctttatttttatataaagtctaatatttgaaaagcgattgttataaagtaaaattctctcttcctattctaatatatatcatatatttcaggcttctatttgaaaacaggtataagagatgatatgatacaaccctatagataatgttttttgcttgattgacttatataatcactgtttcatgattactgcttttggaataataggaagttttgtgaaatgctggccttgtgtatatcttagaatgcaaatttaataaagtgtgtatacatgcataaaatttaaaaaaaat

SEQ ID NO: 92687 - DNA, 2641 bp, Homo sapiens
cgagcggagggcccgatgggtgcccggacgcggaagaactggcccagcggaggttcccgcttctgaagcgtgggaggcggaagagactgcagcccccgcccccgtccccaagcctccgccccttagcccccgcccccagctgccagtccccagcagctcagtcctgcagtgagagtcttgggagtccatagctaagcaccaggagctgagcactgcccgctgtgcctgcctgcaagtctgacatggctcaggagaaaatggagctggaccttgagcctgacacatcttatgggggaaccctgaggagatccagcagcgctcccctaatccatgggctcagtgacctttcacaggttttccaaccttacacacttagaactcggaggaatagtacaacaattatgagccgtcacagcctggaagaaggcctggatatggtgaacagagaaactgcacatgaaagggaaatgcaaacggcaatgcagataagccaatcatgggatgagagcttgagcctgagtgacagtgattttgacaagccggagaaattatattctcctaagagaattgacttcactccagtttctccagcaccttcacccaccaggggattcggaaagatgttcgtgagcagcagtggattgccaccaagtccagttcccagtccaagacgattttcaagcaggagaagtcagagtccagtcaagtgcattagacccagtgttcttggtcctcttaaaagaaaaggtgaaatggagacagaaagtcagcccaagagactcttccaaggcactaccaatatgttatctccagatgccgcgcaactgtctgatctcagttcatggtggtgttatcaaggagaagaaattcctgccttgaccagatgtgtggagcatctacaaatgaatgaatagttatttacacacaaaccactgtgtacaaaagcgtccatggagctgtcagtgtctcgagtggtattatgaggcctcaggtgccttggggtacattgtcatgctataagggatgtatatcataaggtatggtggaagaggggccttatgtgaatgattgccacatactgtttctgttgctgctttttttccgattcctttttgtcattggatttgtttgttttgtcatgtggtgaatggtgttttagttattgtgttgctgccagaatcagaatccagttcttgttcttactgccttatagttattgtgttgccaccagaatcagaatccagttcttgttcatactgccttgtagtgagggcagtttaatatctacaaagaagcttttagaagctgaaaaagtcaatgtgattgtgcattctgcttttaagaagctgtttcagctatgaactgtgtatgtgctataagtgtgaggtaccataagttatttaatttttaaaagaggaaactcctgagtgagctgtttaagaaatctgagtgtgatctattgttacgttatttataactaggtaaaatgtctgtcgtgatagatttcttttaacgttcagatactgtggttgggttgtctatatttaatatgcagatttgcctgctggaatcataatccatttttaagtgaatgtaagaaatgaaaactactgcatttgtgtcttttgaaggcaaggatccttggattttaaaggaagagtatgtgctttgaaggcactcagagactagtaatagcatatggtttgaagggaaacccattctctttcaattacaagagagcatcacttagcgtgcagtacttctgttacagcatccgatgtgtcctttattttaaattgtaaccataacagccattaatggctttatttcttgtattgctctcatctgggaaaagtctctacttcttcaaacgtaacataaatctattatgaagcttgtcccctagtatgccattataaagaaaaaattcttcgatggtatgcagtgtatctattctgtttgtaaaagatcatgtcaaaatgttctgcctctataatgataatagatggttttgtctttcaggatatttatccacctactgtcttctttgccttaaagggacacttggccatcatttttaggctcgaacttaacactgttaagaaataactgaaatatgatggtatttacattaatttttgaaattcaatggtgggatagaattaggtcaggaaatggaagttgttccaatggtgtgagaactaggagacaagatgattcactttattatttaaaccaagcttcatttttagtttttgttgtttaaatggactggaaagttaagtttttgcagggattgttttgaaataaagagatatgctaactcacagatgaactttgttaagacccctttatttttatataaagtctaatatttgaaaagcgattgttataaagtaaaattctctcttcctattctaatatatatcatatatttcaggcttctatttgaaaacaggtataagagatgatatgatacaaccctatagataatgttttttgcttgattgacttatataatcactgtttcatgattactgcttttggaataataggaagttttgtgaaatgctggccttgtgtatatcttagaatgcaaatttaataaagtgtgtatacatgcataaaatttaaaaaaaat

SEQ ID NO: 92688 - DNA, 417 bp, Homo sapiens
aagtaagataaacatacaaattttagaaagtacaagtaaatcaaaagttaaatataaaaaaagactaaatagtagttttgcaaatctaatgatgtagtataagaataagactttgagcataagacaaataaaaaatacacatgggtcataaacaatcacaaaaacagcctatgactgtacatttgacaaaccagccgaaatggaccaaaccaatgtatggaaattgagtaatggtatgttgaagtttattagaccagttacttgaagtttttatgtaccaattgctgaatgttatgtgtctggtactattctaatcctgggtgtaaaacaatacataaaaccaaaaccctgccctcatgaagtttgcattccagtaaaataaattcatagttatatttcgggtggtaatatttttgt

SEQ ID NO: 92689 - DNA, 625 bp, Homo sapiens
gacaccatcattatactgtgtgtctttataaaacccatataccttattcttttgttttatctagctattatattgtctataacttacttttaaatattctagtatagacaggtgtgtgtgtgtgtgcgtgtgtgtgtattcttaatcctctataaggttgtagctaaaatttaaaatactttaactggacacacatcttttaggagtggttggtagtgtttgaaggactactataaggccttaatgatctttatctctagagagttctagaaggttccctaattagcctaataaataaaagaagttattttgcactggaaaattaaggagtgttggagatatgtgatttggctagtgctatttaaagacacccctgtccttgcataaatagggtttaggaatctagtaatcctggattacaaactttgtttggagtgatgcctaaaccaggtatgccaatctgtcttgtgtccacatactaacagagggttctagcaacttaatcccattagcatgttagctgaagactactgctagaatgctgttatgtttgtttagagttaatatttcatggaaatgtctgaaccctggtactgtattaaactcatagaaatggctttgtgcc

SEQ ID NO: 92690 - DNA, 996 bp, Homo sapiens
ttcatggccgccgcctggcgccggggctaagtggccgccggcgtccgggtacccgagggctctcccgcgttgctggcaccgctggcgccgcggtctcgtagcgcatgggcctcctccgaggcgggctcccatgcgctcgggccatggcgcgcctgggcgctgtgcgctcccactactgcgccctgctgctggccgcggcgctggccgtctgcgccttctactacctcggctcaggccgggagaccttctccagcgccaccaagaggctgaaggaggccctgcgccggggctcccgccgcgccctcgccgcccgcgctggagctagcgcggggctccgtggcgccagcccccggcgcgaaggccaagagcttggagggcggcggtgccgggccggtggactaccacctgctgatgatgttcaccaaggcggagcacaatgccgcgctgcaggccaaggcccgcgtcgcgctgcgctcactgctgcgcctcgccaagttcgaggcgcacgaggtgcttaaccttcacttcgtgagcgaggaggccagccgcgaggtggccaagggcctgctgcgggagctcctgccgcccgccgctggcttcaagtgcaaggtcatcttccacgatgttgctgtgctgacggataagctcttccccatcgtggaggccatgcagaagcacttcagtgctggcttgggaacctactacagtgactccatcttcttcctctcggtcgccatgcatcagatcatgcccaaaggaagtggagaaatccttgccaaggaatccaattcaagtcttgtgacccgtaaaaaccgtgaaggttacaaggaagcacgaccagtcggggcaagttgtgtactgaacagcaattgtgagaggtgagccatgccaatagggacaatcaatcggacatacgcccgtggtaagaattcgaggcaagatttaagagggtcaacacagattactgacaaggccgtgctatggagacgcacaaac

SEQ ID NO: 92691 - DNA, 627 bp, Homo sapiens
tcatccagggggcggggctgtagattgttacattcgcctgggcactcggctcggtccaggagaactgtcgggaccaggaagactcattccaaaaagcccaggccgggcacagtcgtcaagcctgtaatcccaacactttgggagaccgaggtgggggtatcgattgagcctcggaggtcgagatcagcctgggaaacacagggaggcccccatcgctacaaaatattttaaaaattagccaggtgtggtggcttgtgcttgttgtcccggctacttgggaggctgaagtgggagggtggcttgagtccaggagttcactgcactgagctgtgatcacaccactgcactccagcctggacgacagagtgagacgtccatctcaaaaaaaaaaaaaaaaccaaaaaaaaacacccggggatttatatgtgggggggggggaaacaaaaggagtgtaagtatagaagtggccacagtggtgctaaaaggtggttatccccgagcaccaaagtattattatgtggctaccaacgggtggtaaaaatgtggcagagatccaccatatatatgtgggacggcaatataaattcgggataaggccgaggtataaacgtggcacataatgagacg

SEQ ID NO: 92692 - DNA, 2745 bp, Homo sapiens
agcgggtgagagtcagtgagctctcaggagatctgctgtttgaaagtgtgtagcgcttcccccttctctctctctgtcctgctgcactatggtgagatgtgtcccttccgccgtgattgtgtgtttcctgaggcctccccagccaggcagaactgtcatcttccacgatgttgctgtgctgacggataagctcttccccatcgtggaggccatgcagaagcacttcagtgctggcttgggaacctactacagtgactccatcttcttcctctcggtcgccatgcatcagatcatgcccaaagagatcctgcagatcattcagctggacctagacctgaagtttaagaccaacatccgggagttgtttgaggaatttgacagtttcctgccaggcgccatcatcggcatagcccgggagatgcagccagtttacaggcacacattctggcagttccgccatgagaacccccagacccgggttgggggcccgccccccgaggggctgccgggcttcaacagcggggtgatgttgctgaacctggaggccatgcgccagtccccgctctacagccgcctgctggagccggcgcaggtgcagcagctggccgacaagtaccacttccgcggccacctcggggaccaggacttcttcaccatgatcggcatggagcaccccaagctcttccatgtgctggactgtacctggaaccggcagctgtgcacctggtggagggaccatggctacagtgacgtcttcgaggcctatttcaggtgtgagggccacgtcaagatctaccacgggaactgcaacactcccatcccggaggactaggcgctccccgtgccttgcccccggggcctccagatctgggggaaggacagggttccttgggacagacccaagggcagtgtctgacccgctagagagacaccgcagggaagtcctgtgattaaggtgctgagacctcctgccgggcaggtcactgtgctgaggccacccgccaaggactggcctgtgcactgctggtgcttgggaccttattcctccagggagcaggcgacacaaaggacacgcatgtccagtgggctgggaagcaagcacttgaagagaaggaaggggagaaagggtcccccttgctgtctgcctctgaggaatggaaatcctttagacccggccttttttggaccaatataaatttaatttaaattgacagccttccatttttcgagaaagtacaaacagaactgctttagcacccatcgagccccaaacgggtaaggtaagccaaggttttaatgaccagcccagtatctaagcttccaaacgaatgccagcccatcacatactcaccctgggaggctgctgcacgcgcattctcctgatgctcacgtcacttggtgtaggtttcaggatcgcctctttgaggaaggacttcaggaccaactggggcctgcataagaaaacttatctcattattagagtactcacagcttgtatctcccagctacatcctagaaccccattgtcctttattccaccaaaccagctccaggtgaccagactctactcagaaagcaaattcgtcatcaaagaacagagactggccaccacaaggacatgcaggagaactgtcgggaccaggaagactcattccaaaaagcccaggccgggcacagtcgtcaagcctgtaatcccaacactttgggagaccgaggtgggggtatcgattgagcctcggaggtcgagatcagcctgggaaacacagggaggcccccatcgctacaaaatattttaaaaattagccaggtgtggtggcttgtgcttgttgtcccggctacttgggaggctgaagtgggagggtggcttgagtccaggagttcactgcactgagctgtgatcacaccactgcactccagcctggacgacagagtgagacgtccatctcaaaaaaaaaaaaaaaaccaaaaaggaacccagcaattcccaagtgtgaccatgtgggcttggaagacatgtcactcatgggctagtaagcattctagtttctttgtttaaaaaatccccttatcataccacgttagaccgtagaccttagcagaaattaaagcgtcatttcttttgatggggcctcctgtacgtaggctgcagacgtgaaagccccaggggtccatttgtatcaattttcatcttgttttgttttgatttcatttacgtttttctttttcccatgagtgaggatagccaataaatcatctttgagaacatggtgattcatgttgtttgttctctgatcacagtttcagctgcatgaaggctctgaatcaagtgtgtactcaatgccattggaatccccacctcccctgatgaagatgagtgcttacaggagatcctaaggaccaaggagagggcacatctgagagggtgtcagagagggtagtattggcatgtttggttcaaagcaaggaatcatttcattctaggtattggcaggtccacctgcactggggagcaaaagcatccccatttcttctcatccctcttaccctagactgcccagttacatcctgccctgaagaggtggagcagatatctttcccagccctctgctgtgacagaattggtctgttctctcacctacttgatttcctatttataggtaacaattcttgaatgcctgctgtgcaccagccattgtattgggggatttattacgctattgataatgtttatgaaaacttcatgaa

SEQ ID NO: 92693 - DNA, 2855 bp, Homo sapiens
aaattgcatgctggtactggcctgaggtttattggatcgccggggctaagtggccgccggcgtccgggtacccgagggctctcccgcgttgctggcaccgctggcgccgcggtctcgtagcgcatgggcctcctccgaggcgggctcccatgcgctcgggccatggcgcgcctgggcgctgtgcgctcccactactgcgccctgctgctggccgcggcgctggccgtctgcgccttctactacctcggctcaggccgggagaccttctccagcgccaccaagaggctgaaggaggccctgcgccggggctcccgccgcgccctcgccgcccgcgctggagctagcgcggggctccgtggcgccagcccccggcgcgaaggccaagagcttggagggcggcggtgccgggccggtggactaccacctgctgatgatgttcaccaaggcggagcacaatgccgcgctgcaggccaaggcccgcgtcgcgctgcgctcactgctgcgcctcgccaagttcgaggcgcacgaggtgcttaaccttcacttcgtgagcgaggaggccagccgcgaggtggccaagggcctgctgcgggagctcctgccgcccgccgctggcttcaagtgcaaggtcatcttccacgatgttgctgtgctgacggataagctcttccccatcgtggaggccatgcagaagcacttcagtgctggcttgggaacctactacagtgactccatcttcttcctctcggtcgccatgcatcagatcatgcccaaagagatcctgcagatcattcagctggacctagacctgaagtttaagaccaacatccgggagttgtttgaggaatttgacagtttcctgccaggcgccatcatcggcatagcccgggagatgcagccagtttacaggcacacattctggcagttccgccatgagaacccccagacccgggttgggggcccgccccccgaggggctgccgggcttcaacagcggggtgatgttgctgaacctggaggccatgcgccagtccccgctctacagccgcctgctggagccggcgcaggtgcagcagctggccgacaagtaccacttccgcggccacctcggggaccaggacttcttcaccatgatcggcatggagcaccccaagctcttccatgtgctggactgtacctggaaccggcagctgtgcacctggtggagggaccatggctacagtgacgtcttcgaggcctatttcaggtgtgagggccacgtcaagatctaccacgggaactgcaacactcccatcccggaggactaggcgctccccgtgccttgcccccggggcctccagatctgggggaaggacagggttccttgggacagacccaagggcagtgtctgacccgctagagagacaccgcagggaagtcctgtgattaaggtgctgagacctcctgccgggcaggtcactgtgctgaggccacccgccaaggactggcctgtgcactgctggtgcttgggaccttattcctccagggagcaggcgacacaaaggacacgcatgtccagtgggctgggaagcaagcacttgaagagaaggaaggggagaaagggtcccccttgctgtctgcctctgaggaatggaaatcctttagacccggccttttttggaccaatataaatttaatttaaattgacagccttccatttttcgagaaagtacaaacagaactgctttagcacccatcgagccccaaacgggtaaggtaagccaaggttttaatgaccagcccagtatctaagcttccaaacgaatgccagcccatcacatactcaccctgggaggctgctgcacgcgcattctcctgatgctcacgtcacttggtgtaggtttcaggatcgcctctttgaggaaggacttcaggaccaactggggcctgcataagaaaacttatctcattattagagtactcacagcttgtatctcccagctacatcctagaaccccattgtcctttattccaccaaaccagctccaggtgaccagactctactcagaaagcaaattcgtcatcaaagaacagagactggccaccacaaggacatgcaggagaactgtcgggaccaggaagactcattccaaaaagcccaggccgggcacagtcgtcaagcctgtaatcccaacactttgggagaccgaggtgggggtatcgattgagcctcggaggtcgagatcagcctgggaaacacagggaggcccccatcgctacaaaatattttaaaaattagccaggtgtggtggcttgtgcttgttgtcccggctacttgggaggctgaagtgggagggtggcttgagtccaggagttcactgcactgagctgtgatcacaccactgcactccagcctggacgacagagtgagacgtccatctcaaaaaaaaaaaaaaaaccaaaaaaaaaaacccgcggccttcttttccgcgggcgcggcaaacggcgcgtctcgcccctgccccctgggcccaaagcatcgctccccgggaacccgcgcgtttcttgtggccaccaaggtcggcaacaatctgtgccggggctccccccataatacgcacgccccatataccactccccataaacaccccgggtttacccccctgcatattatacacatcctccacaaactctcctacaactctacccacacaacccccccaaacctcccaccatcacactcagccatcaccacgtacctatctcactatactcacgtcttctcacacctaccactcacaccctcccctataccaaccacaacacacccctaccactactcactcatccccacgctcctccttacctaccacacct

SEQ ID NO: 92694 - DNA, 2276 bp, Homo sapiens
gctggtacggtccggagttttaggatcgaggggctgccgggcttcaacagcggggtgatgttgctgaacctggaggccatgcgccagtccccgctctacagccgcctgctggagccggcgcaggtgcagcagctggccgacaagtaccacttccgcggccacctcggggaccaggacttcttcaccatgatcggcatggagcaccccaagctcttccatgtgctggactgtacctggaaccggcagctgtgcacctggtggagggaccatggctacagtgacgtcttcgaggcctatttcaggtgtgagggccacgtcaagatctaccacgggaactgcaacactcccatcccggaggactaggcgctccccgtgccttgcccccggggcctccagatctgggggaaggacagggttccttgggacagacccaagggcagtgtctgacccgctagagagacaccgcagggaagtcctgtgattaaggtgctgagacctcctgccgggcaggtcactgtgctgaggccacccgccaaggactggcctgtgcactgctggtgcttgggaccttattcctccagggagcaggcgacacaaaggacacgcatgtccagtgggctgggaagcaagcacttgaagagaaggaaggggagaaagggtcccccttgctgtctgcctctgaggaatggaaatcctttagacccggccttttttggaccaatataaatttaatttaaattgacagccttccatttttcgagaaagtacaaacagaactgctttagcacccatcgagccccaaacgggtaaggtaagccaaggttttaatgaccagcccagtatctaagcttccaaacgaatgccagcccatcacatactcaccctgggaggctgctgcacgcgcattctcctgatgctcacgtcacttggtgtaggtttcaggatcgcctctttgaggaaggacttcaggaccaactggggcctgcataagaaaacttatctcattattagagtactcacagcttgtatctcccagctacatcctagaaccccattgtcctttattccaccaaaccagctccaggtgaccagactctactcagaaagcaaattcgtcatcaaagaacagagactggccaccacaaggacatgcaggagaactgtcgggaccaggaagactcattccaaaaagcccaggccgggcacagtcgtcaagcctgtaatcccaacactttgggagaccgaggtgggggtatcgattgagcctcggaggtcgagatcagcctgggaaacacagggaggcccccatcgctacaaaatattttaaaaattagccaggtgtggtggcttgtgcttgttgtcccggctacttgggaggctgaagtgggagggtggcttgagtccaggagttcactgcactgagctgtgatcacaccactgcactccagcctggacgacagagtgagacgtccatctcaaaaaaaaaaaaaaaaccaaaaaggaacccagcaattcccaagtgtgaccatgtgggcttggaagacatgtcactcatgggctagtaagcattctagtttctttgtttaaaaaatccccttatcataccacgttagaccgtagaccttagcagaaattaaagcgtcatttcttttgatggggcctcctgtacgtaggctgcagacgtgaaagccccaggggtccatttgtatcaattttcatcttgttttgttttgatttcatttacgtttttctttttcccatgagtgaggatagccaataaatcatctttgagaacatggtgattcatgttgtttgttctctgatcacagtttcagctgcatgaaggctctgaatcaagtgtgtactcaatgccattggaatccccacctcccctgatgaagatgagtgcttacaggagatcctaaggaccaaggagagggcacatctgagagggtgtcagagagggtagtattggcatgtttggttcaaagcaaggaatcatttcattctaggtattggcaggtccacctgcactggggagcaaaagcatccccatttcttctcatccctcttaccctagactgcccagttacatcctgccctgaagaggtggagcagatatctttcccagccctctgctgtgacagaattggtctgttctctcacctacttgatttcctatttataggtaacaattcttgaatgcctgctgtgcaccagccattgtattgggggatttattacgctattgataatgtttatgaaaacttcatgaa

SEQ ID NO: 92695 - DNA, 2539 bp, Homo sapiens
agagatttatctggaaggcctggagaagcaactcaagcacaagggatctgaggaggagccagggagcacatttccagtttaaaggggaaaaatgtctccctggagagccccaggcagtccttgaaagagaagcttgaaaagtcaagtttgggtcttctgcagctcgggcaccaccgagtcatagtgagtgttggcctccgcaaggcctgacagcacagaggacagagaggcacacattctggcagttccgccatgagaacccccagacccgggttgggggcccgccccccgaggggctgccgggcttcaacagcggggtgatgttgctgaacctggaggccatgcgccagtccccgctctacagccgcctgctggagccggcgcaggtgcagcagctggccgacaagtaccacttccgcggccacctcggggaccaggacttcttcaccatgatcggcatggagcaccccaagctcttccatgtgctggactgtacctggaaccggcagctgtgcacctggtggagggaccatggctacagtgacgtcttcgaggcctatttcaggtgtgagggccacgtcaagatctaccacgggaactgcaacactcccatcccggaggactaggcgctccccgtgccttgcccccggggcctccagatctgggggaaggacagggttccttgggacagacccaagggcagtgtctgacccgctagagagacaccgcagggaagtcctgtgattaaggtgctgagacctcctgccgggcaggtcactgtgctgaggccacccgccaaggactggcctgtgcactgctggtgcttgggaccttattcctccagggagcaggcgacacaaaggacacgcatgtccagtgggctgggaagcaagcacttgaagagaaggaaggggagaaagggtcccccttgctgtctgcctctgaggaatggaaatcctttagacccggccttttttggaccaatataaatttaatttaaattgacagccttccatttttcgagaaagtacaaacagaactgctttagcacccatcgagccccaaacgggtaaggtaagccaaggttttaatgaccagcccagtatctaagcttccaaacgaatgccagcccatcacatactcaccctgggaggctgctgcacgcgcattctcctgatgctcacgtcacttggtgtaggtttcaggatcgcctctttgaggaaggacttcaggaccaactggggcctgcataagaaaacttatctcattattagagtactcacagcttgtatctcccagctacatcctagaaccccattgtcctttattccaccaaaccagctccaggtgaccagactctactcagaaagcaaattcgtcatcaaagaacagagactggccaccacaaggacatgcaggagaactgtcgggaccaggaagactcattccaaaaagcccaggccgggcacagtcgtcaagcctgtaatcccaacactttgggagaccgaggtgggggtatcgattgagcctcggaggtcgagatcagcctgggaaacacagggaggcccccatcgctacaaaatattttaaaaattagccaggtgtggtggcttgtgcttgttgtcccggctacttgggaggctgaagtgggagggtggcttgagtccaggagttcactgcactgagctgtgatcacaccactgcactccagcctggacgacagagtgagacgtccatctcaaaaaaaaaaaaaaaaccaaaaaggaacccagcaattcccaagtgtgaccatgtgggcttggaagacatgtcactcatgggctagtaagcattctagtttctttgtttaaaaaatccccttatcataccacgttagaccgtagaccttagcagaaattaaagcgtcatttcttttgatggggcctcctgtacgtaggctgcagacgtgaaagccccaggggtccatttgtatcaattttcatcttgttttgttttgatttcatttacgtttttctttttcccatgagtgaggatagccaataaatcatctttgagaacatggtgattcatgttgtttgttctctgatcacagtttcagctgcatgaaggctctgaatcaagtgtgtactcaatgccattggaatccccacctcccctgatgaagatgagtgcttacaggagatcctaaggaccaaggagagggcacatctgagagggtgtcagagagggtagtattggcatgtttggttcaaagcaaggaatcatttcattctaggtattggcaggtccacctgcactggggagcaaaagcatccccatttcttctcatccctcttaccctagactgcccagttacatcctgccctgaagaggtggagcagatatctttcccagccctctgctgtgacagaattggtctgttctctcacctacttgatttcctatttataggtaacaattcttgaatgcctgctgtgcaccagccattgtattgggggatttattacgctattgataatgtttatgaaaacttcatgaa

SEQ ID NO: 92696 - DNA, 1833 bp, Homo sapiens
gttagcatctagacatcccttattgtgttggcgtgtggttcttgtgctgagacctcctgccgggcaggtcactgtgctgaggccacccgccaaggactggcctgtgcactgctggtgcttgggaccttattcctccagggagcaggcgacacaaaggacacgcatgtccagtgggctgggaagcaagcacttgaagagaaggaaggggagaaagggtcccccttgctgtctgcctctgaggaatggaaatcctttagacccggccttttttggaccaatataaatttaatttaaattgacagccttccatttttcgagaaagtacaaacagaactgctttagcacccatcgagccccaaacgggtaaggtaagccaaggttttaatgaccagcccagtatctaagcttccaaacgaatgccagcccatcacatactcaccctgggaggctgctgcacgcgcattctcctgatgctcacgtcacttggtgtaggtttcaggatcgcctctttgaggaaggacttcaggaccaactggggcctgcataagaaaacttatctcattattagagtactcacagcttgtatctcccagctacatcctagaaccccattgtcctttattccaccaaaccagctccaggtgaccagactctactcagaaagcaaattcgtcatcaaagaacagagactggccaccacaaggacatgcaggagaactgtcgggaccaggaagactcattccaaaaagcccaggccgggcacagtcgtcaagcctgtaatcccaacactttgggagaccgaggtgggggtatcgattgagcctcggaggtcgagatcagcctgggaaacacagggaggcccccatcgctacaaaatattttaaaaattagccaggtgtggtggcttgtgcttgttgtcccggctacttgggaggctgaagtgggagggtggcttgagtccaggagttcactgcactgagctgtgatcacaccactgcactccagcctggacgacagagtgagacgtccatctcaaaaaaaaaaaaaaaaccaaaaaggaacccagcaattcccaagtgtgaccatgtgggcttggaagacatgtcactcatgggctagtaagcattctagtttctttgtttaaaaaatccccttatcataccacgttagaccgtagaccttagcagaaattaaagcgtcatttcttttgatggggcctcctgtacgtaggctgcagacgtgaaagccccaggggtccatttgtatcaattttcatcttgttttgttttgatttcatttacgtttttctttttcccatgagtgaggatagccaataaatcatctttgagaacatggtgattcatgttgtttgttctctgatcacagtttcagctgcatgaaggctctgaatcaagtgtgtactcaatgccattggaatccccacctcccctgatgaagatgagtgcttacaggagatcctaaggaccaaggagagggcacatctgagagggtgtcagagagggtagtattggcatgtttggttcaaagcaaggaatcatttcattctaggtattggcaggtccacctgcactggggagcaaaagcatccccatttcttctcatccctcttaccctagactgcccagttacatcctgccctgaagaggtggagcagatatctttcccagccctctgctgtgacagaattggtctgttctctcacctacttgatttcctatttataggtaacaattcttgaatgcctgctgtgcaccagccattgtattgggggatttattacgctattgataatgtttatgaaaacttcatgaa

SEQ ID NO: 92697 - DNA, 1690 bp, Homo sapiens
gagatggacgtctcactctgtcgtccaggctggagtgcagtggtgtgatcacagctcagtgcagtgaactcctggactcaagccaccctcccacttcagcctcccaagtagccgggacaacaagcacaagccaccacacctggctaatttttaaaatattttgtagcgatgggggcctccctgtgtttcccaggctgatctcgacctccgaggctcaatcgatacccccacctcggtctcccaaagtgttgggattacaggcttgacggacttgtgcccgggcctgggcttttttggaatgagtcttcctgcacgcgcattctcctgatgctcacgtcacttggtgtaggtttcaggatcgcctctttgaggaaggacttcaggaccaactggggcctgcataagaaaacttatctcattattagagtactcacagcttgtatctcccagctacatcctagaaccccattgtcctttattccaccaaaccagctccaggtgaccagactctactcagaaagcaaattcgtcatcaaagaacagagactggccaccacaaggacatgcaggagaactgtcgggaccaggaagactcattccaaaaagcccaggccgggcacagtcgtcaagcctgtaatcccaacactttgggagaccgaggtgggggtatcgattgagcctcggaggtcgagatcagcctgggaaacacagggaggcccccatcgctacaaaatattttaaaaattagccaggtgtggtggcttgtgcttgttgtcccggctacttgggaggctgaagtgggagggtggcttgagtccaggagttcactgcactgagctgtgatcacaccactgcactccagcctggacgacagagtgagacgtccatctcaaaaaaaaaaaaaaaaccaaaaaggaacccagcaattcccaagtgtgaccatgtgggcttggaagacatgtcactcatgggctagtaagcattctagtttctttgtttaaaaaatccccttatcataccacgttagaccgtagaccttagcagaaattaaagcgtcatttcttttgatggggcctcctgtacgtaggctgcagacgtgaaagccccaggggtccatttgtatcaattttcatcttgttttgttttgatttcatttacgtttttctttttcccatgagtgaggatagccaataaatcatctttgagaacatggtgattcatgttgtttgttctctgatcacagtttcagctgcatgaaggctctgaatcaagtgtgtactcaatgccattggaatccccacctcccctgatgaagatgagtgcttacaggagatcctaaggaccaaggagagggcacatctgagagggtgtcagagagggtagtattggcatgtttggttcaaagcaaggaatcatttcattctaggtattggcaggtccacctgcactggggagcaaaagcatccccatttcttctcatccctcttaccctagactgcccagttacatcctgccctgaagaggtggagcagatatctttcccagccctctgctgtgacagaattggtctgttctctcacctacttgatttcctatttataggtaacaattcttgaatgcctgctgtgcaccagccattgtattgggggatttattacgctattgataatgtttatgaaaacttcatgaa

SEQ ID NO: 92698 - DNA, 3168 bp, Homo sapiens
aaattgcatgctggtactggcctgaggtttattggatcgccggggctaagtggccgccggcgtccgggtacccgagggctctcccgcgttgctggcaccgctggcgccgcggtctcgtagcgcatgggcctcctccgaggcgggctcccatgcgctcgggccatggcgcgcctgggcgctgtgcgctcccactactgcgccctgctgctggccgcggcgctggccgtctgcgccttctactacctcggctcaggccgggagaccttctccagcgccaccaagaggctgaaggaggccctgcgccggggctcccgccgcgccctcgccgcccgcgctggagctagcgcggggctccgtggcgccagcccccggcgcgaaggccaagagcttggagggcggcggtgccgggccggtggactaccacctgctgatgatgttcaccaaggcggagcacaatgccgcgctgcaggccaaggcccgcgtcgcgctgcgctcactgctgcgcctcgccaagttcgaggcgcacgaggtgcttaaccttcacttcgtgagcgaggaggccagccgcgaggtggccaagggcctgctgcgggagctcctgccgcccgccgctggcttcaagtgcaaggtcatcttccacgatgttgctgtgctgacggataagctcttccccatcgtggaggccatgcagaagcacttcagtgctggcttgggaacctactacagtgactccatcttcttcctctcggtcgccatgcatcagatcatgcccaaagagatcctgcagatcattcagctggacctagacctgaagtttaagaccaacatccgggagttgtttgaggaatttgacagtttcctgccaggcgccatcatcggcatagcccgggagatgcagccagtttacaggcacacattctggcagttccgccatgagaacccccagacccgggttgggggcccgccccccgaggggctgccgggcttcaacagcggggtgatgttgctgaacctggaggccatgcgccagtccccgctctacagccgcctgctggagccggcgcaggtgcagcagctggccgacaagtaccacttccgcggccacctcggggaccaggacttcttcaccatgatcggcatggagcaccccaagctcttccatgtgctggactgtacctggaaccggcagctgtgcacctggtggagggaccatggctacagtgacgtcttcgaggcctatttcaggtgtgagggccacgtcaagatctaccacgggaactgcaacactcccatcccggaggactaggcgctccccgtgccttgcccccggggcctccagatctgggggaaggacagggttccttgggacagacccaagggcagtgtctgacccgctagagagacaccgcagggaagtcctgtgattaaggtgctgagacctcctgccgggcaggtcactgtgctgaggccacccgccaaggactggcctgtgcactgctggtgcttgggaccttattcctccagggagcaggcgacacaaaggacacgcatgtccagtgggctgggaagcaagcacttgaagagaaggaaggggagaaagggtcccccttgctgtctgcctctgaggaatggaaatcctttagacccggccttttttggaccaatataaatttaatttaaattgacagccttccatttttcgagaaagtacaaacagaactgctttagcacccatcgagccccaaacgggtaaggtaagccaaggttttaatgaccagcccagtatctaagcttccaaacgaatgccagcccatcacatactcaccctgggaggctgctgcacgcgcattctcctgatgctcacgtcacttggtgtaggtttcaggatcgcctctttgaggaaggacttcaggaccaactggggcctgcataagaaaacttatctcattattagagtactcacagcttgtatctcccagctacatcctagaaccccattgtcctttattccaccaaaccagctccaggtgaccagactctactcagaaagcaaattcgtcatcaaagaacagagactggccaccacaaggacatgcaggagaactgtcgggaccaggaagactcattccaaaaccgaggtgggggtatcgattgagcctcggaggtcgagatcagcctgggaaacacagggaggcccccatcgctacaaaatattttaaaaattagccaggtgtggtggcttgtgcttgttgtcccggctacttgggaggctgaagtgggagggtggcttgagtccaggagttcactgcactgagctgtgatcacaccactgcactccagcctggacgacagagtgagacgtccatctcaaaaaaaaaaaaaaaaccaaaaaggaacccagcaattcccaagtgtgaccatgtgggcttggaagacatgtcactcatgggctagtaagcattctagtttctttgtttaaaaaatccccttatcataccacgttagaccgtagaccttagcagaaattaaagcgtcatttcttttgatggggcctcctgtacgtaggctgcagacgtgaaagccccaggggtccatttgtatcaattttcatcttgttttgttttgatttcatttacgtttttctttttcccatgagtgaggatagccaataaatcatctttgagaacatggtgattcatgttgtttgttctctgatcacagtttcagctgcatgaaggctctgaatcaagtgtgtactcaatgccattggaatccccacctcccctgatgaagatgagtgcttacaggagatcctaaggaccaaggagagggcacatctgagagggtgtcagagagggtagtattggcatgtttggttcaaagcaaggaatcatttcattctaggtattggcaggtccacctgcactggggagcaaaagcatccccatttcttctcatccctcttaccctagactgcccagttacatcctgccctgaagaggtggagcagatatctttcccagccctctgctgtgacagaattggtctgttctctcacctacttgatttcctatttataggtaacaattcttgaatgcctgctgtgcaccagccattgtattgggggatttattacgctattgataatgtttatgaaaacttcatgaa

SEQ ID NO: 92699 - DNA, 1389 bp, Homo sapiens
aatgagtcttcctggtcccgacagttctcctgcatgtccttgtggtggccagtctctgttctttgatgacgaatttgctttctgagtagagtctggtcacctggagctggtttggtggaataaaggacaatggggttctaggatgtagctgggagatacaagctgtgagtactctaataatgagataagttttcttatgcaggccccagttggtcctgaagtccttcctcaaagaggcgatcctgaaacctacaccaagtgacgtcaggagaactgtcgggaccaggaagactcattccaaaaagcccaggccgggcacagtcgtcaagcctgtaatcccaacactttgggagaccgaggtgggggtatcgattgagcctcggaggtcgagatcagcctgggaaacacagggaggcccccatcgctacaaaatattttaaaaattagccaggtgtggtggcttgtgcttgttgtcccggctacttgggaggctgaagtgggagggtggcttgagtccaggagttcactgcactgagctgtgatcacaccactgcactccagcctggacgacagagtgagacgtccatctcaaaaaaaaaaaaaaaaccaaaaaggaacccagcaattcccaagtgtgaccatgtgggcttggaagacatgtcactcatgggctagtaagcattctagtttctttgtttaaaaaatccccttatcataccacgttagaccgtagaccttagcagaaattaaagcgtcatttcttttgatggggcctcctgtacgtaggctgcagacgtgaaagccccaggggtccatttgtatcaattttcatcttgttttgttttgatttcatttacgtttttctttttcccatgagtgaggatagccaataaatcatctttgagaacatggtgattcatgttgtttgttctctgatcacagtttcagctgcatgaaggctctgaatcaagtgtgtactcaatgccattggaatccccacctcccctgatgaagatgagtgcttacaggagatcctaaggaccaaggagagggcacatctgagagggtgtcagagagggtagtattggcatgtttggttcaaagcaaggaatcatttcattctaggtattggcaggtccacctgcactggggagcaaaagcatccccatttcttctcatccctcttaccctagactgcccagttacatcctgccctgaagaggtggagcagatatctttcccagccctctgctgtgacagaattggtctgttctctcacctacttgatttcctatttataggtaacaattcttgaatgcctgctgtgcaccagccattgtattgggggatttattacgctattgataatgtttatgaaaacttcatgaa

SEQ ID NO: 92700 - DNA, 3219 bp, Homo sapiens
aaattgcatgctggtactggcctgaggtttattggatcgccggggctaagtggccgccggcgtccgggtacccgagggctctcccgcgttgctggcaccgctggcgccgcggtctcgtagcgcatgggcctcctccgaggcgggctcccatgcgctcgggccatggcgcgcctgggcgctgtgcgctcccactactgcgccctgctgctggccgcggcgctggccgtctgcgccttctactacctcggctcaggccgggagaccttctccagcgccaccaagaggctgaaggaggccctgcgccggggctcccgccgcgccctcgccgcccgcgctggagctagcgcggggctccgtggcgccagcccccggcgcgaaggccaagagcttggagggcggcggtgccgggccggtggactaccacctgctgatgatgttcaccaaggcggagcacaatgccgcgctgcaggccaaggcccgcgtcgcgctgcgctcactgctgcgcctcgccaagttcgaggcgcacgaggtgcttaaccttcacttcgtgagcgaggaggccagccgcgaggtggccaagggcctgctgcgggagctcctgccgcccgccgctggcttcaagtgcaaggtcatcttccacgatgttgctgtgctgacggataagctcttccccatcgtggaggccatgcagaagcacttcagtgctggcttgggaacctactacagtgactccatcttcttcctctcggtcgccatgcatcagatcatgcccaaagagatcctgcagatcattcagctggacctagacctgaagtttaagaccaacatccgggagttgtttgaggaatttgacagtttcctgccaggcgccatcatcggcatagcccgggagatgcagccagtttacaggcacacattctggcagttccgccatgagaacccccagacccgggttgggggcccgccccccgaggggctgccgggcttcaacagcggggtgatgttgctgaacctggaggccatgcgccagtccccgctctacagccgcctgctggagccggcgcaggtgcagcagctggccgacaagtaccacttccgcggccacctcggggaccaggacttcttcaccatgatcggcatggagcaccccaagctcttccatgtgctggactgtacctggaaccggcagctgtgcacctggtggagggaccatggctacagtgacgtcttcgaggcctatttcaggtgtgagggccacgtcaagatctaccacgggaactgcaacactcccatcccggaggactaggcgctccccgtgccttgcccccggggcctccagatctgggggaaggacagggttccttgggacagacccaagggcagtgtctgacccgctagagagacaccgcagggaagtcctgtgattaaggtgctgagacctcctgccgggcaggtcactgtgctgaggccacccgccaaggactggcctgtgcactgctggtgcttgggaccttattcctccagggagcaggcgacacaaaggacacgcatgtccagtgggctgggaagcaagcacttgaagagaaggaaggggagaaagggtcccccttgctgtctgcctctgaggaatggaaatcctttagacccggccttttttggaccaatataaatttaatttaaattgacagccttccatttttcgagaaagtacaaacagaactgctttagcacccatcgagccccaaacgggtaaggtaagccaaggttttaatgaccagcccagtatctaagcttccaaacgaatgccagcccatcacatactcaccctgggaggctgctgcacgcgcattctcctgatgctcacgtcacttggtgtaggtttcaggatcgcctctttgaggaaggacttcaggaccaactggggcctgcataagaaaacttatctcattattagagtactcacagcttgtatctcccagctacatcctagaaccccattgtcctttattccaccaaaccagctccaggtgaccagactctactcagaaagcaaattcgtcatcaaagaacagagactggccaccacaaggacatgcaggagaactgtcgggaccaggaagactcattccaaaaagcccaggccgggcacagtcgtcaagcctgtaatcccaacactttgggagaccgaggtgggggtatcgattgagcctcggaggtcgagatcagcctgggaaacacagggaggcccccatcgctacaaaatattttaaaaattagccaggtgtggtggcttgtgcttgttgtcccggctacttgggaggctgaagtgggagggtggcttgagtccaggagttcactgcactgagctgtgatcacaccactgcactccagcctggacgacagagtgagacgtccatctcaaaaaaaaaaaaaaaaccaaaaaggaacccagcaattcccaagtgtgaccatgtgggcttggaagacatgtcactcatgggctagtaagcattctagtttctttgtttaaaaaatccccttatcataccacgttagaccgtagaccttagcagaaattaaagcgtcatttcttttgatggggcctcctgtacgtaggctgcagacgtgaaagccccaggggtccatttgtatcaattttcatcttgttttgttttgatttcatttacgtttttctttttcccatgagtgaggatagccaataaatcatctttgagaacatggtgattcatgttgtttgttctctgatcacagtttcagctgcatgaaggctctgaatcaagtgtgtactcaatgccattggaatccccacctcccctgatgaagatgagtgcttacaggagatcctaaggaccaaggagagggcacatctgagagggtgtcagagagggtagtattggcatgtttggttcaaagcaaggaatcatttcattctaggtattggcaggtccacctgcactggggagcaaaagcatccccatttcttctcatccctcttaccctagactgcccagttacatcctgccctgaagaggtggagcagatatctttcccagccctctgctgtgacagaattggtctgttctctcacctacttgatttcctatttataggtaacaattcttgaatgcctgctgtgcaccagccattgtattgggggatttattacgctattgataatgtttatgaaaacttcatgaa

SEQ ID NO: 92701 - DNA, 2530 bp, Homo sapiens
gcatgtctgactagctacctactgtaacaatacagggagcctcagagtcccaagccctagatactagtcccagctctgccaccttggggcctttgttcccccacctgagaaggagaagagctgagctctaagtccccgctccccggctctggcattgggggttacagcccttcggaccctcattgtcctccctccgtctggaagttgcctgtctgctgaggcacacattctggcagttccgccatgagaacccccagacccgggttgggggcccgccccccgaggggctgccgggcttcaacagcggggtgatgttgctgaacctggaggccatgcgccagtccccgctctacagccgcctgctggagccggcgcaggtgcagcagctggccgacaagtaccacttccgcggccacctcggggaccaggacttcttcaccatgatcggcatggagcaccccaagctcttccatgtgctggactgtacctggaaccggcagctgtgcacctggtggagggaccatggctacagtgacgtcttcgaggcctatttcaggtgtgagggccacgtcaagatctaccacgggaactgcaacactcccatcccggaggactaggcgctccccgtgccttgcccccggggcctccagatctgggggaaggacagggttccttgggacagacccaagggcagtgtctgacccgctagagagacaccgcagggaagtcctgtgattaaggtgctgagacctcctgccgggcaggtcactgtgctgaggccacccgccaaggactggcctgtgcactgctggtgcttgggaccttattcctccagggagcaggcgacacaaaggacacgcatgtccagtgggctgggaagcaagcacttgaagagaaggaaggggagaaagggtcccccttgctgtctgcctctgaggaatggaaatcctttagacccggccttttttggaccaatataaatttaatttaaattgacagccttccatttttcgagaaagtacaaacagaactgctttagcacccatcgagccccaaacgggtaaggtaagccaaggttttaatgaccagcccagtatctaagcttccaaacgaatgccagcccatcacatactcaccctgggaggctgctgcacgcgcattctcctgatgctcacgtcacttggtgtaggtttcaggatcgcctctttgaggaaggacttcaggaccaactggggcctgcataagaaaacttatctcattattagagtactcacagcttgtatctcccagctacatcctagaaccccattgtcctttattccaccaaaccagctccaggtgaccagactctactcagaaagcaaattcgtcatcaaagaacagagactggccaccacaaggacatgcaggagaactgtcgggaccaggaagactcattccaaaaagcccaggccgggcacagtcgtcaagcctgtaatcccaacactttgggagaccgaggtgggggtatcgattgagcctcggaggtcgagatcagcctgggaaacacagggaggcccccatcgctacaaaatattttaaaaattagccaggtgtggtggcttgtgcttgttgtcccggctacttgggaggctgaagtgggagggtggcttgagtccaggagttcactgcactgagctgtgatcacaccactgcactccagcctggacgacagagtgagacgtccatctcaaaaaaaaaaaaaaaaccaaaaaggaacccagcaattcccaagtgtgaccatgtgggcttggaagacatgtcactcatgggctagtaagcattctagtttctttgtttaaaaaatccccttatcataccacgttagaccgtagaccttagcagaaattaaagcgtcatttcttttgatggggcctcctgtacgtaggctgcagacgtgaaagccccaggggtccatttgtatcaattttcatcttgttttgttttgatttcatttacgtttttctttttcccatgagtgaggatagccaataaatcatctttgagaacatggtgattcatgttgtttgttctctgatcacagtttcagctgcatgaaggctctgaatcaagtgtgtactcaatgccattggaatccccacctcccctgatgaagatgagtgcttacaggagatcctaaggaccaaggagagggcacatctgagagggtgtcagagagggtagtattggcatgtttggttcaaagcaaggaatcatttcattctaggtattggcaggtccacctgcactggggagcaaaagcatccccatttcttctcatccctcttaccctagactgcccagttacatcctgccctgaagaggtggagcagatatctttcccagccctctgctgtgacagaattggtctgttctctcacctacttgatttcctatttataggtaacaattcttgaatgcctgctgtgcaccagccattgtattgggggatttattacgctattgataatgtttatgaaaacttcatgaa

SEQ ID NO: 92702 - DNA, 2479 bp, Homo sapiens
atgaatgggatgagtgtcctgatgaaagagaccctgaagagctctgtcaccccttcaccatatgaggagactggggaaaggcagccatctgtgaactgggcagtgagtcctcaccagacacagaatcagtgggcacgttggtcttggacttcccagcctctagaactaggcacacattctggcagttccgccatgagaacccccagacccgggttgggggcccgccccccgaggggctgccgggcttcaacagcggggtgatgttgctgaacctggaggccatgcgccagtccccgctctacagccgcctgctggagccggcgcaggtgcagcagctggccgacaagtaccacttccgcggccacctcggggaccaggacttcttcaccatgatcggcatggagcaccccaagctcttccatgtgctggactgtacctggaaccggcagctgtgcacctggtggagggaccatggctacagtgacgtcttcgaggcctatttcaggtgtgagggccacgtcaagatctaccacgggaactgcaacactcccatcccggaggactaggcgctccccgtgccttgcccccggggcctccagatctgggggaaggacagggttccttgggacagacccaagggcagtgtctgacccgctagagagacaccgcagggaagtcctgtgattaaggtgctgagacctcctgccgggcaggtcactgtgctgaggccacccgccaaggactggcctgtgcactgctggtgcttgggaccttattcctccagggagcaggcgacacaaaggacacgcatgtccagtgggctgggaagcaagcacttgaagagaaggaaggggagaaagggtcccccttgctgtctgcctctgaggaatggaaatcctttagacccggccttttttggaccaatataaatttaatttaaattgacagccttccatttttcgagaaagtacaaacagaactgctttagcacccatcgagccccaaacgggtaaggtaagccaaggttttaatgaccagcccagtatctaagcttccaaacgaatgccagcccatcacatactcaccctgggaggctgctgcacgcgcattctcctgatgctcacgtcacttggtgtaggtttcaggatcgcctctttgaggaaggacttcaggaccaactggggcctgcataagaaaacttatctcattattagagtactcacagcttgtatctcccagctacatcctagaaccccattgtcctttattccaccaaaccagctccaggtgaccagactctactcagaaagcaaattcgtcatcaaagaacagagactggccaccacaaggacatgcaggagaactgtcgggaccaggaagactcattccaaaaagcccaggccgggcacagtcgtcaagcctgtaatcccaacactttgggagaccgaggtgggggtatcgattgagcctcggaggtcgagatcagcctgggaaacacagggaggcccccatcgctacaaaatattttaaaaattagccaggtgtggtggcttgtgcttgttgtcccggctacttgggaggctgaagtgggagggtggcttgagtccaggagttcactgcactgagctgtgatcacaccactgcactccagcctggacgacagagtgagacgtccatctcaaaaaaaaaaaaaaaaccaaaaaggaacccagcaattcccaagtgtgaccatgtgggcttggaagacatgtcactcatgggctagtaagcattctagtttctttgtttaaaaaatccccttatcataccacgttagaccgtagaccttagcagaaattaaagcgtcatttcttttgatggggcctcctgtacgtaggctgcagacgtgaaagccccaggggtccatttgtatcaattttcatcttgttttgttttgatttcatttacgtttttctttttcccatgagtgaggatagccaataaatcatctttgagaacatggtgattcatgttgtttgttctctgatcacagtttcagctgcatgaaggctctgaatcaagtgtgtactcaatgccattggaatccccacctcccctgatgaagatgagtgcttacaggagatcctaaggaccaaggagagggcacatctgagagggtgtcagagagggtagtattggcatgtttggttcaaagcaaggaatcatttcattctaggtattggcaggtccacctgcactggggagcaaaagcatccccatttcttctcatccctcttaccctagactgcccagttacatcctgccctgaagaggtggagcagatatctttcccagccctctgctgtgacagaattggtctgttctctcacctacttgatttcctatttataggtaacaattcttgaatgcctgctgtgcaccagccattgtattgggggatttattacgctattgataatgtttatgaaaacttcatgaa

SEQ ID NO: 92703 - DNA, 3164 bp, Homo sapiens
aaattgcatgctggtactggcctgaggtttattggatcgccggggctaagtggccgccggcgtccgggtacccgagggctctcccgcgttgctggcaccgctggcgccgcggtctcgtagcgcatgggcctcctccgaggcgggctcccatgcgctcgggccatggcgcgcctgggcgctgtgcgctcccactactgcgccctgctgctggccgcggcgctggccgtctgcgccttctactacctcggctcaggccgggagaccttctccagcgccaccaagaggctgaaggaggccctgcgccggggctcccgccgcgccctcgccgcccgcgctggagctagcgcggggctccgtggcgccagcccccggcgcgaaggccaagagcttggagggcggcggtgccgggccggtggactaccacctgctgatgatgttcaccaaggcggagcacaatgccgcgctgcaggccaaggcccgcgtcgcgctgcgctcactgctgcgcctcgccaagttcgaggcgcacgaggtgcttaaccttcacttcgtgagcgaggaggccagccgcgaggtggccaagggcctgctgcgggagctcctgccgcccgccgctggcttcaagtgcaaggtcatcttccacgatgttgctgtgctgacggataagctcttccccatcgtggaggccatgcagaagcacttcagtgctggcttgggaacctactacagtgactccatcttcttcctctcggtcgccatgcatcagatcatgcccaaagagatcctgcagatcattcagctggacctagacctgaagtttaagaccaacatccgggagttgtttgaggaatttgacagtttcctgccaggcgccatcatcggcatagcccgggagatgcagccagtttacaggcacacattctggcagttccgccatgagaacccccagacccgggttgggggcccgccccccgaggggctgccgggcttcaacagcggggtgatgttgctgaacctggaggccatgcgccagtccccgctctacagccgcctgctggagccggcgcaggtgcagcagctggccgacaagtaccacttccgcggccacctcggggaccaggacttcttcaccatgatcggcatggagcaccccaagctcttccatgtgctggactgtacctggaaccggcagctgtgcacctggtggagggaccatggctacagtgacgtcttcgaggcctatttcaggtgtgagggccacgtcaagatctaccacgggaactgcaacactcccatcccggaggactaggcgctccccgtgccttgcccccggggcctccagatctgggggaaggacagggttccttgggacagacccaagggcagtgtctgacccgctagagagacaccgcagggaagtcctgtgattaaggtgctgagacctcctgccgggcaggtcactgtgctgaggccacccgccaaggactggcctgtgcactgctggtgcttgggaccttattcctccagggagcaggcgacacaaaggacacgcatgtccagtgggctgggaagcaagcacttgaagagaaggaaggggagaaagggtcccccttgctgtctgcctctgaggaatggaaatcctttagacccggccttttttggaccaatataaatttaatttaaattgacagccttccatttttcgagaaagtacaaacagaactgctttagcacccatcgagccccaaacgggtaaggtaagccaaggttttaatgaccagcccagtatctaagcttccaaacgaatgccagcccatcacatactcaccctgggaggctgctgcacgcgcattctcctgatgctcacgtcacttggtgtaggtttcaggatcgcctctttgaggaaggacttcaggaccaactggggcctgcataagaaaacccattgtcctttattccaccaaaccagctccaggtgaccagactctactcagaaagcaaattcgtcatcaaagaacagagactggccaccacaaggacatgcaggagaactgtcgggaccaggaagactcattccaaaaagcccaggccgggcacagtcgtcaagcctgtaatcccaacactttgggagaccgaggtgggggtatcgattgagcctcggaggtcgagatcagcctgggaaacacagggaggcccccatcgctacaaaatattttaaaaattagccaggtgtggtggcttgtgcttgttgtcccggctacttgggaggctgaagtgggagggtggcttgagtccaggagttcactgcactgagctgtgatcacaccactgcactccagcctggacgacagagtgagacgtccatctcaaaaaaaaaaaaaaaaccaaaaaggaacccagcaattcccaagtgtgaccatgtgggcttggaagacatgtcactcatgggctagtaagcattctagtttctttgtttaaaaaatccccttatcataccacgttagaccgtagaccttagcagaaattaaagcgtcatttcttttgatggggcctcctgtacgtaggctgcagacgtgaaagccccaggggtccatttgtatcaattttcatcttgttttgttttgatttcatttacgtttttctttttcccatgagtgaggatagccaataaatcatctttgagaacatggtgattcatgttgtttgttctctgatcacagtttcagctgcatgaaggctctgaatcaagtgtgtactcaatgccattggaatccccacctcccctgatgaagatgagtgcttacaggagatcctaaggaccaaggagagggcacatctgagagggtgtcagagagggtagtattggcatgtttggttcaaagcaaggaatcatttcattctaggtattggcaggtccacctgcactggggagcaaaagcatccccatttcttctcatccctcttaccctagactgcccagttacatcctgccctgaagaggtggagcagatatctttcccagccctctgctgtgacagaattggtctgttctctcacctacttgatttcctatttataggtaacaattcttgaatgcctgctgtgcaccagccattgtattgggggatttattacgctattgataatgtttatgaaaacttcatgaa

SEQ ID NO: 92704 - DNA, 678 bp, Homo sapiens
aaattgcatgctggtactggcctgaggtttattggatcgccggggctaagtggccgccggcgtccgggtacccgagggctctcccgcggcgctggccgtctgcgccttctactacctcggctcaggccgggagaccttctccagcgccaccaagaggctgaaggaggccctgcgccggggctcccgccgcgccctcgccgcccgcgctggagctagcgcggggctccgtggcgccagcccccggcgcgaaggccaagagcttggagggcggcggtgccgggccggtggactaccacctgctgatgatgttcaccaaggcggagcacaatgccgcgctgcaggccaaggcccgcgtcgcgctgcgctcactgctgcgcctcgccaagttcgaggcgcacgaggtgcttaaccttcacttcgtgagcgaggaggccagccgcgaggtggccaagggcctgctgcgggagctcctgccgcccgccgctggcttcaagtgcaaggtcatcttccacgatgttgctgtgctgacggataagctcttccccatcgtggaggccatgcagaagcacttcagtgctggcttgggaacctactacagtgactccatcttcttcctctcggtcgccatgcatcagatcatgcccaaagggtaacctgggcttccaggagcaatagccc

SEQ ID NO: 92705 - DNA, 1137 bp, Homo sapiens
  misc_feature (943)..(943): n is a, c, g, or t
gtatcattctgtgtgccattgtactgtaccagtgtattaaaatttgtttaacttaatgatgaaaaattgctttaaatttttcagccttatcttttttttttatttttttgagacagggtcttgctctcttgcccaggctggaaggcagtggtggggctcaatgcagcctctacctcctgtgcttaagcaatcctcccacctcagactcctgagtagctgggactacaagcatgcatcaccaaacctggctaactttaaagaaatcttttttttgtggagacagagtctccctatgttgtctaagctggtctcaaactcctgggctcaagtgatcctcttgacttggcctcccaaagtgctgggattacaggcgtgtgccaccacacccagcaagttattcggcattattaacaactcttttgttcccccacttctctattttcttaggataaattcctagaagttagatggctgggtcaaaggaccactatacatgctttggaaaggtttcaaaaatctatgctcctgctagtgtttcctcacagccatttctgtcaatctgatagtggaaaaaaccaacatggaattgttttgtcttgcatgactgagtactaactgaggctgaaagtcttttttttttctaaagtcccaattttattgagcatttgcatttcttcctttgtaaaccgcctgctcttgaccttcgtccatttttgctatcaggctattttgtctttttttttttttcactgatttaaaaaacttccagatattatagatacttattcttcttaaatgtctgcaagtacttcccccactttgttatttctcttttaatatgttcagaaaaaaagaatgacatagcaattaagaatcaccatgtcggcctggcgcggtggctcacgcccggcccattgtcaatgttttaatgtgtgcccttccngatttcttcctctacaaggcttgcttgcacacttaagcatgcacatgcatgcaaattgttttacaaaaatgagatcacactgaacatgctactttgcaccctgttccctttggttaataaatatgaagaacattcagtgtcaaccattacagacgtaacatcatccttttcagagtcacacagttttatagacc

SEQ ID NO: 92706 - DNA, 217 bp, Homo sapiens
atcattcctgattccaaaatgcatcctcttttagggataggtgaccataatattataatgtcatctcacttaggcagagtcatcttccttaaatgagtcaactcatggaagacaaacaccaggtgggtatgtctcagtgctcagtggtgattcaaaattttgggccaaacacagtggctcatgcctctaatcccagtactttgagaggccaaagtag

SEQ ID NO: 92707 - DNA, 919 bp, Homo sapiens
ctgctcagacgtccctcgggcacggaagacggtgcacgttaatcacccacacacacactatgagggtaccaggccaaggtcagagtcctgcaggatggggaaccgacccctaagaactcctgagctgggtcaggtcagggtaccactgtgcacaaacaggatggtgtgttcacatcgcggtcatcagtggggtttgtggagctggggttctctcctgcagcttcaagatcctcaaccaggacaccagaatttgcttgtctacttgtgccgtctcaggttaatttatgtctatgacatgaatctccgctctttacatggggcaccttgagcaggtgaaacctgcaggccccctcgtggtgatgatgagtgggagccctaagctgctcccccaggaactgcacctcttctctacctcctcagcccagatgaaccatcccaatacctctcctcagtcaccctactttgctctcccaggccagacattgggtgctcctattagaagagggagaggtgacctaggatacaagttgaatcccaaggaattgggggacaaagaaagcaactaaaagactgatgagatgaggagaatggccaactagtggcaaacaagagtggcttatttgactgtggctccctaggtcagcatcctgggtactaatatgtcattccttttaaatctaagattacagtacaaccaagacatggcagaagcattatgaccaagccagaagcatagtcctaaggatgttttgacctcaataaactaaccacatacatgcttccagactgaaacaatggagggatatttgcatcagattgcacagaggttattaaaacagatcaatacataataatggggatctagaattaaatatatttattattaaactccctgatgacacacaaaaaaaaatctctg

SEQ ID NO: 92708 - DNA, 643 bp, Homo sapiens
ctcccagagatgcatgtattcgattggagggaaaaccagtctacgatcctctaggcttgagttctctcacagctggcctggtagggtagactgtacgcattggagccacacagaatggctcgagctctgatcctcgaacaagtctgagtgaggcctgttcatttgagcctgggtttccttgcccaggcaaatgtgctcaaatacgtcaggcacgtagcacattgtaagtgcgtgccttccccatccaagcctgggtctctgtcccttgcgctcccagctagtgttattcatggaaagtacacattcttttctgcatatatattagatgcctgtgattggctgttgccagaacatagtataggaagttggtatacaaaacaaaatatgtactgcctcactctggaaatcagggaaatgataaccgctctgctaatacctcaacctcggctcttagaggagcacaggtgatctcctgcctcagagcccatagctttccagaggtgcctgcaaatggaaatccatgtaccaaaccctgcttccctgtcgacttgtggcatggaatttgagattctttccatttagcaacacctctgcacaaggacacgatgaaggccaaagagactcacagctcttgtgtaaacaa

SEQ ID NO: 92709 - DNA, 261 bp, Homo sapiens
ataggatgagtgccgttgtaaagagaccctttgcccattctgctgtgtgaggacactgtaagaaaggaggcagtccctcaccagacatagaatctaccttgattctggacttcctagcctccagaactgtgagaaataaattcgtgttgttcataagccacccagtccatggtatgttgttacggcagcccgaacagatcaacacagcgtgcacgttccttgctgctgtttttgagccttgcccattaaaaaaaaaaaaaa

SEQ ID NO: 92710 - DNA, 317 bp, Homo sapiens
gcggccgcctactactactactactactaattcgcggccgcgtcgacaagaaaggtaaaatgttggattttaagcaaagtaggattgaccagagactgttctgactttgacattcagacctttcagatgttcttccttcagaccagtccaagacactcagcatttccagccaagttgtcttttttttctgccaataaagtattcattagttgacgtttgtttgtattttaagtaaagtcaattttttttaaagcattaatttaattcacgggtatgcctttcatttctctggccttcagttggtttaaaaaaaaaaa

SEQ ID NO: 92711 - DNA, 1199 bp, Homo sapiens
  misc_feature (29)..(29): n is a, c, g, or t
ggctgtaccgggccggagtgcgttagggnttggcaacatcatgattattaatccgtcagcctttaatgtggtcactgtttcttatccagaccctgactttctagtagtttattttgctagcccagatttctgcttaaccaaatataagggagtttcagaggggtgatcttagctgtcacctagattctgtcagccaaccagtgattgtctggaatatcttaggaaatgaactgtaattgtcagcctcctaaaatcaatttttttttttttttttttgaggctgagtcttgctcttgttgcccgggatggagtgcaatggtgcgatcttggctcaccgcaacctccacctacagggttcaagcgattctcctgcctcagcctcccgagtagctgggattacaggcatgtatcaccacgcccagctaattttgtatttttagtagatacggggtttctccattttggtcaggctggtctcgaactcccgacctcaggtgatccgcctgccttggcctcccaaagtgctgggatttacaggcgtgagccaccgcgcctggccaaaataaaatgtttttatctttcttcacttagaactatgaaggccttttcttgttctggtaaccccccacagtgtaattggtgctgaaaatagtttcgtgcctgaggtctgttgtcactcactcactttctgacaattaggtgagccacttgaggattttctggcctgaagttataaaaacttggcatctgtcctaaggtaattgtaaaggcaaaatgaaagcattgaggtgaatttaggttatatggcatttatctggtaatgtgtttcagaaaagctagaatgaaaatgtgatgtaagggatagcaagtgtaggttgattcataattcttggtataaaaccaagttttccttagtcttgaggaatttgaagaaaggtaaaatgttggattttaagcaaagtaggattgaccagagactgttctgactttgacattcagacctttcagatgttcttccttcagaccagtccaagacactcagcatttccagccaagttgtcttttttttctgccaataaagtattcattagttgacgtttgtttgtattttaagtaaagtcaattttttttaaagcattaatttaattcacgggtatgcctttcatttctctggccttcagttggtttaaaaaaaaaaa

SEQ ID NO: 92712 - DNA, 959 bp, Homo sapiens
  misc_feature (29)..(29): n is a, c, g, or t
ggctgtaccgggccggagtgcgttagggnttggcaacatcatgattattaatccgtcagcctttaatgtggtcactgtttcttatccagaccctgactttctagtagtttattttgctagcccagatttctgcttaaccaaatataagggagtttcagaggggtgatcttagctgtcacctagattctgtcagccaaccagtgattgtctggaatatcttaggaaatgaactgtaattgtcagcctcctaaaatcaatttttttttttttttttttgaggctgagtcttgctcttgttgcccgggatggagtgcaatggtgcgatcttggctcaccgcaacctccacctacagggttcaagcgattctcctgcctcagcctcccgagtagctgggattacaggcatgtatcaccacgcccagctaattttgtatttttagtagatacggggtttctccattttggtcaggctggtctcgaactcccgacctcaggtgatccgcctgccttggcctcccaaagtgctgggatttacaggcgtgagccaccgcgcctggccgcctttctctctttacatcgacccacattagtgttgtgtagttttagttcctgaagatagggatggtcaaagatctgtttattgatgtttcagggttgttttggagatggactgtttttattttaaggaatcagacttctaatatttgccagtggttagagtaagagccgtccttctttgcgcttctcagcatcttctgtttcacagtctttggcatactctttacgatagcgttgtcctttgtttgggtgtctttttttgctgctgctgcagtttttgtgtcacatatcctcagagagattcggtgatgtcctgcttctccctcttccgtggtctattctttccgtcgtgtggtctcgtcctcttcactgtgaatggctgtgaggaagtgacagatgaa

SEQ ID NO: 92713 - DNA, 338 bp, Homo sapiens
tgtagggtccccctcatctgccttacaccctggaagaaacagaggcctctgacctcactctttcctaaagagcagctctttcaatcaacagactttcactggaacacctaccttgcaccaactattctgaattcagagtccatctcttctctctgggaatgtacaggctaccgagacagaaccatggaaacaaaactggaatgaaatatgattactgtaatagagatcccccaaaaggaagaccacagagaagaggagtgagtgagaaggttccaagaaccaactctccctccaaactcaccagccaagtacctaaacccatatcagcatagaataaa

SEQ ID NO: 92714 - DNA, 1277 bp, Homo sapiens
ggcacgaggagcaagctcggtggctgggtgggttggggcgttccgcgcgcccttcattgaagcggcggtggccgggctgggcgccggtagtggaaagcgacggcgcggctggaaaatgccagtccattcccgaggggataagaaggagaccaaccatcacgatgagatggaggtggactacgccgaaaatgaggggagcagctccgaggacgaggacactgagagctcgtcggtctccgaggatggagatagctcagaaatggatgatgaagactgtgaaagaagaagaatggaatgtttggatgaaatgtccaatcttgaaaaacagtttaccgatctcaaagatcaactttataaagaacgattaagtcaggtggatgcaaaactacaagaagtcatagctggaaaagcaccagaatacttggaaccgctggcaactttacaggaaaatatgcaaattcgtacaaaggtagcaggaatctatagagagctctgcttagaatctgtaaagaacaaatatgaatgtgaaattcaagcttctcgccagcattgtgagagcgaaaagctgttgctatatgatacagtccagagtgaactagaggagaagataagaaggcttgaagaggataggcacagcattgatattacctcagagctgtggaatgatgagcttcagtcaagaaaaaagaggaaggatcctttcagtcctgacaaaaagaagccagttgttgtttcaggtccatatatagtttatatgctacaagatcttgatattcttgaagactggacaacaattaggaaggcaatggctacattggggccacacagagtgaaaacggaaccacctgtgaaactggaaaaacatctgcacagtgctagatctgaagagggaagactatattatgatggtgaatggtatatacgtggacaaacaatatgtattgataaaaaagatgaatgtcctacaagtgctgtaattacaacaattaaccatgatgaagtttggtttaagaggcctgatggaagcaaatctaagctttacatttcacagctacagaaaggaaaatattcaattaaacattcataatcatgatttaagtgttatctaaatttaccttattagtgttaccaaatgtaagtgccatgagagtaaaaaaatgtattcaataacttaatattctcactgaatcatgagagaatgtgtatttgtaggtagtactctaaatagatctcattgatatgttattaaaagaaacagtaataaaaattttatcacg

SEQ ID NO: 92715 - DNA, 359 bp, Homo sapiens
  misc_feature (39)..(41): n is a, c, g, or t
  misc_feature (77)..(77): n is a, c, g, or t
  misc_feature (80)..(81): n is a, c, g, or t
cgggagcgcccgccctggcccgaggggttggtatttttnnngccaactcggtctgtaaacacattttatgaccatgnagnnaatttggtttaagaggcctgatggaagcaaatctaagctttacatttcacagctacagaaaggaaaatattcaattaaacattcataatcatgatttaagtgttatctaaatttaccttattagtgttaccaaatgtaagtgccatgagagtaaaaaaatgtattcaataacttaatattctcactgaatcatgagagaatgtgtatttgtaggtagtactctaaatagatctcattgatatgttattaaaagaaacagtaataaaaattttatcacg

SEQ ID NO: 92716 - DNA, 1871 bp, Homo sapiens
tgttatttaagaaatatttttaggccttttttacatatgcatggattgatgttaattgttaatgttctgaccctttgttcttctgacagtgttttattaatataacagtttttgaactgatccctttagcacctgtgaaactggaaaaacatctgcacagtgctagatctgaagagggaagactatattatgatggtgaatggtatatacgtggacaaacaatatgtattgataaaaaagatgaatgtcctacaagtgctgtaattacaacaattaaccatgatgaagtttggtttaagaggcctgatggaagcaaatctaagctttacatttcacagctacagaaaggaaaatattcaattaaacattcataatcatgatttaagtgttatctaaatttaccttattagtgttaccaaatgtaagtgccatgagagtaaaaaaatgtattcaataacttaatattctcactgaatcatgagagaatgtgtatttgtaggtagtactctaaatagatctcattgatatgttattaaaagaaacagtaataaaaattttatcacgatccttacgttgatttgcctcttaggtccgatgaccaataggtattctgtatatggtaggggtttctttctaaacatttttctttggttttaaaaaaagttatgcaaatttgtcttatctttagtaaactatgactacatttatctgcaatttttaaaattttccatatctttgtcattcattgtgtgtttgtaaataaggccgatagaatgtttcctataaatggtttgtactagtacattagtgttaaaccagaactgaaatttaaacatatatatatatgaggatgtatatatggcatcatcagcttatttagaactgatggccataccttacaatcttgttttacccaaaattaagctattggggttgaaagctaaaaggagcacttttgtagaatagcaacttttcttttcctctttcttgattgtatggtggggtggtgacctatttttacaaattatacctaatgagtaaaattagtgtaaagtgataacatgcttctacctgtatttctagtgaccctttagcggcaggtatttatacctggtatttatgatgcagtatataagtggtgaacaataactgacagtattgtgcttgctgtacatgtctggtcttttgaaacagattttagtaagcattttccagaggtaaaactgtgtccttattctaattttattcctagggcaaagtagacagggattatttccttgaatctatttccaaattaatatttttttctttggtatttctacactttaaggccatttggtgcaatttagaaagtgttggcctcccttccgctagccacattcaaaattaacttccaaaacctcaggaacagtacaaagaattgaaaccctcaatatggcagcacagccggctgtagtgtatatttagggtacaccaaatcaggtattcctggtggtcttgtgcactttaatttctgttacaatgagttaagaggatgaggaagaaatctacttattaacacttactgcagaaatgtctgcattattccgtttgttttcttattattttacctctccaaacatcttcctgtgcagatcactacttcatagttgccaaattttaaaacacttaactgctgaaattcagtgtcagcaaagtgatattacgttgttctgtttctaattaaccttagcaaatgtacataatgtcaaaacccaatagtatttgacagtacttatgtatacaatgtttgataagcatttttaataagatttgtatttttaaatttagtatataataaaaagatgtgtttcagtgtgaaaagtagtgtc

SEQ ID NO: 92717 - DNA, 2584 bp, Homo sapiens
ggcacgaggagcaagctcggtggctgggtgggttggggcgttccgcgcgcccttcattgaagcggcggtggccgggctgggcgccggtagtggaaagcgacggcgcggctggaaaatgccagtccattcccgaggggataagaaggagaccaaccatcacgatgagatggaggtggactacgccgaaaatgaggggagcagctccgaggacgaggacactgagagctcgtcggtctccgaggatggagatagctcagaaatggatgatgaagactgtgaaagaagaagaatggaatgtttggatgaaatgtccaatcttgaaaaacagtttaccgatctcaaagatcaactttataaagaacgattaagtcaggtggatgcaaaactacaagaagtcatagctggaaaagcaccagaatacttggaaccgctggcaactttacaggaaaatatgcaaattcgtacaaaggtagcaggaatctatagagagctctgcttagaatctgtaaagaacaaatatgaatgtgaaattcaagcttctcgccagcattgtgagagcgaaaagctgttgctatatgatacagtccagagtgaactagaggagaagataagaaggcttgaagaggataggcacagcattgatattacctcagagctgtggaatgatgagcttcagtcaagaaaaaagaggaaggatcctttcagtcctgacaaaaagaagccagttgttgtttcaggtccatatatagtttatatgctacaagatcttgatattcttgaagactggacaacaattaggaaggcaatggctacattggggccacacagagtgaaaacggaaccacctgtgaaactggaaaaacatctgcacagtgctagatctgaagagggaagactatattatgatggtgaatggtatatacgtggacaaacaatatgtattgataaaaaagatgaatgtcctacaagtgctgtaattacaacaattaaccatgatgaagtttggtttaagaggcctgatggaagcaaatctaagctttacatttcacagctacagaaaggaaaatattcaattaaacattcataatcatgatttaagtgttatctaaatttaccttattagtgttaccaaatgtaagtgccatgagagtaaaaaaatgtattcaataacttaatattctcactgaatcatgagagaatgtgtatttgtaggtagtactctaaatagatctcattgatatgttattaaaagaaacagtaataaaaattttatcacgatccttacgttgatttgcctcttaggtccgatgaccaataggtattctgtatatggtaggggtttctttctaaacatttttctttggttttaaaaaaagttatgcaaatttgtcttatctttagtaaactatgactacatttatctgcaatttttaaaattttccatatctttgtcattcattgtgtgtttgtaaataaggccgatagaatgtttcctataaatggtttgtactagtacattagtgttaaaccagaactgaaatttaaacatatatatatatgaggatgtatatatggcatcatcagcttatttagaactgatggccataccttacaatcttgttttacccaaaattaagctattggggttgaaagctaaaaggagcacttttgtagaatagcaacttttcttttcctctttcttgattgtatggtggggtggtgacctatttttacaaattatacctaatgagtaaaattagtgtaaagtgataacatgcttctacctgtatttctagtgaccctttagcggcaggtatttatacctggtatttatgatgcagtatataagtggtgaacaataactgacagtattgtgcttgctgtacatgtctggtcttttgaaacagattttagtaagcattttccagaggtaaaactgtgtccttattctaattttattcctagggcaaagtagacagggattatttccttgaatctatttccaaattaatatttttttctttggtatttctacactttaaggccatttggtgcaatttagaaagtgttggcctcccttccgctagccacattcaaaattaacttccaaaacctcaggaacagtacaaagaattgaaaccctcaatatggcagcacagccggctgtagtgtatatttagggtacaccaaatcaggtattcctggtggtcttgtgcactttaatttctgttacaatgagttaagaggatgaggaagaaatctacttattaacacttactgcagaaatgtctgcattattccgtttgttttcttattattttacctctccaaacatcttcctgtgcagatcactacttcatagttgccaaattttaaaacacttaactgctgaaattcagtgtcagcaaagtgatattacgttgttctgtttctaattaaccttagcaaatgtacataatgtcaaaacccaatagtatttgacagtacttatgtatacaatgtttgataagcatttttaataagatttgtatttttaaatttagtatataataaaaagatgtgtttcagtgtgaaaagtagtgtc

SEQ ID NO: 92718 - DNA, 141 bp, Homo sapiens
aagaagagataccacgggtgcacctgcacagaggaaaggccacatgaggacacggtgataacacagccatctgcaagcccgtaagagaagactcaggagaaatcagacctgccaacacttgaacctccatcctcctgacct

SEQ ID NO: 92719 - DNA, 314 bp, Homo sapiens
aaacttgtagattgagtcccagaaatactgttagtgcacttaaattataaaactgtttacctgaagcagcactgagcaatcctttggatatacttttacctgtttttattctaataaaaatgactagtacaaggaaaattagttggtttttagcctgaattgtatgttttgatttgatttttatttctccacattattttgcttgttagcttttcttcaaaccagtatcacaaatggatgctgtcttcactcagacctgactttggtaaatgaaatattatgttctgtaataaatatgaccttcagtcatatag

SEQ ID NO: 92720 - DNA, 435 bp, Homo sapiens
gtattttttttttgagacagattctcactgtcgcccagactggagtgcagtggtgcgatcttggctcactgcaacctccacctccaaggttcaatggattctccagcctcaccctcccaagtagctgggactacaggcaagcgccaccatgcccggctacttttttttttagtagaaatggggtttcaccatgttggtcaggctggtctcaaactcctgacctcaaatgatctgcctgcctcagcctcccaaagtgctgggattacaggcatgagccactgtgctggccctaccatcctctttttgcattcccagaacacaggctctagtgcacattagagactcagtcaacatttgttgacctcaacagcaaaggtaggctatgggattcagaagataaaatgatgtaggaaagaatgtcagcttcatagattg

SEQ ID NO: 92721 - DNA, 860 bp, Homo sapiens
ccagagtgtcctcaggggcatgagaagacaagggggtcaggagaggggcaaatggagaaaagccacagtgacacaaattcctgcttagattagtgtgacccaaatatatccggatgcctcaaggccattctcatccacgtcagcacttaaaactaaaactgcaactcaagcaccaaagtaattggtgaataatatggaatttgctcaagatttcagaggaagtggcttatatctatactacacagcaaatctttctaaaaatcccttttaaaggtttttcttcttcacccatattccattccctttagcaactctgtacttccctattctccttccatacccctctcctctgtcttccccttctgtttcctcccttgtgttcatcactattttagaggcttaaaacacaagcgtctttactattttaaataatatgtatatatgtgtgtgtaacatgaaacttcccattttaactattttaagcgtacaattcagtggcattaaatacattcatgaaattaaaaaattcttttgatatataacagatgtacatattttcagggtacatgtgataatttaatacattcatatattttataaaaatcaaatcatgtcattaggtatcctttacctcaaatatttctttatgctagaaacattcaaattattctcttctattttgaaatatacaatagattattgtaaactgtagccaccctactgatctattgaatcctaggtcttatttttcctgtcaaactgtatgtttatacccattcatcaacctctctttgtcctccccccacacttcctggcctctggtaccactaatatactctctatcttcatgtgatccactt

SEQ ID NO: 92722 - DNA, 260 bp, Homo sapiens
gggcaccaagatgctataagatggagaaaaactaatccatactttttctagacaatattgacctatagattattcagaagggggacatgctgcagaaatgtgcagcgctttaccaattcgcatgtaacacaaaaagttccaagataggcttgtttgcagctctccatgagattatagtctgtgcaatacgatgatgagaattttgaaatactgatagaactttatcaggtatttatgataaaatacagcattgtggagaa

SEQ ID NO: 92723 - DNA, 626 bp, Homo sapiens
caaaccatatttacgtcagtctttactgtctgtctcaaacactttcacatccattattccattaatctctcacatgaggagcccatggaaataattactattgctgcattacagagagggaaaccaggctccgagaattcgaaacactttcctaagagcactgttcagtcagcaagagattcctgccctgaccccagaacccaagtgctcctaagagaacagcactccacttgaaagatacaagataatcacagctgagattagagaagccaaaacataataaaggataatattataaaaacaatgacagtcctttcctgtgcatggttatctctggaaacataatcaggaataacttttgtctctggccaaagaagaagttaggaaagacttactattcttttgtttaaaatttataccatgcacatatattacttattcaacaaataaggttttcaaaagttgccaaactaagatgatcaagtgaaagcaactcccaccagtaagaattgcctctctctcaggaaagatttcacatagctccaatggttctcaaggaaaagagagccaggtagagcgagagacaggtagagcgagagacagtaaagcgaaggcaaggtaagcga

SEQ ID NO: 92724 - DNA, 455 bp, Homo sapiens
ctacatggattatgtctttatttggcagcaatgcaaataatacctgaggcagatacctctctccaagacacaaaaaaaatttaataactttcttaaggtcagagcctagcatcttaaccactccaccatactggctgttccctttccatgacaaaaaacccaacctggccggacgtggtgactcatgcctgcgatcctggcactttgggaggccaagacgggtggatcatttgaggtcaggagtttgagaccagcctggccagcatggcgaaaccccatctctactaaaaatacaaaaattagctgggtgtggtggtgtgtgcttgtaatcccagctactcaggaggctgaggcatgagattcgcttgaaccggagaggcagaggctgcaatgagccgagatcatgccactgcactccagtctgagcaacacagcgagattgtctcaaaaaaaag

SEQ ID NO: 92725 - DNA, 464 bp, Homo sapiens
aaaatacatatgtaaatgttgactacttatatatattgagaacacagattattcactcaccccatacgccctgtgtcattaacaaagactgatagtgctctattgtattggatatgtaaaagagacaggcagcagaatgtttttatgattcaaaaatacattaaagaagataattgtgttagaaagtgcaagattacttgaaaaaagataactgtgaaattgtactcaataagaaacaaaaattatatagtgcgatctattacaatatttacagtataaaagtggagtactttgtactatgtattagatgggaggtattaaatattctttattttcacaagggaacctgtctgtctttatatagaagtaagtgctcagttacagggacaggttaatattgagaggtgtttttaattaaaaacaccactgcttttggctagtaaattatctgtgactcttttagt

SEQ ID NO: 92726 - DNA, 390 bp, Homo sapiens
cggaagattgactctccggaagattggaccgtcgccgtgaagattggacctctccggatgattgtacctctttggccgttgattgtctttgcatcctgagtgggactatctcacggcgtcatacgttctgaccgaaagagtgacatgatctcagttacattttagtaaggccaccgtggctgccagaatagactgaatggcagggattgggaggtcgggatgggaaggaccaaaatacaatcacagagaactgctgcagctgcagagagctgttgcagtgatccaggggaggaatggtagtagctggcatcaggatgctagcaggagaggtggagaaaagaggttggattccggatatattttgaatatagagataacaggaacagaggt

SEQ ID NO: 92727 - DNA, 176 bp, Homo sapiens
tccatccacccatcccccatacatcttcattcatccatcctcctcatccatcttgaggtaaaaatgtgaggcctgggaaggctgttgaaagggctgttttgggagtcagaagccctgagttttagtccaggctcctctcacatatagactgtttgaccttgtaagtcacctcccca

SEQ ID NO: 92728 - DNA, 261 bp, Homo sapiens
gataaagagcagagctgggggtgaaaattcccaagaacgaagaagtagaaggacgtggggaggaaaggcccacttcgcccatcccctctaggttttgcttggagctgtggctggtttgaccatgcctcagaggtcaggccctcagccccccgactggctttggggccaatctcaatgccacctccagggtagacttgacctgcgtgcccccatctaccctggccctgatctccctttccccagccctaccctcatagacgg

SEQ ID NO: 92729 - DNA, 1589 bp, Homo sapiens
  misc_feature (785)..(785): n is a, c, g, or t
tctcttgcaaaagaaacctagtgatgggcagtccagggttggcttggcagttccacagtcatcagagactcttgattccttctatctcggagtcatatattggtcctgcatggcttttggaactcctgccctcgcatctgctgctgagtcagcccccttaaggagctttcttggaagccacaccctgaatggctcctacttaaatctcaccagccactccaagctgcaaaactggctggggaattacatgacttagctgagtattttgttgcttagaataaagttgggctttaagtaaagaagaattgaagaatggttattgggatgggcaatgaacagccatttgtactctcattaagttatggaaattcccattccaaatcgtgcagtttggtgggaatgcctgatagcagttgtaggcagttcctttttttgtgagatagctgattcatattttcagtcagccatcctcagagtgtggggaatgtttcctctcagggtcacagggtgatctcagcaattctaggtgttatgtgcagatatgatttccagggaagaatcatcaggctatttctcctgagtctctcctcttattagggaggaatagctttcccagaaacatgtgccagctctctccactcccaacttcccttaccttccatctgccaggattaagtcccatgttcatggctaaaacaacaaatggtcagtggaaggaaatcatgatgattggatttgaccgtggagcctggaaggggtgactttctctgagatgaaggtgaatngctccacaaaattagggttccaatacacagagggaggagggaagaatggatgttaagtaggtagccaatagtttgatatgtatatatattatatatatgaatatatataatttaaaaatgttttttgtttaagatctttgttgatactatgaataaatatctcattatgcaacataaacatgtttaaaattatgaaaataacatgtgtatggtaaaaataattcagtactaaaaggataaataatgaaaggtgaatctttgttcaacccaagatcctagtttcactccttaaaggcaatccttatcaagagcttttgtgtatttgtctagaaaatattcatgtttatgtaattgttttgacacaaatatgtgcatattagacacattgtactacatcttgctttttaaaagttaatagatatattttggagtttttaaaatatcagtatgtaaagatggacagcacccttatttatgactttgggacattgcatagtacagatataccatgatttatttaataattagcctattaatagatatatagatatttaggttgttttcatttctgaaaaaataactactaacattagagacctccttgggcatggttatgggtattggatacattcttgggagtagaattaagtcacaggatatgtacattttacattttgctagttctagccaacttaccttcacaagggctgtactaatttgggcttccactagtagttacagagagggcattgagattcctaatgctggtcagtcaatggctcacatcttagcaaatatctgcag

SEQ ID NO: 92730 - DNA, 123 bp, Homo sapiens
tcagctgagctgtggcctctgtgggcgagcagggcggacactgggcagcaccagagccaagaggacagctgtaggggcggggaaactgactgactacccctgtatctactcctgaggaccctt

SEQ ID NO: 92731 - DNA, 213 bp, Homo sapiens
cttgagtgaaaaatgacacaatccaaagtaggtggcagattggttctcactcaggcagaccctggagacacctctcccgcttctgactcaggggagagtgcggtgacataaaccaccttcttctgctctaggccagcttgtaactgttcagccagccagccgtctcctaactctgtgacccccggcccaagaacagggctcctgaaggccccg

SEQ ID NO: 92732 - DNA, 1491 bp, Homo sapiens
  misc_feature (27)..(27): n is a, c, g, or t
cgagcgcagtgtctgggattcggcttntggcaatccacgcatggcactgagccaccttctcagacatggaagcagcctccttgtctagaactagttgtcctgatgatatacagactctaaggaagataaaagtccctttattctaccacaccaagccctgtcctgggcctgctgggccacaccctgcaacccagtgctttccctcagatttattttgttttagctccacagctgccccctgaattcattcagctactgtttcctttaccaaaacttgctccaggcagcagatctaaaagatcagcttacttactactccactgttatttactctaatgtggattaaagtcagcactgtttatcccagaggtatttacatttggagattctggtttggtgaggaaattaccagagaactattaaagacttggatgctcttctcggctttgctattaagtaagttggacaagttgtttggcttctttgagcctctgttttctccattctaaaattctaaaatgggagtgttgaattagatcagtggctttcgaactttctgctcctagtagtgagaaatacattttactccactccctggtatgtacacgcattcctgtgttttgtgaaaacctgacaccatgctcctccctcactacatgtaaaacacttttattcattaaaaagaaaactgactggcttggacctacaaattagtttcattatttgttaatgtttgaaagccattaaaagatgaatattaaggtttctttatactcaatacttgtagttttgtttgggggaatgagaggatgcccttggtacctttgtgaggcctctccactgagggtcaatcatgacttctgttttaaaccagcccatcccatcttctccagctgctctccttatgtcttgcttctctcccctccaaccttctcagcataaggactcaatcctaggctcctaccccagacgggtgccttccaacgttcctggtgccagtggccccccatcagccatgttcccccagccccttctccacactcttgtcacccagggccccatccttcagtgcattgcacactttgcatgctgggtcagggaagattgtggagagaggacagtgcacctggtttcccccacatagactgcgtgggggtatgtcctgcttccgccacttccaactgtggcacttgggcacgcccctctcagggcaccttccctttttgtctccgcaaaatgaggttgtaatagtgcctgccgcactgtctggcacacagtaagctctcaagaaatgttagctgttgttgccgttagaacaccatagctagaataccatacctggcattcacttaaaaaaaaaaaaaaccaacttagggccaggcgcagtggctcacgcctgtacttccagcactttgggaggccaagacaggcagagcacctgaggccaggagttcaagaacaggctggccttgtctctactaaaaatacaaa

SEQ ID NO: 92733 - DNA, 454 bp, Homo sapiens
  misc_feature (424)..(424): n is a, c, g, or t
ggacgacgatcctctgtgcaaatgcccccccccacgcgctccctgcctcccccgccctcctctccggggtttcgccgttcctcctgcaggcgctcagacgtagttaaatgtggccttaaggactaaccgatcgctctggtgtttgctctttcggcggaagtgatagagtaaggggaacattaaacatgaggttcttttggcgggggtgaggggtgtcgcgcacgcgactctagtggccctgactgaagccaaggacagcagcctgttccccgggagggaagagttgtcgatccgttggggaaacgccctcccgggctgggctctccgggaagaggtatttacatttggagattctggtttggtgaggaaattaccagagaactattaaagacttggatgctcttctcggctttgctattaaatntcttcagggaccatgcatctggaggaagga

SEQ ID NO: 92734 - DNA, 871 bp, Homo sapiens
taaatttattcaattccaacgtataaataactctgtaaagacattttatcagtttccctgggctgggatatttttagcatatcaaaggaaaacaaaaaagtcctcagattttgaaaagtaatggattgcattgccttaaacccttggaccctgtccaccttctgtctttgaactgaactggaattattcctctgtttgtgctagaatgtgtgtccgcagagctgggaagagatggagatacatatcccacctcttataatgtgaggccctaacctaggttataattaaaagtttgggagcaggatctacaaaggccagctggaaggacaatttcttagtaaaagcaaagtgatgtctttggttacaggaggaaagggaaagacaaaacataccaaccagaattggcggtctgggcctacccagtcctatatacagtagttccttcttatccacgggggatacattccaaaacctctagtggttgcctgaaacctgggagagtactaaaccttatatatactgttttctcttaagcatgtatacctatgatcattcaatttataaattaggcacagtaggagattaacagcaataactaataactaataatatcaattataaaaatatgccagcatcactactcttgtgctctgaggccactaagtaaaataagggttacctaaccacaggtactgtgataccgtgacagtcaatctgataaccaagacagctattgagtaacaggcacatagtgtccacagcatgggtatgctggacgaagggatgatttatatcccgggagggatggagtgggacagtgtgagatttcatcatgatactcagaatggcacacaatctaaaacgtagttct

SEQ ID NO: 92735 - DNA, 891 bp, Homo sapiens
ggggaagatgccctggatgtgggtaggcactgtccaatcagctggagagaatcctaaagaaaaaggcagaggaaaggtgattatcccgctctctctcctggagttaggacacacttctgcccttggtcatcagaactccaagctctctggcctgtggactccaggactcacaccagaaccatcccccagcccccaccaccccactggattcccagacattgagcctgggactgagagttacatatgggcttccctgggtctccaacttgcacacggcttattgtgggactttgcaggcttcataatcatgtgatccagttcccctaataagtctcttctcacatatctctgtctgtagctagatattgatatcctactggtttttttctggagaaccccagcaaaaacaccatccattgattcaattgctaatctcttccagaaacaccttcacagactcacccaaaaatgctttactagctatctgggtgtcccttaatccagtcaagttgacacataaaattatccattgcaaggtgagacaacaaccctggcttacaccttgtttgcaggcttgttccagggccagaatcagaggactcagccccactgggcctggattcctgacccacataaactgtgagataaatgtgtcatgttttaagatgctaaatttgtggcgatgtgttacacagcagtagatggataatacggactgccttctctaagaacctgctgctcaactctctgtgcaagtctttattcttcaagatttctccaaactttccttctatacagggttgactgagaaagtctttcaatggatgacagcaccttggaagagggaaaactgcataaattctacttcatcaacacaccaacagtccactc

SEQ ID NO: 92736 - DNA, 310 bp, Homo sapiens
gacatatttttagttttaatatcaataaatcaatagaaactaaattttatccttttataacaaatctttattgttaaaatagagtaagctaactacctgaggctatttgtggaataatttatttgtaagtttttaaatgtatcccattgttttcgaagctagtccccagattataattattccagctgacccacaggacattcttctctggcagtttccacccaacctactgatgctttcttcaccaggttggccccttcaacaagtttctgatggtttatacaagtgaagtgttcctaaaaagaaacaa

SEQ ID NO: 92737 - DNA, 315 bp, Homo sapiens
aacatacatgcactcggtgcttaaaaaaaagatctttctggtgaaataaaaacaaaatataaaaacaaggactattaaaggggtctattagaacagcaaggtttagggggcctcgtgtacaagactgcgcatgaccgccatcctgacgggactctcaccatgagtcaggaaatggcttcatggtttctggtctggggctcagttacttaggagttgcatagatccaaataccatctttgcacatggagaaaatggctcataagctgaaggaaggatattatatgaaactctcttgcaactgagtttctgtaacct

SEQ ID NO: 92738 - DNA, 852 bp, Homo sapiens
ctgcccgcctcggcctctcaaagtgctgggattacaggcgtgagccaccgcacctggccttttgtccatatgtgttttgtcctcagtagattcctagtagaatatgaaaataatttgcagaagatatcctagaaagttagagctaaaagggaccttaaagatcatctagtctagagatggcaaataagtttcgattgtcctgctatctatggtttgttagttggctgcctggaggcttgtattgaagattctgggccatgaaggcatcaaaggctaaatcgattagtgatgtctgccatgagcatggcatgaaggcaaggaagtgtgcatgctgcacattttctgtccctagtttctcccttttgaccaatgaaatcacctgagacagaggtggcactagaaatcacgtctttattctaagtccaggactctttgtaaccccatcttgctgaagtaattatttttcttccaactataaacgttagtaaactagagcaccaaaacaatatgcttcttctagatttgccattgagttcactgtaaagtgaaatacaaaaccaagaatcagtccccctcttcattatttttcccaacttctgatatagttgaggaacgaggcctattctatactgggacctacccaaatttttcttgtttatacttagccatattatcatgatttggttttttttaattaagactgttttggtaagacatattctccagcaaattcattttccctgggtccttctttggttaagcatgttgctagctatagccaaaccaacaggtctaagatgcctaagttatattatcttttcttttcttctttcctttctttctttttttttc

SEQ ID NO: 92739 - DNA, 722 bp, Homo sapiens
ggtgaccagaatgtcagtgcagttggcagctgagggtgtttgtgtgacctgaggtcaccctttgtaagaggctccctggggcctgcatggtacatcctcccctctcctgggggaacccagcatggcccaggatttgtggattgcttagaaagatccttttgggcagcctgaagactggggagggttttcctccctcctccacctccacccacattccacttaccctttccctcctcatcccagttggtaacattcccacctgattagtgtggggagttgctgctgcagctgagttctggttttgcccagcaggatcacacacgtgcggccaggaggctggcaggtggaatcagggtgtgcaggggtgcagcccaagtccttttctgctggaaaatgggctgggtgacttcacttgcgtttttttggtatgtagtgggagtaggtccccattcttcccccttgccctttgctttggggtttctaccctaaaaattgaccacggaaaagtgaaaacaagcatgagtagatcctgcttccaatgggggccttcccgtctgcttactgcttaggtttctgcggtgggtctgagcaatgcagaaagtttcttacaatttctctggattgaaacaagaaatagctccctcgctcctcttcataaatttctcagagaaaatctaagttaccaggaagtagccaaagaccaggagattgtggaatcaaaa

SEQ ID NO: 92740 - DNA, 555 bp, Homo sapiens
gaggatctccgggcaaagctcctacacacacacacacacacacacattgaaagctgaaaagcaaatagagtgtggcaaatgacatagcttacttaagaaagccaaatcttaacttggctatgaagaaggctaaaaatgaagctgacctttaccacagaatctttaaatagctcaggaattgagccagacatatgtggtagcagatccccaggtctcctcctcttccccattccactgaacaactgttcttcctacctatacctccaccttagtataagactccaagtatactctttggagggaaaaaaaaaagcccaagtatctttggattgggagatactaggcaaaattgagaacagggcattttaccacatatgagggaattaggtgaatatgtgcacgctgaatgatgggactcctccacctttcttctctcacttgcctttaccctacaggcaggagattagtagaataccccttggtgtatttagcccaagaagaaagatctaagaataccaactttcccaagattagtggacatctgaagaaaagcct

SEQ ID NO: 92741 - DNA, 273 bp, Homo sapiens
cacaaatatagtttactttgtccactttattttgaagaaaaatctctctcttcccataattttctacttggagagaaatagctaacaactagaagaagcaaaactacatcctacattttcttctgaggtcaaacccactgagcaactgaagttggtattattgggttttcatgtgattacttgtcttctcatgtgaaacatgaatacacaaaagggagaatgggttcagcttcctgtaatggccaagtgtctcctttcagagcaatccttgta

SEQ ID NO: 92742 - DNA, 339 bp, Homo sapiens
agaagcatgggagtaggaagggcaaaaaatgtggccatagaatgcatatggccgttcatttctttcactggcttataatcatgatagattcctccctctttccatttggagtcgtgggcaggggtttagcacccccatttttctcccttcctttttctgctctccccacaggcagtgggatgcgagccagcttacataaggcaaggagcccacattgttgccaagatttttaaaaacttttttcttgttaagactgtctaaagtgaagataatgaacactcagctcaagtaaacttttttcacacaaggaacatattgacagtcaatcatgtgattaga

SEQ ID NO: 92743 - DNA, 474 bp, Homo sapiens
gtgtctcctaggtatctgggtgagattttctaggatgaattcctagcaatggaatgctgggtcatatctccatcttgtagtttttgccctggttcgatgagaaggattggacgtagattattctccaggacttaggttttgtgtggactagtgggttactgggtgttaatcacatttaaaaaataaattaattaactgagtaattcacaaaataacaaaggaccataatggctccataatgccagggtgttgtaatctaacaattatacttcatctacctccacatgactgagctacaaaggaaaagaagaaatagaaatcatattgatgtcctgtttgtaatcctgaagttgggtacttagttggagcgacacaggcaacccacctaaggcatggcttttctcccaacttggaaaacttgtcttatgtcccccacttagctttccaaagggggtctatacgttttcctcccac

SEQ ID NO: 92744 - DNA, 382 bp, Homo sapiens
ttgggaccaaggtcagaggactgtacgcacagagaggaggccacagggcttgcttccttacacacttggccctagggcctattccagctctgtgcccatcaccaaggtaacctgtaccctatgacaggcccaggggactcctagcagaacaagcagggggggcctttgggcagtcatttccttggattgctgggaatctggaaatctgggtgacactgaggctgggccttttcaatggaaggccctcacggtgcacagtgagttgccagggtatggctgggactggggtagctagagagccctcaagtgtcagagtaggtcccagggttgggtcgtctctgtcatcagacctcctgttcctgcgagcagcctcaccccctaa

SEQ ID NO: 92745 - DNA, 5044 bp, Homo sapiens
aaaaaagcagcagaacctggaagtccacggggagcttggatgccaaagggaggacggctgggtcctctggagaggactactcactggcatatttctgaggtatctgtagaataaccacagcctcagatactggggactttacagtcccacagaaccgtcctcccaggaagctgaatccagcaagaacaatggaggccagcgggaagctcatttgcagacaaaggcaagtccttttttcctttctccttttgggcttatctctggcgggcgcggcggaacctagaagctattctgtggtggaggaaactgagggcagctcctttgtcaccaatttagcaaaggacctgggtctggagcagagggaattctccaggcggggggttagggttgtttccagagggaacaaactacatttgcagctcaatcaggagaccgcggatttgttgctaaatgagaaattggaccgtgaggatctgtgcggtcacacagagccctgtgtgctacgtttccaagtgttgctagagagtcccttcgagttttttcaagctgagctgcaagtaatagacataaacgaccactctccagtatttctggacaaacaaatgttggtgaaagtatcagagagcagtcctcctgggactacgtttcctctgaagaatgccgaagacttagatgtaggccaaaacaatattgagaactatataatcagccccaactcctattttcgggtcctcacccgcaaacgcagtgatggcaggaaatacccagagctggtgctggacaaagcgctggaccgagaggaagaagctgagctcaggttaacactcacagcactggatggtggctctccgcccagatctggcactgctcaggtctacatcgaagtcctggatgtcaacgataatgcccctgaatttgagcagcctttctatagagtgcagatctctgaggacagtccggtaggcttcctggttgtgaaggtctctgccacggatgtagacacaggagtcaacggagagatttcctattcacttttccaagcttcagaagagattggcaaaacctttaagatcaatcccttgacaggagaaattgaactaaaaaaacaactcgatttcgaaaaacttcagtcctatgaagtcaatattgaggcaagagatgctggaaccttttctggaaaatgcaccgttctgattcaagtgatagatgtgaacgaccatgccccagaagttaccatgtctgcatttaccagcccaatacctgagaacgcgcctgaaactgtggttgcacttttcagtgtttcagatcttgattcaggagaaaatgggaaaattagttgctccattcaggaggatctacccttcctcctgaaatccgcggaaaacttttacaccctactaacggagagaccactagacagagaaagcagagcggaatacaacatcactatcactgtcactgacttggggacccctatgctgataacacagctcaatatgaccgtgctgatcgccgatgtcaatgacaacgctcccgccttcacccaaacctcctacaccctgttcgtccgcgagaacaacagccccgccctgcacatccgcagcgtcagcgctacagacagagactcaggcaccaacgcccaggtcacctactcgctgctgccgccccaggacccgcacctgcccctcacatccctggtctccatcaacgcggacaacggccacctgttcgccctcaggtctctggactacgaggccctgcaggggttccagttccgcgtgggcgcttcagaccacggctccccggcgctgagcagcgaggcgctggtgcgcgtggtggtgctggacgccaacgacaactcgcccttcgtgctgtacccgctgcagaacggctccgcgccctgcaccgagctggtgccccgggcggccgagccgggctacctggtgaccaaggtggtggcggtggacggcgactcgggccagaacgcctggctgtcgtaccagctgctcaaggccacggagctcggtctgttcggcgtgtgggcgcacaatggcgaggtgcgcaccgccaggctgctgagcgagcgcgacgcggccaagcacaggctggtggtgctggtcaaggacaatggcgagcctccgcgctcggccaccgccacgctgcacgtgctcctggtggacggcttctcccagccctacctgcctctcccggaggcggccccgacccaggcccaggccgacttgctcaccgtctacctggtggtggcgttggcctcggtgtcttcgctcttcctcttttcggtgctcctgttcgtggcggtgcggctgtgtaggaggagcagggcggcctcggtgggtcgctgcttggtgcccgagggcccccttccagggcatcttgtggacatgagcggcaccaggaccctatcccagagctaccagtatgaggtgtgtctggcaggaggctcagggaccaatgagttcaagttcctgaagccgattatccccaacttccctccccagtgccctgggaaagaaatacaaggaaattctaccttccccaataactttgggttcaatattcagtgaccatagttgacttttacattccataggtattttattttgtggcatttccatgccaatgtttatttcccccaatttgtgtgtatgtaatattgtacggatttactcttgatttttctcatgttctttctccctttgttttaaagtgaacatttacctttattcctggttcttaaaaggtgacaattcattctttaacccagatggtcttaatttgtaattaatttgcctccctaaagagcaataccaaatcacatttttttcatgcccctatctttagctgaacttcacccactattatgcttatggtaaaattaaatagagcaatttggaagtgattccaattttccagcatttcttcatttgattctctttttttagtcttaaaataatgactcctattcagacatatcatttttcttttttgtaaatccagtgcgtttttagttaacctttaaatatgctttttgctttcaaaaataaaccagaaaacctatatcctatgatacaactctaagtgttatcacttgattcgaaagggtcagaagaccagttttttagtatcctttcctcattcatcctggagaggattgtgcaggcacattaatattgtgaccaatcacagaatctgggaatatgaagctataattttttaattaatgtcacaaagctctagtgcaatctagttgaatgcagatgcctgtgcccaaataataattcatatagcataaattggagttgtgtgttaatgtgtaaaaatttttgcctgtactatcatataatttaatgtatatacaccagaaactatttttcaaactttttttactgcaaccaatagttaagattatattttacatattttgaaacacacaagcttaatagaaataaatgcttgtgaacaatgcttagtctttttatgacataatttgaaattacctatatatttcattctattcaattttcaaatgtggtcatgatccactaaatttatttcatggtatactagtgggtagtaacccaaagtttgaaaaccacttttctcagacatataaaagcataccagatgttgaacattgatagtatcaaaagatagtcccttagggttctaattttaaaaaaattttcaaagcattgtaggggagtagctttgtctcatgttaaatcactcttacctttaaggatctgacacactatgtaagaaaaagacttcaaggttggaggaggagattttccatgacttttatcaaagtctacagtctatgttgtgggagaaaaatgtagaataacaaaatgagtaaaagtatagaggcaaaacaagcatgtgtatgagagagagagagaaagcatggaaaagaggaaattcatggggatgagcaaaatgactacttccagtgccacagactagactcagttgcttctcttatgttattttttgagacaaggtcctgttctgtcacccaggctggagtgcagtggtgtgatctccactcactgtgatctccactcactgcaacctccacctcctgggctcaagtgatcctcccacctcagcctccctagtacccaggactacaggcccaggccaccacacccactaatttttgcatatttagtagagacgaggtttcatcatattgcccagactggtctcgaattcctgagctcaagcagtctgcctgcctcagcctcccaaagtgctatgattacaggtatgagcacctggcctcaactacttcttgaagatattttaaaactttatcttaacattgtagagggactgggtattagtcagttgataatgccaagaagtgcaatctcttttaatagcatatctaagacaacctaatgtttatacttctgactcagatttcactactggttctgttgagctttgtcaactgagtaattattcttttcttttttctttctttgtttatgttttagagacagggtcttagtcacctaggctggagtgcagtggtgcaatcatagctcactgaagccttgacctcctgggctcaagcaatcctcctgacgcagcatcccaagtagccgggaccacaggcacatgccaccccccacagctatttttgtttgtttgtttgttttttgttttgttttgtttttgaggcagagtctcactctgtcacccaggctggagtgcagtggcgcgatctcggctcactgcaagctccgcctcctgggttcccgccattctcctgcctcagtctcccgagtagcacccccagctattttaaaaaaaatttttgtagagatgggttctcatcatgtcgcccaggctgttgaacttctggcctccaaaggtgggagttattctagcagcttccctgtgatcttctcatatctactggtggagtgggaaagagtagttcaaacaactcagacagaaaatctcgctggtgcaacagtggagagaagggccaagtacttgtcctgttact

SEQ ID NO: 92746 - DNA, 4060 bp, Homo sapiens
aaaaaagcagcagaacctggaagtccacggggagcttggatgccaaagggaggacggctgggtcctctggagaggactactcactggcatatttctgaggtatctgtagaataaccacagcctcagatactggggactttacagtcccacagaaccgtcctcccaggaagctgaatccagcaagaacaatggaggccagcgggaagctcatttgcagacaaaggcaagtccttttttcctttctccttttgggcttatctctggcgggcgcggcggaacctagaagctattctgtggtggaggaaactgagggcagctcctttgtcaccaatttagcaaaggacctgggtctggagcagagggaattctccaggcggggggttagggttgtttccagagggaacaaactacatttgcagctcaatcaggagaccgcggatttgttgctaaatgagaaattggaccgtgaggatctgtgcggtcacacagagccctgtgtgctacgtttccaagtgttgctagagagtcccttcgagttttttcaagctgagctgcaagtaatagacataaacgaccactctccagtatttctggacaaacaaatgttggtgaaagtatcagagagcagtcctcctgggactacgtttcctctgaagaatgccgaagacttagatgtaggccaaaacaatattgagaactatataatcagccccaactcctattttcgggtcctcacccgcaaacgcagtgatggcaggaaatacccagagctggtgctggacaaagcgctggaccgagaggaagaagctgagctcaggttaacactcacagcactggatggtggctctccgcccagatctggcactgctcaggtctacatcgaagtcctggatgtcaacgataatgcccctgaatttgagcagcctttctatagagtgcagatctctgaggacagtccggtaggcttcctggttgtgaaggtctctgccacggatgtagacacaggagtcaacggagagatttcctattcacttttccaagcttcagaagagattggcaaaacctttaagatcaatcccttgacaggagaaattgaactaaaaaaacaactcgatttcgaaaaacttcagtcctatgaagtcaatattgaggcaagagatgctggaaccttttctggaaaatgcaccgttctgattcaagtgatagatgtgaacgaccatgccccagaagttaccatgtctgcatttaccagcccaatacctgagaacgcgcctgaaactgtggttgcacttttcagtgtttcagatcttgattcaggagaaaatgggaaaattagttgctccattcaggaggatctacccttcctcctgaaatccgcggaaaacttttacaccctactaacggagagaccactagacagagaaagcagagcggaatacaacatcactatcactgtcactgacttggggacccctatgctgataacacagctcaatatgaccgtgctgatcgccgatgtcaatgacaacgctcccgccttcacccaaacctcctacaccctgttcgtccgcgagaacaacagccccgccctgcacatccgcagcgtcagcgctacagacagagactcaggcaccaacgcccaggtcacctactcgctgctgccgccccgcgtggtggtgctggacgccaacgacaactcgcccttcgtgctgtacccgctgcagaacggctccgcgccctgcaccgagctggtgccccgggcggccgagccgggctacctggtgaccaaggtggtggcggtggacggcgactcgggccagaacgcctggctgtcgtaccagctgctcaaggccacggagctcggtctgttcggcgtgtgggcgcacaatggcgaggtgcgcaccgccaggctgctgagcgagcgcgacgcggccaagcacaggctggtggtgctggtcaaggacaatggcgagcctccgcgctcggccaccgccacgctgcacgtgctcctggtggacggcttctcccagccctacctgcctctcccggaggcggccccgacccaggcccaggccgacttgctcaccgtctacctggtggtggcgttggcctcggtgtcttcgctcttcctcttttcggtgctcctgttcgtggcggtgcggctgtgtaggaggagcagggcggcctcggtgggtcgctgcttggtgcccgagggcccccttccagggcatcttgtggacatgagcggcaccaggaccctatcccagagctaccagtatgaggtgtgtctggcaggaggctcagggaccaatgagttcaagttcctgaagccgattatccccaacttccctccccagtgccctgggaaagaaatacaaggaaattctaccttccccaataactttgggttcaatattcagtgaccatagttgacttttacattccataggtattttattttgtggcatttccatgccaatgtttatttcccccaatttgtgtgtatgtaatattgtacggatttactcttgatttttctcatgttctttctccctttgttttaaagtgaacatttacctttattcctggttcttaaaaggtgacaattcattctttaacccagatggtcttaatttgtaattaatttgcctccctaaagagcaataccaaatcacatttttttcatgcccctatctttagctgaacttcacccactattatgcttatggtaaaattaaatagagcaatttggaagtgattccaattttccagcatttcttcatttgattctctttttttagtcttaaaataatgactcctattcagacatatcatttttcttttttgtaaatccagtgcgtttttagttaacctttaaatatgctttttgctttcaaaaataaaccagaaaacctatatcctatgatacaactctaagtgttatcacttgattcgaaagggtcagaagaccagttttttagtatcctttcctcattcatcctggagaggattgtgcaggcacattaatattgtgaccaatcacagaatctgggaatatgaagctataattttttaattaatgtcacaaagctctagtgcaatctagttgaatgcagatgcctgtgcccaaataataattcatatagcataaattggagttgtgtgttaatgtgtaaaaatttttgcctgtactatcatataatttaatgtatatacaccagaaactatttttcaaactttttttactgcaaccaatagttaagattatattttacatattttgaaacacacaagcttaatagaaataaatgcttgtgaacaatgcttagtctttttatgacataatttgaaattacctatatatttcattctattcaattttcaaatgtggtcatgatccactaaatttatttcatggtatactagtgggtagtaacccaaagtttgaaaaccacttttctcagacatataaaagcataccagatgttgaacattgatagtatcaaaagatagtcccttagggttctaattttaaaaaaattttcaaagcattgtaggggagtagctttgtctcatgttaaatcactcttacctttaaggatctgacacactatgtaagaaaaagacttcaaggttggaggaggagattttccatgacttttatcaaagtctacagtctatgttgtgggagaaaaatgtagaataacaaaatgagtaaaagtatagaggcaaaacaagcatgtgtatgagagagagagagaaagcatggaaaagaggaaattcatggggatgagcaaaatgactacttccagtgccacagactagactcagttgcttctcttatgttattttttgagacaaggtcctgttctgtcacccaggctggagtgcagtggtgtgatctccactcactgtgatctccactcactgcaacctccacctcctgggctcaagtgatcctcccaccacatagactgtagactttgataaaagtcatggaaaatctcctcctccaaccttgaagtctttttcttacatagtgtgtcagatccttagtcga

SEQ ID NO: 92747 - DNA, 4222 bp, Homo sapiens
aaaaaagcagcagaacctggaagtccacggggagcttggatgccaaagggaggacggctgggtcctctggagaggactactcactggcatatttctgaggtatctgtagaataaccacagcctcagatactggggactttacagtcccacagaaccgtcctcccaggaagctgaatccagcaagaacaatggaggccagcgggaagctcatttgcagacaaaggcaagtccttttttcctttctccttttgggcttatctctggcgggcgcggcggaacctagaagctattctgtggtggaggaaactgagggcagctcctttgtcaccaatttagcaaaggacctgggtctggagcagagggaattctccaggcggggggttagggttgtttccagagggaacaaactacatttgcagctcaatcaggagaccgcggatttgttgctaaatgagaaattggaccgtgaggatctgtgcggtcacacagagccctgtgtgctacgtttccaagtgttgctagagagtcccttcgagttttttcaagctgagctgcaagtaatagacataaacgaccactctccagtatttctggacaaacaaatgttggtgaaagtatcagagagcagtcctcctgggactacgtttcctctgaagaatgccgaagacttagatgtaggccaaaacaatattgagaactatataatcagccccaactcctattttcgggtcctcacccgcaaacgcagtgatggcaggaaatacccagagctggtgctggacaaagcgctggaccgagaggaagaagctgagctcaggttaacactcacagcactggatggtggctctccgcccagatctggcactgctcaggtctacatcgaagtcctggatgtcaacgataatgcccctgaatttgagcagcctttctatagagtgcagatctctgaggacagtccggtaggcttcctggttgtgaaggtctctgccacggatgtagacacaggagtcaacggagagatttcctattcacttttccaagcttcagaagagattggcaaaacctttaagatcaatcccttgacaggagaaattgaactaaaaaaacaactcgatttcgaaaaacttcagtcctatgaagtcaatattgaggcaagagatgctggaaccttttctggaaaatgcaccgttctgattcaagtgatagatgtgaacgaccatgccccagaagttaccatgtctgcatttaccagcccaatacctgagaacgcgcctgaaactgtggttgcacttttcagtgtttcagatcttgattcaggagaaaatgggaaaattagttgctccattcaggaggatctacccttcctcctgaaatccgcggaaaacttttacaccctactaacggagagaccactagacagagaaagcagagcggaatacaacatcactatcactgtcactgacttggggacccctatgctgataacacagctcaatatgaccgtgctgatcgccgatgtcaatgacaacgctcccgccttcacccaaacctcctacaccctgttcgtccgcgagaacaacagccccgccctgcacatccgcagcgtcagcgctacagacagagactcaggcaccaacgcccaggtcacctactcgctgctgccgccccaggacccgcacctgcccctcacatccctggtctccatcaacgcggacaacggccacctgttcgccctcaggtctctggactacgaggccctgcaggggttccagttccgcgtgggcgcttcagaccacggctccccggcgctgagcagcgaggcgctggtgcgcgtggtggtgctggacgccaacgacaactcgcccttcgtgctgtacccgctgcagaacggctccgcgccctgcaccgagctggtgccccgggcggccgagccgggctacctggtgaccaaggtggtggcggtggacggcgactcgggccagaacgcctggctgtcgtaccagctgctcaaggccacggagctcggtctgttcggcgtgtgggcgcacaatggcgaggtgcgcaccgccaggctgctgagcgagcgcgacgcggccaagcacaggctggtggtgctggtcaaggacaatggcgagcctccgcgctcggccaccgccacgctgcacgtgctcctggtggacggcttctcccagccctacctgcctctcccggaggcggccccgacccaggcccaggccgacttgctcaccgtctacctggtggtggcgttggcctcggtgtcttcgctcttcctcttttcggtgctcctgttcgtggcggtgcggctgtgtaggaggagcagggcggcctcggtgggtcgctgcttggtgcccgagggcccccttccagggcatcttgtggacatgagcggcaccaggaccctatcccagagctaccagtatgaggtgtgtctggcaggaggctcagggaccaatgagttcaagttcctgaagccgattatccccaacttccctccccagtgccctgggaaagaaatacaaggaaattctaccttccccaataactttgggttcaatattcagtgaccatagttgacttttacattccataggtattttattttgtggcatttccatgccaatgtttatttcccccaatttgtgtgtatgtaatattgtacggatttactcttgatttttctcatgttctttctccctttgttttaaagtgaacatttacctttattcctggttcttaaaaggtgacaattcattctttaacccagatggtcttaatttgtaattaatttgcctccctaaagagcaataccaaatcacatttttttcatgcccctatctttagctgaacttcacccactattatgcttatggtaaaattaaatagagcaatttggaagtgattccaattttccagcatttcttcatttgattctctttttttagtcttaaaataatgactcctattcagacatatcatttttcttttttgtaaatccagtgcgtttttagttaacctttaaatatgctttttgctttcaaaaataaaccagaaaacctatatcctatgatacaactctaagtgttatcacttgattcgaaagggtcagaagaccagttttttagtatcctttcctcattcatcctggagaggattgtgcaggcacattaatattgtgaccaatcacagaatctgggaatatgaagctataattttttaattaatgtcacaaagctctagtgcaatctagttgaatgcagatgcctgtgcccaaataataattcatatagcataaattggagttgtgtgttaatgtgtaaaaatttttgcctgtactatcatataatttaatgtatatacaccagaaactatttttcaaactttttttactgcaaccaatagttaagattatattttacatattttgaaacacacaagcttaatagaaataaatgcttgtgaacaatgcttagtctttttatgacataatttgaaattacctatatatttcattctattcaattttcaaatgtggtcatgatccactaaatttatttcatggtatactagtgggtagtaacccaaagtttgaaaaccacttttctcagacatataaaagcataccagatgttgaacattgatagtatcaaaagatagtcccttagggttctaattttaaaaaaattttcaaagcattgtaggggagtagctttgtctcatgttaaatcactcttacctttaaggatctgacacactatgtaagaaaaagacttcaaggttggaggaggagattttccatgacttttatcaaagtctacagtctatgttgtgggagaaaaatgtagaataacaaaatgagtaaaagtatagaggcaaaacaagcatgtgtatgagagagagagagaaagcatggaaaagaggaaattcatggggatgagcaaaatgactacttccagtgccacagactagactcagttgcttctcttatgttattttttgagacaaggtcctgttctgtcacccaggctggagtgcagtggtgtgatctccactcactgtgatctccactcactgcaacctccacctcctgggctcaagtgatcctcccaccacatagactgtagactttgataaaagtcatggaaaatctcctcctccaaccttgaagtctttttcttacatagtgtgtcagatccttagtcga

SEQ ID NO: 92748 - DNA, 2746 bp, Homo sapiens
gcagagatcccaggtgcaaacctcaatgtggagggcacctcaacacctttgcttcgaatagcctgggctcgaatcatattggatgaagctcacaatgttaagaatccccgagtgcagacttccatagctgtgtgtaagctacaagcctgtgcccgttgggctgtcactggaacccccattcaaaacaacttattggatatgtattcgctgctgaagtttctccgttgctctccatttgatgagttcaatctgtggaggagtcaggttgacaatggctcaaagaaaggaggagaacggttaagtattttaaccaagagccttttgctgaggagaacaaaagaccagctggactctactggcagacctttggtgatactgccccagcgtaaatttcagttgcaccatttaaagctttctgaagatgaagagactgtttacaatgtgttttttgcaagatcaaggtcagctctgcaatcctatctaaaaagacatgaaagtagaggcaaccaatctggaagaagccctaataatccattcagtagagtggcactggagtttgggtctgaggagcctagacactcggaggcagcagactcaccgagatccagcaccgtccacatactgtcccagttgctgagactccgccagtgttgctgtcatctttctttactgaagtcggccctggatccaatggaactgaagggtgaaggtcttgtcctttccctggaagaacagctcagtgctttgaccttgtcagaactccgtgactcagagccatcttccactgtttcccttaacggcaccttcttcaagatggagctttttgaaggcatgcgagagagcaccaagatttcatctctgttggcagaattggaggcaattcaaagaaattcagcatcccaaaagagtgtcattgtctctcagtggaccaacatgctgaaagttgtagcattgcacctgaagaagcatggactgacttatgccaccatcgatggctctgtcaatcccaagcagagaatggacttggtagaggcatttaaccactccagaggccctcaggtaatgctaatctctctcttggccggaggtgttggtctaaacctgactggaggaaatcacctctttcttttggacatgcactgagatagagaaatgttatccaagattttaaagaggaatccatcacttgaagatcaagcttgtgaccgaatttaccgagtagggcagcagaaagatgttgtcatacacagatttgtttgtgagggaacagtagaagaaaagatcttacagctccaagaaaaaaagaaagatttggccaaacaagttctatcagggtctggagaatctgtcaccaagctcaccttggctgacctcagagtcctttttggcatctaacctcctgtggataagggctcagaatagcaccattgctggtttgtattaggatctgggaataacaacctaaccatgagccttgaactctgttctttgcatttcaatttcaccgtcaagcctttcaccttcctcaaaatgaggcataatcttatccccagaattgaggaggggttgtgttaaccaattagttaaccaattatgttaataatttatttaatgagtggtatggaaaccaattgatttttttagataaaagaatatgttttagagttggatgattttggaaaacaactctggcagaattgtatataagcttcagtaaagttcaaaaagcgggccaggtgtggtggctcatgcctgtaatcccgacactttgggaggccaaggcaggaggatggcttgaagccagtagttcaagaccagcctgggcaacatagtaagaccccatctctatgaagaataaaaaaatgagctaggcgtggtagtgcacacctgtagtcctagctacttgggaggctgaggcaggaggatcccttgagtccaggaggttgaggctgcagtgagctgtgattgtgccactgttttccagcctgggcaatacagtgagaccctgtctcaaaaaaaggaaaaaaaagctcaaaaagttctgtgttgcctttctcttcttagctgatgatgggagaaccagttactaccttctctaacacaggctccatcctatctcttcatctcttcttgccagtgatgttgcacctgtaaccatctttttatgggtggagcagagagtcaatccctgcagccaccctgcagccagccatctctgcagttctctcagtgcaggcagttcttcctctcaggctgaagatcaaggagatgctttgtacatgaacagatgctgagtatctgttatcattgtattgtttagtgtcagtgtatcatttagtatttgtatcactgtaccatttagtgttgtatatcactcagtcatttaatattggttatcaccatacagtttaatatttgtatcatttggttcattgtatcgtttagtatttctattataacatttctatttgtagtatttgtataatatttgtgtcatttttaatagtatttgtatttttacaaatttgcagtatttgtagcatttagtatcattgtttcatttagtatttggtacaatctaataaatactaatccagtccaatactaatccaatccaatactaataatactattggtacaatccaatactaataatactattggtacaatccaatactaataatactaacagtagtattgatacaatctaataaataatgtgtttgacagtgtagcagaaataatg

SEQ ID NO: 92749 - DNA, 2663 bp, Homo sapiens
gcagagatcccaggtgcaaacctcaatgtggagggcacctcaacacctttgcttcgaatagcctgggctcgaatcatattggatgaagctcacaatgttaagaatccccgagtgcagacttccatagctgtgtgtaagctacaagcctgtgcccgttgggctgtcactggaacccccattcaaaacaacttattggatatgtattcgctgctgaagtttctccgttgctctccatttgatgagttcaatctgtggaggagtcaggttgacaatggctcaaagaaaggaggagaacggttaagtattttaaccaagagccttttgctgaggagaacaaaagaccagctggactctactggcagacctttggtgatactgccccagcgtaaatttcagttgcaccatttaaagctttctgaagatgaagagactgtttacaatgtgttttttgcaagatcaaggtcagctctgcaatcctatctaaaaagacatgaaagtagaggcaaccaatctggaagaagccctaataatccattcagtagagtggcactggagtttgggtctgaggagcctagacactcggaggcagcagactcaccgagatccagcaccgtccacatactgtcccagttgctgagactccgccagtgttgctgtcatctttctttactgaagtcggccctggatccaatggaactgaagggtgaaggtcttgtcctttccctggaagaacagctcagtgctttgaccttgtcagaactccgtgactcagagccatcttccactgtttcccttaacggcaccttcttcaagatggagctttttgaaggcatgcgagagagcaccaagatttcatctctgttggcagaattggaggcaattcaaagaaattcagcatcccaaaagagtgtcattgtctctcagtggaccaacatgctgaaagttgtagcattgcacctgaagaagcatggactgacttatgccaccatcgatggctctgtcaatcccaagcagagaatggacttggtagaggcatttaaccactccagaggccctcagagatagagaaatgttatccaagattttaaagaggaatccatcacttgaagatcaagcttgtgaccgaatttaccgagtagggcagcagaaagatgttgtcatacacagatttgtttgtgagggaacagtagaagaaaagatcttacagctccaagaaaaaaagaaagatttggccaaacaagttctatcagggtctggagaatctgtcaccaagctcaccttggctgacctcagagtcctttttggcatctaacctcctgtggataagggctcagaatagcaccattgctggtttgtattaggatctgggaataacaacctaaccatgagccttgaactctgttctttgcatttcaatttcaccgtcaagcctttcaccttcctcaaaatgaggcataatcttatccccagaattgaggaggggttgtgttaaccaattagttaaccaattatgttaataatttatttaatgagtggtatggaaaccaattgatttttttagataaaagaatatgttttagagttggatgattttggaaaacaactctggcagaattgtatataagcttcagtaaagttcaaaaagcgggccaggtgtggtggctcatgcctgtaatcccgacactttgggaggccaaggcaggaggatggcttgaagccagtagttcaagaccagcctgggcaacatagtaagaccccatctctatgaagaataaaaaaatgagctaggcgtggtagtgcacacctgtagtcctagctacttgggaggctgaggcaggaggatcccttgagtccaggaggttgaggctgcagtgagctgtgattgtgccactgttttccagcctgggcaatacagtgagaccctgtctcaaaaaaaggaaaaaaaagctcaaaaagttctgtgttgcctttctcttcttagctgatgatgggagaaccagttactaccttctctaacacaggctccatcctatctcttcatctcttcttgccagtgatgttgcacctgtaaccatctttttatgggtggagcagagagtcaatccctgcagccaccctgcagccagccatctctgcagttctctcagtgcaggcagttcttcctctcaggctgaagatcaaggagatgctttgtacatgaacagatgctgagtatctgttatcattgtattgtttagtgtcagtgtatcatttagtatttgtatcactgtaccatttagtgttgtatatcactcagtcatttaatattggttatcaccatacagtttaatatttgtatcatttggttcattgtatcgtttagtatttctattataacatttctatttgtagtatttgtataatatttgtgtcatttttaatagtatttgtatttttacaaatttgcagtatttgtagcatttagtatcattgtttcatttagtatttggtacaatctaataaatactaatccagtccaatactaatccaatccaatactaataatactattggtacaatccaatactaataatactattggtacaatccaatactaataatactaacagtagtattgatacaatctaataaataatgtgtttgacagtgtagcagaaataatg

SEQ ID NO: 92750 - DNA, 2000 bp, Homo sapiens
gaggttaaataacttgcccaaggacatctagctacctagagaccagacctgagttttggtttcacctctgttacttaagagttgtcaactgatgatagtgctaagagctattattaacagtctgaccctagtttctcactagaaactaggcaagaaggtatctggcaccagcttgtcttaggccagtatagcttaggacagggatcgacagattttttttctttgaggcttttcaggccacatagttctctgtcacatgatgtgtgtgttttgttttgctttgctttcttttcttaaatccctttaaaactgtaacaataatttttagctacaaaaacaagctgtgggctggatttggcccatggcccatagtttgccatttctgatctagtatgtcagttcctttgagctttagctgtcttctaacaggaatccatcacttgaagatcaagcttgtgaccgaatttaccgagtagggcagcagaaagatgttgtcatacacagatttgtttgtgagggaacagtagaagaaaagatcttacagctccaagaaaaaaagaaagatttggccaaacaagttctatcagggtctggagaatctgtcaccaagctcaccttggctgacctcagagtcctttttggcatctaacctcctgtggataagggctcagaatagcaccattgctggtttgtattaggatctgggaataacaacctaaccatgagccttgaactctgttctttgcatttcaatttcaccgtcaagcctttcaccttcctcaaaatgaggcataatcttatccccagaattgaggaggggttgtgttaaccaattagttaaccaattatgttaataatttatttaatgagtggtatggaaaccaattgatttttttagataaaagaatatgttttagagttggatgattttggaaaacaactctggcagaattgtatataagcttcagtaaagttcaaaaagcgggccaggtgtggtggctcatgcctgtaatcccgacactttgggaggccaaggcaggaggatggcttgaagccagtagttcaagaccagcctgggcaacatagtaagaccccatctctatgaagaataaaaaaatgagctaggcgtggtagtgcacacctgtagtcctagctacttgggaggctgaggcaggaggatcccttgagtccaggaggttgaggctgcagtgagctgtgattgtgccactgttttccagcctgggcaatacagtgagaccctgtctcaaaaaaaggaaaaaaaagctcaaaaagttctgtgttgcctttctcttcttagctgatgatgggagaaccagttactaccttctctaacacaggctccatcctatctcttcatctcttcttgccagtgatgttgcacctgtaaccatctttttatgggtggagcagagagtcaatccctgcagccaccctgcagccagccatctctgcagttctctcagtgcaggcagttcttcctctcaggctgaagatcaaggagatgctttgtacatgaacagatgctgagtatctgttatcattgtattgtttagtgtcagtgtatcatttagtatttgtatcactgtaccatttagtgttgtatatcactcagtcatttaatattggttatcaccatacagtttaatatttgtatcatttggttcattgtatcgtttagtatttctattataacatttctatttgtagtatttgtataatatttgtgtcatttttaatagtatttgtatttttacaaatttgcagtatttgtagcatttagtatcattgtttcatttagtatttggtacaatctaataaatactaatccagtccaatactaatccaatccaatactaataatactattggtacaatccaatactaataatactattggtacaatccaatactaataatactaacagtagtattgatacaatctaataaataatgtgtttgacagtgtagcagaaataatg

SEQ ID NO: 92751 - DNA, 1918 bp, Homo sapiens
ccatttacttggtttgaaaaccctgtttttattgtgaattcactaagaaatactctacttaaactagcagaaatttgataacctttgaggccttatggacttaccaaggtagaactttttgggtaaaagctggatctctatacttttttggattgggatatcttttgcttattttgagtttgtttcaattaccttagcttcagaaagtattaaaatgccaatgtgggtcacatccttttaaagggatatatatctagtcaaggttgtttggattcctcagacagggttcttaactggacctaagaagacttaaaggaagaaatctcattaaaaatgaaagcataataaaagtttgaatatattattagatgtgctgcttagggtttttgatagtttgcttattttttgtttttgttttttagatttgtttgtgagggaacagtagaagaaaagatcttacagctccaagaaaaaaagaaagatttggccaaacaagttctatcagggtctggagaatctgtcaccaagctcaccttggctgacctcagagtcctttttggcatctaacctcctgtggataagggctcagaatagcaccattgctggtttgtattaggatctgggaataacaacctaaccatgagccttgaactctgttctttgcatttcaatttcaccgtcaagcctttcaccttcctcaaaatgaggcataatcttatccccagaattgaggaggggttgtgttaaccaattagttaaccaattatgttaataatttatttaatgagtggtatggaaaccaattgatttttttagataaaagaatatgttttagagttggatgattttggaaaacaactctggcagaattgtatataagcttcagtaaagttcaaaaagcgggccaggtgtggtggctcatgcctgtaatcccgacactttgggaggccaaggcaggaggatggcttgaagccagtagttcaagaccagcctgggcaacatagtaagaccccatctctatgaagaataaaaaaatgagctaggcgtggtagtgcacacctgtagtcctagctacttgggaggctgaggcaggaggatcccttgagtccaggaggttgaggctgcagtgagctgtgattgtgccactgttttccagcctgggcaatacagtgagaccctgtctcaaaaaaaggaaaaaaaagctcaaaaagttctgtgttgcctttctcttcttagctgatgatgggagaaccagttactaccttctctaacacaggctccatcctatctcttcatctcttcttgccagtgatgttgcacctgtaaccatctttttatgggtggagcagagagtcaatccctgcagccaccctgcagccagccatctctgcagttctctcagtgcaggcagttcttcctctcaggctgaagatcaaggagatgctttgtacatgaacagatgctgagtatctgttatcattgtattgtttagtgtcagtgtatcatttagtatttgtatcactgtaccatttagtgttgtatatcactcagtcatttaatattggttatcaccatacagtttaatatttgtatcatttggttcattgtatcgtttagtatttctattataacatttctatttgtagtatttgtataatatttgtgtcatttttaatagtatttgtatttttacaaatttgcagtatttgtagcatttagtatcattgtttcatttagtatttggtacaatctaataaatactaatccagtccaatactaatccaatccaatactaataatactattggtacaatccaatactaataatactattggtacaatccaatactaataatactaacagtagtattgatacaatctaataaataatgtgtttgacagtgtagcagaaataatg

SEQ ID NO: 92752 - DNA, 421 bp, Homo sapiens
cagctggactctactggcagacctttggtaatcaagtttgtacctgtccctgggggaggccagggaaggaacatgactgtgtccttgtcttgggttgaacagccatctgctttgcttcaggagcctctgagtttcccatcctcctgtgaggaggccccagggttgcagttccatgcctagtgtcatagcaatccagttgtactgtatgttggagcagtcctgtgtctaagaaagggtggaagctgcattccagggttgactagatatgcagtgtcagtatggggaatttgttctataataggcagttaatttgtatagcttcatgccagcttttttttttattcttccaggtgatactgccccagcgtaaatttcagttgcaccatttaaagctttctgaagatgaagagactgtttacaa

SEQ ID NO: 92753 - DNA, 2713 bp, Homo sapiens
gcagagatcccaggtgcaaacctcaatgtggagggcacctcaacacctttgcttcgaatagcctgggctcgaatcatattggatgaagctcacaatgttaagaatccccgagtgcagacttccatagctgtgtgtaagctacaagcctgtgcccgttgggctgtcactggaacccccattcaaaacaacttattggatatgtattcgctgctgaagtttctccgttgctctccatttgatgagttcaatctgtggaggagtcaggttgacaatggctcaaagaaaggaggagaacggttaagtattttaaccaagagccttttgctgaggagaacaaaagaccagctggactctactggcagacctttggtgatactgccccagcgtaaatttcagttgcaccatttaaagctttctgaagatgaagagactgtttacaatgtgttttttgcaagatcaaggtcagctctgcaatcctatctaaaaagacatgaaagtagaggcaaccaatctggaagaagccctaataatccattcagtagagtggcactggagtttgggtctgaggagcctagacactcggaggcagcagactcaccgagatccagcaccgtccacatactgtcccagttgctgagactccgccagtgttgctgtcatctttctttactgaagtcggccctggatccaatggaactgaagggtgaaggtcttgtcctttccctggaagaacagctcagtgctttgaccttgtcagaactccgtgactcagagccatcttccactgtttcccttaacggcaccttcttcaagatggagctttttgaaggcatgcgagagagcaccaagatttcatctctgttggcagaattggaggcaattcaaagaaattcagcatcccaaaagagtgtcattgtctctcagtggaccaacatgctgaaagttgtagcattgcacctgaagaagcatggactgacttatgccaccatcgatggctctgtcaatcccaagcagagaatggacttggtagaggcatttaaccactccagaggccctcaggtaatgctaatctctctcttggccggaggtgttggtctaaacctgactggaggaaatcacctctttcttttggacatgcactggaatccatcacttgaagatcaagcttgtgaccgaatttaccgagtagggcagcagaaagatgttgtcatacacagatttgtttgtgagggaacagtagaagaaaagatcttacagctccaagaaaaaaagaaagatttggccaaacaagttctatcagggtctggagaatctgtcaccaagctcaccttggctgacctcagagtcctttttggcatctaacctcctgtggataagggctcagaatagcaccattgctggtttgtattaggatctgggaataacaacctaaccatgagccttgaactctgttctttgcatttcaatttcaccgtcaagcctttcaccttcctcaaaatgaggcataatcttatccccagaattgaggaggggttgtgttaaccaattagttaaccaattatgttaataatttatttaatgagtggtatggaaaccaattgatttttttagataaaagaatatgttttagagttggatgattttggaaaacaactctggcagaattgtatataagcttcagtaaagttcaaaaagcgggccaggtgtggtggctcatgcctgtaatcccgacactttgggaggccaaggcaggaggatggcttgaagccagtagttcaagaccagcctgggcaacatagtaagaccccatctctatgaagaataaaaaaatgagctaggcgtggtagtgcacacctgtagtcctagctacttgggaggctgaggcaggaggatcccttgagtccaggaggttgaggctgcagtgagctgtgattgtgccactgttttccagcctgggcaatacagtgagaccctgtctcaaaaaaaggaaaaaaaagctcaaaaagttctgtgttgcctttctcttcttagctgatgatgggagaaccagttactaccttctctaacacaggctccatcctatctcttcatctcttcttgccagtgatgttgcacctgtaaccatctttttatgggtggagcagagagtcaatccctgcagccaccctgcagccagccatctctgcagttctctcagtgcaggcagttcttcctctcaggctgaagatcaaggagatgctttgtacatgaacagatgctgagtatctgttatcattgtattgtttagtgtcagtgtatcatttagtatttgtatcactgtaccatttagtgttgtatatcactcagtcatttaatattggttatcaccatacagtttaatatttgtatcatttggttcattgtatcgtttagtatttctattataacatttctatttgtagtatttgtataatatttgtgtcatttttaatagtatttgtatttttacaaatttgcagtatttgtagcatttagtatcattgtttcatttagtatttggtacaatctaataaatactaatccagtccaatactaatccaatccaatactaataatactattggtacaatccaatactaataatactattggtacaatccaatactaataatactaacagtagtattgatacaatctaataaataatgtgtttgacagtgtagcagaaataatg

SEQ ID NO: 92754 - DNA, 2082 bp, Homo sapiens
gcagagatcccaggtgcaaacctcaatgtggagggcacctcaacacctttgcttcgaatagcctgggctcgaatcatattggatgaagctcacaatgttaagaatccccgagtgcagacttccatagctgtgtgtaagctacaagcctgtgcccgttgggctgtcactggaacccccattcaaaacaacttattggatatgtattcgctgctgaagtttctccgttgctctccatttgatgagttcaatctgtggaggagtcaggttgacaatggctcaaagaaaggaggagaacggttaagtattttaaccaagagccttttgctgaggagaacaaaagaccagctggactctactggcagacctttggtgatactgccccagcgtaaatttcagttgcaccatttaaagctttctgaagatgaagagactgtttacaatgtgttttttgcaagatcaaggtcagctctgcaatcctatctaaaaagacatgaaagtagaggcaaccaatctggaagaagccctaataatccattcagtagagtggcactggagtttgggtctgaggagcctagacactcggaggcagcagactcaccgagatccagcaccgtccacatactgtcccagttgctgagactccgccagtgttgctgtcatctttctttactgaagtcggccctggatccaatggaactgaagggtgaaggtcttgtcctttccctggaagaacagctcagtgctttgaccttgtcagaactccgtgactcagagccatcttccactgtttcccttaacggcaccttcttcaagatggagctttttgaaggcatgcgagagagcaccaagatttcatctctgttggcagaattggaggcaattcaaagaaattcagcatcccaaaagagtgtcattgtctctcagtggaccaacatgctgaaagttgtagcattgcacctgaagaagcatggactgacttatgccaccatcgatggctctgtcaatcccaagcagagaatggacttggtagaggcatttaaccactccagaggccctcaggtaatgctaatctctctcttggccggaggtgttggtctaaacctgactggaggaaatcacctctttcttttggacatgcactggaatccatcacttgaagatcaagcttgtgaccgaatttaccgagtagggcagcagaaagatgttgtcatacacagatttgtttgtgagggaacagtagaagaaaagatcttacagctccaagaaaaaaagaaagatttggccaaacaagttctatcagggtctggagaatctgtcaccaagctcaccttggctgacctcagagtcctttttggcatctaacctcctgtggataagggctcagaatagcaccattgctgctgatgatgggagaaccagttactaccttctctaacacaggctccatcctatctcttcatctcttcttgccagtgatgttgcacctgtaaccatctttttatgggtggagcagagagtcaatccctgcagccaccctgcagccagccatctctgcagttctctcagtgcaggcagttcttcctctcaggctgaagatcaaggagatgctttgtacatgaacagatgctgagtatctgttatcattgtattgtttagtgtcagtgtatcatttagtatttgtatcactgtaccatttagtgttgtatatcactcagtcatttaatattggttatcaccatacagtttaatatttgtatcatttggttcattgtatcgtttagtatttctattataacatttctatttgtagtatttgtataatatttgtgtcatttttaatagtatttgtatttttacaaatttgcagtatttgtagcatttagtatcattgtttcatttagtatttggtacaatctaataaatactaatccagtccaatactaatccaatccaatactaataatactattggtacaatccaatactaataatactattggtacaatccaatactaataatactaacagtagtattgatacaatctaataaataatgtgtttgacagtgtagcagaaataatg

SEQ ID NO: 92755 - DNA, 121 bp, Homo sapiens
ctgagatcacgctactacactccagcctgggcgacagagtgagacttcatctcaaaaaaaataataaaaagagtaattccttaatattatctaccactcagtcaatagttaaattttccca

SEQ ID NO: 92756 - DNA, 1169 bp, Homo sapiens
gttgcttccaaatcttggctgttgtgaatagtgctgcagtaaacatgagagtgcagatatctcttccacatactgattccatttcctttggatatattcccagtagtgagattgctggatcatatggtagttccattaattactgctaaaagctaaacatcagatttttatacatatagatggcatacattcatcagaaatatatcgtgcttcataaatacttgtacttttggctgcacattataatgtagtatggcatagtattgagtaatagcatatcaatttattctttctgtttaaaaaccaaatacattaatctggacaaggtagtgtgtgcctgtaatcccagctactcaagaggctgatgtagaaggaccacttgagcccaagtgttcaagacgagcctgaacaacatagcaagacctagtctaaaaacaaaaagatacattaaatatactacatcttattcatttgaattaaaaagtgaaagctggacatagtagctcacacctgtaatcccagcactttgggaggccaaaggtgggaggatcacttgaggtcaggagttcgagaccagcctggccaacatggtgaaaccccatctctactaaaaatacaaaaattagctggacatggtggcgggtgcttgtaatcccagctactcaggaggctgaggcaggagaattgcttgaacccaagaggcagaggttacagtgagccaagattgtaccactgcactccagactgggcaacagagcgggactgggaaaaaaaaaagttatctttctaggagaaaatctgctttggttggttcaacagtaagaactgactttgccagttaagctgtggtagatatgttcactaaattggatgcactaaatctatagccataatttgaggaaattgagttgacaactgatacattaaaaatggatatcattaaaaatggattttaataatcaaacagtgtatgacttttggcatataacttgtaaggagctcaaagactcaaggggagacattactataacatttctcacaagttagtaatgtgaaaagggcttcttagcatttctatattaaaaaaaaaagcaacacccaaaatagaaaatagacctagaattaatattgaacctgagtcttctagtggaaagccatattgatgcatg

SEQ ID NO: 92757 - DNA, 423 bp, Homo sapiens
attgaccttacagtgtccttgtaggactcaaaagagatgatgtgtgtaatgctcattacatagtttgtcatgtagcaactgttcagttaccatcatcatcatgattaacaatagtagtcgcacactgtttaacacaggaaaatagctctcagcaacaaaggaaaatagatccaacggcctgatttttggaagttaattatactcattctgattacttatgcatttgttttcttgtgaaaaagagtggtgacacagaaaaccctgaagttttcacgggttaaggtgcctgagataataagtaatatacagaaatacctagatgatgacattttccataaaaattggcttcaagaacattaaaataaatgtccaattgcagaatgtcaatctgcctgacagtgtaaatctccttaaagcaattta

SEQ ID NO: 92758 - DNA, 458 bp, Homo sapiens
aactcctggcctcaaggaattcttctgcctccacctcccaaagtgttgggattacaggcatgagtcactgcacctagcctcacttatgttctatttacctttaccactgttgcactttcagcattttcaaagtcctctcaaaataatggtttcctttgcttctccaaacagacttaagtaataggttatacattctactttaagatgagagaattactttgttttaagatgggggaatttattgtgtaacagagaataaatcagtcttagacctgaggccagaaatctctgattttcttgacttcagatcacttaccactcccaccctctgtcctgcccccagcttcaatcatggaagaaacagaatgtaaatgatagctgtgtctcaaaccatctttcagaaagctgaccagaaatataagtcacattgtttataaagtgccgatggagtttatcca

SEQ ID NO: 92759 - DNA, 765 bp, Homo sapiens
cttgaaacgctctcccctccctgcctcccaggcaatgcccactctgcctccaaagttcatccatcgtcctctcctcaggaagatttccctggtggcttgactaggtcacagtccccctttatttgccgtcttctcactggggcctctccttcctggtagcttctaaacaaggcagtttcatgtgtgtatctccactagactagacgctctctgagggcagggaccctgcttcgcttctggcccgaggtggctgcagggtctgcaagatcatcagggccccctccaatgtgacacttgcagaggggacccctggcctggggccacgctggttacttgggtacactccttgcccagggttccacagccccttaaaggcagggtctttctggccacgcctggccctggtctggcctccccaaggagccctgccgctgggggtgctgtgtgggaacagagcacaggccctccctcccagagcccacgagatctcactttctccaagcccagctccccaaggactcagaccccagttgccctgcactgaacgctggcttgccctagctcactcggaccccaccctgcactgggaaggagggtccctgtccccgtttgacgggtgacgacactgaggcccagagagctgaaggggctggccgaggggacgggcttgggcgcttccattctcacactgctgccgtgacacctaatccatccggggaagttccctttaaacccaaaaggggacggtgaagccacacgcggccg

SEQ ID NO: 92760 - DNA, 492 bp, Homo sapiens
ttactgggatgttaaaaaataaaaacctgaaaggtatttacagaacagctaccaacatggaattaaaggaatctcaatcttgttaaatattctaaagagggaagggtttggttacagcatgtaaattaaacttgagacaatggcgggcgggggggtcttgatccgcacacctcttctccagattctgcgggggggaggggtgttaaaatttaaacgcacatggaagaaaaaaaaaatgtattacacaaagacggcaggaaatttcttaaattcgggtgaaggaagcctgattattgaatatcacttaatggcctcattttagaggcagtataaaaacttttctgaaatgctcatgtttttggagtaaggtgaactgggttatttttccccaaccagtaataacagacaaatttgcagtggtatctggggcaaaggtttttgaatttagaccacgaggagagatagaaatctgactttaaggaagtggaagaa

SEQ ID NO: 92761 - DNA, 535 bp, Homo sapiens
ggaagctcctggaggaggaggaagaggaggcatgcgagggggctgatgtgaagtctgtaggggtgaaggggacggtatcgaagacctgaaatacagtgctagctaagtaggggtgggagcagatgaggtgacacgttgtaactccgacggacgacgtgcggaatgtactgggtggaggaggaaaaaaggcccgaggagaggggtgtgtcaagcgaatgaagacggcagtgtgtgcctcagcgcctggtgcgtgcggagctagtgacgggtgggcccggctggggcccgtcattccttcagtgaacatcccatgagctctcgctcggtgttgagccctgtggtaggcacagatgcacccgaccagcacctggagctcaagaagccgcaggaacttaaagaaatggaaaggctgcccttggcaaatgaagataaaacaatatgcattaaatagaaacataacacatcataagtgaactagttcttatcagaaccagtattttctttttttcttttttttttttttttttttgggaaa

SEQ ID NO: 92762 - DNA, 378 bp, Homo sapiens
gatctatgtaagcttggcccactggatgcaaggcgaacaggctctcctcgcaccttcagggcaagcagttaaacagaccagcccctcacacactcactgggcagctgcggtgtggccaagccccgaaaggaacaggacaaagtactgggcgcaggctgcagatcaccacagatgccacgatgtgcccctggatgtccctccagcctccacaccccactgtgcacctcagccaccccagggcctctgcactcaccatcccaacggcctctccacatctgcacaggatcagctcctgcctccaggccacctcctgaggggcctcccatctctccaccccttcaccctgcccctctactgtcctagcacctgccacctctg

SEQ ID NO: 92763 - DNA, 1123 bp, Homo sapiens
caaatctctcgcgtccctgttttttttttttgtcaaaattctcttgattatttttgtgtatgtaggttgactttaagagttttattttggattttgtaagtagtaaaggggttgcattttacaaagccaaaaatacaaatagccccaagaaactactactacgaagatttatttttatttcccatctgctgggtattgttttaagtactttgcagatattgttacagaagaagcagttatactttgatttatttttctttctttcttttttttttttttttttaatggagtctcactctgtcaccaaggctagagtgcacagtagcacagtcttggctcactgcaacctccacctcccaggctcaggcagtccttccacctcagcctcctgaattgctgggactaccaccatgcctggctaatttttgtatttttagtagagacggggttttgcgatgttgcccaggcttgtcttgaactcctgagctcaagtgatctgtccatctcagcctcccaaagtgctgggattacaggcatgagccactgtgcccagcctatattttgatttcatagtgagcaaaaaattggtctgattgcatgactgtagtggggaaatgataataagctgacacctatgtgttttagctgagacagtataaaattgtgtctagtatagatttgaggtgtactgaggttccacttgcccctcaagggacacccccaattctcatatacccaccttgaacacagttaacagtgtttgtgtcctgctttttataagtcatgagcatttcctgatatcatcaaaatgcttttagaaatacaactaataaatatattgtgtcttgcctgttgtattgttgcgaaatctagttattcctacaggcattgtatttttttggtggtatctttcttttgcagttgtgttgtatgtgaaagagtatgtcacctgtgaggtatggagcctcctaaagagacctgggagccagctaacttcagccggagcctaatactcatgcattgaactgtgtgctctttccctcaggcctttaattacaggtacacagttacaagtaatactgtgacctactcttcaatcaccctttcctttttaagagaatta

SEQ ID NO: 92764 - DNA, 382 bp, Homo sapiens
tatactatccttcctcttcatcatcagtgtgaaaatgttccaaggtggaaagaaccagagcccacacttatcccattgttaccctgatgcttccgagctcccctttttaccatggggattgcttaagagaactcaggtgtcttccagcatagttccacgttctccaaccatcgctccagtgaccctttgacctgggtttgagccccacatatgggcaccacttgctgagagcagctcagtcgtggagaccctaacctagtggcactagtggaattaaaaacacacacagaaatatatagtgtggagtgggaaatcaggggcctgacagcattcagcgctgaaagccatgaacagagatttacccaggtatttattgacagca

SEQ ID NO: 92765 - DNA, 117 bp, Homo sapiens
gatcagcacaggaagagccttcctaagcatgtggtcccagggaagggtgaaaagtaggagttatgaacgtaatccacctactacaatgttgaattaaagttataatctcataacttc

SEQ ID NO: 92766 - DNA, 641 bp, Homo sapiens
gagtagctgggactaaagggacgtgccaccatgcccggctaatttttgtattttttgtagagatggggtttcaccatgttggccaggctggtcttgaactcctgacttcaggtgatccacccacctcggcctcccaaagtgctgagattacaggcgtgagccactgtgcccagtctgttttgttttgtttttttaaactgattattaaatcatttaatttcatattggtctgtgtaaatatatttgcaagtgaactttgggtacagttttgctccagtagcattagacaagatgagtccaaatgagattgtcttcattgtgcacttacgaatcactctcctctggccggctgcctctccacactgcagagcaggcctgcagagttggggagccatggtggttgagttccccaagtggcccaggcctcagactgcctctgcataaaagggtgtctgggagaagccgatctaaagcagtaactcggccctatgttaagtcacaaaatatctaaccattacatgcatggtagaaactggtatcttccctgtttctggaaaggaatctgggcagacccaggccgcaaatagtaacgattgggttatctatgctttcagcgatgccatcagaagaaatagtaacac

SEQ ID NO: 92767 - DNA, 274 bp, Homo sapiens
ggaacatcaagggatgcccccccattcttagggatggtgaccttcctcaccaaatcctccattgacaatgtgggattcacctccaatccctgagagccttgccccaggcagtcacgggcttgtctggtccttggagcggagctggttaggcaggggtcagcctgagaaccacgtaggggtggggtgcaggaggcggcaggacatggtggtggtggtccttggtatgaaaccatgtgcttccaggagcagcgagtcagaagccgggccaggacca

SEQ ID NO: 92768 - DNA, 220 bp, Homo sapiens
gaattttctagttatgttttctttttaaaaaaaaaaattaacaaaagttgtatgtattcaaggagtacaacataattctttgatatatgtatgtgtactgattaaaaatatggaatacttcacaaatttgcatgtcatccttgtgcagggaccatgctaatcttctctgtattattctgattttagtatatgtgctgtcaaagcaagcaatttaatttct

SEQ ID NO: 92769 - DNA, 508 bp, Homo sapiens
gaggcccctgctgagccgcggggcttcgcctgcgttcgggtgctgtgtgaggctagcactgccagtggaactgctgttgggctggaggaagtggacccagccagggggcaggaggtgttggccgcaggcccatgcttgcaaggcaaccagaccctgtgtcacaatgccaaagccagttaacctcggggaagaaacgccgtgggtggggacttctgagtgtttgtcaagtgaaaatggaggaagcaagaaagacagggccccagctgctcctgagatgtgtatcttctgtgattctgtctccagggagggactgtgcagcatctgcctgaacatctctgggacacagccgtcctctcgccataggaaggctcttgtccacagaggagtaaagggaagggcgctgcttcctgcaccagctcaccgtggccgctgtctccattttcgcagtctcaaaccctcggtgctttcagtgtggataaaagagtgggaggaacatttaaaaagtgaa

SEQ ID NO: 92770 - DNA, 340 bp, Homo sapiens
tatttaagtaccctgattaatcatttctgtagatacacactcttatctgactgcattctagaaagtattgaattggtttcacattctcttttaaaaaaagaaggttaatgggaagatgggaaacgcccttagttctcatgcaaaagggaaaacactggaatgcaaagttttgacccaaaccacagctatgaagccagcatcgggatgctttcaaagctaagcattgctggggtaactttcataatataaaatgtctggaccatctcattaccaatgagaattgcattctttaaagatgatttgaacaacatttgctactctgcttgtcatctataccatg

SEQ ID NO: 92771 - DNA, 148 bp, Homo sapiens
tactatcagtagttttcattagctcctcaaagctatattgcaaagaatttaaatattattatcattttaataaactaggtcagttcacaaaagcaaccaaccacaaaagcactttaaacaaataagactcaccgactgagattaaaag

SEQ ID NO: 92772 - DNA, 359 bp, Homo sapiens
gtcttgtcctttgaggccagaacagttgacatttatccaaattccgccagatgctggagctgatcctacattaggtcttgagtcaagcatgaagacagcagtaaattttttacagactcagcaaaacacaaggcccagttagtaaatacttgctatttcttgctctagttggctttgggaactgagactgtgtcaatgtggcttaaagttttgcctgggaaagataagactgtaaaccaacaaatcactctttgcttcagaaaattcctagagatcaatttacaaagataaaaatattctcatgtgagcaagtatcacttgctaagtaacagtatacttacttaaacaccatccctgta

SEQ ID NO: 92773 - DNA, 389 bp, Homo sapiens
attgaaaagaaaacagatattagcaatcaggctgagattagaaaggaaaaacatatctaaaaatgaaaattataaggtgaataagctagtcaagaagtaatttaggaatatatattagaagttaatactaaaactagacctaggctggaggttaggaaaagtagagaaaggcagtcaggagttcaagaccagcgtggccaacatggtgaaaccccatctctactaaaaatacaaaaaattagccaggcatggtggcacgtccctataatctcagtcacttggtgggctgaggcaagagaatagcttgaacctgggagatagaggctgcagtgagtcgagactgcgccactgcactccagcctggacgacagagtgagactccatctcaa

SEQ ID NO: 92774 - DNA, 547 bp, Homo sapiens
gacagagtgagactctgtctcaaagaaaaaataaataaatgaataatgacaatatgattgtcatgcttaagatactatgggtgttcatattcacatttccccagttgacccaatactgacccttgtagtgctttttttttcttttattgatgcaggatccaatcaggtatcacatattgcatttacttgtgcttctgttgtctccttaaatcgaaaccatttggatagtgtgggttttgtgggattttttgttttgttttcttttatgacatttacattttgaagagatgaggctgttgttttgaaaattcagatttgtttgatcattttgttactgttagattccgtttaaatattattttctggcaagaatacaacatgggtggtggcatgtccttttcagtgtatcacatcaggagatacgtgatgctgctttgtctctttgtcggtaatatataataaaataggatcacttggttaagttgatagcaactggatttcttcatgattttccctttatgtcctgtttccttaacagccttttacc

SEQ ID NO: 92775 - DNA, 334 bp, Homo sapiens
acaattagtgttatgagttattcaacttctttatcagagtaaagtaggaactaaaaaaattttttaactattttgaaaatctaaatataaaacttttttaaagtttctaaatggttatatttcaaaataaaaagatgaaaaattaagtatccacattaagatgttagcaacagaacaacagaataaattcaaagaaaatagaaaatagaaaaaatatagaaaagatgaaagtaaattctattaaactttcaaggataacatcccattcttataaaaagtatcctagaaaataaaatgcaaccattcttttagctcactttatgaaagcaaaatt

SEQ ID NO: 92776 - DNA, 155 bp, Homo sapiens
tcagggagcctttcctaacttgtctgcctcaggctgactgctcttctgctctgtgtctcctccttgcagatgggctctgagtgtacagcattcgtgcaatcaacaaatagtggctgaatgtacactgtgtgcccggtactgtttcaggcactggc

SEQ ID NO: 92777 - DNA, 212 bp, Homo sapiens
ggaatgtttaaatcagaagaggagagatacagctgagcattttccttatgggcaaataaggtcttttccctatgttcttaatctctaaaacttacttttgattttatatagacagcagatagtcgaaagattagaattaatttaatgtatacacttactcatttctaatataaaagccaatcttaatatttgagtttgaatattttttcccc

SEQ ID NO: 92778 - DNA, 361 bp, Homo sapiens
accagcctgatcaacatggagaaaccccatctctactaaaaatacaaaattagccgggcatggtggctcatgcttgtaatcccagctactcgggaggctgaggcaggagaatcgcttgaacccaggaggcaggggttgcagtgagcggcgatcacgccattgcgctccagcctgggcaacaaaagcaaaactctgtctcagaaaagaaaaaaaagaaaacgacatccgtcatcagttttcacagaggccaaatcccagggttataaaagccctagtatgtgggcagttctttcacgctggctattttggtggcttggggacatgtttaggaatccttcatgcttatcagcattaagccact

SEQ ID NO: 92779 - DNA, 457 bp, Homo sapiens
ttaaagagggcagatactttccggatcctggggatttgagaggtcacatgatttctatccattccatcataacttacctgtacaaagtggtaggtaatagggctgagattctggggataaattcagccccttttccaaacctggtgacatccatctaccaagttcaacaaacaaaactccacaattctaacattctctcttttcaaactggaaaaaattatcctcctggttttaataagaggccttgataggcgataaattgtaatgtaatgaaaaagtggatacggagggaatttggggctggaagcaaaacaagtacatattctacacttggataatgaaccaagccaatttattttggttactgtcaaatatggattaaaatgtgggtcacttcctgaacacaccagaaatgaaactgagattggcaccaagttcccaaaacctgatgaagagt

SEQ ID NO: 92780 - DNA, 158 bp, Homo sapiens
ttattagttacagtagttaggctaccatgattaatccaaggaaggagagcttgaactataataatagtaaacaagcattaagatttttatcaggggccaggcacggtggcttacacctgtaatcccagcactttgggaggctgaggtggtgcattact

SEQ ID NO: 92781 - DNA, 365 bp, Homo sapiens
ctacaagcaaaaggaaaagctgccccctggtttggttccttccctgcaagttatcttccaccttttcacttatgtccttcccatttcaaattagatcctaaagtccttcaatcactttcttgcctcaatggattacacctgccttgaaaaccacaaccttggattatggctcaatataatcactgcttgctgccctccactgccctatggatatcttactgagatcattaatgaacactgactgccaaatataacacttttctactaagctctcaaagcaagtaatggaaaaagcaacaatctgatactattgagctctctccccttcataatcactcccctttggggcttcaagggcaccattc

SEQ ID NO: 92782 - DNA, 281 bp, Homo sapiens
agatggagaaggaaaattatcgcgaagtaagctttccttcaagagtagaaaggtaacagatgccagtaaagggaggaaggaatgagtgcaggcagctctggacaacagggaaaggtaggagctgagagtgggtttagtttgggttcatgtctaaatttactaatcatccagtcacagtggttcccatctgtaatcccagcactttgggaagccaaggcagtagaatcacccaggagtccaagaccagcctgggcaacatagcgaggccccatctctatttc

SEQ ID NO: 92783 - DNA, 491 bp, Homo sapiens
ctggaatgttatttgtgaactaggccttgcaccttgtcaatatttttagttcttaaatttctggaatgttctaaagacataaaacatctacttcattttgaaattttgattttaacatttcactaacaacactgggaaaggatcatcttaactaaaggtgtcaagactaacgtttgagcttagccgttgaactttctcttaggggaaacagtttaatccccaagtactatgagataggcgttttaaggcaactttttaaaaaggaaaataaatctgctttttgccgtctaggaaagatacatttttccttgtggaaatctgcagtctgaaaagacagatatgaaaagcatgaactgttgaaaataacctaaatgttctttgaaaatttaaaggccagcttatcctgcaatggtgatagaatagtcggcttacaacacgcaaagccgagccgcgggtgggcaggcgccgcccgtggctcgcggagtggatgc

SEQ ID NO: 92784 - DNA, 505 bp, Homo sapiens
aggggagtggtagacttttccggctgacctaagtcctcaaagatgaataggacttcaccagggaaggcattccaggcagagggagcagcagatgcacagacacaggggcaaggcgcaaggtggggtgtagcgttcagagtctggaaagctgctagaggccagatgatagacagttgtgctaagaagattgggcttaatcctgagggcagatgagtaaaatgttcagattcacattgtagaaaaggtcacccaggtggcactaggaagaatgaattgaagggaagccacattaataggcggaaagaccagtttaaagattgctagaataatcccaatgagaactggtaagagcctaagcccagtggctaaggaaagtaggagacaaattcaagagggcttgggaagtaaaatccacaggacttactggtcagctggatggacgggcgatgtttgggccaatgagaagatggtgttgccacccacctaagtagggatagagaaggaa

SEQ ID NO: 92785 - DNA, 482 bp, Homo sapiens
tacaaaattgacttgtttatatcgatagtgcctctggcatatgttgaccataaaaggaatatgaactaaaaaaataaaatcctaagcctcccgacagactgaatggacccgctcttggccaaacgggatccccaaaaccctgaaaatctatcagggtatggcaggaagtgggcattggacacacctcattgtgcccaccccccgccctttggaatttaggcacaagtgaccaccactaacattaaaatagagattataagaccgacaaaaccgactcttgtaacaacaaaataccaaattataaacaggacctaagaccatgcaggcaggggttaagtgatacatgcctacacttaaagagtaagctggccgggtgcggtggctcacgcctgtaatcccagcactttgggaggccgaggccggtggatcacgaggtcaggagatcgagatcatcttggctaacacagtgaaaccccgtctct

SEQ ID NO: 92786 - DNA, 851 bp, Homo sapiens
caagcagtaagtgtgggatgaatgaagacacaactcacccttggtggcttaatttcacgtctttttctgtttgctgaagtctaaataatattgttaagttgtaccaggcagattccacaggctgtgagtgcagagtgcactgtaaccagaacattcgtcagaacaccttcaaagaccaccacgaacccaatacagatgccaaggcttaaaggagatgaaataatgagctttgccggttccctcgtgttattttgtggagagcagttcggtgatgctggtcaaatttaaaatgtgccttccctttgacccagcaattccgctgctaagaatgtaccctttggagacagagacacgtgtgcaaaggtgaaaatataatttgtgcacgtcttttctctctacaccttatccctctctctcctttcttttagtggatgaccctgcttttcatttcccaaagaaaacagaagcaaccagcagagaaccgcatacccttcagcctgtgttcagcagagcctccttcctttctgaggctccagacccagctcgggcacccctgacctctagtgcccaatttcctccctcctgcctgttggaagacatcactcttttttgcatgatcagttttctgcctttctacctggctattttcatcagtctgtacacctgctgtcattctgctattgaaaaaacctgagtcctctctttacctgacttaaaactttcctcaatatcatcaaattctccactcctctttataaagcaaaacatgaagtgctcatgctcatactcagcgttcccatccttcctgaaagccactcccatcagcctttggtccataccactctctcaag

SEQ ID NO: 92787 - DNA, 603 bp, Homo sapiens
gcaaggattcccaatgctaaccaatgcctcctctcttggcttaagtgacaatgacactaccctctctggccccaccttggctttcttctcccaccatccctgtcaattgtggtatctgcccccttttcaccatccacagtgcctctcagacaggtacttctcccaggcccttagcttcagctacacctgtatccgctgatttccaaatttgcctccaaccagatcttttctgaggtttgaattaaaatatccaacttctctagatgtgtccaaaagaatgtcccccatgggcacttcagactcatctccagacatttccttcaacccagacttgactcgtcccctacatctaatcagaatcgaggtttgctgattttatctcaacatttctggaagccatttgccctttccatttctactgctctcccttaatttaggtcttcaaaattaacttatgttaatgatgacaatagcagtctcataactgacctttcatcatcaataatggctctcctaactcacatccccaaccctcacttcattctccaaatcacttcagggcaacagtttaaaaatggaaatctgattatcattccctcctca

SEQ ID NO: 92788 - DNA, 142 bp, Homo sapiens
gggtgaaatgtcattgagtttcctagattcttccacagcccctcaggattgactatgaagtgtaagctgtgtcatctgatttgtcatggcagtgagcactcccttaccttcgatgatgcctcacgtcaccttttgcataaag

SEQ ID NO: 92789 - DNA, 472 bp, Homo sapiens
tgaatgtggtgttcctgggtggcgccttcatctgcagcatgatcttcaacaaggtggccgtcactctgggtgacgtgtggatcctgctggccacgctgaaggtcctctccctgctttggcttctctactatgtggcaagcaccacccgccgaccacacgccgtgctctaccaagatccccacgcggggcccctctgggtgcggggttccctagtgctcttcggcagctgcaccttctgcctcaacatcttccgagtgggctacgatgtgagccacatccgctgcaagtcacagctggaccttgtcttctctgtcatcgagatggtcttcatcggcgtccaggtgacaggcttctcacgtccccacatcaccgaggacataccctatctacccatgccatgcacacacctcccactacctatgcctaggaacagccacacaggcaaatacctaatgtcccagggtctttgcac

SEQ ID NO: 92790 - DNA, 472 bp, Homo sapiens
ctccaccgcccaccagtgccaggtgcagagggaaggggcggcgcatctcttgggagacaactgctcacgttggaaaagaacctctctagttaaattcgtgccaccctgaagcatttcacacgcactgcagccgctccgctgcctctgcctggctcccgcctcctaacccagcacccaaacaaaggtgggatgcagctcccactggggaccagattgtggaggaggaagcagcttcccagccctaggctgttccaggatccaggtcccttccaagcagaggcaggcatctctgcagccagagatgggcaagggtgggcctgagccagggccagactgcagacgcctgcctccctcctgggtgtgaccccagacgtgcctggcctcaggggtctcctgacaccccgtcctggggggtgaagattaaatgagagcccccacactgtccctcccctccgaagcgcacgctgggacc

SEQ ID NO: 92791 - DNA, 348 bp, Homo sapiens
tgggtggaatacagggaaatcttacatattgtcttgcctgacagttgctttaagtggactccttctcatggttttggagaccaccccatcactgagaatttgtgtctcctagagttcagtctaaaagccgagatcctacattgtgttccagggaagcttaagaaaattaggtctctgcttgatttggaaagcttagactgaacctaaatgaaaatcaggtcagtaaaaagtcagagtttaacaaagatagatgttatgtcccagagaccagacatttaagcattactttcaaagtgcactcagagagatatttgttcttcatttagtacttagagactaagtcttatc

SEQ ID NO: 92792 - DNA, 861 bp, Homo sapiens
tcagctttttcaacatgtctttatttgcttaaattaacaaaatataggttacatgctcttttcaggtaaactgctttttcagtgaagcagaaagcaatattcacaacttgggctgctatatacttagagttttagtttttaaatagcaagccagagttctgtacaaaatcaacatttggtgtaatgttgtccaaatatgcgaaggatttcaaacgttagctctgttatattttgttccagcaaagcagacaaagatcataattcaaaacaccatgttaatattttattaaatgcgttcagggcttaataaatacagtatgcacattgagctttctcatgcaactactcatatacaaatataccagttactcttgtgggtttatgaaaggtcagccttagtctcatggccggtggggagtcaaatttttaaaaagagagacagaaagaggaattgaaaggtaacatgaggagtaatcataggaaagaataaaaagaataaaagaaaaatatgccactttgctggtccattgatttgttcaaagtgacagtggtcaaaaggctggaaagcatttggtagtgacctattttcagagtctcacaatatgatattctggttttggaatgctggtaatcttggaaggcttcatcccttagttctctgagatggcccacatggactctccttcaaggcttgccttctggttcatcagctcattaggcaaggctggccaacccttcccttaactctgtgctcttgcataaagtgtccatgtaatttctcacccaaactggaatacttttgagaattaaggtgacacttgaataattatcctgggacaacaggtctaaaccacgatcatc

SEQ ID NO: 92793 - DNA, 1932 bp, Homo sapiens
cgacaacgtcacccgcagaccggccaatcccgccaggccgcggcccagtggcgccggcgcgcaccgaagacgacaccagccatccggccaatcccgccccgccgcgccccgcaggcccgcccactcctcgcttctccacttcccttctcgaagtgtccggtcgcttctcgcaggcggcgcgcttgctgggtcacagtgaggcggctccgcgcaggcgcagccgggcgggcgaggagcggggaagctgactcagggctgcggccggggtcctgcggggtaggagcgcgaggccggcctgagggaggaggcctagcgacccatccggcgcctcccgccccgggcacccgcccgcggccgcgcatcctgcgggccccaggaggcctccatctcaaaacaacgtgtttttaggcacatgacagccttcttgcaatcaagaaactacgtgtggccaggatctcatccactatcacagtttcagctttccccaaactggaatgtgtctttgcagacgcccatccttattaaagggcaaagacttctcatacacctaggatggatcttatattcttggcgggactgcagagaaggtgccgtgtcctgagtcctcatgtcagggcacaggcttccagccagttctacctgggttatgtttatctcaattccctggtggtattggtgtctgctgggttttgccagaatgaagacaccgtgttttcatttgtcagttgattcgtattttccaggaagacattctgagattacagcattgtcttagtcaaggtgctgcagaaggacagaactaataggatatatgtacatatgaacagaaagttttatgaagaactggctcacaccatcacaaggcaaagtcccatgacaggccatctgcaagctgaggagcgaggaagccagcagtggctcagccggagtccaacaagcctcaaacggaatccgacagttcaggcttcagtctgtggccaaatgcccagagaccccggaaagctactggtgtaagtcccagagccgaaaggccaaagaacctggagtgtgatgtccaagggcaggaggaatggacagaagcatccagcatggggtaaagacgaaagccagaagactcagcaagctagcttacctactttcttctgcctgccttgttctagccgcgctggcagccggttggagggtgcccacccccactgagggtggatcttcctctcctagtccactgactcaaatttcagtctctctgggagcaccatcacaccagaaacaataccagccatctagccacccttcagttcaccatcacaaccattgtcttattcatgaaacttctgcagacccaccttaacctccatcggtgacttctacctgaagccctctgattgttgcccagtggtgctttttaaaataatttccatagtttcttctacacctttagttggcattctactgtaaaggagagattttattttcttactcatttatttgttagtttatagtcaccaccatatggatgcagagttctgtctcattcactgggaagtattctgttgcagtcatgatttattttgatgttcacatgccagatttggtgagtgagcgccccttcacgctggctcccgagtgctgacgtgtccccgtccttctctgcacttttccttacctcctggcctcagatattccagggtcatttgttctctccctgctccaaccctgcagtcagccatctccctagggacgttggttcctttatggaaggtggcatttagaagccaggatttgggctgagcactgtggctcacgcttgtaatcccagcactttgggaggccgaagtgggcggatcgctggaggccaagagtctgagtccagcctggctaacatggtgaaacccttccccgtctctactacaaataaaaaattagctggga

SEQ ID NO: 92794 - DNA, 1888 bp, Homo sapiens
cgacaacgtcacccgcagaccggccaatcccgccaggccgcggcccagtggcgccggcgcgcaccgaagacgacaccagccatccggccaatcccgccccgccgcgccccgcaggcccgcccactcctcgcttctccacttcccttctcgaagtgtccggtcgcttctcgcaggcggcgcgcttgctgggtcacagtgaggcggctccgcgcaggcgcagccgggcgggcgaggagcggggaagctgactcagggctgcggccggggtcctgcggggtaggagcgcgaggccggcctgagggaggaggcctagcgacccatccggcgcctcccgccccgggcacccgcccgcggccgcgcatcctgcgggccccaggaggcctccatctcaaaacaacgtgtttttaggatctcatccactatcacagtttcagctttccccaaactggaatgtgtctttgcagacgcccatccttattaaagggcaaagacttctcatacacctaggatggatcttatattcttggcgggactgcagagaaggtgccgtgtcctgagtcctcatgtcagggcacaggcttccagccagttctacctgggttatgtttatctcaattccctggtggtattggtgtctgctgggttttgccagaatgaagacaccgtgttttcatttgtcagttgattcgtattttccaggaagacattctgagattacagcattgtcttagtcaaggtgctgcagaaggacagaactaataggatatatgtacatatgaacagaaagttttatgaagaactggctcacaccatcacaaggcaaagtcccatgacaggccatctgcaagctgaggagcgaggaagccagcagtggctcagccggagtccaacaagcctcaaacggaatccgacagttcaggcttcagtctgtggccaaatgcccagagaccccggaaagctactggtgtaagtcccagagccgaaaggccaaagaacctggagtgtgatgtccaagggcaggaggaatggacagaagcatccagcatggggtaaagacgaaagccagaagactcagcaagctagcttacctactttcttctgcctgccttgttctagccgcgctggcagccggttggagggtgcccacccccactgagggtggatcttcctctcctagtccactgactcaaatttcagtctctctgggagcaccatcacaccagaaacaataccagccatctagccacccttcagttcaccatcacaaccattgtcttattcatgaaacttctgcagacccaccttaacctccatcggtgacttctacctgaagccctctgattgttgcccagtggtgctttttaaaataatttccatagtttcttctacacctttagttggcattctactgtaaaggagagattttattttcttactcatttatttgttagtttatagtcaccaccatatggatgcagagttctgtctcattcactgggaagtattctgttgcagtcatgatttattttgatgttcacatgccagatttggtgagtgagcgccccttcacgctggctcccgagtgctgacgtgtccccgtccttctctgcacttttccttacctcctggcctcagatattccagggtcatttgttctctccctgctccaaccctgcagtcagccatctccctagggacgttggttcctttatggaaggtggcatttagaagccaggatttgggctgagcactgtggctcacgcttgtaatcccagcactttgggaggccgaagtgggcggatcgctggaggccaagagtctgagtccagcctggctaacatggtgaaacccttccccgtctctactacaaataaaaaattagctggga

SEQ ID NO: 92795 - DNA, 1770 bp, Homo sapiens
ttaggagcaatgttttgcaggcaggtggtggatctcataaagtacattctcaagggtggggagaattacaaagaaccttcttaagggtagaggagattacaaagtacattgatcagttaggatggggcagaaacaaattacaagggtggaatgtcatcagttaaggctgttttcacttcttttgtggatcttcagttgcttcaggccatctggatgtatacatgcaggtcactggggatatgatggcttagcttgggctcagaggcctgacaggagttcaagaccagcctggtgaacatgacgaaaccctgtctctacaaaaataagaaatgaacgcagcatggtggcatgcacctgcagtcccagcctcttgggaggtggaggcattagtcagctgtgaatgtgccctgcactagagcctgggcagcagagcagacccttcctcaaacccaaaaagcgtcatgccaaccagaccagatggtcgcctaatcaatagagaccacgcccaatcaggtaaggacagacacaaccaggcatgctctttcttgttttgttttttgtttgttgttttgagatggagtttcactcttgttgcccaggctggagtgcagtggtgtgatctcggctcaccggaaccaccacctcctgggttcaagcgattctcctgcctcagcctcccaagtagctgggattacaggcatgcaccaccaggcccggctaattttgtatttttagtagagacgggggtgtctccatattggtcaggctggtctcgaactcccaacctcaggtgatctgcctgcctcggcctcccaaagtactgggattacaggcgtgagccactgcgcccagcttgttgtttttctttagacagtgtcttcctctgtggctcaggctgaagggcactgggatgatcacagctcactgcagcttccacctcccaggctcaagccatccttcttcctcaggctcctgagtagcgggagctacaggcatgcgccatcatgcctggctaatttttgtattttttgtagatacagggttttgctatgtagcccaggctggtcttgaactcctgacctcaggtgatccctctgcctcagcttcccaaagcgctgggattacagaacatgagccactgtgcccggcttattgtacagtctttactctcggttttcaccagagaactcaagggctgtgaaaagagcaggacctcaccagctgcacggcggtggtgactggctccatcttgctgtccctcccaatcacacaacatctccccttgaaggctctgcccaggcccggactcccacctttcaagatgtctgggtcagtgcaggacctcctccttggccacatcgctctccttggactggttcaagtgattctcccacctcagcctcccaagtaggattacagtgttgactcacctgtggagtggtctgagcctgaatgcccggggctgtggccaccgagtgaacgggctgtgctaaggggaattgccaccttgggaaccctgtgtagttacggcttttctgattaagtatcaataaaagtctgaccttgtgaaaaaagcaaacgtgagtggccctgcttatgtttcaccttgcgttgctcagtgatagttctgcaaagtcgcaggaaacctggaatcatctaattatcgtgagtgttggtgagtaacacccataggcactggctcccggggaaatacagagtcaggttcctccgagccgctggccacagcatttttgttaagcagttcatcgt

SEQ ID NO: 92796 - DNA, 572 bp, Homo sapiens
cgacaacgtcacccgcagaccggccaatcccgccaggccgcggcccagtggcgccggcgcgcaccgaagacgacaccagccatccggccaatcccgccccgccgcgccccgcaggcccgcccactcctcgcttctccacttcccttctcgaagtgtccggtcgcttctcgcaggcggcgcgcttgctgggtcacagtgaggcggctccgcgcaggcgcagccgggcgggcgaggagcggggaagctgactcagggctgcggccggggtcctgcggggtaggagcgcgaggccggcctgagggaggaggcctagcgacccatccggcgcctcccgccccgggcacccgcccgcggccgcgcatcctgcgggccccaggaggcctccatctcaaaacaacgtgtttttaggtaatttcaaacttagggaaaagcttcaagaataataccgaaaatgtcagtgtccccagcacctagatcccccagttaaatccttttccatttcaccgcgctgccccccgccccctggacggttatgtggccgcgtggggttggctctgcccagggccgcggtc

SEQ ID NO: 92797 - DNA, 759 bp, Homo sapiens
cgacaacgtcacccgcagaccggccaatcccgccaggccgcggcccagtggcgccggcgcgcaccgaagacgacaccagccatccggccaatcccgccccgccgcgccccgcaggcccgcccactcctcgcttctccacttcccttctcgaagtgtccggtcgcttctcgcaggcggcgcgcttgctgggtcacagtgaggcggctccgcgcaggcgcagccgggcgggcgaggagcggggaagctgactcagggctgcggccggggtcctgcggggtaggagcgcgaggccggcctgagggaggaggcctagcgacccatccggcgcctcccgccccgggcacccgcccgcggccgcgcatcctgcgggccccaggaggcctccatctcaaaacaacgtgtttttagtgttgactcacctgtggagtggtctgagcctgaatgcccggggctgtggccaccgagtgaacgggctgtgctaaggggaattgccaccttgggaaccctgtgtagttacggcttttctgattaagtatcaataaaagtctgaccttgtgaaaaaagcaaacgtgagtggccctgcttatgtttcaccttgcgttgctcagtgatagttctgcaaagtcgcaggaaacctggaatcatctaattatcgtgagtgttggtgagtaacacccataggcactggctcccggggaaatacagagtcaggttcctccgagccgctggccacagcatttttgttaagcagttcatcgt

SEQ ID NO: 92798 - DNA, 446 bp, Homo sapiens
ctgggcaatatggtgagactttgtgagcatggtggcacacatctgtggtcccagctacctcagaggctgaggtgggaggatcacttgagcttgggaggttgaggctacagtgagccaagattgcgtcactgtgcatcagcctgagtgacagaggaagagtctgtctccaaaaaaaaaaagaaaaacgatagagattcttgggcccaagagtttgcattctaaccaagctcctaggaatactgatgctgctgccaatccatggaccacattttgtttttttgtttttttttttttgtttttttgtttttttgagatggagtttcactcttcttgctcaggctggattgcaatggcgcgatctcgggtcactgcaacctccacctcccgggttcaagtgattctcctgcctcagcctcccaagtacaagtaggtgggattataggcat

SEQ ID NO: 92799 - DNA, 325 bp, Homo sapiens
tccatgggggatccatccttggcagactgctctcattattccgcatctccctgggtaatatcatctactcttgcattggactcccacccatatgctgccttcctaattaatatctctacccctgatttctgccttcactttcagactcacatctccaactgccagctggacatctcctcttggccattcccacaggcactcagaatgactctgaccagccaaacccatcttcttcctccagatctgctcctgttctcatcctgtctcagttcatggtgccaccatcttccagacatatgagtttgaaaatgacatcatccttcaa

SEQ ID NO: 92800 - DNA, 324 bp, Homo sapiens
gcacccaagttttgggtgtttttgttcaatcctggccaatcctaaattatcagggaggcgattggcagggctgggtcgttgaagtgaggtctcttttccgtttcctgggctgctctggaccccaccttccgtgaaaacaccttgggctaagcagagtgggaacagggaccaacgccacctgcttccagtgctcagcctggtgggaatgactgcagggtgttctggtctcaggatggtccactcttgagctatctggtgtgagccatatggaaactcctctccctctggccccttctgctattaaggagggaaattttaccttaa

SEQ ID NO: 92801 - DNA, 522 bp, Homo sapiens
aaaaaactcataatgttttaagaaagtttacgaatttgtgttgggccgcattcaaagccatcctgggctgcatgcggcctgtgggctttgggttggacaagcttgcatgtgactgagtttgttcttaaactggtaaggaaactttgtcaggcagtatttatttccataagtggtgttttcctacgaatcagcacatggtgaaaaatgaggggctatgtatatttaaggtgcagaattaaattggtttaaatatcttttctattttgagctttgattttgataccttaaaggaaatatcaacagtactatttccaacctgaagcctcctcagctgttctgtcctagacttatggcgtcctctagtggccactatgggcagctatgatcctgttaccttccccagcagttcccttcctgccctgttccccactgctctggcttgggtcaagccaggcctgcctcccgccaacatattcttcagaattttacctcatgtaatagctgatgagcttaaaaaaaaaa

SEQ ID NO: 92802 - DNA, 266 bp, Homo sapiens
gcagagcaaagccactcatttactccactagtacttactgtgtaccctctagaggccagatcctggggagcagtttcggagcaggcacagaaacacgaggcaggatccttgacttcagggacctcactgcagggtacctcatcaaatctgcttacacagtccgggtatcaagcaccatctagaagtgatttcagtgtgggcctctaaaagacagagagaaaaatctataaccataacatcatttcacatcttttaaaaagcgacca

SEQ ID NO: 92803 - DNA, 443 bp, Homo sapiens
attggcagatccctggtaccgtttcaggacggagtcaaatctccaaattggtctcccagggaattagaggtaatttgggggaacagtctgcacttcttgggcctccctcggcacagatcagcctgagccagaggaaactaactgccaacattgggaatttcccttgtaagattgtaagtctgcctcttcattttttgtgttttcttgaacatgaaaatggagtctgccccttactccaagaggctagtaatggggtctcttaaggataatgatgcattgagagaagtagtgtctgaaataataaagtatgtcttaacaaatattggacaagtcaattatttaaattgttccaagctggcaataaggagcaggatgtctgaggaggagggtggtacaatagacacattggctgatggacttttttgtaggtgcatcagtcaatg

SEQ ID NO: 92804 - DNA, 162 bp, Homo sapiens
tcctagaagctgactgagaaagggctgaggttgtctgagcctatcctttcatatcagtacgaggaaagcaattaaacctcattgcccctgtgaaaagcagcaagcaagcagcgatggagattgaaaaggagcttctagaaccgggcatggtggtacatgcct

SEQ ID NO: 92805 - DNA, 386 bp, Homo sapiens
gctgggtataaaacaacgggcacctgaaggtattcagatacaatttccttaaaaataccttggtttccaagcaaaacacgttatttggctgagaacctttagtttgtaaataccaaaccataatatacaaatgagatctcaagccaaatgaattttttaagccctctttcccatatctgttcatctatgatagtcaactgaataaatgagaacaatgtgatagataaaacaacaaagcataaaaaagattcatgcttggttttataagctattttgaaatataagtatcattgctattctgagaaatctatatacaccaaagccctccctccacaaaaaaactggaaatgttctaataaatgtctgatttcccccaaaaaaaatta

SEQ ID NO: 92806 - DNA, 1827 bp, Homo sapiens
gcgcgccacggcaggaaagggcggtcctgcgctgtggcccacgctcgctcccgctgtcggactctgggcctggaccgcgcgtggccggcgccaaaagcgagaggcatgagcgcgcgcccgggccagtgaactgctcggggatggactgcggctcggtcggcggccagaggacccagcgcctgcccggccgccagcggcttctcttcttgcccgtgggcctcagcggaagaccgggcggcagcgaaacctcagcacgccgctgcctctctgcgctctccgacggtctgggggcgctgcgccctcgcgccccggcggcccgcggcggcgtgtcacgtgcctcaccgctgctcctcctcctgctagtgccctccccgcgcttggccgccgcagccccgcgccggcagctcggggactgggagcgctcgcgcctcgggtatgccgcacccccggccgggcgcagcagcgcgtggaggtgctcaccgggcgtcgccgctgccgccggcgcccttccccagtaccacggcccggcgcctgcactcgtttcctgcaggagagagctaagcttgtctgctggatccctgcagctggagcgcaaaaggagagatttcacctcttctgggagcaggaaactctacttcgacactcatgccttagtgtgcttactggaagacaatgaatctcactctttcatccaggctggagtgcagtggcacagtcttggcctactgcaacccccacctcccggtttcaagcgatcctcccacctcatcctcctgagtagctgggattacaggcatgcaccaccacacctggataatttttctgtatttttactagagacggggtttcaccatgttggccaggctggtctcaaactgctgacctcaagtgatccacccaccttggcctcctaaagtgctgggattacaggcgtgaaccactgtgtccagttgccaaacctaattatgtttaaacatgaactctttttttaattaaaattttttaaaattttatttacattaaaatggagatgggatcactatgttgcccatgctggttctgaactcctgggctcaaagatcctcccgccttggtctcccagagtgttaggattacaggcgtgagccaccacacccagccagtgaactcttcttaataaaactttaaaatttggcaaaagtttagtttgagtttttaaaaactaggaagacagacgagaaaaaagaaaacagagtcagagctaaacaatgttaacattttgggtttgctactcaacaagcagaaatcattgtgtctgcattggtcaagatcctggaggccaacatggacatcgtctacaaagatatggtcaccaagatgcagcaggaaatcacttttcagcaagtaatgtctcagattgcgaatgtgaaaaaggatatgattattttggagaagagtgaattttcagccctcagagcagaaaatgagaaaataaaactcgaactacatcagttaaaacaacaagtaatggatgaagtgatcaaagtccgaacagataccaaattagacttcaacctagaaaagagcagagtaaaagaattgtattcattgaacgaaaagaagctgctggaattgagaacagaaatagtggcattgcatgcccagcaagatcgggcccttacccagacagacaggaagatcgaaactgaggttgctggcctcaaaaccatgcttgagtcacacaagcttgataatattaaatatttagcagggtctatatttacgtgcctaacagtagctctgggattttatcgcctgtggatctaataaagtgtctatttaaagtga

SEQ ID NO: 92807 - DNA, 1241 bp, Homo sapiens
gcgcgccacggcaggaaagggcggtcctgcgctgtggcccacgctcgctcccgctgtcggactctgggcctggaccgcgcgtggccggcgccaaaagcgagaggcatgagcgcgcgcccgggccagtgaactgctcggggatggactgcggctcggtcggcggccagaggacccagcgcctgcccggccgccagcggcttctcttcttgcccgtgggcctcagcggaagaccgggcggcagcgaaacctcagcacgccgctgcctctctgcgctctccgacggtctgggggcgctgcgccctcgcgccccggcggcccgcggcggcgtgtcacgtgcctcaccgctgctcctcctcctgctagtgccctccccgcgcttggccgccgcagccccgcgccggcagctcggggactgggagcgctcgcgcctcgggtatgccgcacccccggccgggcgcagcagcgcgtggaggtgctcaccgggcgtcgccgctgccgccggcgcccttccccagtaccacggcccggcgcctgcactcgtttcctgcaggagagagctaagcttgtctgctggatccctgcagctggagcgcaaaaggagagatttcacctcttctgggagcaggaaactctacttcgacactcatgccttagtgtgcttactggaagacaatgggtttgctactcaacaagcagaaatcattgtgtctgcattggtcaagatcctggaggccaacatggacatcgtctacaaagatatggtcaccaagatgcagcaggaaatcacttttcagcaagtaatgtctcagattgcgaatgtgaaaaaggatatgattattttggagaagagtgaattttcagccctcagagcagaaaatgagaaaataaaactcgaactacatcagttaaaacaacaagtaatggatgaagtgatcaaagtccgaacagataccaaattagacttcaacctagaaaagagcagagtaaaagaattgtattcattgaacgaaaagaagctgctggaattgagaacagaaatagtggcattgcatgcccagcaagatcgggcccttacccagacagacaggaagatcgaaactgaggttgctggcctcaaaaccatgcttgagtcacacaagcttgataatattaaatatttagcagggtctatatttacgtgcctaacagtagctctgggattttatcgcctgtggatctaataaagtgtctatttaaagtga

SEQ ID NO: 92808 - DNA, 2076 bp, Homo sapiens
  misc_feature (293)..(293): n is a, c, g, or t
  misc_feature (700)..(700): n is a, c, g, or t
ttgcatctgctataagtgttctcacatgtcgttcttcctggtgagagcgggctgcatcattctggcacttaatttgggtgttcgattttgctatagagttctttgcagtacagcatagcctcttcttggccttgggaacagtgaactcttcttttgatggtgtggattgcatgcatatctggagagaggagggctcaggactgtgttcactttatttggtcagatgtattttatttgaaaaccatttgagcccaaaatacaagtgtacccttcccacttctggctcaagcacncgtgagccgctgcgcctggcccattctcatcttattcaaattactggcacatgggcaagagagacaatgacatggatagaagcttttctgcctttctctgcacacacatacagtgaaggaaccacaggcagattttttgatcagtttggtgaatacattgctcgttgtcactgttccaaccacattggtaaaaaaaatagttaccttttgtcctttggatgtcatgtctaaactttggaaaatataagtcattgcccttttagagaatgtttgtgtagtccaaagattgtgagctccatatagtatgaaaatcaagtacttttgcatgagcaatagcagtttcaaagtgaaatattataatttaatctttttcaagtagatcaaaaattcttaactgattaataaantattttatcaatatatcatccccctttcagagagaagtccccagaagagacagcacacttagcaattgccctcattattaaaggcctaggtgagtggcataaagggccatatgcgattatgtttcaaggtaaacattacctaaccttgtgtgggttaaaaacagtgaacagagattacaccactgcaacgagactcgggcccagacgagatctgcctgggcgacacagtgagactctgtctcaaaataaataaataagtaaatagaacctcctgagctaccctggcttataaggattcagattactttaggaaattaggcattagcactaggaggggggaagatggctggcaaaacttctagctagcaacctatgtctagcacatgggtaactaaccatagcgagatcctgaacacatatcctctaggtgcaggtggagggaacgatgtccaatacctgaagcagaatctcacatggacggaacgtctgtatttccctctcctgcacgaatcactcatcattcttggagggcttctctgcattcctccttttcttctctcccctcccctgccttttgtcttttctaaagagtctgaactccgatttccatgctctcctgctacattaataagcaaaacctgcttgtgtgtacggttctttactggaaacatgactttttgtttctgtattggttttactgtcatccagttttctagtttaatatctagcaaaactaaatctgaatgtactcgctttttccgttaagtatgccaagcacctcggttgaaaggcttgactcaaaccagaagtcttgctggaattcgtctctgaacacttgaaaaacagaaaccctgagccgcaacaaacatgcctctgtgtgtcgggattgcctttgtctctgcttccatgtggcttttccttttgtagctatgcttagtgacataatcttccctcttctagccttctcctttcaagcctgtctgttaattaaccatgtcagtattggcaagcatttatcttcccccaccctaacatgcgatcttctaagaattttgcaaaattctaaacaaatatagagatggtatatagaattcatatctagaaaactttgattttaatgtgagcttatcaaatttgttctggcttttttggcactaaggcaaaaacatgttaaccagaaataatttattcttcatgtatgtaaaatatttgagaatgtttagccttttattagaattttatttggaaaatatttatctttctacacattttacacttatgttcctttgcttataacccaatttcttaacttttttgttacttaagcaaatatcaattatgttttattatctaataaagtgtaagattcttactat

SEQ ID NO: 92809 - DNA, 2911 bp, Homo sapiens
gcgcgccacggcaggaaagggcggtcctgcgctgtggcccacgctcgctcccgctgtcggactctgggcctggaccgcgcgtggccggcgccaaaagcgagaggcatgagcgcgcgcccgggccagtgaactgctcggggatggactgcggctcggtcggcggccagaggacccagcgcctgcccggccgccagcggcttctcttcttgcccgtgggcctcagcggaagaccgggcggcagcgaaacctcagcacgccgctgcctctctgcgctctccgacggtctgggggcgctgcgccctcgcgccccggcggcccgcggcggcgtgtcacgtgcctcaccgctgctcctcctcctgctagtgccctccccgcgcttggccgccgcagccccgcgccggcagctcggggactgggagcgctcgcgcctcgggtatgccgcacccccggccgggcgcagcagcgcgtggaggtgctcaccgggcgtcgccgctgccgccggcgcccttccccagtaccacggcccggcgcctgcactcgtttcctgcaggagagagctaagcttgtctgctggatccctgcagctggagcgcaaaaggagagatttcacctcttctgggagcaggaaactctacttcgacactcatgccttagtgtgcttactggaagacaatgggtttgctactcaacaagcagaaatcattgtgtctgcattggtcaagatcctggaggccaacatggacatcgtctacaaagatatggtcaccaagatgcagcaggaaatcacttttcagcaagtaatgtctcagattgcgaatgtgaaaaaggatatgattattttggagaagagtgaattttcagccctcagagcagaaaatgagaaaataaaactcgaactacatcagttaaaacaacaagtaatggatgaagtgatcaaagtccgaacagataccaaattagacttcaacctagaaaagagcagagtaaaagaattgtattcattgaacgaaaagaagctgctggaattgagaacagaaatagtggcattgcatgcccagcaagatcgggcccttacccagacagacaggaagatcgaaactgaggttgctggcctcaaaaccatgcttgagtcacacaagcttgataatattaaatatttagcagggtctatatttacgtgcctaacagtagctctgggattttatcgcctgtggatctaataaagtgtctatttaaagtgatttctactgttttgccttaagaataccagattgttggctgggtgcggtggctcacacctgtaattccagcactttgggaggctgaggcaggcagatcacctgaggtcaggagttggagaccagactggccaacatgacgaaatgctctcgctactaaaaatagaaaaattagccaggcgtggtggcacacccctgtagtcctagctactcgggaggctgagacaggaaaattgcatgaacctgggaggcagaggttgcagtgagcagagattacaccactgcaacgagactcgggcccagacgagatctgcctgggcgacacagtgagactctgtctcaaaataaataaataagtaaatagaacctcctgagctaccctggcttataaggattcagattactttaggaaattaggcattagcactaggaggggggaagatggctggcaaaacttctagctagcaacctatgtctagcacatgggtaactaaccatagcgagatcctgaacacatatcctctaggtgcaggtggagggaacgatgtccaatacctgaagcagaatctcacatggacggaacgtctgtatttccctctcctgcacgaatcactcatcattcttggagggcttctctgcattcctccttttcttctctcccctcccctgccttttgtcttttctaaagagtctgaactccgatttccatgctctcctgctacattaataagcaaaacctgcttgtgtgtacggttctttactggaaacatgactttttgtttctgtattggttttactgtcatccagttttctagtttaatatctagcaaaactaaatctgaatgtactcgctttttccgttaagtatgccaagcacctcggttgaaaggcttgactcaaaccagaagtcttgctggaattcgtctctgaacacttgaaaaacagaaaccctgagccgcaacaaacatgcctctgtgtgtcgggattgcctttgtctctgcttccatgtggcttttccttttgtagctatgcttagtgacataatcttccctcttctagccttctcctttcaagcctgtctgttaattaaccatgtcagtattggcaagcatttatcttcccccaccctaacatgcgatcttctaagaattttgcaaaattctaaacaaatatagagatggtatatagaattcatatctagaaaactttgattttaatgtgagcttatcaaatttgttctggcttttttggcactaaggcaaaaacatgttaaccagaaataatttattcttcatgtatgtaaaatatttgagaatgtttagccttttattagaattttatttggaaaatatttatctttctacacattttacacttatgttcctttgcttataacccaatttcttaacttttttgttacttaagcaaatatcaattatgttttattatctaataaagtgtaagattcttactatctaaaatatttaattctgtgtgactaatatacttttctgatcattcaaattgaatatgaaaagctagaataactgtattgcaactgttaattccagccaattgtataatgataacactggtgaatttctaagtaaatctaatacttgaaaatttgggtatacatagaaaataaattttaatataatgtaaaaagtaac

SEQ ID NO: 92810 - DNA, 2839 bp, Homo sapiens
gcgcgccacggcaggaaagggcggtcctgcgctgtggcccacgctcgctcccgctgtcggactctgggcctggaccgcgcgtggccggcgccaaaagcgagaggcatgagcgcgcgcccgggccagtgaactgctcggggatggactgcggctcggtcggcggccagaggacccagcgcctgcccggccgccagcggcttctcttcttgcccgtgggcctcagcggaagaccgggcggcagcgaaacctcagcacgccgctgcctctctgcgctctccgacggtctgggggcgctgcgccctcgcgccccggcggcccgcggcggcgtgtcacgtgcctcaccgctgctcctcctcctgctagtgccctccccgcgcttggccgccgcagccccgcgccggcagctcggggactgggagcgctcgcgcctcgggtatgccgcacccccggccgggcgcagcagcgcgtggaggtgctcaccgggcgtcgccgctgccgccggcgcccttccccagtaccacggcccggcgcctgcactcgtttcctgcaggagagagctaagcttgtctgctggatccctgcagctggagcgcaaaaggagagatttcacctcttctgggagcaggaaactctacttcgacactcatgccttagtgtgcttactggaagacaatgggtttgctactcaacaagcagaaatcattgtgtctgcattggtcaagatcctggaggccaacatggacatcgtctacaaagatatggtcaccaagatgcagcaggaaatcacttttcagcaagtaatgtctcagattgcgaatgtgaaaaaggatatgattattttggagaagagtgaattttcagccctcagagcagaaaatgagaaaataaaactcgaactacatcagttaaaacaacaagtaatgtattcattgaacgaaaagaagctgctggaattgagaacagaaatagtggcattgcatgcccagcaagatcgggcccttacccagacagacaggaagatcgaaactgaggttgctggcctcaaaaccatgcttgagtcacacaagcttgataatattaaatatttagcagggtctatatttacgtgcctaacagtagctctgggattttatcgcctgtggatctaataaagtgtctatttaaagtgatttctactgttttgccttaagaataccagattgttggctgggtgcggtggctcacacctgtaattccagcactttgggaggctgaggcaggcagatcacctgaggtcaggagttggagaccagactggccaacatgacgaaatgctctcgctactaaaaatagaaaaattagccaggcgtggtggcacacccctgtagtcctagctactcgggaggctgagacaggaaaattgcatgaacctgggaggcagaggttgcagtgagcagagattacaccactgcaacgagactcgggcccagacgagatctgcctgggcgacacagtgagactctgtctcaaaataaataaataagtaaatagaacctcctgagctaccctggcttataaggattcagattactttaggaaattaggcattagcactaggaggggggaagatggctggcaaaacttctagctagcaacctatgtctagcacatgggtaactaaccatagcgagatcctgaacacatatcctctaggtgcaggtggagggaacgatgtccaatacctgaagcagaatctcacatggacggaacgtctgtatttccctctcctgcacgaatcactcatcattcttggagggcttctctgcattcctccttttcttctctcccctcccctgccttttgtcttttctaaagagtctgaactccgatttccatgctctcctgctacattaataagcaaaacctgcttgtgtgtacggttctttactggaaacatgactttttgtttctgtattggttttactgtcatccagttttctagtttaatatctagcaaaactaaatctgaatgtactcgctttttccgttaagtatgccaagcacctcggttgaaaggcttgactcaaaccagaagtcttgctggaattcgtctctgaacacttgaaaaacagaaaccctgagccgcaacaaacatgcctctgtgtgtcgggattgcctttgtctctgcttccatgtggcttttccttttgtagctatgcttagtgacataatcttccctcttctagccttctcctttcaagcctgtctgttaattaaccatgtcagtattggcaagcatttatcttcccccaccctaacatgcgatcttctaagaattttgcaaaattctaaacaaatatagagatggtatatagaattcatatctagaaaactttgattttaatgtgagcttatcaaatttgttctggcttttttggcactaaggcaaaaacatgttaaccagaaataatttattcttcatgtatgtaaaatatttgagaatgtttagccttttattagaattttatttggaaaatatttatctttctacacattttacacttatgttcctttgcttataacccaatttcttaacttttttgttacttaagcaaatatcaattatgttttattatctaataaagtgtaagattcttactatctaaaatatttaattctgtgtgactaatatacttttctgatcattcaaattgaatatgaaaagctagaataactgtattgcaactgttaattccagccaattgtataatgataacactggtgaatttctaagtaaatctaatacttgaaaatttgggtatacatagaaaataaattttaatataatgtaaaaagtaac

SEQ ID NO: 92811 - DNA, 2713 bp, Homo sapiens
gcgcgccacggcaggaaagggcggtcctgcgctgtggcccacgctcgctcccgctgtcggactctgggcctggaccgcgcgtggccggcgccaaaagcgagaggcatgagcgcgcgcccgggccagtgaactgctcggggatggactgcggctcggtcggcggccagaggacccagcgcctgcccggccgccagcggcttctcttcttgcccgtgggcctcagcggaagaccgggcggcagcgaaacctcagcacgccgctgcctctctgcgctctccgacggtctgggggcgctgcgccctcgcgccccggcggcccgcggcggcgtgtcacgtgcctcaccgctgctcctcctcctgctagtgccctccccgcgcttggccgccgcagccccgcgccggcagctcggggactgggagcgctcgcgcctcgggtatgccgcacccccggccgggcgcagcagcgcgtggaggtgctcaccgggcgtcgccgctgccgccggcgcccttccccagtaccacggcccggcgcctgcactcgtttcctgcaggagagagctaagcttgtctgctggatccctgcagctggagcgcaaaaggagagatttcacctcttctgggagcaggaaactctacttcgacactcatgccttagtgtgcttactggaagacaatgggtttgctactcaacaagcagaaatcattgtgtctgcattggtcaagatcctggaggccaacatggacatcgtctacaaagatatggtcaccaagatgcagcaggaaatcacttttcagcaagtaatgtctcagattgcgaatgtgaaaaaggatatgattattttggagaagagtgaattttcagccctcagagcagaaaatgagaaaataaaactcgaactacatcagttaaaacaacaagtaatggatgaagtgatcaaagtccgaacagataccaaattagacttcaacctagaaaagagcagagtaaaagaattgtattcattgaacgaaaagaagctgctggaattgagaacagaaatagtggcattgcatgcccagcaagatcgggcccttacccagacagacaggaagatcgaaactgaggttgctggcctcaaaaccatgcttgagtcacacaagcttgataatattaaatatttagcagggtctatatttacgtgcctaacagtagctctgggattttatcgcctgtggatctaataaagtgtctatttaaagtgatttctactgttttgccttaagaataccagattgttggctgggtgcggtggctcacacctgtaattccagcactttgggaggctgaggcaggcagatcacctgaggtcaggagttggagaccagactggccaacatgacgaaatgctctcgctactaaaaatagaaaaattagccaggcgtggtggcacacccctgtagtcctagctactcgggaggctgagacaggaaaattgcatgaacctgggaggcagaggttgcagtgagcagagattacaccactgcaacgagactcgggcccagacgagatctgcctgggcgacacagtgagactctgtctcaaaataaataaataagtaaatagaacctcctgagctaccctggcttataaggattcagattactttaggaaattaggcattagcactaggaggggggaagatggctggcaaaacttctagctagcaacctatgtctagcacatgggtaactaaccatagcgagatcctgaacacatatcctctaggtgcaggtggagggaacgatgtccaatacctgaagcagaatctcacatggacggaacgtctgtatttccctctcctgcacgaatcactcatcattcttggagggcttctctgcattcctccttttcttctctcccctcccctgccttttgtcttttctaaagagtctgaactccgatttccatgctctcctgctacattaataagcaaaacctgcttgtgtgtacggttctttactggaaacatgactttttgtttctgtattggttttactgtcatccagttttctagtttaatatctagcaaaactaaatctgaatgtactcgctttttccgttaagtatgccaagcacctcggttgaaaggcttgactcaaaccagaagtcttgctggaattcgtctctgaacacttgaaaaacagaaaccctgagccgcaacaaacatgcctctgtgtgtcgggattgcctttgtctctgcttccatgtggcttttccttttgtagctatgcttagtgacataatcttccctcttctagccttctcctttcaagcctgtctgttaattaaccatgtcagtattggcaagcatttatcttcccccaccctaacatgcgatcttctaagaattttgcaaaattctaaacaaatatagagatggtatatagaattcatatctagaaaactttgattttaatgtgagcttatcaaatttgttctggcttttttggcactaaggcaaaaacatgttaaccagaaataatttattcttcatgtatgtaaaatatttgagaatgtttagccttttattagaattttatttggaaaatatttatctttctacacattttacacttatgttcctttgcttataacccaatttcttaacttttttgttacttaagcaaatatcaattatgttttattatctaataaagtgtaagattcttactat

SEQ ID NO: 92812 - DNA, 2848 bp, Homo sapiens
gcgcgccacggcaggaaagggcggtcctgcgctgtggcccacgctcgctcccgctgtcggactctgggcctggaccgcgcgtggccggcgccaaaagcgagaggcatgagcgcgcgcccgggccagtgaactgctcggggatggactgcggctcggtcggcggccagaggacccagcgcctgcccggccgccagcggcttctcttcttgcccgtgggcctcagcggaagaccgggcggcagcgaaacctcagcacgccgctgcctctctgcgctctccgacggtctgggggcgctgcgccctcgcgccccggcggcccgcggcggcgtgtcacgtgcctcaccgctgctcctcctcctgctagtgccctccccgcgcttggccgccgcagccccgcgccggcagctcggggactgggagcgctcgcgcctcgggtatgccgcacccccggccgggcgcagcagcgcgtggaggtgctcaccgggcgtcgccgctgccgccggcgcccttccccagtaccacggcccggcgcctgcactcgtttcctgcaggagagagctaagcttgtctgctggatccctgcagctggagcgcaaaaggagagatttcacctcttctgggagcaggaaactctacttcgacactcatgccttagtgtgcttactggaagacaatgggtttgctactcaacaagcagaaatcattgtgtctgcattggtcaagatcctggaggccaacatggacatcgtctacaaagatatggtcaccaagatgcagcaggaaatcacttttcagcaagtaatgtctcagattgcgaatgtgaaaaaggatatgattattttggagaagagtgaattttcagccctcagagcagaaaatgagaaaataaaactcgaactacatcagttaaaacaacaagtaatggatgaagtgatcaaagtccgaacagataccaaattagacttcaacctagaaaagagcagagtaaaagaattgtattcattgaacgaaaagaagctgctggaattgagaacagaaatagtggcattgcatgcccagcaagatcgggcccttacccagacagacaggaagatcgaaactgaggttgctggcctcaaaaccatgcttgagtcacacaagcttgataatattaaatatttagcagggtctatatttacgtgcctaacagtagctctgggattttatcgcctgtggatctaataaagtgtctatttaaagtgatttctactgttttgccttaagaataccagattgttggctgggtgcggtggctcacacctgtaattccagcactttgggaggctgaggcaggcagatcacctgaggtcaggagttggagaccagactggccaacatgacgaaatgctctcgctactaaaaatagaaaaattagccaggcgtggtggcacacccctgtagtcctagctactcgggaggctgagacaggaaaattgcatgaacctgggaggcagaggttgcagtgagcagagattacaccactgcaacgagactcgggcccagacgagatctgcctgggcgacacagtgagactctgtctcaaaataaataaataagtaaatagaacctcctgagctaccctggcttataaggattcagattactttaggaaattaggcattagcactaggaggggggaagatggctggcaaaacttctagctagcaacctatgtctagcacatgggtaactaaccatagcgagatcctgaacacatatcctctaggtgcaggtggagggaacgatgtccaatacctgaagcagaatctcacatggacggaacgtctgtatttccctctcctgcacgaatcactcatcattcttggagggcttctctgcattcctccttttcttctctcccctcccctgccttttgtcttttctaaagagtctgaactccgatttccatgtttttgtttctgtattggttttactgtcatccagttttctagtttaatatctagcaaaactaaatctgaatgtactcgctttttccgttaagtatgccaagcacctcggttgaaaggcttgactcaaaccagaagtcttgctggaattcgtctctgaacacttgaaaaacagaaaccctgagccgcaacaaacatgcctctgtgtgtcgggattgcctttgtctctgcttccatgtggcttttccttttgtagctatgcttagtgacataatcttccctcttctagccttctcctttcaagcctgtctgttaattaaccatgtcagtattggcaagcatttatcttcccccaccctaacatgcgatcttctaagaattttgcaaaattctaaacaaatatagagatggtatatagaattcatatctagaaaactttgattttaatgtgagcttatcaaatttgttctggcttttttggcactaaggcaaaaacatgttaaccagaaataatttattcttcatgtatgtaaaatatttgagaatgtttagccttttattagaattttatttggaaaatatttatctttctacacattttacacttatgttcctttgcttataacccaatttcttaacttttttgttacttaagcaaatatcaattatgttttattatctaataaagtgtaagattcttactatctaaaatatttaattctgtgtgactaatatacttttctgatcattcaaattgaatatgaaaagctagaataactgtattgcaactgttaattccagccaattgtataatgataacactggtgaatttctaagtaaatctaatacttgaaaatttgggtatacatagaaaataaattttaatataatgtaaaaagtaac

SEQ ID NO: 92813 - DNA, 3013 bp, Homo sapiens
gcgcgccacggcaggaaagggcggtcctgcgctgtggcccacgctcgctcccgctgtcggactctgggcctggaccgcgcgtggccggcgccaaaagcgagaggcatgagcgcgcgcccgggccagtgaactgctcggggatggactgcggctcggtcggcggccagaggacccagcgcctgcccggccgccagcggcttctcttcttgcccgtgggcctcagcggaagaccgggcggcagcgaaacctcagcacgccgctgcctctctgcgctctccgacggtctgggggcgctgcgccctcgcgccccggcggcccgcggcggcgtgtcacgtgcctcaccgctgctcctcctcctgctagtgccctccccgcgcttggccgccgcagccccgcgccggcagctcggggactgggagcgctcgcgcctcgggtatgccgcacccccggccgggcgcagcagcgcgtggaggtgctcaccgggcgtcgccgctgccgccggcgcccttccccagtaccacggcccggcgcctgcactcgtttcctgcaggagagggtaatcggggtgaaggactgagagtggaagctgatcagctggagcatctttctggtcattcagaggcctgctggggaaacctttgacctttgagttggcagagctaagcttgtctgctggatccctgcagctggagcgcaaaaggagagatttcacctcttctgggagcaggaaactctacttcgacactcatgccttagtgtgcttactggaagacaatgggtttgctactcaacaagcagaaatcattgtgtctgcattggtcaagatcctggaggccaacatggacatcgtctacaaagatatggtcaccaagatgcagcaggaaatcacttttcagcaagtaatgtctcagattgcgaatgtgaaaaaggatatgattattttggagaagagtgaattttcagccctcagagcagaaaatgagaaaataaaactcgaactacatcagttaaaacaacaagtaatggatgaagtgatcaaagtccgaacagataccaaattagacttcaacctagaaaagagcagagtaaaagaattgtattcattgaacgaaaagaagctgctggaattgagaacagaaatagtggcattgcatgcccagcaagatcgggcccttacccagacagacaggaagatcgaaactgaggttgctggcctcaaaaccatgcttgagtcacacaagcttgataatattaaatatttagcagggtctatatttacgtgcctaacagtagctctgggattttatcgcctgtggatctaataaagtgtctatttaaagtgatttctactgttttgccttaagaataccagattgttggctgggtgcggtggctcacacctgtaattccagcactttgggaggctgaggcaggcagatcacctgaggtcaggagttggagaccagactggccaacatgacgaaatgctctcgctactaaaaatagaaaaattagccaggcgtggtggcacacccctgtagtcctagctactcgggaggctgagacaggaaaattgcatgaacctgggaggcagaggttgcagtgagcagagattacaccactgcaacgagactcgggcccagacgagatctgcctgggcgacacagtgagactctgtctcaaaataaataaataagtaaatagaacctcctgagctaccctggcttataaggattcagattactttaggaaattaggcattagcactaggaggggggaagatggctggcaaaacttctagctagcaacctatgtctagcacatgggtaactaaccatagcgagatcctgaacacatatcctctaggtgcaggtggagggaacgatgtccaatacctgaagcagaatctcacatggacggaacgtctgtatttccctctcctgcacgaatcactcatcattcttggagggcttctctgcattcctccttttcttctctcccctcccctgccttttgtcttttctaaagagtctgaactccgatttccatgctctcctgctacattaataagcaaaacctgcttgtgtgtacggttctttactggaaacatgactttttgtttctgtattggttttactgtcatccagttttctagtttaatatctagcaaaactaaatctgaatgtactcgctttttccgttaagtatgccaagcacctcggttgaaaggcttgactcaaaccagaagtcttgctggaattcgtctctgaacacttgaaaaacagaaaccctgagccgcaacaaacatgcctctgtgtgtcgggattgcctttgtctctgcttccatgtggcttttccttttgtagctatgcttagtgacataatcttccctcttctagccttctcctttcaagcctgtctgttaattaaccatgtcagtattggcaagcatttatcttcccccaccctaacatgcgatcttctaagaattttgcaaaattctaaacaaatatagagatggtatatagaattcatatctagaaaactttgattttaatgtgagcttatcaaatttgttctggcttttttggcactaaggcaaaaacatgttaaccagaaataatttattcttcatgtatgtaaaatatttgagaatgtttagccttttattagaattttatttggaaaatatttatctttctacacattttacacttatgttcctttgcttataacccaatttcttaacttttttgttacttaagcaaatatcaattatgttttattatctaataaagtgtaagattcttactatctaaaatatttaattctgtgtgactaatatacttttctgatcattcaaattgaatatgaaaagctagaataactgtattgcaactgttaattccagccaattgtataatgataacactggtgaatttctaagtaaatctaatacttgaaaatttgggtatacatagaaaataaattttaatataatgtaaaaagtaac

SEQ ID NO: 92814 - DNA, 2263 bp, Homo sapiens
gttacagcattatttaacagtgaaatgttgttctttatattaaattgtgtcttcctgtctctatagtgcatatacatagaccttgtgaccacagaatttttgctattcgaaacttttattgaaaagttttcttagcctaggcaacacagcgagacctagtctctacaaaaagatttagccgggcatggtgtcatctgcctgtagcttcagcttcttgggaggctgaggcaggagggtcacttgagcccgggagtttgaggcacagtgagctgtaatcataccattgcatggtgcactcctcctgggtaccagatgagaccatgtctctaaaataagaaaataaaataaagggtgtgggatttgttttttcagtaggcaggcgtttcacggaatatgggacatcagtgagcaatctaagtttctaggttttcttttttaggttttcttaaaaaaagatgttccctcaagtaactcttaatagaactaatagtactctcaattgtttttttcttacagggtctatatttacgtgcctaacagtagctctgggattttatcgcctgtggatctaataaagtgtctatttaaagtgatttctactgttttgccttaagaataccagattgttggctgggtgcggtggctcacacctgtaattccagcactttgggaggctgaggcaggcagatcacctgaggtcaggagttggagaccagactggccaacatgacgaaatgctctcgctactaaaaatagaaaaattagccaggcgtggtggcacacccctgtagtcctagctactcgggaggctgagacaggaaaattgcatgaacctgggaggcagaggttgcagtgagcagagattacaccactgcaacgagactcgggcccagacgagatctgcctgggcgacacagtgagactctgtctcaaaataaataaataagtaaatagaacctcctgagctaccctggcttataaggattcagattactttaggaaattaggcattagcactaggaggggggaagatggctggcaaaacttctagctagcaacctatgtctagcacatgggtaactaaccatagcgagatcctgaacacatatcctctaggtgcaggtggagggaacgatgtccaatacctgaagcagaatctcacatggacggaacgtctgtatttccctctcctgcacgaatcactcatcattcttggagggcttctctgcattcctccttttcttctctcccctcccctgccttttgtcttttctaaagagtctgaactccgatttccatgctctcctgctacattaataagcaaaacctgcttgtgtgtacggttctttactggaaacatgactttttgtttctgtattggttttactgtcatccagttttctagtttaatatctagcaaaactaaatctgaatgtactcgctttttccgttaagtatgccaagcacctcggttgaaaggcttgactcaaaccagaagtcttgctggaattcgtctctgaacacttgaaaaacagaaaccctgagccgcaacaaacatgcctctgtgtgtcgggattgcctttgtctctgcttccatgtggcttttccttttgtagctatgcttagtgacataatcttccctcttctagccttctcctttcaagcctgtctgttaattaaccatgtcagtattggcaagcatttatcttcccccaccctaacatgcgatcttctaagaattttgcaaaattctaaacaaatatagagatggtatatagaattcatatctagaaaactttgattttaatgtgagcttatcaaatttgttctggcttttttggcactaaggcaaaaacatgttaaccagaaataatttattcttcatgtatgtaaaatatttgagaatgtttagccttttattagaattttatttggaaaatatttatctttctacacattttacacttatgttcctttgcttataacccaatttcttaacttttttgttacttaagcaaatatcaattatgttttattatctaataaagtgtaagattcttactatctaaaatatttaattctgtgtgactaatatacttttctgatcattcaaattgaatatgaaaagctagaataactgtattgcaactgttaattccagccaattgtataatgataacactggtgaatttctaagtaaatctaatacttgaaaatttgggtatacatagaaaataaattttaatataatgtaaaaagtaac

SEQ ID NO: 92815 - DNA, 1773 bp, Homo sapiens
ggctcaggactgtgttcactttatttggtcagatgtattttatttgaaaaccatttgagcccaaaatacaagtgtacccttcccacttctggctcaagcacccgtgagccgactagacgtaatattaaaacttactgatgctgggtgcggtggctcatgcctataatcccagcactttgggaggccaaggcaggcagatcacctgaggtcaggagttggagaccagactggccaacatgacgaaatgctctcgctactaaaaatagaaaaattagccaggcgtggtggcacacccctgtagtcctagctactcgggaggctgagacaggaaaattgcatgaacctgggaggcagaggttgcagtgagcagagattacaccactgcaacgagactcgggcccagacgagatctgcctgggcgacacagtgagactctgtctcaaaataaataaataagtaaatagaacctcctgagctaccctggcttataaggattcagattactttaggaaattaggcattagcactaggaggggggaagatggctggcaaaacttctagctagcaacctatgtctagcacatgggtaactaaccatagcgagatcctgaacacatatcctctaggtgcaggtggagggaacgatgtccaatacctgaagcagaatctcacatggacggaacgtctgtatttccctctcctgcacgaatcactcatcattcttggagggcttctctgcattcctccttttcttctctcccctcccctgccttttgtcttttctaaagagtctgaactccgatttccatgctctcctgctacattaataagcaaaacctgcttgtgtgtacggttctttactggaaacatgactttttgtttctgtattggttttactgtcatccagttttctagtttaatatctagcaaaactaaatctgaatgtactcgctttttccgttaagtatgccaagcacctcggttgaaaggcttgactcaaaccagaagtcttgctggaattcgtctctgaacacttgaaaaacagaaaccctgagccgcaacaaacatgcctctgtgtgtcgggattgcctttgtctctgcttccatgtggcttttccttttgtagctatgcttagtgacataatcttccctcttctagccttctcctttcaagcctgtctgttaattaaccatgtcagtattggcaagcatttatcttcccccaccctaacatgcgatcttctaagaattttgcaaaattctaaacaaatatagagatggtatatagaattcatatctagaaaactttgattttaatgtgagcttatcaaatttgttctggcttttttggcactaaggcaaaaacatgttaaccagaaataatttattcttcatgtatgtaaaatatttgagaatgtttagccttttattagaattttatttggaaaatatttatctttctacacattttacacttatgttcctttgcttataacccaatttcttaacttttttgttacttaagcaaatatcaattatgttttattatctaataaagtgtaagattcttactatctaaaatatttaattctgtgtgactaatatacttttctgatcattcaaattgaatatgaaaagctagaataactgtattgcaactgttaattccagccaattgtataatgataacactggtgaatttctaagtaaatctaatacttgaaaatttgggtatacatagaaaataaattttaatataatgtaaaaagtaac

SEQ ID NO: 92816 - DNA, 1580 bp, Homo sapiens
gcgcgccacggcaggaaagggcggtcctgcgctgtggcccacgctcgctcccgctgtcggactctgggcctggaccgcgcgtggccggcgccaaaagcgagaggcatgagcgcgcgcccgggccagtgaactgctcggggatggactgcggctcggtcggcggccagaggacccagcgcctgcccggccgccagcggcttctcttcttgcccgtgggcctcagcggaagaccgggcggcagcgaaacctcagcacgccgctgcctctctgcgctctccgacggtctgggggcgctgcgccctcgcgccccggcggcccgcggcggcgtgtcacgtgcctcaccgctgctcctcctcctgctagtgccctccccgcgcttggccgccgcagccccgcgccggcagctcggggactgggagcgctcgcgcctcgggtatgccgcacccccggccgggcgcagcagcgcgtggaggtgctcaccgggcgtcgccgctgccgccggcgcccttccccagtaccacggcccggcgcctgcactcgtttcctgcaggagagagctaagcttgtctgctggatccctgcagctggagcgcaaaaggagagatttcacctcttctgggagcaggaaactctacttcgacactcatgccttagtgtgcttactggaagacaatgggtttgctactcaacaagcagaaatcattgtgtctgcattggtcaagatcctggaggccaacatggacatcgtctacaaagatatggtcaccaagatgcagcaggaaatcacttttcagcaagtaatgtctcagattgcgaatgtgaaaaaggatatgattattttggagaagagtgaattttcagccctcagagcagaaaatgagaaaataaaactcgaactacatcagttaaaacaacaagtaatggatgaagtgatcaaagtccgaacagataccaaattagacttcaacctagaaaagagcagagtaaaagaattgtattcattgaacgaaaagaagctgctggaattgagaacagaaatagtggcattgcatgcccagcaagatcgggcccttacccagacagacaggaagatcgaaactgaggttgctggcctcaaaaccatgcttgagtcacacaagcttgataatattaaatatttagcagggtctatatttacgtgcctaacagtagctctgggattttatcgcctgtggatctaataaagtgtctatttaaagtgatttctactgttttgccttaagaataccagattgttggctgggtgcggtggctcacacctgtaattccagcactttgggaggctgaggcaggtggattacctgaggtcaggagttcgagaccagcctggccaacacggtgaaaccccgtctctactaaaaaattaaaacattaggcgggcgtggtggcgggcgcctgtagtcccagctactcgggagtctcgctctgttgcccaggctggagtgcagtgacgtgatctcggctcactataactccgcctcccagttcacaccttagctcccggtcgtacggccgctaatttagtagtagtaggcggccgc

SEQ ID NO: 92817 - DNA, 1088 bp, Homo sapiens
  misc_feature (293)..(293): n is a, c, g, or t
  misc_feature (700)..(700): n is a, c, g, or t
ttgcatctgctataagtgttctcacatgtcgttcttcctggtgagagcgggctgcatcattctggcacttaatttgggtgttcgattttgctatagagttctttgcagtacagcatagcctcttcttggccttgggaacagtgaactcttcttttgatggtgtggattgcatgcatatctggagagaggagggctcaggactgtgttcactttatttggtcagatgtattttatttgaaaaccatttgagcccaaaatacaagtgtacccttcccacttctggctcaagcacncgtgagccgctgcgcctggcccattctcatcttattcaaattactggcacatgggcaagagagacaatgacatggatagaagcttttctgcctttctctgcacacacatacagtgaaggaaccacaggcagattttttgatcagtttggtgaatacattgctcgttgtcactgttccaaccacattggtaaaaaaaatagttaccttttgtcctttggatgtcatgtctaaactttggaaaatataagtcattgcccttttagagaatgtttgtgtagtccaaagattgtgagctccatatagtatgaaaatcaagtacttttgcatgagcaatagcagtttcaaagtgaaatattataatttaatctttttcaagtagatcaaaaattcttaactgattaataaantattttatcaatatatcatccccctttcagagagaagtccccagaagagacagcacacttagcaattgccctcattattaaaggcctaggtgagtggcataaagggccatatgcgattatgtttcaaggtaaacattacctaaccttgtgtgggttaaaaacagtgaagtgtccttgtatcctgataaaatttttttttaaataacatggtgggttgacatttttgcatctgctataagttttctcacatgtcgttcttcctggtgagagcgggctgcatcattctggcacttaatttgggtgttcgattttgctatagagttctttgcagtacagcatagcctcttcttggccttgggaacagtgaactcttcttttgatggtgtgg

SEQ ID NO: 92818 - DNA, 404 bp, Homo sapiens
cccagaggtgactttctggtgttacgtattctaggaggtactgagaccagaatatttaaggcaccagagaaggagaagagagaggagtagatcagaatctgacccatgttacgtgtttatttcagtattcattgaacgaaaagaagctgctggaattgagaacagaaatagtggcattggtaagaaacaagactgtgatttttctttgtctttgtactcatctttgcttcgttccatgcatggttgtttgtaatgataataggaagttacatgcaggtttactgtcatgggaattttttacattgtgctaaaatacacacaacataaaaattaggatcttaaccattttttaagtgtacagttcagtacatttaaagtacattcacattttggggcaaccatcg

SEQ ID NO: 92819 - DNA, 1551 bp, Homo sapiens
gcgcgccacggcaggaaagggcggtcctgcgctgtggcccacgctcgctcccgctgtcggactctgggcctggaccgcgcgtggccggcgccaaaagcgagaggcatgagcgcgcgcccgggccagtgaactgctcggggatggactgcggctcggtcggcggccagaggacccagcgcctgcccggccgccagcggcttctcttcttgcccgtgggcctcagcggaagaccgggcggcagcgaaacctcagcacgccgctgcctctctgcgctctccgacggtctgggggcgctgcgccctcgcgccccggcggcccgcggcggcgtgtcacgtgcctcaccgctgctcctcctcctgctagtgccctccccgcgcttggccgccgcagccccgcgccggcagctcggggactgggagcgctcgcgcctcgggtatgccgcacccccggccgggcgcagcagcgcgtggaggtgctcaccgggcgtcgccgctgccgccggcgcccttccccagtaccacggcccggcgcctgcactcgtttcctgcaggagagagctaagcttgtctgctggatccctgcagctggagcgcaaaaggagagatttcacctcttctgggagcaggaaactctacttcgacactcatgccttagtgtgcttactggaagacaatgggtttgctactcaacaagcagaaatcattgtgtctgcattggtcaagatcctggaggccaacatggacatcgtctacaaagatatggtcaccaagatgcagcaggaaatcacttttcagcaagtaatgtctcagattgcgaatgtgaaaaaggatatgattattttggagaagagtgaattttcagccctcagagcagaaaatgagaaaataaaactcgaactacatcagttaaaacaacaagtaatggatgaagtgatcaaagtccgaacagataccaaattagacttcaacctagaaaagagcagagtaaaagaattgtattcattgaacgaaaagaagctgctggaattgagaacagaaatagtggcattgcatgcccagcaagatcgggcccttacccagacagacaggaagatcgaaactgaggttgctggcctcaaaaccatgcttgagtcacacaagcttgataatattaaatatttagcagggtctatatttacgtgcctaacagtagctctgggattttatcgcctgtggatctaataaagtgtctatttaaagtgatttctactgttttgccttaagaataccagattgttggctgggtgcggtggctcacacctgtaattccagcactttgggaggctgaggcaggtggattacctgaggtcaggagttcgagaccagcctggccaacacggtgaaaccccgtctctactaaaaaattaaaacattaggcgggcgtggtggcgggcgcctgtagtcccagctactcgggaggctaaggtgtgaacctgggaggcggagcttgtagtgagccgagatcacgtcactgcactccagcctgggcaacagagcgagactccgtctcaaa

SEQ ID NO: 92820 - DNA, 756 bp, Homo sapiens
tgatattttaaatttgacatattcttgatatttgtaagaaatttccactgaatgaattttacacaattcagatactaccaattaactaattctagcctaaacaaataacattatttttaaataacaaaatctttaaaaataattttctattttgaacttttagccataatgtaagaaaataaaattttctagcagaataatcaaagagtgaaacaaagttccaacatgttttttctttgcaattaaacatggcacttttacagttatttattattcatatcagtgcacttaccgacttcatattttcaaatcaaaatacagtgtttttctccagtgaaatccttattctcatgactgatagaaaacattgccaattttgatatttccagagttaatgttaaattatttgaaagaaaattatttaacaataataaaaatagacatttcaagactatttcttatcacataattcaaaaagtacttggatcaaatcctacagagtttctccactaaaattctacttgtgcagagggcattgaaacgcatgaaaatcaacagcaggttagttaggttaattaattcggttaattaagcacctactacatgctcagctctatgctaggtgtcatgaggaattaaaaggacatgtaatgcacattttctgatttcaaggagctttaaatattattgtgtagaaaaagttaacatctatgaaaatagaagtggggcaattttgtgcttaattccatggtccag

SEQ ID NO: 92821 - DNA, 544 bp, Homo sapiens
  misc_feature (441)..(441): n is a, c, g, or t
aagtagaaactgatttacatagataattatgtgaaatagtgctgcttgactaggattttcatgatctcatttcaaagattagcaaaaacaccctttacctggtatgtttacctctgatactaccttcactgatttcagcaggtagtcagttataatccatggattgaagttttgatttatttatttatttatttgagacagagtctcactctgttgcgcaagctggagtacagtggtgtgatcttggctcactttagcctctgccttccgggctgaagcgattctcctgcctcagtgatcccagcactttgggaggccgaggcaggcagatcccgaggtcagaagatcgagaccatcctggctaacacggtgaaacctcgtctctgcaaaaaattcaaaaaattggccgggcgtggtggcaggcacctgtggtcccagctnctcgggagcctgaggcaggagaatggtgtgaacctggtggagcttgcagtgagccgagatcgcgccactgcactccagcctgggcgacagagtaaaactctgt

SEQ ID NO: 92822 - DNA, 399 bp, Homo sapiens
  misc_feature (296)..(296): n is a, c, g, or t
aagtagaaactgatttacatagataattatgtgaaatagtgctgcttgactaggattttcatgatctcatttcaaagattagcaaaaacaccctttacctggtatgtttacctctgatactaccttcactgatttcagcaggtagtcagttataatccatggattgaagttttgatttatttatttatttatttgagacagagtctcactctgttgcgcaagctggagtacagtggtgtgatcttggctcactttagcctctgccttccgggctgaagcgattctcctgcctcatnctcgggagcctgaggcaggagaatggtgtgaacctggtggagcttgcagtgagccgagatcgcgccactgcactccagcctgggcgacagagtaaaactctgt

SEQ ID NO: 92823 - DNA, 427 bp, Homo sapiens
ccactgcatgtggccccaaagtctgttttttttccccaagcccttggataagtagacaaagtatgtatgtaaatggtcctgtcatctcagtgaatgtctcattttaaattttggtgaaagcttatgctgtattgtagcacattattttatctataacattgaaaataattggcctttctaaacatggaactgtttatcatgcagtagggtaaggcagtgccatgctgtggtacttaatctggggaggatctcctcccttttccccatagagcatttggaaatgtgtgtgtggatggggttgcttttagatgttccagtgactggggacactcagtcattggatggcttaaggatgctaaacgttcctgagtgcttgggatagtcttgcagaatgaatacttgtgctgtccagaatgacaagagcacc

SEQ ID NO: 92824 - DNA, 886 bp, Homo sapiens
tgctaaaataaacacgtgtactcttctgttcatcttccaatttttttcctcagccccatttgcactctttcttgacattactctctgattctgtggtctgtgactatccacctgaacccatcaccttaaccaacttagagagttcagttgcagaagattttcttgtaaatgaaactctagcttattgatcagtggtgttgctcctcatgaaaaaccttttcagagatttacaaattgaagaagcatggtaatttgtagtcttgtaaagaatgatatccagaagattctttagttatctgcatacaaagctaaatagttaatttgatgtttaaagtattactcagacttcatactgtcatcctatggacagttgcaacatcttcgctattttttctcgtaatagatattttaaattaatttcatacagttgcagaatccagcctacttctgaatttcttccatttaaaatatacataaaacaaagtcaagagataagtagcagattggggaaaaatctttgcaatattatgacagaggcctaatttccttaatatccatagagctcttcaaatggctaaaaagaataacccaatagaaaaatagcaaacaatataagcatgaaaagatgttcactctatcattaaacataaatcaaaacaagttgcagttttccagctatcagattagctgaaatgaaaatgttggaaaaacctcagtgttaaagagtaggaaaaatagcgtgttgttgaaattatgaattgttaaacttttctgaagggtgatttggcaatatttttgaaaatctgaaatgtacatacacttagatcaagaaattccacagatatgaaaagatatgtttgtaatgatagtctttgcagcattattt

SEQ ID NO: 92825 - DNA, 610 bp, Homo sapiens
gttcgagcttcccagctgctttgtttacctactcaagcctcagcaatggtgggtgcccctcccccaaccttgctgccaccttgcagttcaatctcagactgctgtgctagcaatgagccaggctccgtgggcgtgggaccctccgagccaggcacgggatataatctcctggtgtgccgttttctaagaccattggaaaagcacagtattagggtgggagtgaccccattttccaggtgccatctgtcacagcttcccttggctaggaaagggaattccctgacccccttgcacttcccaggtgaggcgatgcctcgccctgcttcggctcacgctcggtgcactgcacccactgtcctgcacccactgtccaacaagccccagtgaaatgaacccggtacctcagttggaaatgcagaaatcacccgccttctgcgtcactcatgctgggagctgtagactggagctgttcctattcggccatcttggactaaatcgatgtcattttcattttatacacatggaaacaggctcagagaggttaggtgtcttgtccaagttcacacagctattaagtgtcagagttgggctttgaacccagaggacatcg

SEQ ID NO: 92826 - DNA, 320 bp, Homo sapiens
gcataagccaccacacccagctcagattactgtttactcaaattaatggggatgattgaggatgaaacagtgcagggattccccattgttttgttttcttctttgcatttctagtgtctgtttttttttttgttggtggtggtggtgtttttgtttgtttgtttttttttttaaaaaaagatctgcagaggctattgtgtcctttgcataacccaagtccagtagcatccttgacttcaaagtctgttggcattgatggcatctgactcagtcataactatctttaatacatcattataaaatctacaatattgctcaag

SEQ ID NO: 92827 - DNA, 366 bp, Homo sapiens
cttaatatgagctacctggaagaggcaaattcatagagacaaagagtagaagggggtggcctgggactgaaaggagagggaaatggagagttactgcttactgggtacagagcttctgcttgggtcatgaaaacgttctggaaacagtcatgaatctaattaatgccactgcactttacacttaaagtggttaaaattgtaaattttatgtttattttcactacaataaaaaacaatgaattatgtaagcatttgatttattgctgaatttgccaacaatcttggctttatttttgatcttattcctggcctgtttattttccaatttcctaaacgggctgtcccacacttgttccccttatgtct

SEQ ID NO: 92828 - DNA, 256 bp, Homo sapiens
atggaagttataatgaatgacttggagtcacatgtgtgaatccatctaaaaatcataatgttgagtgagtaaagcaagttgcagaatggcttcagagtataccttttccataaagtttgaaaacatgtaaaacaatactacatatttgttatggaatatatttttgttcatcaattattcatgccgcctcacactacatcttttggaagagtatagtttcccagtctattgatgccttggccatgagattcacttt

SEQ ID NO: 92829 - DNA, 406 bp, Homo sapiens
cgcccaggttggagtttagtggcaccatattggtttactgcaacctctgcctcccgggttcaagcaattctcctgcctcagtctaccagggagttaggactacgggcctgtgccatcacgcctggctaatttttgtatttttcatagagataaggtttcaccatgttggccaggctggtctttaactcctgaactcaagtgatccacctgcctcggccttccaaagtgctgggattacaggagtgagccaccgtgcccggccatgtctctctttttaacactaatgttaccctgacctttgaacgtagaatgcccttctgttgcaggaaaacctcttttcaaaccatgtttgtcctttgctggcatgccacagcaacagtcaccaacacagaagacttctgtgacc

SEQ ID NO: 92830 - DNA, 413 bp, Homo sapiens
tccaaagctagatattgttattaaccagtcagactattcctttaagatcattcatttccatgtccccccattgctctccacagccaagcctctgccagtgtgaccacagtccatcagatatggcaccagtggcagatggaaatgacttctattccaacaacgcttattgaattacttgaacaagtggatacataagactaaagtgccatctaatttgtctcacctgtagaagccaactcttactttccacttagccaagacatcatgataaatgaacagtttattttaacattgctatttatataacaatcgtatttctaagttattggtctgagcacatcatggaagataccctagctcactaggaacaagactaagaacagagatatgaaagcaaggagagagagagagaa

SEQ ID NO: 92831 - DNA, 333 bp, Homo sapiens
tggaggccagaaggccagttaggaagctgtgccaatgtccatgcatgggaggtgatgtgttctgagtttagagaagctctggggactgagagagcaagtgtgtgcatcttcacaacaggggacctgataaataaatctatgccacatccctgaaagattctgcaaccacagccactgtgcagatctgaataaactgccaacgtgcattttgagcagaaacagcatattgcacaactgcacagatattttatgagcccaactatgtaaaattaaatactcatttctgtatcagtttatctatatataaagagacatctgggaagataccgagtt

SEQ ID NO: 92832 - DNA, 292 bp, Homo sapiens
cctcttctgctgccttctctctctctgacccggtgtcttttctttaatacaacagacaacagaaacaggtgtcaaaaagagataggcgccgggcacagtggctcgcgactgcaatccagcactttgggaggccgaggcaggcgaatcatgaggtcaggagatcaagaccatcctggccatggtgaaacccgtctctactaaaaatacaaaaattagctaggcctggtggtgtctgcctgtaatcccagctactcaggaggctgaggcagaagaattgcttgaacccaggagg

SEQ ID NO: 92833 - DNA, 265 bp, Homo sapiens
  misc_feature (228)..(228): n is a, c, g, or t
  misc_feature (244)..(244): n is a, c, g, or t
attttcttcaattcactcatcaaaacaagctatgaaataagcagaaccccaatccagaagaaggaggactgaaccaatttcagtgatttgcttgagatctccagctggcttcttttagaggccggcttgaaatccagaagagctgaccctctctacctacccgggctccttgcactctagccctgacccactccccacccacacttggcagaagcttcacaccttctntagaggaagtctttcnttcactcctacacacatattt

SEQ ID NO: 92834 - DNA, 341 bp, Homo sapiens
tgtcttccttcccagcttcctccgtgtctggggtgggggatgggggggtctcaggcagggatactctagccccttgactgctgtttagaccctgctgtagctgctgctgctccctgcccagccccagccatgaaactgcccaaggggaccaggagctctgtgtactttgcacagcacccagaaaaggagccattgccctcaaggcaggaggtcaagcagacccctgtcatcatggccaagatcaaaggtccggggcccgccaagtacctccggccatcctgcacgggctacatagatcatgacatctccatgttcaaggcaccagcttataccctgcatag

SEQ ID NO: 92835 - DNA, 463 bp, Homo sapiens
tatagattgttagattttctaaatttttgttgcatatatattttataagctggatgtggtggcatgcgcctgtagtcccagctcctctggaggttgaagcaggagggtggtttgagcttaggtgttcgaggctgcagcatgcaatgatcacacttgtgaatgaatagccactgcacttcaacccaggctatacagcaagaccccatctccattgaaaaatatatatatagctgagcacagtggctcacgcctgtgctcccagcactttgggaggccaaggcgggcagatcacaaggtcaggagatggagaccatcctggccaatatggtgaaaccccgtctctactaaaatacaaaaaaaataattagccaggcgtggtggtgcacacctgtagtcccggctactcgggaggctgaggcagggaaattgcttgaacctggaaggcagaggttacagtgagccg

SEQ ID NO: 92836 - DNA, 531 bp, Homo sapiens
agggagcctgcacagagtaggtgcaaatggcaggagccaccacctgccagcatcccccaggcctccccagtggagtgggggcagaggaagtggtgacctactgccccctctgaggagaaccacccagctgtcaacccgaggcgggaccgccccgagcgatcgcaggctctccatttctccaaagcctccgttcctcatcacagccaattagttacaaatagcttcctctcctcgtgtatcacttacacaacagaaaggggtgattgttcctgaggaagaaggtctccctgggcccctctcgccagagcagctgagagctgcaatggggatgggaaaggggcttaggagaagaggggcacagtcccgggaactaaggatgtggtgggtcccaggcaggtgggaagggactggctgagtgtccacccctggtgggcaacagacaggtaggggtccaaggcttagaaagggccctgtgttgtaagagcagaaaatgaagatagctcagaggcctcgctcctgaacagcagctca

SEQ ID NO: 92837 - DNA, 355 bp, Homo sapiens
ttcttacggatatggtgacctattctccgacacatggaatgcatttactgattatgacgttatacatttgaaaacttatgattccaaaagggtactggaaattttcctgaaatgtctgtgaatatttcttgagtgcagatgactcactcataaaataaacatttattatgagttcctattagccattaccactgatttctgaatttctgaatttcttttataattagaatcctcagtgttgttaatcatgcagcctttgaaaagttttttctataatctttccaaaaatatgaattctgttctctttgaatgaaatagtgtgctattcaagcaatgcaaaatggagattaattaa

SEQ ID NO: 92838 - DNA, 212 bp, Homo sapiens
ggggctggatgccaccccctcaaaggagcacagacctgctggccccccttccctccctctgcaggccaagctcatgagctgtggggagtgggagcagggggtccctcccacatcctcaggaagaagccaccatgtcattgggagcctgtgttacacatcagtgtgtgagggaagaatctggaaacaactgactaagaggatggcatgatctc

SEQ ID NO: 92839 - DNA, 414 bp, Homo sapiens
gaactttgcaatgagtgcttcatgatccagccaaatatggaataaaggtgtgtttgacaaatcttaactcacattgcgtgacacaccaatgttatgtttgtggcttagatgagagtttgctgccttggtattagcggagccagcaaccttgtgagaaaaacttggaagtgatgcagctgcctcctgagcctacatttgggatcattcccctcgccaaagcttcgcccaaacttggtgctcagtgtttgtccccagactggatcctggctcacattagacaagtccaacattggtggcaggcaaagtacagcaagtgtctatcaggcaggcaggagaacacataatgaaaatttaaaagctgtataaatcttccgggattagaaacacatggagcaggaatcaggcaagggtcgt

SEQ ID NO: 92840 - DNA, 491 bp, Homo sapiens
agtacaaatgtcttgtgggactctcactttttttgtaatgtgtaacattattacagaaaatatgggctaagaagacttcagaaacacaccactgacatggtccagacatcgattgaatgatggggcaataccaacaacaaatgcagattctaagagcgtgctttctttgatgtctgtgtttaattccattgattttctgatgtctccgcaacaccgtctgtgggtttttcaaacaaatggtaaagggtgtgatgttttctaaagaagatagagttaaggatggtggttgtgaatgtcttgatttgtgaatgtcttgcacatgtgaaacattaacagagacataaagctatcagttgtaaaccttgtagctaaattgcaaaggcacagaggaatgtttgacttatgtaactcttttgtcttcttaaaaaatttaatgatacctttcacagaggttattttccttgacatgcagagtgaccatagaacttctc

SEQ ID NO: 92841 - DNA, 166 bp, Homo sapiens
tgtccaacaagccctactgagatgaacccggtacctcagttggaaatgcagaaatcatccctcttctgcgtcactcatgctgggagctgtagactggagctgttcctatttggccatcttcaacacttggtcaatcttgttttactacacctcagatctatttacc

SEQ ID NO: 92842 - DNA, 293 bp, Homo sapiens
  misc_feature (153)..(153): n is a, c, g, or t
atccccggctctgggtatcccggctctgggtagctaggattaaggtgccaccacacgcaggctaatttttgtatttttagtaaagacaggtttcaacctgtttgggctggctggtctcgaactcatgaattcaggtgatacgtcaaactcagncttccaaagtagtgggattaccggcatgagccagcggaaccaggcagagcataaacgtttggaaaatttgcagcctgaagatgtgatagaaaagaattttctggggaggaattcaagctggctgcagacatttgcataag

SEQ ID NO: 92843 - DNA, 503 bp, Homo sapiens
caataatccaatctgtgaagctgaatttacgaggtaagggcataactcaaaacctgcttgtttaaaaatgcaacaatttagggcagtttggagtagtgatattatacaccactttgcattttgaatggcagtgaaactattctgtatgaaactataatagtaaatacatgacattacacatttgttaaaacccacagaaccatacaacacagaaagtaaatcctaatgtaacctgtggactttaactaatgataaagtaccaatattggtttctcaactgtaaattgtatcactaatgaaagttggtaatagagaaaactgtggtatgggggcacacataggaactctctatactttctgtgcaattttctctgtaaatgtgaacacattcttaaaaaataaagcctatttaagaaaataaacacatcatttccctttccagggactggcttagaaatggtctaatgaaattgtcaaagagctctcctgtggagcttcggaga

SEQ ID NO: 92844 - DNA, 539 bp, Homo sapiens
ggtctcaaagcatcactgcaagcttcgccaagccccttctctggaaaggcctgagagacccccctcctgccaactgccagagtgtagattatcagtcccattgacagacaaagacgtagcctcagaaagattaaactacttgccccaggtcccacagctaagaaaggcaggatttaggctggacacggtgactcatgcctgtaatcccagcactttgggaggccaaagtgggcagataacctgaggtcaggagtttgagaccagcctgggcaacatggcgaaaccctgcctctactaaaaatacaaaaattagccaggtgtggtggcacatgcctgtagtcccagctactcgggaggccgaggcaggagaattgcttgaacctggggggtggaggttgcactgagccgagatcctgtcactgcactccagcctgggtgacagagcaagactcctctcaaagaaaaggcaggattcaaactctacaggcctgtctgacttcacattcagggctcttggctttttaccatgctggcccttc

SEQ ID NO: 92845 - DNA, 517 bp, Homo sapiens
gtcacacaattaatgagcagcagaaccaggattgaaatcctttgatctttctacccattcatgcagtttaccatttaatctgaatgtcattattcagggctttttatctgcttattcttttgttcttacgttagactcatatggaaataattctgcaaggcaagggaagcggaaagaaggaagataccctgccaattgtcagaataaaagtttgtttagcagcagatagagaggaggggcaggaccagagactggacatgttcacacaggcatgcatacagaaagtgtccccaaaaccacaggggcaagaggcagcagatggtttgtatcaaattaaggaaggaaatcacatgtatagaatatgacaatgtgccagacactaagacaggtggagatgctttatttaggttatctcagttaagcctcaccacagggcttgagatatgactattaagatctgacggcaggtggtagcaaggtctcagaatccttcagtgttcatgttaggattcaggtt

SEQ ID NO: 92846 - DNA, 558 bp, Homo sapiens
gagatctcatctatacaaaaaatagaaaaattagccaggcatggtggcatgcacctgtggtcttagctatttaggaggctgagatgggaggctcagttgagcccaggcagtcaagggtgcaatgagctatgatcacaccgctgttccccagcctgggcatcagagcaagaccctgtctcaaaaaaaaggaagaaagaaattcacacaaaagtggatccacaccattcaaacccatgatgtccaagggtccactgtacatgctcatgctcattagcaatattttttatcatccaggttggagaagagaaagctgagcccccaagatgtaatttgttcaaagggacactgctaataaattagccatggtttcaatcctacagtataagaagtgtaattcaacttggtccaacagatgtgaatgcctaccacagaagtcattgagtgtctttctaggatagaaagataaatcatatataagcctacgctctctggtagggaaaattattaaaaatgaaaattaaaaaagcaatgattctgaaaaaatatattcgttcatta

SEQ ID NO: 92847 - DNA, 550 bp, Homo sapiens
aaaaaaagaaaaagaaaaagaaaattagccgggtgtggtggtatatgcctttaatcccagctactcaggggaggctgaggcaccagagaatcccttaaacccaggaggcagaggttgcagtgacctgagatggcaccactgcacttccagcctaggtaacagcatgacactccgtctcacaaaaataagtaaataaatttatcttagggcctcaccatgttatggagttgagtctaattgtttagaagagaagaggctaagaggctagacaaggacatagaaaaacattgttcagcctgggagaggctagatcccatgcagatgtggcccagtttttatcaaagtagcctgaggaccaccctaccagggccattaggagtgctggctaaaatgcatattcctagcatacttcccaaacatactgaattataatctcaagagggaaagcttaggaaaaatgccaagtttgtagactgacatggtgactcacacctgtaatcccagcactttttgaagctgaggcggtggactgcttgagcctaggagttca

SEQ ID NO: 92848 - DNA, 299 bp, Homo sapiens
cccagtggccctggtaggcccacaacttcccgaagccaagttccccaggcccaggtcaggcctcacggtggcctctccaggctcagctcctgccctccgatggcatctgcaggccccaaacggcctccggtcggtgggctcctctaggcccagcttgggcctcctggcggcctctgcaggcccaaatcgtcccgaagtcggcctctccaggcccagcttgggcctcccggcggcctctgcaggcccaagtcatcctcaaatcggcctggaattgggcctggaagagcagcaagtcggcc

SEQ ID NO: 92849 - DNA, 213 bp, Homo sapiens
ctgcctcacctttcaaaatgctggaattatagacgtgaggtactgcggccggcctttgctctgctgctcttcctgtccagcctcagctgtctggctgctacctgtgcaggttctgcaggggctgtgtgttccctcagcccatttcccagcaccacctgcctgcttgcttcctgctggtcatgactgggctcctgctatacattagccttcccc

SEQ ID NO: 92850 - DNA, 159 bp, Homo sapiens
ctttgtggctgagtgtctgcctgctgtgtctgtgacccagaggaacgaggctgctttgagccctgtcattgccagcgtgtgcttcttcagcaggcaaaggttatgcacaaagttttaggattttttttttaacttttgggattttatttgcttaggaag

SEQ ID NO: 92851 - DNA, 161 bp, Homo sapiens
aaattaagaatataaagcagtacagtaagtatatggggacatcaggagttgagagaatagagagatccttgtggctccatgcaggacatagatcggtcagttatattgaagggagattttggaagggatggcaaacatttcaggaaggaaaagaaaaagaa

SEQ ID NO: 92852 - DNA, 911 bp, Homo sapiens
tgaagcagcaacacttaaggtttatgtgattatttctagttctagatccctgaggaacaagtagttcacaggtcaagaagtatcagtggtccataacatgtggaatgatgctttatatcaagagatgagcaactgagagcacactgagacatcaacgtttacctttcatactggcaaaatcccaggagtttgaaatatgctgttggaagagctgtggataattgggtgcttttattcttggtgagagtgcaaactgttataacccttatggaaaggcaacttcgcaatacttaccaaaattacagaggcatttttctttcccaggtatgtgtggtaatttattattcagatacactagcacatatatcagatgacagaggtgtcaacgtgctgagagctaacacgccagagttggaagggctctgttgaaagatagctggcttgctgctccctggacagctccactctgaaatgcagctctcctgaacagtcagcaccagagctcagaaatacctcctcccacccccatagttttcatgccaccctcacgttccccaaattccttagtgtagagaaccaaggaagcaacatactttgggaagtctggctctgacagcaagtggttcgtccactgtggctgggcattgcatttcttggtaggatggggagcctggggaagtgcgtgcattccgctcaccttccgcctccaaatattcccagttaaatttatagttttttagtctgttgaatgttgttacctgtattggtctttatactctactccacaaataggggactgggtaaataaaatatggttacaagtcaaaaaagcaacccaattgagtcaaaaaaaaaaaagcaaggtatgaggtatatgctatgacagttttgaaataagcagggaagttggg

SEQ ID NO: 92853 - DNA, 272 bp, Homo sapiens
tgtgtactcggatttgagggttcaaattcataacattgtattgatccctcttaaatgcaccagtaaaaattagtagtatgtggtgaaaaaacaaaatggactttggagataggaagacttgtgttcaaaacctggccttaggcaaataagttagctccctgaatttttatttcatcacctgtaaaatagaccacattcctgcctgggttgtagttaccattaagaccatgtatattctgaggcaacacattgtctgtcttatagaagatgct

SEQ ID NO: 92854 - DNA, 690 bp, Homo sapiens
ttggcctcctaaagcactggggttacaggcatgaaccactgtgcccagcctgcatgatgtaatctccaaattgagggtaagtaaaaagtagcacctataactagaggtaaatttttaatttaaaacaactacactacgcaatagtcatctcctcagcccttgcccacgagatcttatgaacctcctcaatagaaaaaaaggaatagtctgtgataggatcaaaggaacaggaaccctttacatggagagtaattttaaatagctacaatttttgagcttgtccgttgataccgagctcagcaaaagaaaaagcagtgattacaggcctgaccactactcaatgattagaatattcactcttctctattacttagaaggaagcccccctctcccactatgtcaggtatacacacaagttcacagctctcagtgtttctgtgtaatttgttcctgtttcagacagctttccagaaaagctcctcttaaatcctgggtggccaatgcagaggttttaaaaagaggaaaagtagagcaaaacaacaaaaagatcatgaaatagaagcttggggagaagggagcaaagagaacatgaatctaacagatgcagcagttgcaaaaaagctgctatcctttagaaactcctgttaatttggtgacctaaagggagctatttctaaggctggatgttga

SEQ ID NO: 92855 - DNA, 990 bp, Homo sapiens
ttattttttttgttcttaatgtagcatttatttggagttgcttaatgtttttcaattacatgacacactgtttgtttacacaattttaaactttgaggtaatttgtgccaaaggatctaaagtaattctcaacagaggtaggaatggagcaattttgcccaccaatggacatttggtaatgtctccattcttctcatagcctgtgggaattggagggaaagagtgctttttgtctgtagtggcagagcccaagttagctactaaacaagctaaagcgcatgggatggtctgctaaaccaaactgtctttcagaaatagtcaacagtggcaaggttgagaaaccctgttcttagaggttcaaattatacctgacacataggaggtaaaagcatggagtctggtaactgaaaacactctacacactctaaattcaaaactacatgggtgtaaatatccaccatttgactaacagaatgaattcaagtaattcaactcgtttaacaatttcaaaatttttgagataatccacgtaattcaaatacttagttcagttcctgacatttaaaatgtgcttctactaccctgtaaacatttaattgtatacttacgtatgaaaatccaaaattaatgtcactgaattcctcaagtttctatgatgtgatgacttacacacacctatgtgaaaacttgctatattccccatcttaaaattatgaatatacttcctggcctttgaaaacctgcaccatggctaagcgcaatggctcacgcctgtaatcccagcaccctgggaggctgaggagaatggatcgcttgagctcaagagtttgagaccagcctgggcaacatggcaaaaccctgtctctaaaaaaaattacaaaaattaactgggcatggtggcacatacctgtagtcccggctacttaggggctgaggcaggaggatcacttaagcccgggaggtagaggctgcagtgatccatgtttgtac

SEQ ID NO: 92856 - DNA, 468 bp, Homo sapiens
tactaatgttataactggacacgttttaagtaggttttttcatttatttacgaattcatacagtaaatattgtagtaggttctccagaaactattatgaacaaaatgtgaaaatgtaaatacatttgaggaagaatttttttttttttagacagaatctgtcacccaggttagaggacagtggcacaatctcagcttactgcaactttcgcctcccgggttccaagattctcttgcctcagcctcccgagtagctgggattacaggcgcccaccaccacacccagcaaatttttgtatttttagtagacatggtgtttcaccatgttgaccaggctagtctcgaattcctgacctcaggtgatccacctgcttcacaatttgagaaaccaaggcaggaggattgcttgagctcaggagttcaagtccagcctggacaatgtggggagacctcatctctacaaaacata

SEQ ID NO: 92857 - DNA, 397 bp, Homo sapiens
cagagattcataaaatgacctcatctttattcaaaacagggctaattcttttgctgtttttggagtagagttctaaatatcttattttcattaactgatttaaaaatatattttatataagacatgtgcaggcatgaaaatcataggaattggtaaaagtcttaaggaaagtaaaaaaatttgggggaatgattggtttgtacttatatacaaatacaaaaatctttgggttgaatttttagttaaaactttcaataatttactttctctgttgtttttcatcataatagttgttttgtaatcagcattagaagacaaataaatattgatactattcaagtaaaaggccagctaattttagcttcgcaagtcgtgttacctctcttttcatgtagaa

SEQ ID NO: 92858 - DNA, 807 bp, Homo sapiens
aagacagagcatgagaagagttgtgcaaaatctagatgactgcaaaacccaaaatatttactttgtgagtcttacagaagaattttgccaatctttggggcaaaacctagactcaccgcttttcatctgcagaggctaaatgcagacccattgtttatttttgttgtgaccttggtttttgcacttacaaagtcagtttataacattgcccagatagagaataaagttaaaaagtgaaagctacataaaagtccttaacactctgcctggcacatagtaagccctcactgaatggcatccttgtattataaacgttattttaagttgacgttgtttccaggacaggacacggagatcttcggggaaggcagagctggctgatgaaccctacccagtgtcctgattaatgcattacagggaatcttgaaggaagtcaagggaaatgaacatttggtgagtggcactctattgcaagtgcattttatttcatttctttgattctcataaggacttggtgccatttaacaagggagaatggatgtcaaggctcaaagaggtcacacaaagatacaaaaagcctaggaatgcaagcacaggtctgtctgcttcaaagcttaaatttatatttttctctaccttaaaataagtaatgtggttgaaggagctggtgatttttacttagaaaagaaagactcagtggtgacccatcagcctgcctccaaatacttaagtgttcctgtgtaccaaagaggtctgaaatacagtagcttcagaggataaaacaaagaccctcaatccatccctttt

SEQ ID NO: 92859 - DNA, 690 bp, Homo sapiens
ctgagctgtttctccagtgaagggggcaggaggaggggcctcaaaggcaaggagtgggtggctttgggcttagggttgcagtagaggggctgccgcccggggccccaacctgtagccagctcgtaagatgtggaccacccagctctgcacctgacccttccgctgaccaaatgggagaggagcaggtggccttccgggtctgatatgatgcgctttttaccgttgggtaaggttggggtgaagagaagtgtgcggctcctgggtcagaggaggctgccccttctattgctcacccacttcttattcccggtcccctacttgggttcgtctccgcccattttgggttttgtaacagttttgtcttttgggtttctcatccagctcctcccattgacctcattgctcagagtgcagtattagggcaaggcttcgccactgcctccctccatgaatgtatttctccctcctgccctggggacatggggagtggcccgtttctttccccatctagtcccagaaagatggtgtttggttttctgttgttggggtgggtgcaggggtcaccgtgttccctgtctgccttgtacccacagtctccccgccccctctccaccctgtgtgacttccctctcttttacctgctcctgtaaatactcccttctcccaataaaacttggtgtgtgttctccc

SEQ ID NO: 92860 - DNA, 1401 bp, Homo sapiens
ctgagctgtttctccagtgaagggggcaggaggaggggcctcaaaggcaaggagtgggtggctttgggcttagggttgcagtagaggggctgccgcccggggccccaacctgtagccagctcgtaagatgtggaccacccagctctgcacctgacccttccgctgaccaaatgggagaggagcaggtggccttccgggtctgatatgatgcgctttttaccgttgggtaaggttggggtgaagagaagtgtgcggctcctgggtcagaggaggctgccccttctattgctcacccacttcttattcccggtcccctacttgggttcgtctccgcccattttgggttttgtaacagttttgtcttttgggtttctcatccagctcctcccattgacctcattgctcagagtgcagtattagggcaaggcttcgccactgcctccctccatgaatgtatttctccctcctgccctggggacatggggagtggcccgtttctttccccatctagtcccagaaagatggtgtttggttttctgttgttggatttttttttttttttttttttttttgcaccaaagtggcaactaggtcagtgttgggggatcaagctggcctcggggtggggggcccccacctgcctctccctggttcccacagtgttagcgtccctgaaaagacaatattctctctaaagcaataaggggtgacgggccggggggagtgtttgctgctgctggcccccagctccccttccctcttgccaggtgtgggggagactcctgttgtgactgaatgtaacccccccacccctgccgcagccaatgcaggggaagggggacactcttcctgtctcttctccccagctaaagagactttggacttagggggcccatgagcctggagaggccttaaccctgtgaggaagtatagggggagccctctcccacccccatccccttctgagagtggtcaatgtttacaagcccctgagcccccctgcccagggactcagaccctgttgctgtccttccccggccccggtcttcctgggccctcgctgctcccctgcccttcctggggttggggtgggtgcaggggtcaccgtgttccctgtctgccttgtacccacagtctccccgccccctctccaccctgtgtgacttccctctcttttacctgctcctgtaaatactcccttctcccaataaaacttggtgtgtgttctcccaaaaaaaaaaaaaaaaaaaaaaaaaaaaaaaaaaaaaaaaaaaaaaaaaaaaaaacaaaaaaaaacatcaaaacacaactaacacccacacccttcaaaaaacaacaaaaaaaccagtaaagaaaaacacaacaatcacacaaatcatacacacatcatatactacctct

SEQ ID NO: 92861 - DNA, 1231 bp, Homo sapiens
ctgagctgtttctccagtgaagggggcaggaggaggggcctcaaaggcaaggagtgggtggctttgggcttagggttgcagtagaggggctgccgcccggggccccaacctgtagccagctcgtaagatgtggaccacccagctctgcacctgacccttccgctgaccaaatgggagaggagcaggtggccttccgggtctgatatgatgcgctttttaccgttgggtaaggttggggtgaagagaagtgtgcggctcctgggtcagaggaggctgccccttctattgctcacccacttcttattcccggtcccctacttgggttcgtctccgcccattttgggttttgtaacagttttgtcttttgggtttctcatccagctcctcccattgacctcattgctcagagtgcagtattagggcaaggcttcgccactgcctccctccatgaatgtatttctccctcctgccctggggacatggggagtggcccgtttctttccccatctagtcccagaaagatggtgtttggttttctgttgttggatttttttttttttttttttttttttgcaccaaagtggcaactaggtcagtgttgggggatcaagctggcctcggggtggggggcccccacctgcctctccctggttcccacagtgttagcgtccctgaaaagacaatattctctctaaagcaataaggggtgacgggccggggggagtgtttgctgctgctggcccccagctccccttccctcttgccaggtgtgggggagactcctgttgtgactgaatgtaacccccccacccctgccgcagccaatgcaggggaagggggacactcttcctgtctcttctccccagctaaagagactttggacttagggggcccatgagcctggagaggccttaaccctgtgaggaagtatagggggagccctctcccacccccatccccttctgagagtggtcaatgtttacaagcccctgagcccccctgcccagggactcagaccctgttgctgtccttccccggccccggtcttcctgggccctcgctgctcccctgcccttcctggggttggggtgggtgcaggggtcaccgtgttccctgtctgccttgtacccacagtctccccgccccctctccaccctgtgtgacttccctctcttttacctgctcctgtaaatactcccttctcccaataaaacttggtgtgtgttctccc

SEQ ID NO: 92862 - DNA, 1309 bp, Homo sapiens
  misc_feature (1232)..(1232): n is a, c, g, or t
  misc_feature (1257)..(1257): n is a, c, g, or t
  misc_feature (1259)..(1259): n is a, c, g, or t
ctgagctgtttctccagtgaagggggcaggaggaggggcctcaaaggcaaggagtgggtggctttgggcttagggttgcagtagaggggctgccgcccggggccccaacctgtagccagctcgtaagatgtggaccacccagctctgcacctgacccttccgctgaccaaatgggagaggagcaggtggccttccgggtctgatatgatgcgctttttaccgttgggtaaggttggggtgaagagaagtgtgcggctcctgggtcagaggaggctgccccttctattgctcacccacttcttattcccggtcccctacttgggttcgtctccgcccattttgggttttgtaacagttttgtcttttgggtttctcatccagctcctcccattgacctcattgctcagagtgcagtattagggcaaggcttcgccactgcctccctccatgaatgtatttctccctcctgccctggggacatggggagtggcccgtttctttccccatctagtcccagaaagatggtgtttggttttctgttgttggatttttttttttttttttttttttttgcaccaaagtggcaactaggtcagtgttgggggatcaagctggcctcggggtggggggcccccacctgcctctccctggttcccacagtgttagcgtccctgaaaagacaatattctctctaaagcaataaggggtgacgggccggggggagtgtttgctgctgctggcccccagctccccttccctcttgccaggtgtgggggagactcctgttgtgactgaatgtaacccccccacccctgccgcagccaatgcaggggaagggggacactcttcctgtctcttctccccagctaaagagactttggacttagggggcccatgagcctggagaggccttaaccctgtgaggaagtatagggggagccctctcccacccccatccccttctgagagtggtcaatgtttacaagcccctgagcccccctgcccagggactcagaccctgttgctgtccttccccggccccggtcttcctgggccctcgctgctcccctgcccttcctggggttggggtgggtgcaggggtcaccgtgttccctgtctgccttgtacccacagtctccccgccccctctccaccctgtgtgacttccctctcttttacctgctcctgtaaatactcccttctcccaataaaacttggtgtgtgttctcccnaaaaaaaaatacaaaattaaaccantnttttaatgattgaaaaatgacttcatttcccgtgaccattcataaaatat

SEQ ID NO: 92863 - DNA, 1194 bp, Homo sapiens
ctgagctgtttctccagtgaagggggcaggaggaggggcctcaaaggcaaggagtgggtggctttgggcttagggttgcagtagaggggctgccgcccggggccccaacctgtagccagctcgtaagatgtggaccacccagctctgcacctgacccttccgctgaccaaatgggagaggagcaggtggccttccgggtctgatatgatgcgctttttaccgttgggtaaggttggggtgaagagaagtgtgcggctcctgggtcagaggaggctgccccttctattgctcacccacttcttattcccggtcccctacttgggttcgtctccgcccattttgggttttgtaacagttttgtcttttgggtttctcatccagctcctcccattgacctcattgctcagagtgcagtattagggcaaggcttcgccactgcctccctccatgaatgtatttctccctcctgccctggggacatggggagtggcccgtttctttccccatctagtcccagaaagatggtgtttggttttctgttgttggatttttttttttttttttttttttttgcaccaaagtggcaactaggtcagtgttgggggatcaagctggcctcggggtggggggcccccacctgcctctccctggttcccacagtgttagcgtccctgaaaagacaatattctctctaaagcaataaggggtgacgggccggggggagtgtttgctgctgctggcccccagctccccttccctcttgccaggtgtgggggagactcctgttgtgactgaatgtaacccccccacccctgccgcagccaatgcaggggaagggggacactcttcctgtctcttctccccagctaaagagactttggacttagggggcccatgagcctggagaggccttaaccctgtgaggaagtatagggggagccctctcccacccccatccccttctgagagtggtcaatgtttacaagcccctgagcccccctgcccagggactcagaccctgttgtgctcccctgcccttcctggggttggggtgggtgcaggggtcaccgtgttccctgtctgccttgtacccacagtctccccgccccctctccaccctgtgtgacttccctctcttttacctgctcctgtaaatactcccttctcccaataaaacttggtgtgtgttctccc

SEQ ID NO: 92864 - DNA, 841 bp, Homo sapiens
ctgagctgtttctccagtgaagggggcaggaggaggggcctcaaaggcaaggagtgggtggctttgggcttagggttgcagtagaggggctgccgcccggggccccaacctgtagccagctcgtaagatgtggaccacccagctctgcacctgacccttccgctgaccaaatgggagaggagcaggtggccttccgggtctgatatgatgcgctttttaccgttgggtaaggttggggtgaagagaagtgtgcggctcctgggtcagaggaggctgccccttctattgctcacccacttcttattcccggtcccctacttgggttcgtctccgcccattttgggttttgtaacagttttgtcttttgggtttctcatccagctcctcccattgacctcattgctcagagtgcagtattagggcaaggcttcgccactgcctccctccatgaatgtatttctccctcctgccctggggacatggggagtggcccgtttctttccccatctagtcccagaaagatggtgtttggttttctgttgttggatttttttttttttttttttttttttgcaccaaagtggcaactaggtcagtgttgggggatcaagctggcctcggggtggggggcccccacctgcctctccctggttcccacagtgttagcgtccctgaaaagacaatattctctctaaagcaataaggggtgacgggccggggggagtgtttgctgctgctggcccccagctccccttccctcttgccaggtgtgggggagactcctgttgtgactgaatgtaacccccccacccccgaacgctgtaactaaggatcctgcaag

SEQ ID NO: 92865 - DNA, 942 bp, Homo sapiens
ggaactccgcttcgcccgagacccagcgcccaggcgtgtcgccccgagaggagccgcgcgaaggtcaccccgcgcccgccgcccgccgcccgccgcctccgtgggtccgtttgccagtcagcccgtgcgtccgagcccctcgcgccccgccgcagccccggccaaccgagcgccatgaaccagatagagcccggcgtgcagtacaactacgtgtacgacgaggatgagtacatgatccaggaggaggagtgggaccgcgacctgctcctggacccagcctgggagaagcagcagaggaagaccttcactgcctggtgtaactcccacctaaggaaagccggcacccagattgagaacatcgaggaagacttcaggaatggccttaagctcatgctgcttttggaagtcatctcaggggaaaggctgcccaaacctgaccggggaaaaatgcggttccacaaaattgctaatgtcaacaaagctttggattacatagccagcaaaggggtgaaactggtgtccatcggcgctgaagaaattgttgatggcaatgtgaaaatgaccctgggtatgatctggaccatcatccttcgctttgctattcaggatatttcggttgaagaaacatctgccaaagaaggtctgctgctttggtgtcagaggaaaactgctccttatagaaatgtgaacattcagaacttccatactagctggaaagatggccttggactctgtgccctcatccaccgacaccggcctgacctcattgactactcaaagcttaacaaggatgaccccataggaaatattaacctggccatggaaatcgctgagaagcacctggatattcctaaaatgttggatgctgaagatttagtatacactgccagacccgatgaaagagccataatgacttatgtttcctgttactatcatgctttt

SEQ ID NO: 92866 - DNA, 360 bp, Homo sapiens
ttcttccctctgttctccctggtttctctccttcgtctgtatgtgtgtggtgtgtgtgtgtgcgcgcgtcctgtgttattttctcccccttcagacatcgtgaacacccctaaacccgatgaaagagccatcatgacgtacgtctcttgcttctaccacgcttttgcgggcgcggagcaggtactcaacacttgtccgtccgggctgttgtgttactctctgttggttttagttgtgtgtgcatacttgagtgtgtgtttgtgcgcttcacatcttaccttggaatctttctgagtgttttctaataacctcatatggcaagttctaaactgtgaaaacttttttttaacagctttaact

SEQ ID NO: 92867 - DNA, 4182 bp, Homo sapiens
ggaactccgcttcgcccgagacccagcgcccaggcgtgtcgccccgagaggagccgcgcgaaggtcaccccgcgcccgccgcccgccgcccgccgcctccgtgggtccgtttgccagtcagcccgtgcgtccgagcccctcgcgccccgccgcagccccggccaaccgagcgccatgaaccagatagagcccggcgtgcagtacaactacgtgtacgacgaggatgagtacatgatccaggaggaggagtgggaccgcgacctgctcctggacccagcctgggagaagcagcagaggaagaccttcactgcctggtgtaactcccacctaaggaaagccggcacccagattgagaacatcgaggaagacttcaggaatggccttaagctcatgctgcttttggaagtcatctcaggggaaaggctgcccaaacctgaccggggaaaaatgcggttccacaaaattgctaatgtcaacaaagctttggattacatagccagcaaaggggtgaaactggtgtccatcggcgctgaagaaattgttgatggcaatgtgaaaatgaccctgggtatgatctggaccatcatccttcgctttgctattcaggatatttcggttgaagaaacatctgccaaagaaggtctgctgctttggtgtcagaggaaaactgctccttatagaaatgtgaacattcagaacttccatactagctggaaagatggccttggactctgtgccctcatccaccgacaccggcctgacctcattgactactcaaagcttaacaaggatgaccccataggaaatattaacctggccatggaaatcgctgagaagcacctggatattcctaaaatgttggatgctgaagacatcgtgaacacccctaaacccgatgaaagagccatcatgacgtacgtctcttgcttctaccacgcttttgcgggcgcggagcaggccgagacagcggctaacaggatatgtaaggttcttgctgtgaatcaagagaatgagaggctgatggaagaatatgagaggctagcgagtgagcttttggaatggattcgtcgcacgatcccctggctggagaaccggactcccgagaagaccatgcaagccatgcagaagaagctggaggacttccgggattaccgccggaagcacaagccacccaaggtgcaggagaaatgccagctggagatcaacttcaacacgctgcagaccaagctgcggatcagcaaccgtcctgccttcatgccctccgagggcaagatggtgtcggatattgctggtgcctggcagaggctggagcaggctgagaagggttacgaggagtggttgctcaatgagattcggagactggagcgcttggaacacctggctgagaagttcaggcagaaggcctcaacgcacgagacttgggcttatggcaaagagcagatcttgctgcagaaggattacgagtcggcgtcgctgacagaggtgcgggctctgctgcggaagcacgaggcgttcgagagcgacctggcagcgcaccaggaccgcgtggagcagatcgcagccatcgcgcaggagctcaatgaactggactatcacgacgctgtgaatgtcaatgatcggtgccagaaaatttgtgaccagtgggaccgactgggaacgcttactcagaagaggagagaagccctagagagaatggagaaattgctagaaaccattgatcagcttcacctggagtttgccaagagggctgctcctttcaacaattggatggagggcgctatggaggatctgcaagatatgttcattgtccacagcattgaggagatccagagtctgatcactgcgcatgagcagttcaaggccacgctgcccgaggcggacggagagcggcagtccatcatggccatccagaacgaggtggagaaggtgattcagagctacaacatcagaatcagctcaagcaacccgtacagcactgtcaccatggatgagctccggaccaagtgggacaaggtgaagcaactcgtgcccatccgcgatcaatccctgcaggaggagctggctcgccagcatgctaacgagcgtctgaggcgccagtttgctgcccaagccaatgccattgggccctggatccagaacaagatggaggagattgcccggagctccatccagatcacaggagccctggaagaccagatgaaccagctgaagcagtatgagcacaacatcatcaactataagaacaacatcgacaagctggagggagaccatcagctcatccaggaggcccttgtctttgacaacaagcacacgaactacacgatggagcacattcgtgttggatgggagctgctgctgacaaccatcgccagaaccatcaatgaggtggagactcagatcctgacgagagatgcgaagggcatcacccaggagcagatgaatgagttcagagcctccttcaaccactttgacaggaggaagaatggcctgatggatcatgaggatttcagagcctgcctgatttccatgggttatgacctgggtgaagccgaatttgcccgcattatgaccctggtagatcccaacgggcaaggcaccgtcaccttccaatccttcatcgacttcatgactagagagacggctgacaccgacactgccgagcaggtcatcgcctccttccggatcctggcttctgataagccatacatcctggcggaggagctgcgtcgggagctgcccccggatcaggcccagtactgcatcaagaggatgcccgcctactcgggcccaggcagtgtgcctggtgcactggattacgctgcgttctcttccgcactctacggggagagcgatctgtgatgctgagcttctgtaatcactcatcccatcagaatgcaataaaagcggaagtcacagtttgtttcctggaaactttgacaagctttattaagttgagagagagagagggggaaaaaaaaaaagcctttcgtagttcagtaattgccagcaatataacacggctaaaatgaagtttttacagtatatgacatagtgcgcttcataaataggtttatttctgagtttttagcaaaatgtaatgaaatatcaggttgatttctttgattaaacagaacaaattacttgagtaataggaaattaggaggatctagggacagaaggaaagtgaaaaatgtgaaaatacaaaatacccaagatttaagaccggggggaaaaaaccacaaattggtaaataaaggtttgctatttgtaaaaaatttcatttatctctaatatgcttatgtgattggccctaggggagtatatttgggattctaatgttttattttcatgcttatccaaagattactattgtatcttcaaatgaacttaatattgtgagatggaactgccggggattaaaaagactacccaaaagatttttggcacttacaatttttaaaatagtttatgtcatctcttcattatttagggctggatggtcaactcagtcagtgattttttgatgcttctcttatcctccagaatagagacctaaggacacgtggaagtcagtttaattgccagagagaaggatgcaatcactaggtgaaatgaggtttttaggattatttattgattccaggttcccatgctttttgttagagcttattagtacaggttctcaagagatgaccacataaaagtgctctgtttataaataagcaggtttctgtagtactgactggttcatcacaaggcaagtcagaaaccagtatccttctagctctccagtcaggacttccttatgcctctagttttatgaccggttaaggagaagccagagttagagtaggagaggactaattctcagcagcagtggaggtgagttctttcttttgcggaagctttacatatgttttgtgtagtaggaataactagatattttagctagtgtgcggtgtgtgttcacccctgggattggacagtgtatcctaacaagtcccatgtctggttctgtgtctaaaggcctgctccatgacacaggatgctacatgcactcctgctagcacatcttgatctgttgaatgttcattctttctttttgctcatactgctgtaggctataattcccccctgtttttccatcttgttgacagcttgtagagaataaagcaggaattc

SEQ ID NO: 92868 - DNA, 790 bp, Homo sapiens
caggagtagatatgaggacatgaagtacagtaggaactttttctttttgggctttttttggttgtttacgcttttttgtttaacatgaatgtatgttatgtttgcaataacagaaataaagatagaaacaaaagatatgtatttcctaacatatgcttttgcttaaacacttaatgatgtcttaccactccctgctccatgtcccacttcgttgcctacattgtaattgcgtgtctaaaggcaaacagccctgtgtaaactgcttagattctgttctctcatcttcctttactttactgtgtgtcccacttttcttgagctccatcatctagtattcacctgaaataggatcgacaaccatgtagggaaactgcttctatataatgagaggctttcagtatttaattgatttaattttattttaaaatgagcagggccttgatgttatgcacatctttttataaaaaggcacatttctcagaggctgctccgaatggtttagctgctttcatgagttacaatcctacagtgggagaatcagggaaaaaaatcacattactgaaaaaggcatgtgtctggcacgttcccaaggcatgagtatttatggcatggtgaactgtgaatttgatgttgatgcttgcacaacaaaagcatgtggttaaaatctatttttgtcaccagcaaaaaaaaaagaactatatttaaaagtgtaaaatgtttgttttatagaaagtctttaccccaaatgaaaaataaataaatcaaggtcagtactattaattctctatga

SEQ ID NO: 92869 - DNA, 564 bp, Homo sapiens
ccaggcccggttaaatttttctgctttttaacagagatggggtttcaccatgttgcccaggctggtctcgaactcttgagctcagacaatctgcccacatcggcctcccaaagtgctgagattacaggcgtgagtcactgcacccggccgcaggggtcttttaaggcattgataatgtccaatttcttgactttactaggaggttcataggttgctttttattcattctttaaagcatacataaaaattttaggtaatcatttggagccaggagtttgagaccagcctgggcaacaaagcaagaccccatctctacaaaaaaaaactttaaaaaattagtcgggcatggtgacacatgcttgtagtcctagctacttgggaggctgaggtgggaggatagtgtattagtccgttcttgcattactataaataaatgcctgagattgggtaatttacacgtaaaagaggtttaatttgctcacgcttccacgcgctgtacagtctgctgcttctggggaggcctcaggaacttacagtcttagacaacggaacaccgggatcctc

SEQ ID NO: 92870 - DNA, 425 bp, Homo sapiens
tattataatctacctctgtatcttcccctccttccccaatttagtcagattgaactgttgcttacaaccaaacaaccctcactgtttcagaagccaacacattcctctctctatagcttgaatctcttctaataccacccctaccagaaatcccccacatcctgtctcctgcctgcttgaattcctcatatgacaaagaggtcatttccttctaaagcaatcctagttcattgctgggaggctctgactactaagaagtttatctaacattacatggaactctctcttctctgatacctccacccaatggtcctcatcccagtttttatcccgagcttcctaacttaagaaaaaaaaaagaccactaacttgaaatggggaagtccctgttccctttcagcatccagggctggcaggctcagaac

SEQ ID NO: 92871 - DNA, 616 bp, Homo sapiens
gaaaataaggaacataatagcatattgtgctattatgatgatgaagaacctctctagaagaaaacataaccaaagaaacaaagaaaattcctgcaaatgtttaatgctatagaagaaattaacaaaaacatatattcaatgaattcagaaaagttagcaggtcaaagaaaacaaatcaaagaccaaaataatcccattttagattgtcgagtaaactagaacagaaagaatacaactggaaattgaattcctacgtaggggacatgcttgagactaaacaactcagggacttgttagatattatcagccttaacaatgtaaaaataagctataattaaaataagaaagggggtaggaggtaggaagaagcaggtgattgctaattttttcatcatttataacatgggctcaaaagtctaaaattgaaactaggtattaacagaaagcaatgactccatcttcttaaaatttttcataaccttgatgagctcttctaaaagatatccatttcaatgaagacatatttttccagaactcagaacttcctttagatgtacttgtttcctcttagaaatttaagccatgtacgttaatactctttgttaaaattgggatg

SEQ ID NO: 92872 - DNA, 146 bp, Homo sapiens
gttggagatcatagtctttaaagtatttgattatttcagaacattggataattcattatgggagtaaaaaaagtaaaccacacttcagtacagaagaaccagaataaatcaatgcttactaatacacagaaagtgtgcatctcctt

SEQ ID NO: 92873 - DNA, 302 bp, Homo sapiens
caatagattgcaaaccatatagtgattaaaataattattaggtaacttgaaaaatgcttaatggaaaaagttttaaaattagattccaggataccatgctctgaataagccaaattttggggtaaaaaaaataaaaaaccatgaaaccagacatagaagcagaacctaaagcatatttatcaaaatatctttgtttaaaaaaaatgtcttcagtggtcgtcttggctggtgggattttatgtcattttaattatctttataaaactttattctctcgaattttaaaattaacatctatttct

SEQ ID NO: 92874 - DNA, 566 bp, Homo sapiens
gaggatctgtgggcacagtcatatggtgagggcctcttggagttcattcaaactttaagggagccccacagcaccggcatgatgggtaagtccaggcctaaggttaggaagcaaatcctggagcatgaggaaattgtaggctacagtgagctaccagtggtgtgcaaactggagacccccaagacagtgagagaggccacagcatctgagggaatggagctctttcttggcctgaggttcagaagaacctgcaccaaagaaaggcatccctatcaatgtcactgttcctgaaatgatgggagaaccacatccctgcttcagggaagcagtccctgtcgtctggggcgctgagccctttggcctgagatgaaggatgatggtgtgatgtatcatggcagtgtgactgagactggattgggggatggggacaggggaacataggcaaaaatacacatgtgccactggatcctgagctgccattgtaccttggaggactggcgtttctctgggaagttgggaggtgggaagaggaagggtctcattttcctgccccttgaaaccatgct

SEQ ID NO: 92875 - DNA, 396 bp, Homo sapiens
acaaattgtcatcgtcagaaatgagggatgtttaaggggttagtacccatttttaatattagagaaataataatcctcaaagcagctttgactccatattgctgttgctcaagtagagtaactagaagctgagtaaagctagaagttgtgtgttgaaagtgttgctagaaaaatctgcttaagcagcatgagtgtctagcttcccaaggtaactatggaaaaggatgcaatagcaataggaatgtgtaagttctgggctgtttaatatagttttctcaggtcaggcgtagtggctcatgtctgtaattctagcactttgggaagctgagacaggaggattgcttgagcccaggagttcgagaccagactaggcaacatcgtgagaccctgtctaca

SEQ ID NO: 92876 - DNA, 890 bp, Homo sapiens
aggtacatttctgctacctgatgggccatttaaacatttatagagaaatttcattcaactgtcatttttaatgcgtattttctggttatatgaaagctttctcatacaaaaatctgatggctgtaatagtagctaaaacattattagaaagtgtgtttccctcatgggacattcctagaaaaatctctagcaataaaaggcacttgattcactggacaagttgtaaaacaaataaggtatttcagatacaatagcattaggcaaaggtaactgattcaactagattgtcttattcaaaagtattacagtggatacagtggataatcagatccacttccaggggaaaacgtaagttggcctttctaaaatagtcggtagagggcccatatccctaataacaaaacctcatttactttctggtctgaaactctgatatgactaaatgctacaaggctttaatacatcatgccaaagtatactttcgctagatttaaaaaaaaaaaaaggcttttcatgatcagtgactgtggacaatcaaacccttcatggtctaaaacccagagactggatattctgaaaatgatatcagaaaaagactgccctttgctgagcacagtggctcacacctgcaatcccagtattttgggaagccaaggcgggtggatcacctgaggtcaggagttcgagaccagcctggccaacatggtgaaaccctgtctctactaaaaatacaaaaattagccactgggtgtggtgatgggtgcctgtaatcccagctaattgggaggctgaggcaggagaatcgcctgaacccaggagacggaggttgcggtgagctgagatcctgccattgcactccagcctgggtgacagagcaaaactccatctca

SEQ ID NO: 92877 - DNA, 530 bp, Homo sapiens
gcctatgcattccaggctccatcccatgtgactctgggcttagccccttctggggccacaggtcaggcaggtccaggccccaaggacctcccagtgacaggcgactgtgagctgggcagacaggagtgaagtcaggtgggggttctggcttgctgacaccagcgtttggagcctcctgctgctgcctggcttccctgcattccctgttccctgcctcaggcaagaaataaccaagccgagttgcctctgcacagcagtgagctcctggtggccctggcttctggggagccctgtggatggcttccttgcccaagtccaggccttcttgttccctttgtgtgctccagagaaagggggcagcaccagatccagatccagggccaaccaacagaaagctgagtccatcccaaactcgcccattctcagagcacaaagaccccatgatctagggcaaacttgtccaactgttggcccatggaacagctttgaatgcagcccaacacaaatctataaattttcttaaacattga

SEQ ID NO: 92878 - DNA, 497 bp, Homo sapiens
tctggctcggcccagaaccatgcaggtcacactgaagttttctcctagttatactgatgttgctgaagcttggatggtgggttttggggaggaagatgggtctgccatggttaagagggtagagaagttagagacaaacatgttgacttgattgttagaattgttgaattgatggtagatagagggatggagagatggatgaatagaatgaatgggcagaatggctaaatgggtagagggtgaatggttgaggtggttgaattgatagaggatgtgtagatgtatgaatgggtaaaatgaattaatggagtatgggtaggtgatggaatgattgactgatggaggattcatgcatggaacagtttgacttgattgtgaataggtcaatggatagaaaggctgagctggtatcagctggttccatggctgatcggctggctggacaaaacggctgactacatagagagtcatcaaaagctgatgttgtttagagctcc

SEQ ID NO: 92879 - DNA, 499 bp, Homo sapiens
tacaaaaaattagctgggtatagtggcacactatgctactcgggagactgatgcaggagaattgcttgagcctgggacttcgagactgtattgagctatgatcacaccactgcactccagcctgggggacagagtaagaccctacctcgaaagcaaaacagaaagaaagctgcagctggtggagaatgctaactccaccctcatacaattagaatatatgagaagtcttttgctactaatagatggtgcattccaggagtgatttagagctatgaagtcatatcaagatttacttttttttttaagatgactaaaattttcagagcaagcttgtgatccaatgcatttatttccacaagatggtgctatagcttctgctaagtacaaaactcacatttcctttaggaactagaaatacaaaatatgtttctaatggagaaccaaatgtgcatacgctctggtgagtctgtcaaagaaacacattgtgcaaaaacgtccc

SEQ ID NO: 92880 - DNA, 467 bp, Homo sapiens
agccaactactcaactaacccagctactccagaggctgaggtaagagggtcaggaggcagaggctgcagtgagctttcatcacaccactccactccagcctgggcaacagcaaaacctcatctcaaaaataaaaataaacaaacaaacaaaaacccaagtaagcaagtgaaataatgaagacctgtgcttcttttatcttcaggaaacaaattgaaattgaggttttttttttacaagtgatgagtaagaggaactgtaaattttccaaaaaatcataatagatttcaaatcaagtaaatttattgcttacagagatctgacttttcttgccaaatatgctcatatctggctaggtgcagtgacatacacctgtaatcacagcaatttagggggctgaggtgggaagatcgcttgagctcaggagttcaagaccagcctgggcaacatggcaaaaccctgtctctac

SEQ ID NO: 92881 - DNA, 750 bp, Homo sapiens
  misc_feature (462)..(462): n is a, c, g, or t
  misc_feature (514)..(514): n is a, c, g, or t
  misc_feature (521)..(521): n is a, c, g, or t
  misc_feature (650)..(650): n is a, c, g, or t
  misc_feature (676)..(676): n is a, c, g, or t
cgagacagccaccaacaatacctgcttcccagtattcctgtccttgtgatgtctccttcacgaggcatcgggttgtctgtgtgaccaatggaataaggcagaaatgatgctacgtcacttccaaggctggcttataaaagacactgtcacctctgccttgttctttccaccttgggtcactctggggaaagccagctgctatgccgcgaggacactcaagcgtcctatgaggagggccatgtggcagggaactgaggccgcctgcccacatccatgtgagtgaccgtctggaagcagacctccagccccagtcccgcctctggaggactgcagcctgcacctggaccaaagccttgtgagagaccctgatcctaaactacccatctcagccgcttctggattcctgacccacagaaactgtgtgaaatagtacatacttgctgttttaaacaaaaaaaaaanaaaaaaaaaaaaaaaaaaaaaaaaaaaaaaaaaaaaaaaaaaaaaaaaaaanaaaatanaaaaaaaaaaaaaaaaaaccatgtcggcccgcttggcccattcgattttagactggggcaagtttttgcatgcggccgaaattcgggctcaacttgcccaatttgcccttttgggggccgttttacaantacattggccgtgttttaacaccctntggactgggaaaacccttggggttccccaatttaaacgccttggagaaaaatccccctttggccaagttggcga

SEQ ID NO: 92882 - DNA, 631 bp, Homo sapiens
cgagacagccaccaacaatacctgcttcccagtattcctgtccttgtgatgtctccttcacgaggcatcgggttgtctgtgtgaccaatggaataaggcagaaatgatgctacgtcacttccaaggctggcttataaaagacactgtcacctctgccttgttctttccaccttgggtcactctggggaaagccagctgctatgccgcgaggacactcaagcgtcctatgaggagggccatgtggcagggaactgaggccgcctgcccacatccatgtgagtgaccgtctggaagcagacctccagccccagtcccgcctctggaggactgcagcctgcacctggaccaaagccttgtgagagaccctgatcctaaactacccatctcagccgcttctggattcctgacccacagaaactgtgtgaaatagtacatacttgctgttttaaacaaaatgtgggggtgactttttacaagcagacagataactgcaacatagtctcaaccttgaatttcattgcaaatgaccccatcctgaccataacctcaatattcgctaagtgggcagaagaatggggttggggggtgggggcagtagatgacttcgggcagtaaaaatgtgtccagtcac

SEQ ID NO: 92883 - DNA, 435 bp, Homo sapiens
tccaatttcattccctgtctggctgcttattgacttctgcagcctgtattgacaacatgcaaccctgtttctgtctgcctgctcccatgcagcgacaacttaaaaaaaaaaaaaaaaaggaaaatagggaacatcacagctataactcatgccaaagaccctgttctggggccaggcatcggcctggaggcaaaatttccaagaaaaattagagatttattaggagaaaaatgcctgagtccccttccctttcttttggttatcctttctcttctctcagggccacagagttcatttggctacttcaaacctctgccccacatttaagcttccaaataccactttgcaccaataaaatacatccaatgtaaggcaaatggggaacagcccacccccaccgcagctcacatatcttttctttttaaaggtgagccg

SEQ ID NO: 92884 - DNA, 286 bp, Homo sapiens
cagatatatatataaaatatatattttaattctgccactgctgctgataaagattaagaccctcatctcaatttttttacttgtaagattttcactgtctataataattgagaagttgttttgtacagttacagtttgtttcaatgaacaaaatgtttctagtattattttgacctctaaataacagctgctacttttttagtcattgtggttgtattcactaaattaccaacctttaaaaataatctccttccttgatgctatgtctctattgtgggatttatgc

SEQ ID NO: 92885 - DNA, 439 bp, Homo sapiens
agggaagcagaggatggagacaggcaacagtagttggcatttctcctacttctcccatcctgaccagaagagacaacccctcaattagtaaaatacggcccacagtacaccaagccatttgccactgcttggctttttttttttttcttaatggttgggaatgcttgggttcgactatagaatcattggattcatcgtggaattggggctgagttgcagggagaaaaggggaacatgcaggaacttccctctccctccagtgacctcgtatggtctgttgtaggctcactgtgtcccttcactctggactccctcaagggttccaagtaggaaggcacagggaggaagtatcactaggggaggcttccagatattccaggggattgttgcttgggtcctaaaatctcagggttggaatagactcttggggcaaagtatt

SEQ ID NO: 92886 - DNA, 374 bp, Homo sapiens
cacatagccctctttacctttgtcaagctccagaatcccattttggtcattctttctcaaaatgtggacactttccacccttcttggtttctgtcaccccgtaccaggcctcttgctgttgaatgctcttgctatcctactccgactctaaatatttcacaccaggcaattcctccctcttttggcaggatatcctccgcacccaacttcaaatttaacacccctcattgagctttcctcttgcatgaatgtcctcatcaccctgctcagactccgttaccccatgccaagctgcactcacatgcagattcccttcctattacactgggttccaaatcccctttgctgtgccttcttcctgtgtggatgcttca

SEQ ID NO: 92887 - DNA, 320 bp, Homo sapiens
tagtatgtggccttcataaggttctgaggcagacagagtaaggagtactgtccttcaaaaggtcagagagtacagcaacaggaaaggcttcccagcaggagttatgttttaactgagactaacaacctaattgtaaaacaaaacaaaaacattttttaagtaaagtcctgaatttccccttgatcacctaagtaatgtgcccatgttggtcctctgccctggacctgtgacattctggactatttctgtgtttatttgtggccgagtgtaacaaccatataataaatcacctcttccgctgttttagctgaagaattaaa

SEQ ID NO: 92888 - DNA, 563 bp, Homo sapiens
tttgtctagctaagggtttttatttttttcaagaaacaaactcgggttttcttaatattttctattattttcctattctctatttctactctgatctttgttattcccttccctctgctaagtttggacttagtttgttctccttctaattccttgaggtataaagttaggttgagattgttcttcttttttaatgtaggcctttatccctcttagtactgctttttctgcatctcttaagtttgggtacgttgtgttttcagttttattcgtctcaagaaacttttcaagttccctttggatttttggactcaaaggttgttcaaaaggatatcatggtttagtttccacacatttgagttttcctgttttctattattgattcctaatggaattccatggtgagtggaaaagattcttagaatgatttggatcttcttaaatctgagacttgttttgtgacctacatgaactatactggagaatgtttcatgtgcacctgagaagaatgtatattcttttgctgttgtgttaaaagttccatacgtatctgttagatccat

SEQ ID NO: 92889 - DNA, 246 bp, Homo sapiens
tcaagagtttgcttgaatcttcaacatatctgtgtccccatagtttctctgtcttttttcaggaccaatttgacttcatcttctgattcaagttcaacaaaagcctcgccacttggtctgccttcttgggctggggctcccctcgtgtcccgcggcgggaggcggggggcattgggacttggttgggtcgcgtctcgcctggtttgagggtttccggggctctgagctcgcccactccgcctccct

SEQ ID NO: 92890 - DNA, 623 bp, Homo sapiens
gacatagggtctcactatgttgcttaggctggtcttgaactcctgggctcaagcgatcctcttgcttcagcctcccgaattgctgtgattacaggcacgagccactcactgcacctagccaaagatcagtaattttttgagcactgacataatgccacaagtgaaaacttctgcatttgacctcgtgtgacagatcaatcaaaactttgttttcatgcacgaaactactaaaaaaaattgcataaaactacattcggactatgtgtataaggtatatataaaacataagtaaatctcatgtgggtcccatccccaagttatctttacatatacgcaaatattcccaaaacctgaaaaaatccaaactccaaacacttctggtcccaaacattttagataagaaatattccacctaaagcagaacatgagtgtatgagtatgtgtgtgtatgtttgtgtgtgtgtggagtatatgtaagtataaatgtgaatatatgtattgtaggtatgtgtatacacacgcgtatgctggtttataggtaaaaatgagaaccagtggatgttcttgtcagcaccacattcataaatacatatacaaaaagatttgcataaaagtgacaacat

SEQ ID NO: 92891 - DNA, 508 bp, Homo sapiens
tcaggagtttgagaccaccctgggaaacatgggtgaaaccccttctctacaaaaaatacaaaaattagccaggcatggtggtatgcaccttatgttcccagctacttgggaggctgaagtggtaggactgcttgagcctgggaggtggatgttgcagtgagccgagattgcatcactgcactccacatcctgggtgacagagtaagactttctctctctctctcaaaacaaacaaacaaacaagaattcataaaaggcaacttttccctgagacaaaagtgagacagcatactttttttttaatcatatacgtttaaaatttgtattttgatgtggagatcaatagaagtggatttcaggattttgtacaatttttttctaaggttttaattaatttattgcaaaatgctgtgaaagggcatatgaatcatgtggtgtgcctttttcctttgagctggcaaagagggcttttgacacagctcctgtgttctcattgtggacttggccc

SEQ ID NO: 92892 - DNA, 160 bp, Homo sapiens
taatataatacatgaagttactgctgtgtcaggctctgggtttttttttttcctgttaccaagttcatggctctgaggaggtcgggtttggtttggttttcttctttgcagtataagtggaagtttttctctcatgtaaattctgcttctgcaaagatca

SEQ ID NO: 92893 - DNA, 275 bp, Homo sapiens
ccagctagattggagtgatatctagattcttagatgtgagtttaatcctttaatcatctggagagttcatgagccatgttcatgaggttcatgaggcatgtcatgagccatgttcatgagttcatgaattcatgaggcatgtttctatggtttaagtttgcaacaagtatccttgaacatgtcagatatacataaagccattatgtggatatttgacacatttaaatattatattcgtgaagaagttatttaaattatcttattcactgtgtatg

SEQ ID NO: 92894 - DNA, 427 bp, Homo sapiens
  misc_feature (420)..(420): n is a, c, g, or t
  misc_feature (422)..(422): n is a, c, g, or t
  misc_feature (424)..(424): n is a, c, g, or t
tgtctgcactctcatgtttattgcagcactattcacaatagccaacatacagaatcaacttaagtgtctatcaatgaatgaatgaataaagaaaacgtacataaaaacacaatgaattaccattcagcgataaaaggcaatgaaatcctgtcatttgcaacaacatggatgtaattggaggccgaggcgggcggatggcctgacctcaggagtttgagaccagtctggccaacatggcaaaatccagtctgtactaaaaatacaaaaaaattagcccaggtgtgtaggtgcgtggctgtgatcccagctactcaggaggctgaggcaggagaatcgcttgaacccgggaggcggaggttgtagtgagccgaaatagcaccattgcactccagcctgggcgaaagagcaagactctgtctntntngtc

SEQ ID NO: 92895 - DNA, 530 bp, Homo sapiens
tactgatttgtttcttgctctcttggagtcctgcgagggttgagtggccaccatctttttgaacatggagactccaggatccacagaaaaggcatactaccagttcctaactgcatctgccacatggggatacatacacacatgcacacatacacacacatacacacacacacacatccattgaagggacatggaaggctgaattcatagaagcccattgtcacaagtctacctatgtgttaaggaaacagaataaaagcagtattaaaaggggatggactcaaacaaggaaggcttcatgaaggaggtgactcttaagcaaagctctgaaacaggcaagggtcagggcttggcagagggttatgtcagcaggagaacttgccatgcttccccacaggagccccaggttaacagatatggcccccaggaggggtgagcagggagagaatgtagggtttgtagtggtttttgtctccatctggggaagagaacccagggtccactgcccagacttctccctaccatgcttc

SEQ ID NO: 92896 - DNA, 379 bp, Homo sapiens
aatttatttagaaaaacacaaactggtttacattgatctaaattcattgtaagcttcagcaaactttctttcccagatatcaaaatttgttgtcacatgagagttaaagggaaaaagctttcatagtttctcaagctatttaaaaaattccatagtttttgcttctggctctcctaacttttttaggttttgttttcatgataacattttattcaagatttaaatattattagccaggcatggtggcaggcacctgtagtcccagctagtcaggaggctgaggcaggagaatcgcttgaacctgggaggcgaaggttgcagtgagccgagatcgtaccactacactctatcctgggcaacaagagtgaaactctgtctc

SEQ ID NO: 92897 - DNA, 317 bp, Homo sapiens
  misc_feature (28)..(29): n is a, c, g, or t
  misc_feature (120)..(121): n is a, c, g, or t
  misc_feature (135)..(136): n is a, c, g, or t
  misc_feature (140)..(140): n is a, c, g, or t
  misc_feature (217)..(217): n is a, c, g, or t
  misc_feature (238)..(238): n is a, c, g, or t
  misc_feature (303)..(307): n is a, c, g, or t
  misc_feature (310)..(312): n is a, c, g, or t
  misc_feature (314)..(314): n is a, c, g, or t
  misc_feature (316)..(317): n is a, c, g, or t
gcctgtaatcccagcactttgggaggcnnaggcgggcagatcacctgaggccaggagttcgagaccagcctggccaacatggtgaaacccagtctctactaaaaatacaaaaattagccnngcgtggtggtaggnncctntaatctcagctacttggaagcctgaggcaggagaatcgcttgaacctgggaggtggaggttgcagtgagccgagatngtgcctttgcactccagcctnggcgatacagcgagtctcaaaaataaataaatcgaaggctgctgagcacagtggctcatgctttnnnnnccnnncncnn

SEQ ID NO: 92898 - DNA, 317 bp, Homo sapiens
atgaaggagaaaatgtatgcattagaagagacatgaaagctaaatgcattgtgggaccctggatttgatcttggactaaggaaagggacagtgaaaaaactagtgaaatttgaactaagtctgtagctaaattactattattgtaccaatattaatttcttgattttgataactgtattatgattattcaagacaaagcttggtgaagggtatacagaaattctctgtactaattttgcaactctgtaaatctaaaattattttaaaattaaaaaaatttaaatcttgtgagaattaaatacagggtcaaaaatttt

SEQ ID NO: 92899 - DNA, 2646 bp, Homo sapiens
aaaatgccaaaatattttaattttcttaatactgtcataaattgaattgttatttacatttttattttctattctttcactatatatagaaatacaattaatttttgtgttttgaacatgtatcctgcaactttactaaattgacttatattaatccttgtaacttttttctggatttcttagagctttgtacatacaaaatcatgtctgcaaataggacagttttacttcttctttccaatttgcctttttctttttcttgccttattcactatctgggtcttacaatacaaatttaaatgcaaatagtgagagtggatatgcctgctttgctttgtttgtgattttaggtagaaaacattaaatcttcaccattgagtttgatgttagctgtagattttttttataaccttaattggatgaggaagacttctattcctagttgttgagagatttagtgatgaaagagtgttgatttttatcaaatgttttttctgcatccatttaaataattatatggttctttttctgttttctattcatagagtagattatattgattgattttctgatgttaagccaaccttgcattctgagataaaccccacttggatatgatagatagtattctttttacatgttattggttcttatttgctatattttgttaggaactttttgtttctatgctcatgagtaatattgctctgcagttctattatcttgtgatgtatttgattttctaataaaggtaatgttagccccataaaacgatctgggaaatgctccctcctcttttatattttgaaaacgttggtgtaagattggcgtcatttcttccttaaataactggtggaattccccagtgaagtgatctagatctggagttttctatgtgggaaagtttttattattaatttaaatagggctgccaaattttcttgaggcagttttggtaaatttgctttttaagccgggcaaggtggctcacgcctgtaatcccatcactttgggaggccaaggcaggcggatcacgaggtcaggagatcgagaccatcctggctaacacagtgaaaacccgtctctactaaaaatacaaaaaaattagccgggcgtggtggcgggtgcctgtaatcctagctactcgggaggctgaggcaggagaatggcatgaacccgggtggcggagcttgtggtgagccgagatcgcaccactgcactccagcctgagcgacaagagcaagactccgtctcaaaaaaaaaaaaaaaaaaaaaaaaatttgctttttaagtagtattttatctagatcgtcaagcttatcagcatggaattgttcacagtatgcccttcttattcttttcatgtctgaaggacgtgtagaaaaaccccttctttcattcctaatggggatttgtctcctctgttttcttcactagtctggctacagctggtcggttttattgaatttatttcaaaaacgtggcttttggttttattgatttttctctacttcttttttttttttttttttttgagatggagactcactctgtcgcccaggctggagtgcagtggcacgatctcggctcactgcaagctacgcctcccgggttcacgccatttatcttttctattttattgatttttaccctttatcctttccttccttttgtttactttgagcataacttggacttatttttataatttcttaaggtggaagcttagatcactgagctttatttttagactttgcttcttttcccatgtaggcattaaagctacatatttccctatatgttctgttttaccctacatcccacaaattttgatatgctttcattatcataggtatatgatatattatcaacatattttctaatattacttgtgactcttctttgatctagtgattattcagaagtatgttgaagtccagatatttgaaattttcctggttatctcattattattgaattccagtttaatcctttgtggacagagaacatagcctgcgtgattttaaactattcaaatttattgagttgtgttttgtggcccaaaatatggcctatcttgacaaacacaccaggtgcacttgaaaataatgtgtattctgccatttttggtgaagtgttctataaatatcaagtcaagttggttgataatattgttcaaaacttctatgtctttactcattttctggtctaattgttctagtagctgctaggtagagatgttaatatttgcagtgatgtttgtggaactatctcttctgcactttcattctgtcagttacttgcttcatgtatttttgcttcatatattggatgcatacaaatttcgactgttgtgttgtccttgacaataagacttttatcattatggagtaatgaaattgataatacatttcttattgtgatataattgacagaacataaaatttcatacaatataaaattctccacttaaaaatatgcagtgtacattttggcttaagtatattttgtctgatatcagtctagccagtctagccttttgatgtctactgtttgcatggtgtatttttccacccattttctttcaacatatttgtcaatatatttgctggttcttctctaataaacatatagttgggtcttgtt

SEQ ID NO: 92900 - DNA, 702 bp, Homo sapiens
gtggacttctccagtgcctcccttttctgaaaacactatccctgtggttgattcaggcatctaggctgaaaacctcagatctatttgtctcttttgtccctgtcaccaaacccaccttcttctccctttgcagggcctcttgcctattgttgcttcacctgtttctattagccttttctcgtgtgcctaggcaaccgcaaaggtctcctaattgcttcttctggcttggtctcggttcccttctccaggcctttctttcgcaaagtacaaatggaatctttctaaatctagtttccctgtctaattttaaaaagcccagtgatttcctctagggattgagcaatggcctccaaacttttatgctgataaaccccataggcagcattgagcctgcaccactgatgcatttatttatgaattatatagcttattatttgactaatttgtcatatataaactgcattaaaataagggcttttttgaatgagataaatagaaatagaaattctaattttcgtttcatacccagactccctgggttttatgcgccctacttagagaccactggcctctcagttcagacttgagctggtgtacaagccttccttagtctgttcccagccttgtacttcactgcatccttctgagtcctctgcctcaagctgttccacttactggcatctcagtaatgcctttcccacc

SEQ ID NO: 92901 - DNA, 713 bp, Homo sapiens
ggagcacacagtcatgggacacccaggcttacagggcacacaggctcacagggcacacagtcacagggcacacaggctcacagggcacagagtcaggggccacacaggctcatggggcacagagtcacggggcacagactcacagactcacagatcacagaggctcatggggtgcaggctcacagggcacacagactcacagggcacacaggctcacgggacacacaggctcacagggcacacagagtcatggggcacagaggctcacagggcacaggctcacaggcacaggctcacggggcacagacttaccggacacacaggtcatgggacacagagtcatggggcacacaggttcacagggcacacaggctcacgggacacagagtcatgggacacacaggctcacagggcacacaggctcacaggacacacaggttcatggggcacagagtcatggggcacagactcacagactcacaggtcatagacgctcatggggtgcaggctcacagggcacacagactcacagggcacacaggctcatggggcacagagtcacggggcacagactcacaaactcacaggtcacagaggctcatggggtgcaggctcacagggcacacaggctcacagggcacacaggctcatggggcacagagtcacaaggcacagactcacagggcacacaggctcacaggacacacaggctc

SEQ ID NO: 92902 - DNA, 259 bp, Homo sapiens
aggatggcaccactgcagtctgccggggtgacagagctagactctgtctcaaaaacagaaaaacaaaaaaacaactttccagtggcttctcactgctctgagaataaactccaggctcttccattgcaaccaacaggatctggtgattcgaccccagcccctctttccaggccctcatcaccttgatcctcccttaacctatcctgctccagctgcactggctgccttcctattcctccagcataccaagattgtttct

SEQ ID NO: 92903 - DNA, 826 bp, Homo sapiens
cacaataaataaaacagttgctgtcaatacaactccccttattttctctcaagtcacctggatcgtcctgaccccgggaaccccgtctgcagcaccaggccccctccgtggagaaaagatggagccggattaagcacccagtgctaaggcgactaagacgccactgcccgcagccctgccgaaaatactcagagagtgcagcaggcgccgcgattccttagaaagtgctggcgtggctctcctgacacagaaagccggctcctggatgcttacaaaggactggcccgcgcaacactgttgctcctcaacccgggccacactccaaggacctctactgagcttcagcttgctcaccgaaaacggcgcggccccctctacccgggatgtcggagcccaggagaccctgagagcccccagctctttccgtaattgcaggagaaggggcaagcgggtccgtagccgggggccctccagtggcattatcctgaaccgccacgcccgcacgtggcccggctagagctccctggcgaaggatcacctgttcctacagtgacaactggacctggcccgaacccctggcatctggcaacattattacctgtcgaaacagaagtagagatttgaaatagaggatgccagttcccatttcctcctgctgtctggaaggaagtctggctttccagcccaactctaagctcatctttacatacaaaataagggtatgtttacatggaaagcaaaaatagaaccatggatttacagaaggttccatagcagcaaataacagtgcttatgaaataaacattttaaatattaaaatgtaaaa

SEQ ID NO: 92904 - DNA, 406 bp, Homo sapiens
gagatggagtcttgctgcgatgcccaggctggagtgcaacggcgcaatctcggctcattgcaacctctgcttcccgggtccaagcaattctcctgcctcagcctcctgagtagctgggattacaggcgtgcatcaccaagcctggctaattttttttatatttttagtagagacagagtttcaccatattggctaggctggtcttgaactcctgacctcaagtgatccacctgcctcgatctcccaaagtgctgggattacaggcatgagccaccgtgccaggcctacattttccttttttaaaatataaagttatatttcacttaatactagtatgattgagcttttaaaatatgtttatattacagactgaattgtgtcacccccaaattcatatgttgaggcc

SEQ ID NO: 92905 - DNA, 364 bp, Homo sapiens
ggattaaataatgtgcagaaagggcctagaatagcacctggtgcaaagtcaatccttaatacatggtgcctattattataacaaactctttttgataccattggatgaatttcaagaaggaccaacctacatgtaaagtgtattagggtgacattttggagaattgtctaggaaactcccaccttatatttggtgtcacttggattctgacagccaaatctatgttcccaatttcaaaatcttcttttggccaggtgtggtggctcacacctgtaatcctagcactttgggaggccaaggtgggtagattgcttgagcccaggaatttgagaccagcctgggcaacatggcaaaatcctgtctc

SEQ ID NO: 92906 - DNA, 735 bp, Homo sapiens
tttttttttttgagatggagtcttgctctgttgccgggctggagtgcagtggcacaatctcggctcactgcaacctccgcctccaggttcaagcaattctcctgcctcagcctcccaagtagatgggactacaggcgcaccaccaccacgcccaggtaatttttgtatttttagtagagacaaggtttcaccatgttggccggcatggtctagatctcttgaccttatgatctgcccacctcagcctcccaaagtgctgggattacggtcatgagccaccgtgcccggcccagtgttgctaactcttatcagtaccacctctaaactctgatgttgtgattaaaggaagagattcccgcaggcagacttactaggtttaaatttcagctctatcagttatcaatcattatgagttggtcacaatccttaaattctctgggtgtcattttttctcatcaataatacaggactaataatgcctactttatgtagtttaaattttacccaatagtaatcaaatccacaaacctttactctctaactagcctaatctgaactctcaaaatacaccccttatgaaactcaccacttatctgttgtgtgttttatccctcttactaaactgtaagctccttgaaggaagtatttacctatgtccccttaaagactagcacagtgccttaccacagcaagtactgagtaaatatttgtttttaacaggttaattagtaattt

SEQ ID NO: 92907 - DNA, 405 bp, Homo sapiens
attaggttgtgtgtgtcaagctgccattataaaaacactaaatgaataaaatttcgcaagcaaggcagcattatcaggctaagtacatgtagtgggcttatatatggtgatgttttacataattcagctattaattcatctatagatttacatttcttaagtgcaaaaaaaaatgtaattatttcattacatatggaattcacctcccaaatttctcagaatctaagagaaaggattgacattttctgatatttcatttttgcttaaaattaagttcttaggatgtttagattttattataaatattacaacttaaattccagagttataatgaacggtctatgttttgaaacacagagggagaatggggtaatgactgaagtactgttttttcagtttattagt

SEQ ID NO: 92908 - DNA, 277 bp, Homo sapiens
acaagtaagtattttctgtttgtttccctttcctcaaatggtgtaatatattaattcagagctattaaagaaaaataatattaaatattgaatttaatactcagacattaaaatgaaataaatcatttaaacttaaatgcatataaatgttttcttttcaaattaatgtacttatatttccccagtaaatttcctggaatttgccattgtaaagattaaattctaagaagtatttgtttcgatatttgtgtgctaattaaagttaataatgaaagat

SEQ ID NO: 92909 - DNA, 472 bp, Homo sapiens
ctggcagatttggtgtctggtgaggccattctcttcttccaaaactatgctttgcagactctggagtggagaaaggctggttactcagcaaaaggcagaagaaccaagagacaaaaaggggttgaacctgtccttttataacagcattaattctacccaatcacatgttaaatgtcccacctcttaatactgttacaatggcaatgaaatttcaacatgagttttggatgggacacacatttaaactatagcagatgggatgtaagcatgagcaatttggaggcagaggagacaatattttatttgaaatgcctatgtgccatggaaatcaagagacactgggtaagtggacttacggagctgaaactcaagaagagatagaggctggagatagaggtttgaaaatttatcaacatccataggtgatacatcaagcgtttggtgtggatttggtaccaagtgagaagaaatg

SEQ ID NO: 92910 - DNA, 493 bp, Homo sapiens
ggttcaagcaattctcgtgcctcagcctcccaagtagctgggattacaggcgtgcactgccacgcctgaataatttttgtatttttagtagagatggggcttcaccatgttggccaggctggtctccaaagatcagccagccttggtctcccaaaatgctgggattacaggaatgagccaccatgcctggcccagaaccagagttcttaatggctgttcggacttaaaacatggtaccccaaactatgtaaccttggtgtgctgaaaactttgaactgaaggagattgggagggcctcagaagcaaggtccttctgacacctcactctcctttcttcctcttatcttccctaagaattcctcttttcctgcgtaagtcatagaaacaacttctctcccgcaaagcaagtcataaaacctagagacgccactcccctgaaggtagaaaaccctcattacagaggagtcctgtcccctatccaggggaaagaatg

SEQ ID NO: 92911 - DNA, 317 bp, Homo sapiens
aaagacccttccatattaatatatagagataaaacatgattttaatattggataagcattatcagagttatatgcatgtgaagtagtacaaaaacaactacaaaatctggaaataatttcacacacattcatacaaaaaaagtagaagagagaacaatttaaaacttctcattttcttgagatacaagaggatgcacattgtgcctgtctcacttataccttaggagagatccctgagcaaattctagaagtatttgcatttccaagggtcagaggcacatgaacttgcattgtaaaatcaaaaggtcaagactttt

SEQ ID NO: 92912 - DNA, 404 bp, Homo sapiens
tctacttgggcactagaaaagaaattgtatagttttaaagcagatgtatgctcttaacgtggttggcttgtaaagcaataaaacttggggtttttccccccttagcctatcacaactcttagaataaacagtgtacttaagacagggcgattctatcacaattccatgtaatatttagtccatataacaagataaaatttgaattagcatcacatatagaaggcatttcattttctcacatacagtacaatattaagcgcaaacaacatatgtctccatggttataaacaacagcgtcatgtttgcaaaacagatcctatatgtagaacgtctgtaaatgggagaaaatatggggcttttgttggttaaaatgatgttaaatatttcaagtcgcatgatcttta

SEQ ID NO: 92913 - DNA, 209 bp, Homo sapiens
acgggagggacggccccacactcctgactcccttgtccacgtgcaagggcacctgtgagtgcatttgcatgcttatctgcatgctcatttgtatgcttgtttgcctactgatctgcatgctcgtttgcatgctcatctacttgctcgtttgcgtggtcatctgcgtgctcgtttgcgagctcatctgcgtgctcgtttgcgtgctcgtc

SEQ ID NO: 92914 - DNA, 455 bp, Homo sapiens
tagcacctgagtgttcctttaggatgcatgtcagtcataacctacttgtttcatctttcaaaattctgtatcttagattccaaagaatgtgacagtttctcccaccagcagttgcatagtctggtagatgactgttaattttccaagagagttgatgagttgtccaggggcattcacatctttggcccttttaagcctgtagattagtgcttctcaaacttttttttcattatccctctttccttgcccagagagcctctgttagaccttgtttttccctaattgctccccaagtcgaattctaatatcatagaggtactgtacatctggtcatgtgctatatgtatatttgtgtgctttatatatttaacaagtaagatttctttcaccttccccaaagaaccaatttttatcccctttggggtgatacttctgctttgagaatgcatgccatg

SEQ ID NO: 92915 - DNA, 422 bp, Homo sapiens
aaagctgttaattaagatataatttatatttatgaaaatttgaaaacaactaaggtcaagggagtggctaggtaacagactaactattggatatgatgttcattaacaccatgtggctcacccagaaaatgcttatgatatgcaacaaatgaaaagcagaaaaccacatttaacatgcgttatgactacaaataagacataatacccacatggggacatggatcagaagccaagtacaaaagactaatttattagaaaagctagctttgcaatcctttttcctttttaaaacttgcaatggatataaactttatatggaacaaattctttaaggatgcatgtatctaatcctctgtgatacaacctgagaggcaaaagcccttgctgtcagacaggcctgtgttgaaatcttcgttctgttg

SEQ ID NO: 92916 - DNA, 323 bp, Homo sapiens
ctctcagatttgcccagcttgacatgatgttatttttcagagggagcagcctctattcagctcctagtcacagccggccttttggaacattctttctagcatttgaaggtttctaagaggtgggagggggtatcttttatactgggaccctttgagtaatctagctcatgcaaggcattcctcttcatgaaggactgagctacctgacttctgaccagaaacaaacgatttttttttttccttttttgaccagaaacagatggtctgcttgagcccaggagttccaggctgcattgagctatcatcgtgccactgcactcctg

SEQ ID NO: 92917 - DNA, 397 bp, Homo sapiens
ctactactactactaaatttgcggccgcgtcgacagagaagagagaacctattgccttaataagaaaatctgatgtatcaagaggtaatttggaaaaagaaatggctcatcttaaccatgatctatattcaggagatttaaatgaacagtcccaggcacagctaagtgaaggatcaattacacttcaggttgaagcagtagagagtacttcacaagtggatgaaaatgatgtgacgttaacggctgataaaggcaaaacagaggacactttcttcatgagcaacaaaccccaaagatacaaagacaagctaccagatagtggtgattctatgcttaggatcagcaccattgcttcagccattgcagaggcatcagttaatactgatccttcccaact

SEQ ID NO: 92918 - DNA, 258 bp, Homo sapiens
aaacattacagtgaggatgtagaagttgcaaattggcacaaatctgcctggagacatgttttgtttgtctcagtaattttaatatttactgtagttaccaaggttttttaactttcatgaaaatgaagatttctggctgttttggaagaatgggaagaactgacaccactaggtccacacttataaatgaaaataactgagtggaatggaatagcaccgccttctccaacagagaatgtgctctctgattcttccaat

SEQ ID NO: 92919 - DNA, 364 bp, Homo sapiens
ccttgcatttgctgtggcaggagaaaacagctagagaatcaaagaggattcctcaatgcctcagcctagaagtgacatgcatcccttctgcttattgaccatgtccaagtcacatggcccagcccaattcaaggaggctgggacatacagattccagtatgcccaggggtgaaaggagaaccagtgattagtgagctcataatgtttaccataatatctattttatgttactctagatggctgccaggtcatctaacattacttattgcataacctatttttttctcattgatttggaatgctatcttggttatacactgaaagcttctgtatctttccattttcccctgagatcattgacttt

SEQ ID NO: 92920 - DNA, 433 bp, Homo sapiens
aaaaaaaaaaaaaaaaaaaaaaaacacttgaggctgtccttaacccctccatctcccttacctcccatgttaacttaactcataatctttatatggccttttcttttcacctctattgccataaccttgtttgaatccttgcagtctttcatctttactactgctacattctctctttcaacagctagtccccactgcctctcaccctccacagtctccagctttatattccttaaaaaaagaaaaaaaaaaaaggtcaggttacttttcccttctatgaaaagctctctacaggaccactcttttcaatactaattaaagaacaaactatttagtttgacacagaagacattctcattctgaaaccccaagctggccacttactgctagctactccacccattctctaagggttctatttccattcaatttg

SEQ ID NO: 92921 - DNA, 1916 bp, Homo sapiens
  misc_feature (169)..(169): n is a, c, g, or t
  misc_feature (1717)..(1717): n is a, c, g, or t
gtatcttccacaatgtgacacagcgccttatacatgtgttcatatgacagcataaatatttgtggatttgtaagtgaaacaaaggctcatttctccactcataagatccaggagacagaagtaagggtaacagcgaaaaagccttccctgtaggtaggttaaagttttncgttaagagccaaacccatgtctaaattaagtaggaatccagaagatttttcatctcttctcttaaaaatttttaaattctgcccagtcacagggaataatggattgcagttagactctctgccagaggctccctcactcagaaaacacaagttccgttccatgtccccaatgcacacagaacaacgagaatctttatattccactttcatgaagctttgcaaacctcagtaagaacaaacagaaatcccatttattctagtattaactgcatactataatacgccaatagtgtcttaggagttagaaatatacaatagtggacaaagtttctattatcacggagcttatatactaatgggaggaatgtaatcagtaaacaaatgaacaaatagatggtggcaagtgctaaaaatttcttagctcttggaagggatggagctatgtgtttgagggaggttgctaggaaggagccccacataaaatgacttttaagaattatggcaacagtggtagtgtgtcaccagtggcctggaggcctatggaactgaccatcatgatcaactaccaccttccacatagtgagtaagtgtgaaggcctcccattcattctatatctcacatgtctgctccacctgtgccaaaccaaagacacatcaaacgggatcgtctcttggtaattttgcaaagcctctagttttacgtatatagtaccagacggtggaaatctcatttatttattcacatgcttcacaattaaaacaatctgatcactttaagtgactcaaaattacacgagccatttattacacgattaagtgacgtaactgtagctagtaagcatgtgaagaccctgtaagccaggggttcccaacccccaggccgtggaccattactggctcatgacctgttaggaactgggccacacagtagctggtgagctaggaagcattactgcctgagctctgcctcctatcagatcagcaggggcattagattctcataggagcgcgacccctattgtgaactgcacatgcaagggatctaggctgtgcactccttatgagaatctaatgcctatgatcgaggtggaacagtttcatcccgaaaccatccctccacacaccccctgccagtctgtggaaaaactgtcttccatgaaaccactccttggtgccaaaaaggttggggaccgttgctgtaagccactgagtaacaagtgaaagccatttctgaaaaatcatttttcaaactgctggaaaccaactgcagtaatggcggatgtagcaccaaataataacctatctacatggctttaaattttgaaataatactctctaagtggaaaatatgagcaattttaatacattattaatatatcactataaaataaagccattaataaatcactacaaaataaagccagagttatttttcctaataagtttaatattacgcctttaagtttctacaagaaggaaaaatcaccaggattattctacaagaagaaataatcaccaggacaaaaaatatctctatcctcatacanctcataaccatacacctgttcttataagattcctagaagggtacagtggtatgcacctgtagtcccagccactcaggaggttgaggtgggtggatcacttcagcccaagagtttgaggctgtagtatgcaatgatgacaactgtgaatagccactgaactccagcctaggcaacatagtgagaccctgtcttgaaattc

SEQ ID NO: 92922 - DNA, 751 bp, Homo sapiens
cgtcacgggcaagggccgccattttgactgagcaaccctagtgacaggagccgaagcagcagcgcaggttgtccccgtttcccctcccccttcccttctccggttgccttcccgggccccttacactccacagtcccggtcccgccatgtcccagaaacaagaagaagagaaccctgcggaggagaccggcgaggagaagcaggacacgcaggagaaagaaggtattctgcctgagagagctgaagaggcaaagctaaaggccaaatacccaagcctaggacaaaagcctggaggctccgacttcctcatgaagagactccagaaaggggtatggggcatagtctcttaccctctttctttggagctaaaggaggttcttcgaatgaagtctgtagaggttctactggatccttttctggaggttttgttgttgaacagaagtagaggcgaatttgaaatttgaaaagagcaagtcaaattaatgtaaatccctgatgtggtatcaattccctcctgatttcccatgtaggaaattaaggcctaaattggagcatttgggtgtgtggggaaatgagggaaagatgttagaaactgaaatgcagactgcccccaggcatttgcctgtttgaatgttggaggttttaggattgtgcactttttaagcattagagataaattttgggatgcatcatttcagaagaagatcaaaccatctctcctacagaaataaatcctcaacttgaaatgaat

SEQ ID NO: 92923 - DNA, 1116 bp, Homo sapiens
cgtcacgggcaagggccgccattttgactgagcaaccctagtgacaggagccgaagcagcagcgcaggttgtccccgtttcccctcccccttcccttctccggttgccttcccgggccccttacactccacagtcccggtcccgccatgtcccagaaacaagaagaagagaaccctgcggaggagaccggcgaggagaagcaggacacgcaggagaaagaaggtattctgcctgagagagctgaagaggcaaagctaaaggccaaatacccaagcctaggacaaaagcctggaggctccgacttcctcatgaagagactccagaaagggcaaaagtactttgactcaggagactacaacatggccaaagccaagatgaagaataagcagctgccaagtgcaggaccagacaagaacctggtgactggtgatcacatccccaccccacaggatctgccccagagaaagtcctcgctcgtcaccagcaagcttgcggggtaacctgagcccccctctcctccccttcctcaaccactggacgtttatatattataggcagggatgaaatgggcacctagtcagatcttctcagcttgctagccagaaatgactgtgattctgctgggggctgctgagaaggtaatgtaggttgaaaaggggctctaagtttatttatttcgttagattgacacttccacacactccctgtagtccaggtagggcccagaaataggaaaggctaggattggataatgctgcaaatgctttttttgtgtgagaaactggagagatgtgatttctccttttgggagagaatgtcccaaaattgattaggctgagccttgggaatagtttggcaggtttaacatcccaaggctaacctaacgtagttgggaaaggtagattgaatgagacatgttttctgtgcttctaagtgttctgtcccttaggctgctattgcttcatgtttccattatggcaggtttagagaatccttaaaaagaaaaattgacttgcttgcctaaaactacagtgcccccttagcctccattacttagtatctcttacagtttgctctggctctcaaataatataaagattgatgaacattattcac

SEQ ID NO: 92924 - DNA, 321 bp, Homo sapiens
accacactgaaacaaggcatttatctacagagctcaactagaaccccttttcattgtggttggagacctggtgtcagataaaagaaactccatccgcacagacagatgcaaacagctcctctagttctgcagagctagttgagaactcaacattaatcattttaaaaagtactgtccttgaaatagatttgctgtgggaagaagggcagtgagtgtgggagaaaggagccgtgagcgtggggaaccccacagagcccaaaggactttttcagtattcgaaataaacaaaacaaaaacccatgaaaaaacccaacccagaaa

SEQ ID NO: 92925 - DNA, 471 bp, Homo sapiens
cgtcacgggcaagggccgccattttgactgagcaaccctagtgacaggagccgaagcagcagcgcaggttgtccccgtttcccctcccccttcccttctccggttgccttcccgggccccttacactccacagtcccggtcccgccatgtcccagaaacaagaagaagagaaccctgcggaggagaccggcgaggagaagcaggacacgcaggagaaagaaggtattctgcctgagagagctgaagaggcaaagctaaaggccaaatacccaagcctaggacaaaagcctggaggctccgacttcctcatgaagagactccagaaagggcaacaagtacttgtgactcaggagactacaacatggccaaagaacgtgacggagacagcagctgcctcaccgcccagacatgatctggtcagatgtttcaatgcctcatgatacaataaaaccacaaaaattttcttacccc

SEQ ID NO: 92926 - DNA, 351 bp, Homo sapiens
tgatgttggagcggccgcaaatgttttgttgttgaacagaagtagaggcgaatttgaaatttgaaaagagcaagtcaaattaatgtaaatccctgatgtggtatcaattccctcctgatttcccatgtaggaaattaaggcctaaattggagcatttgggtgtgtggggaaatgagggaaagatgttagaaactgaaatgcagactgcccccaggcatttgcctgtttgaatgttggaggttttaggattgtgcactttttaagcattagagataaattttgggatgcatcatttcagaagaagatcaaaccatctctcctacagaaataaatcctcaacttgaaatgaat

SEQ ID NO: 92927 - DNA, 4013 bp, Homo sapiens
cgtcacgggcaagggccgccattttgactgagcaaccctagtgacaggagccgaagcagcagcgcaggttgtccccgtttcccctcccccttcccttctccggttgccttcccgggccccttacactccacagtcccggtcccgccatgtcccagaaacaagaagaagagaaccctgcggaggagaccggcgaggagaagcaggacacgcaggagaaagaaggtattctgcctgagagagctgaagaggcaaagctaaaggccaaatacccaagcctaggacaaaagcctggaggctccgacttcctcatgaagagactccagaaagggcaaaagtactttgactcaggagactacaacatggccaaagccaagatgaagaataagcagctgccaagtgcaggaccagacaagaacctggtgactggtgatcacatccccaccccacaggatctgccccagagaaagtcctcgctcgtcaccagcaagcttgcggggtaacctgagcccccctctcctccccttcctcaaccactggacgtttatatattataggcagggatgaaatgggcacctagtcagatcttctcagcttgctagccagaaatgactgtgattctgctgggggctgctgagaaggtaatgtaggttgaaaaggggctctaagtttatttatttcgttagattgacacttccacacactccctgtagtccaggtagggcccagaaataggaaaggctaggattggataatgctgcaaatgctttttttgtgtgagaaactggagagatgtgatttctccttttgggagagaatgtcccaaaattgattaggctgagccttgggaatagtttggcaggtttaacatcccaaggctaacctaacgtagttgggaaaggtagattgaatgagacatgttttctgtgcttctaagtgttctgtcccttaggctgctattgcttcatgtttccattatggcaggtttagagaatccttaaaaagaaaaattgacttgcttgcctaaaactacagtgcccccttagcctccattacttagtatctcttacagtttgctctggctctcaaataatataaagattgatgaacattattcacagaaaatgggcaccttctctctctcttccagcatgttgcttttgaaagtatcatgggatagtgggacgagcactggtttaggagtcaagatatctgggttctcactctactcagtcccagcagagctgttgtataaccttgattaagtcatttagcctctctggatttctatttcctcatctgtaaaatagagttaaatgtatgtaagattgattctgattctgaagtcttaactgccagcagaaaaactccatactgttcattgtaaaactaaaagtgaggaaggctcgtgggtggtgaacctctgctctgtaatactgggaaagtactacagaggggaaccatttgagggatacatgaggagagagtaaattgaggtttggggattataaattcaggcaagagaaccttatagatatcacagtcttgagggtcaaaaaaaaatacttaggaagctagccatggaagcttcttgcctctgacccagcccactttcccagcctacctctgggccttagctgctaaaaagcttctctggcagcggagctgcaggcctgaggaaacatgctcagtcatgcacatgtgttgacccatgtttcagatgcagtctgatgccaggtatattgttagggaaagaggaagaagggtaaactgagctagcccctggggctgagtactcctgcagggctggaggaacaggttcttagaagatgattcaccttggaggaagctggggaaagtggttagggagggagaggaggaagactgagaaatctctgcatccccagaactcagcaacccagctcttttatcatgaggagaggtagccatgctgactcatgaacaggtggaggaaaggggttgcaggtgaccagcatcttcaatctagttaccaccagcttggctagaattttattgaacgcaacttgctagttatgacagagaggaccagggtgagaactaatgctcaagagagcaagattctgtaatcctcttgccctctcacatcacaaattctgatatgccaaacatttggcccaatgagaatgactgatagacttgctgatgtgcatgtggggggatgaggtgtgtatatgcctttctcctgactggccattcagtgttcaggctgtcattcaaattggataggagaaagttggtgaggaaggaatggagagagcaggatccctggactccctggtccccaaactccttgactgtcacttgtaattgtatataatttttgtgtttcttgctccatttcctcatgctgtcatccttaaagtccatctgggaaggggaaaatgctgaacaccattgtatagtttcttcaactgtcccagccatgttgtacatagatatgtcatgttattatatatataaatatatatataattttgtacgttttcttcatctccgatcttctcaaattctgtactttttttcttttctgtctgagctgccttctctatcattcagcttgagtcctcaagactactggtcacaatgagtctgatttttaggaaggaataggaggagcagggaaatcagaaaaactgttggtctcactctgtctctctacctggtcatcttcaaggctaagaaaacaaacaagctacattctgtatttgccagtttccacagcatgaagtacatagcttccttagcaaggagtggtcattccaaaatccaaatgcaaattgctttgattaaacctagattattaaatccattcagaacagcatgtgtgtggtctggttctggcctccacacagtcaccacctcatctctgtgctacctcagtctttgcaagtagctgtggccatgcctctgaaacagcctgctctgagccaggcagcttacccacctggaaacctccagttattttgatcttatctaaagaattatttttctatgtttgttatccatggatatcccagaaaggcagataacgttgtttcgtggataggaaaagactgaaattctattttttgattttttttgcaactcccttatggataggattgagacatgccaggtagcctaatggttgttaaatgtggaggaatcatggggtagagactgggttggagttcagggtttttttcccctattacttgacagtgttgttttttttttttttcttctgtgttcgcccgcagtggccaagttgaatgatgctgcccggggctctgccagatcctgagacgcttcccctccctgccccacccgggtcctgtgctggctcctgccccttcctgcttttgcagccaggggtcaggaggtggctcgggtgtgggctggagaggcagaagccctttcctgttggtgtcccagcacatggagccccttgggctgagcaccaagaccttgaaccttttttgttttaccttttttccaaataacagttgggagaaatatcaatgaaattctgggggtgggggtggggttgaaagggtggggtgggagatatggaggagtatgaattagggcttggagttggtaaaaacattcctgactatccttcttaaccacgtggctgatgtggggtaggtatgaggggaaggaagtggagtagcctaatgaaaaggggttctagttgagctctgtagataaatgccttgtttcagtgtggttggagacctggtgtcagataaaagaaactccatccgcacagacagatgcaaacagctcctctagttctgcagagctagttgagaactcaacattaatcattttaaaaagtactgtccttgaaatagatttgctgtgggaagaagggcagtgagtgtgggagaaaggagccgtgagcgtggggaaccccacagagcccaaaggactttttcagtattcgaaataaacaaaacaaaaacccatgaaaaaacccaacccagaaa

SEQ ID NO: 92928 - DNA, 3955 bp, Homo sapiens
cgtcacgggcaagggccgccattttgactgagcaaccctagtgacaggagccgaagcagcagcgcaggttgtccccgtttcccctcccccttcccttctccggttgccttcccgggccccttacactccacagtcccggtcccgccatgtcccagaaacaagaagaagagaaccctgcggaggagaccggcgaggagaagcaggacacgcaggagaaagaaggtattctgcctgagagagctgaagaggcaaagctaaaggccaaatacccaagcctaggacaaaagcctggaggctccgacttcctcatgaagagactccagaaagggcaaaagtactttgactcaggagactacaacatggccaaagccaagatgaagaataagcagctgccaagtgcaggaccagacaagaacctggtgactggtgatcacatccccaccccacaggatctgccccagagaaagtcctcgctcgtcaccagcaagcttgcggggtaacctgagcccccctctcctccccttcctcaaccactggacgtttatatattataggcagggatgaaatgggcacctagtcagatcttctcagcttgctagccagaaatgactgtgattctgctgggggctgctgagaaggtaatgtaggttgaaaaggggctctaagtttatttatttcgttagattgacacttccacacactccctgtagtccaggtagggcccagaaataggaaaggctaggattggataatgctgcaaatgctttttttgtgtgagaaactggagagatgtgatttctccttttgggagagaatgtcccaaaattgattaggctgagccttgggaatagtttggcaggtttaacatcccaaggctaacctaacgtagttgggaaaggtagattgaatgagacatgttttctgtgcttctaagtgttctgtcccttaggctgctattgcttcatgtttccattatggcaggtttagagaatccttaaaaagaaaaattgacttgcttgcctaaaactacagtgcccccttagcctccattacttagtatctcttacagtttgctctggctctcaaataatataaagattgatgaacattattcacagaaaatgggcaccttctctctctcttccagcatgttgcttttgaaagtatcatgggatagtgggacgagcactggtttaggagtcaagatatctgggttctcactctactcagtcccagcagagctgttgtataaccttgattaagtcatttagcctctctggatttctatttcctcatctgtaaaatagagttaaatgtatgtaagattgattctgattctgaagtcttaactgccagcagaaaaactccatactgttcattgtaaaactaaaagtgaggaaggctcgtgggtggtgaacctctgctctgtaatactgggaaagtactacagaggggaaccatttgagggatacatgaggagagagtaaattgaggtttggggattataaattcaggcaagagaaccttatagatatcacagtcttgagggtcatcccagcctacctctgggccttagctgctaaaaagcttctctggcagcggagctgcaggcctgaggaaacatgctcagtcatgcacatgtgttgacccatgtttcagatgcagtctgatgccaggtatattgttagggaaagaggaagaagggtaaactgagctagcccctggggctgagtactcctgcagggctggaggaacaggttcttagaagatgattcaccttggaggaagctggggaaagtggttagggagggagaggaggaagactgagaaatctctgcatccccagaactcagcaacccagctcttttatcatgaggagaggtagccatgctgactcatgaacaggtggaggaaaggggttgcaggtgaccagcatcttcaatctagttaccaccagcttggctagaattttattgaacgcaacttgctagttatgacagagaggaccagggtgagaactaatgctcaagagagcaagattctgtaatcctcttgccctctcacatcacaaattctgatatgccaaacatttggcccaatgagaatgactgatagacttgctgatgtgcatgtggggggatgaggtgtgtatatgcctttctcctgactggccattcagtgttcaggctgtcattcaaattggataggagaaagttggtgaggaaggaatggagagagcaggatccctggactccctggtccccaaactccttgactgtcacttgtaattgtatataatttttgtgtttcttgctccatttcctcatgctgtcatccttaaagtccatctgggaaggggaaaatgctgaacaccattgtatagtttcttcaactgtcccagccatgttgtacatagatatgtcatgttattatatatataaatatatatataattttgtacgttttcttcatctccgatcttctcaaattctgtactttttttcttttctgtctgagctgccttctctatcattcagcttgagtcctcaagactactggtcacaatgagtctgatttttaggaaggaataggaggagcagggaaatcagaaaaactgttggtctcactctgtctctctacctggtcatcttcaaggctaagaaaacaaacaagctacattctgtatttgccagtttccacagcatgaagtacatagcttccttagcaaggagtggtcattccaaaatccaaatgcaaattgctttgattaaacctagattattaaatccattcagaacagcatgtgtgtggtctggttctggcctccacacagtcaccacctcatctctgtgctacctcagtctttgcaagtagctgtggccatgcctctgaaacagcctgctctgagccaggcagcttacccacctggaaacctccagttattttgatcttatctaaagaattatttttctatgtttgttatccatggatatcccagaaaggcagataacgttgtttcgtggataggaaaagactgaaattctattttttgattttttttgcaactcccttatggataggattgagacatgccaggtagcctaatggttgttaaatgtggaggaatcatggggtagagactgggttggagttcagggtttttttcccctattacttgacagtgttgttttttttttttttcttctgtgttcgcccgcagtggccaagttgaatgatgctgcccggggctctgccagatcctgagacgcttcccctccctgccccacccgggtcctgtgctggctcctgccccttcctgcttttgcagccaggggtcaggaggtggctcgggtgtgggctggagaggcagaagccctttcctgttggtgtcccagcacatggagccccttgggctgagcaccaagaccttgaaccttttttgttttaccttttttccaaataacagttgggagaaatatcaatgaaattctgggggtgggggtggggttgaaagggtggggtgggagatatggaggagtatgaattagggcttggagttggtaaaaacattcctgactatccttcttaaccacgtggctgatgtggggtaggtatgaggggaaggaagtggagtagcctaatgaaaaggggttctagttgagctctgtagataaatgccttgtttcagtgtggttggagacctggtgtcagataaaagaaactccatccgcacagacagatgcaaacagctcctctagttctgcagagctagttgagaactcaacattaatcattttaaaaagtactgtccttgaaatagatttgctgtgggaagaagggcagtgagtgtgggagaaaggagccgtgagcgtggggaaccccacagagcccaaaggactttttcagtattcgaaataaacaaaacaaaaacccatgaaaaaacccaacccagaaa

SEQ ID NO: 92929 - DNA, 3942 bp, Homo sapiens
ggtggaggcccgggggttaatcggacgaggcggtggcttcccgggccccttacactccacagtcccggtcccgccatgtcccagaaacaagaagaagagaaccctgcggaggagaccggcgaggagaagcaggacacgcaggagaaagaaggtattctgcctgagagagctgaagaggcaaagctaaaggccaaatacccaagcctaggacaaaagcctggaggctccgacttcctcatgaagagactccagaaagggcaaaagtactttgactcaggagactacaacatggccaaagccaagatgaagaataagcagctgccaagtgcaggaccagacaagaacctggtgactggtgatcacatccccaccccacaggatctgccccagagaaagtcctcgctcgtcaccagcaagcttgcggggtaacctgagcccccctctcctccccttcctcaaccactggacgtttatatattataggcagggatgaaatgggcacctagtcagatcttctcagcttgctagccagaaatgactgtgattctgctgggggctgctgagaaggtaatgtaggttgaaaaggggctctaagtttatttatttcgttagattgacacttccacacactccctgtagtccaggtagggcccagaaataggaaaggctaggattggataatgctgcaaatgctttttttgtgtgagaaactggagagatgtgatttctccttttgggagagaatgtcccaaaattgattaggctgagccttgggaatagtttggcaggtttaacatcccaaggctaacctaacgtagttgggaaaggtagattgaatgagacatgttttctgtgcttctaagtgttctgtcccttaggctgctattgcttcatgtttccattatggcaggtttagagaatccttaaaaagaaaaattgacttgcttgcctaaaactacagtgcccccttagcctccattacttagtatctcttacagtttgctctggctctcaaataatataaagattgatgaacattattcacagaaaatgggcaccttctctctctcttccagcatgttgcttttgaaagtatcatgggatagtgggacgagcactggtttaggagtcaagatatctgggttctcactctactcagtcccagcagagctgttgtataaccttgattaagtcatttagcctctctggatttctatttcctcatctgtaaaatagagttaaatgtatgtaagattgattctgattctgaagtcttaactgccagcagaaaaactccatactgttcattgtaaaactaaaagtgaggaaggctcgtgggtggtgaacctctgctctgtaatactgggaaagtactacagaggggaaccatttgagggatacatgaggagagagtaaattgaggtttggggattataaattcaggcaagagaaccttatagatatcacagtcttgagggtcaaaaaaaaatacttaggaagctagccatggaagcttcttgcctctgacccagcccactttcccagcctacctctgggccttagctgctaaaaagcttctctggcagcggagctgcaggcctgaggaaacatgctcagtcatgcacatgtgttgacccatgtttcagatgcagtctgatgccaggtatattgttagggaaagaggaagaagggtaaactgagctagcccctggggctgagtactcctgcagggctggaggaacaggttcttagaagatgattcaccttggaggaagctggggaaagtggttagggagggagaggaggaagactgagaaatctctgcatccccagaactcagcaacccagctcttttatcatgaggagaggtagccatgctgactcatgaacaggtggaggaaaggggttgcaggtgaccagcatcttcaatctagttaccaccagcttggctagaattttattgaacgcaacttgctagttatgacagagaggaccagggtgagaactaatgctcaagagagcaagattctgtaatcctcttgccctctcacatcacaaattctgatatgccaaacatttggcccaatgagaatgactgatagacttgctgatgtgcatgtggggggatgaggtgtgtatatgcctttctcctgactggccattcagtgttcaggctgtcattcaaattggataggagaaagttggtgaggaaggaatggagagagcaggatccctggactccctggtccccaaactccttgactgtcacttgtaattgtatataatttttgtgtttcttgctccatttcctcatgctgtcatccttaaagtccatctgggaaggggaaaatgctgaacaccattgtatagtttcttcaactgtcccagccatgttgtacatagatatgtcatgttattatatatataaatatatatataattttgtacgttttcttcatctccgatcttctcaaattctgtactttttttcttttctgtctgagctgccttctctatcattcagcttgagtcctcaagactactggtcacaatgagtctgatttttaggaaggaataggaggagcagggaaatcagaaaaactgttggtctcactctgtctctctacctggtcatcttcaaggctaagaaaacaaacaagctacattctgtatttgccagtttccacagcatgaagtacatagcttccttagcaaggagtggtcattccaaaatccaaatgcaaattgctttgattaaacctagattattaaatccattcagaacagcatgtgtgtggtctggttctggcctccacacagtcaccacctcatctctgtgctacctcagtctttgcaagtagctgtggccatgcctctgaaacagcctgctctgagccaggcagcttacccacctggaaacctccagttattttgatcttatctaaagaattatttttctatgtttgttatccatggatatcccagaaaggcagataacgttgtttcgtggataggaaaagactgaaattctattttttgattttttttgcaactcccttatggataggattgagacatgccaggtagcctaatggttgttaaatgtggaggaatcatggggtagagactgggttggagttcagggtttttttcccctattacttgacagtgttgttttttttttttttcttctgtgttcgcccgcagtggccaagttgaatgatgctgcccggggctctgccagatcctgagacgcttcccctccctgccccacccgggtcctgtgctggctcctgccccttcctgcttttgcagccaggggtcaggaggtggctcgggtgtgggctggagaggcagaagccctttcctgttggtgtcccagcacatggagccccttgggctgagcaccaagaccttgaaccttttttgttttaccttttttccaaataacagttgggagaaatatcaatgaaattctgggggtgggggtggggttgaaagggtggggtgggagatatggaggagtatgaattagggcttggagttggtaaaaacattcctgactatccttcttaaccacgtggctgatgtggggtaggtatgaggggaaggaagtggagtagcctaatgaaaaggggttctagttgagctctgtagataaatgccttgtttcagtgtggttggagacctggtgtcagataaaagaaactccatccgcacagacagatgcaaacagctcctctagttctgcagagctagttgagaactcaacattaatcattttaaaaagtactgtccttgaaatagatttgctgtgggaagaagggcagtgagtgtgggagaaaggagccgtgagcgtggggaaccccacagagcccaaaggactttttcagtattcgaaataaacaaaacaaaaacccatgaaaaaacccaacccagaaa

SEQ ID NO: 92930 - DNA, 4106 bp, Homo sapiens
cgtcacgggcaagggccgccattttgactgagcaaccctagtgacaggagccgaagcagcagcgcaggttgtccccgtttcccctcccccttcccttctccggttgccttcccgggccccttacactccacagtcccggtcccgccatgtcccagaaacaagaagaagagaaccctgcggaggagaccggcgaggagaagcaggacacgcaggagaaagaaggtattctgcctgagagagctgaagaggcaaagctaaaggccaaatacccaagcctaggacaaaagcctggaggctccgacttcctcatgaagagactccagaaaggggtatggggcatagtctcttaccctctttctttggagctaaaggaggttcttcgaatgaagtctgtagaggttctactggatccttttctggagcaaaagtactttgactcaggagactacaacatggccaaagccaagatgaagaataagcagctgccaagtgcaggaccagacaagaacctggtgactggtgatcacatccccaccccacaggatctgccccagagaaagtcctcgctcgtcaccagcaagcttgcggggtaacctgagcccccctctcctccccttcctcaaccactggacgtttatatattataggcagggatgaaatgggcacctagtcagatcttctcagcttgctagccagaaatgactgtgattctgctgggggctgctgagaaggtaatgtaggttgaaaaggggctctaagtttatttatttcgttagattgacacttccacacactccctgtagtccaggtagggcccagaaataggaaaggctaggattggataatgctgcaaatgctttttttgtgtgagaaactggagagatgtgatttctccttttgggagagaatgtcccaaaattgattaggctgagccttgggaatagtttggcaggtttaacatcccaaggctaacctaacgtagttgggaaaggtagattgaatgagacatgttttctgtgcttctaagtgttctgtcccttaggctgctattgcttcatgtttccattatggcaggtttagagaatccttaaaaagaaaaattgacttgcttgcctaaaactacagtgcccccttagcctccattacttagtatctcttacagtttgctctggctctcaaataatataaagattgatgaacattattcacagaaaatgggcaccttctctctctcttccagcatgttgcttttgaaagtatcatgggatagtgggacgagcactggtttaggagtcaagatatctgggttctcactctactcagtcccagcagagctgttgtataaccttgattaagtcatttagcctctctggatttctatttcctcatctgtaaaatagagttaaatgtatgtaagattgattctgattctgaagtcttaactgccagcagaaaaactccatactgttcattgtaaaactaaaagtgaggaaggctcgtgggtggtgaacctctgctctgtaatactgggaaagtactacagaggggaaccatttgagggatacatgaggagagagtaaattgaggtttggggattataaattcaggcaagagaaccttatagatatcacagtcttgagggtcaaaaaaaaatacttaggaagctagccatggaagcttcttgcctctgacccagcccactttcccagcctacctctgggccttagctgctaaaaagcttctctggcagcggagctgcaggcctgaggaaacatgctcagtcatgcacatgtgttgacccatgtttcagatgcagtctgatgccaggtatattgttagggaaagaggaagaagggtaaactgagctagcccctggggctgagtactcctgcagggctggaggaacaggttcttagaagatgattcaccttggaggaagctggggaaagtggttagggagggagaggaggaagactgagaaatctctgcatccccagaactcagcaacccagctcttttatcatgaggagaggtagccatgctgactcatgaacaggtggaggaaaggggttgcaggtgaccagcatcttcaatctagttaccaccagcttggctagaattttattgaacgcaacttgctagttatgacagagaggaccagggtgagaactaatgctcaagagagcaagattctgtaatcctcttgccctctcacatcacaaattctgatatgccaaacatttggcccaatgagaatgactgatagacttgctgatgtgcatgtggggggatgaggtgtgtatatgcctttctcctgactggccattcagtgttcaggctgtcattcaaattggataggagaaagttggtgaggaaggaatggagagagcaggatccctggactccctggtccccaaactccttgactgtcacttgtaattgtatataatttttgtgtttcttgctccatttcctcatgctgtcatccttaaagtccatctgggaaggggaaaatgctgaacaccattgtatagtttcttcaactgtcccagccatgttgtacatagatatgtcatgttattatatatataaatatatatataattttgtacgttttcttcatctccgatcttctcaaattctgtactttttttcttttctgtctgagctgccttctctatcattcagcttgagtcctcaagactactggtcacaatgagtctgatttttaggaaggaataggaggagcagggaaatcagaaaaactgttggtctcactctgtctctctacctggtcatcttcaaggctaagaaaacaaacaagctacattctgtatttgccagtttccacagcatgaagtacatagcttccttagcaaggagtggtcattccaaaatccaaatgcaaattgctttgattaaacctagattattaaatccattcagaacagcatgtgtgtggtctggttctggcctccacacagtcaccacctcatctctgtgctacctcagtctttgcaagtagctgtggccatgcctctgaaacagcctgctctgagccaggcagcttacccacctggaaacctccagttattttgatcttatctaaagaattatttttctatgtttgttatccatggatatcccagaaaggcagataacgttgtttcgtggataggaaaagactgaaattctattttttgattttttttgcaactcccttatggataggattgagacatgccaggtagcctaatggttgttaaatgtggaggaatcatggggtagagactgggttggagttcagggtttttttcccctattacttgacagtgttgttttttttttttttcttctgtgttcgcccgcagtggccaagttgaatgatgctgcccggggctctgccagatcctgagacgcttcccctccctgccccacccgggtcctgtgctggctcctgccccttcctgcttttgcagccaggggtcaggaggtggctcgggtgtgggctggagaggcagaagccctttcctgttggtgtcccagcacatggagccccttgggctgagcaccaagaccttgaaccttttttgttttaccttttttccaaataacagttgggagaaatatcaatgaaattctgggggtgggggtggggttgaaagggtggggtgggagatatggaggagtatgaattagggcttggagttggtaaaaacattcctgactatccttcttaaccacgtggctgatgtggggtaggtatgaggggaaggaagtggagtagcctaatgaaaaggggttctagttgagctctgtagataaatgccttgtttcagtgtggttggagacctggtgtcagataaaagaaactccatccgcacagacagatgcaaacagctcctctagttctgcagagctagttgagaactcaacattaatcattttaaaaagtactgtccttgaaatagatttgctgtgggaagaagggcagtgagtgtgggagaaaggagccgtgagcgtggggaaccccacagagcccaaaggactttttcagtattcgaaataaacaaaacaaaaacccatgaaaaaacccaacccagaaa

SEQ ID NO: 92931 - DNA, 4061 bp, Homo sapiens
cgtcacgggcaagggccgccattttgactgagcaaccctagtgacaggagccgaagcagcagcgcaggttgtccccgtttcccctcccccttcccttctccggttgccttcccgggccccttacactccacagtcccggtcccgccatgtcccagaaacaagaagaagagaaccctgcggaggagaccggcgaggagaagcaggacacgcaggagaaagaaggtattctgcctgagagagctgaagaggcaaagctaaaggccaaatacccaagcctaggacaaaagcctggaggctccgacttcctcatgaagagactccagaaaggggattataaatcattacattggagtgtgcttctctgtgcggatgaaatgcaaaagtactttgactcaggagactacaacatggccaaagccaagatgaagaataagcagctgccaagtgcaggaccagacaagaacctggtgactggtgatcacatccccaccccacaggatctgccccagagaaagtcctcgctcgtcaccagcaagcttgcggggtaacctgagcccccctctcctccccttcctcaaccactggacgtttatatattataggcagggatgaaatgggcacctagtcagatcttctcagcttgctagccagaaatgactgtgattctgctgggggctgctgagaaggtaatgtaggttgaaaaggggctctaagtttatttatttcgttagattgacacttccacacactccctgtagtccaggtagggcccagaaataggaaaggctaggattggataatgctgcaaatgctttttttgtgtgagaaactggagagatgtgatttctccttttgggagagaatgtcccaaaattgattaggctgagccttgggaatagtttggcaggtttaacatcccaaggctaacctaacgtagttgggaaaggtagattgaatgagacatgttttctgtgcttctaagtgttctgtcccttaggctgctattgcttcatgtttccattatggcaggtttagagaatccttaaaaagaaaaattgacttgcttgcctaaaactacagtgcccccttagcctccattacttagtatctcttacagtttgctctggctctcaaataatataaagattgatgaacattattcacagaaaatgggcaccttctctctctcttccagcatgttgcttttgaaagtatcatgggatagtgggacgagcactggtttaggagtcaagatatctgggttctcactctactcagtcccagcagagctgttgtataaccttgattaagtcatttagcctctctggatttctatttcctcatctgtaaaatagagttaaatgtatgtaagattgattctgattctgaagtcttaactgccagcagaaaaactccatactgttcattgtaaaactaaaagtgaggaaggctcgtgggtggtgaacctctgctctgtaatactgggaaagtactacagaggggaaccatttgagggatacatgaggagagagtaaattgaggtttggggattataaattcaggcaagagaaccttatagatatcacagtcttgagggtcaaaaaaaaatacttaggaagctagccatggaagcttcttgcctctgacccagcccactttcccagcctacctctgggccttagctgctaaaaagcttctctggcagcggagctgcaggcctgaggaaacatgctcagtcatgcacatgtgttgacccatgtttcagatgcagtctgatgccaggtatattgttagggaaagaggaagaagggtaaactgagctagcccctggggctgagtactcctgcagggctggaggaacaggttcttagaagatgattcaccttggaggaagctggggaaagtggttagggagggagaggaggaagactgagaaatctctgcatccccagaactcagcaacccagctcttttatcatgaggagaggtagccatgctgactcatgaacaggtggaggaaaggggttgcaggtgaccagcatcttcaatctagttaccaccagcttggctagaattttattgaacgcaacttgctagttatgacagagaggaccagggtgagaactaatgctcaagagagcaagattctgtaatcctcttgccctctcacatcacaaattctgatatgccaaacatttggcccaatgagaatgactgatagacttgctgatgtgcatgtggggggatgaggtgtgtatatgcctttctcctgactggccattcagtgttcaggctgtcattcaaattggataggagaaagttggtgaggaaggaatggagagagcaggatccctggactccctggtccccaaactccttgactgtcacttgtaattgtatataatttttgtgtttcttgctccatttcctcatgctgtcatccttaaagtccatctgggaaggggaaaatgctgaacaccattgtatagtttcttcaactgtcccagccatgttgtacatagatatgtcatgttattatatatataaatatatatataattttgtacgttttcttcatctccgatcttctcaaattctgtactttttttcttttctgtctgagctgccttctctatcattcagcttgagtcctcaagactactggtcacaatgagtctgatttttaggaaggaataggaggagcagggaaatcagaaaaactgttggtctcactctgtctctctacctggtcatcttcaaggctaagaaaacaaacaagctacattctgtatttgccagtttccacagcatgaagtacatagcttccttagcaaggagtggtcattccaaaatccaaatgcaaattgctttgattaaacctagattattaaatccattcagaacagcatgtgtgtggtctggttctggcctccacacagtcaccacctcatctctgtgctacctcagtctttgcaagtagctgtggccatgcctctgaaacagcctgctctgagccaggcagcttacccacctggaaacctccagttattttgatcttatctaaagaattatttttctatgtttgttatccatggatatcccagaaaggcagataacgttgtttcgtggataggaaaagactgaaattctattttttgattttttttgcaactcccttatggataggattgagacatgccaggtagcctaatggttgttaaatgtggaggaatcatggggtagagactgggttggagttcagggtttttttcccctattacttgacagtgttgttttttttttttttcttctgtgttcgcccgcagtggccaagttgaatgatgctgcccggggctctgccagatcctgagacgcttcccctccctgccccacccgggtcctgtgctggctcctgccccttcctgcttttgcagccaggggtcaggaggtggctcgggtgtgggctggagaggcagaagccctttcctgttggtgtcccagcacatggagccccttgggctgagcaccaagaccttgaaccttttttgttttaccttttttccaaataacagttgggagaaatatcaatgaaattctgggggtgggggtggggttgaaagggtggggtgggagatatggaggagtatgaattagggcttggagttggtaaaaacattcctgactatccttcttaaccacgtggctgatgtggggtaggtatgaggggaaggaagtggagtagcctaatgaaaaggggttctagttgagctctgtagataaatgccttgtttcagtgtggttggagacctggtgtcagataaaagaaactccatccgcacagacagatgcaaacagctcctctagttctgcagagctagttgagaactcaacattaatcattttaaaaagtactgtccttgaaatagatttgctgtgggaagaagggcagtgagtgtgggagaaaggagccgtgagcgtggggaaccccacagagcccaaaggactttttcagtattcgaaataaacaaaacaaaaacccatgaaaaaacccaacccagaaa

SEQ ID NO: 92932 - DNA, 4169 bp, Homo sapiens
gtttctattcctggtctgggagaataatcattttgaggttgttggcttgtggttgatctcctggtggctaggatagccccatatttatccttctctatatcttattcatttctgtttctccagttccaggctattgccctgtacccagtaaggtcctcagttaccctttatgaataagtgattttggtggaacgatcctctactgagtggagtacaaaggatggcaggggctatcccttgactccaaaactatatactctagctgggaaattgcttatgtacctgaaaaagtcagaacacactggggagaagacataagtacatgtaattaatgttaaactgtgtatgcatgaggttaatcaaggaagacttcttgaaagatccgagtgtgcatgagggtttataatggatgtgagatgtgagtctccttgtttttgaggaaggccagagtcctcactcacctaaacctccctcttatctcttagcaaaagtactttgactcaggagactacaacatggccaaagccaagatgaagaataagcagctgccaagtgcaggaccagacaagaacctggtgactggtgatcacatccccaccccacaggatctgccccagagaaagtcctcgctcgtcaccagcaagcttgcggggtaacctgagcccccctctcctccccttcctcaaccactggacgtttatatattataggcagggatgaaatgggcacctagtcagatcttctcagcttgctagccagaaatgactgtgattctgctgggggctgctgagaaggtaatgtaggttgaaaaggggctctaagtttatttatttcgttagattgacacttccacacactccctgtagtccaggtagggcccagaaataggaaaggctaggattggataatgctgcaaatgctttttttgtgtgagaaactggagagatgtgatttctccttttgggagagaatgtcccaaaattgattaggctgagccttgggaatagtttggcaggtttaacatcccaaggctaacctaacgtagttgggaaaggtagattgaatgagacatgttttctgtgcttctaagtgttctgtcccttaggctgctattgcttcatgtttccattatggcaggtttagagaatccttaaaaagaaaaattgacttgcttgcctaaaactacagtgcccccttagcctccattacttagtatctcttacagtttgctctggctctcaaataatataaagattgatgaacattattcacagaaaatgggcaccttctctctctcttccagcatgttgcttttgaaagtatcatgggatagtgggacgagcactggtttaggagtcaagatatctgggttctcactctactcagtcccagcagagctgttgtataaccttgattaagtcatttagcctctctggatttctatttcctcatctgtaaaatagagttaaatgtatgtaagattgattctgattctgaagtcttaactgccagcagaaaaactccatactgttcattgtaaaactaaaagtgaggaaggctcgtgggtggtgaacctctgctctgtaatactgggaaagtactacagaggggaaccatttgagggatacatgaggagagagtaaattgaggtttggggattataaattcaggcaagagaaccttatagatatcacagtcttgagggtcaaaaaaaaatacttaggaagctagccatggaagcttcttgcctctgacccagcccactttcccagcctacctctgggccttagctgctaaaaagcttctctggcagcggagctgcaggcctgaggaaacatgctcagtcatgcacatgtgttgacccatgtttcagatgcagtctgatgccaggtatattgttagggaaagaggaagaagggtaaactgagctagcccctggggctgagtactcctgcagggctggaggaacaggttcttagaagatgattcaccttggaggaagctggggaaagtggttagggagggagaggaggaagactgagaaatctctgcatccccagaactcagcaacccagctcttttatcatgaggagaggtagccatgctgactcatgaacaggtggaggaaaggggttgcaggtgaccagcatcttcaatctagttaccaccagcttggctagaattttattgaacgcaacttgctagttatgacagagaggaccagggtgagaactaatgctcaagagagcaagattctgtaatcctcttgccctctcacatcacaaattctgatatgccaaacatttggcccaatgagaatgactgatagacttgctgatgtgcatgtggggggatgaggtgtgtatatgcctttctcctgactggccattcagtgttcaggctgtcattcaaattggataggagaaagttggtgaggaaggaatggagagagcaggatccctggactccctggtccccaaactccttgactgtcacttgtaattgtatataatttttgtgtttcttgctccatttcctcatgctgtcatccttaaagtccatctgggaaggggaaaatgctgaacaccattgtatagtttcttcaactgtcccagccatgttgtacatagatatgtcatgttattatatatataaatatatatataattttgtacgttttcttcatctccgatcttctcaaattctgtactttttttcttttctgtctgagctgccttctctatcattcagcttgagtcctcaagactactggtcacaatgagtctgatttttaggaaggaataggaggagcagggaaatcagaaaaactgttggtctcactctgtctctctacctggtcatcttcaaggctaagaaaacaaacaagctacattctgtatttgccagtttccacagcatgaagtacatagcttccttagcaaggagtggtcattccaaaatccaaatgcaaattgctttgattaaacctagattattaaatccattcagaacagcatgtgtgtggtctggttctggcctccacacagtcaccacctcatctctgtgctacctcagtctttgcaagtagctgtggccatgcctctgaaacagcctgctctgagccaggcagcttacccacctggaaacctccagttattttgatcttatctaaagaattatttttctatgtttgttatccatggatatcccagaaaggcagataacgttgtttcgtggataggaaaagactgaaattctattttttgattttttttgcaactcccttatggataggattgagacatgccaggtagcctaatggttgttaaatgtggaggaatcatggggtagagactgggttggagttcagggtttttttcccctattacttgacagtgttgttttttttttttttcttctgtgttcgcccgcagtggccaagttgaatgatgctgcccggggctctgccagatcctgagacgcttcccctccctgccccacccgggtcctgtgctggctcctgccccttcctgcttttgcagccaggggtcaggaggtggctcgggtgtgggctggagaggcagaagccctttcctgttggtgtcccagcacatggagccccttgggctgagcaccaagaccttgaaccttttttgttttaccttttttccaaataacagttgggagaaatatcaatgaaattctgggggtgggggtggggttgaaagggtggggtgggagatatggaggagtatgaattagggcttggagttggtaaaaacattcctgactatccttcttaaccacgtggctgatgtggggtaggtatgaggggaaggaagtggagtagcctaatgaaaaggggttctagttgagctctgtagataaatgccttgtttcagtgtggttggagacctggtgtcagataaaagaaactccatccgcacagacagatgcaaacagctcctctagttctgcagagctagttgagaactcaacattaatcattttaaaaagtactgtccttgaaatagatttgctgtgggaagaagggcagtgagtgtgggagaaaggagccgtgagcgtggggaaccccacagagcccaaaggactttttcagtattcgaaataaacaaaacaaaaacccatgaaaaaacccaacccagaaa

SEQ ID NO: 92933 - DNA, 3576 bp, Homo sapiens
ggtcatagcgttccagagtgaaaccctatgtcctcgctcgtcaccagcaagcttgcggggtaacctgagcccccctctcctccccttcctcaaccactggacgtttatatattataggcagggatgaaatgggcacctagtcagatcttctcagcttgctagccagaaatgactgtgattctgctgggggctgctgagaaggtaatgtaggttgaaaaggggctctaagtttatttatttcgttagattgacacttccacacactccctgtagtccaggtagggcccagaaataggaaaggctaggattggataatgctgcaaatgctttttttgtgtgagaaactggagagatgtgatttctccttttgggagagaatgtcccaaaattgattaggctgagccttgggaatagtttggcaggtttaacatcccaaggctaacctaacgtagttgggaaaggtagattgaatgagacatgttttctgtgcttctaagtgttctgtcccttaggctgctattgcttcatgtttccattatggcaggtttagagaatccttaaaaagaaaaattgacttgcttgcctaaaactacagtgcccccttagcctccattacttagtatctcttacagtttgctctggctctcaaataatataaagattgatgaacattattcacagaaaatgggcaccttctctctctcttccagcatgttgcttttgaaagtatcatgggatagtgggacgagcactggtttaggagtcaagatatctgggttctcactctactcagtcccagcagagctgttgtataaccttgattaagtcatttagcctctctggatttctatttcctcatctgtaaaatagagttaaatgtatgtaagattgattctgattctgaagtcttaactgccagcagaaaaactccatactgttcattgtaaaactaaaagtgaggaaggctcgtgggtggtgaacctctgctctgtaatactgggaaagtactacagaggggaaccatttgagggatacatgaggagagagtaaattgaggtttggggattataaattcaggcaagagaaccttatagatatcacagtcttgagggtcaaaaaaaaatacttaggaagctagccatggaagcttcttgcctctgacccagcccactttcccagcctacctctgggccttagctgctaaaaagcttctctggcagcggagctgcaggcctgaggaaacatgctcagtcatgcacatgtgttgacccatgtttcagatgcagtctgatgccaggtatattgttagggaaagaggaagaagggtaaactgagctagcccctggggctgagtactcctgcagggctggaggaacaggttcttagaagatgattcaccttggaggaagctggggaaagtggttagggagggagaggaggaagactgagaaatctctgcatccccagaactcagcaacccagctcttttatcatgaggagaggtagccatgctgactcatgaacaggtggaggaaaggggttgcaggtgaccagcatcttcaatctagttaccaccagcttggctagaattttattgaacgcaacttgctagttatgacagagaggaccagggtgagaactaatgctcaagagagcaagattctgtaatcctcttgccctctcacatcacaaattctgatatgccaaacatttggcccaatgagaatgactgatagacttgctgatgtgcatgtggggggatgaggtgtgtatatgcctttctcctgactggccattcagtgttcaggctgtcattcaaattggataggagaaagttggtgaggaaggaatggagagagcaggatccctggactccctggtccccaaactccttgactgtcacttgtaattgtatataatttttgtgtttcttgctccatttcctcatgctgtcatccttaaagtccatctgggaaggggaaaatgctgaacaccattgtatagtttcttcaactgtcccagccatgttgtacatagatatgtcatgttattatatatataaatatatatataattttgtacgttttcttcatctccgatcttctcaaattctgtactttttttcttttctgtctgagctgccttctctatcattcagcttgagtcctcaagactactggtcacaatgagtctgatttttaggaaggaataggaggagcagggaaatcagaaaaactgttggtctcactctgtctctctacctggtcatcttcaaggctaagaaaacaaacaagctacattctgtatttgccagtttccacagcatgaagtacatagcttccttagcaaggagtggtcattccaaaatccaaatgcaaattgctttgattaaacctagattattaaatccattcagaacagcatgtgtgtggtctggttctggcctccacacagtcaccacctcatctctgtgctacctcagtctttgcaagtagctgtggccatgcctctgaaacagcctgctctgagccaggcagcttacccacctggaaacctccagttattttgatcttatctaaagaattatttttctatgtttgttatccatggatatcccagaaaggcagataacgttgtttcgtggataggaaaagactgaaattctattttttgattttttttgcaactcccttatggataggattgagacatgccaggtagcctaatggttgttaaatgtggaggaatcatggggtagagactgggttggagttcagggtttttttcccctattacttgacagtgttgttttttttttttttcttctgtgttcgcccgcagtggccaagttgaatgatgctgcccggggctctgccagatcctgagacgcttcccctccctgccccacccgggtcctgtgctggctcctgccccttcctgcttttgcagccaggggtcaggaggtggctcgggtgtgggctggagaggcagaagccctttcctgttggtgtcccagcacatggagccccttgggctgagcaccaagaccttgaaccttttttgttttaccttttttccaaataacagttgggagaaatatcaatgaaattctgggggtgggggtggggttgaaagggtggggtgggagatatggaggagtatgaattagggcttggagttggtaaaaacattcctgactatccttcttaaccacgtggctgatgtggggtaggtatgaggggaaggaagtggagtagcctaatgaaaaggggttctagttgagctctgtagataaatgccttgtttcagtgtggttggagacctggtgtcagataaaagaaactccatccgcacagacagatgcaaacagctcctctagttctgcagagctagttgagaactcaacattaatcattttaaaaagtactgtccttgaaatagatttgctgtgggaagaagggcagtgagtgtgggagaaaggagccgtgagcgtggggaaccccacagagcccaaaggactttttcagtattcgaaataaacaaaacaaaaacccatgaaaaaacccaacccagaaa

SEQ ID NO: 92934 - DNA, 4546 bp, Homo sapiens
cgtcacgggcaagggccgccattttgactgagcaaccctagtgacaggagccgaagcagcagcgcaggttgtccccgtttcccctcccccttcccttctccggttgccttcccgggccccttacactccacagtcccggtcccgccatgtcccagaaacaagaagaagagaaccctgcggaggagaccggcgaggagaagcaggacacgcaggagaaagaaggtattctgcctgagagagctgaagaggcaaagctaaaggccaaatacccaagcctaggacaaaagcctggaggctccgacttcctcatgaagagactccagaaagggcaaaagtactttgactcaggagactacaacatggccaaagccaagatgaagaataagcagctgccaagtgcaggaccagacaagaacctggtgactggtgatcacatccccaccccacaggatctgccccagagaaagtcctcgctcgtcaccagcaagcttgcggggtaacctgagcccccctctcctccccttcctcaaccactggacgtttatatattataggcagggatgaaatgggcacctagtcagatcttctcagcttgctagccagaaatgactgtgattctgctgggggctgctgagaaggtaatgtaggttgaaaaggggctctaagtttatttatttcgttagattgacacttccacacactccctgtagtccaggtagggcccagaaataggaaaggctaggattggataatgctgcaaatgctttttttgtgtgagaaactggagagatgtgatttctccttttgggagagaatgtcccaaaattgattaggctgagccttgggaatagtttggcaggtttaacatcccaaggctaacctaacgtagttgggaaaggtagattgaatgagacatgttttctgtgcttctaagtgttctgtcccttaggctgctattgcttcatgtttccattatggcaggtttagagaatccttaaaaagaaaaattgacttgcttgcctaaaactacagtgcccccttagcctccattacttagtatctcttacagtttgctctggctctcaaataatataaagattgatgaacattattcacagaaaatgggcaccttctctctctcttccagcatgttgcttttgaaagtatcatgggatagtgggacgagcactggtttaggagtcaagatatctgggttctcactctactcagtcccagcagagctgttgtataaccttgattaagtcatttagcctctctggatttctatttcctcatctgtaaaatagagttaaatgtatgtaagattgattctgattctgaagtcttaactgccagcagaaaaactccatactgttcattgtaaaactaaaagtgaggaaggctcgtgggtggtgaacctctgctctgtaatactgggaaagtactacagaggggaaccatttgagggatacatgaggagagagtaaattgaggtttggggattataaattcaggcaagagaaccttatagatatcacagtcttgagggtcaaaaaaaaatacttaggaagctagccatggaagcttcttgcctctgacccagcccactttcccagcctacctctgggccttagctgctaaaaagcttctctggcagcggagctgcaggcctgaggaaacatgctcagtcatgcacatgtgttgacccatgtttcagatgcagtctgatgccaggtatattgttagggaaagaggaagaagggtaaactgagctagcccctggggctgagtactcctgcagggctggaggaacaggttcttagaagatgattcaccttggaggaagctggggaaagtggttagggagggagaggaggaagactgagaaatctctgcatccccagaactcagcaacccagctcttttatcatgaggagaggtagccatgctgactcatgaacaggtggaggaaaggggttgcaggtgaccagcatcttcaatctagttaccaccagcttggctagaattttattgaacgcaacttgctagttatgacagagaggaccagggtgagaactaatgctcaagagagcaagattctgtaatcctcttgccctctcacatcacaaattctgatatgccaaacatttggcccaatgagaatgactgatagacttgctgatgtgcatgtggggggatgaggtgtgtatatgcctttctcctgactggccattcagtgttcaggctgtcattcaaattggataggagaaagttggtgaggaaggaatggagagagcaggatccctggactccctggtccccaaactccttgactgtcacttgtaattgtatataatttttgtgtttcttgctccatttcctcatgctgtcatccttaaagtccatctgggaaggggaaaatgctgaacaccattgtatagtttcttcaactgtcccagccatgttgtacatagatatgtcatgttattatatatataaatatatatataattttgtacgttttcttcatctccgatcttctcaaattctgtactttttttcttttctgtctgagctgccttctctatcattcagcttgagtcctcaagactactggtcacaatgagtctgatttttaggaaggaataggaggagcagggaaatcagaaaaactgttggtctcactctgtctctctacctggtcatcttcaaggctaagaaaacaaacaagctacattctgtatttgccagtttccacagcatgaagtacatagcttccttagcaaggagtggtcattccaaaatccaaatgcaaattgctttgattaaacctagattattaaatccattcagaacagcatgtgtgtggtctggttctggcctccacacagtcaccacctcatctctgtgctacctcagtctttgcaagtagctgtggccatgcctctgaaacagcctgctctgagccaggcagcttacccacctggaaacctccagttattttgatcttatctaaagaattatttttctatgtttgttatccatggatatcccagaaaggcagataacgttgtttcgtggataggaaaagactgaaattctattttttgattttttttgcaactcccttatggataggattgagacatgccaggtagcctaatggttgttaaatgtggaggaatcatggggtagagactgggttggagttcagggtttttttcccctattacttgacagtgttgttttttttttttttcttctgtgttcgcccgcagtggccaagttgaatgatgctgcccggggctctgccagatcctgagacgcttcccctccctgccccacccgggtcctgtgctggctcctgccccttcctgcttttgcagccaggggtcaggaggtggctcgggtgtgggctggagaggcagaagccctttcctgttggtgtcccagcacatggagccccttgggctgagcaccaagaccttgaaccttttttgttttaccttttttccaaataacagttgggagaaatatcaatgaaattctgggggtgggggtggggttgaaagggtggggtgggagatatggaggagtatgaattagggcttggagttggtaaaaacattcctgactatccttcttaaccacgtggctgatgtggggtaggtatgaggggaaggaagtggagtagcctaatgaaaaggggttctagttgagctctgtagataaatgccttgtttcagtgtggttggagacctggtgtcagataaaagaaactccatccgcacagacagatgcaaacagctcctctagttctgcagagctagttgagaactcaacattaatcattttaaaaagtactgtccttgaaatagatttgctgtgggaagaagggcagtgagtgtgggagaaaggagccgtgagcgtggggaaccccacagagcccaaaggactttttcagtattcgaaataaacaaaacaaaaacccatgaaaaaacccaacccagaaagaaatattctgaagcagttggtgtgttttattggggtttgggagggggaagaaaacaatactgaagacattgttaatgtgagatgcggctgagttccccaataccatcacttaggaaagggagcaggaatgttggcataaaccttgcccatccctttgtttctgtaaccaatgtagaaggtgcatcaacctcagtttgtggctcacaaaatgaggcatttaagatatttgatctaaatggtttcttgacacctaagcctagtccaggtttagcagaaaaggaggcccagtctccttttccctctgtcttccattccttttcaagttcccatgtttgtgagggagaaatgtgacaaaccaaaagaaatatattatttctttgtaataagccaaaagaaactcaagtctttctgctggtggccagcaggaggcagagtgatttctttcctcatgatgtgccaatctgcattgctggaaacctgctactgaaagaagttaaaagctgcctgtgaatgtaacgtacaaaagaaaggt

SEQ ID NO: 92935 - DNA, 4429 bp, Homo sapiens
cgtcacgggcaagggccgccattttgactgagcaaccctagtgacaggagccgaagcagcagcgcaggttgtccccgtttcccctcccccttcccttctccggttgccttcccgggccccttacactccacagtcccggtcccgccatgtcccagaaacaagaagaagagaaccctgcggaggagaccggcgaggagaagcaggacacgcaggagaaagaaggtattctgcctgagagagctgaagaggcaaagctaaaggccaaatacccaagcctaggacaaaagcctggaggctccgacttcctcatgaagagactccagaaagggcaaaagtactttgactcaggagactacaacatggccaaagccaagatgaagaataagcagctgccaagtgcaggaccagacaagaacctggtgactggtgatcacatccccaccccacaggatctgccccagagaaagtcctcgctcgtcaccagcaagcttgcggggtaacctgagcccccctctcctccccttcctcaaccactggacgtttatatattataggcagggatgaaatgggcacctagtcagatcttctcagcttgctagccagaaatgactgtgattctgctgggggctgctgagaaggtaatgtaggttgaaaaggggctctaagtttatttatttcgttagattgacacttccacacactccctgtagtccaggtagggcccagaaataggaaaggctaggattggataatgctgcaaatgctttttttgtgtgagaaactggagagatgtgatttctccttttgggagagaatgtcccaaaattgattaggctgagccttgggaatagtttggcaggtttaacatcccaaggctaacctaacgtagttgggaaaggtagattgaatgagacatgttttctgtgcttctaagtgttctgtcccttaggctgctattgcttcatgtttccattatggcaggtttagagaatccttaaaaagaaaaattgacttgcttgcctaaaactacagtgcccccttagcctccattacttagtatctcttacagtttgctctggctctcaaataatataaagattgatgaacattattcacagaaaatgggcaccttctctctctcttccagcatgttgcttttgaaagtatcatgggatagtgggacgagcactggtttaggagtcaagatatctgggttctcactctactcagtcccagcagagctgttgtataaccttgattaagtcatttagcctctctggatttctatttcctcatctgtaaaatagagttaaatgtatgtaagattgattctgattctgaagtcttaactgccagcagaaaaactccatactgttcattgtaaaactaaaagtgaggaaggctcgtgggtggtgaacctctgctctgtaatactgggaaagtactacagaggggaaccatttgagggatacatgaggagagagtaaattgaggtttggggattataaattcaggcaagagaaccttatagatatcacagtcttgagggtcaaaaaaaaatacttaggaagctagccatggaagcttcttgcctctgacccagcccactttcccagcctacctctgggccttagctgctaaaaagcttctctggcagcggagctgcaggcctgaggaaacatgctcagtcatgcacatgtgttgacccatgtttcagatgcagtctgatgccaggtatattgttagggaaagaggaagaagggtaaactgagctagcccctggggctgagtactcctgcagggctggaggaacaggttcttagaagatgattcaccttggaggaagctggggaaagtggttagggagggagaggaggaagactgagaaatctctgcatccccagaactcagcaacccagctcttttatcatgaggagaggtagccatgctgactcatgaacaggtggaggaaaggggttgcaggtgaccagcatcttcaatctagttaccaccagcttggctagaattttattgaacgcaacttgctagttatgacagagaggaccagggtgagaactaatgctcaagagagcaagattctgtaatcctcttgccctctcacatcacaaattctgatatgccaaacatttggcccaatgagaatgactgatagacttgctgatgtgcatgtggggggatgaggtgtgtatatgcctttctcctgactggccattcagtgttcaggctgtcattcaaattggataggagaaagttggtgaggaaggaatggagagagcaggatccctggactccctggtccccaaactccttgactgtcacttgtaattgtatataatttttgtgtttcttgctccatttcctcatgctgtcatccttaaagtccatctgggaaggggaaaatgctgaacaccattgtatagtttcttcaactgtcccagccatgttgtacatagatatgtcatgttattatatatataaatatatatataattttgtacgttttcttcatctccgatcttctcaaattctgtactttttttcttttctgtctgagctgccttctctatcattcagcttgagtcctcaagactactggtcacaatgagtctgatttttaggaaggaataggaggagcagggaaatcagaaaaactgttggtctcactctgtctctctacctggtcatcttcaaggctaagaaaacaaacaagctacattctgtatttgccagtttccacagcatgaagtacatagcttccttagcaaggagtggtcattccaaaatccaaatgcaaattgctttgattaaacctagattattaaatccattcagaacagcatgtgtgtggtctggttctggcctccacacagtcaccacctcatctctgtgctacctcagtctttgcaagtagctgtggccatgcctctgaaacagcctgctctgagccaggcagcttacccacctggaaacctccagttattttgatcttatctaaagaattatttttctatgtttgttatccatggatatcccagaaaggcagataacgttgtttcgtggataggaaaagactgaaattctattttttgattttttttgcaactcccttatggataggattgagacatgccaggtagcctaatggttgttaaatgtggaggaatcatggggtagagactgggttggagttcagggtttttttcccctattacttgacagtgttgttttttttttttttcttctgtgttcgcccgcagtggccaagttgaatgatgctgcccggggctctgccagatcctgagacgcttcccctccctgccccacccgggtcctgtgctggctcctgccccttcctgcttttgcagccaggggtcaggaggtggctcgggtgtgggctggagaggcagaagccctttcctgttggtgtcccagcacatggagccccttgggctgagcaccaagaccttgaaccttttttgttttaccttttttccaaataacagttgggagaaatatcaatgaaattctgggggtgggggtggggttgaaagggtggggtgggagatatggaggagtatgaattagggcttggagttggtaaaaacattcctgactatccttcttaaccacgtggctgatgtggggtaggtatgaggggaaggaagtggagtagcctaatgaaaaggggttctagttgagctctgtagataaatgccttgtttcagtgtggttggagacctggtgtcagataaaagaaactccatccgcacagacagatgcaaacagctcctctagttctgcagagctagttgagaactcaacattaatcattttaaaaagtactgtccttgaaatagatttgctgtgggaagaagggcagtgagtgtgggagaaaggagccgtgagcgtggggaaccccacagagcccaaaggactttttcagtattcgaaataaacaaaacaaaaacccatgaaaaaacccaacccagaaaaaaaaaaaaaaaaaaaaacaaaaaaaaaaaaaaaaaaaaaaaaaaaaaaaaaaaaaaaaaaaaaaaaaagggggggggggccccaaaatattcccccgggggggccccctcgccgacacccaccagttctgttgtgtgatgaaagaagggggcccccacaaagaggaggagcgcctcgtatattaataaggacgagagaccgcgaggcgcgcggtgactttaaaaaaaacagcagactggtgcgagtgcggagaaaagaagacgtgtagcatccgcgggagcgaatactctgtgtaggagaaagagcacccccttacctactcggtgaggggggaggaagaacaatagactgtgggcgacaacgaccctctcaccaggaacagtagtatcaagcgcccccgaggaagggagcacag

SEQ ID NO: 92936 - DNA, 2857 bp, Homo sapiens
cgcgagcggcgctcgcgatctagaactaggcactggtttaggagtcaagatatctgggttctcactctactcagtcccagcagagctgttgtataaccttgattaagtcatttagcctctctggatttctatttcctcatctgtaaaatagagttaaatgtatgtaagattgattctgattctgaagtcttaactgccagcagaaaaactccatactgttcattgtaaaactaaaagtgaggaaggctcgtgggtggtgaacctctgctctgtaatactgggaaagtactacagaggggaaccatttgagggatacatgaggagagagtaaattgaggtttggggattataaattcaggcaagagaaccttatagatatcacagtcttgagggtcaaaaaaaaatacttaggaagctagccatggaagcttcttgcctctgacccagcccactttcccagcctacctctgggccttagctgctaaaaagcttctctggcagcggagctgcaggcctgaggaaacatgctcagtcatgcacatgtgttgacccatgtttcagatgcagtctgatgccaggtatattgttagggaaagaggaagaagggtaaactgagctagcccctggggctgagtactcctgcagggctggaggaacaggttcttagaagatgattcaccttggaggaagctggggaaagtggttagggagggagaggaggaagactgagaaatctctgcatccccagaactcagcaacccagctcttttatcatgaggagaggtagccatgctgactcatgaacaggtggaggaaaggggttgcaggtgaccagcatcttcaatctagttaccaccagcttggctagaattttattgaacgcaacttgctagttatgacagagaggaccagggtgagaactaatgctcaagagagcaagattctgtaatcctcttgccctctcacatcacaaattctgatatgccaaacatttggcccaatgagaatgactgatagacttgctgatgtgcatgtggggggatgaggtgtgtatatgcctttctcctgactggccattcagtgttcaggctgtcattcaaattggataggagaaagttggtgaggaaggaatggagagagcaggatccctggactccctggtccccaaactccttgactgtcacttgtaattgtatataatttttgtgtttcttgctccatttcctcatgctgtcatccttaaagtccatctgggaaggggaaaatgctgaacaccattgtatagtttcttcaactgtcccagccatgttgtacatagatatgtcatgttattatatatataaatatatatataattttgtacgttttcttcatctccgatcttctcaaattctgtactttttttcttttctgtctgagctgccttctctatcattcagcttgagtcctcaagactactggtcacaatgagtctgatttttaggaaggaataggaggagcagggaaatcagaaaaactgttggtctcactctgtctctctacctggtcatcttcaaggctaagaaaacaaacaagctacattctgtatttgccagtttccacagcatgaagtacatagcttccttagcaaggagtggtcattccaaaatccaaatgcaaattgctttgattaaacctagattattaaatccattcagaacagcatgtgtgtggtctggttctggcctccacacagtcaccacctcatctctgtgctacctcagtctttgcaagtagctgtggccatgcctctgaaacagcctgctctgagccaggcagcttacccacctggaaacctccagttattttgatcttatctaaagaattatttttctatgtttgttatccatggatatcccagaaaggcagataacgttgtttcgtggataggaaaagactgaaattctattttttgattttttttgcaactcccttatggataggattgagacatgccaggtagcctaatggttgttaaatgtggaggaatcatggggtagagactgggttggagttcagggtttttttcccctattacttgacagtgttgttttttttttttttcttctgtgttcgcccgcagtggccaagttgaatgatgctgcccggggctctgccagatcctgagacgcttcccctccctgccccacccgggtcctgtgctggctcctgccccttcctgcttttgcagccaggggtcaggaggtggctcgggtgtgggctggagaggcagaagccctttcctgttggtgtcccagcacatggagccccttgggctgagcaccaagaccttgaaccttttttgttttaccttttttccaaataacagttgggagaaatatcaatgaaattctgggggtgggggtggggttgaaagggtggggtgggagatatggaggagtatgaattagggcttggagttggtaaaaacattcctgactatccttcttaaccacgtggctgatgtggggtaggtatgaggggaaggaagtggagtagcctaatgaaaaggggttctagttgagctctgtagataaatgccttgtttcagtgtggttggagacctggtgtcagataaaagaaactccatccgcacagacagatgcaaacagctcctctagttctgcagagctagttgagaactcaacattaatcattttaaaaagtactgtccttgaaatagatttgctgtgggaagaagggcagtgagtgtgggagaaaggagccgtgagcgtggggaaccccacagagcccaaaggactttttcagtattcgaaataaacaaaacaaaaacccatgaaaaaacccaacccagaaa

SEQ ID NO: 92937 - DNA, 2567 bp, Homo sapiens
taaatcgagctcggcccaatgttgacatgaggagagagtaaattgaggtttggggattataaattcaggcaagagaaccttatagatatcacagtcttgagggtcaaaaaaaaatacttaggaagctagccatggaagcttcttgcctctgacccagcccactttcccagcctacctctgggccttagctgctaaaaagcttctctggcagcggagctgcaggcctgaggaaacatgctcagtcatgcacatgtgttgacccatgtttcagatgcagtctgatgccaggtatattgttagggaaagaggaagaagggtaaactgagctagcccctggggctgagtactcctgcagggctggaggaacaggttcttagaagatgattcaccttggaggaagctggggaaagtggttagggagggagaggaggaagactgagaaatctctgcatccccagaactcagcaacccagctcttttatcatgaggagaggtagccatgctgactcatgaacaggtggaggaaaggggttgcaggtgaccagcatcttcaatctagttaccaccagcttggctagaattttattgaacgcaacttgctagttatgacagagaggaccagggtgagaactaatgctcaagagagcaagattctgtaatcctcttgccctctcacatcacaaattctgatatgccaaacatttggcccaatgagaatgactgatagacttgctgatgtgcatgtggggggatgaggtgtgtatatgcctttctcctgactggccattcagtgttcaggctgtcattcaaattggataggagaaagttggtgaggaaggaatggagagagcaggatccctggactccctggtccccaaactccttgactgtcacttgtaattgtatataatttttgtgtttcttgctccatttcctcatgctgtcatccttaaagtccatctgggaaggggaaaatgctgaacaccattgtatagtttcttcaactgtcccagccatgttgtacatagatatgtcatgttattatatatataaatatatatataattttgtacgttttcttcatctccgatcttctcaaattctgtactttttttcttttctgtctgagctgccttctctatcattcagcttgagtcctcaagactactggtcacaatgagtctgatttttaggaaggaataggaggagcagggaaatcagaaaaactgttggtctcactctgtctctctacctggtcatcttcaaggctaagaaaacaaacaagctacattctgtatttgccagtttccacagcatgaagtacatagcttccttagcaaggagtggtcattccaaaatccaaatgcaaattgctttgattaaacctagattattaaatccattcagaacagcatgtgtgtggtctggttctggcctccacacagtcaccacctcatctctgtgctacctcagtctttgcaagtagctgtggccatgcctctgaaacagcctgctctgagccaggcagcttacccacctggaaacctccagttattttgatcttatctaaagaattatttttctatgtttgttatccatggatatcccagaaaggcagataacgttgtttcgtggataggaaaagactgaaattctattttttgattttttttgcaactcccttatggataggattgagacatgccaggtagcctaatggttgttaaatgtggaggaatcatggggtagagactgggttggagttcagggtttttttcccctattacttgacagtgttgttttttttttttttcttctgtgttcgcccgcagtggccaagttgaatgatgctgcccggggctctgccagatcctgagacgcttcccctccctgccccacccgggtcctgtgctggctcctgccccttcctgcttttgcagccaggggtcaggaggtggctcgggtgtgggctggagaggcagaagccctttcctgttggtgtcccagcacatggagccccttgggctgagcaccaagaccttgaaccttttttgttttaccttttttccaaataacagttgggagaaatatcaatgaaattctgggggtgggggtggggttgaaagggtggggtgggagatatggaggagtatgaattagggcttggagttggtaaaaacattcctgactatccttcttaaccacgtggctgatgtggggtaggtatgaggggaaggaagtggagtagcctaatgaaaaggggttctagttgagctctgtagataaatgccttgtttcagtgtggttggagacctggtgtcagataaaagaaactccatccgcacagacagatgcaaacagctcctctagttctgcagagctagttgagaactcaacattaatcattttaaaaagtactgtccttgaaatagatttgctgtgggaagaagggcagtgagtgtgggagaaaggagccgtgagcgtggggaaccccacagagcccaaaggactttttcagtattcgaaataaacaaaacaaaaacccatgaaaaaacccaacccagaaa

SEQ ID NO: 92938 - DNA, 2278 bp, Homo sapiens
tcgctcgttgttgcccaggctgagtgcaatggtgcaatctcagctcatcgcaacctctgcctcccaggttcaagcgattctcctgcctcagcctcccgagcagctgggattacaggcatgtgccaccacatccagctaactttgtattttgagtagagacggggcctctccacgttggtcaggctggtctcgaactcctaacctcaggtgatccgcccacctcggcctcccaaagtgctgggttgcaggtgaccagcatcttcaatctagttaccaccagcttggctagaattttattgaacgcaacttgctagttatgacagagaggaccagggtgagaactaatgctcaagagagcaagattctgtaatcctcttgccctctcacatcacaaattctgatatgccaaacatttggcccaatgagaatgactgatagacttgctgatgtgcatgtggggggatgaggtgtgtatatgcctttctcctgactggccattcagtgttcaggctgtcattcaaattggataggagaaagttggtgaggaaggaatggagagagcaggatccctggactccctggtccccaaactccttgactgtcacttgtaattgtatataatttttgtgtttcttgctccatttcctcatgctgtcatccttaaagtccatctgggaaggggaaaatgctgaacaccattgtatagtttcttcaactgtcccagccatgttgtacatagatatgtcatgttattatatatataaatatatatataattttgtacgttttcttcatctccgatcttctcaaattctgtactttttttcttttctgtctgagctgccttctctatcattcagcttgagtcctcaagactactggtcacaatgagtctgatttttaggaaggaataggaggagcagggaaatcagaaaaactgttggtctcactctgtctctctacctggtcatcttcaaggctaagaaaacaaacaagctacattctgtatttgccagtttccacagcatgaagtacatagcttccttagcaaggagtggtcattccaaaatccaaatgcaaattgctttgattaaacctagattattaaatccattcagaacagcatgtgtgtggtctggttctggcctccacacagtcaccacctcatctctgtgctacctcagtctttgcaagtagctgtggccatgcctctgaaacagcctgctctgagccaggcagcttacccacctggaaacctccagttattttgatcttatctaaagaattatttttctatgtttgttatccatggatatcccagaaaggcagataacgttgtttcgtggataggaaaagactgaaattctattttttgattttttttgcaactcccttatggataggattgagacatgccaggtagcctaatggttgttaaatgtggaggaatcatggggtagagactgggttggagttcagggtttttttcccctattacttgacagtgttgttttttttttttttcttctgtgttcgcccgcagtggccaagttgaatgatgctgcccggggctctgccagatcctgagacgcttcccctccctgccccacccgggtcctgtgctggctcctgccccttcctgcttttgcagccaggggtcaggaggtggctcgggtgtgggctggagaggcagaagccctttcctgttggtgtcccagcacatggagccccttgggctgagcaccaagaccttgaaccttttttgttttaccttttttccaaataacagttgggagaaatatcaatgaaattctgggggtgggggtggggttgaaagggtggggtgggagatatggaggagtatgaattagggcttggagttggtaaaaacattcctgactatccttcttaaccacgtggctgatgtggggtaggtatgaggggaaggaagtggagtagcctaatgaaaaggggttctagttgagctctgtagataaatgccttgtttcagtgtggttggagacctggtgtcagataaaagaaactccatccgcacagacagatgcaaacagctcctctagttctgcagagctagttgagaactcaacattaatcattttaaaaagtactgtccttgaaatagatttgctgtgggaagaagggcagtgagtgtgggagaaaggagccgtgagcgtggggaaccccacagagcccaaaggactttttcagtattcgaaataaacaaaacaaaaacccatgaaaaaacccaacccagaaa

SEQ ID NO: 92939 - DNA, 2540 bp, Homo sapiens
cgtcacgggcaagggccgccattttgactgagcaaccctagtgacaggagccgaagcagcagcgcaggttgtccccgtttcccctcccccttcccttctccggttgccttcccgggccccttacactccacagtcccggtcccgccatgtcccagaaacaagaagaagagaaccctgcggaggagaccggcgaggagaagcaggacacgcaggagaaagaaggtattctgcctgagagagctgaagaggcaaagctaaaggccaaatacccaagcctaggacaaaagcctggaggctccgacttcctcatgaagagactccagaaagggcaaaagtactttgactcaggagactacaacatggccaaagccaagatgaagaataagcagctgccaagtgcaggaccagacaagaacctggtgactggtgatcacatccccaccccacaggatctgccccagagaaagtcctcgctcgtcaccagcaagcttgcggggtaacctgagcccccctctcctccccttcctcaaccactggacgtttatatattataggcagggatgaaatgggcacctagtcagatcttctcagcttgctagccagaaatgactgtgattctgctgggggctgctgagaaggtaatgtaggttgaaaaggggctctaagtttatttatttcgttagattgacacttccacacactccctgtagtccaggtagggcccagaaataggaaaggctaggattggataatgctgcaaatgctttttttgtgtgagaaactggagagatgtgatttctccttttgggagagaatgtcccaaaattgattaggctgagccttgggaatagtttggcaggtttaacatcccaaggctaacctaacgtagttgggaaaggtagattgaatgagacatgttttctgtgcttctaagtgttctgtcccttaggctgctattgcttcatgtttccattatggcaggtttagagaatccttaaaaagaaaaattgacttgcttgcctaaaactacagtgcccccttagcctccattacttagtatctcttacagtttgctctggctctcaaataatataaagattgatgaacattattcacagaaaatgggcaccttctctctctcttccagcatgttgcttttgaaagtatcatgggatagtgggacgagcactggtttaggagtcaagatatctgggttctcactctactcagtcccagcagagctgttgtataaccttgattaagtcatttagcctctctggatttctatttcctcatctgtaaaatagagttaaatgtatgtaagattgattctgattctgaagtcttaactgccagcagaaaaactccatactgttcattgtaaaactaaaagtgaggaaggctcgtgggtggtgaacctctgctctgtaatactgggaaagtactacagaggggaaccatttgagggatacatgaggagagagtaaattgaggtttggggattataaattcaggcaagagaaccttatagatatcacagtcttgagggtcaaaaaaaaatacttaggaagctagccatggaagcttcttgcctctgacccagcccactttcccagcctacctctgggccttagctgctaaaaagcttctctggcagcggagctgcaggcctgaggaaacatgctcagtcatgcacatgtgttgacccatgtttcagatgcagtctgatgccaggtatattgttagggaaagaggaagaagggtaaactgagctagcccctggggctgagtactcctgcagggctggaggaacaggttcttagaagatgattcaccttggaggaagctggggaaagtggttagggagggagaggaggaagactgagaaatctctgcatccccagaactcagcaacccagctcttttatcatgaggagaggtagccatgctgactcatgaacaggtggaggaaaggggttgcaggtgaccagcatcttcaatctagttaccaccagcttggctagaattttattgaacgcaacttgctagttatgacagagaggaccagggtgagaactaatgctcaagagagcaagattctgtaatcctcttgccctctcacatcacaaattctgatatgccaaacatttggcccaatgagaatgactgatagacttgctgatgtgcatgtggggggatgaggtgtgtatatgcctttctcctgactggccattcagtgttcaggctgtcattcaaattggataggagaaagttggtgaggaaggaatggagagagcaggatccctggactccctggtccccaaactccttgactgtcacttgtaattgtatataatttttgtgtttcttgctccatttcctcatgctgtcatccttaaagtccatctgggaaggggaaaatgctgaacaccattgtatagtttcttcaactgtcccagccatgttgtacatagatatgtcatgttattatatatataaatatatatataattttgtaaaagagtaaaaaaaaaaacact

SEQ ID NO: 92940 - DNA, 2548 bp, Homo sapiens
cgtcacgggcaagggccgccattttgactgagcaaccctagtgacaggagccgaagcagcagcgcaggttgtccccgtttcccctcccccttcccttctccggttgccttcccgggccccttacactccacagtcccggtcccgccatgtcccagaaacaagaagaagagaaccctgcggaggagaccggcgaggagaagcaggacacgcaggagaaagaaggtattctgcctgagagagctgaagaggcaaagctaaaggccaaatacccaagcctaggacaaaagcctggaggctccgacttcctcatgaagagactccagaaagggcaaaagtactttgactcaggagactacaacatggccaaagccaagatgaagaataagcagctgccaagtgcaggaccagacaagaacctggtgactggtgatcacatccccaccccacaggatctgccccagagaaagtcctcgctcgtcaccagcaagcttgcggggtaacctgagcccccctctcctccccttcctcaaccactggacgtttatatattataggcagggatgaaatgggcacctagtcagatcttctcagcttgctagccagaaatgactgtgattctgctgggggctgctgagaaggtaatgtaggttgaaaaggggctctaagtttatttatttcgttagattgacacttccacacactccctgtagtccaggtagggcccagaaataggaaaggctaggattggataatgctgcaaatgctttttttgtgtgagaaactggagagatgtgatttctccttttgggagagaatgtcccaaaattgattaggctgagccttgggaatagtttggcaggtttaacatcccaaggctaacctaacgtagttgggaaaggtagattgaatgagacatgttttctgtgcttctaagtgttctgtcccttaggctgctattgcttcatgtttccattatggcaggtttagagaatccttaaaaagaaaaattgacttgcttgcctaaaactacagtgcccccttagcctccattacttagtatctcttacagtttgctctggctctcaaataatataaagattgatgaacattattcacagaaaatgggcaccttctctctctcttccagcatgttgcttttgaaagtatcatgggatagtgggacgagcactggtttaggagtcaagatatctgggttctcactctactcagtcccagcagagctgttgtataaccttgattaagtcatttagcctctctggatttctatttcctcatctgtaaaatagagttaaatgtatgtaagattgattctgattctgaagtcttaactgccagcagaaaaactccatactgttcattgtaaaactaaaagtgaggaaggctcgtgggtggtgaacctctgctctgtaatactgggaaagtactacagaggggaaccatttgagggatacatgaggagagagtaaattgaggtttggggattataaattcaggcaagagaaccttatagatatcacagtcttgagggtcaaaaaaaaatacttaggaagctagccatggaagcttcttgcctctgacccagcccactttcccagcctacctctgggccttagctgctaaaaagcttctctggcagcggagctgcaggcctgaggaaacatgctcagtcatgcacatgtgttgacccatgtttcagatgcagtctgatgccaggtatattgttagggaaagaggaagaagggtaaactgagctagcccctggggctgagtactcctgcagggctggaggaacaggttcttagaagatgattcaccttggaggaagctggggaaagtggttagggagggagaggaggaagactgagaaatctctgcatccccagaactcagcaacccagctcttttatcatgaggagaggtagccatgctgactcatgaacaggtggaggaaaggggttgcaggtgaccagcatcttcaatctagttaccaccagcttggctagaattttattgaacgcaacttgctagttatgacagagaggaccagggtgagaactaatgctcaagagagcaagattctgtaatcctcttgccctctcacatcacaaattctgatatgccaaacatttggcccaatgagaatgactgatagacttgctgatgtgcatgtggggggatgaggtgtgtatatgcctttctcctgactggccattcagtgttcaggctgtcattcaaattggataggagaaagttggtgaggaaggaatggagagagcaggatccctggactccctggtccccaaactccttgactgtcacttgtaattgtatataatttttgtgtttcttgctccatttcctcatgctgtcatccttaaagtccatctgggaaggggaaaatgctgaacaccattgtatagtttcttcaactgtcccagccatgttgtacatagatatgtcatgttattatatatataaatatatatataattttgtctacaacacaacacgcaaacccagcacacag

SEQ ID NO: 92941 - DNA, 1116 bp, Homo sapiens
ggacgtggggcgggtggttggaaagacggtgaatggaaaggggatggctggtggtcttgggtgtgatgtgtgttattggtttgtagaggacacgcaggagaaagaaggtattctgcctgagagagctgaagaggcaaagctaaaggccaaatacccaagcctaggacaaaagcctggaggctccgacttcctcatgaagagactccagaaagggcaaaagtactttgactcaggagactacaacatggccaaagccaagatgaagaataagcagctgccaagtgcaggaccagacaagaacctggtgactggtgatcacatccccaccccacaggatctgccccagagaaagtcctcgctcgtcaccagcaagcttgcgggtggccaagttgaatgatgctgcccggggctctgccagatcctgagacgcttcccctccctgccccacccgggtcctgtgctggctcctgccccttcctgcttttgcagccaggggtcaggaggtggctcgggtgtgggctggagaggcagaagccctttcctgttggtgtcccagcacatggagccccttgggctgagcaccaagaccttgaaccttttttgttttaccttttttccaaataacagttgggagaaatatcaatgaaattctgggggtgggggtggggttgaaagggtggggtgggagatatggaggagtatgaattagggcttggagttggtaaaaacattcctgactatccttcttaaccacgtggctgatgtggggtaggtatgaggggaaggaagtggagtagcctaatgaaaaggggttctagttgagctctgtagataaatgccttgtttcagtgtggttggagacctggtgtcagataaaagaaactccatccgcacagacagatgcaaacagctcctctagttctgcagagctagttgagaactcaacattaatcattttaaaaagtactgtccttgaaatagatttgctgtgggaagaagggcagtgagtgtgggagaaaggagccgtgagcgtggggaaccccacagagcccaaaggactttttcagtattcgaaataaacaaaacaaaaacccatgaaaaaacccaacccagaaa

SEQ ID NO: 92942 - DNA, 1279 bp, Homo sapiens
cgtcacgggcaagggccgccattttgactgagcaaccctagtgacaggagccgaagcagcagcgcaggttgtccccgtttcccctcccccttcccttctccggttgccttcccgggccccttacactccacagtcccggtcccgccatgtcccagaaacaagaagaagagaaccctgcggaggagaccggcgaggagaagcaggacacgcaggagaaagaaggtattctgcctgagagagctgaagaggcaaagctaaaggccaaatacccaagcctaggacaaaagcctggaggctccgacttcctcatgaagagactccagaaaggggattataaatcattacattggagtgtgcttctctgtgcggatgaaatgcaaaagtactttgactcaggagactacaacatggccaaagccaagatgaagaataagcagctgccaagtgcaggaccagacaagaacctggtgactggtgatcacatccccaccccacaggatctgccccagagaaagtcctcgctcgtcaccagcaagcttgcgggtggccaagttgaatgatgctgcccggggctctgccagatcctgagacgcttcccctccctgccccacccgggtcctgtgctggctcctgccccttcctgcttttgcagccaggggtcaggaggtggctcgggtgtgggctggagaggcagaagccctttcctgttggtgtcccagcacatggagccccttgggctgagcaccaagaccttgaaccttttttgttttaccttttttccaaataacagttgggagaaatatcaatgaaattctgggggtgggggtggggttgaaagggtggggtgggagatatggaggagtatgaattagggcttggagttggtaaaaacattcctgactatccttcttaaccacgtggctgatgtggggtaggtatgaggggaaggaagtggagtagcctaatgaaaaggggttctagttgagctctgtagataaatgccttgtttcagtgtggttggagacctggtgtcagataaaagaaactccatccgcacagacagatgcaaacagctcctctagttctgcagagctagttgagaactcaacattaatcattttaaaaagtactgtccttgaaatagatttgctgtgggaagaagggcagtgagtgtgggagaaaggagccgtgagcgtggggaaccccacagagcccaaaggactttttcagtattcgaaataaacaaaacaaaaacccatgaaaaaacccaacccagaaa

SEQ ID NO: 92943 - DNA, 1789 bp, Homo sapiens
cataactgggaccgaacctctccatcttctcagtcaattgtatcacatatacctgataactctatctctattctgtaccatacatctcctcatactactttagtatttcctccaacattttctttgcagcttctgcagatacagcctttatacgttccacttcaatcgctttttccttttctgagagtgactgatcagtctgtagaagtgcatcagccacatcctccttggactccaaatattttttcagcacctctttggcctgtatccccttccttggcacctggtagtacacgttttcttcatctccgatcttctcaaattctgtactttttttcttttctgtctgagctgccttctctatcattcagcttgagtcctcaagactactggtcacaatgagtctgatttttaggaaggaataggaggagcagggaaatcagaaaaactgttggtctcactctgtctctctacctggtcatcttcaaggctaagaaaacaaacaagctacattctgtatttgccagtttccacagcatgaagtacatagcttccttagcaaggagtggtcattccaaaatccaaatgcaaattgctttgattaaacctagattattaaatccattcagaacagcatgtgtgtggtctggttctggcctccacacagtcaccacctcatctctgtgctacctcagtctttgcaagtagctgtggccatgcctctgaaacagcctgctctgagccaggcagcttacccacctggaaacctccagttattttgatcttatctaaagaattatttttctatgtttgttatccatggatatcccagaaaggcagataacgttgtttcgtggataggaaaagactgaaattctattttttgattttttttgcaactcccttatggataggattgagacatgccaggtagcctaatggttgttaaatgtggaggaatcatggggtagagactgggttggagttcagggtttttttcccctattacttgacagtgttgttttttttttttttcttctgtgttcgcccgcagtggccaagttgaatgatgctgcccggggctctgccagatcctgagacgcttcccctccctgccccacccgggtcctgtgctggctcctgccccttcctgcttttgcagccaggggtcaggaggtggctcgggtgtgggctggagaggcagaagccctttcctgttggtgtcccagcacatggagccccttgggctgagcaccaagaccttgaaccttttttgttttaccttttttccaaataacagttgggagaaatatcaatgaaattctgggggtgggggtggggttgaaagggtggggtgggagatatggaggagtatgaattagggcttggagttggtaaaaacattcctgactatccttcttaaccacgtggctgatgtggggtaggtatgaggggaaggaagtggagtagcctaatgaaaaggggttctagttgagctctgtagataaatgccttgtttcagtgtggttggagacctggtgtcagataaaagaaactccatccgcacagacagatgcaaacagctcctctagttctgcagagctagttgagaactcaacattaatcattttaaaaagtactgtccttgaaatagatttgctgtgggaagaagggcagtgagtgtgggagaaaggagccgtgagcgtggggaaccccacagagcccaaaggactttttcagtattcgaaataaacaaaacaaaaacccatgaaaaaacccaacccagaaa

SEQ ID NO: 92944 - DNA, 1162 bp, Homo sapiens
catggtagaatcagcatatgaacaataagaacaataggtaaagctatgattatggcgtatatataggaaatgactgcattggatatttaaggatattttgctaggttctcccctttcattgtgatactcttctagttgagacattttatgatagatttgcactcatagaaggaaacgtctctattctaggagggcaaaatacttgtgtgctcatagctttcaccgtgagctataccaatctacaactggaagatacataaaagtgcttagcattgaatttgggataggattgagacatgccaggtagcctaatggttgttaaatgtggaggaatcatggggtagagactgggttggagttcagggtttttttcccctattacttgacagtgttgttttttttttttttcttctgtgttcgcccgcagtggccaagttgaatgatgctgcccggggctctgccagatcctgagacgcttcccctccctgccccacccgggtcctgtgctggctcctgccccttcctgcttttgcagccaggggtcaggaggtggctcgggtgtgggctggagaggcagaagccctttcctgttggtgtcccagcacatggagccccttgggctgagcaccaagaccttgaaccttttttgttttaccttttttccaaataacagttgggagaaatatcaatgaaattctgggggtgggggtggggttgaaagggtggggtgggagatatggaggagtatgaattagggcttggagttggtaaaaacattcctgactatccttcttaaccacgtggctgatgtggggtaggtatgaggggaaggaagtggagtagcctaatgaaaaggggttctagttgagctctgtagataaatgccttgtttcagtgtggttggagacctggtgtcagataaaagaaactccatccgcacagacagatgcaaacagctcctctagttctgcagagctagttgagaactcaacattaatcattttaaaaagtactgtccttgaaatagatttgctgtgggaagaagggcagtgagtgtgggagaaaggagccgtgagcgtggggaaccccacagagcccaaaggactttttcagtattcgaaataaacaaaacaaaaacccatgaaaaaacccaacccagaaa

SEQ ID NO: 92945 - DNA, 882 bp, Homo sapiens
  misc_feature (777)..(777): n is a, c, g, or t
  misc_feature (779)..(779): n is a, c, g, or t
  misc_feature (782)..(782): n is a, c, g, or t
cgtcacgggcaagggccgccattttgactgagcaaccctagtgacaggagccgaagcagcagcgcaggttgtccccgtttcccctcccccttcccttctccggttgccttcccgggccccttacactccacagtcccggtcccgccatgtcccagaaacaagaagaagagaaccctgcggaggagaccggcgaggagaagcaggacacgcaggagaaagaaggtattctgcctgagagagctgaagaggcaaagctaaaggccaaatacccaagcctaggacaaaagcctggaggctccgacttcctcatgaagagactccagaaagggcaaaagtactttgactcaggagactacaacatggccaaagccaagatgaagaataagcagctgccaagtgcaggaccagacaagaacctggtgactggtgatcacatccccaccccacaggatctgccccagagaaagtcctcgctcgtcaccagcaagcttgcgggtggccaagttgaatgatgctgcccggggctctgccagatcctgagacgcttcccctccctgccccacccgggtcctgtgctggctcctgccccttcctgcttttgcagccaggggtcaggaggtggctcgggtgtgggctggagaggcagaagccctttcctgttggtgtcccagcacatggagccccttgggctgagcaccaagaccttgaaccttttttgttttaccttttttccaaataacagttgggagaaatatcaatgaaacatttggggtgacngntgncgcgtgactttttaatcccatctattttccaaagctattctcatattaattccctttatccctcgactataaacgttgttattcgctttaacttttccat

SEQ ID NO: 92946 - DNA, 767 bp, Homo sapiens
cgtcacgggcaagggccgccattttgactgagcaaccctagtgacaggagccgaagcagcagcgcaggttgtccccgtttcccctcccccttcccttctccggttgccttcccgggccccttacactccacagtcccggtcccgccatgtcccagaaacaagaagaagagaaccctgcggaggagaccggcgaggagaagcaggacacgcaggagaaagaaggtattctgcctgagagagctgaagaggcaaagctaaaggccaaatacccaagcctaggacaaaagcctggaggctccgacttcctcatgaagagactccagaaagggcaaaagtactttgactcaggagactacaacatggccaaagccaagatgaagaataagcagctgccttcttaaccacgtggctgatgtggggtaggtatgaggggaaggaagtggagtagcctaatgaaaaggggttctagttgagctctgtagataaatgccttgtttcagtgtggttggagacctggtgtcagataaaagaaactccatccgcacagacagatgcaaacagctcctctagttctgcagagctagttgagaactcaacattaatcattttaaaaagtactgtccttgaaatagatttgctgtgggaagaagggcagtgagtgtgggagaaaggagccgtgagcgtggggaaccccacagagcccaaaggactttttcagtattcgaaataaacaaaacaaaaacccatgaaaaaacccaacccagaaa

SEQ ID NO: 92947 - DNA, 808 bp, Homo sapiens
ggacgtggggcgggtggttggaaagacggtgaatggaaaggggatggctggtggtcttgggtgtgatgtgtgttattggtttgtagaggtaagtgacccagcaaccgggctggggcccgcagcctcaatccgcaaagataggggtcgaggtaaagacgtttaaaaaaaaaccagtattgggggaggggagaagtgtagttattataatggctagtttaaggcggcaactttctcaagagacctattttagtagctaaggatggtctattgctcaccttcagtgaggacccagcaatattgaagagggctagagttccaaacagaatcatggtaattaaacttggaaaagacgccgacagggtcgtgagaaagacacttctctcttcccctagacttccaaggcagggacttagtgcacctgcgattccgtgatggaaacactaacgccaaataaaccccttattggggtttgtatttgacttttaaaatttagtactgggttcaggtactcattaaatacacttggtgttatatctatgcgtaatttccaagagaaaggaatataattccactaaaaagagtcatacgttgacttcatatcttttcaaaaagtcactaaagggcagcagggaccacaaaaaaaaagcaagcttatgcattccggccgaattcggcttacttggccattcgccctttatggagtcgattacaattcactggccggcgttacaacgtcgtgactgggaccctggcgtacccactttcgcttggagacattcccttttccagttgggtattacgagcccac

SEQ ID NO: 92948 - DNA, 236 bp, Homo sapiens
cgtgccactgcactccagcctgggcaacatagcgaggctccatctcaaaaaaaaatttttttattttccttactctcctctgcaatgactgtaggattataaatcattacattggagtgtgcttctctgtgcggatgaaatggtgggtgaaacatccctgtggaggatcccagttattgagtcttagtcacagatgataatgtgatgctgatttgcatttaccttgctggaggcaa

SEQ ID NO: 92949 - DNA, 1231 bp, Homo sapiens
cgtcacgggcaagggccgccattttgactgagcaaccctagtgacaggagccgaagcagcagcgcaggttgtccccgtttcccctcccccttcccttctccggttgccttcccgggccccttacactccacagtcccggtcccgccatgtcccagaaacaagaagaagagaaccctgcggaggagaccggcgaggagaagcaggacacgcaggagaaagaaggtattctgcctgagagagctgaagaggcaaagctaaaggccaaatacccaagcctaggacaaaagcctggaggctccgacttcctcatgaagagactccagaaagggcaaaagtactttgactcaggagactacaacatggccaaagccaagatgaagaataagcagctgccaagtgcaggaccagacaagaacctggtgactggtgatcacatccccaccccacaggatctgccccagagaaagtcctcgctcgtcaccagcaagcttgcgggtggccaagttgaatgatgctgcccggggctctgccagatcctgagacgcttcccctccctgccccacccgggtcctgtgctggctcctgccccttcctgcttttgcagccaggggtcaggaggtggctcgggtgtgggctggagaggcagaagccctttcctgttggtgtcccagcacatggagccccttgggctgagcaccaagaccttgaaccttttttgttttaccttttttccaaataacagttgggagaaatatcaatgaaattctgggggtgggggtggggttgaaagggtggggtgggagatatggaggagtatgaattagggcttggagttggtaaaaacattcctgactatccttcttaaccacgtggctgatgtggggtaggtatgaggggaaggaagtggagtagcctaatgaaaaggggttctagttgagctctgtagataaatgccttgtttcagtgtggttggagacctggtgtcagataaaagaaactccatccgcacagacagatgcaaacagctcctctagttctgcagagctagttgagaactcaacattaatcattttaaaaagtactgtccttgaaatagatttgctgtgggaagaagggcagtgagtgtgggagaaaggagccgtgagcgtggggaaccccacagagcccaaaggactttttcagtattcgaaataaacaaaacaaaaacccatgaaaaaacccaacccagaaa

SEQ ID NO: 92950 - DNA, 2517 bp, Homo sapiens
cgtcacgggcaagggccgccattttgactgagcaaccctagtgacaggagccgaagcagcagcgcaggttgtccccgtttcccctcccccttcccttctccggttgccttcccgggccccttacactccacagtcccggtcccgccatgtcccagaaacaagaagaagagaaccctgcggaggagaccggcgaggagaagcaggacacgcaggagaaagaaggtattctgcctgagagagctgaagaggcaaagctaaaggccaaatacccaagcctaggacaaaagcctggaggctccgacttcctcatgaagagactccagaaagggcaaaagtactttgactcaggagactacaacatggccaaagccaagatgaagaataagcagctgccaagtgcaggaccagacaagaacctggtgactggtgatcacatccccaccccacaggatctgccccagagaaagtcctcgctcgtcaccagcaagcttgcggggtaacctgagcccccctctcctccccttcctcaaccactggacgtttatatattataggcagggatgaaatgggcacctagtcagatcttctcagcttgctagccagaaatgactgtgattctgctgggggctgctgagaaggtaatgtaggttgaaaaggggctctaagtttatttatttcgttagattgacacttccacacactccctgtagtccaggtagggcccagaaataggaaaggctaggattggataatgctgcaaatgctttttttgtgtgagaaactggagagatgtgatttctccttttgggagagaatgtcccaaaattgattaggctgagccttgggaatagtttggcaggtttaacatcccaaggctaacctaacgtagttgggaaaggtagattgaatgagacatgttttctgtgcttctaagtgttctgtcccttaggctgctattgcttcatgtttccattatggcaggtttagagaatccttaaaaagaaaaattgacttgcttgcctaaaactacagtgcccccttagcctccattacttagtatctcttacagtttgctctggctctcaaataatataaagattgatgaacattattcacagaaaatgggcaccttctctctctcttccagcatgttgcttttgaaagtatcatgggatagtgggacgagcactggtttaggagtcaagatatctgggttctcactctactcagtcccagcagagctgttgtataaccttgattaagtcatttagcctctctggatttctatttcctcatctgtaaaatagagttaaatgtatgtaagattgattctgattctgaagtcttaactgccagcagaaaaactccatactgttcattgtaaaactaaaagtgaggaaggctcgtgggtggtgaacctctgctctgtaatactgggaaagtactacagaggggaaccatttgagggatacatgaggagagagtaaattgaggtttggggattataaattcaggcaagagaaccttatagatatcacagtcttgagggtcaaaaaaaaatacttaggaagctagccatggaagcttcttgcctctgacccagcccactttcccagcctacctctgggccttagctgctaaaaagcttctctggcagcggagctgcaggcctgaggaaacatgctcagtcatgcacatgtgttgacccatgtttcagatgcagtctgatgccaggtatattgttagggaaagaggaagaagggtaaactgagctagcccctggggctgagtactcctgcagggctggaggaacaggttcttagaagatgattcaccttggaggaagctggggaaagtggttagggagggagaggaggaagactgagaaatctctgcatccccagaactcagcaacccagctcttttatcatgaggagaggtagccatgctgactcatgaacaggtggaggaaaggggttgcaggtgaccagcatcttcaatctagttaccaccagcttggctagaattttattgaacgcaacttgctagttatgacagagaggaccagggtgagaactaatgctcaagagagcaagattctgtaatcctcttgccctctcacatcacaaattctgatatgccaaacatttggcccaatgagaatgactgatagacttgctgatgtgcatgtggggggatgaggtgtgtatatgcctttctcctgactggccattcagtgttcaggctgtcattcaaattggataggagaaagttggtgaggaaggaatggagagagcaggatccctggactccctggtccccaaactccttgactgtcacttgtaattgtatataatttttgtgtttcttgctccatttcctcatgctgtcatccttaaagtccatctgggaaggggaaaatgctgaacaccattgtatagtttcttcaactgtcccagccatgttgtacatagatatgtcatgttattatatatataaatatatatataattttgt

SEQ ID NO: 92951 - DNA, 606 bp, Homo sapiens
gagatgaggatattaactcataataaatttagggttgatgtggcaaggtggaaatcaggacacgcaggagaaagaaggtattctgcctgagagagctgaagaggcaaagctaaaggccaaatacccaagcctaggacaaaagcctggaggctccgacttcctcatgaagagactccagaaaggggtatggggcatagtctcttaccctctttctttggagctaaaggaggttcttcgaatgaagtctgtagaggttctactggatccttttctggaggttttgttgttgaacagaagtagaggcgaatttgaaatttgaaaagagcaagtcaaattaatgtaaatccctgatgtggtatcaattccctcctgatttcccatgtaggaaattaaggcctaaattggagcatttgggtgtgtggggaaatgagggaaagatgttagaaactgaaatgcagactgcccccaggcatttgcctgtttgaatgttggaggttttaggattgtgcactttttaagcattagagataaattttgggatgcatcatttcagaagaagatcaaaccatctctcctacagaaataaatcctcaacttgaaatgaat

SEQ ID NO: 92952 - DNA, 3898 bp, Homo sapiens
ggacgtggggcgggtggttggaaagacggtgaatggaaaggggatggctggtggtcttgggtgtgatgtgtgttattggtttgtagaggacacgcaggagaaagaaggtattctgcctgagagagctgaagaggcaaagctaaaggccaaatacccaagcctaggacaaaagcctggaggctccgacttcctcatgaagagactccagaaagggcaaaagtactttgactcaggagactacaacatggccaaagccaagatgaagaataagcagctgccaagtgcaggaccagacaagaacctggtgactggtgatcacatccccaccccacaggatctgccccagagaaagtcctcgctcgtcaccagcaagcttgcggggtaacctgagcccccctctcctccccttcctcaaccactggacgtttatatattataggcagggatgaaatgggcacctagtcagatcttctcagcttgctagccagaaatgactgtgattctgctgggggctgctgagaaggtaatgtaggttgaaaaggggctctaagtttatttatttcgttagattgacacttccacacactccctgtagtccaggtagggcccagaaataggaaaggctaggattggataatgctgcaaatgctttttttgtgtgagaaactggagagatgtgatttctccttttgggagagaatgtcccaaaattgattaggctgagccttgggaatagtttggcaggtttaacatcccaaggctaacctaacgtagttgggaaaggtagattgaatgagacatgttttctgtgcttctaagtgttctgtcccttaggctgctattgcttcatgtttccattatggcaggtttagagaatccttaaaaagaaaaattgacttgcttgcctaaaactacagtgcccccttagcctccattacttagtatctcttacagtttgctctggctctcaaataatataaagattgatgaacattattcacagaaaatgggcaccttctctctctcttccagcatgttgcttttgaaagtatcatgggatagtgggacgagcactggtttaggagtcaagatatctgggttctcactctactcagtcccagcagagctgttgtataaccttgattaagtcatttagcctctctggatttctatttcctcatctgtaaaatagagttaaatgtatgtaagattgattctgattctgaagtcttaactgccagcagaaaaactccatactgttcattgtaaaactaaaagtgaggaaggctcgtgggtggtgaacctctgctctgtaatactgggaaagtactacagaggggaaccatttgagggatacatgaggagagagtaaattgaggtttggggattataaattcaggcaagagaaccttatagatatcacagtcttgagggtcaaaaaaaaatacttaggaagctagccatggaagcttcttgcctctgacccagcccactttcccagcctacctctgggccttagctgctaaaaagcttctctggcagcggagctgcaggcctgaggaaacatgctcagtcatgcacatgtgttgacccatgtttcagatgcagtctgatgccaggtatattgttagggaaagaggaagaagggtaaactgagctagcccctggggctgagtactcctgcagggctggaggaacaggttcttagaagatgattcaccttggaggaagctggggaaagtggttagggagggagaggaggaagactgagaaatctctgcatccccagaactcagcaacccagctcttttatcatgaggagaggtagccatgctgactcatgaacaggtggaggaaaggggttgcaggtgaccagcatcttcaatctagttaccaccagcttggctagaattttattgaacgcaacttgctagttatgacagagaggaccagggtgagaactaatgctcaagagagcaagattctgtaatcctcttgccctctcacatcacaaattctgatatgccaaacatttggcccaatgagaatgactgatagacttgctgatgtgcatgtggggggatgaggtgtgtatatgcctttctcctgactggccattcagtgttcaggctgtcattcaaattggataggagaaagttggtgaggaaggaatggagagagcaggatccctggactccctggtccccaaactccttgactgtcacttgtaattgtatataatttttgtgtttcttgctccatttcctcatgctgtcatccttaaagtccatctgggaaggggaaaatgctgaacaccattgtatagtttcttcaactgtcccagccatgttgtacatagatatgtcatgttattatatatataaatatatatataattttgtacgttttcttcatctccgatcttctcaaattctgtactttttttcttttctgtctgagctgccttctctatcattcagcttgagtcctcaagactactggtcacaatgagtctgatttttaggaaggaataggaggagcagggaaatcagaaaaactgttggtctcactctgtctctctacctggtcatcttcaaggctaagaaaacaaacaagctacattctgtatttgccagtttccacagcatgaagtacatagcttccttagcaaggagtggtcattccaaaatccaaatgcaaattgctttgattaaacctagattattaaatccattcagaacagcatgtgtgtggtctggttctggcctccacacagtcaccacctcatctctgtgctacctcagtctttgcaagtagctgtggccatgcctctgaaacagcctgctctgagccaggcagcttacccacctggaaacctccagttattttgatcttatctaaagaattatttttctatgtttgttatccatggatatcccagaaaggcagataacgttgtttcgtggataggaaaagactgaaattctattttttgattttttttgcaactcccttatggataggattgagacatgccaggtagcctaatggttgttaaatgtggaggaatcatggggtagagactgggttggagttcagggtttttttcccctattacttgacagtgttgttttttttttttttcttctgtgttcgcccgcagtggccaagttgaatgatgctgcccggggctctgccagatcctgagacgcttcccctccctgccccacccgggtcctgtgctggctcctgccccttcctgcttttgcagccaggggtcaggaggtggctcgggtgtgggctggagaggcagaagccctttcctgttggtgtcccagcacatggagccccttgggctgagcaccaagaccttgaaccttttttgttttaccttttttccaaataacagttgggagaaatatcaatgaaattctgggggtgggggtggggttgaaagggtggggtgggagatatggaggagtatgaattagggcttggagttggtaaaaacattcctgactatccttcttaaccacgtggctgatgtggggtaggtatgaggggaaggaagtggagtagcctaatgaaaaggggttctagttgagctctgtagataaatgccttgtttcagtgtggttggagacctggtgtcagataaaagaaactccatccgcacagacagatgcaaacagctcctctagttctgcagagctagttgagaactcaacattaatcattttaaaaagtactgtccttgaaatagatttgctgtgggaagaagggcagtgagtgtgggagaaaggagccgtgagcgtggggaaccccacagagcccaaaggactttttcagtattcgaaataaacaaaacaaaaacccatgaaaaaacccaacccagaaa

SEQ ID NO: 92953 - DNA, 4044 bp, Homo sapiens
cgtcacgggcaagggccgccattttgactgagcaaccctagtgacaggagccgaagcagcagcgcaggttgtccccgtttcccctcccccttcccttctccggttgccttcccgggccccttacactccacagtcccggtcccgccatgtcccagaaacaagaagaagagaaccctgcggaggagaccggcgaggagaagcaggacacgcaggagaaagaaggtattctgcctgagagagctgaagaggcaaagctaaaggccaaatacccaagcctaggacaaaagcctggaggctccgacttcctcatgaagagactccagaaagggcaaaagtactttgactcaggagactacaacatggccaaagccaagatgaagaataagcagctgccaagtgcaggaccagacaagaacctggtgactggtgatcacatccccaccccacaggatctgccccagagaaagtcctcgctcgtcaccagcaagcttgcggggtaacctgagcccccctctcctccccttcctcaaccactggacgtttatatattataggcagggatgaaatgggcacctagtcagatcttctcagcttgctagccagaaatgactgtgattctgctgggggctgctgagaaggtaatgtaggttgaaaaggggctctaagtttatttatttcgttagattgacacttccacacactccctgtagtccaggtagggcccagaaataggaaaggctaggattggataatgctgcaaatgctttttttgtgtgagaaactggagagatgtgatttctccttttgggagagaatgtcccaaaattgattaggctgagccttgggaatagtttggcaggtttaacatcccaaggctaacctaacgtagttgggaaaggtagattgaatgagacatgttttctgtgcttctaagtgttctgtcccttaggctgctattgcttcatgtttccattatggcaggtttagagaatccttaaaaagaaaaattgacttgcttgcctaaaactacagtgcccccttagcctccattacttagtatctcttacagtttgctctggctctcaaataatataaagattgatgaacattattcacagaaaatgggcaccttctctctctcttccagcatgttgcttttgaaagtatcatgggatagtgggacgagcactggtttaggagtcaagatatctgggttctcactctactcagtcccagcagagctgttgtataaccttgattaagtcatttagcctctctggatttctatttcctcatctgtaaaatagagttaaatgtatgtaagattgattctgattctgaagtcttaactgccagcagaaaaactccatactgttcattgtaaaactaaaagtgaggaaggctcgtgggtggtgaacctctgctctgtaatactgggaaagtactacagaggggaaccatttgagggatacatgaggagagagtaaattgaggtttggggattataaattcaggcaagagaaccttatagatatcacagtcttgagggtcaaaaaaaaatacttaggaagctagccatggaagcttcttgcctctgacccagcccactttcccagcctacctctgggccttagctgctaaaaagcttctctggcagcggagctgcaggcctgaggaaacatgctcagtcatgcacatgtgttgacccatgtttcagatgcagtctgatgccaggtatattgttagggaaagaggaagaagggtaaactgagctagcccctggggctgagtactcctgcagggctggaggaacaggttcttagaagatgattcaccttggaggaagctggggaaagtggttagggagggagaggaggaagactgagaaatctctgcatccccagaactcagcaacccagctcttttatcatgaggagaggtagccatgctgactcatgaacaggtggaggaaaggggttgcaggtgaccagcatcttcaatctagttaccaccagcttggctagaattttattgaacgcaacttgctagttatgacagagaggaccagggtgagaactaatgctcaagagagcaagattctgtaatcctcttgccctctcacatcacaaattctgatatgccaaacatttggcccaatgagaatgactgatagacttgctgatgtgcatgtggggggatgaggtgtgtatatgcctttctcctgactggccattcagtgttcaggctgtcattcaaattggataggagaaagttggtgaggaaggaatggagagagcaggatccctggactccctggtccccaaactccttgactgtcacttgtaattgtatataatttttgtgtttcttgctccatttcctcatgctgtcatccttaaagtccatctgggaaggggaaaatgctgaacaccattgtatagtttcttcaactgtcccagccatgttgtacatagatatgtcatgttattatatatataaatatatatataattttgtacgttttcttcatctccgatcttctcaaattctgtactttttttcttttctgtctgagctgccttctctatcattcagcttgagtcctcaagactactggtcacaatgagtctgatttttaggaaggaataggaggagcagggaaatcagaaaaactgttggtctcactctgtctctctacctggtcatcttcaaggctaagaaaacaaacaagctacattctgtatttgccagtttccacagcatgaagtacatagcttccttagcaaggagtggtcattccaaaatccaaatgcaaattgctttgattaaacctagattattaaatccattcagaacagcatgtgtgtggtctggttctggcctccacacagtcaccacctcatctctgtgctacctcagtctttgcaagtagctgtggccatgcctctgaaacagcctgctctgagccaggcagcttacccacctggaaacctccagttattttgatcttatctaaagaattatttttctatgtttgttatccatggatatcccagaaaggcagataacgttgtttcgtggataggaaaagactgaaattctattttttgattttttttgcaactcccttatggataggattgagacatgccaggtagcctaatggttgttaaatgtggaggaatcatggggtagagactgggttggagttcagggtttttttcccctattacttgacagtgttgttttttttttttttcttctgtgttcgcccgcagtggccaagttgaatgatgctgcccggggctctgccagatcctgagacgcttcccctccctgccccacccgggtcctgtgctggctcctgccccttcctgcttttgcagccaggggtcaggaggtggctcgggtgtgggctggagaggcagaagccctttcctgttggtgtcccagcacatggagccccttgggctgagcaccaagaccttgaaccttttttgttttaccttttttccaaataacagttgggagaaatatcaatgaaattctgggggtgggggtggggttgaaagggtggggtgggagatatggaggagtatgaattagggcttggagttggtaaaaacattcctgactatccttcttaaccacgtggctgatgtggggtaggtatgaggggaaggaagtggagtagcctaatgaaaaggggttctagttgagctctgtagataaatgccttgtttcagtgtggttggagacctggtgtcagataaaagaaactccatccgcacagacagatgcaaacagctcctctagttctgcagagctagttgagaactcaacattaatcattttaaaaagtactgtccttgaaatagatttgctgtgggaagaagggcagtgagtgtgggagaaaggagccgtgagcgtggggaaccccacagagcccaaaggactttttcagtattcgaaataaacaaaacaaaaacccatgaaaaaacccaacccagaaaaaaacacggcagaccacgaagcaaaaggggg

SEQ ID NO: 92954 - DNA, 5355 bp, Homo sapiens
cgtcacgggcaagggccgccattttgactgagcaaccctagtgacaggagccgaagcagcagcgcaggttgtccccgtttcccctcccccttcccttctccggttgccttcccgggccccttacactccacagtcccggtcccgccatgtcccagaaacaagaagaagagaaccctgcggaggagaccggcgaggagaagcaggacacgcaggagaaagaaggtattctgcctgagagagctgaagaggcaaagctaaaggccaaatacccaagcctaggacaaaagcctggaggctccgacttcctcatgaagagactccagaaagggcaaaagtactttgactcaggagactacaacatggccaaagccaagatgaagaataagcagctgccaagtgcaggaccagacaagaacctggtgactggtgatcacatccccaccccacaggatctgccccagagaaagtcctcgctcgtcaccagcaagcttgcggggtaacctgagcccccctctcctccccttcctcaaccactggacgtttatatattataggcagggatgaaatgggcacctagtcagatcttctcagcttgctagccagaaatgactgtgattctgctgggggctgctgagaaggtaatgtaggttgaaaaggggctctaagtttatttatttcgttagattgacacttccacacactccctgtagtccaggtagggcccagaaataggaaaggctaggattggataatgctgcaaatgctttttttgtgtgagaaactggagagatgtgatttctccttttgggagagaatgtcccaaaattgattaggctgagccttgggaatagtttggcaggtttaacatcccaaggctaacctaacgtagttgggaaaggtagattgaatgagacatgttttctgtgcttctaagtgttctgtcccttaggctgctattgcttcatgtttccattatggcaggtttagagaatccttaaaaagaaaaattgacttgcttgcctaaaactacagtgcccccttagcctccattacttagtatctcttacagtttgctctggctctcaaataatataaagattgatgaacattattcacagaaaatgggcaccttctctctctcttccagcatgttgcttttgaaagtatcatgggatagtgggacgagcactggtttaggagtcaagatatctgggttctcactctactcagtcccagcagagctgttgtataaccttgattaagtcatttagcctctctggatttctatttcctcatctgtaaaatagagttaaatgtatgtaagattgattctgattctgaagtcttaactgccagcagaaaaactccatactgttcattgtaaaactaaaagtgaggaaggctcgtgggtggtgaacctctgctctgtaatactgggaaagtactacagaggggaaccatttgagggatacatgaggagagagtaaattgaggtttggggattataaattcaggcaagagaaccttatagatatcacagtcttgagggtcaaaaaaaaatacttaggaagctagccatggaagcttcttgcctctgacccagcccactttcccagcctacctctgggccttagctgctaaaaagcttctctggcagcggagctgcaggcctgaggaaacatgctcagtcatgcacatgtgttgacccatgtttcagatgcagtctgatgccaggtatattgttagggaaagaggaagaagggtaaactgagctagcccctggggctgagtactcctgcagggctggaggaacaggttcttagaagatgattcaccttggaggaagctggggaaagtggttagggagggagaggaggaagactgagaaatctctgcatccccagaactcagcaacccagctcttttatcatgaggagaggtagccatgctgactcatgaacaggtggaggaaaggggttgcaggtgaccagcatcttcaatctagttaccaccagcttggctagaattttattgaacgcaacttgctagttatgacagagaggaccagggtgagaactaatgctcaagagagcaagattctgtaatcctcttgccctctcacatcacaaattctgatatgccaaacatttggcccaatgagaatgactgatagacttgctgatgtgcatgtggggggatgaggtgtgtatatgcctttctcctgactggccattcagtgttcaggctgtcattcaaattggataggagaaagttggtgaggaaggaatggagagagcaggatccctggactccctggtccccaaactccttgactgtcacttgtaattgtatataatttttgtgtttcttgctccatttcctcatgctgtcatccttaaagtccatctgggaaggggaaaatgctgaacaccattgtatagtttcttcaactgtcccagccatgttgtacatagatatgtcatgttattatatatataaatatatatataattttgtacgttttcttcatctccgatcttctcaaattctgtactttttttcttttctgtctgagctgccttctctatcattcagcttgagtcctcaagactactggtcacaatgagtctgatttttaggaaggaataggaggagcagggaaatcagaaaaactgttggtctcactctgtctctctacctggtcatcttcaaggctaagaaaacaaacaagctacattctgtatttgccagtttccacagcatgaagtacatagcttccttagcaaggagtggtcattccaaaatccaaatgcaaattgctttgattaaacctagattattaaatccattcagaacagcatgtgtgtggtctggttctggcctccacacagtcaccacctcatctctgtgctacctcagtctttgcaagtagctgtggccatgcctctgaaacagcctgctctgagccaggcagcttacccacctggaaacctccagttattttgatcttatctaaagaattatttttctatgtttgttatccatggatatcccagaaaggcagataacgttgtttcgtggataggaaaagactgaaattctattttttgattttttttgcaactcccttatggataggattgagacatgccaggtagcctaatggttgttaaatgtggaggaatcatggggtagagactgggttggagttcagggtttttttcccctattacttgacagtgttgttttttttttttttcttctgtgttcgcccgcagtggccaagttgaatgatgctgcccggggctctgccagatcctgagacgcttcccctccctgccccacccgggtcctgtgctggctcctgccccttcctgcttttgcagccaggggtcaggaggtggctcgggtgtgggctggagaggcagaagccctttcctgttggtgtcccagcacatggagccccttgggctgagcaccaagaccttgaaccttttttgttttaccttttttccaaataacagttgggagaaatatcaatgaaattctgggggtgggggtggggttgaaagggtggggtgggagatatggaggagtatgaattagggcttggagttggtaaaaacattcctgactatccttcttaaccacgtggctgatgtggggtaggtatgaggggaaggaagtggagtagcctaatgaaaaggggttctagttgagctctgtagataaatgccttgtttcagtgtggttggagacctggtgtcagataaaagaaactccatccgcacagacagatgcaaacagctcctctagttctgcagagctagttgagaactcaacattaatcattttaaaaagtactgtccttgaaatagatttgctgtgggaagaagggcagtgagtgtgggagaaaggagccgtgagcgtggggaaccccacagagcccaaaggactttttcagtattcgaaataaacaaaacaaaaacccatgaaaaaacccaacccagaaatcgcaaaaaaagacatagaaaaaaacacaaaaaagaatagacagaccataaaaaatgtactagaaatacacacataagaaaaacaaaaatagataaatagtgcgcaggtcgtgcccacacatgtttcttcactgagtggaggccctgaggatccaggcaccccatggtattgtctttctgctagggagtggtcgtctaccgtgatggcgttttgaaccagtagtcggtatgcgtccttgagaaacaacttgctcttgaggctttggcacaacaacttggcttgaggaggcagcccctatcttgtcacatgaaccccagcagtcctcaaggttgagtccgtggacacccacaagtggtggagccaagaagctccatagggagaacaatagtaatcgagagtagcgagcgatcatagagagttagatagctgaggtttcaacaggatcgaggaaattcgcgagatctttcccatgagacgctaggagatacaataacgcccttagccatagacatagacacccagttgatcgtcattcatataagagagatacacctttggcttggagcacccaaagaacaaggagaccattatttaagagcacataagagccacccacttttattatcatataaagggccgatggtagcagaagtagttgtaccagtagatatatttatatagacgcagttaacgtttgggcgcagattaaggaatttaaccccctttaagagggcccccagaaggggggcccccccacatttggaggcgcccccgaaaggaacctttcgagacacgttggccccaaaccttggggtttcgaccggggcaagaaccgggactcggttagcaacggttgcggcgcccttgggggaattccccagatcgagggcattttcgcttaaacacgtttatttacccccgcttttatcgcacaccgtatggaaagagacccccctatggggagcgaaagaaataaaattgggagagcaagccagagaggagcgtacacaacaactggggcacaccggctatacacttcacacacatcttactggagggatgatctaaacagacatgggtaaacaggcctttggacgaacattctcttcccgccactttttgcacaagctggtttccaagcgacgccccccctgatgctcccatatgtgtcgcatgaaagcggcgccgagagggcacttcttgcccatctttaacaatactcacaggcgaaggaccactccatgtggtcttgacagaggacaataattgacaaggggcgcgaccacacggatacgacccatagaataacccacccacaccccaaacacgaggagattttcc

SEQ ID NO: 92955 - DNA, 3967 bp, Homo sapiens
cgtcacgggcaagggccgccattttgactgagcaaccctagtgacaggagccgaagcagcagcgcaggttgtccccgtttcccctcccccttcccttctccggttgccttcccgggccccttacactccacagtcccggtcccgccatgtcccagaaacaagaagaagagaaccctgcggaggagaccggcgaggagaagcaggacacgcaggagaaagaaggtattctgcctgagagagctgaagaggcaaagctaaaggccaaatacccaagcctaggacaaaagcctggaggctccgacttcctcatgaagagactccagaaagggcaaaagtactttgactcaggagactacaacatggccaaagccaagatgaagaataagcagctgccaagtgcaggaccagacaagaacctggtgactggtgatcacatccccaccccacaggatctgccccagagaaagtcctcgctcgtcaccagcaagcttgcggggtaacctgagcccccctctcctccccttcctcaaccactggacgtttatatattataggcagggatgaaatgggcacctagtcagatcttctcagcttgctagccagaaatgactgtgattctgctgggggctgctgagaaggtaatgtaggttgaaaaggggctctaagtttatttatttcgttagattgacacttccacacactccctgtagtccaggtagggcccagaaataggaaaggctaggattggataatgctgcaaatgctttttttgtgtgagaaactggagagatgtgatttctccttttgggagagaatgtcccaaaattgattaggctgagccttgggaatagtttggcaggtttaacatcccaaggctaacctaacgtagttgggaaaggtagattgaatgagacatgttttctgtgcttctaagtgttctgtcccttaggctgctattgcttcatgtttccattatggcaggtttagagaatccttaaaaagaaaaattgacttgcttgcctaaaactacagtgcccccttagcctccattacttagtatctcttacagtttgctctggctctcaaataatataaagattgatgaacattattcacagaaaatgggcaccttctctctctcttccagcatgttgcttttgaaagtatcatgggatagtgggacgagcactggtttaggagtcaagatatctgggttctcactctactcagtcccagcagagctgttgtataaccttgattaagtcatttagcctctctggatttctatttcctcatctgtaaaatagagttaaatgtatgtaagattgattctgattctgaagtcttaactgccagcagaaaaactccatactgttcattgtaaaactaaaagtgaggaaggctcgtgggtggtgaacctctgctctgtaatactgggaaagtactacagaggggaaccatttgagggatacatgaggagagagtaaattgaggtttggggattataaattcaggcaagagaaccttatagatatcacagtcttgagggtcaaaaaaaaatacttaggaagctagccatggaagcttcttgcctctgacccagcccactttcccagcctacctctgggccttagctgctaaaaagcttctctggcagcggagctgcaggcctgaggaaacatgctcagtcatgcacatgtgttgacccatgtttcagatgcagtctgatgccaggtatattgttagggaaagaggaagaagggtaaactgagctagcccctggggctgagtactcctgcagggctggaggaacaggttcttagaagatgattcaccttggaggaagctggggaaagtggttagggagggagaggaggaagactgagaaatctctgcatccccagaactcagcaacccagctcttttatcatgaggagaggtagccatgctgactcatgaacaggtggaggaaaggggttgcaggtgaccagcatcttcaatctagttaccaccagcttggctagaattttattgaacgcaacttgctagttatgacagagaggaccagggtgagaactaatgctcaagagagcaagattctgtaatcctcttgccctctcacatcacaaattctgatatgccaaacatttggcccaatgagaatgactgatagacttgctgatgtgcatgtggggggatgaggtgtgtatatgcctttctcctgactggccattcagtgttcaggctgtcattcaaattggataggagaaagttggtgaggaaggaatggagagagcaggatccctggactccctggtccccaaactccttgactgtcacttgtaattgtatataatttttgtgtttcttgctccatttcctcatgctgtcatccttaaagtccatctgggaaggggaaaatgctgaacaccattgtatagtttcttcaactgtcccagccatgttgtacatagatatgtcatgttattatatatataaatatatatataattttgtacgttttcttcatctccgatcttctcaaattctgtactttttttcttttctgtctgagctgccttctctatcattcagcttgagtcctcaagactactggtcacaatgagtctgatttttaggaaggaataggaggagcagggaaatcagaaaaactgttggtctcactctgtctctctacctggtcatcttcaaggctaagaaaacaaacaagctacattctgtatttgccagtttccacagcatgaagtacatagcttccttagcaaggagtggtcattccaaaatccaaatgcaaattgctttgattaaacctagattattaaatccattcagaacagcatgtgtgtggtctggttctggcctccacacagtcaccacctcatctctgtgctacctcagtctttgcaagtagctgtggccatgcctctgaaacagcctgctctgagccaggcagcttacccacctggaaacctccagttattttgatcttatctaaagaattatttttctatgtttgttatccatggatatcccagaaaggcagataacgttgtttcgtggataggaaaagactgaaattctattttttgattttttttgcaactcccttatggataggattgagacatgccaggtagcctaatggttgttaaatgtggaggaatcatggggtagagactgggttggagttcagggtttttttcccctattacttgacagtgttgttttttttttttttcttctgtgttcgcccgcagtggccaagttgaatgatgctgcccggggctctgccagatcctgagacgcttcccctccctgccccacccgggtcctgtgctggctcctgccccttcctgcttttgcagccaggggtcaggaggtggctcgggtgtgggctggagaggcagaagccctttcctgttggtgtcccagcacatggagccccttgggctgagcaccaagaccttgaaccttttttgttttaccttttttccaaataacagttgggagaaatatcaatgaaattctgggggtgggggtggggttgaaagggtggggtgggagatatggaggagtatgaattagggcttggagttggtaaaaacattcctgactatccttcttaaccacgtggctgatgtggggtaggtatgaggggaaggaagtggagtagcctaatgaaaaggggttctagttgagctctgtagataaatgccttgtttcagtgtggttggagacctggtgtcagataaaagaaactccatccgcacagacagatgcaaacagctcctctagttctgcagagctagttgagaactcaacattaatcattttaaaaagtactgtccttgaaatagatttgctgtgggaagaagggcagtgagtgtgggagaaaggagccgctgtaaccagacacatgcacgtgatcgggatcctctaagcacta

SEQ ID NO: 92956 - DNA, 1262 bp, Homo sapiens
cgtcacgggcaagggccgccattttgactgagcaaccctagtgacaggagccgaagcagcagcgcaggttgtccccgtttcccctcccccttcccttctccggttgccttcccgggccccttacactccacagtcccggtcccgccatgtcccagaaacaagaagaagagaaccctgcggaggagaccggcgaggagaagcaggacacgcaggagaaagaaggtattctgcctgagagagctgaagaggcaaagctaaaggccaaatacccaagcctaggacaaaagcctggaggctccgacttcctcatgaagagactccagaaagggcaaaagtactttgactcaggagactacaacatggccaaagccaagatgaagaataagcagctgccaagtgcaggaccagacaagaacctggtgactggtgatcacatccccaccccacaggatctgccccagagaaagtcctcgctcgtcaccagcaagcttgcgggtggccaagttgaatgatgctgcccggggctctgccagatcctgagacgcttcccctccctgccccacccgggtcctgtgctggctcctgccccttcctgcttttgcagccaggggtcaggaggtggctcgggtgtgggctggagaggcagaagccctttcctgttggtgtcccagcacatggagccccttgggctgagcaccaagaccttgaaccttttttgttttaccttttttccaaataacagttgggagaaatatcaatgaaattctgggggtgggggtggggttgaaagggtggggtgggagatatggaggagtatgaattagggcttggagttggtaaaaacattcctgactatccttcttaaccacgtggctgatgtggggtaggtatgaggggaaggaagtggagtagcctaatgaaaaggggttctagttgagctctgtagataaatgccttgtttcagtgtggttggagacctggtgtcagataaaagaaactccatccgcacagacagatgcaaacagctcctctagttctgcagagctagttgagaactcaacattaatcattttaaaaagtactgtccttgaaatagatttgctgtgggaagaagggcagtgagtgtgggagaaaggagccgtgagcgtggggaaccccacagagcccaaaggactttttcagtattcgaaataaacaaaacaaaaacccatgaaaaaacccaacccagaaaaaaacacggcagaccacgaagcaaaaggggg

SEQ ID NO: 92957 - DNA, 2494 bp, Homo sapiens
cgtcacgggcaagggccgccattttgactgagcaaccctagtgacaggagccgaagcagcagcgcaggttgtccccgtttcccctcccccttcccttctccggttgccttcccgggccccttacactccacagtcccggtcccgccatgtcccagaaacaagaagaagagaaccctgcggaggagaccggcgaggagaagcaggacacgcaggagaaagaaggtattctgcctgagagagctgaagaggcaaagctaaaggccaaatacccaagcctaggacaaaagcctggaggctccgacttcctcatgaagagactccagaaagggcaaaagtactttgactcaggagactacaacatggccaaagccaagatgaagaataagcagctgccaagtgcaggaccagacaagaacctggtgactggtgatcacatccccaccccacaggatctgccccagagaaagtcctcgctcgtcaccagcaagcttgcggggtaacctgagcccccctctcctccccttcctcaaccactggacgtttatatattataggcagggatgaaatgggcacctagtcagatcttctcagcttgctagccagaaatgactgtgattctgctgggggctgctgagaaggtaatgtaggttgaaaaggggctctaagtttatttatttcgttagattgacacttccacacactccctgtagtccaggtagggcccagaaataggaaaggctaggattggataatgctgcaaatgctttttttgtgtgagaaactggagagatgtgatttctccttttgggagagaatgtcccaaaattgattaggctgagccttgggaatagtttggcaggtttaacatcccaaggctaacctaacgtagttgggaaaggtagattgaatgagacatgttttctgtgcttctaagtgttctgtcccttaggctgctattgcttcatgtttccattatggcaggtttagagaatccttaaaaagaaaaattgacttgcttgcctaaaactacagtgcccccttagcctccattacttagtatctcttacagtttgctctggctctcaaataatataaagattgatgaacattattcacagaaaatgggcaccttctctctctcttccagcatgttgcttttgaaagtatcatgggatagtgggacgagcactggtttaggagtcaagatatctgggttctcactctactcagtcccagcagagctgttgtataaccttgattaagtcatttagcctctctggatttctatttcctcatctgtaaaatagagttaaatgtatgtaagattgattctgattctgaagtcttaactgccagcagaaaaactccatactgttcattgtaaaactaaaagtgaggaaggctcgtgggtggtgaacctctgctctgtaatactgggaaagtactacagaggggaaccatttgagggatacatgaggagagagtaaattgaggtttggggattataaattcaggcaagagaaccttatagatatcacagtcttgagggtcaaaaaaaaatacttaggaagctagccatggaagcttcttgcctctgacccagcccactttcccagcctacctctgggccttagctgctaaaaagcttctctggcagcggagctgcaggcctgaggaaacatgctcagtcatgcacatgtgttgacccatgtttcagatgcagtctgatgccaggtatattgttagggaaagaggaagaagggtaaactgagctagcccctggggctgagtactcctgcagggctggaggaacaggttcttagaagatgattcaccttggaggaagctggggaaagtggttagggagggagaggaggaagactgagaaatctctgcatccccagaactcagcaacccagctcttttatcatgaggagaggtagccatgctgactcatgaacaggtggaggaaaggggttgcaggtgaccagcatcttcaatctagttaccaccagcttggctagaattttattgaacgcaacttgctagttatgacagagaggaccagggtgagaactaatgctcaagagagcaagattctgtaatcctcttgccctctcacatcacaaattctgatatgccaaacatttggcccaatgagaatgactgatagacttgctgatgtgcatgtggggggatgaggtgtgtatatgcctttctcctgactggccattcagtgttcaggctgtcattcaaattggataggagaaagttggtgaggaaggaatggagagagcaggatccctggactccctggtccccaaactccttgactgtcacttgtaattgtatataatttttgtgtttcttgctccatttcctcatgctgtcatccttaaagtccatctgggaaggggaaaatgctgaacaccattgtatagtttcttcaactgtcccagccatgtggagatccctaccatgtggagagccacta

SEQ ID NO: 92958 - DNA, 1063 bp, Homo sapiens
agacctgcggtgtaaatacgtggacgtggtgcttggacacgcaggagaaagaaggtattctgcctgagagagctgaagaggcaaagctaaaggccaaatacccaagcctaggacaaaagcctggaggctccgacttcctcatgaagagactccagaaagggcaaaagtactttgactcaggagactacaacatggccaaagccaagatgaagaataagcagctgccaagtgcaggaccagacaagaacctggtgactggtgatcacatccccaccccacaggatctgccccagagaaagtcctcgctcgtcaccagcaagcttgcgggtggccaagttgaatgatgctgcccggggctctgccagatcctgagacgcttcccctccctgccccacccgggtcctgtgctggctcctgccccttcctgcttttgcagccaggggtcaggaggtggctcgggtgtgggctggagaggcagaagccctttcctgttggtgtcccagcacatggagccccttgggctgagcaccaagaccttgaaccttttttgttttaccttttttccaaataacagttgggagaaatatcaatgaaattctgggggtgggggtggggttgaaagggtggggtgggagatatggaggagtatgaattagggcttggagttggtaaaaacattcctgactatccttcttaaccacgtggctgatgtggggtaggtatgaggggaaggaagtggagtagcctaatgaaaaggggttctagttgagctctgtagataaatgccttgtttcagtgtggttggagacctggtgtcagataaaagaaactccatccgcacagacagatgcaaacagctcctctagttctgcagagctagttgagaactcaacattaatcattttaaaaagtactgtccttgaaatagatttgctgtgggaagaagggcagtgagtgtgggagaaaggagccgtgagcgtggggaaccccacagagcccaaaggactttttcagtattcgaaataaacaaaacaaaaacccatgaaaaaacccaacccagaaa

SEQ ID NO: 92959 - DNA, 1257 bp, Homo sapiens
ctactggatccttttctggagcaaaagtactttgactcaggagactacaacatggccaaagccaagatgaagaataagcagctgccaagtgcaggaccagacaagaacctggtgactggtgatcacatccccaccccacaggatctgccccagagaaagtcctcgctcgtcaccagcaagcttgcgggtggccaagttgaatgatgctgcccggggctctgccagaggctccgacttcctcatgaagagactccagaaaggggtatggggcatagtctcttaccctctttctttggagctaaaggaggttcttcgaatgaagtctgtagaggttctactggatccttttctggagcaaaagtactttgactcaggagactacaacatggccaaagccaagatgaagaataagcagctgccaagtgcaggaccagacaagaacctggtgactggtgatcacatccccaccccacaggatctgccccagagaaagtcctcgctcgtcaccagcaagcttgcgggtggccaagttgaatgatgctgcccggggctctgccagatcctgagacgcttcccctccctgccccacccgggtcctgtgctggctcctgccccttcctgcttttgcagccaggggtcaggaggtggctcgggtgtgggctggagaggcagaagccctttcctgttggtgtcccagcacatggagccccttgggctgagcaccaagaccttgaaccttttttgttttaccttttttccaaataacagttgggagaaatatcaatgaaattctgggggtgggggtggggttgaaagggtggggtgggagatatggaggagtatgaattagggcttggagttggtaaaaacattcctgactatccttcttaaccacgtggctgatgtggggtaggtatgaggggaaggaagtggagtagcctaatgaaaaggggttctagttgagctctgtagataaatgccttgtttcagtgtggttggagacctggtgtcagataaaagaaactccatccgcacagacagatgcaaacagctcctctagttctgcagagctagttgagaactcaacattaatcattttaaaaagtactgtccttgaaatagatttgctgtgggaagaagggcagtgagtgtgggagaaaggagccgtgagcgtggggaaccccacagagcccaaaggactttttcagtattcgaaataaacaaaacaaaaacccatgaaaaaacccaacccagaaa

SEQ ID NO: 92960 - DNA, 865 bp, Homo sapiens
cgtcacgggcaagggccgccattttgactgagcaaccctagtgacaggagccgaagcagcagcgcaggttgtccccgtttcccctcccccttcccttctccggttgccttcccgggccccttacactccacagtcccggtcccgccatgtcccagaaacaagaagaagagaaccctgcggaggagaccggcgaggagaagcaggacacgcaggagaaagaaggtattctgcctgagagagctgaagaggcaaagctaaaggccaaatacccaagcctaggacaaaagcctggaggctccgacttcctcatgaagagactccagaaaggggtatggggcatagtctcttaccctctttctttggagctaaaggaggttcttcgaatgaagtctgtagaggttctactggatccttttctggaggttttgttgttgaacagaagtagaggcgaatttgaaatttgaaaagagcaagtcaaattaatgtaaatccctgatgtggtatcaattccctcctgatttcccatgtaggaaattaaggcctaaattggagcatttgggtgtgtggggaaatgagggaaagatgttagaaactgaaatgcagactgcccccaggcatttgcctgtttgaatgttggaggttttaggattgtgcactttttaagcattagagataaattttgggatgcatcatttcagaagaagatcaaaccatctctcctacagaaataaatcctcaacttgaaatgaattttcgcttcttccctcatgtgtgtatcccttcttcctcgcttctacaaatccccgctctttcagctctctatgctctttctctctgcttactttgcctttctctcgtccctccg

SEQ ID NO: 92961 - DNA, 588 bp, Homo sapiens
cttgaggactctacccacggctaaggtcttcatttccctcccaccgaaccttgatttcaaggtggcacccagcatcctgaagccaagaaaggtgggcctcgacctgtgactcacacccagtggacagtgctgagcacggggtcagggctggagggcacaggcagagggcagctcccaggctggctggcaccccaagggaagagctggtctccctcagaagccccttcctccacagacttctgatcatctccctcttctcccctcctttcacaccgaggctcctgctctcctgtgcctccgaggcccccagctggaagtgccttgttgcctctgccctttgaagtcggaacaattcctagcacctgtcggaaggtcaaggccaaaggcaaattcaaggccagactgtgacaaacccaggactgaggcctgccccatgaagaggctgagccccctgaaacccctgccccttgttggtacattccagagacgcaggggcctgggggatatgaagctagggaagcccctgcttcgattccccactgcccttgtcctggatccaacaccaaataaaaagaaacaagtgaagta

SEQ ID NO: 92962 - DNA, 402 bp, Homo sapiens
cttgaggactctacccacggctaaggtcttcatttccctcccaccgaaccttgatttcaaggtggcacccagcatcctgaagccaagaaaggctcctgctctcctgtgcctccgaggcccccagctggaagtgccttgttgcctctgccctttgaagtcggaacaattcctagcacctgtcggaaggtcaaggccaaaggcaaattcaaggccagactgtgacaaacccaggactgaggcctgccccatgaagaggctgagccccctgaaacccctgccccttgttggtacattccagagacgcaggggcctgggggatatgaagctagggaagcccctgcttcgattccccactgcccttgtcctggatccaacaccaaataaaaagaaacaagtgaagta

SEQ ID NO: 92963 - DNA, 425 bp, Homo sapiens
ggcaggccttgcttcctgcctgtctgctttcccacgagagaagtcagagatgcagtaggcacagtggctcacacctgtaatccctgcactttgggtggctgaggtgggaagatcgcttgactccagaagctcaagaccagcctggacaacatagcaagaccccatctctacaaaaatacaaaaattatacaggtgtggtgttgtgtgcctgtagtcccagctactcaagaggctgaggtgggaggatcacttgagcccgggaggtcaaggctgcagtgagctgtgattgcactactgcactccagcctgggcaacagagcaagaccctgtctctaaaaaaaacaaaaatgtaaaccagacaaaagcacaaaacagtgacaggatgcacgcctgggtgatcagggaagacgcagccatcctccagc

SEQ ID NO: 92964 - DNA, 347 bp, Homo sapiens
ttttttttttttttgagacaatgtttcactctgtcacccaggctggagtgcagtggtgcaatcataggtcactgaagccttgaactccagggctcaaactattctcctgccttagcctcctgaataactgggactacaggtgcacaccaccatgctgggctaaattttaaatttttagtagagatggggtcttgctatgttgcccaggctggtcttgaactcctggttttagacttcagcctcagcatgccaaagtgctgggattacagggatgagccaccatgctaggccaaactcaaattctttttgaggctagtataatgtagatatcaaaaattcaaagacag

SEQ ID NO: 92965 - DNA, 406 bp, Homo sapiens
acgatgttaatactttaatgccactgaagtgtattctaaaaatggttaagatggtaaattttatatgtatttaccacaatttaatgataacaataataataataaaaaggtcactggctagagttgttcatcctccaactaaaccattcttcttaatgagttaaattctccattatacggttaggctgtgtccccacccaaatctcatcttgaactgtagctcccataattcccacatgtcatggaaggagcctggtgggaggtaattgaatcatgaggcacgtctttcctgtgttgttctcatggtagtgaataagtctcacgagatttgattttttttttttttttgagacggaatctcgttctgtctctaggctggagttcagtggtgcgatcttgattcact

SEQ ID NO: 92966 - DNA, 483 bp, Homo sapiens
catttaaattttgaggaaaactgccagcaccattgaaaacaaaacaaacccaaagttgactggaatcttaaagaaacacagtgctcctcaagttttcaaaatgaattacctgattcactgaaaacgagatgtcctacttatgctttattgagaaggaggcttttcttctgatatttcctagggggtcttaagaaatagttgagagccctctggtagcagtatctgttgtcagtctattcttaagactgaagacaaatgatttcttaaaagagcccgcacctaaatttccagtttcatcaactatgctatttttgaaagctactgggttaagcgttgacatctcttatctattggcagagactggggaccattcagtgacatgaggcagacaaacagtgacccctgcttctgcctccacaggccaatgaagaaatcattctggttgggtcactggcaatgactgacaaactttgagccttcatt

SEQ ID NO: 92967 - DNA, 331 bp, Homo sapiens
aaaaagtctagaaatgtcttcggcaggattaaaatataaaaatatagctatataaaacttaagtgatgagagaaaaaactaaaggagataggagattattttaactttattacctcatctactcatacaggagctttgccagataaacattatattaacatttcatcactcctgaatcaacagtcatcactttgtcatataacaggttcccacttgttttctgatttagattttagattcaaatgtttatcttaaggctaatgtaccctagtaggatgtaacatcagtaacattcagaacatttttgaaaaaataaagacatatctgattc

SEQ ID NO: 92968 - DNA, 509 bp, Homo sapiens
gagtgaatgaaatctagtgaataagtagagaggtggaagggttggtcttagaaataacttggcagatttggtgttgggaagatgaggtagttctcttctggttgcttccatcttttcagtagaataagaggtaaggggaagggtttgtggatgtttttaagagagcagaaggtgtcagacatgagggagtgaaagaataaactgattaaggaaatgtagagtagttactggggagtgctgaaggctccatgtgagacaagttaaaatgggtatgtaggtttctccagttacattctgctgctcagatgtagccatggcctaagtggagaattgaatttaactagatgagtatgacggaggaacagaaaggcaaaggggccatggcgtatttaaaggaatgatgactgtgatgtttctcgaatctaagctaggcaagatggaagataagaacgtgtggtggttcaagagcaatcaattctactaactgattatggggccaatggatgaag

SEQ ID NO: 92969 - DNA, 182 bp, Homo sapiens
ttcaacagtatgctgtaataaaagttatgcaaatgtggtctctctctttctcgaaatatcttattgtactttactcacctattttcagcccacagttgactgtgtaaagtgaaactagggataagaggggactactgtacatatatatagatatgcatacaatatgcaaacatattcattat

SEQ ID NO: 92970 - DNA, 480 bp, Homo sapiens
aaataaaaatcacagagattgtgatttccttatggttttgtgggtaatggtggagtttaaacttacaacgaagtttctggtgacatgtttcctagttttcacagaaaacattctttttttttttgagacagaaagtctcactgtgtcgcccaggctggagtgcagtggtgtgatgtgtcggctcactgcaacctctgcctcctggattcaagtgattctcatgcgtcagcctccaagtagctgggattacaggcgcccaccaccacgcccagctaatttttgtatttttagtatagatggagtttcaccatgttgaccaggctggtcttgaactcctggcctcaagtgacccacctgtctcagcctcccaaagtgctgggattacaggcataagccaccacacccagccaaaaacattctttataatgatacaagtaatataccagacaagaaattactcagtgtactatgtgagattaa

SEQ ID NO: 92971 - DNA, 360 bp, Homo sapiens
aaggacaggctaccgtaagggcagcctcagagggataagctgggaaggcgcaggatgatgtatccttactgtgaaattgaatgggttagggagttcctcccagcccttaggaagagcatccccaagcctgcccgccctttcttgggttcagcgtgtaataatgaaattaaaggatggcagagccctcctctcttctaatcttcttcgtattaagccccaggattaattagcgtgtcagcccaggtcatttatatccaagagccctgccccatttgattctcagcccatggactggggtgttgtgcctgcgccaaacgtgactgccagagctgtgccagtttgggcggaggatgggaggac

SEQ ID NO: 92972 - DNA, 819 bp, Homo sapiens
  misc_feature (21)..(22): n is a, c, g, or t
  misc_feature (800)..(800): n is a, c, g, or t
ggtgactctagcaggatccgnngacggtaccaacacatgaactgtctaatcacagaataggagcattactatgggtattttctccttttcttttagcttatctaaattttgtacttctttgacagactcatattactagtgtaatttttaagaggatagaagaaaaattccctactatttcataagactttgaaggatgttaatgtcttagtttagggaaccaatatatctgaggccatgattcctcaaactacaaacactacattagcaagagacatttccaaaggagtcaagaatttttctagttgccccccagactcacacacagtaccctgctgacttattcatctgtatgtttccagaacctcgcacaatacctgataagtaaacataaatgcttagagaatgaacaactacttatatttacatagcactctatcttgtatatagggagttcatgtataacatctcatttgatcccccaataaccttgtgaagtgggcataaacatttccatttagaagcaaaaaacttgacactggagaattagatcttagggttactaaactaacaaatctcagaaaagagaatgcataacgttgtcaagtaataagttttatgctacaccacaaagatattaaaatgcatgccaagtgttcattcaacactaaacatttattgaagagccactaaatgccaggtacctgtctgtgtatggggaaatgcagcagtgaacaagtgccactaaatcccttccctgccctcatgaagcttatattcctgttggtaccgtcgacggngatcctctaatcacccagc

SEQ ID NO: 92973 - DNA, 873 bp, Homo sapiens
aagcgctgggattacagatgtgagccactgcacccagccctcttgatttttctgattagcagtttcaggtggtgatggctacctaactagtatagcattatagaatttatcatttctgagtaccttttttattcttagactttcatgtgtagcaattttatgtttaacttttcattgactatgtttgtaaaagtaaaatttctctaatttgttagaatttacttgtggggaaggagaggttggagtggaacatagtataacccatatataagatacacgtggcaaatatctttttttctaattctttttagtttatctattagttaatgatagcatgtatttcagaatagaggctaagaaccatatagattttaaagatagcaaaatttctggcaagaaacattatatctttttttcatgggtttagcacttagttttagaagaatttgtgattgtttagtctgtgattctgattcagagggaaacctgtctaaaccctgagcaaagaaagaactgtatttgagcatagttctttacatgttttattctgtagccaaagtatatcaggatatcttagccatgatattcatcaatagaattaactcctatgttgtgttagtggtataccagatttgtatgtatatagttgtagaatacattatttgatctctaaaacatagttctgaatgcctttgattcacagaaagaagtctgtgatgaaataaacttgttttgatttttctgtactctaaatcttttaagtaagtcttctatatttgctgttttattttaatgcaaataaagctttcctttgacagtgaccttggctcagtttagggattgattctgaatataggagacggtaaaaaaaaa

SEQ ID NO: 92974 - DNA, 564 bp, Homo sapiens
aactatgttttagagatcaaataatgtattctacaactatatacatggaaacctgtctaaaccctgagcaaagaaagaactgtatttgagcatagttctttacatgttttattctgtagccaaagtatatcaggataacaacaagtttagtttcagtcacagcacttactttctggtgatatcaaaaggctattcagaaactatgattttcagagatcaatataagtgtattctacagagctatatagcataccaaatctggatataccacgtaagcacagacatagcgagttaattctagttgatgaatatcatggctaacgatatcctgatatactttggctacagaataaaacatgtaaagaactatgctcaaatacacgttctttctttgctcagggtttagacagggtggtgtcgtctctaagtagtacaacgcatccagatgatgctgtccactacggtctgtactgactcgcaatgccttcaggcggcgcttcgtgtatgggcagacgggcctccctaaggttgaggaccgtcttgcggttggctcattgcttacgg

SEQ ID NO: 92975 - DNA, 227 bp, Homo sapiens
taaaggtgtatgccaacttagtggtagaaaaaaggaaggccaatatgggacaccgaagctaataagacatgagtaggattaaattttcagtctagtaacacatgaggaatgcctgtggcaaagcaagaccaagataaatgacataagaagacaaataaaattgcaacttcactgggaatgagatatggtagttgaatttgaagattctgccactatgtttcacaaaa

SEQ ID NO: 92976 - DNA, 418 bp, Homo sapiens
tgggctccacccactttcatgagtttcatcaaatactggatctactcaagggtggagagaaaaggcaactttcaaaaaggagtatgttattaaatgaggcatttactatactccttcctaagagcaccagatggggaacatgttttctaaactagatctaggaagtggaatgtggaatcaatccgtcctcctccccttaagggctaaccactggttaatgaattaaaaaaacaagactaaaaaacaaaccccacacacactcccccccaaaaaaaagaggagggaaaaaaaacaaaacaaaacactaagatgtcccagattactctccagagtggaaccagggagcagcttcaacaattccaattagtctgttacagagtcatccacaagcatgccttgcttttaaacaaaacaaaca

SEQ ID NO: 92977 - DNA, 188 bp, Homo sapiens
tttgttatggcagttagtagtactctattttatgttccattaaaaattgatacatgaatattttctccaaggttctatattgcctactttacagctatagttgaatatctcaaaggtgtctcaaatggcatgtccaagcctgaatttgtgatttcaccagcttcaggttaatcctgtgctctttatct

SEQ ID NO: 92978 - DNA, 470 bp, Homo sapiens
cgatctgcccgcctctgcctcccaaagtgttgggattacaggcgtgaaccacctcgcccagccaagaaagctttcaaactttcaagaaacacaatccccatgctacagaaagagatccagagcatgggaaaaaatacagaaaatgatcccactagattttaggaaggcagcatgactatgactggaaaaccctgaccacggggcgtggaagaggaataataaaacaggggatcctttcccttggggtacgaacatcatgaagacaggaggctctggagagtgagtcccagcttgaccatttcatagtgataccactttgaccaagtgactttcctctgtgatacccccgattgtgagggttcaaggaaataacccccatataaagcacttagtatcaggtgagcaacaaaatattgactggctttagggggaggactgtccatgttcccttaaaatatgtgaaaatctgc

SEQ ID NO: 92979 - DNA, 449 bp, Homo sapiens
ggacccaagcaaagaccctttcattccatccacccagtgagcatggcagcctcctatactttaggaattacatgaatgtttgaagatagcagcccccaccagccgtctttcccttccctccaaatcaagggagtttcagttatgttggaaatctctggacaactcagtggtggagatgcaaaccttcctaacattaggaaggaaaatacctgccagcctagaagagagaacataatacggcttgaaatgaagcttttaagtctgacaatttatgtacagccctaaatctcccctgaccacttgttcaactcatgatgtggtgtttaatttaagttgagtcacagctgaatacacaacgtgaaagcagcccggagccccgctggaaagaaagccctcccgtgtgcctgggcgacttcctaggcagtttgtgaatgtggagctccctgcat

SEQ ID NO: 92980 - DNA, 459 bp, Homo sapiens
tgtgcctgtgattctgtgtcaccttatccctgaagactcttgtaatcattaccacaatcaaaatacaaactatttcaacaccacgaagatctctctcatacagtccctttatggtcgtccctttctttcccccacaccatccctaaccctttgcaaccatcagtctgttctccatttctataattttgtcgtttggggaatgttttataaattggtcctcacagcttgtgaccttctaagattagctcaccatcccccccacccccccaccccacccaactcagcagaatgccctagagatttatccaagttattgcaggtatttctagtttgttcctttctgttactgagttctacactatgggtgtaacacagtttgtttaatcattcagcattcacctatcatacattttggttccttctttttttgggcggggggagtgcctattacaaataaaa

SEQ ID NO: 92981 - DNA, 1121 bp, Homo sapiens
ctggctcagagaacctcttggtagtgggggacaagtgtcctcagggaggaaaatcctcttaagaaataacttgagtgctcgtattagagaataaatgaaaaacaatctatgaactaagcatcggctttataaaattacagtaggctggtatgatggctcacgcctgtagtcccagcactttgggaggccaagccaggaggatcatctgaggccaggagtttgagaccagcctggcctaacctagcaagactccatctcaattaaataaataaacaaacaaataaatgtacaacagaataagttcaaatagaatgaaagaaatgacaaatataataataaacataagaatagaaatgaatgaaaaaaacaaagagccaggagagaaacattgcaaaagtcatttatttgaaaataccactgcaactgacaaaccactgtactcatcaagacaaaaaatgttaggaataaaattggggatgacattgcagctgctgcagagattaaaaagataaagggaatgttataagcaactttctgccaataaatactgaagtcgaaaaagttccaaaattctgtaactaccaaaattgattaaagaagaaacagacaacttgaatagctttgtaactattactgaaatatttccataaggtctagacagtttccaagagagttttatcaatcattcatgaaatagagagttctcatacttagcagactccttcagaaaatagaaagagcgagcacttcttaactccttttatgaggctaatataaccttgataccaaaacaagacaagaacagtacaagaaaggaaaattaaaagtcagtcttattggccacgcatggtggcttacgtctctaatctcagcactttgggaggctgaggcaggcagatcactcgaggttgggagatcgagaccagcctggccaacatggtgcaaccccatctctactaaaaatataaaaattagccgggagtggtggcaggcacctgtaatcccggctacttgggaggctgaggcaggagaatcgcttaaacccagcaggcggaggttgcggtgagctgagatcatgccactggactccagcccaggtgacagagcgagactccatctca

SEQ ID NO: 92982 - DNA, 413 bp, Homo sapiens
ttttttttttgagacggagtctcactctgtcacccaggctggagtgcggtggcacgatctcagctcactgcaacctctgccttccgggttcaagcgattctcctgcatcagcctcctgaatattttttctttattcagtttgactttccatgatttctaaaccatttagtggagacacacaccaaccaacactgtacgtttcacatgcattccttgaagcagaaagcaccctatactgataggcttcccttaccctaggtttctcccctccacacaattctctttctttgctttttttttttttttgttgggaaaatttattcattaattttttcactgacgctgacttttttcaaaagattttattttttggccagacatgggggctcatgcctgtaatccccaatactttg

SEQ ID NO: 92983 - DNA, 347 bp, Homo sapiens
ctcttctgttgttagtttactttctgatgcagtttagagccagtctagcttagacagatagcttggtccatcagtcatttcatgcagtctatttctagtatctttaactccatcccttccattctactcgcctgtcagaatccaaatctgggatcattgatgctgtttgctttttttaggttcatattctgaaaactgaatgctgctggaaaagatcccacaactgaaagttcattgtcttcagcctcagtaatgtccagcagttccccaggatacccccctcttcccttctctgtggcaactgtgtcagaatttccccagtcttctagaacctctgttatttactc

SEQ ID NO: 92984 - DNA, 426 bp, Homo sapiens
atttttgtatttttctagagatggggtttcaccatattgatcaggctggtctcaaactcctgacctcttgatcgacccgccttggcctcccaaagtgctgggattacaggcgtgagccaccacgcccaactgaaaaacgtatttttatatgtaaccaaggggaggagagcagaaaagagacactaacctattgctaggtgttagcagagttaaaagaaattgaaagcatagaaatggaatttaggcaacacacagctgtcattgaagaaaagttttccatcatagtatagatatttttcttgggaaagggactcctgaatattgaacccctttaaagaagagaacttgttgcttacttgttttagtaaagagcacagaactaaatatttgggtgtttcttgatacaggattggctaccagacaaga

SEQ ID NO: 92985 - DNA, 553 bp, Homo sapiens
tggatttacaggcatgagccactgtgtccagctgaaaaatgagtaggaattttctaaatggcaaggagaggcaaagcatgttaatcaaagggagtgtcatatgcaaaggcagaggcataacaaaaatagtgcaaataaatgcctacacatatacaaaaggagagttattgtgggacccatacataattttgttgatttcttgatatgctcatatccattttgtgttgcagtgattctaagatctgtattagtatgtagactttgtgaacaggtaaacatgtttaagaattttttaagacatggctgtattagatatcgaaattcctctcttcattttcatatctttactttggaattcatatatgccttttgatgttatcatctgacttgtttctaatgaaatttagccgcttaggcaggacgtggattttaggtttctgcttagtgttttggcatctggatttgggattacttagcatttttaatttactaaaataaccaccaacttacactcagttgaaatatgaacatgtcggtttcacttgagcttggg

SEQ ID NO: 92986 - DNA, 814 bp, Homo sapiens
gacattatgagtatttgggttacagggacaataacttgtttttctctgcagtcctgtatatactaatatgaacaggagacaggaaaatactgattagaagagggcagttccccagcaaaggtggaatgatgtggtagagaaagagaggagggatgtctggacactgggccggcgacagtcaggagcagagaccggcagctacgtggcccaactccaggggaagaccaccttcccactccatccccctcttcctgctccccatccatctcgctgagagcccacctccaccactcaataaaaaagaaaaagaaaacaaaaaaaaaaaaaaaaaaaaaaaaaaaaaaaaaaaaaaaaaaaagagagggggggggggaaaaaaaagttctcccgggggggggcaaaggtgtaggggagcaccaagttttgtgtgagaacaagaggggggccccaaaggacgagggcgcataataaaacgaaaggagaaggggacgcagagatataaacaaaagcgagagagagaggagaaaacacgagcagaaaggaggaccaactggggaggaaacagacaacaacaagaagggaggggagagaagcacaaggggacaggaaaaacaaatccccgcacggcaggaattaaaacaacgagcagcgaaaggggagagataaacacaaaaccaagccaagccggcgcgagagatacggcggggggagaacaaaaggagggcagcaaaaaacgcacggggagatgcagcagaagaaatagtcgggccgacagagaggaaaaagacgatgaaaaaacaaaaaattataaccc

SEQ ID NO: 92987 - DNA, 1563 bp, Homo sapiens
cttggaccttggccctcgctttccaggatgggtagggtggaagacgggggaacaactgaggagctggaggactgggacccaggcaccagtgccctgccagctcctgggatcaagcagggtcccagggaacagacaggcacggggcccctgtcccaaaagtgctgggagcctgagcctgatgctcccagccagcctggcccagccctttggtccaggggtcgggcccgcactcaggccttggctggcggctcctcactgcagcagctggaccccgagaacacaggcttcatcggtgcggacaccttcactggcctggtgcacagccatgagctgcccctggacccggccaagctggacatgctggtggccctggctcagagcaacgagcagggccaggtctgctaccaggagctggtggacctgatcagcagcaagcgctccagcagtttcaagcgggccattgctaacggacagcgggcactgccccgggacgggccgctggatgagccaggcctaggtgtctacaagcggtttgtgcgttacgtggcctacgagatcctgccttgtgaggtggaccgccgctggtacttctaccgtcaccgcagctgcccaccccccgtgttcatggcctcggtcactcttgcccagatcatcgtgttcctgtgttacggggcccgcctcaacaagtgggtgctgcagacctaccaccccgagtacatgaagagcccccttgtgtaccaccccgggcaccgtgcccgcgcctggcgcttcctcacctacatgttcatgcacgttgggctggagcagctggggttcaacgccctcctgcagctgatgatcggggtgcccctggagatggtgcacggcctgctccgcatcagcctgctctacctggcaggcgtgctggcaggctccctaaccgtctccatcaccgacatgcgggccccggtggtgggaggctccggcggggtctacgccctgtgctcggcacacctggccaacgttgtcatgaactgggctgggatgagatgtccctacaagttgctgaggatggtgctggccttggtgtgcatgagctccgaggtgggccgggccgtgtggctgcgcttctccccgccgctgcccgcctcgggcccacagcccagcttcatggcgcacctggcaggcgcggtggtgggggtgagcatgggcctgaccatcctgcggagctacgaggagcgcctgcgggaccagtgcggctggtgggtggtgctgctggcctacggcaccttcctgctcttcgccgtcttctggaacgtcttcgcctacgacctgctgggcgcccacatccccccaccgccctgaccggctacctgaggctgcacaggccagggctcgggcatgtggtggccgcccaccaggggccttcacgtctgccctttgtgaacggacgtctcagggctgctgtgccccttgggtgtgggtggcctcaaaggaggccctgtcccagccacccaccccccactcccaggacttgcggtctgagcctttttggataattaataaatattttacacagcacca

SEQ ID NO: 92988 - DNA, 1249 bp, Homo sapiens
ggtgacgcggcccaagcgcggcgccgagcggagcgggcggagcgggccggctggggcggagcggagtcgtccgcagagcagcccctcccggccgcggccgccgaccccggaccccggcccccggccaggctctatggacaggagctcgctgctgcagctcatccaggagcagcagctggaccccgagaacacaggcttcatcggtgcggacaccttcactggcctggtgcacagccatgagctgcccctggacccggccaagctggacatgctggtggccctggctcagagcaacgagcagggccaggtctgctaccaggagctggtggacctgatcatcgtgttcctgtgttacggggcccgcctcaacaagtgggtgctgcagacctaccaccccgagtacatgaagagcccccttgtgtaccaccccgggcaccgtgcccgcgcctggcgcttcctcacctacatgttcatgcacgttgggctggagcagctggggttcaacgccctcctgcagctgatgatcggggtgcccctggagatggtgcacggcctgctccgcatcagcctgctctacctggcaggcgtgctggcaggctccctaaccgtctccatcaccgacatgcgggccccggtggtgggaggctccggcggggtctacgccctgtgctcggcacacctggccaacgttgtcatgaactgggctgggatgagatgtccctacaagttgctgaggatggtgctggccttggtgtgcatgagctccgaggtgggccgggccgtgtggctgcgcttctccccgccgctgcccgcctcgggcccacagcccagcttcatggcgcacctggcaggcgcggtggtgggggtgagcatgggcctgaccatcctgcggagctacgaggagcgcctgcgggaccagtgcggctggtgggtggtgctgctggcctacggcaccttcctgctcttcgccgtcttctggaacgtcttcgcctacgacctgctgggcgcccacatccccccaccgccctgaccggctacctgaggctgcacaggccagggctcgggcatgtggtggccgcccaccaggggccttcacgtctgccctttgtgaacggacgtctcagggctgctgtgccccttgggtgtgggtggcctcaaaggaggccctgtcccagccacccaccccccactcccaggacttgcggtctgagcctttttggataattaataaatattttacacagcacca

SEQ ID NO: 92989 - DNA, 1634 bp, Homo sapiens
ggtgacgcggcccaagcgcggcgccgagcggagcgggcggagcgggccggctggggcggagcggagtcgtccgcagagcagcccctcccggccgcggccgccgaccccggaccccggcccccggccaggctctatggacaggagctcgctgctgcagctcatccaggagcagcagctggaccccgagaacacaggcttcatcggtgcggacaccttcactggcctggtgcacagccatgagctgcccctggacccggccaagctggacatgctggtggccctggctcagagcaacgagcagggccaggtctgctaccaggagctggtggacctgatcagcagcaagcgctccagcagtttcaagcgggccattgctaacggacagcgggcactgccccgggacgggccgctggatgagccaggcctaggtgtctacaagcggtttgtgcgttacgtggcctacgagatcctgccttgtgaggtggaccgccgctggtacttctaccgtcaccgcagctgcccaccccccgtgttcatggcctcggtcactcttgcccagatcatcgtgttcctgtgttacggggcccgcctcaacaagtgggtgctgcagacctaccaccccgagtacatgaagagcccccttgtgtaccaccccgggcaccgtgcccgcgcctggcgcttcctcacctacatgttcatgcacgttgggctggagcagctggggttcaacgccctcctgcagctgatgatcggggtgcccctggagatggtgcacggcctgctccgcatcagcctgctctacctggcaggcgtgctggcaggctccctaaccgtctccatcaccgacatgcgggccccggtggtgggaggctccggcggggtctacgccctgtgctcggcacacctggccaacgttgtcatggtaacgggcctgcccggtggggggcgtggggaggggccccaggtgagcctcaccacttctcgtctgcacacacccatagaactgggctgggatgagatgtccctacaagttgctgaggatggtgctggccttggtgtgcagtgagtaggggccggggggagggccggggggcctctcagcctgcagccagggcacctcccacctgccgcgtccctctgcagtgagctccgaggtgggccgggccgtgtggctgcgcttctccccgccgctgcccgcctcgggcccacagcccagcttcatggcgcacctggcaggcgcggtggtgggggtgagcatgggcctgaccatcctgcggagctacgaggagcgcctgcgggaccagtgcggctggtgggtggtgctgctggcctacggcaccttcctgctcttcgccgtcttctggaacgtcttcgcctacgacctgctgggcgcccacatccccccaccgccctgaccggctacctgaggctgcacaggccagggctcgggcatgtggtggccgcccaccaggggccttcacgtctgccctttgtgaacggacgtctcagggctgctgtgccccttgggtgtgggtggcctcaaaggaggccctgtcccagccacccaccccccactcccaggacttgcggtctgagcctttttggataattaataaatattttacacagcacca

SEQ ID NO: 92990 - DNA, 1474 bp, Homo sapiens
ggtgacgcggcccaagcgcggcgccgagcggagcgggcggagcgggccggctggggcggagcggagtcgtccgcagagcagcccctcccggccgcggccgccgaccccggaccccggcccccggccaggctctatggacaggagctcgctgctgcagctcatccaggagcagcagctggaccccgagaacacaggcttcatcggtgcggacaccttcactggcctggtgcacagccatgagctgcccctggacccggccaagctggacatgctggtggccctggctcagagcaacgagcagggccaggtctgctaccaggagctggtggacctgatcagcagcaagcgctccagcagtttcaagcgggccattgctaacggacagcgggcactgccccgggacgggccgctggatgagccaggcctaggtgtctacaagcggtttgtgcgttacgtggcctacgagatcctgccttgtgaggtggaccgccgctggtacttctaccgtcaccgcagctgcccaccccccgtgttcatggcctcggtcactcttgcccagatcatcgtgttcctgtgttacggggcccgcctcaacaagtgggtgctgcagacctaccaccccgagtacatgaagagcccccttgtgtaccaccccgggcaccgtgcccgcgcctggcgcttcctcacctacatgttcatgcacgttgggctggagcagctggggttcaacgccctcctgcagctgatgatcggggtgcccctggagatggtgcacggcctgctccgcatcagcctgctctacctggcaggcgtgctggcaggctccctaaccgtctccatcaccgacatgcgggccccggtggtgggaggctccggcggggtctacgccctgtgctcggcacacctggccaacgttgtcatgaactgggctgggatgagatgtccctacaagttgctgaggatggtgctggccttggtgtgcatgagctccgaggtgggccgggccgtgtggctgcgcttctccccgccgctgcccgcctcgggcccacagcccagcttcatggcgcacctggcaggcgcggtggtgggggtgagcatgggcctgaccatcctgcggagctacgaggagcgcctgcgggaccagtgcggctggtgggtggtgctgctggcctacggcaccttcctgctcttcgccgtcttctggaacgtcttcgcctacgacctgctgggcgcccacatccccccaccgccctgaccggctacctgaggctgcacaggccagggctcgggcatgtggtggccgcccaccaggggccttcacgtctgccctttgtgaacggacgtctcagggctgctgtgccccttgggtgtgggtggcctcaaaggaggccctgtcccagccacccaccccccactcccaggacttgcggtctgagcctttttggataattaataaatattttacacagcacca

SEQ ID NO: 92991 - DNA, 378 bp, Homo sapiens
ggtgacgcggcccaagcgcggcgccgagcggagcgggcggagcgggccggctggggcggagcggagtcgtccgcagagcagcccctcccggccgcggccgccgaccccggaccccggcccccggccaggctctatggacaggagctcgctgctgcagctcatccaggagcaggtgcgtcggggggtggtctggggagctggcaccgcccccaatgcggccctcctgccgctgagctgagcttgtgcgggaccgagctccccgaaagccccgctcggtacctacctcatccctccacgaccttggtccgtgtgtctgggaccccaggagaggactgactggaccagagctcctggctggagaagggagagtcgggggga

SEQ ID NO: 92992 - DNA, 634 bp, Homo sapiens
gagattaaaataaacaacacaaaatgtatttaaatgagaaattgaaacattaaaaataatattaggtgacattaaaactgtcatagaaataaactgtatatacaacaaataaatcaatgattgttaacttttttagacagtttgaatatcagattataatgaatagcattattagccagtaaaaagagcatataaattattttaaaattccaaataaaaatatttaaaattttgaaattttggacccaaaattatgtcagtaatttcatgaaagtagatctccaatagggtcctatattctagacactatgaaatgacatcagaaaccgtcaattaaagtgtaccccacaagtgataactagctacatacaagtttaattttcgatcaatttgaataactgttgaatttaaaagaaaattgatgctgaggttaatttacagagtcaatgaaatgccaagaagaaagcattgagactgaaaccaaagaaccaaatatcgcataacaaattctatcaacactaacttacatttgtagagagaaaaatctattctggccatatgtagctactaatattttcacatatgattaataaactaatcacattctgcacatcagtgtatcatactgtatatt

SEQ ID NO: 92993 - DNA, 204 bp, Homo sapiens
actcctgagatcttattggaaagctgctgatcaccagtttcaggcgtttctatctattgggagactgccgttgcatggtgccagctgtgaccaattattagcgatacagtgtgacaatagcttgcccatcaccctagggtcgcctgctgttcctggtggggtagggggagccttctcctgtcctgctcatgcctgactagctgc

SEQ ID NO: 92994 - DNA, 367 bp, Homo sapiens
gtgagggccaggggcccttgtgggccagcccctttgccgctatcctttggggggctccacaagtgactcttttatacctccttccacccccatccccaggggggtcagctggacagccccgccccttgctataatagacctgtgtccttggtgagttatttagcactctatgccttagtttccccatctataaaatgggagccccgacagagcctgtctcactgggcatctgtggagagtaaaagaatcactctatgggccgggcgcggttgctcattcctataatcccagcactttgggaggccgaggcgggcggatcatgaggtcaggagttggagaccagcctggccaatatggtgaaaccccg

SEQ ID NO: 92995 - DNA, 830 bp, Homo sapiens
gaacctagcttaggaattgttttacatactagagcttttgtttggttttagatttttttctttttggggagggggtggggtggggaggggaggcaggtagcaaagtactcttcaccacaaagaagttgaaattgaaaaggaaatctgtaggcacttaaatgaaaagcagggcattttgctgatgaggtcaaatgatactgatcaatgggaagctctgggagaggtggctgtgtaaaggagagactgggtgacccagggaagtgtccggagctgaatgagaagttggaatcacatattcctatgttgcagccttcaacctgatactaactcattcttcagacacggagtccaacttccaagtgcttcagggatttttgttaagccttttaagggtatccaaatgaattaactattgtgtttcaccaacgctctagtaattcactttcagtgggcggttttattttcccagatgtgcagattgttcaccatggagctatgagtaattaactcataaaagaaatgtccagatgaatgaacaactgcaaagcacctgttgtcaacagctgatttttgtctccgcgctttgattatgaagagcttgagaatactggaggttgttttcttcttctaaaaccttgtgacacctgctgatttaggttcacatagaatacaatggtaaatagagaataggtggtagagcttgtctttatatctaatgaaagaaaagtgtcaaagtttcagatgaatgtcagatacccaaggatagggctgcattatgactttcatgggccttaggcacttttgcctttgtgggtccgtttctccattaa

SEQ ID NO: 92996 - DNA, 805 bp, Homo sapiens
ctctgcctgctaaggcccagactatgtgcccccaggctcaccggccatggagcacccccactggggccacaggatgagcccaaactcaaaacaatcccccccacccaggtcgtccctgcaggcttagggttcccaacacacctggctcccccctctcctctgtgtgcacaaacacatgcatgtatgcactcacacactgttccctcgcctagaaccctcccacttatgccccttgtcagtccttccaaacccaacgtcaagtgttccctcctgcacgaatccctccctaaccccccaaccttcggtgcctccccagtggcttagtgtccccagcagtgtcttgtgccctggagtgagagtcacccttgggctcggggcagccaggccagggctctgggggacgcataagccgcctccagaggacatcagccatgcagcgtgctgagagatggcatcaatggtccaggagctcattagagatgagccattatctggccagacgctgacacagcggggacccccacaggcctcctgcttcgtgttgtgcaatcagggactcctgtccccctcggcgcccacagtggggtcgctgctggttgccaggcctggggttggagcctgggcttggatctttgcttacgtctgccctgcctcctgcagctcccagacaggcagaccagtgtgaggtccaggggtggaaggcagtgggcagggcagagggtccccacggggtccacaggtgtcctccagccctcacctcgatccagccctgcctgaggttcttgtgatggtttggctggggagg

SEQ ID NO: 92997 - DNA, 256 bp, Homo sapiens
ctctcttgcttcttgcaagccagcctcctgggtccaaacaggggctgccctagatttaggaataaggtcactgagcagccaatggccaaggaacaaaatttgggcaccagccttggatgctaaggcaagagccgccacacctaccaccacagcacccacagaatctgctgagactgacgctggcgtcccaaccagacacttggaggcatagggcatgcccttcaagtctagaaccctgccaggtacctatccctcc

SEQ ID NO: 92998 - DNA, 591 bp, Homo sapiens
agtccccagtgcccttcctgatagtgacctatttgaagagtccaggcaagttgttttgtaggacattccttaacttggatttgtctgattgtctcattggtggtttcaggttaaacatttttgtcaggaattttttataggtgatatggtgtcctcgttatgtcaggtggcacttgataccagtttgtcccattattggtgatttgaagttgtgtctgccggatttctcccttgtcaagttgataccctttcccctttgcagttaataagtagcctgaggggcgatatttgagactaggaatatcgtgtcctcagcagtttgcactctgttcattggtcattcttgactgaattattactaaggtagttgtaaactgattttttctgttgtcattccttctacatttttgatatttcttctgtgaagatgagcctttaaagaaatttgatggaatttcctgatttgatgtatagtaagcatttctgccattattgattttgatgctgaaatgtggcttctgtgttctttgagcatctcctatcagtctttgatcacctccctaccttgtgacagacaagatggcttccatg

SEQ ID NO: 92999 - DNA, 422 bp, Homo sapiens
ttaaagcaagtaagctcaattcctgagttactgttggaagctttccgaaagataaggcttcagtgagagagctggactttggatcagacagacccatcagtctgccttgctctggcctccctagccatgcaggttcttgagcaagctagtgagctcagtttcctttgggtgagctagggacagcaaccccttcagagggtttttctgcagatgaggtcggggaaagggaatgagcatgggctacataggagaacagaggagcccaagacaccttagttttattctccttgctcttgggacttccatttctggaagataatttttccacacctcccaagaatttctttgattcaacatctaaaaaggctgggtttgacactacaaaatttggtaagcagtgattccataaagcaaaccaacaa

SEQ ID NO: 93000 - DNA, 392 bp, Homo sapiens
tccagccaacagcagcaatccgtgacccgtccacttctccacaattgtcccagcaaatgcccttcatagcatagagcagcctcaggaccctgggctgcctgtggctgtgtccccctctgtcaacctggggctgctcctcagcctttctttgatgttcatgaccttgactctttggaaggttacagcctcctttggttacagaatgctcccccatcagcagcgtcaggtcatgcacctgtaggggtctagctccgcctccacgctgcatccttcttgcctcctagcaggtggtccagggcttggctgtgccccattgctggtgatgttctgtttagttacttggtgaaggtggagtctgcttgatttcactgtaaagttacttggtttccgtt

SEQ ID NO: 93001 - DNA, 754 bp, Homo sapiens
atccaatgaaaaccacaaaataaataaaacataattttattaacagattgggcctatgcctagccagggacttgaacaatgttacatgtttatatttgatacatatactctttgttctccattataatttctctctgctataactaacacttttattcctagttataaaaatagaagtcaaaagacttctatttttgccattttatgttaattatttatcatgttctaaccaggtaaaggtggttctatcatgatcaattgtaaataactttgctgagatagtgtaattaaacataagaaaaatttcacattagacatatcaaatagatatctaatgagagaagaaaggtgatcagtcatcttctgagctaatcattttgtgaacgtattttaaattgcatttttaaattaacaagctgacaccataagaaactagaggacctgtttaattgctgaaataattattttggcacatagttgctaagcattgcacatgaacagcaaaaatggtagaagctttagtagctctttctgtcatttctggctgttcctagttcatcctctccccaacccctttgctgtctgtagagagacagcaggtgccatgcttctgctctgactctcgttctagagtcacttcttaccttatgtacacaggaagaaaatatacgtgaatggagagaataattaggacagtgaggtacactggagaggatttaaaagtcacatggagaaaggaagaaaagcaatgaaa

SEQ ID NO: 93002 - DNA, 782 bp, Homo sapiens
atccaatgaaaaccacaaaataaataaaacataattttattaacagattgggcctatgcctagccagggacttgaacaatgttacatgtttatatttgatacatatactctttgttctccattataatttctctctgctataactaacacttttattcctagttataaaaatagaagtcaaaagacttctatttttgccattttatgttaattatttatcatgttctaaccaggtaaaggtggttctatcatgatcaattgtaaataactttgctgagatagtgtaattaaacataagaaaaatttcacattagacatatcaaatagatatctaatgagagaagaaaggtgatcagtcatcttctgagctaatcattttgtgaacgtattttaaattgcatttttaaattaacaagctgacaccataagaaactagaggacctgtttaattgctgaaataattattttggcacatagttgctaagcattgcacatgaacagcaaaaatggtagaagctttagtagctctttctgtcatttctggctgttcctagttcatcctctccccaacccctttgctgtctgtagagagacagcaggtgccatgcttctgctctgactctggaaccagactgcccgagttgaaatcccagctctgctatttaccagcttgagcacctataccactgctctgtgcctcagttcccccatctgtaaaatgagtactgtaattgtaataacttcatagggttgtcacatgcatttaaggaaagtacctggaa

SEQ ID NO: 93003 - DNA, 353 bp, Homo sapiens
agtgcctctctgttcttgagctctgttgctgagaggtacatcaccaagatgcattagcctaatagaaaacttcactaagtccctctgaatggagtccaaagagaatcttacttaaaatgaattctacctgacagcacctgcactacatggacgttaaggacacatacaacaaaattagctagaactgtaggacctgagttcagtcactctacctctcaggatctcagtctccctatttatagaaatgaagtgacttttagataaaagtaatccctaagaaagcagccaccaaaacccagagaaaccaataaactttattagaataaagaagtattatagtttgtaaaacaaca

SEQ ID NO: 93004 - DNA, 256 bp, Homo sapiens
tggacactcaaacaccactggtataaacagaaattggtaaaaaatttttggagggcaagtctgtactacttagcaaatgcatatgccctacggctcagcaatttcaattctagaaatctatcttacagaactacactgtccaatatccaatatagtagccactggccacatgtcatccacccgcctcggcctcccaaagtgctgggattacaggcgtgagccaccgcgcccggccaagccactaaaattttctttc

SEQ ID NO: 93005 - DNA, 937 bp, Homo sapiens
gctcctctcagacacctagctgtagtttgaagtaaataattcaaacaggcctggaccagtgggtcacacctgtaaccccaacactttgggaggctgaggtgggaggatcacttgagcccaggagttccagaccagcttggacaacaaggcaagacccttgtctctacaaaaaatttaaaaattagccgggtgtggcggtgcgcctgcaggtgggcgaatccattgagcccaggaggtcgaggctacagtgagttctgttcgtgccactgtactccagcctagacgacacagagagactctgtctctaaataaataaataaataaatccatctccaggatcctattagacagcacaaaagaactttgatatgcctatttcaaattataaaacatacacgccacaaattttcttcctcttatttagtagtcagtggtatcattaccgtaggaacgccgattttaaagactctattaagcataaattatgttaagacagaatctataacaaattctacgaattcaagagacagttaacctggtcatttccaagcctcaaattacagccttgtcagaattctattgcttgctggtacttcaacatcctctagataagtttcatatactgagttcctagtaggactctgacaccaactcacagttcccaccgggcaatgagctcgccctttgttaggggccacggagcagctccgcccagcgcgctgccccggcccgaccccgggttggcgcggtcagtggtgcacgcgcacccgccccaagtcagcaccttccgagagccatagggtcgtcgcgcggctcaccccgcgatttgcgccgtccacgctggcctctaaagagcccccgatgtgctttcttctcgaaaaagctccctttttaaagccttgcacctacagggactcgggggtgcgtcacaagacaa

SEQ ID NO: 93006 - DNA, 225 bp, Homo sapiens
gccaactgaaaagcagctcataactttgttacataaaagttgaaccagattagtctgatgcaattccaacagtatgtaaagcgtattcaatgtccttgcaacccctaaaagctccaaaaccctaggaaatcaatacccgttaggttactgagatctgtggttacaataggttgagctgtctgaatcatctaaagccaagatgataccaaaaagtatagacatttt

SEQ ID NO: 93007 - DNA, 151 bp, Homo sapiens
caaaccaaggaatgcccaaggccaccagaagccagaggacacgagtgacaacacctccctagagcctctggacagagttcaaccctgctgacaccttcattctggactttcaacctccagagctgacagtgagagaataaatatctgttgc

SEQ ID NO: 93008 - DNA, 241 bp, Homo sapiens
aacccccagccaagccccccgtattcttacaggggcccttttttttgcgaattttaaccaaaatttttattttcccaattagccccaaaaaaaaaaaaaaaaaaaaaaagctaccaccaacgaaactcactgtgataaccattacaatgggaaatgataagggctggcaggcagtgaaaacagtaagcttttcactgaacacagcaaaactcaccacttaatagttttctattttattgaa

SEQ ID NO: 93009 - DNA, 874 bp, Homo sapiens
tactgcttccaaggcagagctcaggcaataatgctcactggctggcagctcacctcctgctgtgcacctggttcctctcaggttcctaacaggccatggaccagtaccggtccatggcctggggattgaggagccctgcgaggaccgccttgtccttttgccttctgtgtgtgggaggttcatttctttcagtaatttctcaggatggacataatgtgtcaagaatctgtcttcactaggcagggcatggtggcttatgcctgtgattccagcactttgggaggccaaggcaggcggatcacctgagattaggaattcgagaccagcctggccaacatggtgaaaccccatctctataaaagtaccaaaaaaaaaaaaaagtcaggcatggtggtaggcgcctataatcccagctgctcaggagcctgagtaagagaatcgattgaacctgggaggcagaggctgcagtgagccgagatcgcaccactgcactccaggctgggcatcagcaagactctgtcacaaaaaaatagaatctgttttcagaggtagcatcattaggaaaaataaaaatacaatactgattcaggacattttatgtcactaaactgctctcctccatgatagtgccacctcctctttaccctcagcaagccaccagtatctcaggtaccttctttctgctatttctactatatttttgatttgccaatttagccaaaaaaaaaaaaaaaaaaaaaaagctaccaccaacgaaactcactgtgataaccattacaatgggaaatgataagggctggcaggcagtgaaaacagtaagcttttcactgaacacagcaaaactcaccacttaatagttttctattttattgaa

SEQ ID NO: 93010 - DNA, 316 bp, Homo sapiens
acagagccgttccaccgaggcctgatggaacaggaagcgggtgtctgcggcaccatcccagaaccagctctgcagggggaccagctggagggggctctgtgttttcctccctgctctaaacagaaagccgtttttctagatgggaatctggatctgttaaaatataatcggtaacgagaccaggattatttatttaagtatgtggaacgctgagggagtgttgtacttcccagctgggctaggagctgcaaacgtccaccatgtcgaggggcacggaaataagaactcgccaccccttcggagatgcctgcatagt

SEQ ID NO: 93011 - DNA, 101 bp, Homo sapiens
ctagtacctttctattctaagcgcaatatagtgtcagtagtgataaaatgcatggactgagtgccagggaagacctggactctgatcctggtcacagcaaa

SEQ ID NO: 93012 - DNA, 354 bp, Homo sapiens
gctggtagaattcttgggccaaagtcactttcttcagaactgcaagtggccttaggtttcctgctgcctgtggttgctgagaccccagggccgttctgcctgcagcccctttcagggtccgtttccctgggacctggagggcttcaccctcagcccccttgggcctgactgcatgcccttcagctggggagtgttctagaatgtttcctgtggtttccctccctcagcctcgtctctcctcccctctcccttgcctgtggagtatagactggctgccagtgtaggggagctgagcggggtccaaggtctggggcctcttgggattcagccccattgtcaccccagcctgccctc

SEQ ID NO: 93013 - DNA, 383 bp, Homo sapiens
aggaatccctgttcttagtgcagtgatatgtatattttaaaattgaaaacagaaagccaaatcctagctgtgggaaaggaaccctgagtctgtgggctatgcggcttctcagaccttgagacttgggtaatatgtcactgcatcttccgaacactgcatattgtctcactgtgtattcagtgtggtttgcccctcatttctcactgttgcctccctacatatggagtgtaccccagtttttgcttacactagcagaagagcactatgtcttttggaaactatagacgtaaatccttagtgatgaaaccaagacaggaaaaaagaattctagcttcagtttttttaagtttaataatttattgtgttaagttaggacaacacag

SEQ ID NO: 93014 - DNA, 349 bp, Homo sapiens
gccctaggtgattctctggcagggaagtcaccaggaaccctccagaaggaagaaatgtctagcatgtcctaggtccccgcacccttgcaaagacccagagatgaagcaatgctggatagaccccacctgcacacagagaagaaaggctgctggagagacatcatcagaggagagagacagtggctctaatccaagaatccaggcaacgtgtgtagggctcagggtggcatgtgtgtgttttcatgcccagcaccaggacctgagcactgagagctttccctacctgccatgggatcctggtatcaaggtgttgcccgaaggtttcagcaccatgtggtcaattgtccat

SEQ ID NO: 93015 - DNA, 436 bp, Homo sapiens
tggcaattccactcctgggaatctctcccatggaaacaaaattatcagcatagaaagcgtaagtacaaggatgtctatgacagcaccgtttgtagtagcacaaaactggaaacagagcgaaaggtcatctgcaagagaatagtgagttacattttgataatctgcaccaaagaatatgatgcgatcatttaaaggaaggaaatagagctctatagccacatgccttggaggtatgcctgtgaagtgttgctcagtgagaaacacagatgtagaaaagcgtagagatgaccaaaccctctgtgtgtgcctgcgtttgcgtatctatgtctatatatgtttagctctgattaggaatatatgtataggtagaaaaatatggattaatatattccaggttactaacattggttcttggggcttacagggtgagcctagc

SEQ ID NO: 93016 - DNA, 247 bp, Homo sapiens
aacaaaagtgaatgataaatagacctagggtgatatgtgcttaaaatactatgcattattttagtttttcattgataatttgaattgtgtgcttgccttgatcttgaaatttaggatcactgataaaatttacctatgcatttcagatagttttttatttgcatataaatatgaaagtacaaaaatatgaaggtgaacactgcttgtgtgtgtgcactaatacttatgtaaaataaattcagaaaac

SEQ ID NO: 93017 - DNA, 171 bp, Homo sapiens
  misc_feature (3)..(7): n is a, c, g, or t
  misc_feature (52)..(52): n is a, c, g, or t
  misc_feature (171)..(171): n is a, c, g, or t
aannnnngaatttaatccatttacattcaaggttattatttataggtgaagncttactcctgttattttgttaattgttttattgtagttttgtatgttctttgttcttttcctctcttattgtttagtattgtggtttgatgattttctgtagtataaagtttgattatn

SEQ ID NO: 93018 - DNA, 751 bp, Homo sapiens
ctttgaagaggaggtcatgagtcctcacttacaggcatgggctctacttctgtgcgaacagggccagggcccccaggaagcctcccagagcctcttccttcctcccaacttagggtgttcaggccccacagactctccagggagtggctgccatgtcctctctggagcaaccatgaagttccctgctgccctcatggcttcagggatgctcgttcacgtcactgggaggggatccttgtgggtcgtgacctcacctgctgcctctgatgaacttcggggcactttttcctccctttgccaaatgacctcactctcaccaacactctgaggattgaaagttgtctgcactgcatgatttttgcttttgagcaagtcaaagctcacaggagtctcacacatgcatagcctgtattaatattacacacaattcctattttcacttttcctatcttcttccaattttctctgcacacttacttactctgcccatccactttctcctgtgaagctgctaatgtgggtttttatttccaggctgatgtgatttccttgctgcaatactagacatgtgctcatcacatgcccacatttttaagaataaagtattttgagcacaatttgctcttcttgtacttgtatgtcagggtggcagctcaggggatcggtttgaaaatttatttgctaaaatgcatgaatatttctagaaattcggtgttataaattaaatgtcttcttgcatcccacaaatttt

SEQ ID NO: 93019 - DNA, 298 bp, Homo sapiens
ccaatttttcattgggcagcattaatcagaggcttaataagagagaaaggagcaagttgaagaatctaagaaggaaacaacgaaggcgtgaaagatggctacagaagcagggtaaatactcaggagtgggattgctggatcatatgactttgaataatgagatgagtacagatgaagacaatgaatatgcagaagaaaaggatagctacatctgtgcagtgtgtctggacgtttatttcaacccttatatgtgttacccttgccatcacatcttctgtgagccctgcttacggactct

SEQ ID NO: 93020 - DNA, 548 bp, Homo sapiens
agttttgaaattgggaaatttgagtcctccaactttgttctttttcaagactgtttttggctgagattcattgcatttgcatttgaactttaggataaacttgtccatttctgtgaaaaatggcagtaggaattttgatagggattgcactgaatctgtagatcattttgatgggtattgccatcttaacaatactgttttccagtcctatgaacatgggacgctttcccatttatttaggctttctttaatctctttcaacaatgttgtgtacttttcagcacacaagtcttgcacctcctttgttcaatttattcctaagtgttttattgattttgaagctattgcacatagaatggctttcttaattttatttttgaattgttattgcaagtgtatagaacagagttctttattatccccatctggcactagcaagccacactgggggcacaaactgtcaccaccacagccacctctaaggttgacagtgggagactgtaggcactaagtgaaaagttgcaacattctcctaaccaaaatttaac

SEQ ID NO: 93021 - DNA, 357 bp, Homo sapiens
tgtgaatgagtgggttagtgcatgaatgagtcgggttattgtgtgaatgagtttgtgaatgggttagtgcgtgaatgagtgggtgggttagtgtgaatgagtgggtgtgtgaacgagtgggtgagttagcgtgtgaatgaatgggttagtgtgtgagggggttagtgtgtgaatgggtgtgtgaatgagtgggttagtgtgtgaacgagtgggctagtgtgtgaacgagtgggtgagtttgtgaatcagtgggcgagttagtgtgtgaatgggtgaattcgtgtgtgaatgtgtgtgaacgagtgggtgacttagtgtgtaaatgactgggtgtgagcgagtgggtgttagggtgtg

SEQ ID NO: 93022 - DNA, 454 bp, Homo sapiens
ggatgtggactggacttctattgatctctgctatagcaagaaaaatactgccttacattattattattggcaaattttgcgtttggaattaaggtggaggagaaattcaagccacctgaaagggaaaatagatttcatatcatttaggaaggaacaaatcctggcactgtccttggctgttatataaatataaatttcctttaataagctggaatatcttggcaaaatgcctatgggaaaataaatagctatagattctaataataaatacaattagtgtttttaaggagggtagaggaggtaattaagtctatttcattatgtcggggaaagacttgagaaagatgggccttatggaatacataaggagaggaggaaggagaagtaagtaaactgtgagcaaagccaggctttggggcaaatacatggcttatgagaattcctggggggtgtc

SEQ ID NO: 93023 - DNA, 402 bp, Homo sapiens
cttagcaaactaatgcaggaacagaaaaacaaataccatgtgttcttacttataagtggaagctaaatattgagaacacatggacacatagagggaaacaaaatacactgctgcccacctaccgaagggtggagggtgggaggagggagaacatcaggaagaatagctgatggatgctgggcttaatacctgggtgatgaaataatctgtacagcaaacccccatgacacacatatacctgtgtaacaagcctgcatctgtacccctgaacttaaaagttaataaagaaaagaaaaacagccttgcatttttaaatggaagcagaaaatagtatagactgtatatgaatggtctacattgtttattacttcatttgtggaacatttttgtggttggcataag

SEQ ID NO: 93024 - DNA, 617 bp, Homo sapiens
ctttagaaataaaactgctatagatattcatgtgcaggatttatgtggacatgttttcatttatccaagataaatgctcaaggggctaattgctgattcttaagagctggaggccgaggagtggtgcaagcacctctgcatggagtgtctggggaccaggctcaatgacatcagccttggggagcccgaccttctggccgcaggagtgcagcgggaacagaatgagagattcaacgtgtatcttatgcctacgccaaacctggatatttatggtgaatgcacaatgcagatcactcatgaaaatatctatctctgggatatccacaatgccaaggtcaaactggtgatgtggcctctcagctcactgaggagatacggtcgggactcaacgtggttcacgtttgagtcaggaagaatgtgtgacacaggagaaggactattcacttttcaaacaagggaaggagaaatgatctatcagaaggttcattctgcgacactggccatagctgagcaacatgaaagattaatgctagaaatggaacagaaggcccgggtaaggccccttccttggtaacctatcagcttggaaatgaatgtcactgggatctgaaaaaaaa

SEQ ID NO: 93025 - DNA, 1575 bp, Homo sapiens
ctttagaaataaaactgctatagatattcatgtgcaggatttatgtggacatgttttcatttatccaagataaatgctcaaggggctaattgctgattcttaagagctggaggccgaggagtggtgcaagcacctctgcatggagtgtctggggaccaggctcaatgacatcagccttggggagcccgaccttctggccgcaggagtgcagcgggaacagaatgagagattcaacgtgtatcttatgcctacgccaaacctggatatttatggtgaatgcacaatgcagatcactcatgaaaatatctatctctgggatatccacaatgccaaggtcaaactggtgatgtggcctctcagctcactgaggagatacggtcgggactcaacgtggttcacgtttgagtcaggaagaatgtgtgacacaggagaaggactattcacttttcaaacaagggaaggagaaatgatctatcagaaggttcattctgcgacactggccatagctgagcaacatgaaagattaatgctagaaatggaacagaaggcccggcttcagacaagcttgactgaaccaatgacattatccaaatcaatatctcttcctcgcagcgcgtactggcatcacatcactcgtcagaacagcgttggtgaaatctacagtttgcaaggtcatgggtttggttcgtcaaagatgtctcgtgcacagacatttcccagctacgccccagaacagagtgaagaggcccagcagccgttgtcgcggtccagcagctatggattcagctacagctccagcctcatccaatgacacacagagagccgctgttgactagagagacagtctgtcctggacccgtctgtggggtcattaccctctgcctcctggaagaccaattgcagtacaaattgaaatgggtcggctctagccccagtcccattggaaggttaaaaactggagttctgcttccttgattcagtggctaagtcctttatttattgaatttctttgggggaatctatgttttacataaatagaatccaaatcgtatgaacagttatttaaataaacaaaattctttgggtctgacagtaacagaaacctcagcactgggaaaagctgcccacactggggtatgcctgggtgatgggcacctctcactgacctcacagcgcagtccgcccatctgagcacagggtctgtccttagacataatggtgaccctccacaagctctgtggcttttaaagttctgacagggataaatacagtaagctctgcaaatgacatcgtagctgcatataaataaacccagtgacaattaaaggaacatgaaattcagaacacactattaagcagggccctgtagctctactcgtgtgtgtgtgtgcgtgtgtgtgtgtgtgtgtagacaaatggatattgctatatccatctatatataacaagtatatatcaaacatgtgctgagggtgacaggatatgctcacttaaattgttgaaaaccataatttggtgcattaaagttaagattgttatgttgaatagctatttttaaaatagtgctgtaaaaaa

SEQ ID NO: 93026 - DNA, 1234 bp, Homo sapiens
ggccccgttccccgtccgcggcggccctgcaggcgaccccgcgtccccaccggcgggagctcggggaagagcgggcggcggcgctgctgctggcggcggccggctggatgcgagacccgcgcagacccggcggcggacggcggctctcgactccggagagcggatcgcggggcgcaggagcccgatcgcgctggccatggcctccaactttaacgacatagtcaagcagggctacgtgaaaatccgcagcaggaagcttgggattttcagacgatgctggttggttttcaagaaggcttctagcaaaggacccagaaggttagaaaaatttccagatgaaaaggcagcttatttcagaaactttcataaggtaactgaactgcacaatatcaaaaatataaccagactgccccgagagacaaagaagcatgcggtggcaatcatctttcacgatgaaacatcgaagacatttgcctgtgagtcagagctggaggccgaggagtggtgcaagcacctctgcatggagtgtctggggaccaggctcaatgacatcagccttggggagcccgaccttctggccgcaggagtgcagcgggaacagaatgagagattcaacgtgtatcttatgcctacgccaaacctggatatttatggtgaatgcacaatgcagatcactcatgaaaatatctatctctgggatatccacaatgccaaggtcaaactggtgatgtggcctctcagctcactgaggagatacggtcgggactcaacgtggttcacgtttgagtcaggaagaatgtgtgacacaggagaaggactattcacttttcaaacaagggaaggagaaatgatctatcagaaggttcattctgcgacactggccatagctgagcaacatgaaagattaatgctagaaatggaacagaaggcccggcttcagacaagcttgactgaaccaatgacattatccaaatcaatatctcttcctcgcagcgcgtactggcatcacatcactcgtcagaacagcgttggtgaaatctacagtttgcaaggaaatcatgaaaatcggcactccgatttaacaggaaagagttgcaagaaatccgagaacagatttcttgaagaaaatgcacccttggttatgtatggcatcactcaccatctgttcatggatacttctacatgcaaagttgtacatgacttggaataaaccagctctagttttatcatcagt

SEQ ID NO: 93027 - DNA, 611 bp, Homo sapiens
gaaatcatgaaaatcggcactccgatttaacaggaaagagttgcaagaaatccgagaacaggtaagacaatgggaaggatataaagcagactaaagtgctcatcaaagtaaattgaaaataatgataaatgcttcacacaaataaaacaatttttataagcacttagaaatccaataactgtagctgaaaagagactatagtagcttcagaaaataataggcattaataaagtaacaaagaaagaaattcagtcagagagacggaaaatacatgggtatgcgcacaagtcaaataatggaattgaacatacaggttttcctgaaatagagaataaatacaagatgtatataaagtctttcctgaaataaaggaagacctatggcttaactcaggtcctcctagaagcagatgccgagatgggttgagatgcacgagagttagccagttaggggtcaccagatatttgaggaaagtatgaaacaaaaaacagaggccatagcaaataaaattgcgtcaaaaggaacctcgaagagaccgaggcagtgcagaaagcagaataaaaccatgcacacaagcaggcttacaaacaaggcaataaacacttcactca

SEQ ID NO: 93028 - DNA, 853 bp, Homo sapiens
ctttagaaataaaactgctatagatattcatgtgcaggatttatgtggacatgttttcatttatccaagataaatgctcaaggggctaattgctgattcttaagagctggaggccgaggagtggtgcaagcacctctgcatggagtgtctggggaccaggctcaatgacatcagccttggggagcccgaccttctggccgcaggagtgcagcgggaacagaatgagagattcaacgtgtatcttatgcctacgccaaacctggatatttatggtgaatgcacaatgcagatcactcatgaaaatatctatctctgggatatccacaatgccaaggtcaaactggtgatgtggcctctcagctcactgaggagatacggtcgggactcaacgtggttcacgtttgagtcaggaagaatgtgtgacacaggagaaggactattcacttttcaaacaagggaaggagaaatgatctatcagaaggttcattctgcgacactggccatagctgagcaacatgaaagattaatgctagaaatggaacagaaggcccggcttcagacaagcttgactgaaccaatgacattatccaaatcaatatctcttcctcgcagcgcgtactggcatcacatcactcgtcagaacagcgttggtgaaatctacagtttgcaaggaaatcatgaaaatcggcactccgatttaacaggaaagagttgcaagaaatccgagaacagatttcttgaagaaaatgcacccttggttatgtatggcatcactcaccatctgttcatggatacttctacatgcaaagttgtacatgacttggaataaaccagctctagttttatcatcagt

SEQ ID NO: 93029 - DNA, 1956 bp, Homo sapiens
ggccccgttccccgtccgcggcggccctgcaggcgaccccgcgtccccaccggcgggagctcggggaagagcgggcggcggcgctgctgctggcggcggccggctggatgcgagacccgcgcagacccggcggcggacggcggctctcgactccggagagcggatcgcggggcgcaggagcccgatcgcgctggccatggcctccaactttaacgacatagtcaagcagggctacgtgaaaatccgcagcaggaagcttgggattttcagacgatgctggttggttttcaagaaggcttctagcaaaggacccagaaggttagaaaaatttccagatgaaaaggcagcttatttcagaaactttcataaggtaactgaactgcacaatatcaaaaatataaccagactgccccgagagacaaagaagcatgcggtggcaatcatctttcacgatgaaacatcgaagacatttgcctgtgagtcagagctggaggccgaggagtggtgcaagcacctctgcatggagtgtctggggaccaggctcaatgacatcagccttggggagcccgaccttctggccgcaggagtgcagcgggaacagaatgagagattcaacgtgtatcttatgcctacgccaaacctggatatttatggtgaatgcacaatgcagatcactcatgaaaatatctatctctgggatatccacaatgccaaggtcaaactggtgatgtggcctctcagctcactgaggagatacggtcgggactcaacgtggttcacgtttgagtcaggaagaatgtgtgacacaggagaaggactattcacttttcaaacaagggaaggagaaatgatctatcagaaggttcattctgcgacactggccatagctgagcaacatgaaagattaatgctagaaatggaacagaaggcccggcttcagacaagcttgactgaaccaatgacattatccaaatcaatatctcttcctcgcagcgcgtactggcatcacatcactcgtcagaacagcgttggtgaaatctacagtttgcaaggtcatgggtttggttcgtcaaagatgtctcgtgcacagacatttcccagctacgccccagaacagagtgaagaggcccagcagccgttgtcgcggtccagcagctatggattcagctacagctccagcctcatccaatgacacacagagagccgctgttgactagagagacagtctgtcctggacccgtctgtggggtcattaccctctgcctcctggaagaccaattgcagtacaaattgaaatgggtcggctctagccccagtcccattggaaggttaaaaactggagttctgcttccttgattcagtggctaagtcctttatttattgaatttctttgggggaatctatgttttacataaatagaatccaaatcgtatgaacagttatttaaataaacaaaattctttgggtctgacagtaacagaaacctcagcactgggaaaagctgcccacactggggtatgcctgggtgatgggcacctctcactgacctcacagcgcagtccgcccatctgagcacagggtctgtccttagacataatggtgaccctccacaagctctgtggcttttaaagttctgacagggataaatacagtaagctctgcaaatgacatcgtagctgcatataaataaacccagtgacaattaaaggaacatgaaattcagaacacactattaagcagggccctgtagctctactcgtgtgtgtgtgtgcgtgtgtgtgtgtgtgtgtagacaaatggatattgctatatccatctatatataacaagtatatatcaaacatgtgctgagggtgacaggatatgctcacttaaattgttgaaaaccataatttggtgcattaaagttaagattgttatgttgaatagctatttttaaaatagtgctgtaaaaaa

SEQ ID NO: 93030 - DNA, 1164 bp, Homo sapiens
agagctagcaccatgagcttcatttgagcccaggtgtttgagactagcctgagcaacatagtgagaccctatctcaaaacaaacaaaaattccagagcatctttggcttcctaggaaatagcctaaggctgtaaataaaccctggcctcatattcctgttgtcatttactggcgtagtagacaattcataactgggaaaatcctttgggtgtttttttgatgtaggttttatagaatcagaggttccaaaattgtgtttaactgattctatagaagactataaaagtaacaaagcaggcaaacaagaacaaaaacctttgtgccataaaatcactatttaggccaggtgtggtggctcatgcctgtaattccagcactttgagagaggcctaggcgggaggattgcttgagcacaggagctcaagaccagcctgggcaacatagtgggaccccgtctgtacaaaaaaaaattttaattagctgggcgtggtggcaagtgcctgtagtcccagctactcaggaggctgtgacaggaggattgcttgagcccaggaggtcaagacttcaagtgagccataatcatgccactttccagcctgggcaacagagtaagaccctttctcaacaaaaacacaaaaatcactgtttaccttctctaacccttatcattatgtaaacataatttaatagtttaatcagtatgccttattattattttttcctcttattcatttagtatcattttttaaagtatatttttataggcactatagaaccttgctgaaattggctgaggatactcttcagtggggccagaagttcttagcattatttcatacagaattttccatgcatttacctaatatatttatcatctttaatgacattataaaaatacattgaaccagaatgccatagattaactatcctttttaaattttgattcattatatgtagtagaaccttatctctgtgttgataacagtttttctttttcttttttatatttttaatttttaatttaatttaaattttcagacagggtctctgtcgcccaggctggagtgcaatagtgtgatcacagctcactgcagccttgactgcctgggcttaggtgatcctccatctcagcctccctgagtagctgggactacaggtgtgtgc

SEQ ID NO: 93031 - DNA, 377 bp, Homo sapiens
gcacgaggggtgtccaggctggggattggtcgggggacttaaagaaaaaggcaggtctgagggtctgaggagagagagagaggggtggggagggctgggccaggcaccagagtggagaccacaggccagggcagagggcagggctgtgagggcactgtaggctgtggatgggagctggcatttaagaggggagtccatagaccagggcagagggcagggctgtgagggcactgtaggctgtggatgggagctggcatttaagaggggagtccatagaccagggcagagggcagggccgtgctgggcactttgggctgtggatgggagctggcatttaagaggggagaccatagaccagggtagagggcagggccgtg

SEQ ID NO: 93032 - DNA, 614 bp, Homo sapiens
gatggatagatgggtgggtggtgggtggataggtgggtaggtgggtggatggatgtatgcatgtctggatggatggatggatggatggatggaaggaatgatggatggatggacggacagatgaacagatggacttgagcatttattcagggtcctccaaagaattgagtgatttcctagggtgtaacatcacctgcacgtgggtgggcaagggggcttgcctatgtaatactcatgattatgggtagtgctcagccttagtcaccactctcagaacactttattgactaggaaagtcaaaactggcattgacaactagtgcaaattacagctataactaacagaagatgttgagtgatgacagctggacaaccaataatcaataatttggctttgtcatgttgctgccatgctggacaggtagagccacgggttccttgatccttccatcacattgaggatgcttatcaagacttccccaaccatggggacaaggatcttatcaaatacttgcagttcaccccaaatgctcaccctcttcattccacctgcacatgaccttcagctcaaagacatttccagtcctccaggtcagcccttcttccagcctttga

SEQ ID NO: 93033 - DNA, 124 bp, Homo sapiens
ggggaaaaggggatggggcaggggagcatgggggagggtccccaaagagagaaagggaaagagaaaaatgtgggtgggcggagacagaggaagaaagatatagttatggagaaatacagacagc

SEQ ID NO: 93034 - DNA, 312 bp, Homo sapiens
ccttggcctctcttaagtgctgggcttacaggtgtgagctagcacgtgcccttcaccctccttttaaagtgaaatttgtgtaagacttagataaaggatatttggaggagaagataaagtcacaaaataattaaccatttaaatttggagaagggaggaaggttagaggacatctaccttaagattttcaatttacagacgaggcagctgagtctccaagctgatgagaattccacaaggccatagagctattaaagagcaaaccttttactgacaaatgagtagtacttattcaacacgtttcataatttt

SEQ ID NO: 93035 - DNA, 197 bp, Homo sapiens
tctcttctggagactagattaggaaataaccgatgtcctggcttgtgcagaaaacataagtatatacatttatatacactgtaagactgaaatttgaaacgtgtgcatgtgtatgtaatatatatatatataacatgggagaggctggttgggagaattgggatgtttaatactccactctattccagcccaggggc

SEQ ID NO: 93036 - DNA, 379 bp, Homo sapiens
ttggcaacaagcgaaggggaggtattaaaaatcaagaggtcaataggtcttgtttctaaataaaatttcccagagggcttccccacccccccggcaaatcaaaagacaccttctgaaagcaaagaggcctccaaggcatgggttgccagcctggcttactgtccccacatggcctcggagacaacaagcaagtcactgcctcctattcctgtaggtttcacatgtagaatgagacaggccttctccttgggctcccgtccctgactcctaactctcagttctccattcagagatagggagagagaaacattatctcctcaaacttccaaacaaggtgtccttatttctctcccaggggcatatgcactccaatttgtca

SEQ ID NO: 93037 - DNA, 514 bp, Homo sapiens
ctagtgagtgtgtgcaatgttccctaagtcagcaggtaaactgaatacttggatgcttagcccatcattttgaattgggattactcaggtgttgtgaatttctttctaaagattcctagtgattccttgtgtgatttttgtgtgtttccctcctttaatacaaatcaggatgaagacttatctttggagaattcaggagagaagtcttggctagaaattacagaggttggcttggtgcagtggctcacatgtgtaatcccggtgctttgagaggcagaggcaggaggatcacttaaggccaggagttctagactagcctaggcaacatagagatctctacaaagttttaaaattagccatgcatggtgttgcatgtctgtagtcccagctacttgagaggttgaggtgggaggatcacttgagcctgggagttcaaggccatagtgagcaatgattgcaccactacacaccgtccatcctgggtgacagagtgaagccctgtctctaaataatt

SEQ ID NO: 93038 - DNA, 222 bp, Homo sapiens
cagcaaatatagaagcagcaactctcctacctgacgtgtgcaactgggagttggtgaattcctaaaattggttaaggcagaaagccgtaaaaacaagatacacatgccctgagcattttgtaaaacacaagcccattgtcgttcaccagccagtgggccgctgcccagagccatgtcttgactggggtccactccttggaattcaagttggtttttctctca

SEQ ID NO: 93039 - DNA, 260 bp, Homo sapiens
agtgttaggaaaatcgaatgagataatacaggtgagatccttagcaaggcgcctggcacgcaggaaacgctggataaatgcattgctatcattccctggctgtccccctccttgactggggcagggatcagggcatatgctgaaccatctcccttctccagcctaaggccatttagccagactagaagaagactcggggggatggaatatgtgtcttggaggagacttggaaccattttcgtaagtctccagaagccatg

SEQ ID NO: 93040 - DNA, 738 bp, Homo sapiens
tgaagtttaaagtatttttattagtttttgaaactaatattagacaataaccagcaaatgatatgattccattccattatacacaaaaccaaccaactacaccaaaaaagacaaaaacaaaaccaacaaacatagccctttcttgtttaactgcattttgttcaatgttttaagctctagaaggggaatctttgagttaatcaggtaggaccctcattttgcaaatgagagacatgaggcacaagtaggtcaatgacttattgaggtacttggagagcgaggcagtgtcctctgcccatcgcagctggccaggccttgcaggaggagacacacccaaaagaaatgtagaggccagttctaccacattcatttcacgccctggggctcgcacccttaaaaagcattcattgcagaacagagaagtacattttgaacaggagtagagtagttaaacatgtaccaatgtgcacattaaaaagcaaaataaaatgcagcattgtcagagtcctcatggaaactagaactctctttaaccaaaactactttttagtcattcagtatcacatatcttttatgttgcttacggtaaacgtcaggtaaatcatgatatttatgctttaattttatttaccaaaaatatttttttccttatgggatttaaaagcacatattcttagcttgtgcacaatagctcatgcctgtaatcccagaactttgggagacagagctgggaggatc

SEQ ID NO: 93041 - DNA, 396 bp, Homo sapiens
cctttagaaccttagaaataaaaacttttgtggcggtagaggcactgctaactgattcaaaaattaattaggttttgcctgtgggtgtgaggaatgcagaaaattaatgctttagcttttctgcagttttggtgtcggggagaggttccaagcaaactctattaaatggggatttttttttccccataaccacctgaatgtgatttgtgggcttatgtgttctgatttgaacttcatatagcaaggttgtggcttttggcagatgcagtatgttctgagcgcggctcctagagtctacaatttggagtccaggaaggggtggctgtggagacaagtgagttttgtacctccgtaagccaccctttttcagggtcagttcatgtgttagtatcaggg

SEQ ID NO: 93042 - DNA, 299 bp, Homo sapiens
gtaatctcttgccactttgactccagttttccctaactttgatctactttcacagtgtaggtcttttaagacacagatgtgcacacacttgctcagaattcctctgttgctccctttgacctacagagtaaaacccaaactcattaccatagcattcacagctctttatgatctggcccctgcccctcatttctataactgcattttgctcctgattactgagttaactggcatttcctggaacatactgtgctgtttgccacacctgtgacttgcacatggtaatctttctgcttgga

SEQ ID NO: 93043 - DNA, 2088 bp, Homo sapiens
cacccatccaggcacctctcagcacagcagagctttccagaggaagcctcaccaagcctctgcaatgaggttcttctgtgcacgttgctgcagctttgggcctgagatgccagctgtccagctgctgcttctggcctgcctggtgtgggatgtgggggccaggacagctcagctcaggaaggccaatgaccagagtggccgatgccagtataccttcagtgtggccagtcccaatgaatccagctgcccagagcagagccaggccatgtcagtcatccataacttacagagagacagcagcacccaacgcttagacctggaggccaccaaagctcgactcagctccctggagagcctcctccaccaattgaccttggaccaggctgccaggccccaggagacccaggaggggctgcagagggagctgggcaccctgaggcgggagcgggaccagctggaaacccaaaccagagagttggagactgcctacagcaacctcctccgagacaagtcagttctggaggaagagaagaagcgactaaggcaagaaaatgagaatctggccaggaggttggaaagcagcagccaggaggtagcaaggctgagaaggggccagtgtccccagacccgagacactgctcgggctgtgccaccaggctccagagaagtttctacgtggaatttggacactttggccttccaggaactgaagtccgagctaactgaagttcctgcttcccgaattttgaaggagagcccatctggctatctcaggagtggagagggagacaccggatgtggagaactagtttgggtaggagagcctctcacgctgagaacagcagaaacaattactggcaagtatggtgtgtggatgcgagaccccaagcccacctacccctacacccaggagaccacgtggagaatcgacacagttggcacggatgtccgccaggtttttgagtatgacctcatcagccagtttatgcagggctacccttctaaggttcacatactgcctaggccactggaaagcacgggtgctgtggtgtactcggggagcctctatttccagggcgctgagtccagaactgtcataagatatgagctgaataccgagacagtgaaggctgagaaggaaatccctggagctggctaccacggacagttcccgtattcttggggtggctacacggacattgacttggctgtggatgaagcaggcctctgggtcatttacagcaccgatgaggccaaaggtgccattgtcctctccaaactgaacccagagaatctggaactcgaacaaacctgggagacaaacatccgtaagcagtcagtcgccaatgccttcatcatctgtggcaccttgtacaccgtcagcagctacacctcagcagatgctaccgtcaactttgcttatgacacaggcacaggtatcagcaagaccctgaccatcccattcaagaaccgctataagtacagcagcatgattgactacaaccccctggagaagaagctctttgcctgggacaacttgaacatggtcacttatgacatcaagctctccaagatgtgaaaagcctccaagctgtacaggcaatggcagaaggagatgctcagggctcctggggggagcaggctgaagggagagccagccagccagggcccaggcagctttgactgctttccaagttttcattaatccagaaggatgaacatggtcaccatctaactattcaggaattgtagtctgagggcgtagacaatttcatataataaatatcctttatcttctgtcagcatttatgggatgtttaatgacatagttcaagttttcttgtgatttggggcaaaagctgtaaggcataatagtttcttcctgaaaaccattgctcttgcatgttacatggttaccacaagccacaataaaaagcataacttctaaaggaagcagaatagctcctctggccagcatcgaatataagtaagatgcatttactacagttggcttctaatgcttcagatagaatacagttgggtctcacataaccctttacattgtgaaataaaattttcttacccaaa

SEQ ID NO: 93044 - DNA, 516 bp, Homo sapiens
tctgttttagtggtactgaaatttaaggatatagtagtgaactggaggtttctcattctataatttggatcaatgtatttaatgtaagaattacccataaattttgcagttgaaaatgaagttttgttttcacaataccttcccacccaacccaaagtacacaggcaactgtaagaaaatgattggtcaggtatacataaagattggtggaggcaaagattattcaaacaggacacagactggttacatgtatttccagcccaatctggcaaacatctgcaagaaaaagttgtgccatttactgtacattcacctccatttctgcatgtgttgtacccacaggctgtcccatcacagtcacctacatttgagccaccttttgctccaaattcagttaattgtaattcttgattatttatgataacttgtcggatacagccttgaaaacctacaggttcattttctattgccatgggatttacaagatttaaagaagatactcctccaatatagaag

SEQ ID NO: 93045 - DNA, 576 bp, Homo sapiens
gaaaccctctgcagcctcccagccaggcctgcagacagcggatggtctgtctgtgcctccctgggcataccccagctgattgggtcatgctgttgcccctcagtagtacacaccccttgcttcctcctctgagatctccccactgtggtcctcagcctgcctgtttcgcctttctctcctgtgcaggttaccaattcaaagtccctaagaaagtggctcatctagcacagggtgcctctggtggccaggaccccctgccaggcccactcttgtactgtttgttgttggagagatgagggcaggcactccctagccacccagctgtgccagtgttggcctgctcacacgtgggttgtaggcgtgcctggaacaaaacaattggtaagtcctggcagctcctaaatgaatgtaactggattctgcttccttcttggtttgccatatatggagagaactttgctttctgaaaaattttaaagggaatgaggtaatttcctcataattcctaagatctccggcagtgttgtaaatttagatttgaggttagagtactaatgagtgtaagcaaaagcagaa

SEQ ID NO: 93046 - DNA, 212 bp, Homo sapiens
tatctctgtgcagggccagacatggggatgagattctgataatttgggaatgaatcaggcccccagcccctcctccctcagactcagcagtccaggcacccggccctcctccctcggacccagaagtccatgctcccagcccctcctcccttggacccaggagtccaggcccccagcccctcctccctcagacccaggagtccaggccccca

SEQ ID NO: 93047 - DNA, 464 bp, Homo sapiens
gatatgtcctgaaggtacattactataataataatcaaggactgctaacaatcatacactattgaatatgtttctattctgagtatcattccaaattgaggctggatgtttttacatccatgtgaaatgcaagaacttatattgcaataattttttcctgttagacataaatattctttattcataatgcaaagacagaaattttaattttctgataatgttgtttgtaattgaattctgtgatgttttgaaattagcttatatggtgtttttaagccccttctgtctttgaaattctccaagccagcatactgtcatattcctgtagtcccagctactagggaggctgagggtgaaggatggcttgaggccagtaatttgaggctctagtgtgctatgatggcgcctgtgaatagctactgaactccagccgggacaacatagtggaaccccgtctctaggaa

SEQ ID NO: 93048 - DNA, 597 bp, Homo sapiens
cctttttcatctgtggactctttcctcacctctcccttctcccttcccaccctataggaactaggatgctgatgatagttggtttgacaggtttagaagtgatgcctgctctgctcttctgacctcaaggttctgccaagactgatttttatcccaagttctgatttctccaacaagagcttatgagctaaccagggctgtcagttaggactttaacctctcctggggcaccagaagggtgcttccctgatgggagcatcagtgtcttcccccttctcctgccctctctcctccccgtggggagtgttctcatctatatcctttctgagccatggtggcatctgggagacattcagttatcatatgagatgggaggaaatggaacagtctatgcaatttgctgtttttaacactgccctaactttatttttatctggttaatgtgtctgttggcagtaagaggtttttaatctcctaataagtgtataccaatccaaaagaagctggaataaggtggggagaaggggttgataaattcctgcagcatctttatattccaactagctgtttctgaaaggtgactctttctcttactca

SEQ ID NO: 93049 - DNA, 421 bp, Homo sapiens
attgatttgcatgctgcatgggtcattgctgcagagagtcctcatactggaaagcaagtgctgaagtgtgaagaacgtgcctgtttgtgtctcttcgctcagtccacaggcctgtgtcttctcctggcttggggctagctgttttttagaaggtttaaatctgaccttacactgccatctaatggaaaacatatctgttcagggtggcaggaattgtccgtgactgaaactgtgtgtttcgattcctcgatgaaaacatttcgtgagtttacacagtagggtctctgtcactttcagtcctaactctgtgctagtggatttaaaatgcaggcttggtttgaagtactcagagcgtatgttgctttttctgatgtgtctgagccgggacttcacttggaaatgtagaatccgaaatccagtt

SEQ ID NO: 93050 - DNA, 2099 bp, Homo sapiens
  misc_feature (151)..(152): n is a, c, g, or t
atgcgcagaccgaggcagggaggcgggggtgcgggaggctccgcggctgcgcgggcgcgtgctggtggcctcggcggaggctcagtcccggcccgcgcccgcggcgcccccgctgcggcccgagcggcctggctgcgggatctgtgcgcanngatggcgcggccgccccggcagcacccgggggtctgggcgtcgctgctcctgctgctactgacggggcccgccgcctgcgcagccagccccgcggacgacggtgcgggcccggggggccggggaccccggggacgcgcgcggggggacacgggcgccgacgaggcggtgccgcgccacgactcctcctacggcaccttcgcgggggagttctacgacctgcgctacctgtcggaggagggttaccccttccctactgctcctcctgtggatccatttgccaaaatcaaagtggacgactgtggaaaaactaagggatgctttagatatggcaaaccaggctgtaatgcagagacctgtgactatttcctcagctaccggatgataggggctgatgtagaatttgagctgagtgcagacacagatggttgggtagcagttggattctcttcagacaagaaaatgggtggtgatgatgtcatggcctgcgtccatgatgacaatggcagggtccgcatacagcacttctataatgtaggccagtgggcaaaggagattcagagaaaccctgccagagatgaagaaggagtttttgagaacaatcgcgtcacctgcagatttaaacgccctgtgaatgttcccagagatgaaacaattgttgatctgcatttgagttggtattatctgtttgcttggggtccagccattcagggctctatcactcgacatgatatagactcaccgccggcttcagagcgtgttgtcagtatttacaagtatgaagacatttttatgccatcagctgcctatcaaaccttctcatctccattttgtttgcttctgattgttgctctgaccttctacctattgatgggaaccccctaaccacagctgcagggccaacagattacatggattgggaagtctttagtataaatatattttttaaagaatatccagtataattttagcttcaattatttaagaaaaaaaacctcatataatttcagctttttggaagaaagaacaagcttcttttgtagtcaaagaagattgtttaataatgaccctatacttttggaacatacttacaccttttctaagcactttcacatatgttttcttatttaacttcacaacatctctgagttggattgatgaaaattgtgattgccatcttcctgaatgggatttgagacccaaaaagactgcctttttatgatccacataccatataactttggctagaaatgacaaatagaaaggcagagaaggaactaagtatagaaatcatgtctcaaaacagtctttactatgagtgctatagcacagagagttattttgaatattactagggagaactttactgaatgtcataagttcacagtcagccttttgggcagaagaaatttcaaatttccgtaaagcagaagtgcttttggatatttacacagccaatggggagattggaggaaaatacaatgatatgaaaatagttcatatttatttgaaattttggccgagcatggtggctcacgcctgtgatcccagcactttaggaggccaagacgggcaggtcacctgaggtcaggagttcgagaccagcctggccaatgtggtgaaacccccgtctctattaaaaagtacaaaaatgagccaggcgtggtggtgcacacctataatcccagctattcgggaggctgaggcaggagaattgctggaacccaggaggcggaggttgcagtgagccgagattgtgccagtgcactccagcctaggtgacagagccagactctgtctcaaaaataactaactaaataaataatatttatttgaaatttcttctcagttagagagcagctatgggaaaacatttttactgctatttgcaaaggttggagaccaaactgtgagcattcctgaagatgtaaagttgtgttaatgatatt

SEQ ID NO: 93051 - DNA, 641 bp, Homo sapiens
  misc_feature (151)..(152): n is a, c, g, or t
atgcgcagaccgaggcagggaggcgggggtgcgggaggctccgcggctgcgcgggcgcgtgctggtggcctcggcggaggctcagtcccggcccgcgcccgcggcgcccccgctgcggcccgagcggcctggctgcgggatctgtgcgcanngatggcgcggccgccccggcagcacccgggggtctgggcgtcgctgctcctgctgctactgacggggcccgccgcctgcgcagccagccccgcggacgacggtgcgggcccggggggccggggaccccggggacgcgcgcggggggacacgggcgccgacgaggcggtgccgcgccacgactcctcctacggcaccttcgcgggggagttctacgacctgcgctacctgtcggaggagggttaccccttccctactgctcctcctgtggatccatttgccaaaatcaaagtggacgactgtggaaaaactaagggatgctttaggcaagattctgcatttctaataagctccctggtcatgctggttcattgatgacctcattttgggtggcaagtctctgcagcatttgcccagcaaagacccaaggatatcatgagaccttttagagactgctaaaatcaagttacactgagtcttgagcattcctt

SEQ ID NO: 93052 - DNA, 303 bp, Homo sapiens
tcttaaagccataatttaaaaaaggcggaagggataggatgtaaggttgaaccacatgggaaaaataagtcagggaaaaataagtcaaggaaaaataaccaccaggtgcagaggctcacacctgtactcccagcactttgggacgccaaagtgggtgggaggatcacttgatcccatgagttccaggccagcctgggcaacatagtgagacctcatctctacacacacacatacatatacacacacacacatatacacacacacagacacaaacacatacaaaaactagccaggtgttggtgg

SEQ ID NO: 93053 - DNA, 588 bp, Homo sapiens
gagtccagcacgggaggcgtggtcttgtagttgttctccggctgcccattgctctcccactccacggcgatgtcgctgggatagaagcctttgaccaggcaggtcaggctgacctggttcttggtcagctcatcccgggatgggggcagggtgtacacctgtggttctcggggctgccctttggctttggagatggttttctcgatgggggctgggagggctttgttggagaccttgcacttgtactccttgccattcagccagtcctggtgcaggacggtgaggacgctgaccacacggtacgtgctgttgtactgctcctcccgcggctttgtcttggcattatgcacctccacgccgtccacgtaccagttgaacttgacctcagggtcttcgtggctcacgtccaccaccacgcacatgtacactgcacgttgtacgacgacgcaccgaggccatacctggcattcctgcggtacgactatagagatctcctccccagcctccggtcctggcctcgtcgatacctgtgtacagaagtgagccaccatccatgccgctaacagtcggtaccgagctcgattgatc

SEQ ID NO: 93054 - DNA, 279 bp, Homo sapiens
ctccacctgctgtgttcaagagattctcctgcctcagcctcccaactagctgggattacaggtgcccgccaacacgcccggctagtttttgtatttttagtagagatgaggtttcaccgtgtcggccagctgttctccaactcctgatctcaagtgatctgcccgcctccacctcccaaagtgctgggattacaggcatgagccgccatgcccggccaggtttcagatttattcttgtatcccagtagttcattctgttaaagccacatttggctttgg

SEQ ID NO: 93055 - DNA, 463 bp, Homo sapiens
ctgagctgaagcctcgtccctggtgtggcctcccaggctgccctgagcagacccctcaggcagaaacctgtcatgcaccagctctccctccccctcacttccttctccctagggctgggctacaggccttgctaggggcttctttaggaaccctcctgggtgactgaaagcagctctgggatgggagaccgtttgggaccttgtctgagaatcctaccaccacacacgtattttgagagaggaagtggggccaaggcaggctccctgacattccggccgttcagagccggctgactcggaagccagaggagccaagcttctaccaggtcctcccctgcccagaccactgctttgacgctttcttcctcaaatagcatttacccagaaggcacatgtgtctgagtcatctcctctatctaagggttctgggtctctctctgctttgggtccatggggcttgtgg

SEQ ID NO: 93056 - DNA, 131 bp, Homo sapiens
attaaaggagtagctctttgattatctaccagtaggatgcaaaaatgattaaatagtgttttatttaaaatattttacattttattaaaccaccttggcttctgactactcctaactcacctcgcctttag

SEQ ID NO: 93057 - DNA, 342 bp, Homo sapiens
cctttcacacatatttttcagattaagcaaaatacaatttattccactgaatagaaaacgttgccttccatatctgtctttgaatttgtagtcgttccgattataatttgagttctcaaacatttgaattacacagtctcttggttcactccgacaggtgtttaaacaggtgtgcgtaggtctttctacttcagctctcagagccggtcttgtttgcaggttagtgggtggcgcacctcgcggttgctcccaccccacccttagtaacagggtttgagtaggaccctggggtgggggagtggatgctgctgtttcaagctcgttcgcccaaatacatctttc

SEQ ID NO: 93058 - DNA, 442 bp, Homo sapiens
aactctgtgagttccagccacatcttctttcagttcctcaaacacctcctgtctctcctccaggaggtttttgtgtaaactctactcaaatgcccttgactacctctggccaccctctgactaaccctccttacccctcaaacctcacactttgcctggatcacttctactgacctcagtttaaatgtcacatctttgggtcagattttcttgtcacctgctctcctaaaacccttttcctcttcagcatttatcaccctaataaataataagctggagctaagataataatggctatggaatatatgtctcccctactagactgtaacctccattatgaaaggactcttttgatttggttcattcctaaaccctgagcaccaactgcagggcctggaatacagaaataatgaatgaatgaatatgtccaagatgtactaaa

SEQ ID NO: 93059 - DNA, 424 bp, Homo sapiens
gtaaattttccatcacaactcagtatacacatatgtatataaccaaaggttcaccatactttacccttacaatgtgcaatgcactccgatattttctattgtgtcattttttttttaattctggttacaattcaacccagaaatagggcacacaacctacagaataacactagcctagagtaacaaatattattcttactatacttttaagtaataaattattgcctttatgagctctatgttttccaccatatgggtgatccctcctccaatattgtcttttgtgtgtctttcgaaataaattatacctttaagcattttaataaaatgttatgcttcttagcatatttctgatatatactagtgaagaggaaacatgtttctccttgtcttgagagctctattcattatatgtttgtgctca

SEQ ID NO: 93060 - DNA, 342 bp, Homo sapiens
atcatgaaaattatgaagatgaggtaaagtctgttccatttttcctctatttttgagaaatcttagatttatctttaccagtctgtaacccagctttcttgttttatattttaaatatactttctattttgtgacaggagtgaaaaaatgtttaatgattttaaacatgtttatatatatttttcagacttggaacagcagtatctcatgttttactataaaaacttgggtatattacttgaagatcaactatattgttatttttagtatgttagcaattcatctgtcaataatcaccaaagaactcaagaatgaataacatgatctatcaaaaggcctata

SEQ ID NO: 93061 - DNA, 177 bp, Homo sapiens
gatagaagattccccagtctagggggtcttcaagttgggactggcagacccttgagactctttagccagatacctgcacagaaagatgtctttccaactgtcaacaacctaagccaggccaggtgcagtggctcacgcctgtaatcctagcactttgggggctgaggagggtggatc

SEQ ID NO: 93062 - DNA, 384 bp, Homo sapiens
cagggattaattattaattgacagctgttttaagttctgaggcaaactcaggcctccatgcaggaatgatttttaatcacatgagctcagtattggactctgatggctgaagcctcttcctgataaggttatttatgaatggtgggttcaccattaatactggagattactctcctacttctctgtgagagagaaggcaaaccctggctaaagaaaataaatggtttgtatatgatgctctgcttttttaattacaagagttactcctagagatttcaggggcttacttgtcccaggatttgagtcagggtcctgagagagcagggccaaaagtgtgttggaaaaggagcagtactaggctggggacagacccaagctgaggga

SEQ ID NO: 93063 - DNA, 463 bp, Homo sapiens
tgttgttagaaagtatggctcccatctcataaacaattctgaatctgcagcctgcaagccccaacctgggcctgtccttgactgagtttgttcccatcagatactcattgcaaagcttttgggggacgtagcacttgtgttctaagcgggctctgagataacttactggggttccactagtaccttgtgagccattgccactccccctctatgatgacctcgcccagggctaaggggaaaaagcagcagggcccccatggacctatccaaaaggagattaatccagggtactcaggaaaatctgtgttggaaatccctgaaaaaacatggaagcagcatggtgtgtgattcagtacaaactacaaaaaacctggagaaacaaggcttccatgtgagattcgtgggagctctgtgaccttacgccaccagctctaaatcagcattccctcacgtgtttgcataa

SEQ ID NO: 93064 - DNA, 302 bp, Homo sapiens
aagaaattaaagactgtgtaagcaaaaactcagttgtatgtaagaaaacccaattccccttgggaagagaaagggctggagtcctttaaaattaactgtgtttttctctctgtggctagtgagccttatctctccctttcccaggcattgtgaagactgtttctctagctgtgcagctgcaaggacactagacagataatctcaagttgtaaaacatgttgttccttaaaaagtaagaaataatgtaatgcatctcttacttgaataactgtctttgtttctctcttctgtaatacgcttcc

SEQ ID NO: 93065 - DNA, 521 bp, Homo sapiens
  misc_feature (44)..(44): n is a, c, g, or t
  misc_feature (153)..(153): n is a, c, g, or t
aggcatgaaccaccatctccggcctgaagtttatttaatccatngccttgtggactgggcattgaagttgtgtgtagttgggtttttttgttgttgttgctgttgcagacaatactactgtgaacattcttatccatgcttccttgtgtcccntaaatgttccctccagggagataccttggagtgacatgctggtgtgagggatgcatatcataattttaccagatactacagatcttgaaattgttccaattctaccccacaagcaatataagagctctcactcctccaaaactccctgagtctttacttatataatttatgattttgacagtcttacagatttaaaatggtacctaattgtgtacttaatttgtgcttttctgatttcactagtgagattgagattctttttgtatgtccattagcccttcaggcctctgtgatttacccatgatttactgtggtttaataatttttattgggttcttttccttattgatttatgggaacttattata

SEQ ID NO: 93066 - DNA, 251 bp, Homo sapiens
cttgaactcctgacctcaggtgatccacccaccttggcctcccaaagtgctgggattacaggcataagccaccatgcccagccatgttgctgtttttctaagaacatgtgttgacttcatggtttatttgtttattgattttttggagataagatctcactctctcatccaggctagagtgcattggcacaaacatggctcactgcagtctcaaccacctgggatcaactgatcctcccacctcagcctcc

SEQ ID NO: 93067 - DNA, 538 bp, Homo sapiens
tctcaaatgattgcaagatacaagtagaatggagaagcattaattcagcccttctaggtttgagttactcactctgcccacctctagagcattctatggcagggagattaaagtgtctcctaactatgcagtcactgataaaataagaattagcacattctcactaaatgaacatgactttaaggcacaagtatagattcctgaaaaagttctaagctgaacctgtacaaatggaatcattttaaacacaccatttactgtcacacagactccctgatactttagtgtgtgcacatgtgaaaccatttttttgaagtatgaaataattaattgctcaccattttatctatataactttggattttggtgtcctgagctctctaaaaaccggtgtgtttctatagtatttgaatattatggggtaatagttttgcagagtacagtatgcttatactaaattataacagcatatcctcgtgggtaaccctatttgatagggcagaaagcttgtacactgatcctgaaaagtcatctgata

SEQ ID NO: 93068 - DNA, 436 bp, Homo sapiens
gtcctcagtgcccccttgtcaacatcgggtgtgccttctccagaccagctgccttcctttgacccaccaagatgggactcctccacagtcctggaagagcctgtggccttgacccaagtgccgtggagagacagtttgagcactcctctgaatgggaacagagagcccctgcagggggaaaagttcagcctgtgaaatttctttcccttcaatttccttctccaccgggtcttgctcacacaatgcccatcaaaggtgtagccttggtggtgctttttgcagctgtccacaacacttggtgtgtccattctgcatgaagcgcacacctctgggttgccaccatcctgactggtgcactatagcactgcccctggctgagaggcaggcaggtaggataatatcccacccattcccactggatggaactctactgtgt

SEQ ID NO: 93069 - DNA, 324 bp, Homo sapiens
cacatgggacggactggagaagctgaggtacagtcatggagctaccggactcctggggggcagcagtggaggccagggaaggccacccttgagtcactcccggggtacattgtgtggccttttgcagtggggcctggcgggctctgacgctggtggatgggctgtgggcacccatttgggggacagacatgtaactcaggcggtggaccccaaaacctgggagaggggctgtggcaaggcaggggcttcagcctcgggcccccatccaccccgcatcctcggcaggtgacttacgggtctctgacacctctgggattccgtact

SEQ ID NO: 93070 - DNA, 1902 bp, Homo sapiens
aatttggaaaatacagaaactacctataatttttccattgttaacatttgagcatatttcttgtcacttttaatggtgctttaaatatgtagcaaatgtatcatttcgtattttaaaaaaatgctaggtaagcatttcctcctgtccttaaaaagctcttttaaacaactttaaaatattgtatagatagatgtacacaattttctgaataattggagttatatttacatcttttcactctttaggaaaggactggcctgtttctgtgttgggttccttcctgagtgtggcttccagctcagtggctcagacttcaagatgaagacttcagtcctggttgtgtatggtcttgggccagttaccatatgtctaatgaatacttagttttgtcatctacaaaatgaaaatagtaatatttgcctcaaagactattatttgggaggatctagtgcaaatgttagtaatgtggatattgtgtagtgtcccaggatattaatgtttttagcctcttggcttttattctgtattgttgccccaaaagatgatgctcacttatctttcatccagtgtaaggatatctggaaagacaacagaaagtatagctgttttcatttcaaaagtgatcagctgcttgagctagcaagcaaggcttgcactagcttccaggcgcagtcacgcagtttcacagcaggcgcggttccctcggagcacccagagctgccctgcggtagtcagcagttgtgctgtggctgcactgccaggctgggtggcaggtggatcggagccagcagatgtggctcaggaagtgccttcttggcctctccttaatctctttcagagtctgtgggcccttgattgcactgtgggttgtttcagactccagtattaggagactgaaccccttggtggtttttttgtgtgtgtgtgctgagctgggttgaggacatgttaagcaggtggggtgcctcccctgggtttgctccgggtggtacctgtggtgtggggtggttctgagtagttctggccccactgctggagtatctgcccactcagtttgtgagatggcagggcttcatcctggtctggtgcctcattttcttctttagcagtgggcttagaaccaatgcagattcccaagttaagtattttttctgtagcttaattattacaggcttctggtacctaagccctttcttactttctgttctgaggggaagagaagataatgttgtttctccgccccccccggagtggccccaggaccttgcatggcatttgcagcatttgcagcgtgcttgggtttgctttactagggtgaaagtgttgcaccccccagcacccacaaaggcacctctggctcaccctccggtgaggttctgactggccctgggacatcacctgctccaggatcctatgtggctcatcccaggagagatgtgggagggaaggggaaaaaaggcttacatttgctgagtggaattcatgtagatctgagttccgcattgattcctaagctgcagagcccttatgccttggctgttttgtgaatgttagtcggtcttaacctttttcaccgagttagcattggctgtctcaggaggctcacagctcctgctcctcctccaggggagtgcgccctcctcctctgtcggtagctgtcaggtgcccctttcctctgcagcagactgtcctgggtccttgcctggccttccccttacacgtgagcctgcagcttcattcacagcccctgtgtagaaagataggcacatcgataggtccctccctgcccagagtgggcggaactgaggcaggcactaaaagcagctgactggcagccctagaaacatgaagggtttcatttatagtttcagtccttttccttctttcgagccttaatttaaa

SEQ ID NO: 93071 - DNA, 1539 bp, Homo sapiens
tagaggatccccagtccgtcgaatgagcatctacaaaatgaaaatagtaatatttgcctcaaagactattatttgggaggatctagtgcaaatgttagtaatgtggatattgtgtagtgtcccaggatattaatgtttttagcctcttggcttttattctgtattgttgccccaaaagatgatgctcacttatctttcatccagtgtaaggatatctggaaagacaacagaaagtatagctgttttcatttcaaaagtgatcagctgcttgagctagcaagcaaggcttgcactagcttccaggcgcagtcacgcagtttcacagcaggcgcggttccctcggagcacccagagctgccctgcggtagtcagcagttgtgctgtggctgcactgccaggctgggtggcaggtggatcggagccagcagatgtggctcaggaagtgccttcttggcctctccttaatctctttcagagtctgtgggcccttgattgcactgtgggttgtttcagactccagtattaggagactgaaccccttggtggtttttttgtgtgtgtgtgctgagctgggttgaggacatgttaagcaggtggggtgcctcccctgggtttgctccgggtggtacctgtggtgtggggtggttctgagtagttctggccccactgctggagtatctgcccactcagtttgtgagatggcagggcttcatcctggtctggtgcctcattttcttctttagcagtgggcttagaaccaatgcagattcccaagttaagtattttttctgtagcttaattattacaggcttctggtacctaagccctttcttactttctgttctgaggggaagagaagataatgttgtttctccgccccccccggagtggccccaggaccttgcatggcatttgcagcatttgcagcgtgcttgggtttgctttactagggtgaaagtgttgcaccccccagcacccacaaaggcacctctggctcaccctccggtgaggttctgactggccctgggacatcacctgctccaggatcctatgtggctcatcccaggagagatgtgggagggaaggggaaaaaaggcttacatttgctgagtggaattcatgtagatctgagttccgcattgattcctaagctgcagagcccttatgccttggctgttttgtgaatgttagtcggtcttaacctttttcaccgagttagcattggctgtctcaggaggctcacagctcctgctcctcctccaggggagtgcgccctcctcctctgtcggtagctgtcaggtgcccctttcctctgcagcagactgtcctgggtccttgcctggccttccccttacacgtgagcctgcagcttcattcacagcccctgtgtagaaagataggcacatcgataggtccctccctgcccagagtgggcggaactgaggcaggcactaaaagcagctgactggcagccctagaaacatgaagggtttcatttatagtttcagtccttttccttctttcgagccttaatttaaa

SEQ ID NO: 93072 - DNA, 434 bp, Homo sapiens
gtacatgaatttgcccattacattttgctactttgagacattagaagacctctcaagaagtccgaacctttctgttgagacttgttcttagatgagacaaatctgatctctcaaaaagatgaggttctcctaaaaacagtgtgtcagttctctgtgaacttgggaaaaattgtgaaacagagaccttgattccctattcagacctcccatatacagaattcatgagtgtcagctaggatctgtccccagatattgcatgggcttcatctcttgatactatggacaacttttggtagaggaggtagaggataaaagaaaataagagatcacctgcaatcttagtgcagactgtaaggagttcagagaaagtgccagccttcaggaaatgtcaggacaagtgttagctcaattcagtaaccaaattcagttcaatt

SEQ ID NO: 93073 - DNA, 911 bp, Homo sapiens
tggagacagtctcactctgttgcccaggctgcaatgcactggcactatcttagctcaccgcaatctctgtctcccgggttcaagcgattctcgtgcctcagcctcccaggtagctgggattacaggggcgcgccaccacacccagataatttttgtactttttagtagagatggggtttcaccacgttggccaggctggtctcaaactgctggcctcaagtgatccccttccctctgcctcctaaagtgctgggattacaggtgtgagccaccgtgcccagcctgacgtgttcaaagtagttatacatacagctggtatatgacaattatgatttaataaatctaatcctatttggcaaagggatagcctagggtagtgttcgaaagtcagcccacccaagttatgttcttaaacccaagcacccttatatagacattacacactggattccttaaaaaaacaacaacaaattcatgtaaaataaaacatagaaacagattctgcacacaaacgtagggcttaatgaattacactaagaccaatacccttggtaactcctaccaggttaaaagaactttgtcaccacttcagaagccaggtccctatcacaatctcctccctcttcccatatatttcccttcatagaaccacaggtattctatgcttctatttttacgttcacagaatttccttgcaggtttttttttttttttaattacccaagtttgggtgaccccagcgcttagcatcacttaaaaaattgttttggcattagtcttctttcttactataatgctaatagaataaacgatgtctacactgattttgtaaagaaaaactagccatagtagtaaatcatttactgtctaacatgatgcaaatttcaactttgaataagtaagtcttacac

SEQ ID NO: 93074 - DNA, 663 bp, Homo sapiens
taatattaagaaagctctaacacaagagtttacaatttcaaagagtacaaaaaagtgctgcctgctgtcccttctcatattttagttgtaccctagtgatcttgacttcttttacatttagacaaaggctatttttttaacaaataataagcaaatgttctccattatgctaatgaaaccattttaatcaactagacgtggcctgaaaagcaaaggcttttgccatccaattgctgccacaaataatggcttacttgacatgaaagatgtcaaaattatcatttttggaagacattatccaaaattaaattgggttaattccacaaaattctgctcagcaagtctactaattaaatctcatggagtatattttccagccacctattctggcaggctcaccagatagttacaaagtccagaaccaaatattctatagggccatctacagggattttcggtggtttgaatgggtcaatttcaacaccagtaattaaagttttccaaatctaatatttctccattatggtttggaactttaaggtcacaatcaagcaattatataaatgttctacctgacagatccaaagttgctttttggggaagttctagctttgtctaaaaataactttccatagggaggtaggattaccttttctgtaaatt

SEQ ID NO: 93075 - DNA, 2396 bp, Homo sapiens
caggcagctgccaggagctcttccctgctcgctcacgcctgagcgcagaagctccgatccagacacacgcgaggcgctgtcctttcagcaccacaagctcgggctgaggagggaggactcctggccgtcctcctcctcttcaaattggcttgaatctgctctgaccccccacgagtgcagcacagtctgggaagaaaggcgtaaggatggtgaagctgaacagtaaccccagcgagaagggaaccaagccgccttcagttgaggatggcttccagaccgtccctctcatcactcccttggaggttaatcacttacagctgcctgctccagaaaaggtgattgtgaagacaagaacggaatatcagccggaacagaagaacaaagggaagttccgggtgccgaaaatcgctgaatttacggtcaccatccttgtcagcctggccctagctttccttgcgtgcatcgtgttcctggtggtttacaaagccttcacctatgatcacagctgcccagagggattcgtctataagcacaaacgctgtatcccagcctccctggatgcttactactcctcccaggaccccaattccagaagccgcttctacacagtcatcagccactacagcgtggccaagcagagcactgcccgggccatcgggccgtggctgtcagcagccgctgtcatccatgagcccaagccgcccaagacccagggccactagaggcctgccccagccagaatggggggcggggtggagaggaggacccccattggctaagccaagctccagttacaagacaacactgtactcctgggatatgggggcgggggcggggcagggcagggtggggggaagaacgcaccaaaaacgtggtgtgtgctggagttgtctgaaccgatatttctttttgttccttggtattgttgattcgtcgccgagtcaggctcatgtacaaaggcatgtttcgtgttgattgttcccatgtaagatatttttaaagccactgcttattctttgttaggaaaatgtaacagcagaaaaggaaagaaacaaagaacatgaacaaaaagcattaaactggctccatcagaagacgttgaagggcagtgaagagcacagactctgtgggcttcttagataagaaaacgtagcttcagtgggggctccagggttgcagagtatgagtgacacagaccgggactattccattagcctgtggtctgcagggtaggcccgcaggaaatgaggaatggccgagctggagagaagagctgattttggcattactaagcccagaacgcacataacccatagtgaaatgtgctggcctctggtgcattttgcaagatgagcacaaactttctgggcctccatcctaggacctgggcagacccacatggcctgggctctgaatgcccaccctgcgacggtgggttctgcatcagcaaacgctgaggagtgggcagattttctttgtcttttgcttgcattttctagatccacacctggatactgcccatgttgacgagacagcagcagggggagagggagggaaggaaggtgcggctgcaagaaggaaggcacgggacaggcatgtgacactaggccacaagcgataagcacaggcacctgacttttaagtttttgtttgtttgttgtttcccaaagtgctgataacaataacaacaacaataggattccaaccaggagcctcaagtgacagccaggaagagacctgaaggttggggccaccacaatgccaaatcgtttctaaaggaagctgaaaaatgggactgtcttttgcccacttcgttgtgttaaaaggggacatttgtccaaactccccaaccgagttctagaagctcctgacaaggaggcagcatccagccttgaccaggcctcccagttccctggaaccgtatcaggcattcgcctgcctctcacaaatgtttcagggaggccagttctgcagggtgtcagctccaggacccacagggccagaaccagctgggagaattggttatttgagatgtggtactgcttcctcacaagtctcccacaggccatgtaaagggtatttttttgtggcttgctgtgttgctgagatcatcgtatgcaacagctgggtaataagactagcatagctcaaactatcctgccaaacgctctcatctgatttttcctcccttctcccccaacctccaatcaccctgagtcacctgtaaattcatttgtcattcaaagcggaataacaagttgtccctagcaaaaccgctgagcgctttataattttgtggtgtatttttgtcagtaggtagcagaggcggaagtattttttggtgtaattcttgaaattttctgacaggaaacaaataaagatagatgtgtctgaga

SEQ ID NO: 93076 - DNA, 694 bp, Homo sapiens
caggcagctgccaggagctcttccctgctcgctcacgcctgagcgcagaagctccgatccagacacacgcgaggcgctgtcctttcagcaccacaagctcgggctgaggagggaggactcctggccgtcctcctcctcttcaaattggcttgaatctgctctgaccccccacgagtgcagcacagtctgggaagaaaggcgtaaggatggtgaagctgaacagtaaccccagcgagaagggaaccaagccgccttcagttgaggatggcttccagaccgtccctctcatcactcccttggaggttaatcacttacagctgcctgctccagaaaaggtgattgtgaagacaagaacggaatatcagccggaacagaagaacaaagggaagttccgggtgccgaaaatcgctgaatttacggtcaccatccttgtcagcctggccctagctttccttgcgtgcatcgtgttcctggtggtttacaaagcctctcccccaacctccaatcaccctgagtcacctgtaaattcatttgtcattcaaagcggaataacaagttgtccctagcaaaaccgctgagcgctttataattttgtggtgtatttttgtcagtaggtagcagaggcggaagtattttttggtgtaattcttgaaattttctgacaggaaacaaataaagatagatgtgtctgaga

SEQ ID NO: 93077 - DNA, 448 bp, Homo sapiens
aacagaaggaaaatatcaagtgaggttaaattgcgttacaggcagggtgacaagtcctaatgatgttaatatggcggtcagtgaaatgtgaatcgactcgcaaaagggacactttgggacggggtccgcccacagtgtctctctctatctctctctctctctctctctctctctctctctctctctctctctctctctctctctctctctctctctctctctctctcctcgtgccgaattcggctcccccaacctccaatcaccctgagtcacctgtaaattcatttgtcattcaaagcggaataacaagttgtccctagcaaaaccgctgagcgctttataattttgtggtgtatttttgtcagtaggtagcagaggcggaagtattttttggtgtaattcttgaaattttctgacaggaaacaaataaagatagatgtgtctgaga

SEQ ID NO: 93078 - DNA, 764 bp, Homo sapiens
cagtacggatgtgtgatcgaaaacccggctggtctgagcagcgtctatagaataggtaaagtaataccaagggctttttatcatttccttcttccctttaagtttcacttgaaattttaaaaatcatgtttatttttatcgttgggatctttctgtcttctgggttccattttttaaatgtttaaaaatatgttgacatggtagttcagttcttaaccaatgacttggggatgatgcaaacaattactgtcgttgggatttagagtgtattagtcacgcatgtatggggaagtagtctcgggtatgctgttgtgaaatctgaaactgtaaaagtagatggttgaaagcactggcccgcacatccgtactggcccggggccagctgcgtatgtggcccaggggaggagtgtggtccctctgtgtgcattccctggaatgtggaacttcctagatgccaccctcctcttggagagcagtggctggtcttacttttttattgtactttcagtgtctgccacacagcacaggcccagtgaaagtggaccaagacccagctgcgtacaagtacttgcaggaataagcaggtacctgcatgaatgagcacagagcttgcaggagaggcctggggtatcttggtgcaccaggccacggggtcaaatttacctgccttcctggcaagagatcacaagaaatattcccaggttcacatgtaagaatgtttgctgcagtactatctataaaattaaagtattggaaactagact

SEQ ID NO: 93079 - DNA, 2556 bp, Homo sapiens
  misc_feature (2403)..(2403): n is a, c, g, or t
  misc_feature (2407)..(2407): n is a, c, g, or t
  misc_feature (2421)..(2421): n is a, c, g, or t
  misc_feature (2423)..(2423): n is a, c, g, or t
caggcagctgccaggagctcttccctgctcgctcacgcctgagcgcagaagctccgatccagacacacgcgaggcgctgtcctttcagcaccacaagctcgggctgaggagggaggactcctggccgtcctcctcctcttcaaattggcttgaatctgctctgaccccccacgagtgcagcacagtctgggaagaaaggcgtaaggatggtgaagctgaacagtaaccccagcgagaagggaaccaagccgccttcagttgaggatggcttccagaccgtccctctcatcactcccttggaggttaatcacttacagctgcctgctccagaaaaggtgattgtgaagacaagaacggaatatcagccggaacagaagaacaaagggaagttccgggtgccgaaaatcgctgaatttacggtcaccatccttgtcagcctggccctagctttccttgcgtgcatcgtgttcctggtggtttacaaagccttcacctatgatcacagctgcccagagggattcgtctataagcacaaacgctgtatcccagcctccctggatgcttactactcctcccaggaccccaattccagaagccgcttctacacagtcatcagccactacagcgtggccaagcagagcactgcccgggccatcgggccgtggctgtcagcagccgctgtcatccatgagcccaagccgcccaagacccagggccactagaggcctgccccagccagaatggggggcggggtggagaggaggacccccattggctaagccaagctccagttacaagacaacactgtactcctgggatatgggggcgggggcggggcagggcagggtggggggaagaacgcaccaaaaacgtggtgtgtgctggagttgtctgaaccgatatttctttttgttccttggtattgttgattcgtcgccgagtcaggctcatgtacaaaggcatgtttcgtgttgattgttcccatgtaagatatttttaaagccactgcttattctttgttaggaaaatgtaacagcagaaaaggaaagaaacaaagaacatgaacaaaaagcattaaactggctccatcagaagacgttgaagggcagtgaagagcacagactctgtgggcttcttagataagaaaacgtagcttcagtgggggctccagggttgcagagtatgagtgacacagaccgggactattccattagcctgtggtctgcagggtaggcccgcaggaaatgaggaatggccgagctggagagaagagctgattttggcattactaagcccagaacgcacataacccatagtgaaatgtgctggcctctggtgcattttgcaagatgagcacaaactttctgggcctccatcctaggacctgggcagacccacatggcctgggctctgaatgcccaccctgcgacggtgggttctgcatcagcaaacgctgaggagtgggcagattttctttgtcttttgcttgcattttctagatccacacctggatactgcccatgttgacgagacagcagcagggggagagggagggaaggaaggtgcggctgcaagaaggaaggcacgggacaggcatgtgacactaggccacaagcgataagcacaggcacctgacttttaagtttttgtttgtttgttgtttcccaaagtgctgataacaataacaacaacaataggattccaaccaggagcctcaagtgacagccaggaagagacctgaaggttggggccaccacaatgccaaatcgtttctaaaggaagctgaaaaatgggactgtcttttgcccacttcgttgtgttaaaaggggacatttgtccaaactccccaaccgagttctagaagctcctgacaaggaggcagcatccagccttgaccaggcctcccagttccctggaaccgtatcaggcattcgcctgcctctcacaaatgtttcagggaggccagttctgcagggtgtcagctccaggacccacagggccagaaccagctgggagaattggttatttgagatgtggtactgcttcctcacaagtctcccacaggccatgtaaagggtatttttttgtggcttgctgtgttgctgagatcatcgtatgcaacagctgggtaataagactagcatagctcaaactatcctgccaaacgctctcatctgatttttcctcccttctcccccaacctccaatcaccctgagtcacctgtaaattcatttgtcattcaaagcggaataacaagttgtccctagcaaaaccgctgagcgctttataattttgtggtgtatttttgtcagtaggtagcagaggcggaagtattttttggtgtaattcttgaaattttctgacaggaaacaaataaagatagatgtgtctgagaaaaaaanaaanagagagagagagananagagagagagagccagcgccacagccacagacagtcagcccgagagagtagacagtgccgtcccataccacatagccttccgcatgtcggccgcctcgcgcgttatcttactttcgtcgggcgggtgacccaa

SEQ ID NO: 93080 - DNA, 2288 bp, Homo sapiens
caggcagctgccaggagctcttccctgctcgctcacgcctgagcgcagaagctccgatccagacacacgcgaggcgctgtcctttcagcaccacaagctcgggctgaggagggaggactcctggccgtcctcctcctcttcaaattggcttgaatctgctctgaccccccacgagtgcagcacagtctgggaagaaaggcgtaaggatggtgaagctgaacagtaaccccagcgagaagggaaccaagccgccttcagttgaggatggcttccagaccgtccctctcatcactcccttggaggttaatcacttacagctgcctgctccagaaaaggtgattgtgaagacaagaacggaatatcagccggaacagaagaacaaagggaagttccgggtgccgaaaatcgctgaatttacggtcaccatccttgtcagcctggccctagctttccttgcgtgcatcgtgttcctggtggtttacaaagccttcacctatgatcacagctgcccagagggattcgtctataagcacaaacgctgtatcccagcctccctggatgcttactactcctcccaggaccccaattccagaagccgcttctacacagtcatcagccactacagcgtggccaagcagagcactgcccgggccatcgggccgtggctgtcagcagccgctgtcatccatgagcccaagccgcccaagacccagggccactagaggcctgccccagccagaatggggggcggggtggagaggaggacccccattggctaattgtctgaaccgatatttctttttgttccttggtattgttgattcgtcgccgagtcaggctcatgtacaaaggcatgtttcgtgttgattgttcccatgtaagatatttttaaagccactgcttattctttgttaggaaaatgtaacagcagaaaaggaaagaaacaaagaacatgaacaaaaagcattaaactggctccatcagaagacgttgaagggcagtgaagagcacagactctgtgggcttcttagataagaaaacgtagcttcagtgggggctccagggttgcagagtatgagtgacacagaccgggactattccattagcctgtggtctgcagggtaggcccgcaggaaatgaggaatggccgagctggagagaagagctgattttggcattactaagcccagaacgcacataacccatagtgaaatgtgctggcctctggtgcattttgcaagatgagcacaaactttctgggcctccatcctaggacctgggcagacccacatggcctgggctctgaatgcccaccctgcgacggtgggttctgcatcagcaaacgctgaggagtgggcagattttctttgtcttttgcttgcattttctagatccacacctggatactgcccatgttgacgagacagcagcagggggagagggagggaaggaaggtgcggctgcaagaaggaaggcacgggacaggcatgtgacactaggccacaagcgataagcacaggcacctgacttttaagtttttgtttgtttgttgtttcccaaagtgctgataacaataacaacaacaataggattccaaccaggagcctcaagtgacagccaggaagagacctgaaggttggggccaccacaatgccaaatcgtttctaaaggaagctgaaaaatgggactgtcttttgcccacttcgttgtgttaaaaggggacatttgtccaaactccccaaccgagttctagaagctcctgacaaggaggcagcatccagccttgaccaggcctcccagttccctggaaccgtatcaggcattcgcctgcctctcacaaatgtttcagggaggccagttctgcagggtgtcagctccaggacccacagggccagaaccagctgggagaattggttatttgagatgtggtactgcttcctcacaagtctcccacaggccatgtaaagggtatttttttgtggcttgctgtgttgctgagatcatcgtatgcaacagctgggtaataagactagcatagctcaaactatcctgccaaacgctctcatctgatttttcctcccttctcccccaacctccaatcaccctgagtcacctgtaaattcatttgtcattcaaagcggaataacaagttgtccctagcaaaaccgctgagcgctttataattttgtggtgtatttttgtcagtaggtagcagaggcggaagtattttttggtgtaattcttgaaattttctgacaggaaacaaataaagatagatgtgtctgaga

SEQ ID NO: 93081 - DNA, 2260 bp, Homo sapiens
caggcagctgccaggagctcttccctgctcgctcacgcctgagcgcagaagctccgatccagacacacgcgaggcgctgtcctttcagcaccacaagctcgggctgaggagggaggactcctggccgtcctcctcctcttcaaattggcttgaatctgctctgaccccccacgagtgcagcacagtctgggaagaaaggcgtaaggatggtgaagctgaacagtaaccccagcgagaagggaaccaagccgccttcagttgaggatggcttccagaccgtccctctcatcactcccttggaggttaatcacttacagctgcctgctccagaaaaggtgattgtgaagacaagaacggaatatcagccggaacagaagaacaaagggaagttccgggtgccgaaaatcgctgaatttacggtcaccatccttgtcagcctggccctagctttccttgcgtgcatcgtgttcctggtggtttacaaagccttcacctatgatcacagctgcccagagggattcgtctataagcacaaacgctgtatcccagcctccctggatgcttactactcctcccaggaccccaattccagaagccgcttctacacagtcatcagccactacagcgtggccaagcagagcactgcccgggccatcgggccgtggctgtcagcagccgctgtcatccatgagcccaagccgcccaagacccaggggggaagaacgcaccaaaaacgtggtgtgtgctggagttgtctgaaccgatatttctttttgttccttggtattgttgattcgtcgccgagtcaggctcatgtacaaaggcatgtttcgtgttgattgttcccatgtaagatatttttaaagccactgcttattctttgttaggaaaatgtaacagcagaaaaggaaagaaacaaagaacatgaacaaaaagcattaaactggctccatcagaagacgttgaagggcagtgaagagcacagactctgtgggcttcttagataagaaaacgtagcttcagtgggggctccagggttgcagagtatgagtgacacagaccgggactattccattagcctgtggtctgcagggtaggcccgcaggaaatgaggaatggccgagctggagagaagagctgattttggcattactaagcccagaacgcacataacccatagtgaaatgtgctggcctctggtgcattttgcaagatgagcacaaactttctgggcctccatcctaggacctgggcagacccacatggcctgggctctgaatgcccaccctgcgacggtgggttctgcatcagcaaacgctgaggagtgggcagattttctttgtcttttgcttgcattttctagatccacacctggatactgcccatgttgacgagacagcagcagggggagagggagggaaggaaggtgcggctgcaagaaggaaggcacgggacaggcatgtgacactaggccacaagcgataagcacaggcacctgacttttaagtttttgtttgtttgttgtttcccaaagtgctgataacaataacaacaacaataggattccaaccaggagcctcaagtgacagccaggaagagacctgaaggttggggccaccacaatgccaaatcgtttctaaaggaagctgaaaaatgggactgtcttttgcccacttcgttgtgttaaaaggggacatttgtccaaactccccaaccgagttctagaagctcctgacaaggaggcagcatccagccttgaccaggcctcccagttccctggaaccgtatcaggcattcgcctgcctctcacaaatgtttcagggaggccagttctgcagggtgtcagctccaggacccacagggccagaaccagctgggagaattggttatttgagatgtggtactgcttcctcacaagtctcccacaggccatgtaaagggtatttttttgtggcttgctgtgttgctgagatcatcgtatgcaacagctgggtaataagactagcatagctcaaactatcctgccaaacgctctcatctgatttttcctcccttctcccccaacctccaatcaccctgagtcacctgtaaattcatttgtcattcaaagcggaataacaagttgtccctagcaaaaccgctgagcgctttataattttgtggtgtatttttgtcagtaggtagcagaggcggaagtattttttggtgtaattcttgaaattttctgacaggaaacaaataaagatagatgtgtctgaga

SEQ ID NO: 93082 - DNA, 2037 bp, Homo sapiens
caggcagctgccaggagctcttccctgctcgctcacgcctgagcgcagaagctccgatccagacacacgcgaggcgctgtcctttcagcaccacaagctcgggctgaggagggaggactcctggccgtcctcctcctcttcaaattggcttgaatctgctctgaccccccacgagtgcagcacagtctgggaagaaaggcgtaaggatggtgaagctgaacagtaaccccagcgagaagggaaccaagccgccttcagttgaggatggcttccagaccgtccctctcatcactcccttggaggttaatcacttacagctgcctgctccagaaaaggtgattgtgaagacaagaacggaatatcagccggaacagaagaacaaagggaagttccgggtgccgaaaatcgctgaatttacggtcaccatccttgtcagcctggccctagctttccttgcgtgcatcgtgttcctggtggtttacaaagcctggggggaagaacgcaccaaaaacgtggtgtgtgctggagttgtctgaaccgatatttctttttgttccttggtattgttgattcgtcgccgagtcaggctcatgtacaaaggcatgtttcgtgttgattgttcccatgtaagatatttttaaagccactgcttattctttgttaggaaaatgtaacagcagaaaaggaaagaaacaaagaacatgaacaaaaagcattaaactggctccatcagaagacgttgaagggcagtgaagagcacagactctgtgggcttcttagataagaaaacgtagcttcagtgggggctccagggttgcagagtatgagtgacacagaccgggactattccattagcctgtggtctgcagggtaggcccgcaggaaatgaggaatggccgagctggagagaagagctgattttggcattactaagcccagaacgcacataacccatagtgaaatgtgctggcctctggtgcattttgcaagatgagcacaaactttctgggcctccatcctaggacctgggcagacccacatggcctgggctctgaatgcccaccctgcgacggtgggttctgcatcagcaaacgctgaggagtgggcagattttctttgtcttttgcttgcattttctagatccacacctggatactgcccatgttgacgagacagcagcagggggagagggagggaaggaaggtgcggctgcaagaaggaaggcacgggacaggcatgtgacactaggccacaagcgataagcacaggcacctgacttttaagtttttgtttgtttgttgtttcccaaagtgctgataacaataacaacaacaataggattccaaccaggagcctcaagtgacagccaggaagagacctgaaggttggggccaccacaatgccaaatcgtttctaaaggaagctgaaaaatgggactgtcttttgcccacttcgttgtgttaaaaggggacatttgtccaaactccccaaccgagttctagaagctcctgacaaggaggcagcatccagccttgaccaggcctcccagttccctggaaccgtatcaggcattcgcctgcctctcacaaatgtttcagggaggccagttctgcagggtgtcagctccaggacccacagggccagaaccagctgggagaattggttatttgagatgtggtactgcttcctcacaagtctcccacaggccatgtaaagggtatttttttgtggcttgctgtgttgctgagatcatcgtatgcaacagctgggtaataagactagcatagctcaaactatcctgccaaacgctctcatctgatttttcctcccttctcccccaacctccaatcaccctgagtcacctgtaaattcatttgtcattcaaagcggaataacaagttgtccctagcaaaaccgctgagcgctttataattttgtggtgtatttttgtcagtaggtagcagaggcggaagtattttttggtgtaattcttgaaattttctgacaggaaacaaataaagatagatgtgtctgaga

SEQ ID NO: 93083 - DNA, 1697 bp, Homo sapiens
caggcagctgccaggagctcttccctgctcgctcacgcctgagcgcagaagctccgatccagacacacgcgaggcgctgtcctttcagcaccacaagctcgggctgaggagggaggactcctggccgtcctcctcctcttcaaattggcttgaatctgctctgaccccccacgagtgcagcacagtctgggaagaaaggcgtaaggatggtgaagctgaacagtaaccccagcgagaagggaaccaagccgccttcagttgaggatggcttccagaccgtccctctcatcactcccttggaggttaatcacttacagctgcctgctccagaaaaggtgattgtgaagacaagaacggaatatcagccggaacagaagaacaaagggaagttccgggtgccgaaaatcgctgaatttacggtcaccatccttgtcagcctggccctagctttccttgcgtgcatcgtgttcctggtggtttacaaagccttcacctatgatcacagctgcccagagggattcgtctataagcacaaacgctgtatcccagcctccctggatgcttactactcctcccaggaccccaattccagaagccgcttctacacagtcatcagccactacagcgtggccaagcagagcactgcccgggccatcgggccgtggctgtcagcagccgctgtcatccatgagcccaagccgcccaagacccagggccactagaggcctgccccagccagaatggggggcggggtggagaggaggacccccattggctaagccaagctccagttacaagacaacactgtactcctgggatatgggggcgggggcggggcagggcagggtggggggaagaacgcaccaaaaacgtggtgtgtgctggagttgtctgaaccgatatttctttttgttccttggtattgttgattcgtcgccgagtcaggctcatgtacaaaggcatgtttcgtgttgattgttcccatgtaagatatttttaaagccactgcttattctttgttaggaaaatgtaacagcagaaaaggaaagaaacaaagaacatgaacaaaaagcattaaactggctccatcagaagacgttgaagggcagtgaagagcacagactctgtgggcttcttagataagaaaacgtagcttcagtgggggctccagggttgcagagtatgagtgacacagaccgggactattccattagcctgtggtctgcagggtaggcccgcaggaaatgaggaatggccgagctggagagaagagctgattttggcattactaagcccagaacgcacataacccatagtgaaatgtgctggcctctggtgcattttgcaagatgagcacaaactttctgggcctccatcctaggacctgggcagacccacatggcctgggctctgaatgcccaccctgcgacggtgggttctgcatcagcaaacgctgaggagtgggcagattttctttgtcttttgcttgcattttctagatccacacctggatactgcccatgttgacgagacagcagcagggggcgaccagtgcatagccaactagaagtaaaaaaaacttgagggggggcccgagacccaatgccccctatctcgagtcggataacaattcaatggccagcgttttacaacatcgacactggcaaaacgctggctttacccaacttaatcgcgtt

SEQ ID NO: 93084 - DNA, 1883 bp, Homo sapiens
caggcagctgccaggagctcttccctgctcgctcacgcctgagcgcagaagctccgatccagacacacgcgaggcgctgtcctttcagcaccacaagctcgggctgaggagggaggactcctggccgtcctcctcctcttcaaattggcttgaatctgctctgaccccccacgagtgcagcacagtctgggaagaaaggcgtaaggatggtgaagctgaacagtaaccccagcgagaagggaaccaagccgccttcagttgaggatggcttccagaccgtccctctcatcactcccttggaggttaatcacttacagctgcctgctccagaaaagggggggaagaacgcaccaaaaacgtggtgtgtgctggagttgtctgaaccgatatttctttttgttccttggtattgttgattcgtcgccgagtcaggctcatgtacaaaggcatgtttcgtgttgattgttcccatgtaagatatttttaaagccactgcttattctttgttaggaaaatgtaacagcagaaaaggaaagaaacaaagaacatgaacaaaaagcattaaactggctccatcagaagacgttgaagggcagtgaagagcacagactctgtgggcttcttagataagaaaacgtagcttcagtgggggctccagggttgcagagtatgagtgacacagaccgggactattccattagcctgtggtctgcagggtaggcccgcaggaaatgaggaatggccgagctggagagaagagctgattttggcattactaagcccagaacgcacataacccatagtgaaatgtgctggcctctggtgcattttgcaagatgagcacaaactttctgggcctccatcctaggacctgggcagacccacatggcctgggctctgaatgcccaccctgcgacggtgggttctgcatcagcaaacgctgaggagtgggcagattttctttgtcttttgcttgcattttctagatccacacctggatactgcccatgttgacgagacagcagcagggggagagggagggaaggaaggtgcggctgcaagaaggaaggcacgggacaggcatgtgacactaggccacaagcgataagcacaggcacctgacttttaagtttttgtttgtttgttgtttcccaaagtgctgataacaataacaacaacaataggattccaaccaggagcctcaagtgacagccaggaagagacctgaaggttggggccaccacaatgccaaatcgtttctaaaggaagctgaaaaatgggactgtcttttgcccacttcgttgtgttaaaaggggacatttgtccaaactccccaaccgagttctagaagctcctgacaaggaggcagcatccagccttgaccaggcctcccagttccctggaaccgtatcaggcattcgcctgcctctcacaaatgtttcagggaggccagttctgcagggtgtcagctccaggacccacagggccagaaccagctgggagaattggttatttgagatgtggtactgcttcctcacaagtctcccacaggccatgtaaagggtatttttttgtggcttgctgtgttgctgagatcatcgtatgcaacagctgggtaataagactagcatagctcaaactatcctgccaaacgctctcatctgatttttcctcccttctcccccaacctccaatcaccctgagtcacctgtaaattcatttgtcattcaaagcggaataacaagttgtccctagcaaaaccgctgagcgctttataattttgtggtgtatttttgtcagtaggtagcagaggcggaagtattttttggtgtaattcttgaaattttctgacaggaaacaaataaagatagatgtgtctgaga

SEQ ID NO: 93085 - DNA, 1376 bp, Homo sapiens
gatcccccgggctgcatgaattcggcacgttacaaagaacatgaacaaaaagcattaaactggctccatcagaagacgttgaagggcagtgaagagcacagactctgtgggcttcttagataagaaaacgtagcttcagtgggggctccagggttgcagagtatgagtgacacagaccgggactattccattagcctgtggtctgcagggtaggcccgcaggaaatgaggaatggccgagctggagagaagagctgattttggcattactaagcccagaacgcacataacccatagtgaaatgtgctggcctctggtgcattttgcaagatgagcacaaactttctgggcctccatcctaggacctgggcagacccacatggcctgggctctgaatgcccaccctgcgacggtgggttctgcatcagcaaacgctgaggagtgggcagattttctttgtcttttgcttgcattttctagatccacacctggatactgcccatgttgacgagacagcagcagggggagagggagggaaggaaggtgcggctgcaagaaggaaggcacgggacaggcatgtgacactaggccacaagcgataagcacaggcacctgacttttaagtttttgtttgtttgttgtttcccaaagtgctgataacaataacaacaacaataggattccaaccaggagcctcaagtgacagccaggaagagacctgaaggttggggccaccacaatgccaaatcgtttctaaaggaagctgaaaaatgggactgtcttttgcccacttcgttgtgttaaaaggggacatttgtccaaactccccaaccgagttctagaagctcctgacaaggaggcagcatccagccttgaccaggcctcccagttccctggaaccgtatcaggcattcgcctgcctctcacaaatgtttcagggaggccagttctgcagggtgtcagctccaggacccacagggccagaaccagctgggagaattggttatttgagatgtggtactgcttcctcacaagtctcccacaggccatgtaaagggtatttttttgtggcttgctgtgttgctgagatcatcgtatgcaacagctgggtaataagactagcatagctcaaactatcctgccaaacgctctcatctgatttttcctcccttctcccccaacctccaatcaccctgagtcacctgtaaattcatttgtcattcaaagcggaataacaagttgtccctagcaaaaccgctgagcgctttataattttgtggtgtatttttgtcagtaggtagcagaggcggaagtattttttggtgtaattcttgaaattttctgacaggaaacaaataaagatagatgtgtctgaga

SEQ ID NO: 93086 - DNA, 668 bp, Homo sapiens
gctgagatcatcgtatgcaacagctgggtaataagactagcatagctcaaactatcctgccaaacgctctcatctgattttttcctcccttctcccccaacctccaatcaccctgaagtaaaccgagttctagaagctcctgacaaggaggcagcatccagccttgaccaggcctcccagttccctggaaccgtatcaggcattcgcctgcctctcacaaatgtttcagggaggccagttctgcagggtgtcagctccaggacccacagggccagaaccagctgggagaattggttatttgagatgtggtactgcttcctcacaagtctcccacaggccatgtaaagggtatttttttgtggcttgctgtgttgctgagatcatcgtatgcaacagctgggtaataagactagcatagctcaaactatcctgccaaacgctctcatctgatttttcctcccttctcccccaacctccaatcaccctgagtcacctgtaaattcatttgtcattcaaagcggaataacaagttgtccctagcaaaaccgctgagcgctttataattttgtggtgtatttttgtcagtaggtagcagaggcggaagtattttttggtgtaattcttgaaattttctgacaggaaacaaataaagatagatgtgtctgaga

SEQ ID NO: 93087 - DNA, 2576 bp, Homo sapiens
  misc_feature (2403)..(2403): n is a, c, g, or t
  misc_feature (2407)..(2407): n is a, c, g, or t
  misc_feature (2421)..(2421): n is a, c, g, or t
  misc_feature (2423)..(2423): n is a, c, g, or t
caggcagctgccaggagctcttccctgctcgctcacgcctgagcgcagaagctccgatccagacacacgcgaggcgctgtcctttcagcaccacaagctcgggctgaggagggaggactcctggccgtcctcctcctcttcaaattggcttgaatctgctctgaccccccacgagtgcagcacagtctgggaagaaaggcgtaaggatggtgaagctgaacagtaaccccagcgagaagggaaccaagccgccttcagttgaggatggcttccagaccgtccctctcatcactcccttggaggttaatcacttacagctgcctgctccagaaaaggtgattgtgaagacaagaacggaatatcagccggaacagaagaacaaagggaagttccgggtgccgaaaatcgctgaatttacggtcaccatccttgtcagcctggccctagctttccttgcgtgcatcgtgttcctggtggtttacaaagccttcacctatgatcacagctgcccagagggattcgtctataagcacaaacgctgtatcccagcctccctggatgcttactactcctcccaggaccccaattccagaagccgcttctacacagtcatcagccactacagcgtggccaagcagagcactgcccgggccatcgggccgtggctgtcagcagccgctgtcatccatgagcccaagccgcccaagacccagggccactagaggcctgccccagccagaatggggggcggggtggagaggaggacccccattggctaagccaagctccagttacaagacaacactgtactcctgggatatgggggcgggggcggggcagggcagggtggggggaagaacgcaccaaaaacgtggtgtgtgctggagttgtctgaaccgatatttctttttgttccttggtattgttgattcgtcgccgagtcaggctcatgtacaaaggcatgtttcgtgttgattgttcccatgtaagatatttttaaagccactgcttattctttgttaggaaaatgtaacagcagaaaaggaaagaaacaaagaacatgaacaaaaagcattaaactggctccatcagaagacgttgaagggcagtgaagagcacagactctgtgggcttcttagataagaaaacgtagcttcagtgggggctccagggttgcagagtatgagtgacacagaccgggactattccattagcctgtggtctgcagggtaggcccgcaggaaatgaggaatggccgagctggagagaagagctgattttggcattactaagcccagaacgcacataacccatagtgaaatgtgctggcctctggtgcattttgcaagatgagcacaaactttctgggcctccatcctaggacctgggcagacccacatggcctgggctctgaatgcccaccctgcgacggtgggttctgcatcagcaaacgctgaggagtgggcagattttctttgtcttttgcttgcattttctagatccacacctggatactgcccatgttgacgagacagcagcagggggagagggagggaaggaaggtgcggctgcaagaaggaaggcacgggacaggcatgtgacactaggccacaagcgataagcacaggcacctgacttttaagtttttgtttgtttgttgtttcccaaagtgctgataacaataacaacaacaataggattccaaccaggagcctcaagtgacagccaggaagagacctgaaggttggggccaccacaatgccaaatcgtttctaaaggaagctgaaaaatgggactgtcttttgcccacttcgttgtgttaaaaggggacatttgtccaaactccccaaccgagttctagaagctcctgacaaggaggcagcatccagccttgaccaggcctcccagttccctggaaccgtatcaggcattcgcctgcctctcacaaatgtttcagggaggccagttctgcagggtgtcagctccaggacccacagggccagaaccagctgggagaattggttatttgagatgtggtactgcttcctcacaagtctcccacaggccatgtaaagggtatttttttgtggcttgctgtgttgctgagatcatcgtatgcaacagctgggtaataagactagcatagctcaaactatcctgccaaacgctctcatctgatttttcctcccttctcccccaacctccaatcaccctgagtcacctgtaaattcatttgtcattcaaagcggaataacaagttgtccctagcaaaaccgctgagcgctttataattttgtggtgtatttttgtcagtaggtagcagaggcggaagtattttttggtgtaattcttgaaattttctgacaggaaacaaataaagatagatgtgtctgagaaaaaaanaaanagagagagagagananagagagagagagagagagagagagagatagagagagacatacagatacagatacggtgagactactcttattcacatagatacttatctcactctaacttcactttcactctttccctgttacttttcctctctcctcctctctcttctctct

SEQ ID NO: 93088 - DNA, 2416 bp, Homo sapiens
caggcagctgccaggagctcttccctgctcgctcacgcctgagcgcagaagctccgatccagacacacgcgaggcgctgtcctttcagcaccacaagctcgggctgaggagggaggactcctggccgtcctcctcctcttcaaattggcttgaatctgctctgaccccccacgagtgcagcacagtctgggaagaaaggcgtaaggatggtgaagctgaacagtaaccccagcgagaagggaaccaagccgccttcagttgaggatggcttccagaccgtccctctcatcactcccttggaggttaatcacttacagctgcctgctccagaaaaggtgattgtgaagacaagaacggaatatcagccggaacagaagaacaaagggaagttccgggtgccgaaaatcgctgaatttacggtcaccatccttgtcagcctggccctagctttccttgcgtgcatcgtgttcctggtggtttacaaagccttcacctatgatcacagctgcccagagggattcgtctataagcacaaacgctgtatcccagcctccctggatgcttactactcctcccaggaccccaattccagaagccgcttctacacagtcatcagccactacagcgtggccaagcagagcactgcccgggccatcgggccgtggctgtcagcagccgctgtcatccatgagcccaagccgcccaagacccagggccactagaggcctgccccagccagaatggggggcggggtggagaggaggacccccattggctaagccaagctccagttacaagacaacactgtactcctgggatatgggggcgggggcggggcagggcagggtggggggaagaacgcaccaaaaacgtggtgtgtgctggagttgtctgaaccgatatttctttttgttccttggtattgttgattcgtcgccgagtcaggctcatgtacaaaggcatgtttcgtgttgattgttcccatgtaagatatttttaaagccactgcttattctttgttaggaaaatgtaacagcagaaaaggaaagaaacaaagaacatgaacaaaaagcattaaactggctccatcagaagacgttgaagggcagtgaagagcacagactctgtgggcttcttagataagaaaacgtagcttcagtgggggctccagggttgcagagtatgagtgacacagaccgggactattccattagcctgtggtctgcagggtaggcccgcaggaaatgaggaatggccgagctggagagaagagctgattttggcattactaagcccagaacgcacataacccatagtgaaatgtgctggcctctggtgcattttgcaagatgagcacaaactttctgggcctccatcctaggacctgggcagacccacatggcctgggctctgaatgcccaccctgcgacggtgggttctgcatcagcaaacgctgaggagtgggcagattttctttgtcttttgcttgcattttctagatccacacctggatactgcccatgttgacgagacagcagcagggggagagggagggaaggaaggtgcggctgcaagaaggaaggcacgggacaggcatgtgacactaggccacaagcgataagcacaggcacctgacttttaagtttttgtttgtttgttgtttcccaaagtgctgataacaataacaacaacaataggattccaaccaggagcctcaagtgacagccaggaagagacctgaaggttggggccaccacaatgccaaatcgtttctaaaggaagctgaaaaatgggactgtcttttgcccacttcgttgtgttaaaaggggacatttgtccaaactccccaaccgagttctagaagctcctgacaaggaggcagcatccagccttgaccaggcctcccagttccctggaaccgtatcaggcattcgcctgcctctcacaaatgtttcagggaggccagttctgcagggtgtcagctccaggacccacagggccagaaccagctgggagaattggttatttgagatgtggtactgcttcctcacaagtctcccacaggccatgtaaagggtatttttttgtggcttgctgtgttgctgagatcatcgtatgcaacagctgggtaataagactagcatagctcaaactatcctgccaaacgctctcatctgatttttcctcccttctcccccaacctccaatcaccctgagtcacctgtaaattcatttgtcattcaaagcggaataacaagttgtccctagcaaaaccgctgagcgctttataattttgtggtgtatttttgtcagtaggtagcagaggcggaagtattttttggtgtaattcttgaaattttctgacaggaaacaaataaagatagatgtgtctgagaaaaaaaaaaacctcgtgccg

SEQ ID NO: 93089 - DNA, 2451 bp, Homo sapiens
caggcagctgccaggagctcttccctgctcgctcacgcctgagcgcagaagctccgatccagacacacgcgaggcgctgtcctttcagcaccacaagctcgggctgaggagggaggactcctggccgtcctcctcctcttcaaattggcttgaatctgctctgaccccccacgagtgcagcacaccctctctttctgcctcacctcctgctgtaaccagaatcccactgcttgccttaggtctgggaagaaaggcgtaaggatggtgaagctgaacagtaaccccagcgagaagggaaccaagccgccttcagttgaggatggcttccagaccgtccctctcatcactcccttggaggttaatcacttacagctgcctgctccagaaaaggtgattgtgaagacaagaacggaatatcagccggaacagaagaacaaagggaagttccgggtgccgaaaatcgctgaatttacggtcaccatccttgtcagcctggccctagctttccttgcgtgcatcgtgttcctggtggtttacaaagccttcacctatgatcacagctgcccagagggattcgtctataagcacaaacgctgtatcccagcctccctggatgcttactactcctcccaggaccccaattccagaagccgcttctacacagtcatcagccactacagcgtggccaagcagagcactgcccgggccatcgggccgtggctgtcagcagccgctgtcatccatgagcccaagccgcccaagacccagggccactagaggcctgccccagccagaatggggggcggggtggagaggaggacccccattggctaagccaagctccagttacaagacaacactgtactcctgggatatgggggcgggggcggggcagggcagggtggggggaagaacgcaccaaaaacgtggtgtgtgctggagttgtctgaaccgatatttctttttgttccttggtattgttgattcgtcgccgagtcaggctcatgtacaaaggcatgtttcgtgttgattgttcccatgtaagatatttttaaagccactgcttattctttgttaggaaaatgtaacagcagaaaaggaaagaaacaaagaacatgaacaaaaagcattaaactggctccatcagaagacgttgaagggcagtgaagagcacagactctgtgggcttcttagataagaaaacgtagcttcagtgggggctccagggttgcagagtatgagtgacacagaccgggactattccattagcctgtggtctgcagggtaggcccgcaggaaatgaggaatggccgagctggagagaagagctgattttggcattactaagcccagaacgcacataacccatagtgaaatgtgctggcctctggtgcattttgcaagatgagcacaaactttctgggcctccatcctaggacctgggcagacccacatggcctgggctctgaatgcccaccctgcgacggtgggttctgcatcagcaaacgctgaggagtgggcagattttctttgtcttttgcttgcattttctagatccacacctggatactgcccatgttgacgagacagcagcagggggagagggagggaaggaaggtgcggctgcaagaaggaaggcacgggacaggcatgtgacactaggccacaagcgataagcacaggcacctgacttttaagtttttgtttgtttgttgtttcccaaagtgctgataacaataacaacaacaataggattccaaccaggagcctcaagtgacagccaggaagagacctgaaggttggggccaccacaatgccaaatcgtttctaaaggaagctgaaaaatgggactgtcttttgcccacttcgttgtgttaaaaggggacatttgtccaaactccccaaccgagttctagaagctcctgacaaggaggcagcatccagccttgaccaggcctcccagttccctggaaccgtatcaggcattcgcctgcctctcacaaatgtttcagggaggccagttctgcagggtgtcagctccaggacccacagggccagaaccagctgggagaattggttatttgagatgtggtactgcttcctcacaagtctcccacaggccatgtaaagggtatttttttgtggcttgctgtgttgctgagatcatcgtatgcaacagctgggtaataagactagcatagctcaaactatcctgccaaacgctctcatctgatttttcctcccttctcccccaacctccaatcaccctgagtcacctgtaaattcatttgtcattcaaagcggaataacaagttgtccctagcaaaaccgctgagcgctttataattttgtggtgtatttttgtcagtaggtagcagaggcggaagtattttttggtgtaattcttgaaattttctgacaggaaacaaataaagatagatgtgtctgaga

SEQ ID NO: 93090 - DNA, 735 bp, Homo sapiens
caggcagctgccaggagctcttccctgctcgctcacgcctgagcgcagaagctccgatccagacacacgcgaggcgctgtcctttcagcaccacaagctcgggctgaggagggaggactcctggccgtcctcctcctcttcaaattggcttgaatctgctctgaccccccacgagtgcagcacagtctgggaagaaaggcgtaaggatggtgaagctgaacagtaaccccagcgagaagggaaccaagccgccttcagttgaggatggcttccagaccgtccctctcatcactcccttggaggttaatcacttacagctgcctgctccagaaaaggtgattgtgaagacaagaacggaatatcagccggaacagaagaacaaagggaagttccgggtgccgaaaatcgctgaatttacggtcaccatccttgtcagcctggccctagctttccttgcgtgcatcgtgttcctggtggtttacaaagccttcacctatgatcacagctgcccagagggattcgtctataagctcccccaacctccaatcaccctgagtcacctgtaaattcatttgtcattcaaagcggaataacaagttgtccctagcaaaaccgctgagcgctttataattttgtggtgtatttttgtcagtaggtagcagaggcggaagtattttttggtgtaattcttgaaattttctgacaggaaacaaataaagatagatgtgtctgaga

SEQ ID NO: 93091 - DNA, 679 bp, Homo sapiens
caggcagctgccaggagctcttccctgctcgctcacgcctgagcgcagaagctccgatccagacacacgcgaggcgctgtcctttcagcaccacaagctcgggctgaggagggaggactcctggccgtcctcctcctcttcaaattggcttgaatctgctctgaccccccacgagtgcagcacagtctgggaagaaaggcgtaaggatggtgaagctgaacagtaaccccagcgagaagggaaccaagccgccttcagttgaggatggcttccagaccgtccctctcatcactcccttggaggttaatcacttacagctgcctgctccagaaaaggtgattgtgaagacaagaacggaatatcagccggaacagaagaacaaagggaagttccgggtgccgaaaatcgctgaatttacggtcatgtctgccacacagcacaggcccagtgaaagtggaccaagacccagctgcgtacaagtacttgcaggaataagcaggtacctgcatgaatgagcacagagcttgcaggagaggcctggggtatcttggtgcaccaggccacggggtcaaatttacctgccttcctggcaagagatcacaagaaatattcccaggttcacatgtaagaatgtttgctgcagtactatctataaaattaaagtattggaaactagact

SEQ ID NO: 93092 - DNA, 266 bp, Homo sapiens
atgggcacatccatggaagagtaagtctcagactcctggaggccaggggaagtgccaagcaagggcaccaatagtgggaaggcaatagggggtcctagtgaggaattattctctcttttgtttctcttgggctttttaagtacttctcaccccccaggtttagctgcacccttcttctttccctttgaatcagaacgtggatttgggctaggctcagtggctctcagcactttgggaggtcaagtggatggactgcttaagcccca

SEQ ID NO: 93093 - DNA, 715 bp, Homo sapiens
acttttataacacagtccaaataccatgcctttggaagtcttcattgcttacttaatcaccctaacacactttctcaaataccccccaaacaatactagagtggattagattttcggtgcttacctctgttattcaatgtaccatgttttactattaatatgtttgtcttccttactagattgtaagctccctctgggcttgggccatcatttatttgattttctgttcccagtgcctgacgtattgccagaacataagggaactctcagtgaatgcttgaatgaatgccacaggattctatgttaaggcttgacctattaaatatttagaaccaatgacttgtataaggacacataaacaacctatgaaatttgccaatagtagaaaccgagaggactaacaactcattttatgtcaggaggttaggagaatgggccaaatgtatcatgaagaaatttagctgatagaaatatacaattctatgtctgaattacaaaaatcagtaacataccagcctaggcaatatgatgaaaccccgtctctacaaaaaatacaaaaattagccaggcatagtggcacatgtcagtagtcctagctacttggaaggccaaggtaggaggatcacttgagcctgggaggttgagtctgcagtgagccaagattgcaccactgcactccagcctgggcaatagatagaatgagaccctgtcttga

SEQ ID NO: 93094 - DNA, 1067 bp, Homo sapiens
aaggtcggacggaagttcccgaagcttccggtggccggcttagttaggagctatggctaaacatcatcctgatttgatcttttgccgcaagcaggctggtgttgccatcggaagactgtgtgaaaaatgtgatggcaagtgtgtgatttgtgactcctatgtgcgtccctgcactctggtgcgcatatgtgatgagtgtaactatggatcttaccaggggcgctgtgtgatctgtggaggacctggggtctctgatgcctattattgtaaggagtgcaccatccaggagaaggacagagatggctgcccaaagattgtcaatctggggagctctaagacagacctcttctatgaacgcaaaaaatacggcttcaagaagaggtgattggtgggtggccccttcctccccccaacatcagtctgctgcagctgccagaaaacatgcctactactaccagcagaaagggagcagagcccagagcatcaccaggagtgcctgctagtgtactggcagcttgccaccccctcctctcccttcacccagacacgtggtagggatggaaaaggattcttcacagagcactctggcacaccatatcggagaaaacttgatagattagttaatggtttttcttgaattcgagaagcatagatctgttctccatattggtatgttctccctcaaccaagatcttctaaaaagaaataatattttagtcttctgcttgaggaactgactgtgaagcgacgcccagtgaaaaacatgttcttgcagcagctctggtggcagctgtccttgaggaacctttggtgtgtggtgggaagctatcagaacaagaaatgtaggcatttcccgtttttttggggggggggggtgggggggcagggctctgccctcttgaaaggcatttacttgtttaacacttgtccagctacagtggggtacagtagctggctattcacaggcatcatcatagcccactagtctcatattattttccttttgagaaattggaaactctttctgttgctattatattaataaagttggtgtttattttctggta

SEQ ID NO: 93095 - DNA, 1294 bp, Homo sapiens
aaggtcggacggaagttcccgaagcttccggtggccggcttagttaggagctatggctaaacatcatcctgatttgatcttttgccgcaagcaggctggtgttgccatcggaagactgtgtgaaaaatgtgatggcaagtgtgtgatttgtgactcctatgtgcgtccctgcactctggtgcgcatatgtgatgagtgtaactatggatcttaccaggggcgctgtgtgatctgtggaggacctggggtctctgatgcctattattgtaaggagtgcaccatccaggagaaggacagagatggctgcccaaagattgtcaatctggggagctctaagacagacctcttctatgaacgcaaaaaatacggcttcaagaagaggtgattggtgggtggccccttcctccccccaacatcagtctgctgcagctgccagaaaacatgcctactactaccagcagaaagggagcagagcccagagcatcaccaggagtgcctgctagtgtactggcagcttgccaccccctcctctcccttcacccagacacgtggtagggatggaaaaggattcttcacagagcactctggcacaccatatcggagaaaacttgatagattagttaatggtttttcttgaattcgagaagcatagatctgttctccatattggtatgttctccctcaaccaagatcttctaaaaagaaataatattttagtcttctgcttgaggaactgactgtgaagcgacgcccagtgaaaaacatgttcttgcagcagctctggtggcagctgtccttgaggaacctttggtgtgtggtgggaagctatcagaacaagaaatgtaggcatttcccgtttttttggggggggggggtgggggggcagggctctgccctcttgaaaggcatttacttgtttaacacttgtccagctacagtggggtacagtagctggctattcacaggcatcatcatagcccactagtctcatattattttccttttgagaaattggaaactctttctgttgctattatattaataaagttggtgtttattttctggtagtcaccttccccatttaactttaactctaggaatttattttagtcacccaggaatttgtgattcaaaacagaggtagtgggattggttaagtactttgtcctcttattaccactggaaggaattcaaaaccacccatacctttcattatagatagatcaaagtcatctttagaaacgtactattttttccttcctgtccaactttaattttgaactgaagagatagc

SEQ ID NO: 93096 - DNA, 995 bp, Homo sapiens
aaggtcggacggaagttcccgaagcttccggtggccggcttagttaggagctatggctaaacatcatcctgatttgatcttttgccgcaagcaggctggtgttgccatcggaagactgtgtgaaaaatgtgatggcaagtgtgtgatttgtgactcctatgtgcgtccctgcactctggtgcgcatatgtgatgagtgtaactatggatcttaccaggggcgctgtgtgatctgtggaggacctggggtctctgatgcctattattgtaaggagtgcaccatccaggagaaggacagagatggctgcccaaagattgtcaatctggggagctctaagacagacctcttctatgaacgcaaaaaatacggcttcaagaagaggtgattggtgggtggccccttcctccccccaacatcagtctgctgcagctgccagaaaacatgcctactactaccagcagaaagggagcagagcccagagcatcaccaggagtgcctgctagtgtactggcagcttgccaccccctcctctcccttcacccagacacgtggtagggatggaaaaggattcttcacagagcactctggcacaccatatcggagaaaacttgatagattagttaatggtttttcttgaattcgagaagcatagatctgttctccatattggtatgttctccctcaaccaagatcttctaaaaagaaataatattttagtcttctgcttgaggaactttggtgtgtggtgggaagctatcagaacaagaaatgtaggcatttcccgtttttttggggggggggggtgggggggcagggctctgccctcttgaaaggcatttacttgtttaacacttgtccagctacagtggggtacagtagctggctattcacaggcatcatcatagcccactagtctcatattattttccttttgagaaattggaaactctttctgttgctattatattaataaagttggtgtttattttctggta

SEQ ID NO: 93097 - DNA, 845 bp, Homo sapiens
aaggtcggacggaagttcccgaagcttccggtggccggcttagttaggagctatggctaaacatcatcctgatttgatcttttgccgcaagcaggctggtgttgccatcggaagactgtgtgaaaaatgtgatggcaagtgtgtgatttgtgactcctatgtgcgtccctgcactctggtgcgcatatgtgatgagtgtaactatggatcttaccaggggcgctgtgtgatctgtggaggacctggggtctctgatgcctattattgtaaggagtgcaccatccaggagaaggacagagatggctgcccaaagattgtcaatctggggagctctaagacagacctcttctatgaacgcaaaaaatacggcttcaagaagaggtgattggtgggtggccccttcctccccccaacatcagtctgctgcagctgccagaaaacatgccctcttgaaaggcatttacttgtttaacacttgtccagctacagtggggtacagtagctggctattcacaggcatcatcatagcccactagtctcatattattttccttttgagaaattggaaactctttctgttgctattatattaataaagttggtgtttattttctggtagtcaccttccccatttaactttaactctaggaatttattttagtcacccaggaatttgtgattcaaaacagaggtagtgggattggttaagtactttgtcctcttattaccactggaaggaattcaaaaccacccatacctttcattatagatagatcaaagtcatctttagaaacgtactattttttccttcctgtccaactttaattttgaactgaagagatagc

SEQ ID NO: 93098 - DNA, 552 bp, Homo sapiens
  misc_feature (427)..(427): n is a, c, g, or t
aaggtcggacggaagttcccgaagcttccggtggccggcttagttaggagctatggctaaacatcatcctgatttgatcttttgccgcaagcaggctggtgttgccatcggaagactgtgtgaaaaatgtgatggcaagtgtgtgatttgtgactcctatgtgcgtccctgcactctggtgcgcatatgtgatgagtgtaactatggatcttaccaggggcgctgtgtgatctgtggaggacctggggtctctgatgcctattattgtaaggagtgcaccatccaggagaaggacagagatggctgcccaaagattgtcaatctggggagctctaagacagacctcttctatgaacgcaaaaaatacggcttcaagaagaggtgattggtgggtggccccttcctccccccaacattcaagtgcttngccgtgcaagctaggcccagaaaaaaaacccaaatttgacccccttaaaccttaaacctttaaaaccccaaagcccaaaggaacaaaacgggggacggcaagaaagggcccaaggaagcattcac

SEQ ID NO: 93099 - DNA, 1139 bp, Homo sapiens
aaggtcggacggaagttcccgaagcttccggtggccggcttagttaggagctatggctaaacatcatcctgatttgatcttttgccgcaagcaggctggtgttgccatcggaagactgtgtgaaaaatgtgatggcaagtgtgtgatttgtgactcctatgtgcgtccctgcactctggtgcgcatatgtgatgagtgtaactatggatcttaccaggggcgctgtgtgatctgtggaggacctggggtctctgatgcctattattgtaaggagtgcaccatccaggagaaggacagagatggctgcccaaagattgtcaatctggggagctctaagacagacctcttctatgaacgcaaaaaatacggcttcaagaagaggtgattggtgggtggccccttcctccccccaacatcagtctgctgcagctgccagaaaacatgcctactactaccagcagaaagggagcagagcccagagcatcaccaggagtgcctgctagtgtactggcagcttgccaccccctcctctcccttcacccagacacgtggtagggatggaaaaggattcttcacagagcactctggcacaccatatcggagaaaacttgatagattagttaatggtttttcttgaattcgagaagcatagatctgttctccatattggtatgttctccctcaaccaagatcttctaaaaagaaataatattttagtcttctgcttgaggaactgactgtgaagcgacgcccagtgaaaaacatgttcttgcagcagctctggtggcagctgtccttgaggaacctttggtgtgtggtgggaagctatcagaacaagaaatgtaggcatttcccgtttttttggcgcaatggattcctggtaaattattcttcctatgacagatgactccgaagcacgttctgaaagttcctctaaaaacctttattactattttaaggacaattatcactcatcacctcggaattccttagcttttaaactgttcagtctccctttacttaggaatgttggcaccccagttaccttccgagtcgtgccgcatgttatatgtcaccactctggctttatttaattctccgcttctattccatttacacagctacccctacataatttt

SEQ ID NO: 93100 - DNA, 390 bp, Homo sapiens
gcccggctaattttttgtatttttagtagagacggggtttcaccgttttagccgggatggtctcgatctcctgacctcgtgatccgcccgcctcggcctcccaaagtgctgggattacaggcgtgagccaccgcgcccggcctacttttttttttaaagatctgagagtgtgaatcttccacctccttttcaaccaaagttgaggaatttgtcctgctataatctcaacccttgagtatttctttttttaaaaaattttattattattattattataatactttaagttttagggtacctgtgcacaacgtgcaggtttgttacatttgtatacatgtgccatgttggtgtgtgcacccattaactcgtcattcagcattaggtatattt

SEQ ID NO: 93101 - DNA, 708 bp, Homo sapiens
gctggatattttcagccttcaatttggcattaaggtcattgtgtgtaaagaagagaaaagctgcccgggggcgcggtggctcacgcctgtaatcctagcactttgggaggccgaggcgggtggatcacaaggtcaagagatcgagaccattctggccaacatggtgaaaacccatctctactaaaaatacgaaaattagctgggcgtggtggcatgctcctgtagtcccagctacttgggaggctgaggcagaaaactgcttgaacccgggaggcgggggttgcagtgagccgagattgtaccactgcactccaacctggcgacagagtaagactacaactaaaaaaaaaaaaaaaacacgaattcaaactgacttaaagaaaaacaaaataatgtggagataggcttatgctactgaaaaatctaggcatggctggatacagggtcctagctaatattatcacggtctattttctatctcaagcctctaccttcttctgtgttactttcattctcaggcactatcttagcatgggctgccatagcaaaataccatagactggttggcttaaaccatagaattttatttctcacagttcttgagcctggaaagtccaagatcaatgagctgacaagattgatttttcctcctgaggccttttctcttggcttccaggcagtcattagcttgctgtgtgctcacgtgac

SEQ ID NO: 93102 - DNA, 421 bp, Homo sapiens
catctcatccaaaaacaccctcatagaaacaaccagaatatctgaccacgtatctgggcaccttgtggcccagtcaagctgacacacaaaattaaccatcacagcagtcattgtgtaataggccccaagaaaaacacatgaggaacactggttactcctaaaacatctacattgaccaagattagaggacagaatctaaattagaagtgcaacttggaggccaggcgcggtggctcatgcctgtaatcccagtattttgagaggaggaggcgggcggatcacctgaggccaggagttcgagaccagtctggccaacatggcaaaaccccatctctattaaaatacaaaagaattagctaggcgtggtaatgcgtgcctgtagtcccagctactcaggaggctgagggacgagaattgctcg

SEQ ID NO: 93103 - DNA, 391 bp, Homo sapiens
gttgcttgagctgtggataccagtagatgcctgggcctgagctgctctatctgctcagtcatccatgtagccagagttcctgtgcagagtctggggtgcagaggctgggatgtgctgtcagcctagcaactcacgaggcatatccccacataggctggaaaacatggtgttagccccacagcctttaaatgccgtctttggaaattgctgcagctggtgtctggggccctctcctgggggctgctgcgccatggcaggctcaccaaggaccttcctcttcaggagattccattgcttaaacacaatcatcgcttgtcatttttgggactgtccaaagaagagatgtgatttttttttttttaatatagtagaagctggaaattcatacaag

SEQ ID NO: 93104 - DNA, 282 bp, Homo sapiens
cagcctgcaggtccacatgttcactgtcttggttgtttgctccttttgaatttgccttctttgatgttcaagagattcctcctagactcagtattctaagacttagtgaacacatctactttttcttaacacattttgtaggtttgggctctgccccaatttccagctgagtcctttataaaaacaaaaacaaagcaaaactgtcttgtagggacccactactccatcctcttgctactttaactgcttatcttctggctacttccaaattcatcacgtttt

SEQ ID NO: 93105 - DNA, 381 bp, Homo sapiens
tcccagattcaagcaattcttctgcctcagcctcccaagttccaatatgttttatacacatgtactcggaggcccccagaggttacgagactgacccaagggcacatttagaccaaatctcagagcaggactagaacctgttctctggagtctgacaaatattgttttactcataacatattgtattgaacatgtacaatctccaaaggcatttttccatgtcaaagatgaaacagggatgtaaaataaagaatgagtatatatgaagtatttatcattttaaaaaattcatttgtttttgcaattttcaagtcataattattttcatgcacagaagctgttttaagcaggacagatacagagagcaccataaaatttcat

SEQ ID NO: 93106 - DNA, 167 bp, Homo sapiens
ttctggttcctacagggcaccctctcactgtgttctcatatggaggaagggatgagctagctttctggggtgtcctttataagggactagaaaaggccccacctcctaataccatcaccttgggggatagaacttcatcatataaattttgaaagaacacaaccatt

SEQ ID NO: 93107 - DNA, 381 bp, Homo sapiens
  misc_feature (290)..(291): n is a, c, g, or t
  misc_feature (298)..(298): n is a, c, g, or t
gaggaccagaaggcagcccgagcccacaagaaaggccgcatagaggaggctaattttagctgggattgaaggatgcataggagctaatattaactcaagagaaacagtttaaaaatcccacaacacctttcaagtaaataacaaattttccatgactctctgctacaatttctggcaggtggctcatagaaataatttgttgcctttcctgggacccagagcaaatagactgggtgtgttccacctttcctgagtagatccaagtgaagtgtcccaaagtgctgggattnnaggcgtnacactgcacctggcctctgttgcagtcttatcttcatttcctttgtttataatgaagtggcgattaggcagttagtttccata

SEQ ID NO: 93108 - DNA, 1114 bp, Homo sapiens
gggagcggaggtgggggcggcgctggaacagaggaggaaagttttgccttttctgtctgggagattccctttctgcacaaacaatcttgccatgtcctgggacgtcttaaagtgagagtaggggttcccccttcactgcagccaggaaacgtgtgaaggcgttttgcgatcccaccccctcacacacacactttcttagaagggaaagctgtgagctctccgggcagttctgcttcttcctgtctttccatggcttggactttcacagatgtagcactgactatccagttgacatgaagacccctttaggagacccacactctgctgctatcccaagaatacgtctcccgaagcccccgctttccagctatcaaaggagagcgatacagtgattccccccaacaacccacaactgacgtcatcgcatgctatttttcctttttttttttcctccgggaagaagaaggagactgaactcattcacttttaactcgcaagccctatttgcccagaggagggtctaatttggaacagaggaaacgttatccataataataatgacgatggtgataatttagagctgtagtatgttgacttctctttccaaacatgtgaaaaagcaaagagactgctgcttggaggtgatttttttttttttttaatctgtaggtctggtttttcctagtctttacctagtaccagtgatttggaaggcattccctggagagaggagagcacagggttatgcaggcatcatcagtgaaagggtagtgaatgcattttaactatgtaagtgtgtctacataaatacgtgtgtgtgtgtgtatatatatatatacatgtatatatatgtgtgtatatatatatgtgtatatatatatatgtatatatatatatataacacctgggattccacaggagactgctttataaatgtctataattcagacaaggagcctctcttcacacacattctcttgagcactcattcactctctcacacaaagattgttgcagtaaaatactttaattggatggggggcgttaggttattattgcttgtataaaatgcctggtccattttatgtgtagaaataacattcctctcaaaacg

SEQ ID NO: 93109 - DNA, 106 bp, Homo sapiens
gaacagcaaggaacttgttaccagtggtaaaatgctgaccactctcatacgtacacgatatcagattggcagggccgaaaccacttcactgtcacctgttttgatc

SEQ ID NO: 93110 - DNA, 375 bp, Homo sapiens
taaatctcctcaaatattttacagagtttcactcttttcatccacagaggaaacatacccccaggcttggaagaaggaaagaactgcatccagattgggctataggtacagttacttcctacagaaatgcgtctttcctatggcttcttaaaactaagaaaaatattcagttatgagaaaagaaaagaacttttatctgaggaacacaagtccttttaattattgggcccagagaggtattaaaaacaggcagcaattgttgcagaattttgctccttagttcagttgtaagtgggttcttttcacacaaccaggaaatttaggcacgcagacacattaaagggtgagtagagcaggattttattgggtgaaaag

SEQ ID NO: 93111 - DNA, 696 bp, Homo sapiens
cacaatgtatcaaaaaggtgttattctgtgacatcaacaactgaaatgggtgggaacagagctgtaaaggaacatagttttgtatgctgttgaagttaagctggtataaattaaaattagagtattaaaactttagaatgttaaatgcgatgtccattgtaagcacaaggagaatagctacagcatctacacaaaaggaaatgaaaaggtaatttaaatgtttcactgcaaagaatcaactcaacacaaagaagacaatattcagaaaatgagacaaaaaagctgtaaggcatatgagaaataacaaaatgacagaagtaaatccctccatatcggtcattattttcgatgaatattaattaaaccctcccatccaaagacacagattggtagaataaacaaaaagatatgatcccattctatgctatctacaatagattcgctttgaacccaaagatacaagtggattgaaagggaaaggatggaaaaaggtattccatgcaaagagtaacccaaagacagcaggagcggctctactaatatcaaagaaaataagactttgaattaaaaaggttatgaaacaaagaaaaatattacatattgataaaaggttcaacagagcaagaacatataactattataaacatttaggcagctcataacagataatcaacatatacaaagcagatattgata

SEQ ID NO: 93112 - DNA, 369 bp, Homo sapiens
aggtaaaactacgaactgggagcccaatatgtggtctacctaaccatggtgaattttacataacatttcctttggctttgttatttataaaccttaactattaaaatacgggctgagatgtcaacatcacagctatcagcactcaacatttcttttctcaagacaattaaaaatccacatttccttgtttagcataaactttctagaaaggctctttgtttttctgccccattttatctaaaacaaatagcacaaatcagaggaaaagagtcttttctaacatttgttcaatctaaaagctaaatccagcatgtaggatatacttactttattgctataccatgattggctctcttcttcactccagga

SEQ ID NO: 93113 - DNA, 1030 bp, Homo sapiens
cagaaaaaagcctaattgcaacttgatggctttgttggctttctgagcaatgtgtccagttgccacagtgaagggaatggaataatctaactcaccattcccaagtcctatgccatcctgagagtggggggtggagtcaattcaccttggtgcttggactaagcatgaggtggtgagtgacaacgttcctaattgaagggtagggtaaatggttgttgggtggacaccaacacttattctactacagaagctaaattgaaccctcaggcagggtacgtgaaagtggcaagagatgtcaagaccactgggcaagttggccagttgttccttaggaatgaaaattcttttgaaaggaatggccagggtcctctgctggccccacttggtcttctggaggctctgatcttggttggttagtggtctttacaggccaaggtcaaggccattgcacaaaaaaccctgtgcatgcccttaacttgctttcagttgaatatttgggctgaactatgaggcagagaggaatcccattgggtggctccttgctgcattcgcagttgaccagcatggggtttgttggagaaataggaaccatcccctgaaaacacacactatggtagccactcaactgttgaaaggcactggagtccaatgggtgaggccgcctctgagacaagcctctgagttgaggctgggagaggctccctccttggagtgttgctttttttgtttcacccctgcctctggagatgggtagaggaacatgagctgaccttctgggaagttaggttggtgaggagttgctgaggcactgcagggccatgcccagtagagaggaatgtataacattttaagaggctgagagcaccccttgttgggcgcatgcccaatggcagcttccttctgccgatcatgggagaaatcaagcactttcacctaatggctagatgattgattttgggatgaaattctccactcctctcctttaccacatcaccactatccttcctgcaatacatccacgagactcact

SEQ ID NO: 93114 - DNA, 384 bp, Homo sapiens
acagcgaaatctaaagcaggtcatgtcagtccctggcagggaaccctccaccagcttcccgtgttccccaggacaaaagccccactcctcactgtggctccacagccctgtgtccagggcccctgccagtgtccagcttcctcctgggaacttgccctcatctcatgactacctctgccccagtcacagttgcttttctcttttcccaaacatcaaaacccttcctgtctcaggttattgtccctgctcttacactatgtacctaaatgatgacagcactgtccctttctcctccttcaggtctaggctcagagatgtctcccatgccctcccacccccatctgaagattcctctgcctgtcagtctctcacgttactcaggaa

SEQ ID NO: 93115 - DNA, 335 bp, Homo sapiens
tgatgatcacggatgaggtcaaggtgagctcagggcccagggctgggggccccccagggccagccctcttggatcttcggatggggtcaaggtgagctcagggcccagggctgggggccccccagggccagccctcttggatcttcggatggggtcaaggtgagctcagggcccagggccgggggccccccagggccagccctcttggatcttcggatggggtcaaggtgagctcagggcccagggctgggggccccccagggccagccctcttggatcttcggatggggtcaaggtgagctcagggcccagggccgggggccccccagggccag

SEQ ID NO: 93116 - DNA, 366 bp, Homo sapiens
ggggctcatcttaccttctgaaaccttcatacaagccacttaacagacgcctctctacctcttagagacattccgcaatgcaacaagcagcttgagttcttttcactcagagattcactcctcatttcataatattctgagccccaggagacatcatagcatcaaatcaaaactccccaggtctttgagccttgctcttaaaggaagatcatgagtcccaccaggcagttcttccttctactacataatcaaactccttttctctaaaatgtactgagtttggaacctacatgcgacttgtgccctttgatttgttgcccagattagtttgtgctgggctctatcctatcaccaggaatggtggtt

SEQ ID NO: 93117 - DNA, 498 bp, Homo sapiens
gataatgagaatagttttgatctgaaagtaaatgacttgacctcgtgatccacccgccttggcttcccaaagtgctgggattacaggcgtgagccaccgcacccggcctaaagtcacaaaatttattagcatcaagttattaataacatttccttattaaccattttaaatatctgtaggatctttaacaacgtctctttctttttgatactggtcatttgtgttcaataattgcgtcctctttttttcttggttggtgtacctagagtttagcaatcatattgaccttttcaaagaaccaccttctggcctcattagttgtgtctattgtttatccagctcataatggattacaaacctaaatttcaacttaactataaaccttctagaagaaaacaaagcagaaaatttttgcaactgtaggttaggcagaagatttcttaggtggacactaaataacacaattcataagagaaaaaaattggtaaattggacttc

SEQ ID NO: 93118 - DNA, 230 bp, Homo sapiens
tcctgccctcccccaaaaagacctgttgtaaacactgttcaaacaccagcattttattaaggataaagtaaccagaatttacttttacaacaagaagtggaacaccattactgacagtaaatacttgctttcatttatctcagtcttggcatcaaactctgaaataaaatttaccggccgggcatggtggctcacacctgtcccagcactttgggaggccaaggcaggcg

SEQ ID NO: 93119 - DNA, 442 bp, Homo sapiens
acagcattgaaaaatgactattttactttgtctaaaaaagtctttcaacaagggtctcaatagtttttgaattcattggtttaatttcttttgataagtttgcaagaacaactgatagacattaagatagctgtgatgcattagtaaattttaataaaatcttttcttatgaaattggccaatgggatttaaaagcttggtcatggttttctaagtgtagccccaaatgcacttctatgtggattcacatagctttgttagctttcttacgtagttgtaaccctcattaattccaagttttgggagaaaaaaaatcctgaatttcaaacctgttcttggaatcactggtttataaaatatagactgggttgaaaaataacgaagcatgacctattatgttggttttactacattttttcttacaattaataaataagataaa

SEQ ID NO: 93120 - DNA, 458 bp, Homo sapiens
acagagcagtgctatcatatgctatgctttgtgtaaaaggatcatatgttaggaatttacgctggcataaagaaagaagactatgcttgtatttccataaggaaacactgaaaaggatacacaagagactaatgaaatctgttccctgtgccccagggaagaactgggtgaagcgtggtttggggtgggaaggagacttcactgtctgccatacagacatatatacaagctttttcatatatatatgaagatgtatatttaaacttattttttaaccgggtgaataatttgcctatgaaaagcccagaaagagaaaaccctccatgacccacggcccaaggcccagaggtaccctggcccagctgcctctgcagcctcatcctgggaccctctcctccctcctctttctgtgcccaggaaggcacagctccagccttctgcctccatgaccctgccac

SEQ ID NO: 93121 - DNA, 405 bp, Homo sapiens
ctctaacatgctagtttatttcgtagtgtaaaatgtgtgttactgatgggcagacagctctcattcaagcagtgacagatgtaagctcttcccatttttgtggccccattgtattcggcgtgtggcttccaagttgcctgggatcatctccacccagactaaggaagaggaaagagcttggacaactgcacttggctggtttttatggatcaggcaaggaattggctccaacacattagctcacattccattggttagaactgggtttctcaactattagtacagggtgagtgtagggttttggcaccatgggcatttgagctggccaaaggctaatcagagttagaacaaagccacaaagcctgtgaatggtgtttattgttgtgaggagctgtcttgtgcatt

SEQ ID NO: 93122 - DNA, 665 bp, Homo sapiens
atgatgtcgggggacacaggcagctcatgcctggatcaggcagtgactggtgtgtgtgtgtgtgttatgaagagagagggatggaaattgtgaccagagagttggagttgggacccctgtcttgatcacttgagcatcagcagctccagggaagaacacattctgaaggaggaactctccagctaggatttcatcctgtcctagaggacacgaagaggtggagaccacccccacaactaaacttgaggattactaaggcaatggggactgcctaggaatatttttgagggggtaaaagcaccccataattgtgctaagtaacaaaagacagaacaagcagccttaaaacattctacatgatacactggtattagaataataagatcttaaagaccatccacttgaaaactggatttgcccctggtcatatgggcagacccatggcagacaaagaactagaagttcctcctaactcccaactcaatgtcctttccttaaagaataactgttctttattataaataggccaagcttttattatttagtatagaactcaggctgatatttttattgatggattaaaatttgaattattctgtagcatagtatttaaaagttttcttctacatatttgttatcattttctagcaaatatcctcaaaatt

SEQ ID NO: 93123 - DNA, 311 bp, Homo sapiens
tgtcaatgctacagtctcaaaagaaagagcacacttagggctcaacttagtgccttgtgtaaagagaaaagaaatgctttataagcagcgtggtgattcctcaaagagctagacacagagctaccattccacctagcaatccttttcaggaacatggatggagctggagtccattatccttagcaaattaactcaggaacagaaaaccaaatactgcatcttctcacttataagtgggagctaaataatgagaactcatggacacaaacagggaaacaacaggtactggagcccacttgagggtagagagt

SEQ ID NO: 93124 - DNA, 211 bp, Homo sapiens
cagtaagcttagtcaaatacacagaaatataaaaatggtatgagtttgctctttaactgtgctatcggtacacaagaatccctaaagaaagaacttcagcaaactcttcctatcctttcctgaatgtgttagctcaatttctaataagcactctatgtctttatagaacctttaaaataacaactttctttttaataacaaataacatttt

SEQ ID NO: 93125 - DNA, 138 bp, Homo sapiens
ataatcagataataacttttaacaggaaataaaaataacattgctaaaattaaaaagttaatagaagtgtaggaagataaagtggagaaattctatcagaaaacataaaaagataaaaatatacaaaatttgtagcat

SEQ ID NO: 93126 - DNA, 335 bp, Homo sapiens
tcaacatcaccaagtgtcatgcagggtcacacagtcacaaacagcactcaatatcacatcactcaatgtcactgtcatatagtatacatcaatgtcacacattgcatatcattgtcacacgtcactcaatgtcacacgtcattgtcagtgtcaatgtcatacagtaccatacatccctcatcgtcacacaatgtcacacattgtcacaaatcgatttcacacaatgtcagtgtcacaacactgtgtcacacaatgtcattcagttcatacatcggtgtcacagtgtcactcaatgtcatacagttcacacattgttcattgtcacaatatcacat

SEQ ID NO: 93127 - DNA, 516 bp, Homo sapiens
agggttagacggtaccaacagctcaagggctcagtctcacaagactgttccctacttcagatgccagttccaagtcttgggtgccagggcacccacacttctgtccaacttggctaccaaccagggggttcccatggccccctcctcaggttcaataatgttataaaggctcacaggactcagggaaacgttacttatgtaaaggatacaaatcaacagcaacatgaagaggtacacagggccatgtctggaatgtccccactgcaggagcttctgttcccctggaatttggagggtaccaccctacccatacatggatgcattcaccaacctggaagctctctgaactctccccatactccagccatcagttagggtttgtatagagattccattatgagggcatgactgattgctgattaaactcaatcttcagcccctttccaatctccagaggtcaaagggtgggactgaaagttccaaatttctaattatggcttggtctttttggtgact

SEQ ID NO: 93128 - DNA, 467 bp, Homo sapiens
cttgccccagcctcccaagtagctgtgactacaggtgcaaaccatcacacctggctaattaagaaaaaaaaaaaaagtctttttgtacaggcacagtctcgctatgttgcccaggctgggtcttgagctcctgggctcaagtgatcctcctgcctcagcctcccaaagtgctgggattataggcgtgaaccactgtgcccaacccatattttgatatttaatgctaacgtattttgagttttccatttgttctgatttgtcctttttaattccctcataacttttttggaggggctaatttatcaagttttaaaaataatgtcataaagttatatcctctatttctgttagtgattacccccataccttccatttctattattttaataattgccttaaattttcagcatgcatatctacattaatagaatctaaaaattattaactctgcccaccttcttactata

SEQ ID NO: 93129 - DNA, 387 bp, Homo sapiens
gatccttgctagggagagtaattcaacattgcaactaagcgttttttttttctttttaagatatattaagtccagataggcggactcctgttattctgtctactgcaacttcagcacgttgcccatgtaaaattattcccccaaagaatgttttatgaagggccaagggtcatgtcactcattagagaaacttcgctcatcaactatttgtcaccagttttttgacactagaaatattaaattcagatgaacttgaaaagtgacttaaaagcctattgcccaaaatattattctaggaggctatatcttatgatcaagccattaaaaggatttgaccaagacaaaaatgttcagcaattgaagctcctataaatgggttgtgtgtga

SEQ ID NO: 93130 - DNA, 802 bp, Homo sapiens
gctgggctatctgtcctgttccattggtttaaggtgtctgcttttatgctattatcatgctgtttgattataacagctttactttatacagccatgttccacataacaatatctcagtcaacgacagactacatgtaaacagtggtcccataagattataatggagctgaaaaactcctatcatctagtgatgttatgttatagtgcaacatactactcgtgttcgtggttatgctggtataaactaacctcctattcagtcatataaaaacagcacataccattatgtacactacagtatataattgataatggtaataaacaactattactggcataagctggtatataaccagcttataaacaactattactggcatattactggtatttactatgattctgaccctgtgtaggcctaggctaatgtgtatgtttgtgtcttagtttttaacaaaggtttaaggggtaaaaaataattttaataatagaaaaagcatgtagaataaagatatcaaaaaagaggccggggcatggtggctcacacctgtaatcccagcactttgggaaaccgagacaggtggaccacttgaggtcaggagttcgagaccagcctaggcaacacgatgaaactccgtctttgctacaaatgcaaaaaattacccgggtgtggtggcacatgcctgtaatcccagctagtctggaggctgaggtaggaagattgcttgaacccgggaggtgggggttgcagtgaaccaaggttgcaccactgcactccagcctgggtgacagagcaagactt

SEQ ID NO: 93131 - DNA, 578 bp, Homo sapiens
gggtggaatgcgcctgccacccccaggctagacgagggggcagagggtcagggtgggcattcgttgtgccgcttttgagctttgtgggccagagctgggtgtagggctggacaatgagcctcctcttccttgaaagaaggaattttggctgagacaatagggccctgtctgttctggcatggggggtggtggctgactcaattctgttccccctaagccctaacaaatgtcatgaagagaggggggcagttttccccttggtgccctgggctgcccccctgcccctttgtgacgacttgcccttctagctttcctcagctgatcttgctttttctcccataacctgaactgctttgttccctgcagctggttctctccctgccccctaactctcccctagtctgttttgggttcaagggggtactggtggtgttacagagctcatagcttctgatctggggagtccagaaataggggcctcagagggttggaaagatacttctagggagccctttgctgggatggggatgagggtagtgggacttgaccctactgagctgaccctgctggagctaagg

SEQ ID NO: 93132 - DNA, 403 bp, Homo sapiens
ccactgtactccagcctgggcgacagagtgggactccatctcaaataataataataatatccatcctaacaggtgtgaggagatacctcattgtggttttgatttgcactgcctggtggttagtgatgtgtactttttcatgcacctattgtatgtctcgtttctcttttcaaaccattgctgcttccctgcttaggcacacacaggtgctggggacatgtgggatctcaaaccacctaattcactttggagatgggtgtaggctgcagcagctgcaggctaccctgtgaacgcacagagctctgcagccgcaaacgggctggcctcctcactggccttggcctgacatgtgatgctctgagggactccacctgcaggagcctccacagtgagtgcctgcttt

SEQ ID NO: 93133 - DNA, 189 bp, Homo sapiens
tgatatgttttctctaggtcttctatttcttttctttccatttcactgccacaggcatgccacttaccatcagcattccatagatattttgtactcctattctgtatatagaactaccaaattattccgatagctgcctgagaccataaatatcatattgggtcagattaataattcggattcaagaac

SEQ ID NO: 93134 - DNA, 394 bp, Homo sapiens
ttctgactgtctgtctcggttctttgtttctcggcatggcaacagttgtggatgctgcctgcgtggccagggctcctagtagcactgacctgcaagatgagtgctggaagccccaacacaattgtttgggaataaatggaagtgaggaatggagaagtaaggaggtaccactctcaaggaggctgtcagtagaggggacaaagagtgtgagagaggaacagaagaaccaagcaggagactggaagagggatttacaaatctggagtccttccaaaacaggacaagtaagacatgagcagtgactttctactctccatccagcagccaacaatagacttcgtcattcagatggagctgcagaggtacagacctgagagagctggaagtcatagag

SEQ ID NO: 93135 - DNA, 134 bp, Homo sapiens
cagtggtgggcagagactaggaaggaagggctgcgtcttctcttctctttctctcttccatttccctcttctctcctctcccctcccctctcaacaaatataaaggttgtcttgatgaagtataaaggttgccc

SEQ ID NO: 93136 - DNA, 294 bp, Homo sapiens
ttttgctaacacccagttctgcctgctacaccacctgggaattgaccatccagctgtgttctctctgcctctggcccagtagcaactgacctgccctattcctggctgatctcatgctgctgaagttcaaggcgctggacacactaccctgatttttgttgcacctggcctagcctcattaacttggcaattagttggtggttttctttctttcttcttctttttttttttttaattcatttcatttctgtcaccccttaattttcatctttcttttttaagtagttgttccat

SEQ ID NO: 93137 - DNA, 717 bp, Homo sapiens
ggaaaacaatttgtgtgagtattggagttgcacactgaattagacacttttttcatgcaataccatattttcttgaaaaaacactgactggcaaagtatggttatccagatatgggtactggtggacatttcactttgtattccagtcacttgaaggaaaataacagacagtgtttgttgccagttgtgtcataatttttttttttttgagatagagtttctgtattgtcacaaaggctggagtgcaatggtgtgatctcggctcactgcagcctccacctcccgggttcaagcgattctcctgcctcagtcttgtgagtagctgggattacaggggtgcaccaccatgcccagctaatttttgtatttttagaagagacagggttttgccatgttggccaggctggtcttgaactcctggcctcaagggatccgtccacctcggtctcccaaagtgctgagattacagacatgagccaccgtgcccagccattgtgtcataattttatacatactctatttcatataaaatctcattagttgatattgaatgcattttattgtgtctaagatttttcattattaagctaggtatctctaaacttttttctgacacattttctttttcaccttcagtttcttgccagctctgagtatatgttttagtcagaagcctttctattgcaggtgcaaaaccctaatttaaattagcttaag

SEQ ID NO: 93138 - DNA, 266 bp, Homo sapiens
cacacacagtattttaaaaagtaaaaaacgaaagtaataaataaacaagaacttggctgggtgcggtgcctcatgcctgtaatcccagcactttgggaggccgaggcgggtggatcatgaggtcaagagattgagaccatcctggccaacatggtgaaaccccgtctctactaaaaatacaaaaattagctgggcgtggtggcatgcacctgtagtcccagctactttggaggctgaggcaggagaatcgcttgaatgtgggaggc

SEQ ID NO: 93139 - DNA, 99 bp, Homo sapiens
tcctcagcaccagggaaatgggattaaactggaggaggttaagagatggttaacaaaaatgctaggagtggagaaagttagatttaaacaagcaagatc

SEQ ID NO: 93140 - DNA, 341 bp, Homo sapiens
cagactgaagctgggtctccaacagtgatggcctgggagaatcactacacacgtgtgtttggacagcactttctacttcttaaaaagaagatatccacatctatcgtgaaagctgagaaatctaagagctggaagcctgggaggaagggatgtgctgtggccaacacaggagggcagaaatgacccctctgtgaccgctcctgtagccagaaagagccacaaacagtccaactccaaaggggaaatggtccccatttcctgcaggtaaccttctcatgacctgctctactccctggaaattcttgacactaaaggacactaaagaccttcttccttagtgc

SEQ ID NO: 93141 - DNA, 391 bp, Homo sapiens
ccaatcccatgtattactgacgaggtaactatggctcagggtgacttgacctgtaagccacaagcttgtgggtgaccactccaggccctgaatggaggatttcactccatccccctgccccacaagtggcctctgagagacagagtacctgatgccaccttatgtgggatattgtttttgctgtcacgaatttctgaatcccctctttgtggaatagagaaatcaaagccaccatacgttcaagggtatccactaaagaagccacatggttacttcagctaaaaataaattaaagacctaacaatgaattatcatttatctaatcatctgggaatgatgaaattaatgtttcgtatctactattttacagttataaattgcttagaaagta

SEQ ID NO: 93142 - DNA, 6226 bp, Homo sapiens
gtggtcgagccgcgcgcagggtgcgctcgtttgaactgcggtgacaccgagggttggggactcgaacccccgcttcgcagctcaggagcctgaggtccgaaagcttcgttccagagcccagcatgaatggatacgcggaatttccgcccagccccagtaaccccaccaaggagcccgtggagccccagcccagccaggtcccactgcaggaagatgtggacatgagcagtggctccagtggacatgagaccaacgaaaactgctccacggggcgggactcgcagggcagtgactgtgacgacagtgggaaggagctggggatgctggtggagccaccggatgcccgccagagtccagatacctttagcctgatgatggcaaaatctgaacacaacccatctacaagtggctgcagtagcgaccagtcttcgaaagtggacacacacaaagaactgataaaaacactaaaggagctgaaggtccacctccctgcagacaagaaggccaagggcaaggccagtacgctggccaccttgaagtacgccctcaggagcgtgaagcaggtgaaagccaatgaagagtattaccagctgctgatgtccagcgagggtcacccctgtggagcagacgtgccctcctacaccgtggaggagatggagagcgttacctctgagcacattgtgaagaatgccgatatgtttgcggtggccgtgtccctggtgtctgggaagatcctgtacatctctgaccaggttgcatccatatttcactgtaaaagagatgccttcagcgatgccaagtttgtggagttcctggcgcctcacgatgtgggcgtgttccacagtttcacctccccgtacaagcttcccttgtggagcatgtgcagtggagcagattcttttactcaagaatgcatggaggagaaatctttcttttgccgtgtcagtgtccggaaaagccacgagaatgaaatccgctaccaccccttccgcatgacgccctacctggtcaaggtgcgggaccaacaaggtgctgagagtcagctttgctgccttctgctggcagagagagtgcactctggttatgaagcccctagaattcctcctgaaaagagaatttttacaaccacccatacaccaaattgtttgttccaggatgtggatgaaagggcggtccctctcctgggctacctacctcaggacctgattgaaaccccagtgctcgtgcagctccaccctagtgacaggcccttgatgctggccatccacaaaaagatcctgcagtcaggcgggcagcctttcgactattctcccattcggtttcgcgcccggaacggagagtacatcacgttggacaccagctggtccagcttcatcaacccatggagcaggaaaatctccttcatcattgggaggcacaaagtcagggtgggccctttgaatgaggacgtgtttgcagcccacccctgcacagaggagaaggccctgcaccccagcattcaggagctcacagagcagatccaccggctcctgctgcagcccgtcccccacagcggctccagtggctacgggagtctgggcagcaacgggtcccacgagcaccttatgagccagacctcctccagcgacagcaacggccatgaggactcacgccggaggagagccgaaatttgtaaaaatggtaacaagaccaaaaatagaagtcattattctcatgaatctggagaacaaaagaaaaaatccgttacagaaatgcaaactaatcccccagctgagaagaaagctgtccctgccatggaaaaggacagcctgggggtcagcttccccgaggagttggcctgcaagaaccagcccacctgctcctaccagcagatcagctgcttggacagcgtcatcaggtacttggagagctgcaatgaggctgccaccctgaagaggaaatgcgagttcccagcaaacgtcccagcgctaaggtccagtgataagcggaaggccacagtcagcccagggccacacgctggagaggcagagccgccctccagggtgaacagccgcacgggagtaggtacgcacctgacctcgctggcactgccgggcaaggcagagagtgtggcgtcgctcaccagccagtgcagctacagcagcaccatcgtccatgtgggagacaagaagccgcagccggagttagagatggtggaagatgctgcgagtgggccagaatccctggactgcctggcgggccctgccctggcctgtggtctcagccaagagaaggagcccttcaagaagctgggcctcaccaaggaggtactcgctgcacacacacagaaggaggagcagagcttcctgcagaagttcaaagaaataagaaaactcagcattttccagtcccactgccattactacttgcaagaaagatccaaggggcagccaagtgaacgaactgcccctggactaagaaatacttccggaatagattcaccttggaaaaaaacaggaaagaacagaaaattgaagtccaagcgggtcaaacctcgagactcatctgagagcaccggatctggggggcccgtgtccgcccggcccccgctggtgggcttgaacgccacagcctggtcaccctcagacacgtcccagtccagctgcccagccgtgccctttcccgccccagtgccagcagcttattcactgcccgtgtttccagcgccagggactgtggcagcacccccggcacctccccacgccagcttcacagtgcctgctgtgcccgtggacctccagcaccagtttgcagtccagcccccacctttccctgcccctttggcgcctgtcatggcattcatgctacccagttattccttcccctcggggaccccaaacctgccccaggccttcttccccagccagcctcagtttccgagccaccccacactcacatccgagatggcctctgcctcacagcctgagttccccagccggacctcgatccccagacagccatgtgcttgtccagccacccgggccaccccaccatcggccatgggtagggcctccccaccgctctttcagtcccgcagcagctcgcccctgcagctcaacctgctgcagctggaggaagcccctgagggtggcactggagccatggggaccacaggggccacagagacagcagctgtaggggcggactgcaaacctggcacttctcgggaccagcagccgaaggcgcctctgacccgtgatgaaccctcagacacacagaacagtgacgccctttccacgtcaagcggcctcctaaacctcctgctgaatgaggacctctgctcagcctcgggctctgctgcttcggagtctctgggctccggctcactgggctgcgacgcctccccgagtggggcaggcagtagtgacacaagtcataccagcaaatattttggaagcattgactcctcagagaataatcacaaagcaaaaatgaacactggtatggaagaaagtgagcatttcattaagtgcgtcctgcaggatcccatctggctgctgatggcagatgcggacagcagcgtcatgatgacgtaccagctgccttcccgaaatttagaagcggttttgaaggaggacagagagaagctgaagctcctacagaaactccagcccaggttcacggagagtcagaagcaggagctgcgcgaggtccaccagtggatgcagacgggcggcctgcccgcagccatcgacgtggcagaatgtgtttactgtgaaaacaaggaaaaaggtaatatttgcataccatatgaggaagatattccttctctgggactcagcgaagtgtcggacaccaaagaagacgaaaatggatcccccttgaatcacaggatcgaagagcagacgtaacccctgccccacctcagcccggcagccagcgaggtacaccaggtggtgcttggaagagatgaaagatcttcatggctgtttccactgaaatggacacatatgctcatgttgctttttttgttttagaaaaaaaaacaacatagttttctgaaggggcgacttaaaactgtggagagtggggagagttcggaaagaaatatgtttttatatataaaatatatatgtggagttttgtgggatggggaagagattttagttgttatttaacttgagaaagactaagcgcctcttagtgtcagggaagttgcctcagtgctcccagaagtcctgtgactgtgacgagacctctgtctgctgcaccagctggggactctggcttccagagctttcccagggtgtttggatcagatcaaattttgtcctctcttggggactgctttttatctgaattatcatttagtcaaggtagagtgtttttttatacataccaaatggagatagcagcctctcctagttttatttcaaaacgtttcacattaaatggtgtgaagcgttgtttggcaaaccaacagctttggcttctggtgtggtcaatatttcagtctgacataggttttgtttgtagtgaacaaagttgaaacatttgctctggactaaagaagcctagtggtttgtgtggccaactccatcggatgaatgcacacgcagacagaccctctgtatatttctgcattattcttgtctccttttcagaccatgatggccaatatggagattaaaatatgtcatcagtcatctctttatggtgacttccctttgcaaaccaggctgtgaccaacacatgtgagacccagtcctgtttggttttcttccgttggaaccacccagacatctgcttccacccagccaagcccacatcacatctcctggccgagagcagccactgccactcagtctgacagcttgcgactgcatctgtattttcaggggtgcagtgagctcacctctcccactgcaccctgggttgggtgcacagccctcattcttttcatgagcccgacctctctcggagcagcttcaggcctctgccagtgtccccagcacttttaggtcatttggacacttggggaaaagtgaggccagtctgcccggctttttacaaaacctcatgttgcagtgtatattccaaagatggttcagaaaatttaatattggtccctggtggaaattcaaagttatcactgaagaacagttgacttaaaattggaccaagactatgaggcttaaaagggaccagggttttctttttttttttttttttttttttttttagatggagtttctttttgcccaggctggagtgcagtggcgccatcttggctcactgcaacctctgcctcccaggttcaagcgattctcctgcctcagcctcctgagtagctgggaccacaggcgactgccaccacacccagctaattttttgtatttttagtagagacagggtttcaccatgttggccaggctggtctcgaactcctgacctcaagcgatccacccacctcggcctcccaaagtgctgggattacaggcgtgagccaccacgcccaactgggaccagggttttctgttttttgatggaggtgaaatctctttgtaatccactaggttttcatcgtaaaaccatcttatgcctgactattaaacctattcttcataaacacaagaacactttaatttttcgttaatttacaaagtaacatcagctgcctatgcctatgataaggtagcagtctgcattcttatggccattagatgttacaaactccttgcctctaaagtcagatcatgaagggataggtgttcatctaaggttacagttatgttaccgaaacacaaaactgccaaaatcttactctgctgttatgaatgtttaccatcagcattattttatcatttaatatgtgctcactgattgttaactgtagcttcagcgcgtgccaagcagttgacttaataggatcatcttgtgaatttgtttacgtgatgccaagcatcaagtcatgttttctttagtgtgtgtgcttacacaggtgttaaacagtttttctctattttaaactgagccttctttttaatatattcccgaagagatatgtaaataagctctcagagtttctgtgatgatttgttgagccttgctggacaagtggtttgtttgtgtgcaaaccaaactttctttacccagtgcaatagatttgtttgactgcttgtgtctttttatgacctgtttgccttttagaaaattggtaaataaagcaagtatatttttattttta

SEQ ID NO: 93143 - DNA, 423 bp, Homo sapiens
gccctggctgtgtctgtagcgctgtctgctgtctccccagcccgtcccccacagcggctccagtggctacgggagtctgggcagcaacgggtcccacgagcaccttatgagccagacctcctccagcgacagcaacggccatgaggactcacgccggaggagagccgtacgtctccttccattctccctgagaaaatgagtttgtggatgtccctccagagttaaaaagcacactcaagacaacctttggcagttaggaggggcttcctgattgcagctgttgctgcttcctttctaaactttgtccacttgggactttttaatctcttaagagttgaaagagctagaaaccatagctaagtgttggttgaaaattatttaaaacagacaaaacaagcaaaagtgaagatttaactaggatag

SEQ ID NO: 93144 - DNA, 6270 bp, Homo sapiens
gtggtcgagccgcgcgcagggtgcgctcgtttgaactgcggtgacaccgagggttggggactcgaacccccgcttcgcagctcaggagcctgaggtccgaaagcttcgttccagagcccagcatgaatggatacgcggaatttccgcccagccccagtaaccccaccaaggagcccgtggagccccagcccagccaggtcccactgcaggaagatgtggacatgagcagtggctccagtggacatgagaccaacgaaaactgctccacggggcgggactcgcagggcagtgactgtgacgacagtgggaaggagctggggatgctggtggagccaccggatgcccgccagagtccagatacctttagcctgatgatggcaaaatctgaacacaacccatctacaagtggctgcagtagcgaccagtcttcgaaagtggacacacacaaagaactgataaaaacactaaaggagctgaaggtccacctccctgcagacaagaaggccaagggcaaggccagtacgctggccaccttgaagtacgccctcaggagcgtgaagcaggtgaaagccaatgaagagtattaccagctgctgatgtccagcgagggtcacccctgtggagcagacgtgccctcctacaccgtggaggagatggagagcgttacctctgagcacattgtgaagaatgccgatatgtttgcggtggccgtgtccctggtgtctgggaagatcctgtacatctctgaccaggttgcatccatatttcactgtaaaagagatgccttcagcgatgccaagtttgtggagttcctggcgcctcacgatgtgggcgtgttccacagtttcacctccccgtacaagcttcccttgtggagcatgtgcagtggagcagattcttttactcaagaatgcatggaggagaaatctttcttttgccgtgtcagtgtccggaaaagccacgagaatgaaatccgctaccaccccttccgcatgacgccctacctggtcaaggtgcgggaccaacaaggtgctgagagtcagctttgctgccttctgctggcagagagagtgcactctggttatgaagcccctagaattcctcctgaaaagagaatttttacaaccacccatacaccaaattgtttgttccaggatgtggatgaaagtcctgcagtcaggcgggcagcctttcgactattctcccattcggtttcgcgcccggaacggagagtacatcacgttggacaccagctggtccagcttcatcaacccatggagcaggaaaatctccttcatcattgggaggcacaaagtcagggtgggccctttgaatgaggacgtgtttgcagcccacccctgcacagaggagaaggccctgcaccccagcattcaggagctcacagagcagatccaccggctcctgctgcagcccgtcccccacagcggctccagtggctacgggagtctgggcagcaacgggtcccacgagcaccttatgagccagacctcctccagcgacagcaacggccatgaggactcacgccggaggagagccgaaatttgtaaaaatggtaacaagaccaaaaatagaagtcattattctcatgaatctggagaacaaaagaaaaaatccgttacagaaatgcaaactaatcccccagctgagaagaaagctgtccctgccatggaaaaggacagcctgggggtcagcttccccgaggagttggcctgcaagaaccagcccacctgctcctaccagcagatcagctgcttggacagcgtcatcaggtacttggagagctgcaatgaggctgccaccctgaagaggaaatgcgagttcccagcaaacgtcccagcgctaaggtccagtgataagcggaaggccacagtcagcccagggccacacgctggagaggcagagccgccctccagggtgaacagccgcacgggagtaggtacgcacctgacctcgctggcactgccgggcaaggcagagagtgtggcgtcgctcaccagccagtgcagctacagcagcaccatcgtccatgtgggagacaagaagccgcagccggagttagagatggtggaagatgctgcgagtgggccagaatccctggactgcctggcgggccctgccctggcctgtggtctcagccaagagaaggagcccttcaagaagctgggcctcaccaaggaggtactcgctgcacacacacagaaggaggagcagagcttcctgcagaagttcaaagaaataagaaaactcagcattttccagtcccactgccattactacttgcaagaaagatccaaggggcagccaagtgaacgaactgcccctggactaagaaatacttccggaatagattcaccttggaaaaaaacaggaaagaacagaaaattgaagtccaagcgggtcaaacctcgagactcatctgagagcaccggatctggggggcccgtgtccgcccggcccccgctggtgggcttgaacgccacagcctggtcaccctcagacacgtcccagtccagctgcccagccgtgccctttcccgccccagtgccagcagcttattcactgcccgtgtttccagcgccagggactgtggcagcacccccggcacctccccacgccagcttcacagtgcctgctgtgcccgtggacctccagcaccagtttgcagtccagcccccacctttccctgcccctttggcgcctgtcatggcattcatgctacccagttattccttcccctcggggaccccaaacctgccccaggccttcttccccagccagcctcagtttccgagccaccccacactcacatccgagatggcctctgcctcacagcctgagttccccagccggacctcgatccccagacagccatgtgcttgtccagccacccgggccaccccaccatcggccatgggtagggcctccccaccgctctttcagtcccgcagcagctcgcccctgcagctcaacctgctgcagctggaggaagcccctgagggtggcactggagccatggggaccacaggggccacagagacagcagctgtaggggcggactgcaaacctggcacttctcgggaccagcagccgaaggcgcctctgacccgtgatgaaccctcagacacacagaacagtgacgccctttccacgtcaagcggcctcctaaacctcctgctgaatgaggacctctgctcagcctcgggctctgctgcttcggagtctctgggctccggctcactgggctgcgacgcctccccgagtggggcaggcagtagtgacacaagtcataccagcaaatattttggaagcattgactcctcagagaataatcacaaagcaaaaatgaacactggtatggaagaaagtgagcatttcattaagtgcgtcctgcaggatcccatctggctgctgatggcagatgcggacagcagcgtcatgatgacgtaccagctgccttcccgaaatttagaagcggttttgaaggaggacagagagaagctgaagctcctacagaaactccagcccaggttcacggagagtcagaagcaggagctgcgcgaggtccaccagtggatgcagacgggcggcctgcccgcagccatcgacgtggcagaatgtgtttactgtgaaaacaaggaaaaaggtaatatttgcataccatatgaggaagatattccttctctgggactcagcgaagtgtcggacaccaaagaagacgaaaatggatcccccttgaatcacaggatcgaagagcagacgtaacccctgccccacctcagcccggcagccagcgaggtacaccaggtggtgcttggaagagatgaaagatcttcatggctgtttccactgaaatggacacatatgctcatgttgctttttttgttttagaaaaaaaaacaacatagttttctgaaggggcgacttaaaactgtggagagtggggagagttcggaaagaaatatgtttttatatataaaatatatatgtggagttttgtgggatggggaagagattttagttgttatttaacttgagaaagactaagcgcctcttagtgtcagggaagttgcctcagtgctcccagaagtcctgtgactgtgacgagacctctgtctgctgcaccagctggggactctggcttccagagctttcccagggtgtttggatcagatcaaattttgtcctctcttggggactgctttttatctgaattatcatttagtcaaggtagagtgtttttttatacataccaaatggagatagcagcctctcctagttttatttcaaaacgtttcacattaaatggtgtgaagcgttgtttggcaaaccaacagctttggcttctggtgtggtcaatatttcagtctgacataggttttgtttgtagtgaacaaagttgaaacatttgctctggactaaagaagcctagtggtttgtgtggccaactccatcggatgaatgcacacgcagacagaccctctgtatatttctgcattattcttgtctccttttcagaccatgatggccaatatggagattaaaatatgtcatcagtcatctctttatggtgacttccctttgcaaaccaggctgtgaccaacacatgtgagacccagtcctgtttggttttcttccgttggaaccacccagacatctgcttccacccagccaagcccacatcacatctcctggccgagagcagccactgccactcagtctgacagcttgcgactgcatctgtattttcaggggtgcagtgagctcacctctcccactgcaccctgggttgggtgcacagccctcattcttttcatgagcccgacctctctcggagcagcttcaggcctctgccagtgtccccagcacttttaggtcatttggacacttggggaaaagtgaggccagtctgcccggctttttacaaaacctcatgttgcagtgtatattccaaagatggttcagaaaatttaatattggtccctggtggaaattcaaagttatcactgaagaacagttgacttaaaattggaccaagactatgaggcttaaaagggaccagggttttctttttttttttttttttttttttttttagatggagtttctttttgcccaggctggagtgcagtggcgccatcttggctcactgcaacctctgcctcccaggttcaagcgattctcctgcctcagcctcctgagtagctgggaccacaggcgactgccaccacacccagctaattttttgtatttttagtagagacagggtttcaccatgttggccaggctggtctcgaactcctgacctcaagcgatccacccacctcggcctcccaaagtgctgggattacaggcgtgagccaccacgcccaactgggaccagggttttctgttttttgatggaggtgaaatctctttgtaatccactaggttttcatcgtaaaaccatcttatgcctgactattaaacctattcttcataaacacaagaacactttaatttttcgttaatttacaaagtaacatcagctgcctatgcctatgataaggtagcagtctgcattcttatggccattagatgttacaaactccttgcctctaaagtcagatcatgaagggataggtgttcatctaaggttacagttatgttaccgaaacacaaaactgccaaaatcttactctgctgttatgaatgtttaccatcagcattattttatcatttaatatgtgctcactgattgttaactgtagcttcagcgcgtgccaagcagttgacttaataggatcatcttgtgaatttgtttacgtgatgccaagcatcaagtcatgttttctttagtgtgtgtgcttacacaggtgttaaacagtttttctctattttaaactgagccttctttttaatatattcccgaagagatatgtaaataagctctcagagtttctgtgatgatttgttgagccttgctggacaagtggtttgtttgtgtgcaaaccaaactttctttacccagtgcaatagatttgtttgactgcttgtgtctttttatgacctgtttgccttttagaaaattggtaaataaagcaagtatatttttatttttaaaaacaacaaaaacaccaacaccaacacaaatttgttggggcggccttgggccctggaaaagttttttaaacccatccgttgggcgcgggggcccgggggtcgtgacaccggggcagcgggtcccgagggaacccggccgagacagggtgg

SEQ ID NO: 93145 - DNA, 4987 bp, Homo sapiens
  misc_feature (4966)..(4966): n is a, c, g, or t
gtggtcgagccgcgcgcagggtgcgctcgtttgaactgcggtgacaccgagggttggggactcgaacccccgcttcgcagctcaggagcctgaggtccgaaagcttcgttccagagcccagcatgaatggatacgcggaatttccgcccagccccagtaaccccaccaaggagcccgtggagccccagcccagccaggtcccactgcaggaagatgtggacatgagcagtggctccagtggacatgagaccaacgaaaactgctccacggggcgggactcgcagggcagtgactgtgacgacagtgggaaggagctggggatgctggtggagccaccggatgcccgccagagtccagatacctttagcctgatgatggcaaaatctgaacacaacccatctacaagtggctgcagtagcgaccagtcttcgaaagtggacacacacaaagaactgataaaaacactaaaggagctgaaggtccacctccctgcagacaagaaggccaagggcaaggccagtacgctggccaccttgaagtacgccctcaggagcgtgaagcaggtgaaagccaatgaagagtattaccagctgctgatgtccagcgagggtcacccctgtggagcagacgtgccctcctacaccgtggaggagatggagagcgttacctctgagcacattgtgaagaatgccgatatgtttgcggtggccgtgtccctggtgtctgggaagatcctgtacatctctgaccaggttgcatccatatttcactgtaaaagagatgccttcagcgatgccaagtttgtggagttcctggcgcctcacgatgtgggcgtgttccacagtttcacctccccgtacaagcttcccttgtggagcatgtgcagtggagcagattcttttactcaagaatgcatggaggagaaatctttcttttgccgtgtcagtgtccggaaaagccacgagaatgaaatccgctaccaccccttccgcatgacgccctacctggtcaaggtgcgggaccaacaaggtgctgagagtcagctttgctgccttctgctggcagagagagtgcactctggttatgaagcccctagaattcctcctgaaaagagaatttttacaaccacccatacaccaaattgtttgttccaggatgtggatgaaagtcctgcagtcaggcgggcagcctttcgactattctcccattcggtttcgcgcccggaacggagagtacatcacgttggacaccagctggtccagcttcatcaacccatggagcaggaaaatctccttcatcattgggaggcacaaagtcagggtgggccctttgaatgaggacgtgtttgcagcccacccctgcacagaggagaaggccctgcaccccagcattcaggagctcacagagcagatccaccggctcctgctgcagcccgtcccccacagcggctccagtggctacgggagtctgggcagcaacgggtcccacgagcaccttatgagccagacctcctccagcgacagcaacggccatgaggactcacgccggaggagagccgaaatttgtaaaaatggtaacaagaccaaaaatagaagtcattattctcatgaatctggagaacaaaagaaaaaatccgttacagaaatgcaaactaatcccccagctgagaagaaagctgtccctgccatggaaaaggacagcctgggggtcagcttccccgaggagttggcctgcaagaaccagcccacctgctcctaccagcagatcagctgcttggacagcgtcatcaggtacttggagagctgcaatgaggctgccaccctgaagaggaaatgcgagttcccagcaaacgtcccagcgctaaggtccagtgataagcggaaggccacagtcagcccagggccacacgctggagaggcagagccgccctccagggtgaacagccgcacgggagtaggtacgcacctgacctcgctggcactgccgggcaaggcagagagtgtggcgtcgctcaccagccagtgcagctacagcagcaccatcgtccatgtgggagacaagaagccgcagccggagttagagatggtggaagatgctgcgagtgggccagaatccctggactgcctggcgggccctgccctggcctgtggtctcagccaagagaaggagcccttcaagaagctgggcctcaccaaggaggtactcgctgcacacacacagaaggaggagcagagcttcctgcagaagttcaaagaaataagaaaactcagcattttccagtcccactgccattactacttgcaagaaagatccaaggggcagccaagtgaacgaactgcccctggactaagaaatacttccggaatagattcaccttggaaaaaaacaggaaagaacagaaaattgaagtccaagcgggtcaaacctcgagactcatctgagagcaccggatctggggggcccgtgtccgcccggcccccgctggtgggcttgaacgccacagcctggtcaccctcagacacgtcccagtccagctgcccagccgtgccctttcccgccccagtgccagcagcttattcactgcccgtgtttccagcgccagggactgtggcagcacccccggcacctccccacgccagcttcacagtgcctgctgtgcccgtggacctccagcaccagtttgcagtccagcccccacctttccctgcccctttggcgcctgtcatggcattcatgctacccagttattccttcccctcggggaccccaaacctgccccaggccttcttccccagccagcctcagtttccgagccaccccacactcacatccgagatggcctctgcctcacagcctgagttccccagccggacctcgatccccagacagccatgtgcttgtccagccacccgggccaccccaccatcggccatgggtagggcctccccaccgctctttcagtcccgcagcagctcgcccctgcagctcaacctgctgcagctggaggaagcccctgagggtggcactggagccatggggaccacaggggccacagagacagcagctgtaggggcggactgcaaacctggcacttctcgggaccagcagccgaaggcgcctctgacccgtgatgaaccctcagacacacagaacagtgacgccctttccacgtcaagcggcctcctaaacctcctgctgaatgaggacctctgctcagcctcgggctctgctgcttcggagtctctgggctccggctcactgggctgcgacgcctccccgagtggggcaggcagtagtgacacaagtcataccagcaaatattttggaagcattgactcctcagagaataatcacaaagcaaaaatgaacactggtatggaagaaagtgagcatttcattaagtgcgtcctgcaggatcccatctggctgctgatggcagatgcggacagcagcgtcatgatgacgtaccagctgccttcccgaaatttagaagcggttttgaaggaggacagagagaagctgaagctcctacagaaactccagcccaggttcacggagagtcagaagcaggagctgcgcgaggtccaccagtggatgcagacgggcggcctgcccgcagccatcgacgtggcagaatgtgtttactgtgaaaacaaggaaaaaggtaatatttgcataccatatgaggaagatattccttctctgggactcagcgaagtgtcggacaccaaagaagacgaaaatggatcccccttgaatcacaggatcgaagagcagacgtaacccctgccccacctcagcccggcagccagcgaggtacaccaggtggtgcttggaagagatgaaagatcttcatggctgtttccactgaaatggacacatatgctcatgttgctttttttgttttagaaaaaaaaacaacatagttttctgaaggggcgacttaaaactgtggagagtggggagagttcggaaagaaatatgtttttatatataaaatatatatgtggagttttgtgggatggggaagagattttagttgttatttaacttgagaaagactaagcgcctcttagtgtcagggaagttgcctcagtgctcccagaagtcctgtgactgtgacgagacctctgtctgctgcaccagctggggactctggcttccagagctttcccagggtgtttggatcagatcaaattttgtcctctcttggggactgctttttatctgaattatcatttagtcaaggtagagtgtttttttatacataccaaatggagatagcagcctctcctagttttatttcaaaacgtttcacattaaatggtgtgaagcgttgtttggcaaaccaacagctttggcttctggtgtggtcaatatttcagtctgacataggttttgtttgtagtgaacaaagttgaaacatttgctctggactaaagaagcctagtggtttgtgtggccaactccatcggatgaatgcacacgcagacagaccctctgtatatttctgcattattcttgtctccttttcagaccatgatggccaatatggagattaaaatatgtcatcagtcatctctttatggtgacttccctttgcaaaccaggctgtgaccaacacatgtgagacccagtcctgtttggttttcttccgttggaaccacccagacatctgcttccacccagccaagcccacatcacatctcctggccgagagcagccactgccactcagtctgacagcttgcgactgcatctgtattttcaggggtgcagtgagctcacctctcccactgcaccctgggttgggtgcacagccctcattcttttcatgagcccgacctctctcggagcagcttcaggcctctgccagtgtccccagcacttttaggtcatttggacacttggggaaaagtgaggccagtctgcccggctttttacaaaacctcatgttgcagtgtgcntccgggatcctctagacgcta

SEQ ID NO: 93146 - DNA, 4954 bp, Homo sapiens
gtggtcgagccgcgcgcagggtgcgctcgtttgaactgcggtgacaccgagggttggggactcgaacccccgcttcgcagctcaggagcctgaggtccgaaagcttcgttccagagcccagcatgaatggatacgcggaatttccgcccagccccagtaaccccaccaaggagcccgtggagccccagcccagccaggtcccactgcaggaagatgtggacatgagcagtggctccagtggacatgagaccaacgaaaactgctccacggggcgggactcgcagggcagtgactgtgacgacagtgggaaggagctggggatgctggtggagccaccggatgcccgccagagtccagatacctttagcctgatgatggcaaaatctgaacacaacccatctacaagtggctgcagtagcgaccagtcttcgaaagtggacacacacaaagaactgataaaaacactaaaggagctgaaggtccacctccctgcagacaagaaggccaagggcaaggccagtacgctggccaccttgaagtacgccctcaggagcgtgaagcaggtgaaagccaatgaagagtattaccagctgctgatgtccagcgagggtcacccctgtggagcagacgtgccctcctacaccgtggaggagatggagagcgttacctctgagcacattgtgaagaatgccgatatgtttgcggtggccgtgtccctggtgtctgggaagatcctgtacatctctgaccaggttgcatccatatttcactgtaaaagagatgccttcagcgatgccaagtttgtggagttcctggcgcctcacgatgtgggcgtgttccacagtttcacctccccgtacaagcttcccttgtggagcatgtgcagtggagcagattcttttactcaagaatgcatggaggagaaatctttcttttgccgtgtcagtgtccggaaaagccacgagaatgaaatccgctaccaccccttccgcatgacgccctacctggtcaaggtgcgggaccaacaaggtgctgagagtcagctttgctgccttctgctggcagagagagtgcactctggttatgaagcccctagaattcctcctgaaaagagaatttttacaaccacccatacaccaaattgtttgttccaggatgtggatgaaagtcctgcagtcaggcgggcagcctttcgactattctcccattcggtttcgcgcccggaacggagagtacatcacgttggacaccagctggtccagcttcatcaacccatggagcaggaaaatctccttcatcattgggaggcacaaagtcagggtgggccctttgaatgaggacgtgtttgcagcccacccctgcacagaggagaaggccctgcaccccagcattcaggagctcacagagcagatccaccggctcctgctgcagcccgtcccccacagcggctccagtggctacgggagtctgggcagcaacgggtcccacgagcaccttatgagccagacctcctccagcgacagcaacggccatgaggactcacgccggaggagagccgaaatttgtaaaaatggtaacaagaccaaaaatagaagtcattattctcatgaatctggagaacaaaagaaaaaatccgttacagaaatgcaaactaatcccccagctgagaagaaagctgtccctgccatggaaaaggacagcctgggggtcagcttccccgaggagttggcctgcaagaaccagcccacctgctcctaccagcagatcagctgcttggacagcgtcatcaggtacttggagagctgcaatgaggctgccaccctgaagaggaaatgcgagttcccagcaaacgtcccagcgctaaggtccagtgataagcggaaggccacagtcagcccagggccacacgctggagaggcagagccgccctccagggtgaacagccgcacgggagtaggtacgcacctgacctcgctggcactgccgggcaaggcagagagtgtggcgtcgctcaccagccagtgcagctacagcagcaccatcgtccatgtgggagacaagaagccgcagccggagttagagatggtggaagatgctgcgagtgggccagaatccctggactgcctggcgggccctgccctggcctgtggtctcagccaagagaaggagcccttcaagaagctgggcctcaccaaggaggtactcgctgcacacacacagaaggaggagcagagcttcctgcagaagttcaaagaaataagaaaactcagcattttccagtcccactgccattactacttgcaagaaagatccaaggggcagccaagtgaacgaactgcccctggactaagaaatacttccggaatagattcaccttggaaaaaaacaggaaagaacagaaaattgaagtccaagcgggtcaaacctcgagactcatctgagagcaccggatctggggggcccgtgtccgcccggcccccgctggtgggcttgaacgccacagcctggtcaccctcagacacgtcccagtccagctgcccagccgtgccctttcccgccccagtgccagcagcttattcactgcccgtgtttccagcgccagggactgtggcagcacccccggcacctccccacgccagcttcacagtgcctgctgtgcccgtggacctccagcaccagtttgcagtccagcccccacctttccctgcccctttggcgcctgtcatggcattcatgctacccagttattccttcccctcggggaccccaaacctgccccaggccttcttccccagccagcctcagtttccgagccaccccacactcacatccgagatggcctctgcctcacagcctgagttccccagccggacctcgatccccagacagccatgtgcttgtccagccacccgggccaccccaccatcggccatgggtagggcctccccaccgctctttcagtcccgcagcagctcgcccctgcagctcaacctgctgcagctggaggaagcccctgagggtggcactggagccatggggaccacaggggccacagagacagcagctgtaggggcggactgcaaacctggcacttctcgggaccagcagccgaaggcgcctctgacccgtgatgaaccctcagacacacagaacagtgacgccctttccacgtcaagcggcctcctaaacctcctgctgaatgaggacctctgctcagcctcgggctctgctgcttcggagtctctgggctccggctcactgggctgcgacgcctccccgagtggggcaggcagtagtgacacaagtcataccagcaaatattttggaagcattgactcctcagagaataatcacaaagcaaaaatgaacactggtatggaagaaagtgagcatttcattaagtgcgtcctgcaggatcccatctggctgctgatggcagatgcggacagcagcgtcatgatgacgtaccagctgccttcccgaaatttagaagcggttttgaaggaggacagagagaagctgaagctcctacagaaactccagcccaggttcacggagagtcagaagcaggagctgcgcgaggtccaccagtggatgcagacgggcggcctgcccgcagccatcgacgtggcagaatgtgtttactgtgaaaacaaggaaaaaggtaatatttgcataccatatgaggaagatattccttctctgggactcagcgaagtgtcggacaccaaagaagacgaaaatggatcccccttgaatcacaggatcgaagagcagacgtaacccctgccccacctcagcccggcagccagcgaggtacaccaggtggtgcttggaagagatgaaagatcttcatggctgtttccactgaaatggacacatatgctcatgttgctttttttgttttagaaaaaaaaacaacatagttttctgaaggggcgacttaaaactgtggagagtggggagagttcggaaagaaatatgtttttatatataaaatatatatgtggagttttgtgggatggggaagagattttagttgttatttaacttgagaaagactaagcgcctcttagtgtcagggaagttgcctcagtgctcccagaagtcctgtgactgtgacgagacctctgtctgctgcaccagctggggactctggcttccagagctttcccagggtgtttggatcagatcaaattttgtcctctcttggggactgctttttatctgaattatcatttagtcaaggtagagtgtttttttatacataccaaatggagatagcagcctctcctagttttatttcaaaacgtttcacattaaatggtgtgaagcgttgtttggcaaaccaacagctttggcttctggtgtggtcaatatttcagtctgacataggttttgtttgtagtgaacaaagttgaaacatttgctctggactaaagaagcctagtggtttgtgtggccaactccatcggatgaatgcacacgcagacagaccctctgtatatttctgcattattcttgtctccttttcagaccatgatggccaatatggagattaaaatatgtcatcagtcatctctttatggtgacttccctttgcaaaccaggctgtgaccaacacatgtgagacccagtcctgtttggttttcttccgttggaaccacccagacatctgcttccacccagccaagcccacatcacatctcctggccgagagcagccactgccactcagtctgacagcttgcgactgcatctgtattttcaggggtgcagtgagctcacctctcccactgcaccctgggttgggtgcacagcctggtttgcaaagggaagtcaccataaagagatgactgatgacatattttaatctccatattggccatcatggtctgaaaaggagacaagaataatgcagaaatatacagagggtctgttgcagtgtgcttccg

SEQ ID NO: 93147 - DNA, 5003 bp, Homo sapiens
atcacctaaggtcaggagttcaagaacagcctgggcaaggtggtgaaaccccgtctctactaaaaatacaaaaattgccttgcatggtggcgcgcccctgtaatcccagctactcgggaggctgaggcaggagaatggcttgaacccgggaggcagaggttgcagagagacaagattgcgccactgcactccagcctgggtgacagagcaagactctgtcttaaaaaaaaaaaaatgtaatgtgccgttttgctttattttttattattctttaggatcatcaaataggttttatctagctctacacctgtcagatttctcatccacagtttccttctgtgttgctgaaattatttcagccatcctctgttctcactttgccggacagactgaaggaggtctcctagaatgaataatgtgttcattttgtttttcttcaaggaaatttgtaaaaatggtaacaagaccaaaaatagaagtcattattctcatgaatctggagaacaaaagaaaaaatccgttacagaaatgcaaactaatcccccagctgagaagaaagctgtccctgccatggaaaaggacagcctgggggtcagcttccccgaggagttggcctgcaagaaccagcccacctgctcctaccagcagatcagctgcttggacagcgtcatcaggtacttggagagctgcaatgaggctgccaccctgaagaggaaatgcgagttcccagcaaacgtcccagcgctaaggtccagtgataagcggaaggccacagtcagcccagggccacacgctggagaggcagagccgccctccagggtgaacagccgcacgggagtaggtacgcacctgacctcgctggcactgccgggcaaggcagagagtgtggcgtcgctcaccagccagtgcagctacagcagcaccatcgtccatgtgggagacaagaagccgcagccggagttagagatggtggaagatgctgcgagtgggccagaatccctggactgcctggcgggccctgccctggcctgtggtctcagccaagagaaggagcccttcaagaagctgggcctcaccaaggaggtactcgctgcacacacacagaaggaggagcagagcttcctgcagaagttcaaagaaataagaaaactcagcattttccagtcccactgccattactacttgcaagaaagatccaaggggcagccaagtgaacgaactgcccctggactaagaaatacttccggaatagattcaccttggaaaaaaacaggaaagaacagaaaattgaagtccaagcgggtcaaacctcgagactcatctgagagcaccggatctggggggcccgtgtccgcccggcccccgctggtgggcttgaacgccacagcctggtcaccctcagacacgtcccagtccagctgcccagccgtgccctttcccgccccagtgccagcagcttattcactgcccgtgtttccagcgccagggactgtggcagcacccccggcacctccccacgccagcttcacagtgcctgctgtgcccgtggacctccagcaccagtttgcagtccagcccccacctttccctgcccctttggcgcctgtcatggcattcatgctacccagttattccttcccctcggggaccccaaacctgccccaggccttcttccccagccagcctcagtttccgagccaccccacactcacatccgagatggcctctgcctcacagcctgagttccccagccggacctcgatccccagacagccatgtgcttgtccagccacccgggccaccccaccatcggccatgggtagggcctccccaccgctctttcagtcccgcagcagctcgcccctgcagctcaacctgctgcagctggaggaagcccctgagggtggcactggagccatggggaccacaggggccacagagacagcagctgtaggggcggactgcaaacctggcacttctcgggaccagcagccgaaggcgcctctgacccgtgatgaaccctcagacacacagaacagtgacgccctttccacgtcaagcggcctcctaaacctcctgctgaatgaggacctctgctcagcctcgggctctgctgcttcggagtctctgggctccggctcactgggctgcgacgcctccccgagtggggcaggcagtagtgacacaagtcataccagcaaatattttggaagcattgactcctcagagaataatcacaaagcaaaaatgaacactggtatggaagaaagtgagcatttcattaagtgcgtcctgcaggatcccatctggctgctgatggcagatgcggacagcagcgtcatgatgacgtaccagctgccttcccgaaatttagaagcggttttgaaggaggacagagagaagctgaagctcctacagaaactccagcccaggttcacggagagtcagaagcaggagctgcgcgaggtccaccagtggatgcagacgggcggcctgcccgcagccatcgacgtggcagaatgtgtttactgtgaaaacaaggaaaaaggtaatatttgcataccatatgaggaagatattccttctctgggactcagcgaagtgtcggacaccaaagaagacgaaaatggatcccccttgaatcacaggatcgaagagcagacgtaacccctgccccacctcagcccggcagccagcgaggtacaccaggtggtgcttggaagagatgaaagatcttcatggctgtttccactgaaatggacacatatgctcatgttgctttttttgttttagaaaaaaaaacaacatagttttctgaaggggcgacttaaaactgtggagagtggggagagttcggaaagaaatatgtttttatatataaaatatatatgtggagttttgtgggatggggaagagattttagttgttatttaacttgagaaagactaagcgcctcttagtgtcagggaagttgcctcagtgctcccagaagtcctgtgactgtgacgagacctctgtctgctgcaccagctggggactctggcttccagagctttcccagggtgtttggatcagatcaaattttgtcctctcttggggactgctttttatctgaattatcatttagtcaaggtagagtgtttttttatacataccaaatggagatagcagcctctcctagttttatttcaaaacgtttcacattaaatggtgtgaagcgttgtttggcaaaccaacagctttggcttctggtgtggtcaatatttcagtctgacataggttttgtttgtagtgaacaaagttgaaacatttgctctggactaaagaagcctagtggtttgtgtggccaactccatcggatgaatgcacacgcagacagaccctctgtatatttctgcattattcttgtctccttttcagaccatgatggccaatatggagattaaaatatgtcatcagtcatctctttatggtgacttccctttgcaaaccaggctgtgaccaacacatgtgagacccagtcctgtttggttttcttccgttggaaccacccagacatctgcttccacccagccaagcccacatcacatctcctggccgagagcagccactgccactcagtctgacagcttgcgactgcatctgtattttcaggggtgcagtgagctcacctctcccactgcaccctgggttgggtgcacagccctcattcttttcatgagcccgacctctctcggagcagcttcaggcctctgccagtgtccccagcacttttaggtcatttggacacttggggaaaagtgaggccagtctgcccggctttttacaaaacctcatgttgcagtgtatattccaaagatggttcagaaaatttaatattggtccctggtggaaattcaaagttatcactgaagaacagttgacttaaaattggaccaagactatgaggcttaaaagggaccagggttttctttttttttttttttttttttttttttagatggagtttctttttgcccaggctggagtgcagtggcgccatcttggctcactgcaacctctgcctcccaggttcaagcgattctcctgcctcagcctcctgagtagctgggaccacaggcgactgccaccacacccagctaattttttgtatttttagtagagacagggtttcaccatgttggccaggctggtctcgaactcctgacctcaagcgatccacccacctcggcctcccaaagtgctgggattacaggcgtgagccaccacgcccaactgggaccagggttttctgttttttgatggaggtgaaatctctttgtaatccactaggttttcatcgtaaaaccatcttatgcctgactattaaacctattcttcataaacacaagaacactttaatttttcgttaatttacaaagtaacatcagctgcctatgcctatgataaggtagcagtctgcattcttatggccattagatgttacaaactccttgcctctaaagtcagatcatgaagggataggtgttcatctaaggttacagttatgttaccgaaacacaaaactgccaaaatcttactctgctgttatgaatgtttaccatcagcattattttatcatttaatatgtgctcactgattgttaactgtagcttcagcgcgtgccaagcagttgacttaataggatcatcttgtgaatttgtttacgtgatgccaagcatcaagtcatgttttctttagtgtgtgtgcttacacaggtgttaaacagtttttctctattttaaactgagccttctttttaatatattcccgaagagatatgtaaataagctctcagagtttctgtgatgatttgttgagccttgctggacaagtggtttgtttgtgtgcaaaccaaactttctttacccagtgcaatagatttgtttgactgcttgtgtctttttatgacctgtttgccttttagaaaattggtaaataaagcaagtatatttttattttta

SEQ ID NO: 93148 - DNA, 2948 bp, Homo sapiens
gctcttaaaaggaagaggtgacgaggctcaaattgaaaaacgtattcaagaaatcattgagcagttagatgtcacaactagtgaatatgaaaaggaaaaactgaatgcacggcttgcaaaactttcagatggagtggcatcgataaacaccggtgtttatcgatgccaccagagaataatcacaaagcaaaaatgaacactggtatggaagaaagtgagcatttcattaagtgcgtcctgcaggatcccatctggctgctgatggcagatgcggacagcagcgtcatgatgacgtaccagctgccttcccgaaatttagaagcggttttgaaggaggacagagagaagctgaagctcctacagaaactccagcccaggttcacggagagtcagaagcaggagctgcgcgaggtccaccagtggatgcagacgggcggcctgcccgcagccatcgacgtggcagaatgtgtttactgtgaaaacaaggaaaaaggtaatatttgcataccatatgaggaagatattccttctctgggactcagcgaagtgtcggacaccaaagaagacgaaaatggatcccccttgaatcacaggatcgaagagcagacgtaacccctgccccacctcagcccggcagccagcgaggtacaccaggtggtgcttggaagagatgaaagatcttcatggctgtttccactgaaatggacacatatgctcatgttgctttttttgttttagaaaaaaaaacaacatagttttctgaaggggcgacttaaaactgtggagagtggggagagttcggaaagaaatatgtttttatatataaaatatatatgtggagttttgtgggatggggaagagattttagttgttatttaacttgagaaagactaagcgcctcttagtgtcagggaagttgcctcagtgctcccagaagtcctgtgactgtgacgagacctctgtctgctgcaccagctggggactctggcttccagagctttcccagggtgtttggatcagatcaaattttgtcctctcttggggactgctttttatctgaattatcatttagtcaaggtagagtgtttttttatacataccaaatggagatagcagcctctcctagttttatttcaaaacgtttcacattaaatggtgtgaagcgttgtttggcaaaccaacagctttggcttctggtgtggtcaatatttcagtctgacataggttttgtttgtagtgaacaaagttgaaacatttgctctggactaaagaagcctagtggtttgtgtggccaactccatcggatgaatgcacacgcagacagaccctctgtatatttctgcattattcttgtctccttttcagaccatgatggccaatatggagattaaaatatgtcatcagtcatctctttatggtgacttccctttgcaaaccaggctgtgaccaacacatgtgagacccagtcctgtttggttttcttccgttggaaccacccagacatctgcttccacccagccaagcccacatcacatctcctggccgagagcagccactgccactcagtctgacagcttgcgactgcatctgtattttcaggggtgcagtgagctcacctctcccactgcaccctgggttgggtgcacagccctcattcttttcatgagcccgacctctctcggagcagcttcaggcctctgccagtgtccccagcacttttaggtcatttggacacttggggaaaagtgaggccagtctgcccggctttttacaaaacctcatgttgcagtgtatattccaaagatggttcagaaaatttaatattggtccctggtggaaattcaaagttatcactgaagaacagttgacttaaaattggaccaagactatgaggcttaaaagggaccagggttttctttttttttttttttttttttttttttagatggagtttctttttgcccaggctggagtgcagtggcgccatcttggctcactgcaacctctgcctcccaggttcaagcgattctcctgcctcagcctcctgagtagctgggaccacaggcgactgccaccacacccagctaattttttgtatttttagtagagacagggtttcaccatgttggccaggctggtctcgaactcctgacctcaagcgatccacccacctcggcctcccaaagtgctgggattacaggcgtgagccaccacgcccaactgggaccagggttttctgttttttgatggaggtgaaatctctttgtaatccactaggttttcatcgtaaaaccatcttatgcctgactattaaacctattcttcataaacacaagaacactttaatttttcgttaatttacaaagtaacatcagctgcctatgcctatgataaggtagcagtctgcattcttatggccattagatgttacaaactccttgcctctaaagtcagatcatgaagggataggtgttcatctaaggttacagttatgttaccgaaacacaaaactgccaaaatcttactctgctgttatgaatgtttaccatcagcattattttatcatttaatatgtgctcactgattgttaactgtagcttcagcgcgtgccaagcagttgacttaataggatcatcttgtgaatttgtttacgtgatgccaagcatcaagtcatgttttctttagtgtgtgtgcttacacaggtgttaaacagtttttctctattttaaactgagccttctttttaatatattcccgaagagatatgtaaataagctctcagagtttctgtgatgatttgttgagccttgctggacaagtggtttgtttgtgtgcaaaccaaactttctttacccagtgcaatagatttgtttgactgcttgtgtctttttatgacctgtttgccttttagaaaattggtaaataaagcaagtatatttttattttta

SEQ ID NO: 93149 - DNA, 416 bp, Homo sapiens
atgacagctttttagtgtatttatttaacaaatagaactttgtattaccacttatcatattagcatttcataaaagaaaggacatttaataccagaagaaaataaggaatgtgtcctgcaattaagagcttgtaatttaagttgattcaatttagttttatggaaaaacctgatgttttgccctgatttttctcacttcactgaggatcagggaaaaccgctcggtggaccaggcaggccctgggccagcatttggaaacccaggactgttgaacgaagaggtgtcttcaaatttggagttaaaattttaactccgagtatttgtttttctgcattagctgcccctggactaagaaatacttccggaatagattcaccttggaaaaaaacaggaaagaacagaaaattgaagtcca

SEQ ID NO: 93150 - DNA, 6119 bp, Homo sapiens
gtggtcgagccgcgcgcagggtgcgctcgtttgaactgcggtgacaccgagggttggggactcgaacccccgcttcgcagctcaggagcctgaggtccgaaagcttcgttccagagcccagcatgaatggatacgcggaatttccgcccagccccagtaaccccaccaaggagcccgtggagccccagcccagccaggtcccactgcaggaagatgtggacatgagcagtggctccagtggacatgagaccaacgaaaactgctccacggggcgggactcgcagggcagtgactgtgacgacagtgggaaggagctggggatgctggtggagccaccggatgcccgccagagtccagatacctttagcctgatgatggcaaaatctgaacacaacccatctacaagtggctgcagtagcgaccagtcttcgaaagtggacacacacaaagaactgataaaaacactaaaggagctgaaggtccacctccctgcagacaagaaggccaagggcaaggccagtacgctggccaccttgaagtacgccctcaggagcgtgaagcaggtgaaagccaatgaagagtattaccagctgctgatgtccagcgagggtcacccctgtggagcagacgtgccctcctacaccgtggaggagatggagagcgttacctctgagcacattgtgaagaatgccgatatgtttgcggtggccgtgtccctggtgtctgggaagatcctgtacatctctgaccaggttgcatccatatttcactgtaaaagagatgccttcagcgatgccaagtttgtggagttcctggcgcctcacgatgtgggcgtgttccacagtttcacctccccgtacaagcttcccttgtggagcatgtgcagtggagcagattcttttactcaagaatgcatggaggagaaatctttcttttgccgtgtcagtgtccggaaaagccacgagaatgaaatccgctaccaccccttccgcatgacgccctacctggtcaaggtgcgggaccaacaaggtgctgagagtcagctttgctgccttctgctggcagagagagtgcactctggttatgaagcccctagaattcctcctgaaaagagaatttttacaaccacccatacaccaaattgtttgttccaggatgtggatgaaagtcctgcagtcaggcgggcagcctttcgactattctcccattcggtttcgcgcccggaacggagagtacatcacgttggacaccagctggtccagcttcatcaacccatggagcaggaaaatctccttcatcattgggaggcacaaagtcagggtgggccctttgaatgaggacgtgtttgcagcccacccctgcacagaggagaaggccctgcaccccagcattcaggagctcacagagcagatccaccggctcctgctgcagcccgtcccccacagcggctccagtggctacgggagtctgggcagcaacgggtcccacgagcaccttatgagccagacctcctccagcgacagcaacggccatgaggactcacgccggaggagagccgaaatttgtaaaaatggtaacaagaccaaaaatagaagtcattattctcatgaatctggagaacaaaagaaaaaatccgttacagaaatgcaaactaatcccccagctgagaagaaagctgtccctgccatggaaaaggacagcctgggggtcagcttccccgaggagttggcctgcaagaaccagcccacctgctcctaccagcagatcagctgcttggacagcgtcatcaggtacttggagagctgcaatgaggctgccaccctgaagaggaaatgcgagttcccagcaaacgtcccagcgctaaggtccagtgataagcggaaggccacagtcagcccagggccacacgctggagaggcagagccgccctccagggtgaacagccgcacgggagtaggtacgcacctgacctcgctggcactgccgggcaaggcagagagtgtggcgtcgctcaccagccagtgcagctacagcagcaccatcgtccatgtgggagacaagaagccgcagccggagttagagatggtggaagatgctgcgagtgggccagaatccctggactgcctggcgggccctgccctggcctgtggtctcagccaagagaaggagcccttcaagaagctgggcctcaccaaggaggtactcgctgcacacacacagaaggaggagcagagcttcctgcagaagttcaaagaaataagaaaactcagcattttccagtcccactgccattactacttgcaagaaagatccaaggggcagccaagtgaacgaactgcccctggactaagaaatacttccggaatagattcaccttggaaaaaaacaggaaagaacagaaaattgaagtccaagcgggtcaaacctcgagactcatctgagagcaccggatctggggggcccgtgtccgcccggcccccgctggtgggcttgaacgccacagcctggtcaccctcagacacgtcccagtccagctgcccagccgtgccctttcccgccccagtgccagcagcttattcactgcccgtgtttccagcgccagggactgtggcagcacccccggcacctccccacgccagcttcacagtgcctgctgtgcccgtggacctccagcaccagtttgcagtccagcccccacctttccctgcccctttggcgcctgtcatggcattcatgctacccagttattccttcccctcggggaccccaaacctgccccaggccttcttccccagccagcctcagtttccgagccaccccacactcacatccgagatggcctctgcctcacagcctgagttccccagccggacctcgatccccagacagccatgtgcttgtccagccacccgggccaccccaccatcggccatgggtagggcctccccaccgctctttcagtcccgcagcagctcgcccctgcagctcaacctgctgcagctggaggaagcccctgagggtggcactggagccatggggaccacaggggccacagagacagcagctgtaggggcggactgcaaacctggcacttctcgggaccagcagccgaaggcgcctctgacccgtgatgaaccctcagacacacagaacagtgacgccctttccacgtcaagcggcctcctaaacctcctgctgaatgaggacctctgctcagcctcgggctctgctgcttcggagtctctgggctccggctcactgggctgcgacgcctccccgagtggggcaggcagtagtgacacaagtcataccagcaaatattttggaagcattgactcctcagagaataatcacaaagcaaaaatgaacactggtatggaagaaagtgagcatttcattaagtgcgtcctgcaggatcccatctggctgctgatggcagatgcggacagcagcgtcatgatgacgtaccagctgccttcccgaaatttagaagcggttttgaaggaggacagagagaagctgaagctcctacagaaactccagcccaggttcacggagagtcagaagcaggagctgcgcgaggtccaccagtggatgcagacgggcggcctgcccgcagccatcgacgtggcagaatgtgtttactgtgaaaacaaggaaaaaggtaatatttgcataccatatgaggaagatattccttctctgggactcagcgaagtgtcggacaccaaagaagacgaaaatggatcccccttgaatcacaggatcgaagagcagacgtaacccctgccccacctcagcccggcagccagcgaggtacaccaggtggtgcttggaagagatgaaagatcttcatggctgtttccactgaaatggacacatatgctcatgttgctttttttgttttagaaaaaaaaacaacatagttttctgaaggggcgacttaaaactgtggagagtggggagagttcggaaagaaatatgtttttatatataaaatatatatgtggagttttgtgggatggggaagagattttagttgttatttaacttgagaaagactaagcgcctcttagtgtcagggaagttgcctcagtgctcccagaagtcctgtgactgtgacgagacctctgtctgctgcaccagctggggactctggcttccagagctttcccagggtgtttggatcagatcaaattttgtcctctcttggggactgctttttatctgaattatcatttagtcaaggtagagtgtttttttatacataccaaatggagatagcagcctctcctagttttatttcaaaacgtttcacattaaatggtgtgaagcgttgtttggcaaaccaacagctttggcttctggtgtggtcaatatttcagtctgacataggttttgtttgtagtgaacaaagttgaaacatttgctctggactaaagaagcctagtggtttgtgtggccaactccatcggatgaatgcacacgcagacagaccctctgtatatttctgcattattcttgtctccttttcagaccatgatggccaatatggagattaaaatatgtcatcagtcatctctttatggtgacttccctttgcaaaccaggctgtgaccaacacatgtgagacccagtcctgtttggttttcttccgttggaaccacccagacatctgcttccacccagccaagcccacatcacatctcctggccgagagcagccactgccactcagtctgacagcttgcgactgcatctgtattttcaggggtgcagtgagctcacctctcccactgcaccctgggttgggtgcacagccctcattcttttcatgagcccgacctctctcggagcagcttcaggcctctgccagtgtccccagcacttttaggtcatttggacacttggggaaaagtgaggccagtctgcccggctttttacaaaacctcatgttgcagtgtatattccaaagatggttcagaaaatttaatattggtccctggtggaaattcaaagttatcactgaagaacagttgacttaaaattggaccaagactatgaggcttaaaagggaccagggttttctttttttttttttttttttttttttttagatggagtttctttttgcccaggctggagtgcagtggcgccatcttggctcactgcaacctctgcctcccaggttcaagcgattctcctgcctcagcctcctgagtagctgggaccacaggcgactgccaccacacccagctaattttttgtatttttagtagagacagggtttcaccatgttggccaggctggtctcgaactcctgacctcaagcgatccacccacctcggcctcccaaagtgctgggattacaggcgtgagccaccacgcccaactgggaccagggttttctgttttttgatggaggtgaaatctctttgtaatccactaggttttcatcgtaaaaccatcttatgcctgactattaaacctattcttcataaacacaagaacactttaatttttcgttaatttacaaagtaacatcagctgcctatgcctatgataaggtagcagtctgcattcttatggccattagatgttacaaactccttgcctctaaagtcagatcatgaagggataggtgttcatctaaggttacagttatgttaccgaaacacaaaactgccaaaatcttactctgctgttatgaatgtttaccatcagcattattttatcatttaatatgtgctcactgattgttaactgtagcttcagcgcgtgccaagcagttgacttaataggatcatcttgtgaatttgtttacgtgatgccaagcatcaagtcatgttttctttagtgtgtgtgcttacacaggtgttaaacagtttttctctattttaaactgagccttctttttaatatattcccgaagagatatgtaaataagctctcagagtttctgtgatgatttgttgagccttgctggacaagtggtttgtttgtgtgcaaaccaaactttctttacccagtgcaatagatttgtttgactgcttgtgtctttttatgacctgtttgccttttagaaaattggtaaataaagcaagtatatttttattttta

SEQ ID NO: 93151 - DNA, 4088 bp, Homo sapiens
  misc_feature (330)..(330): n is a, c, g, or t
  misc_feature (539)..(539): n is a, c, g, or t
  misc_feature (596)..(596): n is a, c, g, or t
  misc_feature (600)..(600): n is a, c, g, or t
  misc_feature (670)..(670): n is a, c, g, or t
tgctagctctccaaactaggacttgctcagcagaggccgccagcccggagctggatccagagcccggccttggggaccccagctcccacctgcgccctgccttccagatcagccaaccgcctgccatggagactttctttaggagacatttccgggggaaggtgccaggccctggagaggggcagcggcggcccagcagcgtggggctgcccacaggcaaggcccggcgtcgctcccccgctgggcaggcctcctcctcactggcacagcggcgccgctccagcgcccagctccagggctgcctcctgagttgcggggtgagggcccagngttccagccgccggcgctccagcactgtgcccccttcctgcaacccccgcttcatcgtggataaggtgctcactccacagcctaccaccgtgggggcccagcttctgggtgcacccctgctgttgaccgggcttgtgggcatgaatgaggaggagggtgtccaggaggatgtggtagccgaggcatcgagcgccatccagccaggcacnaagacaccagggccacccccacctcggggcgcccagccgctgttgcccctaccccgntacntgcgccgagcctcctcccactgctccccgcggatgccgtatatgaccacgctctctggggcctgcacggntactatcggcgcctcagccagcggcggccctcaggccagcaccctggccctgggggccgaagagcctcaggcaccaccgccggcaccatgctgcccacccgtgtgcgcccactgtcccgcaggcgccaggtagccctacggcgcaaggcggccggaccccaggcctggagcgccctgctcgcgaaagccatcaccaagtcgggcctccagcacctggccccccctccgcccacccctggggccccgtgcagcgagtcagagcggcagatccggagtacagtggactggagcgagtcagcgacatatggggagcacatctggttcgagaccaacgtgtccggggacttctgctacgttggggagcagtactgtgtagccaggatgctgcagaagtcagtgtctcgaagaaagtgcgcagcctgcaagattgtggtgcacacgccctgcatcgagcagctggagaagataaatttccgctgtaagccgtccttccgtgaatcaggctccaggaatgtccgcgagccaacctttgtacggcaccactgggtacacagacgacgccaggacggcaagtgtcggcactgtgggaagggattccagcagaagttcaccttccacagcaaggagattgtggccatcagctgctcgtggtgcaagcaggcataccacagcaaggtgtcctgcttcatgctgcagcagatcgaggagccgtgctcgctgggggtccacgcagccgtggtcatcccgcccacctggatcctccgcgcccggaggccccagaatactctgaaagcaagcaagaagaagaagagggcatccttcaagaggaagtccagcaagaaagggcctgaggagggccgctggagacccttcatcatcaggcccaccccctccccgctcatgaagcccctgctggtgtttgtgaaccccaagagtgggggcaaccagggtgcaaagatcatccagtctttcctctggtatctcaatccccgacaagtcttcgacctgagccagggagggcccaaggaggcgctggagatgtaccgcaaagtgcacaacctgcggatcctggcgtgcgggggcgacggcacggtgggctggatcctctccaccctggaccagctacgcctgaagccgccaccccctgttgccatcctgcccctgggtactggcaacgacttggcccgaaccctcaactggggtgggggctacacagatgagcctgtgtccaagatcctctcccacgtggaggaggggaacgtggtacagctggaccgctgggacctccacgctgagcccaaccccgaggcagggcctgaggaccgagatgaaggcgccaccgaccggttgcccctggatgtcttcaacaactacttcagcctgggctttgacgcccacgtcaccctggagttccacgagtctcgagaggccaacccagagaaattcaacagccgctttcggaataagatgttctacgccgggacagctttctctgacttcctgatgggcagctccaaggacctggccaagcacatccgagtggtgtgtgatggaatggacttgactcccaagatccaggacctgaaaccccagtgtgttgttttcctgaacatccccaggtactgtgcgggcaccatgccctggggccaccctggggagcaccacgactttgagccccagcggcatgacgacggctacctcgaggtcattggcttcaccatgacgtcgttggccgcgctgcaggtgggcggacacggcgagcggctgacgcagtgtcgcgaggtggtgctcaccacatccaaggccatcccggtgcaggtggatggcgagccctgcaagcttgcagcctcacgcatccgcatcgccctgcgcaaccaggccaccatggtgcagaaggccaagcggcggagcgccgcccccctgcacagcgaccagcagccggtgccagagcagttgcgcatccaggtgagtcgcgtcagcatgcacgactatgaggccctgcactacgacaaggagcagctcaaggaggcctctgtgccgctgggcactgtggtggtcccaggagacagtgacctagagctctgccgtgcccacattgagagactccagcaggagcccgatggtgctggagccaagtccccgacatgccagaaactgtcccccaagtggtgcttcctggacgccaccactgccagccgcttctacaggatcgaccgagcccaggagcacctcaactatgtgactgagatcgcacaggatgagatttatatcctggaccctgagctgctgggggcatcggcccggcctgacctcccaacccccacttcccctctccccacctcaccctgctcacccacgccccggtcactgcaaggggatgctgcaccccctcaaggtgaagagctgattgaggctgccaagaggaacgacttctgtaagctccaggagctgcaccgagctgggggcgacctcatgcaccgagacgagcagagtcgcacgctcctgcaccacgcagtcagcactggcagcaaggatgtggtccgctacctgctggaccacgcccccccagagatccttgatgcggtggaggaaaacggggagacctgtttgcaccaagcagcggccctgggccagcgcaccatctgccactacatcgtggaggccggggcctcgctcatgaagacagaccagcagggcgacactccccggcagcgggctgagaaggctcaggacaccgagctggccgcctacctggagaaccggcagcactaccagatgatccagcgggaggaccaggagacggctgtgtagcgggccgcccacgggcagcaggagggacaatgcggccaggggacgagcgccttccttgcccacctcactgccacattccagtgggacggccacggggggacctaggccccagggaaagagccccatgccgccccctaaggagccgcccagacctagggctggactcaggagctgggggggcctcacctgttcccctgaggaccccgccggacccggaggctcacagggaacaagacacggctgggttggatatgcctttgccggggttctggggcagggcgctccctggccgcagcagatgccctcccaggagtggaggggctggagagggggaggccttcgggaagaggcttcctgggccccctggtcttcggccgggtccccagcccccgctcctgccccaccccacctcctccgggcttcctcccggaaactcagcgcctgctgcacttgcctgccctgccttgcttggcacccgctccggcgaccctccccgctcccctgtcatttcatcgcggactgtgcggcctgggggtggggggcgggactctcacggtgacatgtttacagctgggtgtgactcagtaaagtggatttttttttcttt

SEQ ID NO: 93152 - DNA, 869 bp, Homo sapiens
  misc_feature (758)..(758): n is a, c, g, or t
  misc_feature (764)..(764): n is a, c, g, or t
  misc_feature (767)..(767): n is a, c, g, or t
ccgggggaagctgcaatgaatcctcagctctgggcccagtggaggcgctggggacggaagaaggggagcggccggggtcactgaggcagatgtggcgctaccgctcctgggacgtgccacagatcccatcagaggcaccccagacacagaaagccatcaccaagtcgggcctccagcacctggccccccctccgcccacccctggggccccgtgcagcgagtcagagcggcagatccggagtacagtggactggagcgagtcagcgacatatggggagcacatctggttcgagaccaacgtgtccggggacttctgctacgttggggagcagtactgtgtagccaggatgctgcagaagtcagtgtctcgaagaaagtgcgcagcctgcaagattgtggtgcacacgccctgcatcgagcagctggagaaggagtgacccagcactcgggggtgaagagtcaaggaccctggagccaaatgcctgcgttcgaatcctggctcctcactgattagctgctgtatccccactgcctggaacaaacctggcgcctagtggataaatttccgctgtaagccgtccttccgtgaatcaggctccaggaatgtccgcgagccaacctttgtacggcaccactgggtacacagacgacgccaggacggcaagtgtcggcactgtgggaagggattccagcagaagttcaccttccacagcaaggagattgtggccatcagctgctcgtggtgcaagcaggcatancacagnagngtctgcttcatgcagcagcagatcgaggaagcgggctcgtggggtcccagcaccggtcacccggcaacggtctcgggccggggccagatatttgagcagcag

SEQ ID NO: 93153 - DNA, 461 bp, Homo sapiens
cggccgcacgatggccgaggggcagggcggcggagggcagcgctgggactgggctggcggcggccgggcagccgaggaggaggtggtgcggcggcgatgccggcgcggggaggaggcccaggtcgcgcagccctggcccgagggttcccggggcacggccgctgggcccccggtggaggagcgtttccgccagctgcacctacgaaagcaggtgtcttacaggtaaggaggacgtgggcagaggggagcgcggcgcctgggaccacccctcttgcaggcgtcattgcacaaacgtttattgtgcgcccgccgcctgcctggcgctgggagtttagagatgactgccgagggatctctgtcttttcgtgtacagcgggaaggaggcagcttctgagactccttctctgcctgaaccgtgaaagccgtattcatccaatatgcggtggctgagggaacagtgt

SEQ ID NO: 93154 - DNA, 382 bp, Homo sapiens
gactagccgatggggctcaaagtcgtggcgctcaccatgacgagagggtggtgggaagtgaggccaggcctcttcctcccgcagccagctcgccctgcggagcctcctctgtgctggttccccctactccaagttcccttccctccctggcccccactctatcccagcctggcctttgcttctctcaacaggagcccgatggtgctggagccaagtccccgacatgccagaaactgtcccttccctttcctacctggggtctcagcctcccctctgccctctggccaggggtcactctcacctttgttctctggctagagtttctgcttcggaaggagcagagtctgggacccccctgccctcagccctggtgccatctgac

SEQ ID NO: 93155 - DNA, 3384 bp, Homo sapiens
ccgggggaagctgcaatgaatcctcagctctgggcccagtggaggcgctggggacggaagaaggggagcggccggggtcactgaggcagatgtggcgctaccgctcctgggacgtgccacagatcccatcagaggcaccccagacacagaaagccatcaccaagtcgggcctccagcacctggccccccctccgcccacccctggggccccgtgcagcgagtcagagcggcagatccggagtacagtggactggagcgagtcagcgacatatggggagcacatctggttcgagaccaacgtgtccggggacttctgctacgttggggagcagtactgtgtagccaggatgctgcagaagtcagtgtctcgaagaaagtgcgcagcctgcaagattgtggtgcacacgccctgcatcgagcagctggagaagataaatttccgctgtaagccgtccttccgtgaatcaggctccaggaatgtccgcgagccaacctttgtacggcaccactgggtacacagacgacgccaggacggcaagtgtcggcactgtgggaagggattccagcagaagttcaccttccacagcaaggagattgtggccatcagctgctcgtggtgcaagcaggcataccacagcaaggtgtcctgcttcatgctgcagcagatcgaggagccgtgctcgctgggggtccacgcagccgtggtcatcccgcccacctggatcctccgcgcccggaggccccagaatactctgaaagcaagcaagaagaagaagagggcatccttcaagaggaagtccagcaagaaagggcctgaggagggccgctggagacccttcatcatcaggcccaccccctccccgctcatgaagcccctgctggtgtttgtgaaccccaagagtgggggcaaccagggtgcaaagatcatccagtctttcctctggtatctcaatccccgacaagtcttcgacctgagccagggagggcccaaggaggcgctggagatgtaccgcaaagtgcacaacctgcggatcctggcgtgcgggggcgacggcacggtgggctggatcctctccaccctggaccagctacgcctgaagccgccaccccctgttgccatcctgcccctgggtactggcaacgacttggcccgaaccctcaactggggtgggggctacacagatgagcctgtgtccaagatcctctcccacgtggaggaggggaacgtggtacagctggaccgctgggacctccacgctgagcccaaccccgaggcagggcctgaggaccgagatgaaggcgccaccgaccggttgcccctggatgtcttcaacaactacttcagcctgggctttgacgcccacgtcaccctggagttccacgagtctcgagaggccaacccagagaaattcaacagccgctttcggaataagatgttctacgccgggacagctttctctgacttcctgatgggcagctccaaggacctggccaagcacatccgagtggtgtgtgatggaatggacttgactcccaagatccaggacctgaaaccccagtgtgttgttttcctgaacatccccaggtactgtgcgggcaccatgccctggggccaccctggggagcaccacgactttgagccccagcggcatgacgacggctacctcgaggtcattggcttcaccatgacgtcgttggccgcgctgcaggtgggcggacacggcgagcggctgacgcagtgtcgcgaggtggtgctcaccacatccaaggccatcccggtgcaggtggatggcgagccctgcaagcttgcagcctcacgcatccgcatcgccctgcgcaaccaggccaccatggtgcagaaggccaagcggcggagcgccgcccccctgcacagcgaccagcagccggtgccagagcagttgcgcatccaggtgagtcgcgtcagcatgcacgactatgaggccctgcactacgacaaggagcagctcaaggaggcctctgtgccgctgggcactgtggtggtcccaggagacagtgacctagagctctgccgtgcccacattgagagactccagcaggagcccgatggtgctggagccaagtccccgacatgccagaaactgtcccccaagtggtgcttcctggacgccaccactgccagccgcttctacaggatcgaccgagcccaggagcacctcaactatgtgactgagatcgcacaggatgagatttatatcctggaccctgagctgctgggggcatcggcccggcctgacctcccaacccccacttcccctctccccacctcaccctgctcacccacgccccggtcactgcaaggggatgctgcaccccctcaaggtgaagagctgattgaggctgccaagaggaacgacttctgtaagctccaggagctgcaccgagctgggggcgacctcatgcaccgagacgagcagagtcgcacgctcctgcaccacgcagtcagcactggcagcaaggatgtggtccgctacctgctggaccacgcccccccagagatccttgatgcggtggaggaaaacggggagacctgtttgcaccaagcagcggccctgggccagcgcaccatctgccactacatcgtggaggccggggcctcgctcatgaagacagaccagcagggcgacactccccggcagcgggctgagaaggctcaggacaccgagctggccgcctacctggagaaccggcagcactaccagatgatccagcgggaggaccaggagacggctgtgtagcgggccgcccacgggcagcaggagggacaatgcggccaggggacgagcgccttccttgcccacctcactgccacattccagtgggacggccacggggggacctaggccccagggaaagagccccatgccgccccctaaggagccgcccagacctagggctggactcaggagctgggggggcctcacctgttcccctgaggaccccgccggacccggaggctcacagggaacaagacacggctgggttggatatgcctttgccggggttctggggcagggcgctccctggccgcagcagatgccctcccaggagtggaggggctggagagggggaggccttcgggaagaggcttcctgggccccctggtcttcggccgggtccccagcccccgctcctgccccaccccacctcctccgggcttcctcccggaaactcagcgcctgctgcacttgcctgccctgccttgcttggcacccgctccggcgaccctccccgctcccctgtcatttcatcgcggactgtgcggcctgggggtggggggcgggactctcacggtgacatgtttacagctgggtgtgactcagtaaagtggatttttttttcttt

SEQ ID NO: 93156 - DNA, 3306 bp, Homo sapiens
ccgggggaagctgcaatgaatcctcagctctgggcccagtggaggcgctggggacggaagaaggggagcggccggggtcactgaggcagatgtggcgctaccgctcctgggacgtgccacagatcccatcagaggcaccccagacacagaaagccatcaccaagtcgggcctccagcacctggccccccctccgcccacccctggggccccgtgcagcgagtcagagcggcagatccggagtacagtggactggagcgagtcagcgacatatggggagcacatctggttcgagaccaacgtgtccggggacttctgctacgttggggagcagtactgtgtagccaggatgctgataaatttccgctgtaagccgtccttccgtgaatcaggctccaggaatgtccgcgagccaacctttgtacggcaccactgggtacacagacgacgccaggacggcaagtgtcggcactgtgggaagggattccagcagaagttcaccttccacagcaaggagattgtggccatcagctgctcgtggtgcaagcaggcataccacagcaaggtgtcctgcttcatgctgcagcagatcgaggagccgtgctcgctgggggtccacgcagccgtggtcatcccgcccacctggatcctccgcgcccggaggccccagaatactctgaaagcaagcaagaagaagaagagggcatccttcaagaggaagtccagcaagaaagggcctgaggagggccgctggagacccttcatcatcaggcccaccccctccccgctcatgaagcccctgctggtgtttgtgaaccccaagagtgggggcaaccagggtgcaaagatcatccagtctttcctctggtatctcaatccccgacaagtcttcgacctgagccagggagggcccaaggaggcgctggagatgtaccgcaaagtgcacaacctgcggatcctggcgtgcgggggcgacggcacggtgggctggatcctctccaccctggaccagctacgcctgaagccgccaccccctgttgccatcctgcccctgggtactggcaacgacttggcccgaaccctcaactggggtgggggctacacagatgagcctgtgtccaagatcctctcccacgtggaggaggggaacgtggtacagctggaccgctgggacctccacgctgagcccaaccccgaggcagggcctgaggaccgagatgaaggcgccaccgaccggttgcccctggatgtcttcaacaactacttcagcctgggctttgacgcccacgtcaccctggagttccacgagtctcgagaggccaacccagagaaattcaacagccgctttcggaataagatgttctacgccgggacagctttctctgacttcctgatgggcagctccaaggacctggccaagcacatccgagtggtgtgtgatggaatggacttgactcccaagatccaggacctgaaaccccagtgtgttgttttcctgaacatccccaggtactgtgcgggcaccatgccctggggccaccctggggagcaccacgactttgagccccagcggcatgacgacggctacctcgaggtcattggcttcaccatgacgtcgttggccgcgctgcaggtgggcggacacggcgagcggctgacgcagtgtcgcgaggtggtgctcaccacatccaaggccatcccggtgcaggtggatggcgagccctgcaagcttgcagcctcacgcatccgcatcgccctgcgcaaccaggccaccatggtgcagaaggccaagcggcggagcgccgcccccctgcacagcgaccagcagccggtgccagagcagttgcgcatccaggtgagtcgcgtcagcatgcacgactatgaggccctgcactacgacaaggagcagctcaaggaggcctctgtgccgctgggcactgtggtggtcccaggagacagtgacctagagctctgccgtgcccacattgagagactccagcaggagcccgatggtgctggagccaagtccccgacatgccagaaactgtcccccaagtggtgcttcctggacgccaccactgccagccgcttctacaggatcgaccgagcccaggagcacctcaactatgtgactgagatcgcacaggatgagatttatatcctggaccctgagctgctgggggcatcggcccggcctgacctcccaacccccacttcccctctccccacctcaccctgctcacccacgccccggtcactgcaaggggatgctgcaccccctcaaggtgaagagctgattgaggctgccaagaggaacgacttctgtaagctccaggagctgcaccgagctgggggcgacctcatgcaccgagacgagcagagtcgcacgctcctgcaccacgcagtcagcactggcagcaaggatgtggtccgctacctgctggaccacgcccccccagagatccttgatgcggtggaggaaaacggggagacctgtttgcaccaagcagcggccctgggccagcgcaccatctgccactacatcgtggaggccggggcctcgctcatgaagacagaccagcagggcgacactccccggcagcgggctgagaaggctcaggacaccgagctggccgcctacctggagaaccggcagcactaccagatgatccagcgggaggaccaggagacggctgtgtagcgggccgcccacgggcagcaggagggacaatgcggccaggggacgagcgccttccttgcccacctcactgccacattccagtgggacggccacggggggacctaggccccagggaaagagccccatgccgccccctaaggagccgcccagacctagggctggactcaggagctgggggggcctcacctgttcccctgaggaccccgccggacccggaggctcacagggaacaagacacggctgggttggatatgcctttgccggggttctggggcagggcgctccctggccgcagcagatgccctcccaggagtggaggggctggagagggggaggccttcgggaagaggcttcctgggccccctggtcttcggccgggtccccagcccccgctcctgccccaccccacctcctccgggcttcctcccggaaactcagcgcctgctgcacttgcctgccctgccttgcttggcacccgctccggcgaccctccccgctcccctgtcatttcatcgcggactgtgcggcctgggggtggggggcgggactctcacggtgacatgtttacagctgggtgtgactcagtaaagtggatttttttttcttt

SEQ ID NO: 93157 - DNA, 2665 bp, Homo sapiens
tcaccaacacccctgcttcccttgcagaatactctgaaagcaagcaagaagaagaagagggcatccttcaagaggaagtccagcaagaaagggcctgaggagggccgctggagacccttcatcatcaggcccaccccctccccgctcatgaagcccctgctggtgtttgtgaaccccaagagtgggggcaaccagggtgcaaagatcatccagtctttcctctggtatctcaatccccgacaagtcttcgacctgagccagggagggcccaaggaggcgctggagatgtaccgcaaagtgcacaacctgcggatcctggcgtgcgggggcgacggcacggtgggctggatcctctccaccctggaccagctacgcctgaagccgccaccccctgttgccatcctgcccctgggtactggcaacgacttggcccgaaccctcaactggggtgggggctacacagatgagcctgtgtccaagatcctctcccacgtggaggaggggaacgtggtacagctggaccgctgggacctccacgctgagcccaaccccgaggcagggcctgaggaccgagatgaaggcgccaccgaccggttgcccctggatgtcttcaacaactacttcagcctgggctttgacgcccacgtcaccctggagttccacgagtctcgagaggccaacccagagaaattcaacagccgctttcggaataagatgttctacgccgggacagctttctctgacttcctgatgggcagctccaaggacctggccaagcacatccgagtggtgtgtgatggaatggacttgactcccaagatccaggacctgaaaccccagtgtgttgttttcctgaacatccccaggtactgtgcgggcaccatgccctggggccaccctggggagcaccacgactttgagccccagcggcatgacgacggctacctcgaggtcattggcttcaccatgacgtcgttggccgcgctgcaggtgggcggacacggcgagcggctgacgcagtgtcgcgaggtggtgctcaccacatccaaggccatcccggtgcaggtggatggcgagccctgcaagcttgcagcctcacgcatccgcatcgccctgcgcaaccaggccaccatggtgcagaaggccaagcggcggagcgccgcccccctgcacagcgaccagcagccggtgccagagcagttgcgcatccaggtgagtcgcgtcagcatgcacgactatgaggccctgcactacgacaaggagcagctcaaggaggcctctgtgccgctgggcactgtggtggtcccaggagacagtgacctagagctctgccgtgcccacattgagagactccagcaggagcccgatggtgctggagccaagtccccgacatgccagaaactgtcccccaagtggtgcttcctggacgccaccactgccagccgcttctacaggatcgaccgagcccaggagcacctcaactatgtgactgagatcgcacaggatgagatttatatcctggaccctgagctgctgggggcatcggcccggcctgacctcccaacccccacttcccctctccccacctcaccctgctcacccacgccccggtcactgcaaggggatgctgcaccccctcaaggtgaagagctgattgaggctgccaagaggaacgacttctgtaagctccaggagctgcaccgagctgggggcgacctcatgcaccgagacgagcagagtcgcacgctcctgcaccacgcagtcagcactggcagcaaggatgtggtccgctacctgctggaccacgcccccccagagatccttgatgcggtggaggaaaacggggagacctgtttgcaccaagcagcggccctgggccagcgcaccatctgccactacatcgtggaggccggggcctcgctcatgaagacagaccagcagggcgacactccccggcagcgggctgagaaggctcaggacaccgagctggccgcctacctggagaaccggcagcactaccagatgatccagcgggaggaccaggagacggctgtgtagcgggccgcccacgggcagcaggagggacaatgcggccaggggacgagcgccttccttgcccacctcactgccacattccagtgggacggccacggggggacctaggccccagggaaagagccccatgccgccccctaaggagccgcccagacctagggctggactcaggagctgggggggcctcacctgttcccctgaggaccccgccggacccggaggctcacagggaacaagacacggctgggttggatatgcctttgccggggttctggggcagggcgctccctggccgcagcagatgccctcccaggagtggaggggctggagagggggaggccttcgggaagaggcttcctgggccccctggtcttcggccgggtccccagcccccgctcctgccccaccccacctcctccgggcttcctcccggaaactcagcgcctgctgcacttgcctgccctgccttgcttggcacccgctccggcgaccctccccgctcccctgtcatttcatcgcggactgtgcggcctgggggtggggggcgggactctcacggtgacatgtttacagctgggtgtgactcagtaaagtggatttttttttcttt

SEQ ID NO: 93158 - DNA, 3477 bp, Homo sapiens
ccgggggaagctgcaatgaatcctcagctctgggcccagtggaggcgctggggacggaagaaggggagcggccggggtcactgaggcagatgtggcgctaccgctcctgggacgtgccacagatcccatcagaggcaccccagacacagaaagccatcaccaagtcgggcctccagcacctggccccccctccgcccacccctggggccccgtgcagcgagtcagagcggcagatccggagtacagtggactggagcgagtcagcgacatatggggagcacatctggttcgagaccaacgtgtccggggacttctgctacgttggggagcagtactgtgtagccaggatgctgcagaagtcagtgtctcgaagaaagtgcgcagcctgcaagattgtggtgcacacgccctgcatcgagcagctggagaagataaatttccgctgtaagccgtccttccgtgaatcaggctccaggaatgtccgcgagccaacctttgtacggcaccactgggtacacagacgacgccaggacggcaagtgtcggcactgtgggaagggattccagcagaagttcaccttccacagcaaggagattgtggccatcagctgctcgtggtgcaagcaggcataccacagcaaggtgtcctgcttcatgctgcagcagatcgaggagccgtgctcgctgggggtccacgcagccgtggtcatcccgcccacctggatcctccgcgcccggaggccccagaatactctgaaagcaagcaagaagaagaagagggcatccttcaagaggaagtccagcaagaaagggcctgaggagggccgctggagacccttcatcatcaggcccaccccctccccgctcatgaagcccctgctggtgtttgtgaaccccaagagtgggggcaaccagggtgcaaagatcatccagtctttcctctggtatctcaatccccgacaagtcttcgacctgagccagggagggcccaaggaggcgctggagatgtaccgcaaagtgcacaacctgcggatcctggcgtgcgggggcgacggcacggtgagctccccgcatgggccagccgagcaccagggctgggcctgaagccggggtccctgtgggcctgatttgcctctgttcttcctcccccaggtgggctggatcctctccaccctggaccagctacgcctgaagccgccaccccctgttgccatcctgcccctgggtactggcaacgacttggcccgaaccctcaactggggtgggggctacacagatgagcctgtgtccaagatcctctcccacgtggaggaggggaacgtggtacagctggaccgctgggacctccacgctgagcccaaccccgaggcagggcctgaggaccgagatgaaggcgccaccgaccggttgcccctggatgtcttcaacaactacttcagcctgggctttgacgcccacgtcaccctggagttccacgagtctcgagaggccaacccagagaaattcaacagccgctttcggaataagatgttctacgccgggacagctttctctgacttcctgatgggcagctccaaggacctggccaagcacatccgagtggtgtgtgatggaatggacttgactcccaagatccaggacctgaaaccccagtgtgttgttttcctgaacatccccaggtactgtgcgggcaccatgccctggggccaccctggggagcaccacgactttgagccccagcggcatgacgacggctacctcgaggtcattggcttcaccatgacgtcgttggccgcgctgcaggtgggcggacacggcgagcggctgacgcagtgtcgcgaggtggtgctcaccacatccaaggccatcccggtgcaggtggatggcgagccctgcaagcttgcagcctcacgcatccgcatcgccctgcgcaaccaggccaccatggtgcagaaggccaagcggcggagcgccgcccccctgcacagcgaccagcagccggtgccagagcagttgcgcatccaggtgagtcgcgtcagcatgcacgactatgaggccctgcactacgacaaggagcagctcaaggaggcctctgtgccgctgggcactgtggtggtcccaggagacagtgacctagagctctgccgtgcccacattgagagactccagcaggagcccgatggtgctggagccaagtccccgacatgccagaaactgtcccccaagtggtgcttcctggacgccaccactgccagccgcttctacaggatcgaccgagcccaggagcacctcaactatgtgactgagatcgcacaggatgagatttatatcctggaccctgagctgctgggggcatcggcccggcctgacctcccaacccccacttcccctctccccacctcaccctgctcacccacgccccggtcactgcaaggggatgctgcaccccctcaaggtgaagagctgattgaggctgccaagaggaacgacttctgtaagctccaggagctgcaccgagctgggggcgacctcatgcaccgagacgagcagagtcgcacgctcctgcaccacgcagtcagcactggcagcaaggatgtggtccgctacctgctggaccacgcccccccagagatccttgatgcggtggaggaaaacggggagacctgtttgcaccaagcagcggccctgggccagcgcaccatctgccactacatcgtggaggccggggcctcgctcatgaagacagaccagcagggcgacactccccggcagcgggctgagaaggctcaggacaccgagctggccgcctacctggagaaccggcagcactaccagatgatccagcgggaggaccaggagacggctgtgtagcgggccgcccacgggcagcaggagggacaatgcggccaggggacgagcgccttccttgcccacctcactgccacattccagtgggacggccacggggggacctaggccccagggaaagagccccatgccgccccctaaggagccgcccagacctagggctggactcaggagctgggggggcctcacctgttcccctgaggaccccgccggacccggaggctcacagggaacaagacacggctgggttggatatgcctttgccggggttctggggcagggcgctccctggccgcagcagatgccctcccaggagtggaggggctggagagggggaggccttcgggaagaggcttcctgggccccctggtcttcggccgggtccccagcccccgctcctgccccaccccacctcctccgggcttcctcccggaaactcagcgcctgctgcacttgcctgccctgccttgcttggcacccgctccggcgaccctccccgctcccctgtcatttcatcgcggactgtgcggcctgggggtggggggcgggactctcacggtgacatgtttacagctgggtgtgactcagtaaagtggatttttttttcttt

SEQ ID NO: 93159 - DNA, 1767 bp, Homo sapiens
caaccgcgagctgctaactcaggggcgagctgctaactcaggggcgagctgctaactcaggggcgagctgctaactcagggccgcgctgcaggtgggcggacacggcgagcggctgacgcagtgtcgcgaggtggtgctcaccacatccaaggccatcccggtgcaggtggatggcgagccctgcaagcttgcagcctcacgcatccgcatcgccctgcgcaaccaggccaccatggtgcagaaggccaagcggcggagcgccgcccccctgcacagcgaccagcagccggtgccagagcagttgcgcatccaggtgagtcgcgtcagcatgcacgactatgaggccctgcactacgacaaggagcagctcaaggaggcctctgtgccgctgggcactgtggtggtcccaggagacagtgacctagagctctgccgtgcccacattgagagactccagcaggagcccgatggtgctggagccaagtccccgacatgccagaaactgtcccccaagtggtgcttcctggacgccaccactgccagccgcttctacaggatcgaccgagcccaggagcacctcaactatgtgactgagatcgcacaggatgagatttatatcctggaccctgagctgctgggggcatcggcccggcctgacctcccaacccccacttcccctctccccacctcaccctgctcacccacgccccggtcactgcaaggggatgctgcaccccctcaaggtgaagagctgattgaggctgccaagaggaacgacttctgtaagctccaggagctgcaccgagctgggggcgacctcatgcaccgagacgagcagagtcgcacgctcctgcaccacgcagtcagcactggcagcaaggatgtggtccgctacctgctggaccacgcccccccagagatccttgatgcggtggaggaaaacggggagacctgtttgcaccaagcagcggccctgggccagcgcaccatctgccactacatcgtggaggccggggcctcgctcatgaagacagaccagcagggcgacactccccggcagcgggctgagaaggctcaggacaccgagctggccgcctacctggagaaccggcagcactaccagatgatccagcgggaggaccaggagacggctgtgtagcgggccgcccacgggcagcaggagggacaatgcggccaggggacgagcgccttccttgcccacctcactgccacattccagtgggacggccacggggggacctaggccccagggaaagagccccatgccgccccctaaggagccgcccagacctagggctggactcaggagctgggggggcctcacctgttcccctgaggaccccgccggacccggaggctcacagggaacaagacacggctgggttggatatgcctttgccggggttctggggcagggcgctccctggccgcagcagatgccctcccaggagtggaggggctggagagggggaggccttcgggaagaggcttcctgggccccctggtcttcggccgggtccccagcccccgctcctgccccaccccacctcctccgggcttcctcccggaaactcagcgcctgctgcacttgcctgccctgccttgcttggcacccgctccggcgaccctccccgctcccctgtcatttcatcgcggactgtgcggcctgggggtggggggcgggactctcacggtgacatgtttacagctgggtgtgactcagtaaagtggatttttttttcttt

SEQ ID NO: 93160 - DNA, 2600 bp, Homo sapiens
ccgggggaagctgcaatgaatcctcagctctgggcccagtggaggcgctggggacggaagaaggggagcggccggggtcactgaggcagatgtggcgctaccgctcctgggacgtgccacagatcccatcagaggcaccccagacacagaaagccatcaccaagtcgggcctccagcacctggccccccctccgcccacccctggggccccgtgcagcgagtcagagcggcagatccggagtacagtggactggagcgagtcagcgacatatggggagcacatctggttcgagaccaacgtgtccggggacttctgctacgttggggagcagtactgtgtagccaggatgctgcagaagtcagtgtctcgaagaaagtgcgcagcctgcaagattgtggtgcacacgccctgcatcgagcagctggagaagataaatttccgctgtaagccgtccttccgtgaatcaggctccaggaatgtccgcgagccaacctttgtacggcaccactgggtacacagacgacgccaggacggcaagtgtcggcactgtgggaagggattccagcagaagttcaccttccacagcaaggagattgtggccatcagctgctcgtggtgcaagcaggcataccacagcaaggtgtcctgcttcatgctgcagcagatcgaggagccgtgctcgctgggggtccacgcagccgtggtcatcccgcccacctggatcctccgcgcccggaggccccagaatactctgaaagcaagcaagaagaagaagagggcatccttcaagaggaagtccagcaagaaagggcctgaggagggccgctggagacccttcatcatcaggcccaccccctccccgctcatgaagcccctgctggtgtttgtgaaccccaagagtgggggcaaccagggtgcaaagatcatccagtctttcctctggtatctcaatccccgacaagtcttcgacctgagccagggagggcccaaggaggcgctggagatgtaccgcaaagtgcacaacctgcggatcctggcgtgcgggggcgacggcacggtgggctggatcctctccaccctggaccagctacgcctgaagccgccaccccctgttgccatcctgcccctgggtactggcaacgacttggcccgaaccctcaactggggtgggggctacacagatgagcctgtgtccaagatcctctcccacgtggaggaggggaacgtggtacagctggaccgctgggacctccacgctgagcccaaccccgaggcagggcctgaggaccgagatgaaggcgccaccgaccggttgcccctggatgtcttcaacaactacttcagcctgggctttgacgcccacgtcaccctggagttccacgagtctcgagaggccaacccagagaaattcaacagccgctttcggaataagatgttctacgccgggacagctttctctgacttcctgatgggcagctccaaggacctggccaagcacatccgagtggtgtgtgatggaatggacttgactcccaagatccaggacctgaaaccccagtgtgttgttttcctgaacatccccaggtactgtgcgggcaccatgccctggggccaccctggggagcaccacgactttgagccccagcggcatgacgacggctacctcgaggtcattggcttcaccatgacgtcgttggccgcgctgcaggtgggcggacacggcgagcggctgacgcagtgtcgcgaggtggtgctcaccacatccaaggccatcccggtgcaggtggatggcgagccctgcaagcttgcagcctcacgcatccgcatcgccctgcgcaaccaggccaccatggtgcagaaggccaagcggcggagcgccgcccccctgcacagcgaccagcagccggtgccagagcagttgcgcatccaggtgagtcgcgtcagcatgcacgactatgaggccctgcactacgacaaggagcagctcaaggaggcctctgtgccgctgggcactgtggtggtcccaggagacagtgacctagagctctgccgtgcccacattgagagactccagcaggagcccgatggtgctggagccaagtccccgacatgccagaaactgtcccccaagtggtgcttcctggacgccaccactgccagccgcttctacaggatcgaccgagcccaggagcacctcaactatgtgactgagatcgcacaggatgagatttatatcctggaccctgagctgctgggggcatcggcccggcctgacctcccaacccccacttcccctctccccacctcaccctgctcacccacgccccggtcactgcaaggggatgctgcaccccctcaaggtgaagagctgattgaggctgccaagaggaacgacttctgtaagctccaggagctgcaccgagctgggggcgacctcatgcaccgagacgagcagagtcgcacgctcctgcaccacgcagtcagcactggcagcaaggatgtggtccgctacctgctggaccacgcccccccagagatccttgatccggtggaggaaaacggggagaccacacctctgtcatgtaccaaatcctgactg

SEQ ID NO: 93161 - DNA, 963 bp, Homo sapiens
ccagacagtctgtgtgaatcggacgagacgagcagagtcgcacgctcctgcaccacgcagtcagcactggcagcaaggatgtggtccgctacctgctggaccacgcccccccagagatccttgatgcggtggaggaaaacggggagacctgtttgcaccaagcagcggccctgggccagcgcaccatctgccactacatcgtggaggccggggcctcgctcatgaagacagaccagcagggcgacactccccggcagcgggctgagaaggctcaggacaccgagctggccgcctacctggagaaccggcagcactaccagatgatccagcgggaggaccaggagacggctgtgtagcgggccgcccacgggcagcaggagggacaatgcggccaggggacgagcgccttccttgcccacctcactgccacattccagtgggacggccacggggggacctaggccccagggaaagagccccatgccgccccctaaggagccgcccagacctagggctggactcaggagctgggggggcctcacctgttcccctgaggaccccgccggacccggaggctcacagggaacaagacacggctgggttggatatgcctttgccggggttctggggcagggcgctccctggccgcagcagatgccctcccaggagtggaggggctggagagggggaggccttcgggaagaggcttcctgggccccctggtcttcggccgggtccccagcccccgctcctgccccaccccacctcctccgggcttcctcccggaaactcagcgcctgctgcacttgcctgccctgccttgcttggcacccgctccggcgaccctccccgctcccctgtcatttcatcgcggactgtgcggcctgggggtggggggcgggactctcacggtgacatgtttacagctgggtgtgactcagtaaagtggatttttttttcttt

SEQ ID NO: 93162 - DNA, 1353 bp, Homo sapiens
ggccctctgtgggatctccagtgatcgtcccattccacttcactgtatctctgtctaggccacaatagatggctcctagtaggggcttcctagctcagtccacctgtccctggtgcttagaaaggagcaggtcagaggaagcactgctccagggcttggtcaccagtgctgccagagagcccacaggctgtggggtgagaggcccctcctccggtgtgctccagagagacccacagaggcaactcaggagtaagatgtgtgagcgcactcgtttcaggcctgtgctggtgtacccggctgtgggccagcgtgtgagctcagggaaggaggggtggccccaggaggtccagccctgccatgcctcctgccctcagctccaggagctgcaccgagctgggggcgacctcatgcaccgagacgagcagagtcgcacgctcctgcaccacgcagtcagcactggcagcaaggatgtggtccgctacctgctggaccacgcccccccagagatccttgatgcggtggaggaaaacggggagacctgtttgcaccaagcagcggccctgggccagcgcaccatctgccactacatcgtggaggccggggcctcgctcatgaagacagaccagcagggcgacactccccggcagcgggctgagaaggctcaggacaccgagctggccgcctacctggagaaccggcagcactaccagatgatccagcgggaggaccaggagacggctgtgtagcgggccgcccacgggcagcaggagggacaatgcggccaggggacgagcgccttccttgcccacctcactgccacattccagtgggacggccacggggggacctaggccccagggaaagagccccatgccgccccctaaggagccgcccagacctagggctggactcaggagctgggggggcctcacctgttcccctgaggaccccgccggacccggaggctcacagggaacaagacacggctgggttggatatgcctttgccggggttctggggcagggcgctccctggccgcagcagatgccctcccaggagtggaggggctggagagggggaggccttcgggaagaggcttcctgggccccctggtcttcggccgggtccccagcccccgctcctgccccaccccacctcctccgggcttcctcccggaaactcagcgcctgctgcacttgcctgccctgccttgcttggcacccgctccggcgaccctccccgctcccctgtcatttcatcgcggactgtgcggcctgggggtggggggcgggactctcacggtgacatgtttacagctgggtgtgactcagtaaagtggatttttttttcttt

SEQ ID NO: 93163 - DNA, 1585 bp, Homo sapiens
ggccctctgtgggatctccagtgatcgtcccattccacttcactgtatctctgtctaggccacaatagatggctcctagtaggggcttcctagctcagtccacctgtccctggtgcttagaaaggagcaggtcagaggaagcactgctccagggcttggtcaccagtgctgccagagagcccacaggctgtggggtgagaggcccctcctccggtgtgctccagagagacccacagaggcaactcaggagtaagatgtgtgagcgcactcgtttcaggcctgtgctggtgtacccggctgtgggccagcgtgtgagctcagggaaggaggggtggccccaggaggtccagccctgccatgcctcctgccctcagctccaggagctgcaccgagctgggggcgacctcatgcaccgagacgagcagagtcgcacgctcctgcaccacgcagtcagcactggcagcaaggatgtggtccgctacctgctggaccacgcccccccagagatccttgatgcggtggaggaaaagtaagtatctgggcagtgcagaaccgtggtcaccccggaaaccacccttttccccacccctcccattttgtcaggtcagagcccataaacttcctggtcacatctgtcatcccctgggccacccctattgccccagagccctgaacttcctgccctttctgatggcccttgggagacagatgggtggatcaggggacgggatggggtacacagccagcccctgctcccccagcggggagacctgtttgcaccaagcagcggccctgggccagcgcaccatctgccactacatcgtggaggccggggcctcgctcatgaagacagaccagcagggcgacactccccggcagcgggctgagaaggctcaggacaccgagctggccgcctacctggagaaccggcagcactaccagatgatccagcgggaggaccaggagacggctgtgtagcgggccgcccacgggcagcaggagggacaatgcggccaggggacgagcgccttccttgcccacctcactgccacattccagtgggacggccacggggggacctaggccccagggaaagagccccatgccgccccctaaggagccgcccagacctagggctggactcaggagctgggggggcctcacctgttcccctgaggaccccgccggacccggaggctcacagggaacaagacacggctgggttggatatgcctttgccggggttctggggcagggcgctccctggccgcagcagatgccctcccaggagtggaggggctggagagggggaggccttcgggaagaggcttcctgggccccctggtcttcggccgggtccccagcccccgctcctgccccaccccacctcctccgggcttcctcccggaaactcagcgcctgctgcacttgcctgccctgccttgcttggcacccgctccggcgaccctccccgctcccctgtcatttcatcgcggactgtgcggcctgggggtggggggcgggactctcacggtgacatgtttacagctgggtgtgactcagtaaagtggatttttttttcttt

SEQ ID NO: 93164 - DNA, 802 bp, Homo sapiens
cgcgcggccccctccagcttcttctgtcttcgtcccctggactgtccaacggcctcgctcatgaagacagaccagcagggcgacactccccggcagcgggctgagaaggctcaggacaccgagctggccgcctacctggagaaccggcagcactaccagatgatccagcgggaggaccaggagacggctgtgtagcgggccgcccacgggcagcaggagggacaatgcggccaggggacgagcgccttccttgcccacctcactgccacattccagtgggacggccacggggggacctaggccccagggaaagagccccatgccgccccctaaggagccgcccagacctagggctggactcaggagctgggggggcctcacctgttcccctgaggaccccgccggacccggaggctcacagggaacaagacacggctgggttggatatgcctttgccggggttctggggcagggcgctccctggccgcagcagatgccctcccaggagtggaggggctggagagggggaggccttcgggaagaggcttcctgggccccctggtcttcggccgggtccccagcccccgctcctgccccaccccacctcctccgggcttcctcccggaaactcagcgcctgctgcacttgcctgccctgccttgcttggcacccgctccggcgaccctccccgctcccctgtcatttcatcgcggactgtgcggcctgggggtggggggcgggactctcacggtgacatgtttacagctgggtgtgactcagtaaagtggatttttttttcttt

SEQ ID NO: 93165 - DNA, 1610 bp, Homo sapiens
cggccgcacgatggccgaggggcagggcggcggagggcagcgctgggactgggctggcggcggccgggcagccgaggaggaggtggtgcggcggcgatgccggcgcggggaggaggcccaggtcgcgcagccctggcccgagggttcccggggcacggccgctgggcccccggtggaggagcgtttccgccagctgcacctacgaaagcaggtgtcttacaggaaagccatcaccaagtcgggcctccagcacctggccccccctccgcccacccctggggccccgtgcagcgagtcagagcggcagatccggagtacagtggactggagcgagtcagcgacatatggggagcacatctggttcgagaccaacgtgtccggggacttctgctacgttggggagcagtactgtgtagccaggatgctgcagaagtcagtgtctcgaagaaagtgcgcagcctgcaagattgtggtgcacacgccctgcatcgagcagctggagaaggtgggtgggtagctcagctttgcccgcccctgccctttgggtgctgaggccctttcagcgcgcactcacacccacatgttatacaaacggcctgccaggagtgacccagcactcgggggtgaagagtcaaggaccctggagccaaatgcctgcgttcgaatcctggctcctcactgattagctgctgtatccccactgcctggaacaaacctggcgcctagtgggttcgttgaatatcactcaatggaatgaattgacgaatggtggcccttgtaccatttcaccatgtccaaactagtgcttagaagaggccattgatttgctgaagcttcataactcagctgtggctacaccctgcctctgtggagacctttccccaagggccattgtccactgtgcatttgcagctgggggcatgtctgggcactgtgcttctagaggtggaggcagcactgggcagacgggtcaaggccaggggcagaagggttcgcatggaggggcagcgcttcccagcctgcagaaacccaggccatcatacgggagagactgtaagactaggagtggttcaggcaggctcacacaggctgctttccccagcctctgaattgtaaagtgaggcttccttatacctctaataaggctgaagtagggacagttatgagaagggaaatagaaatgcagccccaagcactgtacactcatcatttaaggtggaaatcgacctagggttccacaaattagctaaaggtctccaggggccaggcagtgcaagtctgcgtgtgaggaccaggctggctgcgtgtgcccgggtcgggagtgccagagggcgaggaagaaaggatgcggccgagtgcggtggctcatgcctgtaatcccagcactttgggaggccgaggtaggtggatcaccctgaggtcaggagtttgagaccagcctggccaacatggtgaaaccccatctctactaaaaatcacaaaaattagccaggcgtggtgatgcacacctgtaatcccagctactcgggaggtggaggttgcagtgagccgagatcgcaccactgcactccagcctgggcaacagagcgagactctgtctcaaaaaacaa

SEQ ID NO: 93166 - DNA, 290 bp, Homo sapiens
agcgcttcctgcagccccgtgtgttgagccgtgtgggcagtcctcaggactgtgcccctgcccacccctcacccagtgaaatttttccccttctcccccagccaacctttgtacggcaccactgggtacacagacgacgccaggacggcaagtgtcggcactgtgggaaggtgagaggccctgcccgaggacatcgccacctgcacctgcgggcctgagcccaggccatgtggccggtgtggcctgccgatcactgaccacaccctggtgtgcagagtccggggctgacc

SEQ ID NO: 93167 - DNA, 425 bp, Homo sapiens
tttctgctctgtggcctggtaagatctggcccagagatggtacgtgagggtacaaagagggaacaaagtcacccagggggcctgctaaggatgatggtagggtgtcctggacgggaaggagcttacagcctctcaccttgtctcccaggagggccgctggagacccttcatcatcaggcccaccccctccccgctcatgaagcccctgctggtgtttgtgaaccccaagagtgggggcaaccaggtgaacgcggccttgcctctcagctaagggctcgggcgggggttggggtccagcccgtctgccagcagctgttcccagagcccgtttctggcttctaccccaatccctctttcccagggatcctgagaaaatcctgtcctttctccacccctcaccccttattggccctggttcccacagt

SEQ ID NO: 93168 - DNA, 3485 bp, Homo sapiens
gcggcgcggagcgggcgtgctgagccccggccgccggcccggcatgggcgtctcccgcgggccctccgccggccggggctagggccggatggagccgcgggacggtagccccgaggcccggagcagcgactccgagtcggcttccgcctcgtccagcggctccgagcgcgacgccggtcccgagccggacaaggcgccgcggcgactcaacaagcggcgcttcccggggctgcggctcttcgggcacaggaaagccatcaccaagtcgggcctccagcacctggccccccctccgcccacccctggggccccgtgcagcgagtcagagcggcagatccggagtacagtggactggagcgagtcagcgacatatggggagcacatctggttcgagaccaacgtgtccggggacttctgctacgttggggagcagtactgtgtagccaggatgctgcagaagtcagtgtctcgaagaaagtgcgcagcctgcaagattgtggtgcacacgccctgcatcgagcagctggagaagataaatttccgctgtaagccgtccttccgtgaatcaggctccaggaatgtccgcgagccaacctttgtacggcaccactgggtacacagacgacgccaggacggcaagtgtcggcactgtgggaagggattccagcagaagttcaccttccacagcaaggagattgtggccatcagctgctcgtggtgcaagcaggcataccacagcaaggtgtcctgcttcatgctgcagcagatcgaggagccgtgctcgctgggggtccacgcagccgtggtcatcccgcccacctggatcctccgcgcccggaggccccagaatactctgaaagcaagcaagaagaagaagagggcatccttcaagaggaagtccagcaagaaagggcctgaggagggccgctggagacccttcatcatcaggcccaccccctccccgctcatgaagcccctgctggtgtttgtgaaccccaagagtgggggcaaccagggtgcaaagatcatccagtctttcctctggtatctcaatccccgacaagtcttcgacctgagccagggagggcccaaggaggcgctggagatgtaccgcaaagtgcacaacctgcggatcctggcgtgcgggggcgacggcacggtgggctggatcctctccaccctggaccagctacgcctgaagccgccaccccctgttgccatcctgcccctgggtactggcaacgacttggcccgaaccctcaactggggtgggggctacacagatgagcctgtgtccaagatcctctcccacgtggaggaggggaacgtggtacagctggaccgctgggacctccacgctgagcccaaccccgaggcagggcctgaggaccgagatgaaggcgccaccgaccggttgcccctggatgtcttcaacaactacttcagcctgggctttgacgcccacgtcaccctggagttccacgagtctcgagaggccaacccagagaaattcaacagccgctttcggaataagatgttctacgccgggacagctttctctgacttcctgatgggcagctccaaggacctggccaagcacatccgagtggtgtgtgatggaatggacttgactcccaagatccaggacctgaaaccccagtgtgttgttttcctgaacatccccaggtactgtgcgggcaccatgccctggggccaccctggggagcaccacgactttgagccccagcggcatgacgacggctacctcgaggtcattggcttcaccatgacgtcgttggccgcgctgcaggtgggcggacacggcgagcggctgacgcagtgtcgcgaggtggtgctcaccacatccaaggccatcccggtgcaggtggatggcgagccctgcaagcttgcagcctcacgcatccgcatcgccctgcgcaaccaggccaccatggtgcagaaggccaagcggcggagcgccgcccccctgcacagcgaccagcagccggtgccagagcagttgcgcatccaggtgagtcgcgtcagcatgcacgactatgaggccctgcactacgacaaggagcagctcaaggaggcctctgtgccgctgggcactgtggtggtcccaggagacagtgacctagagctctgccgtgcccacattgagagactccagcaggagcccgatggtgctggagccaagtccccgacatgccagaaactgtcccccaagtggtgcttcctggacgccaccactgccagccgcttctacaggatcgaccgagcccaggagcacctcaactatgtgactgagatcgcacaggatgagatttatatcctggaccctgagctgctgggggcatcggcccggcctgacctcccaacccccacttcccctctccccacctcaccctgctcacccacgccccggtcactgcaaggggatgctgcaccccctcaaggtgaagagctgattgaggctgccaagaggaacgacttctgtaagctccaggagctgcaccgagctgggggcgacctcatgcaccgagacgagcagagtcgcacgctcctgcaccacgcagtcagcactggcagcaaggatgtggtccgctacctgctggaccacgcccccccagagatccttgatgcggtggaggaaaacggggagacctgtttgcaccaagcagcggccctgggccagcgcaccatctgccactacatcgtggaggccggggcctcgctcatgaagacagaccagcagggcgacactccccggcagcgggctgagaaggctcaggacaccgagctggccgcctacctggagaaccggcagcactaccagatgatccagcgggaggaccaggagacggctgtgtagcgggccgcccacgggcagcaggagggacaatgcggccaggggacgagcgccttccttgcccacctcactgccacattccagtgggacggccacggggggacctaggccccagggaaagagccccatgccgccccctaaggagccgcccagacctagggctggactcaggagctgggggggcctcacctgttcccctgaggaccccgccggacccggaggctcacagggaacaagacacggctgggttggatatgcctttgccggggttctggggcagggcgctccctggccgcagcagatgccctcccaggagtggaggggctggagagggggaggccttcgggaagaggcttcctgggccccctggtcttcggccgggtccccagcccccgctcctgccccaccccacctcctccgggcttcctcccggaaactcagcgcctgctgcacttgcctgccctgccttgcttggcacccgctccggcgaccctccccgctcccctgtcatttcatcgcggactgtgcggcctgggggtggggggcgggactctcacggtgacatgtttacagctgggtgtgactcagtaaagtggatttttttttcttt

SEQ ID NO: 93169 - DNA, 769 bp, Homo sapiens
ccgggggaagctgcaatgaatcctcagctctgggcccagtggaggcgctggggacggaagaaggggagcggccggggtcactgaggcagatgtggcgctaccgctcctgggacgtgccacagatcccatcagaggcaccccagacacagaaagccatcaccaagtcgggcctccagcacctggccccccctccgcccacccctggggccccgtgcagcgagtcagagcggcagatccggagtacagtggactggagcgagtcagcgacatatggggagcacatctggttcgagaccaacgtgtccggggacttctgctacgttggggagcagtactgtgtagccaggatgctgcagaagtcagtgtctcgaagaaagtgcgcagcctgcaagattgtggtgcacacgccctgcatcgagcagctggagaagataaatttccgctgtaagccgtccttccgtgaatcaggctccaggaatgtccgcgagccaacctttgtacggcaccactgggtacacagacgacgccaggacggcaagtgtcggcactgtgggaagggattccagcagaagttcaccttccacagcaaggagattgtggccatcagctgctcgtggtgcaagcaggcataccacagcaaggtgtcctgcttcatgctgcagcagatcgaggagccgtgctcgctgggggtcaagcaacgaggacaccagccactggacatcggccggggccaaaaacacgaagaacagaaagaaggatatagagagcg

SEQ ID NO: 93170 - DNA, 398 bp, Homo sapiens
agctcgttacccgacgctctctctgtggggtgcagccagctgctgacaggtgctctgttctccagctgtgccgctgggcactgtggtggtcccaggagacagtgacctagagctctgccgtgcccacattgagagactccagcaggagcccgatggtgctggagccaagtccccgacatgccagaaactgtcccccaagtggtgcttcctggacgccaccactgccagccgcttctacaggatcgaccgagcccaggagcacctcaactatgtgactgagatcgcacaggatgagatttatatcctggaccctgagctgctgggggcatcggcccggcctgacctcccaacccccacttcccagagagcgtcggggtcctcagaccgaccgcagcagc

SEQ ID NO: 93171 - DNA, 316 bp, Homo sapiens
acatacaagtgcgtccacaactaagaacggacatgcatcaccaccacgaacgcattccaggcaccacgacgacaaattcccttccctccctggcccccactctatcccagcctggcctttgcttctctcaacaggagcccgatggtgctggagccaagtccccgacatgccagaaactgtcccccaagtggtgcttcctggacggtgagtctactcccagggtgccaagctgtttcgtgttccctccctaggggatcccaggtaggggcagcagaggacctgggcctggacatggcactccctgatcctcagctgc

SEQ ID NO: 93172 - DNA, 3682 bp, Homo sapiens
cggccgcacgatggccgaggggcagggcggcggagggcagcgctgggactgggctggcggcggccgggcagccgaggaggaggtggtgcggcggcgatgccggcgcggggaggaggcccaggtcgcgcagccctggcccgagggttcccggggcacggccgctgggcccccggtggaggagcgtttccgccagctgcacctacgaaagcaggtgtcttacaggaaagccatcaccaagtcgggcctccagcacctggccccccctccgcccacccctggggccccgtgcagcgagtcagagcggcagatccggagtacagtggactggagcgagtcagcgacatatggggagcacatctggttcgagaccaacgtgtccggggacttctgctacgttggggagcagtactgtgtagccaggatgctgcagaagtcagtgtctcgaagaaagtgcgcagcctgcaagattgtggtgcacacgccctgcatcgagcagctggagaaggtgggtgggtagctcagctttgcccgcccctgccctttgggtgctgaggccctttcagcgcgcactcacacccacatgttatacaaacggcctgccaggagtgacccagcactcgggggtgaagagtcaaggaccctggagccaaatgcctgcgttcgaatcctggctcctcactgattagctgctgtatccccactgcctggaacaaacctggcgcctagtggataaatttccgctgtaagccgtccttccgtgaatcaggctccaggaatgtccgcgagccaacctttgtacggcaccactgggtacacagacgacgccaggacggcaagtgtcggcactgtgggaagggattccagcagaagttcaccttccacagcaaggagattgtggccatcagctgctcgtggtgcaagcaggcataccacagcaaggtgtcctgcttcatgctgcagcagatcgaggagccgtgctcgctgggggtccacgcagccgtggtcatcccgcccacctggatcctccgcgcccggaggccccagaatactctgaaagcaagcaagaagaagaagagggcatccttcaagaggaagtccagcaagaaagggcctgaggagggccgctggagacccttcatcatcaggcccaccccctccccgctcatgaagcccctgctggtgtttgtgaaccccaagagtgggggcaaccagggtgcaaagatcatccagtctttcctctggtatctcaatccccgacaagtcttcgacctgagccagggagggcccaaggaggcgctggagatgtaccgcaaagtgcacaacctgcggatcctggcgtgcgggggcgacggcacggtgggctggatcctctccaccctggaccagctacgcctgaagccgccaccccctgttgccatcctgcccctgggtactggcaacgacttggcccgaaccctcaactggggtgggggctacacagatgagcctgtgtccaagatcctctcccacgtggaggaggggaacgtggtacagctggaccgctgggacctccacgctgagcccaaccccgaggcagggcctgaggaccgagatgaaggcgccaccgaccggttgcccctggatgtcttcaacaactacttcagcctgggctttgacgcccacgtcaccctggagttccacgagtctcgagaggccaacccagagaaattcaacagccgctttcggaataagatgttctacgccgggacagctttctctgacttcctgatgggcagctccaaggacctggccaagcacatccgagtggtgtgtgatggaatggacttgactcccaagatccaggacctgaaaccccagtgtgttgttttcctgaacatccccaggtactgtgcgggcaccatgccctggggccaccctggggagcaccacgactttgagccccagcggcatgacgacggctacctcgaggtcattggcttcaccatgacgtcgttggccgcgctgcaggtgggcggacacggcgagcggctgacgcagtgtcgcgaggtggtgctcaccacatccaaggccatcccggtgcaggtggatggcgagccctgcaagcttgcagcctcacgcatccgcatcgccctgcgcaaccaggccaccatggtgcagaaggccaagcggcggagcgccgcccccctgcacagcgaccagcagccggtgccagagcagttgcgcatccaggtgagtcgcgtcagcatgcacgactatgaggccctgcactacgacaaggagcagctcaaggaggcctctgtgccgctgggcactgtggtggtcccaggagacagtgacctagagctctgccgtgcccacattgagagactccagcaggagcccgatggtgctggagccaagtccccgacatgccagaaactgtcccccaagtggtgcttcctggacgccaccactgccagccgcttctacaggatcgaccgagcccaggagcacctcaactatgtgactgagatcgcacaggatgagatttatatcctggaccctgagctgctgggggcatcggcccggcctgacctcccaacccccacttcccctctccccacctcaccctgctcacccacgccccggtcactgcaaggggatgctgcaccccctcaaggtgaagagctgattgaggctgccaagaggaacgacttctgtaagctccaggagctgcaccgagctgggggcgacctcatgcaccgagacgagcagagtcgcacgctcctgcaccacgcagtcagcactggcagcaaggatgtggtccgctacctgctggaccacgcccccccagagatccttgatgcggtggaggaaaacggggagacctgtttgcaccaagcagcggccctgggccagcgcaccatctgccactacatcgtggaggccggggcctcgctcatgaagacagaccagcagggcgacactccccggcagcgggctgagaaggctcaggacaccgagctggccgcctacctggagaaccggcagcactaccagatgatccagcgggaggaccaggagacggctgtgtagcgggccgcccacgggcagcaggagggacaatgcggccaggggacgagcgccttccttgcccacctcactgccacattccagtgggacggccacggggggacctaggccccagggaaagagccccatgccgccccctaaggagccgcccagacctagggctggactcaggagctgggggggcctcacctgttcccctgaggaccccgccggacccggaggctcacagggaacaagacacggctgggttggatatgcctttgccggggttctggggcagggcgctccctggccgcagcagatgccctcccaggagtggaggggctggagagggggaggccttcgggaagaggcttcctgggccccctggtcttcggccgggtccccagcccccgctcctgccccaccccacctcctccgggcttcctcccggaaactcagcgcctgctgcacttgcctgccctgccttgcttggcacccgctccggcgaccctccccgctcccctgtcatttcatcgcggactgtgcggcctgggggtggggggcgggactctcacggtgacatgtttacagctgggtgtgactcagtaaagtggatttttttttcttt

SEQ ID NO: 93173 - DNA, 3510 bp, Homo sapiens
ccgggggaagctgcaatgaatcctcagctctgggcccagtggaggcgctggggacggaagaaggggagcggccggggtcactgaggcagatgtggcgctaccgctcctgggacgtgccacagatcccatcagaggcaccccagacacagaaagccatcaccaagtcgggcctccagcacctggccccccctccgcccacccctggggccccgtgcagcgagtcagagcggcagatccggagtacagtggactggagcgagtcagcgacatatggggagcacatctggttcgagaccaacgtgtccggggacttctgctacgttggggagcagtactgtgtagccaggatgctgcagaagtcagtgtctcgaagaaagtgcgcagcctgcaagattgtggtgcacacgccctgcatcgagcagctggagaaggagtgacccagcactcgggggtgaagagtcaaggaccctggagccaaatgcctgcgttcgaatcctggctcctcactgattagctgctgtatccccactgcctggaacaaacctggcgcctagtggataaatttccgctgtaagccgtccttccgtgaatcaggctccaggaatgtccgcgagccaacctttgtacggcaccactgggtacacagacgacgccaggacggcaagtgtcggcactgtgggaagggattccagcagaagttcaccttccacagcaaggagattgtggccatcagctgctcgtggtgcaagcaggcataccacagcaaggtgtcctgcttcatgctgcagcagatcgaggagccgtgctcgctgggggtccacgcagccgtggtcatcccgcccacctggatcctccgcgcccggaggccccagaatactctgaaagcaagcaagaagaagaagagggcatccttcaagaggaagtccagcaagaaagggcctgaggagggccgctggagacccttcatcatcaggcccaccccctccccgctcatgaagcccctgctggtgtttgtgaaccccaagagtgggggcaaccagggtgcaaagatcatccagtctttcctctggtatctcaatccccgacaagtcttcgacctgagccagggagggcccaaggaggcgctggagatgtaccgcaaagtgcacaacctgcggatcctggcgtgcgggggcgacggcacggtgggctggatcctctccaccctggaccagctacgcctgaagccgccaccccctgttgccatcctgcccctgggtactggcaacgacttggcccgaaccctcaactggggtgggggctacacagatgagcctgtgtccaagatcctctcccacgtggaggaggggaacgtggtacagctggaccgctgggacctccacgctgagcccaaccccgaggcagggcctgaggaccgagatgaaggcgccaccgaccggttgcccctggatgtcttcaacaactacttcagcctgggctttgacgcccacgtcaccctggagttccacgagtctcgagaggccaacccagagaaattcaacagccgctttcggaataagatgttctacgccgggacagctttctctgacttcctgatgggcagctccaaggacctggccaagcacatccgagtggtgtgtgatggaatggacttgactcccaagatccaggacctgaaaccccagtgtgttgttttcctgaacatccccaggtactgtgcgggcaccatgccctggggccaccctggggagcaccacgactttgagccccagcggcatgacgacggctacctcgaggtcattggcttcaccatgacgtcgttggccgcgctgcaggtgggcggacacggcgagcggctgacgcagtgtcgcgaggtggtgctcaccacatccaaggccatcccggtgcaggtggatggcgagccctgcaagcttgcagcctcacgcatccgcatcgccctgcgcaaccaggccaccatggtgcagaaggccaagcggcggagcgccgcccccctgcacagcgaccagcagccggtgccagagcagttgcgcatccaggtgagtcgcgtcagcatgcacgactatgaggccctgcactacgacaaggagcagctcaaggaggcctctgtgccgctgggcactgtggtggtcccaggagacagtgacctagagctctgccgtgcccacattgagagactccagcaggagcccgatggtgctggagccaagtccccgacatgccagaaactgtcccccaagtggtgcttcctggacgccaccactgccagccgcttctacaggatcgaccgagcccaggagcacctcaactatgtgactgagatcgcacaggatgagatttatatcctggaccctgagctgctgggggcatcggcccggcctgacctcccaacccccacttcccctctccccacctcaccctgctcacccacgccccggtcactgcaaggggatgctgcaccccctcaaggtgaagagctgattgaggctgccaagaggaacgacttctgtaagctccaggagctgcaccgagctgggggcgacctcatgcaccgagacgagcagagtcgcacgctcctgcaccacgcagtcagcactggcagcaaggatgtggtccgctacctgctggaccacgcccccccagagatccttgatgcggtggaggaaaacggggagacctgtttgcaccaagcagcggccctgggccagcgcaccatctgccactacatcgtggaggccggggcctcgctcatgaagacagaccagcagggcgacactccccggcagcgggctgagaaggctcaggacaccgagctggccgcctacctggagaaccggcagcactaccagatgatccagcgggaggaccaggagacggctgtgtagcgggccgcccacgggcagcaggagggacaatgcggccaggggacgagcgccttccttgcccacctcactgccacattccagtgggacggccacggggggacctaggccccagggaaagagccccatgccgccccctaaggagccgcccagacctagggctggactcaggagctgggggggcctcacctgttcccctgaggaccccgccggacccggaggctcacagggaacaagacacggctgggttggatatgcctttgccggggttctggggcagggcgctccctggccgcagcagatgccctcccaggagtggaggggctggagagggggaggccttcgggaagaggcttcctgggccccctggtcttcggccgggtccccagcccccgctcctgccccaccccacctcctccgggcttcctcccggaaactcagcgcctgctgcacttgcctgccctgccttgcttggcacccgctccggcgaccctccccgctcccctgtcatttcatcgcggactgtgcggcctgggggtggggggcgggactctcacggtgacatgtttacagctgggtgtgactcagtaaagtggatttttttttcttt

SEQ ID NO: 93174 - DNA, 1853 bp, Homo sapiens
tttctggcatgtcggggacttgactccagcaccatcgggctcctgctggagtctctcaatgtgcacacggcagagctctaggtcactgtctcctgggaccaccacagagccccagcggcatgacgacggctacctcgaggtcattggcttcaccatgacgtcgttggccgcgctgcaggtgggcggacacggcgagcggctgacgcagtgtcgcgaggtggtgctcaccacatccaaggccatcccggtgcaggtggatggcgagccctgcaagcttgcagcctcacgcatccgcatcgccctgcgcaaccaggccaccatggtgcagaaggccaagcggcggagcgccgcccccctgcacagcgaccagcagccggtgccagagcagttgcgcatccaggtgagtcgcgtcagcatgcacgactatgaggccctgcactacgacaaggagcagctcaaggaggcctctgtgccgctgggcactgtggtggtcccaggagacagtgacctagagctctgccgtgcccacattgagagactccagcaggagcccgatggtgctggagccaagtccccgacatgccagaaactgtcccccaagtggtgcttcctggacgccaccactgccagccgcttctacaggatcgaccgagcccaggagcacctcaactatgtgactgagatcgcacaggatgagatttatatcctggaccctgagctgctgggggcatcggcccggcctgacctcccaacccccacttcccctctccccacctcaccctgctcacccacgccccggtcactgcaaggggatgctgcaccccctcaaggtgaagagctgattgaggctgccaagaggaacgacttctgtaagctccaggagctgcaccgagctgggggcgacctcatgcaccgagacgagcagagtcgcacgctcctgcaccacgcagtcagcactggcagcaaggatgtggtccgctacctgctggaccacgcccccccagagatccttgatgcggtggaggaaaacggggagacctgtttgcaccaagcagcggccctgggccagcgcaccatctgccactacatcgtggaggccggggcctcgctcatgaagacagaccagcagggcgacactccccggcagcgggctgagaaggctcaggacaccgagctggccgcctacctggagaaccggcagcactaccagatgatccagcgggaggaccaggagacggctgtgtagcgggccgcccacgggcagcaggagggacaatgcggccaggggacgagcgccttccttgcccacctcactgccacattccagtgggacggccacggggggacctaggccccagggaaagagccccatgccgccccctaaggagccgcccagacctagggctggactcaggagctgggggggcctcacctgttcccctgaggaccccgccggacccggaggctcacagggaacaagacacggctgggttggatatgcctttgccggggttctggggcagggcgctccctggccgcagcagatgccctcccaggagtggaggggctggagagggggaggccttcgggaagaggcttcctgggccccctggtcttcggccgggtccccagcccccgctcctgccccaccccacctcctccgggcttcctcccggaaactcagcgcctgctgcacttgcctgccctgccttgcttggcacccgctccggcgaccctccccgctcccctgtcatttcatcgcggactgtgcggcctgggggtggggggcgggactctcacggtgacatgtttacagctgggtgtgactcagtaaagtggatttttttttcttt

SEQ ID NO: 93175 - DNA, 2757 bp, Homo sapiens
ccgggggaagctgcaatgaatcctcagctctgggcccagtggaggcgctggggacggaagaaggggagcggccggggtcactgaggcagatgtggcgctaccgctcctgggacgtgccacagatcccatcagaggcaccccagacacagaaagccatcaccaagtcgggcctccagcacctggccccccctccgcccacccctggggccccgtgcagcgagtcagagcggcagatccggagtacagtggactggagcgagtcagcgacatatggggagcacatctggttcgagaccaacgtgtccggggacttctgctacgttggggagcagtactgtgtagccaggatgctgcagaagtcagtgtctcgaagaaagtgcgcagcctgcaagattgtggtgcacacgccctgcatcgagcagctggagaagataaatttccgctgtaagccgtccttccgtgaatcaggctccaggaatgtccgcgagccaacctttgtacggcaccactgggtacacagacgacgccaggacggcaagtgtcggcactgtgggaagggattccagcagaagttcaccttccacagcaaggagattgtggccatcagctgctcgtggtgcaagcaggcataccacagcaaggtgtcctgcttcatgctgcagcagatcgaggagccgtgctcgctgggggtccacgcagccgtggtcatcccgcccacctggatcctccgcgcccggaggccccagaatactctgaaagcaagcaagaagaagaagagggcatccttcaagaggaagtccagcaagaaagggcctgaggagggccgctggagacccttcatcatcaggcccaccccctccccgctcatgaagcccctgctggtgtttgtgaaccccaagagtgggggcaaccagggtgcaaagatcatccagtctttcctctggtatctcaatccccgacaagtcttcgacctgagccagggagggcccaaggaggcgctggagatgtaccgcaaagtgcacaacctgcggatcctggcgtgcgggggcgacggcacggtgggctggatcctctccaccctggaccagctacgcctgaagccgccaccccctgttgccatcctgcccctgggtactggcaacgacttggcccgaaccctcaactggggtgggggctacacagatgagcctgtgtccaagatcctctcccacgtggaggaggggaacgtggtacagctggaccgctgggacctccacgctgagcccaaccccgaggcagggcctgaggaccgagatgaaggcgccaccgaccggttgcccctggatgtcttcaacaactacttcagcctgggctttgacgcccacgtcaccctggagttccacgagtctcgagaggccaacccagagaaattcaacagccgctttcggaataagatgttctacgccgggacagctttctctgacttcctgatgggcagctccaaggacctggccaagcacatccgagtggtgtgtgatggaatggacttgactcccaagatccaggacctgaaaccccagtgtgttgttttcctgaacatccccaggtactgtgcgggcaccatgccctggggccaccctggggagcaccacgactttgagccccagcggcatgacgacggctacctcgaggtcattggcttcaccatgacgtcgttggccgcgctgcaggtgggcggacacggcgagcggctgacgcagtgtcgcgaggtggtgctcaccacatccaaggccatcccggtgcaggtggatggcgagccctgcaagcttgcagcctcacgcatccgcatcgccctgcgcaaccaggccaccatggtgcagaaggccaagcggcggagcgccgcccccctgcacagcgaccagcagccggtgccagagcagttgcgcatccaggtgagtcgcgtcagcatgcacgactatgaggccctgcactacgacaaggagcagctcaaggaggcctctgtgccgctgggcactgtggtggtcccaggagacagtgacctagagctctgccgtgcccacattgagagactccagcaggagcccgatggtgctggagccaagtccccgacatgccagaaactgtcccccaagtggtgcttcctggacgccaccactgccagccgcttctacaggatcgaccgagcccaggagcacctcaactatgtgactgagatcgcacaggatgagatttatatcctggaccctgagctgctgggggcatcggcccggcctgacctcccaacccccacttcccctctccccacctcaccctgctcacccacgccccggtcactgcaaggggatgctgcaccccctcaaggtgaagagctgattgaggctgccaagaggaacgacttctgtaagctccaggagctgcaccgagctgggggcgacctcatgcaccgagacgagcagagtcgcacgctcctgcaccacgcagtcagcactggcagcaaggatgtggtccgctacctgctggaccacgcccccccagagatccttgatgcggtggaggaaaacggggagacctgtttgcaccaagcagcggccctgggccagcgcaccatctgccactacatcgtggaggccggggcctcgctcatgaagacagaccagcagggcgacactccccggcagcgggctgagaaggctcaggacaccgagctggccgcctactgaagagggagcagcataagatcctctagataccttgaac

SEQ ID NO: 93176 - DNA, 1052 bp, Homo sapiens
aggatcccccggctgccgccctcttcaaggtgaagagctgattgaggctgccaagaggaacgacttctgtaagctccaggagctgcaccgagctgggggcgacctcatgcaccgagacgagcagagtcgcacgctcctgcaccacgcagtcagcactggcagcaaggatgtggtccgctacctgctggaccacgcccccccagagatccttgatgcggtggaggaaaacggggagacctgtttgcaccaagcagcggccctgggccagcgcaccatctgccactacatcgtggaggccggggcctcgctcatgaagacagaccagcagggcgacactccccggcagcgggctgagaaggctcaggacaccgagctggccgcctacctggagaaccggcagcactaccagatgatccagcgggaggaccaggagacggctgtgtagcgggccgcccacgggcagcaggagggacaatgcggccaggggacgagcgccttccttgcccacctcactgccacattccagtgggacggccacggggggacctaggccccagggaaagagccccatgccgccccctaaggagccgcccagacctagggctggactcaggagctgggggggcctcacctgttcccctgaggaccccgccggacccggaggctcacagggaacaagacacggctgggttggatatgcctttgccggggttctggggcagggcgctccctggccgcagcagatgccctcccaggagtggaggggctggagagggggaggccttcgggaagaggcttcctgggccccctggtcttcggccgggtccccagcccccgctcctgccccaccccacctcctccgggcttcctcccggaaactcagcgcctgctgcacttgcctgccctgccttgcttggcacccgctccggcgaccctccccgctcccctgtcatttcatcgcggactgtgcggcctgggggtggggggcgggactctcacggtgacatgtttacagctgggtgtgactcagtaaagtggatttttttttcttt

SEQ ID NO: 93177 - DNA, 2364 bp, Homo sapiens
ccgggggaagctgcaatgaatcctcagctctgggcccagtggaggcgctggggacggaagaaggggagcggccggggtcactgaggcagatgtggcgctaccgctcctgggacgtgccacagatcccatcagaggcaccccagacacagaaagccatcaccaagtcgggcctccagcacctggccccccctccgcccacccctggggccccgtgcagcgagtcagagcggcagatccggagtacagtggactggagcgagtcagcgacatatggggagcacatctggttcgagaccaacgtgtccggggacttctgctacgttggggagcagtactgtgtagccaggatgctgcagaagtcagtgtctcgaagaaagtgcgcagcctgcaagattgtggtgcacacgccctgcatcgagcagctggagaagataaatttccgctgtaagccgtccttccgtgaatcaggctccaggaatgtccgcgagccaacctttgtacggcaccactgggtacacagacgacgccaggacggcaagtgtcggcactgtgggaagggattccagcagaagttcaccttccacagcaaggagattgtggccatcagctgctcgtggtgcaagcaggcataccacagcaaggtgtcctgcttcatgctgcagcagatcgaggagccgtgctcgctgggggtccacgcagccgtggtcatcccgcccacctggatcctccgcgcccggaggccccagaatactctgaaagcaagcaagaagaagaagagggcatccttcaagaggaagtccagcaagaaagggcctgaggagggccgctggagacccttcatcatcaggcccaccccctccccgctcatgaagcccctgctggtgtttgtgaaccccaagagtgggggcaaccagggtgcaaagatcatccagtctttcctctggtatctcaatccccgacaagtcttcgacctgagccagggagggcccaaggaggcgctggagatgtaccgcaaagtgcacaacctgcggatcctggcgtgcgggggcgacggcacggtgggctggatcctctccaccctggaccagctacgcctgaagccgccaccccctgttgccatcctgcccctgggtactggcaacgacttggcccgaaccctcaactggggtgggggctacacagatgagcctgtgtccaagatcctctcccacgtggaggaggggaacgtggtacagctggaccgctgggacctccacgctgagcccaaccccgaggcagggcctgaggaccgagatgaaggcgccaccgaccggttgcccctggatgtcttcaacaactacttcagcctgggctttgacgcccacgtcaccctggagttccacgagtctcgagaggccaacccagagaaattcaacagccgctttcggaataagatgttctacgccgggacagctttctctgacttcctgatgggcagctccaaggacctggccaagcacatccgagtggtgtgtgatggaatggacttgactcccaagatccaggacctgaaaccccagtgtgttgttttcctgaacatccccaggtactgtgcgggcaccatgccctggggccaccctggggagcaccacgactttgagccccagcggcatgacgacggctacctcgaggtcattggcttcaccatgacgtcgttggccgcgctgcaggtgggcggacacggcgagcggctgacgcagtgtcgcgaggtggtgctcaccacatccaaggccatcccggtgcaggtggatggcgagccctgcaagcttgcagcctcacgcatccgcatcgccctgcgcaaccaggccaccatggtgcagaaggccaagcggcggagcgccgcccccctgcacagcgaccagcagccggtgccagagcagttgcgcatccaggtgagtcgcgtcagcatgcacgactatgaggccctgcactacgacaaggagcagctcaaggaggcctctgtgccgctgggcactgtggtggtcccaggagacagtgacctagagctctgccgtgcccacattgagagactccagcaggagcccgatggtgctggagccaagtccccgacatgccagaaactgtcccccaagtggtgcttcctggacgccaccactgccagccgcttctacaggatcgaccgagcccaggagcacctcaactatgtgactgagatcgcacaggatgagatttatatcctggaccctgagctgctgggggcatcggcccggcctgacctcccaacccccacttcccacgacgacgacgaattccggcacgacgacgacgaattccagcacgacgacgacgaatgccggcaccacg

SEQ ID NO: 93178 - DNA, 646 bp, Homo sapiens
gctgttgtcgacctcatgcaccgagtactggctgtgtagcgggccgcccacgggcagcaggagggacaatgcggccaggggacgagcgccttccttgcccacctcactgccacattccagtgggacggccacggggggacctaggccccagggaaagagccccatgccgccccctaaggagccgcccagacctagggctggactcaggagctgggggggcctcacctgttcccctgaggaccccgccggacccggaggctcacagggaacaagacacggctgggttggatatgcctttgccggggttctggggcagggcgctccctggccgcagcagatgccctcccaggagtggaggggctggagagggggaggccttcgggaagaggcttcctgggccccctggtcttcggccgggtccccagcccccgctcctgccccaccccacctcctccgggcttcctcccggaaactcagcgcctgctgcacttgcctgccctgccttgcttggcacccgctccggcgaccctccccgctcccctgtcatttcatcgcggactgtgcggcctgggggtggggggcgggactctcacggtgacatgtttacagctgggtgtgactcagtaaagtggatttttttttcttt

SEQ ID NO: 93179 - DNA, 1787 bp, Homo sapiens
ccgggggaagctgcaatgaatcctcagctctgggcccagtggaggcgctggggacggaagaaggggagcggccggggtcactgaggcagatgtggcgctaccgctcctgggacgtgccacagatcccatcagaggcaccccagacacagaaagccatcaccaagtcgggcctccagcacctggccccccctccgcccacccctggggccccgtgcagcgagtcagagcggcagatccggagtacagtggactggagcgagtcagcgacatatggggagcacatctggttcgagaccaacgtgtccggggacttctgctacgttggggagcagtactgtgtagccaggatgctgcagaagtcagtgtctcgaagaaagtgcgcagcctgcaagattgtggtgcacacgccctgcatcgagcagctggagaagataaatttccgctgtaagccgtccttccgtgaatcaggctccaggaatgtccgcgagccaacctttgtacggcaccactgggtacacagacgacgccaggacggcaagtgtcggcactgtgggaagggattccagcagaagttcaccttccacagcaaggagattgtggccatcagctgctcgtggtgcaagcaggcataccacagcaaggtgtcctgcttcatgctgcagcagatcgaggagccgtgctcgctgggggtccacgcagccgtggtcatcccgcccacctggatcctccgcgcccggaggccccagaatactctgaaagcaagcaagaagaagaagagggcatccttcaagaggaagtccagcaagaaagggcctgaggagggccgctggagacccttcatcatcaggcccaccccctccccgctcatgaagcccctgctggtgtttgtgaaccccaagagtgggggcaaccagggtgcaaagatcatccagtctttcctctggtatctcaatccccgacaagtcttcgacctgagccagggagggcccaaggaggcgctggagatgtaccgcaaagtgcacaacctgcggatcctggcgtgcgggggcgacggcacggtgggctggatcctctccaccctggaccagctacgcctgaagccgccaccccctgttgccatcctgcccctgggtactggcaacgacttggcccgaaccctcaactggggtgggggctacacagatgagcctgtgtccaagatcctctcccacgtggaggaggggaacgtggtacagctggaccgctgggacctccacgctgagcccaaccccgaggcagggcctgaggaccgagatgaaggcgccaccgaccggttgcccctggatgtcttcaacaactacttcagcctgggctttgacgcccacgtcaccctggagttccacgagtctcgagaggccaacccagagaaattcaacagccgctttcggaataagatgttctacgccgggacagctttctctgacttcctgatgggcagctccaaggacctggccaagcacatccgagtggtgtgtgatggaatggacttgactcccaagatccaggacctgaaaccccagtgtgttgttttcctgaacatccccaggtactgtgcgggcaccatgccctggggccaccctggggagcaccacgactttgagccccagcggcatgacgacggctacctcgaggtcattggcttcaccatgacgtcgttggtgagtgggccctgggcccatggtgcctgggagcacagcccaaaggtggaaggggtcacccatactcacctccatgggccacggcggcct

SEQ ID NO: 93180 - DNA, 6914 bp, Homo sapiens
ggaaggagcaggaggcagcccaggcggagcgggaggagctggcagcggggcgcatgccaggcgggggtcctcagggcgccccagccgccgccggcggcggcggcgtgagccaccgcgcaggcagccgggattgcttaccacctgcagcgtgctttcggaggcggcggctggcacggaggccgggctacatgagaagctcgacagggcctgggatcgggttcctttccccagcagtgggcacactgttccggttcccaggaggggtgtctggcgaggagtcccaccactcggagtccagggccagacagtgtggccttgactcgagaggcctcttggtccggagccctgtttccaagagtgcagcagcccctactgtgacctctgtgagaggaacctcggcgcactttgggattcagctcagaggtggcaccagattgcctgacaggcttagctggccgtgtggccctgggagtgctgggtggcagcaagagtttgcagccatggatagttctgagaccctggacgccagctgggaggcagcctgcagcgatggagcaaggcgtgtccgggcagcaggctctctgccatcagcagagttgagtagcaacagctgcagccctggctgtggccctgaggtccccccaacccctcctggctctcacagtgcctttacctcaagctttagctttattcggctctcgcttggctctgccggggaacgtggagaagcagaaggctgcccaccatccagagaggctgagtcccattgccagagcccccaggagatgggagccaaagctgccagcttggacgggcctcacgaggacccgcgatgtctctctcagcccttcagtctcttggctacacgggtctctgcagacttggcccaggccgcaaggaacagctccaggccagagcgtgacatgcattctttaccagacatggaccctggctcctccagttctctggatccctcactggctggctgtggtggtgatgggagcagcggctcaggggatgcccactcttgggacaccctgctcaggaaatgggagccagtgctgcgggactgcctgctgagaaaccggaggcagatggaggtaatatccttaagattaaaacttcagaaacttcaggaagatgcagttgagaatgatgattatgataaagctgagacgttacaacaaagattagaagacctggaacaagagaaaatcagcctgcactttcaacttccttcaaggcagccagctcttagcagtttcctgggtcacctggcagcacaagtccaggctgccttgcgccgtggggccactcagcaggccagcggagatgacacccacaccccactgagaatggagccgaggctgttggaacccactgctcaggacagcttgcacgtgtccatcacgagacgagactggcttcttcaggaaaagcagcagctacagaaagaaatcgaagctctccaagcaaggatgtttgtgctggaagccaaagatcaacagctgagaagggaaatagaggagcaagagcagcaactccagtggcagggctgcgacctgaccccactggtgggccagctgtccctgggtcagctgcaggaggtcagcaaggccttgcaggacaccctggcctcagccggtcagattcccttccatgcagagccaccggaaaccataaggagcctccaggaaagaataaaatccctcaacttgtcacttaaagaaatcactactaaggtgtgtatgagtgagaaattctgcagcaccctgaggaagaaagttaacgatattgaaacccaactaccagccttgcttgaagccaaaatgcatgccatatcaggaaaccatttctggacggctaaagacctcaccgaggagattagatcattaacatcagagagagaagggctggagggactcctcagcaagctgttggtgttgagttccaggaatgtcaaaaagctgggaagtgttaaagaagattacaacagactgagaagagaagtggagcaccaggagactgcctatgaaacaagtgtgaaggaaaatactatgaagtacatggaaacacttaagaataaactgtgcagctgcaagtgtccactgcttgggaaagtgtgggaagctgacttggaagcttgtcgattgcttatccagtgcctacagctccaggaagccaggggaagcctgtctgtagaagatgagaggcagatggatgacttagagggagctgctcctcctattccccccaggctccactccgaggataaaaggaagacccctttgaaggtattggaagaatggaagactcacctcatcccctctctgcactgtgctggaggtgaacagaaagaggaatcttacatcctttctgcagaacttggagaaaagtgtgaagacataggcaagaagctattgtacttggaagatcaacttcacacagcaatccacagtcatgatgaagatctcattcagtctctcaggagggagctccagatggtgaaggaaactctgcaggccatgatcctgcagctccagccagcaaaggaggcgggagaaagagaagctgcagcttcctgcatgacagctggtgtccacgaagcacaagcctgaggagtgacgggatgggggagggaggtgggccaccatgtttggacccggggggctgctcttccctcccccgccatagctaagatgcctgaatcaattacggagatacagagccttgaggtctttcagtggaaaggtggttcatgttcattctcatcagtgtgaaactgaggagtctgcaatttggaatatggagagagagactgatttgctgaatttccttctaaatgtcactcaaaaatttcttttccatgtcattcttgggaatgtcttccacaggatttgagaatagtttcatctcagcccccattagagagaagttggggtgaattctggaaaaatgtctctttttcctgtgccatttgccttctgctgcaacgaaaatatttcctgattcaagattctataaaaaggaaaccaagcataagactctgtcatcatacctgttacacgttcctacaggtgcacaatctaagagagctaattaacctcagagtctggagttaacagcttttcaccttacttctcctgtgatctaatattatcttagaaaaattaatatgcaatttccaaaagatattttggtaagacaacaacctcccagtgatatgccacctttcaattttccttttgtggcaatgattgcatctgaagaaaggatccctgagagtctctgtttcatcaggacattctgaaatttacccacagtgaggctgtggatggatcaggggacctgtataaaatgtttgagcctgttccattttcccgtggaacctgtttcactcaatgccaggcagtgcagcatttaggaaagcagtgcagtactcagtaaggcagtgcagtactcagtaacacaatacagtactcaggcagtgcagtactcagtaagacagtgcagtgctcagtaaggcagtgcaatactcagtaacagtgtagtactcagtaacagtgaagtactcagtaatacagtacagtattcagtaaggcagtgaagtactcagtaatacaatacagtactcagttaggcagtgcagtactcaggaatgcagcacagtactcaggcagtgcaatactcagtgcggtactcagtaacacagtgcagtactcagtaacagtgcagtactcagtaacagtgcagtactcagtaaggcagtgcagtactcagtaacacagtgcagtactcagtaatacagtacagtactcagtaaggcagtatggtactcagtaaagcaatgcaatgctcagtaacacagtgcagtgctcaataaggcagtgcagtgctcagtaaggcagtgaattgcttagtaacacagtgtagtgctcagtaggacagcatagtactcagtaacacagggcagctagtactcagtactataagtactgagtacttatataggcaatgtagtactcagtaaatcagtgcagtactcagtaatgcaagggcatttcaggctcctgctgggctgcttctttggcccagctgggactcctattgagacagctgcaaaacaggctgatttcaattaggcagcacttcccaaagtgcactgaggaaggtggccccaagagaagctctctaaacaaaggagtaccctctctggtcaagtacctttggtaaatacaccataccataatatctgcttggagaaccacaatgcacattagcatattagtctgagagagaacttatagtaaggaaactcacttgattttatctaacctcaaactttccaagtttaatggatcgtgaatttttttcatgtaactcctattcatatcccatagatctagtattgtacagcactgcattctctgaggaagtcccagtccaaactctgatttacatcactttagaaaccacactcacacttttgcagagtgttgagcttaataactacctgccacagattggtaaatttaatccagtggttgttctgtttgtgcttctgttctcatttatgtgtttagggatagtgaggttcctgccttcactaggatccacggatatgagaccatttttgtcatttcctgaagtcacactggcgtttccagaaggcatctggtgctttgctcagccttccatgctgtgcagcacttctgtcctcagtcaaggagatggccatgcttaagccagcaattggctggggtccaggaaacaaagcaaaagcacaatatgtgaatgtgctgattgtgttccctatggctttatctcgagcaaaatacactctacatattttaataataagtataattagcttgttcctggacttcattttcaatgatgaaccaaattcctgaattatttataattgtgtctaaagaaaattatgaactggtcacatggcacttggaatccttgagttaattccagtgaagcaaaacttgggaagagtcaggattggccacattgccaataacaaattcctacttcgacatatgtcttttcaaaaagcctcccagacacaagacatcttaaccgtcactagcccaagtgttttgtattactcagacaccatcatgaaataattctgtgaggtcatgatgtatttgaaaattctgcaagttaataactgccttgaattgtttgaacccgaaataagggttctttggtacctctagtagatagtgtgttcatttccctgctgcaaattttgaagtatttgggcaggtgagtcatgttttaaccacaagccataactcatctgttgtctttgcttggtcttagagtatcattcagaaagtccgctaagggccagcgtgcttcttctggctacacaaccttctcaggacaagcccactgtcttaagccactttgaccctgggagacacaggactgtgtatcctcaatcatactatacagcagtttttgtcaggggaacataaaaatatccaagagaggttagggcttagatttaaaagcatcaaaacaacaacaatggaaatttatgttggcgatagccaagaccacaagcaaaagcacatactggaaatgatgagttagaatctgatttgactgggatgttttatgagaatgtaagtgtgatattatactgtctgccttgctggaatgctggctttcaaatggtcacccatttttctttcactggcctgagttaggacatgctatcagtaatagtcccagttccatccaactttctgaaatttcatttttttttttgagatggagtctctctctgtcacccaagttggagtgcagtggccccgcaatctcggctcactgcaacctctacctcccaggttcaagctattctactgcctcagcctcccaagtagctggggttacaggcatttgccaccgggccctgatgatttttgtatttttagtagagacagggcttcaccatgttggctaggagggtctcaaactcctgacctcaggcgatccacccccacctcggcttcccaaagtgctgagattacaggtgtgagccaccgcacccggccaactttctgaaatttcaaaactgaattgatccttctccaaattagtatatactattggaaacttgtctttccctgcagtaaggctggtttccccaccccagaaacatgtaacggttggtaccatgctaagcccttgccatgctaagccctttacagtcatatcctataatccccatatcaaccttataaggaaggtgtttgtagatgatgcaactgagccttaagaggactaattccctttttctaaggcacagagctggtaaaatgtgaagtaatagtgaacctaacagtcagagacaggcagcatgctcttaactagtgctcttcctaaagttcctttaatgtccttttgagattttgagccatggaacttacttgttcacctggctaagaactcatggccactgtggaaatcttggttagggagtcaaagaaactgagcctggggcaaacgaggcttcccacactgccaggggagcctcactgtgaagtctaggctcagacaggcatcaacaaacctattcaccccaccatcatcctgatctaaccattccccagtcatcccaggaaaaccactcacagcctgacactgggctgactttcttgaagatcctcatccaattggtgtttttcagaagtgttccaatattatgaattctgtgttgtggagaaaagcaaccatgcatttactggtcaatgccttcttgtatatgtaattcaatacttttacttttaatatcctcaccttatctaatctttgaattttgtcatgtaatttattgcttcattaaggttactttttgttatacaaaataaaagctgatatccaaggca

SEQ ID NO: 93181 - DNA, 6848 bp, Homo sapiens
ggaaggagcaggaggcagcccaggcggagcgggaggagctggcagcggggcgcatgccaggcgggggtcctcagggcgccccagccgccgccggcggcggcggcgtgagccaccgcgcaggcagccgggattgcttaccacctgcagcgtgctttcggaggcggcggctggcacggaggccgggctacatgagaagctcgacagggcctgggatcgggttcctttccccagcagtgggcacactgttccggttcccaggaggggtgtctggcgaggagtcccaccactcggagtccagggccagacagtgtggccttgactcgagaggcctcttggtccggagccctgtttccaagagtgcagcagcccctactgtgacctctgtgagaggaacctcggcgcactttgggattcagctcagaggtggcaccagattgcctgacaggcttagctggccgtgtggccctgggagtgctgggtggcagcaagagtttgcagccatggatagttctgagaccctggacgccagctgggaggcagcctgcagcgatggagcaaggcgtgtccgggcagcaggctctctgccatcagcagagttgagtagcaacagctgcagccctggctgtggccctgaggtccccccaacccctcctggctctcacagtgcctttacctcaagctttagctttattcggctctcgcttggctctgccggggaacgtggagaagcagaaggctgcccaccatccagagaggctgagtcccattgccagagcccccaggagatgggagccaaagctgccagcttggacgggcctcacgaggacccgcgatgtctctctcagcccttcagtctcttggctacacgggtctctgcagacttggcccaggccgcaaggaacagctccaggccagagcgtgacatgcattctttaccagacatggaccctggctcctccagttctctggatccctcactggctggctgtggtggtgatgggagcagcggctcaggggatgcccactcttgggacaccctgctcaggaaatgggagccagtgctgcgggactgcctgctgagaaaccggaggcagatggaggtaatatccttaagattaaaacttcagaaacttcaggaagatgcagttgagaatgatgattatgataaagctgagacgttacaacaaagattagaagacctggaacaagagaaaatcagcctgcactttcaacttccttcaaggcagccagctcttagcagtttcctgggtcacctggcagcacaagtccaggctgccttgcgccgtggggccactcagcaggccagcggagatgacacccacaccccactgagaatggagccgaggctgttggaacccactgctcaggacagcttgcacgtgtccatcacgagacgagactggcttcttcaggaaaagcagcagctacagaaagaaatcgaagctctccaagcaaggatgtttgtgctggaagccaaagatcaacagctgagaagggaaatagaggagcaagagcagcaactccagtggcagggctgcgacctgaccccactggtgggccagctgtccctgggtcagctgcaggaggtcagcaaggccttgcaggacaccctggcctcagccggtcagattcccttccatgcagagccaccggaaaccataaggagcctccaggaaagaataaaatccctcaacttgtcacttaaagaaatcactactaaggtgtgtatgagtgagaaattctgcagcaccctgaggaagaaagttaacgatattgaaacccaactaccagccttgcttgaagccaaaatgcatgccatatcaggaaaccatttctggacggctaaagacctcaccgaggagattagatcattaacatcagagagagaagggctggagggactcctcagcaagctgttggtgttgagttccaggaatgtcaaaaagctgggaagtgttaaagaagattacaacagactgagaagagaagtggagcaccaggagactgcctatgaaacaagtgtgaaggaaaatactatgaagtacatggaaacacttaagaataaactgtgcagctgcaagtgtccactgcttgggaaagtgtgggaagctgacttggaagcttgtcgattgcttatccagtgcctacagctccaggaagccaggggaagcctgtctgtagaagatgagaggcagatggatgacttagagggagctgctcctcctattccccccaggctccactccgaggataaaaggaagacccctttgaaggaatcttacatcctttctgcagaacttggagaaaagtgtgaagacataggcaagaagctattgtacttggaagatcaacttcacacagcaatccacagtcatgatgaagatctcattcagtctctcaggagggagctccagatggtgaaggaaactctgcaggccatgatcctgcagctccagccagcaaaggaggcgggagaaagagaagctgcagcttcctgcatgacagctggtgtccacgaagcacaagcctgaggagtgacgggatgggggagggaggtgggccaccatgtttggacccggggggctgctcttccctcccccgccatagctaagatgcctgaatcaattacggagatacagagccttgaggtctttcagtggaaaggtggttcatgttcattctcatcagtgtgaaactgaggagtctgcaatttggaatatggagagagagactgatttgctgaatttccttctaaatgtcactcaaaaatttcttttccatgtcattcttgggaatgtcttccacaggatttgagaatagtttcatctcagcccccattagagagaagttggggtgaattctggaaaaatgtctctttttcctgtgccatttgccttctgctgcaacgaaaatatttcctgattcaagattctataaaaaggaaaccaagcataagactctgtcatcatacctgttacacgttcctacaggtgcacaatctaagagagctaattaacctcagagtctggagttaacagcttttcaccttacttctcctgtgatctaatattatcttagaaaaattaatatgcaatttccaaaagatattttggtaagacaacaacctcccagtgatatgccacctttcaattttccttttgtggcaatgattgcatctgaagaaaggatccctgagagtctctgtttcatcaggacattctgaaatttacccacagtgaggctgtggatggatcaggggacctgtataaaatgtttgagcctgttccattttcccgtggaacctgtttcactcaatgccaggcagtgcagcatttaggaaagcagtgcagtactcagtaaggcagtgcagtactcagtaacacaatacagtactcaggcagtgcagtactcagtaagacagtgcagtgctcagtaaggcagtgcaatactcagtaacagtgtagtactcagtaacagtgaagtactcagtaatacagtacagtattcagtaaggcagtgaagtactcagtaatacaatacagtactcagttaggcagtgcagtactcaggaatgcagcacagtactcaggcagtgcaatactcagtgcggtactcagtaacacagtgcagtactcagtaacagtgcagtactcagtaacagtgcagtactcagtaaggcagtgcagtactcagtaacacagtgcagtactcagtaatacagtacagtactcagtaaggcagtatggtactcagtaaagcaatgcaatgctcagtaacacagtgcagtgctcaataaggcagtgcagtgctcagtaaggcagtgaattgcttagtaacacagtgtagtgctcagtaggacagcatagtactcagtaacacagggcagctagtactcagtactataagtactgagtacttatataggcaatgtagtactcagtaaatcagtgcagtactcagtaatgcaagggcatttcaggctcctgctgggctgcttctttggcccagctgggactcctattgagacagctgcaaaacaggctgatttcaattaggcagcacttcccaaagtgcactgaggaaggtggccccaagagaagctctctaaacaaaggagtaccctctctggtcaagtacctttggtaaatacaccataccataatatctgcttggagaaccacaatgcacattagcatattagtctgagagagaacttatagtaaggaaactcacttgattttatctaacctcaaactttccaagtttaatggatcgtgaatttttttcatgtaactcctattcatatcccatagatctagtattgtacagcactgcattctctgaggaagtcccagtccaaactctgatttacatcactttagaaaccacactcacacttttgcagagtgttgagcttaataactacctgccacagattggtaaatttaatccagtggttgttctgtttgtgcttctgttctcatttatgtgtttagggatagtgaggttcctgccttcactaggatccacggatatgagaccatttttgtcatttcctgaagtcacactggcgtttccagaaggcatctggtgctttgctcagccttccatgctgtgcagcacttctgtcctcagtcaaggagatggccatgcttaagccagcaattggctggggtccaggaaacaaagcaaaagcacaatatgtgaatgtgctgattgtgttccctatggctttatctcgagcaaaatacactctacatattttaataataagtataattagcttgttcctggacttcattttcaatgatgaaccaaattcctgaattatttataattgtgtctaaagaaaattatgaactggtcacatggcacttggaatccttgagttaattccagtgaagcaaaacttgggaagagtcaggattggccacattgccaataacaaattcctacttcgacatatgtcttttcaaaaagcctcccagacacaagacatcttaaccgtcactagcccaagtgttttgtattactcagacaccatcatgaaataattctgtgaggtcatgatgtatttgaaaattctgcaagttaataactgccttgaattgtttgaacccgaaataagggttctttggtacctctagtagatagtgtgttcatttccctgctgcaaattttgaagtatttgggcaggtgagtcatgttttaaccacaagccataactcatctgttgtctttgcttggtcttagagtatcattcagaaagtccgctaagggccagcgtgcttcttctggctacacaaccttctcaggacaagcccactgtcttaagccactttgaccctgggagacacaggactgtgtatcctcaatcatactatacagcagtttttgtcaggggaacataaaaatatccaagagaggttagggcttagatttaaaagcatcaaaacaacaacaatggaaatttatgttggcgatagccaagaccacaagcaaaagcacatactggaaatgatgagttagaatctgatttgactgggatgttttatgagaatgtaagtgtgatattatactgtctgccttgctggaatgctggctttcaaatggtcacccatttttctttcactggcctgagttaggacatgctatcagtaatagtcccagttccatccaactttctgaaatttcatttttttttttgagatggagtctctctctgtcacccaagttggagtgcagtggccccgcaatctcggctcactgcaacctctacctcccaggttcaagctattctactgcctcagcctcccaagtagctggggttacaggcatttgccaccgggccctgatgatttttgtatttttagtagagacagggcttcaccatgttggctaggagggtctcaaactcctgacctcaggcgatccacccccacctcggcttcccaaagtgctgagattacaggtgtgagccaccgcacccggccaactttctgaaatttcaaaactgaattgatccttctccaaattagtatatactattggaaacttgtctttccctgcagtaaggctggtttccccaccccagaaacatgtaacggttggtaccatgctaagcccttgccatgctaagccctttacagtcatatcctataatccccatatcaaccttataaggaaggtgtttgtagatgatgcaactgagccttaagaggactaattccctttttctaaggcacagagctggtaaaatgtgaagtaatagtgaacctaacagtcagagacaggcagcatgctcttaactagtgctcttcctaaagttcctttaatgtccttttgagattttgagccatggaacttacttgttcacctggctaagaactcatggccactgtggaaatcttggttagggagtcaaagaaactgagcctggggcaaacgaggcttcccacactgccaggggagcctcactgtgaagtctaggctcagacaggcatcaacaaacctattcaccccaccatcatcctgatctaaccattccccagtcatcccaggaaaaccactcacagcctgacactgggctgactttcttgaagatcctcatccaattggtgtttttcagaagtgttccaatattatgaattctgtgttgtggagaaaagcaaccatgcatttactggtcaatgccttcttgtatatgtaattcaatacttttacttttaatatcctcaccttatctaatctttgaattttgtcatgtaatttattgcttcattaaggttactttttgttatacaaaataaaagctgatatccaaggca

SEQ ID NO: 93182 - DNA, 2368 bp, Homo sapiens
  misc_feature (1737)..(1737): n is a, c, g, or t
tcaaaagttatacacagattttcaactgtatagggccggggttggttcccataatccccgttgttcaagggccgactgtattatgtttttgcctagaatgtaagtctggagggctaagcattttatgatgtatccttgttacatcaacacaatacaaacagggcctgataactaagaggcactcagtaaatatttgttgaatgggtctatgaatagaagaagcaagtacaggtcacaatggaggtatagaggagggacatttaacacagactggaggagacgacacttgtgctaggggttgaaggaaatgtaggtgtgagccaggcaaagaatgggaggaagatgtttttcagggatcaagcccaaatccattcattggtaggccaagaattcattgtcagtaaatctttgggtctcctgttgagaagaacaatgattgtattagtcagttctcatgctgctaataaagacgtacccaagtctgggtaatttataaagaaaaagaggtttaacggactcacagttctacatggctggggaagcctcacaatcatggtggaaggcaaaggaggagaaaggcacatcttacacagtggcaggcaagagggcgcttgtgcaggggaactcccttttataaaaccatcagatctcatgagacatattcattatcatgagaacagcatgggaaagacccacccccatgattcaattacctcccacgacatgcgggaattatgggagctacaattcaagatgagatttgggtggggacacagccaaaccatatcaatgatgctaaatcaacccattggtaacactcagagaagtaactggatcactgagtctccatgtgggttaaataagactgcccttttctgtaatggaaaatatttgaaccttagggcttctcagaagggttttgtgagagctttgccatcattcttactcaagccttcaggacagcctgctgagcttaagttcatgctctttttctcttggtttctctgccaattttggtgtgtttaccttcataatttaaatgtgaggtttagaacagagaccatttggtcaggaaatttgtattccttctcattatgcatttcttcatgcagatgagggcacagtgtgatgtttttgtttaaaataaaataacattttaactttttatgtggatgttatgctcaaattacactttttctttacatagattttttttggagaaactaatgcatctggcattgaaaaaatgtgcatttttgttttttttttaaaaagagaatgaagaagttcagttttgaaacagtttctaaatgttcttagttttcacaaaaatgtttgcttgaattctattgtaattttttattttttcccctttaaaccaacataggtaatatccttaagattaaaacttcagaaacttcaggaagatgcagttgagaatgatgattatgataaaggtgagttttaatttgtttattgattgttttgtcatcatgtcccaattttctttccatctttactcatatctaccttttgaatcccaaaagaattgtacaatctgttcctctgatcatctctaccagggaatagttgactcttttacagcattattgttttgtagatttcaaagtacttcatgaacattaatcctttgggttataaatataaccttatcaattgtccagaaacacttagcatactcacacaataaaaattatattagcttgccacctgtcngcccatggtgtgatgtatctataatccacttgttcataaaaaatattcgtctgacacctatgatatgctagggaatatgggagacaataggaaagtaagacagacatggtatctgcccttgtgatgccagtaaacttaagccttcatggggctctctgacttcataatttccagaaccagagataggaaatgaggtgaatttgagaaatgtcagactgtgccaaagggggtcacatgcatcaaatttccacatacatggcctaaaatacccaagagaaaaagaagttacaacattagaccagagatagagggactgatctgaggccaggaaaacaaacaaacaaaaaaacaaaaaaaccaattaaaatgaggcaccaaaatagaagttgggctgcaagcagatgagggctgacatgggggttgaatgggcacagggtagactgagtcaaaggaaagctttcaggtatggttgtcctgggaacaatcctgaaaactttagatgctcattgcaagatctcacacccatttctgctgggtgtgggaaagagaaagggctgaaaatgacatgtagattcccctaggcacctactaacttgatagatactcctgctattgagcaagttaggacacc

SEQ ID NO: 93183 - DNA, 2146 bp, Homo sapiens
  misc_feature (1)..(1): n is a, c, g, or t
  misc_feature (1515)..(1515): n is a, c, g, or t
nttgctcacccaagatgcctccagaagaaagcagaaacttccgagaggagcgtgaatgctctgtttctgtgctgcagaaacaattcctagtttatttgtttcctaaattaagtttatcttattggtttttgtttttccaaaagcaatgcatgctcattacaggaagcacagaaagctacaaacaagcagccgggattgcttaccacctgcagcgtgctttcggaggcggcggctggcacggaggccgggctacatgagaagctcgacagggcctgggatcgggttcctttccccagcagtgggcacactgttccggttcccaggaggggtgtctggcgaggagtcccaccactcggagtccagggccagacagtgtggccttgactcgagaggcctcttggtccggagccctgtttccaagagtgcagcagcccctactgtgacctctgtgagaggaacctcggcgcactttgggattcagctcagaggtggcaccagattgcctgacaggcttagctggccgtgtggccctgggagtgctgggtggcagcaagagtttgcagccatggatagttctgagaccctggacgccagctgggaggcagcctgcagcgatggagcaaggcgtgtccgggcagcaggctctctgccatcagcagagttgagtagcaacagctgcagccctggctgtggccctgaggtccccccaacccctcctggctctcacagtgcctttacctcaagctttagctttattcggctctcgcttggctctgccggggaacgtggagaagcagaaggctgcccaccatccagagaggctgagtcccattgccagagcccccaggagatgggagccaaagctgccagcttggacgggcctcacgaggacccgcgatgtctctctcagcccttcagtctcttggctacacgggtctctgcagacttggcccaggccgcaaggaacagctccaggccagagcgtgacatgcattctttaccagacatggaccctggctcctccagttctctggatccctcactggctggctgtggtggtgatgggagcagcggctcaggggatgcccactcttgggacaccctgctcaggaaatgggagccagtgctgcgggactgcctgctgagaaaccggaggcagatggaggtaatatccttaagattaaaacttcagaaacttcaggaagatgcagttgagaatgatgattatgataaaggtgagttttaatttgtttattgattgttttgtcatcatgtcccaattttctttccatctttactcatatctaccttttgaatcccaaaagaattgtacaatctgttcctctgatcatctctaccagggaatagttgactcttttacagcattattgttttgtagatttcaaagtacttcatgaacattaatcctttgggttataaatataaccttatcaattgtccagaaacacttagcatactcacacaataaaaattatattagcttgccacctgtcngcccatggtgtgatgtatctataatccacttgttcataaaaaatattcgtctgacacctatgatatgctagggaatatgggagacaataggaaagtaagacagacatggtatctgcccttgtgatgccagtaaacttaagccttcatggggctctctgacttcataatttccagaaccagagataggaaatgaggtgaatttgagaaatgtcagactgtgccaaagggggtcacatgcatcaaatttccacatacatggcctaaaatacccaagagaaaaagaagttacaacattagaccagagatagagggactgatctgaggccaggaaaacaaacaaacaaaaaaacaaaaaaaccaattaaaatgaggcaccaaaatagaagttgggctgcaagcagatgagggctgacatgggggttgaatgggcacagggtagactgagtcaaaggaaagctttcaggtatggttgtcctgggaacaatcctgaaaactttagatgctcattgcaagatctcacacccatttctgctgggtgtgggaaagagaaagggctgaaaatgacatgtagattcccctaggcacctactaacttgatagatactcctgctattgagcaagttaggacacc

SEQ ID NO: 93184 - DNA, 5127 bp, Homo sapiens
tgagaaaattgagggaagaccataaagtggctcttctatgtgtggacttttctgagagcttctttccccaggaaggatgatgtagaagatgtgaatgccgccttagccaaagtgtctgcttgtcagaggagttcaagtgttcctgtgttctttccttttccagtcgttaggagtaactgagcttactctgagatttgcacccagagggatggtctcagaagacgctggttcagtgcaaattgagatgaaacaagtgtgaaggaaaatactatgaagtacatggaaacacttaagaataaactgtgcagctgcaagtgtccactgcttgggaaagtgtgggaagctgacttggaagcttgtcgattgcttatccagtgcctacagctccaggaagccaggggaagcctgtctgtagaagatgagaggcagatggatgacttagagggagctgctcctcctattccccccaggctccactccgaggataaaaggaagacccctttgaaggtattggaagaatggaagactcacctcatcccctctctgcactgtgctggaggtgaacagaaagaggaatcttacatcctttctgcagaacttggagaaaagtgtgaagacataggcaagaagctattgtacttggaagatcaacttcacacagcaatccacagtcatgatgaagatctcattcagtctctcaggagggagctccagatggtgaaggaaactctgcaggccatgatcctgcagctccagccagcaaaggaggcgggagaaagagaagctgcagcttcctgcatgacagctggtgtccacgaagcacaagcctgaggagtgacgggatgggggagggaggtgggccaccatgtttggacccggggggctgctcttccctcccccgccatagctaagatgcctgaatcaattacggagatacagagccttgaggtctttcagtggaaaggtggttcatgttcattctcatcagtgtgaaactgaggagtctgcaatttggaatatggagagagagactgatttgctgaatttccttctaaatgtcactcaaaaatttcttttccatgtcattcttgggaatgtcttccacaggatttgagaatagtttcatctcagcccccattagagagaagttggggtgaattctggaaaaatgtctctttttcctgtgccatttgccttctgctgcaacgaaaatatttcctgattcaagattctataaaaaggaaaccaagcataagactctgtcatcatacctgttacacgttcctacaggtgcacaatctaagagagctaattaacctcagagtctggagttaacagcttttcaccttacttctcctgtgatctaatattatcttagaaaaattaatatgcaatttccaaaagatattttggtaagacaacaacctcccagtgatatgccacctttcaattttccttttgtggcaatgattgcatctgaagaaaggatccctgagagtctctgtttcatcaggacattctgaaatttacccacagtgaggctgtggatggatcaggggacctgtataaaatgtttgagcctgttccattttcccgtggaacctgtttcactcaatgccaggcagtgcagcatttaggaaagcagtgcagtactcagtaaggcagtgcagtactcagtaacacaatacagtactcaggcagtgcagtactcagtaagacagtgcagtgctcagtaaggcagtgcaatactcagtaacagtgtagtactcagtaacagtgaagtactcagtaatacagtacagtattcagtaaggcagtgaagtactcagtaatacaatacagtactcagttaggcagtgcagtactcaggaatgcagcacagtactcaggcagtgcaatactcagtgcggtactcagtaacacagtgcagtactcagtaacagtgcagtactcagtaacagtgcagtactcagtaaggcagtgcagtactcagtaacacagtgcagtactcagtaatacagtacagtactcagtaaggcagtatggtactcagtaaagcaatgcaatgctcagtaacacagtgcagtgctcaataaggcagtgcagtgctcagtaaggcagtgaattgcttagtaacacagtgtagtgctcagtaggacagcatagtactcagtaacacagggcagctagtactcagtactataagtactgagtacttatataggcaatgtagtactcagtaaatcagtgcagtactcagtaatgcaagggcatttcaggctcctgctgggctgcttctttggcccagctgggactcctattgagacagctgcaaaacaggctgatttcaattaggcagcacttcccaaagtgcactgaggaaggtggccccaagagaagctctctaaacaaaggagtaccctctctggtcaagtacctttggtaaatacaccataccataatatctgcttggagaaccacaatgcacattagcatattagtctgagagagaacttatagtaaggaaactcacttgattttatctaacctcaaactttccaagtttaatggatcgtgaatttttttcatgtaactcctattcatatcccatagatctagtattgtacagcactgcattctctgaggaagtcccagtccaaactctgatttacatcactttagaaaccacactcacacttttgcagagtgttgagcttaataactacctgccacagattggtaaatttaatccagtggttgttctgtttgtgcttctgttctcatttatgtgtttagggatagtgaggttcctgccttcactaggatccacggatatgagaccatttttgtcatttcctgaagtcacactggcgtttccagaaggcatctggtgctttgctcagccttccatgctgtgcagcacttctgtcctcagtcaaggagatggccatgcttaagccagcaattggctggggtccaggaaacaaagcaaaagcacaatatgtgaatgtgctgattgtgttccctatggctttatctcgagcaaaatacactctacatattttaataataagtataattagcttgttcctggacttcattttcaatgatgaaccaaattcctgaattatttataattgtgtctaaagaaaattatgaactggtcacatggcacttggaatccttgagttaattccagtgaagcaaaacttgggaagagtcaggattggccacattgccaataacaaattcctacttcgacatatgtcttttcaaaaagcctcccagacacaagacatcttaaccgtcactagcccaagtgttttgtattactcagacaccatcatgaaataattctgtgaggtcatgatgtatttgaaaattctgcaagttaataactgccttgaattgtttgaacccgaaataagggttctttggtacctctagtagatagtgtgttcatttccctgctgcaaattttgaagtatttgggcaggtgagtcatgttttaaccacaagccataactcatctgttgtctttgcttggtcttagagtatcattcagaaagtccgctaagggccagcgtgcttcttctggctacacaaccttctcaggacaagcccactgtcttaagccactttgaccctgggagacacaggactgtgtatcctcaatcatactatacagcagtttttgtcaggggaacataaaaatatccaagagaggttagggcttagatttaaaagcatcaaaacaacaacaatggaaatttatgttggcgatagccaagaccacaagcaaaagcacatactggaaatgatgagttagaatctgatttgactgggatgttttatgagaatgtaagtgtgatattatactgtctgccttgctggaatgctggctttcaaatggtcacccatttttctttcactggcctgagttaggacatgctatcagtaatagtcccagttccatccaactttctgaaatttcatttttttttttgagatggagtctctctctgtcacccaagttggagtgcagtggccccgcaatctcggctcactgcaacctctacctcccaggttcaagctattctactgcctcagcctcccaagtagctggggttacaggcatttgccaccgggccctgatgatttttgtatttttagtagagacagggcttcaccatgttggctaggagggtctcaaactcctgacctcaggcgatccacccccacctcggcttcccaaagtgctgagattacaggtgtgagccaccgcacccggccaactttctgaaatttcaaaactgaattgatccttctccaaattagtatatactattggaaacttgtctttccctgcagtaaggctggtttccccaccccagaaacatgtaacggttggtaccatgctaagcccttgccatgctaagccctttacagtcatatcctataatccccatatcaaccttataaggaaggtgtttgtagatgatgcaactgagccttaagaggactaattccctttttctaaggcacagagctggtaaaatgtgaagtaatagtgaacctaacagtcagagacaggcagcatgctcttaactagtgctcttcctaaagttcctttaatgtccttttgagattttgagccatggaacttacttgttcacctggctaagaactcatggccactgtggaaatcttggttagggagtcaaagaaactgagcctggggcaaacgaggcttcccacactgccaggggagcctcactgtgaagtctaggctcagacaggcatcaacaaacctattcaccccaccatcatcctgatctaaccattccccagtcatcccaggaaaaccactcacagcctgacactgggctgactttcttgaagatcctcatccaattggtgtttttcagaagtgttccaatattatgaattctgtgttgtggagaaaagcaaccatgcatttactggtcaatgccttcttgtatatgtaattcaatacttttacttttaatatcctcaccttatctaatctttgaattttgtcatgtaatttattgcttcattaaggttactttttgttatacaaaataaaagctgatatccaaggca

SEQ ID NO: 93185 - DNA, 7350 bp, Homo sapiens
tcaaaagttatacacagattttcaactgtatagggccggggttggttcccataatccccgttgttcaagggccgactgtattatgtttttgcctagaatgtaagtctggagggctaagcattttatgatgtatccttgttacatcaacacaatacaaacagggcctgataactaagaggcactcagtaaatatttgttgaatgggtctatgaatagaagaagcaagtacaggtcacaatggaggtatagaggagggacatttaacacagactggaggagacgacacttgtgctaggggttgaaggaaatgtaggtgtgagccaggcaaagaatgggaggaagatgtttttcagggatcaagcccaaatccattcattggtaggccaagaattcattgtcagtaaatctttgggtctcctgttgagaagaacaatgattgtattagtcagttctcatgctgctaataaagacgtacccaagtctgggtaatttataaagaaaaagaggtttaacggactcacagttctacatggctggggaagcctcacaatcatggtggaaggcaaaggaggagaaaggcacatcttacacagtggcaggcaagagggcgcttgtgcaggggaactcccttttataaaaccatcagatctcatgagacatattcattatcatgagaacagcatgggaaagacccacccccatgattcaattacctcccacgacatgcgggaattatgggagctacaattcaagatgagatttgggtggggacacagccaaaccatatcaatgatgctaaatcaacccattggtaacactcagagaagtaactggatcactgagtctccatgtgggttaaataagactgcccttttctgtaatggaaaatatttgaaccttagggcttctcagaagggttttgtgagagctttgccatcattcttactcaagccttcaggacagcctgctgagcttaagttcatgctctttttctcttggtttctctgccaattttggtgtgtttaccttcataatttaaatgtgaggtttagaacagagaccatttggtcaggaaatttgtattccttctcattatgcatttcttcatgcagatgagggcacagtgtgatgtttttgtttaaaataaaataacattttaactttttatgtggatgttatgctcaaattacactttttctttacatagattttttttggagaaactaatgcatctggcattgaaaaaatgtgcatttttgttttttttttaaaaagagaatgaagaagttcagttttgaaacagtttctaaatgttcttagttttcacaaaaatgtttgcttgaattctattgtaattttttattttttcccctttaaaccaacataggtaatatccttaagattaaaacttcagaaacttcaggaagatgcagttgagaatgatgattatgataaagctgagacgttacaacaaagattagaagacctggaacaagagaaaatcagcctgcactttcaacttccttcaaggcagccagctcttagcagtttcctgggtcacctggcagcacaagtccaggctgccttgcgccgtggggccactcagcaggccagcggagatgacacccacaccccactgagaatggagccgaggctgttggaacccactgctcaggacagcttgcacgtgtccatcacgagacgagactggcttcttcaggaaaagcagcagctacagaaagaaatcgaagctctccaagcaaggatgtttgtgctggaagccaaagatcaacagctgagaagggaaatagaggagcaagagcagcaactccagtggcagggctgcgacctgaccccactggtgggccagctgtccctgggtcagctgcaggaggtcagcaaggccttgcaggacaccctggcctcagccggtcagattcccttccatgcagagccaccggaaaccataaggagcctccaggaaagaataaaatccctcaacttgtcacttaaagaaatcactactaaggtgtgtatgagtgagaaattctgcagcaccctgaggaagaaagttaacgatattgaaacccaactaccagccttgcttgaagccaaaatgcatgccatatcaggaaaccatttctggacggctaaagacctcaccgaggagattagatcattaacatcagagagagaagggctggagggactcctcagcaagctgttggtgttgagttccaggaatgtcaaaaagctgggaagtgttaaagaagattacaacagactgagaagagaagtggagcaccaggagactgcctatgaaacaagtgtgaaggaaaatactatgaagtacatggaaacacttaagaataaactgtgcagctgcaagtgtccactgcttgggaaagtgtgggaagctgacttggaagcttgtcgattgcttatccagtgcctacagctccaggaagccaggggaagcctgtctgtagaagatgagaggcagatggatgacttagagggagctgctcctcctattccccccaggctccactccgaggataaaaggaagacccctttgaaggtattggaagaatggaagactcacctcatcccctctctgcactgtgctggaggtgaacagaaagaggaatcttacatcctttctgcagaacttggagaaaagtgtgaagacataggcaagaagctattgtacttggaagatcaacttcacacagcaatccacagtcatgatgaagatctcattcagtctctcaggagggagctccagatggtgaaggaaactctgcaggccatgatcctgcagctccagccagcaaaggaggcgggagaaagagaagctgcagcttcctgcatgacagctggtgtccacgaagcacaagcctgaggagtgacgggatgggggagggaggtgggccaccatgtttggacccggggggctgctcttccctcccccgccatagctaagatgcctgaatcaattacggagatacagagccttgaggtctttcagtggaaaggtggttcatgttcattctcatcagtgtgaaactgaggagtctgcaatttggaatatggagagagagactgatttgctgaatttccttctaaatgtcactcaaaaatttcttttccatgtcattcttgggaatgtcttccacaggatttgagaatagtttcatctcagcccccattagagagaagttggggtgaattctggaaaaatgtctctttttcctgtgccatttgccttctgctgcaacgaaaatatttcctgattcaagattctataaaaaggaaaccaagcataagactctgtcatcatacctgttacacgttcctacaggtgcacaatctaagagagctaattaacctcagagtctggagttaacagcttttcaccttacttctcctgtgatctaatattatcttagaaaaattaatatgcaatttccaaaagatattttggtaagacaacaacctcccagtgatatgccacctttcaattttccttttgtggcaatgattgcatctgaagaaaggatccctgagagtctctgtttcatcaggacattctgaaatttacccacagtgaggctgtggatggatcaggggacctgtataaaatgtttgagcctgttccattttcccgtggaacctgtttcactcaatgccaggcagtgcagcatttaggaaagcagtgcagtactcagtaaggcagtgcagtactcagtaacacaatacagtactcaggcagtgcagtactcagtaagacagtgcagtgctcagtaaggcagtgcaatactcagtaacagtgtagtactcagtaacagtgaagtactcagtaatacagtacagtattcagtaaggcagtgaagtactcagtaatacaatacagtactcagttaggcagtgcagtactcaggaatgcagcacagtactcaggcagtgcaatactcagtgcggtactcagtaacacagtgcagtactcagtaacagtgcagtactcagtaacagtgcagtactcagtaaggcagtgcagtactcagtaacacagtgcagtactcagtaatacagtacagtactcagtaaggcagtatggtactcagtaaagcaatgcaatgctcagtaacacagtgcagtgctcaataaggcagtgcagtgctcagtaaggcagtgaattgcttagtaacacagtgtagtgctcagtaggacagcatagtactcagtaacacagggcagctagtactcagtactataagtactgagtacttatataggcaatgtagtactcagtaaatcagtgcagtactcagtaatgcaagggcatttcaggctcctgctgggctgcttctttggcccagctgggactcctattgagacagctgcaaaacaggctgatttcaattaggcagcacttcccaaagtgcactgaggaaggtggccccaagagaagctctctaaacaaaggagtaccctctctggtcaagtacctttggtaaatacaccataccataatatctgcttggagaaccacaatgcacattagcatattagtctgagagagaacttatagtaaggaaactcacttgattttatctaacctcaaactttccaagtttaatggatcgtgaatttttttcatgtaactcctattcatatcccatagatctagtattgtacagcactgcattctctgaggaagtcccagtccaaactctgatttacatcactttagaaaccacactcacacttttgcagagtgttgagcttaataactacctgccacagattggtaaatttaatccagtggttgttctgtttgtgcttctgttctcatttatgtgtttagggatagtgaggttcctgccttcactaggatccacggatatgagaccatttttgtcatttcctgaagtcacactggcgtttccagaaggcatctggtgctttgctcagccttccatgctgtgcagcacttctgtcctcagtcaaggagatggccatgcttaagccagcaattggctggggtccaggaaacaaagcaaaagcacaatatgtgaatgtgctgattgtgttccctatggctttatctcgagcaaaatacactctacatattttaataataagtataattagcttgttcctggacttcattttcaatgatgaaccaaattcctgaattatttataattgtgtctaaagaaaattatgaactggtcacatggcacttggaatccttgagttaattccagtgaagcaaaacttgggaagagtcaggattggccacattgccaataacaaattcctacttcgacatatgtcttttcaaaaagcctcccagacacaagacatcttaaccgtcactagcccaagtgttttgtattactcagacaccatcatgaaataattctgtgaggtcatgatgtatttgaaaattctgcaagttaataactgccttgaattgtttgaacccgaaataagggttctttggtacctctagtagatagtgtgttcatttccctgctgcaaattttgaagtatttgggcaggtgagtcatgttttaaccacaagccataactcatctgttgtctttgcttggtcttagagtatcattcagaaagtccgctaagggccagcgtgcttcttctggctacacaaccttctcaggacaagcccactgtcttaagccactttgaccctgggagacacaggactgtgtatcctcaatcatactatacagcagtttttgtcaggggaacataaaaatatccaagagaggttagggcttagatttaaaagcatcaaaacaacaacaatggaaatttatgttggcgatagccaagaccacaagcaaaagcacatactggaaatgatgagttagaatctgatttgactgggatgttttatgagaatgtaagtgtgatattatactgtctgccttgctggaatgctggctttcaaatggtcacccatttttctttcactggcctgagttaggacatgctatcagtaatagtcccagttccatccaactttctgaaatttcatttttttttttgagatggagtctctctctgtcacccaagttggagtgcagtggccccgcaatctcggctcactgcaacctctacctcccaggttcaagctattctactgcctcagcctcccaagtagctggggttacaggcatttgccaccgggccctgatgatttttgtatttttagtagagacagggcttcaccatgttggctaggagggtctcaaactcctgacctcaggcgatccacccccacctcggcttcccaaagtgctgagattacaggtgtgagccaccgcacccggccaactttctgaaatttcaaaactgaattgatccttctccaaattagtatatactattggaaacttgtctttccctgcagtaaggctggtttccccaccccagaaacatgtaacggttggtaccatgctaagcccttgccatgctaagccctttacagtcatatcctataatccccatatcaaccttataaggaaggtgtttgtagatgatgcaactgagccttaagaggactaattccctttttctaaggcacagagctggtaaaatgtgaagtaatagtgaacctaacagtcagagacaggcagcatgctcttaactagtgctcttcctaaagttcctttaatgtccttttgagattttgagccatggaacttacttgttcacctggctaagaactcatggccactgtggaaatcttggttagggagtcaaagaaactgagcctggggcaaacgaggcttcccacactgccaggggagcctcactgtgaagtctaggctcagacaggcatcaacaaacctattcaccccaccatcatcctgatctaaccattccccagtcatcccaggaaaaccactcacagcctgacactgggctgactttcttgaagatcctcatccaattggtgtttttcagaagtgttccaatattatgaattctgtgttgtggagaaaagcaaccatgcatttactggtcaatgccttcttgtatatgtaattcaatacttttacttttaatatcctcaccttatctaatctttgaattttgtcatgtaatttattgcttcattaaggttactttttgttatacaaaataaaagctgatatccaaggcatggtgcatcttgatgattttttgtcctttgaagtatggatgatagaaaaatgtatcaggtttattcatctcatctttctgttacaggatgattaattgtacagttacatcacacgaaacatttataataaagtcatgctttagaattgc

SEQ ID NO: 93186 - DNA, 448 bp, Homo sapiens
tgtttatggtgctgttttttcttttcttcccaggcagccgggattgcttaccacctgcagcgtgctttcggaggcggcggctggcacggaggccgggctacatgagaagctcgacagggcctgggatcgggttcctttccccagcagtgggcacactgttccggttcccaggaggggtgtctggcgaggagtcccaccactcggagtccagggccagacagtgtggccttgactcgagaggcctcttggtccggagccctgtttccaagagtgcagcagcccctactgtgacctctgtgagaggaacctcggcgcactttgggattcagctcagaggtggcaccagattgcctgacaggcttagctggccgtgtggccctgggagtgctgggtggcagcaagagtttgcagccatggatagttctgagaccctggacgccagctggga

SEQ ID NO: 93187 - DNA, 219 bp, Homo sapiens
ctggagaaaaaatttatactcagagttcaattattccctatatatttataggcgtcaaatcaatacttacagttccagtccttcacctgatcttcagtatatctaatttccctcaaatgatatatcaatacactagctctctttgtattaacatatatatgtgttcaaagcataaaagtacagaaggccgggtgcggtggctcacacctgtaatcccag

SEQ ID NO: 93188 - DNA, 2272 bp, Homo sapiens
gcataggctaggtagcgaggccgcgtgtgaatcggccgaggccgagttttctgcgcttccttctccctctctccagacgtcgtggtcgttcggtcctatgtcgcgccgggccctccggaggctgaggggggaacagcgcggccaggagcccctcgggcccggcgccttgcatttcgatctccgtgatgacgatgacgcggaagaagaagggcccaagcgggagcttggtgtccggcgtcccgggggcgcagggaaggagggcgtccgagtcaacaaccgcttcgagctgataaacattgacgatcttgaggatgaccctgtggtgaacggggagaggtctggctgtgcgctcacagacgctgtggcaccagggaacaaaggaaggggtcagcgtggaaacacagagagcaagacggatggagatgacaccgagacagtgccctcagagcagtctcatgcaagtggcaaactccggaagaagaaaaaaaaacagaaaaacaagaaaagcagcacgggagaagcatcggaaaacggactagaagatatcgatcgcatcctagagaggattgaggacagcactgggttgaaccgtcccggcccagctcccctgagctccaggaagcacgttctctacgtggagcacagacacttgaatccagacacagaactgaaaaggtattttggtgcccgggcaatcctgggggagcaaaggccacggcagagacaacgtgtgtaccccaagtgcacatggctgaccacccctaaaagcacctggccccgctacagcaaaccaggtctgtccatgcggctgctggaatcaaaaaaaggcctctccttctttgcgtttgagcacagtgaggagtaccagcaggctcagcacaagttcctggtggccgtggagtctatggagccgaacaacatcgtggttctgctccagacgagcccttaccacgttgactcactcctgcagctcagcgatgcctgccgctttcaagaggatcaggagatggctcgagacctcgtagagagagcgctgtacagcatggaatgtgcgttccaccccctgttcagtctcaccagtggggcctgccggctggattaccgcagacccgagaacaggagcttctacctggccctctacaagcagatgagcttcctggagaagcgaggctgcccgcgcacggcgctggagtactgcaagctcatcctgagtctcgagccggatgaggaccccctctgcatgctgctgctcatcgaccacctggccttgcgggcccggaactacgagtacctgatccgcctcttccaggagtgggaggctcatcggaacctgtcccagctccctaattttgccttctctgttccactggcgtatttcctgctgagccagcagacagacctccctgagtgtgagcagagctctgccaggcagaaggcctctctcctgatacagcaggcgctcaccatgttccctggagtcctcctgcccctgctcgagtcttgcagtgtgcggcccgacgccagcgtttccagtcaccgcttctttggacccaatgctgaaataagccagccccctgccctgagccagctggtgaacctgtaccttgggaggtcacactttctctggaaagagcccgccaccatgagctggctggaggagaacgtccacgaggttctgcaagcagtggacgccggggacccagccgtggaagcctgtgagaaccggcggaaggtgctctaccagcgtgcacccaggaatatccaccgccatgtgatcctctctgagatcaaggaagccgtcgctgccctgcccccggacgtgaccacgcagtctgtgatggggtttgatcctctgcctccttcggacacaatctactcctacgtcaggccagagaggctaagtcctatcagccatggaaacaccattgctctcttcttccggtcactgttgccaaactataccatggagggggagaggcccgaggaaggagtggctgggggtctgaaccgcaaccagggcctgaacaggctgatgctggctgtgcgcgacatgatggccaacttccacctcaacgacctggaggcgccgcacgaggacgacgctgagggggagggggagtgggactgagcgtccgcagaggtgaccgaaaagccgtatgatgatgttcccgatttctctgttggtcggagtcggccagttgcctgaagtagggaagctgagtgtgtcgctccctggtccactgtttctcctataaatgtaaatgggtcacgc

SEQ ID NO: 93189 - DNA, 2128 bp, Homo sapiens
gccctaatgtggaacgctccgcttaatgcttggcgatatgttactgtgctcatagggactgagtgtgagatgctgtacagcccagccacggatacacagttcaggtcagactagatcattacagcagcagaggagggtatgggcatggagaggggaaagctctcactgtcaggcacctccgcatcccagacacaggcctcggtcctccatttatgcaatgtcctcattttacaaacaagaaaagcagcacgggaagaagcatcggaaaacggactagaagatatcgatcgcatcctagagaggattgaggacagcactgggttgaaccgtcccggcccagctcccctgagctccaggaagcacgttctctacgtggagcacagacacttgaatccagacacagaactgaaaaggtattttggtgcccgggcaatcctgggggagcaaaggccacggcagagacaacgtgtgtaccccaagtgcacatggctgaccacccctaaaagcacctggccccgctacagcaaaccaggtctgtccatgcggctgctggaatcaaaaaaaggcctctccttctttgcgtttgagcacagtgaggagtaccagcaggctcagcacaagttcctggtggccgtggagtctatggagccgaacaacatcgtggttctgctccagacgagcccttaccacgttgactcactcctgcagctcagcgatgcctgccgctttcaagaggatcaggagatggctcgagacctcgtagagagagcgctgtacagcatggaatgtgcgttccaccccctgttcagtctcaccagtggggcctgccggctggattaccgcagacccgagaacaggagcttctacctggccctctacaagcagatgagcttcctggagaagcgaggctgcccgcgcacggcgctggagtactgcaagctcatcctgagtctcgagccggatgaggaccccctctgcatgctgctgctcatcgaccacctggccttgcgggcccggaactacgagtacctgatccgcctcttccaggagtgggaggctcatcggaacctgtcccagctccctaattttgccttctctgttccactggcgtatttcctgctgagccagcagacagacctccctgagtgtgagcagagctctgccaggcagaaggcctctctcctgatacagcaggcgctcaccatgttccctggagtcctcctgcccctgctcgagtcttgcagtgtgcggcccgacgccagcgtttccagtcaccgcttctttggacccaatgctgaaataagccagccccctgccctgagccagctggtgaacctgtaccttgggaggtcacactttctctggaaagagcccgccaccatgagctggctggaggagaacgtccacgaggttctgcaagcagtggacgccggggacccagccgtggaagcctgtgagaaccggcggaaggtgctctaccagcgtgcacccaggaatatccaccgccatgtgatcctctctgagatcaaggaagccgtcgctgccctgcccccggacgtgaccacgcagtctgtgatggggtttgatcctctgcctccttcggacacaatctactcctacgtcaggccagagaggaagggagaggaggagaggaacagtgttatttgggggtcacagctctgcgtttgcaggccacgttctttcccatctccaccgaatgtacaagcgcttgcgtgtcggcctctgtggcaggctaagtcctatcagccatggaaacaccattgctctcttcttccggtcactgttgccaaactataccatggagggggagaggcccgaggaaggagtggctgggggtctgaaccgcaaccagggcctgaacaggctgatgctggctgtgcgcgacatgatggccaacttccacctcaacgacctggaggcgccgcacgaggacgacgctgagggggagggggagtgggactgagcgtccgcagaggtgaccgaaaagccgtatgatgatgttcccgatttctctgttggtcggagtcggccagttgcctgaagtagggaagctgagtgtgtcgctccctggtccactgtttctcctataaatgtaaatgggtcacgc

SEQ ID NO: 93190 - DNA, 510 bp, Homo sapiens
atctacaggagcttaattcggccgggacatcctgggggagctagccacggcagagacaacgtgtgtaccccaagtgcacatggctgaccacccctaaaagcacctggccccgctacagcaaaccaggtctgtccatgcggctgctggaatcaaaaaaaggcctctccttctttgcgtttgagcacagtgaggagtaccagcaggctcagcacaagttcctggtggccgtggagtctatggagccgaacaacatcgtggtgcgtggtccctgcagcccctgacaggagcaggggccatgtagccaccactgccctgggccgcctgcttccctggtggctgggggaggcatgctgcctcctgcccttcccaacaggaagggtgccagtctctgcagggcggtctggccctgtgaccagaaggagatgtgttcggaggctctaggccaagcgagctccatccgatactcagtaggagaggctggagcgctgctctctcagccgttcctgggga

SEQ ID NO: 93191 - DNA, 595 bp, Homo sapiens
tgtagtcccagctacttgggaggctgaggcaggaaaaacatattaattttagaatgtagaaataaacataaaatcaaaactgcaccagcctggccaacatggcaaaccccgtctcaactaaaaatacaaaacttagccagctgggtgcagtgactcacgcctgtaattccagcagtttgagaggccaaggtgggcaaatcacaaggtcaagagattgagaccagcctggccaacgtgctgaaaacccgtctctactaaaatacaaaaaaattagctgggcgtggtgccgcacacctgtagtcccagctacttgggaggctgaggcaggaaaattgtttgaacccgggaggcacaggttgcagtgagtggagatcgtgccactgcactccatcctggcgacagaggaagactccgtctcaaaaaaaaaaaaaaaaaaaaaaattgggcgtggtgggttgtgcctgtagtcccagctactcaggaggctgaggcaggagaatcccttgaacccggaaggagggggttgccgtgagctgagatcacgccactgcactccagcctgggtgacagagtgactccatctcaaaaaaaaaaa

SEQ ID NO: 93192 - DNA, 179 bp, Homo sapiens
  misc_feature (5)..(5): n is a, c, g, or t
cgtantaggcaggacactgtagagatggctagataccgacagagatggggagggcggggaggatgggatggagttgacacatgacagagacgcctggaggggactcctcgggggcctgcctgtgtcaactcccctcccagctcccacctccctcctcccagctcccggctcccacctcc

SEQ ID NO: 93193 - DNA, 628 bp, Homo sapiens
cacgcctgcctcagctgagttggtctccctcatcctgttcccgctgtccacagccccaccctaagctgatgaggaagcctcacgggccacccggggaatccagggcctgtgctcagctgctgctgctctgccccctggcggcccctccgtgtccctgcgagggaggcagctggcaggcagccccgtgagccgggttgggtcccacgagtctcagttcagtgtcgtttctgacttttcttgactttctttcaggctaagtcctatcagccatggaaacaccattgctctcttcttccggtcactgttgccaaactataccatggagggggagaggcccgaggaaggagtggctgggggtctgaaccgcaaccagggcctgaacaggctgatgctggctgtgcgcgacatgatggccaacttccacctcaacgacctggaggcgccgcacgaggacgacgctgagggggagggggagtgggactgagcgtccgcagaggtgaccgaaaagccgtatgatgatgttcccgatttctctgttggtcggagtcggccagttgcctgaagtagggaagctgagtgtgtcgctccctggtccactgtttctcctataaatgtaaatgggtcacgc

SEQ ID NO: 93194 - DNA, 641 bp, Homo sapiens
tagtggggagttaggtggcccctggcctgggcatgtcaggttctgagttcttgctttaagtcatataattggttcagcttagcaataataactagcctattttgagttggggggacgttgtgagtgtcgacccggtaattcccccgtttttgtttttgtttttggagtcggaatctcactctgtcgcctaagctagagtgcattggcgcagtctcggcccgggttcaagcgattcgcctgcctcagccttccgagtaactggaattacaggcacacgccaccacacccggctaatttttgtatttttattagagaccaggttttgccacgttggccaggctggtcttgaactcctgatatcaagtgatcctcctgtaatcctagcactttgggaggccgaggtgggcggatcacgaggtcaggagatcgagaccatcctgactaacacggtgaaaccacgtctctactaaaaatacaaaaaattagccgggcgtgttggcgggcacctgtagtcccagctacttgggaggctgaggcaggagaatggcatgaacccaggaggcagagcttgcagtgagccgagatcgcgccactgcactccagcctgggcaacatagtgagactccgtctcaaaaaaaaag

SEQ ID NO: 93195 - DNA, 436 bp, Homo sapiens
cctgacagcatgtgtgaaatccctctttaagatgggcctcctccgaggagctgtgaggggtgagggtgaaatccctccttaagacgagcctcctctgaggggctgtgaggggtgagggtgaaatccctccttaagacgggcctccggccgggcgcggtggctcacgcctgtaatcctagcactttgggaggccgaggtgggcggatcacgaggtcaggagatcgagaccatcctgactaacacggtgaaaccacgtctctactaaaaatacaaaaaattagccgggcgtgttggcgggcacctgtagtcccagctacttgggaggctgaggcaggagaatggcatgaacccaggaggcagagcttgcagtgagccgagatcgcgccactgcactccagcctgggcaacatagtgagactccgtctcaaaaaaaaag

SEQ ID NO: 93196 - DNA, 2232 bp, Homo sapiens
gcataggctaggtagcgaggccgcgtgtgaatcggccgagggtggtcgttcggtcctatgtcgcgccgggccctccggaggctgaggggggaacagcgcggccaggagcccctcgggcccggcgccttgcatttcgatctccgtgatgacgatgacgcggaagaagaagggcccaagcgggagcttggtgtccggcgtcccgggggcgcagggaaggagggcgtccgagtcaacaaccgcttcgagctgataaacattgacgatcttgaggatgaccctgtggtgaacggggagaggtctggctgtgcgctcacagacgctgtggcaccagggaacaaaggaaggggtcagcgtggaaacacagagagcaagacggatggagatgacaccgagacagtgccctcagagcagtctcatgcaagtggcaaactccggaagaagaaaaaaaaacagaaaaacaagaaaagcagcacgggagaagcatcggaaaacggactagaagatatcgatcgcatcctagagaggattgaggacagcactgggttgaaccgtcccggcccagctcccctgagctccaggaagcacgttctctacgtggagcacagacacttgaatccagacacagaactgaaaaggtattttggtgcccgggcaatcctgggggagcaaaggccacggcagagacaacgtgtgtaccccaagtgcacatggctgaccacccctaaaagcacctggccccgctacagcaaaccaggtctgtccatgcggctgctggaatcaaaaaaaggcctctccttctttgcgtttgagcacagtgaggagtaccagcaggctcagcacaagttcctggtggccgtggagtctatggagccgaacaacatcgtggttctgctccagacgagcccttaccacgttgactcactcctgcagctcagcgatgcctgccgctttcaagaggatcaggagatggctcgagacctcgtagagagagcgctgtacagcatggaatgtgcgttccaccccctgttcagtctcaccagtggggcctgccggctggattaccgcagacccgagaacaggagcttctacctggccctctacaagcagatgagcttcctggagaagcgaggctgcccgcgcacggcgctggagtactgcaagctcatcctgagtctcgagccggatgaggaccccctctgcatgctgctgctcatcgaccacctggccttgcgggcccggaactacgagtacctgatccgcctcttccaggagtgggaggctcatcggaacctgtcccagctccctaattttgccttctctgttccactggcgtatttcctgctgagccagcagacagacctccctgagtgtgagcagagctctgccaggcagaaggcctctctcctgatacagcaggcgctcaccatgttccctggagtcctcctgcccctgctcgagtcttgcagtgtgcggcccgacgccagcgtttccagtcaccgcttctttggacccaatgctgaaataagccagccccctgccctgagccagctggtgaacctgtaccttgggaggtcacactttctctggaaagagcccgccaccatgagctggctggaggagaacgtccacgaggttctgcaagcagtggacgccggggacccagccgtggaagcctgtgagaaccggcggaaggtgctctaccagcgtgcacccaggaatatccaccgccatgtgatcctctctgagatcaaggaagccgtcgctgccctgcccccggacgtgaccacgcagtctgtgatggggtttgatcctctgcctccttcggacacaatctactcctacgtcaggccagagaggctaagtcctatcagccatggaaacaccattgctctcttcttccggtcactgttgccaaactataccatggagggggagaggcccgaggaaggagtggctgggggtctgaaccgcaaccagggcctgaacaggctgatgctggctgtgcgcgacatgatggccaacttccacctcaacgacctggaggcgccgcacgaggacgacgctgagggggagggggagtgggactgagcgtccgcagaggtgaccgaaaagccgtatgatgatgttcccgatttctctgttggtcggagtcggccagttgcctgaagtagggaagctgagtgtgtcgctccctggtccactgtttctcctataaatgtaaatgggtcacgc

SEQ ID NO: 93197 - DNA, 3215 bp, Homo sapiens
cgaagagtgcgcaggcgcgccgacagccgagttttctgcgcttccttctccctctctccagacgtcgtggtcgttcggtcctatgtcgcgccgggccctccggaggctgaggggggaacagcgcggccaggagcccctcgggcccggcgccttgcatttcgatctccgtgatgacgatgacgcggaagaagaagggcccaagcgggagcttggtgtccggcgtcccgggggcgcagggaaggagggcgtccgagtcaacaaccgcttcgagctgataaacattgacgatcttgaggatgaccctgtggtgaacggggagaggtctggctgtgcgctcacagacgctgtggcaccagggaacaaaggaaggggtcagcgtggaaacacagagagcaagacggatggagatgacaccgagacagtgccctcagagcagtctcatgcaagtggcaaactccggaagaagaaaaaaaaacagaaaaacaagaaaagcagcacgggagaagcatcggaaaacggactagaagatatcgatcgcatcctagagaggattgaggacagcactgggttgaaccgtcccggcccagctcccctgagctccaggaagcacgttctctacgtggagcacagacacttgaatccagacacagaactgaaaaggtattttggtgcccgggcaatcctgggggagcaaaggccacggcagagacaacgtgtgtaccccaagtgcacatggctgaccacccctaaaagcacctggccccgctacagcaaaccaggtctgtccatgcggctgctggaatcaaaaaaaggcctctccttctttgcgtttgagcacagtgaggagtaccagcaggctcagcacaagttcctggtggccgtggagtctatggagccgaacaacatcgtggttctgctccagacgagcccttaccacgttgactcactcctgcagctcagcgatgcctgccgctttcaagaggatcaggagatggctcgagacctcgtagagagagcgctgtacagcatggaatgtgcgttccaccccctgttcagtctcaccagtggggcctgccggctggattaccgcagacccgagaacaggagcttctacctggccctctacaagcagatgagcttcctggagaagcgaggctgcccgcgcacggcgctggagtactgcaagctcatcctgagtctcgagccggatgaggaccccctctgcatgctgctgctcatcgaccacctggccttgcgggcccggaactacgagtacctgatccgcctcttccaggagtgggaggctcatcggaacctgtcccagctccctaattttgccttctctgttccactggcgtatttcctgctgagccagcagacagacctccctgagtgtgagcagagctctgccaggcagaaggcctctctcctgatacagcaggcgctcaccatgttccctggagtcctcctgcccctgctcgagtcttgcagtgtgcggcccgacgccagcgtttccagtcaccgcttctttggacccaatgctgaaataagccagccccctgccctgagccagctggtgaacctgtaccttgggaggtcacactttctctggaaagagcccgccaccatgagctggctggaggagaacgtccacgaggttctgcaagcagtggacgccggggacccagccgtggaagcctgtgagaaccggcggaaggtgctctaccagcgtgcacccaggaatatccaccgccatgtgatcctctctgagatcaaggaagccgtcgctgccctgcccccggtaagggagaaaggctgaaatgggagctctgtgtaagccggtcacatgcacgtcccttctgctccgggcggtccacatgcaggcgtgcgtggtgcgggctccctcagcagcccagccccgccacggcaggggcagggtctagtgcagagggctcctcctttcctggcagcccgggttcggatgcttgttgttttgagagagaaatcctttggggctcagagcacaagctgagtcgtcaccgtggtgagctgctccatccgtggtcttgtgagcgcgtggtgcggctgctgggggattctctgtagtcgtggggtgtagtcctgctctgacgcctcctgtgctggaggtgccgtttctgtctcaaaacctaaggagtttgtactgttgttaagggataagatagaacgagtgagaaaaccagcaagtcagagggtcgcaggaccgtggaccgtccactggggacagcttagtgcctcctggtttaacttcagctgctctgcgggcccttatgaccggcatggctggctttgtctggggctgtgagcttctgactctcctcagtagagtggcagcacgtggcactgtgcaacccgagggcagctcagggtccctgtagcctgcatttgctgaagtgggagcttctgacacgtggtgaagatgttggcaggcttgagcggcacgtgacccccttccttccccaccacacactctggtgtgcagggcagacgccgtgcaggttcatctcgactcccgtgagtgtcctggtggcagaaggactgtcccaccctcacccaaagctcgttggtacaaaaagcacagccgtttctgtcagactctgtggctatctctcagcagatgcatccagtccatgctggagtcgacagaaggactctgctgggagaggtagaggccccctggcagcatctgtagcatcttcgttttatgtccctttctgaaggacgtgaccacgcagtctgtgatggggtttgatcctctgcctccttcggacacaatctactcctacgtcaggccagagaggctaagtcctatcagccatggaaacaccattgctctcttcttccggtcactgttgccaaactataccatggagggggagaggcccgaggaaggagtggctgggggtctgaaccgcaaccagggcctgaacaggctgatgctggctgtgcgcgacatgatggccaacttccacctcaacgacctggaggcgccgcacgaggacgacgctgagggggagggggagtgggactgagcgtccgcagaggtgaccgaaaagccgtatgatgatgttcccgatttctctgttggtcggagtcggccagttgcctgaagtagggaagctgagtgtgtcgctccctggtccactgtttctcctataaatgtaaatgggtcacgc

SEQ ID NO: 93198 - DNA, 2399 bp, Homo sapiens
cgaagagtgcgcaggcgcgccgacagccgagttttctgcgcttccttctccctctctccagacgtcgtggtcgttcggtcctatgtcgcgccgggccctccggaggctgaggggggaacagcgcggccaggagcccctcgggcccggcgccttgcatttcgatctccgtgatgacgatgacgcggaagaagaagggcccaagcgggagcttggtgtccggcgtcccgggggcgcagggaaggagggcgtccgagtcaacaaccgcttcgagctgataaacattgacgatcttgaggatgaccctgtggtgaacggggagaggtctggctgtgcgctcacagacgctgtggcaccagggaacaaaggaaggggtcagcgtggaaacacagagagcaagacggatggagatgacaccgagacagtgccctcagagcagtctcatgcaagtggcaaactccggaagaagaaaaaaaaacagaaaaacaagaaaagcagcacgggagaagcatcggaaaacggactagaagatatcgatcgcatcctagagaggattgaggacagcactgggttgaaccgtcccggcccagctcccctgagctccaggaagcacgttctctacgtggagcacagacacttgaatccagacacagaactgaaaaggtattttggtgcccgggcaatcctgggggagcaaaggccacggcagagacaacgtgtgtaccccaagtgcacatggctgaccacccctaaaagcacctggccccgctacagcaaaccaggtctgtccatgcggctgctggaatcaaaaaaaggcctctccttctttgcgtttgagcacagtgaggagtaccagcaggctcagcacaagttcctggtggccgtggagtctatggagccgaacaacatcgtggttctgctccagacgagcccttaccacgttgactcactcctgcagctcagcgatgcctgccgctttcaagaggatcaggagatggctcgagacctcgtagagagagcgctgtacagcatggaatgtgcgttccaccccctgttcagtctcaccagtggggcctgccggctggattaccgcagacccgagaacaggagcttctacctggccctctacaagcagatgagcttcctggagaagcgaggctgcccgcgcacggcgctggagtactgcaagctcatcctgagtctcgagccggatgaggaccccctctgcatgctgctgctcatcgaccacctggccttgcgggcccggaactacgagtacctgatccgcctcttccaggagtgggaggctcatcggaacctgtcccagctccctaattttgccttctctgttccactggcgtatttcctgctgagccagcagacagacctccctgagtgtgagcagagctctgccaggcagaaggcctctctcctgatacagcaggcgctcaccatgttccctggagtcctcctgcccctgctcgagtcttgcagtgtgcggcccgacgccagcgtttccagtcaccgcttctttggacccaatgctgaaataagccagccccctgccctgagccagctggtgaacctgtaccttgggaggtcacactttctctggaaagagcccgccaccatgagctggctggaggagaacgtccacgaggttctgcaagcagtggacgccggggacccagccgtggaagcctgtgagaaccggcggaaggtgctctaccagcgtgcacccaggaatatccaccgccatgtgatcctctctgagatcaaggaagccgtcgctgccctgcccccggacgtgaccacgcagtctgtgatggggtttgatcctctgcctccttcggacacaatctactcctacgtcaggccagagaggaagggagaggaggagaggaacagtgttatttgggggtcacagctctgcgtttgcaggccacgttctttcccatctccaccgaatgtacaagcgcttgcgtgtcggcctctgtggcaggtgcgagtgacacagtggaagcaggctaagtcctatcagccatggaaacaccattgctctcttcttccggtcactgttgccaaactataccatggagggggagaggcccgaggaaggagtggctgggggtctgaaccgcaaccagggcctgaacaggctgatgctggctgtgcgcgacatgatggccaacttccacctcaacgacctggaggcgccgcacgaggacgacgctgagggggagggggagtgggactgagcgtccgcagaggtgaccgaaaagccgtatgatgatgttcccgatttctctgttggtcggagtcggccagttgcctgaagtagggaagctgagtgtgtcgctccctggtccactgtttctcctataaatgtaaatgggtcacgc

SEQ ID NO: 93199 - DNA, 2212 bp, Homo sapiens
cgaagagtgcgcaggcgcgccgacagccgagttttctgcgcttccttctccctctctccagacgtcgtggtcgttcggtcctatgtcgcgccgggccctccggaggctgaggggggaacagcgcggccaggagcccctcgggcccggcgccttgcatttcgatctccgtgatgacgatgacgcggaagaagaagggcccaagcgggagcttggtgtccggcgtcccgggggcgcagggaaggagggcgtccgagtcaacaaccgcttcgagctgataaacattgacgatcttgaggatgaccctgtggtgaacggggagaggtctggctgtgcgctcacagacgctgtggcaccagggaacaaaggaaggggtcagcgtggaaacacagagagcaagacggatggagatgacaccgagacagtgccctcagagcagtctcatgcaagtggcaaactccggaagaagaaaaaaaaacagaaaaacaagaaaagcagcacgggagaagcatcggaaaacggactagaagatatcgatcgcatcctagagaggattgaggacagcactgggttgaaccgtcccggcccagctcccctgagctccaggaagcacgttctctacgtggagcacagacacttgaatccagacacagaactgaaaaggtattttggtgcccgggcaatcctgggggagcaaaggccacggcagagacaacgtgtgtaccccaagtgcacatggctgaccacccctaaaagcacctggccccgctacagcaaaccaggtctgtccatgcggctgctggaatcaaaaaaaggcctctccttctttgcgtttgagcacagtgaggagtaccagcaggctcagcacaagttcctggtggccgtggagtctatggagccgaacaacatcgtgctcagcgatgcctgccgctttcaagaggatcaggagatggctcgagacctcgtagagagagcgctgtacagcatggaatgtgcgttccaccccctgttcagtctcaccagtggggcctgccggctggattaccgcagacccgagaacaggagcttctacctggccctctacaagcagatgagcttcctggagaagcgaggctgcccgcgcacggcgctggagtactgcaagctcatcctgagtctcgagccggatgaggaccccctctgcatgctgctgctcatcgaccacctggccttgcgggcccggaactacgagtacctgatccgcctcttccaggagtgggaggctcatcggaacctgtcccagctccctaattttgccttctctgttccactggcgtatttcctgctgagccagcagacagacctccctgagtgtgagcagagctctgccaggcagaaggcctctctcctgatacagcaggcgctcaccatgttccctggagtcctcctgcccctgctcgagtcttgcagtgtgcggcccgacgccagcgtttccagtcaccgcttctttggacccaatgctgaaataagccagccccctgccctgagccagctggtgaacctgtaccttgggaggtcacactttctctggaaagagcccgccaccatgagctggctggaggagaacgtccacgaggttctgcaagcagtggacgccggggacccagccgtggaagcctgtgagaaccggcggaaggtgctctaccagcgtgcacccaggaatatccaccgccatgtgatcctctctgagatcaaggaagccgtcgctgccctgcccccggacgtgaccacgcagtctgtgatggggtttgatcctctgcctccttcggacacaatctactcctacgtcaggccagagaggctaagtcctatcagccatggaaacaccattgctctcttcttccggtcactgttgccaaactataccatggagggggagaggcccgaggaaggagtggctgggggtctgaaccgcaaccagggcctgaacaggctgatgctggctgtgcgcgacatgatggccaacttccacctcaacgacctggaggcgccgcacgaggacgacgctgagggggagggggagtgggactgagcgtccgcagaggtgaccgaaaagccgtatgatgatgttcccgatttctctgttggtcggagtcggccagttgcctgaagtagggaagctgagtgtgtcgctccctggtccactgtttctcctataaatgtaaatgggtcacgc

SEQ ID NO: 93200 - DNA, 2466 bp, Homo sapiens
cgaagagtgcgcaggcgcgccgacagccgagttttctgcgcttccttctccctctctccagacgtcgtggtcgttcggtcctatgtcgcgccgggccctccggaggctgaggggggaacagcgcggccaggagcccctcgggcccggcgccttgcatttcgatctccgtgatgacgatgacgcggaagaagaagggcccaagcgggagcttggtgtccggcgtcccgggggcgcagggaaggagggcgtccgagtcaacaaccgcttcgagctgataaacattgacgatcttgaggatgaccctgtggtgaacggggagaggtctggctgtgcgctcacagacgctgtggcaccagggaacaaaggaaggggtcagcgtggaaacacagagagcaagacggatggagatgacaccgagacagtgccctcagagcagtctcatgcaagtggcaaactccggaagaagaaaaaaaaacagaaaaacaagaaaagcagcacgggagaagcatcggaaaacggactagaagatatcgatcgcatcctagagaggattgaggacagcactgggttgaaccgtcccggcccagctcccctgagctccaggaagcacgttctctacgtggagcacagacacttgaatccagacacagaactgaaaaggtattttggtgcccgggcaatcctgggggagcaaaggccacggcagagacaacgtgtgtaccccaagtgcacatggctgaccacccctaaaagcacctggccccgctacagcaaaccaggtctgtccatgcggctgctggaatcaaaaaaaggcctctccttctttgcgtttgagcacagtgaggagtaccagcaggctcagcacaagttcctggtggccgtggagtctatggagccgaacaacatcgtggttctgctccagacgagcccttaccacgttgactcactcctgcagctcagcgatgcctgccgctttcaagaggatcaggagatggctcgagacctcgtagagagagcgctgtacagcatggaatgtgcgttccaccccctgttcagtctcaccagtggggcctgccggctggattaccgcagacccgagaacaggagcttctacctggccctctacaagcagatgagcttcctggagaagcgaggctgcccgcgcacggcgctggagtactgcaagctcatcctgagtctcgagccggatgaggaccccctctgcatgctgctgctcatcgaccacctggccttgcgggcccggaactacgagtacctgatccgcctcttccaggagtgggaggctcatcggaacctgtcccagctccctaattttgccttctctgttccactggcgtatttcctgctgagccagcagacagacctccctgagtgtgagcagagctctgccaggcagaaggcctctctcctgatacagcaggcgctcaccatgttccctggagtcctcctgcccctgctcgagtcttgcagtgtgcggcccgacgccagcgtttccagtcaccgcttctttggacccaatgctgaaataagccagccccctgccctgagccagctggtgaacctgtaccttgggaggtcacactttctctggaaagagcccgccaccatgagctggctggaggagaacgtccacgaggttctgcaagcagtggacgccggggacccagccgtggaagcctgtgagaaccggcggaaggtgctctaccagcgtgcacccaggaatatccaccgccatgtgatcctctctgagatcaaggaagccgtcgctgccctgcccccggacgtgaccacgcagtctgtgatggggtttgatcctctgcctccttcggacacaatctactcctacgtcaggccagagaggctaagtcctatcagccatggaaacaccattgctctcttcttccggtcactgttgccaaactataccatggagggggagaggcccgaggaaggagtggctgggggtctgaaccgcaaccagggcctgaacaggctgatgctggctgtgcgcgacatgatggccaacttccacctcaacgacctggaggcgccgcacgaggacgacgctgagggggagggggagtgggactgagcgtccgcagaggtgaccgaaaagccgtatgatgatgttcccgatttctctgttggtcggagtcggccagttgcctgaagtagggaagctgagtgtgtcgctccctggtccactgttctttggctgattatcatttgtatcttttagctgtaaaaaacatttgtacatatagtgctttccggatgtgttagtcagggaaggctctattacagtatactaaaccatagaaatgtatttttcacagttctggaggctagaagtctgggacagggtgccagcatggttggagtctcgcgtgggagccccattctggcttgcaggtagccagcgtctccttgtgtcctctgcagggc

SEQ ID NO: 93201 - DNA, 2075 bp, Homo sapiens
ttgcaagctcggacccgtatcattttcttggtgtccggcgtcccgggggcgcagggaaggagggcgtccgagtcaacaaccgcttcgagctgataaacattgacgatcttgaggatgaccctgtggtgaacggggagaggtctggctgtgcgctcacagacgctgtggcaccagggaacaaaggaaggggtcagcgtggaaacacagagagcaagacggatggagatgacaccgagacagtgccctcagagcagtctcatgcaagtggcaaactccggaagaagaaaaaaaaacagaaaaacaagaaaagcagcacgggagaagcatcggaaaacggactagaagatatcgatcgcatcctagagaggattgaggacagcactgggttgaaccgtcccggcccagctcccctgagctccaggaagcacgttctctacgtggagcacagacacttgaatccagacacagaactgaaaaggtattttggtgcccgggcaatcctgggggagcaaaggccacggcagagacaacgtgtgtaccccaagtgcacatggctgaccacccctaaaagcacctggccccgctacagcaaaccaggtctgtccatgcggctgctggaatcaaaaaaaggcctctccttctttgcgtttgagcacagtgaggagtaccagcaggctcagcacaagttcctggtggccgtggagtctatggagccgaacaacatcgtggttctgctccagacgagcccttaccacgttgactcactcctgcagctcagcgatgcctgccgctttcaagaggatcaggagatggctcgagacctcgtagagagagcgctgtacagcatggaatgtgcgttccaccccctgttcagtctcaccagtggggcctgccggctggattaccgcagacccgagaacaggagcttctacctggccctctacaagcagatgagcttcctggagaagcgaggctgcccgcgcacggcgctggagtactgcaagctcatcctgagtctcgagccggatgaggaccccctctgcatgctgctgctcatcgaccacctggccttgcgggcccggaactacgagtacctgatccgcctcttccaggagtgggaggctcatcggaacctgtcccagctccctaattttgccttctctgttccactggcgtatttcctgctgagccagcagacagacctccctgagtgtgagcagagctctgccaggcagaaggcctctctcctgatacagcaggcgctcaccatgttccctggagtcctcctgcccctgctcgagtcttgcagtgtgcggcccgacgccagcgtttccagtcaccgcttctttggacccaatgctgaaataagccagccccctgccctgagccagctggtgaacctgtaccttgggaggtcacactttctctggaaagagcccgccaccatgagctggctggaggagaacgtccacgaggttctgcaagcagtggacgccggggacccagccgtggaagcctgtgagaaccggcggaaggtgctctaccagcgtgcacccaggaatatccaccgccatgtgatcctctctgagatcaaggaagccgtcgctgccctgcccccggacgtgaccacgcagtctgtgatggggtttgatcctctgcctccttcggacacaatctactcctacgtcaggccagagaggctaagtcctatcagccatggaaacaccattgctctcttcttccggtcactgttgccaaactataccatggagggggagaggcccgaggaaggagtggctgggggtctgaaccgcaaccagggcctgaacaggctgatgctggctgtgcgcgacatgatggccaacttccacctcaacgacctggaggcgccgcacgaggacgacgctgagggggagggggagtgggactgagcgtccgcagaggtgaccgaaaagccgtatgatgatgttcccgatttctctgttggtcggagtcggccagttgcctgaagtagggaagctgagtgtgtcgctccctggtccactgtttctcctataaatgtaaatgggtcacgc

SEQ ID NO: 93202 - DNA, 2439 bp, Homo sapiens
gcataggctaggtagcgaggccgcgtgtgaatcggccgaggccgagttttctgcgcttccttctccctctctccagacgtcgtggtcgttcggtcctatgtcgcgccgggccctccggaggctgaggggggaacagcgcggccaggagcccctcgggcccggcgccttgcatttcgatctccgtgatgacgatgacgcggaagaagaagggcccaagcgggagcttggtgtccggcgtcccgggggcgcagggaaggagggcgtccgagtcaacaaccgcttcgagctggaaaaatggacattttcctctccccctaaaaaaagataaaactccttcctggttattaactgaaatgctgatcgagctttatcctaaagaagatcagtcgtggacaagaaccttgtgaaatgttccccatttgagaccctaaaactaatgaaaatcacagcttttggataaacattgacgatcttgaggatgaccctgtggtgaacggggagaggtctggctgtgcgctcacagacgctgtggcaccagggaacaaaggaaggggtcagcgtggaaacacagagagcaagacggatggagatgacaccgagacagtgccctcagagcagtctcatgcaagtggcaaactccggaagaagaaaaaaaaacagaaaaacaagaaaagcagcacgggagaagcatcggaaaacggactagaagatatcgatcgcatcctagagaggattgaggacagcactgggttgaaccgtcccggcccagctcccctgagctccaggaagcacgttctctacgtggagcacagacacttgaatccagacacagaactgaaaaggtattttggtgcccgggcaatcctgggggagcaaaggccacggcagagacaacgtgtgtaccccaagtgcacatggctgaccacccctaaaagcacctggccccgctacagcaaaccaggtctgtccatgcggctgctggaatcaaaaaaaggcctctccttctttgcgtttgagcacagtgaggagtaccagcaggctcagcacaagttcctggtggccgtggagtctatggagccgaacaacatcgtggttctgctccagacgagcccttaccacgttgactcactcctgcagctcagcgatgcctgccgctttcaagaggatcaggagatggctcgagacctcgtagagagagcgctgtacagcatggaatgtgcgttccaccccctgttcagtctcaccagtggggcctgccggctggattaccgcagacccgagaacaggagcttctacctggccctctacaagcagatgagcttcctggagaagcgaggctgcccgcgcacggcgctggagtactgcaagctcatcctgagtctcgagccggatgaggaccccctctgcatgctgctgctcatcgaccacctggccttgcgggcccggaactacgagtacctgatccgcctcttccaggagtgggaggctcatcggaacctgtcccagctccctaattttgccttctctgttccactggcgtatttcctgctgagccagcagacagacctccctgagtgtgagcagagctctgccaggcagaaggcctctctcctgatacagcaggcgctcaccatgttccctggagtcctcctgcccctgctcgagtcttgcagtgtgcggcccgacgccagcgtttccagtcaccgcttctttggacccaatgctgaaataagccagccccctgccctgagccagctggtgaacctgtaccttgggaggtcacactttctctggaaagagcccgccaccatgagctggctggaggagaacgtccacgaggttctgcaagcagtggacgccggggacccagccgtggaagcctgtgagaaccggcggaaggtgctctaccagcgtgcacccaggaatatccaccgccatgtgatcctctctgagatcaaggaagccgtcgctgccctgcccccggacgtgaccacgcagtctgtgatggggtttgatcctctgcctccttcggacacaatctactcctacgtcaggccagagaggctaagtcctatcagccatggaaacaccattgctctcttcttccggtcactgttgccaaactataccatggagggggagaggcccgaggaaggagtggctgggggtctgaaccgcaaccagggcctgaacaggctgatgctggctgtgcgcgacatgatggccaacttccacctcaacgacctggaggcgccgcacgaggacgacgctgagggggagggggagtgggactgagcgtccgcagaggtgaccgaaaagccgtatgatgatgttcccgatttctctgttggtcggagtcggccagttgcctgaagtagggaagctgagtgtgtcgctccctggtccactgtttctcctataaatgtaaatgggtcacgc

SEQ ID NO: 93203 - DNA, 2119 bp, Homo sapiens
ggcacgaggctcacagacgctggtgggcaccagggaacaaaggaaggggagaggtctggctgtgcgctcacagacgctgtggcaccagggaacaaaggaaggggtcagcgtccgagtcaacaaccgcttcgagctgataaacattgacgatcttgaggatgaccctgtggtgaacggggagaggtctggctgtgcgctcacagacgctgtggcaccagggaacaaaggaaggggtcagcgtggaaacacagagagcaagacggatggagatgacaccgagacagtgccctcagagcagtctcatgcaagtggcaaactccggaagaagaaaaaaaaacagaaaaacaagaaaagcagcacgggagaagcatcggaaaacggactagaagatatcgatcgcatcctagagaggattgaggacagcactgggttgaaccgtcccggcccagctcccctgagctccaggaagcacgttctctacgtggagcacagacacttgaatccagacacagaactgaaaaggtattttggtgcccgggcaatcctgggggagcaaaggccacggcagagacaacgtgtgtaccccaagtgcacatggctgaccacccctaaaagcacctggccccgctacagcaaaccaggtctgtccatgcggctgctggaatcaaaaaaaggcctctccttctttgcgtttgagcacagtgaggagtaccagcaggctcagcacaagttcctggtggccgtggagtctatggagccgaacaacatcgtggttctgctccagacgagcccttaccacgttgactcactcctgcagctcagcgatgcctgccgctttcaagaggatcaggagatggctcgagacctcgtagagagagcgctgtacagcatggaatgtgcgttccaccccctgttcagtctcaccagtggggcctgccggctggattaccgcagacccgagaacaggagcttctacctggccctctacaagcagatgagcttcctggagaagcgaggctgcccgcgcacggcgctggagtactgcaagctcatcctgagtctcgagccggatgaggaccccctctgcatgctgctgctcatcgaccacctggccttgcgggcccggaactacgagtacctgatccgcctcttccaggagtgggaggctcatcggaacctgtcccagctccctaattttgccttctctgttccactggcgtatttcctgctgagccagcagacagacctccctgagtgtgagcagagctctgccaggcagaaggcctctctcctgatacagcaggcgctcaccatgttccctggagtcctcctgcccctgctcgagtcttgcagtgtgcggcccgacgccagcgtttccagtcaccgcttctttggacccaatgctgaaataagccagccccctgccctgagccagctggtgaacctgtaccttgggaggtcacactttctctggaaagagcccgccaccatgagctggctggaggagaacgtccacgaggttctgcaagcagtggacgccggggacccagccgtggaagcctgtgagaaccggcggaaggtgctctaccagcgtgcacccaggaatatccaccgccatgtgatcctctctgagatcaaggaagccgtcgctgccctgcccccggacgtgaccacgcagtctgtgatggggtttgatcctctgcctccttcggacacaatctactcctacgtcaggccagagaggctaagtcctatcagccatggaaacaccattgctctcttcttccggtcactgttgccaaactataccatggagggggagaggcccgaggaaggagtggctgggggtctgaaccgcaaccagggcctgaacaggctgatgctggctgtgcgcgacatgatggccaacttccacctcaacgacctggaggcgccgcacgaggacgacgctgagggggagggggagtgggactgagcgtccgcagaggtgaccgaaaagccgtatgatgatgttcccgatttctctgttggtcggagtcggccagttgcctgaagtagggaagctgagtgtgtcgctccctggtccactgtttctcctataaatgtaaatgggtcacgc

SEQ ID NO: 93204 - DNA, 2238 bp, Homo sapiens
cgaagagtgcgcaggcgcgccgacagccgagttttctgcgcttccttctccctctctccagacgtcgtggtcgttcggtcctatgtcgcgccgggccctccggaggctgaggggggaacagcgcggccaggagcccctcgggcccggcgccttgcatttcgatctccgtgatgacgatgacgcggaagaagaagggcccaagcgggagcttggtgtccggcgtcccgggggcgcagggaaggagggcgtccgagtcaacaaccgcttcgagctgataaacattgacgatcttgaggatgaccctgtggtgaacggggagaggtctggctgtgcgctcacagacgctgtggcaccagggaacaaaggaaggggtcagcgtggaaacacagagagcaagacggatggagatgacaccgagacagtgccctcagagcagtctcatgcaagtggcaaactccggaagaagaaaaaaaaacagaaaaacaagaaaagcagcacgggagaagcatcggaaaacggactagaagatatcgatcgcatcctagagaggattgaggacagcactgggttgaaccgtcccggcccagctcccctgagctccaggaagcacgttctctacgtggagcacagacacttgaatccagacacagaactgaaaaggtattttggtgcccgggcaatcctgggggagcaaaggccacggcagagacaacgtgtgtaccccaagtgcacatggctgaccacccctaaaagcacctggccccgctacagcaaaccaggtctgtccatgcggctgctggaatcaaaaaaaggcctctccttctttgcgtttgagcacagtgaggagtaccagcaggctcagcacaagttcctggtggccgtggagtctatggagccgaacaacatcgtggttctgctccagacgagcccttaccacgttgactcactcctgcagctcagcgatgcctgccgctttcaagaggatcaggagatggctcgagacctcgtagagagagcgctgtacagcatggaatgtgcgttccaccccctgttcagtctcaccagtggggcctgccggctggattaccgcagacccgagaacaggagcttctacctggccctctacaagcagatgagcttcctggagaagcgaggctgcccgcgcacggcgctggagtactgcaagctcatcctgagtctcgagccggatgaggaccccctctgcatgctgctgctcatcgaccacctggccttgcgggcccggaactacgagtacctgatccgcctcttccaggagtgggaggctcatcggaacctgtcccagctccctaattttgccttctctgttccactggcgtatttcctgctgagccagcagacagacctccctgagtgtgagcagagctctgccaggcagaaggcctctctcctgatacagcaggcgctcaccatgttccctggagtcctcctgcccctgctcgagtcttgcagtgtgcggcccgacgccagcgtttccagtcaccgcttctttggacccaatgctgaaataagccagccccctgccctgagccagctggtgaacctgtaccttgggaggtcacactttctctggaaagagcccgccaccatgagctggctggaggagaacgtccacgaggttctgcaagcagtggacgccggggacccagccgtggaagcctgtgagaaccggcggaaggtgctctaccagcgtgcacccaggaatatccaccgccatgtgatcctctctgagatcaaggaagccgtcgctgccctgcccccggacgtgaccacgcagtctgtgatggggtttgatcctctgcctccttcggacacaatctactcctacgtcaggccagagaggctaagtcctatcagccatggaaacaccattgctctcttcttccggtcactgttgccaaactataccatggagggggagaggcccgaggaaggagtggctgggggtctgaaccgcaaccagggcctgaacaggctgatgctggctgtgcgcgacatgatggccaacttccacctcaacgaccgcttcgagctgataaacattgacgatcttgaggatgaccctgtggtgaacggggagaggtctggctgtgcgctcacagacgctgtggcaccagggaacaaaggaacggggtcagcgtggcaacacagagagcaagacggatggagatgacatccgagactagtgccctcaggccg

SEQ ID NO: 93205 - DNA, 2637 bp, Homo sapiens
  misc_feature (2593)..(2593): n is a, c, g, or t
  misc_feature (2603)..(2603): n is a, c, g, or t
cgaagagtgcgcaggcgcgccgacagccgagttttctgcgcttccttctccctctctccagacgtcgtggtcgttcggtcctatgtcgcgccgggccctccggaggctgaggggggaacagcgcggccaggagcccctcgggcccggcgccttgcatttcgatctccgtgatgacgatgacgcggaagaagaagggcccaagcgggagcttggtgtccggcgtcccgggggcgcagggaaggagggcgtccgagtcaacaaccgcttcgagctgataaacattgacgatcttgaggatgaccctgtggtgaacggggagaggtctggctgtgcgctcacagacgctgtggcaccagggaacaaaggaaggggtcagcgtggaaacacagagagcaagacggatggagatgacaccgagacagtgccctcagagcagtctcatgcaagtggcaaactccggaagaagaaaaaaaaacagaaaaacaagaaaagcagcacgggagaagcatcggaaaacggactagaagatatcgatcgcatcctagagaggattgaggacagcactgggttgaaccgtcccggcccagctcccctgagctccaggaagcacgttctctacgtggagcacagacacttgaatccagacacagaactgaaaaggtattttggtgcccgggcaatcctgggggagcaaaggccacggcagagacaacgtgtgtaccccaagtgcacatggctgaccacccctaaaagcacctggccccgctacagcaaaccaggtctgtccatgcggctgctggaatcaaaaaaaggcctctccttctttgcgtttgagcacagtgaggagtaccagcaggctcagcacaagttcctggtggccgtggagtctatggagccgaacaacatcgtggttctgctccagacgagcccttaccacgttgactcactcctgcagctcagcgatgcctgccgctttcaagaggatcaggagatggctcgagacctcgtagagagagcgctgtacagcatggaatgtgcgttccaccccctgttcagtctcaccagtggggcctgccggctggattaccgcagacccgagaacaggagcttctacctggccctctacaagcagatgagcttcctggagaagcgaggctgcccgcgcacggcgctggagtactgcaagctcatcctgagtctcgagccggatgaggaccccctctgcatgctgctgctcatcgaccacctggccttgcgggcccggaactacgagtacctgatccgcctcttccaggagtgggaggctcatcggaacctgtcccagctccctaattttgccttctctgttccactggcgtatttcctgctgagccagcagacagacctccctgagtgtgagcagagctctgccaggcagaaggcctctctcctgatacagcaggcgctcaccatgttccctggagtcctcctgcccctgctcgagtcttgcagtgtgcggcccgacgccagcgtttccagtcaccgcttctttggacccaatgctgaaataagccagccccctgccctgagccagctggtgaacctgtaccttgggaggtcacactttctctggaaagagcccgccaccatgagctggctggaggagaacgtccacgaggttctgcaagcagtggacgccggggacccagccgtggaagcctgtgagaaccggcggaaggtgctctaccagcgtgcacccaggaatatccaccgccatgtgatcctctctgagatcaaggaagccgtcgctgccctgcccccggacgtgaccacgcagtctgtgatggggtttgatcctctgcctccttcggacacaatctactcctacgtcaggccagagaggaagggagaggaggagaggaacagtgttatttgggggtcacagctctgcgtttgcaggccacgttctttcccatctccaccgaatgtacaagcgcttgcgtgtcggcctctgtggcaggtgcgagtgacacagtggaagcaggtgtgcagtgaagtggggaaaacatattaattttagaatgtagaaataaacataaaatcaaaactgcaccagcctggccaacatggcaaaccccgtctcaactaaaaatacaaaacttagccagctgggtgcagtgactcacgcctgtaattccagcagtttgagaggccaaggtgggcaaatcacaaggtcaagagattgagaccagcctggccaacgtgctgaaaacccgtctctactaaaatacaaaaaaattagctgggcgtggtgccgcacacctgtagtcccagctacttgggaggctgaggcaggaaaattgtttgaacccgggaggcacaggttgcagtgagtggagatcgtgccactgcactccatcctggcgacagaggaagactccgtctcaaaaaaaaaaaaaaaaaaaaaaagacgggcctcctccgaggggctgtgaggggtgagggtgaaatccctccttaagacgggcctcctccgaggggctgtgaggggtgagggtgaaatccctccttaagatgggcctcctccgaggggctgtgaggggtgagggtgaantccctccttnaagacgggcctccggccgggtcgcggtggttcaa

SEQ ID NO: 93206 - DNA, 2026 bp, Homo sapiens
  misc_feature (1895)..(1895): n is a, c, g, or t
  misc_feature (1898)..(1898): n is a, c, g, or t
  misc_feature (1907)..(1907): n is a, c, g, or t
  misc_feature (1909)..(1909): n is a, c, g, or t
  misc_feature (1914)..(1914): n is a, c, g, or t
  misc_feature (1925)..(1925): n is a, c, g, or t
  misc_feature (1959)..(1959): n is a, c, g, or t
  misc_feature (1984)..(1984): n is a, c, g, or t
cgaagagtgcgcaggcgcgccgacagccgagttttctgcgcttccttctccctctctccagacgtcgtggtcgttcggtcctatgtcgcgccgggccctccggaggctgaggggggaacagcgcggccaggagcccctcgggcccggcgccttgcatttcgatctccgtgatgacgatgacgcggaagaagaagggcccaagcgggagcttggtgtccggcgtcccgggggcgcagggaaggagggcgtccgagtcaacaaccgcttcgagctgataaacattgacgatcttgaggatgaccctgtggtgaacggggagaggtctggctgtgcgctcacagacgctgtggcaccagggaacaaaggaaggggtcagcgtggaaacacagagagcaagacggatggagatgacaccgagacagtgccctcagagcagtctcatgcaagtggcaaactccggaagaagaaaaaaaaacagaaaaacaagaaaagcagcacgggagaagcatcggaaaacggactagaagatatcgatcgcatcctagagaggattgaggacagcactgggttgaaccgtcccggcccagctcccctgagctccaggaagcacgttctctacgtggagcacagacacttgaatccagacacagaactgaaaaggtattttggtgcccgggcaatcctgggggagcaaaggccacggcagagacaacgtgtgtaccccaagtgcacatggctgaccacccctaaaagcacctggccccgctacagcaaaccaggtctgtccatgcggctgctggaatcaaaaaaaggcctctccttctttgcgtttgagcacagtgaggagtaccagcaggctcagcacaagttcctggtggccgtggagtctatggagccgaacaacatcgtggttctgctccagacgagcccttaccacgttgactcactcctgcagctcagcgatgcctgccgctttcaagaggatcaggagatggctcgagacctcgtagagagagcgctgtacagcatggaatgtgcgttccaccccctgttcagtctcaccagtggggcctgccggctggattaccgcagacccgagaacaggagcttctacctggccctctacaagcagatgagcttcctggagaagcgaggctgcccgcgcacggcgctggagtactgcaagctcatcctgagtctcgagccggatgaggaccccctctgcatgctgctgctcatcgaccacctggccttgcgggcccggaactacgagtacctgatccgcctcttccaggagtgggaggctcatcggaacctgtcccagctccctaattttgccttctctgttccactggcgtatttcctgctgagccagcagacagacctccctgagtgtgagcagagctctgccaggcagaaggcctctctcctgatacagcaggcgctcaccatgttccctggagtcctcctgcccctgctcgagtcttgcagtgtgcggcccgacgccagcgtttccagtcaccgcttctttggacccaatgctgaaataagccagccccctgccctgagccagctggtgaacctgtaccttgggaggtcacactttctctggaaagagcccgccaccatgagctggctggaggagaacgtccacgaggttctgcaagcagtggacgccggggacccagccgtggaagcctgtgagaaccggcggaaggtgctctaccagcgtgcacccaggaatatccaccgccatgtgatcctctctgagatcaaggaagccgtcgctgccctgcccccggacgtgaccacgcagtctgtgatggggtttgatcctctgcctccttcggacacaatctactcctacgtcaggccagagagaaccaaaaaacaancgngccgcacangnagcgnaacaatattanttgaggggtcaaaaatatgaagattaaaaggacnaagagaaatatataaaaatatccangagagaaaaaaaaagaagccttgccatgatcggacctgctgg

SEQ ID NO: 93207 - DNA, 2880 bp, Homo sapiens
cgaagagtgcgcaggcgcgccgacagccgagttttctgcgcttccttctccctctctccagacgtcgtggtcgttcggtcctatgtcgcgccgggccctccggaggctgaggggggaacagcgcggccaggagcccctcgggcccggcgccttgcatttcgatctccgtgatgacgatgacgcggaagaagaagggcccaagcgggagcttggtgtccggcgtcccgggggcgcagggaaggagggcgtccgagtcaacaaccgcttcgagctgataaacattgacgatcttgaggatgaccctgtggtgaacggggagaggtctggctgtgcgctcacagacgctgtggcaccagggaacaaaggaaggggtcagcgtggaaacacagagagcaagacggatggagatgacaccgagacagtgccctcagagcagtctcatgcaagtggcaaactccggaagaagaaaaaaaaacagaaaaacaagaaaagcagcacgggagaagcatcggaaaacggactagaagatatcgatcgcatcctagagaggattgaggacagcactgggttgaaccgtcccggcccagctcccctgagctccaggaagcacgttctctacgtggagcacagacacttgaatccagacacagaactgaaaaggtattttggtgcccgggcaatcctgggggagcaaaggccacggcagagacaacgtgtgtaccccaagtgcacatggctgaccacccctaaaagcacctggccccgctacagcaaaccaggtctgtccatgcggctgctggaatcaaaaaaaggcctctccttctttgcgtttgagcacagtgaggagtaccagcaggctcagcacaagttcctggtggccgtggagtctatggagccgaacaacatcgtggttctgctccagacgagcccttaccacgttgactcactcctgcagctcagcgatgcctgccgctttcaagaggatcaggagatggctcgagacctcgtagagagagcgctgtacagcatggaatgtgcgttccaccccctgttcagtctcaccagtggggcctgccggctggattaccgcagacccgagaacaggagcttctacctggccctctacaagcagatgagcttcctggagaagcgaggctgcccgcgcacggcgctggagtactgcaagctcatcctgagtctcgagccggatgaggaccccctctgcatgctgctgctcatcgaccacctggccttgcgggcccggaactacgagtacctgatccgcctcttccaggagtgggaggctcatcggaacctgtcccagctccctaattttgccttctctgttccactggcgtatttcctgctgagccagcagacagacctccctgagtgtgagcagagctctgccaggcagaaggcctctctcctgatacagcaggcgctcaccatgttccctggagtcctcctgcccctgctcgagtcttgcagtgtgcggcccgacgccagcgtttccagtcaccgcttctttggacccaatgctgaaataagccagccccctgccctgagccagctggtgaacctgtaccttgggaggtcacactttctctggaaagagcccgccaccatgagctggctggaggagaacgtccacgaggttctgcaagcagtggacgccggggacccagccgtggaagcctgtgagaaccggcggaaggtgctctaccagcgtgcacccaggaatatccaccgccatgtgatcctctctgagatcaaggaagccgtcgctgccctgcccccggtaagggagaaaggctgaaatgggagctctgtgtaagccggtcacatgcacgtcccttctgctccgggcggtccacatgcaggcgtgcgtggtgcgggctccctcagcagcccagccccgccacggcaggggcagggtctagtgcagagggctcctcctttcctggcagcccgggttcggatgcttgttgttttgagagagaaatcctttggggctcagagcacaagctgagtcgtcaccgtggtgagctgctccatccgtggtcttgtgagcgcgtggtgcggctgctgggggattctctgtagtcgtggggtgtagtcctgctctgacgcctcctgtgctggaggtgccgtttctgtctcaaaacctaaggagtttgtactgttgttaagggataagatagaacgagtgagaaaaccagcaagtcagagggtcgcaggaccgtggaccgtccactggggacagcttagtgcctcctggtttaacttcagctgctctgcgggcccttatgaccggcatggctggctttgtctggggctgtgagcttctgactctcctcagtagagtggcagcacgtggcactgtgcaacccgagggcagctcagggtccctgtagcctgcatttgctgaagtgggagcttctgacacgtggtgaagatgttggcaggcttgagcggcacgtgacccccttccttccccaccacacactctggtgtgcagggcagacgccgtgcaggttcatctcgactcccgtgagtgtcctggtggcagaaggactgtcccaccctcacccaaagctcgttggtacaaaaagcacagccgtttctgtcagactctgtggctatctctcagcagatgcatccagtccatgctggagtcgacagaaggactctgctgggagaggtagaggccccctggcagcatctgtagcatcttcgttttatgtccctttctgaaggacgtgaccacgcagtctgtgatggggtttgatcctctgcctccttcggacacaatctactcctacgtcaggccagagagtcgttattcaccaccgccctctagagtgtgaggaaaatgtt

SEQ ID NO: 93208 - DNA, 2191 bp, Homo sapiens
cgaagagtgcgcaggcgcgccgacagccgagttttctgcgcttccttctccctctctccagacgtcgtggtcgttcggtcctatgtcgcgccgggccctccggaggctgaggggggaacagcgcggccaggagcccctcgggcccggcgccttgcatttcgatctccgtgatgacgatgacgcggaagaagaagggcccaagcgggagcttggtgtccggcgtcccgggggcgcagggaaggagggcgtccgagtcaacaaccgcttcgagctgataaacattgacgatcttgaggatgaccctgtggtgaacggggagaggtctggctgtgcgctcacagacgctgtggcaccagggaacaaaggaaggggtcagcgtggaaacacagagagcaagacggatggagatgacaccgagacagtgccctcagagcagtctcatgcaagtggcaaactccggaagaagaaaaaaaaacagaaaaacaagaaaagcagcacgggagaagcatcggaaaacggactagaagatatcgatcgcatcctagagaggattgaggacagcactgggttgaaccgtcccggcccagctcccctgagctccaggaagcacgttctctacgtggagcacaggccacggcagagacaacgtgtgtaccccaagtgcacatggctgaccacccctaaaagcacctggccccgctacagcaaaccaggtctgtccatgcggctgctggaatcaaaaaaaggcctctccttctttgcgtttgagcacagtgaggagtaccagcaggctcagcacaagttcctggtggccgtggagtctatggagccgaacaacatcgtggttctgctccagacgagcccttaccacgttgactcactcctgcagctcagcgatgcctgccgctttcaagaggatcaggagatggctcgagacctcgtagagagagcgctgtacagcatggaatgtgcgttccaccccctgttcagtctcaccagtggggcctgccggctggattaccgcagacccgagaacaggagcttctacctggccctctacaagcagatgagcttcctggagaagcgaggctgcccgcgcacggcgctggagtactgcaagctcatcctgagtctcgagccggatgaggaccccctctgcatgctgctgctcatcgaccacctggccttgcgggcccggaactacgagtacctgatccgcctcttccaggagtgggaggctcatcggaacctgtcccagctccctaattttgccttctctgttccactggcgtatttcctgctgagccagcagacagacctccctgagtgtgagcagagctctgccaggcagaaggcctctctcctgatacagcaggcgctcaccatgttccctggagtcctcctgcccctgctcgagtcttgcagtgtgcggcccgacgccagcgtttccagtcaccgcttctttggacccaatgctgaaataagccagccccctgccctgagccagctggtgaacctgtaccttgggaggtcacactttctctggaaagagcccgccaccatgagctggctggaggagaacgtccacgaggttctgcaagcagtggacgccggggacccagccgtggaagcctgtgagaaccggcggaaggtgctctaccagcgtgcacccaggaatatccaccgccatgtgatcctctctgagatcaaggaagccgtcgctgccctgcccccggacgtgaccacgcagtctgtgatggggtttgatcctctgcctccttcggacacaatctactcctacgtcaggccagagaggctaagtcctatcagccatggaaacaccattgctctcttcttccggtcactgttgccaaactataccatggagggggagaggcccgaggaaggagtggctgggggtctgaaccgcaaccagggcctgaacaggctgatgctggctgtgcgcgacatgatggccaacttccacctcaacgacctggaggcgccgcacgaggacgacgctgagggggagggggagtgggactgagcgtccgcagaggtgaccgaaaagccgtatgatgatgttcccgatttctctgttggtcggagtcggccagttgcctgaagtagggaagctgagtgtgtcgctccctggtccactgtttctcctataaatgtaaatgggtcacgc

SEQ ID NO: 93209 - DNA, 1807 bp, Homo sapiens
cgaagagtgcgcaggcgcgccgacagccgagttttctgcgcttccttctccctctctccagacgtcgtggtcgttcggtcctatgtcgcgccgggccctccggaggctgaggggggaacagcgcggccaggagcccctcgggcccggcgccttgcatttcgatctccgtgatgacgatgacgcggaagaagaagggcccaagcgggagcttggtgtccggcgtcccgggggcgcagggaaggagggcgtccgagtcaacaaccgcttcgagctgataaacattgacgatcttgaggatgaccctgtggtgaacggggagaggtctggctgtgcgctcacagacgctgtggcaccagggaacaaaggaaggggtcagcgtggaaacacagagagcaagacggatggagatgacaccgagacagtgccctcagagcagtctcatgcaagtggcaaactccggaagaagaaaaaaaaacagaaaaacaagaaaagcagcacgggagaagcatcggaaaacggactagaagatatcgatcgcatcctagagaggattgaggacagcactgggttgaaccgtcccggcccagctcccctgagctccaggaagcacgttctctacgtggagcacagacacttgaatccagacacagaactgaaaaggtattttggtgcccgggcaatcctgggggagcaaaggccacggcagagacaacgtgtgtaccccaagtgcacatggctgaccacccctaaaagcacctggccccgctacagcaaaccaggtctgtccatgcggctgctggaatcaaaaaaaggcctctccttctttgcgtttgagcacagtgaggagtaccagcaggctcagcacaagttcctggtggccgtggagtctatggagccgaacaacatcgtggttctgctccagacgagcccttaccacgttgactcactcctgcagctcagcgatgcctgccgctttcaagaggatcaggagatggctcgagacctcgtagagagagcgctgtacagcatggaatgtgcgttccaccccctgttcagtctcaccagtggggcctgccggctggattaccgcagacccgagaacaggagcttctacctggccctctacaagcagatgagcttcctggagaagcgaggctgcccgcgcacggcgctggagtactgcaagctcatcctgagtctcgagccggatgaggaccccctctgcatgctgctgctcatcgaccacctggccttgcgggcccggaactacgagtacctgatccgcctcttccaggagtgggaggctcatcggaacctgtcccagctccctaattttgccttctctgttccactggcgtatttcctgctgagccagcagacagacctccctgagtgtgagcagagctctgccaggcagaaggcctctctcctgatacagcaggcgctcaccatgttccctggagtcctcctgcccctgctcgagtcttgcagtgtgcggcccgacgccagcgtttccagtcaccgcttctttggacccaatgctgaaataagccagccccctgccctgagccagctggtgaacctgtaccttgggaggtcacactttctctggaaagagcccgccaccatgagctggctggaggagaacgtccacgaggttctgcaagcagtggacgccggggacccagccgtggaagcctgtgagaaccggtgagctaggggttgacacaagccctgccacgccccctcctcagggaccctcatcccagacacgggggcctcgcattcgggaggcgagaagggctgt

SEQ ID NO: 93210 - DNA, 2010 bp, Homo sapiens
gccctaatgtggaacgctccgcttaatgcttggcgatatgttactgtgctcatagggactgagtgtgagatgctgtacagcccagccacggatacacagttcaggtcagactagatcattacagcagcagaggagggtatgggcatggagaggggaaagctctcactgtcaggcacctccgcatcccagacacaggcctcggtcctccatttatgcaatgtcctcattttacaaacaagaaaagcagcacgggaagaagcatcggaaaacggactagaagatatcgatcgcatcctagagaggattgaggacagcactgggttgaaccgtcccggcccagctcccctgagctccaggaagcacgttctctacgtggagcacagacacttgaatccagacacagaactgaaaaggtattttggtgcccgggcaatcctgggggagcaaaggccacggcagagacaacgtgtgtaccccaagtgcacatggctgaccacccctaaaagcacctggccccgctacagcaaaccaggtctgtccatgcggctgctggaatcaaaaaaaggcctctccttctttgcgtttgagcacagtgaggagtaccagcaggctcagcacaagttcctggtggccgtggagtctatggagccgaacaacatcgtggttctgctccagacgagcccttaccacgttgactcactcctgcagctcagcgatgcctgccgctttcaagaggatcaggagatggctcgagacctcgtagagagagcgctgtacagcatggaatgtgcgttccaccccctgttcagtctcaccagtggggcctgccggctggattaccgcagacccgagaacaggagcttctacctggccctctacaagcagatgagcttcctggagaagcgaggctgcccgcgcacggcgctggagtactgcaagctcatcctgagtctcgagccggatgaggaccccctctgcatgctgctgctcatcgaccacctggccttgcgggcccggaactacgagtacctgatccgcctcttccaggagtgggaggctcatcggaacctgtcccagctccctaattttgccttctctgttccactggcgtatttcctgctgagccagcagacagacctccctgagtgtgagcagagctctgccaggcagaaggcctctctcctgatacagcaggcgctcaccatgttccctggagtcctcctgcccctgctcgagtcttgcagtgtgcggcccgacgccagcgtttccagtcaccgcttctttggacccaatgctgaaataagccagccccctgccctgagccagctggtgaacctgtaccttgggaggtcacactttctctggaaagagcccgccaccatgagctggctggaggagaacgtccacgaggttctgcaagcagtggacgccggggacccagccgtggaagcctgtgagaaccggcggaaggtgctctaccagcgtgcacccaggaatatccaccgccatgtgatcctctctgagatcaaggaagccgtcgctgccctgcccccggacgtgaccacgcagtctgtgatggggtttgatcctctgcctccttcggacacaatctactcctacgtcaggccagagaggctaagtcctatcagccatggaaacaccattgctctcttcttccggtcactgttgccaaactataccatggagggggagaggcccgaggaaggagtggctgggggtctgaaccgcaaccagggcctgaacaggctgatgctggctgtgcgcgacatgatggccaacttccacctcaacgacctggaggcgccgcacgaggacgacgctgagggggagggggagtgggactgagcgtccgcagaggtgaccgaaaagccgtatgatgatgttcccgatttctctgttggtcggagtcggccagttgcctgaagtagggaagctgagtgtgtcgctccctggtccactgtttctcctataaatgtaaatgggtcacgc

SEQ ID NO: 93211 - DNA, 1401 bp, Homo sapiens
cgaagagtgcgcaggcgcgccgacagccgagttttctgcgcttccttctccctctctccagacgtcgtggtcgttcggtcctatgtcgcgccgggccctccggaggctgaggggggaacagcgcggccaggagcccctcgggcccggcgccttgcatttcgatctccgtgatgacgatgacgcggaagaagaagggcccaagcgggagcttggtgtccggcgtcccgggggcgcagggaaggagggcgtccgagtcaacaaccgcttcgagctgataaacattgacgatcttgaggatgaccctgtggtgaacggggagaggtctggctgtgcgctcacagacgctgtggcaccagggaacaaaggaaggggtcagcgtggaaacacagagagcaagacggatggagatgacaccgagacagtgccctcagagcagtctcatgcaagtggcaaactccggaagaagaaaaaaaaacagaaaaacaagaaaagcagcacgggagaagcatcggaaaacggactagaagatatcgatcgcatcctagagaggattgaggacagcactgggttgaaccgtcccggcccagctcccctgagctccaggaagcacgttctctacgtggagcacagacacttgaatccagacacagaactgaaaaggtattttggtgcccgggcaatcctgggggagcaaaggccacggcagagacaacgtgtgtaccccaagtgcacatggctgaccacccctaaaagcacctggccccgctacagcaaaccaggtctgtccatgcggctgctggaatcaaaaaaaggcctctccttctttgcgtttgagcacagtgaggagtaccagcaggctcagcacaagttcctggtggccgtggagtctatggagccgaacaacatcgtggttctgctccagacgagcccttaccacgttgactcactcctgcagctcagcgatgcctgccgctttcaagaggatcaggagatggctcgagacctcgtagagagagcgctgtacagcatggaatgtgcgttccaccccctgttcagtctcaccagtggggcctgccggctggattaccgcagacccgagaacaggtgagtgcagctgccctggaggtgacgcagctccccttcccttctcctgcgagtgaggctgggggaggtgcagtgggcacctcatggctgccctccagggtggaccagggcccacaggtccagagtgacccaccttcctctctctgggcttaaggatagagggatgggattgtctcagcccaggtttacctttgtctgtggacatgcctgatgctactgtggaggtcagagtgggaggtctgctgagcccaggagttcaagtccagcctgggcaccatagtgagacccccatctctt

SEQ ID NO: 93212 - DNA, 1213 bp, Homo sapiens
ctcgaggacttgtctagccgcgcagtggggctgcgtctgattaccgcagaccgagaacaggagcttctacctggccctctacaagcagatgagcttcctggagaagcgaggctgcccgcgcacggcgctggagtactgcaagctcatcctgagtctcgagccggatgaggaccccctctgcatgctgctgctcatcgaccacctggccttgcgggcccggaactacgagtacctgatccgcctcttccaggagtgggaggctcatcggaacctgtcccagctccctaattttgccttctctgttccactggcgtatttcctgctgagccagcagacagacctccctgagtgtgagcagagctctgccaggcagaaggcctctctcctgatacagcaggcgctcaccatgttccctggagtcctcctgcccctgctcgagtcttgcagtgtgcggcccgacgccagcgtttccagtcaccgcttctttggacccaatgctgaaataagccagccccctgccctgagccagctggtgaacctgtaccttgggaggtcacactttctctggaaagagcccgccaccatgagctggctggaggagaacgtccacgaggttctgcaagcagtggacgccggggacccagccgtggaagcctgtgagaaccggcggaaggtgctctaccagcgtgcacccaggaatatccaccgccatgtgatcctctctgagatcaaggaagccgtcgctgccctgcccccggacgtgaccacgcagtctgtgatggggtttgatcctctgcctccttcggacacaatctactcctacgtcaggccagagaggctaagtcctatcagccatggaaacaccattgctctcttcttccggtcactgttgccaaactataccatggagggggagaggcccgaggaaggagtggctgggggtctgaaccgcaaccagggcctgaacaggctgatgctggctgtgcgcgacatgatggccaacttccacctcaacgacctggaggcgccgcacgaggacgacgctgagggggagggggagtgggactgagcgtccgcagaggtgaccgaaaagccgtatgatgatgttcccgatttctctgttggtcggagtcggccagttgcctgaagtagggaagctgagtgtgtcgctccctggtccactgtttctcctataaatgtaaatgggtcacgc

SEQ ID NO: 93213 - DNA, 1163 bp, Homo sapiens
cgaagagtgcgcaggcgcgccgacagccgagttttctgcgcttccttctccctctctccagacgtcgtggtcgttcggtcctatgtcgcgccgggccctccggaggctgaggggggaacagcgcggccaggagcccctcgggcccggcgccttgcatttcgatctccgtgatgacgatgacgcggaagaagaagggcccaagcgggagcttggtgtccggcgtcccgggggcgcagggaaggagggcgtccgagtcaacaaccgcttcgagctgataaacattgacgatcttgaggatgaccctgtggtgaacggggagaggtctggctgtgcgctcacagacgctgtggcaccagggaacaaaggaaggggtcagcgtggaaacacagagagcaagacggatggagatgacaccgagacagtgccctcagagcagtctcatgcaagtggcaaactccggaagaagaaaaaaaaacagaaaaacaagaaaagcagcacgggagaagcatcggaaaacggactagaagatatcgatcgcatcctagagaggattgaggacagcactgggttgaaccgtcccggcccagctcccctgagctccaggaagcacgttctctacgtggagcacagacacttgaatccagacacagaactgaaaaggtattttggtgcccgggcaatcctgggggagcaaaggccacggcagagacaacgtgtgtaccccaagtgcacatggctgaccacccctaaaagcacctggccccgctacagcaaaccaggtctgtccatgcggctgctggaatcaaaaaaaggcctctccttctttgcgtttgagcacagtgaggagtaccagcaggctcagcacaagttcctggtggccgtggagtctatggagccgaacaacatcgtggtgcgtggtccctgcagcccctgacaggagcaggggccatgtagccaccactgccctgggccgcctgcttccctggtggctgggggaggcatgctgcctcctgcccttcccaacaggaagggtgccagtctctgcagggcggtctggccctgtgaccagaaggagatgtgttcggaggctctaggccaagcgagctccatccgatactcagtaggagaggctggagcgctgctctctcagccgttcctgggga

SEQ ID NO: 93214 - DNA, 1339 bp, Homo sapiens
gcataggctaggtagcgaggccgcgtgtgaatcggccgaggcccgccacggcaggggcagggtctagtgcagagggctcctcctttcctggcagcccgggttcggatgcttgttgttttgagagagaaatcctttggggctcagagcacaagctgagtcgtcaccgtggtgagctgctccatccgtggtcttgtgagcgcgtggtgcggctgctgggggattctctgtagtcgtggggtgtagtcctgctctgacgcctcctgtgctggaggtgccgtttctgtctcaaaacctaaggagtttgtactgttgttaagggataagatagaacgagtgagaaaaccagcaagtcagagggtcgcaggaccgtggaccgtccactggggacagcttagtgcctcctggtttaacttcagctgctctgcgggcccttatgaccggcatggctggctttgtctggggctgtgagcttctgactctcctcagtagagtggcagcacgtggcactgtgcaacccgagggcagctcagggtccctgtagcctgcatttgctgaagtgggagcttctgacacgtggtgaagatgttggcaggcttgagcggcacgtgacccccttccttccccaccacacactctggtgtgcagggcagacgccgtgcaggttcatctcgactcccgtgagtgtcctggtggcagaaggactgtcccaccctcacccaaagctcgttggtacaaaaagcacagccgtttctgtcagactctgtggctatctctcagcagatgcatccagtccatgctggagtcgacagaaggactctgctgggagaggtagaggccccctggcagcatctgtagcatcttcgttttatgtccctttctgaaggacgtgaccacgcagtctgtgatggggtttgatcctctgcctccttcggacacaatctactcctacgtcaggccagagaggctaagtcctatcagccatggaaacaccattgctctcttcttccggtcactgttgccaaactataccatggagggggagaggcccgaggaaggagtggctgggggtctgaaccgcaaccagggcctgaacaggctgatgctggctgtgcgcgacatgatggccaacttccacctcaacgacctggaggcgccgcacgaggacgacgctgagggggagggggagtgggactgagcgtccgcagaggtgaccgaaaagccgtatgatgatgttcccgatttctctgttggtcggagtcggccagttgcctgaagtagggaagctgagtgtgtcgctccctggtccactgtttctcctataaatgtaaatgggtcacgc

SEQ ID NO: 93215 - DNA, 762 bp, Homo sapiens
gaacttcgagttggtacctgaacattcgtgtccccccttccttccccaccacacactctggtgtgcagggcagacgccgtgcaggttcatctcgactcccgtgagtgtcctggtggcagaaggactgtcccaccctcacccaaagctcgttggtacaaaaagcacagccgtttctgtcagactctgtggctatctctcagcagatgcatccagtccatgctggagtcgacagaaggactctgctgggagaggtagaggccccctggcagcatctgtagcatcttcgttttatgtccctttctgaaggacgtgaccacgcagtctgtgatggggtttgatcctctgcctccttcggacacaatctactcctacgtcaggccagagaggctaagtcctatcagccatggaaacaccattgctctcttcttccggtcactgttgccaaactataccatggagggggagaggcccgaggaaggagtggctgggggtctgaaccgcaaccagggcctgaacaggctgatgctggctgtgcgcgacatgatggccaacttccacctcaacgacctggaggcgccgcacgaggacgacgctgagggggagggggagtgggactgagcgtccgcagaggtgaccgaaaagccgtatgatgatgttcccgatttctctgttggtcggagtcggccagttgcctgaagtagggaagctgagtgtgtcgctccctggtccactgtttctcctataaatgtaaatgggtcacgc

SEQ ID NO: 93216 - DNA, 1781 bp, Homo sapiens
cgaagagtgcgcaggcgcgccgacagccgagttttctgcgcttccttctccctctctccagacgtcgtggtcgttcggtcctatgtcgcgccgggccctccggaggctgaggggggaacagcgcggccaggagcccctcgggcccggcgccttgcatttcgatctccgtgatgacgatgacgcggaagaagaagggcccaagcgggagcttggtgtccggcgtcccgggggcgcagggaaggagggcgtccgagtcaacaaccgcttcgagctgataaacattgacgatcttgaggatgaccctgtggtgaacggggagaggtctggctgtgcgctcacagacgctgtggcaccagggaacaaaggaaggggtcagcgtggaaacacagagagcaagacggatggagatgacaccgagacagtgccctcagagcagtctcatgcaagtggcaaactccggaagaagaaaaaaaaacagaaaaacaagaaaagcagcacgggagaagcatcggaaaacggactagaagatatcgatcgcatcctagagaggattgaggacagcactgggttgaaccgtcccggcccagctcccctgagctccaggaagcacgttctctacgtggagcacagacacttgaatccagacacagaactgaaaaggtattttggtgcccgggcaatcctgggggagcaaagagacagggtcttgctgggttgtccagtctggttttgaactcgtggcctcaagtgatcctcccatctcagtctcccaaatagctgggactaccggcacatgccaccgctaatttattttattttattttttatagaaacaaggtcttactttgttgcccagggtgatgtcaaactcctggcttcaagcgattctcctccctctacctcctaaagtgctaggattacaggcatgagccaccacgcccagccagacacatcctgttttattggaccatggagagtattgctggtctataacatgccctgggtttgcacgtctgagttctttttttttttttcgagacagaattttgctcttgttgcccaggctggagtgcaatggctcaatcttggctcaccacaacctccgcctcccgggttcaagtgattctcctgcctcagcttcccaagtagctgggattacaggcgagtgccaccatgctcggcaaatttttgtatttttggtagagacggggtttcaccatgttggccaggctggtctcgatctcctgacctcaagtgatccgccagtctcggcctcccaaagtgctgggattacagccctgagccactgcgcccggcctcccaaagtgctgggattacaggcgtgagccaccacacccagcctaagtgttgtttctgcaccatggtatacccaggtcatttcctcaccccaatggtagcatgtgtccagatgttggctacagtccccggtgtctgcaggcatttctgtgaaactgcccaagaatgagtatatatcctgcatgctgccagtgccttcagtagagttacgtggctcacactgagtgtctgcccaggtccttcaccttcttactcgtagtcgacggtagtggtttggaaacctgccgtcgtgtgtgggcagaagtgttggggttttgattgtgggtagatcaaggatgttttcatatgctgttgttcacgccttccctggatttctaacaggttttgctttatattttactttacatttttggtgttgatgggtttcttcgggaatattaattaaaaatagactttaaaatgtc

SEQ ID NO: 93217 - DNA, 610 bp, Homo sapiens
tctacctcgcgggtgcctctacctggctgcctctttcagacccagatgctgagagatggggctcagggctaagtgggtctttcccctcacaggaagggagaggaggagaggaacagtgttatttgggggtcacagctctgcgtttgcaggccacgttctttcccatctccaccgaatgtacaagcgcttgcgtgtcggcctctgtggcaggtgcgagtgacacagtggaagcaggctaagtcctatcagccatggaaacaccattgctctcttcttccggtcactgttgccaaactataccatggagggggagaggcccgaggaaggagtggctgggggtctgaaccgcaaccagggcctgaacaggctgatgctggctgtgcgcgacatgatggccaacttccacctcaacgacctggaggcgccgcacgaggacgacgctgagggggagggggagtgggactgagcgtccgcagaggtgaccgaaaagccgtatgatgatgttcccgatttctctgttggtcggagtcggccagttgcctgaagtagggaagctgagtgtgtcgctccctggtccactgtttctcctataaatgtaaatgggtcacgc

SEQ ID NO: 93218 - DNA, 403 bp, Homo sapiens
  misc_feature (2)..(2): n is a, c, g, or t
tnccgctacggacgccacgctgcctcagctaagtcctatcagccatggaaacaccattgctctcttcttccggtcactgttgccaaactataccatggagggggagaggcccgaggaaggagtggctgggggtctgaaccgcaaccagggcctgaacaggctgatgctggctgtgcgcgacatgatggccaacttccacctcaacgacctggaggcgccgcacgaggacgacgctgagggggagggggagtgggactgagcgtccgcagaggtgaccgaaaagccgtatgatgatgttcccgatttctctgttggtcggagtcggccagttgcctgaagtagggaagctgagtgtgtcgctccctggtccactgtttctcctataaatgtaaatgggtcacgc

SEQ ID NO: 93219 - DNA, 921 bp, Homo sapiens
gcataggctaggtagcgaggccgcgtgtgaatcggccgaggccgagttttctgcgcttccttctccctctctccagacgtcgtggtcgttcggtcctatgtcgcgccgggccctccggaggctgaggggggaacagcgcggccaggagcccctcgggcccggcgccttgcatttcgatctccgtgatgacgatgacgcggaagaagaagggcccaagcgggagcttggtgtccggcgtcccgggggcgcagggaaggagggcgtccgagtcaacaaccgcttcgagctggaaaaatggacattttcctctccccctaaaaaaagataaaactccttcctggttattaactgaaatgctgatcgagctttatcctaaagaagatcagtcgtggacaagaaccttgtgaaatgttccccatttgagaccctaaaactaatgaaaatcacagcttttggataaacattgacgatcttgaggatgaccctgtggtgaacggggagaggtctggctgtgcgctcacagacgctgtggcaccagggaacaaaggaaggggtcagcgtggaaacacagagagcaagacggatggagatgacaccgagacagtgccctcagagcagggggagaggcccgaggaaggagtggctgggggtctgaaccgcaaccagggcctgaacaggctgatgctggctgtgcgcgacatgatggccaacttccacctcaacgacctggaggcgccgcacgaggacgacgctgagggggagggggagtgggactgagcgtccgcagaggtgaccgaaaagccgtatgatgatgttcccgatttctctgttggtcggagtcggccagttgcctgaagtagggaagctgagtgtgtcgctccctggtccactgtttctcctataaatgtaaatgggtcacgc

SEQ ID NO: 93220 - DNA, 510 bp, Homo sapiens
gcataggctaggtagcgaggccgcgtgtgaatcggccgaggccgagttttctgcgcttccttctccctctctccagacgtcgtggtcgttcggtcctatgtcgcgccgggccctccggaggctgaggggggaacagcgcggccaggagcccctcgggcccggcgccttgcatttcgatctccgtgatgacgatgacgcggaagaagaagggcccaagcgggagcttggtgtccggcgtcccgggggcgcagggaaggagggcgtccgagtcaacaaccgcttcgagctgataaacattgacgatcttgaggatgaccctgtggtgaacggggagaggtctggctgtgcgctcacagacgctgtggcaccagggaacaaaggaaggggtcagcgtggaaacacagagagcaagacggatggagatgacaccgagacagtgccctcagagcagtctcatgcaagtggcaaacataggaagaagctcgtgccgaattcggcacgagctcgtgc

SEQ ID NO: 93221 - DNA, 188 bp, Homo sapiens
gaaaaatggacattttcctctccccctaaaaaaagataaaactccttcctggttattaactgaaatgctgatcgagctttatcctaaagaagatcagtcgtggacaagaaccttgtgaaatgttccccatttgagaccctaaaactaatgaaaatcacagcttttgggtaggtaataaggtgttttgt

SEQ ID NO: 93222 - DNA, 385 bp, Homo sapiens
cgggttcaagcgattcgcctgcctcagccttccgagtaactggaattacaggcacacgccaccacacccggctaatttttgtatttttattagagaccaggttttgccacgttggccaggctggtcttgaactcctgatatcaagtgatcctcctgcctcagcctcccaaagtggtgggattacaggcgtgagccactgcgcccagcctccgctggttttaaatgtctgaaaaaaaggcatgcctgggagctggggccttgctgagtgcctttcctccagggctgtcctcccttctggtaggttctgctccagacgagcccttaccacgttgactcactcctgcagctcagcgatgcctgccgctttcaagaggatcaggagatg

SEQ ID NO: 93223 - DNA, 563 bp, Homo sapiens
tcaccgagcgccctcacggcacagtgacggcagcttccccatggtgcccgcagtggcgaggcctcagctgtggttggggtggtgattttagagaaaggcctggaagctgcctttcaaaccaaaaatccgtgttctctccttgactattaggtggctttctgaagcttttggaatcgtcttagaacataatttcatgttttttttctacaattttcaattccccagacacttgaatccagacacagaactgaaaaggtattttggtgcccgggcaatcctgggggagcaaagggtaaggtccacagtgagctgcattctcacagctgcttcattccttcttagactcttggccgggggtggtgttcctgaagctagtttacccttgagggagagtatttaaagccagagtgcacacgtaacccttagaattggggtctgaatgggagtccacagattgtctgtgtataaccttgtctgtgaccgtgggttgtagagatgctcagagtagctggtctccatccctcacactgccttgtccagcatgaggtttcaaaagccatgcc

SEQ ID NO: 93224 - DNA, 268 bp, Homo sapiens
ccaccctaagctgatgaggaagcctcacgggccacccggggaatccagggcctgtgctcagctgctgctgctctgccccctggcggcccctccgtgtccctgcgagggaggcagctggcaggcagccccgtgagccgggttgggtcccacgagtctcagttcagtgtcgtttctgacttttcttgactttctttcaggctaagtcctatcagccatggaaacaccattgctctcttcttccggtcactgttgccaaactataccatgg

SEQ ID NO: 93225 - DNA, 490 bp, Homo sapiens
tgcctggcttggtctagacacggcatttggttttgagagcttcctcctcacagggacctggggagggttcagggtccggtgctggggcaagggccacctcgggctccacagtgcctcctgcttgggccccgggcccctagtcccagcacagacagcccccttctcagacatgtccccttgctgcagggggagaggcccgaggaaggagtggctgggggtctgaaccgcaaccagggcctgaacaggctgatgctggctgtgcgcgacatgatggccaacttccacctcaacgacctggaggcgccgcacgaggacgacgctgagggggagggggagtgggactgagcgtccgcagaggtgaccgaaaagccgtatgatgatgttcccgatttctctgttggtcggagtcggccagttgcctgaagtagggaagctgagtgtgtcgctccctggtccactgtttctcctataaatgtaaatgggtcacgct

SEQ ID NO: 93226 - DNA, 793 bp, Homo sapiens
  misc_feature (793)..(793): n is a, c, g, or t
gcataggctaggtagcgaggccgcgtgtgaatcggccgaggccgagttttctgcgcttccttctccctctctccagacgtcgtggtcgttcggtcctatgtcgcgccgggccctccggaggctgaggggggaacagcgcggccaggagcccctcgggcccggcgccttgcatttcgatctccgtgatgacgatgacgcggaagaagaagggcccaagcgggagcttggtgtccggcgtcccgggggcgcagggaaggagggcgtccgagtcaacaaccgcttcgagctgataaacattgacgatcttgaggatgaccctgtggtgaacggggagaggtctggctgtgcgctcacagacgctgtggcaccagggaacaaaggaaggggtcagcgtggaaacacagagagcaagacggatggagatgacaccgagacagtgccctcagagcagtctcatgcaagtggcaaactccggaagaagaaaaaaaaacagaaaaacaagaaaagcagcacgggagaagcatcggaaaacggactagaagatatcgatcgcatcctagagaggattgaggacagcactgggttgaaccgtcccggcccagctcccctgagctccaggaagcacgttctctacgtggagcacagacacttgaatccagacacagaactgaaaaggtattttggtgcccgggcaatcctgggggagcaaagggccaggcgagacacgtgtgtccccaagtgcctggctgacaccctaaagactggccgttagaacaggtggctgcggtgtgan

SEQ ID NO: 93227 - DNA, 2257 bp, Homo sapiens
cgaagagtgcgcaggcgcgccgacagccgagttttctgcgcttccttctccctctctccagacgtcgtggtcgttcggtcctatgtcgcgccgggccctccggaggctgaggggggaacagcgcggccaggagcccctcgggcccggcgccttgcatttcgatctccgtgatgacgatgacgcggaagaagaagggcccaagcgggagcttggtgtccggcgtcccgggggcgcagggaaggagggcgtccgagtcaacaaccgcttcgagctgataaacattgacgatcttgaggatgaccctgtggtgaacggggagaggtctggctgtgcgctcacagacgctgtggcaccagggaacaaaggaaggggtcagcgtggaaacacagagagcaagacggatggagatgacaccgagacagtgccctcagagcagtctcatgcaagtggcaaactccggaagaagaaaaaaaaacagaaaaacaagaaaagcagcacgggagaagcatcggaaaacggactagaagatatcgatcgcatcctagagaggattgaggacagcactgggttgaaccgtcccggcccagctcccctgagctccaggaagcacgttctctacgtggagcacagacacttgaatccagacacagaactgaaaaggtattttggtgcccgggcaatcctgggggagcaaaggccacggcagagacaacgtgtgtaccccaagtgcacatggctgaccacccctaaaagcacctggccccgctacagcaaaccaggtctgtccatgcggctgctggaatcaaaaaaaggcctctccttctttgcgtttgagcacagtgaggagtaccagcaggctcagcacaagttcctggtggccgtggagtctatggagccgaacaacatcgtggttctgctccagacgagcccttaccacgttgactcactcctgcagctcagcgatgcctgccgctttcaagaggatcaggagatggctcgagacctcgtagagagagcgctgtacagcatggaatgtgcgttccaccccctgttcagtctcaccagtggggcctgccggctggattaccgcagacccgagaacaggagcttctacctggccctctacaagcagatgagcttcctggagaagcgaggctgcccgcgcacggcgctggagtactgcaagctcatcctgagtctcgagccggatgaggaccccctctgcatgctgctgctcatcgaccacctggccttgcgggcccggaactacgagtacctgatccgcctcttccaggagtgggaggctcatcggaacctgtcccagctccctaattttgccttctctgttccactggcgtatttcctgctgagccagcagacagacctccctgagtgtgagcagagctctgccaggcagaaggcctctctcctgatacagcaggcgctcaccatgttccctggagtcctcctgcccctgctcgagtcttgcagtgtgcggcccgacgccagcgtttccagtcaccgcttctttggacccaatgctgaaataagccagccccctgccctgagccagctggtgaacctgtaccttgggaggtcacactttctctggaaagagcccgccaccatgagctggctggaggagaacgtccacgaggttctgcaagcagtggacgccggggacccagccgtggaagcctgtgagaaccggcggaaggtgctctaccagcgtgcacccaggaatatccaccgccatgtgatcctctctgagatcaaggaagccgtcgctgccctgcccccggacgtgaccacgcagtctgtgatggggtttgatcctctgcctccttcggacacaatctactcctacgtcaggccagagaggctaagtcctatcagccatggaaacaccattgctctcttcttccggtcactgttgccaaactataccatggagggggagaggcccgaggaaggagtggctgggggtctgaaccgcaaccagggcctgaacaggctgatgctggctgtgcgcgacatgatggccaacttccacctcaacgacctggaggcgccgcacgaggacgacgctgagggggagggggagtgggactgagcgtccgcagaggtgaccgaaaagccgtatgatgatgttcccgatttctctgttggtcggagtcggccagttgcctgaagtagggaagctgagtgtgtcgctccctggtccactgtttctcctataaatgtaaatgggtcacgc

SEQ ID NO: 93228 - DNA, 2223 bp, Homo sapiens
agaagttacggctaggtacgaggctgggtgtggtggtcgttcggtcctatgtcgcgccgggccctccggaggctgaggggggaacagcgcggccaggagcccctcgggcccggcgccttgcatttcgatctccgtgatgacgatgacgcggaagaagaagggcccaagcgggagcttggtgtccggcgtcccgggggcgcagggaaggagggcgtccgagtcaacaaccgcttcgagctgataaacattgacgatcttgaggatgaccctgtggtgaacggggagaggtctggctgtgcgctcacagacgctgtggcaccagggaacaaaggaaggggtcagcgtggaaacacagagagcaagacggatggagatgacaccgagacagtgccctcagagcagtctcatgcaagtggcaaactccggaagaagaaaaaaaaacagaaaaacaagaaaagcagcacgggagaagcatcggaaaacggactagaagatatcgatcgcatcctagagaggattgaggacagcactgggttgaaccgtcccggcccagctcccctgagctccaggaagcacgttctctacgtggagcacagacacttgaatccagacacagaactgaaaaggtattttggtgcccgggcaatcctgggggagcaaaggccacggcagagacaacgtgtgtaccccaagtgcacatggctgaccacccctaaaagcacctggccccgctacagcaaaccaggtctgtccatgcggctgctggaatcaaaaaaaggcctctccttctttgcgtttgagcacagtgaggagtaccagcaggctcagcacaagttcctggtggccgtggagtctatggagccgaacaacatcgtggttctgctccagacgagcccttaccacgttgactcactcctgcagctcagcgatgcctgccgctttcaagaggatcaggagatggctcgagacctcgtagagagagcgctgtacagcatggaatgtgcgttccaccccctgttcagtctcaccagtggggcctgccggctggattaccgcagacccgagaacaggagcttctacctggccctctacaagcagatgagcttcctggagaagcgaggctgcccgcgcacggcgctggagtactgcaagctcatcctgagtctcgagccggatgaggaccccctctgcatgctgctgctcatcgaccacctggccttgcgggcccggaactacgagtacctgatccgcctcttccaggagtgggaggctcatcggaacctgtcccagctccctaattttgccttctctgttccactggcgtatttcctgctgagccagcagacagacctccctgagtgtgagcagagctctgccaggcagaaggcctctctcctgatacagcaggcgctcaccatgttccctggagtcctcctgcccctgctcgagtcttgcagtgtgcggcccgacgccagcgtttccagtcaccgcttctttggacccaatgctgaaataagccagccccctgccctgagccagctggtgaacctgtaccttgggaggtcacactttctctggaaagagcccgccaccatgagctggctggaggagaacgtccacgaggttctgcaagcagtggacgccggggacccagccgtggaagcctgtgagaaccggcggaaggtgctctaccagcgtgcacccaggaatatccaccgccatgtgatcctctctgagatcaaggaagccgtcgctgccctgcccccggacgtgaccacgcagtctgtgatggggtttgatcctctgcctccttcggacacaatctactcctacgtcaggccagagaggctaagtcctatcagccatggaaacaccattgctctcttcttccggtcactgttgccaaactataccatggagggggagaggcccgaggaaggagtggctgggggtctgaaccgcaaccagggcctgaacaggctgatgctggctgtgcgcgacatgatggccaacttccacctcaacgacctggaggcgccgcacgaggacgacgctgagggggagggggagtgggactgagcgtccgcagaggtgaccgaaaagccgtatgatgatgttcccgatttctctgttggtcggagtcggccagttgcctgaagtagggaagctgagtgtgtcgctccctggtccactgtttctcctataaatgtaaatgggtcacgc

SEQ ID NO: 93229 - DNA, 2621 bp, Homo sapiens
cgaagagtgcgcaggcgcgccgacagccgagttttctgcgcttccttctccctctctccagacgtcgtggtcgttcggtcctatgtcgcgccgggccctccggaggctgaggggggaacagcgcggccaggagcccctcgggcccggcgccttgcatttcgatctccgtgatgacgatgacgcggaagaagaagggcccaagcgggagcttggtgtccggcgtcccgggggcgcagggaaggagggcgtccgagtcaacaaccgcttcgagctgataaacattgacgatcttgaggatgaccctgtggtgaacggggagaggtctggctgtgcgctcacagacgctgtggcaccagggaacaaaggaaggggtcagcgtggaaacacagagagcaagacggatggagatgacaccgagacagtgccctcagagcagtctcatgcaagtggcaaactccggaagaagaaaaaaaaacagaaaaacaagaaaagcagcacgggagaagcatcggaaaacggactagaagatatcgatcgcatcctagagaggattgaggacagcactgggttgaaccgtcccggcccagctcccctgagctccaggaagcacgttctctacgtggagcacagacacttgaatccagacacagaactgaaaaggtattttggtgcccgggcaatcctgggggagcaaaggccacggcagagacaacgtgtgtaccccaagtgcacatggctgaccacccctaaaagcacctggccccgctacagcaaaccaggtctgtccatgcggctgctggaatcaaaaaaaggcctctccttctttgcgtttgagcacagtgaggagtaccagcaggctcagcacaagttcctggtggccgtggagtctatggagccgaacaacatcgtggttctgctccagacgagcccttaccacgttgactcactcctgcagctcagcgatgcctgccgctttcaagaggatcaggagatggctcgagacctcgtagagagagcgctgtacagcatggaatgtgcgttccaccccctgttcagtctcaccagtggggcctgccggctggattaccgcagacccgagaacaggagcttctacctggccctctacaagcagatgagcttcctggagaagcgaggctgcccgcgcacggcgctggagtactgcaagctcatcctgagtctcgagccggatgaggaccccctctgcatgctgctgctcatcgaccacctggccttgcgggcccggaactacgagtacctgatccgcctcttccaggagtgggaggctcatcggaacctgtcccagctccctaattttgccttctctgttccactggcgtatttcctgctgagccagcagacagacctccctgagtgtgagcagagctctgccaggcagaaggcctctctcctgatacagcaggcgctcaccatgttccctggagtcctcctgcccctgctcgagtcttgcagtgtgcggcccgacgccagcgtttccagtcaccgcttctttggacccaatgctgaaataagccagccccctgccctgagccagctggtgaacctgtaccttgggaggtcacactttctctggaaagagcccgccaccatgagctggctggaggagaacgtccacgaggttctgcaagcagtggacgccggggacccagccgtggaagcctgtgagaaccggcggaaggtgctctaccagcgtgcacccaggaatatccaccgccatgtgatcctctctgagatcaaggaagccgtcgctgccctgcccccggacgtgaccacgcagtctgtgatggggtttgatcctctgcctccttcggacacaatctactcctacgtcaggccagagaggctaagtcctatcagccatggaaacaccattgctctcttcttccggtcactgttgccaaactataccatggagggggagaggcccgaggaaggagtggctgggggtctgaaccgcaaccagggcctgaacaggctgatgctggctgtgcgcgacatgatggccaacttccacctcaacgacctggaggcgccgcacgaggacgacgctgagggggagggggagtgggactgagcgtccgcagaggtgaccgaaaagccgtatgatgatgttcccgatttctctgttggtcggagtcggccagttgcctgaagtagggaagctgagtgtgtcgctccctggtccactgtttctcctataaatgtaaatgggtcacgcaaaaaaaaaaaaaaaccaaaaaaaaaaaaacaaaaaaaaaaaagtgacagaaggcagtaatacaggagcacaagctgagggtgcggacgagagcaagtggagcaggaacgaagagggagggaaggagagtggggagctagagcgtgagggtggagagcggcacgagcacgagcggaggagagaggacgagcgacagacccaagcagtagataggagaagggagggagggtcggagcaggtggcggaggtgggtgttggagcatcgcctcagatggcatcgatgcgtgtgagtggggcgaagtaggtgaagagggaagtgtgaaggggatgggagatgttggtagtgaggtggtgaccagattga

SEQ ID NO: 93230 - DNA, 2755 bp, Homo sapiens
cgaagagtgcgcaggcgcgccgacagccgagttttctgcgcttccttctccctctctccagacgtcgtggtcgttcggtcctatgtcgcgccgggccctccggaggctgaggggggaacagcgcggccaggagcccctcgggcccggcgccttgcatttcgatctccgtgatgacgatgacgcggaagaagaagggcccaagcgggagcttggtgtccggcgtcccgggggcgcagggaaggagggcgtccgagtcaacaaccgcttcgagctgataaacattgacgatcttgaggatgaccctgtggtgaacggggagaggtctggctgtgcgctcacagacgctgtggcaccagggaacaaaggaaggggtcagcgtggaaacacagagagcaagacggatggagatgacaccgagacagtgccctcagagcagtctcatgcaagtggcaaactccggaagaagaaaaaaaaacagaaaaacaagaaaagcagcacgggagaagcatcggaaaacggactagaagatatcgatcgcatcctagagaggattgaggacagcactgggttgaaccgtcccggcccagctcccctgagctccaggaagcacgttctctacgtggagcacagacacttgaatccagacacagaactgaaaaggtattttggtgcccgggcaatcctgggggagcaaaggccacggcagagacaacgtgtgtaccccaagtgcacatggctgaccacccctaaaagcacctggccccgctacagcaaaccaggtctgtccatgcggctgctggaatcaaaaaaaggcctctccttctttgcgtttgagcacagtgaggagtaccagcaggctcagcacaagttcctggtggccgtggagtctatggagccgaacaacatcgtggttctgctccagacgagcccttaccacgttgactcactcctgcagctcagcgatgcctgccgctttcaagaggatcaggagatggctcgagacctcgtagagagagcgctgtacagcatggaatgtgcgttccaccccctgttcagtctcaccagtggggcctgccggctggattaccgcagacccgagaacaggagcttctacctggccctctacaagcagatgagcttcctggagaagcgaggctgcccgcgcacggcgctggagtactgcaagctcatcctgagtctcgagccggatgaggaccccctctgcatgctgctgctcatcgaccacctggccttgcgggcccggaactacgagtacctgatccgcctcttccaggagtgggaggctcatcggaacctgtcccagctccctaattttgccttctctgttccactggcgtatttcctgctgagccagcagacagacctccctgagtgtgagcagagctctgccaggcagaaggcctctctcctgatacagcaggcgctcaccatgttccctggagtcctcctgcccctgctcgagtcttgcagtgtgcggcccgacgccagcgtttccagtcaccgcttctttggacccaatgctgaaataagccagccccctgccctgagccagctggtgaacctgtaccttgggaggtcacactttctctggaaagagcccgccaccatgagctggctggaggagaacgtccacgaggttctgcaagcagtggacgccggggacccagccgtggaagcctgtgagaaccggcggaaggtgctctaccagcgtgcacccaggaatatccaccgccatgtgatcctctctgagatcaaggaagccgtcgctgccctgcccccggacgtgaccacgcagtctgtgatggggtttgatcctctgcctccttcggacacaatctactcctacgtcaggccagagaggctaagtcctatcagccatggaaacaccattgctctcttcttccggtcactgttgccaaactataccatggagggggagaggcccgaggaaggagtggctgggggtctgaaccgcaaccagggcctgaacaggctgatgctggctgtgcgcgacatgatggccaacttccacctcaacgacctggaggcgccgcacgaggacgacgctgagggggagggggagtgggactgagcgtccgcagaggtgaccgaaaagccgtatgatgatgttcccgatttctctgttggtcggagtcggccagttgcctgaagtagggaagctgagtgtgtcgctccctggtccactgtttctcctataaatgtaaatgggtcacgctctgccgtccgcaccttctcctttcgcaggcactgagcgccgtcccatgccctcggattcgaatcacactcagtccattctcctcccagtggcttgtgggtgaggtggggcccagaccccatgcttcctgtgctcccaggatctgggcacgggtggagaaggggccccacggggtcttcagtgcaggtccctgctgaatgccaaggccctgggtgcacgtcctccttgaacttgctgtggagttcgtcaacagagctgcgtgccttgttggtagagggtctcagggcagggctggagcagagaggcccctatgtggcagccggccttcagtcttgttcctccaagcaagtggggtggagatgttggggtcctttggctggatgccactatctgttgaatctgacaaaataattttcttttttttttttgagacaagagtctcactgcactccagcctgggtgacagagtgactccatctcaaaaaaaaaaaagcaaaa

SEQ ID NO: 93231 - DNA, 2355 bp, Homo sapiens
cgaagagtgcgcaggcgcgccgacagccgagttttctgcgcttccttctccctctctccagacgtcgtggtcgttcggtcctatgtcgcgccgggccctccggaggctgaggggggaacagcgcggccaggagcccctcgggcccggcgccttgcatttcgatctccgtgatgacgatgacgcggaagaagaagggcccaagcgggagcttggtgtccggcgtcccgggggcgcagggaaggagggcgtccgagtcaacaaccgcttcgagctgataaacattgacgatcttgaggatgaccctgtggtgaacggggagaggtctggctgtgcgctcacagacgctgtggcaccagggaacaaaggaaggggtcagcgtggaaacacagagagcaagacggatggagatgacaccgagacagtgccctcagagcagtctcatgcaagtggcaaactccggaagaagaaaaaaaaacagaaaaacaagaaaagcagcacgggagaagcatcggaaaacggactagaagatatcgatcgcatcctagagaggattgaggacagcactgggttgaaccgtcccggcccagctcccctgagctccaggaagcacgttctctacgtggagcacagacacttgaatccagacacagaactgaaaaggtattttggtgcccgggcaatcctgggggagcaaaggccacggcagagacaacgtgtgtaccccaagtgcacatggctgaccacccctaaaagcacctggccccgctacagcaaaccaggtctgtccatgcggctgctggaatcaaaaaaaggcctctccttctttgcgtttgagcacagtgaggagtaccagcaggctcagcacaagttcctggtggccgtggagtctatggagccgaacaacatcgtggttctgctccagacgagcccttaccacgttgactcactcctgcagctcagcgatgcctgccgctttcaagaggatcaggagatggctcgagacctcgtagagagagcgctgtacagcatggaatgtgcgttccaccccctgttcagtctcaccagtggggcctgccggctggattaccgcagacccgagaacaggagcttctacctggccctctacaagcagatgagcttcctggagaagcgaggctgcccgcgcacggcgctggagtactgcaagctcatcctgagtctcgagccggatgaggaccccctctgcatgctgctgctcatcgaccacctggccttgcgggcccggaactacgagtacctgatccgcctcttccaggagtgggaggctcatcggaacctgtcccagctccctaattttgccttctctgttccactggcgtatttcctgctgagccagcagacagacctccctgagtgtgagcagagctctgccaggcagaaggcctctctcctgatacagcaggcgctcaccatgttccctggagtcctcctgcccctgctcgagtcttgcagtgtgcggcccgacgccagcgtttccagtcaccgcttctttggacccaatgctgaaataagccagccccctgccctgagccagctggtgaacctgtaccttgggaggtcacactttctctggaaagagcccgccaccatgagctggctggaggagaacgtccacgaggttctgcaagcagtggacgccggggacccagccgtggaagcctgtgagaaccggcggaaggtgctctaccagcgtgcacccaggaatatccaccgccatgtgatcctctctgagatcaaggaagccgtcgctgccctgcccccggacgtgaccacgcagtctgtgatggggtttgatcctctgcctccttcggacacaatctactcctacgtcaggccagagaggctaagtcctatcagccatggaaacaccattgctctcttcttccggtcactgttgccaaactataccatggagggggagaggcccgaggaaggagtggctgggggtctgaaccgcaaccagggcctgaacaggctgatgctggctgtgcgcgacatgatggccaacttccacctcaacgacctggaggcgccgcacgaggacgacgctgagggggagggggagtgggactgagcgtccgcagaggtgaccgaaaagccgtatgatgatgttcccgatttctctgttggtcggagtcggccagttgcctgaagtagggaagctgagtgtgtcgctccctggtccactgtttggtccgagcggaccggtcctgctcggaccaatttgtaagtgtaactgttcctccttggtatttgtgtaatatcctgtacatatctttgagttcaacctttagtatcgtgtggctttggtcactt

SEQ ID NO: 93232 - DNA, 2201 bp, Homo sapiens
cgaagagtgcgcaggcgcgccgacagccgagttttctgcgcttccttctccctctctccagacgtcgtggtcgttcggtcctatgtcgcgccgggccctccggaggctgaggggggaacagcgcggccaggagcccctcgggcccggcgccttgcatttcgatctccgtgatgacgatgacgcggaagaagaagggcccaagcgggagcttggtgtccggcgtcccgggggcgcagggaaggagggcgtccgagtcaacaaccgcttcgagctgataaacattgacgatcttgaggatgaccctgtggtgaacggggagaggtctggctgtgcgctcacagacgctgtggcaccagggaacaaaggaaggggtcagcgtggaaacacagagagcaagacggatggagatgacaccgagacagtgccctcagagcagtctcatgcaagtggcaaactccggaagaagaaaaaaaaacagaaaaacaagaaaagcagcacgggagaagcatcggaaaacggactagaagatatcgatcgcatcctagagaggattgaggacagcactgggttgaaccgtcccggcccagctcccctgagctccaggaagcacgttctctacgtggagcacagacacttgaatccagacacagaactgaaaaggtattttggtgcccgggcaatcctgggggagcaaaggccacggcagagacaacgtgtgtaccccaagtgcacatggctgaccacccctaaaagcacctggccccgctacagcaaaccaggtgagggtctgcggctgctgggctcagcacaagttcctggtggccgtggagtctatggagccgaacaacatcgtggttctgctccagacgagcccttaccacgttgactcactcctgcagctcagcgatgcctgccgctttcaagaggatcaggagatggctcgagacctcgtagagagagcgctgtacagcatggaatgtgcgttccaccccctgttcagtctcaccagtggggcctgccggctggattaccgcagacccgagaacaggagcttctacctggccctctacaagcagatgagcttcctggagaagcgaggctgcccgcgcacggcgctggagtactgcaagctcatcctgagtctcgagccggatgaggaccccctctgcatgctgctgctcatcgaccacctggccttgcgggcccggaactacgagtacctgatccgcctcttccaggagtgggaggctcatcggaacctgtcccagctccctaattttgccttctctgttccactggcgtatttcctgctgagccagcagacagacctccctgagtgtgagcagagctctgccaggcagaaggcctctctcctgatacagcaggcgctcaccatgttccctggagtcctcctgcccctgctcgagtcttgcagtgtgcggcccgacgccagcgtttccagtcaccgcttctttggacccaatgctgaaataagccagccccctgccctgagccagctggtgaacctgtaccttgggaggtcacactttctctggaaagagcccgccaccatgagctggctggaggagaacgtccacgaggttctgcaagcagtggacgccggggacccagccgtggaagcctgtgagaaccggcggaaggtgctctaccagcgtgcacccaggaatatccaccgccatgtgatcctctctgagatcaaggaagccgtcgctgccctgcccccggacgtgaccacgcagtctgtgatggggtttgatcctctgcctccttcggacacaatctactcctacgtcaggccagagaggctaagtcctatcagccatggaaacaccattgctctcttcttccggtcactgttgccaaactataccatggagggggagaggcccgaggaaggagtggctgggggtctgaaccgcaaccagggcctgaacaggctgatgctggctgtgcgcgacatgatggccaacttccacctcaacgacctggaggcgccgcacgaggacgacgctgagggggagggggagtgggactgagcgtccgcagaggtgaccgaaaagccgtatgatgatgttcccgatttctctgttggtcggagtcggccagttgcctgaagtagggaagctgagtgtgtcgctccctggtccactgtttctcctataaatgtaaatgggtcacgc

SEQ ID NO: 93233 - DNA, 1823 bp, Homo sapiens
cgaagagtgcgcaggcgcgccgacagccgagttttctgcgcttccttctccctctctccagacgtcgtggtcgttcggtcctatgtcgcgccgggccctccggaggctgaggggggaacagcgcggccaggagcccctcgggcccggcgccttgcatttcgatctccgtgatgacgatgacgcggaagaagaagggcccaagcgggagcttggtgtccggcgtcccgggggcgcagggaaggagggcgtccgagtcaacaaccgcttcgagctgataaacattgacgatcttgaggatgaccctgtggtgaacggggagaggtctggctgtgcgctcacagacgctgtggcaccagggaacaaaggaaggggtcagcgtggaaacacagagagcaagacggatggagatgacaccgagacagtgccctcagagcagtctcatgcaagtggcaaactccggaagaagaaaaaaaaacagaaaaacaagaaaagcagcacgggagaagcatcggaaaacggactagaagatatcgatcgcatcctagagaggattgaggacagcactgggttgaaccgtcccggcccagctcccctgagctccaggaagcacgttctctacgtggagcacagacacttgaatccagacacagaactgaaaaggtattttggtgcccgggcaatcctgggggagcaaaggccacggcagagacaacgtgtgtaccccaagtgcacatggctgaccacccctaaaagcacctggccccgctacagcaaaccaggtctgtccatgcggctgctggaatcaaaaaaaggcctctccttctttgcgtttgagcacagtgaggagtaccagcaggctcagcacaagttcctggtggccgtggagtctatggagccgaacaacatcgtggttctgctccagacgagcccttaccacgttgactcactcctgcagctcagcgatgcctgccgctttcaagaggatcaggagatggctcgagacctcgtagagagagcgctgtacagcatggaatgtgcgttccaccccctgttcagtctcaccagtggggcctgccggctggattaccgcagacccgagaacaggagcttctacctggccctctacaagcagatgagcttcctggagaagcgaggctgcccgcgcacggcgctggagtactgcaagctcatcctgagtctcgagccggatgaggaccccctctgcatgctgctgctcatcgaccacctggccttgcgggcccggaactacgagtacctgatccgcctcttccaggagtgggaggctcatcggaacctgtcccagctccctaattttgccttctctgttccactggcgtatttcctgctgagccagcagacagacctccctgagtgtgagcagagctctgccaggcagaaggcctctctcctgatacagcaggcgctcaccatgttccctggagtcctcctgcccctgctcgagtcttgcagtgtgcggcccgacgccagcgtttccagtcaccgcttctttggacccaatgctgaaataaggtctgaaccgcaaccagggcctgaacaggctgatgctggctgtgcgcgacatgatggccaacttccacctcaacgacctggaggcgccgcacgaggacgacgctgagggggagggggagtgggactgagcgtccgcagaggtgaccgaaaagccgtatgatgatgttcccgatttctctgttggtcggagtcggccagttgcctgaagtagggaagctgagtgtgtcgctccctggtccactgtttctcctataaatgtaaatgggtcacgc

SEQ ID NO: 93234 - DNA, 1784 bp, Homo sapiens
cgaagagtgcgcaggcgcgccgacagccgagttttctgcgcttccttctccctctctccagacgtcgtggtcgttcggtcctatgtcgcgccgggccctccggaggctgaggggggaacagcgcggccaggagcccctcgggcccggcgccttgcatttcgatctccgtgatgacgatgacgcggaagaagaagggcccaagcgggagcttggtgtccggcgtcccgggggcgcagggaaggagggcgtccgagtcaacaaccgcttcgagctgataaacattgacgatcttgaggatgaccctgtggtgaacggggagaggtctggctgtgcgctcacagacgctgtggcaccagggaacaaaggaaggggtcagcgtggaaacacagagagcaagacggatggagatgacaccgagacagtgccctcagagcagtctcatgcaagtggcaaactccggaagaagaaaaaaaaacagaaaaacaagaaaagcagcacgggagaagcatcggaaaacggactagaagatatcgatcgcatcctagagaggattgaggacagcactgggttgaaccgtcccggcccagctcccctgagctccaggaagcacgttctctacgtggagcacagacacttgaatccagacacagaactgaaaaggtattttggtgcccgggcaatcctgggggagcaaaggccacggcagagacaacgtgtgtaccccaagtgcacatggctgaccacccctaaaagcacctggccccgctacagcaaaccaggtctgtccatgcggctgctggaatcaaaaaaaggcctctccttctttgcgtttgagcacagtgaggagtaccagcaggctcagcacaagttcctggtggccgtggagtctatggagccgaacaacatcgtggttctgctccagacgagcccttaccacgttgactcactcctgcagctcagcgatgcctgccgctttcaagaggatcaggagatggctcgagacctcgtagagagagcgctgtacagcatggaatgtgcgttccaccccctgttcagtctcaccagtggggcctgccggctggattaccgcagacccgagaacaggagcttctacctggccctctacaagcagatgagcttcctggagaagcgaggctgcccgcgcacggcgctggagtactgcaagctcatcctgagtctcgagccggatgaggaccccctctgcatgctgctgctcatcgaccacctggccttgcgggcccggaactacgagtacctgatccgcctcttccaggagtgggaggctcatcggaacctgtcccagctccctaattttgccttctctgttccactggcgtatttcctgctgagccagcagacagacctccctgagtgtgagcagagctctgccaggcagaaggcctctctcctgatacagcaggcgctcaccatgttccctggagtcctcctgcccctgctcgagtcttgcagtgtgcggcccgacgccagcgtttccagtcaccgcttctttggacccaatgctgaaataagctgtgcgcgacatgatggccaacttccacctcaacgacctggaggcgccgcacgaggacgacgctgagggggagggggagtgggactgagcgtccgcagaggtgaccgaaaagccgtatgatgatgttcccgatttctctgttggtcggagtcggccagttgcctgaagtagggaagctgagtgtgtcgctccctggtccactgtttctcctataaatgtaaatgggtcacgc

SEQ ID NO: 93235 - DNA, 3163 bp, Homo sapiens
cgaagagtgcgcaggcgcgccgacagccgagttttctgcgcttccttctccctctctccagacgtcgtggtcgttcggtcctatgtcgcgccgggccctccggaggctgaggggggaacagcgcggccaggagcccctcgggcccggcgccttgcatttcgatctccgtgatgacgatgacgcggaagaagaagggcccaagcgggagcttggtgtccggcgtcccgggggcgcagggaaggagggcgtccgagtcaacaaccgcttcgagctgataaacattgacgatcttgaggatgaccctgtggtgaacggggagaggtctggctgtgcgctcacagacgctgtggcaccagggaacaaaggaaggggtcagcgtggaaacacagagagcaagacggatggagatgacaccgagacagtgccctcagagcagtctcatgcaagtggcaaactccggaagaagaaaaaaaaacagaaaaacaagaaaagcagcacgggagaagcatcggaaaacggactagaagatatcgatcgcatcctagagaggattgaggacagcactgggttgaaccgtcccggcccagctcccctgagctccaggaagcacgttctctacgtggagcacagacacttgaatccagacacagaactgaaaaggtattttggtgcccgggcaatcctgggggagcaaaggccacggcagagacaacgtgtgtaccccaagtgcacatggctgaccacccctaaaagcacctggccccgctacagcaaaccaggtctgtccatgcggctgctggaatcaaaaaaaggcctctccttctttgcgtttgagcacagtgaggagtaccagcaggctcagcacaagttcctggtggccgtggagtctatggagccgaacaacatcgtggttctgctccagacgagcccttaccacgttgactcactcctgcagctcagcgatgcctgccgctttcaagaggatcaggagatggctcgagacctcgtagagagagcgctgtacagcatggaatgtgcgttccaccccctgttcagtctcaccagtggggcctgccggctggattaccgcagacccgagaacaggagcttctacctggccctctacaagcagatgagcttcctggagaagcgaggctgcccgcgcacggcgctggagtactgcaagctcatcctgagtctcgagccggatgaggaccccctctgcatgctgctgctcatcgaccacctggccttgcgggcccggaactacgagtacctgatccgcctcttccaggagtgggaggctcatcggaacctgtcccagctccctaattttgccttctctgttccactggcgtatttcctgctgagccagcagacagacctccctgagtgtgagcagagctctgccaggcagaaggcctctctcctgatacagcaggcgctcaccatgttccctggagtcctcctgcccctgctcgagtcttgcagtgtgcggcccgacgccagcgtttccagtcaccgcttctttggacccaatgctgaaataagccagccccctgccctgagccagctggtgaacctgtaccttgggaggtcacactttctctggaaagagcccgccaccatgagctggctggaggagaacgtccacgaggttctgcaagcagtggacgccggggacccagccgtggaagcctgtgagaaccggcggaaggtgctctaccagcgtgcacccaggaatatccaccgccatgtgatcctctctgagatcaaggaagccgtcgctgccctgcccccggtaagggagaaaggctgaaatgggagctctgtgtaagccggtcacatgcacgtcccttctgctccgggcggtccacatgcaggcgtgcgtggtgcgggctccctcagcagcccagccccgccacggcaggggcagggtctagtgcagagggctcctcctttcctggcagcccgggttcggatgcttgttgttttgagagagaaatcctttggggctcagagcacaagctgagtcgtcaccgtggtgagctgctccatccgtggtcttgtgagcgcgtggtgcggctgctgggggattctctgtagtcgtggggtgtagtcctgctctgacgcctcctgtgctggaggtgccgtttctgtctcaaaacctaaggagtttgtactgttgttaagggataagatagaacgagtgagaaaaccagcaagtcagagggtcgcaggaccgtggaccgtccactggggacagcttagtgcctcctggtttaacttcagctgctctgcgggcccttatgaccggcatggctggctttgtctggggctgtgagcttctgactctcctcagtagagtggcagcacgtggcactgtgcaacccgagggcagctcagggtccctgtagcctgcatttgctgaagtgggagcttctgacacgtggtgaagatgttggcaggcttgagcggcacgtgacccccttccttccccaccacacactctggtgtgcagggcagacgccgtgcaggttcatctcgactcccgtgagtgtcctggtggcagaaggactgtcccaccctcacccaaagctcgttggtacaaaaagcacagccgtttctgtcagactctgtggctatctctcagcagatgcatccagtccatgctggagtcgacagaaggactctgctgggagaggtagaggccccctggcagcatctgtagcatcttcgttttatgtccctttctgaaggacgtgaccacgcagtctgtgatggggtttgatcctctgcctccttcggacacaatctactcctacgtcaggccagagagaggtacctccctccttccagttcccacctcccacaggtgtatctaggaaggcttctgccctggctgggcctgcccccgctaaccggctttttgcccaaatgggccattatcgaagaattcacaaaaaacaatagcctcatcatccccaccatcatagccaccatcaccctccttaacctctacttctacctacgcctaatctactccacctcatcacactactccccatatctacacgtaaaaataaaatgacagtttgacatacaaacccacccattcctccccaccgcatcacccttcgggatcctctagatcaccttagca

SEQ ID NO: 93236 - DNA, 2498 bp, Homo sapiens
cgaagagtgcgcaggcgcgccgacagccgagttttctgcgcttccttctccctctctccagacgtcgtggtcgttcggtcctatgtcgcgccgggccctccggaggctgaggggggaacagcgcggccaggagcccctcgggcccggcgccttgcatttcgatctccgtgatgacgatgacgcggaagaagaagggcccaagcgggagcttggtgtccggcgtcccgggggcgcagggaaggagggcgtccgagtcaacaaccgcttcgagctgataaacattgacgatcttgaggatgaccctgtggtgaacggggagaggtctggctgtgcgctcacagacgctgtggcaccagggaacaaaggaaggggtcagcgtggaaacacagagagcaagacggatggagatgacaccgagacagtgccctcagagcagtctcatgcaagtggcaaactccggaagaagaaaaaaaaacagaaaaacaagaaaagcagcacgggagaagcatcggaaaacggactagaagatatcgatcgcatcctagagaggattgaggacagcactgggttgaaccgtcccggcccagctcccctgagctccaggaagcacgttctctacgtggagcacagacacttgaatccagacacagaactgaaaaggtattttggtgcccgggcaatcctgggggagcaaaggccacggcagagacaacgtgtgtaccccaagtgcacatggctgaccacccctaaaagcacctggccccgctacagcaaaccaggtctgtccatgcggctgctggaatcaaaaaaaggcctctccttctttgcgtttgagcacagtgaggagtaccagcaggctcagcacaagttcctggtggccgtggagtctatggagccgaacaacatcgtggttctgctccagacgagcccttaccacgttgactcactcctgcagctcagcgatgcctgccgctttcaagaggatcaggagatggctcgagacctcgtagagagagcgctgtacagcatggaatgtgcgttccaccccctgttcagtctcaccagtggggcctgccggctggattaccgcagacccgagaacaggagcttctacctggccctctacaagcagatgagcttcctggagaagcgaggctgcccgcgcacggcgctggagtactgcaagctcatcctgagtctcgagccggatgaggaccccctctgcatgctgctgctcatcgaccacctggccttgcgggcccggaactacgagtacctgatccgcctcttccaggagtgggaggctcatcggaacctgtcccagctccctaattttgccttctctgttccactggcgtatttcctgctgagccagcagacagacctccctgagtgtgagcagagctctgccaggcagaaggcctctctcctgatacagcaggcgctcaccatgttccctggagtcctcctgcccctgctcgagtcttgcagtgtgcggcccgacgccagcgtttccagtcaccgcttctttggacccaatgctgaaataagccagccccctgccctgagccagctggtgaacctgtaccttgggaggtcacactttctctggaaagagcccgccaccatgagctggctggaggagaacgtccacgaggttctgcaagcagtggacgccggggacccagccgtggaagcctgtgagaaccggcggaaggtgctctaccagcgtgcacccaggaatatccaccgccatgtgatcctctctgagatcaaggaagccgtcgctgccctgcccccggtaagggagaaaggctgaaatgggagctctgtgtaagccggtcacatgcacgtcccttctgctccgggcggtccacatgcaggcgtgcgtggtgcgggctccctcagcagcccagccccgccacggcaggggcagggtctagtgcagagggctcctcctttcctggcagcccgggttcggatgcttgttgttttgagagagaaatcctttggggctcagagcacaagctgagtcgtcaccgtggtgagctgctccatccgtggtcttgtgagcgcgtggtgcggctgctgggggattctctgtagtcgtggggtgtagtcctgctctgacgcctcctgtgctggaggtgccgtttctgtctcaaaacctaaggagtttgtactgttgttaagggataagatagaacgagtgagaaaaccagcaagtcagagggtcgcaggaccgtggaccgtccactggggacagcttagtgcctcctggtttaacttcagctgctctgcgggcccttatgaccggcatggctggctttgtctggggctgtgagcttctgactctcctcagtagagtggcagctgggaggtgggaactggaaggagggaggtacctctcttgcctgacgtaggagtagattgtgtccgaaggaggcagaggatcaaagcccatcacagactgcgtggtcacgtccttcagaacggga

SEQ ID NO: 93237 - DNA, 2165 bp, Homo sapiens
cgaagagtgcgcaggcgcgccgacagccgagttttctgcgcttccttctccctctctccagacgtcgtggtcgttcggtcctatgtcgcgccgggccctccggaggctgaggggggaacagcgcggccaggagcccctcgggcccggcgccttgcatttcgatctccgtgatgacgatgacgcggaagaagaagggcccaagcgggagcttggtgtccggcgtcccgggggcgcagggaaggagggcgtccgagtcaacaaccgcttcgagctgataaacattgacgatcttgaggatgaccctgtggtgaacggggagaggtctggctgtgcgctcacagacgctgtggcaccagggaacaaaggaaggggtcagcgtggaaacacagagagcaagacggatggagatgacaccgagacagtgccctcagagcagtctcatgcaagtggcaaactccggaagaagaaaaaaaaacagaaaaacaagaaaagcagcacgggagaagcatcggaaaacggactagaagatatcgatcgcatcctagagaggattgaggacagcactgggttgaaccgtcccggcccagctcccctgagctccaggaagcacgttctctacgtggagcacagacacttgaatccagacacagaactgaaaaggccacggcagagacaacgtgtgtaccccaagtgcacatggctgaccacccctaaaagcacctggccccgctacagcaaaccaggtgagggtctgcggctgctgggctcagcacaagttcctggtggccgtggagtctatggagccgaacaacatcgtggttctgctccagacgagcccttaccacgttgactcactcctgcagctcagcgatgcctgccgctttcaagaggatcaggagatggctcgagacctcgtagagagagcgctgtacagcatggaatgtgcgttccaccccctgttcagtctcaccagtggggcctgccggctggattaccgcagacccgagaacaggagcttctacctggccctctacaagcagatgagcttcctggagaagcgaggctgcccgcgcacggcgctggagtactgcaagctcatcctgagtctcgagccggatgaggaccccctctgcatgctgctgctcatcgaccacctggccttgcgggcccggaactacgagtacctgatccgcctcttccaggagtgggaggctcatcggaacctgtcccagctccctaattttgccttctctgttccactggcgtatttcctgctgagccagcagacagacctccctgagtgtgagcagagctctgccaggcagaaggcctctctcctgatacagcaggcgctcaccatgttccctggagtcctcctgcccctgctcgagtcttgcagtgtgcggcccgacgccagcgtttccagtcaccgcttctttggacccaatgctgaaataagccagccccctgccctgagccagctggtgaacctgtaccttgggaggtcacactttctctggaaagagcccgccaccatgagctggctggaggagaacgtccacgaggttctgcaagcagtggacgccggggacccagccgtggaagcctgtgagaaccggcggaaggtgctctaccagcgtgcacccaggaatatccaccgccatgtgatcctctctgagatcaaggaagccgtcgctgccctgcccccggacgtgaccacgcagtctgtgatggggtttgatcctctgcctccttcggacacaatctactcctacgtcaggccagagaggctaagtcctatcagccatggaaacaccattgctctcttcttccggtcactgttgccaaactataccatggagggggagaggcccgaggaaggagtggctgggggtctgaaccgcaaccagggcctgaacaggctgatgctggctgtgcgcgacatgatggccaacttccacctcaacgacctggaggcgccgcacgaggacgacgctgagggggagggggagtgggactgagcgtccgcagaggtgaccgaaaagccgtatgatgatgttcccgatttctctgttggtcggagtcggccagttgcctgaagtagggaagctgagtgtgtcgctccctggtccactgtttctcctataaatgtaaatgggtcacgc

SEQ ID NO: 93238 - DNA, 1421 bp, Homo sapiens
cgaagagtgcgcaggcgcgccgacagccgagttttctgcgcttccttctccctctctccagacgtcgtggtcgttcggtcctatgtcgcgccgggccctccggaggctgaggggggaacagcgcggccaggagcccctcgggcccggcgccttgcatttcgatctccgtgatgacgatgacgcggaagaagaagggcccaagcgggagcttggtgtccggcgtcccgggggcgcagggaaggagggcgtccgagtcaacaaccgcttcgagctgataaacattgacgatcttgaggatgaccctgtggtgaacggggagaggtctggctgtgcgctcacagacgctgtggcaccagggaacaaaggaaggggtcagcgtggaaacacagagagcaagacggatggagatgacaccgagacagtgccctcagagcagtctcatgcaagtggcaaactccggaagaagaaaaaaaaacagaaaaacaagaaaagcagcacgggagaagcatcggaaaacggactagaagatatcgatcgcatcctagagaggattgaggacagcactgggttgaaccgtcccggcccagctcccctgagctccaggaagcacgttctctacgtggagcacagacacttgaatccagacacagaactgaaaaggtattttggtgcccgggcaatcctgggggagcaaaggccacggcagagacaacgtgtgtaccccaagtgcacatggctgaccacccctaaaagcacctggccccgctacagcaaaccaggtctgtccatgcggctgctggaatcaaaaaaaggcctctccttctttgcgtttgagcacagtgaggagtaccagcaggctcagcacaagttcctggtggccgtggagtctatggagccgaacaacatcgtggttctgctccagacgagcccttaccacgttgactcactcctgcagctcagcgatgcctgccgctttcaagaggatcaggagatggctcgagacctcgtagagagagcgctgtacagcatggaatgtgcgttccaccccctgttcagtctcaccagtggggcctgccggctggattaccgcagacccgagaacaggagcttctacctggccctctacaagcagatgagcttcctggagaagcgaggctgcccgcgcacggcgctggagtactgcaagctcatcctgagtctcgagccggatgaggaccccctctgcatgctgctgctcatcgaccacctggccttgcgggcccggaactacgagtacctgatccgcagaggtgaccgaaaagccgtatgatgatgttcccgatttctctgttggtcggagtcggccagttgcctgaagtagggaagctgagtgtgtcgctccctggtccactgtttctcctataaatgtaaatgggtcacgc

SEQ ID NO: 93239 - DNA, 1235 bp, Homo sapiens
ctgatgctgaaggtgactctaaggatccgtcctatctcaccagtggggcctgccggctggattaccgcagacccgagaacaggagcttctacctggccctctacaagcagatgagcttcctggagaagcgaggctgcccgcgcacggcgctggagtactgcaagctcatcctgagtctcgagccggatgaggaccccctctgcatgctgctgctcatcgaccacctggccttgcgggcccggaactacgagtacctgatccgcctcttccaggagtgggaggctcatcggaacctgtcccagctccctaattttgccttctctgttccactggcgtatttcctgctgagccagcagacagacctccctgagtgtgagcagagctctgccaggcagaaggcctctctcctgatacagcaggcgctcaccatgttccctggagtcctcctgcccctgctcgagtcttgcagtgtgcggcccgacgccagcgtttccagtcaccgcttctttggacccaatgctgaaataagccagccccctgccctgagccagctggtgaacctgtaccttgggaggtcacactttctctggaaagagcccgccaccatgagctggctggaggagaacgtccacgaggttctgcaagcagtggacgccggggacccagccgtggaagcctgtgagaaccggcggaaggtgctctaccagcgtgcacccaggaatatccaccgccatgtgatcctctctgagatcaaggaagccgtcgctgccctgcccccggacgtgaccacgcagtctgtgatggggtttgatcctctgcctccttcggacacaatctactcctacgtcaggccagagaggctaagtcctatcagccatggaaacaccattgctctcttcttccggtcactgttgccaaactataccatggagggggagaggcccgaggaaggagtggctgggggtctgaaccgcaaccagggcctgaacaggctgatgctggctgtgcgcgacatgatggccaacttccacctcaacgacctggaggcgccgcacgaggacgacgctgagggggagggggagtgggactgagcgtccgcagaggtgaccgaaaagccgtatgatgatgttcccgatttctctgttggtcggagtcggccagttgcctgaagtagggaagctgagtgtgtcgctccctggtccactgtttctcctataaatgtaaatgggtcacgc

SEQ ID NO: 93240 - DNA, 1202 bp, Homo sapiens
agatcggtctagctgcagtggggctgcggtgatacgagaccgagaacatgagcttctacctggccctctacaagcagatgagcttcctggagaagcgaggctgcccgcgcacggcgctggagtactgcaagctcatcctgagtctcgagccggatgaggaccccctctgcatgctgctgctcatcgaccacctggccttgcgggcccggaactacgagtacctgatccgcctcttccaggagtgggaggctcatcggaacctgtcccagctccctaattttgccttctctgttccactggcgtatttcctgctgagccagcagacagacctccctgagtgtgagcagagctctgccaggcagaaggcctctctcctgatacagcaggcgctcaccatgttccctggagtcctcctgcccctgctcgagtcttgcagtgtgcggcccgacgccagcgtttccagtcaccgcttctttggacccaatgctgaaataagccagccccctgccctgagccagctggtgaacctgtaccttgggaggtcacactttctctggaaagagcccgccaccatgagctggctggaggagaacgtccacgaggttctgcaagcagtggacgccggggacccagccgtggaagcctgtgagaaccggcggaaggtgctctaccagcgtgcacccaggaatatccaccgccatgtgatcctctctgagatcaaggaagccgtcgctgccctgcccccggacgtgaccacgcagtctgtgatggggtttgatcctctgcctccttcggacacaatctactcctacgtcaggccagagaggctaagtcctatcagccatggaaacaccattgctctcttcttccggtcactgttgccaaactataccatggagggggagaggcccgaggaaggagtggctgggggtctgaaccgcaaccagggcctgaacaggctgatgctggctgtgcgcgacatgatggccaacttccacctcaacgacctggaggcgccgcacgaggacgacgctgagggggagggggagtgggactgagcgtccgcagaggtgaccgaaaagccgtatgatgatgttcccgatttctctgttggtcggagtcggccagttgcctgaagtagggaagctgagtgtgtcgctccctggtccactgtttctcctataaatgtaaatgggtcacgc

SEQ ID NO: 93241 - DNA, 518 bp, Homo sapiens
tgaatgtagattatatgctaatttaaattatatattggaggtcgagaaaagagtactttagagacgtgaccacgcagtctgtgatggggtttgatcctctgcctccttcggacacaatctactcctacgtcaggccagagaggctaagtcctatcagccatggaaacaccattgctctcttcttccggtcactgttgccaaactataccatggagggggagaggcccgaggaaggagtggctgggggtctgaaccgcaaccagggcctgaacaggctgatgctggctgtgcgcgacatgatggccaacttccacctcaacgacctggaggcgccgcacgaggacgacgctgagggggagggggagtgggactgagcgtccgcagaggtgaccgaaaagccgtatgatgatgttcccgatttctctgttggtcggagtcggccagttgcctgaagtagggaagctgagtgtgtcgctccctggtccactgtttctcctataaatgtaaatgggtcacgc

SEQ ID NO: 93242 - DNA, 1852 bp, Homo sapiens
cgaagagtgcgcaggcgcgccgacagccgagttttctgcgcttccttctccctctctccagacgtcgtggtcgttcggtcctatgtcgcgccgggccctccggaggctgaggggggaacagcgcggccaggagcccctcgggcccggcgccttgcatttcgatctccgtgatgacgatgacgcggaagaagaagggcccaagcgggagcttggtgtccggcgtcccgggggcgcagggaaggagggcgtccgagtcaacaaccgcttcgagctgataaacattgacgatcttgaggatgaccctgtggtgaacggggagaggtctggctgtgcgctcacagacgctgtggcaccagggaacaaaggaaggggtcagcgtggaaacacagagagcaagacggatggagatgacaccgagacagtgccctcagagcagtctcatgcaagtggcaaactccggaagaagaaaaaaaaacagaaaaacaagaaaagcagcacgggagaagcatcggaaaacggactagaagatatcgatcgcatcctagagaggattgaggacagcactgggttgaaccgtcccggcccagctcccctgagctccaggaagcacgttctctacgtggagcacagacacttgaatccagacacagaactgaaaaggtattttggtgcccgggcaatcctgggggagcaaagagacagggtcttgctgggttgtccagtctggttttgaactcgtggcctcaagtgatcctcccatctcagtctcccaaatagctgggactaccggcacatgccaccgctaatttattttattttattttttatagaaacaaggtcttactttgttgcccagggtgatgtcaaactcctggcttcaagcgattctcctccctctacctcctaaagtgctaggattacaggcatgagccaccacgcccagccagacacatcctgttttattggaccatggagagtattgctggtctataacatgccctgggtttgcacgtctgagttctttttttttttttcgagacagaattttgctcttgttgcccaggctggagtgcaatggctcaatcttggctcaccacaacctccgcctcccgggttcaagtgattctcctgcctcagcttcccaagtagctgggattacaggcgagtgccaccatgctcggcaaatttttgtatttttggtagagacggggtttcaccatgttggccaggctggtctcgatctcctgacctcaagtgatccgccagtctcggcctcccaaagtgctgggattacagccctgagccactgcgcccggcctcccaaagtgctgggattacaggcgtgagccaccacacccagcctaagtgttgtttctgcaccatggtatacccaggtcatttcctcaccccaatggtagcatgtgtccagatgttggctacagtccccggtgtctgcaggcatttctgtgaaactgcccaagaatgagtatatatcctgcatgctgccagtgccttcagtagagttacgtggctcacactgagtgtctgcccaggtccttcaccttcttactcgtagtcgacggtagtggtttggaaacctgccgtcgtgtgtgggcagaagtgttggggttttgattgtgggtagatcaaggatgttttcatatgctgttgttcacgccttccctggatttctaacaggttttgctttatattttactttacatttttggtgttgatgggtttcttcgggaatattaattaaaaatagactttaaaatgtcactttgtcatctgcatttctctgagctgagggttccacctcgtcccaccctttgtttgcatctgcttggtc

SEQ ID NO: 93243 - DNA, 573 bp, Homo sapiens
  misc_feature (553)..(553): n is a, c, g, or t
  misc_feature (572)..(572): n is a, c, g, or t
gcataggctaggtagcgaggccgcgtgtgaatcggccgaggccgagttttctgcgcttccttctccctctctccagacgtcgtggtcgttcggtcctatgtcgcgccgggccctccggaggctgaggggggaacagcgcggccaggagcccctcgggcccggcgccttgcatttcgatctccgtgatgacgatgacgcggaagaagaagggcccaagcgggagcttggtgtccggcgtcccgggggcgcagggaaggagggcgtccgagtcaacaaccgcttcgagctgataaacattgacgatcttgaggatgaccctgtggtgaacggggagaggtctggctgtgcgctcacagacgctgtggcaccagggaacaaaggaaggggtcagcgtggaaacacagagagcaagacggatggagatgacaccgagacagtgccctcagagcagtctcatgcaagtggcaaactccggaagaagaaaaaaaaacagaaaaacaagaaaagcagcacgggagaagcatcgggttggggaagaagcaaagactctttncctattttgtatgtgtatna

SEQ ID NO: 93244 - DNA, 316 bp, Homo sapiens
gagcttctacctggccctctacaagcagatgagcttcctggagaagcgaggctgcccgcgcacggcgctggagtactgcaagctcatcctgaggtgagtgtctgctcagggccaagcccgtccacgctccctgtcctggctgcaggcccactctcagcctgacgatgcccctgttcccctttgctctgctctctgtgctgcctccggaagtctcgagccggatgaggaccccctctgcatgctgctgctcatcgaccacctggccttgcgggcccggaactacgagtacctgatccgcctcttccaggagtgggag

SEQ ID NO: 93245 - DNA, 921 bp, Homo sapiens
gagtctcccatgtgtaacaggtacgaggatgaaatcaacaagcacactgctgcagagaacgagtttgtggtgctcaagaaggatgtggatgcagcatacatgggccggatggatctgcatggcaaagtgggcaccttgacccaggagattgacttcctgcagcaactctatgaaatggagctgagccaagtgcagacccacgtgtctaacaccaatgtggtgctgtccatggacaacaaccgcaacctggacctggacagcatcatcgccgaggtcaaggcccagtatgagctgattgcccagaggagccgggctgaggccgaggcctggtaccagaccaagtatgaggagctgcaggtgactgctgggaagcatggggacaacctgcgggacaccaagaacgagattgctgagctcacccgcactatccagaggcttcagggggaggctgatgcagccaagaagcagtgtcagcagctgcagacggccattgcaggaagcggagcagcgtggggagctggcactcaaggatgctcagaagaagctaggggatctggatgtggccctgacaccaggccaaggaggacctgacacggctgctgcgtgactaccaggagctgatgaatgtcaagcttggccctggacgtggagattgccacctaccgcaagcttctggagagcgaggagagcaggatgtctggagaatgtcccagtggagtcagcatttctgtgactggaaatccaccactgtgtgcggaggtggcgcagccagcttaggaggtggcatctaccagagatgggaatgagggggcaccaaagggtgatacagaaacaaatgatgggcataggaaccgacagggagggcagaatccgaggcaccacaacactgagaagacacaagggcaagagtcagcagaagta

SEQ ID NO: 93246 - DNA, 812 bp, Homo sapiens
cctcggcctcccaaggtgctgggattacagatgtgagccaccgcgcctgccctggctaaaatttctttgcaaagaattatttaaaatgttcagttatccgggcacgatggtgcatgcctgtagtcccagctattctggaggctaaggtggaaggatcacttgagcccaggagtttgagtctagtctgggcaacatactgataccttttcatttaaaaaaaattttaatagtaataagaatgttcagtcaatatcaatagaattaggaagaatttctatttccttccttcattaattcaacaaatatttattgagcaaacatctgtgtgtcgtctggcgctgttgcacaggtcaaactggcttcttaagaatgaaatcctaagtgtgaggaagaaattgcattgtatgtgtggtctgactgcagaaaacctaaaataagtaaactgctgccatgatgaaaagtcaaggagtaagttggcttttccatgttagtaagacaagtgaaaaggcatgtttcagtcacgatgtaatatttcctaaaattttgaagctatggggagaaaggtttgggaggaatttcatagggaaaagaaaatgtggggagggggaatgtaagcaaacaatacttagtacattttacaaaattaaagtcactttgtaggtatataaaaagttttaaaagttggtttattaatgagagtagtgtattacatttcttttcaagcagtagtttaaatattaaccagtttacttttttttaaagtcaatttacttttccagcctggacaacatggtgaaacctcgtatctacaa

SEQ ID NO: 93247 - DNA, 364 bp, Homo sapiens
cataaacacacagcaaaatcagcaaacaaagctaagtagcatttaggcggggagcagtggctcacgcctgtaatcccagcactctgggagcccgagtcgggtggatcacttgaggtcaagagttcgagaccagcctggccaacatggtgaaactgcatctctactaaaaacacaaaaattagccagggtgcggtggtcgtgcacctatagtcccagctacccggaggccgaggcaggagactctcttgaacccggcaggtggaggttgcagtcagccgaaatcatgctcctgggtgatagacagaggctgtctcaaaaaaaaaaaagaaaaaagaaaaacagctaagtagcatttagatgaaac

SEQ ID NO: 93248 - DNA, 432 bp, Homo sapiens
gaacacagaagtctgttgccctattcaaaccaaacgtctcgctgaaagaattatgtttatagtggaaaatgggcaggctatttgttcctttaaatcagtggtctccacatatcgctttctgaatcagctaaaaaaatttttaaaagtattcccatggatgtatacttattaattatactcatgtactattgtactaatatatacaatatgaaacatacacaaagaaaagaaaaatttaaagaatgagaaaacacaaataaatacaaattctaatgctgtcttcctggacctagctataccacctcacaaaatgacctatggtgtacaaacccctaaggtattagcctctataacaggagtcctttacagcccccaatggctgtggaatctggaagtagaccagattatcagtgagtagtatactttgtattg

SEQ ID NO: 93249 - DNA, 346 bp, Homo sapiens
agacagagtcttgctctgtcactcaggctggagtgcagtggcaggatctcagctcattgcaacctgggaggcggaggttgcattgagctgagatcatgccactgcacaccagcctaggtgaaagagcgaaactccgtctcaaaaaaaaataaataaaataaaaatacttcatccctttcaaaaagcaatttggtgatattatcaagatcccaagggctgggcgtggtggctcatgcctggaatcctagcactttgggaggctgaagcgagaggatcacttgagtccaggaatctgagaccaacctgtgcaacatagtgagactgtgtctctacagaaaaaaaaaga

SEQ ID NO: 93250 - DNA, 558 bp, Homo sapiens
cagtattgttttataattttaaggaaatcatgtttgtttcactgctttgtttttttttttagctgttgccttgtcactgtcacagctaacaagacttactacatacttgatattctgaagtactgtggggctgtcctctgtatactgacattaaataaacgtgtgtgagtgaactgtaaatgtagataattttcagtagtcattttcacatctaagctttaaaaatcccagtgaaccaaaaccagaaaagtttttaaatgctgtaaaattaaggaccttgttaatgtttatagaacagccagccaccggaattgctccctcttactaaagctgactgtttctcatagttggcagcgtactcgatgaaatgttctgcgtctcagatactgttttatgtggtcctcctctgtgccaactccagtccgggagaaggactgttgattggcgtttcggctgagctgtgtagaggcttctgtttaatgagaatgcagacattctgaagtcgtcctgggccacgagctggcttttgttacatggactcactatcccggatgctgg

SEQ ID NO: 93251 - DNA, 435 bp, Homo sapiens
aaagtgagacacaaagtcagtgtcagcccagttgatccacaaaacatgaatggggtgcgtgtggttttgagcccagacgagccttccagtcactgctctgcaccaactccatgtcagaccctgtctcccgggtggatgggtgaggccaagccagcccccagcctggagtgagtttcctgatgcatcccaattcttaagtccccagcgtctagactccggttgtcccccagcaagacccatggcttggggaacaaacccatttcctgaatgccttactacatggggagcaccatctgagactcttacaggcagaattgtacggcagtcagacagacctgggtttgagttctggtcctgccacttactagccatgtgacttgagtaagtttacacttccctgagcttcagtttcctcatctgtaggatggggataac

SEQ ID NO: 93252 - DNA, 436 bp, Homo sapiens
ggagcacatcagatgggaactgaggggacccaggagtgtgatttctttatagctaataagccctggctttggagccagacagcgctggatttgaatcctggctctggtacatattagcttaggtgatgaagggtaagttacttcaactttccttgcctctgttattcacattttcaagtctgctatataagattaagatgagaaataaagcatataaaatgcctgactcattgaaagtgttctacaagtggtagttacgaccatgatgtaactcattttacttagcctttctttaattgtatgtacttccctgaaaggccatgaataaagttcagatttggatattgaatcatattttccacagacttcaattcaggtttcagaacatattcccaaagtaaagaaaatgctgccactaagactagataaaacccac

SEQ ID NO: 93253 - DNA, 458 bp, Homo sapiens
cctctcctaccagcttaggcagaggacttagttactatttccaatagatgggagccaaggaaaagacaagcatctgtgatgtcatgtctcccccaaacgggtagctgcctcaccagcctccattagagacatcccccagagtaagaaataagaaataatcatgagtagaatgagaaaaaaatgcagcttcctttatctgagaaaaacaatagtagctcaatgctgtggcctaaagggctttgaaaataatgcaatttctgataaaaataaatgccattattcttgcttattgtcactgttttagtcaaataagattttagcaagcatatttcaaattgttctaaatctaagtaaattggtaattaaatgctatcattagaaagtattttaatatcagaaaaattggaccataagaaagttagtttacccttgtattcatatatacatgtgctttgtgc

SEQ ID NO: 93254 - DNA, 189 bp, Homo sapiens
gctcctgcctttcggccacttcagcaggtccagctcctgcctgccagtggcctctttaggcccagctcattcctcacagcggcctttccaggccccgtttttcccttccggcagcctcttggcctctaatttgtttatcttttgtgtataaatcccaaaatatggaattttggaatatttccaccatta

SEQ ID NO: 93255 - DNA, 535 bp, Homo sapiens
agaagaaaataattacgaagtatgcaaacaaacttaaaaggaaaaaaatgtattgctcacacctgaaccccacacagcatacagctgctttattagaatggcattcaagtaggaacgtggaagaagctgtgtccatagtggtcgtgtgatgactccagctcttaagcaaaagcttcacataatgacagtcagaatttgcccagtcatggttcaattttatactgttcgtattttttttaactagttttaaagtctttattattaaaattcctgaaggaaaaatactattgagagttggaaatgatgctgtatctacaaattaaatcataatccctaattaaaggatttcatatatacagcttatgttttagagtttcacattgtatgaaagttgccatgtgtgttatctatgtatttactttctgccatcctaccgtcattattcttgcagatcaggaaattttacgtaaattagagaaggagaaaatcctggtgttcacgccatcccggcgagtccaggggaggagagtggtgt

SEQ ID NO: 93256 - DNA, 8429 bp, Homo sapiens
ccaggcttgataactaagactcacagacagctctgcaggtctccctgtttagagcctcacatactcaagcgcaatgaaattttgcaagactttaaacctgaagagtcccagactacatccaaggaagcaaagaaaccacctgatgtggtgcgagaataccaaacaaaactggagtttgcacttaagttaggttattctgaagaacaggttcagcttgtactaaacaaacttggtactgatgctttaatcaatgatattttgggagaacttgtcaaacttggaaataaaagtgaggctgatcaaacggttagtacaattaacactataacacgggaaacttcttccctggaatctcagaggtctgaatctccaatgcaagagattgtaacagatgatggtgaaaatctgagaccaatagttattgatggcagcaatgtggcaatgagccatggaaacaaagaagtattttcctgcagaggaataaaattggcagtggattggtttttggaaagaggccacaaagacattacagtttttgttcctgcttggaggaaagagcaatcccgacctgatgctctcattacagatcaggaaattttacgtaaattagagaaggagaaaatcctggtgttcacgccatcccggcgagtccaggggaggagagtggtgtgctatgacgacaggttcatcgtgaagctggcttttgagtcggacggtatcattgtgtccaatgataactacagggacttggctaatgagaagccagaatggaagaagttcatagatgaacgattattaatgtattcatttgtcaatgacaagttcatgccccctgatgaccctcttggcagacatggccccagtctggataattttctgaggaagaaacctattgttcctgaacacaaaaagcagccttgtccatatggaaagaagtgtacctatggacacaagtgcaaatattaccatcccgaaaggggcagtcagccacagcggtcagtggctgatgaactccgtgccatgtctagaaatacggcagccaaaactgcaaacgaaggaggactggtgaaaagcaacagtgttccttgtagcaccaaggctgatagcacttctgatgtcaaacgaggtgctccaaagaggcaatcagatccaagcataaggacacaagtctaccaagacctagaagaaaagcttcccaccaaaaacaaattggaaaccaggtctgtaccttccttagttagcatcccagctacttctactgcaaaaccccaaagcactacatctttaagcaatggccttccatctggagttcatttcccacctcaggatcaaagaccacagggacaatatccttcaatgatgatggcaaccaaaaatcatggaacgccaatgccttatgaacagtatccaaaatgtgactcacctgtcgacatcggatattattccatgttgaatgcatactcaaatctgagtctctcaggcccacgaagccctgaaaggcgtttctccttagacacagattatagaataagttccgtagcttctgactgcagcagtgaagggagcatgagctgtgggagcagtgactcctacgtgggttacaatgaccggtcctatgtcagctcccccgacccacagctagaggagaatttgaagtgtcaacacatgcaccctcacagccgccttaatcctcaaccgttcctgcagaatttccacgaccccttaaccagagggcaaagttacagtcacgaagaaccaaagttccatcacaagcctcctcttccgcacctggctctgcacctgccgcactccgctgtgggcgcccggtccagctgtcctggcgactacccctctcctccaagttcagcacactctaaggcaccacacctagggaggtccttggtggccacgagaatagacagcatctctgactctcgactttatgacagttctccttcacgacaaagaaagccttattcccgccaggaaggcctgggaagctgggagaggccaggctatgggatcgacgcctatgggtaccggcagacttattccttgcccgataactccacacagccgtgttatgagcagttcaccttccagagcctccctgagcaacaggagccagcctggcggatcccatactgtggaatgccgcaagatcccccgaggtatcaagacaaccgagaaaagatttatatcaatttgtgcaacatcttcccccctgaccttgtgagaattgtcatgaaaaggaatcctcacatgacagacgcccagcagctcgccgcagccattttagtggagaaatcccagctgggttattgaaagatgatgcatctttgtggtgtttagtagttttttgttcagctcaaatgctgagggaggtttgctacaatagcacatgtgatctccttctcagcaaggaggttatatagtatccatttatgtgaaatactgtatcatggaatctgtatgtatagccccacatggtggaagtatcacgggattgctttacatttaaactttttttttttaacatttcctttttaaagctatatccttggctggaaatttttccagtttgatttaatagatgtatctgtgatctttgatattaatctttggtgcatcaggggtttatatgcagcactttttatccttgttttgtgttttattaacttggtgtttgtctatcaattgcaagcaattacaataccttcagaatgtgggacatttgactagacctagcaaactgttttttcgagccaagcttagttagactcttttacagctttttaagttatttttatttggggaaagtgggcttctttgtgctataatcattatttatagaaacaaagttatactacagcactgactttatattttaaacagaatgtaagttaccagttttatgttgaaatgtgttacagtatatatatattagaatgatttacaatatggcacttttcgatgtgttatttttgtttggatttttttttctgttaagaaattagttaatttaatatggtcaatttaaaagaaagcagatgcaatcaatggaaaaatgtttccattttttaaaaatgaataaggcaaaagctgtaactgttacaggttagagctttgttatccagctatgatgtgcttcttgacagtagaagtggaattgaattcctagatttccattaacctgtatttttaatatgtctgtctttttgttttggggcacaacaatactggataaaataaccctttcacagcacttgcctgtttttaatgaatctaattattcacaatgcaacttttatatttaacatactctttagctttcctgctatttatcaaggctggcctgaggtgggtttatgtgttgaggttatgcaacatttcttgatactgcactatagagaaatggtgatggaggagttgtaaatggtaacttaaaatttttgtaagatattgtatattttccattttcctgaaggtagttttcttgggggggcctgttatattattaaggccagactcttgccacaaatagtgtagttttagatacagactaaggtctgttctagtattagtaagggatatttctggtttcaaagtcatgggttttgctagtggtgaatacatttctgcggagtagaagatagattttgcagtcagtggcagacagttgtgtgattgacatcacttgactgttgcgtccaggttttgaattgtacttcacgtaacagatgcattcagatctttttctgtagtctgcttagatgccctggctattctgattatcctacatgctacagtttgaagtgaagccctgaaaaaccagaaagtaccttttactgttgatacaaattgtatctttttaactataagaactattttgatttgtagatctagttaaaacacaagtatgtaactatgattagacttttgggcaacattttatcccttatttaaatacaaatttttaaagtaaaattgaggtctagaatagattagaaaataaaaataacaatttagataaatagaaatgtctgtcttagttttatataatatattaaaacacagtaaataaatttattggcattttctttctcctaaaacttacctagtgtgaacttaaaataaaggtaaaatgctgcctgaaaataatgtccaagcacctttgactaggataacattttcactacttgtgtgacactgtgtgttgcacgaagtaggatttgggtatacagtaaatgcttctaaaaggcattgtgcatattgacataaccaataatctgaaccgtgttcagcaaacttaattcaggaaagtggtattctacacaattattgctgttgtgtttgaaatgagtgtggcactcatctgtatccagaaataatatgggtgaggccacacaacccattctgagtggtgtctgtctgaaagcaaccctactcgcatgtgaaattgttctccttgatttggtcactataaagcaagtttaaatgtagaggctaactcagtgccaaaaacagggttacaaatgtgtagtatcttttattttagtcatattctaagacttctttttagtatgaaatcacttttaaattatacatgtaggttttgcttccattttcttcattttaccattttaattatttgaacattcgccaaattttacatttatttaaatgagatcttaggtgagatgtgtgtgacactttgaatttgaccttcttgtgttattagctgactatttgtcattgcctcatggattttaaattatgggaaaatagtgtagccagctgccacctctactgaagtgagtagctctgaactacccacactaaatccttcagtgtaattaattatgagtttaaaaatagcagttttcttatgtgaagaggacagtttgtcccctttttttgaagcaccgatgttgcgttcagagctgtagaatgagataattggcagactttaggtacagcaaattcttacttatctaaagcaataagtcaaaggagtccatcattaaattaaatccatagctgatcacaagccttcattttagccaaaactttctctctaaccaaatcttttaccagacttgctaataaataaccagagagatgtgttaataagtgaagttgccagaaatggtcaactgatcggaaaaaaaaggattcagactggagtattttgcccctgaataattgacagttgactgtgctttacacagtaactagccagtctgttgtctctgtgtcttagtccagagggaatagtacccaattggccaaatactggcccttagtatctcctcctttcttgcatgggatacagacgttttcagtcttgtttttatgatctctctctatatcctgataagagtttgtcattgacttacacatttggaagaaatgcacaccagtgtaatatatttgatactggtggaaacttgaactttgtgtttttatgaaaattcatttatgagaatatgtaatataactgaagagtattttatgtatatctatatacacaaatatgtatttgttatgaggtattaaaaacaggggttggggggagtgcttctgatggctaacttttctctaattaaactatgtttctttgagttgtgaacgaccgagtctggggtctggacggccaatgataagatttagaaccacttggatggaaagcagttcttcactggttttattcttggtattttcaaagaattattttgatatttttaatagaatgtgtaattttaaaatacacaaaaaacttaaagtagtattgattatacaaataattatttaacatgtcttatggatgtatctatatgtatatagacagtaatatatttataaaacaaatatactttgcttatgttatagctcttagtttgtgacaggtgggaggatggctctgggtgtgtgtgtgtgtgtgtgtgtgtgtgtgtgtgtgtgtgtgtgttttgaaaactctcaagctgttttccctctgatttacaatggtatttactttaaagtatgtttggttttcattattctttttgctctccaacttccttattcaagataaaataagacatacagttttctggccattctgttggtgtgtggtgcacccattttattgtcatctaactcctggagaattcccacgtgacctgaaatcaaacagattctggctggacatatgcttatgttccaaatatattaaagatgttaattcagctaacagttaagtttccaaggtatacaccaacaaataaaatgaggtattaaaaagagatggattacacacatgcattagaataagagaaaacagtagtgttaataaaagtaaagaaacatacactatcttagccccctagggcaggggttgactttttctgtaaaggatcagatagtaaataatacaggaatcatatggacttcaaatgccattgtaaaaactactcagctctgcctttagagcataagaacagccacagataacatgtaaattagtgtggctgtgttccaataaaactttatttacagaaacgggaagccggtcagattgggcctgtgggccataatttgctgatctcaagcagtaaatcctggtatatgttaatagaagaaatcataattgcatttcagttgacattaaaagaaaatctggtagtttttgatgtccttcaaaagaggattgttagacattgatgttaaagcatcttaattcatttgagttttcttacctgtttacacccattatttattagagatatttcttgtgtttaaccacaaaaaaaagcactctgttaaaatgttttaatatgtattgaatttctttcataaacttttcatttctgttgataaatgggaatcccttaccaaccttttgttttttaaaagtctcatagaccaaaaaaaatctgttgcagcatttaattagccacagatacattttggctgcatttaccagttacatttttccattggttttggcttctaataaataacatatctgccattctttaaaaatgattttaaagaagataaatatattgtaatttcacatgctatagctttattctgtaagattaaaaattgtgactagtataattgtagctataatgtgagtggcatgttacaatgtaactctttatgagaaataaaatgtatctctgctttgtctgtccagatctttaggatttttagatgccttgggactgtccttggtgaatgatattcttcatatgatcatatgtaattttgaattcgttggaagtacacgctgctgagcatgtttattcacagtgctttataccgggtgttgcatcagtaatcattttcataagaacatttaaacagcatgaacatcatcatccacttaaatagttaaactttcttttaaaattggaatgcaactgtaggttttaacaatgtttattgttttttaagtggttactttgtttttccttaatactttctgttaacttaattattactcctgttgcagtgttactgttatgtattagaagtggcttttccccctaagatccttagtcttttaaagacaatttaaggtattggccatttggcagtagaaaatgtgcatgttttaacttggttttataaaatctgtaatgtttcacttcttgaaccatgtaccaaatttgccaattttctgtccaagtgtttcagatgaataacaaaacgctgttcattgaagctttcgccacctttcttaaagcagcgtatgttccaagggaaaaaggcattgaaaagcaatcgtttgtttttatgaagaataggtgttcagattccttcagtttttttgaaattagaaatttcttaccttatgtgaaatattcacaaacgtgcacacttctgcagagacaaagcatttcactgcacgtgtaccaggttattgattttatcttttcctttcagggttttgtcctcccaaaccagagtcatatgctgctagtagaattttttatttgatcctgcgaacttttcttataggaaaagtaaggcaaaggatgtgtagtgcaaccatctgataaactagtgtgattgtatttatcctctgttctgtgtatttctgtaatggaatctttacaattcccaaaacggtattttagacctactggaaatctgtatcgaaacagctatgtgattctgccactgagaaaaaaaaattttttaattcgtttttcttatgctggtttgtttttctttaatgaagaaattgatctcatatggcatcatagatgctaaataaataaaagcatcatacttctctagtttgcctgcattcagtggctaacattatgagcattgtgtaagataaacacatggtcagtatcaatgtaaatgttagagccatgattaattcctatgaaaattgaaattaaatgtcaaagacaactagacat

SEQ ID NO: 93257 - DNA, 441 bp, Homo sapiens
gaggtgaggggggcgagtcctgtcaccaaaggggctggactttctttcctggcaggctcagccgcacctgggatgtggaaaccttggcgggggcgagcacccaggtcattttcacaagcagcaaaacaaaaacaaaacttcagctggtttccaatcactcaccatgctgcttctttataaatcattttaaagtgatttcactaataaaattcagcatgtacagcgttttatttttaacgtgcacattttaaagcataatgttacatacattatggaaaggtgcataatgagagaaatcatttccataatatatcaacttcctggctaaaaattctttggataaaaatccaatatttatttgatatcaatggacacctatgtcaatttggttttcactgagggaccttagagggaaactttgaagtgggaagatggtctgtg

SEQ ID NO: 93258 - DNA, 335 bp, Homo sapiens
tatacatgttatctgcagatgctggaaggaagaaaggaaggaagactaaaggaaagaaggaaggaagacaaaaggaaggaaggcagggaggaaggaaaaaacaaaggaagctttaaataaaacttaattaactttatttaaagaactgtaaataaagcttaaataatgttatataaataacttttaataaattttaaataaagttttaaatgaaaaaagaacattgaaattttgctcaacttccctgtaagtcagtgtaaggaaaaaaaggaaaaaaaatcctttaaaaatggctccaaaggacaaaagtggaaacctggtgttattcagaatat

SEQ ID NO: 93259 - DNA, 257 bp, Homo sapiens
aaggggagaaggggtcacagcactggtgtggataggggtgagagatgctggcacccagatgccgtgatctgccatgggcagggccggatgacaagcagggtgtgctgagtctccagaaagatggagaccctgcccaaggtgaggtggagaggccaaggctggggaactgcagcggggagtccatcgtacagatgttatgtgtgaaccacaggagtaactgagggggagccagagacaacatctgccctcgccctggg

SEQ ID NO: 93260 - DNA, 179 bp, Homo sapiens
cctcccaaagtgctggggttacaggtgtgagccaccacatctggccttacagccttcttctgtgtgtttatgtgcatatatgtagccatagggaaaaaaatcaaaatcctttggtgttctttcttattttttcaaatatttcacctgccccattctctttcctttctccttctagtact

SEQ ID NO: 93261 - DNA, 258 bp, Homo sapiens
ccaccattcctgggtttgaatcccagctctgcactaactcattggttaaatgagtcagtatacatatgaagcatttataaaagacagtgtctgggacatagcaaaaactgtaaatgatattttcattataccactagtagtagtactatttctttcactttgagttgtctgttcataccctttgtccatttttctatcttacaagttcctttttttttttctgagatggagcctcgctctgtcacccaggttggagtg

SEQ ID NO: 93262 - DNA, 1058 bp, Homo sapiens
aaccaatgttttaagatggaaataattgtctgtttatgtgtatatgtttgcttttaaaattttacacttttagacaaattattatttttttccgtgtcataaagaaatttcattttaatcctcattcctctaaaagaatttttatggttttatcagcatgatacttacaaagagcatatccccctttagacaaattattttaggcagccaagtttagtttatttgggtttcatgctataaattatgctaatttatgaaggttatttcttgttggatgcttgtagtattcatataatatttaaatgcaaaagagaatattaatataaagcattatcaattaaattttattcaacctgataatgttttctgtgatacatgatcatcgtaggtgtataactaattttgcattaccatttatgagtgatatagttgtgttctttttaaagtgtgtatgcaattagtagtggttatattcatttcgtgaaatctctttgaaggtcctttgttttaggagtgtaagtaattttcattataatatattcataaatttttaaatctcatttccatatgaaggtaaagatggggtcattcttagaatgaaataactctattcagaaggacgcagtcaaaagctaggaattcatttgttatccctctgtagttgttaggacaggagcactaatctggccaactaacctttaaaagaacatgcaaagtcaaagatgtcaggttgtaccagtaaatattcaccggcaaactttttatatcaaagactggaactttcgaagatgctcctgggacttagtgtactctaacatctattaatccctggtaccttaggtgacttgtcatagaagtgctacatttacaagtagtatgcaaggaggcccaagaggacaaattcagttaaaggtcaaggaagcaattaacgttctctacttttccctaaagaacttccacagcaaatgttgccctccccctgcatccccaatcttaccaaggcaagtgcatatagtgaaatggaagttaaagttcaaataaaacatgtttccaatatt

SEQ ID NO: 93263 - DNA, 360 bp, Homo sapiens
tagatagaattcacatgctgtgagattcaccattttaaagaataccaaatcagtggtttttatttattcacaaagttgttaacattaaaatttgacctttggaaatataaggaaatattttagaaatctgtagggagtatgaagggtcattttttattttaaattgtagaggtggtagaatgacgtttacttcctggatctgtttttggtcatggctgcagttttgtttggagtgtacatcttctgggtgttctgctcagggagtttatttagtgttgctttcagtgaaattgccatcccagtcctgtctgaatctataactgccacactgtatggtcactcttagagacatgaatggat

SEQ ID NO: 93264 - DNA, 339 bp, Homo sapiens
gagcatagataacttcttcacagcaatatcagttgatgaaaatgcacagaaagtaagaggatattattaacaaatttcaaaaagtactgagatcccaccaagttgtttctccttgcatttgtgtgtgtgtttgattctggtaagtcctaatctacagttttttttaagagcagaagccagcagttgcctaaggtcgatgtgttagggtgtttttggcacaggcctagtttccttgtcttttcgtacaatttgaagtaatagtatcttggtaaatggaccttttatggaagttaaaagcaaatgtataaattatcctttgaaattgttacatattgagag

SEQ ID NO: 93265 - DNA, 83 bp, Homo sapiens
gggaattaagaagagattttattttttgctataatcttctctgttagaagaccgttcctactggtaggagtacaaagtggatc

SEQ ID NO: 93266 - DNA, 729 bp, Homo sapiens
ggccactatgcagggctgcagggactgctgtgcttcccttgctttccatgttattgctctgaagataatcatctcacttaatccagatgagcacagtggtgattgtaatcacatggtctaaaggaaaatacatttactgcagaagtgaatcagttagtttgctaattaagttagttttataagtttattggttttattttttcttagctgaaatcgtgaatttgaaattttatgattatttttcatggttcaataataggaaaaactgttgaaatattaagtggagaaaaattgttaagcttatttaaattcttctatccaaataatacatgcatgtggtttaaagagccatgtagcagtaaaaggcttagaaggtaaaatagcagtccctgccctaccccgtttcacagtctcccttcccagaaataactacttcctgttcttctcactgtaattctagttatttgtatttcttcattttcaaaataaaaaccttctatcttttgagtcatttattttagacatgtcacttggttctaatttaaaaactttgactttattaaaacaaattaaattcaccctgtcttatggtgctgagtctgttggttctaaattatgataaatgagcatttaattattttttattacctttcctctctgtcttaccacattcttcttcctttagagttatattacaatttttggttaaatacaaaatgagtttttaca

SEQ ID NO: 93267 - DNA, 341 bp, Homo sapiens
agattaaatgagatcacatatgtaaagggcatttagggtaatctgaagtttctctgcagtttctgcatcttggcctaggatttttaatcccttaggaaaattctgtctatcttctgggtagtttagggttagtatggctcagagccctaccctggtcctcttgtcctgacattaattgagttagaaataaggtagtgctcaatatcatgctatataccactgctcttggcacccttaaatccagccatactcaatacccccaatattcccatttgattcactaatgactcaagctgtcaagtacagtagaaaaggtaactttttttttttttttttttttt

SEQ ID NO: 93268 - DNA, 375 bp, Homo sapiens
caggaatgagccactgcacccagccttgagtggaatattatattttcagatatgaccagttttaaagaactaaagttgactatctggggaactcgcccccaatatttcaacgtaggttctttctattttccctaagcattggctggctgagaaaaagaaagagtacaaagagaggaattttacagctaggcttccgggggtgacatcacatatcagtaggaccataatgcccccctgagccacaaaaccagcaggttttattaaggattttaaaaggggaggggttgtacaaacagggagtaggtcacaaagatcacatgcttcaaagggcaaaaagagaacaaagatcataagcttctaaggccaataaagatc

SEQ ID NO: 93269 - DNA, 524 bp, Homo sapiens
ctaacagacacatccaaccttgtctttcttccaaggtgagaatcaccttttggccaatgcaacttgcttcctccttattttttggactcagccacctcaggaagcctcaagtctggcatgatagtaattttccctagattttctcccacaaaattctattctcaagcagatgtaagatctataataaatacctataaaattgctgtgaaagaaactaatcaaccattgcatttttttatgtgaacttttgtaatggagaaaaagttaatcaagaataaagattcaagcccaggtagtgtgcatctatagttgcagctactcaggaggctgaggcaagagaatctcttgagcccacgagttcagggccagcctgggcaacataatgagacccccacctcttgaagaaaaaaaatcaagattcaaatacaaagaacagacattagtagtcaaagtgtgataaacttcaaaaaggctatttaaaaaattagttacttttgattgacaaatcataattatatacattt

SEQ ID NO: 93270 - DNA, 208 bp, Homo sapiens
catccgcatagtatttacatcatgggtataggcaagtgctacaaatcaggacttttccttggggatggatgtttggagctagtttaccagcacaccagtgggtaaaagtgaacaaatacttttttgatcccacagaatcttaaaaaatactttacttcgaaaatgtctctactaagtaatcatatatatatatatatatgtatatata

SEQ ID NO: 93271 - DNA, 475 bp, Homo sapiens
gacctggagcagcaagaactcccactcattgctggtgagaatgtgacgaggtacagccaccctgaaaagcggttggcagttccttccgaagctaagtatactcttaccatacaattcagcaatcacactccttggtatttacccaaatgatttgaaaacttatgtccacacaaaaaccaccccacatatatttatagcagcctttttttccttaaagaccagtgcgatagtattagcagctttattcgtaattggcaaaaactggaagcaattaagatgttcctcagtaggtgaacaaataaaatgtggtatatctggacaatggaatactagtcagtgataaagaggggaaagctatgaacccatgcaaagaaataagttaatcttaaatacatattgcatagtaaaaagcctgacaaagctacctactctatgactccatttacctgacattccggaaaaagcaaaatagatt

SEQ ID NO: 93272 - DNA, 356 bp, Homo sapiens
taacatttgaattattaaaaaagaaaaaaaagctgtagttttataatagaaaatatataagatttttaaaatccaggaacatcaataacaataatactaaataaagatcttttttgaggaggtaagcccacaatatttattgtagctaataggtaggttaacagagtaaaataggagaacttaatttttctaatagtagaaccaagtcatgttgaaagtgacaggaggaatcggaaaagtggaaaagtgtagtggaaggtgcccaacatgtgaagtcaagacaagagcacctctttcatagtttagctgtgtgacctagggtatttaactttgcctcagttttgtcagctttaaga

SEQ ID NO: 93273 - DNA, 434 bp, Homo sapiens
gtagatttgttcatattagcttctttatattttcagaggaagcagccataacactttggatagaacacatggcactttggatagaacacgtaacactttggaagactcctttggtgtcttcatttttgggggggcaggaaagacagtctctgaggatgaggatggtaccactacccacaggacggaaggaaaggtaaaaggaagattgaatcactcttcaacttccttctggagcccagccctttccacctgctcaggggctgacttctccggtatcatcagccattcctttgtttcaagagtcatggaccgtatactgaagatctgtgcagtttaggatatgtaaattatatctcagtaaagtattagaacacaaatacacacaaaagcctttctgtctttctcttcctctcttcagccagatttgacagaga

SEQ ID NO: 93274 - DNA, 433 bp, Homo sapiens
cgccccccgggttcaagcgattctcctgcctcagccccctgagtaggtgggattgcaggcttgtgccaccatgcccagctaatttttgtatttttagtagagatggggtttcaccatgttggtcaggctggtcccgaactcctgacctcaagtgaactgcccccgcctcggcctcccacagtgctgggattacagatgtgagccaccacacccagtctcaaagaactattcttacctgttttctccaatcaactgatttattatctcctgtaaccatatcatcataacttaaccagagggaacggtgagctttttgacctgttcctcattggtagctcgcccttcaagatatatggaaggacattctggaaaaccttttgttatgaaaattgtgtcctgttatttgaacatatttcagtggagggcattgtct

SEQ ID NO: 93275 - DNA, 348 bp, Homo sapiens
ataagcccaccttgggtttgatctttggcctaaggctatttttaatttgccagatctttgccatctgtaaacccagcaagccctggtttctttgtatttcctccaaatttttcttgaaaattaaactattctttttaaaatcatgtatctgtatttttgttcttaccatatgtagttataagccaccagttgacactttcaacattcttccgggaactctccttagctaaatccactaggccattaggtttattttctgctttccacatcaccataggcaatactggtgttaaactttccatcattgcagaacatgggtccctttcctccagcttttaataccatttc

SEQ ID NO: 93276 - DNA, 685 bp, Homo sapiens
gtttaaaagttttgtattatgtcatacaaactgtcttcacatacaagtgcattaaaaaaattatccccccctcctcctccccaaacatcacagtagaccaattcttgctaatatatgacaaagttaaaacatatgtcccctctgaattctaaacagctaattctagacactaacatctggatcttataatttaccggtctggtatggacatgaacagttccagtgcctttcaacttatccctgaatttttctcttctcaaagttctaggcagtaattttaatgccctcaaattagataaagctgattacttagagcttataaattagctacactttatgacactaagaatagagctatgacttatgcatatcatacctgtcaagctacctagcaccacgaatagaactaatattaatggatggactaatacaaggatctaatatatgacagtgatagtcttaaaaacaccgatttgttattttccttatatataatccaaattcctttctatccttctggcaatgtttctactgcctgactaccttaaataactatatagtgtcaatttcttgcttgggccaggtggtggctcatgcctgtaatcccagcatattgggaggattgcttgagcctaggagttcgagatcagcctgggcaacatagtgaaacctcatctctatttaa

SEQ ID NO: 93277 - DNA, 864 bp, Homo sapiens
gtttgttttgcattattatatgcctagaactgttagattattttccttaagcaaatacagtcagagtaaatttttggagatgtggcttaatagccagacgaaaagccataaacctaaaattcctagtgtcagtgtctttgctctttattaagtctctagacaatggatacagttttgtcatgaaggcttattgggcagtaggagtattgtctcttaagacacagagatgaagaacttaaaataattaacttctctaactagaattactgtatgctcaatgataattattaagaatattaagcatttaagagaacaaaatttatatctgtccctcgaaaccactattaacatcttatgtgctttttttaaaacaagaacgttttataatgttatacatacaatgtaatctgcttatttgtaactgtgtcattctacaaaattaaatattttctgatcttggttttaatgcataaaaaaatatccaatagatgtaccttatgatggtggttttctaactgtggttcacaatgcttcaatgagatgtgaaatcagttcatactttgtttttgtttttaaatggaatattatataaaagaaaatgactgtgtttaagtgtattaaggctaaattctgttccggggagatctgattttatttatgtaaacaccatgatatataatgtatttctaactgtaggccatgatcacaacagttgtttgcaagccactgccttaaattaactcttatccttttgttcaacatgcagattgttttcaatgaacattcatgtatataaatcattgtatataactcatatattgtcagggtaaatttctaaatgtgaatcacttggtcaaaagataa

SEQ ID NO: 93278 - DNA, 1971 bp, Homo sapiens
actgattttcttagataatataattaaacagaagcgtgtaacagattaaacattatgagagagaaaaactttattgatcaaacatttggcttccaagaaaagtacctgacctagctcaatattaggtaacattatgaagtatttcctgggcatgataatgacattgtggttatatgataggtgaattatttagggtcgaagtgtcaaatcagtgtctttgtggagggataaagctttgtggagggataggggaaaatgttcgacaattgttgaatctaaatagaaggaattcacatgtttattttaacattctatcaactttttggtatactcttaacaaaaagaaaaaaaacaatgcctgacttagatgtttatatgggtgactcaagctatcaagtaatggataactcctgtgccatataaacagttccaatacactaacaaaaacttcctaatttacttgaggacattaacaaaaacctcagaagacatacctgaaattatgaatcttttgcatcagtgtgatgtctccacttttatttctgattttatttatttgagtcttctagttttttcttagtctagctaaatgtttgttaacattgtttttaccttttcaaaaactaacaatttagttgatttcttcctgtttttctattttttatttctgctctaatttttattctttccttttttctgctaactttgggcttagttttgttcttttttttctagttccttgagatgtaaagttgagttgcttatttgagatctttcttcctttaaaaataggcaattatcattagaaacttccctcttagtcctgattttgcttcatcctgtaagtgttcatttgttgtgtttttgtcttttttaaaattttccttgatttcatctttgatccactggttgttttaagagtgtgttgttaattcccacataattgtgattttcccagttttccttctgttactgatttctaattttagtctattgtgcttgggaaaaaaaggttggtatcatttcagtcttcttaaatttgttcagacttgttttatgacttaatatgtgatctatcctggagaatgttctatgtgcagttgagaagactgtgtattctgcaactgttaggtggaatattcagtatatgtgtgttctgttcattattgaaaatggggtactgacatcttctactgtattgctaattgctatttttcccttcagttctgtcagtgtttgctttatgtatttaggtactctaatgttgggtgtatatatgtttatacttgtgatatcttcctaatgaattgactcttttatcatatgaccttctttgtctcttgggatggttttttatttaaagtctatatcgtctgatagtgtggccacacctgtgctcttttggttgctatctgcatggaatatattttcctattccttcacttttagcctgtgtgtccttaaatctaaagtgagtctcttctagatagtatatagttagatcttatttttaaaattaattcagccactatatgttttttgattagggagtttactccatttacattaaagtaattattgatagggaaagacttactagttccattttgttaattggtttctttcttgtagttgttttgtcccttttgtcctctcttgctgtcttcctttgtgatttgttgattttgctttgatccttccttttttttttttctttcgtgtatcttctataggtattttctttgtggttaccaaagtcttaacagaaaacaacttatagctacagcgaaagcaatttaaaaaaatagacaaacaggactgcatctaattaaaaagcttttgcacagcaaagaaaacagttaagagactgaactggtaatctatggaataggagaaaatatttgcaaaccatgtatctaatgaggggttaatatccaaagtatataaggaacacctgcaactcaacagcca

SEQ ID NO: 93279 - DNA, 134 bp, Homo sapiens
tgtggaatagtaaggaagccagtatagttgcagcactgtgagccagtaggagagttagtggaggtgaggtctgagagctaataggagcttggaagaactgtgactggtactcggtgtgagatgagatgcccctg

SEQ ID NO: 93280 - DNA, 738 bp, Homo sapiens
gaggatgggcagggagagagaaacaggaggcagagtccctccgtaagctttcccaagtgagtaaagtactcatacccagggctttatttgaatttatcacctcttattagtgtcttttgaaatgcgaattagctgattaaccactgctcacagccttccaactgttctttattctccagcattcagcaactttgttctaaatagggtaggccacagtagcccaccagggggaaattattctcaaggttacaagaacagcgaccaaggcaaaattaggccctggcctggatggaatcaagttgggagtgaggttgtgcctggagccaggctctaaccactcccaccccccaacccggtctacacacaaagcctccgaggatgctggttaccctggtgttagtccatccttgcgatgtatgaacagggctctggggaacaagatacacactcttctgccccctaccacttttttgttgatgatcaccattttctaaaaggtttattagttctaggtccctcaggaatgcccgtgcactggcttcggctttctgtttgggacgtgggttcacgtttacgaacaacaagggatggcccctggcagagcctcgttcgcactcgctcctgcctccagtttggcaacacaacacaaaggcggtatggcttgtatacactttccaggctgagcccctattcagagggggctgcagcttgcgcgtaatgggccccctacagacaaag

SEQ ID NO: 93281 - DNA, 449 bp, Homo sapiens
tccacttagttgtgcggacgggggcgggtgggcaggcagtttctcaccttaaaggaagcggaaagaggccagagcttcaacagtggatggcctgttcccgatttctagctatcctacagccatccttttttgcttctgggtagctgtgacataatcattagggctaaaatgtgttatgttgtaaagagagcatcctacacatagatctcaatttccagggcctagcagggggtgggagaaatcagcctatgttgtattttgttgttgttcccactacaagcaagtctcctaaaaagtcgctgaaattggtgaactctttcctgtgcaacacaagaagagtgtgtgtgtgtgtgtgtgtgtgtgtgtgtgtgagagagagagagagaatttcttaaattctaacaaataaatctatagaaaatctaagttttgggtagaagtctgtaaaa

SEQ ID NO: 93282 - DNA, 1283 bp, Homo sapiens
  misc_feature (1063)..(1063): n is a, c, g, or t
  misc_feature (1065)..(1065): n is a, c, g, or t
  misc_feature (1091)..(1091): n is a, c, g, or t
  misc_feature (1106)..(1106): n is a, c, g, or t
  misc_feature (1161)..(1161): n is a, c, g, or t
ctgagaccacccaccctctccaggagcagccccagaggctctctgtctgcctgccggtaggtgttcccacctgacacactctctgggacaggatggagccataggccctcctctggcttggctgtgagtcgggaggatgcctaccgggaagtatgtgtgacatgacctgaaatcccccgacaggtcacctgggagaggccgggagagggcaagcgccacacctgccaggtggcccagctcagcccacctgcccccaccccagagctacctgcagtgggtggtcagggtggggtgtccccacaccctcttccctacccaccccttgggcctgggtaccagctgctcccacagacccactgagcacatgcgtctccactagatggttgcccgtgatgaacggagctcactggccatgaccccacaggcccagctgcacacccaggtcatgagcacggccctgccccacccccataggggccctctgacccctccactcactcatccgccaccaaagctgtggaggcctgtggcagggtctcagtcacctccatcccctgtgcccggaaccaagcccggaacacaggaggtgctctgcaagtgctcgtggggagtggctgccttggggtctaaaggcagagaggcaggaggagcaagggacgggcccactggtgctgacggcagcaccaccattcagcactgagactgaggcttaaggagtccatccaaatgactccatagccgccgcgttcaggctggaaaaggcttttcagcggagggtgctgtaactgtccagctgtgggagaggagataccagcccaggagaagagcagctggccctactgggcctagaagtttgggagacccatcccagcaaggatgggaaatcaagacagatgttgagcatggatttcccagaggtggtgactgcgccgcacagaggagcatctctgcctgggaggagggagagggctcccgccgggctgccagagccgagcaagtacctgcaccttcagccagacacatgctgggcattcttcagatgccatcgtaaggcggaggcctngnggacgtcccagaacacctatggatgnctgcccctcgggctnttctcggccacaccagatgcagaggggctgtgggagcctggaaaagggcttggtnggtccagctgctttgttgttgttgtttttgttttgtttgtttgtttgtttgtttgttttggcttggggcttttcttagaagtgatgtgttgttagaaacttcaaaccagatacaaatatacc

SEQ ID NO: 93283 - DNA, 341 bp, Homo sapiens
ttacagatcagatttggccagtgagctacagtttgccaacacctggcttagactagacacaagagctgatgaggggtggctcagaggacccgaggcatcctcacagctctaaccatcctgccccagagtatgctgcagaaggctcccaggtgggggtgagtggacaggccaggcccagcctccgaggctagccacggcaatgtccttttagggattaagtggtttcccccacagagaagctcatgtaagagcaggccagcgcatggccaggcctcagagggacgatggggtggagatggccatgctagccagaccatcaaccatggccaacaaacatctgt

SEQ ID NO: 93284 - DNA, 409 bp, Homo sapiens
gctgaagtcatgccactgcactccagcctgggcaacagagtgagactccatctcaaaaaaataaaaaataaaaaacagtaaaagaaacaagagtattaaaagcttttcctggaagatacccatttaatgcaaaagagagcaataatggaggaataaaggtacaaaaaatacataagacatgtaaaaatccaaatagcaaaatggtaaattaaaatcctagcttatcagtaatttaatcaaaagtaaatggcttaaacaccctaaccagaaggcaaagattgccagaatgagggtttttattaaaaataacccaacaatactattagagacacactttagattcaaagacacaaattggttgaaaataaaaggatggacaaagatatggcatgcaaacagtaaccaaaaa

SEQ ID NO: 93285 - DNA, 879 bp, Homo sapiens
tccagcctgggtgacaagagagaaactccctctcaaaaaataaaaataaaaagttagctgagtgtggtggcaccagcctgttgtcatagctactcaggagtccaaggctgaagaattgcttgaggtcagcctgggaaacatagcaataccccatgtctacaaaaaatgtgaaaaattagctgggcatagtggtacctgcctgtagccctagcttttctggacactgagtcaggaggatcccttgagcccaggagttcgaggctgcagttagctatactggcaccaccgcactccagcctggtgacagagtgagaccccgtctattgaaaaacatatatctgctgataaatatgtccacaatttagaccagacttagacactgaagttattaccagctccttcacacccacatgccttaactctctcttgccttcatgcattccttcactccattcattcgcttaactttcatccagcagatatctgccaagcaccagctctgtgacagacactgaggctgggggtgccagggagacctttaccaaccggacagacactgccccgcactcctggctctgtggctttctgatagtccgtggcctcacatgttcatttattaagtgtccttttattgattgagtcttcattcattctttctcttaatgtccttattcattcattcatccatcacttgctcatctcactgacacgtctattcagtcttcatatatgttttcattcctttattctccaagcatcctggaagtacccactctacaccatgccagggttagatgctgggattctggcccagcccaccacactgccaagcccatggggacacagatggtgaggacatagtggtaactacttcaccag

SEQ ID NO: 93286 - DNA, 316 bp, Homo sapiens
gattacaggcacacaccaccatgcccagctagtttttgtatttttagtagagacggggtttcgctatgttggccagactggtctcgaattcctgacctcaggtgatccgcctgccttagcctcccaaagtgctgggattacaggcatgagccaccacgcctggcctgttactgttacttttaactgggtgtggattttgaaatactgaggcacctgcaggcagcccaggtaaaactaaattagtaggcattttagagctcagtagagagagaggacatcaagatacgtattaggagttctcagcatataggaatag

SEQ ID NO: 93287 - DNA, 385 bp, Homo sapiens
taaatacaagcaccacttgtcatagtaaaataaagtagcctgccccttatttataataaaattgatttttaaaaatcctattttctgtgtgagattttatgacacagcacatagtctttccagtaagtgcagcagaactgctgcctttctgccaagtgggatagagtaccatgaaaatacacatgtttgagggtcacttagggtataatgctgaatattatagaaccactttagcatgcattactttctacctactgtaattataacattatatgtacctttcattactattaggagcttcatgctgattttttttttgtttgtttgttttgttttgtttttttgtcacagtatgactttccaattaacaaaaagagagatggct

SEQ ID NO: 93288 - DNA, 533 bp, Homo sapiens
ctgcactccagcctggccacagcgggagaccctgtctcaaaaaacaagaacatgattatcaataccagaacctcatactgaggagtaatatttctcttttctggcacataaatttctttccaggccccttagccagctaattaccagaagttcaatactctctgttaattctatccacctgccatttttaggcccctggtagtggtagaatgtagagtgacttaggacagagttctttccttctttgccaagggctgtggagattaatgtccttcactttacacttacccctctctttcctggcagttcttctagccaaaatgtaaaagcacacacagtagatatatgggaacaatgcacttctgctaaaatttgctgtgtacctaaaacttctctaaaaaattaaaagttttacatatataaagatgggatttataaatataaatttatatataaagacggggtttataaagatggggtttcaccatgtttgcacaggctggtcttgaactcctgggctcaagtgatccacc

SEQ ID NO: 93289 - DNA, 523 bp, Homo sapiens
aaattaacctttacacatctcaaaccaaacaaaaatcaacctgaaatggatcacagacctaaatgtgagagctaaaactgtaaaatttctaagataaaatatagcagaatatctttatgacttaggttgaggagagttctgagatacaactttaaaagcatgattcataaaagaaataaattgtacttcatcaaaatttaaaattttgcactttgaaacacttttttttgggagggaaaaagacaagcagcagactgggagaaaataattgcaaatcatatatctgacgaagacactggatccggaatatataaagaactacttcaacttaataagaagatgacaattcaaattttaaaatgagaaaaatatttaaatcagcattttatccaaaaagataggtgaatggctaacaagcacatgaaaaatgtttaacattattagtaataagaaaattaaaaccacaatggcataacaacactcaccagaatggctataataaaaaaaaaagatctgttggtaa

SEQ ID NO: 93290 - DNA, 567 bp, Homo sapiens
tccttattagtccatgtccagaatcagtaaatgtccctagaaaataaaatggccacttacctcaggaggactcctccctctctggaattcccattcacctagtccttattgctttcatagctctcacatatctttaaatatgatctttataatttttccatctttttctagttgttgcaggcaaagttttaggctgccatgacctactatatcctatttagaagtggaagtctctagagagattttcaaaattacagatgtgtggatattagcttttctcctaatttaattgaattgtggtgagagaaggtgttctgtattattcaaatagcttaaaatttgctgaaatgggtttataatcaaatatatggtcaaatttaatagttcatgtactcttataaatatgtattctcccattgttggatgcaatgccctttgtatgttcatgggatcaagtttgttgactgttttgtgtaaatctatatgcaaaatcttgatttttgtctacttgatctgcttctgaaagaggaacaataaaacttcccactgctacggtaaaaaagccaa

SEQ ID NO: 93291 - DNA, 522 bp, Homo sapiens
aaattaacctttacacatctcaaaccaaacaaaaatcaacctgaaatggatcacagacctaaatgtgagagctaaaactgtaaaatttctaagataaaatatagcagaatatctttatgacttaggttgaggagagttctgagatacaactttaaaagcatgattcataaaagaaataaattgtacttcatcaaaatttaaaattttgcactttgaaacacttttttttgggagggaaaaagacaagcagcagagtgagagaaggtgttctgtattattcaaatagcttaaaatttgctgaaatgggtttataatcaaatatatggtcaaatttaatagttcatgtactcttataaatatgtattctcccattgttggatgcaatgccctttgtatgttcatgggatcaagtttgttgactgttttgtgtaaatctatatgcaaaatcttgatttttgtctacttgatctgcttctgaaagaggaacaataaaacttcccactgctacggtaaaaaagccaa

SEQ ID NO: 93292 - DNA, 371 bp, Homo sapiens
aaatcatacaagtcagaaactctgatgtacattaaaaaagcaagagcatcagagaataagttaaggtaaaataaacacgtttatttttcttattcttaatggatctgatagataacagtttgttcaaataataataggcacacacacatttaatggattgaatgccaatctacctcttatattcttctccttccctttcccccaagtgtatatcccggccttaagtctgctcagtaatttccagcagcaaaatgttcttttctcctttgtgttgctaatttaaagcagtagttgaaaatgactgtatatgacgggaagaatttaatttgcagtcactccactcttcccctcactttctttttggatgatag

SEQ ID NO: 93293 - DNA, 231 bp, Homo sapiens
gtcctccctgattctcaacctttgcaacctgccttccgtcactgctaggtccacgtaggcttaaccttgatcttatatgtaggaccggtcttcaccttaagcaagagaaatgtaagaagtgctttcccaactcagttgctggcccagctttggcctcgtgttccctttctgaggactgacctttggtattgctctggagtctcatatcccctttggccctaactgaccacg

SEQ ID NO: 93294 - DNA, 346 bp, Homo sapiens
ctgagctcaagtgatcctcccacctcagcatcctgagcagctggaaccacaggcgcacaccaccatacccggctaaattttttgttttttttgtagagatggggtctccctatgttgtccaggctggtgtcaaactgcggctcaagtgatcctcccacctcagcctcccaaagtgctggattacaggagtgagccaccacacccagcctaccacttctaactgtacccagttttagtgtagtggttacttcattatctgtaaaaatgtgtgtatcttgctctttttgtttatcagtattaaaccttatctctcaacttcctgttttgatggaaaagaatcaactcc

SEQ ID NO: 93295 - DNA, 352 bp, Homo sapiens
ggttcagatgctctagaatatctgtttacttcctcttgaaggaaggcagatggggaagaaggaaaatatcatcagatagtatttggaacaagacttccagccaaccagtggcaacttcttggaggcagtctggtgaagtggctggaactctggcattagaatctgagttttgactgtatgtttctgggcaacccttggtttcctaagctccagtgacctctcaagggtgttgtgaggacagacatgagctggtgcctgtgttctgtaccaggttgccataaagaatggtgttctttgcgtcttgtcattttgaactcctcttccaaaggagcctgggaaaccctctgcttac

SEQ ID NO: 93296 - DNA, 145 bp, Homo sapiens
gaaaagaaaaaaaaggaaagaaagaaaggaaggaaggagagagaaagaaagaaaagaaagaacgaaagaaagaaagaaagaaagaaagaaggaaagaaagaaagaaaaaaaaagaaagaaagaaagattacataaaatttggaaa

SEQ ID NO: 93297 - DNA, 493 bp, Homo sapiens
cttgaaacttagaagaaaattttgaaattgataattgtggagaacttcaggatgtgaaatatttgaatcttctgtctagggcgttcaatatttattgatgaaagtcttgtatgaggtaagtaaccatgacccaagttataacttacagcagcttttgtgagttatgcgaggtgatagggccacttgagagagcccctacagagttatagggccagatagcagatgttttattctttgcaggtgaaagcagccatagtaagtgaatagctctggcttgttaactttgctggatttggcctgcagactgcagtttgtcaggccctgcactacagattgtggaatcatcatttcatttatctcagttgcagcatcgaggtaatcagggtcctgatttcataattgaaacaggtggaatgattaacctgcttaagatcatacagcttaggatgtgcttgagttaagacccaagtcagagtggtgctattataccttc

SEQ ID NO: 93298 - DNA, 573 bp, Homo sapiens
ccgtgattagaggatcccgcacgaggggtgcccaggaaacttactctcccacctgctgccccatccctcccctcttcctcaccataggcagagagagtcatagggcatgttgggaagcagctacgcgctcctatctgtgcattaaggaagcacaagtgagggcctggacatagagacggtccctgacctacgatggttccacttaagatttttcaactttatgatggtgcaaaagtgataggcttcctgtagaaactgtacttcaagtacctatacagccattccggttttcgttttttgttttttgtttttttttgtttttttgagatggagtcttgctcttgtcacccaggctggagggcaatggtgcaatctcggctcactacaacctcctcctcccgggttcaagtgattctcctgcctcatcctcccaagtagctgggattacaggtgcctgccaccacacccggctaatttttgtatttttagtaaagacagggtttcactacgttggccaggctggtctcgaactcttgacctcaggtgatccacctgcctcggcctcccaaagtg

SEQ ID NO: 93299 - DNA, 229 bp, Homo sapiens
acactatttaataagataatggactaacatttctagtaatctgttttgccagtggctttaaattgcaaataagtcagagaatattattcctgtaggttgaattattactcattttttcttatttaaacttatttttcttaatttttgtgggtacatagtatgtgtaaatatggcatatatggcatattttgatacaggtatataatatgtaataattacatatgggtaa

SEQ ID NO: 93300 - DNA, 136 bp, Homo sapiens
atggtttcttctgtatggctgagactgtctccagtctttagggacaggcaatctgaagtgatttgatttttttctttttttgttgtttgtttgttgtttctttgtttgtttggagatgaggtcttgctctttgccc

SEQ ID NO: 93301 - DNA, 747 bp, Homo sapiens
gttgttgctttggctactggtctgttctttcattttgggcttatagtgctttaaaattcaatatattggatattaaatgcatgtgattaggaaacagtcttgaaatatgcccagagttactcagtagcttcttttttataattttaattgtggtggtctcacatttgtgggtttaaattgtctgagttattgagtgttgtattttgtagcccccttctttaattttcagaagcactgtccatttcatttcggtttataaaaatgcacatcttttgtttattgttatgatttatccatgtgtgttttctagccaataaactgtgtcttgcagtcatgattgatcttgttttactgagatttagttttgaagactaaaaatctccagtgttgatatttaaggtttttgaggattaattcttataatcatttttgatcgaataaaattaactcattatgtcggagtatgtgccttttgggagacaaaaataattaagagaattgaaaggatctataaatgtgtttgtagaaattccacttggggatgtggtcctattgtagtttactgaaaacagttgtgggcattgttaccagtggaatgtgtgccctaagaaaacaccatttgtgatgaatgctgggcgaactgtgttctcaaatcattcctgttgtctaatggttatcttacaaaaagcatgtgcctggttatgtttgttatgtggctttgtacagtccttacctaggatcgattgg

SEQ ID NO: 93302 - DNA, 361 bp, Homo sapiens
gagctaggcaaagagtgtgtgtgtttagctacaaactaagtcacagatcaagaggcttttggtattcttccatttttgcttagaattctatgatggtttttgaaatatattgtccttactttatgttcttacctgtaatctcataagtttctggtaaatttagcttttgccaggttccggtgggtcttacccagagatggtcagagtaaatgaacaaaagaaggaattgattaggatgtgaaacttcagatacgctcacaggccttcaagccctagaaagtagtatgccagtgaattttctagtcctctctacactttgtacagatgaagaaaccgagacccagggaactcaaccaaggtt

SEQ ID NO: 93303 - DNA, 344 bp, Homo sapiens
aagaagcatagtccctagactgagggagaacctgttctatttgacagaggatacctggcctctagctgggtgaggctcctggctgatgaggaagacagagtcactgacttgagggaggccctggcttgtctgatgggggagacactgtgctgtgctaagggaagccctgtctcatggcaaaggtctgcctcagagctggagatgggccctggaattcccctgcaggtagacctatctcagtgaaaggcatagcctctgccctccaggaattttccatctattccggtgccatgctgtggatgctgaggagagatgggggatggctacaaagcacactgcagtga

SEQ ID NO: 93304 - DNA, 516 bp, Homo sapiens
ttagctagttgtgatgtattttggcttttaagatattgttcccacacatgaaactcacaaacgttgctaagttaaagcacctaacttttcattgactctagcattcaaaaatctcacaaaccctggtctgtccatatcttaaactctatacaccagtttttttgccactgcatttattccacggcctgcatacagtgtgatctggcatatatgcaagaacacttaagtaaagttctgcatgcttgattgagaaaaagacttttattctaaaaacaaagaagctatattaataatctttttggaaagagaatattttacaacattcccttgtctacactgcttggaataagcactttgaaataagacaagcactttggaataagacaagacggtatacagaataataaatcactggcattaggcaaaggggttgacttatttgtgtatcatggatcttagatttactgatcctcagatttttaaattcctgctgattctctttctcaaaaccaatat

SEQ ID NO: 93305 - DNA, 332 bp, Homo sapiens
gagattatgcagaagttgcagatatagagttgctttattgtcttggatcatcatgccagtttaatttaaggtctttcaggacagaaacaacatctgcccattttgtttgacattctcttttcccctttatttcaaacaatacacgtgccctttgtagtaaaattagtcaatgagaaaaaaaataaatagcaccacctcttctagcacctaagatatatgctggaacactggttaaactcttaaagatatttaaagacatcttaaagatgtttttataacatgcacacacacccttcttttctcaatttgaatatagcattgattacaaagtt

SEQ ID NO: 93306 - DNA, 1306 bp, Homo sapiens
tgatattgaaccatttctgctccttttcagacactacccctctctctcaactataatcactttcctaacttctatcaccattgactacttttccttttatctttatatatatgaaaccatattgtatatatccttttgtgtctctgttttgcccaacattatgtttgtgagattgaactatgctgctgttttatagcaattgtttacttattttgttactgtagagcaagtgtaggcacactacatcccatgggtgaaatcttgtatatatttcggggtgcacatgtgtgtgtgtttctgcttgctagaagtggaatttctgtgtcatggagaatacataaatttaactctagcagatactgtgaaacattttccaaagtgattgtaccaatttacactcttacaaggaccgtggtagagttccatctgctccacgtgcttgccaatgtttggtgttgtcagacttaaattatttttaaattattttttaaattcaccattctaattttttaaaagaagtagagtataatgctggttaccaggggctggagtggaggggttgggacatattggtcaaaagatataacatgtcagttatacacgagtaatttttaaaaaatcagtgattctggtatggcaatagagttgtctcattgagggtttaatttatactgctgtaatgactaatgaagttgagcaaacagagcatgtatctgaagccttgtacatttgtatattcttcatatagtgcttactcaagtgatttgttgatttgtctatttggttgtcagtcttattcttgtatttataggatttctttatattctgcttacaagccttttgacatatgtgtgtattgtgattatcttttcaactgtggccagcattttcactttccttatggtacatttgataaacaaccattctcattttaagttttttaattttacttttcagttggtactttaaaaaatcgttgccaacattagagaaggtcacaaagatattttagtagctatttaaaaaaatcttttaattttaagatctatattccatatcatattgatatttacatatgggatgtgctaaaggtcaagattaattatttttctatgtgaagaatatacaatatcctcacttcttaagagatttctccattttattatctttgtcaaatatcaaatgactagatatatgtaaatctgtttctgaactttctattatcttccattagtctattcatatttgcatatatagcacacttttaattactgcaaatacataaaatgtcttgatgtcttatcgc

SEQ ID NO: 93307 - DNA, 926 bp, Homo sapiens
tgatattgaaccatttctgctccttttcagacactacccctctctctcaactataatcactttcctaacttctatcaccattgactacttttccttttatctttatatatatgaaaccatattgtatatatccttttgtgtctctgttttgcccaacattatgtttgtgagattgaactatgctgctgttttatagcaattgtttacttattttgttactgtagagcaagtgtaggcacactacatcccatgggtgaaatcttgtatatatttcggggtgcacatgtgtgtgtgtttctgcttgctagaagtggaatttctgtgtcatggagaatacataaatttaactctagcagatactgtgaaacattttccaaagtgattgtaccaatttacactcttacaaggaccgtggtagagttccatctgctccacgtgcttgccaatgtttggtgttgtcagacttaaattatttttaaattattttttaaattcaccattctaattttttaaaagaagtagagtataatgctggttaccaggggctggagtggaggggttgggacatattggtcaaaagatataacatgtcagttatacacgagtaatttttaaaaaatcagtgattctggtatggcaatagagttgtctcattgagggtttaatttatactgctgtaatgactaatgaagttgagcaaacagagcatgtatctgaagccttgtacatttgtatattcttcatatatggcgtacccagggaatggggaatggccaaatggggggcagcctaaccggaattaaaggacactgaaatccgggcagccctggaaccagtgtttgggaaacttcaaggggcgcataatactccatgggccatggccactcattggttgcaccccccagggcaccgcgcgggccctcgcc

SEQ ID NO: 93308 - DNA, 1452 bp, Homo sapiens
  misc_feature (1416)..(1416): n is a, c, g, or t
  misc_feature (1421)..(1421): n is a, c, g, or t
tcagggtgctgtatgaagctgggtgtgggcggattcctcccacaccttcacactggcctgcctccaactcatacagatctcggagcggtcggtacttcattcataggtccctgttcaggcagcagttctgtgggctgtggccctctcccctccaatatgtccgaaaccattgtgatgggtggcaaatcccagggagctcctaagccctgctctgcccacatcactgccagcagagaagtcagaggaagggacttgttgctaaaaaatcctttaaaaggttaaatactttaaaagattaaagcaacataactgtaaacatatcgtataaaaatgaaaaacacaggaaccctcttcccttccgcctggtgtgggcttgggaaatgggcaagcggccccagcaatcatgggaggaactcttgcgggggagcggtctgggattccaaatgggcaggtcacacgaaggtcacgatgcttctctgcatcctgaaaagggctggggacagggccagtgggggtggtaagggtatttatagcacagtgcttgaaaagggaagattaatgtgtaaatataaaggacacacaggctgggggttggtcagaggcaagaggagggtgcctctgagcttcaacccctcccaggaacaatgagctcaaattggaagagtccagtggaatcggggggatggtgtgagcgcccctgttcagtctttgacaattgcatacagaaaagcagctggtatggggttgggtgtcaatgaaagggccaaagactggtggccagctggtttgggggatttgggccattgatagcatctcccaggaacaacgactttttgcctccaaagttggatctagtgatgatcagcaccagcaggaaatgacatttggtgtctgcccactgcagccatactgtgacctccagccagacttccgcctaattgactccactggatttgtgctctgttgagtcagaggctcccgggggttggggatcgaggggcgggggtcagctatgcagcccatcacgtgtgtttttcatctgggatgaaaaagcctggttctcttttgaaatgcttgattgtacttattgagctaaacaagtcttggtgactgttgttgatttgcctcaaaagttttaagtcctgggttttcagactactgtgtagcagctgtgtgtttaacatactgtagctttttctcccttgggggcacatacaaataggatgtgttgatgtggactctaaactgtaattttcctgtaactattttggaatgatgcatatttctaatgtttgttatacttgtacagagtattgctgttggttgcttttttttttttttaaggaaaaaatggcctgaaaacatttttttaaagacttacaaataccaaatataaaaaaatggtcatggccgccncgtgncgaaaaaaatagatctttaacaaaaaatcct

SEQ ID NO: 93309 - DNA, 623 bp, Homo sapiens
  misc_feature (38)..(38): n is a, c, g, or t
tctaggtctgtaatttattaactggctactgggaaatnacttattttctggatctatctgtattttcatttaactacaaattatcatactaccggctacatcaaatcagtcctttgattccatttggtgaccatctgtttgagaatatgatcatgtaaatgattatctcctttatagcctgtaaccagattaaggaatacagctcttaaaaaatcaagaacttcctgagtttcacatataaaatggtaacatgttaccattctgatgtaggaggtcatctgttttcctcttttcctctcctctgactcttaagccctttcccattctctttctcaggaatggctgttaaaatgccaatatggtcttgtaactttcctgtacttagtgaacctccttatttacaccctgtttgtgaagtggctgtgttcaccctgggtggacacggaatgtttttggcatgtacaaagagaattttatgctgcctgtgtacagttattaatttgtaagtacactcagctttttgtatctgtaggtttaatatctgtgtatgtaagcaaacttggatgcaaaatatttgaaataaaatcagatgcttgcatctgtagtgaacataaaaaaacttt

SEQ ID NO: 93310 - DNA, 1025 bp, Homo sapiens
ggtcttcagccttaaggctatgtttccagtgttctctggctgtttccaagagctacaagaaaagaataaatctctggagttggtgtcctttgaggaggtagctgtgcacttcacctgggaggagtggcaggacctggatgacgctcagaggaccctgtacagggacgtgatgctggagacctacagcagcctggtatcattggggcattgcattaccaaacctgagatgatcttcaagctagagcaaggagcagagccatggatagtagaagaaaccctaagcctgagactttcaggtggaagcaagaagcaagttttctcaggtatttgccacaggagcctggtggagctccaggaggtttgatctctcttgtgaactctggaactgtattcccaattgtcaattggacatccctacgtatgggacctcagatatttcaaacatgatgtgtccaagtctgtatcacttctggccatcatattgttcttttatttttccaaatttcacatcaccagtaacaaactagctgtgatcatggcagatagcctggaaataaaactcccctttttaccctttgcacagcaaattgacatcaaatcctgtttctacttttttttttttaactattgcttccctattctgtattctcactgctccatcttctgatgtaggaggtcatctgttttcctcttttcctctcctctgactcttaagccctttcccattctctttctcaggaatggctgttaaaatgccaatatggtcttgtaactttcctgtacttagtgaacctccttatttacaccctgtttgtgaagtggctgtgttcaccctgggtggacacggaatgtttttggcatgtacaaagagaattttatgctgcctgtgtacagttattaatttgtaagtacactcagctttttgtatctgtaggtttaatatctgtgtatgtaagcaaacttggatgcaaaatatttgaaataaaatcagatgcttgcatctgtagtgaacataaaaaaacttt

SEQ ID NO: 93311 - DNA, 607 bp, Homo sapiens
ggtcttcagccttaaggctatgtttccagtgttctctggctgtttccaagagctacaagaaaagaataaatctctggagttggtgtcctttgaggaggtagctgtgcacttcacctgggaggagtggcaggacctggatgacgctcagaggaccctgtacagggacgtgatgctggagacctacagcagcctggtatcattggggcattgcattaccaaacctgagatgatcttcaagctagagcaaggagcagagccatggatagtagaagaaaccctaagcctgagactttcagggtgacactctatcatccaggctggtgcaatcacaactcactgcagcctcaacttcctgagctcaagcaatcctcccacctcagcttcccaagtacctgagaccacaggcatgtgacaccacacctggtgtattttagtattttcttgtacacagagggttttgccatgtttcccaggttggtctcaaactcctgggctcaaaggatcctcctgcctcagcttcccaatgtgttgtgattacaggcatgaaccaccgtgcctggccttaatattcttttctatttgtaaatggaaagcttcagaaaagacc

SEQ ID NO: 93312 - DNA, 918 bp, Homo sapiens
ggtcttcagccttaaggctatgtttccagtgttctctggctgtttccaagagctacaagaaaagaataaatctctggagttggtgtcctttgaggaggtagctgtgcacttcacctgggaggagtggcaggacctggatgacgctcagaggaccctgtacagggacgtgatgctggagacctacagcagcctggtatcattggggcattgcattaccaaacctgagatgatcttcaagctagagcaaggaggtttgatctctcttgtgaactctggaactgtattcccaattgtcaattggacatccctacgtatgggacctcagatatttcaaacatgatgtgtccaagtctgtatcacttctggccatcatattgttcttttatttttccaaatttcacatcaccagtaacaaactagctgtgatcatggcagatagcctggaaataaaactcccctttttaccctttgcacagcaaattgacatcaaatcctgtttctacttttttttttttaactattgcttccctattctgtattctcactgctccatcttctgatgtaggaggtcatctgttttcctcttttcctctcctctgactcttaagccctttcccattctctttctcaggaatggctgttaaaatgccaatatggtcttgtaactttcctgtacttagtgaacctccttatttacaccctgtttgtgaagtggctgtgttcaccctgggtggacacggaatgtttttggcatgtacaaagagaattttatgctgcctgtgtacagttattaatttgtaagtacactcagctttttgtatctgtaggtttaatatctgtgtatgtaagcaaacttggatgcaaaatatttgaaataaaatcagatgcttgcatctgtagtgaacataaaaaaacttt

SEQ ID NO: 93313 - DNA, 349 bp, Homo sapiens
taagacacaggatctgtcttaggcttcctttagtggtgaaacagtgtggcctaatgggaggaggcttattggtagactaacagagaagcagacaactcttttccagtgtcctgcttatttgcaaggaaggcagacatctcggggaaaagaatttcttgttctaggatctatctcttggttgtgatttaaaataaaaaagaaggttcctttggtctcagcccctgtaactgttgtaattggtgagacataagcttggtagtcttttgggttttttcttgctccagagtcctctcaaaatgttcagctaaggccaccaattcagtcatgtctgtaacttcccatccaggtt

SEQ ID NO: 93314 - DNA, 290 bp, Homo sapiens
gtgattctcctagagatgcatgagtccttaatgaaagctgccctcactattcttgaaaaagccacttgcatttatagataacagagggtaaactttaaacacaactgcataaagtggcaaggaactggcctgccgtcagctcactgaatttggattccatgcaagcaggatgtgtaaaggaggtaaactccaaaagtgtttttcctcccttaataaggtctattcttcttggtgtcaaggtatgaaaagcagtatttcatatcaacgttcatggttaatctttttgatag

SEQ ID NO: 93315 - DNA, 308 bp, Homo sapiens
tccgtccacagcaggtgggtgtcctgtttccagccagttctgctggcccgtcctcctcttccctgaaggctgaagtgtgatcttcagaggagtgtgttctgtggtcagccggcagcagcggcccctctgaaggcccaccaggaaaggatgggagatcctccaggagttcatgctgctgcatcagtggtcccctcccggcaccacccagaggtccccagaacacactcctctgaagatcacacttcagccttcagggaagaggaggactgggccagcagaactggctggaaacagtgaacacccacctg

SEQ ID NO: 93316 - DNA, 134 bp, Homo sapiens
gcaaagttcagcggcccgcaagaccacctccagatttaacagttcactagaaggacccacagaactctctgaaagctgttatattcatgtatgttttattatagcataaggacacacattaacgctaaccgagg

SEQ ID NO: 93317 - DNA, 475 bp, Homo sapiens
cagtgagctgagatcctgccactgcactccaacctgggggtaacagagcgagactctgtctcaaaaaaaaaaaaaagtgtaattagaaatggaaatctaggtaaaggaagctttaaaatgttgtattttttccctgaaataaacttttatgatttaatgtcttggaaaaagactcacatgaaaagtggcttttatatttggtaggataaagccattgtcctttaataccatagcaaatagaagcaatttttaatgaggttactgaattgtttagtattcctaatatggcatccaggtcatcttttcttttctccaaccattattaaaataacttgacactttgggaggccaagctgggcagatcacctgaggtcaggagtttgagaccagcctggccaacatggtgaaaccccatctctactaaaaaaaatacaaaaattagcggggccatggtgacgtgcacctgtaatcccag

SEQ ID NO: 93318 - DNA, 430 bp, Homo sapiens
tcctcactgtggagagggcagctgctgacctgcagcaagccaggtggcggatcaagatttgtgccaagtgaggggccaaacttagcgtgggcatgcgtgcttttctctttacatgtgtccaaggccataagcgatgggctgtgacaaagcacatctgggctgagctcagggagaaatgtcccctgcagtagatatgcaagtgtgtgcaggtgtcagaaacaccaagccacacactgataactcatgccgggtgcggcggctcacacctgtaactcagcactttgggaggcagaggcgggaggatcgcttgagctcaggagtttgagaccagcctgggcaacatggctaaactgccccccaacaaaaaataaaaaatccggggatggtggcatgtgtctgaagtcacagctactcgggaggctgaggtggg

SEQ ID NO: 93319 - DNA, 395 bp, Homo sapiens
agctgtacagttggaaatgttttttagaatttttttttgtaaaatgtttttaacttccttcttattatgatttcttttttattgtattcttgtttattttcatctttctctttttaatcctctctttgaatttgagatgataaccagaattatgttaatcagtatctttgaactttgccaaaagtcgatggcaaagtattttcaaaatcatttgaatatttgtaatattttcatattttttaaaatcagcaatcctgttcggtatatgtgatgagtttttgaacattcaataagttggctttcacaagataaaaatctcttgctgaacagctgctggaacccaatgtgaatattggactggcggagccttgggaagtgaaccttccataggaagc

SEQ ID NO: 93320 - DNA, 1848 bp, Homo sapiens
attttttcccaggattcaaaatatacccgctagaatggaaaacaaaaatttgaatgattacaacattatcgttaacattcaattttgtatttattgttttattgaatatagttcagagtatattaaaatagacctaccacttcaaatgataatgattattataatgtctcttcaccctattctagcacttctgcttgcagtatgtggtttctatttttttcctcttgtataattccacttgcttttaattgttgtttcattatataaaaggaacatcttcccatagcatattctatgaaaggggtttcattccaagttgagttttcaaaaaaaaggtcttcctaaagctaccattttcaaccgtcctgttatctagtacaacataaataacagtcttaaaaattgcactaataccagtgcccccctggctctccaaatctgttctttgctcttgtatctgctggacgcttgaagacaggtgcactgtctcgtatgtatttgaattatgaacagtaatttctaatgaattctaaaatggtcattgtaagtgaaagcctctcgctaccacttcctcttccaactacataaatatatttcaatgtatttccagttttggaaagttttcaatacatacatcaagtgtttacttagatttttataaaaattttttttacaatctaataatctttggtaaaggaactagagatgcatgcagttgcaaaattaatgtatttattttccagcataattttattaacttcactttttttctctctagtaaatatccagtgtacttatgaactcatgtttggctcttttaaaaccttttctaaaagctagatcagcatttttctattttacaagttttttgtataaaaaggtgaacatatgagatattgtgagaaatcattttaagtttcatttaaatcatggtgcctcttttgatactttcttaaaattgtgcaagaagaaatcatttttagtagtggtcataaatattatccttttggcagtaagctattactaattcagcctgaagctcggtagacaatatgtctacatgtgtttgagtacatcctggatacagtttcccagctcatgagggactgaaaatagtcttattcatcaacccactaggatgtgaagggttaagtctagatttggtcgcattgaaaccccacaatatagaattaataaatggccttcagtaggaaaacctacactaaagcaaatccgaagaagtggggcagggggaaagaggcattactggtctttccttttgttttgcaagcataatttgattttcctttggctcagaaaactcatttggggaaattctcttttgtgttcagtttaacctagaaaggtcctcttgaaaaaccaacattttaggaaagttcttttttcaggatggagtatattaaaattaagccaggctttgacgtgaattatcacttttctttattattttgttttctattttggtttatagctatttctggttcagttctgaacttcagcacttaatcatccttatcaaccaggcttttggtagcctaaaccgctatgctgttgtttttttaatttaaagatgtataagccaaaatttggatgggagtgagacataactgatttatatgaattttaacagagttgtatttgtgtgtgtttaataaaatatatatttattcagtactttcctcagtattttatgggcaaagtaaaaataacaatgcatagtgaaagggcatatattaccagcagtaataattcaaaatcctgaaaatgtttcattttttttgtttttgttatgcagaataaacaaggcagaaatgctctttgaaccac

SEQ ID NO: 93321 - DNA, 695 bp, Homo sapiens
tctttcctaacatagtctattctctaagaatagagaagatatgtatcagtcactcttatagtctgaaaacctaaacataaaagtaatctgcttttgacatataattttgtataatacgtatgaaaaaatgtgacagctaaggacttgaattaaatccctaaaaaacaccaattagccactcattaagccaagactttaattctatgatcaattagcactgtttatctgaattaagcttttttgtggtctaacaaaaagtttttttgtggtctatcaaggagacagctgttcaaatggaaggatacatgtggggcaggggggcggtgaagagacctagattctggtcctaactgctttgccttggagagattaattcccccctctaagcctcagtttcctctgaagatgttggaccagataacctctaaggtcctttgaaactgactccttgattccatgactcactgaatatttttctgcaaagataatcccaaccaatgccttctatcctaatctaacaaaaaattgctcttcatcatagaaatacaaagtaatcttcagtgatgtgctctttatactttgctttttaaaccgtccattccagttggtcttaatatattgcacaagtattttataagtgaaatgtgtacagaatcatattctaagattatgtgcaaatatatgtgtagaaagag

SEQ ID NO: 93322 - DNA, 418 bp, Homo sapiens
aaaacagcaataaattggaaagaactcaaatgtccaacataatcttataatctggtacaatcatatcatggaaactgtacacattaaaagctgcagagcccttttcacaagatggcaccgaaagcaaagaaggaagctcctgcccctcctcaagccgaagccaaagcaaaggctgtgaaggccaagaaagcagtgttgaaaggcgtccacagccggaaaaaaaaaagatccacacatcacccaccttccagcggcccaaaacactgcgactccaggggcagcccaaatatcctcagaagagcgccgccaggagaaacaagcttgaccaccatattatcatcaagttgccgctgaccactgagtctgccatgaagaagagcgaggacaacaagacacttgtgttcattgtagatgttaa

SEQ ID NO: 93323 - DNA, 353 bp, Homo sapiens
gaagatactttatgatatgatcatttcctgagttgtattaatcatctttttctccttatgggatctgattataggaaagttagtatcacaaaatcaacatacaaagatgagtagcatttctatataccagtattcttcaagctgagaaccaaatcaagaactcaaacccatttaaaatagccacacaataataaaatatgtagaaatacatttaaccaaggaggattgcaaacgtgcatgtgcaaaagctttgaaaaagaaaaagaggatgccaagcttcggtttccagtagattccggaaatttcggagaagcattttaacattcttatatgtcacttgttttcttatggct

SEQ ID NO: 93324 - DNA, 267 bp, Homo sapiens
attgttctaggtgaaatgtaaggagcctattttgtgggaaaacaggtttttttcacgttaaaagtcactgtcaggaatttaataaaggtcgtcggacttgaccacagaagttcttttgaggtcgtgtgaatagtacattgacattgtattccaagtaaattttgccctgtctaatctcctgccttctagtctaagtcatgaacatgacaccttttcacgaatgtacattctttatttacctgttggtagtttctactacaaaatctg

SEQ ID NO: 93325 - DNA, 195 bp, Homo sapiens
aagggttttgatgggccttttaactctagagaccagctagtccctaacatcaggtttgctagagaagggaagattctttccagccttcctggatgacacctaatacatactatattcctagtaattctgttatacttaagatttatgggttcatctttcctgttacactgtgagcccttcctgggctgggacgat

SEQ ID NO: 93326 - DNA, 373 bp, Homo sapiens
tctcaatttggatacgttaaattactttttaagagaaagaagtaattcaccatttttagtgtttttgaccattatttgtctccaaatgccagaaacctctgttaaactataaatcttgatagtcctctgtctttagaatggagacttttttgaggtttttagcaatgcccaacaatgtacaactttgtttccagtgtgaaccaaatcacctttctcaccttgccccaagcaagagtaaaccgcatagatttcttcagagagaagataggaaaagtggcatccaagggagcgtcctggttgcttaagggttaagggagcggttcgaaccggcccgagcgttgggggattcggaggagggcgcgggaggcaggag

SEQ ID NO: 93327 - DNA, 3869 bp, Homo sapiens
gcttcctccagagggcgggaaccttggacgtggcggggctgggtcagtcagggcgctgggcccagcctctctgcaggctggccttccgcgctgccgtgaagcccccgacaggtcccacgcctgcctaggtagaccggcgccagcccgagtgacgcctggcgtgtggccgcgggcaggcggctccgtgcggcggggcgggcgggtgccacacctgtgcgggcaagggcggggcgggaaggtgcgcaggcgcgctcggggctggtgggcggtggctcctgggaagttgcgcagccgaactggccggctgggcgcgcgctcttgcggtggcgtaatctctcagcctttctgtgtctcctttcctccgcctcagtttggggcgggtcgggggaatggctgaggagatggagtcgtcgctcgaggcaagcttttcgtccagcggggcagtgtcaggggcctcagggtttttgcctcctgcccgctcccgcatcttcaagataatcgtgatcggcgactccaatgtgggcaagacatgcctgacctaccgcttctgcgctggccgcttccccgaccgcaccgaggccacgataggggtggatttccgagaacgagcggtggagattgatggggagcgcatcaagatccagctatgggacacagcaggacaagaacgattcagaaagagcatggttcagcactactacagaaatgtacatgctgttgtcttcgtgtatgatatgaccaacatggctagttttcatagcctaccatcttggatagaagaatgcaaacaacatttgctagccaatgatataccacggattcttgttggaaataaatgtgacttgagaagtgccatacaggtacccacagacttggcacaaaaatttgctgacacacacagtatgcctttgtttgaaacgtctgctaaaaaccccaatgataatgaccatgtggaagctatatttatgaccttggctcataagcttaagagccacaaaccattaatgcttagtcagccccctgataatggaattatcctgaagcctgaaccaaagcctgcaatgacgtgctggtgctaaataacagtctttattatattatctaattttgactaaagaaatacttttgaagtatgacagtattaagtcataagatttaatctcaactataatgggtcatcttgacactttgctgtttgtcattgtcacgcttttgtattttgtatctacttaagtttgtcactgtgacaacacaggaaaagttggttttcaggtgagattgaaaatgaagcaaagataggatgaatctgaacatctctccatctagagcccaatgaaggaagcttcaaatgagaacatgatggaatcagtaaccattcaatcttttgtcctaggattggaaaaaaatgttaaaggtttaggacacacctaatagtatgtcctttgaatgggaagtgttcttaataggataaaaactggtatttgcctctccccagagtactttttttgttttttcatagagacggggtcttgctatgttgtccaggctggccttgagctcctgggctcaagcaatcctcccacctcagcctccccagtactgggactgtaggtactcaccactgcatctggcctttctttgttttattaacatatttagttttgttattattggtatgttttagagccaagactttagttccagtgggataagaaggcatagaatgttttctggttcccagtccataaagaatgacttttccaagagttctagatgtttgattttctaattaatacttatcagatctacaaaaatcattattattttaaaagagttatttgagtttctttctttctttttttttttttttttttttgagatggagtctcgctctgtctccaggctggagtgcagtggcgtcatctcggctcactgcaacctccgcctcccaggttcaagtgattctcctgcctcagcctcccgagtagctgggattacaggcgtgcactaccacacccagctgatttttgtatttttagtatagatggggtttcaccatgttggccaggatggtctcgatctcttgacctcatgatccacccgcctcagcttcccaaagtgctgggattacaggtgtgagtcactgcacccagccgagttgctttcttactaaatcctattaaaatatgcaaaaataagtcagattttaaggcaaataaagtgacataaggtgctttatattttattttggtatatttaaacagtgaaaaactaactgaaagcacatgaagagttgtaacttgggggaaaataggtaaacatagcttctagctaacacaggagacctattcttagcctttactaatttcaagcagtgtatcccatatggtatctcttgctcttccttcaactccaataaatttaatgactaaatgccaagttaacaaatcaacttccatttggattgtaggtgtgaaggcacaactctaattgctattagtctacatgtatttctgtaatagtattgtgtcatatcaatttttaagatgtctaaattttatggtcacaagttatccctcctcagtatgaaaaataaattagatattgaaaaatgtctaaacttcagtgatggaaagaatatttcaagaagttttttaacctaaatacttttattttgaatttaagtctttgcacataaaatatagcaagcttacatattaaactatttacgtaaatggaatgtaagccatgactttaactgaagtgttcacattcactaattttgatagattgctgtccttaataattttggaggaaattaagccaaatgattattgtactacagtattttcagaatatgggaaatcaattaaaaatgtaatctaatctagtttaagatttttgtttaatcatcatggtggtcctacctggataatttaactataaagacaaagtaattctattaaatgaactaactgaaaataataattataggaagtgattattccattttaagtattagagctcaaattggctttatttgcatttagggagatcatgttttcttaatcatgctggaatttaaaaattgttttacttgtatcgaaattaaccttgatttataactatttttgtaataaaacaatgacagctgtagtaactatgatgggtgtaacaacatttttttaaagaagggaatctgtttatcgcttttcaaaatattttctaaagtgggggaagaaagtttatagactttccaagcacatttatggttttttattactattattatggttttaaaaagagtaactttatttctttttgtaaggaattaagtaatatcctttacagttctgtgaaaggacttattttttaactgtaatatttattagttttaaaatatttgtatctcatttgtaacaatttgttttaattttttatatatatgtttttatttttaaaaaacataccagttgaatggggttaaagctttcaatatcttaaaatatttataaaacatttcactgttgcaaaatcacttccaaaatgatagctatctaacaactaattactaatttttaaagaacaaatcacacatttaaaaaatctgtagaatttattttaactatgacctttaattgaaaataaataattaaaatatcagacatgttttggaaaagtcttaatttgagaacaccaaaggaaactaccccagaatctaatgtagttcgctattaataacaatgcattattgaaagtatattgcaaatacatgtttcctcatgaaatctaagtaattttgttgtggctaagctggtttattgaacttcatgggggaaatgtaacagtgacactattccacgtcgacg

SEQ ID NO: 93328 - DNA, 389 bp, Homo sapiens
cctcctgcccgctcccgcatcttcaagataatcgtgatcggcgactccaatgtgggcaagacatgcctgacctaccgcttctgcgctggccgcttccccgaccgcaccgaggccacgataggggtggatttccgagaacgagcggtggagattgatggggagcgcatcaaggtgagcggatggggaactgttggggaggacagggtgacaggtgtcccaaccccaccgtgggctggtcgctggccgtgtgcacggtgtgtgtgcgctccatttttttctcacgctgatgagattggagttggggattggaaggattgcaatactgcaaacttctaaggcagcgtttctcagacttcattgtgcatgcgatttacctggggatcttgttt

SEQ ID NO: 93329 - DNA, 3876 bp, Homo sapiens
gcttcctccagagggcgggaaccttggacgtggcggggctgggtcagtcagggcgctgggcccagcctctctgcaggctggccttccgcgctgccgtgaagcccccgacaggtcccacgcctgcctaggtagaccggcgccagcccgagtgacgcctggcgtgtggccgcgggcaggcggctccgtgcggcggggcgggcgggtgccacacctgtgcgggcaagggcggggcgggaaggtgcgcaggcgcgctcggggctggtgggcggtggctcctgggaagttgcgcagccgaactggccggctgggcgcgcgctcttgcggtggcgtaatctctcagcctttctgtgtctcctttcctccgcctcagtttggggcgggtcgggggaatggctgaggagatggagtcgtcgctcgaggcaagcttttcgtccagcggggcagtgtcaggggcctcagggtttttgcctcctgcccgctcccgcatcttcaagataatcgtgatcggcgactccaatgtgggcaagacatgcctgacctaccgcttctgcgctggccgcttccccgaccgcaccgaggccacgataggggtggatttccgagaacgagcggtggagattgatggggagcgcatcaagatccagctatgggacacagcaggacaagaacgattcagaaagagcatggttcagcactactacagaaatgtacatgctgttgtcttcgtgtatgatatgaccaacatggctagttttcatagcctaccatcttggatagaagaatgcaaacaacatttgctagccaatgatataccacggattcttgttggaaataaatgtgacttgagaagtgccatacaggtacccacagacttggcacaaaaatttgctgacacacacagtatgcctttgtttgaaacgtctgctaaaaaccccaatgataatgaccatgtggaagctatatttatgaccttggctcataagcttaagagccacaaaccattaatgcttagtcagccccctgataatggaattatcctgaagcctgaaccaaagcctgcaatgacgtgctggtgctaaataacagtctttattatattatctaattttgactaaagaaatacttttgaagtatgacagtattaagtcataagatttaatctcaactataatgggtcatcttgacactttgctgtttgtcattgtcacgcttttgtattttgtatctacttaagtttgtcactgtgacaacacaggaaaagttggttttcaggtgagattgaaaatgaagcaaagataggatgaatctgaacatctctccatctagagcccaatgaaggaagcttcaaatgagaacatgatggaatcagtaaccattcaatcttttgtcctaggattggaaaaaaatgttaaaggtttaggacacacctaatagtatgtcctttgaatgggaagtgttcttaataggataaaaactggtatttgcctctccccagagtactttttttgttttttcatagagacggggtcttgctatgttgtccaggctggccttgagctcctgggctcaagcaatcctcccacctcagcctccccagtactgggactgtaggtactcaccactgcatctggcctttctttgttttattaacatatttagttttgttattattggtatgttttagagccaagactttagttccagtgggataagaaggcatagaatgttttctggttcccagtccataaagaatgacttttccaagagttctagatgtttgattttctaattaatacttatcagatctacaaaaatcattattattttaaaagagttatttgagtttctttctttctttttttttttttttttttttgagatggagtctcgctctgtctccaggctggagtgcagtggcgtcatctcggctcactgcaacctccgcctcccaggttcaagtgattctcctgcctcagcctcccgagtagctgggattacaggcgtgcactaccacacccagctgatttttgtatttttagtatagatggggtttcaccatgttggccaggatggtctcgatctcttgacctcatgatccacccgcctcagcttcccaaagtgctgggattacaggtgtgagtcactgcacccagccgagttgctttcttactaaatcctattaaaatatgcaaaaataagtcagattttaaggcaaataaagtgacataaggtgctttatattttattttggtatatttaaacagtgaaaaactaactgaaagcacatgaagagttgtaacttgggggaaaataggtaaacatagcttctagctaacacaggagacctattcttagcctttactaatttcaagcagtgtatcccatatggtatctcttgctcttccttcaactccaataaatttaatgactaaatgccaagttaacaaatcaacttccatttggattgtaggtgtgaaggcacaactctaattgctattagtctacatgtatttctgtaatagtattgtgtcatatcaatttttaagatgtctaaattttatggtcacaagttatccctcctcagtatgaaaaataaattagatattgaaaaatgtctaaacttcagtgatggaaagaatatttcaagaagttttttaacctaaatacttttattttgaatttaagtctttgcacataaaatatagcaagcttacatattaaactatttacgtaaatggaatgtaagccatgactttaactgaagtgttcacattcactaattttgatagattgctgtccttaataattttggaggaaattaagccaaatgattattgtactacagtattttcagaatatgggaaatcaattaaaaatgtaatctaatctagtttaagatttttgtttaatcatcatggtggtcctacctggataatttaactataaagacaaagtaattctattaaatgaactaactgaaaataataattataggaagtgattattccattttaagtattagagctcaaattggctttatttgcatttagggagatcatgttttcttaatcatgctggaatttaaaaattgttttacttgtatcgaaattaaccttgatttataactatttttgtaataaaacaatgacagctgtagtaactatgatgggtgtaacaacatttttttaaagaagggaatctgtttatcgcttttcaaaatattttctaaagtgggggaagaaagtttatagactttccaagcacatttatggttttttattactattattatggttttaaaaagagtaactttatttctttttgtaaggaattaagtaatatcctttacagttctgtgaaaggacttattttttaactgtaatatttattagttttaaaatatttgtatctcatttgtaacaatttgttttaattttttatatatatgtttttatttttaaaaaacataccagttgaatggggttaaagctttcaatatcttaaaatatttataaaacatttcactgttgcaaaatcacttccaaaatgatagctatctaacaactaattactaatttttaaagaacaaatcacacatttaaaaaatctgtagaatttattttaactatgacctttaattgaaaataaataattaaaatatcagacatgttttggaaaagtcttaatttgagaacaccaaaggaaactaccccagaatctaatgtagttcgctattaataacaatgcattattgaaagtatattgcaaatacatgtttcctcatgaaatctaagtaattttgttgtggaatagtgtcactgttacatttcccccatgaagttcaataaaccagcttagccacaaagaaaaaaaaaa

SEQ ID NO: 93330 - DNA, 125 bp, Homo sapiens
taaggtaactctaatgtacattccttaactctgaagctaacagctatgaaggtgaatgccgatagctgctgtaggtttcacagagagactcaatgattatgaagattctgaccatatctaataac

SEQ ID NO: 93331 - DNA, 395 bp, Homo sapiens
taaatacttacccctaaaaatgaaatagaatgttttgagttttcttctcctgagaatatatgtaataccatactctgttaaaaattcttaaaatatttctaattatttaatatacatttctgaaaggaggatttttaaagctactgaaacaaagtgcaaatgacagccttgaaaagtaccaagttatcctcttgaccgcagtaggtagaaatcctgccttttcttctccctttttttttttaggaatcagcgtttcactttgttgcccaggctggagtgcatggtgtgatcatggttcactgcagcttcaaactcccgggctcaagggatcctcccacctcggctgccccagtagctgggactataggcacatgccaccacacctggctgattgt

SEQ ID NO: 93332 - DNA, 455 bp, Homo sapiens
aatctattgataatattcaggaagttttacattctttctgggcacttaacattcttagttattttaattttttttgtgaacttgacattttatttcttaattcattttagccaattgtgagaattatgcattaaaatgggagattggcccctttccactgcatcacagatgaaaaatggaaagtacctttgattggtcccctcccacaagcaatcactggttgtgggccaagtcttcatgtgtaactttgttaacttcactttagcctctgattggttgactcttgcaaccaatcagactagttgtgggccaaatcttcatttatagagggtataaccaagtaaccaatgggaaacctctagagggtatttaaaccccagaaaattctgtaaccagtgcccttgagctgcttgcttcagcctgcccctgctctgtggagtgtactttcatttcca

SEQ ID NO: 93333 - DNA, 366 bp, Homo sapiens
acattagaaggggtttgtttctagggtttctaaagctagaaactcctagaaggtttgcagccaggggacaacaaactgtagctatctgggcccgcaaacaccaggagcctggattagagcatttggcaagggaccctttcatttgcagacctcacaatactccgattctttcttgcatgtgagcgagaacaacaccgaggtttgtagaaggaaagctctagaacaaaattcatcccgatgccagaggcttcctcacaatgtgaggagatggcgccccctcgtgtcgagatgatccttcagcacctggaccaggctgagagcggtgaccttgagcactaagcaggtggtggcttcaagatgggcttg

SEQ ID NO: 93334 - DNA, 499 bp, Homo sapiens
ttcatggttcaaggagtaggtagacatatttattataattacacgattgttaacaatgtgtactgccatccaaaaatgaacatttattgctactttgttcactagcataaagatgcaatttacttacatagaaaatattttatatgctttgatactgccatgtgtaaacattcttatggatatgtttgtgaactaaaattgacaaatacatattcctatgttaccaacttaagatcataaaccattctcatgtctgctcattaaagctaaagggtctattacatgtgaatctcaattatttttatagaaacatcacacttgattaccattttctgcatttcagtggttgctgtttgtattgaaaacaaactgagaaattgagaaatcaaatgtagtacctctcttaaaaagaggaattgttaacattaggaactaaactgccaaaagttattttccataatgactagagtcagtcatcacatacacaaattattattta

SEQ ID NO: 93335 - DNA, 361 bp, Homo sapiens
tgtcacagagtgtgaggatctcactgggggagttgtgtatccctgatttctggccgtgcttgcacttggctagcaaggcacacacgcacacagcagtgagccttccacagatgatggcctggtttccatccactcacacaggctgccctgagcctgccaggccccctgatagaacttgcctcctcccatgtcaggtggggcagcctctttagatgatatttgctttggatgggattgttgtacctattgagccagagaccattgctgtggtatatttgccacaagtcaggcacacatgcacataggtgcatgcattcacacatttgtcaggcatacttgcactcactcacaaacacacatg

SEQ ID NO: 93336 - DNA, 227 bp, Homo sapiens
tgaattgctgtgaaagttggtcttttaagctaactgtcaagctggttaatcaaactcttaaatagttcttctttcagtttcttatcctcatactaagaacatctgtaactgtttttgtctactactgtaaaagagaatacgaaaagacaaatgtaaacagggttaaaaaaatctttataaatattaaatacttattctgctagtaagctagagataaaccctgaaaa

SEQ ID NO: 93337 - DNA, 405 bp, Homo sapiens
aactctcgcatctctctgggtcttggaccctctgtgacaaagcagtggtaacttggtaactgtcttgggagcacgcagagagagtcaagcctcatcttgccaaattttcccagagtatgcaccccttcttcatctcctctgggcctttaccttagaagagctgtgtcatgcattactgatggcagaggctgtctgcattggagatgagtggctataatctttcatcaccttcaggagaactgtgaaatcgttgacttcctttatctgctcgggtttgagatgagctagcatctaccagttttagcctctggagtcccatggccttgtaagaagggagtgttctgctggcactagctgtgcgggggacagtagtccttgaccctttgttcttttcactctgccttc

SEQ ID NO: 93338 - DNA, 303 bp, Homo sapiens
cagcttttgaagatcttttggagtttcctgtggatttaatgtaataggtctgtctgtccttttgtctacttcctcctttctacttctcctctgcttttaaaagtggtagaaaagaagaaaaccaatgttacatagagatagaaagttgttgtgtgaggggttctataagtcctgcactcagtatgtcagtttaatgttctgtggttgttctttcttcactggttccttttgctgttcttggaattacaaaggattgctcctggtcatttaactcttcttagcaccctgatattagcacatatg

SEQ ID NO: 93339 - DNA, 494 bp, Homo sapiens
  misc_feature (296)..(296): n is a, c, g, or t
  misc_feature (305)..(305): n is a, c, g, or t
ctttttggagcactaatctaactccaaaggggtacaacaacctcatcacttctaatatgaatacaaccaagatattgtgtgagctgagagtggcagaagaaaactggaaaaagctctctcttagatagccagtgtcacttggagaagtctattcttatgtaaaaggagttatattggtcttctaagaagaaaggttgtcaggaactggcaagcactaaaatgcctaaccaacaccttggagttagagcagtctagttttagaaggcagagactaggagaattacttgaaccagggngcggaggtngcagtgagctgagatcacgccactgcactccagcctgggcaatagaatgagactccgtctcaaagaaaaaaagtttaagccagatgcagtggctcatgcctgtaatcctagcactttgggagaccaaggcaggaggattgctcgagcacaggagtttgaaaccagcttgggcaacaaagtgagacctgt

SEQ ID NO: 93340 - DNA, 756 bp, Homo sapiens
taatttttgtattcttagtagagacagggtttcaccatgttggccaggctggtctcgaactcctgacctcagtgatccacccacctcggcctcccaaagtgctgggattacaggcgtgagccactgcgcccagcctgcatttaaattctcaataatttgtagctgctcatttctgaattttcaattatgaagtattttgctatttagaaatgttttaaatctgcacagttctattcagctcttaacacctgcagcctccagtattttctcatgttcagatatgaaggtatctgagctgtttctctatcagaagaatttatgtgatacatagagaatatgttccagtgatgttttttacagtgagttgtaagaatataatagaatcctcaggaatctatttcagtgtatcattatttaatggttagtatatcatgatttaatggttttttttttcataacctaataacgtacctaacacaacactcaaggttagaaaagatataataggtgaatattaaggataagaggaagtagacaagaaagagccctattaagatggggaagatggaagaaggttgtgacagtctcagtcagacttcttagaggaaacaggagcctgtcccttctcctccatgtccatactagcctgctgaatcctttacttacaggatcagctgaatatgtctagttgactcaagggtctttttctgcctccctctgttacagctgtgttacctttttacatagcaaagcaaa

SEQ ID NO: 93341 - DNA, 936 bp, Homo sapiens
  misc_feature (310)..(310): n is a, c, g, or t
  misc_feature (373)..(373): n is a, c, g, or t
cgattttcttagtattttctttcttttaagtggataagagttttgttgttgttcttgtagtaattcctgcaacggaggtaaatcctaacactcataaacacattaacacattaaatatatgtattggatactgagtatacttatagtactgtgtacacttttctctacaatggatgtcagatatacattgaatagagcagtggaaaatgggtatggtcgctctgctttcatagagcttctagtctagtatagaactttaaaaaaattatcatcctatccccttatcctacacagattttaatttaagtanttcattttaattgaaaggaactcatatctttcttcagaaataaaattcacccttgaaaacacnctgtttgaaataatataacagataaaattaaaaattagttgcccaagtagggctatcattgatttattttccagtgttttggatggggtacttaaggtctgagtttagcataatataaacacactgtaacttattctttttaacaaaaatactgaaagtatcctgagatcatctgtggtaggcagaataatgacaatgacaccccccaaccccccaacaaagacatccagatcctaatcctggaatctgtgaatatgttagattacacggcaaaggagaattacggttgctaatcagctgaccttgaaatagggagattatcctggattatcagggtgggcccactgtaatcctaagggtccttaacagcagaagaggagtcggaattccgcaggaagatcacctgaggtcaggagttcgagaccagcctgaccaaaatggagaaaccccatctctactgaaaatacaaaattagccgggcgtggtggtgcatgcctgtaatcctagctactcgggaggctgaggcaggagaattgcttaaacctgggaggcagaggttgcgc

SEQ ID NO: 93342 - DNA, 562 bp, Homo sapiens
caacatctcctgcctcagcctcctgagtagctgggatttggcccactaccacaccgggctgattttttggtattttaagtagagacggggtttcaccatgtggcccaggctagtctcaaactcctgagctcaggtgatcctcctgcttcagcctcctgaatagcaggaccacaggtgcatgctattgtgcctggctaattttttaatattttgtagggacagggtctccctatgttgcccaggctgagcgaacttattttacagaattgaaacttgtaagtggacagagtagggcaacaatatacatatgtagaatcctgaacctcgaacttccaggattctccatcaagtatgcaccatattgcagagagtgcctcctactgatgataggtggtatcacagcctggttctatgggacattttaaataaccaaagaaaaggggaggggaaacacaaccaagttctggaagtcccagcactctgtgttgagacctgcgggcctggaaagaagccacgtgaaacacctggaggcttcgggaggctttgctaatacaaaggagac

SEQ ID NO: 93343 - DNA, 572 bp, Homo sapiens
tggagaaatcctgtctctactaaaaatataaaattagctggacgtggttgctcatgcctgtaatcccagctactcaaggctgaggcgggagaatctcttgaagccgggagacagaggttgcagtgagccgaggtcacaccattgcactacagcctgtgcaacaagagcaaaactccatctcaaaaaataataataataataaatgaggaaaatactgtaatattatttgattatggagacctatttacaatctgactgttcagattgaatagttgtgaccaaacctggaataacattaagaaatgttcaaaacctgttttaaaaaattaagctgtagaaaggcctgttgtaatacaaatatcacattaaacaagagtaaaactcactgaaaggtacttgtgtgataagtgttgaaaagttgggtttttgtggggtttttctggggagactggaggcagggtcacactctgtcacccaggctggagtgcagtggcatgatctctgctcactgcaacctctgcctcccaggcttacacaatcctcccacttgagcctccctattagttgggact

SEQ ID NO: 93344 - DNA, 519 bp, Homo sapiens
tggagaaatcctgtctctactaaaaatataaaattagctggacgtggttgctcatgcctgtaatcccagctactcaaggctgaggcgggagaatctcttgaagccgggagacagaggttgcagtgagccgaggtcacaccattgcactacagcctgtgcaacaagagcaaaactccatctcaaaaaataataataataataaatgaggaaaatactgtaatattatttgattatggagacctatttacaatctgactgttcagattgaatagttgtgaccaaacctggaataacattaagaaatgttcaaaacctgttttaaaaaattaagctgtagaaaggcctgttgtaatacaaatatcacattaaacaagagtaaaactcactgaaaggtacttgtgtgataagtgttgtctgtcacccaggctggagtgcagtggcatgatctctgctcactgcaacctctgcctcccaggcttacacaatcctcccacttgagcctccctattagttgggact

SEQ ID NO: 93345 - DNA, 247 bp, Homo sapiens
gcacattgctggctgcgattgatgtttaaagagtgttcttccttttccttattcataggcataccatttcctttctgtaacacctacaggttttaccagtgcagatcaacaggagctctaatagcaataccacctacaaatgagtacatactgtgagccagtcattgttctggattcttcttaagcattatttcatttaattctcacaatatccacatagtgtagttattctgcccattttggggat

SEQ ID NO: 93346 - DNA, 579 bp, Homo sapiens
tacattgatactaaaagcatttaactctattgtaattaacataaaaccataaaagcttgttttcatttatctgtcttgattgtatcaaaatggcaaattcttgataagttattctgaaatggatcttcatcatgttaatagcaacaagaaaactccattcatttgtggttttggcttcaggatatatgaaattataatgaatttaggatttttttcctgtatcactttgataattttataaggtgtggaactgaatgtaaggaaagaaatacagcgtctagtggattcacattcatttccgtcttttaaaaatattcatacgcaccttagtcttggctcatatggtcattaaaaacttttttttgtatgaaaactatgaaaggaatataaatctgcatttcttccaaaaaaagtatgtgaaatcttctaaacaaaatatcattaaaaataatcttatctttgtggaaagatagtctaattggatatcttatgacaagttattgcaaataaattttacctatcgacattagaaaaatgtttttaccattacgtcatgtttctttaccaatcaacctctgt

SEQ ID NO: 93347 - DNA, 302 bp, Homo sapiens
gaaggggactttacgtaatcaaatttactttcaccttgttttctacaaatggcttatgcataaagcataaaacaacagtgggttttaaaaattgatacatgatattttacatattcatggggtacatgtggtgttttgttacatggatagaatgtataatgatctagttgggttatttggggtatccatgacattgagtacttatcatttctgtgtttggtgaacattttgagttgtcttgtagctactttgaaatacacaaaacattgttgttaactatagtccctccactctgctatcag

SEQ ID NO: 93348 - DNA, 335 bp, Homo sapiens
ccttgaaacatacataagcatatataaggttaagacttgccccaaatcactcagatgtctctcctctaaaatcttgatggtttttcgtgcacacagaataaaatctaaactccttagcgagaccctccatgatctgaacttcacatcttgtaacgcctacccctcgcccgcaaaagcctatggttcagccagacattttccccagtcttcgaacacactgttcttgtcttcccacatcttcatgccttagcccaattccttggctttttcccacctagttttctggtccaacttctaccatcctttaagattcagttcaaatgtcactttctttc

SEQ ID NO: 93349 - DNA, 275 bp, Homo sapiens
ctccagggcatggctcttaacagctgtgctctgactgcctcagaatgtatcattcatctgtgtccattgactactacagaccaaaacacatttgcaacttcttgtcacctctgctgctagtgccttggtccaaacctccatcgtgtctctcttggatcatgggaacactctcctaactggtctctgtattttgcccttgaacagaatgcatgtattatgtttttaacattttttagtaattgactttctgacactcctctattttatttattata

SEQ ID NO: 93350 - DNA, 219 bp, Homo sapiens
cagaggaataaagaaaaaaatttgaaaatcatttctgcttgttgtacaactctaaaagcatctttgcattaaaaaaatcttcttctgaataaaagtttatgtatacctatcagtaaaatttctaacagtatagaaatgttaaaaaatcaatagaaaagcgcaatttcatagcagtttcacctcctagatagtcaccattgttgacagttcggtgcatgt

SEQ ID NO: 93351 - DNA, 160 bp, Homo sapiens
ccaggaacggttctggaccatcacttccagctactaccggggggctcatggcttcctcgtggtatatgacgtcactgaccaggaatcctatgccaacgtgaagcagtggctgcaggagattgaccgccatgccagcgagaacgtcaataagctcctggtg

SEQ ID NO: 93352 - DNA, 376 bp, Homo sapiens
ttcttaccatctccccattgcacagaaaggatggctgtggctcaaagaggaagtgcctttccatttgagttctgctgctagctcagggcagacctaggacttgccctctgaccttactcctgctgtgtgactccccagctgcacctctctccatccacgggtcaggcctcagttgaaccctggtggggtggtgggggctcactggcttcacaaggccctgctgtggtagctcttcccacctcattctctcagtgctggtttgcccagagctgtggttccttcttcctggcccctggtctcatctccactctatcatatccagcatctgcctgggccacctgcttttacttctttaagccagggccattttcttggc

SEQ ID NO: 93353 - DNA, 246 bp, Homo sapiens
tcttcccttcccttcttgcttgcttgacagggtctcactctgtcacccagcctgaagtgcagtggcatgattatagccgaatacagccttgaactcctgtatttaaatgatcctcctgcctcagccttctgagtagctaggactactcagtgtggtgtttgccaccacactgggctaatttttgtttttaatattttgcggagacagggtcttgctgtgttgcacaggccggtcttaaactcctct

SEQ ID NO: 93354 - DNA, 250 bp, Homo sapiens
cagatctgcatcgtactgctgcatcggagtgggctgcttccattatcccattcttacaccactgtcaatagagatttctagtttctcaagatgggccatatcttagaaaaactgttttgtgtttcttattaagaatttttcctaagaactttattagaggcagctagcggtcttaccagaaaagacttttcaataaatactgagatttgtttttcattatctctttctctttacagtgggcttctcattt

SEQ ID NO: 93355 - DNA, 612 bp, Homo sapiens
cttaaactcacgaggggctgcattcacaccatcagcagggagattacacttgtgtcatttgtgacactagacaggtcagctagcaccatcaagtacttttttttttatatgaactgctattgtgctaggcctccccaatcctgtacttgtgaggttcatttctttgaacccaaatacagaaattcctgtttattccttttgcaaatttgattattcagcctcttgggagaatttagattccaagttctgtcagtgagtatattagccattcctctttggctgtcttagccattcaaaagtgtgataaagatgcttccatatgacatattgaatgaagtatcagggccaggatgtcctgaaaaataccttattgaggacacagcataaatacaggagcctgcactccactcaccaaaatctaccatatggtgattcacatttcatccaccaaaatatcatgaaaaatgaggtcacaggcctcggtgacatcaaaacacttttaaaatctatatccgtttccattctacttttcttatgacccaattggggcaaggggaaagttcttgctactcattgaccatttgctaagtatttctaattcatcagatcaaa

SEQ ID NO: 93356 - DNA, 500 bp, Homo sapiens
gccacgggctgattgggactgtcgggtgttgctttaagttaacaaggtgcacatcacagcgaccccaagtgatgtcccaaagggaggagacattagtctggccgaagtgaagtctgtggctttatatgtaaaagcactcgtatgcaactgttacctttgaaactcagatcctagttacgaactataagaacgtgcccctccagtagagggagactgtctcactgatgttgatttctttattcatttccgcatctgttacacgaacttcgtgtcataaattgctatcctttcatttgaaagtgtaaaaaatttcctgcatttttatcatttctgtatacttgagtttattagagattgttatgttaggcgacactgtataaaattgtatggatattttgagtgaaaatcaaaagtaaaattcacatgtatttccttttttatattttcatccaatttcttgacaacttgaataaatttcataaagagccttcctaacatga

SEQ ID NO: 93357 - DNA, 370 bp, Homo sapiens
ttttggagacagaattttgctctgtcgccaggctggaagtgcagtggtgcgatctgggctcactgcaacctctgcctcccgggttcaagcgattctccctgcctcagccctaccgaaaagcagggattacaggcgcctgcctgccatgcccggctaatttttttggtatttttagtagagatggggtttcaccatgttggccagcatggtctccatctcttgacctcgtgatccacccacctcggcctcccaaagtgctgggattgcaagcgtgagccactgcgcccggccactaataatttttaaaagcccctagaactaccgtagcttctaaaaagggaggaaaggaacgattcacaagtattgaatt

SEQ ID NO: 93358 - DNA, 1835 bp, Homo sapiens
  misc_feature (17)..(17): n is a, c, g, or t
gggtgcagtggtgcganctcggatcactgcaagctccgcctcctaggttcagaccattctcctgcctcagcttcccaggtagctgggactgcaggcgcccgccactgcgcccggctaattttttgcatttttagtggagacagggtttcaccgtgttagccaggatggtctcgatctcctgatctgcccgcctcagcctcccaaagtgctgggattacaggcatgagccaccgcgcccggcccaggcacttaatttttgtgtttgacttagtaacaagtgcaaactattacgggagcagatggagtcaattggccttcatgtgactgtcagtgggaaattggtccaagcagagggaatactggttcaggaaactggtttgggaaggttaggcaaacgggaagtgctatggtggagagaaagattactctggccgggctgtaaaggacggctacaatgggaggctgaaggcagaaccaagaaaatgggagtgagtatggaaaaggtacgattcagacggcataatggacgggacttggagactgaattgtagtgggccgaccacaaaatgataaggcatggaaggaagtagagtttggggggaaggatccctagtcccttaatggctaccttcttccccaggagttgttaggccatccgatcccctggcctgggaaagaaacactgatttcgttgctggcttgttcactcaccagaagctacagctactaacagttctaaaaactgtttcatgtgatgaggaacagacgaaaatagttttgagccctaagtccgccgattccagtgctttcttgaacccgcatttactaaaatattttcatgactgccaagctttgaatagcctgctgtgttcatggaggctcatactggcgatctctagtggctggctaaagcttgaattgcaaaagatctaatttctggtctaatgtatatatgccttaaatatagttgcgttcaaacgtgggagctgcaggtgcaacttgattttatgacaaatgtctgccacataatttgcacaagcagtgctcgtcaagggcagctaaatcaggcgagctttcaatcaaaataaatgtactactaaaccctacttagcggctaactagcccaagagcagacagcccacggacggactgcaagtcggaagcgcgggcggaagctgtgcagcgcccacctggtggctccatcggccgcgttcatcagtcagcacgacccgacctcagtggcgtcctcacaacacagaccggaccttgggtcttaccccggcacctgagaaccacttccggtgagtagcttctacttccggagacgatgactcccccgcgtcccagaccggaagaagcccggcggagaccggcctcgctcggccacttccggcaagggcggagccggccagtggtgcgcgagcgcagataactcccctggagaggcgggatgttcaactccacccctggtccttgggcggccgtgggtccccttcgaagcggaggaatggccaacctcgccgcacttcgagcccctttagggtgcgtttaagaacagtgggcgtggcctttacgtaaatcttcgagatgggaacctccagaatttgtctcaattgtctaaaaggtaatgagcgtcagcgacattcaagggcactttgggctaaaaaagaaagtgcttgtacacggatggaaatattctagaagaacataaaaggaatttcctcttaggaggttagggaaatgagcacgaagtatgttttggtgcagttttttgttcaacccaatgcgtattttcatattgagaggcaatataaatggagcgaaagtatcttgag

SEQ ID NO: 93359 - DNA, 2210 bp, Homo sapiens
  misc_feature (17)..(17): n is a, c, g, or t
gggtgcagtggtgcganctcggatcactgcaagctccgcctcctaggttcagaccattctcctgcctcagcttcccaggtagctgggactgcaggcgcccgccactgcgcccggctaattttttgcatttttagtggagacagggtttcaccgtgttagccaggatggtctcgatctcctgatctgcccgcctcagcctcccaaagtgctgggattacaggcatgagccaccgcgcccggcccaggcacttaatttttgtgtttgacttagtaacaagtgcaaactattacgggagcagatggagtcaattggccttcatgtgactgtcagtgggaaattggtccaagcagagggaatactggttcaggaaactggtttgggaaggttaggcaaacgggaagtgctatggtggagagaaagattactctggccgggctgtaaaggacggctacaatgggaggctgaaggcagaaccaagaaaatgggagtgagtatggaaaaggtacgattcagacggcataatggacgggacttggagactgaattgtagtgggccgaccacaaaatgataaggcatggaaggaagtagagtttggggggaaggatccctagtcccttaatggctaccttcttccccaggagttgttaggccatccgatcccctggcctgggaaagaaacactgatttcgttgctggcttgttcactcaccagaagctacagctactaacagttctaaaaactgtttcatgtgatgaggaacagacgaaaatagttttgagccctaagtccgccgattccagtgctttcttgaacccgcatttactaaaatattttcatgactgccaagctttgaatagcctgctgtgttcatggaggctcatactggcgatctctagtggctggctaaagcttgaattgcaaaagatctaatttctggtctaatgtatatatgccttaaatatagttgcgttcaaacgtgggagctgcaggtgcaacttgattttatgacaaatgtctgccacataatttgcacaagcagtgctcgtcaagggcagctaaatcaggcgagctttcaatcaaaataaatgtactactaaaccctacttagcggctaactagcccaagagcagacagcccacggacggactgcaagtcggaagcgcgggcggaagctgtgcagcgcccacctggtggctccatcggccgcgttcatcagtcagcacgacccgacctcagtggcgtcctcacaacacagaccggaccttgggtcttaccccggcacctgagaaccacttccggtgagtagcttctacttccggagacgatgactcccccgcgtcccagaccggaagaagcccggcggagaccggcctcgctcggccacttccggcaagggcggagccggccagtggtgcgcgagcgcagataactcccctggagaggcgggatgttcaactccacccctggtccttgggcggccgtgggtccccttcgaagcggaggaatggccaacctcgccgcacttcgagcccctttagggtgcgtttaagaacagtgggcgtggcctttacgtaaatcttcgagatgggaacctccagaatttgtctcaattgtctaaaaggtaatgagcgtcagcgacattcaagggcactttgggctaaaaaagaaagtgcttgtacacggatggaaatattctagaagaacataaaaggaatttcctcttaggaggttagggaaatgagcacgaagtatgttttggtgcagttttttgttcaacccaatgcgtattttcatattgagaggcaatataaatggagcgaaagtatcttgagaaaaaaaaaaaaactaccagaacttgccgttgctgaaaagtaatattttctctttcgagagttttcatggccttttaaattacacccccacctccacaggcaaataaatttgttttggaatgcataccacatcatctggctctagaaacgtattttgtgtagctcccctagcaagaatataggttaaagcgtaaatttaattcctggctctattttacatcccaatttttattttcctctcattcccactttacgttgtttcaaataacctagtttgtgtatccctgtaagtcattttggtataaagtaggttataagtgtacatgcgaaaagatgtttttaacaaaaatgtaactgagctgtgactaatcccac

SEQ ID NO: 93360 - DNA, 219 bp, Homo sapiens
gtggagaaccgcaggagatgagattggaaagtagtaataagccatgtggataagaacagaggagcgggttttaagggggacgtcctgaaatgctgctcatgtcgtttcagttccatagaccacaggaaatgcaggtgagagggcagcccggtgggaaggaaggaagagggtggtggtgagccaggtgagtgtggagccgcccagggcaccgtgctgtgc

SEQ ID NO: 93361 - DNA, 291 bp, Homo sapiens
agatttttaagatatttttaatcacatcatttgacatgtagtcagtattagtggtggcttaatgcattaatcagttatccctagttccaaaatatgcactcgaaaacaagaagtatttgtgtcattaatgaaaagagcaccttgggagtcagagggatttggttgccagtcatgccagttgttaacccagtggttctcaactgggggagttttgtcctccctgccttctccccaaggacatttggcaatgtccagagtcattttttatcgtgacaattggatagggggatt

SEQ ID NO: 93362 - DNA, 275 bp, Homo sapiens
acacagtgtgggggatttgaggaggttgcacacagtggggggacttgaggtggcacacagtagagggatttgggggggttgcacagagtggggggatttgagaaggttgcacacactacgggggatttcgggaggttgcagagtgggggaaattgggcaggttgcacagagtggtggggatttgaggaggttgcacacagtgggggggatttgagattgcacacagtggggggatttgaggaggttgctcacagtggggggatttggggacattg

SEQ ID NO: 93363 - DNA, 630 bp, Homo sapiens
ggctcggtcccctcgcgacgtgtatccaggatggtctcgatctccgactcgtgatctacacgcctcggcatctcaaagtgctgggattacaggcgtgagccaccacacttggccagactgcagtgttattggaggctgtggtgaggctttgctgaggatggggatgccaggaagtcttgtccttcagcatcagtggtagtggcggtggaccaggtgtgtcaatactagggaccatgggcagcgtttgtgggcactgatgatagcctgtctgtgtgggccaatccctgggactccaggtggcttctttggttgctggcagtgggccagatgggcaggtgcaccactgggctcctgggtggtgtgtgtggcaggctgatctctagttctccaggtgacctatacaggttctggtggtgggtaggcaggcgtttcctcaggcctctcagtagtaagtgtgagcaccagctctggaggcaggtgagtcaatctccaggtccccggatggtacattcaggcaccagcatattcctatgcatttctagataaaagtatttttcagaaaacctgagcatatgtcctattaatacaacttaccctcatcagctctgcatgagaagaaggcggaattcc

SEQ ID NO: 93364 - DNA, 1119 bp, Homo sapiens
acattttctaggttgtttttatttctacaccattattctgggaattcttccattgataactagaatattcaacagtttgcttagcattaaacagtgtgagatcataaccctgtgctttggactttattcttctagacctgccattccaggaagtgccagaatataccaaaataaaaatccccataaaagcatttttaaacaaaaatccctgggtaatgtttgagttattttaaatctagatcaaaatcttggattcttctgagtccatgatgacaaatgtttggatgaaaagtagaaaatacagttaaaaataaaaatgtcctaaagtttacagatttttgagtttgtgtacatatcttcaaactcactccttgcatgatagggttggttttaatggtttatttttatcagcaccaagttgcattgcactattgaggctgagcaaatgctggtggaaaggtgagttttcatttctggcaatggatcattatttgtacactgtaaatatcatgcccagctacccctttcccttatctcttcccctgggataaatgttaaggaatagtaatacttattatggtatgtttaagaaaccttggacattaccctgaatcaaaacttcaaatgttaggtggcagcaggaaacaaaagattacagcttgaatgaaattttaaaattgaatgttgtaaaactatttttgaacgttttagctgccttatttatgttaatataactgtagagagatgccaaatgtataatatcagaagggaaaactacgattttgctgtgcctacaattgtttacattttttaaatctccagttttcaaaagtattttaaattgtcaaacatttgctaaaactggattataacctcacctgagaatgagagaagaaaatcttcctggcatattttccagtctgaaacttttggttactttcaggtattttttttcttgcatacaaaaatcattgagaaagtactttctacagttattctaagcagtcattaaaaatgctttgataggtttccccacatggtaactaccatgtcctggaatataatatgctatctttgtcaaaatatgaataataaaacattaatcgtaggatgcctcct

SEQ ID NO: 93365 - DNA, 370 bp, Homo sapiens
cctagtgcaggcaagagcttagtccaagccaatgacagtcccataaatttcacttaacacatgaaaatttccctcctccagtactctcctctagacacaatcattgttatcatagaaattctatggatatgaaatatcatatatatatatattttttttttttttttttcacctattgaattagaaaagccatgaactggcccggtgcagtggctcactcctgtaatcccagcactttgagaggctgaggtgggtggatcgcttgagctcaggaggtcaagaccagcctgggcaatatggcaaaaacccttctctaccaaaaaatacaaaaattagctgggcgtggtggcacacgcctgtagtcccagct

SEQ ID NO: 93366 - DNA, 429 bp, Homo sapiens
aatggctggtgtggggtgtcctgagtacctgagtgtgcataaaagctgaccctggggtccatgggcatagcagggtgggagctggtgggcccgaggtggggatgagaggggaggagggaagtggggagaggatcagggagtgcttctgagaggccaggagaaagaagggcacaggagctccctggcaagtctgggcaggccacagccctgggcatttgggggacaggctgggggtgggcaggctggggcaggccgggacctggagatggggctgcagacggtacaggcctaggcttgtgtccccagtcctggcgggctccactgaagccccatcacccccagctctgccagtgcctgcagggagaaagggcgaggtttgggaacaactggctcctgctccccatcacaccacctgggtacccctaaagc

SEQ ID NO: 93367 - DNA, 712 bp, Homo sapiens
gggctctctttagtcctacatactctcttggggttttgtgattctcttaaaaccttaagtttccaccttaagatttttgtagactttcctttgggatttagttgtgacagggtgctgaaaatgcaaaaatatttgtgtcttccatattgacatacttagataaattagattggtttggggaacactgaagttacagaatggaaaaggaggaaggaggagtgcataaaagtaaagaacatttttgagataactaacatttgttttttatagctatttattttcctggggtaaaagaaaaattgtgacaagtatcctagaagaaattacaagttaaaagaacaataaccatatcctctattcttagtttctgatgctttgttttaaaactttgcctttaccacttatatggtattaggaaataaaaaacatggtactttgttctcctgcttcctagacgaaatctaagcaatattttatccacttctttttagtaaaagaaatacatattgcctgttggggtcatgagctatgtagggaatgaaaaaattttttaaaggagaattataaagagaaggaggatacaagagaaaggaaaacgaaagctggtgggaagttgagccatgtttatctctagtggaatccttaccttgtgttttaaaattgttaaatgtttgtatatatgagaaatccctgaaaagttatatgtaattta

SEQ ID NO: 93368 - DNA, 448 bp, Homo sapiens
atatatatatatatctttataccagatctatatgtacacatataatatgacttacatcatcaccctctgaccctatcacattcaggattctaaagcagggagcatcaagtttgccaaagtcaaggaaaaggaaagtcatgcacacaaaccaaagggaacatttcttcctgatttcataaggttgtttgttccatgcacatatatttacaaatatacacatatgtacccatattttcccaccctaagaatatcaatttatagccttaaggaaatcggtcagccatatccctaatgctgatatagaggcaaagaatacacaacagaaaatacaaagcaaaaatttagactgcagatactctctttgcttctctggagcagggtataaaagatatcaacaattcaagagccaacattgtactaatcaatctaaaataaatgagttgcacgc

SEQ ID NO: 93369 - DNA, 782 bp, Homo sapiens
tccctcccaggaagtgtaggaatcatccaaagtggtaaaagagcagcgcttctaaactctgacttcacatggaaaataacgcgactactaaaactgataacaatagcagtccatgccatttgacaggggtgtgtaggagaggtggtgagcaagctgaaatcccttcaggtatttgcagaacttctgagcaaaagctaaagctaaaattaacattaaatatgcaaagtatttttaacccaacataaattaacaatgttcctatttcaattctattgctcttgggatgactatgtcctttggaaaatgtttaaataacttaagatttccgtcatgagtttactatttcaaaacttatttttttaacagcaagatacctttttatgttaccaggagtgttaccagctagctgccaaaacctggttgaagttctcccactttatattgtaaatgattacatagtttattagtaattgtgtcccctgtccacccactggtccatttggatgggaaaattttcaaaataacttcataagaaaatgataagaaaaatgtggtcaccggtatcatgaggaacttccagacagctcagcacagaaaagttggttttaaagtcctcgaaaacgttactggtaatgagcttccactcctttagtcgttgtgcatagatacaccacagagtaaggttataaaaataaaagttgtttcaggaaatttcccattgctttattacatgatcaatgagagtaaagagaaatggaagttgacgggataggaatgaggga

SEQ ID NO: 93370 - DNA, 544 bp, Homo sapiens
agtgtaataaggagggggtgttgccttaggcttccacatcatctggctctcctctctacagcaagcctggttgcccctcagaattacagcaaccagaaagcaagcaaggacagccagggaaggcaaagttggcactgtgctgaacatggcttagaactaggggctggatggcctccttggttttgtaaactcttaaatttatacttgtcagtggtcttccctaccttagcctactggtctatataaaatccaaatatttagggggagagggtggaacaaacagatctgagagtgagaaatggatagaatcttaaaccagaatacaacctcaaaggactttgaaaagaacaactctgaacacaagggagctataatcaagttctagaaaataagagggataaaaatccaaatattcttgataatggttcctctgaacattgacctatattatttgtttgtttttcagatagggtcttgctctgtcacccaggctggagtgcagtcgtgcaagcatagctcaatgcagcctcaaactcctgggctc

SEQ ID NO: 93371 - DNA, 416 bp, Homo sapiens
aggtctgcatgggcccggcctcggcctcacagcggactctccacgcccagctagctctcgcctcactgcaccctccccagtccaaagctcctgcctttcggccacttcggcaggcccagctcctgcctgccagtggcctctttaggcccagctcattcctcacaacggcctttccaggccccgtttttcccttccggcagcctcttggcctctaatttttttatcttttgtgtataaatcccaaaatatggaattttggaatatttccaccattatataaatattttggtaggtaatttatttggagtgagtttctgcaccaagcccgaattttttattttattttccttattatttggtgttaaacaggtttaatgacggtcatggcaactttttggcacaatgaaaaatatcgc

SEQ ID NO: 93372 - DNA, 454 bp, Homo sapiens
cttagttcctcagttccccgcccttcagcttctctttgttagccactgggtgggtgtaaccaaacctcagtcacactgtggccccagcagctgggcttctctctcccccattacattgcagacattcttttcacatcattttgtcctctctgctgcattccctacatttggcttcattccctctgtgcaaacttctgtttcaagggacagcagtttgccaaggagatgctggcagagagggtccagttctttcctttctatctgaagagcccagtgtcattcattagcatatgagaagaatggttgtaaataaacatcaaatgaggttaacgagctgcagctcatcaatattaatgaagtccacctcacagccttggtatgaggtaccaatggctctaatcacaagaagcagtttcataaggccccagttacagggcaggaagggttagatcca

SEQ ID NO: 93373 - DNA, 248 bp, Homo sapiens
gtgtgagccttgggagacatctgagctaaagatacagatgtggctatctttgcctgtaggtgggctttgaaaccacaggtgtggatgagattgtcaagtgtgagggtgtggacagtaattgacccctaaggctggtagacagtgaggagctggagaagtaggaggaaaatcaggccaagggaagtggtcagctgtgttaaagtttgccgaaggtaaaagaaagaatatgaccaatgccaaagagatgt

SEQ ID NO: 93374 - DNA, 296 bp, Homo sapiens
tatcacacatcaatgtccatttaaaaaaatgtgttgccatgaataagaaaatgccacttttaaacattctttagtaacaaggaaagaaatataaaaatcctttatccccatgaatggtataaactgtcattggtgtaatgtttgccaggctgaggctgcgtcttactgtgcttctctgagttaaggaagaagattggggttaggttattggttgattgtgaagaaggtgtaatgaggaatggccatggcaagagaggcgtaaacaagatagacaatggtgtctgtgccagacagag

SEQ ID NO: 93375 - DNA, 346 bp, Homo sapiens
attaaagaggtttaaatttgtctatatctttattttaattgtatatcaataatttaattcatataaaattattccaattatactattatagaggactgatgagataaattttgtataatatattaactctaccctcagtctacaatcaaatagtactttccttagatgtaattttgcttgtgagaaatttgctgcacaattccattttgacttttaggcataatagagctaagtcacttgagacactttgtattaaaatccttcaagctttggctatctagagattagaaggacccagaatggaaacaaggcatactaaagataaacacatctctactaaaaatac

SEQ ID NO: 93376 - DNA, 299 bp, Homo sapiens
atgacagctagctccattctctctctttctccatagtaaaccaagcctgtggactatgtaatagaaagacatccttctcctaaaattccctttatggtttcaggaccataaattgctctcttcatatgtagcatatagcagttatactgcctgtatttctcagtaagtgctactgaaatttaaaataagctgcattttaatgtctacattatgtgagcattacatgagaagtgtgtatgttccaatatgcattagcatgatggactcacacataggtagccatgcatctgttctatatt

SEQ ID NO: 93377 - DNA, 426 bp, Homo sapiens
ggggagggagagggagaggagaagggagaagggttgggagacggaaagagaggaagggggagggaaagaaaaatgctaaagggcaggaaaagggaagtctcattttcttgtcttatttcatatgaataggtaactggttaattataagtcacctgctgtgatccacatgggaactccctgccaagtggctgctgccttctagatggtttgtactatgagttccatgcaaggtgactggcatccatttcctgcctgcctcaccctgtaattcctcaaacttactgcggtaccacctttaacactaaggaaatgcaaacacggcatggtggactcactcagtgagttgacagaagactccaaatatctgatataaggctccttagatcactttgcactgaaatctcaaattattattctcttccaatt

SEQ ID NO: 93378 - DNA, 253 bp, Homo sapiens
agaatattaaggaattttgtcttatgagaatgagggatttcttttaataagtaaaatgatattttcagaataacatgagaccacaaaacagtgtttaccatttcttctttgctctctatttgtagcagcgtggaaccttcctttaaacaattctcttgactggtgtgccaaatgctccaaatttcagagacatagtaacaactttctctgttctgaatccaattgtttggacaaggactgctgttatgggctt

SEQ ID NO: 93379 - DNA, 557 bp, Homo sapiens
gggattcgcccttaagcagtgtaaccacgcagagtactttttttttgtctcttttttttttccagattctggaagaagcaactgaagaagaaacagcacttcataatcgaattatgcccacagtggttcgtcctcccaaacaactgcttcctgaatctacccctgcaggaaaccaagaaatggtgagaaatcacttaaagctagataaaactgttggtggttacttatatttatttttaatttttttcaatttttattttttatagagacaaggtcttgctatgttgcccaggctggtctcaaactcctgggctcaaatgatccccctcaaccttggcctccccaagtgctgggattacaggtgtgagccaccacccccagcctgcttacttacatttaattctcattttgaaatgttgctagaagaggaagtcacaagtcctttatttaactcttatgcagagataggaatattttaactgcgtttatcagaaactacacctctgtgttgagatataattctcagtactatcacttttctttcctgtttactgagc

SEQ ID NO: 93380 - DNA, 371 bp, Homo sapiens
aactttagtgtgttaatagagttaatctgtactattttttcttgttttgtttcgtttttaggagctgtttgaacttccagtaagtgaagaatgtttacttcttactaagtatatttgttttgattctttaagaatattaagtgctttgtgcctcttttgaaatgatataggctacttatgagataggaattgttcgccagttcccattttcttctgctttgcaacgtatgagtgtggttgccagggtgctgggggataggaaaatggacgcctacatgaacatgtagcgaacttattacacgctccgtctctgttgtccttttgcaggtgcggcgatttactctgtctgcgcggcggggatctctctacag

SEQ ID NO: 93381 - DNA, 5724 bp, Homo sapiens
caactgattttaaactctacagagatgcctacttgtttctactatgtcttgtggcagttgctggcattgggtttatctacactattattaatagcattttaaatgaggtacaagttggggtcataattatcgagtctcttgatattatcacaattactgtgccccctgcacttcctgctgcaatgactgctggtattgtgtatgctcagagaagactgaaaaaaatcggtattttctgtatcagtcctcaaagaataaatatttgtggacagctcaatcttgtttgctttgacaagactggaactctaactgaagatggtttagatctttgggggattcaacgagtggaaaatgcacgatttctttcaccagaagaaaatgtgtgcaatgagatgttggtaaaatcccagtttgttgcttgtatggctacttgtcattcacttacaaaaattgaaggagtgctctctggtgatccacttgatctgaaaatgtttgaggctattggatggattctggaagaagcaactgaagaagaaacagcacttcataatcgaattatgcccacagtggttcgtcctcccaaacaactgcttcctgaatctacccctgcaggaaaccaagaaatggagctgtttgaacttccagctacttatgagataggaattgttcgccagttcccattttcttctgctttgcaacgtatgagtgtggttgccagggtgctgggggataggaaaatggacgcctacatgaaaggagcgcccgaggccattgccggtctctgtaaacctgaaacagttcctgtcgattttcaaaacgttttggaagacttcactaaacagggcttccgtgtgattgctcttgcacacagaaaattggagtcaaaactgacatggcataaagtacagaatattagcagagatgcaattgagaacaacatggattttatgggattaattataatgcagaacaaattaaagcaagaaacccctgcagtacttgaagatttgcataaagccaacattcgcaccgtcatggtcacaggtgacagtatgttgactgctgtctctgtggccagagattgtggaatgattctacctcaggataaagtgattattgctgaagcattacctccaaaggatgggaaagttgccaaaataaattggcattatgcagactccctcacgcagtgcagtcatccatcagcaattgacccagaggctattccggttaaattggtccatgatagcttagaggatcttcaaatgactcgttatcattttgcaatgaatggaaaatcattctcagtgatactggagcattttcaagaccttgttcctaagttgatgttgcatggcaccgtgtttgcccgtatggcacctgatcagaagacacagttgatagaagcattgcaaaatgttgattattttgttgggatgtgtggtgatggcgcaaatgattgtggtgctttgaagagggcacacggaggcatttccttatcggagctcgaagcttcagtggcatctccctttacctctaagactcctagtatttcctgtgtgccaaaccttatcagggaaggccgtgctgctttaataacttccttctgtgtgtttaaattcatggcattgtacagcattatccagtacttcagtgttactctgctgtattctatcttaagtaacctaggagacttccagtttctcttcattgatctggcaatcattttggtagtggtatttacaatgagtttaaatcctgcctggaaagaacttgtggcacaaagaccaccttcgggtcttatatctggggcccttctcttctccgttttgtctcagattatcatctgcattggatttcaatctttgggttttttttgggtcaaacagcaaccttggtatgaagtgtggcatccaaaatcagatgcttgtaatacaacaggaagcgggttttggaattcttcacacgtagacaatgaaaccgaacttgatgaacataatatacaaaattatgaaaataccacagtgttttttatttccagttttcagtacctcatagtggcaattgccttttcaaaaggaaaacccttcaggcaaccttgctacaaaaattatttttttgttttttctgtgatttttttatatatttttatattattcatcatgttgtatccagttgcctctgttgaccaggttcttcagatagtgtgtgtaccatatcagtggcgtgtaactatgctcatcattgttcttgtcaatgcctttgtgtctatcacagtggaggagtcagtggatcggtggggaaaatgctgcttaccctgggccctgggctgtagaaagaagacaccaaaggcaaagtacatgtatctggcgcaggagctcttggttgatccagaatggccaccaaaacctcagacaaccacagaagctaaagctttagttaaggagaatggatcatgtcaaatcatcaccataacatagcagtgaatcagtctcagtggtattgctgatagcagtattcaggaatatgtgattttaggagtttctgatcctgtgtgtcagaatggcactagttcagtttatgtcccttctgatatagtagcttatttgacagctttgctcttccttaaaataaaaacagaaaaatatatcgtcctaacagttaaattaacaatcaatccataaagtcctatatcttcattcagcaacccaaatattacatacatttccagaattttcttgattgttactttcagtgatattctttatattgggtacaggagaagtttggtgtttggtaggtttttcaacattagtttttgagactagtttacctcttcacatttatgctcacaaccctcttgttagaaaagtctgtgtttatatacaggctgtaagtttgtgattgataaaaagaagatgagtgttaattagcctccagtgaaaatatactgaaagcctgttttcatttgattccaatgtttcttccaaagaattctgtataaacatatgccaattccctatgatggtctagagttaggaatgagtgtttatggtgttgcttatagaacaactcaggtaatctccatttctggttttatattttctgtacaaactgcctgggttttatttttctaatcagcaaggtgcttcactgccttcttgagacgcctctcaaagctcttaaatggctcctgtgctatgtgtggtgttggcagtctaatttgcttctgttaaatgttgtagaacctttttcactaggaaataagattcatttctttcggcagtagatgtagattcatcttttaacgtttcttcaaatttgtttctgtcaggctttgtgttattttaaatggttttttaaaattttcttctatgttttcaattacctaaagacataggataatagttttttttaagttagaattttacctcataaaattttttgaggtttgatgtatgtctctgtcttatcaataatgaggcttaaaaaatactggatttgaatggctgccgttttttcaaagcaatatgaatttgatgagtttgttttatgccattaggtggcgccagaggtcagaacatgtctattttgaattggatcgttacaaatgagcatatttgatgcggaaatttctgggagaaaaaaaattgaggaaataaagttaaaaaattgacattcattgagccaaaagagatgtggagaaacatttttcacctttctgtttggcctgattaacatttaaattcttgccaaaattaaggtaacttttaaaaaacaccttttataggtggatccagcagtctggcaacgcccacagttaccacaacacagaaaactgatcgtgctataaaatggacgctaaactatgaaaacagtgtgacattgttctctgttcttccagagccagtaacatgcttgctcgtgctttctacttctagctgatcattcttttcccaacatatatttacaaatttaccaaattttacctagaattttaggaccaaatggttctcactctttatgctgcaaagacctggatgatgtttggtaactatagaaaaatagaaattacactcaggatcactgttactgctattgccactgatgattcctgcaaaaatataatcgaagttttccatcaaatgtataatatgctattaatacacattagatgataacagttgttccatgaatgattctatgaagctatgcatcttagacctcttgagctgtgaattagcactattttctatagttacttattctctggatcattttataatttccatattaatttcaaatatgctcgtgttattcttcagtgatttccacaattgtgcattttattctttggtttaagtactgaagcatataatgaaagtaattgctaagtagcagcttaaaaattcaattatccgattgtatttaacatctttaagagcatgatcataaagagctatttttgacaccccccccccacttttttaacatttagagttagtaagggttttatatctcttctgtccatattgttttcaaaggaatgaggtgtttaggtggctggaaaagcatttgtaggaagttagatttgaatatagacaaggtgggttattcacgttgagaatgttatttgaagaatgcctgtgaagccaggtgtgggttctactcagtgccatagatagactgagtcttctctcgtaggttaccattacatagtaattttgattctgaatttcacattaaattatttgagtttatacagacctaaattttaaaatctgtacatatattattttgatgtattaagatgaatattgctgatttaaattttatttatgcacatacttaaaggacagaaatgtctgggaaagtaattgttaaataatgatatgtaactttttaactttttaaataaataacaagatttttaatgtgtgtctccctcagggttgtttaaagttttttttctccctcaagtataaatagtggtaactatatgttttgtatcttctagcaccaactgctgtaaagcaatgctgcaaataatgcttgaatacaagtggctaagccaacaacagaataaatacttttatagtagttttataatcctgaaattcgaaagctttcccaattgcacttgcatctaaacaaaactgttgcagtttttactctatttattttgttccccatgtttatgaaagtcctgcacagtttcaaaggcatggtaaataatatatcaatgtttatgtagtctgttacagaaacagctatagataacattatccagtgaagagcaaaattcaagctttagaaaatattcatgcatgcaattttgacatatctaaaaataggtttttgtatatttatggtgggaggtggttgggaacttttaacaaaatggggtgttaatttttgtacagtctgtgggcatttacacatttttaatgtattaaaatttggtaattatgtgtacattaaattaataaaagttacttctagttatgatttgtgaattccctaagaccttggatttttttaagtaactttatatcagaaatgatactgcatctttatatttttaaaattgtattgctgctcaagaatggtaccctcttgtcaaaaaggcatacattcataattgtacattcagcattgtaaataatcttatgaaaccttttttgattgaagctattcaaaataaaattttaatgaatgaaataa

SEQ ID NO: 93382 - DNA, 5461 bp, Homo sapiens
gggattcgcccttaagcagtgtaaccacgcagagtactttttttttgtctcttttttttttccagattctggaagaagcaactgaagaagaaacagcacttcataatcgaattatgcccacagtggttcgtcctcccaaacaactgcttcctgaatctacccctgcaggaaaccaagaaatggagctgtttgaacttccagtaagtgaagaatgtttacttcttactaagtatatttgttttgattctttaagaatattaagtgctttgtgcctcttttgaaatgatataggctacttatgagataggaattgttcgccagttcccattttcttctgctttgcaacgtatgagtgtggttgccagggtgctgggggataggaaaatggacgcctacatgaaaggagcgcccgaggccattgccggtctctgtaaacctgaaacagttcctgtcgattttcaaaacgttttggaagacttcactaaacagggcttccgtgtgattgctcttgcacacagaaaattggagtcaaaactgacatggcataaagtacagaatattagcagagatgcaattgagaacaacatggattttatgggattaattataatgcagaacaaattaaagcaagaaacccctgcagtacttgaagatttgcataaagccaacattcgcaccgtcatggtcacaggtgacagtatgttgactgctgtctctgtggccagagattgtggaatgattctacctcaggataaagtgattattgctgaagcattacctccaaaggatgggaaagttgccaaaataaattggcattatgcagactccctcacgcagtgcagtcatccatcagcaattgacccagaggctattccggttaaattggtccatgatagcttagaggatcttcaaatgactcgttatcattttgcaatgaatggaaaatcattctcagtgatactggagcattttcaagaccttgttcctaagttgatgttgcatggcaccgtgtttgcccgtatggcacctgatcagaagacacagttgatagaagcattgcaaaatgttgattattttgttgggatgtgtggtgatggcgcaaatgattgtggtgctttgaagagggcacacggaggcatttccttatcggagctcgaagcttcagtggcatctccctttacctctaagactcctagtatttcctgtgtgccaaaccttatcagggaaggccgtgctgctttaataacttccttctgtgtgtttaaattcatggcattgtacagcattatccagtacttcagtgttactctgctgtattctatcttaagtaacctaggagacttccagtttctcttcattgatctggcaatcattttggtagtggtatttacaatgagtttaaatcctgcctggaaagaacttgtggcacaaagaccaccttcgggtcttatatctggggcccttctcttctccgttttgtctcagattatcatctgcattggatttcaatctttgggttttttttgggtcaaacagcaaccttggtatgaagtgtggcatccaaaatcagatgcttgtaatacaacaggaagcgggttttggaattcttcacacgtagacaatgaaaccgaacttgatgaacataatatacaaaattatgaaaataccacagtgttttttatttccagttttcagtacctcatagtggcaattgccttttcaaaaggaaaacccttcaggcaaccttgctacaaaaattatttttttgttttttctgtgatttttttatatatttttatattattcatcatgttgtatccagttgcctctgttgaccaggttcttcagatagtgtgtgtaccatatcagtggcgtgtaactatgctcatcattgttcttgtcaatgcctttgtgtctatcacagtggagaacttcttccttgacatggtcctttggaaagttgtgttcaaccgagacaaacaaggagagtatcggttcagcaccacacagccaccgcaggagtcagtggatcggtggggaaaatgctgcttaccctgggccctgggctgtagaaagaagacaccaaaggcaaagtacatgtatctggcgcaggagctcttggttgatccagaatggccaccaaaacctcagacaaccacagaagctaaagctttagttaaggagaatggatcatgtcaaatcatcaccataacatagcagtgaatcagtctcagtggtattgctgatagcagtattcaggaatatgtgattttaggagtttctgatcctgtgtgtcagaatggcactagttcagtttatgtcccttctgatatagtagcttatttgacagctttgctcttccttaaaataaaaacagaaaaatatatcgtcctaacagttaaattaacaatcaatccataaagtcctatatcttcattcagcaacccaaatattacatacatttccagaattttcttgattgttactttcagtgatattctttatattgggtacaggagaagtttggtgtttggtaggtttttcaacattagtttttgagactagtttacctcttcacatttatgctcacaaccctcttgttagaaaagtctgtgtttatatacaggctgtaagtttgtgattgataaaaagaagatgagtgttaattagcctccagtgaaaatatactgaaagcctgttttcatttgattccaatgtttcttccaaagaattctgtataaacatatgccaattccctatgatggtctagagttaggaatgagtgtttatggtgttgcttatagaacaactcaggtaatctccatttctggttttatattttctgtacaaactgcctgggttttatttttctaatcagcaaggtgcttcactgccttcttgagacgcctctcaaagctcttaaatggctcctgtgctatgtgtggtgttggcagtctaatttgcttctgttaaatgttgtagaacctttttcactaggaaataagattcatttctttcggcagtagatgtagattcatcttttaacgtttcttcaaatttgtttctgtcaggctttgtgttattttaaatggttttttaaaattttcttctatgttttcaattacctaaagacataggataatagttttttttaagttagaattttacctcataaaattttttgaggtttgatgtatgtctctgtcttatcaataatgaggcttaaaaaatactggatttgaatggctgccgttttttcaaagcaatatgaatttgatgagtttgttttatgccattaggtggcgccagaggtcagaacatgtctattttgaattggatcgttacaaatgagcatatttgatgcggaaatttctgggagaaaaaaaattgaggaaataaagttaaaaaattgacattcattgagccaaaagagatgtggagaaacatttttcacctttctgtttggcctgattaacatttaaattcttgccaaaattaaggtaacttttaaaaaacaccttttataggtggatccagcagtctggcaacgcccacagttaccacaacacagaaaactgatcgtgctataaaatggacgctaaactatgaaaacagtgtgacattgttctctgttcttccagagccagtaacatgcttgctcgtgctttctacttctagctgatcattcttttcccaacatatatttacaaatttaccaaattttacctagaattttaggaccaaatggttctcactctttatgctgcaaagacctggatgatgtttggtaactatagaaaaatagaaattacactcaggatcactgttactgctattgccactgatgattcctgcaaaaatataatcgaagttttccatcaaatgtataatatgctattaatacacattagatgataacagttgttccatgaatgattctatgaagctatgcatcttagacctcttgagctgtgaattagcactattttctatagttacttattctctggatcattttataatttccatattaatttcaaatatgctcgtgttattcttcagtgatttccacaattgtgcattttattctttggtttaagtactgaagcatataatgaaagtaattgctaagtagcagcttaaaaattcaattatccgattgtatttaacatctttaagagcatgatcataaagagctatttttgacaccccccccccacttttttaacatttagagttagtaagggttttatatctcttctgtccatattgttttcaaaggaatgaggtgtttaggtggctggaaaagcatttgtaggaagttagatttgaatatagacaaggtgggttattcacgttgagaatgttatttgaagaatgcctgtgaagccaggtgtgggttctactcagtgccatagatagactgagtcttctctcgtaggttaccattacatagtaattttgattctgaatttcacattaaattatttgagtttatacagacctaaattttaaaatctgtacatatattattttgatgtattaagatgaatattgctgatttaaattttatttatgcacatacttaaaggacagaaatgtctgggaaagtaattgttaaataatgatatgtaactttttaactttttaaataaataacaagatttttaatgtgtgtctccctcagggttgtttaaagttttttttctccctcaagtataaatagtggtaactatatgttttgtatcttctagcaccaactgctgtaaagcaatgctgcaaataatgcttgaatacaagtggctaagccaacaacagaataaatacttttatagtagttttataatcctgaaattcgaaagctttcccaattgcacttgcatctaaacaaaactgttgcagtttttactctatttattttgttccccatgtttatgaaagtcctgcacagtttcaaaggcatggtaaataatatatcaatgtttatgtagtctgttacagaaacagctatagataacattatccagtgaagagcaaaattcaagctttagaaaatattcatgcatgcaattttgacatatctaaaaataggtttttgtatatttatggtgggaggtggttgggaacttttaacaaaatggggtgttaatttttgtacagtctgtgggcatttacacatttttaatgtattaaaatttggtaattatgtgtacattaaattaataaaagttacttctagttatgatttgtgaattccctaagaccttggatttttttaagtaactttatatcagaaatgatactgcatctttatatttttaaaattgtattgctgctcaagaatggtaccctcttgtcaaaaaggcatacattcataattgtacattcagcattgtaaataatcttatgaaaccttttttgattgaagctattcaaaataaaattttaatgaatgaaataa

SEQ ID NO: 93383 - DNA, 5903 bp, Homo sapiens
caactgattttaaactctacagagatgcctacttgtttctactatgtcttgtggcagttgctggcattgggtttatctacactattattaatagcattttaaatgaggtacaagttggggtcataattatcgagtctcttgatattatcacaattactgtgccccctgcacttcctgctgcaatgactgctggtattgtgtatgctcagagaagactgaaaaaaatcggtattttctgtatcagtcctcaaagaataaatatttgtggacagctcaatcttgtttgctttgacaagactggaactctaactgaagatggtttagatctttgggggattcaacgagtggaaaatgcacgatttctttcaccagaagaaaatgtgtgcaatgagatgttggtaaaatcccagtttgttgcttgtatggctacttgtcattcacttacaaaaattgaaggagtgctctctggtgatccacttgatctgaaaatgtttgaggctattggatggattctggaagaagcaactgaagaagaaacagcacttcataatcgaattatgcccacagtggttcgtcctcccaaacaactgcttcctgaatctacccctgcaggaaaccaagaaatggagctgtttgaacttccagctacttatgagataggaattgttcgccagttcccattttcttctgctttgcaacgtatgagtgtggttgccagggtgctgggggataggaaaatggacgcctacatgaaaggagcgcccgaggccattgccggtctctgtaaacctgaaacagttcctgtcgattttcaaaacgttttggaagacttcactaaacagggcttccgtgtgattgctcttgcacacagaaaattggagtcaaaactgacatggcataaagtacagaatattagcagagatgcaattgagaacaacatggattttatgggattaattataatgcagaacaaattaaagcaagaaacccctgcagtacttgaagatttgcataaagccaacattcgcaccgtcatggtcacaggtgacagtatgttgactgctgtctctgtggccagagattgtggaatgattctacctcaggataaagtgattattgctgaagcattacctccaaaggatgggaaagttgccaaaataaattggcattatgcagactccctcacgcagtgcagtcatccatcagcaattgacccagaggctattccggttaaattggtccatgatagcttagaggatcttcaaatgactcgttatcattttgcaatgaatggaaaatcattctcagtgatactggagcattttcaagaccttgttcctaagttgatgttgcatggcaccgtgtttgcccgtatggcacctgatcagaagacacagttgatagaagcattgcaaaatgttgattattttgttgggatgtgtggtgatggcgcaaatgattgtggtgctttgaagagggcacacggaggcatttccttatcggagctcgaagcttcagtggcatctccctttacctctaagactcctagtatttcctgtgtgccaaaccttatcagggaaggccgtgctgctttaataacttccttctgtgtgtttaaattcatggcattgtacagcattatccagtacttcagtgttactctgctgtattctatcttaagtaacctaggagacttccagtttctcttcattgatctggcaatcattttggtagtggtatttacaatgagtttaaatcctgcctggaaagaacttgtggcacaaagaccaccttcgggtcttatatctggggcccttctcttctccgttttgtctcagattatcatctgcattggatttcaatctttgggttttttttgggtcaaacagcaaccttggtatgaagtgtggcatccaaaatcagatgcttgtaatacaacaggaagcgggttttggaattcttcacacgtagacaatgaaaccgaacttgatgaacataatatacaaaattatgaaaataccacagtgttttttatttccagttttcagtacctcatagtggcaattgccttttcaaaaggaaaacccttcaggcaaccttgctacaaaaattatttttttgttttttctgtgatttttttatatatttttatattattcatcatgttgtatccagttgcctctgttgaccaggttcttcagatagtgtgtgtaccatatcagtggcgtgtaactatgctcatcattgttcttgtcaatgcctttgtgtctatcacagtggaggagtcagtggatcggtggggaaaatgctgcttaccctgggccctgggctgtagaaagaagacaccaaaggcaaagtacatgtatctggcgcaggagctcttggttgatccagaatggccaccaaaacctcagacaaccacagaagctaaagctttagttaaggagaatggatcatgtcaaatcatcaccataacatagcagtgaatcagtctcagtggtattgctgatagcagtattcaggaatatgtgattttaggagtttctgatcctgtgtgtcagaatggcactagttcagtttatgtcccttctgatatagtagcttatttgacagctttgctcttccttaaaataaaaacagaaaaatatatcgtcctaacagttaaattaacaatcaatccataaagtcctatatcttcattcagcaacccaaatattacatacatttccagaattttcttgattgttactttcagtgatattctttatattgggtacaggagaagtttggtgtttggtaggtttttcaacattagtttttgagactagtttacctcttcacatttatgctcacaaccctcttgttagaaaagtctgtgtttatatacaggctgtaagtttgtgattgataaaaagaagatgagtgttaattagcctccagtgaaaatatactgaaagcctgttttcatttgattccaatgtttcttccaaagaattctgtataaacatatgccaattccctatgatggtctagagttaggaatgagtgtttatggtgttgcttatagaacaactcaggtaatctccatttctggttttatattttctgtacaaactgcctgggttttatttttctaatcagcaaggtgcttcactgccttcttgagacgcctctcaaagctcttaaatggctcctgtgctatgtgtggtgttggcagtctaatttgcttctgttaaatgttgtagaacctttttcactaggaaataagattcatttctttcggcagtagatgtagattcatcttttaacgtttcttcaaatttgtttctgtcaggctttgtgttattttaaatggttttttaaaattttcttctatgttttcaattacctaaagacataggataatagttttttttaagttagaattttacctcataaaattttttgaggtttgatgtatgtctctgtcttatcaataatgaggcttaaaaaatactggatttgaatggctgccgttttttcaaagcaatatgaatttgatgagtttgttttatgccattaggtggcgccagaggtcagaacatgtctattttgaattggatcgttacaaatgagcatatttgatgcggaaatttctgggagaaaaaaaattgaggaaataaagttaaaaaattgacattcattgagccaaaagagatgtggagaaacatttttcacctttctgtttggcctgattaacatttaaattcttgccaaaattaaggtaacttttaaaaaacaccttttataggtggatccagcagtctggcaacgcccacagttaccacaacacagaaaactgatcgtgctataaaatggacgctaaactatgaaaacagtgtgacattgttctctgttcttccagagccagtaacatgcttgctcgtgctttctacttctagctgatcattcttttcccaacatatatttacaaatttaccaaattttacctagaattttaggaccaaatggttctcactctttatgctgcaaagacctggatgatgtttggtaactatagaaaaatagaaattacactcaggatcactgttactgctattgccactgatgattcctgcaaaaatataatcgaagttttccatcaaatgtataatatgctattaatacacattagatgataacagttgttccatgaatgattctatgaagctatgcatcttagacctcttgagctgtgaattagcactattttctatagttacttattctctggatcattttataatttccatattaatttcaaatatgctcgtgttattcttcagtgatttccacaattgtgcattttattctttggtttaagtactgaagcatataatgaaagtaattgctaagtagcagcttaaaaattcaattatccgattgtatttaacatctttaagagcatgatcataaagagctatttttgacaccccccccccacttttttaacatttagagttagtaagggttttatatctcttctgtccatattgttttcaaaggaatgaggtgtttaggtggctggaaaagcatttgtaggaagttagatttgaatatagacaaggtgggttattcacgttgagaatgttatttgaagaatgcctgtgaagccaggtgtgggttctactcagtgccatagatagactgagtcttctctcgtaggttaccattacatagtaattttgattctgaatttcacattaaattatttgagtttatacagacctaaattttaaaatctgtacatatattattttgatgtattaagatgaatattgctgatttaaattttatttatgcacatacttaaaggacagaaatgtctgggaaagtaattgttaaataatgatatgtaactttttaactttttaaataaataacaagatttttaatgtgtgtctccctcagggttgtttaaagttttttttctccctcaagtataaatagtggtaactatatgttttgtatcttctagcaccaactgctgtaaagcaatgctgcaaataatgcttgaatacaagtggctaagccaacaacagaataaatacttttatagtagttttataatcctgaaattcgaaagctttcccaattgcacttgcatctaaacaaaactgttgcagtttttactctatttattttgttccccatgtttatgaaagtcctgcacagtttcaaaggcatggtaaataatatatcaatgtttatgtagtctgttacagaaacagctatagataacattatccagtgaagagcaaaattcaagctttagaaaatattcatgcatgcaattttgacatatctaaaaataggtttttgtatatttatggtgggaggtggttgggaacttttaacaaaatggggtgttaatttttgtacagtctgtgggcatttacacatttttaatgtattaaaatttggtaattatgtgtacattaaattaataaaagttacttctagttatgatttgtgaattccctaagaccttggatttttttaagtaactttatatcagaaatgatactgcatctttatatttttaaaattgtattgctgctcaagaatggtaccctcttgtcaaaaaggcatacattcataattgtacattcagcattgtaaataatcttatgaaaccttttttgattgaagctattcaaaataaaattttaatgaatgaaataaaaaaaaaaaaaaggtttgggggggcgggccagaaagttttaaacattttgtgggggggccagaggtagagagtgctcacggtcccaagaaccgggcgacatgggggttcaccaaaaaaggctgggcggcgtgtgcaaacaaggggggggaagggttaaaaggcagcgcatcgccgggta

SEQ ID NO: 93384 - DNA, 1946 bp, Homo sapiens
caagggagcagtgtagcaacttcaaatctgtgttctctaactctgatatttaactccctcttatagagacccttgtgattacattgggctctcttgaataatttagaataatcttcccatcgcaggattcttaaccaaattacatctgcaaagtcccttttgcccacaccacctgagtccaacatatatttacaaatttaccaaattttacctagaattttaggaccaaatggttctcactctttatgctgcaaagacctggatgatgtttggtaactatagaaaaatagaaattacactcaggatcactgttactgctattgccactgatgattcctgcaaaaatataatcgaagttttccatcaaatgtataatatgctattaatacacattagatgataacagttgttccatgaatgattctatgaagctatgcatcttagacctcttgagctgtgaattagcactattttctatagttacttattctctggatcattttataatttccatattaatttcaaatatgctcgtgttattcttcagtgatttccacaattgtgcattttattctttggtttaagtactgaagcatataatgaaagtaattgctaagtagcagcttaaaaattcaattatccgattgtatttaacatctttaagagcatgatcataaagagctatttttgacaccccccccccacttttttaacatttagagttagtaagggttttatatctcttctgtccatattgttttcaaaggaatgaggtgtttaggtggctggaaaagcatttgtaggaagttagatttgaatatagacaaggtgggttattcacgttgagaatgttatttgaagaatgcctgtgaagccaggtgtgggttctactcagtgccatagatagactgagtcttctctcgtaggttaccattacatagtaattttgattctgaatttcacattaaattatttgagtttatacagacctaaattttaaaatctgtacatatattattttgatgtattaagatgaatattgctgatttaaattttatttatgcacatacttaaaggacagaaatgtctgggaaagtaattgttaaataatgatatgtaactttttaactttttaaataaataacaagatttttaatgtgtgtctccctcagggttgtttaaagttttttttctccctcaagtataaatagtggtaactatatgttttgtatcttctagcaccaactgctgtaaagcaatgctgcaaataatgcttgaatacaagtggctaagccaacaacagaataaatacttttatagtagttttataatcctgaaattcgaaagctttcccaattgcacttgcatctaaacaaaactgttgcagtttttactctatttattttgttccccatgtttatgaaagtcctgcacagtttcaaaggcatggtaaataatatatcaatgtttatgtagtctgttacagaaacagctatagataacattatccagtgaagagcaaaattcaagctttagaaaatattcatgcatgcaattttgacatatctaaaaataggtttttgtatatttatggtgggaggtggttgggaacttttaacaaaatggggtgttaatttttgtacagtctgtgggcatttacacatttttaatgtattaaaatttggtaattatgtgtacattaaattaataaaagttacttctagttatgatttgtgaattccctaagaccttggatttttttaagtaactttatatcagaaatgatactgcatctttatatttttaaaattgtattgctgctcaagaatggtaccctcttgtcaaaaaggcatacattcataattgtacattcagcattgtaaataatcttatgaaaccttttttgattgaagctattcaaaataaaattttaatgaatgaaataa

SEQ ID NO: 93385 - DNA, 5470 bp, Homo sapiens
caactgattttaaactctacagagatgcctacttgtttctactatgtcttgtggcagttgctggcattgggtttatctacactattattaatagcattttaaatgaggtacaagttggggtcataattatcgagtctcttgatattatcacaattactgtgccccctgcacttcctgctgcaatgactgctggtattgtgtatgctcagagaagactgaaaaaaatcggtattttctgtatcagtcctcaaagaataaatatttgtggacagctcaatcttgtttgctttgacaagactggaactctaactgaagatggtttagatctttgggggattcaacgagtggaaaatgcacgatttctttcaccagaagaaaatgtgtgcaatgagatgttggtaaaatcccagtttgttgcttgtatggctacttgtcattcacttacaaaaattgaaggagtgctctctggtgatccacttgatctgaaaatgtttgaggctattggatggattctggaagaagcaactgaagaagaaacagcacttcataatcgaattatgcccacagtggttcgtcctcccaaacaactgcttcctgaatctacccctgcaggaaaccaagaaatggagctgtttgaacttccagctacttatgagataggaattgttcgccagttcccattttcttctgctttgcaacgtatgagtgtggttgccagggtgctgggggataggaaaatggacgcctacatgaaaggagcgcccgaggccattgccggtctctgtaaacctgaaacagttcctgtcgattttcaaaacgttttggaagacttcactaaacagggcttccgtgtgattgctcttgcacacagaaaattggagtcaaaactgacatggcataaagtacagaatattagcagagatgcaattgagaacaacatggattttatgggattaattataatgcagaacaaattaaagcaagaaacccctgcagtacttgaagatttgcataaagccaacattcgcaccgtcatggtcacaggtgacagtatgttgactgctgtctctgtggccagagattgtggaatgattctacctcaggataaagtgattattgctgaagcattacctccaaaggatgggaaagttgccaaaataaattggcattatgcagactccctcacgcagtgcagtcatccatcagcaattgacccagaggctattccggttaaattggtccatgatagcttagaggatcttcaaatgactcgttatcattttgcaatgaatggaaaatcattctcagtgatactggagcattttcaagaccttgttcctaagttgatgttgcatggcaccgtgtttgcccgtatggcacctgatcagaagacacagttgatagaagcattgcaaaatgttgattattttgttgggatgtgtggtgatggcgcaaatgattgtggtgctttgaagagggcacacggaggcatttccttatcggagctcgaagcttcagtggcatctccctttacctctaagactcctagtatttcctgtgtgccaaaccttatcagggaaggccgtgctgctttaataacttccttctgtgtgtttaaattcatggcattgtacagcattatccagtacttcagtgttactctgctgtattctatcttaagtaacctaggagacttccagtttctcttcattgatctggcaatcattttggtagtggtatttacaatgagtttaaatcctgcctggaaagaacttgtggcacaaagaccaccttcgggtcttatatctggggcccttctcttctccgttttgtctcagattatcatctgcattggatttcaatctttgggttttttttgggtcaaacagcaaccttggtatgaagtgtggcatccaaaatcagatgcttgtaatacaacaggaagcgggttttggaattcttcacacgtagacaatgaaaccgaacttgatgaacataatatacaaaattatgaaaataccacagtgttttttatttccagttttcagtacctcatagtggcaattgccttttcaaaaggaaaacccttcaggcaaccttgctacaaaaattatttttttgttttttctgtgatttttttatatatttttatattattcatcatgttgtatccagttgcctctgttgaccaggttcttcagatagtgtgtgtaccatatcagtggcgtgtaactatgctcatcattgttcttgtcaatgcctttgtgtctatcacagtggaggagtcagtggatcggtggggaaaatgctgcttaccctgggccctgggctgtagaaagaagacaccaaaggcaaagtacatgtatctggcgcaggagctcttggttgatccagaatggccaccaaaacctcagacaaccacagaagctaaagctttagttaaggagaatggatcatgtcaaatcatcaccataacatagcagtgaatcagtctcagtggtattgctgatagcagtattcaggaatatgtgattttaggagtttctgatcctgtgtgtcagaatggcactagttcagtttatgtcccttctgatatagtagcttatttgacagctttgctcttccttaaaataaaaacagaaaaatatatcgtcctaacagttaaattaacaatcaatccataaagtcctatatcttcattcagcaacccaaatattacatacatttccagaattttcttgattgttactttcagtgatattctttatattgggtacaggagaagtttggtgtttggtaggtttttcaacattagtttttgagactagtttacctcttcacatttatgctcacaaccctcttgttagaaaagtctgtgtttatatacaggctgtaagtttgtgattgataaaaagaagatgagtgttaattagcctccagtgaaaatatactgaaagcctgttttcatttgattccaatgtttcttccaaagaattctgtataaacatatgccaattccctatgatggtctagagttaggaatgagtgtttatggtgttgcttatagaacaactcaggtaatctccatttctggttttatattttctgtacaaactgcctgggttttatttttctaatcagcaaggtgcttcactgccttcttgagacgcctctcaaagctcttaaatggctcctgtgctatgtgtggtgttggcagtctaatttgcttctgttaaatgttgtagaacctttttcactaggaaataagattcatttctttcggcagtagatgtagattcatcttttaacgtttcttcaaatttgtttctgtcaggctttgtgttattttaaatggttttttaaaattttcttctatgttttcaattacctaaagacataggataatagttttttttaagttagaattttacctcataaaattttttgaggtttgatgtatgtctctgtcttatcaataatgaggcttaaaaaatactggatttgaatggctgccgttttttcaaagcaatatgaatttgatgagtttgttttatgccattaggtggcgccagaggtcagaacatgtctattttgaattggatcgttacaaatgagcatatttgatgcggaaatttctgggagaaaaaaaattgaggaaataaagttaaaaaattgacattcattgagccaaaagagatgtggagaaacatttttcacctttctgtttggcctgattaacatttaaattcttgccaaaattaaggtaacttttaaaaaacaccttttataggtggatccagcagtctggcaacgcccacagttaccacaacacagaaaactgatcgtgctataaaatggacgctaaactatgaaaacagtgtgacattgttctctgttcttccagagccagtaacatgcttgctcgtgctttctacttctagctgatcattcttttcccaacatatatttacaaatttaccaaattttacctagaattttaggaccaaatggttctcactctttatgctgcaaagacctggatgatgtttggtaactatagaaaaatagaaattacactcaggatcactgttactgctattgccactgatgattcctgcaaaaatataatcgaagttttccatcaaatgtataatatgctattaatacacattagatgataacagttgttccatgaatgattctatgaagctatgcatcttagacctcttgagctgtgaattagcactattttctatagttacttattctctggatcattttataatttccatattaatttcaaatatgctcgtgttattcttcagtgatttccacaattgtgcattttattctttggtttaagtactgaagcatataatgaaagtaattgctaagtagcagcttaaaaattcaattatccgattgtatttaacatctttaagagcatgatcataaagagctatttttgacaccccccccccacttttttaacatttagagttagtaagggttttatatctcttctgtccatattgttttcaaaggaatgaggtgtttaggtggctggaaaagcatttgtaggaagttagatttgaatatagacaaggtgggttattcacgttgagaatgttatttgaagaatgcctgtgaagccaggtgtgggttctactcagtgccatagatagactgagtcttctctcgtaggttaccattacatagtaattttgattctgaatttcacattaaattatttgagtttatacagacctaaattttaaaatctgtacatatattattttgatgtattaagatgaatattgctgatttaaattttatttatgcacatacttaaaggacagaaatgtctgggaaagtaattgttaaataatgatatgtaactttttaactttttaaataaataacaagatttttaatgtgtgtctccctcagggttgtttaaagttttttttctccctcaagtataaatagtggtaactatatgttttgtatcttctagcaccaactgctgtaaagcaatgctgcaaataatgcttgaatacaagtggctaagccaacaacagaataaatacttttatagtagttttataatcctgaaattcgaaagctttcccaattgcacttgcatctaaacaaaactgttgcagtttttactctatttattttgttccccatgtttatgaaagtcctgcacagtttcaaaggcatggtaaataatatatcaatgtttatgtagtctgttacagaaacagctatagataacattatccagtgaagagcaaaattcaagctttagaaaatattcatgcatgcaattttgacatatctaaaaataggtttttgtatatttatggtgggaggtggttgggaacttttaacaaaatggggtgttaatttttgtacagtctgtgcgagccacacgtatccgatatcatgatcattgctattcctg

SEQ ID NO: 93386 - DNA, 1458 bp, Homo sapiens
gtaatttttaagctgctacttagcaattactttcattatatgcttcagtacttaaaccaaagaataaaatgcacaattgtggaaatcactgaagaataacacgagcatataatgaaagtaattgctaagtagcagcttaaaaattcaattatccgattgtatttaacatctttaagagcatgatcataaagagctatttttgacaccccccccccacttttttaacatttagagttagtaagggttttatatctcttctgtccatattgttttcaaaggaatgaggtgtttaggtggctggaaaagcatttgtaggaagttagatttgaatatagacaaggtgggttattcacgttgagaatgttatttgaagaatgcctgtgaagccaggtgtgggttctactcagtgccatagatagactgagtcttctctcgtaggttaccattacatagtaattttgattctgaatttcacattaaattatttgagtttatacagacctaaattttaaaatctgtacatatattattttgatgtattaagatgaatattgctgatttaaattttatttatgcacatacttaaaggacagaaatgtctgggaaagtaattgttaaataatgatatgtaactttttaactttttaaataaataacaagatttttaatgtgtgtctccctcagggttgtttaaagttttttttctccctcaagtataaatagtggtaactatatgttttgtatcttctagcaccaactgctgtaaagcaatgctgcaaataatgcttgaatacaagtggctaagccaacaacagaataaatacttttatagtagttttataatcctgaaattcgaaagctttcccaattgcacttgcatctaaacaaaactgttgcagtttttactctatttattttgttccccatgtttatgaaagtcctgcacagtttcaaaggcatggtaaataatatatcaatgtttatgtagtctgttacagaaacagctatagataacattatccagtgaagagcaaaattcaagctttagaaaatattcatgcatgcaattttgacatatctaaaaataggtttttgtatatttatggtgggaggtggttgggaacttttaacaaaatggggtgttaatttttgtacagtctgtgggcatttacacatttttaatgtattaaaatttggtaattatgtgtacattaaattaataaaagttacttctagttatgatttgtgaattccctaagaccttggatttttttaagtaactttatatcagaaatgatactgcatctttatatttttaaaattgtattgctgctcaagaatggtaccctcttgtcaaaaaggcatacattcataattgtacattcagcattgtaaataatcttatgaaaccttttttgattgaagctattcaaaataaaattttaatgaatgaaataa

SEQ ID NO: 93387 - DNA, 1305 bp, Homo sapiens
  misc_feature (23)..(23): n is a, c, g, or t
tcgtcggcccaacatcgcaggtnagcatgatcataaagagctatttttgacaccccccccccacttttttaacatttagagttagtaagggttttatatctcttctgtccatattgttttcaaaggaatgaggtgtttaggtggctggaaaagcatttgtaggaagttagatttgaatatagacaaggtgggttattcacgttgagaatgttatttgaagaatgcctgtgaagccaggtgtgggttctactcagtgccatagatagactgagtcttctctcgtaggttaccattacatagtaattttgattctgaatttcacattaaattatttgagtttatacagacctaaattttaaaatctgtacatatattattttgatgtattaagatgaatattgctgatttaaattttatttatgcacatacttaaaggacagaaatgtctgggaaagtaattgttaaataatgatatgtaactttttaactttttaaataaataacaagatttttaatgtgtgtctccctcagggttgtttaaagttttttttctccctcaagtataaatagtggtaactatatgttttgtatcttctagcaccaactgctgtaaagcaatgctgcaaataatgcttgaatacaagtggctaagccaacaacagaataaatacttttatagtagttttataatcctgaaattcgaaagctttcccaattgcacttgcatctaaacaaaactgttgcagtttttactctatttattttgttccccatgtttatgaaagtcctgcacagtttcaaaggcatggtaaataatatatcaatgtttatgtagtctgttacagaaacagctatagataacattatccagtgaagagcaaaattcaagctttagaaaatattcatgcatgcaattttgacatatctaaaaataggtttttgtatatttatggtgggaggtggttgggaacttttaacaaaatggggtgttaatttttgtacagtctgtgggcatttacacatttttaatgtattaaaatttggtaattatgtgtacattaaattaataaaagttacttctagttatgatttgtgaattccctaagaccttggatttttttaagtaactttatatcagaaatgatactgcatctttatatttttaaaattgtattgctgctcaagaatggtaccctcttgtcaaaaaggcatacattcataattgtacattcagcattgtaaataatcttatgaaaccttttttgattgaagctattcaaaataaaattttaatgaatgaaataa

SEQ ID NO: 93388 - DNA, 1064 bp, Homo sapiens
tcgatcgagctcggtaccgaatctcgaagtgtgagcatgtcaaatgtgggagtcgtcagtaattttgattctgaatttcacattaaattatttgagtttatacagacctaaattttaaaatctgtacatatattattttgatgtattaagatgaatattgctgatttaaattttatttatgcacatacttaaaggacagaaatgtctgggaaagtaattgttaaataatgatatgtaactttttaactttttaaataaataacaagatttttaatgtgtgtctccctcagggttgtttaaagttttttttctccctcaagtataaatagtggtaactatatgttttgtatcttctagcaccaactgctgtaaagcaatgctgcaaataatgcttgaatacaagtggctaagccaacaacagaataaatacttttatagtagttttataatcctgaaattcgaaagctttcccaattgcacttgcatctaaacaaaactgttgcagtttttactctatttattttgttccccatgtttatgaaagtcctgcacagtttcaaaggcatggtaaataatatatcaatgtttatgtagtctgttacagaaacagctatagataacattatccagtgaagagcaaaattcaagctttagaaaatattcatgcatgcaattttgacatatctaaaaataggtttttgtatatttatggtgggaggtggttgggaacttttaacaaaatggggtgttaatttttgtacagtctgtgggcatttacacatttttaatgtattaaaatttggtaattatgtgtacattaaattaataaaagttacttctagttatgatttgtgaattccctaagaccttggatttttttaagtaactttatatcagaaatgatactgcatctttatatttttaaaattgtattgctgctcaagaatggtaccctcttgtcaaaaaggcatacattcataattgtacattcagcattgtaaataatcttatgaaaccttttttgattgaagctattcaaaataaaattttaatgaatgaaataa

SEQ ID NO: 93389 - DNA, 675 bp, Homo sapiens
  misc_feature (5)..(5): n is a, c, g, or t
  misc_feature (26)..(26): n is a, c, g, or t
cccgngaattcggccattatggccgngaacagaataaatacttttatagtagttttataatcctgaaattcgaaagctttcccaattgcacttgcatctaaacaaaactgttgcagtttttactctatttattttgttccccatgtttatgaaagtcctgcacagtttcaaaggcatggtaaataatatatcaatgtttatgtagtctgttacagaaacagctatagataacattatccagtgaagagcaaaattcaagctttagaaaatattcatgcatgcaattttgacatatctaaaaataggtttttgtatatttatggtgggaggtggttgggaacttttaacaaaatggggtgttaatttttgtacagtctgtgggcatttacacatttttaatgtattaaaatttggtaattatgtgtacattaaattaataaaagttacttctagttatgatttgtgaattccctaagaccttggatttttttaagtaactttatatcagaaatgatactgcatctttatatttttaaaattgtattgctgctcaagaatggtaccctcttgtcaaaaaggcatacattcataattgtacattcagcattgtaaataatcttatgaaaccttttttgattgaagctattcaaaataaaattttaatgaatgaaataa

SEQ ID NO: 93390 - DNA, 1833 bp, Homo sapiens
gggattcgcccttaagcagtgtaaccacgcagagtactttttttttgtctcttttttttttccagattctggaagaagcaactgaagaagaaacagcacttcataatcgaattatgcccacagtggttcgtcctcccaaacaactgcttcctgaatctacccctgcaggaaaccaagaaatggagctgtttgaacttccagtaagtgaagaatgtttacttcttactaagtatatttgttttgattctttaagaatattaagtgctttgtgcctcttttgaaatgatataggctacttatgagataggaattgttcgccagttcccattttcttctgctttgcaacgtatgagtgtggttgccagggtgctgggggataggaaaatggacgcctacatgaaaggagcgcccgaggccattgccggtctctgtaaacctgaaacagttcctgtcgattttcaaaacgttttggaagacttcactaaacagggcttccgtgtgattgctcttgcacacagaaaattggagtcaaaactgacatggcataaagtacagaatattagcagagatgcaattgagaacaacatggattttatgggattaattataatgcagaacaaattaaagcaagaaacccctgcagtacttgaagatttgcataaagccaacattcgcaccgtcatggtcacaggtgacagtatgttgactgctgtctctgtggccagagattgtggaatgattctacctcaggataaagtgattattgctgaagcattacctccaaaggatgggaaagttgccaaaataaattggcattatgcagactccctcacgcagtgcagtcatccatcagcaattgacccagaggctattccggttaaattggtccatgatagcttagaggatcttcaaatgactcgttatcattttgcaatgaatggaaaatcattctcagtgatactggagcattttcaagaccttgttcctaagttgatgttgcatggcaccgtgtttgcccgtatggcacctgatcagaagacacagttgatagaagcattgcaaaatgttgattattttgttgggatgtgtggtgatggcgcaaatgattgtggtgctttgaagagggcacacggaggcatttccttatcggagctcgaagcttcagtggcatctccctttacctctaagactcctagtatttcctgtgtgccaaaccttatcagggaaggccgtgctgctttaataacttccttctgtgtgtttaaattcatggcattgtacagcattatccagtacttcagtgttactctgctgtattctatcttaagtaacctaggagacttccagtttctcttcattgatctggcaatcattttggtagtggtatttacaatgagtttaaatcctgcctggaaagaacttgtggcacaaagaccaccttcgggtcttatatctggggcccttctcttctccgttttgtctcagattatcatctgcattggatttcaatctttgggttttttttgggtcaaacagcaaccttggtatgaagtgtggcatccaaaatcagatgcttgtaatacaacaggaagcgggttttggaattcttcacacgtagacaatgaaaccgaacttgatgaacataatatacaaaattatgaaaataccacagtgttttttatttccagttttcagtacctcatagtggcaattgccttttcaaaaggaaaacccttcaggcaaccttgctacaaaaattgatctcttctttttgtgtattctaagatgctgttatattaacccaaagatactctacagagaataaagaaccta

SEQ ID NO: 93391 - DNA, 381 bp, Homo sapiens
ttatttttaaactgtaagtggaagaaccatacattatcgttactctgccagcccagtcatggagactgtagtagattctcagcaagtacatgtttgatacgttcacgtttccattttaatttcaatacatttaaaatattttgaaaattaggtgacagtatgttgactgctgtctctgtggccagagattgtggaatgattctacctcaggataaagtgattattgctgaagcattacctccaaaggatgggaaagttgccaaaataaattggcattatgcagactccctcacgcagtgcagtcatccatcagcaattgacccagaggtaaggtcaagatcgactgtccgttttaaagtttgttgatttaaatttagtctg

SEQ ID NO: 93392 - DNA, 221 bp, Homo sapiens
gtcatttcctcttatttttctctgctaatgtgtgctttaacaaacctgtttaaaacgacaagcctttaatcaactggggtgttttgttttgtttttttcttattttcttaggagtcagtggatcggtggggaaaatgctgcttaccctgggccctgggctgtagaaagaagacaccaaaggcaaagtacatgtatctggcgcaggagctcttggttgatcc

SEQ ID NO: 93393 - DNA, 840 bp, Homo sapiens
atttcagcatcagaaaaataatttttatatgtttcttatactaatatttcatatttatatatataattgtgatctataagatagttcagaactttaagtgccgctttaaaagagtctcatgtgctttttatttagctaaagtacaatatccacagttttttctctatgacttcattctttcaggtgctctatcttgatagaagtggctaatcattttagtaaacagttatgtttcaggttattaagggataaatttttactgataacgttaaaagtagccatactaaagactgtaggcacaagcgctttgctctaaagatgaggaaattgagacaccaaaatgatttgccgataatgtgacagaaataggacaataacctagctcatttcacttgtggtctggtgctgtttgcaaagcagcacacctgtgttcattatagtgaaaagattcatagttccactgggggaatcttggtgtgttagctctttataatactgtaatagaaaagtcttaataagttaaatgttttgtagtttaagaaattaattaaaatcttaacattgttttgtttcttagttattttgttgggatgtgtggtgatggcgcaaatgattgtggtgtaagtatagtttttgtgatttagttttatagttcttactctagcctaaatcatattcacaaaacttaaccagttttcttaaaattattaggctttgaagagggcacacggaggcatttccttatcggagctcgaagcttcagtggcatctccctttacctctaagactcctagtatttcctgtgtgccaaaccttatcaggtagtacaaattaaaattt

SEQ ID NO: 93394 - DNA, 5671 bp, Homo sapiens
caactgattttaaactctacagagatgcctacttgtttctactatgtcttgtggcagttgctggcattgggtttatctacactattattaatagcattttaaatgaggtacaagttggggtcataattatcgagtctcttgatattatcacaattactgtgccccctgcacttcctgctgcaatgactgctggtattgtgtatgctcagagaagactgaaaaaaatcggtattttctgtatcagtcctcaaagaataaatatttgtggacagctcaatcttgtttgctttgacaagactggaactctaactgaagatggtttagatctttgggggattcaacgagtggaaaatgcacgatttctttcaccagaagaaaatgtgtgcaatgagatgttggtaaaatcccagtttgttgcttgtatggctacttgtcattcacttacaaaaattgaaggagtgctctctggtgatccacttgatctgaaaatgtttgaggctattggatggattctggaagaagcaactgaagaagaaacagcacttcataatcgaattatgcccacagtggttcgtcctcccaaacaactgcttcctgaatctacccctgcaggaaaccaagaaatggagctgtttgaacttccagctacttatgagataggaattgttcgccagttcccattttcttctgctttgcaacgtatgagtgtggttgccagggtgctgggggataggaaaatggacgcctacatgaaaggagcgcccgaggccattgccggtctctgtaaacctgaaacagttcctgtcgattttcaaaacgttttggaagacttcactaaacagggcttccgtgtgattgctcttgcacacagaaaattggagtcaaaactgacatggcataaagtacagaatattagcagagatgcaattgagaacaacatggattttatgggattaattataatgcagaacaaattaaagcaagaaacccctgcagtacttgaagatttgcataaagccaacattcgcaccgtcatggtcacaggtgacagtatgttgactgctgtctctgtggccagagattgtggaatgattctacctcaggataaagtgattattgctgaagcattacctccaaaggatgggaaagttgccaaaataaattggcattatgcagactccctcacgcagtgcagtcatccatcagcaattgacccagaggctattccggttaaattggtccatgatagcttagaggatcttcaaatgactcgttatcattttgcaatgaatggaaaatcattctcagtgatactggagcattttcaagaccttgttcctaagttgatgttgcatggcaccgtgtttgcccgtatggcacctgatcagaagacacagttgatagaagcattgcaaaatgttgattattttgttgggatgtgtggtgatggcgcaaatgattgtggtgctttgaagagggcacacggaggcatttccttatcggagctcgaagcttcagtggcatctccctttacctctaagactcctagtatttcctgtgtgccaaaccttatcagggaaggccgtgctgctttaataacttccttctgtgtgtttaaattcatggcattgtacagcattatccagtacttcagtgttactctgctgtattctatcttaagtaacctaggagacttccagtttctcttcattgatctggcaatcattttggtagtggtatttacaatgagtttaaatcctgcctggaaagaacttgtggcacaaagaccaccttcgggtcttatatctggggcccttctcttctccgttttgtctcagattatcatctgcattggatttcaatctttgggttttttttgggtcaaacagcaaccttggtatgaagtgtggcatccaaaatcagatgcttgtaatacaacaggaagcgggttttggaattcttcacacgtagacaatgaaaccgaacttgatgaacataatatacaaaattatgaaaataccacagtgttttttatttccagttttcagtacctcatagtggcaattgccttttcaaaaggaaaacccttcaggcaaccttgctacaaaaattatttttttgttttttctgtgatttttttatatatttttatattattcatcatgttgtatccagttgcctctgttgaccaggttcttcagatagtgtgtgtaccatatcagtggcgtgtaactatgctcatcattgttcttgtcaatgcctttgtgtctatcacagtggaggagtcagtggatcggtggggaaaatgctgcttaccctgggccctgggctgtagaaagaagacaccaaaggcaaagtacatgtatctggcgcaggagctcttggttgatccagaatggccaccaaaacctcagacaaccacagaagctaaagctttagttaaggagaatggatcatgtcaaatcatcaccataacatagcagtgaatcagtctcagtggtattgctgatagcagtattcaggaatatgtgattttaggagtttctgatcctgtgtgtcagaatggcactagttcagtttatgtcccttctgatatagtagcttatttgacagctttgctcttccttaaaataaaaacagaaaaatatatcgtcctaacagttaaattaacaatcaatccataaagtcctatatcttcattcagcaacccaaatattacatacatttccagaattttcttgattgttactttcagtgatattctttatattgggtacaggagaagtttggtgtttggtaggtttttcaacattagtttttgagactagtttacctcttcacatttatgctcacaaccctcttgttagaaaagtctgtgtttatatacaggctgtaagtttgtgattgataaaaagaagatgagtgttaattagcctccagtgaaaatatactgaaagcctgttttcatttgattccaatgtttcttccaaagaattctgtataaacatatgccaattccctatgatggtctagagttaggaatgagtgtttatggtgttgcttatagaacaactcaggtaatctccatttctggttttatattttctgtacaaactgcctgggttttatttttctaatcagcaaggtgcttcactgccttcttgagacgcctctcaaagctcttaaatggctcctgtgctatgtgtggtgttggcagtctaatttgcttctgttaaatgttgtagaacctttttcactaggaaataagattcatttctttcggcagtagatgtagattcatcttttaacgtttcttcaaatttgtttctgtcaggctttgtgttattttaaatggttttttaaaattttcttctatgttttcaattacctaaagacataggataatagttttttttaagttagaattttacctcataaaattttttgaggtttgatgtatgtctctgtcttatcaataatgaggcttaaaaaatactggatttgaatggctgccgttttttcaaagcaatatgaatttgatgagtttgttttatgccattaggtggcgccagaggtcagaacatgtctattttgaattggatcgttacaaatgagcatatttgatgcggaaatttctgggagaaaaaaaattgaggaaataaagttaaaaaattgacattcattgagccaaaagagatgtggagaaacatttttcacctttctgtttggcctgattaacatttaaattcttgccaaaattaaggtaacttttaaaaaacaccttttataggtggatccagcagtctggcaacgcccacagttaccacaacacagaaaactgatcgtgctataaaatggacgctaaactatgaaaacagtgtgacattgttctctgttcttccagagccagtaacatgcttgctcgtgctttctacttctagctgatcattcttttcccaacatatatttacaaatttaccaaattttacctagaattttaggaccaaatggttctcactctttatgctgcaaagacctggatgatgtttggtaactatagaaaaatagaaattacactcaggatcactgttactgctattgccactgatgattcctgcaaaaatataatcgaagttttccatcaaatgtataatatgctattaatacacattagatgataacagttgttccatgaatgattctatgaagctatgcatcttagacctcttgagctgtgaattagcactattttctatagttacttattctctggatcattttataatttccatattaatttcaaatatgctcgtgttattcttcagtgatttccacaattgtgcattttattctttggtttaagtactgaagcatataatgaaagtaattgctaagtagcagcttaaaaattcaattatccgattgtatttaacatctttaagagcatgatcataaagagctatttttgacaccccccccccacttttttaacatttagagttagtaagggttttatatctcttctgtccatattgttttcaaaggaatgaggtgtttaggtggctggttgagaatgttatttgaagaatgcctgtgaagccaggtgtgggttctactcagtgccatagatagactgagtcttctctcgtaggttaccattacatagtaattttgattctgaatttcacattaaattatttgagtttatacagacctaaattttaaaatctgtacatatattattttgatgtattaagatgaatattgctgatttaaattttatttatgcacatacttaaaggacagaaatgtctgggaaagtaattgttaaataatgatatgtaactttttaactttttaaataaataacaagatttttaatgtgtgtctccctcagggttgtttaaagttttttttctccctcaagtataaatagtggtaactatatgttttgtatcttctagcaccaactgctgtaaagcaatgctgcaaataatgcttgaatacaagtggctaagccaacaacagaataaatacttttatagtagttttataatcctgaaattcgaaagctttcccaattgcacttgcatctaaacaaaactgttgcagtttttactctatttattttgttccccatgtttatgaaagtcctgcacagtttcaaaggcatggtaaataatatatcaatgtttatgtagtctgttacagaaacagctatagataacattatccagtgaagagcaaaattcaagctttagaaaatattcatgcatgcaattttgacatatctaaaaataggtttttgtatatttatggtgggaggtggttgggaacttttaacaaaatggggtgttaatttttgtacagtctgtgggcatttacacatttttaatgtattaaaatttggtaattatgtgtacattaaattaataaaagttacttctagttatgatttgtgaattccctaagaccttggatttttttaagtaactttatatcagaaatgatactgcatctttatatttttaaaattgtattgctgctcaagaatggtaccctcttgtcaaaaaggcatacattcataattgtacattcagcattgtaaataatcttatgaaaccttttttgattgaagctattcaaaataaaattttaatgaatgaaataa

SEQ ID NO: 93395 - DNA, 3609 bp, Homo sapiens
caactgattttaaactctacagagatgcctacttgtttctactatgtcttgtggcagttgctggcattgggtttatctacactattattaatagcattttaaatgaggtacaagttggggtcataattatcgagtctcttgatattatcacaattactgtgccccctgcacttcctgctgcaatgactgctggtattgtgtatgctcagagaagactgaaaaaaatcggtattttctgtatcagtcctcaaagaataaatatttgtggacagctcaatcttgtttgctttgacaagactggaactctaactgaagatggtttagatctttgggggattcaacgagtggaaaatgcacgatttctttcaccagaagaaaatgtgtgcaatgagatgttggtaaaatcccagtttgttgcttgtatggctacttgtcattcacttacaaaaattgaaggagtgctctctggtgatccacttgatctgaaaatgtttgaggctattggatggattctggaagaagcaactgaagaagaaacagcacttcataatcgaattatgcccacagtggttcgtcctcccaaacaactgcttcctgaatctacccctgcaggaaaccaagaaatggagctgtttgaacttccagctacttatgagataggaattgttcgccagttcccattttcttctgctttgcaacgtatgagtgtggttgccagggtgctgggggataggaaaatggacgcctacatgaaaggagcgcccgaggccattgccggtctctgtaaacctgaaacagttcctgtcgattttcaaaacgttttggaagacttcactaaacagggcttccgtgtgattgctcttgcacacagaaaattggagtcaaaactgacatggcataaagtacagaatattagcagagatgcaattgagaacaacatggattttatgggattaattataatgcagaacaaattaaagcaagaaacccctgcagtacttgaagatttgcataaagccaacattcgcaccgtcatggtcacaggtgacagtatgttgactgctgtctctgtggccagagattgtggaatgattctacctcaggataaagtgattattgctgaagcattacctccaaaggatgggaaagttgccaaaataaattggcattatgcagactccctcacgcagtgcagtcatccatcagcaattgacccagaggctattccggttaaattggtccatgatagcttagaggatcttcaaatgactcgttatcattttgcaatgaatggaaaatcattctcagtgatactggagcattttcaagaccttgttcctaagttgatgttgcatggcaccgtgtttgcccgtatggcacctgatcagaagacacagttgatagaagcattgcaaaatgttgattattttgttgggatgtgtggtgatggcgcaaatgattgtggtgctttgaagagggcacacggaggcatttccttatcggagctcgaagcttcagtggcatctccctttacctctaagactcctagtatttcctgtgtgccaaaccttatcagggaaggccgtgctgctttaataacttccttctgtgtgtttaaattcatggcattgtacagcattatccagtacttcagtgttactctgctgtattctatcttaagtaacctaggagacttccagtttctcttcattgatctggcaatcattttggtagtggtatttacaatgagtttaaatcctgcctggaaagaacttgtggcacaaagaccaccttcgggtcttatatctggggcccttctcttctccgttttgtctcagattatcatctgcattggatttcaatctttgggttttttttgggtcaaacagcaaccttggtatgaagtgtggcatccaaaatcagatgcttgtaatacaacaggaagcgggttttggaattcttcacacgtagacaatgaaaccgaacttgatgaacataatatacaaaattatgaaaataccacagtgttttttatttccagttttcagtacctcatagtggcaattgccttttcaaaaggaaaacccttcaggcaaccttgctacaaaaattatttttttgttttttctgtgatttttttatatatttttatattattcatcatgttgtatccagttgcctctgttgaccaggttcttcagatagtgtgtgtaccatatcagtggcgtgtaactatgctcatcattgttcttgtcaatgcctttgtgtctatcacagtggaggagtcagtggatcggtggggaaaatgctgcttaccctgggccctgggctgtagaaagaagacaccaaaggcaaagtacatgtatctggcgcaggagctcttggttgatccagaatggccaccaaaacctcagacaaccacagaagctaaagctttagttaaggagaatggatcatgtcaaatcatcaccataacatagcagtgaatcagtctcagtggtattgctgatagcagtattcaggaatatgtgattttaggagtttctgatcctgtgtgtcagaatggcactagttcagtttatgtcccttctgatatagtagcttatttgacagctttgctcttccttaaaataaaaacagaaaaatatatcgtcctaacagttaaattaacaatcaatccataaagtcctatatcttcattcagcaacccaaatattacatacatttccagaattttcttgattgttactttcagtgatattctttatattgggtacaggagaagtttggtgtttggtaggtttttcaacattagtttttgagactagtttacctcttcacatttatgctcacaaccctcttgttagaaaagtctgtgtttatatacaggctgtaagtttgtgattgataaaaagaagatgagtgttaattagcctccagtgaaaatatactgaaagcctgttttcatttgattccaatgtttcttccaaagaattctgtataaacatatgccaattccctatgatggtctagagttaggaatgagtgtttatggtgttgcttatagaacaactcaggtaatctccatttctggttttatattttctgtacaaactgcctgggttttatttttctaatcagcaaggtgcttcactgccttcttgagacgcctctcaaagctcttaaatggctcctgtgctatgtgtggtgttggcagtctaatttgcttctgttaaatgttgtagaacctttttcactaggaaataagattcatttctttcggcagtagatgtagattcatcttttaacgtttcttcaaatttgtttctgtcaggctttgtgttattttaaatggttttttaaaattttcttctatgttttcaattacctaaagacataggataatagttttttttaagttagaattttacctcataaaattttttgaggtttgatgtatgtctctgtcttatcaataatgaggcttaaaaaatactggatttgaatggctgccgttttttcaaagcaatatgaatttgatgagtttgttttatgccattaggtggcgccagaggtcagaacaccgctcgaacggggaccctctgaaca

SEQ ID NO: 93396 - DNA, 2306 bp, Homo sapiens
gaattccgaatcatgtgcagaatgctgaatcttcccccagccaggacgaataagacagcgcggaaaagcagattctcgtaattctggaattgcatgttgcaaggagtctcctggatcttcgcacccagcttcgggtagggagggagtccgggtcccgggctaggccagcccggcaggtggagagggtccccggcagccccgcgcgcccctggccatgtctttaatgccctgccccttcatgtggccttctgagggttcccagggctggccagggttgtttcccacccgcgcgcgcgctctcacccccagccaaacccacctggcagggctccctccagccgagaccttttgattcccggctcccgcgctcccgcctccgcgccagcccgggaggtggccctggacagccggacctcgcccggccccggctgggaccatggtgtttctctcgggaaatgcttccgacagctccaactgcacccaaccgccggcaccggtgaacatttccaaggccattctgctcggggtgatcttggggggcctcattcttttcggggtgctgggtaacatcctagtgatcctctccgtagcctgtcaccgacacctgcactcagtcacgcactactacatcgtcaacctggcggtggccgacctcctgctcacctccacggtgctgcccttctccgccatcttcgaggtcctaggctactgggccttcggcagggtcttctgcaacatctgggcggcagtggatgtgctgtgctgcaccgcgtccatcatgggcctctgcatcatctccatcgaccgctacatcggcgtgagctacccgctgcgctacccaaccatcgtcacccagaggaggggtctcatggctctgctctgcgtctgggcactctccctggtcatatccattggacccctgttcggctggaggcagccggcccccgaggacgagaccatctgccagatcaacgaggagccgggctacgtgctcttctcagcgctgggctccttctacctgcctctggccatcatcctggtcatgtactgccgcgtctacgtggtggccaagagggagagccggggcctcaagtctggcctcaagaccgacaagtcggactcggagcaagtgacgctccgcatccatcggaaaaacgccccggcaggaggcagcgggatggccagcgccaagaccaagacgcacttctcagtgaggctcctcaagttctcccgggagaagaaagcggccaaaacgctgggcatcgtggtcggctgcttcgtcctctgctggctgccttttttcttagtcatgcccattgggtctttcttccctgatttcaagccctctgaaacagtttttaaaatagtattttggctcggatatctaaacagctgcatcaaccccatcatatacccatgctccagccaagagttcaaaaaggcctttcagaatgtcttgagaatccagtgtctccgcagaaagcagtcttccaaacatgccctgggctacaccctgcacccgcccagccaggccgtggaagggcaacacaaggacatggtgcgcatccccgtgggatcaagagagaccttctacaggatctccaagacggatggcgtttgtgaatggaaatttttctcttccatgccccgtggatctgccaggattacagtgtccaaagaccaatcctcctgtaccacagcccggacgaagtctcgctctgtcaccaggctggagtgcagtggcatgatcttggctcactgcaacctccgcctcccgggttcaagagattctcctgcctcagcctcccaagcagctgggactacaggggatgtgccaccaggccgacgccaccaggcccagctaatttttgtatttttagtagagacggggtttcaccatgttggccaggatgatctcgatctcttgacctcatgatctgcctgcctcagcctcccaaagtgctgggattacaggcgtgagccaccgtgcccggcccaactattttttttttttatcttttttaacagtgcaatcctttctgtggatgaaatcttgctcagaagctcaatatgcaaaagaaagaaaaacagcagggctggacggatgttgggagtggggtaagaccccaaccactcagagcccacccccccaacacacacacacattctctccatggtgactggtgaggggcctctagagggtacatagtacaccatggagcacggtttaagcaccactggactacacattcttctgtggcagttatcttaccttcccatagacacccagcccatagccattggtt

SEQ ID NO: 93397 - DNA, 2001 bp, Homo sapiens
gaattccgaatcatgtgcagaatgctgaatcttcccccagccaggacgaataagacagcgcggaaaagcagattctcgtaattctggaattgcatgttgcaaggagtctcctggatcttcgcacccagcttcgggtagggagggagtccgggtcccgggctaggccagcccggcaggtggagagggtccccggcagccccgcgcgcccctggccatgtctttaatgccctgccccttcatgtggccttctgagggttcccagggctggccagggttgtttcccacccgcgcgcgcgctctcacccccagccaaacccacctggcagggctccctccagccgagaccttttgattcccggctcccgcgctcccgcctccgcgccagcccgggaggtggccctggacagccggacctcgcccggccccggctgggaccatggtgtttctctcgggaaatgcttccgacagctccaactgcacccaaccgccggcaccggtgaacatttccaaggccattctgctcggggtgatcttggggggcctcattcttttcggggtgctgggtaacatcctagtgatcctctccgtagcctgtcaccgacacctgcactcagtcacgcactactacatcgtcaacctggcggtggccgacctcctgctcacctccacggtgctgcccttctccgccatcttcgaggtcctaggctactgggccttcggcagggtcttctgcaacatctgggcggcagtggatgtgctgtgctgcaccgcgtccatcatgggcctctgcatcatctccatcgaccgctacatcggcgtgagctacccgctgcgctacccaaccatcgtcacccagaggaggggtctcatggctctgctctgcgtctgggcactctccctggtcatatccattggacccctgttcggctggaggcagccggcccccgaggacgagaccatctgccagatcaacgaggagccgggctacgtgctcttctcagcgctgggctccttctacctgcctctggccatcatcctggtcatgtactgccgcgtctacgtggtggccaagagggagagccggggcctcaagtctggcctcaagaccgacaagtcggactcggagcaagtgacgctccgcatccatcggaaaaacgccccggcaggaggcagcgggatggccagcgccaagaccaagacgcacttctcagtgaggctcctcaagttctcccgggagaagaaagcggccaaaacgctgggcatcgtggtcggctgcttcgtcctctgctggctgccttttttcttagtcatgcccattgggtctttcttccctgatttcaagccctctgaaacagtttttaaaatagtattttggctcggatatctaaacagctgcatcaaccccatcatatacccatgctccagccaagagttcaaaaaggcctttcagaatgtcttgagaatccagtgtctccgcagaaagcagtcttccaaacatgccctgggctacaccctgcacccgcccagccaggccgtggaagggcaacacaaggacatggtgcgcatccccgtgggatcaagagagaccttctacaggatctccaagacggatggcgtttgtgaatggaaatttttctcttccatgccccgtggatctgccaggattacagtgtccaaagaccaatcctcctgtaccacagcccggaggggaatggattgtagatatttcaccaagaattgcagagagcatatcaagcatgtgaattttatgatgccaccgtggagaaagggtctagaatgctgatctccaggtagctggagacctaggcagtctgcaaatgaggagtcagctggaagctatggctatgtattatgtgacatcgcttgttcctaagtgaaaactggatatcccaaccttctggaccagtaggtttcatggttacgacctggtagtgagaacattttaggaactatttggttgggcaggcaatttttcactct

SEQ ID NO: 93398 - DNA, 1587 bp, Homo sapiens
gaattccgaatcatgtgcagaatgctgaatcttcccccagccaggacgaataagacagcgcggaaaagcagattctcgtaattctggaattgcatgttgcaaggagtctcctggatcttcgcacccagcttcgggtagggagggagtccgggtcccgggctaggccagcccggcaggtggagagggtccccggcagccccgcgcgcccctggccatgtctttaatgccctgccccttcatgtggccttctgagggttcccagggctggccagggttgtttcccacccgcgcgcgcgctctcacccccagccaaacccacctggcagggctccctccagccgagaccttttgattcccggctcccgcgctcccgcctccgcgccagcccgggaggtggccctggacagccggacctcgcccggccccggctgggaccatggtgtttctctcgggaaatgcttccgacagctccaactgcacccaaccgccggcaccggtgaacatttccaaggccattctgctcggggtgatcttggggggcctcattcttttcggggtgctgggtaacatcctagtgatcctctccgtagcctgtcaccgacacctgcactcagtcacgcactactacatcgtcaacctggcggtggccgacctcctgctcacctccacggtgctgcccttctccgccatcttcgaggtcctaggctactgggccttcggcagggtcttctgcaacatctgggcggcagtggatgtgctgtgctgcaccgcgtccatcatgggcctctgcatcatctccatcgaccgctacatcggcgtgagctacccgctgcgctacccaaccatcgtcacccagaggaggggtctcatggctctgctctgcgtctgggcactctccctggtcatatccattggacccctgttcggctggaggcagccggcccccgaggacgagaccatctgccagatcaacgaggagccgggctacgtgctcttctcagcgctgggctccttctacctgcctctggccatcatcctggtcatgtactgccgcgtctacgtggtggccaagagggagagccggggcctcaagtctggcctcaagaccgacaagtcggactcggagcaagtgacgctccgcatccatcggaaaaacgccccggcaggaggcagcgggatggccagcgccaagaccaagacgcacttctcagtgaggctcctcaagttctcccgggagaagaaagcggccaaaacgctgggcatcgtggtcggctgcttcgtcctctgctggctgccttttttcttagtcatgcccattggtaagtcttgaacacccctcactttagcatctgggggtcttcaccctcctcggcttctgttaccccagactcccagtccgggatggaagaggaaggattagcatttcaaacagcacagctctagggcaattagaaaaggctcccttgtagagcactttttcgactgtaaagtggcttccaactgatgcagattaattggtctctttaataagaatgtcaacttttcttaatgcctataagcacgtgttcaatttaaatgcatctgctc

SEQ ID NO: 93399 - DNA, 2290 bp, Homo sapiens
gaattccgaatcatgtgcagaatgctgaatcttcccccagccaggacgaataagacagcgcggaaaagcagattctcgtaattctggaattgcatgttgcaaggagtctcctggatcttcgcacccagcttcgggtagggagggagtccgggtcccgggctaggccagcccggcaggtggagagggtccccggcagccccgcgcgcccctggccatgtctttaatgccctgccccttcatgtggccttctgagggttcccagggctggccagggttgtttcccacccgcgcgcgcgctctcacccccagccaaacccacctggcagggctccctccagccgagaccttttgattcccggctcccgcgctcccgcctccgcgccagcccgggaggtggccctggacagccggacctcgcccggccccggctgggaccatggtgtttctctcgggaaatgcttccgacagctccaactgcacccaaccgccggcaccggtgaacatttccaaggccattctgctcggggtgatcttggggggcctcattcttttcggggtgctgggtaacatcctagtgatcctctccgtagcctgtcaccgacacctgcactcagtcacgcactactacatcgtcaacctggcggtggccgacctcctgctcacctccacggtgctgcccttctccgccatcttcgaggtcctaggctactgggccttcggcagggtcttctgcaacatctgggcggcagtggatgtgctgtgctgcaccgcgtccatcatgggcctctgcatcatctccatcgaccgctacatcggcgtgagctacccgctgcgctacccaaccatcgtcacccagaggaggggtctcatggctctgctctgcgtctgggcactctccctggtcatatccattggacccctgttcggctggaggcagccggcccccgaggacgagaccatctgccagatcaacgaggagccgggctacgtgctcttctcagcgctgggctccttctacctgcctctggccatcatcctggtcatgtactgccgcgtctacgtggtggccaagagggagagccggggcctcaagtctggcctcaagaccgacaagtcggactcggagcaagtgacgctccgcatccatcggaaaaacgccccggcaggaggcagcgggatggccagcgccaagaccaagacgcacttctcagtgaggctcctcaagttctcccgggagaagaaagcggccaaaacgctgggcatcgtggtcggctgcttcgtcctctgctggctgccttttttcttagtcatgcccattgggtctttcttccctgatttcaagccctctgaaacagtttttaaaatagtattttggctcggatatctaaacagctgcatcaaccccatcatatacccatgctccagccaagagttcaaaaaggcctttcagaatgtcttgagaatccagtgtctccgcagaaagcagtcttccaaacatgccctgggctacaccctgcacccgcccagccaggccgtggaagggcaacacaaggacatggtgcgcatccccgtgggatcaagagagaccttctacaggatctccaagacggatggcgtttgtgaatggaaatttttctcttccatgccccgtggatctgccaggattacagtgtccaaagaccaatcctcctgtaccacagcccgggtgagaagtaaaagctttttgcaggtctgctgctgtgtagggccctcaacccccagccttgacaagaaccatcaagttccaaccattaaggtccacaccatctccctcagtgagaacggggaggaagtctaggacaggaaagatgcagaggaaaggggaataatcttaggtacccaccccacttccttctcggaaggccagctcttcttggaggacaagacaggaccaatcaaagaggggacctgctgggaatggggtgggtggtagacccaactcatcaggcagcgggtagggcacagggaagagggagggtgtctcacaaccaaccagttcagaatgatacggaacagcatttccctgcagctaatgctttcttggtcactctgtgcccacttcaacgaaaaccaccatgggaaacagaatttcatgcacaatccaaaagactataaatataggattatgatttcatcatgaatattttgagcacacactctaagtttggagctatttcttgatggaagtgaggggattttattttcaggctcaacctactgacagccacatttgacatttatgccggaattc

SEQ ID NO: 93400 - DNA, 2089 bp, Homo sapiens
gaattccgaatcatgtgcagaatgctgaatcttcccccagccaggacgaataagacagcgcggaaaagcagattctcgtaattctggaattgcatgttgcaaggagtctcctggatcttcgcacccagcttcgggtagggagggagtccgggtcccgggctaggccagcccggcaggtggagagggtccccggcagccccgcgcgcccctggccatgtctttaatgccctgccccttcatgtggccttctgagggttcccagggctggccagggttgtttcccacccgcgcgcgcgctctcacccccagccaaacccacctggcagggctccctccagccgagaccttttgattcccggctcccgcgctcccgcctccgcgccagcccgggaggtggccctggacagccggacctcgcccggccccggctgggaccatggtgtttctctcgggaaatgcttccgacagctccaactgcacccaaccgccggcaccggtgaacatttccaaggccattctgctcggggtgatcttggggggcctcattcttttcggggtgctgggtaacatcctagtgatcctctccgtagcctgtcaccgacacctgcactcagtcacgcactactacatcgtcaacctggcggtggccgacctcctgctcacctccacggtgctgcccttctccgccatcttcgaggtcctaggctactgggccttcggcagggtcttctgcaacatctgggcggcagtggatgtgctgtgctgcaccgcgtccatcatgggcctctgcatcatctccatcgaccgctacatcggcgtgagctacccgctgcgctacccaaccatcgtcacccagaggaggggtctcatggctctgctctgcgtctgggcactctccctggtcatatccattggacccctgttcggctggaggcagccggcccccgaggacgagaccatctgccagatcaacgaggagccgggctacgtgctcttctcagcgctgggctccttctacctgcctctggccatcatcctggtcatgtactgccgcgtctacgtggtggccaagagggagagccggggcctcaagtctggcctcaagaccgacaagtcggactcggagcaagtgacgctccgcatccatcggaaaaacgccccggcaggaggcagcgggatggccagcgccaagaccaagacgcacttctcagtgaggctcctcaagttctcccgggagaagaaagcggccaaaacgctgggcatcgtggtcggctgcttcgtcctctgctggctgccttttttcttagtcatgcccattgggtctttcttccctgatttcaagccctctgaaacagtttttaaaatagtattttggctcggatatctaaacagctgcatcaaccccatcatatacccatgctccagccaagagttcaaaaaggcctttcagaatgtcttgagaatccagtgtctccgcagaaagcagtcttccaaacatgccctgggctacaccctgcacccgcccagccaggccgtggaagggcaacacaaggacatggtgcgcatccccgtgggatcaagagagaccttctacaggatctccaagacggatggcgtttgtgaatggaaatttttctcttccatgccccgtggatctgccaggattacagtgtccaaagaccaatcctcctgtaccacagcccggggacacacacccatgacatgaagccagcttcccgtccacgactgttgtccttactgcccaaggaaggggagcatgaaacccaccactggtcctgcgacccactgtctttggaatccaccccaggagcccaggagccttgcctgacacttggatttacttctttatcaagcatccatctgactaaggcacaaatccaacatgttactgttactgatacaggaaaaacagtaacttaaggaatgatcatgaatgcaaagggaaagaggaaaagagccttcagggacaaatagctcgattttttgtaaatcagtttcatacaacctccctcccccatttcattcttaaaagttaattgagaatcatcagccacgtgtagggtgtgag

SEQ ID NO: 93401 - DNA, 1067 bp, Homo sapiens
cacagagagcctggtgggttccttccacaccacactctctaccccaccacactggctgccacactaacagggatgctcagagagaccttccacaatggtctttcttccctgatttcaagccctctgaaacagtttttaaaatagtattttggctcggatatctaaacagctgcatcaaccccatcatatacccatgctccagccaagagttcaaaaaggcctttcagaatgtcttgagaatccagtgtctccgcagaaagcagtcttccaaacatgccctgggctacaccctgcacccgcccagccaggccgtggaagggcaacacaaggacatggtgcgcatccccgtgggatcaagagagaccttctacaggatctccaagacggatggcgtttgtgaatggaaatttttctcttccatgccccgtggatctgccaggattacagtgtccaaagaccaatcctcctgtaccacagcccgggtgagaagtaaaagctttttgcaggtctgctgctgtgtagggccctcaacccccagccttgacaagaaccatcaagttccaaccattaaggtccacaccatctccctcagtgagaacggggaggaagtctaggacaggaaagatgcagaggaaaggggaataatcttaggtacccaccccacttccttctcggaaggccagctcttcttggaggacaagacaggaccaatcaaagaggggacctgctgggaatggggtgggtggtagacccaactcatcaggcagcgggtagggcacagggaagagggagggtgtctcacaaccaaccagttcagaatgatacggaacagcatttccctgcagctaatgctttcttggtcactctgtgcccacttcaacgaaaaccaccatgggaaacagaatttcatgcacaatccaaaagactataaatataggattatgatttcatcatgaatattttgagcacacactctaagtttggagctatttcttgatggaagtgaggggattttattttcaggctcaacctactgacagccacatttgacatttatgccggaattc

SEQ ID NO: 93402 - DNA, 1888 bp, Homo sapiens
gcccgggcaggagcgggcttgccctgcggagcagtagctaggaacagatccacttgcaggttgctgttcccagccatggcttcgcgctgctggcgctggtggggctggtcggcgtggcctcggacccggctgcctcccgccgggagcaccccgagcttctgccaccatttctccacacaggagaagaccccccagatctgtgtggtgggcagtggcccagctggcttctacacggcccaacacctgctaaagcacccccaggcccacgtggacatctacgagaaacagcctgtgccctttggcctggtgcgctttggtgtggcgcctgatcaccccgaggtgaagaatgtcatcaacacatttacccagacggcccattctggccgctgtgccttctggggcaacgtggaggtgggcagggacgtgacggtgccggagctgcgggaggcctaccacgctgtggtgctgagctacggggcagaggaccatcgggccctggaaattcctggtgaggagctgccaggtgtgtgctccgcccgggccttcgtgggctggtacaacgggcttcctgagaaccaggagctggagccagacctgagctgtgacacagccgtgattctggggcaggggaacgtggctctggacgtggcccgcatcctactgaccccacctgagcacctggaggccctccttttgtgccagagaacggacatcacgaaggcagccctgggtgtactgaggcagagtcgagtgaagacagtgtggctagtgggccggcgtggacccctgcaagtggccttcaccattaaggagcttcgggagatgattcagttaccgggagccggcccattttggatcctgtggatttcttgggtctccaggacaagatcaaggaggtcccccgcccgaggaagcggctgacggaactgctgcttcgaacggccacagagaagccagggccggcggaagctgcccgccaggcatcggcctcccgtgcctggggcctccgctttttccgaagcccccagcaggtgctgccctcaccagatgggcggcgggcagcaggtgtccgcctagcagtcactagactggagggtgtcgatgaggccacccgtgcagtgcccacgggagacatggaagacctcccttgtgggctggtgctcagcagcattgggtataagagccgccctgtcgacccaagcgtgccctttgactccaagcttggggtcatccccaatgtggagggccgggttatggatgtgccaggcctctactgcagcggctgggtgaagagaggacctacaggtgtcatagccacaaccatgactgacagcttcctcaccggccagatgctgctgcaggacctgaaggctgggttgctcccctctggccccaggcctggctacgcagccatccaggccctgctcagcagccgaggggtccggccagtctctttctcagactgggagaagctggatgccgaggaggtggcccggggccagggcacggggaagcccagggagaagctggtggatcctcaggagatgctgcgcctcctgggccactgagcccagccccagccccggcccccagcagggaagggatgagtgttgggaggggaagggctgggtccgtctgagtgggactttgcacctctgctgatcccggccggccctggcttggaggcttggctgctcttccagcgtctctcctccctcctggggaaggtcgcccttgcgcgcaaggttttagctttcagcaactgaggtaaccttagggacaggtggaggtgtgggccgatctaaccccttacccatctctctactgctggactgtggagggtcaccaggttgggaacatgctggaaataaaacagctgcaaccaaga

SEQ ID NO: 93403 - DNA, 784 bp, Homo sapiens
  misc_feature (594)..(595): n is a, c, g, or t
  misc_feature (598)..(598): n is a, c, g, or t
  misc_feature (611)..(611): n is a, c, g, or t
  misc_feature (625)..(625): n is a, c, g, or t
  misc_feature (638)..(638): n is a, c, g, or t
  misc_feature (650)..(650): n is a, c, g, or t
  misc_feature (676)..(676): n is a, c, g, or t
  misc_feature (724)..(724): n is a, c, g, or t
  misc_feature (756)..(756): n is a, c, g, or t
gcccgggcaggagcgggcttgccctgcggagcagtagctaggaacagatccacttgcaggttgctgttcccagccatggcttcgcgctgctggcgctggtggggctggtcggcgtggcctcggacccggctgcctcccgccgggagcaccccgagcttctgccaccatttctccacacaggagaagaccccccagatctgtgtggtgggcagtggcccagctggcttctacacggcccaacacctgctaaagcacccccaggcccacgtggacatctacgagaaacagcctgtgccctttggcctggtgcgctttggtgtggcgcctgatcaccccgaggtgaagaatgtcatcaacacatttacccagacggcccattctggccgctgtgccttctggggcaacgtggaggtgggcagggacgtgacggtgccggagctgcgggaggcctaccacgctgtggtgctgagctacggggcagaggaccatcgggccctggaaattcctggtgaggagctgccaggtgtgtgctccgcccgggccttcgtgggctggtacaacgggcttcctgagaaccaggagctggagcaaganntgngatgtgaaaaagnagtgattatggggnaggggaaagtggntatggaagtggnaagaataataatgaaaaaaaatgagnaaatggagagaaaggaaataaagaaggaagaaatgggtgtaatgaggnagagtagagtgaagaaagtgtggatagtgggnaggagtggaaaaatgaaagtggaattaa

SEQ ID NO: 93404 - DNA, 778 bp, Homo sapiens
gcccgggcaggagcgggcttgccctgcggagcagtagctaggaacagatccacttgcaggttgctgttcccagccatggcttcgcgctgctggcgctggtggggctggtcggcgtggcctcggacccggctgcctcccgccgggagcaccccgagtaggagcagggcgcctttggggctggatgggagcgcggggaggcctgcgagcgctgagtaggggtcggagcagagctggggcagggctggagaagggtgagactgaaggggtgtcttcctgctggcgagatcccggtggtgtacgggggtgggcggagatctgtgcgtgagatgtgaggcttctagggttagagacggaggtcaacaaaggtgaaaaggagagactttgagatctacaggtgtgagacggggtgaatggaggatgatacggaggtctgtggggcgagaggaaagtctgagtcgaaacagggatctgtaggaataagacgggtctatatgggcaatatagcgttttgtggagagagagaggggttagaggagggacaccgtggggagacccacgggggcgagattgggatgatatggaggccgttggaaggatgtgggattctagccgattggatagggaatgaagtgttgttgggcaggccattggcagtggtgtagtaggttcatgggtgagatgtgggctctggatgaacccacagcctttgggggttcagatgaagtaagagaccctgcaaatgccaaagccttgaggaacaagagaaggaggatgcagg

SEQ ID NO: 93405 - DNA, 2188 bp, Homo sapiens
  misc_feature (1933)..(1935): n is a, c, g, or t
gcccgggcaggagcgggcttgccctgcggagcagtagctaggaacagatccacttgcaggttgctgttcccagccatggcttcgcgctgctggcgctggtggggctggtcggcgtggcctcggacccggctgcctcccgccgggagcaccccgagcttctgccaccatttctccacacaggagaagaccccccagatctgtgtggtgggcagtggcccagctggcttctacacggcccaacacctgctaaagcacccccaggcccacgtggacatctacgagaaacagcctgtgccctttggcctggtgcgctttggtgtggcgcctgatcaccccgaggtgaagaatgtcatcaacacatttacccagacggcccattctggccgctgtgccttctggggcaacgtggaggtgggcagggacgtgacggtgccggagctgcgggaggcctaccacgctgtggtgctgagctacggggcagaggaccatcgggccctggaaattcctggtgaggagctgccaggtgtgtgctccgcccgggccttcgtgggctggtacaacgggcttcctgagaaccaggagctggagccagacctgagctgtgacacagccgtgattctggggcaggggaacgtggctctggacgtggcccgcatcctactgaccccacctgagcacctggagagaacggacatcacgaaggcagccctgggtgtactgaggcagagtcgagtgaagacagtgtggctagtgggccggcgtggacccctgcaagtggccttcaccattaaggagcttcgggagatgattcagttaccgggagccggcccattttggatcctgtggatttcttgggtctccaggacaagatcaaggaggtcccccgcccgaggaagcggctgacggaactgctgcttcgaacggccacagagaagccagggccggcggaagctgcccgccaggcatcggcctcccgtgcctggggcctccgctttttccgaagcccccagcaggtgctgccctcaccagatgggcggcgggcagcaggtgtccgcctagcagtcactagactggagggtgtcgatgaggccacccgtgcagtgcccacgggagacatggaagacctcccttgtgggctggtgctcagcagcattgggtataagagccgccctgtcgacccaagcgtgccctttgactccaagcttggggtcatccccaatgtggagggccgggttatggatgtgccaggcctctactgcagcggctgggtgaagagaggacctacaggtgtcatagccacaaccatgactgacagcttcctcaccggccagatgctgctgcaggacctgaaggctgggttgctcccctctggccccaggcctggctacgcagccatccaggccctgctcagcagccgaggggtccggccagtctctttctcagactgggagaagctggatgccgaggaggtggcccggggccagggcacggggaagcccagggagaagctggtggatcctcaggagatgctgcgcctcctgggccactgagcccagccccagccccggcccccagcagggaagggatgagtgttgggaggggaagggctgggtccgtctgagtgggactttgcacctctgctgatcccggccggccctggcttggaggcttggctgctcttccagcgtctctcctccctcctggggaaggtcgcccttgcgcgcaaggttttagctttcagcaactgaggtaaccttagggacaggtggaggtgtgggccgatctaaccccttacccatctctctactgctggactgtggagggtcaccaggttgggaacatgctggaaataaaacagctgcaaccaagaaaaaaaaaaaaaaaaaaaaaaaaaaaaaaaaaaaaaaaaaaaaaaaaaaaaaaaaaaaaaaannnaagggggggcccgagaccaaaaacgccctatagtgagaaaaaatccttggggggggggccgggcccctattcccccttttgggggggaaattccccccccccccggcctcatttttcaaaacgcagaaccggaaaaacccggggggttccaaaattaaaagccctgaacaaaattcccttttcaacaattgggcaaatttgaaaagaagaccgcaaaatttacgcctttaacaatttggccaaaccccggatg

SEQ ID NO: 93406 - DNA, 1967 bp, Homo sapiens
gcccgggcaggagcgggcttgccctgcggagcagtagctaggaacagatccacttgcaggttgctgttcccagccatggcttcgcgctgctggcgctggtggggctggtcggcgtggcctcggacccggctgcctcccgccgggagcaccccgagtaggagcagggcgcctttggggctggatgggagcgcggggaggcctgcgagcgctgagtaggggtcggagcagagctggggcagggctggagaagggcttctgccaccatttctccacacaggagaagaccccccagatctgtgtggtgggcagtggcccagctggcttctacacggcccaacacctgctaaagcacccccaggcccacgtggacatctacgagaaacagcctgtgccctttggcctggtgcgctttggtgtggcgcctgatcaccccgaggtgaagaatgtcatcaacacatttacccagacggcccattctggccgctgtgccttctggggcaacgtggaggtgggcagggacgtgacggtgccggagctgcgggaggcctaccacgctgtggtgctgagctacggggcagaggaccatcgggccctggaaattcctggtgaggagctgccaggtgtgtgctccgcccgggccttcgtgggctggtacaacgggcttcctgagaaccaggagctggagccagacctgagctgtgacacagccgtgattctggggcaggggaacgtggctctggacgtggcccgcatcctactgaccccacctgagcacctggagagaacggacatcacgaaggcagccctgggtgtactgaggcagagtcgagtgaagacagtgtggctagtgggccggcgtggacccctgcaagtggccttcaccattaaggagcttcgggagatgattcagttaccgggagccggcccattttggatcctgtggatttcttgggtctccaggacaagatcaaggaggtcccccgcccgaggaagcggctgacggaactgctgcttcgaacggccacagagaagccagggccggcggaagctgcccgccaggcatcggcctcccgtgcctggggcctccgctttttccgaagcccccagcaggtgctgccctcaccagatgggcggcgggcagcaggtgtccgcctagcagtcactagactggagggtgtcgatgaggccacccgtgcagtgcccacgggagacatggaagacctcccttgtgggctggtgctcagcagcattgggtataagagccgccctgtcgacccaagcgtgccctttgactccaagcttggggtcatccccaatgtggagggccgggttatggatgtgccaggcctctactgcagcggctgggtgaagagaggacctacaggtgtcatagccacaaccatgactgacagcttcctcaccggccagatgctgctgcaggacctgaaggctgggttgctcccctctggccccaggcctggctacgcagccatccaggccctgctcagcagccgaggggtccggccagtctctttctcagactgggagaagctggatgccgaggaggtggcccggggccagggcacggggaagcccagggagaagctggtggatcctcaggagatgctgcgcctcctgggccactgagcccagccccagccccggcccccagcagggaagggatgagtgttgggaggggaagggctgggtccgtctgagtgggactttgcacctctgctgatcccggccggccctggcttggaggcttggctgctcttccagcgtctctcctccctcctggggaaggtcgcccttgcgcgcaaggttttagctttcagcaactgaggtaaccttagggacaggtggaggtgtgggccgatctaaccccttacccatctctctactgctggactgtggagggtcaccaggttgggaacatgctggaaataaaacagctgcaaccaaga

SEQ ID NO: 93407 - DNA, 431 bp, Homo sapiens
  misc_feature (30)..(30): n is a, c, g, or t
  misc_feature (261)..(261): n is a, c, g, or t
tgagggtgaagcttgggaagttccagcttnctgttggatattcaggttggtttgggactggggagagaagttaattttgaccttttccctctcctctgcctggccccaggcttctgccaccatttctccacacaggagaagaccccccagatctgtgtggtgggcagtggcccagctggcttctacacggcccaacacctgctaaaggtaagccacttactcatagtccatcattcacctgctgctccagtcctaagggcnaagcctcacccgctttgggttttaagagcactcctggttgccttatggggaaggggctcccagccatctggcctggacacttcccacttgcttcctcacctacacctgaggctcccctcccctcccgtcctcagtgtgacaggggtgtaaaacgcacattggtggtgagt

SEQ ID NO: 93408 - DNA, 1870 bp, Homo sapiens
gcccgggcaggagcgggcttgccctgcggagcagtagctaggaacagatccacttgcaggttgctgttcccagccatggcttcgcgctgctggcgctggtggggctggtcggcgtggcctcggacccggctgcctcccgccgggagcaccccgagcttctgccaccatttctccacacaggagaagaccccccagatctgtgtggtgggcagtggcccagctggcttctacacggcccaacacctgctaaagcacccccaggcccacgtggacatctacgagaaacagcctgtgccctttggcctggtgcgctttggtgtggcgcctgatcaccccgaggtgaagaatgtcatcaacacatttacccagacggcccattctggccgctgtgccttctggggcaacgtggaggtgggcagggacgtgacggtgccggagctgcgggaggcctaccacgctgtggtgctgagctacggggcagaggaccatcgggccctggaaattcctggtgaggagctgccaggtgtgtgctccgcccgggccttcgtgggctggtacaacgggcttcctgagaaccaggagctggagccagacctgagctgtgacacagccgtgattctggggcaggggaacgtggctctggacgtggcccgcatcctactgaccccacctgagcacctggagagaacggacatcacgaaggcagccctgggtgtactgaggcagagtcgagtgaagacagtgtggctagtgggccggcgtggacccctgcaagtggccttcaccattaaggagcttcgggagatgattcagttaccgggagccggcccattttggatcctgtggatttcttgggtctccaggacaagatcaaggaggtcccccgcccgaggaagcggctgacggaactgctgcttcgaacggccacagagaagccagggccggcggaagctgcccgccaggcatcggcctcccgtgcctggggcctccgctttttccgaagcccccagcaggtgctgccctcaccagatgggcggcgggcagcaggtgtccgcctagcagtcactagactggagggtgtcgatgaggccacccgtgcagtgcccacgggagacatggaagacctcccttgtgggctggtgctcagcagcattgggtataagagccgccctgtcgacccaagcgtgccctttgactccaagcttggggtcatccccaatgtggagggccgggttatggatgtgccaggcctctactgcagcggctgggtgaagagaggacctacaggtgtcatagccacaaccatgactgacagcttcctcaccggccagatgctgctgcaggacctgaaggctgggttgctcccctctggccccaggcctggctacgcagccatccaggccctgctcagcagccgaggggtccggccagtctctttctcagactgggagaagctggatgccgaggaggtggcccggggccagggcacggggaagcccagggagaagctggtggatcctcaggagatgctgcgcctcctgggccactgagcccagccccagccccggcccccagcagggaagggatgagtgttgggaggggaagggctgggtccgtctgagtgggactttgcacctctgctgatcccggccggccctggcttggaggcttggctgctcttccagcgtctctcctccctcctggggaaggtcgcccttgcgcgcaaggttttagctttcagcaactgaggtaaccttagggacaggtggaggtgtgggccgatctaaccccttacccatctctctactgctggactgtggagggtcaccaggttgggaacatgctggaaataaaacagctgcaaccaaga

SEQ ID NO: 93409 - DNA, 1564 bp, Homo sapiens
gcccgggcaggagcgggcttgccctgcggagcagtagctaggaacagatccacttgcaggttgctgttcccagccatggcttcgcgctgctggcgctggtggggctggtcggcgtggcctcggacccggctgcctcccgccgggagcaccccgagagaagaccccccagatctgtgtggtgggcagtggcccagctggcttctacacggcccaacacctgctaaagcacccccaggcccacgtggacatctacgagaaacagcctgtgccctttggcctggtgcgctttggtgtggcgcctgatcaccccgaggtgaagacggcccattctggccgctgtgccttctggggcaacgtggaggtgggcagggacgtgacggtgccggagctgcgggaggcctaccacgctgtggtgctgagctacggggcagaggaccatcgggccctggaaattcctggtgaggagctgccaggtgtgtgctccgcccgggccttcgtgggctggtacaacgggcttcctgagaaccaggagctggagccagacctgagctgtgacacagccgtgattctggggcaggggaacgtggctctggacgtggcccgcatcctactgaccccacctgagcacctggagagaacggacatcacgaaggcagccctgggtgtactgaggcagagtcgagtgaagacagtgtggctagtgggccggcgtggacccctgcaagtggccttcaccattaagaggtcccccgcccgaggaagcggctgacggaactgctgcttcgaacggccacagagaagccagggccggcggaagctgcccgccaggcatcggcctcccgtgcctggggcctccgctttttccgaagcccccagcaggtgctgccctcaccagatgggcggcgggcagcaggtgtccgcctagcagtcactagactggaggcctctactgcagcggctgggtgaagagaggacctacaggtgtcatagccacaaccatgactgacagcttcctcaccggccagatgctgctgcaggacctgaaggctgggttgctcccctctggccccaggcctggctacgcagccatccaggccctgctcagcagccgaggggtccggccagtctctttctcagactgggagaagctggatgccgaggaggtggcccggggccagggcacggggaagcccagggagaagctggtggatcctcaggagatgctgcgcctcctgggccactgagcccagccccagccccggcccccagcagggaagggatgagtgttgggaggggaagggctgggtccgtctgagtgggactttgcacctctgctgatcccggccggccctggcttggaggcttggctgctcttccagcgtctctcctccctcctggggaaggtcgcccttgcgcgcaaggttttagctttcagcaactgaggtaaccttagggacaggtggaggtgtgggccgatctaaccccttacccatctctctactgctggactgtggagggtcaccaggttgggaacatgctggaaataaaacagctgcaaccaaga

SEQ ID NO: 93410 - DNA, 1950 bp, Homo sapiens
gcccgggcaggagcgggcttgccctgcggagcagtagctaggaacagatccacttgcaggttgctgttcccagccatggcttcgcgctgctggcgctggtggggctggtcggcgtggcctcggacccggctgcctcccgccgggagcaccccgagcttctgccaccatttctccacacaggagaagaccccccagatctgtgtggtgggcagtggcccagctggcttctacacggcccaacacctgctaaagcacccccaggcccacgtggacatctacgagaaacagcctgtgccctttggcctggtgcgctttggtgtggcgcctgatcaccccgaggtgaagaatgtcatcaacacatttacccagacggcccattctggccgctgtgccttctggggcaacgtggaggtgggcagggacgtgacggtgccggagctgcgggaggcctaccacgctgtggtgctgagctacggggcagaggaccatcgggccctggaaattcctggtgaggagctgccaggtgtgtgctccgcccgggccttcgtgggctggtacaacgggcttcctgagaaccaggagctggagccagacctgagctgtgacacagccgtgattctggggcaggggaacgtggctctggacgtggcccgcatcctactgaccccacctgagcacctggagagaacggacatcacgaaggcagccctgggtgtactgaggcagagtcgagtgaagacagtgtggctagtgggccggcgtggacccctgcaagtggccttcaccattaaggagcttcgggagatgattcagttaccgggagccggcccattttggatcctgtggatttcttgggtctccaggacaagatcaaggaggtcccccgcccgaggaagcggctgacggaactgctgcttcgaacggccacagagaagccagggccggcggaagctgcccgccaggcatcggcctcccgtgcctggggcctccgctttttccgaagcccccagcaggtgctgccctcaccagatgggcggcgggcagcaggtgtccgcctagcagtcactagactggaggtgagtctcatgtttcccaaagacacccccttcccaggcctctgccacccgcctggtgttgcccacactctccccaacagggtgtcgatgaggccacccgtgcagtgcccacgggagacatggaagacctcccttgtgggctggtgctcagcagcattgggtataagagccgccctgtcgacccaagcgtgccctttgactccaagcttggggtcatccccaatgtggagggccgggttatggatgtgccaggcctctactgcagcggctgggtgaagagaggacctacaggtgtcatagccacaaccatgactgacagcttcctcaccggccagatgctgctgcaggacctgaaggctgggttgctcccctctggccccaggcctggctacgcagccatccaggccctgctcagcagccgaggggtccggccagtctctttctcagactgggagaagctggatgccgaggaggtggcccggggccagggcacggggaagcccagggagaagctggtggatcctcaggagatgctgcgcctcctgggccactgagcccagccccagccccggcccccagcagggaagggatgagtgttgggaggggaagggctgggtccgtctgagtgggactttgcacctctgctgatcccggccggccctggcttggaggcttggctgctcttccagcgtctctcctccctcctggggaaggtcgcccttgcgcgcaaggttttagctttcagcaactgaggtaaccttagggacaggtggaggtgtgggccgatctaaccccttacccatctctctactgctggactgtggagggtcaccaggttgggaacatgctggaaataaaacagctgcaaccaaga

SEQ ID NO: 93411 - DNA, 1698 bp, Homo sapiens
gcccgggcaggagcgggcttgccctgcggagcagtagctaggaacagatccacttgcaggttgctgttcccagccatggcttcgcgctgctggcgctggtggggctggtcggcgtggcctcggacccggctgcctcccgccgggagcaccccgagcttctgccaccatttctccacacaggagaagaccccccagatctgtgtggtgggcagtggcccagctggcttctacacggcccaacacctgctaaagcacccccaggcccacgtggacatctacgagaaacagcctgtgccctttggcctggtgcgctttggtgtggcgcctgatcaccccgaggtgaagaatgtcatcaacacatttacccagacggcccattctggccgctgtgccttctggggcaacgtggaggtgggcagggacgtgacggtgccggagctgcgggaggcctaccacgctgtggtgctgagctacggggcagaggaccatcgggccctggaaattcctggtgaggagctgccaggtgtgtgctccgcccgggccttcgtgggctggtacaacgggcttcctgagaaccaggagctggagccagacctgagctgtgacacagccgtgattctggggcaggggaacgtggctctggacgtggcccgcatcctactgaccccacctgagcacctggagagaacggacatcacgaaggcagccctgggtgtactgaggcagagtcgagtgaagacagtgtggctagtgggccggcgtggacccctgcaagtggccttcaccattaaggagcttcgggagatgattcagttaccgggagccggcccattttggatcctgtggatttcttgggtctccaggacaagatcaaggaggtcccccgcccgaggaagcggctgacggaactgctgcttcgaacggccacagagaagccagggccggcggaagctgcccgccaggcatcggcctcccgtgcctggggcctccgctttttccgaagcccccagcaggtgctgccctcaccagatgggcggcgggcagcaggtgtccgcctagcagtcactagactggaggcctctactgcagcggctgggtgaagagaggacctacaggtgtcatagccacaaccatgactgacagcttcctcaccggccagatgctgctgcaggacctgaaggctgggttgctcccctctggccccaggcctggctacgcagccatccaggccctgctcagcagccgaggggtccggccagtctctttctcagactgggagaagctggatgccgaggaggtggcccggggccagggcacggggaagcccagggagaagctggtggatcctcaggagatgctgcgcctcctgggccactgagcccagccccagccccggcccccagcagggaagggatgagtgttgggaggggaagggctgggtccgtctgagtgggactttgcacctctgctgatcccggccggccctggcttggaggcttggctgctcttccagcgtctctcctccctcctggggaaggtcgcccttgcgcgcaaggttttagctttcagcaactgaggtaaccttagggacaggtggaggtgtgggccgatctaaccccttacccatctctctactgctggactgtggagggtcaccaggttgggaacatgctggaaataaaacagctgcaaccaaga

SEQ ID NO: 93412 - DNA, 1891 bp, Homo sapiens
gcccgggcaggagcgggcttgccctgcggagcagtagctaggaacagatccacttgcaggttgctgttcccagccatggcttcgcgctgctggcgctggtggggctggtcggcgtggcctcggacccggctgcctcccgccgggagcaccccgagcttctgccaccatttctccacacaggagaagaccccccagatctgtgtggtgggcagtggcccagctggcttctacacggcccaacacctgctaaagcacccccaggcccacgtggacatctacgagaaacagcctgtgccctttggcctggtgcgctttggtgtggcgcctgatcaccccgaggtgaagaatgtcatcaacacatttacccagacggcccattctggccgctgtgccttctggggcaacgtggaggtgggcagggacgtgacggtgccggagctgcgggaggcctaccacgctgtggtgctgagctacggggcagaggaccatcgggccctggaaattcctggtgaggagctgccaggtgtgtgctccgcccgggccttcgtgggctggtacaacgggcttcctgagaaccaggagctggagccagacctgagctgtgacacagccgtgattctggggcaggggaacgtggctctggacgtggcccgcatcctactgaccccacctgagcacctggagagaacggacatcacgaaggcagccctgggtgtactgaggcagagtcgagtgaagacagtgtggctagtgggccggcgtggacccctgcaagtggccttcaccattaaggagcttcgggagatgattcagttaccgggagccggcccattttggatcctgtggatttcttgggtctccaggacaagatcaaggaggtcccccgcccgaggaagcggctgacggaactgctgcttcgaacggccacagagaagccagggccggcggaagctgcccgccaggcatcggcctcccgtgcctggggcctccgctttttccgaagcccccagcaggtgctgccctcaccagatgggcggcgggcagcaggtgtccgcctagcagtcactagactggagggtgtcgatgaggccacccgtgcagtgcccacgggagacatggaagacctcccttgtgggctggtgctcagcagcattgggtataagagccgccctgtcgacccaagcgtgccctttgactccaagcttggggtcatccccaatgtggagggccgggttatggatgtgccaggcctctactgcagcggctgggtgaagagaggacctacaggtgtcatagccacaaccatgactgacagcttcctcaccggccagatgctgctgcaggacctgaaggctgggttgctcccctctggccccaggcctggctacgcagccatccaggccctgctcagcagccgaggggtccggccagtctctttctcagactgggagaagctggatgccgaggaggtggcccggggccagggcacggggaagcccagggagaagctggtggatcctcaggagatgctgcgcctcctgggccactgagcccagccccagccccggcccccagcagggaagggatgagtgttgggaggggaagggctgggtccgtctgagtgggactttgcacctctgctgatcccggccggccctggcttggaggcttggctgctcttccagcgtctctcctccctcctggggaaggtcgcccttgcgcgcaaggttttagctttcagcaactgaggtaaccttagggacaggtggaggtgtgggccgatctaaccccttacccatctctctactgctggactgtggaggtatacagccttggacatgctgaatccacgctgtgttcgcgtgttttgccgctcgcgtcggggctgcga

SEQ ID NO: 93413 - DNA, 488 bp, Homo sapiens
gactttaaatgtttaatttttggaaggttcaaggctgataggtgttaatagaaccatatctgccaatttcttattggcaaaggatttctcaagagtgtctcaaaattaaacactttggatatttacaaacattgctcattgagatgaggtaatgcagtcggctatttgggttctctcttcaaccttgccacaaacagactattttgctttgctctgatattttcccattgatactattcaggatcatagaattttataggtggctgagcatgatgtcttactccgagaaggtgcctgatgaatgcttatggaactgatttgaatagtttagtccttcattttacagctgaggagaatacagagaactgaagaggcttgtccaaggtcacacggctagatggtggcagatctgaaactagaagcagatttaccaactctcaattctctattctgtatctttactatgaaacatcatctgaccagggtgg

SEQ ID NO: 93414 - DNA, 605 bp, Homo sapiens
ggaggagggactctaagacctcccgtgggatggctgaccctggtatagtcacctgagctgagggtgggccctcgactctgcacaccgttagttcaatcctgccagagttgactggtctcagcgagactaactcagtagatccaactcataagaggttgatgtgtaacttgtattccaggctgttgatgtcccaggagaaacagaccttgcaagcagatcagattttcctgttatctaacctgtgccttcttctctagagggaactttggggaagcaaaatcatgataaggctcttgtttggtgagcaggactggagggaggaattgatggaagacttgggtgagtgctctggggccaaatctccctcccctggtccaggaggacagcatcccagcacctcttatcactttctgtctcctacagttaagccatgacctgacgatacatgcaacagtttgcctatcagacagctctgccagcctacaagttccagaaaggcaagcacagcatgttatccacatcttcagcagtaagtgctacatagaagatgctcagtcaacgtgcgtgtttgctttttttttaccatttgcagtcaccttcctaaa

SEQ ID NO: 93415 - DNA, 862 bp, Homo sapiens
cttgactctgggcaggtcctcaggtgcactgagaggagaacaaatagctcttataataaatggggcagttttctcaatatgattattatttttaagaaattgaaaatcattttgattatagatgtaacacaagcttggaaagaatttaaaacacacatacggttaaaaatggaatgccctgtattttcactttctaaagattgacacatggttgggcacagtggctcatgcctgtaatcccggcactttgggaggctgaggtgggcagatcacctgaggtcaggagttcgagaccagtctggccaacatggtgaaaccccatctctactaaaaatacaaaaattagccagtcatggtggcatgcacctgtaatcccagctacttgggaggctgtggcagaagaatcacttggacccaggaggcggaggttgcagtgagctgagatcacgccactgcgctccagcctgggtgacagagtaagactctgactcaaaaaaaaaagaaagacccatgtgtatccttctaagctgtgtatgtaaactgtatcattttaagaaccttgagatcattccatatatggtttggtaagtcacttgatgacacattatggaacatctttgagtgtcagtctgtgttgacctacctcattctttagtatagtagtgatgtggaagtattctattgtgtggaaggactgtaatttatttaaccactccttattcatggacacttagatagctttcagcttaacagtattacagtgctgttacaaacacttttgcctttaggtgcaagtatttctgtaggctcacttcctgtgacttgaatttccaagccaattgcttaccgaaatgtatgacag

SEQ ID NO: 93416 - DNA, 338 bp, Homo sapiens
gcatagaggatcttattctcatgcgtcagccacccaatgtagttctaattacaggcacgggctactacacctggctgatttttgtgtttttggtagagatggagtttcactatgttggccaggctggtctcaaactcctgacctcaggtgatccgcctgcctcagcctcccgaagtgttgggattacaggcgtgagccaccatgcccagccagtctggttttttttttattttttgagatggaatctcactctgttgccaggctggagtgcaatggcgcgatcttggctcactgcaatctccgcctcctggcttcaagcgattctcctgcctcagcct

SEQ ID NO: 93417 - DNA, 673 bp, Homo sapiens
ggttctgcaggctgtacaagcacgcaccagctctgctcggcttctggtgtggcctcaggaagcttctactcatggtggaaggtgaagggggagcaggcgtgtcacatggcaagagaaagagcgagagaggaggaggtgccaggctcctttaaccaaccagctcttctgtgaactcatagagtaagaactcaactcactactgcaagaacagcacccagccgttcatgagggatctacccccttgacccaaacatctcccaccaggcctccctccaacactggggatcacatttcaacatgacatttggaggggacaaacatccaaactacaccagctttaaactaacaaacttgatcaatggtactgctttgcctcccacctccccaccccctaaatcctgttgtggttctatgtaaaatttcaaaatttgtgtagacacaaacaaaatgcttcaaagtaagaaaggtacaagtaatttccactaaaaagaaacccccgaggctgggcgcggtggctcacgcctgtaatcccagcactttgggaggccgaggcgggcagatcatgaggtcaggagttcaagaccagcctgaccaacatggtgaaacctatctctactaaagatacgaaaaattagctgggcgtggtggcgtatgcctgtaatcccagctactc

SEQ ID NO: 93418 - DNA, 252 bp, Homo sapiens
ctttatgtgtttgtatatatgtacatatgtatgtatgtatgtatgtatgtatgtatgtatgtatgtatgagacaggggcttgctctgtcgcccagcctggagtacagtggcatgattacagctcactgcagccttaacctcccgggctatgggaggtatacgggaaggggtgtggagcttccgtgtcctgtgtggggcaccacccttccagctacctccccatgttcagcaacccagaagctcttgaaactc

SEQ ID NO: 93419 - DNA, 406 bp, Homo sapiens
tttctgtccataaatctttttcaaccacaagccagcacaaggtgacaccaaacctattctggctcaggacactgcctgattcgtgaatcattctttgctcaattaaactctactaaatttaatttttctaaagtttttcttttaacacctgcaatataatcataaatgtaactgtaaggggaaaataaattgttcttattttaaacaaaaaccgaattgcagttgcatttttttttaattacccatgtttacctttctgtttgttatttgtttgtctattcaactttcctcctgtaactcagatgtttcttctggaaccatttcccttcttcctaaaatatgtcctttggaacttcctttagtgagagactttggataataaaactctcatttttttgtgtgcttg

SEQ ID NO: 93420 - DNA, 321 bp, Homo sapiens
ttttgtatttttggtagagatggggtttcaccatcttggccaggctggtctcaaactcctagcctccagtgatctgcccgcttctgcctcccaaagtgctggaattacaggtatgagccactggaccaggcctctctgagccttttaataccttctgctttccagcatgtccacctcacttagtgtgggctttcacttttccctgcttctaggacccatcctagcagcctgtctgcaacacttctgggggtcttttccaggtattaaatgctatattctgctctgagttgataaactctaactttcccttatccactatcc

SEQ ID NO: 93421 - DNA, 369 bp, Homo sapiens
cagtttaataaaacagtagatcagtctcactaatataaattcaaaagtaaaaataaaatattagcaaattgaatctgccattgtatcaaaagaattctagactatcaacactagagtttatttcagacatgtaatgatgatttgttaccaggaaatctgtcaacataatttattctatcaaagggacaaataatcatagaagctattctcatgagaatttgaagtaaaatgggtataagaaggcagttatgcctgtaatcccagcactttgggagggcgaggcagttggattgcttgagcctggtaggtggagtttgcaatgagccaagactgtgtcactgtacttgagcctgggcaacagaatgagac

SEQ ID NO: 93422 - DNA, 702 bp, Homo sapiens
aagtagcactatggagattcacacgtggcaaagagctgaggcctcccaccaacagccacatgagggagccagagtaggagtggctcctccagccccagtcgaaccttcagatgtgacagacttggctgctgacagtttgcaatctcatgagaccctgagccagaaccacccagctaaatcagtcctggactcctgatcaacagaaatgaccaaagagaggcgttttgaacattaagacgctttgctgcttctcacctgaaacacgtaacaggaacaccaacctcttcagccgcgggaaatcttctttgacacaaaactcaaaccgagtcaacccaaagttccaagttctttgctttctcttctgtgtgtgtgttggtttgtcccaaaagtcagtttgcaagttgaaacttcatgaaattactcgtagcagaaataaagtacattgtacaaatcacgcaggtctgcgatgtggagtataaaaatggtatttacagccagtaaacatggaccagaaagacacgtacaactgcacaccggcacacactcccaagcaggccctcgggggcctcggcgggcgccgcggacacgggtgaggccccctcgaggcagattggcatggcacacgcttgcacacggggacacacggaacacaggcacgctagaggagagtctcgaaacaattatcaaactctggaatatcga

SEQ ID NO: 93423 - DNA, 608 bp, Homo sapiens
agcctaggcctgcagagactgctcagtcacagttgaaggagacctactgagtcctgaggacaaccaacaaaggccttaacggcacagaaggaagtcctgtcttctgggattgagtttggtaatccaccccttggagctaaacacagtagtatccttagtcgttgggatggtgggagagggagaagaggaaggatgaaggaaagggctctttgctagtatctccatatctagaagatggtttaaactcatacccatagctctatatgagcattttcagtaaagtgcctgtgtttgttgtggacaagttttattattttgcaacatctgagctttatgaaagtcctggagtgacaatgtatgataaaaagtagagctagtgaattaggcaatttattaatattttttgttataactgatagaaaagatgcatcttgaacatggaattgttaagccacgtctgagcagtgtatgtcaggacttgttcattaggttggcagcagaagggcagaatgaagtataaagggagagatgtatgcaaatgtgtctatgtttacattttgatactagtcattgatatatgtgcaactcttttggctgtactataggaa

SEQ ID NO: 93424 - DNA, 389 bp, Homo sapiens
  misc_feature (18)..(18): n is a, c, g, or t
  misc_feature (24)..(24): n is a, c, g, or t
  misc_feature (52)..(52): n is a, c, g, or t
  misc_feature (69)..(69): n is a, c, g, or t
  misc_feature (136)..(136): n is a, c, g, or t
gagacaaagatgagaaanaaagantcacacacggggggggtgtattatgttnagatatttttttttaancctcaggagatgtttttttttgtaggaaatttataaaaacgcccccccgctcacaaaaaggagggtntttcgctgcctcccgggggggccaccccctataggggggggggggaggggggttcttaaacaaccccgagcggcaaagagggtttccccccacaaataatataaacccaccaaggcgccagaaggtgtgaatagtttgatttaattattccacattatatgcataaatagtaacatcaccttgttccccataaaattatacaattataaattgtcaatttgcaattaaaacaataaaatccagccagacgttg

SEQ ID NO: 93425 - DNA, 638 bp, Homo sapiens
  misc_feature (626)..(626): n is a, c, g, or t
  misc_feature (638)..(638): n is a, c, g, or t
agcctaggcctgcagagactgctcagtcacagttgaaggagacctactgagtcctgaggacaaccaacaaaggccttaacggcacagaaggaagtcctgtcttctgggattgagtttggtaatccaccccttggagctaaacacagtaagaggagcccacccttttcttactatacagagaagagtaaaacacagtcacctttacacagcatctgagtggacctaacacagggcagtgaaagtgatgcagaacaaacttcaaagcctccaggagcacacgtgacctcaggaaatgaacagaaacaacctagctctccaaagaggagtatttcattcaactccgaactgctcacacattatgcaactgtgaacaaggctcatttaaaaatccatgaagcttctaatgttttcaccacaaaatatattaagtattgaggtgctggatatgttgactagtttgatttaattattccacattatatgcataaatagtaacatcaccttgttccccataaaattatacaattataaattgtcaatttgcaattaaaaattgtgacatacagatgcgtccagattttccctttatttttcaaattcttcttcttcctcttccctttccctcncccccccccctn

SEQ ID NO: 93426 - DNA, 753 bp, Homo sapiens
  misc_feature (741)..(741): n is a, c, g, or t
  misc_feature (753)..(753): n is a, c, g, or t
ctcactcagctcacccattaaaccctgcgggtctgtttcactttttccttcccacacaaacattacagtaacagtctggccttcccaaaccaccactggaaacttcaactgaactgatcatatatcagtcaactctaggagaccagctctgattccaagaaactgtgacattgcctccattggaagttacaaccttcacctgccaacctggactcatcccataggttgtgacatcagaaagttgatagacgtgatcgctaagaatcttgccgaatattctaggactacaagtaaaagagaccctattttctgtgctgggaaaagcatctgagtggacctaacacagggcagtgaaagtgatgcagaacaaacttcaaagcctccaggagcacacgtgacctcaggaaatgaacagaaacaacctagctctccaaagaggagtatttcattcaactccgaactgctcacacattatgcaactgtgaacaaggctcatttaaaaatccatgaagcttctaatgttttcaccacaaaatatattaagtattgaggtgctggatatgttgactagtttgatttaattattccacattatatgcataaatagtaacatcaccttgttccccataaaattatacaattataaattgtcaatttgcaattaaaaattgtgacatacagatgcgtccagattttccctttatttttcaaattcttcttcttcctcttccctttccctcncccccccccctn

SEQ ID NO: 93427 - DNA, 815 bp, Homo sapiens
  misc_feature (803)..(803): n is a, c, g, or t
  misc_feature (815)..(815): n is a, c, g, or t
agcctaggcctgcagagactgctcagtcacagttgaaggagacctactgagtcctgaggacaaccaacaaaggccttaacggcacagaaggttgtgacatcagaaagttgatagacgtgatcgctaagaatcttgccgaatattctaggactacaagtaaaagagaccctattttctgtgctgggaaaagaagtcccaccagtgtgatcaggaataaaacacttcaggtgcaacgtgatcattattcaaaggttctgtgaagccaattaccccctttgcaaagtgaaaagtgcaactttggatttttctgatcagagtaatatagagaggagcccacccttttcttactatacagagaagagtaaaacacagtcacctttacacagcatctgagtggacctaacacagggcagtgaaagtgatgcagaacaaacttcaaagcctccaggagcacacgtgacctcaggaaatgaacagaaacaacctagctctccaaagaggagtatttcattcaactccgaactgctcacacattatgcaactgtgaacaaggctcatttaaaaatccatgaagcttctaatgttttcaccacaaaatatattaagtattgaggtgctggatatgttgactagtttgatttaattattccacattatatgcataaatagtaacatcaccttgttccccataaaattatacaattataaattgtcaatttgcaattaaaaattgtgacatacagatgcgtccagattttccctttatttttcaaattcttcttcttcctcttccctttccctcncccccccccctn

SEQ ID NO: 93428 - DNA, 481 bp, Homo sapiens
atttggactctgacttaggacctgtcattaaatctttctgtgatcttgggcaggttgtgacatcagaaagttgatagacgtgatcgctaagaatcttgccgaatattctaggactacaagtaaaagagaccctattttctgtgctgggaaaaggcaagtcaagcccaactcttcttttctggagctctattatcctccttccaccccaccccaataacccagagaagtaactggccccatcattcagaaggcaatggataaagttgggttgaatcagtaggtctatttttttttccagttattttcactctcccaagcttaagtggaatttctcatcaagttctaaccccagaaacatcattatgagtagcacactttaagccagacattgacaaaccagactttgtccagagaagactagccagaatggcaagggtttgagaattttgtctaatgaaaaataagttagaaaataagatgt

SEQ ID NO: 93429 - DNA, 495 bp, Homo sapiens
ttgccaaataacttccagaagaagtgagcttttaccaagtaaaaggtgaaagctaaaatcctgctcactactggcagcacttagtctatcgccctgttacatacattaatacatcacacccatggaaagtctgtattttatccccatttcacagttgagaaagctgagcctcagacgtccatgcatgacttctttgtatgcttttcagcaaaggtcagtgggaaattaaattatagaatatgccatgcactgtgcagatattttaatccgtttttcttacaaccctatggggaagttatcatctccatataagactagagagaactgaggttcaaggttaaggacggccaagcagtgaggtgtcagaggtgagatttgagctccattcattcatctccaaaccaaagtctttgttccttccaccaatccagccacctccctctggcagagaagtcagtaccaatgagtgggacgtgctgagatggagccaatgtt

SEQ ID NO: 93430 - DNA, 431 bp, Homo sapiens
ttttttttagctttttgtttgttttgtttttagagacaggatctcactctgtcacccagtctggagtgcagtggcacaatcatggctcactgcatcctccaactctcaggctcaagtgatcttcctgcctcaccctcccgtgtagccccagctatgttttgcatatgggactgcaggcatgtattaccaggctcagctaatttttaaacatttttttgtaaagatggggtcttgctctatcgccaaggctgatctcaaattcctgggcttaagccatcctcctgtgtcggcctccttaagtgccgggatgacaggcatgagctactgtgcctggctgatacattttgccaagctctaaatgaagttagctttaagaaatttctttgaaaaaaattctctgaaatcttaaaaacaactttttgaaatggaac

SEQ ID NO: 93431 - DNA, 403 bp, Homo sapiens
ctgaattgtatggaaagatggagcaagcttgaactaccctagcaatgccaactactttcattgctcctgcatcttagataaggaacataaccaagttttccatccttggccccctagggtctctacatgtccatatctgacaagaatctgtgaagaccaagctcaaagccagcacctcctaaaaagctgcctggcagctctgaatagtggttttccttctgcctcccacagcacagatcacatcccttcttgttttgtgcatacacagctcattgtacagtggtcctgcctcttgttgatggtgagctccctgaggccaggcccctgagctaattcccagtgcactgcagttcttattttggccagtggttccacctgctaaacagcctccaggtagcttatt

SEQ ID NO: 93432 - DNA, 868 bp, Homo sapiens
cttgctctgattttgcagagcttttgaagacattttccccttgtttgggaatcaatatgaaaacattgattgtcctgcaattatcaatgttacattgtctctggagtttttggccttgtttcaatgcaataaatcaagttgtagattgctggtggccttagcagagcaattatcactgcagcacataatatccagcttgctgccttattgtgattcagagacctagtcacaagcttgctttttgtctaagagccaacaactaaaaacccaagtttccatcaacagaaggaataaattgtggtatattcatacatggagtactatgcagccacataggagctaactactgctacatataatacggagtaatctcagacatgatgttgaacaaaagcagacaagcacaagtcaatatgtgtgcatttatttatatgaaattcaaaacagctactacaaatataggacataggaagaatgtctacctttggggaagggggcaaatattaactgagtagggacccaagggagccctctgaggtactggaaatgctctatatttttatatgagtggttacagggtataatcattggtcagggccaggctcatgcctgtaatcctagcactttgggaggccgaggcgggtggatcacctgaggtcaggagttttgagaccagcctgaccaacatggcaaaacccggtctctactaaaaacacaaaaaattagctgggtgtggtggtgggcgcctgtaatcccagctactcaggaggctgaggcaggagaatcgcttgaacccgggaggtggaggttgtagtgagccgagatcccgtcactgtacaccagcctggcgacaagagcgaaactccat

SEQ ID NO: 93433 - DNA, 485 bp, Homo sapiens
gaacaaagcatatttactggaatgcaaagatatctactgttttaccaaatgtcaaatatccaatcagagattatgagacatacaaagaagcaggaaatattattaatactgacataatgaggaaatgattaagcaatcaaaagtgacccatgattaacacagatgttacaattagcaaagaagtacattaaaatagttatcgctgggcgtggtggttcacgcctgtaatcccagcactttgggagaccgaggcaggcagatcacttgaagtcaggagtttgagaccggcctggccaacatggtgaaaccctgtctctactaaaaaaatacaaaaataaaccgggcgtggtggtgtgcacctgtaatcccagctactctggaggctgaggcaggataattgcttgagccctggaggtggaggttgcagtgagcggagatcatgccactgtactcccgcctgggtgacacagcaagactctgtctca

SEQ ID NO: 93434 - DNA, 2300 bp, Homo sapiens
agagcctgtgctactggaaggtggcgtgccctcctctggctggtaccatgcagctcccactggccctgtgtctcgtctgcctgctggtacacacagccttccgtgtagtggagggccaggggtggcaggcgttcaagaatgatgccacggaaatcatccccgagctcggagagtaccccgagcctccaccggagctggagaacaacaagaccatgaaccgggcggagaacggagggcggcctccccaccacccctttgagaccaaagacgtgtccgagtacagctgccgcgagctgcacttcacccgctacgtgaccgatgggccgtgccgcagcgccaagccggtcaccgagctggtgtgctccggccagtgcggcccggcgcgcctgctgcccaacgccatcggccgcggcaagtggtggcgacctagtgggcccgacttccgctgcatccccgaccgctaccgcgcgcagcgcgtgcagctgctgtgtcccggtggtgaggcgccgcgcgcgcgcaaggtgcgcctggtggcctcgtgcaagtgcaagcgcctcacccgcttccacaaccagtcggagctcaaggacttcgggaccgaggccgctcggccgcagaagggccggaagccgcggccccgcgcccggagcgccaaagccaaccaggccgagctggagaacgcctactagagcccgcccgcgcccctccccaccggcgggcgccccggccctgaacccgcgccccacatttctgtcctctgcgcgtggtttgattgtttatatttcattgtaaatgcctgcaacccagggcagggggctgagaccttccaggccctgaggaatcccgggcgccggcaaggcccccctcagcccgccagctgaggggtcccacggggcaggggagggaattgagagtcacagacactgagccacgcagccccgcctctggggccgcctacctttgctggtcccacttcagaggaggcagaaatggaagcattttcaccgccctggggttttaagggagcggtgtgggagtgggaaagtccagggactggttaagaaagttggataagattcccccttgcacctcgctgcccatcagaaagcctgaggcgtgcccagagcacaagactgggggcaactgtagatgtggtttctagtcctggctctgccactaacttgctgtgtaaccttgaactacacaattctccttcgggacctcaatttccactttgtaaaatgagggtggaggtgggaataggatctcgaggagactattggcatatgattccaaggactccagtgccttttgaatgggcagaggtgagagagagagagagaaagagagagaatgaatgcagttgcattgattcagtgccaaggtcacttccagaattcagagttgtgatgctctcttctgacagccaaagatgaaaaacaaacagaaaaaaaaaagtaaagagtctatttatggctgacatatttacggctgacaaactcctggaagaagctatgctgcttcccagcctggcttccccggatgtttggctacctccacccctccatctcaaagaaataacatcatccattggggtagaaaaggagagggtccgagggtggtgggagggatagaaatcacatccgccccaacttcccaaagagcagcatccctcccccgacccatagccatgttttaaagtcaccttccgaagagaagtgaaaggttcaaggacactggccttgcaggcccgagggagcagccatcacaaactcacagaccagcacatcccttttgagacaccgccttctgcccaccactcacggacacatttctgcctagaaaacagcttcttactgctcttacatgtgatggcatatcttacactaaaagaatattattgggggaaaaactacaagtgctgtacatatgctgagaaactgcagagcataatactgccacccaaaaatctttttgaaaatcatttccagacaacctcttactttctgtgtagtttttaattgttaaaaaaaaaaagttttaaacagaagcacatgacatatgaaagcctgcaggactggtcgtttttttggcaattcttccacgtgggacttgtccacaagaatgaaagtagtggtttttaaagagttaagttacatatttattttctcacttaagttatttatgcaaaagtttttcttgtagagaatgacaatgttaatattgctttatgaattaacagtctgttcttccagagtccagagacattgttaataaagacaatgaatcatgaccgaaag

SEQ ID NO: 93435 - DNA, 560 bp, Homo sapiens
tggtagatgctcagtaaatatgtgctgaatgaatgaatgaatgaatgctaccttggttctttctgggtctgaaatacaaagatcttattccagatggctgatgaagtgtgataggaagggcagaaattagccgaagaagaggctggtaaactgtccagccccacctatggcctaaagggctttcgcgccaccccctcccacccgacagtgatctgtggttgggggcaggtggaaagcagggagttgcataaggcacataatctgagagttctaagaaggacccgtgagagcttggggctagaagctgcatggcttcctgcacttccagttgggaggatttggtcgcatggataatatttagaaaagtgaaagaaaactggcacattggttcagggctcagcctgtgacctaagtcaaggcttgatctgagatcaggggcaggaccaggctcagggcttggagtgaccaagatcatgacttctgcagggccaggactggggctccccctgtgaccagaatcagagctcagtccgtgacagagattagggctcagtcaggag

SEQ ID NO: 93436 - DNA, 366 bp, Homo sapiens
ttcctcattcccagtaggttccaagtccctcttgtggtgcacacttcctgccatgctggacagagcctaatgtttcagatgcggtaggattgggggtcagctactgcatagctcctaattatggggactattgtgttatcctgaggcattagaactggacatagcctaatgtttgaagatgcggtaggattgggggcagccgaggcaggaggatcacttgaggtcaggagtttgagaccagcctggctaatatggtgaaaccccatctctactaaaaatacaaaaatcagctgggtgtggtggtgcatgcctgtagtcccggctgctcgggaggctgaggcaggagaatcacttgaacccgggagg

SEQ ID NO: 93437 - DNA, 477 bp, Homo sapiens
caggctggtttcaaactcctgacctcaggcaatccacctgcctcggcctctcaaagtgctgggattacaggcgtgacacgccagcacgcctggctcagctttacttttcaagcccatcactaacatcacgtggatttggccaagttactgttgaggaaatctatgggattattccctagtcctaggcaatagtcctaggcactggccccagcctgactttgcacaaatgactatggtggaggctgaacctgattttacacaaaccagcaaccccacacaccacacctggcccagccaagttggctgatctggggatgaacatgtagtcttagttggaacattaagactcctttctagaattttgcatttgggtctagaaagggaatctgagtgttggatataacactgggccaccatcagtggttatgttgctgccacaggaagaaagccagattccaggacaggggactgaaggtg

SEQ ID NO: 93438 - DNA, 419 bp, Homo sapiens
aaaaaaaaaaagaatgctctgaatagtcttgagctgccagttaagtgtttggagtgcaagtgatttgcttcattttgcatacaactcactggctagaaccaatcacatggccccactcactcacaaatcagtaagccaggaagtgtccacagcagcagagagctggaaacatttggtgatctgctgtggtgtgtactatggcaggaagtcttctccacttgaagatgggggacctgaggctaagagagtttaaataacgatcaagaacattcagcttgcaggtgactgggctcaaactcaggcctatctgggtctaggacccaggtgtttaactgctaagctataggtttttcatctcttaattaattgtaaaatcagtttcttcccttcagtgaaaactctcagcttagaaagaaaat

SEQ ID NO: 93439 - DNA, 246 bp, Homo sapiens
gagatggagttttgccatgttgcccaggttggtctcaaactcctgaactcaagcagtgtgcccacctcggcctcccagagtgctggaattacaggcgtgagccaccgcgcccggcacaatatgcaattcgttttgtccagcctctccctctgatgtcttcattcttcccattacaactccgcatgtctcctgtggtggaaggcatcagtggccccaatttttcacccttccctttcacatgttttg

SEQ ID NO: 93440 - DNA, 159 bp, Homo sapiens
ctccatgcccagctctattcacagtggctgatcaggtctttactgcggatctggaaagaagctgatagaagatgggtgccagaggggcctgggtagagatgttagctgagagatacccagtatggattctgtcagttttctgggtgagcatacacattc

SEQ ID NO: 93441 - DNA, 409 bp, Homo sapiens
aggttttgcaagtcaagtggcaaaatcaaggatgatgttatgaagatatttatataactatttaaaatgtgaccattttaaactggataggccagtgggctcactcctgtaatcccagcacttcgggagcccaagatggttagatcgcttaagcccaggagttcaagaccagcctgggctcaagcagtccgctcaccttggcctcccaaaggtcgaacagcatagtgaaaccccgtctctaaaaaaattagataggtgtgctggccaatttgcctgtaatccgagctattgcctgtaatccgagctattcacgaggctaagatgggagaatcacctgagcccaggaagttgaggctgcagtgagcagtgattatgtcactgcactccattctgggtgacagagtgagac

SEQ ID NO: 93442 - DNA, 596 bp, Homo sapiens
ttacaacctggattagcagaggaaggaaagaaaaaataattctggataagaacagtttttgtgggctggtccaaaggcagtgagttatctcaactgactgttcacagtcagttacagatcaaattctttgttctattctttccccacttctcactactgtgcttaactagtcttagaggggaaaaacagtctatgtaaagagggattggaacagtatggtatcttccatttaggtatatgtaagtaagtcaggattctggaacttgaagtattaatataaggaaaggagtaatgggagatgaggttgaagggggaggcctccattataaaggatgctatatgcctgctaagcaatctggaccttaacttgtaagcagtgggtgaatccatgaactacagagtactaagtaggggaagagataagatcagattcacttttaaatcactgtgcaagccatgggaaggttgaactagagggaggtaaaggtaggtacgaggctatttgtaactatccaagtgagaggtaataaggcaataaagagtaggaatgaagccaaaaagaaaacctaaagacacttagaagatagaaaaggtgg

SEQ ID NO: 93443 - DNA, 1729 bp, Homo sapiens
  misc_feature (15)..(15): n is a, c, g, or t
ggaatatctttagtncctactagaagaaaggtcttgttttggaatttacattctctgcatacgatgttctgatgggacagcaagaacttacacatcaactagtttatactacatgtcctttgtctaactatctatctatatagacatatgtgctagtttagaaaattgtcaaatcagcatgtcagtaccaatggaaaaattgtctttgatatgttatatttttctcacttaggaaatgtgcttaatttccaagggtttttttttttaatgttactattgaagcatgaaaagttaacatcatttgttatcctttctttccccactatatattgtcttacccagagtagggctatactttggtggtgttttaacatcttctaataagtgatcataagcaacatacagatgctaatatttgaaatcttgttttttcttacttcctaataatcaaattatattaatatttcacactacaaaaaataggattttctaatttgtaaaaacaagagctcctgctatctcttggaagttaagtccttaggaaccctatcttatctttctaaaaataataagtaagaacaatcacatgtgattctggctattaaaatcatacatccctagtggaattaacaagcttgaccaattatgattatgctaaattgttttaggctaggaggactgtcagtccctacttcttcccatttttcttgggatatctttatattggctagatttgttgccaatataaaattgacacagcagagacactcctctaacttaaatttttagtggagtttggtttttgctaaccccgtactaataaacactttaatgacttttttcatttcaaaatatttaaatgtataaaattgcctatgctgcttattgaaagaaccgtccttttgggcataagaagactttttcaacctaaaccgttatgtgtgatttattaacaacttaacaaagaaagtaccaacatctctcaaaatgtagttgatattcttacctatctcagaaatattaacgaattggattcacaaaagaatgtcttacatactgttgacatttatgtgaatattctttatactgttgtaaatgtttcattcaacttaataacattttaaaagatgtatgtatctgatttttctttagaaaatattatatttttatttgtattttttacattttaaagttcatctctatgtgcagctatttttatattgccaaaaactcacataaatacaaaataagtgaaatatgcaaaaaaaaatattttggcaagcattacactgcatatttttttaaatgtttgtgggccagtctcatacaattgattattctaagaatgtgttgtgtcttatcactgtaaatatggcacaaacctgtttatctcagtagtgtaaataattgaaagattgaattctccctgttcaatttttattttaatttccttgtaatttctccagctgacattactgtatcaaaagatgcataagatttttgatttgcggtttggagataattgcattgtgttcagtttccagtttgtttttatttgctttttaaatttgttttcagggttcctagtttgtgagaagttgatcttcagaattatttttacactatttatgacttattttcataatgtaaaaagtgtgtaattattacaatattaatccaaacaatgataatgaattgtattgttataaagctttattgatgttcatga

SEQ ID NO: 93444 - DNA, 618 bp, Homo sapiens
taattgttctagcccactttttttttctggtctataaagcattgaacccccctgtacacgactcactccttttaaagaaaaaaattgaagtataaagctttgagctcaacgctttatacttcagtctcgacacacagcttttataggtgacagaaactgaagtaaaaagcccttataggatcaaaaattgttcagggctcttagagatggtgaaaactacaaaaaaaaccatggctttcatatggacagataaaatgaaagaaagggaaaaggcagtggtgtgtaggcaaatatggtttggcatttgtcttttaatgacacctgatatgatgtcattttgattttgaaattgaacactagaactgttaatcacctttaaaaagaagagcttattgggaattatatattccttaaaatatacatgggggcctgaatgtcagccatctttatactatagaaaaaggattatggatgcatgaatggtcatgctttggagatcaaatattggttgaatgcctatgtatgtcaggccctgtgctgagccatgaggattaaaaagatgaataaacatatcttgtttaggaaatggatgtataaaaaaatcaagtgcaataaagt

SEQ ID NO: 93445 - DNA, 586 bp, Homo sapiens
gacttctttattcctgctttcagttttcctcacatagcagctttgtatgtgtattgccagctatattttgttctttagaaatatcttggattttccaagatatatatacatacacatacataagtgtgatgaaggttcaggtagcttactagctttctattgctagtaccctaaagactagtactctaataaggagactaaggtggcacccacatagatatcttgcatcctcagttgtgtgtgtgtgtgtgttcatatacatatgcttatttcttctatcaagggaaaagttcagttagaagacatacttcaccatcttgaaaaagaagaaatcaatccccttgctactacagaagaacaactctgtttggtgcttattccagccagcacagtgaagacaggctgaggactgctaccacagatgtagaagagcttatagtgaagcacatgggtgaaacaaaagaagtgagaactaatagcatagaattttaaagacacctgtgattttgttcattgcccttcattaaattgacatattaaaaactaatgtttggctatcactgtatagtttgaaaagcacccacgt

SEQ ID NO: 93446 - DNA, 671 bp, Homo sapiens
tgacgcccaggtctccgtcggcacctgcagctagcagctgagcgcgtaggggccgagcgaccccgggacgctcgcggcaccctccgcaggaaaatttccgacttggttcttgaggttcctgcctcagccccaaggaggaaagcacccattctcccctcttttccgcattccgggccttttctgcttctccccagtatggtccgaaactacaggaggggaacccctcctggcccggcctttctattccctggctggagtgattccgcctgaaggagaattcgcccgttttccccggacccagctgccacaagcatttagtattaggctgccgcttattattagagcgggcttagaacatcctcagcgagggaaaagttcagttagaagacatacttcaccatcttgaaaaagaagaaatcaatccccttgctactacagaagaacaactctgtttggtgcttattccagccagcacagtgaagacaggctgaggactgctaccacagatgtagaagagcttatagtgaagcacatgggtgaaacaaaagaagtgagaactaatagcatagaattttaaagacacctgtgattttgttcattgcccttcattaaattgacatattaaaaactaatgtttggctatcactgtatagtttgaaaagcacccacgt

SEQ ID NO: 93447 - DNA, 513 bp, Homo sapiens
cacgctgcacattattgaatgtccatttgtctgcaccacctctgtcatctatagaccacctccttctgctttcctgctacaatgctttgcgtacctaagtatttcgcattctcccagctctgcagtcattgggaagattttctgtttttctttgcactatggcaacctttcagtcttgggtaaactagagactaggagaagtgcaaattgggaaaagttcagttagaagacatacttcaccatcttgaaaaagaagaaatcaatccccttgctactacagaagaacaactctgtttggtgcttattccagccagcacagtgaagacaggctgaggactgctaccacagatgtagaagagcttatagtgaagcacatgggtgaaacaaaagaagtgagaactaatagcatagaattttaaagacacctgtgattttgttcattgcccttcattaaattgacatattaaaaactaatgtttggctatcactgtatagtttgaaaagcacccacgt

SEQ ID NO: 93448 - DNA, 401 bp, Homo sapiens
cccattccatgtacaactgactgaatggggaaaatacagattgatctggagcatagcagagagagattcttatttaatctttcaaacaacagagtgagggaaaagttcagttagaagacatacttcaccatcttgaaaaagaagaaatcaatccccttgctactacagaagaacaactctgtttggtgcttattccagccagcacagtgaagacaggctgaggactgctaccacagatgtagaagagcttatagtgaagcacatgggtgaaacaaaagaagtgagaactaatagcatagaattttaaagacacctgtgattttgttcattgcccttcattaaattgacatattaaaaactaatgtttggctatcactgtatagtttgaaaagcacccacgt

SEQ ID NO: 93449 - DNA, 171 bp, Homo sapiens
gcggcgcctactactactactactactgctcgattcaagcttctaacgatgtacggggccatgaggattaaaaagatgaataaacatatcttgtttaggaaatggatgtataaaaaaatcaagtgcaataaagtgtgtgtccaaaagctgacacaatggaaaaaaaaaaaa

SEQ ID NO: 93450 - DNA, 1516 bp, Homo sapiens
aagcactggatcaacgcagagtgcccattacgggcgtggggcggcggccgcgaaacgtgcgcaggcgccggccgctgcgctgcagatggcggaaatggatccggtagccgagttcccccagcctcccggtgctgcgcgctgggctgaggttatggctcgcttcgcggccaggctgggcgcgcagggccggcgggtggtgttggttacgtcaggcggcaccaaggtcccactggaagcgcggccggtgcgcttcctggacaacttcagcagcgggcggcgcggtgcaacctcggccgaggccttcctagccgccggctacggggtcctgttcttgtatcgcgctcgctctgccttcccctatgcccaccgcttcccaccccagacttggctgtccgctctgcggccttcgggcccagccctttcgggcttgctgagcctggaggccgaggagaatgcacttccgggttttgctgaggctctgaggagctaccaggaggctgcggctgcaggcaccttcctggcagtagagttcaccactttggcggactatttgcatctgttgcaggctgcggcccaggcactcaatccgctaggcccttctgcgatgttttacctggctgcggctgtgtcagatttctatgttcctgtctctgaaatgcctgaacacaagatccagtcatctgggggcccactgcagataacaatgaagatggtgccaaaactgctttctcctttggttaaagattgggctcccaaagcatttataatttcctttaagttggagactgaccccgccattgtaattaatcgagctcggaaggctttggaaatttatcagcatcaagtggtggtggctaatatccttgagtcacgacagtcctttgtgtttattgtaaccaaagactcggaaaccaagttattgctatcagaggaagaaatagaaaaaggcgtagagatagaagagaagatagtggataatcttcagtctcgacacacagcttttataggtgacagaaactgaagtaaaaagcccttataggatcaaaaattgttcagggctcttagagatggtgaaaactacaaaaaaaaccatggctttcatatggacagataaaatgaaagaaagggaaaaggcagtggtgtgtaggcaaatatggtttggcatttgtcttttaatgacacctgatatgatgtcattttgattttgaaattgaacactagaactgttaatcacctttaaaaagaagagcttattgggaattatatattccttaaaatatacatgggggcctgaatgtcagccatctttatactatagaaaaaggattatggatgcatgaatggtcatgctttggagatcaaatattggttgaatgcctatgtatgtcaggccctgtgctgagccatgaggattaaaaagatgaataaacatatcttgtttaggaaatggatgtataaaaaaatcaagtgcaataaagtgtgtgtccaaaagctgacacaatggaaaaaaaaaaaa

SEQ ID NO: 93451 - DNA, 1530 bp, Homo sapiens
  misc_feature (1483)..(1483): n is a, c, g, or t
aagcactggatcaacgcagagtgcccattacgggcgtggggcggcggccgcgaaacgtgcgcaggcgccggccgctgcgctgcagatggcggaaatggatccggtagccgagttcccccagcctcccggtgctgcgcgctgggctgaggttatggctcgcttcgcggccaggctgggcgcgcagggccggcgggtggtgttggttacgtcaggcggcaccaaggtcccactggaagcgcggccggtgcgcttcctggacaacttcagcagcgggcggcgcggtgcaacctcggccgaggccttcctagccgccggctacggggtcctgttcttgtatcgcgctcgctctgccttcccctatgcccaccgcttcccaccccagacttggctgtccgctctgcggccttcgggcccagccctttcgggcttgctgagcctggaggccgaggagaatgcacttccgggttttgctgaggctctgaggagctaccaggaggctgcggctgcaggcaccttcctggcagtagagttcaccactttggcggactatttgcatctgttgcaggctgcggcccaggcactcaatccgctaggcccttctgcgatgttttacctggctgcggctgtgtcagatttctatgttcctgtctctgaaatgcctgaacacaagatccagtcatctgggggcccactgcagataacaatgaagatggtgccaaaactgctttctcctttggttaaagattgggctcccaaagcatttataatttcctttaagttggagactgaccccgccattgtaattaatcgagctcggaaggctttggaaatttatcagcatcaagtggtggtggctaatatccttgagtcacgacagtcctttgtgtttattgtaaccaaagactcggaaaccaagttattgctatcagaggaagaaatagaaaaaggcgtagagatagaagagaagatagtggataatcttcagtctcgacacacagcttttataggtgacagaaactgaagtaaaaagcccttataggatcaaaaattgttcagggctcttagagatggtgaaaactacaaaaaaaaccatggctttcatatggacagataaaatgaaagaaagggaaaaggcagtggtgtgtaggcaaatatggtttggcatttgtcttttaatgacacctgatatgatgtcattttgattttgaaattgaacactagaactgttaatcacctttaaaaagaagagcttattgggaattatatattccttaaaatatacatgggggcctgaatgtcagccatctttatactatagaaaaaggattatggatgcatgaatggtcatgctttggagatcaaatattggttgaatgcctatgtatgtcaggccctgtgctgagccatgaggattaaaaagatgaataaacatatcttgtttaggaaatggatgtataaaaaaatcaagtgcaataaagtatcnggccgactcctctcttcgccatccccgctacttatcttctccctcca

SEQ ID NO: 93452 - DNA, 1043 bp, Homo sapiens
gtttagaggctgcagcttgagctacaatcaggaggaaacccctcctctggagggcagatggcggaaatggatccggtagccgagttcccccagcctcccggtgctgcgcgctgggctgaggcccttctgcgatgttttacctggctgcggctgtgtcagatttctatgttcctgtctctgaaatgcctgaacacaagatccagtcatctgggggcccactgcagataacaatgaagatggtgccaaaactgctttctcctttggttaaagattgggctcccaaagcatttataatttcctttaagttggagactgaccccgccattgtaattaatcgagctcggaaggctttggaaatttatcagcatcaagtggtggtggctaatatccttgagtcacgacagtcctttgtgtttattgtaaccaaagactcggaaaccaagttattgctatcagaggaagaaatagaaaaaggcgtagagatagaagagaagatagtggataatcttcagtctcgacacacagcttttataggtgacagaaactgaagtaaaaagcccttataggatcaaaaattgttcagggctcttagagatggtgaaaactacaaaaaaaaccatggctttcatatggacagataaaatgaaagaaagggaaaaggcagtggtgtgtaggcaaatatggtttggcatttgtcttttaatgacacctgatatgatgtcattttgattttgaaattgaacactagaactgttaatcacctttaaaaagaagagcttattgggaattatatattccttaaaatatacatgggggcctgaatgtcagccatctttatactatagaaaaaggattatggatgcatgaatggtcatgctttggagatcaaatattggttgaatgcctatgtatgtcaggccctgtgctgagccatgaggattaaaaagatgaataaacatatcttgtttaggaaatggatgtataaaaaaatcaagtgcaataaagtgtgtgtccaaaagctgacacaatggaaaaaaaaaaaa

SEQ ID NO: 93453 - DNA, 1071 bp, Homo sapiens
aagcactggatcaacgcagagtgcccattacgggcgtggggcggcggccgcgaaacgtgcgcaggcgccggccgctgcgctgcagatggcggaaatggatccggtagccgagttcccccagcctcccggtgctgcgcgctgggctgaggcccttctgcgatgttttacctggctgcggctgtgtcagatttctatgttcctgtctctgaaatgcctgaacacaagatccagtcatctgggggcccactgcagataacaatgaagatggtgccaaaactgctttctcctttggttaaagattgggctcccaaagcatttataatttcctttaagttggagactgaccccgccattgtaattaatcgagctcggaaggctttggaaatttatcagcatcaagtggtggtggctaatatccttgagtcacgacagtcctttgtgtttattgtaaccaaagactcggaaaccaagttattgctatcagaggaagaaatagaaaaaggcgtagagatagaagagaagatagtggataatcttcagtctcgacacacagcttttataggtgacagaaactgaagtaaaaagcccttataggatcaaaaattgttcagggctcttagagatggtgaaaactacaaaaaaaaccatggctttcatatggacagataaaatgaaagaaagggaaaaggcagtggtgtgtaggcaaatatggtttggcatttgtcttttaatgacacctgatatgatgtcattttgattttgaaattgaacactagaactgttaatcacctttaaaaagaagagcttattgggaattatatattccttaaaatatacatgggggcctgaatgtcagccatctttatactatagaaaaaggattatggatgcatgaatggtcatgctttggagatcaaatattggttgaatgcctatgtatgtcaggccctgtgctgagccatgaggattaaaaagatgaataaacatatcttgtttaggaaatggatgtataaaaaaatcaagtgcaataaagtgtgtgtccaaaagctgacacaatggaaaaaaaaaaaa

SEQ ID NO: 93454 - DNA, 1689 bp, Homo sapiens
aagcactggatcaacgcagagtgcccattacgggcgtggggcggcggccgcgaaacgtgcgcaggcgccggccgctgcgctgcagatggcggaaatggatccggtagccgagttcccccagcctcccggtgctgcgcgctgggctgaggttatggctcgcttcgcggccaggctgggcgcgcagggccggcgggtggtgttggttacgtcaggcggcaccaaggtcccactggaagcgcggccggtgcgcttcctggacaacttcagcagcgggcggcgcggtgcaacctcggccgaggccttcctagccgccggctacggggtcctgttcttgtatcgcgctcgctctgccttcccctatgcccaccgcttcccaccccagacttggctgtccgctctgcggccttcgggcccagccctttcgggcttgctgagcctggaggccgaggagaatgcacttccgggttttgctgaggctctgaggagctaccaggaggctgcggctgcaggcaccttcctggcagtagagttcaccactttggcggactatttgcatctgttgcaggctgcggcccaggcactcaatccgctaggtgcgtgccctaggagtaccccttttgcctggaagcacagcctttctttccagccacttatccccttacctcctgcttacccacggatctcagctggggaacccgagttgagaaggagctgatcctatatcgtacctcgccgatttgttaacaccttgtgtttctctttgcaggcccttctgcgatgttttacctggctgcggctgtgtcagatttctatgttcctgtctctgaaatgcctgaacacaagatccagtcatctgggggcccactgcagataacaatgaagatggtgccaaaactgctttctcctttggttaaagattgggctcccaaagcatttataatttcctttaagttggagactgaccccgccattgtaattaatcgagctcggaaggctttggaaatttatcagcatcaagtggtggtggctaatatccttgagtcacgacagtcctttgtgtttattgtaaccaaagactcggaaaccaagttattgctatcagaggaagaaatagaaaaaggcgtagagatagaagagaagatagtggataatcttcagtctcgacacacagcttttataggtgacagaaactgaagtaaaaagcccttataggatcaaaaattgttcagggctcttagagatggtgaaaactacaaaaaaaaccatggctttcatatggacagataaaatgaaagaaagggaaaaggcagtggtgtgtaggcaaatatggtttggcatttgtcttttaatgacacctgatatgatgtcattttgattttgaaattgaacactagaactgttaatcacctttaaaaagaagagcttattgggaattatatattccttaaaatatacatgggggcctgaatgtcagccatctttatactatagaaaaaggattatggatgcatgaatggtcatgctttggagatcaaatattggttgaatgcctatgtatgtcaggccctgtgctgagccatgaggattaaaaagatgaataaacatatcttgtttaggaaatggatgtataaaaaaatcaagtgcaataaagtgtgtgtccaaaagctgacacaatggaaaaaaaaaaaa

SEQ ID NO: 93455 - DNA, 2734 bp, Homo sapiens
aagcactggatcaacgcagagtgcccattacgggcgtggggcggcggccgcgaaacgtgcgcaggcgccggccgctgcgctgcagatggcggaaatggatccggtagccgagttcccccagcctcccggtgctgcgcgctgggctgaggttatggctcgcttcgcggccaggctgggcgcgcagggccggcgggtggtgttggttacgtcaggcggcaccaaggtcccactggaagcgcggccggtgcgcttcctggacaacttcagcagcgggcggcgcggtgcaacctcggccgaggccttcctagccgccggctacggggtcctgttcttgtatcgcgctcgctctgccttcccctatgcccaccgcttcccaccccagacttggctgtccgctctgcggccttcgggcccagccctttcgggcttgctgagcctggaggccgaggagaatgcacttccgggttttgctgaggctctgaggagctaccaggaggctgcggctgcaggcaccttcctggcagtagagttcaccactttggcggactatttgcatctgttgcaggctgcggcccaggcactcaatccgctaggcccttctgcgatgttttacctggctgcggctgtgtcagatttctatgttcctgtctctgaaatgcctgaacacaagatccagtcatctgggggcccactgcagtatcataatgaagacctggaaaaagacaaaacatcacaaaactgcctaggaagaggaatggaacaagtagcaaagaagttaggggtggctcatgaagagattcaaaggctcactgatgagctacaagtgaaggagaaggaacaatgtaaattagattctgcacttaagaaggctcaactagaaattgacaaattgaaggaaaatttggtaaagctgaaagaaaatgatgcagctgacctacagaaagcaaaggaacaaaatcagagactggatgaggaaattctggctttaagaaatagggttcgatcacttgactcagaaaaaaaggtgcttggtgaaatggttgaaagacttaaaggagaggtgtgtgaatctcaagagaataagcaacttggaaaccactcccctggaaaaactgtgggtggtgaacagagagaacagattgaggcttccatgttagagcctgaattatcagtaacataggaagatagaagagaaaccagtacaaaagatcaagagacaaagtacaagatttgaatgagatcctgaaaatgagccaagaaaaaaatgaaatgtttgaaagtgagtggtcaaaagagagagagagagagaagcagttggcatctggtcttgacactgcagagaaggccttgaaagttgaaagtgaggtattaccattcaggaagctgttttcttcttcttgtagttctaatttagggatttcatgttatcatttttaaataaagtataactatgtgtctcagcttgggctgccataaccaaacaccacagactaggtgtctcaaagaacagaattttattttctcacagttatggaggaggggaagtccaagatcaaggtgccagccaagtcagttcctggtgagggttctcttcctggcttgcagatggccaccttcttgctgtgtcctcacatgacagagtgagcaagctctggtgtctcttcctcttcctataaaggcactaaccctattggattaaggccccacccttatatcctcatttgacctttatcacctccttatcaaccctatctatctccaaatacagtccatattgggaattagggtttcaacaatatgaatagggagggagagcacaattcagtccatagcactgtagaatacgtgtttctataataataatggggtagctctgttgtttctccaagctgagttctagcactaagcaaagagtcctttatttagcagacgtttgattgttgtagtgttcatagagtcatgggcttatcgctcgttttaacttcttgtcctgccatcttggaaagatctatcaggagacataatcagcctatattatgaaaagagacctggaagtgagttcatggaagtctaaatcagtaatttagaggatagtgacactcaatcagtttgtagtttgcagtgcccctaatctcatcctaatgacctacaggaattttcagtgaaataagataggaaatcaattatcatttaccctcttcctgtggttttgggaggccaccctctaccttcttgcctttttgtctaagcctttctaatcagcatttacctcccactttgacttcaaggctttgggaaaataccaagtagctcctctcctgaagtaaattttatgtaacctattcccttcattgagcaccacagactgactctcaacccaaagtcttccaccagccaatcagtgcacatcctgtgtcatcaatgtaaaaatctgttaaaaatctgcatttaggttgggcacggtggctcacgcttgtaatcccagcactttgggaggccaaggtgggcggatcacctgaggtcaggagttcgagaccagcctgaccaacatggagaaaccccatctctcccgaaaatacaaaattagccaggcgtggtggtgcatgcctataatcccaggtacttgggaggctgaggcaggagaatcacttgaacccaggaggcagagattgcagtgagctgagatcatgccattgcactccagcctgggcaacaagagaagaaactccatctc

SEQ ID NO: 93456 - DNA, 1093 bp, Homo sapiens
cctagctgcagcggctctcttaaactttattttattgacaggtttaggataggctaaaaactgattttccactgctgatgaagaatatgtatggagccttgaatttaggcatcgctgtgaactctacagagccaaggctttttttttgtgagacaaggtgtcgctctgttgcccaggctgaagtgcagtggcatgaacacagctcactgcagcctcaaccttccaggctcaagtgatcttcccatctcagcctcctgagtagctgggactacagataacaatgaagatggtgccaaaactgctttctcctttggttaaagattgggctcccaaagcatttataatttcctttaagttggagactgaccccgccattgtaattaatcgagctcggaaggctttggaaatttatcagcatcaagtggtggtggctaatatccttgagtcacgacagtcctttgtgtttattgtaaccaaagactcggaaaccaagttattgctatcagaggaagaaatagaaaaaggcgtagagatagaagagaagatagtggataatcttcagtctcgacacacagcttttataggtgacagaaactgaagtaaaaagcccttataggatcaaaaattgttcagggctcttagagatggtgaaaactacaaaaaaaaccatggctttcatatggacagataaaatgaaagaaagggaaaaggcagtggtgtgtaggcaaatatggtttggcatttgtcttttaatgacacctgatatgatgtcattttgattttgaaattgaacactagaactgttaatcacctttaaaaagaagagcttattgggaattatatattccttaaaatatacatgggggcctgaatgtcagccatctttatactatagaaaaaggattatggatgcatgaatggtcatgctttggagatcaaatattggttgaatgcctatgtatgtcaggccctgtgctgagccatgaggattaaaaagatgaataaacatatcttgtttaggaaatggatgtataaaaaaatcaagtgcaataaagtgtgtgtccaaaagctgacacaatggaaaaaaaaaaaa

SEQ ID NO: 93457 - DNA, 677 bp, Homo sapiens
tagaggtaccccggtcgcacttctgaatctcacgacagtcctttgtgtttattgtaaccaaagactcggaaaccaagttattgctatcagaggaagaaatagaaaaaggcgtagagatagaagagaagatagtggataatcttcagtctcgacacacagcttttataggtgacagaaactgaagtaaaaagcccttataggatcaaaaattgttcagggctcttagagatggtgaaaactacaaaaaaaaccatggctttcatatggacagataaaatgaaagaaagggaaaaggcagtggtgtgtaggcaaatatggtttggcatttgtcttttaatgacacctgatatgatgtcattttgattttgaaattgaacactagaactgttaatcacctttaaaaagaagagcttattgggaattatatattccttaaaatatacatgggggcctgaatgtcagccatctttatactatagaaaaaggattatggatgcatgaatggtcatgctttggagatcaaatattggttgaatgcctatgtatgtcaggccctgtgctgagccatgaggattaaaaagatgaataaacatatcttgtttaggaaatggatgtataaaaaaatcaagtgcaataaagtgtgtgtccaaaagctgacacaatggaaaaaaaaaaaa

SEQ ID NO: 93458 - DNA, 1000 bp, Homo sapiens
aagcactggatcaacgcagagtgcccattacgggcgtggggcggcggccgcgaaacgtgcgcaggcgccggccgctgcgctgcagatggcggaaatggatccggtagccgagttcccccagcctcccggtgctgcgcgctgggctgaggttatggctcgcttcgcggccaggctgggcgcgcagggccggcgggtggtgttggttacgtcaggcggcaccaaggtcccactggaagcgcggccggtgcgcttcctggacaacttcagcagcgggcggcgcggtgcaacctcggccgaggccttcctagccgccggctacggggtcctgttcttgtatcgcgctcgctctgccttcccctatgcccaccgcttcccaccccagacttggctgtccgctctgcggccttcgggcccagccctttcgggcttgctgagcctggaggccgaggagaatgcacttccgggttttgctgaggctctgaggagctaccaggaggctgcggctgcaggcaccttcctggcagtagagttcaccactttggcggactatttgcatctgttgcaggctgcggcccaggcactcaatccgctaggcccttctgcgatgttttacctggctgcggctgtgtcagatttctatgttcctgtctctgaaatgcctgaacacaagatccagtcatctgggggcccactgcagggaaaagttcagttagaagacatacttcaccatcttgaaaaagaagaaatcaatccccttgctactacagaagaacaactctgtttggtgcttattccagccagcacagtgaagacaggctgaggactgctaccacagatgtagaagagcttatagtgaagcacatgggtgaaacaaaagaagtgagaactaatagcatagaattttaaagacacctgtgattttgttcattgcccttcattaaattgacatattaaaaactaatgtttggctatcactgtatagtttgaaaagcacccacgt

SEQ ID NO: 93459 - DNA, 1006 bp, Homo sapiens
gtttagaggctgcagcttgagctacaatcaggaggaaacccctcctctggagggcagatggcggaaatggatccggtagccgagttcccccagcctcccggtgctgcgcgctgggctgaggcccttctgcgatgttttacctggctgcggctgtgtcagatttctatgttcctgtctctgaaatgcctgaacacaagatccagtcatctgggggcccactgcagataacaatgaagatggtgccaaaactgctttctcctttggttaaagattgggctcccaaagcatttataatttcctttaagttggagactgaccccgccattgtaattaatcgagctcggaaggctttggaaatttatcagcatcaagtggtggtggctaatatccttgagtcacgacagtcctttgtgtttattgtaaccaaagactcggaaaccaagttattgctatcagaggaagaaatagaaaaaggcgtagagatagaagagaagatagtggataatcttcagtctcgacacacagcttttataggtgacagaaactgaagtaaaaagcccttataggatcaaaaattgttcagggctcttagagatggtgaaaactacaaaaaaaaccatggctttcatatggacagataaaatgaaagaaagggaaaaggcagtggtgtgtaggcaaatatggtttggcatttgtcttttaatgacacctgatatgatgtcattttgattttgaaattgaacactagaactgttaatcacctttaaaaagaagagcttattgggaattatatattccttaaaatatacatgggggcctgaatgtcagccatctttatactatagaaaaaggattatggatgcatgaatggtcatgctttggagatcaaatattggttgaatgcctatgtatgtcaggccctgtgctgagccatgaggattaaaaagatgaataaacatatcttgtttaggaaatggatgtataaaaaaatcaagtgcaataaagt

SEQ ID NO: 93460 - DNA, 1479 bp, Homo sapiens
aagcactggatcaacgcagagtgcccattacgggcgtggggcggcggccgcgaaacgtgcgcaggcgccggccgctgcgctgcagatggcggaaatggatccggtagccgagttcccccagcctcccggtgctgcgcgctgggctgaggttatggctcgcttcgcggccaggctgggcgcgcagggccggcgggtggtgttggttacgtcaggcggcaccaaggtcccactggaagcgcggccggtgcgcttcctggacaacttcagcagcgggcggcgcggtgcaacctcggccgaggccttcctagccgccggctacggggtcctgttcttgtatcgcgctcgctctgccttcccctatgcccaccgcttcccaccccagacttggctgtccgctctgcggccttcgggcccagccctttcgggcttgctgagcctggaggccgaggagaatgcacttccgggttttgctgaggctctgaggagctaccaggaggctgcggctgcaggcaccttcctggcagtagagttcaccactttggcggactatttgcatctgttgcaggctgcggcccaggcactcaatccgctaggcccttctgcgatgttttacctggctgcggctgtgtcagatttctatgttcctgtctctgaaatgcctgaacacaagatccagtcatctgggggcccactgcagataacaatgaagatggtgccaaaactgctttctcctttggttaaagattgggctcccaaagcatttataatttcctttaagttggagactgaccccgccattgtaattaatcgagctcggaaggctttggaaatttatcagcatcaagtggtggtggctaatatccttgagtcacgacagtcctttgtgtttattgtaaccaaagactcggaaaccaagttattgctatcagaggaagaaatagaaaaaggcgtagagatagaagagaagatagtggataatcttcagtctcgacacacagcttttataggtgacagaaactgaagtaaaaagcccttataggatcaaaaattgttcagggctcttagagatggtgaaaactacaaaaaaaaccatggctttcatatggacagataaaatgaaagaaagggaaaaggcagtggtgtgtaggcaaatatggtttggcatttgtcttttaatgacacctgatatgatgtcattttgattttgaaattgaacactagaactgttaatcacctttaaaaagaagagcttattgggaattatatattccttaaaatatacatgggggcctgaatgtcagccatctttatactatagaaaaaggattatggatgcatgaatggtcatgctttggagatcaaatattggttgaatgcctatgtatgtcaggccctgtgctgagccatgaggattaaaaagatgaataaacatatcttgtttaggaaatggatgtataaaaaaatcaagtgcaataaagt

SEQ ID NO: 93461 - DNA, 1536 bp, Homo sapiens
aagcactggatcaacgcagagtgcccattacgggcgtggggcggcggccgcgaaacgtgcgcaggcgccggccgctgcgctgcagatggcggaaatggatccggtagccgagttcccccagcctcccggtgctgcgcgctgggctgaggttatggctcgcttcgcggccaggctgggcgcgcagggccggcgggtggtgttggttacgtcaggcggcaccaaggtcccactggaagcgcggccggtgcgcttcctggacaacttcagcagcgggcggcgcggtgcaacctcggccgaggccttcctagccgccggctacggggtcctgttcttgtatcgcgctcgctctgccttcccctatgcccaccgcttcccaccccagacttggctgtccgctctgcggccttcgggcccagccctttcgggcttgctgagcctggaggccgaggagaatgcacttccgggttttgctgaggctctgaggagctaccaggaggctgcggctgcaggcaccttcctggcagtagagttcaccactttggcggactatttgcatctgttgcaggctgcggcccaggcactcaatccgctaggcccttctgcgatgttttacctggctgcggctgtgtcagatttctatgttcctgtctctgaaatgcctgaacacaagatccagtcatctgggggcccactgcagataacaatgaagatggtgccaaaactgctttctcctttggttaaagattgggctcccaaagcatttataatttcctttaagttggagactgaccccgccattgtaattaatcgagctcggaaggctttggaaatttatcagcatcaagtggtggtggctaatatccttgagtcacgacagtcctttgtgtttattgtaaccaaagactcggaaaccaagttattgctatcagaggaagaaatagaaaaaggcgtagagatagaagagaagatagtggataatcttcagtctcgacacacagcttttataggtgacagaaactgaagtaaaaagcccttataggatcaaaaattgttcagggctcttagagatggtgaaaactacaaaaaaaaccatggctttcatatggacagataaaatgaaagaaagggaaaaggcagtggtgtgtaggcaaatatggtttggcatttgtcttttaatgacacctgatatgatgtcattttgattttgaaattgaacactagaactgttaatcacctttaaaaagaagagcttattgggaattatatattccttaaaatatacatgggggcctgaatgtcagccatctttatactatagaaaaaggattatggatgcatgaatggtcatgctttggagatcaaatattggttgaatgcctatgtatgtcaggccctgtgctgagccatgaggattaaaaagatgaataaacatatcttgtttaggaaatggatgtataaaaaaatcaagtgcaataaagtaagagatgcggccaaccctcttctttcccttcacactacctcactccagttgactct

SEQ ID NO: 93462 - DNA, 1733 bp, Homo sapiens
aagcactggatcaacgcagagtgcccattacgggcgtggggcggcggccgcgaaacgtgcgcaggcgccggccgctgcgctgcagatggcggaaatggatccggtagccgagttcccccagcctcccggtgctgcgcgctgggctgaggttatggctcgcttcgcggccaggctgggcgcgcagggccggcgggtggtgttggttacgtcaggcggcaccaaggtcccactggaagcgcggccggtgcgcttcctggacaacttcagcagcgggcggcgcggtgcaacctcggccgaggccttcctagccgccggctacggggtcctgttcttgtatcgcgctcgctctgccttcccctatgcccaccgcttcccaccccagacttggctgtccgctctgcggccttcgggcccagccctttcgggcttgctgagcctggaggccgaggagaatgcacttccgggttttgctgaggctctgaggagctaccaggaggctgcggctgcaggcaccttcctggcagtagagttcaccactttggcggactatttgcatctgttgcaggctgcggcccaggcactcaatccgctaggcccttctgcgatgttttacctggctgcggctgtgtcagatttctatgttcctgtctctgaaatgcctgaacacaagatccagtcatctgggggcccactgcaggtgatgggcgcttctcttccagagatctaatcccatataaccaatcttgggttaatttcctcttgatctggagatggcctttctgcatctgtattcgctaggcacaggggatacagagatgaataagacaccgccctccctcatggacctcacaatctagtgagggagctggacacagacataattacaatacagagtgataaatgctctagtggagataacaatgaagatggtgccaaaactgctttctcctttggttaaagattgggctcccaaagcatttataatttcctttaagttggagactgaccccgccattgtaattaatcgagctcggaaggctttggaaatttatcagcatcaagtggtggtggctaatatccttgagtcacgacagtcctttgtgtttattgtaaccaaagactcggaaaccaagttattgctatcagaggaagaaatagaaaaaggcgtagagatagaagagaagatagtggataatcttcagtctcgacacacagcttttataggtgacagaaactgaagtaaaaagcccttataggatcaaaaattgttcagggctcttagagatggtgaaaactacaaaaaaaaccatggctttcatatggacagataaaatgaaagaaagggaaaaggcagtggtgtgtaggcaaatatggtttggcatttgtcttttaatgacacctgatatgatgtcattttgattttgaaattgaacactagaactgttaatcacctttaaaaagaagagcttattgggaattatatattccttaaaatatacatgggggcctgaatgtcagccatctttatactatagaaaaaggattatggatgcatgaatggtcatgctttggagatcaaatattggttgaatgcctatgtatgtcaggccctgtgctgagccatgaggattaaaaagatgaataaacatatcttgtttaggaaatggatgtataaaaaaatcaagtgcaataaagtgtgtgtccaaaagctgacacaatggaaaaaaaaaaaa

SEQ ID NO: 93463 - DNA, 1083 bp, Homo sapiens
tggcccgagtttaggcatctgatagttccgggttttgctgaggctctgaggagctaccaggaggctgcggctgcaggcaccttcctggcagtagagttcaccactttggcggactatttgcatctgttgcaggctgcggcccaggcactcaatccgctaggcccttctgcgatgttttacctggctgcggctgtgtcagatttctatgttcctgtctctgaaatgcctgaacacaagatccagtcatctgggggcccactgcagataacaatgaagatggtgccaaaactgctttctcctttggttaaagattgggctcccaaagcatttataatttcctttaagttggagactgaccccgccattgtaattaatcgagctcggaaggctttggaaatttatcagcatcaagtggtggtggctaatatccttgagtcacgacagtcctttgtgtttattgtaaccaaagactcggaaaccaagttattgctatcagaggaagaaatagaaaaaggcgtagagatagaagagaagatagtggataatcttcagtctcgacacacagcttttataggtgacagaaactgaagtaaaaagcccttataggatcaaaaattgttcagggctcttagagatggtgaaaactacaaaaaaaaccatggctttcatatggacagataaaatgaaagaaagggaaaaggcagtggtgtgtaggcaaatatggtttggcatttgtcttttaatgacacctgatatgatgtcattttgattttgaaattgaacactagaactgttaatcacctttaaaaagaagagcttattgggaattatatattccttaaaatatacatgggggcctgaatgtcagccatctttatactatagaaaaaggattatggatgcatgaatggtcatgctttggagatcaaatattggttgaatgcctatgtatgtcaggccctgtgctgagccatgaggattaaaaagatgaataaacatatcttgtttaggaaatggatgtataaaaaaatcaagtgcaataaagtgtgtgtccaaaagctgacacaatggaaaaaaaaaaaa

SEQ ID NO: 93464 - DNA, 2751 bp, Homo sapiens
tgacgcccaggtctccgtcggcacctgcagctagcagctgagcgcgtaggggccgagcgaccccgggacgctcgcggcaccctccgcaggaaaatttccgacttggttcttgaggttcctgcctcagccccaaggaggaaagcacccattctcccctcttttccgcattccgggccttttctgcttctccccagtatggtccgaaactacaggaggggaacccctcctggcccggcctttctattccctggctggagtgattccgcctgaaggagaattcgcccgttttccccggacccagctgccacaagcatttagtattaggctgccgcttattattagagcgggcttagaacatcctcagcgaggtaggtcggcgttccttttctcacttaaaggtgaggtgtcgagacgcgcccctggacagacaacgcccgaaggtccaggccactacgaagtccacggaggggcagctttcccctacgtgtaggcccgcgaacaaagaactaccgttttctgattttttttggccgatgttcgtcatgcagaaccttgaatcccgatgaagatttggaggcctttgtatcctcaacatcagaggtcatgaagttggagtgctggagtgcagtagcatgatctccgttcactgcagcctcaacctcctgggctcaagtaatcctcctgtcttgtcctcccaaaatgctggaattacagtatcataatgaagacctggaaaaagacaaaacatcacaaaactgcctaggaagaggaatggaacaagtagcaaagaagttaggggtggctcatgaagagattcaaaggctcactgatgagctacaagtgaaggagaaggaacaatgtaaattagattctgcacttaagaaggctcaactagaaattgacaaattgaaggaaaatttggtaaagctgaaagaaaatgatgcagctgacctacagaaagcaaaggaacaaaatcagagactggatgaggaaattctggctttaagaaatagggttcgatcacttgactcagaaaaaaaggtgcttggtgaaatggttgaaagacttaaaggagaggtgtgtgaatctcaagagaataagcaacttggaaaccactcccctggaaaaactgtgggtggtgaacagagagaacagattgaggcttccatgttagagcctgaattatcagtaacataggaagatagaagagaaaccagtacaaaagatcaagagacaaagtacaagatttgaatgagatcctgaaaatgagccaagaaaaaaatgaaatgtttgaaagtgagtggtcaaaagagagagagagagagaagcagttggcatctggtcttgacactgcagagaaggccttgaaagttgaaagtgaggtattaccattcaggaagctgttttcttcttcttgtagttctaatttagggatttcatgttatcatttttaaataaagtataactatgtgtctcagcttgggctgccataaccaaacaccacagactaggtgtctcaaagaacagaattttattttctcacagttatggaggaggggaagtccaagatcaaggtgccagccaagtcagttcctggtgagggttctcttcctggcttgcagatggccaccttcttgctgtgtcctcacatgacagagtgagcaagctctggtgtctcttcctcttcctataaaggcactaaccctattggattaaggccccacccttatatcctcatttgacctttatcacctccttatcaaccctatctatctccaaatacagtccatattgggaattagggtttcaacaatatgaatagggagggagagcacaattcagtccatagcactgtagaatacgtgtttctataataataatggggtagctctgttgtttctccaagctgagttctagcactaagcaaagagtcctttatttagcagacgtttgattgttgtagtgttcatagagtcatgggcttatcgctcgttttaacttcttgtcctgccatcttggaaagatctatcaggagacataatcagcctatattatgaaaagagacctggaagtgagttcatggaagtctaaatcagtaatttagaggatagtgacactcaatcagtttgtagtttgcagtgcccctaatctcatcctaatgacctacaggaattttcagtgaaataagataggaaatcaattatcatttaccctcttcctgtggttttgggaggccaccctctaccttcttgcctttttgtctaagcctttctaatcagcatttacctcccactttgacttcaaggctttgggaaaataccaagtagctcctctcctgaagtaaattttatgtaacctattcccttcattgagcaccacagactgactctcaacccaaagtcttccaccagccaatcagtgcacatcctgtgtcatcaatgtaaaaatctgttaaaaatctgcatttaggttgggcacggtggctcacgcttgtaatcccagcactttgggaggccaaggtgggcggatcacctgaggtcaggagttcgagaccagcctgaccaacatggagaaaccccatctctcccgaaaatacaaaattagccaggcgtggtggtgcatgcctataatcccaggtacttgggaggctgaggcaggagaatcacttgaacccaggaggcagagattgcagtgagctgagatcatgccattgcactccagcctgggcaacaagagaagaaactccatctc

SEQ ID NO: 93465 - DNA, 867 bp, Homo sapiens
ggaagatattcctcgggagaactactcagctcagaccccagcgtcgctataacaatgaagatggtgccaaaactgctttctcctttggttaaagattgggctcccaaagcatttataatttcctttaagttggagactgaccccgccattgtaattaatcgagctcggaaggctttggaaatttatcagcatcaagtggtggtggctaatatccttgagtcacgacagtcctttgtgtttattgtaaccaaagactcggaaaccaagttattgctatcagaggaagaaatagaaaaaggcgtagagatagaagagaagatagtggataatcttcagtctcgacacacagcttttataggtgacagaaactgaagtaaaaagcccttataggatcaaaaattgttcagggctcttagagatggtgaaaactacaaaaaaaaccatggctttcatatggacagataaaatgaaagaaagggaaaaggcagtggtgtgtaggcaaatatggtttggcatttgtcttttaatgacacctgatatgatgtcattttgattttgaaattgaacactagaactgttaatcacctttaaaaagaagagcttattgggaattatatattccttaaaatatacatgggggcctgaatgtcagccatctttatactatagaaaaaggattatggatgcatgaatggtcatgctttggagatcaaatattggttgaatgcctatgtatgtcaggccctgtgctgagccatgaggattaaaaagatgaataaacatatcttgtttaggaaatggatgtataaaaaaatcaagtgcaataaagtgtgtgtccaaaagctgacacaatggaaaaaaaaaaaa

SEQ ID NO: 93466 - DNA, 572 bp, Homo sapiens
  misc_feature (7)..(8): n is a, c, g, or t
  misc_feature (11)..(11): n is a, c, g, or t
  misc_feature (345)..(345): n is a, c, g, or t
  misc_feature (410)..(410): n is a, c, g, or t
  misc_feature (553)..(553): n is a, c, g, or t
attcgtnnacnagtggcgaggcggcggtcaggtgggatgctatggaatatgatgagaagctggcccgtttccggcagcccacctcaaccccttcaacaagcagtctgggccgagacagcatgagcagggccctggggaggaggtcccggacgtcactcctgaagaggccctgctgagctgccccctgggagccggaattccgctgccctgaacgcgtgatggatctcggcctgtctgaggaccacttctcccgccctgtggtctgttcctggcctctgacgtccagcagctgcggcaggcgatcgaggagtgcaagcaggtgattctggagctgcccgagcagtncggagaagcagaaggatgccgtggtgcgactcatccacctccggctgaagctccaggagctgaangaccccaatgaggatgagccaaacatccgagtgctccttgagaccgcttttacaaggagaagagcaagagcgtcaagagacctgtgacaagtgtaacaccatcatctgggggctcattcagacctggtacacctgcacaggtnggccgagaccagacgagga

SEQ ID NO: 93467 - DNA, 273 bp, Homo sapiens
catctggtagaggggctatcatgatgatcaagcgcggtgtcgctagaagtactttgtaagctagaaatcatctaaaggagcttccatttcacttacatctcatttggtgaatgagaatgtaggagtgattgtcagtaataatagcatccaccattagttgaacagtcaattaaaataatcgaaagaaatcaattgaaaaaacaatcacttttgcaacagtattttgtgaaggaatatatagactattttgaatcacttcaaaagttactgtaa

SEQ ID NO: 93468 - DNA, 248 bp, Homo sapiens
caagacataacttacttgatattgaatcagcctaaaataagatggtccttgtggaccataaccatgtcacaggacagcactgccttgggtggcacagtgtagagtctggaaatgccatgattgtcacaggacagcactgccttgggtggcacagtgtagagtctggaaatgccatgattgccacagggaccttcctgttcagggtagcttttactatccatacactatgcctcctatccgcttactgt

SEQ ID NO: 93469 - DNA, 348 bp, Homo sapiens
ggtttcactgggtgcagatacctagcacacaaagcagtcctatttgcccatctatggctgagcagagtgagctcacagtcagtgaccccttcccaggccccacccccactagcacaggagttcccgctgtgtgcacccatggcgtggctctggggtggctctgggtggccctcatcacttggactgccttttcttcttttctcgtctgccctcccctaagctgtagctccatttctgtcttgcacgctgctgcagcttcagcacccaccgtggtacctggctcgctgtggtgttccgcacatgttgttaaatttaaattgttaaatgattggatgagcctgacgtgag

SEQ ID NO: 93470 - DNA, 742 bp, Homo sapiens
atatgtgtatatgcacatacatagaaatgtattgggtaaatacctatatatttgtgtaacatacatactatatatgtatatgtacatatacatataaacatagacatatacatacaaataaaatcactatgtctgcaccaggatagagaacttgaccacctaaattgttgttcaggtgttttgaccaatgatacatcactttacagaataattcggcaaactttaaatcatttttgtcaattttactttttatgaggagattcatttagcaatcaagatgatccaccctcagattctgagtgttgatgacatgtgacaattggaataaagcagtttggagtggggatagctaggttgccatcatgaatctgcatagttacaagaaaaaccagattaaagttatgatactggaagagttcccaggtctctgtagatttcagaaccatattgatgagtaacagagggtttaaatgatcaacttttctagcagtgccagttcttccactgtacaaatctctaaatatttgttctaagaatccacataaaaacacaaaagccatcttacatataacattaaatgttctttgggaggccgaggcgggcggatcacgaggtcaggagattgagaccatcctggctaacatggtgaaaccccgtctctactaaaaaatacaaaaaattagccgggcgtggtggtgggcgcctgtagtcccagctactcaggaggctgaggcaggagaat

SEQ ID NO: 93471 - DNA, 455 bp, Homo sapiens
atggaaaggctgcacccaggctctgaatatagaaaagacccggcttcaaggaaaggagaaaataaagggtgccaataggccacggcacatggaatcaccacgtacatctgcatgtcttaaggagaagggaagagggtacgggaacaaaatgggccaccagtgcctaagccaggtgctccatgaacttgatctaattaaatcctcacaacaatgaagctctgaagaaagagagagcagggtgaacccactagaggacaagtgaaagcatcggatagggccaaggggaatgcaaagtttttaccttcaaactgcaaaggcagtgctcctaagactaatatttttcaaacattttgactaactcagtacgaaataataggttgtacttcccccgctgccctactccaagacggagttttgctcttgttgcccaggtgggaatgcaatggcacaaactc

SEQ ID NO: 93472 - DNA, 553 bp, Homo sapiens
gttcttttcttctttttttctctttcagagtgagaattttttattaatctattgcatagtaattattcccttattagctatacatctttattttaaatatttagttgtggctttagggtttacaatatatatctttaacttatagtctatagtcaaataatattctacatttcatgtaaaatgtcagaactttactgtagtatatttcgattacccctttccatgctttgtgctattgttactatatattatagttctatatataaaatatactccacagtacactgctattatagttgttttagaatatctttttaaacagctttattgatatacaattcagtcatttaaagtgtacagttccatcatttttctatattcctgagctatgcaactattaccacagtaagatttttgggtccttgttttttggctttgggttttttggagaaccgaacccttcactactgttccttccaagtcttggatatgcggggggtcccaatctttgggtttttgttgaaacccttcccctttccgggtcccaaccccc

SEQ ID NO: 93473 - DNA, 548 bp, Homo sapiens
  misc_feature (522)..(522): n is a, c, g, or t
gttcttttcttctttttttctctttcagagtgagaattttttattaatctattgcatagtaattattcccttattagctatacatctttattttaaatatttagttgtggctttagggtttacaatatatatctttaacttatagtctatagtcaaataatattctacatttcatgtaaaatgtcagaactttactgtagtatatttcgattacccctttccatgctttgtgctattgttactatatattatagttctatatataaaatatactccacagtacactgctattatagttgttttagaatatctttttaaacagctttattgatatacaattcagtcatttaaagtgtacagttccatcatttttctatattcctgagctatgcaactattaccacagtaagatttttgtttttgtttttgtttttgtttttgagacggagcctcgctctgtcctccagctgagtgcgtgcgcgactcgtcgtgagcttcgctcggtcagcgtctctctagctncgatgtgatgagcctcacagccgctc

SEQ ID NO: 93474 - DNA, 526 bp, Homo sapiens
gttcttttcttctttttttctctttcagagtgagaattttttattaatctattgcatagtaattattcccttattagctatacatctttattttaaatatttagttgtggctttagggtttacaatatatatctttaacttatagtctatagtcaaataatattctacatttcatgtaaaatgtcagaactttactgtagtatatttcgattacccctttccatgctttgtgctattgttactatatattatagttctatatataaaatatactccacagtacactgctattatagttgttttagaatatctttttaaacagctttattgatatacaattcagtcatttaaagtgtacagttccatcatttttctatattcctgagctatgcaactattaccacagtaagatttttgtttttgtttttgtttttgtttttgagacggagcctcgctctgtcctccagtgagctgagattgtgccactacactgcagcctggccacagagcaagactgtctctcaaa

SEQ ID NO: 93475 - DNA, 769 bp, Homo sapiens
gagtgtgtagtctggaagggcagcaaaagtcgagtggagtgagaggttcctgtgtcctggagcactgagtagagactccctcatgggggtgaatcttaaaggataaaggggcctctataatgaaaaggaggaggatgggatttctggtagaggaaattgcttgagcaaaacctccaaggttggaatgactatggtgtgttcagggatgttaggagacccagatgggtggagcgttgagtgtgtgtgtgtaggaaggaagaggggaggtggctggatgagcacagtgagacctgatttgattgagagccttgaacgccacgctgaataatggaggcaatgggactccatagagggcttttgagtagacatatatcagtgtagaagggtgaatttcagatttttagacagaatagagtaaggagaggagctcttagaaatcatctagtccagggcttgtggcagagccctgaggttttaagaaggcatgtcaggggctaccatgacaggcacggagaggctgagtgaattggggttcttgccacaattcccttgcctgagattcaacaagagcagctgtattacaatctgtgcaaaatgtcattaggagaaactagttagtagctgggcgtggtggcatgcaactgttgtcccagctactcgggaggctgaggccggagaatcgcttgaacctgggaggcggaggttgcagtgagcagagactgtgccactgcactccagcctggatgacagagcaagactctgtttcaaa

SEQ ID NO: 93476 - DNA, 855 bp, Homo sapiens
gctagaggtgaggaagtccgatttgacttctgagttatttggtgtgcaggataaggagcaaaaagggtatgaagataactcaggttttgagattaagtttccggggcaaaggtagttcatatgttaataaattaggaaaaaagagaaaaaggtgttggagcaagaagaggaatatattcaatttgaagcactggcaaaacattaaaagatgtccaggaattccagtctggaaccccagttaggggctggaaataaaaacatgtacttggaagtaattagcatggaggtgccaagtaacattgagtgaatgaaagaagagcagatggtgaaggaccgaattttggaagtcacccaacaaatatttatcaaacaagtaacatatatcagggactcatcccagtgccaaaaatacagcagtgaacaaagtagatgaagtacccccttttacatgaggaatatggctggtatgaaagtgaggtgaaggagataatctgataagagagagtgagagaagacaggaagtagacattcttcataagaagaaatgggtacagaaaagacacagagggaaataggtaaggcttggagtcaagcagaacagagttaaattacattttcctcactttgtagaaactctgatagggatcaagttactgaacctcagttttctcatgtatataaggggaattatgattatttattgtgaggattgaataaataaaatatgttgagtgcctcactcattgtaaatagttcattcatattagtctttttttttaatggcttcttcccatcctcattgctgagaaacttgagagagaacaaatacctatacatctctaccatgataggcat

SEQ ID NO: 93477 - DNA, 1147 bp, Homo sapiens
gagtcctttaaacgctgtcaggagacaagattccacatgctccctccatcagctctcccgagccaagaaagagaagagcttgtttaagtttggaagactcccattggcatgtcattgaaggtaagcccccttttaaatatttactgttaatgattctggatcctatttgtattgaactgaagatcctctaaagcccctggtcttatttctccaatctctctccaggggtgttcttacatgtcgtggggtgcagaccctgccaacttccatgctgagactcaggaaagaggtttgggcttgaagcttgtatgtcccagagaaagaaaaccctaatgtggaggtgagtgtgttgatgggttagaagtccagatgcctcagccagcaccttccttcccttttcgtttttttattttttttatttttttaaccttttgtccctctgtatttctcagaaataaaatgctctttagatggatttggattgtgtctttttttacagtctactatgaggcagtcttttgttctgtagatcctggtgttctctgtttccgtgtgagaagatgaaaaggaatgaaattccccaatgcaccctcttcccctaatgtcctacaccatctcaatgtcctttggctttaattgtgatccttctaggccttggcgaagatggcactgggagtcctctctgattctggtttcttttatgaacttgcaaatagtctatcccaaggatggaacttcagtcctgtcctcaccttttcctggcaaaaatgcccataaggttagaaacaaggctattcccattctgcctgaggactgtcgtagcctcatcccagctttagcctttcttctctgttgctaaactgtgtgatttggcatagcaaggctttgtttataagaagaccttctggttatttatatagaaacttttcattttcatgacttcattttgttctgagagcatatccgaagattctgtccggtggcaggcccaatcagtggattcagcacaagggagttttccatcttccttgggaaagacggcaagcaagctcagttttagtttgggagagaattagtgtagaatctctaaagccatctctatggtaagtccatagatttccaggaataaaacacagtgaaacctatt

SEQ ID NO: 93478 - DNA, 993 bp, Homo sapiens
gtgctcaaaaacagagtctctctgtggaaggccagttccccaatcccagagagcgtcaaatgaagagaggtaccgactcctgtcccacccaggacgcagccttcagcctccagccttctgaggcagagtaggcatttctgcacgtctgcaaaaggaagggagggaagcactccatcatctcactgggaagaacggcacgggcatacctgcagctactggggttccactgggcttgagggtcgatttttcaccttttgaaggacaagatgcattggaagatgttgctgcttctgctgttgtattacaatgctgaggcttctatgtgccacaggtggagcagggctgtgctcttccctgccgcccaccggccaaagaggtcctcatcactgccattgaacccagtcctgcagacctccctggaggaggtggagctgctctacgagttcctgctggccgaacttgagatcagccctgacctgcagatctccatcaaggacgaggagctggcctccttgcggaaggcctcagacttccgcaccgtctgcaacaacgtcatccccaagagcatcccagacatccgccggctcagcgccagcctctccagccaccctggcatcctcaagaaagaagactttgaaaggacagtgctgaccctggcctacacagcctaccgcacagccctgtcccacggccatcagaaggacatctgggcgcagtccctcgttagcctcttccaggccctgaggcacgacttgatgcgctcctcacagccgggagtacctccctgagagactggcccacaccaggacctcagagcagggaccagcacagtaatccagaaagtcttcattctctactccatttacagagaccagcaacaaaactcttaccgctgacacagagcagcagagatcaaacagtaaccccgatgctcttttctccttgtagtttcctggaagacacatctgattcatgccatcatgtgacctgggc

SEQ ID NO: 93479 - DNA, 209 bp, Homo sapiens
acagaatgagccaccatctcagcaggtgccaggcgtgagccatgctagaggtgctgctgcatagccaggagcaggcccatgggctcaggcaccctagtcccaggctcgcttctcctgctatacctcgacttccactgcagaagacagtgcttgggcaatgccatcacctgccctcctagcccactgtcatctcggcaacatcgtggcag

SEQ ID NO: 93480 - DNA, 463 bp, Homo sapiens
ccaggttcaaacaattgtcctacctcagcatcccgagtagctgggactacgggcatgagccaccatgctcggctaatttttgtatttttagtagagacagggtttccccatgttggccaggctggtctcgaacttctggcctcaagagatccacccgcctcggcctcccaaaatgctgggattacaggcgtgagccaccgccaccggcctcgcatttctttataagaagtacaacaagaaaatgcactgacctaactgcaaaattaccctgggctgattttacaatctccagccttagccttgaaaacactgtgtaaagtgtgtggcttcgcctgcaaggctgatgggtgcctcgggtggtgaggtggcaaagacagaaaggcaagcttcttctgtagcatcagatcacttagggacaaccctgtttccgagttgctcaggttgaagcatgccacaattaaga

SEQ ID NO: 93481 - DNA, 369 bp, Homo sapiens
gccagactcgactcagagcccttcctcacgattcccacctgttcctatccctcccctggctcccaaactgtacatcacggcaccctggggcaccgcagcctagttcaaacttttaaacagaacgtagcagtaattaacacctgtcagacactgagcaaacgactagctcgagcgagttcagtctcaaccttagtttctgccacagtcccatctgtgtgacaccatcgctctgtagagctgggatttcagcagttgctatgaaaaatagcaaattccaggcaaaaatcaggggacagaaactgggggggagtgtccatctgattccaggtctggaagatgtgtgaggcccaaaaggtgtacccatatcat

SEQ ID NO: 93482 - DNA, 340 bp, Homo sapiens
ttttgtgttttttagtagagatgggatttcaccatgttggccagtctggtctcaaactcctgacctcaggtgatccacccacctcggccttccaaagttctgggattacaggcgtgagccaccgcatctggctgtatttcttttttttatcacattaataccaaagctgattagcttctttataccaagagggtccagtttgccatagaggaatatggactttctcttggtttgtgagaaatttggattatgtctcactgaacctcaaaaactagatcataaataagaaataatagtaacaataataattaaatgctttatgtaccttaacttatgtacc

SEQ ID NO: 93483 - DNA, 1031 bp, Homo sapiens
gtaacgaaagtaagataagcccgttcttagcgtggatcattgtcctgattacacgccttaagtgattttatctggtcgatgtctgttttatcaagtagaaccgagcccagctcccccagttttttcttttatatttgtaatttactctcgagtcgcacaccttatccggcatctttccttccttcactgcacagtgcaccttggagccccttgcgcatccaattgaggcacctcgtcgttttaatgtctggatagcattgcaatgtacactgcaagcatttgtggtgattcgtaattacaaacaacagcctttcctctggctggctgaagcagactagaaacctgtgggaggttgtggagcggctcccctcgttacaaatccggaaaaccattttcccatggtggtaaaagctccaggaccacaattgagcctgagctttaatttcagtaagcttatggcacaacttcatgatggcagggtctcaagactggtacgggcaatttacactaattaccccgaaggaatgtccatagtcccgagggccaaggaagcttgaaagaagggcggtagggccggcgggccagattgggctttcaccggcagccgagtgtagccccgccaggcctcggtgcgggaagtcctgggtcgaacccttgctgaacagtgtgatcttcatttgatccaccggaatgtccgacgctgctgtcggggttactatcactcttgtgctttttttcaaaaaatggggggataaccggggaccacatctcattcagcgttgcctatgaacagtaacccacacactgcctggcaacgcagcaagcccgcttaaaggggccaaggcccctgggacaggacaaggcactgaccgggacgccccgggacacgcaggcgaagcaccgaagtcgccccgcactagggagccatggacacgatgcgcaccccgcagaaaccaaagctgtgtccccaaggagccacccggggcagccaaatgacgacaaaccggggtctcaaacaagccatgtgcccc

SEQ ID NO: 93484 - DNA, 332 bp, Homo sapiens
accagcattttctctcccaggatcattgctgcagactctcagcttgtatgtttcgagtgtactcttggacccagcacaatctgctttccacgtgtaacaagaatcatcgacttgaaacatacataaaatgaagccttccaaatggcttcccaccacactcagggttaaagcataaccccttgccagctcctacaaggctctgtgtatgcaatctgcccccacctgcctctccagcctcgttccccatcaccctcctctggtctgcagccacatggtctctccttgcagctctactggccctcagggccttcccccattctgttccctctaca

SEQ ID NO: 93485 - DNA, 305 bp, Homo sapiens
tcccagttactcaggaggctgaggcaggagaattgcttgaacccgggaggtggaggttgcagtgagccgaggtcacaccattgcactccagcctgggcaacagaatgagactctgtctcaaaaaaaaaaaaaaaaaaaaaaaaaaaaaaaaaaaaaaaaagtaaaattcttcaaataggtgcatcccagttcctgggggcaaggcctcaaaataaacctagtgcatctccctggattgtcagtttatttgaaggtttgtggaaaaaaaaattatcagattgtcagtttatttgaaggtttgtgga

SEQ ID NO: 93486 - DNA, 110 bp, Homo sapiens
ctaccacgtaagacatcccttgctcttccaccaggattgtgagacctccccagccacgtggaactgtgaatccattcaacttctttcctttatacattactcagtctcag

SEQ ID NO: 93487 - DNA, 340 bp, Homo sapiens
cctctattcctcaagggttttgcatggatggggtgagaaagaaaaggagacatacacagataattccttacgtggcaaaaggtaacaggtgcagactccagatggaacagggtaccataaacaatggggcaggggagtctgggcagcatcccgtcctggaccctgctggaggtggggtagggaaaatcaggcagaggtgtaaacaaggggagggtgtgtggggcagggaaggggtcaagagaccaagctgggtggagctcggggaataaagggagaaatagggtagaggtggaggtggtgtgagggaggaaattgaggaagaggagcctcggataccgag

SEQ ID NO: 93488 - DNA, 248 bp, Homo sapiens
ctttgcatggattgatgaatttcaagagtgtgcatgaattaaggtttattatgaccaacccagttcggggcacctgaggtcccccgacagaagtgagtaatgggacgtgttgggggtgcagaggaggagaggctggtcaattttgtttgtgcaagagtcagaaaatgttatatagaggggccctggagtgtcaaaggtgagcatcggccaggaggaagtgggagtggcatggaaggcatgcctgcagc

SEQ ID NO: 93489 - DNA, 775 bp, Homo sapiens
taaccgcagcgcgcctacctgccgcacctagtaaccgcagcgcgcctacctgccgcacctagtaaccgcagcgcgcctacctgccgcacctagtaaccgcagcgcgcctacctgccgcacctagtaaccgcagcgcgcctacctgccgcacctagtaaccgcagcgcgcctacctgccgcacctagtaaccgcagcgcgcctacctgccgcacctagtaactgcagagcgcctacctgccgcacctagtaactgcagcgcgcctacctgccgcacctagtaactgcagcgcgcctacctgccgcacctagtaactgcagcgcgcctacctcctgcacctagtaactgcagagtgcctacctgccgcacctagtaactgcagagtacctacctgccgcacctagtaactgtagcgtacctacctgctgcacctagtaactgcagagtacctacctgctgcacctagtaactgcagtgcacctacctttaaaggcttttcaagaacatacagagcattttcaaaaactgaccatgtgctgggaaatcaaataagtctcaatttaaaaggattgtaatcataaaaatgtcctctgagtatatttcaattatgttcaaaattaattttaaaaaggtaattggaaaatcttatgtggttagaagtaacgaaatatacttttaaatatcccttggatcaaaaaaaataaatcacaatggtatttagaaaatatttttcactgaaggctaacaaaacactacatattaaaattataaaatgc

SEQ ID NO: 93490 - DNA, 890 bp, Homo sapiens
atacccagaaggaagtgatggctttagaaaaagtgagggtagttcccaagatagcctgcagcaggtggttccctttctgcgggagaaaagcaccatgcgtgggtgtctgcagcctggagggcatcgctcctctgagatgctggtcaccctccattggcagcaacagtggcatccctgctgtcactcggcagagtagcccctctcgctgagggtggtttttcctgcccgctctgtgctgcgcttgtggataagcagagaacgactcctatgagcagactgaggtcaggtggcccttcccagcgttagctcctggggacattcactactggacgcacttgaaaaagttgttgcaaagccccttgccctggtaggtgaagccctagtgaatgatggtctgttttatgattcccagttcacttgtccctttaaatggtcccttcctatgttagcactgcccccaggttctacctgttggggatgtttctcagtctcagtgtctggagtggagttcttagccatgaaaacactgtccctgacccaggccactcaacagccgacagtaagtccagctgaggctgccagaatggggcaggttttttggaaggtgtccccatcccttctgccccgagcatggtgagctgcaagtctctggaaggttcaccttagccagggcagcttcacacatggaggatgcagtgatattaaacagtcagcctgcagacatatcaagtaaacaaattatattttaaaagatatttttggccaggcacagtggctcatgcctgtagtcccagcactttggaaggccaaggcaggaggatcacctgagcccaggaagttgaggctgcagagagctgtgtttgcatcactgcactccagctgcttgacag

SEQ ID NO: 93491 - DNA, 340 bp, Homo sapiens
cccatcaacacagccttataattactggtttatgtagttgtcttttaaatcaggagacgcgagttacaaaaatacacgtatcctgtgtgttgtattacctgtgtagttacctttaatgggattttttatttcttggtgtggattggagttgctatatgatgtcctttcatttcagccatactaaatactctcctggatttcttgtggggcaggcctgataacagtcaacttgctctgtgtgtgtttaaaataaaaacatcggaatgttttaatttccccttcatttttgaaggataggttttttaatacatagaattcatagttgaacgtttttctttca

SEQ ID NO: 93492 - DNA, 354 bp, Homo sapiens
acacacatacaccacacacacaatcacagttctcaaacacatacacacaccacactcctgacacatgtacaggccccacagatcactcgcagatgcacgcactccacacacacgtctatttattgcgctggaaggaaacagatgctggaatggtgtagaaccggggcccggcaccttggctccccaatggcggctgcagagctggagccagcccctctaaggctgcagtggctgcgggtcccaggatgtgaacggaagtcatctaccctctccaggagaaagggcgagggaatgcaggacaggacaagggtgctctgggaggcccacgtgtgcggcaccacgccaggcctgccc

SEQ ID NO: 93493 - DNA, 281 bp, Homo sapiens
agggtaggggaggttgagagcttggacctctccccaccaccagatacccctgtttaggaccacaccctctagggtcaggggggccgatgtgactgatggaggcctgctgtccagagcaaaccagggtcaggcggccaggggagcatcggagggacgggcggccatggaagccctagggcagtgctgggagaagagggcaggttttcagcaggcagctcctcctccccttgttaaagccacagaaccaagtcagaggaccacagcccagcaaggcccattgg

SEQ ID NO: 93494 - DNA, 289 bp, Homo sapiens
tggtgggagatcagaacaccctaaagagagaatttaaggggagggggaggaggacctgagccagagtagaagcagaggatagggagatctgttcttggggacagcatttgcaagaaacaaggctgaggggtccactccaacctctccaccctgctgcaggtgctgcctatgatgaagatgagcagatggccatctcagctggggccacagtgcactggacctatagtttccaattccgcactcagcaggcatctttctgatgatccgatggcttctcagagccagggat

SEQ ID NO: 93495 - DNA, 323 bp, Homo sapiens
tggcgaattactggaagatggcggttctggccaaaaggaaggagctattttaatttttattaggcagaggcagaaatggaaatcagggcctgctcaagggcacatggatgtgttggcgggtgtgtgtgtgtcgtgggggggactgggtgatggggaaagtggaagcatggcgaagtggagagagaagaggatatgggagtgaacagataaaaaagaaacatttaaaggaatcattttgggggttaaaaaaataactctaggtttgaaggagtatacaatttcccgagacttcatgaagtcctgccaacttcttccctctagca

SEQ ID NO: 93496 - DNA, 380 bp, Homo sapiens
aaatgatcggcatgcctaagacctattacactctaacatcatttcacatccatttcctctttttcacctcatttctttgtgaagtacccaggacaagttttataacttccactgtgctagtgaggaaagctgaagaagttggaggttaagttaagaggcatgcctaaacttacagaaacttgtgtgtagctgggcctgtttttcatttctgcttccctctcactggattgtatcctttctttcaaccattttatatcaggatctcccaaaattgtctaaaaattaatgttattttagttctttcctcttgtggtttgagaagtaattctccggtggctcatatttcaactgtagagcatgaacatcagcttaaaacttga

SEQ ID NO: 93497 - DNA, 320 bp, Homo sapiens
ccaaattctaatgtgtgcttgaaaattcaaattttgctattgaccacaaatattggcaattattttccttaaaacaacaatctcactttattagttttcaggaatgtttttgtgaaatacccgaaactgaataaccagtttgtatgtcagtcattcttttaagtaaaactgatgttcagtaaatatgtggttagtttagcttgcaactgaaataattgcacagtatttttatttttctatagaaaaccatgtgcactatacaatggaagtgttttatgcatatatctcactgcatcacatagaatattataaagttatgg

SEQ ID NO: 93498 - DNA, 331 bp, Homo sapiens
ggaggatcacttgagcccaggagttcgaggttgcagtaagctatgatcatcactgcactccagcctgggcaacagggtgagattccacctctaaaatgaaaacgaaacaaaaacctcacagggctaaggaaagattaccataaaaacccccaatacctggcccatggcaaatgcccaagatcttgtggaatcaatgactatacctgcaaatacgtgaaagatgaatatgtgtgcatatatgtatcgtagatggaaaaaacagatgaaaaacaacatattcaggatgatcatagccttatggatattgtgcagagaaaaatggctgatgagg

SEQ ID NO: 93499 - DNA, 430 bp, Homo sapiens
ccaccacgcccagccgtatgattacccttaagagttaactaccacactcaaaagaggcaagtagtaaaaaattaatgagtacaagctctgtactaataaatccctttgcattcataaagcagctttgatgacaggtcttcaggatccctgttcttctgcacatcagtttgttaatgggaaaagccaggttgggaggcagggctgtgcaggtcccccgacttgggttctagtggtgggtagagccaagaggaatgtgtgacgagtggcactttcaagcgggaggtagaaagcccagactggcacaagtcaaccatgctcacagcatgagctgctgacttggccttctctattctaatgagctgttttagggctgcagtaatttgttgacttagaattgtactcctgacttaaaggcgcggggctgcgtgtc

SEQ ID NO: 93500 - DNA, 393 bp, Homo sapiens
catctgtcagctcatggctggctttcttttatctgtctctctattcacttcacttcttactatattatttggaagcaattcccaggcatgtcatcattccatctacatatacttcactacgtatctataaaagatgagactctttagaataccattataataactaaataaattaacagcaaatccttaatgtcatcacatattcactgtgttcagatttccatttgtctttgtttctttcatagtctcttatttgaatcaggatccaagttaggtacatacattgcgattgtgataggtctcttcaaatctctttaatctattggttctgtccctttctttcttttatatttccttgcaatttttgttgttgttgaagaaattgggttgtcc

SEQ ID NO: 93501 - DNA, 722 bp, Homo sapiens
gacagcagatcaagggcatgagagagtatgtgttggcaatttaagatctgacagccagagaagtcaccactgagaagatgatggtggagtaaagacctggggaggtgaggcatggaaccctgagaatgtctgagagaaaagtggtccaggctgaggaaggagcaagtgcaaggccctgaggtgggagcgtgctcctggcatacatgaagcacaaccaagaggtcagtgtggctggagttagtaatctagggggagagtggtagatgaagccagaacaataccaggggctagaacttgtagcccattgttaaatgttaaacccaggagcattaaaattttaaagaatttatttgagcagatggtgattcatgaatcaggcagcactagattgcacgtggttcagggctccaccaagagggtgtgagggaatattttttataaggtgtttgtggaagccaagacaaagaaattatttgattggttaaagtggaaagtcccagttagaagttagttagtggtttcttgttggttaagcttaagtttcattttactgcttacattgacttgggttttggtttgcttatgtaggaatccaaagtgctggaaccatctcagcctaatggcttcctgatagattattttaacactgtttactgtgactaagacaggaagctatttcaaggcagaagaaataatagaaatgctgttacccttctccttat

SEQ ID NO: 93502 - DNA, 278 bp, Homo sapiens
tccctcttcctcctctccaaaagccaactcagatattacttcttctgcaaggccttctctgactcagtgtgatattatgatatgtgtatatatacctccagattttcattcatggttcctggctcataactcccatagcctttattatttctaaggcaggctatggaaactaaaaatatactctaatctccccacaacttgctttcttggagctgaccataaataatttatctgacctaccttgtctgattatgggtcataaaacccctatttcagaa

SEQ ID NO: 93503 - DNA, 400 bp, Homo sapiens
aaaggaactagaggagaaacctatgaattaaaaaagactttagatatctggaccaatcacgacatgtggattttatttaaatcctgtttctttaaaaataaaaacaaaaacaaacaaaaaaacactgacatacttaaaatcggaaatttgaatattgtctgatgatattaagaaaacagacacattatttttggtgtgataacggcattgtgattgttaccaaaaaaaggaggagtccttttcatttagagatatttactgatataaaataaatgttatttatctggggccaggcatgatggctcacaattgtaatcccagcactttgggaggctgaggcaggaggattgtgtgagctcagcaattcaagcctacaaaatgacaagacattatctctgcc

SEQ ID NO: 93504 - DNA, 225 bp, Homo sapiens
tcttttctgatttactttaaatgtgaaagaaaattctaagatgttaatattattattactgccattgatatatcccttataggaattaattaatagaaatagaatcaaagtaaatttagttatataatgcttagcatgtattatattctcaaaattctgtattcagtttcagacatgttcaaggctgaatatatgatctgacaataatctgcttatatagataaa

SEQ ID NO: 93505 - DNA, 369 bp, Homo sapiens
gagtcatgggtggtgagtcagagaggatgcttgaccattctgtgtacatgtgttggattcatgtcccctccctactttcagctccccctctctgccttgtgttataccagttattccctatttctgagctcacattcttgggtcttctgcgtcatagctcctctcaccaccagctcttcctgaactttcataaatatatggagctctcttgcctgatgataatccctctcctgatctcttttttcttatagatttattcctcttaattcctttgctttattttagtgggttcttggtagggagcagagagaaacagatgtgccacctttaactggatgcctgttggatggttttcagcaaggaagtttt

SEQ ID NO: 93506 - DNA, 440 bp, Homo sapiens
tctcgaactcctggcttcaaacgattctcctgcctcagcctcccaaagtgttgggattacaggcatgagccactgcgcctggcctcattttacgttttgatagctaaagctaaattgctttcttaaagaatgcagtttaggcttccagtgacagcaaatgagaatgtttccccacccaaagtggggaaattctgttcacaaaaatttccttgccaaaagtggtaaaaatttaaataattgataattatccaaactatttggtgaaaatcatatttcatggttttaatttgcattttctggtacatttagttgtaatgataccactgtcaggttttagtttccccacacatttacttttggtcgttctagaggcagtatctattgctgctaattgaggatactgaccactcttcaccataaataaaccatcacacttaatt

SEQ ID NO: 93507 - DNA, 1024 bp, Homo sapiens
  misc_feature (979)..(979): n is a, c, g, or t
actttgcacaaggttgccatgtttaataattcattcacagaatcctcaatctcacaaaagcctggaatggatttcctgtttggttatggcagggaagctactgtggccaggctccaactcctcccactgtagatagcagcagccttcttaagcagcctgtggccgggcacagtagctcacacctgtaatcccagcactttggaaggccgaggtaggcggatcacctgagctcaggagtttgagaccagcctgtctctactaacaatataaaaattagctgggagtcacggtgggcgcctgtaatcccagctactcgggaggctgaggcaggagaattgcttgaacccaggagacagaggttgtagtgagctgagatcgcaccactgcactctagccttggcaacagtgcaagactgtctcaaaaacagcaacagagagcaggacgtgagacttctacctgctcactcagaatcatttctgcaccaaccatggccacgtttgtggagctcagtaccaaagccaagatgcccattgtgggcctgggcacttggaagtctcctcttggcaaagtgaaagaagcagtgaaggtggccattgatgcaggatatcggcacattgactgtgcctatgtctatcagaatgaacatgaagtgggggaagccatccaagagaagatccaagagaaggctgtgaagcgggaggacctgttcatcgtcagcaagttgtggcccactttctttgagagaccccttgtgaggaaagcctttgagaagaccctcaaggacctgaagctgagctatctggacgtctatcttattcactggccacagggattcaagtctggggatgaccttttccccaaagatgataaaggtaatgccatcggtggaaaagcaacgttcttggatgcctgggaggccatggaggagctggtggatgaggggctggtgaaagcccttggggtctccaatttgcttcnattggaagttgtaaaaatggtggaaataacgggcacccggggggc

SEQ ID NO: 93508 - DNA, 862 bp, Homo sapiens
tatgctgtgacacgtctagagctctactgcatgtatgcattcatgaaccatagttatatcagcagcgagctagtgataccaagatgcccattgtgggcctgggcacttggaagtctcctcttggcaaagtgaaagaagcagtgaaggtggccattgatgcaggatatcggcacattgactgtgcctatgtctatcagaatgaacatgaagtgggggaagccatccaagagaagatccaagagaaggctgtgaagcgggaggacctgttcatcgtcagcaagttgtggcccactttctttgagagaccccttgtgaggaaagcctttgagaagaccctcaaggacctgaagctgagctatctggacgtctatcttattcactggccacagggattcaagtctggggatgaccttttccccaaagatgataaaggtaatgccatcggtggaaaagcaacgttcttggatgcctgggaggccatggaggagctggtggatgaggggctggtgaaagcccttggggtctccaatttcagccacttccagatcgagaagctcttgaacaaacctggactgaaatataaaccagtgactaaccaggttgagtgtcacccatacctcacacaggagaaactgatccagtactgccactccaagggcatcaccgttacggcctacagccccctgggctctccggatagaccttgggcaagccagaagacttttcctgctggaggatccccgattaagagatgctgcaagccaaaaacgcggccaggttgatcgttcctatccgaggacagtgttgtcttccccgctgttaccgccgctgtgggcacatccgcctcgctcctggggggggg

SEQ ID NO: 93509 - DNA, 1708 bp, Homo sapiens
actttgcacaaggttgccatgtttaataattcattcacagaatcctcaatctcacaaaagcctggaatggatttcctgtttggttatggcagggaagctactgtggccaggctccaactcctcccactgtagatagcagcagccttcttaagcagcctgtggccgggcacagtagctcacacctgtaatcccagcactttggaaggccgaggtaggcggatcacctgagctcaggagtttgagaccagcctgtctctactaacaatataaaaattagctgggagtcacggtgggcgcctgtaatcccagctactcgggaggctgaggcaggagaattgcttgaacccaggagacagaggttgtagtgagctgagatcgcaccactgcactctagccttggcaacagtgcaagactgtctcaaaaacagcaacagagagcaggacgtgagacttctacctgctcactcagaatcatttctgcaccaaccatggccacgtttgtggagctcagtaccaaagccaagatgcccattgtgggcctgggcacttggaagtctcctcttggcaaagtgaaagaagcagtgaaggtggccattgatgcaggatatcggcacattgactgtgcctatgtctatcagaatgaacatgaagtgggggaagccatccaagagaagatccaagagaaggctgtgaagcgggaggacctgttcatcgtcagcaagttgtggcccactttctttgagagaccccttgtgaggaaagcctttgagaagaccctcaaggacctgaagctgagctatctggacgtctatcttattcactggccacagggattcaagtctggggatgaccttttccccaaagatgataaaggtaatgccatcggtggaaaagcaacgttcttggatgcctgggaggccatggaggagctggtggatgaggggctggtgaaagcccttggggtctccaatttcagccacttccagatcgagaagctcttgaacaaacctggactgaaatataaaccagtgactaaccaggttgagtgtcacccatacctcacacaggagaaactgatccagtactgccactccaagggcatcaccgttacggcctacagccccctgggctctccggatagaccttgggccaagccagaagacccttccctgctggaggatcccaagattaaggagattgctgcaaagcactccccaagtctgtgacaccagcacgcattgttgagaacattcaggtctttgactttaaattgagtgatgaggagatggcaaccatactcagcttcaacagaaactggagggcctgtaacgtgttgcaatcctctcatttggaagactatcccttcgatgcagaatattgaggttgaatctcctggtgagattatacaggagattctctttcttcgctgaagtgtgactacctccactcatgtcccattttagccaagcttatttaagatcacagtgaacttagtcctgttatagacgagaatcgaggtgctgttttagacatttatttctgtatgttcaactaggatcagaatatcacagaaaagcatggcttgaataaggaaatgacaattttttccacttatctgatcagaacaaatgtttattaagcatcagaaactctgccaacactgaggatgtaaagatcaataaaaaaaataataatcataaaaaaaaag

SEQ ID NO: 93510 - DNA, 1824 bp, Homo sapiens
actttgcacaaggttgccatgtttaataattcattcacagaatcctcaatctcacaaaagcctggaatggatttcctgtttggttatggcagggaagctactgtggccaggctccaactcctcccactgtagatagcagcagccttcttaagcagcctgtggccgggcacagtagctcacacctgtaatcccagcactttggaaggccgaggtaggcggatcacctgagctcaggagtttgagaccagcctgtctctactaacaatataaaaattagctgggagtcacggtgggcgcctgtaatcccagctactcgggaggctgaggcaggagaattgcttgaacccaggagacagaggttgtagtgagctgagatcgcaccactgcactctagccttggcaacagtgcaagactgtctcaaaaacagcaacagagagcaggacgtgagacttctacctgctcactcagaatcatttctgcaccaaccatggccacgtttgtggagctcagtaccaaagccaagatgcccattgtgggcctgggcacttggaagtctcctcttggcaaagtgaaagaagcagtgaaggtggccattgatgcaggatatcggcacattgactgtgcctatgtctatcagaatgaacatgaagtgggggaagccatccaagagaagatccaagagaaggctgtgaagcgggaggacctgttcatcgtcagcaagttgtggcccactttctttgagagaccccttgtgaggaaagcctttgagaagaccctcaaggacctgaagctgagctatctggacgtctatcttattcactggccacagggattcaagtctggggatgaccttttccccaaagatgataaaggtaatgccatcggtggaaaagcaacgttcttggatgcctgggaggccatggaggagctggtggatgaggggctggtgaaagcccttggggtctccaatttcagccacttccagatcgagaagctcttgaacaaacctggactgaaatataaaccagtgactaaccaggttgagtgtcacccatacctcacacaggagaaactgatccagtactgccactccaagggcatcaccgttacggcctacagccccctgggctctccggatagaccttgggccaagccagaagacccttccctgctggaggatcccaagattaaggagattgctgcaaagcacaaaaaaaccgcagcccaggttctgatccgtttccatatccagaggaatgtgattgtcatccccaagtctgtgacaccagcacgcattgttgagaacattcaggtctttgactttaaattgagtgatgaggagatggcaaccatactcagcttcaacagaaactggagggcctgtaacgtgttgcagtaagtggcatggagttaactagaagcattgccaggagtttttctaaactaatagaggatcctctcatttggaagactatcccttcgatgcagaatattgaggttgaatctcctggtgagattatacaggagattctctttcttcgctgaagtgtgactacctccactcatgtcccattttagccaagcttatttaagatcacagtgaacttagtcctgttatagacgagaatcgaggtgctgttttagacatttatttctgtatgttcaactaggatcagaatatcacagaaaagcatggcttgaataaggaaatgacaattttttccacttatctgatcagaacaaatgtttattaagcatcagaaactctgccaacactgaggatgtaaagatcaataaaaaaaataataatcataaaaaaaaag

SEQ ID NO: 93511 - DNA, 441 bp, Homo sapiens
tccatggtgataatgaacttctggaatgtactagcagcaaatcttaaagtcaagccagtcgtttctaaaatattagtatgctacagtagatacagagattttaattaaactcacattcctaaagtatgtactccagaacttgaaaaagtggtatgcagatgtggtatttagcaagagtcaggatcctgaaaccttgttgaacagaaccaagtgtcctgatgcagattccagtaaacttttcattctgtgttcacagtctggggatgaccttttccccaaagatgataaaggtaatgccatcggtggaaaagcaacgttcttggatgcctgggaggtaggttcccagcttcctctaagtgtgctgggagagaaatcttcagttatccatgagattcgcatggatatgaatgaggccatgtgcctgatgctttctaatttcat

SEQ ID NO: 93512 - DNA, 1766 bp, Homo sapiens
actttgcacaaggttgccatgtttaataattcattcacagaatcctcaatctcacaaaagcctggaatggatttcctgtttggttatggcagggaagctactgtggccaggctccaactcctcccactgtagatagcagcagccttcttaagcagcctgtggccgggcacagtagctcacacctgtaatcccagcactttggaaggccgaggtaggcggatcacctgagctcaggagtttgagaccagcctgtctctactaacaatataaaaattagctgggagtcacggtgggcgcctgtaatcccagctactcgggaggctgaggcaggagaattgcttgaacccaggagacagaggttgtagtgagctgagatcgcaccactgcactctagccttggcaacagtgcaagactgtctcaaaaacagcaacagagagcaggacgtgagacttctacctgctcactcagaatcatttctgcaccaaccatggccacgtttgtggagctcagtaccaaagccaagatgcccattgtgggcctgggcacttggaagtctcctcttggcaaagtgaaagaagcagtgaaggtggccattgatgcaggatatcggcacattgactgtgcctatgtctatcagaatgaacatgaagtgggggaagccatccaagagaagatccaagagaaggctgtgaagcgggaggacctgttcatcgtcagcaagttgtggcccactttctttgagagaccccttgtgaggaaagcctttgagaagaccctcaaggacctgaagctgagctatctggacgtctatcttattcactggccacagggattcaagtctggggatgaccttttccccaaagatgataaaggtaatgccatcggtggaaaagcaacgttcttggatgcctgggaggccatggaggagctggtggatgaggggctggtgaaagcccttggggtctccaatttcagccacttccagatcgagaagctcttgaacaaacctggactgaaatataaaccagtgactaaccaggttgagtgtcacccatacctcacacaggagaaactgatccagtactgccactccaagggcatcaccgttacggcctacagccccctgggctctccggatagaccttgggccaagccagaagacccttccctgctggaggatcccaagattaaggagattgctgcaaagcacaaaaaaaccgcagcccaggttctgatccgtttccatatccagaggaatgtgattgtcatccccaagtctgtgacaccagcacgcattgttgagaacattcaggtctttgactttaaattgagtgatgaggagatggcaaccatactcagcttcaacagaaactggagggcctgtaacgtgttgcaatcctctcatttggaagactatcccttcgatgcagaatattgaggttgaatctcctggtgagattatacaggagattctctttcttcgctgaagtgtgactacctccactcatgtcccattttagccaagcttatttaagatcacagtgaacttagtcctgttatagacgagaatcgaggtgctgttttagacatttatttctgtatgttcaactaggatcagaatatcacagaaaagcatggcttgaataaggaaatgacaattttttccacttatctgatcagaacaaatgtttattaagcatcagaaactctgccaacactgaggatgtaaagatcaataaaaaaaataataatcataaaaaaaaag

SEQ ID NO: 93513 - DNA, 1621 bp, Homo sapiens
agtgtgatagctcaaacctgcaatcccagcattctgggaggctgaggagggtggatcagctgaggtcaggagattgagacccatcctggctaacacagtgaaacctgtctctactaacaatataaaaattagctgggagtcacggtgggcgcctgtaatcccagctactcgggaggctgaggcaggagaattgcttgaacccaggagacagaggttgtagtgagctgagatcgcaccactgcactctagccttggcaacagtgcaagactgtctcaaaaacagcaacagagagcaggacgtgagacttctacctgctcactcagaatcatttctgcaccaaccatggccacgtttgtggagctcagtaccaaagccaagatgcccattgtgggcctgggcacttggaagtctcctcttggcaaagtgaaagaagcagtgaaggtggccattgatgcaggatatcggcacattgactgtgcctatgtctatcagaatgaacatgaagtgggggaagccatccaagagaagatccaagagaaggctgtgaagcgggaggacctgttcatcgtcagcaagttgtggcccactttctttgagagaccccttgtgaggaaagcctttgagaagaccctcaaggacctgaagctgagctatctggacgtctatcttattcactggccacagggattcaagtctggggatgaccttttccccaaagatgataaaggtaatgccatcggtggaaaagcaacgttcttggatgcctgggaggccatggaggagctggtggatgaggggctggtgaaagcccttggggtctccaatttcagccacttccagatcgagaagctcttgaacaaacctggactgaaatataaaccagtgactaaccaggttgagtgtcacccatacctcacacaggagaaactgatccagtactgccactccaagggcatcaccgttacggcctacagccccctgggctctccggatagaccttgggccaagccagaagacccttccctgctggaggatcccaagattaaggagattgctgcaaagcacaaaaaaaccgcagcccaggttctgatccgtttccatatccagaggaatgtgattgtcatccccaagtctgtgacaccagcacgcattgttgagaacattcaggtctttgactttaaattgagtgatgaggagatggcaaccatactcagcttcaacagaaactggagggcctgtaacgtgttgcaatcctctcatttggaagactatcccttcgatgcagaatattgaggttgaatctcctggtgagattatacaggagattctctttcttcgctgaagtgtgactacctccactcatgtcccattttagccaagcttatttaagatcacagtgaacttagtcctgttatagacgagaatcgaggtgctgttttagacatttatttctgtatgttcaactaggatcagaatatcacagaaaagcatggcttgaataaggaaatgacaattttttccacttatctgatcagaacaaatgtttattaagcatcagaaactctgccaacactgaggatgtaaagatcaataaaaaaaataataatcataaaaaaaaag

SEQ ID NO: 93514 - DNA, 1325 bp, Homo sapiens
tatgctgtgacacgtctagagctctactgcatgtatgcattcatgaaccatagttatatcagcagcgagctagtgataccaagatgcccattgtgggcctgggcacttggaagtctcctcttggcaaagtgaaagaagcagtgaaggtggccattgatgcaggatatcggcacattgactgtgcctatgtctatcagaatgaacatgaagtgggggaagccatccaagagaagatccaagagaaggctgtgaagcgggaggacctgttcatcgtcagcaagttgtggcccactttctttgagagaccccttgtgaggaaagcctttgagaagaccctcaaggacctgaagctgagctatctggacgtctatcttattcactggccacagggattcaagtctggggatgaccttttccccaaagatgataaaggtaatgccatcggtggaaaagcaacgttcttggatgcctgggaggccatggaggagctggtggatgaggggctggtgaaagcccttggggtctccaatttcagccacttccagatcgagaagctcttgaacaaacctggactgaaatataaaccagtgactaaccaggttgagtgtcacccatacctcacacaggagaaactgatccagtactgccactccaagggcatcaccgttacggcctacagccccctgggctctccggatagaccttgggccaagccagaagacccttccctgctggaggatcccaagattaaggagattgctgcaaagcacaaaaaaaccgcagcccaggttctgatccgtttccatatccagaggaatgtgattgtcatccccaagtctgtgacaccagcacgcattgttgagaacattcaggtctttgactttaaattgagtgatgaggagatggcaaccatactcagcttcaacagaaactggagggcctgtaacgtgttgcaatcctctcatttggaagactatcccttcgatgcagaatattgaggttgaatctcctggtgagattatacaggagattctctttcttcgctgaagtgtgactacctccactcatgtcccattttagccaagcttatttaagatcacagtgaacttagtcctgttatagacgagaatcgaggtgctgttttagacatttatttctgtatgttcaactaggatcagaatatcacagaaaagcatggcttgaataaggaaatgacaattttttccacttatctgatcagaacaaatgtttattaagcatcagaaactctgccaacactgaggatgtaaagatcaataaaaaaaataataatcataaaaaaaaag

SEQ ID NO: 93515 - DNA, 1921 bp, Homo sapiens
gaatctgctatgtttcttgaccagtgcacataatgttttatgatttggatgtcagaggcttcattcttttggacatcatttgctttttatgttctgaaaaggatatggagagtagagctaaccatacttcacactcgagttgtatgagggactggggaggccttatatgtgtcaggcaggcattttttaaattttaatatcgtcaatattttcccccaaactgcccagtagaattcattgtattaattcttttgaaattacctttgaaaatagctattcctggagaatgtgcaagcttacataaggataaaggacaggggaggagtttgtaagccttgcagttccaataactaaccaacaggttattagacaaaagggaaggtgttttgtgcttctcagatgttgctggtttaggagtgtgtgatgatgcttgccagtgattttgtgttttggaaagggtaggtatcgaatgttaatcactttctaatgggtacctaaacagcaatgctgataaatgttcaaggaattattttcatcttagtttgttcttctcaaaaggcatcaaaaacaacttatttgaagctgcaatagagtgtagcattagcctgcatgtttctaggtcttctgccaagtgcttttctcagttgaaaactatttttcactagcaaaattggtattttatttcattacctgttagtaactacttcaatgatcatttcacaagaaaaagactataaattaagtagagaacaacatttttattgaacatttttggcttgcaatcaaactttgccactaaaaattaacttcataaaacactagtccgttatcaacttcttcacagagaaagtagctatactataccctacatatttatttatttattattctactatagcagaataacaaaacttgatgcattaagccagttctttgcaactgaaaattacctgtttctccttccctttcacactccatgtatatatgatcagcctctccattaaaaagaagctggacatgcaaatacatcatattatgttttctccatattttatgtttttctatgtatctgaatacagtgggataaataattgaaagtagtgttcctatggcattagtgtttttgtgagaagggtaaatgtagtgagaaaggttttttcatggcattaataagaaagcccttctgtaatatatatattattttgtaaacatttcactgaagggccaaaagttaaattataactaaatcactgtgttttcagaatgatatttaacaacaaacccgtggtcaaaccaaaatagtgggttgaagtgtattattcatcttttagtgcattggcaattgcaaaaaaaaaaaaggaatttaatataaggctatagagattaattcagtgtctaacatttgtatttatttaaatagttattgacctatgatgactttctagtcttaacattttatctttttattgttgttgttcttcctttcaaagatgtggttcttaataggttcactgaatgcacagttgaggcacttcttgtgacaccagttcccaagtagcgttaataattgggcctgtgtcataaaatgcacggatcattaataactaaatgtccctgacacttttcactacagggctggacttagtaactgaccaacttcggggggagggttggggcaagggggggtgggcgttagaacatgatcaaaaaatgtctccgctcagggatttatggtggattattgcagacagtgctaaaaatatagagcacaagacaagtttactaaattaaaattttattttttgagaaactgttatttgtataaattatcaagatttgtaggctttccttttgtagaaataattgttttatgtgccagagaatttcaattttgttttcaacaataaagcattgataagaa

SEQ ID NO: 93516 - DNA, 323 bp, Homo sapiens
ccaatctccgcaaactgtggaacatcatggaaaaacaaggcttaaagacttctaagacctgacacaggagggttggggcaagggggggtgggcgttagaacatgatcaaaaaatgtctccgctcagggatttatggtggattattgcagacagtgctaaaaatatagagcacaagacaagtttactaaattaaaattttattttttgagaaactgttatttgtataaattatcaagatttgtaggctttccttttgtagaaataattgttttatgtgccagagaatttcaattttgttttcaacaataaagcattgataagaa

SEQ ID NO: 93517 - DNA, 5084 bp, Homo sapiens
gatcccatcgcagctaccgcgatgagaggcgctcgcggcgcctgggattttctctgcgttctgctcctactgcttcgcgtccagacaggctcttctcaaccatctgtgagtccaggggaaccgtctccaccatccatccatccaggaaaatcagacttaatagtccgcgtgggcgacgagattaggctgttatgcactgatccgggctttgtcaaatggacttttgagatcctggatgaaacgaatgagaataagcagaatgaatggatcacggaaaaggcagaagccaccaacaccggcaaatacacgtgcaccaacaaacacggcttaagcaattccatttatgtgtttgttagagatcctgccaagcttttccttgttgaccgctccttgtatgggaaagaagacaacgacacgctggtccgctgtcctctcacagacccagaagtgaccaattattccctcaaggggtgccaggggaagcctcttcccaaggacttgaggtttattcctgaccccaaggcgggcatcatgatcaaaagtgtgaaacgcgcctaccatcggctctgtctgcattgttctgtggaccaggagggcaagtcagtgctgtcggaaaaattcatcctgaaagtgaggccagccttcaaagctgtgcctgttgtgtctgtgtccaaagcaagctatcttcttagggaaggggaagaattcacagtgacgtgcacaataaaagatgtgtctagttctgtgtactcaacgtggaaaagagaaaacagtcagactaaactacaggagaaatataatagctggcatcacggtgacttcaattatgaacgtcaggcaacgttgactatcagttcagcgagagttaatgattctggagtgttcatgtgttatgccaataatacttttggatcagcaaatgtcacaacaaccttggaagtagtagataaaggattcattaatatcttccccatgataaacactacagtatttgtaaacgatggagaaaatgtagatttgattgttgaatatgaagcattccccaaacctgaacaccagcagtggatctatatgaacagaaccttcactgataaatgggaagattatcccaagtctgagaatgaaagtaatatcagatacgtaagtgaacttcatctaacgagattaaaaggcaccgaaggaggcacttacacattcctagtgtccaattctgacgtcaatgctgccatagcatttaatgtttatgtgaatacaaaaccagaaatcctgacttacgacaggctcgtgaatggcatgctccaatgtgtggcagcaggattcccagagcccacaatagattggtatttttgtccaggaactgagcagagatgctctgcttctgtactgccagtggatgtgcagacactaaactcatctgggccaccgtttggaaagctagtggttcagagttctatagattctagtgcattcaagcacaatggcacggttgaatgtaaggcttacaacgatgtgggcaagacttctgcctattttaactttgcatttaaaggtaacaacaaagagcaaatccatccccacaccctgttcactcctttgctgattggtttcgtaatcgtagctggcatgatgtgcattattgtgatgattctgacctacaaatatttacagaaacccatgtatgaagtacagtggaaggttgttgaggagataaatggaaacaattatgtttacatagacccaacacaacttccttatgatcacaaatgggagtttcccagaaacaggctgagttttgggaaaaccctgggtgctggagctttcgggaaggttgttgaggcaactgcttatggcttaattaagtcagatgcggccatgactgtcgctgtaaagatgctcaagccgagtgcccatttgacagaacgggaagccctcatgtctgaactcaaagtcctgagttaccttggtaatcacatgaatattgtgaatctacttggagcctgcaccattggagggcccaccctggtcattacagaatattgttgctatggtgatcttttgaattttttgagaagaaaacgtgattcatttatttgttcaaagcaggaagatcatgcagaagctgcactttataagaatcttctgcattcaaaggagtcttcctgcagcgatagtactaatgagtacatggacatgaaacctggagtttcttatgttgtcccaaccaaggccgacaaaaggagatctgtgagaataggctcatacatagaaagagatgtgactcccgccatcatggaggatgacgagttggccctagacttagaagacttgctgagcttttcttaccaggtggcaaagggcatggctttcctcgcctccaagaattgtattcacagagacttggcagccagaaatatcctccttactcatggtcggatcacaaagatttgtgattttggtctagccagagacatcaagaatgattctaattatgtggttaaaggaaacgctcgactacctgtgaagtggatggcacctgaaagcattttcaactgtgtatacacgtttgaaagtgacgtctggtcctatgggatttttctttgggagctgttctctttaggaagcagcccctatcctggaatgccggtcgattctaagttctacaagatgatcaaggaaggcttccggatgctcagccctgaacacgcacctgctgaaatgtatgacataatgaagacttgctgggatgcagatcccctaaaaagaccaacattcaagcaaattgttcagctaattgagaagcagatttcagagagcaccaatcatatttactccaacttagcaaactgcagccccaaccgacagaagcccgtggtagaccattctgtgcggatcaattctgtcggcagcaccgcttcctcctcccagcctctgcttgtgcacgacgatgtctgagcagaatcagtgtttgggtcacccctccaggaatgatctcttcttttggcttccatgatggttattttcttttctttcaacttgcatccaactccaggatagtgggcaccccactgcaatcctgtctttctgagcacactttagtggccgatgatttttgtcatcagccaccatcctattgcaaaggttccaactgtatatattcccaatagcaacgtagcttctaccatgaacagaaaacattctgatttggaaaaagagagggaggtatggactgggggccagagtcctttccaaggcttctccaattctgcccaaaaatatggttgatagtttacctgaataaatggtagtaatcacagttggccttcagaaccatccatagtagtatgatgatacaagattagaagctgaaaacctaagtcctttatgtggaaaacagaacatcattagaacaaaggacagagtatgaacacctgggcttaagaaatctagtatttcatgctgggaatgagacataggccatgaaaaaaatgatccccaagtgtgaacaaaagatgctcttctgtggaccactgcatgagcttttatactaccgacctggtttttaaatagagtttgctattagagcattgaattggagagaaggcctccctagccagcacttgtatatacgcatctataaattgtccgtgttcatacatttgaggggaaaacaccataaggtttcgtttctgtatacaaccctggcattatgtccactgtgtatagaagtagattaagagccatataagtttgaaggaaacagttaataccattttttaaggaaacaatataaccacaaagcacagtttgaacaaaatctcctcttttagctgatgaacttattctgtagattctgtggaacaagcctatcagcttcagaatggcattgtactcaatggatttgatgctgtttgacaaagttactgattcactgcatggctcccacaggagtgggaaaacactgccatcttagtttggattcttatgtagcaggaaataaagtataggtttagcctccttcgcaggcatgtcctggacaccgggccagtatctatatatgtgtatgtacgtttgtatgtgtgtagacaaatatttggaggggtatttttgccctgagtccaagagggtcctttagtacctgaaaagtaacttggctttcattattagtactgctcttgtttcttttcacatagctgtctagagtagcttaccagaagcttccatagtggtgcagaggaagtggaaggcatcagtccctatgtatttgcagttcacctgcacttaaggcactctgttatttagactcatcttactgtacctgttccttagaccttccataatgctactgtctcactgaaacatttaaattttaccctttagactgtagcctggatattattcttgtagtttacctctttaaaaacaaaacaaaacaaaacaaaaaactccccttcctcactgcccaatataaaaggcaaatgtgtacatggcagagtttgtgtgttgtcttgaaagattcaggtatgttgcctttatggtttcccccttctacatttcttagactacatttagagaactgtggccgttatctggaagtaaccatttgcactggagttctatgctctcgcacctttccaaagttaacagattttggggttgtgttgtcacccaagagattgttgtttgccatactttgtctgaaaaattcctttgtgtttctattgacttcaatgatagtaagaaaagtggttgttagttatagatgtctaggtacttcaggggcacttcattgagagttttgtcttgccatactttgtctgaaaaattcctttgtgtttctattgacttcaatgatagtaagaaaagtggttgttagttatagatgtctaggtacttcaggggcacttcattgagagttttgtcaatgtcttttgaatattcccaagcccatgagtccttgaaaatattttttatatatacagtaactttatgtgtaaatacataagcggcgtaagtttaaaggatgttggtgttccacgtgttttattcctgtatgttgtccaattgttgacagttctgaagaattc

SEQ ID NO: 93518 - DNA, 1351 bp, Homo sapiens
  misc_feature (613)..(613): n is a, c, g, or t
tgatctagaggatcccggtccccatgcacagtttgaacaaaatctcctcttttagctgatgaacttattctgtagattctgtggaacaagcctatcagcttcagaatggcattgtactcaatggatttgatgctgtttgacaaagttactgattcactgcatggctcccacaggagtgggaaaacactgccatcttagtttggattcttatgtagcaggaaataaagtataggtttagcctccttcgcaggcatgtcctggacaccgggccagtatctatatatgtgtatgtacgtttgtatgtgtgtagacaaatatttggaggggtatttttgccctgagtccaagagggtcctttagtacctgaaaagtaacttggctttcattattagtactgctcttgtttcttttcacatagctgtctagagtagcttaccagaagcttccatagtggtgcagaggaagtggaaggcatcagtccctatgtatttgcagttcacctgcacttaaggcactctgttatttagactcatcttactgtacctgttccttagaccttccataatgctactgtctcactgaaacatttaaattttaccctttagactgtagnctggatattattcttgtagtttaccctttagactgtagcctggatattattcttgtagtttacctctttaaaaacaaaacaaaacaaaacaaaaaactccccttcctcactgcccaatataaaaggcaaatgtgtacatggcagagtttgtgtgttgtcttgaaagattcaggtatgttgcctttatggtttcccccttctacatttcttagactacatttagagaactgtggccgttatctggaagtaaccatttgcactggagttctatgctctcgcacctttccaaagttaacagattttggggttgtgttgtcacccaagagattgttgtttgccatactttgtctgaaaaattcctttgtgtttctattgacttcaatgatagtaagaaaagtggttgttagttatagatgtctaggtacttcaggggcacttcattgagagttttgtcttgccatactttgtctgaaaaattcctttgtgtttctattgacttcaatgatagtaagaaaagtggttgttagttatagatgtctaggtacttcaggggcacttcattgagagttttgtcaatgtcttttgaatattcccaagcccatgagtccttgaaaatattttttatatatacagtaactttatgtgtaaatacataagcggcgtaagtttaaaggatgttggtgttccacgtgttttattcctgtatgttgtccaattgttgacagttctgaagaattc

SEQ ID NO: 93519 - DNA, 5123 bp, Homo sapiens
  misc_feature (4385)..(4385): n is a, c, g, or t
gatcccatcgcagctaccgcgatgagaggcgctcgcggcgcctgggattttctctgcgttctgctcctactgcttcgcgtccagacaggctcttctcaaccatctgtgagtccaggggaaccgtctccaccatccatccatccaggaaaatcagacttaatagtccgcgtgggcgacgagattaggctgttatgcactgatccgggctttgtcaaatggacttttgagatcctggatgaaacgaatgagaataagcagaatgaatggatcacggaaaaggcagaagccaccaacaccggcaaatacacgtgcaccaacaaacacggcttaagcaattccatttatgtgtttgttagagatcctgccaagcttttccttgttgaccgctccttgtatgggaaagaagacaacgacacgctggtccgctgtcctctcacagacccagaagtgaccaattattccctcaaggggtgccaggggaagcctcttcccaaggacttgaggtttattcctgaccccaaggcgggcatcatgatcaaaagtgtgaaacgcgcctaccatcggctctgtctgcattgttctgtggaccaggagggcaagtcagtgctgtcggaaaaattcatcctgaaagtgaggccagccttcaaagctgtgcctgttgtgtctgtgtccaaagcaagctatcttcttagggaaggggaagaattcacagtgacgtgcacaataaaagatgtgtctagttctgtgtactcaacgtggaaaagagaaaacagtcagactaaactacaggagaaatataatagctggcatcacggtgacttcaattatgaacgtcaggcaacgttgactatcagttcagcgagagttaatgattctggagtgttcatgtgttatgccaataatacttttggatcagcaaatgtcacaacaaccttggaagtagtagataaaggattcattaatatcttccccatgataaacactacagtatttgtaaacgatggagaaaatgtagatttgattgttgaatatgaagcattccccaaacctgaacaccagcagtggatctatatgaacagaaccttcactgataaatgggaagattatcccaagtctgagaatgaaagtaatatcagatacgtaagtgaacttcatctaacgagattaaaaggcaccgaaggaggcacttacacattcctagtgtccaattctgacgtcaatgctgccatagcatttaatgtttatgtgaatacaaaaccagaaatcctgacttacgacaggctcgtgaatggcatgctccaatgtgtggcagcaggattcccagagcccacaatagattggtatttttgtccaggaactgagcagagatgctctgcttctgtactgccagtggatgtgcagacactaaactcatctgggccaccgtttggaaagctagtggttcagagttctatagattctagtgcattcaagcacaatggcacggttgaatgtaaggcttacaacgatgtgggcaagacttctgcctattttaactttgcatttaaaggtaacaacaaagagcaaatccatccccacaccctgttcactcctttgctgattggtttcgtaatcgtagctggcatgatgtgcattattgtgatgattctgacctacaaatatttacagaaacccatgtatgaagtacagtggaaggttgttgaggagataaatggaaacaattatgtttacatagacccaacacaacttccttatgatcacaaatgggagtttcccagaaacaggctgagttttgggaaaaccctgggtgctggagctttcgggaaggttgttgaggcaactgcttatggcttaattaagtcagatgcggccatgactgtcgctgtaaagatgctcaagccgagtgcccatttgacagaacgggaagccctcatgtctgaactcaaagtcctgagttaccttggtaatcacatgaatattgtgaatctacttggagcctgcaccattggagggcccaccctggtcattacagaatattgttgctatggtgatcttttgaattttttgagaagaaaacgtgattcatttatttgttcaaagcaggaagatcatgcagaagctgcactttataagaatcttctgcattcaaaggagtcttcctgcagcgatagtactaatgagtacatggacatgaaacctggagtttcttatgttgtcccaaccaaggccgacaaaaggagatctgtgagaataggctcatacatagaaagagatgtgactcccgccatcatggaggatgacgagttggccctagacttagaagacttgctgagcttttcttaccaggtggcaaagggcatggctttcctcgcctccaagaattgtattcacagagacttggcagccagaaatatcctccttactcatggtcggatcacaaagatttgtgattttggtctagccagagacatcaagaatgattctaattatgtggttaaaggaaacgctcgactacctgtgaagtggatggcacctgaaagcattttcaactgtgtatacacgtttgaaagtgacgtctggtcctatgggatttttctttgggagctgttctctttaggaagcagcccctatcctggaatgccggtcgattctaagttctacaagatgatcaaggaaggcttccggatgctcagccctgaacacgcacctgctgaaatgtatgacataatgaagacttgctgggatgcagatcccctaaaaagaccaacattcaagcaaattgttcagctaattgagaagcagatttcagagagcaccaatcatatttactccaacttagcaaactgcagccccaaccgacagaagcccgtggtagaccattctgtgcggatcaattctgtcggcagcaccgcttcctcctcccagcctctgcttgtgcacgacgatgtctgagcagaatcagtgtttgggtcacccctccaggaatgatctcttcttttggcttccatgatggttattttcttttctttcaacttgcatccaactccaggatagtgggcaccccactgcaatcctgtctttctgagcacactttagtggccgatgatttttgtcatcagccaccatcctattgcaaaggttccaactgtatatattcccaatagcaacgtagcttctaccatgaacagaaaacattctgatttggaaaaagagagggaggtatggactgggggccagagtcctttccaaggcttctccaattctgcccaaaaatatggttgatagtttacctgaataaatggtagtaatcacagttggccttcagaaccatccatagtagtatgatgatacaagattagaagctgaaaacctaagtcctttatgtggaaaacagaacatcattagaacaaaggacagagtatgaacacctgggcttaagaaatctagtatttcatgctgggaatgagacataggccatgaaaaaaatgatccccaagtgtgaacaaaagatgctcttctgtggaccactgcatgagcttttatactaccgacctggtttttaaatagagtttgctattagagcattgaattggagagaaggcctccctagccagcacttgtatatacgcatctataaattgtccgtgttcatacatttgaggggaaaacaccataaggtttcgtttctgtatacaaccctggcattatgtccactgtgtatagaagtagattaagagccatataagtttgaaggaaacagttaataccattttttaaggaaacaatataaccacaaagcacagtttgaacaaaatctcctcttttagctgatgaacttattctgtagattctgtggaacaagcctatcagcttcagaatggcattgtactcaatggatttgatgctgtttgacaaagttactgattcactgcatggctcccacaggagtgggaaaacactgccatcttagtttggattcttatgtagcaggaaataaagtataggtttagcctccttcgcaggcatgtcctggacaccgggccagtatctatatatgtgtatgtacgtttgtatgtgtgtagacaaatatttggaggggtatttttgccctgagtccaagagggtcctttagtacctgaaaagtaacttggctttcattattagtactgctcttgtttcttttcacatagctgtctagagtagcttaccagaagcttccatagtggtgcagaggaagtggaaggcatcagtccctatgtatttgcagttcacctgcacttaaggcactctgttatttagactcatcttactgtacctgttccttagaccttccataatgctactgtctcactgaaacatttaaattttaccctttagactgtagnctggatattattcttgtagtttaccctttagactgtagcctggatattattcttgtagtttacctctttaaaaacaaaacaaaacaaaacaaaaaactccccttcctcactgcccaatataaaaggcaaatgtgtacatggcagagtttgtgtgttgtcttgaaagattcaggtatgttgcctttatggtttcccccttctacatttcttagactacatttagagaactgtggccgttatctggaagtaaccatttgcactggagttctatgctctcgcacctttccaaagttaacagattttggggttgtgttgtcacccaagagattgttgtttgccatactttgtctgaaaaattcctttgtgtttctattgacttcaatgatagtaagaaaagtggttgttagttatagatgtctaggtacttcaggggcacttcattgagagttttgtcttgccatactttgtctgaaaaattcctttgtgtttctattgacttcaatgatagtaagaaaagtggttgttagttatagatgtctaggtacttcaggggcacttcattgagagttttgtcaatgtcttttgaatattcccaagcccatgagtccttgaaaatattttttatatatacagtaactttatgtgtaaatacataagcggcgtaagtttaaaggatgttggtgttccacgtgttttattcctgtatgttgtccaattgttgacagttctgaagaattc

SEQ ID NO: 93520 - DNA, 1508 bp, Homo sapiens
ctccacccgacggggtggggaatgggagtgggaaggccaggagtgtctctgcaccatcactgtttgagtgttgcccctttgctgtgtgccccacctagtctatgtgtgtctctgttctctggggactcaatttgctggtgaattgcttccatggacattgttctgggaaacgccattttttctgctcacccatgactctgtgacaaggaatgacagcttattaggaatttgtttttgcattggaacagtggtcatcagaatgggccccttttcccttgcagctttgacatttgcctctcttttcctcacctctctcccttgcatccacccttttctctttttcttcttttttgttttccttctagcaggggccttttacctttacttgttaatcctgtttgtagcaagcaagtggaaggaggagttcctctctgatctgcttcttattctccacctaccttctcttctgtactttccgcctcctagagagagagagagagagaggaatgccgacctaactaccgctgccactgctgctgccaccaccgctgccaccaccaccctggtaatgttcacacgtcctcaaatcaacccagagccagggccctgctggtcagggggaggctatgtaaataatcccatgagtgtgccatcctcaggccctggggtctcctaggcaagaccagggcctctgtgggctctctcggaaatgctgaggttgctggaagccagcccgtcatacagggtctgagagtttaacttcttttaaattaaaccacagttgagctcatgctgtgtgtgtataaacttttgtatcctgctttttccttaaattctttatcatcagcatcttcccatgttatttcatagtcttcatcatcatcactttccataccttcatagtagttgatcgtagaattccatcataattaacttgtcttttctctcttagaagtcccttaggtaatgtccaattttccgtgagtgtaagtaataccataatggacatcttggagtctgaagtttattctgtgttggtttgttccacatttaggatcattttcccaggctagggatgatggggtgatagttccaggctggttgaggatggatttggagacagtcctttgtaccctcagtgagcaagagtatctgtcaccctacctcagcagttgtctctgtcactggtccaagcagctggttcctacacaaggtcaagatcaactggggagaagcagactcctgggtctatcccattagtgtggactgctgcctgggcttatggcctcattggtttggtttttatcttgatcatctctaccatccattcatcccggccttccattttctacctcagctgtcagtgcacagattgatgtgtgtgggaacggagcttgggaggagtgtggtagggctggtcctgtcctgtagcccacccttacttcgcgctcttgaatcctttggagcttacctaggtgggaggagaggaaggcacttgaaaagtccca

SEQ ID NO: 93521 - DNA, 440 bp, Homo sapiens
ctcttctctttctcctcttagttaccctccattgatatcctcatcaccatcagctccttctcctcccacctcacagttctctggtgaaattctcagggtgaaagtgagcctcagtgcttaggcagctaggacagcaggaagatggcaaacagccatctagagtgttcacgatagcttctcacctccccgagtaaggaagagctagaagcacttcctaacacttttatcagcatcatttagcctctagttcatgaggttatttatgaatcataccagcccctgcctgcatggcttcatggctgcttgctgttttgcataggcacccagctttattgttagtcatttccaaatgaggcctgggcccctggagaggcatgaggcctaactttaaaacaccgaaggacccaagggcagctttagcattgtgacacctgcaagtc

SEQ ID NO: 93522 - DNA, 102 bp, Homo sapiens
ggctataaactgaggtttaaaaaaacaaaaattatgtgtgaagtgtgtataaatgtagaaaaattatcaaaataatcaagactgcatatgtgtaagtgagag

SEQ ID NO: 93523 - DNA, 516 bp, Homo sapiens
tatatttaattgaaaaaagaaaatgaatcaatagaaaggttatgtacaaaattggatttgtgtatagggatgtgtacaaactgagtctatagggtacacatgacaattggttacaattttacaatcataatgtgtagtgtagagaaatcaacagcagaggaaccactctaacacattaagttccttggtcaaataaaagagattctcctgttgaataacagaatttaaaacattttcagtggtaggcaagtgtgttaatctttcctggccatagtggaaataaaggccgtagaagaactgagtgatgttattagcagtgcaaatagagttaaaaattgccatcatctagaactgacctcatgtgcttgggaaactgaatcttctcgccacagatggctctaatgagtcgggaggatggtgctgggcagaggtcagtgttggaagtcctttcttatggcaaagagtttgcagtctgtgcatgcatgtgtgtgtaagtgtgtgatgagagttgcagtt

SEQ ID NO: 93524 - DNA, 729 bp, Homo sapiens
  misc_feature (35)..(35): n is a, c, g, or t
acctcactacagaagatattcagatggcaaatgancatatgaaaatgctcaacatcttacatcataggaaattacaaattataataattgggagccccaatgttgggtgcagagatacttaaaattgttatatccttttgctgaattgactcctttatcattatataagtgacctttctttgtcttcttttacagtcattgatttatgtctattttatctaaatatagctactcttgctctttttgacctccagttgtatggaatgtgttttcccatccctcactctcagtctatgtgtgtctttataggtgagtgggtttcttcgtaggctgcatatagttgagtcttgtttctttatcaagcctctcgctgccttttaattggaaaattgagaccctttacattcagtattatattgataagcaaggacttactactgccatcttgttgcttatttctggttttgtaacttttgtcttcctttccccccccccccctccagcctgggcaacagaatgaaactttgtctcaaaaaaaaaaaaaaaaaatcatctgaaggtacaaaactctcactggttacagtaagtacacggaagaacagaatattaaacattgtatgtgtggtgtgtaaactactcttaagtggaaagactaaatgatgaactaatcaaaaataataaccacaacaacttttcaagaccaagtcagtaccataagataaataaaaa

SEQ ID NO: 93525 - DNA, 215 bp, Homo sapiens
gcccaggctggtcttgaactcctggcttcaagtgatcctcccacctcagcctcccaaagtgctgggattacaggcgtgagccacagcatccggtctatttgtgcattttaattaaaaagttctcagactaaaataagtttataaattttgattatgttactgtaattatgtgcagatattaaaaattgaaattatttaattttattatttaatcc

SEQ ID NO: 93526 - DNA, 288 bp, Homo sapiens
aaagcatgcatatcaactcagacttctctctcttcttataaagccaccagtctcttcacagggactctacgctgacatccttatcttaccctaattaccacccaaaggtcccacttctgaccaacatatgaatttgataattatctttccagcaaatgaaaatttcggggacacatttaaagcctagcaaggtttgaggtggagagggagagtaatttttaagtaagaaaggtaacacaaaaggcattttaagaatgatagccttacctcataaaaaataaaactttt

SEQ ID NO: 93527 - DNA, 875 bp, Homo sapiens
ataaacaacagaaatttatttctcacagttctggaggctggaaagtccaagggcaaggcaccagcaaattgagtgtctggtgagcctggttcatagatggtgccttcttactgcgtcctcacagggtagaacggtccaggggtctctctcagccttcttttataacagcactgatcccattcatgggggttacactgttgtgtcctgatcacttcccaaagattctacctgctaatactgttaccttggagattaggatttcaacatagaaatatttggcaggacacagacattcagaccaaagcagatgtgtacaccgtcacagcttcttgcttttatcttctatcttggtgacatgaattacttctggctatagtcactggtttgtcatcacattttctattgttggtagcaagcaatacaatagaggtataaataactcctaaacatttgtgtttttaaatacatttaagaaatgtttttttcctgagtagattgtgtttattcattaaccttattctttgaaacttaaaataagcttcaagattgtttaagatatgggaaatgaaagttttaacatctcttcggccttttattttaaggttgcctcttctctattttttcagttgaggaaaatgaagatgcaaagtgttagttgtcttttctaagtggcttgatggaagtatagacatgagttgcagtgtcaacactagcatttgcgcatagagcaaggttagccactgagaaccaggtctcagcatgtggcctgtccaaaatcaggttgacctaggtgccaccatacaaagaactctttgggtgacaggtatccagcctttcaggtaatactcagccaaggcctgtgccatctcatgtgg

SEQ ID NO: 93528 - DNA, 1458 bp, Homo sapiens
agagggaaactgaaaaatgaatttatctttctttaaatggaagtcagtttggtggttcatggcacctagtgtgaacatcagggtgagcccagaagagccatggaaataacaagtttccttcgggatgggtgaagagaaggcccagctaactcaagtccctggtattcagagccacatttgtgtgagaatttggggaaattcatgagagaaaatgggcattaccaatctatgtctcttaaccccggtggctatctctgagcagctctccctttccagcttggaaggttgtctgtgtgcagaggctgggagggagaagcactgcagtacgtgaatgaaaggtcgcagagttgtggctggaaaatacatttttcaccagggtagaactgagcccccagctgcctatcctggtagtcttttctgttcctttccttcccctttagagagctccatgttaatttatttcttatgggcaattatttattacttggacttttcatgtgtcttgtttatttgggggtggggggaggttaggggtaaggagggtaggtgatagaaagggaagttttaagatatcccagaccctatagccactggtgaaaaacaatcctggatggatggtaaattgaccaggggaagagttaggtttgaccaaggtttggattaaacaactatatttttgagagatggcttttcaggaagatcagggaatcctgagactggatagttagtggagggtgggactcattccacagaaatcgaaagttgtgatcatggagtttgcaattgggaagtaagagaccccagatttggagctgtgtcctcctgggatgatgttagatgttggctctctatgctgaatagtgaagctgtggataggcggttgctgggttgagggactgttgatttcatgttcgaaaatatcttcaggtggtccatgtaggcctggtgtctgctgcctccatctttgaaggaacatggaggagccctttctctgtaggagccctaagtctgggttttatcttaaaagaacacaccagtcattctgggtctccccttattgccattgccaggggagggtcgtctagtccttaagcataaacactggctgtcttcctactggtgtccccgccccctctgtatcccccaccccaacactttgccagacagttctttatgatgaacaaactttggctttagagctttaccacttacccatggctccctccttactgggcaggtggtgtacctgcctcttcccagcccagaaggcagcttagtcaggtcatcccagtagtagctcctacagctcttctgaccagcccatttccatctttggagggccttagcagactctggggtattgtcctcagagaagagacaaggagatgatggatggggtgcatgtgtatatgtgtgtttgtctgctgtccaataacaccaaaagtggaacttaaaaag

SEQ ID NO: 93529 - DNA, 399 bp, Homo sapiens
atctcctcacctgctcacaggccagtctcctctggaaacacccgcacagccacacccagaaacaatgcttccccggttctccaggtgttccttcatccagtcaagttgacacctaaaattcaccatcacagctggctggtgtctctggctggtttaggaaatgccgtttcccctattatttaaggaggtctgtggtgtttctgatcttgtctgggctctgggtttgttgtcattcattttctaaacagctgcctcccggctccccagtctctcatgttgtgggagtcattccttgggaagacaaaaagcattcatttattcgttcattcactcctccatccatttatccatccatccatccatctgtccatcatccatccatccagccattcatccact

SEQ ID NO: 93530 - DNA, 527 bp, Homo sapiens
attcttatgagttgcaaaatggaaaaggcctattataggcctcccataagcaacccagatgggaacattgtcactgtctgcagcctggcgtgctctggaaggcacttcctagtgactgcatctcccatctcctcagatgatactaatgagtttgctgctaactgaatgagcaaatactcccaccctgtttcaggccatcttttgtcactaggacacttgcaacagcttcctcactgagccctgtcttacatctggtccttttcccacatagtcagagtgacctttcagaatgcaagtttgattacgtaactgtcttgctgaaaatgtattgatggctgggtgcagtggctcacacctgtaatcccagccctttgggaagctgatgctaaggatagcttgagcccaggagttcaagaccaatctcggcaacatagtgagactccgtctctacaaaaaaatgaaaatatctgccaagtgtggtggtatgtgataatcctaagtcccagctactcaggaggctgaggtgg

SEQ ID NO: 93531 - DNA, 343 bp, Homo sapiens
atgatataacttctctagtatccaaagaatcaaccattaacagtttggtattctctatgaactattttgcacatataaaaatgggcagaaaacacaattatgtacataaatgtatccagctttttaaaaaaatgaaactgaatcatagtatatctggtctgtagcttgcttttttacctctacctaattgtatgcgaactactttctttgcagatcttaaaaaaaaaaaagaaaaagagtgttattcagatgaatggatatatcattatttaattattcagccatatattgatagatatttacaacgttttgtttttagtgatttgttagcatcttcgaatta

SEQ ID NO: 93532 - DNA, 652 bp, Homo sapiens
atcaaatactgtctcattatcatatgtttagcccccccaaaattacattttagactcttactttctctccctctcccctttctttagctcttgtttgtgtcttgccaaagaagtgtacctagtaagggaatgtttcttatttgtgccaagggactattgatgatgctgtataatggcaagatagcattttgtaatacctgcttttttatatttctaatacaaatgggcaaagctgtgaaaccaatttactaggtttttctgctttggacataattgtatgtgttaattctctctaaacagtgcctggcacatattacatgctataaaagtgttagctactactgctaccatttattattatcattattaaatatccattggttgaaaaaccaagtagtcagctaaatcatacctgctactgtacaaaatgtaggggaaaagctgagaaaaatcatttatcaataaacagttttcagaacaagaatttatactttggatatttttaaattgttaaatgttattgaaactttatgcaccaaaactgtatgaaataatttaattttgcagttgtgtttctatattctatgtaattaaagctacttttatactatattgatagttttaaataaaactggtttggaggtttgtttgc

SEQ ID NO: 93533 - DNA, 234 bp, Homo sapiens
cctttattatcaccacagaatttgaaatgatttctgtagtggccatatttcttttcagaacaagaatttatactttggatatttttaaattgttaaatgttattgaaactttatgcaccaaaactgtatgaaataatttaattttgcagttgtgtttctatattctatgtaattaaagctacttttatactatattgatagttttaaataaaactggtttggaggtttgtttgc

SEQ ID NO: 93534 - DNA, 900 bp, Homo sapiens
ctcatctaaaaattaccttcacagtgacatccagatatgtttgaacaagtatctggataccatggcctagccaaattgacacctgaaattaactgtcacatactgctagaccaaggaggggcttattttccccaagatgcctcaagaagttcaaagtgccagcgggacacagttccttctatctttctgcatggttatgccttgccatgggacttttgtcctcataggctacaaactgactactccatccctgggcatcacaggcagaagaaagagggaaggatcttgggcaaaaggcaaacactaacaaactgtgttatctgagtcttcccttttcaacagacttttttggaagccctgcctatcaaattcttattgatcttattgatcaaccgatatctttttgatgactcctagatgcaagggaggttaagaagctgattattttttatctaagttaaaaaagagagagagagaaagaaaaactcagggcaagaagtggagaataactgggtaggcaagtggtggcatcatccacaccaggtgttctgatgctacatcatttatgttttacatcccaccaaattgctcaccatacacacatggaggtgtctatccttgattggactgccctttatgttaatcactgaggtctctttggatatgtgaattgaacccaggatcaatgtgaagtcaccttcaatttaatggaagccggtagcaaaggaaggataaatttgctgggcattactttttcttttctgactcctgatgggctaagtagagaaacttttcattttaagctgatggaagcagcaaaaaatgaaaataaggatgaggtgtgaggggagggggcgggcattggtaaatgttcggatagctggtatattatatgggcca

SEQ ID NO: 93535 - DNA, 221 bp, Homo sapiens
ggcagaacttatacagttaattagcttgtgagcaacacagttaaaaactgtttttccaaacttaattttgtatttcaggtgcaaagctatttgaaaatttaagacagagtagcatggtttgatattagtgtttatggcgctttttatcatcacagttttgtttgttttgatatggggtcttgctctgtcgcccaggctggagtgcagtggcacgatcttgg

SEQ ID NO: 93536 - DNA, 125 bp, Homo sapiens
agagcaaaacttcgtcgaaagaaggaaggaaggaaggaaagagaaaggagggagggaggaaggaagggaaggaaaaaagaaatacctgaagctgggtaatttattttttaaaaaaagatgtaatt

SEQ ID NO: 93537 - DNA, 463 bp, Homo sapiens
gacagattttcaccatgttggccagggctgtctcgaattcctgacctcagggtgatccacccacctcagcctcccaaagtgttgggattacaggtgtgagccactgtgcccagcttaagtgtagcctttctttgtctaaactgaaagcccatatggttcagcaaaggctctccattctgcttggtcagagccacgtctgatttttgccacctctgtactctgttcagctcataggcttctgtcatgtctcagaattttgctctgcacatttgcagcctactgttcagccaactgttcagccaacttctagggctataatggctgatacagtagtcacaagttgtagctatttaaaattaatttataatattgtttcttacttgcatttgccacatttcaagtgcttagtagcacatggtactggtggctaccacattagatgtcacagatacaagttgcagaa

SEQ ID NO: 93538 - DNA, 207 bp, Homo sapiens
cttttctttaatcacatttagaaaatcacatttatggcccatggttataaatattctttgtatgttgataacttttaaatatatagctgcagccctcattgctcatctaaactccaggtttacctaactgcatacttggcatctccatttggatgtcttatgggtgtttcagacttaaagaactcatgattcttcccacaccccata

SEQ ID NO: 93539 - DNA, 437 bp, Homo sapiens
gggcatccggatggcgactgcgggaaatcgagttctcatgctggggcgaaaggtgtgtctgcaggagccaaatccaaatgagcagtccaggtacttcagagttttaacctgagcgaaacaggaatgtctcgggtcttaacaggaccgtccgcccgctcggaagaggcgaatctcccacggcagacgtctgggtgtgcgaatgccagttgagcggggcctcgaggacgcgtcacacacagcgaggatttgaggagggaagcgccttccagagcttcagagaagaggcagaagtgtgcaaacaggagcaggtccaagatttgcatggccagaagcaattcttgatcctcttggctagattcgaagatttggccacctccagacgctaccacactctgggacagtgggagatttggaacagctttgagaagagcaaggtg

SEQ ID NO: 93540 - DNA, 342 bp, Homo sapiens
gtttcctgaaatagagtcttacatccttaattaattaattctttaattaattaattcttttctaatgtatgtatttaaggctgtaactttaaagtagacagagcttacatgggtttttatattgtttcattcaaaatattttctaatttccattgtgatttcctctttgaccatggtttgttttaaagtctatttcttaatttctgagtatacaagaatttttaattttctctttgtaactacattattagaaaacttgttttaaattactttaatggtcagataaattatttcaacccttggaattttgttgtcttgctgtgtgcgctttaaaatgagtat

SEQ ID NO: 93541 - DNA, 632 bp, Homo sapiens
gcaacatctgttagaactttagaggtatagcattagcaaattacaggccaggtgcagtggctcacaactgtaatcccagtaccttgggagggtgaggcaggaggtttgcttgaggccaggagtttgaaactagcctggtcaacatagtgagaccccgtctctacagaagaaacatttttaaaaaatcagccaggtgtaggccaggtgcagtggctcacgcctgtaatcccaacactttgggaggctgaggcgggcagatcacgaggtcaggagatcgagaccatcctggctaacacagtgaaaccccatctctactaaaaatacgaaaaataagccaagcgtggtagcacatgcttgtagtcccagctactcaggaggctgaggcagcagtatcgcttgaaccctggaggcggaggttgcagtgagctgagattgcaccactgcactccagcctgggcgacagagcgagactccgtctcaaaaaaaataaaaaataaataaaaattagccaggtggccgggcatggtggctcacacctgtaatcccagcactttgggaggccgagttgggtggatcacgaagtcaggagatggagaccatcctgactaacacggtgaaaccctgtctctact

SEQ ID NO: 93542 - DNA, 364 bp, Homo sapiens
actggaaagcacatcagcacaccctcggggtccattgtaaacagcaaaatcaccaacaaaaagcaccaaaatgcaaaaaacacagcactaactacaccactaaaaagatacttgttttcagtaggagagtgaaacaaggaggcatagtgttgccttgtttgacctcaggaacatgaacatcaagtgatttcaaattttttactgctctgtgcatgtctacaaatgaccaaaaaagccccagacgtattgatttgggcttataaataaattttagtgagtaggtgcatttgcaagtatagctgcaaataatgaagactgactgtatttagagtcacaagtaactttgttataaattaccttttac

SEQ ID NO: 93543 - DNA, 223 bp, Homo sapiens
ctcctagctgttgcttttgcccagcaggataatattgagtcccactgcaagcacggacaaggcctctggttctggtcaccactaccttttcaaccgtagaacatcactggaaatgcttaatgcctggatctattttctaccaaaaacagttccactgggaagtctttcagtgggaaatgaataaatgttatacattgttatgttcagttatgtcaataagacc

SEQ ID NO: 93544 - DNA, 704 bp, Homo sapiens
ggcaaagatatttccatatttccccagacacccatttttagttcaggtttcacaggagacagattttgccaagcagatgtacttgtgtgaaatttgagaaacagcaatgaacatagtgaggtggaggttgtgctttcactattactactgtttcttctggcaataatgtttgtgaaattgaaagtagtaggaaacccacctacagtggtgtaagcaaatagaagcctatttttctcagatagcaagaagtttggatgtaggcaatcattggatttgtccatgagtttaccaatatcaggatcaatcaggatcagtatctgtgcagttttttcgaattttccttcatggctacaagaccattgttggagctgctttattcaaggcaaaacaaacaaaataaaaacaatagaaaaggaaaacagtaacatcaactatgtctgcctgttttatcagaagacaggttttcccagaagccctcaaaaccggcttacccaaggtctcactgtccaaatttgggcatgttaccacctgaaaattaggattctactggcaaggaaaaaggagggaaagttatgggagtgccataatgcatagaactcatagtctctgccctcaaggatctaatgatggcttgtagagcaaaacatatgcatggatatttgaataatagtataagagttaagaaaaaatataaggtaataata

SEQ ID NO: 93545 - DNA, 450 bp, Homo sapiens
acccacatcatagaaggagccatattgtaaagaagtcaaatgcagacttaaataattagaaaccttctgccagcgtgtttttctggcactccttctgtgtcgtcttccttatcgtctggtactggttcagaagcacttgtgtccatcacgtcatcttctgttaattcctctagtgtgttatctattagctcttgaatttctccaaggtgtatatcttgaaagccttcactcaccacccttttttccgtgttcacgatctctttcgtgatttccttggttggctgtattgtaaatcctgtcaagtcatgcacaacatctggacacagtttcctccagcaggggagtgtgttgtgttgggcttgatgctttcacagctttttgtgtaacgatggcatcttcagtgctgtgatccttccagactttcatgatgttctatcagggttctcttgc

SEQ ID NO: 93546 - DNA, 288 bp, Homo sapiens
caaagatccttttgtcagacaagggaacagcatgataatccaatggaactggttaacatgacccaagatgacatgaccacagatatactagtcgttctgaaacttgcccaagaaattgcaatcgtttcagcagaactccatgaaatattgacaaattaattccatcatcaaactaggagtgatattatcaggtaaaactatgatctcatgtatgtatttggtctttctgggtcacaatgtgacatgaaaaattttaaaggtcatattttagcaagatcaaaatgaatt

SEQ ID NO: 93547 - DNA, 458 bp, Homo sapiens
caactgaaataattctaagtatattctctgacaacagtgtaattaagccagaaattactaacagccagaattaataacagataatcctcactttttgtaaattttatgtatagttgacccttgaacaatatgggtttgaattgcatgggtcgacttatatatagattttcttccacctctgtcacccctgagatagcaagaccaactcctcttattcctcctcctcctcttcagcctattcaacatgaagacaatgaggatgaagacctttaagatgatcacttctacttaatagtaaatatattttctcttccttacgattttcttgataacattttcttttctctagctttattataagaatacattatataaaacatatacaaaaatatgtgttaattgactgttcatgcaattggtgaggctttatcaatagttaagttttttgggagtcagaa

SEQ ID NO: 93548 - DNA, 430 bp, Homo sapiens
atgtaatctcatgaattattatattggttcacatgtacagaagtcctgatttgtggccttatgtgttacttttttattttctacctgtctactctacttggcataaaacaaaattaattatacaatttaacaaaaataatgcatttctttaaacaagcatcctgaaagatgaaggtcatactataaacagttctagtagcctaacaccaaatgtactggcaggattcagcaggctcccctgtacaccagaataaatggcatttttactaaggtacatttctgagttgtagtatgataccttgtataacaaccattaaagcccacattaatccaattataagtaacagaggccatattttgaattggataagattaaatatatactttagacatttttagataagggaaaaatatttaaacaataaattaa

SEQ ID NO: 93549 - DNA, 408 bp, Homo sapiens
ttactccatgttctgtccccatcccaactctttggccccatagaatccccaagggtgggactcagtggcatcccttatagagtccaccattaggacacaggttcagagaaggatgagtgtatgccatcatatttcttccttagagaatttgacctaggaaatgataggagaaggaggccggtggcagaggtggctgaagctgaaggtttatgacacacagacagggtgtcatagccccctgggccctctggaacccaagaagcaggctgtagaaaccataagaaaacagaagcatacagatggaagagagggtgggccagctgggagcaggagaacagcacatgcaggaaaagctggtcgctgagaccatgtccccatgagagaacctggtcagtggctatcgaaagg

SEQ ID NO: 93550 - DNA, 116 bp, Homo sapiens
attaatatggtgccaagagactatacatatttgtgttaataaatgtgttcatttttgccattttgagaaattatactacaagaaagtatttttgttaaagaaaaaagagagtatag

SEQ ID NO: 93551 - DNA, 356 bp, Homo sapiens
ggcttgagaatcagtgcgaaggcagtgtaagattttggaaatcagatcgagagcctggatattattctaggatgacgggaagtatttggggtgataagacaagctaaaaagcatggcccatacatcttttccacaaagaccccaaactagagagatggccaacaagatggcaggtgtcctgaggtgcacgtctatcccttggtgcccctcacccaaagagccagactcttgaaagcactgatggcagctggctccttggaatgacatcaccaggggataccacggccacagcacttgccattgcatcagctccaacctggtcaagacctacatcatcaagacctcctccttcaccc

SEQ ID NO: 93552 - DNA, 573 bp, Homo sapiens
tgagtttggactcctctccatccttgctgccctgttcttgaaaatatagtgccttgaggggaccgtcactctccagaagtgacctggtctgaccatggaaaagcttggtggggcttcccctcccttgttctaatttctatgcatcttaagaaagtcacctaatctctttgtgcctcagtttccttattgggacagtggtgatagtactcattcctaaattgtttcaatcatctactgctgtgtaagaaaactccaaaacttattgcctacaaaatagtgatctgttatttgccatgataccgtggcagggatcagtggatgtttcttctgctctatatagcttggtccagagtcactgacacagttgcatttggcagctgagctgggctataaggtccaggaaggaaggcctcactcattcatctaggctgtgtggtttttctctcattcacgcttcctcatcattctgtggtccattcagacattcttacagaatggtggcggcttttcagagcaaagcagaaacatgcttggtttcttagggatgagatctaaaattaaactctaaggccc

SEQ ID NO: 93553 - DNA, 2670 bp, Homo sapiens
  misc_feature (1717)..(1717): n is a, c, g, or t
aacccatggccaattctgccctatccccattctctacccctttccatatttttcttctcccatattattttgaagcaaatcccaggcatcacataagatcaaaattttaacatgtttttacctctacttcaggttattgttgaaatgacctgaaattttaaggaagtagctgaaaatagcattaagattggaaagaaaggcagacagattatgagaggcctataatgccagccttgtggaggagccccagagttgtttcagtagacagacaaaatctggtctgtgctttagcaactttgtttcatgaatgaataattaacctagtgagagagagagtttcagaaagttgtaatgaaaggaatggtaatgtgaaagaggccctgaagcagcagaatttttatcactggatgattaattaaatgaggggatgagggaggctttgctaacctgaatttcaagcctgaatgaggttgatgatgacattaactaagacagcagacatggaaaagtaatgtgtggaacttagggttcttggattccaaagcagttgaaagggactttgtctagcttaagcaagaaggaaatttattaaaatattagtagggagaggagggacccctaggttgaaagggaagactgaagagccaggctaagaagtgtcagagtggcagtcagccagccggggcattgctgctagagtgagcgaatgccagctatctttagtgtttaggttgtattgcttatcatccattctctagggaggaagcattggatctccttcctcctatcccttcatttttactcttttgattagaggcaaacagggactttattaatgctctcttcaaactatattgaggggaaaaggtaattctgcagaaggaaatcaggttgctattgccgaaacaaagtagaatgttcagccaaagagtaacagttgtccactgtgtaacaaacctggctctgtacatgttgcatgtgtgttatctataaggcatgcaagtagaaatgtatagcagatagttggaaatgtggttctgaagtataagaagatagatttatatagtatactggattgattttccaagagtgactggattcttcttccctagagattttaaaaaaaaaaaaataaccctttatcttggttttgactgagtggtttaaagaaagtcagctctaaatccataacttactattggattgacttttgaagagcctttcctgtgctatggattcttaattcattttgaagatccaacagcagccgtgtagaccaccatcaagaaatgaacataaaagtcttttgattgaagccttaagatttttgcactggctcttctttctgcctgcaaccactagtctgctttatgtctctaagaatttgcctttactggacatttcatataaatggaatcatatggtatgtggccttttgtgactgacttcttttactcagcttaatgttatcaagggtcatccatgctaaagcatgtgtcagtacttcatttctttttattgctggataacatttcattgtatagatttgccacatcttatttattcattcatcaggtgatgggcatttgggtttgcactttttagctatttgaataatactgctgtgaccatttgtgtagaaatttttgtgtggacatttctcttgggtacatggaagtggaatttctgggttatatggtaactgtgtttaactgcngaggaactgccaaacttttccaaaatgactgccccattttacattcccaccagcagtctatgagtattctaatttcttcacatcctcagcaacacttgttattgtctctccttttgagtttagccatcctagtgagtatgaaggaatatcttgtttttattttcatttcattttcctactaatgatgttgaacattctttcatgcgctttttggttcatttgtttctttgttggggaaatgtctatcaagtcctttgcccatttttaagttggataattgtctttttattgttgagttacaagagttcttaatagtctagatgcgagttccttgtcagatatataatttgcaaatattctctcattctgtgggttgtcttttaactttcttaatggtatcttttgaaatgtaaaacttaaattttgatgaagtccagtttatctattttttgtcacttgtgcagccatatctaagaaatcattgccttacccaaggtcacaaagatttactactgtctttagtaaagacagttttctgttactaaacagaataccacagactgggtaatttctaaagaaatttacttagctcatggttccggaggctgagaagtctaagaacatggtgcctggcatttggttagggccttcttgctgtgtcataatatggcagagggcatcacatggtgagagggcaagcaagaacaaacccactcccatgatagtgacattaatccatgtatgagggcaaagcttttattaattaatctgttcatgaaggcagagggactaagtttccaacatgtgattttttaagggatacattcaaactatagcaacccctatgttttcttctaatagtcttatagttgtagcattacataggtctgtgatctgttttgaactatttttattttattttataattattatttttttgagactccgcctcc

SEQ ID NO: 93554 - DNA, 1107 bp, Homo sapiens
aacccatggccaattctgccctatccccattctctacccctttccatatttttcttctcccatattattttgaagcaaatcccaggcatcacataagatcaaaattttaacatgtttttacctctacttcaggttattgttgaaatgacctgaaattttaaggaagtagctgaaaatagcattaagattggaaagaaaggcagacagattatgagaggcctataatgccagccttgtggaggagccccagagttgtttcagtagacagacaaaatctggtctgtgctttagcaactttgtttcatgaatgaataattaacctagtgagagagagagtttcagaaagttgtaatgaaaggaatggtaatgtgaaagaggccctgaagcagcagaatttttatcactggatgattaattaaatgaggggatgagggaggctttgctaacctgaatttcaagcctgaatgaggttgatgatgacattaactaagacagcagacatggaaaagtaatgtgtggaacttagggttcttggattccaaagcagttgaaagggactttgtctagcttaagcaagaaggaaatttattaaaatattagtagggagaggagggacccctaggttgaaagggaagactgaagagccaggctaagaagtgtcagagtggcagtcagccagccggggcattgctgctagagtgagcgaatgccagctatctttagtgtttaggttgtattgcttatcatccattctctagggaggaagcattggatctccttcctcctatcccttcatttttactcttttgattagaggcaaacagggactttattaatgctctcttcaaactatattgaggggaaaaggtaattctgcagaaggaaatcaggttgctattgccgaaacaaagtagaatgttcagccaaagagtaacagttgtccactgtgtaacaaacctggctctgtacatgttgcatgtgtgttatctataaggcatgcaagtagaaatgtatagcagatagttggaaatgtggttctgagttagaggtggtttttttggtttctggttgttttcagggtgctggtcttttccagggttttaggaa

SEQ ID NO: 93555 - DNA, 573 bp, Homo sapiens
gggaagttaagtaacttgctccaggccagcctgctggtcattgatcaccctggtttcaaaccctgtttttagctccgagcttcctagttgggacttacttaatgtcacctgcattagaatgagttgtttacagtacagtctaggagcatcttatagtgatggagaacactgcctttggaatcatgcaaagctaggttcagtcttcgttctactacttatttctaccactttgagcaagttactgtatctgttataacggaggtgttgatagtagctcctacatttgtgaggacaaatgacaaatgaggtgttgatagtagctcctacatttgtaaggacaaatgagaaatgtaggtgtaataatacagagaaataatttcctggtagctagaaatagagttattttgggtgagaagttgggtaacctggcgatgggaacaccatcttctacagtcatttctttagtaaatttcctggtatttttgttgaacggggtgtgtaagctgagggggagatttatgaaagaagacgatgaatacagatgataaaattctaataaagtttctgctgtat

SEQ ID NO: 93556 - DNA, 131 bp, Homo sapiens
aaagctgatttggtagctactcttctctccccacccccatttgaaattagtaaattaaatttttattgtgaaatatttttgttagcctgagctacatggcaaaagcctatttctaccaaaacagataaaaa

SEQ ID NO: 93557 - DNA, 132 bp, Homo sapiens
aacgtcgagggcctcttcgtgtgtcatttactgtattaccagatgaagacagaaaaactacacggtcacagagatgcagtaaaagaatttgatgaaattccatacccacgtctagagaactttttttttttt

SEQ ID NO: 93558 - DNA, 568 bp, Homo sapiens
ggacaatcaaagcttagtagcttgagctggtcctggaagagcaagtaggagctctttagccagactaagagaagggcattcttggcagaaggaatattctatataaagaagtggagtcagggaacagtagggctctttgaagaactacagattgtgttctaaatgaatgacatgtaaggtttgtaaggggcgagtgataaccactgatgaatggcagatggtgttgacaactaggcggggccagagtctgtaggatcttacatgtcttgcaatcagttttgactttgaccttggaacccagttgaggctcccttccgccccagttcctcatggcagggaaatacatcatgttgtgcgttgtaagacttcaaaactttgctagtgagaggcctgcttaatattatttaatctagttcaatttaattgttttgaaaaaaaaaaaaaacaacaacttactttgaaggtactcttttaccagtttgggaattgctactacagacaacgggaagctactgaagttttatgtagagagggaaatggtcatatctggctgcatacagacttgaat

SEQ ID NO: 93559 - DNA, 709 bp, Homo sapiens
agagcatggaaatgacccagctgccctgctgttgaaacagaatcctatttggaaggcagacatgtggcccatctctgtagccatcactgagaaatctggattttcaagggcctttctctctgttgcccaggctggagtttagcgactcaatcatggctcactgactgcagcatcgacctccggggctcaagtgatcctttcatctcagcctcctcagtagctgagactacaggctcctccagatctgcctcctgctgaccttgtacccagctgcagcgacaccgagctcctcacagcttcccaaagtgggctggcccctctcacgacagggtcatcgcacaggctccctctgtgggggaacacaacgggagtcatttcaacaccactttcttcaggaagcctattctgatccttggtactccaagcagctgttgtcaatgcctaccccaggctgctaggaaatgctttccactcggaactgagacctaaaactggaaactaggctgcaggaccacctgggtacgtgtgaattacagaggttcatgcatttccaaatgggggtgtcattttagaactggggcgtaagatgatgagcaacagaaaagacaacgccgagcccccgggtatgagctcagaactctttacatgtttgatgctccaaatggtctagggcaggggggcttcagagccttggcagcagaacgtggtc

SEQ ID NO: 93560 - DNA, 556 bp, Homo sapiens
agagcatggaaatgacccagctgccctgctgttgaaacagaatcctatttggaaggcagacatgtggcccatctctgtagccatcactgagaaatctggattttcaagggcctttctctctgttgcccaggctggagtttagcgactcaatcatggctcactgactgcagcatcgacctccggggctcaagtgatcctttcatctcagcctcctcagtagctgagactacagatccctagaagactgtggccagcaggtattagcgtcaggagataaacagaactgagagcgtttgtcactagaagacttacattacaagtaatcctatagtgttctgcagactgaagagcgatgaaacgagatggcaattctgatgcctagaagaaatgaagacaaccaaaaatgatggtaagtatgtgagttagtaagttaagaactcttctctctctctctctctctccctcccctcaccacatatgtgtgtatctgtattttctaaaaaacatgacattttaacaaaaattatagcactttattgatgagtttacaagatat

SEQ ID NO: 93561 - DNA, 696 bp, Homo sapiens
tagactggataagagatgctcagctaagggagttcctggatggtctttagattgatacaccaatcctctgaaattgcatgcaaaaatgtaagtgtgtgtttttcttttcttccttttgtgcgtgtgtgtgtttctctccctccctccttccttcctgcctgcctgcctgcctgcctgcctgccttcctgccttcttccctccctccctccctccatctctctctctctttctctctttctttcttcagggcctttctctctgttgcccaggctggagtttagcgactcaatcatggctcactgactgcagcatcgacctccggggctcaagtgatcctttcatctcagcctcctcagtagctgagactacagatccctagaagactgtggccagcaggtattagcgtcaggagataaacagaactgagagcgtttgtcactagaagacttacattacaagtaatcctatagtgttctgcagactgaagagcgatgaaacgagatggcaattctgatgcctagaagaaatgaagacaaccaaaaatgatggtaagtatgtgagttagtaagttaagaactcttctctctctctctctctctccctcccctcaccacatatgtgtgtatctgtattttctaaaaaacatgacattttaacaaaaattatagcactttattgatgagtttacaagatat

SEQ ID NO: 93562 - DNA, 579 bp, Homo sapiens
tagaaatttcttcgatttggagactgaacactagtgagcagaactgaaattgagctttaaaagatattgatgactggtctgtggataggagactttagtgtggtttttatgcagacgtcctgccagctgtaaattccctggaggtttggtatgtgagaacataagactaaacttatttctattttgttgaggagaaatgattaaaacttttcattgatgtacttctgtggcagacttttggagaattgaaccagcgggcatattcagtatttgaagtcatagatgagtaaaggaggtatgttgtagtttgcgctggcggcgtggcctgtggtcggcagggcttatctgtgaaggtatgtgcacagcttcctaaggcagtgaaaagtcctggcagtgttagtattgaatgagataatccaaaaaatgtaaaaatgtttacatttttaaagggatagttggcgatttaaatggtttctgctaacaaatcagattattcattgcagaggtaaaatattttcagaatgttaattttagatgtcgtagagagtgtacatcagcaatgacaaggtcaacaaaata

SEQ ID NO: 93563 - DNA, 155 bp, Homo sapiens
gagattgcgccactgcactccagcctgggcgacagagcaagactgtctcacaacagaaaaagaagaaagaaaagtgactttgtttgggctgcccggcaacggatcccaagatagtgattccagagcaagttgtttacgtggaggtgaagaaaacc

SEQ ID NO: 93564 - DNA, 308 bp, Homo sapiens
cccagttgggccacatctttatgccacctagtccttcaactactccaccccatccatatcaacaaggacctcctagctatcagaaacagggaagccattcagtagcctatcttccatacacagcatctagtttatccaaaggttccatgaagaagatagaaattacagttgaaccttctcaaagacctgggacagcaattaataggagtccttcacccatcagtaatcaaccatctccatggaatcaacactcactgtacacaccaactggaccttcttgtactccatcaccatctcctcgagtgata

SEQ ID NO: 93565 - DNA, 442 bp, Homo sapiens
tttttagagacaaggtctcactctgtcacccaggagggtgtccattcttttgcatgaagctcctacactaggccctaacagaccagactaaaaatcaaaacagagtcaccatgcttaagttccacactaccaaactaaaactagttgttacctgacctcctgagaaattaggagaaagaagtgacagccactttctctaacaggccagtttcaatcttgaataagcttgatagtaaacttctctctgtttgcttgcttgcttgcttgattgattgattgattgactgattgatttagaaatggagtctcaaaaaacaaaaaaaaacaggactgtaaacaaggtaataaatggagattagagaactataggtatccttatttttcttctttctacttttctatattttcaaaatttgccatgtcttcattatttataatgaga

SEQ ID NO: 93566 - DNA, 448 bp, Homo sapiens
gatttgatccctccttccaggagaaaccttctggacaggcgtctttccattaaacactcaagaagcgttctaggtgaggggactgtacctccaggtttctcctgggcccacccggttcacacccactgtccctgtgtaatcatttgatgtgcccactatgggtaattggtgctacggttcccctgcacccccctcccgcttctttctgcagacactgagccacctgtgtgcacggcccctcggtttaggcggtgtgggttctcagcctccctggtgtgtctcgctccccctgcagcccagcagagcctctctgtgcctagctacagcacgctccggaaaatggcaaacgtgctgcgggctgggcaggagcagcttccccaggtgggaacacgcccagcatgcacaagtggcacggattgaattatgtcccccaaaatatatagagagg

SEQ ID NO: 93567 - DNA, 881 bp, Homo sapiens
aaaagattgagaaatcggatggttgccatgtctgtgtagaaagaggtagacatgggagacttttcattttgttctgtactaagaaaaattcttctgccttgggatcctgttgatctgtgaccttacccccaaccctgtgctctctgaaacatgtgctgtgtccactcagggttgaatggattaagggtggtgcaagatgtgctttgttaaacaaatgcttgaaggcagcatgctcgttaagagtcatcaccactccctaatctcaagtacccagggacacaaacactgcggaaggccgcagggtcctctgcctaggaaaaccagagacctttgttcacttatctgctgaccttccctccgctattgtcctgtgaccctgccaaatccccctctgcgagaaacacccaagaatgatcaattaaaaaaaaaaaaaaaaaaaaaaaaaagaaaccattcagtagccgggcacggtggctcacacctgttatcctagcactttgggaggctgaggcgggcggatcacttgagctcaggagttccagaccagcctggccatcatggcaaaaccccgtccctactaaaaatacaaaaattagccaggcgcactggcgtgtgcatgtagtcccagctactcaggaggaggctgaggcaggaagattgcttgaggccaggagacaaactgcagtaagccaagatcataccatggcactctggcccgggcgacaaagctagaccttatctttaaaaaaaaaaaaggccaggcacagtggctcacgcctgtaatcccagcactttggaaggctgaggcaggcggatcatgaggtcaggagatcgagaccatcctggctaaaacagtgaaaccccgcctctactaaaaatac

SEQ ID NO: 93568 - DNA, 2870 bp, Homo sapiens
gagcggagcgaagccaggagcccgatcgagatgatgatggttatgcagcccgagggtctgggggccggggaggggcgctttgcgggcggcggcgggggcggcgagtacatggaacaggaggaggactgggaccgcgacctgctgctggacccggcctgggagaagcagcagcggaaaaccttcactgcctggtgcaactcacacctgcgcaaggcaggcacccagatcgagaacatcgaggaagatttccgcaatggcctcaaactcatgctgctcctggaggtcatttcaggtgagaggctgcctaggccagataaaggcaagatgcgcttccacaaaatcgccaacgttaacaaggccctggacttcattgccagcaagggggttaaactggtgtccattggtgctgaagagattgttgacgggaacctgaagatgaccctgggcatgatctggaccatcatccttcgcttcgccatccaggacatctctgtggaagaaacctcagccaaggaaggcttgcttctgtggtgccagaggaagacagcaccgtaccgcaacgtcaacgtgcagaacttccacaccagctggaaggatggcctggccctctgtgccctcatccaccgacaccgccctgacctcatcgactacgccaaactgcgaaaggatgaccccatcggaaacctgaacactgcctttgaggtggcagagaaatacctggacatccccaagatgttggatgcagaagacattgtgaacaccccaaagccggatgagaaggccatcatgacctatgtgtcctgcttctaccatgcctttgccggggctgagcaggcagagacagctgccaacaggatctgcaaggtgctggcagtgaaccaggaaaacgagaagctgatggaggagtatgagaagcttgccagtgagctgctggagtggatccgccgcactgtcccatggctggagaaccgtgtgggtgagcccagcatgagtgccatgcagcgcaaactagaggactttcgggactaccggcgtctgcacaagccgccccgcattcaggaaaagtgccagctggagatcaacttcaacacactgcagaccaagttgcggctcagccaccggcctgccttcatgccctccgagggcaagctggtctcggacatcgccaacgcctggcgggggctggagcaggtggaaaagggctatgaggactggctgctctcggagatccggcgcctgcagcgactccagcacctggctgagaagttccggcagaaggcctccctgcacgaagcctggacccggggaaaggaggagatgctgagccagcgcgactacgattcggctttgctacaggaggtgcgggcgttgctgcggcgccacgaggcctttgagagcgacctggcggcgcaccaggaccgcgtggagcacattgccgcgctggcccaggagctcaatgagctggactaccacgaggcagcctcagtgaatagccgctgccaggccatctgcgatcagtgggacaacctgggcaccctgacccagaagaggcgggatgcgctagagcggatggagaagctcctggagaccattgaccagctgcaactggagtttgcccggcgggccgcgcccttcaacaactggctggatggtgccgtggaggacctgcaggacgtgtggctggtacactctgtggaggagacccagagcctgctgacagcgcacgatcagttcaaggcaacactgcccgaggctgaccgagagcgaggtgccatcatgggcatccagggtgagatccagaagatctgccagacgtatgggctgcggccctgctccaccaatccctacatcaccctcagcccgcaggacatcaacaccaagtgggatatggtccgaaagctggtgcccagccgtgaccagacactgcaggaggagctggcacggcagcaggtaaacgagaggctccggcgacagtttgcggcccaggccaatgccattggaccctggatccaggcgaaggtggaggaagtggggcggctggcagcagggctagctggctctctggaggagcagatggctgggctacggcagcaggagcagaacattatcaactacaagactaacattgaccggctggagggtgaccaccagctgctgcaggagagcctggtgttcgacaataagcacaccgtctacagcatggagcacatccgcgtgggctgggagcagctgctcacctccattgcccgcaccatcaatgaagtggagaaccaggtactgacccgagacgccaagggactgagccaggagcagctcaacgagttccgagcatccttcaaccactttgacaggaagcggaatgggatgatggagcctgatgacttccgagcttgcctcatctccatgggctatgacctgggggaagtggagtttgctcgcatcatgaccatggtggaccccaacgcagctggggtggtgaccttccaggccttcatagacttcatgacccgagagacagccgagactgacacgactgagcaagttgtagcttccttcaagatcttggcaggagacaagaactacatcacccccgaggagctgcggcgcgagctccctgccaagcaggccgagtactgcatccgccgtatggtgccctacaagggatccggggccccggctggagccctggactacgtggccttctccagtgccctctatggggagagcgacctttgaccccaaccactgaggttctctatgcaagatggagagaggatgcaccctgtggctgatcccatccgtccctcggagcaagggcctaagagaaaagccagccaagtgcttctgaataaagatccctctctgggtca

SEQ ID NO: 93569 - DNA, 803 bp, Homo sapiens
gccaagggcagagtcagatttgcccataggagagcactgccgtcagaactcatgtatgcttgtaaaagaaccaaataatatcaaggctaagtccctggattttgaacttcaaaaaccaaaccaaccaatcagttttcagggataggcctagtcctacacctttgccatcttcagagctaaagagagatagcagatcgtcaaaataaaatcttcaattatagttgtagtcactagccgccactcagtaggttctgtgcatttgagattgttaactaacctctgagcctcagtttgctcatctacaaaatggcaataatgatagcatctacctcataggctattgtgaggattgaatagaaaaggcacataaggcacttggcacagtacctggcagcacatttgttagataccaccactaccatcaccacaaccattaccaccaccattgtcaccatcatcatcctcatcaagacaacagtgaatgggaaaaagctcagtctctggagcctgacaaactttttttgaatcctggctttgccacttcacagctacgtggcctcagataagtgacaacttccttgaacttgattcttattctgtaaaatgggaaactcataaggctattgaaaagtgtataacatggttcttcacagtaagcactcaataaatgttagctattatgattattaaaaaggagtgatcaaggtcagtggttgcctggtgttaggaggatacagagatgaatgggctaagcacagagggtttctagggcaatgagactactattctgtgtaatactataa

SEQ ID NO: 93570 - DNA, 852 bp, Homo sapiens
tttaaattttttgaagcaatttcttaggtacatacatatttggaaatgttattcttcataatatgaacctttgtcattgtgaggtatccctctttatcacaggtaatacttcttaaagtttactttgtttacagttaatatagctgtactagctttattttggtatttgcatggtatgtcttttttttcccatttctttactctcagcctttctgaattcacatgtctcttataaacatcatatagataggttttctttttttttatatggcccaacaatcttcaaattttaataggagcatttcatctatttatatttaatatactcaccaatatatttgggcttaaaatctactgttttttatgtgctttttatttgtcctgcctgatatatgttcctttttcttttcttccttgccttttttgctctttcttgcatttttttactacttttttattccattttttcttttgtttggaagttttactcttttactattattttagtcattaaccaaatggtgaaaacagatctgtgatctatcagtatttgctaactagtagttttatctttttcccagataatacaggtgttttaatatgccttactgtgatatgattttgttcctctgttgttgtgtatcttaattatctgtatgttttaaattcaacacatcgctattatgttttatgcagtcactatttaaacatactcacgtttcattgcctttcattatttctcacacctctaacttttcttcgagacattttcaatctttccttcaatatttcctttagtgcaggtctgctggtgtgagattctcctcttagtctgtctgaaatgtctttatt

SEQ ID NO: 93571 - DNA, 491 bp, Homo sapiens
gccccacagtaggtgaccagttcccacggcttggggtcctccgtctgtcaccttgcagatacaggaggtctatactgcagaccctcctaaagcagctttctctaaagatgcaaaaaaccaccaagctgtttttagatgtgctatttgctgtttttctctagcagatgcgccaagtcctaaagataaacagtttaaaatgatatggattcagtacctggaatcccattgtccatttctatcaacactttttttgttgaaagcctgatcggttccagcccagtgacctccatagattggcatgactcccctaaagccccctttttgtaagtgctagagatccttgctgaaagctgtcaagggcactttcccatcctttgggtttaaacagaaagaccagctacatgtaaaagcccatcaccccaagacaacaagtggctctggtctgctagaaaggattcatgcagttttttaaaatgaactcagaaaagaaa

SEQ ID NO: 93572 - DNA, 246 bp, Homo sapiens
ttgcctggatactggtgtcagcctagacatggagctcactagccatggggccctctcctgcggaaggaccctctcctgcggaaggaccctctcctgaagaaagctccgggactttcctcctctctcaccacaggcccaagtggattcacaggctcccaagcccgtgcggtctgggctctctgttccctccagccacacgtcgctgccactgaccctgttttttcttttcttttttttttttttgag

SEQ ID NO: 93573 - DNA, 1902 bp, Homo sapiens
agtgaggtggtttaaatattgttcaaaactctgaaaatgagctctgatggaagtattccaatgattttgtgatccaagggatttgtgcaaagctgtctagcggtacaaaaagaataaatatttagcagcttgtgtttgtcttgcccctgagtaaagtatacaggagcctgtctctgtttacccatttaaaaattttcctggatctgtttaaatgatggtgcccctggcagtgagtgtgtccaagctcacttaggaccagagtggaagagcatggaacccatcaggtggccacacaaaagcctgcagttggcttttggctctgtcactactcaggtttttgggcaactccctttacttcttttggctcagatttttcatcagttgaaagaagggctgatattaagtccccttctaggtctgactctaagctaatatttattttattgccttaactaacagaagtaaaagagagaggctgcttgttatttaatgtccaaggaaattttatccagttgtgattacttcagctgattcaaaacagcgtccttagaggcacagggccgtgcagagcctggacccatgtaagacccctctgagccgccagcctgactgctctcagtgcaaagacccagaacccagccttccttcacctgaaacagctgcagcgtgcacacacacttcttgtgcatatatctctggtctatttattttcaaaactaagtataatccaaattgaatgctggaatcagatttttccattctgaatgtgtttaaataacatggccaaggataatttctttctgttttcttgacatttataggtagtataagatatgtgacttccaaataaacataaaccatcacacttcacgaaaaaagagatctttcgacttttaactgcctgtttcctatcttaattacaagtatttctaaagaaaaccattaagttctagagcttacagtacatggttttaaaattgtataagtgctgttaagagtattgattgccttttcttggtttaatattaaaccagggtgttctgccgaagaccgcatagtttctctgatatggttccaaagggatattctttccactgaaacactgtatgtatactagtaaatgcttcctaatggtagatgataaatatttttgttgcttgtagatagaatttttccatctagtgtaagcttaggattgttttctttttcccagtgacatgtacagtttcactactccacttaaaaaaaatcgttagctcagataaagtgtgtggcacatgaaatgaattttgccaattcaccaccgaaatccctgctttatatctcttcagtggaacactaaaccaacttctttcccaagtacactgatttgatctttacaaattatatgaatgtattaaattatcacatgtgccctgaaactgtgtacatctattatgtatcattagagagatggaaaaaaaaaaaagaaactgcttagtaaagtagaaaaaatagttttaaagtaattttgtaaggctaatggaagacttactgtataaagcaaaaaggattttaaccacattcaaattattgactgttttggggcttttcaggaatcacttaaaaagcaccaagttcacagccaggcacggtggctcatgcctgtaatcccagcactttgggaggctgagatgggcagatcacttgaggtcaggagtttgagacaagcctggtcatcatggcaaaatctcatctctactaaaaatacaaaaattagacctggtggcatgtgcctgtaatcccagctactgaggagtctgaggcatgagaaacgcttgaacctgggaggcggaggttgcagtgagccaagatcgtgccactgcattccagcctggggaacagagcaagtctttgtctcaa

SEQ ID NO: 93574 - DNA, 353 bp, Homo sapiens
ctctatacatcgagctccgtacctaagtcgcggtcacggttgagattatgttcagttgtatgggacgagtgttttatacaaatagaggcttatttacctcttatgtaaaagaagtctggagttagtgatccagggtggtagagaatgtatcactgacccgtgtatcaatgacccacatatcaatgacccacgtatcaatgacccgcatatgaatgacccatgctgcttcaatcattttggtttccttctcaagatcactttgtagtccataatggctgctgtggcttcagtcattacatttgcattccatgttggaaaaagaataaaggaataaaaaccccactcactctcta

SEQ ID NO: 93575 - DNA, 1084 bp, Homo sapiens
caaaattatactcaaggaagggaccgagctggtttgcagagccatagctttggctttctctctgtcaaacttgatgccataactaaatgtcctgatcttacctcaaagatgaacaagccctctctggatttcagccttctaattcactgaaacaaggacaaccattctaacgtaactcaatggagaatttaaaggcattaaggatgctcaaaactatctagaaactgactgaacttcatttgatttccagctttgccatgtgaccttggacaagttatgtatccctttacccatctgtaaagtgagaagaataattgtatgtgcttgtaaaggttaaatgagatgatgtaagtgtttagcacagtgcttggcacactaggcactcaaaaatgatgttttactagttgaaaacaattcctttaacaaacatttttacatccccacaactgaaaactctaaaactgggaagtatgtataatgtcattatttgactttggcaattatttagtataaaacatgatttctgagccttccagcacctttaaggatggcacccttacaaatgcttaatgagcctatgggtttgtttggtactgtaatgacaagccatcgcaagtgacctctatatacagggtcactcagagcccttaaaaagataaagtcttggcattgttaattgcattagaggtatgtctccttttgtatttagtacaccaaatacttaatatttcagaatgcttattccttcaatgatttcctaagtgtatcagttgagattatgttcagttgtatgggacgagtgttttatacaaatagaggcttatttacctcttatgtaaaagaagtctggagttagtgatccagggtggtagagaatgtatcactgacccgtgtatcaatgacccacatatcaatgacccacgtatcaatgacccgcatatgaatgacccatgctgcttcaatcattttggtttccttctcaagatcactttgtagtccataatggctgctgtggcttcagtcattacatttgcattccatgttggaaaaagaataaaggaataaaaaccccactcactctcta

SEQ ID NO: 93576 - DNA, 1797 bp, Homo sapiens
ttaaaagcacaaatacactacatagagaaaggcttggttcttatcaggacacaaatttaaaggctgtgtggacttggggatggaaattaaacacctcttgtttttggttgctgctgcttgcttactgcctatgttgtccatgaaaaagaaatcagctagagaccaatttaataagctcgtcaccgacttgccaaatgtacaagaagagatcgttaatatacacaacgccctcaggagaagagtagttccaccagccagcaacatgctgaagatgagttggagtgaagaggctgcacaaaatgccagaattttttcaaagtattgtgatatgacagagagcaacccccttgagaggagacttccaaataccttttgtggagaaaatatgcatatgacatcttatcctgtatcatggtcaagtgtaattggagtctggtacagtgagtctacaagtttcaaacatggagaatggacaacaacggatgatgacataactactgaccactacactcagattgtttgggccacatcttacctgattggctgtgccattgcatcttgccgccaacaaggatcacctcgatatctctacgtttgtcactattgtcatgactaacccctgcatctactatgatgaatacttcgactgtgacatacaagtccattatctgggatgcaaccactcaacaactatcctattctgtaaagccacttgtctgtgtgacactgagataaaataggtctttgttattttcaactgttctatgctgtgacgatgaggaggagatgtctgttggattcatgtcttttgctatagttcagtagcttctgctaaatttcactgattttaatcatgctggagaccttaactcccatcctgatacatcctgaagtaacactgttttaaactttcttagtgctggagtaaaaggtcaagtccaacacctgccttaaatttaaatcatgtgatttatagtttttaagttggcataattcaacttatggtataactgggtccctcaacagtaacctgggctaaaataggtcttatgtggttcaactcccacccccgccttccccatattttcaaccactctgattatcttccctgcacaactaacatccagtaataattcttcacttttaaaattttacttctactttaaatcaatcattaaaggaatccacaaagcaaacagagttcagtctcatcttgcaaggtaaatatcatttaattggaagtagtttaaatgtctcattgttttattgacacatctatatatacatttgtgaagcaagaaacaataaaaaagcttcgtatgccattaatttaacaaaatatgtattcagtactgattgcatacaagatgcatgtttatatatatggaaggaatatagtttcatttcattgcaaaggcagtataaaagatatataaaatagcataatatgagaaattaagtccctaaagacatataggtcacatattattattgccagatgagcataaatagcttctgtttggagattcaggaaagccttagggtggaatgaggaacatcttctgagtaaacagggttgcaaaggttatgattatttcaacacaatggaagagcacagttaaggccaactaacgtaaaatgcactgaagccttagggaatattgaagggcctgacatggggaaagggaaggctagaaatacttggtcaaattttaacattataccaaagttatacccagttctacctacttgtatatttctttactcatttcaataaagtgtttgaaaaaaaaaaaa

SEQ ID NO: 93577 - DNA, 1886 bp, Homo sapiens
ttaaaagcacaaatacactacatagagaaaggcttggttcttatcaggacacaaatttaaaggctgtgtggacttggggatggaaattaaacacctcttgtttttggttgctgctgcttgcttactgcctatgttgtccatgaaaaagaaatcagctagagaccaatttaataagctcgtcaccgacttgccaaatgtacaagaagagatcgttaatatacacaacgccctcaggagaagagtagttccaccagccagcaacatgctgaagatgagttggagtgaagaggctgcacaaaatgccagaattttttcaaagtattgtgatatgacagagagcaacccccttgagaggagacttccaaataccttttgtggagaaaatatgcatatgacatcttatcctgtatcatggtcaagtgtaattggagtctggtacagtgagtctacaagtttcaaacatggagaatggacaacaacggatgatgacataactactgaccactacactcagattgtttgggccacatcttacctgattggctgtgccattgcatcttgccgccaacaaggatcacctcgatatctctacgtttgtcactattgtcatgagggaaatgatcctgaaacaaagaatgaaccttataagacaggcgtcccatgtgaagcctgcccaagtaactgtgaagacaaactttgcactaacccctgcatctactatgatgaatacttcgactgtgacatacaagtccattatctgggatgcaaccactcaacaactatcctattctgtaaagccacttgtctgtgtgacactgagataaaataggtctttgttattttcaactgttctatgctgtgacgatgaggaggagatgtctgttggattcatgtcttttgctatagttcagtagcttctgctaaatttcactgattttaatcatgctggagaccttaactcccatcctgatacatcctgaagtaacactgttttaaactttcttagtgctggagtaaaaggtcaagtccaacacctgccttaaatttaaatcatgtgatttatagtttttaagttggcataattcaacttatggtataactgggtccctcaacagtaacctgggctaaaataggtcttatgtggttcaactcccacccccgccttccccatattttcaaccactctgattatcttccctgcacaactaacatccagtaataattcttcacttttaaaattttacttctactttaaatcaatcattaaaggaatccacaaagcaaacagagttcagtctcatcttgcaaggtaaatatcatttaattggaagtagtttaaatgtctcattgttttattgacacatctatatatacatttgtgaagcaagaaacaataaaaaagcttcgtatgccattaatttaacaaaatatgtattcagtactgattgcatacaagatgcatgtttatatatatggaaggaatatagtttcatttcattgcaaaggcagtataaaagatatataaaatagcataatatgagaaattaagtccctaaagacatataggtcacatattattattgccagatgagcataaatagcttctgtttggagattcaggaaagccttagggtggaatgaggaacatcttctgagtaaacagggttgcaaaggttatgattatttcaacacaatggaagagcacagttaaggccaactaacgtaaaatgcactgaagccttagggaatattgaagggcctgacatggggaaagggaaggctagaaatacttggtcaaattttaacattataccaaagttatacccagttctacctacttgtatatttctttactcatttcaataaagtgtttgaaaaaaaaaaaa

SEQ ID NO: 93578 - DNA, 1902 bp, Homo sapiens
agtccagtttctttgcagctaccaggacagagcttggtgagataattcttttattcttcaacttttattttaacttcaatggtacatgtgcagggatggaaattaaacacctcttgtttttggttgctgctgcttgcttactgcctatgttgtccatgaaaaagaaatcagctagagaccaatttaataagctcgtcaccgacttgccaaatgtacaagaagagatcgttaatatacacaacgccctcaggagaagagtagttccaccagccagcaacatgctgaagatgagttggagtgaagaggctgcacaaaatgccagaattttttcaaagtattgtgatatgacagagagcaacccccttgagaggagacttccaaataccttttgtggagaaaatatgcatatgacatcttatcctgtatcatggtcaagtgtaattggagtctggtacagtgagtctacaagtttcaaacatggagaatggacaacaacggatgatgacataactactgaccactacactcagattgtttgggccacatcttacctgattggctgtgccattgcatcttgccgccaacaaggatcacctcgatatctctacgtttgtcactattgtcatgagggaaatgatcctgaaacaaagaatgaaccttataagacaggcgtcccatgtgaagcctgcccaagtaactgtgaagacaaactttgcactaacccctgcatctactatgatgaatacttcgactgtgacatacaagtccattatctgggatgcaaccactcaacaactatcctattctgtaaagccacttgtctgtgtgacactgagataaaataggtctttgttattttcaactgttctatgctgtgacgatgaggaggagatgtctgttggattcatgtcttttgctatagttcagtagcttctgctaaatttcactgattttaatcatgctggagaccttaactcccatcctgatacatcctgaagtaacactgttttaaactttcttagtgctggagtaaaaggtcaagtccaacacctgccttaaatttaaatcatgtgatttatagtttttaagttggcataattcaacttatggtataactgggtccctcaacagtaacctgggctaaaataggtcttatgtggttcaactcccacccccgccttccccatattttcaaccactctgattatcttccctgcacaactaacatccagtaataattcttcacttttaaaattttacttctactttaaatcaatcattaaaggaatccacaaagcaaacagagttcagtctcatcttgcaaggtaaatatcatttaattggaagtagtttaaatgtctcattgttttattgacacatctatatatacatttgtgaagcaagaaacaataaaaaagcttcgtatgccattaatttaacaaaatatgtattcagtactgattgcatacaagatgcatgtttatatatatggaaggaatatagtttcatttcattgcaaaggcagtataaaagatatataaaatagcataatatgagaaattaagtccctaaagacatataggtcacatattattattgccagatgagcataaatagcttctgtttggagattcaggaaagccttagggtggaatgaggaacatcttctgagtaaacagggttgcaaaggttatgattatttcaacacaatggaagagcacagttaaggccaactaacgtaaaatgcactgaagccttagggaatattgaagggcctgacatggggaaagggaaggctagaaatacttggtcaaattttaacattataccaaagttatacccagttctacctacttgtatatttctttactcatttcaataaagtgtttgaaaaaaaaaaaa

SEQ ID NO: 93579 - DNA, 350 bp, Homo sapiens
  misc_feature (238)..(240): n is a, c, g, or t
actgtatacatacactggaagttcaatattggtaagatttcaattttccccacattgattcattgatttaatataattccaatcaaaatgttatgaggttctttctcgtgccgctgaattccggaagatccccacatcgatgaaagcaaagcgaagcaccaagccatcatcatgtccacgtcgctacgagtcagcccatccatccatggctaccacttcgacacagcctctcgtaagnnngccgtgggcaacatctttgaaaacacagaccagggatcactagaaaggctcttcagaaactctggagacaagaaagcagaggagagagccaagatcatttttgccataga

SEQ ID NO: 93580 - DNA, 324 bp, Homo sapiens
ctcaaacacttctactttaatgttacctacatctgaaaactgcctttccatattacattcaatagcactaccacgttgctatgcctttcctccacgacactgtctgtaaacagatcctttaggtagtagggtaactgtgtgtgtgcgtgcgcatatgtgggggtgtggtgtgtgtgtgcgtgtgtgtgtgtgtttcttcaggtttaaagactaaactatctggaataagaatagtatcttatgattctttaaaattttgagcctgggctggcgcagtggattacgcctgtaatcccagcactttgggaggccgaggtgggcgga

SEQ ID NO: 93581 - DNA, 519 bp, Homo sapiens
agggaagagaaacaaacctcttccctcctgatgcttctgtaccagcaaaatcaaaagagaattaaatcttacaacaaattgcactgcttcagctattgacactgtcccacagaattcgagggacctcacctcctcgtttttggacgacagaggctgaaacaaatctttgctaagggaggctggaagttggggcaaaacattattaatgggtcacaggccagaaaggagagtcaatgagagaggattaatgaggccagatcatctggtccacaggctgggctgactcatcctgcattctgaggcttgatcttcagtgcacctacctgtgttggctcctgctagggctgcgtgagcctaaggaaataagactaaaaaaatcaagccttgtgtatgagtctgttttcatgctgctaataaagacatacccaggagtgggcaatttacaaaagaaagaggtttaattggacttacagttccacgtggctggggaagcctcacaattatggcggaaggcaagga

SEQ ID NO: 93582 - DNA, 197 bp, Homo sapiens
gaacgaggagacgcgaggaggagggaggaggaagagagggagggaggcgggaggagcgcggaatgaaaagctcggaggggcgaaaaagcagcacagcaaagcccaagttgctgagcgagcggagcgctcccgcggcccggagccgagcggccgccgcgccccggagcccggcccggccccgcccgctctgggccccc

SEQ ID NO: 93583 - DNA, 244 bp, Homo sapiens
caggctggggaaacacgtagcaaggaaatggttgggtcagactaaatacttggggtaaagctaggattcctgggttgctgagctccagtaaattccacactgaaatagagccctgggcacagtgtcctctgaccactacttacattctcctgtcatccatcgactcttcctccccaccatccacccactcgcccattcattcatctctccattcatttacccacccacccgtgcatccatctgt

SEQ ID NO: 93584 - DNA, 358 bp, Homo sapiens
tatgaaagtattgagtaaaaggaagtaaagccctctcagagtgttttgtaggctgtcacatttcactccataatgtcctagtgtttgttgccaccagtgatatatgaaggtacccactgaaatgtcacacctttttggttttcctttttaaaataaaaaataaaaaagacatttaaccatataatattgttcttatatatgatttattataatgtagattcacatctttgagttcataaaaatattgaatttggattctctccaatttcccttttagtagaaaggctaaagttcggtaagaaattctacttggaattttattgaattgagaaacatacttggatttctgtaactcatg

SEQ ID NO: 93585 - DNA, 371 bp, Homo sapiens
cgggaggcagaggttgcagtaagctgagatcatgccattgcactgtagcctgggcaacaagaacgaaactccgtataaaaaaaaaaaaaaaaattagccaggcgtggtggctggtgcctgtaatcccagctactcaggaggctgaggcaggacaatcacttgaacctggaaggtagaggctgcaatgagctgagattgcgccactgcactccagtcggaggggaagagcgagactccgtaagcctaaaattgctttacaaggaaaagcttattaattaaaaaaaggaaataaaagatagaagaaggaggagtcaaaaaggagaaaacgctggttctcagagcggctgtttttcttactatgttcctggggt

SEQ ID NO: 93586 - DNA, 552 bp, Homo sapiens
ataatatatttgataaataaaggatttgtatccagaatatgtaaaactttcttacaattcattaataagacatgtgaaccaatttaaaaatgggcaataattgaatagatatttcactaaagatatacaaatggttaacaatcgcatgaagatgctcaaaatcattagttgtcagagaaatgcaaatgaaccataatgagatgccactttgcatccactagaatggctacaacaaaacagaaaagtccaagtgccgacaagaatgtggaggaacctgaaccattcattattcattgctggtggaaatgtaaagagggacagccactttggaaaagcttggcaatttcttaaaaagttaaacctaaacctactatatgatcccagcagtttcactcctaggatctacccaagaggaatgaaaatatatgtctaacaaagacttataaatgaatgttcatagccgtattattcataatagccccaaattggaaacaatctaaacatttatcaatcggtgaatgaacaaaatatggtataagtggaatacaactt

SEQ ID NO: 93587 - DNA, 595 bp, Homo sapiens
cctgacctcaggtgatccaccagcctctgcctcccaaagtgctgggattacaggcgtgagccaccacactcggcctacgaacttctttattaatgtaatagcgcacatatacttaacttctggtttctacttaagagcatctcaataacctccgatatagaatacgatgaaaaatgaaacctgtgtgcataatgtgcttgtatctacctgtcagaagccctttgctttgatagcatttgctgcctcagtcttcctcatcacccaacctctctgggttgcttgttatgataaacctaagtgcctccgtaaatggttagagcatgtgtttcttcgtctttgtgacttcccttgtctgggaataagactgcttgtacttctcccagctttgccctctttggcctactagtagcacaccccatcgatccagacctgtctggctctttgtaacatttacctggtcacatgataaagggtgctgagtgcttgccagtgtgggtccctgtcacttctcatgcatgtcctataccttaattttaccacatgtgcttctgcttcttaaaagccattcaaataaatggagagggttttaattaac

SEQ ID NO: 93588 - DNA, 205 bp, Homo sapiens
ccaagatcttgtgtcaacagctgagatacacacacaagccccgttccctccccgttccctccccactccctcctctttccctcattctctgcatgcctgcttctgtgttcttccgcccctcgcaggggagcctgggctccgcgcacaccctctgacatggagctgggggcatcgtgcggtccccaagctctgcccctgagctaca

SEQ ID NO: 93589 - DNA, 432 bp, Homo sapiens
gtattatctgacatgtctttcctgctacctctttgcagtcctggcggtcgtgatttttattgtagatgtatgctgtaaatttatagcaagtcaaaagtgcaaaatttaatattaattacaaagggaaggggaaaggaaaatgctttttgcagcacaatttaatacgagctcctgacaatattaaactttggtgaggaaaggatactcagagcttgatacatttgagaatggtgagattgaaaggaatacaatcataaaatggcttaaggaagtgcttatctcatacagatcataattgctgtatcatgaaaacatacattgttctctcagaggaaaactgtcctttatccataaaggacaaatatttacaaagtactccagtttaatgtgtcctaattagacaaaggctaaaaagctttaaaatattaaatt

SEQ ID NO: 93590 - DNA, 588 bp, Homo sapiens
tttgcttgaacctggaaggcggaggttgcagtgagccaagattgtgccactcaactccagcctgggcaacagagcgagaccccgcctctaaatcaatcaatcaatcataactgctgaaaatgatctaagtgaaccaacggcatggaatacgtgctctttctctgtcctgggacatactgcacagaggactcaatcttagctcagctccttgggccagcatgaccttaaacaagtggctcaatatcttggagcaaccccagttatcatcattaaggtagggacaaccataacaacacaatcactctaacactaactatccaggcaacccgaggccacaagcagaccctcaaaggctgtttgtggtaatgacgacaacatccttgacccacctgctgccctgtcatgacagggagggctgcagcacaagtttattaatagatacctcatcatcttcagcacaaacctaaagcaagttttttcaagcctggtttcacagaatgtcaggttagcattcttcagtctttttttaaagaatactgacttctgggccaggcgcagtggctcacgcctgtaatcccagcactttgg

SEQ ID NO: 93591 - DNA, 596 bp, Homo sapiens
tagatggactcttgctctgtcgcccaggctggagcgcagtggcgcaatctcagctcactcaactccagcctgggcaacagagcgagaccccgcctctaaatcaatcaatcaatcataactgctgaaaatgatctaagtgaaccaacggcatggaatacgtgctctttctctgtcctgggacatactgcacagaggactcaatcttagctcagctccttgggccagcatgaccttaaacaagtggctcaatatcttggagcaaccccagttatcatcattaaggtagggacaaccataacaacacaatcactctaacactaactatccaggcaacccgaggccacaagcagaccctcaaaggctgtttgtggtaatgacgacaacatccttgacccacctgctgccctgtcatgacagggagggctgcagcacaagtttattaatagatacctcatcatcttcagcacaaacctaaagcaagttttttcaagcctggtttcacagaatgtcaggttagcattcttcagtctttttttaaagaatactgacttctgggccaggcgcagtggctcacgcctgtaatcccagcactttgg

SEQ ID NO: 93592 - DNA, 752 bp, Homo sapiens
gtgagtttgaagttcaggggagtgggctggactggaaatgtgaatttgatagttactagcataactgcttagagccgtaagactgaatgagaccaccaatgggataagtggagataaagcagagaaggggtccaagggctgagttgttgaaatccaagaccatcagctataaaatttttgaacttcataagagcaagaattttttctcatggcacggcctgctagatgcttgttcagatttctccccttctttctaagaagatcctgcctggagaggagcaacgacgtggctaatggatgtgaacatgaccaaattacgtgtaggcaaaagtcataggatggaattctaggaaagttagaaagtgtggggagcacaggcagctcagctatcatgcttttcttaacctttgtccttgccctccttcctgcttggaatgcagatagaatgctgaaggtgctggagattacatcagaaagactgaaaatttccaaatttatcttgacattatggagtaaccaaaatagccccaaactgcctgcattggacttcatattttgttagaaaaaaacaaaactcctcattcatttaagctgaggggagcggggtgggggcttacagcaaagtgtattccttaatatacatttatgttgttccctactttatcccctatatctagaaaaatgcccagcatgtgacaattactcaataaatattgattgggtgaataaatgaacatctaagaattccacaa

SEQ ID NO: 93593 - DNA, 693 bp, Homo sapiens
tttctgttccaggattcaatccaggatgccacattgcttttagttgtaatagttctttatttgttttttatctttcatgaccttgacattttttatgagtattggtcagttattttgtagaatgtctctcattttggatttatctgatatgttctcatgattcgattgcaattatgtatttttggcaagaataccacaaacatgatgctgttgtttccttgtctcagtggattgtattcagaggtataggatgtcaattaatcttattaactggtgatgttaaccttgatcacttgattaagatagtgtaccagatttttccattgtaaaattattatttattcatttgggggagatactttattctcttgtgggagatactttgaatctatgccaatttcctgtttcttctcacttttgcccattgattttagccattagtggatcttgcctgatgtaattattgctgtggtgttggtctaatggtgatttttaacttttgtcagtccttctacacttattcattgtaattttttttttttgagatggagtctccctgttgtcacctggactggagtgcaatggcacaatctcggctcactgcaacctctgcctccccagttccagcaattcttctgcctcagcctcccaagtagctgagattacaggcacccaccaccacgcctgactaat

SEQ ID NO: 93594 - DNA, 316 bp, Homo sapiens
gatggatacagggttattttttgggggggcagagggtgttaatgaaaatgttttggaactagacagagatgatgattgcttaacgttgtgaatgtatttaatgatactgaagtgtatggtttcatacagggacttgtatgttatgtgaattttgcctcattaaaaaaatactgctaggagcaatggctcatgcctgtaatcccagcacttgggaggccaaggcgggaggatcacgtgaggctaggagtttgagacctgcctggccaacatggtgaaaccctatctctattaaaactacaaaaattagccaggcatg

SEQ ID NO: 93595 - DNA, 540 bp, Homo sapiens
cacacatttatattatgagtcctgcatataagaagtcccattctctgggaatctcctttctccttccgacttcatgcccagcaggagcttttcagaatacaaggagggggaagaggggagggtcagagctgagcatgagagccactcttctgtgactggaaggaaacttccattcatggacagatgagaaagcctgtgctagaagccaccttgtagaaacatacccaggtttgagtaaacagacacctgcttagcacagtttccatactaatttttgcacatatatgattccaagattatttttattaaacatccgataagtatatatcctttggtataaatccatcaggttttgctggacctaccagaagttttagattccttacccaaacctccaaagtgtaaacctggccgggcgtggtggctcacgcctgtaatcccagcatttttgggaggccaaggcaggcagatcacggggtcaggagatggagaccatcctggctaacaaggtgaaaccccatctctactaaaaaatacaaa

SEQ ID NO: 93596 - DNA, 471 bp, Homo sapiens
ataacttcttaaaaatacatgaattataatgaatggggaggaggataaaataaagaacacccaatcactggattgttaaaacaagagcagaaagtacatagtgatagaaaacaaggcatggcgtgtgcctgggtgaagcttagaggctaacagaagagatgataagtgagcaaacttccaaaggatcactattaaagactccacaggcatcatcacggtgtatggaagttagggggatactgggaaaatactgttttttaaggttaaagttttaaaagaacttccatttcttaagcacctagtagtgccaggaattgcaccaggaattttattccaaacaaaaatctggtaaggtaggagatggtatctcaaccttgcaagtgacaccatgaagactcagacaggtgcagtaagatgtccaaggtcacaccaacagtaagaggcacgaccatgatttaaatctcatgctaa

SEQ ID NO: 93597 - DNA, 328 bp, Homo sapiens
caattcatgtcatacatcataatgctcattataatagacttcttgtcttcatgagataataataattactgagtgaggagctaagcttgagttataactcatccatttacttcctgtattacaattgttaagtctctttaattccttgcatctttgtaaaattgaaaaatactgttgacattttgattacgaattgaagtatattataaagtttggtttatggtttagatcagggttcagttaagctacagtctgtgtgtcaaagctagcccactgtctgtttttgtattgcctacatacaattctgtttcctttttaaattttggga

SEQ ID NO: 93598 - DNA, 469 bp, Homo sapiens
tttttaagacagaattttgctcttgttgctttctgaaagagttgtattgtatgtacatccaccagacatgcatgagtatggccgtttcattgcagatagcacttctccctgctggtttaggtccacacatgcctactaagtgaaggaaaaaattgggatgaaccaaatgaacttcagtaattctgtcagctcacatgttaacgtagcttggctgtctgaggttacatcctggcgctgtgaccgacagcaaatgacctaactgccctggatttcagttttatcccctgcaaagtggggtataagaggaagaataataagtgaatagacttaagtttagatttttgcctggctggcagcgatggagaagagcaaaaccaataaagtcagtttcttaggtagtaatgaaaagattgttctttattattaaaaagtgacttgtttgggaagaagtgatacattctcattataa

SEQ ID NO: 93599 - DNA, 370 bp, Homo sapiens
ataaaagccctggaaaattgctttgtaaaccataaggcactctgcatacaaaagagattactatgaatttttcctaagtgattaactcatgactcctttccatactcctcagcagtggcaacattgggaggctggattttggtgggatggaagataatgaggggactctggtttctggccagctccaggactggatgtgatggttaacgatacttaacatcaccacacagctcattccctagctggctcagtaactatggatctctaagcaatgtcttaacatttacgcttacatctgctaagctaagtatgtactgttccttgatttacatgccacattgatttttttaaggggtttcaactgtggatc

SEQ ID NO: 93600 - DNA, 273 bp, Homo sapiens
aattatttctaaaatttattcagtgtgaattcctttccccccaacacacatataatattcctcagaacatgcaaactgttctaaatgctgctgtaaaaaaaagttactaaagtccaaactgcttttgttggtttgcttctaaagctaggaaaaagagaaaagaatatgtatataggtgaaatcaaataattgggaagaaaaacagaatatctgcaaagcattaaatccaattctatttttttcatgctttctgatatctgtaaaagggagatc

SEQ ID NO: 93601 - DNA, 123 bp, Homo sapiens
actgtcaatactgctgaaatcaatggtaataccttgcatcctcattgtccaacatgattttaataaaactcctttagggccaggtgcagtggctcacgcctgtaatcccagcactttgggagg

SEQ ID NO: 93602 - DNA, 825 bp, Homo sapiens
aattcccttactcagactcttttaagtattggacctcttggatttatcctatgttctttttactgtatgttttggtcattcaatttaatattctgagaaattttgcaggcccaatttaatgtatcttttgaattttttcctgtgccctgaattatgtttgtttcggttgaaatttttccttaagtgtctggtgatccctggatttctgctcataattaaggaaaagaatgctgactcactggacccaggcagggcttctctcccagattgcaggcttgcctcggggatacacgggtttcccaaatgctagaatgaaaagagattttattttggcttgctaacatcaaagatactagtttctccagatggtttattcagaacactgttgtcttatttttatttgtctgagattaaatgtcttcccctttaattaaagggaggtctctgatgaagtaggtttgggaactgctaccttggtgacagcttgagtctttcctttagtgaagtgcagcacaattccacgtgcacggtgaccttctcttgattagggtgccttggaatgtacagaacctaacttgaatatacagcactggtttcttggataagaagtgtacagtgatctaaacttgcaaaccaaaatacagagatgatgggaccaaaaattatcaacaggaatgtccaagaaatatgatcagtgtagccatggatacgtgtcatatttgactctatgtgcttccaaaccaatcgcaaacaggcctgggcaagctgaattactgtctttgaactccatctggttggattagctcttgtactttttaacaactc

SEQ ID NO: 93603 - DNA, 343 bp, Homo sapiens
aaatgaagtgcatcatgtgaagaataaagtaaagtttcctaataaccgaattctccacacatgggaaacacagagggctgtatctgcctccgacacacactgacttggacagcccgccttccacttctcaaaggggaggacgtcggaagctttgtcagtgtttagacgtaaaaagttcctgaaggcacgttactgttctgacctatttaaatgacagtaaaatacacagaacaaaatgcacatttttaccattttctgagtgcacagttctgtggcaccaagtacattcacactgttgtgttgccatcaccaccatccatctccagaactgtctcaccttccc

SEQ ID NO: 93604 - DNA, 478 bp, Homo sapiens
aattcggaacgagggaaaggtccaaagcttaaggaaacagtggccaagttatttgaaaactgagttctgttttctacataggcttggatcttgggaatacgggatagtttgtttttaatcacaggaaccatcttatcagtttctataataactaaaagaacaaatatgagaaggttaaggaacagcttaattaaaatgttggagaaaatgacagaaataaattaattcagagagtgcctttgacattaatcatggaaaaaatgcatctcattttggtagcatacttagaaaaagcaaaataagaataaatttgcatgccaattagatgcaaagataccacacatacctcaagataaatttgagatcctgaaacaagcaattgggtctataatattttgtaacatattcatttggatatgtgcgctatctgcatttttagtgaaagaaaatgcattcaatcaagggccatagagagagt

SEQ ID NO: 93605 - DNA, 374 bp, Homo sapiens
ttttgtatttttagtagagacagggttttaccatgttggtcaggctggtctcgaactcctcaccttgtgatctgccctcctcggcctcccaaagtgctgggattacaggcatgagccaccgcacccagcccctgattcctctttttcctaaaattacttaagcacatgtatattaaacaaatgacttttcatagtggacttactcataaaccagtaattaaagtcttgatgtgtgcagaaatgcaaaacatttcccagtctgatttttggggcctctctcttataagggtttgctttcccataatgtatcgtctgctcagtgtgcttgccacactatctgtggtgacaatgtattgtcattctcttggtctgac

SEQ ID NO: 93606 - DNA, 144 bp, Homo sapiens
aaattagaatgtgtatgtatattttaatttttaaacaattttattgaggtacattttacatataaaatttacttatttcaggctgggcagagacagcagtctctactgaaaatagcaaaaatagcctggtgtggtggtacgtgc

SEQ ID NO: 93607 - DNA, 1006 bp, Homo sapiens
tgagacagagtctcactctgtcacccaggctggagtgcagtggcacaatctcggctcaccacaacctctgcttcccatttcaagcaattctggtgccttagcctcccaaataactgggattataggcgtgcaccaccacacctggctaagttttgtatttttagtagagacaggatttcaacatattagcaagtctagtcttgaactcctgacttcaggtgatctgtccacctcagcctccaaaagtgctgggattacaggcgtgagccaccatgcctggccaggcataagtacattctatgatgttcacacaatgacaaaattgcctaacgacatttcttaaagtgtatccctgttgttaagcgacacagggctacactatcttctcagccactaaagatatataaaagtacgctaatcctaataatctttaatctgagggtactgcttaacaaatctcaaagtttccataaactagccatctcactgctttaaagtaaacaaaatctccatattctgtttcaagtgtctcattaattaatagtggtaaaagcatgagcataaaaagtcacaatttcaatcatttttatcctaaacctaaattttaaaaacttaaatcacaaatactctaaattctaacctctttcaccctagagactcaatgatcttctcccactagtaaatataggtcctaccacccaaatttgattctcactatactgtcaggttctttctttcccactgagactggtcaacccagctggcctggaaaaacagttaagtggagaagtaaaaggattactttcccttctaaactaacccaaattaaagtctattctctatgaagaaacaataattaacctattctgcagctgtagagtatgacagaaagagagggtgagacagaaacagagatctctaagatcttgagaaagaacaaatacacacacattagtaaagtatgccatcatctttatttaaaagcagcatggtcacacatttgctc

SEQ ID NO: 93608 - DNA, 477 bp, Homo sapiens
cattgagtgtcaacttgattggactgaaggatgaagtactgttccttggtgtgtctgtgaggagcatgttgatttggcaaagaacaatttggctttgaagagggagcaccattttgcctgtttctcatgtgtgagcagacggactcagaaggcactggttccaatccagatttgctgttaagcacagcgccctccacaaccatccatgaagtggagcagaagaacttccgcctttcagagcaagcctcctgggattcattgattttgtaattccttgcctctatttgtgttataatacattgaaaccaaagctagcatttcaaaaatcaggaccaagtattttagttactcgggaccaagaacataaagttcctgtgaatgaaattaacataaggacagagccgttcgaccaagaaaaagaaaagtccaggagattaaagatacaattcagatgaactgttacaaggtaactccatg

SEQ ID NO: 93609 - DNA, 381 bp, Homo sapiens
aaaatatgccctcttccagcttaatcaccctctttgttaaagaaagtcaggtcagggagaaaacaggcaagaacttgagcgtcagaattgcacgtccgcgtgtttgtgcggggctggaacttggcagctcccgctgaaattaaagcgcgagtcttgcgccccctcatggccccaggcggcaccccagcatctcccgctctctggacaagcccctcccccgctgattgtatttcacattgggagcccagacagggtggtctcgccgggtggctgtagctgtggatgacgagttggttctaggactgaggcctgagggcagctcagcctggggccccttgagcacgcagtcacagagcccaggattcctcttaaagagcacag

SEQ ID NO: 93610 - DNA, 563 bp, Homo sapiens
gggaagattgcttgagcccaggagttaaagtccagcctagacaacatagagagactctgtctctaagaaatatatgtatatatacacatacctatatatgtatttgtgtgtgtgtgtatgattagggactttctgttaggtttatttcagcatggtttttccaccatgtgtttctttcaaatgcagagctatttctctgtataaaataaacacattatccttcaacagaaatctgaaatgagccgggcatggtgacacctgcctgtaatcccaccactttggaaggctgaggcaggaggatcgcttgaggccaggagttcaagactagcctcggtaacatagggagatgccatctctacaaacaattaaaaaaaattagccgggcctggtggcttgtacctgttgtctcagctacttgggaggctgaggcgagtatccgcactccagtctgggtgacagagcaagaccccacatcaaaaaataagagagaaatctgaaatggacatctgagtttgcagtttgcccagtgcagtgtttctcaaacttgccaaatcatcaaaatc

SEQ ID NO: 93611 - DNA, 527 bp, Homo sapiens
gctattaatattatgtggcaggccatatcaaggcatggagaatacagtggtaaacagaacagatcaaacctctgcccttatgttggtgataaatgctctagcaccttggtaatcaaaatacctccgtattagcagtttatcggaaatgcagaatctcaggccccaccccagatctattggatcagaatatcctttaaacaacatcctcctggagtttcatatgcattttcaagttgagaagaaatagataaaaaaataagtaaaataaggaaaataggaagagtttggggagcttaatgggagattatgtaagagagatatgtggaggtcaaatgcccagggctctgtgggttatttgaaggacgtgggcttttgctctgagtggggtggcaaaactggagaggattttgagacaaggcatggtgtaatgtgactaagtataaattctatgtagcacagccttaaatgttagagaggtagaaaacagatcagtggcggcctggcaacaggggataggccacaaaagg

SEQ ID NO: 93612 - DNA, 675 bp, Homo sapiens
agcacttctaaatgctagtgggaagaccaaaaccatataaaatatatatcatagtcatttaaaaaattagtttctgctatgaggcagacttagcttgataaatttcaaatagcctttctcaatatcagaattttttttcttttgttactggttcagtaacaatcaacaatatcaagcaattagatgaattaatgaaagccacaggatatatgatatctgttaatagagaacattcagaaatgaaaaaaaaatttgccaacttccttctagagcaaaacattcttctggagcacaattctcattcattgaatatccaactgtgaaaccactaaaggaactgcccagcagatcgccttaaagcagcagttctcaaatattttggtcttgggacccttttacactcttttttttttttgagatggagtcttactctgtcgcccaggctggagtgcagtggtgtgatctcagctcactgcaacctctgcttcccgggttcaagtgatttgatcctgcctcagcttcccaagtagctaggattacaagcacgtgccaccacgcccagctaattttttgtatttttagtagagatgcagttttatcgtactagccaggatggtctcgatctcctgaccttgtgatctgcccacctcggtctcccaaagtgctgggattaca

SEQ ID NO: 93613 - DNA, 492 bp, Homo sapiens
atgtcaatgggccagggtggaagtggggaggccaggtaggaggctccacagcctctgagtgaggccagccctcagcctgcacaccagacaccccacactctttcaacaagacccccaccctgtgcagccagcctcatggccatctctggggtaaaacataaaatacccagaggggtgaggacagagctaaagatttcttaagaatctgttagtgctggacatggtggctcacgcctgtaatcccagcactttgggaggccgaggtggacagatcacttgaggccaggagtttgaggccagccttgccaacatggtgaaatcccatctctacaaaaatataaaaaattagccaggcgtgggggtgcacgcctgtaatcccagctactcgggaggctgaggcaggagaatcacttgaacctgggaggtggaggttgcagtgagccaagattgtgccactgcactccagcatgggttacagagcaagactccatc

SEQ ID NO: 93614 - DNA, 419 bp, Homo sapiens
caacattgacattattatgcaaccatcactgtcatccatttccagaatgtcttcaccctcctaaactgaaactctgtccccattcaacactaactccccattcacctccccagcccttgacagtcaccattctacttctgtctcgatgattttgactactctagggacctgataagtgaattcatacaatgaggtgccctttttgcgactggcttatttcacttggcacaatgtcttcaaggttcacccatgttgtagcctgtgagcatgggtcagagttcacttccctttcattgctgaatgaaattccattgtttgtatagatcacattttgtcaatgggcatttgagttgtttctaccttttggtgactgtgaataatgctgctaagaatactagtgtcagccaggcatggtggct

SEQ ID NO: 93615 - DNA, 817 bp, Homo sapiens
caggtgatctacctgccttggcctcccaaaatgctgggattacaggtatgagccactgtgcctggccacaaataatttttataaaggaaagaatacaagcttgctttttagagttttagaattaactcaaaacagaagaagtaagaattaagttgactcttaacagatttttagctatgttagtcaaggtataaaattcggagtgcaaagtgaccttagagttacactagtagctaatttagtaacttggcattttaagctgaatgaaattaagactttgttttaccctgttactttctaatttgcagttttaatttgatcaatttataggtttttataaatatcttaaagaaggtcctttctctaattttataagatcttaaaaataataaatcgttattaatttgtgttgaactttttctccatcttatgattggttttttcctttacagcaaaaagtattttttgggcaaaattgcaaaattgcttttttcaatttattcatgtgatatgttacattaatagcttgtctatattaatatttaacaatttggtcatgattttaaaagtacatagttaaatttgttgttaaaatatcttatgatttttctttcttaagattgtatcatcttcatatataaactgactagattttcctgttgtatttttattcctgggaacatgttgcataaaatagaaattgtctcttccttaaaggttttgtttaatgtgtctataaaattgtatggaaagttcctggtatgtgttttttgggaaaatttgttttctgtctttttttgtggtaaaatacacataa

SEQ ID NO: 93616 - DNA, 427 bp, Homo sapiens
gtcctgggcaggccacaggcctgaagcaggaacaggttggagcagggaagacccctcaggacattccccatgtttgtggccttctgtctgggagagggggatgggatcaggggtcacactgtggtgactggatctgccattcacttagtcacctgttgtgtgatgccaggcaggtgacgtccttccttgggcatctcctctataaagggcttgtgttctcctggggtttgcaggcttctttaagaatctcttcctccctcattaatcctacaggtcccaactgagcctgttctcatgccaggagctcctggcacactcctttcatcacctgccggagctgggctctattatcatccctatttgacagaagagcacaccaaggcccagaggctactgctgcctggcggtcagccttctcctcaccagt

SEQ ID NO: 93617 - DNA, 375 bp, Homo sapiens
actcgctgattacagtttatactatggacgccaactgatgacaatctgtaccatggattacctggttctgaatgctctgtcctttgtctgctatgtaggccattcacttaccaaccttccccttaccctctgttttccagacttaatatccttccctataatttttcactgcctctggaactcacaaagttgttttccttctttgcatagagactatcctttccttaactgctcccttcctgagttcatccctattcatcacagagatgtcatgcataaacgtgctgtacctttcccaggaaaggagttcttcatcaccgaaacaaattcatatcctgtgttttgtcttcttagaataactgttctctacttttt

SEQ ID NO: 93618 - DNA, 392 bp, Homo sapiens
aatacattgcgccatgatggctacgacataggaatttttcagctccattataattttatgggatcaccgttgtgaatgcagtgcattgttaaccaaaatgtcattatgtgttatatgactgtatatataatctcgacttttatttgtaccaatatatacaatgggaaaagttgtaccatgcaaataccagttagaaaaaaaaactattgtaatgatattaataacataatacaaagtatattttagagcaaagaatattaccaaagatgaagtttcatagagataaaatagtcaaggcatgaagaggacataaaaaattataattatttgaaataaaagcataagaaggaggtcttaagacacttatgtgccctttagtaaaatgattataa

SEQ ID NO: 93619 - DNA, 767 bp, Homo sapiens
ggggagtgggtgccagtgtgcccctgtcctgagagctgagcttcagggccaacagggcaagtggctcaggacccactcaaggtgcctgtggtgggaggacagcccagccctccaaggtgaactgaaaaaacacatgccagtgagttttaaagctgaaggctggaaagctcttctccattgcacggctctgatataccggcttggctttcacaggaaaatcagctgtgcgtggggtgtcctctgagattctcctaattgctttgcaggtctaaacataccgcacaatgctgtcagggattgctatggatagccaactccattctgctaaacaaaaccagtaatttggaaaaattacagccctggatgccatcgttggcaccacaaggacgacctccctgctaactgttaaaaaaagaaaaaaaaaaaattggcggcacaccaggccaaggaaggcctctgtgtaagtgtggaatacgacaatcctttaggaaaaaaagcaaaatagaaaactgaatgaatttttgatgatttaacctaggacagtggggtcttagagggctgtggctgtttcatttggaatagttattttgtaacaaaaagggcatatcctgcttcccagccttaaccatatgcaagcactgtttagcaacttgctcctaatgacaccttcctctgaaaagctagttcgccatgaaacagatatttatgaggcctgtggttcatcttcctagagattcccataaacacaggtgtgtggacacatctga

SEQ ID NO: 93620 - DNA, 473 bp, Homo sapiens
tatttgtacctttgccatttttattccccagcagataaaacaaatgaccttcaagtttgtactctcagcgttactcaagactcagtggttaaacatttcctcctctcaagctctttcacaggtcagcttagtcaggtcactgttcttttgataatttagtgatgagagaactattagattttcagtttcctgttctacaagtgagtttgaacataaatggtgttggacagtggttttgaaatctggctggtcccagaatcacctgaagcttttctttcctcaaacatttccaaaccttaccccaggagattctggtgcaatgagatggttaaatgtggtagacttagcatatgcagtgataatactgcaatctttcctacatccccactaaaataaataaaaatgatattcattttaacccacaaggacagatgagagaggagaccatagcagatgaaatagcgaaagctgca

SEQ ID NO: 93621 - DNA, 278 bp, Homo sapiens
ttcaaccagcagcaatctcctgcaggagagtgaagttggaatattggtttccctggctgactccctgttggtttttggctaaaggctgcagatcctctcagaggcccttgctgcaggtccgagtcccctgactttgagtagttactccctccccttccttttcttcaagcttaggaggagtaaccatttcccgccattgctaattctagggatccacatcatattccttaccccctcattaaactttcctcaatatcttttttcttgccagtatcatg

SEQ ID NO: 93622 - DNA, 224 bp, Homo sapiens
tgctctttcagccatttctttttatttacagtttgtgttcaatgcaaatcaattccataagaagttactatgaatcaaagcgtaaatacacaaacacaatatacaatccaaaatagatgtacagcattctggaataaagcaaaagagtgttcattcacacacacagtagcttcaaaactgttcgatctgtttgttctcatgtagttttgtaaagatggaaaaaa

SEQ ID NO: 93623 - DNA, 1014 bp, Homo sapiens
cgcgtgccctactggcggtggagaggctgggcgggccccataggatgcccgctttggagccacaggacctcaaaatacgctccttacaacgtgttttatagagcgaagtctcgctatgccacccaggctggagtgcagtggcgccatcgtagctcaccgcagcctcgaacacctgggctcaagcgatcctcccgcctcaacctcccgagtagctgggaccacaggtgcgcgccaccaagccgggctctaacagtttttaaccagacctgttgatggtttctggggcgagcactagctggggatttttatatcagctggattagttttttccccctaaacgagtctacaaaatcccggacatttccagggtcctgagacggttccctaccttccttctgcgcagagattgcctgttggggatgaatcgcttagcgagacccagccatagctggctacgctgagttccggcccgggaccgcgcggagaggcaagatctattcccgaccctctcatctggcagacagaacccaggcttcaggaagagaagcggctttcgcagtttcacgctaggacgggctgagctgggaatcgatcccaaattccacagtcccagtcctctcctgggtcctgctctcctgactgcgtctcaggcccagaggtgatggggcacttagggttagggaatggcagacctggagaaaagggttccgctactaccctcggctttgccaaacttaacattttgaaattccattccacaaatgtgtactgcgtctctgggaacaagacagcgtaatgagcatcgtgagaaatctaagacgaatccctaaaccggcgctgtctttaaagagattacaaccatgctataattacatacagagctgtatctctaataaggacccaaccacggttttatctggctagtttttttgtttgttttgagctctggttatttcccatagccaggaaaatcaaaatattaaaaacaagggataggggaaggccagaagaaaa

SEQ ID NO: 93624 - DNA, 961 bp, Homo sapiens
cgcgtgccctactggcggtggagaggctgggcgggccccataggatgcccgctttggagccacaggacctcaaaatacgctccttacaacgtgttttatagagcgaagtctcgctatgccacccaggctggagtgcagtggcgccatcgtagctcaccgcagcctcgaacacctgggctcaagcgatcctcccgcctcaacctcccgagtagctgggaccacaggtgcgcgccaccaagccgggctctaacagtttttaaccagacctgttgatggtttctggggcgagcactagctggggatttttatatcagctggattagttttttccccctaaacgagtctacaaaatcccggacatttccagggtcctgagacggttccctaccttccttctgcgcagagattgcctgttggggatgaatcgcttagcgagacccagccatagctggcctctcatctggcagacagaacccaggcttcaggaagagaagcggctttcgcagtttcacgctaggacgggctgagctgggaatcgatcccaaattccacagtcccagtcctctcctgggtcctgctctcctgactgcgtctcaggcccagaggtgatggggcacttagggttagggaatggcagacctggagaaaagggttccgctactaccctcggctttgccaaacttaacattttgaaattccattccacaaatgtgtactgcgtctctgggaacaagacagcgtaatgagcatcgtgagaaatctaagacgaatccctaaaccggcgctgtctttaaagagattacaaccatgctataattacatacagagctgtatctctaataaggacccaaccacggttttatctggctagtttttttgtttgttttgagctctggttatttcccatagccaggaaaatcaaaatattaaaaacaagggataggggaaggccagaagaaaa

SEQ ID NO: 93625 - DNA, 1365 bp, Homo sapiens
aatcaaaggtgggaggattttccctaaactgacttagcaggactcttgttacaattggactaggcaggctgaagacaggatgcaaggacaaagcttgttgaaaagaggcctcagaggagctcatctaaaatttggtcaaggggagggtctttcttggtccctcctcttgttcaagggaaaaagagacattcttctttcctttgaacaatataagtcaatttctcatttggtggcctttttttcattaaggacaagctgagccccctgctgaaacttggtagcagggcagccagttgagaagatttctagatgtcaaggcatctttagatgatggggtgaggactgcagtggccatcccagatcatggattttctggtttgcagtttgaatgtccttggtgatggcatagacatcagtgtcacagtcatggttatttttccgagcagagtgtagaagtgtccaacttcatcttgaagggcttctttaggcagtcacaataaagatctgggaagttaggttttagttctcagtgatgccaaatcaggacagtgggagaaaaattaaaaacctcagtttggagagtggtagccagatagtaaagggaactagaagaactgagaatttggtaaggactgacaagctgtgcatgatgacaggatcccgttcaatttacaagtagataacaaaacctgaaagacaagtacaggaccagaataataacccataagaaggtgctatagtttttataaaatatctttctacagtcatcccccttttttgatccaaattaaccaaagtaagattattcttgtttacaaaataagtcttgtctcattatatttgacttacttatttgcataattgcagcaagaatggcaactgaccaggtaggcttatttaagtttgcattgctggaactttttacaagtaatctcagattatgctttcaagagttcttgaagctataaagccaagtcaagcaccaccaggccttatctgcaatgcctagagattcagatgggttcttctcttcttgaggtcctaaaaacatcctgagtttctttggcctgccagaaagtcaccttcctgactcacctgtaaggctgggaactccataatccaggtaccaggcagactttccgggagggcttcatatgcattggctccataaagttaaccttagttcctcaaaactgtctgttcatatgtgattttatgtcttattctcagttggaaatgcagaaatcacctgtcttctgcgtcgatcaggctgggagctgcagaccggagctgttcctattcggccatcttggaatggacccccatgtcttattctcaaataaaacattttggtcaaagccttga

SEQ ID NO: 93626 - DNA, 473 bp, Homo sapiens
attgcaaggcagatggacacagcagcagcacataagagcacacgcgtggggctccagcccggccacggggagaccttttctcagcaaagggcagcactgctcgctttgctggggcagccctcccaggaagatcccagaagagatggtctgaggccctgaaagcagcagatctcacctgcattggaggatgagacgccacatgaagaagaaagaagacgccacagacagcagcgcagtaccaccttccagagatgtcctaaaaacatcctgagtttctttggcctgccagaaagtcaccttcctgactcacctgtaaggctgggaactccataatccagttggaaatgcagaaatcacctgtcttctgcgtcgatcaggctgggagctgcagaccggagctgttcctattcggccatcttggaatggacccccatgtcttattctcaaataaaacattttggtcaaagccttga

SEQ ID NO: 93627 - DNA, 1127 bp, Homo sapiens
ctgttcttgaactcctgaccttaagtgatctgcctgctttggcctcccaatgtgctgggattacaggcttgaaccactgagcctggcctactcctttgctatcttaataaacttggtttcagcttactttatggactcgccctaaattctttcttgtgcaaggtccaagaaccttctcttggggtctgcatcaggacccctttctgccctttctggtaacagtaccataataacaaatattatcgagcatattttcatgtaattatttgcaacttgtatatcttctttggtagagtgtctgttagaatattttgtctatctaaaaattgggtttgttttcttattattgaattttgagagtgtgttatatgttctggacacaagccctttatcagagatatggtttgcaaatatttcttctagtctgtgacttttctctcttaacaatgtcttttgaagagcaggtgttttaaattttgatgaagtcagatgtatcaatttatgattttaataaatcatgcttttagcatagtatttaagatacttaacccaaggtcacaagagttttcttttagaagttttagttttaggttttgcatttaggtatatgatccattttgagttagtttatatacattgtgcaaggtaaggactgaggtttttactttttgcatatagattaccacttgtgccaacctcactgttgtgatgatatgatagaaatcactgtcttttctccactgacttgcttttgcatctttgtaaaaagttggtcatgccaatgaaactgacccaattttcccatagaactgatgggaaaattgaagtggactctccaggttttaaagcttgagaaacttacatttgtcttatctgagtttatttctcaggaaaccagctgtcaggcctcccagatagtatcagaaagctgaagatttccagatcactgcatcctaacagcaaggtgccagaaccctgattcaactacctactgcctgttgagcaactcctacataaactcctaactttattggttacagagacagattttagacttgtctcccatatcctggctggcatcaccagcaataaagcctttcttcctggcagtacttgttgtctcagtg

SEQ ID NO: 93628 - DNA, 550 bp, Homo sapiens
attgcaaggcagatggacacagcagcagcacataagagcacacgcgtggggctccagcccggccacggggagaccttttctcagcaaagggcagcactgctcgctttgctggggcagccctcccaggaagatcccagaagagatggtctgaggtgtgtgaacactgtgaatgtcatggacaaagctcagcgtgggaccccatgggacttcaggccctgaaagcagcagatctcacctgcattggaggatgagacgccacatgaagaagaaagaagacgccacagacagcagcgcagtaccaccttccagagatgaaaccagctgtcaggcctcccagatagtatcagaaagctgaagatttccagatcactgcatcctaacagcaaggtgccagaaccctgattcaactacctactgcctgttgagcaactcctacataaactcctaactttattggttacagagacagattttagacttgtctcccatatcctggctggcatcaccagcaataaagcctttcttcctggcagtacttgttgtctcagtg

SEQ ID NO: 93629 - DNA, 211 bp, Homo sapiens
  misc_feature (156)..(156): n is a, c, g, or t
  misc_feature (205)..(205): n is a, c, g, or t
  misc_feature (207)..(209): n is a, c, g, or t
  misc_feature (211)..(211): n is a, c, g, or t
atcctagtaggttgtaagcatccaagaaataatcatttcctcttagtttttttacttgttagcatatatttgttcatagtaatttctactgattgccacttctacagtatcagtgtaatgtctcctttttcattttttattttatttattagagtnttctttcttttttcttagtctagataatggtttgccaattgtatttatntnnncn

SEQ ID NO: 93630 - DNA, 779 bp, Homo sapiens
taagccagtttactaatttattaaatttatttataagaaatacaattgtcaaagcagcagctctcacccaaaagaacagcccattatctccctggagcagacttagattgaaacttaaaaactgttttgatccaaacattgcttactaaaatgccaagaaatcaaaatagtaattaatggatagtaactaatgtagccattgattaccatgtaactctgggtcactattcattagtaaaacgagattgaggacttcaaaaatgagtgaagattgctaagggtaccttaagaatagggttgtcttccctattctactgtcgaaatatgggcgaaatgggcgattatacacaaaaatacattctcagctggaacgctataatgtatcatcacaataaggaaaagtaaaaaataattaaatagaaaaacatggccgtgtttcataacatactcaagacagaaaagagcaaaactcaccaagtgtttaaattatgagttatttcaactgttacaaaaatagaaaacagatatacaattctttaaactgggtcagaatacaggaagatgttaagaatgagatcagcccccaaactgagggcaaagtggtgggcgtggatcaaccaaacgaaaataaactcgacttaacgtaggagcagtttcactctactgtactttgagatatccagaatatttaaagagaggagaaccaggactcttcccctggcccccagtggtctttcatcatagaaaatctgttgagaagaggcaagaggaggtgtgtg

SEQ ID NO: 93631 - DNA, 414 bp, Homo sapiens
accatgagagtgacctcaggtggccctcactgctacactcccaccagcgctctgacagtttacaaatgccatggcaacattgggaagttaccctatatggtctaaaaaggggaggcattaataatccacaccttgtttagcatatcattaagaaaaccataaaaatgggcaaccagcagccctctgggctgctctaaggagtagccattctttattcctttactttcttaataaacttgctttcactttactctgtggactcaccctgaattctttcttgcacaagatccaagaactcttggggtctggattggtaccccttttctgtaacatcttcatgccagctataacgtgaataacacaatgcaagacagtggataagcaaactgtgattatcttcaaataatatcagct

SEQ ID NO: 93632 - DNA, 391 bp, Homo sapiens
tgaacctggtggagcttgcagtgagccgagatcgcgccactgcactccagcctgggcgacagagtaaaactctgtctcaaaaaaaaagaaaaaaaaaaaaaaagaaaatacatacatgtctcatctaaaacatggttggtcaacaactttctgatttcctgatacacattttattaaccggctccttaaatatatccatgttgcatatcatgtttgacatgctttcattgtagcttatagaataatttcaaatagaattttgggataaaaattatgctaccttaaaataggttatgaagtatttgaggtattctctttttatatgataggtaaacttggcttggaattaaaaagattttgaaagttgcttagggagctccctgcttttgtg

SEQ ID NO: 93633 - DNA, 1126 bp, Homo sapiens
gctttctggagagcagatggtggggatgggggagggggagcagggggcaggacaggcggtgaacaggagggagtctgaaagttttcagagatgagacatttgcgtttctcagctcccatggcttcttgcctgaaattgtttccctccataggagatttgagtaaccgatcccttgacaaacaacttaagacagctggagctctaatcatcaaggatttttatggtgctgcttttgaagtaaaaatagtgaaaccccttatggcatttcaagtggaaaaataaataagactggctgtccaaccagccggatgtaaggtgatggctggaagtgccgagagtggtgtggttccatgttgtaggtatgcacgtgctcccatggccatgacctttgagacagtgtaggctagtttgtcaggtcctgtgctgagtattcacctctgaatctccttcttctagaaagcatggtaggaatactgcctgtccaaggcacagggctgtcgtgaaggttttattgagtcacagtcgtgaagggctttggtaatttcatagaagatcacctgttctacctaggctttaaatttgttgctataaaattgagtatggttttctcctgttcacttaagtctccccattgtcactttattccttttttcattcaaaacttgccaaagatttgtctattttagaggtattttcaaagaaccaaacttttatcgatcatatctgctgggtaattttcttacctgattcttttatgcttttatctctgaattcttcttttctgtgtttctggatagatttcgtggttctgcaaagtcttgacaagctgaggagtcatacctggaaaggatggtttgttcaacaaacattgagaccctgtactaggcttgctggggatttcaggggcaagactcagacctgactcttcaggagctcatgattgtagcctagtgggaagacttaacaaaatagacaattgcaaattccaaaaacaaaacaaacaaaaaaaaggcttttgtgtccctactctcctgtggcgacacctggatgataaatgaagccaagattattgcttattttgctctccctcggaaagcagctttctgttttaggtcaagcccgctta

SEQ ID NO: 93634 - DNA, 477 bp, Homo sapiens
tctccacactggttcatggagaagacaaaggagcaaggtccgaaagctctgaagaacgttagagctgagaatcatgaatatgattacttggctgcacaaagtaagaatatgagaaaaaaacaggggagttgagggagaaataggagaaaatataaaggcattaatttcttcatttcctttaagaagagttgatgggtattatgtttggcaaaatgtgatgaaatgtttaaactgcgaaataagtacaagggtgttccttatgcgattagccattttattaagtatttaaaacacaaattattttaaagaattacatctgcaagtgacaaagcaagacaagaggcaagtaccaaagtgtgtaacaacctgtgtttttttttaaagtggagcctactgacagcaacgtgacaaaaccactctcttgtttgctttctcctggactatcctgaatggggaagagaggggtggaattacaag

SEQ ID NO: 93635 - DNA, 393 bp, Homo sapiens
attgtttgaaaaattcaaaattatgatgtatgtcattgatcaccatttgtaatttctaatcaagtgaaatattctgtgggatagataattgcggatgcactttttgtgagttaatgatatgttctcataatgaaacaggatcatgaggctaggttgatgtgatgtcatatttctctgcagtctacagtatgcttccacgtttactgtcatatctcctattagcaacattttgttcctctacaggtaatatacaaaaatatctcctacctatgaaaatttaaattttagctcaactgtttcatgtttattataaaagaaaataaaaaataagtaaatacatacaaagcagtaaaacaataacaaatacccccaaattaaagaagttcaacctgc

SEQ ID NO: 93636 - DNA, 477 bp, Homo sapiens
ttcagttacttttttttggagtgattgatgttccagtattcttctaaacaaccacgggtacaaatgtgaataagataggaccgttgcagtccaagagcttgttctgtagtcctttcctttatatgattttttcccctgatttagaagtctataaagcaaagctaagtattacacactgataatggctgaataaatcaagagcaagagataggatactttgcaaatatgcatatttattaaaaatgtactttaaaatagagattaaaattctcgtattgaatgtagaataggtaagcatttatttgtgaaatactcgaatgcttcatgtaaatactttctgagtttgtatttttagaaaggaacattttggaggctgaggcaggagaatggcgtgaacgtgggaggcggagcttgcagtgagctgagattgtgccactgcactccagcctgcgcgacagagcaagattctgtctcaat

SEQ ID NO: 93637 - DNA, 212 bp, Homo sapiens
accataaaaaaaaaaaaaaagtctctgtcctttactttattttcattgagccccggtgaagctgtatgaagtccatactgctgtcaccctattttacagatggagaacctaagaccagaggtgcaggagcttcttgttgagtttaacgccgtcttgcagaatggatatcctagaatcctggacctgagtttgggtcctggctcagccactga

SEQ ID NO: 93638 - DNA, 180 bp, Homo sapiens
gtccagtctctctgggcctgcactgtccagccgccctcttatccctaagccaaggctttcaccagctaaagctcaggagtaaagtggccatcactgaggccattctatgtatgcatgtatgcatgtatgcatgtatgtatgtatgtatgtatgtatgtatttagagatgaagtcttgctc

SEQ ID NO: 93639 - DNA, 415 bp, Homo sapiens
tggctcttcaccggaggaaatgtgagccggatccaaagggtcgaggggactggggtgcccccgtgacgtctaagagcaaatagaagagggcggcctccaggctaaagctagggcactggggagccccggagaagcctgcctttcctagtctgtggctcagtccctgcttccggcttccggcgcgcagcagcgggagagcgacgctggccccctggcgatcctggcgctgcgaccgcggtggtagcgcgaatgggaggtggagcggagccactgcgccgagggacgcttcaaaaactctttgagtttcagcccttcgcggatccgaggatgtgacagttgttcgagttaaagggtcttaaggcgatcggttgatccaaaagcagctgaatctttagaagacccacgcaggaggatt

SEQ ID NO: 93640 - DNA, 1753 bp, Homo sapiens
tagtgatatggacagtgaagtccaggctgagttggtctcagatgggagatgagaatcttattccgaactggagtgaaggtcactcttggctgtgctttagcaaagagagtggtggcattgtgcccctgctctagagatctgtgaactctgaactcgagagggtatctggcagaaaaaatttctaagcagcaaagtgttcaagatgtggcctgattgcttctaaaagcctatgctcatttgcatgaacaaagtggaacttatatttaaaacagaagctgagcttttataaaagtttggagaatttgcagcccaaccatgtggtgaaaaagaaaaatccattttctggggaggaattcaaggctgcagaaatttgcataagaagagcctcatgttaacagccaagagagtgaggaaaatgcctctagagcatttcagagaccttcacagcagctcctcccatcacaggcatggaagcccaggaggaagaaatgcttttgtgggccagcccagggccccactgttctgtgcagccttgggacatggtgccctgcatcccagccactccagctccagctgtgactaaaaggggccaaggtacagcttgggctgctgcttcagagggtgcaagccccaagccttggtggcttccatgtggtgttaggcaggtgtgcagaagagttgaggtttaggaacctctacctagatttcagaggatgtatggaaatgcccggatgtccaggcagaagtttgctgcagaggcagagccctcatagataacctctgcgagggcagtgtggaggggaaatgtggggttggagcccacacagagtccccactggggcactgcctagtggagctatgagaagagggccaccatccaccagaccccagaattgtagatccactgacagcttgcactatgcacctgtaaaagttgcaggcagttaatgctagcctgtgaaagcagctgtggggactatatgcagagccacagaggcagagctgcccagagccttgggagcccactccttgtgtcagtgtggcctggatgtgagacgtggagtcaaagatcattttggaggtttgagatttaatgactgccctcctggattttggacttgcatggggcccatagcccctttgttttggctgatttctcctatttggaatgggagcatttacccaatgcctgtatccccattgtatcttggaaataactgacttgtttttgattttacaggctcacaggaggaagggacttggctggtctcagatgagacttgacttggacatttgagttaatgctggaatgagttaagactttagggggctattgggaaggcatgattgtgttttgaaatgtgaggacatgagatttgggaggggccagggtggaatgatatggtttggctgtgtccccccacccaaatctcatgttgaattgtgatcctgagtcttggaggtagagcctggtgggaggtgattggatcatgggggcagatttcccccttgctgttctcatgacagtgagttctcatgagatctggttaagtgtgtagcacttccccctttgcttgctctctccctctgccatgtgaagaaggtgcttgctttcccttcgcccttctgccatgactgtaagtttcttgaggcctcgcagccatgcttcctgtacagcctgcagaactgtgagttaattaaacctcttttcttcataaaatatccagtctcaggtagttctttatagcagcgt

SEQ ID NO: 93641 - DNA, 149 bp, Homo sapiens
tgtaatagcatcctctgcttttcctcatcatagcatttagaagactgtatttaaattacctatttgacacatacctcagtagctatacattttccctaaggggagggttgatgtcttgtttctcattgcatcctgcagtaagcaccgag

SEQ ID NO: 93642 - DNA, 401 bp, Homo sapiens
ccaggaccgggtttgggaaggagaaggacattgtctgccaggaccgagagcaggatgggcatcccaggcctggggcaggtggttgcagctgcaggggggctgctgagagcgggcaggttgatttctgaattcctggtgggcatgggagtcaggtagggacacacggtgtatgtcctggggtcgggggacagcaggtcctggattaccctggccttgacgggcggggccccaccagcacctgttctgcaggatctctgcagaactttctgctcctgatgacaggaaatagcgattccaatttagcctcggctttccctgagccggttacactgagatgcgaggctcttgcttcagcaataaaggggacaatacaaaatagcattctttcaaaaataggaccc

SEQ ID NO: 93643 - DNA, 518 bp, Homo sapiens
aactcagagttggctgggccacatgagttgctttggccaattaagtgtgagcagaagggttgtgtcgcttctgagcataaacattaagatcaagtgtgtgattcaccattttctcttcttttatctgtcacttgggccagcagtgttctaggcagagaccaatcccatcagccccagtcctggagtgaaggagacaggagagagctgtagctgacctgtatcagacatttttcatgagcaagaaaaaaacatctgctgttgtaaactggtgagatttgggagtcatttgttactgggctggtcctgactgatacaatcacccacccttgaaatactctgatttcatctatactctagggaatatggatgagacacaccagagcatttccttctccatggaactcttctcaggagggaggaatggagacacctaatattagttctcccctgataccttaaatcatttctgagactggaaagggcctaactaaatgaaattgaattaaaataaatggatt

SEQ ID NO: 93644 - DNA, 379 bp, Homo sapiens
aacccaggaggcggaggttgcagtgagccaagattgcaccatccccccccagcctgggcaacatgagtgaaactctgtctaaacaaacaaacaaacaaactgagtgttatggattgctggagcccaggagttcaaggtccagtgagctatcatcgtgccattcactgtactgcagcctgggcaacagagcaagaccctgtctctttaaaaaaaaaacaaaaaacaaaaaactatgttgcccaggctggaatgtagtagctattcacagtattcacaggcacaatcatggcatgctacaggctggaactcctaggctcaaatgatcctcctcttcagactcccaaatagtcggaactacaagccctcattagcatgcctg

SEQ ID NO: 93645 - DNA, 354 bp, Homo sapiens
cagtgagacagtacagtgagatagtcacattcacacattgctaccagcagtgcaaattggtaaaaatttgctggagagcaatataaaaatagcattaaaatcaagacattttaaagtctatacttttgagcctagtaattccaattctagaaaattataatagaaatagcaatttactggccaggcatggtggttcacacctgtaatcccagcactttgggaggccgaggcaggcaaatcacttgaggtcaggagttcgagataagcctggccaacatggtgaaaccctatctctactaaaaatacaaaaagttagctgggcatggtagtgggtacctgtaataccagctactc

SEQ ID NO: 93646 - DNA, 105 bp, Homo sapiens
aaacaaacagctttatttgaaagacggaggacagccgagtccccccgaccccgtggtcctggcgacatcggtctcacgtgtgggaagaccagtgtcctgtggaga

SEQ ID NO: 93647 - DNA, 259 bp, Homo sapiens
gttgtagtttttccatctgtttttaatctttatttcctgtctttgggtttattttgcatgcttacaaaacttcctgggtgattgtgtgggatggcctggacggaagggaccagggcttcaggaggaggatgagccccaccctttctgtggtgggaatgcctgagctctgttgggctgcacatggctcctactttggcagtcattcaacaagcctgaggaatgtggcttactggtaaaatagaaaagtatgttgccagag

SEQ ID NO: 93648 - DNA, 403 bp, Homo sapiens
caaaaccaaaaccaatgtgaaattgtactcagggatgcaaatgtagcccagtgaagcatttgcccacttgtttggtattattgaagcacaattagaaaaatgtgcaatgtatgcccaaaaattctataataagggccaggcgcggtggctcacacctgtaatctcagcattttgggaggccaaggtgggcaaatcatgaggtcaggagatcgagaccatcctagctaacaccatgaaacccagtctttactaaaaatacaaaaaattggcccagacgtggtggcgggatcctgtagtcccagctactcgggaggctgaggcaggagaatggcatgaacccaggaggcagagtttgcactgagcctactctccagcctgaacgacagagcgagaccccatctca

SEQ ID NO: 93649 - DNA, 511 bp, Homo sapiens
gggacgtcgtctacaacgcagcgatcggagactgctccaacctctgcctttagcccgtttcaaagtcacttccacattttcaggtatccttatagtagcgccccattctgagataccaatttactgtattagtccattctcacactgctatgaagaaatacccaagattgggtaatttataaagcaaagagatttaaatttgctggggaggcctcaggaaacttacaatcatgacataaggcacctcttcactgggcagcaggagagagaatgagtgccagcaggggaaatgccagatgcttaaaaaaccatcagatcttgtgaaaactcacaatcgtgagaagagcatgggggaactgcgcccatgattcagttacctcccactgggtccctcccacgacatgtgggaattatgggaactacagttcaagatgagattcatattactatgtctagttgttattgctaatgaaataaaaaactaatgaaaacaatactggccaggcgccat

SEQ ID NO: 93650 - DNA, 399 bp, Homo sapiens
  misc_feature (239)..(239): n is a, c, g, or t
  misc_feature (362)..(363): n is a, c, g, or t
  misc_feature (393)..(394): n is a, c, g, or t
gcctgtaatcccagcactttgggaggctgaggtgggtggatcacgaggtcagcagttcaacaccagcctggccaagatggtaaaacccagtctctactaaaaatacaaaaatgaaccggacatggtgacagttgcctgtaatcccagctactctggaggctgaggcagagaattgcttgaacccaggaagcggaggttgcagtgagctgagattgcatcgctgcactctagcctgggtnacagagtgagactctgtctcaaaaaaaaaaaaaaagagagaatgcagatgtgaacacatgcatacttggtgacctgaaactgcaggcctgcatcaccactgttggagaccttgtacccttgcnngtgggatgcccgccttgtgccttccccccnnccccc

SEQ ID NO: 93651 - DNA, 371 bp, Homo sapiens
gaagctgagtcaatcagggacttcaaagctctttgagtcccataccctgcctcccaacccaccctagcagggtgatatccccttgcgatatcaagagcaggtggtactttctctattttacagtgaggaaaatgcaagcccagctatacacagtgagtaacagcagccaggactagcacctgtctcctgatgcccagcctgcttctctatcacagcatcgtcccagcctgaggttggcaggtagttggcactaacgtgtgtttgttgactgactagctgactggccagttctggggctttgtggtgaggagggccatggctcgcatggaaggcagaggcctggctcaggaaaggctcactggtttaggcgc

SEQ ID NO: 93652 - DNA, 269 bp, Homo sapiens
cacatcctcaccaacagttactatctgtgtttttcattatagccatccaagtgggttgaagcaatatctcattgtgattttaatttccatttccctgatgactaatagtgttgaacatcttttcatgtgtttattggccatttgtaaatctttggagaaatatatattcagatattttgctcatttttaattaggttgtcttttttattattgagctataataatgtttttcatgttctggataaaagtcccttatcaaatatataatt

SEQ ID NO: 93653 - DNA, 514 bp, Homo sapiens
tcatggagaggttgggctgagagaagctttaaaaaagtgatagcaatcgtaacattttaactgatgacattgctctagtagaaagcaagaaacatggtttagagacgagtgagaattacagcagtgatgccttgagtaaaacagaatggattctgacccacaaatgaagaaattggctttaggcaggagcagacagggaggtagaagaagagagtgcagatgtctgcaggtgtgtcccttgggggaagaattctgcagagctcatctgattgcttcatttttcttagtgaaacagagagcaaggccatcagctgagagtaaaggtggatgaagcagtatttggagtttcaggagaaagaaagtacaacacagtgaaaattttattttcaacgtaatattttatttctaaaatagtgaaagatctggcagataaagggcccatttgtgattcatggttatgagctgtaaagtaaaatatttcaacatgattacatgtttgtttgttggtttattt

SEQ ID NO: 93654 - DNA, 651 bp, Homo sapiens
ttttgaattggtgaaaggatgcaggttagtcacgggttaagctcattaagtcagccttgcagatacaagtggtggcttaattatcctggagcagagctcattgcctgagagcactttaaaagagtctccgcttttcctttatcctagagggcaagcaagctggctggttactaactatattgtcaaaagctgtcctagactcactcctaagttgctgctgattaactgttcagtctaatatctggactctaatagaaggcagcacttttggtttggtaggagacaaattggaaggctgggcatcaagtaagttaaagtcgtccatttatcaaacacaatgcataagagacacagaggctcccgtttccatggacgagacacgcagctgaaagagatgagctgtggacacttagaccttgtattgagatgaattggcaggccaagaggaaaagaagaaagtggttgggaaatattttttggaactggtgaggcattcctgcaagggaaatcaatctaaaactaaacattctttccacaatgtgtgtatgaaatacacttactttattttatagagatgcggtcttgctatattgcccaggctggtctcaaacccctggcctcaagcaatcctcccacctaggcctcccaaag

SEQ ID NO: 93655 - DNA, 426 bp, Homo sapiens
cttttctgaggctcattcaggtctggtcccaccctggagtttctcctcacagaactcataagaggagaccagagatttgggaggtggcttctgctgcctctccagagcttatgctcacaatattctgaaacccaaaagcagataaattagagcaataagctatatattttgaggtcttaacttctttctttttaattaaaaccagtgcttgtagagacattccatcccagtagttactccacaagtcacaagaaagtaaaagaaacacaataaaaaatccctttaaactgcacttaaccctttcctttctgtatccctcccatctgtctacatttatcacttatgctatacatttttaaaaaaaatcagtgagaggccgggctatgtggctcatgcctgtaatactagcattttgggaggccaagg

SEQ ID NO: 93656 - DNA, 509 bp, Homo sapiens
ccggggcggggatgcgggcgccggcgagctcgggctgcggggtaccgggcgtccgcggaggggacgcgagccaggctcccagagcgcagccctgagcccggcatccacacggacgggcggcccttttgtccttactcgccgaactcgaattacagcaaggtgtcagggagcgctaattgtttgtgcttgtcaccatgcactcggaggcaaccccgaatcatacccacagtccagaccctttaatcatagactggtgcccttatctgcgcctgtgaagatatgaccggtagggtgtgtcttcttttttaatggggaaagttaaataggaaaacctgaagaggttattgaatcggtgttgagttcaggcgaccctctcactccgtcatttctgtcgcctctcctctcacttggttgttttttttccctctcctgtcttcttcttgtatcttacaggtaaataacttggatcttatttggaggctgttaacatttgaaaggcatgagctcgt

SEQ ID NO: 93657 - DNA, 362 bp, Homo sapiens
gtccctcccacaacacatgggaattatgagagtacaattcaagatgagatttgggtggggacacaaagccaaaccatatcacaacctatgctttgaataaagacaggaaccagagcagcaggaattgtcctaccagggcactgccagtggatatgaacaaattggcaatccctttgacaatcctttgagtccaagtccaagagagtctggtcgtccaagctcaagtcatacacttgccccaagatgctatcagggtggtgagaggaagccccctacaacagcttccaaaggcctcattggttaccatggtggagagccaggcaccttgatgtacagcccctcaaggctacacacaagaggac

SEQ ID NO: 93658 - DNA, 418 bp, Homo sapiens
ctggaaaaagaccaaaagcaaggaggtcacctaaaaggctattgcagtcatccagatgctcaatcttgttggcttggattaggatggaactagagggatggtgagaagttcatggatttcagatattttttaagtggacagccgaaaagatttactgactggctgggtatgagtgtgaaagaaagagttaatttaagggtgatgctaaggttttagcttggcccactatgatggtgaagttactgttttctgagatggggaaatctgtaagtggagcaggcttagatgggtataaatcaatcatttttgaatatgttaagtttgaggtgcccctttacaccaagtgaaggttttcttgacattattaaagtgaacatggagttcaggggagaagtctgggcaggggatctaaatttag

SEQ ID NO: 93659 - DNA, 202 bp, Homo sapiens
gtttaaaatacagatcagaccttcctctatttctctattttttctattttctactcatttaatggtattcgtcattcagttgactgcactagaaaagctgaaaacactcttgtgaatgttaaacatctctgaatctgtttagcacatagcacatttatcaatgcacatttaatacattaatagctaattgcagcaaaaagtt

SEQ ID NO: 93660 - DNA, 540 bp, Homo sapiens
tgtggcatgtggtgtgtgtgtgtgcatgtaagtgtattgtgtatatgtggtgagtgtgtgtatgtgcatgtgtgagtgcattgtatgtgtgtgtgtcagtgtgtgtcagtgcatgagtgtgtgtttgtgtgagtgtgaacgtgtgtatatgaagaaagaggatggaggtaggctcctcatggacaacctcttgggcaaggaagacaataattggttttctcacctagaatgggacctggaggaagaatctagaactcatatccttagggatagatgcatgcccacaaggggaggagagaagaggccagaggagggagcatcatagtcaaagaaaaagacaaggaagagggggcggtcagcaccgaatttcaccagcttaggttgctgatctattcccgcacactctgagcatctctctgattgtgctaagcctctggatatacgaggctcatgacctcaccctcctcttcttgcctggcatgacagagaccagcactgatgtactggagtcagttcattctggcctgtgagagagctgag

SEQ ID NO: 93661 - DNA, 388 bp, Homo sapiens
gttattgctaggatatctaacaaaattggattaaatttttaaaacattttcatcaaaattgattaaatttttaaaaccttttcatcaaaaaatgcacttgaaatcaatttcttccattggaaaatattttaaagacaactataactttacagattaaattgaaattggctactgatgaaggactaaagttcaattttgaaactacagcattgtctcagtggtgaccaacttaataaatgaatattttgtgtttgccaaaattactctaaaatgtctttctttattctaatttacctctgtgagagacttttttctctagtatgattttcattaaaacagaatacagaaaccgtttatatataaattattcctcaagaggaagattgtc

SEQ ID NO: 93662 - DNA, 395 bp, Homo sapiens
ttctgtcatgatgggaagcagaagtctctttctcttttcaccttgaagtccattttctccgccttacccaacataaattctcttctcaatcattatagttgttcccttcaatacactttttgcttccttgcccctgtcttgttctgcttgggaaaagtgtacaaccctggttaaatctgtctcttcacttttcagtgccagtacctgtgcagctgaatgtcactcgagaaaaagacacaaccgtgctatttgcaccttaaatccatgaccacaatgaggccagtcatactgcatttccagagtcacttattcttccactttcctagatgtatttttcacatcttttctgtcaacattctaacatttcctccccgatcttctcagacattgtcgtt

SEQ ID NO: 93663 - DNA, 522 bp, Homo sapiens
tcagccttccgaatagctaggacttcaggcatgtgctaccctgcctggctaattttattttttatagagacaaggtctcactatattgcctaggctggttttgaactcctggcctcaagctatcctcccacctcagcctcccaaagtactgggattacaggcaagagccaccgtgcctggcaatttcaattattttttttaaaaaatcattaatctattacttgaatttggcaattttgtattttaaatgcaaataaaggctcaaaatatttcaaaatactctgattaaaacccaacaaaaataaaatcctccaaatctaggggaaaaaataaaatttcaggataactctgtttaattctatttttcagcctatatatgtatgtggagattgcttgccatccaacatatgttaggatgtctactgaagcacagccaagtgtaacagcaatagtttccaaactttcttcttcattcattaatctattcaacagacaacttattaagcaactacctattgggct

SEQ ID NO: 93664 - DNA, 381 bp, Homo sapiens
gtgttccaatcagcattctgctgtgtctccaattctctaggattaggttttaatgcttaaactcttcagcatggcctgagaatgaaaagcttctcatagccttgttcctctctacctttcttgattcagttgacccctctggactgcctgcagagtgtgtgccccagtcacaccagatcaatttcactccttgaacatgccaggtatgtttatgcttctgtcattcgcataacctatgctcttgaaaccaccttgctttcttgtctaaccgggcaaattatgccttcatccttaaaaattcatctcttttctctagctttctctgactgtttcatcaagtgaaatcaactgatccatctcctggaaacatctcttttcttt

SEQ ID NO: 93665 - DNA, 204 bp, Homo sapiens
tgatactgacagcttgtacaattttgaaaggaccatagatggtgtttaaaaaaaaatggtaactttaattctgccttctatatttcaacttcagcttcatggattatagtgacccatgagaactccttccccttggggtcttccgaggcctgaatcagaaggaaatgagatgtatttgaaatcatctgtgtggccttgtagatc

SEQ ID NO: 93666 - DNA, 400 bp, Homo sapiens
cctttgcatatcacactccctttgtctggttcagtcctattcatgtttccgatcatcgcttcctcggggaagcattcctcccctccatattgaggctaaagtatttccaggggacaaatccttcattgcgtttgtcactgttgttgttttacattgatttggtggcaatctgacaagctctgtctcctgcagaagactgtatgctccgcacaacagggcctgtgtctctgttctccatctcatctctggcacctcacaaggttggtactcagtataactatttgttaggcactaaatgaatggaatgaatggatccctgacaaataacttcaccaaaatcttttattaaagacttgcctttgcaaggaaccctgtggaatacgccaaaagacatggttcc

SEQ ID NO: 93667 - DNA, 210 bp, Homo sapiens
tattctagggccagggtattttattcattaagacctgtacagagtttaaactgatctgttaatctctggtgtcgctgcaataattagacaattgatgggccagaaagcgacctctgtccttaatggggagacatctcatgacccatttttctcctacccatttttcccctatataccaaaatataaccccaaaggacacaagtcactttg

SEQ ID NO: 93668 - DNA, 511 bp, Homo sapiens
gcgggtgcctgtagtcccagctacttgggaggctggggcagaagaatctcttgaacccagaggtggaggttgcagtgagccaagactgtgccactgcactccagcctgagtgacagagcaagactcgatctcaaaacgaaacaaaacaaaacaaaacaaaaaaatcaacccctggcccagcagggtagtgcaagcctgtagacctagctacatagtaagctgaaatggcgggggtggggggtgcaccccagaagttcaaggttgcagcgagctatgattgagccactgcactccagcctgtgcaacaaggctagcccctatctcgggggggaaaaaaataaggaaaaaaatacaaaaagataaaaaagattaggaaatggcaaaaatcaactcccccattctgataaaggtgaaattaaaccaacttttggcatcccacaaattcattcactgaaatttttaaaaagctctccatttaccatgccaactttcctcctttgaggagtttctt

SEQ ID NO: 93669 - DNA, 741 bp, Homo sapiens
ttctgaggcttgtgctctccctccaccttcaggttttatgtggggcttacttggggctgaggacagatgtaggccttagtcttatctctgaaaaggggataaggtgctcctatactctgtgggcaagatcagtctgttatatgaatacaaagctcagacattacttgaaaaatatatattagttgaatcgttggaatagtattgtcccactaagagaactgtattaattttttagtttttgtttatttaatgaggtttagtgaatatcttacatcttgacattcagcaggctagagttatagtgtcagttgatgtttgtcttgagccagaatcctctctggttttaagaggtctggttcataaaactggtttgggatgtggttcttattcttacaggtcagttttcaaatttaaattgattgtagagatagctgtaaaaccaaatatgtgttttattttgccaatatcttatatcggttgtagaggtggctaatacattcaatattgaataaattgagaaccactgtttaatttcattttttcctcgtacattaaacaacgaatctaaaaagtattaaatatttgggcctttctttgcaagttaaaatagtttttctcttagaaataattactgtttcagttataatacaaaatcagtaatctgcagaagcaagttagaatttttcataagtggtaataaaagtagttaaggtttgttccttaggttttgtattataccgg

SEQ ID NO: 93670 - DNA, 185 bp, Homo sapiens
aaagttaagatcatgtaatatgcctcaaccacataaattgataaattaccttcatctccagtcaaccatttacaccattttccaagagatgagttttaatgtaatgtgaggcagctttattctctgagtcatctgtagtacttcttgttactacagccaaagacctcatcagcattttcattttc

SEQ ID NO: 93671 - DNA, 233 bp, Homo sapiens
aaaaaatcaaaatacttcagaataaatttgacaaaagtgcaagatttgtacactgaaaactgcaaaatatggctgagaggaattagtgactacataaatggagagacattccatgttcataggttagaagactcaagatggcagtccctatcaaaatcccagcaggctttttttcagtaattaacaagctgatcctaaaatttttatgggaatgcaaaggactcagaatagtc

SEQ ID NO: 93672 - DNA, 600 bp, Homo sapiens
tgatagatcctgggaggccactctgatcctgccaacgttgaggccagatgagtctttgaaaaacatggtttggcttaacaccagcacttactctaacacccaccatgaatcttgctgaactgaagctatacaaataccttttcaaaagattttttttcattccagatccttcttagaaattcctaaggctcaatgctttgtggaagattctgagaaagaaaatagtttccgatctttgggattcccgagatggtccaatctgcaaaaagttcattgccatttccatcaaggacactgagaacaagagtcttatctggattggatcctgggaattgagaagcttcagcaggtgggaaatgcaccctccacaggctcacacccttgtgggctgtttcagttacctattgcacctaaaattagaaactttaaaccaccagaagccattattgctcatgaccctgtgagttgcatggggacttcctggctggtttaacctgggctcatttgtgtggctacctgcagctggagggccagctgggcggagcatccaggatggcctcatgcatgtgcctggcagttggtgctggttgtcagccgggg

SEQ ID NO: 93673 - DNA, 327 bp, Homo sapiens
gagaattggtgttgaatgatgctgatacagcaagtaagacagactgaaaaaatgttatttagttagtgacagggaggccattggtaatatcatcaagagctgtttgctggaaagggaaggctgcacgctgcatgagagcaggctaagcagtgagaacatatgaggaaatggccacagattcagctgcaaaaagtggaacagagaggatgacaagtgaaaggtagtaagccctgagtttttgttttgttcataatgatttctcttctttcttttctgtatctatctctatctctcagaaggaagcacagttaagagtcaacagaaaaa

SEQ ID NO: 93674 - DNA, 279 bp, Homo sapiens
aggtataagtaatctagagataatttgaagtacagtcttggccatataacaacatattggtcaacgacagaccacacatatgacaatggtcccatgagattataagggagctaaaaaatttccattgcctagtgacatagctgtcttaacattgtagcacaacgcatcaccttttctgtgtttgaatgtatttagagtcacaaatacttactattgtgttacagttgcctgcctgcagtattcatacattaacatgctgtacaggttgtagcctgggag

SEQ ID NO: 93675 - DNA, 825 bp, Homo sapiens
aggcgcccgacatggtaagagacaggcagccgccgctgctgcatttgcttctcttaaaactttgtatttgacgtcttatttccactagaaggggaactggtcttaattgcttgatgaagagcaggagactcatttatgtgagtcttttgagtgaccattgtctgggtcactcccatttaactttccctaaagcccatttgaaggagaggtcgcacgagctgctccacaacctctgaatggggatggcatgggtaatgatgcttgagaacataccaagccccactggcatcgcccttgtctaagtcattgactgtaggtcatcatcgcacccttgaaagtagcccatgccttccaaagcgatttatggtaaatggcagaattttaagtggcaaattcagataaaatgcatttcttggttgtttccaatgatgactgttatctagagggaatttaaaggcaggggtttactgcagactcagaagggaggggatgctccgggaaggtggaggctctgagcatctcaataccctcctcttggtgcagaagatatgctgccacttctagagcaaggggacctgctcatttttatcacagcacaggctcctaaattcttggtctcattctcaagatgttttaatgactttaaagcagcaaagaaatattccacccaggtagtggagggtggtaatgattggtaatgctttggaaccaaaacccaggtggcgctggggcaggactgcagggaactggggtatcaagtagagggagacaaaagatggaagccagcctggctgtgcaggaacctggcaatgagatggctttagc

SEQ ID NO: 93676 - DNA, 707 bp, Homo sapiens
cgtttctaaaataaggcgaggctgaccgaaactgaaaaggctttttttaactatctgaatttcatttccaatcttagcttatcaactgctagtttgtgcaaacagcatatcaacttctaaactgcattcatttttaaagtaagatgtttaagaaattaaacagtcttagggagagtttatgactgtattcaaaaagttttttaaattagcttgttatcccttcatgtgataactaatctcaaatactttttcgatacctcagagcattattttcataatgactgtgttcacaatctttttaggttaactcgttttctctttgtgattaaggagaaacactttgatattctgatagagtggccttcattttagtatttttcaagaccacttttcaactactcactttaggataagttttaggtaaaatgtgcatcattatcctgaattatttcagttaagcatgttagttggtggcataagagaaaactcaatcagatagtgctgaagacaggactgtggagacaccttagaaggacagattctgttccgaatcaccgatgcggcgtcagcaggactggcctagcggaggctctgggagggtggctgccaggcccggcctgggctttgggtctccccggactacccagagctgggatgcgtggcttctgctgccgggccgactggctgctcaggccccagcccttgtt

SEQ ID NO: 93677 - DNA, 759 bp, Homo sapiens
aggcgcccgacatggtaagagacaggcagccgccgctgctgcatttgcttctcttaaaactttgtatttgacgtcttatttccactagaaggggaactggtcttaattgcttgatgaagagcaggagactcatttatgtgagtcttttgagtgaccattgtctgggtcactcccatttaactttccctaaagcccatttgaaggagaggtcgcacgagctgctccacaacctctaagtcattgactgtaggtcatcatcgcacccttgaaagtagcccatgccttccaaagcgatttatggtaaatggcagaattttaagtggcaaattcagataaaatgcatttcttggttgtttccaatgatgactgttatctagagggaatttaaaggcaggggtttactgcagactcagaagggaggggatgctccgggaaggtggaggctctgagcatctcaataccctcctcttggtgcagaagatatgctgccacttctagagcaaggggacctgctcatttttatcacagcacaggctcctaaattcttggtctcattctcaagatgttttaatgactttaaagcagcaaagaaatattccacccaggtagtggagggtggtaatgattggtaatgctttggaaccaaaacccaggtggcgctggggcaggactgcagggaactggggtatcaagtagagggagacaaaagatggaagccagcctggctgtgcaggaacctggcaatgagatggctttagc

SEQ ID NO: 93678 - DNA, 416 bp, Homo sapiens
atcccactgccttcacagagttctgccagagtcttcctcattcagagtgaaatttcaagggatcttgtaactttcctcgtcattttcatgaccagtccagtctaatggcaaagcttccgtcttccgtctaatttaaagcttctttccctccttcagctcagaacacctgcacgggcatagaagcttgaggtatggtggtggtgagctgggaagggtcaggtagggagaagagaagtagggcaaggacaacagagggcttttttgactggtagagttggaatccaccagcatgggtgtgaccagtatacatatgctatcttttttttttttttttctcatgggagtgctttggtggatttcttggagattccccattagtgactttggattggaagcccgggcatgggcgatgtcat

SEQ ID NO: 93679 - DNA, 2158 bp, Homo sapiens
gggctctctataatggaatgatgctccttttcaatacttagagccactgtactcagtttaggagtaactgaaggtgtggatgcatgttaatgggaatccaatttttactatttttatattaataacagcgttctgtagaaacagtctctcccttctaaataaaaactatgtgactgctgttactagtgctattctatgcgaatatcctaataataggattcaggaattctaatgaattgtttcttaattaaggtgaacaagtagactcctgatcaagaggagaacactgtgaatgtctcataatcaatagaccttcattctcttgtagaaaatgtggattttcaggaaaagactgattattttcatgaataaattttcttatacaaattccattttgtttgacataaaagaccctgaatcttaagatatttgtaaatcagaatatttaagaatgtaaaatgaatccccaaatctagtttcctccaaagcacttcttaatgtaggaaatagtttttacaaaccctatgtcagtactaatgttcctgggtcaaacccagtaatattgttagtgtatgttgttacaccttatttaagaggcagagtggttttgagcaagtcagttaacgtgatttgatgaagaaataaggaattatatacatttagacagaagaatattttattttgaaaataggatttcgtgcaataatttttcttgcataacttagttcatataaatatgtacatctgtttttctggcagatgccttaaggtcatgtttttcagtatttgagtaaatctgtatgtagcaatgttctcattgatttcagaaaaaaatatattctttatattgttgccaggagaaatgtttttgtttatttaaaattattatggatattgtgttgttgtatcataactaactgcctcagcaacaataaatatgcagtaagaaaatcctgtaccttagattgacaatactgttactttaaaagaaatatatacggtacaaattgctgattctacatgtgtacatttaacagatactcagttctgcaccacctaaatcaaaatggcatttgtatgctgatgattacatatgtggattgtagtatcctttgtgatgaatctttgataagatttataaagggcattgccaatactttttgactgtgtaaattaagttaattttttgtatgatgtacagtttgtttaaccttagagcttctatagatttctactttattatacttgaatgaggcagaaaagcactgtggaaaatctgtagctctggatgcaacatgcagacataccaaaaaaataataataaagcaaggtactgaagagcaatgttaacagaatgctttatatccagaatgctatgtttttttcaagccacattttagttgaatgaagtaaagttattcaatcttttattttaaaatattggaaagtcacaaatgattacttctttgatatgatgaacctataagtctattcatctctgttatttcatttctcaaatgtgagccttgttgaggtccattatcaaatctacactttggttgattatatgatgtttaggacaaggcagaatttaaaacctgcatgtttagtgcatcacatgtcaagtcaccatccttctgacagtgtaacttccataacgttattttgagagccatttaataatcatatttgaaaaagtggatttcttgagtctgttgtagtttagtacttacagcagtgcctaaaacagcaactaatatgaactgcctgagtcctacaacataaatgcataaagcttttttatgtaaaagccacaggaggggttcaaaattgaacttttccaaagtttatttctcttgcgttagatgaaaaactatttaaaaggactgaaaaccctgagctttttgctcgtcttggtagcagatatctgtaaaaacctacccagaattgtgattttacttcattgttcttgcatccttgaggctacagtataaatcatctccaaacttgactactattgggaagatgtgtataaaagcatcgctttgggaattttttaaaaaatatgcaaaaataaatattgaataaaatctacattaccataaaacacccaaaaatgcagttctaaaataaaattggtcacaattaaaaaaagcat

SEQ ID NO: 93680 - DNA, 1340 bp, Homo sapiens
gggctctctataatggaatgatgctccttttcaatacttagagccactgtactcagtttaggagtaactgaaggtgtggatgcatgttaatgggaatccaatttttactatttttatattaataacagcgttctgtagaaacagtctctcccttctaaataaaaactatgtgactgctgttactagtgctattctatgcgaatatcctaataataggattcaggaattctaatgaattgtttcttaattaaggtgaacaagtagactcctgatcaagaggagaacactgtgaatgtctcataatcaatagaccttcattctcttgtagaaaatgtggattttcaggaaaagactgattattttcatgaataaattttcttatacaaattccattttgtttgacataaaagaccctgaatcttaagatatttgtaaatcagaatatttaagaatgtaaaatgaatccccaaatctagtttcctccaaagcacttcttaatgtaggaaatagtttttacaaaccctatgtcagtactaatgttcctgggtcaaacccagtaatattgttagtgtatgttgttacaccttatttaagaggcagagtggttttgagcaagtcagttaacgtgatttgatgaagaaataaggaattatatacatttagacagaagaatattttattttgaaaataggatttcgtgcaataatttttcttgcataacttagttcatataaatatgtacatctgtttttctggcagatgccttaaggtcatgtttttcagtatttgagtaaatctgtatgtagcaatgttctcattgatttcagaaaaaaatatattctttatattgttgccaggagaaatgtttttgtttatttaaaattattatggatattgtgttgttgtatcataactaactgcctcagcaacaataaatatgcagtaagaaaatcctgtaccttagattgacaatactgttactttaaaagaaatatatacggtacaaattgctgattctacatgtgtacatttaacagatactcagttctgcaccacctaaatcaaaatggcatttgtatgctgatgattacatatgtggattgtagtatcctttgtgatgaatctttgataagatttataaagggcattgccaatactttttgactgtgtaaattaagttaattttttgtatgatgtacagtttgtttaaccttagagcttctatagatttctactttattatacttgaatgaggcagaaaagcactgtggaaaatctgtagctctggatgcaacatgcagacataccaaaaaaataataataaagcaaggtactgaaga

SEQ ID NO: 93681 - DNA, 270 bp, Homo sapiens
gagaatatcaacaaactcaaaaatcaattctttcaaaagattaatacagtttacaaacccctatcaagttttcaaaaaaaaatattaccaaagtggagactggaccacagattttttaaggctttaattaaaaagataatacaattctatgccaataattttggcaatttcaacaatatagacaaattccttaaaacaaaaattgccaaaattcacacaagaaaaaacagaaatacaaatcatcccatggatattaaagaaattgaatgt

SEQ ID NO: 93682 - DNA, 666 bp, Homo sapiens
acatacatctttaaatacttgtgtacttatgtgcatacttctactggaaatatgcccatttaaagtttggtatatcctctcaaagttgaccttccaaaagagccatggcagtttgtagagcttgtgctttgaataaaagactatgagaactttggcttcttggtaactttgcatcctattagtcttaagttgagtttggtatcttttgattcaaataaggatctttgactctgttatgctttctttagtgatctcacttttctgtgcttggtaacccctttgtatttatgtttaagtggttttgtggccattaggtaattgtagactttatatacaaaacttattcagtcatttctttaaaaggtaaactatagggcttagcacattggctcacgcctataatcccagtacttttggaggccgaggcaggaggattgcttgagctcaggagttcaagaccagccagggcaatatagtgaaacccccatctaaaaaaacttaaaaattagctgggtatggtggtgcgcacttgtagtcccagctgcttgggaggctgagggggtggtgagaggatagcttgagtccaggaggttgaggttgcagtgacccgtgatcacaccattgcattccagtctgggtgatagaggaagactctatctcaaaaaa

SEQ ID NO: 93683 - DNA, 442 bp, Homo sapiens
tgaacaccgtgtaccaaacagctatgagctgtggctcgccctttggggcatcattccagacaggtttcatcaccacgctctccacaagtatctgcagctcctgtcctctctctttccctttcttcccttggcatgacaaaccctggcaaagcgtcccctaggttgttacgatgatgcatttggagggcaagtatgtatgcttgcagggtaaaaaaaagccggggttccaaaaaagagtgaacatttacctgaaatggaattggatagaagagaaattgggaagaattctctgttttggtaataggagataatgatatttgtcattacccaaccttgatttgtcagtaagttgcaggtcctgaattaagcactttattggaatgcttagacctcacaaagaccatgtgaggtacatacaatagtgctaagtggcagggggttg

SEQ ID NO: 93684 - DNA, 290 bp, Homo sapiens
agcttctatcacattattggcgctggtagaaagacagagagaaaaaagagtagattcatggagataaaggcattgcatgttaagtatttatcagagtgtctattacatgatgaatgttccaaaatagctaatatcatctcatttagtcctcaggacaggaaactcactgtcctttgtaaatttcaactcatctccctcactttcgagtgctacaaagtttagtcctttgttctcttctctttcctatttacctttggtgttctccgctgttctcatggttccccccaact

SEQ ID NO: 93685 - DNA, 418 bp, Homo sapiens
gaaaaggaggataggaagatttgtgtaaaagtgggcatggataaaagacagtacatctggagtgctcagctctgggcctgatgcccaatcctgacaggtgttgccgggcccttccagggcggctccttcaatggccacagccctgtgggggtgcgtgtcatcccttccctcacacggcaggcttttggcttctggatgacttcagctggggaagtgtggcctccttagtgcctgagtggtctttgaaaggaagggagatagaatacatgtttctgccttttgttgcccttaagctcatcatctagcaggaaagtctggctatttttaaaagagtagattaatagtagtgcttgaaaaccagatagaaaatgatcaccgataaaaaaatgttgaacaattcatggaagacagatgtgat

SEQ ID NO: 93686 - DNA, 917 bp, Homo sapiens
aacaaagttgtttttataggtcttcactgggtggaaaaatattaacaagcaaccaggtcaagaacaaaaaataacaaccaaaacaattagtggtgtcccacaaatagatccagaaattgaaggccatgaaacagagacattggagagtctgcccagtgttcattagttgaaaatctagacttgagtcaccaacaatgctgacatcataaatccagtatgccagctgacttaaggataactcaggtggtttgtagatactgaactgggatgggcatccttatttcaacagcggcgcatgtttggaagagcacgggcccaactcaggactcggagttgccaagcggaccgtttcccctaacccaggcctgtttcctgtcctgaggtcctggtacctccaggaatctattctgttctcagagtgtccctctcattttgtaatggtagaaaatgagaaaatgaaaaacagaccatttttttctttgaagccatgttctgtaacttcctcctgcttcttttgcattttgggttttgccagtacttgagacttccctttttctgaattttagtcagtttttaatttatcattctaataggggccatggaaattagaataataaaggtttgctactgatcataacatagtattaattttagtagattgacagctttttttttcccctctagatttaaatatttgaacagagaataacaggttatgaaactgactaattcaggtctggcctctgccttcctctgtagtcagccatcccccaggtttgctgccctggagttgagcacaccagggcctttcagccttaccattagggaaatgaggcagatagaggaggttgggcagtgacttgcggagacaggtggcaggggcagaggattaaccacccaagcccaacaagcatatc

SEQ ID NO: 93687 - DNA, 593 bp, Homo sapiens
gcaacagagaaagaccctctctcaaaaaattaattaaaaagagaagagttttgctcctcataggtaagctttaactctcaacctgctcttactcgaaactataacaatttgcattaattcaagttctataacccagttctaccatttttccaaagtataacaatttgcattaattcaagttctataacccagttctaccatttttctgttgggcaccgtagcactcactgcagaaaatcccttccatcttgaacattttccaactttgaccctttctttccattccctttccgtgaaacaggcgtgacttcttaatcctgtattgacatggaatgatactctagtcatcttggcttgatctagtgtgcctcattgtcctgatcagaaaaatcagaaactttgggggacctgaaacatcatctctctggacttgttgcaaagatggaaggtaacaccctggagatggtagagcattgagacgagaagagtgtgggtcattgaagacttcatgaaacacagcagccacacaccagctctggactgccccaccctgactttgacattagagaagtaaacttcattttcttgaacta

SEQ ID NO: 93688 - DNA, 322 bp, Homo sapiens
aaagctttttaatgttccaggtttcagaagatgtaaaacaacgatatttgtcaaaatcaaattgggtttatttcctgggacgccatctgtccagaggtctaagaccactttagaatataaagattcccattctcatcccatgtgaccctgcctctcatcctctgaggactcctaggtgaaagaggctaagctctctggattcagcttcaccatctgcactcatggaaaaattcagtgtttttattttagtttgctgtatttattttaatttgttgtaatattcaataaaactaaaacaaagtttgaagaaaggtgatctgtt

SEQ ID NO: 93689 - DNA, 343 bp, Homo sapiens
tacattgtcctgtctccttttgtgcctgttacctttgattatttgtcagagtatttgaaaaactatttttaaaatattttgaggcctagataatgttactttcttccaagaatgttttcatttttttctgcctggtcctaaagtattagcaatctgagattaattcatttttagggattagaattttctggaccattcagatgacttgaagctagactacagtatctgcaaggacttttataatttcagtttactcttatgtctaagaaacaaaccttggggatcccagtgtcaggcacggaggttttgccaggcagcaacccacaccattgagtgggtctgg

SEQ ID NO: 93690 - DNA, 365 bp, Homo sapiens
gactgagccccagaaggcttacatggcttcccagtgtcaaaacgggcagtagggaagggagcccaaatctggtgctcctcagtcctgtgcacagcaataccttgtacatttccattttcctctcactaggcttagaccactctacagaaattacttgacttatctcaagggtactgaacagagttcaccaataagaaaaaacagaagatgaaaacagaaaaaaataacagcaaatgaaggtggtgattttttaaactatagggattgaaggaatccactcttgaaataactaccctgatgctttaaaaccttcagggcaaggatttcttgagaattttattgggaagacagccttcttgtgtttt

SEQ ID NO: 93691 - DNA, 1516 bp, Homo sapiens
  misc_feature (1)..(1): n is a, c, g, or t
ntcagcatttgaatttttatgctttgaagtttggaactggattatgatcttgattaaagaagggtttcttcattgtttcctcaccacttttcccttaattctaagtcatttttttattttgttaccaacccatattcttagaatataaacaggacttgtttttttcagtaagggcccagaagtgactagccttcatgtaattttaagatgaattttacttgagttgcactaacattctatgttattctagactatacaaattaagtggtaagcagttataaagacggcaagaccatgctattgaaaaagttcagaaaacatacaccgtggaccagaggtcttaatcctatctatggatgtgttttgtgtgacccatacagtgttgtaaaaaacacttagaaccattattctaaaaaatggggctatttcacattaaagtccagatttctgcttctttttaaacatcagaggctctggctacacagaggcctttgttctttcctggcatcagtctgcaggaccaagcggtggtggctcacttgggaagagccttgtgctctccactttgccacagtaccactgccaccatgctgctcacttatgtcatccacttggcccttgtatgacctgaatttgcaacctctggtatactgttatgttctggagaaaatattcaaagatctgccaaatactgcattagtatactgagtttatacagcatttttgtagggttttaaattgcattcaaggtcactttccaagcactttctggttttgcttgtttttctagaagaaaatgaaaagctattccttataataaacatggcagcaagtaaacagtgtgattgtgaaaaaaatattatttatagattttctacaaataaatatttgtctaccaagtaaaatattttgactgaaatgattctttgaaatgcatattgatttattatgtattgactttttaaaaattgaggtataattttcacaaaattctccaattttcagtgtcaaattcagtgaattttgaaaacatatatacagttgtctgtctgccacagtgatcatgatacagaacactttctttaccctgaaaacttctcatttttccttttgcagtcaatcccctgctcctatccttggcccctggcaaacactggtttgctttctatcattagttctgctgtttgagaatttcatataaatggaatcatgcaatgtgtaatctattgtgcctggcttctttcacgtagcattttgagaaaagcatttatactatttacagattgttgacaaatatttatccactaagtaaaatgttagactgaaatgattctttgacaagcttgccaatttactgattttgtcaaagaaaaatatgttatttttgaagtttgttcatcctttgagtgtgtgagtatagtatcagaggcttaattttgtatttatggagctattctaacttgttatttaaaaggaaaaaggtattaaacttgaagcaaacttctcatgatctcat

SEQ ID NO: 93692 - DNA, 902 bp, Homo sapiens
  misc_feature (1)..(1): n is a, c, g, or t
ntcagcatttgaatttttatgctttgaagtttggaactggattatgatcttgattaaagaagggtttcttcattgtttcctcaccacttttcccttaattctaagtcatttttttattttgttaccaacccatattcttagaatataaacaggacttgtttttttcagtaagggcccagaagtgactagccttcatgtaattttaagatgaattttacttgagttgcactaacattctatgttattctagactatacaaattaagtggtaagcagttataaagacggcaagaccatgctattgaaaaagttcagaaaacatacaccgtggaccagaggtcttaatcctatctatggatgtgttttgtgtgacccatacagtgttgtaaaaaacacttagaaccattattctaaaaaatggggctatttcacattaaagtccagatttctgcttctttttaaacatcagaggctctggctacacagaggcctttgttctttcctggcatcagtctgcaggaccaagcggtggtggctcacttgggaagagccttgtgctctccactttgccacagtaccactgccaccatgctgctcacttatgtcatccacttggcccttgtatgacctgaatttgcaacctctggtatactgttatgttctggagaaaatattcaaagatctgccaaatactgcattagtatactgagtttatacagcatttttgtagggttttaaattgcattcaaggtcactttccaagcactttctggttttgcttgtttttctagaagaaaatgaaaagctattccttataataaacatggcagcaagtaaacagtgtgattgtgaaaaaaatattatttatagattttctacaaataaatatttgtctaccaagta

SEQ ID NO: 93693 - DNA, 127 bp, Homo sapiens
attccgaaagtttcctaggtttcaagctgggagttccttgaaaaagcccagggcgccaacagcatgatgtgatccgctcccatttttagatgagtcactaggacagttttactcaaagaggcagggg

SEQ ID NO: 93694 - DNA, 343 bp, Homo sapiens
tcatttggtcatttctctactgaattgtatttttcttactgattcacaaggcttttgaatacatgaataataactctttaaacaccttgtaaaaatatactctaaaagattaaaaatgaagccagaacccttaagaccagtcagtaaccattaatacagctgaacttatgatcctataccaacacatctaaattactcttctgctatatagaatttactctcaaaatagccaaccaaatttttacttgatagaaaaatcaccaaaaaaattactcaactcagttgagacccgtcacaattaaaaaacaggtcagtaaaacagcaaaccactttttcatttgtg

SEQ ID NO: 93695 - DNA, 323 bp, Homo sapiens
cctgtctctacaaaaaatacaaaaattaactgggcatggtggcatgagcttgtggtcccagtacttaggatgcttatgtgggaggattgcttgagcccagaaggtggaggttgcagtgagccgaggtcacaccattgcacttgggtgaaagaagtgaaaccctgtctcaagaaaaaaaaaaaaaaaaaaagaaagaaaagaaatcccatagtctacaatttgttgtttaaatatgtctcttaagtacagactagatctcagattattggtttttaaaattcaatgtacactctggctatagactctaagttcactgccactcc

SEQ ID NO: 93696 - DNA, 633 bp, Homo sapiens
atactggaaagacaatgctcactgaaagtgcaaatccgtgtgactgatggcagtataaataggatgtgtgtgaattctggcattaatttcagctctgatgctggacattctctcttaatgcctttaataattaccccttgatggtggctgcagcccgtctgcagccatcacagcaaagatgctggctgcagcaagggagacgtcttaatacctttaatagttactccttgatggcagtggcagcctgtctggagccaccacagcaaagatgctggctgtagcaggggaggtgtgactggggctgtgtactccgggggactggcaggggccagaaacaggtaagagccctgcccttcgggagcaaagttgtggccaagcccaggtgctgttgcaaccctgctgggtgtgtacgtgcccagggtggaactgccatgccagcctcctgccacctcagctcgctctggattttgggccctgacaagtgtgggagggagtccgggggggtgctgagggcagctcagcatggacttgcaggtgcacctcagcacaaaccacctgggtgccatagatggcatgttgatggcagcaggcagacaggttcctggatagaaaggggtggttctctggtgaaac

SEQ ID NO: 93697 - DNA, 421 bp, Homo sapiens
tgcccccaggcttgtcaccaccattccctgatagaggagaagtatgtggcagagagaatgtgctgtgtggcccttacctgtaggccagtgctcccagaaaggtgggtccaggtaagagtgagttcacttctgtccctgggcttctttgtaacaaaaacggggcagtttttaagcccagcatctttggcaggaaacagtatctgtgtgaaactcggtaacattgtcttgttttcatggtaaccttctacttacagcagatgatcctagttttccatttaaaggagtgatataaagtttccttttaaaataaatgtattcagggctgaaatccaaccaacgtattattttgtgcattgcttttagcttcttattgttgaaagtgtgaaacatgcgtggaagtggagatagctgcttggtgaag

SEQ ID NO: 93698 - DNA, 586 bp, Homo sapiens
tagcatcagactacatgaaattttattcttgatgttcttgtatgcaaagtggcatcttggtcttggtgaactgaaaatgttaatgtcaccagtatactacacttgccgttctttagctgttgtattgctgagatgctagagtactatggaaattagtagtttccatcttttgtgctggctaaaattgtctaccaagtaaggtgcaaaaccagcagtgattttttttttttttgcatcacaaatatttggcctagaaaaatgccattatatactgcttagttacaagttattaatataaataagtattaaagtagacattaaattcaaggaaggttgttttttttttattaactctagagccttgagtaaacatcttttcaggatttggggtgtcgaaatagaaagtatgggccaggtgcaggggctcataccggtaatcctagcacttggggaggctgacgtgaggggatcgcttgagcctaggagttccagaccagccggggtagcatggtgaaaccctgtctctacaaaaataccaaaagctggctgggtgtgggggtgcgccctgtggtgtcgccactgggag

SEQ ID NO: 93699 - DNA, 394 bp, Homo sapiens
catcagacctgtatagatgttgctccattgtatattttttaattaaaatttttattttaattatagactcacatgcagctacaataaacagtacagaaagatcctatgtactcttttcacaatttcctgtaatgataacatcttgtaaaactatagtataatatcataaccaggatattaactttgatacagtcaacatacagaaggtttccatcacatcagggatttcttacagtacatcaagataagtgtacttatacagtatgtaacctgggattggcttttttcattcaccataattatctggaaagtgactctgattattgcatctatcaatagtttgtttctttttattgctgagtggcatttgacgatgtgcatacctcaagtttgt

SEQ ID NO: 93700 - DNA, 627 bp, Homo sapiens
acaggaatcatacagcatacagcaagcatttaataaggctcctgggtgctgattaaagcttctggaatgggggattccaccacaccagctaacaatataacttttcacatgaggctcttaggcttgtataattctcaaatggaagattaaagagataacctggcttcagttcttttcttactatgtggcctaaagcctgggcctcagtctccccatgtataagaagcaggtgcttagattaatcagtggttttcaaatttttctttagaagcaatagcacctttagttaattagagcaaaaccttatgcaaatccaaagtcttatgcaaatctttttacttctgaaagaaaagtaaaaagaactttggctcagataccaggaagccagggtcagggctgaggtgggcccagtcatcaggggctgtgctcccaggaaccctctttacaagaggcaggtgagaccttccatctgtcctggatgaagccaggctctgtccctatagctcaagcctccttggagctgctggctctgttgattcccaggagacaggagttacccagcatgggcccagggtgcccacttgccaggccggttcatccaggctggccctcggccatgaccttggg

SEQ ID NO: 93701 - DNA, 366 bp, Homo sapiens
gtcttgctctgcgatgcgcttggcaagttgccacaattcttatgtctctctctgcttcctcatctgtgaaatgggcttaatagcacctagggaaggaagaacttgtaggtgctgtgtggattcataaattcaccctcagtgagagctttgaagatgtgaaattgtctctggggacttggaggtgttctaaacctgttgaaccagagacattggcatcttactgggttgcctgtagcagctggagagttggaggcctcagatattgggctgggtgttgggcttcaggcagctctttcctggctcctgaatgagttttagttttctccaaggaaatcttgacttgtcttagcttacacatgggggttt

SEQ ID NO: 93702 - DNA, 439 bp, Homo sapiens
gggctagggctgagcctcaggtgggtctcctgttccctgtgctcccctgcacagcggctccctcccaagctctggggcagctgcaggaggggcacactgggaggagctgctgcagctgttcacttgggcaggacatcagaggactcggacaccagcttcccatcgtggatctcaatcttcttcacaactatggccctggtgaagctggtgtggctgaaggagatggagcccatgccagagccaaagctggagccgaggccatagctgaggctggggcttgtgagaccctcataggccgagctcagaccacctgcatagccactggtggtcttcatatggatattcatgttctgcatcccagactccaactggctctcctcgccctccagcagcttcctgtagatggtgatcttgatgtccagggccagcctgatgttcg

SEQ ID NO: 93703 - DNA, 428 bp, Homo sapiens
tttccattatggtccagattgtttaaattcaactatactctttcacaattaaggaaatgggacagagtagagtcaagagacttttcatgatcccaaacatagttgcagaatattagatttatgacatctagcccagagtatttttctttcctccctgctactatatttaacttatatttctcttccactacatttggctatactcttcgtatgataaagtttttctaaaatttcagtgtattatattgttttgctgattcacatttttaatatactgagtagcctttttagcaagcagacctatgttttatatggtgatttttgtttccatggctcaagtgaatcgaatggatgtcttttcagagaagtgaacagatgttggatatatttctgaatacttcagaaagattggactggttatacacatg

SEQ ID NO: 93704 - DNA, 674 bp, Homo sapiens
tggagatctctttttcataaattcagttttagtcaggactcctgttgcaggtgacagaaaccaaattcaaattggcttaacagaataaaaaggaatgtattggctcacatagctgagaagtccaagaacagtcaggtgcatactgctgaggcggctacgctggcagggtaagcaaaagaagcaccccagcctaagtttacagagaaccaggacatcattttgaatataacttagttctaatagtcaaatggccactcaaggtgacaaataggaacttcagtggtcacccctcggaagcaagctttcaatgtcccccacctgtagaaggctgaaaaacatcctccaaagataacaggttccaatcactggaacctgtattacttattaccattaaatataaattttaattatttaatttaaaatattgtgaatattatgagattgctatgtaacttaaataatattgataatattaattattaatatttatatttaattataagtaaatttataaacatttggcagaaggatctttgcagatccgattaatttatgaatcttaaagaattatgttaaaataatattttgcaaataacctatgtacgtcctcctataaacgttaaatcatctcgattacttataatccttaatacaatggaaatgctatataaata

SEQ ID NO: 93705 - DNA, 389 bp, Homo sapiens
acacttaacgctataattatggaaaataatactgcagactgtgacttgtttctatgaatcagagacaccactacagttagcagtgagtgtaaaataatgagtgtcagaaacttatattgggtgatttcatttttaaaagtaaccaaagtgaaaaatgaagccttgcgtttttgcttaaatgatttacaaaaaatatttgatgtccatcctgggatagggaattcctcccccataactttgaaagtgcagttgcttcattcccaccattcaaaattctcatggagtcacatttagttattcaactatttagcatttattcctataagaccttcaaaatggcgtgttctgggcaagtaactgctaagatagcagtaggccttgtcagcgat

SEQ ID NO: 93706 - DNA, 418 bp, Homo sapiens
cttgatctcttgaccttgtgatgcacccacctcggcctcccaaagtgctgggattacaggcctgagtcaccacgccagctaccttttgtgccatatttttatagtatcttttttatgttttgatacacaaatacttgccagtgtgttacaattacctacagtattcagtacaataacatgctatacatgtttgtatctaggaggagcaataggctataccatatagcctgggtatgtagtaggctgcaccatctaggtttgtgtaagtacagtttgtgatgttggcacaataaaatagcctaacaatgcatttcccagaacatagctccattattaagtgccacattactgcatatgtgtgtgtgtgtgtgtgtgtatgcgcatatgatgtcatatttgaataacttctaagtgcttt

SEQ ID NO: 93707 - DNA, 910 bp, Homo sapiens
tattaagaaattcataaaaattgaaaaaggtgaattcatataagtacttctcgagtgtttgggaggtatttcctatacttgaactgtatataatagatataagtgcatagataacacatggaaatgatgattaaaaagttcagtatttcagtaagattgtgcttttacatgtttgaatagatatttttgttgaagtgaaattgcagacagagcattagctgtaatctgtcctggaagggggaatgccagttttactgtctgagctcagccattgggtttaattcagatgtcgaagcttaacaagccattggtaccagtgtgatatttgtgtggacagtggcatctgaggaactaatcactaaggaagtgtagacgcagcctaactactggcaagtgtgtccttgggccagctcaggattgtggcacattggcaaggagagatcagtattggattgtagtcgagaaagtgaagctgtctccattcccactctgcttatgtgtgaccatggaaatgttctgttctctctctctctgggaaactgtccaatgggtctgaatttaaacttaccagaatggagtaatttcacttcattaagaaatgggtcctgtatattcacgtatagaaagttaaaacattttggagaattagtacctttaaaggcagttattggtttgcttttagcattgctttttaaccaaaaaagaagtgttttagaaattagaatagcctggacattattgttttacctcagttacaagaggtttttcatacttttatagaacctttaaattattatatatacaacttgaaacagcctctcagtctattgtgtttatccatgattctggaaaaataattatctatttgagggaaatgtttatgatcttaaaaatgggaaatacccatggc

SEQ ID NO: 93708 - DNA, 361 bp, Homo sapiens
ttattgttatccttggcaaaattaaatcatgtcgtaaacaatatcccaatcctcttgtcatccatcagactctagaagggtggctcctaatgcttttcgggtctcggaccactgtggaaatttggtgaaagccatgcaactcctcctttggaaaagttatggtagcctgctttagaatataaatgcagaagttcagggtatagtgaactccatcagtggaaccctagaaagtctcaagctttagcaggagtggctgggctggccaagggaaggaacagggaagaaggactggttggatttacaggtctcacggagagtggtggcattgtcacagaaagattatggactccctgccttctaa

SEQ ID NO: 93709 - DNA, 424 bp, Homo sapiens
gtgatggcagactttttctgtaaaggactagagaataaatattttagtctttgtaggccaatctctgtctcaacaatcaactctgccattgttctgcaaaagcagcaataaacaataaattaatgagataaatgtattccagtgaacctgtatttacaaaatatgtgcaaggctagatttgccacacgggctatagtttgccgtcctctgctgtagcatgtcaaaagctctgtttagagtcacagccacttctgacatttagatcagcactaaatgctggactagtgtctccttaatctatcttgttagctcttcagtgccttctagcatatgttgagtttttatgtttcttagcaggagattaacctaaaaagtttagtttgccactaccagaagaaagtcatatataaagtaaccaatgttt

SEQ ID NO: 93710 - DNA, 288 bp, Homo sapiens
ggatgtatatagtaactaggtagtttgaatattaattttcaaagctggaaatactatacaacaataaatatctcctttattgttgttcttttacattgagtttaaatctattaatattagccttttgctctaatcccctttctcctgaagtgattaaaaactaaatgtctttattaaagcagatataccctttatttccagtaatagtacctttgaagagcaagctaattaattctttctaactgcttaatgtaaacaagaaatacaacagttttgtgagtattgctg

SEQ ID NO: 93711 - DNA, 486 bp, Homo sapiens
actcaccagtcaaagtgaggcagtggtagtgagggctatgaaagataagttgggtgcagatcactgtgaagattccgccatcctcaagcggttcactggctcttaccagatcctgctcttgaccctctttgcagtgctggcatcaacagcttccatcttcctagcatacaatgccttcctaaacaagatacaaacagttccagttgtgtatgtaccaactctaggaacaccacagccaggtttttttaactccacaagttctccccctcacttcatgagtctacaacctccattggcccaaagtcggctgcaacattggttatggagtataaggcactaacctctgcttggacaagtttctcttaactgcaggggaatgaagatttctagtcctcgacaagaagcctaacagcaacttctacattaagtttccagataaggcttctgagaactataaataaagcatcctaagctgtttcttaaaac

SEQ ID NO: 93712 - DNA, 2203 bp, Homo sapiens
ggtgtttgaaaaactccaactcttctatccagagtgccaaggacaagatgggaagaaaatacacatcaactcctcggcacattgaagtgtttcctccattcagacttcttccagagaaaatgacactgattccaatgaatatgatgcaggtaatgtctgaaggtggcccccagccccaatccatcgttcacttctccatcagtaatcagaccgtggctgttgttaataggagggggcaagttacagggaagattgttggcacagctgtggttcatggcaccatccagacagtaaatgaagatactggcaaagtcattgtgttttctcaggatgaagtacagattgaagttgttcagctaagggctgttaggatccttgcagctgcaactcggctcatcacagctaccaagatgccagtttatgtcatgggagtaaccagtacccagacccctttctccttcagcaatgctaatcctgggctcacattccactggtctatgagcaaaagggatgtattggatctagtgcccaggcattcagaggtttttctacagctcccagtagagcataactttgccatggttgtccatacaaaagcagcaggcaggaccagtatcaaggtcactgttcactgcatgaacagttcctctgggcagtttgaggggaatttgttggaactctctgatgaagtacagatcctggtgtttgaaaaactccaactcttctatccagagtgccaaccagagcagattctgatgcctataaattctcagctcaaactccataccaacagggaaggagctgccttcgtgagttctcgtgttctcaagtgtttccctaattcatccgtcattgaggaggatggtgaagggctcctgaaagctggttccattgcaggtactgctgtattggaagtcacttctatagaaccttttggagtcaaccaaacaaccataactggggtccaggtagcaccggtgacatacctgcgagtgagcagccaacccaagctatacacagcccaaggaaggaccctgtcagcatttcccttgggcatgtctcttaccttcactgttcagttttataatagtatcggagagaaattccacacacacaatacccagctttatctggctctgaacagagatgacttgctgcatattggaccagggaataagaactatacttacatggcccaggctgtgaacagagggctgacacttgtggggctttgggaccggagacatccaggcatggcagattatattcctgttgctgtagagcatgccattgagccagacaccaagcttacctttgttggagatatcatctgcttcagtactcaccttgtcagccagcatggtgaacctgggatatggatgatttctgccaacaatattctacagacagacattgtcactggagtaggagtggccaggagtccggggactgcaatgatttttcatgacatcccaggagtagtgaaaacatatcgagaggtggtggtcaatgcatcatcaagattaatgctcagttatgacctcaagacttatctcaccaataccctcaattcaactgtattcaagctcttcatcaccactggcagaaatggtgtcaatcttaaaggattctgtaccccaaaccaggccttggccattacaaaagtacttcttccagcgaccctcatgctgtgccatgtacagttcagtaatactttgctagacattccagcaagtaaagtctttcaggtccattcagatttcagtatggagaaagatcactgtgaagattccgccatcctcaagcggttcactggctcttaccagatcctgctcttgaccctctttgcagtgctggcatcaacagcttccatcttcctagcatacaatgccttcctaaacaagatacaaacagttccagttgtgtatgtaccaactctaggaacaccacagccaggtttttttaactccacaagttctccccctcacttcatgagtctacaacctccattggcccaaagtcggctgcaacattggttatggagtataaggcactaacctctgcttggacaagtttctcttaactgcaggggaatgaagatttctagtcctcgacaagaagcctaacagcaacttctacattaagtttccagataaggcttctgagaactataaataaagcatcctaagctgtttcttaaaac

SEQ ID NO: 93713 - DNA, 413 bp, Homo sapiens
gacctcaaacacttgaacccatacccacagtgcagcaggactgttgtgtgtgctccttgtaagtaaaactaatctctgacccatccaagaggttccagtatgctagagcatgtgggaggcttctgcctcatgtcaagacgtgctctaaagtcacagaattgtgttgctccaaaatggcagtggtcaacacaattggctggcagtttagaccacattagaagataatcgctatttttagtataaatattattttcccttttatcttaagggatagtaccaattccattctttattgctaataagttaccagtagtatatcactgcagtgagaatatttcaaaataaccctgtagctttattccaaagacctcagttatagacttactctcattttgtggtcactccaaaaacaa

SEQ ID NO: 93714 - DNA, 189 bp, Homo sapiens
ctcccagcagacagatacgaatcgagccggtaccctgggcaagagagcaagaatccatttcaaaaaacaaacaaacaaaaaaacacaaaactttattctgctctacaatgcagagtattttaaggggggcaagaatggaaacagagagatagtaatgaggttgctacaagagttcagtttagaactggt

SEQ ID NO: 93715 - DNA, 254 bp, Homo sapiens
taaagcactgtgtttccggcatggggtatttcgagggaacaggtattctaacgacagagagcgagagtgagtaagagaaaaagagatgtacttgttgaaggaagggtagggtagaggggctccctgggaagtttcctgggccacctacctgccactctgaggcatactgtttggtttgttctctgaacccagaggtggccccagataatacaaaaaaatggccaacgtttcttttcactgcccttgactgttct

SEQ ID NO: 93716 - DNA, 523 bp, Homo sapiens
aaacagtgctgtcagtgcaacatttgattgcacatccctctaccagagagagcagtatcagctctgctggtggagggccccatggaaagtggcccttgcttggttttcccagggagctagaggacacttctccgtaaggaaacgtgacttgctgttgcatggaagtggggctggctgcctgcttccaatctgaaagacttccagaagtcttcccaccttacctgagggtgcctgccaaattgttttgggaacaggaaaggccattgcagactcactaagattaatgagttcctcactatctcaagcaaggtgttgggtatctccaggtttggggactggcgtacagatcacatttgtctatgaagaacctcgttgtgggagattactccagagtcaatggcagcctttttagatttgttcccttctgtccttccactcaaaactgaaaaattgcccaggctgcccaagagggccaagccaagtagagagcaaggaacaccaggggaagtgtcaagacattaga

SEQ ID NO: 93717 - DNA, 408 bp, Homo sapiens
agacacaaaggggagaagcaagaacattcagttgagggactccttagcaaacgcatctagttagactagaaagtctacaaagaaaatagtaaaagacaaggttgggaaaattgttggaactagatgatggacatagggatttctattaggtgggggcagaagtaactgcagtttttgtaattacttttaacggcaattactttggcaattgcaattactttagcaccaacctaatagactaagggattaagacagaaagtaatggagagatgctgaacttttggtatatagaaacaaaacaaatagttattgattaaaagctttctctttttttttgccaagcattgcagtaagtgctttatgtcaactgtctcctctgagcctcaggcaaccctgtgaaacagatac

SEQ ID NO: 93718 - DNA, 634 bp, Homo sapiens
cacctgtcactggaacaaattcccacagactctcagcccagggaccaaaggacccacaggctaaggcagagggactgagactggcacccccatttggtaagggggtgacctatcagggcagtgacagagagagtccttcgagtccaatagacctggctgtgagtccaggctctgcccagaccctctaagccaccttgaggctgctatttctctgagtatctgtttctagatgttttaaaagtgggagagtcgcatttcctccctcccaggatcacggtacagtaaagagcttagcactctgcctaatacatagaacaagcagcaaatgttcactgccgttgcgatgacagtgccctggcaggtgacctgtgctcaaggcgtcccagtgcacacacacactcacacgcacacagggtagggcagcagatgggacacacgccctgccacaggccattttaaggagtcggggtgggtgaggacccaggcacggtggaggaaagagggaggcaagaagcctttttcagcttccttggtgtcatctcacagtgcctccctcaggaggggaaaagggaggggagtgagaaggctgtttagctgtgttccatactggctgtgcctcacacaaccggcccca

SEQ ID NO: 93719 - DNA, 702 bp, Homo sapiens
gagaattagagcatacattctgtcactgaaattttaaagtggtaccaatttctccaaaattaagattagtagtgtgaagtgaaatgtttgaagggaattttaaaacttatcttttaatgtaaagtctatggtttagttacatctattgtataaacattctaatttgcatctccattgctcaaagacatttatgccatccagatatgttttacataatgccagaaggtgaaattcctcaggtgggggcgtgattcctacctggaaagataacctttatcttccaggaggacaacttgtaactttctggtgtcagcttctggtttagaagagggaggttggggtgccgtcctcactgagctcttgagctgagtacttccagatgtcttctgaataccacttgtttggggaccaaggaaaaataagaaagaaggagtaaaaccaatggcagaaatgaccaagatggcagaactgcatctctgatcctaacttaagaagatttaatgcactgagccatttattgaacattttgtgctgtgatggaggtaggggtaggcagctgaatgaaggcaaaataaagtgagatcctccctcctcaaaacagtcactccccctgccttctaattcaggcaataaagaactcaatgagagtttctttctttctttatcaaatagggttagctgtatgttcccagtttaaaaaaa

SEQ ID NO: 93720 - DNA, 217 bp, Homo sapiens
ctgatatactactctggatttttagtcagttacatgctataatttaaaaaaaatctgtgggccgggtgcagtggctcacgcctgtaatcccagctctcagggaggctaagaggcgggaggatagcttgagcccaggagttcgagacctgcctgggcaatatagcgagaccccgttctccagaaaaaggaaaaaaaaaaacaaaagacaaaaaaaaaa

SEQ ID NO: 93721 - DNA, 402 bp, Homo sapiens
tttagtctagagcctggtatgtgacagcccgggccctctctcctgcgaactgccgccgccaccgcctctgctggccagataattagtccattacgactctcccacctcgggtaggtgggggcagggtgagagcccaccctcagactccttgtaattcaacttcctgtgttttatggaagcaggctgttgggggcagagagtgaaaggccggtccctaggcttggccaaccccttcctcaactcccagcccccacctccctccttccacccaaacccggttgctgtggtgaccaaatgttatttcccagcttcgtgttggaactgctttgtaaaagttttttacatctcttacctgcctcaaacacgaatgcaggctggtctatctctccctgcgtcttgctc

SEQ ID NO: 93722 - DNA, 443 bp, Homo sapiens
acctggcgacttgttacacagagaaacccatgctttacatggtatgaacacgggcacaccctttgggcacttaggaacatggcatggcaagtggtatgctttgtacagctgtgtacctgctacacagaattcgagaactttccatttgtaaagtcaggacttgactaggtaaagggcagatggaaaattttaaagccttttattcagttcattctcttaagaattattccaaggaacaaagttacctgaagagctcatataataaaagtacaaaagaaactgaaactttggagtcactgcacagtaactatctatataaacctcaagatccacgtgaggaaaatttccccataatttccttttataggccaaatggttataattacaactctcctttgaaggcaaaaattactcattaaatggacacagcctgttttgctagt

SEQ ID NO: 93723 - DNA, 445 bp, Homo sapiens
tggcaactgactgtcagcgagagcaagggaggcgcaggagggagcaccagcaagagagagtggaggaaacagagccccggtcctgtgtaactgaatcacagaagtgaccacactccatcgttcttgccctattctgctcatcagaagcaggtcattaagtccagcccacactcagggagagggagctgtaggcatacttggaggtatgcaggcttggttctaaaccaacacaataaagcaagtgtcttcacaagtaagtcacacaaatttcttggtttcccagtggatataaaagtatgtgtatactatagtctattaagtcacatcttcaggctccacttctaattctagttcttttgctgtttccaccacatctgaggtcacttcttcctctcgtcttgaacctctcaaggtcatccatgagggttggaatccacttccacat

SEQ ID NO: 93724 - DNA, 311 bp, Homo sapiens
cgtcatctcggctcactgcaacctctgcctcccaggttcaagtgattctcctgcctcagcctcccaagtagctgggactacaggtgcgcatcaccacgcccagctaatttttgtatttttagtagagatggggtttcaccatgttggccaggccggttttgaactcctgacctcaggtgatccgcccacctcggcctcccaaagtgctgggattacaggtgtgagccactgcacccagcctactaacccatttctttccttcacttacaactgcttactcttcaactcctagttctctatgccaactcatg

SEQ ID NO: 93725 - DNA, 568 bp, Homo sapiens
tgactattatgctcaatttaccaaagaaaaggccgttggatctgtgggttcaatgaacccttagtgatcagctatgtggtctaagttctcactgatctcctctctaagatccctgattgaggtcagaatcgcagaatcaatgggcacttctctattctttcataccaatcatttgatccattgcactgatagtttattgagtacaaaatgcagcttcctcttccacaaaagcctaacaatggtcagctattgccaatggaagaacaattcagctcatcccatcttttctggatcaggtccttatattacccccgccgcccccaagctttacttaaagtcctctctatccctttgaaacatttttctttctggctccctgcttaggttagctcttctcgcttgtcttgtcattaggtggaataatacatgaagacactcctggcacaattactgccttggaattggcccagttcagcttatcagatgatgagtgtctgctatgggcagatgcaagtgatataagcatcagagacacctccttcccaaagaacttaacacatgttagtgt

SEQ ID NO: 93726 - DNA, 294 bp, Homo sapiens
  misc_feature (272)..(272): n is a, c, g, or t
ggagcttcactggaacccaggaggtcgaggctgcagtgagccgtgattgcaccaccgcactccagcctgggtaacagagcaaccctgtcaatcatacatatatactacatacatacagcaaatctcaagctaaaataggaagcaaggggctggcctgcagcagtggctggagaagagaaaggatttggtgacacatttctcagaaatgccgtcactgagaagagacctctcagggcccctacctagcattgtgttcactgccacagcggagngggatcaccgtttctatacaaa

SEQ ID NO: 93727 - DNA, 259 bp, Homo sapiens
agcatttccaaagccacatgtagatccgtccacaaaggggaaaaacttcactgacaaaaggggttaaacacaacctctgacaaaacactgaataacaataagatactcaaatgcagggacaactcctaagaagccaggcctaaaattaaaatttcttgcatccctgagagtctggaagactgtttgcatgtccgagactgtttcctctctggagcaatcagagaggggacatccaaactaatagtccctggatgacatt

SEQ ID NO: 93728 - DNA, 404 bp, Homo sapiens
tgaatctagcaggatcctcagggctacctgggtgcatgcaagaatgaatcagaagcatgccatccgaattccaacaagtgattttgaaataaacttttagaatggggtggtgtgtgctgagttattctggattctttcccatcacaatggcaaaaacatgtaagaaaatatgtttcccatgtagttcctctgaatttatttcttttccaaaataatgacattacagcatggctattttagtgtcactttttggaaagaaacaaattcaagggaggcaaacatacctccttctccttcctcccaaaggcctgctgaattaagaggtggaagctgtaacaacgcagaaacaaggccgcaccgcccatggtggaggacgtgctggaagaggggtagcccttaaactg

SEQ ID NO: 93729 - DNA, 296 bp, Homo sapiens
ctggatccaagccaaaactttaccctagttactaattgtaggataccaaatatgtaaaattaaatgatctttaaggtacttctaagtctaaccttctgtttgataaaatcacttcacctttctacgcctcagtttcaaatctataaaatggggatcattgtcaatgacctgtcagcctcccagggccactggaagatctaatgaagtgatgactaagatagagctgaactccttacagatataagagttggtgatttttttttcagtgccctggtaaaagataggcagtccaaagt

SEQ ID NO: 93730 - DNA, 430 bp, Homo sapiens
cactttgcagatgacagtatctgttaatattgaaactaaaactagtatgttatactttaagttcttactaagatcccttaactgaccttaactgatttaagatgaattcaggcagtttctagttaatgacactcaaatatgctatatgattatatttttatagtactttggtctctaatcctatttaaaattggtaatttatgaacaatttcagcaaaatgaaattatttcctttacaagcttcccaagttgaagagtttaggttgtaaccttaaactttgaatattccaatctttttctttcgcttaacttggaagcatctttccacagctaaattaggaaagttgggttgaccatttagcctcatgggtgtgacccctagtaatttccttgaaacagtgttgaagaatttagagcattaaaaataaaa

SEQ ID NO: 93731 - DNA, 753 bp, Homo sapiens
gttacaggttcgtaaagttactagcgcagaagcattagcaagatcgtgatgtatttcttaggctattgttggcctccacacaaattcatggagttgctggatgtggtttaaagggtacaagatctctgtgttagataatattggagttaatccattcctctgggaggggaattgagtgtcccgaggtagctgttactggaaggatagcattgccccttggtgagactgttaggagagtgaaggagagtgagtgacagatggagctcttgggagtggcagctcatcatttgttggtgcagtacaggccaccagaagaggatggatctgccggggcgctccctggtagtacaaagagcaggaacccgctagaggagagatgtgctttccatgagcgccaagggcccagcctacccccagacagatgtgcccttgagaagtggggactgttggcaccaagaggggttgcctccgcggtggccttcctggatggagctgcccgtgttgagcgcactgtgctctgtgtgggcaggggttccagctgcttcccagccctttcatgggcagccccctggagctccaccaccccaaggagccccaaaaccctcctgctgaacatgccatgaatttgaatgcttgaaggcatagctttaaaaacaaaaaaaaaccctgctttgactgcagggtggtagggggagttagctttgtttttgtcactatttttaaaagtatatttgcagtaacacatttttttca

SEQ ID NO: 93732 - DNA, 405 bp, Homo sapiens
tcccaatgcttggggcctttgcagcctccagactcgccatggccctctggtcccactttctctttcaaactgtctttttctcattcctttgactctgctggacttcgtcacccccatgacctggtgttgggtctgatcaccccaacaaaagaaaacaggaagggggcacctggatttgaatcagggacctcttgatttgcagtcaaatgctctacccctgagctataccccctgcttgtcataagtgtctaataaccacttttcatgttggtaatcgcacccaggagtcctacagcacattgaaagttcctgcttacttttagagagtaagaccagcaactgattttaccacaaactcaccccagaaaagtccatccccagttgccaaaccctggcccctgctca

SEQ ID NO: 93733 - DNA, 484 bp, Homo sapiens
gaatgccattgacttgtcaccaaaggagaaactgaagttagagagtcagggagtatttggagaagcgtggacagttatctagtaggttctgggtaaagcaagagttcagtggccgaatgaagagctccacctaagcgggtctgaatgtcttaggaggattccaggcctcaggctcctgcataattctacggcaagggcaagaagttgtaaaacaggtttttgagcaaaatagccacatagactaatttggcctggcattgtcctaactcttaatacctctctctctctgctcctcagcacccaaagcccacccatatgtaccaaccaactgcaccttcctctaccggcctactcttcatctaccctgggtcccatcctcccgtctcctcctcctcctccctcagagctccacctaagcctgtcttcaaaggcaatgacctgcatacagaattaggccatctcttctactctccaccccatcagc

SEQ ID NO: 93734 - DNA, 156 bp, Homo sapiens
agcacacacgatgaggctactgtgttgagtgtctgtcctaggtgggtcatgctgatgtgcagccaccattccacacctgagtgtcccactgccctgctgggggttggggaatgctcattaccgggatgagcacttttgcaaaatgggctgaggtgg

SEQ ID NO: 93735 - DNA, 457 bp, Homo sapiens
ttttaaacaaaatcttattgtaaaaatgaagaatgagtagctgctaaaacatcatgggaaaaatgttatccacttttactttagaacagcattcaaaactactgaacattttataagtgaatcaaatatagatgtttatatagtcttcaataatcacacatttctttagtgccagctcctaatcatattacaagtttttcatgagttcaactaaaatgtgaccatttttaaaatttcatattttgctttgacagtataacttttaagatttctgagatgtagaaatgtagttgacttgatattttctttcacttgtgcatgtctttaaatgttaaaaactaaaaactattgttagagtaaggagggcggatcacgaggtcaggagatcaagaccatcctggctaacacggtgaaactcagtctctactaaaaatacaaaaaaaattagccaggcgtg

SEQ ID NO: 93736 - DNA, 5313 bp, Homo sapiens
  misc_feature (1088)..(1088): n is a, c, g, or t
  misc_feature (2048)..(2048): n is a, c, g, or t
attgttggcaggcctctgaggctcatgcaacatcaaggactccttcatctggagcactttgactctagctctgtgtaaacaggccatcttataaactcattgccatttaacagatttggcttataatcaggggtttgctgtaacttgcatttttgactgtgccttattctcacccagggagtgtccgagtgcccgaggagttgaagcttcctcatgcttgctgtgtcgggatcgcttcccagaccctcctcagtgtgcttaatccaactgaccgctggctgcaagtcagcattggggtcctcagcattagtgttaatggtgaaaaggtagctttctatgtctttctcatttaacctaacagttgcattgtgattaggtgcttgatttcccccatctctagtgctaggttctcccttcacgcctttattaatgcacacagtcattgccatggtatctttctctcagaccccttttgttgtagtgcttgtagagtgtaaagtgaaacagttttgcattttccatcatttattatttatattttattgttatttattggtaaattcctataaatttgcttttagtgctattatttaaatcatcaaaagttctgagtttcttgtttctacttgtcagttttgttaaaggtgattgaatataagtaaccatgacttgtaaaaaaaaaaaaagaaagcagttactcttggagcttatgccttcatttggcaagggaagtctttttaactagtttatctgatgattttcttacatgagcttttgaaatacctggaaatgcagttttaatatgaacttttaagacagatgtctcttacatgatcaattacagttgctataattctagactctaaatcttctctcctggttacagtgaccatttgaacattggtgagtggagaggggggatatatggtcagcagctgttttgaaatgtcccagttttacgactgttacttgtgaatcagtattggtggatgcttccctcgtgcctcttagtggccatcgtctgcctggtaaaataagatcgcctccccctacgccgtcttggcttttcccctctacttccagtcctnaggttagatgaaaagtaggtgattgaaggagaggattgagggtggaaggtgggctgtgaagactttttgggggcatcctggagtctgtgaatgaagcagtgttgtctatggaagtggggagtagaaaagaagatccccattgacagtgaggagggagggtggctggagttgtcactgcagtcgaggcggagtcagggctgtgggacctcagcggttagcctgactcttcttccccccagcccccacccactgctgtgttgtgtgtgctagagagacttacagggctgtgaaagagtgacctttgtcagtgtcctttttaagacaagtgagtgtaagggtcaatgtgcttgcttggaggtggactggggagacagccttggtgcagcaagaacattcaactcaggaagcatttgactcgttgtacttcagagaccataaatgacaaggttttgacatttttgaagagataataaatgttttaatttggcagtttgagtgattgggaaaaggaatcttaaactaggtgattctacttgattttcagtgtgaagccattaataacgaactttatggctcttttttgaaggtggatctttcaacatatcgttgtttagttttcaagaataaagccatcataagacctcatgccacagaagagataaaagtgctttttataccatccagtcctggggttttcagatgcacattcagtgttgcttcttggccatgttcgacagatgctgagaccatcgtacaggcagaagctttggccagcaccgtcactctcactgccattgccgagagtcctgttattgaggtagaaacagaaaagaaagacgttcttgattttggtgacttgacttatggaggctggaaagccctcccactaaaattgataaaccgaacgcatgccactgtgccaattagactgattattaatgctaacgctgtagcctggcnctgtttcacgttttccaaggaacccgtccgagctcctgtggaagttgctccttgcgctgatgtggtcactcggctagcaggcccttctgtggtcaaccacatgatgcctgctagttatgatggacaggatccagaatttctgatgatttgggttcttttccatagtccaaagaaacagatcagctcttcagatattctggactcagcagaagaattctcggcaaaagttgatatcgaagttgacagcccaaaccctacgcccgttcttagaagtgtgagtctccgagcaagagcaggaatagctaggatccatgctcccagggacttgcagacgatgcatttcttggccaaagtggcttcctcaagaaagcagcacttacctttgaaaaatgctgggaacattgaagtttatttggatatcaaggtcccagaacaaggaagtcacttttcagtggatccaaagaatctattccttaaacctggagaagaacatgaggttattgtttcatttactccaaaggatcctgaagcctgcgaggaaaggatcttgaaaatatttgtgcagccatttggacctcagtatgaggtagtgttaaaaggcgaagtcatttcttcaggaagtaaacctctgtcacctggaccttgcttagatattccatcgattttgtccaacaaacaatttctggcttggggaggagtccctctaggtagaacacagcttcagaaactagctttaagaaataattctgcatctacaactcaacatttacgactgcttattagaggacaagatcaggactgctttcagcttcagaacacttttggttcagaacagcgattgaccagtaactgtgagatcagaattcacccaaaggaagacattttcatctctgtattatttgcacctactcgattatcttgcatgttggctagactagaaatcaaacaacttggaaatcgatcacaaccaggcattaagttcacaatacctttgtctggatatggaggaacaagcaatcttattttggaaggcgttaaaaaattatctgacagttacatggtaacagtgaatggcttagtacctggcaaagaaagtaaaattgttttttctgtccgcaacactggctcccgagcagcttttgttaaagcagtaggttttaaggattctcagaaaaaagttttgctggatcctaaagtattgaggatttttccagataaatttgtactcaaggaaagaacacaagaaaatgttactttaatatataatccatcagacagaggaatcaataataaaactgcaacagaactatcaactgtatacttatttggtggagatgaaatttcaagacagcagtatcgcagggccctgttacataaaccagagatgataaaacagatacttccagaacatagtgtgcttcaaaacattaattttgttgaagcatttcaagatgagctattagtaactgaagtatatgatcttccccaacgacctaatgatgttcagctcttttatggaagcatgtgtaaaattatactttcagtaattggagaattcagagattgcatttctagcagagaattccttcagccttcttccaaagctagcttggaatctacaagcgacttgggagcttctgggaaacatggtggcaacgtctctttggatgttttaccagtcaaaggtcctcagggttctcctcttctctcacgggcggctcgcccgcctccggatcagctggcctccgaagagccgtggactgtcctacccgagcacttgattctggtagctccttctccttgtgacatggcaaaaactggacgtttccagattgtgaataactctgtgaggttactgagatttgagctgtgctggccagcgcattgcctcacagtcacgccgcagcatggatgtgtcgcgccagagagtaaactacaaattcttgtgagtcctaattcctccttatccacaaaacagtcaatgttcccgtggagtggtttgatctatatacactgtgacgatggacagaagaaaattgtgaaagttcaaattcgagaagatttaactcaagtggaacttttaactcgtttgacctccaaaccatttggaattctttccccagtatctgagccttcagttagtcatttggtcaaaccaatgacaaaaccgccttccacaaaagttgaaataagaaacaagagtattacttttcctacaacagaacctggtgaaacttcagagagctgtctagaactcgagaatcatggcaccacagacgtgaaatggcatctgtcatctttagcgccaccttatgtcaagggagttgatgaaagtggagatgtttttagagctacctatgcagcattcagatgttctcctatttctggtctgctggaaagccatgggatccaaaaagtctccatcacatttttgcccagaggtaggggggattatgcccagttttgggatgttgaatgtcaccctcttaaggagcctcacatgaaacacacgttgagattccaactctctggacaaagcatcgaagcagaaaatgagcctgaaaacgcatgcctttccacggattccctcattaaaatagatcatttagttaagccccgaagacaagctgtgtcagaggcttctgctcgcatacctgaagcagcttgatgtgactgctcgtggagtttatgccccagaggatgtgtacaggttcctgccgactagtgtgggggaatcacggacacttaaagtcaatctgcgaaataattcttttattacacactcactgaagtttttgagtcccagagagccattctatgtcaaacattccaagtactctttgagagcccagcattacatcaacatgcccgtgcagttcaaaccgaagtccgcaggcaaatttgaagctttgcttgtcattcaaacagatgaaggcaagagtattgctattcgactaattggtgaagctcttggaaaaaattaactagaatacatttttgtgtaaagtaaattacataagttgtattttgttaactttatctttctacactacaattatgcttttgtatatatattttgtatgatggatatctataattgtagattttgtttttacaagctaatactgaagactcgactgaaatattatgtatctagcccatagtattgtacttaacttttacaggtgagaagagagttctgtgtttgcattgattatgatattctgaataaatatggaatatattttaatgtggtatatccaga

SEQ ID NO: 93737 - DNA, 5771 bp, Homo sapiens
  misc_feature (2506)..(2506): n is a, c, g, or t
aaaggactattctcatgtgcgtcatttcttacctaatgatttagaaaaaagtaatggatccaatgcacttgatatggagaaataccttaaaaaaacagaagttagtagatatgaaagtgcattggaaaacttttcaagggctagtatgtctgatacttgggatttatctttgcccaaagaacaaactactcaagacattcatccggtggacttaagtgctactagtgtaagtgtgagggcaccagaagaaaacacagcagctattgtttatgttgaaaatggagagagtgagaatcaagagtcatttagaaccataaactcctcaaattcagttacaaatagagagaataacagtgcagtagttgatgtgaagacatgttccattgacaacaaattacaagatgttggtaacgatgaaaaagctacctcaatttccactccatctgatagttattcatcagtgaggaaccccagaataacatccctttgtctgttaaaagactgtgaagaaatacgagataacagagaaaatcagaggcaaaatgagtgtgtcagtgaaataagcaacagtgagaagcatgtgacttttgaaaaccatcgcatagtctcacctaaaaatagtgatttgaaaaatacctctcctgagcatggtggacgtggctcagaggatgagcaggagagcttcagaccttccacgtcaccactgagtcattcttctcctagtgaaatttctggaacgagttcatcagggtgtgcgttagagtcctttggttcagcagctcagcagcagcagcctccctgtgagcaggagttgtctcccttggtgtgctcgcctgctggggtgagcaggctgacgtatgtgtctgaaccagagagctcctatcctaccacagccacagatgatgccctggaggaccgcaagagtgatatcaccagcgagttgagtaccacaattattcaaggcagtccagccgcattggaggaacgggctatggaaaaattgagagaaaaagttccatttcagaatagaggaaaaggaacattatcatctattatccagaataactctgatacaagaaaagcaactgaaactacttctctgagtagcaagcctgaatatgtaaaacctgactttagatggagtaaagatccttcctccaaaagtggaaatctgttggaaaccagtgaggtaggttggacatcaaaccctgaggaattggacccgatcaggctggctctcctgggcaagtcaggtctgagctgtcaggtggggtcagccacatcacaccctgtgtcctgccaggagcctatagatgaagatcaaagaataagtcctaaagataagtcaactgctggccgtgagttcagtggccaggtttctcatcagaccacctctgaaaaccagtgtactcctattcccagcagcacagttcacagctctgtggctgacatgcagaacatgcctgctgctgtgcacgcactcttgacacaaccctctctcagcgctgctccttttgctcagcggtatttgggaacactcccttcaactggaagcaccaccttgcctcagtgccatgctggcaatgccacagtctgtggcttctcaggaggccttccctatccagctgttgcaggagagcctgtgcagaactctgtggctgtgggaatttgtctaggatcaaatatcggctctggatggatgggtacctcttccctctgtaacccatattctaataccttaaatcagaacctgctaagcacaacaaaaccttttcctgtgccgtctgttggtacaaactgtggaattgaaccatgggattcaggagtgacatcaggattggggagtgtccgagtgcccgaggagttgaagcttcctcatgcttgctgtgtcgggatcgcttcccagaccctcctcagtgtgcttaatccaactgaccgctggctgcaagtcagcattggggtcctcagcattagtgttaatggtgaaaagtgaccatttgaacattggtgagtggagaggggggatatatggtcagcagctgttttgaaatgtcccagttttacgactgttacttgtgaatcagtattggtggatgcttccctcgtgcctcttagtggccatcgtctgcctggtggatctttcaacatatcgttgtttagttttcaagaataaagccatcataagacctcatgccacagaagagataaaagtgctttttataccatccagtcctggggttttcagatgcacattcagtgttgcttcttggccatgttcgacagatgctgagaccatcgtacaggcagaagctttggccagcaccgtcactctcactgccattgccgagagtcctgttattgaggtagaaacagaaaagaaagacgttcttgattttggtgacttgacttatggaggctggaaagccctcccactaaaattgataaaccgaacgcatgccactgtgccaattagactgattattaatgctaacgctgtagcctggcnctgtttcacgttttccaaggaacccgtccgagctcctgtggaagttgctccttgcgctgatgtggtcactcggctagcaggcccttctgtggtcaaccacatgatgcctgctagttatgatggacaggatccagaatttctgatgatttgggttcttttccatagtccaaagaaacagatcagctcttcagatattctggactcagcagaagaattctcggcaaaagttgatatcgaagttgacagcccaaaccctacgcccgttcttagaagtgtgagtctccgagcaagagcaggaatagctaggatccatgctcccagggacttgcagacgatgcatttcttggccaaagtggcttcctcaagaaagcagcacttacctttgaaaaatgctgggaacattgaagtttatttggatatcaaggtcccagaacaaggaagtcacttttcagtggatccaaagaatctattccttaaacctggagaagaacatgaggttattgtttcatttactccaaaggatcctgaagcctgcgaggaaaggatcttgaaaatatttgtgcagccatttggacctcagtatgaggtagtgttaaaaggcgaagtcatttcttcaggaagtaaacctctgtcacctggaccttgcttagatattccatcgattttgtccaacaaacaatttctggcttggggaggagtccctctaggtagaacacagcttcagaaactagctttaagaaataattctgcatctacaactcaacatttacgactgcttattagaggacaagatcaggactgctttcagcttcagaacacttttggttcagaacagcgattgaccagtaactgtgagatcagaattcacccaaaggaagacattttcatctctgtattatttgcacctactcgattatcttgcatgttggctagactagaaatcaaacaacttggaaatcgatcacaaccaggcattaagttcacaatacctttgtctggatatggaggaacaagcaatcttattttggaaggcgttaaaaaattatctgacagttacatggtaacagtgaatggcttagtacctggcaaagaaagtaaaattgttttttctgtccgcaacactggctcccgagcagcttttgttaaagcagtaggttttaaggattctcagaaaaaagttttgctggatcctaaagtattgaggatttttccagataaatttgtactcaaggaaagaacacaagaaaatgttactttaatatataatccatcagacagaggaatcaataataaaactgcaacagaactatcaactgtatacttatttggtggagatgaaatttcaagacagcagtatcgcagggccctgttacataaaccagagatgataaaacagatacttccagaacatagtgtgcttcaaaacattaattttgttgaagcatttcaagatgagctattagtaactgaagtatatgatcttccccaacgacctaatgatgttcagctcttttatggaagcatgtgtaaaattatactttcagtaattggagaattcagagattgcatttctagcagagaattccttcagccttcttccaaagctagcttggaatctacaagcgacttgggagcttctgggaaacatggtggcaacgtctctttggatgttttaccagtcaaaggtcctcagggttctcctcttctctcacgggcggctcgcccgcctccggatcagctggcctccgaagagccgtggactgtcctacccgagcacttgattctggtagctccttctccttgtgacatggcaaaaactggacgtttccagattgtgaataactctgtgaggttactgagatttgagctgtgctggccagcgcattgcctcacagtcacgccgcagcatggatgtgtcgcgccagagagtaaactacaaattcttgtgagtcctaattcctccttatccacaaaacagtcaatgttcccgtggagtggtttgatctatatacactgtgacgatggacagaagaaaattgtgaaagttcaaattcgagaagatttaactcaagtggaacttttaactcgtttgacctccaaaccatttggaattctttccccagtatctgagccttcagttagtcatttggtcaaaccaatgacaaaaccgccttccacaaaagttgaaataagaaacaagagtattacttttcctacaacagaacctggtgaaacttcagagagctgtctagaactcgagaatcatggcaccacagacgtgaaatggcatctgtcatctttagcgccaccttatgtcaagggagttgatgaaagtggagatgtttttagagctacctatgcagcattcagatgttctcctatttctggtctgctggaaagccatgggatccaaaaagtctccatcacatttttgcccagaggtaggggggattatgcccagttttgggatgttgaatgtcaccctcttaaggagcctcacatgaaacacacgttgagattccaactctctggacaaagcatcgaagcagaaaatgagcctgaaaacgcatgcctttccacggattccctcattaaaatagatcatttagttaagccccgaagacaagctgtgtcagaggcttctgctcgcatacctgaagcagcttgatgtgactgctcgtggagtttatgccccagaggatgtgtacaggttcctgccgactagtgtgggggaatcacggacacttaaagtcaatctgcgaaataattcttttattacacactcactgaagtttttgagtcccagagagccattctatgtcaaacattccaagtactctttgagagcccagcattacatcaacatgcccgtgcagttcaaaccgaagtccgcaggcaaatttgaagctttgcttgtcattcaaacagatgaaggcaagagtattgctattcgactaattggtgaagctcttggaaaaaattaactagaatacatttttgtgtaaagtaaattacataagttgtattttgttaactttatctttctacactacaattatgcttttgtatatatattttgtatgatggatatctataattgtagattttgtttttacaagctaatactgaagactcgactgaaatattatgtatctagcccatagtattgtacttaacttttacaggtgagaagagagttctgtgtttgcattgattatgatattctgaataaatatggaatatattttaatgtggtatatccaga

SEQ ID NO: 93738 - DNA, 6397 bp, Homo sapiens
  misc_feature (2752)..(2752): n is a, c, g, or t
  misc_feature (3712)..(3712): n is a, c, g, or t
aaaggactattctcatgtgcgtcatttcttacctaatgatttagaaaaaagtaatggatccaatgcacttgatatggagaaataccttaaaaaaacagaagttagtagatatgaaagtgcattggaaaacttttcaagggctagtatgtctgatacttgggatttatctttgcccaaagaacaaactactcaagacattcatccggtggacttaagtgctactagtgtaagtgtgagggcaccagaagaaaacacagcagctattgtttatgttgaaaatggagagagtgagaatcaagagtcatttagaaccataaactcctcaaattcagttacaaatagagagaataacagtgcagtagttgatgtgaagacatgttccattgacaacaaattacaagatgttggtaacgatgaaaaagctacctcaatttccactccatctgatagttattcatcagtgaggaaccccagaataacatccctttgtctgttaaaagactgtgaagaaatacgagataacagagaaaatcagaggcaaaatgagtgtgtcagtgaaataagcaacagtgagaagcatgtgacttttgaaaaccatcgcatagtctcacctaaaaatagtgatttgaaaaatacctctcctgagcatggtggacgtggctcagaggatgagcaggagagcttcagaccttccacgtcaccactgagtcattcttctcctagtgaaatttctggaacgagttcatcagggtgtgcgttagagtcctttggttcagcagctcagcagcagcagcctccctgtgagcaggagttgtctcccttggtgtgctcgcctgctggggtgagcaggctgacgtatgtgtctgaaccagagagctcctatcctaccacagccacagatgatgccctggaggaccgcaagagtgatatcaccagcgagttgagtaccacaattattcaaggcagtccagccgcattggaggaacgggctatggaaaaattgagagaaaaagttccatttcagaatagaggaaaaggaacattatcatctattatccagaataactctgatacaagaaaagcaactgaaactacttctctgagtagcaagcctgaatatgtaaaacctgactttagatggagtaaagatccttcctccaaaagtggaaatctgttggaaaccagtgaggtaggttggacatcaaaccctgaggaattggacccgatcaggctggctctcctgggcaagtcaggtctgagctgtcaggtggggtcagccacatcacaccctgtgtcctgccaggagcctatagatgaagatcaaagaataagtcctaaagataagtcaactgctggccgtgagttcagtggccaggtttctcatcagaccacctctgaaaaccagtgtactcctattcccagcagcacagttcacagctctgtggctgacatgcagaacatgcctgctgctgtgcacgcactcttgacacaaccctctctcagcgctgctccttttgctcagcggtatttgggaacactcccttcaactggaagcaccaccttgcctcagtgccatgctggcaatgccacagtctgtggcttctcaggaggccttccctatccagctgttgcaggagagcctgtgcagaactctgtggctgtgggaatttgtctaggatcaaatatcggctctggatggatgggtacctcttccctctgtaacccatattctaataccttaaatcagaacctgctaagcacaacaaaaccttttcctgtgccgtctgttggtacaaactgtggaattgaaccatgggattcaggagtgacatcaggattggggagtgtccgagtgcccgaggagttgaagcttcctcatgcttgctgtgtcgggatcgcttcccagaccctcctcagtgtgcttaatccaactgaccgctggctgcaagtcagcattggggtcctcagcattagtgttaatggtgaaaaggtagctttctatgtctttctcatttaacctaacagttgcattgtgattaggtgcttgatttcccccatctctagtgctaggttctcccttcacgcctttattaatgcacacagtcattgccatggtatctttctctcagaccccttttgttgtagtgcttgtagagtgtaaagtgaaacagttttgcattttccatcatttattatttatattttattgttatttattggtaaattcctataaatttgcttttagtgctattatttaaatcatcaaaagttctgagtttcttgtttctacttgtcagttttgttaaaggtgattgaatataagtaaccatgacttgtaaaaaaaaaaaaagaaagcagttactcttggagcttatgccttcatttggcaagggaagtctttttaactagtttatctgatgattttcttacatgagcttttgaaatacctggaaatgcagttttaatatgaacttttaagacagatgtctcttacatgatcaattacagttgctataattctagactctaaatcttctctcctggttacagtgaccatttgaacattggtgagtggagaggggggatatatggtcagcagctgttttgaaatgtcccagttttacgactgttacttgtgaatcagtattggtggatgcttccctcgtgcctcttagtggccatcgtctgcctggtaaaataagatcgcctccccctacgccgtcttggcttttcccctctacttccagtcctnaggttagatgaaaagtaggtgattgaaggagaggattgagggtggaaggtgggctgtgaagactttttgggggcatcctggagtctgtgaatgaagcagtgttgtctatggaagtggggagtagaaaagaagatccccattgacagtgaggagggagggtggctggagttgtcactgcagtcgaggcggagtcagggctgtgggacctcagcggttagcctgactcttcttccccccagcccccacccactgctgtgttgtgtgtgctagagagacttacagggctgtgaaagagtgacctttgtcagtgtcctttttaagacaagtgagtgtaagggtcaatgtgcttgcttggaggtggactggggagacagccttggtgcagcaagaacattcaactcaggaagcatttgactcgttgtacttcagagaccataaatgacaaggttttgacatttttgaagagataataaatgttttaatttggcagtttgagtgattgggaaaaggaatcttaaactaggtgattctacttgattttcagtgtgaagccattaataacgaactttatggctcttttttgaaggtggatctttcaacatatcgttgtttagttttcaagaataaagccatcataagacctcatgccacagaagagataaaagtgctttttataccatccagtcctggggttttcagatgcacattcagtgttgcttcttggccatgttcgacagatgctgagaccatcgtacaggcagaagctttggccagcaccgtcactctcactgccattgccgagagtcctgttattgaggtagaaacagaaaagaaagacgttcttgattttggtgacttgacttatggaggctggaaagccctcccactaaaattgataaaccgaacgcatgccactgtgccaattagactgattattaatgctaacgctgtagcctggcnctgtttcacgttttccaaggaacccgtccgagctcctgtggaagttgctccttgcgctgatgtggtcactcggctagcaggcccttctgtggtcaaccacatgatgcctgctagttatgatggacaggatccagaatttctgatgatttgggttcttttccatagtccaaagaaacagatcagctcttcagatattctggactcagcagaagaattctcggcaaaagttgatatcgaagttgacagcccaaaccctacgcccgttcttagaagtgtgagtctccgagcaagagcaggaatagctaggatccatgctcccagggacttgcagacgatgcatttcttggccaaagtggcttcctcaagaaagcagcacttacctttgaaaaatgctgggaacattgaagtttatttggatatcaaggtcccagaacaaggaagtcacttttcagtggatccaaagaatctattccttaaacctggagaagaacatgaggttattgtttcatttactccaaaggatcctgaagcctgcgaggaaaggatcttgaaaatatttgtgcagccatttggacctcagtatgaggtagtgttaaaaggcgaagtcatttcttcaggaagtaaacctctgtcacctggaccttgcttagatattccatcgattttgtccaacaaacaatttctggcttggggaggagtccctctaggtagaacacagcttcagaaactagctttaagaaataattctgcatctacaactcaacatttacgactgcttattagaggacaagatcaggactgctttcagcttcagaacacttttggttcagaacagcgattgaccagtaactgtgagatcagaattcacccaaaggaagacattttcatctctgtattatttgcacctactcgattatcttgcatgttggctagactagaaatcaaacaacttggaaatcgatcacaaccaggcattaagttcacaatacctttgtctggatatggaggaacaagcaatcttattttggaaggcgttaaaaaattatctgacagttacatggtaacagtgaatggcttagtacctggcaaagaaagtaaaattgttttttctgtccgcaacactggctcccgagcagcttttgttaaagcagtaggttttaaggattctcagaaaaaagttttgctggatcctaaagtattgaggatttttccagataaatttgtactcaaggaaagaacacaagaaaatgttactttaatatataatccatcagacagaggaatcaataataaaactgcaacagaactatcaactgtatacttatttggtggagatgaaatttcaagacagcagtatcgcagggccctgttacataaaccagagatgataaaacagatacttccagaacatagtgtgcttcaaaacattaattttgttgaagcatttcaagatgagctattagtaactgaagtatatgatcttccccaacgacctaatgatgttcagctcttttatggaagcatgtgtaaaattatactttcagtaattggagaattcagagattgcatttctagcagagaattccttcagccttcttccaaagctagcttggaatctacaagcgacttgggagcttctgggaaacatggtggcaacgtctctttggatgttttaccagtcaaaggtcctcagggttctcctcttctctcacgggcggctcgcccgcctccggatcagctggcctccgaagagccgtggactgtcctacccgagcacttgattctggtagctccttctccttgtgacatggcaaaaactggacgtttccagattgtgaataactctgtgaggttactgagatttgagctgtgctggccagcgcattgcctcacagtcacgccgcagcatggatgtgtcgcgccagagagtaaactacaaattcttgtgagtcctaattcctccttatccacaaaacagtcaatgttcccgtggagtggtttgatctatatacactgtgacgatggacagaagaaaattgtgaaagttcaaattcgagaagatttaactcaagtggaacttttaactcgtttgacctccaaaccatttggaattctttccccagtatctgagccttcagttagtcatttggtcaaaccaatgacaaaaccgccttccacaaaagttgaaataagaaacaagagtattacttttcctacaacagaacctggtgaaacttcagagagctgtctagaactcgagaatcatggcaccacagacgtgaaatggcatctgtcatctttagcgccaccttatgtcaagggagttgatgaaagtggagatgtttttagagctacctatgcagcattcagatgttctcctatttctggtctgctggaaagccatgggatccaaaaagtctccatcacatttttgcccagaggtaggggggattatgcccagttttgggatgttgaatgtcaccctcttaaggagcctcacatgaaacacacgttgagattccaactctctggacaaagcagcttgatgtgactgctcgtggagtttatgccccagaggatgtgtacaggttcctgccgactagtgtgggggaatcacggacacttaaagtcaatctgcgaaataattcttttattacacactcagtaagttggaaatattactat

SEQ ID NO: 93739 - DNA, 949 bp, Homo sapiens
gagtcaagatcatgccattacaccccagcctgggctacaagagtgaaactccgtctcaaaaaaaaaaaggatcatatgaattttagagcaaaaactgcacagcccattaatgatagggttgggacaagttgttttaatctttccagtgcaatatgctgtctggactgagtaaaacgggcatttagggtgttcccgaaccctttcttaggtagatagtttttgcaggcagtatacaaagctgtatgtatgatagtttagacctcttattttcctttttatatattaatagttactggatagccaggaatacatacgtatgcaatactgttttaatccaattttacgtttttctctcctttgtgttattttctcattaaataatagcatccaagaaatcataaatacatttaagctgaatgtggcttgaccgagctctttcctcaacacctgagccaggcactgtgctgcctgggacagggtcacgggtgctgtcatgacatgctgctgtcatgtgcctctctctttccagagcccagcattacatcaacatgcccgtgcagttcaaaccgaagtccgcaggcaaatttgaagctttgcttgtcattcaaacagatgaaggcaagagtattgctattcgactaattggtgaagctcttggaaaaaattaactagaatacatttttgtgtaaagtaaattacataagttgtattttgttaactttatctttctacactacaattatgcttttgtatatatattttgtatgatggatatctataattgtagattttgtttttacaagctaatactgaagactcgactgaaatattatgtatctagcccatagtattgtacttaacttttacaggtgagaagagagttctgtgtttgcattgattatgatattctgaataaatatggaatatattttaatgtggtatatccaga

SEQ ID NO: 93740 - DNA, 290 bp, Homo sapiens
atagtctcacctaaaaatagtggtaagtgtctgagtcgttggtcacattcataaaattacaaagtttattttctcttcttactggaaaatacccctttctgatagatttgaaaaatacctctcctgagcatggtggacgtggctcagaggatgagcaggagagcttcagaccttccacgtcaccactgagtcattcttctcctagtgaaatttctggaacgagttcatcagggtaagtgtgtaccttcttttttaaaaaataaaaatatgcgttcagtataggaactggg

SEQ ID NO: 93741 - DNA, 5629 bp, Homo sapiens
  misc_feature (2364)..(2364): n is a, c, g, or t
aaaggactattctcatgtgcgtcatttcttacctaatgatttagaaaaaagtaatggatccaatgcacttgatatggagaaataccttaaaaaaacagaagttagtagatatgaaagtgcattggaaaacttttcaagggctagtatgtctgatacttgggatttatctttgcccaaagaacaaactactcaagacattcatccggtggacttaagtgctactagtgtaagtgtgagggcaccagaagaaaacacagcagctattgtttatgttgaaaatggagagagtgagaatcaagagtcatttagaaccataaactcctcaaattcagttacaaatagagagaataacagtgcagtagttgatgtgaagacatgttccattgacaacaaattacaagatgttggtaacgatgaaaaagctacctcaatttccactccatctgatagttattcatcagtgaggaaccccagaataacatccctttgtctgttaaaagactgtgaagaaatacgagataacagagaaaatcagaggcaaaatgagtgtgtcagtgaaataagcaacagtgagaagcatgtgacttttgaaaaccatcgcatagtctcacctaaaaatagtgatttgaaaaatacctctcctgagcatggtggacgtggctcagaggatgagcaggagagcttcagaccttccacgtcaccactgagtcattcttctcctagtgaaatttctggaacgagttcatcagggtgtgcgttagagtcctttggttcagcagctcagcagcagcagcctccctgtgagcaggagttgtctcccttggtgtgctcgcctgctggggtgagcaggctgacgtatgtgtctgaaccagagagctcctatcctaccacagccacagatgatgccctggaggaccgcaagagtgatatcaccagcgagttgagtaccacaattattcaaggcagtccagccgcattggaggaacgggctatggaaaaattgagagaaaaagttccatttcagaatagaggaaaaggaacattatcatctattatccagaataactctgatacaagaaaagcaactgaaactacttctctgagtagcaagcctgaatatgtaaaacctgactttagatggagtaaagatccttcctccaaaagtggaaatctgttggaaaccagtgaggtaggttggacatcaaaccctgaggaattggacccgatcaggctggctctcctgggcaagtcaggtctgagctgtcaggtggggtcagccacatcacaccctgtgtcctgccaggagcctatagatgaagatcaaagaataagtcctaaagataagtcaactgctggccgtgagttcagtggccaggtttctcatcagaccacctctgaaaaccagtgtactcctattcccagcagcacagttcacagctctgtggctgacatgcagaacatgcctgctgctgtgcacgcactcttgacacaaccctctctcagcgctgctccttttgctcagcggtatttgggaacactcccttcaactggaagcaccaccttgcctcagtgccatgctggcaatgccacagtctgtggcttctcaggaggccttccctatccagctgttgcaggagagcctgtgcagaactctgtggctgtgggaatttgtctaggatcaaatatcggctctggatggatgggtacctcttccctctgtaacccatattctaataccttaaatcagaacctgctaagcacaacaaaaccttttcctgtgccgtctgttggtacaaactgtggaattgaaccatgggattcaggagtgacatcaggattggggagtgtccgagtgcccgaggagttgaagcttcctcatgcttgctgtgtcgggatcgcttcccagaccctcctcagtgtgcttaatccaactgaccgctggctgcaagtcagcattggggtcctcagcattagtgttaatggtgaaaaggtggatctttcaacatatcgttgtttagttttcaagaataaagccatcataagacctcatgccacagaagagataaaagtgctttttataccatccagtcctggggttttcagatgcacattcagtgttgcttcttggccatgttcgacagatgctgagaccatcgtacaggcagaagctttggccagcaccgtcactctcactgccattgccgagagtcctgttattgaggtagaaacagaaaagaaagacgttcttgattttggtgacttgacttatggaggctggaaagccctcccactaaaattgataaaccgaacgcatgccactgtgccaattagactgattattaatgctaacgctgtagcctggcnctgtttcacgttttccaaggaacccgtccgagctcctgtggaagttgctccttgcgctgatgtggtcactcggctagcaggcccttctgtggtcaaccacatgatgcctgctagttatgatggacaggatccagaatttctgatgatttgggttcttttccatagtccaaagaaacagatcagctcttcagatattctggactcagcagaagaattctcggcaaaagttgatatcgaagttgacagcccaaaccctacgcccgttcttagaagtgtgagtctccgagcaagagcaggaatagctaggatccatgctcccagggacttgcagacgatgcatttcttggccaaagtggcttcctcaagaaagcagcacttacctttgaaaaatgctgggaacattgaagtttatttggatatcaaggtcccagaacaaggaagtcacttttcagtggatccaaagaatctattccttaaacctggagaagaacatgaggttattgtttcatttactccaaaggatcctgaagcctgcgaggaaaggatcttgaaaatatttgtgcagccatttggacctcagtatgaggtagtgttaaaaggcgaagtcatttcttcaggaagtaaacctctgtcacctggaccttgcttagatattccatcgattttgtccaacaaacaatttctggcttggggaggagtccctctaggtagaacacagcttcagaaactagctttaagaaataattctgcatctacaactcaacatttacgactgcttattagaggacaagatcaggactgctttcagcttcagaacacttttggttcagaacagcgattgaccagtaactgtgagatcagaattcacccaaaggaagacattttcatctctgtattatttgcacctactcgattatcttgcatgttggctagactagaaatcaaacaacttggaaatcgatcacaaccaggcattaagttcacaatacctttgtctggatatggaggaacaagcaatcttattttggaaggcgttaaaaaattatctgacagttacatggtaacagtgaatggcttagtacctggcaaagaaagtaaaattgttttttctgtccgcaacactggctcccgagcagcttttgttaaagcagtaggttttaaggattctcagaaaaaagttttgctggatcctaaagtattgaggatttttccagataaatttgtactcaaggaaagaacacaagaaaatgttactttaatatataatccatcagacagaggaatcaataataaaactgcaacagaactatcaactgtatacttatttggtggagatgaaatttcaagacagcagtatcgcagggccctgttacataaaccagagatgataaaacagatacttccagaacatagtgtgcttcaaaacattaattttgttgaagcatttcaagatgagctattagtaactgaagtatatgatcttccccaacgacctaatgatgttcagctcttttatggaagcatgtgtaaaattatactttcagtaattggagaattcagagattgcatttctagcagagaattccttcagccttcttccaaagctagcttggaatctacaagcgacttgggagcttctgggaaacatggtggcaacgtctctttggatgttttaccagtcaaaggtcctcagggttctcctcttctctcacgggcggctcgcccgcctccggatcagctggcctccgaagagccgtggactgtcctacccgagcacttgattctggtagctccttctccttgtgacatggcaaaaactggacgtttccagattgtgaataactctgtgaggttactgagatttgagctgtgctggccagcgcattgcctcacagtcacgccgcagcatggatgtgtcgcgccagagagtaaactacaaattcttgtgagtcctaattcctccttatccacaaaacagtcaatgttcccgtggagtggtttgatctatatacactgtgacgatggacagaagaaaattgtgaaagttcaaattcgagaagatttaactcaagtggaacttttaactcgtttgacctccaaaccatttggaattctttccccagtatctgagccttcagttagtcatttggtcaaaccaatgacaaaaccgccttccacaaaagttgaaataagaaacaagagtattacttttcctacaacagaacctggtgaaacttcagagagctgtctagaactcgagaatcatggcaccacagacgtgaaatggcatctgtcatctttagcgccaccttatgtcaagggagttgatgaaagtggagatgtttttagagctacctatgcagcattcagatgttctcctatttctggtctgctggaaagccatgggatccaaaaagtctccatcacatttttgcccagaggtaggggggattatgcccagttttgggatgttgaatgtcaccctcttaaggagcctcacatgaaacacacgttgagattccaactctctggacaaagcatcgaagcagaaaatgagcctgaaaacgcatgcctttccacggattccctcattaaaatagatcatttagttaagccccgaagacaagctgtgtcagaggcttctgctcgcatacctgaagcagcttgatgtgactgctcgtggagtttatgccccagaggatgtgtacaggttcctgccgactagtgtgggggaatcacggacacttaaagtcaatctgcgaaataattcttttattacacactcactgaagtttttgagtcccagagagccattctatgtcaaacattccaagtactctttgagagcccagcattacatcaacatgcccgtgcagttcaaaccgaagtccgcaggcaaatttgaagctttgcttgtcattcaaacagatgaaggcaagagtattgctattcgactaattggtgaagctcttggaaaaaattaactagaatacatttttgtgtaaagtaaattacataagttgtattttgttaactttatctttctacactacaattatgcttttgtatatatattttgtatgatggatatctataattgtagattttgtttttacaagctaatactgaagactcgactgaaatattatgtatctagcccatagtattgtacttaacttttacaggtgagaagagagttctgtgtttgcattgattatgatattctgaataaatatggaatatattttaatgtggtatatccaga

SEQ ID NO: 93742 - DNA, 6803 bp, Homo sapiens
  misc_feature (2752)..(2752): n is a, c, g, or t
  misc_feature (3712)..(3712): n is a, c, g, or t
aaaggactattctcatgtgcgtcatttcttacctaatgatttagaaaaaagtaatggatccaatgcacttgatatggagaaataccttaaaaaaacagaagttagtagatatgaaagtgcattggaaaacttttcaagggctagtatgtctgatacttgggatttatctttgcccaaagaacaaactactcaagacattcatccggtggacttaagtgctactagtgtaagtgtgagggcaccagaagaaaacacagcagctattgtttatgttgaaaatggagagagtgagaatcaagagtcatttagaaccataaactcctcaaattcagttacaaatagagagaataacagtgcagtagttgatgtgaagacatgttccattgacaacaaattacaagatgttggtaacgatgaaaaagctacctcaatttccactccatctgatagttattcatcagtgaggaaccccagaataacatccctttgtctgttaaaagactgtgaagaaatacgagataacagagaaaatcagaggcaaaatgagtgtgtcagtgaaataagcaacagtgagaagcatgtgacttttgaaaaccatcgcatagtctcacctaaaaatagtgatttgaaaaatacctctcctgagcatggtggacgtggctcagaggatgagcaggagagcttcagaccttccacgtcaccactgagtcattcttctcctagtgaaatttctggaacgagttcatcagggtgtgcgttagagtcctttggttcagcagctcagcagcagcagcctccctgtgagcaggagttgtctcccttggtgtgctcgcctgctggggtgagcaggctgacgtatgtgtctgaaccagagagctcctatcctaccacagccacagatgatgccctggaggaccgcaagagtgatatcaccagcgagttgagtaccacaattattcaaggcagtccagccgcattggaggaacgggctatggaaaaattgagagaaaaagttccatttcagaatagaggaaaaggaacattatcatctattatccagaataactctgatacaagaaaagcaactgaaactacttctctgagtagcaagcctgaatatgtaaaacctgactttagatggagtaaagatccttcctccaaaagtggaaatctgttggaaaccagtgaggtaggttggacatcaaaccctgaggaattggacccgatcaggctggctctcctgggcaagtcaggtctgagctgtcaggtggggtcagccacatcacaccctgtgtcctgccaggagcctatagatgaagatcaaagaataagtcctaaagataagtcaactgctggccgtgagttcagtggccaggtttctcatcagaccacctctgaaaaccagtgtactcctattcccagcagcacagttcacagctctgtggctgacatgcagaacatgcctgctgctgtgcacgcactcttgacacaaccctctctcagcgctgctccttttgctcagcggtatttgggaacactcccttcaactggaagcaccaccttgcctcagtgccatgctggcaatgccacagtctgtggcttctcaggaggccttccctatccagctgttgcaggagagcctgtgcagaactctgtggctgtgggaatttgtctaggatcaaatatcggctctggatggatgggtacctcttccctctgtaacccatattctaataccttaaatcagaacctgctaagcacaacaaaaccttttcctgtgccgtctgttggtacaaactgtggaattgaaccatgggattcaggagtgacatcaggattggggagtgtccgagtgcccgaggagttgaagcttcctcatgcttgctgtgtcgggatcgcttcccagaccctcctcagtgtgcttaatccaactgaccgctggctgcaagtcagcattggggtcctcagcattagtgttaatggtgaaaaggtagctttctatgtctttctcatttaacctaacagttgcattgtgattaggtgcttgatttcccccatctctagtgctaggttctcccttcacgcctttattaatgcacacagtcattgccatggtatctttctctcagaccccttttgttgtagtgcttgtagagtgtaaagtgaaacagttttgcattttccatcatttattatttatattttattgttatttattggtaaattcctataaatttgcttttagtgctattatttaaatcatcaaaagttctgagtttcttgtttctacttgtcagttttgttaaaggtgattgaatataagtaaccatgacttgtaaaaaaaaaaaaagaaagcagttactcttggagcttatgccttcatttggcaagggaagtctttttaactagtttatctgatgattttcttacatgagcttttgaaatacctggaaatgcagttttaatatgaacttttaagacagatgtctcttacatgatcaattacagttgctataattctagactctaaatcttctctcctggttacagtgaccatttgaacattggtgagtggagaggggggatatatggtcagcagctgttttgaaatgtcccagttttacgactgttacttgtgaatcagtattggtggatgcttccctcgtgcctcttagtggccatcgtctgcctggtaaaataagatcgcctccccctacgccgtcttggcttttcccctctacttccagtcctnaggttagatgaaaagtaggtgattgaaggagaggattgagggtggaaggtgggctgtgaagactttttgggggcatcctggagtctgtgaatgaagcagtgttgtctatggaagtggggagtagaaaagaagatccccattgacagtgaggagggagggtggctggagttgtcactgcagtcgaggcggagtcagggctgtgggacctcagcggttagcctgactcttcttccccccagcccccacccactgctgtgttgtgtgtgctagagagacttacagggctgtgaaagagtgacctttgtcagtgtcctttttaagacaagtgagtgtaagggtcaatgtgcttgcttggaggtggactggggagacagccttggtgcagcaagaacattcaactcaggaagcatttgactcgttgtacttcagagaccataaatgacaaggttttgacatttttgaagagataataaatgttttaatttggcagtttgagtgattgggaaaaggaatcttaaactaggtgattctacttgattttcagtgtgaagccattaataacgaactttatggctcttttttgaaggtggatctttcaacatatcgttgtttagttttcaagaataaagccatcataagacctcatgccacagaagagataaaagtgctttttataccatccagtcctggggttttcagatgcacattcagtgttgcttcttggccatgttcgacagatgctgagaccatcgtacaggcagaagctttggccagcaccgtcactctcactgccattgccgagagtcctgttattgaggtagaaacagaaaagaaagacgttcttgattttggtgacttgacttatggaggctggaaagccctcccactaaaattgataaaccgaacgcatgccactgtgccaattagactgattattaatgctaacgctgtagcctggcnctgtttcacgttttccaaggaacccgtccgagctcctgtggaagttgctccttgcgctgatgtggtcactcggctagcaggcccttctgtggtcaaccacatgatgcctgctagttatgatggacaggatccagaatttctgatgatttgggttcttttccatagtccaaagaaacagatcagctcttcagatattctggactcagcagaagaattctcggcaaaagttgatatcgaagttgacagcccaaaccctacgcccgttcttagaagtgtgagtctccgagcaagagcaggaatagctaggatccatgctcccagggacttgcagacgatgcatttcttggccaaagtggcttcctcaagaaagcagcacttacctttgaaaaatgctgggaacattgaagtttatttggatatcaaggtcccagaacaaggaagtcacttttcagtggatccaaagaatctattccttaaacctggagaagaacatgaggttattgtttcatttactccaaaggatcctgaagcctgcgaggaaaggcttcagaaactagctttaagaaataattctgcatctacaactcaacatttacgactgcttattagaggacaagatcaggactgctttcagcttcagaacacttttggttcagaacagcgattgaccagtaactgtgagatcagaattcacccaaaggaagacattttcatctctgtattatttgcacctactcgattatcttgcatgttggctagactagaaatcaaacaacttggaaatcgatcacaaccaggcattaagttcacaatacctttgtctggatatggaggaacaagcaatcttattttggaaggcgttaaaaaattatctgacagttacatggtaacagtgaatggcttagtacctggcaaagaaagtaaaattgttttttctgtccgcaacactggctcccgagcagcttttgttaaagcagtaggttttaaggattctcagaaaaaagttttgctggatcctaaagtattgaggatttttccagataaatttgtactcaaggaaagaacacaagaaaatgttactttaatatataatccatcagacagaggaatcaataataaaactgcaacagaactatcaactgtatacttatttggtggagatgaaatttcaagacagcagtatcgcagggccctgttacataaaccagagatgataaaacagatacttccagaacatagtgtgcttcaaaacattaattttgttgaagcatttcaagatgagctattagtaactgaagtatatgatcttccccaacgacctaatgatgttcagctcttttatggaagcatgtgtaaaattatactttcagtaattggagaattcagagattgcatttctagcagagaattccttcagccttcttccaaagctagcttggaatctacaagcgacttgggagcttctgggaaacatggtggcaacgtctctttggatgttttaccagtcaaaggtcctcagggttctcctcttctctcacgggcggctcgcccgcctccggatcagctggcctccgaagagccgtggactgtcctacccgagcacttgattctggtagctccttctccttgtgacatggcaaaaactggacgtttccagattgtgaataactctgtgaggttactgagatttgagctgtgctggccagcgcattgcctcacagtcacgccgcagcatggatgtgtcgcgccagagagtaaactacaaattcttgtgagtcctaattcctccttatccacaaaacagtcaatgttcccgtggagtggtttgatctatatacactgtgacgatggacagaagaaaattgtgaaagttcaaattcgagaagatttaactcaagtggaacttttaactcgtttgacctccaaaccatttggaattctttccccagtatctgagccttcagttagtcatttggtcaaaccaatgacaaaaccgccttccacaaaagttgaaataagaaacaagagtattacttttcctacaacagaacctggtgaaacttcagagagctgtctagaactcgagaatcatggcaccacagacgtgaaatggcatctgtcatctttagcgccaccttatgtcaagggagttgatgaaagtggagatgtttttagagctacctatgcagcattcagatgttctcctatttctggtctgctggaaagccatgggatccaaaaagtctccatcacatttttgcccagaggtaggggggattatgcccagttttgggatgttgaatgtcaccctcttaaggagcctcacatgaaacacacgttgagattccaactctctggacaaagcatcgaagcagaaaatgagcctgaaaacgcatgcctttccacggattccctcattaaaatagatcatttagttaagccccgaagacaagctgtgtcagaggcttctgctcgcatacctgaagcagcttgatgtgactgctcgtggagtttatgccccagaggatgtgtacaggttcctgccgactagtgtgggggaatcacggacacttaaagtcaatctgcgaaataattcttttattacacactcactgaagtttttgagtcccagagagccattctatgtcaaacattccaagtactctttgagagcccagcattacatcaacatgcccgtgcagttcaaaccgaagtccgcaggcaaatttgaagctttgcttgtcattcaaacagatgaaggcaagagtattgctattcgactaattggtgaagctcttggaaaaaattaactagaatacatttttgtgtaaagtaaattacataagttgtattttgttaactttatctttctacactacaattatgcttttgtatatatattttgtatgatggatatctataattgtagattttgtttttacaagctaatactgaagactcgactgaaatattatgtatctagcccatagtattgtacttaacttttacaggtgagaagagagttctgtgtttgcattgattatgatattctgaataaatatggaatatattttaatgtggtatatccaga

SEQ ID NO: 93743 - DNA, 6951 bp, Homo sapiens
  misc_feature (2752)..(2752): n is a, c, g, or t
  misc_feature (3712)..(3712): n is a, c, g, or t
aaaggactattctcatgtgcgtcatttcttacctaatgatttagaaaaaagtaatggatccaatgcacttgatatggagaaataccttaaaaaaacagaagttagtagatatgaaagtgcattggaaaacttttcaagggctagtatgtctgatacttgggatttatctttgcccaaagaacaaactactcaagacattcatccggtggacttaagtgctactagtgtaagtgtgagggcaccagaagaaaacacagcagctattgtttatgttgaaaatggagagagtgagaatcaagagtcatttagaaccataaactcctcaaattcagttacaaatagagagaataacagtgcagtagttgatgtgaagacatgttccattgacaacaaattacaagatgttggtaacgatgaaaaagctacctcaatttccactccatctgatagttattcatcagtgaggaaccccagaataacatccctttgtctgttaaaagactgtgaagaaatacgagataacagagaaaatcagaggcaaaatgagtgtgtcagtgaaataagcaacagtgagaagcatgtgacttttgaaaaccatcgcatagtctcacctaaaaatagtgatttgaaaaatacctctcctgagcatggtggacgtggctcagaggatgagcaggagagcttcagaccttccacgtcaccactgagtcattcttctcctagtgaaatttctggaacgagttcatcagggtgtgcgttagagtcctttggttcagcagctcagcagcagcagcctccctgtgagcaggagttgtctcccttggtgtgctcgcctgctggggtgagcaggctgacgtatgtgtctgaaccagagagctcctatcctaccacagccacagatgatgccctggaggaccgcaagagtgatatcaccagcgagttgagtaccacaattattcaaggcagtccagccgcattggaggaacgggctatggaaaaattgagagaaaaagttccatttcagaatagaggaaaaggaacattatcatctattatccagaataactctgatacaagaaaagcaactgaaactacttctctgagtagcaagcctgaatatgtaaaacctgactttagatggagtaaagatccttcctccaaaagtggaaatctgttggaaaccagtgaggtaggttggacatcaaaccctgaggaattggacccgatcaggctggctctcctgggcaagtcaggtctgagctgtcaggtggggtcagccacatcacaccctgtgtcctgccaggagcctatagatgaagatcaaagaataagtcctaaagataagtcaactgctggccgtgagttcagtggccaggtttctcatcagaccacctctgaaaaccagtgtactcctattcccagcagcacagttcacagctctgtggctgacatgcagaacatgcctgctgctgtgcacgcactcttgacacaaccctctctcagcgctgctccttttgctcagcggtatttgggaacactcccttcaactggaagcaccaccttgcctcagtgccatgctggcaatgccacagtctgtggcttctcaggaggccttccctatccagctgttgcaggagagcctgtgcagaactctgtggctgtgggaatttgtctaggatcaaatatcggctctggatggatgggtacctcttccctctgtaacccatattctaataccttaaatcagaacctgctaagcacaacaaaaccttttcctgtgccgtctgttggtacaaactgtggaattgaaccatgggattcaggagtgacatcaggattggggagtgtccgagtgcccgaggagttgaagcttcctcatgcttgctgtgtcgggatcgcttcccagaccctcctcagtgtgcttaatccaactgaccgctggctgcaagtcagcattggggtcctcagcattagtgttaatggtgaaaaggtagctttctatgtctttctcatttaacctaacagttgcattgtgattaggtgcttgatttcccccatctctagtgctaggttctcccttcacgcctttattaatgcacacagtcattgccatggtatctttctctcagaccccttttgttgtagtgcttgtagagtgtaaagtgaaacagttttgcattttccatcatttattatttatattttattgttatttattggtaaattcctataaatttgcttttagtgctattatttaaatcatcaaaagttctgagtttcttgtttctacttgtcagttttgttaaaggtgattgaatataagtaaccatgacttgtaaaaaaaaaaaaagaaagcagttactcttggagcttatgccttcatttggcaagggaagtctttttaactagtttatctgatgattttcttacatgagcttttgaaatacctggaaatgcagttttaatatgaacttttaagacagatgtctcttacatgatcaattacagttgctataattctagactctaaatcttctctcctggttacagtgaccatttgaacattggtgagtggagaggggggatatatggtcagcagctgttttgaaatgtcccagttttacgactgttacttgtgaatcagtattggtggatgcttccctcgtgcctcttagtggccatcgtctgcctggtaaaataagatcgcctccccctacgccgtcttggcttttcccctctacttccagtcctnaggttagatgaaaagtaggtgattgaaggagaggattgagggtggaaggtgggctgtgaagactttttgggggcatcctggagtctgtgaatgaagcagtgttgtctatggaagtggggagtagaaaagaagatccccattgacagtgaggagggagggtggctggagttgtcactgcagtcgaggcggagtcagggctgtgggacctcagcggttagcctgactcttcttccccccagcccccacccactgctgtgttgtgtgtgctagagagacttacagggctgtgaaagagtgacctttgtcagtgtcctttttaagacaagtgagtgtaagggtcaatgtgcttgcttggaggtggactggggagacagccttggtgcagcaagaacattcaactcaggaagcatttgactcgttgtacttcagagaccataaatgacaaggttttgacatttttgaagagataataaatgttttaatttggcagtttgagtgattgggaaaaggaatcttaaactaggtgattctacttgattttcagtgtgaagccattaataacgaactttatggctcttttttgaaggtggatctttcaacatatcgttgtttagttttcaagaataaagccatcataagacctcatgccacagaagagataaaagtgctttttataccatccagtcctggggttttcagatgcacattcagtgttgcttcttggccatgttcgacagatgctgagaccatcgtacaggcagaagctttggccagcaccgtcactctcactgccattgccgagagtcctgttattgaggtagaaacagaaaagaaagacgttcttgattttggtgacttgacttatggaggctggaaagccctcccactaaaattgataaaccgaacgcatgccactgtgccaattagactgattattaatgctaacgctgtagcctggcnctgtttcacgttttccaaggaacccgtccgagctcctgtggaagttgctccttgcgctgatgtggtcactcggctagcaggcccttctgtggtcaaccacatgatgcctgctagttatgatggacaggatccagaatttctgatgatttgggttcttttccatagtccaaagaaacagatcagctcttcagatattctggactcagcagaagaattctcggcaaaagttgatatcgaagttgacagcccaaaccctacgcccgttcttagaagtgtgagtctccgagcaagagcaggaatagctaggatccatgctcccagggacttgcagacgatgcatttcttggccaaagtggcttcctcaagaaagcagcacttacctttgaaaaatgctgggaacattgaagtttatttggatatcaaggtcccagaacaaggaagtcacttttcagtggatccaaagaatctattccttaaacctggagaagaacatgaggttattgtttcatttactccaaaggatcctgaagcctgcgaggaaaggatcttgaaaatatttgtgcagccatttggacctcagtatgaggtagtgttaaaaggcgaagtcatttcttcaggaagtaaacctctgtcacctggaccttgcttagatattccatcgattttgtccaacaaacaatttctggcttggggaggagtccctctaggtagaacacagcttcagaaactagctttaagaaataattctgcatctacaactcaacatttacgactgcttattagaggacaagatcaggactgctttcagcttcagaacacttttggttcagaacagcgattgaccagtaactgtgagatcagaattcacccaaaggaagacattttcatctctgtattatttgcacctactcgattatcttgcatgttggctagactagaaatcaaacaacttggaaatcgatcacaaccaggcattaagttcacaatacctttgtctggatatggaggaacaagcaatcttattttggaaggcgttaaaaaattatctgacagttacatggtaacagtgaatggcttagtacctggcaaagaaagtaaaattgttttttctgtccgcaacactggctcccgagcagcttttgttaaagcagtaggttttaaggattctcagaaaaaagttttgctggatcctaaagtattgaggatttttccagataaatttgtactcaaggaaagaacacaagaaaatgttactttaatatataatccatcagacagaggaatcaataataaaactgcaacagaactatcaactgtatacttatttggtggagatgaaatttcaagacagcagtatcgcagggccctgttacataaaccagagatgataaaacagatacttccagaacatagtgtgcttcaaaacattaattttgttgaagcatttcaagatgagctattagtaactgaagtatatgatcttccccaacgacctaatgatgttcagctcttttatggaagcatgtgtaaaattatactttcagtaattggagaattcagagattgcatttctagcagagaattccttcagccttcttccaaagctagcttggaatctacaagcgacttgggagcttctgggaaacatggtggcaacgtctctttggatgttttaccagtcaaaggtcctcagggttctcctcttctctcacgggcggctcgcccgcctccggatcagctggcctccgaagagccgtggactgtcctacccgagcacttgattctggtagctccttctccttgtgacatggcaaaaactggacgtttccagattgtgaataactctgtgaggttactgagatttgagctgtgctggccagcgcattgcctcacagtcacgccgcagcatggatgtgtcgcgccagagagtaaactacaaattcttgtgagtcctaattcctccttatccacaaaacagtcaatgttcccgtggagtggtttgatctatatacactgtgacgatggacagaagaaaattgtgaaagttcaaattcgagaagatttaactcaagtggaacttttaactcgtttgacctccaaaccatttggaattctttccccagtatctgagccttcagttagtcatttggtcaaaccaatgacaaaaccgccttccacaaaagttgaaataagaaacaagagtattacttttcctacaacagaacctggtgaaacttcagagagctgtctagaactcgagaatcatggcaccacagacgtgaaatggcatctgtcatctttagcgccaccttatgtcaagggagttgatgaaagtggagatgtttttagagctacctatgcagcattcagatgttctcctatttctggtctgctggaaagccatgggatccaaaaagtctccatcacatttttgcccagaggtaggggggattatgcccagttttgggatgttgaatgtcaccctcttaaggagcctcacatgaaacacacgttgagattccaactctctggacaaagcatcgaagcagaaaatgagcctgaaaacgcatgcctttccacggattccctcattaaaatagatcatttagttaagccccgaagacaagctgtgtcagaggcttctgctcgcatacctgagtatgttgtttttgtcattcttatgagttttttcccagtactttattgaggaatagagtcagtaaaatgctcgatgactttacctgagttcacatgtgttaccagcactccaaccaagatacagaatattcctctcgcccagaaagttcttacgtgtccctttgcagtcaagatttgtcctgttctgatttctgtcatcatagattcattttgcttgaacttcatatatatacatatgtatgtatatattctttgtgtctggcttctttttctcaacatactatttttaaaaatccattcatgttattgaatgtacctatagttcattcctttttattgtttagtattccattaaatgaacgtatcacagtttattcattttcctgttgacttttggatgtcttataatttggaatgattattaattaaggtgctatgaatattactgtatgtgcatttctaaagatgacatacattttcgttactttttagtaaaaatacctacttttacccacaattgcgaggtcacatgataaccatgtgttgaactttaaaataaactgccaaatagttttccctaa

SEQ ID NO: 93744 - DNA, 2318 bp, Homo sapiens
aaaggactattctcatgtgcgtcatttcttacctaatgatttagaaaaaagtaatggatccaatgcacttgatatggagaaataccttaaaaaaacagaagttagtagatatgaaagtgcattggaaaacttttcaagggctagtatgtctgatacttgggatttatctttgcccaaagaacaaactactcaagacattcatccggtggacttaagtgctactagtgtaagtgtgagggcaccagaagaaaacacagcagctattgtttatgttgaaaatggagagagtgagaatcaagagtcatttagaaccataaactcctcaaattcagttacaaatagagagaataacagtgcagtagttgatgtgaagacatgttccattgacaacaaattacaagatgttggtaacgatgaaaaagctacctcaatttccactccatctgatagttattcatcagtgaggaaccccagaataacatccctttgtctgttaaaagactgtgaagaaatacgagataacagagaaaatcagaggcaaaatgagtgtgtcagtgaaataagcaacagtgagaagcatgtgacttttgaaaaccatcgcatagtctcacctaaaaatagtgatttgaaaaatacctctcctgagcatggtggacgtggctcagaggatgagcaggagagcttcagaccttccacgtcaccactgagtcattcttctcctagtgaaatttctggaacgagttcatcagggtgtgcgttagagtcctttggttcagcagctcagcagcagcagcctccctgtgagcaggagttgtctcccttggtgtgctcgcctgctggggtgagcaggctgacgtatgtgtctgaaccagagagctcctatcctaccacagccacagatgatgccctggaggaccgcaagagtgatatcaccagcgagttgagtaccacaattattcaaggcagtccagccgcattggaggaacgggctatggaaaaattgagagaaaaagttccatttcagaatagaggaaaaggaacattatcatctattatccagaataactctgatacaagaaaagcaactgaaactacttctctgagtagcaagcctgaatatgtaaaacctgactttagatggagtaaagatccttcctccaaaagtggaaatctgttggaaaccagtgaggtaggttggacatcaaaccctgaggaattggacccgatcaggctggctctcctgggcaagtcaggtctgagctgtcaggtggggtcagccacatcacaccctgtgtcctgccaggagcctatagatgaagatcaaagaataagtcctaaagataagtcaactgctggccgtgagttcagtggccaggtttctcatcagaccacctctgaaaaccagtgtactcctattcccagcagcacagttcacagctctgtggctgacatgcagaacatgcctgctgctgtgcacgcactcttgacacaaccctctctcagcgctgctccttttgctcagcggtatttgggaacactcccttcaactggaagcaccaccttgcctcagtgccatgctggcaatgccacagtctgtggcttctcaggaggccttccctatccagctgttgcaggagagcctgtgcagaactctgtggctgtgggaatttgtctaggatcaaatatcggctctggatggatgggtacctcttccctctgtaacccatattctaataccttaaatcagaacctgctaagcacaacaaaaccttttcctgtgccgtctgttggtacaaactgtggaattgaaccatgggattcaggagtgacatcaggattgggtaagatgctttttctctattattattacttgctattattttctcaaatgacaccacaaagctagtttgtttcaaggagttactggttagcattaattccttgtaagttttgtgcttcttcctaaactgagaacaccgtgtatttctgtgcaagcgtccctaaagttggcttagaaaaacgctacacttatgcaggtgacaggctgcctatggctctgtcttccttatctctcttttgctctgccattccagttttgtgattatttcccctaggaaatgtccagtttagaattgaatcccagaatgagtgagtgcctccaccttgtgagtctctgggtggctgctgtggtggagaggcagcactctcgggtgcatttgtggggcagcttctctctgggagctgtgcttttactgacatggtgcacacggccactggggtgctgtcttctctgccctccggagcaactgcatgaggat

SEQ ID NO: 93745 - DNA, 167 bp, Homo sapiens
gttagcatgtaatactttattatttttattgtttaaataaatcaataaatacctactttaaattttctgttttaatttttaatgtagtaaatattgatataacctcataaagaaaagctcttcagagtcttaagtaactttgaaaagtgtaaagaggtcctgagatc

SEQ ID NO: 93746 - DNA, 701 bp, Homo sapiens
aaccaccatggcacgtgtatacctatgtaacaaacctgcaagttctgcatatgtatcccagaacttaaagtataataaaaataataataaaaagagttgcaatccatccatctgttgacccatccatccatccatccatccatgcattcattcaattcagaggaacagaagcaggttagagttgctgcagtaaggtctgtaaggtgtgatgggtgctgtggttaaattctaaaactgcattctcaagagaagtctgctggttgcactaggatctctagcacagttcagagccccactccagtgtactgaaaaagaatctgtgtgtctgaaactcacatctttaaccagtatctcagtggctcttatgcagcttaagtttgaaaatcactcactatatcatggagcattttcaatatccttccaaagaacttgaacttgaggctcccctcaaggagtaactgaaaggccagatagagatggcagaacttggcttataagtgaatcacttgaaaacctttattcatgcactcacttaatagagtgcaaaatctgcaccaagaactgtttcgttgctgaaaatatatcagtacaagggctgttaggattcctgcctttaggaggctaacaatctaatgaggagagacagacagtgaacatctaatacatatattacatatatcttttggaaatattaatacggt

SEQ ID NO: 93747 - DNA, 145 bp, Homo sapiens
gaaaaccccagagatgctactgtagtcattcaagactggcatgtgactacagaaaaaaaagaaaggttaaatccaagaaacatttcaaacacgattcaaaaaaaaaaaaagggctgtgcgtggtggctcacgcctgtaatcccag

SEQ ID NO: 93748 - DNA, 588 bp, Homo sapiens
tcagggaaacaccagtgagaagcacgtgtctcccctgatgagaagagaagtgctaggagattgagcctcagtcacaggcagatgtgtgtcttgacagccacggtgtgtgtcttgagagtttaaaagatgtgaaagaatgatttgacccattggcttgctcgctgaataagcaccaaggcaagagagcctggtagttgtcctgcatagtctaggaaggacattctgagaaggataactaatacttcatccctcttcaacttgatgcaacctgaagagcaagtccttgggtgaaagtttcttgtccggtaccaaagataggagatagcaggtaaagggaacaagttggtaccatggcaatggtgtcccagtaaatttttattttgttttgttttgtttgcaagaacagtatgggataaacaatagcaaatatacagccttggtttccccaaatcctacaatctcagtgcaggaaggtcatcttcagcagtcagctcagaatagcctcaagggacatgatgtctacagcttctggcttcagaataatgtcctattactgtcaagtggcaccccccaccatttcttcaaagg

SEQ ID NO: 93749 - DNA, 275 bp, Homo sapiens
agtcacaagttcatcatcaatatggtgacctcctgggagcagaggatcaccaggttgcctaaggaggagtgaaccggcccgggacagaatcagagcaggtcaaaactgtgctgattagtagtgaggttgtgcctgtggatagcaattgtactccaacctgagcaacatagcgagactccatctctttagaaaagtgagtaaagatggaaagtataagactgttactacaaatgtcattgttacaaatactttgtttagaaagatattagatattt

SEQ ID NO: 93750 - DNA, 232 bp, Homo sapiens
atccagccccaaaacatcagcctaatggctaccatcagcataaccagaaacattccaaccctaagataaacccctctctgaccagaaacatgccaacccccagatagcctcccttccgaccagagactttccaaccccacaataaacttttcctcacatgaaaacattccgaacctagataagcacccccttccaaaactcttaaatatccttagtctgtaaaaaaaaaaaa

SEQ ID NO: 93751 - DNA, 129 bp, Homo sapiens
ggctgagatagtaaactttatgatacatgtatttttaaaactggcaaaaaatccctacaaacatatagcaacaaatagttttccctttgcttcaagccccaatatatcttagcatgcctctgtttgatc

SEQ ID NO: 93752 - DNA, 241 bp, Homo sapiens
agaatcttccctttagtgttagtgttctcacccttttaatgatgtatgtgccttaatgtaggtctttttacttggtgggccctttaaatatgaagactcctgccctagcaaaaatttttaaattattattttgatcatttcttccctgtttattttttgttctctttttctaggactcaggtttttaattaattgactggataaacatgtcaggcctctgagcccaagctaagccatcata

SEQ ID NO: 93753 - DNA, 394 bp, Homo sapiens
aaatagattcacaggcgctctagacatcaagtgtctaattttagacttactcagactactagatttattagggtcaaagacataaaagataaaacagagcatgttagcaaagaatttggaagctataaaaaaagaaccacatagaaattcaagaactgaaatatacaaaagccaattaagaattcaataaatgagtttaacagtaatatataaagagctgaagagagaattagaggaaactaaccaaagaataaacagataaagaacttggaaatacctcagagaaaataagacacacatgagatattatgaaaagatcccactatgtacattagaagaaccaaaggatgaaggataaaaaaatgatgggaaataaaactaggaagtgaggatt

SEQ ID NO: 93754 - DNA, 509 bp, Homo sapiens
  misc_feature (432)..(432): n is a, c, g, or t
tgtagagatggggtctccctatgttgcccagactggtctcaaacttttgggcttaagagatcctcccacctcaggctctcaaaattctagtattacaggcatgagccactgctcccagtccacttctataaatatacatatatatacatatatatgtgtatttatttttttttgacacagagtttcactctcattgcccaggctgaaatgcaatgatgcaatcttggcttactgcaacttccgcctcccaggttcaagcaattctcctgcctcagtctcccaagtagctgggattacaggcatgcacaagaatcgcttgatatcaagaggcagaggttgcagtgagccaagagtgtactactgcactccagcctgggcgcagagtgagactccgtctcaagaaaaaaaaaaaatttaggttaaaaagttggngaatcggttagcaatgaaaatgaaggtaagtcatcatagactaagaagaagaaaaaggaccaaatctaacatactct

SEQ ID NO: 93755 - DNA, 480 bp, Homo sapiens
cccctatcctgcaccccgcctcacccctgtggagttgatgtgtatataacatttgctgatagctaaagtttatagagccaggcacctgcagagtactttatgtaccttatccatataattctccagttgccctattaagcaggtactatgattctccatcttgcaggtgaggaaacagaggcatggagaggttaagctatttagccaaggtgatgtagctcataaaagaggagacaggatttgaatccaggcttttaaattatttacgtctacctcgcacagagcttgtgcaattggtaagttacatgtctgcctcctctgctcagctgtgagcttttgagaacagatatgatgacttcatcatctgtgtgtcatctttgcaactgagatccaatgcttgtcacctagtaggcacatttgtatatgtatgaatgaatgaattaattgttgatgtgacattgtaaatgtctcataaatctc

SEQ ID NO: 93756 - DNA, 942 bp, Homo sapiens
cttgtctgagtcttgtcctaagggaatcttgtaacgcatctcaggaaccaggatcaaggtggtgtgactcttctgcgtggcttcacctcacgttagattttgtcatatagctagggaagcacctatgtgatatgactcctcttctgcctgagccttgcttatttgggacattgggccttatatctaagccagtatcctaagtgatgtaattctattcttctgcctgagcctttacaattgggtgatgtgacatattgctaagcccaatacttaggttatatgactcttctttttttcccaaaacatgcccatgaaaaggaattttgacatattgcatggcccagcacccaagtgatgttcctcttctgcctggatcctgcataaaaagagagttatggcatattgctgtgccccccaccatgatgctgtaaccctctcctcttgccagtgccagagcaacagaaagtaattttacatatcttgggcacacccagtaggaattttgctttcatcatttgactgttttttttttgttgttgttagtttgtttttaggtggggggattgtgtcatattgctgagcccagcacctagttaatataaccctcatttctagaccctacctagagaatgcattgtgatctattgcttgggacagcacctcagttgtgctaccctcttgacaagttttttttcccctacaaatgggattatgaaatttacattgatccaattcagaggcatgttgatcaaacttaaactgggattccaccaatagtaggtatttgcctatcatctctacacttagggtaataaatttaaaattgtgagttgcatatttgtagaaagctcacagcagcttagaacaccaactcatattataaaaactgcttgggtggtacacagagttttataacagggcctagcaagaggttaagattat

SEQ ID NO: 93757 - DNA, 461 bp, Homo sapiens
gccaggtgttctttagagcgatcattccatcattccacttgcgctgttcagaacggggattgaggggaacgagatcagaggcgtggagcccaattccgtatttcctcttgaaatagcgatagggagagagggaaaggatagaaaaactggaaaaggagctccacgccaaaggcacacttggccccagtgaaccacctggaatacgctgggagcgctgtaaccactaagtaattctgagcaaaagctagggtggattctggatatgccaggccgtcttttggaaaaagaacacacaattaggcacgaagtggagtaagaaaagaaatcacaattactggagcctcggaaatccgagtttcttctgtttaccagaaccgcttgcccagcaatgtttccagagggcgcccggctttccctcttttcccagagcactccccagctctcccaagacaagggtggcg

SEQ ID NO: 93758 - DNA, 560 bp, Homo sapiens
ctacttgggaggctgaggcaagaggactgcttgagcccaggaggttgaggctgcagtgagccatgattgcaccgctgcacaataaggcaagagttcagtgtattcttgccttattttttaaaaatcagctgcaagtttaatttcaagttatgatttgtgtttgattggggttgtcaatcgtgcaaccattggcaaagtgccaacaggttctaccaaaattggtcttttcccatgtggttttagtctggtttgactcaagcctgctgccactgtctgcagccctgctccagaaacttctgcatggcattgggttttattttacattaaaataaatcagcattgcattggaagattgatcatttctatcaatcctcttgagatattggaggtataacttccattcctggcttcttcccttgcttggccccagtcaaacatcacgagtcactctttttagcatcttttctggttcattttggggagtggaaaggatggactcttgtaataagttattcctacaaaaaagcagttcccctatctgcagtgatcctcaagtaatc

SEQ ID NO: 93759 - DNA, 766 bp, Homo sapiens
agcggaaaaaactctaaatcaaatgcactccacattgtaattggaaagcatttcactctttcagataactcatgaaatgaatcatgattttatgtttggacaactgttattataccaaaccattcaagaagctgtattctttttatctagatgtaatgacacaggtaatcagttttcagttaattctgttttaaagcaataggtttgaacatgggttaattaacatatttgtgaatggctgtcatatatattaaaataaagtataccactattaaccttaaaatgatataaaacctgtactgagttcttgctacgtaattcagaagaggtttccaaattttgctatgcttctctattgacattttggtatctactttttatcgtgtctgttaaaactggtaaaaactcatcattaaacatttagaatttatataataattaaaaattcatttagtaagtttgtgaacttatttactcactgagagacaaaatttgggtataataggttacttctttttataaagatgtggatttttaaaacagatagctgtctttctgggagactttagcatttacttagcttagaatcagagtaatggataataatcgttagcgttccattttcagtccatattgcttttaaaatatgaaaagcatataaaatacttttaaaaacctttttatctttctaatatttttttccacaaaccagtctcttgatttctaggtcttctcattgaacaacatttgccttcacctgggatta

SEQ ID NO: 93760 - DNA, 322 bp, Homo sapiens
gccaaatttatatattttgatatctaacaaggctgttctatctcatcaatctgtcttttaaaaaaattattagctcttcatacctctttagataaactttagagttaacctgtaaagtcctaaatgcacagccaatcctactcctttgggagttagaaactacattaaatttatataaagtaagtggacatttttactcattccagtgtaaaatgtctgtcattttattcaagccttttattccatcagaaaaaattttttcttatcagtgtggtacattccttgtttggcttattttaatataaatataatgtaaaattgt

SEQ ID NO: 93761 - DNA, 137 bp, Homo sapiens
ggcaatgcagcagatgataggacagacaaggtctcagctctctgtgcgcgttctggtgggagagatgggagtcacacagccgcatcaggcagtgcaggcagtcacaggcaggagaggaaagctggggaagaaggtgg

SEQ ID NO: 93762 - DNA, 709 bp, Homo sapiens
aagaaaagaaaggaataaaccaaaaagaggatatgaaatcaaggaaccaaagaatgttatttattaatagattaaggagtcccagaacaaaagatgtgcaacactcttggagagtagtcaattcagactagaggaaaagtgagagcttccagaagtgtatctccaagaaaagctgaaactgagaagagtaaatgctgttttgaaaatattgagagattttgggaggatcgcttgaaactggggtcgggggtggggggtcaaggctatagtgagctgcgactgtgctatggcactccagcctgggtgacagagcaagaccctgtctaaaaatatatatataaataaggctgggcatgatggctcacgcctgtaatcccagcactttgggaggccaatgcaggcagatcacctgaggtcaggagtttgagaccagcctggccaacatggtgaaacctcgtctccactaaaaatgcaaaatttagtgggtatggtggtgtgcacctgtaatcctagctactcgggaggctgaggcaagagaatagcttgaacccaggaggtggaggttgcaatgagccaagatcacaccactgaactccagcctgtgcaacagagcaagactccatctcaaataataataataataataataaaatttaaaaaaaagaaaataatgaaagatttacagttctttgagaatttggagagaacc

SEQ ID NO: 93763 - DNA, 898 bp, Homo sapiens
cccagatttatgcaaagctcttgacctgtgtattcaattgactactgatatcacaacttagatattttgtagaatataaaacatatcatattcaaacgtgaactcatcacttctactcattttaaacctacttctccacttgttttcccattttcattgaatggtaccaccatccactaagtttcccaagccataaaccaaacatcatatttaatttttccctctcccttatattacacaaccagtcttatcaactcaatctcctatatttttctcaaactatcccctgctttctatctacaatgcctcttcttgcagtgagaacacttttctttcccatggctaaagttgtaactgatgtccttgcttccattgtgagccctcttccattaatttttcatgctgagtcttatcttctgctcccatgttaagatccttctaaacctccccagtgtctttcagagaaagactagagtccttccttatggcttttaaggttctgtatgatctgatcccttcttactcttctagcatgtaattcatgttttccatacattcttccctagctattccaaactgctttgggtttctggagcccattattttgcatcttgcagccaagctttttactatgcatttttgcagatggattaccgctcctgcttctgcttattccaagcaaactgttactgtgcattaattcagtttactcagcaaatatttcatgagcatctaccaagagtcatgctctgttcttgacactgcagatgaaactgtaggcacaatagacaaaaattcctggccatcttggaattctcattatagtgacgacagagtaattaaaaataaataagcaaatatataatatatcaaattgtgataagtactagggaaaaac

SEQ ID NO: 93764 - DNA, 799 bp, Homo sapiens
ctggactataatttatttactcattcccccattccctcttgagggagtatttaggttgtgttcatgttctgttttttttccctataaataatactgctataaatttttgtgtctatcctgacctactggtgcctgtatttctttaggctgaactgccaaaattgatatggctgagtcagagtatacatgttttaaatttcagcagctgtcaatgagggcttttattgagagttatgctttttgatcagaaatatatattattttgacaaaggtgcagagaagatagttcactagtgtcttagtctgcttgggggctgctgtaacaaattccttagactgagtagcttagaaactacagacattagtttctcatggttcttaaagctgtaagtccaagataaagatgccagcagattcagtgtctggggaaggcctgtttctgattcatagaaatggtgccttcacgctgtgtcctcacataaggtaagggctggatgagctctcttaggcctattttgtaagggcactaatcccattcatgaaggctacactcctatgacctccccaaaggtttcatctcctcataccattaccttgggcattaggattctaacatatgagtctagaccatagcgactgaagaaaggataatagtgttttcaacaaatgatgctggaacaattggatattcatatacaaaatgacagtgaaaacatcaacaaacccagatacttcaatccattcatcatgccatttacaaaaattaactcaaaatgggtcataaatctaaatataaaac

SEQ ID NO: 93765 - DNA, 497 bp, Homo sapiens
ctcactgttatcatttactatcttataagtgcaaaaactaaagtttaaagaggttaagtaattggctcaaggtatcacagctggtaaacagaggcactgagatttgttctcttttggtttgaccctagaaccctctcctaacattttttttttattttgactctgttagaacagaataagtagcaaggacaccataatctttgctgaggaaagatgactattattagtagtaggcaagtggagagtcgtcagtgttccatcagcttttcccctgtgtctctcatcccatgaatgaagagcagatgtgaaaattgctgccagccactcacttgtcagatgagaactgacttggctgtgctcattacaaaattaatttttaggcttattacaaaattaataaggcatgtgaaatatagatgtcctcaagatttataaactttaatttagaagtgtctttgattctaatacaaatctatttttacttacagtaagatagc

SEQ ID NO: 93766 - DNA, 229 bp, Homo sapiens
gggaaacaggaccatgggctttggggtggcgcatgtcaggtcctgtccgggcttcgacatttactaacacagtgacctgggcagtgtcttcatctgtagaatggggtaatgtcagaggcctccatagtgtttgggaggcgtgatgaggccatctgcggagtggttagcagggagccctgcccggctgctgtgttcttaccgtcgttttcctgtgtgtcctccccaccca

SEQ ID NO: 93767 - DNA, 548 bp, Homo sapiens
tttaaagattttttttgctgttttaaactagaacatatttacattgttgtgaaactagaaaatcaccataggaatattattttgtgaatgaatttaaagagatttaatttgctctatccagtgcagctggagacaactaaagtacgactgccaacaaatcctgcctcaaaccaactctctttatgactcattgctccatgttgagaaactcacatcagcccttgatgactcagttcagtcaattataaaccaggaaagataatatttattgtctttcagggtgttgcaagaatgcattaatgtttatagcacattcgtaaaaggtccaaaaacaggatttcatattatatttctagtattcccacatgaatttgaggtgctcttttaaaatctgaacatctatcacaagaactggtataatactttaatataaaaaaattactaataataaataacaattttagtctgttgggagttaagttgcatcatagcaccagatggtcatactagaccagtgctactgtttcttctgggctgggactttggtg

SEQ ID NO: 93768 - DNA, 330 bp, Homo sapiens
ttttcattgcaaaatgaaagatgcattttaatgaaattgaagttaaagaagaaagaaatgaaaaagaaagaagttcaaagggatgaggagaagaaaagacagatggtaatatgactgtcctctaaaggaaatggtttctgttgctaggtttttccacttagctaaagtcatcagctgtttgatgaatagacaatagtttggattaaaaaatatttaaaattcttttattgttcacattcaagatttaaacatgaaggccattagaaatgaataggggcaaatcaagagttctagggcactggaagcatgtcaggagaaaagacctctgtt

SEQ ID NO: 93769 - DNA, 439 bp, Homo sapiens
ctcaactacttgtattttctaaaaataaaatttttgagcccttcatatgctatgataaaatttcagccattatcactacatgcattttatctatttattactgatcctattatatgcatgttggacctttctctctctctttctttctttctttttttttttttttttttttttttgagactgggtcttgctctgtcacccaggctggagtgcagtggcacaatcttggctcactgcaacctccatcttgcaggttcaagtgattctcctgcctcagcctcccaagtagctgggactacaggcacaccaccatgcccagctaatttttttctgttttagtaaagacagggtttcaccatgttgcccaggctggtctcaaactcctgagctccagcaatccacctgcctcagcctcccaaagtgctgagattacaggcgt

SEQ ID NO: 93770 - DNA, 394 bp, Homo sapiens
ccacttttttttcctatatgtaaatatatctttattggggtctgctaaaatatcagttacttttctctaaagttatatgcatatttcataatattgattccgcagtacctgacattttggtttctattatcattggtatcttttttaacattacatttcctctttgatgctgcacttgtatgttaattttatatccaccaattttggtgaactctattaattctaaaagattttctgcacattctcttgagttttctacatagacttccgcaaacaatgacagctttatttattcctttataatgttggctagtattttcttggagatgaagactcgttctattgtctaagctgcagtgcagcagcgtgatctcagctcactgcaacctctgcc

SEQ ID NO: 93771 - DNA, 334 bp, Homo sapiens
agtcacacgcagctccttactgtctggtatgtgggaatcttctgccccacggcagcctgtgcctttgccgaacacctccaggagagccatgtgggggatggtctggacgttgcagggaccagagccgagctcttgagattctctgagtgtggacaaacgaggtgctcagacatggcccttggtggtgtggggacacaggcaggatagctcctctcggtgactcttggtagattgtcttctggtagatgggctgggggtgcgggttctggtgcttcaaggtggttgtcctctgactgtgaaccagagcccagggaccaggcgtcagccccgtgct

SEQ ID NO: 93772 - DNA, 204 bp, Homo sapiens
atgaattttaccttgctgggtgctaaatatttttgtattcctataaatattcttatgctttgttctggaaagcagttaagtaacttgaaaacagtttgatcctttggggtcctgcttttatgaattattaggaaggcctggagccactgctcagtctagggttgatttttccctgctactgagacaaaatcctcctgagtgatc

SEQ ID NO: 93773 - DNA, 318 bp, Homo sapiens
gatctcctgacctcgtgatccgcccgtctctgcctcccaaagtgctgggattacagacgtgagccaccacgcccagccagatgcgattttgccattttggccaggctagtctcgagctcctgacctcaggtgatctgcctggcttagccacccaaagtgctgggattacaggcgtaagccaccatgcccggccaggccaccctatttaaggggacaatttaaagggaacctctgtccgcacatacactccccatctcccttccctcctcattttcttcatagcacttaatatcatctgacatcttacatatttgactt

SEQ ID NO: 93774 - DNA, 495 bp, Homo sapiens
  misc_feature (402)..(402): n is a, c, g, or t
  misc_feature (495)..(495): n is a, c, g, or t
gagagagtcttcctctattgcccaggctggagtgcagtggtgtgatctcaattcgctacaaacactgcctcctgggttcaagcaattctcatgactcagcctcctgagtagctgggactacagacacgcattactagacccggctactttttgcattttgtgtagagacagggtttcaccatgttcccaggctggtcttgaactcttgacttcaaatgatccacccacctcagcctcccaaaggcctgggattacaggcgtgacactgcatccagcccaaaaatcaatttttaaaaaatattatctagccgggcacggtggctcacatttttagcagttatgaatttcttcattggtgccccaagttagatgttttgactatttaaaatgttattgttgacncttaagtattacaagtttatttatttattttttctttaaccacatttcaggtgctcaaacaagttttattttgaaaagggaggagtgataagn

SEQ ID NO: 93775 - DNA, 468 bp, Homo sapiens
cattatttgatatatattttttttacttagaagagtgtttctccaaaactataaatttgactcttagtgtaaaataatcttaatatttgaattatacattcaggttatgccctctatttctagtttgatgaaaatattattagtaatggatgttggggttttattaaatggcttttttccacatctgtcaagatgatcaactggcttttctctattatgactttagatgaatcgttttaatagatttgctaatgttaagacatctctgcatttctacaagaatctgatgtagtcatagtatactattcttttaatatacatctcctttcaatgttaacagtggttatttatgattggttggtccatagtagatttttattttgtgtttcttatctgtactttctgatttttctacaaagattgtgtattacttgtataataaaaataagagctttaaattgtgaaaat

SEQ ID NO: 93776 - DNA, 505 bp, Homo sapiens
ttccatcagaacaagtatcactgaggactaaaaataataataatcataataaataataaggccaggtgcagtggctcacatctaacactttgggaggctgaggcaggatgatcacttcagcccagaagtttgagagactagtctgggaaacacagtgagaccccgtcactttataaattttttttaaaaaattaaaattaaccgccccccaagaatagatgaaatctccaaaaataaagatgtaacttagaagaaataacaaacctgcaagcaaccccagtatttaaagggagtctcacagaaaagattcctatgaagaaaaccaataaggaatcattagaaagataaaagaaccaggaaaaaatggtattgtgaagccgatagaaaataaaaagggagtggctaataatctcaaatgctacagatatccagcaaaaatcaactttctttaaaatgcagtgtcttatttccctaattagaatgttcacttctgtaggtaatataa

SEQ ID NO: 93777 - DNA, 389 bp, Homo sapiens
aaaaatgtctatggggaccttacaatttctaagcttttattcttccaggaaatgatatttagaatgcaactaccatctgatattgccattatttcattaaaaatattaaatttcaatccctaaaacttaggatgtatctacaaagggaaaaattacagcattaaatgcatttttattttttatatattcttctttatacatttattcattaatggagtaattgactgattcattgtttcatttcatttcataaaatcttttttgtgtgtgtgaataaggattggtctgtggtatccctgacactaaaataaacacacacacacacacacacacacacaattgttctagggatctgacttctatctagattcagttcagaattttgcatc

SEQ ID NO: 93778 - DNA, 529 bp, Homo sapiens
aggcttgctgccgcctactgtatggccggccctgtgggcacagctgtcctccacccgcctcccaaggcaccatcgggcccagaatgtgcccgatgagtcacgggcctgggtctccccagcatgggcgcagcaggggggctgagtccgcctgagccccggtgcccagctcagggtctggcacagagcagatgctagtgaatgaacgtcgggctggatgaatgaacgaatgactaatgcccgctccctcaaaccacaggctacaccgtctgagcctgggggagggcagagcccacgggaccccagaagaggcctccgcagctgaggctttgcgtcccagggtcgatgggggagggggcggggcggccagcagccggcgcggcacggggctcccctccttcccgagaaggaatctgggtctctggactgagctggtgacgggggctggggcggggggttgtggcgtcctggatggagagagctgcaggagcagggggcgcgtcccggtttgcgttggggtgtgggacgaagc

SEQ ID NO: 93779 - DNA, 341 bp, Homo sapiens
cctagggtcacagagccagtgagtggcacagctggagtggcatttcagtgtggctgtttccactgagctcttgcagccaccagcctcggagaccaccctgctgaatgagggttccagtctcgactcaatcacctttcacccagtgaccttgagcaggtcctttctctctggtgttagaatcccataagccatagaataccagaaagcctgtgttgtttctgtaacccacaaagatagcacagcccctcctcattccatgagtcccccagtggggtggacatcagggctcagtgtcatggaaatggctcatggggtgactcagatttggctcaggctcaggg

SEQ ID NO: 93780 - DNA, 346 bp, Homo sapiens
tccattctccagaaaaatcttaggatgctgtcatgacaatgccaatttgctagtggtctctacacacccagaaaccatctgtctcactgggccccactataaacttctcttccttctctgagcatcagtataaggctaaagtgtatctgaataaacagaagtcctactctgtaattcaccttctggttttcattttccactcatgccaacaagagaaaaataaaaattttcaaaattaaggttcagattaattttgaaatggctgctttactcattatagtaagataccgtctttgtatattttaaaggctcaaaggagtaatccaatatgtgaaaatacctttca

SEQ ID NO: 93781 - DNA, 373 bp, Homo sapiens
aagcagcagccaagtaaaggtataatatggggcaaaatcccagccttagtgtgttctagcaggggtgctctggagtataaacaatgcctctgagtttgagccacctcaaggcaaaggtgctggtctttcatagccctgcagtcactcagtcaatgactaaaagcctccctagggcaatgtaaactgccaggcacttctggttctctgggcccatgcacaaagtgatgccagtcacccaaagacagtcctcaagagtcacagatgcaagctgttaagcacacaatagctataggatgggtgcacagaaccggtaatagggatcaaggggatctggtcagagctacacagtatctgctacacacctggtgatact

SEQ ID NO: 93782 - DNA, 890 bp, Homo sapiens
cttttttttaacaagcagtttactttgctttcccaagccaagtagacctgcatgagctttgacttcatgattcttgttctttagtggatttacgttattacttactacgctcccttcagtaatccctacgttattacttactacgccagtttggatttgacatattttctcttccagaatgcagtccagaatgactgcagatacctacataatttatggttttcctggctccccaggaaatacatcactggggatgcaggcactccccggaggcttttctgtttcctatcatgatgaatatttatttgatttgaaaaaaccaactcattcttttgatcttgggtgtacatataggtatatacctataaagaaatgtaaataccctttattggccattttatttcctgagtagcattttaaaatgtagtattgttttgtatggactaaataaggctttttctgaagaccccaggcatggttttctgtgaagtgagttgaggaaatggaaactggtgagtctgactctgtgtttgctcagggctggtactaagtgagccccctatgaattttgaactgtcattcatgataattgaggaaagaaaagctgtatcaggagagaaatcagatgcgatgaccatgaacacaaaaagctgccttttttctctgagatgcaggatgtgcatttaaatattaatctcttgagatgagtgcgtttcatatcttttggtagtgcaataaagaaaggtatcagagcttgagtaaaaagatacagaaatattggcacttagtgcatgaaggctttttggaagaggtgagcaagaagtattttggtaactgcggacaagtcatgtaaactttttgtcctttgtctcctaatccacaaagtgagg

SEQ ID NO: 93783 - DNA, 514 bp, Homo sapiens
acaatattaagggctacccaaatgaaaaactagctcctaattttcaagaaatgaacattcttattatcagtaattcagaatgtgctcttaaatagagaatatactaccaaaatccatagtcagatttaaaagcactagatgaaattacactttcaaaaaaaatgtaaaataatacttagcagctggcaccccctatactggagttggagcatttgaatttttacgtcaagactccaaaatgtgagctgacaaacaacatggctaaaccctcaattcaattatgtcaagattgtgtaaggaactaagcaccgaagaagattctgaaataaacaattcctgctttcaaatagctaatcatctagctgagggaaaagaaaagtaacaaccagaatatgataaatattgtgtgaggattttagagaactactgcgtgagtttaaatgagggaatgtgtgtatctacttatggcatgggacatataaaagagatatcacttgaatttggcctaaaaaag

SEQ ID NO: 93784 - DNA, 580 bp, Homo sapiens
atttctatcgttttgcccacgcacccaggatcatgcatgtgaccccatgaaagaggagttcagatgctcttaggagacccaattcttgtactctctccatgtagcttttgtgtttggggaagttggtggggatgtccacttgttaggagtcaaacttcttagagagaaatcagattcaatctgagcctttgaaatttcactaggaattttgctcgtaatgaacttagtaatttgtcatgaggccatagaaggaatatagatccaagtctggtttcgtgtgtgtggcttttccttagttagaaatttccctagaagcgtctttgaagttagcagcattaaagatggttacccaccaacacacaagctcataaactgaacagatgctgggccattacagacgtctttggaaacttctgcctgcaatgagaagccacagggaagcactttatgaggctgcagctgagtcatatggaggaggtggcagctgtggggcagtggggattgagagggagtagtctggatgaagtccctggcagtttggctcaccggtcacaagttgtgatcttggccatattatgta

SEQ ID NO: 93785 - DNA, 451 bp, Homo sapiens
tgactcagcaattctagactgcctcaaaaaaaactctggcaaaaaaatgaaaggactttactcacagagttcttttcacgcctaaatatgtttgcaaccaagttcttcactgtggcatttgtaaaactggaaacaatcaaaatgtccatcagtaggggattaggaacattaattcgtacagtggggaactcagtaccagaaggagggatgaggaagacctattgataaggggcagagtacatatcatataatgcaaatatatatttgctttttcttaaaacagtacaaagataaaaaactaaagtggttgctgtggaggacaggggtcaatggtggaagtgagactgaaatagactctgaagtaatatctggactttgaaattataagtgttttacatattaccaaactaagttttaagatagtccctaaaattgaaagaatagtatctga

SEQ ID NO: 93786 - DNA, 790 bp, Homo sapiens
gagaggggttggtctccctttctcacttgcgtggtgtctgatgagccgtctgcggtcatgtttgtttgttttagtgcttgagaggggttggtctccctttttcacctgcgtggtgtctgatgagccgtctgtggtcgtgtgtgtttgttcctctgctgcttccaggattttctctctcagtgcttttgagcaacttgattacgatggaccttggtatggttttctatgtgttccttgtgcttgtagttcattgagatttttggatctgggtctttgtagttttcatgaaatttgcatcattttgaaacttcatatctgcaggtgttttttctgtccctctactcctcaggacctcaggcatgcaggtatcaggcacgcgggtatcaggcaggtgggtatcaggcatgcagttatcaggcatgccggtatcaggcacgtgggcctcaggcacacaggtatcacgtgggtatcaggcacgcagttatcaggcacgcgggtgtcgggcaggcgggtgtcggcacgcgggtgtcgggcaggcgggtgtcgggcacgtgggtgtcgggcaggcgggcgtcgggcaggcgggcgtcaggctgcttggctttgccccaccgcagctcagtaaagctttgtgcctgttttgtggtttctgttgctgtgtcttcgggttcactcatcttttcttctgcaatgtataatctgctgttcatcccactcagtagttttcatagttttcacttccgcaagttgagtttggatcgttttaaaaaatatctttcgtgtttcagct

SEQ ID NO: 93787 - DNA, 323 bp, Homo sapiens
tggaactgcaaaccctacactcagtcaaattcatagaaatttgctttctcttgctatgatctgttttagattatgtatatttattgtctgcacttgcctagtaatttagaatgaagctcttaaaattggagctttccaaatcaatatcacaatttagagactgataagaaaccaggtatttttactggactatagggggtaaatttaagtggcaaactaacattctgctttgtaagtaaaattaaactcaacagggtttagaatataattcaggttcagctttcatgttctgctcttttagcctttggctttatgcctaggag

SEQ ID NO: 93788 - DNA, 923 bp, Homo sapiens
tgaggtttgatcctgtcatggtggtgtttgctgtttgctttgtagtcttgattgcgtatttgctttataggatctgtgaacctctgtatttatgtgttcttttatggtagtgagtatcattcttatgtatgcatgtttagaacttccttgagcatttcctataggctaggtgatgtagtttgggtatttgtccccacccaaatgtcacattgaaatgtaacccctagtgttggagttggcgcctgatgggaggtgattggatcatgtctgtgaatttctcatgaatggcttagcgccacccccttgatgctgtccttgtgatagtgagtgggttcttgcaagatctggttgtttaaaagtgtatgcccccacagccttcccctctcgttcttgccatatgaaatgcacattccctcttcgccttccaccacgagcaaaagcttcctgtggtctcccctgaagcagatgctggcattgtgcttcctgtacagcctgcagaatcatgagccaattaaacttcttaccttataaattacccagtcttgggtatttctaatagcaatgcaagaacagtctaacacactaggtctagatataacaaattcctttagcgtttgcttgtcaggaaagactttatttcttctttgtttgtgaagcttagtatttggtgattacatagtcataaataacatggttaagcatttgtaaccttcatatctctgtgaataactgctaagagttgctttcttatgcccttaggcttggccagtttgtcatatcttgttggcattctttttttttttttttttttttggtaactacacaaatctcactatattgtttgtattatttaaatagttaatccatttagaatttctataaattaaatgtgttagttaatatctagaggcacatgtgaaata

SEQ ID NO: 93789 - DNA, 545 bp, Homo sapiens
ctgtaacttcttgagggtagaatccatgtctaatttatctttgccaacatctggcatacagaattagttcaagatgagagagtatccaaaatgaatgaagaatgcttctcagcacaggagtgaggagaatgagcttccatatatggccctcagaatacaaagcccagtccttcttctcactcggttcagtaactgccagaggcagcatacagggttggttaagagcacagtctgggggcccactggcttgagttcaaatccttccatgagatgttttgtgtctctggataagttactcaacctctcttacccctcaatattctcatcagtggtgtgggaataacacaggagtagcttaatatgaggagtagcacctacttcatagagttgttggggagattaaatgagttaatatgaataaagcagttgaacagtaccttgcacatagttagcagtcagtagatagtagctagtattattatttgtatgcactgcttctctgtggctctgattgccaaactttttaaatcatgaacaccatagta

SEQ ID NO: 93790 - DNA, 783 bp, Homo sapiens
agcgcgggtgggaagcgtgcgaggagagctgagccagggagttgcggggaggagaagaattagaggagacagcactgatgggagtgacagaagcggtgccggttaactccccaccatcaaaagtatcttctgctgtagtctggcacaaggagtgaaaggttaatagccaagaaagaaagaaggaagaagaaaacagctccccgtacagagacagaggaaggggggatttgaacaaagaaaaaaccccgtgtgcgtcggaaaagtggctgcttatacgtatcccaaatctaaaggaagttttttttttttttgagacggagtctcgctctgtcccccaggccggagtgcagtggcgcaatctctgctcactgcaagctccgccttccgggttcacggcattctcctgcctcagcctcccgaatagctgggaccacaggcacccgccaccacgcccggctaattttttgtatttttagtaaagacggggtttcaccgtgttagccaggatggtcttgatctcctgacctcgtgatccacccacctcggcctcccaaagtgctgggattacaggcgtaagccactgcacccagccaatctaaaggaagttttaaaaggttacttccttttgatttctgttaagaaaagggagtgtttatgtgtttgtttccaaatattatttctcagctgaaaatccattttttaaaacactaccttaaaagttcttctaccactcctgtggaaatatatgagcccatcttcaagaaataacagtttgaaatgtga

SEQ ID NO: 93791 - DNA, 264 bp, Homo sapiens
gatttcctccaaagagaaaaagaagacattaaaatctgtttttactaattcataatcatccatacatgtgcttgctacacaaagaagctcagattagaaagctataataaaaacggagggcacatgaatatgtatgaatatatataaaatcagccctaaatctcatctttgatcactgattctagaaataagtacctataaatagtttgcttgccttcttcatgagaactatatccagactgctagactctcccttaaactcaa

SEQ ID NO: 93792 - DNA, 451 bp, Homo sapiens
gcccataatcccaacacttttggaggccaaggtaggaggattgcttgagcccaggagttcaaggctgcagtgagctatgatcacaccactgccctccagcctgggtgacagagtgagaccctgtctctaagataataatagcaagaagaagaaagatcaacaataaaaaccgcactgttatttaaatttagaaggaggagggagaagaaaacaaaattaaaataaacatcaattttatagtaataaaaatcccgattttttagagatacatatcaaagtatttacagatgaagtgatagatctaggatttgtttcaaaataattgaggggaaggtagacagatgataaaaagctggccatgagttcataactgttgagttgaatgatgggtacataggagttcattatactattctgtctacttttttacatttgaaattatatattcaga

SEQ ID NO: 93793 - DNA, 536 bp, Homo sapiens
cagtgaaatctaacagctgattctcagaccccatgttacccagcctcccagaaagcacagttcaaaaagcagagttatcacctgctcctgcttgaaacactttcttcatttggtttccagaatactaaactcttcattattttctttcttctatttttttggaaacacggtcttgctctgttacccaggctggaatgcagtggcgcgatcacaactcactgcagccttcacctcgtgggctcctatgtcagcctcccaagtaatcggtaccacaggtgcacaccaccacgcctggctaatttttgtatttgttgtaaagaagggatctccctgtgttgccagagctggtctctaactcctgggctcaagcaatcctcccaccttggcctcccaagtagctgggactataggcgcatgccaccatgcccagctaaattttgtaattttagtagagacggggtttcactatgttggccaggcttgtctcgaactcctgactttgtgatccgcccgcctggtcttcccaaagtgctggg

SEQ ID NO: 93794 - DNA, 155 bp, Homo sapiens
gatcaagatgccagcaaattcggtttctgtgaggatcctcttctcagcttgtagatggcctgtaccactgtctcttcacatggtctttcctctgtgccatgttagggctggggagaacacaccctggtgtctttccttatgaggacactaatttt

SEQ ID NO: 93795 - DNA, 2172 bp, Homo sapiens
agcattgagaagttcagctgttgtagagcttgatttggaaggcaccagaatccggaggaaaaaacctctgggggaaagaccaaaggatgaggatgaacgcacagtgtatgtggagttacttcccaaaaatgttaatcacagctggattgaaagagtatttgggaaatgtggcaatgttgtttatataagtataccattataagtctactggagatccaaaggggtttgcgtttgtggaatttgaaacaaaagaacaagcagcaaaagcaattgagtttcttaacaacccaccagaagaagcaccaagaaaacctggcatatttcctaaaacagtgaaaaataagcccattccagccttaagagttgtgggtgagtatttttcaatatttaaataggtgtagttgaagtaagatgaactaataatgatggcacttttacagaagagaagaaaaagaaaaagaagaagaaagggaatgaaaaaggaagacaatatccaagccaaagaagaaaacatggacacaagcaacaccagcatcagtaaaatgaaaagatccagacccacatctgagggctctgacattgagtccactgaaccccaaaagcagtgctcaaagaaaaagaaaaaacgggacagagttgaagcatctagcttacctgaagtcagaacagggaagaggaagagaagcagctctgaagatgcagaatccctagctccccgatcaaaagtaaagaaaattattcagaaagacatcattaaggaagcatcagaagcttccaaggaaaatagaggtaaaactacaaggttttaattagataaaactaattaattttaattaattagtttttaattaattagtttttaattaattaggttttaattggcttctgcatttcacagccccatgtcttaacggagagcttttttatttatttcaagatatagaaatctctactgaagaggaaaaggatactggagatctaaaagatagctctctcttgaaaacaaaaaggaaacataagaaaaaacataaagagagacataaaatgggagaagaagttataccattaagagtgctatcaaagtaagtctgtggtttaaattctgtcattggcttaacaatccatcaccattgctaaagtgcaattccaatttatattcaacagagttgcatattagcaacagtaatggcctgtagccaagaactgcacacagtgtgggcgttaacgcaattgctgattaggtaggaaccaccacactcaaacatggaagcacttatttttgtcatgtcacagcaagtgcctccatgttaaagtagagggggccccttaacagatgtaaaaatacaaaataaagcttaaatgtatgagctgcggtcaatacaataaagttattttctaaaaaaataataaaaatgtaaaaggaagacttaccatcaccaaaacatggaagcacttacttctttagtttcaaagcaagtacatccacgtttaagtggtggggagcccagtcttggaaaaagttagaatcctttaacctgtaacaagcttagtaaccttaaaacacaataacaaaaaaattttgtaacaaaaggtgtgctggcttggagacacctccactgaaacatggaagcacttacttttgtttcacacagcaggtacccccatgttaaagcaaaggggatcccttcaaatgaggttagcgtgttctattttggagaagtaaattggattcactcctactaaaacatggaagcacttacttttaaagtcacagaaagcacttccatgttaaagttgaagggagcccacccaacatacaacttctttggacttcagagtatttagagctgaggagaaagaaaacaaaatggcataactttagaagaaaaaaatttttttaccttcctgaactagttcccaaagattcgtgttctcctccagaagggtaaaaggcagggacttcagccacttctatttatactattcttaactcttgaattccttttgcctttttatctcagagaatcattacaagggccttttgttattttaatgtatcagctctcagggaatgtatgatcctgggtgggtctggatccttttttttttttttgaagtatacagatgtcaatgttaacagctaaaaccattaccacaagatatcttcctttt

SEQ ID NO: 93796 - DNA, 1732 bp, Homo sapiens
agcattgagaagttcagctgttgtagagcttgatttggaaggcaccagaatccggaggaaaaaacctctgggggaaagaccaaaggatgaggatgaacgcacagtgtatgtggagttacttcccaaaaatgttaatcacagctggattgaaagagtatttgggaaatgtggcaatgttgtttatataagtataccattataagtctactggagatccaaaggggtttgcgtttgtggaatttgaaacaaaagaacaagcagcaaaagcaattgagtttcttaacaacccaccagaagaagcaccaagaaaacctggcatatttcctaaaacagtgaaaaataagcccattccagccttaagagttgtggaagagaagaaaaagaaaaagaagaagaaagggaatgaaaaaggaagacaatatccaagccaaagaagaaaacatggacacaagcaacaccagcatcagtaaaatgaaaagatccagacccacatctgagggctctgacattgagtccactgaaccccaaaagcagtgctcaaagaaaaagaaaaaacgggacagagttgaagcatctagcttacctgaagtcagaacagggaagaggaagagaagcagctctgaagatgcagaatccctagctccccgatcaaaagtaaagaaaattattcagaaagacatcattaaggaagcatcagaagcttccaaggaaaatagagatatagaaatctctactgaagaggaaaaggatactggagatctaaaagatagctctctcttgaaaacaaaaaggaaacataagaaaaaacataaagagagacataaaatgggagaagaagttataccattaagagtgctatcaaagagcgaatggatggatttgaaaaaagagtatttagcgctacaaaaagctagcatggcttctttaaaaaaaacaatatcccaaataaaatcagagtcagaaatggaaacagacagtggagtacctcaaaacactggaatgaaaaatgaaaaaacagccaacagggaagagtgtcgcacccaggagaaagttaatgcaacaggaccacagttcgtgagtggagtgattgtgaagatcattagcacagagcctctacctggcaggaaacaagtccgggatactttggcagcaatctcagaagttctttatgttgatttgctagaaggggatacagaatgccatgctagatttaaaactcctgaggatgctcaagcagtaataaatgcctatacagaaattaacaagaaacactgctggaaactcgagatcctttctggtgatcacgaacaaaggtattggcagaagattttggttgatagacaggcaaaacttaatcagcctcgggaaaagaaaagaggcactgaaaagttaatcaccaaagctgaaaagattagactggcaaagactcaacaagcgagtaaacatataagattttctgaatatgattgaaaaaaaaaacagttcacctcttaatacttcacaagatacttgagctgttcttgggagattcacttttattatggtagcactgcataattaatgtgtttttaattaaaagaaatatctttgttccttaacttgtaaataagacttttttctagagacaaatatgatgtataccacaatttttcttaaacattttatttgttgaaattatcttagatgtcagtgtcaggtgatttagtaaataaatgtgttttgaacattaaaa

SEQ ID NO: 93797 - DNA, 968 bp, Homo sapiens
agcattgagaagttcagctgttgtagagcttgatttggaaggcaccagaatccggaggaaaaaacctctgggggaaagaccaaaggatgaggatgaacgcacagtgtatgtggagttacttcccaaaaatgttaatcacagctggattgaaagagtatttgggaaatgtggcaatgttgtttatataagtataccattataagtctactggagatccaaaggggtttgcgtttgtggaatttgaaacaaaagaacaagcagcaaaagcaattgagtttcttaacaacccaccagaagaagcaccaagaaaacctggcatatttcctaaaacagtgaaaaataagcccattccagccttaagagttgtggaagagaagaaaaagaaaaagaagaagaaagggaatgaaaaaggaagacaatatccaagccaaagaagaaaacatggacacaagcaacaccagcatcagtaaaatgaaaagatccagacccacatctgagggctctgacattgagtccactgaaccccaaaagcagtgctcaaagaaaaagaaaaaacgggacagagttgaagcatctagcttacctgaagtcagaacagggaagaggaagagaagcagctctgaagatgcagaatccctagctccccgatcaaaagtaaagaaaattattcagaaagacatcattaaggaagcatcagaagcttccaaggaaaatagagcatttcacagccccatgtcttaacggagagcttttttatttatttcaagatatagaaatctctactgaagaggaaaaggatactggagatctaaaagatagctctctcttgaaaacaaaaaggaagacaatatccaagccaaagaagaaaacatggacacaagcaacaccagcatcagtaaaatgaaaagatccagacccacatctgagggctctgacattgagtccactgaaccccaaaagcagtgctc

SEQ ID NO: 93798 - DNA, 1355 bp, Homo sapiens
aaattgattgtatttggagtgggagggttccccctacagatagctgtgggatatgtgaccaaattctagccaataagatataaactgggtcggaggggcggggatcggctgtgtggagagggccggggctctcacacgtgaagaagttgttgttaggtctttcagaaagactctttaaaagggaacagagagttgaggcatagtattttttttttcctttcttccttcctcctattttttgccaggaacccagaaatagtggctggaatccttgcagccgtcttgggctatgaggcaacctttgggacagaagccagcatcagggctggtgaatcagaaagatatagaaatctctactgaagaggaaaaggatactggagatctaaaagatagctctctcttgaaaacaaaaaggaaacataagaaaaaacataaagagagacataaaatgggagaagaagttataccattaagagtgctatcaaagagcgaatggatggatttgaaaaaagagtatttagcgctacaaaaagctagcatggcttctttaaaaaaaacaatatcccaaataaaatcagagtcagaaatggaaacagacagtggagtacctcaaaacactggaatgaaaaatgaaaaaacagccaacagggaagagtgtcgcacccaggagaaagttaatgcaacaggaccacagttcgtgagtggagtgattgtgaagatcattagcacagagcctctacctggcaggaaacaagtccgggatactttggcagcaatctcagaagttctttatgttgatttgctagaaggggatacagaatgccatgctagatttaaaactcctgaggatgctcaagcagtaataaatgcctatacagaaattaacaagaaacactgctggaaactcgagatcctttctggtgatcacgaacaaaggtattggcagaagattttggttgatagacaggcaaaacttaatcagcctcgggaaaagaaaagaggcactgaaaagttaatcaccaaagctgaaaagattagactggcaaagactcaacaagcgagtaaacatataagattttctgaatatgattgaaaaaaaaaacagttcacctcttaatacttcacaagatacttgagctgttcttgggagattcacttttattatggtagcactgcataattaatgtgtttttaattaaaagaaatatctttgttccttaacttgtaaataagacttttttctagagacaaatatgatgtataccacaatttttcttaaacattttatttgttgaaattatcttagatgtcagtgtcaggtgatttagtaaataaatgtgttttgaacattaaaa

SEQ ID NO: 93799 - DNA, 253 bp, Homo sapiens
ttaacggagagcttttttatttatttcaagatatagaaatctctactgaagaggaaaaggatactggagatctaaaagatagctctctcttgaaaacaaaaaggaaacataagaaaaaacataaagagagacataaaatgggagaagaagttataccattaagagtgctatcaaagtaagtctgtggtttaaattctgtcattggcttaacaatccacctcaatggaaacatttcacgtgttaaacaactcct

SEQ ID NO: 93800 - DNA, 1438 bp, Homo sapiens
agcattgagaagttcagctgttgtagagcttgatttggaaggcaccagaatccggaggaaaaaacctctgggggaaagaccaaaggatgaggatgaacgcacagtgtatgtggagttacttcccaaaaatgttaatcacagctggattgaaagagtatttgggaaatgtggcaatgttgtttatataagtataccattataagtctactggagatccaaaggggtttgcgtttgtggaatttgaaacaaaagaacaagcagcaaaagcaattgagtttcttaacaacccaccagaagaagcaccaagaaaacctggcatatttcctaaaacagtgaaaaataagcccattccagccttaagagttgtggaagagaagaaaaagaaaaagaagaagaaaggcagaagcttccaaggaaaatagagatatagaaatctctactgaagaggaaaaggatactggagatctaaaagatagctctctcttgaaaacaaaaaggaaacataagaaaaaacataaagagagacataaaatgggagaagaagttataccattaagagtgctatcaaagagcgaatggatggatttgaaaaaagagtatttagcgctacaaaaagctagcatggcttctttaaaaaaaacaatatcccaaataaaatcagagtcagaaatggaaacagacagtggagtacctcaaaacactggaatgaaaaatgaaaaaacagccaacagggaagagtgtcgcacccaggagaaagttaatgcaacaggaccacagttcgtgagtggagtgattgtgaagatcattagcacagagcctctacctggcaggaaacaagtccgggatactttggcagcaatctcagaagttctttatgttgatttgctagaaggggatacagaatgccatgctagatttaaaactcctgaggatgctcaagcagtaataaatgcctatacagaaattaacaagaaacactgctggaaactcgagatcctttctggtgatcacgaacaaaggtattggcagaagattttggttgatagacaggcaaaacttaatcagcctcgggaaaagaaaagaggcactgaaaagttaatcaccaaagctgaaaagattagactggcaaagactcaacaagcgagtaaacatataagattttctgaatatgattgaaaaaaaaaacagttcacctcttaatacttcacaagatacttgagctgttcttgggagattcacttttattatggtagcactgcataattaatgtgtttttaattaaaagaaatatctttgttccttaacttgtaaataagacttttttctagagacaaatatgatgtataccacaatttttcttaaacattttatttgttgaaattatcttagatgtcagtgtcaggtgatttagtaaataaatgtgttttgaacattaaaa

SEQ ID NO: 93801 - DNA, 1781 bp, Homo sapiens
agcattgagaagttcagctgttgtagagcttgatttggaaggcaccagaatccggaggaaaaaacctctgggggaaagaccaaaggatgaggatgaacgcacagtgtatgtggagttacttcccaaaaatgttaatcacagctggattgaaagagtatttgggaaatgtggcaatgttgtttatataagtataccattataagtctactggagatccaaaggggtttgcgtttgtggaatttgaaacaaaagaacaagcagcaaaagcaattgagtttcttaacaacccaccagaagaagcaccaagaaaacctggcatatttcctaaaacagtgaaaaataagcccattccagccttaagagttgtggaagagaagaaaaagaaaaagaagaagaaagggaatgaaaaaggaagacaatatccaagccaaagaagaaaacatggacacaagcaacaccagcatcagtaaaatgaaaagatccagacccacatctgagggctctgacattgagtccactgaaccccaaaagcagtgctcaaagaaaaagaaaaaacgggacagagttgaagcatctagcttacctgaagtcagaacagggaagaggaagagaagcagctctgaagatgcagaatccctagctccccgatcaaaagtaaagaaaattattcagaaagacatcattaaggaagcatcagaagcttccaaggaaaatagagcatttcacagccccatgtcttaacggagagcttttttatttatttcaagatatagaaatctctactgaagaggaaaaggatactggagatctaaaagatagctctctcttgaaaacaaaaaggaaacataagaaaaaacataaagagagacataaaatgggagaagaagttataccattaagagtgctatcaaagagcgaatggatggatttgaaaaaagagtatttagcgctacaaaaagctagcatggcttctttaaaaaaaacaatatcccaaataaaatcagagtcagaaatggaaacagacagtggagtacctcaaaacactggaatgaaaaatgaaaaaacagccaacagggaagagtgtcgcacccaggagaaagttaatgcaacaggaccacagttcgtgagtggagtgattgtgaagatcattagcacagagcctctacctggcaggaaacaagtccgggatactttggcagcaatctcagaagttctttatgttgatttgctagaaggggatacagaatgccatgctagatttaaaactcctgaggatgctcaagcagtaataaatgcctatacagaaattaacaagaaacactgctggaaactcgagatcctttctggtgatcacgaacaaaggtattggcagaagattttggttgatagacaggcaaaacttaatcagcctcgggaaaagaaaagaggcactgaaaagttaatcaccaaagctgaaaagattagactggcaaagactcaacaagcgagtaaacatataagattttctgaatatgattgaaaaaaaaaacagttcacctcttaatacttcacaagatacttgagctgttcttgggagattcacttttattatggtagcactgcataattaatgtgtttttaattaaaagaaatatctttgttccttaacttgtaaataagacttttttctagagacaaatatgatgtataccacaatttttcttaaacattttatttgttgaaattatcttagatgtcagtgtcaggtgatttagtaaataaatgtgttttgaacattaaaa

SEQ ID NO: 93802 - DNA, 1075 bp, Homo sapiens
ggagacggaaatgtccgaagccgcagtacttgaccctgtattttgggagtcgaacggagaatggaaactgaaagtggaaatcaggaaaaggatactggagatctaaaagatagctctctcttgaaaacaaaaaggaaacataagaaaaaacataaagagagacataaaatgggagaagaagttataccattaagagtgctatcaaagagcgaatggatggatttgaaaaaagagtatttagcgctacaaaaagctagcatggcttctttaaaaaaaacaatatcccaaataaaatcagagtcagaaatggaaacagacagtggagtacctcaaaacactggaatgaaaaatgaaaaaacagccaacagggaagagtgtcgcacccaggagaaagttaatgcaacaggaccacagttcgtgagtggagtgattgtgaagatcattagcacagagcctctacctggcaggaaacaagtccgggatactttggcagcaatctcagaagttctttatgttgatttgctagaaggggatacagaatgccatgctagatttaaaactcctgaggatgctcaagcagtaataaatgcctatacagaaattaacaagaaacactgctggaaactcgagatcctttctggtgatcacgaacaaaggtattggcagaagattttggttgatagacaggcaaaacttaatcagcctcgggaaaagaaaagaggcactgaaaagttaatcaccaaagctgaaaagattagactggcaaagactcaacaagcgagtaaacatataagattttctgaatatgattgaaaaaaaaaacagttcacctcttaatacttcacaagatacttgagctgttcttgggagattcacttttattatggtagcactgcataattaatgtgtttttaattaaaagaaatatctttgttccttaacttgtaaataagacttttttctagagacaaatatgatgtataccacaatttttcttaaacattttatttgttgaaattatcttagatgtcagtgtcaggtgatttagtaaataaatgtgttttgaacattaaaa

SEQ ID NO: 93803 - DNA, 346 bp, Homo sapiens
atgactccctttgctccaatgaaaaaactctgagctgtatattctacactggctcccagagttccccagaggcattgagctccagttgcccacagtggtaacttgctcaataacgcactctccattggcttccttccttccctgtcttacttctccagtccctgaatggtgatccctgaatgactgtttctcaattaagccacttgcacttgaatccttgtctcaggtactgcttctggaggatgcaaactaagacagcgatgtgtgaaattcaaatatcaaaaggtcattgaaaaagcaaagaaataaatcaacatggacctttagtagttgtggacaatgctat

SEQ ID NO: 93804 - DNA, 838 bp, Homo sapiens
agctgggactacaggcacgcgccaccatgcccagctaatttttggatttttagtagagaaggagtttcaccatgctgaccaggctggtttcgaactcctgacctcaagtgatccgcccgcctgggcctcccagagtgctgagattacaggcgtgagccaccgcacctggccaaaaaaaggcattttgatttaggttgctgtgtttgcttgttgataaagaaaactcaatcgggacactagttttgtgctcagctttaggccgggtagctaatgggaggatgtccagcctgtcactgtgctcccagcgcaaggaaatgggtgcccacctggaatcaggagaagaggcttttccctcctgttctgcaaccagggtggagctatctttccagggaagccagctgagaggttttagggctttggttattttatgggggttttaaacctcctaacttttcaatgacaaatggctcccaggtgccatagtctctgttaaatcctcaaacattcacaagcacacactgccaggggtacgggttgtctttcacctgcatgtttctaaggctctttattcaatctcacggtgtcagtgtccagttgtcaaagttatgaatcttcctcctgcttctaaacagggctgacagtatactctcgtctagtctaggaacatgtctgctgctgggataccctggtaccaggatttgagggccacgggtggcatctctgagagctgaaaatccacagagtgcctgtgggaaagccaagcccttggctgtgtggcttttctatcccttggatttacaggtctgggaattggctgcttcttagttataaccccagt

SEQ ID NO: 93805 - DNA, 379 bp, Homo sapiens
gggcatgcaaagtggtacagacttttaaagaaaggaatttggcaacatctgaaaatattacctctgtgtttaccctttggtctagcaatcccacttctaggaatctatcccaaagagacaacagaaggtacagaatgcatacagttataaaagcactatttgtaatagcaaacatctggaaacaacctgaatgcctatgcgtaataaggtactagtataataaactgtggtatatccttccagtgtagtactatgcagctgtcgaaagaaatgaggaagaagtatatattctgctagggtgtgacctccagatacgttggtaagttaaaaaataaaagcaaggtccagaataatttgctcagtatagtactttctaagt

SEQ ID NO: 93806 - DNA, 732 bp, Homo sapiens
accatcccttagtccatctctaatttcctccatttctccctgtccttgcctatatgctgacataattttatgtagctataaaaaagccatgtttaaaattataaggttagcattttcttatgtggtgacataattgctgttactactattataagtgattgcataataccttactgaaacagtcttaggataacacagtattttggttttacacatgaaagaaagattcaaaaattgttgggacaagtacctatccatgaggaaaaaatatatctttatcccagtccttacagcacattcaagatagactgaataattaaatataaaaaattaacataaaccagaacaaatgggtaagtgctttttgatcttggatgggaaaggcctgagagtgacaaaaacttaagaaattgccaggataagactgataaatttggctatattcattcaacaaacatttattgagtgcatattctatatgcaaggttctgctctagacactggggatctcagagttatctaaaatgacaagtagggagttgagctatcatactctcacacaagtcagtcagtcatagccaaagggctgtccctggggccttaagcctgggcactctggggctctctgggaataggagcaaagcagccccactgacctgaggacaggtgccagccatgggaagccagagcacatcaagccccagtggggatgtccagaaacagtgaaagggg

SEQ ID NO: 93807 - DNA, 549 bp, Homo sapiens
ccgggttcacgccattctcctgcctcagcctcccgagtagctgggactacaggcgcctgccaccatgcccggctaatatttttgtatttttagtagagacggggtttcaccatgttggccaggatggtctcgatctcttgacctcatgatccacctgctttggtctcccaaagtgctgggattacaggcgtgagccaccgtgcccagcctgttctcaatctttcaatcttgctcttttgagagtctgtctagtcagtcagacaacagataattcacactgcttgggaatatatgtatttcgggccatttctctctccatgcaattgagagatggagagtggatgactgcctggactctcagggccacccctgagtgcagctgcagtgcagtagaagttcactttcatcttgcattgccatgcagggcagactcatcctggtttttgcctccgttgtcagctggttgtagagatcaccccctcccaccccaaagaggccatagggtgagctgagggagatgcattggcatgacataggtgggtgacatga

SEQ ID NO: 93808 - DNA, 591 bp, Homo sapiens
gtttgaacccaggctgcggagattgcggtgagctgagatcataccactgcactccagcctggacaacggagcaagattccaactccaaaaaaaaaaattaaaataaaataaataaatcagtactagctatagaataagatccaaaaatgtggtgaaaactgctatgttgaatcctctcctcccacaggatttgcaggtgttcattggcaccatatctgtcagtggaaacatatctcttgtttctcctgaggagaatggatgtcttcatgagcctgccagatatttctgttatatgcccttgtaaatagacacttatctaggatgaatagtaatttataatggcgaaatagcaaagaatttggatctaatttatgttatgacctatttacccccagcgtgagaatgggaaggtaaaaacttccagacttcatcaattgctttccggtgaaatttgaaaattaactagttggataacatttctagttatgtatgacattttctgatcccatttgcttaaagtgtaacttctgaaatatttatatgttacactgtaccccatgctagtctagtggaccaggccttgatcctctc

SEQ ID NO: 93809 - DNA, 293 bp, Homo sapiens
gctcactcaggcttcattcatttaaaatgaaaacaaaataaaacaaattttaaataaaataaacaataatgtcaaataaatgttcaaataaaataaacttaatgtggatttaaaatactgaattccattttccttataagatttaaacagtttgattaaatgtgaccatcagttttgtttttcgttttctgtttttaaagagtttatttgagcaggcagcaccaggccacatgcaattgagggcttcacctagggggcttgaggggaaaacttttataggtgtttatggaagc

SEQ ID NO: 93810 - DNA, 394 bp, Homo sapiens
gtctatggtcatgcttccttctcctcacttggtctcaccccagcttctcttcaagttgctgctgttctctgctgctcctgctttctccctctaaatacttttcttgctctccctgcccctttttgcaaccttttatttcagcctggcagtggtttctaaaaacccgtcggaaatttagcatatgtgacactgtgttgctaacctgtattaactctcaagctttggtctcagcaagaacgagctccatatgccaagaggagggaggaggaatgacagggtggactgtgacaggttctcctggagaccatgaccctgggagcaggggtgaaggcctctggagttccctttggaggtgtcctatagtctgagtgaccagtttccctcttgcttgcag

SEQ ID NO: 93811 - DNA, 376 bp, Homo sapiens
gcacacccagaaacagaaagggattaatgtagaaacagaaaggaattcatacagtgatctcattattagtagtagtattagtactagtatctctcaccttgagagaaaaatttattcatttattagcaatggggtcttaccatgttgcccaggctggacttgaactcctgtgctcaagcagtcctcctggcttagcttcccaagtagctgggactacaggcatgcaccaccaaacccagcttaattttgtacttctagtagagacagggtttctccatgttggtcaggctggtcttgaactcctgacctcaggtgatccacctgcctcagcctcccaaagtgctgggattacaggcatgagccaccaagccctgcc

SEQ ID NO: 93812 - DNA, 351 bp, Homo sapiens
gggcaccaggatcagaagtggagaaacaatacctaatagggagaccaccatgtgggcagaaaataaagagataagctcaaaagcatcaattttccttttcatgcacatgtttttgtaatactaatatagtttttaaaacctgtcaagaatgacataatcaatactctaaaatctcttagagcaggaaataattctagtaaaatacctagtacgggccgggtgcggtggctgtgttcatgtatgtgctgcgcatgagtgtgtgtgctgtgtgtgcatgtgtgtgctgtgtgtttgtgtgtgctgtgttcatgtgtgctgtgcatgcgtgtgtgctgtgtgcatgtgtgtgct

SEQ ID NO: 93813 - DNA, 180 bp, Homo sapiens
gatgaaagttagaaatggaagtgacaagcacacctgagtgaaggatgagagctccagctgccttttccagttgtattcccatgtagctgagccaaaggctgatctcaagtttattgttacatgcccatttaaggcttctggccattaacacttttgattttttttggcttgttattttat

SEQ ID NO: 93814 - DNA, 411 bp, Homo sapiens
tttgacaaactacaaagaaaccattccatggaagagcaaccttcttgacactggaagtaatacaagtcttctaaagaataatagagcaccgctagcaagagccataaaaatcctgaagccctctgaactagtaaaaccactcttggtaactttctctaaggaaataattacactgaagcaaaaagctatttaaaaatgttcactgcaccactatctataacaaaaaagtggaaacccaattcccaacaatagaatggttaagtaaaaaccttacagccgggcgcagtggctcacgcctgcaatcccagcactttgggaggccgaggcgggcgcatcacctgaggtcggtagtacgagaccaaactggccaacatggtgaaaccttgtctctaccaaaaatacaaaaattag

SEQ ID NO: 93815 - DNA, 305 bp, Homo sapiens
tgtgttccaaacaatagcaagaagataataagatgaaatccaagcgtatcagttttatttgcccctttcactcattggtaaaatggacaagtgggtaaattaacataaattaacatgtaaagatttagttatgaagtataaaaagtactatgaaaatgtaacagggtaaaataatataggaaagtatgtatcctatgtgtaagaaagactgctaagggaaagtctcttaaacataaaaaaataacaataagatgctataggcctggcgcagtggctcacgcctgtaatcccagcactttgggagg

SEQ ID NO: 93816 - DNA, 304 bp, Homo sapiens
caaaattgatatcagatttttatttctttgttattatattggatatgtccttatacaaatgaaaaaaccctgtagattagcacatatattatttgtggacatattacccaaaagaaaaaagttttaataaaactcctttgtcatatagatttttcatgacaaaaactaaagttttgttagttacagaaagaatattttccattttttcacttatatatttcactggtgaagccacagaggaaaagcacatcattctgcaaagcttgcagtcttggcagaatttcaacatgttctcaaaacctaa

SEQ ID NO: 93817 - DNA, 866 bp, Homo sapiens
gtcagcaaaattttattgaacttagggattaatacagctttgtaattcctataaataaaaatagtttgtatatcctttatttaattgatcttaaattctagaacatttcgcgtcataaagtccaaacaatatacactgagttcacactttctgcaatgcctaccatctcaagttaaaaaaagtctcaaattttgccttaatgtaaaatggctctaataagatatataatatttttgtcatataaaatattgcatattgacagcaatatcccagtggctgatttattgataatatctttgaccatttgaattttttttcctattatatataaggaaatacaaactaggtaacaggaagaaatgagaaaaggtagagagagacaatagtgaagactggtggacattggactacaaaagattactgcaggattcttctatgatgctgattacagctttatcttatcaagctttggcattgaagaccatgtgaattcatctccaaccctgggagtgaaataagaactttcttttttgcttctgaaattttaagctctatacggaaacactttttacttaatctgcatgacatcagagaaagagacttaccagcttttgaaaccaaaagaagagcatcccaggggaagtatgcatggaagcaccaagaggcatggagggaatcaaagccaaatggctgtaggtatcccatctccattggctgaatacttcgaggcttcagcctgctgtgaagaaacatttcattcattctacagtttgattcacttggttcttctttggcttctcactgcaatctatcttcagaaaaaagcgcagtgacaatgccgcatgaatatggaagtctttgtaaca

SEQ ID NO: 93818 - DNA, 189 bp, Homo sapiens
gagagagagagagaggatggagctacaattattaagcagagtcttgcataaaactctcggaaactcacaaccagaaaaaattttgataatcatcgggttgcagcaaaatgctacataatccaaattcataggtcccatacctatgaagactggcaaactccttgtctgtccacagacatttcgtgcagg

SEQ ID NO: 93819 - DNA, 425 bp, Homo sapiens
aatgctctatgactctcttcctttgtcttatagacatatgttagatgtacaatgtacagctaagttaaaataaatagcttgcagagcacagagttgcagagctggagggggaaccttaggttgtttttggaagcagtgtgttctgaaataattaagttacttaaaaacccacttccgttgagcccgatgagttggaagcaatggaattgggaaggagcacttgccgaagagcaaaatcaatggggaagattctattagcttaattgtttattagtttggtgcctggagctcatccattcttcaaacccagggacgtgactggcctattccttcctcctgggccaaggcccatccctggcagggccctgccatccccctgccaggtgagtcagggaatgccctggtctgatgctgattctgactct

SEQ ID NO: 93820 - DNA, 443 bp, Homo sapiens
ggcacatgtggggaaactgaggcacgggatggttggctaatctgcccaaggtcacagagccagtgagtggcggggccgagattcaaacccaggcagtgtgaagttcatgaagggaaaagctgaacttgctggaaccccttcagactccacgctcctggcctggctgaaggaccctgctgactctctcccccagctcacccctccgggggctgccgtcctggctgtgacctgggcctggtgtgccttcacagctcactcctgctgttgaactccccctcttccctcaggctcagcacagtcggggtgcttcctaggggtgggagtgcaccctcgcagcacacctgcctccctcttggcagtcgctgtgagcatagtgaagccggccattgcacctttgcccattccccgggtgaaacgccagctccagcagggcagggactgag

SEQ ID NO: 93821 - DNA, 286 bp, Homo sapiens
catcatttattgtcaggtaagcaaaaagaaacgtccctgttttagagcagggtaaagggattggaggttggggtttggttgttcttttgaacatttagcagttgaaatgagtcttgtatttgcataattgttaccacattatttttaaaaattcaacatttcaagccaggtgccatggctcatgcctgtaatcccagcactttgggaggccgaggcaggtgggatcacttgaggtcaggagttcaagaccagcctggccaacatggtgaaaacctgtctctactaa

SEQ ID NO: 93822 - DNA, 466 bp, Homo sapiens
cactccagtctgggtgacagagtgagatcctgtctcaaaaaacaaaacaaagcaaaacaaaacaaaaaacaaacaaaaaacccacttttgatcaggcatattatgttatggagacatcctaaagaagggagggtgagtaggcagggacttccctccccatcaaaaatttcatcattgcacacttacatcgtctgacatgattagacggtgtgtgtccttcacaggatcctcaagcttcctgagggttagttcgtttgtgcagtgaaacatcttccctgtaagaatgctactacctaggagctggaaacctgcatatcatcactttattggttgactctaccattattatttttttaaatgaaacactttgaatgtggccttattaaaaacagaattaaatattagtaaatcataaatataattatgtaagttaaattctaacgataataaagaataaataaaagac

SEQ ID NO: 93823 - DNA, 482 bp, Homo sapiens
gagacagagtcttgctctgttacccaggctggagtgcagtggcacgatctcagctcaccgcaacctctgcctcctgggttcaagtgattctcttgcttcagcctcctgagtagctgggattataggcatgcaccactaggcctggctaatttttgtatttttagtagagatggggtttttccatgttggccaggctggtcccgaactcctgacctcaggtgatccgcgcacctcagcctcccaaagtgctgggattacaggcatgagctaccatgcctggccttctcatgtgttttctgattaaggctcttgacttccaaggctgtgtggggagatggggtgggggctcttggactgatataaaactttgtcaaatgtagttctttgaatggagcttgaaacgccgcatattcttgctcccacaaggatagtgggcatcatgaattaataaaacgtcctaggattctgcaagctagactggt

SEQ ID NO: 93824 - DNA, 320 bp, Homo sapiens
ggaaaaaaaaaaaaagagcttgatgtcataagcacccataaaccattatgcatcatgttggcagtatagtatataaatacatggtgctgggattacaggcatgagctaccatgcctggccttctcatgtgttttctgattaaggctcttgacttccaaggctgtgtggggagatggggtgggggctcttggactgatataaaactttgtcaaatgtagttctttgaatggagcttgaaacgccgcatattcttgctcccacaaggatagtgggcatcatgaattaataaaacgtcctaggattctgcaagctagactggt

SEQ ID NO: 93825 - DNA, 722 bp, Homo sapiens
gcctcccaaagtgctgggattacaggcatgagccaccgcgcccggcctaagatttcttattgtggtattctgcagtggagaatgggagttggaaagaaatgttttctcccacacctgtcccgctcctgtctactgaaagctgattaatcagtcagatagtgagttcctattggtagtacgcctccaaaatttggaagaggggaggtggcgtgatgtgaaaaagcaaggctttagggagagattcccgctgggggcattcaccctctggtccagcgtgcctgttacagtgatcactccatagtggttttgcatgaacaagactgcccagtttgcttaggaagaaaacaaaggacataaggtagttctcatgtcttcccagcaccctaaatactcgggctaaacttccacagtcagaccgtcagcttcaggaagggctgctgttgggaactttttttttagtttgcagttagttcagctccagccaaaaacctacaaaaagccactgcaagccctctgcctgctcgtataagacaccttggttgggcccctgtgactgtccatccataggatggttggccattgactgcacagagaggtagggcaagataaaacgactcatttgtggatctgactccttgtacttctgtttggattcaaacagaggaagatagagtagtggccttgggaaaccgtggagagagaaaaggcatagtcagaatgtt

SEQ ID NO: 93826 - DNA, 119 bp, Homo sapiens
atatttctgagttggttggcaacatgtgttatctaggagattttacataaaaatgtacatttccttgcttctcttgaagagtggaagcttggcctggtgcaggggctcactcctgtagt

SEQ ID NO: 93827 - DNA, 507 bp, Homo sapiens
gttgtctggcttcactggtaggattctgaacctggattagatatacagctgtccaatggatcagcttcccacatcctagagttccattatggagttacaaagagaatgacagcacttggcaagtcccaggcctaatcatagcacagagaagtgacttttggaaggtacattactaagcaattaggacccatttaataaattacctcttatggaacactttgaaccctagtggtctgaagaggttaatgcacctctcacaactgagtgctactcagtttccaggggtaacttcaaggccacagctaatccaaaccttcttctcatcaatggcctcttactcttgagccacttctgtagtctggcatcagtaagcccacacacttgcactactcccctctgcgtgccagatgcttcattttcttgcagctgaatccattgggcgcagtgctcatgaggccaaaagactttgtgctgcacattaacttcctccttgggctttcatgcttc

SEQ ID NO: 93828 - DNA, 228 bp, Homo sapiens
agaaatcaagaagaaatggagtttagcctgaaattgtttttggagatggttggaagatttagaccaggacagatctagggttgacaggcaatagagaggggctgattcagtgttcgatgaaggatgcctgctgtgaggaacctttctggggacacccaggaggctggcagtgccctccaaaccatgttgggccagttggattctcgggtgtccacagcaacatgggac

SEQ ID NO: 93829 - DNA, 1068 bp, Homo sapiens
aatgatagactggattgggagagtgtatgtgtgccacatttccttgatccagtctatcattttggacatttggtcaacaagaagaaaatttagtcctgaaaaataattttttataaaggctgacattttggcccagcattgttgttgttattgactttattttttttttacagcagttttaggtccacagcaaaattaagcagaaagtacagagaggtctaatgtgttttggttattttaaaaattaatagactacttgttacataaaacaaagtaggttttcttgcttgttttgtctttttttttcagtaacactctaaagggtaaatttattttgtctgcaaatcaagtgtgcatacatgttgccttgttttctcttcacttcaaacatgtaaaatttcatctagaacttaattttgtaagtatttgaggaataattcatacctttattatagcagataaaagcctagataggacatttaaaaaataatttctaaattgtaccgcaattattttaatttcaaaaagctttcctttatcatattcttatcttttatttttatgttttaatgttttaataatttcaacttttagatttgagggaacatgtgcaggtttgtaacatgactatatttcatgatgctgagattaggggtatgaaagatccatcacccaggtgctcagcatacaccccatagggtgttttcagcccctgcttgcctctccctctcctccctctagtaatccccaggtctgttgttcccctcttacctatttatgaacccaacgtttagctccacacacaagtgagaatatgtggtatttgattatctgttcctaagttaattcacttaggatatggccccgacctatattcatgttattgtaaaaaaaaataagtaattttgatttttttatggctggcattccatggtatatatttaccaaattttatttatccaatccaccattgataggcatgcaggctgattttatgtctttgctattgtgaatagtgctgttattaatatgtgagtacatgtgtctttttggtaaaaaaaaaaaaaa

SEQ ID NO: 93830 - DNA, 518 bp, Homo sapiens
ttagatattagttattttactctgttacattgctaacagggtaaaacaggttaaccataatttatgtagaaaatatagaatgtgagaaaataaataacgcaatgagaaatacaaagactaaacaaacattaaataaaaaataccaaacacatgcataagatacaaactcatacagtaatactcagccttgaaataatcttctaaacttatgaaaatagcaaaacataatacaaaagagaaaatctcaacactgttattgtaaagttgttttaaattttgtgtgctaaatcattgatattaatattataagtaactgtaagtcttctagcaggctagatattaggcaatatatagccagaaacaacttttttatacattaaaaaaaaaaaaattcagattgggtgtggtggctcacacctgtaattccagcaatttgggaagccaaaatgggaggattgcttgagcccaggaatttgagaacaacctggtcaacatactgcgagaccttgtctctattt

SEQ ID NO: 93831 - DNA, 1445 bp, Homo sapiens
aaaggggaaagtctttttcagtgttgcataacagttgatttccccaccattcccataccctaagtgaaaattcaactttgttctgattatcagaaattgattccttctcctatagattctttaaagaaacctctgatggtttaggcttactaactcaaggtgctcttaatatcagtgttaagctgtgtgttaagcctacttggctttaaaaaagtgttacacaggtgcatatggaaactttaacagctttcaagttttcagtccaaatctaacattttgcagactaatgtgataatttcagattaccaaagtagcccttttatagtgaggggcctttgtgtcttacaggctttttttgtggtggattgggtgtcctaaaattcacctaggtgtcttgtaagcctccccagtgcagcagcagcttgctcttgtgctatcgcagtgccgttaggtccctgagtttttaagtacttacttcaaccattcttctgtattggcagaccattgtcttgtgttgggggctcagaaaatactttcatccttaaagtgcctaacccagtggcatacacatagtaggtactaaataaatgtttactgatttcttaaaaaattgttaactgattgatgaaactttttcagtcattggaatttgatttcataaagcctcctatgtagacttcaaaataatagtatttccagagcaggagtcaaattataaattataacaccacaaccacagaaataatagccccatacttgttattcatgaactgtacatgttgatatctcatttacagttatttgcatttaggcatgtcagatagtagagcagaggtaaatgtcagcattttttctagtctaatattttttctttgaaaatgaatctttttaaattttaagatattaactatgctctggaaattcatgttagagaaggcaaactgctagcaatttagcaaaattaaatcataaaattagtttctttgtattatctcaagatgcaatttaattcattacaaaatttcttattaaaactgtaagtcagcatatctttaagtgaatttcaacaagaaattcattgggggatgcttttatagtcctacagcatttagtaaataccagtttatcagtgtgggtgggagattgataactaattgcatttttaggttaagcagtatgtactttgcgttaaagtgtatcctgcatgtgttctatggaacaatatgtggactgttagtattgtatgagaaaagagttccgtggtctggtaagtttttgggaaatacaggttgaatatccctaatcagaaaatgagaaatgttccaaagtctgttttgagtgctgacatgatgctcaaaggaagtgctcaatggagcatttcagagtttggattttcagattagggatgctgaactggtaaatataatgcagatattccaaaagcc

SEQ ID NO: 93832 - DNA, 202 bp, Homo sapiens
agggtatgccactaaaatgcgaaaaaatgaatttatgtagaattctacctagtctcatccttaaggcatttgctttctgagaaaggaaaaaagaaaaatactggttattttggttgaattggggactagacactgctacgacactgtcagaaattaagtatgtttgggaattatttcaaaatataactagggggaacggggt

SEQ ID NO: 93833 - DNA, 227 bp, Homo sapiens
cctcccaaagtgctgggattacaggcctgagccactacacctggcctgtttatggaatgtaatattgattttctcggctgtagtttagcctgctccttcatgaagcagcgtcttccttctgtctttgcctgttttttgttagcacacagattgagaagtgacatcatcagtgcaattaagtacctacaggggtaagcacattgagtcatacgccgtggagggaatat

SEQ ID NO: 93834 - DNA, 383 bp, Homo sapiens
ggggcctagtgcagtggtcatcatcatctgacgggtagtgtggaaacttcatccagctatgagatgacgagggcctaggacgggtggcttgtggaaaggaaaagatattaaacgtgtgagaaaaaaacaggatccagtgacttagatgggtacaggagccaaaagtgaggaaatcctctaagatgagtcctacaagcttagttaaatgccatttgttattgctagtactgcaaaaggtaggaaaggaaggtgtgcagacaagtgagggagctagggtggacagtctctgttacattgacattctactggagtctaagctccacgaggaaaagaacttcacctgtcttattcaggtcagggctttgtacagtgcctagtcaaaa

SEQ ID NO: 93835 - DNA, 179 bp, Homo sapiens
  misc_feature (150)..(150): n is a, c, g, or t
ccaccacttattgtcttcaaacattattgcactttaactttcttaatttgacaaagcattcaagaaacatctgcagactagttttaacagacaaataacacctgtaagcagacatgactgtcctaaattgtttattaagaaagttaaagngcaataatgtttgaagacaataagtggtg

SEQ ID NO: 93836 - DNA, 207 bp, Homo sapiens
taacctggtaagagtgcggtacaaaaaaagaatatgaagagccgtattgacaactattctcacagatgtatatacgtacagcaaacagcccaaattaaaggagaattcaaataaatacattccgtgttcagactgctgtggataattattgatcctgcagttggagcattgtttacctcacactgaacagcaacttagagaaccccc

SEQ ID NO: 93837 - DNA, 409 bp, Homo sapiens
cctccaccctgccccacaaggctccgtactcccacctgcctgggcagccctcacacccatgctccctcctttaggcaggcccagaaaggtgccccttcctgagggtgttgggggatggcggcagagagacagctggtattaggagcttccccatcctaatgtgcaggaccaagttgcccgctctgccagccaggggctccagccatgctggcacaggcatctcagaggtgtgagatgaactccgcctcatgcaggatgcccagggctcggaagcagtaaggaggatgctacagaaaggaactgcagaaagaaaaaaagccacatggttaacttttcccctggagggcaaaggggtccggctctcaaaaagaaaagccaggcacagatcccaacaccaagtgtaaggcag

SEQ ID NO: 93838 - DNA, 453 bp, Homo sapiens
acttggtccagatgattgtattttaaaaggtatgttaaaataactttgtactgtggcagacatcagtgggtcatttggcatcagtgttaaagtacccttgccaagagaagatggcacagtcaaagcagacctaccatgaataattttaatggcctttgcatcatcagtggaaagtaattgaatgatcattgccaatttcaggtagcactacatatcttttattaacaaaatttttctttattgagacaaatcctgtaagtgaaaagacctgaggttgcccagcaggattcatttccaagtttctttggcctgagttcatatcaagaaatacctcctgggggtgatgaaataatctgcacaccaaacccctgcaacatccaatttgcttatataacaaatctgcacatatatccctggacctaaattaaaataataaataaattcaaaagtttc

SEQ ID NO: 93839 - DNA, 504 bp, Homo sapiens
ggaaccaatctcccacagatactgggtactgagggatgcgactgtatgcactttgtggtccatggggcctgtaacaaggaatgggaaatacctaccttcaacgttgcctagaaaccagatttttattaaatgtgtttgttgccaagtcttgtttctatttcctagacatacctgcagcttctcctatgtgctaccagtgcatttgatatggtttggccctgtgtccccatcatatctcatcttgaattataatgcccacctgttgagggagggacccgtaatccaagtgattggattatgggagtggttcccccatgctgttcttgtgaaacctgatggttttataaatggtagtttttcctgcgctcacactgtctctctgtcctgctgccttgtgaagaaggtgtctgcttcccctttaccttccgccatgattgtaagtttcctgaggcctccccagtcatgtggaactgtgagtcaattaaacctctttcctttataaat

SEQ ID NO: 93840 - DNA, 538 bp, Homo sapiens
ctggtaaggaattatgtgctctactacccaaatgtcttgtcctgatggcaggaccttcattcccttctgaacatttgcttctaaatgttatcaaggtttttagaaacagaagtgaaataacaaaatggagaaactatgcatatatgcatctattcagcatccagacacctaaatgtctattaggcactctttccagatgcattttctgccttgggggagtgcttcataaatctagatagagtgtgaatgtcagtggatggattaccggcaatttttctatgatctcatctcacgtggtcctctaatggccaaaataatcaggagcagttttccacatttaacaataactctttttaagttctgaaacttaatggcattagctgaggcagaactgttcaaggaaaccaaaggaaacatcaattatgacacacagcaggtgctgacagtgaatgttgtgctagaggccataaatctatgtcttaacattggtagaatatgatgtgttcagtaagaccattcttactgccttctgcctgta

SEQ ID NO: 93841 - DNA, 193 bp, Homo sapiens
cctgatcgcatgagcccagtaattcaaggctgtggtgagctatgatcaagccactgcactccagcctgggcagcagagcaagacctgtctcaaaaaatacatacatacataaattccaccctttttgatagcatgttatgaggctcaccaaggtctatcctctggcagtatccctggcctgttctccccatct

SEQ ID NO: 93842 - DNA, 509 bp, Homo sapiens
aatcgggatacacaaacacaaacaccttgctgagctctctggcctccccttcctctctcctcctcccctccccaacaccctctttatctttgtacccttccccagctgtggaaaacattcggttaccagaatggaaaagattcttggggcagcatctggagcctgaggcctcagactgcctctcatacctgcctgaaatgggctcacagatgtgatgtgtggtaggggtggggatctgtggggcgatgcaagtggcctcttgagagctccattataggtggctggagctagaataagggcttccttcctcaaagacagctttccaaattgaggcattaatggggatcaatggaaatgaaattgccttgtgatcacccatctccaagagcaggggagagagggggtagtgtgagaatgtagaattgaaaatgagtagaactcactcactaccttgtctctaaaggtatcttgccctcttcatcttttccctatttaaaagtcaaaaatgc

SEQ ID NO: 93843 - DNA, 499 bp, Homo sapiens
ctctagggatgaggaaatattctgctagatgaccttaaaaaatgtttcttccagagacttttgcctcatttacaatgtctttttttgtcctataagcctctctttgattttataaactgacataatttcttgttgttatgagtgtacactgctctagtcgttcaataaacccatcacacattttcatcatattgtcaattggcacctttttctttttcagtgttaacaatgccattatcatcactattatcacaatcatcttaattcagagctcttttggctatttcatcattggtcaatgaaaacacctggagtcttattatcgatgttaataacctctttgatatccacttcttccagcttactgatagactctgaaggtatatttttttgcttacgtaatgaggtcagacataattttttctcacttgacatacagaatccttcagtcactaccttgttcatcatcactgaacatagttgcaggccagaggttgtg

SEQ ID NO: 93844 - DNA, 461 bp, Homo sapiens
tagacggagtcttgctctgtcccccaggctagagtgcagcggtgcgatctcagctcactgcaagctctgcctcccagtttcatgccattctcctgcctcagcctcccgagtaactcgaactacaggtgcccgccaccacgccccactatttttttgtatttttagtagagacagggtttcactatgttagccaggatggtctcgatctcctgacctcgtgatccacccacctcagcctcccaaagtactggaattacaggcgtgagcaaccgcactcggcctccatttcttaatattgcagagaagcacctcatttcccaggcttactagtctaacttagccacatgtgttttaagaagcagcagtaagtaacatccctgtcagttgttcttttcagcagaattcagttggccaagcaggtaaatctgtaagccgaatggtttgtgttcacttggtcactg

SEQ ID NO: 93845 - DNA, 691 bp, Homo sapiens
ttcaacttggggtctcctccttgcagcctctctctggtggcgtcattgcctctccactgatccttcccttgggcggtgctgtcaaccggtgccgctgcctgtcagcccatgggcgaggtgagtcacaggcactgtggggttcttggagtcttaggcctgctcacttgaggcattcttcccctattcgttgagtgttctcagagggaggggacggagctgctcaaccctgctcttgtggctgtcaaggtgtcctgcattatcccacacgcccaactcctgggatcttacagggaggctgctgatgtccaccttcctgcgcttccatccatcaggtgcctgcccttccttggctgcagccggccgtgaggagttttcctccatagatagggttcaagtaccgcccaactgtcacctcatggtcatctgacattcctggtggtggtggggggacccccgggtactatgctcacgtcagaccaagtacctcaagtgataggaacgtctgacaggattgcacatgtggcagaagagcatccgagaagattgaagctttggcagaagaaacacctgccagatcagatgtgaatgtgtggcagaaggcccatctgggaagattgcacattgggtagtaggaagacctaagagcactggacagcagaaggagtgcctctggagattgcccggtgggcgg

SEQ ID NO: 93846 - DNA, 385 bp, Homo sapiens
taatcagattgttttcctgttaactgagttttaagagccctttgtaaatcttggatagcagtccttcatgagataggtctcttgcaaatagtttctcccaggctgcagcttttctcattatattaaaaatgtttttcaaagagcagagggttttgttttgttttgttttttgagatggagtctcgctctgtcgcccagtctggagtgcagtggcgtgatctcggctcactgcaagctccgcctcccgggttcacgccattctcctgcctcagcctcctgagtagctgggactacaggcaccaccacgcctggcctagcagaggggtttttttattattattttaataaagtcaagcttgtaagtttctttcatggatcatgcctt

SEQ ID NO: 93847 - DNA, 272 bp, Homo sapiens
aaaggactggggagaaaaaccctcttaatacactattgtcctcagcagtttcctctttaaaaagcaagggcctgttgggctccttgaaggggaaaagttaagaagatggcaatgccagtcaccagcctggtacaggaacaacggcaccattcacagcaagacccttgtcctctgtttcaggggtgaccttgtacttgtcacccatgctggagtgtggtggtctgatcacagcacaccgcagcctcgaactcctgggcacacattatggatcc

SEQ ID NO: 93848 - DNA, 264 bp, Homo sapiens
aagcatttcctgatatcacaaatgagagctccgtgttaatgacttctacagccttgcccagtttcatctcttctgcttgcactgactgtcatcaccccctactctgcccgtcgaagacccactcaggccctccatcccaagcccctctccagttctgtagctctcaaaaaccttctgtcttcccaattctcggggcatttatacactacattatatacgttgatgtccagcatgagctaccttgtgaaattcactaatgctttt

SEQ ID NO: 93849 - DNA, 754 bp, Homo sapiens
taggcatatattaccccattttgctcaggaatggtctgagctgggcacaggtagggaatagacaaagggggaaactcaaaaagctgttgtctgtggaagatgaaggtgaagtggttgtcaagcctgtttgattgaaaatgatgcttcagggattcacaacatgtcaggtttaagggggaggccctctaaaaaatactgggtctccctgagcctaagcgaaaatcttacagaaatctacaggtatcattcctaggtgtttgtcctaaagaaataaccagagatatggccaaagatacgcatgccctttgagtaatgttgtgttgttccatgttacttcattaaaacattgatgagaaaaaaatggattcccagacgcagccactgtctgtatggagtttgcacattctccctatgtctgtgtgggttttctccaggtactttggtttcctcccatatctcaaagatgtgcatgttaggttaattgctgtttttaagttgtcccagtctgagtgagtgtgtgtgtgtgtgccctctgatgtaaaggcattctggccatgattggtttctgcctcaggttctgtgctgctagaatagactccagcctcttgagaccctgacttagaataagtggattgaaaagagatgaatgaatgaatacaaatgatcatgaaataaaaatttataaaatatatgataatcatacaattgcatgacaataaaaagtatgggacaaaatctttcagagggcctacca

SEQ ID NO: 93850 - DNA, 384 bp, Homo sapiens
tatgaattcacactagtaggtgaatcatggagaacctcttaaccctcttaatgtcttctcgtgttaaaacgaattggttgtgagacttgagagtccttgtggcagtatgggttagggatgaacacggtggctaaggattcagaattcacacacacattagtgggactcttaggctcttcactgcacctgcttccagaacactggcagtcagttaggaaacgatcctactctggaaaaaaatgggatggtcacagagaagaaactttcaggttcagacactgggagactcccctcagtaaataagctgattatctgccagatcgcctctgagaataagccacattcatgcacacagaaccccccaccagttttttgtgcatcata

SEQ ID NO: 93851 - DNA, 226 bp, Homo sapiens
atgagaaatagccatatgttccatttcagaatgtgtgttgctgattaaaagccaaatgggagttataaaatttgggaaagtgaaggaaaataaatgcaactattaattaggatctagttatgatgctgttgtgaagaataatacatctttagcttaaataatattcaatatcttgattatatgtaccattaggggaaaatagtgactaagttgttgttagtctata

SEQ ID NO: 93852 - DNA, 327 bp, Homo sapiens
gtttcatgggcccagtgcagggacttgctgctctgtgcagtctcaggacttggttccctgtgtcccaatcatggctaaagggccaatgtacagctcaggccatggcttcagagggtaaaggccccaagccttggcagcttacatgaggcgtcgggcctgcgggtgcacagaagtcaagaattgaggtttgggaatctacgcctaaatttcagaggatgcatggaaacgcgtgggtgttcaggcacaaatttgtgacagggacggagccctcatggggaacctctgctagggcagtgactgcagaagggaaatgcggggtcagagccc

SEQ ID NO: 93853 - DNA, 828 bp, Homo sapiens
tcccgagtagctgaggtcacaggcacctgtcaccatgcccagctatttttgtatttttagtagagacggagtttcaccatgttggccaggcttggtcttgaactcatgacctcaggtgatccacctgcctcggtctcctagagtgctgggattacagatgtgagccaccgtgtccagtctgagaaggggctttgagagaaaagccaccttggccagtaccaggcaggaagggactcaacggggctccagcccagctacctgtaggagctgagccaggcagcctcctcgagtacctgtggccccagggtccgcattccacaccttccgctgtatgtctcagtcctcgcgctccaagaccaggtggctgaccgtttggttggctcaaatccggttgtcttgactgtcgttttgtgagcacctgtgtgctaggcggcatcctaagtgctttaaggaagtgcttctggaactatctgtgaggaaggactgggttggttttgttgttttgttttgtttttttgttgcccatactgaagtgtgatgtttccatcacagctcactgtagcctcaacctcttgggctcaaatagttctctcacctcagcctcctgggtagctggaaccacaggtgtgagccacaaagcctggctaatttttgagttttttgtagacaagggatctcactctgttgtccaggaggatcccttgagcccaggaggttgaggctgcagtgagccatgatcatgccactgcattccaacctgggtaacagagcaaaaccctgtctctaaaaacaacaacaaaaaatacaaaagcagaaagtgcatctgaa

SEQ ID NO: 93854 - DNA, 846 bp, Homo sapiens
acgttgacacttcagccttctaagtagctgggaccataggtgcacgccaccacacctggttaagttttttttaaaaaaatttcttacaaagttttgctatatgcccaggttggtcttgaactccagggctcaaaggatcctctcacctcggtctcctagagtgctgggattacagatgtgagccaccgtgtccagtctgagaaggggctttgagagaaaagccaccttggccagtaccaggcaggaagggactcaacggggctccagcccagctacctgtaggagctgagccaggcagcctcctcgagtacctgtggccccagggtccgcattccacaccttccgctgtatgtctcagtcctcgcgctccaagaccaggtggctgaccgtttggttggctcaaatccggttgtcttgactgtcgttttgtgagcacctgtgtgctaggcggcatcctaagtgctttaaggaagtgcttctggaactatctgtgaggaaggactgggttggttttgttgttttgttttgtttttttgttgcccatactgaagtgtgatgtttccatcacagctcactgtagcctcaacctcttgggctcaaatagttctctcacctcagcctcctgggtagctggaaccacaggtgtgagccacaaagcctggctaatttttgagttttttgtagacaagggatctcactctgttgtccaggaggatcccttgagcccaggaggttgaggctgcagtgagccatgatcatgccactgcattccaacctgggtaacagagcaaaaccctgtctctaaaaacaacaacaaaaaatacaaaagcagaaagtgcatctgaa

SEQ ID NO: 93855 - DNA, 789 bp, Homo sapiens
ttcaggtttgattaccaccacctaagacacggccactttttaaaatatttgtagtttaaattaataacaggctcagtaagaccatcaaaaatacaagtctcaagaggtacctggagagtgaacaaactttcctcaaactgatttcatcccatttgcacctgatgtctgatacacagcagctactcggtaagcattagcttgccttattactcccgcttgggctctggtattccctgggcaggggtgcagtgacctgaggggtgggagatccacatgtgggggaaggaagacacctgcgaacagcaggctatggggcacggggctagtgcagagggtccctggacctggggaagtgatactaatgtgcctgccatgggcttgcccctgggccgagaccctgaaggaaatcgctatttcagccaactgcattgcctgcacagggtcatttcgtctatgccagctacccagcatgcttgaaagccacccccagaaaataatttctcagagcatcatctgggtttaatattccggcggcaggtataagtgacatcattgccttttcagccctgagaggaagagtaattttcttttaggaaaaaagaagtgaactatgattacaggcagatctttgaggtggaggaaggaaagtgaggagttttaagcaatgttttctgctctcattcttggaacagctttccctcttgcccttcctttctcacttagcttatttagtttggtccgttcagggttccgtttcctaagggaggtttggtgggagatctggaagaa

SEQ ID NO: 93856 - DNA, 203 bp, Homo sapiens
taggggctgggtattcaaaaggtagatgagataaaaaatatagtaggagggagacctaaagataattgtaatgtaatgtacttaatgctataataaaggtacatattggatacaatggcagcaatattggtcctctgaaaacaatatagttcacaggaaggtcttctactggggcatttggccccaaaacctacttctctgag

SEQ ID NO: 93857 - DNA, 539 bp, Homo sapiens
atggctctggaagctcattcctgattcttcctatctagagtcaggatagacatattctgtccaatggagacatgttgtaggacactcccaactgacttaggaaaggcagtgaagaggagctggaatggaggcagaggcagatatttattgagaatcatctattagacccaagaaggatcaatttaaggtccagagcaaggggaaatgggtcaaaatgtaaagttgggatgttcaaactttgtaaagacctactggcactagactgagaagtcaaaggaagctcaggggagaaaaaaggcattgtagttaatctggtgtatttaatattatttctggtgctttaggcaaataggaggcaacaccatggaggtaattattcctttcctcaagagctgggggcagtcatggtgatgatgatggagcagcagctgaagaaacttcttaagagagaatggggagacagatgtataggaagtgcttggatagttccattttgctgggtgttattcctaatgggagtgaggcaagaagcctagatc

SEQ ID NO: 93858 - DNA, 365 bp, Homo sapiens
atagacacggtctcatcatgttgcccaggttgttttttttgaggcattcttgctttgtcacccaggctggagggcagtgacgtgatcttggttctcagctcactgcaacttctacctcctgtgttcaagcagttctcctgcctcagcctcctgagtagctgggattacaggcatgagccaccacgcccagctaatttttgtatttttagtagagacagggtttcatcatgttggccagtctggtcttgaactcctgacctcaggtgatttgcccacctcggcctcccagagtgttgggattgcaggcatgagccactgtacccggcctcccaggctgtatttttaataaaagtccaaatgtgtca

SEQ ID NO: 93859 - DNA, 2042 bp, Homo sapiens
  misc_feature (2038)..(2038): n is a, c, g, or t
ggttagcctttgtggcttgggcatccagcctttcagagatatgaaaccacacacgtcttcagagtgaacagctgctcaccccgatgtgctcaaggggtgcaggatgtggacacatcctactgaatgagccagacaacgtaactggatctgtccagaacaccacgatgggtgacattgccatctgcagcagtgctgtacttcctcccgccaatttgtaaagtgcagacaggatgctggatcaactggctgctgctgaggccagtgacctctagggcgtattcccacgttcctttgcagtagctgctcacctttgtaagcatgtgagttattcgtgctgtctgttgtgatcctaaggaatccaatggtcaggaccagaacttctgaagtacagcccagcattgccgtctggcatccccagaaagcagattttgagattggcatgatggccgttaagcagggcgttctctctggagcaatgtctagccggggtcggagtggggagagagagaggggggctgctgagaatatcacagagagatggcagcctttctgcagcataggcctaagtgcacactcacctggctatcactgagaggactctctgttcaacagggccactcagggcttcccctgcatggagatctgagtgtccagggaggggacgtggtgagcatttctctggtcaaagtgtgcaaagcaaaatctgccccattcctgccaaagtggttgacatggaggaaaggggagtgccagttctgtaggctgaggtggtggctgttagaactgctcctaggctagttggtgttctggaaggttcccctctatgtgagatgaaagagcatatctttaagagctgcaactttgaagctctaatatagaatgcttttggtggcaagcattacttcggaaagggcttgaagacccctgaagatccttggtggcctaggcagttcctttattgccagggctgtgcaggactaagcttcaacagcgccaccatgtgacaagaagcaattgcagtggtgcattgagggttttcttttgcactgagaactcaagtcccactttcacccttggacctggtaaatctttggggttcatggacaattctgaggaggagatacttaagagagtgatgttagaatttgatgttttggtttattgtatcagaaaataaaagaaattggatttatagctcagtttgtggttcatatcaatttaaatagctttgaaatgctgataggaccatcacggttttttggttgctgaaatcccataactaaagcaatgcctcaataagcttttaatccacagcccccatgcccaggtctataacaaagtttttatatgcctatggggaaaaacaattatgaggcaaacatttataaagttaaatttattacgtttctactcctattttttattctgctggtgtattgttatatattttcctacatatttaaacattttcttcctcttataaaatgttagtgattttaaatgatggtgtgtccggaattggttccttctggtgggttcagtcttgctgacttcaagaatgaagccacagatgctcacagtgagtgttacagctcttaaagatggtgtgtccaaagtttgttccctcagatgttcagatgtctccagagtttcttccttctggtgggttcgtggtcttgctgacttcaggagtgaagccgcagacctttgcagtgagtgttacagctcttaaaggtggtgcgtccagagttgtttcttcctcccagtgggattatggtctcgtgcagaccttgcattgagtgttacagctcttaaagggggcacggacctgaccatcctggctaaaatacagtgaaaccccatctccactaaaattacaaatattagcccggagtggtggcaggtgcccatagtcccagctactccggaggctgagacaggagaatagtgtgaacccgggacgcggagcttgtagtgaacagagattgcgtcactgcactccagcctgggcgacagagcgagactccatctcaaaaancaag

SEQ ID NO: 93860 - DNA, 262 bp, Homo sapiens
ctgtgttgtccaggctggtcttgaactcctgggctcagtgatcctccagcctcagcctcctaaagtgctgggattacaggcatataggcatgagccacggtgaagccaacccttgatctctttcttgcagataggaactgccatttgttttagtttcctggagcctactgtaacaagttcatataaactaagcagaaaattactcttggcgctggaggcacttaagaatcctaccttgcctcttcctgtcttctggtggttg

SEQ ID NO: 93861 - DNA, 692 bp, Homo sapiens
aagtgccagagtttgggactcagaataaatgagttcttaacaatttaacaaaaatgagtttaaccaagaactgtgtacaactgttcaacataagacatgtatcttttattcatctgatgttcatagtggttgctggctggcatatgccaggcatgcagtaaatagtgaaggagaagcaggcagggagtgttagagaaaaccaggcgggccacaagcaagggctagaggattccatgctgtccttcctctcatcctcattagtaatgggtttttaaaaggtcgtaaaggccaggcacagtggctcatgcctgtaatcatagcactttgggaggccgaggcaaggggatcagttcagcccaagagttcaagaccagcctggacaacatggagaaaccctgtctctacaaaacatataaaacttagatgagtgaagtgccatgtgcctgtagtcccagcttctcaggaggttgaggcgggaggattgcttaaacccaggaagttgtggctgcagtgagctaagactgcaccactacactacaacctgggctatagagccagaccctgtctcaaaaaacaacaaaaatgttcgtcagcatatggtgactcaaaaagcctggttgctcttggtaagaatcttcaaggaaagatgcgaaagagacgtgttgggagttctgagctgttttctttcaggg

SEQ ID NO: 93862 - DNA, 386 bp, Homo sapiens
gagccagaagcattcagagccatcagcaaagcagagtctgcctctctgcagggagctgtctgtggagctccctgtgtgccctgatggtaggattcaatcgctccacagaaacctggaattctccctgttgtcctgaactgtgagaagccaagtcctgtgttttagatacaataccatctgaattctgctctcactgctggcccatgttctgtggcttcagccgagtaattccactctccagggctctttgtcatccatctgtgagagccagtccgggcagagaaggagaggagcagggcaagctgagaatgcagcccatgatgccgccccgattatggtgtttcctcactggacacgtggatgaagcgtgctcgggttttgacatc

SEQ ID NO: 93863 - DNA, 399 bp, Homo sapiens
tttttgtagaaattgccaggaactgattttctgcccttccttcctaacagacaagccttccagccctccctgacacagctcttccctatctcctactctctggtcatcaagcttttagagatgccctggccttctctagttgccccagctgtattttttcttcttgggaatgcgttgattccagagcctgactgggaataaatctcagctcctccatttagcagttatgggattcaagtactcttactcccagggactcagtttctgcacctgtaaaatggagatttaccacctttcgttccagcattactgatattgtttggctctgtgtccctacccaaatcccatctcgaaaattaatccctatagtccccacctgttgagggtcctggtgggagg

SEQ ID NO: 93864 - DNA, 461 bp, Homo sapiens
gtgtctaactggcccacgtttacctcttcgggcaaatccatggggacagataaagtcggaaaatgacacaaggcatagaatcctctatacacgcctaaccattagttgaacaaagccacttggttcaaccagtaagtcctctcaataacataaaaaggaactatgactttgttacggtttttgaaacggatgttgcagatatgtttcttgaagtagcacttctggaggttaagttttactattcagcattgacgaagcaaggggcaatgtctccacccattaacttagcaatgatagttccattgcaacagttcttttgagtgatttggctgtttaccctagcatcattcaagcctgcttatctagctctctgaaatattctgtaagctacctaaaagtttaaataaagtatctgtctgttaaactaactagggttggtttccatttgcaattaagaatac

SEQ ID NO: 93865 - DNA, 414 bp, Homo sapiens
caaaacacatacacccatccattcttccaacaaatattttattgagcacttactatgccaaatactattctagaaactgagggcctagcaggtaaaagaagacacaacttctctattctcatggagctcacatactagtaggtctttacagtacagagctatgaagaaatatcagaaagattaattcaaaatttatttacattcccatgaggaaaaccaataggtctctgtatatgaacattttaaagtgtcttgataccttctagcaggaatgataataaaactatttaacaatccattatcaatagactccctgtccaatcagaagaggccagcagtaccaagcatcctggctaaaaatccagcctcgactactgcccaggtctttactagaaaaggtgaaccaattacaca

SEQ ID NO: 93866 - DNA, 568 bp, Homo sapiens
cagcattcaactttccagctaagaaaggacaaaaccaagcagccacatggagcaaagcgtagggagtgaaagaactgtattctccgtccccactgcaggcttcctgccatgagctgtggaaaacaggaagacctaatgctcggttaattctggagtttggaagcgcatctttacatgtagattctaatcacagaattaaaattattttgcagtataaagtgaccctaagtctgtctcttgactacatataggcagatatggcatgggaactctctcagaagatttgttcagtgtctgagaaagattactaaatcagatatttttttaaaggtggtaggaaaacaaaataaaattatgctttcttatgtctgcaattatgtctgttcaacttactgatggtatttatgtatttatatttgagacaggctcttactctgtcacccaggctggagtgcaggggcacaatcacagctcactgcagcctcgacctccctggctcaagcaatcctcccactgctaggaccacaggtgcactctaccacacctggctaatttttgaatttttttg

SEQ ID NO: 93867 - DNA, 195 bp, Homo sapiens
tataataggaaaacagtaaatacctaccttagggagttttcctgaagcctgagaaaatatatttaaagtacttgaaacaagtcttggcacacaggacttaaatgctgctgctgctgtctgctcacaggtttgtggtgaggattcagtggcagaattgtggagagtgcttagtgcacgcctaggtttgggcatgtg

SEQ ID NO: 93868 - DNA, 682 bp, Homo sapiens
cggcacgagggtttgcatgctttttaaactaattgtcgttcattttcacttatctttaagccagtaggtcactggctgtttataaaattcatcagaggaaacattctcagacatttacccaactggcaagtcgtgctaacccgaagacccaaagtacccctttatgcaaaataggatccaaagctaaggctgggtaagaatagttgtgcagggagggagcacgagatgggcagagctggttcctaccactccattcacacagttcatcagttcattcccaagtatttattgtcacccccaaacatctctggagtactactgctcaatttttgtgtcgttatcaggagtataccttggctcttccttttttttctcctgcttccccccgcaccttgtggggaagcttcaggggagcgggggagggtgattcccagtggtggggaaaacattaatcaaggatacttgcatttagcctggagccccttcctcattatgctttagaatattcataggagttccatttgtattctggctgggtgatgagcaaaaaaaatatatagtagcaaatattctctcatcctttagagataaagaaatggtgttcatcaaatgtactgagaatagactagcatttgtggggcactcaataaatttaaattcatggtgacagtgaaaaaaaaat

SEQ ID NO: 93869 - DNA, 462 bp, Homo sapiens
cacaaagtcccaggtagaagggaggagctgtccccagcagcctggggtctctagccccggtccaccatcacagcacccttggagtgagtgtcagggagtgtgggatatttgcccaaatccagccaccacccctgtccgagtagagcccacacagtattggaaagagaaatatagccactgctttcactcctgggagtaggggtgccctggttgctttcaccagcctgcaagagtatagtcagggtgaggtgctggagaacatcaacaacgatctgggttcaaatcccagctttgccacttattagccatgttgctgtgtcaacttctctgagcttcagtttattccactgttgtgtaaagataatgcctcttagggctgttgtgagcattagcacagtgcctggcatatagtaaatactcaatatatggtagccatattataattgtaattgttactaccac

SEQ ID NO: 93870 - DNA, 453 bp, Homo sapiens
gattgaatcccaactcaccacccaggaacaggagaggccaggctcctagctgcaaagggtgagaacttcctgaggctccatcccctcctcccagtgcacaggctggtgggagactctccagggaccttcccccttatcttcctcctgcatcgatcattactatgttccagacactgcatcaacaactttatatgcagctttctttgccaaagaagtctcaccaaaaaaacttcttcgaaagtatctgaacacacaaactcaggtgtctacatctcacagcagggacacatggtgcatcctccacggaagaagccgtgctggctaagtgtgtccatttctaccccaactgccctatgaacagaaaggatttctaaaaaaggaaacagagaaatactgttggaaatgtatttaaaacaaatcatcatctttccgtatttcctttttttttctttt

SEQ ID NO: 93871 - DNA, 602 bp, Homo sapiens
gctcaagacgtcctggtgctcacgtacaaaggcaggtggaagacatccagagggaggaggaagcagcagagtgtgttcacagagaagagaaaatgcagtagactacggcgagagtaaggaagaccagactagcaggacagggctgggcaaagtggctcacgcctgtaatcccagcactttgggagaccaaggtgggaggattgcttgagcccaggaagtcaagttgacaatgagctataattgtgccactacactccagactgggtgacagagcaagaccctgtctctgaaataaaataaaaatttaaaaagaatagcaaggtggtttctttatctcagttggtactgagaagtgacaaaagccacagaaattgaaaggtatgtgaggggacactgactacaacaattagaggaatttttcaaactcaagtcttcgggcctcagtttcctcagctaacaaatactgtcttggcaataaacaggggctctgtcgttgtcccctccagttctgaagttctatgcatctatgatttgaccatcttagcattcccagtggaatacaggtgtggacatctgtaaatgtacaaacacacaaagaacag

SEQ ID NO: 93872 - DNA, 274 bp, Homo sapiens
gtcagaaagagatagagagagtattaagctgtatgcaatttcattacctacaggttcaaagatccaccaatgaatagtaccaacactgcaaaaatcctgtgttgcccttttataactacatccagcttcgagaccctcttgagaccctaagccctatacctaactccaccaaccactagtctgtcctctgttcctaacattttgtcatctcaaaatgttatatgtgtggaattatacagtatgcactctcttatgatcaaattttttattcacc

SEQ ID NO: 93873 - DNA, 308 bp, Homo sapiens
gctattttttcctcagaacgtacatggtgaccagccccatgagtaaattttaaaataatttttctgtacctatcattatgtagaggtgatgtatataataatataattttaagaagtgacagaggctgcttttcaattttgttaaattcttagaaatacaacagtttgagataaggttactttttcattatagtactggcctttggattcctttccatgggtgattcagatgatattttagtacagtacagaattcgacagtaattttgtagttatcaggtagataactaataccttcctgggaactt

SEQ ID NO: 93874 - DNA, 846 bp, Homo sapiens
agcgggctttcctgtcacagccacaggccttgtttcaggaatagaatgagatagtgagggattgttccaaataggccattgctgtgtctcacacaccctcacgctttggaagaataagggaaacgcacgtgaaaaattcctaattaattgaaaattgttttagtttttataaggaaaactaatatgagaatggtatttaggtcctaccaagaatataaaaatgccatctgtgttcatatcccctgctccgccctctggggcaagaccctcagattgtttgcccactgtcagaacctgagctgtcatgcgctgtgtccaaaatgcttcgctgtatattgaaagtttttagttctgtgtttcagtgtttataagcgcaggcaagactgttagcattttaaaatgtaatttaatttttaatttattattattattattattattttgagacagactctcgctgtagcccaggctggagtgcagtggcgcgatcttggttcactgcaacctctgcctcccgggtcccggttcaagctattctcctgcctcagcctccctcccaagtggctgggattgcaggcacataccaccatgcccagctaattttggtatttttagtacagacgggttttcaccgtgttggccactatggtctcgaactcctgaactcgtgatctgcccacctcagcctcccaaagtgctgggattgtaggcgtgagccaccatgcccggcctattttttattattttaaatctattatttacgtatttatgagacagggactcactttgtcacccaggttggagtatagtggcatgatctcagctcactgcagcctccacctccca

SEQ ID NO: 93875 - DNA, 457 bp, Homo sapiens
tcaatattcaatgttttatcaatgacttggataaagacatataaagtctgcttaccaaattgtgaaagcaaagagttttgggggatagcagataaactagggttttatccccatccccaaggtctaaaaagaggaggatctcttagctgaactgacaactcaaatggtcaaatgcatgactagaattccttctcttggaccccaacagcaggtgaggtttgggagaagattttgcttcccaactacaaatatgaaaaggctgaaggactgcagtgaacggcaggcccagaacgaggctcccagtgaaagtgaaggctgtgagtgtgtcacccacaatggtggggaggtggtcctgtctctatcactcagggtggtggccagcaggcaccacagagagagcccaatgccagggactgctcactggggactctgagcacagggaacttctgtctgatgg

SEQ ID NO: 93876 - DNA, 708 bp, Homo sapiens
agcgggcagctctgggagtcgatgacagtgtcccattgagattatgctgatggttgcatagctgtagaaatgaatggcaacccttagaaccatgtgcgcttgaagattagcgtgcccagtgtgcatcgcagggtgtgtaactgcaccccagtgaagctgtgacaccaacagaaaagctcagcccgaaaaaggaggcgcagggctggaaggtgtgcagagcccggagaggtctcggactttgcatttccggtgccgacggagccgggccggaaggtgtgcagagcccggagaggtctcggactttgcatttccagtggacatggtgcagggccggaaggtgtgcagagcccggagaggctcagactttgcatttccggtgccgacggagccgggccggaaggtgtgcagagtccggagaagtctcggactttgcatttccagtggacatggtgcagggccggaaggtgtgcagagcccggagaggctcagactttgcatttccggtgccgacggagccgggccggaaggtgtgcagagtccggagaggtctcggactttgcatttccagtggacatggtgcagggccggaaggtgtgcagagcccggagaggctcagactttgcatttccggtgtcggacagagccgggccggaaggtgtgcagagtccggagaggtctccgactttgcatttctggtgcacatggtgc

SEQ ID NO: 93877 - DNA, 481 bp, Homo sapiens
ggccagtaggggttactcttggcattatgatctaagagtggtagattagagtttgaagacataatgagtggtatttttaaaaatagctattatcattgtgaatttaggtgcaatattcagaattcagaattggtgataacttgctttgagcactgtttcagcagcttttatcctattcatatgactgtcagacatattccagggaactattttacttagccttgttgattgtccctcattaaataaaatccacaggtcaaaattgtaaagtagccttttagttcaatttggcatctttttttcctgggtgatattctcagtcccaggggtttgaattccagacatccttgaaaacaaagccttatatgaatgtagtcagaactaactctttaaaaggcaaaagcacaaccacattcagttaccctaaagtaactgtagtcaggtggctcttcaattttagaaaataaattactttcaaaaa

SEQ ID NO: 93878 - DNA, 422 bp, Homo sapiens
agtaacattcaaatatgcaaatgattttctccatatggggtcagattccgtatttacaagaatcaacaatgacattaaccaagatcccaacacagctccccaagcccaagatcaggtattttattttcctagaactcccagttcagtacaaacttctgtatagagcaggtattcaacagtgattgacgacacttatctaatctggtaatcatctacatttgtatcactgccaccatcaccacccgctgccactctaccttcattaggtcttgccagtcattccaggagttaaacttaaaatttatctttaaaaaaaagctctatgcagaagacaagaattacacaacatttatttgtacttctcttctacgtgttctttacggagctcgtgtatgtcacccctcattaaatcacatacaccc

SEQ ID NO: 93879 - DNA, 583 bp, Homo sapiens
cagagaagacccgtattgagcctcgaaggacgagctctggggcctggtccccagtgagccaggggaacggccgcctgtccgggctccaaggtctcaggctcccagggctgctggtggccacgtggcaggcaagtcacctggagcttgatgccaattcacaggaaggtggccctgagggcgccagctaggagggcggccaccccaccgggggctctgggatggagcctcccctggactgcctgaggccgggcccatgaggagggaccccatagcccctctgccccagctccctgtgatacccgtgctggggaagcagccctggaagcatcgcttggccgggagcacctgcctgggctgccagactcgggcccagctgctccactgcctctgtggacctcggcgcccctcccatccccgccctccggctccttggctggggtctccaggcagctgtgagcaactccagagggtgcagctgtcccagctcccgagtgttcttggagggaaaatccagagctgtgttttccgtcagaatcggcggctgatggcgcaggggaggggtgggcagtccagactctgctct

SEQ ID NO: 93880 - DNA, 445 bp, Homo sapiens
ggcccaacaaaactcttgctggcttgagtgctgcccttgtactgccaattgaagtttaacatttgtctaaccctaaagactttcaaagtgaaattatttttaggttcttaacaaggtttttctatgccaaggtaaaattttcaagggcatatgaggtatttactgtctcactcagagttctgtttaagtgagcacatgggcatgcatgttggagaaagtgttgtgagctcttacagataaagtttgaaatgcaacctattttcaatagaaaaaagcctcttactctcagatagctcagaaaaacttagattttacaatccttttaagacttaagactcttaggtctgtggagtcaaaatgctacgtgatatttgtggtggatgaattactgaaaaacagaattcctcagcgaatcaagtgtctgatgcataataaaccaacctaa

SEQ ID NO: 93881 - DNA, 1038 bp, Homo sapiens
tttgtgcaaacaaagatcaggaaggaaatcaagataggaacaatgctttcaaccatcttgacttatttggcatttataattgacatataaattgacaacatctcataactacagaatatttatttttttacattgcacaaagattatccatgaaatggaacacatactatgactataaaactagtcttaattactttcataagaataaaatcacccagagtatattctctgaacacaatcttatcaaattacaaattagtaagattgagaaaactgcctaaatttttggaagtaaaataatacatttctaaataatctgtggcttgtcaaagaggatatcagaaggaaattagaaaataattttaaataaaataatactacaatgaatttttaaaattttcgagatgcaaccaaggcagtccttagagaaaaatatttagttttaaatgcctgtattataaaaagataaatatgtaaaaatcaaaggtgtaaacttttaacttaataataaaaagaaacaaatttaagttgaaaaaagtagaagaaaaaagcaaaggggtgaggaaatcgataacattattttcttggttttgtttcctatttgtttactatagagcataattgtgttagtcccttcttacattgccagaaataaacacctgaggttgggtaattcatgaagaaaagaagtttaactgactcagggttctgcaggctgtacaggaggtgtggtgctggcaattgcttctggtgagggcctcaggaagctaacaattatgggggaaggaaaggggggcccaggtatcacatggtgagagcagaagcacagagaaagtggggaagagtcgcacttctttaaacaaccagatctcatgtgaactgagtgagaactcactcattacagctaggatggcaccaagtcattgatgaaggatctgccccaccccccgaccaaaatacctctcaccaggcctcacctccaacgatggaggttacattttaacatgagatctggaggggacaaacatccaaactata

SEQ ID NO: 93882 - DNA, 377 bp, Homo sapiens
tgcagtttgaggtggaaggtgagggatattttaagtttcggactgtaggaaatcagtcagggtggtaggagaagctataaggaaagacgcaaaccttcttggaaggctgggaggttttgcaaagcttcagagagaataaagctgaaggcagctaattctcttaccccgaggctgagggcgaagagtaggtaacaaggtagtgtaaagaaatttatctagataagtttgtttacatatgtcctccagaaaccaacccttgatcagtgcaagactgctccctgcaaaggggggcgacaatgttcattactcacaaattgtgttggcttcaggcctttggcgttctgtctgtaccgaataaatacaagcggctccagctt

SEQ ID NO: 93883 - DNA, 146 bp, Homo sapiens
atgaataaaaccctatctaacaattactaataatcatatatttaatgccactggaggatttaaaaatcatatacttagatattttccaatagttgtacttctttattccttagtatcatttttaaaaatacgtgaaatgttccttt

SEQ ID NO: 93884 - DNA, 589 bp, Homo sapiens
agggagacagcgagagagcgaggggaattggtacatgtgattgtggaggctgacaagtccaaaatctgtaggatagggtagcagagacccagggaagaattgatcttgcagctggagtcccaagtctgctgacagaattccctcttcttcaggggaggtcagtcttttttctgttaatgccttcaactgattggacgaggtcctcccatattatggagggtaaactgctttactcaaagtctaccggaatctcatcaagaaataccttcacagaaatatctagaataatgtttgaccagatatctggagcataatctagccaagaaggcacataagattaaccgtcacacaaacataaagcattcttgcccaaaaagttgaacctgaatttaattagtcctccagaggtaactttcttttacatgaaatacagaaaaaataggaagaagttaaatgaaaaaacaaggagcagaagtgattaggcttcttctacgtgtcagcagcattttaaaaatgaagaaaaaggaggtggacttctctagatcaaaagagatttaagagacataataaccaaatgtgatatattgaa

SEQ ID NO: 93885 - DNA, 523 bp, Homo sapiens
ttagaggtggacacagagatgctgtgagagacagagacagagagacagtgaggagagacccagccagtggagagataacagaagtggcccagcagggccctgcgacagtggtggaatgatagaaagggtgtcccagagggccccggccccacgaaggtcagggccaggcctgtactccttgccccgaagtgtgcagaccccagaattggcccaaatgtccttcccacagaccctgtgacccctcataccaaatatccagaccccagatatccagatccaaattcgcagacccttagctttgaactccaactccaaatccagacttctggccccctcaagtccaaactcctatgctgatccccagtcccagatatccacacccccagtcctgactcccagccccagtcagctcccaacctcagatatctagatcttccgccccaagtgtccagtctcttggctttgagcccctaggtcccaaatatgcaagccctcagccctgacctctaaaccccactcagaa

SEQ ID NO: 93886 - DNA, 260 bp, Homo sapiens
cgaagaaagccacacaaaaaaatgtatacaccagcactttgggtcaaaaggccacaggatctttgagtctgacagtgaggtccagtactaaggtcatggagacccccactctgtagcatccctgtgaggagatcattccgtttctgcttgtgtactccagcaatggggaactcctgattattcttttttttttaaaaaaaatagcttcattgaggtataacttacattgcataaacttcacctgtgatattgtgaaatat

SEQ ID NO: 93887 - DNA, 505 bp, Homo sapiens
tcagcatcacactgtggggttggtttaggaaatcagtcttaatcatgcaactaattgacaggacattcagggtcataaagacacatttttaaaagatggggtctatatctagttgatgttaaccaagtgaactcatgttttcttacagaatgagccagctattatcattcatctagaaggaatgtgaaggctgtgatattttttagaaggtaagaggataggaatttttaaaatgtaattcagaaaaactgccctctcaaagaggcctgtcttaacctgacttaacctcatcagcaaaagctccatcaatatgctttaatatgaatcaggtaactagatggagctctagtctaggcttgtctttgagactccagaacaggagttctcaacctagactgcaccccagaccaattaaaacagaatccctagaggtagaagcagacatggctgttattttttaacttccccaggtaacttcaacatgtagtcacatttgataactatt

SEQ ID NO: 93888 - DNA, 929 bp, Homo sapiens
  misc_feature (688)..(688): n is a, c, g, or t
  misc_feature (753)..(753): n is a, c, g, or t
  misc_feature (837)..(837): n is a, c, g, or t
  misc_feature (851)..(851): n is a, c, g, or t
  misc_feature (878)..(878): n is a, c, g, or t
  misc_feature (883)..(883): n is a, c, g, or t
  misc_feature (908)..(908): n is a, c, g, or t
  misc_feature (923)..(923): n is a, c, g, or t
ctattggccagaaactccctccattttcttatgcttatacggaactggaagctattatgtatgcccttggagtgggagcgtcaatcaaggatccaaaagatttgaaatttatttatgaaggaagttctgatttctcctgttgcccaccttcggagttatcataggtcagaaatctatgatgggtggaggattagcagaaattcctggactttcaatcaactttgcaaaggttcttcatggagagcagtacttagagttatataaaccacttcccagagcaggaaaattaaaatgtgaagcagttgttgctgatgtcctagataaaggatccggtgtagtgattattatggatgtctattcttattctgagaaggaacttatatgccacaatcagttctctctctttcttgttggctctggaggctttggtggaaaacggacatcagacaaagtcaaggtagctgtagccatacctaatagacctcctgatgctgtacttacagataccacctctcttaatcaggctgctttgtaccgcctcagtggagactggaatcccttacacattgatcctaactttgctagtctagcaggtttgacaagcccatattacatggattatgtacatttggattttctgccaggcgtgtgttacagcagtttgcagataatgatgtgtcagattcanggcagttaaggctcgtttgcaaaaccagtatatccaggacaaactctacaaactggatgtggagnaggaaaggaaacagaatttcatttttccaaaccaaggtcccaagaaactgggagacattgtccttttcaatggcatatgtgggntcttgcaccaaccntctgggtacttcaggttaggacacccnctgangggccggggaggtttcagggtaccnttgtatttgagggantagggc

SEQ ID NO: 93889 - DNA, 667 bp, Homo sapiens
tgtatttttagtagagatgaggtttcaccatgttgaccaggctggtctcgaactcctgacctcaggtgatccacccacctcagcctcccaaaatgctgggattacagcgtgagccaccaggcccggccaatttttgtaacttttacaaagatatttaatttaaaattgattttaataaaaggtagacatccaagaacacaggatgattaatgcacttcaatgttaggtgaatatctttaaaactgattattgtcaaacattaaatccatataaccgaagcaaactgcacacacctgtacaaaataaaggaagtaacttaagaaaataaagtgacttatccactgacatttcacaattagtatttgaacaatcaactcaaaagacacccatgtgttagtaaagtaaataaatgcatgttacttcttgcaatcttctgggaaggagtttaatgccaagccgtttcatggaaaagacaggagttaagaaatatggaggaaagaataattattcctcatcaggcgagtctggcgatacctaaatgtgtgtatgtaagggagtggctttaattaaggtatagaatccacatgtgccaattgaaaagcagtatcttcctgcccctcctcaaaagttcttctgctaccaagccatgacccacacctagccagac

SEQ ID NO: 93890 - DNA, 396 bp, Homo sapiens
ccgcctcagcctcccaaagtgctgggattacaggcatgagccaccgcgccaggccatagggggcttctataagctctgacatcctcctggtgtgcagatggccatgtgcgtgtgttggctgcgtgtgtgcccaggaaggacttcagaaggcaataataaccccccttggactgaccttgaggctctgtgcgagcagaacgtgaaagctgaggcagagttagaaactgcctggctgggtgttgaaagtttgcatggatccagagcctctcagcaaagagtagatgtgttggttccaggaggttaaggaaatctgtctaatcattagctaaccactaagttaactgcgcaaagaatccagtggccacacatgatgtagaatacagacttggcataatt

SEQ ID NO: 93891 - DNA, 618 bp, Homo sapiens
aggtgatctgcccgcctcggcctcccaaagtgctgggattgcaggcctgagcaaccacgcccggccaagtttgttctctttttaacatatagagcattttagatgtaccatgagtccctttttcttcccagtatcactcccagtttcctctcactttcccaagaagtagtattgccttaagtcatgatgagttcttagagaccatttaaaaaaacactcattagatgcacatgaaaagaggttcaacaccatgagccattatggaaatgcaaattaaaaccacaatgaggccgggcatggtggctcacacctttaatcccggcacttcaggaggccaaggcagaaaaatcatttgcgcccaggagttggagaccagcccagacaacgtagtgaggaccccatctctacaaaaaataaaaaattagccgggaatggtggctcacacctgtgatcccagctacttggggggctgaggtgggaggatcatttgagcccaggagtttgaaaccaacatgggcaacatagtgagacctcatctctacaaaaaaattaaatattagttggacgtggtggtatgcacctgtagtcccagcttctcgggaggctgaggtgggagga

SEQ ID NO: 93892 - DNA, 210 bp, Homo sapiens
gtgtttcacaggtattttaatgaatagaaatatcagacactaaaaagaatacccactataagatgctaatcacaaaataaatcttaacagttgtagggatgtgaattgattgaagtaagtttcagagattatgttgttgtaatttttaaagtaatgcaaattacataaatgcaaacttgttttaatcccatggaactgtaaattaagatc

SEQ ID NO: 93893 - DNA, 284 bp, Homo sapiens
ctttaaattgtcattgtgtggtttgctatgagatgctgagctgcaagtctattaaactgggctgtggtccttcgaaaagtggagaggtaagcccaggtaaaaattctggcaaatttgttgcaactaatagtctccatttagaagaatgctatttaatacaaaaattagctgggcttggtggcgggtgcctgtaatcccagctactcgggaggcgagacaggataatcgcttgaacccgagaggtggaggttgcaggttgcagtgagctgagatggtgccactgc

SEQ ID NO: 93894 - DNA, 323 bp, Homo sapiens
cggacctatccccggttctgggtaggcttgtatatgctgtgattggttagaaattgacccccaaatacagtggtataggaaaacacatgtttatttcatgctaattatcaccacataataagactgtactccatagagtgactcagcagtccaggctgacagaggttcttcatcctgtacctgccacctggaacacacagccttcctggtctatatggaagtgggagagacagtggacagtccccagcaggcttggcgtttactcaaagaccctggccagaactatccaaacagccccacctcattgcaaaggggctgaggag

SEQ ID NO: 93895 - DNA, 230 bp, Homo sapiens
ctatatatcctgcctccttcctgtgtacacaataggaaactgaggctcaaaggcactgactcccatgcagtaatcctctcactagcacggccagggcgtctcaaagagcaggtctgcgggaggatctgagggatgattttttaagagtgtcttcctgaagaggaacatcagcccccaacccctgagaagcttactccccagacaccatctgtcagggcactcaaagttta

SEQ ID NO: 93896 - DNA, 425 bp, Homo sapiens
tagatttttaaactgagctaactagaccacactacaacatacctggcttatgaaatgggagggctgaagtctgtagggctgcccggaaactcaggtaagagttgaaattgtaatcttgagtctgaaattcatagggaaggcctccatgcaggaaacttgggcaggatttctatattacaatattgaggcagaattccttcttcttcaaaaacatgtttttgcttttaaggccttcagctgatgggatgagagccagccatgttatccagggtactttccctttacttaaagtcagctgattgtaaattgttaatcatctctacaaaaccttcacagtgccacctcgattagtatttgaccaactaactaagcaccatcatgtagccaagctgacacataaaaattaagcacccctaggtgaaaag

SEQ ID NO: 93897 - DNA, 479 bp, Homo sapiens
gtcagaaaatgtctgttaaaactaaagggagaacattgaggaaacttgggaaaatgtgctggaataaggagaacatccctcaaaatgcttattcctcacttaggacaaactgggcacatgctgttttggactaactttcaagataaaattattaacgttgccactgaggaaattcagatgggaggaaactaaagggaactgcaaaggtggtctggtacagtagcacgtgcaaggtccaatccagagtcagcttgtaccacattctggcagccagaggtgctgtaggatcagggctctgctgccttagactggacacatcctgcctctttcttattctgttgttctctctggacttaaggctgattctctttcctgtttgtagattatgtttcccaaagttttgatgaccagttatacatgatgttttatatcatgcttgccagaccacgcttcccactgaaaaggtgtaacaaaaaaag

SEQ ID NO: 93898 - DNA, 1304 bp, Homo sapiens
cagaaatgtgaagaggcttttttagacaagttcaaaacatttgcctcagttgaaagagtcagtgtcatgaaacctcagcagtggtcctgggaggtgccacgttatggtttggaacttaatgaaggcagcagcattgatagaaatttctgtcaaatatcaccaaagtcataaatgccgtcactctaagaagaggggtttatttaactttagcatggatgtatccagcctctgaaatgggacaaataagccccgccccttctaggtactttgacaaaaacaggaacacaataaaagagcagacctctggaggctgaggcaggagaatcacttgaacccggcatgaggaggttgcagtgagccaagatcatgccaccctactccagcctgggtgacaaaagcaagactctgtctcaaaaaaaaaaaaaaaaaaaacagatctcacaatgatacagtcagttctcaagtggcatctgttgaagcagtggatgtcgtcacccaatattagaatatgtcttaaaccaaattaaaactttactttacacagagttttatggacacatgaagggtttcctcctgtgcccagggagcccaagaactatagaaaggccttcattgtccatcatttctgttcctgtttgggtcacttggtggctttgtctttgacttgttagttgtttctctatcttctgtgtctttgtagagaattttcttgacccacactcactgcctcaaagactagacatttgagagagtattaagtacttgaagaagacttagatctagaagcagctatgttagatgatcagacctcatacactgccacttggaagatgaggtgtggtcatggggttcagtttcagaaatgtgttctctctgttgatcgtttctggaggaagaaacatggggatgtgtttagagggaggatatgccagctacttatcataggaagtctagaaaaggcagccatagtgaggtcactatttgaaaaggagtaagaaggaatgtattgggcaggaaagagtgtgcatagactcttctaggtgaatcaggtgagctgtgttctatctgcggagaactagtgatggtggggcagaccaggcatcttcccctccacttgtcataggggtctgagaagggaaacatggggcagaattgggaatcaatctgtaacactgcttttaaactaagtgctgtatttcacattagacttgcagaactggaagatttaatgtcaattagagttaatgttgttttaccagtagaaaaaaaacgatattagaacaataacaacaaaatagtttgtg

SEQ ID NO: 93899 - DNA, 213 bp, Homo sapiens
cagaaatgtgaagaggcttttttagacaagttcaaaacatttgcctcagttgaaagagtcagtgtcatgaaacctcagcagtggtcctgggaggtgccacgttatggtttggaacttaatgaaggcagcagcattgatagaaatttctgtcaaatatcaccaaagtcataaatgccgtcactcctcacccagctatgaagatcctgctagagt

SEQ ID NO: 93900 - DNA, 528 bp, Homo sapiens
acgctttatggtttttatttttaatgaaactattatgttaggtaattgatcataatttggtcatttactgaaagaaacagcaacagataacctttgaaaactactggaaggtgaatcatctctcccattcaacatttgaatgacttcaattcacagtgacttagactaaagcaagagaacatcaaatgtactgttataagctgaactactaactcagaggaggaaccactggcaagcccataaaactgaaactcacaaaaccatgatttattgggagatgtttatgtcacttttgagaaaatattaaacaggtgcttttttatttgtagtaaggtcatggagtatattttgagtttcattgtattctaaattgaaattttgtacttttagggtattctgaaattcttaagtgattcagattagactttggatgctataggtaatgcaaaggcagaaaccatttcttctcttattcatcaccagatctctggtgtttcgtataggtcctcacatggctggtgaatgaat

SEQ ID NO: 93901 - DNA, 215 bp, Homo sapiens
atatgcattgtttcatttaatcgtgaggagtttatgaagagaatcctattattttgatgcgtatcaaaatgtaagggaactgaggctcaatcagagtaaaagaataagtgacttttttttgtgtatgttacacagctagaaagtcataaggcttgggtacaagtctctgccagccttattttaggctgtagacatttgctactacattatggtga

SEQ ID NO: 93902 - DNA, 280 bp, Homo sapiens
gaatctaagcaattctcctgtctcagcctcctgagtagctgggactacaggctcacaccaccatgcccggctaatttttgtatttttagtagggacgaggttttgccatattggtcaggctggtcttgaagtcctggcctcaggtgatccaccagcctcagcctcccaaaatgctgggattacaggcatgagtcaccatgcccagcctaaacctggcaagataataaataacctttttaagtgttgttgggcacttgtctggttgtttttctttaggtta

SEQ ID NO: 93903 - DNA, 120 bp, Homo sapiens
atcttatctgctgggagcagtcaatgaaagaattggcatcagtggcaaaggtgcttgtgatagaagccttatatggttagaggttctttgataggaaataaagtttgacttttttttttt

SEQ ID NO: 93904 - DNA, 475 bp, Homo sapiens
gacgggggtgtgttaattggggaaaggttataatggggagagataattaccggggaagtatatttaattgggttatgtattatagatctggggttcctctgtgttgattggaaccttggcagatacaccttcactgattttactgaaatttactgttccactaaagtaagggtaaaaagagaaggaacagaatagaaaactttcagtcttcagatttaatgctaccaactcattagcagacccagttttcagagttactagaggagtagagatgtctacagatttctgactaatgtcatcattagttttctttttaaattatgctgtggaggaaagttagttattttacataagagagaaagggtttgctctgagagaagcagcatataactttccacctctatattttaatgtaccttttgagtagggttaggagcagtgttggtgatatgggtgggaagcagggaaatactgg

SEQ ID NO: 93905 - DNA, 588 bp, Homo sapiens
aagcacaccttctagagaaccaactaaaagataaaatagatattgggaatttgaggcaaagcatctatctcacattttttctgaatcaatcaaaatacccagaagctatttgaatcagttacccctcccttatgtatcacatacatttttttcttaagctatctctaaattatgttctttcttctatgttgctaattgctgaaactcaaagtaccatatatataaatgatataatagttacacttttatccttccagcatcagttggatatttcttccttcctttctttttctttcctcctatcttgtcctatcctcacctttaaactctatttctatatttccaactgtctattggacattttccagtagatgggtatcatgcaacttcacattaaaatggaattaacttcattatctccacaattaacttcattatctattctttcctatccattcatcttctacaggtggccttacctctccttcatgcctcatgtgaagttaatcacaaaatcctgtcctgtccaccttctgtgtgtctctgcgtctgcctttcctttttagttctacaaccactgtgaaggca

SEQ ID NO: 93906 - DNA, 288 bp, Homo sapiens
gtggggaatgggatggggggttgagatgcaggcaccacccacgaggcccctcctttcctgtctctccttgcagccaaagcaaagggcgtccgccacccccagcttccctagggcagggtcactgcacccatttacagataagcaaagcaaggcccagaaagggccttcagtgagaggggtaggccaagatgtagaggcctccaggcccatctggcaaaggagttcagcagccaatggtgctgatgtgagagtttcccttcgagggttccagtcctggttccatcgctg

SEQ ID NO: 93907 - DNA, 195 bp, Homo sapiens
gatttgtggggcttgaagtttatataatttggggaactctgttatgatattatggtataataaataatacatatttggtctctgctgctggttcctgacacctggctcctaaaacctttggaatctctaaagggataagtgtctttttgtaagcagatgagatgactggtggctgggagctcctagatagctttg

SEQ ID NO: 93908 - DNA, 448 bp, Homo sapiens
atgctatcccttccctagccccccactccccgacaggccccagtgtgtgatgttcccctccctgtgtccatgtgttctcattgttcaactcccacttatgagtgagaacatgcagtgtttagtttgctgttcctgcattagtttgctgagaatgatggtttctagcttcatccatgtccctgcaaaggacatgaactcatccttttttatggttgcatagtattccattgtgtatatatcccacattttctttattcagtctaccattgatgagcatttgggttggttccaagtctttgctactgtgaacagtgctgcaataaacatacgtgtgcatgtgtcttaattctttctagaaagtacattttattttttattttttgagatgaagtctgactgtcacccaggctggagagcagtggcgtgatctcagctcacttcaaattct

SEQ ID NO: 93909 - DNA, 369 bp, Homo sapiens
aaaaaaaaaaaaaaaaattctacttgtaccttattccctatgagaatacttatcaaacttatctaaaaaagaaaaataggaacagccatatgcaaagtcagcccaacaggaaaggacatattagattaaaatacattgcggcctgggcttagtggctcacacctgtaatcccagcactttgggaggctgaggcaggcagatcgcttgagtccaggagtcgaaaccctgtctctacaaaaaaaaaaatacaaaaatctgcctgttgtcccagccactggggaggctgaggtaggaggtcaaggctgcagtgaaccttgatcattgctactgccactccagcctaggtgacagagtgagaccctgtctcca

SEQ ID NO: 93910 - DNA, 144 bp, Homo sapiens
gagatttatttttataaagagcccaggccagttgtcttatgtagtggatttgtcagatttatctatgattagattcaggctggacattgttttatttttgagacagagtcttgctctggctggagtgcagtggtgcaatctcaa

SEQ ID NO: 93911 - DNA, 647 bp, Homo sapiens
agttagaattctcagagactatgagggttcactatctgtttgctggaagatatacaagacttttgaggataatacttaaatgaagatagaccggatgtataatatgctttttcttagctttcctatgactctacttagcaacttttgctaaaagaaacacaatatatgactgactactttgaagacacatatattggacacttaaaatcaacaaaagcagagaggtcccaaacgtggtatcttttcacaatgatgtattttatccgaattcttggaattactcatggtgtctttcaaaattaaagatctgtgaaacctgaagcagatatgaatattagccagattatttcctactggggctaccctgatgaagaatatgatattgtaaccgaagatggttatatccttggcctttatagaattccttattggaggacagacaataataaaaatctagctcagagggttgttgtatacttgcaacatggtttgcttacatctgccagcagctggatttccaatcttcccaacaatagtctgggcttcattctggcagatgctggttatgatgtgtggatgggaaatagcagaggaaatacctggtccaggaaacacttgtacctagaaacgagttccaaagaattctg

SEQ ID NO: 93912 - DNA, 1067 bp, Homo sapiens
agttagaattctcagagactatgagggttcactatctgtttgctggaagatatacaagacttttgaggataatacttaaatgaagatagaccggatggtaattcagttggataatgatcagtgacgttgaacttcttttcatgtgttcattggccgtgtaaatgtcttcttttgagacctaacaatacttttaagactgttgcttctatatttgaactcctttaagtcattatagactgcatagtcactacttgttgctgttattacaataactgccagacagaaaaataaatctacttcagacttttaaggaagtttcatatcttaatacttttaattgctttttaatggacactagcgggaaactatcactaacaacctctgtagtggttttctcattttcgtcaagatgtgaatgtatttggattaacgtatgggaaaggggcttgaaaaaaataggaagctgaatttaatattgccttgagctaaatgttctctttttattttttctttttagtataatatgctttttcttagctttcctatgactctacttagcaacttttgctaaaagaaacacaatatatgactgactactttgaagacacatatattggacacttaaaatcaacaaaagcagagaggtcccaaacgtggtatcttttcacaatgatgtattttatccgaattcttggaattactcatggtgtctttcaaaattaaagatctgtgaaacctgaagcagatatgaatattagccagattatttcctactggggctaccctgatgaagaatatgatattgtaaccgaagatggttatatccttggcctttatagaattccttattggaggacagacaataataaaaatctagctcagagggttgttgtatacttgcaacatggtttgcttacatctgccagcagctggatttccaatcttcccaacaatagtctgggcttcattctggcagatgctggttatgatgtgtggatgggaaatagcagaggaaatacctggtccaggaaacacttgtacctagaaacgagttccaaagaattctg

SEQ ID NO: 93913 - DNA, 261 bp, Homo sapiens
gttggcctagtcatcctagtcgggttcctcatgcttaccatggtctttggccaagagtagttactgagcaaatgattgttaactgactagtagtaactcaggttactgtggaacttgatttctacttctatcctgtatcttgagcatataggaggtgtctagtcaacacttgatggattcagatttttctcgtgaattaaccatcttttgcagccaggaaggtgccctttgattctctctcctgagaagtgacctagtcgg

SEQ ID NO: 93914 - DNA, 250 bp, Homo sapiens
gcaattctcctacctcagcctcctgagtagctgggattacaggcacccgccaccacgttcagctaatttttgtatttttagtagagacagggtttcaccaggttggtcaggctggtctcaaacccctggcctcgtgatccaccggcctcggcctcccaaagtgctgggattacaggcatgagccaccgcacccggcctaaacttctttatttatttttatattttgtagagacagaatctcactatgttg

SEQ ID NO: 93915 - DNA, 219 bp, Homo sapiens
gaatttcgatctactaattttcaggtggaacagtatggttgcagagagtccatttggacatatatacactttcatgcattcatgtctttaacaataatttgtggccctgctgtgtttgttcactaactccttcgaacctaccatataagctatatctttattttccttgtaatttgggaggtccaatgcttcattaagctcacatgcctgaaactaatg

SEQ ID NO: 93916 - DNA, 448 bp, Homo sapiens
gaattacaactctgctgactaaatgatgaagtgaatagaaatgaaaaacgtggcataatttgttaaggaaatgctagctgctgcaggcaaaggcaacaatgagggaggctggatattgtcgaaggttatagaatgaaccagcagtcataacctgaggccttgctgtgacacaatggagggaaattttactcccagtgttttctttatattttaagggtttctatattttcaaagaggtcttcaattccctagttatctagctctgcccactgaataaatataggaaatgactttagattaacataaaaatacaagtttatgcctgtaatcagagtaactgaactgaatataagccatttagattctagatggtgtatttcaaataacaattcagagagccaaccccagaatgtttttctaatcacccatgtagaatggcattctcgag

SEQ ID NO: 93917 - DNA, 324 bp, Homo sapiens
cacctcccgggttcaagcaattctcctgcctcagtctcctgagtagctgggattataggtgcatgccaccacgcctggctaatttttgtattttttagtagagacagggtttcaccatgttggtcaggcttgtcttgaactcctgacctcatgatccgcccacctcgtcctcccaaaatgctgggattacagctatgagccaccacacctggccctgtgaattttttaatactgcatttcccaaaaagaatttgtctttctctactttttaaaaaaagttttccctgagtctattataaagtcattcttgaccagaaaactcaa

SEQ ID NO: 93918 - DNA, 2490 bp, Homo sapiens
cgtgtgggggtgtcttgcgcgtggtgtgtcgggggggtgagtgggtgtgttctggtgtccggtggtaagcggtgtcgcgtgtgggaggtgccggtagccgtggtgtgggcggcccgttgcttgttgcctcggctgttgtacgctgtgcccttcggctcgatgcgggcacgtactgcggcagtcgacgcgtcctcccccgcgctgggcggggaggaggcggctctgcgcaggcaccgaccgcccccctccccgaggagctgcggcgggaggacgcgggttcagcgatgagggacgaacctcagagcgcgctcggccgcccggccgcccgcagccgcggggctgacaaaccagcggcgggaggctgcgaagcggctgtgcctgtggcggctgctccttaccgcagcgccctccgttttccgcggacacggctgggcgtgcgcgcgcgcgtgcgtgcgatccttccgcggcgtccgggcacggagggtcccgggaagggcggggggagactgaggcgggggcgcggagggataccgccccgggacaatcacggccgccacgtgcgggaggcgccggccgggagcggtggcgggccgagcttcggacctcgggccggcggagagggtggaccccgcgtcgctctcggcaccccaggaacagcggcggcacggacgccttggagccccgcggccgggccgcgatgtgcttttctcctgtgttcgctgcccgggatgcggaatcttgagcctcggtgtcgggttacagagttgtcctggtgacgggatgcggagcgtttcctcctttttgttgtgggggcggctggtggcaggggcagctggtggcagggttgcccacgctaatctccgagtctctaagggcaccgtctttcctggatccctcttgcgcctcgtccataaaggcagacccgcgggcgcgcgccggcaacctgaaatcagagcaggcgtccgtggcgctcaggaaccttgctgagcttcgccgatctttcattgttgcttcatttgggtaccaagggcctctcattctgtggattctttgcctggaggagcccccttaatgttgctaatcacgtgtggttaaattgctcgtaaattccgaacaaaacaaatagcgacctgtgttacactgtttcttggtaactgggaaagttactggtggcttgaagtatacgcagaaaatacaaagattaaaaactagggaagagttcactgaatgaacaccgtaacatttctgctctgcagggtaaaataatttcgggacccaggtctgggaaagatttgtattaacaaggtaaacggtgggtagagtgcctgagaagctattcgtatcgtctttggtagcctctgggcactaggactagacatggaattaggggtcccccaacaatgacttcaattttaggttaatagaaaccatctgccacttaagggaaagaaagcaccaaaatgtagataagttgatgttcacccttaaagttatcgtgtgaggtcatgatttgtaggaggattaaggaatgtatctctggaaagggcaagaacgttgcttttaaaagtctaattggttctgaagttttatattttttctgctgattgctttaaaatgttcagctactagagagaaaaaaagtacagtaaaagaaacccccaagtcagagacctatcagactgagaatatgtattttctcatgttctaaagatacagaatacctgtgtggtgtaaaatgtgaaccaaaaattgtttcatttttgtaagtgtgcctcccacctgatttaattacacttaattgttcttgtttatgactctgccttttatggtgatgttgatcattttagtccttcgatcatagcactgtatcatcttaaaagttaataatagattacttgtaacacaggctcactatgtgagaattcatcaagctgtatgtacatttattattgtgctcttcattgtatgtataattcaataaattgaaacagtaaacgaaaaggtaattatagaaaaaatacagtgataacttgaagtatgttgaatttttattaatttactctgaaggttttaagatataatttctagacgttactatcttattgttatagcacagagttggaaataactacattcttttcctattcttttattgttggctttaaacagtgaaagaatttgaccaacaatattttctaattcaaatctcaaaagattctaaaacacatttcttgggtaaaatattcacaaaaatttagaattcttgtcattcttctatatttttcaaaatataattcattttaaattactgcttacttttccaacatgatgttatttttctagaattgcaaacagtaaaatttaaacaactatgaaaaaaattctgtataatagattaaattttacagtttcaatttttaggttatatattcaaagagagtccatgtgctgtcttggttttcagtactgtaataaagtaacctgtgctta

SEQ ID NO: 93919 - DNA, 1997 bp, Homo sapiens
cgtgtgggggtgtcttgcgcgtggtgtgtcgggggggtgagtgggtgtgttctggtgtccggtggtaagcggtgtcgcgtgtgggaggtgccggtagccgtggtgtgggcggcccgttgcttgttgcctcggctgttgtacgctgtgcccttcggctcgatgcgggcacgtactgcggcagtcgacgcgtcctcccccgcgctgggcggggaggaggcggctctgcgcaggcaccgaccgcccccctccccgaggagctgcggcgggaggacgcgggttcagcgatgagggacgaacctcagagcgcgctcggccgcccggccgcccgcagccgcggggctgacaaaccagcggcgggaggctgcgaagcggctgtgcctgtggcggctgctccttaccgcagcgccctccgttttccgcggacacggctgggcgtgcgcgcgcgcgtgcgtgcgatccttccgcggcgtccgggcacggagggtcccgggaagggcggggggagactgaggcgggggcgcggagggataccgccccgggacaatcacggccgccacgtgcgggaggcgccggccgggagcggtggcgggccgagcttcggacctcgggccggcggagagggtggaccccgcgtcgctctcggcaccccaggaacagcggcggcacggacgccttggagccccgcggccgggccgcgatgtgcttttctcctgtgttcgctgcccgggatgcggaatcttgagcctcggtgtcgggttacagagttgtcctggtgacgggatgcggagcgtttcctcctttttgttgtgggggcggctggtggcaggggcagctggtggcagggttgcccacgctaatctccgagtctctaagggcaccgtctttcctggatccctcttgcgcctcgtccataaaggcagacccgcgggcgcgcgccggcaacctgaaatcagagcaggcgtccgtggcgctcaggaaccttgctgagcttcgccgatctttcattgttgcttcatttgggtaccaagggcctctcattctgtggattctttgcctggaggagcccccttaatgttgctaatcacgtgtggttaaattgctcgtaaattccgaacaaaacaaatagcgacctgtgttacactgtttcttggtaactgggaaagttactggtggcttgaagtatacgcagaaaatacaaagattaaaaactagggaagagttcactgaatgaacaccgtaacatttctgctctgcagggtaaaataatttcgggacccaggtctgggaaagatttgtattaacaaggtaaacggtgggtagagtgcctgagaagctattcgtatcgtctttggtagcctctgggcactaggactagacatggaattaggggtcccccaacaatgacttcaattttaggttaatagaaaccatctgccacttaagggaaagaaagcaccaaaatgtagataagttgatgttcacccttaaagttatcgtgtgaggtcatgatttgtaggaggattaaggaatgtatctctggaaagggcaagaacgttgcttttaaaagtctaattggttctgaagttttatattttttctgctgattgctttaaaatgttcagctactagagagaaaaaaagtacagtaaaagaaacccccaagtcagagacctatcagactgagaatatgtattttctcatgttctaaagatacagaatacctgtgtggtgtaaaatgtgaaccaaaaattgtttcatttttgtaagtgtgcctcccacctgatttaattacacttaattgttcttgtttatgactctgccttttatggtgatgttgatcattttagtccttcgatcatagcactgtatcatcttaaaagttaataatagattacttgtaacacaggctcactatgtgagaattcatcaagctgtatgtacatttattattgtgctcttcattgtatgtataattcaataaattgaaacagtaaacg

SEQ ID NO: 93920 - DNA, 487 bp, Homo sapiens
ctgtagtccgtttgctttattaatatttatttatttatttttgagacagagtctcactttttcacccgctgcactctgacctgggtgacagagtgaaaccctgtcttaaaaaacaaaacaaaatccaaatatttacacctgtgtcatcaccacccagatcattgtttagaatatttccgccaccttagaaagttttgtcatgccttttttttcagtcagtccctccccttcactcactgcaagaccaccactgttgtgacttttagcatctaaatgtagctttggaatcatgtagtatgtactctcatgtctctgaaattcatccatgttgttgcataattcagtagttcactactttttaatttctgattagtatttcattgtatgggtgtactgtaatttgtttaaccattcacctgctgtttaatcttttgagctgtatgcatttggctattatgaataaagctgctttgaacattcctataaa

SEQ ID NO: 93921 - DNA, 411 bp, Homo sapiens
ggttatttatttatcatcagttgtagcagttctttatgtattctggaaccaagtctattggattccaaatacggtattttctttgtatatatggtaaatagaatactttctcttttaagtcataagatatattttaagatattaaatgactaaaattatttaggtcataagttaaatatttttttcctgtggtggtattttttaatcccttctttccacctagtcactttttggaatatctgtagcaataatagtaggaacagtagatgtgcctttggagtgaaaataaatagccatttaaaacataggcctttatcaacatttagttctttcaattaggaaatggagaatgaatgtttgagtttttaaggggaattaattgaatgatattttatcatttaagatgaaatc

SEQ ID NO: 93922 - DNA, 494 bp, Homo sapiens
ctgtagtccgtttgctttattaatatttatttatttatttttgagacagagtctcactttttcacccgctgcactctgacctgggtgacagagtgaaaccctgtcttaaaaaacaaaacaaaatccaaatatttacacctgtgtcatcaccacccagatcattgtttagaatatttccgccaccttagaaagttttgtcatgccttttttttcagtcagtccctccccttcactcactgcaagaccaccactgttgtgacttttagcatctaaatgtagctttggaatcatgtagtatgtactctcatgtctctgaaattcatccatgttgttgcataattcagtagttcactactttttaatttctgattagtatttcattgtatgggtgtactgtaatttgtttaaccattcacctgctgttcaaagcagctttattcataatagccaaatgcatacagctcaaaagattaaacagcaggtgaatggttaaa

SEQ ID NO: 93923 - DNA, 746 bp, Homo sapiens
gtcataagttaaatatttttttcctgtggtggtattttttaatcccttctttccacctagtcactttttggaatatctgtagcaataatagtaggaacagtagatgtgcctttggagtgaaaataaatagccatttaaaacataggcctttatcaacatttagttctttcaattaggaaatggagaatgaatgtttgagtttttaaggggaattaattgaatgatattttatcatttaagatgaaatcataacactagacacatagttgtatgttttaggaggaaatttagtttttctatctgtgcttctcatgaataggagcacttcttgagtactctggggtgatttaagccctttcccaccaactgtagtccgtttgctttattaatatttatttatttatttttgagacagagtctcactttttcacccgcctggactgcagcggcacaatcatggctcactgtaacctcagcctccagggttctagaggttgtcatgtctcagccacctgagtagctgggattacagacgtgcgccaccacgcccgggctaatttttaaaaatatttttagtagaaacagggttttgccatgttggccaggctggtctcaaacttctggccccaagtgatctgcccgccatggcctcccaaagtgctaggattacaggtgtgagccactgcgcccagcttattaatagacatttaatataaagaagtaaataaactttttattgaggtata

SEQ ID NO: 93924 - DNA, 601 bp, Homo sapiens
caaagacactttcatgatgaaatttgttataaaattagatggtgatgtgagggataaactttggcttcaaaccagctcaaatgtggtttattctacagtcttccccaattcttctctgtggaagagatgcgctttcaaattcttataagcttttctttctttttgacagggtcctgctctgttgcccaggctggagcatagcagcatgatcatagctcactgtagcctcaaattcctgggcttgaatgatccttctacctcagccttccacatatgtgcatgctaccatgcctggctcattttttaatttttatagagacagggtctcactatgttgcccaggctgatctcgaactcctggcatcaagtgatccttcctccttggcttcccaaaacgttgggattataggcatgagccactacgcccaggctggagtgcagtggtgtgatctcggctcactgcaacctctgcctcctgggttccagtgattctcctgtctcagcctccggagtagctgggactagaggtgtgcgccactatgcctggctaatttttttgtatttttagtagagacagggtttcaccatgttgggcaggctg

SEQ ID NO: 93925 - DNA, 2033 bp, Homo sapiens
ccctcgatctgcgtcgccatcccggccctgctggaccccggggtcagtaggaagccgcggggtggtggcgagagaggacccaggtgtcctggcagtgggcgccgcggggcacacgctgggccaaggtgcaggcggccagggtgggagactgttcgccccgccctgagtactcctatcttgtttctccacctgttcgggagttggagatgtgcacctaaaggaggcgcatctggggacggacacatctggcactgaggccctcgccacctgcctcgccacctggcgaccctgaccccaccacactgccttgaggtaggaaaaggaggctcctcaaccacaacttctgacctcccagggtgtctgaggcctctaaagagcttagtttgcccctctgggaagtgaatccttggcttatggtgccggggggaccctggaggccccctcacacgaaggctgcttcttgcagagtcgctcaaaagtagggccccagggctcgcagcagcatgggcaccgagaaagaaagcccagagcccgactgccagaaacagttccaggctgcagtgagcgtcatccagaacctgcccaagaacggttcttaccgcccctcctatgaagagatgctgcgattctacagttactacaagcaggccaccatggggccctgcctggtcccccggcccgggttctgggaccccattggacgatataagtgggacgcctggaacagtctgggcaagatgagcagggaggaggccatgtctgcctacatcactgaaatgaaactggtggcacagaaggtgatcgacacagtgcccctgggtgaggtggcagaggacatgtttggttacttcgagcccctgtaccaggtgatccctgacatgccgaggcccccagagaccttcctgagaagggtcacaggttggaaagagcaggttgtgaatggagatgttggggctgtttcagagcctccctgcctccccaaggaaccggcacccccaagcccagagtcccattcacccagggacctggactccgaggttttctgtgattccctggagcagctggagcctgagctggtttggacagagcagcgggcagcatctggaggaaagcgtgatcccaggaacagccccgtgccccccacaaagaaagaggggttgcggggcagcccgccggggccccaggagttggacgtgtggctgctggggacagttcgagcactacaggagagcatgcaggaggtgcaggcgagggtgcagagcctggagagcatgccccggccccctgagcagaggccgcagcccaggcccagtgctcggccatggccccttgggctcccggggcccgcgctgctcttcttcctcctgtggcccttcgtcgtccagtggctcttccgaatgtttcggacccaaaagaggtgactgtcagtggaggggtctctgcagccaactgagactatcttgctgtgccctgagccttcctagggtttagaagaacagcattcaaaattccccgtcctgtcagtgtttgccttcgcacctcctcccctaaagcagcgcggggggcaaataagaccccacccctccctgcagcttcacagggacgcttccttccctccccgcaaccaccccaggctcccctgggaggctgcagttgtggtacacgtccccggtgctgggttggccgtgactcgggggcggggcgatcgggtctcagcccctgccttccccagtctctgggtcacccgaattttcccacccctgcttctccccgaggaggttgagctcttgagcaagttgggacttgggccggggcctggaagaatgattggctgggaggccgcgggagggaggccaggaggcccggaccagttgggaggagtgagcaggccccgggggagggggatgagcgcagtttgctcgctttcctcccctgccggccccctccgcccccacacacactcgggacgtcttcattgaagattcacttacaaaggaatgtttcactaaataaaagaaaaccagaaaaaaaaa

SEQ ID NO: 93926 - DNA, 446 bp, Homo sapiens
  misc_feature (10)..(10): n is a, c, g, or t
aacccccccnccccccgagtagaggagttttttttccttccgaccccccccagtcttggaggtcagttgtggtacacgtccccggtgctgggttggccgtgactcgggggcggggcgatcgggtctcagcccctgccttccccagtctctgggtcacccgaattttcccacccctgcttctccccgaggaggttgagctcttgagcaagttgggacttgggccggggcctggaagaatgattggctgggaggccgcgggagggaggccaggaggcccggaccagttgggaggagtgagcaggccccgggggagggggatgagcgcagtttgctcgctttcctcccctgccggccccctccgcccccacacacactcgggacgtcttcattgaagattcacttacaaaggaatgtttcactaaataaaagaaaaccagaaaaaaaaa

SEQ ID NO: 93927 - DNA, 665 bp, Homo sapiens
ccctcgatctgcgtcgccatcccggccctgctggaccccggggtcagtaggaagccgcggggtggtggcgagagaggacccaggtgtcctggcagtgggcgccgcggggcacacgctgggccaaggtgcaggcggccagggtgggagactgttcgccccgccctgagtactcctatcttgtttctccacctgttcgggagttggagatgtgcacctaaaggaggcgcatctggggacggacacatctggcactgaggccctcgccacctgcctcgccacctggcgaccctgaccccaccacactgccttgagagtcgctcaaaagtagggccccagggctcgcagcagcatgggcaccgagaaagaaagcccagagcccgactgccagaaacagttccaggctgcagtgagcgtcatccagaacctgcccaagaacggttcttaccgcccctcctatgaagagatgctgcgattctacagttactacaagaggcccggaccagttgggaggagtgagcaggccccgggggagggggatgagcgcagtttgctcgctttcctcccctgccggccccctccgcccccacacacactcgggacgtcttcattgaagattcacttacaaaggaatgtttcactaaataaaagaaaaccagaaaaaaaaa

SEQ ID NO: 93928 - DNA, 1917 bp, Homo sapiens
ccctcgatctgcgtcgccatcccggccctgctggaccccggggtcagtaggaagccgcggggtggtggcgagagaggacccaggtgtcctggcagtgggcgccgcggggcacacgctgggccaaggtgcaggcggccagggtgggagactgttcgccccgccctgagtactcctatcttgtttctccacctgttcgggagttggagatgtgcacctaaaggaggcgcatctggggacggacacatctggcactgaggccctcgccacctgcctcgccacctggcgaccctgaccccaccacactgccttgagagtcgctcaaaagtagggccccagggctcgcagcagcatgggcaccgagaaagaaagcccagagcccgactgccagaaacagttccaggctgcagtgagcgtcatccagaacctgcccaagaacggttcttaccgcccctcctatgaagagatgctgcgattctacagttactacaagcaggccaccatggggccctgcctggtcccccggcccgggttctgggaccccattggacgatataagtgggacgcctggaacagtctgggcaagatgagcagggaggaggccatgtctgcctacatcactgaaatgaaactggtggcacagaaggtgatcgacacagtgcccctgggtgaggtggcagaggacatgtttggttacttcgagcccctgtaccaggtgatccctgacatgccgaggcccccagagaccttcctgagaagggtcacaggttggaaagagcaggttgtgaatggagatgttggggctgtttcagagcctccctgcctccccaaggaaccggcacccccaagcccagcttccctctgggcagtaactctaccaacccctccacagagtcccattcacccagggacctggactccgaggttttctgtgattccctggagcagctggagcctgagctggtttggacagagcagcgggcagcatctggaggaaagcgtgatcccaggaacagccccgtgccccccacaaagaaagaggggttgcggggcagcccgccggggccccaggagttggacgtgtggctgctggggacagttcgagcactacaggagagcatgcaggaggtgcaggcgagggtgcagagcctggagagcatgccccggccccctgagcagaggccgcagcccaggcccagtgctcggccatggccccttgggctcccggggcccgcgctgctcttcttcctcctgtggcccttcgtcgtccagtggctcttccgaatgtttcggacccaaaagaggtgactgtcagtggaggggtctctgcagccaactgagactatcttgctgtgccctgagccttcctagggtttagaagaacagcattcaaaattccccgtcctgtcagtgtttgccttcgcacctcctcccctaaagcagcgcggggggcaaataagaccccacccctccctgcagcttcacagggacgcttccttccctccccgcaaccaccccaggctcccctgggaggctgcagttgtggtacacgtccccggtgctgggttggccgtgactcgggggcggggcgatcgggtctcagcccctgccttccccagtctctgggtcacccgaattttcccacccctgcttctccccgaggaggttgagctcttgagcaagttgggacttgggccggggcctggaagaatgattggctgggaggccgcgggagggaggccaggaggcccggaccagttgggaggagtgagcaggccccgggggagggggatgagcgcagtttgctcgctttcctcccctgccggccccctccgcccccacacacactcgggacgtcttcattgaagattcacttacaaaggaatgtttcactaaataaaagaaaaccagaaaaaaaaa

SEQ ID NO: 93929 - DNA, 1739 bp, Homo sapiens
ccctcgatctgcgtcgccatcccggccctgctggaccccggggtcagtaggaagccgcggggtggtggcgagagaggacccaggtgtcctggcagtgggcgccgcggggcacacgctgggccaaggtgcaggcggccagggtgggagactgttcgccccgccctgagtactcctatcttgtttctccacctgttcgggagttggagatgtgcacctaaaggaggcgcatctggggacggacacatctggcactgaggccctcgccacctgcctcgccacctggcgaccctgaccccaccacactgccttgagagtcgctcaaaagtagggccccagggctcgcagcagcatgggcaccgagaaagaaagcccagagcccgactgccagaaacagttccaggctgcagtgagcgtcatccagaacctgcccaagaacggttcttaccgcccctcctatgaagagatgctgcgattctacagttactacaagcaggccaccatggggccctgcctggtcccccggcccgggttctgggaccccattggacgatataagtgggacgcctggaacagtctgggcaagatgagcagggaggaggccatgtctgcctacatcactgaaatgaaactggtggcacagaaggtgatcgacacagtgcccctgggtgaggtggcagaggacatgtttggttacttcgagcccctgtaccaggtgatccctgacatgccgaggcccccagagaccttcctgagaagggtcacaggttggaaagagcaggttgtgaatggagatgttggggctgtttcagagcctccctgcctccccaaggaaccggcacccccaagcccagagtcccattcacccagggacctggactccgaggttttctgtgattccctggagcagctggagcctgagctggtttggacagagcagcgggcagcatctggaggaaagcgtgatcccaggaacagccccgtgccccccacaaagaaagaggccgcagcccaggcccagtgctcggccatggccccttgggctcccggggcccgcgctgctcttcttcctcctgtggcccttcgtcgtccagtggctcttccgaatgtttcggacccaaaagaggtgactgtcagtggaggggtctctgcagccaactgagactatcttgctgtgccctgagccttcctagggtttagaagaacagcattcaaaattccccgtcctgtcagtgtttgccttcgcacctcctcccctaaagcagcgcggggggcaaataagaccccacccctccctgcagcttcacagggacgcttccttccctccccgcaaccaccccaggctcccctgggaggctgcagttgtggtacacgtccccggtgctgggttggccgtgactcgggggcggggcgatcgggtctcagcccctgccttccccagtctctgggtcacccgaattttcccacccctgcttctccccgaggaggttgagctcttgagcaagttgggacttgggccggggcctggaagaatgattggctgggaggccgcgggagggaggccaggaggcccggaccagttgggaggagtgagcaggccccgggggagggggatgagcgcagtttgctcgctttcctcccctgccggccccctccgcccccacacacactcgggacgtcttcattgaagattcacttacaaaggaatgtttcactaaataaaagaaaaccagaaaaaaaaa

SEQ ID NO: 93930 - DNA, 2184 bp, Homo sapiens
ccctcgatctgcgtcgccatcccggccctgctggaccccggggtcagtaggaagccgcggggtggtggcgagagaggacccaggtgtcctggcagtgggcgccgcggggcacacgctgggccaaggtgcaggcggccagggtgggagactgttcgccccgccctgagtactcctatcttgtttctccacctgttcgggagttggagatgtgcacctaaaggaggcgcatctggggacggacacatctggcactgaggccctcgccacctgcctcgccacctggcgaccctgaccccaccacactgccttgagagtcgctcaaaagtagggccccagggctcgcagcagcatgggcaccgagaaagaaagcccagagcccgactgccagaaacagttccaggctgcagtgagcgtcatccagaacctgcccaagaacggtgaggctgcggggactcgcatttggactcgcattcaggacgcctggggtctgactctgaagaaagaatggtcctgatcactgcagtttttgcagacaagcccctgcctgggctgtcctgggggttccctccgcttcctatcctagtccagatgccctgggtgggacccatccccacctctgccctttccaagcagggttctcccgcccctccgccccttggagctgggagtgatgctttgccctggcttcccaactctctgcccaggttcttaccgcccctcctatgaagagatgctgcgattctacagttactacaagcaggccaccatggggccctgcctggtcccccggcccgggttctgggaccccattggacgatataagtgggacgcctggaacagtctgggcaagatgagcagggaggaggccatgtctgcctacatcactgaaatgaaactggtggcacagaaggtgatcgacacagtgcccctgggtgaggtggcagaggacatgtttggttacttcgagcccctgtaccaggtgatccctgacatgccgaggcccccagagaccttcctgagaagggtcacaggttggaaagagcaggttgtgaatggagatgttggggctgtttcagagcctccctgcctccccaaggaaccggcacccccaagcccagcttccctctgggcagtaactctaccaacccctccacagagtcccattcacccagggacctggactccgaggttttctgtgattccctggagcagctggagcctgagctggtttggacagagcagcgggcagcatctggaggaaagcgtgatcccaggaacagccccgtgccccccacaaagaaagaggggttgcggggcagcccgccggggccccaggagttggacgtgtggctgctggggacagttcgagcactacaggagagcatgcaggaggtgcaggcgagggtgcagagcctggagagcatgccccggccccctgagcagaggccgcagcccaggcccagtgctcggccatggccccttgggctcccggggcccgcgctgctcttcttcctcctgtggcccttcgtcgtccagtggctcttccgaatgtttcggacccaaaagaggtgactgtcagtggaggggtctctgcagccaactgagactatcttgctgtgccctgagccttcctagggtttagaagaacagcattcaaaattccccgtcctgtcagtgtttgccttcgcacctcctcccctaaagcagcgcggggggcaaataagaccccacccctccctgcagcttcacagggacgcttccttccctccccgcaaccaccccaggctcccctgggaggctgcagttgtggtacacgtccccggtgctgggttggccgtgactcgggggcggggcgatcgggtctcagcccctgccttccccagtctctgggtcacccgaattttcccacccctgcttctccccgaggaggttgagctcttgagcaagttgggacttgggccggggcctggaagaatgattggctgggaggccgcgggagggaggccaggaggcccggaccagttgggaggagtgagcaggccccgggggagggggatgagcgcagtttgctcgctttcctcccctgccggccccctccgcccccacacacactcgggacgtcttcattgaagattcacttacaaaggaatgtttcactaaataaaagaaaaccagaaaaaaaaa

SEQ ID NO: 93931 - DNA, 1988 bp, Homo sapiens
ccctcgatctgcgtcgccatcccggccctgctggaccccggggtcagtaggaagccgcggggtggtggcgagagaggacccaggtgtcctggcagtgggcgccgcggggcacacgctgggccaaggtgcaggcggccagggtgggagactgttcgccccgccctgagtactcctatcttgtttctccacctgttcgggagttggagatgtgcacctaaaggaggcgcatctggggacggacacatctggcactgaggccctcgccacctgcctcgccacctggcgaccctgaccccaccacactgccttgagagtcgctcaaaagtagggccccagggctcgcagcagcatgggcaccgagaaagaaagcccagagcccgactgccagaaacagttccaggctgcagtgagcgtcatccagaacctgcccaagaacggttcttaccgcccctcctatgaagagatgctgcgattctacagttactacaagcaggccaccatggggccctgcctggtcccccggcccgggttctgggaccccattggacgatataagtggtgagctccctgctggctgggcagacaagcctcagctgtcaagcagccctctcacagccctctgcccccagggacgcctggaacagtctgggcaagatgagcagggaggaggccatgtctgcctacatcactgaaatgaaactggtggcacagaaggtgatcgacacagtgcccctgggtgaggtggcagaggacatgtttggttacttcgagcccctgtaccaggtgatccctgacatgccgaggcccccagagaccttcctgagaagggtcacaggttggaaagagcaggttgtgaatggagatgttggggctgtttcagagcctccctgcctccccaaggaaccggcacccccaagcccagcttccctctgggcagtaactctaccaacccctccacagagtcccattcacccagggacctggactccgaggttttctgtgattccctggagcagctggagcctgagctggtttggacagagcagcgggcagcatctggaggaaagcgtgatcccaggaacagccccgtgccccccacaaagaaagaggggttgcggggcagcccgccggggccccaggagttggacgtgtggctgctggggacagttcgagcactacaggagagcatgcaggaggtgcaggcgagggtgcagagcctggagagcatgccccggccccctgagcagaggccgcagcccaggcccagtgctcggccatggccccttgggctcccggggcccgcgctgctcttcttcctcctgtggcccttcgtcgtccagtggctcttccgaatgtttcggacccaaaagaggtgactgtcagtggaggggtctctgcagccaactgagactatcttgctgtgccctgagccttcctagggtttagaagaacagcattcaaaattccccgtcctgtcagtgtttgccttcgcacctcctcccctaaagcagcgcggggggcaaataagaccccacccctccctgcagcttcacagggacgcttccttccctccccgcaaccaccccaggctcccctgggaggctgcagttgtggtacacgtccccggtgctgggttggccgtgactcgggggcggggcgatcgggtctcagcccctgccttccccagtctctgggtcacccgaattttcccacccctgcttctccccgaggaggttgagctcttgagcaagttgggacttgggccggggcctggaagaatgattggctgggaggccgcgggagggaggccaggaggcccggaccagttgggaggagtgagcaggccccgggggagggggatgagcgcagtttgctcgctttcctcccctgccggccccctccgcccccacacacactcgggacgtcttcattgaagattcacttacaaaggaatgtttcactaaataaaagaaaaccagaaaaaaaaa

SEQ ID NO: 93932 - DNA, 1937 bp, Homo sapiens
ctcggatcggccaggcctggatatcagcgaacagatgcggatttccaccagggggcgctaggacgccacgacctttcactatgtgcaccagggggcgctgccgcccgccttggccatcccgggctgggaagtccgacccttcgattaagccccgcctgattgggaaaggctctgagaaactatttgcatgatcttgaaagagctgtgctgaatggttgagttggagatgtgcacctaaaggaggcgcatctggggacggacacatctggcactgaggccctcgccacctgcctcgccacctggcgaccctgaccccaccacactgccttgagagtcgctcaaaagtagggccccagggctcgcagcagcatgggcaccgagaaagaaagcccagagcccgactgccagaaacagttccaggctgcagtgagcgtcatccagaacctgcccaagaacggttcttaccgcccctcctatgaagagatgctgcgattctacagttactacaagcaggccaccatggggccctgcctggtcccccggcccgggttctgggaccccattggacgatataagtgggacgcctggaacagtctgggcaagatgagcagggaggaggccatgtctgcctacatcactgaaatgaaactggtggcacagaaggtgatcgacacagtgcccctgggtgaggtggcagaggacatgtttggttacttcgagcccctgtaccaggtgatccctgacatgccgaggcccccagagaccttcctgagaagggtcacaggttggaaagagcaggttgtgaatggagatgttggggctgtttcagagcctccctgcctccccaaggaaccggcacccccaagcccagcttccctctgggcagtaactctaccaacccctccacagagtcccattcacccagggacctggactccgaggttttctgtgattccctggagcagctggagcctgagctggtttggacagagcagcgggcagcatctggaggaaagcgtgatcccaggaacagccccgtgccccccacaaagaaagaggggttgcggggcagcccgccggggccccaggagttggacgtgtggctgctggggacagttcgagcactacaggagagcatgcaggaggtgcaggcgagggtgcagagcctggagagcatgccccggccccctgagcagaggccgcagcccaggcccagtgctcggccatggccccttgggctcccggggcccgcgctgctcttcttcctcctgtggcccttcgtcgtccagtggctcttccgaatgtttcggacccaaaagaggtgactgtcagtggaggggtctctgcagccaactgagactatcttgctgtgccctgagccttcctagggtttagaagaacagcattcaaaattccccgtcctgtcagtgtttgccttcgcacctcctcccctaaagcagcgcggggggcaaataagaccccacccctccctgcagcttcacagggacgcttccttccctccccgcaaccaccccaggctcccctgggaggctgcagttgtggtacacgtccccggtgctgggttggccgtgactcgggggcggggcgatcgggtctcagcccctgccttccccagtctctgggtcacccgaattttcccacccctgcttctccccgaggaggttgagctcttgagcaagttgggacttgggccggggcctggaagaatgattggctgggaggccgcgggagggaggccaggaggcccggaccagttgggaggagtgagcaggccccgggggagggggatgagcgcagtttgctcgctttcctcccctgccggccccctccgcccccacacacactcgggacgtcttcattgaagattcacttacaaaggaatgtttcactaaataaaagaaaaccagaaaaaaaaa

SEQ ID NO: 93933 - DNA, 1203 bp, Homo sapiens
ctagcgtatccttgggcgcgaggcccagagacttcctgctaaggtacatggttggaaagagcaggttgtgaatggagatgttggggctgtttcagagcctccctgcctccccaaggaaccggcacccccaagcccagcttccctctgggcagtaactctaccaacccctccacagagtcccattcacccagggacctggactccgaggttttctgtgattccctggagcagctggagcctgagctggtttggacagagcagcgggcagcatctggaggaaagcgtgatcccaggaacagccccgtgccccccacaaagaaagaggggttgcggggcagcccgccggggccccaggagttggacgtgtggctgctggggacagttcgagcactacaggagagcatgcaggaggtgcaggcgagggtgcagagcctggagagcatgccccggccccctgagcagaggccgcagcccaggcccagtgctcggccatggccccttgggctcccggggcccgcgctgctcttcttcctcctgtggcccttcgtcgtccagtggctcttccgaatgtttcggacccaaaagaggtgactgtcagtggaggggtctctgcagccaactgagactatcttgctgtgccctgagccttcctagggtttagaagaacagcattcaaaattccccgtcctgtcagtgtttgccttcgcacctcctcccctaaagcagcgcggggggcaaataagaccccacccctccctgcagcttcacagggacgcttccttccctccccgcaaccaccccaggctcccctgggaggctgcagttgtggtacacgtccccggtgctgggttggccgtgactcgggggcggggcgatcgggtctcagcccctgccttccccagtctctgggtcacccgaattttcccacccctgcttctccccgaggaggttgagctcttgagcaagttgggacttgggccggggcctggaagaatgattggctgggaggccgcgggagggaggccaggaggcccggaccagttgggaggagtgagcaggccccgggggagggggatgagcgcagtttgctcgctttcctcccctgccggccccctccgcccccacacacactcgggacgtcttcattgaagattcacttacaaaggaatgtttcactaaataaaagaaaaccagaaaaaaaaa

SEQ ID NO: 93934 - DNA, 724 bp, Homo sapiens
tgctgcggtgacctagaggatccggcacacccgtacggcggcgttcttcttcctcctgtggcccttcgtcgtccagtggctcttccgaatgtttcggacccaaaagaggtgactgtcagtggaggggtctctgcagccaactgagactatcttgctgtgccctgagccttcctagggtttagaagaacagcattcaaaattccccgtcctgtcagtgtttgccttcgcacctcctcccctaaagcagcgcggggggcaaataagaccccacccctccctgcagcttcacagggacgcttccttccctccccgcaaccaccccaggctcccctgggaggctgcagttgtggtacacgtccccggtgctgggttggccgtgactcgggggcggggcgatcgggtctcagcccctgccttccccagtctctgggtcacccgaattttcccacccctgcttctccccgaggaggttgagctcttgagcaagttgggacttgggccggggcctggaagaatgattggctgggaggccgcgggagggaggccaggaggcccggaccagttgggaggagtgagcaggccccgggggagggggatgagcgcagtttgctcgctttcctcccctgccggccccctccgcccccacacacactcgggacgtcttcattgaagattcacttacaaaggaatgtttcactaaataaaagaaaaccagaaaaaaaaa

SEQ ID NO: 93935 - DNA, 1217 bp, Homo sapiens
ccctcgatctgcgtcgccatcccggccctgctggaccccggggtcagtaggaagccgcggggtggtggcgagagaggacccaggtgtcctggcagtgggcgccgcggggcacacgctgggccaaggtgcaggcggccagggtgggagactgttcgccccgccctgagtactcctatcttgtttctccacctgttcgggagttggagatgtgcacctaaaggaggcgcatctggggacggacacatctggcactgaggccctcgccacctgcctcgccacctggcgaccctgaccccaccacactgccttgagagtcgctcaaaagtagggccccagggctcgcagcagcatgggcaccgagaaagaaagcccagagcccgactgccagaaacagttccaggctgcagtgagcgtcatccagaacctgcccaagaacggttcttaccgcccctcctatgaagagatgctgcgattctacagttactacaagcaggccaccatggggccctgcctggtcccccggcccgggttctgggaccccattggacgatataagtgggacgcctggaacagtctgggcaagatgagcagggaggaggccatgtctgcctacatcactgaaatgaaactggtggcacagaaggtgatcgacacagtgcccctgggtgaggtggcagaggacatgtttggttacttcgagcccctgtaccaggtgatccctgacatgccgaggcccccagagaccttcctgagaagggtcacaggttggaaagagcaggttgtgaatggagatgttggggctgtttcagagcctccctgcctccccaaggaaccggcacccccaagcccagagtcccattcacccagggacctggactccgaggttttctgtgattccctggagcagctggagcctgagctggtttggacagagcagcgggcagcatctggaggaaagcgtgatcccaggaacagccccgtgccccccacaaagaaagctgcacagcctcaggaagtcatccatattctctggactcccccgtttggaaatctcagaagacaatgagttctgccctcttcccttctagaactcctgttgtgtgtcaggtcctgtatggacattttgaaaagtttctccttttttcctctgagcaagcagccctgtgagagaaatgacatcttctcctaatttttagatgacaaaatgatgcccagag

SEQ ID NO: 93936 - DNA, 1287 bp, Homo sapiens
ccctcgatctgcgtcgccatcccggccctgctggaccccggggtcagtaggaagccgcggggtggtggcgagagaggacccaggtgtcctggcagtgggcgccgcggggcacacgctgggccaaggtgcaggcggccagggtgggagactgttcgccccgccctgagtactcctatcttgtttctccacctgttcgggagttggagatgtgcacctaaaggaggcgcatctggggacggacacatctggcactgaggccctcgccacctgcctcgccacctggcgaccctgaccccaccacactgccttgagagtcgctcaaaagtagggccccagggctcgcagcagcatgggcaccgagaaagaaagcccagagcccgactgccagaaacagttccaggctgcagtgagcgtcatccagaacctgcccaagaacggttcttaccgcccctcctatgaagagatgctgcgattctacagttactacaagcaggccaccatggggccctgcctggtcccccggcccgggttctgggaccccattggacgatataagtgggacgcctggaacagtctgggcaagatgagcagggaggaggccatgtctgcctacatcactgaaatgaaactggtggcacagaaggtgatcgacacagtgcccctgggtgaggtggcagaggacatgtttggttacttcgagcccctgtaccaggtgatccctgacatgccgaggcccccagagaccttcctgagaagggtcacaggttggaaagagcaggttgtgaatggagatgttggggctgtttcagagcctccctgcctccccaaggaaccggcacccccaagcccagagtcccattcacccagggacctggactccgaggttttctgtgattccctggagcagctggagcctgagctggtttggacagagcagcgggcagcatctggaggaaagcgtgatcccaggaacagccccgtgccccccacaaagaaagaggggttgcggggcagcccgccggggccccaggagttggacgtgtggctgctggggacagttcgagcactacaggagagcatgcaggaggtgcaggcgagggtgcagagcctggagagcatgccccggccccctgagcagtctcactctgtcggtcagactggagtgaagtggcgtgaactcggctcactgcaacctccgcctccccgggttcaagcaattctctgcctcagcctcccgagtagctgggattgcaggcgcccaccaccatgccccgctaatttttttta

SEQ ID NO: 93937 - DNA, 261 bp, Homo sapiens
gatttagtggtcctaggttcatgtgatttgggagccttaagttgttatttagattgattcagcctgattcaccatcttttttactacagttctacatgaatgtggtgaaacaggtagaagaaaattaagcatttctctgcttttggagtctaatgttcctgcctagtgactggtttgtaacacccccctcacccctactttgttaggaacctgcaattcctaaaagaaataaataaagctgtacccaatgtccattcttta

SEQ ID NO: 93938 - DNA, 565 bp, Homo sapiens
acctttgtcctgtgtctccctaactacactgtaatcttttgagtgcagagactctgccataacctggaaccctagcatgcagtatactttccagtacacaacaacttataattttacctttggtgactgaatactcttagctttttaaaagtcatcaagaaggagaaaatgcttaataaaatgaatgaaaaatcaaagtcatgattaaaattacttaaataggcacaggtagtatcacacactaaactgctaaatctatgatacttaccatgagccagttcatgtactcagttcatgaactcagtcacaactttgaggttatactattattacctacattttacagataagaaagctgaggggcagaacctccattaagaggttcagggaagccccaaaactctaagttttgtcttaaaacaaaaaaattaggtgaaagaagaggggggaagtatcccaagagactttgcttgtttaaaagtatctgaaaagaaagaaaagacaaagactagaagagaagtttcattttattcacggatgatataaatgtctatgacacaaggca

SEQ ID NO: 93939 - DNA, 163 bp, Homo sapiens
gttaccagttctgcttttcctggacctgttccaagctctcacgttccacatcacacatgggacatctagtgtcaggctcccagagagcaggaaccaggtgaaatacaagagcacagtcctcccagccggtggcatggggataatcggacaatacaactctcca

SEQ ID NO: 93940 - DNA, 175 bp, Homo sapiens
ttgtctcagcctcccaggtagttgagactatccataggcacgtgctgccatgcccagggtatcactttgttgcccaggctgcctacctcccttttagatttgaagtcctttcaggagagaaactgagtttccttcctgaacttgaatgttgggtcctcccgaggatggcccccta

SEQ ID NO: 93941 - DNA, 384 bp, Homo sapiens
acacatcacatacacacacacacacacacacacacacaggtgcatgtgcagccatgctgctttgggaagttgtttctcagctcactcattgattgcgttaacaaagagttacacaatgctttttctgtgagaggcactgtgctaagacaaagggtagatacaaagacaagtctgctaccatgcctggtttttgtaaaagagataaaacaagtagaaaactataatatataaggtcagaggatttaagggacagcaaggaaactacaaataaaagatcaagggagttgggtggggagaataggggcagatgaggaatggggctggcttcagggagaactctgcttctgttccacgcctggaagatgtgtgggtgtgaaaagaaag

SEQ ID NO: 93942 - DNA, 442 bp, Homo sapiens
gccacacatagatgcaaacactgggaagttggctaaggtgactcattaagtgagtccatcgtatctatcaatcttgagtaattcgggaattccaaaatgtgcagcagccaaataacaaatgaatgtcccgaacatttatttatttatttattttgagatagagtcttgctctggcacccaggctggagtgcagtggcgctgtctcggctcagtgcaagctccgcctcctgggttcacgccattctcctgcctcagcctcccaagtagctgggactacaggcgcccaccaccacacccggctaattttttgtatttttagtagagatggggtttcaccattgttagccaggttggtctcgatctcctgaccttgtgatccgcccgcctcggcctcccaaagtgctgggattacaggcgggagccaccgcacctggcctgtcct

SEQ ID NO: 93943 - DNA, 606 bp, Homo sapiens
aggctgcagtcttggctcactacagcctcaacctaccatgctcagtcaagcctcccacctcagccacctcagtagcttgggccacatgctcatgccaccactcctggctaatttttttattttttgtagagatatggggtcttgctgtgttgctcaggctggtcttgaattcctggactcaagcagttttcttgtctcagcctcccaaagtggtgggattacaggagtgagccaccgcaacctgacctgtaattttcttgtaatgcttttgtccccttttggtgttaggtttatactggcctcttaaattggaatgtgatactttcattgttttccgaaaaagtttgtgtaagattggaattatttcttcattgaatagaggcatacctcattttattgtgcttcactttcttgtgctttgcacgtatttcattttttacgaattgaagggcttgtggcagccctgcatcgaccaagtctgttggccagcagcatgtgctcactttgtctctgtgtcacacttcggtaattcttgcaatgtttcagattttttttactgttatatctgttacggtgatctgtaataagtgatttttgatgtcacta

SEQ ID NO: 93944 - DNA, 96 bp, Homo sapiens
gaaatatttaggtagccaatccccagcaaagtgatgtactattaataaagctgtgcccagcataaaacagagtaaaacgaggaaaaaagaagccaa

SEQ ID NO: 93945 - DNA, 475 bp, Homo sapiens
gagagggcctgtctctccagggtagggtagtagactcaggactcagggaatgcagtcagctgcgtgggcccctgtgctctctaggaagctgggagacaaatgttataaagaaactcttaccccataggatgcccttttctgatttttcaactataattacctggaaagtggtccatgtccacgggcctagtgggctctaattctgtgaggtgacctatcattgcccacctgccccagaggccacgtaaggttgggttgagtttttgcaggaagtatgggaaagcctcccttgaaggtagactttgcatctgaccccagagcttctagttaagtggctttaggcctttggtaagtccttaacaaatctgagtctcctctgatgaggactctagccttctacttacacctctgggaaactattctgtaatgaggcaacatatatcaaatgcgtgtctagtgctggggatgttgcagg

SEQ ID NO: 93946 - DNA, 486 bp, Homo sapiens
tatcaagacacctgccgagcgtctgcgggggccgcttccaccctcagccgatgataatctcaagacaccttccgagcgtcagctcactccccttccaccctcagctccaccctcagcagatgataatatcaagacacctgccgagcgtctgcgggggccgcttccaccctcagccgatgataatctcaagacaccttccgagcgtcagctcactccccttccaccctcagctccaccctcagcagatgataatatcaagacacctgccgagcgtctgcggggagcgtctgtgggttccgcttccacgcctcagcggatgataatctcaagacaccttcgcaagacgtcagctcactccccttcacacccatcagcatccacgccgtcagccagagtgataagtatcaagacacctgcacgagcgtctgcgggggccgcttccaccctcagccgatgataatctcaagacaccttccaaacgtcagc

SEQ ID NO: 93947 - DNA, 697 bp, Homo sapiens
ctacactgaagatgttttgggcatatgttaagtggtttttctcctttaatctatggatatatcatctcaaacagtgaattatatttgtttgagaaggagtctcactctatagttttttacagtgttgaactatcattctattttgagggtaaatggctacgtttgatttacggctacattttgaagtgatactgagcttttcgttttggtgctgccctagtccagtttgggatcggggctatgctggcttcatacagtagtaagaggaggcttgtcattactttctttgcgctggtacacttacagtaacataggtattatagttttggaagatttgataaaactctcccacgaaacatcctaggccctggtgtccattttggggacatcaaaatcttcgaataccatttctaccttttttttttttttttttttgagatggagtctcacttatcacccaggctggagtgcagtggcgcgatctcggctcacgtgtttcatagcctttcaggagttcagggctaacggtcaaccagccagcctctttggcagtcagcctgaagggggccaagggggcagatcgatgccaaggtgcacagcccctcaggagccctggaggagtgctatgtcacagaattggaccaagataagtatgctgtgcgctaatccctcgggaaaagggagtaacctgatggac

SEQ ID NO: 93948 - DNA, 534 bp, Homo sapiens
aggtgaagccatttaccccaagtgagcaggtgaggaggccgtgcagcctaggagctgtgccaaccctaagcccatacccctttctagaccatgctacacatgtcacaaccccagatttccctgctgttttccagagcctcttccctgggtccctcctccccagaacactggtgtgtgtacccctaggcccaaggggtggccaaggggcatctgtctgtgagtgtgactttgcacttaggagctggtgtgacccctgggctgaacgtgaggccctgtggtgcaggacagagactaaggcagtgtattcatttcctatttctgctgtaaaaaaattaccgcaaacttactatctgacatttatggaggccagaggtccaaaatgggtctcactgggctataatcaaggtatagccatggctgtgtccttcctgaggctccagggagaatctgtttgcttgccttttccagcttctagaggccacctgtgttccttggctggtggccaccttcaaagccagcaatcccatcactcca

SEQ ID NO: 93949 - DNA, 392 bp, Homo sapiens
agtttttaataatatttaaaggtaatctcactaaattacaaatagcactgcatttaacttgattgctgcagcaaacatgaaattaagattttcatactaaaatattatagacattttgtataggtccaatgttagctatatcatgtacattaatatttattaaagttgtgtgtacatacatcttgtactcattactattgcatacgtgtagtatatcaagcattataataaaaaaattatgatttttaaaaaaccattctttctcaggtgtatagtctactgtcaataaaaaagaatcctgtaaacgctgtaggaagagatgtgaagcagggagagtcgactactgtttactggagtctactttgtagctaaaatgaaacagcttaaaattt

SEQ ID NO: 93950 - DNA, 398 bp, Homo sapiens
agtgagcatgatctgcgtatagtgcttgtgaagagtagcgtgcagtgccaggatgcactggggctttatagatggctgtgttttccttgcacatcattagcctggagccacacgaaagaggaaaacagagaagtggagagtttatgctccctgctggtgtttaagaagccagggtcctggaaggacatctgggaattgcactgagatgggggtttttgtaatttaagaatagacattcattagcagtaaatgccataaatcccatgctaagtaaaaaccttgtccaagaaagcctaaaacaataaactctgtgctcaatgtagcctgagctggatgctctgtagctttctgaggaatactagagatccatcagctcattcccagacctgctccctcct

SEQ ID NO: 93951 - DNA, 367 bp, Homo sapiens
agttataagtaaattcaactacctaatcatagtattcagttatcatgaacctgatgatactgatgtgaaattgaactataatctcaaagtttagagctcattaaattaaactgaaataccatttaaaattgatcttcaatggcactagccacatatccagtgctcaatagccatatgtgtctagtgatttctatatgaaacagtaaaacaatagactatttcctttatcacagcaagttatattgggatagatagatgaatagttagatgatagatagataatatataagtagatagatgatagatggataaatgatagatgatagatggatagatgatagatagatagatgatagatagatagata

SEQ ID NO: 93952 - DNA, 421 bp, Homo sapiens
agttataagtaaattcaactacctaatcatagtattcagttatcatgaacctgatgatactgatgtgaaattgaactataatctcaaagtttagagctctgctgtccaatatggtagccactacccactagtggctatttaaaatcaaatttcattaaattaaactgaaataccatttaaaattgatcttcaatggcactagccacatatccagtgctcaatagccatatgtgtctagtgatttctatatgaaacagtaaaacaatagactatttcctttatcacagcaagttatattgggatagatagatgaatagttagatgatagatagataatatataagtagatagatgatagatggataaatgatagatgatagatggatagatgatagatagatagatgatagatagatagata

SEQ ID NO: 93953 - DNA, 401 bp, Homo sapiens
tttcttactcaaaatgtcagtaaccctgttggcaggcgtataagaacagttgtgctcttacactttgctattgaaagtataaattgatagactttctggaagacagcttggaaatacataaatatatactgaaactttaaaattatgcgtgtcctttgacccaacaattacacttcttggaacttttttatttttatctgttttagagataggatattgctctattgcccaagttggcttcaaactcctgggctcaagtgattctctcacctcagccttccgataactgggactacaggcacacgccactgcacccagccattggaatttatcctaaagaaagaatttaggatgtgaaaaaagatttagttataaaagttcattcatcacaatgctattta

SEQ ID NO: 93954 - DNA, 363 bp, Homo sapiens
tcctagatggatatcttgaaagaaatacttgaaggctattagtgattgtcatgattatttctagatagtgagattagagatgatttctggcttcttttccatcattttctaaattgtcaaatatgtgttaagaagattagatatgaagtagttttgaacaccaaaaagtcatattgaagtgtaggtaccttggcaaagtagctactactttttcttttttgctttttcagggagtcctctgaagttccttcttagatggggggactaaaatctgcttttgtgagattccacccgtaggtcctcctcctgccaactccccaccctgagcttccacagatgtttccttctgtctctctgcacctt

SEQ ID NO: 93955 - DNA, 385 bp, Homo sapiens
ctcattttgttgctattcagttgtttgagttccttatgtattttgaatattattttctttattaggcagaagctttgtagtttgatgtaatcccactttctatttttgcttttggtgcctgtgctttagggaccatattcaaaaagtcattgcccagacttttcttctagtagttttacggttttgagtcttacatttaagtctttaatccatttttgttgatttttgtatatggtaagagacaaagggtctaatttcatttttctgcatgtagataggcagttttcccaacactgcttattgaagagactgtcccttgcccattgtttgttctcggctcctttgtcaaaaatcaattggttgcaaacatgtggatttactcctg

SEQ ID NO: 93956 - DNA, 506 bp, Homo sapiens
tagtcatttacaactaaatgaatattgaatatttcctcgacctcaatttctgtccagtgacttcaacatcaatcaatacagtattgaaagggaatctagtcagagcacatgtcctgatgctattttcccaaaggcaaggactaggtcttttcatctcctaggacacagtggctcactaagtagagcatagggaattaggggatgggtgtggaatgtgatagctgcaagagatgtttccaagcactacacatatagggcagagttcttctaggccaagaagtcggaagctccttttgcagtgcagatccgacttacttgacgactgcctaacttctggctctcacagttttattggagaatatggaatgatttcctttcatggcctgacaccttcagaactcccgatggtaattacaggcaattagtgtggtggctgagagtggagtcttggtgtcttggtttctttatgtataaaatgccaccatccttcttcacttcgattgcta

SEQ ID NO: 93957 - DNA, 307 bp, Homo sapiens
tgacattttgcagcatattttgttatctcctacattcagctatatttaatagcctgttttacatgaaattgaacagaaaatgttaagcccagaaatttgttcaattagatatcatatattggggggaaactaattttcttccagtggtttagtagtttaagaatgagcatatagtctcttaggaataaattgaaaattctaaccattgagagtacagcagttttttttttccatttttttttttttttgacacaatggtaaatgcccaagattggaaactatttttaaatgaaaataacatatgttt

SEQ ID NO: 93958 - DNA, 228 bp, Homo sapiens
ggtgggtgaataatctttatttggtctgtactttctgcttccaatctgggaatttttccaagaaaacactgactgaaatacagtcagaatttatatatgcatttacattaggctccaacaataagattcagcctttttcaaaactgtcacttgcatagccaataaactagtgtctcaaaaatccatttaattttccatacttcccaaaaccatttcaatgcgatgatc

SEQ ID NO: 93959 - DNA, 276 bp, Homo sapiens
agatgaacagagcgtggaagacttccagggcagaaaaactctgcgtaatactataatggtggacacatgtcattatacatttgtctaaactcatagaatatacaagaccaagtaaactctagactttgggtgataatgatgtatcaacgtaggttcactgactataacaaatggaccactatgatgaaagatgttgatggtggaggaggctgtgcccgtgtgaaggcaggggttacgtgggaaatctctgtactttatgttcagtgttacgtgaag

SEQ ID NO: 93960 - DNA, 114 bp, Homo sapiens
gacagcacaagaatggagggtgaaaattcaggatttctagccagtctgtccaggttcagatcctgtttcttccagtaccaggcaacgtggggtgggcagtcccttctctgtgct

SEQ ID NO: 93961 - DNA, 289 bp, Homo sapiens
tgcttggtgtgcctgttggctcagactctggtgtgcctgaattctgagcttagtgctcctttcctgtggcttgggatggtggtaatttcatgcacagctaaactcagaatttctcagagccatctggtcaccggccaaggattttgtgcatttgggtggagaggccaaaatgtcagtcagggaaaacaaagcaaatatctcctttaataacctgtctctgggaatcagccaagtttaagcctatcagaggtccttcagcccaccccacatgcgaggctgggctgccctc

SEQ ID NO: 93962 - DNA, 164 bp, Homo sapiens
catcccttcatctggatccatcctgtcttccatttattcctcctttgagatctttctatatttctctatcatttgccaaaaaaatctaagccctctctcccttaggctacttctgtttattgttcttatttccacctttgcgttgtggtgtaatcgtccatctc

SEQ ID NO: 93963 - DNA, 569 bp, Homo sapiens
caaggaaccaagacccacagcctccattctcccaaggcctggcctctgcataccctctgtaaacattcatccatgaagctcagtccaaacacgcaagttccagaaccatgcagccaacacacacgtggctttgcagaaaacatatgttcccaaacacacggaaaagccatcagaacgggctacagttaagctaaaaggagttatctcggcagcagggcagaagagggtatttttactttcttctttttatttgcccgttattttttctgatcttctttcactgagagtcactctttgtgtaatacagctgtttttgaaaatgtgcttaacaacaaaggaagcctgcattcagttatccatggacgccttcatcccaccagctaaagtctggtgcacccaggctgtgctggaaacactctcaggataaggaggttagaaaaaacaacccaggcctcacctgtgcagccctgggttcaaatcccagccccctctgccactctccagttccgtgacctccagcaggtcattcaactgcttcctgcctcagttcctcatctgcccaatgggga

SEQ ID NO: 93964 - DNA, 602 bp, Homo sapiens
  misc_feature (34)..(34): n is a, c, g, or t
cgatgagtaaatcttggcgatgagtaaatcttgntcgatgagtaaatcttggcatctccaaaaaggcattttaaatctgtatttcctaattgttcgagaaacataaaagaaatttttggagatgccaagttcaaatatgacaagactctaaggagaaaaactggatattaaaggtttaaaaaaacaagttgacaaggagaacagagaaggcaggtcttgttatctagagctagacaccagctaatatcttggtagtcaactacttgatagagttgctttgtcatctatcagtggagaaagaaagttttctctctgtctgtgatctctctctctccagtggaaagaaggtgcaggcagagttgctggtgttatcaagggtgtgggagtggaggttactttcctttctgagttaacacttgatgttttggagcagtggcattgtaaagtgtcctaggaaaaagtccagtctagaaaggacagattaggggaatgaaaagcagcagttggttgaattttaaaagatgaggttcttagggggcttagggtaataaaactcagaatgcaataccaagattaccatcggtaccgagctcgatctatcc

SEQ ID NO: 93965 - DNA, 1281 bp, Homo sapiens
gcagagggaaaaggagaggagtatggatggatgtgttattgctcacattctagttcttgagtttacaggttcttattatgacattgaacttcataactatcaagctatacttattttgcagaaacaaatatgttaaagttgttctcattatcattaaagataatttgtcatctttatgggttaaataagaaaaaccagaacatgtttcaatagatgccaaaaaggcattttaaatctgtatttcctaattgttcgagaaacataaaagaaatttttggagatgccaagttcaaatatgacaagactctaaggagaaaaactggatattaaaggtttaaaaaaacaagttgacaaggagaacagagaaggcaggtcttgttatctagagctagacaccagctaatatcttggtagtcaactacttgatagagttgctttgtcatctatcagtggagaaagaaagttttctctctgtctgtgatctctctctctccagtggaaagaaggtgcaggcagagttgctggtgttatcaagggtgtgggagtggaggttactttcctttctgagttaacacttgatgttttggagcagtggcattgtaaagtgtcctaggaaaaagtccagtctagaaaggacagattaggggaatgaaaagcagcagttggttgaattttaaaagatgaggttcttagggggcttagggtaataaaactcagaatgcaataccaagtgattaaagaactaaattgggcccacatcagtagagggttggtacctaagcagccataggaaaagggcagttctttataatacatgaaaagcctagggtttaataaccacttagtaaggtatgttatggatatcttattttagagtaagaatataaggcatagccatatttatgaaggtagtaatactctactaatcaatacttagaagtttttgttatgactaatctgaatgctttttagtttttccttaatctagttatgttggtaatttataagtcagttttcagattaggaaagaaggtatttgagggtgttccatttccactgaatagtaagatgatgcttacttagatttccacagctgtttgaaagctctgtatttggctataacggaaaactttgttagggatgcttgatgttttgtgttttgtttctaaaggaagacagtgttttgttccttctttagaaaacttgaagaatagaataatgagtccaggattaatttgggataaagtcttttacttcataaattctgattctgtaaaaaaa

SEQ ID NO: 93966 - DNA, 1122 bp, Homo sapiens
  misc_feature (34)..(34): n is a, c, g, or t
cgatgagtaaatcttggcgatgagtaaatcttgntcgatgagtaaatcttggcatctccaaaaaggcattttaaatctgtatttcctaattgttcgagaaacataaaagaaatttttggagatgccaagttcaaatatgacaagactctaaggagaaaaactggatattaaaggtttaaaaaaacaagttgacaaggagaacagagaaggcaggtcttgttatctagagctagacaccagctaatatcttggtagtcaactacttgatagagttgctttgtcatctatcagtggagaaagaaagttttctctctgtctgtgatctctctctctccagtggaaagaaggtgcaggcagagttgctggtgttatcaagggtgtgggagtggaggttactttcctttctgagttaacacttgatgttttggagcagtggcattgtaaagtgtcctaggaaaaagtccagtctagaaaggacagattaggggaatgaaaagcagcagttggttgaattttaaaagatgaggttcttagggggcttagggtaataaaactcagaatgcaataccaagtgattaaagaactaaattgggcccacatcagtagagggttggtacctaagcagccataggaaaagggcagttctttataatacatgaaaagcctagggtttaataaccacttagtaaggtatgttatggatatcttattttagagtaagaatataaggcatagccatatttatgaaggtagtaatactctactaatcaatacttagaagtttttgttatgactaatctgaatgctttttagtttttccttaatctagttatgttggtaatttataagtcagttttcagattaggaaagaaggtatttgagggtgttccatttccactgaatagtaagatgatgcttacttagatttccacagctgtttgaaagctctgtatttggctataacggaaaactttgttagggatgcttgatgttttgtgttttgtttctaaaggaagacagtgttttgttccttctttagaaaacttgaagaatagaataatgagtccaggattaatttgggataaagtcttttacttcataaattctgattctgtaaaaaaa

SEQ ID NO: 93967 - DNA, 732 bp, Homo sapiens
ctctggagtcagaaatctgaaatggaggggctggcagggctgtccttcctcctcaggctgagcggagaatcctgcctggcctttcccagcttctggaggctccaggcgttcagggcctgtggctgcagaactccagtctctgcatgcgtcttctctgtgcctttcctctggatgtctttatgaggacacttgtcattggatttatggcctgcccagataacccaggatggtctcctcaaaatcttccacataattattttctcaaagtccccttttccaaataaggtcacatttgtgggtcccagaggttgggacatggatctatattttgggaggtcaccattcaacccattacacacccttgaaggtgtcttaagtagtgacagggacatgttgataaggacgtgaagggctagccatggggacctgacagctcttccaatgccggctttcgtattttctctccgtgccccgacccgtctctgaaccacccaccccagactgcagcctccttgggcttctccctcagttgcctgccgggaatgccgtctcccctgcatctcaaggccccacctcttcttccagctgtagctctgctctgcctcctccaggaagccctgactgactcatggtccctggactcctctcggcccttgcctcccttgccactccctgtctacaccatccttggacttttaacctctggccttgctgggtcttttttcttgcccc

SEQ ID NO: 93968 - DNA, 548 bp, Homo sapiens
actttacttaatttatcggtgtcttcccatgtctcgctggagtgctgcggcacaattcttcatggctcactgcggcctcggcctcctgggctccagccattttcctgccttggcctccagtagtgctgggattatgggcgtgagccactgtgcccagcccataatactttttagaggtcgtatagcacttcattatgtggatatacaagtattaacctagttaactattgttgggaagttaattaattttctcatttttcatcatttaaaatattgtaataatcttagtgtatattattgacaagttttctgaagtataattattggataggaaattatgaacatttcaaggccctcagtttctgcacttggccagtttgctttccagatggggtgtgccagtgtatacctggcctgcatgggagagtgctctctgcctctgccaaggaggggacctcctgggtcagtaggtgatggtgctgccactgtttttgcagccgttgttgagtggctgggcccaggactgcagtctccagtctcattttgat

SEQ ID NO: 93969 - DNA, 401 bp, Homo sapiens
gcttcccagagctcaggattctgccatggagacactggtttgagcaagcatactggatgttttcttgaaaaatgttaagctttaattgtttataataaaataaattcatacttattgtaggaaatgtggccagcacagatgattttaaagaagatagtaaacacccatattcttaccacccagaataatctacaaaagagcatttctttcatttctttgcattctttctgtttgtttgtgtatatataaatacaaatgcttatttttttgggggggcgggtggcaggagaatcacttgaacccaggaggcggagtttgcagtgagccgcgatcgtgccactgcactccagcttgggtgacagagcaagactgtgtctcaggaaaaaaaaaaaaaagaactg

SEQ ID NO: 93970 - DNA, 160 bp, Homo sapiens
taaaatggtgcaggtagtacagagagcaagcagtaaggagatactcctaaaattaaaaagacaattagaatatgattcagcaatcccacttctggatatatatccagaaagaattcaaagcaggatcttaaagataaattttcacccatgttcatggaag

SEQ ID NO: 93971 - DNA, 404 bp, Homo sapiens
tgagattaaaggcgtgagctccgcgtctggccataacatcttatcctatagaagcccagagaggttaggtatgtagtccctgagaccagccttccttggatgaactccaaagtgatggctgaggattagggagtgtggggtgggggctggaaagtcggtcccctattgttgctacctaggccatgacatccccatactcccatcgcctgctcaccgtttgagattcccccccaccaccgccttggtggctgaactcttactttaatttctgtctttcttcgtttgttgggtttcaggagggggtgcaggaaagacggtgtgcgtggggagggggtgtagggtggggatggaggggagcgtcctaagggtcgatgtagtgtcatgcctctttcatcaccaccacc

SEQ ID NO: 93972 - DNA, 226 bp, Homo sapiens
atggggcctattatttcccaagctaaggctctagggatgtgcatagtaaatcctttacctgcttgtatctctgaattcatgttttattgccattcctagactctaaggaattgccttattttgctgccagctcagccatgcattaactagaattttttttagaacaattctttctcttaacagttttaggagtgctaaactgggaaaaattcctctgaatgtccag

SEQ ID NO: 93973 - DNA, 249 bp, Homo sapiens
ccacctcctgggccagtcttaccgtggcacaaagtatcattttctctgggtagaaatccaggaagtcaggaagccttagggaggagggagtgccacaaaaaccaccctcacattggcctgaaacctgctgccttagtgctcttccctcccttatggagtcagatttttgtttgtttgttgttgagactgggtcttgctctgtcacccaggctggagtgcagtagcacaaacactgcagcctctaccttc

SEQ ID NO: 93974 - DNA, 412 bp, Homo sapiens
gatagaatagtattaggattggttgcaattagaaacctaggtgtaacattcttattaatgaccttcagtctttaacaaatcagcatccccttcctttaggcttcttgacaagcaatatgggatattacaggtactagtacaagaaattgttgtaactaggaggtcataattggctttattctgtgaaaaagttctggctttaaggaagcagtctgggcaatggtttggaagaccacgtgactctttataatacccactttccataatacgctccacattcacagatcgtctaactcataaatggtcagatcaaataaggctaagccatctacagtttccagagtcattatttggtaagtccaggaaagtcacatgtagcatgattgtgaagctgccttccaagcagttcctc

SEQ ID NO: 93975 - DNA, 412 bp, Homo sapiens
ttttttttttttccctgagatggagtcttgctctgtcacccaggctagagtgcagcggcacgatctcggctcactgcaatctcttcctcccgggttcaagcgattctcctgcctcagcctcccaagtagccgggattagaggaggcatacgccaccacgcccagctaattttgtatttctagtagagacagggtttttccatgctggccaggctgttctcgaacttctgacctcgtgatccacccccccttggcctcccaaagtgctgggattacagaagtgagtcactgcgcctggccagatatacctttttatcattaccatgcaaagtgtaggcttcatgccctgtttgaacatgaatgaactgaatgctatgcaagacaacccaacaccgagctgggttttttttttt

SEQ ID NO: 93976 - DNA, 414 bp, Homo sapiens
cagatacttgtacaccaatgctcagagcagcattactcacaataaccatatgatagaaaccaaccccaggtgtccttcaactgaccaaaaggattttttaaatgtggtatatcctacaatatggatgaacctggaaaatattattctaagtgaaataagccagatacaaaagaacacatgtatgatttcacttatatgaaaatgtaaaataggcaaattcatagagaccagaaaagtagatctgaagttactaggagctgggaaggttaaggtctggggattggagagtgattgtttaatgggtacagaatttctgtttggggagataaaaaaatcttagaattagatagtggtgatgggttctgtgtggagaagccaaacaataaaacaacctagtgggcaaccttcttaatt

SEQ ID NO: 93977 - DNA, 935 bp, Homo sapiens
ggcaggaccagctgcatatgcgtccaacctatgtagttgcacagtgctcccagcttagaagggcttcgagcttggtttaatattctggtgtcgccattttgaaattcgtaatttttcagaaaggggctccgcattttccttttccagtcttacctagagttacccaaccctgacacctgtctctttcttcctaatctacaagagatccctgggctactggtccccttagatgacaaaatacagaacaacacagggacacattaagtctactgaaagtttttatttccatctacttctgagattttgtatcatgttatagtccttagcctttaagaagacaaataaacttttccaatttacctcagtaagttagtagctccccacagcctacaaattcagtctcttatcattcaaaccagccctaacttttcctggccatgccccaacttctaccatcttctaccccaacttctatctagcctttaagaagactaagattctcacagacccctttgagaatctaataaaagctatgatccatcttcccaggaaaatacttctgcatctaaaattttgtacttatggggattcatgaccccagcactagagctaccacactatacactgggactgggagaagaaggggttccaggcctgggttctgagccagaaacaactaggctactgtattagcattattgctgggttaagcacagaagtggcttgccactttatttttccttcagtccccagtttcttgggaccctaacaggcatggcattcccagataaggatttgagacaaagagcaacaaactcttgagaagttggtatgacttcgagaaacaaaattccctaaacaagctatttaatctgtctaagctttattttgttacctctagattgctgtgagaaaatagagctttttaaattgca

SEQ ID NO: 93978 - DNA, 343 bp, Homo sapiens
catccaggctccaggaccctgcatgaggccaccctaccatacaggtgcctcacttaccccactcagactctgacatcctgttccagccagcactatcacctcatgacacccatgctgaccagcctgctcactccactctggctgcagtgtcctgcactagggttgccaaggctctcccagccctatacatggacagccgctttgctcagcctcacctattggctttcagactgaatcattctgatggagagagaagacaaagaaaaagaagtagagaaacagaagatgaacaacagaaggctggattttctctgcttacacctctgtttaattttatgctata

SEQ ID NO: 93979 - DNA, 420 bp, Homo sapiens
caagccaccctgtttagctaatttatttttattttgtagagacagggtttcgccttgccgcctagactggtcttgaagccctggcctcaagtaattctcctgcttgggtctcccacagcgctggggttacaaggtttgggctttcaaagcatcactctggctgtagggtggtgagtggctggtaggagataaatataaagctggagtccaggcacggtggctcacgcctgtactccccacactttgggaggccgaggtgcgtgaatcacccgaggtcaggagttcaagaccagcctggccaacatggtgaaaccccgtcgctactaaaaatacaaaaaatagccaggcgtgtccctggggtgcgtctcaactatactacttaggaggctgaggcaggagaattgcttgaatccgagaggc

SEQ ID NO: 93980 - DNA, 847 bp, Homo sapiens
gcttgttagtgagtttaaagccaatatatcctactagatattgccctacgtggtaatagtagtatgtacatcatgccctccttgaataatagagagcctattatgaaacaagcagtatagacaaatgttcctatacttatatgtttaaaaaaatgcaaaaaccatgattacttttgcacaacctaataattaatagcaaagattagaaagaatctaacttcctatcaaacgaggcccaattttaacgtacggcactggtatacagagtttacatataaatctttaggacacacaagaaattggtgatatgggttgcctccagggaaggaaaatggatcgatgagtaaaggaatgaaagggagctttcttctttcatgacttttgaagttagtagctatttaaactgcatcatctatttaaaaagaaaataaagatttaaaatttttagaaaaaaattcaccccatcacttgtcacggcaccccgttttaactctttgaataacacttactacatattttcttacactctcattaatttgtttattctgtctttccccataactgaataaagaacactcactccatgaagtagagattttgtctctattgttcaccctgtagcacccagcacttaaacaggatttagcacctagcagccactcaataaccatttgtcgaataaacctaaatcgactttgctgtcttacctcctaaacctcccctcctccagaattctgagtttggtggccttcttcaacgttttcattaacacctagcatggacctctatctctagagttctcacatggtattataattgcctgtttgtgttgggcttcggccagaaa

SEQ ID NO: 93981 - DNA, 766 bp, Homo sapiens
agcgggtaaggctatggtaaatactaacattaagctctccttatgtgccacacacagttccttcaccaaaatgggcagaattttagctgaagactaatagtgaagcctagacattcatgcagaaattaaacaactcgaccattattagaatatagtaaacatatacatgttcaataccagcatcttcttttctcactttatgttttttgaatgtcattagatttacatatcctgctaacataacataaaaacaaaccttaagtttcaagaaattaacaattctagtttcatactatttacatgtttttcttattaactattagttatttcaaaatttaccttttatgtttggagataaaaaatatctaatagaaaggtagttttttgagaagaattcatttttattatttttatttttatttctttatcttttttttgagacaacttcttattctgtcacccaggttggagtgcagtggcgtgatgttggctcgctgcgacctctgcctcccgggttcaggtgattctcctgcttcagcctcctgagcaggtgggattagagtagcttgccaccatgcctggctaatttttgtatttttagtaaacatggagttttaccatgttggctaggctggtcttgaactcgtgacctcaagtgatccatcctcctcagcctcctaaagtactgggattacaggcatgagctactgcacctggctcttttttaattattttgaaaggctactttagttttcctagtaatcca

SEQ ID NO: 93982 - DNA, 381 bp, Homo sapiens
gacaaattaagaaaattagccagtttatctgcagtatacaagttcttcacaccaaaaccacacgagcccagaataagccatgctttcttagtatttatactgttcctttcacctataacttactttcatcacttcagttcttctgccatttttgtatggcttatacatctcagttattctctaagaagtcttcacacctcaaaactacactgggaacactttctataaggtcatattgttctttgtgctgccaaacccatcatagtgtctggaaatagttcattcagggatgtgttttactaatttttctgaaagttgaacttattcccagtagctagagcttaacacagtgcctaatacagagcaggcatttggtaaata

SEQ ID NO: 93983 - DNA, 378 bp, Homo sapiens
tgctgtgcttaaaagtaaattagttacttgccgtttgaatttggaagtggctggctgatggtgaattccagttggttttgtgtggaaagttgccatatttacactaccaacttgatgtttttctttccctcgtctccctcacgaagactgtctaaacggctagtaaatgatcttctgaatctcagtattattggagacatcatagagactggataaatattatatcaaaagtactttccggaatacttctaagtattttatgaaatttattttttaaaccagggtagccaatcttttggccatattggaagaagaattgtctcgggccacacataaaatacactaacactaaaaacagttgatcagctaaaaaaaaaa

SEQ ID NO: 93984 - DNA, 296 bp, Homo sapiens
tgagggataaagcaggagcatcatacatgagtcaacatccaaggaccacatagtatctggcacatctcagaagatgcctgtgttggccgggcacagtggctcatgcctgtaaccccagcactttgggaggccaaggcaggcagatcattcgagccccagagttcaagaccagcctgggcaacatggcaaaaccccatctctacaaaaaagtataaaaattagctggatgtggtggctcacgcctgtggtcccagttactcgggaggctgaggcaggagaatcacttgagcccagga

SEQ ID NO: 93985 - DNA, 312 bp, Homo sapiens
ctaatataaataatgccagtgttaacacaaaaatttgacttgaatgattacaatagcaaacttcaatgtttaccccatggaataggcagaaaatttcaagcacttttctaggccacctgagtctattttgagtaaggatccttaagttgatactcaagtaatgacattgatgcaatgtagaagactatgctaaaatttgtcctggcttctctccatgctatgggccatctgtaaagctttggagtctaggtcagatgtatgcgttgtctcctctttgctaccatttttgtacagatttctaatctaaataaa

SEQ ID NO: 93986 - DNA, 1813 bp, Homo sapiens
  misc_feature (824)..(824): n is a, c, g, or t
  misc_feature (1379)..(1379): n is a, c, g, or t
  misc_feature (1713)..(1714): n is a, c, g, or t
aaggagccccacacagtgccttcccccaaccatgagccaattctgtcacagtccgaaatagactttttctaagggtttcgtgtccctcttttatccgtcgcagtgtaaagggtctgatccgcagcctgcattgtgcgcgcaccgaggcaggagcggatgtcttctgaggagagcgctggctggggttgactctcaggctcccggctgtccgcccgcccacacgcagcgaggaggggcggagccctgcttccggaatgcttaaaatatggaattctagaacatgacccacattctgagtatcactccagcatctgccttgtgttccaagtgggaaaacgagaagtgcaaaggaacaggcagcgaggagggtagcgatttttgtctgcaaattgatggagctgatgcaggtgtcccctttgtaggcgagccctccattcactggctgctcccagcgctgcctggggagggaaacagctgtactgctctccgctgcaaaactcagatgtgctttatggcttgtgacaatagatttcctccccaccacgcttcactgggacacttcaattccagtaatatatgtctcagcccttctgtttactgcgccctgctcacccccctgggctgtcattagctgcaccaccatcaaccgtttcttaattgacctttttaaaatgctggacatcaccggctgcacgcagctgccacacattaaatttccagagcaaagagtccaacttggtagctggtgaattgcagccctgtaatatacttaataaatgacgtccacccagccttagtccctgagctgtcaggtgaacccgtgncacgtctcaactgaatggcacaacattcatgagaggaccataccccttctccctgtttcttgcatgaattaaggaagcagcggatttccaggatgatttcctgtcaaggttggctgcagagaattcctgccatcttggttcatgagatgagatatgacatcatcaaaggcagccaggtcccaggccgttcaatggggatcctgcattaggaagggtttgcacattaaaactgtgcctgtgccacacctctttccttcgtgtttgcatccctgccctgtgaagtaaaacagagtccaagatgcaaggagtagattgtgtgtggggtggtgaaaggacacccctggcagccaggcagagcatcagtgcctcccttcccaggtcaccagcttgggacctccttgtgagaggctctgatctccatcagcatcagggcccataggggattctgaactcttggaggatatttcatcccctccaagccttgccccatggaaagggctacacctcctgcaggaaggggtgccttttgttaacaggtattaatgggtacagagncaccatgcagcctaccagcacccttgctagcctagtcctcttcctgtgcttctttttgaaagatcaagaatgaagaggaagagatgaggagtgggggtcctttacctaaaggaccctcgtggttcattgcttctctttaactgactttttaaaaaaactccctcttccacactccttgctgtgattctgtcctaatcatttttcttgagaatgtcatgtagagataaatgtgtgtcacagtgaagccagaaggtgaattaacaactaagacaaatccagcatgctcttgcctgccctgcatatgtgctcatttggggaaggacggaggacacanngcatcgacacaaattctacagctcctcagagaacacagcagagactcagatgagctgtaaaatccattaaggaaaaataaatggcatgatttggaagtt

SEQ ID NO: 93987 - DNA, 327 bp, Homo sapiens
ttttctttagatcatactcctctcacacagcctgcagaggacacataggctttcaaagctaactgagctccaaaaaccagaagacttaaaagatcttgccttccggctgggcacggtagctcatgcctgtaattccagcactttgggaggccaaggcgggtggatcacaaggtcaggatatggagaccattctggctaacatggtgaaacctcatctctacttaaaatacaaaaagttagctgggcgtggtggcaggcacctgtagtcccagctacttgggaggctgaggcaggagaatggtgtgaacctgggaggtggagcttgca

SEQ ID NO: 93988 - DNA, 419 bp, Homo sapiens
ggggggagtctacccatacaaagcaatattattcagccataaaaacaaatgaaggcctgacacatgctacaatacagatgaaccaggcacaaagggtcacgcattgcagactccatgtgtataaaattctcagaataagtaaacgtagaggcagaaaacagcctggcaggtgccaggggttgggaatacagtcatgtgtcgtgatgtgtcatgactatgtgaatggacaccagagtattttttcggtgacaaaaatgtgttaaaagtagacagaagtaatagctgtgcaacattgggtatgtactaaatgctctgagtttttcactttaaagttaatggttatttttatgttatgtgaaattttacctcaaaacacaaatacacacagaaagagagaaatgactttttaagagcaaaca

SEQ ID NO: 93989 - DNA, 757 bp, Homo sapiens
actcaaactaatctttgtcatctattttcatgtttctacccactctatgttttagagttggaatgtattgtgactgaaagttacctaattatttgacctatgcaagaatattgaaacatctcttggtattgatctatttcacaagtcagccaatttcttttttggatatctttttctattagaatatttttcatctctggacgtggtggttcatgcctgtaatcccagaactttgggaggccaagatggggaaattgcttgaacccaggagttagagcccagccctggcaacatagtgagacttataaaatcttgacttattgagtacacctgaataataaatttatattctctcttgtcaatcatcaaggtataatgcatagagcagattttgtttctccatcaccaccttttagtgttttaaatagtagtgttgcctttctggttctgcagttttggtggaaattttccatccataacaaacagtcctgattaggtaattcataaaatttattattttctaattggaatattgctattcatacactaggttcatgtattttgttggtttatttgtttgtttagaagagtaactcatgcttattgccaaaagtttaggaaataaaagtataaagaagaaagtatgtattgcaagtccttactccctttaatctaaccaccattaatggtgttttctatatttatgtacattctttaacaaaagtggaataaaattatgtttgctattttggaactt

SEQ ID NO: 93990 - DNA, 171 bp, Homo sapiens
taagtactggctctgcccctctctggctgtgtggccttgggcaagttagtcaagtctgtaccttttctccctctgaaaatggggatagttatagtactaatctcatagggctgttgtgaggaaggaattaatcatggaaagcacctaaaagagtgcttggcacgtagcctt

SEQ ID NO: 93991 - DNA, 685 bp, Homo sapiens
caaaagtgctgggatgacaggtatgagccaccgcgcccaacctattttgtaacctttttttaggcagcagtttccaccattttgtttctgtaaattttcagtgcatttgatactctgatcatgttcacttttctccagttgtcccaaaaatcccctttatagatggtgtgtccaaatcagtttgcaatgcagagacacactttacatgtggttgttatgtcctgccagtcagtcccacccagcccctttgtttacgttgaccagtagaagagcctgggccaggagtcccgtggaatgattcactgtctggctctgtctggttgcattctcatgtggtgtcacttagctcattcctctgtcctctgtattttctgtaaactgaagttatatccaaggcgtgatgggtttcttggtgcctagaatagctagcaggtgtcggtgtgtccttcctgcggcatcccaccaccattagtggggccaaggcctattctgggatgagggggaagacagtgtgacctctccctcatatggttgcttatctcctcttgtgagtggaaaagtattatgtgagggttcccttggcactgtctaaatgccagttctgggagatctttttaaactacacaagaaaacttgtccatttgctgagaggaacttgatcttggggatagggcacttgggtaaa

SEQ ID NO: 93992 - DNA, 435 bp, Homo sapiens
acaggctgcaatcaaggtattgcccatgctgcattctcatctggtggcttgacagaggaagaatctgcttactcaaggttagtattatacttaccctcagcaataaaatacctaagaatgctttaactccgattatccttcctaacaagttataagcttttaatgtccaatattttggctccattttgttttttaaatcacccaagttgacattaataccatttatttacaaactgtttagatttatccatatgtgccatattctttgctcactattccgtcttgcacctcagaccttttgtcctggattattttccttctttctgaagtatattttttagaagttccttcattgaacatctgctcatagttaactctaattttttgttggataacatctttatttttccttctttcttgaaaaataatttctcc

SEQ ID NO: 93993 - DNA, 933 bp, Homo sapiens
  misc_feature (754)..(754): n is a, c, g, or t
  misc_feature (757)..(757): n is a, c, g, or t
ggtcccgggactgggaagaaacggcggccgggagggggctccgtgggaccatggggctcctgaccattctgaagaagatgaagcagaaagagcgggagctgcgactgctcatgcttggcctggacaatgctggaaagacaaccatcctgaagaagttcaatggggaggacatcgacaccatctccccaacgctgggcttcaacatcaagaccctggagcaccgaggattcaagctgaacatctgggatgtgggtggccagaagtccctgcggtcctactggcggaactactttgagagcaccgatggcctcatctgggtagtggacagcgcagaccgccagcgcatgcaggactgccagcgggagctccagagcctgctggtggaggagcgcctggccggagcaaccctcctcatctttgctaataagcaggacctgcctggagcactgtcctctaacgccatccgcgaggccctggagctggactccatccgcagacaccacatggtgcatccagggctgcagcgccgtcaccggggagaacctgctgccgggccatcgactggctcctggatgacatttccagccgcattttcacaagctgactgaaccaatccagatgcgcccagctagcagtccaggtccctcaacttcacaaacatacccatgggggttgcgagtagcggcaaatacacatcgccctctcacccagctggtgtgtattgtggccgggtgtctgggcacccggtccatgnggnagggtggctggtggtctctggccgactgcctgggtcacaaccacaaaagggcggcgggagggaggacagagccgaggggggccaccacccagtaaacggtggccaaaaagaaaaaaagtgcgggggcgagaattaaagggggcgcggagaagggggtgaggagagagaaaaaaggg

SEQ ID NO: 93994 - DNA, 646 bp, Homo sapiens
ggtcccgggactgggaagaaacggcggccgggagggggctccgtgggaccatggggctcctgaccattctgaagaagatgaagcagaaagagcgggagctgcgactgctcatgcttggcctggacaatgctggaaagacaaccatcctgaagaagttcaatggggaggacatcgacaccatctccccaacgctgggcttcaacatcaagaccctggagcaccgaggattcaagctgaacatctgggatgtgggtggccagaagtccctgcggtcctactggcggaactactttgagagcaccgatggcctcatctgggtagtggacagcgcagaccgccagcgcatgcaggactgccagcgggagctccagagcctgctggtggaggagcgcctggccggagcaaccctcctcatctttgctaataagcaggacctgcctggagcactgtcctctaacgccatccgcgaggccctggagctggactccatccgcagacaccacatggtgcatccagggctgcagcgccgtcaccggggagaacctgctgccgggccatcgactggctcctggatgacatttccagccggccaaactaacgctccccctcctccaccccagcctgctgctgctactgctgcccgctg

SEQ ID NO: 93995 - DNA, 302 bp, Homo sapiens
ggtcagtctttttaataggtgtgtgctggaatttccttgtaattgcaagttctatttctctattaactaatgaaattcagcattttaaatatgtttatttgccattcatatattttttttggtaaagtatctgcccgctttaaaattaaaaaaattattgacttttgagagtttgagaggatacaagtcctttcatttatatattctagatacaagtcctttatcagatatatgctttacaaacattttcttcccatctgtggattgctttttattcattttgaattagtccagtttttcaa

SEQ ID NO: 93996 - DNA, 405 bp, Homo sapiens
aaggcgctagcatctcctaggctaacagtacaatttcggctacctgtaattattgaattcccattaagcaactacactgggaatcctgttattaaccaatttatcacaccaaggaaccatgtaatcacagagtaatctaatctgagttcttgttaacaaaatgactcgactttatctgtcgagttgattcctgtttgcactccccattatgctgccctgggaatctgcaaccagaggcaggttccttggtagagggcacttatgagtctgtgagtgcccacttggaaacgcctgccagcaagttgaccctgaggtccgccccccagcccatctccccatctgtcacatgtgagttgcagtggatctgcgtgtgggatgacgcccgtgcaccagccaggcaacgtg

SEQ ID NO: 93997 - DNA, 722 bp, Homo sapiens
ttagctaatttttgtgtttccccaaactggttcttagaaatccaaggccttgacttttaaaacttgtctctgagttttaagggctcattttggaatgtaaaagataatcactgtttttcattgttttggtgttctacaatcatgatttggggtcatgagaaaacctcattgtcctggagtgaaaataatttgagttttgtgcttcaagatttcattccacttctttgagtatttggataaatgcccatgaattaagtaagaaccaatgagagccttagagtcatgatttctttatttaatttttcagctgcttctctttgcaaacaacaacaacaaaccaaccccaagcccacagatggcgttagtcatcctaataatacacatcaattaaaactgtgagtcgggatccagcctcatttgctttgagcaacaggtatattactgacgagttgcagatacattgacattttctaaatcaaattaatttttaaaggcactggagtagcttgcaatttaaaggtaattgatattaaccccctgaaataaagagttatttgtaaagaaaaaaaaaaaaaacaaaaaaaaaaaaaaaaaaaaaaacacaaaaaacacacaaaccacacaccaacaacaacaaagacacaacaacacacaccgacgacccaacacacacacagacacgacaaaacacacgaaacaccagacaccacaacaacaagaaa

SEQ ID NO: 93998 - DNA, 394 bp, Homo sapiens
gttttcatccagccatgtaatgctctcccatgctggctttcaaagttccatcatctactcgaagaagagaggaaggagaagacctagcaaaaccccaaggtatttagattagccaaagggagcatcactttgcttaagtggagtgaattgttttcctctagtcattctttcacgtgtaggtgactgttctcactgctaatgattatgcagctatggagatttcagcgaggagcccatccaccaagcctggctggcatttgagttatgatggaaatctggtgattttctgttgcagtcatttgttgttacaacgcacacagatttcactcatcgccaagtgatttcatgaacaggaatggaaacatcgttggcccttatcacagagaggtcctgg

SEQ ID NO: 93999 - DNA, 288 bp, Homo sapiens
aacccctgaccttgtgatctgcctgcctcggcctcccaaagtgctaggattacaggcatgagccacagcgcctggccgcctgttcttaaattcttaagtcacttacttgtaatgttttgatgtatttgttgattccttcaggtggctaattccatccatttgtatggctgttacttgtttcatgttatttccaggttgttggacaatacttcacagtaagccccatattgtacagactttggaaccaaatgatctagctttgaatgtggctctgctacttactagttc

SEQ ID NO: 94000 - DNA, 613 bp, Homo sapiens
tggaacctcagaaactaagaggatactagataacacagaatggaaagaattatgcagattttagaggaaactgtacattcctaggaggtcaagtccctgtggttgatttttttttgatatgttttttaaatgagtggctaatgtttcttttgcattggaggccagaccactggaacattaacatttcaatatttgaaactatgtttttcattcaatagcatgtctatagagcctaacacagcagtctaaggaagaggatatgcttagtgaatatttctaaatgatcattttattcattttcttttttaaatgtatttatgcagcacaaaaacagcataccacagtcgcattaggtgcttgaaataatttggagagcaaatcagttaaaatgactagaaaggaatgagacaatgtctgagataagccctgatattcccatttgccttgtccaaggtagacattgataattcatcacagtcctctttcctgctgagcctggatgcagcatcagaatcctcctcaatacagggcttccatcagccactaccaatcagctggagttggcagctatttccaaaccatttgccactgttggactagactgtatttccct

SEQ ID NO: 94001 - DNA, 153 bp, Homo sapiens
ttcatgtagagaataagaaaaaatatgtttattacctaatgatgttcaggtcattgatggtttcgatgactttttggccttagttgcaccactcagaatactggttagagtcacttggcatattcaaagtaagacagccttatgttgcgactg

SEQ ID NO: 94002 - DNA, 148 bp, Homo sapiens
tatgtgagactgggagtggatccttccccagttgagccatgagataactagagccccagctggccctttgactacaacttgtgagaggctatgatgcagaagctccagctaagccacacctgaattcctgacttacagaaattgcaag

SEQ ID NO: 94003 - DNA, 549 bp, Homo sapiens
ctttccctaccaaaatatcaaatctattttgaagttaatcccagatgttatatactttcatctgaaaatgtccccattcaaaaatactattttgatggtgatattagaggtacacgctttacaaactttgtgagctacagaagagaagccaaatttgccctatgattacaatattctactttcttatctctgggaagacatggcacccatttttttgggggggagggatggagtttcatgcttgtcacccaggctggagtgcagtggtgtgatcttggctcactgcaacctccaccttctgggtttaagctattctctcgcctcagcctcctgagtagctgagattacaggcaaccgccaccacaccagactaaaaatacaaaaaatgagccaggcatggtggcacgtgcctgtagtcccagctactcgggcagctgaggcaggagaatagcttgaacctgggaggcagaggttgccatgagccgagatcatgctactgcactccagcctgggcgacagggtaggactctgtctcaaacaaacccccaa

SEQ ID NO: 94004 - DNA, 327 bp, Homo sapiens
gtccttttctatttgagtgcttagagataacttaaaactaactctaccatgtcgtagatataatttttaaatttaggcgtctgatctatattattggtagaatattccctcatctgtaaaatggtgatgataataggacttccctcagaggcttttataggagtaaaaaaagataatggataatgtatgtaaagggcttattactatgcttagtgcatagtaaaaggtcaactaatagtggagggagaatggtaggatattggtagaagaaaatactctcttccaagcaataaataatctgtaaattctcagggtgatgtatatatt

SEQ ID NO: 94005 - DNA, 371 bp, Homo sapiens
tgaaacagtgtttgtattttgccttggagataaggacaaacatgagctggcaacccacaatctttattttcatcagcttgctcttcagcaggcctacaccgtcagcactgtgtgaagagcgaaatcaataaaaatcatctccctcggtgcaggaggccaacatgtgactgtttcttggctctggagcaagtatctgtcagtcagggtcaggaaggtttctactgtacttatctgggcaatctcttaccacagtgtaactgggcacctaggggggctctatagatggggaaatggaagctttgtggtgtcaatgccttaattcaagcagcctcagctatgcaattcacccaacttagaagacagcattaact

SEQ ID NO: 94006 - DNA, 381 bp, Homo sapiens
  misc_feature (27)..(27): n is a, c, g, or t
gggtgatctacaggattatccccgganctgggtagctgggactacagcgtgcacatcatgcccagctaagttttatatttttagtacagacagtgtttcaccatgttgtccaggctggcctcgaattcctgacctcaagtgacccgcctgcctcagcctcccaacgtgctgggattacagatgtgagccaccatgcccagcctcatttttctggctcttgaacacacttttctctttacctggatgccccagatttcttttgtcagcctaaggaatatgtactcctattattaagacccaactcaagtactttctcttttctctctttctctttcccaagccaagtccctcggacaggattgctcatgctctcctatgtcc

SEQ ID NO: 94007 - DNA, 233 bp, Homo sapiens
cccgactagcccgacagcatagcaagatgtactaatgaaactgttaacatatgtagcggtcctgtagcctggaataaactctatagttaatcatattttcctttcttttcttttttgtttctttttggagacgtagaagcaaattacaaaaactagccatactgaagggaaggagaattaggctccacttactgaaagggggctgcccaagcatttgtggatatattttaaaa

SEQ ID NO: 94008 - DNA, 1243 bp, Homo sapiens
gtctacacctcctcactctagcccaatccccctgtgacaccaaagagtgtcaacatggtggccagtgccaggtggagaatggctctgcggtgtgtgtgtgccaggccggatacaccggagcagcctgcgagatggatgtggacgactgcagccctgacccctgcctgaatggaggctcttgtgttgacctagtggggaattacacctgcttgtgtgccgagcccttcaagggacttcgctgtgagacaggagaccatccagtgccagacgcctgcctctcggccccttgccacaatgggggcacctgtgtggatgcggaccagggctacgtgtgcgagtgccccgaaggcttcatgggcctggactgcagggagagagtccccgatgactgtgagtgccgcaacggaggcagatgcctgggcgccaacaccaccctctgccagtgccccctgggattctttgggcttctctgtgaatttgaaatcacagccatgccctgcaacatgaacacacagtgcccagatgggggctactgcatggagcacggcgggagctacctctgcgtctgccacaccgaccacaatgccagccactccctgccatcaccctgcgactcggacccctgcttcaacggaggctcctgcgatgcccatgacgactcctacacctgcgagtgcccgcgcgggttccacggcaagcactgcgagaaagcccggccacacctgtgcagctcagggccctgccggaacgggggcacgtgcaaggaggcgggcggcgagtaccactgcagctgcccctaccgcttcactgggaggcactgtgagatcgccagactcgtgtgcctctggcccctgtcacaacggcggcacctgcttccactacattggcaaatacaagtgtgactgtcccccaggcttctccgggcggcactgcgagatagcccctccccctgcttccggagcccgtgtgtgaatgggggcacctgcgaggaccgggacacggatttcttctgccactgccaagcagggtacatgggacgccggtgccaggcagaggtggactgcggccccccggaggaggtgaagcacgccacactgcgcttcaacggcacgcggctgggcgcggtggccctgtatgcatgtgaccgtggctacagcctgagcgcccccagccgcatccgggtctgccagccacacggtgtctggagtgagcctccccagtgccttggtgattctgtgggccc

SEQ ID NO: 94009 - DNA, 220 bp, Homo sapiens
atatctgtatgccaaactagagacacgtgaacggcacaggtgaatggaaagcaagccaagttccccatctagcatatctgcaaatatgatcgagaatgatgggagcttttccaggcagatactgctaaacagggaaatcaaacatgggtggaatacatttattcattcgtctattataatcttatcaactcctaccatgcaaggtacttttgcttataag

SEQ ID NO: 94010 - DNA, 412 bp, Homo sapiens
tgcacgcagaagacagtggagtgacatcaagtgctgagagaaaacaaaacaaacctgccaacctgggatcctatacccaataacaatatctttcaaaactaaaggcaaaacaaagactttttagacaaacaagagctgggaaaattcattgctagttaacctgcactacaagagatggaggaagtgtgttgggcagaaggtgtatggtaccaggtgacatttggatctccacaaagaaatatagagtacctgcagtaatgtaaaagccatcgaatgtaaagacattgcatgtctaaagccaaaacaatgcaaatatattatgagatttagaacatgtaggaataaagcatatgacaataatagcacaaatcatagacaggacatggaaatgtaaaatgttatttagaggtag

SEQ ID NO: 94011 - DNA, 266 bp, Homo sapiens
agatagctggctgtggcaattctgacgtcacacacaggcaaggggtaaagtctggatttttatatcattatagtggttatgatgaattatgccatctccttcatttagcatggcagagtttgcctgagtttacacgatgagctttctgttatgaaccttgactctatctattgcataaagggaatttcctgatttttattatttatttatttagagccagggtcttactctgtcacccatgctggaatgcagtggtggtatctcag

SEQ ID NO: 94012 - DNA, 473 bp, Homo sapiens
gataaagtcatactctggcggtggagctgatactgacaaggataatgaacgtggagaaggagcacatcgcagggcaaagaccactgacctgaccagacggtggggaatccagtctgcagaccggacctagctcaaacttctgtatcaggttacagacgatggcagagctccttcactcattcattcgcacattcaatagtgaacttccacaacgtctgcagcccagcaaccactggcactcctggtaacgggtatctgtgccttcatttcttcttaagggaagtggccacctcctagctcagcccagatgccagcccacacattccatccaccaggtgacaatgattggttcagggatgagcacgtgaccaagtcaggccaatcagagctaacaagacccaattctggggtatctgttctgggctattgggaacccatctctctctatcaattcaggatctatctatctacct

SEQ ID NO: 94013 - DNA, 379 bp, Homo sapiens
aactcctgaccttgtgatccacccaccttggcctcccaaagtgctgggattacaggcatgagccaccgcgcccggcctaatttttgtatttttagtagagacggagtttcaccatattggccaggctggtcccaaactcctgacctcaggtgatctgcctgcctcggcctcccaaagtgctgggattacaggcgtgagccactatgcccggcactatgtgggaagattctaaagtgcattccagaggccagtgtccctcagaatttttcttcacagtgctgatcatggtgggtgtgatggttaattttaggtgtcagcctgactgggctcagggatgccgaggtagctgataaaacatgatgcctgggtgtgtctgtga

SEQ ID NO: 94014 - DNA, 300 bp, Homo sapiens
gttcttcctaagtttaatcttttccatgtggtttcattcatttatgaaaaatatgaccacacataccaatattcacccataagactcacatgtattgcaaaagtcagagagaaattttagggcacttctcaccattgctctttttcaggctagaggacaactgatcacacatactgtgtgcccctgcatatgcagctctgagaatacaaagtgagtagtaggagcttacgatctctacctagggagtatctcatcctctgccgcttctccctttttacccacactgacatcgtgtgtctg

SEQ ID NO: 94015 - DNA, 584 bp, Homo sapiens
aaagtgctgggattacaggcatgagccaacatgcccggcctcatttttctttattctttttgcttctcagatgcaataattttaaatgacctatctttaagttcacttattcttacttctgtttcttgagtctctcattgaatccctctactgaatttttaaattgtcattttatttttcagctcaaaaatttttacgtttctttattatattttttttaacttatttccattatttctgtttttctcttggctttagcataaaacagctatgttattgtcttgtaagtaagatctttatatttctacaggaagattatctggagacttaatttgttattttaaaattgactttgtttttatttttttctgtttctttgtatgccttttgatcttttgctgaaaactgggtttttgaaaaaacatacaccttcccagtctttcaggactggcttcatgcattagaccatcacacattagcaggtcatgttctgtgcctgaggtcagctcagtataaaggcttgatgtattcttgggcatttctagggatgcgtgctttccggatgtgtgtgtgcgcgtatgagt

SEQ ID NO: 94016 - DNA, 432 bp, Homo sapiens
agggctggagagggatgatgagaacaggcaggtcccctgactcctgccaagcgtggctgccccaccatgccgcctcgttccagttgtcttccctttcatccttccacatttccagtcattcatgtccatcctttagggacaacagatactagaaaaaaaatcaacaaaaaaaatttttacatatatttttgaagtctccagaccaaatgctaacacctgccacctaaaggtgagtacctgctgcccattcttcagcagtgtaaatttactaaagggtctttggcgtttgtgtgtttggagaaactttagtcgaggacaaatccttattattaggttaaatatgcttcttatgtgattataatagttgcttaccctgaatgagagattatttatactaagaaaacaataaaaactgtcaaagcctaaaaaaaa

SEQ ID NO: 94017 - DNA, 258 bp, Homo sapiens
gaaaatttaattgccaaagcagtatagcacagtagttcaaaatagaactgtatttgtatataatctctgccacttaaaaaagatcttcagtttttttttaacgtttctgaattaattttcctctttttaaacatgcaaaaatacttccacctacatcccacatgtaaaggctattacattgtatcagatagtttctttctctggtttccccttaatcacatttctgttctctttcatatactctggtttatctgattt

SEQ ID NO: 94018 - DNA, 649 bp, Homo sapiens
atgtttctgatgcaggaatacagctatctaggaacaaaagggagatgagactacagaacagactgtgaaatttcttaaaattattaaatgatcctaagactgagcacaggagtggatgatgttactgcagattgttcttaataagggctttaaaagcttaatgatttattgattggctctgcattaatgacgtgcccttgattatgcatgtgtaaataagagggctgatttatgagggtacaattgtatctttcagatatatttgtccaagtctacatctttaaaataaatggaagcaattatctgaatatttcaagggagggaaccccaccttcccatcccccacccccgatttgagggaagtctagtatgttaggtgaagagaaaaaaaaagaaaagaggaagctctaaagggagttaggaacaaaacaaaacttccgttaagaaatatccctgcttctcttatcctaagagaagaaaaacagattcccaggtgccaccggggagcaatgttttacttaaaaaaaaaaaaagaaaaaggaaaaagaaaaacctgtaagaagttgtcctgttaaatcaacgacacatggagtctgaaggaaatcagccttttcgttacaaacaggtttaaaaagccctggagaagaga

SEQ ID NO: 94019 - DNA, 247 bp, Homo sapiens
agattcgtctctgggaagagatttacccagtagagatcagagccggacattttattgttttccaagtttgaccttttcatttcaggagcatcaagcatgaagagccaatccagtttaagtgtgggcatcttgagagtaacactgtgtcttgttccttcttgtgttcctgctattgactgcaatgctcagtaaatgtttcaggcatccacgaatgaatgattgaacaaatcaacaattaatcaattaa

SEQ ID NO: 94020 - DNA, 263 bp, Homo sapiens
tacaatgtccctgacgggtggtgaatcaagccctgctttaacacctgatggtgacaggtgctcattccatggggcagtgtgttctgcagatgggtgtggaaggtgctcagctcctgctgagagaagccctggtggctctcactcactgcttttagcttctaaagcaacacattagaagtctactcacttctacatgacagcccttcaaatcaatgtttggaaacaacaatctggtccttcttcagacatccccgctccttgta

SEQ ID NO: 94021 - DNA, 466 bp, Homo sapiens
ggctgggcacctaatgggagagatttgctgaggctcaaagcatgatagttccttaggggaagcacaccatgttggcagaggtactgggtcagatgtcttgccatcccattgactggaagacccagtcctgagaagcaaagccaagaccctggggccctggaggctcccacaccttcctgagcccaggactaagactccatgattttcctaataaaccagatcactccccagggccagggagcttctaaaggggcctcctggccttcccacctgggctgggctttgctggtagaatccaaacctccaatgcctgctgaacgtgaaggcaaactctcggctccactcagctcagtgtggcagaaacgaaatgcctccttttcccctagccctttatcccttcctttcttactttcctgtatcccccacattgactaccctttctcctcgggcacttaacaccagtcca

SEQ ID NO: 94022 - DNA, 221 bp, Homo sapiens
gcactactaagacactgaccctgtactcagaactgtaagctttcctgggttggaaaaggctctgactaatttgcacattaaaaagcacacagacagaggaacccacctttttttccctttcccagtcaccctgggagagaccgtcttctcttcttcattcatgtgtggaatcccaattaagcgtagtaaacaaaggaaacttcttacattgtgattttcct

SEQ ID NO: 94023 - DNA, 558 bp, Homo sapiens
ggcagacagggctctgaggcgcgcctgattggacaataagtaggatgccatcctggcacccctaactggatataacttcaggctccgcccctgtggcttaaggggcagaacacttaagatgtttcaacagggatccaacgtggttctagcacacaccgtatgcagtggtgtgccttcctccaggttccagatacccatgtccaaagtcagcatcacatattacatgcattaaaatttttaaccaatgcaaaaatgacaataagccatacctatatctttacggggaatcattattgttaacctcaaaaaggcaggactgtctatattgctatgcactatctacatccacacttaagcagttcctgaaatggtgctgaagatgtataagaggtggaaatataaatgaccgatggtgacatttcttcactcactgatgttgccaccctccacagagaacatatacacacaccctcagcttccgtattatctcacaccatcatttactttccttcaaagtgcttatttccttcttataaaccagtcttaccattttttcaa

SEQ ID NO: 94024 - DNA, 260 bp, Homo sapiens
acactgtaccccgtgaatacatccaacgattatgtgtcaattaaaaataaagtaaaactttacaaaatcaaatgagctactctgaagcatttgcaatgacttcatagtttaaactgggatagaatctcaaactagaaaagggcaaggagcctgttctcactaaccatgtcactcttggagcagatggcctttcctgaaggctgcgacattttttgcatatccctttatttcaaaggctgttatggtcatgaaatggaata

SEQ ID NO: 94025 - DNA, 158 bp, Homo sapiens
tgttttgtttttgtttgtttgtttgtcttttaaagcaaaccacataaaaggatttacaccaaaaagtcagtctctcccatccatggcccagttcctttcccaaaggcactcaaccgcagccacgggttccatgcagaccgtgtagagaatcatagatg

SEQ ID NO: 94026 - DNA, 306 bp, Homo sapiens
agacattccaaagatgcaatcaacccaaatctgttattatttgatatgggtggctgggcagagggaagggtcaaaaaggctcccagcttctagttcagtcccggggaagtgatagagctattcaaagaagttgtagtgagagagagggaagatgacagtttggttttagttgatgtgtacagaaatacgggtgcccaggagcccacaaaacggccagaggagaaatgctttcaaaggcaagctgcagggctccttggttttgtcacattcctcattctggggctttgcggttttgtcttgggaatc

SEQ ID NO: 94027 - DNA, 399 bp, Homo sapiens
ctgggtgtcctacaatttaattcaattctgacactaactattcagttaacacagactccacaggttgatgtctcagtcccacaagactgtcccgagttcaaatgccaatctcaagtagtgagtccccaggtaatccacacttctgtgcaatttgactaggggttcacatgcaaattaagggttcacatgaccccttcctcagattcaataatttgctataacagctcatgtatttcagggaaacacttttgtttactggtttattaaaaaggatattgtaggctgggcatggtagctcatgtctgtaattccagcactttgggagtctgaggtgggtggattgcttgaggccaagagtttgagaccagcccatgcaacatggcaagaccctgtgtctac

SEQ ID NO: 94028 - DNA, 340 bp, Homo sapiens
tcacatttgccacaaggagattaataacgcgatgtgtatgacagcctgagaccttgattgaaattatgctctttctctctgagctgtgaatggggcatttggggcccttttgtttctggggggtcatgagaatcatgggaaagggagaggatctgtgtagtgtgacgggtaccgtgtggtggcgtccccttccaggccaagacccactggagacccttctccacaggcctgggcttttctgggcgctcctgccacaggcgacagccctcaatcgcagctcctgtccccgtcagtcccttgtgagtgaggggcttgcccagctgtgctccttctcattcaa

SEQ ID NO: 94029 - DNA, 639 bp, Homo sapiens
gtttgggccatttgtcgccatgaagcctgactcttgaaaaaaagaaattcttagccaagtctctaaatgacgctgtaaattaaggcaaaatcaaaaccagaactcaagcctacactacagtaaaaaccatcacatcatactctatttcttctggattatttcttatgcttctctaattttcatttagctcttacaattaagataatttagaaacaatcatgagtactttggaaaccttaacttttatttacagaggagagaattaaagagttcatcttaggaactaaaacagctagtagaacctagagtgtctatgtagttttgacttctacttcattattataaccattcatgagtgaaatctacatatattacaactgtcattttatgctttcctgttaaaagaactttaattcctctatgagacttgcaaaaattaaactatctttctttcatggcatcaatttgcaatgtacttttatattgaatatctagaagagtaacaagtaatagctgataataataagagtataacaataattgacaagttaaagcttttactttgtactaggctctgtgctaagcagtttatatgcattgtcacattgcaagatacagacaataaaatgaaagaccaga

SEQ ID NO: 94030 - DNA, 151 bp, Homo sapiens
tccatgggccttaaaaagcaggctaatttactgccatgtttgcttttagctctgcatgaaggataaagaccctcacagtgaaacagctctgtaagtactctaggccgggaccagtgctttttaaataagcagatgaatagcagtgatatgc

SEQ ID NO: 94031 - DNA, 452 bp, Homo sapiens
tatggaaagagctattaagaatgaaaagtaagattttgttaagtcttctccttgaagtatatgttaattaattgagatttgttccaaataggttggtaatcatttactgtttagtgtgttttttttctaggtaggagatacttgggtctcacaaattggtgcaaagccaaaaaaaaaaaaaaaggaagaaacaacagagtaatcaattttttaagttgcccaggaagcatataaaaaataccagttatgccaggtgtggtggctcctataatcccagcactttgggaggctgaggcaggcagattacttcaggccaggaattcaagatcagcctggccaacatagtgaaaaccatctctactaaaaatacaaaaagccaggtgtagtggcatgcacctgtaatcccagctacttgggaggctgaggcagcagagttgcttgaacctggtagg

SEQ ID NO: 94032 - DNA, 1125 bp, Homo sapiens
gaagagcagtgtcataatgcaaatgggaagatttcttctcttagtaattttatttctgccacgtgagatgacaagttctgttttaactgtgaatggtaaaactgagaactatatcctggatactacacctggctcccaagcatctctgatatgtgctgttcaaaaccacaccagagaggaagaactgctctggtaccgagaggaggggagagtggatttgaaatctggaaacaaaatcaattccagctctgtctgtgtctcttccatcagtgaaaatgacaacggaatcagctttacctgcaggctggggagggatcagtccgtgtccgtttcggtggtgctgaatgttacttttcctcctctcctaagtggaaacgacttccaaacagttgaggaaggcagtaatgtgaagttggtttgcaatgtgaaagccaacccccaggctcaaatgatgtggtacaaaaacagtagtctcctcgatttagagaaaagccgtcaccaaatccaacagacaagtgagtcttttcagctgtcaatcaccaaagtcgagaagcctgacaacggaacctacagttgtattgcaaagtcatctctgaaaacggagagcttggactttcacctgattgttaaagataaaactgtgggtgtaccaatagagcccattattgctgcatgtgttgtgatctttctgacattgtgctttggactgattgctagaagaaagaaaataatgaagctctgcatgaaggataaagaccctcacagtgaaacagctctatgagaaagctgagatgccatcgaatacagagagagttttgcatcaggacctccacaatttatgtagtcccatctgtatttattgctattattaaattcactcctgtcactcctgtttcattaatcacttaacagtagttgttaggactaatttgatacacttgtggaacatttttatggaaagagctattaagaatgaaaagtaagattttgttaagtcttctccttgaagtatatgttaattaattgagatttgttccaaataggttggtaatcatttactgtttagtgtgttttttttctaggtaggagatacttgggtctcacaaattggtgcaaagccaaaaa

SEQ ID NO: 94033 - DNA, 402 bp, Homo sapiens
gctgcagaccgtcggctgctatggctgggaagggataggtaggaagcagaataggctacagacaagcggtggggtggcctgtccagtggggaggggatatttccatagtgtcagatgttgggccatcaccccacagaaaggaatgtggtgaggtcactgatcacagcctggaagaaatgatagccctcactagcccagggcctcacaccacatccagtggttttctgtgtgagactgtagaatcctgcattgaacttaacctccagctgagtcaaagaccgtagagctttcctccttctagaagtggagctcatctgtctagtgccattggttggttctttctacggcctacccatgccctagcctgcagtgggtcagctcttacagggtgccctgacgttg

SEQ ID NO: 94034 - DNA, 444 bp, Homo sapiens
tttggccaaaacctattacaaaagccctcaaagcagcctcctgtgatgtggaagctccatttctctctggagctggaatctcccggagtgactacctggggcactgggttctgtgtcagcaggttccagcattcagaaccactggcagctccgagggcatctttgagcccctcagtaacttggcatcctttagcctacaagttactccatctctgaaagaactaattctttggaagacttggaaagtacagtggctacagcttctacttctaaagtctgtggctaggccgggtgcggtggctcacgcctataatcccaatactttgggaggccgaggcaggcggatcacctgaggtcaggagtttgagaccagcctggccgacacggtgaaaccctgtctgactaaaaatataaaaattagccaggcatggtggcgggcgcctg

SEQ ID NO: 94035 - DNA, 381 bp, Homo sapiens
ggagcaccagagatgaatagccccaagtgctccctctttggggttcccaaggcaccctgtgcctgcttccctcagaggaccttccaatccatttgccccgcaaccctggctgctccgacaggggagacttgtctcccttgttcccctcaggatccatagagtggacagtaaaggtgctcagtacatgttggctgagctgaactgcatacatgtggcccccaggttcctggtctttatggacgaagggcacaaggtggaggggggatggggggatgctgctggaggtctcagtgggtgcagacagccctgccttgaggatggcttgacctgggattgacaaagtgtgtctgctgaaatgctgaggtccccacgtgtgaatgg

SEQ ID NO: 94036 - DNA, 923 bp, Homo sapiens
gaataggcctttgaggtctgggattctagcagtctcctttctggtttccttccctccccatcatcactccagtcccccacaaatccatgtgtctgggctaaaagagatgttggcccaaaagagatgttggcccttaactggtgagttgatgtagacaggacctgtgatgcttcctgaatcagtctgtgaggcattgctagtgaatggtatctgtggttgatttcctgagtgagcccttcccatgagagtgtctcctcgagtgtccccacaggccgatctttcatttgtttctgctttacctctggcttcctggaacagttctgttatgtgactttatagcagcgctgagagctgatggtaagccttctgagacacagaggcttgggtttttacgtcagtggcccttgtaggccaagggagtgaaaagtaaaggaattgagataaaatgctgtccttgccaaattgtggtttctgctttatctttcaagaagtctccattttctcttaagtcacagttcccagaggtgcatgtgggggttccagtgacctttcatgtgtggttcctgtctcagagaatggggtgcaaaaagcccagcgtagttaagcttttcagattttatattctgtgctttattacagtcatacaaattttgtaacccctgttaggggctttattaatgtatttatttgtaatttagacttacacattgatggcagacactttcacttttagttttggtagcctctcagcttcctgtctgaaaagttccagacttactagtttttgttgattagaaatcacatctgttgcttcctaagggccaggaaactcacccttcccatcagatcacttgagtcgttgttcctctcattaagctgtaatctgtctcctggtctccaaataaagacacaaacaccgaaaa

SEQ ID NO: 94037 - DNA, 693 bp, Homo sapiens
caaatagagaattgatagattttaggtctttaaggtaaataatacctttaacttacaactttgagaatgtggagttttggagcagtatattgttttacctgttgtgaactgacgtagcagtttatcatgcttgaacctgccattggttaaggttctttaagcttctgtttcttgccaggcagacctcggcaggatctcactaaaggcaggagaaaaaaagctgtgtgtatattgcagagttatagttttggtccatagtttcataacagtagacattcctacatgaaattattttagatggaatgtatatattccataattctataatcaaaatttcttagaataaatttttttccatctaaaacttgcagtatgaaaccaaagcttttcaataatcttttgttttctttttaaacattttttatttttaattatgggtaaataatagttgtacatatttatggggtatgtgtgatatttttatacaagcatacaatgtgtgatgatcaaatcagggtaattgggctatccattaactcaggcatttatcatttatttatgttaggaacattccaattccacttttttagttattttgaaatatgtgatagattattgttaactatagttgccctgttgtgccaccaaacactagatcctgttccttccatctaactgtatttttgtacccat

SEQ ID NO: 94038 - DNA, 638 bp, Homo sapiens
agctagtttaaaaaactcataggaagatcaatgaaactcccttgcagaggttgtaggagaacctgcttctgtaaattacagcactacacagtttccttagcattatagaaggattttcccaggacaggattttaaaatgataaacgctggcttattttagagggttactgttgtctcttgcgaaatctttttactatctggccatctaggcattgagggccaggattattaaccatctttaactgtatgcatacagatgctactcacctgtgcccatttgagaagaactttacaattctcttttgattttgttgttcagggtttacactgaagctactgttttctctatctacagcatcttaacatttatgatatgtctcaacccatctgaagcccagaacttttgttctttgtcttttctggataatgcctgcctgtctcttgagtatccctgtgacccacattcccaaagcagatatcatgtacatcacatagattatattttaagacagaccagtctgcacagatctttctgattttatggaaatacatccaaccatttttacatgatgtgatggcaaacttggaagaaacttaattttatttgtccgtgtgagactttttatgattttccccat

SEQ ID NO: 94039 - DNA, 475 bp, Homo sapiens
gagaattcgccactaccaagctaccacaacaagaactgctaaaagggctgtaaatcttggaacaaatcctggaaacacatcaaaacagaacctctttaaagcataaatctcacaggacctataaaacaaaaatacgatttaaaaagcaagaacaaaaaaccaaggtacacaggcaacaaatagcatgatgaatggaatggtacatcacatctcaatactaacattgactgtaaatggcctaagtgctccacttaaaagatacagaactgcagaatggataagaactcaccaaccaactatctgctgccttcaggagactcacctaacacataaggactcacataaacttcaagtaaaggagtggaaaaagtcatttcatgcaaatggataccaaaagcaagcagaggtagctattcttacatcagacaaaaaaatctttaaagcaatagcagttaaaaaagacaaagagggacat

SEQ ID NO: 94040 - DNA, 253 bp, Homo sapiens
cctcttctttttttttaagacaacctttttaaacataaagactatcacccagcactgtccaataggaatccctaggatgatgaaagtgttctgtatctgtgctgtccaacacagtagccactaactattgaacatttcaaacgtggctgtcgtaaggaaattaaaatttcaattgtatttttctttctttttttttttttgagacggagtcttgctctgtcgcccaggttggagtgcagtggcgcgatctctg

SEQ ID NO: 94041 - DNA, 204 bp, Homo sapiens
aaagtactgatcataacttgtagatgaacatacctggaaaggaagaaactagcacaattccctcccagtattctagaaggcggtgatgagaatctcccagagtggcaacagtgagaagggaaagaaaagagtgactgagtgacattgacaggagggacaagagggcagtggaattaaagcagccagggttgaagcttgtgatgc

SEQ ID NO: 94042 - DNA, 691 bp, Homo sapiens
agcggaaaaaaacttaaagacaataatgagagagaaaaaaagctggctagtgatttctcctgtagtggatgctgtggttttccacctagtctctctccataaccttctcagggctgaagctctcatttctccagtattgtgggtgttggcagctgcctgctcttagctttctcaggtgttgcctaaagccaaagacaatcacccttctgaggtcatacttccttcctgtgtcccatgactggcctgtgtagaacactgtgaagggcccacctgattccagagctccctacggaatgaagtgaggccttggccttgactgccattcagcttatccttttaccccaggatttctcaaattcagcactattgacattttgacctggatgattctttgttgtggtggccactctgtatattacagggtatttagcagtgtccttggcctctatccactagatgccagtatgtctccagatgttgctaaatatatcctggggttccaaaccttcccagttgagaaccatgatgcaatcctgccattttgacagtaccccctgaggcgctgatcctaagagcattccccaataaacttcctgcatacaaatcaccagatctgtagcgcacgcaacaaattcagttcactcaataaacacatgtttatttattagtaaagtatacctgtactactgta

SEQ ID NO: 94043 - DNA, 380 bp, Homo sapiens
caagactgaatggaaatctaagaagctactgcttgaaatgtcattcttttgcgataaagatgtggttggctaagaaaacatggccagatgtggctggtcacatgccatgaaggagaatgtaatcatgaaactgtggaaggatgtaacagggaaataggattctctagcacatacctttggctgctgatgttgtaatgtgtcaataatcccaggtcactcagttgtaattccagagaagtcacatttccctaccatggcactatcaagcagaaacttaacagtctgccccctattatctcctgcatttgtcttaggactctttgaaggcaggctttgtgctttcaatccccagtactcagcatctcacctgtccttggtac

SEQ ID NO: 94044 - DNA, 366 bp, Homo sapiens
tccagttccatctttctcatatccagtttgtacttcacacatcagacagaatccccatttacatttcctgagagcccccagcccacattatactacagcatgttcattcgaaccacaaagatttttggagcagcaacaggatctactttaggttctgggtatacaaagacaaataaaacattgtcttacactcaagtaatatggctaagtgagggagaaatgtctaactagttaaaagacaacaggcattttgggagaaagcatggctgtgctttgtgaagtcagcctcaaattgcagatcccttgttatttatctaccattcaccaattttcctgaaccaattggtcacaagcacaagtatttag

SEQ ID NO: 94045 - DNA, 237 bp, Homo sapiens
atttctaatcaagacttaggaaaatttgggatatttccatagggtaagtaagaaggtattttatgcagaatggaaaaatgactattttattactttgaaaagtacagtaggagtattagaactgaaatagtgctgaggaaaacacaactttctattttagaaaatcatttttaaagcctttttcacattaagtaaaaacccagaggaatataatccagatattttcatcgtagctta

SEQ ID NO: 94046 - DNA, 1412 bp, Homo sapiens
agcggggatctaaatgcccctctagccctcggtgccaatgccttgctcttcgtcggtgtgaacatgtatggggtctttgtgcggattctgactgagcgttcacagaggaaggcgttcctgcaggcccggagctgcattgaggaccgactgaggctggaggatgagaacgagaagcaggagcggctcctcatgagcctcctgccccggaacgttgccatggagatgaaggaggacttcctgaagccccctgagaggattttccacaagatttacatccagaggcacgacaatgtgagcatcctgtttgctgacatcgtgggtttcacgggcttggcatcccagtgcacagcccaggagctggtgaaactcctcaatgagctcttcggcaagttcgatgaattagccacggagaaccactgtcgccgcatcaagattctcggggactgctactactgcgtgtcgggcctcacccagcccaagactgaccatgcccactgctgtgtggagatgggactcgacatgattgataccatcacatctgtggctgaagccaccgaggtggatctgaacatgcgtgtgggtctgcacacgggcagggtcctctgtggtgtcctgggcttgcgcaagtggcagtacgacgtgtggtccaatgatgtgaccttggccaatgtcatggaagccgctggcctgccagggaaggttcatatcacaaagacgaccctagcgtgcttgaatggggactacgaggtagaaccgggttacggacatgagaggaacagtttcttgaaaactcataacatcgaaaccttttttattgtgccatcccatcgccgaaagatatttccaggcctgattctctcagatataaaaccggccaaaaggatgaagttcaagactgtctgctacctgctggtgcagctcatgcactgccggaaaatgttcaaggccgagatccccttctccaatgtcatgacctgcgaggacgatgacaaggttcagatccatccctcactgagtggcctggatgtcctcctggggttttggtctcccaccctgcaacggggacgactgtgcacatagcttcaggtcctgcccaacagccactgtcaccagtgctgcaaggatgagctcctgccatcagcccttatcccccagggcattcacgccagctctgttcttctctcagcactctctcctgatcgtaaacataattgattatggaaaatatggagaacacaaagatgcacaagggagaaaatgaaaagcatttatctggaatcctaccatctcacaaaaaagctatcatgaacattttgttccttccagtttcttaagtttgtgtgtctgtatttttttaataaacttgactggatggtaaaaaaaatgtattattttaaacctaaggcggtcga

SEQ ID NO: 94047 - DNA, 2955 bp, Homo sapiens
  misc_feature (2763)..(2764): n is a, c, g, or t
  misc_feature (2903)..(2903): n is a, c, g, or t
agcggggatctaaatgcccctctagccctcggtgccaatgccttgctcttcgtcggtgtgaacatgtatggggtctttgtgcggattctgactgagcgttcacagaggaaggcgttcctgcaggcccggagctgcattgaggaccgactgaggctggaggatgagaacgagaagcaggagcggctcctcatgagcctcctgccccggaacgttgccatggagatgaaggaggacttcctgaagccccctgagaggattttccacaagatttacatccagaggcacgacaatgtgagcatcctgtttgctgacatcgtgggtttcacgggcttggcatcccagtgcacagcccaggagctggtgaaactcctcaatgagctcttcggcaagttcgatgaattagccacggagaaccactgtcgccgcatcaagattctcggggactgctactactgcgtgtcgggcctcacccagcccaagactgaccatgcccactgctgtgtggagatgggactcgacatgattgataccatcacatctgtggctgaagccaccgaggtggatctgaacatgcgtgtgggtctgcacacgggcagggtcctctgtggtgtcctgggcttgcgcaagtggcagtacgacgtgtggtccaatgatgtgaccttggccaatgtcatggaagccgctggcctgccagggaaggttcatatcacaaagacgaccctagcgtgcttgaatggggactacgaggtagaaccgggttacggacatgagaggaacagtttcttgaaaactcataacatcgaaaccttttttattgtgccatcccatcgccgaaagatatttccaggcctgattctctcagatataaaaccggccaaaaggatgaagttcaagactgtctgctacctgctggtgcagctcatgcactgccggaaaatgttcaaggccgagatccccttctccaatgtcatgacctgcgaggacgatgacaagcggagggcattaagaacagcctcggaaaaactcagaaaccgctcatctttttctaccaacgttgtctacaccaccccgggcactcgcgtcaacaggtacatcagccgcctcttagaagcccgccagacagagctggagatggcagacctgaacttctttaccctgaagtacaaacatgtcgaacgggagcaaaagtaccaccagcttcaggacgagtatttcaccagcgccgttgtcctcaccctcatcctggctgccttatttggccttgtctaccttctaatattcccacagagtgtggtcgtcctgctcctgctagtattctgcatctgcttcctggtggcctgtgtcctgtacctgcacatcacccgggtccagtgttttccagggtgcctgacgattcagattcgcactgtcctgtgtattttcatagtggtcttaatctactcagtagcccaaggttgtgtggtgggctgcctgccttgggcctggagctccaagcccaacagttccctggtggtcctttcgtctgggggccagcgcacagccctgcccaccctgccctgcgagtctacacaccatgccctgctctgctgcctggtgggcaccctcccgctagccatatttttccgggtgtcctccttgccaaaaatgatcctgctctccgggctcaccacgtcctacatcctcgttctggagctcagcggatacaccaggactgggggtggtgccgtctccgggcgcagctacgagccgattgtggccatcctgctcttctcctgtgcgctggccctgcatgccaggcaggtggacatcaggctgaggctggactacctctgggccgcacaggcagaggaggagcgagaggacatggagaaggtgaagctggacaacaggcgcatcctcttcaacctcctgccggcccacgtcgcccagcacttcctcatgtccaaccctcggaacatggacctctactaccagtcctactcccaggtgggcgtcatgtttgcctccatccccaacttcaatgacttctacatcgagctggacggcaacaacatgggggtggagtgtctgcggcttctcaacgagatcatcgccgactttgacgagctcatggaaaaagacttttacaaggacatagagaagatcaagaccatcgggagcacctacatggccgctgtggggctagcgcccacctcggggaccaaggctaagaagtccatctcctcccacctgagcacgctggcggactttgccattgagatgtttgacgttctggatgaaatcaactaccagtcttacaacgactttgtcctccgagttggcatcaatgttggccctgtggtggctggagtgattggcgctcgcaggccccagtacgacatctggggaaacacagtcaacgtggccagtcggatggatagcacaggggtccagggcagaatccaggtgactgaggaagtccaccggctgctgagaaggtgcccctaccactttgtgtgccgaggcaaagtcagtgtcaagggcaaaggcgagatgttgacatactttctagaaggcaggactgatggaaacggctcccaaatcaggtccctgggcttggatcggaaaatgtgtccatttgggagagctggccttcagggcagacgtccccccgtgtgccccatgcctggcgtctcagtcagggctgggctccctccacactccccaggccagtacctgccctctgcagcagctgggaaggaggcttagtggagcccacgtggnnctctggggtgcacatggggtgggaatgctccgggggtgacacaggccacggtggctccagccaggaccagccagaccagcagagcagggagccacttgccagggtggaggaggagcattgtccaggcatggcctgtgcncgagggccaaccaccgagcaggcacagcacagcagtgactcggtgaggggag

SEQ ID NO: 94048 - DNA, 1875 bp, Homo sapiens
agcggggatctaaatgcccctctagccctcggtgccaatgccttgctcttcgtcggtgtgaacatgtatggggtctttgtgcggattctgactgagcgttcacagaggaaggcgttcctgcaggcccggagctgcattgaggaccgactgaggctggaggatgagaacgagaagcaggagcggctcctcatgagcctcctgccccggaacgttgccatggagatgaaggaggacttcctgaagccccctgagaggattttccacaagatttacatccagaggcacgacaatgtgagcatcctgtttgctgacatcgtgggtttcacgggcttggcatcccagtgcacagcccaggagctggtgaaactcctcaatgagctcttcggcaagttcgatgaattagccacggagaaccactgtcgccgcatcaagattctcggggactgctactactgcgtgtcgggcctcacccagcccaagactgaccatgcccactgctgtgtggagatgggactcgacatgattgataccatcacatctgtggctgaagccaccgaggtggatctgaacatgcgtgtgggtctgcacacgggcagggtcctctgtggtgtcctgggcttgcgcaagtggcagtacgacgtgtggtccaatgatgtgaccttggccaatgtcatggaagccgctggcctgccagggaaggttcatatcacaaagacgaccctagcgtgcttgaatggggactacgaggtagaaccgggttacggacatgagaggaacagtttcttgaaaactcataacatcgaaaccttttttattgtgccatcccatcgccgaaagatatttccaggcctgattctctcagatataaaaccggccaaaaggatgaagttcaagactgtctgctacctgctggtgcagctcatgcactgccggaaaatgttcaaggccgagatccccttctccaatgtcatgacctgcgaggacgatgacaagcggagggcattaagaacagcctcggaaaaactcagaaaccgctcatctttttctaccaacgttgtctacaccaccccgggcactcgcgtcaacaggtacatcagccgcctcttagaagcccgccagacagagctggagatggcagacctgaacttctttaccctgaagtacaaacatgtcgaacgggagcaaaagtaccaccagcttcaggacgagtatttcaccagcgccgttgtcctcaccctcatcctggctgccttatttggccttgtctaccttctaatattcccacagagtgtggtcgtcctgctcctgctagtattctgcatctgcttcctggtggcctgtgtcctgtacctgcacatcacccgggtccagtgttttccagggtgcctgacgattcagattcgcactgtcctgtgtattttcatagtggtcttaatctactcagtagcccaaggttgtgtggtgggctgcctgccttgggcctggagctccaagcccaacagttccctggtggtcctttcgtctgggggccagcgcacagccctgcccaccctgccctgcgagtctacacaccatgccctgctctgctgcctggtgggcaccctcccgctagccatatttttccgggtgtcctccttgccaaaaatgatcctgctctccgggctcaccacgtcctacatcctcgttctggagctcagcggatacaccaggactgggggtggtgccgtctccgggcgcagctacgagccgattgtggccatcctgctcttctcctgtgcgctggccctgcatgccaggcaggtggacatcaggctgaggctggactacctctgggccgcacaggcaagacgagccctttctgctttctgggggtgg

SEQ ID NO: 94049 - DNA, 1621 bp, Homo sapiens
cgtggaagtggcaggggtgggagagtttttcacttgctccagggtatccagcaccacatcaggggcatgctttgctgtgctctgtctctccagttctcggagttcattcaaagctgtgttcatcgtttcttcaatatcctgagcaattgtctctgggtccagtggcttgtggtcattgaagcccgtgtattgccctgatgacgtggaccttctaatgggagggctgtcgatcttcttgagggagtcgtgccggctgatgttggtcaggctgccatggccaggcctgcgcctccgctcaggactgtcattgttgaggccacggttctgcagcaggccccgggggtgactggcaaggcttggggaccctaggtcaactgaggagttagaaagggcatgtggagggtggagcgggcaatggccatcactggtcctgccaggacgccttactggagggggtggctctcctctttttcgttgcctggctaaatagccgtcaggatgacggtctgtcggggagttcatgtccttggatgaggacttgtcttccgtgactggcccactgctggcctcactgtcggctttttggctcagagtgtctgaaaacgtatcatccatatcctgcaccactatatactggtgaggcaccagcccgtcaatcccgttgtgcctgccttcccaccagtcctcagatgcacggtgatacagcagcagggaggcacccttcttgaaggatagttctctggcggaccgcccaacatagtcaaacttggctattgcttctattggctcacattcatcttcacttgtgggggctcagatcaccgtagacaactggacactcaggaccacgccatggaggagctgcaggatgattatgaagacatgatggaggagaatctggagcaggaggaatatgaagacccagacatccccgagtcccagatggaggagccggcagctcacgacaccgaggcaacagccacagactaccacaccacatcacacccgggtacccacaaggtctatgtggagctgcaggagctggtgatggacgaaaagaaccaggagctgagatggatggaggcggcgcgctgggtgcaactggaggagaacctgggggagaatggggcctggggccgcccgcacctctctcacctcaccttctggagcctcctagagctgcgtagagtcttcaccaagggtactgtcctcctagacctgcaagagacctccctggctggagtggccaaccaactgctagacaggtttatctttgaagaccagatccggcctccgatttcctctccgcttgcaacctccgggaccatcttctcggccatctcctgcttctgggacctgccagcaccgtttttgtggttagctccttcttgccaaccaaccatgagctcccagattcgtcagaattattccaccgacgtggaggcagccgtcaacagcctggtcaatttgtacctgcaggcctcctacacctacctctctctgggcttctatttcgaccgcgatgatgtggctctggaaggcgtgagccacttcttccgcgaattggccgaggagaagcgcgagggctacgagcgtctcctgaagatgcaaaaccagcgtg

SEQ ID NO: 94050 - DNA, 4915 bp, Homo sapiens
  misc_feature (4415)..(4415): n is a, c, g, or t
ggctgtcagaacgagtgggaacgtagctggtcgcagagggcaccagcggctgcaggacttcaccaagggaccctgaggctcgtgagcagggacccgcggtgcgggttatgctgggggctcagatcaccgtagacaactggacactcaggaccacgccatggaggagctgcaggatgattatgaagacatgatggaggagaatctggagcaggaggaatatgaagacccagacatccccgagtcccagatggaggagccggcagctcacgacaccgaggcaacagccacagactaccacaccacatcacacccgggtacccacaaggtctatgtggagctgcaggagctggtgatggacgaaaagaaccaggagctgagatggatggaggcggcgcgctgggtgcaactggaggagaacctgggggagaatggggcctggggccgcccgcacctctctcacctcaccttctggagcctcctagagctgcgtagagtcttcaccaagggtactgtcctcctagacctgcaagagacctccctggctggagtggccaaccaactgctagacaggtttatctttgaagaccagatccggcctcaggaccgagaggagctgctccgggccctgctgcttaaacacagccacgctggagagctggaggccctggggggtgtgaagcctgcagtcctgacacgctctggggatccttcacagcctctgctcccccaacactcctcactggagacacagctcttctgtgagcagggagatgggggcacagaagggcactcaccatctggaattctggaaaagattcccccggattcagaggccacgttggtgctagtgggccgcgccgacttcctggagcagccggtgctgggcttcgtgaggctgcaggaggcagcggagctggaggcggtggagctgccggtgcctatacgcttcctctttgtgttgctgggacctgaggccccccacatcgattacacccagcttggccgggctgctgccaccctcatgtcagagagggtgttccgcatagatgcctacatggctcagagccgaggggagctgctgcactccctagagggcttcctggactgcagcctagtgctgcctcccaccgatgccccctccgagcaggcactgctcagtctggtgcctgtgcagagggagctacttcgaaggcgctatcagtccagccctgccaagccagactccagcttctacaagggcctagacttaaatgggggcccagatgaccctctgcagcagacaggccagctcttcgggggcctggtgcgtgatatccggcgccgctacccctattacctgagtgacatcacagatgcattcagcccccaggtcctggctgccgtcatcttcatctactttgctgcactgtcacccgccatcaccttcggcggcctcctgggagaaaagacccggaaccagatgggagtgtcggagctgctgatctccactgcagtgcagggcattctcttcgccctgctgggggctcagcccctgcttgtggtcggcttctcaggacccctgctggtgtttgaggaagccttcttctcgttctgcgagaccaacggtctagagtacatcgtgggccgcgtgtggatcggcttctggctcatcctgctggtggtgttggtggtggccttcgagggtagcttcctggtccgcttcatctcccgctatacccaggagatcttctccttcctcatttccctcatcttcatctatgagactttctccaagctgatcaagatcttccaggaccacccactacagaagacttataactacaacgtgttgatggtgcccaaacctcagggccccctgcccaacacagccctcctctcccttgtgctcatggccggtaccttcttctttgccatgatgctgcgcaagttcaagaacagctcctatttccctggcaagctgcgtcgggtcatcggggacttcggggtccccatctccatcctgatcatggtcctggtggatttcttcattcaggatacctacacccagaaactctcggtgcctgatggcttcaaggtgtccaactcctcagcccggggctgggtcatccacccactgggcttgcgttccgagtttcccatctggatgatgtttgcctccgccctgcctgctctgctggtcttcatcctcatattcctggagtctcagatcaccacgctgattgtcagcaaacctgagcgcaagatggtcaagggctccggcttccacctggacctgctgctggtagtaggcatgggtggggtggccgccctctttgggatgccctggctcagtgccaccaccgtgcgttccgtcacccatgccaacgccctcactgtcatgggcaaagccagcaccccaggggctgcagcccagatccaggaggtcaaagagcagcggatcagtggactcctggtcgctgtgcttgtgggcctgtccatcctcatggagcccatcctgtcccgcatccccctggctgtactgtttggcatcttcctctacatgggggtcacgtcgctcagcggcatccagctctttgaccgcatcttgcttctgttcaagccacccaagtatcacccagatgtgccctacgtcaagcgggtgaagacctggcgcatgcacttattcacgggcatccagatcatctgcctggcagtgctgtgggtggtgaagtccacgccggcctccctggccctgcccttcgtcctcatcctcactgtgccgctgcggcgcgtcctgctgccgctcatcttcaggaacgtggagcttcagtgtctggatgctgatgatgccaaggcaacctttgatgaggaggaaggtcgggatgaatacgacgaagtggccatgcctgtgtgaggggcgggcccaggccctagaccctcccccaccattccacatccccaccttccaaggaaaagcagaagttcatgggcacctcatggactccaggatcctcctggagcagcagctgaggccccagggctgtgggtggggaaggaaggcgtgtccaggagaccttccacaaagggtagcctggcttttctggctggggatggccgatggggcccacattagggggtttgttgcacagtccctcctgttgccacactttcactggggatcccgtgctggaagacttagatctgagccctccctcttcccagcacaggcaggggtagaagcaaaggcaggaggtgggtgagcgggtggggtgcttgctgtgtgaccttgggcaagtcccttgacctttccagcctatatttcctcttctgtaaaatgggtatattgatgataatacccacattacaggatggttactgaggaccaaagatacatgtaaaatagggctttgtaaactccacagggactgttctatagcagtcatcatttgtctttgaacgtacccaaggtcacatagctgggatttgaactgagccgtgcagctgggatttgaaccaggccttctgatttcaaggtccgagctctgtcctctgtcagtcatgcgtccactttcccttcccctgtgactcctcccttccccactctgctcccagcccctaccttgagaccctcttctctgggcccagagagaggcgtcctggtgaggacaaggtacaggcaaggatgatccagggattgggcctgggactcaggcctcctaagtgtttggttcctccctccaaacactcattagttcactcattcattcattccacaaacatttactgagggccccggaatcagtggactccgaggggactgagacaagccctgccctggggtgggggtggggggcaaggtacagttgattctacatttggatagggagtgggggagggtgggaaggtaggggcgggagagtgagggggtttgtaatttattaattttcaggcccctcatttgagagccattatcctcaactccatctaaactgaatcttggggagaacccagatctgaccaattggggtaggagacagcaggctctccaagaacatgggcaaatttatttttttataaaacaaaaagataaaaagagttgaaagacgtgaaagtggtgagagatggaggaaacagaatcaggaagtggtagaaaagagaggaggtggctgggcgcagtggctcacgtttgtaatcccagcactttgggaggccaagttgggcggatcatttgaggtcaggagtttgagaccagcctggccaacatggtgaaaccccgttactactaaaaatacaaaaattagctgggtgtctcgtggcaggcacctgtaatcccagctacttagaaggctgaggcaagagaatcacctgaacccaggaggtggaggttgcagtgagccaagattgcaccactgcactccagcctgggcaacagagcnagaccctgtctcaaaaaaaaaaaaaaaaaaaaaaaaaaaacggaaggaaacatcagccttgggggccacagactcaacatgtgtgtgtggtggggttccagcccaacatagagtaacattatttgtacctcccaggctagctcagtccatgggaggctctcctgtccctgaaagctgacacccacctttcaccacttcgcccatgctacagttcagtttcctcgtctgtaaaatggggatgataatggtacctaccttgcagtgttgttataaggattaaaggagacagtgcaagaaaaggccttggttggtgaagagcccaacctcggaggggagctgctgggatcctccttatcttgactgggatgtccctgtctccccctccccttgctccttgaacatggccaaggaaagtgaaaaacaaaaattattcactctgctagcacccttccccttgatgcctgggaataggttttgccaataaacgtatctgtgttgga

SEQ ID NO: 94051 - DNA, 4860 bp, Homo sapiens
  misc_feature (4360)..(4360): n is a, c, g, or t
tgagacactgtgctgacgggctcattgagctcacgacaccgaggcaacagccacagactaccacaccacatcacacccgggtacccacaaggtctatgtggagctgcaggagctggtgatggacgaaaagaaccaggagctgagatggatggaggcggcgcgctgggtgcaactggaggagaacctgggggagaatggggcctggggccgcccgcacctctctcacctcaccttctggagcctcctagagctgcgtagagtcttcaccaagggtactgtcctcctagacctgcaagagacctccctggctggagtggccaaccaactgctagacaggtttatctttgaagaccagatccggcctcaggaccgagaggagctgctccgggccctgctgcttaaacacagccacgctggagagctggaggccctggggggtgtgaagcctgcagtcctgacacgctctggggatccttcacagcctctgctcccccaacactcctcactggagacacagctcttctgtgagcagggagatgggggcacagaagggcactcaccatctggaattctggaaaagattcccccggattcagaggccacgttggtgctagtgggccgcgccgacttcctggagcagccggtgctgggcttcgtgaggctgcaggaggcagcggagctggaggcggtggagctgccggtgcctatacgcttcctctttgtgttgctgggacctgaggccccccacatcgattacacccagcttggccgggctgctgccaccctcatgtcagagagggtgttccgcatagatgcctacatggctcagagccgaggggagctgctgcactccctagagggcttcctggactgcagcctagtgctgcctcccaccgatgccccctccgagcaggcactgctcagtctggtgcctgtgcagagggagctacttcgaaggcgctatcagtccagccctgccaagccagactccagcttctacaagggcctagacttaaatgggggcccagatgaccctctgcagcagacaggccagctcttcgggggcctggtgcgtgatatccggcgccgctacccctattacctgagtgacatcacagatgcattcagcccccaggtcctggctgccgtcatcttcatctactttgctgcactgtcacccgccatcaccttcggcggcctcctgggtcagtgccaatacctgtctccctaactcttgcctctgaccctctggcctctgtctcagccccaacttctgactctgtctgaccctccagacccctgcatcagcctgaccatgacttgctctatgggctcctgggaaatgatctcctgaccttgatcccactgtgacctctacccacaggagaaaagacccggaaccagatgggagtgtcggagctgctgatctccactgcagtgcagggcattctcttcgccctgctgggggctcagcccctgcttgtggtcggcttctcaggacccctgctggtgtttgaggaagccttcttctcgttctgcgagaccaacggtctagagtacatcgtgggccgcgtgtggatcggcttctggctcatcctgctggtggtgttggtggtggccttcgagggtagcttcctggtccgcttcatctcccgctatacccaggagatcttctccttcctcatttccctcatcttcatctatgagactttctccaagctgatcaagatcttccaggaccacccactacagaagacttataactacaacgtgttgatggtgcccaaacctcagggccccctgcccaacacagccctcctctcccttgtgctcatggccggtaccttcttctttgccatgatgctgcgcaagttcaagaacagctcctatttccctggcaagctgcgtcgggtcatcggggacttcggggtccccatctccatcctgatcatggtcctggtggatttcttcattcaggatacctacacccagaaactctcggtgcctgatggcttcaaggtgtccaactcctcagcccggggctgggtcatccacccactgggcttgcgttccgagtttcccatctggatgatgtttgcctccgccctgcctgctctgctggtcttcatcctcatattcctggagtctcagatcaccacgctgattgtcagcaaacctgagcgcaagatggtcaagggctccggcttccacctggacctgctgctggtagtaggcatgggtggggtggccgccctctttgggatgccctggctcagtgccaccaccgtgcgttccgtcacccatgccaacgccctcactgtcatgggcaaagccagcaccccaggggctgcagcccagatccaggaggtcaaagagcagcggatcagtggactcctggtcgctgtgcttgtgggcctgtccatcctcatggagcccatcctgtcccgcatccccctggctgtactgtttggcatcttcctctacatgggggtcacgtcgctcagcggcatccagctctttgaccgcatcttgcttctgttcaagccacccaagtatcacccagatgtgccctacgtcaagcgggtgaagacctggcgcatgcacttattcacgggcatccagatcatctgcctggcagtgctgtgggtggtgaagtccacgccggcctccctggccctgcccttcgtcctcatcctcactgtgccgctgcggcgcgtcctgctgccgctcatcttcaggaacgtggagcttcagtgtctggatgctgatgatgccaaggcaacctttgatgaggaggaaggtcgggatgaatacgacgaagtggccatgcctgtgtgaggggcgggcccaggccctagaccctcccccaccattccacatccccaccttccaaggaaaagcagaagttcatgggcacctcatggactccaggatcctcctggagcagcagctgaggccccagggctgtgggtggggaaggaaggcgtgtccaggagaccttccacaaagggtagcctggcttttctggctggggatggccgatggggcccacattagggggtttgttgcacagtccctcctgttgccacactttcactggggatcccgtgctggaagacttagatctgagccctccctcttcccagcacaggcaggggtagaagcaaaggcaggaggtgggtgagcgggtggggtgcttgctgtgtgaccttgggcaagtcccttgacctttccagcctatatttcctcttctgtaaaatgggtatattgatgataatacccacattacaggatggttactgaggaccaaagatacatgtaaaatagggctttgtaaactccacagggactgttctatagcagtcatcatttgtctttgaacgtacccaaggtcacatagctgggatttgaactgagccgtgcagctgggatttgaaccaggccttctgatttcaaggtccgagctctgtcctctgtcagtcatgcgtccactttcccttcccctgtgactcctcccttccccactctgctcccagcccctaccttgagaccctcttctctgggcccagagagaggcgtcctggtgaggacaaggtacaggcaaggatgatccagggattgggcctgggactcaggcctcctaagtgtttggttcctccctccaaacactcattagttcactcattcattcattccacaaacatttactgagggccccggaatcagtggactccgaggggactgagacaagccctgccctggggtgggggtggggggcaaggtacagttgattctacatttggatagggagtgggggagggtgggaaggtaggggcgggagagtgagggggtttgtaatttattaattttcaggcccctcatttgagagccattatcctcaactccatctaaactgaatcttggggagaacccagatctgaccaattggggtaggagacagcaggctctccaagaacatgggcaaatttatttttttataaaacaaaaagataaaaagagttgaaagacgtgaaagtggtgagagatggaggaaacagaatcaggaagtggtagaaaagagaggaggtggctgggcgcagtggctcacgtttgtaatcccagcactttgggaggccaagttgggcggatcatttgaggtcaggagtttgagaccagcctggccaacatggtgaaaccccgttactactaaaaatacaaaaattagctgggtgtctcgtggcaggcacctgtaatcccagctacttagaaggctgaggcaagagaatcacctgaacccaggaggtggaggttgcagtgagccaagattgcaccactgcactccagcctgggcaacagagcnagaccctgtctcaaaaaaaaaaaaaaaaaaaaaaaaaaaacggaaggaaacatcagccttgggggccacagactcaacatgtgtgtgtggtggggttccagcccaacatagagtaacattatttgtacctcccaggctagctcagtccatgggaggctctcctgtccctgaaagctgacacccacctttcaccacttcgcccatgctacagttcagtttcctcgtctgtaaaatggggatgataatggtacctaccttgcagtgttgttataaggattaaaggagacagtgcaagaaaaggccttggttggtgaagagcccaacctcggaggggagctgctgggatcctccttatcttgactgggatgtccctgtctccccctccccttgctccttgaacatggccaaggaaagtgaaaaacaaaaattattcactctgctagcacccttccccttgatgcctgggaataggttttgccaataaacgtatctgtgttgga

SEQ ID NO: 94052 - DNA, 4951 bp, Homo sapiens
  misc_feature (4451)..(4451): n is a, c, g, or t
ccagaggcaccaaggagcgcagaggcaccaaggagcgcagaggcaccaaggaggagaatctggagcaggaggaatatgaagacccagacatccccgagtcccagatggaggagccggcagctcacgacaccgaggcaacagccacagactaccacaccacatcacacccgggtacccacaaggtctatgtggagctgcaggagctggtgatggacgaaaagaaccaggagctgagatggatggaggcggcgcgctgggtgcaactggaggagaacctgggggagaatggggcctggggccgcccgcacctctctcacctcaccttctggagcctcctagagctgcgtagagtcttcaccaagggtactgtcctcctagacctgcaagagacctccctggctggagtggccaaccaactgctagacaggtttatctttgaagaccagatccggcctcaggaccgagaggagctgctccgggccctgctgcttaaacacagccacgctggagagctggaggccctggggggtgtgaagcctgcagtcctgacacgctctggggatccttcacagcctctgctcccccaacactcctcactggagacacagctcttctgtgagcagggagatgggggcacagaagggcactcaccatctggaattctggaaaagattcccccggattcagaggccacgttggtgctagtgggccgcgccgacttcctggagcagccggtgctgggcttcgtgaggctgcaggaggcagcggagctggaggcggtggagctgccggtgcctatacgcttcctctttgtgttgctgggacctgaggccccccacatcgattacacccagcttggccgggctgctgccaccctcatgtcagagagggtgttccgcatagatgcctacatggctcagagccgaggggagctgctgcactccctagagggcttcctggactgcagcctagtgctgcctcccaccgatgccccctccgagcaggcactgctcagtctggtgcctgtgcagagggagctacttcgaaggcgctatcagtccagccctgccaagccagactccagcttctacaagggcctagacttaaatgggggcccagatgaccctctgcagcagacaggccagctcttcgggggcctggtgcgtgatatccggcgccgctacccctattacctgagtgacatcacagatgcattcagcccccaggtcctggctgccgtcatcttcatctactttgctgcactgtcacccgccatcaccttcggcggcctcctgggtcagtgccaatacctgtctccctaactcttgcctctgaccctctggcctctgtctcagccccaacttctgactctgtctgaccctccagacccctgcatcagcctgaccatgacttgctctatgggctcctgggaaatgatctcctgaccttgatcccactgtgacctctacccacaggagaaaagacccggaaccagatgggagtgtcggagctgctgatctccactgcagtgcagggcattctcttcgccctgctgggggctcagcccctgcttgtggtcggcttctcaggacccctgctggtgtttgaggaagccttcttctcgttctgcgagaccaacggtctagagtacatcgtgggccgcgtgtggatcggcttctggctcatcctgctggtggtgttggtggtggccttcgagggtagcttcctggtccgcttcatctcccgctatacccaggagatcttctccttcctcatttccctcatcttcatctatgagactttctccaagctgatcaagatcttccaggaccacccactacagaagacttataactacaacgtgttgatggtgcccaaacctcagggccccctgcccaacacagccctcctctcccttgtgctcatggccggtaccttcttctttgccatgatgctgcgcaagttcaagaacagctcctatttccctggcaagctgcgtcgggtcatcggggacttcggggtccccatctccatcctgatcatggtcctggtggatttcttcattcaggatacctacacccagaaactctcggtgcctgatggcttcaaggtgtccaactcctcagcccggggctgggtcatccacccactgggcttgcgttccgagtttcccatctggatgatgtttgcctccgccctgcctgctctgctggtcttcatcctcatattcctggagtctcagatcaccacgctgattgtcagcaaacctgagcgcaagatggtcaagggctccggcttccacctggacctgctgctggtagtaggcatgggtggggtggccgccctctttgggatgccctggctcagtgccaccaccgtgcgttccgtcacccatgccaacgccctcactgtcatgggcaaagccagcaccccaggggctgcagcccagatccaggaggtcaaagagcagcggatcagtggactcctggtcgctgtgcttgtgggcctgtccatcctcatggagcccatcctgtcccgcatccccctggctgtactgtttggcatcttcctctacatgggggtcacgtcgctcagcggcatccagctctttgaccgcatcttgcttctgttcaagccacccaagtatcacccagatgtgccctacgtcaagcgggtgaagacctggcgcatgcacttattcacgggcatccagatcatctgcctggcagtgctgtgggtggtgaagtccacgccggcctccctggccctgcccttcgtcctcatcctcactgtgccgctgcggcgcgtcctgctgccgctcatcttcaggaacgtggagcttcagtgtctggatgctgatgatgccaaggcaacctttgatgaggaggaaggtcgggatgaatacgacgaagtggccatgcctgtgtgaggggcgggcccaggccctagaccctcccccaccattccacatccccaccttccaaggaaaagcagaagttcatgggcacctcatggactccaggatcctcctggagcagcagctgaggccccagggctgtgggtggggaaggaaggcgtgtccaggagaccttccacaaagggtagcctggcttttctggctggggatggccgatggggcccacattagggggtttgttgcacagtccctcctgttgccacactttcactggggatcccgtgctggaagacttagatctgagccctccctcttcccagcacaggcaggggtagaagcaaaggcaggaggtgggtgagcgggtggggtgcttgctgtgtgaccttgggcaagtcccttgacctttccagcctatatttcctcttctgtaaaatgggtatattgatgataatacccacattacaggatggttactgaggaccaaagatacatgtaaaatagggctttgtaaactccacagggactgttctatagcagtcatcatttgtctttgaacgtacccaaggtcacatagctgggatttgaactgagccgtgcagctgggatttgaaccaggccttctgatttcaaggtccgagctctgtcctctgtcagtcatgcgtccactttcccttcccctgtgactcctcccttccccactctgctcccagcccctaccttgagaccctcttctctgggcccagagagaggcgtcctggtgaggacaaggtacaggcaaggatgatccagggattgggcctgggactcaggcctcctaagtgtttggttcctccctccaaacactcattagttcactcattcattcattccacaaacatttactgagggccccggaatcagtggactccgaggggactgagacaagccctgccctggggtgggggtggggggcaaggtacagttgattctacatttggatagggagtgggggagggtgggaaggtaggggcgggagagtgagggggtttgtaatttattaattttcaggcccctcatttgagagccattatcctcaactccatctaaactgaatcttggggagaacccagatctgaccaattggggtaggagacagcaggctctccaagaacatgggcaaatttatttttttataaaacaaaaagataaaaagagttgaaagacgtgaaagtggtgagagatggaggaaacagaatcaggaagtggtagaaaagagaggaggtggctgggcgcagtggctcacgtttgtaatcccagcactttgggaggccaagttgggcggatcatttgaggtcaggagtttgagaccagcctggccaacatggtgaaaccccgttactactaaaaatacaaaaattagctgggtgtctcgtggcaggcacctgtaatcccagctacttagaaggctgaggcaagagaatcacctgaacccaggaggtggaggttgcagtgagccaagattgcaccactgcactccagcctgggcaacagagcnagaccctgtctcaaaaaaaaaaaaaaaaaaaaaaaaaaaacggaaggaaacatcagccttgggggccacagactcaacatgtgtgtgtggtggggttccagcccaacatagagtaacattatttgtacctcccaggctagctcagtccatgggaggctctcctgtccctgaaagctgacacccacctttcaccacttcgcccatgctacagttcagtttcctcgtctgtaaaatggggatgataatggtacctaccttgcagtgttgttataaggattaaaggagacagtgcaagaaaaggccttggttggtgaagagcccaacctcggaggggagctgctgggatcctccttatcttgactgggatgtccctgtctccccctccccttgctccttgaacatggccaaggaaagtgaaaaacaaaaattattcactctgctagcacccttccccttgatgcctgggaataggttttgccaataaacgtatctgtgttgga

SEQ ID NO: 94053 - DNA, 987 bp, Homo sapiens
  misc_feature (487)..(487): n is a, c, g, or t
ggctgtcagaacgagtgggaacgtagctggtcgcagagggcaccagcggctgcaggacttcaccaagggaccctgaggctcgtgagcagggacccgcggtgcgggttatgctgggggctcagatcaccgtagacaactggacactcaggaccacgccatggaggagctgcagatggaggaaacagaatcaggaagtggtagaaaagagaggaggtggctgggcgcagtggctcacgtttgtaatcccagcactttgggaggccaagttgggcggatcatttgaggtcaggagtttgagaccagcctggccaacatggtgaaaccccgttactactaaaaatacaaaaattagctgggtgtctcgtggcaggcacctgtaatcccagctacttagaaggctgaggcaagagaatcacctgaacccaggaggtggaggttgcagtgagccaagattgcaccactgcactccagcctgggcaacagagcnagaccctgtctcaaaaaaaaaaaaaaaaaaaaaaaaaaaacggaaggaaacatcagccttgggggccacagactcaacatgtgtgtgtggtggggttccagcccaacatagagtaacattatttgtacctcccaggctagctcagtccatgggaggctctcctgtccctgaaagctgacacccacctttcaccacttcgcccatgctacagttcagtttcctcgtctgtaaaatggggatgataatggtacctaccttgcagtgttgttataaggattaaaggagacagtgcaagaaaaggccttggttggtgaagagcccaacctcggaggggagctgctgggatcctccttatcttgactgggatgtccctgtctccccctccccttgctccttgaacatggccaaggaaagtgaaaaacaaaaattattcactctgctagcacccttccccttgatgcctgggaataggttttgccaataaacgtatctgtgttgga

SEQ ID NO: 94054 - DNA, 1925 bp, Homo sapiens
tgagacactgtgctgacgggctcattgagctcacgacaccgaggcaacagccacagactaccacaccacatcacacccgggtacccacaaggtctatgtggagctgcaggagctggtgatggacgaaaagaaccaggagctgagatggatggaggcggcgcgctgggtgcaactggaggagaacctgggggagaatggggcctggggccgcccgcacctctctcacctcaccttctggagcctcctagagctgcgtagagtcttcaccaagggtactgtcctcctagacctgcaagagacctccctggctggagtggccaaccaactgctagacaggtttatctttgaagaccagatccggcctcaggaccgagaggagctgctccgggccctgctgcttaaacacagccacgctggagagctggaggccctggggggtgtgaagcctgcagtcctgacacgctctggggatccttcacagcctctgctcccccaacactcctcactggagacacagctcttctgtgagcagggagatgggggcacagaagggcactcaccatctggaattctggaaaagattcccccggattcagaggccacgttggtgctagtgggccgcgccgacttcctggagcagccggtgctgggcttcgtgaggctgcaggaggcagcggagctggaggcggtggagctgccggtgcctatacgcttcctctttgtgttgctgggacctgaggccccccacatcgattacacccagcttggccgggctgctgccaccctcatgtcagagagggtgttccgcatagatgcctacatggctcagagccgaggggagctgctgcactccctagagggcttcctggactgcagcctagtgctgcctcccaccgatgccccctccgagcaggcactgctcagtctggtgcctgtgcagagggagctacttcgaaggcgctatcagtccagccctgccaagccagactccagcttctacaagggcctagacttaaatgggggcccagatgaccctctgcagcagacaggccagctcttcgggggcctggtgcgtgatatccggcgccgctacccctattacctgagtgacatcacagatgcattcagcccccaggtcctggctgccgtcatcttcatctactttgctgcactgtcacccgccatcaccttcggcggcctcctgggtcagtgccaatacctgtctccctaactcttgcctctgaccctctggcctctgtctcagccccaacttctgactctgtctgaccctccagacccctgcatcagcctgaccatgacttgctctatgggctcctgggaaatgatctcctgaccttgatcccactgtgacctctacccacaggagaaaagacccggaaccagatgggagtgtcggagctgctgatctccactgcagtgcagggcattctcttcgccctgctgggggctcagcccctgcttgtggtcggcttctcaggacccctgctggtgtttgaggaagccttcttctcgttctgcgagaccaacggtctagagtacatcgtgggccgcgtgtggatcggcttctggctcatcctgctggtggtgttggtggtggccttcgagggtagcttcctggtccgcttcatctcccgctatacccaggagatcttctccttcctcatttccctcatcttcatctatgagactttctccaagctgatcaaggtgggggcctatggggatgttaatgcacacgggaggttgtgtataagactgagacagtggccgggtgcgagggctcaggcctgtaatctcagaactttgggaggccgaggcaggtggatcacccgagatcaggagttcaagaccagcctgaccaacattgtgaaactccatctctattaaaaatacaaaaatcagcc

SEQ ID NO: 94055 - DNA, 295 bp, Homo sapiens
aaagtggggaacgagcagatggatgtaaagggattagtgtaatgattaggtacagagcaagtgctcaatataagtaagttcccaagtgcctccaacctaactgcccgacccctaggaccctggctcctcctgctcccacccttccccatcctcctgcccttggcattcttacctgctaccccctcccacagaaactctcggtgcctgatggcttcaaggtgtccaactcctcagcccggggctgggtcatccacccactgggcttgcgttccgagtttcccatctggatgatgtt

SEQ ID NO: 94056 - DNA, 328 bp, Homo sapiens
cccggggctgggtcatccacccactgggcttgcgttccgagtttcccatctggatgatgtttgcctccgccctgcctgctctgctggtcttcatcctcatattcctggagtctcagatcaccacgtgagagacagggtgggggctgggcctgggagggtgggaggcagggacctttccctggcattctcccaggcaggcaagagacccaggactgcaagctagtccctgcgggtgtgtggccctcccgactagcaggaatagtgaaaagccaggggcagttccaggttttgtgggaccagaagttgtataatttggagagctcttttt

SEQ ID NO: 94057 - DNA, 4961 bp, Homo sapiens
  misc_feature (4461)..(4461): n is a, c, g, or t
ggctgtcagaacgagtgggaacgtagctggtcgcagagggcaccagcggctgcaggacttcaccaagggaccctgaggctcgtgagcagggacccgcggtgcgggttatgctgggggctcagatcaccgtagacaactggacactcaggaccacgccatggaggagctgcaggatgattatgaagacatgatggaggagaatctggagcaggaggaatatgaagacccagacatccccgagtcccagatggaggagccggcagctcacgacaccgaggcaacagccacagactaccacaccacatcacacccgggtacccacaaggtctatgtggagctgcaggagctggtgatggacgaaaagaaccaggagctgagatggatggaggcggcgcgctgggtgcaactggaggagaacctgggggagaatggggcctggggccgcccgcacctctctcacctcaccttctggagcctcctagagctgcgtagagtcttcaccaagggtactgtcctcctagacctgcaagagacctccctggctggagtggccaaccaactgctagacaggtttatctttgaagaccagatccggcctcaggaccgagaggagctgctccgggccctgctgcttaaacacagccacgctggagagctggaggccctggggggtgtgaagcctgcagtcctgacacgctctggggatccttcacagcctctgctcccccaacactcctcactggagacacagctcttctgtgagcagggagatgggggcacagaagggcactcaccatctggaattctggaaaagattcccccggattcagaggccacgttggtgctagtgggccgcgccgacttcctggagcagccggtgctgggcttcgtgaggctgcaggaggcagcggagctggaggcggtggagctgccggtgcctatacgcttcctctttgtgttgctgggacctgaggccccccacatcgattacacccagcttggccgggctgctgccaccctcatgtcagagagggtgttccgcatagatgcctacatggctcagagccgaggggagctgctgcactccctagagggcttcctggactgcagcctagtgctgcctcccaccgatgccccctccgagcaggcactgctcagtctggtgcctgtgcagagggagctacttcgaaggcgctatcagtccagccctgccaagccagactccagcttctacaagggcctagacttaaatgggggcccagatgaccctctgcagcagacaggccagctcttcgggggcctggtgcgtgatatccggcgccgctacccctattacctgagtgacatcacagatgcattcagcccccaggtcctggctgccgtcatcttcatctactttgctgcactgtcacccgccatcaccttcggcggcctcctgggagaaaagacccggaaccagatgggagtgtcggagctgctgatctccactgcagtgcagggcattctcttcgccctgctgggggctcagcccctgcttgtggtcggcttctcaggacccctgctggtgtttgaggaagccttcttctcgttctgcgagaccaacggtctagagtacatcgtgggccgcgtgtggatcggcttctggctcatcctgctggtggtgttggtggtggccttcgagggtagcttcctggtccgcttcatctcccgctatacccaggagatcttctccttcctcatttccctcatcttcatctatgagactttctccaagctgatcaagatcttccaggaccacccactacagaagacttataactacaacgtgttgatggtgcccaaacctcagggccccctgcccaacacagccctcctctcccttgtgctcatggccggtaccttcttctttgccatgatgctgcgcaagttcaagaacagctcctatttccctggcaagctgcgtcgggtcatcggggacttcggggtccccatctccatcctgatcatggtcctggtggatttcttcattcaggatacctacacccagaaactctcggtgcctgatggcttcaaggtgtccaactcctcagcccggggctgggtcatccacccactgggcttgcgttccgagtttcccatctggatgatgtttgcctccgccctgcctgctctgctggtcttcatcctcatattcctggagtctcagatcaccacgctgattgtcagcaaacctgagcgcaagatggtcaagggctccggcttccacctggacctgctgctggtagtaggcatgggtggggtggccgccctctttgggatgccctggctcagtgccaccaccgtgcgttccgtcacccatgccaacgccctcactgtcatgggcaaagccagcaccccaggggctgcagcccagatccaggaggtcaaagagcagcggatcagtggactcctggtcgctgtgcttgtgggcctgtccatcctcatggagcccatcctgtcccgcatccccctggctgtactgtttggcatcttcctctacatgggggtcacgtcgctcagcggcatccagctctttgaccgcatcttgcttctgttcaagccacccaagtatcacccagatgtgccctacgtcaagcgggtgaagacctggcgcatgcacttattcacgggcatccagatcatctgcctggcagtgctgtgggtggtgaagtccacgccggcctccctggccctgcccttcgtcctcatcctcactgtgccgctgcggcgcgtcctgctgccgctcatcttcaggaacgtggagcttcagtgtctggatgctgatgatgccaaggcaacctttgatgaggaggaaggtcgggatgaatacgacgaagtggccatgcctgtgtgaggggcgggcccaggccctagaccctcccccaccattccacatccccaccttccaaggaaaagcagaagttcatgggcacctcatggactccaggatcctcctggagcagcagctgaggccccagggctgtgggtggggaaggaaggcgtgtccaggagaccttccacaaagggtagcctggcttttctggctggggatggccgatggggcccacattagggggtttgttgcacagtccctcctgttgccacactttcactggggatcccgtgctggaagacttagatctgagccctccctcttcccagcacaggcaggggtagaagcaaaggcaggaggtgggtgagcgggtggggtgcttgctgtgtgaccttgggcaagtcccttgacctttccagcctatatttcctcttctgtaaaatgggtatattgatgataatacccacattacaggatggttactgaggaccaaagatacatgtaaaatagggctttgtaaactccacagggactgttctatagcagtcatcatttgtctttgaacgtacccaaggtcacatagctgggatttgaactgagccgtgcagctgggatttgaaccaggccttctgatttcaaggtccgagctctgtcctctgtcagtcatgcgtccactttcccttcccctgtgactcctcccttccccactctgctcccagcccctaccttgagaccctcttctctgggcccagagagaggcgtcctggtgaggacaaggtacaggcaaggatgatccagggattgggcctgggactcaggcctcctaagtgtttggttcctccctccaaacactcattagttcactcattcattcattccacaaacatttactgagggccccggaatcagtggactccgaggggactgagacaagccctgccctggggtgggggtggggggcaaggtacagttgattctacatttggatagggagtgggggagggtgggaaggtaggggcgggagagtgagggggtttgtaatttattaattgcgtattttctaagagttttcaacatagtttggcttcacacacaacttcaggcccctcatttgagagccattatcctcaactccatctaaactgaatcttggggagaacccagatctgaccaattggggtaggagacagcaggctctccaagaacatgggcaaatttatttttttataaaacaaaaagataaaaagagttgaaagacgtgaaagtggtgagagatggaggaaacagaatcaggaagtggtagaaaagagaggaggtggctgggcgcagtggctcacgtttgtaatcccagcactttgggaggccaagttgggcggatcatttgaggtcaggagtttgagaccagcctggccaacatggtgaaaccccgttactactaaaaatacaaaaattagctgggtgtctcgtggcaggcacctgtaatcccagctacttagaaggctgaggcaagagaatcacctgaacccaggaggtggaggttgcagtgagccaagattgcaccactgcactccagcctgggcaacagagcnagaccctgtctcaaaaaaaaaaaaaaaaaaaaaaaaaaaacggaaggaaacatcagccttgggggccacagactcaacatgtgtgtgtggtggggttccagcccaacatagagtaacattatttgtacctcccaggctagctcagtccatgggaggctctcctgtccctgaaagctgacacccacctttcaccacttcgcccatgctacagttcagtttcctcgtctgtaaaatggggatgataatggtacctaccttgcagtgttgttataaggattaaaggagacagtgcaagaaaaggccttggttggtgaagagcccaacctcggaggggagctgctgggatcctccttatcttgactgggatgtccctgtctccccctccccttgctccttgaacatggccaaggaaagtgaaaaacaaaaattattcactctgctagcacccttccccttgatgcctgggaataggttttgccaataaacgtatctgtgttgga

SEQ ID NO: 94058 - DNA, 5224 bp, Homo sapiens
  misc_feature (4724)..(4724): n is a, c, g, or t
ggctgtcagaacgagtgggaacgtagctggtcgcagagggcaccagcggctgcaggacttcaccaagggaccctgaggctcgtgagcagggacccgcggtgcgggttatgctgggggctcagatcaccgtagacaactggacactcaggaccacgccatggaggagctgcagtgcaggtgggtgttccctggcatcagcagtgctcccacctggaggctctggggacctggtcctagactcctatcttcgttgggggtggaagagcccctcacagcccagcctcagcggccacttcccacaggatgattatgaagacatgatggaggagaatctggagcaggaggaatatgaagacccagacatccccgagtcccagatggaggagccggcagctcacgacaccgaggcaacagccacagactaccacaccacatcacacccgggtacccacaaggtctatgtggagctgcaggagctggtgatggacgaaaagaaccaggagctgagatggatggaggcggcgcgctgggtgcaactggaggagaacctgggggagaatggggcctggggccgcccgcacctctctcacctcaccttctggagcctcctagagctgcgtagagtcttcaccaagggtactgtcctcctagacctgcaagagacctccctggctggagtggccaaccaactgctagacaggtttatctttgaagaccagatccggcctcaggaccgagaggagctgctccgggccctgctgcttaaacacagccacgctggagagctggaggccctggggggtgtgaagcctgcagtcctgacacgctctggggatccttcacagcctctgctcccccaacactcctcactggagacacagctcttctgtgagcagggagatgggggcacagaagggcactcaccatctggaattctggaaaagattcccccggattcagaggccacgttggtgctagtgggccgcgccgacttcctggagcagccggtgctgggcttcgtgaggctgcaggaggcagcggagctggaggcggtggagctgccggtgcctatacgcttcctctttgtgttgctgggacctgaggccccccacatcgattacacccagcttggccgggctgctgccaccctcatgtcagagagggtgttccgcatagatgcctacatggctcagagccgaggggagctgctgcactccctagagggcttcctggactgcagcctagtgctgcctcccaccgatgccccctccgagcaggcactgctcagtctggtgcctgtgcagagggagctacttcgaaggcgctatcagtccagccctgccaagccagactccagcttctacaagggcctagacttaaatgggggcccagatgaccctctgcagcagacaggccagctcttcgggggcctggtgcgtgatatccggcgccgctacccctattacctgagtgacatcacagatgcattcagcccccaggtcctggctgccgtcatcttcatctactttgctgcactgtcacccgccatcaccttcggcggcctcctgggtcagtgccaatacctgtctccctaactcttgcctctgaccctctggcctctgtctcagccccaacttctgactctgtctgaccctccagacccctgcatcagcctgaccatgacttgctctatgggctcctgggaaatgatctcctgaccttgatcccactgtgacctctacccacaggagaaaagacccggaaccagatgggagtgtcggagctgctgatctccactgcagtgcagggcattctcttcgccctgctgggggctcagcccctgcttgtggtcggcttctcaggacccctgctggtgtttgaggaagccttcttctcgttctgcgagaccaacggtctagagtacatcgtgggccgcgtgtggatcggcttctggctcatcctgctggtggtgttggtggtggccttcgagggtagcttcctggtccgcttcatctcccgctatacccaggagatcttctccttcctcatttccctcatcttcatctatgagactttctccaagctgatcaagatcttccaggaccacccactacagaagacttataactacaacgtgttgatggtgcccaaacctcagggccccctgcccaacacagccctcctctcccttgtgctcatggccggtaccttcttctttgccatgatgctgcgcaagttcaagaacagctcctatttccctggcaagctgcgtcgggtcatcggggacttcggggtccccatctccatcctgatcatggtcctggtggatttcttcattcaggatacctacacccagaaactctcggtgcctgatggcttcaaggtgtccaactcctcagcccggggctgggtcatccacccactgggcttgcgttccgagtttcccatctggatgatgtttgcctccgccctgcctgctctgctggtcttcatcctcatattcctggagtctcagatcaccacgctgattgtcagcaaacctgagcgcaagatggtcaagggctccggcttccacctggacctgctgctggtagtaggcatgggtggggtggccgccctctttgggatgccctggctcagtgccaccaccgtgcgttccgtcacccatgccaacgccctcactgtcatgggcaaagccagcaccccaggggctgcagcccagatccaggaggtcaaagagcagcggatcagtggactcctggtcgctgtgcttgtgggcctgtccatcctcatggagcccatcctgtcccgcatccccctggctgtactgtttggcatcttcctctacatgggggtcacgtcgctcagcggcatccagctctttgaccgcatcttgcttctgttcaagccacccaagtatcacccagatgtgccctacgtcaagcgggtgaagacctggcgcatgcacttattcacgggcatccagatcatctgcctggcagtgctgtgggtggtgaagtccacgccggcctccctggccctgcccttcgtcctcatcctcactgtgccgctgcggcgcgtcctgctgccgctcatcttcaggaacgtggagcttcagtgtctggatgctgatgatgccaaggcaacctttgatgaggaggaaggtcgggatgaatacgacgaagtggccatgcctgtgtgaggggcgggcccaggccctagaccctcccccaccattccacatccccaccttccaaggaaaagcagaagttcatgggcacctcatggactccaggatcctcctggagcagcagctgaggccccagggctgtgggtggggaaggaaggcgtgtccaggagaccttccacaaagggtagcctggcttttctggctggggatggccgatggggcccacattagggggtttgttgcacagtccctcctgttgccacactttcactggggatcccgtgctggaagacttagatctgagccctccctcttcccagcacaggcaggggtagaagcaaaggcaggaggtgggtgagcgggtggggtgcttgctgtgtgaccttgggcaagtcccttgacctttccagcctatatttcctcttctgtaaaatgggtatattgatgataatacccacattacaggatggttactgaggaccaaagatacatgtaaaatagggctttgtaaactccacagggactgttctatagcagtcatcatttgtctttgaacgtacccaaggtcacatagctgggatttgaactgagccgtgcagctgggatttgaaccaggccttctgatttcaaggtccgagctctgtcctctgtcagtcatgcgtccactttcccttcccctgtgactcctcccttccccactctgctcccagcccctaccttgagaccctcttctctgggcccagagagaggcgtcctggtgaggacaaggtacaggcaaggatgatccagggattgggcctgggactcaggcctcctaagtgtttggttcctccctccaaacactcattagttcactcattcattcattccacaaacatttactgagggccccggaatcagtggactccgaggggactgagacaagccctgccctggggtgggggtggggggcaaggtacagttgattctacatttggatagggagtgggggagggtgggaaggtaggggcgggagagtgagggggtttgtaatttattaattttcaggcccctcatttgagagccattatcctcaactccatctaaactgaatcttggggagaacccagatctgaccaattggggtaggagacagcaggctctccaagaacatgggcaaatttatttttttataaaacaaaaagataaaaagagttgaaagacgtgaaagtggtgagagatggaggaaacagaatcaggaagtggtagaaaagagaggaggtggctgggcgcagtggctcacgtttgtaatcccagcactttgggaggccaagttgggcggatcatttgaggtcaggagtttgagaccagcctggccaacatggtgaaaccccgttactactaaaaatacaaaaattagctgggtgtctcgtggcaggcacctgtaatcccagctacttagaaggctgaggcaagagaatcacctgaacccaggaggtggaggttgcagtgagccaagattgcaccactgcactccagcctgggcaacagagcnagaccctgtctcaaaaaaaaaaaaaaaaaaaaaaaaaaaacggaaggaaacatcagccttgggggccacagactcaacatgtgtgtgtggtggggttccagcccaacatagagtaacattatttgtacctcccaggctagctcagtccatgggaggctctcctgtccctgaaagctgacacccacctttcaccacttcgcccatgctacagttcagtttcctcgtctgtaaaatggggatgataatggtacctaccttgcagtgttgttataaggattaaaggagacagtgcaagaaaaggccttggttggtgaagagcccaacctcggaggggagctgctgggatcctccttatcttgactgggatgtccctgtctccccctccccttgctccttgaacatggccaaggaaagtgaaaaacaaaaattattcactctgctagcacccttccccttgatgcctgggaataggttttgccaataaacgtatctgtgttgga

SEQ ID NO: 94059 - DNA, 3593 bp, Homo sapiens
  misc_feature (3540)..(3540): n is a, c, g, or t
  misc_feature (3569)..(3569): n is a, c, g, or t
tgagacactgtgctgacgggctcattgagctcacgacaccgaggcaacagccacagactaccacaccacatcacacccgggtacccacaaggtctatgtggagctgcaggagctggtgatggacgaaaagaaccaggagctgagatggatggaggcggcgcgctgggtgcaactggaggagaacctgggggagaatggggcctggggccgcccgcacctctctcacctcaccttctggagcctcctagagctgcgtagagtcttcaccaagggtactgtcctcctagacctgcaagagacctccctggctggagtggccaaccaactgctagacaggtttatctttgaagaccagatccggcctcaggaccgagaggagctgctccgggccctgctgcttaaacacagccacgctggagagctggaggccctggggggtgtgaagcctgcagtcctgacacgctctggggatccttcacagcctctgctcccccaacactcctcactggagacacagctcttctgtgagcagggagatgggggcacagaagggcactcaccatctggaattctggaaaagattcccccggattcagaggccacgttggtgctagtgggccgcgccgacttcctggagcagccggtgctgggcttcgtgaggctgcaggaggcagcggagctggaggcggtggagctgccggtgcctatacgcttcctctttgtgttgctgggacctgaggccccccacatcgattacacccagcttggccgggctgctgccaccctcatgtcagagagggtgttccgcatagatgcctacatggctcagagccgaggggagctgctgcactccctagagggcttcctggactgcagcctagtgctgcctcccaccgatgccccctccgagcaggcactgctcagtctggtgcctgtgcagagggagctacttcgaaggcgctatcagtccagccctgccaagccagactccagcttctacaagggcctagacttaaatgggggcccagatgaccctctgcagcagacaggccagctcttcgggggcctggtgcgtgatatccggcgccgctacccctattacctgagtgacatcacagatgcattcagcccccaggtcctggctgccgtcatcttcatctactttgctgcactgtcacccgccatcaccttcggcggcctcctgggtcagtgccaatacctgtctccctaactcttgcctctgaccctctggcctctgtctcagccccaacttctgactctgtctgaccctccagacccctgcatcagcctgaccatgacttgctctatgggctcctgggaaatgatctcctgaccttgatcccactgtgacctctacccacaggagaaaagacccggaaccagatgggagtgtcggagctgctgatctccactgcagtgcagggcattctcttcgccctgctgggggctcagcccctgcttgtggtcggcttctcaggacccctgctggtgtttgaggaagccttcttctcgttctgcgagaccaacggtctagagtacatcgtgggccgcgtgtggatcggcttctggctcatcctgctggtggtgttggtggtggccttcgagggtagcttcctggtccgcttcatctcccgctatacccaggagatcttctccttcctcatttccctcatcttcatctatgagactttctccaagctgatcaagatcttccaggaccacccactacagaagacttataactacaacgtgttgatggtgcccaaacctcagggccccctgcccaacacagccctcctctcccttgtgctcatggccggtaccttcttctttgccatgatgctgcgcaagttcaagaacagctcctatttccctggcaagctgcgtcgggtcatcggggacttcggggtccccatctccatcctgatcatggtcctggtggatttcttcattcaggatacctacacccagaaactctcggtgcctgatggcttcaaggtgtccaactcctcagcccggggctgggtcatccacccactgggcttgcgttccgagtttcccatctggatgatgtttgcctccgccctgcctgctctgctggtcttcatcctcatattcctggagtctcagatcaccacgctgattgtcagcaaacctgagcgcaagatggtcaagggctccggcttccacctggacctgctgctggtagtaggcatgggtggggtggccgccctctttgggatgccctggctcagtgccaccaccgtgcgttccgtcacccatgccaacgccctcactgtcatgggcaaagccagcaccccaggggctgcagcccagatccaggaggtcaaagagcagcggatcagtggactcctggtcgctgtgcttgtgggcctgtccatcctcatggagcccatcctgtcccgcatccccctggctgtactgtttggcatcttcctctacatgggggtcacgtcgctcagcggcatccagctctttgaccgcatcttgcttctgttcaagccacccaagtatcacccagatgtgccctacgtcaagcgggtgaagacctggcgcatgcacttattcacgggcatccagatcatctgcctggcagtgctgtgggtggtgaagtccacgccggcctccctggccctgcccttcgtcctcatcctcactgtgccgctgcggcgcgtcctgctgccgctcatcttcaggaacgtggagcttcagtgtctggatgctgatgatgccaaggcaacctttgatgaggaggaaggtcgggatgaatacgacgaagtggccatgcctgtgtgaggggcgggcccaggccctagaccctcccccaccattccacatccccaccttccaaggaaaagcagaagttcatgggcacctcatggactccaggatcctcctggagcagcagctgaggccccagggctgtgggtggggaaggaaggcgtgtccaggagaccttccacaaagggtagcctggcttttctggctggggatggccgatggggcccacattagggggtttgttgcacagtccctcctgttgccacactttcactggggatcccgtgctggaagacttagatctgagccctccctcttcccagcacaggcaggggtagaagcaaaggcaggaggtgggtgagcgggtggggtgcttgctgtgtgaccttgggcaagtcccttgacctttccagcctatatttcctcttctgtaaaatgggtatattgatgataatacccacattacaggatggttactgaggaccaaagatacatgtaaaatagggctttgtaaactccacagggactgttctatagcagtcatcatttgtctttgaacgtacccaaagtgctgggattacagacgtgaaccaccgcacccagctgattttttttttttttatgagtaggggaaatgtgaaatgagtcctttattttctctacttttggaagtttttcccaggggtgggggaagaatggtgttggggatcgcggttnagagatgcccagcaacttctctagaggtncgggtgaggcgtgtgcacttcctt

SEQ ID NO: 94060 - DNA, 2030 bp, Homo sapiens
gtcacaaaaagtgcagcgctacatgatctgtcaatttgaagtgcatctacggacattgcggagctatgaaagttaacaagatactctttcgcttcaatgttagctgcagaaaatgacccttatggacctttgccaccaggctgggaaaaaagagtggattcaacagacagggtttactttgtgaatcataacacaaaaacaacccagtgggaagatccaagaactcaaggcttacagaatgaagaacccctgccagaaggctgggaaattagatatactcgtgaaggtgtaaggtactttgttgatcataacacaagaacaacaacattcaaagatcctcgcaatgggaagtcatctgtaactaaaggtggtccacaaattgcttatgaacgcggctttaggtggaagcttgctcacttccgttatttgtgccagtctaatgcactacctagtcatgtaaagatcaatgtgtcccggcagacattgtttgaagattccttccaacagattatggcattaaaaccctatgacttgaggaggcgcttatatgtaatatttagaggagaagaaggacttgattatggtggcctagcgagagaatggtttttcttgctttcacatgaagttttgaacccaatgtattgcttatttgagtatgcgggcaagaacaactattgtctgcagataaatccagcatcaaccattaatccagaccatctttcatacttctgtttcattggtcgttttattgccatggcactatttcatggaaagtttatcgatactggtttctctttaccattctacaagcgtatgttaagtaaaaaacttactattaaggatttggaatctattgatactgaattttataactcccttatctggataagagataacaacattgaagaatgtggcttagaaatgtacttttctgttgacatggagattttgggaaaagttacttcacatgacctgaagttgggaggttccaatattctggtgactgaggagaacaaagatgaatatattggtttaatgacagaatggcgtttttctcgaggagtacaagaacagaccaaagctttccttgatggttttaatgaagttgttcctcttcagtggctacagtacttcgatgaaaaagaattagaggttatgttgtgtggcatgcaggaggttgacttggcagattggcagagaaatactgtttatcgacattatacaagaaacagcaagcaaatcatttggttttggcagtttgtgaaagagacagacaatgaagtaagaatgcgactattgcagttcgtcactggaacctgccgtttacctctaggaggatttgctgagctcatgggaagtaatgggcctcaaaagttttgcattgaaaaagttggcaaagacacttggttaccaagaagccatacatgttttaatcgcttggatctaccaccatataagagttatgaacaactaaaggaaaaacttctttttgcaatagaagagacagagggatttggacaagaatgaatgtggcttcttattttggaggagctcttgcatttaaataccccagccaagaaaaattgcacagatagtgtatataagctgttcattctgtacagtgaattttccgaacctctcaaagtatgttttccgttcttccacagaaatatgcaaaacagttcatccttttctactttatttattgttcccttgaaatgactgaccaggaaaaagatcatccttaaattttgaagcaagtgagagactttattaaaaatacatatatatctatataaacatatatgatagtggctctagttttatagagctccaagtgtattaaacatgacagccattcattcataaagatctggatttgctttaccttgttaatattatctaggggaaaaagtgcaaattgctccatgttcttctctcccttatgtaacatctcctgagggtgtttagttgcatggctgttcagaaaggtattaagggcttaggccaaatcttactttgagtatgtt

SEQ ID NO: 94061 - DNA, 453 bp, Homo sapiens
tctgtgcactttgccttcttcctattcattttgatgtgtgtggtttttataggatctcaaagctatgctgttcatcttttatactgctaggcttcacacagcattcccctagccttttcaccacctctgattattgctagtgacatctgacaaaacaatctaactgtcatcattctattggccggtttacagaggcttccggaacctgctctgttggtagcagccatttaactgatgtctttttgtatgattgttcatcacttaataaaggatgaattcaggtatcttttcaaggagtgggtaatccctgtccttttaaggtgttggtataagatggcattactttttctaattaaggatttcaaaaattagcttttgtttttggagatgggataggggtgtgcatattctatgtgtaacataattaaatgccaggtagcggggtttcctcta

SEQ ID NO: 94062 - DNA, 280 bp, Homo sapiens
atacccatataatagaatggtatttggcaagaaaaggagtggagtactggtgcatgttacaatatggatgaacctcaaaaatgtaatgctgagtgaaagaagccagtcacaaaaaaaacccacattatatgattccatctatatgaaatgtccagaataggcaaatttaaagagacagagagtaggttagtggctgcctagggatgggggtggggagagggttgattgggaggagaaagaagggggcagggactgcttcagtttctgtcgacgcggccgc

SEQ ID NO: 94063 - DNA, 3561 bp, Homo sapiens
agcgggaggggctgctggcggctgggctgccggggccgacgcctgggtggctgctgccgccgcgcctgctgcgagatggcgatcttgggcgcggaagggtgagtggcgcccgccgcaggaggaggtgccgctgccgtggccgcccggctgccgggagccgacagcttcgcgccggggttgtctcctcacagactatgagctccttgaaagagggaatcgtgtcttactcatctttgtatccccagtgtctagcagttcctgatacatagttttagctgaattttgggacatggccactgcttcaccaaggtctgatactagtaataaccacagtggaaggttgcagttacaggtaactgtttctagtgccaaacttaaaagaaaaaagaactggttcggaacagcaatatatacagaagtagttgtagatggagaaattacgaaaacagcaaaatccagtagttcttctaatccaaaatgggatgaacagctaactgtaaatgttacgccacagactacattggaatttcaagtttggagccatcgcactttaaaagcagatgctttattaggaaaagcaacgatagatttgaaacaagctctgttgatacacaatagaaaattggaaagagtgaaagaacaattaaaactttccttggaaaacaagaatggcatagcacaaactggtgaattgacagttgtgcttgatggattggtgattgagcaagaaaatataacaaactgcagctcatctccaaccatagaaatacaggaaaatggtgatgccttacatgaaaatggagagccttcagcaaggacaactgccaggttggctgttgaaggcacgaatggaatagataatcatgtacctacaagcactctagtccaaaactcatgctgctcgtatgtagttaatggagacaacacaccttcatctccgtctcaggttgctgccagacccaaaaatacaccagctccaaaaccactcgcatctgagcctgccgatgacactgttaatggagaatcatcctcatttgcaccaactgataatgcgtctgtcacgggtactccagtagtgtctgaagaaaatgccttgtctccaaattgcactagtactactgttgaagatcctccagttcaagaaatactgacttcctcagaaaacaatgaatgtattccttctaccagtgcagaattggaatctgaagctagaagtatattagagcctgacacctctaattctagaagtagttctgcttttgaagcagccaaatcaagacagccagatgggtgtatggatcctgtacggcagcagtctgggaatgccaacacagaaaccttgccatcagggtgggaacaaagaaaagatcctcatggtagaacctattatgtggatcataatactcgaactaccacatgggagagaccacaacctttacctccaggttgggaaagaagagttgatgatcgtagaagagtttattatgtggatcataacaccagaacaacaacgtggcagcggcctaccatggaatctgtccgaaattttgaacagtggcaatctcagcggaaccaattgcagggagctatgcaacagtttaaccaacgatacctctattcggcttcaatgttagctgcagaaaatgacccttatggacctttgccaccaggctgggaaaaaagagtggattcaacagacagggtttactttgtgaatcataacacaaaaacaacccagtgggaagatccaagaactcaaggcttacagaatgaagaacccctgccagaaggctgggaaattagatatactcgtgaaggtgtaaggtactttgttgatcataacacaagaacaacaacattcaaagatcctcgcaatgggaagtcatctgtaactaaaggtggtccacaaattgcttatgaacgcggctttaggtggaagcttgctcacttccgttatttgtgccagtctaatgcactacctagtcatgtaaagatcaatgtgtcccggcagacattgtttgaagattccttccaacagattatggcattaaaaccctatgacttgaggaggcgcttatatgtaatatttagaggagaagaaggacttgattatggtggcctagcgagagaatggtttttcttgctttcacatgaagttttgaacccaatgtattgcttatttgagtatgcgggcaagaacaactattgtctgcagataaatccagcatcaaccattaatccagaccatctttcatacttctgtttcattggtcgttttattgccatggcactatttcatggaaagtttatcgatactggtttctctttaccattctacaagcgtatgttaagtaaaaaacttactattaaggatttggaatctattgatactgaattttataactcccttatctggataagagataacaacattgaagaatgtggcttagaaatgtacttttctgttgacatggagattttgggaaaagttacttcacatgacctgaagttgggaggttccaatattctggtgactgaggagaacaaagatgaatatattggtttaatgacagaatggcgtttttctcgaggagtacaagaacagaccaaagctttccttgatggttttaatgaagttgttcctcttcagtggctacagtacttcgatgaaaaagaattagaggttatgttgtgtggcatgcaggaggttgacttggcagattggcagagaaatactgtttatcgacattatacaagaaacagcaagcaaatcatttggttttggcagtttgtgaaagagacagacaatgaagtaagaatgcgactattgcagttcgtcactggaacctgccgtttacctctaggaggatttgctgagctcatgggaagtaatgggcctcaaaagttttgcattgaaaaagttggcaaagacacttggttaccaagaagccatacatgttttaatcgcttggatctaccaccatataagagttatgaacaactaaaggaaaaacttctttttgcaatagaagagacagagggatttggacaagaatgaatgtggcttcttattttggaggagctcttgcatttaaataccccagccaagaaaaattgcacagatagtgtatataagctgttcattctgtacagtgaattttccgaacctctcaaagtatgttttccgttcttccacagaaatatgcaaaacagttcatccttttctactttatttattgttcccttgaaatgactgaccaggaaaaagatcatccttaaattttgaagcaagtgagagactttattaaaaatacatatatatctatataaacatatatgatagtggctctagttttatagagctccaagtgtattaaacatgacagccattcattcataaagatctggatttgctttaccttgttaatattatctaggggaaaaagtgcaaattgctccatgttcttctctcccttatgtaacatctcctgagggtgtttagttgcatggctgttcagaaaggtattaagggcttaggccaaatcttactttgagtatgtt

SEQ ID NO: 94064 - DNA, 2829 bp, Homo sapiens
tctgtgcactttgccttcttcctattcattttgatgtgtgtggtttttataggatctcaaagctatgctgttcatcttttatactgctaggcttcacacagcattcccctagccttttcaccacctctgattattgctagtgacatctgacaaaacaatctaactgtcatcattctattggccggtttacagaggcttccggaacctgctctgttggtagcagccatttaactgatgtctttttgtatgattgttcatcacttaataaaggatgaattcagttaatggagaatcatcctcatttgcaccaactgataatgcgtctgtcacgggtactccagtagtgtctgaagaaaatgccttgtctccaaattgcactagtactactgttgaagatcctccagttcaagaaatactgacttcctcagaaaacaatgaatgtattccttctaccagtgcagaattggaatctgaagctagaagtatattagagcctgacacctctaattctagaagtagttctgcttttgaagcagccaaatcaagacagccagatgggtgtatggatcctgtacggcagcagtctgggaatgccaacacagaaaccttgccatcagggtgggaacaaagaaaagatcctcatggtagaacctattatgtggatcataatactcgaactaccacatgggagagaccacaacctttacctccaggttgggaaagaagagttgatgatcgtagaagagtttattatgtggatcataacaccagaacaacaacgtggcagcggcctaccatggaatctgtccgaaattttgaacagtggcaatctcagcggaaccaattgcagggagctatgcaacagtttaaccaacgatacctctattcggcttcaatgttagctgcagaaaatgacccttatggacctttgccaccaggctgggaaaaaagagtggattcaacagacagggtttactttgtgaatcataacacaaaaacaacccagtgggaagatccaagaactcaaggcttacagaatgaagaacccctgccagaaggctgggaaattagatatactcgtgaaggtgtaaggtactttgttgatcataacacaagaacaacaacattcaaagatcctcgcaatgggaagtcatctgtaactaaaggtggtccacaaattgcttatgaacgcggctttaggtggaagcttgctcacttccgttatttgtgccagtctaatgcactacctagtcatgtaaagatcaatgtgtcccggcagacattgtttgaagattccttccaacagattatggcattaaaaccctatgacttgaggaggcgcttatatgtaatatttagaggagaagaaggacttgattatggtggcctagcgagagaatggtttttcttgctttcacatgaagttttgaacccaatgtattgcttatttgagtatgcgggcaagaacaactattgtctgcagataaatccagcatcaaccattaatccagaccatctttcatacttctgtttcattggtcgttttattgccatggcactatttcatggaaagtttatcgatactggtttctctttaccattctacaagcgtatgttaagtaaaaaacttactattaaggatttggaatctattgatactgaattttataactcccttatctggataagagataacaacattgaagaatgtggcttagaaatgtacttttctgttgacatggagattttgggaaaagttacttcacatgacctgaagttgggaggttccaatattctggtgactgaggagaacaaagatgaatatattggtttaatgacagaatggcgtttttctcgaggagtacaagaacagaccaaagctttccttgatggttttaatgaagttgttcctcttcagtggctacagtacttcgatgaaaaagaattagaggttatgttgtgtggcatgcaggaggttgacttggcagattggcagagaaatactgtttatcgacattatacaagaaacagcaagcaaatcatttggttttggcagtttgtgaaagagacagacaatgaagtaagaatgcgactattgcagttcgtcactggaacctgccgtttacctctaggaggatttgctgagctcatgggaagtaatgggcctcaaaagttttgcattgaaaaagttggcaaagacacttggttaccaagaagccatacatgttttaatcgcttggatctaccaccatataagagttatgaacaactaaaggaaaaacttctttttgcaatagaagagacagagggatttggacaagaatgaatgtggcttcttattttggaggagctcttgcatttaaataccccagccaagaaaaattgcacagatagtgtatataagctgttcattctgtacagtgaattttccgaacctctcaaagtatgttttccgttcttccacagaaatatgcaaaacagttcatccttttctactttatttattgttcccttgaaatgactgaccaggaaaaagatcatccttaaattttgaagcaagtgagagactttattaaaaatacatatatatctatataaacatatatgatagtggctctagttttatagagctccaagtgtattaaacatgacagccattcattcataaagatctggatttgctttaccttgttaatattatctaggggaaaaagtgcaaattgctccatgttcttctctcccttatgtaacatctcctgagggtgtttagttgcatggctgttcagaaaggtattaagggcttaggccaaatcttactttgagtatgtt

SEQ ID NO: 94065 - DNA, 1796 bp, Homo sapiens
agcgggaggggctgctggcggctgggctgccggggccgacgcctgggtggctgctgccgccgcgcctgctgcgagatggcgatcttgggcgcggaagggtgagtggcgcccgccgcaggaggaggtgccgctgccgtggccgcccggctgccgggagccgacagcttcgcgccggggttgtctcctcacagactatgagctccttgaaagagggaatcgtgtcttactcatctttgtatccccagtgtctagcagttcctgatacatagttttagctgaattttgggacatggccactgcttcaccaaggtctgatactagtaataaccacagtggaaggttgcagttacaggtaactgtttctagtgccaaacttaaaagaaaaaagaactggttcggaacagcaatatatacagaagtagttgtagatggagaaattacgaaaacagcaaaatccagtagttcttctaatccaaaatgggatgaacagctaactgtaaatgttacgccacagactacattggaatttcaagtttggagccatcgcactttaaaagcagatgctttattaggaaaagcaacgatagatttgaaacaagctctgttgatacacaatagaaaattggaaagagtgaaagaacaattaaaactttccttggaaaacaagaatggcatagcacaaactggtgaattgacagttgtgcttgatggattggtgattgagcaagaaaatataacaaactgcagctcatctccaaccatagaaatacaggaaaatggtgatgccttacatgaaaatggagagccttcagcaaggacaactgccaggttggctgttgaaggcacgaatggaatagataatcatgtacctacaagcactctagtccaaaactcatgctgctcgtatgtagttaatggagacaacacaccttcatctccgtctcaggttgctgccagacccaaaaatacaccagctccaaaaccactcgcatctgagcctgccgatgacactgttaatggagaatcatcctcatttgcaccaactgataatgcgtctgtcacgggtactccagtagtgtctgaagaaaatgccttgtctccaaattgcactagtactactgttgaagatcctccagttcaagaaatactgacttcctcagaaaacaatgaatgtattccttctaccagtgcagaattggaatctgaagctagaagtatattagagcctgacacctctaattctagaagtagttctgcttttgaagcagccaaatcaagacagccagatgggtgtatggatcctgtacggcagcagtctgggaatgccaacacagaaaccttgccatcagggtgggaacaaagaaaagatcctcatggtagaacctattatgtggatcataatactcgaactaccacatgggagagaccacaacctttacctccaggttgggaaagaagagctgatgggagcaagatgcgcgcagtcttctcccatcagtacctaatttattgagagtttttagcatgaagggttgttgaattttgtcaaaggctttttctgcatctattgagataatcatgtggtttttgtctttggctctgtttatatgctggattacatttattgatttgcgtatattgaaccagccttgcatcccagggatgaagcccacttgatcatggtggataagctttttgatgtgctgctggattcggtttgccagtattttcttttcttttacattccctttcctctaggtaataaaggcctgacatatctgatgggtgcaagactt

SEQ ID NO: 94066 - DNA, 369 bp, Homo sapiens
agggttgattgggaggagaaagaagggggtgactgcttaatggtatggagtttatttttatggtaacaaaactgttttaaaattgattgtggtgatggttgtgccactctgaatatagtgaaaccattgaattgtacagtttaagtgggtgaattatatgatatgtgaatgatagctcactaaaactgttacagaaacattcaaatggctctcaagcattatcagtagcccttttgtattgtttcttcattctgccaacgagaagagttctagttgcacaagaagcacaattccattcttattgattgattagtgtgcagtactactttttggcaacacatactcactagtgaattatttgtctgttag

SEQ ID NO: 94067 - DNA, 3761 bp, Homo sapiens
agcgggaggggctgctggcggctgggctgccggggccgacgcctgggtggctgctgccgccgcgcctgctgcgagatggcgatcttgggcgcggaagggtgagtggcgcccgccgcaggaggaggtgccgctgccgtggccgcccggctgccgggagccgacagcttcgcgccggggttgtctcctcacagactatgagctccttgaaagagggaatcgtgtcttactcatctttgtatccccagtgtctagcagttcctgatacatagttttagctgaattttgggacatggccactgcttcaccaaggtctgatactagtaataaccacagtggaaggttgcagttacaggtaactgtttctagtgccaaacttaaaagaaaaaagaactggttcggaacagcaatatatacagaagtagttgtagatggagaaattacgaaaacagcaaaatccagtagttcttctaatccaaaatgggatgaacagctaactgtaaatgttacgccacagactacattggaatttcaagttaggagccatcgcactttaaaagcagatggttgcatagacggaggacgtggggactgggtcggaacaggaatatatacaggaagtagtcgtcgatggagaaattacgaacaacagcgaaatccagtagttcttctaatccaaaatgggatgaacagctaactgtaaatgttacgccacagactacattggaatttcaagtttggagccatcgcactttaaaagcagatgctttattaggaaaagcaacgatagatttgaaacaagctctgttgatacacaatagaaaattggaaagagtgaaagaacaattaaaactttccttggaaaacaagaatggcatagcacaaactggtgaattgacagttgtgcttgatggattggtgattgagcaagaaaatataacaaactgcagctcatctccaaccatagaaatacaggaaaatggtgatgccttacatgaaaatggagagccttcagcaaggacaactgccaggttggctgttgaaggcacgaatggaatagataatcatgtacctacaagcactctagtccaaaactcatgctgctcgtatgtagttaatggagacaacacaccttcatctccgtctcaggttgctgccagacccaaaaatacaccagctccaaaaccactcgcatctgagcctgccgatgacactgttaatggagaatcatcctcatttgcaccaactgataatgcgtctgtcacgggtactccagtagtgtctgaagaaaatgccttgtctccaaattgcactagtactactgttgaagatcctccagttcaagaaatactgacttcctcagaaaacaatgaatgtattccttctaccagtgcagaattggaatctgaagctagaagtatattagagcctgacacctctaattctagaagtagttctgcttttgaagcagccaaatcaagacagccagatgggtgtatggatcctgtacggcagcagtctgggaatgccaacacagaaaccttgccatcagggtgggaacaaagaaaagatcctcatggtagaacctattatgtggatcataatactcgaactaccacatgggagagaccacaacctttacctccaggttgggaaagaagagttgatgatcgtagaagagtttattatgtggatcataacaccagaacaacaacgtggcagcggcctaccatggaatctgtccgaaattttgaacagtggcaatctcagcggaaccaattgcagggagctatgcaacagtttaaccaacgatacctctattcggcttcaatgttagctgcagaaaatgacccttatggacctttgccaccaggctgggaaaaaagagtggattcaacagacagggtttactttgtgaatcataacacaaaaacaacccagtgggaagatccaagaactcaaggcttacagaatgaagaacccctgccagaaggctgggaaattagatatactcgtgaaggtgtaaggtactttgttgatcataacacaagaacaacaacattcaaagatcctcgcaatgggaagtcatctgtaactaaaggtggtccacaaattgcttatgaacgcggctttaggtggaagcttgctcacttccgttatttgtgccagtctaatgcactacctagtcatgtaaagatcaatgtgtcccggcagacattgtttgaagattccttccaacagattatggcattaaaaccctatgacttgaggaggcgcttatatgtaatatttagaggagaagaaggacttgattatggtggcctagcgagagaatggtttttcttgctttcacatgaagttttgaacccaatgtattgcttatttgagtatgcgggcaagaacaactattgtctgcagataaatccagcatcaaccattaatccagaccatctttcatacttctgtttcattggtcgttttattgccatggcactatttcatggaaagtttatcgatactggtttctctttaccattctacaagcgtatgttaagtaaaaaacttactattaaggatttggaatctattgatactgaattttataactcccttatctggataagagataacaacattgaagaatgtggcttagaaatgtacttttctgttgacatggagattttgggaaaagttacttcacatgacctgaagttgggaggttccaatattctggtgactgaggagaacaaagatgaatatattggtttaatgacagaatggcgtttttctcgaggagtacaagaacagaccaaagctttccttgatggttttaatgaagttgttcctcttcagtggctacagtacttcgatgaaaaagaattagaggttatgttgtgtggcatgcaggaggttgacttggcagattggcagagaaatactgtttatcgacattatacaagaaacagcaagcaaatcatttggttttggcagtttgtgaaagagacagacaatgaagtaagaatgcgactattgcagttcgtcactggaacctgccgtttacctctaggaggatttgctgagctcatgggaagtaatgggcctcaaaagttttgcattgaaaaagttggcaaagacacttggttaccaagaagccatacatgttttaatcgcttggatctaccaccatataagagttatgaacaactaaaggaaaaacttctttttgcaatagaagagacagagggatttggacaagaatgaatgtggcttcttattttggaggagctcttgcatttaaataccccagccaagaaaaattgcacagatagtgtatataagctgttcattctgtacagtgaattttccgaacctctcaaagtatgttttccgttcttccacagaaatatgcaaaacagttcatccttttctactttatttattgttcccttgaaatgactgaccaggaaaaagatcatccttaaattttgaagcaagtgagagactttattaaaaatacatatatatctatataaacatatatgatagtggctctagttttatagagctccaagtgtattaaacatgacagccattcattcataaagatctggatttgctttaccttgttaatattatctaggggaaaaagtgcaaattgctccatgttcttctctcccttatgtaacatctcctgagggtgtttagttgcatggctgttcagaaaggtattaagggcttaggccaaatcttactttgagtatgtt

SEQ ID NO: 94068 - DNA, 2234 bp, Homo sapiens
acgccgcaccgcggttcaaaacagtgggaacaaagaaaagatcctcatggtagaacctattatgtggatcataatactcgaactaccacatgggagagaccacaacctttacctccaggttgggaaagaagagttgatgatcgtagaagagtttattatgtggatcataacaccagaacaacaacgtggcagcggcctaccatggaatctgtccgaaattttgaacagtggcaatctcagcggaaccaattgcagggagctatgcaacagtttaaccaacgatacctctattcggcttcaatgttagctgcagaaaatgacccttatggacctttgccaccaggctgggaaaaaagagtggattcaacagacagggtttactttgtgaatcataacacaaaaacaacccagtgggaagatccaagaactcaaggcttacagaatgaagaacccctgccagaaggctgggaaattagatatactcgtgaaggtgtaaggtactttgttgatcataacacaagaacaacaacattcaaagatcctcgcaatgggaagtcatctgtaactaaaggtggtccacaaattgcttatgaacgcggctttaggtggaagcttgctcacttccgttatttgtgccagtctaatgcactacctagtcatgtaaagatcaatgtgtcccggcagacattgtttgaagattccttccaacagattatggcattaaaaccctatgacttgaggaggcgcttatatgtaatatttagaggagaagaaggacttgattatggtggcctagcgagagaatggtttttcttgctttcacatgaagttttgaacccaatgtattgcttatttgagtatgcgggcaagaacaactattgtctgcagataaatccagcatcaaccattaatccagaccatctttcatacttctgtttcattggtcgttttattgccatggcactatttcatggaaagtttatcgatactggtttctctttaccattctacaagcgtatgttaagtaaaaaacttactattaaggatttggaatctattgatactgaattttataactcccttatctggataagagataacaacattgaagaatgtggcttagaaatgtacttttctgttgacatggagattttgggaaaagttacttcacatgacctgaagttgggaggttccaatattctggtgactgaggagaacaaagatgaatatattggtttaatgacagaatggcgtttttctcgaggagtacaagaacagaccaaagctttccttgatggttttaatgaagttgttcctcttcagtggctacagtacttcgatgaaaaagaattagaggttatgttgtgtggcatgcaggaggttgacttggcagattggcagagaaatactgtttatcgacattatacaagaaacagcaagcaaatcatttggttttggcagtttgtgaaagagacagacaatgaagtaagaatgcgactattgcagttcgtcactggaacctgccgtttacctctaggaggatttgctgagctcatgggaagtaatgggcctcaaaagttttgcattgaaaaagttggcaaagacacttggttaccaagaagccatacatgttttaatcgcttggatctaccaccatataagagttatgaacaactaaaggaaaaacttctttttgcaatagaagagacagagggatttggacaagaatgaatgtggcttcttattttggaggagctcttgcatttaaataccccagccaagaaaaattgcacagatagtgtatataagctgttcattctgtacagtgaattttccgaacctctcaaagtatgttttccgttcttccacagaaatatgcaaaacagttcatccttttctactttatttattgttcccttgaaatgactgaccaggaaaaagatcatccttaaattttgaagcaagtgagagactttattaaaaatacatatatatctatataaacatatatgatagtggctctagttttatagagctccaagtgtattaaacatgacagccattcattcataaagatctggatttgctttaccttgttaatattatctaggggaaaaagtgcaaattgctccatgttcttctctcccttatgtaacatctcctgagggtgtttagttgcatggctgttcagaaaggtattaagggcttaggccaaatcttactttgagtatgtt

SEQ ID NO: 94069 - DNA, 414 bp, Homo sapiens
ttccgtgactcgtgggtaggcagcgtctcacgtggccatgcatgtcagtgacccacacagcctccacactgtgaggttagcatgtctcgtgggcagacagcagtgtccttggatgtacccgggggctttgtgctgtagagatgttattttaaataataagccaagtcgaggatgggagcgtttccatggcaacttgaattttaaaaccaagatttctttggttactgtggtggctgagaacactggcagctgccatgtccagtggctctcaactcctggaggacaacctgccgtggccattccctggagtcccacagggccccctcgccacttcactagcaggcgacttccctgcacccgccctccttttcatggttcccaggccctcccacacctccctgtgctccctactca

SEQ ID NO: 94070 - DNA, 382 bp, Homo sapiens
gcctcctgggtataagagccccttgtcttacctttgcaggcccatgcctgatacaatttggatgtttgtccctcctcatctcatgttgaaatgtgatccccagtgttggaggtgaggcctagtgggaggtgttgggtaacaggggtgaatggcttggtgctatcctcgtgacagtgagtgagttcttcttgcaagatccttaaaagtatatgccacctccccctctctctaactcctgatctcctgtaacatgcctgctcccccttcaccttctgtcatgaatgtaagcttcctgaggcctcaccagcagtagatgccagcaccatgtttcttgtactatctgcagaatcatgagccaattaaatctctttactttataaat

SEQ ID NO: 94071 - DNA, 165 bp, Homo sapiens
gcagataaagtctccctggtgataaaagttgttggagcagctctcttccgggtgcagacacctcactaaagcggctctcctttacagatgcaaattgcttttacaaaaggacagcttttcagagcgactcctggctccgcagtttctcagaataaccggcagtga

SEQ ID NO: 94072 - DNA, 357 bp, Homo sapiens
tatttctttgacagggaaggagacttggtctgaaagatgccacattcctgcagcctctcttggtgcagtggaatacagtcttgggcgaggtggcgtggatgagctggtgaaagaggatgctgcccacatccaaaggctccagaggatcctggcctggcagctgagctcccctgcatttggaacctcaggcgtaacttggtgtagagctcatgaaaggtgcttgtgtttctccagcttttttcaccagtgcttaccagactggctcaggttttggaatctaaggtgagctggtagaaacaggagaggtagaaagaagcccctggatgcctccagaattcattgatgggatccctgcat

SEQ ID NO: 94073 - DNA, 167 bp, Homo sapiens
aatcctctccgtctcagaagcctaaagggggagtgagttggttttgggaggatgaactggaggagacgctgtgggtggagaaaaagcaggtggaaagagggtatgtgtttgagtgcctactgtgtgcaggaccaggtgagaaggtgctgatctggatgcacaggctg

SEQ ID NO: 94074 - DNA, 1930 bp, Homo sapiens
ctttcacttctttgacttcatcttctccattctttcatggtgccttctggattgctcctagtacacttaggcatactcctgcctcagggcctttacatttgctatgctttctgcctgggaagttgtctgctcagatatccctaacctccctcaagtcgttcctcaaatgttacctcctccagaagctttccttgatcatcacccctctccgaacatagcacccctcatactttctatgtaccctctctgcttaatttttatccacagcatttctttctttctttcaaaacagggtctcactctgtcacccaggctggaatgcagtgggctcaagtgatcctcccacctcagcctcctggatagctaggactacaggtgcacgccaccatgcctggctaatttttaaactttttgtagatagggggtcttactatgttgcccaggttgggtctccaacttctggcctcaagtgatcctcctcctttggcctcccaaactgcgggattacaggcatgagacagcactcctagcctctccatagcatttctaatcatacagcagtccatatattgtccttatacatttaccatctgtctttcccacgtggaagaggtaagctccacgagggctggaattgttgtttgtgctctctgctgtgtcctcaacccctagaagcgtgcctagcatgcaaaaggcactcagtatatatttgttgagtaaatgaatgcttcccccaccttccaactgttagagcaggccaaggggacctgttgtgcagaacttcacagctttctactctgagctctatcttccttgttcttccccagcttttacttaggagccacttcttgactgagcttgtcacaggtgaaaggctgatgaatctggagagatacttgtggcaagtacccggtgttcctgcagtcatccacaagcgcagcagtggtggtagacagctagagaagaaagtgtaaagtttgcatcctccaattatcacggttgcaagacagaacttgaaactagatacacctgattttggttatctctggatgccattcaccgagaatgaagggaagaagatacttcctccaaaggagaatctgatgaggcgccagcaggctgctgctgcggtggaaactgccacatccgcttttgcaaactggtgtggccccagctgcttggactgaggctcaacgcaggtttcagccacttcaaccacagggctacgaacatgccaagagagccactaaccaagtttctcattcctcctctgagatttaaagtccatcacttcgcgactcaaacacgcaagaggcgtgggagacggaggaatggggaagcgaggcggcgctgcccaccttggcaatggcacagccgcggtctctgatgcaaaggcaggcggccgcgcagggccgggcctgggtgggaaggctgggctctgggaaggatgtcggggcacccggcagtgcccaaagccaccatctcaagcgtgatagtggggaaatggatgctgcacctgctctctcatcttgcggggaatcgtgatttggggaagtttcacctttgttgcagaactgcccacattagagccttcatttcttgggaaggggttggcgggagttgccagtgaaatgtgtgacacacacacgcgccacatactccccaaacccacagacgactccagtaacgctctagttacccttaaaaagtaaaacagaacaaatcagcaggccccctccctccatcctggcacttcattaatgtcggccaaggccacatttcccctgcccactgcagggagtctgtcaggagaacaacaggcgaacgtttgcctcacttgactcagctctcttggggcggtatcagcattttaaaattcacacctaaaggaaggagtcagcaaaggaaagcagagctgggccggggcgcc

SEQ ID NO: 94075 - DNA, 1719 bp, Homo sapiens
ctttcacttctttgacttcatcttctccattctttcatggtgccttctggattgctcctagtacacttaggcatactcctgcctcagggcctttacatttgctatgctttctgcctgggaagttgtctgctcagatatccctaacctccctcaagtcgttcctcaaatgttacctcctccagaagctttccttgatcatcacccctctccgaacatagcacccctcatactttctatgtaccctctctgcttaatttttatccacagcatttctttctttctttcaaaacagggtctcactctgtcacccaggctggaatgcagtgggctcaagtgatcctcccacctcagcctcctggatagctaggactacaggtgcacgccaccatgcctggctaatttttaaactttttgtagatagggggtcttactatgttgcccaggttgggtctccaacttctggcctcaagtgatcctcctcctttggcctcccaaactgcgggattacaggcatgagacagcactcctagcctctccatagcatttctaatcatacagcagtccatatattgtccttatacatttaccatctgtctttcccacgtggaagaggtaagctccacgagggctggaattgttgtttgtgctctctgctgtgtcctcaacccctagaagcgtgcctagcatgcaaaaggcactcagtatatatttgttgagtaaatgaatgcttcccccaccttccaactgttagagcaggccaaggggacctgttgtgcagaacttcacagctttctactctgagctctatcttccttgttcttccccagcttttacttaggagccacttcttgactgagcttgtcacaggtgaaaggctgatgaatctggagagatacttgtggcaagtacccggtgttcctgcagtcatccacaagcggcttttgcaaactggtgtggccccagctgcttggactgaggctcaacgcaggtttcagccacttcaaccacagggctacgaacatgccaagagagccactaaccaagtttctcattcctcctctgagatttaaagtccatcacttcgcgactcaaacacgcaagaggcgtgggagacggaggaatggggaagcgaggcggcgctgcccaccttggcaatggcacagccgcggtctctgatgcaaaggcaggcggccgcgcagggccgggcctgggtgggaaggctgggctctgggaaggatgtcggggcacccggcagtgcccaaagccaccatctcaagcgtgatagtggggaaatggatgctgcacctgctctctcatcttgcggggaatcgtgatttggggaagtttcacctttgttgcagaactgcccacattagagccttcatttcttgggaaggggttggcgggagttgccagtgaaatgtgtgacacacacacgcgccacatactccccaaacccacagacgactccagtaacgctctagttacccttaaaaagtaaaacagaacaaatcagcaggccccctccctccatcctggcacttcattaatgtcggccaaggccacatttcccctgcccactgcagggagtctgtcaggagaacaacaggcgaacgtttgcctcacttgactcagctctcttggggcggtatcagcattttaaaattcacacctaaaggaaggagtcagcaaaggaaagcagagctgggccggggcgcc

SEQ ID NO: 94076 - DNA, 582 bp, Homo sapiens
gtggaatgtcatcaattaaggcaggaaccggccatctggatgtgtatgtgcaggtcacaggggatatgatggcttagcttgggctcagaggcctgacagctatgtcctagatcttggaatgttttcacgttgattttattgcacaaactgatagtctttcccgattacatctctgataatgcattttaaatcatttaataacattttacacctttagacattttaaaacaaagggtttagacatttttaaactgttaccattaactctgattgatacaattgagagtcagaagaaagtaagccatatatcaagcaatacaatcattatcattgaatcaaaaacaacccaattgcaacaggtgtattagctctacaattgttctcgaaataataaataatttactgtgttattttcaaatatatcgatggcctaaatgtggaaaaatgtaattcccagaaaacagaaaaacaactcagcaaagatcccatttcaactaccaaggcttatcccccatgcttacatgattattttgcgtattaaggagattttcactaagcttacttgatagttaaagttctcca

SEQ ID NO: 94077 - DNA, 501 bp, Homo sapiens
aggcctgtttctccacctgagccctggccctggcaggctggctcacagctctgacttgaggaggcaggtgaaggcgtcaccctgtgagtctgcggacgtccgggaaccggggcccctcctgcacacagctggccttcccgccttccaggggccagcctccctgtgtgcctaatggctggtagtctcgggagtgcaaagtccagccacccccagatggtgggctctgtggttggtgcccaccgtggggtcaccccagcacccacttatctaatcggccccatcgctccgcccggccccgccctgtggctcccataggccagctgggtccagctttgttgggagcggccctgtctcagggatcatgctgtttgcttttgataaaagtcacaaaaaaggaaagaaaaaggagtgagggggagggaaggaaaaaccccaggctgacggggttctggaagcctctgtgggtcagcggactggcggtgaggctggtgcacagaccac

SEQ ID NO: 94078 - DNA, 348 bp, Homo sapiens
ggtgaggttaagtgttgtgagcatatgctcagaaatgccatgtgactctaatcatctccacttgagcagtttctctgtctagtaaattgcatattgcagtaaaaagggatctctccgagttctcatgtattttttaaattgtgtttactggaatactgcaaaccttgaataacactgtgggacccatacaaaatgctacttgtgatcctggaagtacttctaagaacagagaaaagtcatgatattataagaaaaaagttgaatgcagctgggtgcacaggctgaggcaagaggattgcttaagcccaggagttctaggtactagtgtgctgtgattgtgcctgcaaa

SEQ ID NO: 94079 - DNA, 280 bp, Homo sapiens
cctgttatccaatttgatgagctcaaagtctgttgggtgagacagatgtaaaaagatatcataatataaaaataagaatgaaatactgacttgcaggggcccaaggggtagttgtaagagaagggaagatcagaggtatgggggcgtctttgaggatgtcacacatctgatgtcaggcaagtacttgaggaaatgtgacaagtttattgtaaatgaatcacaggggcccacagggtacctagtggagcagatggaaaggggttggagctctaatcctgga

SEQ ID NO: 94080 - DNA, 756 bp, Homo sapiens
tttaatgaacgacttgaattaaaatagaaatgcagttttatttcagtgtattttctgatgtggaaatattgtaagttttctaacctgacgtctcatgctcttttctacaaggcactgctgcttaaaataataagaatgtgtttttaaaaataaagtttttatttatatgcagggttaccttcaaacttggctcttaatttaactataaaggagtatgagtattttatctttaatttttttaatgaaataaggcctgtatggaccatttgttaagactctaagatttcagatttttttcatattaatcaatctagagagactttgctattgaatagtgggcttatattacataagtacttatgaagattgctcataacaccaaaatagtgaaataaagtgttcacaagagaaaggaaaacattatcatagtttaataagttttatttgtgcttttattttcattcacattttatatattctctctcatggcaatttaattttagcttgtttatcagtgagatgtacccatgtgatttttttttcccccctcaattctgatactagacacatacaatttttttgtttgttttaatgctctctgagatgttctcaagacacacgtgattttaaagtcagtgcctatgtggctctttttcctccagtatattattttccattcttttttttttggctgtgttgcccaggctggtctcaaactcccaggctaaagtgatcctctcacctcagcctcctgag

SEQ ID NO: 94081 - DNA, 281 bp, Homo sapiens
gagatggagtctcactctgtcacccaggttggagtgcagtggtgcaatcttggctcactgaaacctccacaatcttctcagctcagcctccggagtacctggtaccacaggcgtgtgccaccacacccagcttatttttggcagagatggggttttgccatgttgcccaggctggtcttgaactcctgagctcagaaaatccacctgcctcagcctcccagcatatagggatttacaggcattagccaccatgcacagccagatttttctactacatattt

SEQ ID NO: 94082 - DNA, 670 bp, Homo sapiens
tgttattaagtccattgttaggagtggttcctaatctcccaggctgcaggctttgtttgctccatacacctggccttctctgtagcagctgaagtttgatgctggagctgggtcagggtggagagactgtgtggagccaggactcatgaccctggcctgtttctcccgctctctaggcctaaatcccagcagtcacactggccatctctaatggttccttccacagcactgttcttcagagcccacacacaaattttgtctccttttgtgatgactgcacttctttggctgtttttgccaacagcctcttcactgaccccttccttccactgcattgacccagacatctggatgtggatgaggtcgagtcacttgttgcctttggctaatgcataggggcacgagtagagctctagaatcaccatgcccttgactcagggtgcagaatctgcctatggtgcttgagctgtggttgtcgctagaggagaattaccatggctcccccgggcagatgaagatgacgaggtggtgcctcagccccgaggagtgaactgcagggcaccgacaagattctgcctgtggccatcagggctggagggaaggaggccaggttcatctacccaagctggtggcatgaggcataaatttaaaaaaattggtgtgggcacag

SEQ ID NO: 94083 - DNA, 86 bp, Homo sapiens
ttattcacctgctattttatcaatgtcatttataaattaaaatttttcttattataactataccttaaaaacaccaataaaattgc

SEQ ID NO: 94084 - DNA, 469 bp, Homo sapiens
tctcaaaatcctgcctcagccttccaagtagctgggactacaggtgtgcaccactacgcctggctaaattttgtatttttagtagagacggggtttcggcacgttggccaagctgatctcaatctgctgacctcaaatgatctacccgctttggcctcccaaaatgctggtattacaagtgtgagccactgtgccctcttttgtaattttattggcctgtgaaaatcagagatccaggaaccgctgtttaaaacactctggcttattcatcttattatttatagatttctcacgatagatcagtttatttcttagtttgatttgaacatatttcacagaatgattaataatgaaatactgggtgccaacggcctacttttatttggctttttatgtgttgcttcttgttaccttatacccaaccatgtgggattgagtttattgtgctaataggcaggtattacctata

SEQ ID NO: 94085 - DNA, 439 bp, Homo sapiens
ggcgccccgggtatccctttatgccacgctcacagctcgcagcccggggggcactccaggttccgtttctcgggggatctcacactggggagctgctgtaggtaaatcgccgctggaagcagtttaattccagttgcgggtgtcttaaaaatcccattggctgctttagtatctgtcttattcccccttctttctctgctccccccaaccccccactatctcttaaatgtttccaaccagcactattcaggtggtaaaattactgcctgcatattcctggaggaacttgtgttatgtttaatatttacggggatgaacatctgctggaacaagcatattaactgcactctgttctgcctctggtaatcgcttattgtagagctgagcttttttttttttccttttgctttaattcagtaaagagttcacatgtgtctaa

SEQ ID NO: 94086 - DNA, 463 bp, Homo sapiens
atacatgttcttacgttagggttctccagggaaatagaatcgttgggaaatagataaaatatgaaggagatttattatgaggaaattggtttatgctattttgaagactgagaagtcccgtggagtgctgtctgtaagccaagcctcgggaaagctggaagtggaattcattctgcaggtctagaaccaggggacccagtggtgtcagttccagtccaagggcaggagaagactgatgttccagctcaggcaggccagcaggaagaaaaaggggtaaattcctccctcctctaccttttgttctattcaagcccttgacagaatggattatggccacccacattggtgatggcatcttctttgttcagtctgctgattcagatgcacagacacacccacgaacagtgtttaatctaggcactctgtggcacagttaagttgacacacaaaattaatcatcaca

SEQ ID NO: 94087 - DNA, 427 bp, Homo sapiens
ggaagacactgggttacctgaatcttgaagagtctggttaatgtcttgactcctaacatgtgacattattttcaattggtcccacttggcagttagggagaaatttctcctttacatcaagaggaaggtcaaaggaaagggtaatctcaagtgtaagagctaaggctttaataagcaaatagttaagacttaagatccccaaagaaaaagaacattttatattaaggactcagtaagtgggagttttacttctcattcccaaggagctccctatttctcactctggctctgaaaagagccctgcaaagcaacatggtcactgacgcctattgtgagaaaatgtgtgaatggagtcttaccactcctcttcactaaggtctttagtaaaatttcaaagtcaattttaccaacagtaaaagttaccctg

SEQ ID NO: 94088 - DNA, 419 bp, Homo sapiens
ctgaggaggctctggggacagggtgaagggcagtccaggaacagaaagcccgcagctcagagaccagccaggggctgctgagaaggtctagggaggaggtgacctggatggatgggggaggcctggggcaagcatcctggggcgggcagaagcaatcaggtgccccaggtctaatgccggcaggtgggacacatgttggcagcttccatggaagaagcctctactgaaaaccacatcgggttctggggaagcactggggaggccatcgtctgagctttagggacaaccttgctatgcacggacagtggtagtcagtccgctgtaggaatctaggggttagatgacagtctacagatctggacccattgcagacaagatcacggagtcccggcaggaagcagctatctgggaacaggtgt

SEQ ID NO: 94089 - DNA, 1293 bp, Homo sapiens
atttaacacataattattctatttgatcacttaatcttacatgtatagcattaaacatatatgggatattttcttttttttgtaatatgttttcgtaatgtacgtgacagatcttataagtataatgtacattatttcctactacaaaaatttaattttccatgaaattattgatagaaatttataacaagcctaaaaatcatctagattatcaagattgttttatttttaatggttattgaatgatttatttttatcaatttttaaacattatgtaccagaaatatgtctgaggttcactttctaattgatattgaaatttgtaacatgttcaatgagaatattatgtgtaagagtacaattgagatattgcttgacaactttatgtagactgagtagagaagaaaacatttgaaaggaattatgttagaaattatgtcttttggcatgtttttctaggtttggcaaaaaaaattacttatttttaacacttctttttccgtgttgatcatacattttttgttcttttattcattttcaaagaaaaccgggaaatgagcaagacaagtgggcgactcaacaatggcatacctcagattccagtgaaacagaggagaatccgaatttgattcttttaggcagtctttaccagtgtttgagaaacaggaagaaattgttaacaataattaaggaaaataaagtagttttgattgtaggagaaactgggtctggaaagaccacacagattcctcagttccttttagatgattgctttaaaaatggtatcccctgccgtatattttgtactcaaccaagacgattggcagctatcgctgtggctgaaagagttgccgcagagagacgggaaaggattggtcaaacaattggttatcagatccgattagaaagcagggtttctccaaagacacttctgacattttgtactaatggggtattgcttcgtacattgatggcaggagatagtacgttgtcgactgtgacacatgttatcgtggatgaagtgcatgaaagggatcgatttagtgattttttacttacaaagttaagagatttgttgcaaaagcacccaactttgaaactaattctttctagtgctgccttggatgtaaatctctttataagatattttggaagttgtccagtgatatatatacagggaagaccatttgaagtaaaagaaatgtttctggaagatattttaagaacaactggatatacaaacaaagaaatgttaaaatataaaaaggaaaaacagcaaggtaaattttttaa

SEQ ID NO: 94090 - DNA, 1395 bp, Homo sapiens
ggcttcacttctgctgtggcggtgactgaggcctttctggtgacctcagcccaacacaggccgtctccggagcttcccggtagtggccccggattcccacggtctttgtcattggctgtcagctagcaggcctggccgctcccgtgcggagagaccatctcttcagggcaatgtccaggccgagcagcgtctccccgcggcagccggctcctggcggtggcggaggcggcggcccctcgccttgtggccctgggggcggcggccgggccaaggggctgaaggacattcgcattgatgaggaggtgaagatcgcagtcaatatcgcgctggagcgcttccgatacggggaccagagagaaatggaatttccttcttctttgaccagtactgaaagagcctttattcatcgactcagtcagtctcttggtttggtctctaaaagtaaaggaaagggagcaaatagatacctaactgtgaagaagaaagatggatcagaaacagctcatgcaatgatgacctgtaatttgactcataatacaaaacatgctgttaggagcctaattcaaagatttcctgtcaccaataaagagcgtacagaacttctgcctaaaacagaaagaggaaatgtgtttgcagttgaagctgaaaaccgggaaatgagcaagacaagtgggcgactcaacaatggcatacctcagattccagtgaaacagaggagaatccgaatttgattcttttaggcagtctttaccagtgtttgagaaacaggaagaaattgttaacaataattaaggaaaataaagtagttttgattgtaggagaaactgggtctggaaagaccacacagattcctcagttccttttagatgattgctttaaaaatggtatcccctgccgtatattttgtactcaaccaagacgattggcagctatcgctgtggctgaaagagttgccgcagagagacgggaaaggattggtcaaacaattggttatcagatccgattagaaagcagggtttctccaaagacacttctgacattttgtactaatggggtattgcttcgtacattgatggcaggagatagtacgttgtcgactgtgacacatgttatcgtggatgaagtgcatgaaagggatcgatttagtgattttttacttacaaagttaagagatttgttgcaaaagcacccaactttgaaactaattctttctagtgctgccttggatgtaaatctctttataagatattttggaagttgtccagtgatatatatacagggaagaccatttgaagtaaaagaaatgtttctggaagatattttaagaacaactggatatacaaacaaagaaatgttaaaatataaaaaggaaaaacagcaaggtaaattttttaa

SEQ ID NO: 94091 - DNA, 320 bp, Homo sapiens
caagcatgtgaatgtcaggagcagagagaaagggaagggaagaagaagggaggagagagaagagggatggtgtttgggggcattgggatggctctcttccttcttggtctaaatcacagagcctgatcaggagagggtcagagttccagactcttgaagagtcaggaagaacatcagaagtgaagctactgccatctgaggtggccctgggttggctattcacagagggctggaatgggatgatggggctgtactccccactaaggctgccagatctggaacttgaccttgaagtctagttatccaggactcttaaggct

SEQ ID NO: 94092 - DNA, 129 bp, Homo sapiens
catccttccctcactcaccctgtaccagctgcaagggcaccttgcaagctttcaaacacccaagcacgttgttgcctcagggactttgcatgactttttctctgtcccaacagtctttatttttattta

SEQ ID NO: 94093 - DNA, 551 bp, Homo sapiens
ctttcgctgttctcgcgaagtgatctatctgaaataaaaatctaatcatgggagtctgtcttaaatgttcactgcctccctattgccaacagaaagtagctttacctctcaaatgttttctatgcacaagtcactctttaaaaatattatattgtataatccaaacagcaactaaatgaggtacttacctttattatcaccattttataaatgaggaaacaaatacagagaaaataaatacctggcccaaggtcacatagctgataataacagggccaggattcggcccaagcagtctgatgatagatgccctgtgtgtaaacactatgcaatgatacttctaatttcttagcttcccacaaaggcagggtttgaatttcaaagtgaaccaagagaggatgggcccattttatatcatcctataccaatgaatgtggcctgccttgccacactgtgtaaaggagattgtttcacattttatggtataaacttaatgctgaaaggcagtagttcttatcgcctgagttggtacaagtactaatggttcttaa

SEQ ID NO: 94094 - DNA, 614 bp, Homo sapiens
  misc_feature (2)..(2): n is a, c, g, or t
  misc_feature (10)..(10): n is a, c, g, or t
  misc_feature (12)..(13): n is a, c, g, or t
  misc_feature (16)..(16): n is a, c, g, or t
  misc_feature (21)..(21): n is a, c, g, or t
  misc_feature (27)..(27): n is a, c, g, or t
  misc_feature (594)..(594): n is a, c, g, or t
gngaggcagnannatngcttnaacccnggggtcgggggcggaggcggaggttgcagtgggccgagatcacgccattttctgggcgagagagcgagactccgtctcaaaaaaaaaaaaaaaaaccatgaaagaaataagctcagtgaaggcgggcattctgcctggctaacgcaggtcgctccttgccgtgcctggaacattactgtaagtgctcagcaaactactttaaggtaggaataaaatctgcaaggttgcttttgtttaaattggataaccttttgtgttccaagtctttggagtaattttgtgttccaagtctttggaataattgtgtccttaattattatactagtcactgttaaattttgaaactccagtgcgtcccatgaaggtaatgatacaaaacatttccagctgggattgttccagggaatccagactaatcaattatctgggctcattatatctatggatctttatttttcacctctttccttatgtttttcttaatccttctagctgatagtgatcactccctttaaaactgtcattcttaaaatcagaacaacatagtttatcatttacttattattntcttcatgtgattgttctcc

SEQ ID NO: 94095 - DNA, 646 bp, Homo sapiens
ctttaaacttatttggcacttctcataggaccttaatagcatttatgtaaacctaacgtttaaaggactcatgaggagtttcctttggcctgcagtgtcttgtttttacctttttttttttaggttggtgaaatgccagggtgcaggggatagccagttggattagagcataagtactgctccaattatttggcagagtgtctagtaaaagtcctctacaatatcaccatacatttgcttggggatggctaagcgtggactgatgggcaagctcttggaaaggcttgagctccttgcatccttttatgcttctaaggaacaccaaattttactcttgccgtgagaggcacaaagtaaacttggcattcagaggtggaagcaggcttgccctcgggggcggacccccggggtattgagtttcaggaaataacagatagagagctcagcatgatggattatcctaaactgtgggattttgcaagagagccaccatatgtccatttctggtcaatgaggagaccgtccgagtggaaaggggataatctggacctctgggctaccatgcgtacaagcgtgataataatttttatttaaagtgcgaagggaatatttaattcattccagccaggcatttgcatcttgatat

SEQ ID NO: 94096 - DNA, 907 bp, Homo sapiens
ccaaggcatccacctgcaccctgaagcctggcatcgtgtactaccacggtggcgggggcgtcatggggagtttgaaaacccaccatggcatatgctctcgtttgtgcaaggagagtgactccgtggttctggcagttggttaccgcaagttacctaagcataagtttccagtgccagtaagagactgcttggtggccaccatccacttcctgaagtccctggatgcatatggagtggatccagcccgggttgtggtctgcggtgacagtttcggaggggcaatagccgcagtggtttgtcaacaacttgtggacaggccagatctgccccggatccgggctcagatcctgatctatgccattctccaagccctggatttacaaaccccttcgtttcaacagaggaaaaacatcccactgctcacctggagtttcatctgctactgtttttttcaaaacctggatttcagctcctcctggcaagaggtcatcatgaaaggtgcccatttgcctgctgaagtctgggaaaagtacagaaagtggttgggcccagaaaacatccctgagaggtttaaggagaggggttaccaactgaagccccatgagcccatgaatgaagctgcttacttggaagtaagtgttgtcctggatgtgatgtgctcgcccctgattgcagaagatgacatagtgtctcagctcccggaaacctgcatcgtgagctgtgagtatgatgctctccgggacaattcactgttgtacaagaaaaggctggaagacctgggagtgcccgtgacctggcaccatatggaggatggtttccatggagtgctcaggaccattgacatgagcttcttgcactttccctgctccatgagaattctgagtgcattagttcaatttgtaaaggg

SEQ ID NO: 94097 - DNA, 442 bp, Homo sapiens
ccccgttttaagacccttaaacttaatcacatctgcaaagtcctttcggccatgtaagttaacatattcacaggctccaggaattaagacatggatatctttgggggccattattctacccgccattgaaggataacaaaatgcatggctgatttaatctacattaaattcacacatctgatatttttgctgaaaatcataaattaaactagtgattgccaatagagactatgaaactttgacctaattcattggatgtaatcatccccaaggatattaaaatgcctcaaaataattaatgtgggaaattcagattagaaagaaatgtttcaccaactcaaatgttcaaaactcttaggtacagatgggagtctcgtaaagtgacactattcttagtttaatatttttattgagaggctcacatcagatgaagttaattaaa

SEQ ID NO: 94098 - DNA, 559 bp, Homo sapiens
caccttaattgggggagcttggttagtaaatagaattgctatgttaaatgcttcttgtaagatctcttccttgaaattcctgaatttctctctatttatattatattgttgaattcattctgtaatgctttgttatactgataaaattaatgccccattcagagaagtagtatttcctaaagatatatagtcactgagcggctcaaaaccaatcactaccaataattttttaatgtggttggggagattaaaaaataagtgttttttgcattttcctaacaaattatttggagcctatgctcacagaaacctgttaaatatcttaataggaatttgaaaaggatggcagatatgaacagccaattttgcaagctaagctcttcaatactcaccctcactcctacccaggtctagctttcattaatattttcttctgttttgcacgaatgatctgcccaggatcttggtattttaattcaactgcatagaaatcaacccaaaacagccttgctcttgatgcagtggccaagtcccgcctgtcatgcctgaagcctatggg

SEQ ID NO: 94099 - DNA, 328 bp, Homo sapiens
ccaaattaccactgggaacaaaggctttaagctagttcatgaactcatttctgtattaacctattgggtttcttttttacttgacttcagggctgctgagagatcactgtaatcctcaaaccacttggtatgatgatagtgtccctttctttaaatggcttctattctctccttcgattttaaatttcttaacctttaactgtgctgtttcatatgtgttatcctaatcagacatttcaaattacccacagaagttagaaagaaataatcaaaaaagaaagaactgaggagacgacgtttatttcattttaagaagagaagccaagca

SEQ ID NO: 94100 - DNA, 465 bp, Homo sapiens
gtcccttctctgcatctgagatcagccggggagttgttcagcaggcctgataatctgcactctggaacccacagactggtctgttgctgtaggacaggttgtacttttgaaacttttttgagcaaggttagccctggaccaagcatgccatctctaagagccctcagacaccagaactgggaagacagccctttgcctctcaggaagctgtgcagctcctctccaggtgagacaaagtagtttgaggaccctcaacctgggcattccaagttcttctccaggcaggacctggatcctccatgcccagccacgctgcctggatgtgggtattcccaggaatgggttatcctccccaagggccaccctaccactctcctatgttcatggaagaaaccccagaccaatgtcaacaacaatgttatttctcagtaattatcagttatacttctctaacaaatggatgaa

SEQ ID NO: 94101 - DNA, 377 bp, Homo sapiens
cagccccgcactcccttccctatctggctccatgtgtatgcaatcacctgggaccccccaatgcttcaccctcgggcctggggctgtgatgctgctgacttcatgttttgacaaaagtctggagttaaaaaggccatgctaacctgcagagcctttggagaacagctggaattaagccagctcccggccaaggtgcctgctctgtcaagaggccgtcccaagtgcctcctgcctgtggcacggggctgaccactccgccatgatctctgccaggagcagtgggccagcccagccatgctcagttctactcaagacaaccccaggggagccactgtgtcgatgcacggccaacagggagctcaaccctgcttctcaag

SEQ ID NO: 94102 - DNA, 340 bp, Homo sapiens
atcatccacaaaatttaagagaatgctgtctacatagtcacacaataaatgttagttgaacaaaccaacagattcacaagaagaataaaacagcaacaaggcctaaaatctgagagagacaccattcaaagcctcctagctcaatggttctcaaccctagatgcatattggaatcacctggaagcctctacacagccccacttcctaggtctgccctaatcagactctctggcactggtaccattttaaagttcttcaagtgatgctgatgcaaaaccagggatgagaaccattgctccagaccagtgctgtcccacagacccttttgcaatgatggaag

SEQ ID NO: 94103 - DNA, 450 bp, Homo sapiens
ggtaatctggattttggttatagctccattggtagctatatagaaaccagggaaaaataaacaatctggttttatgtctcctcacctgcaaaatgaagatgctggacttgattggtccaaagctatcggatacctagtagtttaactttagatcccaaactttgaggcacatagccatctgcttagactaaggggagagaactagaatgaatctactctttttcaaatcctcggagacatgtaagatctcaaggtccgtgtttcagatgaaaccattcaagaaataggccaaaaaaaagcctgtgttcattaatcatctaatgatgaattagagtgagggagtgttgaagatattaaggacagtcaacaggcaaatgaagaatagtccccttggcaaaatttggcagactcatctaagaacggaagttcctttaaaagagaaataaatgt

SEQ ID NO: 94104 - DNA, 2679 bp, Homo sapiens
  misc_feature (1169)..(1170): n is a, c, g, or t
  misc_feature (1213)..(1213): n is a, c, g, or t
  misc_feature (1503)..(1503): n is a, c, g, or t
ctttgacccagcactgctggacccatctagtccgttcctcacactcgcggactggaagctccaggctgcacaaccaccaactgcaccaaccatgtgcctaaagctaactgtgtcaaaaagagcatgcttcgaggggctggagtgagcaattcaacttgtggagaaataagaaataatagtgttgagacaagaaacataaaaccgcagggtaagaacttttggagaaagatttcttgggaggaagctatcctgaacgcttagagacttttctcatttactggcacaccagctttagagtcctaggtcttcatcctggctcagccaccctccagctgtgtgaactttgagaagttgcttgactacactgagtctcgttgtcactatgagtggaggttgctacgttgctactgtgtggagcacctacccccaagcactcttataagctgcagcatatcatgagtgatgagatctgtgtacaggtgactgacctttacctggcagaaaataataatggggccaccggaggccagccgaacacacagaactcaagaagcctcctggagtcaacgtatccacagaaagccaagcagctaatgtcagatgagaaatgctttaaggtgagagttgctcatgtagtcaaagaccttgctggtgacaatgtaagttgttaggattctctgaatcggaagttatagccagggtactttgaccccgtgattctactcctggaactttttagagttcctaatgagttcaccagagaaatacaaagtggaagtaaccatcttcctggacaatctattttgtttctttcttgccttaaaaaaaaaaaactagttatatatgatttttacaattttgtattcttctttttccctgaacatttttcataatatgctttgtatctcttattgttaaaaaaaaaagttggtacatgaaacccatggtcgtggtcattatagaaaaaaaagtaggcctggcacacttggctcacacttgtaatcccagcactctggcaggccgagatgggtagatcgcttgagaccagcttgggcaatgcagcaaaaccccatctttgcaaaaaatacaagaatacaaaaattagccaggtgtggtgcatgcgcctctagtcccagctactcaggagacagaggtgggagaattgcttnngcctgggaggtcaaggttgcagtgagccctgatcatatcactntgttccagcctgggtgacagagtaagaccctatctcaaaaaaacaaaacaaaacaaaaaatgcagataaccaaaaaaagtcaccttagaattctttcctgaaattaccattgatgacatttctagactttcctgtgcttgagtatatattttgaaagagtttatactggacaaatggtctttcactttatttatttatttatttatttagagacagggtcaggctctgttgcacaggctggagtgcagtggtatgatcctggctcactgcaaccgtgcctcctgggttcnagtgatcatcgtgcctcagccaccctagtagttggaattacatgggccaccacactggctaatttttgtatttttagcagagatgtgtgtcagatcccagggtccaggtccagcccatggtgaagtctgaggggagtgggtgggtgagcagaaagaacaatcggggggccataggcaggtgaaagatagttttattcagcggcagctctcattaacagctttcttacactagctctcttattagcagcttactcttccactgttcgcctgtctcagcagcttgagccagctgcccctacacatagctgcgcagccagctctctcttgccttcagggtcagcagcttaactccttctctctctgggcatgagcaagcccagctgtgtcctggctccctcccatctgcctgcaagatggacagctttggctctctctttctctgggtgccagtgtgctcatcatgtcaagccatgttaagccaaactgagccaagccccgaagagccatgtctcttatgcacggcatcaacagggcagttataccttttacagacaatagtggcataaagccaggaatgaacttacacaaacaggttatattacaagtggagctgtgtgcttgcacgccaaactcgtgagtcacacaggcctagatatccacctcggcctattccttgaccaaagcacatctatgtaccttactatgtggttttgtatgttggccaggctggtctcaaactcctgaactcaagtgatctgcccgcttcagcccccaagtgctgggattacaggtgtgagccactgcatctgaccggaaaggatgtatttttgctcaattagcaacacttctgggtctttaatgtcttttctatggctatttgatattcactttatagagaattaatgcctgtattgttggacatttaagttgtttccaagttttcaccattataactgtatttgtgtgtatatattatattcttgccaggctgtaagctttactagcagagaggaaattttaaagctttaaaagaacgctgagctagatctagcttctggctctgtgtgtttattgaccagtggtgtgccttgagaaaccagaactctctgaatttcagttttgtctctgtgtaaatgaagaaggttgtaataaaaaaaatctcaagtttccttccag

SEQ ID NO: 94105 - DNA, 630 bp, Homo sapiens
gcatcagtaactcaggctgtttcccacactacaggccagcactgtgggctctcagtttattgggaaatggaaataagagggaaggacaaaagtccactgggaagcagactggacagaaaggaactctgagcagctaaactctgactaatcccagggtatacctgcgttttctcttcaccagacaaactgcggcctggaccagctggtgaaacataattctgaatcctgcccacagccttcggtggttttggatgaaaggccagcgccttgggagccctgcgtttgatttcaagttttaaggccggcactggtggagcaatgaatggtgaaagctctccccttaaaggagcacagttgcctttaggtgactgctaactcaggcttttgctgaggacagtgtttactttgtgagcttaatgacagggctggctttctgggagtgttgcaatgaaacagactcagacacaggccatcatgggcctcctccctagcaaggccgccacggctggcatctcaagagcagtccgttgaacttgggatttgggtgtgagacacagtttcatcagaagaatttaaaccaaagtctacatttgccctctagataaatgtgtgtgttcagcagcaaccaca

SEQ ID NO: 94106 - DNA, 703 bp, Homo sapiens
gcatcagtaactcaggctgtttcccacactacaggccagcactgtgggctctcagtttattgggaaatggaaataagagggaaggacaaaagtccactgggaagcagactggacagaaaggaactctgagcagctaaactctgactaatcccagggtatacctgcgttttctcttcaccagacaaactgcggcctggaccagctggtgaaacataattctgaatcctgcccacagccttcggtggttttggatgaaaggccagcgccttgggagccctgcgtttgatttcaagttttaaggccggcactggtggagcaatgaatggtgaaagctctccccttaaaggagcacagttgcctttaggtgactgctaactcaggcttttgctgaggacagtgtttactttgtgagcttaatgacagggctggctttctgggagtgttgcaatgaaacagactcagacacaggccatcatgggcctcctccctagcaaggccgccacggctggcatctcaagagcagtccgttgaacttgggatttgggtgtgagacacagtttcatcagaagaatttaaaccaaagtctacatttgccctctagataaatgtgtgtgttcagcagcaaccacaactccttgcctcattctcttggttgattatgtgactgtgagaagaaaagcaaaagcaaaaatgcgaagcgtag

SEQ ID NO: 94107 - DNA, 775 bp, Homo sapiens
gcatcagtaactcaggctgtttcccacactacaggccagcactgtgggctctcagtttattgggaaatggaaataagagggaaggacaaaagtccactgggaagcagactggacagaaaggaactctgagcagctaaactctgactaatcccagggtatacctgcgttttctcttcaccagatttttcctaccaggaagagcatgtgctgaccaacagacatgaatttcagcctggtagttacaacattcacagtatacccacatcactaagctgggaggcacattttgagacccagaatcctgacacctccatgcattcaaaaggacaaactgcggcctggaccagctggtgaaacataattctgaatcctgcccacagccttcggtggttttggatgaaaggccagcgccttgggagccctgcgtttgatttcaagttttaaggccggcactggtggagcaatgaatggtgaaagctctccccttaaaggagcacagttgcctttaggtgactgctaactcaggcttttgctgaggacagtgtttactttgtgagcttaatgacagggctggctttctgggagtgttgcaatgaaacagactcagacacaggccatcatgggcctcctccctagcaaggccgccacggctggcatctcaagagcagtccgttgaacttgggatttgggtgtgagacacagtttcatcagaagaatttaaaccaaagtctacatttgccctctagataaatgtgtgtgttcagcagcaaccaca

SEQ ID NO: 94108 - DNA, 463 bp, Homo sapiens
cttgacctttatacttggaagattctccattgagtagcacagatttaggaacatagaatgcatctcctgctttagggattccatcatagtatttgattctccagtgaaaaatatttacataatcatcattttataattgttattcatatttaaaattttatattctatctgtacagagaaagcataaaaattataactaggaagggaacgtaaatgttattaatataagtttttacagtataaagatagttacatacctgactagctttatgtttgtgggggaaagacaagtgcaggggagtatagggctgttaactgtgttaacttacatagaatatgttgtaaaataccatgtgaagttgacatggtaaggaaaactacaattaaaaggactgacagtatgaaaagttggcccagatttaaagcaattggaactttcatatactgctcatagaagtataat

SEQ ID NO: 94109 - DNA, 391 bp, Homo sapiens
aataaaagctaatatttattgagcatctactatgtgctaagcatttttctaagagctttatatgatgaactcataacaatgttatttacttattctaactttgcctatgaagtatccattttaggactggaatattatttgttgtatttacagataaaaataaaagctcagagataaaaacaacttgtctacgagcacattttagtgttcttttcccagcattaatcacaatggctccatgtattctttccttctaagtgcacaaatgagttctttcagtatcaattcctcaaagtcaggactatgcagattgaacccagtcagcaactccagatatgtgaattaccatgtatctgcaataatatgcctaggtcatacttttcatgaagca

SEQ ID NO: 94110 - DNA, 414 bp, Homo sapiens
tgcagagttcatggtccttggtttgaaaatgagatatacttttattttctctatgatttgtctttcatggttggcctgaattacagaatttagaaccttaaaaattaaaataaccatccagaagtagaactgacccaatcacgagagctctcattttgcccaagtttcctgttggttctcaagatgatcaaaggaagctatagagagtagcacttcaagaggcttcttccatgatacttcagaaagggaaggggagcagaatcatgtgataataacgcggctttaaaaaggctattgtaaaggtagcaccagaacctcacttctgcatccctcttgcctcttctatctgtcatgaccctttttaagggagttcccatgtgacagttccatacaggatcagcccaaggcactgga

SEQ ID NO: 94111 - DNA, 171 bp, Homo sapiens
ttgagatcatccctctggagcctggcatgggcatctcccctctgggctagaacatagcttaacagattgtccgtgtgcctcaacccctcaaaaactgccacttccagttcctaacattcttgttttgttttgagacgaagtcttgctctgtcacccaggctggagtgcagt

SEQ ID NO: 94112 - DNA, 355 bp, Homo sapiens
ttcagcatgtaagatcctccatcccttccttgaaaataatacggcaaaaaatccagtgtataattatggtctcggccatttgcacagcaagccattcagagttgtaaacttaataaaaggtagggtgtgtcccaagaccagatcatattctcaggactatgatgtattccacctgattaggggaacagaccacattatatggtaaagagcttggactctgtcatcacaccaactttgattcaaatctagactctgctaccaattagctctgtgatgtttaggcaaataaattcacttctttgggcttcatttttctttttctttttctttttttatttttatgagacagagtttc

SEQ ID NO: 94113 - DNA, 473 bp, Homo sapiens
gtagaaaagctgagaagatcagaggctaccattcctgccatgtgccagagtaatggctctggcatccaaaaaccaatcagtgtaataagccatatcaacagaataatggatcaaaacacacgttcatctcaatagatgcagaatacatatataaaacaaaatccaacctccttttataataaaaacacttactgaactagggagagaagggaacgtcttcaaactgacaaaagacacctatataaaacctgcagttaacattacatttaatggtcaatgactgatggcttttctctatgatcaggaggaagacaagaatgtcagcttttgccatttttatttaacagtgtactacaggttctatccagtgcaattagggaagaaaaataaatggaaagcatccaaattggaaaggaagtagtaaagctatatctattaaagatgacatgatcttgtatataagaaattcatca

SEQ ID NO: 94114 - DNA, 248 bp, Homo sapiens
ctgagcagaggacattatctgacttaagttctaaaagattatctctggcttagctatattgagactaggttgtaggggcccaaaggcagaagccgggagaacatttaagaggcagttacaaataatcgaattagaaaatatgtggttacctgaaccaaggtagttggggtggtagtgagaagtggtaatagtttggatatattttaaaggctagagctgatggatttcctggtatagtgtagagaaag

SEQ ID NO: 94115 - DNA, 472 bp, Homo sapiens
gttcagaggagagatcagattggtttgtcaggtcactgttttttattcattgtagaccactgtagacgggcggagactttctgccaagcctgtcttcagtctgcagattggctgctctttgcactctccagtcggcctgggcttcaaaagtgggcctaagtggttgaatgtagggcagccctctgtgtttaaaaaagtcaaaaagcttaaaaaggtgcatgtggcagaaattttcaaaaaacaaaaggagcattataagcaacaggccccttccattgtctgacttgtaaaatgtgcaacgcaataggcagctattctttgtgtacagatgtacctcaaatcccagaccatcagggccctcagttagctagcgtcagtggaggggtacgactcagacacaattaaccacaacatatggaagcatggaagatggcacttggcagaaactaagccttaggagtggagcctgtca

SEQ ID NO: 94116 - DNA, 647 bp, Homo sapiens
actcacgtgtttagatttctgtctagtgatttttgtggagtttttcacatccatttactctaaactgtaagaatataaggaaagagttttctaaaaatagggtgacaagcaacttttaatataaaactgagagtgacgctgaactaataatatttagtgtacatgtgaaaatgatgtgtaccattcttagaatatccagtttagaaataagatttttaattcctggagatagagctaatttaaagaatcagctcaaatttgtcctgattgtatttaaaataaaaatcacttattttgctttactcttatgtttaacatcttttccaaattctgaagcaaattgagtggtagacacaactgtttacattttcattgaacaagtggcaacgaaatctctgaaacttagacaatgattatacgtccacgttccaatatgtaatacaaaaagcaaatataaatttcacataacctagaatattatgcctagtacaacattatcctttcctgtatgcataagcagacacatcccaaccccaccagtcccaacaaatggtacctaaagtctgtaaaagcagataaaagctctaaaaatgaatctgctttccgagattattgagtgaaaagactgctacattttttattcccta

SEQ ID NO: 94117 - DNA, 183 bp, Homo sapiens
ttaaaccttcaagtgggcagcttgcctgtggctgcctccaggaagtcttgaagactcccagcctgggtcaagagcctctccttggtcatgcacagtggctcatacctgtaatcccagtgctttgggaggccaaggtgggcagatcacctgaggtcaggagttcaagaccagcctggccaatat

SEQ ID NO: 94118 - DNA, 259 bp, Homo sapiens
ccagtttgtcaccagtcgccactcccacccccaacctcaggcagccatgcgtctgctttctgtctatagttctgccttttctagaaacttcatataaacacatagtctttggtttctggcttccacttggcataatgtttttggggttaattcatgtttttccatgaactagtcttttttttttttttttttttttgagataagttttgcctttttaacaaagcttgttttccggaatccggggccaaaaccacagcca

SEQ ID NO: 94119 - DNA, 628 bp, Homo sapiens
gagctgaatggtggacgggtctggtgatatggtggacgggtctgagctgcacatggtagcgtgtgcctgtagtcccagctacttgtgggggctgagttgggaggatcgcttgaacctgggaggttgaggctgcaatgagccgagatcgtgccattgcactccagactggttgacaaagtgagatcctgtgtcaaatagtaacagtaataatcaaaatataaatggagtttgtcactatcagtttctcaaaggcaaaagaaaatgaaaaatattcctggttgataagagtgagagaaaaatgatcgttataccttatggggtataaaatgttatctttccagaaagcaacttgacaatgtttacctaaagccttaagactgtgccttttgactgggtgtggtggctcacacctgtaatcaaaacattttgggaggccaaggcaggaggatcacttacttgagcccaggagttcaagatcagccttggcaacatagtgagaccccgcatctacaaataataatttttaaaaaattagcagcatgtagtggcatgcacctgtggtcccagatactcaggaggctgaggcaggagggtcgcctgagcccaagaggttgaggctgcagtgagc

SEQ ID NO: 94120 - DNA, 401 bp, Homo sapiens
ttctagttttaaaacaattgcttcaagttagccagactgactcaggggactccatgcagactttgcatgtgttttgcttcatagccattcagagtacagggagatgatgatcacaagacagggaggactgtgttgttctttagggagtgatgttgtttgactcttcgcagacggaggacatcagcagtgtctcgaggccttcttttcatgtctttcgttcagccactcctgcagcctccagtccacctcctcacagcacgcgtgcgtgtccctgggtacttgcagatagatggagtaaagattaaggaacacaatggcaagttaatgaactgttttaagaccaaaatgacttactacagctttatgaaatgtgtaggtagtagactgccttaaagttctat

SEQ ID NO: 94121 - DNA, 188 bp, Homo sapiens
accaaaaacaaaggtgaaactaggataaaatttctcacctgtgtgattggtaaatgtgcaggtttgacatcatgctttgtttatgaagctgtgggatacaaggactctcatacgtcactgtggaatgcagaacattgcaacctcatggaagaggatttggcagcatctaacaaaagtatgtggcattt

SEQ ID NO: 94122 - DNA, 637 bp, Homo sapiens
ctccggaatcgtcagttgccctggctcagcgaccacccttcaggctccccaactcccgttggtcccgaactcccctcccccgcaccccatcctttcggatcccagttgctccaggaaaacatgcttgatcctgtcacaaacacatatagcacacatggaaccaccataggccctgctgacatggttttttgtgttttggacaatctcataagacttcgggtcttatagcacgaaccccttgaagtctgcgtgggtacacaccacagtagattttggtgctttcccagccttcttggtataaagttacagcaagaagacgtgaaaggttgggaaaggagacctctgattccaaggactcgttcaaaagatgctgagaccgaggcttaagcttcagggcacctcggccccacctgctggccggagacggtagcgctgccccagccgctcagtgcttatggggctggcagagggatgggatggggctggctgggaagaagaggtcgctgaggccccgcctgggagctgcagagctggggcaaacctggggctctgggcaggtctgccccaggcagtatactgtggagaatgaaacttttctaaatgatcaataaaaaagccaaagtggagtcagctgtgc

SEQ ID NO: 94123 - DNA, 352 bp, Homo sapiens
gctgcctggaggcccaaggagccacctgcctgaacttgctaccaccagtgcccacatacgccaccttgggatccaaggactgacaatttcagttcactgccaccaccactggtgtctgatgaccagtctgcctggcatccctgtctcccacagagccttgccgtaacctccactaacaactgcagcctaaaccactgaagaattcatagacacctctgatgctgattatagctaaagaaatcatacagaccctacactactgcacccacccagaatcaaagccaaggtatcctacccaaataacattatagatatatctatagaaaaagtctttccctatgaaagccaattc

SEQ ID NO: 94124 - DNA, 108 bp, Homo sapiens
ctggcaaaacttggtgtcagccctagaatccaggcctgctaagctggggttgggggagaagagggccaccttctgattttcacggtaaagaaagggatgcccagagga

SEQ ID NO: 94125 - DNA, 303 bp, Homo sapiens
cacctttttacaggacattttccagtaggggcttctctcaaacggatgagtggtaagtcaagtccttcctttccatatcacactcagcagacacctgatcctgatatgctagaggcacagggagactagatatgtacgtggtcttcccagagtgggagtggccacagtgaaggaagaacaatgatggaggggcctgatactggtaattccaactctatggaagtaacaagtccccagaaatacttcaggaggaggaaagcagtagggaggtgctatcaggaaatacctgagaacaaagcaaaa

SEQ ID NO: 94126 - DNA, 201 bp, Homo sapiens
ccatttaattttaacttcagcctcaagtaattacattcaccactctcagtttaccaatggggaaactaaggcccagagacttaagtgacttgggtgaggtcacacactggtcagtggcagagtggaacttgcaatcaagtctctgcctctgagtcttgctgtcatagggtcaagggggcagctctggaagggactgcaggt

SEQ ID NO: 94127 - DNA, 542 bp, Homo sapiens
agcggccgcctactactactaaattcgcggccgcgtcgacgcagtggtagggatcattcctcaatatgtgtgagagctgagcctaactgaatgatatgggaaacttgctcagcaatgcaaggaaagagaacgggtggctgcggctgccagtgcgtgctggtgaatgcagcccatgggcggttggtgggttggggaatgatggtaaccaaatttcaaggcctttaaaccatcaccgtgctgtggtcatcgggctttctcttcagcatccctcctaattatctggcctttcccacgtgcctgaggttcctgatctggtgtccacaatgatctgagaactgattcaaggattcttggagccctcagacccaggaagaagagagtttttaggttccaaatgaggagagtaaactttttgttgttcagtttgattatccttcacaacaaagagaaggtactagaaacttggatgagggagatgagacagtggaaaggattcaagcacacagatgagtcacttggattctaagagttaaaaaaaaaaa

SEQ ID NO: 94128 - DNA, 932 bp, Homo sapiens
ccgtgcccggctttctccttttctttagactaaaacccaagctccctcctatggctcatgagtttttcagctcatgacctctggccacctcccaacctctgtgctcccacctctgcctccattaccagattccagccacagattcttgttcctggaattaaagcgaaaacaaaatgaacaaacctgttcccgccatggggcgtttgcccttgtttgtgcctagattgctctttccctagatccttgctaggctccctgtctctttgttcaactctcagcacaaatatcagagtggccttctctctctcaccaatctctgttaatctctgtcccattcctctgctttatttacctcacaacttttaccactgtctgaaattctcctgtctctgcctttatgtattgtacatcctttcccattcatgtgcgagcagtggtagggatcattcctcaatatgtgtgagagctgagcctaactgaatgatatgggaaacttgctcagcaatgcaaggaaagagaacgggtggctgcggctgccagtgcgtgctggtgaatgcagcccatgggcggttggtgggttggggaatgatggtaaccaaatttcaaggcctttaaaccatcaccgtgctgtggtcatcgggctttctcttcagcatccctcctaattatctggcctttcccacgtgcctgaggttcctgatctggtgtccacaatgatctgagaactgattcaaggattcttggagccctcagacccaggaagaagagagtttttaggttccaaatgaggagagtaaactttttgttgttcagtttgattatccttcacaacaaagagaaggtactagaaacttggatgagggagatgagacagtggaaaggattcaagcacacagatgagtcacttggattctaagagttaaaaaaaaaaa

SEQ ID NO: 94129 - DNA, 878 bp, Homo sapiens
ccgtgcccggctttctccttttctttagactaaaacccaagctccctcctatggctcatgagtttttcagctcatgacctctggccacctcccaacctctgtgctcccacctctgcctccattaccagattccagccacagattcttgttcctggaattaaagcgaaaacttgctctttccctagatccttgctaggctccctgtctctttgttcaactctcagcacaaatatcagagtggccttctctctctcaccaatctctgttaatctctgtcccattcctctgctttatttacctcacaacttttaccactgtctgaaattctcctgtctctgcctttatgtattgtacatcctttcccattcatgtgcgagcagtggtagggatcattcctcaatatgtgtgagagctgagcctaactgaatgatatgggaaacttgctcagcaatgcaaggaaagagaacgggtggctgcggctgccagtgcgtgctggtgaatgcagcccatgggcggttggtgggttggggaatgatggtaaccaaatttcaaggcctttaaaccatcaccgtgctgtggtcatcgggctttctcttcagcatccctcctaattatctggcctttcccacgtgcctgaggttcctgatctggtgtccacaatgatctgagaactgattcaaggattcttggagccctcagacccaggaagaagagagtttttaggttccaaatgaggagagtaaactttttgttgttcagtttgattatccttcacaacaaagagaaggtactagaaacttggatgagggagatgagacagtggaaaggattcaagcacacagatgagtcacttggattctaagagttaaaaaaaaaaa

SEQ ID NO: 94130 - DNA, 265 bp, Homo sapiens
agagcagaagctaggattttattacttttaaattcctctatcaccaggcaaagaataaacacatgtacatactgatagaccaaatccatctcaagtggactttcacttagaaacctattgtgagtaagtggaataagctgatgacattaactccctacctactttctatctaagcacatacttacacaacagttactatgtttcaggcactatcctgaatacttcatagatattaactcattaaagcctcctaacaaccctatgt

SEQ ID NO: 94131 - DNA, 404 bp, Homo sapiens
aaagaagccagatgcaaaagaccaaatattgtttgatttcacttatataaaatgtcaaaaacaagcaaatccacagagaaacaaagcatatctgtgattgcctagggctgggggtgggcacagggattaactgcattcaagcaggatgggtaatcttagggtgatgaaaatgtctaaaactcaacgatgaagtcccagctacagcaatcagacaagagaaagaaataaagggcatccaaactggaaaagaagaagtcaaattatccttgtttgcagatgacatgatcttatatttggaaaaacctagactccatcaaaaaacgattagaactcataaacaaattcagtatagttgcaagatacaaaatcaacatacaaaaatcagtagtgtttctatatgccag

SEQ ID NO: 94132 - DNA, 986 bp, Homo sapiens
  misc_feature (978)..(978): n is a, c, g, or t
  misc_feature (980)..(982): n is a, c, g, or t
  misc_feature (985)..(985): n is a, c, g, or t
tcaagagtgaagagagaatgctaggatgcagtggggacagcaggcggcatcaagcaggggtccctgaaagatctacctcctctttacacctgcccctcttccccaccgttatcatctggcaaatgtctgttacctatctttggtttctccctccccatccttcctgcacaccccagccaaattgatttttaaagcatcattttgcacaagtcaccactctccttaaaaccaactttcaggagctttcctgcacgtaaaccctcgtttcagccaacctggtttacccactctgagcaagccgcatggagatcaggccgcccctgcccactccagcctgggcaaaagagctagactctgtctcaaaaaaaatatatataaaaaaaatttctaagtgatgaatgcttagggtattgctgcttatttcttactgtactgtggtgtcaacatttctaagtgtccataggacttctttgggcctgaatatattatcagtttttataaaagcatttgtgtaatctcaaaatgtgtttttattctaccagttctatttgttaactcaattttttcattattttattcaaatccatattttctctgactttcatttactttagagttcttaatctgggggtccatggcctgcctaggagtctttagcatgtaggggtttaggagttgcagacccctagggatcgaacaaagctgggtatgtgcttgaaggaattttgctgggacaaggatctgtagtatttactatatttttaaatgcctctgtgacaccaaagcagttcagaacactcatttacctgatctaatcatagtttgatgtttgtgtgttatatctctatgtattcctgtttcacttttaatttctgtatgtgtattgtcgctatgttgtgcagtttttctcaagtcatttttgagaaataggcagggtatgaattatcaataaataagtatcatgtttggggcatatanannnaana

SEQ ID NO: 94133 - DNA, 407 bp, Homo sapiens
gctacaggcagctgtgcgcctgtagtcccagctacttgggaggctgaggcaggagaatggtgtgaacccgggaggcagagcttgcagtgagccgaggtggtgccactgcactccagcctgggcaaaagagctagactctgtctcaaaaaaaatatatataaaaaaaatttctaagtgatgaatgcttagggtattgctgcttatttcttactgtactgtggtgtcaacatttctaagtgtccataggacttctttgggcctgaatatattatcagtttttataaaagcatttgtgtaatctcaaaatgtgtttttattctaccagttctatttgttaactcaattttttcattattttattcaaatccatattttctctgactttcatttactttagagttcttaat

SEQ ID NO: 94134 - DNA, 891 bp, Homo sapiens
attcgtaagggtaagaaccacatggactaaaacacatcaaataggtttaaaatccgtaagtgtacagtgatgcttaacacaaaacactgaaagtctctcactggccacctttgaagaatgttagaaaaccaactcattattttgaaaatcagtaaagaatcaagcatttatttttccctttcttgaacagctatatctgtgggtaaccaaacagttaatgaggggagattggtgtttatagaagtttccagctaataaacagaataccatgattttacaaccccctaatgaaataatggatctagcaatgattagtgatggcttctcattccaaacagacaaccagatattgtacctactgaggtacacataaagaaaaaacaaaatcaaatctgaacttgatgaagcctctacatctaactcattattgaaaagtttaacaagtctgggcacagtggctcatgcctggaatcccagcactttgggaggccgaggcgggtggatcgcttgaggccaggagttcgagaccagcctgggcaacacggtaaaaccccgtctctacaaaaatattacagaaattagccaggcatggtggtatgcgcctgtagtcccagctacttgggaggctgagatgggaggatcatttgaacccaggaggtggaggctgcagtgagctgtgctcgtgccactgcactccagcctgggcaacaaactgagaccctgtctttaaaggaaaaaaaaaaaaaggttggccgggcgcggtggctcatgcccataatcccagcactttgggaagccaaggcaggaggatcacctgaggtcagaagtttgtgaccagcctggacagcatggggaaaccccgtctctactaaaaatacaaaaattagccag

SEQ ID NO: 94135 - DNA, 244 bp, Homo sapiens
aacattcaccatagaaaatcctcaaaaaattaagcacatattttatctccttttaagatatctgtcaaggattgtcttcaccaagggcacatagtaggaaaggtgccattctaactcctggaacaatttaatcagtactaacatacttcaggtagcaggggtgtggaatcaggtcagtaacaaaaacggacttgcaggccagagtaaagatatattggctaatcttaactaacataatttactg

SEQ ID NO: 94136 - DNA, 473 bp, Homo sapiens
tgcttacatgcagcatgggaaggagctggcagagaaggagtgaagaaggcgaagacacaggaaacagaggtattcaggatggagtgaaggaggagggaaggagacaaaatgaccaggtggaggcacacctactcctctacaaatgcagatgaaagctgcaggtggggaagacagccagggagctcccaccagaaaaagacaagcatggcttcccccagccccacctgtcagtatatagggcatgagcctgtccctcctgaagcaaatatccccaagggactggttaggctctgactccaggccagctttaggctgtgcacaggtagagtaagatctcagaggctctttgaaagcctttttaactggtagacatctccctcacttgcttattaatgcctgaccaccataaagggcaccacgtggtaatttcaactgtggggcttatttcacacatcacgcatatagatcagaca

SEQ ID NO: 94137 - DNA, 386 bp, Homo sapiens
gatgttcatgcctcagccacccgagtagctgggattacaggcacccaccaccatgtccggctaatatttgtatttttagtagagacagggttttgccatgttggcaaggctggtctcagactcctggtctcatgtgatctgcccgcctcagcctcccaaatagaaatactatttggacatttttactgctatgttttctcttcaaagccatctatttgataggagagtgaagaaaaactattaaatcaataattccaaagtgttagaattttagagtttacagacatcatggaggtcacttagcgcaactctctacaaaggatgggtctgagcagtacatccttaataaatggctgtccaagtatgattgacctttccctgttcca

SEQ ID NO: 94138 - DNA, 846 bp, Homo sapiens
actggattattgatatttctatggaagaatgggctttgaactgccaaaataagaacttgagggtttctgtttccggtaatgaatgagtaaatttctgtcatacttaatcccctgcaataagcaactctaaaatatgcacgataaaaaccagctactccaaggaactctgtaggatgagtgtaagcagagtctgaaatagagttggtccttgaaggaaggaagttagtacactgaatactagttttcctggcttttagcctgaggcaaagcacattaggtggcactcattccaacccagagaaatctctgctgatggagaaagataaaaagaagggaaagaaaagagaacgggaatccccaaattgtagctgaccccaggattatatgtgcagagtagacataagcatctcatctaaagatgtgaactaagaccatagttggcacctgagaaacaaagtgtgcagccctcaattgaatcaagatattgcctactacaaaacaaaacgaaaacaaaaccagaaccagaaacaaaagaaaaaaattcgtcaaaataatctagaatcaggatacagtttaaaattaagctctgaaagtaaatcatactctcaaaagaaaatcagctgataccaaccattacattttggaactaagagacagattttttgtttttgtttttttaaatagctgttaactagtctcataaggacaaaatacagaaagacagttcttacagagaaatagaagcaaaaaaaggaaccaatggaaaatttaaaactgaaaaatagaatatctgaaataaaaaattcactagatgacataactgttgaggaaagagtatgtgaattt

SEQ ID NO: 94139 - DNA, 619 bp, Homo sapiens
agcggcctcagtttattctaaatgtcccagacctttggccttctaaaatcttcactaatatcaaggagcctgaatcttaatgggatttatggctcaccattgccatacaagctttctaaggtattcatagaacttgtcacttcctggtcaacatatcaacagcaggatgtcatccttatagtgtaccaccaagatttcctctgggatatcaacatgattaattcatattgattcacatttgaatgatattttgaatcgcatcatattgatttaaatttatattaattaatattaaattcagtctattgtagtggaatgttttgcctttttcatgtaaaaaccatgtttgattaatattactctcagcgatgagtactgagaagaaagccatatcagtagcataaagcaagcagcaaaggctctgtggatctgttgcagtaaagatggcacattcccagttgctgcagtagaggcctggccaacacggtgaaaccccatctctactaaaaatgcaaaagttatctggaaattgcttgaatctgggaggcagaggttgcagtgagctgagattgtggcactccaaccttggggaacagagcaagatttcatctcaaaaaaa

SEQ ID NO: 94140 - DNA, 450 bp, Homo sapiens
ttatcatacgttaaattaaaactgacatttccaaaacatatctaattagggttagcagctacattgaccatagtctatggctaaaagaagtcagtccacaaattcaataaattgttgtaaagaaatggaactgtctttaacgtatatcactctcccatacagatggaatttatactcatgcaaattggcttagtagaaagtatacaagctttaatgccaggtcatacatttcccgtcctcagctttatcactcccagtcaatgggaccttgagcaaagccatctcacctctgatcctctgggccttcttccatcaaaatgtgctcatcctgcccacgtcacctggcttttgtgaagaatttagcaagataacggtgaaatgccaagcacacacactctatgttcaagaaacatcagctcccattttgtgcaacattttccagagctgttt

SEQ ID NO: 94141 - DNA, 414 bp, Homo sapiens
agctacaagtggcttgttagatatcagagagtgtactgaattagaaaaaatgttctactgttggccagttgccaccaacagaaaagttaggaagatgtttaagttgatggagtgcttaatttagtgatagtttttggtgagcttttggaaagctttactaggatttaggaatatgcctgagtctcagtaagcttctccttagagaattgaagagtctctgcaattccacagaaggcagtacttccgaaaaccatcaaaaggatattattctgtaatgctcgtaagttctgtctttagccagttaaatatgatatctactggattttaaatgactgccattttaaagaatgtcttttaagagtttactgatttaagtcttttgataggcctgtcttatggctgtcatcctgattt

SEQ ID NO: 94142 - DNA, 454 bp, Homo sapiens
ttagtaaccttcacccaatggttttagcatccattaatgatccttgcttcaatcactaatgtgatggttaaaaatggtgacttttctgtcattccttctacatttattagttgacattcagtagagtttcgcctgaattttaaacctaacaaaatacgatttcttttttgttgttgttaatgctgagtcttgctctgtctctcaggctggggtgcagtggcgtgatcttagcttgctgcaacctctggctcctgggttcaagcgattctcctgtgtcagcctcctgagtagctgggactacaggtgcaagccactatattgagctaatttttgtattttttaagtggagacggggtttcaccatgttagccaagctggtctcgaactcctgacctcaagtgattcacctgtctctgcctcccaaagtgctgggattgcaggcatgagccaccgt

SEQ ID NO: 94143 - DNA, 835 bp, Homo sapiens
agcggagtttccaaagacagttgtaaacccatattcacagcatcattatctacaggagtaaaaaggtggaaacaactgaagtgttgattgacagatgaatggatatacaaaatggagtctcctggtctacccatacaatggaactttaggccttttctgaaacactacaacatggatgaaccttgaaggcattatgtggaataaagtaagccagtcacaaagacaaatattgtctggttccacttacatgaaacacctagagtagtcaaattcactgatacagaaagtggactggtggctgccagggattgtggaagggagaaatgagagttattatttaatggctacagggtttcagttttacaagagaaaaacattatggaaagagacgttggtgatggttgcataattcaaatgtacttcatgccgctgaattgtacacaaaactagttacatagtgaattttatgttctgtatgtcttactacaattagaaataacttttaaacaatagctgatggttatgaagcttgtgttatggggcaataaaaatgctctaaaattagataatggtgatggttgtataactctgtgaatgtactataaaccactgaattatacacctttaaaaagaataaaaggccgggcacagtggctcacacctgtaatcccagcaatttgagaggtcaaggcaggcagatcgcttgagcccaggagtttgagactagccttagcaacatggcaaaatcctgtctctacaaaaaatacaaaaattagccaggcctggtggcacaagcctgtagtctcagctactcgcatcgctgaggagagaggat

SEQ ID NO: 94144 - DNA, 715 bp, Homo sapiens
gatcgacatgagatacagacgagagattatgtctcttatggctttatcatcaattaaacttagcaaagtctgttaaatttatttcagagtctcccagctgtgaaaagtagagttccacttatgtcatccatatctgcacagtaatcttttttttaatcctaaactttcttaacaggtttcttctccttattctagacaataatgctatgtgttttccttgaataccatgattttaaacttttaaaatgtctcagccttcatctttccaatgcagtctaccctgtagccttcacatgaaccttctatatcttttcactttcacatccctcccagcaaagaacattttgatcattagttaaagcaacctcaccgctttctcttttaaaactgtttctcttagaatccacagggaagctgcatctagcacagaagctagtatgattggctttccattgctagttactgctttcagcctgaccctggatgccacctagtgttgagtctctgataatgaaaatatgaaaccataaattacatttcataatttaacaatgccatctagtatatgcatttggtatatgtccctgaacttgcagtacctttgtactccaaaaagttcggtcacttgcagcagtttacatttctgtgactcccttacgcttttggcatctggtttggaaaataattataacgttcaagcactcaccttttttaa

SEQ ID NO: 94145 - DNA, 304 bp, Homo sapiens
cacagcagaaagaacgaccgctactgttgactgaacatccattattcgttaggcccaaatcatgccattcatcctataaataaccctgtgaggtaaattttattttcctgattctgcagcctgggaagcctccctagcattgtttaggagatttattatcctttttaaatgaatattcctacagccactgaacctggaccctaaggacatgaacagacaaacacctgaccaagaaccaacagctccgtgtgaagcatctgcccctagatactttccatttgggagtcacattggaacttggtgt

SEQ ID NO: 94146 - DNA, 747 bp, Homo sapiens
attgagcggtcgtggcagaaggggaagcagatgtcttacatggcagtgagtgagagcaagcaaaggggaagagcccccttataaaaccatcagatctcgtgagaactggctgtcacaagaacagcatgggggaactgtctccatgttccaatctccttccaccaggtccctccctcaacacgtggggattatggggattacaatttgaaatgagatttgggtggggaacagagccaaatcatatcattccaccctggcccctcccaaatcacatgtcctttttacatttcaaaaccaatcatgccttcacaacagtcctccagagtcttaactcattccagcattaacccaaaagtccaagttcaaagtctcatccaagacaaggcaagtcccttctgcctgtgagcctgtaacattaaaagcaagttagtgacttccaagatacaatgggagtacagacattggtaaatgttcccattccaaatgggagaaattggccaaaacacaggggctacaggccccatgcaccactgcactccactgtgcaagtctgaaacccggcagggcactccttaaattttttttttttttttttgagatggagtctcgctctgttgcccaagctggagtacagtggcacgatctcggctcactgcaacctccgcctcttgggttcaaaggatcatcctgcctcagcctccggagtagctgggctactcaggcgtgtgccaccatgcccggctaatt

SEQ ID NO: 94147 - DNA, 617 bp, Homo sapiens
ggagtaacttggataaaggccagacggggcttcctgtgggtctagtgatggatgttttgctgattatctccctcgtttgtcatttccgagatcagaaagcctttgcgaggggtaaatcttggttctagacattccggctttggaaggcttgagcaggacgggtgtgaaaactgaagctgctcggcgtccagtgtgttcccaggatatgtgcacgagggagcggcggggacagggccggggccagcggctcatcgctgaccctgcatggggtggtgtgggaaggagaggggccgggcccagcccctcaagtcataaatacacgaggcagactaacgcatgcgcgcgccagctcactcctggggactgcctgtctggagcagcatgtgcggctgagagctgagctgcagggctctgtggatggcacagctgtgccaggggagagccgtggcatctctgagaagcgggagggatgtgggctcccccgtgcagctgcaggttcagggctcactggaggaggcctggaggtcgggctccggggatgtgcccggtccctcccatgaggcaacccctccagtgtcctctgagggaagagccacataccggttccccactcagcc

SEQ ID NO: 94148 - DNA, 411 bp, Homo sapiens
caacaaaatatacttacagaatgaattaatgaagtttctaagaacttcattcataaccctggttcataaagaacattttcccacataatgccttctattttctctaggtcagagggtggggaaaggctcttactggtagctattactcaaaatgaacacaggaggtctccactgccatgccttggcctaaaatggccttggttttccttggaagtcatctgcatctgcctctcgtaagactattaacttagtacttaaggtccagaacaaaaatagaaaatgtttatgtgggccgggcgtggtggctcacacctgtaatcccagcactttgggaggctgaggcgggcgagtcacatgaggttgggagtttgagaccagcctgaccaacatggtgaaaccccgtctctacta

SEQ ID NO: 94149 - DNA, 770 bp, Homo sapiens
agcggtgttctcggctcactgcaacctctgcctcccgggttcaagcaattctctgcctcagccttctgagtagctaggtttacaggtgcctaccaccacacctggctaatttttgtatttttagtaaagacagggtttcgccaccttggccaggctggtcttgaactcctgacctcgtgatccaccctccccggcctcccgaagtgctgggattacaggcgtgagccaccgtgcccggccaacactttgtattacaatccctatatgctttgtaagagcattgcccttgtctttttaaatcctaactgccacttactagtagtatgatcaggaacaagttaattaacttatctgaacctcagtcctagtatctgtaaaactggcatatcattacctagctcacaagtttgtgaagattaaataaaattcatttatgtagactaaatacgtgttggtttcccttgtcatgaagttggtcctgcttttctcttgatcacgttcctttaccattttcctggtgttattttgattctttgatcatgattactatgagggattatcacagctaggtcctactcatgcaggcaaggaggaggaattattcaatccaattaatcccaggctctgtatcctcaaggaatggagttggtagtttaatgaaacagattacatgaattctttctatttaacaattacaggtttcatgacaacttttgaagaaatgtattaacttgggcccaaattggtatatttctaaatatggagccata

SEQ ID NO: 94150 - DNA, 405 bp, Homo sapiens
gttttatattttttaatacttacatcacctagttatctaagtataactcatttccacaatgtgaatacaatttttctcaataaatcattttgacatctctgaatctcaggttaaacagtctctcctattattaaaaagaggagcctgaaccaagtgaacttatcattgcagtcaccatcttagtgtccagagagagcaaaccagcaaacttcaactatccctgactaagcgtagtaccaaccccttcaaaggcccggcaatgcactgaaagccaggtgagcctgctgacgacacagtaacaagaaggccagagtttattgaatcacagaataattcaatggtaggctagcactgggctttaatgagcatcgcgtccagccttctcactctgggaccttatgatgt

SEQ ID NO: 94151 - DNA, 456 bp, Homo sapiens
taggaatccaataccatactgtcagtttaaagagaggttttttcctccttcatttaaggaaagtaagattactgcaagatgtttctagatttccttagtttgaatctaacagtcaaaacacattttagaaaatcctacatagtacttttctggaatctaatccataccacgtatgttgttgctattaccatgcggttttaaaaaaataacttaagctcttctattgtaactaaactatacagccttgaacaaatcacttaaccttaccacatggttagttttctcatctttctcatctttgacttttttaaatgactataaatgatgagactatctaactttaaaacactacaatgcaaaaattttttgtaaagtgctatacaaacaacttatagcatgtacttacaaattaaaagccagatacattttccattaaaagatagttttaaaaacagt

SEQ ID NO: 94152 - DNA, 674 bp, Homo sapiens
aaaaatgcaaaggcctatagaacgacttcctatccctagcaaaaattcacacagaatcctgtcccctgcacgttttaagtggaaaagaatgaccccagaaagttgatttaaaactaataaagctgtttattatcattaatgataatttctgtataattgtcacggagagcttatgcatgaatctgtaacttgtcgttattatggtcttcactagaaattgcatgtcttttttaatttctgaaataaattattgggatgaagagcactgtcagtttttgtattaaagtgtttcagtagagcgtggccgaatatttgacatgatgaatctgaatgaaatgatcagagctatgtgaggaatatggttctacgctggatgttttgtggacaaaacagaaaaaaaatcccagcctagaagcattattgaaattgcatcgaggaaaaactataatctgggggtcatactgtcactctgagagaactactatgttctgtctcgctttctcatcagaggaaatccttgtaccatgttggtcaggctggtctcgaattcctgacctcttgatctgtctgccttggcctcccaaagtgctgggattacaggcgtgagccatcacgcccactctgatgcttcttttactgcgacagtgaaatcagaaacagttgtcagggttgaa

SEQ ID NO: 94153 - DNA, 308 bp, Homo sapiens
agaaggcagaggggacagcgcccagtaggcttcccttccatatttgctcagcaagtgtttcctgaggcctcccccgaagccttgtgctgggcggtgctgggagtggagaggtgattttgatcttgccctgctctcaaggggctcccagtctggcgggaaaacaggcacagacgcagcttgaggaggacgtggcagcggtggtgccatgctgccaggggctctgcgtgcccttctcttgacggaagggtacagatcagagctgggtgttcagaatttctctccgaggcctgtgtggaaggaccaggaag

SEQ ID NO: 94154 - DNA, 448 bp, Homo sapiens
ttccaggctcatattgtacttaccctgtcctagccctagtccaaccatttctcctaagagtcctggttctctttggtgagaaatggtatcaaagaccaaaattttaggtgttagggcatgtgttagatcatttctactggggtgactttgcttctaggccacttttgcctatagatggagctaggaaatatatgcatgtacatatatacatacacatacatacatgagaacatatacatgcatatgtatttgagaaatcctgagtctatgccattacttttaattccattccatccccacagggtatccctcactatcccaattcatatttgtatgttccttcttccactgagaatgctggaacctaataacatcaacatacttattcatttgctaaatcctgtattacacataaaagagcttcagaattgtttcagccatttcaact

SEQ ID NO: 94155 - DNA, 171 bp, Homo sapiens
agatccaagtccaaattggttaaggtaaaggatctacagagttacaagataagaaaattatgtgaggttatgcaggaaaatgcttacagctcactttgcaaagacaaaaagatatgagaagaaatttagctgattaaatattgatgagttctccttctgggacactatgta

SEQ ID NO: 94156 - DNA, 439 bp, Homo sapiens
ccactgtggcctcatcatccacctacaggtggacaggagagagtgaaagcagaaatccagtgagtcagtttcgtagctgccaccaaaagtcacgcaggagaagggagagaagttcccaggagacttccagaggtcctaccctagctaggcctttatgacacagaggggctggggctgcctatggctagggtggtaggggcctgctgtgtactacctggtcagctgcccgtccccagagcccaacacgaggactgtcctagggactggagcggaagccacagaaattccagagcccaaggcctttcctggaacacctccaggttgaccagcagcctagaaaactgcccaggaggggtgtgctgattcttgcacttatgacacaagcccacggagcaggaggcagctggtgtagagattaggagcacagggtttgaggtca

SEQ ID NO: 94157 - DNA, 394 bp, Homo sapiens
ttttttactgtaggccgtaaggccctttgaaccctcgatatataatacttgctcaattatgtttgtttagtaaaggaatgattccatttgcaccataaactctcttcctgtgaccagcatatgaatgtgtgtgtggtctctaagaactcgaatgatgcctaagctatccaacccactttcctcagtttttatttacgcagaaattgaaattaacaaactaatttctgagtcttaagtgaaattgttttcgttttatttaaagttacccttgacttacatagttttaaccttctggaaagttcttcttttttctctctctcttcctgttcctgattgccacactggatagaaagttctaaatgaatacttaggtttgaaagtatttttctacatc

SEQ ID NO: 94158 - DNA, 561 bp, Homo sapiens
ggaggggccccaggttgtggtcctgcctcccttgtgccgtggtgtggcagccatggtccgtgcctttcctgggtgcggggcctaccctgtgtcaggtgcctctccctaggatcagctgtgcaacttggctttggcattggcagctgtgtgggagtggccagtctgagcagcagcagctgttcccagtcccttggagagggcaggactgggacagtaggggcagcactcttatggccctgtccctcatctctggcagaggcaaaaggaagctagggaaaagcaacatgaccttgggagccaggccacccaccatgcccccctgcagccaggcctcccctgcaggcctccaagagctggacttgccgtctcagcatggatctgtgctgcccctgcccctcacagttctccagagggcagggagagccatttcctgccacctgtccttgattgccatatggccacctgaccttcctgaggttcagtggggaggacagtaaggtttggctgaggtaaccctgtgtgagtggtgtcgtggcttttggtgcttagccctcagcccca

SEQ ID NO: 94159 - DNA, 403 bp, Homo sapiens
cctcataaatcagtaggtgggaaatctcggcggagaaatagaaaccctaaaacaggaactaaatggaatttctggaatggaaaaacacagtagatgaatttttaaaaatctactagatgataataatagattttttaaaaagtcagttaacttgtaaaccaatagaaattatccagtatgaacaacagaaataaggataattgggggaaaaaagcaagcggagctctcgacccgtgggacaatgtctcaatatccagcatgcatgtaattagattttcaaaagtgtaagaatgacccatcagccacatgaaaggatgaacaacatcgttagttagcagggaaatgaaaattaacactacaatgcgatgccatcacacatccatcaggataaaaattaaagact

SEQ ID NO: 94160 - DNA, 379 bp, Homo sapiens
ggattttttggtctgttttggctgctataagataatgctatagactcagtgacttataaacaacagaagtttatttctctcagttctggagggtgggaagtccaaggcactggcaaattcgatgtctggtaagggcctgctttgtggttcataggtggctgtcttctagctttgtccttatgtggtagaaggggtgaaggcgtctctggggtttcttatatgaggtcactaatcccatttgtgatggctctgccctcataacttaatcacctcccaaaggccgcactttcaaataccgtctcgtgggcggagggcgtattgggattttaatacatgaattttaggagatggaaacattttagtccataacatacaatga

SEQ ID NO: 94161 - DNA, 240 bp, Homo sapiens
cggtgccttgatctcccttcttagctacttcaattgactgataaaaccaccctgtgatggtaataaccaggttcccaagtgcccaggaaaataagtcctaggggtggacttcatttaaagcagactgtggtttctgcctcagttccctcttgctcctggttggattacacttgctgcccaggggcccaacagaaaacagagaggcgctgcttccctccacctccctgagttaatggtgta

SEQ ID NO: 94162 - DNA, 356 bp, Homo sapiens
  misc_feature (211)..(211): n is a, c, g, or t
  misc_feature (225)..(225): n is a, c, g, or t
  misc_feature (263)..(263): n is a, c, g, or t
ctgtctcaaaaaaaaaaaaaaaaaagtcagaaaattaagatggagaaaaggccaaaaggccattgtatttagcctgatagtaaatagatcattgatggcatttgagagagtgattgtgtttgattgattctaaagaatgtcttaagtattcagtattactttttacaattttttaaaattattaatacaattcttccatctctactaaaantacaaaagttagtngggcgtggtgggaggctgagtcaggagaatcgcttgancccgggaggcggaagttgcagtgagccaagatggcgccactgcacttccagcctgggcgacagagcgaggcgccgtcttcaaaaaaaagaaaa

SEQ ID NO: 94163 - DNA, 228 bp, Homo sapiens
gtatttgcttatgtctaaggtccctgtagttgtggttcacaggattggggctgctcctgagattcagcaccacacaggcactgcatggaactgtgctatggtggtgggcactcgctttccagatagggcccatgttgccagcaggcatgatgcatcatttaccctaccctgagtgcaatatgtggttttatagaaaaaaacttgggccagatgcggtggctcacacct

SEQ ID NO: 94164 - DNA, 411 bp, Homo sapiens
gccctgctaatttgtgtatttttagtagagacaggatttcaccatgttggccaggctgggctcgaactcctgacctcaagtgatctgcccacctcggcctcccaaattgctgtgaatacaggcatgagccaccgcacacagcaagattttctatttcttcataattctgtcttggtaagttgtatgtttccagaaattaatctatttcttctagttattcaatttgttggtgaatgattcttcatagtagcctcttaagattctttgtatctttgtggtatcagttgtaatgcctggtcttttagttctgattttatttatttgagtcttctcttgttttcttagtctagctaaaagattgataaaatttgataaaattcaacatattttatcaattttgtttatctttgc

SEQ ID NO: 94165 - DNA, 1349 bp, Homo sapiens
ccctttgcactcaggacaggggtgcctccagcagacagggtgctcaatgtatgtttgttgttagtaataactataacttattgggtgatggccattatttactatgtaccaggcactattctacacattttatgtatgtatattaactcatgcagttctcataaggaccacaaaaagattgtcctcatttttaaaatgaaaaaagcagtcacagagaagttaagcaactttcccaaaggcacatagctagtgatatggtttggatctgtgtccccacccaaatcttatgtcaaattgtaatccccaacttggaggtggagactagtgggaggtgattggatggggccgggggcagactttccccttggtgctgttcttgtgatagtgaataagtgctcaccagatcaggtttaaaagtgtgtagccctccccattctctctcttcctcatccagccatgtaagacgtgcctgcttccccctcaccttctgccagggttgtaagttttctgaggcctcccagccatgcttcctgtacagcctgtagaaccatgagccaattaaacctattttctttataaattatccagtctcaggcatttctttatagcagtgtgagagtggactaatagagctagttattagtagagccaagatttaaattcgagcttgctggctcccgagttctactttctcaaaccctatgttaagctattgtccacagcattcaacattgttgaattatctttgtcaactaaccttggaagtcttaaattttgtcctaatcctgtcccctattccccccaccttagtcttctccatcactcaaaccagaacattaggaatcctctctttccttacccaccccctctgatccatctccttctatacacatcaatcctgaatccatccagctcctccttcccagtgaccctgcgctgaaccagtccaaaccatcatcacctttcatctggactcatgcggtcacctgctgacttcctccaggcttcccctcctgctgctcacccccatctatcctccactcagcagctggaaggattaacgcataaactaaacaatggtaatcctggtttataaccccataaaggctcctcatagactgggcccggtgactcaatcccagcactttgagaggctgaggcaggcagatcacttgagggcaggagttcaataccagcctgactaacatggcaaaactccatctctactaaaaatacaaaaattagccgggcgtggtggcaggcgcctgtaatcccagctactcagaaggctgaggcatgagaatcacttggacccaggaggcggaggttgcagtgagcagagattgtgc

SEQ ID NO: 94166 - DNA, 199 bp, Homo sapiens
accactgggtttgggggctgctcatgcagggcagcagctgagctcagagaccgcagctcccctctgggccttggatggagcaggtggctgtgggtgccgtggctcagtctcagtggcacgcaggcagtgctgaccaagagggcacgtggtaggcagggagcacgtgttgtgtcattcatcaccatacctcagtgtctag

SEQ ID NO: 94167 - DNA, 446 bp, Homo sapiens
gagaatccaaaaataaactctacttacttcaggcagtggagtaaatgcctgggaacactttccttggagacagatagatctgccatctcagcctgactcagcctcccacgagctgcatcagcttggtcaaactgcttaatgtctctgagactgtggttcttcaggtgatatgcgggaaaaataatacacacctcataggtttcctatggtgaatgaatgaatgaatgattatgtacaaagtgcttagcattgtgttgggctcaataagtgatatttattatttattattattattctgagcttgcttaagtatagacctcaagaggatcagccaagactagtgtaccctttggaaatatcgtttctagggacaagaaaaatgtcttggaataagactccataaatccctctttcattgtgcctgacagagttaaagcagcttcccc

SEQ ID NO: 94168 - DNA, 871 bp, Homo sapiens
tgcgggagtgtggggttatgtacctcctcccattttcctgctattcagcataaaattatatgctttttgaattttatcatcttagttactaatattcagcattcatatggtagtcagaggttaatttctgctactgaaatgctaagaagcaggtagactctttgtggtataagggtttctggagtccttctacctggactactgcttctctttctgatatcacttctaactttgttactttccatccaaacgtgtgtgtgtgtgtgcgtgtgtgcgcgcacgcgtgtgcacgcgctgtatctgtgtgttttaatcagatgcttcctaagatattgcagtctttgctcacataaactttcaatagttctgtattatctgcttgatcagactttaactccttaagatgaagctcacagctcttggtcatctgattgctacacatctattcatctatttctactgctactcaatcaaatcactatattcccattatcctgactggagttggaattttttctagactagaaagtgtcccctgaaaaatcatcatcatcttcacctcacctcccattctccaaccaccatacactctggcttttcttcatttagaatatccatcatctcatttccatacataaaagtcccgacccctatttacaacctaattaaaaccataccttctcaaagcttcccttactgtaccagtatgctaacatatataatgtttattttcttctctccctattgaggttagacaggaatgtctctgtaaatgcataggagtgcttggtttcttcaagaaacaacaaagtcaatatttttgtctattcatctaggaagtgaaagtcagcagagagaattagaagaaaaa

SEQ ID NO: 94169 - DNA, 397 bp, Homo sapiens
aaaacattgaactaggaatcccgagacttaagcttgagtcctgacccaacctataaattcactgtgtgaccttgggaggcttgcataacctctctgagctttcccttctttgtaaattgcacaatattaccttcaaatgtaatcatgtgagaaagaaactgcagctgcttcttgggtttagagctgcagcatctgtgtgggttctcagaagtaccatagccctgactacaaattatctcatagccaagagaacaacctcatggaactcgaaagttgaaattcactcagtctgggttttttatatttattctggggaacttttggggaaatgactacagtcaaccactcttatgcaacaataaagacgcagacattttttgaaagaaaactgagttct

SEQ ID NO: 94170 - DNA, 292 bp, Homo sapiens
gtcaactcatctaagacacttcgcaggcccttgctatcagcctcaacacagtgataaaggacaactttactctggcatctgaacagagcccaattggaagaatcaatacagcttagatggaggtctcctcatccagtggtaataaaacatcccacatagtggagcttagagagcacagcactgggatgtgaagacatgggttcaaattgcacctctgccatgttcagctgtcaccttgggcaaattacttctctgaaccttagttttctcatcattaaaatgggaatattgg

SEQ ID NO: 94171 - DNA, 1451 bp, Homo sapiens
aatcatttgataaaatttgaaagtgcagtcagacaaggcagtcacttaaaagcaactaaactgtgatttgcttgacttagtttctcattttctctgccagagtctgcaaataaacactctgatatcagagcaaacttggtaaatacctctgtttatatacaatataaatatacaatataaatcatgacgtatgaacgcctaaggtatctgaaagagttggtatttctaatatttcataaaagttaaatatctagagaatgcattgcttttgtcacttttaatttttatattaaccctcctaaactagttacctcttttattcgtatataggtaaaacaaacgatgagccatttttatcaaataagcaaggtattgagtaaagtgtaagcatatagtatacaaattgtaaggtaaaatggcaatttactgtgtggcaccaggtatttaaatgtgcactgaaaaaatttaatgtatcattcaagtatgtgctttagttatttagcgttcgttgttattttaacttcatgaatatgctgccatttattctttggaaaaactgcttgatctattgtatatcaaaggcagcataatttctaattcagtcggcatacatgttactaacaacaattcctctttcacattagcttaatttatataatgatcttgtcattttttcctcattatgtaaattgtgctttcttcactgaaatattaagaaaaacataataaatatcttcctatgtttttcaaaatagtcctgtcttaggctcacaaatgaaaatttattcctacaatgaatttttgttctgtttttgagacgaagtctcgctctgtcgcctaagctggagtgcaatggcacgatctcggctcactgcaacctctgcctcctgggttcaagccattctcctgtctcagcctcctgagtagctgggattacaggcatgcaccaccgtgcccagcaaattttttgtatttttagtaaagatgggggtttcaccacgttggccaggctggtctcgaactcttgacctcaagtgatccacccacctctgcctcccaaagtgctggaattacaggcatgagccaccccacccagcctctataatgaattttgagtagaaaatttgatgatggtgtggaggcaggaataagaactaaggatatttttctagtattccatttttaaactggcaaagttagattaacaagagtcacaaacttctaattaacttctaattctgcatatattttgtggaaaaaatcttaaaattcttagaaagttcctgcttattaaaaagtttaagtctggccaagcactgtctgtctcttaaaaaaaaaaaaagtttaagtcaacaaaagatttaaagcatacttgttatacatgtaacaaacacaatgggtaatgaagtaaaaagcggttctttttaagtttataaagaccatagaacctt

SEQ ID NO: 94172 - DNA, 550 bp, Homo sapiens
tgagaaatcctgcatatagctatcctgaggttttctacttgatgtttacttcttgccctcacccagtatcattttgctgggtgtgctctgttccatttatattcatctcccgaccactgtccgtatctttctccatcagaatttttctttttttctaatttattaatcaagagaacaattttccactttctccatctcttgtctgtcttctcataaatttaaccagctgtgtgctgaagctagcttaccctggttcatgtggattttgtgtatctcttcccagttctgcattcagtaatatcacgttggtggcttgaaattggacagggtggtagtaattatcccatggaaatgtaaacgctacaaatcagggctccccatcctcccaccccagaactagcataccactgaattaaccttttagcctgccttcactcaaaaacagctttgtaaagaaaacattcgtgcagaataacatgttttcattaggtgaattcaagtaaggatactgtgaaagtttcagcagccatagcctagtctggccaacatg

SEQ ID NO: 94173 - DNA, 384 bp, Homo sapiens
agcagatccaatgagtgtgcgtttttgctctgtggcattaccatcagattgacatatttaattatcagatatctttcttttgccaaaaagttgtggttgagttggccctgggatttataaatacatgcacacagcacatttctgtcattgttcactgcagtcttttaacacatcttctcagcaatattcttaatgtttccagcgggaaaattgtaaattatttaaccactgaattagaggtgtgttgttttttagctaatcaatagccattgaatgcttaaatgggctttaaagtagacaaaagtaaaagacagcaaagaaaattaatcagtaagattgcccatactccatagacacttgagcagctactttagtcattttgaa

SEQ ID NO: 94174 - DNA, 433 bp, Homo sapiens
tgtttgcacagttggcagaattgggcacccacttgtgctttcatttgaacatactcagaaggtaggggtagagctgagggggtttacagcctttactgccagtctctggagaccaccaatatgtacaacaaaaacaaacaaaatcaaacaaaatcccaagcaaacaaaaacctaacaattgttaccaccaggctatagatacagtgagtgaaaacatcctagctcagcaaggagggcagatatgaaagagaacaatcttcctctcccatctccctctccactacttccacacgcttgtggtgaggggggagaaaacatttaaaatgaagaggataggttttaaataagcagaatgagatgattttagtgagtgaaagtggctgacagttatgaaagaaagactgagagaaacttatgaaggagtctttaaggg

SEQ ID NO: 94175 - DNA, 791 bp, Homo sapiens
gtggtattaagaggggaggcctttgggaggtgattaagttgtgagggctctgccttcgtaagtgagattaccccttataacagagacctgagggagcttgtttgccccttccaccatgtaaagacacgtgcaaggtgccatctatgaggaacaggcccttagttgacactgaacctgcaggcaccttgatcttggacttcccagcctccaaaattgtaagcaataaatacctgttgtttataaactacctagtgtaagttatgttgtcatagcagcctgaatgggctaagataatccatatccccttggaattgtactaaacatcaccttgaagttgtattataaatgtcagaatcccagtctgctattcactagctgattggcttggggaaaacttgtttatctctgtagccctggttttgtttaccacttaatagtattcacctcattgggctgctggaagactgaacaagccagtatctacaacatccctgagccacatctgttgggtattagcggtccatgagggttaattgcctctctttctcttctttttgcatcacatttgaagttttgacattttaaaaaatcgcaagaggttgcttcaagctttgggatgcatggcaaccttctcttgaggaaaattcattcgaatgttttgtgtgctcaaaatatccgttattacatccgagaatctacagtggactttggtgaaaggttggcccaaagcttagaacggaaaaaattaatttttccagagaggcacgactcagaatttattcctgtctaaa

SEQ ID NO: 94176 - DNA, 570 bp, Homo sapiens
cggctgccaagttttctccctgctctgctccagtgacctgggaaaagcttaatagactgcccattttagagtctccacactgagtgtcctcagcctgtctctcaggaagccctttgacatgtttttaagatcctgtgagccatcgttgtggcttctggtttctctcggcccagagctaaaacaccccacctgtttgccaccagacagaaaaatgtctgtttgttcaggcctttattcctcttatcttactgtgcactcctttccctccctctgggaagccagccagacacactgaggaaatggcttagttttctcatgtaaaaacaacaaaatccattttttgaaagaataatataaaaacgtatgatgaatggggaaaaaaccaactatacaaacataaatattacttctgtacatttgtcttctacaattagctttaaaatcatttttgtttgaacagctgagatatttggtactggccaggaaaactggagcttagagaaggggtatctgtttccaagacattctctctatggtgtcatttacaaaagacttcaaatcagcattaga

SEQ ID NO: 94177 - DNA, 492 bp, Homo sapiens
gtaatgcacacatttaatgactaggtgttaaatattggtgattatgttgattgtactgtagctttgtatggtacattacttcctaaggtattcccacaggcaggacactagatcttggaaaacactaactttatcagaatcagttcttgatgtgacactgactgtatttaagtcaagataggttttaggcaggaattggagctacaagcagcgtgttgtagatgagtatttttgttgtgttacttcaactgtcatagtttctaaagcttagaaataactagttcacgacctttgtagcatcattatgtgagaatttattgagggtatgataatgaggggcttattcatactgttaatctggctctacacaagtgtgactagagcatgtttttgttttgttttaagagatggaatcttgctgtgttgcccaggctggagtgcagcagctgttcacagacgaggtggtagcacagggaagccttgaaccggact

SEQ ID NO: 94178 - DNA, 701 bp, Homo sapiens
cagaagaagaaattctgctagcagactgcctttgctcccctccctggttctccagcctgctggtctaccctgcagactttgactttccaagctgccacaatcatgtgagccaattccctaaaataaacctctctatatatacttgtatacatcctgttgattttggttctctggagaaccatgactaatacaactgggcttaacattttatctggagctccgaaagaagctgaggtcttcaccaaggtattatgaaaggagcaaagggtgtcctaagaatatctgagtgtctgcaaggtgtttaactcgtgttaaagggtttgtgctgggcagaggacaaggtactttttttttttttttttttttttgagatggagtttttctctcgttgcccaggctggagcacaatggcacgatcttggctcaccacaacctctgcctcctgggttcaagcgattctcctgcctcagcctcccgagtagctgggattacaggcacccgccaccacaccccgctaattctttttgtatttttagtagagatggggtttcaccatgttggtcaggctggtcttgaactcccgacctcaggtgatccgcccgcttctgcctcccaaagcactgggattacaggcttgagccacagcacccagacaggacaagatactattttgaagggtatgtgcttcccaggtagagcat

SEQ ID NO: 94179 - DNA, 315 bp, Homo sapiens
tcaagcgatcctcctgcctcagtctcctgagtagctgggactataggcatgctccaccatgcctggctaatattttaatttcattttatttttggagacagaatatgttgcccaggcttgtcttgaactcctggcctcatgctatcctcccaccttggtctcccaatgtgctggcattacaggtgtgagccaccacacctgtccagattatttattaagaacatgtagaaataccactgaattaactatacttgtctttgaggccaactttattcatttggccaaagtgaatatcaccatttaaaaactgtggaa

SEQ ID NO: 94180 - DNA, 640 bp, Homo sapiens
atctgaaaaaaaaaaaaagtttatttacatgggtaaattgtatataccctattttctcccaactctactattaaagataaaacaaaactaaaacaaatttatgaaagccatgtcaccttatcaaaaaagtaaataatttggaaaggcatatttttaatatcaccaaaattcaactcttttcccttaatattcaaatcctatttatatataatattttaataatcctaaagttttagttacaatttcattcaaaaattccataggaagttgttgatatggataagaaatagtttttgggaaaaatgagagctagtgaataatatggataaaatcattaaaagcttttttagtgcccaggaataatatgaaaaataactagatcagtaagtaaaggtgagttaagcagtatcgaatgacctgaaagggtgattaggatgtgaattttcaaatttgctcaggtatcagatttcgacatttatgtagttgtacaaaataaaggacttactgagaatatccagaatgtagggactagagggttgaattggggttacactcagaccttcacagacttatctggtggtctacttttacttctcattcttccctttctgccctctcacttcttatctttaccagtcag

SEQ ID NO: 94181 - DNA, 199 bp, Homo sapiens
ggttattttcagtgaaagccctggtgccttgatccacaaatttccccccactgaaggccctttttcaccacctccctactggttatgtgtagcattagggccaagttcatgccccagtgggctgctcatgcacttcaaggacctgacttgtagaggaaataggcttagcctgtccattgcttgccaccctccacaccag

SEQ ID NO: 94182 - DNA, 1014 bp, Homo sapiens
aagatgtcctaagccgaacaggacttaggcttaacaaaggaccaaactcttcagggtgactgacttgggtgggtgtgggaaagcttactttgtcttgacttcagcagttgcaggcttcattcaaactgatttttttctcacatcttactcatgttaaggagatggaaataggcccatattttcaacctctgccctgcatagatctcaccaatgaaggtggggctgtttcagtatcaataaaaatagcatagtgaactatagagggaaaatcgtgatctagagacatgcttcagtgtcatcaagactggcctccatagctgacatttccccacctttactggggaaagctgagtaataattagtccaacagtctggtgaacagggaggtacttttcatagagccctgtcaagctggcctcatccctgcttttataacccccagctaaaccaaaccttgctgcccctcttcacgtttgcttggtaaacagttccttgtggaaaaaaacaacatccccactatcctcaagtccgccacctacctcatcctgtaggcactgaccaagagcaacaactttagaagctcacgctaaatatagtttagggcacaccatggtgaacaggtggacagcaagaagcctgtttccatattggtgtaccatatgtatacaaacacaggtactagattggtgtctgcttctgagtcattttcccagccaagtatagaaattttgtagcaaaacccatgtgcttcatgatcatgagtagttaagccttgtttttctatcaaagatccccgttaagtgaaagggacccacaaaccttcaacttgtcattttgtcaatataccaaaaataacctttctttttacctttactgtattacacagaagtcaatcatcttccttgcctcccgctctgaactttggagtggagaatgagccatttggggactatggggaaacttaccactatgtgtgaaacttaacattacaagttctagtccttgttctaaaca

SEQ ID NO: 94183 - DNA, 446 bp, Homo sapiens
tggcactggtcgaaaattgcactattaatcaacagctcacccatcaaagacacagaaatgcagacagagactgcaaatggccaagccaacgtatcaccattgttaggagaaaacaaaaaccaaatacttaaacacagatggctccagaccaagtgtgaagacagtacattggcacgacaagggctaaagtgttttataaaagataatttaggaggtagggctagagtctatcttgctcaacaaatgaatctgtacagacctttgccttcaatccccaaaacagatgagtaacttacatcattaatctcattgtctctccacacaatacttttaacagtcaatcacaaagtagcctgagagaaagtttccctggatactaccaaacacacaggtttgcaacagatgtctccatgcaacttttaaaacagattccatgttaagaagtt

SEQ ID NO: 94184 - DNA, 801 bp, Homo sapiens
tatccactgcactaatgagtccttctcatctgggtcaggtatcaggagtggacaaggggataccaaacatgtcatttgcagccacttaaaatacttgagtggttacaaagatcattctctgatcattcaatataatgagagcgtttcttccctgtttgatggacatttatgcttcagtgaggtgttatatagaagactgataaagtagtgctgatatgtgctgttaaaaaattctttcctggccaggcatgatgtacatccctgaaagtataccaaaagggtctggaaggagacacattacctgttgatagaggtcatctatgcagagggggatggaggcagaaatgatataggaaggagaaaagatgactttcgccttgctcttaaatatgcttctgtactgttttcaatttaaataacagattggcattatttctacaataaaagtgcattgacaaccagcatatttttctttttttttttttgagacgggctttcactatgttggccaggctggtctcgaactcctgacctcgtgatctgcctgcccccgcctcccaaagtgctggaattacaggcgtgagccactgtgcctggccttaaaaatattttttcttcatttcctatcacctttagcacagactacatttctttttgtattctgagttcatttctagactctgtttatacatcagttcttagagtatcaaacgatcttatttattatatctttgcattatgttttaatatccatcattagtccaccttttcagaagttttttgacaatgtgtgcatgtttg

SEQ ID NO: 94185 - DNA, 858 bp, Homo sapiens
accacaatcttaggtacagaaggcagtagcaggccccagctgctcttcaaggagacatacaggcatgagcagagggccaaaatcaggaaaagcttcatgccctccaaataatgctcaaatggcagaaaaacaccagagtacattgcttcttgggctccataacaaaccttgtccattataaggctcctgattagtgaggagaagaaaaaaaacacactaaaaaagttaaggagcaaaacatcacaggactaggacagaatcctatcagtgcaaaaggaagaagtatatagttgtatttgggggcatagatgtacatccctgaaagtataccaaaagggtctggaaggagacacattacctgttgatagaggtcatctatgcagagggggatggaggcagaaatgatataggaaggagaaaagatgactttcgccttgctcttaaatatgcttctgtactgttttcaatttaaataacagattggcattatttctacaataaaagtgcattgacaaccagcatatttttctttttttttttttgagacgggctttcactatgttggccaggctggtctcgaactcctgacctcgtgatctgcctgcccccgcctcccaaagtgctggaattacaggcgtgagccactgtgcctggccttaaaaatattttttcttcatttcctatcacctttagcacagactacatttctttttgtattctgagttcatttctagactctgtttatacatcagttcttagagtatcaaacgatcttatttattatatctttgcattatgttttaatatccatcattagtccaccttttcagaagttttttgacaatgtgtgcatgtttg

SEQ ID NO: 94186 - DNA, 437 bp, Homo sapiens
aggttgtaaagaccatggaaaaagtgtagtatctgggccggagtgcaccgttcctcagggcacagtctctcacgacttcccttggctaggggagggatttctctgatcccttgtgcttcccggatgtggcaaagcctcaccttgcttcagcttgccccccacagtctgcacccactgtctaaccagtcccagtgagatgagctgggtacctcagttggaaatgcagaaatcacctgccttctgcgttgatctcactgggagctgcagaccggagctgttcctattcggctgacttgccagccactccctcttctttcattgtataatgtctaaactgaggcccagggactttaattgcttatctaaagttaaaaatttcacaacccagccagcaatatgacccagtcccatacttctaagactgctttttcattact

SEQ ID NO: 94187 - DNA, 418 bp, Homo sapiens
ttccaaacacagttcaaatgaaaccatcaataggataaaacaaacctgtaaaatgtgtgcacaggattgatgtgcaatattcattactaatccaagagaagtaatgtgattcaattacttacatctctatatcaaatgtgatggcataatggctttatgccattatcaattaaaaaaaaataaggaagtattagtgtgctacctgagacctgcattccactcaaagcgccaagtagtttaactcatttttaagagataaagctctcaagcaataaacaacatgtaagtagagttcacattacctgaaaattgacccacaaatcatgtgttcatcctaagcaaactaactgagcttcatccaggccctggaataataacacccaccctggcatgagagaatagaggtgcttcaccccag

SEQ ID NO: 94188 - DNA, 388 bp, Homo sapiens
ctctctctctcttcctcctgctttcgccatgtgacatgcctagtccatttttgccttctgccatgatcggaagctccctgaggcttcaccagaagtttagtagataccagcaccatgcttcctataaagcctgcagtactgtgaaccaattaaacctctcttcttaataaattatcaagtctcaggtatttctttatagcaatgcaagaatggtctaatacagtcctgtgaattccacctcagtaatttctttcaaatgtatctcttctagtccattttaccaacaccataataatttagaaactcattattctaacctgagtacagaacccatgagtgggtatcaacccatcagtctctcttctgttaaaaagttttacagctctct

SEQ ID NO: 94189 - DNA, 235 bp, Homo sapiens
tttttgatgtaaaataatgttcaatcctgtctagaaattgctgtagaaagcaaactcttctcaaactttaggcagagctaaatatattttttcaatattcaaacagttatctgtatgttaaaataaattctgggccaggcatggtagctcacgcttgtaatctcagcacttggagaggccaaggtgggaggatcacttgaggtcaggaattagcgaccagcgtaggcaacatggg

SEQ ID NO: 94190 - DNA, 788 bp, Homo sapiens
tggctattttcactatttttgaaatggtcagttaacagtttgagatagatacatatacttttttgagacaaggtcttgctttgttggccaggcttggattgcattgatgcagtaacgattcactgcatcctcaacctcccaggcccaaatgatcatcccatctcagcctcccacttagctgggcccacagctgtgcaccacaatacctggataatttaaaataacttttttttctttttctttttcttttttcccgagacaagatctcagtatattactcaggctgggatgcagtgtcacatttatggctcactgcagctttgaccccctgggcacctcagcatgccaagtagctggggctacagaagtataccaccacttctggctaatttttgtagagacaggattttaccatgttgcccaggtcttgaactcgagctcaagattcacctgcctcggcctcccaaagttttgcgattacaggcgtgagccaccatggctggcaaaaaaatttttttggtagaggcctggtcccagcggattgcccaggctgatgttgaactcctgagctcatgtgatcttcccaccaggtagctggtaccgccatgaccagctaattaaaactttttttttgtggagacgggatcccactgtgttgtccaggtaactcctgggttcaagcgatcctcccactgtggcctccccaaagtgcagggattataggcatgaaccactgcgcccgtccagcttgatatatttaggtattgatatatccataatgacgaatt

SEQ ID NO: 94191 - DNA, 541 bp, Homo sapiens
ccatctcctgggctcagcctcccctcaagtgtagctggaactacatgctcgcaacctactaaatgttttgcttttttttttttatagagacgggttttcatcatgctgcccaggctggtctagaactcttggactcaagtgagttgcctgcctcactctcccaaagttctgggattagaagcataagccgccactcctggctgcaattttattttgaaggtaatgcaggacacaggatacaaagtctatattcagaggaagagaatgtatgtggtctaaccagacaccttccaaaataaatctgcaactccaaatgctaataccggcaagcataatggtataaacctgtcctacagaaacggacagttgagtagtgagattaaaagaacttcccctgaaaattcagagccacagccagcctttcatctggaattctgtattaccaaagtaattggaacaaacaaaaaaacaccatgctgagactttcaaggggtccttgagttggtagcaccaattcagagacttcatggaagcaatcacc

SEQ ID NO: 94192 - DNA, 454 bp, Homo sapiens
ctatagtgaggcaagtctgctagataaacggtagttcagcccattttcaaataaactgctatctgcacacaggtcctaatctatgtaccttcaacagtatctgtggtcatgagtataatattcatttttctagctaaggaagttagaaactaaagacagttagaaactgagggtgtaataatgattttcaaaaaattctaaaatttccatttcaatgagttacacaaaagcaattagagctatttgacaatattcatattaattatattttctaattctagaaaaagaaatgggacattataaatcagtaatcgtttgaaagattccaacttgagactttttaaaccaagactagaaaccaagaagccataaaagaaatgtcagacatattgaaatacacatgaagtaaaagcttctatggcaaacgataccataaaaaagtaaacaaacacat

SEQ ID NO: 94193 - DNA, 699 bp, Homo sapiens
gagaccttttcagggaaggtacaaggtcaaaactatcttctcaataatacaaaaacatttgttttgttcattttcatcctcccacaagggtatagcggagttttcccggggctacatgaagtctaacatcacaacagattgaatgtagaggcagacatgagaattcaggtacattttattaattcagacatttaaaaaatgaaaagcaatgcaattcttttcgcttttttctggtttgaaaaataagattttcgtgaaaaataactatgctaacatgtcatcttaacatgtaaaattataatttatcattgtaattttaaaataattttttcttcatttctcagccttcatttctaatccaataaatattgtagatatcacccacataaacaatagctccctagaatcctaaataatgttaaaagagtgcaaaagagtcctgagaccaaaaagtgtgagaactgccacgaaggagaaaagctgttatgtatgatgctactcaaacagagtgactgcaccaggagaatctaggccaggaaagggaaaaggaaacgaccaactaagctgaagaaaacctgaaggatgataagacctggtttagcaaacagtaagtggagccaggaggaatgcactaagctcagcaaaggaaaaatcaaggcttggaagacagaaatatcattctcccatatacctgcaaaa

SEQ ID NO: 94194 - DNA, 159 bp, Homo sapiens
cttctccccaaaattcacctcattttaaaaggcactgtaaattgttttataaagcaaatacatacaaatagtcttgtactttgttttaaaagtttttggttttcatttttttttttttttttttgagacggagtctcaccgtgtcacccaggctggagt

SEQ ID NO: 94195 - DNA, 647 bp, Homo sapiens
agataggacgcagcaactcacagagcaaccaggacccagaaatcgcttaagagaccgcggcaaagtaacttaactgagttgccttcttccatattttcacgcccctttcatccagaacattttttttcttgaactgcttccatggaggactcaacctccccgaagcaagaaaaagaaaaccaagaagaactaggggaaacaaggcggccatgggaaggaaagacagcagcttctccccaatattctgagcctgagtcgtctgagcccttggaggcgaagcaggggccagaaactggacgccagtcccgaagcagccgtccttggagcccgcagtctagagccaagacgcctctgggtggccccgcgggaccagaaacatcatcacctgctcctgtctctccgcgggagccctcttcctctccttctcccctggctccggccagacaagacctcgcggcaccacctcagtcggacaggaccacgagtgtgattcctgaagctgggacaccttatcctgatcctttggaacaatcatctgataaaagagaatcaactcctcatcacacaagccagtcagaaggaaacacctttcaacagtctcagcaacccaaaccccacctgtgtggacgaagggacgtgagctataa

SEQ ID NO: 94196 - DNA, 650 bp, Homo sapiens
tatttcttttccaccagttatacagatatattaaattcatcatcattgactttgactttcttttcttttcttttttaccccaagtttacaacctccacctgccaggctcaagtgatcctcccacctcagcctccttagtggctgggaatataggcatacaccaccacacctggctaattttttgtatttttggtagagatggggtcttgccatattgcccaggctggtctcgaacttctggactcaagcaatctgcccgcctcgtcctcccaaagtgctgggattaaaggcgtgaaccacctcacccagctgactttgactttcaaaaccaactaactaaattaccaaggtttaatattatattccccttataaaagagaacttttatattacataccagttactagcttataattctttcctctaactacttttttcttttagaagcctattaaggcttattttttactgtttttaaaaggcttggaagatgttaaggattttttagcactttctgcataaattgtttactagactcttcaggttttaaagatcatttcactactgaaaccagatacaagtgcttgcataagaaaataatcactttttattaccaaagtaatacatacttgttttagaaaggttaggaa

SEQ ID NO: 94197 - DNA, 577 bp, Homo sapiens
gaatattaatatttcaacatgtaaacaatattttttaaaaaatcaatgagatttaactttttgtgaaccaagcctttgaaatctggtatttcacaataataatacatctccatttggactatccacatttcaagtgctcgacagccacaagtggataatgcaggcctagagagaatgtaagcatagaagtcacttggtcacaggctagaaaaatcttcaagcactgaaacaatccattgagcgaaacaaagaggaagtgagaaaaactggaaactaaagtttactgtgccaggcatttgacatttattctcatttattcctcatcacagtccttggacacagtgtttataggtgaagaaatgaaacacaagtcactgaagcaaagttatcagcttataactggaaaagccattacttactgacaggaagtaacagtcttcaaaactgttgagaacatttagatcatcttaggagaggccaaacagggagataaaacaaaacaaaaacaccccagccctgccacttttaatttaaaaacaaaaccaaaagtacagatatgaaaggcaaaaaaaaaaaa

SEQ ID NO: 94198 - DNA, 428 bp, Homo sapiens
tgagcacccctttggctaccagtaacagaaaagccaattcaaactggcctaagcgacgatgggtcttttcctctcacagaatgaaaggcacagggatgggcacctccaagtatagactgtcagagctccgcttctccgtcattttcttggctgtgccttacttggcattggtgtcatccccaggctggtaccagattgctgccacattgctagatgtgatcaggtcaggggaggaagagaggtgtccttccttgtatgtctatgtctccctgtgaagaaagttttctgagaagcctgcagagagttactcctcatattcccgcagccagaatcttgtcaaatgtccctgcctaacccaatctttggcaaggagaaatgcaacaccatgatcagcttagatgaaccaggatgaactcacagaaatgtgg

SEQ ID NO: 94199 - DNA, 809 bp, Homo sapiens
ataggtgcaaaagtcctcaacaaaccactaacaagttgaattcatcagcacattaaaaatatcattcactatgatcaagtagggtttatccgaggaataaaagaatggaataatatacgaaaatctttaaatataatcaaacacattagcagaatgatgaagagaaactataagataatctcaacagaagcagaaaaagcatttgacaaaactggacatcattttatgatacaaactcttgattaatttggcaaagaagaaatatacctgagcacgataaaggctatatatgatgatggggtttggctgtgtccccacacaaatctcatcatgaattgtagtctccatgatccccacatgtcataggagggacccagtaggagataactgaatcataatggaggcggttacccccatgctaatctcgtgatagtgagtgagttctcacaaaatctaatgattttataggggctttccccaccttgtttggcatttctctttcctgtcaccatgtgacgaaggatacatttgcttccccttcagccagaattataagttttctgaggcctccccagccctgcagaactgttagtcaattaaacttctttcatgtataaattacccagtctcaggcagttatttatcacagcatgagaatggactaatacatatgagaaacctacagcttatgttatactcaacaggaaaatgttgaaagttttcctctgagatcagtacataaagagagaatgtccactctcaccacttctatttaacatattactgaaagtactagccagagaaattac

SEQ ID NO: 94200 - DNA, 393 bp, Homo sapiens
atttgtcactagattccagcctctcaaattactgacacgcatcctttttatgtaaagatgacattgttctttcctgatatattgcattcctcatgaatttcttatagtcatagaatttttataaaccatttcagaatcgctgaaataaacatcaatatttttaactttttcattctgtcaaaaatattgtatgcagagatattgctgtaagtgtgtatacctgtgcttaagagactagggctgaagagaagtaatcaaccgaaccactggtgtaaatgtgcgtcacatttttagtgactagaaattgaaataattccaacaaatttatgtgctttgggcttgagaattcagactgccttaggctaagataaaaatcttttcctggtactatat

SEQ ID NO: 94201 - DNA, 419 bp, Homo sapiens
aaaaatgatgagaaaaacactccaacaattaagagagtgttataaaatctaaggaacaaggaactaacaaagttctaatgatgtggtaaaaataagaaagatagctttaactattagattatccatcaataactttggaaaaacagtttcggtggaatactatgggtagaatacaaatttctgtgggtagtgtagtggatagaattgggagttgaagacatggagatgcagtattgatagttgtgtccctgagagcacgtagcctggacgctggatgtcctggatcctcagcttgccactggccatggccaatgttgtagtgagatatattaaaaagcagccaaatggttacgcattattattggctaaaacttttaccccaaactccaatgtattcatctactgaaataaaccaaatt

SEQ ID NO: 94202 - DNA, 312 bp, Homo sapiens
caaaaccacatctctactaaaagtacaacaattagctgggcctggtggcgggcgtctgtaatcccagctacttgggaggctgaggcatgaaaattgcttgaacccgggaggtggaggttgcagtgagcccagatcatgtcattgcactctagcctgggtgacaagagtgaaactccatctcaaataaaactgaattattttaaaaaataataatttatttgaccttcagtttcttcatttgtagaatgggcatcatagtatggtatctctatctgcttctgaaggttatcatgaagactaaataggatattt

SEQ ID NO: 94203 - DNA, 486 bp, Homo sapiens
cttttcaaattgaatacatgataatttgtgaaactagttttatgtacatttagacaaatacaatatgacatagcacagctaattccccattttgacatattaaaatcataccctaccaccaacacccagcactgatgtcagccctctattaagctttctggatcattctaatcagaagattttcgtcttgttctaatttctagcaattgatgcatatgtaattcatgatgctattaatattatttccatgtgttttttccacctattaaattgtaataaccttgaaaacaagaataattttattcagctccaacaatattctgattgtactagcaggttaataatatttattgattaaatgcctttgtagtgagagtaattgttagcaaatagctaactccaacccttccaaaataaagatatacattcaggtagagaatataaacttggtgaatgtaggtcattcatttggtacagagacatcaa

SEQ ID NO: 94204 - DNA, 482 bp, Homo sapiens
cagagacccaacaggaagtgtggagaagtaggcttggtaaaggatggaaactgggaagccctgggcttccaggtggacagaactcacagtctcattagtgtgctgctgctgcaatggaaaattccagcaggtttctccatctaagagtcaaagtcctggtaacaagggttggattggcttagcttaggccacatcccacaccttggccagggggagctgggacaccctgagtgacagtctcgccaagactacacacagaggggagaagtaattttcaaataagaaatctagaaagaagggaaagtggatatgggatggacaaaaatgattggtgtctgtgactgaaactcatgacatgtcagggtagccacctggctcatcaactgtcatttcatcattcagctggtagggcttcctgacacctttgggggaattgttgaaattgaaatgtaacacgcaagtatcattcattcctccttctt

SEQ ID NO: 94205 - DNA, 294 bp, Homo sapiens
aaccccttgttctaatgctctaacctttactggtaaaatacatgtaatatgatatgaaacaagactttgattattttcaaaactgttaataccagacatggagtgagaatagcattataattctgacgactgttgagaaaacacagcaactattttagaatcaaaaaaatgaacctttttctttggaaaattttttaaaatttggaatccccttggaatgtgtcagtatatttgtgtcagaatgcatgttttaatttttgaattgccctgcaaagttaattgtcagtttaacag

SEQ ID NO: 94206 - DNA, 472 bp, Homo sapiens
gcagtattacctgaggtcaggagctcaagaccagcctgaccaacgtggagaaacgccgtctctacaaaaaatgaaaaaaattaggcatgatggctcctgcctatagttcctgctactctggaggctgaggtggaaggatcgcttgagcccgagaggtcaaggcttcagtgagccatggttataccactgcattccagcctgggcaatagagtgagattctttcttaaaaaaaaaaagtcaatttaggagagaattctttctgaaatcattgctgggtgcttttatggattcccaaaccctggggatcctgaaggctggaaactacagaatcagttcttgctgactgttgccaacatggacctgacacccacacttgagtttttaggatccccaatccccacacttgagttttagaggatcccccaagtcctgagaggagaactactcccctacatgcctccagaggaaagag

SEQ ID NO: 94207 - DNA, 788 bp, Homo sapiens
gattttattggtagagtgggaatgtattaaaattctctacttccttgttacatggtctttcctccaccctacaaggtgtgtgcttgtaactcaaatttccatttgagtaattagcaattattatttaaaactaacctgaaaataaaaattgtattcaattcattcatagggagcatctacctatttattattaccacataggtgatgtgactctagaaacatcttggtattcaaatagccaattaaaatataaaatgtaatgattttctaaagctactcgttttccttctctcatctctatctactaattggaaagtctattctccaaacacagcaaagatgattgacagaattctaaaaatacacaaatttccctattaaagagggtgaatggatgttagcactgtatcagacacataatattaaggagatacctgctgtttaacattaacattctgtgtagtttttgttttgcatcaaacagacatcaaaaagtgaataaaaacatgtcgtgaaattaccaaataataaattaacttcctggatacaaggaagttattttagcaagttctttttaataaaagcaaagaatggggatgtaacaattagagaaatgtggaggaaaacataagaaagttgggagagggaggtcaaatctcacttccagttatcagtaaagtgcacattcttttctgtattctgtgaggctggaggtgctgctgatagaatgtcctcacatattctgtcaatgccaggatgcaaacatcactaaataaaccctcgtgtca

SEQ ID NO: 94208 - DNA, 333 bp, Homo sapiens
aattaatagttgtgagaaagtcccattattgtattgtgtaaatttgtagtcatacagtcatatacaaataatattaaaattcatacatagttataatgctgctgtccctagagagctggcatgtctcctcaatagtggtaatagcacatttttctaccctaccaacttcctcccatcctcacaccccttttaatttgtagttattaacattttattctagatttattgttcataccaccacagattatcagcccttgagttcgtcttcctgtaaggtcatctagtgacttatattctttaattacttggattatttaactttttttctcctta

SEQ ID NO: 94209 - DNA, 1215 bp, Homo sapiens
gtcaggagaatcgcttgaacctgggaggcggaggttgcagtgaaccaagatcacgccactgccttccagcttgggtaacagagcgagactcagcctcaacaaaaaagaagtgttaaaaagttttacttttaaatatttcttttgaagaatgttctgtgtgaagttctgaaaaaattctttcgtgctgtttttgggagatgcgttgtgcatatgtaggttaggtccaatttaacgtatagtttaggttgcctatttacttactttttttctgtctgtcctatttataaaagtggtccgttgaagtcttttattattactgtggaacttttctccctttagttatgtttctcttgcttcatatattaaggatctctaatattaggtgcatatataactataattggtatatcttctagtgaattaaccctttaattattagataatgctcttctttgtctcttgtaccagttttgacataaagtctgttttgactgataccagtttagccacctccgatgtctttctattaccatttataagggatatcttttttcaccctttcaattcagcctgcgtgtgtccttcaaataaaaatgaatcttttgtggatagtatgtagttggagcctgtttttaaaattcattcagccagtctctatcttctgattgtggagtttaagccacttacacttaatgtaattactgatagagaaggactcactcttgctgttttgctgaatgtttcctatatctcttagatttttttgttcttcatatccgttactgcctttgtgtttatttagttgattcttttgtcttgacatacttttatttccattgtgtgtgtcttctatacattctttgtggttaccattgcaattacagaaaacactttagatttataacatcctgttttaaactggtaacagtttgacttcagtcacatagaaaaatgactcctttacaggtctgctcccatgttatgtttttgatatcccagattacttccatatatactgtgtctccatgaacgtgtatttaaaccttgacaacaatttcctgctttcttagttttttcagattaatatttgcccattttgccagcgtgtcttcttctgcatcccaagtctccttaacattgttgtactatcaataaggttttatgttgtctttttgtgtgtgtacaaaataaattcatccatctcctcttcatggc

SEQ ID NO: 94210 - DNA, 1650 bp, Homo sapiens
atgctgtttatgcaataatttgtgaacatgtacagagttttatataaatttaaaccaatttttaaaacaaaactgcggacaccaccataaaaatggaatcaaaagaaagttaatttatgaaattaagaggtcagcagaatatactcagtgatggaagacacttgggaaagtctttttaatagaacaagaacgatcttaatttaagaatattatcctggtttaacaacagtgccctgtttacaacagattgtgccctatctcatctgcagccgaggaataaaggattctgattagaaagagggttgcctacagattagtaagcaattccttggatcttatgcacagaacttgtaccatttgaatctgttttatgcttaaatcaaagtgctttgatcaaatgcataacctgccatatctttacatatttgttggtagcaatttgtattaaagaaatcacaagtgcaaataaaaagtcatttatcatttgtttaactaaactgtcatggtttagtttacaatttttaaaaagttcttaaaatactgaaaatgcagttgacacttgtgtatggcttatgaagttatttttgatagtcttacattacttgaattgttcaaagtacagtatattttaaattaagaaaagtgaactatatgtatttgttttatacatttaaggcttagactcataaataatgctattgtttatgatttgaaaactttcaggcaaaatccaatttacatttttcccttccctagcaattacttttttccagcttcaactcttcttagttactaatattttgttgactttaaaaatgaaatcattcacaaacttttggtatatgatggagaatgagaatacatttttttactgccttaacctgtagtgcgtagaatatgcatcagtttcttgaaggagattcatgtttttataagaattttcatgtaattattgcaattgtggtcaaataaggaacgtttcctgcttgaaattatattgatttaaatgatgtgtgagatgtttcaccattttcaggcactgtgtaattctattgtaataaactggcaggtatctttgtaactataaatagtgcatgctcagccatgtacactgtaaatagcctttaccaaacgtgtttgacaaggaccataattaacatcacttagtgaattgtgataaagaaaaaaaagccatgatttattcgatgtgattggcttgtttttatgtggcgccaagaacgaacctgtttaacagctgtaaccaatggtactgatctatccatccaatgttgtcattatatttgactgtggttcaacagtattgcgttgtcagactaggaaagctaaacgaacaaaacggttttagttttgctgaagactggccttattaatggacagctttcctaacaagagattattaacttttatcaggtgttaacatctgtttcaggaacatggcagtatgtttacatgtcagaagttttgtttaattctatggtatttctaaattgacttgtttaaataaattcagcaaatggatagcattgttttttatttgcttcaatatgggggtagataatagctaaagagccaaggatgaatttcttcaaatgactttattctgttagctttacataggtgttggaggat

SEQ ID NO: 94211 - DNA, 579 bp, Homo sapiens
ttttcctattttggagtttttgggttttttaagcctagggaatgcctaatatgtactgtggagtgcatttgttcatttatatcccagtgcattgtaaaatcgagcaattcagtgccttagaatcctttctgtgaacttgatgctacgtgaactacttgagaacaactactttcaagccctccgaagcactcagttacaactgtcggtctaattgcacattattctaattcattaaaaaagtccccaagggcttcttaggatactgctctatgttattagaagtccttccaaatagaaaaactttattaatttaaaaataaccgccaattcagacttcgattcaaacaaggcattttaccaagtccggctgaaagagcttcttaccacatctggcatgtagaatggcagaagactatttttgctagattccttgttgctgcagccgtttctgatgtccttttccccttcacacctttcgtgttacacatgtctgagatgacatgatgctaagtaaccaaagtactgctgcgatggaattgctctgatgtttttttccagagtgaaagctgctattacttt

SEQ ID NO: 94212 - DNA, 918 bp, Homo sapiens
caaacaaacataaaccaaagcaaagacacttaagggctgggtactcatgcctgtaaacccaacactttgggagtttgaggcaggaggctcatttgaggccaggagtttgagaccagcctggggaacatagtgagaccctgttgcaacaaaaaccagaaaaacaacaaaaagaagacattggaaaatggctggagctgattctaggtgaataaacaaccctcgacttaacttgctttgcctctgggatatgtttatcgagcgtcttgaacgttgaggaagccagccaagagaaagagcctgatgccaaggtcacaccggtccctgctgctcatggggaagagaaggcccccaactagatgtcccagaactggccgctccccacttacttgctggttcacaccttctttggttttagcgcacagggcatttcttgggctctggagtaaccactgaggccagagtgagagtccctcttccctggagggagaggcctttggggatccagacaggcttctctcctgagggaagacgctggcctggggtcactcattttcacggggagggtgtgctggcgggatgggtggaagggcctggggccccggcagcccattgcggaggttttctcgggagatggtgggtatgggactaagggtgaaagggaagttgtgagttgggtaagaaaggcctgaggatctggcaggggaaggcggcacacctgggtgtgtctcccagaggaaggcctgtggagccctggcttcaggagacagaagagaggattaacggtagaagctctttcatgttagaaaataaaacaatatagctaagggattatttggttgtaaaatccaacaccattaataaaactgttatattctgaaaaaatcctcattaaatccacatgaaaagacatgtgaccta

SEQ ID NO: 94213 - DNA, 683 bp, Homo sapiens
caaacaaacataaaccaaagcaaagacacttaagggctgggtactcatgcctgtaaacccaacactttgggagtttgaggcaggaggctcatttgaggccaggagtttgagaccagcctggggaacatagtgagaccctgttgcaacaaaaaccagaaaaacaacaaaaagaagacattggaaaatggctggagctgattctaggtgaataaacaaccctcgacttaacttgctttgcctctgggatatgtttatcgagcgtcttgaacgttgaggaagccagccaagagaaagagcctgatgccaaggtcacaccggtccctgctgctcatggggaagagaaggcccccaactagatgtcccagaactggccgctccccacttacttgctggttcacaccttctttggttttagcgcacaggggaagttgtgagttgggtaagaaaggcctgaggatctggcaggggaaggcggcacacctgggtgtgtctcccagaggaaggcctgtggagccctggcttcaggagacagaagagaggattaacggtagaagctctttcatgttagaaaataaaacaatatagctaagggattatttggttgtaaaatccaacaccattaataaaactgttatattctgaaaaaatcctcattaaatccacatgaaaagacatgtgaccta

SEQ ID NO: 94214 - DNA, 361 bp, Homo sapiens
ccctataccatggggacatcacgttccctgccctcagtttccccatctctaaaagctgggcaatgaattaggtggtctctaggatctgctcctgacctgacagtcgttgcttctaagacaacagcagaaagtgcctacaattcacgcaggagagctacgcagcagcgcttcccatactctgcagcagaggacctctacttccataaaacacaacaaaaacgaagtactaggagaaggaagtgccgcacagtgccacctgcggtgatggcctctacacgctggctctggttcctggatggttctcatccccgaccatggcacaccattaatggactgtgcagaccatgtggaatgacaccgc

SEQ ID NO: 94215 - DNA, 624 bp, Homo sapiens
atagtgtctgttccttcccagctggcagagtgggtaaccaggtgtctgtagctgagaccagggacttacaggctctataaaggataatatagggtaaccgagaataaagtctggggcttctccaagaagccgatatgggtagtagacagaacccttggaagccagactgagctgggttcaactctccaaggctggggctgcttcccaaagctgttattatgaagtggaatggaccttagaagccaggcagccgtgggttcagatctcagattggctacttgtcagctggtgcctaacctttgaacccttagtcttgtgtgcaaaatagagactctgccgccgccccaaaacagatgaaaattagatggaacctgtgtgcaagtacctgagctaatttaaaagttaacatatagtaagtgcttaaattaggatccatgccaggcatggtggctcatgcctgtaatcccagcactttgggaggctgaagtgggaagatcgcttgagcccaggagtttgagaccagccttggcaacacagtgagacctcatctctatttaaaaaaaaaaaaaaaaaaggccaggcacggtggctcaaacgcccataatcccagcatattgggaggcc

SEQ ID NO: 94216 - DNA, 376 bp, Homo sapiens
cctgggaggctgaggttgcagtgagccgagatcaggccactgaactccagcctgggtgacagaacaagactccatctcaaaaaaaaaaaaaaagttaaaaataaaaagaaataagtgaaattaatttcagtaatatcgactttatttatgtaaaatattgttaattcaacatattattgattttaaaatgttaacgcaacattttacgttttttttgtaccaagactttgaaacctggtgtgtatcttaggcttacaacacatttcagttcaaacataaaattttcattggaaatacttgatttgcttttagatttcataaaacttactactttttcatggaaaagtaggttcacatacccacgtttttccaaaca

SEQ ID NO: 94217 - DNA, 552 bp, Homo sapiens
tcatagctgactcttgaggataaacccgcggcgagttcatgcacgaaactgacagtcttcagggctcggccgctgctttctggatgcataaagctcaccaccgcgatgaagagaatgttctcgaacagtgcatttccccaggggcccgtggtcaccctgtgctggatgaggctgctggcccgcacacggcaggggtggttccgcagtgctgggagctgcctgccctcgggggtatctggcccagagtccctgcttctgggtggggctgtgcagagggtttgaggaagcttggagtcctaccagggtgggctccacctggaccccccagaggccctcccttgggcctccagctggcaatatatgagaagttagatagggcgaggtggaggcacgttggggcagggcctgagctgccagggacccgccgtgggagggtctcagggaccctcacctggcagcatgaggaggcgtcagtagatagcaggtcccgtgtgtatggccagagtggccggtctgcctgtgtgaatgcctgcaggacaggagcccgttcac

SEQ ID NO: 94218 - DNA, 572 bp, Homo sapiens
attctgaattctttttttaagtaccatcctattcaaccttttgaaatgaaggatttgccttttagtgggaaatctgcatttcaacacaaagatggaacacaatgtctttggcttagttgcttttcagaaaagcaagattttttttttttggaattatatgctttgcttatgttaaagacacagcttgcagaaaaattttgtttaggcctgacagattggtggctggcatttttatagataaaggggcacgcaaaatgtcatctctacttcctccctttattgagaaaaagcctaggaggagaactcttaaaaggtgaagttagtaacctgttgtttgagtaatcaaggctctaagaggatagcattgatcaaaaaagagttttaaaatgagtgattgatgttattaaagtcactggtgaagtatcaaggaatctaaggaccatgagagagtttcagggaagaaattctatattgtagtgtctataattattgctttcttttgtttttgcagaatacactttttaaagaacatcaggatttggtaaaacagccagtaaaaaagcaatgaagga

SEQ ID NO: 94219 - DNA, 208 bp, Homo sapiens
tgtttgaatggtatatttaaatttaccttggtcattctcacaaaaaaacaactttcttaattgggactaaatagatggcatccaatggataaactgtcctcatgttttcaaaccaggacagctcctaaagtcatagacgtatatttacaaaatgacatttggcaggccattgttattttagttgctttctgaattaattcataggatc

SEQ ID NO: 94220 - DNA, 145 bp, Homo sapiens
ctcccaccttgccatcagggccaccttcttctagtgcattttgaatgaaagggggtcatcttacacccactcctgaggtgaagtggcctgtgctccagcctttcctccatgaccgcctcttcttagtgaccactcacagctcctg

SEQ ID NO: 94221 - DNA, 1195 bp, Homo sapiens
tcccactgccaaaaaatgaaagctgggaatagcctaaatttccaacttagttgaattgttcaatatattagagttcatcaatatgagagaatattatgcatctaataattgtgacgactatgtataaacatggaaaatatttaagatctgatgtttaactagcatatacactattattgtagctatgagaaagaaatactgcatatttagaaattaatatacaaaaatgaaaacaactatgtttggggacagtgattatgtacttttaaattttttttaatcttgttatctttaaacttttctaaaaatgatgtgattacaagcaatggctctttgggatcacctaataaatacctactaaattctagacgggacaacgagctctgccatcctgcaatggctcctgtgacctagttccagggccattctgaatggacagaggtcttcacaatggaggtggagatgcagggagctctatggcatgaaatggttaatgattctcttttgtaattgtgttttctgtttgctgccttagttctaaaaggaggcaaaacaactgtggtttattctaccttttccaggcatagttcttctcctacctttgtgatccccaaattaatatcaaatgtctaattagtttttttctccattggtgatccccaaattaatatcaaatgtcagacaaagtaaatcaaagtacaaataaaggtaaaactgctcttgcaaagggctaaaatagcaatgtttactagaagcattcaagagccagttcaatttcctatttctcattaagtggtaaaatagtaatgccaagaccacatcccagaatctccagggtaacagaggcccaacgaagggctgcagagaaacttgaaagtaaactggcttagttctttacacacagaaattgttctacaaagatctcttgcaaagcagtgtcaccagtagcatcactgccactaagccaatgtcccaggaattgaggaaaggaagacacccttaaagaaaaaaatggaaaaaagccacaaggactggtaccacagtaaatgtctgcctgggtctccctaaactgtcttaggtgagcttacccaggaatgtttctcccctacatgtttgccttcctttgtttaagcctttattcctcctaaatgaaaataaatacccccgactggggaacatggagtttggagtgtgt

SEQ ID NO: 94222 - DNA, 1141 bp, Homo sapiens
tcccactgccaaaaaatgaaagctgggaatagcctaaatttccaacttagttgaattgttcaatatattagagttcatcaatatgagagaatattatgcatctaataattgtgacgactatgtataaacatggaaaatatttaagatctgatgtttaactagcatatacactattattgtagctatgagaaagaaatactgcatatttagaaattaatatacaaaaatgaaaacaactatgtttggggacagtgattatgtacttttaaattttttttaatcttgttatctttaaacttttctaaaaatgatgtgattacaagcaatggctctttgggatcacctaataaatacctactaaattctagacgggacaacgagctctgccatcctgcaatggctcctgtgacctagttccagggccattctgaatggacagaggtcttcacaatggaggtggagatgcagggagctctatggcatgaaatggttaatgattctcttttgtaattgtgttttctgtttgctgccttagttctaaaaggaggcaaaacaactgtggtttattctaccttttccaggcatagttcttctcctacctttgtgatccccaaattaatatcaaatgtctaattagtttttttctccattggtgatccccaaattaatatcaaatgtcagacaaagtaaatcaaagtacaaataaaggtaaaactgctcttgcaaagggctaaaatagcaatgtttactagaagcattcaagagccagttcaatttcctatttctcattaagtggtagaagggctgcagagaaacttgaaagtaaactggcttagttctttacacacagaaattgttctacaaagatctcttgcaaagcagtgtcaccagtagcatcactgccactaagccaatgtcccaggaattgaggaaaggaagacacccttaaagaaaaaaatggaaaaaagccacaaggactggtaccacagtaaatgtctgcctgggtctccctaaactgtcttaggtgagcttacccaggaatgtttctcccctacatgtttgccttcctttgtttaagcctttattcctcctaaatgaaaataaatacccccgactggggaacatggagtttggagtgtgt

SEQ ID NO: 94223 - DNA, 391 bp, Homo sapiens
taaaaaatgctataacaaatatatgaaaatgtagcctaagaaatgttgttttaggcattgactacaaatttttaacttttgagtttagaatccttgtttggactgtgcaaggctatgatgtctgaaattttcccaccaaggtattgtattgtattgtatgccatacaataccttgctgaatgaattcattatcaaattttaacaccttcataaaaggcctaaacatagccttttatgaagactcataagcacagaatgggcaaattcatgttcttgtatttatttggtgaatataagcttgtttttcaaaattatcctattgttattaccttggtcactcattttccagatcactagagtcagattagcatgtttctgaatgcataaatgt

SEQ ID NO: 94224 - DNA, 269 bp, Homo sapiens
ttattctaacctccctttttccttatttgtaacctcctactccaacagagagaaatctgtctcctaccatctgccatccttttatatatttgttcaattttagtataaatttgtagtggctttagaatgatactccatatccattgaaatggcctttaacaactcaagtacggcgctatacattgttactattcctttagtcttatattctccattgtcaaattgattttaaaatttacactgacattcacaggacctagaacagaaat

SEQ ID NO: 94225 - DNA, 343 bp, Homo sapiens
atgaagaaattaagatggaaataaaaaaaatttcttgaaacaaaaaaaaattgaaatacaatataccaaagcctgtgggatacagcaaaagcagtgctaagagggaagtttatagcaataaacacctacatcaaaaaagtagaaagatttcaaataaacaatctaataatgcacctgaaggaattggaaaaccaagcccaaaattagtagaagaaaagaagtaataaaaatcagaccagaactaaacgaaatagaaactaaaaaaacaatacaaagggtcagcaaaaaaacagattcttcaaaaaaataaaccaaattgataaaccagtagctagactaacca

SEQ ID NO: 94226 - DNA, 419 bp, Homo sapiens
aggagcctaacagctttctaaaaatctacccttgaagtttgttcctaaggtggggagaagacaatatatttgtgtttattgtaacagatttttagtggaaaagaatagggtcctagagagaatgagggggacctaatttagatggtggtgggagtgtcagaagaaacctcactggggaagtaacattagtgaaacttaaaggaggaagtaggacatagcctggcagagactgaggactagcttctaggactgggtagctaggcgaacacaacattttaggcaaaggcactaactgaggaagaatgggtctcagtgggtttggggatccgatggaaggcccctgtaactggaaaaataggaagcaagtaggtagaataggtaatgctacagtgttggagaggccagggaactgctcatga

SEQ ID NO: 94227 - DNA, 651 bp, Homo sapiens
cactactcttcacaaagaaagaacagacttttaagtgtagtccagatggtgatggatgaacatgatatttctttgtcctttcccaagacagggtaattgtgcatcatgcatggcagtccgtggtcatttttaatatttaagtgatgtctgagttggagattaaaatttataaagagcagtgagatcccagagaaaaggatgggaggccactttcctttcaaatgttataaaagcagatgggcctcccattccagacttatgcattaaaacatttaagattctttgtgatattggaagcctacagaaagaacacacgttctctctctctctctcgctctcacacacacacacacacacactcacacacacattttgcattaattgatcatgaaggtaatttcagagggcaaaattaatttttgtttttaaaaacctataatgtaaccttaggacctagcatgttgactaaacaaataatgatggagaaacacagtaacaatcttaaatggagggaaataatgataactaccatgataatcattaccttgaaatattctcagacactttacaaacatgatctaattattcctgtgtacatctctcacgggaaaggtgttatttccatcttgaagacaaatataatgtctactc

SEQ ID NO: 94228 - DNA, 834 bp, Homo sapiens
gttacaagtacatagcagatgttcagtaaatacttgtttaataaatagatttgaatgcacgatttttaaaggatacaaaggtaactgccaagaagtcaatattttgtcttgttctgcccccaaacctgattaccttttttttttcatatttgtttacatcatgtattctaaatttttgaacatggcttttaggaaaatgtactgaatagctcttattctgacaagattggctataaagtagtctacctaatcagcacttctgtggctaaacttgtggtataaaaaccaaccaaccaacaaaactgctatccaagtcagcttgttttaaaccagtgtgcacatggtgtatcatacataactggggagatatgtggtacttggttatttcaaatctggccagtgctctgggagaaagctgctataaagacaactaaagtttctagtgtttgtcagcctggaagtcctggtgattgcccttggggcaatgtggggacaacaatcatggaattctaagtcagacttaaaatcagatccctgatctgcccctcattatttgagatcttgaagaaattattctttctaatggttaattttatgttgcaatttgacagggctacaaggtgcccagatatttgttcagacattcttctgggtgtttctgtgagtggttttggatgagattaacatttaaatcagtagacaaagtaaagcagattaccgtccctaacatgggtgggcctcattcaatcctttaaaggcttcaataaagcaaaaatgttgtccttctccaggaagagagaattcttcctgcttgactactttgaactgaaataa

SEQ ID NO: 94229 - DNA, 674 bp, Homo sapiens
aagcatcatttgggggcatgtaggtggaggagcgaataagagaagaaggagggatggctggagaggaggccgaggccctggacagttggggtggagcagctcctacttcgctggccaggcgtcgctgttcagccagtacatctcatcagctccgtgcaggctgcactcaggaagacacctttgagcagttccttctgaacggtggtcctcgggctgaaggctggcctgcacctctgtgcccagaatcagttgctctctggtgctcttttctcaggtgtcttatggagcatagcccaggcccatgcagggttaggtttctcccagccttactccctgcctttccacaccgcgtctgtgtcgggggcgatgtgctccagctcctgcgcctgctccctctggcgtccgcggcctctccccttgggtggctggagatccagatgaatgagctgctcctcacccagacgttcgagggcttttgtgcaagcaccaccattcagcttgctgatctttaatactgagccgccagttgctttcccgccccctggcaagctgagccctgagacagagaaggatgagtaatgaggagtaatatcttccttttgatttgtggatggccctgtcactcaggcaacaaaggctggcattgttgctgtagataacagactctccctcat

SEQ ID NO: 94230 - DNA, 414 bp, Homo sapiens
attgaatcacttacctgcttacttcccttttttggcccctcattgccctcagaatagcatccaactcctctaacttgatccagccttaaatgacttctccatccttaattctggcccactctctctcatctattctaagcttcaaccaaactgaactacttagagttgctgaacatgaatacatttcattttcggttgcttctaacttctggcaaagagagaatacttgtttggaataatattccctattccacactccctgacccctgcttgtttttcaggtatgagctagaatgtcacctctggtaaacctttcatgggatacgcagtattaggccagtaaaaccacgtttacttaccccatttgatcactttagtacacagtactgtgttattgtcactgtcaccaatgtc

SEQ ID NO: 94231 - DNA, 405 bp, Homo sapiens
cgaactagtcacttctaaaggcttcatgttttccctccaaaaagcctctgatcccccttttcccatggcacttccagtggtgaagtgtttgggttttgaggactgttgtcctcatacattttcaggagcagccaggtgttgaaatacgtgggtcctaactttgctcatgaatggtgtgtagcacagaggtggtcagaaacacggggaaagtgaggaagttggataataccaagtgtcttaagacagttgatatctggggctatctagagctcagcctttttaggggacacttgatttcctggagggtgataaggaccctggtgatggggaataatggtccggctgttgaagtcattgatgtcaggggagcctggaatttggtgttgacacctgatttcactttcc

SEQ ID NO: 94232 - DNA, 783 bp, Homo sapiens
gtttcccttaacttagcttgttttacagtttttcttaatagtttatcataacacatttgttgtattagaatagttggatatttgtgttctgggattagggatttgatcacattcagggtgtttagggagcctgaaggttttattaaatgttcattgtgatgtgtcttaattatctgattatgattatgattcatcttacatcctttaataacctgtgtggaaggcctactctgagtctgtggcccttgtcctccgcctggcagaagctcagggtttagggctcacccctggaggccactgttgggatgaatcctggcccctccactctggccgagtgaccttggcccttcacctctttaagccttgcttccctcctcagtgagatggggatcccagtggtatcttggcccagtttagctgttaggattcagtgaggcaacccaggaggcgtgtgcagcacaaggcttggagtgagtgcccagtcgttggctgtaatgacagtggcactgcagtgtgactcttcttagggttgtggccagagtggagggcatttattgacatagggcttccgagcttcagtttttagtgtgtggcattgtagagagaacattggactagaagtctgtggatctggtttctagctttggctctgccataaacagtaaaaattatttcctaatggttgctttcacgtcaggcagtttgaaagaggtgggagacctcaagccagtggaccttctctggtgttctttttattcaccaggaatgttagagggttggaat

SEQ ID NO: 94233 - DNA, 709 bp, Homo sapiens
agcggaactgcccctggcgtcaccacgcgggccccatcaatcgccccgtcgggccgggaggagccgcaccccaggactggggcaggggccagctccgagggccgcagaagcggtcctgcaggcgcagcggcggggctaggcggcccgagtgtcaggggtggtgggtcccggagataactcggacgccaccacccggcggcctggcccaagcgtggggccgctgccctcccggctctgatctcctcccccgggcccgagggttccaggccccggccccgccctcgagctccgaatcccgggggcgtgcggggtggcgggtggcgcgtgtgggctccgcggatcctttcgagcgtggatccaacagtccgtctctttggtgttacgcggcccgtggttgtccctgcggctgaggatgtgtgtgtgtgggcccgagtgtcccgtgcgccctgtgcgccttctgagtccagttaggcgcccgcacctgttcccccagctctgtgccaggctgcgcgggggaatggctggggagataagacgcttacgtgcacatataacttaataatcacatcatgactgttttgttttttgagacagggtcttgctctgttgccctggctggagtgcagtggcacaatcaaggctcaccgcagcctccagcttctaggcttaagtgatcctcctgcctcagcctcccaaaactctgggaata

SEQ ID NO: 94234 - DNA, 398 bp, Homo sapiens
agtagtgtgtgtataaaaggagccaggcaaacatatttgttacatctaaactttagtaaaataaaagaattttgacaagcttttaggattcattttggcctatattatatcagtatatttatttgctttctgagagaaactttgcttgttttcaaatgtgagggagatcagaggaagcctccccaaaatatgtcactttggcataatgattactttgagctgaaggcaactgaggaacagaagatgcagaaaaagttctaaaagcagagtataaatttctatttttgtaaaaggcaatttctatttataaaggtatcctcctctctggtaccagaaagaggataccaactctggagacaactctcatcacctgagatgacttaaatctgagtaagtct

SEQ ID NO: 94235 - DNA, 558 bp, Homo sapiens
gttggtttgcaattctattataaatactgcatgtgtatctgggtggtttgcaattttaaatcacgagcttgaaccaagatctgaaggatgtgaaagaaaaccaggtgtatgctgggggtggaggatgatggaggaagattctatgtacaatgaacagcatgtacaaaagccttgagatttaggaagaactattcagagaaaagaaagctgaactgaggtaaagaagtgacaggaagaaacaaagatggtgaaggaaccagaactaattcatgaggaagtaggacaagtggaatgtgacgttttaagaaagaagtggggaggttaatagctcaaatgcttcaataaatataagatgaggaatgagaaaaagatattggatttgaaatacagatcactcatgactttcaaagacaaacttcctaagttgctaaaggcttacacagagaattacagaacaagtcatttgtgaagaaaggtgaatagtacatttggaacacttttccaaagacagtaacaataaaaaagaaaaagagagaacacaatgacttgatgggttgc

SEQ ID NO: 94236 - DNA, 283 bp, Homo sapiens
ggcttagcacagttgagggcatacagtaagtgctggataaatgctggcctccactaacttcggtggactagaagaatgaggaagtaaggagacgactcctcctgtctctcagaaatcagagggttgggtaggtagtcatatatttgtgggtagaaatacgcttgaaaaagcacacaggattataggtaatttcattttctactttgtatgctttggtactttcacagtgttctatagtggacttaggcagtttttttataccactgtgtgccaatagggacat

SEQ ID NO: 94237 - DNA, 325 bp, Homo sapiens
ggtaagctgcatggtattttcattacaaaatttcccaacaagaggtagttccccaggtccacaggcaaaatcggctctgcctattccctttcttcacctaagagcttttcacctatggacaaacttcttctaaactcctaaaaacataataaattagccaagaaaatgaaacttattaagcctagtgtttgtgagaaattcagagagacatcataaattgatcaaacattttttttttttttttttttgagacagagtcttgctctgtcacccagggtgaaatgtaatcacatgatctcggctcactgcagcctctgtttcctgg

SEQ ID NO: 94238 - DNA, 371 bp, Homo sapiens
tttgagacgagtcttgattgatctgtcacccaggctggagtgcagtggcactatctcggctcactgcaacctccgcctcccgggttcaagtgattctcctgcctcagcctcccgagtagctgggactacaggtgcccaccaccacgcctggctaactttttgtatttttactagagacagggtttcaccacattgctcctgaccttgtgatccgcccgcgtcggcctcccaaagtactgggattacaggcatgagccaccgtgcccggccgaccttctttatgagaaagcatctgctttgtgaatgacagagctattggtgagctgtattgcttccttatgaagacagcattcttgtgtgtcatgttagtc

SEQ ID NO: 94239 - DNA, 404 bp, Homo sapiens
attccatttaaactatgtgtagactataaattcagcattccagaacatgaaaataatttcttaagtttgtgcatattattaaaggctttggagattattgaatatacttgtgcaaaaatctttatttttctaagtataatgtattgaaaagcacacataggctttggagatacagaagtggatttgaatctcagctcttacactgactagtctgtgccctgggacaatttacatcattgtcatgagctgtatttttagtctataaaaatagaattgattattacattactgtgaggattaaatgagataatatgtaaaatgtctaacataccacctgctacctctgaaaggtctgtgcaagtgttggtctttttctctccctttctcctttttattacttttat

SEQ ID NO: 94240 - DNA, 413 bp, Homo sapiens
tatattttacataattcccacccatataactcagtccatacagttcacagttttcattccctcatagcaatgcaaaaaattttgatgagttactactactaaaactagttaagtaaaagatgattcttaagaatttccaggctgggcacggtggctcacgcctgtaatcccagcactttgggaggctgaggcaggcagctcacgaggtcaggagatcgagaccatcctgctcggtgaaaccccatctctattaaaaatacaaaaaattagccgggcctggtggcgggtgcctgtagtcccatctactcaggaggctgaggcaggagaatggcgtgaacccgggaggcggagcttgcagtaagctgagattgtgccactgcactccagcctgggcgacagagggagactccatc

SEQ ID NO: 94241 - DNA, 231 bp, Homo sapiens
ctgaggcccggtggggagtgaggtgtgcaattttatgcactaagaaaaccacagcggtgactcatgtctaatatgtgccctgcatgttgtcaagaaaggctgtggaaaagtcaggaaacaggacttggctctggttatcgcgtgtatttccccatttttcatagtaacttggaaaatgttgctacccaacattggaaaatgttactgcgcagtgttcacaggtgtcgggat

SEQ ID NO: 94242 - DNA, 203 bp, Homo sapiens
cttgcaattcatcaagggttgagctgcacattggggcttttagatgtgctgctgaggaagtgatttcctgcatttaatcatcttctgatgaatgctagagaaactgatctagagtggctcctcttggttagaactagctgaagcatactgtatatacttacttcttttaaaaatttcatataaaggaatagaaaataatactg

SEQ ID NO: 94243 - DNA, 146 bp, Homo sapiens
tcattatagccatgggtgccacttttctgtggtagaagccaggctggcctctccacacctgggaatgagtcctgtgtttcttaggagaatcctgttgataagtatcttgcaggagcacatcctgtgagtcacttctaccttctgca

SEQ ID NO: 94244 - DNA, 312 bp, Homo sapiens
gaaatattaagcatttagccaaagtcgcacagcaaaaaggtggcaaagtcaagatttgaatgcaggctgtctgacgtcagagtctgaattgtcgagatgctacgtttcctctttatgaaagacagaatttttaatatctcgtgaatttaaatattaatcctgactcattacataaaaataaaactaggctgggcacagtggttcacgcctataatcccagcactttgggaggctgaggcaggcggatcacctgaggtcacgagttcaagaccagcctggccaacatgacaaaactccgtctctactaaaaat

SEQ ID NO: 94245 - DNA, 229 bp, Homo sapiens
acattaggtgggctcgaggtgagaatatttttctactaggtgtgcacctgattaaaagtcttggggaaaagtgcaaaaaaaaaaactgcacacactcacttcctgcagggttggagggatggaattgggtgtggaaagcactttgccagcaagatgccccatctgtgcctgcagggaggtcgggggagcaggctggggaagccttcccttctcgtgaacctggaacact

SEQ ID NO: 94246 - DNA, 319 bp, Homo sapiens
cccaaagtgctgggattacaggcctgagccaccatgcccggccccaattcctgtttctatcaagagtaacaaagatcctcattaaaggcctctaagagattcatgaaggcgcggctgggtattatttaattggtattttacttgttaggaattgtttgtttgtttgttttcgagatggagtctcgctctgtcgcccaggctggagtacagtggcatgatctctgcttactgcaagctccgcctcccatgttcaagtggattctcctgcttcagcctcctgcatagctgtgattacaggtgcataccaccatacctggct

SEQ ID NO: 94247 - DNA, 529 bp, Homo sapiens
gtggtgggaaggaagcatatcattacatgtacagaagcctcccgttttcttgtcttctctcttcatggtggtttggtttgggagaaggccgctgggttattagtgcttctctcccttctctgggccatctcatctgttctgtggcttcacttgccagccacacacaatgacatctaactccatcaccaggctggctccctccctcgacatccagacccatgtatcaaagggcccagctggacagctgcccttggagactcacaggcctctcagactgaagcagtccagaactgaaatcctcacccccaccaccaacctgcttctcgtggtgggatgccttagccagccacctacccagatccctgggtgtcatccgtcgcttctgcctgtccctcacaccctctgacagatctattgatttcccctcttcacagcctctcagctcttccctctccatcttgactggtactgcctctccccgggcctccattattgctcagggcaatgccgcagcctccccactggtttc

SEQ ID NO: 94248 - DNA, 165 bp, Homo sapiens
tggttctgctgcttctctctgcctctcagctcaaagctgagtcttcaccacagcagacgactggggacagccctaaaacacagaggttttgctcatgatacgccactgaagatttacatatggagagagagctgatgaacagctgttctcgtctcctcgcctggc

SEQ ID NO: 94249 - DNA, 344 bp, Homo sapiens
tgcagcctccgcctcccaggttcaagcgattctgatgctcctgcctcagcctcctgaacagctgggattataggtgcacgccaccatgccagtgtaatttttttttttttagcagagacgggatttcaccatgttggccaggctggtctcaaactcctgaccccaaatgatccacctgccttggcctcccaaagtgctgggattacaggtgtgagtcaccgtgcccagccagcttattcctttttattgctgggtagcatttcattttatgattataccacagttaatttacccattactagtcgatgggcatttgagttattgccagcttttggctattatga

SEQ ID NO: 94250 - DNA, 310 bp, Homo sapiens
ggcttacaggacagaaaggtcccttctcacagtttgggaggtccgaagtctgaagtgaagctgtcagcagggccacaccccctctggatgctccaggggagggtcctttgcctcttccagttctggtggctccaggcattccttgctttatggtggcatcattcatctctgctccgtcttcacgtggccttctctgtgttgtcaaatctccttctctgttctcttgtaaaaacactcgtcattggatttagggcccaccccaatctagatggtctcatcttgagccttactttagttacctctgcaaaga

SEQ ID NO: 94251 - DNA, 263 bp, Homo sapiens
ctgtaggggtcaagagaaacttcccattgccttctgaaggtttgctgaaaaagaaactcacaaaaggcagattaatgggagacaaaggcatacaaattttattaacacgtacatggggagaaccacagagtgattatctaccctgcaacgggattcagaagcttatacaccatgctggcaaaacaggttagggggtcaggggagaggaattctgttgagggacagtaaaggatagggagaatgaatgggttcgggaacagaga

SEQ ID NO: 94252 - DNA, 515 bp, Homo sapiens
tcgatctacaggattatcccggtctgtgtatcattcattgttttgttctccctccttcatttatccttgcatttatttatatactgaacaccagctctgtgccaagaattgtgctgggggagtgggtgatataaagaggggacttacagtgtatccaggaatctggacagtaactaccaggcatgaggggagagaaagagaagatctctgaatactgcaaactcagaggacgggggtgtgtgaccagctggagagctcagggaagcctttcaggaggcagtgatgcagaacctgattctgaaagaatgagtagaggtcaatcaagtgaaagagaacagggttctaggcagagagaaaaaggcatgcaacgacgcagaggcctgacagcaagcattcagtgtgactcgggaggtgggcactttggagacagattagggcatgaggctgctcagctgtcatgagccagattgcaaggaactgaattctgacatccttgtagctcctgcaggaccaaa

SEQ ID NO: 94253 - DNA, 821 bp, Homo sapiens
agttctcagtgtgtttgtgctccttcagccttgatcacaggggcagcgaccctgattcaggggctggaggcctgtatgtgtagaagggatattctaactcagttattggggaagaaatgaaagtattttctaggcagtcaaaactgtgatcatttatcagggaagaggtggaatgatgcttgcttgcattctgtgtaccttcttattctattctattagggaaattttggggaatggagtaaagggtcagaagtctgtttagaaaaactaatttggggctaaccttctgatgcgtgggaaggcaatgttctgtgtttatttggtgggctctgtgtatcattcattgttttgttctccctccttcatttatccttgcatttatttatatactgaacaccagctctgtgccaagaattgtgctgggggagtgggtgatataaagaggggacttacagtgtatccaggaatctggacagtaactaccaggcatgaggggagagaaagagaagatctctgaatactgcaaactcagaggacgggggtgtgtgaccagctggagagctcagggaagcctttcaggaggcagtgatgcagaacctgattctgaaagaatgagtagaggtcaatcaagtgaaagagaacagggttctaggcagagagaaaaaggcatgcaacgacgcagaggcctgacagcaagcattcagtgtgactcgggaggtgggcactttggagacagattagggcatgaggctgctcagctgtcatgagccagattgcaaggaactgaattctgacatccttgtagctcctgcaggaccaaa

SEQ ID NO: 94254 - DNA, 556 bp, Homo sapiens
gctgacatcagcagatcagctattctggaaagatttttaaacactcagaggtttttttgtgtttgtttgttttcttttcttttcttttttagaggcagggtcttgctctgtcgcccaggctaaggtggagtggtgcaatcatagctcactacagcctcaaactcctgggctcaaacaatcctcacacctttcataccttaggcccctgagtagctgggtgggactacaggcatgcatcaccatgcttggctaatttttaattttgtataggtggggtcttgccatttgcccaggctggtgtcaaactcctcaagtaatccttctgcctcggcctcctaaagtgccagggattataggcctgagccactacacacagcccggagtttttaaaaaatactcaattaaaatgcttcatttaagtgtatgtctctaagaaaatttaataattgattaaatattgttgaatagactgaaagcacaacatccaagcacatgaattaagcaaataatgcaagcatagctcccacactccacaaatgttttctagtcattccaa

SEQ ID NO: 94255 - DNA, 154 bp, Homo sapiens
acaccacaggacaaagaaaacctgctgacaccttggtcttggactgtaccctccaggactgtaagaagatacatttgtgttatttatctttcacccagcctgtggtactttgttatggcagccccagaattctgacgtcttacaaagcttatac

SEQ ID NO: 94256 - DNA, 401 bp, Homo sapiens
tcccaggcctgcaagccctgaggcctgcatccaagtcatcctcttccaatttcctttttgaatcaccccataccctctcagggcctcagtttccccacctgaaaagtgaggggcaggtggccataaatgactcacaaggagccttcctgtgtttagattctcagaggtagacaccatgtcactagaaaagggctctgggtttcaaaagaagggacttggatagaacctgagggagagctggggagatgggagctctgtcagctcaggggatgtctctgatgggagacattccggagacagagagaaatgtctcctcctgtctccagcctgcctgaaagcggatgccaacggaaataatttaattgttaactgagacctgtgggtctgagaagcgagggcag

SEQ ID NO: 94257 - DNA, 467 bp, Homo sapiens
ttcttcttttttgagatggaggccgctctgttgtcgccaggctggagtgcagtggcgcaatcttggctcactgcaacctctgcctactgggttcaagtgattcccctgcctcagccttccgagtagctgggactacaggcacacgccacaatgccagctaatttttgtatttttagtagagacggagtttcaccatgttggccaggatggtctcgatatcttgacctcatgatccgcccgccttggcctcccaaagtgctgggattacaggtgtgagccgccgcacccggccatcacttgattttctaaagaaatctcttgctaaaaagattactgcctcttacaaaactccacttcacataaacttgcacgtttaattgaaaaatgtgtgacaacatctatcagtcttaagacaatcactcccctgcaatgtaaaaggaaaaacaaacgttcttgctcctgtcaaa

SEQ ID NO: 94258 - DNA, 672 bp, Homo sapiens
tttaattaacacaatgtttggcaaaagttggcatcctaggaagtctgttcaacaattcatttgccattttttcccccgctcttcactagtattcttcatattccatacaagtttatagtttgtatagtaagttttagaaattgtactcaggaggctgaggcagggaggatcacttgataccaggagttcaagaccagcctgggcaacacagcaagaccccatttctaaaaatgaaaaaacaacccaggcatagcagtgcacacctgtaggatcagctgctcaggaggctgaggtaggaggatcagtgagcccagaaatttaaggatgcagtgatctgtggtcgtgccactgtactccagtctgggtgacaaagggagaccttgtctcttaaaaaaaagtaacatatacggccgggcgcgatggcccacgcctgtaatcccaacactttgggaggccgaggcaggcagatcatgaggtcaggagatcaagaccatcttagccaacatggtgaaaccctgtctcagctaaaatacaaaaaattagttgggcatggtagcatgtgcctgtaatcccagctacttgggaggctgaggcaggggaatcgcttgaacctggcaggcagaggttgcggtgagctgagatcatgccacggcactccagcctagtgacaga

SEQ ID NO: 94259 - DNA, 340 bp, Homo sapiens
ggaaggtgggttaggaatgtttattttttaaatgtagtgttttctaagctatttacaaatgttaactatttaagcgtttttttttaatttaatttgatgaggtagaaattattgttgtagacgagtaaatagaaacacagaaagagtaagtaaattgcccaaagtcactcacacatatttgagtagaagtgtcaggatttgaactcaggcagtctggcttcagagtctctgctcttccatgctgtaaatacactatattgtataggtttttttaaatatgtatttattaataaggacatagagtagtgaattaaaggcatcacttggaatctcctaaatc

SEQ ID NO: 94260 - DNA, 284 bp, Homo sapiens
tacctctctggctcctgggtagggggatgagggatgagtgaagtgtctgaattttagagaacagtagattaaggggaaatgtagatattcaggaagtaaatggtattctaagaattttgctcaacgtacatggggatgagactggaaaggtggctgggtccagatgaaagattctaaacactacattaagcagtttccaccttaatatataggcagtgggaagtcatgctgcagctgtgttttatttacattcagcctggttctacaatggatctgaaataact

SEQ ID NO: 94261 - DNA, 747 bp, Homo sapiens
gttgcttccagtttggggatgctatgaagaggctctgtgcagctctcccattcgatgctgttgtgcctgtgcgtgcatttctgtgaagtgtgtccctggatgggaaattattgggtcacaggcagggacactgtcgtggacattaccaacgatgtacactcccgggagtactgtcactgagctccgggtggcccacgtcctccccgagtagtggctccacatggcggtgattcctccctcgtacaccttgactaacgtgtgtcccagctcccgatccctgtgcgcagtcttcttctctggacggtcccgcttccagtgtagggccccagtgctgtcatgcttcctatcagccaaaagctttgtggtcagggacagtggcttcaggcatggctctaggtgggcggccacacatgaaggtgggagttggtgagatggggcgctgctgggacggcggcacaaggagagcacatgacgggggcggtgacgtgcccggagccagcctcccagcactgggctctcaggtcagtgcacccctccgctgtggccagcccctccccaccctgtggctgtcgcgtgggtgaatcagccccacagagagggcccgggagtctttctgcccactgtctctgctggggtctttgggactcactccatgagctctccaagcctcacctccccaggcatcttgggtaactctgggcaggccaagtcctctctgggctcaggagtccttcatctgctctcctg

SEQ ID NO: 94262 - DNA, 555 bp, Homo sapiens
aagcaaggtgaacccattgggctgttacaccagcactttggaaggctgagacaggcagatggcttgagctcaggcgttcaagaccagcctaggcaacatggcaaaacccagtctctattaaaaatacaacaaaaaagtagccaggcttggtagtttgtgccagtggtcccaactactcaggaggctgtggtgggaggatcgcttgaacttgggaagtggaagttgcagtgaactgcactccagcctaggtgacagagcaacaccctatcacaaatgaaaaaagaaaaaaaagtaaatataaccccaggttctggagggccatggggaagtgcttgaatggtgtgagggactccttttgcaaagcacaacagggaaagtctctgagaaaataacatctgagctctaaatgatgagagaggaccacggtgtgacaacctcagggagcaaattcctagaagagggatgagcctctgcaaaggctctaagggaagaagaagcacagcatgtgagagagacagaaaaaccgtcaccgaggccagatcacagtgggtgagg

SEQ ID NO: 94263 - DNA, 918 bp, Homo sapiens
cctgtgacaaaaatcaatgtgctaatctcaaaccaaacaacagtatcaaaagcacaaaacagagataacctaagataaaatgtcctcaaactaactcagactagcttgacaggttaagaaggggggttaaagtaggggtgttgctggttctttccgttttaacccaggaagactggaacacccaagtatccaaataaatgaatgccatgagaaaaagatcacaatgtggagcttggtgtgggaaagaaaagacaaccgagagcaagatatcccaaattcaaagaaactatttcagtgttgctttatttaataaggtgctaaagttcagagatacaaatttctgcttcgtatatgctgcctaataaagcacaaacggggaaaaaaaactaaccaacataatgagactggcttttaacaccatcacaactggaaagcttgctctatttgtcttgtcagctttaataaaaggcatctctcctctggcaggatggcttctttttctcttttcctaatagtggtaagtggcatgtcaaagaagaaatcgcttcccattccaccacccacctccaggagactcttgttttttgaaccaaactttcaggaatatctccactcctgttcagcggttcatttaggacttgggcggctacctgagtaagactatcttggactagcgggatagggggaactccctcctggttctgtaaccggcggactgcttgtggggaaatcttcccatcttcatctgcgctgacattattcaagcagggaatccctctcttgcctgcatgctgaggggaggctggaggcaggcggagagggcccgcaggagatagaaaaaactggaggcgcccaccgataccctctctcctggagcccggggcgcgcaccaactcttaggctaacccctcggcctcc

SEQ ID NO: 94264 - DNA, 353 bp, Homo sapiens
agcgggttggtttaatgatccgtcttctgcagtagtgagggtgttgtgtcatcctaggacagccttttgggagaggagccaagatggccaaataggaacggctctggtctacagctcccagcgtgagcgacacagaagatgggtgatttctgcatttccatctgagactggtgaaaatatatttatggactggtgcttgggaatcactacttagaagataaaaatatgatcttcatttctaatcacttataactgttgaatatctttatttttttctatctagagcttatgtttaaatctgttttaaaagtttcaaataaaactgtagtttcctccacattgaagaaaactcc

SEQ ID NO: 94265 - DNA, 808 bp, Homo sapiens
ggcgcacaacacctgtaatcccagctactcgggaggcttaaagccaggaggcagaggttgccgtgagccgagatcgcgccactgcactacagcctgaccgacaaagcaagactcagtctcaaaaaaaaaaaaaccaaccaaccattcactaagtgcatgtaagcaaatctaccctggttgtcccaaattgggattcaaccactttagaagtcttgttagacattttttcagttgatacataatagttgtatgtacttaccgagcatgtgatattgatatgtgcatacaatatataatgatcacatcagaataactggaatatccatcacctcaaacaatgatcatttctaaaagaacattccaaagctgctcttttagctgttttgaaatatacaataaattattaattgttggaaaacttttgaaagttatctttaagctgcttttttggacaagaggtatataattgcaatacagatggatattaacttccactgtatatttcattaaagctggtaaaatttttttaaaggatctaaaattttgccatgtaaggaacttaagcatctttatgtttaattgcaaaatttttatattcccaatataaaaatttctcttcaagtatttcctgcattgccatttttagcatgtttggctattctgctatgtaacctacctagtgatactcgctggagacagtccgtctacaggcatgtctgataggcacaagttctttattcacacaaaactaacatatagagtagaatttatgggatgatgatgtcgtttgggatagaggtatggaaaa

SEQ ID NO: 94266 - DNA, 1533 bp, Homo sapiens
ggcggctagcggcgaggccccttcctgtaccttcagggatcggccaccatgtcccaccggaagttttccgcccctcggcacggacacctgggcttcctgccccataagaggagccaccggcaccggggcaaggtgaagacgtggccgcgggatgaccccagccagcccgtgcacctcacggccttcctgggctacaaggcgggcatgacccacaccctgcgggaggtgcaccggccggggctcaaaatttccaaacgggaggaggtggaggcggtgacaattgtagaaacgccgcccctagtggtggtgggcgtggtgggctacgtggccacccctcgaggtctccggagcttcaagaccatctttgcagaacacctcagtgatgagtgccggcgccgattctacaaggactggcacaagagcaagaagaaagccttcaccaaggcctgcaagaggtggcgggacacagacgggaaaaagcagctacagaaggacttcgccgccatgaagaagtactgcaaggtcattcgggtcattgtccacactcagatgaaactgctgcccttccggcagaagaaggcccacatcatggagatccagctgaacggtggcacggtggccgagaaggtggcctgggcccaggcccggctggagaagcaggtgcccgtgcacagcgtgttcagccagagtgaggtcattgatgtcattgctgtcaccaagggtcgaggcgtcaaaggggtcacaagccgctggcataccaagaagctgccgcggaagacccataagggcctgcgcaaggtggcctgcattggcgcctggcaccccgcccgcgtgggctgctccattgctcgggccgggcagaagggctatcaccaccgcacggagctcaacaagaagatcttccgcatcggcaggggcccgcacatggaggacgggaagctggtgaagaacaatgcatccaccagctacgacgtgactgccaagtccatcacaccgctgggtggcttcccccactacggggaagtgaacaacgacttcgtcatgctgaagggttgtattgctggtaccaagaagcgggtcattacgctgagaaagtccctcctggtgcatcacagtcgccaagccgtggagaatattgagctcaagttcattgacaccacctccaagttcggccatggccgcttccagacagcccaagagaagagggccttcatgggcccccaaaagaagcatctggagaaggaaacgccggagacctcgggagacttgtaggctgtgtggggtggatgaaccctgaagcgcaccgcactgtctgccccaatgtctaacaaaggccggaggcgactcttcctgcgaggtctcagagcgctgtgtaaccgcccaaggggttcaccttgcctgctgcctagacaaagccgattcattaagacaggggaattgcaatagagaaagagtaattcacacagagctggctgtgcgggagaccggagttttatgttttattattactcaaatcgatctctttgagcattt

SEQ ID NO: 94267 - DNA, 206 bp, Homo sapiens
tccgcatcggcaggggcccgcacatggaggacgggaagctggtgaagaacaatgcatccaccagctacgacgtgactgccaagtccatcacaccgctggtgaggctgggagggggcgactgccaggcccatcacaccgctgatgatggctggagtggggtcaggctggccggggggcctggtatacatgtagggggcatgccccag

SEQ ID NO: 94268 - DNA, 510 bp, Homo sapiens
tcactgcaacctccgcctcctgggttcatgtgattctcctgccttgtcctcctgagtagctgggactacaggcgtgtgccaccatgcctggctaatttttgtggttttagtacaggtggggtttcaccatgtcggccaggctggtctccaactcctgacctcaagtgatcctcctgcctcggcctcccaaagtgctgggattacaggcgtgagccacggtgcccagccacatcgagattgttttatctccaagtacaggctcttatattgctctaccatagagaagattttttttgagatcatagcacacatgctttccattgttcaaacaagacagggaatacagagtttgtttctttcatatgatcaaaaaagaatgactgtgaacgagaagttatgtcaaagatttaggcagccctacctatggagatgagcagttgcttcggaagtgccagggcgcactctggaatgggaacagctttgcagggttggtagaggaagtgtgagaat

SEQ ID NO: 94269 - DNA, 383 bp, Homo sapiens
atagatggcccacagatgggcgtgggaagcaggcagggtgttgatggcactaacatcatccaggggacttttatggcaaagaactttgcttcatccacaggctggaggtgagacacgagttcaatactgcaacgctgaaaactgacagagccagcctcccatctagggtggaactaggccaccttcctagggtgtagcgggacttgggtcaggtctccgagcatgtgcacactgcatgatcctcagtaagctataggtttgaaattgcacctagagagctggtggttgtctagagtgtggctgtctgggtgcttcacatgcaattgagttatcacttcctagagacttttgaaagttaggtaattaaacgtttttgctgggtt

SEQ ID NO: 94270 - DNA, 385 bp, Homo sapiens
tgagaaatgagaatgagcacaaatcaaatcttcccatacatgagttcaatgaccttgggcaagacacttcacctgtccactttgtgagttttcactttccccacttataaatgaaggactgatctaaattagtgcctttgaaccccagctgcctatttgaatcatctaggttgccttttaaaaatattgcttcatcccagctaaaaaaaaaattaaaacaattggactcatgaagataaagagtagaatgatggttactagaggcagagaagggtgtgtgcgctagggagaagtagggatgttaatgggtacaaaaatgcagctagatagaataaataagatctaatgtttgataatacaacggggtgactgtagtcaacaataa

SEQ ID NO: 94271 - DNA, 443 bp, Homo sapiens
cagcccttcctctttctggctgtatgaccttgggcagtaacttaacctccttgggcctcagttttctcatttgtaaaatgagggtgataataatagtgctgaggttattggattgttatacggattcaagatgtaaaaggctgagaataatgaacatcacccagtgagtagtcaaactttttcttctcataatcattattatcaagaaagatttagcttttggttcccccctttcaattggcatttatcacaattttttgtgaagtggattttagtgttatttatattatgactatgtaaatactgtttcctttcaagccaagtcatatattttggttacatttcctttcttgtacaactctttgttcttcctggagttactactcgctttgctttttttcatttgctgtttcctcttaacccatccttaattctcttaattc

SEQ ID NO: 94272 - DNA, 446 bp, Homo sapiens
tggtgggtcctaaatccaatgacaaatatctttataagagaaacacagaggagagacccagagagaaggagaaggccgcatgaagatggagcagagactggagttattcagccaagtcaaggaatgcctggagcaccagaagccggaagaggcaaggaaggatcctcccttagagcatttggaagagtgtggccctgccaacaccttgacttcaaacttctggcctccataactatgaaataaattcttgttgttttaagccaccaagtttgtggtaacttcttacagcaaccctaggaaattaacacacagagtgtcagttacctaaacattgtgagcctcagttaccttatctgaaaatggggctaaaacttagacctaccttttagggctgctttaaggagtaatagaaattatacatgggaattacatggcaccaagttgtt

SEQ ID NO: 94273 - DNA, 592 bp, Homo sapiens
gaagtctcgttcttgtcccccaggctggagtgcaatggcatgatctcagctcactgcaacctctgcctcccgggttcaagcaattctcctgtctcagcctcctgagtagctggattacagagtcttttctaaggcaccaactacttccttcaagcagcagccagagatctttgcttaatggctgagaaacacagaggagagacccagagagaaggagaaggccgcatgaagatggagcagagactggagttattcagccaagtcaaggaatgcctggagcaccagaagccggaagaggcaaggaaggatcctcccttagagcatttggaagagtgtggccctgccaacaccttgacttcaaacttctggcctccataactatgaaataaattcttgttgttttaagccaccaagtttgtggtaacttcttacagcaaccctaggaaattaacacacagagtgtcagttacctaaacattgtgagcctcagttaccttatctgaaaatggggctaaaacttagacctaccttttagggctgctttaaggagtaatagaaattatacatgggaattacatggcaccaagttgtt

SEQ ID NO: 94274 - DNA, 813 bp, Homo sapiens
agaactcctgacttcaggtgatccacccaccttggcctcccaagcgtggggattacaggtatgagccaccacgcccggtcatcaaagataatgtttttaatgatcaggagcactttgagatgtttagaacaatctgaaacctgatttccaagccatctcaaaatatactttggtaatcaagacagggaaatgatggtgttatatcatttgtgggactcaactgattttgttgagtattggttttgctgtgggattccttgttctcttggttgtgttgggcctactgctttttaaaaaagtattttgagacagggtcttactctgttgctcaggctggagtgtagtggcgcagtctcttgtctctgcaacctcaatctcctgggctcaagggatcctcccacctcagcctcccaagtagctgggaccacaggtacccaccatcacacctggctaatttttgtattttttgtagacatgggggtcactgtcttgcccaggcaggtcttgaactcctaagctcaaacaaccgtcctgccttgccctcccaaattgctggaattacaggtgtgagccagtgcgcctggccttcttttttttttttaaccactattttttagaactagatttggcctggaaagagaaaaaagatattcctcgacttgatctatatattttatggttcattcatttgctttagaggtagaaggagcaggaaaaagtacaacaaaacaaaatcttccctttggtgtttaatttgaatgcccacagatgcttttgcatttattagtagtgagttttcataattatcaaata

SEQ ID NO: 94275 - DNA, 292 bp, Homo sapiens
aatgcttagtcttcagtaattgccaaaacaaatattattttacattatgcatttgacagaataaacattatagttgaagaatttttggttgttttatttaatatgctgattacttaatcctataatcctaaatgtcacaaattagttttatgaaaaaacacttttttatctttgctcattttgtattcaaaataattttatatctcaaaaaagtaatattctcatgagttactcatttcaataaatatttattttctaagtattttgcaggatggtatggaaaacctcaacg

SEQ ID NO: 94276 - DNA, 264 bp, Homo sapiens
ctagtttcattctctcctttattgactgctgtttctgctacatgaccaaaagtagttttcattgttcatgtttggtttgttttgcttgtaggtaaagcttattataattaaatacatagagccaaggaagggaaaaattaacagttacataagagaataaggagaaagtaagaatgaaggtcaatatatactccaaacattgatgtttctgtctccttcacatacagatattggcctcgtgttgtagccttaaaccatctgatc

SEQ ID NO: 94277 - DNA, 416 bp, Homo sapiens
ttaatttttatttcttgagatggagtcacgcacttgttgcccaggctgggatgcaatggctcattgcaacctccacctcccaggttcaagcaattctcctgcttcagcctccaaaggagctgggatcacaggcgtgcatcaccacagccggctaatttttgtatttttggtaaagatggggtttcaccatgttggccaggctggtctcaaactcctgacctcaagtgatctgcctgcctcagcctcccaaagtgctgggattactggggtaagccaccatgcctggcctatgatttgttcttgaaacatcttccccacagtttttgtttggaaaactcctattcacccatctatagcgctgcttaaatagggagtcttccctgatttttttccaggcagcttcaaaagttcataca

SEQ ID NO: 94278 - DNA, 393 bp, Homo sapiens
ggctgcagtgagccgaaatcgtgccagtggattccagcctggcgacagagcaagactccatcaaaaaaaaaaaaaagaaagaaaggaaggaaggaaggaaggaagaaggaaagaaatctgttgttagtctgatgggaattctcttgtacgtagcatgacacttttatcttgctcattttagaattctctgtttgtccttttgacaatttgactaaaatgtgccatgtagaggacctttttgtgttgaatattttggaaacttttaagcttcctggaactggatgtccacatctcttccaggacttgcaaagttttcagctattattttattaaataggttatttacaccatctctcatctcttcttctgaaactcacataatatgaaaatttt

SEQ ID NO: 94279 - DNA, 941 bp, Homo sapiens
gaggcattgtatagtagtggcaaagaatttgggttctggcattaattgtacagttcaaatcctagatctgcctcttgctagcataacctgttttcatttctgtaaaataggaatatgaataacaatgattatttcatagagtggctgtgagggttaactgaatttcatgtagttaaccctcaataaatgctagctattatttttctgaaaaatctcaaagttctaatacgtctaagctcatcgtattgttgtcatcatattgttgtagtaattgccctagttataagagatatgaagaaaaaagtatgtattcaaatttacaaagcccatgaaaatcactttcttgtagttcatttctatttgaggataaccccaggatacttctttcagtccagacagtcctgttcgctccaacccaaactcaactctaaatctaaaacttgtttgaaaaaaatttttaaagagctatctacctatcataagctaatcttaaaggctaaagtgggcttcttgatactacttattttggaggctagatcaatatcagtaagttcctttatcaacaggccccatacagattattttttttacttaaaaatacttgaacaattgaaatgactctgtaaaacatttaatttagttttataaaattggtggcagcctgggcatggtggttcacacctgtaatcccagcactttgagaggctgaggcaggtggatcttttgagcccaggagtgtgagaccagcctggacaatataatgtgcccgcatctccataaaaactaaaaaatataatagttgggtgtggtggcacatgtgtgttctcccagctactcagtgggctaaggtgcaggggcggggattgttaaacccaagaggttgaggctgctgtgagccatgatgatgccactgcactccagcctggcaacagagcaagatc

SEQ ID NO: 94280 - DNA, 119 bp, Homo sapiens
gaggcctcgggaagcggcccactggggttatcagaatcttcatctgcccacaccagcttcccaatgggtcctcctctgcctccctccaggagtcccggcccttcagccgcactgcccta

SEQ ID NO: 94281 - DNA, 355 bp, Homo sapiens
cctccacctcccgggttcaagtaattctcctgcctcagcctcctgagtagctgggattacaggcgcccaccaccacgaccagctaatttttgtatttttagtagagacggggtttcaacatgttggtcaggctggtctcgaaaccctgacctcatgatccacttgcctcggcctcccaaagtgctaggattacaggcatgagccaccgcacctggccagaaaagtcaatctcaaaaggtcacatactatatgattccatttatataacattctcaaaatgacaaaattatagacagaaaatacattagtaattgccagggcttagggagataggggtgtatgtgtgtgattctaa

SEQ ID NO: 94282 - DNA, 170 bp, Homo sapiens
gctcaggctgactcttgaggatcccccttcccgaggatgaagcttcaggtagtttttttaagcaaatcgattcttctcccgtaggaggtgaaacagacgagaccactgtgagccagaattaccgtggcagcgtgtcccagccctcaaccccgagccccccgaaacctaca

SEQ ID NO: 94283 - DNA, 137 bp, Homo sapiens
tacacgaatcccagcacaggatgtgactgtgcactgcccagttccccacctccatcctcctggtgtctctgtggatctgctccccacctccatcctcctggtgtgtctggatctgctccccacctccatcctggtgt

SEQ ID NO: 94284 - DNA, 551 bp, Homo sapiens
ggctgctggtgatgtgtggggtgacacagcgagcacaggggtgccggatgccagcggctcgcagtatgagaatgttgagaacttagaatttgttcagaatcaagaagttctgccaagtgagcccctcaatttggacccttcctccccgagtgaccagttcagatatgggccccttcctgggccagctgtgcccaggcatggtgctgtgtgccacaccggagcccctgatgccacactgcatacagtgcaccctgacagcgtgtcatccagctatagcagcagaagccacggaaggctctcaggctcagccaggccccaggagctggttggcacattcattcagcaagaagttggaaaaagccctctctgtccctcggtcagctcgtgtgaatcctgggacctcttccggtcggctctgcccgctgttctggggtcgactgccacgacttttgattcaagaagcttcctccaggcgggagcggctatttttcctaaatgagaattgttacattgcaaattgttgaataaaatattttgcgctccttcaagca

SEQ ID NO: 94285 - DNA, 499 bp, Homo sapiens
ggctgctggtgatgtgtggggtgacacagcgagcacaggggtgccggatgccagcggctcgcagtatgagaatgttgagaacttagaatttgttcagaatcaagaagttctgccaagtgagcccctcaatttggacccttcctccccgagtgaccagttcagatatgggccccttcctgggccagctgtgcccaggcatggtgctgtgtgccacaccggagcccctgatgccacactgcatacagtgcaccctgacagcgtgtcatccagctatagcagcagaagccacggaaggctctcaggctcagccaggccccaggagctggttggcacattcattcagcaagaagttggaaaacccgaggatgaagcttcaggtagtttttttaagcaaatcgattcttctcccgtaggaggtgaaacagacgagaccactgtgagccagaattaccgtggcagcgtgtcccagccctcaaccccgagccccccgaaacctaca

SEQ ID NO: 94286 - DNA, 1006 bp, Homo sapiens
ctaaatctcccgttaaaagaatgacctggccagcatgcagagagcctggggttggtttgtggttttttttttgatttgcctgtttctgcatgagtgtgccgcgtgtgcagtgtgaaactctcttcctctcggagtgtcttcagtgagaccccagggacgttcgggacggaatgatggcctcctcgctctctcatccccagatgcagaagaaccacagcttccagacgggactggcagggaagggcctgcagcagctaggggcctggccaatccagagcctgccccagagcccaaggtgagcgggtacggtgggaaaggggaaaggtacccagtgaggaggcacctccccatcctgccagacagggccttgccttctgcaagtcagtatccaatgtgtacgtagagtgttccgccttaaacgcctcacacttatgtatggtagagacggaaggtagaatgcagggtgccgggcgggacagagctgtttgggaagacggagatctggggatagtggcggtgatggttgctcagcacggtgaatgtgcttaaaacttaaaaatgattaaagtggcaaattttacagtatgtatattttacaatttttaaaattggaaaaagtaaaattaattactctaagttacagagaaattacctaccgataataaaagttaagtatattttcatccaaaaaaaaaaaacaaaaaacaaatgactcccatgtgaagtagaacagctcagaccagtcgggagtggtggatgatgcctgtaatcccagctctttgggaggctgagctgggcgggtcacctgaggtcaggagttcgagaccagcctggccaacatggtgaaaccccatctctactaaaaaaaaaacaaaatttacctgggtgtggtggcgggtgcctgtaatcccagctactcagaaggctgaggcagaagaatcgcttggacccaggaggcagaggttgcagtgagctgagattgcgccattgcactccatcccgggca

SEQ ID NO: 94287 - DNA, 3765 bp, Homo sapiens
tcgctattcacggcaccagtcatgaccaggtttgctaacagcctcccaatcaacgaccctctgcagacagtctaccagctcatgtccggacggatgcctgccgcgtccacgtgctgtggagacgagaaatggggagattggaggccgcacctcgccatggtcttgtccaacttgaacaacaacatggacgtcgagtccaggacgatggctaccatgggcgacactctggcttcaaggggcctcttggatgcggcccacttctgctacctcatggcccaggcgggatttggtgtttacacgaagaaaactacaaagcttgtcttaatcggatccaatcacagtttgccattcttaaagttcgcaaccaacgaagcaatccagaggacggaagcctatgagtacgcccagtccctgggtgccgagacctgccccctgcctagtttccaggtgtttaagttcatctactcctgccgcctggcggaaatggggctggccacgcaagccttccactactgtgaggccatcgcgaagagcatcctgacgcagccgcacctgtattccccggtgttgatcagccagcttgtgcagatggcttcccagttacgactcttcgatccccagctgaaagagaagccagaagaggagtccttggccgcacccacgtggctggttcacctgcagcaggtggagcggcagattaaggagggggctggagtatggcatcaggatggagccctcccgcagcagtgtcctggcactccgagttccgagatggagcagttggacaggccaggactcagtcagccaggagccctggggatcgccaaccctctgctggcggtgcctgcaccgagccctgagcactcgagcccgagcgtgcggctgctgccctcagctccgcagacgctccctgacggcccattggccagtcctgccagagtgccgatgttcccagtgccactgcccccggggcccctggagccgggtcctggctgtgtgaccccagggcctgcacttggcttcctggagccctccgggcctggcctcccacctggtgtgccacctctgcaggaaaggagacacttgctccaggaagccaggagcccagacccagggatagtgccgcaggaggcgcctgttggaaactcactttccgagctaagcgaagaaaattttgatggaaaatttgctaatctgaccccctcgaggacggtgccagactcggaggcccccccagggtgggatcgtgccgactcgggtcccacgcagccacctctgtctctctcacccgctcccgaaacaaagagacccggacaggcagccaagaaagaaacgaaggaacctaagaagggtgaatcctggttctttcgttggctacctggaaagaaaaagacagaagcttatttgccagatgacaagaacaaatcgattgtttgggatgaaaagaaaaaccagtgggtgaatttaaatgagccagaagaggagaagaaagccccgcccccacctccaacctcgatgcccaagactgtgcaagctgccccgcctgccctcccagggcctcctggagcccccgtgaacatgtactctagaagagcagcaggaaccagagctcgctacgttgacgtcctgaacccaagcgggacccagcggagcgagccggctctcgctcctgcggactttgtcgctccactcgcgccactcccaattccttctaacttgttcgtgccaaccccagatgcagaagaaccacagcttccagacgggactggcagggaagggcctgcagcagctaggggcctggccaatccagagcctgccccagagcccaaggttttaagctctgcagcgtcactccctggctctgaactcccctcctccaggcctgagggttcccagggaggagagctttcgcgctgtagttcaatgagttcattatcacgtgaagtgagccagcattttaatcaggctcctggcgacctccctgctgcagggggccctcccagcggggccatgcccttctacaaccctgctcagctggcacaggcctgcgccacctccgggagctcaaggctagggaggattggccagaggaagcacctggtgctgaactaggcttgccctgctgtgaacttgcacttggagccctgacgctgctgttctccccgaagaacccgaccgacctccgcgatctccgtcccgcccccagggagacacagcagtgactcagagctggtcgcacactgtgcctccctcctcaccgcccatcgtaatgaattattttgaaaattaattccaccatcctttcagattctggatggaaagactgaatctttgactcagaattgtttgccgaaaagaatgatgtgactttcttagtcatttaggatgatttaaggatatagtattcctggtcatttaagaatgttcattcattgaagccggagctgtctctgccacaggagagccacatggtcggtagtaaccagggcctctccaagcccagctgtgagtcactgcccagtgagtcccgcgcttcctttaaggtgctgggagcaaagagagggtgactgaggcagaccccaacccctgctctgcaccatctgggccctcgccgtgtttgaacctggctgaatgagtggagggcgctgtgttctcaatcagcgcctccgaggagccgtggggttccttcggcattagttcacggtttttgagagaggccttagttactgcagtgaatttctttcctgttgcaaagacgcttccagcctcactttactttctgtggcctgatgaggaccatgggtgattttgtgtacccaaagcgctggggactgcccaccgtgtggcccagtcactgggaaggagccccagagagccggctgtctgacatgatggctcagggtggtcatccaggttgaaaactgaccgtgtgatgtttgatttgggcttcatttcgtgtgtaggagcacggttagactcactgttaaggaagctggatgcacttctctaaaaggctgcactttccgtgagcacttttcgtggtacaatccacatgacccactttctcccctgggggacgttggttcagaggttggtagcacttggggagagtatcttaacacagtttcttgacagcagctctggaacttagtatttctgccccgagttttgccacactgagactttgagtagctcctggtggactcaaccctgttcaactcagagacgggcctcctctcactgatgcaaagctttaaggcttctctgactgttctgaaactcttcgtattcttgtcaagtctaaagagactgaagaaaagatttaaatactaataaaaatcagtagataatttctgtaggttctgctggaggaatacaaactgtttggtgttttaaatttaagtgtagaaattgtagaatgtggaattagcacagatccttcctggctttctgtttcacttgatcatttagcccagaccacccaggatgttttccaaaatgttccacaggcgtgtcccgctggatccatttgtccttgtcacttggagaaaggccagtccctgtgacggggcagccctctctgtccctcggtcagctcgtgtgaatcctgggacctcttccggtcggctctgcccgctgttctggggtcgactgccacgacttttgattcaagaagcttcctccaggcgggagcggctatttttcctaaatgagaattgttacattgcaaattgttgaataaaatattttgcgctccttcaagca

SEQ ID NO: 94288 - DNA, 3705 bp, Homo sapiens
tcgctattcacggcaccagtcatgaccaggtttgctaacagcctcccaatcaacgaccctctgcagacagtctaccagctcatgtccggacggatgcctgccgcgtccacgtgctgtggagacgagaaatggggagattggaggccgcacctcgccatggtcttgtccaacttgaacaacaacatggacgtcgagtccaggacgatggctaccatgggcgacactctggcttcaaggggcctcttggatgcggcccacttctgctacctcatggcccaggcgggatttggtgtttacacgaagaaaactacaaagcttgtcttaatcggatccaatcacagtttgccattcttaaagttcgcaaccaacgaagcaatccagaggacggaagcctatgagtacgcccagtccctgggtgccgagacctgccccctgcctagtttccaggtgtttaagttcatctactcctgccgcctggcggaaatggggctggccacgcaagccttccactactgtgaggccatcgcgaagagcatcctgacgcagccgcacctgtattccccggtgttgatcagccagcttgtgcagatggcttcccagttacgactcttcgatccccagctgaaagagaagccagaagaggagtccttggccgcacccacgtggctggttcacctgcagcaggtggagcggcagattaaggagggggctggagtatggcatcaggatggagccctcccgcagcagtgtcctggcactccgagttccgagatggagcagttggacaggccaggactcagtcagccaggagccctggggatcgccaaccctctgctggcggtgcctgcaccgagccctgagcactcgagcccgagcgtgcggctgctgccctcagctccgcagacgctccctgacggcccattggccagtcctgccagagtgccgatgttcccagtgccactgcccccggggcccctggagccgggtcctggctgtgtgaccccagggcctgcacttggcttcctggagccctccgggcctggcctcccacctggtgtgccacctctgcaggaaaggagacacttgctccaggaagccaggagcccagacccagggatagtgccgcaggaggcgcctgttggaaactcactttccgagctaagcgaagaaaattttgatggaaaatttgctaatctgaccccctcgaggacggtgccagactcggaggcccccccagggtgggatcgtgccgactcgggtcccacgcagccacctctgtctctctcacccgctcccgaaacaaagagacccggacaggcagccaagaaagaaacgaaggaacctaagaagggtgaatcctggttctttcgttggctacctggaaagaaaaagacagaagcttatttgccagatgacaagaacaaatcgattgtttgggatgaaaagaaaaaccagtgggtgaatttaaatgagccagaagaggagaagaaagccccgcccccacctccaacctcgatgcccaagactgtgcaagctgccccgcctgccctcccagggcctcctggagcccccgtgaacatgtactctagaagagcagcaggaaccagagctcgctacgttgacgtcctgaacccaagcgggacccagcggagcgagccggctctcgctcctgcggactttgtcgctccactcgcgccactcccaattccttctaacttgttcgtgccaaccccagatgcagaagaaccacagcttccagacgggactggcagggaagggcctgcagcagctaggggcctggccaatccagagcctgccccagagcccaaggttttaagctctgcagcgtcactccctggctctgaactcccctcctccaggcctgagggttcccagggaggagaggctcctggcgacctccctgctgcagggggccctcccagcggggccatgcccttctacaaccctgctcagctggcacaggcctgcgccacctccgggagctcaaggctagggaggattggccagaggaagcacctggtgctgaactaggcttgccctgctgtgaacttgcacttggagccctgacgctgctgttctccccgaagaacccgaccgacctccgcgatctccgtcccgcccccagggagacacagcagtgactcagagctggtcgcacactgtgcctccctcctcaccgcccatcgtaatgaattattttgaaaattaattccaccatcctttcagattctggatggaaagactgaatctttgactcagaattgtttgccgaaaagaatgatgtgactttcttagtcatttaggatgatttaaggatatagtattcctggtcatttaagaatgttcattcattgaagccggagctgtctctgccacaggagagccacatggtcggtagtaaccagggcctctccaagcccagctgtgagtcactgcccagtgagtcccgcgcttcctttaaggtgctgggagcaaagagagggtgactgaggcagaccccaacccctgctctgcaccatctgggccctcgccgtgtttgaacctggctgaatgagtggagggcgctgtgttctcaatcagcgcctccgaggagccgtggggttccttcggcattagttcacggtttttgagagaggccttagttactgcagtgaatttctttcctgttgcaaagacgcttccagcctcactttactttctgtggcctgatgaggaccatgggtgattttgtgtacccaaagcgctggggactgcccaccgtgtggcccagtcactgggaaggagccccagagagccggctgtctgacatgatggctcagggtggtcatccaggttgaaaactgaccgtgtgatgtttgatttgggcttcatttcgtgtgtaggagcacggttagactcactgttaaggaagctggatgcacttctctaaaaggctgcactttccgtgagcacttttcgtggtacaatccacatgacccactttctcccctgggggacgttggttcagaggttggtagcacttggggagagtatcttaacacagtttcttgacagcagctctggaacttagtatttctgccccgagttttgccacactgagactttgagtagctcctggtggactcaaccctgttcaactcagagacgggcctcctctcactgatgcaaagctttaaggcttctctgactgttctgaaactcttcgtattcttgtcaagtctaaagagactgaagaaaagatttaaatactaataaaaatcagtagataatttctgtaggttctgctggaggaatacaaactgtttggtgttttaaatttaagtgtagaaattgtagaatgtggaattagcacagatccttcctggctttctgtttcacttgatcatttagcccagaccacccaggatgttttccaaaatgttccacaggcgtgtcccgctggatccatttgtccttgtcacttggagaaaggccagtccctgtgacggggcagccctctctgtccctcggtcagctcgtgtgaatcctgggacctcttccggtcggctctgcccgctgttctggggtcgactgccacgacttttgattcaagaagcttcctccaggcgggagcggctatttttcctaaatgagaattgttacattgcaaattgttgaataaaatattttgcgctccttcaagca

SEQ ID NO: 94289 - DNA, 3630 bp, Homo sapiens
tcgctattcacggcaccagtcatgaccaggtttgctaacagcctcccaatcaacgaccctctgcagacagtctaccagctcatgtccggacggatgcctgccgcgtccacgtgctgtggagacgagaaatggggagattggaggccgcacctcgccatggtcttgtccaacttgaacaacaacatggacgtcgagtccaggacgatggctaccatgggcgacactctggcttcaaggggcctcttggatgcggcccacttctgctacctcatggcccaggcgggatttggtgtttacacgaagaaaactacaaagcttgtcttaatcggatccaatcacagtttgccattcttaaagttcgcaaccaacgaagcaatccagaggacggaagcctatgagtacgcccagtccctgggtgccgagacctgccccctgcctagtttccaggtgtttaagttcatctactcctgccgcctggcggaaatggggctggccacgcaagccttccactactgtgaggccatcgcgaagagcatcctgacgcagccgcacctgtattccccggtgttgatcagccagcttgtgcagatggcttcccagttacgactcttcgatccccagctgaaagagaagccagaagaggagtccttggccgcacccacgtggctggttcacctgcagcaggtggagcggcagattaaggagggggctggagtatggcatcaggatggagccctcccgcagcagtgtcctggcactccgagttccgagatggagcagttggacaggccaggactcagtcagccaggagccctggggatcgccaaccctctgctggcggtgcctgcaccgagccctgagcactcgagcccgagcgtgcggctgctgccctcagctccgcagacgctccctgacggcccattggccagtcctgccagagtgccgatgttcccagtgccactgcccccggggcccctggagccgggtcctggctgtgtgaccccagggcctgcacttggcttcctggagccctccgggcctggcctcccacctggtgtgccacctctgcaggaaaggagacacttgctccaggaagccaggagcccagacccagggatagtgccgcaggaggcgcctgttggaaactcactttccgagctaagcgaagaaaattttgatggaaaatttgctaatctgaccccctcgaggacggtgccagactcggaggcccccccagggtgggatcgtgccgactcgggtcccacgcagccacctctgtctctctcacccgctcccgaaacaaagagacccggacaggcagccaagaaagaaacgaaggaacctaagaagggtgaatcctggttctttcgttggctacctggaaagaaaaagacagaagcttatttgccagatgacaagaacaaatcgattgtttgggatgaaaagaaaaaccagtgggtgaatttaaatgagccagaagaggagaagaaagccccgcccccacctccaacctcgatgcccaagactgtgcaagctgccccgcctgccctcccagggcctcctggagcccccgtgaacatgtactctagaagagcagcaggaaccagagctcgctacgttgacgtcctgaacccaagcgggacccagcggagcgagccggctctcgctcctgcggactttgtcgctccactcgcgccactcccaattccttctaacttgttcgtgccaaccccagatgcagaagaaccacagcttccagacgggactggcagggaagggcctgcagcagctaggggcctggccaatccagagcctgccccagagcccaaggctcctggcgacctccctgctgcagggggccctcccagcggggccatgcccttctacaaccctgctcagctggcacaggcctgcgccacctccgggagctcaaggctagggaggattggccagaggaagcacctggtgctgaactaggcttgccctgctgtgaacttgcacttggagccctgacgctgctgttctccccgaagaacccgaccgacctccgcgatctccgtcccgcccccagggagacacagcagtgactcagagctggtcgcacactgtgcctccctcctcaccgcccatcgtaatgaattattttgaaaattaattccaccatcctttcagattctggatggaaagactgaatctttgactcagaattgtttgccgaaaagaatgatgtgactttcttagtcatttaggatgatttaaggatatagtattcctggtcatttaagaatgttcattcattgaagccggagctgtctctgccacaggagagccacatggtcggtagtaaccagggcctctccaagcccagctgtgagtcactgcccagtgagtcccgcgcttcctttaaggtgctgggagcaaagagagggtgactgaggcagaccccaacccctgctctgcaccatctgggccctcgccgtgtttgaacctggctgaatgagtggagggcgctgtgttctcaatcagcgcctccgaggagccgtggggttccttcggcattagttcacggtttttgagagaggccttagttactgcagtgaatttctttcctgttgcaaagacgcttccagcctcactttactttctgtggcctgatgaggaccatgggtgattttgtgtacccaaagcgctggggactgcccaccgtgtggcccagtcactgggaaggagccccagagagccggctgtctgacatgatggctcagggtggtcatccaggttgaaaactgaccgtgtgatgtttgatttgggcttcatttcgtgtgtaggagcacggttagactcactgttaaggaagctggatgcacttctctaaaaggctgcactttccgtgagcacttttcgtggtacaatccacatgacccactttctcccctgggggacgttggttcagaggttggtagcacttggggagagtatcttaacacagtttcttgacagcagctctggaacttagtatttctgccccgagttttgccacactgagactttgagtagctcctggtggactcaaccctgttcaactcagagacgggcctcctctcactgatgcaaagctttaaggcttctctgactgttctgaaactcttcgtattcttgtcaagtctaaagagactgaagaaaagatttaaatactaataaaaatcagtagataatttctgtaggttctgctggaggaatacaaactgtttggtgttttaaatttaagtgtagaaattgtagaatgtggaattagcacagatccttcctggctttctgtttcacttgatcatttagcccagaccacccaggatgttttccaaaatgttccacaggcgtgtcccgctggatccatttgtccttgtcacttggagaaaggccagtccctgtgacggggcagccctctctgtccctcggtcagctcgtgtgaatcctgggacctcttccggtcggctctgcccgctgttctggggtcgactgccacgacttttgattcaagaagcttcctccaggcgggagcggctatttttcctaaatgagaattgttacattgcaaattgttgaataaaatattttgcgctccttcaagca

SEQ ID NO: 94290 - DNA, 3690 bp, Homo sapiens
tcgctattcacggcaccagtcatgaccaggtttgctaacagcctcccaatcaacgaccctctgcagacagtctaccagctcatgtccggacggatgcctgccgcgtccacgtgctgtggagacgagaaatggggagattggaggccgcacctcgccatggtcttgtccaacttgaacaacaacatggacgtcgagtccaggacgatggctaccatgggcgacactctggcttcaaggggcctcttggatgcggcccacttctgctacctcatggcccaggcgggatttggtgtttacacgaagaaaactacaaagcttgtcttaatcggatccaatcacagtttgccattcttaaagttcgcaaccaacgaagcaatccagaggacggaagcctatgagtacgcccagtccctgggtgccgagacctgccccctgcctagtttccaggtgtttaagttcatctactcctgccgcctggcggaaatggggctggccacgcaagccttccactactgtgaggccatcgcgaagagcatcctgacgcagccgcacctgtattccccggtgttgatcagccagcttgtgcagatggcttcccagttacgactcttcgatccccagctgaaagagaagccagaagaggagtccttggccgcacccacgtggctggttcacctgcagcaggtggagcggcagattaaggagggggctggagtatggcatcaggatggagccctcccgcagcagtgtcctggcactccgagttccgagatggagcagttggacaggccaggactcagtcagccaggagccctggggatcgccaaccctctgctggcggtgcctgcaccgagccctgagcactcgagcccgagcgtgcggctgctgccctcagctccgcagacgctccctgacggcccattggccagtcctgccagagtgccgatgttcccagtgccactgcccccggggcccctggagccgggtcctggctgtgtgaccccagggcctgcacttggcttcctggagccctccgggcctggcctcccacctggtgtgccacctctgcaggaaaggagacacttgctccaggaagccaggagcccagacccagggatagtgccgcaggaggcgcctgttggaaactcactttccgagctaagcgaagaaaattttgatggaaaatttgctaatctgaccccctcgaggacggtgccagactcggaggcccccccagggtgggatcgtgccgactcgggtcccacgcagccacctctgtctctctcacccgctcccgaaacaaagagacccggacaggcagccaagaaagaaacgaaggaacctaagaagggtgaatcctggttctttcgttggctacctggaaagaaaaagacagaagcttatttgccagatgacaagaacaaatcgattgtttgggatgaaaagaaaaaccagtgggtgaatttaaatgagccagaagaggagaagaaagccccgcccccacctccaacctcgatgcccaagactgtgcaagctgccccgcctgccctcccagggcctcctggagcccccgtgaacatgtactctagaagagcagcaggaaccagagctcgctacgttgacgtcctgaacccaagcgggacccagcggagcgagccggctctcgctcctgcggactttgtcgctccactcgcgccactcccaattccttctaacttgttcgtgccaaccccagatgcagaagaaccacagcttccagacgggactggcagggaagggcctgcagcagctaggggcctggccaatccagagcctgccccagagcccaagctttcgcgctgtagttcaatgagttcattatcacgtgaagtgagccagcattttaatcaggctcctggcgacctccctgctgcagggggccctcccagcggggccatgcccttctacaaccctgctcagctggcacaggcctgcgccacctccgggagctcaaggctagggaggattggccagaggaagcacctggtgctgaactaggcttgccctgctgtgaacttgcacttggagccctgacgctgctgttctccccgaagaacccgaccgacctccgcgatctccgtcccgcccccagggagacacagcagtgactcagagctggtcgcacactgtgcctccctcctcaccgcccatcgtaatgaattattttgaaaattaattccaccatcctttcagattctggatggaaagactgaatctttgactcagaattgtttgccgaaaagaatgatgtgactttcttagtcatttaggatgatttaaggatatagtattcctggtcatttaagaatgttcattcattgaagccggagctgtctctgccacaggagagccacatggtcggtagtaaccagggcctctccaagcccagctgtgagtcactgcccagtgagtcccgcgcttcctttaaggtgctgggagcaaagagagggtgactgaggcagaccccaacccctgctctgcaccatctgggccctcgccgtgtttgaacctggctgaatgagtggagggcgctgtgttctcaatcagcgcctccgaggagccgtggggttccttcggcattagttcacggtttttgagagaggccttagttactgcagtgaatttctttcctgttgcaaagacgcttccagcctcactttactttctgtggcctgatgaggaccatgggtgattttgtgtacccaaagcgctggggactgcccaccgtgtggcccagtcactgggaaggagccccagagagccggctgtctgacatgatggctcagggtggtcatccaggttgaaaactgaccgtgtgatgtttgatttgggcttcatttcgtgtgtaggagcacggttagactcactgttaaggaagctggatgcacttctctaaaaggctgcactttccgtgagcacttttcgtggtacaatccacatgacccactttctcccctgggggacgttggttcagaggttggtagcacttggggagagtatcttaacacagtttcttgacagcagctctggaacttagtatttctgccccgagttttgccacactgagactttgagtagctcctggtggactcaaccctgttcaactcagagacgggcctcctctcactgatgcaaagctttaaggcttctctgactgttctgaaactcttcgtattcttgtcaagtctaaagagactgaagaaaagatttaaatactaataaaaatcagtagataatttctgtaggttctgctggaggaatacaaactgtttggtgttttaaatttaagtgtagaaattgtagaatgtggaattagcacagatccttcctggctttctgtttcacttgatcatttagcccagaccacccaggatgttttccaaaatgttccacaggcgtgtcccgctggatccatttgtccttgtcacttggagaaaggccagtccctgtgacggggcagccctctctgtccctcggtcagctcgtgtgaatcctgggacctcttccggtcggctctgcccgctgttctggggtcgactgccacgacttttgattcaagaagcttcctccaggcgggagcggctatttttcctaaatgagaattgttacattgcaaattgttgaataaaatattttgcgctccttcaagca

SEQ ID NO: 94291 - DNA, 3586 bp, Homo sapiens
ttagcggatccttggaggcaggacactggctaccatgggcgatactctggcttcaaggggcctcttggatgcggcccacttctgctacctcatggcccaggcgggatttggtgtttacacgaagaaaactacaaagcttgtcttaatcggatccaatcacagtttgccattcttaaagttcgcaaccaacgaagcaatccagaggacggaagcctatgagtacgcccagtccctgggtgccgagacctgccccctgcctagtttccaggtgtttaagttcatctactcctgccgcctggcggaaatggggctggccacgcaagccttccactactgtgaggccatcgcgaagagcatcctgacgcagccgcacctgtattccccggtgttgatcagccagcttgtgcagatggcttcccagttacgactcttcgatccccagctgaaagagaagccagaagaggagtccttggccgcacccacgtggctggttcacctgcagcaggtggagcggcagattaaggagggggctggagtatggcatcaggatggagccctcccgcagcagtgtcctggcactccgagttccgagatggagcagttggacaggccaggactcagtcagccaggagccctggggatcgccaaccctctgctggcggtgcctgcaccgagccctgagcactcgagcccgagcgtgcggctgctgccctcagctccgcagacgctccctgacggcccattggccagtcctgccagagtgccgatgttcccagtgccactgcccccggggcccctggagccgggtcctggctgtgtgaccccagggcctgcacttggcttcctggagccctccgggcctggcctcccacctggtgtgccacctctgcaggaaaggagacacttgctccaggaagccaggagcccagacccagggatagtgccgcaggaggcgcctgttggaaactcactttccgagctaagcgaagaaaattttgatggaaaatttgctaatctgaccccctcgaggacggtgccagactcggaggcccccccagggtgggatcgtgccgactcgggtcccacgcagccacctctgtctctctcacccgctcccgaaacaaagagacccggacaggcagccaagaaagaaacgaaggaacctaagaagggtgaatcctggttctttcgttggctacctggaaagaaaaagacagaagcttatttgccagatgacaagaacaaatcgattgtttgggatgaaaagaaaaaccagtgggtgaatttaaatgagccagaagaggagaagaaagccccgcccccacctccaacctcgatgcccaagactgtgcaagctgccccgcctgccctcccagggcctcctggagcccccgtgaacatgtactctagaagagcagcaggaaccagagctcgctacgttgacgtcctgaacccaagcgggacccagcggagcgagccggctctcgctcctgcggactttgtcgctccactcgcgccactcccaattccttctaacttgttcgtgccaaccccagatgcagaagaaccacagcttccagacgggactggcagggaagggcctgcagcagctaggggcctggccaatccagagcctgccccagagcccaaggttttaagctctgcagcgtcactccctggctctgaactcccctcctccaggcctgagggttcccagggaggagagctttcgcgctgtagttcaatgagttcattatcacgtgaagtgagccagcattttaatcaggctcctggcgacctccctgctgcagggggccctcccagcggggccatgcccttctacaaccctgctcagctggcacaggcctgcgccacctccgggagctcaaggctagggaggattggccagaggaagcacctggtgctgaactaggcttgccctgctgtgaacttgcacttggagccctgacgctgctgttctccccgaagaacccgaccgacctccgcgatctccgtcccgcccccagggagacacagcagtgactcagagctggtcgcacactgtgcctccctcctcaccgcccatcgtaatgaattattttgaaaattaattccaccatcctttcagattctggatggaaagactgaatctttgactcagaattgtttgccgaaaagaatgatgtgactttcttagtcatttaggatgatttaaggatatagtattcctggtcatttaagaatgttcattcattgaagccggagctgtctctgccacaggagagccacatggtcggtagtaaccagggcctctccaagcccagctgtgagtcactgcccagtgagtcccgcgcttcctttaaggtgctgggagcaaagagagggtgactgaggcagaccccaacccctgctctgcaccatctgggccctcgccgtgtttgaacctggctgaatgagtggagggcgctgtgttctcaatcagcgcctccgaggagccgtggggttccttcggcattagttcacggtttttgagagaggccttagttactgcagtgaatttctttcctgttgcaaagacgcttccagcctcactttactttctgtggcctgatgaggaccatgggtgattttgtgtacccaaagcgctggggactgcccaccgtgtggcccagtcactgggaaggagccccagagagccggctgtctgacatgatggctcagggtggtcatccaggttgaaaactgaccgtgtgatgtttgatttgggcttcatttcgtgtgtaggagcacggttagactcactgttaaggaagctggatgcacttctctaaaaggctgcactttccgtgagcacttttcgtggtacaatccacatgacccactttctcccctgggggacgttggttcagaggttggtagcacttggggagagtatcttaacacagtttcttgacagcagctctggaacttagtatttctgccccgagttttgccacactgagactttgagtagctcctggtggactcaaccctgttcaactcagagacgggcctcctctcactgatgcaaagctttaaggcttctctgactgttctgaaactcttcgtattcttgtcaagtctaaagagactgaagaaaagatttaaatactaataaaaatcagtagataatttctgtaggttctgctggaggaatacaaactgtttggtgttttaaatttaagtgtagaaattgtagaatgtggaattagcacagatccttcctggctttctgtttcacttgatcatttagcccagaccacccaggatgttttccaaaatgttccacaggcgtgtcccgctggatccatttgtccttgtcacttggagaaaggccagtccctgtgacggggcagccctctctgtccctcggtcagctcgtgtgaatcctgggacctcttccggtcggctctgcccgctgttctggggtcgactgccacgacttttgattcaagaagcttcctccaggcgggagcggctatttttcctaaatgagaattgttacattgcaaattgttgaataaaatattttgcgctccttcaagca

SEQ ID NO: 94292 - DNA, 3692 bp, Homo sapiens
tcgctattcacggcaccagtcatgaccaggtttgctaacagcctcccaatcaacgaccctctgcagacagtctaccagctcatgtccggacggatgcctgccgcgtccacgtgctgtggagacgagaaatggggagattggaggccgcacctcgccatggtcttgtccaacttgaacaacaacatggacgtcgagtccaggacgatggctaccatgggcgacactctggcttcaaggggcctcttggatgcggcccacttctgctacctcatggcccaggcgggatttggtgtttacacgaagaaaactacaaagcttgtcttaatcggatccaatcacagtttgccattcttaaagttcgcaaccaacgaagcaatccagaggacggaagcctatgagtacgcccagtccctgggtgccgagacctgccccctgcctagtttccaggtgtttaagttcatctactcctgccgcctggcggaaatggggctggccacgcaagccttccactactgtgaggccatcgcgaagagcatcctgacgcagccgcacctgtattccccggtgttgatcagccagcttgtgcagatggcttcccagttacgactcttcgatccccagctgaaagagaagccagaagaggagtccttggccgcacccacgtggctggttcacctgcagcaggtggagcggcagattaaggagggggctggagtatggcatcaggatggagccctcccgcagcagtgtcctggcactccgagttccgagatggagcagttggacaggccaggactcagtcagccaggagccctggggatcgccaaccctctgctggcggtgcctgcaccgagccctgagcactcgagcccgagcgtgcggctgctgccctcagctccgcagacgctccctgacggcccattggccagtcctgccagagtgccgatgttcccagtgccactgcccccggggcccctggagccgggtcctggctgtgtgaccccagggcctgcacttggcttcctggagccctccgggcctggcctcccacctggtgtgccacctctgcaggaaaggagacacttgctccaggaagccaggagcccagacccagggatagtgccgcaggaggcgcctgttggaaactcactttccgagctaagcgaagaaaattttgatggaaaatttgctaatctgaccccctcgaggacggtgccagactcggaggcccccccagggtgggatcgtgccgactcgggtcccacgcagccacctctgtctctctcacccgctcccgaaacaaagagacccggacaggcagccaagaaagaaacgaaggaacctaagaagggtgaatcctggttctttcgttggctacctggaaagaaaaagacagaagcttatttgccagatgacaagaacaaatcgattgtttgggatgaaaagaaaaaccagtgggtgaatttaaatgagccagaagaggagaagaaagccccgcccccacctccaacctcgatgcccaagactgtgcaagctgccccgcctgccctcccagggcctcctggagcccccgtgaacatgtactctagaagagcagcaggaaccagagctcgctacgttgacgtcctgaacccaagcgggacccagcggagcgagccggctctcgctcctgcggactttgtcgctccactcgcgccactcccaattccttctaacttgttcgtgccaaccccagttcagtgagaccccagggacgttcgggacggaatgatggcctcctcgctctctcatccccagatgcagaagaaccacagcttccagacgggactggcagggaagggcctgcagcagctaggggcctggccaatccagagcctgccccagagcccaaggctcctggcgacctccctgctgcagggggccctcccagcggggccatgcccttctacaaccctgctcagctggcacaggcctgcgccacctccgggagctcaaggctagggaggattggccagaggaagcacctggtgctgaactaggcttgccctgctgtgaacttgcacttggagccctgacgctgctgttctccccgaagaacccgaccgacctccgcgatctccgtcccgcccccagggagacacagcagtgactcagagctggtcgcacactgtgcctccctcctcaccgcccatcgtaatgaattattttgaaaattaattccaccatcctttcagattctggatggaaagactgaatctttgactcagaattgtttgccgaaaagaatgatgtgactttcttagtcatttaggatgatttaaggatatagtattcctggtcatttaagaatgttcattcattgaagccggagctgtctctgccacaggagagccacatggtcggtagtaaccagggcctctccaagcccagctgtgagtcactgcccagtgagtcccgcgcttcctttaaggtgctgggagcaaagagagggtgactgaggcagaccccaacccctgctctgcaccatctgggccctcgccgtgtttgaacctggctgaatgagtggagggcgctgtgttctcaatcagcgcctccgaggagccgtggggttccttcggcattagttcacggtttttgagagaggccttagttactgcagtgaatttctttcctgttgcaaagacgcttccagcctcactttactttctgtggcctgatgaggaccatgggtgattttgtgtacccaaagcgctggggactgcccaccgtgtggcccagtcactgggaaggagccccagagagccggctgtctgacatgatggctcagggtggtcatccaggttgaaaactgaccgtgtgatgtttgatttgggcttcatttcgtgtgtaggagcacggttagactcactgttaaggaagctggatgcacttctctaaaaggctgcactttccgtgagcacttttcgtggtacaatccacatgacccactttctcccctgggggacgttggttcagaggttggtagcacttggggagagtatcttaacacagtttcttgacagcagctctggaacttagtatttctgccccgagttttgccacactgagactttgagtagctcctggtggactcaaccctgttcaactcagagacgggcctcctctcactgatgcaaagctttaaggcttctctgactgttctgaaactcttcgtattcttgtcaagtctaaagagactgaagaaaagatttaaatactaataaaaatcagtagataatttctgtaggttctgctggaggaatacaaactgtttggtgttttaaatttaagtgtagaaattgtagaatgtggaattagcacagatccttcctggctttctgtttcacttgatcatttagcccagaccacccaggatgttttccaaaatgttccacaggcgtgtcccgctggatccatttgtccttgtcacttggagaaaggccagtccctgtgacggggcagccctctctgtccctcggtcagctcgtgtgaatcctgggacctcttccggtcggctctgcccgctgttctggggtcgactgccacgacttttgattcaagaagcttcctccaggcgggagcggctatttttcctaaatgagaattgttacattgcaaattgttgaataaaatattttgcgctccttcaagca

SEQ ID NO: 94293 - DNA, 4170 bp, Homo sapiens
tcgctattcacggcaccagtcatgaccaggtttgctaacagcctcccaatcaacgaccctctgcagacagtctaccagctcatgtccggacggatgcctgccgcgtccacgtgctgtggagacgagaaatggggagattggaggccgcacctcgccatggtcttgtccaacttgaacaacaacatggacgtcgagtccaggacgatggctaccatgggcgacactctgggtaggtcaggggtggagatgggcattgggtgtcgcggatggagcgccgaaggcccggttgtctgtggcgttggcagaaatcaccagaacccggccttctcggtccggctggcgtctctggtgccttctgtgcgcgtccttgacttctgcaagcgctcccggtcgctgagcccccgccgtgtgtcgtgtcgtctctccgcagcttcaaggggcctcttggatgcggcccacttctgctacctcatggcccaggcgggatttggtgtttacacgaagaaaactacaaagcttgtcttaatcggatccaatcacaggtaaagaaccaagtcagtgtagtcctgtaagttttcctttcaaagtaaaacaaaatccttctcctttagtgaattcagaaatggccagaatcatgtctttatttgtcacgtggtgggacacacttctggatgatttgctccaaggttgactatgccaataattggccattttttccaaatcaaaataattcacttcctctacagtttgccattcttaaagttcgcaaccaacgaagcaatccagaggacggaagcctatgagtacgcccagtccctgggtgccgagacctgccccctgcctagtttccaggtgtttaagttcatctactcctgccgcctggcggaaatggggctggccacgcaagccttccactactgtgaggccatcgcgaagagcatcctgacgcagccgcacctgtattccccggtgttgatcagccagcttgtgcagatggcttcccagttacgactcttcgatccccagctgaaagagaagccagaagaggagtccttggccgcacccacgtggctggttcacctgcagcaggtggagcggcagattaaggagggggctggagtatggcatcaggatggagccctcccgcagcagtgtcctggcactccgagttccgagatggagcagttggacaggccaggactcagtcagccaggagccctggggatcgccaaccctctgctggcggtgcctgcaccgagccctgagcactcgagcccgagcgtgcggctgctgccctcagctccgcagacgctccctgacggcccattggccagtcctgccagagtgccgatgttcccagtgccactgcccccggggcccctggagccgggtcctggctgtgtgaccccagggcctgcacttggcttcctggagccctccgggcctggcctcccacctggtgtgccacctctgcaggaaaggagacacttgctccaggaagccaggagcccagacccagggatagtgccgcaggaggcgcctgttggaaactcactttccgagctaagcgaagaaaattttgatggaaaatttgctaatctgaccccctcgaggacggtgccagactcggaggcccccccagggtgggatcgtgccgactcgggtcccacgcagccacctctgtctctctcacccgctcccgaaacaaagagacccggacaggcagccaagaaagaaacgaaggaacctaagaagggtgaatcctggttctttcgttggctacctggaaagaaaaagacagaagcttatttgccagatgacaagaacaaatcgattgtttgggatgaaaagaaaaaccagtgggtgaatttaaatgagccagaagaggagaagaaagccccgcccccacctccaacctcgatgcccaagactgtgcaagctgccccgcctgccctcccagggcctcctggagcccccgtgaacatgtactctagaagagcagcaggaaccagagctcgctacgttgacgtcctgaacccaagcgggacccagcggagcgagccggctctcgctcctgcggactttgtcgctccactcgcgccactcccaattccttctaacttgttcgtgccaaccccagatgcagaagaaccacagcttccagacgggactggcagggaagggcctgcagcagctaggggcctggccaatccagagcctgccccagagcccaaggttttaagctctgcagcgtcactccctggctctgaactcccctcctccaggcctgagggttcccagggaggagagctttcgcgctgtagttcaatgagttcattatcacgtgaagtgagccagcattttaatcaggctcctggcgacctccctgctgcagggggccctcccagcggggccatgcccttctacaaccctgctcagctggcacaggcctgcgccacctccgggagctcaaggctagggaggattggccagaggaagcacctggtgctgaactaggcttgccctgctgtgaacttgcacttggagccctgacgctgctgttctccccgaagaacccgaccgacctccgcgatctccgtcccgcccccagggagacacagcagtgactcagagctggtcgcacactgtgcctccctcctcaccgcccatcgtaatgaattattttgaaaattaattccaccatcctttcagattctggatggaaagactgaatctttgactcagaattgtttgccgaaaagaatgatgtgactttcttagtcatttaggatgatttaaggatatagtattcctggtcatttaagaatgttcattcattgaagccggagctgtctctgccacaggagagccacatggtcggtagtaaccagggcctctccaagcccagctgtgagtcactgcccagtgagtcccgcgcttcctttaaggtgctgggagcaaagagagggtgactgaggcagaccccaacccctgctctgcaccatctgggccctcgccgtgtttgaacctggctgaatgagtggagggcgctgtgttctcaatcagcgcctccgaggagccgtggggttccttcggcattagttcacggtttttgagagaggccttagttactgcagtgaatttctttcctgttgcaaagacgcttccagcctcactttactttctgtggcctgatgaggaccatgggtgattttgtgtacccaaagcgctggggactgcccaccgtgtggcccagtcactgggaaggagccccagagagccggctgtctgacatgatggctcagggtggtcatccaggttgaaaactgaccgtgtgatgtttgatttgggcttcatttcgtgtgtaggagcacggttagactcactgttaaggaagctggatgcacttctctaaaaggctgcactttccgtgagcacttttcgtggtacaatccacatgacccactttctcccctgggggacgttggttcagaggttggtagcacttggggagagtatcttaacacagtttcttgacagcagctctggaacttagtatttctgccccgagttttgccacactgagactttgagtagctcctggtggactcaaccctgttcaactcagagacgggcctcctctcactgatgcaaagctttaaggcttctctgactgttctgaaactcttcgtattcttgtcaagtctaaagagactgaagaaaagatttaaatactaataaaaatcagtagataatttctgtaggttctgctggaggaatacaaactgtttggtgttttaaatttaagtgtagaaattgtagaatgtggaattagcacagatccttcctggctttctgtttcacttgatcatttagcccagaccacccaggatgttttccaaaatgttccacaggcgtgtcccgctggatccatttgtccttgtcacttggagaaaggccagtccctgtgacggggcagccctctctgtccctcggtcagctcgtgtgaatcctgggacctcttccggtcggctctgcccgctgttctggggtcgactgccacgacttttgattcaagaagcttcctccaggcgggagcggctatttttcctaaatgagaattgttacattgcaaattgttgaataaaatattttgcgctccttcaagca

SEQ ID NO: 94294 - DNA, 3721 bp, Homo sapiens
tcgctattcacggcaccagtcatgaccaggtttgctaacagcctcccaatcaacgaccctctgcagacagtctaccagctcatgtccggacggatgcctgccgcgtccacgtgctgtggagacgagaaatggggagattggaggccgcacctcgccatggtcttgtccaacttgaacaacaacatggacgtcgagtccaggacgatggctaccatgggcgacactctggcttcaaggggcctcttggatgcggcccacttctgctacctcatggcccaggcgggatttggtgtttacacgaagaaaactacaaagcttgtcttaatcggatccaatcacagtttgccattcttaaagttcgcaaccaacgaagcaatccagaggacggaagcctatgagtacgcccagtccctgggtgccgagacctgccccctgcctagtttccaggtgtttaagttcatctactcctgccgcctggcggaaatggggctggccacgcaagccttccactactgtgaggccatcgcgaagagcatcctgacgcagccgcacctgtattccccggtgttgatcagccagcttgtgcagatggcttcccagttacgactcttcgatccccagctgaaagagaagccagaagaggagtccttggccgcacccacgtggctggttcacctgcagcaggtggagcggcagattaaggagggggctggagtatggcatcaggatggagccctcccgcagcagtgtcctggcactccgagttccgagatggagcagttggacaggccaggactcagtcagccaggagccctggggatcgccaaccctctgctggcggtgcctgcaccgagccctgagcactcgagcccgagcgtgcggctgctgccctcagctccgcagacgctccctgacggcccattggccagtcctgccagagtgccgatgttcccagtgccactgcccccggggcccctggagccgggtcctggctgtgtgaccccagggcctgcacttggcttcctggagccctccgggcctggcctcccacctggtgtgccacctctgcaggaaaggagacacttgctccaggaagccaggagcccagacccagggatagtgccgcaggaggcgcctgttggaaactcactttccgagctaagcgaagaaaattttgatggaaaatttgctaatctgaccccctcgaggacggtgccagactcggaggcccccccagggtgggatcgtgccgactcgggtcccacgcagccacctctgtctctctcacccgctcccgaaacaaagagacccggacaggcagccaagaaagaaacgaaggaacctaagaagggtgaatcctggttctttcgttggctacctggaaagaaaaagacagaagcttatttgccagatgacaagaacaaatcgattgtttgggatgaaaagaaaaaccagtgggtgaatttaaatgagccagaagaggagaagaaagccccgcccccacctccaacctcgatgcccaagactgtgcaagctgccccgcctgccctcccagggcctcctggagcccccgtgaacatgtactctagaagagcagcaggaaccagagctcgctacgttgacgtcctgaacccaagcgggacccagcggagcgagccggctctcgctcctgcggactttgtcgctccactcgcgccactcccaattccttctaacttgttcgtgccaaccccagatgcagaagaaccacagcttccagacgggactggcagggaagggcctgcagcagctaggggcctggccaatccagagcctgccccagagcccaaggttttaagctctgcagcgtcactccctggctctgaactcccctcctccaggcctgagggttcccagggaggagagctttcgcgctgtagttcaatgagttcattatcacgtgaagtgagccagcattttaatcagcatgcccttctacaaccctgctcagctggcacaggcctgcgccacctccgggagctcaaggctagggaggattggccagaggaagcacctggtgctgaactaggcttgccctgctgtgaacttgcacttggagccctgacgctgctgttctccccgaagaacccgaccgacctccgcgatctccgtcccgcccccagggagacacagcagtgactcagagctggtcgcacactgtgcctccctcctcaccgcccatcgtaatgaattattttgaaaattaattccaccatcctttcagattctggatggaaagactgaatctttgactcagaattgtttgccgaaaagaatgatgtgactttcttagtcatttaggatgatttaaggatatagtattcctggtcatttaagaatgttcattcattgaagccggagctgtctctgccacaggagagccacatggtcggtagtaaccagggcctctccaagcccagctgtgagtcactgcccagtgagtcccgcgcttcctttaaggtgctgggagcaaagagagggtgactgaggcagaccccaacccctgctctgcaccatctgggccctcgccgtgtttgaacctggctgaatgagtggagggcgctgtgttctcaatcagcgcctccgaggagccgtggggttccttcggcattagttcacggtttttgagagaggccttagttactgcagtgaatttctttcctgttgcaaagacgcttccagcctcactttactttctgtggcctgatgaggaccatgggtgattttgtgtacccaaagcgctggggactgcccaccgtgtggcccagtcactgggaaggagccccagagagccggctgtctgacatgatggctcagggtggtcatccaggttgaaaactgaccgtgtgatgtttgatttgggcttcatttcgtgtgtaggagcacggttagactcactgttaaggaagctggatgcacttctctaaaaggctgcactttccgtgagcacttttcgtggtacaatccacatgacccactttctcccctgggggacgttggttcagaggttggtagcacttggggagagtatcttaacacagtttcttgacagcagctctggaacttagtatttctgccccgagttttgccacactgagactttgagtagctcctggtggactcaaccctgttcaactcagagacgggcctcctctcactgatgcaaagctttaaggcttctctgactgttctgaaactcttcgtattcttgtcaagtctaaagagactgaagaaaagatttaaatactaataaaaatcagtagataatttctgtaggttctgctggaggaatacaaactgtttggtgttttaaatttaagtgtagaaattgtagaatgtggaattagcacagatccttcctggctttctgtttcacttgatcatttagcccagaccacccaggatgttttccaaaatgttccacaggcgtgtcccgctggatccatttgtccttgtcacttggagaaaggccagtccctgtgacggggcagccctctctgtccctcggtcagctcgtgtgaatcctgggacctcttccggtcggctctgcccgctgttctggggtcgactgccacgacttttgattcaagaagcttcctccaggcgggagcggctatttttcctaaatgagaattgttacattgcaaattgttgaataaaatattttgcgctccttcaagca

SEQ ID NO: 94295 - DNA, 3615 bp, Homo sapiens
tcgctattcacggcaccagtcatgaccaggtttgctaacagcctcccaatcaacgaccctctgcagacagtctaccagctcatgtccggacggatgcctgccgcgtccacgtgctgtggagacgagaaatggggagattggaggccgcacctcgccatggtcttgtccaacttgaacaacaacatggacgtcgagtccaggacgatggctaccatgggcgacactctggcttcaaggggcctcttggatgcggcccacttctgctacctcatggcccaggcgggatttggtgtttacacgaagaaaactacaaagcttgtcttaatcggatccaatcacagtttgccattcttaaagttcgcaaccaacgaagcaatccagaggacggaagcctatgagtacgcccagtccctgggtgccgagacctgccccctgcctagtttccaggtgtttaagttcatctactcctgccgcctggcggaaatggggctggccacgcaagccttccactactgtgaggccatcgcgaagagcatcctgacgcagccgcacctgtattccccggtgttgatcagccagcttgtgcagatggcttcccagttacgactcttcgatccccagctgaaagagaagccagaagaggagtccttggccgcacccacgtggctggttcacctgcagcaggtggagcggcagattaaggagggggctggagtatggcatcaggatggagccctcccgcagcagtgtcctggcactccgagttccgagatggagcagttggacaggccaggactcagtcagccaggagccctggggatcgccaaccctctgctggcggtgcctgcaccgagccctgagcactcgagcccgagcgtgcggctgctgccctcagctccgcagacgctccctgacggcccattggccagtcctgccagagtgccgatgttcccagtgccactgcccccggggcccctggagccgggtcctggctgtgtgaccccagggcctgcacttggcttcctggagccctccgggcctggcctcccacctggtgtgccacctctgcaggaaaggagacacttgctccaggaagccaggagcccagacccagggatagtgccgcaggaggcgcctgttggaaactcactttccgagctaagcgaagaaaattttgatggaaaatttgctaatctgaccccctcgaggacggtgccagactcggaggcccccccagggtgggatcgtgccgactcgggtcccacgcagccacctctgtctctctcacccgctcccgaaacaaagagacccggacaggcagccaagaaagaaacgaaggaacctaagaagggtgaatcctggttctttcgttggctacctggaaagaaaaagacagaagcttatttgccagatgacaagaacaaatcgattgtttgggatgaaaagaaaaaccagtgggtgaatttaaatgagccagaagaggagaagaaagccccgcccccacctccaacctcgatgcccaagactgtgcaagctgccccgcctgccctcccagggcctcctggaccggctctcgctcctgcggactttgtcgctccactcgcgccactcccaattccttctaacttgttcgtgccaaccccagatgcagaagaaccacagcttccagacgggactggcagggaagggcctgcagcagctaggggcctggccaatccagagcctgccccagagcccaaggttttaagctctgcagcgtcactccctggctctgaactcccctcctccaggcctgagggttcccagggaggagaggctcctggcgacctccctgctgcagggggccctcccagcggggccatgcccttctacaaccctgctcagctggcacaggcctgcgccacctccgggagctcaaggctagggaggattggccagaggaagcacctggtgctgaactaggcttgccctgctgtgaacttgcacttggagccctgacgctgctgttctccccgaagaacccgaccgacctccgcgatctccgtcccgcccccagggagacacagcagtgactcagagctggtcgcacactgtgcctccctcctcaccgcccatcgtaatgaattattttgaaaattaattccaccatcctttcagattctggatggaaagactgaatctttgactcagaattgtttgccgaaaagaatgatgtgactttcttagtcatttaggatgatttaaggatatagtattcctggtcatttaagaatgttcattcattgaagccggagctgtctctgccacaggagagccacatggtcggtagtaaccagggcctctccaagcccagctgtgagtcactgcccagtgagtcccgcgcttcctttaaggtgctgggagcaaagagagggtgactgaggcagaccccaacccctgctctgcaccatctgggccctcgccgtgtttgaacctggctgaatgagtggagggcgctgtgttctcaatcagcgcctccgaggagccgtggggttccttcggcattagttcacggtttttgagagaggccttagttactgcagtgaatttctttcctgttgcaaagacgcttccagcctcactttactttctgtggcctgatgaggaccatgggtgattttgtgtacccaaagcgctggggactgcccaccgtgtggcccagtcactgggaaggagccccagagagccggctgtctgacatgatggctcagggtggtcatccaggttgaaaactgaccgtgtgatgtttgatttgggcttcatttcgtgtgtaggagcacggttagactcactgttaaggaagctggatgcacttctctaaaaggctgcactttccgtgagcacttttcgtggtacaatccacatgacccactttctcccctgggggacgttggttcagaggttggtagcacttggggagagtatcttaacacagtttcttgacagcagctctggaacttagtatttctgccccgagttttgccacactgagactttgagtagctcctggtggactcaaccctgttcaactcagagacgggcctcctctcactgatgcaaagctttaaggcttctctgactgttctgaaactcttcgtattcttgtcaagtctaaagagactgaagaaaagatttaaatactaataaaaatcagtagataatttctgtaggttctgctggaggaatacaaactgtttggtgttttaaatttaagtgtagaaattgtagaatgtggaattagcacagatccttcctggctttctgtttcacttgatcatttagcccagaccacccaggatgttttccaaaatgttccacaggcgtgtcccgctggatccatttgtccttgtcacttggagaaaggccagtccctgtgacggggcagccctctctgtccctcggtcagctcgtgtgaatcctgggacctcttccggtcggctctgcccgctgttctggggtcgactgccacgacttttgattcaagaagcttcctccaggcgggagcggctatttttcctaaatgagaattgttacattgcaaattgttgaataaaatattttgcgctccttcaagca

SEQ ID NO: 94296 - DNA, 2686 bp, Homo sapiens
aaggtccaggctggtacgcgtcagagttcgtagctccatcctcctggtgtctctgtggatctgctcccacctccatcctcctggtgtctctgtggatcgccccccacctccatcctcctggtgtctctgtggatcgccccccacctccatcctcctggtgtctctgtggatctgctccccacctccatcctcctggtgtctctgtggatctgctcccacctccattctcctggtgtctctgtggatctggcgactctggggcctcacagaaggtgaatcctggttctttcgttggctacctggaaagaaaaagacagaagcttatttgccagatgacaagaacaaatcgattgtttgggatgaaaagaaaaaccagtgggtgaatttaaatgagccagaagaggagaagaaagccccgcccccacctccaacctcgatgcccaagactgtgcaagctgccccgcctgccctcccagggcctcctggagcccccgtgaacatgtactctagaagagcagcaggaaccagagctcgctacgttgacgtcctgaacccaagcgggacccagcggagcgagccggctctcgctcctgcggactttgtcgctccactcgcgccactcccaattccttctaacttgttcgtgccaaccccagatgcagaagaaccacagcttccagacgggactggcagggaagggcctgcagcagctaggggcctggccaatccagagcctgccccagagcccaaggttttaagctctgcagcgtcactccctggctctgaactcccctcctccaggcctgagggttcccagggaggagagctttcgcgctgtagttcaatgagttcattatcacgtgaagtgagccagcattttaatcaggctcctggcgacctccctgctgcagggggccctcccagcggggccatgcccttctacaaccctgctcagctggcacaggcctgcgccacctccgggagctcaaggctagggaggattggccagaggaagcacctggtgctgaactaggcttgccctgctgtgaacttgcacttggagccctgacgctgctgttctccccgaagaacccgaccgacctccgcgatctccgtcccgcccccagggagacacagcagtgactcagagctggtcgcacactgtgcctccctcctcaccgcccatcgtaatgaattattttgaaaattaattccaccatcctttcagattctggatggaaagactgaatctttgactcagaattgtttgccgaaaagaatgatgtgactttcttagtcatttaggatgatttaaggatatagtattcctggtcatttaagaatgttcattcattgaagccggagctgtctctgccacaggagagccacatggtcggtagtaaccagggcctctccaagcccagctgtgagtcactgcccagtgagtcccgcgcttcctttaaggtgctgggagcaaagagagggtgactgaggcagaccccaacccctgctctgcaccatctgggccctcgccgtgtttgaacctggctgaatgagtggagggcgctgtgttctcaatcagcgcctccgaggagccgtggggttccttcggcattagttcacggtttttgagagaggccttagttactgcagtgaatttctttcctgttgcaaagacgcttccagcctcactttactttctgtggcctgatgaggaccatgggtgattttgtgtacccaaagcgctggggactgcccaccgtgtggcccagtcactgggaaggagccccagagagccggctgtctgacatgatggctcagggtggtcatccaggttgaaaactgaccgtgtgatgtttgatttgggcttcatttcgtgtgtaggagcacggttagactcactgttaaggaagctggatgcacttctctaaaaggctgcactttccgtgagcacttttcgtggtacaatccacatgacccactttctcccctgggggacgttggttcagaggttggtagcacttggggagagtatcttaacacagtttcttgacagcagctctggaacttagtatttctgccccgagttttgccacactgagactttgagtagctcctggtggactcaaccctgttcaactcagagacgggcctcctctcactgatgcaaagctttaaggcttctctgactgttctgaaactcttcgtattcttgtcaagtctaaagagactgaagaaaagatttaaatactaataaaaatcagtagataatttctgtaggttctgctggaggaatacaaactgtttggtgttttaaatttaagtgtagaaattgtagaatgtggaattagcacagatccttcctggctttctgtttcacttgatcatttagcccagaccacccaggatgttttccaaaatgttccacaggcgtgtcccgctggatccatttgtccttgtcacttggagaaaggccagtccctgtgacggggcagccctctctgtccctcggtcagctcgtgtgaatcctgggacctcttccggtcggctctgcccgctgttctggggtcgactgccacgacttttgattcaagaagcttcctccaggcgggagcggctatttttcctaaatgagaattgttacattgcaaattgttgaataaaatattttgcgctccttcaagca

SEQ ID NO: 94297 - DNA, 3711 bp, Homo sapiens
tcgctattcacggcaccagtcatgaccaggtttgctaacagcctcccaatcaacgaccctctgcagacagtctaccagctcatgtccggacggatgcctgccgcgtccacgtgctgtggagacgagaaatggggagattggaggccgcacctcgccatggtcttgtccaacttgaacaacaacatggacgtcgagtccaggacgatggctaccatgggcgacactctggcttcaaggggcctcttggatgcggcccacttctgctacctcatggcccaggcgggatttggtgtttacacgaagaaaactacaaagcttgtcttaatcggatccaatcacagtttgccattcttaaagttcgcaaccaacgaagcaatccagaggacggaagcctatgagtacgcccagtccctgggtgccgagacctgccccctgcctagtttccaggtgtttaagttcatctactcctgccgcctggcggaaatggggctggccacgcaagccttccactactgtgaggccatcgcgaagagcatcctgacgcagccgcacctgtattccccggtgttgatcagccagcttgtgcagatggcttcccagttacgactcttcgatccccagctgaaagagaagccagaagaggagtccttggccgcacccacgtggctggttcacctgcagcaggtggagcggcagattaaggagggggctggagtatggcatcaggatggagccctcccgcagcagtgtcctggcactccgagttccgagatggagcagttggacaggccaggactcagtcagccaggagccctggggatcgccaaccctctgctggcggtgcctgcaccgagccctgagcactcgagcccgagcgtgcggctgctgccctcagctccgcagacgctccctgacggcccattggccagtcctgccagagtgccgatgttcccagtgccactgcccccggggcccctggagccgggtcctggctgtgtgaccccagggcctgcacttggcttcctggagccctccgggcctggcctcccacctggtgtgccacctctgcaggaaaggagacacttgctccaggaagccaggagcccagacccagggatagtgccgcaggaggcgcctgttggaaactcactttccgagctaagcgaagaaaattttgatggaaaatttgctaatctgaccccctcgaggacggtgccagactcggaggcccccccagggtgggatcgtgccgactcgggtcccacgcagccacctctgtctctctcacccgctcccgaaacaaagagacccggacaggcagccaagaaagaaacgaaggaacctaagaagggtgaatcctggttctttcgttggctacctggaaagaaaaagacagaagcttatttgccagatgacaagaacaaatcgattgtttgggatgaaaagaaaaaccagtgggtgaatttaaatgagccagaagaggagaagaaagccccgcccccacctccaacctcgatgcccaagactgtgcaagctgccccgcctgccctcccagggcctcctggagcccccgtgaacatgtactctagaagagcagcaggaaccagagctcgctacgttgacgtcctgaacccaagcgggacccagcggagcgagccggctctcgctcctgcggactttgtcgctccactcgcgccactcccaattccttctaacttgttcgtgccaaccccagatgcagaagaaccacagcttccagacgggactggcagggaagggcctgcagcagctaggggcctggccaatccagagcctgccccagagcccaaggttttaagctctgcagcgtcactccctggctctgaactcccctcctccaggcctgagggttcccagggaggagagctttcgcgctgtagttcaatgagttcattatcacgtgaagtgagccagcattttaatcaggctcctggcgacctccctgctgcagggggccctcccagcggggccatgcccttctacaaccctgctcagctggcacaggcctgcgccacctccgggagctcaaggctagggaggattggccagaggaagcacctggtgctgaactaggcttgccctgctgtgaacttgcacttggagccctgacgctgctgttctccccgaagaacccgaccgacctccgcgatctccgtcccgcccccagggagacacagcagtgactcagagctggtcgcacactgtgcctccctcctcaccgcccatcgtaatgaattattttgaaaattaattccaccatcctttcagattctggatggaaagactgaatctttgactcagaattgtttgccgcctggtcatttaagaatgttcattcattgaagccggagctgtctctgccacaggagagccacatggtcggtagtaaccagggcctctccaagcccagctgtgagtcactgcccagtgagtcccgcgcttcctttaaggtgctgggagcaaagagagggtgactgaggcagaccccaacccctgctctgcaccatctgggccctcgccgtgtttgaacctggctgaatgagtggagggcgctgtgttctcaatcagcgcctccgaggagccgtggggttccttcggcattagttcacggtttttgagagaggccttagttactgcagtgaatttctttcctgttgcaaagacgcttccagcctcactttactttctgtggcctgatgaggaccatgggtgattttgtgtacccaaagcgctggggactgcccaccgtgtggcccagtcactgggaaggagccccagagagccggctgtctgacatgatggctcagggtggtcatccaggttgaaaactgaccgtgtgatgtttgatttgggcttcatttcgtgtgtaggagcacggttagactcactgttaaggaagctggatgcacttctctaaaaggctgcactttccgtgagcacttttcgtggtacaatccacatgacccactttctcccctgggggacgttggttcagaggttggtagcacttggggagagtatcttaacacagtttcttgacagcagctctggaacttagtatttctgccccgagttttgccacactgagactttgagtagctcctggtggactcaaccctgttcaactcagagacgggcctcctctcactgatgcaaagctttaaggcttctctgactgttctgaaactcttcgtattcttgtcaagtctaaagagactgaagaaaagatttaaatactaataaaaatcagtagataatttctgtaggttctgctggaggaatacaaactgtttggtgttttaaatttaagtgtagaaattgtagaatgtggaattagcacagatccttcctggctttctgtttcacttgatcatttagcccagaccacccaggatgttttccaaaatgttccacaggcgtgtcccgctggatccatttgtccttgtcacttggagaaaggccagtccctgtgacggggcagccctctctgtccctcggtcagctcgtgtgaatcctgggacctcttccggtcggctctgcccgctgttctggggtcgactgccacgacttttgattcaagaagcttcctccaggcgggagcggctatttttcctaaatgagaattgttacattgcaaattgttgaataaaatattttgcgctccttcaagca

SEQ ID NO: 94298 - DNA, 1545 bp, Homo sapiens
gcaggcgctctagaggacccctgacacgccgagcatccataccatcgtaatgaattattttgaaaattaattccaccatcctttcagattctggatggaaagactgaatctttgactcagaattgtttgccgaaaagaatgatgtgactttcttagtcatttaggatgatttaaggatatagtattcctggtcatttaagaatgttcattcattgaagccggagctgtctctgccacaggagagccacatggtcggtagtaaccagggcctctccaagcccagctgtgagtcactgcccagtgagtcccgcgcttcctttaaggtgctgggagcaaagagagggtgactgaggcagaccccaacccctgctctgcaccatctgggccctcgccgtgtttgaacctggctgaatgagtggagggcgctgtgttctcaatcagcgcctccgaggagccgtggggttccttcggcattagttcacggtttttgagagaggccttagttactgcagtgaatttctttcctgttgcaaagacgcttccagcctcactttactttctgtggcctgatgaggaccatgggtgattttgtgtacccaaagcgctggggactgcccaccgtgtggcccagtcactgggaaggagccccagagagccggctgtctgacatgatggctcagggtggtcatccaggttgaaaactgaccgtgtgatgtttgatttgggcttcatttcgtgtgtaggagcacggttagactcactgttaaggaagctggatgcacttctctaaaaggctgcactttccgtgagcacttttcgtggtacaatccacatgacccactttctcccctgggggacgttggttcagaggttggtagcacttggggagagtatcttaacacagtttcttgacagcagctctggaacttagtatttctgccccgagttttgccacactgagactttgagtagctcctggtggactcaaccctgttcaactcagagacgggcctcctctcactgatgcaaagctttaaggcttctctgactgttctgaaactcttcgtattcttgtcaagtctaaagagactgaagaaaagatttaaatactaataaaaatcagtagataatttctgtaggttctgctggaggaatacaaactgtttggtgttttaaatttaagtgtagaaattgtagaatgtggaattagcacagatccttcctggctttctgtttcacttgatcatttagcccagaccacccaggatgttttccaaaatgttccacaggcgtgtcccgctggatccatttgtccttgtcacttggagaaaggccagtccctgtgacggggcagccctctctgtccctcggtcagctcgtgtgaatcctgggacctcttccggtcggctctgcccgctgttctggggtcgactgccacgacttttgattcaagaagcttcctccaggcgggagcggctatttttcctaaatgagaattgttacattgcaaattgttgaataaaatattttgcgctccttcaagca

SEQ ID NO: 94299 - DNA, 3760 bp, Homo sapiens
tcgctattcacggcaccagtcatgaccaggtttgctaacagcctcccaatcaacgaccctctgcagacagtctaccagctcatgtccggacggatgcctgccgcgtccacgtgctgtggagacgagaaatggggagattggaggccgcacctcgccatggtcttgtccaacttgaacaacaacatggacgtcgagtccaggacgatggctaccatgggcgacactctggcttcaaggggcctcttggatgcggcccacttctgctacctcatggcccaggcgggatttggtgtttacacgaagaaaactacaaagcttgtcttaatcggatccaatcacagtttgccattcttaaagttcgcaaccaacgaagcaatccagaggacggaagcctatgagtacgcccagtccctgggtgccgagacctgccccctgcctagtttccaggtgtttaagttcatctactcctgccgcctggcggaaatggggctggccacgcaagccttccactactgtgaggccatcgcgaagagcatcctgacgcagccgcacctgtattccccggtgttgatcagccagcttgtgcagatggcttcccagttacgactcttcgatccccagctgaaagagaagccagaagaggagtccttggccgcacccacgtggctggttcacctgcagcaggtggagcggcagattaaggagggggctggagtatggcatcaggatggagccctcccgcagcagtgtcctggcactccgagttccgagatggagcagttggacaggccaggactcagtcagccaggagccctggggatcgccaaccctctgctggcggtgcctgcaccgagccctgagcactcgagcccgagcgtgcggctgctgccctcagctccgcagacgctccctgacggcccattggccagtcctgccagagtgccgatgttcccagtgccactgcccccggggcccctggagccgggtcctggctgtgtgaccccagggcctgcacttggcttcctggagccctccgggcctggcctcccacctggtgtgccacctctgcaggaaaggagacacttgctccaggaagccaggagcccagacccagggatagtgccgcaggaggcgcctgttggaaactcactttccgagctaagcgaagaaaattttgatggaaaatttgctaatctgaccccctcgaggacggtgccagactcggaggcccccccagggtgggatcgtgccgactcgggtcccacgcagccacctctgtctctctcacccgctcccgaaacaaagagacccggacaggcagccaagaaagaaacgaaggaacctaagaagggtgaatcctggttctttcgttggctacctggaaagaaaaagacagaagcttatttgccagatgacaagaacaaatcgattgtttgggatgaaaagaaaaaccagtgggtgaatttaaatgagccagaagaggagaagaaagccccgcccccacctccaacctcgatgcccaagactgtgcaagctgccccgcctgccctcccagggcctcctggagcccccgtgaacatgtactctagaagagcagcaggaaccagagctcgctacgttgacgtcctgaacccaagcgggacccagcggagcgagccggctctcgctcctgcggactttgtcgctccactcgcgccactcccaattccttctaacttgttcgtgccaaccccagatgcagaagaaccacagcttccagacgggactggcagggaagggcctgcagcagctaggggcctggccaatccagagcctgccccagagcccaaggttttaagctctgcagcgtcactccctggctctgaactcccctcctccaggcctgagggttcccagggaggagagctttcgcgctgtagttcaatgagttcattatcacgtgaagtgagccagcattttaatcaggctcctggcgacctccctgctgcagggggccctcccagcggggccatgcccttctacaaccctgctcagctggcacaggcctgcgccacctccgggagctcaaggctagggaggattggccagaggaagcacctggtgctgaactaggcttgccctgctgtgaacttgcacttggagccctgacgctgctgttctccccgaagaacccgaccgacctccgcgatctccgtcccgcccccagggagacacagcagtgactcagagctggtcgcacactgtgcctccctcctcaccgcccatcgtaatgaattattttgaaaattaattccaccatcctttcagattctggatggaaagactgaatctttgactcagaattgtttgccgaaaagaatgatgtgactttcttagtcatttaggatgatttaaggatatagtattcctggtcatttaagaatgttcattcattgaagccggagctgtctctgccacaggagagccacatggtcggtagtaaccagggcctctccaagcccagctgtgagtcactgcccagtgagtcccgcgcttcctttaaggtgctgggagcaaagagagggtgactgaggcagaccccaacccctgctctgcaccatctgggccctcgccgtgtttgaacctggctgaatgagtggagggcgctgtgttctcaatcagcgcctccgaggagccgtggggttccttcggcattagttcacggtttttgagagaggccttagttactgcagtgaatttctttcctgttgcaaagacgcttccagcctcactttactttctgtggcctgatgaggaccatgggtgattttgtgtacccaaagcgctggggactgcccaccgtgtggcccagtcactgggaaggagccccagagagccggctgtctgacatgatggctcagggtggtcatccaggttgaaaactgaccgtgtgatgtttgatttgggcttcatttcgtgtgtaggagcacggttagactcactgttaaggaagctggatgcacttctctaaaaggctgcactttccgtgagcacttttcgtggtacaatccacatgacccactttctcccctgggggacgttggttcagaggttggtagcacttggggagagtatcttaacacagtttcttgacagcagctctggaacttagtatttctgccccgagttttgccacactgagactttgagtagctcctggtggactcaaccctgttcaactcagagacgggcctcctctcactgatgcaaagctttaaggcttctctgactgttctgaaactcttcgtattcttgtcaagtctaaagagactgaagaaaagatttaaatactaataaaaatcagtagataatttctgtaggttctgctggaggaatacaaactgtttggtgttttaaatttaagtgtagaaattgtagaatgtggaattagcacagatccttcctggctttctgtttcacttgatcatttagcccagaccacccaggatgttttccaaaatgttccacaggcgtgtcccgctggatccatttgtccttgtcacttggagaaaggccagtccctgtgacggggcagccctctctgtccctcggtcagctcgtgtgaatcctgggacctcttccggtcggctctgcccgctgttctggggtcgactgccacgacttttgattcaagaagcttcctccaggcgggagcggctatttttcctaaatgagaatttttttttttattccactcaccccccaaccccctcccgccgta

SEQ ID NO: 94300 - DNA, 3241 bp, Homo sapiens
tcgctattcacggcaccagtcatgaccaggtttgctaacagcctcccaatcaacgaccctctgcagacagtctaccagctcatgtccggacggatgcctgccgcgtccacgtgctgtggagacgagaaatggggagattggaggccgcacctcgccatggtcttgtccaacttgaacaacaacatggacgtcgagtccaggacgatggctaccatgggcgacactctggcttcaaggggcctcttggatgcggcccacttctgctacctcatggcccaggcgggatttggtgtttacacgaagaaaactacaaagcttgtcttaatcggatccaatcacagtttgccattcttaaagttcgcaaccaacgaagcaatccagaggacggaagcctatgagtacgcccagtccctgggtgccgagacctgccccctgcctagtttccaggtgtttaagttcatctactcctgccgcctggcggaaatggggctggccacgcaagccttccactactgtgaggccatcgcgaagagcatcctgacgcagccgcacctgtattccccggtgttgatcagccagcttgtgcagatggcttcccagttacgactcttcgatccccagctgaaagagaagccagaagaggagtccttggccgcacccacgtggctggttcacctgcagcaggtggagcggcagattaaggagggggctggagtatggcatcaggatggagccctcccgcagcagtgtcctggcactccgagttccgagatggagcagttggacaggccaggactcagtcagccaggagccctggggatcgccaaccctctgctggcggtgcctgcaccgagccctgagcactcgagcccgagcgtgcggctgctgccctcagctccgcagacgctccctgacggcccattggccagtcctgccagagtgccgatgttcccagtgccactgcccccggggcccctggagccgggtcctggctgtgtgaccccagggcctgcacttggcttcctggagccctccgggcctggcctcccacctggtgtgccacctctgcaggaaaggagacacttgctccaggaagccaggagcccagacccagggatagtgccgcaggaggcgcctgttggaaactcactttccgagctaagcgaagaaaattttgatggaaaatttgctaatctgaccccctcgaggacggtgccagactcggaggcccccccagggtgggatcgtgccgactcgggtcccacgcagccacctctgtctctctcacccgctcccgaaacaaagagacccggacaggcagccaagaaagaaacgaaggaacctaagaagggtgaatcctggttctttcgttggctacctggaaagaaaaagacagaagcttatttgccagatgacaagaacaaatcgattgtttgggatgaaaagaaaaaccagtgggtgaatttaaatgagccagaagaggagaagaaagccccgcccccacctccaacctcgatgcccaagactgtgcaagctgccccgcctgccctcccagggcctcctggagcccccgtgaacatgtactctagaagagcagcaggaaccagagctcgctacgttgacgtcctgaacccaagcgggacccagcggagcgagccggctctcgctcctgcggactttgtcgctccactcgcgccactcccaattccttctaacttgttcgtgccaaccccagatgcagaagaaccacagcttccagacgggactggcagggaagggcctgcagcagctaggggcctggccaatccagagcctgccccagagcccaaggttttaagctctgcagcgtcactccctggctctgaactcccctcctccaggcctgagggttcccagggaggagagctttcgcgctgtagttcaatgagttcattatcacgtgaagtgagccagcattttaatcaggctcctggcgacctccctgctgcagggggccctcccagcggggccatgcccttctacaaccctgctcagctggcacaggcctgcgccacctccgggagctcaaggctagggaggattggccagaggaagcacctggtgctgaactaggcttgccctgctgtgaacttgcacttggagccctgacgctgctgttctccccgaagaacccgaccgacctccgcgatctccgtcccgcccccagggagacacagcagtgactcagagctggtcgcacactgtgcctccctcctcaccgcccatcgtaatgaattattttgaaaattaattccaccatcctttcagattctggatggaaagactgaatctttgactcagaattgtttgccgaaaagaatgatgtgactttcttagtcatttaggatgatttaaggatatagtattcctggtcatttaagaatgttcattcattgaagccggagctgtctctgccacaggagagccacatggtcggtagtaaccagggcctctccaagcccagctgtgagtcactgcccagtgagtcccgcgcttcctttaaggtgctgggagcaaagagagggtgactgaggcagaccccaacccctgctctgcaccatctgggccctcgccgtgtttgaacctggctgaatgagtggagggcgctgtgttctcaatcagcgcctccgaggagccgtggggttccttcggcattagttcacggtttttgagagaggccttagttactgcagtgaatttctttcctgttgcaaagacgcttccagcctcactttactttctgtggcctgatgaggaccatgggtgattttgtgtacccaaagcgctggggactgcccaccgtgtggcccagtcactgggaaggagccccagagagccggctgtctgacatgatggctcagggtggtcatccaggttgaaaactgaccgtgtgatgtttgatttgggcttcatttcgtgtgtaggagcacggttagactcactgttaaggaagctggatgcacttctctaaaaggctgcactttccgtgagcacttttcgtggtacaatccacatgacccactttctcccctgggggacgttggttcagaggttggtagcacttggggagagtatcttaacacagtttcttgacagcagctctggaacttagtatttctgccccgagttttgccacactgagactttgagtagctcctgtgactatagagacggcctcctctgtgctgtcagagagtcacaa

SEQ ID NO: 94301 - DNA, 2541 bp, Homo sapiens
tcgctattcacggcaccagtcatgaccaggtttgctaacagcctcccaatcaacgaccctctgcagacagtctaccagctcatgtccggacggatgcctgccgcgtccacgtgctgtggagacgagaaatggggagattggaggccgcacctcgccatggtcttgtccaacttgaacaacaacatggacgtcgagtccaggacgatggctaccatgggcgacactctggcttcaaggggcctcttggatgcggcccacttctgctacctcatggcccaggcgggatttggtgtttacacgaagaaaactacaaagcttgtcttaatcggatccaatcacagtttgccattcttaaagttcgcaaccaacgaagcaatccagaggacggaagcctatgagtacgcccagtccctgggtgccgagacctgccccctgcctagtttccaggtgtttaagttcatctactcctgccgcctggcggaaatggggctggccacgcaagccttccactactgtgaggccatcgcgaagagcatcctgacgcagccgcacctgtattccccggtgttgatcagccagcttgtgcagatggcttcccagttacgactcttcgatccccagctgaaagagaagccagaagaggagtccttggccgcacccacgtggctggttcacctgcagcaggtggagcggcagattaaggagggggctggagtatggcatcaggatggagccctcccgcagcagtgtcctggcactccgagttccgagatggagcagttggacaggccaggactcagtcagccaggagccctggggatcgccaaccctctgctggcggtgcctgcaccgagccctgagcactcgagcccgagcgtgcggctgctgccctcagctccgcagacgctccctgacggcccattggccagtcctgccagagtgccgatgttcccagtgccactgcccccggggcccctggagccgggtcctggctgtgtgaccccagggcctgcacttggcttcctggagccctccgggcctggcctcccacctggtgtgccacctctgcaggaaaggagacacttgctccaggaagccaggagcccagacccagggatagtgccgcaggaggcgcctgttggaaactcactttccgagctaagcgaagaaaattttgatggaaaatttgctaatctgaccccctcgaggacggtgccagactcggaggcccccccagggtgggatcgtgccgactcgggtcccacgcagccacctctgtctctctcacccgctcccgaaacaaagagacccggacaggcagccaagaaagaaacgaaggaacctaagaagggtgaatcctggttctttcgttggctacctggaaagaaaaagacagaagcttatttgccagatgacaagaacaaatcgattgtttgggatgaaaagaaaaaccagtgggtgaatttaaatgagccagaagaggagaagaaagccccgcccccacctccaacctcgatgcccaagactgtgcaagctgccccgcctgccctcccagggcctcctggagcccccgtgaacatgtactctagaagagcagcaggaaccagagctcgctacgttgacgtcctgaacccaagcgggacccagcggagcgagccggctctcgctcctgcggactttgtcgctccactcgcgccactcccaattccttctaacttgttcgtgccaaccccagatgcagaagaaccacagcttccagacgggactggcagggaagggcctgcagcagctaggggcctggccaatccagagcctgccccagagcccaaggtgagcgggtacggtgggaaaggggaaaggtacccagtgaggaggcacctccccatcctgccagacagggccttgccttctgcaagtcagtatccaatgtgtacgtagagtgttccgccttaaacgcctcacacttatgtatggtagagacggaaggtagaatgcagggtgccgggcgggacagagctgtttgggaagacggagatctggggatagtggcggtgatggttgctcagcacggtgaatgtgcttaaaacttaaaaatgattaaagtggcaaattttacagtatgtatattttacaatttttaaaattggaaaaagtaaaattaattactctaagttacagagaaattacctaccgataataaaagttaagtatattttcatccaaaaaaaaaaaacaaaaaacaaatgactcccatgtgaagtagaacagctcagaccagtcgggagtggtggatgatgcctgtaatcccagctctttgggaggctgagctgggcgggtcacctgaggtcaggagttcgagaccagcctggccaacatggtgaaaccccatctctactaaaaaaaaaacaaaatttacctgggtgtggtggcgggtgcctgtaatcccagctactcagaaggctgaggcagaagaatcgcttggacccaggaggcagaggttgcagtgagctgagattgcgccattgcactccatcccgggca

SEQ ID NO: 94302 - DNA, 600 bp, Homo sapiens
tcgctattcacggcaccagtcatgaccaggtttgctaacagcctcccaatcaacgaccctctgcagacagtctaccagctcatgtccggacggatgcctgccgcgtccacgtgctgtggagacgagaaatggggagattggaggccgcacctcgccatggtcttgtccaacttgaacaacaacatggacgtcgagtccaggacgatggctaccatgggcgacactctggcttcaaggggcctcttggatgcggcccacttctgctacctcatggcccaggcgggatttggtgtttacacgaagaaaactacaaagcttgtcttaatcggatccaatcacagtttgccattcttaaagttcgcaaccaacgaagcaatccagaggacggaagcctatgagtacgcccagtccctgggtgccgagacctgccccctgcctagtttccagatggcttcccagttacgactcttcgatccccagctgaaagagaagccagaagaggagtccttggccgcacccacgtggctggttcacctgcagcaggtggagcggcagattaaggagggggctggattatgcatcagtggggacaccccccgc

SEQ ID NO: 94303 - DNA, 287 bp, Homo sapiens
gtggggctttgtgcctgtggtggtccaacgcgtcctcacctgagagccgttgttctccttcctgttcctgttgacccaaacagaccgtggtagggaccgacattgcggagcttctgttacgagaccacagaacagtgtggcttcctgggaagtcgcccaatgaagcaaacctgattgatttcacgaatgaggcagtggagcaggtggaagaggaggagtctggtgaggcccagctctctttcctcactggtggtccggcggctgccgccagctcgctcgagagagag

SEQ ID NO: 94304 - DNA, 542 bp, Homo sapiens
gcttcaaggggcctcttggatgcggcccacttctgctacctcatggcccaggcgggatttggtgtttacacgaagaaaactacaaagcttgtcttaatcggatccaatcacaggtaaagaaccaagtcagtgtagtcctgtaagttttcctttcaaagtaaaacaaaatccttctcctttagtgaattcagaaatggccagaatcatgtctttatttgtcacgtggtgggacacacttctggatgatttgctccaaggttgactatgccaataattggccattttttccaaatcaaaataattcacttcctctacagtttgccattcttaaagttcgcaaccaacgaagcaatccagaggacggaagcctatgagtacgcccagtccctgggtgccgagacctgccccctgcctagtttccaggtaagcaggtgctgccagcctgcagctgtcatggctgggcaggcactcagtgctaacaagcttttggctacttagattgtttgaattggtatcgaaaaaaatgacgtgagagagggaag

SEQ ID NO: 94305 - DNA, 471 bp, Homo sapiens
ttcccagttacgactcttcgatccccagctgaaagagaagccagaagaggagtccttggccgcacccacgtggctggttcacctgcagcaggtggagcggcagattaaggtacagccttggcttggggtggcacagaggcgtctggcaaggtggcttctgtccctgtcatttccacactgaaagtatgtatctgtaaagacagtgtaactgcaaacgtgtgcctatgagaattccctaattccccagaaagggctttgagtgcctcctgtcctgaagtagggacacagcaagcgcggtggtggcaggcgggcagcgctgcagagcggccacaggcggcttccacagggcaggtcttgttctccctcaggagggggctggagtatggcatcaggatggagccctcccgcagcagtgtcctggcactccgagttccgagatggagcagttggacaggccaggactcagtcagc

SEQ ID NO: 94306 - DNA, 323 bp, Homo sapiens
ccccgacctccattctcctggtgtctctggatctgctccccacctccatcctcctggtgtctctgtggatctgctccccacctccatcctcctggtgtgtctggatctgctccccacctccatcctggtgtctctatggatctgctccccacctccatcctcctggcgtctctgtggatctgctcccacctccatcctcctggtgtctctgtggatctgccccccacctccatcctcctggtgtctctgtggatctgctcccacctccatcctcctggtgtctctgtggatcgccccccacctccatcctcctggtgtctctg

SEQ ID NO: 94307 - DNA, 296 bp, Homo sapiens
tctttcgttggctacctggaaagaaaaagacagaagcttatttgccagatgacaagaacaaatcggtgagtgctgtcaaatacgcacgggacgtccgaagaattgtaatgatttttctgtcactttcagagcagacctgagtaggtgtttcctgaagttttgaagtgtcatcattaatcagatgctaattctgtttaggttcagtctgctgaccttttttctttttaaaatcttggcagattgtttgggatgaaaagaaaaaccagtgggtgaatttaaatgagccagaagaggag

SEQ ID NO: 94308 - DNA, 4297 bp, Homo sapiens
  misc_feature (4295)..(4295): n is a, c, g, or t
tcgctattcacggcaccagtcatgaccaggtttgctaacagcctcccaatcaacgaccctctgcagacagtctaccagctcatgtccggacggatgcctgccgcgtccacgtgctgtggagacgagaaatggggagattggaggccgcacctcgccatggtcttgtccaacttgaacaacaacatggacgtcgagtccaggacgatggctaccatgggcgacactctggcttcaaggggcctcttggatgcggcccacttctgctacctcatggcccaggcgggatttggtgtttacacgaagaaaactacaaagcttgtcttaatcggatccaatcacagtttgccattcttaaagttcgcaaccaacgaagcaatccagaggacggaagcctatgagtacgcccagtccctgggtgccgagacctgccccctgcctagtttccaggtgtttaagttcatctactcctgccgcctggcggaaatggggctggccacgcaagccttccactactgtgaggccatcgcgaagagcatcctgacgcagccgcacctgtattccccggtgttgatcagccagcttgtgcagatggcttcccagttacgactcttcgatccccagctgaaagagaagccagaagaggagtccttggccgcacccacgtggctggttcacctgcagcaggtggagcggcagattaaggagggggctggagtatggcatcaggatggagccctcccgcagcagtgtcctggcactccgagttccgagatggagcagttggacaggccaggactcagtcagccaggagccctggggatcgccaaccctctgctggcggtgcctgcaccgagccctgagcactcgagcccgagcgtgcggctgctgccctcagctccgcagacgctccctgacggcccattggccagtcctgccagagtgccgatgttcccagtgccactgcccccggggcccctggagccgggtcctggctgtgtgaccccagggcctgcacttggcttcctggagccctccgggcctggcctcccacctggtgtgccacctctgcaggaaaggagacacttgctccaggaagccaggagcccagacccagggatagtgccgcaggaggcgcctgttggaaactcactttccgagctaagcgaagaaaattttgatggaaaatttgctaatctgaccccctcgaggacggtgccagactcggaggcccccccagggtgggatcgtgccgactcgggtcccacgcagccacctctgtctctctcacccgctcccgaaacaaagagacccggacaggcagccaagaaagaaacgaaggaacctaagaagggtgaatcctggttctttcgttggctacctggaaagaaaaagacagaagcttatttgccagatgacaagaacaaatcgattgtttgggatgaaaagaaaaaccagtgggtgaatttaaatgagccagaagaggagaagaaagccccgcccccacctccaacctcgatgcccaagactgtgcaagctgccccgcctgccctcccagggcctcctggagcccccgtgaacatgtactctagaagagcagcaggaaccagagctcgctacgttgacgtcctgaacccaagcgggacccagcggagcgagccggctctcgctcctgcggactttgtcgctccactcgcgccactcccaattccttctaacttgttcgtgccaaccccagatgcagaagaaccacagcttccagacgggactggcagggaagggcctgcagcagctaggggcctggccaatccagagcctgccccagagcccaaggttttaagctctgcagcgtcactccctggctctgaactcccctcctccaggcctgagggttcccagggaggagagctttcgcgctgtagttcaatgagttcattatcacgtgaagtgagccagcattttaatcaggctcctggcgacctccctgctgcagggggccctcccagcggggccatgcccttctacaaccctgctcagctggcacaggcctgcgccacctccgggagctcaaggctagggaggattggccagaggaagcacctggtgctgaactaggcttgccctgctgtgaacttgcacttggagccctgacgctgctgttctccccgaagaacccgaccgacctccgcgatctccgtcccgcccccagggagacacagcagtgactcagagctggtcgcacactgtgcctccctcctcaccgcccatcgtaatgaattattttgaaaattaattccaccatcctttcagattctggatggaaagactgaatctttgactcagaattgtttgccgaaaagaatgatgtgactttcttagtcatttaggatgatttaaggatatagtattcctggtcatttaagaatgttcattcattgaagccggagctgtctctgccacaggagagccacatggtcggtagtaaccagggcctctccaagcccagctgtgagtcactgcccagtgagtcccgcgcttcctttaaggtgctgggagcaaagagagggtgactgaggcagaccccaacccctgctctgcaccatctgggccctcgccgtgtttgaacctggctgaatgagtggagggcgctgtgttctcaatcagcgcctccgaggagccgtggggttccttcggcattagttcacggtttttgagagaggccttagttactgcagtgaatttctttcctgttgcaaagacgcttccagcctcactttactttctgtggcctgatgaggaccatgggtgattttgtgtacccaaagcgctggggactgcccaccgtgtggcccagtcactgggaaggagccccagagagccggctgtctgacatgatggctcagggtggtcatccaggttgaaaactgaccgtgtgatgtttgatttgggcttcatttcgtgtgtaggagcacggttagactcactgttaaggaagctggatgcacttctctaaaaggctgcactttccgtgagcacttttcgtggtacaatccacatgacccactttctcccctgggggacgttggttcagaggttggtagcacttggggagagtatcttaacacagtttcttgacagcagctctggaacttagtatttctgccccgagttttgccacactgagactttgagtagctcctggtggactcaaccctgttcaactcagagacgggcctcctctcactgatgcaaagctttaaggcttctctgactgttctgaaactcttcgtattcttgtcaagtctaaagagactgaagaaaagatttaaatactaataaaaatcagtagataatttctgtaggttctgctggaggaatacaaactgtttggtgttttaaatttaagtgtagaaattgtagaatgtggaattagcacagatccttcctggctttctgtttcacttgatcatttagcccagaccacccaggatgttttccaaaatgttccacaggcgtgtcccgctggatccatttgtccttgtcacttggagaaaggccagtccctgtgacggggcagccctctctgtccctcggtcagctcgtgtgaatcctgggacctcttccggtcggctctgcccgctgttctggggtcgactgccacgacttttgattcaagaagcttcctccaggcgggagcggctatttttcctaaatgagaattgttacattgcaaattgttgaataaaatattttgcgctccttcaagcaaaaaaaaaaaaaaaaaaaaaaaaaaaaaaaaaaaaaaaaaaaaaaaaaaaaaagaaaaaaaaaaaaacaaaaaaaacaagaaaacaaagaggaaaaccaaaccacaagaagcaatcacgacagcgcagacagcagacgacacatataccggcgcgggcactaccaagatcaacgtcaataccggcttccacggagcaatccccgcgccagaacaggacaccattactactgaggcaatcgacctacgggcaccaaaaccctacggagagtaagaaccaacgatcatctaccagatgtgaaaaaggagcaccacccgcaggatgcagacaggagacaggacaaaagccgtggccagaccacgggaacgccacggcctaaccggcaactcgggatgagatgaaaaatattgacccacgggagctgtatggttcgacacccagtgaaccggcgagccacagaaaaacactgagccggaagaatcatatacaacatatcacagccagaacagaaaacaccacagcacagagganat

SEQ ID NO: 94309 - DNA, 3716 bp, Homo sapiens
tcgctattcacggcaccagtcatgaccaggtttgctaacagcctcccaatcaacgaccctctgcagacagtctaccagctcatgtccggacggatgcctgccgcgtccacgtgctgtggagacgagaaatggggagattggaggccgcacctcgccatggtcttgtccaacttgaacaacaacatggacgtcgagtccaggacgatggctaccatgggcgacactctggcttcaaggggcctcttggatgcggcccacttctgctacctcatggcccaggcgggatttggtgtttacacgaagaaaactacaaagcttgtcttaatcggatccaatcacagtttgccattcttaaagttcgcaaccaacgaagcaatccagaggacggaagcctatgagtacgcccagtccctgggtgccgagacctgccccctgcctagtttccaggtgtttaagttcatctactcctgccgcctggcggaaatggggctggccacgcaagccttccactactgtgaggccatcgcgaagagcatcctgacgcagccgcacctgtattccccggtgttgatcagccagcttgtgcagatggcttcccagttacgactcttcgatccccagctgaaagagaagccagaagaggagtccttggccgcacccacgtggctggttcacctgcagcaggtggagcggcagattaaggagggggctggagtatggcatcaggatggagccctcccgcagcagtgtcctggcactccgagttccgagatggagcagttggacaggccaggactcagtcagccaggagccctggggatcgccaaccctctgctggcggtgcctgcaccgagccctgagcactcgagcccgagcgtgcggctgctgccctcagctccgcagacgctccctgacggcccattggccagtcctgccagagtgccgatgttcccagtgccactgcccccggggcccctggagccgggtcctggctgtgtgaccccagggcctgcacttggcttcctggagccctccgggcctggcctcccacctggtgtgccacctctgcaggaaaggagacacttgctccaggaagccaggagcccagacccagggatagtgccgcaggaggcgcctgttggaaactcactttccgagctaagcgaagaaaattttgatggaaaatttgctaatctgaccccctcgaggacggtgccagactcggaggcccccccagggtgggatcgtgccgactcgggtcccacgcagccacctctgtctctctcacccgctcccgaaacaaagagacccggacaggcagccaagaaagaaacgaaggaacctaagaagggtgaatcctggttctttcgttggctacctggaaagaaaaagacagaagcttatttgccagatgacaagaacaaatcgattgtttgggatgaaaagaaaaaccagtgggtgaatttaaatgagccagaagaggagaagaaagccccgcccccacctccaacctcgatgcccaagactgtgcaagctgccccgcctgccctcccagggcctcctggagcccccgtgaacatgtactctagaagagcagcaggaaccagagctcgctacgttgacgtcctgaacccaagcgggacccagcggagcgagccggctctcgctcctgcggactttgtcgctccactcgcgccactcccaattccttctaacttgttcgtgccaaccccagatgcagaagaaccacagcttccagacgggactggcagggaagggcctgcagcagctaggggcctggccaatccagagcctgccccagagcccaaggttttaagctctgcagcgtcactccctggctctgaactcccctcctccaggcctgagggttcccagggaggagagctttcgcgctgtagttcaatgagttcattatcacgtgaagtgagccagcattttaatcaggctcctggcgacctccctgctgcagggggccctcccagcggggccatgcccttctacaaccctgctcagctggcacaggcctgcgccacctccgggagctcaaggctagggaggattggccagaggaagcacctggtgctgaactaggcttgccctgctgtgaacttgcacttggagccctgacgctgctgttctccccgaagaacccgaccgacctccgcgatctccgtcccgcccccagggagacacagcagtgactcagagctggtcgcacactgtgcctccctcctcaccgcccatcgtaatgaattattttgaaaattaattccaccatcctttcagattctggatggaaagactgaatctttgactcagaattgtttgccgaaaagaatgatgtgactttcttagtcatttaggatgatttaaggatatagtattcctggtcatttaagaatgttcattcattgaagccggagctgtctctgccacaggagagccacatggtcggtagtaaccagggcctctccaagcccagctgtgagtcactgcccagtgagtcccgcgcttcctttaaggtgctgggagcaaagagagggtgactgaggcagaccccaacccctgctctgcaccatctgggccctcgccgtgtttgaacctggctgaatgagtggagggcgctgtgttctcaatcagcgcctccgaggagccgtggggttccttcggcattagttcacggtttttgagagaggccttagttactgcagtgaatttctttcctgttgcaaagacgcttccagcctcactttactttctgtggcctgatgaggaccatgggtgattttgtgtacccaaagcgctggggactgcccaccgtgtggcccagtcactgggaaggagccccagagagccggctgtctgacatgatggctcagggtggtcatccaggttgaaaactgaccgtgtgatgtttgatttgggcttcatttcgtgtgtaggagcacggttagactcactgttaaggaagctggatgcacttctctaaaaggctgcactttccgtgagcacttttcgtggtacaatccacatgacccactttctcccctgggggacgttggttcagaggttggtagcacttggggagagtatcttaacacagtttcttgacagcagctctggaacttagtatttctgccccgagttttgccacactgagactttgagtagctcctggtggactcaaccctgttcaactcagagacgggcctcctctcactgatgcaaagctttaaggcttctctgactgttctgaaactcttcgtattcttgtcaagtctaaagagactgaagaaaagatttaaatactaataaaaatcagtagataatttctgtaggttctgctggaggaatacaaactgtttggtgttttaaatttaagtgtagaaattgtagaatgtggaattagcacagatccttcctggctttctgtttcacttgatcatttagcccagaccacccaggatgttttccaaaatgttgccagtccctgtgacggggcagccctctctgtccctcggtcagctcgtgtgaatcctgggacctcttccggtcggctctgcccgctgttctggggtcgactgccacgacttttgattcaagaagcttcctccaggcgggagcggctatttttcctaaatgagaattgttacattgcaaattgttgaataaaatattttgcgctccttcaagca

SEQ ID NO: 94310 - DNA, 2524 bp, Homo sapiens
tcgctattcacggcaccagtcatgaccaggtttgctaacagcctcccaatcaacgaccctctgcagacagtctaccagctcatgtccggacggatgcctgccgcgtccacgtgctgtggagacgagaaatggggagattggaggccgcacctcgccatggtcttgtccaacttgaacaacaacatggacgtcgagtccaggacgatggctaccatgggcgacactctggcttcaaggggcctcttggatgcggcccacttctgctacctcatggcccaggcgggatttggtgtttacacgaagaaaactacaaagcttgtcttaatcggatccaatcacagtttgccattcttaaagttcgcaaccaacgaagcaatccagaggacggaagcctatgagtacgcccagtccctgggtgccgagacctgccccctgcctagtttccaggtgtttaagttcatctactcctgccgcctggcggaaatggggctggccacgcaagccttccactactgtgaggccatcgcgaagagcatcctgacgcagccgcacctgtattccccggtgttgatcagccagcttgtgcagatggcttcccagttacgactcttcgatccccagctgaaagagaagccagaagaggagtccttggccgcacccacgtggctggttcacctgcagcaggtggagcggcagattaaggagggggctggagtatggcatcaggatggagccctcccgcagcagtgtcctggcactccgagttccgagatggagcagttggacaggccaggactcagtcagccaggagccctggggatcgccaaccctctgctggcggtgcctgcaccgagccctgagcactcgagcccgagcgtgcggctgctgccctcagctccgcagacgctccctgacggcccattggccagtcctgccagagtgccgatgttcccagtgccactgcccccggggcccctggagccgggtcctggctgtgtgaccccagggcctgcacttggcttcctggagccctccgggcctggcctcccacctggtgtgccacctctgcaggaaaggagacacttgctccaggaagccaggagcccagacccagggatagtgccgcaggaggcgcctgttggaaactcactttccgagctaagcgaagaaaattttgatggaaaatttgctaatctgaccccctcgaggacggtgccagactcggaggcccccccagggtgggatcgtgccgactcgggtcccacgcagccacctctgtctctctcacccgctcccgaaacaaagagacccggacaggcagccaagaaagaaacgaaggaacctaagaagggtgaatcctggttctttcgttggctacctggaaagaaaaagacagaagcttatttgccagatgacaagaacaaatcgattgtttgggatgaaaagaaaaaccagtgggtgaatttaaatgagccagaagaggagaagaaagccccgcccccacctccaacctcgatgcccaagactgtgcaagctgccccgcctgccctcccagggcctcctggagcccccgtgaacatgtactctagaagagcagcaggaaccagagctcgctacgttgacgtcctgaacccaagcgggacccagcggagcgagccggctctcgctcctgcggactttgtcgctccactcgcgccactcccaattccttctaacttgttcgtgccaaccccagatgcagaagaaccacagcttccagacgggactggcagggaagggcctgcagcagctaggggcctggccaatccagagcctgccccagagcccaaggttttaagctctgcagcgtcactccctggctctgaactcccctcctccaggcctgagggttcccagggaggagagctttcgcgctgtagttcaatgagttcattatcacgtgaagtgagccagcattttaatcaggctcctggcgacctccctgctgcagggggccctcccagcggggccatgcccttctacaaccctgctcagctggcacaggcctgcgccacctccgggagctcaaggctagggaggattggccagaggaagcacctggtgctgaactaggcttgccctgctgtgaacttgcacttggagccctgacgctgctgttctccccgaagaacccgaccgacctccgcgatctccgtcccgcccccagggagacacagcagtgactcagagctggtcgcacactgtgcctccctcctcaccgccccacaggcgtgtcccgctggatccatttgtccttgtcacttggagaaaggccagtccctgtgacggggcagccctctctgtccctcggtcagctcgtgtgaatcctgggacctcttccggtcggctctgcccgctgttctggggtcgactgccacgacttttgattcaagaagcttcctccaggcgggagcggctatttttcctaaatgagaattgttacattgcaaattgttgaataaaatattttgcgctccttcaagca

SEQ ID NO: 94311 - DNA, 342 bp, Homo sapiens
atcatgtccggccggcttttttcttttagctgagccagcatggggtctttctgtgtttatgtctgcctaggtttgctaacagcctcccaatcaacgaccctctgcagacagtctaccagctcatgtccggacggatgcctgccgcgtccacggtgagtggcactgcctggtggcttgcacaggctccactgcctgtgtggagtttgctcgtgggtgacgctgtcacaggccgtgaggtgcctggtgagcccagctgtgtggaattgaaatggcgctggcttccggggatgaggcttcgttttgtttttcctcatgttagtgctgtggagacgagaaatgggg

SEQ ID NO: 94312 - DNA, 312 bp, Homo sapiens
tgtgcccacgaagtgggaagatgttcagccttggtttctgcagatcatgctggtgtggcggtagctgggtgggaaggtggtgtgcctgttgatctgtgcgccacacacacgtcccgccttctcgtgactgagatcatagttgctctctttcccgttgacagggatagtgccgcaggaggcgcctgttggaaactcactttccgagctaagcgaagaaaattttgatggaaaatttgctaatctggtactttgtcacattttcttaaactgtttgttttccataaagttcatcgagtgggcacccagactcct

SEQ ID NO: 94313 - DNA, 720 bp, Homo sapiens
gggcctgggtcgtggcctcgccgagtgagtgtttccccggtcaggatgctctcctttggaaggaagattgctcctttctgatcaagcatgagaacgttggtttgaggccggggcgggtgcagcagtgacctgcggccaatgtgggagggaggtgaacgaacgcttcatcttctgcctgtccaggcaccagctgcagccgtggctcagcagaaaggcttgcagcgacccttccgcctgcaaatgagagccctgggcctcgtgtcatggctggagccttagagctgcagccgtgggcacctcctcaccacctcgcacgctcggtgccacctcagtgctgtgtgcaccttcccattgcatgttccggtgcttaaaacattggctctgcacgttgctttgattttcaccatttttctctgaaccattaaataactaaatccagtgttgcaagaagtgtcttggatctgcttctgtagcttatgtaaaagtactgtaaatcccacccagaagcggtgtctgtatctgcacttgaagtgacagctgctgtgcagcgcagccctgctgaggtgacttctctgtgcttctcaggctcctggcgacctccctgctgcagggggccctcccagcggggccatgcccttctacaaccctgctcagctggcacaggtgagtgactcctacctttccctacgagaccctaacacgcccactgacgacctgacc

SEQ ID NO: 94314 - DNA, 240 bp, Homo sapiens
aaaagaaaaaggaaagtttacgggaattatagaacagcttcaacagagcaaatgtacatggtataggaattaagaagagagagactaaaggatagaaagcttatttaaagaaataataacagaaaatattccaaatccagggaaagatgtatatatatccagatacagaaaagaaaaaagtctacaagcagactcaatccaaacaagactacatcaagacatattaaatcagactgtgaa

SEQ ID NO: 94315 - DNA, 534 bp, Homo sapiens
agaggtttggggaggctctgctgtactgggactggtggcttgcacttgttagggtaatagctaatcccttcagcccatggcttttgtggctaatgtaatgctacatttccagttattttggggagagtgtgagtgacccagggtccagtcacatatgtgttcccctgggttgaggttgtgctccaagccaaaaccccctgaggcagctgccagtgcctaccacactgagaagccaagccaagaggctggaggggattgggggcaatgggtgagtgtctgtttcaaacctggttagtcactaaatttgcttcaatgactcctgcaaaaattgaggaaacacaaatctataagtaggagaatcttctggaagcctgctcatgaattctatgcaaagatgtcacagtctagtttaactttgtagaataatggtaagatgatagtcataggataacataaacaccattaacaaccctagtgagcttttttttggtcaaggtttcacagcacatgaggctaggatttatctgttgactg

SEQ ID NO: 94316 - DNA, 237 bp, Homo sapiens
aattgtgtcagcatcgtcatgtcatgctcatgttttcccttccagctgtgctgtgggcagtgtttagttcatgtctgctttgctggcgggccgagtagcaacagctgcagttggtgtgttctctgaaggcagtatccgaaggctggaggggttgcttttcttcccaggtgtcttttgaagaggcagtcaagtcagcagctcgcggtgaccttctggtaacatcgtatgggctgggtt

SEQ ID NO: 94317 - DNA, 543 bp, Homo sapiens
tggagcagacacacaagaggtgccccactgtgagaacggtgtccgtccctggcaaacctctcgacccctccccgctctctcttcccttttgttcaatgcagtaatggattacaaagtgctttcaaaagacaaagtgccatacaaactcaagaaactattattagctacggagcttccccattctgtgtgccctgtggacggcccagaggctgttaacttcctgttgccagaatttggagctcctgagaagaaaggttttgagagagaccagggtcaagtgagcctctgaattcaatcagcaggaagctgcagtcctagcccgtccgagacaggatggtgccaagaggtcagagaggccattccttcgttttccacgggcaggacagggactgaagtaaccagccaggagcggggtgggcagtggctgagctggggctagaacccccaggctccggctgccccctggaaacttcccactccacccttgttgccgctcctgggatcttttggtttgaaaaaaaaccctggggtttaaagtcaacc

SEQ ID NO: 94318 - DNA, 329 bp, Homo sapiens
cctaggaggaagtctggcagaggaagccaatttataccgggctggtgtactctccccagctcagcccccagtgtgggcctcagatgccaggccagatcaggtagcagaaagggccccagaaaaggggaagaggctagacttcatcctggctgggtgatgccgggcctgtgcagacacagcaaatgcagcacagcaaggcatgctccttcctcctgagcctcaattcagcctcagaacttctctcagaacaacccaggcagtcgctaccatagatttggccttggcacagaggacagacctgattccctcaggctttcttctttgtaaaa

SEQ ID NO: 94319 - DNA, 266 bp, Homo sapiens
ttccccctaaccttgtgagtgggccttttaagtagtaagtagtatacacctagatatggatagatagctaggtgaccaaacctaatggattaaggccatcctcgcctaggtcacttactaaagatcaggtcatatgtcatatcgttcctgtgctttttagaacgtatttgggaatgggttccagattttttttaaacacatattaaagattatttatattatgctttgtttccaaaaggttttaaggtggattaaaatataagatt

SEQ ID NO: 94320 - DNA, 445 bp, Homo sapiens
ttgctggaaatttaatttgcccagtggtagtgccaaaaataggtactttctttctgttggtgtatgattgatttatctttgcccattcctttgcttttaaccttttgacatgacctataactttgttgcagttgtatctagactaaaataattaagttattcacggtacactaatttgaacttttagttgcactgatctcataatagaatttataggtcatttgggaaaagtggtagattttagaaaataaagtatttataattttagaagtcaagtaagtttttagtaatatttgtgtacaggagaagttggtagccacatttcagacaccatgacccagaaatagcaaaaacatcaaaagttcattatttctactagataccttttacaaggcggtattattaaatgatgaataacttatatggaaatcatttatattactag

SEQ ID NO: 94321 - DNA, 799 bp, Homo sapiens
agcggaataaaagaccaaatcatctgctataagaaccaggagagtggtgactgagtctcagcacattctagggacaggagaaaagcaggtggctggggaaaaacccagtgggagtgctcacagcagagaacgaagactcagccaagctccattcgcacttcctttcccgtagcattggagacagagctcctggggctgctggtacctttgaaagggctcataggaaaagggagatccatcaactgcctccttacaaaggaggtactgaaacaaagcaacacaactgagaagaccaaaaatgtgtagaaagtcactatgcatggaatgagctggctgtttcaatattagcttctgtttgactcccacatgcaattcaaaggctcactatataacaaaaatagtctgaaattcatctttgttcaccaatccattgtggactatagaaactcagatttcctaccagttaaaatgtaagcagtaaagccaggtgcggtggctcatgcctgtaatcccagcactttgggaggccaaggcaggtggatcacttgaggtcaggagtttgagaccagcctgaccaacatggtgaaaccctgtctgtactaaaaatacaaaattagccagatgtggtgggcatgcctgtaatcccagctactcgggaggctgaggcaggagaatcacttgaacccaggaggcagagattgcagtgagcaaaaggttgcagtgagccgagatggtgccaccgtactccagcctgggcaagaagagagaaactcttgtttcaaaaaaaaaaaaaaaatgt

SEQ ID NO: 94322 - DNA, 608 bp, Homo sapiens
aggaaggcaggggaagtgcagggcatgcctgaggtctgctgagtaggtaattccaacattccaagtaggagttgggtacagagtattgaatcttagaatgaaatgtgctatgttcacctgcatcaatagctctatctaattgtatccaagttttcttgaaaggaaaactacttttaccttttttatggccaccatcatgtctagtgtagaatgtgaaagttagtgttgcccagtggaaacaggcaggcatcttgattccacatcttggctgtcactcatgagctctgtaacttcggacaaaacatctcttctatcagattatatactgaggccaggcacagtggctcaatgcctgtaatcccagcactttaggaggctgaggcgggtggatcacttgaggtcaggagttcaagacccacctagccaacatggtgaaacctcatctctactaaaaataaattagccaggcgcggtggcacatgcctgtaataccagctgctcgggaggctgaagcaggggaatcgcttgaacccaggaggtggaggttgctgtgagccgagatcatgccactgcactctagcctgagtgacaaagcaagactctgtctc

SEQ ID NO: 94323 - DNA, 926 bp, Homo sapiens
gctagtttggccctctccctccctcttcttatattccccagtggctgttgttcccatctttatgtcgaggtgtaccatatgtttagctcccacttataagtgagaacatgcaggtatttggttttccattattacaacattataataatgttgttatttctggcatagttaactggataggagttcacgtttccaggaagtttcccccttttaacattttaactaagataatgaaaatgtggcaatatacatacttcactttttgtgactgattctcagtaataaaaaaacagctgggcctggtggctcatacctgtaatcctaacactttgggaggcccaggtgggtggatcgcttgagctcaggagttcaagactagcctgggcaacgtgatgagaccccatctgtacaaaaaatataaaaattagctgggcatggtgtcacacacctgtggtccgagctacttgaagggtcaaggtgggaggattgcttaagcccagaagaaggaggttgcagtggactgagattgtaccactgcactccagcctgggcgacagaatgagaccttgtctcaaaaaagaaaaacagaaaaaattcaaaaatcatatttctggtaatcgatacaccattgctggatattaaatattaataaatattttttcacgatttttattttgtagatggtcatttgattaaaatgttaggtaaagtagagcaattcagaaatatttcacctaaaatcacagcgctttgggaggctgaggcaggaggattgcttgaggccaggagttagagaccagcctacgcaacatagcaagaccctttctctacaaaaaataagtttaaaaaattagctgagtgtagtggtgtatgtgcctatagtcctagctactctggaggctcaagcaggagaatcagttgaaccc

SEQ ID NO: 94324 - DNA, 413 bp, Homo sapiens
ttctctattgggcaacccaacaccggaatctgaccaattcctcaatcactttcatattaaaagtttttttctgatagccgatagtctttcaagccaaaggaattagtcaagactctaggacatagtctttagataaactgggaccatcttctgtgaagccctgctataaaggaaagaccctgagtaaagaaacttcctcgttaactttacaatacagtctcacctctatgcattcctctatcaatcctttattcatgccatcctttttactaaaatcgagaaaaaggaaattgagttgttaacctcacatacacacaaaaaaatcacatggcactactgaaaacaatacaatggacttcacagcagtatattattttaaaaaacaatagaataaccttagttgttatgtctca

SEQ ID NO: 94325 - DNA, 415 bp, Homo sapiens
gtctgaatacctgtaacaaaacctctgttttttccttatggaactccaagagtgtaaacaggcaaatttcacttcagatcttaagctgcttgcttgtattgtgttacctgatttttttccaactaaaatagttattacaacagaggctactcttgtatgtttaaaataagaaagagtgtcatttagacacttacagaaatgtctttgtaaaaaagaaaaaaaaggtgcactgtaaaaacatggtctaacctcataataattctctcatggagacccaggatacagtgtagattctgctcagagctcaaagattgagttaaaagatgcagagtaaaattagaactacctattaaataaaattggttttcttacacaattctatgatagaattatataattttatgtttaacttggc

SEQ ID NO: 94326 - DNA, 780 bp, Homo sapiens
agtccggggctagggactgggggagtttagacaagaaagcacagaagaagccccaggaagtgatgggagtaggagacagacaaagagggtgtttgagaaatgtttctataggcaaagtatctcctgcatgggactaaagagacataaaggacgggagcaatttttgaaaatacaagtggatgctagactgcgtttctttgaacatcacatcagcctgagaccagcccacatgaatcatggcttcaaaggggtgacaggttaatctggcagcagaacttatggaggatgatcagaaagagtagaagaaatatagaggtgaagggatcattggaatagacttggacttggggactgaatcactgcagagggataaagaaggaggaagagtcccaggtttcagtgcagaatagtcacataggggatgggagatgagactcagcttggatgccttcacctctttgtagaggttgtccagagcaccgtgttgaaaaacattacgaggtcaatctgggaaaatgttatggccaaatggagatctttgccatgagctgcggagctagctctgcctttattgaccctgaacttagggaataacagcattgttgacggcattgatggcttaaggacatcagcatggaagctgggtttctggaagagagaatgaacttggctgaaactgaagcaatgcacaccgcttttgctatttgtttttgttttgtttttttctttttttccaccatcgatgcattttaaagttcccagatttgtactccagtacca

SEQ ID NO: 94327 - DNA, 533 bp, Homo sapiens
agtagtgatgatgatcacacttgcacctttagtatagggccatggtgagaattaagtaagatgatccaggtgcctggtcagggtaaatactcaaatgaggccgggcgtggtggctcacacctgtaatcctggcaatttgggaggatgaggcaggaggatcactggagcccagaagttcaggccagcctgagcagtgtagcaatacctcgtccctatttaaaaaagaaattaaagagaatatcaggaagaatagctaatgcatgctgggcttaatacctgggtgatgggatgatctgtgcggtaaaccacaacggcacatggttacctgtgtaacaaacctgcacgtcctgcacatgtacccctgaacttaacagttggaaaaaaaatttgcaaggtgtggtggcgtgcacctgtagtcccagctactcgagaggctgaggcaggaggatcacttgagcctgggggggtcaaggctacagcagtgagctgtgatcatgccactttactccagcctaggtgacagagtgagatcc

SEQ ID NO: 94328 - DNA, 833 bp, Homo sapiens
agcggggtagcaggcggaagtgcggccctcgaggcggtcgcggcctgtcggggcttggagcgaatggctccaaggccgcaggctgggcctgggccgcagccgtgggaagccgacgatgcctgaggcgctctgccctcggcccaccctaggaacttgtatgaccgcaggaaaggatcaggagaggccgctgcccgtctcccaccggctctaggctccctcggccgaccgatgtggggaaggggaaggggcccgcgccgaggctctaggggaggctcctaggccgggttctctgacttaaggccctcttggctgtggttttgcgggagtgagttgagggagctgcattcactcaagtccctcacatgcccgagggcccgggaatcgtgaagccgggcctgcggacccggtgggaggaaggagtgcgaagcgcggccgccgtgctcggccggcgccgggctaggtcgggcggtggggaccgcgccggcataggacaacgcggtggagggaagcacctgcccccggccaccttgactcagggccgccgcgcccctcctgggccatccgcgcgggggtctcaggatggcgaaacccgggacctcgcggccctctagtgctcccctgccagggtgcgacctaggtaccctttatcgagccccactccccaaggcagagagagttcgacgttcccaaggagggagtctccatggaggaattcgtcctgcttcacttccagagttgaaagcccgtcggttctgcaaagaggagcagtcgggcgcgggctagcaagcagctgatgaaaataattgtcctcgcacacacagccctgcgcccag

SEQ ID NO: 94329 - DNA, 1816 bp, Homo sapiens
cttggacatggctttaccgagaaataaatgaattaataagcataaactctaggccatacttaggtcaaaataagtgaagttacagtgagctcctcagattcttctagaaagtaaacaacccatcaatctttaatactaagtcatctgaatatgaactagcatcctaaaagtgaaaagctctaatggtacattacaaattcctgagtcattttgtcctcacaactttatgctttaaataaaactggctaaagaaaatctacaagtgactcagtatgacttagtgtttccaaaccaggaaaaggaaggactttcagtgtttgagataaggtttttttctgtagtttggaaaataaacatttcctattcagttatgcccaggggcagggtgtgtgtgtgtatgtgtgtatgtgtgtgtgtgtaggggaaggagtgtctgtgtgagtatgaaaagagaagaagagcaggaacgagggagtaagacagggaaggagagagggagaagggagagaaagagagggaaaaggagaaaaagagatttttttaatcagtatttggtgttcacgtaaaatggttactttctgcaaaagttacctcagcaaattatgtgtaagcaagccatggaagcactgcaatttgtaataaaatcaatgggaatggcttacctgactgtatatagtagataatccttatctatggggaatacattccaagacccccagaggatgcctgaaaccatggacagtaacaacccctaaatatactattatttttcctatacatacctacaataaagtttaatttataaattaggcacagtaagtgattaacaacaataactataataaaacagaacaattatactgtaataaaagttatgtgaatatggtctctctcttggtttctctgtctcaaaatatcttatcgtgttgtaccatgggtaactgaaactgcagaaagtgaaattgcagataaggggggattactgtattgcattctgtactgcatttccatgaattcagtgacacacagtgatgtattccatgtcgttatagcaaataataatcttaggtgtctaaattagactgaattttttatttcaataggcataagccattttctgcacctaaatgaaagtagcattttttttcctgatataaaaatgggcagatttttgtcctggtgtcatgctaatataaccccagaggtggcaagcatagtggctcaagccagtaatcccaggactttgggaggctgagacaggaggatcacttgaagccaggagtttgagataaccccagaattatctactttatttaaagtacattttagctgggcagtggtgtgcatctgtagtcccagatacttgggaaagtaaggcagaaggatcgcttgaacccagaagtttgagaccaggcaggacaacacagattcagtctctaaataaataaaatacctaagaacactcagagtggctgaaaatgtgttcagcaaaatctgttccactaatgtccctaataacgtcagtagagactagggattaatgagactaccaataaacacacatacacacacatgaacatacacacaatgtttactatcttgttttctgttataaggattgctaaatatttttgtatgatatagacagttacaatttatattttttagagaattcatagaaataatccttaaaatatttagagattggtactcctttgtcagataaataaatgcaaaagtgaaaattatttcaaaccaatagcacatatatcccatgatatccacaatggttttattttatccatcacttgaaagt

SEQ ID NO: 94330 - DNA, 1263 bp, Homo sapiens
gtcttctaaattttagttataaaatacattttaattatatgtcaacaatttgcctcaaccctaatctcaaatatctagaacagctatatcacattatctaaacatgagtaaaagctgagtttctgctttagagaaaacatctcagaagatgtttagagacccccagaggatgcctgaaaccatggacagtaacaacccctaaatatactattatttttcctatacatacctacaataaagtttaatttataaattaggcacagtaagtgattaacaacaataactataataaaacagaacaattatactgtaataaaagttatgtgaatatggtctctctcttggtttctctgtctcaaaatatcttatcgtgttgtaccatgggtaactgaaactgcagaaagtgaaattgcagataaggggggattactgtattgcattctgtactgcatttccatgaattcagtgacacacagtgatgtattccatgtcgttatagcaaataataatcttaggtgtctaaattagactgaattttttatttcaataggcataagccattttctgcacctaaatgaaagtagcattttttttcctgatataaaaatgggcagatttttgtcctggtgtcatgctaatataaccccagaggtggcaagcatagtggctcaagccagtaatcccaggactttgggaggctgagacaggaggatcacttgaagccaggagtttgagataaccccagaattatctactttatttaaagtacattttagctgggcagtggtgtgcatctgtagtcccagatacttgggaaagtaaggcagaaggatcgcttgaacccagaagtttgagaccaggcaggacaacacagattcagtctctaaataaataaaatacctaagaacactcagagtggctgaaaatgtgttcagcaaaatctgttccactaatgtccctaataacgtcagtagagactagggattaatgagactaccaataaacacacatacacacacatgaacatacacacaatgtttactatcttgttttctgttataaggattgctaaatatttttgtatgatatagacagttacaatttatattttttagagaattcatagaaataatccttaaaatatttagagattggtactcctttgtcagataaataaatgcaaaagtgaaaattatttcaaaccaatagcacatatatcccatgatatccacaatggttttattttatccatcacttgaaagt

SEQ ID NO: 94331 - DNA, 228 bp, Homo sapiens
gcacttgccaaggcggccctcaggagtggcactggctcactaggctctgagccttcctaccttcgtgctcaggcgcagccatggtttggggcctggtcaagaacaaagaagcaggtgaaactctgggacccactgctggccttctttcctagggtgctggggagtgacgtagggcaaagatccctgggcaagtgagggcacaaggtgtcaaaaaggcaccttccctag

SEQ ID NO: 94332 - DNA, 839 bp, Homo sapiens
aacaggtgctctgataccagtggacgtcagagtagaacatccgtttctgcagtgatcaagcagggcctctgacaagtgagttttgctgacgagaaggggttaaccctagaagaatcagtgatcagtcagttccagcaagaacagcccagtctgggcacgaaagggttcaccttctaagggggcacccggagtgctgtggccacagcccagagcggggagagggagtgggtgggggggctccaccaaagtctgtgtccttccagaacattaggagggcggggaagggttttgggcctcagctacctgagtatccctctcccattgtaaatagggagggctatgcctaccccgggtcccaaggagaaggggtgccaagatgtgctgattagttcagttctgtgccttaaaagttagcctgtcttctctaggcaggcaatccttctctgcagcagaagaattgagtctttagtttttctgttgttgatgaacacaggtatccctggtggggcactctatacctgccctaaccaggactgctggggttttcattccagagtggccagaaagggtcaaggcagcagacaggcatcaggggttagctgtgaccttttgttcctattattagatcctcagcagccatctgtcccattagcctccagcttgtggtggtgcttgggcctcaccaactcctggtacctggccagggctagggtgtggtcaggctgttgcccaggagcccagttaccaacctcagggtagggctgccacctcccagcctagaaggccatgagtcacccttccaccagcagctgagggtccccagcgagtttctaaaatta

SEQ ID NO: 94333 - DNA, 894 bp, Homo sapiens
ctcccctctctaggaccagcaataaggagcttcggcacctgattgaggtctccgtggttttatgggctgttgctctgaccagctggatcagtgaccgtctgctttgcagcttctggcagaggattcatttcttctatctgcacagcatctggcatgtgctcatcagcatcaccttcccttatggcatggtcaccatggccttggtggatgccaactatgagatgccaggtgaaaccctcaaagtccgctactggcctcgggacagttggcccgtggggctgccctacgtggaaatccggggtgatgacaaggactgctgagacctgccagcctcttgactatccaaccacccaacaacttgcctgtgtcttgagaagatagccccggtcaggacttgcacctgcgggacactcgtggttccttcctctgtttccccttccgtgtcctccttgtcctgcgctgccctgccttgaggcagatgatggactttgtgacatctctgagcagcagcctggtgactgtggggggctgtctcgtgcatctcccctccatgaccccccccatcctctttcatttcctcctctgtgtccacagcctcccagtgaccattgtcacatgagctggtgggactgtgtcaccaggtactggggtgactgaaggatgtggcatctaaatattagcttctaggctgggaacggtggctcacgcctataatcccagcactttgggaggccgaggtgggtggatcacctgaggtcagaagttcaagactagcctggccaacatggcaaaaccccgcctctactaaaaatacaaaaattagccgggcgtggtggtgcatgcctgtaatctcagctacttgggaggctgaggcaggagaatcgcttgaaccca

SEQ ID NO: 94334 - DNA, 2286 bp, Homo sapiens
atgagagcgagctccagtggcagactctagtttctggaataagagcaatacttttaccttcacaggtttgagcctgttgtttgctatattttataactcgttaagagttttttttaatgcactggtatcttgaaggagttcttttcctctggcagtagacctctggttttataatggaaatctttgaacaagtaagatctgcttagatttacattcatctttggtagagtaaacctcatctctaaattaaagagtttgtaatttcttacctttatgattagaatgaaaattcttggagagggcctaatccacatgtcagtttttaaagcttaaagacaaaagacaacactggcatttgtgttaatatctgcatttaaatatatatcatacacacacaaacacacacacacacacacacttagctatatggaaaaaatggatccctaccttacagtatatgcaaaagtcaattctagatgggaaattaaactttaaaaatttttaaagaaaatacagggcaatatctttatgacctcagagtaaagagggatttcttaaacaagaactacagctcataaaggaaaaagttggtttattttattactttaaggaaaaaaaaccttctatatatcaaaagacgtaaagaaatgaaaagccaagccacacagtacagctactttggaattatctttcagaattcatgtgtacaccctacagcgctgcaattctacccctagtcataggccctggagaaactgcacatgtgaaccaggagacattcagaagaatgtttattgcattttcataatagcaaaagactgggaataatccagtgtccatccacaggaaaacagttacattctggaatagaatattttgcagcagtaaaaataattgaacgaacagctacttgtgacagtgtgaatcaattttagaaacaaagttgagaggaagaatctaatagcagaagactgtatatagaatggtaccattttaataaagctcaaaaataaaactaagatctcatttagagagatagatggcaaaattctttttaaaagcagaggagtgacaaaacacgaaattcagcatagtggttaagagaagcaggagagacgaggaggagtacatgtttagctttaataatattggtattccttggttcttcagttgaactcgtggctattcattttcatgattatgcattataatttgataatgtatgtaattaacagatgtatgtatgtgacatatttacttttgggtaacaaatactacttcattaaaaaaatcacaataaaaataacaagcgtcaatctgggagaagatacttgcagtatacaaatatcttaaacagattaatgtcctgaattcataaagaattcctatgaatcaataagaaaaaggacaacacaacttaaaaaatactaatggacaaaggatctgaataggaattcataataaaaacctggatggctaattaaaatatgaatatgtgctcaaccctacttgaaataaagtaaatgcaaattaaaacaagatcccagccatgctggcacatccctacagtcccagctactcaggaggctgaggcaggagaatcccttgaggccaggatttcaaggctgcagtgagctatgatcataccactgcactccagcccgggtgacagagcaagaccccatctcttaaaaagaaaaaaaaagagatcccatttcatattcatcagattggtaaaaataaaaaaaaatctgacaaagccaagtcttgatgagatatggagtaccagaagctaatccccaccggggttggtttaaatagggactaactactttggaggacatggaagatacctcaagtttaaatgcttataacccaaggctcagcaatattctagttaatactctagaggaatgcttgcacagtgcccaagaaggtattaaaagaatgtttattcaggtgttatttgtcatagtgaaatactggaagcactgtaactgtccattacagaagaacggataaaaactattgtgactaatttatataacagtatagcatacggcagagaaatgagtgaactagagctacatgaataaatctcaaaacgaatgttaagacaaacaaggccggttgcggtggctcactcctgtaatcccagtactttgggaggctgaggtgggtggatcacttgaggtcaggagtttgtgaccagcctggccaatgtggtgaaaccctgtctctactaaaaatacaaaaaattagccaggtgtggttcatctcaaaaaa

SEQ ID NO: 94335 - DNA, 1226 bp, Homo sapiens
gcccaatctttaagaaataatgatctctcggttagctcttttcccacatatattggacatctttaatttttttgccatctgtgaaaattctgctctgtgtaagtattttactagtcacaatttatgggtatagtttggaaaatataatgcattcagagcagaattcggcacgaggatgtatgtatgtgacatatttacttttgggtaacaaatactacttcattaaaaaaatcacaataaaaataacaagcgtcaatctgggagaagatacttgcagtatacaaatatcttaaacagattaatgtcctgaattcataaagaattcctatgaatcaataagaaaaaggacaacacaacttaaaaaatactaatggacaaaggatctgaataggaattcataataaaaacctggatggctaattaaaatatgaatatgtgctcaaccctacttgaaataaagtaaatgcaaattaaaacaagatcccagccatgctggcacatccctacagtcccagctactcaggaggctgaggcaggagaatcccttgaggccaggatttcaaggctgcagtgagctatgatcataccactgcactccagcccgggtgacagagcaagaccccatctcttaaaaagaaaaaaaaagagatcccatttcatattcatcagattggtaaaaataaaaaaaaatctgacaaagccaagtcttgatgagatatggagtaccagaagctaatccccaccggggttggtttaaatagggactaactactttggaggacatggaagatacctcaagtttaaatgcttataacccaaggctcagcaatattctagttaatactctagaggaatgcttgcacagtgcccaagaaggtattaaaagaatgtttattcaggtgttatttgtcatagtgaaatactggaagcactgtaactgtccattacagaagaacggataaaaactattgtgactaatttatataacagtatagcatacggcagagaaatgagtgaactagagctacatgaataaatctcaaaacgaatgttaagacaaacaaggccggttgcggtggctcactcctgtaatcccagtactttgggaggctgaggtgggtggatcacttgaggtcaggagtttgtgaccagcctggccaatgtggtgaaaccctgtctctactaaaaatacaaaaaattagccaggtgtggttcatctcaaaaaa

SEQ ID NO: 94336 - DNA, 3319 bp, Homo sapiens
atgtgacctgttgactttgtatctgcacgtgggcacgagtgatgttcagtttgctaggcactagtcatagtgttatggacgtggtggagtgtaaggtcttgatgaattacggcagtatgcagaaaaggaaccaaggccagagagacaaataatgcctcatgtcccactgctttaaaattacattaatttataaaatggccactatgggctctttttgactgtttctcggagtaggaacaaaataagacattaaatggtggcttgaagagaaagatacacattttcagaagaaagaaaggggagggctgcagggagcctgtcttggcgggagctctccagtctgttggattagcacagggacacgcttatggtgccatgacgccgaaactagtcatcccccatctccagcataggcaacggcctgcaggggtgagtgtcagaaaagacttactttggaagaaaagggtttttttttgtttgtttgttttttgtttttttttgtttgtttgttttgggtttttttcctgaaatttcctgatacctttttcagaatgtcacccttgtaaataggcacctaaagccaagttggtcagcagagctcctgaccacggctgcctctgcgtgacaaggacatttgcagctgcctttggaaggctcttcacattaaaaaacaataattatgtaagtgtgtttcatagcttgagtcaagctttcaaggatcactgctcctttgtgcattgtgcatccctttggggaaagaaacagaaaattattctctttctatagagtcaagcaattccagcagaagtgaagaaatgttagtttcccagaaatcgcagtggaatagaatacaatactgtgttaaccaactttctgtataaatgcatcagtattcccttacatatgtctatatattttataatagaactgttagtgaaaatgtgcttgtttaagctgggtcactatgcaagagttacttccagtagaatgtagtgaatgtaattccctagtcggatattagggatgctgtagacccaagttctacattccagatgtccgtgcctatagtatactggatttattcttcatgttgcttaaatgcagttagctctggagggggatagctgcatcccttacttctgtgactagcaaaggacaaagtcccagcgcacagaatatgaaaacataccctgtgttagccaatcaagttacagcaatgctgtcacaaagggagttttagaaaactggggagtcattgtccgtagacagccattttgatttaggaaacaggtgtattagcatgagccttaggtcatgaactgcttttaaagattgagtttgaatatgggatctgtccacgaggaagagaaaatggctttacctttaggacaatctcattgtggactgctttatttatattattagtaacgctgttttaagtgttattctttttattgtattttatttataaaaaatgcctttatatattgaaatatataaatatatataaacacacacacacacacacacacacacacacacatatatatatatatatataattgcctttatatttaggcggtatgagttctccctaagcgtgagttggctctgccctgcacaggcacccaaacagtcctacctaatgtcacttcaccaggaaatgagaggacatggtacagtgtgggagacagcactaacacgtgctgaataactactgtgtaccaggcactgtgctcggtgcttgttactgttaactcatttaacccccacaactcatctacaaagttggcattaaaatccccaagtcactcagtgagccatgggacctgaatccgaacctagtttatctggagccataatctgggctcctcccatttttccatactgctttccaaaagcattgcggttcactctttggatggaaccagtcccgttccgtatgctgtgatctatccctgccgtggaattcctccgaggctccaactccgcagccggagaagctgctctctggcctccgcgggcagagctctgcttatgacttcgtcttccagaggtccacatttctccccttgacgccccctgtctaccacctccacctggaaatttgatctttactgtgctcagtgatcacgaaattggtcaagcctattcatgttccttctcatctagaattctgtgtgattgttttagcataaactgccccgctcccactgtatcatttcacgatctccttttaatgtttttctttcagttttgcactgacagtctggtgacaggtgctgccagggtgcaagttacattgcaatgttctaaaccttttgaagtgttcttagcaaaagcctttctttctgggtgtttttgtcgaatgagtctatgaagactcaatgcatccatcttgggctgatcatgccacagatctcattccagctatagtactgccaagaagtgaagtttatcattgaattttacctgtgttgctctcttttaaagtaatgactttgagatgcatgctttgtatcatattgaaaagtatgttttattttccttaaagttgtaatattgtgtgtgaaactgtacatattttaaatgatgtagctttggcaggttttatttggttgatatgattttatattaaaagagaaggctgctttcatatagcatagcccctgaaggtgggaatactccctgtttgtacaacgctgcttatagtttgtgattggggtgggcgaatgtcttcctctgaaattctttgggaaccccccacccctgtcctcccctggaaactcccctgtggcacacccctctgttctggactgcaggagatcaagggccctgaaggagcaggatcttgggcaagtgttttaggggacgctgagaacatacctgaccctgggggcgatgtggaggcaggcccacctcctcggggcaactttgcgtttccttggagggaagggaggtgggtaggagaggagcttgggaggatgaggaggagcggtcccgccctcacacattgtcctatttttacccattaaccgagcgccacatgtttatgaacttcaggatagaaatttagcctccttgtgaaaacgttttgttttactgccctaagaaaatacacatctctaggcttgtctgaccagaaagccagcaaagtcttttgcatcgggtgtggcccttttgtattttatttcccatatttaaataagccttccttaaaccctagccccagtcctgagagctttgagggtagccgaaaccccttatctaataaagtctaactctgtgagaaccacagaatcttcttaagcttctcaat

SEQ ID NO: 94337 - DNA, 435 bp, Homo sapiens
tgtgggatggacttgacccactgtggtgggctttgaagacggaggaagaggccataagccaaggaatgcaggcagcctctggaaactgggaagagcatggaaacagaatctctcctccagagcttccagaaaggagaatggccctaccaacaccttgattttagcccggtgagatgcctgtcagacttcttactttcagaactgtaagatagcatgtctgcattgtcaagctactaaatttgtggtttttgctagagcaccataggaaactattaatacactttaccacctatctgatggtttgctaagcactttcggggtgtccatcatctcacttaatctttgcaacaagcttagacatagacattattatccacattcgacagcaagctgagcttcagagaggtttaagagcttgatgagggtcacacagcc

SEQ ID NO: 94338 - DNA, 190 bp, Homo sapiens
agtgggctggaggggaaagaggtagggtatggtaatccacaagttgcaaaagaaaaggatcaagtaggataatagtcaattacatgttcacaggtaaatcagctgtttacctaagacaggtgaacataaagtagctacctgtggagatatttaaccttttatctgtagctatctgcttaggtacaaaagg

SEQ ID NO: 94339 - DNA, 767 bp, Homo sapiens
agcggctgaggtgacacttttttaaaaaaaattgtaaaaattgcatagaaagtgtccaaatatttatctttattgaaagaatttgtcttctgatatgctgtgtgagagttaaggtgatcttaatgtactttgtacctgacatgaatgtgtagttaatgcatgccaatgggtggtttgggtgatttagaataaccaactcatctcaaaaattttttacttattatctttcactcatagatttttttttccttttctgttccatttttagtaactcttctacataaaaattttttactgggctgggtgcggtggctcacgcctataatctcagcactttgggaggctgaggtgggtagatcacctgaggccaggagtttgagaacagcctagccaacatgctgaaacccgtctctactaaaaatacaaaaattagccaggtgtggtggcatatgcctgtaatcccagctactcgggaggctgaggcaggagaatcacttgaacttgggaggtagaggttgcagtgagccaagattgtgccactgcactccagcctgggcaaaagagtgagacgccatctaaataataataataataataatttattggcacagggctgctaattgtagaattttgcattagtgcttctggagggtcttgacatttacattgcctgctctatgccaggtgctatctttgactcctaacttttacaatctcatttaatacgtgaagaggttatataaaggctaatgctaatttaaaaatat

SEQ ID NO: 94340 - DNA, 760 bp, Homo sapiens
ggagtcagatgcgaggcggcggtcaggtgggatgctatggaatatgatgagaagctggcccgtttccggcaggcccacctcaaccccttcaacaagcagtctgggccgagacagcatgagcagggccctggggaggaggtcccggacgtcactcctgaagaggccctgcctgagctgccccctggggagccggaattccgctgccctgaacgcgtgatggatctcggcctgtctgaggaccacttctcccgccctgtgggtctgttcctggcctctgacgtccagcagctgcggcaggcgatcgaggagtgcaagcaggtgattctggagctgcccgagcagtcggagaagcagaaggatgccgtggtgcgactcatccacctccggctgaagctccaggagctgaaggaccccaatgaggatgagccaaacatccgagtgctccttgagcaccgcttttacaaggagaagagcaagagcgtcaagcagacctgtgacaagtgtaacaccatcatctgggggctcattcagacctggtacacctgcacaggtgggccgagacccagacgaggagtgaggaatgagagagaccaaagttcctgcctccgctgggctcacattcagatgtgagctatccagtgtggtggccactagccaaacatggccagtcaaagttaaattaactaaatatgcatttcctcgttgtactgtctacattggacagggctgttctggatgagaaattaaactagtgaattac

SEQ ID NO: 94341 - DNA, 858 bp, Homo sapiens
  misc_feature (761)..(761): n is a, c, g, or t
  misc_feature (766)..(766): n is a, c, g, or t
  misc_feature (774)..(774): n is a, c, g, or t
ggagtcagatgcgaggcggcggtcaggtgggatgctatggaatatgatgagaagctggcccgtttccggcaggcccacctcaaccccttcaacaagcagtctgggccgagacagcatgagcagggccctggggaggaggtcccggacgtcactcctgaagaggccctgcctgagctgccccctggggagccggaattccgctgccctgaacgcgtgatggatctcggcctgtctgaggaccacttctcccgccctgtgggtctgttcctggcctctgacgtccagcagctgcggcaggcgatcgaggagtgcaagcaggtgattctggagctgcccgagcagtcggagaagcagaaggatgccgtggtgcgactcatccacctccggctgaagctccaggagctgaaggaccccaatgaggatgagccaaacatccgagtgctccttgagcaccgcttttacaaggagaagagcaagagcgtcaagcagacctgtgacaagtgtaacaccatcatctgggggctcattcagacctggtacacctgcacaggtgggccgagacccagacgaggagtgaggaatgagagagaccaaagttcctgcctccgctgggctcacattcagatgtgagctatccagtgtggtggccactagccaaacatggccagtcaaagttaaattaactaaatatgcatttcctcgttgtactgtctacattggacagggctgttctggatgagaaattaaactagtgaattacnaacanaaaaaaanaacaaaattttggcggcggcgcgagaattttaaacatctgtggcgcgccaagggacatcggtcactccacaaccggcaaagggc

SEQ ID NO: 94342 - DNA, 495 bp, Homo sapiens
gaaaagggacatggcattgtgctgaaactcacaatctctgccctaaatggtgcctggaagaaataagttgaggggcttgtgcgaagggaaaggaacttcagcccagctcacctgtgaccccctccctgactcaccctctgcaggaccccaatgaggatgagccaaacatccgagtgctccttgagcaccgcttttacaaggagaagagcaagagcgtcaagcagacctgtgacaagtgtaacaccatcatctgggggctcattcagacctggtacacctgcacaggtgggccgagacccagacgaggagtgaggaatgagagagaccaaagttcctgcctccgctgggctcacattcagatgtgagctatccagtgtggtggccactagccaaacatggccagtcaaagttaaattaactaaatatgcatttcctcgttgtactgtctacattggacagggctgttctggatgagaaattaaactagtgaattac

SEQ ID NO: 94343 - DNA, 992 bp, Homo sapiens
cctagctttcctccaagaggaagctcttcagaaggaagtgaagtgacataacaaaaaagcatctggatttctcaaagaaggaagttgtcttttgaaaagcaactttcaaacattaggttttcagaggtctgtgggcaggcaggtcaggctaggagcacgcagcaccgggtggaccttgaccgtgctgccacctttcctgccctggagcaagtcctcggtgccctctgggttgagtttccttctctgggtgaggggtgtcggggtctgctctgggcctgtctcggcggatgggccttaacagggagctcctgcaggatgggcctttgactgcccccgcccccaacctgggcagggtctgttcctggcctctgacgtccagcagctgcggcaggcgatcgaggagtgcaagcaggtgattctggagctgcccgagcagtcggagaagcagaaggatgccgtggtgcgactcatccacctccggctgaagctccaggagctgaaggtgggtgtggggccgccccgccgtggggcagcctggggccgaggccagaactgtggaactaggaggaccctgccagcctctggctctctctcaggcggtggtctctctctcggcctcaggggctgaggtagaagggcacgagacaggcagggtggaagacgggccctcaccccactgcgggaggtttccctattagcctagaccctcctgttgcaaggaacagaaactcaaccctgagtagcttaagccaaaaagaaaaatgtatttgcttggtgactggaagatcctccagtgtcaggaatcttgctctcttccaactcgacttcctgtgtctgatccagcctcaggcaggccttccctgtgcggtggcagagacggtcccggcaaccacatcttgctttccaggagctgagcctccctgtgcagatgacagctgccttttcacagtggttatagcaggaacctcaggcctgactttcattggccagtc

SEQ ID NO: 94344 - DNA, 3489 bp, Homo sapiens
ggagtcagatgcgaggcggcggtcaggtgggatgctatggaatatgatgagaagctggcccgtttccggcaggcccacctcaaccccttcaacaagcagtctgggccgagacagcatgagcagggccctggggaggaggtcccggacgtcactcctgaagaggccctgcctgagctgccccctggggagccggaattccgctgccctgaacgcgtgatggatctcggcctgtctgaggaccacttctcccgccctgtgggtctgttcctggcctctgacgtccagcagctgcggcaggcgatcgaggagtgcaagcaggtgattctggagctgcccgagcagtcggagaagcagaaggatgccgtggtgcgactcatccacctccggctgaagctccaggagctgaaggaccccaatgaggatgagccaaacatccgagtgctccttgagcaccgcttttacaaggagaagagcaagagcgtcaagcagacctgtgacaagtgtaacaccatcatctgggggctcattcagacctggtacacctgcacagggtgttattaccgctgtcacagtaagtgcttgaacctcatctccaagccctgtgtgagctccaaagtcagccaccaagctgaatacgaactgaacatctgccctgagacagggctggacagccaggattaccgctgtgccgagtgccgggcgcccatctctctgcggggtgtgcccagtgaggccaggcagtgcgactacaccggccagtactactgcagccactgccactggaacgacctggctgtgatccctgcacgcgttgtacacaactgggactttgagcctcgaaaggtttctcgctgcagcatgcgctacctggcgctgatggtgtctcggcccgtactcaggctccgggagatcaaccctctgctgttcagctacgtggaggagctggtggagattcgcaagctgcgccaggacatcctgctcatgaagccgtacttcatcacctgcagggaggccatggaggctcgtctgctgctgcagctccaggatcggcagcattttgtggagaacgacgagatgtactctgtccaggacctcctggacgtgcatgccggccgcctgggctgctcgctcaccgagatccacacgctcttcgccaagcacatcaagctggactgcgagcggtgccaggccaagggcttcgtgtgtgagctctgcagagagggcgacgtgctgttcccgttcgacagccacacgtctgtgtgcgccgactgctccgcggtcttccacagggactgctactacgacaactccaccacttgtcccaagtgtgcccggctcagcctgaggaagcagtcgctcttccaggagccaggtcccgatgtggaggcctagcgccgaggaacagtgctgggcaccccgcctggcccgccaggacccaccctgccaacatcaagttgttccttctgctccggagacccctggggtgcggccctggccccctccacccctgctgggccagagcgggtgggcagtgtcaaggcccgctgtctcccaggtgcttgctgggactcggggcggctgcacctggctgtcacctgggtgtgctgctgtgaggggtccttgcgtggcccccatccttcccccaatgcagaactccatgggcagggagctggggggacatctcacctcccccatggcacagagccctccacacccctggaccagggcatccgggccctagaaattccacagctcccgtcctggccaccctggaagctcatcaggccaagacccggacagagcttcagaggagtgttgagtgacacctgaggatgcggctgcacacactcagccaagggccgagtctcacctgcggtggggtttcggctctgcctgggggctccatccctttcagccactcgtggccttggggatttctggttgtccccagctgggactgttcacagttgtcacctgcagacctgcctctccctggcctgaggttcaaaggcctcatcggatggtcagtacagtggggtcacctgttgtttctatacaacagcagggaaggggccatggagcttttccctgctgggtgctcctgctttggcccagcccacctttcctggtgctccaagctaggaggctgtggccccagcctgaggagggtgtcctggcctccaggtgtgcagcaggggctgtgtgctgggggaggttccagttaggcgatgggatcctgcagtggtctggtggcatttcttggaaccagatttacctgaggagctctgtcctgctccctgtggagggctccagatagctcagaaatgaccagccaatggccttttgtttgggggcctgaggtcaagagagctgagagtattcgctcgactgagcacattcaggaagatcagggcaggcgtgtgggaggtccctcactccacgggacagaggcccctggacagcagaggaaacctacagctctgggtgaggggacacttggctttggtgtttgcactttacagatcctgcggtccacgaggggcctcaggagaggacgtgtcaggacgtggcttcccagccttctgccttgggcagtgggggtgctcctgtctgtccttttcccccacaccctggactgtgcttggctgttggtgcacatggttggcacacggtgggcagagggcagagaatgccactgcttggttattggtcccctttgaccaggaaacccaagaggagacacctcagtcagcagaaaggccacctggctcactggctcattccaggagtgggagagacggcagggtctcctctttgtcctccggcatcaggaaggggatggtgtccactccccactgtggtggctttaggcaaggttcttattgtctgctctgcctcggtttccccatctggaaaatgggggcaggggtcctgacctacctcaggtggaacggtgagcagggaacatgtcggagtccttcagagaatgtgatgtgaggttggatcaacagtgtgggttcctgtcctgtttccccttcctctttggggctgaggaggaggttaaaggccaaatgctgtttcccaacaccccaaagtctgcacacgtctcatgaatgcatcacatttctgtcatatggatattagccattccgaaatctgtgtaatcaacttcacattattcaagttacaaatcactgtgtccatagaaaaactgtgctggtatttgctggacaaagggttgggccccttttatttttacctgccacccagcatctcccccacctgccccttctgggtgacacagccggtaaacggaatcacgtatggttctttctgtgggtctgtggcacagcaggaagagcccggtgccgccagcaccttgtggaagaccacacatgggtggtcccacagcatgggaccaggctggcctgagggatgcccagttgtaacaatgctgctgtcactgtctcattaaatatacatccttta

SEQ ID NO: 94345 - DNA, 3265 bp, Homo sapiens
cacatggacaaggacgggtggtgtcttgaaggtgacaacaaaagaaggtggtgggtcccaggccacagatgttcctgatgcagtccttgggtctgtgtgtgctttggcctggctgccctgtgtcccctgtgctgattcaggtatccctgggaatgtagaaagtagaatattcatgaggaaacaggaccccaatgaggatgagccaaacatccgagtgctccttgagcaccgcttttacaaggagaagagcaagagcgtcaagcagacctgtgacaagtgtaacaccatcatctgggggctcattcagacctggtacacctgcacagggtgttattaccgctgtcacagtaagtgcttgaacctcatctccaagccctgtgtgagctccaaagtcagccaccaagctgaatacgaactgaacatctgccctgagacagggctggacagccaggattaccgctgtgccgagtgccgggcgcccatctctctgcggggtgtgcccagtgaggccaggcagtgcgactacaccggccagtactactgcagccactgccactggaacgacctggctgtgatccctgcacgcgttgtacacaactgggactttgagcctcgaaaggtttctcgctgcagcatgcgctacctggcgctgatggtgtctcggcccgtactcaggctccgggagatcaaccctctgctgttcagctacgtggaggagctggtggagattcgcaagctgcgccaggacatcctgctcatgaagccgtacttcatcacctgcagggaggccatggaggctcgtctgctgctgcagctccaggatcggcagcattttgtggagaacgacgagatgtactctgtccaggacctcctggacgtgcatgccggccgcctgggctgctcgctcaccgagatccacacgctcttcgccaagcacatcaagctggactgcgagcggtgccaggccaagggcttcgtgtgtgagctctgcagagagggcgacgtgctgttcccgttcgacagccacacgtctgtgtgcgccgactgctccgcggtcttccacagggactgctactacgacaactccaccacttgtcccaagtgtgcccggctcagcctgaggaagcagtcgctcttccaggagccaggtcccgatgtggaggcctagcgccgaggaacagtgctgggcaccccgcctggcccgccaggacccaccctgccaacatcaagttgttccttctgctccggagacccctggggtgcggccctggccccctccacccctgctgggccagagcgggtgggcagtgtcaaggcccgctgtctcccaggtgcttgctgggactcggggcggctgcacctggctgtcacctgggtgtgctgctgtgaggggtccttgcgtggcccccatccttcccccaatgcagaactccatgggcagggagctggggggacatctcacctcccccatggcacagagccctccacacccctggaccagggcatccgggccctagaaattccacagctcccgtcctggccaccctggaagctcatcaggccaagacccggacagagcttcagaggagtgttgagtgacacctgaggatgcggctgcacacactcagccaagggccgagtctcacctgcggtggggtttcggctctgcctgggggctccatccctttcagccactcgtggccttggggatttctggttgtccccagctgggactgttcacagttgtcacctgcagacctgcctctccctggcctgaggttcaaaggcctcatcggatggtcagtacagtggggtcacctgttgtttctatacaacagcagggaaggggccatggagcttttccctgctgggtgctcctgctttggcccagcccacctttcctggtgctccaagctaggaggctgtggccccagcctgaggagggtgtcctggcctccaggtgtgcagcaggggctgtgtgctgggggaggttccagttaggcgatgggatcctgcagtggtctggtggcatttcttggaaccagatttacctgaggagctctgtcctgctccctgtggagggctccagatagctcagaaatgaccagccaatggccttttgtttgggggcctgaggtcaagagagctgagagtattcgctcgactgagcacattcaggaagatcagggcaggcgtgtgggaggtccctcactccacgggacagaggcccctggacagcagaggaaacctacagctctgggtgaggggacacttggctttggtgtttgcactttacagatcctgcggtccacgaggggcctcaggagaggacgtgtcaggacgtggcttcccagccttctgccttgggcagtgggggtgctcctgtctgtccttttcccccacaccctggactgtgcttggctgttggtgcacatggttggcacacggtgggcagagggcagagaatgccactgcttggttattggtcccctttgaccaggaaacccaagaggagacacctcagtcagcagaaaggccacctggctcactggctcattccaggagtgggagagacggcagggtctcctctttgtcctccggcatcaggaaggggatggtgtccactccccactgtggtggctttaggcaaggttcttattgtctgctctgcctcggtttccccatctggaaaatgggggcaggggtcctgacctacctcaggtggaacggtgagcagggaacatgtcggagtccttcagagaatgtgatgtgaggttggatcaacagtgtgggttcctgtcctgtttccccttcctctttggggctgaggaggaggttaaaggccaaatgctgtttcccaacaccccaaagtctgcacacgtctcatgaatgcatcacatttctgtcatatggatattagccattccgaaatctgtgtaatcaacttcacattattcaagttacaaatcactgtgtccatagaaaaactgtgctggtatttgctggacaaagggttgggccccttttatttttacctgccacccagcatctcccccacctgccccttctgggtgacacagccggtaaacggaatcacgtatggttctttctgtgggtctgtggcacagcaggaagagcccggtgccgccagcaccttgtggaagaccacacatgggtggtcccacagcatgggaccaggctggcctgagggatgcccagttgtaacaatgctgctgtcactgtctcattaaatatacatccttta

SEQ ID NO: 94346 - DNA, 3438 bp, Homo sapiens
ggagtcagatgcgaggcggcggtcaggtgggatgctatggaatatgatgagaagctggcccgtttccggcaggcccacctcaaccccttcaacaagcagtctgggccgagacagcatgagcagggccctggggaggaggtcccggacgtcactcctgaagaggccctgcctgagctgccccctggggagccggaattccgctgccctgaacgcgtgatggatctcggcctgtctgaggaccacttctcccgccctgtgggtctgttcctggcctctgacgtccagcagctgcggcaggcgatcgaggagtgcaagcaggtgattctggagctgcccgagcagtcggagaagcagaaggatgccgtggtgcgactcatccacctccggctgaagctccaggagctgaaggaccccaatgaggatgagccaaacatccgagtgctccttgagcaccgcttttacaaggagaagagcaagagcgtcaagcagacctgtgacaagtgtaacaccatcatctgggggctcattcagacctggtacacctgcacagggtgttattaccgctgtcacagtaagtgcttgaacctcatctccaagccctgtgtgagctccaaagtcagccaccaagctgaatacgaactgaacatctgccctgagacagggctggacagccaggattaccgctgtgccgagtgccgggcgcccatctctctgcggggtgtgcccagtgaggccaggcagtgcgactacaccggccagtactactgcagccactgccactggaacgacctggctgtgatccctgcacgcgttgtacacaactgggactttgagcctcgaaaggtttctcgctgcagcatgcgctacctggcgctgatggtgtctcggcccgtactcaggctccgggagatcaaccctctgctgttcagctacgtggaggagctggtggagattcgcaagctgcgccaggacatcctgctcatgaagccgtacttcatcacctgcagggaggccatggaggctcgtctgctgctgcaggacctcctggacgtgcatgccggccgcctgggctgctcgctcaccgagatccacacgctcttcgccaagcacatcaagctggactgcgagcggtgccaggccaagggcttcgtgtgtgagctctgcagagagggcgacgtgctgttcccgttcgacagccacacgtctgtgtgcgccgactgctccgcggtcttccacagggactgctactacgacaactccaccacttgtcccaagtgtgcccggctcagcctgaggaagcagtcgctcttccaggagccaggtcccgatgtggaggcctagcgccgaggaacagtgctgggcaccccgcctggcccgccaggacccaccctgccaacatcaagttgttccttctgctccggagacccctggggtgcggccctggccccctccacccctgctgggccagagcgggtgggcagtgtcaaggcccgctgtctcccaggtgcttgctgggactcggggcggctgcacctggctgtcacctgggtgtgctgctgtgaggggtccttgcgtggcccccatccttcccccaatgcagaactccatgggcagggagctggggggacatctcacctcccccatggcacagagccctccacacccctggaccagggcatccgggccctagaaattccacagctcccgtcctggccaccctggaagctcatcaggccaagacccggacagagcttcagaggagtgttgagtgacacctgaggatgcggctgcacacactcagccaagggccgagtctcacctgcggtggggtttcggctctgcctgggggctccatccctttcagccactcgtggccttggggatttctggttgtccccagctgggactgttcacagttgtcacctgcagacctgcctctccctggcctgaggttcaaaggcctcatcggatggtcagtacagtggggtcacctgttgtttctatacaacagcagggaaggggccatggagcttttccctgctgggtgctcctgctttggcccagcccacctttcctggtgctccaagctaggaggctgtggccccagcctgaggagggtgtcctggcctccaggtgtgcagcaggggctgtgtgctgggggaggttccagttaggcgatgggatcctgcagtggtctggtggcatttcttggaaccagatttacctgaggagctctgtcctgctccctgtggagggctccagatagctcagaaatgaccagccaatggccttttgtttgggggcctgaggtcaagagagctgagagtattcgctcgactgagcacattcaggaagatcagggcaggcgtgtgggaggtccctcactccacgggacagaggcccctggacagcagaggaaacctacagctctgggtgaggggacacttggctttggtgtttgcactttacagatcctgcggtccacgaggggcctcaggagaggacgtgtcaggacgtggcttcccagccttctgccttgggcagtgggggtgctcctgtctgtccttttcccccacaccctggactgtgcttggctgttggtgcacatggttggcacacggtgggcagagggcagagaatgccactgcttggttattggtcccctttgaccaggaaacccaagaggagacacctcagtcagcagaaaggccacctggctcactggctcattccaggagtgggagagacggcagggtctcctctttgtcctccggcatcaggaaggggatggtgtccactccccactgtggtggctttaggcaaggttcttattgtctgctctgcctcggtttccccatctggaaaatgggggcaggggtcctgacctacctcaggtggaacggtgagcagggaacatgtcggagtccttcagagaatgtgatgtgaggttggatcaacagtgtgggttcctgtcctgtttccccttcctctttggggctgaggaggaggttaaaggccaaatgctgtttcccaacaccccaaagtctgcacacgtctcatgaatgcatcacatttctgtcatatggatattagccattccgaaatctgtgtaatcaacttcacattattcaagttacaaatcactgtgtccatagaaaaactgtgctggtatttgctggacaaagggttgggccccttttatttttacctgccacccagcatctcccccacctgccccttctgggtgacacagccggtaaacggaatcacgtatggttctttctgtgggtctgtggcacagcaggaagagcccggtgccgccagcaccttgtggaagaccacacatgggtggtcccacagcatgggaccaggctggcctgagggatgcccagttgtaacaatgctgctgtcactgtctcattaaatatacatccttta

SEQ ID NO: 94347 - DNA, 1063 bp, Homo sapiens
tcggtacctgcctgttgttcatacgcccctggacagcagaggaaacctacagctctgggtgaggggacacttggctttggtgtttgcactttacagatcctgcggtccacgaggggcctcaggagaggacgtgtcaggacgtggcttcccagccttctgccttgggcagtgggggtgctcctgtctgtccttttcccccacaccctggactgtgcttggctgttggtgcacatggttggcacacggtgggcagagggcagagaatgccactgcttggttattggtcccctttgaccaggaaacccaagaggagacacctcagtcagcagaaaggccacctggctcactggctcattccaggagtgggagagacggcagggtctcctctttgtcctccggcatcaggaaggggatggtgtccactccccactgtggtggctttaggcaaggttcttattgtctgctctgcctcggtttccccatctggaaaatgggggcaggggtcctgacctacctcaggtggaacggtgagcagggaacatgtcggagtccttcagagaatgtgatgtgaggttggatcaacagtgtgggttcctgtcctgtttccccttcctctttggggctgaggaggaggttaaaggccaaatgctgtttcccaacaccccaaagtctgcacacgtctcatgaatgcatcacatttctgtcatatggatattagccattccgaaatctgtgtaatcaacttcacattattcaagttacaaatcactgtgtccatagaaaaactgtgctggtatttgctggacaaagggttgggccccttttatttttacctgccacccagcatctcccccacctgccccttctgggtgacacagccggtaaacggaatcacgtatggttctttctgtgggtctgtggcacagcaggaagagcccggtgccgccagcaccttgtggaagaccacacatgggtggtcccacagcatgggaccaggctggcctgagggatgcccagttgtaacaatgctgctgtcactgtctcattaaatatacatccttta

SEQ ID NO: 94348 - DNA, 607 bp, Homo sapiens
gatggccggacgccaagaagcttagtatactagtacacatacaggggtcctgacctacctcaggtggaacggtgagcagggaacatgtcggagtccttcagagaatgtgatgtgaggttggatcaacagtgtgggttcctgtcctgtttccccttcctctttggggctgaggaggaggttaaaggccaaatgctgtttcccaacaccccaaagtctgcacacgtctcatgaatgcatcacatttctgtcatatggatattagccattccgaaatctgtgtaatcaacttcacattattcaagttacaaatcactgtgtccatagaaaaactgtgctggtatttgctggacaaagggttgggccccttttatttttacctgccacccagcatctcccccacctgccccttctgggtgacacagccggtaaacggaatcacgtatggttctttctgtgggtctgtggcacagcaggaagagcccggtgccgccagcaccttgtggaagaccacacatgggtggtcccacagcatgggaccaggctggcctgagggatgcccagttgtaacaatgctgctgtcactgtctcattaaatatacatccttta

SEQ ID NO: 94349 - DNA, 433 bp, Homo sapiens
gaggaggtcccggacgtcactcctgaaggtgggtgctggtgggagtcagggtgggagctgggcaggtctctgactgcttacgtggacccctcctttcttcctgccgcgtcctgcgcagccctggctttcccacggagccggcacctgctggctgtgttctttttcccatctcttctgtggtcgtgtggtttgtttctgtgtccccactagaattcacattcctgagggcaagatttgtgcctgacccatcactgctgcatcctagggcccagcacatagtaggtgctcagggaacacttgctgagtgcggtcagcgctgagacctggtaagggagaggttagccgagggaacgtgctctgggcgtcagggtggcatgagctttagaaactgcagatgaggtcatcagggagtgcttggagcggggcagctgca

SEQ ID NO: 94350 - DNA, 414 bp, Homo sapiens
tgggtgtgagaggtgtcacccggccgtgcctggcaggtttctcgctgcagcatgcgctacctggcgctgatggtgtctcggcccgtactcaggctccgggagatcaaccctctgctgttcagctacgtggaggagctggtggagattcgcgtgaggctggggccatggaagtggggggcgggggcgctgtgtcaggtgggccctagggccgggccagtaccctcttctcctctgggccacgggaggttctgagcagaggagggaggccacctgcttagggtgagccaggcgccgcggctgcccttttggttgaaggtgctggagcggtgtcccgtagtgatctgatgccaggtgtgaacacaatattaaattttgtaatagccacgttaaaaaagtaaaaagagctgggcacgg

SEQ ID NO: 94351 - DNA, 870 bp, Homo sapiens
  misc_feature (15)..(15): n is a, c, g, or t
agcgggggcgcagcngggagacagatgcgaggcggcggtcaggtgccgaacccacggccaggcttccgtggccagcagccctagaggaatggccatcctgtccctgcgagcccctgggccctggcaggcgatgcaggtgggatgctatggaatatgatgagaagctggcccgtttccggcaggcccacctcaaccccttcaacaagcagtctgggccgagacagcatgagcagggccctggggaggaggtcccggacgtcactcctgaagaggccctgcctgagctgccccctggggagccggaattccgctgccctgaacgcgtgatggatctcggcctgtctgaggaccacttctcccgccctgtgggtctgttcctggcctctgacgtccagcagctgcggcaggcgatcgaggagtgcaagcaggtgattctggagctgcccgagcagtcggagaagcagaaggatgccgtggtgcgactcatccacctccggctgaagctccaggagctgaaggaccccaatgaggatgagccaaacatccgagtgctccttgagcaccgcttttacaaggagaagagcaagagcgtcaagcagacctgtgacaagtgtaacaccatcatctgggggctcattcagacctggtacacctgcacaggtgggccgagacccagacgaggagtgaggaatgagagagaccaaagttcctgcctccgctgggctcacattcagatgtgagctatccagtgtggtggccactagccaaacatggccagtcaaagttaaattaactaaatatgcatttcctcgttgtactgtctacattggacagggctgttctggatgagaaattaaactagtgaattac

SEQ ID NO: 94352 - DNA, 892 bp, Homo sapiens
  misc_feature (15)..(15): n is a, c, g, or t
agcgggggcgcagcngggagacagatgcgaggcggcggtcaggtgccgaacccacggccaggcttccgtggccagcagccctagaggaatggccatcctgtccctgcgagcccctgggccctggcaggcgatgcaggtgggatgctatggaatatgatgagaagctggcccgtttccggcaggcccacctcaaccccttcaacaagcagtctgggccgagacagcatgagcagggccctggggaggaggtcccggacgtcactcctgaagaggccctgcctgagctgccccctggggagccggaattccgctgccctgaacgcgtgatggatctcggcctgtctgaggaccacttctcccgccctgtgggtctgttcctggcctctgacgtccagcagctgcggcaggcgatcgaggagtgcaagcaggtgattctggagctgcccgagcagtcggagaagcagaaggatgccgtggtgcgactcatccacctccggctgaagctccaggagctgaaggaccccaatgaggatgagccaaacatccgagtgctccttgagcaccgcttttacaaggagaagagcaagagcgtcaagcagacctgtgacaagtgtaacaccatcatctgggggctcattcagacctggtacacctgcacaggtgggccgagacccagacgaggagtgaggaatgagagagaccaaagttcctgcctccgctgggctcacattcagatgtgagctatccagtgtggtggccactagccaaacatggccagtcaaagttaaattaactaaatatgcatttcctcgttgtactgtctacattggacagggctgttctggatgagaaattaaactagtgaattaccaaaaaaaaaaaatctccaggg

SEQ ID NO: 94353 - DNA, 536 bp, Homo sapiens
cacatggacaaggacgggtggtgtcttgaaggtgacaacaaaagaaggtggtgggtcccaggccacagatgttcctgatgcagtccttgggtctgtgtgtgctttggcctggctgccctgtgtcccctgtgctgattcaggtatccctgggaatgtagaaagtagaatattcatgaggaaacaggaccccaatgaggatgagccaaacatccgagtgctccttgagcaccgcttttacaaggagaagagcaagagcgtcaagcagacctgtgacaagtgtaacaccatcatctgggggctcattcagacctggtacacctgcacaggtgggccgagacccagacgaggagtgaggaatgagagagaccaaagttcctgcctccgctgggctcacattcagatgtgagctatccagtgtggtggccactagccaaacatggccagtcaaagttaaattaactaaatatgcatttcctcgttgtactgtctacattggacagggctgttctggatgagaaattaaactagtgaattac

SEQ ID NO: 94354 - DNA, 3599 bp, Homo sapiens
  misc_feature (15)..(15): n is a, c, g, or t
agcgggggcgcagcngggagacagatgcgaggcggcggtcaggtgccgaacccacggccaggcttccgtggccagcagccctagaggaatggccatcctgtccctgcgagcccctgggccctggcaggcgatgcaggtgggatgctatggaatatgatgagaagctggcccgtttccggcaggcccacctcaaccccttcaacaagcagtctgggccgagacagcatgagcagggccctggggaggaggtcccggacgtcactcctgaagaggccctgcctgagctgccccctggggagccggaattccgctgccctgaacgcgtgatggatctcggcctgtctgaggaccacttctcccgccctgtgggtctgttcctggcctctgacgtccagcagctgcggcaggcgatcgaggagtgcaagcaggtgattctggagctgcccgagcagtcggagaagcagaaggatgccgtggtgcgactcatccacctccggctgaagctccaggagctgaaggaccccaatgaggatgagccaaacatccgagtgctccttgagcaccgcttttacaaggagaagagcaagagcgtcaagcagacctgtgacaagtgtaacaccatcatctgggggctcattcagacctggtacacctgcacagggtgttattaccgctgtcacagtaagtgcttgaacctcatctccaagccctgtgtgagctccaaagtcagccaccaagctgaatacgaactgaacatctgccctgagacagggctggacagccaggattaccgctgtgccgagtgccgggcgcccatctctctgcggggtgtgcccagtgaggccaggcagtgcgactacaccggccagtactactgcagccactgccactggaacgacctggctgtgatccctgcacgcgttgtacacaactgggactttgagcctcgaaaggtttctcgctgcagcatgcgctacctggcgctgatggtgtctcggcccgtactcaggctccgggagatcaaccctctgctgttcagctacgtggaggagctggtggagattcgcaagctgcgccaggacatcctgctcatgaagccgtacttcatcacctgcagggaggccatggaggctcgtctgctgctgcagctccaggatcggcagcattttgtggagaacgacgagatgtactctgtccaggacctcctggacgtgcatgccggccgcctgggctgctcgctcaccgagatccacacgctcttcgccaagcacatcaagctggactgcgagcggtgccaggccaagggcttcgtgtgtgagctctgcagagagggcgacgtgctgttcccgttcgacagccacacgtctgtgtgcgccgactgctccgcggtcttccacagggactgctactacgacaactccaccacttgtcccaagtgtgcccggctcagcctgaggaagcagtcgctcttccaggagccaggtcccgatgtggaggcctagcgccgaggaacagtgctgggcaccccgcctggcccgccaggacccaccctgccaacatcaagttgttccttctgctccggagacccctggggtgcggccctggccccctccacccctgctgggccagagcgggtgggcagtgtcaaggcccgctgtctcccaggtgcttgctgggactcggggcggctgcacctggctgtcacctgggtgtgctgctgtgaggggtccttgcgtggcccccatccttcccccaatgcagaactccatgggcagggagctggggggacatctcacctcccccatggcacagagccctccacacccctggaccagggcatccgggccctagaaattccacagctcccgtcctggccaccctggaagctcatcaggccaagacccggacagagcttcagaggagtgttgagtgacacctgaggatgcggctgcacacactcagccaagggccgagtctcacctgcggtggggtttcggctctgcctgggggctccatccctttcagccactcgtggccttggggatttctggttgtccccagctgggactgttcacagttgtcacctgcagacctgcctctccctggcctgaggttcaaaggcctcatcggatggtcagtacagtggggtcacctgttgtttctatacaacagcagggaaggggccatggagcttttccctgctgggtgctcctgctttggcccagcccacctttcctggtgctccaagctaggaggctgtggccccagcctgaggagggtgtcctggcctccaggtgtgcagcaggggctgtgtgctgggggaggttccagttaggcgatgggatcctgcagtggtctggtggcatttcttggaaccagatttacctgaggagctctgtcctgctccctgtggagggctccagatagctcagaaatgaccagccaatggccttttgtttgggggcctgaggtcaagagagctgagagtattcgctcgactgagcacattcaggaagatcagggcaggcgtgtgggaggtccctcactccacgggacagaggcccctggacagcagaggaaacctacagctctgggtgaggggacacttggctttggtgtttgcactttacagatcctgcggtccacgaggggcctcaggagaggacgtgtcaggacgtggcttcccagccttctgccttgggcagtgggggtgctcctgtctgtccttttcccccacaccctggactgtgcttggctgttggtgcacatggttggcacacggtgggcagagggcagagaatgccactgcttggttattggtcccctttgaccaggaaacccaagaggagacacctcagtcagcagaaaggccacctggctcactggctcattccaggagtgggagagacggcagggtctcctctttgtcctccggcatcaggaaggggatggtgtccactccccactgtggtggctttaggcaaggttcttattgtctgctctgcctcggtttccccatctggaaaatgggggcaggggtcctgacctacctcaggtggaacggtgagcagggaacatgtcggagtccttcagagaatgtgatgtgaggttggatcaacagtgtgggttcctgtcctgtttccccttcctctttggggctgaggaggaggttaaaggccaaatgctgtttcccaacaccccaaagtctgcacacgtctcatgaatgcatcacatttctgtcatatggatattagccattccgaaatctgtgtaatcaacttcacattattcaagttacaaatcactgtgtccatagaaaaactgtgctggtatttgctggacaaagggttgggccccttttatttttacctgccacccagcatctcccccacctgccccttctgggtgacacagccggtaaacggaatcacgtatggttctttctgtgggtctgtggcacagcaggaagagcccggtgccgccagcaccttgtggaagaccacacatgggtggtcccacagcatgggaccaggctggcctgagggatgcccagttgtaacaatgctgctgtcactgtctcattaaatatacatccttta

SEQ ID NO: 94355 - DNA, 3583 bp, Homo sapiens
cctagctttcctccaagaggaagctcttcagaaggaagtgaagtgacataacaaaaaagcatctggatttctcaaagaaggaagttgtcttttgaaaagcaactttcaaacattaggttttcagaggtctgtgggcaggcaggtcaggctaggagcacgcagcaccgggtggaccttgaccgtgctgccacctttcctgccctggagcaagtcctcggtgccctctgggttgagtttccttctctgggtgaggggtgtcggggtctgctctgggcctgtctcggcggatgggccttaacagggagctcctgcaggatgggcctttgactgcccccgcccccaacctgggcagggtctgttcctggcctctgacgtccagcagctgcggcaggcgatcgaggagtgcaagcaggtgattctggagctgcccgagcagtcggagaagcagaaggatgccgtggtgcgactcatccacctccggctgaagctccaggagctgaaggaccccaatgaggatgagccaaacatccgagtgctccttgagcaccgcttttacaaggagaagagcaagagcgtcaagcagacctgtgacaagtgtaacaccatcatctgggggctcattcagacctggtacacctgcacagggtgttattaccgctgtcacagtaagtgcttgaacctcatctccaagccctgtgtgagctccaaagtcagccaccaagctgaatacgaactgaacatctgccctgagacagggctggacagccaggattaccgctgtgccgagtgccgggcgcccatctctctgcggggtgtgcccagtgaggccaggcagtgcgactacaccggccagtactactgcagccactgccactggaacgacctggctgtgatccctgcacgcgttgtacacaactgggactttgagcctcgaaaggtttctcgctgcagcatgcgctacctggcgctgatggtgtctcggcccgtactcaggctccgggagatcaaccctctgctgttcagctacgtggaggagctggtggagattcgcaagctgcgccaggacatcctgctcatgaagccgtacttcatcacctgcagggaggccatggaggctcgtctgctgctgcagctccaggatcggcagcattttgtggagaacgacgagatgtactctgtccaggacctcctggacgtgcatgccggccgcctgggctgctcgctcaccgagatccacacgctcttcgccaagcacatcaagctggactgcgagcggtgccaggccaagggcttcgtgtgtgagctctgcagagagggcgacgtgctgttcccgttcgacagccacacgtctgtgtgcgccgactgctccgcggtcttccacagggactgctactacgacaactccaccacttgtcccaagtgtgcccggctcagcctgaggaagcagtcgctcttccaggagccaggtcccgatgtggaggcctagcgccgaggaacagtgctgggcaccccgcctggcccgccaggacccaccctgccaacatcaagttgttccttctgctccggagacccctggggtgcggccctggccccctccacccctgctgggccagagcgggtgggcagtgtcaaggcccgctgtctcccaggtgcttgctgggactcggggcggctgcacctggctgtcacctgggtgtgctgctgtgaggggtccttgcgtggcccccatccttcccccaatgcagaactccatgggcagggagctggggggacatctcacctcccccatggcacagagccctccacacccctggaccagggcatccgggccctagaaattccacagctcccgtcctggccaccctggaagctcatcaggccaagacccggacagagcttcagaggagtgttgagtgacacctgaggatgcggctgcacacactcagccaagggccgagtctcacctgcggtggggtttcggctctgcctgggggctccatccctttcagccactcgtggccttggggatttctggttgtccccagctgggactgttcacagttgtcacctgcagacctgcctctccctggcctgaggttcaaaggcctcatcggatggtcagtacagtggggtcacctgttgtttctatacaacagcagggaaggggccatggagcttttccctgctgggtgctcctgctttggcccagcccacctttcctggtgctccaagctaggaggctgtggccccagcctgaggagggtgtcctggcctccaggtgtgcagcaggggctgtgtgctgggggaggttccagttaggcgatgggatcctgcagtggtctggtggcatttcttggaaccagatttacctgaggagctctgtcctgctccctgtggagggctccagatagctcagaaatgaccagccaatggccttttgtttgggggcctgaggtcaagagagctgagagtattcgctcgactgagcacattcaggaagatcagggcaggcgtgtgggaggtccctcactccacgggacagaggcccctggacagcagaggaaacctacagctctgggtgaggggacacttggctttggtgtttgcactttacagatcctgcggtccacgaggggcctcaggagaggacgtgtcaggacgtggcttcccagccttctgccttgggcagtgggggtgctcctgtctgtccttttcccccacaccctggactgtgcttggctgttggtgcacatggttggcacacggtgggcagagggcagagaatgccactgcttggttattggtcccctttgaccaggaaacccaagaggagacacctcagtcagcagaaaggccacctggctcactggctcattccaggagtgggagagacggcagggtctcctctttgtcctccggcatcaggaaggggatggtgtccactccccactgtggtggctttaggcaaggttcttattgtctgctctgcctcggtttccccatctggaaaatgggggcaggggtcctgacctacctcaggtggaacggtgagcagggaacatgtcggagtccttcagagaatgtgatgtgaggttggatcaacagtgtgggttcctgtcctgtttccccttcctctttggggctgaggaggaggttaaaggccaaatgctgtttcccaacaccccaaagtctgcacacgtctcatgaatgcatcacatttctgtcatatggatattagccattccgaaatctgtgtaatcaacttcacattattcaagttacaaatcactgtgtccatagaaaaactgtgctggtatttgctggacaaagggttgggccccttttatttttacctgccacccagcatctcccccacctgccccttctgggtgacacagccggtaaacggaatcacgtatggttctttctgtgggtctgtggcacagcaggaagagcccggtgccgccagcaccttgtggaagaccacacatgggtggtcccacagcatgggaccaggctggcctgagggatgcccagttgtaacaatgctgctgtcactgtctcattaaatatacatccttta

SEQ ID NO: 94356 - DNA, 3593 bp, Homo sapiens
ggagtcagatgcgaggcggcggtcaggtgggatgctatggaatatgatgagaagctggcccgtttccggcaggcccacctcaaccccttcaacaagcagtctgggccgagacagcatgagcagggccctggggaggaggtcccggacgtcactcctgaagaggccctgcctgagctgccccctggggagccggaattccgctgccctgaacgcgtgatggatctcggcctgtctgaggaccacttctcccgccctgtgggtctgttcctggcctctgacgtccagcagctgcggcaggcgatcgaggagtgcaagcaggtgattctggagctgcccgagcagtcggagaagcagaaggatgccgtggtgcgactcatccacctccggctgaagctccaggagctgaaggaccccaatgaggatgagccaaacatccgagtgctccttgagcaccgcttttacaaggagaagagcaagagcgtcaagcagacctgtgacaagtgtaacaccatcatctgggggctcattcagacctggtacacctgcacagggtgttattaccgctgtcacagtaagtgcttgaacctcatctccaagccctgtgtgagctccaaagtcagccaccaagctgaatacgaactgaacatctgccctgagacagggctggacagccaggattaccgctgtgccgagtgccgggcgcccatctctctgcggggtgtgcccagtgaggccaggcagtgcgactacaccggccagtactactgcagccactgccactggaacgacctggctgtgatccctgcacgcgttgtacacaactgggactttgagcctcgaaaggtttctcgctgcagcatgcgctacctggcgctgatggtgtctcggcccgtactcaggctccgggagatcaaccctctgctgttcagctacgtggaggagctggtggagattcgcaagctgcgccaggacatcctgctcatgaagccgtacttcatcacctgcagggaggccatggaggctcgtctgctgctgcaggacctcctggacgtgcatgccggccgcctgggctgctcgctcaccgagatccacacgctcttcgccaagcacatcaagctggactgcgaggtgggcctctgcccgagggccgctcttctccaaccccagccctgaggggggattggcaggagaagcagcccagcccagtgtgtccctggcctcagagtgcccagaggagctggcactgacgtgcccgtgccccaaccccacactgttccccccagcggtgccaggccaagggcttcgtgtgtgagctctgcagagagggcgacgtgctgttcccgttcgacagccacacgtctgtgtgcgccgactgctccgcggtcttccacagggactgctactacgacaactccaccacttgtcccaagtgtgcccggctcagcctgaggaagcagtcgctcttccaggagccaggtcccgatgtggaggcctagcgccgaggaacagtgctgggcaccccgcctggcccgccaggacccaccctgccaacatcaagttgttccttctgctccggagacccctggggtgcggccctggccccctccacccctgctgggccagagcgggtgggcagtgtcaaggcccgctgtctcccaggtgcttgctgggactcggggcggctgcacctggctgtcacctgggtgtgctgctgtgaggggtccttgcgtggcccccatccttcccccaatgcagaactccatgggcagggagctggggggacatctcacctcccccatggcacagagccctccacacccctggaccagggcatccgggccctagaaattccacagctcccgtcctggccaccctggaagctcatcaggccaagacccggacagagcttcagaggagtgttgagtgacacctgaggatgcggctgcacacactcagccaagggccgagtctcacctgcggtggggtttcggctctgcctgggggctccatccctttcagccactcgtggccttggggatttctggttgtccccagctgggactgttcacagttgtcacctgcagacctgcctctccctggcctgaggttcaaaggcctcatcggatggtcagtacagtggggtcacctgttgtttctatacaacagcagggaaggggccatggagcttttccctgctgggtgctcctgctttggcccagcccacctttcctggtgctccaagctaggaggctgtggccccagcctgaggagggtgtcctggcctccaggtgtgcagcaggggctgtgtgctgggggaggttccagttaggcgatgggatcctgcagtggtctggtggcatttcttggaaccagatttacctgaggagctctgtcctgctccctgtggagggctccagatagctcagaaatgaccagccaatggccttttgtttgggggcctgaggtcaagagagctgagagtattcgctcgactgagcacattcaggaagatcagggcaggcgtgtgggaggtccctcactccacgggacagaggcccctggacagcagaggaaacctacagctctgggtgaggggacacttggctttggtgtttgcactttacagatcctgcggtccacgaggggcctcaggagaggacgtgtcaggacgtggcttcccagccttctgccttgggcagtgggggtgctcctgtctgtccttttcccccacaccctggactgtgcttggctgttggtgcacatggttggcacacggtgggcagagggcagagaatgccactgcttggttattggtcccctttgaccaggaaacccaagaggagacacctcagtcagcagaaaggccacctggctcactggctcattccaggagtgggagagacggcagggtctcctctttgtcctccggcatcaggaaggggatggtgtccactccccactgtggtggctttaggcaaggttcttattgtctgctctgcctcggtttccccatctggaaaatgggggcaggggtcctgacctacctcaggtggaacggtgagcagggaacatgtcggagtccttcagagaatgtgatgtgaggttggatcaacagtgtgggttcctgtcctgtttccccttcctctttggggctgaggaggaggttaaaggccaaatgctgtttcccaacaccccaaagtctgcacacgtctcatgaatgcatcacatttctgtcatatggatattagccattccgaaatctgtgtaatcaacttcacattattcaagttacaaatcactgtgtccatagaaaaactgtgctggtatttgctggacaaagggttgggccccttttatttttacctgccacccagcatctcccccacctgccccttctgggtgacacagccggtaaacggaatcacgtatggttctttctgtgggtctgtggcacagcaggaagagcccggtgccgccagcaccttgtggaagaccacacatgggtggtcccacagcatgggaccaggctggcctgagggatgcccagttgtaacaatgctgctgtcactgtctcattaaatatacatccttta

SEQ ID NO: 94357 - DNA, 355 bp, Homo sapiens
gacgcttggggggattcagtgctggagtttcctgtgcagagagccccgacctctttctgcccccagggactgctactacgacaactccaccacttgtcccaagtgtgcccggctcagcctgaggaagcagtcgctcttccaggagccaggtcccgatgtggaggcctagcgccgaggaacagtgctgggcaccccgcctggcccgccaggacccaccctgccaacatcaagttgttccttctgctccggagacccctggggtgcggccctggccccctccacccctgctgggccagagcgggtgggcagtgtcaaggcccgctgtctcccaggtgcttgctgggactcggggcgg

SEQ ID NO: 94358 - DNA, 331 bp, Homo sapiens
aagtagttttgctggcctgtggcttccctggcttcattctgtatagtgtcattccttgtctggtttcttttatgctggctctacggctctacccaggtttgttggctgctccttgacagctgcccaagctcaccctcccaggtgttgacgccccttctctctgcatttccttgtccctgtgctctgcctgcctctgtatctgcattggtccatgtgtctctttgacgagccatctctctccctgtcctgcccctgcttgctcttgccggtgccccacatggtgtttgctatgaagtgggcccacagttcgtgcttactgaatgcatttata

SEQ ID NO: 94359 - DNA, 910 bp, Homo sapiens
  misc_feature (52)..(52): n is a, c, g, or t
  misc_feature (57)..(57): n is a, c, g, or t
  misc_feature (61)..(61): n is a, c, g, or t
  misc_feature (97)..(97): n is a, c, g, or t
  misc_feature (102)..(102): n is a, c, g, or t
  misc_feature (121)..(121): n is a, c, g, or t
  misc_feature (124)..(124): n is a, c, g, or t
  misc_feature (139)..(139): n is a, c, g, or t
  misc_feature (147)..(147): n is a, c, g, or t
  misc_feature (151)..(151): n is a, c, g, or t
  misc_feature (155)..(155): n is a, c, g, or t
  misc_feature (181)..(181): n is a, c, g, or t
  misc_feature (191)..(191): n is a, c, g, or t
  misc_feature (246)..(246): n is a, c, g, or t
  misc_feature (248)..(248): n is a, c, g, or t
  misc_feature (272)..(273): n is a, c, g, or t
  misc_feature (325)..(325): n is a, c, g, or t
  misc_feature (333)..(333): n is a, c, g, or t
  misc_feature (342)..(342): n is a, c, g, or t
  misc_feature (353)..(353): n is a, c, g, or t
  misc_feature (357)..(357): n is a, c, g, or t
  misc_feature (408)..(408): n is a, c, g, or t
  misc_feature (419)..(421): n is a, c, g, or t
  misc_feature (501)..(501): n is a, c, g, or t
  misc_feature (741)..(741): n is a, c, g, or t
  misc_feature (750)..(750): n is a, c, g, or t
  misc_feature (825)..(825): n is a, c, g, or t
  misc_feature (833)..(833): n is a, c, g, or t
  misc_feature (849)..(849): n is a, c, g, or t
  misc_feature (902)..(902): n is a, c, g, or t
agtagagacgggtttcaccgtgttagccaggatggtctcgatctcctgaccncgtgntctncccctcttggcctcccaaagtgctgggattacaggngtganccaccgcgcccggtcttgnagnacggttctgagtctntggaatanctgncatnaagtaacctgaaggaggtgctggctngtaggggttnattacatggttgggcacagctcgtacacttgccattctctgcatatgctggttantnaagtgagcctggcactcttctttnngctgagctaaagctacatacgatggttttgtggccacagttctaccgttcanttctgtanctgctttantggcttcttcngggnaggagaaacatacgaaaccaaaccctttgctgtgaccaccctccatcatancctttgcactnnngattgtaccaaatggagaaaactctttctggagacgttcatcatcaatactatcatcaagatttttcacgtaaatattancaccctggtatctgctggctgcagctactcctgctgtccgcaccgttccacagtataaatatgctgcgggagttcgcaatcctcagcaacatcttaatgcacagccacaagttacaatgcaacagcctgctgttcatgtacaaggtcaggaacctttgactgcttccatgttggcatctgcccctcaagagcaaaagcaaatgttcatatgctcgagagtccagagtcactctgttctanggttcatgnagctagctatattacaagcccaccaagctaaagaggctacccagaaagcagttaacagtgccattggtgttcctnctgtttanaattgatcagagaccncgaaaagaaacttgtgcttcaccaaagaaaaatatctaaacatcgaaaaactnaaatatgg

SEQ ID NO: 94360 - DNA, 827 bp, Homo sapiens
  misc_feature (52)..(52): n is a, c, g, or t
  misc_feature (57)..(57): n is a, c, g, or t
  misc_feature (61)..(61): n is a, c, g, or t
  misc_feature (97)..(97): n is a, c, g, or t
  misc_feature (102)..(102): n is a, c, g, or t
  misc_feature (121)..(121): n is a, c, g, or t
  misc_feature (124)..(124): n is a, c, g, or t
  misc_feature (139)..(139): n is a, c, g, or t
  misc_feature (147)..(147): n is a, c, g, or t
  misc_feature (151)..(151): n is a, c, g, or t
  misc_feature (155)..(155): n is a, c, g, or t
  misc_feature (181)..(181): n is a, c, g, or t
  misc_feature (191)..(191): n is a, c, g, or t
  misc_feature (246)..(246): n is a, c, g, or t
  misc_feature (248)..(248): n is a, c, g, or t
  misc_feature (272)..(273): n is a, c, g, or t
  misc_feature (325)..(325): n is a, c, g, or t
  misc_feature (333)..(333): n is a, c, g, or t
  misc_feature (342)..(342): n is a, c, g, or t
  misc_feature (353)..(353): n is a, c, g, or t
  misc_feature (357)..(357): n is a, c, g, or t
  misc_feature (408)..(408): n is a, c, g, or t
  misc_feature (419)..(421): n is a, c, g, or t
  misc_feature (501)..(501): n is a, c, g, or t
agtagagacgggtttcaccgtgttagccaggatggtctcgatctcctgaccncgtgntctncccctcttggcctcccaaagtgctgggattacaggngtganccaccgcgcccggtcttgnagnacggttctgagtctntggaatanctgncatnaagtaacctgaaggaggtgctggctngtaggggttnattacatggttgggcacagctcgtacacttgccattctctgcatatgctggttantnaagtgagcctggcactcttctttnngctgagctaaagctacatacgatggttttgtggccacagttctaccgttcanttctgtanctgctttantggcttcttcngggnaggagaaacatacgaaaccaaaccctttgctgtgaccaccctccatcatancctttgcactnnngattgtaccaaatggagaaaactctttctggagacgttcatcatcaatactatcatcaagatttttcacgtaaatattancaccctggtatctgctggctgcagctactcctgctgtccgcaccgttccacagtataaatatgctgcgggagttcgcaatcctcagcaacatcttaatgcacagccacaagttacaatgcaacagcctgctgttcatgtacaaggtcaggaacctttgactgcttccatgttggcatctgcccctcctcaagacataagcataatgttgggtgtacggctgtttcccctgattcaagccccccaccctactcttgctggtaaaatcactggcatgttcgttggagattgataattcagaacttcttcatagtatcgagtctgcaga

SEQ ID NO: 94361 - DNA, 340 bp, Homo sapiens
gcacactcacactcatatacacacccaggcacacacactcatacaccaagatacacacccacacactcatacacagacatacagacacacacaccagatatgcacactcacacatacactcagacacactcacatacactctctcacacacatactcctgggagggatcctgacattcacctaggggagtcaggggctacaggccttgacaagcatgctaacaatttccagtgtgggtaacagacctgggtcctggtctcccaccttttaaacctcagatgctccagcctgtaatccctactacctgggtttgaatcccagctctgttacttaccattta

SEQ ID NO: 94362 - DNA, 473 bp, Homo sapiens
ctgtcaaatgggaatgtgagcatttgccgtgattccttagggagaatgaatgtgaggctctgcctggcacaaagttccctgcctggcagagtgaggtcgaccactgggtgctgaggatgatgatgtggtagtcattcagcccttgctgcctgccgttctttgtggcttcctgatactctaactctggggttctcaactgccccctagggacattggcagtgtctggagactttttggttgtcacaacctggggcatggaggaagtgcctaccccgtaggcgtctagtaggtagaggccagggatgcaactcaacagcctgccatgcccagaacagcccaccccacaaagaagtgtctccttcctaaggtcaggcaggtggaggttgaggaaccctgatttaactcaatccaggccccagacacccccctctccaacttgctccctgcataattactcacatgaggctaaatag

SEQ ID NO: 94363 - DNA, 1374 bp, Homo sapiens
atgtgctctgcctaagacctaggagaattagcagaaaaaataattaccatccttcccatgatacaatacaatgttattttccatttttccattctgcattcaatgagtatttaataataaaaatcacttccaatatagagtactatgttagacccagtgaaggttgctaaggtataaaacttccaatcctttctcaagcagtttattttaaaataataatgattatagtaaacatgtattgaaacttaactatgtgcctgcagttatgctgacatacttaggcacaccacatgcattacctcatttaacacaataactttattacgtggcattgttataactgttttttgtttttttgagacagagtctcgcactgtcacccaggctggagtgcagtgacgtgatctcggtcaagcgatcctcctgcctcagcctcccaaagtgttgagattacaggtgtgagccaccacacctggctaaatattgcaatcctaaaaataatgggaatcctgagttgaacactgtaacttcctaacatgttcaagataacattcatttattcagttaacaattttttattgagggattactatgtactacttattattttaagagattgaggatatagcagtaaacaatataaagtttttgccctcatacctatactctagactctgaagaattctcatacctttctctttatcactgcaaaagggcctttattaactttttaaacttgtatatccattcatcatttcacctgcaaatattttatcataatattttatattactttattgtaaagattttgaaaacatatttttaagggcagcatttgttcctctaaagattataagatgtaatttgtctgctttcccaaggaaaagcattttcctttgtaaaaatcaccttacattaatgatttcttggatctcacactctattgtagtatttctgtagctaaacaattataacatggtggagagtatactataataaagttatgtataaagtctcatgggaacagatgtaagaaaaattaactgcctaggcagtttctgaggaaagataaagaaaatagagccgacatttgtctcgtggatgaaaaaagagtaagtaggcattgaccaggttaacacaagaagaggatgttctatgcccagctgacttttgtatttttcatagaaacagggtttcgccatgttggccaaggctggtctcgaactcctggcctcatagcatccgcctgctcggcctccctaagtgctaggaatacggacatgtaccaccgcacccatgcctataagctgtttgtataaatgtaattaatacccaagttaagtattatagttcagtccactcaatgtagctccc

SEQ ID NO: 94364 - DNA, 789 bp, Homo sapiens
aagtgtgtcgtcgatcgcgtatgataaggagagtggaagagttttggagagaatataaagtttttgccctcatacctatactctagactctgaagaattctcatacctttctctttatcactgcaaaagggcctttattaactttttaaacttgtatatccattcatcatttcacctgcaaatattttatcataatattttatattactttattgtaaagattttgaaaacatatttttaagggcagcatttgttcctctaaagattataagatgtaatttgtctgctttcccaaggaaaagcattttcctttgtaaaaatcaccttacattaatgatttcttggatctcacactctattgtagtatttctgtagctaaacaattataacatggtggagagtatactataataaagttatgtataaagtctcatgggaacagatgtaagaaaaattaactgcctaggcagtttctgaggaaagataaagaaaatagagccgacatttgtctcgtggatgaaaaaagagtaagtaggcattgaccaggttaacacaagaagaggatgttctatgcccagctgacttttgtatttttcatagaaacagggtttcgccatgttggccaaggctggtctcgaactcctggcctcatagcatccgcctgctcggcctccctaagtgctaggaatacggacatgtaccaccgcacccatgcctataagctgtttgtataaatgtaattaatacccaagttaagtattatagttcagtccactcaatgtagctccc

SEQ ID NO: 94365 - DNA, 567 bp, Homo sapiens
ttttgccctcatacctatactctagactctgaagaattctcatacctttctctttatcactgcaaaagggcctttattaactttttaaacttgtatatccattcatcatttcacctgcaaatattttatcataatattttatattactttattgtaaagattttgaaaacatatttttaagggcagcatttgttcctctaaagattataagatgtaatttgtctgctttcccaaggaaaagcattttcctttgtaaaaatcaccttacattaatgatttcttggatctcacactctattgtagtatttctgtagctaaacaattataacatggtggagagtatactataataaagttatgtataaagtctcatgggaacagatgtaagaaaaattaactgcctaggcagtttctgaggaaagataaagaaaatagagccgacatttgtctcgtggatgaaaaaagagtaagtaggcattgaccaggttaacacaagaagaggatgttctaggcaatatagaattattaagaagatggccgggtgcggtagctcacgcctgtaatcct

SEQ ID NO: 94366 - DNA, 3908 bp, Homo sapiens
  misc_feature (3776)..(3776): n is a, c, g, or t
  misc_feature (3820)..(3820): n is a, c, g, or t
agccgggctgtcggggcgaccgcgggagctcgccgtgcgccgtggctgggaccggcctggccgagcgcgccggcgccgcggccgcagacaaagggcggctcgcgcccgggccgccacgctctcgggctctgcctcgggaaggagacttggtctgaaagatgccacattcctgcagcctctcttggtgcagtggaatacagtcttgggcgaggtggcgtggatgagctggtgaaagaggatgctgcccacatccaaaggctccagaggatcctggcctggcagctgagctcccctgcatttggaacctcaggcgtaacttggtgtagagctcatgaaaggtgcttgtgtttctccagcttttttcaccagtgcttaccagactggctcaggttttggaatctaaggtgagctggtagaaacaggagaggtagaaagaagcccctggatgcctccagaattcattgatgggatccctgcatactgcttggaacacagaaagaggctgtgacacagctgagctttggagcatcttaaggagctcagctcagcaaacaaactcttgcatttcagccagaaagagcctcttgtaacaaagtattcaaaggggagagtttctgcatcttttactttgcagtccactatggtagaaaacttgacattccatagataatgatactgggttttctttccaagatgccagctttaaaagaaatatgagccattctaagctttaagaagggttcaggaaacacaggaattagtagacagccctcccaatgcaggttaagacgacagcctgcgcccccaactagcacagctcagcgagcatgaccatatgccattctcgtctccagagagctggtggcagtgacctcactaggagaaaacacatccctcagccgtgggacttgacagaatgaggtgcgcgagggaggccgctagccgagacttggcctttcctgactgcccctgtgttacctgggcagctccagatcactgagcccacaatggctgagaagggtgactgcatcgccagtgtctatgggtatgacctcggtgggcgctttgttgacttccaacccctgggcttcggtgtcaatggtttggtgctgtcggccgtggacagccgggcctgccggaaggtcgctgtgaagaagattgccctgagcgatgcccgcagcatgaagcacgcgctccgagagatcaagatcattcggcgcctggaccacgacaacatcgtcaaagtgtacgaggtgctcggtcccaagggcactgacctgcagggtgagctgttcaagttcagcgtggcgtacatcgtccaggagtacatggagaccgacctggcacgcctgctggagcagggcacgctggcagaagagcatgccaagctgttcatgtaccagctgctccgcgggctcaagtacatccactccgccaacgtgctgcacagggacctgaagcccgccaacatcttcatcagcacagaggacctcgtgctcaagattggggatttcgggttggcaaggatcgttgatcagcattactcccacaagggttatctgtcagaagggttggtaacaaagtggtaccgttccccacgactgctcctttcccccaataactacaccaaagccatcgacatgtgggccgccggctgcatcctggctgagatgcttacggggagaatgctctttgctggggcccatgagctggagcagatgcaactcatcctggagaccatccctgtaatccgggaggaagacaaggacgagctgctcagggtgatgccttcctttgtcagcagcacctgggaggtgaagaggcctctgcgcaagctgctccctgaagtgaacagtgaagccatcgactttctggagaagatcctgacctttaaccccatggatcgcctaacagctgagatggggctgcaacacccctacatgagcccatactcgtgccctgaggacgagcccacctcacaacaccccttccgcattgaggatgagatcgacgacatcgtgctgatggccgctaaccagagccagctgtccaactgggacacgtgcagttccaggtaccctgtgagcctgtcgtcggacctggagtggcggcctgaccggtgccaggacgccagcgaggtacagcgcgacccgcgcgcggttcggcgccactggctgaggacgtgcaggtggacccgcgcaaggactcgcacagcagctccgagcgcttcctagagcagtcgcactcgtccatggagcgcgccttcgaggccgactacgggcgctcctgcgactacaaggtggggtcgccgtcctacctggacaagctgctgtggcgcgacaacaagccgcaccactactcggagcccaagctcatcctggacctgtcgcactggaagcaggcggccggcgcgccccccacggccacggggctggcggacacgggggcgcgcgaggacgagccggccagcctcttcctggagatcgcgcagtgggtcaagagcacgcagggcggcccagagcacgccagcccgcccgccgacgaccccgagcgccgcttgtctgcctcgccccccggccgcccggccccggtggacggcggcgccagcccccagttcgacctggacgtgttcatctcccgcgccctgaagctctgcaccaagcccgaggacctgccggacaataaactgggcgacctcaatggtgcgtgcatccccgagcaccctggcgacctcgtgcagaccgaggccttctccaaagaaaggtggtgagggcggaggggccgctccaggccccacagagcaggagacccccagagaaagccggggctggcaggaggcggccgcccttcccgcccctctctgctgccttggggttggcagaacacgtgaaggatccgaggagcgagaggaatgtccatttcttaaactgccttaataactagcctttaacctgtgggagcgggtttgaacaggaccctggcttaggggttgatcactttcctagcaaaggggagaccacatgtggtgcacagggaagaaacggctttagacagcagtctgcgggccccacctgggtggcaggatgccgagaaatcttgcagaggtagctccgaaaccatctggcccaactagcctcaactgacagctgaggaaaggcaattaggcccagagaggcagagacactcgcttaagatcacaggcttagtgtgaggacgagcttgaaatcccagtctcctggcccccaggccagggtctgtccaccatagaatgtcttcctctactggggtcgttctggctttttgttagaaacttggtctgagatgtttcttccctgtccattaccattcgatgttcttttattcagagcaatgtttcttgtattctgaaactggaaactgaaccagtttgtttctcctagtcaccaagcatactctcctggctccccaagtacttaaatgttctcatctgtcgcacccctgtatttgcctcacccctgcatggtcggaaatcttcgtttcaggtcagaacagcctggggtctgtgggtaaaatcagcccttctcccaggcctgtgcacacaccccctcagcactccctatgcgcgcgccacatttggctaaattttgtatttttttgtagagatggggtttcgccatgttgcccaggctgtttttcttaagataaatacatttttaaaaaaagaaatagatcactttggtaaatctccgtactgtttttatagaggttgtactaatttacattcccaccagcagcanataagtgttcctttttcgccatatccacaccaacatctattgtnttttgactttttaataatggccattctggctggggtaaggtttatctccatgtggtttaatttgatttctctgatgatagtgatgtgg

SEQ ID NO: 94367 - DNA, 3857 bp, Homo sapiens
agccgggctgtcggggcgaccgcgggagctcgccgtgcgccgtggctgggaccggcctggccgagcgcgccggcgccgcggccgcagacaaagggcggctcgcgcccgggccgccacgctctcgggctctgcctcgggaaggagacttggtctgaaagatgccacattcctgcagcctctcttggtgcagtggaatacagtcttgggcgaggtggcgtggatgagctggtgaaagaggatgctgcccacatccaaaggctccagaggatcctggcctggcagctgagctcccctgcatttggaacctcaggcgtaacttggtgtagagctcatgaaaggtgcttgtgtttctccagcttttttcaccagtgcttaccagactggctcaggttttggaatctaaggtgagctggtagaaacaggagaggtagaaagaagcccctggatgcctccagaattcattgatgggatccctgcatactgcttggaacacagaaagaggctgtgacacagctgagctttggagcatcttaaggagctcagctcagcaaacaaactcttgcatttcagccagaaagagcctcttgtaacaaagtattcaaaggggagagtttctgcatcttttactttgcagtccactatggtagaaaacttgacattccatagataatgatactgggttttctttccaagatgccagctttaaaagaaatatgagccattctaagctttaagaagggttcaggaaacacaggaattagtagacagccctcccaatgcaggttaagacgacagcctgcgcccccaactagcacagctcagcgagcatgaccatatgccattctcgtctccagagagctggtggcagtgacctcactaggagaaaacacatccctcagccgtgggacttgacagaatgaggtgcgcgagggaggccgctagccgagacttggcctttcctgactgcccctgtgttacctgggcagctccagatcactgagcccacaatggctgagaagggtgactgcatcgccagtgtctatgggtatgacctcggtgggcgctttgttgacttccaacccctgggcttcggtgtcaatggtttggtgctgtcggccgtggacagccgggcctgccggaaggtcgctgtgaagaagattgccctgagcgatgcccgcagcatgaagcacgcgctccgagagatcaagatcattcggcgcctggaccacgacaacatcgtcaaagtgtacgaggtgctcggtcccaagggcactgacctgcagggtgagctgttcaagttcagcgtggcgtacatcgtccaggagtacatggagaccgacctggcacgcctgctggagcagggcacgctggcagaagagcatgccaagctgttcatgtaccagctgctccgcgggctcaagtacatccactccgccaacgtgctgcacagggacctgaagcccgccaacatcttcatcagcacagaggacctcgtgctcaagattggggatttcgggttggcaaggatcgttgatcagcattactcccacaagggttatctgtcagaagggttggtaacaaagtggtaccgttccccacgactgctcctttcccccaataactacaccaaagccatcgacatgtgggccgccggctgcatcctggctgagatgcttacggggagaatgctctttgctggggcccatgagctggagcagatgcaactcatcctggagaccatccctgtaatccgggaggaagacaaggacgagctgctcagggtgatgccttcctttgtcagcagcacctgggaggtgaagaggcctctgcgcaagctgctccctgaagtgaacagtgaagccatcgactttctggagaagatcctgacctttaaccccatggatcgcctaacagctgagatggggctgcaacacccctacatgagcccatactcgtgccctgaggacgagcccacctcacaacaccccttccgcattgaggatgagatcgacgacatcgtgctgatggccgctaaccagagccagctgtccaactgggacacgtgcagttccaggtaccctgtgagcctgtcgtcggacctggagtggcggcctgaccggtgccaggacgccagcgaggtacagcgcgacccgcgcgcggttcggcgccactggctgaggacgtgcaggtggacccgcgcaaggactcgcacagcagctccgagcgcttcctagagcagtcgcactcgtccatggagcgcgccttcgaggccgactacgggcgctcctgcgactacaaggtggggtcgccgtcctacctggacaagctgctgtggcgcgacaacaagccgcaccactactcggagcccaagctcatcctggacctgtcgcactggaagcaggcggccggcgcgccccccacggccacggggctggcggacacgggggcgcgcgaggacgagccggccagcctcttcctggagatcgcgcagtgggtcaagagcacgcagggcggcccagagcacgccagcccgcccgccgacgaccccgagcgccgcttgtctgcctcgccccccggccgcccggccccggtggacggcggcgccagcccccagttcgacctggacgtgttcatctcccgcgccctgaagctctgcaccaagcccgaggacctgccggacaataaactgggcgacctcaatggtgcgtgcatccccgagcaccctggcgacctcgtgcagaccgaggccttctccaaagaaaggtggtgagggcggaggggccgctccaggccccacagagcaggagacccccagagaaagccggggctggcaggaggcggccgcccttcccgcccctctctgctgccttggggttggcagaacacgtgaaggatccgaggagcgagaggaatgtccatttcttaaactgccttaataactagcctttaacctgtgggagcgggtttgaacaggaccctggcttaggggttgatcactttcctagcaaaggggagaccacatgtggtgcacagggaagaaacggctttagacagcagtctgcgggccccacctgggtggcaggatgccgagaaatcttgcagaggtagctccgaaaccatctggcccaactagcctcaactgacagctgaggaaaggcaattaggcccagagaggcagagacactcgcttaagatcacaggcttagtgtgaggacgagcttgaaatcccagtctcctggcccccaggccagggtctgtccaccatagaatgtcttcctctactggggtcgttctggctttttgttagaaacttggtctgagatgtttcttccctgtccattaccattcgatgttcttttattcagagcaatgtttcttgtattctgaaactggaaactgaaccagtttgtttctcctagtcaccaagcatactctcctggctccccaagtacttaaatgttctcatctgtcgcacccctgtatttgcctcacccctgcatggtcggaaatcttcgtttcaggtcagaacagcctggggtctgtgggtaaaatcagcccttctcccaggcctgtgcacacaccccctcagcactccctatgcgcgcgcatatatacacatatatgtatacatacacacgtatatatacacatatatgtatacatacacacgtatatatacacatatatgtatacatacacacgtatatatacacatatatgtatacatacatacgtatatatacacatatatgtatacatacatacgtatatatacacatatatgtatacatatatatgaacacatatatatgtgtgtatatatatatatataagattttacttgaccatgaatcaca

SEQ ID NO: 94368 - DNA, 587 bp, Homo sapiens
ctgcaacacccctacatgagcccatactcgtgccctgaggacgagcccacctcacaacaccccttccgcattgaggatgagatcgacgacatcgtgctgatggccgctaaccagagccagctgtccaactgggacacgtgcagttccaggtgctcgcagccctgggttccagagcccacatttccctgtcctcccatctctattttgcctctaatcctccgtgaccttcccctctgtctcccaagttgcatagctcattggacgacttctccagcttagcttcctgcctttctcttgtgcccagacactaccagtaaatgaccagtgtgagttgcatgtgtgggtcagaggccttcctttgtgcaacacccccagcttccctcaccatgactctactgaacatggggttcaatacagtgctccgcaaggatttagtgaacaccatggtaggagctcacttctagcagcctgggaacttgcccttgaaaagtaaactgcaacaaggcgaggcaaaaaaacaaagcagagattaccattacaaaacgctatctcatgtttcatgttggtaactcttaaaaatgccatta

SEQ ID NO: 94369 - DNA, 4750 bp, Homo sapiens
agccgggctgtcggggcgaccgcgggagctcgccgtgcgccgtggctgggaccggcctggccgagcgcgccggcgccgcggccgcagacaaagggcggctcgcgcccgggccgccacgctctcgggctctgcctcgggaaggagacttggtctgaaagatgccacattcctgcagcctctcttggtgcagtggaatacagtcttgggcgaggtggcgtggatgagctggtgaaagaggatgctgcccacatccaaaggctccagaggatcctggcctggcagctgagctcccctgcatttggaacctcaggcgtaacttggtgtagagctcatgaaaggtgcttgtgtttctccagcttttttcaccagtgcttaccagactggctcaggttttggaatctaaggtgagctggtagaaacaggagaggtagaaagaagcccctggatgcctccagaattcattgatgggatccctgcatactgcttggaacacagaaagaggctgtgacacagctgagctttggagcatcttaaggagctcagctcagcaaacaaactcttgcatttcagccagaaagagcctcttgtaacaaagtattcaaaggggagagtttctgcatcttttactttgcagtccactatggtagaaaacttgacattccatagataatgatactgggttttctttccaagatgccagctttaaaagaaatatgagccattctaagctttaagaagggttcaggaaacacaggaattagtagacagccctcccaatgcaggttaagacgacagcctgcgcccccaactagcacagctcagcgagcatgaccatatgccattctcgtctccagagagctggtggcagtgacctcactaggagaaaacacatccctcagccgtgggacttgacagaatgaggtgcgcgagggaggccgctagccgagacttggcctttcctgactgcccctgtgttacctgggcagctccagatcactgagcccacaatggctgagaagggtgactgcatcgccagtgtctatgggtatgacctcggtgggcgctttgttgacttccaacccctgggcttcggtgtcaatggtttggtgctgtcggccgtggacagccgggcctgccggaaggtcgctgtgaagaagattgccctgagcgatgcccgcagcatgaagcacgcgctccgagagatcaagatcattcggcgcctggaccacgacaacatcgtcaaagtgtacgaggtgctcggtcccaagggcactgacctgcagggtgagctgttcaagttcagcgtggcgtacatcgtccaggagtacatggagaccgacctggcacgcctgctggagcagggcacgctggcagaagagcatgccaagctgttcatgtaccagctgctccgcgggctcaagtacatccactccgccaacgtgctgcacagggacctgaagcccgccaacatcttcatcagcacagaggacctcgtgctcaagattggggatttcgggttggcaaggatcgttgatcagcattactcccacaagggttatctgtcagaagggttggtaacaaagtggtaccgttccccacgactgctcctttcccccaataactacaccaaagccatcgacatgtgggccgccggctgcatcctggctgagatgcttacggggagaatgctctttgctggggcccatgagctggagcagatgcaactcatcctggagaccatccctgtaatccgggaggaagacaaggacgagctgctcagggtgatgccttcctttgtcagcagcacctgggaggtgaagaggcctctgcgcaagctgctccctgaagtgaacagtgaagccatcgactttctggagaagatcctgacctttaaccccatggatcgcctaacagctgagatggggctgcaacacccctacatgagcccatactcgtgccctgaggacgagcccacctcacaacaccccttccgcattgaggatgagatcgacgacatcgtgctgatggccgctaaccagagccagctgtccaactgggacacgtgcagttccaggtaccctgtgagcctgtcgtcggacctggagtggcggcctgaccggtgccaggacgccagcgaggtacagcgcgacccgcgcgcggttcggcgccactggctgaggacgtgcaggtggacccgcgcaaggactcgcacagcagctccgagcgcttcctagagcagtcgcactcgtccatggagcgcgccttcgaggccgactacgggcgctcctgcgactacaaggtggggtcgccgtcctacctggacaagctgctgtggcgcgacaacaagccgcaccactactcggagcccaagctcatcctggacctgtcgcactggaagcaggcggccggcgcgccccccacggccacggggctggcggacacgggggcgcgcgaggacgagccggccagcctcttcctggagatcgcgcagtgggtcaagagcacgcagggcggcccagagcacgccagcccgcccgccgacgaccccgagcgccgcttgtctgcctcgccccccggccgcccggccccggtggacggcggcgccagcccccagttcgacctggacgtgttcatctcccgcgccctgaagctctgcaccaagcccgaggacctgccggacaataaactgggcgacctcaatggtgcgtgcatccccgagcaccctggcgacctcgtgcagaccgaggccttctccaaagaaaggtggtgagggcggaggggccgctccaggccccacagagcaggagacccccagagaaagccggggctggcaggaggcggccgcccttcccgcccctctctgctgccttggggttggcagaacacgtgaaggatccgaggagcgagaggaatgtccatttcttaaactgccttaataactagcctttaacctgtgggagcgggtttgaacaggaccctggcttaggggttgatcactttcctagcaaaggggagaccacatgtggtgcacagggaagaaacggctttagacagcagtctgcgggccccacctgggtggcaggatgccgagaaatcttgcagaggtagctccgaaaccatctggcccaactagcctcaactgacagctgaggaaaggcaattaggcccagagaggcagagacactcgcttaagatcacaggcttagtgtgaggacgagcttgaaatcccagtctcctggcccccaggccagggtctgtccaccatagaatgtcttcctctactggggtcgttctggctttttgttagaaacttggtctgagatgtttcttccctgtccattaccattcgatgttcttttattcagagcaatgtttcttgtattctgaaactggaaactgaaccagtttgtttctcctagtcaccaagcatactctcctggctccccaagtacttaaatgttctcatctgtcgcacccctgtatttgcctcacccctgcatggtcggaaatcttcgtttcaggtcagaacagcctggggtctgtgggtaaaatcagcccttctcccaggcctgtgcacacaccccctcagcactccctatgcactttcctgacacgcaaagacacagccctctttccccactgggcgtcctaccccagtgaggttgaaggcaccaattccaagaatccctccaacctccctgccagcactcccccttcaccccacacccggcccccccacctaaccacagcgcctctccagacctacctcgggacctaatgttctctacatgaactgctcatttggaggacagcagtgaggtcctgccatagagcaaatgtgttaggagagaaggtttcacatgggacccaacatccttcatcaatactttcctgagtttgatcatccatttagccttgacaaacagcagaccctacagagatgtgttggagagcacgtcgtgaccttgggggcaaggaatccagaaaggtaggaagatatgaaaagagaggtgtcaacagcaagggctcttaggggtcaggcaccagcatggagacctcatgacaaaggaagggactcaaagcagcaatgcccctcatagtgtaggctaaggtgagtttggtgcatgcaaacctgtgtgctcacccacagagcatggggtaatggtgtgtagacacaggccctctgcagaagcgtggggtggggacactgacagcccctatctggtccccaggaacattctaccatttctgccactggtgttcagctccttctcttcccccaacactcccaaagatacccacaggaagtccagccagtttccaggtagaggattccaccagttggtcttgggctgcgttcaccctcacatcacagcaccttaaatctaatcagcaaactataatttgtacgttgaaacctgcaacacattagaaacttatatttaaaaacagaattaatcacactgaccaacttttaaatggaaaatatgtaaataggaagtgtttgggttttgttttttctttaagaaaaagaaatgtacaccactcctcatgtgccattttgtcctcagagggcggctttacttttttggtaaaggaacaagctgctggccttgaccaggagttcatatataactgttattacagaggaattgttataactactaatgtttttaaaaaatttattaaacattattaaacttgatcaggtcaggccaaataaagttttattggaacacagaaaaaaaaa

SEQ ID NO: 94370 - DNA, 3731 bp, Homo sapiens
agccgggctgtcggggcgaccgcgggagctcgccgtgcgccgtggctgggaccggcctggccgagcgcgccggcgccgcggccgcagacaaagggcggctcgcgcccgggccgccacgctctcgggctctgcctcgggaaggagacttggtctgaaagatgccacattcctgcagcctctcttggtgcagtggaatacagtcttgggcgaggtggcgtggatgagctggtgaaagaggatgctgcccacatccaaaggctccagaggatcctggcctggcagctgagctcccctgcatttggaacctcaggcgtaacttggtgtagagctcatgaaaggtgcttgtgtttctccagcttttttcaccagtgcttaccagactggctcaggttttggaatctaaggtgagctggtagaaacaggagaggtagaaagaagcccctggatgcctccagaattcattgatgggatccctgcatactgcttggaacacagaaagaggctgtgacacagctgagctttggagcatcttaaggagctcagctcagcaaacaaactcttgcatttcagccagaaagagcctcttgtaacaaagtattcaaaggggagagtttctgcatcttttactttgcagtccactatggtagaaaacttgacattccatagataatgatactgggttttctttccaagatgccagctttaaaagaaatatgagccattctaagctttaagaagggttcaggaaacacaggaattagtagacagccctcccaatgcaggttaagacgacagcctgcgcccccaactagcacagctcagcgagcatgaccatatgccattctcgtctccagagagctggtggcagtgacctcactaggagaaaacacatccctcagccgtgggacttgacagaatgaggtgcgcgagggaggccgctagccgagacttggcctttcctgactgcccctgtgttacctgggcagctccagatcactgagcccacaatggctgagaagggtgactgcatcgccagtgtctatgggtatgacctcggtgggcgctttgttgacttccaacccctgggcttcggtgtcaatggtttggtgctgtcggccgtggacagccgggcctgccggaaggtcgctgtgaagaagattgccctgagcgatgcccgcagcatgaagcacgcgctccgagagatcaagatcattcggcgcctggaccacgacaacatcgtcaaagtgtacgaggtgctcggtcccaagggcactgacctgcagggtgagctgttcaagttcagcgtggcgtacatcgtccaggagtacatggagaccgacctggcacgcctgctggagcagggcacgctggcagaagagcatgccaagctgttcatgtaccagctgctccgcgggctcaagtacatccactccgccaacgtgctgcacagggacctgaagcccgccaacatcttcatcagcacagaggacctcgtgctcaagattggggatttcgggttggcaaggatcgttgatcagcattactcccacaagggttatctgtcagaagggttggtaacaaagtggtaccgttccccacgactgctcctttcccccaataactacaccaaagccatcgacatgtgggccgccggctgcatcctggctgagatgcttacggggagaatgctctttgctggggcccatgagctggagcagatgcaactcatcctggagaccatccctgtaatccgggaggaagacaaggacgagctgctcagggtgatgccttcctttgtcagcagcacctgggaggtgaagaggcctctgcgcaagctgctccctgaagtgaacagtgaagccatcgactttctggagaagatcctgacctttaaccccatggatcgcctaacagctgagatggggctgcaacacccctacatgagcccatactcgtgccctgaggacgagcccacctcacaacaccccttccgcattgaggatgagatcgacgacatcgtgctgatggccgctaaccagagccagctgtccaactgggacacgtgcagttccaggtaccctgtgagcctgtcgtcggacctggagtggcggcctgaccggtgccaggacgccagcgaggtacagcgcgacccgcgcgcggttcggcgccactggctgaggacgtgcaggtggacccgcgcaaggactcgcacagcagctccgagcgcttcctagagcagtcgcactcgtccatggagcgcgccttcgaggccgactacgggcgctcctgcgactacaaggtggggtcgccgtcctacctggacaagctgctgtggcgcgacaacaagccgcaccactactcggagcccaagctcatcctggacctgtcgcactggaagcaggcggccggcgcgccccccacggccacggggctggcggacacgggggcgcgcgaggacgagccggccagcctcttcctggagatcgcgcagtgggtcaagagcacgcagggcggcccagagcacgccagcccgcccgccgacgaccccgagcgccgcttgtctgcctcgccccccggccgcccggccccggtggacggcggcgccagcccccagttcgacctggacgtgttcatctcccgcgccctgaagctctgcaccaagcccgaggacctgccggacaataaactgggcgacctcaatggtgcgtgcatccccgagcaccctggcgacctcgtgcagaccgaggccttctccaaagaaaggtggtgagggcggaggggccgctccaggccccacagagcaggagacccccagagaaagccggggctggcaggaggcggccgcccttcccgcccctctctgctgccttggggttggcagaacacgtgaaggatccgaggagcgagaggaatgtccatttcttaaactgccttaataactagcctttaacctgtgggagcgggtttgaacaggaccctggcttaggggttgatcactttcctagcaaaggggagaccacatgtggtgcacagggaagaaacggctttagacagcagtctgcgggccccacctgggtggcaggatgccgagaaatcttgcagaggtagctccgaaaccatctggcccaactagcctcaactgacagctgaggaaaggcaattaggcccagagaggcagagacactcgcttaagatcacaggcttagtgtgaggacgagcttgaaatcccagtctcctggcccccaggccagggtctgtccaccatagaatgtcttcctctactggggtcgttctggctttttgttagaaacttggtctgagatgtttcttccctgtccattaccattcgatgttcttttattcagagcaatgtttcttgtattctgaaactggaaactgaaccagtttgtttctcctagtcaccaagcatactctcctggctccccaagtacttaaatgttctcatctgtcgcacccctgtatttgcctcacccctgcatggtcggaaatcttcgtttcaggtcagaacagcctggggtctgtgggtaaaatcagcccttctcccaggcctgtgcacacaccccctcagcactccctatgcgcgcgccacatttggctaaattttgtatttttttgtagagatggggtttcgccatgttgcccaggctgatggtcccaaaactcctgagctcaagcgattctcccgcctcggcctcccaaagtgctgggat

SEQ ID NO: 94371 - DNA, 3017 bp, Homo sapiens
acccgttgcctgatgacgagagttgggagtgtggctggggctgcggatctccagcagtggcgttacttctagcggctggataccgggttctccgcgagatcccgagatattctccccgcacggaagcgacgactggcctggccagaggactcgcgtgggagcgaggtgccggccccgacaggacggtgagcctacccgtatattacaagaaatctcaagtcaaacactggaaaagatgtcagaagattcagaaaaggaagactattcagacagaacaatcagtgatgaagatgaatcggatgaggatatgttcatgaaatttgtaagtgaagatcttcatcggtgtgcacttttaacagctgactcttttggtgatcccttcttcccccggactacacagatactattagaatatcagctagggagatgggtgccacgtcttcgtgaaccaagggatttatatggtgtctcttcttctggtccattgagcccaacacggtggccataccattgtgaagtcatcgatgaaaaagtccagcatattgatggagtctcatgctggagtgagtctcaccaggctggagcgcagtggtgcgatctcggctcactgcaacctccacctcccaggttcaagcgattcgcctgcttcagcctcctgagtagcagagactacaggcgcgtgccaccacgcccagctaattttgtatttttagtagagacggggtttcaccatgttggccaggatggtctccgtctcttgacctcgtgatccgcctgcctcagcttcccaaagtgctgggtttttttttgttgttgttgttgttttaacattctgtatctcttagctgacattggaaatctgacctgtaattttcaaaagtgtcaaagtcatgaaatataaggaaagactgaaaagctgttctatatcgaagaaaactaaaatacacattaaagttcaatgcaatgtgtgattctaaagtggatccttttgctatagaggacattatttatacaactgtcaaaattttaagtctaaggattaaatattagaaataaatcagtattaatgtcctgatcttgatggttgtattatggttatttatataggaggatttccttcactggaggaaatataagtatttggagaggatggggtattatgtttgcaaatatttcagggaaaaaaagttgtttttcctgttattgcaacttttctgtatgttttcaactgtttcaaataaaattaaaaaccacatgcctaggaataaatctgatagacaagatttctatgaagaagcaataaagcattgagagagatttttaaaagacctaagtaaatagagggaaatagcatgttcatagattgggagactcattattttaaagatgtcagttatctccaaactgatctacatgtcccatgcaataccagtcaaaatcccaattgtgatttttttatagaaattgacaaggtactttaaaaatgcatatggaaatgccaacgacctcttaaaaggacaaaaaaattgtaagagttactagctcttaaaccttaataaagttatagtaatatatggcattgctgaaaggaaacaggaatggaatagaacagagagcttagaaacagacctatgcatatatggtcattatgacaaaggtggaactgcaagagaaagttaaagatggtcttttcagtaaataatactggaataattggatttccatatggaaaaagtgaaatctcaccccaaccttatgcacaaaagtccattttaaatgggttatggatataaaaatgaaaggtaaaacaataagacttctagaaaataatacaagaaaatatcttcataatattaaaatctggaaaggcttaaacagaacagaaaataccctaaaccataaagagaaagactgataaatttgactacgatacaattaaaaacctcagttcatcaaaaaataaaacgaggcaaacaatagattgggagaatatattaatatttgcaatacataactgacaaatagatcatttctggaatacataaagcatttctgaaagtaataagaaaagacaaacaacccagtaggaaaatgggcaagagacttgaatgggcacttaataaaaaatgatattcacatggccaataaacatatgagataatatcaaccttatcatgaagtcttgttgtgattttaatttgctattccctgattgttaatgaggctgagttctgtttcacagaaaccttgcaaggttaaatttaacttatactaaggaatggtgagcatatggagcaaacagaaactttgtgacctgctggtgggtgtgtaaattggtataatcattttggatgatagcttggcgttatttactgaaattgatacatgccctgcaacctagaatttttactcccagttgtatacctaaaactgatgtgagcacaggtgctctaagcaacatgtataaagctgttcatagcaccatttttcttaatagccccaaactgaaacagcccaaatgtccattataaatagaaattgataaattgtaacattttgtacaatattatatatcaatgaaataagcaaattacagcagtatgccacaatgtggattgatttcatgaatatacgtgaaaaacagcacagaagaataccatacactatgtgattttaattttataaagttcaaatataggcaaagcaaagcaatagttttatttacacttctgtagataaaaactgtattatacacatgcatatatatgaatgcttaggtggtaaaattataaaggagagtaaagaaatgactgcattatattaagactaatggctacttttcaaagggagggagaggctggtgatgggaaaggggcatgagtggagtatgtaaggtgcttgcaatgtaatatttcttggcctatgtggtgtttgctttgtgataaatcagtaagctgtagttctttgtttttgcacttttcataagtataatacctaataaacatttaaatatttgc

SEQ ID NO: 94372 - DNA, 1347 bp, Homo sapiens
  misc_feature (90)..(90): n is a, c, g, or t
atcatagtagaaccaccgtgttctaaccttattgtgtatcaccataacagtttattgtggctctgatgtcataaaggaagagacatggangaagaaaaagggggaaaaacgtagtatttaaaattctttagtctttttctactacataggctgcgagatttccttcaaattttattaaagtataaattatgtatgtaaactaatgtcccgaaataagctcttaaagcttactttagctatttaaaggatttatggctttctgtgtttttctttttgttaatttaatttttttttttttcttgagccagagtttgagatcgctcttgttgctcaagctggagtgcaatggcgcgatctcggctcactgcaacctctgcctcctgggttcaaacgattctgcctcagccacccgagtagctgggattacaggcatgtgccaccatgcctggctaattttttttgtatttttagtagaaacggggtttcaccatgttagccaggctggtctcaaacttctgacctcaggtgatccacccgccttggcctcccaaagtgctgggattacaggcatgagccgccacgcccggccaattttattcttaatttaaatagttttcccgggtttatcaagaatctttaaactttattccttccataaagtcattattatgaccacacccagtggaagaggaggaatgaaagatgcaaactttaaggtttcaggatatttgaagtgttgggtgcattgagaccagtagctgataataatcctttaattttctcgtttattaaaggttaaagacatatactcaatcccaagtactaaaatagatgtaaaaaaattctggatttgaaaactgttggtttttaaaagagaaatatttttaaattcttattttaggatgaggatatgttcatgaaatttgtaagtgaagatcttcatcggtgtgcacttttaacaggtttgaacctattcatatagtttttgtttagcataaaactttgaatggataaaaaagaagatgaggaaactaaaaagtcagattgaataatatagggaatgattattctagtagattgtgaaagagaactgtatctacttgcagagttcaaacttttcaggtttgttttaggtaagcctattttatattagaaaataataaatgaaagtggtgattatcttatatttaacataaggatttaccttgtcatttgtttaaatgtattgactgtatgactcaagttataacggacagattatgttagaagtacatcttcatttaaacgaagtacattgtctaaagagtctcattaataaagtcattcatttgcaactgaaaaaatgtg

SEQ ID NO: 94373 - DNA, 1293 bp, Homo sapiens
  misc_feature (90)..(90): n is a, c, g, or t
atcatagtagaaccaccgtgttctaaccttattgtgtatcaccataacagtttattgtggctctgatgtcataaaggaagagacatggangaagaaaaagggggaaaaacgtagtatttaaaattctttagtctttttctactacataggctgcgagatttccttcaaattttattaaagtataaattatgtatgtaaactaatgtcccgaaataagctcttaaagcttactttagctatttaaaggatttatggctttctgtgtttttctttttgttaatttaatttttttttttttcttgagccagagtttgagatcgctcttgttgctcaagctggagtgcaatggcgcgatctcggctcactgcaacctctgcctcctgggttcaaacgattctgcctcagccacccgagtagctgggattacaggcatgtgccaccatgcctggctaattttttttgtatttttagtagaaacggggtttcaccatgttagccaggctggtctcaaacttctgacctcaggtgatccacccgccttggcctcccaaagtgctgggattacaggcatgagccgccacgcccggccaattttattcttaatttaaatagttttcccgggtttatcaagaatctttaaactttattccttccataaagtcattattatgaccacacccagtggaagaggaggaatgaaagatgcaaactttaaggtttcaggatatttgaagtgttgggtgcattgagaccagtagctgataataatcctttaattttctcgtttattaaaggttaaagacatatactcaatcccaagtactaaaatagatgtaaaaaaattctggatttgaaaactgttggtttttaaaagagaaatatttttaaattcttattttaggatgaggatatgttcatgaaatttgtaagtgaagatcttcatcggtgtgcacttttaacaggtttgaacctattcatatagtttttgtttagcataaaactttgaatggataaaaaagaagatgaggaaactaaaaagtcagattgaataatatagggaatgattattctagtagattgtgaaagagaactgtatctacttgcagagttcaaacttttcaggtttgttttaggtaagcctattttatattaggtcatttgtttaaatgtattgactgtatgactcaagttataacggacagattatgttagaagtacatcttcatttaaacgaagtacattgtctaaagagtctcattaataaagtcattcatttgcaactgaaaaaatgtg

SEQ ID NO: 94374 - DNA, 600 bp, Homo sapiens
acccgttgcctgatgacgagagttgggagtgtggctggggctgcggatctccagcagtggcgttacttctagcggctggataccgggttctccgcgagatcccgagatattctccccgcacggaagcgacgactggcctggccagaggactcgcgtgggagcgaggtgccggccccgacaggacggtgagcctacccgtatattacaagaaatctcaagtcaaacactggaaaagatgtcagaagattcagaaaaggaagactattcagacagaacaatcagtgatgaagatgaatcggatgaggatatgttcatgaaatttgtaagtgaagatcttcatcggtgtgcacttttaacagattggactccttcttgtcctgagccagtgtatatcccaacgggcttagaaacggaacccctttatccagactccaaggaagctactgtggtttatctagctgaagatggtgagcacataatgacacatgttgctgtaaaatataatttggtacttaggttaatctcttaattatatttgttttgctgtttgtagtggaaatttcagatgaccagtccctaaacataaagatgtttgtttat

SEQ ID NO: 94375 - DNA, 3566 bp, Homo sapiens
  misc_feature (90)..(90): n is a, c, g, or t
atcatagtagaaccaccgtgttctaaccttattgtgtatcaccataacagtttattgtggctctgatgtcataaaggaagagacatggangaagaaaaagggggaaaaacgtagtatttaaaattctttagtctttttctactacataggctgcgagatttccttcaaattttattaaagtataaattatgtatgtaaactaatgtcccgaaataagctcttaaagcttactttagctatttaaaggatttatggctttctgtgtttttctttttgttaatttaatttttttttttttcttgagccagagtttgagatcgctcttgttgctcaagctggagtgcaatggcgcgatctcggctcactgcaacctctgcctcctgggttcaaacgattctgcctcagccacccgagtagctgggattacaggcatgtgccaccatgcctggctaattttttttgtatttttagtagaaacggggtttcaccatgttagccaggctggtctcaaacttctgacctcaggtgatccacccgccttggcctcccaaagtgctgggattacaggcatgagccgccacgcccggccaattttattcttaatttaaatagttttcccgggtttatcaagaatctttaaactttattccttccataaagtcattattatgaccacacccagtggaagaggaggaatgaaagatgcaaactttaaggtttcaggatatttgaagtgttgggtgcattgagaccagtagctgataataatcctttaattttctcgtttattaaaggttaaagacatatactcaatcccaagtactaaaatagatgtaaaaaaattctggatttgaaaactgttggtttttttgtaagtgaagatcttcatcggtgtgcacttttaacagctgactcttttggtgatcccttcttcccccggactacacagatactattagaatatcagctagggagatgggtgccacgtcttcgtgaaccaagggatttatatggtgtctcttcttctggtccattgagcccaacacggtggccataccattgtgaagtcatcgatgaaaaagtccagcatattgatggagtctcatgctggagtgagtctcaccaggctggagcgcagtggtgcgatctcggctcactgcaacctccacctcccaggttcaagcgattcgcctgcttcagcctcctgagtagcagagactacaggcgcgtgccaccacgcccagctaattttgtatttttagtagagacggggtttcaccatgttggccaggatggtctccgtctcttgacctcgtgatccgcctgcctcagcttcccaaagtgctgggtttttttttgttgttgttgttgttttaacattctgtatctcttagctgacattggaaatctgacctgtaattttcaaaagtgtcaaagtcatgaaatataaggaaagactgaaaagctgttctatatcgaagaaaactaaaatacacattaaagttcaatgcaatgtgtgattctaaagtggatccttttgctatagaggacattatttatacaactgtcaaaattttaagtctaaggattaaatattagaaataaatcagtattaatgtcctgatcttgatggttgtattatggttatttatataggaggatttccttcactggaggaaatataagtatttggagaggatggggtattatgtttgcaaatatttcagggaaaaaaagttgtttttcctgttattgcaacttttctgtatgttttcaactgtttcaaataaaattaaaaaccacatgcctaggaataaatctgatagacaagatttctatgaagaagcaataaagcattgagagagatttttaaaagacctaagtaaatagagggaaatagcatgttcatagattgggagactcattattttaaagatgtcagttatctccaaactgatctacatgtcccatgcaataccagtcaaaatcccaattgtgatttttttatagaaattgacaaggtactttaaaaatgcatatggaaatgccaacgacctcttaaaaggacaaaaaaattgtaagagttactagctcttaaaccttaataaagttatagtaatatatggcattgctgaaaggaaacaggaatggaatagaacagagagcttagaaacagacctatgcatatatggtcattatgacaaaggtggaactgcaagagaaagttaaagatggtcttttcagtaaataatactggaataattggatttccatatggaaaaagtgaaatctcaccccaaccttatgcacaaaagtccattttaaatgggttatggatataaaaatgaaaggtaaaacaataagacttctagaaaataatacaagaaaatatcttcataatattaaaatctggaaaggcttaaacagaacagaaaataccctaaaccataaagagaaagactgataaatttgactacgatacaattaaaaacctcagttcatcaaaaaataaaacgaggcaaacaatagattgggagaatatattaatatttgcaatacataactgacaaatagatcatttctggaatacataaagcatttctgaaagtaataagaaaagacaaacaacccagtaggaaaatgggcaagagacttgaatgggcacttaataaaaaatgatattcacatggccaataaacatatgagataatatcaaccttatcatgaagtcttgttgtgattttaatttgctattccctgattgttaatgaggctgagttctgtttcacagaaaccttgcaaggttaaatttaacttatactaaggaatggtgagcatatggagcaaacagaaactttgtgacctgctggtgggtgtgtaaattggtataatcattttggatgatagcttggcgttatttactgaaattgatacatgccctgcaacctagaatttttactcccagttgtatacctaaaactgatgtgagcacaggtgctctaagcaacatgtataaagctgttcatagcaccatttttcttaatagccccaaactgaaacagcccaaatgtccattataaatagaaattgataaattgtaacattttgtacaatattatatatcaatgaaataagcaaattacagcagtatgccacaatgtggattgatttcatgaatatacgtgaaaaacagcacagaagaataccatacactatgtgattttaattttataaagttcaaatataggcaaagcaaagcaatagttttatttacacttctgtagataaaaactgtattatacacatgcatatatatgaatgcttaggtggtaaaattataaaggagagtaaagaaatgactgcattatattaagactaatggctacttttcaaagggagggagaggctggtgatgggaaaggggcatgagtggagtatgtaaggtgcttgcaatgtaatatttcttggcctatgtggtgtttgctttgtgataaatcagtaagctgtagttctttgtttttgcacttttcataagtataatacctaataaacatttaaatatttgc

SEQ ID NO: 94376 - DNA, 4203 bp, Homo sapiens
acccgttgcctgatgacgagagttgggagtgtggctggggctgcggatctccagcagtggcgttacttctagcggctggataccgggttctccgcgagatcccgagatattctccccgcacggaagcgacgactggcctggccagaggactcgcgtgggagcgaggtgccggccccgacaggacggtgaggtatgcagaagtaaggcggggcgccccctgcgggaagcgagcgcgccccggaaaatgagcgcctccccacaccaaggtgtccaggagtgagtgcgggaaggaactcggccgcccggagttgtggcctcatcgtgcttcccgccaaaaacgccttggtactgtcgggacgcggctaagcgtggacgcgcccgcatctgcccctcctccgcagtggtggaagacacccgcggagcgccggtggataagggccgtttcctgagaccagagctgtatccgcagcaggtcagcacttcgtgcgccctgtgtgcacctgtaaggaatggaatttaggccagtcggattttccaaatgtggagttgtgatgcccaggcagaaacttcagtttcttaggactgaaggtgtcatctatgagacagtcggttccgtggcattggcagtgatttgccatagagcttggacttaacttatatgtagtccacgctccaaaacacgcttcctgtagagaggggcgtaaactaatagatttgaaattgtcgagtcctttggtctctcaagaacgatgggaacttgacaagaaatttcgattattccctggtcttgatattacccacatgggaagatacttgcatagaatggtaatggtcattaccaatacaaccttctggtagctatttagatttctaagaataagaataatataaatgaatattagaacagacagtatctacagaataataatcaaaatgtaaagtcttgtcacttgaacttttggtcaagtgaaaatcaaggagaaaacttaaaattatattgctacatttcagtaagtgactataatttttaaattcattatcttttaatgcctcaggatcattctgaacttgctgtgtagtatttaattgtaaatataaaatgtgaatgatttggctgtatactctggaaattccttttaattaaatgatttgcttgattgtcttattgtggttgttgtctcgtatagtcatggaaaattcctttaactctttgaaattgaaggttttattagttgtattctaattagtttttagagaagactgttgtgactgttaaatacaattgaatatatttttgagtactcatttaatgtagtaaacacctacagcttgaaaagaaaagctgtcatataatttccttagaaattgttttacagcctacccgtatattacaagaaatctcaagtcaaacactggaaaagatgtcagaagattcagaaaaggaagactattcagacagaacaatcagtgatgaagatgaatcggatgaggatatgttcatgaaatttgtaagtgaagatcttcatcggtgtgcacttttaacagctgactcttttggtgatcccttcttcccccggactacacagatactattagaatatcagctagggagatgggtgccacgtcttcgtgaaccaagggatttatatggtgtctcttcttctggtccattgagcccaacacggtggccataccattgtgaagtcatcgatgaaaaagtccagcatattgatggagtctcatgctggagtgagtctcaccaggctggagcgcagtggtgcgatctcggctcactgcaacctccacctcccaggttcaagcgattcgcctgcttcagcctcctgagtagcagagactacaggcgcgtgccaccacgcccagctaattttgtatttttagtagagacggggtttcaccatgttggccaggatggtctccgtctcttgacctcgtgatccgcctgcctcagcttcccaaagtgctgggtttttttttgttgttgttgttgttttaacattctgtatctcttagctgacattggaaatctgacctgtaattttcaaaagtgtcaaagtcatgaaatataaggaaagactgaaaagctgttctatatcgaagaaaactaaaatacacattaaagttcaatgcaatgtgtgattctaaagtggatccttttgctatagaggacattatttatacaactgtcaaaattttaagtctaaggattaaatattagaaataaatcagtattaatgtcctgatcttgatggttgtattatggttatttatataggaggatttccttcactggaggaaatataagtatttggagaggatggggtattatgtttgcaaatatttcagggaaaaaaagttgtttttcctgttattgcaacttttctgtatgttttcaactgtttcaaataaaattaaaaaccacatgcctaggaataaatctgatagacaagatttctatgaagaagcaataaagcattgagagagatttttaaaagacctaagtaaatagagggaaatagcatgttcatagattgggagactcattattttaaagatgtcagttatctccaaactgatctacatgtcccatgcaataccagtcaaaatcccaattgtgatttttttatagaaattgacaaggtactttaaaaatgcatatggaaatgccaacgacctcttaaaaggacaaaaaaattgtaagagttactagctcttaaaccttaataaagttatagtaatatatggcattgctgaaaggaaacaggaatggaatagaacagagagcttagaaacagacctatgcatatatggtcattatgacaaaggtggaactgcaagagaaagttaaagatggtcttttcagtaaataatactggaataattggatttccatatggaaaaagtgaaatctcaccccaaccttatgcacaaaagtccattttaaatgggttatggatataaaaatgaaaggtaaaacaataagacttctagaaaataatacaagaaaatatcttcataatattaaaatctggaaaggcttaaacagaacagaaaataccctaaaccataaagagaaagactgataaatttgactacgatacaattaaaaacctcagttcatcaaaaaataaaacgaggcaaacaatagattgggagaatatattaatatttgcaatacataactgacaaatagatcatttctggaatacataaagcatttctgaaagtaataagaaaagacaaacaacccagtaggaaaatgggcaagagacttgaatgggcacttaataaaaaatgatattcacatggccaataaacatatgagataatatcaaccttatcatgaagtcttgttgtgattttaatttgctattccctgattgttaatgaggctgagttctgtttcacagaaaccttgcaaggttaaatttaacttatactaaggaatggtgagcatatggagcaaacagaaactttgtgacctgctggtgggtgtgtaaattggtataatcattttggatgatagcttggcgttatttactgaaattgatacatgccctgcaacctagaatttttactcccagttgtatacctaaaactgatgtgagcacaggtgctctaagcaacatgtataaagctgttcatagcaccatttttcttaatagccccaaactgaaacagcccaaatgtccattataaatagaaattgataaattgtaacattttgtacaatattatatatcaatgaaataagcaaattacagcagtatgccacaatgtggattgatttcatgaatatacgtgaaaaacagcacagaagaataccatacactatgtgattttaattttataaagttcaaatataggcaaagcaaagcaatagttttatttacacttctgtagataaaaactgtattatacacatgcatatatatgaatgcttaggtggtaaaattataaaggagagtaaagaaatgactgcattatattaagactaatggctacttttcaaagggagggagaggctggtgatgggaaaggggcatgagtggagtatgtaaggtgcttgcaatgtaatatttcttggcctatgtggtgtttgctttgtgataaatcagtaagctgtagttctttgtttttgcacttttcataagtataatacctaataaacatttaaatatttgc

SEQ ID NO: 94377 - DNA, 1736 bp, Homo sapiens
acccgttgcctgatgacgagagttgggagtgtggctggggctgcggatctccagcagtggcgttacttctagcggctggataccgggttctccgcgagatcccgagatattctccccgcacggaagcgacgactggcctggccagaggactcgcgtgggagcgaggtgccggccccgacaggacggtgaggtatgcagaagtaaggcggggcgccccctgcgggaagcgagcgcgccccggaaaatgagcgcctccccacaccaaggtgtccaggagtgagtgcgggaaggaactcggccgcccggagttgtggcctcatcgtgcttcccgccaaaaacgccttggtactgtcgggacgcggctaagcgtggacgcgcccgcatctgcccctcctccgcagtggtggaagacacccgcggagcgccggtggataagggccgtttcctgagaccagagctgtatccgcagcaggtcagcacttcgtgcgccctgtgtgcacctgtaaggaatggaatttaggccagtcggattttccaaatgtggagttgtgatgcccaggcagaaacttcagtttcttaggactgaaggtgtcatctatgagacagtcggttccgtggcattggcagtgatttgccatagagcttggacttaacttatatgtagtccacgctccaaaacacgcttcctgtagagaggggcgtaaactaatagatttgaaattgtcgagtcctttggtctctcaagaacgatgggaacttgacaagaaatttcgattattccctggtcttgatattacccacatgggaagatacttgcatagaatggtaatggtcattaccaatacaaccttctggtagctatttagatttctaagaataagaataatataaatgaatattagaacagacagtatctacagaataataatcaaaatgtaaagtcttgtcacttgaacttttggtcaagtgaaaatcaaggagaaaacttaaaattatattgctacatttcagtaagtgactataatttttaaattcattatcttttaatgcctcaggatcattctgaacttgctgtgtagtatttaattgtaaatataaaatgtgaatgatttggctgtatactctggaaattccttttaattaaatgatttgcttgattgtcttattgtggttgttgtctcgtatagtcatggaaaattcctttaactctttgaaattgaaggttttattagttgtattctaattagtttttagagaagactgttgtgactgttaaatacaattgaatatatttttgagtactcatttaatgtagtaaacacctacagcttgaaaagaaaagctgtcatataatttccttagaaattgttttacagcctacccgtatattacaagaaatctcaagtcaaacactggaaaagatgtcagaagattcagaaaaggaagactattcagacagaacaatcagtgatgaagatgaatcggtatgtttttctcaactttattttacttggagataaaatttgtattatataaatccccaattaaaatattataaaatcaattggatataaaaatcaattggatgtttaaattattgtcattgaagttgggaaataatttggctgaaaaagctaagctatcactgggaacactatgccctgtctagaaagagaaactatatttgtattttttttgagaaaatattttagctaagattcttctaggttttatta

SEQ ID NO: 94378 - DNA, 437 bp, Homo sapiens
cctgggctcaagtgaccgtcccaccttggcctcctgaagtgttttgattacaggtatgagccactgcaccaggccagcatacatttcatttggccttattgtcttaaagatgtctttgggtgtcaggccccacgcatttaatgcggctttattgtcttgtaggtatccttgggtatgaagtcccatgcattcagtgcagccccgtattgtcccgggtgtctgagggtgtcaggcccgatgcgttcaacacagccttgcgttcagtgcagccccgtattgtcccgggtttctgagggtgtcaggtccgatgcgttcaaaacagccttgcgttcagtgcagccccgtattgtcccgggtgtctgagggtgtcaggtccgatgcgttcaacacagccttgcgttccctgcagccccgtattgtcccgggtgtctgagggt

SEQ ID NO: 94379 - DNA, 393 bp, Homo sapiens
ctttagaaaaaaagtgtttcagtgtttgaattaccatcctgtctttctttgaagagccaaatacagcttacatcatcttcaggtaaaacaaaatttagggttcagaaactatatggcataagaaaatagttgaactgggcacagtgtttcatgcctgtaattccagcactttgggaggccaaggtgggcagattgcttgagctcaggagttctttcagaccagccagggcaacgtggcaagaccttatctctaccaaaaatacaaatagctggtcatggtatgtgcctgtggtcccagctgaggccggcaggattgcctgagccctggaggtcaaggctacagtgagccaaaactgtgccactgcactccagcctgggcaacagagtgagatc

SEQ ID NO: 94380 - DNA, 527 bp, Homo sapiens
tcattaactgagggttttctgctgtatttggttccacacatgcaatttatatggcatttaatctgagagacccatctgcctcagtggcccatttcccttttatttttggttgctaagaaatgttttgtatctcctttgttccgggtagtctgtgctgttctaaatccttacaagcacttcagatttcgtacattggggttcggagtaagatcaaaaggactagctggttggtgtgaggaagaatgtctgggacctggcccattataatagtatatctggacttagattttgaactctaaagcatatgtacagttggaatggaacacttgtagaagtaacacaggtctatatatcaatggttactgcagctgtggtttctagatggtataggctgccccaacatgaacagggcataaagcgcaccatcactgtggggctgcgtgccacagcggaccacttcaaccacatggctctttacatgattgatgccactgaattagaataaaatctcaaatcttaatatcact

SEQ ID NO: 94381 - DNA, 405 bp, Homo sapiens
aaataaaattcaatttaaaattcaacctttactttcactattaaatagcaatgcaggtaaaaggctgagtggaaaagcattaaatagatattcatggtgaatagactgtgaatgatctgtaatcagaagtcaaactacagcttatgtcaatgcacactagacccatgaaagagttccattaaaaatgtatgtataattctgaaattttcatgttgcatgacatgaatagtctgataagagagttctatcgtggttggtatggagggttttgggaactgaaaggtgctcattatttaactacaatgatgaagcaatgccaactttcagtctttttttttacaaaaataagttatatttttgaataagtaatacattacaatgaagtatcaataatttaaataatgt

SEQ ID NO: 94382 - DNA, 525 bp, Homo sapiens
gtgggcctgagctcagagcacaagcctccgagttcactcgggcgtttgttatagctagagcttcattccttaaatccagccagggaactgggaagccttactttttctttcaagatcaaatacaggtgtgtggcagagataggtgtaaaattgacacgcacttttaagctgaaacttaagacttctatgatcttttggacttaggggtcccttgaggttggagccccatcctctaggagggccccattgtgtatttccttggtgagtctggggtgtggcctctgggggtcactctgcatgggcaggcctggcccagtggggctgaggcagttttggggtcggctgcctctgtgtgggtgcctggttatcctctgagcccacaatcgaaaaggcagctagttctgtattcatgaagcttaggaactctgtcttggaaaggatggttataactacactctctccaagacagagttcctaagtttatgaatacagaactagctgctttaaaaagaacagaaggacctg

SEQ ID NO: 94383 - DNA, 439 bp, Homo sapiens
agatgaggaaactgaagcctagagaggcaaggtaacttgccctaggttatgcacctaggaagctatgaggcctgcgttccaacccaggtcaaaagactccaaggctggcaacctctgtttcactgctgcctctggactgcttgcagggaccagttatgaaacatatttctcattgtggaagggttgggcaacaatttatttaaaagtgcagtgcatttataagtatcaaagaaagtaccaatatggccttaaagattcagatgataaaaagttatctgttttttaagaaaatgaggccgggtgcggtggctcacgcctataatcccagcactttgggaggccactttggtggattgcttgaggccaggagtttgagactagcctggccaacatggtgaaacccgtctctactaaaaatacaaaaattagctgagcatgg

SEQ ID NO: 94384 - DNA, 417 bp, Homo sapiens
gacaagctgtttactaagtggggtctgcctatttaggaaagttgagaaagttgcttgcaactcattttgtgagctgagggtcaccaagccaaaccacaaatccacactagaaaagagaaggccgtgactaatgtggataaaaggcagaaagattcaggctggccttggcaagtgttagttgaggaaaaaggagctggtttaaggctgggactcttcccagaaaatggcataatttacaagcttcatctgagaagagtgtttacagctatgggaaggtttgatgttacagttacagtgaaaaagctgggcaacatctgttcctcttctctgtaatgggcttgttttgaaaggtaggatttagcaagaaagatcaaagcaaaacaatggtctcctcacgttccataaagtgtatgcatt

SEQ ID NO: 94385 - DNA, 132 bp, Homo sapiens
atactcacacacacgctgccacatgctctgtctctcacacatacctgacagttccgtgctgtcccgtttccctcggggtcttcccttcggaggctgcagctcgtctgagcatccagccttgaaggcactgag

SEQ ID NO: 94386 - DNA, 349 bp, Homo sapiens
cacaatagggttcgcactcctgtgagaatctgttgccacagctgatctgataggaggtggagctcaggtggtaatgctcgctcacctgctgctcacctcttgctgcgtggcctggttcctaacagccaccatccgcggcccaggggtggggaccctgcacttggtaacagcacctcctatctctccatccctcagcacattggcagtaaccaagaatgtctctatgtgttgccaaatgtccagtgagggtggggagcacatcactactcctggttttgagtaccactgctcacagtaaaatcaaatgcagatacaggcattctacagctaatcattcagtgtaattatc

SEQ ID NO: 94387 - DNA, 197 bp, Homo sapiens
aactggaaatgtgagttttattatccctctatgaggaaatgagtcacaaagaaaccaaattctaagaggttccattttattcacaaaaattaaaaatgctgtaacagaaaactgattcaaattcctgtggcaaaaatcagatgaaatattaaaatttaagttcttaattggagagtacggacattgttggttacttc

SEQ ID NO: 94388 - DNA, 546 bp, Homo sapiens
tcacagatccctcaccccaaccccagaccctacgtagcacattgcctgcaaagatgctcaagacgtgttttgcaatgaacaagagaatgagcagcccgcctgctccgggctgctcacctgttctagccaccttcaccatgttggcctccagctcccgtcttcagctgagcacaggggcctgtcccaggattcttggaagcggcttcctaaggcatcatgcttttgtgttctccttctcttaccagcctttctttccctctcacgtttctctccctttctgaccatgagcagggctgcagtgcagctgctgatggtcaagatgaagatggggaatgtgccagtgaaaacctggcatgcggaggcctcacctcactcaccctctcctgtcccagcttcaaaatctttcagagcgactcatgctgccagagggtggaggagtggaccttgaaatgacaagtgacagttcctcagcagtagcatctcctgctttctcagcctggtgacctgacccggcagcacgcccactgggcacctgtgcccacctgg

SEQ ID NO: 94389 - DNA, 504 bp, Homo sapiens
ctcccagttgtggtcgcggactccagttgtcaggtcttgggggccgaggccccggtgagcccaaggccagggacggccagctcgagacgcggggtcgcaagttccccttattaatcccgattccctctcatctgcaaaaaaatccttccatgcaccacggttgtacaaaaatccctcccgtgaagcgggccccgcccccagggtgtaatcgctccagcgggaaaacgaggcctggagcgcttccagtccctcggtagagccacgtgctcaggattttcgggcgtgtgcttcgtgcacgctcatccagacgctgcagaaacctggttcctgctgggcaaaggtctgttctgggaggctggaatccacagactccttgtggggcctagggttttagtgggagaccgagctgctccaaagcccctctccacgctcaacccccgcccaacccagcgttccagccacactggcttttctgagggtcattaaacgcagtttctcaaccag

SEQ ID NO: 94390 - DNA, 778 bp, Homo sapiens
agcggcgttgggactttcacttctttgatatggtttgtctgtgtccccaaccaaatctcctcttgaattgtagctcccataattcctagatgttgtgggagggaccgagtgggagataattgaatcatgggggtggtttcccccatactgttctcatggtagtgaataagtctcactagatctgatggttttataaggggaaacccctttcacttggttgtcattctctcttgtctgttgccatgtaagatgtgccttttgccttccaccatgattgtgaggcctccccagccacatggaactgtgagttcattaaacctctttttctttataaattattcagtcttgggtatgtctttatcagcagtgtgaaaacagactaatacactgctatatcccccagggcctgggaaatacttgcacatagtaggtctacaaataagtatttgctgaatgaatgagtacatgtgttcatttaataaattttgtttcattctggcatttgatttggagttactgtatctatattctaaatttttacattttttcacaaagtagctgagtgttatgtttctataagaacaccaagaagatgatctttaatctttcttgcttaataaggcctccccagactctcagacctgtttcctaaactcaaggagactgtcagtctctaagtggagtctaaggaggctaaagtggctaacattgctacagggcagagtgccaaagggaacagggctacacagacagggcgcaccggagatatacagaggga

SEQ ID NO: 94391 - DNA, 333 bp, Homo sapiens
ggttctacaaacatttcccagaccccattgccaaatttcctgttagggtctgccaatgggataccctaaaggaacccttaaagataggagagacttcattcctgttttccagttgtcacatgatctcagctgcagacatctggcttctactagctagttctgcactcaacatcagctttgccacacttctcagagatatttgcagcagtctgactacccacttggcagtctgagatcagtcatcccttgctttcccaccctcagggccatgcctttcctcagaggtataagcaccaagatacctggagggagcttctcccataaaagtcagta

SEQ ID NO: 94392 - DNA, 376 bp, Homo sapiens
cgcgccgcgcccgccccgcgcgcccctgtactccccgcgccgctcctcggggtcccgcggcgctcgcaggccgcgccgccctgccgcccctctctcgtggcttttacggcccgcccgcccctcagcagccctggggtgcccggggcggccctgcaagcgggagagagcggcgaggcggcggcgccgagtgcggggggatgcggagccgtgcccggccctgtcgcatccctcggccgcccgcccgcgcccggccccgcccggccttgcccgggctgcacgcacttctcccgcggcccagaatccacttgaccctgctgggcgctcccgcgggcggcggacccgggtgggtgcgggggaattccccggccgcccaggc

SEQ ID NO: 94393 - DNA, 734 bp, Homo sapiens
gcgagacccgtctcgacaaaaataaataaataaatttagtcaggcatggtggtgtgcatctgtacgtcccagctgctcgggaggctgaggcagaaggatctcttgggcccacgaggttgaggttgaggttgaggaggttgatgccatggcatcatggaatcactgtactccactgtgagcaacagagtaagaccctgtctctgaataaactaaattaacagtcttgctttcaagggcaacctataaaaataatattatactctattttactaagtgacatcaagtaagacacattttttatagcttttatttatttatttattattattttcaaagtgggacactttatatctgggaaaagattatacttgttcgttttctaaattattttttaaaaataatatactctattaaatgacatcaagtaagacactttatatttgggaaaagattatactgattggttttgtaaattattttattttaaaaatatttctgtattttagaactgtgtcacttaaatatttaccaaaaaaaaatgataagtatctttcaaggccaaaacagatgaaagatttcatattaaaatgttataatctcaacacctgtagtatcatttgtgtacattatttttctatacagtctggatttgtgtcacttaatttctttgttcaattaataggcattagtttgaaagtccataaagttcaacacagcaaggtaattaacatctg

SEQ ID NO: 94394 - DNA, 316 bp, Homo sapiens
tgtatacgtttttcacttaacatataatgagcatttttccaagcatgttttggtagcatgagttttaatgactgtatagtgttccattctaggtatatagtatgctttatttaagtttgctttttttttttttgagacggagtctcgctctgtcgcccagactggagtgcagtggcataatctcggctcactgcaacctcagcctccctggttcaagcaattctcgtgcctcagcctcccgaatagctgggactacaggtgcacgccaccatgcccagctaatttttttgtatttttagtagagatggggtttcac

SEQ ID NO: 94395 - DNA, 610 bp, Homo sapiens
gtcaaggacaagccaagcctggagtctggtgggtgctcagcgaacgcagccatgattattactgtcatgctgctgaacctattggtctgtgagttggatcctggatactaggtcatatgtaagctggctagagtcaggtcaaagagtcaactaaagtgcccaagagtggtcaattttgcctcttagattgtttcacacgctgctgtgagactttctcaaaattctttcaagttgttaatttgttcacataaatcagtggttttccttctgcctgcactacagacccagaagtggatgttctttccctctgatggcactgtcaggtagaacagccaatgggtcacgaggtgagtggtcagaatggtcaggggagaggtctgctgtcacccagacaagcatcaccttgcttccctggagagaggcagcaaaatgaccaagacagagaaacaaaggggaggctatgaagggaggtagtgctctcctcttggagctctgtctttctggagaagatggtttgtggagttcttgtgcatgaaacttgtttccttctttctttcttttttttgtttgagatggagtctcgctctgtcacccaggctgaagtgccgta

SEQ ID NO: 94396 - DNA, 383 bp, Homo sapiens
ttctgcaggatgtacaggaagcatggcaccatcatctatctgctcctggtgagggcctcaaaaagcttccactcaaggcagaagagggaggaagcatgtcataaagggagataaggagcaagagagagtggggaggcaacgtcaactcagagtgagaactcactcattatgcggaggagggcaccaagctattcatgaggaatcagcctccatgactcaaacatctcccatcaggccccatctccaatattggggattacatttcaacatgtgatttggaggggacaaaacagccagaccacatcataacacaagtgtccactaatatggattaatagacacttgggtaatattatggactatagctcaattattttaatgag

SEQ ID NO: 94397 - DNA, 115 bp, Homo sapiens
catccctttccttgaatacttttcaccccatcaccgcctaattaagtccatcattcctttaaaacttccttcaggtgtcacttcagccagaaaccttttgctgacaacctttcta

SEQ ID NO: 94398 - DNA, 349 bp, Homo sapiens
ctttaagaaatgttatccattcccacagagtcccagtttgttgaccttcaggccacagagtaaaaccttccttttaagtgaagcattccccattgggaagcactccagctttttctttttatgaggaactttaactgctggacttaatttaattattgtattttgtacatactcccagaagccccagggcatgagctttacttttttcaaaactttcaaataaatatcttttaggatcgcacatttctgatggcagtgttccgtctttgacttgtatttctaatccaaatactgaacttggatctttctatttcctgtgacctatcaatggacgggtttcaaccatagc

SEQ ID NO: 94399 - DNA, 172 bp, Homo sapiens
gcaggacttggaagcagcataaataacagtgggtaaacacatgggctatgccatcaaagtgaatctaaaccccggctctgctgtggtttacacatccatttcctaacctataaatgggggtttataagagtacagtacctacttcaaggaattgtagattcaacgcaacatt

SEQ ID NO: 94400 - DNA, 174 bp, Homo sapiens
aaaaaaaaaaagaaaatgggaacacatctccttttgcagaaactgaagaaacgtttatattatagagccctataggtatataaaatactttacaatcattgtatatctagaattattttatctcaatttttacagattgagaatcaaaagtattaatcacgtacattgattgag

SEQ ID NO: 94401 - DNA, 490 bp, Homo sapiens
catcacgggcttcagggatgaagtctccacgtcctgcatctggacgtcttttccatttactcctcccagatcctctttctacccttgtgttctgctccctgccacaggagggaacctgtacaaatgacatcggggttcagccagtgcagagacatggcaggagggcaggaggaagaggagagtgaggtcaagttacccattgccctggctccttccctgtgttgtggtcagggactgctggctatgtctctccaccagagctttctgcaaggcagccttctctgtataaccctttccttggttttccttctaggtgcataggtggacagtgtttatagcccccagttagtgcactatctagccacatggtttctatattagtcatttgccataacaaaacaccacagaccaggtggcaaaccacagaaattcattttctcccagttccggaggctgaaggtccaagatcaaggtgccagaagggttggtt

SEQ ID NO: 94402 - DNA, 265 bp, Homo sapiens
gagtagctgggaccacaggtgtgtgccaccacacccagctaattttttgtattttttacagagatggggtttcactatgttgcccaggctggtcttgaactcccgagctcaatggatttgcctcccttgcccttccaaagtgctgagattataggcatgagccaccatgcctggcctggaatcttcatttttaacaagtgccccagtagagtgtttttgggttttgtttttgttttgagatagagtctcgctctgtcacccaggc

SEQ ID NO: 94403 - DNA, 775 bp, Homo sapiens
ctttgtaagtgctgctaggtcgtggttaatcacgttagtcctctagacacaggtaattctaatgtattactgggtatgggtgtacttgttagtagtcagctttaccaacaagtaatatgcctacaccatgtaaggcttttgttttggggacagagtgaaagcaatagttaacaattaccaagtaattaggagccgggccgctttatatgcatccttttatgattccttacaagtttatgacgcaggtggtatttttttccagttgtgtggcgtttttgcccattaggactcaactaaaaacccatggctttggccaggcacagtggctgacgcctgtaatcccagcactttgggaggccgaggcgggcggatcacctgaggtcaggagttcaagatcagcctgggcaacacggtgaaaccccgtctctactaaaaatacaaaattagctgggcgtggtggcacatgcctgtaatcctcgggaggctgaggcaggataatcgcttgaacctgggaggcggaggatgcggtgagccgagatcgtgccattgcactccagcctgggcaacaaatctccgtctcaccaaaacaaacaaacgaaaaccgtggcttttatccatgaagctattaatatattgccttcttttgaagtggaataaaacaatctgccttcagataacttaaaatctgatatgggaaataagacgcgctgtaataaataatatgaaagagaatgggataagtaccagaagattgtgaacaaaacctaattaataa

SEQ ID NO: 94404 - DNA, 1103 bp, Homo sapiens
ctgggacattttgctaaacatagaagatttcagttccagatttttcaggtgggtgggggagctattttagtcgggggggcaggggggtgggaaattttcaatttataaagatggacaatttttgtgttgtatttgaagcttttgaaagaattttgtaatattttccaagtttggatttatgtgcattgttaacaagaactgaaattctaacttttttggtaacattaaagtttaggtagcaggattgaaggaaatgatttaagaaggatatagctgttaaatgcaaatgaactgtcattacaaatgaacctttttggtacctgttgggagattttgggatttttagaagttaggccagtcacatctccagcttcttttgctgcagaaatatgcaactgaactcctcatggaggggtcatcaccacaaaggtcatggaagggtcattatttctcttgttggcattttattgcagcccattttaaatgtttgtacagaaatatttttcattctgtgaaaatttatttggagttctgtatgaaactggaagaactctggatacttttatatgttctcttttaattaaaaaaatgattagaattatcctaacactaaagtgttaaactggaatggttgacaagatattcaggatctcagtctacacattgaggggttggggaaaatgtaatgttgtccttagtttattttcctttctaaaaaaaataccccacgaaagggattctgatcagttctctgccatttccctctatctgtgaaataacagcttcgtataaccacaaccaaaaacagatgttctgtattaggagaatcgaattgaaagttattcaaagccaaaataagtttagatttcaaaatcattccagctctgcttttatctatcctggatttggtagaaaactaatttgaaagagaatttaattttcttaaaattccatatatatatatatatatatatatatatatatatatatatatatatatatataaaattgtctttaattgtattcaggatttattttaataataaccgatttggaccattttgaacattccctgttttaaaattcatatgacttccttttaa

SEQ ID NO: 94405 - DNA, 503 bp, Homo sapiens
aatgcttctcagactgtcctttctagactgcaggctcactgacaacagataggggtcctcctacatgagggtcctcccacaaatgctccgcaatacgggtgacaggccagtggggtgttccccagctcctaccaagggctcacagtctcgggcaatctctatcctcccatctttcagcctctgctgcattctgacctcttcattaaccccatcgggaagttgtccccccaagggcaggggaagccatccaggggctttcattatccgggtctcaaatctggggccagattcagccaatgggtagggtacaagaaggccttctacgtcccatcctggagggcagaggtctgggccgtggctggaagaaagcctgctctggtgacccctctcaggccctggcccaccccagtcctgcccttgacgacaaaagagggtgtccctgtctctcaggggtctaggatcctggacactgtgtctgctttgaagggaaagacgcctctgag

SEQ ID NO: 94406 - DNA, 220 bp, Homo sapiens
gaaataaaatgttaccctgagcaaaaacaatgtcttggcagtgataggctacaatgatacaaaggtcatggtcttgtttgaaaaagaaaacaagcgtaactataatctggcattttagatccatgcactcatctgtgaattctttactgctctttgtaggaaaaaacacacaagcttcctgtaatatactcaagccagattggcacctaaacttaaactg

SEQ ID NO: 94407 - DNA, 644 bp, Homo sapiens
agggtctgtgaggtgcggcgcagggtctgaggtgtggcgcggcgtctgtgaggtgcggcgcggcgtctgtgaggggcgcggcgtctgtgatgggcgcagggtctgtgaggtgcaaaggccatttagtgtgtggccttagttaattttttgttttcaattttctgtctctcatgttattgatctgtaaaaggagcataatcgtaagtgtctcttcttattaggttacttgtgaggcgtaagtgaagtactatgtgttaactagtatcatgaaactacagcctcactctccggaggaaatagtgtaatgatagcgccgtttacagggtgcaccgtaacaggaggcaaaaacagaggtggatacgtgcagagaagtctttaggtggtcttgacactagagctgaatttgaaggaagttgagaacttgttagatgaagggacctgagaacaggaacaagtgttcaccaagaccggtctgtgtgaacacacagaggcggaaatcatgccaaaacttgcagagtggcaggaaactccattcagctggagaaagcatacatatggagggagtgaaaggagataacagtggagaggtctgggcaaatttaggctgacttcaagaaggcaggagtttcctgtgaagaaaattg

SEQ ID NO: 94408 - DNA, 739 bp, Homo sapiens
ggaaacttgtaatcataagtacattttcttcaaaaagatgaataaggaaatgggaaataacatatttcctatgttttccctaaggtagacctgtcgtaacacagattcagaaagaaaaatcagtaagaaggggtttctccatgtaatccacagttttccccctgctttgaaacagaaatcatcgttcactacagaagtatctgtaagcaaaacacactttatcctctctagggaggagaaagggttaactagctacagtcaccagcaggaccaccacagagcaggactggctgggcccaaacctgctcccccatcccttcaactcctctaactcacagctccttgttttttttctttcttaccttcctcgtaattctctcatgtaaacctcatgcccagtgatgtttgcccaatttctgggaaaagataaagctccagaaacaatttgattttcctctaacatttcaaaatatttcaagtcaaaacctgaaccttggaaaaaaaaaaggaaatctttgaaaacagcttcaatcactgtccaggttcacaaatatctagttaccagactcatagttttcctactttaaacaatgaagaactatcagacaaaagaagaaatgttgaaaaatttagatgacaatgaatttcattgctgcttgctctcagggagtgttattgctaacttagtaaacaaaaagggagcttgtcacagatgaatgaacatttcaaaactggctgc

SEQ ID NO: 94409 - DNA, 457 bp, Homo sapiens
cctgtttctgcctgcagcttggtcctaaatgtgagacaattgtgaaaagtggaggacagagccacctggttaaatacagccccagctttctggtgagaggactgaaaccaagatgtgtcaagtaactagaatgtgcctggacagatactgtagaaagcaaaaccataaagttgttcatgagcttgtggacgcacctgccagctgtgaataagtggctctaatcccgaacaacttacctaaaaagagcctgagagctgaactgtgcaatggcccactttccagtcctcactgaccactgggttgcacacactttggagatctctgaacagcagtgtcaaggctttcaaatagagttatctttgaaacgacaacacatgaaagtctggttggtacttggagcttgaatacaaggcaattgtgtgcctgcaaaaacaaaaatagcaatattatccttaag

SEQ ID NO: 94410 - DNA, 397 bp, Homo sapiens
actgctgaccggctcagtgaggccttgctgagccagcattaaagactgcaacactttcttttcctttctcagttctttcttcttagtgcttcttagtgcttgccaatatccaacttagtatttctctctccccaccaaaagaataaaagttccctgcgtgcagagatacctggtcggcagatggatgaaatgatataaatttgctaacaagagatccattcagacgcttccatctgaagcctccatttgctctatcaccaaacgagtaggaataactgccagacataccccagatctacatgggaacatttaaagcaggccatgccctcttcaaggccccacacaaacattgtggcaggaggcagggctggaggggagcatcagagcagacatgggg

SEQ ID NO: 94411 - DNA, 803 bp, Homo sapiens
tccagcatgaactccatgtcctccaggaagccctggtggacttgggcagacctggggacacgtccagcctcctggcaagatgggggtaacaggagtgtgtataaaggggaaggcaagaatgtgcccttggtggagcagtgaaaagaagccctcatgtgacaagtgttttgctcctaacccacctcctctggtgacatcttctgggttaactgctcttgctgatctctgcacataaaccaagctaactgtgagaggcctttcatttctagtttaaagcaaggagaccacagttccttctgaacactcacccccaaggagataaggagggcgtcccatgagcaacactgtgtgttaaagatgtacacgagcactgggacctgaccaaggacaaacacgtctccagccccctcagacccttgctgctgctcagatgtccgctgtcatcggtcacatcctaacctcaaccccctctctcctcccacataaaaggaggctgaaattcatagtaacttcagatggttctttaggacactggcccaccaccttctcggttgctggctctccaaaacaaagccccctcccttgacccaattccttgtttcttgacgtactggctgttgtgcagtgcatggtaccggcttgaactcggttatgttggcatggcctctggcggtgctcagtttgtgtggatgagtattttacagctactgtcctatttccagtccccttcctctggacggctatgggatgtgctgtggatgccctctcttaggctggaataaaccaccctaccttctcctctg

SEQ ID NO: 94412 - DNA, 331 bp, Homo sapiens
ctagcaacagattttaagcaccaatttgcctttgggcttcaacaaactctacccatatttccattcttgatttgttttaaaaagacattaacttttatttttaacttcttgttttagatttagcattctcaatcaaggtatgaataatgcattatggttagccttctccttcaagttgtattctatatgattcccaattcatcagacaatttgagtaagaaaaacaccttctaatttgtttgttgctatgtaaacaaaacatattttttcctagataatactttgcagattgaatatgaataacaaaaatctatttaaagtatattttata

SEQ ID NO: 94413 - DNA, 181 bp, Homo sapiens
gatttctaatttaattgcattttaatgagaaaaagtagttctcatattactgattctttgaaatttattggtaaaggctgggtgggcatggtaactcatgcctgtaatcctggcactttgggaggctgaggcaggtggatagcttgagtcaaagagttcgagaccagcctgggcaacatga

SEQ ID NO: 94414 - DNA, 318 bp, Homo sapiens
cctgtattcaactgaaacatttaaggaggtcagcattaatattatgtcaaaagcacaaagcttgggttagacaaattagatgagtcaacattttggctctgcagctggttaactgtattcttaatcaggtacttcactaaacctcagtatactcactcgtcaagctgggttacgattctgtagcaaccaccttagggtttttgtaaggctgtaaaaagtgaaaaagaatgcatgtggagtgcttagcccagtgcctgcgaccttgtatgtgttgacagctgtgatgattctaagtggcatttaaaattatttatttat

SEQ ID NO: 94415 - DNA, 335 bp, Homo sapiens
tgttgctgcagagcctttcctgaggttggggagggtgtctgcagaaggaggctggagactgctgtagaatcactactactggtgacatcgttgttcttctctgacctgacccctgagttggtcagacttggccatgtggacaaccccctgcttctcccactctctgctgccctaacctgagactggttattcaagtgtcttcctcactgtctcccccaaacaggaagtattttttgatgctcttgcatctggggctgacccaacactgctcatcccatgtggtcattgctggcttacaggtcagtctggcccttgcattcgatgttctgtaagga

SEQ ID NO: 94416 - DNA, 806 bp, Homo sapiens
aggtcatacactgattttcatgagctacgcttctgttcagccatatgctgattttgctgtctacctgtgcactccttccttctatgtatgcattctcaggtttccctgaagaagatggatgttttcccttatttcctcctctactttgtagattcaatcttgccattatctcaggtttccaaaatctcaccttttctttttgactgcacattattttaaaaaattttgttcatgcttattacaaactcagaacttaaaagggaataattattgtctgttttcaaatgtggttgcggatttctaaaaggttggctagcagttattatgcctttacctctcaatgagcacagcccagttctcttatattaggttagaggaagaatggagaaggaaccagacctactaaagctataaggtgaggagagaagttaaaccagacagaatgccagaaagtttggaatatgacataaacctaagagtagttctcagaccagtgggtgctgtcggtttcggtttatgtgactaatcctaccattaccattgtgagatttcttcctaaagtaaggcaactaatcctagaatttcacaattaaaaccaactgttaaatactttaatttaattttatatactattgctcaattttgcttcttgagttttactggtttattttagttttatggctgataaacttatgtgaatattgtttgtctgtacttctccactgaaaaaaatgcttaaagttattgtactctaaaaccactagatactgtaccatttatttatcttatagtagaatcacatatta

SEQ ID NO: 94417 - DNA, 342 bp, Homo sapiens
tctaaaccagatgccccattttacagaggaatgaggcattcgcaggctaaatgactcgtgcgggtcccccaatagctgatggcgaagctgtgaattcagacccccacttcgcttgagcagtgacgggaagctggtgacttcaggctctggcagaggctggccctggtgacctgcccacctcctcttctgtctcctggaggctggcccttgtgacctgcccacctcctcttctgtctcctggaggctggccctggtgacctgcccacctcctcttctgtctcctggaggctggccctagttgcaggaaaacaggcttagggctgccactgattctacattatg

SEQ ID NO: 94418 - DNA, 420 bp, Homo sapiens
tgttatgatttccacctcttggaagaagaagtgcaagtgtcataacaagtttacgttagatattatttggggattatcaaatcaggccagagggaagacttattttgttttgtgttttaacattagcaaaaacactctgtcttaccaagtcaggttatctggtggtgctgtggtgagcagccatcatctctgcactgcctctgactggcttgcaggagaagagaattgcgtgtgaggtgacttgctgctttggagatgttcccagccaggacagctccacaaggagcaggcatgggatgtgtgtggacctgcaccaggaagagggcagcgggcctgtgatgactggctgttagaatgagtgccattagaattgcctttttttcaagttttcatgagactcaatcttgtttttctgccttt

SEQ ID NO: 94419 - DNA, 6839 bp, Homo sapiens
  misc_feature (3)..(3): n is a, c, g, or t
gcncaggtactcaggtatgtctcaagtccatgtcctccaaacagactcagcatctagctcaccgctgccaacacgacttccactgtactcttgatcaatttaccttgatgcactaccggtgaagaacggggactcgaattcccttacaaacgcctccagcttgtagaggcggtcgtggaggacccagaggaggagacgaaggggaaggaggcggtggtggaggaggcaaaggccttggacgaccattgttggcgaggggcaccactccgggagaggcggcgctgggcgtcttgggggtgcgcgccgggagcctgcagcgggaccagcgtgggaacgcggctggcaggctgtggacctcgtcctcaccaccatggtcgggctccttttgttttttttcccagcgatctttttggaggtgtcccttctccccagaagccccggcaggaaagtgttgctggcaggagcgtcgtctcagcgctcggtggccagaatggacggagatgtcatcattggagccctcttctcagtccatcaccagcctccggccgagaaagtgcccgagaggaagtgtggggagatcagggagcagtatggcatccagagggtggaggccatgttccacacgttggataagatcaacgcggacccggtcctcctgcccaacatcaccctgggcagtgagatccgggactcctgctggcactcttccgtggctctggaacagagcattgagttcattagggactctctgatttccattcgagatgagaaggatgggatcaaccggtgtctgcctgacggccagtccctccccccaggcaggactaagaagcccattgcgggagtgatcggtcccggctccagctctgtagccattcaagtgcagaacctgctccagctcttcgacatcccccagatcgcttattcagccacaagcatcgacctgagtgacaaaactttgtacaaatacttcctgagggttgtcccttctgacactttgcaggcaagggccatgcttgacatagtcaaacgttacaattggacctatgtctctgcagtccacacggaagggaattatggggagagcggaatggacgctttcaaagagctggctgcccaggaaggcctctgtatcgcccattctgacaaaatctacagcaacgctggggagaagagctttgaccgactcttgcgcaaactccgagagaggcttcccaaggctagagtggtggtctgcttctgtgaaggcatgacagtgcgaggactcctgagcgccatgcggcgccttggcgtcgtgggcgagttctcactcattggaagtgatggatgggcagacagagatgaagtcattgaaggttatgaggtggaagccaacgggggaatcacgataaagctgcagtctccagaggtcaggtcatttgatgattatttcctgaaactgaggctggacactaacacgaggaatccctggttccctgagttctggcaacatcggttccagtgccgccttccaggacaccttctggaaaatcccaactttaaacgaatctgcacaggcaatgaaagcttagaagaaaactatgtccaggacagtaagatggggtttgtcatcaatgccatctatgccatggcacatgggctgcagaacatgcaccatgccctctgccctggccacgtgggcctctgcgatgccatgaagcccatcgacggcagcaagctgctggacttcctcatcaagtcctcattcattggagtatctggagaggaggtgtggtttgatgagaaaggagacgctcctggaaggtatgatatcatgaatctgcagtacactgaagctaatcgctatgactatgtgcacgttggaacctggcatgaaggagtgctgaacattgatgattacaaaatccagatgaacaagagtggagtggtgcggtctgtgtgcagtgagccttgcttaaagggccagattaaggttatacggaaaggagaagtgagctgctgctggatttgcacggcctgcaaagagaatgaatatgtgcaagatgagttcacctgcaaagcttgtgacttgggatggtggcccaatgcagatctaacaggctgtgagcccattcctgtgcgctatcttgagtggagcaacatcgaatccattatagccatcgccttttcatgcctgggaatccttgttaccttgtttgtcaccctaatctttgtactgtaccgggacacaccagtggtcaaatcctccagtcgggagctctgctacatcatcctagctggcatcttccttggttatgtgtgcccattcactctcattgccaaacctactaccacctcctgctacctccagcgcctcttggttggcctctcctctgcgatgtgctactctgctttagtgactaaaaccaatcgtattgcacgcatcctggctggcagcaagaagaagatctgcacccggaagcccaggttcatgagtgcctgggctcaggtgatcattgcctcaattctgattagtgtgcaactaaccctggtggtaaccctgatcatcatggaaccccctatgcccattctgtcctacccaagtatcaaggaagtctaccttatctgcaataccagcaacctgggtgtggtggcccctttgggctacaatggactcctcatcatgagctgtacctactatgccttcaagacccgcaacgtgcccgccaacttcaacgaggccaaatatatcgcgttcaccatgtacaccacctgtatcatctggctagcttttgtgcccatttactttgggagcaactacaagatcatcacaacttgctttgcagtgagtctcagtgtaacagtggctctggggtgcatgttcactcccaagatgtacatcattattgccaagcctgagaggaatgtccgcagtgccttcaccacctctgatgttgtccgcatgcatgttggcgatggcaagctgccctgccgctccaacactttcctcaacatcttccgaagaaagaaggcaggggcagggaatgccaagaagaggcagccagaattctcgcccaccagccaatgtccgtcggcacatgtgcagctttgaaaacccccacactgcagtgaatgtttctaatggcaagtctgtgtcatggtctgaaccaggtggaggacaggtgcccaagggacagcatatgtggcaccgcctctctgtgcacgtgaagaccaatgagacggcctgcaaccaaacagccgtcatcaaacccctcactaaaagttaccaaggctctggcaagagcctgaccttttcagataccagcaccaagaccctttacaacgtagaggaggaggaggatgcccagccgattcgctttagcccgcctggtagcccttccatggtggtgcacaggcgcgtgccaagcgcggcgaccactccgcctctgccgccccacctgaccgcagaggagacccccctcttcctggccgaaccagccctccccaagggcttgccccctcctctccagcagcagcagcaaccccctccacagcagaaatcgctgatggaccagctccagggagtggtcagcaacttcagtaccgcgatcccggattttcacgcggtgctggcaggccccgggggtcccgggaacgggctgcggtccctgtacccgcccccgccacctccgcagcacctgcagatgctgccgctgcagctgagcacctttggggaggagctggtctccccgcccgcggacgacgacgacgacagcgagaggtttaagctcctccaggagtacgtgtatgagcacgagcgggaagggaacacggaagaagacgaactggaagaggaggaggaggacctgcaggcggccagcaaactgaccccggatgattcgcctgcgctgacgcctccgtcgcctttccgcgactcggtggcctcgggcagctcggtgcccagctccccagtgtccgagtcggtgctctgcacccctcccaacgtatcctacgcctctgtcattctgcgggactacaagcaaagctcttccaccctgtaagggggaagggtccacatagaaaagcaagacaagccagagatctcccacacctccagagatgtgcaaacagctgggaggaaaagcctgggagtggggggcctcgtcgggaggacaggagaccgctgctgctgctgccgctactgctgctgctgccttaagtaggaagagagggaaggacaccaagcaaaaaatgttcaggccaggattcggattcttgaattactcgaagccttctctgggaagaaagggaattctgacaaagcacaattccatatggtatgtaacttttatcacaaatcaaatagtgacatcacaaacataatgtcctcttttgcacaattgtgcatagatatatatatgcccacacacactgggccatgcttggcaaggaacagaccacgtggcatccagtcggatcatgagttcacctgatgcattcggagtgagctggtggagccagacagagcaggtgcggggaagggaagggccaggccagacccatcccaaacggatgatgggatgatgggacagcagttccttgctcagaagcccttctccccgctgggctgacagactcctcatcttcaggagactcaggaatggagcggtacaggggtctctcttcatccaccgcaacccatccagtgccagctttgagattgcacttgaagaaaggtgcatggaccccctgctgctctgcagattccctttatttaggaaaacaggaataagagcaaaattatcaccaaaaagtgcttcatcaggcgtgctacaggaggaaggagctagaaatagaacaatccatcagcatgagactttgaaaaaaaaaacacatgatcagcttctcatgttccatattcacttattggcgatttggggaaaaggccggaacaagagattgttacgagagtggcagaaacccttttgtagattgacttgtgtttgtgccaagcgggctttccattgaccttcagttaaagaacaaaccatgtgacaaaattgttaccttccacttactgtagcaaataatacctacaagttgaacttctaagatgcgtatatgtacaatttggtgccattatttctcctacgtattagagaaacaaatccatctttgaatctaatggtgtactcatagcaactattactggtttaaatgacaaataattctatcctattgtcactgaagtccttgtaactagcgagtgaatgtgttcctgtgtccttgtatatgtgcgatcgtaaaatttgtgcaatgtaatgtcaaattgacctgtcaatgtcaacctagtagtcaatctaactgcaattagaaattgtcttttgaatatactatatatattttttatgttccaataatgttttatacatcattgtcatcaatatctacagaagctctttgacggtttgaatactatggctcaaggttttcatatgcagctcggatggacatttttcttctaagatggaacttatttttcagatattttctgatgtggagatatgttattaatgaagtggtttgaaaatttgttatattaaaagtgcacaaaaactgagagtgaaaataaaaggtacattttataagcttgcacacattattaacacataagattgaacaaagcatttagattattccaggttatatcatttttttaaagattttccacagctacttgagtgtctaacatacagtaacatctaactcagctaataatttgtaaaatctttatcaatcacattgtggcctcttttaatttttatgttcatggacttttattcctgtgtcttggctgtcataactttttatttctgctatttgctgttgtgtaatatccatggacatgtaatccacttactccatctttacaatccctttttaccaccaataaaaggattttttcttgctgttttgatttcttctattatttgtggaatgaattataccccccttaaatatctttgtttatgccttatgttcagtcatattttaatatgcttccttcatattgaagctgctgatttctcagccaaaaatcatcttagaatctttaaatatccattgcatcatttgttcagaatttaacatccattccaatgttggaggcttgtattacttatatttcatcatattctattgccaagtttagtcagttccacaccaagaatgaactgcatttcctttaaaaattattttaaaacacctttattgaaaagatctcatgactgagatgtggactttggttccatgttttcattgtaagaaagcagagagcggaaaatcaatggctccagtgattaatagatgggtttttagtaattgacaaattcatgagggaaagcatatgatctctttattagtgaatcatgcttattttttactcttaacgccactaatatacatccctaatatcacagggcttgtgcattcagatttttaaaaaattaggatagataaggaaacaacttatattcaagtgtaagatgatatcaggttggtctaagacttttggtgaacacgttcattcaactgtgatcactttattactctgaatgcctactattatcctgattatggggtctcctgaataaatagagtattagtccttatgtcatcattgttcaaaattggagatgtacacatacataccctataccaagagggccgaaactcttcaccttgatgtatgttctgatacaagttgttcagcttcttgtaaatgtgttttccttcggcttgttactgccttttgtcaaataatcttgacaatgctgtataataaatattttctatttatt

SEQ ID NO: 94420 - DNA, 6754 bp, Homo sapiens
  misc_feature (3)..(3): n is a, c, g, or t
gcncaggtactcaggtatgtctcaagtccatgtcctccaaacagactcagcatctagctcaccgctgccaacacgacttccactgtactcttgatcaatttaccttgatgcactaccggtgaagaacggggactcgaattcccttacaaacgcctccagcttgtagaggcggtcgtggaggacccagaggaggagacgaaggggaaggaggcggtggtggaggaggcaaaggccttggacgaccattgttggcgaggggcaccactccgggagaggcggcgctgggcgtcttgggggtgcgcgccgggagcctgcagcgggaccagcgtgggaacgcggctggcaggctgtggacctcgtcctcaccaccatggtcgggctccttttgttttttttcccagcgatctttttggaggtgtcccttctccccagaagccccggcaggaaagtgttgctggcaggagcgtcgtctcagcgctcggtggccagaatggacggagatgtcatcattggagccctcttctcagtccatcaccagcctccggccgagaaagtgcccgagaggaagtgtggggagatcagggagcagtatggcatccagagggtggaggccatgttccacacgttggataagatcaacgcggacccggtcctcctgcccaacatcaccctgggcagtgagatccgggactcctgctggcactcttccgtggctctggaacagagcattgagttcattagggactctctgatttccattcgagatgagaaggatgggatcaaccggtgtctgcctgacggccagtccctccccccaggcaggactaagaagcccattgcgggagtgatcggtcccggctccagctctgtagccattcaagtgcagaacctgctccagctcttcgacatcccccagatcgcttattcagccacaagcatcgacctgagtgacaaaactttgtacaaatacttcctgagggttgtcccttctgacactttgcaggcaagggccatgcttgacatagtcaaacgttacaattggacctatgtctctgcagtccacacggaagggaattatggggagagcggaatggacgctttcaaagagctggctgcccaggaaggcctctgtatcgcccattctgacaaaatctacagcaacgctggggagaagagctttgaccgactcttgcgcaaactccgagagaggcttcccaaggctagagtggtggtctgcttctgtgaaggcatgacagtgcgaggactcctgagcgccatgcggcgccttggcgtcgtgggcgagttctcactcattggaagtgatggatgggcagacagagatgaagtcattgaaggttatgaggtggaagccaacgggggaatcacgataaagctgcagtctccagaggtcaggtcatttgatgattatttcctgaaactgaggctggacactaacacgaggaatccctggttccctgagttctggcaacatcggttccagtgccgccttccaggacaccttctggaaaatcccaactttaaacgaatctgcacaggcaatgaaagcttagaagaaaactatgtccaggacagtaagatggggtttgtcatcaatgccatctatgccatggcacatgggctgcagaacatgcaccatgccctctgccctggccacgtgggcctctgcgatgccatgaagcccatcgacggcagcaagctgctggacttcctcatcaagtcctcattcattggagtatctggagaggaggtgtggtttgatgagaaaggagacgctcctggaaggtatgatatcatgaatctgcagtacactgaagctaatcgctatgactatgtgcacgttggaacctggcatgaaggagtgctgaacattgatgattacaaaatccagatgaacaagagtggagtggtgcggtctgtgtgcagtgagccttgcttaaagggccagattaaggttatacggaaaggagaagtgagctgctgctggatttgcacggcctgcaaagagaatgaatatgtgcaagatgagttcacctgcaaagcttgtgacttgggatggtggcccaatgcagatctaacaggctgtgagcccattcctgtgcgctatcttgagtggagcaacatcgaatccattatagccatcgccttttcatgcctgggaatccttgttaccttgtttgtcaccctaatctttgtactgtaccgggacacaccagtggtcaaatcctccagtcgggagctctgctacatcatcctagctggcatcttccttggttatgtgtgcccattcactctcattgccaaacctactaccacctcctgctacctccagcgcctcttggttggcctctcctctgcgatgtgctactctgctttagtgactaaaaccaatcgtattgcacgcatcctggctggcagcaagaagaagatctgcacccggaagcccaggttcatgagtgcctgggctcaggtgatcattgcctcaattctgattagtgtgcaactaaccctggtggtaaccctgatcatcatggaaccccctatgcccattctgtcctacccaagtatcaaggaagtctaccttatctgcaataccagcaacctgggtgtggtggcccctttgggctacaatggactcctcatcatgagctgtacctactatgccttcaagacccgcaacgtgcccgccaacttcaacgaggccaaatatatcgcgttcaccatgtacaccacctgtatcatctggctagcttttgtgcccatttactttgggagcaactacaagatcatcacaacttgctttgcagtgagtctcagtgtaacagtggctctggggtgcatgttcactcccaagatgtacatcattattgccaagcctgagaggaatgtccgcagtgccttcaccacctctgatgttgtccgcatgcatgttggcgatggcaagctgccctgccgctccaacactttcctcaacatcttccgaagaaagaaggcaggggcagggaatgccaattctaatggcaagtctgtgtcatggtctgaaccaggtggaggacaggtgcccaagggacagcatatgtggcaccgcctctctgtgcacgtgaagaccaatgagacggcctgcaaccaaacagccgtcatcaaacccctcactaaaagttaccaaggctctggcaagagcctgaccttttcagataccagcaccaagaccctttacaacgtagaggaggaggaggatgcccagccgattcgctttagcccgcctggtagcccttccatggtggtgcacaggcgcgtgccaagcgcggcgaccactccgcctctgccgccccacctgaccgcagaggagacccccctcttcctggccgaaccagccctccccaagggcttgccccctcctctccagcagcagcagcaaccccctccacagcagaaatcgctgatggaccagctccagggagtggtcagcaacttcagtaccgcgatcccggattttcacgcggtgctggcaggccccgggggtcccgggaacgggctgcggtccctgtacccgcccccgccacctccgcagcacctgcagatgctgccgctgcagctgagcacctttggggaggagctggtctccccgcccgcggacgacgacgacgacagcgagaggtttaagctcctccaggagtacgtgtatgagcacgagcgggaagggaacacggaagaagacgaactggaagaggaggaggaggacctgcaggcggccagcaaactgaccccggatgattcgcctgcgctgacgcctccgtcgcctttccgcgactcggtggcctcgggcagctcggtgcccagctccccagtgtccgagtcggtgctctgcacccctcccaacgtatcctacgcctctgtcattctgcgggactacaagcaaagctcttccaccctgtaagggggaagggtccacatagaaaagcaagacaagccagagatctcccacacctccagagatgtgcaaacagctgggaggaaaagcctgggagtggggggcctcgtcgggaggacaggagaccgctgctgctgctgccgctactgctgctgctgccttaagtaggaagagagggaaggacaccaagcaaaaaatgttcaggccaggattcggattcttgaattactcgaagccttctctgggaagaaagggaattctgacaaagcacaattccatatggtatgtaacttttatcacaaatcaaatagtgacatcacaaacataatgtcctcttttgcacaattgtgcatagatatatatatgcccacacacactgggccatgcttggcaaggaacagaccacgtggcatccagtcggatcatgagttcacctgatgcattcggagtgagctggtggagccagacagagcaggtgcggggaagggaagggccaggccagacccatcccaaacggatgatgggatgatgggacagcagttccttgctcagaagcccttctccccgctgggctgacagactcctcatcttcaggagactcaggaatggagcggtacaggggtctctcttcatccaccgcaacccatccagtgccagctttgagattgcacttgaagaaaggtgcatggaccccctgctgctctgcagattccctttatttaggaaaacaggaataagagcaaaattatcaccaaaaagtgcttcatcaggcgtgctacaggaggaaggagctagaaatagaacaatccatcagcatgagactttgaaaaaaaaaacacatgatcagcttctcatgttccatattcacttattggcgatttggggaaaaggccggaacaagagattgttacgagagtggcagaaacccttttgtagattgacttgtgtttgtgccaagcgggctttccattgaccttcagttaaagaacaaaccatgtgacaaaattgttaccttccacttactgtagcaaataatacctacaagttgaacttctaagatgcgtatatgtacaatttggtgccattatttctcctacgtattagagaaacaaatccatctttgaatctaatggtgtactcatagcaactattactggtttaaatgacaaataattctatcctattgtcactgaagtccttgtaactagcgagtgaatgtgttcctgtgtccttgtatatgtgcgatcgtaaaatttgtgcaatgtaatgtcaaattgacctgtcaatgtcaacctagtagtcaatctaactgcaattagaaattgtcttttgaatatactatatatattttttatgttccaataatgttttatacatcattgtcatcaatatctacagaagctctttgacggtttgaatactatggctcaaggttttcatatgcagctcggatggacatttttcttctaagatggaacttatttttcagatattttctgatgtggagatatgttattaatgaagtggtttgaaaatttgttatattaaaagtgcacaaaaactgagagtgaaaataaaaggtacattttataagcttgcacacattattaacacataagattgaacaaagcatttagattattccaggttatatcatttttttaaagattttccacagctacttgagtgtctaacatacagtaacatctaactcagctaataatttgtaaaatctttatcaatcacattgtggcctcttttaatttttatgttcatggacttttattcctgtgtcttggctgtcataactttttatttctgctatttgctgttgtgtaatatccatggacatgtaatccacttactccatctttacaatccctttttaccaccaataaaaggattttttcttgctgttttgatttcttctattatttgtggaatgaattataccccccttaaatatctttgtttatgccttatgttcagtcatattttaatatgcttccttcatattgaagctgctgatttctcagccaaaaatcatcttagaatctttaaatatccattgcatcatttgttcagaatttaacatccattccaatgttggaggcttgtattacttatatttcatcatattctattgccaagtttagtcagttccacaccaagaatgaactgcatttcctttaaaaattattttaaaacacctttattgaaaagatctcatgactgagatgtggactttggttccatgttttcattgtaagaaagcagagagcggaaaatcaatggctccagtgattaatagatgggtttttagtaattgacaaattcatgagggaaagcatatgatctctttattagtgaatcatgcttattttttactcttaacgccactaatatacatccctaatatcacagggcttgtgcattcagatttttaaaaaattaggatagataaggaaacaacttatattcaagtgtaagatgatatcaggttggtctaagacttttggtgaacacgttcattcaactgtgatcactttattactctgaatgcctactattatcctgattatggggtctcctgaataaatagagtattagtccttatgtcatcattgttcaaaattggagatgtacacatacataccctataccaagagggccgaaactcttcaccttgatgtatgttctgatacaagttgttcagcttcttgtaaatgtgttttccttcggcttgttactgccttttgtcaaataatcttgacaatgctgtataataaatattttctatttatt

SEQ ID NO: 94421 - DNA, 857 bp, Homo sapiens
agcggtcttgaactcctgggctcaagcaatctcctcaccttggcctctaaaattgttggcactgcaggcatgagccattgtacctggcctaatttagatgttaaaggattgtaacagtgttagtaaattttatgacaatttgagaaagagaaactcctaagtcattttggactaatattaatcctgtcactttgaagactatgctaaattttgaatgtgaatgaatctcattttaagaactaataccctaaaattgcttaatgactcaagtgtgctattatataatagaacttaaaagtagaaaacatctaatactgcattttttcctagtgaagggataagcagttgagacattttagctctattttgttttgtcatttttgttttatgatcacaggattacttaaaaaggtggacagctgggcacggtggctcacgcctataatcccagcattttgggaggacaaggagggaggatcacttgaacccagaagtttgagaccagcctggacaatgtagtgagaccccgtctctacaaaaattttaaaaaaattagccagttgtgttggcgtgagcctgtagtctcaactactcaggaggctgaggtgggatgatcactcgagcctgggagattgaggctgcagtgagctgtgatcttgccaccgtactccagcctgggttgacagagtgaaaagacaaaagaaataacaaaggggacctaacttttttacaagcacgaattttgtgtagtgtatatagaaagtcaattttttaatgtgttcagcagctgaaatcgtgtatacttccccatgtgcaatggaacagaaaaacgctcgttgttttagaacaccagaata

SEQ ID NO: 94422 - DNA, 544 bp, Homo sapiens
cagccatgacacggaatatgtattcattgcctttcaagagtttagtgacctttagctttgttacttggacttctgaggctacatttgtccatgccaatctgctggtttcacgtttctgtactatgtaatgatcaattttggcacctccatcatccagtggagggaaccatgatagtacacacttttctgatgtcacttcagttacagccaaaggtccttcaggtgggcctggtctgtcaactgaatttgacatctgaaaagtgtgtttagcaaagccaccaggattagtcgctgtaagggtataggcaccactatcccttcttgttgaatctttgtttaccagattagtagagaaatctgcaatttttatttctaactttgctgtgccttccagctcttttccatctttgctccattccattgttggaggtgggcggcctgaaacatcagcttccagtctgaatgcttcacctgcttttaatataaccgtgtccttaaatttaacatccacctttatctttggtgccatcaagtccaccatctg

SEQ ID NO: 94423 - DNA, 210 bp, Homo sapiens
ggctaaaatgtttcggcccccactgataaagaacacgctaaagtcaatttcaacactctagacacagtaacaatcttctttttttctctttgccaaaaagagtgcaatacccagattatagtattcatctgcatctctctgtaaagttactttatgagagtgggctctctcaaaggcaccacgtagttgggcctcgactctaatgacacg

SEQ ID NO: 94424 - DNA, 344 bp, Homo sapiens
agagaagcatttaacacattatggggtatctatcggacagaagggcacatgatctgtaaacaaatgaggagacctagatttactgatgtggaaagatgatcaacatgtatcgtatttttttaatttgcaaaagattaaaattttacttctattttaaaaataatggtaacaggcagggcatggtggctcaagcctgtaatactggcactttgggaggccgagaagggagggtcccctgaggtcaggagttcaagaccggcctggccaacaaggtgaaaccccatctctactaaaaatacaaaaattagctgggcgtggtgaggcaggcgcctgtaatcccagct

SEQ ID NO: 94425 - DNA, 253 bp, Homo sapiens
gctcaggaagttcttgaagagcgcttcatttatgatagaacacactctgttgcctctcagaaaagagctttcattaagcacaaacagagctgctctagtaaatgggctctcaacaaacaggagtactgtaccaagcaataagacagtgattctttgtgttccgagtttgacacgtggtgtaggacttctctgcctgggcactatggctcacgcctgtaatcccagcactttgggaggccgaggtgggcagatc

SEQ ID NO: 94426 - DNA, 206 bp, Homo sapiens
ctttaattcaagagcaatgagttattaaatgacatttcataaattgtgttgagtcttattattccatacttttatagaatattaaaatttgaatgtgcatttacactttggaacaccagttatggccatttaaaaaatatttgcatcttctaattggattgcaaattttcatgaatttttatggttattattgatgaggagctaaa

SEQ ID NO: 94427 - DNA, 542 bp, Homo sapiens
ttttttttttacttttaaaaataaagaggtagaaagtggggaaccttgcttttctgggcattgggtcaagaccacacagagcgtgggagcaatggcagctggctggggctggctaaggccgcactccctttgctctgcctttggccataaccactagaccgcacgtttgcactattttccaaataaccaaaagggaagacttttaaaaccatactagaacataactttgtttttaggatgtgtttacttgttctggtaaaggtcatggggcaggattttggggaacacaactaaaaagaatgcagtaaaactggcatcataagctctctcaatttgaccacatttgagcccagttcagcaaatccaaagatacattttcaaaaatgcatatcctgtttcacacctcaccacaaagcaaacaacctaatttgcagactttctaatactcataatgcctctaggtcctcctgtcaacatgtgtttttaaatatcatctttgatttgatcactaacaaatattaccactttctggtttttggaga

SEQ ID NO: 94428 - DNA, 338 bp, Homo sapiens
ttttttttgcaattttaggcactctaatacttatgaactgttaccacattgtagtgttaacttaaatttctccaatgaattatgatgctgagtatcttttaattgtgcttatattttatacacctgctttggtgaagtgtccatggaaatattttaccctttttccaaaaaaccaaaaaaaaaaataaaaaacaaaataggttttgttttcttattgttggttttcaataattttaaactatattctgtatgcaaatcttttgtcagacatatgatttgtaaatattttctcccagtctatgattctgcttttcattcttttaacagtacctttcaaa

SEQ ID NO: 94429 - DNA, 409 bp, Homo sapiens
cattatggatggctttgagagtctgtcacaacagtttagccttgaggctgcaatcagtagtgattcaattgagccttcttgagttgtgcagagagattgatttgatgaaaacgattttagaaaaatgggtctgatggtgagtgaaaatgaatcaaatggaggagaaaataaatacagcgagaaaacaatcacaggaatgaagtgaggaaaaggaggaggaaaggtgaatccaagtgacattttggaggacattggacattattaagaaaactacaagaggcgtagtggtaaagggaatactgaggtttcaggccaaggtgataaagaaataatagggatatttgatataaatttaatagctgatagaaattgagcacttagaaagggaagtggtttgtggagcatgagg

SEQ ID NO: 94430 - DNA, 814 bp, Homo sapiens
ggaactcttgaccttatgtgatccatgtggccactttggcctcccaaagtgctatattacaggcataagccactatacctggcccttctttcttttggctaactctctgagcaaaactctttctgccatgggagatcattaccttatcattggtcattttcaggatcttctgagaacacagaccagaagtactgaggtaatcttggcacattttcttaactattttatgctgcttttaaaataccttatatatagctgggaaaaaaggttttgctagatgatctttcaaccttcatgaaaataaagattttactaaaaagtttaaaccaaaggcactgatggaaaatacagaagaaaacctaaacaaagtttcagttctcagcccctcagcagccactaagtgatgggcatttccttcactccccagtgagcacctattgtttgccccgcatggtacagggaagccagaatgggcatgggaggagcagaccaagaaacacgccttgggtgggggccacagagggcttgggtgaactcccaggacagggcgggaagggaaggcagaaaggctatgagcatgggctgcactgtcagctttggaagggtgcagtgaccctgcatctgtgggaagtatggggcacaggcagcctgagctgcagcctcagagtggactcatctcggggtccacctggccatggcctggattaagtttaaaatgatgagcccgtctccaacttccatacatgactttgcacaagtctgacaaacacttttgggcctcaggaacagcaccttaagtcagagtgcctgcttt

SEQ ID NO: 94431 - DNA, 593 bp, Homo sapiens
aggaatgaatggtatgtaaatacagtaggaatgtaattatagattttcctgacccagttcctaaataatagatatcatttcagaagtgccccaatacctgaccttttgctccaagccatatcaaagcacacatctagtctacttttcactctcattcctagccactatgacaatactattcagataaaacttctagtcctctacttatgtgactcataccaacttgaccttacgatagtgactgggggtgcatatctaggttcatgctgtttgtccattattatggttttgtgagaaaaggcaaaatttctaggtaaagtgttatgaggacgaataatccaccaggcaaccaactgaccctttcatttgccatcttgtcacttcaaacagctctccagaacctgcagccagcacagaccaaagtcaggtttgtctcctcttctgttgatgaacaaaggttgattccatatcgtggctattgtgaatagtggcagtaaacatggcagtattgtatgaaaatatcacagatagcccttaaatatgtgcaactatgatgatctatcaaaattaaaaattaaaatttatttttaaaa

SEQ ID NO: 94432 - DNA, 874 bp, Homo sapiens
acagtggcgcaatcttgactcactgcaacctctgcctttcaggttcaagcaattcttttgcctcagcctcctgagtagctgggactacaggcatgtgccaccacgcctggctaatttttatattttagtagagatggggtttcaccatgttggccaggctagtctcgaactcctgacctcaagtgatactcctgccttggccttccaaagtgctaggatgacaggcgtgagctgctgcacctggccctatttatttatttttgatgtagagtctcgctctgccacccaggctagagtgcagtggtgcaatcttgatcttggctcacagcagtctccacctcctgggctccagcaatcctcccacctcagcctcccaagtagctgggtctacagttgcgcaccaccacacttggctaatttttgtatttttgcagagaccggttctcaccagattgcccaggttggtcttgaactcctgggctcaagagatctgcctgcatcagtctcccagaatgctgggattacaggcgtgagccaccgtgccagccctcttgggggtttctcgggctaagccattacctctcagcctccgtgccccggtgggctctgaaggagcctgtttcatcctgagcaatggtggaggcggaggctgcagaggaggggtgaagtcctggggctctgggggagacaaaggaccctgctggtgtccctcagacccgggttctggcccctctgcttcgtgtgacttcagacaagtcgctttacctctgtgagtctgtttccccagctgtaaaatggggatcataacaccaacctacctctcaggatccccaagaggaggaagtaggcgaatgtacaagaaggccccttccac

SEQ ID NO: 94433 - DNA, 1581 bp, Homo sapiens
taaagatcaggctcagctgctgctgctgctgctgctgcttgtcccaagaccaagtcgtaatagcaacttcccttcctcagctgcctgaactttttttttcccttgtagctggagagaagtgtcacattttgctcactctcaaccttcctcgcccacccccttcccggagaacctgtgcggtgtgtagagggtgctgtgagccacctccagcctcgggtggctgcttaagtaactttcaactcctctcttcttaacactatgaagtgtctcgggaagcgcaggggccaggcagctgctttcctgcctctttgctggctctttttgaagattctgcaaccggggcacagccacctttataacaaccgctatgctggtgataaagtgataagatttattcccaaaacagaagaggaagcatatgcactgaagaaaatatcctatcaacttaaggtggacctgtggcagcccagcagtatctcctatgtatcagagggaacagttactgatgtccatatcccccaaaatggttcccgagccctgttagccttcttacaggaagccaacatccagtacaaggtcctcatagaagatcttcagaaaacactggagaagggaagcagcttgcacacccagagaaaccgaagatccctctctggatataattatgaagtttatcactccttagaagaaattcaaaattggatgcatcatctgaataaaactcactcaggcctcattcacatgttctctattggaagatcatatgagggaagatgtctttttattttaaagctgggcagacgatcacgactcaaaagagctgtttggatagactgtggtattcatgcaagagaatggattggtcctgccttttgtcagtggtttgtaaaagaagctcttctaacatataagagtgacccagccatgagaaaaatgctgaatcatctatatttctatatcatgcctgtgtttaacgtcgatggataccattttagttggaccaatgatcgattttggagaaaaacaaggtcaaggaactcaaggtttcgctgccgtggagtggatgccaatagaaactggaaagtgaagtggtgtggtaagtttgggaccaactgggatccagatccaaaggtttctgcaggttttactctgcaaaatatgagtccagaggactctcatgggagactcatgtttttctgtatgtgaaaacctggtagagaaaggtacagatacgtacatgatagctgtaattggcaaaagaaaatgaaaggattcttttttaatatataaaaatcaaggattttaaatatgtcaattcggtcctgaaaactgaaaatttaaatacatatgtaaaagcagcaaactgaggaatatttgtcattccccaaattaaaacatgaaccgtggtgtagtataattctggttaaatctttttatccttttcatacaagcaccactgatgctgcattcggctgtctgtcgtggtcagagctgtcatgaccttgtctatattctaccactctgctggtcatacgtggattgaccatgcacattggaatgtatttctgctgcattccatgt

SEQ ID NO: 94434 - DNA, 1898 bp, Homo sapiens
ggctgtcgtaaaaggacgtccggtccgtctcctagtgtccggaatcggctgtcagcctccctggctgttagtaccttctttcccggagtcctggtccacgagttggatttactgctgtcgcgggtgggcctcacgccattccctgtccctcggccccctgagtgagtccggtctcccggcgaaagtgagcgaggtttgcccggagcgcgcacgaggggaaaatgcctaaaaaaaagactggtgcgaggaagaaggctgagaaccgccgagaacgtgaaaaacaactaagagcatcaagaagcactatagatttagctaaacatccatgtaatgcctcaatggtatcagacaagtgtcagaggcggcagaagaatagagcattttgctacttttgtaattctgtacagaagttaccaatttgtgcacagtgtgggaaaacaaagtgcatgatgaagtcttcagactgtgtcataaagcatgctggtgtatacagtactggccttgcaatggtgggtgcaatatgtgacttctgtgaagcttgggtttgccatggtaggaaatgtctcagtacacatgcttgtgcctgccctcttaccgatgctgagtgtgttgaatgtgaacgaggcgtgtgggaccatggaggcagaatattcagttgttctttttgccataactttctctgtgaagatgatcaatttgagcatcaagccagctgccaggttttagaggcagaaacatttaaatgtgtttcatgcaatcggcttggtcagcactcatgtctccgttgtaaggcttgtttctgtgatgatcatacaaggagcaaagtgtttaagcaagaaaaaggaaaacagcctccttgtcctaaatgtgggcatgaaactcaggagactaaggaccttagcatgtcaacacgctccctgaaatttggcaggcagactggaggtgaagagggagatggagcttctgggtatgatgcttattggaagaacctttcatctgataagtatggtgataccagctaccacgatgaggaggaggatgagtatgaagcagaggatgatgaagaggaagaagatgaaggcagaaaggattcagatactgagtcatcagatttgtttactaatttgaatttaggaaggacctatgctagtggctatgctcactatgaggaacaagagaactaggggagctgctctggtggccgtgtgtgagaggagcaggagtgagtgtgtgtgcttgatgaattgtgtgtggttgttcaaaagtaccttagccacttagccttgtgcagaagactagttacacttaatgggccaagcaatagggtgtagcgtttttatagaactgataatcaggcttatggcataagaaaaatgagtttcaaatttaagatgtttattgatcgaagcaattgaagtatcatggattggattgttactgatttcagtaaagtatgttttgccaattagatacatatatacaagataaaggaataggatggtaatatatttgtttgaaattaaattactgtttttattaaaaaatactgcttcattgggctgattttgtaaaatgtaatgagtaaaatgaattactgtatttttccttttatgtccacagaatgagagtcatatgttgttatattctaaattttcattaaatattcatgtcaccttgagttgtcatgataagtatgttttagtatttgacttattcttctctttcttcacaatgtatgtcctcagtggtacctattattgatgccttaaatgtattgataaggtgactagttagccatttttcagagatacagtatcagaaatagtattattacagaagctttacccaggacattttatttctctttgaataaatctattatttcacttaaaaaaatt

SEQ ID NO: 94435 - DNA, 431 bp, Homo sapiens
ggctgtcgtaaaaggacgtccggtccgtctcctagtgtccggaatcggctgtcagcctccctggctgttagtaccttctttcccggagtcctggtccacgagttggatttactgctgtcgcgggtgggcctcacgccattccctgtccctcggccccctgagtgagtccggtctcccggcgaaagtgagcgaggtttgcccggagcgcgcacgaggggaaaatgcctaaaaaaaagactggtgcgaggaagaaggctgagaaccgccgagaacgtgaaaaacaactaagagcatcaagaagcactatagatttagctaaacatccatgtaatgcctcaatggtatcagctttttttgatatcagttggtagttggaaaaactatatactattttatctgacgtatacctgaataaaattttagtgaagaca

SEQ ID NO: 94436 - DNA, 684 bp, Homo sapiens
ggctgtcgtaaaaggacgtccggtccgtctcctagtgtccggaatcggctgtcagcctccctggctgttagtaccttctttcccggagtcctggtccacgagttggatttactgctgtcgcgggtgggcctcacgccattccctgtccctcggccccctgagtgagtccggtctcccggcgaaagtgagcgaggtttgcccggagcgcgcacgaggggaaaatgcctaaaaaaaagactggtgcgaggaagaaggctgagaaccgccgagaacgtgaaaaacaactaagagcatcaagaagcactatagatttagctaaacatccatgtaatgcctcaatggtatcagctttttttgatatcagttggtagttggaaaaactatatactattttatctgacgtatacctgaataaaattttagtgaagacaaaaaaaaaaaaaaaaaaaaaaaacaacctgtttgggcacgctaggcccccgaaaaaagttttatacacacatcggtgggggcggggggcccaatgggaacggacatgtgcaaagggtgtccaaagagaaccgggcaggacaagcgggggttcccacgatataaaaggccgggggacacggggtttgaaaacccaagggatcggagcctcgggcttccacaggtccaggagcggataatcgcccgtggggagat

SEQ ID NO: 94437 - DNA, 332 bp, Homo sapiens
ccacaaagaaatgtaattattattaaaacataagttgtcataagagaaaaaaagaagctggcagaagtttcgtatttctcagtaattctagaaaagctatgcaaatatatagataagaaggtattttaaaaatcagaaatggtagtatttaaaaattcaatgtagttacaggaattattatagacaagaaagcttaagctgttggttccttcaaactttatttgaattaaattcattttgaggaaaatacttccatctctttggcttaattaaataatattaggataagtgtacagtttacctttttttcttttgatatgtaactgagtttt

SEQ ID NO: 94438 - DNA, 1471 bp, Homo sapiens
  misc_feature (46)..(46): n is a, c, g, or t
  misc_feature (56)..(56): n is a, c, g, or t
  misc_feature (83)..(83): n is a, c, g, or t
  misc_feature (97)..(97): n is a, c, g, or t
  misc_feature (150)..(150): n is a, c, g, or t
gtaataattttacttcttgatgatggtaatttttcatgattaaccnattttgggcncctattccgccatatatggttttattnaattttcacagcancactttcaaagttgatattcatattctaaatttatagatggtaagagggtagnaggctcctgccctcttaccgatgctgagtgtgttgaatgtgaacgaggcgtgtgggaccatggaggcagaatattcagttgttctttttgccataactttctctgtgaagatgatcaatttgagcatcaagccagctgccaggttttagaggcagaaacatttaaatgtgtttcatgcaatcggcttggtcagcactcatgtctccgttgtaaggcttgtttctgtgatgatcatacaaggagcaaagtgtttaagcaagaaaaaggaaaacagcctccttgtcctaaatgtgggcatgaaactcaggagactaaggaccttagcatgtcaacacgctccctgaaatttggcaggcagactggaggtgaagagggagatggagcttctgggtatgatgcttattggaagaacctttcatctgataagtatggtgataccagctaccacgatgaggaggaggatgagtatgaagcagaggatgatgaagaggaagaagatgaaggcagaaaggattcagatactgagtcatcagatttgtttactaatttgaatttaggaaggacctatgctagtggctatgctcactatgaggaacaagagaactaggggagctgctctggtggccgtgtgtgagaggagcaggagtgagtgtgtgtgcttgatgaattgtgtgtggttgttcaaaagtaccttagccacttagccttgtgcagaagactagttacacttaatgggccaagcaatagggtgtagcgtttttatagaactgataatcaggcttatggcataagaaaaatgagtttcaaatttaagatgtttattgatcgaagcaattgaagtatcatggattggattgttactgatttcagtaaagtatgttttgccaattagatacatatatacaagataaaggaataggatggtaatatatttgtttgaaattaaattactgtttttattaaaaaatactgcttcattgggctgattttgtaaaatgtaatgagtaaaatgaattactgtatttttccttttatgtccacagaatgagagtcatatgttgttatattctaaattttcattaaatattcatgtcaccttgagttgtcatgataagtatgttttagtatttgacttattcttctctttcttcacaatgtatgtcctcagtggtacctattattgatgccttaaatgtattgataaggtgactagttagccatttttcagagatacagtatcagaaatagtattattacagaagctttacccaggacattttatttctctttgaataaatctattatttcacttaaaaaaatt

SEQ ID NO: 94439 - DNA, 1637 bp, Homo sapiens
gcattatctgtgttttctttgtctggaatacttttccatcttggcttaccctattgccctcccattcttcatatggctattaagacttcgtgtctctaagatgcctttcccaaatcccatgtctgctttagtgcccttccctctgcacttcccgttcagtgcttagtgtcttgtaattgccttttcactgtctccatccctagttagaccatacactgtgtgagagtaaataggctgttcaccattatttcatttcatcagggcccttatgagtactgaaatatttgtgaacagctaaatgtacttacatgtcatactcaatatagtctgccttttgttagatcattgttcagaagggtcctgacaaaaaccatttctgttaagaaaatgaaatgagaagtgtgactgctcccaacaaaattgttaatctcactgccttaataaagctatatctttaaaacactgaatactgtctttttgtatatttttacatttttatttatttactttattttgcttctcctatacaggcttgtttctgtgatgatcatacaaggagcaaagtgtttaagcaagaaaaaggaaaacagcctccttgtcctaaatgtgggcatgaaactcaggagactaaggaccttagcatgtcaacacgctccctgaaatttggcaggcagactggaggtgaagagggagatggagcttctgggtatgatgcttattggaagaacctttcatctgataagtatggtgataccagctaccacgatgaggaggaggatgagtatgaagcagaggatgatgaagaggaagaagatgaaggcagaaaggattcagatactgagtcatcagatttgtttactaatttgaatttaggaaggacctatgctagtggctatgctcactatgaggaacaagagaactaggggagctgctctggtggccgtgtgtgagaggagcaggagtgagtgtgtgtgcttgatgaattgtgtgtggttgttcaaaagtaccttagccacttagccttgtgcagaagactagttacacttaatgggccaagcaatagggtgtagcgtttttatagaactgataatcaggcttatggcataagaaaaatgagtttcaaatttaagatgtttattgatcgaagcaattgaagtatcatggattggattgttactgatttcagtaaagtatgttttgccaattagatacatatatacaagataaaggaataggatggtaatatatttgtttgaaattaaattactgtttttattaaaaaatactgcttcattgggctgattttgtaaaatgtaatgagtaaaatgaattactgtatttttccttttatgtccacagaatgagagtcatatgttgttatattctaaattttcattaaatattcatgtcaccttgagttgtcatgataagtatgttttagtatttgacttattcttctctttcttcacaatgtatgtcctcagtggtacctattattgatgccttaaatgtattgataaggtgactagttagccatttttcagagatacagtatcagaaatagtattattacagaagctttacccaggacattttatttctctttgaataaatctattatttcacttaaaaaaatt

SEQ ID NO: 94440 - DNA, 1160 bp, Homo sapiens
atgctgtccagagttcccaagctttggtcagcactcatgtctcctgtctaagggcttgtttctgtgatgatcatacaaggagcaaagtgtttaagcaagaaaaaggaaaacagcctccttgtcctaaatgtgggcatgaaactcaggagactaaggaccttagcatgtcaacacgctccctgaaatttggcaggcagactggaggtgaagagggagatggagcttctgggtatgatgcttattggaagaacctttcatctgataagtatggtgataccagctaccacgatgaggaggaggatgagtatgaagcagaggatgatgaagaggaagaagatgaaggcagaaaggattcagatactgagtcatcagatttgtttactaatttgaatttaggaaggacctatgctagtggctatgctcactatgaggaacaagagaactaggggagctgctctggtggccgtgtgtgagaggagcaggagtgagtgtgtgtgcttgatgaattgtgtgtggttgttcaaaagtaccttagccacttagccttgtgcagaagactagttacacttaatgggccaagcaatagggtgtagcgtttttatagaactgataatcaggcttatggcataagaaaaatgagtttcaaatttaagatgtttattgatcgaagcaattgaagtatcatggattggattgttactgatttcagtaaagtatgttttgccaattagatacatatatacaagataaaggaataggatggtaatatatttgtttgaaattaaattactgtttttattaaaaaatactgcttcattgggctgattttgtaaaatgtaatgagtaaaatgaattactgtatttttccttttatgtccacagaatgagagtcatatgttgttatattctaaattttcattaaatattcatgtcaccttgagttgtcatgataagtatgttttagtatttgacttattcttctctttcttcacaatgtatgtcctcagtggtacctattattgatgccttaaatgtattgataaggtgactagttagccatttttcagagatacagtatcagaaatagtattattacagaagctttacccaggacattttatttctctttgaataaatctattatttcacttaaaaaaatt

SEQ ID NO: 94441 - DNA, 376 bp, Homo sapiens
gacgtgatgcgtgagagctgttctagagtatcccagaactgtgagactcctcgaaggctctagctgttagtaccttctttcccggagtcctggtccacgagttggatttactgctgtcgcgggtgggcctcacgccattccctgtccctcggccccctgagggaaaatgcctaaaaaaaagactggtgcgaggaagaaggctgagaaccgccgagaacgtgaaaaacaactaagagcatcaagaagcactatagatttagctaaacatccatgtaatgcctcaatggtatcagctttttttgatatcagttggtagttggaaaaactatatactattttatctgacgtatacctgaataaaattttagtgaagaca

SEQ ID NO: 94442 - DNA, 399 bp, Homo sapiens
gacgtgatgcgtgagagctgttctagagtatcccagaactgtgagactcctcgaaggctctagctgttagtaccttctttcccggagtcctggtccacgagttggatttactgctgtcgcgggtgggcctcacgccattccctgtccctcggccccctgagtgagtccggtctcccggcgaaagggaaaatgcctaaaaaaaagactggtgcgaggaagaaggctgagaaccgccgagaacgtgaaaaacaactaagagcatcaagaagcactatagatttagctaaacatccatgtaatgcctcaatggtatcagctttttttgatatcagttggtagttggaaaaactatatactattttatctgacgtatacctgaataaaattttagtgaagaca

SEQ ID NO: 94443 - DNA, 776 bp, Homo sapiens
  misc_feature (677)..(678): n is a, c, g, or t
  misc_feature (755)..(755): n is a, c, g, or t
  misc_feature (766)..(766): n is a, c, g, or t
gaaaaaaagaagctggcagaagtttcgtatttctcagtaattctagaaaagctatgcaaatatatagataagaaggtattttaaaaatcagaaatggtagtatttaaaaattcaatgtagttacaggaattattatagacaagaaagcttaagctgttggttccttcaaactttatttgaattaaattcattttgaggaaaatacttccatctctttggcttaattaaataatattaggataagtgtacagtttacctttttttcttttgatatgtaactgagttttgtatattgtggatagctgttaagaagttgtttttcagagaaccctttttatttttggcttagagtgagtagtaaaatgtttaaatgaagcggcctactatcattgagggttgataaattgctaaatgtatacagttttgatggttgccgtggttaaagaatggttgcaggtggtcaggtgataatgattatgtattcttgttccttggttacagggtgcaatatgtgacttctgtgaagcttgggtttgccatggtaggaaatgtctcagtacacatgcttgtgcctgccctcttaccgatgctgagtgtgttgaatgtgaacgaggcgtgtgggaccatggtgagctcatcacacacaagtaatgagctttgttatataggtgaatgtnntgactttcgcccaccctcctcaatgctgtttttgagcatttttttacagagatactgtccaattccctaactactgntgtactgtttnctgattatca

SEQ ID NO: 94444 - DNA, 1897 bp, Homo sapiens
gacgtgatgcgtgagagctgttctagagtatcccagaactgtgagactcctcgaaggctctagctgttagtaccttctttcccggagtcctggtccacgagttggatttactgctgtcgcgggtgggcctcacgccattccctgtccctcggccccctgagtgagtccggtctcccggcgaaagtgagcgaggtttgcccggagcgcgcacgaggggaaaatgcctaaaaaaaagactggtgcgaggaagaaggctgagaaccgccgagaacgtgaaaaacaactaagagcatcaagaagcactatagatttagctaaacatccatgtaatgcctcaatggtatcagacaagtgtcagaggcggcagaagaatagagcattttgctacttttgtaattctgtacagaagttaccaatttgtgcacagtgtgggaaaacaaagtgcatgatgaagtcttcagactgtgtcataaagcatgctggtgtatacagtactggccttgcaatggtgggtgcaatatgtgacttctgtgaagcttgggtttgccatggtaggaaatgtctcagtacacatgcttgtgcctgccctcttaccgatgctgagtgtgttgaatgtgaacgaggcgtgtgggaccatggaggcagaatattcagttgttctttttgccataactttctctgtgaagatgatcaatttgagcatcaagccagctgccaggttttagaggcagaaacatttaaatgtgtttcatgcaatcggcttggtcagcactcatgtctccgttgtaaggcttgtttctgtgatgatcatacaaggagcaaagtgtttaagcaagaaaaaggaaaacagcctccttgtcctaaatgtgggcatgaaactcaggagactaaggaccttagcatgtcaacacgctccctgaaatttggcaggcagactggaggtgaagagggagatggagcttctgggtatgatgcttattggaagaacctttcatctgataagtatggtgataccagctaccacgatgaggaggaggatgagtatgaagcagaggatgatgaagaggaagaagatgaaggcagaaaggattcagatactgagtcatcagatttgtttactaatttgaatttaggaaggacctatgctagtggctatgctcactatgaggaacaagagaactaggggagctgctctggtggccgtgtgtgagaggagcaggagtgagtgtgtgtgcttgatgaattgtgtgtggttgttcaaaagtaccttagccacttagccttgtgcagaagactagttacacttaatgggccaagcaatagggtgtagcgtttttatagaactgataatcaggcttatggcataagaaaaatgagtttcaaatttaagatgtttattgatcgaagcaattgaagtatcatggattggattgttactgatttcagtaaagtatgttttgccaattagatacatatatacaagataaaggaataggatggtaatatatttgtttgaaattaaattactgtttttattaaaaaatactgcttcattgggctgattttgtaaaatgtaatgagtaaaatgaattactgtatttttccttttatgtccacagaatgagagtcatatgttgttatattctaaattttcattaaatattcatgtcaccttgagttgtcatgataagtatgttttagtatttgacttattcttctctttcttcacaatgtatgtcctcagtggtacctattattgatgccttaaatgtattgataaggtgactagttagccatttttcagagatacagtatcagaaatagtattattacagaagctttacccaggacattttatttctctttgaataaatctattatttcacttaaaaaaatt

SEQ ID NO: 94445 - DNA, 707 bp, Homo sapiens
ggctgtcgtaaaaggacgtccggtccgtctcctagtgtccggaatcggctgtcagcctccctggctgttagtaccttctttcccggagtcctggtccacgagttggatttactgctgtcgcgggtgggcctcacgccattccctgtccctcggccccctgagtgagtccggtctcccggcgaaagtgagcgaggtttgcccggagcgcgcacgaggggaaaatgcctaaaaaaaagactggtgcgaggaagaaggctgagaaccgccgagaacgtgaaaaacaactaagagcatcaagaagcactatagatttagctaaacatccatgtaatgcctcaatggtatcagacaagtgtcagaggcggcagaagaatagagcattttgctacttttgtaattctgtacagaagttaccaatttgtgcacagtgtgggaaaacaaagtgcatgatgaagtcttcagactgtgtcataaagcatgctggtgtatacagtactggccttgcaatggtgggtgcaatatgtgacttctgtgaagcttgggtttgccatggtaggaaatgtctcagtacacatgcttgtgcctgccctcttaccgatgctgagtgtgttgaatgtgaacgaggcgtgtgggaccatgaaacacatttaaatgtttctgcctctataacctggcagctggcttgatgctcaaatgtgatactcacg

SEQ ID NO: 94446 - DNA, 389 bp, Homo sapiens
aggactccaacagttgttaatggagtattttagaagtcctttggccaaaaacacctcagtttacaagcacagaatgccctagcctctcattacttctgagctgtctctacttcttactctataaccctgtgtgaacgacatggatgttctgaccatgcgtacacttattttccctccccacacatgacgtctatggaaaatcaacaacacaacagtatgagaaaatgtttcatggcatacctggtagaacacaaaaccaaaagttttggccttcattttgacacttaaataactcccacatgcgtagtgttctgataatggaaaactcatttatgcctagtgttccattattggaacgctaagcatgtgagagttatttatatcctaca

SEQ ID NO: 94447 - DNA, 895 bp, Homo sapiens
acgaaatcttgcactgtcacccaggctagagtgcagtgccgtgatctcggctgcaacctccgcctcccgggttcaagcaattcttgtctcagcctcccaagtagctgggattacaggcacccaccaccacacccggctaatttttgtatttttcagtaaagactgtttcgctgtgttggccaggctggtcttgaacttctgacctcaggtgattggcctgtctccacttcccaaagtgctgattacaggcctgagccactgcacccaacattattttcaaaatgacaagaggtagtatttagtacctgaggctcagatgttaaacacaaactcagtatttacaaaaataaacatttaaaacatttacacttcaacttccaaaatggctttttaccataaacattcaggattttcaaacctgtaacagcttatcaatgcatctcatcttagaagtatgttttacattcttcataaaaataaaaatgaacccaggcttcctaagattcaggccagtgggtctccacttaaggccaaatggagaaataattttttgctgcctaaacacacaagtgaattgaaaagccacaggccattcattcaacaaataactttattatttttattgataatgtacttgtaatgtgctattttgatacatgtatgcaaagtataatggtcaaatcagggtatttgaatatacatatatttcaaaatatagttatatatttcaaaataagatatagcaagttagaagtatatataagtatattattatatgttattgttaactataatttacctactgtactatcaaatactagaacttattccttgtatctaaatgtattcttgtaaccattaactaacttttctgaatttcctactctccccttcc

SEQ ID NO: 94448 - DNA, 305 bp, Homo sapiens
aaaggaaatacctctttaattgctctaccaattctaaatatttacctgaaaaaatatggtaatttttactcccaaatgaacatccctctcctgtaaagtctgcaacaaaatcactttaggctgcttccactttgggttattatgaagagtgctgctatgaacattcgagtataagtttttatgtggacatatgttttcatttctcatcagtacatatttaggagtgaaattgttgtgttatataataactccatgtttacctttctgagtaatagccaaggtgttttccaaagcagctgcacaat

SEQ ID NO: 94449 - DNA, 373 bp, Homo sapiens
ctttgctacagcagacattcttcaacttaaattgtaagctctgcaagatgacttttttaagggacaaaaagactatgtttccattattctataggttaacagaaatcaaccaagtttattttataataatacttaatatgcatactaatggtatgtgtgtatatgtatacactgttgtctatgtatatatttgcttgtagtataagaagactaactgggcatagtggagtgtgcctgtagtcccagctacttggaaggctaaggtggaaggatccctcaaggccaggagtttgaggctgcagtgagccatgattagtcctttgaatagccactgcactccagcctgggcaacaatatgagattctgtctcaag

SEQ ID NO: 94450 - DNA, 358 bp, Homo sapiens
ccccttggtgaagggtgatttgctttattagatattaaaatttatcacaaaaacaatgaaatagcatgagaaaagactagaaacaaatacagaaatagatacaaaaatatataaacatgttatatgacaaaatagagatttatgtttcagtagtggaatcacttaataaatagtactaatgtaattagccagccataaggaagaaaagtataaaagaatgttaattcatgctattcaaaaatatattccaagtagaatgaatattgatatgtcaaaagtaaaaattaactcactgtaagattaaataagaaaacacttgtatgatcttggagtaggaaaaatcttcctaattattaat

SEQ ID NO: 94451 - DNA, 310 bp, Homo sapiens
aatttgcagttgttaaatcaaacctactgacatttatagtcccttactttctcttctttcttccattgtaaatgtctgaaatgtcgtacagtcatacttcccactgtatttttaggttttactctcatacttcaataatcactaccaccctttatttcaataaaagttttaagtcagtgctgattttttggtagctcccattttctgatatatttgtcatgtacatatgcaagtgtatgtaatgtaggtgtgcatctatatatacccacatatacatatatacatatacatatatatgtccatatacacg

SEQ ID NO: 94452 - DNA, 193 bp, Homo sapiens
caaatgtagtttgtcctcatgacccccttacacacagttccacttcctgccttgggtgaagccaccccctctttatctgaaatggccttatccaactcctatccagccttctctgttcccacatcaagactgtctgtctgccaggcacggtggctcacgcctgtaatcccagcactttaggaggccgaggtgg

SEQ ID NO: 94453 - DNA, 723 bp, Homo sapiens
ggtggaggttgcagtgagttgagatcacaccactgcaccccagcctgggttgacagagtgagactctgtcccaaaaaaaaaagagggagatgtctggaaggctaggagatttgagagtaagagcatgaattcagctctgttacctgtagcttccagaaaaaggagctgtatggggagagagaatatggtcccatggagaattttctacaaatgtgcaagtgcaaacgcctgtgtggcttatgagaaggcactgcaggccttacgctgtttccaacattcccgacattttcacacctgggttggtgtctatgtggggtctgtgtgttgagaacacctgaacacctgctcctcttaaaatgagcccggaggttgtgccaggcacagctggagcagtgcagcgcctagatgtggctgtggaaggtgagattaccgcctccagggctcccaggctggctcctaccctgtgggctcctagcaccctatccccaccctccctgcaggaagcatggctgagtgctgggcacctcccaccctgggtcactcccagtgagtctgggaccaggagactctggtgaggctgtggggattggccttccctggggagctgcctggggctgccctccctcctgacggcccccagccccttctccgcatgttcaaaacaggaattctgaactcatagtctccagccacacgtatgttaagcgaaactcctctgtgccc

SEQ ID NO: 94454 - DNA, 514 bp, Homo sapiens
atctcaaaaaaagaaaaaaaaaagttaaatcaaaccactatccaaaagaattagaaaaagttctgtggggaacatggacttggaaataaacattttgtccagtggtaggagaagcttgggttgtgagggactggttaagtgctttactcagttttctgtgttcactcagtggcagagcgagggctgattggaactggtgcccacccttctacaggccagttttcattttcatggcagcatactctctagttggagttgagcactttttcctaaccaacctttaaacttattttctcccattacaagagtgatgaaagtagcataataactattagttttctactgttggctgtaacaaattgccaccaacttggtggcttaaaaagtacaaatttattatcttacagttctcttggttacaagtctgacacaagtctcactgcactgaaacatcaaggtgtcagaagggctacatctcctttcaggaggctctaggggagaattcctttccttg

SEQ ID NO: 94455 - DNA, 349 bp, Homo sapiens
gattggtggaaggtctatgcaaagattgataacatggtaactgattagacatgttattttaaatgcagtccaagatttggatgaaaagctcacgttcaggttttttttgccttttgttgtaggtactcgataaatatttattgaggtagtgaaactaatctgaaattggatctgatacagagaatttgaccgattttacaaggtgtccatttactttttccccataagtattgtttaaataggctgttttattatcgactatcacacagatcttactgatttgcctcatttccttaaagatgtaaaataactgtgtttctctgtatgtttgtgttgctaaagaggaggt

SEQ ID NO: 94456 - DNA, 417 bp, Homo sapiens
tggtgcttgctcagcatgagcctgcgccatcgcatgtgcttgtattaacagattctcatgtgtccttgctatcgtactggttaataaccgtgacactgagttaggttttagtataggatcattgtgaaaattctgggcagggagatgctgatggaagagtgtggatgagaataaagaacttatcttgagaaggtacaataatgacttgctttgtttctctttcctcatcttgccagataacctcaggacagctgtttttattcagcccattgtattaataaacacagaaagacagctactcatgtaactgaatacacaggtatttctgtatttgaagttgataatacagtatcatagagaactcctttgtcccagaaaaaaaaaaaaaaaggagtgaaaaagagaggcagggtgccc

SEQ ID NO: 94457 - DNA, 373 bp, Homo sapiens
gaaaggcaacattttagcgggtaaagagggatacaagttctcactttgggccatggtttcaggcttttcagcttgagggtggggttttgctggggaatcacccttttctgcctagaatttctctggcttctgttcatatcagtaggatctgctccaacatgaggatagtaggaggagttatgagtcaaatatgatgtcagtgttttggggctggacaagcaaaatggtgatgctcttgatagaaaaatgaaactccatcagtggagaggataggtggcggggagcacggtcagctgagtgtggtgttgggcagcttgtgcgtgtgctgaataggtgctgatataccaagtctggccttttaaagacagacccg

SEQ ID NO: 94458 - DNA, 619 bp, Homo sapiens
ttggcttgcactgagagctgccctcccaccctctctccaaatttcctcttgggggtagcctaacaaggtgctgtcacagacccttgtcggccacgatgaccccacccagaccatccctctgctgtttcactctttgatagtctctggagctctctggggaggggtgagacctgccgtctagtttgtatggtttgcccaggtcttacagtcatggctggctgcctctctctgagaactagaactcctgaacttggtgaaagacctcagccatcgatcatgttgaattatcggggacactcatttgaaatccgagcctgttccagatagactctctctctttctgccctgaccgtgagagaagccctgctggacggtggagacactcgtgggctgtgagcaagggatgcaaaggctgccgggaatcccatctttccagcatcatctgccaaggcacattagttcctgggtatctggatgggttctagcagcattactgtcattgaaggaaaaattttagccatattaaaggttaatgcagcaatctccacataggctgcctggaagggaagcaggacaaggttaggttttccttgtgatggacaggaggcaggcggccctc

SEQ ID NO: 94459 - DNA, 208 bp, Homo sapiens
cggagctcacacggtaatgctctgacgggaggcggagctcacacggtaatgctgtgacgggaggcggagctcacacggtaatgctgtgacgggaggcggagctcacacggtaatgctgtgacgggaggcggagctcacacggtaatgctcggacgggaggcggagctcacacggtaatgctctggcgggaggcggagctcacacggta

SEQ ID NO: 94460 - DNA, 235 bp, Homo sapiens
gtaaccaacttccgttcatatatattaaaaataatcaggccagacacgatgcctcacacctgtaatcccagcactttgggaagccaaggcaggcggatcacctgaggtcaggagttctaagaccagcctggccaacatggtgaaaccccgtctctactaaaaaataaaaaataaatgtgctggacacagtggcaggtacctgtaatctgttgaggcaggggactcacttgagtcc

SEQ ID NO: 94461 - DNA, 548 bp, Homo sapiens
tcttccagtatcgtccgatcgaagtctgtcacgaatacggccgcagtggtcacaggcttggggagtcggttcttccctggcagctcccaggggcggtggtggtggggcctcagctgggagggtcccctctggctctcgatctccatcctctcctttaaccttcacaggcggtgacagtagcagggtctcagctgggagggtcccctctggctcttgatctccatcctctcctttaacctccacaggtggcgggggtggtggggcctcagctgggagggtcccctctggctctccatctccgtcctctcctttaacctccacaggtgacgacagtagcagggtctcagctgggagggtcccctctggctctggacctccatcctctcttttagcctccacaggcggctcctctccacttggcttttccgggcagagctcgtccttggcctcaaagctttccttaacaaatagctccatcttctgccttgtttctctgtccccgggaggctcctccttgccttccgcactggcgggcacattctcaccat

SEQ ID NO: 94462 - DNA, 379 bp, Homo sapiens
tgatacatggtacagtacagataaatcttgaaaacatgctaagtgaaataagttagacacaaagggacaaatattgtgtgattccacttatatgaggtacctagaacagtcaaattcatagaaacagaaagtagaatagaggttaccaaaggctgagggggaggcaatggaagttattgtttcatgggtacagcttttctatttgcggtgatgaaaagttttgggaatggatgataatgatggttgcacatcagtgtgaatgtacttaataccactgaactataccctagaatattaaatttataaattttatgttatgtatatttaggacaataaaaaaagagtgagacctatagagtcaggagttggaggtaggatc

SEQ ID NO: 94463 - DNA, 503 bp, Homo sapiens
gtatctcagaaatacacatgcagtatatttactttaaagtaaaaggatgtgttcatcgtcattgggaggtatcctctaacattgcattattctctttaacattcacagttatgctatccatatttatgagctgaaaagacagattactggcttgcatgagtccttgtttcttacatttgtcttctaagttttgtttggtgatgacattattgtgcaaggagctacagatggttttattttgatggggccaaggcctagccctgtgtcctcttccataggatgctaacatttctttctgcttttgttcttcctgagtcactgatgtacacaatacatcataatggattattcttcatcttgctcttgtcaaccaaagattaggtcattttgtcaccaaggaaaacttaaactgtgaaaaagaaatcctctatttcctagtggtgcctgataaatgttagtcataatgaattcgttaatagtctcccactttggaataatatgta

SEQ ID NO: 94464 - DNA, 597 bp, Homo sapiens
gacacagtgagatgctgtctcaaaaaaaaaaaaaaaaaaaatatctgggattcgaatcagccctctccagctccaagcacactgggatccttgccgttggaggttgctgttggcttctgcccgtgctgtgtattgagatctgcaaccaagcatgggagcttacgaaggcacctggtggtttctaggtaggaaaacagtgtggatgccagatgtggtgcctcacacacaacagcactttgggagcctgaggcaggcagatcacctgaggtcaggaattcgagaccagcctggccaacagagagaaaccctgtctctactaaaaaaatacaaaaaaaattagtcaggcatggtggtacctgtagtccctgctacttgggaggctgaggcacaagaatcacttgaacctgggaggcagaggttacagtgagctgagatggtgccgctgcactccagcctgggagacagagcaagactccatcttaaaaaaaagggccgggtgcagtggctcacgcctgcaatcccagcactttgggaggccaaggcgggcagttcacaaggtcaggagttcaagaccagcctggccaaaatagtgaaatg

SEQ ID NO: 94465 - DNA, 258 bp, Homo sapiens
agtgggaagattggcaggttttctgcagtttctgggtaatgggaagagtctttgtagtggagaagccacaaagaagtcaaaaggaaagatagaagggcctaccagacaggaaaaagctgaaggccatcaatatatgttgaaggaaaggaaatctaaggaaatcttggtcttagaacaggagctggcattcggtacctaaactgcagggtggctaggacattttgaggctgcaaagcaaactgtgggagtctctgtctg

SEQ ID NO: 94466 - DNA, 732 bp, Homo sapiens
ccactttttgaaagacaatctaatttaacaatctacatctacatcagtatggatatcagttttgcctttggtatttctcttttccccctgtctctctttgttcctgcctatctctattttagtctacgtcctctcagcttctgatgtcagactcctggggtttgaaactgagctcctcacttactggcttgtgatctgggccaagttacttaatctctttgtgctactggaaaagggcatgtaatgagttagtacctgccacatgcctaacacagagcctgaatcacagtgatgctcagcatgcgagggttgttattattattctattataattccctgggctgccatgaagggccagtgtttgagaaaggatggagacaagaccaggatatgggaggtgttgggttttagggggaaggttctccacctatcagggagcctctgaggactactgagtgaatgagtgatttgtcagagctggagtttagggcattctatgggcagcccagagcaggaaggaccatgggagagatggaggcagagccccacgtgggagccatcacagtcctggcccagcgatcccactggtcccaaggccagaacagagacctttgattccccatcacctaacccgccattcacagcatcctgaagcctacttatgtgtgaaggacgatggttctagaaacaggagggcccaagaacatcaagacagtctatacttttcagtgt

SEQ ID NO: 94467 - DNA, 429 bp, Homo sapiens
actgaaacctggcccccatgaaacactcactctccatccctggcaccagcgttcaagtcacttcttctctatgaacgggccacccgaggggcctcctgtgcatggagcctgcagcgtctgttctctgcggacggcttggtgcacttaccgcagtgccctccaggcgccccgtgctgcggcccccgtcagaatccccttccactgttaggctgaacgacatccacggcaccgtatgcgcggattgctttctgctcatccattcacccttccggggacttctgggttgtttccaccttctggctctagttctcagtcacctttgaagtgacccaggctccccggagccacgctgatctgatttggccatgacattcccatgccctcgggtgactcacagaagagatgcccgaacgccccaccctcctttcc

SEQ ID NO: 94468 - DNA, 411 bp, Homo sapiens
  misc_feature (318)..(318): n is a, c, g, or t
  misc_feature (342)..(342): n is a, c, g, or t
  misc_feature (361)..(361): n is a, c, g, or t
  misc_feature (370)..(370): n is a, c, g, or t
  misc_feature (386)..(386): n is a, c, g, or t
ggtgtaccttttttaaaaaaagatttttagttttgtctcgagacagggtcttgttcagtcacccagggtagattgaagtggcgtgatcatggcttactgtagcctcgagctcctgggctcaagagattgtctcccactttagcctctagctatcctcccaccttagcctatagagtagctgcgactatgggtgcatgccaccatacctggctgatttttttgttttttatgttttgtagagacctcgctatgttagccagggagtttgagaccagcctgggcaacatggtgaaaacctgttctctacaaaaaatacanaaattagggcacacgtctgtggtncctagctactcaggtaggnctgggagtngggaggattcacttgnagcctggggaggtttcaggctgggg

SEQ ID NO: 94469 - DNA, 333 bp, Homo sapiens
gttctcagactttacctggtatcagaatcatctgcagggcttgttaaaactcagatggctgggccttaccccagaaaaatttacatttctaacaggtttctaggtgatgctggtcaggcatacactttggcttaatgattctaggccaactggccattctgaggagaaatttgacagattttggcctggtattcctttctgcctctctgggtgaaaagattaattgcagatgggtttggggaaaaaaactctgaactttattttttgatacttagccacagggtggccccctagctccaataattactccatagcccccactcccaccgcatt

SEQ ID NO: 94470 - DNA, 217 bp, Homo sapiens
taaaattttatttaaatacattatgtattccttttacatggcttcttttactcaacatagtgcttctgagattcagtcatgtggtgtatatcaatagtttgtttttctggctgaatagtattctgttttatgcatataccatatttgtttatacctccatctgttactggacatttgagttgtttctgttacgttttctgaaacttggatttccaat

SEQ ID NO: 94471 - DNA, 314 bp, Homo sapiens
agggccagtcagagggtgagccaaggttccaacccaggcttccctccccagcctaggccgttccacactccctgttctgattttctaccgtgtccagaggaaactccatgtctgaggtttggtccgttgatgaggagctgcctgacctcctggctgtcacgaactcagggcagccctctgggaacgctacactcagccagagggcaaaggattgagcaggaggaaagcagccgcagggggctctttgatcatcctcaacccaggcagggacagctggacccggtgataatcctcctcctgtatttaggccactg

SEQ ID NO: 94472 - DNA, 275 bp, Homo sapiens
gtcataactttgcagcccagcccattcaagttatcattcttagggctctttccttctccacttctcttcctattctttccctcctgcatgaaaggccttatgaagcccaagccaggcttgtgaattacccatgacttctccatctccacagtgcctctcccctcagctactcactcactgaattctgctgttcttcttgtctttataatttctcatattcattttctctgtgttcttactgcctcttccctaattaaggctcccatgctctccct

SEQ ID NO: 94473 - DNA, 293 bp, Homo sapiens
ctgtggcccgttgggaagcccagatctaggggctccccaagccagggctgtgacaccttctttgggactgcacagttcctggtgtctccaagcttccgggtgccaccgtgttctcctagaacatttctagatgtgttacttaggaatgtggcagctgtcttgcttcttcatccagacatgggtccagaaatgggtgcctgcagcagaagccatgtgtggtacatctggtccagccacagactcacatggagctggcacctgtgccagtgcccggagctgtccatcctgtcgca

SEQ ID NO: 94474 - DNA, 154 bp, Homo sapiens
tgatagttcatgatgggtagctccagaaacaaacaaacaaaatgataataatgattataacctttcagccaaaaagaaaaaaaaaagcatattaactttactgttgtagtgccagtacaactttttattttatttttgagacaggttttccctc

SEQ ID NO: 94475 - DNA, 573 bp, Homo sapiens
ctgagccactgcttccagccccctttcctttcttatggatgactattttagaatgttgttttttgtgtaatcttagactttcctaccaaaggcagagggcccatggctgagggtccatgttcttcccagtactcagcacagtgcctggtacattcattcattcattcaacaaacatgtattgagcacctgataagtaccaggaactgtattaaaactaaacatagaaaatgaacaagaccagatctctatgctcccagagcttatatgatagtaagggagatagaaaagaaacaactattcattgtgaaactctctgctgtggtttgaatgttgtatcctcccagattcatgttgaatcctaatgttgaatcctatgttgaagcctaatccccaacatgattgtattaggaggtggcaactttgggaggtgattaggtcacgagagtagagtcctcatgggtagagtattagtgccctgatcaaagagaccccagggagctgccttgctccttcctccatgggaggacacagctggaaggcactatctatgaaccagaaagtggccttcacca

SEQ ID NO: 94476 - DNA, 1211 bp, Homo sapiens
gtttcatttgtcttttctaaaaaccaccttttgcttctttcattctattgtgtctatttgtttatttcattaatctttacttttatcttcattatttccttttttcttttttattttgatttaactttttttcccctagcttcttgagatagaccttggagtattgatttccaggcattttttttttgcttttctaatatattcaaccaaagctataaattttctctggaagtacagctttagagatattcttcaagttataacgtgtcatattttcattacaattcattctgaaacactttttaacttccattttgattttatatttgaacaatgggttatttagaaatgtatttttcagatcttaaacagcgggggatcattcagttatctttttgttatttgaagtccttgctagttactctgtgatcataacatttacatgattttatgttgaaaattttatttaggtttgtttcatggcccagaatatgaaatattttggcaagtattattttttacttggaaagaacatatatgcaaccattgttgggtatagagttctatgtatgtcagttaggtcaaatctgttgcttattttttatgttttttgtgacatttttcctgcgtattctatcagtttcgagaaaggtgtgttatgtattttgatgattattatggaatttctatcttttattgggtctatcaatttttgctttataaattttaagattatataattaagtatatgcacattaattttcttatgtgaattggccttttgttgtcattaaataaccttatttgtaacaatgtttcttgccttaaatcctattttgtctgatattagcctgtctttctttgcgtcatatttgtatggaatatattttccatctttctattttaaacattttacatccttatatttactgtgcatttcttataatcagcatatagtcattttttagttttgtggggaatttttagttgttttcttatttgtttttaccatccatcatgccaatattggtcttttaatttttgtccatttatattttatgtaattatttgtatattttggttcaaataggccaccatactatttgttttctgttcattctatatcttttaagttccttttttctctcctttcttgccctcttttatttaaaaggttaatctttctccaaagagataagaaaactgagcaa

SEQ ID NO: 94477 - DNA, 430 bp, Homo sapiens
atcctcccacctcagcctcttgagtagctgggactacagtcacatgctaccatgcttggctaatttttttgtattttttgtagataagaggttttgccatattgcctaggctggtctggagctcctagactcaagtgatcctcctgccttggcctcccaaagttctgggattgcagatgtgagctaaggcaaccggcctcacagaacacttttaactttaagatacttataaatttttcagatatctcagccatttcaagagtatggtaataatttctacttagcagtaggaactgaatcaaggtgttggtaggtggggctatgcaggattttgttgtcttctttattaaaaaaggtcttgtctatagtgagatttcttttaggcttagaatttaagttaattttgtagttcattttaggctgttcttta

SEQ ID NO: 94478 - DNA, 532 bp, Homo sapiens
gccttatctcggggaaagcacttccttccaagcaccatgaaggcctcccgtgctgagacaagatggaagctcctagtcccacctgaggactgatacggcctgtgcttctcggtctctcaggacgcgcaggcggccatgcgccccttcgacccctccgctctgctgcccacctgctgggattactggacctatgtgggctcgctcaccaccccgccgctgaccgagtcggtcacctggatcatccagaaggagcccgttgaagtggccccaagccagctctctgcatttcgtactctcctgttttctgcacttggtgaagaggagaagatgatggtgaacaactatcgcccacttcaacccttgatgaaccggaaggtctgggcgtccttccaggccactaatgagggcacaaggtcctagagacattaggtccacatgaatagcagaactgactttgaaggaaggaagcgttgtttcccaagtttcacaatgtgattgtacatgacttctgaaattaaaaagagagcatgaa

SEQ ID NO: 94479 - DNA, 205 bp, Homo sapiens
ctatgaatgtactgattttgtcagctaattttcagcgaactttctgagggcaaaggcaaagatttctcctcgccctacaggtgcatcagccaacaagaagtccctctatttgcaggtcctctttgtcctgtcaatttctttcttttaatttcttttttctttttttgagatggggtctggctctgtcgtgcagtgggaagatctc

SEQ ID NO: 94480 - DNA, 488 bp, Homo sapiens
acactagatagtttataagtccaaacaatgcataaaatacctatctcatgttaccattgtttaggttaccagataattgttctgtccaattattccacttaattttttgcttgcccattagctaaatggcaagataaaatttgtcaaacgggggggaatgtattgaaaatgctagacaactacacttaaaatgaaaacaggccaggcgcggtggctcaggcctgtaatcccagcactttgggaggccaaggcgggtggatcacctgaggtcgggagttcaagaccagcttgaccaacatggagaaactccatctctactaaaaatacaaaattagccgggcatggtggcacatacctgtaatcccaactactggggaggctgaggcagaagaatcgtttgaacccaggaggcggtggttgcagtgagccgagattgtgccactgtattctagcctaggcaacatgagcgaaactccatctcaaaaaaa

SEQ ID NO: 94481 - DNA, 466 bp, Homo sapiens
ctaactgcagagcccatgctcttacttcctaccctctgtggtatcatctcagagccaagcacataaaatgcaagcttttgtgctgctccttttcgtcaaagatgtgtgtcctccagtttcaagggactaaacacaaagtagttccctggaagtagaatcagaaggctttagaattaatttttttaagtcaaagtgcctctttgaaattatttttagaaaggaaactttcattaaatatgttttccttgatatataaatttggggtcagagggattaggctttgagaatatgtgtgtgtatgcatgacccagtctgtgttgatagccatgatactgatttatccaccttgtcacactagttccttttatgattaagcacacaccttgcatgaggtcagtgaccatggaacacagggaaaccgctcccatggctgatttgagcctatgatcttagcctcaattacatt

SEQ ID NO: 94482 - DNA, 384 bp, Homo sapiens
atcagacattcacatgcttatgaatgaaggaccccttgtaatacttctgcccctgccccccattccacacaccaccccctccccaggagtagggattagaaatcgttagtctttccattttgtcttctgtggtttcagttaaagttctaaagacgtattttactaaaagtggaattgactttttgtattcaggggaacttgtcagtggttttcatattatgtgccgtggagtcccaggattccagaagatgcctcaagggagacccctcccttcccccgtatcccttccagctttaagcagcctgtctgctttaagctcttatatatattgagattctccatgagatttcatttgtataaatgatttcacagcttaccaaaaaa

SEQ ID NO: 94483 - DNA, 174 bp, Homo sapiens
tagtcgcaaaatgttttatttgtaataaacttaaaatcgtcccttctgttcacacgctggtccttttctctcccacttcttgcaaggccttcagagctcctccccaaaactaaggaggtgctaaaggatgtgagaaaatgacaatccagaacatttctgagtgggcttaggtgt

SEQ ID NO: 94484 - DNA, 840 bp, Homo sapiens
attctgattattacgtttaacctagatttatttgccaggttgctttcattttcttatttatatgtgaaatgtaaactagcagggttgtgtgtttaatttttttttaactttgcaaatggttgtggtatattctgaaacagttcaaaatatagctaagtagatttatttctcttttttggtgccattagtccatctttcaactctttttttttggagacagggccttgctctgtcacccaggccggaggggcagtggcgtaatttcagctcattgcagcatcagcctcccgagttcaagtgattctcctgcctctgcctcctgagtagctggaactacaggcatgtgcttccacacctggctaatttttgtgtttttagtggagatatggttttaccaggttggccaggctggtctcaaactcttgacctcaagtgatccacctgacttggcctcccaaagtgttgggattacaggcgtgagcaactgcccccgacccatctttcaactcttataatcactttcaacaattataaaattgtcagtaaactcttgaatttaaaatgaaacatttttagtgatgtcaaatggcatcttgaaagaaaattgaattttcttagctgacatggctttatattttcagttttggaaactatggggtacagcttatccttttgtctatggtatcatttatcatacgttttggaacatgtcattttagaatgtattttctctaaatactgacaaatttgcctttaaataccatctgttgatgtttaagatacccctttagtacactaaagtcaaatgtatacaaggagtttatcataacttgtgtgata

SEQ ID NO: 94485 - DNA, 385 bp, Homo sapiens
acattttgcagttttaatccaaccaagctacttaaagcaaaacaaacaaaaaagtcactctttggaggaatataacaaaatctgactatccatgagataatgttggcaatgtccaggatataattcagaattaacaccaccagtgagcagcagatgtacatcctgcacctctagatgtgatacccggagaagcatcatcaccattataacatttcatccaagaacccgtagtcttaaggacatacacacaaaagtttttattactaaaaaaacaagaaaggaggagaatatattatccaaaaatggcaatgtcataaaagtcaaagcgagaggaaatgttccagattaaaggagactaaagagttacaagtaagtgaaatgtgtg

SEQ ID NO: 94486 - DNA, 248 bp, Homo sapiens
aggtttacctgctcctgttgccatttttatttagtacaaatttattaacatttaaaaatcattggcacttatgaaacttgaaactttattttactgttaggaagattttggctgcaagaaatataaaaaccaatgctaagtggtttaaatcataagaacacttaacacttcatggatgaatatgaaaatatggtggttcaggattagttgaattagtagttcaataatggcctcaaagactcaggatc

SEQ ID NO: 94487 - DNA, 585 bp, Homo sapiens
gggattgtagagtaaggatagattttgttatttcttgtaaactgtctgagaaatcctttgagagtgtgtggtagtaggatagtaaagtagataaactggcgattctggttcctgtagcagtggccattcctaaccctataagtaaggttattagttgtatggccctgcactgacagacttcagctttgaggggcactaatatggtctgatttcctcaagattagaagttaggataatacatgttacactgttaacttttagcaagctttacttttgtcaaaaaccttgtaagtttgggatttcaattattctttgctattaataagacctcgttcagtccatattaacttagaattggtatagatggctcctttctgatgctgtaagtactttaaggtttggctgagtgcaaacagctcacacgtttgagcagaccaattattaagcaactttcctaactctgcttctacaagagtttccttatcacttactgaatacccattgtgtctttttcccttaatagctttggaggaaccatctatcatcctatcccaaaggggttcctcctaggtctgttcagatctt

SEQ ID NO: 94488 - DNA, 227 bp, Homo sapiens
tccaggctctatcactgcactactgaattgtattatgttgccggttatgctccttatggctcagtctcttgaagccctgatgccagtggctggcccctgggaggtgctctgctgatgtgtgcaggagggaatgaagtgtcctcaggattcgtgacttccctctgctcctggctggtggcaccttctcccgcattctcctccgcgtcaccctcactgctcttttccta

SEQ ID NO: 94489 - DNA, 349 bp, Homo sapiens
aaaaaaacttgattctggcaatagagggatagaggattaattctttgaagtttttgacatataaaagggattgtggggtctccttttattggaaagacagagaattaacaccttaactgaatccatattgtaataaaccctaggacttggaaacaatgttgcaaatattaagtatcgtataaatttatctctatggaaaacatcttcaacttcattaaatgttctgtatgatgccacttatctatttcatgcacccccataccttctccaaaagttctctagacaatgttgcactgagaccacagagatggcatttttaatgtcaaaacaaaataacgtagcagaaacc

SEQ ID NO: 94490 - DNA, 196 bp, Homo sapiens
tacactgcacccagagctccccaccttgcctggaccccctgaccaggaagggccgagtgtgggtaatcatcagttgaatgtctgcatggcccccacttttattataaatctacaatgtatcataggaagccttactgttcatccacccctcacgttatagacagggaaaccaaggccctgggaggagatgggtcct

SEQ ID NO: 94491 - DNA, 374 bp, Homo sapiens
tggctggccatggtgtttattcgatggcaggtattaccaggatggagcgagtcccagtaggaagggcctttaggatgtcatctggttccacccaacagggatgggaactgtaattccccactctccctgtggagaatcagggcgggctccggatggatggccaaaggctgcacagaggtgagcctccagggttgggttctaagcgctgttcacactcctgtcccagtggtgtttggtctggggcacattgtgatatgtgtttccctcctttcttaaaattagctcttggcttcagggccttgtagtggactgatgtccctccttaactgaacagtcagtctgcttatttttttggggtggtttaggggtaaaaa

SEQ ID NO: 94492 - DNA, 273 bp, Homo sapiens
ccttttcctctaaaactcccacatattcaaattagatgttgctggcatacaggggaagtttttaaatgtaataactgcctgtttacttcttggaactataaacaaagcttagaagaacagggatgtctatcttgttggcatttagtgttcttacaggaaaattaaagtctcacaaagacacagttcagtgagccaattaagccttgtctattaaacttatgcaaaatatatggcaataattctgatagctattgttaattcaaagcataggct

SEQ ID NO: 94493 - DNA, 265 bp, Homo sapiens
accagaagaaatagctaacagagtgaaaagtaattgtctggggaggtagcaggtggggtggaacatgggtattaagaaggattctttttttaattctaagcattctattactacttgactttttaaactatgtatttgttagatacaaataaaaataaagttctttgggaacaatgactacctaattctcttatatgaataaacttttctattgttggcccttggtttgtttctaattataaatggttcaataaattttttaagt

SEQ ID NO: 94494 - DNA, 404 bp, Homo sapiens
caataggttcttggaaactgcaactttaagcgaaatcccagataaggaaaccaattttaccataggctaattgatgtaaacaagagtgaagttcctacagtgtccaaaacatcaccaaatttctaaataaagcccaaaacacttctcatattaagcattgaaataaatgtgaactatatatacatacatttcagaaaaagtaattaaaacaagtaaggggcagggcgtggtggctcacgcctgtaatcccagcactttggaaggccgagacaggtggatcatgatgtcaggtgtttgagaccagcctgaccaacatggtgaaaccccatctctactaaaaatacaaaaactagctgggcatggtggctggcacttgtaatcccatctactcgggaggctgaggc

SEQ ID NO: 94495 - DNA, 188 bp, Homo sapiens
ggaaaagctcagaagcctctagatgggccagggtgccacagaagtgagctagacaggtgggcctgcaggccgccgggccaggaaagtggaggaagagcaggtgtgggagactggaggggtggaggtcaggatctagcagggcctgggctgggggcagtctcttcaagagtgctgtgatgatgcagggg

SEQ ID NO: 94496 - DNA, 483 bp, Homo sapiens
gtgtgtgtatctcagcaaagtccactgttgtaagcagaataatggccccctgaaagatctgcacgtcctgtttcctagaacctctgactatgttacttcacaaggcaaaagaactgagtgtgatgaagttttggatcttgagatggggagattcctggattatgtgtggttggcctagtgtgatcacaagaggcagaagggtcagaatcctataaggagtataaggagatttgacaacaaacccagaaagagagagatgaacatgtcttactgctggcttgaagatggaagaaagaaaagtaggtggcacctagaagctggaaatggtcagcaaacgtcctccccaagagcttctggaaggaacccacactactgaaacccttcacttaggacttacgacctccagaactctgagataacaagtttgcactgtctcaagccactatggggtggcagtttgttaaagcagctttaacaatagat

SEQ ID NO: 94497 - DNA, 641 bp, Homo sapiens
ttgtcttcaaacattaccatcataaaatcagatggttcatagttactgcaataggaacatatagtagagttgcaacatgtaacagaaagagataaatggaagaagtatgggtgactccatccaccattcaactcaatgagtgaatgccttggagtgagcatgaagagtgagacatgactccactgagcccttggtcggtcacagtacatgtgtacctttcatagtatgaccatctgacaacactatgtggtaatttcatctaagaaacacgtatatttttcatacaaagcacaaacattgccaaacacaagtcaacttgtttatcgactccccatttgattcaacagcaatctatcccaacaatgaaagtaaagtgataggggttaaaatctttgagatagggtatgaatgtctccaatgtggcaggaatatatggctctaaatgcacataaaatcaatacagacaaatccatgtagaccattaaattatgaggaatttatgagatttttttaaagtaatttggtcacatgcaatattcaaccttttaggctgaacttggaacataaccccctcctgaaatgtcactccactgggatgaaatacactgagtttatcttagtagtaggatttatttcactgg

SEQ ID NO: 94498 - DNA, 919 bp, Homo sapiens
cctcagcctcccaaagtgttaaaattacaggcatgagccaccacacctggccttttttattaaaaaaaattttttttaaatgcaatgttttctttttttgttgttgttttagcttgtgtctattctccaaagcatgttgtactgattgtgtagtacaattttatttaaaaatgtatgttaagatttacataaatatttggggtgtccatgaatcaagaaatacatgaaagtatgggcaccaaaacgttaaaagtggttttgttgggagttcaggggattttactttctccctaatactttattctttgaatatcttgaaatggatattttgtaactgtataaggagaaaggaagcgaaactatttttctgcaggggtacacccacatctattgtattagacaaatcacagagggattgcaacagaacacagatttttctcactgttttttctctggttgatcgggatgcattatccaccagaaaacactgtagacgactcactcaccaggaaaagagcatatgccagttggaataaataaaggggaagagtaaggaagaggctgtagaattattttataaattatcaagtcttatgagccaggtgcagtggtgcatgcctatgtacagtcccagctactcaggaggctgaggtggtaggatagcttgagcccaggagttcgagggtggagtgtgatatgatcgtctgtgaatagccacagcactgcatcctggacaagatagggtctctttaaaaataagacttaactagcactttaataatcattgtttttgttcccaactgcattgtacattcattgaggacagggactttaaacttcattatattgctgttgctgtgtttcacctttgaatgatttttaaataaaaatctcatctttgagtcacaatctgatgtaa

SEQ ID NO: 94499 - DNA, 440 bp, Homo sapiens
caaataggtagcataggactgaaaagtttctctattgcctgacatttcattgagcaccacattttataactgaagtgcttaataggtcttaattcatttttactttaggatctaaggtaaacgataaactctagataattaaccaacctaagtcatctgttgagtaaaaataaaaaatcaaactgacacaactatctttttgtatctgtgtagtaacaactgtgctggattaattatctaaacagctactgagatatttaaaattatctatcacttaactgcttatatatacacccagaaacctaatagttttaagcaggacaaatggcagtgtgggaagatgctgaagaaacattctagacacatcagaaaacaccacagaccagcagtttccaacagaaatacagtgtaattataattctagtaaccatattacagtc

SEQ ID NO: 94500 - DNA, 345 bp, Homo sapiens
cggttctgggtaggatcccagaactggttgagccagattaccggtctgggtggcactagctggtgcatcagaacactgggtctgcaaaatattccaagcactgatcttagtttttacaacagtgatcttatccccaggagcagttttgggaggttcagaatcttgtagcctccggcctgcgtgacccctaaaccataatttctaatcttgtagctaatttgttagccttacaaaggtagtatagtccccaggcaagaagggggtttgttttgggaaagggctattaccatttttgtttcaaagttaaactataaactaagttcctcccgaagttagttcagccca

SEQ ID NO: 94501 - DNA, 487 bp, Homo sapiens
ggtccaagtgcgttctgctcactgatacttttaaccctcataataacctagatctggattgctaagattgagtcttagttctgctgagcagtggtgaccttgcacaagttacttaacctctctgtgactcagaaagacacagtggagaaagtatgtgactgacctcaaaatgttgttttaagcaaataaggctaaatatgcaatgctcttaagagtagttctgggtacatgataagcacctccgtcccagtgttagctgttactgtcccattgtcctgaagccaggcgattacctaagagcacacagtgcactgctgggcagagctggggcttcgggctttttgacgagtaggctgcagtgccttgggacagaagcagcagctgcaagataccatcactgtgttcggggtatgttgcagagaaggagctccttatggcaaggcattctttcagtggctgcaggccatagctgcatgcaggcaaacgc

SEQ ID NO: 94502 - DNA, 202 bp, Homo sapiens
tgcatgacttatgatgacataaccttgagcaagaagtgagctcaacattagttctgagacttcctgtctacccatagtggaaaacacaatgagttccatgagtgacattgttcattttggctagcgacatttcagagaaatttatccatgagatcctcataatacagattctaaaaacagtgatcagcacaagaaataacat

SEQ ID NO: 94503 - DNA, 420 bp, Homo sapiens
cgagattacagtgaggtatgaccgcatcaccgcactccagcctgggcaacagagtgagaccctacctccaaaataacagcaacaaaaaaggaatacaattctgatacatgctgcgacacaggtggaccttgaaggcattgttaagttcaataagccagtcacaaaaagacaaatgctatatgattccaattatatgaggtatcgaaagtcatcaaattcatagaaacagaaaatatagtggtggttaccaggagctgtggggaaggggaaaaagaggttgttgcttagtaagtgtagagtttcagatttgcaagatgagaatgttcagtagatctcttttgcaacaatgtgcgtaatgtttaataccactgaactgtgcacttaaaagcggcaaagatggtaaactaaaggtttttttat

SEQ ID NO: 94504 - DNA, 216 bp, Homo sapiens
acatgctattcattgtaagacgcatcattattttatctactactaaagaggaaaaaataactaattaaaccatgacacaccattgattgtaagaagaatcccattcagagatgttaaaatatgaaaaaatgagaaaatatgaaatatattaataagcagttaagttattcctgtgtaaatgtttacaaccatggactgctaggatacacttccttt

SEQ ID NO: 94505 - DNA, 759 bp, Homo sapiens
ttttttgacttacaatgttttttgctttgcagaattgatttttttttgcatttgaacttatcaatcttttctcttatggctttattattattttttttagagacaggatctagctttcttgcccagactggattgcagtggcatgatcatagctcactgtaacctcaaactcttgacctcaagtgatcctcctgctttagtcacctgaatagctgggaccaccggcatgcaccaccatgcaagttccatgcataagttttatatctacagtaaatatttcaagacttaaactgaaaatttaatgaaaaatataatgtatagatattatggataaaataggaaaaaaacttacacctaaaactttgtcaagtttaaaaagctaaatttgaaatcctgttagaaaagcgggtcttgtattttgtatgtgtacaaaatattttgttttgggctctaagcatatgcagatagtgtgacctgatgttaattaatctggacagaattaagaatgaaggtatagagagggctctaaggcttaaagtgacagttttatgattcttaagtgatgcttgtataagtctgtgagttttgcttctacaatctttgaatgcttgctgatgagtggcctaaaatctcaaaaaaggctgggggcagtggctcatgcttgtaatctcagcactttgggaggctcaggcgggtggatcgcttgagcccagaagttcaagactagcctgggcaacatggtgaaaccccatctctacc

SEQ ID NO: 94506 - DNA, 272 bp, Homo sapiens
ggcaaaggaaaagaaaatgcgtcatcccaggactgcagaagcctgtgatgaattatccacagggctgctcccaagagcccgagcagagggctttttcggcagagttcctgcatccagcctaccgatgccctggaagaggaattcttaccccccttccccaaattaataaaatccaccaagccagagagcaggaatgcagcattgcaggacagcagtagctgccgggtgttccctcagcctgccctcgggcttccctataccggtctattttt

SEQ ID NO: 94507 - DNA, 136 bp, Homo sapiens
tcttaattacagcctgggagcctgaataaaaataataggtagactcagagtggatcttggatggaaggtcaagaaatcaagtataataatgttatacaaagtaactggagattaaaggaaagaacccccttatttt

SEQ ID NO: 94508 - DNA, 475 bp, Homo sapiens
tgaaacaagaagagaagaggctgaatcggaggcgcttctcatgaccacacccaggagtccgggccctgggccttttctgggtgctgggaagagcatggctgcccgtgctgaatgtccttgtcttctgtccccggtgcctgagacctctgcctactcaacccatcttttaactctcaaggacatgacctacagggagcttctttgcccccacactgggcaaggcctccctgtgacagcctcaacttcacctgcttcatcactttgttacatttacatatttttttttccttttgagacagggtctcattcctttgtccagcctgggagtgcagtggtgcaaatgtggctcaactgcagccttgacctccaggtctcaagtgatcctcctgagtagctgggaccacaggcacacatcaccacatctggctaattattattattattattattattattttaagtagggacaaggtct

SEQ ID NO: 94509 - DNA, 585 bp, Homo sapiens
cccaagtagctggaattaccggcacccaccaccatgcccagctaatttttgtatttttagtagagatggggtttcaccatgttggccaggctggtcttgaactcctgacctcagatgatccgcctgcctcaacctcccaaagtgctgggattacaggtgtgagccactgcgcctggccaagaaccacaacatagtttaatggaaaatatttcttgtacaatttgtgttcatctttagaagaaatttttctcttctgaagaaagaaaatacaaatacaaatctcttgagcatatctttaatcagtatttactaaagaacattaacttaagtgatgccattttgtccaaaatataagctaaactcttgacaaacttcaacatgtttcggaagcagaaataagggcctgttggaggtttctatttagtttcaaaggaaagcacagcaaatcagaatcctggaagattagaccacccaggagttctgccaaggtgaagcttttatgaatcctggattgtcttacgttttatttccattcacttgttctgaggaaatctaactcatcaggagacttgaagataatgagta

SEQ ID NO: 94510 - DNA, 478 bp, Homo sapiens
ttcaccacacccctcctcccaacttaacatttctgaaatgagatatatcttaaaaatcaatgtttacatatttaatgttctcatagtaggctttcctcactcctcagagaagctgttaatacattgatggtgtatggagaatcgaagaattacagtattacctttttaagaaattgaacagaagaagaaaaggaatgcttaatttccttggagatttcttggaaaaggtggtcaccactcttgcttattctaattctcattatttatctttctatgaattccttctccatcaagttcctcaaaaatggtggcactcctgaggctaaaagttcagctgttatcatgttcactcaggccattgtcagttctctgaaatcttctctttcccaccactcctacttattttccctctccttcccaccacccaaccagtttatgcgagagtgctgttttgtaaatgagactgggagctcataaa

SEQ ID NO: 94511 - DNA, 680 bp, Homo sapiens
aaaagaaaacagtatctggtaatgaaatcagtcacgaaggaagcggacttctcctgacttaccaatgtgacaagaagcaccacagatgtagtcaagtccaattctcttacttcacacatgaggatactgaggactgggaggagtgtattcatgttacattcgggattagaactcagttttccttcgtcaccaatttcaaacattcagtgaaaatgatgatacaatgaacaccctatacccaccactacattgattcaatgattaacattttgtcatatttgctgactgtatttgcaaaaccatttaaacgtaatttgtacaccttgtgacaattcatctctaaagatttcagcatatatttcctaagatcaggatattcttttatatacccacaataccattataaaaataactaaaaataattccttaatgtatctaatacctagtccattttctaaattttgaaatgtgtgtctcaaaatgtcttttataatttttttcctcaaattacaatctagtcaagatatctcattgcattcattttatctttatcatctctgttcgtctggaacattctccaaacacttctttttgggatgttaactttttgtaaaatgccccatggcacactagggaaagtggcatacaaagctgaggcctgaaggtgaataagtatgtgt

SEQ ID NO: 94512 - DNA, 666 bp, Homo sapiens
atgaatcaaggtctaacttatgctgactgtccgtgttgcatcatcagtctttggggccccttctcagtttctgtggctgctcttgtgcctgctgactccatccctgtagaccttgctgttcctcccagtctgtggccactaacctcagttatttttactgaatgtgttacctcatccatagtgagtcttttgttgttgttgggttttttttttagcaacaatgtattttttaattaaggtatgtacattgttattttagacataatgctattgcacacttaatagactaccatatagtgtaaacataacctttactgcactgggaaaccaaaaaaataagtgtgacacactttattcaatagtcactttattgcaatgttctggaaccctttttgttgttgttgttgttgaacggttattataacatgtctgatttagaggaaagtacactgaactgaaaatcaggaaagctgggcccagggggctggccttgagcagctgactaagcctgtacatttaattcaaaaagagctactcaggttattcccttaatcggtcttatactttatgacagtaagcacttacctcgttctgtcacatggtgtggccagattatgcatgtactatgattcaaaacattcacgtaaataaatcttcctaacatac

SEQ ID NO: 94513 - DNA, 560 bp, Homo sapiens
gatgtttattttattaatctattttttaactgggtagggattgcttttgtaattagaaaaagtattaaaaactctctttaattaggaagattatgtaaagctgtaaagcaaatttattttgcatttcagaggctgtttctttatcttgctctctctcctgtggcagattttatggccggaagatggtgaatatcttgatggcgaacactaagtttgatgcatttctgaagcaatctctcccatcttacgacttgcagaaggtcatggcggccattaaacagcagggaatagaagataatgatgaacttccctctgccaaaggccgcaaggtgttgaggagtctggtggtgtgtgagaacgggctgcccatcaaggaggggctcagctgcaatggcccaaggctggtggggctgcgctccacactgcagggccgcggggagatggtggagcagctacgggagctgacacggctgctggaggccaaggacttccggtcccggatggaaggcgtggggcagctcctggagctctgcaaggccaagacggagcttgtcactgcc

SEQ ID NO: 94514 - DNA, 258 bp, Homo sapiens
aagactacagagaaatggcctccccctttgacccctcctccttgggggacaccattgttagatattttgcgggggctcacctccttaggtcagtctgtatgtgcctggagaaattgctgtattttataggtctctgtctctctatcacaaacataaaaggatcccactgtatacattaacctacaacttggttttttcccctcacaatacaccgtgaggctctgtccacattggtctgcatacatctgctcattcatt

SEQ ID NO: 94515 - DNA, 360 bp, Homo sapiens
actaacccagcctttggtgccctgctgggaagtgtcaagcgtggagacagttatggaaactagaaagccctttttcatgtttgcctagtgatgagaggaagagatgagattgttgctttttcatatctctcccgtggactcttaaaattaacttcactgtcaaaatttcccatggcccaaatgtaggtttggggagagaaatgtaagactttgaagttgagaaagaaagtagagaaagcattctctagacaaatgctcaccatgcagacttcagaatctgtgaggagacaaataaaaaggcactcggggaaccgttttagagagaaaataaagaactgggagtagagatggctacttcag

SEQ ID NO: 94516 - DNA, 557 bp, Homo sapiens
gtaatgaaaccataagacatgggtcccaacttcagaatgcttcacatttggttgtggaaacaggtcacatgtatcatgttaagtaatggagataaaaagtttgcaattaactttttttagtgatttcttttttttttattagtgaaatttaaaatctatttccccaaagtaatctttggagttcaacctaattttagtgataatatatgtgccagatttaatgctgtttctccttcccaccgctcccgcctccccaaccccaaccttccgtacattagttgaaagggccctgcaggaaggttctgaagtcccaggcaaatgtaatagggggtaggcagaggacttacttagagagatggtggtgaaagtctcaaactgcagatttctagaacaaacaggttacttgtaagaagcagacagagatacttagatcagtaaaatacttctgtaacactagaagtgagaagacatgagaacgttatctagaaactatcaagaggaaatgactgcagaccaaaaatcctacgcatagtagtcaaataaaaaatgtcaaggga

SEQ ID NO: 94517 - DNA, 697 bp, Homo sapiens
acaccgtggttgaaattgtataaacgaggaatagtaaattacaaaatcttggttgatgatacagaagtgcttacagaacatagtcactccaaagaccctttcactccacttatcaacagtaattattgtcctcaggtttaactggctaggtgaaacaagtatagaacaaaagcagcctctgcttgtatctgaagccctttagttagtgttcatagcaggtaaatgctctagtaaagggacagcttctattccaatcccgaggtatttcaatcactgttggttcttgttcttctcgagacagagtctcgactgtgttgcccaggctggagtgcagtggtgtgatctcggctcactgcaaactccacctccgtgggttcaggtgattctcatgccatcagtcacctgagtagctgggactgcaggaacatgccatcacagcctggactaattttaatagtatatttattattttaggtaaagacagggtatcaccatttgggccagactggtctcgaacttctgacctcaggtgattcccctgccttggatctgcccgaagtgctggggtactacatggcatgaaccactcgaacccggtccagttaggtatcctaaaatttccttatcaggtaaagtttaaagagcatagttactgcccaaaggtttcgttgtgtggcactgattatcggatcaagaa

SEQ ID NO: 94518 - DNA, 460 bp, Homo sapiens
acctcactctccaaccaagtgcaaaattaaatagaattcttgtgatatcaggggaaacaaaatatctccctgaccttctctagatgtctgtactatcagttcacgagtttctgtctctaaagcatagtccctgtttctcctgatgttttctctctttctggcaaaaaagaatgttattgcatattacaaataatttttgttagtttctactcaaaattttaacatatttgtagtgagaaagatgttacaatatttatttcaccatcctgccagaacaagatgtcaaggtggtgttttctaaaacacaaatgggtgtgtcacactcctacttaaaatcttcaatgactttatatttctattatcataaaattccatctccttcatatgacataaaaggaaatcctacctttcaagtctaaccctttgctatggtctccttcacactcagttttcagctata

SEQ ID NO: 94519 - DNA, 370 bp, Homo sapiens
gaatttcttctttattggcaccctggctcttcgttcactcacatgttggaaatgttctcttaacatctgtatgttgtcttccttgggagctgatgttgaattctaaaatatttggaaccatccctataaattttctgccagattcttccctccccttccccccaccccccactctttttttcatctaggtgtatgtatgctgctatttccgagacatacattccttacacaatcatgaaaaaaagttttcctagacacccatcatcccttactgcttcatcccccattttgctttctaaatgtcatctcttccttttttttttttgagttggagtcttgctctgttgcacaggctggagtgcagtggcgt

SEQ ID NO: 94520 - DNA, 546 bp, Homo sapiens
agttaccaatctgaagtgggttccattattgtccccatttcacagatggggaaactgaggcacagagagcacaggtcacttccccaaggccacacagctagtaggtggcagagctacgttcaaactcagctctcctgggcccagtccctgctcccaacccatagcacactgtggctgtgctgcacgcaccgttcaagaggcgccctcgtcagtgggatctctggctgcatgttcgtccacgccagcggtttcactggtggtcaccacactcaacagggtgccttaagcatggcccgtgccaccttggcccagtgctcatacctcccacaaatctcctagtctaataaaaccttccaactcaaaaaaaaaaaaagagggggcctcaggtggccttgagaagggggtagatggcatccagataaaataacaataaccacagcagtaagagtaactagggcacgtcgcctcccggagcgctgcccctctggcaggcactaaggacctcacaggtaatcactcgttcactcctcataggacctcttggat

SEQ ID NO: 94521 - DNA, 320 bp, Homo sapiens
ctgggattacaggcatgcgcgaccatgcctggctaatttttgtatttttagtagatacagggtttcaccatgttggccaggctggtctcgaactcctgacctcaagcgatccgcctgcctgggcctccaaagtgttgggattacaggcgtgagccaccgcgcccggcctaatattggctagtattttcagtacaacgtttattaaatggtgaaaaatggtttcctgtctcattcttttttttttttttttttttcaagacagagtcttactgtgtcacccaggctggagtgcagtggcgtgattttggctcactgcaacc

SEQ ID NO: 94522 - DNA, 785 bp, Homo sapiens
cccaaacccagaggatccaggcttccagcacgggatggggttctgaatggggaaggaggaaggaagctgcctgctctctgcctgggcccctgtactaccctcaccccagcatggtcactccattcaacctacttctgtttccaaggcgtcttactgtgcccagcaccctgaggaagagagaggatcagagacatcccaacctcctgttggacaaattctcttacttccacatttctgccttggctccttagagaactcttccaaggcctcagctggatcccctgagctctgacctgccaatcacaccaaggctgctcgccacgaaaaagaactgactttgcctcctctccctccctgtccaaatccatcccaggctttcctgtgcagctaagtccttcccagagagacatcaagatgaaagaaagcagacagacctggattcaaacttcatctctactctttatgactttgggcaagttgcttactctctttgagtctcggtttcttgatctgtaactgggaaagcaggtgcatccttgccgaggtgttgtgaggatttaataaggtgcgacttggagagcaccctgccctccctccctggcaggtgtacagagagcttgtcagaccataactcaaaagccacgtggccaccattgcccattgacactacctccgaaacctctctcccgttcagctcctctttctatccccattgtcacagccctagtctaagcccctggtttcccacctgaattcatttaaacaacgaattcattgaccctctt

SEQ ID NO: 94523 - DNA, 964 bp, Homo sapiens
ctctacaaaaaatacaaaaatcagctgagtgtggtggcaggcacctgtagtcatagctactcaggaggctgaggtgggagaatcacctgagctcaggaggttgagatagcagtgaaccatgattgcgccactgcactccagcctgaatgacagagtaagaccctatctcaaaaaaaaaaaggggaggtttatttaacaggtaacatagattatttaacaagtagtataggttaattctaagcacacaacatttatcaaaatctcaggaaaaaaatgtgttgaggaagtattgaaaagtacagtttattttttgagattttgagattattacaaattattcatttgtcaaactattgaacagactaggtgtctggaaaaaacgatacccttgtagaatttatttattgttttagcattttcaacttaatttgagggaggttataagaaacatgtaagaaacacattttctattagaaggatattacattgtttgttatattcttttattgggatctttggaaggaattgtttatattatgcagtaatccctccttattcatggttttgcttttcatggttttggtcatctgtggtctgaaaatattaagtggaaaattacagaaacaaacaattcataagtttgaaatctgacaccattcagctccatccctcccgggatgtgaattattcctttgtccagtgtatccatgatttatgggccacctgcccaatagtcacttagtagcagcctcagttatgagacctattgtcctggtatcaagctgcttgttttcaagaaactctattttccttaataatggccccaaagtgcaaaagttatggggttggccacttgtgtatgccagagagaagtccttcctttaagtgaaaaggtaaaagttcttgacttaataaggaaagaccaaaaactgtgtgctgaggtttttgagatctataataagaa

SEQ ID NO: 94524 - DNA, 411 bp, Homo sapiens
ccacagtagtgattgatgtgatgtaataaagtgaagcgagtggtcaaggaaggcctctctgtgagaagttgccatctgaccaagacctgaatggtaagaaggcactaaccttgcaaagacaggtcagaaaagcatcccaggcaagaagagctgcttgtgcaaaggccctgtggcaggaatcacattgccccatgcaagaaactgagagaagccagcatggctggagcttggagggcgcaaggacaagaatggaacaagtcacagtcagagagagagtccagggcatgctcacggagagctctgaaggccaaaagaaggagcctgaagcacattctaagcatgataggaagcggctgcagggtttgaagccagagtgacatggtgagatttgcttgtaaagaccactctggc

SEQ ID NO: 94525 - DNA, 411 bp, Homo sapiens
aaaaaaaaaaaaaaaaaaaaaaaagtcttaacattgggggtaataaactatatgagattaataataatttctgaagttatcgacattaaacagtgccagaatgagtggcacttaaaacacagcaacagaaactcagatttgaacaattatgagtaggaagatattctaaataggaaagccatcatttactctcaggtacaatttgagggaacaaataaggaaaccaggctagtgacagggaagtgaaacatgaatgtataaagccacattgtggaaggcaattaatgtttaaatttgttatttattcttgtgcatctcttcacatgaaccatattgacagccattgttgacctttgggtgtatttacttgtagtcttttatttaatacttattgtatatatgtactcacta

SEQ ID NO: 94526 - DNA, 494 bp, Homo sapiens
gtatcttagtattttcttttctctatgctataaaaaataatacttcgaaaaaatttcaaattccaattgctcattcctagtacatagaaatgcaattaacttttgagtgctgacttcatacttgcaatcttgctaaatgtatttgttagttctaggagtatgcgtttttttttttctttaatgttctttaggatattctacaaagacaatcctgtcatctgtgaacagatgcagtctcacatcgccccctcccctctgaatgtagcaacacagactccatcgctacaaaacataaaaaaaatttggctggacatgatggcttgtgcctgtagtcctagctacttcaggaggctaaagtgggaagatcacttaggcccaggagatcaagtcaatagtaagctatgattgtgccactgcactccagtctgaatggcaggccttatctcaaaaaatataaataaaatgaaagagggctttatcagttttcatccaag

SEQ ID NO: 94527 - DNA, 221 bp, Homo sapiens
caccctactcactttacagatgacagcgtgaagtctcagcgaagttaaataattggctccaatgcacccagccacaaagagctcaagtcacagccgcgacctaggtgtgcctgattccaaagggtttttgttttttgtttgtttgttttgttttgttttgtttttgagatggagtctcactctgtcacccagtctggagtgcaatggcacaatctcggctc

SEQ ID NO: 94528 - DNA, 272 bp, Homo sapiens
tggtaggtgggtacaggtgggtgcaggtgggtgatgggtggtaggtaggtgggtgcaggtgagtgggtggcaggtaggtgggtgcagatgggtggttggtaggtgggtgtgggtcgtgatgccttccctcagctccccccactggtccctctcattgtcagtggggcttgtcacccacatcctcaaattctgtgatccacaggggcagaagcaagtcaggagggcacctgctggccctgagctcttctcaccctccctgcacagcccttgag

SEQ ID NO: 94529 - DNA, 303 bp, Homo sapiens
ccccacccaggattcactgaacatttatggcctgagtcccttccacatgctgggttaacaatcacaaaaccacatgatactatagttcaggagttaccgagctctggaaatgaaagggcacaaatcctgagagggaatcacaatgtcctggagaagaaaaaggacaataaataatgaggagaaattcagtttgttggggatgggctctgaactggcaatcatgcttagcggcgaggcattgaattctctctgctggtgcctcccgcatctgcggctcccggaggtgtggtctgtgtgggtgat

SEQ ID NO: 94530 - DNA, 541 bp, Homo sapiens
ttcctctctcacggaatagaagggtgacagttatgaacaatgttctaataaacatccacttggtcttacatcttctatccacatgtcagtgccattccctgtgtgaggaaagactgaagtcaggaaacaagatggaagctccatagcaatgggcatgtctggagatgacgttgaccttgcctctaggaggggagcagtgaacatggcaacattggtgccaatggggagtgaaaaggagatggaagaagaggtcaatcctccatgtgggcagtattgggcatagcagaatatgcagagaatgtagggtcacactggtgaacaaaggcccccgagttgggagaaatctaatcttcgctcaatactctcgtggttcaagatcctcacaagtcattggatgtttctgaagctccattgatctctttatttgggtatatttatctgtgtatctagtcagtgatactgttgaactgtaatgatttgatatccatttggcatgtttttgagcatcagttatcatggaccagtagaggggatgcaacac

SEQ ID NO: 94531 - DNA, 442 bp, Homo sapiens
gcacccagctgctgaaaatgtcttaaaaggagaagacacctattttacttaaatgtgacacaacatttaatcactggaacttaatggtatgcattagaactgtttcttgaggaacacagtctctgacttaatgaattttctagcaagtctcaacctttctcttttgggtgtaccagaattctctcgtcagttttccattagttggatttacctgttgggtttaattctttcattttgtatataggtacctctgcttggtttcattttgctttcctaagcaagggagtagaaacagatgttaagactgaaattctactatatttaggaagaataaataaatatatcttccactatggtataatggaaagatatactgacctgggcatactcatgggcaacgtacctgttgtaaatcccctcctttgcaaattgtacctacttt

SEQ ID NO: 94532 - DNA, 923 bp, Homo sapiens
agcggttaaaaattactatctccagatattgtgagaattaaataaaaacagcatactcaaagaaaaaaaaagagcaagggccaactttctcacccatattactctctgttttataaactcagaggatgccttgagaagatctaaaaggagagaaaacactagctattcctacaggataactagggagacagatacagttttataaataggctatgatatccaagagtatatgtatgcagaagtatatttgacagtggatgtgtacaagttctttaagtaagccctaggaagtccagtaagtgaatgagtacagtgttgtagaacaagctatagggaagcattgtttcacctacattagtaatcttatcaaaatatccatcaattttaatttcactccagttagagaaactaaaagctctggtcttagctgcatctcttgtatttcatctgtagtgagaagaaagaacactcttcattggcaattatcaaattatttgtttgaatagcatttttccacattcagctccccatcttcttgcataaggatgatattccctaagaatagaatttagtgataaatgcttctaaggaagccacagagcccctggagctcattaatcctgcaaccttctgtgagcttgctggcctgaaatggttggagttcactttaaactggactgaatttcaaagcaaagggctctgaggtggcaaacagctcattaattcagagtataatacagtgacagaagaattgttttaaatgcacaatctaaaactatttaaattcacattataattataagcaaaaagtatgcactcaaaattgaaatctggatatgtaatctattgataaaactaatgaacaatttttttttaaaaggggggactgtcatcttaccaagaaatgctaatcattctacttt

SEQ ID NO: 94533 - DNA, 1814 bp, Homo sapiens
taataacatctcatcaatttaaaggacaagttcactgatcgtactgtcatactccagagatacatgtgccaagaagcaaagagatgcactcttgtattccagaaagaagatgatttgtaagtgttcagtatttgtgtggcagcccttttaggtgtaatgaagtgtaacagaaaagtaagtgaactacttcacatagctcttaatgtttgtctttcagaggacatacgagtcaggcagcaaaagttggagccattgtatgattgtgtgtcaaaatgagagtcacacacttcaagaactgtaggaactaattttagaaaaagactcttcagaacagatgacacatgaaatgtgagtttatgtaaacatgtaaatttgagtagcattagtttgttttctgtttaggaactgtatcagggtgacaaagatgaaagaatgctgccagaaaagtatattgttaaattttcaggcctccattggtgaagtttcaagtaacctttcacttaagttacttgtgtcagaggatggatgatggggtcatttaaattgttggacaaagccatgaaaggacttttaaaattttgtcataaaaatagccaatgatgtttttaattttacatctaaaactaatttgcattatcctgtgttagtgactgaatctcaactcagtcctcattttttagttcaacttttgacaaccttatattcattgacaccatggacagcacagtaaaaaaatacacaaatttcttttgcagttattgatttggaatgatcactttaaaagagccatcaaatacgcctacatattgagccactctttatcattaaggtgaaaagttcattcaattaaggtatttgagtgctactatgcgccagcctttctttgtgataatgttaattttttttttcctcccctccatgaagggaagaaaaaaaaattaattcggccatgaattttaatattctggccagcaccttatccatttgtagccacgccaacaaatttattctgtgatataccaaacttacaaagtcactctgcgatttcagtaaggcccattcccaacatgagtgctgctgtccacggtactgaaccatcaatgctaaatggtatttagttgtggatcttcatcctgtcatgcagctaaatattccaggaatactgaaccaagtgaggagaaagatagcagtgggttgctgcaaaggaggtgaggggaggggagagatagcaagtgagaaaaagagagactagtggtgatgtttttaagtaattgaagtaaaaaagagagagaaagagagagagaagaggttctactcagtccaccaaagctttttaatttccttacataattaacatgatgaatttttaaataattgttatatttagttttgttcttccaccttttggctatttctactacatatttacttatcataaaaaatacttcctagaccttcctcttatagctattgcctatctctgcctttgcagctgttctcctttaaagagtagtctccattagttttcttgacttcttcatctccctgcataaagatgaagggtatttagctctgaaaatcctttactgttgaatatttagattgttttcaatttttacataatgaacaatgcatcatgggattattggctgcaaataaattggaaacataaaaggtgttttaagtttaaatttttttaaaaaaacaggtaaaaataaaatatttgccaaagactaagggttgcaaagctacctcatgatacactcttataccaatactaaaataaacttcacaacaacaaaattagtgattgg

SEQ ID NO: 94534 - DNA, 283 bp, Homo sapiens
cagactttatgtgattcttggcagtttaggaagtcacttctccctccaatgcaccatctgtggatagatggtgcttcccactggcttgcttctccctggctgtctgctgatgtctccctttagtcacgagggaggaatggatgccatgattgttggtaaatgcttcactaatgaagctaccccatagctggaagccagggccctcagacagaaggttccacagaaaatccaacagtaggagtaagtggtgtacaccatttgaataaaggcacatatcttaaag

SEQ ID NO: 94535 - DNA, 821 bp, Homo sapiens
ggccctgagtgggactcggcccagaagccgagggacgctctaggctgccgggcgctgattgtcagcgcggaggctgggctgaggcgccgcggtaccatgaggcgccggtacttaagagattatggcatcggaaactcacaatgttaaaaaacggaacttttgtaataagattgaggatcatttcattgatcttcctagaaaaaaagatctctaatttcactgataagaacatgaaggaggttaagaagtctccaaaacagttggctgcttacataaatagaacagttggacaaactgtgaaaagcccagataaacttcgtaaagtgatctatcgcagaaagaaagttcatcatccctttccaaatctttgttacagaaaaaaacagccccctggaaggtgggggctgtgacatggcaaataaagaaaatgaactggcttgtgcaggccaccagactgaaaaattacaccatgacagtcgaacatatttggttaactccagtgattctggttcttcacagacagaaagcccatcatcaaaatatagtgggtttttttctgaggtttctcaggaccatgaaacaatggtccaagttttgttcagcaggaatatgagattgaatgtagctttaagtttctggagaaggagaagtataagtgaacttgtagcttatttgttgaggatagaagatcttggcgttgtggtagattgccttcctgtgctcaccaattgtttacaggaagaaaaacaatatatctcacttggctgctgtgtagacttgttgcttctagtaaagtcactacttaaaagcaaatttgaaga

SEQ ID NO: 94536 - DNA, 481 bp, Homo sapiens
catgattgacatcatctagtcaaattatatattatactgagctttattttctgtataaaccatattttacagatattattttaaaagaaattgaaatcttctgggcttaggtttcagagttatatataactcataagtgagctgtgtgagctgagttccttaaacctaggtctcatttcaaaggctagctttgggctggttgcagtggctcacgcctgtaatcccagcactttgggaggctgaggcaggtggatcacaaggtcaggagatcaagactatcctggctaacacggtgaaaccctgtctctactaaaaatacaaaaaattagccaggcatggtggcgcacacctgtagtcccagctactcgggaggctgagacaggagaattgcttgaacctgggaggtggaggttgcggtgagccgagatggcgccactgcactccagcctgggcgacagagcgagactccactccatctcaa

SEQ ID NO: 94537 - DNA, 385 bp, Homo sapiens
acagagtcagtctacccaagaaccaagaggaagaaggcccaggcagatgcacagggacagtgggaagtgcagcctgcacaggacacaactttcccggtgagggagccatgcctaagactaacttgcagctcaggaagttgcttatttaaaaagaaaagaacatttccgagcaaacatctcactgcaaaccaagtttgctgtagttgctgtttaatggtcagcacattcacctctttcatgaaaaccctggttcaaaacagggcggcgagccaggcgtggtagctcacacttgtaatcccagcactttgggaggccaaggcaggtggatcacctgaggtcaggagttcgacaccagcctggccaacatggtgaaaccccgcctcta

SEQ ID NO: 94538 - DNA, 519 bp, Homo sapiens
gtaaaaagagggcataactgggatgtcactaactgctactgttaaaatgagcatgtattaaaatccttatggatgtccccttcatattcaacattaattagaaacctgccctatctcagtgttcttctataatcaatccccctttccagtattactaaggtaactgtaagccctgcatgcctgaactgtcctggtttacacctgtttttccagcataattgttaattgcaaccctgttcactgtctgatgaatcttggtttggacgataaattatatggtcaacctaagtattagagtccctgggataaacaatcaaggtgtcattcttatttattggtattggtttgtcacaagctgtgaaaacagtttttcttttgcttgtttcttcctgagttgtcacgaagaccttcacataaaatcactctctcccattaaagtaattattgaagcccccttcagtaatgaccagttgttttagttttcctcctcagattccaaagaccaaatgtagagattat

SEQ ID NO: 94539 - DNA, 734 bp, Homo sapiens
tatttgtttgtctcctcagcccagtggcactagtgctttttgtttgaatctatcttgtctaatcatctatgttaaaaattgcaaatttccctcaggtaaaattccaagagtctatcaaaactggccagagaagttaacaaagtaccaggtagaatttccaaaaaacaaaaacatagtaattgaaaattaaaactcaggaactggactaaactaagtattaaaaacacatgaaaaagtaagtgaaagatagatctggaaacatttcctgagtgcagcattgaaagtcgaagggatgagaataatgaaaaggatgtaaaatacatagaagaaagactgggaatttcaacacgtgtctaatcagagttctagtaggaaaaaaaaatgccggagaggcagtatttgaagaaataaccactaaaaatcgctataattgattaaaaggtaccgtgaccaagtgggatttatacaaactatgcaaggctgattcagtatttgaaaatcaattactgttatatccatcaaatcaacaggctaaaaaagaaaaattatatagtcctatcaatagatgcagaaaaaacatctgacaaaatccaatacctattcatgataaaaactctcagcaaactaggatagaagggaacttctcaacttgataaagaacatctacaaataccatagctgacatcatacttaatgatggtaaagtagatgcttttcactaaaattaggaatga

SEQ ID NO: 94540 - DNA, 451 bp, Homo sapiens
ggcaaagaaagtagattgatacctctcgtggactgattgtggatttcagcatttgggtagaacagattaatgataagatatggcagaagtgaagaaggtgaatgagctaatggcggataaagggacaaaactgccattttggctttttcagcttgcatttcagcacaaattgagagacttgaaagtcatatagttgcagtgctgaggcaggaatgctcagaagcaatccactttaaatcagtaaagacctaaggactaggcattcagaaaacttgtgacttacctacgaaactttgctaggtaaggatggagtgaagactagaatttaaatttccaccactctgccctagcatctttctgcctctcataaggtttgcctgggaaggtggatagcagcagggtgtagcggttgatattttcattttaacagacacacagaagtgggtcaggt

SEQ ID NO: 94541 - DNA, 436 bp, Homo sapiens
ctgtcttgcaaacacgtgttgactgggttgtttcagttatctgacaattggccatggtatattggaaatagtactggactgaaaaccaagaaacctgggtctgaagtctttgtgacctcatccattccctctgcctttggcctcagttttctgatgtgtaagccaaagatgttctaggctttctcaaccaaggttcttcttctaaattttaagacatggaaaatgatttgtgtaactatttcctcatttctcccaaagatggtatataataagtactattttagtttcataggagacaagttaattcattatatacaatggatgccttggagaaacactgtccaataggatttgctgcaataacggaaatattctatatcagtactaacattatagccattagccaactggggcttgaaatgtgactggtgtgact

SEQ ID NO: 94542 - DNA, 718 bp, Homo sapiens
agcggagagtcccgcgggcggcgcggaagcggcggcggcgcggccggggcagccatgtcgccattgtctgcggcgcgggcggccctgcgggtctacgcggtaggcgccgcggtgatcctggcgcagctgctgcggcgctgccgcgggggcttcctggagccagttttccccccacgacctgacggtgtcgctatagtgacgggagggacagatggcattggctattctacagcgaagcatctggcgagacttggcatgcatgttatcatagagacgtgagtcttgctgtgttgcccgggctggctttgcctctggaactcaagcgatcctcccacctcagcctctcgaggagctgggactacaggcgtgcaccatcatttcctcctaaaatttggaatttttatactgtgacttggcttccatgacttccatccggcagtttgtgcagaagttcaagatgaagaagattcctctccatgtcctgatcaacaatgctggggtgatgatggtccctcagaggaaaaccagagatggattcgaagaacatttcggcctgaactacctagggcacttcatgctgaccaaccttctcttggatacgctgaaagagtctgggtcccctggccacagtgcgagggtggtcaccgtctcctctggcacccattacgtcgctgagctgaacatggatgaccttcagagcagtgcctgctactcaccc

SEQ ID NO: 94543 - DNA, 266 bp, Homo sapiens
gcaaattcaaggccagtgaccaggttcacaaaatgcaattgttctcaatgacacttaacaaagagccagggagagaatcgattgtcattaaaagctggccaagaacatcgatcgtctccccagtgatgatctcagaattttgacttagccaggccaagagcgttggtgcagagacgttttgatgtgatttctcatgtggaaatgggctccagcatggcgagtcagcacaaaacaagcatgaagctaaggacggagcagccagagct

SEQ ID NO: 94544 - DNA, 839 bp, Homo sapiens
agaacatctgtcacattgttagtctttttcctcctcaagatactttcgtatgttgtccaaccatgatgcttccagacccatgtaaatgagaggattccaagaatgctttcctagcttaagacctctctgggtagccacctctgtcatactttctgagacctgccgccctcatttctgcctgaatcctgctttcctcaccctgtggtcctgtcctggtcagtaaggattgtgtactcagaagggctttgtctttctggaaggaaggtttgctgggtttttgcacagtcccaaggggcttaggcagacctgggttttctggccttacagtcttgcacttaaccctgtgaatctcctcccagtctccttggttaggttcagacccccttgcttagtttttcacccccaggggagaagcttcccttctgcggcgagtactccttattgtctcttatggcctgctcccgtctgacttagctaaatatatgttaccagtctagagtaaattatttctatttagaaaatatataattttagttttagctgttacaacctacaataaattgtttctttaaaacttatttgtgttatatgtcagatattaatcacttttattcatggtgtacgaaatgagagctttatacccataaaactgtgggaagggaattcctttcaggtctttttgttcttggcgtatatcagcatctgttatcttggttttgaccttcagcttgcatccaagaagccagggttttaaggtgaaatgaagattttttcctgatatcaagagccaggtgtattatttataaacattctgtgtggatttttcaattgctaataat

SEQ ID NO: 94545 - DNA, 425 bp, Homo sapiens
gtgactcgggaaagaaaacttgtttttttcttcagttgactgggctcagccatcccaggtgtgagtgactcaggccttgagagcaggtaatggatccatagggagccctgtccccacccagggagactgtcccagcccctcccgatggctccttccagaaaggggcgcagtgggctgggttgcagggggtagttgtgtccaagagtcctgcaggatggagtgggaaggggcaggaggggtgtcctgcactgccagctgttcatctaccccagtgccatggaaacagagctcctgcttttccccaggaaggcgttgatacatttataggctagcattcaacatcagcgttgtgctctggcagtctcagcagtaagacataaacctaccaaggtctgggggaagcactgggtgttaccatcctggct

SEQ ID NO: 94546 - DNA, 404 bp, Homo sapiens
gcagaaactacttatgtgcagaagatacccatcccaggtgtgagtgactcaggccttgagagcaggtaatggatccatagggagccctgtccccacccagggagactgtcccagcccctcccgatggctccttccagaaaggggcgcagtgggctgggttgcagggggtagttgtgtccaagagtcctgcaggatggagtgggaaggggcaggaggggtgtcctgcactgccagctgttcatctaccccagtgccatggaaacagagctcctgcttttccccaggaaggcgttgatacatttataggctagcattcaacatcagcgttgtgctctggcagtctcagcagtaagacataaacctaccaaggtctgggggaagcactgggtgttaccatcctggct

SEQ ID NO: 94547 - DNA, 2112 bp, Homo sapiens
gaggagggggagggaaggagcccctgggagcctggggtagaagtgtaggaggtgggaggattccggcccgcatggagctgtcctggcctcagaaggttatccgtctctcctgccaaccatggagacatatttagacaggaccaggtggggactgaggggtgccaatttcagggggcagctccggttccctccccgccccctgctcctattcctccacctgaccctttttcccttggctctgtcggcagtttctccaggacccagcagtgccctctgtccactgctctgggccattccccaatcccccctcccacttgagcccctaactcagaatctgggacccaggggcccctccctaccccagctaacctcttctggaccaggagagccaacccagatcccactacctccatgagtgctacagacaggatggggcccagagctgtgccgggtctgcggctggcactgctgttgctgctggtgctagggacacccaagtcaggggtacaggggcaggaagggctggacttccctgagtacgatggtgtggaccgtgtgatcaatgtcaatgcaaagaactacaagaatgtgttcaagaagtatgaggtgctggcactcctctaccatgaaccccccgaggatgacaaggcctcacaaagacaatttgagatggaggagctgatcctggagttagcagcccaagtcctagaagacaagggtgttggcttcgggctggtagactctgagaaggatgcagctgtggccaagaaactaggcctaactgaagtggacagcatgtatgtattcaagggagatgaagtcattgagtacgatggcgagttttctgctgacaccatcgtggagtttctgcttgatgtcctagaggaccctgtggaattgattgaaggtgaacgagagctgcaggcgtttgagaatattgaggatgagatcaaactcattggctacttcaagagcaaagactcagagcattacaaagccttcgaggatgcagctgaggagtttcatccctacatccccttcttcgccaccttcgacagcaaggtggcaaagaagctgaccctgaagctgaatgagattgatttctacgaggccttcatggaagagcctgtgaccatcccagacaagcccaatagcgaagaggagattgtcaacttcgtggaggagcacaggagatcaaccctgaggaaactgaagccggagagtatgtatgagacctgggaggatgatatggatggaatccacattgtggccttcgcagaggaagctgatcctgatggtttcgagttcttagagactctcaaggctgtggcccaagataacactgaaaacccagatcttagcatcatctggattgaccctgatgacttccccctgctggtcccatactgggagaagacgtttgacatcgacttgtcagccccacaaataggagtcgtcaatgttactgatgcggatagcgtatggatggaaatggacgatgaggaggacctgccttctgctgaggagctggaggactggctggaggatgtcctggagggcgagatcaacacagaggacgatgacgatgatgatgatgactagttgctatggcaaccatctttcagccccactggtcttttcatgctctctcctgccttcccttgtccttccctgagttcctccagggagactaggttattctctgccatagagctaactggggtctatatgctgggtgctgagacactgatccccctcatttgatgagcaaatgagctacttttccctagacaccaggccagctctctcttatctgacttctgtttcttatcccataacttacttgtatctattatgtgtctcttccatcactctccatactctttcttgtgattctcctctagccatatatatgggccccatctctgttctgttccctccatctatgcacagctttcccccactctctctaatcctgtatctttctgactgtcctgtccttggccagaaggaagggagaatactgtgtttgggactgtatctcagcaatcacttgttaatgtatttgggtcaaatgagaggcctcaataaagacatctggggcagcatgaa

SEQ ID NO: 94548 - DNA, 601 bp, Homo sapiens
gaggagggggagggaaggagcccctgggagcctggggtagaagtgtaggaggtgggaggattccggcccgcatggagctgtcctggcctcagaaggttatccgtctctcctgccaaccatggagacatatttagacaggaccaggtggggactgaggggtgccaatttcagggggcagctccggttccctccccgccccctgctcctattcctccacctgaccctttttcccttggctctgtcggcagtttctccaggacccagcagtgccctctgtccactgctctgggccattccccaatcccccctcccacttgagcccctaactcagaatctgggacccaggggcccctccctaccccagctaacctcttctggaccaggagagccaacccagatcccactaccccatctctgttctgttccctccatctatgcacagctttcccccactctctctaatcctgtatctttctgactgtcctgtccttggccagaaggaagggagaatactgtgtttgggactgtatctcagcaatcacttgttaatgtatttgggtcaaatgagaggcctcaataaagacatctggggcagcatgaa

SEQ ID NO: 94549 - DNA, 1826 bp, Homo sapiens
gaggagggggagggaaggagcccctgggagcctggggtagaagtgtaggaggtgggaggattccggcccgcatggagctgtcctggcctcagaaggttatccgtctctcctgccaaccatggagacatatttagacaggaccaggtggggactgaggggtgccaatttcagggggcagctccggttccctccccgccccctgctcctattcctccacctgaccctttttcccttggctctgtcggcagtttctccaggacccagcagtgccctctgtccactgctctgggccattccccaatcccccctcccacttgagcccctaactcagaatctgggacccaggggcccctccctaccccagctaacctcttctggaccaggagagccaacccagatcccactacctccatgagtgctacagacaggatggggcccagagctgtgccgggtctgcggctggcactgctgttgctgctggtgctagggacacccaagtcaggggtacaggggcaggaagggctggacttccctgagtacgatggtgtggaccgtgtgatcaatgtcaatgcaaagaactacaagaatgtgttcaagaagtatgaggtgctggcactcctctaccatgaaccccccgaggatgacaaggcctcacaaagacaatttgagatggaggagctgatcctggagttagcagcccaagtcctagaagacaagggtgttggcttcgggctggtagactctgagaaggatgcagctgtggccaagaaactaggcctaactgaagtggacagcatgtatgtattcaagggagatgaagtcattgagtacgatggcgagttttctgctgacaccatcgtggagtttctgcttgatgtcctagaggaccctgtggaattgattgaaggtgaacgagagctgcaggcgtttgagaatattgaggatgagatcaaactcattggctacttcaagagcaaagactcagagcattacaaagccttcgaggatgcagctgaggagtttcatccctacatccccttcttcgccaccttcgacagcaaggtggcaaagaagctgaccctgaagctgaatgagattgatttctacgaggccttcatggaagagcctgtgaccatcccagacaagcccaatagcgaagaggagattgtcaacttcgtggaggagcacaggagatcaaccctgaggaaactgaagccggagagtatgtatgagacctgggaggatgatatggatggaatccacattgtggccttcgcagaggaagctgatcctgatggtttcgagttcttagagactctcaaggctgtggcccaagataacactgaaaacccagatcttagcatcatctggattgaccctgatgacttccccctgctggtcccatactgggagaagacgtttgacatcgacttgtcagccccacaaataggagtcgtcaatgttactgatgcggatagcgtatggatggaaatggacgatgaggaggacctgccttctgctgaggagctggaggactggctggaggatgtcctctccataatgtgtgcccaacagcaacgagagatactacggctacactggggctttccggtgcctggctgagaatgctggagacgttgcatttgtgaaagatgtcactgtcttgcagaacactgatggaaataacaatgaggcatgggctaaggatttgaagctggcagactttgcgctgctgtgcctcgatggcaaacggaagcctgtgactgaggctagtagctgccatcttgccatgaccccgcatgcatcccgtggtgtctcggatctaa

SEQ ID NO: 94550 - DNA, 2150 bp, Homo sapiens
gaggagggggagggaaggagcccctgggagcctggggtagaagtgtaggaggtgggaggattccggcccgcatggagctgtcctggcctcagaaggttatccgtctctcctgccaaccatggagacatatttagacaggaccaggtggggactgaggggtgccaatttcagggggcagctccggttccctccccgccccctgctcctattcctccacctgaccctttttcccttggctctgtcggcagtttctccaggacccagcagtgccctctgtccactgctctgggccattccccaatcccccctcccacttgagcccctaactcagaatctgggacccaggggcccctccctaccccagctaacctcttctggaccaggagagccaacccagatcccactacctccatgagtgctacagacaggatggggcccagagctgtgccgggtctgcggctggcactgctgttgctgctggtgctagggacacccaagtcaggggtacaggggcaggaagggctggacttccctgagtacgatggtgtggaccgtgtgatcaatgtcaatgcaaagaactacaagaatgtgttcaagaagtatgaggtgctggcactcctctaccatgaaccccccgaggatgacaaggcctcacaaagacaatttgagatggaggagctgatcctggagttagcagcccaagtcctagaagacaagggtgttggcttcgggctggtagactctgagaaggatgcagctgtggccaagaaactaggcctaactgaagtggacagcatgtatgtattcaagggagatgaagtcattgagtacgatggcgagttttctgctgacaccatcgtggagtttctgcttgatgtcctagaggaccctgtggaattgattgaaggtgaacgagagctgcaggcgtttgagaatattgaggatgagatcaaactcattggctacttcaagagcaaagactcagagcattacaaagccttcgaggatgcagctgaggagtttcatccctacatccccttcttcgccaccttcgacagcaaggtggcaaagaagctgaccctgaagctgaatgagattgatttctacgaggccttcatggaagagcctgtgaccatcccagacaagcccaatagcgaagaggagattgtcaacttcgtggaggagcacaggagatcaaccctgaggaaactgaagccggagagtatgtatgagacctgggaggatgatatggatggaatccacattgtggccttcgcagaggaagctgatcctgatggtttcgagttcttagagactctcaaggctgtggcccaagataacactgaaaacccagatcttagcatcatctggattgaccctgatgacttccccctgctggtcccatactgggagaagacgtttgacatcgacttgtcagccccacaaataggagtcgtcaatgttactgatgcggatagcgtatggatggaaatggacgatgaggaggacctgccttctgctgaggagctggaggactggctggaggatgtcctggagggcgagatcaacacagaggacgatgacgatgatgatgatgactagttgctatggcaaccatctttcagccccactggtcttttcatgctctctcctgccttcccttgtccttccctgagttcctccagggagactaggttattctctgccatagagctaactggggtctatatgctgggtgctgagacactgatccccctcatttgatgagcaaatgagctacttttccctagacaccaggccagctctctcttatctgacttctgtttcttatcccataacttacttgtatctattatgtgtctcttccatcactctccatactctttcttgtgattctcctctagccatatatatgggccccatctctgttctgttccctccatctatgcacagctttcccccactctctctaatcctgtatctttctgactgtcctgtccttggccagaaggaagggagaatactgtgtttgggactgtatctcagcaatcacttgttaatgtatttgggtcaaatgagaggcctcaataaagacatctggggcagcatgaaaaaaaaaagtcgacgcggccgcgaatttagtagtagta

SEQ ID NO: 94551 - DNA, 1219 bp, Homo sapiens
ggccttccaaagtgctgggattacagatgtgaccactgcaccctgcccagatttaactttttaaaagcctttatttgaaataaagtcactgtggttagaggcctctgacggttttgcattttaagtctgaggactatgttgagtgactttttgcataagttgtaaaatgtgcattcatgttgatttcatttcctatggtttccaattaattgtcccttctgcatttttagaaactcacgggctaatgggctctgtgtcagtttgcatttctagaatgatggcgccgaacactccatgctgtcttttagttggtgcagcaggaggggtagcagagggcgctcagcttccgacagtgccttgagctctagggcgctgcagtgcccccggccgccagcagagcacgcgcgagcccggcttttctgagccttgaggcggccgcatcccgcacgcttcctccgcgcctgcaccctgcaagggcgggagccgcgttctcctcagcacataccaggaaacgcccctcgctttgggacaccttgagccggcggcgtccatggttgagtaaaatccttcctgttttcagccctgactgctgaggggtagagacccttcatgtggaaaattagaaaccaaaatcccctgtgaatccagcgcactcgaggttcattctccacacccaaggcgaggcggccacagggccaagctgcggtcttggaacagaaatgtagtgtcaggaaagcaactagaacacccgccacactgacaataacctctgtagtgctaataacactgcatctgtgatgctagtgttagcacccgtcgtatgcagagagcacacccgtcggggtagctgccttccacatccaaccccgggaacgtggatgtgtccctcagtgcgcacataacgcttggaacgcggagatgacatcgtcacctaacgctacagccgtcacactcatataacccccggaacacgcatgtgtccctcagagcacacacgtaacccctggaacgcccgtgacacagtcagactcacgccacacccgtcacactcatataacccccggaacacgcatgtatctctcagagcgtacataccgcccgggatgcagacatggcctttgcagcccacacgagagggtctgcagctctgaggatggaaccttccggctctcgctggggcgctgagttgacagcctctgctgggctgggtttgggctgc

SEQ ID NO: 94552 - DNA, 109 bp, Homo sapiens
taaatattagggtataatttctttgtatactgtaataaagacaaagtattagaaagtgcaaggtattctacatatcttcaaggtgaaaattgaactatatcattaattt

SEQ ID NO: 94553 - DNA, 276 bp, Homo sapiens
actgtcatatccttttagcaaaatgagattgcctaggttcttgttgcaaaataccacataatgaaatccttcctgttgcatgattaactgggtgagaatatcatctttccttttggtccgtagaaatgtattattcactactccattcttgaggtttgttttttaatttttttggagacagtctcactctgttgcccagtctggagtgcagtggtgcggtctcagacgtctcactgcaacctctgtctcccaggctcaagtgattctcgtgcctca

SEQ ID NO: 94554 - DNA, 297 bp, Homo sapiens
aaacaaaaaggaatacacactgaccagaccggaccaacctccttctctgcggaattatccaggtgcccagaggcccagatcacagacctgttcaggaaaggcacctcttcttgtgcaatcatttgataatttttccaaatgaataaatttattttttaaagatttcccaaagtagtcaatgtcttcaagctctttgccagtggtgactggtgaatgagcagtgcccatgtttataggtgaactctcaggcacacggaggcttgtgttcacaaggagaagcggctgggtccggagcac

SEQ ID NO: 94555 - DNA, 248 bp, Homo sapiens
gcactcatcacaatgaggtcacgtacgcaagcagtaaacaagaaggattctgactttatgaccatcgacttgaacttttatgtataagaaaaataaactttccagctcatttaagccagtggtttttttcggggagtcttctctgtccttgcagctggacctaatcctaactgatacattgatccaactaaaaaggggaaatgcaataaagaaaggaataggagtaagaggcaaaggtggaaattcac

SEQ ID NO: 94556 - DNA, 305 bp, Homo sapiens
gtctttaacattttttagaattccatttgatatatttgtagtgttttttaaatatatttctttgtatttttgtattaatttttttagtggttgctttaagtagtataatgtacatatgtaacataattacagttaatggtatgaaaaatttagcactttgatgtatagaaaccttacttggtcccttcaccttgcctgttaatataattgtctaaagtaattcctcttcaaaattgagcaccatgttggaaaatgtaatttttgcttccactgtcaaatatattttgcaaaaaacacaggaagta

SEQ ID NO: 94557 - DNA, 268 bp, Homo sapiens
ctgagcatgtcctccccacggggtctgagcaaatcctccccacggggtctgagcaaatcctccccatggggtctgagcaaatccttcctatgccgtctgagcaagtcctccccatgggttctgagcatgtcctccccacagggtctgagcaagtcctccccacggggtctgagcaagtcctccccacggggtctgagcatgtcctccccacggggtctgagcaagtcctccccacggggtctgatcatgtcctccccacggggtctga

SEQ ID NO: 94558 - DNA, 453 bp, Homo sapiens
tgctgagaggaactgtcgtcctgctagggaagggagtgtggcacaagggcaggtgggtgtgggcagacccccccacgagtataaagggcagaggatgagaagcccccaagcagcgggagcaagagcagcagagcaactctgcccctggaagggtctggagccttccctcatcactcttcctcaagtcggtgctggacacccaccatgagccaggcagtgtgaggtgctggggtaaaccagagacaagacagatagggtccctgccccatggagctcccagccttgcaagagagctggaccacagacaagtacacaaagaaatacagaaactacagggctatgaaggagaagcacggcagtgaggagtgggaggaacagagaaggcttctctgaagaatgagcagaagtaaccagagaagacagagccctccctgcaatgggacagcctgaggc

SEQ ID NO: 94559 - DNA, 409 bp, Homo sapiens
gggggtgttgttgtcagctccgccatgtcgtggacctgcccccttttcaggacacctcacgtcaccttccataacagaacaggtaacgtgacatatgaggtgcactgttgacaagtgacactggtgacaagtgaggagcactgttatcaatctggaaaggaaatataagcatagctttactcatttatttatttatttttttaatttatttttgagacagagtcttgctctgtcacccaggctggtctcgaactgctgatctcaggtgatccacccgccttggcctccccaagtgctaggattacaggtgtgagccactgtgcccagccagtatcatccaatttgacttctactttattctgtgaccttttcctacagagctagctatgcagactggccatgtcttcac

SEQ ID NO: 94560 - DNA, 656 bp, Homo sapiens
gctttcaagctaaaaaatttaaaaacccttatttttattgatctgaaagttgaaaaaccatgagcattttaaagttacgttagaaagtgagttttataagcttcttcttaaactcaatttataatctacaattattgcataaagtgattttaaatctttaaaaatcttgaattggctggcactttgggaggccaaggtgatccacctgcctcagcctcccaaagtgctgggattacaggcaggagccatcgcgcccagcctgtattttttttaagacctactatatgtctggaactgttataggtttggagaaccagctaatagtaaacaaactaatataaaaatgatgtaatcaagtaatttagaagattttatatattattgttgccaaaaaggtgatcaagtagattttctttgtcaaagaacataacagttttttcatcagtgcatgataattgagtacttttggaatcacaacactttaaacatttagacaggatcctatttacattttagaaagagattaagagatattctatagatgtgtcagtatgatggaaagaatgcattgtttttagaaagtcaatgagcactttaaaaactttcaactctgttttaaaccttaagtataaaagaaactagctacaaatacccat

SEQ ID NO: 94561 - DNA, 444 bp, Homo sapiens
tttttaaatagacaccaagtctcaccatgttgcccaggctggtctctaactcctgagctcaagtgatcctcccacctcagcgtcctaaagtgctaggattacaggcatgagccaccaggcccagcctgaaccaccatttttaagccccactcagctgaagacaaatacatcaaagcaaacttgtccttagaaggggagaaggggctgctggctcatgcttgtaatcccagcactttgggaggccaaggtgggtgaaatacttgagcccaggcaacatggcgaaaccttgtctctataaaaaatacaaaaattagctggctatggtggcataagcctgtggtcccagctactcaagaggatgaagtgagaggattgcttgagcctggaggttgaggctgcagtgagccgtgattgtgccactgcactccagcctaggcaacagag

SEQ ID NO: 94562 - DNA, 269 bp, Homo sapiens
ctagttttttttttctttccctctcagtttcattcttttcacgaaacacttatttcaagaacgttgtctgctctgtgcctggtgctgggaccgtgaaggtcccgtgccgggactaggcagggagcctggcggctggcgggggtgggcacccgtgtttgcagaggtggggtggggacagcggggaccagcactgggtggagttccacagctaaatcagccctgggattggaaacaagcgaagactattctcactgtgcttttccttacat

SEQ ID NO: 94563 - DNA, 2069 bp, Homo sapiens
tagtcacatatttacataagatatcatagtcatggtagactaatgagaggagaagcattttggttatgtcatttcgggataattttatcagttgtgagagtttaacaataaagaacataaaacttgctgtttcataaaaatatgaaattttcctggagaaattttgacttaataaaggaacaaagaactcagtttgtagtgaataaaattttacattcacttccccactttctcatagaagatctacagttggggataaccgataagaggcaattggtttctggcttaagagcctttctcattaggaattttcggtaaattaaagtctgaaattagaaaaacattagacattaatcaacagaccaacaccagtcacgtaaataaatggcattcgtataatttggcagctgaaattcttaaataatctggcaggtacaaggagagaaagaggaaaaatgaaccgttcatcattctcactgcggtctcaccgtttctctccccacctcctttttaaaaattccttttttgcctctgtttccaaagaaatgccagctcaaaaccaaggcagttggaatttaacagctctaggaagctctagtgagaataaaagccaaataatatgaaccagccaaaattccttttgcaacatttttccccaaaagaaaaatacagaagatatttcttttcaagtctctaattctacctttaaaaaatatgtgtactaatgaacagtattcattttaaatctagaacctgggaatatattactataggcaagacacctttaggtaaagagctcataattttccattgaatacagtaaaattataaagaatgtaacaaaggctttggtaatttggtagaggggctttttgatgaaaaaaagacagatgatttagaaagcgaggaacacatcaagcctcagggaaagaaaatgtttgattggtattaattaaaacactgctaatatattctaataaaatcaaatttaacattctaaagtaatcctcttggtatgtcaaaggaaaagaaaagtattatcttatttgcatctctgcaatccaaatgcatttgctcattcagcagaattaatttttatcaccagcctgttttatctcctcacagatttagtcaaagttattctttcaaactagaaaggatcagggtggggaatccatggaaggtattggaagactagtgactgtatttagtaccggctttatattttacgatgttctttctcttcattcgctgtaatggggtgtggagggaaacggtgagaccgcagtgagaatgatgaacggttcatttttcctctttctctccttgtacctgccagattatttaagaatttcagctgccaaattatacgaatgccatttatttacgtgactggtgttggtctgttgattaatgtctaatgtttttctaatttcagactttaatttaccgaaaattcctaatgaaaaaggctcttaagccagaaaccaattgcctcttatcggttatccccaactgtagatcttctatgagaaagtggggaagtgaatgtaaaattttattcactacaaactgagttctttgttcctttattaagtcaaaatttctccaggaaaatttcatatttttatgaaacagcaagttttatgttctttattgttaaactctcacaactgataaaattatcccgaaatgacataaccaaaatgcttctcctctcattagtctaccatgactatgatatcttatgtaaatatgtgactaacaaaaaaaaaatgaatgggccataaatactgaggaccatatttgcgtgtttccaaagtgaggggttctgcgtcctatcaaggagatgtaaactactgactacactaccgatgatgctggctttttgctccattgccttttcaagtcttcaacgtaaaagagcaatcgcagttcggtttcacatgtattgttctataatccaggcaataaatgctaattagtaatgctcaaggatccgaccattcagagtaattatcataatttacttcttccttgttaaagacattccttgctgattagaaaaa

SEQ ID NO: 94564 - DNA, 1786 bp, Homo sapiens
aaaaaaaaaataaggcggggaactggggcgggggtgcgttgcgggaagaaaagagaaagaagtgaactggagctttcggacacagaaggacaggaagcttgagagaaaaggagaggataatgagtgaaatgcaatgcagcacctccttggaacacacagttacaattcagttcacagggcacactggctcaccgtatttttaactagtttctctccccacctcctttttaaaaattccttttttgcctctgtttccaaagaaatgccagctcaaaaccaaggcagttggaatttaacagctctaggaagctctagtgagaataaaagccaaataatatgaaccagccaaaattccttttgcaacatttttccccaaaagaaaaatacagaagatatttcttttcaagtctctaattctacctttaaaaaatatgtgtactaatgaacagtattcattttaaatctagaacctgggaatatattactataggcaagacacctttaggtaaagagctcataattttccattgaatacagtaaaattataaagaatgtaacaaaggctttggtaatttggtagaggggctttttgatgaaaaaaagacagatgatttagaaagcgaggaacacatcaagcctcagggaaagaaaatgtttgattggtattaattaaaacactgctaatatattctaataaaatcaaatttaacattctaaagtaatcctcttggtatgtcaaaggaaaagaaaagtattatcttatttgcatctctgcaatccaaatgcatttgctcattcagcagaattaatttttatcaccagcctgttttatctcctcacagatttagtcaaagttattctttcaaactagaaaggatcagggtggggaatccatggaaggtattggaagactagtgactgtatttagtaccggctttatattttacgatgttctttctcttcattcgctgtaatggggtgtggagggaaacggtgagaccgcagtgagaatgatgaacggttcatttttcctctttctctccttgtacctgccagattatttaagaatttcagctgccaaattatacgaatgccatttatttacgtgactggtgttggtctgttgattaatgtctaatgtttttctaatttcagactttaatttaccgaaaattcctaatgaaaaaggctcttaagccagaaaccaattgcctcttatcggttatccccaactgtagatcttctatgagaaagtggggaagtgaatgtaaaattttattcactacaaactgagttctttgttcctttattaagtcaaaatttctccaggaaaatttcatatttttatgaaacagcaagttttatgttctttattgttaaactctcacaactgataaaattatcccgaaatgacataaccaaaatgcttctcctctcattagtctaccatgactatgatatcttatgtaaatatgtgactaacaaaaaaaaaatgaatgggccataaatactgaggaccatatttgcgtgtttccaaagtgaggggttctgcgtcctatcaaggagatgtaaactactgactacactaccgatgatgctggctttttgctccattgccttttcaagtcttcaacgtaaaagagcaatcgcagttcggtttcacatgtattgttctataatccaggcaataaatgctaattagtaatgctcaaggatccgaccattcagagtaattatcataatttacttcttccttgttaaagacattccttgctgattagaaaaa

SEQ ID NO: 94565 - DNA, 518 bp, Homo sapiens
ggaccaaggaagaatgtttttgagggaaatagaaattaccatcctaaaaatggttccttctgtgtgtctgctgatagaaacccttgacctctttagaaacaaccgcaaaattattcactacgattatctgaatctcataaataaaataatgattacagcgtgagccactgtgcccggcctcaagatgcattaagttttaaaggcccctggttatttctcgtcttctgagatgtcattccagtgtgacatggttaacatcagtgaggatggcattcctgtcccacacagtaaaatgtcacctctcacacacataactctgggcgtaaagtgagtaaaaatatgagacttagaagaatatttcatcatggtatgctgattggggatttcacttactgatactagaaaggttttgcatttcagaacacgatgaaataggtaatatttatctgaaagacgcagacaagtggtggaggaaccagacacccccagtgccgtttgctggcttttatcagacagaa

SEQ ID NO: 94566 - DNA, 684 bp, Homo sapiens
tcattcattcattcattccttacatctgctgagagctcatttaaaaagcaggtgctatagcaggcagtggggaggaacccctggataaaaggaatttctgtccttagggttcagtctaccaggatggacagacacaacaggggagcggcaggtgggggcaaggctgtaggtgggcttggggctggccccgtgaatgtctgaccaccgctgtcaccgccatagcagcagggcagcttctccggaacttgtataaatgaagcgtgtcctccttgccccagacctgcttgatcaaagtctgtatttcagcaagatcccccaagtcttgcacacactagggaagttagggatgaccatgacctgtagctcgtgaggcctcggtacaagaaatcctcctccaggctggcttggggagacaggcagggcccagcaatgccttctccagccacagaaccatttcccactagaacctttcctcctcacctctttcaggcctagcagggtgggctgctggctgtgtgcaagggtgggatgagggctctgctagagccaacaccagccctgccagctcacttgtcccttgtgcaaacactcatcttgggctcaccaggccctacctgacatgaaccaagctgttaacatcccccgccctcctggggcctggcccacagacatggcccagcatgg

SEQ ID NO: 94567 - DNA, 613 bp, Homo sapiens
agtcctgcagtcaccccgacactgctctccctctcacctcacacatccagcccagcagcaaatctagccagctccaccttgacctggaatctgcttcccaccccctcctctgacatcaccctggtccccatccccatcactgcccacctgggttactgcagcagcttcctcccggcctcctgcttccatcccaccccctcagtctagtctcaaccttaaagtcacagtgattgttaagacctaagtcagatattgttccttctctgctcaacagtctcttgtaactcccatctcactcacaggaaaggccaggagagtctgcactatgactcacagggtcctgctccatctgcccgcttccctctctgccttcacctcttacctctcttcccattgcccacgtggctccagccacaccggcctccctgctgttccttgagcattccaggcaccgtcctgcctcaggactttgcacaagctgctggttctgcctgaagggctcttcctccagatacgtatgtgcctcactactttgttatctcctccaaatctttgctcaaatgttatattctttttttttttttttgacatggagtctcaccctgttgcctag

SEQ ID NO: 94568 - DNA, 292 bp, Homo sapiens
tgctgtagatggggctttctcttcttgtatattctctaactggttgattttatttctatatgttaattttatatgctgctacctatctgaattattgtttgagttagttttattattgcttctctagggttttccaggtgtactaacctaccatatggaaataaagatagttttacatcttccttgccaattcttaaggcttcattgattattttctgtctagttgcatgggctggtatatctagcacagtgttgaacagcaggggagagagtggctatccttacgttgttc

SEQ ID NO: 94569 - DNA, 440 bp, Homo sapiens
aagacgtggatggaggatgtttaggttggtccagggctcacttcagccctaggagtcagtggggaagatggaggccatagatggggtgatcaacaggtttgtgatgagggacaggccattgttcacaagtgaggccagtattaaaaggaggtgagaatctccttattgatacagccctgattccaaatcagatggcttccctgtgggcagaagagctatgtaactcatcccctggggttgttcagggcaagtcaattcttggccctgctgttccctgactgtatagtcttaagccagtttctaatcttcttgggcctcaatttcctctttaaactacacactcacacatacacacacatcacaagataagacctgtaatggacttggagcagtgaagctcagacatgtagtaagttatcaataaatggcaactatcatcc

SEQ ID NO: 94570 - DNA, 398 bp, Homo sapiens
ctgacttacagtgtgcaaatatcttttatacaaagatgcagccgctttctccctaaaatggaagtatgtgatcctattactggatccatctcagaatgttgttaatttttcttctgattcagtaacaattcctcctggatattctgtaacataaagactaaattgtaaatttagccacttaacatgaaataaaatgatgcggaaagggaggtagatgtgggcaggatggggggggcagatgaatatatgcaaatatgtagatacaagtaagggaaatatgcttgggtgttataatgtaattatagaaatcaataactaaatgtaatgaaactaaatgtataatgtataataactaagtatataatgtaatttagaaatcaacaactaaaatgaaactg

SEQ ID NO: 94571 - DNA, 402 bp, Homo sapiens
ctcaccgaaagaaggaagcatttaagattgagcaggaaataatggccttgtttcagcaaagagatgacaccagtccaatatgtttattattgttggtttatttcataatttcattttgttacattctcaaggaacagtgtgttcccagtagcatctatcaagtgaaccctggaggctggtcacattcataatcttttgtttttctggctacatagaggtgattttgaactacaagatcatctcagctattcagagtttagattttatttagccttatttgttttgcctagcatttatgtatttgaaaatatcttgatttttaatcttctatcaccttggcccttacctgaagtgaactttgtttgaactcaattgatttcacctctcaataaatatgaaatt

SEQ ID NO: 94572 - DNA, 354 bp, Homo sapiens
caatatcttccttctagctacttgaactagataaatattattgttaactgtagtcatcctagagtgctatagaacactagaccctttctatttagctgtaattttatatcctttaacaaatctctccccatccccaagaacctatgtcaatttaactttccaataacaatgtttgaaattagtacagatgtccccatatcctcatatcattgcatactatcattctattttcttctttgtcttctgatagactaaacagacaccttgacatttaagcgtatttgattactagcaaaatggaccgtcacttcataaacttattgacaataggtacatcttcagctctttttacac

SEQ ID NO: 94573 - DNA, 351 bp, Homo sapiens
aactgcagattttttaaaattctttcgaatagctaatatatttacatggttcaaaaatctaagcaatatgtgcacacaactgagaattctcaccatcaccaacttctataaataaccaatctttcttaccaaaaaatagtaacactgttctgcactgttttaaaacttaatgataaaaatttgccataataaattttcagtttggaagaaggttatacaatagcaacatagcaaataaacttattttttaaaaactgtgcagaaaaaaagactgaaagtttataaaccaaaaactgatgaattacgttttaattttcttctttgttgactatttttttttttttgaaactg

SEQ ID NO: 94574 - DNA, 438 bp, Homo sapiens
atcatgttagtaattaaactctctctcctcttgagactcagtgagagccttccccttacaaaaaaacaaaaaagaccatagcttgctgccaaagcggatctgaccacgcgtcctctcactctaagagattaaaataaagcctcctgcagtccttttctccaaatacacaaagaagtggctgggctgaggctcaagggcacagttccagtccctgttggcaagagaagggcagggctctggttctcccaaagggtgcaaaggacaagaatgtttcctagaaaagaaaccagggaaggagaccaaagtagacctagctgatatggagctgttatgtgaaaactgaaagctgcttcgatactacttcaaagccagattattctgggaactgaagggagactgagccttcaagtaatatgactagggaagtcaagtacaaaa

SEQ ID NO: 94575 - DNA, 390 bp, Homo sapiens
cttctaagagttttatagttttaggtcttactggggggtagggggtactttgatccattttgagttggtttttatatatggtgttagataagggtccaacttcattcttttgcatgtggatatccagtttccccaacaccatttgttgaaaagactctgcattccccattgagtgatcttggtaccttgttgaaaatcactggctatatacacgaatgtttatttatggcctattcttttccaatggtcgatgtcagtctttatgccagtaccacactcttttagttactgtagctttgtagcaagttacaagattaggaagtatgagacctccaacttttttattcttttttcaatattgtttcgtctgtacagggtcatttaagattc

SEQ ID NO: 94576 - DNA, 328 bp, Homo sapiens
  misc_feature (23)..(23): n is a, c, g, or t
tttaatgttgatatttagtatanaaataaagtagagatctgtgctttattttaaaacatccagattttaatgtactagtaaattttttttcactttcctgcaaagatctggtaagcaggaagaaatgtacatcctgaaagaagtgagctactgcgcctggcctcaaattgttttttcctgatttttcttaataatgttgtgtctgggcccagcccagtggctcacacctgtaatctcagtgctttgggaggctgaggcaggcagatcacttgagcccaggagtgcgagaccagcctgggcaacatggtgaaaccctctctctacaaaa

SEQ ID NO: 94577 - DNA, 548 bp, Homo sapiens
cttcaacagctcctctgtgacttacctggagtctgtccagccccgagataagacccaagatctgaaccctcaacttcctcccaaaaaagcctctcttccattccccaacatcgcaggggcggagaccaatgcctccactctcttcctttccccaacatcgcgggggccgagaccaatgcctccactctcttcctttccccaacatcgcgggggccgagaccaatgcctccactctcttcctttccccaacatcgcgggggccgagagcaatgcctccactctcttccattccccaacatcgcgggggccgagaccaatgcctccactctcttcctttccccaacatcgcgggggccgagagcaatgcctccactctcttcctttccccaacatcgcgggggccgagaccaatgcctccactctcttcctttccccaacatcgcgggggccgagaccaatgcctccactctcttccattccccaacatcgcaggggccgagaccaatgcctccactctcttcctttccccaacatcgcgggggccgaga

SEQ ID NO: 94578 - DNA, 378 bp, Homo sapiens
ggcaccaggggcccagggtagctgtaagggcctaatggtccctgggactgggttgtggggccaggtgaggctggtctgatggaggagctgttcttggaaggagaattctgtttctggctagacccttgtttgagtacaaggaactgtgaaggatccatttgacaggaagcctaggataaaactaaactcattcttttttcttacagctcacctctgagtcttgagctccaaaccagcccctcctgctgacttttccattatcaatagtctcctatacccagttgtaaatctcagggtaacgctgactttccacatttaatcaattatcagattctgatagtccttcacaaaacagttgccttttgtccccacttcctt

SEQ ID NO: 94579 - DNA, 395 bp, Homo sapiens
ttacctctttgaataacagtagtaagtacagtggtgatcctgttgactgccaggtggggagtttgcttagctttagccctcaactaatttcaccagtccagactgtatgtatgtttatactgctatttttaattataagtgttcacttcttcaaaacagatatttggtaactgtgtttaattaaaagtgtgtgtgtatgtgtgtgtgtgtgtgtgtgtgtgtgtgttttaaacaaaatggaaaacaagcaaaactcatctcattgggttattcaaaggtagagatgaaagacgataaaaatagccataattcatttaaaggaatgttgcagagagaaaacatttattggagatttaccaatgaataaacatatagccaaaataatttgtacacag

SEQ ID NO: 94580 - DNA, 278 bp, Homo sapiens
tataatcatgtaggtataggaaataaagtcatctataatatttctataatatggctataatatggctataaatctataatatggcgtgagccactgcatctggccttcattgttgtaaatatagagttgtgtcctattgggagtacatgttctagaataaaggattttatctcgattcaatttggcaaacacctttggttactatagtttggacttttcttttgaattcccaaatcttatcaatcccatctcttaacagatttcagcttttcatttta

SEQ ID NO: 94581 - DNA, 374 bp, Homo sapiens
tgtacacaaggccccaagagaccagcccagcccagaatggagtcatgtgtgctaggtgccacataatcaaactgatcatggcttttaaaaagccagtttaaacaacaacgaaaacaaaccagattttcagcaaccagtccaaacaggtccagtcaccgtaagctggcatgataaggaaactttctcttccttaaccctgtaaggaaagtaacttttaaacaatgaatccacattttgtttcttgttttatgttcttcagcctttctgtctataaagcctactccctctgctcagctcattcgaatgtctttctgttttgtagatggaatgctgcctgattcacaaaacactaataaaaaagaatttgatctttg

SEQ ID NO: 94582 - DNA, 311 bp, Homo sapiens
ggatcactccctccaggaatccctccggctctgtaggacccagtttgaaaacccagtgttatgtgatgctaaatgctgacattccttccctgcctgtcagctttgctctcggaggtgcctaatggcgccagtgctgacctaatgcggccggtgttctggtttgtttctgaattgcgtgttgaggtagttggggggctttgttactctgggtggctggtctgctttattattagtcttggggaaatgatttctctgagaagcagtagaaggtgtaaattatgcttcactgcaaatcatcaagactatatata

SEQ ID NO: 94583 - DNA, 278 bp, Homo sapiens
cgaaatgattcgtgaacaggatggtttgagccagcatgttttttaaggatcaaactgagggcttgttttctcccccaccccttgatgggcttttaaaggtgcattcaatgctttcacatggaaacctggtctgttgcagatcagagcttgttaccccttcctcgtgactccggtcctccaaccgcatcagggcacccggcccctctgctctggggaacgcaggtcactttgcaagatgcggggaatattcacagggctgcaatgggctatctgtcttc

SEQ ID NO: 94584 - DNA, 144 bp, Homo sapiens
ttttcccaagccttggagggtaagatctttcttctagtctgagggtgaccagtctgctttttttttttgagagggagttttgctcttgtcacccaggttggagtgcaatggcgtgatcttggcttactgcaacctctgcctccc

SEQ ID NO: 94585 - DNA, 429 bp, Homo sapiens
ttctgggattacaggcatgagccatcacgcctggcccagactatttttcacgtacttctcacaccagccttgtaaggcagcgctgtcattatccccattttacagatgaagagaccgaggttcagagaggttaagtaatgcccagtgtcatatagctctgtctgactcccctcttctggcctgcctcccactgaggcctttcagcctgatgggagagtgaactgtgtacccgtattcatgtgggtactgggcactgaactattaaatatgcacagggctcggaaatccactcccaccccacctgctcattttgtctttcccttctgtgttccagtgcctaccgtcatctttagagaaggtaggttaagatgccactgccctgctagacactcggaggggacatggctggggtctaggggacatggctgg

SEQ ID NO: 94586 - DNA, 182 bp, Homo sapiens
catggatgaactgtgtttctagatttttcctccagctttcctgagagtaagttaacctctaaaattgtggttattttgcatatagaaatataacataagactataaataggcatgccagacgtttaggtagaaaccattaaaagcagtaagttattaacgagtcattttgactttttaaatc

SEQ ID NO: 94587 - DNA, 374 bp, Homo sapiens
caaactaaatataaaagaagaatactcttctcttgatcctgaaagtaaaatacagagaaattcaaaagaaaccctaaccattgatttcatttctcagtggaacaatctctatgtgtatccaaaatattgtgatgtactcagaagtcccatggcctaactaatgaaacatgaatcacagatttcaagaagttcagctgtaagattcatatgctctggagaaactcacaaaactgaaaacttgtctttttataaaataatagtactgtgtttcaaacctcacaaggacctcatagctcaacccctcttctttgcagaagaggctcaaggaggtaatttgtctattgaagatgaaaaaagttgttaatggcagaatc

SEQ ID NO: 94588 - DNA, 789 bp, Homo sapiens
agcggagaggacaccattgcctggagatgacagaaggctgaggatggagagaggcactgatagaggccagaccagacaagcagtgccaagtccatagtgggacaccaaagggaggaggcaatcccagatgaggtccatcccagaaccagaccttgcagggacctcaaggagctatgaacatagaaaccctatacacgatatcacttgaatccctccacaagggcttctgatattgtcttagacctttggaaagttcaggggtagtagcctctgggcccatagtgctcccctgatgatgcagccccaccctcaactcttgccactgcagatgctccttgggcagtttcatctgggcctttcacatcagctccctccaaatgtgactggacctcaaatggatcttcagacccccatgcccaaccacctcccagctaccttccctggacaacccacaggtcacatgatcaccaggaagcccatgtctctgcatgataacctggagaaacctacagatgccaggcttctgaatctcattcaccatgcttcccagggatcaaggaagaaatacccagagatacagactgaaaaatcaggaaactggatgggattcagagcccttggaatggagccttctcattcattcacccaactccagtctaaaacgtgcagctctgaagcagggctgcttcatagagacttgagtaaatagcacagtaaagcccaggttttaccagtgaggaggagagtaaatacactgatcatttgcaagagcacctcttcagatatggc

SEQ ID NO: 94589 - DNA, 165 bp, Homo sapiens
actacaggacccctactctttatcctaacctgatatttctaaatggtcttggaaactagaacttgcgtagttttctactgatacgagctttttccttgatcagcaaaatcacaaaacttgtgttaaaaagtataattttcattctcacatgctgaaagagaaaca

SEQ ID NO: 94590 - DNA, 282 bp, Homo sapiens
agtagagctgtggctgctgcactgagacccagccgtgggtggactgagctgcttaagaccctggttcctcttcaacatcactgcacccctcttggtccctcttcccttgggggtgcactgctgaggtctcctaattctgcttccctaagcccttgctgctcccagtgtggtctgggaaccagtggcagctgcactgatggggcgcccatgaaaaatgcagactcccttgcccccagacctgctgagtcagtctgcagttcaccaagctttcaggcaccttct

SEQ ID NO: 94591 - DNA, 339 bp, Homo sapiens
gtgagctccaatccatcatatctgctataatcagcacaagttctttttcctttggtaattgtattcatttttatggattttgaggatataatttcctatcagtttaatgaagaaatatgtcaaaactcatattcatagttttttagatataggaaataatttattttcaaattgtgaactaattaacttgtatgccaagaaagatggtgtttattctctaggaccagagttccctgtaattttcttaagtttggaatggtgggaaatgctcttctttccagtcttcatcctcatcgcctgctagcttactgttaccactttttaatgctttaaggccca

SEQ ID NO: 94592 - DNA, 414 bp, Homo sapiens
ttttaatataatttatatttaaaatatatgctttaatttttaagttcttacagtgaggatgccatatatttaagctgtcaaaacagcttgtatttgtactcttttctagtgttgtgggccataatacatatatactcatgggcagtataacatttgccttcttaattttctttttaaaagttgttgtatttaatttatttttatttttaattttttgagatggagtctcactctgtcactcaggctggaaagcagtggcgtgatctcagcttactgcaacctccgcctcctgggttcaagcgattctcctgcttcagcctcctgagtatctgggattagaggtgcgtgccaccatgcccggcttatttttgtatttttagtagaagtggggtttttaccatgttggccaggctg

SEQ ID NO: 94593 - DNA, 261 bp, Homo sapiens
agagcgcgcggaggttggcggttgggggaggtgaagctgtccaaagagggacggtgtttaggacaggttaagcaggtaccatccaccactttgggctgggcgatctgccaggcatctgcccccacctagcctctgcccccacctggcctctgaccccactgaacaagaagacgtggtcacatccagggtacactggaaaatctccctgctctggctggggcctgcagagcttgaggaagtttagaatgtccaaagtccaaa

SEQ ID NO: 94594 - DNA, 307 bp, Homo sapiens
gtattactgcatcagggataaaggaaaagtcaaaattatctcttattttggtagatgaaattgaaaaagttgcagtgtgtgtgtacatggtgcatccccccaagatctatccataagaatggcttgctttttgcttatttatataaaacccactatgttaaaacaatgattttgtttaataatttacaaatttatcaatgatttatacatcttaattttcagtaatatgcagtatttgttgccaaatggtgtaatacaattatgaatgtctgaagataataaaaccaagatgagtagaaatttaaga

SEQ ID NO: 94595 - DNA, 445 bp, Homo sapiens
tattcgggaactcccaaaccctccctaaatttatcatcaatattaaaaagtcttctttctattatatttatggcacttaaactgaagcttagtttctaaacagtctcaatctattttgtgttatgaaaacaatccacaatccttgaaaacattcagatattgcaggcatatgttaacttaaaggaaaggactctacattcaaaagtcctaccctactactcttccccaaagcagccacagttaacatttttatgttcaattttcaaaatttttgacagtgtacattcatgcacactttatctgcatgggtttttataatttatacacatgataactatagataactttctacttttggattttttagttaacagtatattgtgaagataccctcatgtcaggacactgaattttgcataatgttacaaaatgttgttgtatcaaa

SEQ ID NO: 94596 - DNA, 633 bp, Homo sapiens
caagattgaacttggacaccaaggatgaaaaatgccacacaggcctcctgagaagggcccagggtatgcctagtcagcaggattcagttcagggtaccagatttttacagatattttaataatgactcttaaattattgaaataaatatagacaaccccaaaccttggacactgtatataaaaagaaacctaagaagactctgaaaggtagaaagaagacagacaggccagggaccttgggaactgaagaatgacacactggtgagttcctggggttttcctcttggctcagatatcccagacttggagctaaagaaactggagacccagaaacaccatgaggcctgagcagacaaacggagccccaacaaaagtccactctttctagccagaggaccagggaaggggcagcctagcaagacagaaaactcgagacagtagctactttcctccagccaaacacctctgcaggaactgtagccacacccccacccaccactccagcggaggcccaatgaggggcctagacagtgacaaggtacccagcaccccaacagggtggtgtcaaagggactgtcatcccattggggataatgagctactaagcttttcaatggaggcttttcagtgaaa

SEQ ID NO: 94597 - DNA, 676 bp, Homo sapiens
aaagatagtattttgagcagaatagtcatgaaaaacttaggagatttcagcagagattttgaatgaatgaaaagaagtcatgtaaatctctaagaatgttttaggaaaaggaaattgcaagtaaattttctgttaatggattgtttcctatttttaactttctccatctgtacctttaagagctaacctgtatgaaagtgtcttgcacataaatggccaagtatttctttgtttatgctgttcactaaaatattcttgataaaattctgtccatcttttaattctcagctgttactctttttcatgaattctcaggtcatctttcttgcctatctagtactaggtaacttttctctttttttttcttttctttttaagagataaggtctcagtctgtcacccaggctggagtacattggtgtgatcatagctcactgaacctccaactcctgggctcaaaatccttctacctcatcttccagagtagctaggactacaggtgtataccacccacaccaggccttttttttttttctttagaggggggctagctgtgttgcccaggatgttcttgaacttctggcctcaagcaggcctcccacctcagcctccctagtagctagtcttacctagtgctatataatttttcaatgtcagttatttccttttttataaa

SEQ ID NO: 94598 - DNA, 242 bp, Homo sapiens
tcaataattttgtatgccttcatacagtctttttgggattggcctttttcacttccatggttctctggttgttgagtttatcaatactgtagtttattcctttttgtggttgatacagacttctatactatgatctggatatgccacagttagtttaactgttcacccactgtagaacatctggtttgtttcctgttttcacttttgtgaataaagctgctaataaatattcatgtcgaggg

SEQ ID NO: 94599 - DNA, 338 bp, Homo sapiens
cctaatggctagtgatgttggacattttttcatggatttatttaccatctatacatcctctttggtaaagtatctattgaatgctttatccatttaaaaactggattgttttcttgttaagatttaagaattctttatatattctggataaaagtcctttgttggaaatgtgatttgcatatatattttattccatctgtagcttttattttcacactcttaacaatgtcttttgcagtgcaaaagtttttaattctggtgaaatccaacatgtcagtttcttcctttatggattgtgcttttgttgtcatgactaaaaactctttccttaacccaaa

SEQ ID NO: 94600 - DNA, 725 bp, Homo sapiens
gtattggggctcagaaatcgataccccaaaatgtcgtgctttgacctgctgaaatgaagtctctaggtattttgggcctccacccccgccaccctgcccctcagtcttctgtctctcccaaaacaaaggataaaattgttatctgaagttcctagataaaagtccagaaccctcaaagaagaaattttgaacaattacttttggtctcttggcgtttccattaaatgaactcacttcacaggaagaaagactgtctatcaacatacctgaacaaatttttttgccacagccattatctgctctgtgggtcgaacaactttgttccaggacattgtatgttctttaagccattgaattcccttaaaaatcatttactatccccctaaaattatccacacttcccatgtttctcgccccctagaataaaagtatataaccccattctttggtggggcagtcactctgtgattctcccccatgtacgctaataaatttgtattctatttcttctacgaatctgcctttgattagttgattttcagtgtaccttcagatggtgaaggcggggagttttccattagcccccacactggtttctgttgtaccccaagccaagaaaaccagtgtttcctttgtcctattaacttgtgattcctatgatggcaaaacaatgatctctttttcccttgagtctgttgtccctactcttccctctccagggaata

SEQ ID NO: 94601 - DNA, 582 bp, Homo sapiens
catagctgactcctgaggatccacgaaggtttaattggctcacagttctgcaggctatatggaaaacactgcaccagcatctgctcctggtgaggcctcgggaagcttacaatcatggcagaaggcaaagggggagcaggtgtgtcaaaaggagaggggcaggagagagagagaaggagagagagagaaaaagagagcacaaaagagagaagggagaggccccaggctctcttaaccaaccaaatctcgtgtgaactgagtaagaactcactcatcaccaaggggatggcactaagccagcagtccccaaactttctggcaccagagaccaattttgtgggagacaatttttccatggaccatgggggatggttttgggatgaaactgttccacctcggatcatcatcaggcattggttagattcccataaggagtacttgacccagatgcctcgcatgcacagttcacaatagggggtcacactcctatgagagtctaatgccaccactgatctgacaggaggccaagctcaggcagtaatgtgcacttgcctgccgctcacctcgtcctgtgtggtccag

SEQ ID NO: 94602 - DNA, 474 bp, Homo sapiens
cctgggccacaaagcaagatcactgtctctacaaaagaaattttacttgctgggcgcggtggctcacgcctcggcctcccaaagtggtgggattacaggcgtgagccactgcgccccgccaattttgtatttttagtacagacggggttcctccatgttgtcaggctggtctcaaactcctgacctcaggtgatccacctgtctcagcatcccaggcatgagccaccaagcccagcctcatttggttactttttgcatggaatttattttttcattcttttgttttcaatctctttgtttctttgtatctaaagtgagtctcttatagacagtatatggatggatcatgttgtattttattttacttattttttttacatttcccaaggctctgtcatccaccttttcattaaatcattctaccaatctctcctgggctcaggtgatcctaccacctcaactgcctgagtagct

SEQ ID NO: 94603 - DNA, 952 bp, Homo sapiens
cacattgcctcagagggagggagggaggatcatcaggcaggagacgatccaggagttcagatgctgctgctagatttctctcccctgcctcatcttccatgcctcatcttccccttgtgtgttaccttcactctcatctctgagattagacatccttcacacccagagaattcggccaggcttaccttgtggtagctgagagccctagagaaaaaaaaccttctctctccctgggctgaattagaaagtcccagggaagaactctgattggccaggcctgtttcctgtgccctcccctgtgacttagtagaggtggggcctgatgctgtgattgacagcctggttaatcggctaaactcagtaggcgtgtcccatgcaccacaaggaattggggaggaacaattcccaaaggaaggaggttgctgttagcagaagaaaggcaaaacaacctgtgtccacatcatccctcctgccacctctggccctgtgctttcactgcactctgcacacacccccagcagaccccacccgagcttccagggatgatttgggtacttgggtatgggtgactgtccctgccactggacgatgaagtcttaaagggccaagactctggtcaccttggctctcccagccctctgctctgtccctgatcataaactacttttgacgaacgaagaaaacgaaggatcaaggaatagaaggggttgtgtaaggggccaaccaggatgaaaatcttcatctaggctcttccaaccctaccctgcagcctcctccctcaacccacaatcagcaacatatcctacaaaaacatgttgacaaggaaaccatcacccacccctcaggaggcaagagatggccccagctcagtgcccctgtgaggaaagctggacctacattcaaaaccagcttctgtcaaagacacattctgccatcgtgggcaatcaggctg

SEQ ID NO: 94604 - DNA, 340 bp, Homo sapiens
gaagacagaagcataatgtctgctaagcctctttgatttcaggcagcagagtatttcacacttaaaaaaaacctaccctgcctcatttactgagtgatctggaaagctgccacagaggaggagggccgagtgtaagaaagggctctgcagcagctctggccctaaaatggtaattttttttttttttttttgggacagaatctcgcactgtcacccaagctggagtgcagtggagtgaacttggctcaatgggacctccgccttccaggttcaagcgattctcctgcctcagccctagcctcattcttccaagtagttgggcctataggcctgcgccacc

SEQ ID NO: 94605 - DNA, 400 bp, Homo sapiens
cacatgacacacacagacatacacatagacacagacacacacacagagacacacaaaacagatcacacggacacacacagacacacacacagatcacacggacacacacagacacacacacacacagacacacactgatccagacacacacacagacacacacagatcacattggctcaaagacttcatcctctctaagttccattatttcctttctcaccaaaaccaaagacaatcgctgccagggaatggagatgcccgtgcgtgaaggcgcagtttggattccgatgttagaatgggagggaacgttgtggtataggaaaaatgccgtgtgtgtctgaggagagctacactgaggcaccacgcacgtttgcgctctgagcgaaaggctccgtacccc

SEQ ID NO: 94606 - DNA, 530 bp, Homo sapiens
ggcaggaaaatattaggaagacagcttcaaatgaagggactatcattgtgtttatgctgttcttgatcacatctcttaattgctttctctctgaatgtccgtgtataaaaaagaagctacaatgtgtgtaccctgcgtgttatggaggaagtgtttaaaatttgggtataaggaacaacaggactcagtaaccagccactccccaacccccaatgtcagtagaagacagatgtcaaaatatcatgatcaacttgaggtagcataaatcaaaacaattttgatagaattagccatctgtggaactcttcccgaaaataacaaaatttcaccagggagccaccaatctgaaatgtaattactctaagatgggctataacctaattaattgtaaccttgcctgtcataaggtaaaatattttgctgacagaatatttaaaaagagagctgggaaatagaacatttgtctctgttcatccaaaattacatgagagagatactccagtagcttgggtgcataaaagtttataatc

SEQ ID NO: 94607 - DNA, 284 bp, Homo sapiens
ttgaagctaagtgaagaaaaaattttaaaaaagaaacaaaattactgacaaacatttgaaatataaagacagtttttatagaaaaaaagaactttgaaaaaatgaatatatgtattaatgaacaactactatgatgcccttgaaattaattttgaagaatatttcaagggaggaaaaatagttattcactgaaacgaatagcataatatgaaaaattatagatatttaaaaataaaatttggatctgatatggtttggctgtgtggccccacccaaatctcatt

SEQ ID NO: 94608 - DNA, 378 bp, Homo sapiens
agtctgagtaaataattatgaatcggctctcagaattctccaggctcactgaattctgcaacctctggagagcattttaaatgctagcagaacattttaaataccactgataccccatgcatcataagcatccactgcaagagaattaccaggaaatttcagtgccacgtggcaaatactcaggcaattacaagcagaaatagtttcagaaattgtttcttcatgtgaaggacggtggaagaccatgccattggatgacaatcacatagaattggtcatgttgacacttatctgcctcatcctggagcacttctgggaagacttcatctgtttaagaaccataatctcagcaccctgagataaaacaacaacaacaac

SEQ ID NO: 94609 - DNA, 196 bp, Homo sapiens
ggaaaggtttttaaccactctgagacttagtttctttaactgtaaaatgagggtaataaagtactcactatagggttggcctacaagtcaggtagcatctggcacttagtaagtgctcagtaaacactagctaggctttaaagtgaactgagaccttcttagacactcctgactaaaatgatctagttgagatcac

SEQ ID NO: 94610 - DNA, 290 bp, Homo sapiens
ccccatctctctcctctcacccctcacctttgcacgctgggccttttctccacatctccgtggctctcatgctctttcctctattttttcattcttttcttctctatgcctcactctggatattttctgtcaatctacagtgcagagttcactctcctatgtgcaatctgctatccaatttatatttaattcttcatttcatttattgtatttttcattcccagaatttccatttaagtccagttttatacattcttttttttttttttttttagacggagtttcactct

SEQ ID NO: 94611 - DNA, 277 bp, Homo sapiens
agcaaatatgcaagggagatgaatgttggcttggacatgcttgagcctgaagccttgttttcatggcggtctcaggacccactgcaaggccatctccccttactgcaccttcaacaaggagcagagctcctctggcatggataggccaaagttctagaaaaactccacctcttggctctttgagcctggaaagggatcatttcctttcctctctgttctttccatttctctctctctcctttgcattctctgaagctttctttttcttttttctttt

SEQ ID NO: 94612 - DNA, 213 bp, Homo sapiens
ccggttcctctacttcccgccgcctctctggagcagactgggaatcattaggaatcgggtgtccttaggtttccacataggaggagggcccatctctgtctcctgcacttgcctgggaacagaaatctgccaccaacccttgtgctgacctctggctgtgtgtgcagtgaccagaggcttgggctcctctgaagggcaacagatctccagctt

SEQ ID NO: 94613 - DNA, 440 bp, Homo sapiens
tatccacctcactatgcagcccatcatctcaatggtgacagtgggccagtcccttcacaggacaactggttatgcaaaggtgtccttggtgctgggccatggcgcagaccagacccagtcccaactacaccaactagcacaccaggagaccacacccaagctgacctcagggagtgcagtgcattctcaaaacactatgtgaagctgttgtctttgaccaagcagggaacttgatcaaacacccaagttgagagcaggtgatgtggccacccgttatcatgctgatgtgctcctgaacaacaagcaagagtgggcaccttgaatcctgttgggagcttcaggtttgccaaaagaaacttacctctcccattttttttgaatataaacattaaggtcttttgaattatccttttttttttttttttttttgaagccaattt

SEQ ID NO: 94614 - DNA, 931 bp, Homo sapiens
tgcccctgctagggttttgcttggctttggaagcctttcatgtgccccgaatgctataaacccttgcaataaatgtgaagtgtatatagtttctgctacttatgggaggcattgagggagttaagcacagtggcttttgtgtctgcagatttgagctgaaattccagttctgcagcatagggcttaacaggttcactccccttccccatcctctcatcccccagggctttactctctcttccttccacctggatagatgcccttctcatcttcacacagcagaacactgcttgttctgagagctcgccctgctgattcttcttccatgagtcagaaagcccacttcacttataggatgagaacatggatttaaaatcagacaaatctgggttcataccgtccttttgctagctagacaatgattggagtttgtcagtttccttgagaaaaaaagggataatgatattcctaccttttaaggtaatggcagacattaggaaaatataaacataaaattattagtagagatttgatgagtagccagtgctcagtaataactaggcaattcttgattgtgtctgaatgagtttgtgagtgcatatgagagtgtgtgtatgtgagtgttatgcgtgctcacacatgtgtctggtaaagggcagatattcatatagctgctcaggttggtggaaataatttctttttacttttattctattgttcctcccaggactgagtttctggcctgtctcacttttgacgtctaatattgcgttggttaagagtgccttctctctcccccactctacagatattcagaagtaactgtgaagtaattgtggatgggatccatgtctacttggtatgtttgtctcctgagcatctgttgccagtgtaatttcatgacaatcatcaatatgtattgaataaaaca

SEQ ID NO: 94615 - DNA, 294 bp, Homo sapiens
agccagggaggcagtattgcaaggaagaacatggctatcaacacttgtttgtctgactcagaggaataaaacatagtaaattttgccttagcgggccacccacattcattgggggaagaaacaattgaggtggggggaaaacagaacagatgaaccttcatggagtttcacaagagtccacatggttgtgtcccttattttcagaaaatgtgaaattggaaaatacgcacttgtgaaagctgaagatgtcacagaaatcttcagaggatttatttagatggtcgtatcctccgc

SEQ ID NO: 94616 - DNA, 783 bp, Homo sapiens
gtggcccagggcggtgggctggggggtaaatggctctcttgtagctgatgccaaacgcttgttcctttgcctggtctcttctacaccaagccccgtgtgtctgtccctgaaggcagtctcagtgctggggcttgaagggagcttcccccagatgaaaccctgtctctcgaccttctcttccatccattgagcctgcttggacgcagtaaatcaatgaacgaccctagtgtttgctgtcccgggtgagccggcaaccatgggtcattgtttctggagaggaccaggtgctctgaacaggcagctctgggcctacaccccatctcaggttgggtttcccaagagctgacactgagacaacactgtgaacaggaacactgatgcagaagctgattccaggattcatctatgggaacaggggcatgagacagggcctggaaggagacgatgaggggtgtgatgagttgaggccatcagggctcagtccctctggggacgacagcggcatggtgtagagcagtgtcctgaagcccccgggaccagtgcagattctggctctgcaggtctggggtggcctgagacccctggagcaatgcaggtgctgttggtccaaggtccactccaactggaacgcacctcagaggtactgcgttattggggttgaaatgtgtccccctgaaacatatgctgaagtcctcacactcggtgcctgggaatgggacctcatttggaaacagagtctttgccgacgtgatcgagttaagacaagggcatactgggttaggg

SEQ ID NO: 94617 - DNA, 565 bp, Homo sapiens
aagaaagaaaaaaacccagcaaagacctaatggtgagccctgtttcactacccatccccagcagtgggctcagtctgcctgcaggtacagtgtcaatgcagcccataagggccttcctgttgtccactccatactcagcagaagctataggcctggtccgcccacatcaccagcaactgcagggaggcctgtcccctaccaggtaacagcaccagtggcttctatagccctggtgtcttgtaatcctctacccaggggcaggagactttcgtaggtttcagaacctctacttccttccccttagcaagagaaagcccccgaggtaggtgtttcctgctcccagcaaccccagcagagatcaaacaggaggtctgcctgggtcccaggcagccagagagcagtccagaggaagctctctattctatgtttccagcatcactcagcccctatgtgctgacactgggtgacacaggtaagtccctacagccctttcaggcagtaccaaaagggattagttagaaccttagcagaatcagaacacaacaggccataaatgcattgcaag

SEQ ID NO: 94618 - DNA, 369 bp, Homo sapiens
acagcagccaccagaaattaatatggggaggaaatagggatttcatctgtccatagtaaagacatgccgggggtgataagaatctgagcccatctcacctagatgagaacgagagagtaatgaccacagaatagtggtgatggccatcctcacatctggctccttagccacccatgccagtatggactgactgccttctacgtcttgtccatggccattctctagggaaattcccttgcatctcctgctacctttacagactacatattttgttggattactttctcattttcatgaagcatatcttctagtaacttctgataaaagatgcataggagataaatattttaggacttccacagtaccaga

SEQ ID NO: 94619 - DNA, 241 bp, Homo sapiens
gagccatgtccacgtttaatattccagaatgcagacatgtcttatgatatggagtgaggtggagattgggaggggaaatagaaaccaaattccatgagaggactctgagatgcttaagaaacaatacaaagaaaaaaagggcaggcatgatgactgaaacccaaccttcattcatcctcctcagaggagaacgtggttctggaagacagcatgatggttttcactgaaactttccatgatc

SEQ ID NO: 94620 - DNA, 778 bp, Homo sapiens
cagaagtacaatggccgaggcgggcggatcacgaggtcaggagatcgagaccatcccggctaaaacggtgaaaccccgtctctactaaaaatacaaaaaattagccgggcgtagtggcgggcgcctgtagtcccagctacttgggaggctgaggcaggagaatggcgtgaccccgggaggcggagcttgcagtgagccgagatcccgccactgcactccagcctgggcgacagagcgagactccgtctcaaaaaaaaaagaagtacaatggataggggctaaaatcacaagacctgaagttatgctatctggagctgtattttttaataaatactcacctcttgttacttagatctcttacttgtaaatgggtgtaatgatggtacctgcctcatagggttactgtgaagttcaaatgagttaacaccattaatgataccaggctttgcaatgtgtttgatttagatgctaaagactatttattggttccatatttcaataattcactgaggagaaaagtgagggaggtaaacatagaatctgtgaaatcaaaatgcctttctagagcaagacaatcaggtttctatagtgaaacaagactcttaaaaatatgcttacaccaagcacagtggctcatccctgtaatcccagcaatttgggaggcggagcaggaggatcacttgagcccgggaattcgataccagcctgagtaacatagtgacaccccatcactacaaaaaaataaaaaaattagccaagtgtggttgtgtatgcctgt

SEQ ID NO: 94621 - DNA, 685 bp, Homo sapiens
agcggaggctgggaggagagaaaaggtctgcctttgacatttgtaactgctgagaactgaaggtcagatacagtcctttccactaagaaatggctgctcaccgaagagctcatgagatttgctactgctgtcacctctcatggcttggtggtctgaaaatattgtagaaagaaaagagtttcctatgcctcagcaacttgtgaaataccagattaagtttgtggacactgtctccaggataaaaagtttttaggctgggtgcggtgtctcacacctgtaatcccagcactttgggaggctgaggtgggtagattgcttaagcccaggaatttgacaccagcctgggcaacatagcaagaccctgtctcaaaaataaacaaatacataaataatttttaaaaagaagtttttaaggccgggcactgtggctcacacctgtaatcccagcactttgggaggctgaggtgggcggattacctgaggttgggagtccaacaccagcctgaccaaccctgtctctactaaaaatagaaaagtagccaggcgtggtggcgcatgtctgtaatcccagctacttgggaggctgaggcaggagaatcacttgaatctgggaggcggaggttgcggtgagctcagattgcaccattgctctccagcctgggcaacaagagtgaaactccgtctc

SEQ ID NO: 94622 - DNA, 495 bp, Homo sapiens
cgtgggattaagctctagttgcctacagtggttacttcttgataacaacctattactggctttttcaccttccctgcctcaataccctactccccattgtatattaaaccagtgcaaaagtgtcttgtgtttatatgtaaagaaaagttggcgtctggattcagataactacaggttttattgtttttcagtgacatgatagttcagtgggacatttgaaagttatacagggcatgaggcgattcttcactgtgtagggcaacttgtggaaaactttgcttaaagagcagtaggcatattttctttgcctgtgttttcttaatcccttcctcccctaccctgttggccgaaatgtagacgtgatgactggagctgcagctgccatcttgggagcaggttagacagaaccatgctacaccctagggtgacagagcagtagccggaaggaacctattccctgaggacttcatggagcaaggctgccctattagccct

SEQ ID NO: 94623 - DNA, 322 bp, Homo sapiens
ttgtctcagcctcccaggtagttgagactatccataggcacgtgctgccatgcccagggtatcactttgttgcccaggctgcctacctcccttttagatttgaagtcctttcaggagagaaactgagtttccttcctgaacttgaatgttgggtcctcccgaggatggccccctactgctctctgcttctatccttgggttccatgagcaaaaactaggcctggcccagctgtcccgctaggcgggattcctaaagacctaccaggaaacagagaaggcaaaggcagaagaagacataagaagtgggacaactctactcctt

SEQ ID NO: 94624 - DNA, 415 bp, Homo sapiens
gttgaaataagacatgtcacatcctttatttaggaatggtggtattacagcaccagacaagcatctttaattgaaggaacccatccgtcctccttcccttcccacccaggatcacgttagtaaatccttgcttacctcgaaatgcttgagagagagtggttaatgtataaatcatgcccatttatgatttggaaatcataacttgggaaagcaaacagaaggacgtccaggactgaacaggccatagctttttcatattggagtctgccccttctcttctgtctgtgacctcagttaagttataggtcgctgctgggctttggtttcctcattggtaaaatgaaggccctgggctagcggatgatctccagggtccattccagctcttactcttgacgctgacccagatgctact

SEQ ID NO: 94625 - DNA, 260 bp, Homo sapiens
cccacctcatctttctctgcctcatcatgtcagaaaaagtaccccaccttttgccacaaggcaaatctgagataaaagatttagatggcctgtaattccagcacttggggagaccaatgcaggcagattatttgagtctaagagttcaaaagaagcctaagcaacttagggaaactgcatctctcaaacaaatacaaaccattagcctagcatggtggtgtggtggcacatgcctgtagtcccagctactcagggtgggg

SEQ ID NO: 94626 - DNA, 453 bp, Homo sapiens
ggaactcaaactaagacaatgtctctgcctcttgtttgtctacgactatggtcaggatcacaccattgcactccagcctgggtgacaagaaagaaactacgtcaaaaaagaaaaagaaatgagtttcctcctccatacttgcagagccccagtgagtccctgctctgcaatgctcatacccattgtgctgttactgcaagtcaatgagaacgttggtggacttctctccacttcacagaagaatgaatggaggcccagaacaatggcatgaacctgtcgtttcttggccttttggctaagatcaagtgcaatggcatgaacctgaccatagtcgtagacaaacaagaggcagagacattgtcttagtttgagttcccacttcagaaaaccttgagacaaacattgtagcacatgagaccttgtcttaaaaaaataaaaaattttaaaaaaaaa

SEQ ID NO: 94627 - DNA, 529 bp, Homo sapiens
taaagccccgtctctactaaaaatacaaaaattagccgggcgtggtggcatgtgcttggaatcccagctacttgagaggctaaggcaggaaactcgcttgaacccaggaggcagatcttgcagtgagctgagatcacaccattgcactccagcctgggtgacaagaaagaaactacgtcaaaaaagaaaaagaaatgagtttcctcctccatacttgcagagccccagtgagtccctgctctgcaatgctcatacccattgtgctgttactgcaagtcaatgagaacgttggtggacttctctccacttcacagaagaatgaatggaggcccagaacaatggcatgaacctgtcgtttcttggccttttggctaagatcaagtgcaatggcatgaacctgaccatagtcgtagacaaacaagaggcagagacattgtcttagtttgagttcccacttcagaaaaccttgagacaaacattgtagcacatgagaccttgtcttaaaaaaataaaaaattttaaaaaaaaa

SEQ ID NO: 94628 - DNA, 342 bp, Homo sapiens
cttgtacccatatcctcaggtgcccttggccattcacccttaaggcacctggctcctgggcttatcaccctgggaacgacctccagattctgaattttttaacctttatgtctctttcccctttgtccctttcatcaaatcacatttgtcctgtcattcagagatctgctatctgttgcaggatcaactgatctcagaatctaattttcatgaagatgtttgtagatgatactgtgctaatatttatcttttcatctttccatatgtggaagtggtctcaactgagactgaaattcaggcatacttggcacatttttatcttgtgcttgccagaagcatgtt

SEQ ID NO: 94629 - DNA, 654 bp, Homo sapiens
aggggaggagttaagtgtggggccattgtcagtttagcttttggccatcccaggtgctattcatttggcgattcggcaaatgtttattgagcaccaactatgtgccaggccctgtgctacatgctgaagatgctaagataaacaagataaggtcaaggacattgctcttgtagaactcttactttaatgggagagacagctagcccgagaaacaaacaagattatttcagggattgggttaaatgctgtacagaaaatgaaactgagtaatggaatatctaggaagcaactatatgcatgggccaactcagttactcagctttgacactgttgggtctagttggtacctttgtttccttttgtgttatagatggaggtgatctttcaaatctcctctgcagagatccaatgggataatggttgactaccatttattgagcacctagcccatgtcaggtactctacatgcattttctcatttaattccctcacctagactgtgtgctaaatggtccattagccctactttcttttccagtaaagaaactaaggtttggataagtgaagttgcatgccagggtcctgcagctttacgtggtgaatcctggatttggacctagattgggctggctctaaagccaggcttctttcccc

SEQ ID NO: 94630 - DNA, 378 bp, Homo sapiens
catgtagggggagagaaggggcaaggaggggaagagaaaaaagaagagactagaggtgagaagggagacatttaggatctggggctaagctggcacagattctccttcctgttctaaggaggctagaagtgcatcctggcgatggctgtggagggagaggaccggctgtctggatgctggtcagtgtgtggaaacagagggggctgtgctgccaacccaggcatctatgacatcagataccctcagcctggagggagtaaagagccctctttcccagccggtctggactctgatgactagatttccttacagccattcatcaaaacaggaactgccctcatcctacaaaatggcttttcaaccaggacaagagcacag

SEQ ID NO: 94631 - DNA, 343 bp, Homo sapiens
aagccatttgcttggggcctctgaaggccaaactcattaactaggaatgattaatggagtcctcctgcttgtttattcagctcaagtctatcaacaactgcagaagtattttgttttccgtctccctgatgttttcgttctgtcttctctgctaatcctgcccccttctctgccaaatcccctgctctgctcttgaccttgctggctggccgcctcctctccctggactcaccctcctctgcttgaccttcagagacttttcccctaccaggttctggggacccacttgggacaatgactctgaagacttcggcccgcggggagggggacaaagggttctccc

SEQ ID NO: 94632 - DNA, 311 bp, Homo sapiens
  misc_feature (19)..(20): n is a, c, g, or t
agaaggcaaggaatatagnnaaaaatctgtgcgatccggaacatggataagctactttgatggtaatgttgagatgagaaagacattccagaaggcaaggaatatagtttgtagtctgtgcgatccggaacatggataagctactttgatggtaatgttgagttgagtgtaattttttaaataggtatttgccggttttgaaaagaaaaagcatgtttatctctactattgagagaatcttatttccactaattgcgtttcactaacatataggctttctttcaaaacacaacagaaaagagaaggaagat

SEQ ID NO: 94633 - DNA, 504 bp, Homo sapiens
ctatcgtcatagctgattcttgaggatcaacccgcggcgagttcatgcacccggtgggtgttcatgacagtgtgaggacacccttggtgtcaccaactacagaggcatcccacctgctacaggacctggcaaaacaaaaggctctagacaggtccataaaagggtttgccaaggttggggtgcgggggatttccagagtaatctgcatagcaaatgcccacccactcctgcttgtctatatcaagacagctaacaagggagagtgaagagaggggctgtttttagtagaagtaaacctttgtcaagaaggagctgtatttctttctttctcttcactcacaagataggggcacctgagggaattgcctatgcattgtgagtgtgtctgcaggacattccattcctgtgacccatgtactgtaggaccaaaatcccacctggtctcaaccaaacacatgacttatcaaacatgatgagtcagaaggggcaaagcttgcttcctcc

SEQ ID NO: 94634 - DNA, 328 bp, Homo sapiens
aacattgccctcagattaaaaaaaaactaaagaaagatctgtttaggaatgtgcaaatacaaccatattcatggatggatgcttaaaaatagtcacgtacctttgtagttttgtgtataggtgtgtgctttaaattttcacctaacaagggaactgttgcagatgtccttgcttttgacataatggctctgatttaaggcaactagcagactgtactgagaatctcccctccttagctttttttcttaactcttctttttcagaataatataaataattcagaaatctttgtcagtgttaagaattaacaggaaattaatgtgtatat

SEQ ID NO: 94635 - DNA, 516 bp, Homo sapiens
tccctgcacagatgggacgtggcttgggaggaatccctggctgcaggcattccttggcccagtggccagatttctggcacttgaagcaagatcctgagagaggaggtcctgtaggaatgcctgaccactgcagcttaggcgttttgaagttcttgtgtgctggagctgcagctgagttttgtctcacagcagaggcaagtaattgtaactcagaaatgcattgccatttggctgcctcctctctattattgcacactttgaaggtgaggttgattaattcctgttgtggggtttgaggactggattccaatttttgaagcttttttctaatgtcaggagctgactggttgataaaatgcatattgagaatgagacagccttctgacccttcagggtctagggctgtaaagtgtctcagaattgctgccagatgaaccatgaactgggctgggttttcatctttaccttgggtcgtttaagtttgtcataattaacagctttgtaagctgccttttt

SEQ ID NO: 94636 - DNA, 782 bp, Homo sapiens
ataaggaggcagataaactactgaaaaatgctctgcttggtttctctaatttagcttcaaatgatgtcataactgagcataatatgacatttaaaaagggacttagcactccctcttaaatatttaaataacaatgtacatgttaattagtatgcatttgcctgttaatagacttattaacatgtatgctagtagtcaagagtactgagaaatgcctgtgcaggcaaaggtgtcttgattcaggacaggcaatgtgaggtactgtagtgattagcaatgactgacagtgcactaatcacagcccttgttgagcaatcagtcttcattaggctccccaaaccaaaactgacccaaaaacaattgattctttctggctttaaagccaatttctccatttgttttgatttgaggctttttaacgctgaatctgtgtgtgaaaggcccttctgtttaatattttagttgcagtgcagttaataaatccttgactttattctaaaagtagagacaaagttaagacttctccaggagactaaggaatcttaatatttacatgagggaaatatacacagttataatcctgaaaattatgcaatttccagtcatttaaaaatcaccacaaaatcttattcttataaaaatctagcttaaagcacattctcagtcagaattctggctttaaaaatattcattgaataagaatactagaggtctttggaaagtataggacatgatactgatctcttctcccagtaaaagaaagctgctttagagattaaaaa

SEQ ID NO: 94637 - DNA, 492 bp, Homo sapiens
aaagggtactacgcaacaataaaagtgaacaaagcaagctactgacacacaacaacatgatgactctccgggtcacgacgttaaccaaaaaataagacaaaaagagaatatattctatatgattctaattatatgaaatccagctgcagacaaactaatctgttatgttaaaaatcagatagtagtagagatggggtgtggaactgactgggaagggactggagggaactcttccagggatggaaatgttctttaagggggtgggggaacagggtatggttacacggacttttacagttgttagaattcatcagattcaacacttagaatgtttattttattgattgtattgtatgttaattatatctcaatttccttaaaaacttacacacacacatatgcatgagtcagcccacacatgtagaagactgaaaagatagacaccaaaatgttagaagtgatggaattaccagagtgggttttgttgatgtt

SEQ ID NO: 94638 - DNA, 520 bp, Homo sapiens
taacctacagtaggtgccatgaaatttagcagttggtagtgcatttctttgctctctagatatcatataagaaaaagcattgaaagtgatacagaaggagagaacggtgtggtccctggctaggactctaacccaggcctgtgcccacggacctaggtgcggcatttttattttcctgcccaaatgttgcatctcccaagaccaccgtggcctgccatgcccctatcccgtgcctataaaaatcctgagaccctagcaggcagacaaactttgagaagagcacaacaggggaggaacacacgggtggctggatgccgagaggaatgcactgacaggcaccagcaggtctgcaggccatcgacctggcagaagaggcagagtttggctgggatggttggaggagaacccaggccgctcagtgtcctgactccagaggaaaaccttcccgctccatccccctctggcttcccccatctgctcagaaatacttccactcaataaaaccttgtactcattctcc

SEQ ID NO: 94639 - DNA, 711 bp, Homo sapiens
  misc_feature (71)..(71): n is a, c, g, or t
  misc_feature (73)..(73): n is a, c, g, or t
  misc_feature (77)..(77): n is a, c, g, or t
  misc_feature (84)..(84): n is a, c, g, or t
tgtccggggttgtttaaatcttttctggtttttccggaaacattcaccaggacactatgccatgattcgantngacncgtaccntcgatgtggctcagagcaaggaagataggagatgggactgcccctctcctggagtcaggctggactggggggagcagagacccccagccccccagatggagtgggatgggtgaagtgactactcaagggctttccaacagctgcctcctcaccctcccattggctccagccaaacagcccctcttggcctctgcggagccccttgagctccaagttccgaaaaagcccttccttacccctgccctatcactccccttggggcagttcagagctaatggaacagccaaggagaaagcagaagaatcaaagaagggcgcggcacagtacccaggagaattcagggtaccaggttggctcacctcaaagaggagaaggcccctgggggcactggggtggggtaatgctcagagaagcagcctgtaagattcaccttcccagattctgtcacctcagggaggcacttggtggctccatgggaggattccagagggggccaaaggatctagcactcaggccaacatggcagggcctcactccttgggtacctagcctcctgtgttcccctcctatccccggccgggaggcaggtggggagggtgcctgctccacctctgagcccacatcgaa

SEQ ID NO: 94640 - DNA, 916 bp, Homo sapiens
tacggtaggtacagctacgggtgaggtacagctacgggtggttccagcttcctccagccacacacacccaggtgtgtgcggagggggttggagaatcctgaaggtgagagggaccttactgtatgcaaatgaaatgcaaattagtacacaaatgagcaattctgccagccacctgcttttaggtctggtccagatcacaaaatccaaaagctgaccccttccagagcagtactgaacccatcccctcagctgcagccagaaggagggagagtaggtggagggatgcctagatggagctcttagagcaaggaagataggagatgggactgcccctctcctggagtcaggctggactggggggagcagagacccccagccccccagatggagtgggatgggtgaagtgactactcaagggctttccaacagctgcctcctcaccctcccattggctccagccaaacagcccctcttggcctctgcggagccccttgagctccaagttccgaaaaagcccttccttacccctgccctatcactccccttggggcagttcagagctaatggaacagccaaggagaaagcagaagaatcaaagaagggcgcggcacagtacccaggagaattcagggtaccaggttggctcacctcaaagaggagaaggcccctgggggcactggggtggggtaatgctcagagaagcagcctgtaagattcaccttcccagattctgtcacctcagggaggcacttggtggctccatgggaggattccagagggggccaaaggatctagcactcaggccaacatggcagggcctcactccttgggtacctagcctcctgtgttcccctcctatccccggccgggaggcaggtggggagggtgcctgctccacctctgagcccacatcgaa

SEQ ID NO: 94641 - DNA, 199 bp, Homo sapiens
tgttgggattacacgcgtgagccacggtgcgcggcaaggtaaaaacttttaagtatcgcttaaacattacaacagtccaattcatttaaattaataaattcaagagactgcaaagactaagatccatgggtgtttttgttttgttttgtttgtttgtttgtttgttttttgagatggagtatcgctctgtcgcccaggc

SEQ ID NO: 94642 - DNA, 622 bp, Homo sapiens
tctaggtcgaggccgacgtcgcttccggagcagcatggcggccactgaggaggagaggctagcagggagcggtgagggagagcggctggatttcttgcgggatctgcacgtgcgatttttccagcgctgcctcgaggttttgccggagcgctgttcttcacttgagacaagcaggtctttcccacagaagacagatcaaatctaaatcgctgtggtttccgaggctcttcatacctgggtattcttttcaatccatcaaaggctcctggaacagctcatccttatgatagtggccacattgcaatgacctacactggcctttcatgcttacttattcttggagacgacttaagccgagtaaataaagaagcttgcttagcaggcttgagagcccttcagctggaagatgggagtttttgtgcagtacctgaaggcagtgaaaatgacatgcgatttttgtactgtacttcctgtatttgctatatgctcaacaaccggtcaggcatggatatgaaaaaagccatctcctatattagaagaagtatgtcctatgacaatggactggcacagggagctggacttgaatctcatggagggtctactttttgtgccattgcctcac

SEQ ID NO: 94643 - DNA, 301 bp, Homo sapiens
aaaaaggttgagtttctgatcctcaaggtaaagtcgatattaatagttaactaaagtttcctacattctggcccctatctgcctgtctgcatatccacattcataccattcccttccaacctccatgcatgctgttttctatcatcatggtcctagacctagaatttcctttttcattggacaaatattttaggtctctgtttcagtcagagctttccctagttcccccaggcaaactctgtatttgtttctgtttctagtgttcattggttatagcaattattgtattaaatttgctgtt

SEQ ID NO: 94644 - DNA, 210 bp, Homo sapiens
ggagcagaaaatcgatgccttggctgcaggtgctcacaatgatgagtgctacgggtaattgtgtcaattagagggccgggacataaatatttgtgtgaaaaggctagctgtcgttaatctttttttatttccacaaagtatgagaaaacaagcattaaagacaatggtctaaggtgagttagacttagttatatttataacaaaggagct

SEQ ID NO: 94645 - DNA, 806 bp, Homo sapiens
cctcctgggatgaccttgggtaatccgctacccttgagtgtgggctgaacttacttctaatgaataaggatgtcgctactgagattaggttttaaaacctaattctactgagattaggttttaaaacctaattctactgagattaggttttaaaacctaattcttcttgggtttcgtttttgggttctctatggttctcccacgcttgatcaccaccttccatgttctgaggtcccataggcagcttcctccttggtcttgaggaatactctcatgctcagaggggcatcctgtggtaaggaaggggcctaccagcaaccacgtgagtgagctgaatcctttggcctcaatagagttgagatgactgctgccccagctgacagcttaactgcaacctgaaatatcttcagtcagaagcacccaacctcatgcttctggatttctagcacacagcaactgtgagataataaatgcatgtttttagtcactaagttttggattattttgttatgcaataatagatgactaatatatcctgattataactttgcaaaagcatatgccaggatgacccccatccaatgactgatacctgtggaggtataaaggtctagccatctcagcccaatgagggacaattctgaaggaccactttagctcctgacctctctgtggggttggctgaggctgccattgaatctgcattgcagctcaacttttccttttgcccgctcttgcttttgtcccctcccttacacaggtgttgactcccagggaacgccttaataaatattctgcatgctaaa

SEQ ID NO: 94646 - DNA, 394 bp, Homo sapiens
ctgccctgacactggtgtgacctggggcaagcggcccaacccctcctagcctgttcctcttttgtcagatgggggtgatgactgcactcccctccctgggttgcagtgattctgagagagccagtgagcgattggtgcctgggaaatgcccagcccagtgcccaggggccgtttccgggagcggactccggtactgtctctccctctcccgctgcctcacacgtcctgtccttgcagtttctccttccccagcacctttcctttttcgctatgtgaggccttgaggactctctggaatttaacatcattatcgccgtcatcacacccctggccctgacttgttttctctgtgtcccaccctacattgcagactcactcagggcggggactccgg

SEQ ID NO: 94647 - DNA, 435 bp, Homo sapiens
tgtggctgtgatttaaacaatgaggactctggtaagaacgtcctggcctcattggtgaactaggactgcaacctgaatggagttattgaataaattgatagcacagttttcagacacctgcccccttccctccatgccatgattttccagttgcttgctctgtggccaattttggggtagatccaaacttgcttcttcagcacctagcaacaatctcaaatgccacaagaagagttttaatttaatttagtgcacggccacatttagtaagtttttgagaatgttcctaatttattagcttaaaatcttatcacgatttttaaatccatcacttctcttcaaagaatgatgaattaaaatgtaggtaaatttttcttactttccttgaatgaaatacactgagagcagacagtctgattgacactgttatgtatg

SEQ ID NO: 94648 - DNA, 482 bp, Homo sapiens
cttaccgagatattattctctcaaaaataatataacttcacaatctctagtaggtctcctctttttcttcctttgtgacttattatttttcttcattgcatttgtcaaatttgtaatcatacatttatttaggggattgtttaatatctacctttctgcatattctctaaatattttcatttactataatttcctctctgcctaaaatcatacgttatgtggtaaataatatttgttaaatgagtgagtaaatgaattctttaagcaactaattatttaagagctgtagggattacttcagcttgggagaaatgtgatcagatttacgtattggaaagatcattttggcaacattataaatgattgattggaagaaataagattggaaacgccaagaacatctaagaggccattgctatagtccacctaagagattatgaaggatccaacctaaggcaatagtggtgagaagtgggaatgga

SEQ ID NO: 94649 - DNA, 459 bp, Homo sapiens
  misc_feature (431)..(431): n is a, c, g, or t
  misc_feature (457)..(457): n is a, c, g, or t
cctgggaggcaggggttgcagtgagcagagatctcgccacttgcactccagcctgggtgatggagcgagactctgtctaaataaataaaaatacaaaaattaggcctgacctcaagtgatatgcctgcctcagcctcccaaagtgttgggattacaggccactgcgcccagcctaaaacaacgtttgaacattagaattaagaattttttttttgtagagattggggggtgtctcactatgttccaggctggtccagaactcctgagctcaacctatccttcagccttgacctcccaaaatgctgggattacagatgacagccacctaactcagataccactttctttttaaatatagacttcccgggccaggtgcggtggctcatgcttcgtgactccgcctgcctcggcctcccaaagtgctgggattncagatgtgagccgccgtgcctggctntc

SEQ ID NO: 94650 - DNA, 419 bp, Homo sapiens
ccagctgctgtcattcaatggatagtcgaattcaatggcgcccaccaaagacaatgcaaaactctctgtgtccatgtcaccacaccactgatagccaattaactccttacattcagtgtaaaacatcagtgatttgactctcatacgcgcatctggggagagaagacaggaagaagaggaagctaaccgtttccagatctgagtgccagctcaaaataaaaccagtatcatctgccacaagtgcttttgacatgggtcctaattttaaatttacacacacacaaacatttatgtatgcatgggtgtgtgtgtgcgtatatatatatgtacatatttgattgcttctgtttaaaatgtactcatctcagcaaagcttattttccttttatttgactttcattgtgacgacaaaacactac

SEQ ID NO: 94651 - DNA, 1423 bp, Homo sapiens
tgttggtgctcaacaggttttagatcttggagcatttcagatttcagattttcagatttgggatgaccaacctgtatcgtcataactattgctgatgttcatttggtcacctggctgatgtttaacaggtatttaccaggtttcttttctgtgaagttactctttctcccgcttttcatactgtagcctttgggtaggaaattaccatgttcagcccacacttttaaggagtggggagttaaggcttcactttcttaagagaaggatatctacataaattatttggaattcttctgcacgggagatttatctcttctctctcatttattcaaccatttatttctatcaatatggactcgtgggcatttattttaatactttggtttataatacaataccacgtttttctgttgctttgttctagcttcagcttttgagggctatctacttgattcctatgtccctttgatatatccttatttttgtgggttttttttttcagggggagcaggcgcttttttattttccggcactataatatattctaggcttatcttgtgtattttctgccccagtcctagaatcaggcatttctccaaggaacattatttttatggagaatgaaagaaaccaagatccgagtgctttccctctttttaattgctccaaaaggtatctgactatgtaaggcaaaaatagtaactgtattttgtttctgtagcacatgtaaaaataaaatatatgacaacaaaagatgggagggaggaattgactctacacatgatgtaaatattatttgaagatgaactcaaggtaactaaaggtgtatattataaaccctagtgcaactacagaagaaaattttaaagaagtataaataagtcagtagaatagataaaatagaaatataaaaaatgctctactaagtagcccaagaaatgggagaaaagaagacaaaaagcaagataatggtagcttttaatccagtcatataagtaatcacattgaatgtggtgagaaagcgtcagttaaaagattgtcagatttgtgtgtgtgtgtgtgtgtgtgtgtgtgtgtgtgtgtgtgtgtgtgtgtgtttcttaaaaagcaatgtggtggctcatgcctgtaatcccagcactttgggaggctgagacaggcagatcacctgaggtcgagagttcgagaccagcctgaccaacatggagaaaccctgtctctactaaaaatacagaattagctgggcatggtagcacacgtctgtaatcccagctacttggtaggctgaggcaggagaatcacttgaacccgggaggcggaggttgcagtgagccaagatcatgctattgcgctccagcctgggcaacaagagtgaaactccatctcaaaaaaaaaaaagaaaaatgctgcttacaagaaatcc

SEQ ID NO: 94652 - DNA, 138 bp, Homo sapiens
acaaggatatgtgttagcagttctgtaactgcatatatgctagggttgaataagtaagtcagtgcatcatagatgatgagagccaggtttctcactttcaggtaaagaaattacagctaaggccgggcgcggtggctc

SEQ ID NO: 94653 - DNA, 634 bp, Homo sapiens
ccacgtgtgaattctaaatgacattgaagttcagatgaaaaagctctctggctacattaggtttctgatgcaagagacagactttttttgtttttgttttttaacttacgttcccacaaaacaaaagagacagacttggtgggtaggtaaacgttaagaaaataaattattaaatagaataatatctaccagagggcacagagaataaggaactttgtctacctgctacccagccgaggaagtaaacactgccaaccggcggaaccccccgccttgtgctctgccctcagtgtgctcttccccatgtccactgttgtgaattatttatttctctaagtaggcttttgatggacaaaaatgggggctcaggaggaagtgacacaggcacagaggcaggaaagcagggatgggttgtccgacgagcgagttctcgtctactttggccagatggcatgtacttgtgtgtagagaaatgacaagaaatagggctggtgagggggagtgccagggtgtgcgccccatggtggttaatttaggaggaaacaaggagcttcgtgatgattttggagcagagaagcagtcggatgaaactgctcttttttttttttttttttgagaccgagttttgctcttg

SEQ ID NO: 94654 - DNA, 366 bp, Homo sapiens
ctgggtcttatgggcataaaaactaactataaaattaatgtcaattgtgacaactaagaaaaggagtcatcttatttaaggtttacaatcaaatcaaatattccggtaccgtcctcaatggtttaaaagttgactatatatgcaaactaagagattgagaattgcagagaaaaaatgaaatcttgtcacttttaatttttacttggtcaaaactttggctttcaggcatacctacaattttatatttaattcattaaaacatgttttaatagtcaatgtcactgtttttaaattaaatccaaaacactagctgataaacaatgtttaacagaagccatattgatacactaagtatttattgagcat

SEQ ID NO: 94655 - DNA, 159 bp, Homo sapiens
aagctaaaagcaggcctaagtactatccttacttggtaaagccttgtggatcataagctagaattatgaaagccagaggagagggaagaactaaagggaagggctggttctggaactatgaccatattctaagtttgaagactatgcaaaacaaaatag

SEQ ID NO: 94656 - DNA, 406 bp, Homo sapiens
gctgttgtgatcaccaaagcaacactatccgtttaggtgctggattagaatccaggcgagtccgcagtatagtctttacacttcatcaacttccacacaggacataaattgtactaatatagtaatatactgaaatctcagaccaactgtttgtcatcggattagaatgtgatgacacagaataaagatgtgagacagaatctgtgctgaggtctaaattcacattggaagtctgggaagagaagactgtttataaaattatagcccaggaattgctgccaaagtcggcctttggtgcagctgtaagtcggatggaatccaccttcctgacgtcagacccacccactggaacactgctcctctgactggggcttccctgaatggaaactacatgtcatactgcaaa

SEQ ID NO: 94657 - DNA, 678 bp, Homo sapiens
agcggaggagtttttggatgtttttataaaatgatcacaaaactgaaagcagaaatttttcctggaattcaagaatgattcaatatttaatataatccctttgtatcaagagaagatgaaaaatcatatggtatctccatagataatgaactgtatttaacaacattcaacaacctttcttgattaaaaaaaactaaatacagtaagaacaggtagaaaattccttaacatgatcaaatatatctgtctcaatccaaaagtcagaataatgcccaatggtgaaacattagaagaattcccaaaaaaacacatcaagtatgtccactattttctctacaacttaacattgtcctgaaggtattagctaacataattagccaagagaaaaaaaataaaaaatatcaaacaagaaaaaaaaaaaacaaacgaaaaaaacaaaaggaggtggtaaaattattgctatttacagattatatgattgcatacttggaagctctcaaagaatcaaccaaaaaaattattacaaacaataagactattattgtagttgaatataaaattagtatagaaaatcactagaaataccatttgacccagccatcccattactgggtatatacccaaaggattgtaaatcatgctgctataaagacacaagcacacgtatgtttattgtgg

SEQ ID NO: 94658 - DNA, 463 bp, Homo sapiens
taaagcttgttataataccggtggtttcccaagttcagtgttcctctctcctgtaacacacaccactgtatgtacctttcactgtatgtaccctctacgtcttccctatgggacttggtcagagaggagacctgcagcaaacatactggggctcatgctgcttgctttgctgtgactcaggagtgtttgtcttctgccagcatccatgaaacaggaacaggttaacttaccagctgataatcaaatctcagacccaacagacacattggcctgaaataatctcagtaaatgaaagtttgacagtttaggaagcttatagaagtcaccttacatagttaatttaaatcgaaggtaagaaatatgactagtattagtaatttttttcaggatatggaacctcacatttgcaaattgtggatgtcactgtagtctagccttttcaagatcaccaaaaaaaaaaaaa

SEQ ID NO: 94659 - DNA, 446 bp, Homo sapiens
ctgctgatctcatgaggtatggcgctgcagctggaggcgacccacaccttagtggatgtggggaaatctcctcagtgaagagtggatttgtggagaccatgcatccacactggtggcacttgcttttcaataattttattgtcgtgggacatacatgagtaaaaatggaaattccaaataggatcaggcataggggcgtttccttaatttgacctaaaacatgcatgcctggagattctcattggtttaataagacaaagaaagaaagtcaaagaattattgggaatattcagctaagagtaacaggaattcttccttctatagacagccctgtgatttttgtggtgtttaaactttgtaaaatctggattttatcaggacaagtgaaaaattgcagaggactaattcctaaatattagtgagtgtttaaccctccgccaaaaaaa

SEQ ID NO: 94660 - DNA, 708 bp, Homo sapiens
atgaagtcctgtcatttgcagcaacatggatggaactggaggccattgtgttaaatgaaataagccaggcacagaaagacaaatattgcaactcatatttgggaactaaaaaaaaaaaaagttgaactcatgaaaatagagagtagaatgagggttaccagaggctaaagagtggagagccagagataaagaagggatggttagtgggtacaaaatacagttaggaggaataagatctagtgttcagtagcacaacagggtaactatagttaacaataatttattgtatagttcaaaataactaaaagaatggagttggaatgttcccaacacaaagaaatggtaaatgtttgaggtgatggatgtcccagttaccttgatttgagcattgcacatagtatgcctgtatcaaaatatcatgtgtaccccataaatatgtacaatgattatatatccataattaaaaatttaaaaataataaaaatagtaagattttactctgaagaaaacctaaagattatttgaatttggacacacctttggcccctcgagtttcagaaaaaggattgtaaatcatctttttgttctcagtgtctgaatacgtggggcatgaagtcatgttctgccctttctgacctgtctcttctgcatacgacaatgtccgtgtgtacacatctacacatctacatccacacatggtggaaggtg

SEQ ID NO: 94661 - DNA, 593 bp, Homo sapiens
cttgctctgcatcaccccaactacaccacacacggacagcttctgggtctctctctccacaaggaggtgttccaggtgcggccttctcaatggccctgggcgcttctcccaggcacccattgattcttacctctaaggtcctcctggccaatcctggccaccattctccttttgtccaggggaacctggactgtttgtggctgtagtctccaccctgtggccctgaggtggctccctagcgaggcccgcctcccctgcgctgcggtgaggctgagatgaggtcgtgtctttaaccgcccctggtttccaatgggccaagagccttcctagcctcgcagagcagcctggcccagcttctcttttgctcctgtgattcaacacctgttacaggacccctcctgggcacccctggccttgagctgggcccgccctggagttacgtattgtggcttgtgtggagccagcagcctgcccaccatcccctccctccttctttggaggcagatctctcgtattctttccctcccagctgcttctctccgtctctgtcaccccaggctggctgggcaggtctgcccgagccccatctctct

SEQ ID NO: 94662 - DNA, 920 bp, Homo sapiens
tattatgcactagtagaaggacatattttcttcacactttattaattaatctatttcgtgaatttttcttttcaaatgtctatcactgtaattatctttgcttataccaaattcagtttcactggattacttagaatgctgatattcaaatagttttttgaagctcagatttcaggctttgttcagttctacttacagtatttattacgattaatcattattccacctgcctctgagcaccttttacctagtagtagcagaggtgagtccagtctcgtgcaggaagaacaaggatgtgtttggcaggtaagctgattagtgagtctacatcaagtgattgagtcaacagttcataccaacatagctagagcaatgctttttgaactatgggcagctgtccttcctcttgatgcatgcctctttaatcatttccagcattttcttttccatttgttattttcaccagggaagagagagccttataatattagtctgttatgttagctttccatagatgtacacattatttaaatcatatgtaaattagatccatccttcaataaaaattttaaaactagtaaatcatctcctaataatttttcaaaatttaaattactgttaatttcagataaggctaataggcaatggttttcttgttctacaatactcttaacctagaactaagccatgttctctaataaccagatctcaaggtatatgaattttctttcattattggaaacatggttagagtgacctaaagctccaacttattattacatacatggaacccaatctagctagttctttcttatttaaattatctttccttagagccctttcattgttcctcttggggaggacttaaaggttttcttggttctagtcacaatcagaaaatatataatgaattttttaca

SEQ ID NO: 94663 - DNA, 160 bp, Homo sapiens
atccacttgcctcggcctcccaaagtgctgggattacagacgtgagccaccgcgctcagcccagtagctggctctttattcacactctgtggagccacacattgacctccgcccagccctccttcctctggcttatcacacgccctgcttccaaacacct

SEQ ID NO: 94664 - DNA, 269 bp, Homo sapiens
tagactgataatgtccttaatgtgccaggaggctttctgtgctgtgcctcatggccaattatacaagttcattcttccacgcccgcctctaggttcagacgtgaagtccatgttgtgaatgtaaaagcagacccctatgaccttcacgagatgggtttctaaacatacttagaagcaagtccccacccccacaatcctcactgtacacacagaaaacagacagctctcctgggataattcagtatagcccaattcctaaaccaatcccc

SEQ ID NO: 94665 - DNA, 351 bp, Homo sapiens
taattggcctaatgcttcctgataaccttgaattttgacgtcaaatatctaacaaatctgaagcccttgttgtcacttgcaaaatagctacccatgatcaatatgttactatcaatatgtactattcacccaaggtagcatatactctcctaggcatattatatgtatttttaaaatcatccatgccaatatttccattgataaacatgtctaattaaacttttttaaagaatatgcctttgagagtcaattatttttataagcccagcagtttaaatttaatcattatctgccaggcatggtggctcatacttgtaatcccaacactttgggaggctgagtcgggtagat

SEQ ID NO: 94666 - DNA, 395 bp, Homo sapiens
cagggccccgagagcacagtgatgcctgggtctggagctgcagctgggtgactgcagttgtgccccagagcacaggactcctgccccgtggacttggtagagagtggggctccccccattcccagccccctcccagccccacctggctccatggagcacatggccccagccacacctcccctgctgcagccagcatcttcacagcaactgctccagacaggctgccactgttatcaacatcatacttaaacatgaaaagtggaacacttttcctgctagatcagggacaatacaagaatgcccattcttataactttttttttttttggtgtcttgctctgtcgccaggctggagtgcagtggcatgatctcagctcactgcaacctccgtcttc

SEQ ID NO: 94667 - DNA, 946 bp, Homo sapiens
gccgtcgtgtcgagcctggtgaacgggtccacgttcgtgctacagaagaagggcatcgtgcgtgccaagcggcgaggtacttcctatttaacagacattgtgtggtgggctggcacaatcgcaatggctgttggccagattggaaacttcctggcttacacggcggtccccacggtcctggtaacccccctgggcgcccttggagtaccgttcgggtccattttagcttcctatctcctgaaggaaaagctcaacatcttgggcaagttggggtgcctgctaagctgtgcaggctccgtcgtgctgattatccactccccaaagtctgagagtgtgacgactcaggctgagctggaggaaaagctgaccaatccagtgtttgtgggctacctgtgcatcgtgctgctcatgctgctgctgctcatcttctggatcgcgccggcccatgggcccaccaacatcatggtctacatcagcatctgctccttgctgggcagtttcaccgtgccttccaccaagggcatcgggctggcggcccaagacatcttgcataacaacccgtccagtcagagagccctctgcctgtgcctggtactcctggccgtgctcggctgcagcatcatcgtccagttcaggtacatcaacaaggcgctggagtgcttcgactcctcggtgttcggggccatctactacgtcgtgtttaccacgctggtcctgctggcctcagccatcctcttccgggagtggagcaacgtgggccttggtggacttcttggggatggcctgtggattcacgaccgtctcccgtggggattgtccttatacaggtgttcaaagagttcaatttcaaccttggggagatgaacaaatctaatatgaaaaccgactagatgcaataggagcttggatggttcgaggaataggcattggaggtggtttctggccg

SEQ ID NO: 94668 - DNA, 894 bp, Homo sapiens
cggcgcgccgggcttcgcgctccggtacttcctatttaacagacattgtgtggtgggctggcacaatcgcaatggctgttggccagattggaaacttcctggcttacacggcggtccccacggtcctggtaacccccctgggcgcccttggagtaccgttcgggtccattttagcttcctatctcctgaaggaaaagctcaacatcttgggcaagttggggtgcctgctaagctgtgcaggctccgtcgtgctgattatccactccccaaagtctgagagtgtgacgactcaggctgagctggaggaaaagctgaccaatccagtgtttgtgggctacctgtgcatcgtgctgctcatgctgctgctgctcatcttctggatcgcgccggcccatgggcccaccaacatcatggtctacatcagcatctgctccttgctgggcagtttcaccgtgccttccaccaagggcatcgggctggcggcccaagacatcttgcataacaacccgtccagtcagagagccctctgcctgtgcctggtactcctggccgtgctcggctgcagcatcatcgtccagttcaggtacatcaacaaggcgctggagtgcttcgactcctcggtgttcggggccatctactacgtcgtgtttaccacgctggtcctgctggcctcagccatcctcttccgggagtggagcaacgtgggccttggtggacttcttggggatggcctgtggattcacgaccgtctcccgtggggattgtccttatacaggtgttcaaagagttcaatttcaaccttggggagatgaacaaatctaatatgaaaaccgactagatgcaataggagcttggatggttcgaggaataggcattggaggtggtttctggccg

SEQ ID NO: 94669 - DNA, 495 bp, Homo sapiens
gccgtcgtgtcgagcctggtgaacgggtccacgttcgtgctacagaagaagggcatcgtgcgtgccaagcggcgaggtacttcctatttaacagacattgtgtggtgggctggcacaatcgcaatggctgttggccagattggaaacttcctggcttacacggcggtccccacggtcctggtaacccccctgggcgcccttggagtaccgttcggacagatgcccaaatccttgcagagaagtgtgtccatgatgggtgtattgaagtttacaccttagagtcacgtaggcattaaggtccattttagcttcctatctcctgaaggaaaagctcaacatcttgggcaagttggggtgcctgctaagctgtgcaggctccgtcgtgctgattatccactccccaaatgttggagatgctccaccttcggctgggggaagaagaaacaccttcccacccctcttggggtggggcctcccttggacatagcgcccact

SEQ ID NO: 94670 - DNA, 872 bp, Homo sapiens
gccgtcgtgtcgagcctggtgaacgggtccacgttcgtgctacagaagaagggcatcgtgcgtgccaagcggcgaggtacttcctatttaacagacattgtgtggtgggctggcacaatcgcaatggctgttggccagattggaaacttcctggcttacacggcggtccccacggtcctggtaacccccctgggcgcccttggagtaccgttcgggtccattttagcttcctatctcctgaaggaaaagctcaacatcttgggcaagttggggtgcctgctaagctgtgcaggctccgtcgtgctgattatccactccccaaagtctgagagtgtgacgactcaggctgagctggaggaaaagctgaccaatccagtgtttgtgggctacctgtgcatcgtgctgctcatgctgctgctgctcatcttctggatcgcgccggcccatgggcccaccaacatcatggtctacatcagcatctgctccttgctgggcagtttcaccgtgccttccaccaagggcatcgggctggcggcccaagacatcttgcataacaacccgtccagtcagagagccctctgcctgtgcctggtactcctggccgtgctcggctgcagcatcatcgtccagttcaggtacatcaacaaggcgctggagtgcttcgactcctcggtgttcggggccatctactacgtcgtgtttaccacgctggtcctgctggcctcagccatcctcttccgggagtggagcaacgtgggccttggtggacttctcgccaagggttttcccaattcacgaccagtctccatggcagacacgtctctatacatggtattcaagcaggtaatcttctaccgtgcggtacgtgatgt

SEQ ID NO: 94671 - DNA, 1341 bp, Homo sapiens
cggcgcgccgggcttcgcgctccggtacttcctatttaacagacattgtgtggtgggctggcacaatcgcaatggctgttggccagattggaaacttcctggcttacacggcggtccccacggtcctggtaacccccctgggcgcccttggagtaccgttcggacagatgcccaaatccttgcagagaagtgtgtccatgatgggtgtattgaagtttacaccttagagtcacgtaggcattaaggttctgtgacctaaataccatgtttttcacatgcgacgccttgagaatgtgtgtgtggcacatttttctcgtgaacacatacactgctatcatgtgtggcttggtgtccctttgtgtttcggatggctctgaggcgctgggagggcaagagtgttctcactttgggaaacactcctccagcttctgtgacccgtccccctgaaagataatcaggcagataaacaacctgacctggtgatcttggcacgtggcacattgaatgcacatatactaaaatgttttgctcagttaatttccttagaactgttctcatgcactttgatgattaagtcacttcaccagaaatgttcactgctccacatctgcaggtgttactcactgtaggaaccatgtcagatggtgttctggataaaaagcctgtcttcaacttggaatcccagtccattttagcttcctatctcctgaaggaaaagctcaacatcttgggcaagttggggtgcctgctaagctgtgcaggctccgtcgtgctgattatccactccccaaagtctgagagtgtgacgactcaggctgagctggaggaaaagctgaccaatccagtgtttgtgggctacctgtgcatcgtgctgctcatgctgctgctgctcatcttctggatcgcgccggcccatgggcccaccaacatcatggtctacatcagcatctgctccttgctgggcagtttcaccgtgccttccaccaagggcatcgggctggcggcccaagacatcttgcataacaacccgtccagtcagagagccctctgcctgtgcctggtactcctggccgtgctcggctgcagcatcatcgtccagttcaggtacatcaacaaggcgctggagtgcttcgactcctcggtgttcggggccatctactacgtcgtgtttaccacgctggtcctgctggcctcagccatcctcttccgggagtggagcaacgtgggccttggtggacttctcgccaagggttttcccaattcacgaccagtctccatggcagacacgtctctatacatggtattcaagcaggtaatcttctaccgtgcggtacgtgatgt

SEQ ID NO: 94672 - DNA, 305 bp, Homo sapiens
atgcccattttacaactgaggatctgaggccctaagaagtgggtcacaccagctcagggtcaagtaaattggctgaacctgtgttcttaactctggggtcaaaccaccctgtctgctcccttgagccattttcttggagcctcgtgagggccccagtgtgggtgcacggggttgtcgcccctgcagggcagtcagtgccaggagcttacagggctgatccaactacttggcttcctcatgtgccaggtccttcttctcccaactgcgtacagtggcaacatcttccctatgggctgtggtgacat

SEQ ID NO: 94673 - DNA, 505 bp, Homo sapiens
cccaagtttccgtcttcctaactcccacctgtccttgaggcttcactgaggctctggaaggcaacctctgccctaggttgcacagtccccgtgaagactgccctctgtacctggctgtcttgtttgcttcccaccaggctgtgagtgccaccatggcccaggctgaatcttcaagtctgtgttccccatgcttagcagagtctggcacataccatgtgcccaataggtatttatggaataaatgagtgatggccacatcacagagccagtccaccgcagagccagctacaatctgggtctcctgatgtctaggtcccaactcattccagcagtcctgccaactccttgtggctcagggatgtctcccttgggatgaggggctaacctctcttgagataggtcacttgggcactatccccctccctgaaggactctgttcagcactcgtccttacactggtctgtctaacttcaggtctgatgtctggacaggtgcaggtgatggg

SEQ ID NO: 94674 - DNA, 150 bp, Homo sapiens
tagacacagatgagcacatccttaaacacatccttttaggtagctgaaatgttttaaacaaagacaggcacctggttttctgcaactcaggctttcacagagttttattttttattttatttatttatttttgagacagagttttgcttt

SEQ ID NO: 94675 - DNA, 3273 bp, Homo sapiens
  misc_feature (3272)..(3272): n is a, c, g, or t
atggagaaccaagggacacgcactcagcagataaggcaagtcctgcttctctttgttttgctcggaatgtctcaggcgggctctgaaacctggagcttttctgtggcagaagaaatgcagagcgggagttttgtaggcaatctggcaaaggacctggggctgaaggtgagagaactgtcctcacggggggctcgggtggtctctaatgataagaaacagcgtttgcagctggacataaacactggggatttgctcttaagtgaaacactagacagggaggagctctgcggttccatcgagccttgcgtgctacatttgcaggtgttaatgcaaaaccccacgcagtttttacaaattgagcttcaggtcagggatataaatgatcactctcccatcttctcggaaaaacaaatgctcctagaaatcccagagaacagtcccgttggtgctgtgttcttactagaaagtgcgaaggatttagatgtaggaatcaatgctgtaaaaagctacacaataagccccaactctcattttcacattaaaatgagagtcattccagacaataggaaataccccgagttagttctggacaaggcgctggattatgaagagctcccggagctcagtttcatcctctctgctctggatggtgggtcccctcccaggtctggaactgccttggtcagggtggtggttgtggacattaatgacaactcccctgaatttgagcaggctttttatgaggtgaagattcgggagaatagcatccttggctcgctgattttgattgtctcagcttgggatttagactctggaacaaatggtgaaatatgctataccttttcccatgcctcagaagatattcgcaagacatttgaaattaatcaaaagtctggagaaattactttaagagcacctctggattttgaaacgattgagtcatactcaataatcattcaagccacagatgggggaggactttttggaaaatctacagtcataattcacgtgatagatgtaaatgacaatgctcctgaaatcactgtgtcatcaattaccagtccaatcccagaaaatacgccagagaccgtggttatggtttttagtatccaagatatagactctggggacaacggaagaattgtttgttccattccggaagacctcccattcgtgctaaaatcttcagttgagaattactacacgttggaaacagagagaccactggacagagagagcacagccgagtacaatatcaccatcaccgtcaccgacttggggatacccaggctgaaaaccgagcacaacacaactgtgttggtctctgacgtcaatgacaacgcccccaccttcacccaaacctcctacaccctgttcgtccgcgagaacaacagccccgccctgcacatcggcagtgtcagcgctacagacagagactcaggcaccaacgcccaggtcaactactcgctactcccgccccaggacctgcacctgcccctcgcctccctggtctccatcaacacagacaacggccacctgttcgccctcaggtcgctggactacgaggccctgcaggctttcgacttccgcgtgggcgccacagaccgcggctccccggctttgagcagcgaggcgctggtgcgcgtgctggtgctggacgccaacgacaactcgcccttcgtgctgtacccgctgcagaacggctccgcgccctgcaccgagctggtgccccgggcggccgagccgggctacctggtgaccaaggtggtggcggtggacggcgactcgggccagaacgcctggctgtcgtaccagctgctcaaggccacggagcccgggctattcggcgtgtgggcgcacaatggcgaggtgcgcaccgccaggctgctgagcgagcgcgacgcggccaagcacaggctggtggtgctggtcaaggacaatggcgagcctccgcgctcggccaccgccacgctgcaagtgctcctggtggacggcttctcccagccctacctgccgctccctgaggcggcaccggcccaggcccaggccgactcgctcaccgtctacttggtggtggcgttggcctcggtgtcttcgctcttcctcttctcggtgctcctgttcgtggcggtgcggctgtgcaggaggagcagggcggcctcggtgggaagctgctcggtgcctaagggcccctttccagggcatctggtggacgtgagcggcaccgggaccctttcccagagctaccagtacgaggtgtgtctgacgggaggttccgagacaaatgaattcaagttcctaaaaccggttatccctaatatccaggcaaaaggtcttgggaagaatagtgaagaaaactccacctttcgaaatagctttggatttaatttttagtaagaatgctatttacatttgcatgtacttttttagttttatgtaaccatatcaatattatttagtcttaaactagttacgttattatgcaatacgactaattgtatttttaattttttcttttctcccccaattttttttttttttttgagaccgagtctcattctgtcgccctggctggagtgcaatggtgtgatctcagctcactgcaccctccgcctctcgggttcaagcaattctcctgcatcagcctcccgagtagctggcattacaggcgcccaccaccacgctcggctaaattttttttttttttatctttagtagagacggggtttcaccacgttggccgggcaggttttaaactcttgacctcatgttccacccgccacggcctcccaaagtgctgtgattaccggtgtgagccactgcgcccggccttttttttttcttttcttttcttttttttgatacagagtcttagtcacccagactagaggtcagtggcaggatctcagctcactgcaacctctgcctcctgggctcaagagaccagcccacctccgcctccaagtagctgggactacaggcgtgcgccaccatgcccggctacttcttgtattttttgtagagacggatcgtcaccatatttcttaggctggcctttaacttctgagctcaagagatgcactcccctcagcctcccaaagtgctgggattacaggcggccaggcctattttcaattttcaagtattgcatatcattgtgaataacattgtaaatcctttttatattaagtaacaggtagttaatccatttctaatgaataattttaaggttttaatcctttccaagtgtacaataatttactgattattant

SEQ ID NO: 94676 - DNA, 141 bp, Homo sapiens
agattttgttacttcccttgggcaggtggacagagttcaaattactttcataattcagctaaaagaattttatacttcagttgaaattacatgaagacatttttgatctgatatacatatctgcataaatttctattatga

SEQ ID NO: 94677 - DNA, 396 bp, Homo sapiens
gtccagcaggatgtttgtaatgtgaagcaattcttgttaagaatcccactctgcacagtggcccgtgcatgctcatatcagtaatactcctgatcagtatgataaccaaaaatggccccagagatttcagtgcacccgctgagaactgctgacagatcaaatgactctgggacacctggagtcctaagaagtgaaacctccacaatgcaggacagacctggctccctatggtcttccttccttccttcacctccttccccctactttccttacctccctactaaaaagtagttcttttaatgaactgctactgtatgttaggcaatttacattcttgcatattctatacaagtaatgtctctttctcagtcacgttacaactgaggctagattcaa

SEQ ID NO: 94678 - DNA, 223 bp, Homo sapiens
attagctcccaaagttgctgggattacagttgtatgccgctgcactggttagtttttaaaaaaatacattttgcagagatggggatttcgctatgttgcctaggctggtctccaactcctagtctcaaacaatcctctcacctcagcctccggagtagttagaactacaggtgcataccaccatgcctggctaatctttgtttgtgtgtgtgtgtgtgtgttg

SEQ ID NO: 94679 - DNA, 816 bp, Homo sapiens
tttgctcttgtgcccaggctggagtgcaatggtgggatctcggctcaccacaacctccgcccctgggtttaagcggttctcctgcctcagcctcccaaagtgctgtgattacaggcatgagccactggacctggcctgttttttgtttttgttttgaacacacgattttgctttgtcacccaggctggaatgtaatggtctgatcatagtgcattgcagcctcaaactcctgggctcaagcgatcctcctacctcagcctcctgagtatctgggaccacacgtgctcaccaccatgcttggctaattattattattttttgatagagacggggtcttgctatgtttcccaggctggtcttgaacacctggcctcacacaatcctcccacctcagtatctcagagtgctgggattacaggcatgagccactgctcctggccaatatttcatttctttttatggagacgtaataatcagttgtatggaaatagctgattttgttttttattgtatcttttggtgaacatttcaattgtatcgactttttggataaaaacctgaaaatgtttcacctttagaacgtttcattgaatggagatttttttgtggactctggtatttatactagaaccaaatcaaaaccactctggcggctgggcatgcctaggctggtttgagactagcctgtccaacctggtgaaagcccatctctactaaaaatacacaaattagccgagcatggtggtacacacctgtaatcccagctactcaggaggctgaggcaggagaatcgcagaacccgggaggcggagattg

SEQ ID NO: 94680 - DNA, 480 bp, Homo sapiens
ggctgtcaatctagttaaaagaacagctgttcctatgcaagagcaaagtggtcctatttctacctggaggatacacccaatcaatacaaggcactattttgagagctggacctaagcagtgacagaacatcagtgatgaaactttgctgttcctcccactgtagcaaaagaaaataagggtggttggctgtctcagggaaggtcttgcagggtggctgcactttatgaggtcaggaaaatccaaggtctagtcctcaggtttctcaggttcagaaacttgcttcaactggggtgactaggccctaggagactgattcatgctaaccaaactcacaagagactgattcataaaccataacaccaatttattaatttacaatgagaaatgtaattgccaagcagaccagaatacttgtgtcggctggtcagcgaattctcttcctagtaggagaccctaattgggaaaccaaattagcatca

SEQ ID NO: 94681 - DNA, 464 bp, Homo sapiens
atgagggaaaaccccagcgactgaactgttgccatgaaagaaacactaggtaggggagaaggttatttaatttatcattctttcggttgtgttagttctaagtggtgtatgctcagtatgttgctaagagttgagttgcatcatatatagagtcagtgcataagtctcattaagttaatattaaccttgaaaacccaatatataaccaactggtgggcccttagcagctcagaagtcaacaattaacttctttgggttaatacacctttgaggcagtgttgtgcagtggttaacgttcctgagtttgaatcccagctctgcctcttattaaccttggatatgttatttaaacacaccgccttagttcctaaatctgtaaaatggcaatatttacctcatcatggtcctgctttgactaaatgagtcaatacagtataaacaaaatgctgactactttttacata

SEQ ID NO: 94682 - DNA, 610 bp, Homo sapiens
ctgtgactgaaatctgagtagtatgcccagaacttcagaaaagatcaaacagagatagacatataggtaaataaagagaaagtgtaaacgtaagtaattgaaagagcagggaaaatagagctatcaggaaatatttgtgaaggataggttgctagtcttcttcaccaccatttaaacggtatttactgccagaattatctaaaaatggcaatttcataatgctgctactaaacactaagtgttcgtcagattgcacaaagacattagattctgttcacttagtgcctctggaacatcttataataatctaaatgaaaaaaaaagcggtttctctgaaaacttgcctatgatcctccaactctaccttctgaactagtatgaagctcatatttggtataattatgtcttttctgggacctatttgagggtggaatgtgggaggagggtaaggattaaaaacctgactattgggcattatgctgattacctgggtgacaaaattatctgcacaccaaacccccatgacacacaatttgctcatgtaacatgagtaacctttaacctaaaatgaaagttggacagaaaaataaagtgtcttaatatcaaaagt

SEQ ID NO: 94683 - DNA, 429 bp, Homo sapiens
ctaatcccacatgctctcccaagatagcagcctgcccaagtacaccctgggcttcctgttctctccagacatcacagattctctaaatagcatcactgatgacatccacatctttatctgcagcccaaaccccagacataagatataaccacttgaataaacaaatggagatctcaaacttaaaatgggtcaacaggactcctgcggcccaacctgcaccaccattgccatcatgttagtaaactgtgcactcttaaattcttttttcttttttgagtctcactttgtctcccaggctggagtgcagtggtgtgatctcagctcactgaagcctccgcctcctggattcaggcaattttccagccccagcctcccgagtagctgggattacaggtgtgcaccactataactggctaattttttgtattt

SEQ ID NO: 94684 - DNA, 6670 bp, Homo sapiens
  misc_feature (4549)..(4549): n is a, c, g, or t
  misc_feature (4745)..(4745): n is a, c, g, or t
  misc_feature (4753)..(4753): n is a, c, g, or t
  misc_feature (4826)..(4826): n is a, c, g, or t
tgcttttactgtatcataattttgaaagtgcctagtaaggaggggttattagtgtcctgatgtatttcagaagcagcaaactaatcatctttgaatagtggtagatatcttttcaggtagaaaaatttcatcagtaatgccaataagtacaaatataggctctaatgatttcttttaatatttctggaaagtaattagattatatatctgtgatagaatataatactaagtattagactgtagaaggctttgtttcaaggtgtttattcattcatgttactacctacctcaatcataacatcagtaagacctcaatgatctaaatctttgggctttgtaaatcctgaattacttaggtctctgctactggaaagtgaatatcaaaaattgtctatttaagaaaaaaagtagtttttataatctgagttgtatactgcacccatagagatcattttaaatgtagcaatgaatagagattggataaaaacaatgttaaaaattcttttctaattcaagttcaaattttaaaaatttgaaaggcatgttttagtgtataaataatagaaaagttgttgacagttgtttgttttgcagtcagcaagtggtaagaatctttggagagacaacaggagaataaaagccgaaacatgcgtatatacaaaatgaaatatgaatgtgagcttagaggctacacgtggtctctcggatactagaactatctttcttgccttggaccagctaacgtgccttggttgcgccagtgtactgagccctgtggacatcacctcattaaatattcaataaatgttatttttttcctattgcctttctctcttctatatgagaatctgtaagtattcgccgaaggcttttcttttgcttttgtgaataccttcacaccatgttgtattctgtcttggttagttaaaaaaaaaaaaaaagttggccaggcacagtggcttgcacctgtaatcccagcactttgggaggccgaggcaggcggatcacctgaggttgggagttcgagaccaacctgaccaacatggagaaacccatctctactaaaaatacaaaattatccggtcatggtggcacgcgcctatgatcccacctactcgggaggctaaggcaagagaattgcttgaacccgtgaggcagaggttgcagtgaaccgagattgcgccactgcactccagcctgggtgactgagggagactctgtctcaaaataaataaataaataaaaggttaattatatttcttgttatgagacaaatgaagtatttcacattttccattgacgatagcatgtaacgcaggtttttctcttataggttgtgggactggaaaatatcttaaagtgaacagccaggtacataccgtgggctgtgactactgtgggccactggtagagattgcccggaatagaggatgtgaagccatggtatgtgacaaccttaatctcccctttagggatgagggcttcgatgccatcatctccataggagtcatacatcatttttctacaaaacaaagaagaatcagagcaataaaagaaatggccagggtcttagttcccggaggccaactgatgatttacgtttgggcaatggaacaaaagaaccgtcgctttgagaagcaagacgtgcttgttccatggaacagggccctgtgttcccagctcttctcagagtccagccagtctgggaggaagaggcagtgtggatacccagaaagaggccatccctaccatcctccttgctctgagtgtagctgttctgtttgttttaaagagcagggtggttcaaaacggtcccacagcgtgggctatgaacctgctatggcaagaacctgttttgcaaatatttctaaggaaggcgaggaagaatatggattttacagcacattaggaaaatcgtttcgttcctggtttttctccagatctttggatgaatcgactctgaggaagcaaattgaaagagtaagacccttgaaaaacacagaagtttgggccagtagcactgtaacagtccagccttccagacactctagtctagactttgatcaccaagagccattttcaacaaaagagcaaagtttagatgaggaagtgtttgtggaatcttcttctggaaaacacttggagtggctgagagcaccaggcactctgaaacatttaaatggagaccatcaaggggaaatgaggagaaatggagggggaaattttctggatagcactaatactggtgtgaattgtgtggatgcaggcaacatagaagatgataatccttctgctagtaaaatattgagaaggatttctgcagtcgattccacagatttcaacccagatgatacaatgtctgtcgaagatccacagactgatgttttggactccacagcctttatgcgctactaccatgtgtttcgagaaggggagctctgcagtctgctcaaggagaatgtgtcagagctccgtatcctgagttctgggaatgatcatggtaactggtgtatcattgcagagaaaaagggaggttgtgattgattggatccttttagacaactcctccaaaagatgaaccacattcttttctcttggtttgatatggttacctgaatttgcattcagtgttatttgttaatccatttacgctttggtctgcagagactattaattatttggttgtttttgttttcatgtttgaataagcacagattctggcattgaaagcacttgacaaagggtatttgtgcttaaatgttaatataaaagatctgaagaagcaacagaaagtacccttcagtacacctcagacttttttttaaccccagagagataaaatacatgtatagtgtttttcagtattacacattgatttaaaaagattatgctgttaaataatcttttaaaacggtatttttataaagtgaggggataatttctggttctcaggttataactgagagcagtgtgcaagataataggtaaatttgatccattgcacagatatactttgaaccatgtgatgagttatcttgttgccaaggccttgcttctacttaaagttttcagaaaactgagtgacagtggagagaaccaagaagttttacaaggactttactaaattataagcaaacttgcttcaaaataagttgacatgtgataataaggttttcaatgtagcccaggaggtttttaaaggcactgttaggctgagcatggtggctcatgcctgtaatcccagcactttgggaggccaaggcagaagcatcacttgaacccaggagttcaagaatagcctgggcaacatagcaagaccccatctctataaaaattagcaagatgtggtggtgcatgcctgtcatccaagctactcaagagactgaggcaggaggatcacgtgagcccaggaattcaaggctgcagtgaactatgattgcatcactgcactgcagcctgggcaacatagcaagactctgtctcaaaataataataataataataataaaggcattgttagcttgtaaggagtggagtatgtaggtagtaggagttatatgcaagtacccaagtggtattcttccaatcttattagaagcatgaatattcaagattgatactactattgcttattagcaagattgttatcaatcatgcttattagaaggatgaatatccaagaccaagattgactaatgatgagtctgcatcaagaactaggcatttcttctgagttgacggactctttaggaaaggagaatctaagtgaagcactgattttagctctgagaacaaacaaattaaggtacagcatagttagccttggtagaggtatgacttggatttgctgtatcctttaaaatagtatctgggcatttattttattgaaggtgactacattttattagttatattaggaatttaggtagaatcaacttctactgattacaggttgaatttctgtcactttgtagagaaacgaatagactggacactgtgtggtcactgtttagatttgcccatgggtctgtttaaatctatgtcatggatcctgagacacaaatataattaagacaggtctagagacaggagaagcagaaataagttgacccaggagtacagtctcaagtagttcattaatgagaaaattgacatctgacaagagtctttttactttatgctggatgaaaatccaaatcttgttttattttttccactaaaagtgactaaaataataacgaatttcatttgttcttgggttcttttttcctttaatgattgtgctataacttaaaataatgatgttacttttgaacaaacttaaagaaatatttttaaagcgtatctgaaaacgattgatgtttataactctcttttggcttcaaaataagattgtgttatcaccattttggtagatgaggttgtctggtgaaaatgatgcatatgagttgtactgttcagtgtacatcctgcagtagtggatgattgaaaacatatataagtggagtataaattaaaaattaatttggtttcttctatttcttttttntttttttttttttttgagacagagtctcgctctgtcgcccaggctggagtgcactggcgcgatctcggctcactgtaagctccgcctcccgggttcacgccatcctcctgcctcagcctcccaagtagctgggactactggcacccaccacgacgcccggctgtttttttgtatttttaggagagacggggtttcnccgtgttngccaggatggtctcgatctcctgacgtcgtgatccacccgcctcggccccccacagtgctgggattacaggcntgagccaccgcgcccggcctgttccttttatttcttaattcaggacactaaaccatgactgcaagggatttccttggtaaaaagaaaagattctcagagtcaaaatgttcttacaactcgggcttgacggcctttgaattatgaatggattgttcctctctctgaagcctattgtcacatgggtttttaatcctggccttgctgctagaaatctgtgcttgaagtcctctctttctgctggtagcctaccagttaaaagtcaagacttggtggaactcagtttaccagactctttagcctttgagctaaactgtctgagcaacctcttagatgtgcacacaccactttgtatgaaagggttctctagaacggttctttggagagaaatattttcatgtacgtttgacaggggtgtaaataaagcatgctgactaataagtcttttactcttcatctaatgaacataagaatctatgcatccagatattattttgtatacaaatatttaatttggtgattgataatctctctttggggtagtcacatggaaagctcttttaaatttaacttccgcctttggattttttttaaaaagccattgaagagcaaaactaatgtaaacgtcttgatcatttaaaaagcttgcttgtcctcgaaaggaaacacaggtcatcagtgagtataaacgtagacagttgatttgtgaatgctgtcggcctcaacttgcttgatgatagattctactgacctagctggagtaatctgatcacttacttccttattaatactagatcacacagtgtctttcttattccttcttctttacttactggcatcagcacagagtcccactagctgaaatagaagggagagtttgggggtttattggaggagtcttaaaaacttggttggcagctgggtacgatgactcacacctgtactcccagcacttcaggaagctgaggtgggtggatcagctgaggtcaggagtttgagaccagcctgaccaacatggtgaaaccccgtctttattaaatacaaaaaattagccaggttggtggcgcatgcctgtaatcccagctacttgggaggctgaggcaggagaatcgcttgaacctgggaggcggaggttgcagtgagccgagattgtgccattgcactccaacctgggcaacaagagtgaaactccatctccaacaaaacaaaactttgctggcttcctgatgcctcactgtctatttgaggaattccacagaatcttcaaaggatttgggggaaagcgcattaacatggacaaaggatggaatcaaaataatgttatagtgagaatcattcaagcacctatttaaattttttccaattgccagtatagtgatgatatgacaccagcatatcaaagtaactaacaaactagctacacaaacgtcttggagtttggtttcgttctcttttctcatcatagatctccgtgcagaatagtgctaattcttatttctcgtttgcctttctatttccttccaaattctacatgccagtaattcctctgtcttttaagtgaccatcaattcaataggcaaaaatttggagtaatccagagaaaaaaccatccaaatataaaccagctaggaacatgaatgcccctgattattaatggccaaaaaaaaaagcactggtggattttaaattaaattaatacatatatacgagtttggaggagaacagaagttctaactcagtacttgaacttggtgggggagggcacaggttaaatatgagctgtgagcccccagttttggaggaaggaggaaatgggaaccaaccaccagacaagcagctgcagtcta

SEQ ID NO: 94685 - DNA, 6606 bp, Homo sapiens
  misc_feature (4485)..(4485): n is a, c, g, or t
  misc_feature (4681)..(4681): n is a, c, g, or t
  misc_feature (4689)..(4689): n is a, c, g, or t
  misc_feature (4762)..(4762): n is a, c, g, or t
tgcttttactgtatcataattttgaaagtgcctagtaaggaggggttattagtgtcctgatgtatttcagaagcagcaaactaatcatctttgaatagtggtagatatcttttcaggtagaaaaatttcatcagtaatgccaataagtacaaatataggctctaatgatttcttttaatatttctggaaagtaattagattatatatctgtgatagaatataatactaagtattagactgtagaaggctttgtttcaaggtgtttattcattcatgttactacctacctcaatcataacatcagtaagacctcaatgatctaaatctttgggctttgtaaatcctgaattacttaggtctctgctactggaaagtgaatatcaaaaattgtctatttaagaaaaaaagtagtttttataatctgagttgtatactgcacccatagagatcattttaaatgtagcaatgaatagagattggataaaaacaatgttaaaaattcttttctaattcaagttcaaattttaaaaatttgaaaggcatgttttagtgtataaataatagaaaagttgttgacagttgtttgttttgcagtcagcaagtggtaagaatctttggagagacaacaggagaataaaagccgaaacatgcgtatatacaaaatgaaatatgaatgtgagcttagaggctacacgtggtctctcggatactagaactatctttcttgccttggaccagctaacgtgccttggttgcgccagtgtactgagccctgtggacatcacctcattaaatattcaataaatgttatttttttcctattgcctttctctcttctatatgagaatctgtaagtattcgccgaaggcttttcttttgcttttgtgaataccttcacaccatgttgtattctgtcttggttagttaaaaaaaaaaaaaaagttggccaggcacagtggcttgcacctgtaatcccagcactttgggaggccgaggcaggcggatcacctgaggttgggagttcgagaccaacctgaccaacatggagaaacccatctctactaaaaatacaaaattatccggtcatggtggcacgcgcctatgatcccacctactcgggaggctaaggcaagagaattgcttgaacccgtgaggcagaggttgcagtgaaccgagattgcgccactgcactccagcctgggtgactgagggagactctgtctcaaaataaataaataaataaaaggttaattatatttcttgttatgagacaaatgaagtatttcacattttccattgacgatagcatgtaacgcaggtttttctcttataggttgtgggactggaaaatatcttaaagtgaacagccaggtacataccgtgggctgtgactactgtgggccactggtagagattgcccggaatagaggatgtgaagccatgtcatacatcatttttctacaaaacaaagaagaatcagagcaataaaagaaatggccagggtcttagttcccggaggccaactgatgatttacgtttgggcaatggaacaaaagaaccgtcgctttgagaagcaagacgtgcttgttccatggaacagggccctgtgttcccagctcttctcagagtccagccagtctgggaggaagaggcagtgtggatacccagaaagaggccatccctaccatcctccttgctctgagtgtagctgttctgtttgttttaaagagcagggtggttcaaaacggtcccacagcgtgggctatgaacctgctatggcaagaacctgttttgcaaatatttctaaggaaggcgaggaagaatatggattttacagcacattaggaaaatcgtttcgttcctggtttttctccagatctttggatgaatcgactctgaggaagcaaattgaaagagtaagacccttgaaaaacacagaagtttgggccagtagcactgtaacagtccagccttccagacactctagtctagactttgatcaccaagagccattttcaacaaaagagcaaagtttagatgaggaagtgtttgtggaatcttcttctggaaaacacttggagtggctgagagcaccaggcactctgaaacatttaaatggagaccatcaaggggaaatgaggagaaatggagggggaaattttctggatagcactaatactggtgtgaattgtgtggatgcaggcaacatagaagatgataatccttctgctagtaaaatattgagaaggatttctgcagtcgattccacagatttcaacccagatgatacaatgtctgtcgaagatccacagactgatgttttggactccacagcctttatgcgctactaccatgtgtttcgagaaggggagctctgcagtctgctcaaggagaatgtgtcagagctccgtatcctgagttctgggaatgatcatggtaactggtgtatcattgcagagaaaaagggaggttgtgattgattggatccttttagacaactcctccaaaagatgaaccacattcttttctcttggtttgatatggttacctgaatttgcattcagtgttatttgttaatccatttacgctttggtctgcagagactattaattatttggttgtttttgttttcatgtttgaataagcacagattctggcattgaaagcacttgacaaagggtatttgtgcttaaatgttaatataaaagatctgaagaagcaacagaaagtacccttcagtacacctcagacttttttttaaccccagagagataaaatacatgtatagtgtttttcagtattacacattgatttaaaaagattatgctgttaaataatcttttaaaacggtatttttataaagtgaggggataatttctggttctcaggttataactgagagcagtgtgcaagataataggtaaatttgatccattgcacagatatactttgaaccatgtgatgagttatcttgttgccaaggccttgcttctacttaaagttttcagaaaactgagtgacagtggagagaaccaagaagttttacaaggactttactaaattataagcaaacttgcttcaaaataagttgacatgtgataataaggttttcaatgtagcccaggaggtttttaaaggcactgttaggctgagcatggtggctcatgcctgtaatcccagcactttgggaggccaaggcagaagcatcacttgaacccaggagttcaagaatagcctgggcaacatagcaagaccccatctctataaaaattagcaagatgtggtggtgcatgcctgtcatccaagctactcaagagactgaggcaggaggatcacgtgagcccaggaattcaaggctgcagtgaactatgattgcatcactgcactgcagcctgggcaacatagcaagactctgtctcaaaataataataataataataataaaggcattgttagcttgtaaggagtggagtatgtaggtagtaggagttatatgcaagtacccaagtggtattcttccaatcttattagaagcatgaatattcaagattgatactactattgcttattagcaagattgttatcaatcatgcttattagaaggatgaatatccaagaccaagattgactaatgatgagtctgcatcaagaactaggcatttcttctgagttgacggactctttaggaaaggagaatctaagtgaagcactgattttagctctgagaacaaacaaattaaggtacagcatagttagccttggtagaggtatgacttggatttgctgtatcctttaaaatagtatctgggcatttattttattgaaggtgactacattttattagttatattaggaatttaggtagaatcaacttctactgattacaggttgaatttctgtcactttgtagagaaacgaatagactggacactgtgtggtcactgtttagatttgcccatgggtctgtttaaatctatgtcatggatcctgagacacaaatataattaagacaggtctagagacaggagaagcagaaataagttgacccaggagtacagtctcaagtagttcattaatgagaaaattgacatctgacaagagtctttttactttatgctggatgaaaatccaaatcttgttttattttttccactaaaagtgactaaaataataacgaatttcatttgttcttgggttcttttttcctttaatgattgtgctataacttaaaataatgatgttacttttgaacaaacttaaagaaatatttttaaagcgtatctgaaaacgattgatgtttataactctcttttggcttcaaaataagattgtgttatcaccattttggtagatgaggttgtctggtgaaaatgatgcatatgagttgtactgttcagtgtacatcctgcagtagtggatgattgaaaacatatataagtggagtataaattaaaaattaatttggtttcttctatttcttttttntttttttttttttttgagacagagtctcgctctgtcgcccaggctggagtgcactggcgcgatctcggctcactgtaagctccgcctcccgggttcacgccatcctcctgcctcagcctcccaagtagctgggactactggcacccaccacgacgcccggctgtttttttgtatttttaggagagacggggtttcnccgtgttngccaggatggtctcgatctcctgacgtcgtgatccacccgcctcggccccccacagtgctgggattacaggcntgagccaccgcgcccggcctgttccttttatttcttaattcaggacactaaaccatgactgcaagggatttccttggtaaaaagaaaagattctcagagtcaaaatgttcttacaactcgggcttgacggcctttgaattatgaatggattgttcctctctctgaagcctattgtcacatgggtttttaatcctggccttgctgctagaaatctgtgcttgaagtcctctctttctgctggtagcctaccagttaaaagtcaagacttggtggaactcagtttaccagactctttagcctttgagctaaactgtctgagcaacctcttagatgtgcacacaccactttgtatgaaagggttctctagaacggttctttggagagaaatattttcatgtacgtttgacaggggtgtaaataaagcatgctgactaataagtcttttactcttcatctaatgaacataagaatctatgcatccagatattattttgtatacaaatatttaatttggtgattgataatctctctttggggtagtcacatggaaagctcttttaaatttaacttccgcctttggattttttttaaaaagccattgaagagcaaaactaatgtaaacgtcttgatcatttaaaaagcttgcttgtcctcgaaaggaaacacaggtcatcagtgagtataaacgtagacagttgatttgtgaatgctgtcggcctcaacttgcttgatgatagattctactgacctagctggagtaatctgatcacttacttccttattaatactagatcacacagtgtctttcttattccttcttctttacttactggcatcagcacagagtcccactagctgaaatagaagggagagtttgggggtttattggaggagtcttaaaaacttggttggcagctgggtacgatgactcacacctgtactcccagcacttcaggaagctgaggtgggtggatcagctgaggtcaggagtttgagaccagcctgaccaacatggtgaaaccccgtctttattaaatacaaaaaattagccaggttggtggcgcatgcctgtaatcccagctacttgggaggctgaggcaggagaatcgcttgaacctgggaggcggaggttgcagtgagccgagattgtgccattgcactccaacctgggcaacaagagtgaaactccatctccaacaaaacaaaactttgctggcttcctgatgcctcactgtctatttgaggaattccacagaatcttcaaaggatttgggggaaagcgcattaacatggacaaaggatggaatcaaaataatgttatagtgagaatcattcaagcacctatttaaattttttccaattgccagtatagtgatgatatgacaccagcatatcaaagtaactaacaaactagctacacaaacgtcttggagtttggtttcgttctcttttctcatcatagatctccgtgcagaatagtgctaattcttatttctcgtttgcctttctatttccttccaaattctacatgccagtaattcctctgtcttttaagtgaccatcaattcaataggcaaaaatttggagtaatccagagaaaaaaccatccaaatataaaccagctaggaacatgaatgcccctgattattaatggccaaaaaaaaaagcactggtggattttaaattaaattaatacatatatacgagtttggaggagaacagaagttctaactcagtacttgaacttggtgggggagggcacaggttaaatatgagctgtgagcccccagttttggaggaaggaggaaatgggaaccaaccaccagacaagcagctgcagtcta

SEQ ID NO: 94686 - DNA, 5852 bp, Homo sapiens
  misc_feature (3731)..(3731): n is a, c, g, or t
  misc_feature (3927)..(3927): n is a, c, g, or t
  misc_feature (3935)..(3935): n is a, c, g, or t
  misc_feature (4008)..(4008): n is a, c, g, or t
gcgtcgtaccaatcagtttacacaagccatcatttccatcctgatttagtcaatcatgtcaggtccgttttggtggaggatgtacacaaaggccctgaagagccactgtctaaaggtaaagtttgaggccaggcacggtggcccaagcctgtaatcccagcactttgggaggccgaggcaggcggatcacctgaggttgggagttcgagaccaacctgaccaacatggagaaacccatctctactaaaaatacaaaattatccggtcatggtggcacgcgcctatgatcccacctactcgggaggctaaggcaagagaattgcttgaacccgtgaggcagaggttgcagtgaaccgagattgcgccactgcactccagcctgggtgactgagggagactctgtctcaaaataaataaataaataaaaggttaattatatttcttgttatgagacaaatgaagtatttcacattttccattgacgatagcatgtaacgcaggtttttctcttataggttgtgggactggaaaatatcttaaagtgaacagccaggtacataccgtgggctgtgactactgtgggccactggtagagattgcccggaatagaggatgtgaagccatggtatgtgacaaccttaatctcccctttagggatgagggcttcgatgccatcatctccataggagtcatacatcatttttctacaaaacaaagaagaatcagagcaataaaagaaatggccagggtcttagttcccggaggccaactgatgatttacgtttgggcaatggaacaaaagaaccgtcgctttgagaagcaagacgtgcttgttccatggaacagggccctgtgttcccagctcttctcagagtccagccagtctgggaggaagaggcagtgtggatacccagaaagaggccatccctaccatcctccttgctctgagtgtagctgttctgtttgttttaaagagcagggtggttcaaaacggtcccacagcgtgggctatgaacctgctatggcaagaacctgttttgcaaatatttctaaggaaggcgaggaagaatatggattttacagcacattaggaaaatcgtttcgttcctggtttttctccagatctttggatgaatcgactctgaggaagcaaattgaaagagtaagacccttgaaaaacacagaagtttgggccagtagcactgtaacagtccagccttccagacactctagtctagactttgatcaccaagagccattttcaacaaaagagcaaagtttagatgaggaagtgtttgtggaatcttcttctggaaaacacttggagtggctgagagcaccaggcactctgaaacatttaaatggagaccatcaaggggaaatgaggagaaatggagggggaaattttctggatagcactaatactggtgtgaattgtgtggatgcaggcaacatagaagatgataatccttctgctagtaaaatattgagaaggatttctgcagtcgattccacagatttcaacccagatgatacaatgtctgtcgaagatccacagactgatgttttggactccacagcctttatgcgctactaccatgtgtttcgagaaggggagctctgcagtctgctcaaggagaatgtgtcagagctccgtatcctgagttctgggaatgatcatggtaactggtgtatcattgcagagaaaaagggaggttgtgattgattggatccttttagacaactcctccaaaagatgaaccacattcttttctcttggtttgatatggttacctgaatttgcattcagtgttatttgttaatccatttacgctttggtctgcagagactattaattatttggttgtttttgttttcatgtttgaataagcacagattctggcattgaaagcacttgacaaagggtatttgtgcttaaatgttaatataaaagatctgaagaagcaacagaaagtacccttcagtacacctcagacttttttttaaccccagagagataaaatacatgtatagtgtttttcagtattacacattgatttaaaaagattatgctgttaaataatcttttaaaacggtatttttataaagtgaggggataatttctggttctcaggttataactgagagcagtgtgcaagataataggtaaatttgatccattgcacagatatactttgaaccatgtgatgagttatcttgttgccaaggccttgcttctacttaaagttttcagaaaactgagtgacagtggagagaaccaagaagttttacaaggactttactaaattataagcaaacttgcttcaaaataagttgacatgtgataataaggttttcaatgtagcccaggaggtttttaaaggcactgttaggctgagcatggtggctcatgcctgtaatcccagcactttgggaggccaaggcagaagcatcacttgaacccaggagttcaagaatagcctgggcaacatagcaagaccccatctctataaaaattagcaagatgtggtggtgcatgcctgtcatccaagctactcaagagactgaggcaggaggatcacgtgagcccaggaattcaaggctgcagtgaactatgattgcatcactgcactgcagcctgggcaacatagcaagactctgtctcaaaataataataataataataataaaggcattgttagcttgtaaggagtggagtatgtaggtagtaggagttatatgcaagtacccaagtggtattcttccaatcttattagaagcatgaatattcaagattgatactactattgcttattagcaagattgttatcaatcatgcttattagaaggatgaatatccaagaccaagattgactaatgatgagtctgcatcaagaactaggcatttcttctgagttgacggactctttaggaaaggagaatctaagtgaagcactgattttagctctgagaacaaacaaattaaggtacagcatagttagccttggtagaggtatgacttggatttgctgtatcctttaaaatagtatctgggcatttattttattgaaggtgactacattttattagttatattaggaatttaggtagaatcaacttctactgattacaggttgaatttctgtcactttgtagagaaacgaatagactggacactgtgtggtcactgtttagatttgcccatgggtctgtttaaatctatgtcatggatcctgagacacaaatataattaagacaggtctagagacaggagaagcagaaataagttgacccaggagtacagtctcaagtagttcattaatgagaaaattgacatctgacaagagtctttttactttatgctggatgaaaatccaaatcttgttttattttttccactaaaagtgactaaaataataacgaatttcatttgttcttgggttcttttttcctttaatgattgtgctataacttaaaataatgatgttacttttgaacaaacttaaagaaatatttttaaagcgtatctgaaaacgattgatgtttataactctcttttggcttcaaaataagattgtgttatcaccattttggtagatgaggttgtctggtgaaaatgatgcatatgagttgtactgttcagtgtacatcctgcagtagtggatgattgaaaacatatataagtggagtataaattaaaaattaatttggtttcttctatttcttttttntttttttttttttttgagacagagtctcgctctgtcgcccaggctggagtgcactggcgcgatctcggctcactgtaagctccgcctcccgggttcacgccatcctcctgcctcagcctcccaagtagctgggactactggcacccaccacgacgcccggctgtttttttgtatttttaggagagacggggtttcnccgtgttngccaggatggtctcgatctcctgacgtcgtgatccacccgcctcggccccccacagtgctgggattacaggcntgagccaccgcgcccggcctgttccttttatttcttaattcaggacactaaaccatgactgcaagggatttccttggtaaaaagaaaagattctcagagtcaaaatgttcttacaactcgggcttgacggcctttgaattatgaatggattgttcctctctctgaagcctattgtcacatgggtttttaatcctggccttgctgctagaaatctgtgcttgaagtcctctctttctgctggtagcctaccagttaaaagtcaagacttggtggaactcagtttaccagactctttagcctttgagctaaactgtctgagcaacctcttagatgtgcacacaccactttgtatgaaagggttctctagaacggttctttggagagaaatattttcatgtacgtttgacaggggtgtaaataaagcatgctgactaataagtcttttactcttcatctaatgaacataagaatctatgcatccagatattattttgtatacaaatatttaatttggtgattgataatctctctttggggtagtcacatggaaagctcttttaaatttaacttccgcctttggattttttttaaaaagccattgaagagcaaaactaatgtaaacgtcttgatcatttaaaaagcttgcttgtcctcgaaaggaaacacaggtcatcagtgagtataaacgtagacagttgatttgtgaatgctgtcggcctcaacttgcttgatgatagattctactgacctagctggagtaatctgatcacttacttccttattaatactagatcacacagtgtctttcttattccttcttctttacttactggcatcagcacagagtcccactagctgaaatagaagggagagtttgggggtttattggaggagtcttaaaaacttggttggcagctgggtacgatgactcacacctgtactcccagcacttcaggaagctgaggtgggtggatcagctgaggtcaggagtttgagaccagcctgaccaacatggtgaaaccccgtctttattaaatacaaaaaattagccaggttggtggcgcatgcctgtaatcccagctacttgggaggctgaggcaggagaatcgcttgaacctgggaggcggaggttgcagtgagccgagattgtgccattgcactccaacctgggcaacaagagtgaaactccatctccaacaaaacaaaactttgctggcttcctgatgcctcactgtctatttgaggaattccacagaatcttcaaaggatttgggggaaagcgcattaacatggacaaaggatggaatcaaaataatgttatagtgagaatcattcaagcacctatttaaattttttccaattgccagtatagtgatgatatgacaccagcatatcaaagtaactaacaaactagctacacaaacgtcttggagtttggtttcgttctcttttctcatcatagatctccgtgcagaatagtgctaattcttatttctcgtttgcctttctatttccttccaaattctacatgccagtaattcctctgtcttttaagtgaccatcaattcaataggcaaaaatttggagtaatccagagaaaaaaccatccaaatataaaccagctaggaacatgaatgcccctgattattaatggccaaaaaaaaaagcactggtggattttaaattaaattaatacatatatacgagtttggaggagaacagaagttctaactcagtacttgaacttggtgggggagggcacaggttaaatatgagctgtgagcccccagttttggaggaaggaggaaatgggaaccaaccaccagacaagcagctgcagtcta

SEQ ID NO: 94687 - DNA, 1593 bp, Homo sapiens
tgcttttactgtatcataattttgaaagtgcctagtaaggaggggttattagtgtcctgatgtatttcagaagcagcaaactaatcatctttgaatagtggtagatatcttttcaggtagaaaaatttcatcagtaatgccaataagtacaaatataggctctaatgatttcttttaatatttctggaaagtaattagattatatatctgtgatagaatataatactaagtattagactgtagaaggctttgtttcaaggtgtttattcattcatgttactacctacctcaatcataacatcagtaagacctcaatgatctaaatctttgggctttgtaaatcctgaattacttaggtctctgctactggaaagtgaatatcaaaaattgtctatttaagaaaaaaagtagtttttataatctgagttgtatactgcacccatagagatcattttaaatgtagcaatgaatagagattggataaaaacaatgttaaaaattcttttctaattcaagttcaaattttaaaaatttgaaaggcatgttttagtgtataaataatagaaaagttgttgacagttgtttgttttgcagtcagcaagtggtaagaatctttggagagacaacaggagaataaaagccgaaacatgcgtatatacaaaatgaaatatgaatgtgagcttagaggctacacgtggtctctcggatactagaactatctttcttgccttggaccagctaacgtgccttggttgcgccagtgtactgagccctgtggacatcacctcattaaatattcaataaatgttatttttttcctattgcctttctctcttctatatgagaatctgtaagtattcgccgaaggcttttcttttgcttttgtgaataccttcacaccatgttgtattctgtcttggttagttaaaaaaaaaaaaaaagttggccaggcacagtggcttgcacctgtaatcccagcactttgggaggccgaggcaggcggatcacctgaggttgggagttcgagaccaacctgaccaacatggagaaacccatctctactaaaaatacaaaattatccggtcatggtggcacgcgcctatgatcccacctactcgggaggctaaggcaagagaattgcttgaacccgtgaggcagaggttgcagtgaaccgagattgcgccactgcactccagcctgggtgactgagggagactctgtctcaaaataaataaataaataaaaggttaattatatttcttgttatgagacaaatgaagtatttcacattttccattgacgatagcatgtaacgcaggtttttctcttataggttgtgggactggaaaatatcttaaagtgaacagccaggtacataccgtgggctgtgactactgtgggccactggtagagattgcccggaatagaggatgtgaagccatggtatgtgacaaccttaatctcccctttagggatgagggcttcgatgccatcatctccataggaggtaaggcagccagatcacacattcaccctttgccatgagaataattgacccggtttagtccgttctcatgagtcaacatccgttct

SEQ ID NO: 94688 - DNA, 5161 bp, Homo sapiens
  misc_feature (3040)..(3040): n is a, c, g, or t
  misc_feature (3236)..(3236): n is a, c, g, or t
  misc_feature (3244)..(3244): n is a, c, g, or t
  misc_feature (3317)..(3317): n is a, c, g, or t
tgatacatcatatgtacgacacacagaagattcaaatgaataccatcctgggtccggctctccatgccgggaggcaactgatgctaatgtctggtcatgtggcatcaactgaaccgtgggtgagatagtcaagacgtgcttgttccatggaacagggccctgtgttcccagctcttctcagagtccagccagtctgggaggaagaggcagtgtggatacccagaaagaggccatccctaccatcctccttgctctgagtgtagctgttctgtttgttttaaagagcagggtggttcaaaacggtcccacagcgtgggctatgaacctgctatggcaagaacctgttttgcaaatatttctaaggaaggcgaggaagaatatggattttacagcacattaggaaaatcgtttcgttcctggtttttctccagatctttggatgaatcgactctgaggaagcaaattgaaagagtaagacccttgaaaaacacagaagtttgggccagtagcactgtaacagtccagccttccagacactctagtctagactttgatcaccaagagccattttcaacaaaagagcaaagtttagatgaggaagtgtttgtggaatcttcttctggaaaacacttggagtggctgagagcaccaggcactctgaaacatttaaatggagaccatcaaggggaaatgaggagaaatggagggggaaattttctggatagcactaatactggtgtgaattgtgtggatgcaggcaacatagaagatgataatccttctgctagtaaaatattgagaaggatttctgcagtcgattccacagatttcaacccagatgatacaatgtctgtcgaagatccacagactgatgttttggactccacagcctttatgcgctactaccatgtgtttcgagaaggggagctctgcagtctgctcaaggagaatgtgtcagagctccgtatcctgagttctgggaatgatcatggtaactggtgtatcattgcagagaaaaagggaggttgtgattgattggatccttttagacaactcctccaaaagatgaaccacattcttttctcttggtttgatatggttacctgaatttgcattcagtgttatttgttaatccatttacgctttggtctgcagagactattaattatttggttgtttttgttttcatgtttgaataagcacagattctggcattgaaagcacttgacaaagggtatttgtgcttaaatgttaatataaaagatctgaagaagcaacagaaagtacccttcagtacacctcagacttttttttaaccccagagagataaaatacatgtatagtgtttttcagtattacacattgatttaaaaagattatgctgttaaataatcttttaaaacggtatttttataaagtgaggggataatttctggttctcaggttataactgagagcagtgtgcaagataataggtaaatttgatccattgcacagatatactttgaaccatgtgatgagttatcttgttgccaaggccttgcttctacttaaagttttcagaaaactgagtgacagtggagagaaccaagaagttttacaaggactttactaaattataagcaaacttgcttcaaaataagttgacatgtgataataaggttttcaatgtagcccaggaggtttttaaaggcactgttaggctgagcatggtggctcatgcctgtaatcccagcactttgggaggccaaggcagaagcatcacttgaacccaggagttcaagaatagcctgggcaacatagcaagaccccatctctataaaaattagcaagatgtggtggtgcatgcctgtcatccaagctactcaagagactgaggcaggaggatcacgtgagcccaggaattcaaggctgcagtgaactatgattgcatcactgcactgcagcctgggcaacatagcaagactctgtctcaaaataataataataataataataaaggcattgttagcttgtaaggagtggagtatgtaggtagtaggagttatatgcaagtacccaagtggtattcttccaatcttattagaagcatgaatattcaagattgatactactattgcttattagcaagattgttatcaatcatgcttattagaaggatgaatatccaagaccaagattgactaatgatgagtctgcatcaagaactaggcatttcttctgagttgacggactctttaggaaaggagaatctaagtgaagcactgattttagctctgagaacaaacaaattaaggtacagcatagttagccttggtagaggtatgacttggatttgctgtatcctttaaaatagtatctgggcatttattttattgaaggtgactacattttattagttatattaggaatttaggtagaatcaacttctactgattacaggttgaatttctgtcactttgtagagaaacgaatagactggacactgtgtggtcactgtttagatttgcccatgggtctgtttaaatctatgtcatggatcctgagacacaaatataattaagacaggtctagagacaggagaagcagaaataagttgacccaggagtacagtctcaagtagttcattaatgagaaaattgacatctgacaagagtctttttactttatgctggatgaaaatccaaatcttgttttattttttccactaaaagtgactaaaataataacgaatttcatttgttcttgggttcttttttcctttaatgattgtgctataacttaaaataatgatgttacttttgaacaaacttaaagaaatatttttaaagcgtatctgaaaacgattgatgtttataactctcttttggcttcaaaataagattgtgttatcaccattttggtagatgaggttgtctggtgaaaatgatgcatatgagttgtactgttcagtgtacatcctgcagtagtggatgattgaaaacatatataagtggagtataaattaaaaattaatttggtttcttctatttcttttttntttttttttttttttgagacagagtctcgctctgtcgcccaggctggagtgcactggcgcgatctcggctcactgtaagctccgcctcccgggttcacgccatcctcctgcctcagcctcccaagtagctgggactactggcacccaccacgacgcccggctgtttttttgtatttttaggagagacggggtttcnccgtgttngccaggatggtctcgatctcctgacgtcgtgatccacccgcctcggccccccacagtgctgggattacaggcntgagccaccgcgcccggcctgttccttttatttcttaattcaggacactaaaccatgactgcaagggatttccttggtaaaaagaaaagattctcagagtcaaaatgttcttacaactcgggcttgacggcctttgaattatgaatggattgttcctctctctgaagcctattgtcacatgggtttttaatcctggccttgctgctagaaatctgtgcttgaagtcctctctttctgctggtagcctaccagttaaaagtcaagacttggtggaactcagtttaccagactctttagcctttgagctaaactgtctgagcaacctcttagatgtgcacacaccactttgtatgaaagggttctctagaacggttctttggagagaaatattttcatgtacgtttgacaggggtgtaaataaagcatgctgactaataagtcttttactcttcatctaatgaacataagaatctatgcatccagatattattttgtatacaaatatttaatttggtgattgataatctctctttggggtagtcacatggaaagctcttttaaatttaacttccgcctttggattttttttaaaaagccattgaagagcaaaactaatgtaaacgtcttgatcatttaaaaagcttgcttgtcctcgaaaggaaacacaggtcatcagtgagtataaacgtagacagttgatttgtgaatgctgtcggcctcaacttgcttgatgatagattctactgacctagctggagtaatctgatcacttacttccttattaatactagatcacacagtgtctttcttattccttcttctttacttactggcatcagcacagagtcccactagctgaaatagaagggagagtttgggggtttattggaggagtcttaaaaacttggttggcagctgggtacgatgactcacacctgtactcccagcacttcaggaagctgaggtgggtggatcagctgaggtcaggagtttgagaccagcctgaccaacatggtgaaaccccgtctttattaaatacaaaaaattagccaggttggtggcgcatgcctgtaatcccagctacttgggaggctgaggcaggagaatcgcttgaacctgggaggcggaggttgcagtgagccgagattgtgccattgcactccaacctgggcaacaagagtgaaactccatctccaacaaaacaaaactttgctggcttcctgatgcctcactgtctatttgaggaattccacagaatcttcaaaggatttgggggaaagcgcattaacatggacaaaggatggaatcaaaataatgttatagtgagaatcattcaagcacctatttaaattttttccaattgccagtatagtgatgatatgacaccagcatatcaaagtaactaacaaactagctacacaaacgtcttggagtttggtttcgttctcttttctcatcatagatctccgtgcagaatagtgctaattcttatttctcgtttgcctttctatttccttccaaattctacatgccagtaattcctctgtcttttaagtgaccatcaattcaataggcaaaaatttggagtaatccagagaaaaaaccatccaaatataaaccagctaggaacatgaatgcccctgattattaatggccaaaaaaaaaagcactggtggattttaaattaaattaatacatatatacgagtttggaggagaacagaagttctaactcagtacttgaacttggtgggggagggcacaggttaaatatgagctgtgagcccccagttttggaggaaggaggaaatgggaaccaaccaccagacaagcagctgcagtcta

SEQ ID NO: 94689 - DNA, 268 bp, Homo sapiens
cagcgcttggcccagagagctggccttctgagcagcatgtcagagctgataaagatgctggcgcctggcggccaccaaggccaccctggacaaccattctgccttctcattagcattgtgccactgttacctcacttgacaataacaactgccgtggaggatctgacaagcacaggtcgccccgaaggtgaaaggagaaaaggatctgaagacaaatcataaaaattgtttcaccctgtctggaaccatcacaagctgacccggtgct

SEQ ID NO: 94690 - DNA, 472 bp, Homo sapiens
caattcttttccctttcagatatcaagagtctttttctctaataatctcaaaatctgtaaagagttctaaaatctagccatttttatgtgcttaatacagatttagtttcagattccattgagcttgcaggggacttacaggtagataatttagcccattttacagtggaggcagtgaagggctaggaaatgtaaataactttcccaaatacacatggtgacagtgctagaacttaatcactcttttaaatattaagtccactgctatttgtattacatctcttttagcattttgagcttcttggtaattgttgaatgataagttttgtgttttcttaacagaatttgaggtccctgtaagtgaaagggtatttcgggttacagctgagaaatggtgcagactcctcagactgctctggctacgtaattttcagggcccagtgcaaaataaaagtgtgagatctccttttca

SEQ ID NO: 94691 - DNA, 201 bp, Homo sapiens
ccagtagccttggaatatctggtttccctgatggttatatttcttatcataattgatatcaatatcttataagggccaggcatggtggctcatgcctgtgatcccagcaccttgagagcccgaggcgggctgatcgcttgagcccagaagtttgagaccagcctgggcaacatggtgaaaccccatctctactaaaaatac

SEQ ID NO: 94692 - DNA, 365 bp, Homo sapiens
gccaggcagtggaggaaggtgcttgcgggagctgcgaacacacaacagtgtgtcggcatacttatagacaattactgaacaaattatatgctcagctagtatgcttcaatccaacattaggaaatcgtttcaagaaactgttttaaacatttttatagcaatgtatctttaatacttttctcagcatggggcagaagagaactttacatatttacttgcatgtactttacatctttttgtctgctgtacagatctgtaggcctattgtttttccttccactaattttgaagtgtctcagtttaaagcatatttgttggaattatattatgtatccatggttgtcctggataccttttctttgccc

SEQ ID NO: 94693 - DNA, 807 bp, Homo sapiens
agcggagtaattaaaagtgtagtactgacatcaatatacactaatagacaatgtaacagaattgagagtcagaaatagccctgtgatatatgtgactgattttaactaaagttacaaatgtggtttaatagagaaagcatagtagtttcaagaaatggtggtaaaactattggaaatccttatgcaaaaacaaaccaaatttccacctacactgagccacatataagaattaatacaaaatggattacagacctaagtgtaaaactaaaactctaaactgtgtaaaaaaaaaaaagagagaaaaatctgtgatcatggattgcctataacaaaagaacaaactgaaatggccttgttgcctggggtggcacccgaggttcttggtctcacgctgaggaaatcaaggacgctgacacaccaagggtgtgaggctagagcagaagtttaataggcaaaagaaagagactagctctctcctgcagagagaggtcctgaaaagagttcccattccacagtgaaatgcaagcatttttataaatgagctaatgggaagggggtagcttatctacacatagggagcaaaaaaccagttaggaccaggtgttgccatctgcacagagcgtgaatctctggcatcccccaccccaacctttcattatgcaggcaggtccttggcctgagctactccacattgcttatctctttcctattgtgcctgtgctaaataaggggaggtggagccaccatggtggacatgcctggccccaggtacccctttctctccgtgcagctgcaggcaaccccaac

SEQ ID NO: 94694 - DNA, 448 bp, Homo sapiens
ggggagggaggggctggcagcctatcgggtaggctcacctggtagcagggtgaccttgccctctggtctggccgcagttggggaattgagcctttttgcctgcaagctttctcctcctcctcacccatgccactgaggaaatggtaggaaatgattctgggaagttcttctcaaatttcattgtcattcttggcatggatggtcagaaccaggaagagacttgtcttgtaacagctttttgaggggatccacacatattcatcagaagaaagataaatttctgccaggcacagtggctcacacctataatcctagcattttgggaggctgaggtggggagattgcttgagaccagcctgggcaacatagtgaaaccctgtctctacaaaaattagccgggcgtggtggcacatgcctgtagtcccagctactctggaggctgaggtgg

SEQ ID NO: 94695 - DNA, 281 bp, Homo sapiens
gtgtgggcttagaggactggtagcctgggagagagcaatgagcctccatggaggggcctgtacaccgggaggtgctgggcaactcccatggctcatctcaaccacagtcctcggcggtttgttttctgcattagcttctcatgccagaacaccctcttatttgtttacctgcttagtgttggcctcttgcaggtagagtggccactccttggagggcaaggcctcttgtacttgttcgtcatcatatcctacgccgcagcggtgcctgtgcatgaaactga

SEQ ID NO: 94696 - DNA, 277 bp, Homo sapiens
aacgtccccccgtggctcctgggctaacggtgcacttctccgtcctgcttcactgccttatggcacgtgtccatttccccaaccaccggtgggccccgggtggcttggccggcctggtgtcccgtgcccagcatgggctctggcccaagttagcacttgctgcctaagtgcctctgccttttactcacctccatctggagcgggctcagtggggttcctgctggggctctacgggggcatccagactttgccctctgaccagccccactgtcctgtc

SEQ ID NO: 94697 - DNA, 666 bp, Homo sapiens
tacatctttaagtaatgtgcttataacttacaacattttttgatttatgttgacaacgcagtgggctccatgccatctctccagaaggctccccccttcctgacttcacctggagttttttcttctgccgcaggttcaagagccatattcgaatactctctgccttggaatagtgattctcacactggagctggcatcagaatcacctggggggcttgctgaagcacaggcccggcccggcactttctcatacagtgcgtctggagggaggcctgagcataagcgtttttgttttgttttgagatggagtcttgctctggtcgcccaggctggaatgcagtggtgtgatctcagctcactgcaacctctgcctcccgggttcaagtcattctcctgcctcagccttccaagtagctgggactacaggcatgcgccaccacgcccggctaatttttgtgtttttagtagagatggggttttgccatgttggccaggatagtcttgaactcctgacctcaagtgatctgcccacctcggcctcctaaagtgctgggattacaggcgtgagccaccgctccgggcagtgcataaatgtttttaatatgttctctgtggcgccgatgctactggtcgcaggatcccactttgtggagcactcccttagcg

SEQ ID NO: 94698 - DNA, 391 bp, Homo sapiens
ttgtccataatgtacagatggatgtagacaactgccctcagggctgtccgggggcaggaccaagcccagcaaccacacctcctgacacagccaggttctcccccaacggcggagctgacaggactgttcatggttcattgagtggacccagcaatacctcatcgataatccacagtcgagagaagaggggcggtcagagaccggccagccctcccttctgattgggagaggcctctgcaggcactgacaggctccagagagtgctgtggggggcagtcagtgtccatagtcccctggaatcttctctgggctgttttctctgacttttcacctgaaattaactgtacatagctgggctaggaactctctaaatctgaaagcatgtggctta

SEQ ID NO: 94699 - DNA, 570 bp, Homo sapiens
gtgctttcaaattcatttttagcagggcccacatggatggtaatatcatcattagtgatgcccaagtcccatgtaatcaaccacagaaggatattgctctgaaaacagaaggaacattggcaatcagagcttctgcagccgaaccatgcaggagagtgcctgctccgtctctgccagctgttggtaaggcactgtgagtgagatgagttgccttccctaaggcagaagccatgatttacatctggcaatcaactgtatcaatggtaggcagttagacagctgcagccttttgcagtgggctgtgctcaccctggatggtctttgtggttccagctattgtgtttcaggccccatttgtctctgccagctctgctattctcttttttaaagctaagccttggtttcacgaaacaattactgaattgaagcacttcagtaaaggaaaacgtcaccccagtcattcattgacaactcaaaaccagaagagaacttcgaagtttggagaatgttggttggacattctcagccacttatgtaccattattatgatttttacaatatccatgtact

SEQ ID NO: 94700 - DNA, 304 bp, Homo sapiens
ttaatatgctggtaatatggtagactatatttttttgaatattgaagcagccttgcataaactcttaggataaattctacttggtcgtgatcattctctatattttgctggattatatttgctaatatttgttggggatttttatgtctgtattcatgagggatattgatttgtagtttccttttctgtactatctttgttttggtatcagagtcataggttttctcatgaaataagttggaaagtgttttctcctcttccgttttctgaaagagattttgtagagtcaaggctatttcttctt

SEQ ID NO: 94701 - DNA, 356 bp, Homo sapiens
attgcattttctggaaaaaggcaaagaaattcaaacaagcctgtggtaaattatccagtaaaaataaaatgaaaagagtatagaactgcatcaatttcatagaaaggagaaacaaaatattaaatattaatccaaaagaaagcaaaagaggacacaggaacaaatttgaaacaagaaggataaacagcaaatcctaatagacttaacccccaaatgtcagtattaatattatatataaatgaatttaacgcttacctcaaatttcaaaaacagtaatgtcagaggtgtttgaaccacagcaactccatcttgagtaggggctggataaaatgaggctgagacctactgggctgcat

SEQ ID NO: 94702 - DNA, 440 bp, Homo sapiens
aaacatggtaacatctttcaaaaaccttgtcttgcttcaaccttctagccatataatttagcatccctgtactctttcactaagctttttaataacattgatactctgtgctgccacctcctattcgtctggtgcccaacttttgtgtttagtcctcatttcatgtaattttctgttatatgagacaccactgacacctctttctctcacttaccaaacaaaaaacaaactaaaatctcaccaagtcatcagaaccttctaattgtcatctactcttttcctatctttgacctctctttggcatctgatctattgacgtgtcccacagtgctccacacgtcctggttctacactctgtcctggctctctacctagccctctcttcagtgatttcttttccgccacacactgactctacataggatagcccacttcagtga

SEQ ID NO: 94703 - DNA, 359 bp, Homo sapiens
agaaggaaaaggtaagtaccctgaaggattgaaaggattaaatgaacattgagggatgagcaatttctgttcttccctggctccagcattaccaaagcacacagtaagaggactgacatcggcctccgacccagtgaggattactttcggggtggagggggaactgctaaacctcgaatctccgggactggccctggcgcgtttccagtcccagcagaaagggcaatccccatccagaccacactcctagtcctccttattcccacacagcccgtatcttgaccacccccagctccgccctctctcctcccacctccttttcccgctcccccgccccatttccttcttctccgcccacc

SEQ ID NO: 94704 - DNA, 387 bp, Homo sapiens
ccatgttgcccaggctggtctcgaactcctgacctcaggtgatccgcccatctcagccttccaaaatgctgggattacaggcgtgagccaccacacccggctgacatgggtattgtttgcctggggtctagtacaaggactgcagtgataataatgcctgcctacaatggagtgtcctaggcattgctcaaggtaatttttgcacagcatgctgacaaccttgaaacatcacacaggcataaaatctttttattattgatattcatgcagtcaagaatttgtcttaaaaccaaagagcaaaaatatcaattgtaaatatcaacagagattacaatagtcatcagtaatagctttcttactataagaatgttgtagtataattaaaaa

SEQ ID NO: 94705 - DNA, 335 bp, Homo sapiens
cattttgacagtttctttttaagttacatatatcttgccatgacccaaaatcccactcctcaatatttaccttagagaaatgaaaacagatgttcatacaacatatgttcacacacacacatatgttcacacgtgcccaaactgccaaaaactagaaccaacccctccatcaatgagtgaatagaaaaactgtttactgtggagtactattcagcaataaaaggaacaaactattaacacacatataaacttgggtgaatttcaaaggcattatgctgagtgaagaaaccagtctcaaaaattgatgattccaattacctgacattctagaaaga

SEQ ID NO: 94706 - DNA, 670 bp, Homo sapiens
agcacaaacaactgcatacggcccgaggggaggctgaaaaggacttgtgtgtggtggttttattgcctgtcatcactttgctggcctcctcccgactggagcctggaggttcacagtggatttctttctgccgaagacaccaaggcactgaggaaggatcccttctccttctgttgactctttctatttttatggtttaagtttatctattcatggggctgaaaagcgtttgcaaatccatcaacggcgaagtgtggcaagccgcccagcgtcacgtcgtcgcctgcctgtggtcaggcattcctcactcccaccaggcagaaggtcaataacaatggaggcaagctcttctggaatcactaatggaaaaaccaaagtcttccacccagtggccaaggatgtcaatattctttttgatgaattagaagctgtcagcagtccttgcaaagatgacgattctcttcttcaccctggaaacctgactagtacttcagatgatgccagcagattggaagccgggggagagacagtgccagaaagaaacaaatcaaatggactttactttcgagatggaaagtgtcgaattgactacatccttgtgtacagaaaatccaacccccagactgaaaagagagaagtatttgaaagaaacattagagcagaaggattg

SEQ ID NO: 94707 - DNA, 818 bp, Homo sapiens
agccctgtcagaggcagtatgtctcttttagccaacttttagtttttcatttttagatttctactatcttttcatgtcagccacagggaatgtgaaagctaagtaggtctgatcattataaacaaaatctacagaaaacaatagcaaagactcaggaaaatagatgcatttatttaggccagcttaatagcttagcatcaaggaatcttttgcctactgcctcttggttatcactgaccatttataaacatgaggccaggtgccgtggctcacgcctgtaatcccagcactttgggaggctgatgcaggtggatcacttgaggtcaggagttcgagaccagcctggccaacatgatgaaaccccatctctactaacaatacaaaaattagttgggtgcagtggcaggcacctgtaatcctagctacttgggaggcagagacaggagaattgcttgaacccaggaggcgaaggttgcagtgagtggagatcgtgccactgcactccagcctgggcgaccaagtgagagtccgtctcaaacaaaacaagcaaactaacaaaaagatgggatgaacaacctgatggttctggagcctttgccacataggtctcacctaaggtcaggccctatgagtgagacagcctgcttatatattgccttctgccttccagaatatttttattagtctttcaagagagctaagcatcaaataatttctcaaaaaattgtcaatgactcattgaaagttcatagaagcacaacagatccaaatttctcctgtggataatgtattgaaaagtggcaaaaggaaagagagag

SEQ ID NO: 94708 - DNA, 681 bp, Homo sapiens
aaaagggagccaccacccctgccagcaaaatgtcttctgcaaggagaccctcttccaattgttcctttccagagcatagctctgactggtagagcctccgtcacagtgcgcaccctgactgcaaaacagactaaatgaagacttggccatgcaagcaaggggaggtgagacctgatactgccagagaaggaatagggcactgtcaactcgctaactgggtcctagtattggctatgtaaccctagacaagttactttacatttctagacctcagttcagcagttggaacacgtggactttggattttcttcttcctggaacttcctttatgcactcatgtttgttactcacccatgtatttatccattgtccatgtctgcttgtcagttttagttacctcctacccccacctgtccaaggtgctcttgtcctcagaagatcccactggcatgaataagacagacttggaaacttttatcctagataaaactggtctggaacacataaaaagtatttccccaacaattttgattcacttcaattcctgaaatctaacttctgactttcaaagaaaattccactttggcagctgtacaggtaccaacaacagtttacccttacctggaagaagagccttggaggagaaaacacaccatgtcggtatgggtgtgacaaagtcta

SEQ ID NO: 94709 - DNA, 542 bp, Homo sapiens
tagagacggggtttctccatgttggtcaggctgttctcgaactcccaacctcaggtgatctgcctgccttggcctcccaaagtgctgggattacaggtgtgagccacagtgcctggcctaatttttgtatttttagtagagatgaggttttacgatgttggccaggctggtcttgaattcttgacctcaaatgatccactcacctcggcctcccaaagtgctgggattacagacgtgagccaccgcacctggccgggatttacttctatatgtaaaaaaacccagacctgcacaaaggattgggaagattggctttagatttatcaatagcagtgctgaaagctagaagacctcaaattctgagggaaattatttccagcctttaatttagcgttcatccaaattattgacaagacgtgtacataaaataaaaacctttttgggatctgtcatgtttgaattttccattcacacaccctttcttaggaagctatggagcactgtgagccactaaaacaggaagttgagaaagagggaagtac

SEQ ID NO: 94710 - DNA, 470 bp, Homo sapiens
tgttaatcctgctctcaagatgtaagtaaggtgtgtttcagacattattaaaatactgaaatagtggtatttgtaccaaaacactagtatctcattacttaccatgatatataacactgtataactgaatagtggaataccaaaattgaaattgcacactgcatctaatcctgtatgcatccaagtatattcttctgtgcctgtactgtctgcctttttcatgttttggacaaaactgtcatcctttgtgtacctcctctctgtgtccacgttcctattctcctccctcagtgcctttattctctcccttcccattgcttcctttgtatctgcttacacatgttcatatgtttctcttattttggaaaagaaagaaaaaggtcattcatttaatcttaacttgactattagtttcgttttctttccttccttccttccttccttctttctttcctttttttttttttttt

SEQ ID NO: 94711 - DNA, 272 bp, Homo sapiens
cagcttcctcacctgtaagatgcaagcaataagacgaattttagagggagttattaaatgatataatatatatacactgtagagcagagaacttgacacatagtcaaatgttcactaagtgtttatctcttccttttaaagtctggggtaaggctttttgactttaggccagagggagccgtagaaggttgtggaggatgaaattgataagattatatccatttgctgttatgtttgggtgttggtgttgtgtggaggatactggtccaaga

SEQ ID NO: 94712 - DNA, 120 bp, Homo sapiens
acatagggtcaggaccgagtttcctctcacaagactcctagccccaccttgaaatcaccggacgcgcttcgttgtccaggagccttctcgaagcggcgggacgtctccggaggttgggtg

SEQ ID NO: 94713 - DNA, 500 bp, Homo sapiens
tcttaagtattttactctttttggtactactgtaagtagatctttctcagtttcctttttggattgttcaatgttggcatataaaagtgtaagtgccaggcacagtgtcacatgcctatagttccagctactcaggaggctgagacaggaggattgcttgggcccaggagtttgagatttcagcatgctatgattgctcctgtgaatagccactgcactccagcctgggcaacataacaagacctcatttcgtaaaaaacacataatactgatttttgtgcattggttttgtatcctttgctgaatttgtttattctaacagttttttggggggtgtgtgggatctaggattttctagatacaatcatgtcatttgctaacagattttacttcttccaaatttggatgtcttttatttcttgttcttgcctaattgctgtacctagaacttcaaatactgtgttgaaggaaggaggcaaaaaaaaaaaaaaaaaaaaaaa

SEQ ID NO: 94714 - DNA, 298 bp, Homo sapiens
attggccagctgtgtgggcatatgaatgttacatactaacagtggtaaaatgagaattttaattgcaggggtctgcaaaggatattgcttgtgggccaagtgtgagtgctgcctgtttttgtaaataatgttttattgaaatatagccatgcccattcctttacacatcgcctatgtcctctttctccctaccacaactgagttgagccatgcaacgctgagaccttacatggccacgaaatctaaaatgtttttttctagctctgtacaaaaaagtgtgccaatctctattattatg

SEQ ID NO: 94715 - DNA, 948 bp, Homo sapiens
tcacttacttggaactttttatgcccctcttatgccaaataaacatgccattactttgtggtttagattgtgctgtgaattgtttgagaacccatctttctgatagcatatatggatctgttaaaatatcatcagtttgttggcttaatatcaatttattgaaaacagtcaaattcagatactcaaccagtggttaatttctagtccacggttcattctttgtaaatggatagtgaactaccttaccaggaatgtgacctgtcacccagtttttcccccgctacaaagctggaagacagagaaacttgaaatgttatcattattgttattgttgtagtttgccttcatgctttctatttaaatgctaatttagaaatataatggaaatgttggatatactattcaatgtattcagtgtgggatgcctttaaagtacaaacgcgttccttttctcctagtcttaagtaaaaattggtaagagtatcaagagaaaataatagcatatataatagttcatgttagagcttctgtcagtgttaaagtactttttaacttttttcatatttatatgtattatactgtcaaaatagcactttttcagggactgtgtaccaacatgattaacatgatgttttacccccaaaactgtgaatatgcaggaatatgttagtatggtggtagtttctgtaggtaagcagtaagaaaaataggtgaatacttattgaatatagtattaccttttcatgtaatagtacttagactaaggagaatgtcaaataattagtttattaaaatacttagttacagtttattatatactgtttttatacatgtgagtttagattatacctttggatatagttagtgattttaaatgagacatcttttagtgcccagctaactcagtcagtagagcacgagacccttaaataagacttctttttgtag

SEQ ID NO: 94716 - DNA, 765 bp, Homo sapiens
aggcttaagtaatcctcccacctcagcctcctgggtagctgagatcacaggcgcgcgccaccacaccaagctaattttttgatcgtctgtagagacgtgttctcacaatatggcccaggctggtgttgaactctcggagctcttagatgttgattcagactccttcatagtataataggcttaaaatggaaagactgtgcgtacaggaatttatcctaaggaagtaatgtgtcagatttgcgtatataaatttaatatcagttattaagaattttttttaaaattaaatattcaagttttgggaatctgctaattctgttgtgaaagtggaaatctatacagccacttaaaacagtatcgtaggtgaagagtatgatgggaaaatggtaacggtatacagttttaactggaaaggaaaatgttgtaaaactgctaatgtcgtttgattgttttttaaacgacaatgtaaacatgaaaatagagatataccccaaaatgtttgctcagatgttggcattgtttactccctgatgtttttctgaatttaccacgagaaataacatcaacttttgtaatgagagaaaaaaatgaaaaacatattttgtaaatactgtaactgcttaaaatattagagtcctctgtatttttaagcgaaattggcatagacaaactagctgcttcaagtctgaagtgaaaagtactgagaagtgacagaaagtagtgcttgtgtaacattttggatattgggtataagcaaacacagga

SEQ ID NO: 94717 - DNA, 1064 bp, Homo sapiens
tagatgcccagtagtggagtggctgaatcaaatggtatatctatttttggctctttgagaaatctccatactgttttgcacagaggttgtactaatttacatgcccaccagcactgtttaagagttcactttctccatatcctcaccaacatctgttagtttttgtctttttaataatagccattctaacatttgttttcttagtattgagttgtttcatttccctatatatttttggatattaaccccttatcatatgcatggtttgcaaatattttctcccattttgcaggttgtctcttcactctgttgattatttcttttgctgtgtagaagctttttagtttaagtcccatgcatctgtttttggttttgtttttgtttttcgattggggggatggagtttcgctcttgttgccaggctagagtgcaatggcacgatcttggctcacttcaacctctgcctcctgggttcaagagagtctcctgcctcagcctcctgggtagctgggattacaggcgcgcatccccacgtccagctaatttctttgtatttttagtaaagacgaggtttcaccatgttggccaggctggtcttgaactcctgacctcaggtgatccacctgcctcggtctcccacagtgctgagattataggcgtgagcctgtttttgttttaaaatccttaaggagatgtacacgaccccacaggacctgaccctggctcccggccagcctcacctcccatggctttcctgcccctgtattacctcacttccttcccctttagccatccttcgggcctcagttcaagttcacatcttcaggatggtagtctacgaccccttataccagttgagaccatcttttaggcattcctacctcaccacttgattttctttcagggtatttagtacatttgctgttgtaagataacgtgggccttttcatcaatggcagtctcccgtgctagaatacataatccagtactgcaggacatagctatatattgcttatccatgaattcccagtggcaaagccccagtagaatttcaatacatatat

SEQ ID NO: 94718 - DNA, 351 bp, Homo sapiens
attccaatctgagattttcaaatgtctatggagatcttctatatcatataaagtaagccaggtttacaaaactgtttacgactcatcttggatgcaaatattaccacacctagcttcatctcaaagccacctgctccttaaaacataatctgaaatactttggcctctccacaatttttaatctacaagtcatccaccattaagaaggcagatcattgaagataattttctccaccgtagactcaattccctaacccaagctagaattgagaaggttagcaaaatagtcatttattaatatatctatgtctctaatatttatttatgtgcttattatatctccctgttaga

SEQ ID NO: 94719 - DNA, 227 bp, Homo sapiens
tgattccccagggggtgcaaacaatcttcatcacccccccaacactaagaaaaaaaatgtcttcctgtcacgtggctgtcacttcctgtcccactgtggttcctgggatgtttgttgttggttgccatggtgatgtctgccgtgggcactacccctggttcttgtggggaaggagctacccctccccaccaggctgggggggtacttgggggacttgactagggggt

SEQ ID NO: 94720 - DNA, 742 bp, Homo sapiens
ggtaaccaccattctactatctgtttctttgagctcaattgttttaaattctatacataaatgagaacatgtagtattagtttttccttgcctggcttattttacttagcataatgctctccaggttcatctattttgccacaaatgacagaattttcttcctttttaagactgtgtagtatgccaccatgtatacgtacaatattgtacagcattgtaagtcatgctgcagtgaacatgggagtgcagatatctctttgacatactgatttcaaattctttggatacatacacagaagtggaattgctggattctattgtaattctatttttagtttttgagtaatctccatatagttttttgttatccccatgtcatttttcacagaaataggaaaaaatccaaaaattcatatggaaccacacacacacacacacacacacaaaagcaaggcaatattgagcaaaaagaacaaatctgaagacaccatactacctgattccaaactataatataaatctatagtaattaaaacagcatgggactggcataaaaatagacacatttgccaatggaatagaagaaagaaccaagaaatgaactcaaacatttacagtcaattgatttttgatgaaagtgcaagaatacaatgggaagaagaaagtctcttcaataaaaagtattgacaaacatgaagaaaaagaatgacattggatccttatctcactctttatagaataa

SEQ ID NO: 94721 - DNA, 591 bp, Homo sapiens
agcgaaatctgcaagcaggccctgagcaccaacgccagccgacctctgagaaagcagcttgggcagcataagctttgcaaaggaaaataaaatcctcagcatggagtctcaaacaagaaaaatagtgagatatttaaacctgaccatttctttttaaagacttgggtgttcttcagaaagggaatttccctcccaccccagaagggtccaaagtgttactcatattatttacagagctttgaagtgtgcctccaaagtttgagttcagctctgaagaatgtgaaggtcaaatcattttccctttctgatgaaggaaggctgtgaatttaataccacaatttattcaaaacaaggaaatacactgaggcactctccactattaatgcacaacagtagacggttggaaccatctcatactccaaagagtttatatggtttggccaacagtggtgatacatttaatgagcctctggttaatccattcctaccagactcagcacctgtaaaatgcaagacactttgcttctaataataggaattgagttaatttatttaaacaatgttagagtcatcattttctaaaagtaaaat

SEQ ID NO: 94722 - DNA, 455 bp, Homo sapiens
ctttacaataattattatagccaaagccaccatatattctgcatttcccaggatggtgtcagttttgaatgttgtttctttcaggcaggcatggtgaattttggttcagaaaacaggatcactctgtcacgctcttgagggtgaactgttggagagtcactgtggtgatcaaccaatgggtactccctagttcctggaactgagaacttcagtctggatacttctctataaatggtttcggtagactctgccactttccccggggatctgaaagagttctccaagaagcccccacttctcaggcggcaacagggcaggtacctgggcggtagcccttatgctactgttcataaatcaatctgagttttatgggtgctttttctgaggaaggagagatttaaagttatgtagcggcaacaaagctttctaataatatttttggcaggctgctaaag

SEQ ID NO: 94723 - DNA, 364 bp, Homo sapiens
attacttcgctttgttctgcttgtgacctagagtgaattttattcatagcaaaattagaccttactagcttcttatacctgaatggcctagaggtagagaaatttccagaacagccttattagagagtggggtgcatgacaagaccataatctaaagccagttttcagttttattatttactttgctgccttgatcatttttctgcactcatttggcttgaaggcatagacattccctgttgattatctcggcttggcagtgggtttctgctacacattttgattcctaatatggtagtaggagaggattttgtatgagttccagcgagtttctctgggcttgtggaatgcagcaaggaaagaa

SEQ ID NO: 94724 - DNA, 349 bp, Homo sapiens
taaccaatgacgacaaagcacaaggactccttcctcactttaaagtcaactttacatgtgatatgttttaaatttctacctgcgtatcctatctttaatattactataaagtactactaactttaaaaggctattttaggccgggcgcggtggctcacgcctgtaatcccagcactttgggaggccgaggcgggtggatcatgaggtcaggagatcgagaccatcctggctaacacggtgaaaccccgtctctactaaaaatacaaaaaattagccgggtgcggtggcgggcgcctgtagtcccagctactggggaggctgaggcaggagaatggcgtgaacccgggaa

SEQ ID NO: 94725 - DNA, 317 bp, Homo sapiens
tctgtctcatgcacgggagggctgggctcggggaagcagagaggagcgaaaaacgggatgcaggcaggaaccatggcccggaccctcagagccggagagcagccacgggccctggagtcaccttggcttcccctgcagagggatacacaccctggaggagattctgcctttcctacaacacagtgaaggccattaaaagctctggaggagggggaggggctacctgcggggacaccagatgacacgaagccctggggtttggcttcagtgaacttcttctcccagtgggaggaataccccaccactacacacacaca

SEQ ID NO: 94726 - DNA, 254 bp, Homo sapiens
aaaaagattattttacccatattaaagttgtcatttaagtgccagaagatgtgaaggatgcgaattaattagcctctcgttcagccacgggcactatgtcctggctggaagatgcctcctcccccttcctcctgttcactcatccctttattttatttgtttttattctaaatattatgccataagaggtattatttatttatttatgttttcacctatccctttaatagttccggggagcctgcttcctttca

SEQ ID NO: 94727 - DNA, 822 bp, Homo sapiens
tgccggcccgcgcccgttcttccgcccgtgccgccgcgtctggagctcggcgctcgcccggctgtccctcttccgggggccgcccgccgcgggcctccggagcggcgtcgccggccctttttttttgccggagaaccaaccggagtggcgaggagctgccttgagcgggcctttgtgcccgcagggcccccacggacatccgacagggggccccttacctggtcggctccacccgcagccatcttggaagtgggaagcggccgggagggggaaggggctcgagcgggcagggctcaggcgtagggagccgagcggcggagcgcatcgatggggctcccctgccccggccggtgtgcgggagacggcccgggccccgccgcggaagggaagctttgcgtgacaccggagctcaggccccgccgcggtggtcttgggagcggcgccgtggcgtcctcccagccagcctcagtctcttaatctataaagggcttttccgaacgttctctcttatcgcgctgtgacacggtgcctggcgctgtagttcccaaactggtctgcactttagtattgcctgcggagcttttaatattctgaagcccaggccgattaagtcacagtctctgaagatgagatggaagcatcatcagtttgggaagctgtgtaatgtgcacgcgggtttggaagccactggcctggcgttatctgcatatttggcctcaacattgcacaaactccagagacgggatctatgatcagagccattgtacaaagcgggaaacgggctcagagatgaagccctccgcccaaggacccgggtgggtc

SEQ ID NO: 94728 - DNA, 506 bp, Homo sapiens
gaatgaaccttgtttattcctgggcgtaggctgaactaactttgggaggaacttagtttatagtttaaaataaagatgggctgggcatggcatcccagcactttgggaggccgaggcgggtggattacttaaggtcaggagttcgagaccagcctggccaatatgctgaaaccccacctctactaaaaatacaaaaattagccgcacgtggtggtgtgtgcctgtaatctcagctactcaggaggctgaggcaggagaatcgcttgaatttgtggggtggaggttgcagtgagccaagattgcaccactgcattctagcctgggcagcacagtgagaccctgtatcaaaaacaaacaaacaaacatggtaacagccctttcccgaaacaagcctccttcttgcctggggactagattgcctttgtaggactaacaaagtagccacaagattagaaacaatggcttaggagtcacgcagctggaggctacaaaattctgaccctccc

SEQ ID NO: 94729 - DNA, 376 bp, Homo sapiens
cttgcctctctgcaacccctgcttcccaggttcaagcgactatcctgcctcagcctcccaagtagctggggttacaggcatgtgccgtcaggcctagcaattttttttaagtagagatggggtttcaccacgctggtcaggctggtctccaactcctgacctcaggtgatcctccagcttcagcctcccaaagtgctgggattaacaggcgtgagccaccacacctggcccagttctcctttcaaatgagggaatacatatgtgtttattcctgattcaggataagtgtagggcaccctccacccacttgtagtttttgttttttaaaagttttttttttttttgagaccagttcttgctttgtcattcaggctgg

SEQ ID NO: 94730 - DNA, 538 bp, Homo sapiens
gtgtccccggcatccactctctctcccttcttatcccttccgtgacggatgcctgaggaaccttccccaaactcttctgtcccatccctgccctgctcaaaatccaatcacagctccctaacactcctgaatcaacgtgaagtcctgtcttgagtaatccgtgggccctaactcactcatcccaactcttcactcactgccttgccccacaccctgccagggagcctcccgtggcaccgtggggacacaaaggaaccagggcaaagctccctcagccccattcaaagaggcctggcccacaggctcacggaaagtcagcctctcatgccccgagagctgagtgcaagggagaggcagcgctgtctgtgcttcccatgcagaagcacccccctcccacccctgtgcaggccggccttcgcggcagaccaccatacaccacgttccaagccacactgaggcctccctccaagcctgcggcccccatttccagaccccaccagggcaacctgcatatccacctccctaccctgcccccctc

SEQ ID NO: 94731 - DNA, 288 bp, Homo sapiens
ggggagggctgggtgtgtccagctgccgggttgaagcctaaaagcgaggtcaccccaacctggttctcgtcctggcctgcccgctgtccgcccggcagtgtgggtggactctcagccttgcccctcgcctctgcactctcgcccccaacccccgggaggttggccggcacctgcaccctcgggctgggacgaagagcagactgccagccccgtggtcaccttgcctccctgctgggaggtgtggtcacccgtcacagggcccaggactcaggagagggctcagccctg

SEQ ID NO: 94732 - DNA, 319 bp, Homo sapiens
agaacttgaacagagcactgaagtagaggcaggacagaggcagacaaaaggggagcaagagggcattctaggtaggggcctggcatgagtgagcaaaggcccacaggctgaaagatacagaccccttgtggcagcagtatggtgagagacctgggcacatggaatagagatctggcaatggaccacaaagagagatgaggttggaacccacctttaagagcctggagccagagggagtttcaagggtgttcagaaagagggctcaccccgacttccagtgagacagagtcttgctctgttgcccaggctggagtgcagt

SEQ ID NO: 94733 - DNA, 1099 bp, Homo sapiens
atttctcaagaacataatttacaaagtctgctaacaaaacctatattgacaattaaactttgcctctctcctcttcaactttccaagcaattgtctacgtagtttacattctttttctctctgtaccacctttagtggctattccactttagacaaattctgccaggtacggttggtggcaggggtgcctgatccctctgaagttgaaagcagatcagcagcagcctggctattggtggagctgccagtgaaaagcacccagacgacctacctgatggacccatcatcaggctcaaacagcaccaccagaaaaacacaagaaacctcttacctaaaacataaccaacagtaaaatagaacttataaaaagaagtctctaaaattccacagggggaaaaaacaaagagattaagtaaaatccttactgatacattaggaaataacttgctagtagccttttgatttctgacttgtaaaacctcagaattggagattcaatagctttgtttttatagaggactgtattggaataagttagattattggaaaactttgcatccccaaaatcattgttataagactatagcacttacatctcttcaggagttctaaaaattaagctgaatttcccataagattctcttattaatcacccacaaaagagaaagacagaaaaacccactaaaaatgatgtgcatttgatccagtaaaatgttttaaaaaccataatacagaccacccttgttaatacattttgccccattcctcagttgaactcaggggaaagttcaagatttttaggtcctacctgtaaaaataaaaaatttttctaattaccaaatataaatttcactgtaggatatataggaaaacagaagcacacaaaaaaagaaaattaaaacaaccagtaatcccagcactcagatgaccacttttaatatatcagcattcttcattcttaatctatcctgagatgtgcctcttttacacaaatgatatgttttgtaatgtgctttttttaaattaaaaaatacattctgaacattttttcatgctattaaatatacttttccacaacaactattctcaaaacttttgg

SEQ ID NO: 94734 - DNA, 1107 bp, Homo sapiens
ctcgggtctacctggtctctcggttctacctaggtctctcgagctctaccttggtatctcgtggtctaacgtggtctcctcttcaactttccaagcaattgtctacgtagtttacattctttttctctctgtaccacctttagtggctattccactttagacaaattctgccaggtacggttggtggcaggggtgcctgatccctctgaagttgaaagcagatcagcagcagcctggctattggtggagctgccagtgaaaagcacccagacgacctacctgatggacccatcatcaggctcaaacagcaccaccagaaaaacacaagaaacctcttacctaaaacataaccaacagtaaaatagaacttataaaaagaagtctctaaaattccacagggggaaaaaacaaagagattaagtaaaatccttactgatacattaggaaataacttgctagtagccttttgatttctgacttgtaaaacctcagaattggagattcaatagctttgtttttatagaggactgtattggaataagttagattattggaaaactttgcatccccaaaatcattgttataagactatagcacttacatctcttcaggagttctaaaaattaagctgaatttcccataagattctcttattaatcacccacaaaagagaaagacagaaaaacccactaaaaatgatgtgcatttgatccagtaaaatgttttaaaaaccataatacagaccacccttgttaatacattttgccccattcctcagttgaactcaggggaaagttcaagatttttaggtcctacctgtaaaaataaaaaatttttctaattaccaaatataaatttcactgtaggatatataggaaaacagaagcacacaaaaaaagaaaattaaaacaaccagtaatcccagcactcagatgaccacttttaatatatcagcattcttcattcttaatctatcctgagatgtgcctcttttacacaaatgatatgttttgtaatgtgctttttttaaattaaaaaatacattctgaacattttttcatgctattaaatatacttttccacaacaactattctcaaaacttttgg

SEQ ID NO: 94735 - DNA, 759 bp, Homo sapiens
agcgggggggttctccccaggcccgctggcagcttgttccctgggggcggctcctggacgcagctctttgcaggcccaccaggctcaggggagccaaggcccgtcgcggccaacaggcctgtggagagtaagagtaaggtgggctctgcagggcagcggccgggaaccatgagagaagcgcgtcagtctgggctccaagcgcagcctctcgggattctccgggacccacggcttataatgcgcttaaatcccacgcctcgcacgagagacagcaagtcaccgtcaccgcctaccgcccctgacccgctcccactctcgctgcagcggagggtgtgtgggagagagagggacgcagggagggaaaagcgcggggagggcgaacatcttttcataagctttccgccttctatatgccatctctgatgggagcctctttagatcttttgtccatttactaattgggtggcttgaattcttattgttgagttgtaagtggtttttaatggtctggatgcaagacaggtgttttacaaatattttcttcctgtctgtggcttgtttcttcattctcttaatatttcctttcccagagcaaaagtttttaattgtaacgaagtcacagatgtgactcacagatgtgagccaccgcacccagccaaaattgatacatttaaaatatactatttttaatataaatggaagatggagaatcactatgagtatttcattaatattttgtgggaagcctaataaaaataa

SEQ ID NO: 94736 - DNA, 330 bp, Homo sapiens
gctgtgaatgtacgtggccttggtatgttctccagcaagattataagtggaggatggagtcagctgggaagcgaggctcagatcaaggagggctactaccaggatccctgcagaaacagggacacagggagagatggctgtaaaatccttgagctttaaggggtaagctcatggagccctgaaaaatatgactgcattgcaaatgccaacttgtagacacaaatatcgtggaagcaggccacgttcagccttgcacactgtgcgctcttccatgactgagaacgttagtcacctgcaccctgaccaacctctcatccctgaagcctgctg

SEQ ID NO: 94737 - DNA, 226 bp, Homo sapiens
taataaccacaaggatttacaaagcccagtttgagaaaggtcaccaaaatatatgagttgacttttagagctgatactctaggcttgaaatgaggatgattaaatcttaaaccttcactaaagtttggaagagcctggctggatttgagttttaaagaccgaggcatgattagccttctttttctatcatacccttctcccagtttagctactgagcactgtcttt

SEQ ID NO: 94738 - DNA, 2434 bp, Homo sapiens
  misc_feature (248)..(248): n is a, c, g, or t
  misc_feature (250)..(250): n is a, c, g, or t
gcacgattcgaagaagagtggttagtgaatgaatgagtttcaaaatgtgcaggctgacgtcccgataacctgttttcaacaaccgtagtaaataggaattttcctgggtggtgggaaatggagaagcagcctgcttagacttgagaaaacttcgccaaggtggggccagaaaggaaaggatacttccgcagtgtaatggttggtgtctgttgatgttggcaatgccagtaaaacctcctgttttccgncntctttccgcgccgccacaatggtgcgcatgaatgtcctggcagatgctctcaagagtatcaacaatgccgaaaagagaggcaaacgccaggtgcttattaggccgtgctccaaagtcatcgtccggtttctcactgtgatgatgaagcatggttacattggcgaatttgaaatcattgatgaccacagagctgggaaaattgttgtgaacctcacaggcaggctaaacaaggttggagtgcagtggcacgatcttggctactgcaacctctgtctcccaggttcaagcgattctcctgcctcagcctccctagtagctgagattacagtgtggggtgatcagccccagatttgacgtgcaactcaaagacctggaaaaatggcagaataatctgcttccatcccgccagtttgggtaagttggcctttccttaattaaaagaagttaatgctaagaatttctgtggtgcagtttgacttaagggtttttttctttttttctgtttaaaacaaagcagtggtaatttgtctactcttaaccattttgacctaatagctcaagtgttatccatatttcttttctctctctttaaaaagagacagggttggccaggcacagtggctcacgcctgtgatcctagcattttgggaggctgaggcaggcggatcacctgaggttgggagttcgagaccaccctgaccaacatggagaaccccgtgtctacctaaaatacaaaattagccaggcctggtggcacacacctgtgatcccagctacttgagaggctgaggcaggaaaatagcttgaacccgggagagaggttgcggtgagctgagattgtgccattgcactccagcctgggcaacgagtgaaactctgtctcgagaaaaaagagagagagacagggtttcactttgttgcccaggctggagtgcagtggctgttcacaggtgcggtcataacacgctacagccttggcttcttggcctcgagcagtcctccccgctcagcctcttgtggatttgggaatacaggcgcctgccaccgtgcctggctatttgccacatttcatgtgttgagcttcaggttctgagaggcacatgagagcttagactggcagaaaaggggggtcgtgtccactttcatgtctgcccttttggctcactgcagatagttccctgtgatcccagatgagggccagaatcagttctaagcctaggcctttgggaaaacttagtttgggagtctttgtccttaaaagcctatctgagttcaaacccttgtttttctgctttaaagccatgagatcttgggcaagtcacagccttgatttcttcatccgtaaaagtggtaatagttcctctgtttatcacctgatttaattttggtaaagcactttatgagctgacacagtaaatgtgtatctttgtggttaagaatttataccctccaaattatgcgtctggtgccttggttgaaagtattctcacttcatggttgctgtattacaggtacggtattctcaccaaaatcatttctctttgtaattatgatactgattttaatgccgcacatttgcatactatatgcttgttacagtgatccccacagtaactcatgaagcagccactcattgtacaaatgaacgtctccatataatagtttagctattatacagtacatggcagaaacacaattcaaactcaagtttatacgaatactttcaagtctccttacctgagagcagaaagtgacatttaaatttaaaggagttcccagcctttgttttcagtgcagtttgtttcatggtgtaggcagaagtcagggctgtgtgattgtgtggctgggctctctggatttggctctttgggttgcaggagtcatggctcatacgctacatgaggcaccagctcatgtaggcactgtcagttcctatgtgccccacaggaaagcgcccttaaccactgatgagtgttgatgtttttctgcactagaaggcactatgttgaactattaaacttaccagcactttctttttccactccatagtttcattgtactgacaacctcagctggcatcatggaccatgaagaagcaagacgaaaacacacaggagggaaaatcctgggattctttttctagggatgtaatacatatatttacaaataaaatgcctcatggac

SEQ ID NO: 94739 - DNA, 2337 bp, Homo sapiens
  misc_feature (248)..(248): n is a, c, g, or t
  misc_feature (250)..(250): n is a, c, g, or t
gcacgattcgaagaagagtggttagtgaatgaatgagtttcaaaatgtgcaggctgacgtcccgataacctgttttcaacaaccgtagtaaataggaattttcctgggtggtgggaaatggagaagcagcctgcttagacttgagaaaacttcgccaaggtggggccagaaaggaaaggatacttccgcagtgtaatggttggtgtctgttgatgttggcaatgccagtaaaacctcctgttttccgncntctttccgcgccgccacaatggtgcgcatgaatgtcctggcagatgctctcaagagtatcaacaatgccgaaaagagaggcaaacgccaggtgcttattaggccgtgctccaaagtcatcgtccggtttctcactgtgatgatgaagcatggttacattggcgaatttgaaatcattgatgaccacagagctgggaaaattgttgtgaacctcacaggcaggctaaacaagtgtggggtgatcagccccagatttgacgtgcaactcaaagacctggaaaaatggcagaataatctgcttccatcccgccagtttgggtaagttggcctttccttaattaaaagaagttaatgctaagaatttctgtggtgcagtttgacttaagggtttttttctttttttctgtttaaaacaaagcagtggtaatttgtctactcttaaccattttgacctaatagctcaagtgttatccatatttcttttctctctctttaaaaagagacagggttggccaggcacagtggctcacgcctgtgatcctagcattttgggaggctgaggcaggcggatcacctgaggttgggagttcgagaccaccctgaccaacatggagaaccccgtgtctacctaaaatacaaaattagccaggcctggtggcacacacctgtgatcccagctacttgagaggctgaggcaggaaaatagcttgaacccgggagagaggttgcggtgagctgagattgtgccattgcactccagcctgggcaacgagtgaaactctgtctcgagaaaaaagagagagagacagggtttcactttgttgcccaggctggagtgcagtggctgttcacaggtgcggtcataacacgctacagccttggcttcttggcctcgagcagtcctccccgctcagcctcttgtggatttgggaatacaggcgcctgccaccgtgcctggctatttgccacatttcatgtgttgagcttcaggttctgagaggcacatgagagcttagactggcagaaaaggggggtcgtgtccactttcatgtctgcccttttggctcactgcagatagttccctgtgatcccagatgagggccagaatcagttctaagcctaggcctttgggaaaacttagtttgggagtctttgtccttaaaagcctatctgagttcaaacccttgtttttctgctttaaagccatgagatcttgggcaagtcacagccttgatttcttcatccgtaaaagtggtaatagttcctctgtttatcacctgatttaattttggtaaagcactttatgagctgacacagtaaatgtgtatctttgtggttaagaatttataccctccaaattatgcgtctggtgccttggttgaaagtattctcacttcatggttgctgtattacaggtacggtattctcaccaaaatcatttctctttgtaattatgatactgattttaatgccgcacatttgcatactatatgcttgttacagtgatccccacagtaactcatgaagcagccactcattgtacaaatgaacgtctccatataatagtttagctattatacagtacatggcagaaacacaattcaaactcaagtttatacgaatactttcaagtctccttacctgagagcagaaagtgacatttaaatttaaaggagttcccagcctttgttttcagtgcagtttgtttcatggtgtaggcagaagtcagggctgtgtgattgtgtggctgggctctctggatttggctctttgggttgcaggagtcatggctcatacgctacatgaggcaccagctcatgtaggcactgtcagttcctatgtgccccacaggaaagcgcccttaaccactgatgagtgttgatgtttttctgcactagaaggcactatgttgaactattaaacttaccagcactttctttttccactccatagtttcattgtactgacaacctcagctggcatcatggaccatgaagaagcaagacgaaaacacacaggagggaaaatcctgggattctttttctagggatgtaatacatatatttacaaataaaatgcctcatggac

SEQ ID NO: 94740 - DNA, 227 bp, Homo sapiens
  misc_feature (1)..(1): n is a, c, g, or t
nttatctagaggatcccttcgatgctgggctctaggttgggccaggctctctggagccaccagccatcctgccctcgtctgtgtggaagctctgcttccgcctctccctcccctgggaggtgcgctggccagggcccatgggagcctcacctcctgtgacctttcggagcacatctccccgtggaacagcgctggtttccaccccactttcttgctcttccttctta

SEQ ID NO: 94741 - DNA, 925 bp, Homo sapiens
gacagaatctctctctgctgcccaggctggagtgcagtgggatgatctcggctcattgaaacctccacctccaggttcaagcgatactcctgcctcaggctcccgagtagctgggactacaagtgtgcaccacgatgcccagatggagtcttgctctgtcgcccaggctggaaagcaatggcgctatcttggctcactgcaacctccgtctcctgggttcaattgattcctctgcctcagcctcccaaatagctggaattacaggacactcagaaaaaaaatgaaattatgagaattgttttctcaaatccttttctactgcaaccttcccaccattacgagcataatgaaactcaaatgtgagtccaaggaattattatcttcatttttctactgaggagaactatcaagacttctaatcacatggaataactcattcaggaaatgaggctgggttgctgatgatggaatgagggagttggagggattagaaatgacgtatccagaatagacaatggaatcggtgacagacttccactagtggcagcaacctgtgcctcactcctgcacaaatccaaaagggtttttgaggcatttgatggcatgtgcctgtgaaacaagtagatattctgtcttgggagcttgagaaaaggccagtagcactgttctagtagcctaaaggcaaacacacatttaaatagtggtggggttagtaggcatgggatgatgagtaatgagcagctcagaaatggtcactttaaagatcaaaggtcatatgcccacattttctgaaatcatgccatttggaatcatcttacatccctaagaataaaaatgttcctaccaaaatcatttagaagaagttttctctgacaactcaccctgttaaaggtcaacatgagattttatcatttacaaaaataaa

SEQ ID NO: 94742 - DNA, 1153 bp, Homo sapiens
ggcctttttttttcttttcttttcttttggtacttcatcaaattcaactgtggcttgaccgatatctaagtgcatttacctctgaaatgattcacaatagtaaactgatttcagcttttaattttagaagacaaaaaatagtttttaagaatcctaaactagctatgtttgagaagacaatagattatgattttataaagagcaaattcctaaaaatatatgcaagatcattactggcccgtggtatttagagaaatgaaatgcacccaccatttggctggacttagtcagacaaacagaataggtggcataacgggtctaattcctaccttgtctggaatatccatccttctgtagttttcctgaacactcatagaggccagtggcagagcccacaggcagagccaccagggtggcgttttttcatgaggcacaaatcatggctttcactcaccacagtccagcacgtaccccaataagttcattcaacatgaaagtatttcaaaaggaaagcaaactgacactggatgaagtatacaatttcaggcgagtctcaaggaacctaacgttcttaatgttcttattcaaacaattactttgggttcaattagttcttcgagtccttttttttttttttcaatttggtcttgaattgcagtatgtgtgaaactgcaaaagccgttcttaccattcaggacatacactgattatacatcttactaaaaactagcagcattgctagactttcagatttacacagtgagttcatagaaaggttatttacggtcggctgtggtggctcatgcctctaatccccactttgggaggccgaggcaggaggatcgcttgagctcaggagttggaaaccagcctgggcaacatggggaaactctgtcccttaaaaataaaaattaaaaattaaaaaaaaaagatataaagagaggttatttactgtgctcatcttccatagtcattccacaaagatgtgtttccaagtctctcaacacccagaaaacgtcaaggggttggatgccttggaaattgtgagattgttaggaggcaggggggagtggccacccggtgtccatagatactggctggcagcagcttttctctgaagttgggcactctttggccccaggctcagcgttcc

SEQ ID NO: 94743 - DNA, 278 bp, Homo sapiens
cctccccttgatgctgtcttgcagaccgctccctgcaacatgagcacaggctctcaccctctgagctgaaacggcctcctgtttctcccagtagtgttccagaaatgccagggcatcattttcacatgatggtgctacagaggcagcaagccagtcagtggcacccaccagtggctgttctgtataaggctctgtgctatggagtcttgagaggtggacagagaaacatattagcagtcagaggccctgggttcaagtccccctgaacatggttaggg

SEQ ID NO: 94744 - DNA, 668 bp, Homo sapiens
cacttttagatcctttgttgacgtagttttatttgattgctacactaactgaaattgtcattggtataaagaaatactgggcaggcacggtggcttacgcctataatcccagctcatttttgtatttttagtagagatgggctatcaccattgtggccaggctagtctcaaactcctgacctcgtgatccacccgcctcggcctcccaaagtgctggggttacaggcatgagccactgcgcccagccaccaaatttatcatttgcatatatattcaataggaatatgcactggtagaaatccatgagtttgcaatctttgttgcaaagatgtttatatttagcaatgtatcttagaagctgattttaaagttttggatggggaaacagaagtcgaacttatggctgtacttgaacacaggaattttaaaagtttttataaagagtgatactaaaattgggtgggattacaggcatcatattccattctcttgagcagtttattttctcttaggcaccatatcattaaaaagctggaagtgataagggaaaaattgcatttcctggtttataatggattccatttccaacttaaagtgtggaaaattaacaaaaattgaagttaatattataggtggtagtggtctttggaggaaggactgggtctcat

SEQ ID NO: 94745 - DNA, 349 bp, Homo sapiens
agattcaaaaactttttaaaatattttaaagcactggtagttgccaattatattagtccattttcacaatgctataaagaaatacctgagactgggtaatttctaatgaaaagaggtttaattgactcacagttccacatggctggggaagcctcaggaaacttacaatcatggtggaaagggaagcagtcttacttggcagcaggcaagagagagcgagtgtgtattaacacttaaaaaaccatcggatctcatgagaactcactccctatcacgagaatagcatgggggaaaccacccccatgatccaatcacctcccactagttcccgctctcaacacatggggat

SEQ ID NO: 94746 - DNA, 387 bp, Homo sapiens
cgagaattgcttgaacctgggagatggagtttgcagtgagccaagattgcatcactgcactccagcctgggcgacagagcaagcaagatctcaccaaaaaaaaaaaaaaaaagaatctaaaaaacaatctgggtgaagatcatttgaagatcaaaaatttaaggtagtaatttcccttttgctttttgaggcagggtcttgttttattgcccaggttggagtacaatggagtgaccacaactcaaattcctgggctcaagggatcctcctgtctcatccttccaagtagttgatacaacagatgcatgccacaatgcctggcttaatttcccattttttgatcaactattattttattctctgaagttacctatttgaggaaaagga

SEQ ID NO: 94747 - DNA, 942 bp, Homo sapiens
agaccagaagacattgttcacaaaacaaaagcaccctcacctgccaatgaatatgcagcgtgcagggggtgtggtgtgagtgttggtggggccccacctctcggagatactgctgtgctgccttcctcactgactgtatacatagtaactgtcatatctttaatgccatggactcactgagccgctctgcaaggactattgtagacaggcacttcacaccataaagtggcatttttttcgttccccaaactgacatttacaagcgataagaaaagagacaatatccatttcattgactgatcattttctagagtatgaagaaatacacacctgggtgtctgcaaggatgtcatcatctttgggtttcatctgagagcatcactcagcatctcacacatagatgttaccatatttttaaatgagctttcctcatccggctccctaagcaagcgctgttggccggtgggagtgactaagtgctccacctgtgggtgtccttcttaatgtgctgcttttgttctgtataaattcacaccacctcactcccaaaagtacttcctgtggctcagaaaaatatgttcaataagattttggatagataaatccatacaaaaataaaaagaggtatagttataaaacaagactacagaaaaagttgtggcagaaattgcatgcaggaaaatcccacaccattagtaaaagtaaggtcaactgtaagttcagctcagggcttcctagcagccatgtttagcgaagtgtgatttttttttttaaacaaaaacaagcaaagatttggaagaaaatgctttagacctaactttacaattattataacataagatgttccagggtccttgaataaatgctgagttttagggaaatgattccaagggaccaagaattggtagaaataatttcaaggcagagaagactaattctaca

SEQ ID NO: 94748 - DNA, 280 bp, Homo sapiens
tcaacgaatgtctttgttttagaaagaggcattttcaagtgttttgatgtgacccaacgtgacctaaaaccattaaaagattctaagcaaaaataataaggccaaactttagtgtaaatagcatgaaaggcttgaaaactaaataaaaaattattttttcctttaagagtaaatagctaggctaggcatggtagttcatacctgtgaacctgtgaaccattgctttggggggctgaggtgaaaggattgcttgagcccagaatttcaagacgagcctggg

SEQ ID NO: 94749 - DNA, 520 bp, Homo sapiens
aagactttttacttaaagatactttctgcatttcagccactttatttcctttccattccttctcttcccaatcctactttttacttaggtgtagtattccttgtagatgtagatttgaagaaaggtgaaagcacagtaattaagacttaatgtttggaagaaattatgatgataggaattaatagaaacagaacaactttgtagtcttccttttcgtcttacccagattatcatatttgccttaaatgagtgagtccaacccaatcagaaggctgttgttgagatctggagagaaaacttgtgatatccaaaagttgcttttggcagcagtgtttatattttcaacgtgagggtgaacaatgctccaggagatacttcaccaagagaaaacagagctactagctgtgaagataatcagtggagctagcaggtctggaggaaactggcagagcagatgtattccacagcatcagttgtaacacacattctcttcaggctgtaatttggggtggaagaaaag

SEQ ID NO: 94750 - DNA, 337 bp, Homo sapiens
tggggtcagatttgtccttgaatgccagtctcacctaaatgtgttatatagcaccttgagagttgctttgccttttttcttgcatcctaccaccagtaaatggtcttactggtcattttataaggattttacgtgaagaaaatgagatgcatatttctgcaaggaaagatccattgtgtatttctatatttgcaaagagtactttagaactttttatgaaaatgaagcatgcctacaggaaagtgtacaggtcctgagcggacagcttaatgagttctcacaaagtgaaaacacctgcatatccagcaccctgaccaagaaacagaacatgaccatt

SEQ ID NO: 94751 - DNA, 684 bp, Homo sapiens
cgcccggcccagtttttctaatcttcttcaccctcccagggctctgagaagtgtgagggtagaatcacctcctgcagatgtttgtggtatagaaatagaaactgcatagtccctcaatatctttatcaggactctaaagataagtggctatgaactgtggcacacttcagagcatactcagagttggggtggattctgatctaacagttgtctaccattaaatgaataactacagtctttgagcaaattcttgctgattacaaaacactatgcaagttaccagagatacaaagatgaataagccatagtctctgctctcaggatctcagcctgctggggagacagctataaccaccagcaactatggcaagcacagagggagcaattaagttggccacagaggaggtaatacttcaactgagcttttgtaagtcctgcccaagttagcatgttggtctctttgggaggccttaatgtgtatgggcagcagaatcccatttaatttattttacatccagtttgacaaatggctctccttgccatggatatgcaagataaatatgcctccaaaatgtgatctcagagcaatttagaaactaagtggcaaatatcctatacatcaagatgacagtgacattgagaaacatgtggtttgttaatccacagtgggatcaagatcaggct

SEQ ID NO: 94752 - DNA, 626 bp, Homo sapiens
tgcagtgagccgagatggcaccagtgcactctagcctgggcaacagagcaagactctgtctcaaaaataaatatataaataaataaatggatttttcgacatgtagaccaggaatatgagaccttaaaaacaatatctatgttgcaggtttccaaatattatcaggtgtatctctttctgctagtattttatttctatttaacgttcaagtattttactatatttagggacctttccatttcctggttattgcaccaattactgtaacattattaataaattaacatgatgttttgcaaaaatgtaaattaaactgagagcagaagtgacatcgccctgacataaaacagtgaagcagcactttcgttcttaccaaacaaaggccaactgttttaatctcccgacccacccgtgggtgaaaaacaagaaatattcacttaatcgagagccacatgcaaagtgccagaagctctgctctgctcagggaagataccacatcctagagagcatttgtaagtagtgatttaaatttatggaactctgccctcattttataatgtatctgattttggtagaggccatttaggttaagtggagagggatgtaaaaagactaccatcccctgt

SEQ ID NO: 94753 - DNA, 239 bp, Homo sapiens
gcctctgcatagtgcatgatccatcagactttgcccagctgctctgatagtctttaactctgcattgtatctgtgaaaattgctgtggcagaaataggctggaatgtttacctaatgctcttccactaaatacccaaaggattctggaatgtgctacaagcagcatagctcctacttttttctccttctgaaaacagtactaaacaggggccgacctcagggtggtgggagtgggtgac

SEQ ID NO: 94754 - DNA, 148 bp, Homo sapiens
caggatatttccttctgtctttgaatatgccttttgtttctaatttgtgcaactataacttcacgtgaacctcatggattctggcttaggcaagtggcttctatgtaattagcagtgattccatcttaataaggtcctgtgatctgac

SEQ ID NO: 94755 - DNA, 325 bp, Homo sapiens
tgaccaggaggtgatgggtcaggccaccattaaactgcctctctcaaataacagatgattgctgggagccccgccggggacgggcagtcccccagacagacagaaaccctggaaggtggcgatgagcagctccccgagatctcagggggtgggcgagggggttcacgcttgcgcattcacaggcaaaccggccgggtttcactgtcctatgaccctccctgggcaacatccaactgccgagggaggcacgcctcaagtgagcacccctacgactccaggaaacacgctgcgcctgcggtccctcccaagtgccgacaggccactg

SEQ ID NO: 94756 - DNA, 329 bp, Homo sapiens
acatatgttaaagttgtacaaaaagaggaggtgctacactagtttcctcaaagcacacagaggtaggattgctggtgtgctcaaaaggcaatgtaatttcctaacttaagctgtctattccatgtagttactatagaagagctatagcatctagaattttcttagtgtcatttacagagaatcaagaaatattgtcagtgggtacggaagccttaatggagacacttaataagctagggatattttagaaggaaatgaacaaagtctttatgagtccattttttcttttctatttatagttccttaatagtttttcatggtagctggaa

SEQ ID NO: 94757 - DNA, 323 bp, Homo sapiens
ttacaagcagtgctgtagtgcataacactatacatacgtcatcttatatgatgataagtgtatctgtaggattgctatccagaagtggaattgctaggttaatagtttatgcaattgtaattttttttaagagatgaagtttcactgtgttgcccagacttgagtgcagtggctatttacagatgctattatagctcaccacagccttgaactcctggcctcaagtagtcctcctgtcttagcctctcaagtacccaggattacaggtgtgtgccagcacacccagcttgtaattgtgattttgaaagacattacttaattgc

SEQ ID NO: 94758 - DNA, 615 bp, Homo sapiens
tataactctaccattgtatgcatctgatcattttcacattaaagaagaaagtgcttttcagtcagccaggtgtgatggctcatgcctgtaattgcagcactttgggaggccaaggcgggcagatcatcaggtcaggagattgagaccatcctggctaacagggtgaaatcccatctctactaaaaatacaaaaaattagtcaggcgtggtggcgggcgcctgtagtcccagccactcgggcgggggcaaaagaatcgcttgaacccgggaggcggaggttgcagtgagccgggattgcgccattgcactccagcctgggcgacagagcgagatttcctcccaaaaaaaaaaagaaaagaaagtgctttttagtcatctgcctcatggttgaaaagtggactgtgggactatgcagtggcagaggcccaggaagaggctaccagagagctggagtgcagggaggggctgagtgggaagagcagacaggacaaggggtagaccccagcagatccccagggcctggggctgaagcaaccccaagctaatccttgcagagatcggggaggactggggaggtctgttctaagtcttagacgtctagtctagggagcactt

SEQ ID NO: 94759 - DNA, 504 bp, Homo sapiens
gccgggactacaggcgcctgccaccacgcctggctaattttttgtgtttttagtagagacagggtttccctgtggtagccaggatggtctcgatttcctgatcttgtgatccacctgcctcggcctcgcaaagttctgggattacaggcgtgagccaccgtgcccggccccaggctggtaattttttattttttgtagaggcagggtttctttgttgctctgtgtggacagaaagcttagtttgtttctctgatggttagtcccccacagaattttaacgtgattctgtgttgatgacactttctgttgcatgagacaatattccagatctctctgggtccctcctggattcaaggcatcctcctgcctcggcctcccgagtagctgggaccacaggtatgtgtcacagcccaaggcctccagcacaagccttattctcccatccccagactcaggaggccatgcagccacacaccgggggagggttccagacgtcactgtggg

SEQ ID NO: 94760 - DNA, 570 bp, Homo sapiens
ttactatccaaattaaaaatctgctgttctccctcccatattctttgcgaatgaagattcccctgtttgtttggatagttttccaaattcattactgcattcctggcatccgcagcaagctaagagttagttaatatttttaatatagcaaataaggatgagggatgcccttcatgtgtatttacacaccagatttttatggtacatagggagtaatctagggaaaagatatattaggcatgaatcttagctgtggtagaagcacagctcaaattagcttaaggaaaaaaaaaaaaaagctggctcatagaacttgaggacagtggtggccatgactatgggcttgattggatctagtgactcaagctcccttccatttggccctccaaccacccccccatccctccaccaatcataccttctgttggcctctgcagtagagtgggcctcttctgggcccttccacatgccaggggatatggccaccagcagttctggggaaaccattagtaatttgtgatcgtagagatttgctcccagtattccctagggcaaaaatattgggagttc

SEQ ID NO: 94761 - DNA, 313 bp, Homo sapiens
actcctagagtatccccagctctggaaaaggggggccttcggggacaatggctgcccttatgactgctgttatcattaattcttttattgtaattatttaaatgtgctataatatttcatatatattcaaattttatcaccaaaaataaaatcagcatgcttgcaacatagatgaagtccctcaaatctcagggccatagtttctcctctgctgctgagagaggttggcctctctggttttggagatcatttttttgagagagtttcactcacccaggctggagtgcagtggcacaatctcagctcactgcaa

SEQ ID NO: 94762 - DNA, 399 bp, Homo sapiens
gagaactgcccaggttggacaaaagcatggagtttgctaaggggcaagaaaggtcaccacgtctctgagaagatatttggctggaaatggtaggttatgaaaaaccatgtcgtgtgaaatcagttttccctcatggattaatattttcctccagaaagacgcaaatgtagaaagccattttatttaacaggtaaattgtgtgtttggggttaaaatgttttgaaattggtggggtggcactcccaccctccaagtcaccctcccctcagactggcctccccatcagcctgcggagggggtgttaactttgctccagtttcctcctctcaagccactgctacctccttctacctccttcatgacctttcaccttgatgagggcaatggcctctgggcttc

SEQ ID NO: 94763 - DNA, 330 bp, Homo sapiens
tcatggtaattattttacctttcccaactgggagttactatgctattaaaataatggcctaaggcagtttacatagcatgcatttaaatattaagagaatctatttgtgtttttctgttggacatttttgtcttaattgatctatttcttccacattaatatgtattagtcttaataaagacactggctatgttcaagtggccaaagatagaccacttttctaagagtttattcagaagaaatatctcatccaaagttaccttcaatgcaagcttcacaatttgacaatgtgcatttggaaccataatccctggcctgggttttctactt

SEQ ID NO: 94764 - DNA, 1362 bp, Homo sapiens
agcgggaggggcagacgggctcgcgcgcgcgccgtctgctgaggtccctcgggaaggaggagagcgtcctgacgccgacccgcaggcgcagcccggcagtcggcggcgcgccgagggcggaggtggtgcgtgcgtgcgtgtgtgtgtgtgtgtgtgtgtgtgtgtgtgtggagctcgggtgccaaggggcgagccgtcagtccccgggtgcgagtccctgctgtcttccacacccttcctccctccaggctcctttcctacatccttcccgcgcccccacggttgcggaccgagcgagaacccccttaagcaggtgtggggggcgtgcggggtggcacgagacaaaaggggcacgggggtaagcccgccatggcctcccggagcctggggggcctgagcgggatccgcggcggtggcggcggaggcggcaagaaaagcctgagcgcccgcaatgctgcggtggagaggaggaacctgatcaccgtgtgcaggttttctgtgaagaccctgattgatcggtcttgctttgagacaattgatgattcttctcctgaatttaacaattttgcagctattttggaacagattttaagccaccggctaaaaggtcaagtaacctggtttggttatgaaagtcctcgtagcttctgggactatatcagagtggcttgccggaaagtttcacagaattgtatctgcagcattgaaaatatggaaaatgtcagttcttctagagctaagggtagagcctggatcagagtagcactcatggaaaaacatttatctgaatacatctctacagctctgagagacttcaaaacaaccaggagattttatgaagatggagcaattgtcttgggtgaagaagcaaatatgcttgctggcatgcttctaggactcaatgctattgatttcagtttctgcctaaagggagaggggctggatggcagttttcctgctgtaatagactatacaccatatttgaagtatatccaaagttctgatagtatcagcagtgatgaggaggagctaaggactttgggaagcagtggtagcgaaagcagtactccagagaatgtcggacctcctttcctcatggatgagaacagttggttcaacaagtgtaagagagttaaacaaaagtatcagcttaccctggaacagaagggttaccttgaagaactcttacgacttcgagagaaccaactatctgaatctgtctcccagaataaaatactacttcaaaggattgaagattccgatctggctcataaactggagaaggaacaattagaatatataattgtggagcttcaagatcagctgtaagtacaagccttttagaaaaatgttggtagcatg

SEQ ID NO: 94765 - DNA, 890 bp, Homo sapiens
gcagtgagctgtgatcgtgccatcatgccactgcaatctagcctgggcaatagaatgagaccctgtctcaaaacaaacaacaacaacaaaactttggaataacaggaagaaaggatacagtaaacaagaatatgggtcaagtaacctggtttggttatgaaagtcctcgtagcttctgggactatatcagagtggcttgccggaaagtttcacagaattgtatctgcagcattgaaaatatggaaaatgtcagttcttctagagctaagggtagagcctggatcagagtagcactcatggaaaaacatttatctgaatacatctctacagctctgagagacttcaaaacaaccaggagattttatgaagatggagcaattgtcttgggtgaagaagcaaatatgcttgctggcatgcttctaggactcaatgctattgatttcagtttctgcctaaagggagaggggctggatggcagttttcctgctgtaatagactatacaccatatttgaagtatatccaaagttctgatagtatcagcagtgatgaggaggagctaaggactttgggaagcagtggtagcgaaagcagtactccagagaatgtcggacctcctttcctcatggatgagaacagttggttcaacaagtgtaagagagttaaacaaaagtatcagcttaccctggaacagaagggttaccttgaagaactcttacgacttcgagagaaccaactatctgaatctgtctcccagaataaaatactacttcaaaggattgaagattccgatctggctcataaactggagaaggaacaattagaatatataattgtggagcttcaagatcagctgtaagtacaagccttttagaaaaatgttggtagcatg

SEQ ID NO: 94766 - DNA, 1105 bp, Homo sapiens
agcgggaggggcagacgggctcgcgcgcgcgccgtctgctgaggtccctcgggaaggaggagagcgtcctgacgccgacccgcaggcgcagcccggcagtcggcggcgcgccgagggcggaggtggtgcgtgcgtgcgtgtgtgtgtgtgtgtgtgtgtgtgtgtgtgtggagctcgggtgccaaggggcgagccgtcagtccccgggtgcgagtccctgctgtcttccacacccttcctccctccaggctcctttcctacatccttcccgcgcccccacggttgcggaccgagcgagaacccccttaagcaggtgtggggggcgtgcggggtggcacgagacaaaaggggcacgggggtaagcccgccatggcctcccggagcctggggggcctgagcgggatccgcggcggtggcggcggaggcggcaagaaaagcctgagcgcccgcaatgctgcggtggagaggaggaacctgatcaccgtgtgcaggttttctgtgaagaccctgattgatcggtcttgctttgagacaattgatgattcttctcctgaatttaacaattttgcagctattttggaacagattttaagccaccggctaaaaggtcaagtaacctggtttggttatgaaagtcctcgtagcttctgggactatatcagagtggcttgccggaaagtttcacagaattgtatctgcagcattgaaaatatggaaaatgtcagttcttctagagctaaggtaagacattggtcagagactcgtttctattttttttttcattgcatgtatttggaatagcaggaaggtgtgaagctacttactatgaatttccttttcttaagaagcataataaaatacgtcctgttctgtgatgtttctacatttcttgaattatctaaactagtggctctcaaataatgttcagcagaaccctgaagatgtccaagaccctttctttaatgggtacaaaatgtcaaaaatatttttatataatatcaacctgttatttgccttttcgctgtgttgatatttgcactgccaatgcagacacaatggtggataaaactgttggaaccttagcacgaattaatgcagtgacatc

SEQ ID NO: 94767 - DNA, 254 bp, Homo sapiens
tctgatagtatcagcagtgatgaggaggagctaaggactttgggaagcagtggtagcgaaagcagtactccagagaatgtcggacctcctttcctcatggatgagaacagttggttcaacaagtgtaagagagttaaacaaaagtatcagcttaccctggaacagaaggtattttaaaattatcaaaacgtacttaattttattctagttattgcctttgaactgtgactgccaaaatattttttaactgaata

SEQ ID NO: 94768 - DNA, 461 bp, Homo sapiens
tatatttgattctttcttcttccttttagggtagagcctggatcagagtagcactcatggaaaaacatttatctgaatacatctctacagctctgagagacttcaaaacaaccaggtttaaaagtccttttaattttctaatatatatttgaaagaatcacctgaagactcagaaatcagaataggatgaagaatcaatttctaaaatcctcaactgttttatttcctccttttgttactactcagataaatccactgtcttcttaggaaaatgtaatttgtcaactaaacatacatctacctttctgtaaaaagatacacattacgcctggaatatcctttttctaaatcatttctgattcatactctttcaactcttgaagcttcattctccccatagactattccctgatggatttgaatttaagtatgaaatttcaatagcatcttttttcttttca

SEQ ID NO: 94769 - DNA, 487 bp, Homo sapiens
aaaaataaaaaataaaaaatattttttaaataaacagtatgatcccacactgttctctctgcctgtttagggtgtttagagctggccccttgttcagatcatagtgcagacctcacctcgagagcctttcctgacaaccctatcagcctgggcctcaccctcccttgtatcatagtctcagcatcctcttcttaataacaccttgagatgatatatttgtttactgattttgggactcttccccgccatagactgagtcccctgagagcagagctgagatctgagttgtgcatgaccgtatctataaaccacatccaactggccgcctgtttttgtgagccaggaaggtttttcaaaggtgaacatgtaccatcaattgacgacaggaaatacaactgggagccccaattaagtgaaatgttatcccccaaaagaattccactcttatgaatagacttgggtcttagtccattttgcatcgctataa

SEQ ID NO: 94770 - DNA, 234 bp, Homo sapiens
tgtttaactgccaactgccccataaaggcttccagggcattcttcagtggaaggattctctcaccggctgcagcactttctcattctttctcaccccggagtgtttgtccagcttactcatgagcttactcttgaggtgatgtttacttacagaattgccttttttttttttttttttgagacgaagtctcactctgtccccaggctggagtgcagtggcacaatctcgctcac

SEQ ID NO: 94771 - DNA, 296 bp, Homo sapiens
agagacaaggttttgccatgttccccagggtagtctcaaactcctgagctcaagtgatccacctgtgctggcctcccaaagtgttgggattatagatgtgagccactgcgcccagccaaaagacaactttaaaaactttagtctgaaggcttagagagactcaagaggattgatatccaccaaagtcaactagaaagataacagatttccatgcaaagcagaaatcagagcaggaaaggttcaaaggcatgacagttaaaacagaaaatgtaatagaattgataaaatgacacatc

SEQ ID NO: 94772 - DNA, 292 bp, Homo sapiens
gagctgtgctctctggggccacttagcactctgggcatgcactccagcctttgtctgggagcactcttggggtttaacagaacagttgttcaatataaagtgcctcctggcagagacaatagctctagatgtctctccactcagtgcccctcccatcacttcctccctgtcttcatgctaattgtgctctggaattcttccagattgcatttaggagtgatgggttatgattacacctcttaacaaggtcaagtaccccatgtgcccagtgcaaaggggtatatagaaacca

SEQ ID NO: 94773 - DNA, 255 bp, Homo sapiens
cctttgagataaggcagaatttcccaaactaacatttagaagaaccctctctaggaggttaatagatattatatagcgtatccgggcatggtggctcacgcctgtaatcccagcactgtgggaggccgaggtaggcacttgaggccaggctggtcttgaactcctgacttcgagtgattcgcctgccttggcctcccaaagtgctgggattatagccgtgagccattgtgccgggccacactatgcacttctata

SEQ ID NO: 94774 - DNA, 516 bp, Homo sapiens
gcagcgcagtaggaaaatgagaaaatcctagggtctatataaagtgatgctttgttacccacatgtatggcaaatgtctctcattaatgcctttgataaggtgggaaactgtctggtgttggaggatcaggctggttttgaattctggctgttaagcttaatagcagtgtgatggtgagcaagtgacttcaaactctctagagccttggtttcttcctctgtaaaatgggaatcattgttcttagctcccatgagcttattccagttgtgagaagtaactggggcaatgtatgtaaactgcctagcatataccttcaccctgttcctttaatggaataaaaaaaggctgaggctgaggaagaggacagtgaaaagcatgggttcagccagcctaggttagaatctcacttgctcactgcatgaccttggggaggcactcatcttttccgagcctcagtttccttttctgggaaagcaggataaaaataggacctactttgtcacaccgctgtgtgg

SEQ ID NO: 94775 - DNA, 215 bp, Homo sapiens
caatataaaacatagtttaataaggcttaaaaagatttagtatctatatccttctgaaaatagtagcatatacatttttgaaatgtcctcttggttattacagtaggaatatataggtaaaattggaatatagttctttctcaaaataaaattatacctatgatgtactttgcagtataagggaagaaaaatataatcaatgagatagccagatc

SEQ ID NO: 94776 - DNA, 1205 bp, Homo sapiens
atattttagttctgttgaaactctcccattctttctgaaacttggattttttttgtgaaaacttgagtcttaaaaacacatccatagttcaccctgaagtttgaagacctcacttgactgatggagcgagagccccgctaacctgcactctggtctctaaggtgcagtcatcgagaagtcctgagcggccgtgcaggtttcccgatctggaaaagagaaatgttgctgaggacaggatgaggtagataaggggctgccctttgttttggaccagttgcatttgcactgaggttagaattggcagctatgttgatttttatatcaaaatccaagatcgtgcttccataactaaaagctttataaacaacttaaaaattggcagtgttggtaggaagaaataaaggcacaatccagaattgagaggtgatttgtgtcctttagggcagggacttttataatcccgcagtgtgtaccttggtgtatagttgttaagccaagtgcacagtgccttgtgagtaccagggttcccatcagacaaactagaaaaggggatcccagacatgctgctgctgtttcactgtggagcatgacttagcagtattgaaacagatctgactttttgcttggcagcacaaaaatgatgttattttagaaactctgttggaaagtataggcatgaaactagtctgaggtgagaggcctgccttttcagaaaagttttaatgaaacacgaagtaattagcttttttgtatgtttagtggcacaatttttaatttcgttgaagtttgtaataattttaactgctttttaatatgtgtaccactcatttgtatgcaaccatggacaacttaaaaaaatacttttgtgttctttttctcccttttatttttagttaatacataataacacatttgtgggatacaaagtgatatttcagtacatgtatacaacgtgtaatgatcaaagcacagtaatcagcatatccatcacctcagatgtttatcatttctttgtgttgggaacattcagaattctctcttctagctttttgaaaatatacaatagattgttgttaagtatatttaccttgaaatactacagagcactagaacttattgagctgcaattttgtatcaacctctccctctcctctcctcccactagccttcccagcttctaataaaccacaattcaagtctctact

SEQ ID NO: 94777 - DNA, 984 bp, Homo sapiens
  misc_feature (861)..(861): n is a, c, g, or t
atattttagttctgttgaaactctcccattctttctgaaacttggattttttttgtgaaaacttgagtcttaaaaacacatccatagttcaccctgaagtttgaagacctcacttgactgatggagcgagagccccgctaacctgcactctggtctctaaggtgcagtcatcgagaagtcctgagcggccgtgcaggtttcccgatctggaaaagagaaatgttgctgaggacaggatgaggtagataaggggctgccctttgttttggaccagttgcatttgcactgaggttagaattggcagctatgttgatttttatatcaaaatccaagatcgtgcttccataactaaaagctttataaacaacttaaaaattggcagtgttggtaggaagaaataaaggcacaatccagaattgagaggtgatttgtgtcctttagggcagggacttttataatcccgcagtgtgtaccttggtgtatagttgttaagccaagtgcacagtgccttgtgagtaccagggttcccatcagacaaactagaaaaggggatcccagacatgctgctgctgtttcactgtggagcatgacttagcagtattgaaacagatctgactttttgcttggcagcacaaaaatgatgttattttagaaactctgtaacatctttggttgtggtagtcctgttttcctaataactttgttactgtgctgtgaaagattacagatttgaacatgtagtgtacgtgctattgagttgtgaactggtgggccgtatgtaacagctgaccaacgtgaagatactggtacttgatagcctcttaaggaaaatttgcttccaaattttaagctggaaagtcnctggaataactttaaaaaagaattacaatacatggctttttagaatttcgttacgtatgttaagatttgtgtacaaattgaaatgtctgtactgatcctcaaccaataaaatctcagttatga

SEQ ID NO: 94778 - DNA, 704 bp, Homo sapiens
agaagataagcatggcccctgcacaaggatgacacacaaatttgtgaagcgttccatatttttctgcacatgtatcccagaacttaaagtaaattaaataataataataataataagtctggctactaaatagggttttcagagcatgatttcagaagagatgtgaaataggtaaattgatctttaagctcttttttacataaaatattcccagtaacctcctacttcctcctagttgcataattctcttacttctaaaagcaactccatatacattctttggaaatattctatttttagtacattttaacactccaatctgcttcacattttgcctaactggtcctggtcttggccttttggagtcttttctcctaaataaagctagaatgcctccatcatcctgattacatggtttgctcagatgtgcttgctgaatttcatgacctcactcccccttataaactggtgaggatgtactcatgagcatggagtacatttttatccttaaaaccacattcatggcagagaacacacaccaaagcaagatttttcttaatctcttgctcaattcaatattttagaaaatgttgtaaaaatagtggaaggtgatttcattacaagattggggaaaacacctctatctatgaccatcttctatacctaaatctcatttctattcagataaaaatctgattatccca

SEQ ID NO: 94779 - DNA, 643 bp, Homo sapiens
agcggatctcttccggttatggcgcccgctgggagtgtcttatcagccgcttataccgcggaaactttaacctgcgttttcccgtaaaattttcctctctaggtttcgtatcattgtcttgtttcttactcttgtattaactttgttttaacctaaggtttctctttcccaaaaactgtggtgtttctttacaacctctttttatagttatataaacattgcaagaaccatgattttatattcttccttttcagtattaataacttcaatgtcttttttggcatttgtctgaaaatttgaaatatttttcaatttactgaactgattatcgttttgtaaatatcggatactactttaatcatttgtgtattggccttaagattctctatttttaactcttccaccaacatacctttaatctgagaggtgttgtaggggcttcaagatcaaactttccccacagtctctattttcattataaaataccgtgttttaagaaaaaatgtacaaggttgaaagaagtttcactactacgtgttttttttttaatttttattttattttattttattttgagacggagtctcgctctgtcaccaggctggagtgcagtggtgcggtctcggctcactgcaacccccga

SEQ ID NO: 94780 - DNA, 819 bp, Homo sapiens
ataagacggatgcggaaaccgagacgggctggatgggaaactctttccaggaaggctccggggccctcagctggtctccgaccttcccctgcaacctgtgacacctgccattttcccatcttaggcgatggcaacgccacccttccgtttgctccgggcaaaacttcgagagttccctctgactctggagatttttcctcacatccaagagccaactggtcatcaattcgtgatttcccatcggctaagtgcgtgggcattgagctacacgcgagtctctccacctctgcggaatagctacttcggggtaggggaggggccctcccgtggattgtaaggtgtttagcagcagccgtcgcctccgctgactagatacatgccagggggttagcattctccctccccgcttcccccattcgtgacctagtgtcccagcggggatgggagaggcgtgtaagggcgaagttgccccctcttgagaaccactgatgcgcgttgtcctgctgtctgagcttgtgcagaggactctccagatgaaggctcaggggtcgatccagcttgagaccccctcgctcccccgcacagtcggaccttaggattggagatttttaacatctctgcgtcatgagattcgaaacctttaggtcttttcttccgttctgtcctccaaatcggcctcttccgagcctgttgaccagggccagccaggcagagggctgggtttgctcaacgaggctcctctcggccctcctggagcttcaggcctctttcggttgcagagaagctttatgggtcacttccttcggcatccccgggggc

SEQ ID NO: 94781 - DNA, 240 bp, Homo sapiens
tacaagaggctacatgctatatgatttcatttataagatattctggaaaaggcaaaactataggaaatcagattagtagctaacgggctgacggtgggaggaggtgattgactacaaagggacacgagggacctttttgaggcgacagaaatgctttatattgggaatgtggtggtggttatgtaactatacatttgtcaaaactcatcaaattgtacacttaaaaagggtgaatgttag

SEQ ID NO: 94782 - DNA, 433 bp, Homo sapiens
ggtggtaggttcaaaactgagcatgtttacagtgtaaatagaaagattgtgtgttcaagatgtaaggaatagttgatgtccccagatacgctattatttcaaaattttaacctttaccaagattctcattctcagttttaccatggagaatgaaaaaagtagtacatttaataagtttcctttctgaatatatctctaatgattatttaagcatattttaaatttctttttcatacttttaacgaaacactaaagctttttaaaaattgatagttcagttttatatttatgtcacaaaatatttcttcaccatcttccaggtgcccaggtgattttatatgttgtttaatttaattttccatagcattttcatagatttctttattcggaagtattaccaaggacaaaaatgttcctaataaaaattttttaa

SEQ ID NO: 94783 - DNA, 338 bp, Homo sapiens
cagaactttatctaaattgactgagaaaaatcaaattagtaaaatcagtaatgaaggacatttctaatgaccttattaaatgtatacatatattaaaacatcacattgtaccgcataaatatgtaaaattattgtttgtcacttggaccagatggtgtggttgtgaattctactaaacctttaaagaagaattaatatcaatacaatatttactttggctatcaaaatacagaaagagatgaatcatgagaaaaaaatctaaactacagaaaaatatcccttatgaagacaaatataaacatcctcacaaaattttaacagaatccaacacagtcaaa

SEQ ID NO: 94784 - DNA, 499 bp, Homo sapiens
tgctcagcatggaaatagtattattacttaatcactgcaatctccacctcccgggttcaagcgattctcctgcctcagcctccccagtagctgggactacaggcgtgtaccaccaggcctggctggctaatttttgtatttttagcacagatggggtttcaccatgttggtcaggctggtctcgaactcctgacctcaagtgacccacctgcctcagccccccaaagtgctgggattacaggcgtgagccactgcacctggccaccacctgttttatttcatgtcttcctcggctgttttacctcaaaggcctagcataagccatgacatagtgggcactaaatgaagaggttaaactaacacatttatgtggtaagtaatccatctaaaatgtatcacactacctagtttattattttgaaagtatgtgcagcactcacttcgggaaaagttaatgaaaggctaagccagtctacaaaagtctgctcacctaacccac

SEQ ID NO: 94785 - DNA, 325 bp, Homo sapiens
gacagcactaataggtccatgactgggtccaggttctgcctgggatgattggcaaagagctcactgacagtgttgaaggcatctgtggtgaagtggatgggctggtccagctccaaggcctggctgaggctgaagaactggcagccttctgatgctccttcttaaagcctgtcaccatcacctgcttgcatgtcaactcattggctgtgaagttgagccgagtgccctgttgttcatcttcttggtgaagcatttgaagctgtcgatcttgctctcccactcctaaagtttgagtgtcaccctggacagtaggctcagagcccgg

SEQ ID NO: 94786 - DNA, 681 bp, Homo sapiens
ggaaaacatttttcagtcattcaatagtctgttgtgaataaagcaaaaatagttaacaaggcagcgctactctgtgctgggccctgtactaatgttctatgtaaacccatgaggtcagcactgtttgtttctctggttggtagatgtgggaaactgagtcttggggaggtcagaggacatgctggcctcccacccccagcccccccacccagctagtaaaggcagagctgagattggaacatattgttgaactttcaccaatacaaacaaaagccttctttttccaaaacaagtacctttgaaagacttcaaaatgtaagagtaggttctcctgggtggagataatgaggctcaacactgtttatccttataatatccctgggaggtggtaggagtcagagagctttagcttctattgaagggagaagccccacggtcagaagacagtaaaaagccttctagggtgacagggaatggacttcacaagagttctcttgtaatgacttcattctggcgtttcttttaaagcatgttgccttatgattccattacttttatttgtggaatttatggttaattttgatattgaagaggaaagcatttattgaagacatatttaaacagtaccagcaacaacttgtgcttgctaaatcagacccatcggaatgtgggcgtatatgt

SEQ ID NO: 94787 - DNA, 445 bp, Homo sapiens
tagctggttctccactcttacattacattgggctatactcctggcaaagctcctttgaatctcagaaatattttcttccctgttctttgtttcccaatgcctactatacccctgtattagtccattttcatactgctgtgaagaaatacccaagactgggtaatttataaagaaaaagagctttaatggactcacagttccacatgactggggaggcctcacaatcatggcagaaggcgaaagaggaacaaaggcacatcttacatggcagcaggcaagagagtgtgtgaagggtaactgccctttataaaaccatcagatctcatgagacttattcacgcagggaaaaaaaccacctcatgattcaattaccttccaccgagttcctctcatgacatgtggggattatgggagctacaattcaaaatgagatttgggtggggac

SEQ ID NO: 94788 - DNA, 532 bp, Homo sapiens
caacccctgtggctggaggaggccttggaggcctgtggggggataagcagctgataaaccttgaagaatggaagccttggctgtagttctgagtgaccatcagtggctgctgccccactgcctgggaacacagaaacccagagtccagggtggtagagggggctcaccctctgaccaagttgctctcctccctctcctgggtaccctctgtcattgttctacctctgtgcctttataattttattctccagcttcccatcttgaaatacggcccttctccctcaccagtgtgaatgtccttcttcaaatccctgtctcagtgtcctccttcctgccctctgcaactacccaggcccatcttgagtacttcttcctcagatctcagataataatacacagtcacatgtagatgacactctgtcatttacaaggcacattagtggtgatcatctcatcttcagtttcacagtcaatctgtgaggcagggatcagcatgcccattttacagaggatgaactgaggctaagaggca

SEQ ID NO: 94789 - DNA, 449 bp, Homo sapiens
ccatgttggccaaaatggtcttgatctcttgagctcatggttcgcccaccttggcctcccaaaatgctgagatgacaggtgtgagccaccatgcctggcctagagttcactcttgatgtacattctatggtttgtacaaatacataatgcaatgtatttaccattatgatgttgtacaaatagtacatatgttaaaatcccctgtgcttcacctgttcacttctctttccccacccagcctttggcaaccactgatctttttagtctccatagttttgccttttccagaatgtcatgtagttggaatcatgtagtatgcagcctcctcagcttggcttcttacattcacagtatgcatttaagtttcctctgtgtctttttctggcttagtagctcatttctccagcctgggggacagagcaagactctgtctaaataaataaataaat

SEQ ID NO: 94790 - DNA, 140 bp, Homo sapiens
gtttatcatcctctttttattttgaatctcctttgtgtagttttagaatgagtattggcagactaaggtgcagagaattatttagaactccttgttcagatattgaatcttccatgtcagctaaacaatcctttcctgtt

SEQ ID NO: 94791 - DNA, 280 bp, Homo sapiens
cagcagtgggagacacagcacagccaccagggcagcccccaggcagacggcgggcctagagagggcgggatgacacaagaaaggttctcctttggagacggcgaggtcaggcaggtgggagagggttcacggtgcttgaggtgcagagagaggatggtggaatggaaaacgtagggtgacttgtcggggacaggcccagggccacaactcgggcaggcctattgcccgagttttgggtcccatcctggcaggcaggggagagaattctgaattttttaat

SEQ ID NO: 94792 - DNA, 234 bp, Homo sapiens
tatataggcaatgggccgagtgcatgctccggcgcatggcggcgcggaattcgattagtcacatgggccggtcaacttttttttagccattcatcccaggctgcagctgggtgacgtcagaggtgacttggaatggcaacagatggtgcctgagcttgtaggaccgttggggagcaccgtgggaggctcagaatgctggggcagtccctaatagtgatgctgctgctcctgacc

SEQ ID NO: 94793 - DNA, 390 bp, Homo sapiens
atcaaatcagggtaaatggagtatccatcacctcaagcatttatcatttttttgtgttagaaatattccaattccactcttttagttatcttagaatataaaataaattagtgttaactatagtcaccctattgtgctaccaaatactagatcttattcatcctatctaactgtatttttgtacccattaatcatccccactttatccacccacttcttgccacccttcacagcctctggtatccatcattctactatctccaagagttaaattttattttttttaagctcccacacatgtgtgagaatatacaatatttgtctttctgtgtctgggatattttacttaacataatgtcctctagttccatccatgttgttgcaaatgac

SEQ ID NO: 94794 - DNA, 358 bp, Homo sapiens
agctaaattgtagcctcttctccacctgccataacagcaggagccaggaggcctagtgaacttcaaagggcaggccctgcctgaggccctggtttaaaatgcagattcctgggccctatcccagggccactgagtcaggctctctgcaggttgtttcaggaaactgcacgcttagaggattcttaagcacactgaagcttaagatccctggcagggatttccaagaagggtacaggccctgcagaaggtatgagaagcaaggattagagcttctatttaaaatatagttgaccagctgggtgggtggctcatgcttgtaatcccagcacatagggaggccgaggcaggaggatcattt

SEQ ID NO: 94795 - DNA, 215 bp, Homo sapiens
gagtatcccagaatagtgtcaagtctcccctacctttccaagccattgctctaggactgaccagctgcaacacacctttgctggaagcttcagtgagggcctctgccccaggccagtcccttcctgtgccctgtacctaccggcactgaagactgccatctagtggccattgccctttctttttcttttgctggtaaaggaaacggagtctccca

SEQ ID NO: 94796 - DNA, 549 bp, Homo sapiens
tgaatccaaataccaactattttcaaataaaagaaaggagaggcaagacttagcagcagcaggctttttacagtccttcaggtttcaattgtgggaccttacacgtggtgctattgcagctccaattttgtttttttcttttaacccatcatttcagcttgttaaactttggagattcatattctgtcattgagagttgtccttccttcctttgctgcttcagaggacttagtgatgcctttattagagcttttactacattgcattatggctctttatgtctttcctcctgagttctgctaggatcataatcatgtctcatcatattcctcttctctcttcaacactgacagctcatagtaagtgcttaatacattttcattgaatgaatgagtcaaaagtatttgctcttccaaattctgcttattgatagtttattaataattatatattattcatgctgtttcaatatttatcgtacttatttgaatatatacatttatatttatataaagtaataaatgtgggtattttattaataaataagtt

SEQ ID NO: 94797 - DNA, 440 bp, Homo sapiens
attactgagcgtggattgtaaggtagaaattacccattaaatttcacactcctagtaacccttctccttcagatagattaagttttgagaatgacaaaaagaacaacagtgtacatgacggcttcatcatctttactgtattgcctataatagccatctgattatatccaagcagcactgggcataccgagaagcttaacagacactgccagatacacatttgtacatgtggaattgtgtgctgaatactaacaacacctaccgtgtgcctgatgtttcctaagtgcttcatacatatgaacccatttaatctttaaaacaactgcatgatatacaaggattgaatccatcaccctgaatgaggacatcaaggtatgaagacatctagcaactcctttaagatcctgtaaattgcaaataaaataactggaatctgaacc

SEQ ID NO: 94798 - DNA, 3032 bp, Homo sapiens
cggggtgcgaatccggtgccggcaagcggctggcgatgctggaggttcgctagccgaagcggctgcatctggcgccgcgtctgccccgcgtgctcggagcggattctgcccgccgtccccggagccctcggcgccccgctgagcccgcgatcacttcctccctgtgaccaaccggcgctgcaggttagagcctggcaatgccgtttgggtgtgtgactctgggcgacaagaagaactataaccagccatcggaggtgactgacagatatgatttgggacaggtcatcaagactgaggagttttgtgaaatcttccgggccaaggacaagacgacaggcaagctgcacacctgcaagaagttccagaagcgggacggccgcaaggtgcggaaagctgccaagaacgagataggcatcctcaagatggtgaagcatcccaacatcctacagctggtggatgtgtttgtgacccgcaaggagtactttatcttcctggagctggccacggggagggaggtgtttgactggatcctggaccagggctactactcggagcgagacacaagcaacgtggtacggcaagtcctggaggccgtggcctatttgcactcactcaagatcgtgcacaggaatctcaagctggagaacctggtttactacaaccggctgaagaactcgaagattgtcatcagtgacttccatctggctaagctagaaaatggcctcatcaaggagccctgtgggacccccgagtatctggccccagaggtggtaggccggcagcggtatggacgccctgtggactgctgggccattggagtcatcatgtacatcctgctttcaggcaatccacctttctatgaggaggtggaagaagatgattatgagaaccatgataagaatctcttccgcaagatcctggctggtgactatgagtttgactctccatattgggatgatatttcgcaggcagccaaagacctggtcacaaggctgatggaggtggagcaagaccagcggatcactgcagaagaggccatctcccatgagtggatttctggcaatgctgcttctgataagaacatcaaggatggtgtctgtgcccagattgaaaagaactttgccagggccaagtggaagaaggctgtccgagtgaccaccctcatgaaacggctccgggcaccagagcagtccagcacggctgcagcccagtcggcctcagccacagacactgccacccccggggctgcaggtggggccacagctgcagctgcgagtggagctacctcagcccctgagggtgatgctgctcgtgctgcaaagagtgataatgtggcccccgcagaccgtagtgccaccccagccacagatggaagtgccaccccagccactgatggcagtgtcaccccagccaccgatggaagcatcactccagccactgatgggagtgtcaccccagccactgacaggagcgctactccagccactgatgggagagccacaccagccacagaagagagcactgtgcccaccacccaaagcagtgccatgctggccaccaaggcagctgccacccctgagccggctatggcccagccggacagcacagccccagagggcgccacaggccaggctccaccctctagtaaaggggaagaggctgctggttatgcccaggagtctcaaagggaggaggccagctgagtaggcagcctggtgagggggggcaggggatgggcaggagggtgggagagtggatgaggggcttctcactgtacatagagtcactggcatgatgccctcgctcccccatgcccccacatcccagtggggcataactaggggtcacgggagagcagtctcgtctcctgtgtgtatgtgtgtgagtggtgggcaggccagtggcagggccggccccagcccctgcatggattccttgtggcttttctgtcttttgctagcttcaccagtttctgttccttgtgggatgctgctctagggatactcagggggctcctgctctccttccccttcccttcttgcctcaccattcccctaggcaggccctgcaggtcccacactctcccaggccctaaacttgggcggccttgccctgagagctggtcctccagcgaggccctgtcagcggtcttaggctcctgcacatgaaggtgtgtgcctgtggtgtgtgggctgctctaggagcagatacaggctggtatagaggatgcagaaaggtagggcagtatgtttaagtccagacttggcacatggctagggatactgctcactagctgtggaggtcctcaggagtggagagaatgagtaggagggcagaagcttccatttttgtccttcctaagaccctgttatttgtgttatttcctgcctttccgagtcctgcagtgggctgccctgtaccctgaacctcatgagcctctaagggaaaggaggaacaattaggacgtggcaatgagacctggcagggcagagtacaagcccagcacccagtgtcccagccttactgggtccttaccctgggccaaacagggagggctgatacctccttgctcttcctagatgcccacctcctacaatctcagcccacaagtcctctccaccctagggggcttgctgcatggcaataactcataatctgatttggaggtttgccctttacaggggcagattttctgctcagttcaacaatgaaatgaagaggaactccctctttctacagctcacttctatcagaggcccaggtgcctcagagccacattgagttgctttttctgggatgaggaagtagggttaaactccccagtttcctgagggaggctcctgacaggtgccctttgtcagaccctaccacagcctggataggcagccacattggtcctcgcccttgctcggcactccgtggtggtcctgcccttctccctgcatgcctgtgggtctgctctggtgtgtgaaggtcggtgggttaactgtgtgcctactgaacctggcaaataaacatcaccctgcaaagcc

SEQ ID NO: 94799 - DNA, 3734 bp, Homo sapiens
  misc_feature (2961)..(2963): n is a, c, g, or t
  misc_feature (2965)..(2966): n is a, c, g, or t
cggggtgcgaatccggtgccggcaagcggctggcgatgctggaggttcgctagccgaagcggctgcatctggcgccgcgtctgccccgcgtgctcggagcggattctgcccgccgtccccggagccctcggcgccccgctgagcccgcgatcacttcctccctgtgaccaaccggcgctgcaggttagagcctggcaatgccgtttgggtgtgtgactctgggcgacaagaagaactataaccagccatcggaggtgactgacagatatgatttgggacaggtcatcaagactgaggagttttgtgaaatcttccgggccaaggacaagacgacaggcaagctgcacacctgcaagaagttccagaagcgggacggccgcaaggtgcggaaagctgccaagaacgagataggcatcctcaagatggtgaagcatcccaacatcctacagctggtggatgtgtttgtgacccgcaaggagtactttatcttcctggagctggccacggggagggaggtgtttgactggatcctggaccagggctactactcggagcgagacacaagcaacgtggtacggcaagtcctggaggccgtggcctatttgcactcactcaagatcgtgcacaggaatctcaagctggagaacctggtttactacaaccggctgaagaactcgaagattgtcatcagtgacttccatctggctaagctagaaaatggcctcatcaaggagccctgtgggacccccgagtatctgggctttcaggcaatccacctttctatgaggaggtggaagaagatgattatgagaaccatgataagaatctcttccgcaagatcctggctggtgactatgagtttgactctccatattgggatgatatttcgcaggcagccaaagacctggtcacaaggctgatggaggtggagcaagaccagcggatcactgcagaagaggccatctcccatgagtggatttctggcaatgctgcttctgataagaacatcaaggatggtgtctgtgcccagattgaaaagaactttgccagggccaagtggaagaaggctgtccgagtgaccaccctcatgaaacggctccgggcaccagagcagtccagcacggctgcagcccagtcggcctcagccacagacactgccacccccggggctgcaggtggggccacagctgcagctgcgagtggagctacctcagcccctgagggtgatgctgctcgtgctgcaaagagtgataatgtggcccccgcagaccgtagtgccaccccagccacagatggaagtgccaccccagccactgatggcagtgtcaccccagccaccgatggaagcatcactccagccactgatgggagtgtcaccccagccactgacaggagcgctactccagccactgatgggagagccacaccagccacagaagagagcactgtgcccaccacccaaagcagtgccatgctggccaccaaggcagctgccacccctgagccggctatggcccagccggacagcacagccccagagggcgccacaggccaggctccaccctctagtaaaggggaagaggctgctggttatgcccaggagtctcaaagggaggaggccagctgagtaggcagcctggtgagggggggcaggggatgggcaggagggtgggagagtggatgaggggcttctcactgtacatagagtcactggcatgatgccctcgctcccccatgcccccacatcccagtggggcataactaggggtcacgggagagcagtctcgtctcctgtgtgtatgtgtgtgagtggtgggcaggccagtggcagggccggccccagcccctgcatggattccttgtggcttttctgtcttttgctagcttcaccagtttctgttccttgtgggatgctgctctagggatactcagggggctcctgctctccttccccttcccttcttgcctcaccattcccctaggcaggccctgcaggtcccacactctcccaggccctaaacttgggcggccttgccctgagagctggtcctccagcgaggccctgtcagcggtcttaggctcctgcacatgaaggtgtgtgcctgtggtgtgtgggctgctctaggagcagatacaggctggtatagaggatgcagaaaggtagggcagtatgtttaagtccagacttggcacatggctagggatactgctcactagctgtggaggtcctcaggagtggagagaatgagtaggagggcagaagcttccatttttgtccttcctaagaccctgttatttgtgttatttcctgcctttccgagtcctgcagtgggctgccctgtaccctgaacctcatgagcctctaagggaaaggaggaacaattaggacgtggcaatgagacctggcagggcagagtacaagcccagcacccagtgtcccagccttactgggtccttaccctgggccaaacagggagggctgatacctccttgctcttcctagatgcccacctcctacaatctcagcccacaagtcctctccaccctagggggcttgctgcatggcaataactcataatctgatttggaggtttgccctttacaggggcagattttctgctcagttcaacaatgaaatgaagaggaactccctctttctacagctcacttctatcagaggcccaggtgcctcagagccacattgagttgctttttctgggatgaggaagtagggttaaactccccagtttcctgagggaggctcctgacaggtgccctttgtcagaccctaccacagcctggataggcagccacattggtcctcgcccttgctcggcactccgtggtggtcctgcccttctccctgcatgcctgtgggtctgctctggtgtgtgaaggtcggtgggttaactgtgtgcctactgaacctggcaaataaacatcaccctgcaaagcctctgnnnannctctcgcctttgcttcctctgtcctactggggaggagcccctggaaggcagtggggaagggagaggctgggagcaggttcacaagtagtggctgggagtagtagtgaacagtgccctgtggatttcttgggctgagggtgaagatcatcctcaccacagtgtattcctcaatggtggtggtggtgggggtcctctgaactctagaaatccatgtgagtagtgggtcttgggctgcatttggaccaaggaatactccctgggctgagagctcaagtaagggctgctgtttttgactcctgttgaccgaggagccttactcttgatttaggcatagagctggaatctacctgggccagccagcgcaaggacagaccctgctcatagccaaagatagcttccctgagctagggagagggtgtagggtgagcaatgcacaaagattctatgctgctctgtgttgattccttctttctgtgaacacctgtgctttccacctatgccccaaatgaaatctcactctgggtctatttcagctggagcagatcagctttatattatgggactatgcacagggtttcttctgggtagagggagtaacactgccacagatactaagcctaaaaacccaaaagttgacttactccagcccaggtgggcctgggtgaactcaccagggatgctgctctctgggaggacctcaaagataacctcctcaaagataacttctctgatgtgggaataataaaaaggatttgttagtctctaaac

SEQ ID NO: 94800 - DNA, 1224 bp, Homo sapiens
  misc_feature (451)..(453): n is a, c, g, or t
  misc_feature (455)..(456): n is a, c, g, or t
gccggtgtgaatcggacgaggcagtcctctccaccctagggggcttgctgcatggcaataactcataatctgatttggaggtttgccctttacaggggcagattttctgctcagttcaacaatgaaatgaagaggaactccctctttctacagctcacttctatcagaggcccaggtgcctcagagccacattgagttgctttttctgggatgaggaagtagggttaaactccccagtttcctgagggaggctcctgacaggtgccctttgtcagaccctaccacagcctggataggcagccacattggtcctcgcccttgctcggcactccgtggtggtcctgcccttctccctgcatgcctgtgggtctgctctggtgtgtgaaggtcggtgggttaactgtgtgcctactgaacctggcaaataaacatcaccctgcaaagcctctgnnnannctctcgcctttgcttcctctgtcctactggggaggagcccctggaaggcagtggggaagggagaggctgggagcaggttcacaagtagtggctgggagtagtagtgaacagtgccctgtggatttcttgggctgagggtgaagatcatcctcaccacagtgtattcctcaatggtggtggtggtgggggtcctctgaactctagaaatccatgtgagtagtgggtcttgggctgcatttggaccaaggaatactccctgggctgagagctcaagtaagggctgctgtttttgactcctgttgaccgaggagccttactcttgatttaggcatagagctggaatctacctgggccagccagcgcaaggacagaccctgctcatagccaaagatagcttccctgagctagggagagggtgtagggtgagcaatgcacaaagattctatgctgctctgtgttgattccttctttctgtgaacacctgtgctttccacctatgccccaaatgaaatctcactctgggtctatttcagctggagcagatcagctttatattatgggactatgcacagggtttcttctgggtagagggagtaacactgccacagatactaagcctaaaaacccaaaagttgacttactccagcccaggtgggcctgggtgaactcaccagggatgctgctctctgggaggacctcaaagataacctcctcaaagataacttctctgatgtgggaataataaaaaggatttgttagtctctaaac

SEQ ID NO: 94801 - DNA, 3717 bp, Homo sapiens
  misc_feature (2944)..(2946): n is a, c, g, or t
  misc_feature (2948)..(2949): n is a, c, g, or t
cggggtgcgaatccggtgccggcaagcggctggcgatgctggaggttcgctagccgaagcggctgcatctggcgccgcgtctgccccgcgtgctcggagcggattctgcccgccgtccccggagccctcggcgccccgctgagcccgcgatcacttcctccctgtgaccaaccggcgctgcaggttagagcctggcaatgccgtttgggtgtgtgactctgggcgacaagaagaactataaccagccatcggaggtgactgacagatatgatttgggacaggtcatcaagactgaggagttttgtgaaatcttccgggccaaggacaagacgacaggcaagctgcacacctgcaagaagttccagaagcgggacggccgcaaggtgcggaaagctgccaagaacgagataggcatcctcaagatggtgaagcatcccaacatcctacagctggtggatgtgtttgtgacccgcaaggagtactttatcttcctggagctggccacggggagggaggtgtttgactggatcctggaccagggctactactcggagcgagacacaagcaacgtggtacggcaagtcctggaggccgtggcctatttgcactcactcaagatcgtgcacaggaatctcaagctggagaacctggtttactacaaccggctgaagaactcgaagattgtcatcagtgacttccatctggctaagctagaaaatggcctcatcaaggagccctgtgggacccccgagtatctggccccagaggtggtaggccggcagcggtatggacgccctgtggactgctgggccattggagtcatcatgtacatcctgctttcaggcaatccacctttctatgaggaggtggaagaagatgattatgagaaccatgataagaatctcttccgcaagatcctggctggtgactatgagtttgactctccatattgggatgatatttcgcaggcagccaaagacctggtcacaaggctgatggaggtggagcaagaccagcggatcactgcagaagaggccatctcccatgagtggatttctggcaatgctgcttctgataagaacatcaaggatggtgtctgtgcccagattgaaaagaactttgccagggccaagtggaagaaggctgtccgagtgaccaccctcatgaaacggctccgggcaccagagcagtccagcacggctgcagcccagtcggcctcagccacagacactgccacccccggggctgcagaccgtagtgccaccccagccacagatggaagtgccaccccagccactgatggcagtgtcaccccagccaccgatggaagcatcactccagccactgatgggagtgtcaccccagccactgacaggagcgctactccagccactgatgggagagccacaccagccacagaagagagcactgtgcccaccacccaaagcagtgccatgctggccaccaaggcagctgccacccctgagccggctatggcccagccggacagcacagccccagagggcgccacaggccaggctccaccctctagtaaaggggaagaggctgctggttatgcccaggagtctcaaagggaggaggccagctgagtaggcagcctggtgagggggggcaggggatgggcaggagggtgggagagtggatgaggggcttctcactgtacatagagtcactggcatgatgccctcgctcccccatgcccccacatcccagtggggcataactaggggtcacgggagagcagtctcgtctcctgtgtgtatgtgtgtgagtggtgggcaggccagtggcagggccggccccagcccctgcatggattccttgtggcttttctgtcttttgctagcttcaccagtttctgttccttgtgggatgctgctctagggatactcagggggctcctgctctccttccccttcccttcttgcctcaccattcccctaggcaggccctgcaggtcccacactctcccaggccctaaacttgggcggccttgccctgagagctggtcctccagcgaggccctgtcagcggtcttaggctcctgcacatgaaggtgtgtgcctgtggtgtgtgggctgctctaggagcagatacaggctggtatagaggatgcagaaaggtagggcagtatgtttaagtccagacttggcacatggctagggatactgctcactagctgtggaggtcctcaggagtggagagaatgagtaggagggcagaagcttccatttttgtccttcctaagaccctgttatttgtgttatttcctgcctttccgagtcctgcagtgggctgccctgtaccctgaacctcatgagcctctaagggaaaggaggaacaattaggacgtggcaatgagacctggcagggcagagtacaagcccagcacccagtgtcccagccttactgggtccttaccctgggccaaacagggagggctgatacctccttgctcttcctagatgcccacctcctacaatctcagcccacaagtcctctccaccctagggggcttgctgcatggcaataactcataatctgatttggaggtttgccctttacaggggcagattttctgctcagttcaacaatgaaatgaagaggaactccctctttctacagctcacttctatcagaggcccaggtgcctcagagccacattgagttgctttttctgggatgaggaagtagggttaaactccccagtttcctgagggaggctcctgacaggtgccctttgtcagaccctaccacagcctggataggcagccacattggtcctcgcccttgctcggcactccgtggtggtcctgcccttctccctgcatgcctgtgggtctgctctggtgtgtgaaggtcggtgggttaactgtgtgcctactgaacctggcaaataaacatcaccctgcaaagcctctgnnnannctctcgcctttgcttcctctgtcctactggggaggagcccctggaaggcagtggggaagggagaggctgggagcaggttcacaagtagtggctgggagtagtagtgaacagtgccctgtggatttcttgggctgagggtgaagatcatcctcaccacagtgtattcctcaatggtggtggtggtgggggtcctctgaactctagaaatccatgtgagtagtgggtcttgggctgcatttggaccaaggaatactccctgggctgagagctcaagtaagggctgctgtttttgactcctgttgaccgaggagccttactcttgatttaggcatagagctggaatctacctgggccagccagcgcaaggacagaccctgctcatagccaaagatagcttccctgagctagggagagggtgtagggtgagcaatgcacaaagattctatgctgctctgtgttgattccttctttctgtgaacacctgtgctttccacctatgccccaaatgaaatctcactctgggtctatttcagctggagcagatcagctttatattatgggactatgcacagggtttcttctgggtagagggagtaacactgccacagatactaagcctaaaaacccaaaagttgacttactccagcccaggtgggcctgggtgaactcaccagggatgctgctctctgggaggacctcaaagataacctcctcaaagataacttctctgatgtgggaataataaaaaggatttgttagtctctaaac

SEQ ID NO: 94802 - DNA, 2939 bp, Homo sapiens
cggggtgcgaatccggtgccggcaagcggctggcgatgctggaggttcgctagccgaagcggctgcatctggcgccgcgtctgccccgcgtgctcggagcggattctgcccgccgtccccggagccctcggcgccccgctgagcccgcgatcacttcctccctgtgaccaaccggcgctgcaggttagagcctggcaatgccgtttgggtgtgtgactctgggcgacaagaagaactataaccagccatcggaggtgactgacagatatgatttgggacaggtcatcaagactgaggagttttgtgaaatcttccgggccaaggacaagacgacaggcaagctgcacacctgcaagaagttccagaagcgggacggccgcaaggtgcggaaagctgccaagaacgagataggcatcctcaagatggtgaagcatcccaacatcctacagctggtggatgtgtttgtgacccgcaaggagtactttatcttcctggagctggccacggggagggaggtgtttgactggatcctggaccagggctactactcggagcgagacacaagcaacgtggtacggcaagtcctggaggccgtggcctatttgcactcactcaagatcgtgcacaggaatctcaagctggagaacctggtttactacaaccggctgaagaactcgaagattgtcatcagtgacttccatctggctaagctagaaaatggcctcatcaaggagccctgtgggacccccgagtatctggccccagaggtggtaggccggcagcggtatggacgccctgtggactgctgggccattggagtcatcatgtacatcctgctttcaggcaatccacctttctatgaggaggtggaagaagatgattatgagaaccatgataagaatctcttccgcaagatcctggctggtgactatgagtttgactctccatattgggatgatatttcgcaggcagccaaagacctggtcacaaggctgatggaggtggagcaagaccagcggatcactgcagaagaggccatctcccatgagtggatttctggcaatgctgcttctgataagaacatcaaggatggtgtctgtgcccagattgaaaagaactttgccagggccaagtggaagaaggctgtccgagtgaccaccctcatgaaacggctccgggcaccagagcagtccagcacggctgcagcccagtcggcctcagccacagacactgccacccccggggctgcagaccgtagtgccaccccagccacagatggaagtgccaccccagccactgatggcagtgtcaccccagccaccgatggaagcatcactccagccactgatgggagtgtcaccccagccactgacaggagcgctactccagccactgatgggagagccacaccagccacagaagagagcactgtgcccaccacccaaagcagtgccatgctggccaccaaggcagctgccacccctgagccggctatggcccagccggacagcacagccccagagggcgccacaggccaggctccaccctctagtaaaggggaagaggctgctggttatgcccaggagtctcaaagggaggaggccagctgagtaggcagcctggtgagggggggcaggggatgggcaggagggtgggagagtggatgaggggcttctcactgtacatagagtcactggcatgatgccctcgctcccccatgcccccacatcccagtggggcataactaggggtcacgggagagcagtctcgtctcctgtgtgtatgtgtgtgagtggtgggcaggccagtggcagggccggccccagcccctgcatggattccttgtggcttttctgtcttttgctagcttcaccagtttctgttccttgtgggatgctgctctagggatactcagggggctcctgctctccttccccttcccttcttgcctcaccattcccctaggcaggccctgcaggtcccacactctcccaggccctaaacttgggcggccttgccctgagagctggtcctccagcgaggccctgtcagcggtcttaggctcctgcacatgaaggtgtgtgcctgtggtgtgtgggctgctctaggagcagatacaggctggtatagaggatgcagaaaggtagggcagtatgtttaagtccagacttggcacatggctagggatactgctcactagctgtggaggtcctcaggagtggagagaatgagtaggagggcagaagcttccatttttgtccttcctaagaccctgttatttgtgttatttcctgcctttccgagtcctgcagtgggctgccctgtaccctgaacctcatgagcctctaagggaaaggaggaacaattaggacgtggcaatgagacctggcagggcagagtacaagcccagcacccagtgtcccagccttactgggtccttaccctgggccaaacagggagggctgatacctccttgctcttcctagatgcccacctcctacaatctcagcccacaagtcctctccaccctagggggcttgctgcatggcaataactcataatctgatttggaggtttgccctttacaggggcagattttctgctcagttcaacaatgaaatgaagaggaactccctctttctacagctcacttctatcagaggcccaggtgcctcagagccacattgagttgctttttctgggatgaggaagtagggttaaactccccagtttcctgagggaggctcctgacaggtgccctttgtcagaccctaccacagcctggataggcagccacattggtcctcgcccttgctcggcactccgtggtggtcctgcccttctccctgcatgcctgtgggtctgctctggtgtgtgaaggtcggtgggttaactgtgtgcctactgaacctggcaaataaacatcaccctgcaaagcc

SEQ ID NO: 94803 - DNA, 2933 bp, Homo sapiens
cggggtgcgaatccggtgccggcaagcggctggcgatgctggaggttcgctagccgaagcggctgcatctggcgccgcgtctgccccgcgtgctcggagcggattctgcccgccgtccccggagccctcggcgccccgctgagcccgcgatcacttcctccctgtgaccaaccggcgctgcaggttagagcctggcaatgccgtttgggtgtgtgactctgggcgacaagaagaactataaccagccatcggaggtgactgacagatatgatttgggacaggtcatcaagactgaggagttttgtgaaatcttccgggccaaggacaagacgacaggcaagctgcacacctgcaagaagttccagaagcgggacggccgcaaggtgcggaaagctgccaagaacgagataggcatcctcaagatggtgaagcatcccaacatcctacagctggtggatgtgtttgtgacccgcaaggagtactttatcttcctggagctggccacggggagggaggtgtttgactggatcctggaccagggctactactcggagcgagacacaagcaacgtggtacggcaagtcctggaggccgtggcctatttgcactcactcaagatcgtgcacaggaatctcaagctggagaacctggtttactacaaccggctgaagaactcgaagattgtcatcagtgacttccatctggctaagctagaaaatggcctcatcaaggagccctgtgggacccccgagtatctggccccagaggtggtaggccggcagcggtatggacgccctgtggactgctgggccattggagtcatcatgtacatcctgctttcaggcaatccacctttctatgaggaggtggaagaagatgattatgagaaccatgataagaatctcttccgcaagatcctggctggtgactatgagtttgactctccatattgggatgatatttcgcaggcagccaaagacctggtcacaaggctgatggaggtggagcaagaccagcggatcactgcagaagaggccatctcccatgagtggatttctggcaatgctgcttctgataagaacatcaaggatggtgtctgtgcccagattgaaaagaactttgccagggccaagtggaagaaggctgtccgagtgaccaccctcatgaaacggctccgggcaccagagcagtccagcacggctgcagcccagtcggcctcagccacagacactgccacccccggggctgcagaccgtagtgccaccccagccacagatggaagtgccaccccagccactgatggcagtgtcaccccagccaccgatggaagcatcactccagccactgatgggagtgtcaccccagccactgacaggagcgctactccagccactgatgggagagccacaccagccacagaagagagcactgtgcccaccacccaaagcagtgccatgctggccaccaaggcagctgccacccctgagccggctatggcccagccggacagcacagccccagagggcgccacaggccaggctccaccctctagtaaaggggaagaggctgctggttatgcccaggagtctcaaagggaggaggccagctgagtaggcagcctggtgagggggggcaggggatgggcaggagggtgggagagtggatgaggggcttctcactgtacatagagtcactggcatgatgccctcgctcccccatgcccccacatcccagtggggcataactaggggtcacgggagagcagtctcgtctcctgtgtgtatgtgtgtgagtggtgggcaggccagtggcagggccggccccagcccctgcatggattccttgtggcttttctgtcttttgctagcttcaccagtttctgttccttgtgggatgctgctctagggatactcagggggctcctgctctccttccccttcccttcttgcctcaccattcccctaggcaggccctgcaggtcccacactctcccaggccctaaacttgggcggccttgccctgagagctggtcctccagcgaggccctgtcagcggtcttaggctcctgcacatgaaggtgtgtgcctgtggtgtgtgggctgctctaggagcagatacaggctggtatagaggatgcagaaaggtagggcagtatgtttaagtccagacttggcacatggctagggatactgctcactagctgtggaggtcctcaggagtggagagaatgagtaggagggcagaagcttccatttttgtccttcctaagaccctgttatttgtgttatttcctgcctttccgagtcctgcagtgggctgccctgtaccctgaacctcatgagcctctaagggaaaggaggaacaattaggacgtggcaatgagacctggcagggcagagtacaagcccagcacccagtgtcccagccttactgggtccttaccctgggccaaacagggagggctgatacctccttgctcttcctagatgcccacctcctacaatctcagcccacaagtcctctccaccctagggggcttgctgcatggcaataactcataatctgatttggaggtttgccctttacaggggcagattttctgctcagttcaacaatgaaatgaagaggaactccctctttctacagctcacttctatcagaggcccaggtgcctcagagccacattgagttgctttttctgggatgaggaagtagggttaaactccccagtttcctgagggaggctcctgacaggtgccctttgtcagaccctaccacagcctggataggcagccacattggtcataatcgacgggcggcacctcgcggaatatttttagaagtctttgtgtaaattaatgtctgttgtgctgtgttaaggacgatgcgtaaactgtgtgcctactgaacctggaaatagaacttccccctgc

SEQ ID NO: 94804 - DNA, 3151 bp, Homo sapiens
cggggtgcgaatccggtgccggcaagcggctggcgatgctggaggttcgctagccgaagcggctgcatctggcgccgcgtctgccccgcgtgctcggagcggattctgcccgccgtccccggagccctcggcgccccgctgagcccgcgatcacttcctccctgtgaccaaccggcgctgcaggttagagcctggcaatgccgtttgggtgtgtgactctgggcgacaagaagaactataaccagccatcggaggtgactgacagatatgatttgggacaggtcatcaagactgaggagttttgtgaaatcttccgggccaaggacaagacgacaggcaagctgcacacctgcaagaagttccagaagcgggacggccgcaaggtgcggaaagctgccaagaacgagataggcatcctcaagatggtgaagcatcccaacatcctacagctggtggatgtgtttgtgacccgcaaggagtactttatcttcctggagctgtgagtgtgggtctggggacccaagattccccagcgcccagggctttcacctgtcccaccctctgcagctaaggaaaccccctttctggacccttggcgtcccaggtccctgtgccttgctcagccagctgcctggcgtaggcagctcacccaagtgctcctgccctacccctgattctgccacgccaggctcaggggctggtgtccctcagggccacggggagggaggtgtttgactggatcctggaccagggctactactcggagcgagacacaagcaacgtggtacggcaagtcctggaggccgtggcctatttgcactcactcaagatcgtgcacaggaatctcaagctggagaacctggtttactacaaccggctgaagaactcgaagattgtcatcagtgacttccatctggctaagctagaaaatggcctcatcaaggagccctgtgggacccccgagtatctggccccagaggtggtaggccggcagcggtatggacgccctgtggactgctgggccattggagtcatcatgtacatcctgctttcaggcaatccacctttctatgaggaggtggaagaagatgattatgagaaccatgataagaatctcttccgcaagatcctggctggtgactatgagtttgactctccatattgggatgatatttcgcaggcagccaaagacctggtcacaaggctgatggaggtggagcaagaccagcggatcactgcagaagaggccatctcccatgagtggatttctggcaatgctgcttctgataagaacatcaaggatggtgtctgtgcccagattgaaaagaactttgccagggccaagtggaagaaggctgtccgagtgaccaccctcatgaaacggctccgggcaccagagcagtccagcacggctgcagcccagtcggcctcagccacagacactgccacccccggggctgcagaccgtagtgccaccccagccacagatggaagtgccaccccagccactgatggcagtgtcaccccagccaccgatggaagcatcactccagccactgatgggagtgtcaccccagccactgacaggagcgctactccagccactgatgggagagccacaccagccacagaagagagcactgtgcccaccacccaaagcagtgccatgctggccaccaaggcagctgccacccctgagccggctatggcccagccggacagcacagccccagagggcgccacaggccaggctccaccctctagtaaaggggaagaggctgctggttatgcccaggagtctcaaagggaggaggccagctgagtaggcagcctggtgagggggggcaggggatgggcaggagggtgggagagtggatgaggggcttctcactgtacatagagtcactggcatgatgccctcgctcccccatgcccccacatcccagtggggcataactaggggtcacgggagagcagtctcgtctcctgtgtgtatgtgtgtgagtggtgggcaggccagtggcagggccggccccagcccctgcatggattccttgtggcttttctgtcttttgctagcttcaccagtttctgttccttgtgggatgctgctctagggatactcagggggctcctgctctccttccccttcccttcttgcctcaccattcccctaggcaggccctgcaggtcccacactctcccaggccctaaacttgggcggccttgccctgagagctggtcctccagcgaggccctgtcagcggtcttaggctcctgcacatgaaggtgtgtgcctgtggtgtgtgggctgctctaggagcagatacaggctggtatagaggatgcagaaaggtagggcagtatgtttaagtccagacttggcacatggctagggatactgctcactagctgtggaggtcctcaggagtggagagaatgagtaggagggcagaagcttccatttttgtccttcctaagaccctgttatttgtgttatttcctgcctttccgagtcctgcagtgggctgccctgtaccctgaacctcatgagcctctaagggaaaggaggaacaattaggacgtggcaatgagacctggcagggcagagtacaagcccagcacccagtgtcccagccttactgggtccttaccctgggccaaacagggagggctgatacctccttgctcttcctagatgcccacctcctacaatctcagcccacaagtcctctccaccctagggggcttgctgcatggcaataactcataatctgatttggaggtttgccctttacaggggcagattttctgctcagttcaacaatgaaatgaagaggaactccctctttctacagctcacttctatcagaggcccaggtgcctcagagccacattgagttgctttttctgggatgaggaagtagggttaaactccccagtttcctgagggaggctcctgacaggtgccctttgtcagaccctaccacagcctggataggcagccacattggtcctcgcccttgctcggcactccgtggtggtcctgcccttctccctgcatgcctgtgggtctgctctggtgtgtgaaggtcggtgggttaactgtgtgcctactgaacctggcaaataaacatcaccctgcaaagcc

SEQ ID NO: 94805 - DNA, 252 bp, Homo sapiens
cccctgtctttcaaaagcagttacagcacagccaggagagccgtgtgcatgcacctcccctaccatttcaaacacatgccttggaaacttcgccctgcttttccgagtatcaagtccatcaaataacaaatgatagtgtaaagacagggcacttaatcacgttatgtggcatgattagtagccgtctccagaattcaggcaacttataaaccacacccttgtctcatcttaatgagacaaggtagagccgag

SEQ ID NO: 94806 - DNA, 123 bp, Homo sapiens
gaaaataaatcaggtaatattggattttaattcattatatgaaatacatatctatgagtcctcggtgacatagatgattgaatcattaaactggggaagaaaagaaaaatcagtgcagaacaa

SEQ ID NO: 94807 - DNA, 455 bp, Homo sapiens
tgccccttgtttccacagctgaggcacagaaagtagcctcttttgtgaggagttgggagttaagtatacatttatttttttaccatgatttgttcaggaccacattttacaagataccttgtttcctttattattgtttctggaaagtcctattcatattattttatttgaatatagaatatagtttttttaaatgagggcttattttgaaaaattctgagcttaattcaaatttatgccaataccttcccaaataaggtaatagtcaaagacagatgttctgatcaaatggcttagagatagtcctggaatattcatattcaaagattccttattaatgaatgtctttaacttaaatctacccaataattgcaacatggttctttgtacattttcattatatggtgttaacaagcttcactgcaaacaaataaattacttaagttatttgttta

SEQ ID NO: 94808 - DNA, 318 bp, Homo sapiens
tagctaattaaccacagagatttgggaagaaatctattaaagagaccaaatacagtgtgaacaaaaagcaagtggtaatgttgccgcttattactgttatggccattaatattaatattaatgctattatttagttttattattactctgatacatcattattattgctgtctcctagcatcttcaccataaatctatcaccaaatgttttagaggtttaatattgttatagttatgtaattaaacaaatagaaataatcgttgcagaattgcagagttacataattattgctcctcaatggaaacgataaataaaac

SEQ ID NO: 94809 - DNA, 347 bp, Homo sapiens
aaaacctgatgttaattagcaagaccctcttaatttgattcttggtttatttctacttttcgtaagagtgaccatgatactccatataatatcctcagttctctggcatccttggtgatctgttttccagacctcatactggagagcaaatagctcttcttttcctcagctaatattgagtgctggggagtcacaaaccttgctgattggctctattaaaaatgcagtttttcattgctggttagtaattcttaatctcttttaagtttctcattataattactcaacttcccatgattttctttaaagagtattctatatgtgtattccattcggtaatttctttg

SEQ ID NO: 94810 - DNA, 459 bp, Homo sapiens
cttgtatatcaaaggcctgtgaaaatggctgattataaaggagaaagttaatgatctctaattgtgttgtaatgtaaatgcagtatcaccgtaatgaagagaacagatttgcatgttaacaaaagaaatattagaggagtgagtgtaggatgtttgggataattaattccatcctccactcctacatacatatgcatatacaaactcaattcaattttaaagagaacccgaagaaccaaaaatagactgaacacacttgatgttgtatgggagcttaaattactatttttgttgttctctgtgactatctcatttagtttctattgtgtttgcaatttcttccaaggtgatttttaatggattgagtaatgcataaaaatttgcagaagtatgcagaaagtttgtatgcagggccatgtagagcttttatcctacagtaaatcctagtagtttgctggt

SEQ ID NO: 94811 - DNA, 723 bp, Homo sapiens
ctggcgtacaacgccaagcgatccccctcctcagagagagcttacaccccatgctgctctccatcatcatcactgttgcagacaacctcaactccaagaactcagggatttacgctgctgccgtggctgtgctggatgcgatggttgagagcctggacaacctttgccttctaccagcgcttgctgggcgagtgcgtttcctgagtggccgtgcggtgctggatgtcacagatcgcctggcagtgctggtggcctcagtttacccccggaagcctcaagctgtagagcggcatgtccttcccatcctctggcacttcctgaacaccgccaccaggaatggcaccctgcctggacccagcgggaacatccgcggggtggtgtgccggctgtccaggagcctccaggagcacatgggctcccgcctgctggactttgccgccagccagccaaagcacgtcctcaagacgctccaggaactcttagactcagagtccttgggaggcagccgcaaggccactgacagaggggtggcccctgacagcaagacaactggcagctcatacccttttcagctggattaaagatggatctgaaatgggcaattattatttatcttatttttttgatggactattctcctggttactttcccccttagagttccagatgtacatggtatattttgaagtagaaataaaagaattacttatttttctaaggttt

SEQ ID NO: 94812 - DNA, 395 bp, Homo sapiens
gaacaaaacattcaaaccaaatcagagagagaagtcaactgtgctaaaatcttccaagaaagcaaatagtatgaacacagagaggtgactgaagccagcctcataggggtaacaagaattctggacagaaatataattatcattaatcattaaacaggctgcactttggtccccttccttgtaactgaaagtcatgtagcagcacttgatactggctgtttgtatcctcatggttcctatagataggatttctgatgttggaatcataagagtttgggccaggcatgatggctcacacctgtaatcccagcactttgggaagccgaggtgggcagatcacttgagcccaggagttcaagaccagcctgggatacatggtgaaacccaatctctac

SEQ ID NO: 94813 - DNA, 806 bp, Homo sapiens
cgattctgccacttttttttttctctcaagaaagtttaaatttaagctcctgaaaaaagtcagtgtgcctacagataccactttattttgtccacttagatcagaactaggttgctatctttagcttaattctagcatatgagaaatgtgagatagttctatgaagactgtagtgaaaaaaaaaagattagaaatgtaaagtacaaggtgggaaattattgaaattgctattatttaacccaaagaagaaaaagtttgggcattattactttatagatgaggaaaggggaggctcagatggaggtaaagtaccttacccacagtcacccaagcactcggagtctcaatgggggcctgcactcagattagcctgccagtattgaagtctcaattcctcatctgctacaggagcctgatacatttgtgagtgacaagtatagtcgatactcattatttgcggattccatatttgcaaatttacctatttgctaaaatttatttttaacccaaaatcaatacttgtggttttatggtcattcacagtcatgcaagcagagcagcaaaaaaaaaaatgtgtttcctgacacgcgtgtttccagctgaggttgaacaaggcagtctctgccttttcttatactataaacaagtgtccttctgatggtcgattaagtgccacagttttttgtatttttgtgctttttgttgatcattttgctgtttaaagtgatcccaaagcatcgtgcaaaactgtttagtgtttacaagaaggctgtggtgtcttacagagaaaatgtgtgtttaaggta

SEQ ID NO: 94814 - DNA, 319 bp, Homo sapiens
tccccatgctcagttctcggggtacagagacaaatgaaacgcagtcttgccttcaaggaatttacaacctgttatcatctgattagtcagttgtttcaattgtgagttggtaaattgaatgaattgactccagaattttgaggtaggcatttctgtttttaaaaagtttcaggctgggcacaatgcctcccacctgtaaccctaatgcttttggaggctgagtcaggaagattgcctgagcccaggagtttgaggctacagtgagtaatgatggtgccacttactgcagcctgggcaacagagtcagaccattgtctct

SEQ ID NO: 94815 - DNA, 443 bp, Homo sapiens
tagctgccgtgggaaactgcttggcaacacttcaccaactttgccatgtgaactgaggtgtgcagccatggtcatgccaccctggagcatgtcaggtggtaacagaccctgcagtttatgctaggggcacctgttatccaggatggagctcatgctcatggaatagaagtatttttagaaaaaaattgtattgttagtttcattccataaacaggtaatactttttttggtagaaaacagaagtctcacagacatgcacatgcacatacaataaaaattcataattccaaaaaccagaggtaaattcttttaatattttggtgcaaatagcatcctagagtgtttgtatgtggatatagatgagtacaaaagacagcacagcttctgcttctggccaacatggaataacagggcctggatttactctcttgcctgggatagtc

SEQ ID NO: 94816 - DNA, 439 bp, Homo sapiens
agggaggcagagcacagagatgggtagaggaacctagttctgatgcaactggtaaattagctaattaagtatcaaatagacttttcagatacaagtttgcttaaaacagttttgagtggcttttctatccttgaatctgagagaatcttggcctctacaaaccatgtggtagggtgcttgtggttctcacttattttcacattggcgacaccttgggagttttttaaattacagatttaaaaacattcgtggaccgacgtgttcaatttcatatacagtgtgcatcatttcagggcttcagccattctgcgttctgttgtgaccatcgtcagaaagtgcctactacatgtgctgttgcatatgaagatactttataaagagagcttcatagacaactccagaattgtgtttaatctatttccaaattcttttacatcct

SEQ ID NO: 94817 - DNA, 426 bp, Homo sapiens
ttttttttggagacagagcctagctctcacccaggctggagtgcagtggcacgatcttggctcactgcaacctcctcttcccaggttcaagcaattctcctgcctcagcttccagagtagctgggactatcggcgcatgctgccatgcctggctaattttttttgttttagtagagatggggtttccctgtgttgccgaggctggtctccaactcctgaactcaggcaatccgcctgcctcggcctcccaaagtgctaggattacaggcgtgagccaccacagcccggcctagtctcaggctttctatgtgaagtcttttctgcatagcttgagtactccttctcagggagactgtctcaccatccgatttaaaatactagctccagcactccctgccctccccaccatctaatttttctccacat

SEQ ID NO: 94818 - DNA, 2293 bp, Homo sapiens
atcattttcatgttatagttatgcctgtgtggcctctgtcagaactattatcagtaaaagaggttaagcctatatatgaatgatggaccaaaaccttgaggttgtacattaactgaaatagtattttataaaatcttatggtgctgtggaaaatatttattatttcaccttttctgacacttcaccatggagactattcaggtaatacaattttaagtcattgcagttaatactctggttaattggtactgttaatcacccaggtcaggaattctgattttaggttatctcattaatcatggctgataaagaagctaaggggattctccagatctaatagatttcattagtcatttgtgtcgagtattcctccctaaaaacaaaagcagtattttctttctcaattaatttttaagttattcattaaaaaatatataacatcttaattttattcttttaaaaacatacagtgaagccttgctacaagagtcataagtgactggaatttcttgcataataggttcctccttttgaatagatcagattcatccccaggctctcagcagtgtcatgatgaaatgagtgtgctgacttccagggtgtggtggacactggtagctagccttatcagctccctccttattcctacctctgtcagcagcatgcctcgccccttacctaattctgctgtgactctgacagagaggaagtgccttctcactttgcaaaggaatgcagcatgtcacaaaggaggtgctccaattttttgtgtccttacttccctatgtttgcctagttactgaggctaggtcgagtgtgaagcaataggtgtaagatgctgagagcacatggacagctaccagggagatctgttgcttggttacagggtgtattcatgagtggtagctgcagttgtcgtgagagacatgcttggcatacagagctgtctaatgggtgggagacatgtaatggtagatttagggctgggagcatgattttgggtctgcccaaaggaacatggtgtcacttttgttctttctgacccactaaataaaaagtagtgtaacagggtttcactggaatgtttattagaaagtttacactttttatatttttatgattttaaaaacaaacaataatagaaaaacagattttaaggaacttcagagcagtatatattctgtctaaactcactgaatattttaagttgtaaatcaggtgtccaccaacctttatttttgcattgcaggagatgtgactgtaaagtagggagtttttttttttgagacagagtttcacccttgttgcccaggctagagtgtaatggtgcaatctccgctcactgcaacctctgcctcccaggttcaagcgattctcctgcctcagcctccctagtagctgggattacaggcatgcaccaccacacccggctaatttttttatatttttagtagagacaaggtttctccatgttggtcaggctggtctcgaactcccgacctcaggtgatctgcccgcctcagcctcccaaagtgctgggattacaggcgtgagccactgcgcccggccaaattattttggtgggtagattcattctctttacctaatagtcataatttagtcagtgaagggacaacatctggggtaagagctatggaggaggtgctcagctttgtgagttttgtgccaggcatctttgctgaaaatggagatggcagcaagtgtgaatctgggggaatataagggaagacagaaaagccttaagagtagacggaggaagaagggtaccagaatagtccctgtggaggcaggcagatcagagctcagggtttgaaagtgggcctgagtaagggtcctgctagagaaactgcagatggaagctgagcagttaccaactgctaatgtgccaagtataccaagcacagcatgtgtcctgtagaggagcattattttaaacaatgttctactatcatctaccaaaataattgtggtaaaagtgtagtattttattttttccttttatgtcagcaatattttaaaatattgatctgtttatcttatatttttatggataaatgtagtatttgcctcatgattgtgagccactgagagtgcactgaacctattcacatgtctttaagatgttttgctgtgttaaaattttaggagagaaaaatacaagtgaataattatttaataggcatttattactttattttggagttgaattctgtcatttgaaaaagttcagtaatgtaataaatacaaagtgatctgcactgttaaaagtcta

SEQ ID NO: 94819 - DNA, 954 bp, Homo sapiens
cggaggctgcgcggcggagagtagagagctagagggtgagaagcgctgggccggaccagaactgtcttagcttttccctctgcggctgctctggttggttactttgagcctgcctcctcagcgccgcaggagagacttaacagcaaaaatgactgtgtcctgagttcagcccccactgctctgggagcttccccctggtttctgcacctgaagaatgtcatcccagccgaagttcttaggagcggggagcacaaagaaaaacaaagaaaagcagacctgaaaattgggacctgggagaaatagacgagtgctctaaaccagtatcatggctccagttcctctgacaaggattcacatggggttgcaattctgactgtgctggtgatgctggttccaggtccctcaggaacccctcccccagtctggtctgcccttgaactctatactggccccagggtatcccaggattgtcagaaaggcctggccaggattcacctgggagagggatcagcatctctgcaaagttgttggattgaaagaactttcattttgagctacatcattgaagagctttaaatctgaaaataagaaagacgttgaaccctattactcacatctctttgtcatttgaagcagatcccgaaccactcaaaaggacaaaacaaggaaatagcaatgaaattggattcagtgaatggggtaagggtattaagtgtctgaaatataagagataaaaaaattagtttttacctttttttctattttctaaatgttttggtggctagaataagatatactttgaactcaagagcaataaatgttaatatattaaaagtagctttatgaaatatggaaagtatctttatttcaaaatacttcaaagtaatcatctgaatatttatcagaaatattaagacaacttattaaatcctgtattaaaatgattgcttatta

SEQ ID NO: 94820 - DNA, 1040 bp, Homo sapiens
cggaggctgcgcggcggagagtagagagctagagggtgagaagcgctgggccggaccagaactgtcttagcttttccctctgcggctgctctggttggttactttgagcctgcctcctcagcgccgcaggagagacttaacagcaaaaatgactgtgtcctgagttcagcccccactgctctgggagcttccccctggtttctgcacctgaagaatgtcatcccagccgaagttcttaggagcggggagcacaaagaaaaacaaagaaaagcagacctgaaaattgggacctgggagaaatgggaactcaaaccaaaaacaggaatcatccttgctaattagtgctgagtggatcagggactaaccagaatcaggcaacaagaaaatagacgagtgctctaaaccagtatcatggctccagttcctctgacaaggattcacatggggttgcaattctgactgtgctggtgatgctggttccaggtccctcaggaacccctcccccagtctggtctgcccttgaactctatactggccccagggtatcccaggattgtcagaaaggcctggccaggattcacctgggagagggatcagcatctctgcaaagttgttggattgaaagaactttcattttgagctacatcattgaagagctttaaatctgaaaataagaaagacgttgaaccctattactcacatctctttgtcatttgaagcagatcccgaaccactcaaaaggacaaaacaaggaaatagcaatgaaattggattcagtgaatggggtaagggtattaagtgtctgaaatataagagataaaaaaattagtttttacctttttttctattttctaaatgttttggtggctagaataagatatactttgaactcaagagcaataaatgttaatatattaaaagtagctttatgaaatatggaaagtatctttatttcaaaatacttcaaagtaatcatctgaatatttatcagaaatattaagacaacttattaaatcctgtattaaaatgattgcttatta

SEQ ID NO: 94821 - DNA, 991 bp, Homo sapiens
actctacatcctcccacaatgatactagacagacacactggcacacctcgaaatttctgggttgtgcacagcccaagagggctcatttaagctgccatgtccactcctccaacaaatccaggcaccatctaaagggaacatgccaagtcacagtctcctttgtgaattccataatggcaagagagctctcattcatatttgcgttcctggcacccagagcacatttaataaaagttgattaaacaaaaataatgacttggtcctgaactgcattctacaactgctccttgagttttgtcccatcctataataaccatcacaagctctgctatttattctaccatttctgtcctggccccacctttgagattgttctcacagttatctttgccactaggttgcaattctgactgtgctggtgatgctggttccaggtccctcaggaacccctcccccagtctggtctgcccttgaactctatactggccccagggtatcccaggattgtcagaaaggcctggccaggattcacctgggagagggatcagcatctctgcaaagttgttggattgaaagaactttcattttgagctacatcattgaagagctttaaatctgaaaataagaaagacgttgaaccctattactcacatctctttgtcatttgaagcagatcccgaaccactcaaaaggacaaaacaaggaaatagcaatgaaattggattcagtgaatggggtaagggtattaagtgtctgaaatataagagataaaaaaattagtttttacctttttttctattttctaaatgttttggtggctagaataagatatactttgaactcaagagcaataaatgttaatatattaaaagtagctttatgaaatatggaaagtatctttatttcaaaatacttcaaagtaatcatctgaatatttatcagaaatattaagacaacttattaaatcctgtattaaaatgattgcttatta

SEQ ID NO: 94822 - DNA, 1052 bp, Homo sapiens
cggaggctgcgcggcggagagtagagagctagagggtgagaagcgctgggccggaccagaactgtcttagcttttccctctgcggctgctctggttggttactttgagcctgcctcctcagcgccgcaggagagacttaacagcaaaaatgactgtgtcctgagttcagcccccactgctctgggagcttccccctggtttctgcacctgaagaatgtcatcccagccgaagttcttaggagcggggagcacaaagaaaaacaaagaaaagcagacctgaaaattgggacctgggagaaatgttggagtgcagtggcaccacctcagcttattgcaacctccacctcccgggttcaagcaattctcctgcctcagcctcccaagttgctgggactacagagacgagtgctctaaaccagtatcatggctccagttcctctgacaaggattcacatggggttgcaattctgactgtgctggtgatgctggttccaggtccctcaggaacccctcccccagtctggtctgcccttgaactctatactggccccagggtatcccaggattgtcagaaaggcctggccaggattcacctgggagagggatcagcatctctgcaaagttgttggattgaaagaactttcattttgagctacatcattgaagagctttaaatctgaaaataagaaagacgttgaaccctattactcacatctctttgtcatttgaagcagatcccgaaccactcaaaaggacaaaacaaggaaatagcaatgaaattggattcagtgaatggggtaagggtattaagtgtctgaaatataagagataaaaaaattagtttttacctttttttctattttctaaatgttttggtggctagaataagatatactttgaactcaagagcaataaatgttaatatattaaaagtagctttatgaaatatggaaagtatctttatttcaaaatacttcaaagtaatcatctgaatatttatcagaaatattaagacaacttattaaatcctgtattaaaatgattgcttatta

SEQ ID NO: 94823 - DNA, 911 bp, Homo sapiens
agcggctgggagggacgcccagggagaccgtacgtcactgctctgcgccggaagaccctattttcaggttctcttccctccattcctaccccttccccggtaccataaaatcccgggatatgagctggaagaggcatcacctgatcccggagacctttggagttaagaggcggcggaagcgagggcctgtggagtcggatcctcttcggggtgagccaggtcggcgcgcgcggctgtctcagaactcatgcagctgttcccgcgaggcctgtttgaggacgcgctgccgcccatcgtgctgaggagccaggtgtacagccttgtgcctgacaggaccgtggccgaccggcagctgaaggagcttcaagagcagggggagatcagaatcgtccagctgggcttcgacttggatgcccatggaattatcttcactgaggactacaggaccagagtatgtgactgtgtcctcaaggcctgtgatggccgaccgtatgctggggcagtgcagaaatttctagcttcagtacttccagcctgtggggaccttagtttccagcaggaccaaatgacacagacctttggcttcagggactcagaaatcacgcatctggtgaatgctggagtcctcaccgtccgagatgctgggagctggtggctagctgtgcctggagttgggagattcatcaagtactttgttaaagggcgccaggctgtccttagcatggtccggaaggccaaagtacccgggaactggtcctatcagagctcctgggccggcgggcgcctgtcgtggtgcggttggcctcacctaccatgtgcacgacctccttggggcccgctatggactgctctctacccttcaggaacctcctccgctgccaagactgaaatctgccctcctggtccgccta

SEQ ID NO: 94824 - DNA, 406 bp, Homo sapiens
ccgggaactcgcccccacccaccctgctcgcctcctcaccgtgcaccctggccacagcagcccctccagtggggccccaggaactcaatggatggggctcagccttccgttgtccacagttctaggagaaaaaacacaatgtggccagcagaggtgatggctcactgctgctgatggcagccctgcattcaaaaataacaccaggtgttgtcactgcatagagaagcaggttggaccccacctgtccacagggcatttccctggttctcaatgtttagcttgctgttaggctgggcggtgtggctcacgcctgtaatcccagcattttgggaggctgaggcaggcggatcacctgaggttaggagttcaagaccagcctggccaacatggtgcaaccccatctcta

SEQ ID NO: 94825 - DNA, 612 bp, Homo sapiens
aaaaaaaaagagtcattgtgacatacacaatacaaataggtatatagtaatttgttaaaaccattagatcatgttcatataagcttggaacttatttaatgtctccaatgttgtgatggcttgcttttataatttatgattggttttgttatcaaaaaatcacagtttgaactgagagtgaaagtagaccaacgactccttttttcttatctctcatcttgctgtctgaagaactgttgaagcctccttgagatggctcttgtctgtcttgcatgtaggatgtaccttgtaactattgaagtgtccaattgagagtgttcaagagtcagtcaagaactgtccatctggctagagattttgtttttcatccacttcaagtcagtgccttttcctgttggtgttttccatagttattattgcccccttgttctgataggtcatatgtcacatatctctgagacatcataggtcagccatgtggagcctaccgaacaagtgtttgtgtcttaggacctgttgaagagggataggcgtggtgttcgagcagtttctctttcagctgggcttatttctgtcctgttacccactctgttcacatttatatgaaaaaaa

SEQ ID NO: 94826 - DNA, 488 bp, Homo sapiens
cctcaggtgatccaccagcctgagcctctcaaagtgctgggattacaggtgtgagccatagcgcctggccccattaagggaaatttagatgttccattttatttttatatcaatgataaattccccaagggtaataactgtatcatggttattaggagaatacccttaagctgaggacatacatacttaagtatctaggggtaaagaggcatgatgtctgcaatttattctcaaatggttcagcaaaaaagcataaagcatgtgtatgtgagagagagagagagagagaggaatagggatggatggagagggaaaaataaagcaaatacggcaaagtaactcataaaaatcttcctataactagaactattctattctttaaaaaaatacaaaaatctcatacaaaatatgctactatatgcagagcttcctaatggggtctgacacccgtggtacccttcatgtaatgatttttgttcttctgatag

SEQ ID NO: 94827 - DNA, 137 bp, Homo sapiens
aacatggagaacattcaaacacaatatgggggaggaggcgacctgcgtgacttttaacatccccttcatatcctcccactgggcgcattttaagcgccagcgctcaccacatccggctgccccaccgcccgcgcccg

SEQ ID NO: 94828 - DNA, 520 bp, Homo sapiens
gagatattttgaataatactcgaaagtgattacagcatattagacataaaattatttttaaaataccacctttactcagcactagaaatgagagtaaaacccacagaaaactgtctacactatgcgggtgctgttaagggtgaaaagtagcacatgaagaactcacacctgaatttctaaataccttgctaggaactggaaatggggtagaaattaaaagagaagtgggagcttataggactctcttcctggcttcacagtggagggggttcccaattctgtggaagaccagcctctcttcttcagttctggatatcatctcccattcctatttctcaagagcccctctcctttagctctttactggaatatttccatgcttttattatgttatatttattatatgatcacaccaagcaataataacatttaatccctatattgcaccccattgaaaaatcaactcaaatggatcaaagacttaaatataagacctggatctataaaactactagaggaa

SEQ ID NO: 94829 - DNA, 626 bp, Homo sapiens
cccgtccttttcgctctcatctttgggcgctttgtgcagctgccttctttgtctccgcctctccggcgactgggctctcccttccctccctctcctccctcccccagtgtcaagaagccatcggcctcaagggcatcgatatttcagggtcatgaagctggaagccagctgtggcacagccacctcagaggtccctaagccggaaaagaagactgcccgagatgcagagccaagctctgaaacccggccacaggaggtggaggccgagcccaggtcgggatcggggcctgaggctgaggccgagccattggacttcgtggtggccacggaacgggagtttgaggaagtgctggccatctcggggggcatctacggcggcctggactaccttcctagccgctaccacagctggctccgggaccccgaccgcacggtggtgctggccaagcgcaacggaggcgtggtgagcccgggggcacggcccaggtgacatggggtgaagccacctgcgggtgcgtggatcttaggaagaggaggatgagagcttctccccagccttcctctggaggctgcggaaatagagcctgctttgggaccaaagtgcagggcgtgcagtgcggatccag

SEQ ID NO: 94830 - DNA, 653 bp, Homo sapiens
cgacgttagagtcgggctccgacagcgcggccgagtccccgcgcgtcatcctcctttgactcttgggggctccaaagggacctctctcttggcaccgggggtgtctgcgcccgccgcccgccccgcttggctttgcggcatctcggccctggctccagctccggctccggcgagggtcatgaagctggaagccagctgtggcacagccacctcagaggtccctaagccggaaaagaagactgcccgagatgcagagccaagctctgaaacccggccacaggaggtggaggccgagcccaggtcgggatcggggcctgaggctgaggccgagccattggacttcgtggtggccacggaacgggagtttgaggaagtgctggccatctcggggggcatctacggcggcctggactaccttcctagccgctaccacagctggctccgggaccccgaccgcacggtggtgctggccaagcgcaacggaggcgtggtgagcccgggggcacggcccaggtgacatggggtgaagccacctgcgggtgcgtggatcttaggaagaggaggatgagagcttctccccagccttcctctggaggctgcggaaatagagcctgctttgggaccaaagtgcagggcgtgcagtgcggatccag

SEQ ID NO: 94831 - DNA, 464 bp, Homo sapiens
cccagtcatatactgttgatagaaatgttgagtcctttgcctatcttttaatcaggttgttttttagctattgagttttttgagttccttacatattttggatattaactccctatcagatgttttgattgcaaatattttatcctaatttgcatattatttcttcatcctattaactgcttcctttgctgtgcaaaacttgtaagtttgatataattccctttgtctatttttgcttttgttgcttgatcttttagaatcaaatccaaaaaaataattgcccagaccagtgtcatgtggtgttttcctatgctttcttctagtgcagttactgtttcaggtcttaggtttaagactttaatccattttgagttgacttttgtaacgaatatgagataaaaggataaaggttgtttcatgtttctgcatgtggatatccagttttctcaacactctttattaaa

SEQ ID NO: 94832 - DNA, 81 bp, Homo sapiens
ctcaaattcatttcatggtggaaaacaactgacagccccagcagtctctatccttgagcctgcagtggccttcaatgaatg

SEQ ID NO: 94833 - DNA, 3536 bp, Homo sapiens
cggctcaagtgaactgactctgctagaacagtgccgtgcttttccacagaaggttagaccctgaaagagatggctcagcaccacctatggatcttgctcctttgcctgcaaacctggccggaagcagctggaaaagactcagaaatcttcacagtgaatgggattctgggagagtcagtcactttccctgtaaatatccaagaaccacggcaagttaaaatcattgcttggacttctaaaacatctgttgcttatgtaacaccaggagactcagaaacagcacccgtagttactgtgacccacagaaattattatgaacggatacatgccttaggtccgaactacaatctggtcattagcgatctgaggatggaagacgcaggagactacaaagcagacataaatacacaggctgatccctacaccaccaccaagcgctacaacctgcaaatctatcgtcggcttgggaaaccaaaaattacacagagtttaatggcatctgtgaacagcacctgtaatgtcacactgacatgctctgtagagaaagaagaaaagaatgtgacatacaattggagtcccctgggagaagagggtaatgtccttcaaatcttccagactcctgaggaccaagagctgacttacacgtgtacagcccagaaccctgtcagcaacaattctgactccatctctgcccggcagctctgtgcagacatcgcaatgggcttccgtactcaccacaccgggttgctgagcgtgctggctatgttctttctgcttgttctcattctgtcttcagtgtttttgttccgtttgttcaagagaagacaaggtaggattttcccagaaggttcctgcttgaacaccttcactaagaacccttatgctgcctcaaagaaaaccatatacacatatatcatggcttcaaggaacacccagccagcagagtccagaatctatgatgaaatcctgcagtccaaggtgcttccctccaaggaagagccagtgaacacagtttattccgaagtgcagtttgctgataagatggggaaagccagcacacaggacagtaaacctcctgggacttcaagctatgaaattgtgatctaggctgctgggctgaattctccctctggaaactgagttacaaccaccaatactggcaggttccctggatccagatcttctctgcccaactcttactgggagattgcaaactgccacatctcagcctgtaagcaaagcaggaaaccttctgctgggcatagcttgtgcctaaatggacaaatggatgcatacccttcctgaaatgactcccttctgaatgaatgacaaagcaggttacctagtatagttttcccaaacttcttcccatcatagcacatgtagaaaataatatttttatggcacactgggataaacaagcaagattgctcacttctggaagctgcatatgactagaggcctcttgtgactggaggtaacaaccctgcccagtaactgtgggagaaggggatcaatattttgcacacctgtaataggccatggcacaccagccaagatgctctgctcacagtcagtatgtgtgaagatccctggtgcgtggccttcaccacgcatcttgagcaaattaggaaaatgtacccttcgcttgaggcagatgcagcccttcccccgagtgcatggcttggagagcagaatgtgggctgcatataagcacactcatccctttgtctgggaatctttgtgcagggcataacaggcttagtaagtccaaacacagatgacagtgctgtgtgggtctctgtcagagttgtggctctcagccatgtagacacactctccaaatggagtgttggaaaatgttctttctgcagggtctagagactgctgggacacttttcttggagtgctacttcagaagccttataggattttctttctggccaagatttccttctgtatcactccaagcagcctcagcagaagaagcagccatgcccagtattcccactctccaaaaggaactgaccagcttatatttctcacacttctggggaactgggtataatccaaccatcaaaatagaagaccttgcaagaagcagagtcattctccagaaggaacttgggagatgatggtgcagatgatgaaactgggttcatcccagttccaaagactcagagaactagagtttaagctgaggcagagtgccgccaccctggcatgccccacaaacagatcaccagccagcttacacaggcattaactctcctcaatgaggaagaatcattcacaactgagcaagacattcatatgatcatttaaggaagtgtttcccttatgtgttagcaagtataatcggctaactcctaaatcccaatgaatagtcctaggctggacagcaatgggctgcaattaggcagataaagacatcagtcccagtaaatgaatccatagactcatctagcaccaactaccattagcactatgttaggagctgcaaggccccaaagtagaagatgtgcataatgtctgctcttgtgtagctcaggagacaattccagcacagacactacagttaacgctgaactgcagctgcaagtaatagcatgaacagtcagaaaaataccttatgagggggcagggctgaagctgggccttgaaggatggatgaaatttggatagagaatgaggaagacagagggcctccaagtgagagaagcatgaaaaatgagcaggggcctggatcagtggggtgtattcagagcacctctccagatgcaccatgcatgctcacagtcccttgcctatgtgtggcagagtgtcccagccagatgtgtgcccccaccccatgtccatttacatgtccttcaatgcccacctcaaaaggtacctcttctgtaaagctttccctggtatcaggaatcaaaattaatcagggatcttttcacactgctgttttttcctctttggtccttctatcactaaaactcatctcattcagccttacagcataactaattatttgttttcctcactacattgtacatgtgggaattacagataaacggaagccggctggggtggtggctcacgcctgtaaccccaacactttgggaggccaaggcaggcggatcacctgaggtcaggagttcgagattagtctggccaacatggtgaaaccccatctctactaaaaatacgaaattagccaggtgtggtggcacacatctgtagtcccagctactctggaggctgagacaggagaatcgcttgaacccaggaagtggaggttgcagtgagctgagatcacaccactgcactccagcctgggagagagagagtgagtctccatctcaaaaaaaaaaaaagatagaagccaataagcatggtgcaatcaaattctggcaagcattaaatatcaggatgcagctgggcacggtggctcacgcctgtaatcccagcactttgggaggccaaggtgggcggatcacttgaggtcaggaatttgagaggatcctggccagcatggcaaa

SEQ ID NO: 94834 - DNA, 1367 bp, Homo sapiens
cggctcaagtgaactgactctgctagaacagtgccgtgcttttccacagaaggttagaccctgaaagagatggctcagcaccacctatggatcttgctcctttgcctgcaaacctggccggaagcagctggaaaagactcagaaatcttcacagtgaatgggattctgggagagtcagtcactttccctgtaaatatccaagaaccacggcaagttaaaatcattgcttggacttctaaaacatctgttgcttatgtaacaccaggagactcagaaacagcacccgtagttactgtgacccacagaaattattatgaacggatacatgccttaggtccgaactacaatctggtcattagcgatctgaggatggaagacgcaggagactacaaagcagacataaatacacaggctgatccctacaccaccaccaagcgctacaacctgcaaatctatcgtcggcttgggaaaccaaaaattacacagagtttaatggcatctgtgaacagcacctgtaatgtcacactgacatgctctgtagagaaagaagaaaagaatgtgacatacaattggagtcccctgggagaagagggtaatgtccttcaaatcttccagactcctgaggaccaagagctgacttacacgtgtacagcccagaaccctgtcagcaacaattctgactccatctctgcccggcagctctgtgcagacatcgcaatgggcttccgtactcaccacaccgggttgctgagcgtgctggctatgttctttctgcttgttctcattctgtcttcagtgtttttgttccgtttgttcaagagaagacaaggtaggattttcccagaaggtaaaatgtggaaactcaccttctctcctcctgggactgaagccatttatccaaggtttagctgaaaggcccattgttccagggaatctgcctttttccgatctccaccccaccacctcccagaatgatggctctgaggatggtatgacattaccctgaatggtcttcagaatccattcctgagatcaccagtagctggtgggcccagaacatgggttcgagcttagtacatacatgaacaagctgtgcttcactgtacgagtgtgttcacctttccagctcagggccctcacatgtgaaatgtttggactagaggatctccagggtcacttccaatttcattgtattttgattatgactattggagagtcattgagaaacatatactaatcctgtactccatggttgtcactatgtccctctgaatccctctggatcattctgtagttgtgccattctccattcagaaaacctgatcttagaccctcaaggaatcattataccctccgattcacccaca

SEQ ID NO: 94835 - DNA, 3031 bp, Homo sapiens
gttaaaaaactaagaccgtgacatggaaagtcaactagccatgcaagacagtcagtggtaagtgtcagaaacatgaagggagatcctgggtagaagagctacatttgactggccacacagggaggggttggggaaattgtctttggcctaatctggactctagagtagaagagaattcccattgacctgtgggtgaggcctcagccaagtgactcctgagacattctgaggatccaagcatccatttcaaaggatggcagccatttaatccctgggggcttcctttcttcatcttaaaaagagaacattggaatagatcattgctaaaaaaaccacctttcacagactgtgggtctatatttatttgtgagacagatgctgcctcaaagaaaaccatatacacatatatcatggcttcaaggaacacccagccagcagagtccagaatctatgatgaaatcctgcagtccaaggtgcttccctccaaggaagagccagtgaacacagtttattccgaagtgcagtttgctgataagatggggaaagccagcacacaggacagtaaacctcctgggacttcaagctatgaaattgtgatctaggctgctgggctgaattctccctctggaaactgagttacaaccaccaatactggcaggttccctggatccagatcttctctgcccaactcttactgggagattgcaaactgccacatctcagcctgtaagcaaagcaggaaaccttctgctgggcatagcttgtgcctaaatggacaaatggatgcatacccttcctgaaatgactcccttctgaatgaatgacaaagcaggttacctagtatagttttcccaaacttcttcccatcatagcacatgtagaaaataatatttttatggcacactgggataaacaagcaagattgctcacttctggaagctgcatatgactagaggcctcttgtgactggaggtaacaaccctgcccagtaactgtgggagaaggggatcaatattttgcacacctgtaataggccatggcacaccagccaagatgctctgctcacagtcagtatgtgtgaagatccctggtgcgtggccttcaccacgcatcttgagcaaattaggaaaatgtacccttcgcttgaggcagatgcagcccttcccccgagtgcatggcttggagagcagaatgtgggctgcatataagcacactcatccctttgtctgggaatctttgtgcagggcataacaggcttagtaagtccaaacacagatgacagtgctgtgtgggtctctgtcagagttgtggctctcagccatgtagacacactctccaaatggagtgttggaaaatgttctttctgcagggtctagagactgctgggacacttttcttggagtgctacttcagaagccttataggattttctttctggccaagatttccttctgtatcactccaagcagcctcagcagaagaagcagccatgcccagtattcccactctccaaaaggaactgaccagcttatatttctcacacttctggggaactgggtataatccaaccatcaaaatagaagaccttgcaagaagcagagtcattctccagaaggaacttgggagatgatggtgcagatgatgaaactgggttcatcccagttccaaagactcagagaactagagtttaagctgaggcagagtgccgccaccctggcatgccccacaaacagatcaccagccagcttacacaggcattaactctcctcaatgaggaagaatcattcacaactgagcaagacattcatatgatcatttaaggaagtgtttcccttatgtgttagcaagtataatcggctaactcctaaatcccaatgaatagtcctaggctggacagcaatgggctgcaattaggcagataaagacatcagtcccagtaaatgaatccatagactcatctagcaccaactaccattagcactatgttaggagctgcaaggccccaaagtagaagatgtgcataatgtctgctcttgtgtagctcaggagacaattccagcacagacactacagttaacgctgaactgcagctgcaagtaatagcatgaacagtcagaaaaataccttatgagggggcagggctgaagctgggccttgaaggatggatgaaatttggatagagaatgaggaagacagagggcctccaagtgagagaagcatgaaaaatgagcaggggcctggatcagtggggtgtattcagagcacctctccagatgcaccatgcatgctcacagtcccttgcctatgtgtggcagagtgtcccagccagatgtgtgcccccaccccatgtccatttacatgtccttcaatgcccacctcaaaaggtacctcttctgtaaagctttccctggtatcaggaatcaaaattaatcagggatcttttcacactgctgttttttcctctttggtccttctatcactaaaactcatctcattcagccttacagcataactaattatttgttttcctcactacattgtacatgtgggaattacagataaacggaagccggctggggtggtggctcacgcctgtaaccccaacactttgggaggccaaggcaggcggatcacctgaggtcaggagttcgagattagtctggccaacatggtgaaaccccatctctactaaaaatacgaaattagccaggtgtggtggcacacatctgtagtcccagctactctggaggctgagacaggagaatcgcttgaacccaggaagtggaggttgcagtgagctgagatcacaccactgcactccagcctgggagagagagagtgagtctccatctcaaaaaaaaaaaaagatagaagccaataagcatggtgcaatcaaattctggcaagcattaaatatcaggatgcagctgggcacggtggctcacgcctgtaatcccagcactttgggaggccaaggtgggcggatcacttgaggtcaggaatttgagaggatcctggccagcatggcaaa

SEQ ID NO: 94836 - DNA, 3467 bp, Homo sapiens
cggctcaagtgaactgactctgctagaacagtgccgtgcttttccacagaaggttagaccctgaaagagatggctcagcaccacctatggatcttgctcctttgcctgcaaacctggccggaagcagctggaaaagactcagaaatcttcacagtgaatgggattctgggagagtcagtcactttccctgtaaatatccaagaaccacggcaagttaaaatcattgcttggacttctaaaacatctgttgcttatgtaacaccaggagactcagaaacagcacccgtagttactgtgacccacagaaattattatgaacggatacatgccttaggtccgaactacaatctggtcattagcgatctgaggatggaagacgcaggagactacaaagcagacataaatacacaggctgatccctacaccaccaccaagcgctacaacctgcaaatctatcgtcggcttgggaaaccaaaaattacacagagtttaatggcatctgtgaacagcacctgtaatgtcacactgacatgctctgtagagaaagaagaaaagaatgtgacatacaattggagtcccctgggagaagagggtaatgtccttcaaatcttccagactcctgaggaccaagagctgacttacacgtgtacagcccagaaccctgtcagcaacaattctgactccatctctgcccggcagctctgtgcagacatcgcaatgggcttccgtactcaccacaccgggttgctgagcgtgctggctatgttctttctgcttgttctcattctgtcttcagtgtttttgttccgtttgttcaagagaagacaaggtaggattttcccagaaggtaaaatgtggaaactcaccttctctcctcctgggactgaagccatttatccaaggtttagctgaaaggcccattgttccagggaatctgcctttttccgatctccaccccaccacctcccagaatgatggctctgaggatggtatgacagtaaacctcctgggacttcaagctatgaaattgtgatctaggctgctgggctgaattctccctctggaaactgagttacaaccaccaatactggcaggttccctggatccagatcttctctgcccaactcttactgggagattgcaaactgccacatctcagcctgtaagcaaagcaggaaaccttctgctgggcatagcttgtgcctaaatggacaaatggatgcatacccttcctgaaatgactcccttctgaatgaatgacaaagcaggttacctagtatagttttcccaaacttcttcccatcatagcacatgtagaaaataatatttttatggcacactgggataaacaagcaagattgctcacttctggaagctgcatatgactagaggcctcttgtgactggaggtaacaaccctgcccagtaactgtgggagaaggggatcaatattttgcacacctgtaataggccatggcacaccagccaagatgctctgctcacagtcagtatgtgtgaagatccctggtgcgtggccttcaccacgcatcttgagcaaattaggaaaatgtacccttcgcttgaggcagatgcagcccttcccccgagtgcatggcttggagagcagaatgtgggctgcatataagcacactcatccctttgtctgggaatctttgtgcagggcataacaggcttagtaagtccaaacacagatgacagtgctgtgtgggtctctgtcagagttgtggctctcagccatgtagacacactctccaaatggagtgttggaaaatgttctttctgcagggtctagagactgctgggacacttttcttggagtgctacttcagaagccttataggattttctttctggccaagatttccttctgtatcactccaagcagcctcagcagaagaagcagccatgcccagtattcccactctccaaaaggaactgaccagcttatatttctcacacttctggggaactgggtataatccaaccatcaaaatagaagaccttgcaagaagcagagtcattctccagaaggaacttgggagatgatggtgcagatgatgaaactgggttcatcccagttccaaagactcagagaactagagtttaagctgaggcagagtgccgccaccctggcatgccccacaaacagatcaccagccagcttacacaggcattaactctcctcaatgaggaagaatcattcacaactgagcaagacattcatatgatcatttaaggaagtgtttcccttatgtgttagcaagtataatcggctaactcctaaatcccaatgaatagtcctaggctggacagcaatgggctgcaattaggcagataaagacatcagtcccagtaaatgaatccatagactcatctagcaccaactaccattagcactatgttaggagctgcaaggccccaaagtagaagatgtgcataatgtctgctcttgtgtagctcaggagacaattccagcacagacactacagttaacgctgaactgcagctgcaagtaatagcatgaacagtcagaaaaataccttatgagggggcagggctgaagctgggccttgaaggatggatgaaatttggatagagaatgaggaagacagagggcctccaagtgagagaagcatgaaaaatgagcaggggcctggatcagtggggtgtattcagagcacctctccagatgcaccatgcatgctcacagtcccttgcctatgtgtggcagagtgtcccagccagatgtgtgcccccaccccatgtccatttacatgtccttcaatgcccacctcaaaaggtacctcttctgtaaagctttccctggtatcaggaatcaaaattaatcagggatcttttcacactgctgttttttcctctttggtccttctatcactaaaactcatctcattcagccttacagcataactaattatttgttttcctcactacattgtacatgtgggaattacagataaacggaagccggctggggtggtggctcacgcctgtaaccccaacactttgggaggccaaggcaggcggatcacctgaggtcaggagttcgagattagtctggccaacatggtgaaaccccatctctactaaaaatacgaaattagccaggtgtggtggcacacatctgtagtcccagctactctggaggctgagacaggagaatcgcttgaacccaggaagtggaggttgcagtgagctgagatcacaccactgcactccagcctgggagagagagagtgagtctccatctcaaaaaaaaaaaaagatagaagccaataagcatggtgcaatcaaattctggcaagcattaaatatcaggatgcagctgggcacggtggctcacgcctgtaatcccagcactttgggaggccaaggtgggcggatcacttgaggtcaggaatttgagaggatcctggccagcatggcaaa

SEQ ID NO: 94837 - DNA, 572 bp, Homo sapiens
ctttgctgaattggataatggtttccaaataccagaagaatacttcctattttttgtgctattcacaatgtaatggctacagatattatacaattttaagtttcatctgcattcctccattgctatcttaagtctagagcaacaatcatcaaaacagtaaatcgagtcctagcttatagcaattgcaaatttctgtggggtaatactcctaccatggctgattttaagacatgcagaattagaaagacagatactctgttaacaaaggacagatacaatagatgtagataacctcgagagcatagacagcaggaaaatgtcaaaaaaaggattagaaagtgatgagttttgaggatttattatctttatttttaacataatttatttaattatgtttttataatttaatttttaatgatggcttgcaaatttctgagaatttaacaattggctcccacaaactagtacaagccagctccagctcactattggctcatgtgtttgcccccacaggtcggcttgggaaaccaaaaattacacagagtttaatggcatctgtgaacagcacctgt

SEQ ID NO: 94838 - DNA, 3485 bp, Homo sapiens
cggctcaagtgaactgactctgctagaacagtgccgtgcttttccacagaaggttagaccctgaaagagatggctcagcaccacctatggatcttgctcctttgcctgcaaacctggccggaagcagctggaaaagactcagaaatcttcacagtgaatgggattctgggagagtcagtcactttccctgtaaatatccaagaaccacggcaagttaaaatcattgcttggacttctaaaacatctgttgcttatgtaacaccaggagactcagaaacagcacccgtagttactgtgacccacagaaattattatgaacggatacatgccttaggtccgaactacaatctggtcattagcgatctgaggatggaagacgcaggagactacaaagcagacataaatacacaggctgatccctacaccaccaccaagcgctacaacctgcaaatctatcgtcggcttgggaaaccaaaaattacacagagtttaatggcatctgtgaacagcacctgtaatgtcacactgacatgctctgtagagaaagaagaaaagaatgtgacatacaattggagtcccctgggagaagagggtaatgtccttcaaatcttccagactcctgaggaccaagagctgacttacacgtgtacagcccagaaccctgtcagcaacaattctgactccatctctgcccggcagctctgtgcagacatcgcaatgggcttccgtactcaccacaccgggttgctgagcgtgctggctatgttctttctgcttgttctcattctgtcttcagtgtttttgttccgtttgttcaagagaagacaagatgctgcctcaaagaaaaccatatacacatatatcatggcttcaaggaacacccagccagcagagtccagaatctatgatgaaatcctgcagtccaaggtgcttccctccaaggaagagccagtgaacacagtttattccgaagtgcagtttgctgataagatggggaaagccagcacacaggacagtaaacctcctgggacttcaagctatgaaattgtgatctaggctgctgggctgaattctccctctggaaactgagttacaaccaccaatactggcaggttccctggatccagatcttctctgcccaactcttactgggagattgcaaactgccacatctcagcctgtaagcaaagcaggaaaccttctgctgggcatagcttgtgcctaaatggacaaatggatgcatacccttcctgaaatgactcccttctgaatgaatgacaaagcaggttacctagtatagttttcccaaacttcttcccatcatagcacatgtagaaaataatatttttatggcacactgggataaacaagcaagattgctcacttctggaagctgcatatgactagaggcctcttgtgactggaggtaacaaccctgcccagtaactgtgggagaaggggatcaatattttgcacacctgtaataggccatggcacaccagccaagatgctctgctcacagtcagtatgtgtgaagatccctggtgcgtggccttcaccacgcatcttgagcaaattaggaaaatgtacccttcgcttgaggcagatgcagcccttcccccgagtgcatggcttggagagcagaatgtgggctgcatataagcacactcatccctttgtctgggaatctttgtgcagggcataacaggcttagtaagtccaaacacagatgacagtgctgtgtgggtctctgtcagagttgtggctctcagccatgtagacacactctccaaatggagtgttggaaaatgttctttctgcagggtctagagactgctgggacacttttcttggagtgctacttcagaagccttataggattttctttctggccaagatttccttctgtatcactccaagcagcctcagcagaagaagcagccatgcccagtattcccactctccaaaaggaactgaccagcttatatttctcacacttctggggaactgggtataatccaaccatcaaaatagaagaccttgcaagaagcagagtcattctccagaaggaacttgggagatgatggtgcagatgatgaaactgggttcatcccagttccaaagactcagagaactagagtttaagctgaggcagagtgccgccaccctggcatgccccacaaacagatcaccagccagcttacacaggcattaactctcctcaatgaggaagaatcattcacaactgagcaagacattcatatgatcatttaaggaagtgtttcccttatgtgttagcaagtataatcggctaactcctaaatcccaatgaatagtcctaggctggacagcaatgggctgcaattaggcagataaagacatcagtcccagtaaatgaatccatagactcatctagcaccaactaccattagcactatgttaggagctgcaaggccccaaagtagaagatgtgcataatgtctgctcttgtgtagctcaggagacaattccagcacagacactacagttaacgctgaactgcagctgcaagtaatagcatgaacagtcagaaaaataccttatgagggggcagggctgaagctgggccttgaaggatggatgaaatttggatagagaatgaggaagacagagggcctccaagtgagagaagcatgaaaaatgagcaggggcctggatcagtggggtgtattcagagcacctctccagatgcaccatgcatgctcacagtcccttgcctatgtgtggcagagtgtcccagccagatgtgtgcccccaccccatgtccatttacatgtccttcaatgcccacctcaaaaggtacctcttctgtaaagctttccctggtatcaggaatcaaaattaatcagggatcttttcacactgctgttttttcctctttggtccttctatcactaaaactcatctcattcagccttacagcataactaattatttgttttcctcactacattgtacatgtgggaattacagataaacggaagccggctggggtggtggctcacgcctgtaaccccaacactttgggaggccaaggcaggcggatcacctgaggtcaggagttcgagattagtctggccaacatggtgaaaccccatctctactaaaaatacgaaattagccaggtgtggtggcacacatctgtagtcccagctactctggaggctgagacaggagaatcgcttgaacccaggaagtggaggttgcagtgagctgagatcacaccactgcactccagcctgggagagagagagtgagtctccatctcaaaaaaaaaaaaagatagaagccaataagcatggtgcaatcaaattctggcaagcattaaatatcaggatgcagctgggcacggtggctcacgcctgtaatcccagcactttgggaggccaaggtgggcggatcacttgaggtcaggaatttgagaggatcctggccagcatggcaaa

SEQ ID NO: 94839 - DNA, 3387 bp, Homo sapiens
cggctcaagtgaactgactctgctagaacagtgccgtgcttttccacagaaggttagaccctgaaagagatggctcagcaccacctatggatcttgctcctttgcctgcaaacctggccggaagcagctggaaaagactcagaaatcttcacagtgaatgggattctgggagagtcagtcactttccctgtaaatatccaagaaccacggcaagttaaaatcattgcttggacttctaaaacatctgttgcttatgtaacaccaggagactcagaaacagcacccgtagttactgtgacccacagaaattattatgaacggatacatgccttaggtccgaactacaatctggtcattagcgatctgaggatggaagacgcaggagactacaaagcagacataaatacacaggctgatccctacaccaccaccaagcgctacaacctgcaaatctatcgtcggcttgggaaaccaaaaattacacagagtttaatggcatctgtgaacagcacctgtaatgtcacactgacatgctctgtagagaaagaagaaaagaatgtgacatacaattggagtcccctgggagaagagggtaatgtccttcaaatcttccagactcctgaggaccaagagctgacttacacgtgtacagcccagaaccctgtcagcaacaattctgactccatctctgcccggcagctctgtgcagacatcgcaatgggcttccgtactcaccacaccgggttgctgagcgtgctggctatgttctttctgcttgttctcattctgtcttcagtgtttttgttccgtttgttcaagagaagacaaggtgcttccctccaaggaagagccagtgaacacagtttattccgaagtgcagtttgctgataagatggggaaagccagcacacaggacagtaaacctcctgggacttcaagctatgaaattgtgatctaggctgctgggctgaattctccctctggaaactgagttacaaccaccaatactggcaggttccctggatccagatcttctctgcccaactcttactgggagattgcaaactgccacatctcagcctgtaagcaaagcaggaaaccttctgctgggcatagcttgtgcctaaatggacaaatggatgcatacccttcctgaaatgactcccttctgaatgaatgacaaagcaggttacctagtatagttttcccaaacttcttcccatcatagcacatgtagaaaataatatttttatggcacactgggataaacaagcaagattgctcacttctggaagctgcatatgactagaggcctcttgtgactggaggtaacaaccctgcccagtaactgtgggagaaggggatcaatattttgcacacctgtaataggccatggcacaccagccaagatgctctgctcacagtcagtatgtgtgaagatccctggtgcgtggccttcaccacgcatcttgagcaaattaggaaaatgtacccttcgcttgaggcagatgcagcccttcccccgagtgcatggcttggagagcagaatgtgggctgcatataagcacactcatccctttgtctgggaatctttgtgcagggcataacaggcttagtaagtccaaacacagatgacagtgctgtgtgggtctctgtcagagttgtggctctcagccatgtagacacactctccaaatggagtgttggaaaatgttctttctgcagggtctagagactgctgggacacttttcttggagtgctacttcagaagccttataggattttctttctggccaagatttccttctgtatcactccaagcagcctcagcagaagaagcagccatgcccagtattcccactctccaaaaggaactgaccagcttatatttctcacacttctggggaactgggtataatccaaccatcaaaatagaagaccttgcaagaagcagagtcattctccagaaggaacttgggagatgatggtgcagatgatgaaactgggttcatcccagttccaaagactcagagaactagagtttaagctgaggcagagtgccgccaccctggcatgccccacaaacagatcaccagccagcttacacaggcattaactctcctcaatgaggaagaatcattcacaactgagcaagacattcatatgatcatttaaggaagtgtttcccttatgtgttagcaagtataatcggctaactcctaaatcccaatgaatagtcctaggctggacagcaatgggctgcaattaggcagataaagacatcagtcccagtaaatgaatccatagactcatctagcaccaactaccattagcactatgttaggagctgcaaggccccaaagtagaagatgtgcataatgtctgctcttgtgtagctcaggagacaattccagcacagacactacagttaacgctgaactgcagctgcaagtaatagcatgaacagtcagaaaaataccttatgagggggcagggctgaagctgggccttgaaggatggatgaaatttggatagagaatgaggaagacagagggcctccaagtgagagaagcatgaaaaatgagcaggggcctggatcagtggggtgtattcagagcacctctccagatgcaccatgcatgctcacagtcccttgcctatgtgtggcagagtgtcccagccagatgtgtgcccccaccccatgtccatttacatgtccttcaatgcccacctcaaaaggtacctcttctgtaaagctttccctggtatcaggaatcaaaattaatcagggatcttttcacactgctgttttttcctctttggtccttctatcactaaaactcatctcattcagccttacagcataactaattatttgttttcctcactacattgtacatgtgggaattacagataaacggaagccggctggggtggtggctcacgcctgtaaccccaacactttgggaggccaaggcaggcggatcacctgaggtcaggagttcgagattagtctggccaacatggtgaaaccccatctctactaaaaatacgaaattagccaggtgtggtggcacacatctgtagtcccagctactctggaggctgagacaggagaatcgcttgaacccaggaagtggaggttgcagtgagctgagatcacaccactgcactccagcctgggagagagagagtgagtctccatctcaaaaaaaaaaaaagatagaagccaataagcatggtgcaatcaaattctggcaagcattaaatatcaggatgcagctgggcacggtggctcacgcctgtaatcccagcactttgggaggccaaggtgggcggatcacttgaggtcaggaatttgagaggatcctggccagcatggcaaa

SEQ ID NO: 94840 - DNA, 857 bp, Homo sapiens
cggctcaagtgaactgactctgctagaacagtgccgtgcttttccacagaaggttagaccctgaaagagatggctcagcaccacctatggatcttgctcctttgcctgcaaacctggccggaagcagctggaaaagactcagaaatcttcacagtgaatgggattctgggagagtcagtcactttccctgtaaatatccaagaaccacggcaagttaaaatcattgcttggacttctaaaacatctgttgcttatgtaacaccaggagactcagaaacagcacccgtagttactgtgacccacagaaattattatgaacggatacatgccttaggtccgaactacaatctggtcattagcgatctgaggatggaagacgcaggagactacaaagcagacataaatacacaggctgatccctacaccaccaccaagcgctacaacctgcaaatctatcgtcggcttgggaaaccaaaaattacacagagtttaatggcatctgtgaacagcacctgtaatgtcacactgacatgctctgtagagaaagaagaaaagaatgtgacatacaattggagtcccctgggagaagagggtaatgtccttcaaatcttccagactcctgaggaccaagagctgacttacacgtgtacagcccagaaccctgtcagcaacaattctgactccatctctgcccggcagctctgtgcaggtaaccagctctgcccatctctcctggtgagtctcagagatcactctgaggagctgcaaggtctgaacgtgggccacattctctagggagatgtgcttcctttatctttgcctggtcactgagggcatcacctcccaagaagcctact

SEQ ID NO: 94841 - DNA, 338 bp, Homo sapiens
aaaattaggcttgaataacatgtttagtatgctcagttatttctgtttgtttgtgttaagcatccaatctaatatagttgggttttatgatcttcaagaaaggtatcaatgaagagcaacatgaggctttttgggttccatttggtgggtgggggaggaagttaaagttgtttgaacattagaaagaatgtgattatctggttggttttgtgttttctggtaaatattccagttggtaaatctaacattgctacagaagttggctttgttcatatagcttctctacaattagatatttttagaagtttaagcaaaactcacaaattcaggggggaaaa

SEQ ID NO: 94842 - DNA, 389 bp, Homo sapiens
ccacaaattatttacattcctcccacatgcaaaaatacactcagtcccaccaaaggtctcccaaagtctcatcccattatggcgtcaggatgaggtccaggaactcatcatttaaaccaggtccaggtgtggaggaaattcctcaggtgtaattcctcaaatacaattctcagtatgaagacctgtgagctagagacaagttatctgccacacacacaaccccaatgtccaatgcagtacagtcataggaaaaccactacagatatttttgttcaaaagaggtggaagggggagacaaaaaaaaaagtcactggtccttagaaaatcagaactttagctgggaaaatgttggaaattccttgattcagacactgctcaactcctaccta

SEQ ID NO: 94843 - DNA, 816 bp, Homo sapiens
cctcttccacagtgttgaaataaggttggaaagtttcatttttctatctcaactttatactttgaaaaaaaaaaattccaaacctacagactagccaaaggaataagaaaatgaacaactgcatctctctcacccagattcactaattgtgaatgttttgccacatttatgcttttttctgcaacacactttttcttaaaagccagctgtttaagttgcagataattgacacttcaactctgactacttaacctttgtatctatatagaacaagatattaaacattggtacaatagtgttatttaaaatgtagccacattaacactctccccagttgttaccaaattgttcttttttgcttttaaaaaatccaggatgtaatctaggatagttttattgtgtttggttgttatatctctttagtctcctttgatccagaagagcatgcccagtttttgtctttcgtgacattggcatttttgaagcgtccaggcctgttttcttgtcatacgtctcctagtcttgttttgcctgattgtttccataggttgtggtgtagtggtgcatgttcgtgttcgcatttcctcttgcattgcttctgtttgtcccatccttggtgatgctcagtctggatgcctgttgggagtagggcctgccagtctgtccattgggaaggtgcttggcaggtgtaattgctcaggactgtagagaaagtgggcgaggtcaagagttggacttgggtctgaatggctccagctcctgtgttctgcaccactttgctgcattgcctctttcttcttgaaaacaaaaaaaaaa

SEQ ID NO: 94844 - DNA, 385 bp, Homo sapiens
ccacagagagtatctgttccctgatatcttatctgatgtgcattcaaaccaagtttcaaaaacttttcaaagtcatcattctcttcactacaaattaagtttgctaacaatattgccatttttttttccttaggaatgaaaagaatgtctgtgcttattaaagggagacaaaactcttggcccgggccccacatgggccactttgtgagttatgttggagggagaacaggcctcatctccaccctacaaccaaaccaataccaggtaaggcaggagggcgtttctcaaggataagagcgacacggcctgacagtcactagtattcatttttcacaattgcctaagtgattttcttcttatttgagctgagggtctctatgtgtga

SEQ ID NO: 94845 - DNA, 153 bp, Homo sapiens
tccagcattccagcagttctgaaggtcctgtgcctggcctcacaagcccattacaggttgcaaagatctaatgatcttctcagaaggaaactgaggagacaggaggcactgagaagctgcacaagcagcacttgcgtgattctcagagagtac

SEQ ID NO: 94846 - DNA, 599 bp, Homo sapiens
gcttaagtgattcagttcatgtcaaacaacatttcacaggattcttacccccaaggcaactctttactatccagtacataagactctagaacattaaaattctttatatagtgccatgtggcatctaaaataactttggctaggaaataaaacatatttgcagaaagtttggggttgaaatcaaagaatggatcaaagtggcccttcatttggctccacgtcatctcacaatagtgaaatacagcagaatgtcactaaactaccataaaactaaggggagagactttgcaaaaacagggagtgacagacacgttttttgctcctgttttaaagtaaattgtactaatgacaacaatagtgatcttttataggcccaagttggatcagtgatcaatttatagcatttctgtttcaaatattcaaaagcaaaaagtaatctgccaattagaaaacaaaaaacttcaaacttaagtgatgtaatgatggagcacctgtatttgactagatgttatatacatgccattgaaagacatagtacctaatctgcctaatgtctataaactggtgcaaataaaagacatttaaaccatgaaatctct

SEQ ID NO: 94847 - DNA, 329 bp, Homo sapiens
gcttaagtgattcagttcatgtcaaacaacatttcacaggattcttacccccaaggcaactctttactatccagtacataagactctagaacattaaaattctttatatagtgccatgtggcatctaaaataactttggctaggaaataaaacatatttgcagaaagtttggggttgaaatcaaagaatggatcaaagtggcccttcatttggctccacgtcatctcacaatagtgaaatacagcagaatgtcactaaactaccataaaactaagggatcaagccttaagcgtgatcagcgggtatactctagagtcagactagcagac

SEQ ID NO: 94848 - DNA, 425 bp, Homo sapiens
ggcccttttagtgacctgcagggactgtagctaggtagctgacgtcgtataacagacgatagcgactgagaacagttagaatggcaatcattaaaaagtcaggaaacaacaggtgctggagaggatgtggagaaataggaacacttttacactgttggtgggactgtaaactagttgctatatgttataataagccatttgtactttaaaaatactgtgagcatagtattattattataatcattattatcatcaaaggagaggacctctagtgaatttatgttgatatgcccatgtagcacagaaccatacaaactttgctagcaaaaatagcctacccttttgaaactgtttcccatgcttggggtatagaatggaaaggggtcactgccctggggttgctgatatcacatagtagccacagc

SEQ ID NO: 94849 - DNA, 208 bp, Homo sapiens
aagatagtgccattgcactccagcctgggtgacaagagtgaaattctgtctcaaaacaaaaaacaaacaaaaaacaaaacaaaacaaaaaacaactcagccacctctgcccacacaattcctaatagcacgagctagctgtctctatagaggtccatcctgctgttaaatagcccggaccattgccaaattcctcctgagtgcaaatg

SEQ ID NO: 94850 - DNA, 342 bp, Homo sapiens
cccgactagcccgacgccaaaaaaaatcctaagcaaaaagaacaaagctgaaggcatcatattacccaacttcaaactatactacaaggctacagtaacccaaacagcatggtactggtacaaaacagacacataaatattgatactaataatgatctatttacctatgtgtataaatgccagtaagtaaaaagtgctataaagaaaaataaagcaagctgaaggattagagactgaaggttattatgcctttttttttttttttttttttgggggcaaggggtcaggggggggttcctgtggaaggggggaatatttcccaaaagcccagggggattcaaa

SEQ ID NO: 94851 - DNA, 692 bp, Homo sapiens
aacagtcccaaaaggggcattagaaatcctggcgttttgctgatgttctgcttcttgatgtagatgcttatactgtagagcacatctcttcaaggagaactacaaaccactgctcaacgaaataaaagaggacacaaacaaatggaagaacatttcatgctcatggacagaaagaatcaatatcgtgaaaatggccatactaccctaggtaatttatagattcaatgccatccccatcaagctaccaatgactttcttcacagaataggaaaaaactactttaaagttcatatggaatcaaaaaagagcccgcattgccaagataatcctaagccaaaagaacaaagctggaggcatcatgctacctgacctcgaactatactacaaggctacagtaaccaaaacagcatggtactggtaccaaaacagagatatagaccaatggaactcaacagagccctcagaagtaataccacacatctacaaccatctcatctttgacaaacctgacaaaaacaagaaatggggaaaggattccctatttaataaatggtgctgggaaaactggctagccatacgtagaaatctaaaattggatgccttgcttacaccttatacaaaaattaattcaagatggcttaaagacttaaatgttagacctaaaaccataaaaaccctagaagaaaacctag

SEQ ID NO: 94852 - DNA, 680 bp, Homo sapiens
atcatgagatgcagaccacatggagaccttaatgcatggagatcttgcccactagtagcgtggcccagcgttttgggacacagcccaatcagaccagtatttcccctctggagctggattgaggagggaacatggggactgaaaccttgaatgcttctgctttaattaccccgaaaagctagtgccactggttagaacatggaagatcaggcctagctgtctgggcgcggcatcgtcagtcacggaatgctaacatgtcctatgtacccctcatgatccacacaaagaccttctgagccttgtgaatttaacgtagagggatgactgctattgcttcattcctgtgccctctgagtgggacgactgtgcctagagtgctgctgtgccattggtgacccgcctctgccatgagatgccatgccctggaactggacctgccttctctcccatcttcctcatggttgggcatgggtctcctccacttttgctcagcccgagcaggcaagccccgcttgtcctcagaagcatggggtcaatttgtcacattccagaggagagcccgccgcagggtttcaatcacctggtggtgggatgatgaggacaggacacatttacttgggggccgtcaatcggatttacaagctctccagcgacctgaaggtcttggtgacgcatgagac

SEQ ID NO: 94853 - DNA, 201 bp, Homo sapiens
ttagcagctctgagatgggaaatttgttgtccctttgattggccccacgaagagcccgagtgaagaagcagatgtcaaatgatttgctttattataaatgacctggagagatacctggcaaagtcatcaccaagttctttctcaagttgctctgcagctcaagaaaagagctggccaggcacggtggctcacacctataat

SEQ ID NO: 94854 - DNA, 425 bp, Homo sapiens
aatgccaggatgctctttagtttctgctgactctaggagaagtggtcaggcctgccctaacattggcagggcccagggaaagattacaaatggagacccatgtgttacaggtcacatttagaagttagaaatcaagctaataaaccattaaataaaagatgtttttgttcttcttccttgacaaagtaggccttcaaaatgacctggaaggccaggatggactttagaattcttgacttcttagggttccacaccacggtattgtagttggaagagcctcccccagcctttccccttttctcccactcctatctccatctcaaggggccttgcacacctgcttgcgagcaatgcggcgtgcatgtccatgctctgtacatgcatacaatcacatgcacacatacacaaccaataacagttccagg

SEQ ID NO: 94855 - DNA, 459 bp, Homo sapiens
acagtctttgtggtccatttagcaaatacttctatgtacctgtccttgttgtttctaagtcttttcaccaaccattccatccttctctactgagtaaggtttagtggtccacacccacttccctaccagctgccccagcatgtaaggataattggcctactgcttttgaaaggtttctgatatctatccctggccccgcatccttatagaatccaaataagggcaagataacccctgattcccagtgggggtggaaagtaggtcagtgctgctgtctggccaagtctcgaggatggtgtttaaggcctgactatagaaaactctgtgattattgtccaggggcaatatatgcatgacctcggttccaaggcagttcatagtatcccagtccctgtcagttctttcccctactgagaaaaaaatcatgggatcaggtgtctggaacctggtttgatatgg

SEQ ID NO: 94856 - DNA, 272 bp, Homo sapiens
ggaacaagactgaatagctcagcagctccagtgtgtctgtataagaaaagtgccagctgtcagcaaagtgctttaccatagagcctccatggtggcccaaaagagacaagtaacaataacaatatctgtcatctttataattctaaaatatggtcttctgatggggttgggggtgggacagagtaaaacattaatctactaaactcactaatctactggaagcagaaagcagaaatggcttaactcgctgattttatttattgcactctagg

SEQ ID NO: 94857 - DNA, 443 bp, Homo sapiens
tacccccgactagccgacagtcccgactagcgacaggcctgatagcccgacagtccccgactagccgacagtccccgactagccggagagtccccgattagcccgacagtccccgactagccctacagccacaaattacttgatattcttctgtgtagacggaactcacttctagtgaatagaaagtggtggaagtgacaatgtgtgacatctgagactaggtcataaaagacattgtcacttctgccttgctcttttttggatcacttactctagaggaagccacctatcactgaaaaacactcaagcagcctaaagaggagaccacatgagaaagtaccaagacctctcattaacaaccagcactgaggctgggtgtggtggctcatgcctgtaatcccagcactttgggaggccgaggtgcatggatcacctgaattcag

SEQ ID NO: 94858 - DNA, 569 bp, Homo sapiens
tcgagctcggtaccgtcacgcccacaggactcacggatatgatcaagggaaatacatgaaatacacatcatcttctcaatgctatggtcaccctttacactctgctgtctttataaatttcttgtcaaaattattcattttacgtgtttaactctgaggaaactgagtctcactctgtcacccaggctggagttaacctccacctcttgggttcaagcaaccttctgcctcctgggttcaagcgattcttctgcttcagcctcccgagtagctgggattacagatgcgtgccaccacgcctggctcatttttgtatttttagtagagatgaggtttcgccgtgttggccaggctgaggtgtatgccttttaaaaataacacttgttggcacttgatgagccttttagacttaaaaacttaaagtcttttttctgttcaaggttgttttattgcttccctttctttttttttccaacctccttactttatagaactcagaaaggtgaagtgacttgtccaagctcatatagctagttacagatgaacctcaagcaaataacctgactcct

SEQ ID NO: 94859 - DNA, 283 bp, Homo sapiens
gtaagtgtgcccaggggtctcaggggggcgttgccagggctctcagctctcctccctgtggttctcccaggcccagcccctgcagaacctctgcttgttgtggttctgccagacagggtgagccagggacttcctgaggtgccccctgcagcaggaagctccttttggacaggcgtgtctcggacccacagtctcccccgaatgcggagtccagcctaagccttcccctagaaggtgtctggtagatgttgagtgaggtttcaggagcagggccaaggctggg

SEQ ID NO: 94860 - DNA, 626 bp, Homo sapiens
ggtcagggttcaaactaccacacctactaccacaagtatttaaaacctgtgaactggaagtggggcgccaccaggcaatggctgagatgcagaggaagaagtgtttacacacctggagcattctcactgtagctctttccaggaatgagttctcctgtctggctctgggcccaaagccttctccctagtgggccatccctcagcctggtcttagaaaatgcaggcactgccctgctccttggtgtgggatgactgaaagagcactggacttggagtgactttacacaagactaattaacctctccgaggaccagcttcctcacatggaaaagaggaatagcacactcctcactgccgccgggggtgaataaggttggtgctaagagtgctttataaactgtaaaggactgtgcaaatgtatattctagtgaactcattttagggtataaattatgtaaccaagagatggttcacagtagaagggtcttgaggccccatctttctttctttcttttttatttttttgagacagagtctcactctgtcaccccagctggagtgcagtggtgcaatcttggctgactgcaacctccacctcccaggttcaagcgattctcctgcctcag

SEQ ID NO: 94861 - DNA, 492 bp, Homo sapiens
agtggtttgtgttgaatgtaaacataatgagggaataggttgaagtctgtacccactccctccgtctcccgttcgacaaaccccaaacgcctgtctgtctcctcctccctgaaatcaggaagggatcttttgatttcttctctgttcttttccctaatgtgtctttagcagtgatcattggagtattacaatctcactgcctggtttagcatagaccctggggcctggagggaagtcagaccggacatcagtgccccaactgaataatctgtgtcactagggctttgagccaaggatgtgagcggaggcaattcccggttttggaagaaaatcagacaggaaaccagtgctaggaagaaggaagagaactcagtccagcagagtgtaatagggcctcattaccgaagcaaaaagcagctgttggctaattcctagcatgctgtaacacatgagtattttgcaattagcaataaccagtgcacggggtttcgc

SEQ ID NO: 94862 - DNA, 521 bp, Homo sapiens
ccactcccttcccatatctgtccccatttattcagcactttattgtgccagagctgagctacgaatcacctcatcatcgcttttcactcccggctctacgtgggaactactataatcctgcccatgttacatgtgaggaaactgcctgaggcctcgcagacagggaggagtggagctgggatccaaactcagctttgaccctggaatctatgccccgccctctggaacacaccagcaaattctccagaaagcgccgggaccttagcactgggcttttccaaagggatgattttccaaagggatgggctgccctggccagatgggcaactgcctcctactttctagctctgcccagtcctgggcagtaagattcccgtttccagccgggcacagtggctcatgcctgtaatcccagcactttgggaggccaaagcaggcagatcacctgaagtcaggagttcgagatcagcctggccaacatggcaaaaccccgtctctactaaaaatacaaaaattagcaa

SEQ ID NO: 94863 - DNA, 391 bp, Homo sapiens
gctttttttttgcatttaagagcatctagactgaaacttgggatattttgctaaatgttgtccaaggaattttcagttggctagataagaatagtggtatataaatgttgccactaagggtttttagtatttaaaaataccatttgctttcgttgtgtgccacaacctctcccactttccacccccaggcctgtaacactttttaaaatactatcatgtttgttttctgtaacagtgttacttaagtaaaggtaagttttattttagctgttgaaaaaataaattctggctggacgcagtggctcacgcctgtaatcccagcactttgggaggccgaggtaggtggatcgcttgagtccaggagttcgagagcagcctgggcaacatggta

SEQ ID NO: 94864 - DNA, 798 bp, Homo sapiens
aacaagcgtttcaaatttaagaaggttaaaattatgtcaagtttttattctgactataatggtataaaactggaaaccaatagcaagaagaaaattggaaaactcacaaatatgtggatattaaacaacatgctcctaaacaaccaatggggttcaaagaagaagtcaaaagggaaaaaggaaagcaccccaatacaaataaaattgagcacacaaggatccaaaatttctgggatacaacaaaagcagttctaagagaagtttataataataaactcctacactaataaaaaaagaaagatttaagtaaacaacctaactttaactcccaaaaaacttgaacaagaccaaaataattccaacgttagcttaattataaaaatatcaagaattagagaaaaaagaaagtaaacagagactagaaagacaatagaaatttttttttaattgagctgaggttttaaagaaccaaaattgacaaacttttggctatattaacccagggaacaaaaagagagaggacttaaaaaaattataaataaaaaattaagttatttcaaaagatcccacagaaatgcaaaagataataagagactactatgagcaattatatgacaacaaatttgataactcaagaaataattattagaaacaaacccaccaagattaaattataaaaaaaaagaaataccgaacagatcaataatgaggaaggagattgaagcagtaaccaaatacttccaattttgaaaaatcccatgaccggccgggcgtggtggctcaagcctgtaatcctag

SEQ ID NO: 94865 - DNA, 228 bp, Homo sapiens
cagtgccccactatcccacatgcagcctgaacctctattatctctcttaccatacttcccactcttctagctattcactgcctctgctctaatcactgcttttctttgaatacatcacgcacagtcttgctgtatggtctttgcacaaactgtgccctccgtctgaacggctcctccaaaaatagctgcctggctaactccaacatctttctcaactattgctttcca

SEQ ID NO: 94866 - DNA, 483 bp, Homo sapiens
agaaagcaagcaagcaaccagccatggaaagtagataaggttgttaggcttaagattatcacatttttaaagcagaggaaaccttaaaagagagaggtgaaaaggcttgagtcatagacatggggttctgcctgaatgtgctctttctgctgccccatgctgctttatactttgaagatcctgaatacattctttgctgaatgctaaagctgtgttagcttggggagggccctgtggatctttgtatgtgcggttgcttctttaatctttgggctggtgatagcttggcagagaggccttgctttcccttgccttggtaggagtttgtcctctgtggggccatacctttggcctgccttttcctcttccaaagtcctgctgagactttggaagcctaagacgtgtgaacgctttggatgattctgagagttcaagccaacctgccctgtggccttctcgtgactttgttaggactgaggcatc

SEQ ID NO: 94867 - DNA, 317 bp, Homo sapiens
atccgccgcctcagcctcccaaagtgctgggattacaggggtgagccaccgcacccagttgttatttttgttttaaagtcacacgagacataaaagcttaagaaacattccttccttctgtaactattatacaggcacctactatgtgccaaacactacgctaagctatggaatacataggttcttttctccagggacttacctgccatccagtgaagaagtggagatgtttgagtaaataatgacattcactttctaagagctgttataaagatatacacaaggggcagcagaggaattgctaaattgcctggaga

SEQ ID NO: 94868 - DNA, 372 bp, Homo sapiens
caaaaagctggttttctacataattcagagttctcacaaaccacctatttgttttctctctctgctcaagaccccaaaatggtggctgtgtggcctgttctttggttggaaattaagttcttcttctaattctggttaaaccatgtagctaaactgaaaacaaactttttcacctagattacctcagttggcctttttttctccccctatttctacacataaatatatcattaaaatgctaatttttatcatttgttcttctctaataaacacgtgagaaaaggaatataatttttaagcgggaagatctttgacaacaagaagtctgtattataaactaccaatatgctgaaaacacaataccagcaatgt

SEQ ID NO: 94869 - DNA, 641 bp, Homo sapiens
tttcttgtagagatggggtttcatcatgttgcccaggctggtctcgaactccagagcttaagcgatccactggcctcagcctccccaagtgatgggattataggtgtgagcgaccacacccagcccctggtcactttttacagttaggtatcactagagagactaaatacccaacaggaaacatttttctcatttctattttcccatgatagataccgatcctgggggagtgggctggggagggtgatgggattatccagtgaaaagccgcaggcaacagttcaagtccctctgaatccacagctacatgcacagcttcagagcaatacaaaacaggtaatttaattccataaaattatctttctacagttcgttttttcctcctagcctactgaaatgtacacaccatgagtacaaagtacaaggtgctgttcagctgtaattttacttctgcacatatttaatgtgctaatgggatgaagcatttcatggttcctgtgcttagcaaatgaaataaatcaatgtgttaagagaaagcgattttgttcttgctgtttggggaaagtgctctttactttcctattaacaaaaacttaatgaaccatttcacattcaaaaccccttaggtcataatgtctatt

SEQ ID NO: 94870 - DNA, 234 bp, Homo sapiens
gccgagattgtgccattgcactccagcctgagcaacaagagtgaaactccgtcccaaagaacaacaacaaaaaaaggtataataatacctaccacccttgttacaggaattacaagagttaacaccctttacatttaaagcagtgcttgacatatagtaagggctacacacgtgtgtctgctacatctattatttagtccccagaccccatgttcagctctactttgcctctct

SEQ ID NO: 94871 - DNA, 469 bp, Homo sapiens
ttgtcctgggatcttccttcacctttttcctgggatttccctttgcttctctgtattgaaccctagtttctggatcccatatctctactgccaactttcaggtcttcaattgtggtagctctccttactttgatcctggagcatcctgcgaactctttgcctcatgtagatttcagcctttgaggtcttctctttgttcttttttaaagtacaggttgagcattccaaacctgaaactccaaaatgcaaaatgctccaaaatctgaaactttttgagcaccaacatgatactcaaaggaaaaaaaaatgattggagtatttcagattttggatttttgaatttggaatgctcactggtcagtataaagcacatagtccaaaaactgaaaaagtttaaaatctgaaacacttctggtctcaagcattttggacaagggatactcaacttgcagtataaaccgtagtgata

SEQ ID NO: 94872 - DNA, 294 bp, Homo sapiens
tccacaatcttaagaattaccctctattgccccttgggccccctgtccccagaagcctggtcagccaagactcacatccccaggtggctggcaaccaccggaagtggctgtctcagggatactgccatttgttttcctgttcctgttcactcctgctggaactctaggtctgtttttctgccaatattcttttaactgttggaaagaagagcagtaatattcatgagaaccgtcagcccctacagccacaacctcctttacagtttttacaaaatacacttacacaccatctga

SEQ ID NO: 94873 - DNA, 278 bp, Homo sapiens
agaggggaaaggcaaactgtcagacagaaacaagagacaaagagaaacaatcagaaggaagcagacagacggaaaaaagaagaccaacagaaaaaggaaaagatgcacagagaaaaaggagaaaagacagaaagacggcaggctgggagaatacagacagcgtagttgacattcggcctggactgaaagagctcagatctggggaggtcaaggcggggagggctcaaagcgcaatccagattgaaagctggatgtacacagcttcggcgtaaggtcag

SEQ ID NO: 94874 - DNA, 390 bp, Homo sapiens
ggagactctcctgtatgttgtctgaacataactgggtacaatcttttaaatcataccccttaaaaatgttatgtttaaataacatattaactggaagacatgaatagcaggaaacatacataatataataaaaccttcacattaaaataaaaaacaacatgggagagcaaaataaagacattactaagtgaggtaaatgcaggagcagggcaaatcccactctacttctgaacaggagaggaaaggcaatgaaatatgtttcattaatccactatttgtgtgaccttgggcttattacttaacctcttagcgactccattccccatctgtaaagaagggataatagtatttactacagagggttgatatagagattaaatgggttagtac

SEQ ID NO: 94875 - DNA, 149 bp, Homo sapiens
atcatcccccatctagccctgtaagtgcgagtaccatcccccatcttaccctgcaagtaccatcacccacttcaccctgcaagtaccatcccccacctcagcctgcaagtaccatcccccacctcagcctgcaagtaccatcccctatc

SEQ ID NO: 94876 - DNA, 342 bp, Homo sapiens
gccaggcttgtgtccttcccttcaggacagcaagttccccccagccccaggcagctctacagatgccatctgagagccagagcccggacttgggaaccttagaaatctacctgatgctttactctattgcgactgagctggcaccaattggatttgttttttttggagggcatctttttttagagaaccaactcttggttttgatataaatatgcatatgtatgtgtgtacatatatatatatatgcatatatgtgtgatataaatatgcatatgtgtatttgtatatatatggtctacaatgcttgtagcattttgtatatttgtatacctctcccccgcc

SEQ ID NO: 94877 - DNA, 436 bp, Homo sapiens
gcacatatcaaaacattaacagcaggtgacagaatatttgccaacctgttagcaggttttaaaaccttctacaatgaacttttaatgggcacacaaataagaacacaagcataaaatactttttaaaattaaagtaaaatcttcccaactacgctaaaagctctagcctgaatattttatatacgagcaaaagtactaattaaaagcactagcatcttagaagaatttccttaaatccaagattttaaaattcccactctggctagctctaatgaagctcaaaacaaaatacaaaggttggtactaatagcccatcctcctaacggtagatttatttttcttgctagacttatagcaatgttaataaaagaaacctctcaagaaattttataatgccatctaagttttcaaatttgtaacttaaaggggaaagaac

SEQ ID NO: 94878 - DNA, 768 bp, Homo sapiens
aattcctttctgttttagtctccactgacactgcagtggaggtggccttattaccactgcgagataataaaagtcatgaaatttcaccaggcctcctctgatgccaccccagaagttaagtggaaagttgccccattatctattgagtcagagaagaaatccagactccccaaggggtctccactgataccacaggggtcagagacttcaggtttccatcagcggttcctcttccaggactcaggaaactaggctcccacagaattgcccatccttggtctctctgcatcttttggatggaagtggacagcacacataagacaaggtgtccaaatgggagaaaccaattgctgatggtatttagctaaatgactgtgtaagaatcacctgtggaaggtatattcccactcactgtgtggccaactcttcttagtaccaagtgcagtctctatcaagcaaatcaagcagaagggccagcttgggaggggacaggctaaaggaaacccatgaagcattgaatctgagctcaatttcaatgagaaccattcctgaacagtggaaagaccagagacatcagaaccatctttcccacttccattaagccaaggcatttggtcttatcaccaggacatgtagctttttggccatgttgaagaatctctgtggaaagaattcagctgctcctacctacagcagaatctggtgatttagaagagaagattgaacaaccaagatgaaaacccctgcttcctttacctgaggtgtggc

SEQ ID NO: 94879 - DNA, 1187 bp, Homo sapiens
  misc_feature (567)..(567): n is a, c, g, or t
aggcgtgagccaccactcccggctctgttataattttcgtttgcctgctcaagagcgatggggtgcagagtttccagagccatcttgcttttgtcgtactttttttttttttgagacagagccgtgggtgacggggcgagacccgtgcctcaaaaaaaaaaaaaaaaattgagggaggggcttgacccaggggtggcattgagccttgttaactcccagctttattggggaggatgaggcgggaggatggcttgtgaccccgagaagtttcgaaaaccagcttggggcaacattagttggagaaccttggttcttcaaaaaaaacggaagaaagggaaacacgaggaaaccagaggaaagagaagttaggaagtgtggcagaaagcgaagggggcggaaaaaaaaacccgaggaagaagttgtgaggggttaaaagagggagacaaacattgattgtagacctcaggagaattcccaccaggctgtgtgcggtcacgccgtggcaggtccgggggccattatctctatagttcccattcggagagggctcccaggtgtgttccccanaatttggcattattcaacggggcgtaattgggagcccaaagattgcctttagtccctctaattagccaatcttggccactctatacgcttccgcttttcagagtttccgcagcaccagttagggtggccgttccagaattatgtggggcggcctgcagtgggggggttccaccttatagggcaacacactgagggctcgtgggggcgaaagcatacgctgtgctcatccttaattattcctctcccatacccaggtggcggttttgccctataatgagaaaggtccatcacagagcgggtgtgacctcctgttggctcgatggactaatttccccagaggttggctttaaatttggacgcacatttttggtaggggcccagagggggtgtgccaacgggcggcccagtgggcctctttgtctggaaacaggccacagtggagaaccggctatagagaaaaacaaccgctgttcttttgcgatgttgtgtagggcccttgtgggactatattgtggccccccccagaaagttcctaactgttaacccgagagttccacatactcttcccgagagctttgcctcttgtcaaaatgaggcagagaacctgtttattatccaca

SEQ ID NO: 94880 - DNA, 748 bp, Homo sapiens
tgtttgcatcttcatgattaggagaccttgcattccaaggagacagatgtatttgcatctgttttctcaagagcccgcttcctggctgaaaattccttggaggaagggccaagacggcccctgtgttatacccagggaaggccaatgctgtctttcttgctaggtgctgaactgagtcctagttcaaatggctattatttgtttttaatttgagaatatttgaaaagctctcattgtaaaagagtcaagccatacaaaagtataatgagtatgattgtcataccacagatataattgtactagaaagatcatgttactttatttatttattttttttatcaaatctaacaccaaggtcctatcccattagctgcatagacatttgttttcaagggcacttctcctcatagagtagcacaaaagtcccagagttttatgaaaaccaagatatccaagggacccctctgatattcatccatgctggccaccacagatatgtttcttgtccaaacacaggcattcccttgaaatccacgcaggcacatcatctctcccaggggccagcctcctggggtctagtactcagtccttctccaggggacccaccgcttctgggggcacaggctgcagctttcccactacttcaggcatgggctccggggcccctcacactgggcttccaggacacctccttcctggccctcctggttctgagactttgacccctcccttcaccacaggcccttct

SEQ ID NO: 94881 - DNA, 546 bp, Homo sapiens
ttgtcctctgaccacctttacctgtgagcaccttctctcctcttctaggcagcccctcccgcaaggaggctgcagggccattcccagaagaacagtgaacagtgaaaatggcacctagcatttactgagcacttactatgtgccgggtgctttactcatgctgcaaatttaatcctgacacaatgctgactttgccagggagcagtattatctccatatcagcgatgaagagcctgagggtgagagagagagagagagagagagagagcctgcccagggacaaccaatgaggaagcagcatagcagcatagccgggactgaccctctgccagcctgacctcagagcctgccctccactccctgaatatccccagccaggtctttatgtgcctacgatactcacgctgtttccttgtctcttctccaggcctcccgcacgtgccaggtctcccctcttcccctgctgctgaactcagtccctgcagggctctgaagcagagaaaacctgctgttttctctgcccggaaagccgcccctactcatgtg

SEQ ID NO: 94882 - DNA, 465 bp, Homo sapiens
gttacagtgtacaccggggtaccaaaggctctgcgggaatgagacctgctttacatggttcaacccaacattcctcaagcgtatttcgctccatttggggaagcacacttttggagaagcactctcttaggtggtgcccagtgttagccagcacagctgtgccaccggtctgagctggcttggttagttgttccatctactcggattgaggtgggcaggagcatgtagctggcagaggacattcagaaatctactgtgttgagcctggggagtatgtaaattgtatcataggaatttaagctgatggctagattttactggtccaatatttgacttcaaaacagggaagtctcacattcacctaaactgcaacatatctagacgtagcatcccaccctccagtcttccttgaaaacagccacctcagttcaaaaattcagcatcatcgctaactcttttatcctc

SEQ ID NO: 94883 - DNA, 243 bp, Homo sapiens
gaaagctagaatgttacagatgatagaattgttagacattagaactattataactgtattccacatgttcaataagccagaagaaatataacatgcaaagtacacatagaacttataagtatgactcaaaccaaagttctagagatgaaatctataacatctgagatgaaaaacatgctggattggattaatagcagattagacatcatagaagaatggataggtaaacttgaagacatagca

SEQ ID NO: 94884 - DNA, 569 bp, Homo sapiens
tctttattatggatttaagaacataaataatgtcaacaacatccttgggaataattagtaggatgacatctgcatcccactgcccacatgcttaccttgagaacaactgacttggtgaatgagccaacaccccgtttcttaagtaagcgctccgttagggaaacctcactgtcaaatatattatatgctgtttttgactcctaaaaattatttttcattaaatagatcaataatttatatttcaatctctgtgtctgaataatactcagacactttcaatctgtcacaattaatattcttaaaaaatgtatcttgtaatcccagtgctttgagaggcagaggttggatgatcgcttgagtccaggcattcaagaccagtctgggaaacacagtgagaccccgtctctacaaaaagatttttaaaaatcagtcaggcgtagtggtgtatgcctgcagtctcagctttccaaaaggctgaggtgggaagactgagcctaggtgtttgaggttatagtgagctatgatcgcgccaatgtactccagcatgggcgatggagcaagatccggtc

SEQ ID NO: 94885 - DNA, 315 bp, Homo sapiens
aacctacaaactgcaaacacttggggctggagcattctttgcagtgggggctgtcttgtgccttgtaggatgttgggcagcatgcttggcttctacccatgagacgctaatagcaacctcttcccagggtgtgacaacaacaaaatatgtctccagacactgccaaatgtgccccaggggcaaaattgcccatagttaaaaaccactaatgggcctagaggggtgttccccagtttatgcaccacgctcaatatttaaaggagattttctctctacaccatttttctatagtatttcaaattttttttttttctt

SEQ ID NO: 94886 - DNA, 185 bp, Homo sapiens
ctcctccaaagaatctaactgcgtttgttcattctctggtgccttcaggtcttcttgaaatatttgtgttaagacttatctgcaggagggttgggtatggcaggcgtttacttgtcatactaaaagtgaaactatgcattaccttttttaatggttcctttatgttgcatattagtttactaaag

SEQ ID NO: 94887 - DNA, 265 bp, Homo sapiens
tgaacaaaactgaaagctcaacaaatagatatacatcgtaaaatagaaccaaacaacttctgaagctgaagactgcaatgaatgaaatgaaaaatgcatcagagagagtcaacagcagattcgatcaagcagaagaaaggatctgtgaactcaaatacaaagcatttgaaattatctagtcagagaaggaaaaagaaagcttatgggatttatgcgataccatcaggagaaataatatatgcaatatgagagtcttcaaaggaga

SEQ ID NO: 94888 - DNA, 409 bp, Homo sapiens
tggtttatttcatctgtgaccactgggtgagatctcattttataatggccttaataatttgccacttatgattacgataataacaatattttttaaaatcactggaaactttaattaggtatttccaaatcgctaggggttattaaccaagggtcaattttgctcccccaacccccacccagaaatatttggcaatgtctactgatatttttggttctcataattggaggtgagagtgctactggcatctagtgggtacagaacagggattctgctaaatatacttcaatgcactggaaaacttcctgcaacaaagaattatcccacccaaaatgtcaacaacgccaaggtgaaaaaaccatgccctaaagctacatatgatcactatcatttaaatgattattccagg

SEQ ID NO: 94889 - DNA, 322 bp, Homo sapiens
tcttctagcattgcttctttattaatgtcccattatgattataaaaggccaaaatgtttatttaaatgtagtcttcaaatatttttagggcactcttactcagatttgaatttatttatttttatttatttattcaatgatatttgatttatttaaatgtggcttttcacatttgatgatagcaactgtgttcagtagaaaaacatattataaactcacaatattttagctcctgttagcaaaaataggaacttgaaattctctagatctgtggttcctaaccctgactacacattcctgtaacctaaacaggctttaaaaa

SEQ ID NO: 94890 - DNA, 250 bp, Homo sapiens
cgagactccgtctcaaaacaaaacaaaacaaaacaaaacaaaaagaatgataatctactgagaaattcaagatagcctctgtgcctggtcatgtgaataaactgttattgatttatccacatttgatctcaaatcattataaatactttgggtaggatatgatacatctttgtattcaaatatttatatgttcttttagtgttttgatttccttcatatcacttaataagttaaaaacatagcattaatc

SEQ ID NO: 94891 - DNA, 248 bp, Homo sapiens
ctggaggctacagtgagctatgactgtaccactgcattccagtttgggagacagagcaagaccctgtcttttaaaaaaggaaagaaacaaacctcagaggtggtggacactcacactgcaagtgggccaaagcctgctggaaggggtaggatggttgtggagctcaggaatccaggctcctgagggcctggtgtggggagagtaaaggacaaagaggaggagaaaccctggccactgatcgcagcacc

SEQ ID NO: 94892 - DNA, 246 bp, Homo sapiens
tgcctgtatgtctgaggctgggtttgaagcctccagcgtgtttggagttaatccccattaggttggactccgcccctttctcccaaaggtaaagcaaggttttcaggcatcactgcaaagggcagctagtattcccatccttgtctaacaagctgtaaggagaagttgtttctgagatctgagcctgaagagagggaacaagtcagtcagccttcgtggtcagaaggtaaatatgcaacttgggcc

SEQ ID NO: 94893 - DNA, 3306 bp, Homo sapiens
cgaatcagccgggcccccagtcgctgccccatcaaggttcaggacaaagaggtgtgggcaggccactgggccagctggtaacatcatggcagagaaagtgaacaacttcccaccattgcccaaattcatcccgctgaagccatgtttctaccaagacttcgaggcagatattcctccccagcatgtcagcatgaccaagcgcctctactacctctggatgttgaacagcgtcacgctggccgtgaacctggtgggctgtctcgcgtggctgatcggaggcgggggagccaccaactttggcctcgcctttctctggctcatcctcttcacaccctgctcctacgtctgctggtttcggcccatttacaaggccttcaagactgacagctccttcagtttcatggcattcttctttaccttcatggctcagttggtcatcagcatcatccaggccgtgggcatcccaggctggggcgtctgcggctggattgctaccatctccttcttcggaacgaacattggctcggcggtggtgatgctaattcccactgtcatgttcacagtgatggccgtcttttccttcatcgccctcagcatggttcataaattttaccggggaagtggggggagtttcagcaaagctcaggaggagtggaccacaggggcctggaagaatccacatgtgcagcaggcagcccagaacgcagccatgggggcagcccagggtgccatgaatcagcctcagactcagtattccgccacccccaattacacgtactccaatgagatgtgaaccagccacgcctaccaggtggcagagctggggccattgggacagggggctcaagccacatcgtcatttgtggttaccaagcagggttcccccttcccttttctccttccctactttgtacaaaggaccagagttatatatatatatatatatgtatatgtctgtaccccagcccccacctttcagattctgctcttggcactcagctgtgggctgcacgtggagctgtcccgtgcggtagtagctgtgtctgtgtcccctcgtgaaatagtgtgcagtggaggtctcttgtggtgctagatgtgtgtttagagctaaaccagcccccaaccccaccctccacctgcccctcttgcctctggcccctctgaccctggcccagggacccctcacggggccaggggaggcatagcagaaagactggccccttcctagggttatgagctggaactgtttctactttcagtcttcctgggaagtaacagtacttagcactcttggtggtgggtgggagggtggctacaggccaggatattcccttgctcttttgatccctccaggcctcgcctccttcagcctcctcctccctcatctgttccctgatgtcacattccctgtgcaatcttcccttgcccatggtctgtctatctctttcctatgtggcttttctttgtcttccccaaggctgagtgtcccagttttatctgctcctgagactgagcccagatccccaaatctaatctgatttacagttcaaggaagctgatggggagctgggccttacccctgatgtaggaggggcacacagctgggggtgcagagcccacctgggtacctgacccccaggggatgaaaatgcaaggatgagtctgcttgggcctgagagtttgatctgcaggggcaggctcatcttttctctcccctgccttctcctccttctctccccagagcccccttgagcccctctgcctatgtccctctgcctcctccccatgcccccagttgctgtggcttgattctgctaccctgaccccaccatgtgccaggtggcatctgccttactgccttccctgaggagctgggacatgctgggcagttgtcagatgtaaaggcacagctggagcagagggcatgtcagtaatgattggtccctggggaaggtctggctggctccagcacagtgaggcatttaggtatctctcggtgaccgttggattcctggaagcagtagctgttctgtttggatctggtaggacagggctcagagggctaggcacggagggaaggtcagaggagaaggcaggcagggcccagtgagaggggagcatgccttcccccaccctggcttgctcttggtcacagggcggttctgggcacttgaactcagggcccaagcagaagcacaggcccagtcctggctgcaagcacaatagcctgaatgggatttcaggttaggcagggtgggaggggaggctctctggctttagttttgttttgttttccaaatcaaggtaacttgctcccttctgcctacaggccttggtcttggcttgtcctcacccagtcggaactccctaccactttcaggagagtggttttaggcccgtggggctgttctgttccaagcagtgtgagaacatggctggtagaggctctagctgtgtgcggggcctgaaggggagtgggttctcgcccaaagagcatctgcccatttcccaccttcccttctcccaccagaagcttgcctgagctgtttggacaaaaatccaaaccccacttggctactctggcctggcttcagcttggaacccaatacctaggcttacaggccatcctgagccaggggcctctggaaattctcttcctgatggtcctttaggtttgggcacaaaatataattgcctctcccctctcccattttctctcttgggagcaatggtcacagtccctggtacctgaaaaggtacctaggtctaggcccttcttccctttcccttcctctcccctaccccagaactttggctccctttcccttctctctctggtagctccaggaggcctgtgatccagctccctgcctagcatccatgacctgttggatgttacctccaatcagtttcctgtcctacctgcctctttggcttggacctatatggccatgctctggctctacccttgggaagcctgatcccggtgtgtggcccagcttgttcaggccctgggatgctgcatctccaggcaactatgcactttcccggggagagaaccagtatgagaagtgggggcagggcacacattcatctttgtaggaaggtctggcctggggtcgggtgaaggagggcccaggtcagttctggggtcccagtgacctgctttgccattctcctggtgccgctgctgctccctgtttctggagctggatgttccccagctggcagttgagctgcctgagccaatgtgtctgtctttggtaactgagtgaaccataataaaggggaacatttggccctgtg

SEQ ID NO: 94894 - DNA, 3173 bp, Homo sapiens
cgaatcagccgggcccccagtcgctgccccatcaaggttcaggacaaagaggtgtgggcaggccactgggccagctggtaacatcatggcagagaaagtgaacaacttcccaccattgcccaaattcatcccgctgaagccatgtttctaccaagacttcgaggcagatattcctccccagcatgtcagcatgaccaagcgcctctactacctctggatgtgactgacagctccttcagtttcatggcattcttctttaccttcatggctcagttggtcatcagcatcatccaggccgtgggcatcccaggctggggcgtctgccccacactggcctcttcctgcagcggctggattgctaccatctccttcttcggaacgaacattggctcggcggtggtgatgctaattcccactgtcatgttcacagtgatggccgtcttttccttcatcgccctcagcatggttcataaattttaccggggaagtggggggagtttcagcaaagctcaggaggagtggaccacaggggcctggaagaatccacatgtgcagcaggcagcccagaacgcagccatgggggcagcccagggtgccatgaatcagcctcagactcagtattccgccacccccaattacacgtactccaatgagatgtgaaccagccacgcctaccaggtggcagagctggggccattgggacagggggctcaagccacatcgtcatttgtggttaccaagcagggttcccccttcccttttctccttccctactttgtacaaaggaccagagttatatatatatatatatatgtatatgtctgtaccccagcccccacctttcagattctgctcttggcactcagctgtgggctgcacgtggagctgtcccgtgcggtagtagctgtgtctgtgtcccctcgtgaaatagtgtgcagtggaggtctcttgtggtgctagatgtgtgtttagagctaaaccagcccccaaccccaccctccacctgcccctcttgcctctggcccctctgaccctggcccagggacccctcacggggccaggggaggcatagcagaaagactggccccttcctagggttatgagctggaactgtttctactttcagtcttcctgggaagtaacagtacttagcactcttggtggtgggtgggagggtggctacaggccaggatattcccttgctcttttgatccctccaggcctcgcctccttcagcctcctcctccctcatctgttccctgatgtcacattccctgtgcaatcttcccttgcccatggtctgtctatctctttcctatgtggcttttctttgtcttccccaaggctgagtgtcccagttttatctgctcctgagactgagcccagatccccaaatctaatctgatttacagttcaaggaagctgatggggagctgggccttacccctgatgtaggaggggcacacagctgggggtgcagagcccacctgggtacctgacccccaggggatgaaaatgcaaggatgagtctgcttgggcctgagagtttgatctgcaggggcaggctcatcttttctctcccctgccttctcctccttctctccccagagcccccttgagcccctctgcctatgtccctctgcctcctccccatgcccccagttgctgtggcttgattctgctaccctgaccccaccatgtgccaggtggcatctgccttactgccttccctgaggagctgggacatgctgggcagttgtcagatgtaaaggcacagctggagcagagggcatgtcagtaatgattggtccctggggaaggtctggctggctccagcacagtgaggcatttaggtatctctcggtgaccgttggattcctggaagcagtagctgttctgtttggatctggtaggacagggctcagagggctaggcacggagggaaggtcagaggagaaggcaggcagggcccagtgagaggggagcatgccttcccccaccctggcttgctcttggtcacagggcggttctgggcacttgaactcagggcccaagcagaagcacaggcccagtcctggctgcaagcacaatagcctgaatgggatttcaggttaggcagggtgggaggggaggctctctggctttagttttgttttgttttccaaatcaaggtaacttgctcccttctgcctacaggccttggtcttggcttgtcctcacccagtcggaactccctaccactttcaggagagtggttttaggcccgtggggctgttctgttccaagcagtgtgagaacatggctggtagaggctctagctgtgtgcggggcctgaaggggagtgggttctcgcccaaagagcatctgcccatttcccaccttcccttctcccaccagaagcttgcctgagctgtttggacaaaaatccaaaccccacttggctactctggcctggcttcagcttggaacccaatacctaggcttacaggccatcctgagccaggggcctctggaaattctcttcctgatggtcctttaggtttgggcacaaaatataattgcctctcccctctcccattttctctcttgggagcaatggtcacagtccctggtacctgaaaaggtacctaggtctaggcccttcttccctttcccttcctctcccctaccccagaactttggctccctttcccttctctctctggtagctccaggaggcctgtgatccagctccctgcctagcatccatgacctgttggatgttacctccaatcagtttcctgtcctacctgcctctttggcttggacctatatggccatgctctggctctacccttgggaagcctgatcccggtgtgtggcccagcttgttcaggccctgggatgctgcatctccaggcaactatgcactttcccggggagagaaccagtatgagaagtgggggcagggcacacattcatctttgtaggaaggtctggcctggggtcgggtgaaggagggcccaggtcagttctggggtcccagtgacctgctttgccattctcctggtgccgctgctgctccctgtttctggagctggatgttccccagctggcagttgagctgcctgagccaatgtgtctgtctttggtaactgagtgaaccataataaaggggaacatttggccctgtg

SEQ ID NO: 94895 - DNA, 3803 bp, Homo sapiens
cgcggccggctccgcgccgcatcgctcgggtgcagcgcagctcagcgcagcgctgcggcctttcggcagccgaacggccgcggcagttcaggacaaagaggtgtgggcaggccactgggccagctggtaacatcatggcagagaaagtgaacaacttcccaccattgcccaaattcatcccgctgaagccatgtttctaccaagacttcgaggcagatattcctccccagcatgtcagcatgaccaagcgcctctactacctctggatgttgaacagcgtcacgctggccgtgaacctggtgggctgtctcgcgtggctgatcggaggcgggggagccaccaactttggcctcgcctttctctggctcatcctcttcacaccctgctcctacgtctgctggtttcggcccatttacaaggccttcaagactgacagctccttcagtttcatggcattcttctttaccttcatggctcagttggtcatcagcatcatccaggccgtgggcatcccaggctggggcgtctgcggctggattgctaccatctccttcttcggaacgaacattggctcggcggtggtgatgctaattcccactgtcatgttcacagtgatggccgtcttttccttcatcgccctcagcatggttcataaattttaccggggaagtggggggagtttcagcaaagctcaggaggagtggaccacaggggcctggaagaatccacatgtgcagcaggcagcccagaacgcagccatgggggcagcccagggtgccatgaatcagcctcagactcagtattccgccacccccaattacacgtactccaatgagatgtgaaccagccacgcctaccaggtggcagagctggggccattgggacagggggctcaagccacatcgtcatttgtggttaccaagcagggttcccccttcccttttctccttccctactttgtacaaaggaccagagttatatatatatatatatatgtatatgtctgtaccccagcccccacctttcagattctgctcttggcactcagctgtgggctgcacgtggagctgtcccgtgcggtagtagctgtgtctgtgtcccctcgtgaaatagtgtgcagtggaggtctcttgtggtgctagatgtgtgtttagagctaaaccagcccccaaccccaccctccacctgcccctcttgcctctggcccctctgaccctggcccagggacccctcacggggccaggggaggcatagcagaaagactggccccttcctagggttatgagctggaactgtttctactttcagtcttcctgggaagtaacagtacttagcactcttggtggtgggtgggagggtggctacaggccaggatattcccttgctcttttgatccctccaggcctcgcctccttcagcctcctcctccctcatctgttccctgatgtcacattccctgtgcaatcttcccttgcccatggtctgtctatctctttcctatgtggcttttctttgtcttccccaaggctgagtgtcccagttttatctgctcctgagactgagcccagatccccaaatctaatctgatttacagttcaaggaagctgatggggagctgggccttacccctgatgtaggaggggcacacagctgggggtgcagagcccacctgggtacctgacccccaggggatgaaaatgcaaggatgagtctgcttgggcctgagagtttgatctgcaggggcaggctcatcttttctctcccctgccttctcctccttctctccccagagcccccttgagcccctctgcctatgtccctctgcctcctccccatgcccccagttgctgtggcttgattctgctaccctgaccccaccatgtgccaggtggcatctgccttactgccttccctgaggagctgggacatgctgggcagttgtcagatgtaaaggcacagctggagcagagggcatgtcagtaatgattggtccctggggaaggtctggctggctccagcacagtgaggcatttaggtatctctcggtgaccgttggattcctggaagcagtagctgttctgtttggatctggtaggacagggctcagagggctaggcacggagggaaggtcagaggagaaggcaggcagggcccagtgagaggggagcatgccttcccccaccctggcttgctcttggtcacagggcggttctgggcacttgaactcagggcccaagcagaagcacaggcccagtcctggctgcaagcacaatagcctgaatgggatttcaggttaggcagggtgggaggggaggctctctggctttagttttgttttgttttccaaatcaaggtaacttgctcccttctgcctacaggccttggtcttggcttgtcctcacccagtcggaactccctaccactttcaggagagtggttttaggcccgtggggctgttctgttccaagcagtgtgagaacatggctggtagaggctctagctgtgtgcggggcctgaaggggagtgggttctcgcccaaagagcatctgcccatttcccaccttcccttctcccaccagaagcttgcctgagctgtttggacaaaaatccaaaccccacttggctactctggcctggcttcagcttggaacccaatacctaggcttacaggccatcctgagccaggggcctctggaaattctcttcctgatggtcctttaggtttgggcacaaaatataattgcctctcccctctcccattttctctcttgggagcaatggtcacagtccctggtacctgaaaaggtacctaggtctaggcccttcttccctttcccttcctctcccctaccccagaactttggctccctttcccttctctctctggtagctccaggaggcctgtgatccagctccctgcctagcatccatgacctgttggatgttacctccaatcagtttcctgtcctacctgcctctttggcttggacctatatggccatgctctggctctacccttgggaagcctgatcccggtgtgtggcccagcttgttcaggccctgggatgctgcatctccaggcaactatgcactttcccggggagagaaccagtatgagaagtgggggcagggcacacattcatctttgtaggaaggtctggcctggggtcgggtgaaggagggcccaggtcagttctggggtcccagtgacctgctttgccattctcctggtgccgctgctgctccctgtttctggagctggatgttccccagctggcagttgagctgcctgagccaatgtgtctgtctttggtaactgagtgaaccataataaaggggaacatttggccctgtgaaaaaaaaaaaaaaaaaaaaaaaaaaaaaaaaggaaaaaaaaaaaaaaaaaaaatagggagggggcgatagtaaaaaatctcttcgagggggggaggagctgggtacggtgtagcgtgtgttttgtgttcaggtagggggtgggactagtagggagacgtgaatttattaagagaatggaggggggggggtttttaaaaatgagtatagggggggaaaaaggtgatgatcaggagagggtaattctgtgggcaggcacgagacccccatcaatctatgtggcggggggggggagagcacaacagtgttgtggcgacacaatctcttacagccaagccaactgtctactgacgctacgttctgtcggcgtgaaatatctattacaacttacaacaggtgttatattagatggtttggaataaccaaaaccgctgtagaatctatactac

SEQ ID NO: 94896 - DNA, 3327 bp, Homo sapiens
cgcggccggctccgcgccgcatcgctcgggtgcagcgcagctcagcgcagcgctgcggcctttcggcagccgaacggccgcggcagttcaggacaaagaggtgtgggcaggccactgggccagctggtaacatcatggcagagaaagtgaacaacttcccaccattgcccaaattcatcccgctgaagccatgtttctaccaagacttcgaggcagatattcctccccagcatgtcagcatgaccaagcgcctctactacctctggatgttgaacagcgtcacgctggccgtgaacctggtgggctgtctcgcgtggctgatcggaggcgggggagccaccaactttggcctcgcctttctctggctcatcctcttcacaccctgctcctacgtctgctggtttcggcccatttacaaggccttcaagactgacagctccttcagtttcatggcattcttctttaccttcatggctcagttggtcatcagcatcatccaggccgtgggcatcccaggctggggcgtctgcggctggattgctaccatctccttcttcggaacgaacattggctcggcggtggtgatgctaattcccactgtcatgttcacagtgatggccgtcttttccttcatcgccctcagcatggttcataaattttaccggggaagtggggggagtttcagcaaagctcaggaggagtggaccacaggggcctggaagaatccacatgtgcagcaggcagcccagaacgcagccatgggggcagcccagggtgccatgaatcagcctcagactcagtattccgccacccccaattacacgtactccaatgagatgtgaaccagccacgcctaccaggtggcagagctggggccattgggacagggggctcaagccacatcgtcatttgtggttaccaagcagggttcccccttcccttttctccttccctactttgtacaaaggaccagagttatatatatatatatatatgtatatgtctgtaccccagcccccacctttcagattctgctcttggcactcagctgtgggctgcacgtggagctgtcccgtgcggtagtagctgtgtctgtgtcccctcgtgaaatagtgtgcagtggaggtctcttgtggtgctagatgtgtgtttagagctaaaccagcccccaaccccaccctccacctgcccctcttgcctctggcccctctgaccctggcccagggacccctcacggggccaggggaggcatagcagaaagactggccccttcctagggttatgagctggaactgtttctactttcagtcttcctgggaagtaacagtacttagcactcttggtggtgggtgggagggtggctacaggccaggatattcccttgctcttttgatccctccaggcctcgcctccttcagcctcctcctccctcatctgttccctgatgtcacattccctgtgcaatcttcccttgcccatggtctgtctatctctttcctatgtggcttttctttgtcttccccaaggctgagtgtcccagttttatctgctcctgagactgagcccagatccccaaatctaatctgatttacagttcaaggaagctgatggggagctgggccttacccctgatgtaggaggggcacacagctgggggtgcagagcccacctgggtacctgacccccaggggatgaaaatgcaaggatgagtctgcttgggcctgagagtttgatctgcaggggcaggctcatcttttctctcccctgccttctcctccttctctccccagagcccccttgagcccctctgcctatgtccctctgcctcctccccatgcccccagttgctgtggcttgattctgctaccctgaccccaccatgtgccaggtggcatctgccttactgccttccctgaggagctgggacatgctgggcagttgtcagatgtaaaggcacagctggagcagagggcatgtcagtaatgattggtccctggggaaggtctggctggctccagcacagtgaggcatttaggtatctctcggtgaccgttggattcctggaagcagtagctgttctgtttggatctggtaggacagggctcagagggctaggcacggagggaaggtcagaggagaaggcaggcagggcccagtgagaggggagcatgccttcccccaccctggcttgctcttggtcacagggcggttctgggcacttgaactcagggcccaagcagaagcacaggcccagtcctggctgcaagcacaatagcctgaatgggatttcaggttaggcagggtgggaggggaggctctctggctttagttttgttttgttttccaaatcaaggtaacttgctcccttctgcctacaggccttggtcttggcttgtcctcacccagtcggaactccctaccactttcaggagagtggttttaggcccgtggggctgttctgttccaagcagtgtgagaacatggctggtagaggctctagctgtgtgcggggcctgaaggggagtgggttctcgcccaaagagcatctgcccatttcccaccttcccttctcccaccagaagcttgcctgagctgtttggacaaaaatccaaaccccacttggctactctggcctggcttcagcttggaacccaatacctaggcttacaggccatcctgagccaggggcctctggaaattctcttcctgatggtcctttaggtttgggcacaaaatataattgcctctcccctctcccattttctctcttgggagcaatggtcacagtccctggtacctgaaaaggtacctaggtctaggcccttcttccctttcccttcctctcccctaccccagaactttggctccctttcccttctctctctggtagctccaggaggcctgtgatccagctccctgcctagcatccatgacctgttggatgttacctccaatcagtttcctgtcctacctgcctctttggcttggacctatatggccatgctctggctctacccttgggaagcctgatcccggtgtgtggcccagcttgttcaggccctgggatgctgcatctccaggcaactatgcactttcccggggagagaaccagtatgagaagtgggggcagggcacacattcatctttgtacctgcctctttggtttggacctggccagtcgggtcactgcctccacgtctgaggccccgccagctggccgtctgtcctcgccagcctcaggctgctgcgctctctcggcttttacggacctctgaggccgaaaccccacctcgaagtttccccgtgacagtgcgtccgagtccacat

SEQ ID NO: 94897 - DNA, 1125 bp, Homo sapiens
ttggtgtggcgttctagaggatccctgctattatcggcacaatagcctgaatgggatttcaggttaggcagggtgggaggggaggctctctggctttagttttgttttgttttccaaatcaaggtaacttgctcccttctgcctacaggccttggtcttggcttgtcctcacccagtcggaactccctaccactttcaggagagtggttttaggcccgtggggctgttctgttccaagcagtgtgagaacatggctggtagaggctctagctgtgtgcggggcctgaaggggagtgggttctcgcccaaagagcatctgcccatttcccaccttcccttctcccaccagaagcttgcctgagctgtttggacaaaaatccaaaccccacttggctactctggcctggcttcagcttggaacccaatacctaggcttacaggccatcctgagccaggggcctctggaaattctcttcctgatggtcctttaggtttgggcacaaaatataattgcctctcccctctcccattttctctcttgggagcaatggtcacagtccctggtacctgaaaaggtacctaggtctaggcccttcttccctttcccttcctctcccctaccccagaactttggctccctttcccttctctctctggtagctccaggaggcctgtgatccagctccctgcctagcatccatgacctgttggatgttacctccaatcagtttcctgtcctacctgcctctttggcttggacctatatggccatgctctggctctacccttgggaagcctgatcccggtgtgtggcccagcttgttcaggccctgggatgctgcatctccaggcaactatgcactttcccggggagagaaccagtatgagaagtgggggcagggcacacattcatctttgtaggaaggtctggcctggggtcgggtgaaggagggcccaggtcagttctggggtcccagtgacctgctttgccattctcctggtgccgctgctgctccctgtttctggagctggatgttccccagctggcagttgagctgcctgagccaatgtgtctgtctttggtaactgagtgaaccataataaaggggaacatttggccctgtg

SEQ ID NO: 94898 - DNA, 818 bp, Homo sapiens
aagatgaattcttgctctgttgcccaggctggagtgcagtggtgtgaccttagcccacggcaacctccatctcctgggttcaagagattcttgtgcctcagcctcccaagtagctgggattgcaggcgccctccaccatgcttggctaatttttgtatttttagcagagacaggtttcaccatgttggccaggctggtctcgaacccctgacctcaagtgatccacctgctttgccattctcctggtgccgctgctgctccctgtttctggagctggatgttccccagctggcagttgagctgcctgagccaatgtgtctgtctttggtaactgagtgaaccataataaaggggaacatttggccctgtgaaaaaaaaaaaaaaaaaaaaaaaaaaaaaaaaggaaaaaaaaaaaaaaaaaaaatagggagggggcgatagtaaaaaatctcttcgagggggggaggagctgggtacggtgtagcgtgtgttttgtgttcaggtagggggtgggactagtagggagacgtgaatttattaagagaatggaggggggggggtttttaaaaatgagtatagggggggaaaaaggtgatgatcaggagagggtaattctgtgggcaggcacgagacccccatcaatctatgtggcggggggggggagagcacaacagtgttgtggcgacacaatctcttacagccaagccaactgtctactgacgctacgttctgtcggcgtgaaatatctattacaacttacaacaggtgttatattagatggtttggaataaccaaaaccgctgtagaatctatactac

SEQ ID NO: 94899 - DNA, 3355 bp, Homo sapiens
cgcggccggctccgcgccgcatcgctcgggtgcagcgcagctcagcgcagcgctgcggcctttcggcagccgaacggccgcggcagttcaggacaaagaggtgtgggcaggccactgggccagctggtaacatcatggcagagaaagtgaacaacttcccaccattgcccaaattcatcccgctgaagccatgtttctaccaagacttcgaggcagatattcctccccagcatgtcagcatgaccaagcgcctctactacctctggatgttgaacagcgtcacgctggccgtgaacctggtgggctgtctcgcgtggctgatcggaggcgggggagccaccaactttggcctcgcctttctctggctcatcctcttcacaccctgctcctacgtctgctggtttcggcccatttacaaggccttcaagactgacagctccttcagtttcatggcattcttctttaccttcatggctcagttggtcatcagcatcatccaggccgtgggcatcccaggctggggcgtctgcggctggattgctaccatctccttcttcggaacgaacattggctcggcggtggtgatgctaattcccactgtcatgttcacagtgatggccgtcttttccttcatcgccctcagcatggttcataaattttaccggggaagtggggggagtttcagcaaagctcaggaggagtggaccacaggggcctggaagaatccacatgtgcagcaggcagcccagaacgcagccatgggggcagcccagggtgccatgaatcagcctcagactcagtattccgccacccccaattacacgtactccaatgagatgtgaaccagccacgcctaccaggtggcagagctggggccattgggacagggggctcaagccacatcgtcatttgtggttaccaagcagggttcccccttcccttttctccttccctactttgtacaaaggaccagagttatatatatatatatatatgtatatgtctgtaccccagcccccacctttcagattctgctcttggcactcagctgtgggctgcacgtggagctgtcccgtgcggtagtagctgtgtctgtgtcccctcgtgaaatagtgtgcagtggaggtctcttgtggtgctagatgtgtgtttagagctaaaccagcccccaaccccaccctccacctgcccctcttgcctctggcccctctgaccctggcccagggacccctcacggggccaggggaggcatagcagaaagactggccccttcctagggttatgagctggaactgtttctactttcagtcttcctgggaagtaacagtacttagcactcttggtggtgggtgggagggtggctacaggccaggatattcccttgctcttttgatccctccaggcctcgcctccttcagcctcctcctccctcatctgttccctgatgtcacattccctgtgcaatcttcccttgcccatggtctgtctatctctttcctatgtggcttttctttgtcttccccaaggctgagtgtcccagttttatctgctcctgagactgagcccagatccccaaatctaatctgatttacagttcaaggaagctgatggggagctgggccttacccctgatgtaggaggggcacacagctgggggtgcagagcccacctgggtacctgacccccaggggatgaaaatgcaaggatgagtctgcttgggcctgagagtttgatctgcaggggcaggctcatcttttctctcccctgccttctcctccttctctccccagagcccccttgagcccctctgcctatgtccctctgcctcctccccatgcccccagttgctgtggcttgattctgctaccctgaccccaccatgtgccaggtggcatctgccttactgccttccctgaggagctgggacatgctgggcagttgtcagatgtaaaggcacagctggagcagagggcatgtcagtaatgattggtccctggggaaggtctggctggctccagcacagtgaggcatttaggtatctctcggtgaccgttggattcctggaagcagtagctgttctgtttggatctggtaggacagggctcagagggctaggcacggagggaaggtcagaggagaaggcaggcagggcccagtgagaggggagcatgccttcccccaccctggcttgctcttggtcacagggcggttctgggcacttgaactcagggcccaagcagaagcacaggcccagtcctggctgcaagcacaatagcctgaatgggatttcaggttaggcagggtgggaggggaggctctctggctttagttttgttttgttttccaaatcaaggtaacttgctcccttctgcctacaggccttggtcttggcttgtcctcacccagtcggaactccctaccactttcaggagagtggttttaggcccgtggggctgttctgttccaagcagtgtgagaacatggctggtagaggctctagctgtgtgcggggcctgaaggggagtgggttctcgcccaaagagcatctgcccatttcccaccttcccttctcccaccagaagcttgcctgagctgtttggacaaaaatccaaaccccacttggctactctggcctggcttcagcttggaacccaatacctaggcttacaggccatcctgagccaggggcctctggaaattctcttcctgatggtcctttaggtttgggcacaaaatataattgcctctcccctctcccattttctctcttgggagcaatggtcacagtccctggtacctgaaaaggtacctaggtctaggcccttcttccctttcccttcctctcccctaccccagaactttggctccctttcccttctctctctggtagctccaggaggcctgtgatccagctccctgcctagcatccatgacctgttggatgttacctccaatcagtttcctgtcctacctgcctctttggcttggacctatatggccatgctctggctctacccttgggaagcctgatcccggtgtgtggcccagcttgttcaggccctgggatgctgcatctccaggcaactatgcactttcccggggagagaaccagtatgagaagtgggggcagggcacacattcatctttgtaggaaggtctggcctggggtcgggtgaaggagggcccaggtcagttctggggtcccagtgacctgctttgccattctcctggtgccgctgctgctccctgtttctggagctggatgttccccagctggcagttgagctgcctgagccaatgtgtctgtctttggtaactgagtgaaccataataaaggggaacatttggccctgtg

SEQ ID NO: 94900 - DNA, 3147 bp, Homo sapiens
tgggaaatccctccctgtgtaatgttgcaacacacaggtctaccacgtggaaacttgcaaagatgtatgggtagaactaaccccttctgacctctcaattaaggcctttaaatgtcttctgtccattatgcacttaaacttggaagggcttgggggccttgaaggcagggaagccctggccctctgcccaggtgacgggagccacctcctctgccgcaggactgacagctccttcagtttcatggcattcttctttaccttcatggctcagttggtcatcagcatcatccaggccgtgggcatcccaggctggggcgtctgcggctggattgctaccatctccttcttcggaacgaacattggctcggcggtggtgatgctaattcccactgtcatgttcacagtgatggccgtcttttccttcatcgccctcagcatggttcataaattttaccggggaagtggggggagtttcagcaaagctcaggaggagtggaccacaggggcctggaagaatccacatgtgcagcaggcagcccagaacgcagccatgggggcagcccagggtgccatgaatcagcctcagactcagtattccgccacccccaattacacgtactccaatgagatgtgaaccagccacgcctaccaggtggcagagctggggccattgggacagggggctcaagccacatcgtcatttgtggttaccaagcagggttcccccttcccttttctccttccctactttgtacaaaggaccagagttatatatatatatatatatgtatatgtctgtaccccagcccccacctttcagattctgctcttggcactcagctgtgggctgcacgtggagctgtcccgtgcggtagtagctgtgtctgtgtcccctcgtgaaatagtgtgcagtggaggtctcttgtggtgctagatgtgtgtttagagctaaaccagcccccaaccccaccctccacctgcccctcttgcctctggcccctctgaccctggcccagggacccctcacggggccaggggaggcatagcagaaagactggccccttcctagggttatgagctggaactgtttctactttcagtcttcctgggaagtaacagtacttagcactcttggtggtgggtgggagggtggctacaggccaggatattcccttgctcttttgatccctccaggcctcgcctccttcagcctcctcctccctcatctgttccctgatgtcacattccctgtgcaatcttcccttgcccatggtctgtctatctctttcctatgtggcttttctttgtcttccccaaggctgagtgtcccagttttatctgctcctgagactgagcccagatccccaaatctaatctgatttacagttcaaggaagctgatggggagctgggccttacccctgatgtaggaggggcacacagctgggggtgcagagcccacctgggtacctgacccccaggggatgaaaatgcaaggatgagtctgcttgggcctgagagtttgatctgcaggggcaggctcatcttttctctcccctgccttctcctccttctctccccagagcccccttgagcccctctgcctatgtccctctgcctcctccccatgcccccagttgctgtggcttgattctgctaccctgaccccaccatgtgccaggtggcatctgccttactgccttccctgaggagctgggacatgctgggcagttgtcagatgtaaaggcacagctggagcagagggcatgtcagtaatgattggtccctggggaaggtctggctggctccagcacagtgaggcatttaggtatctctcggtgaccgttggattcctggaagcagtagctgttctgtttggatctggtaggacagggctcagagggctaggcacggagggaaggtcagaggagaaggcaggcagggcccagtgagaggggagcatgccttcccccaccctggcttgctcttggtcacagggcggttctgggcacttgaactcagggcccaagcagaagcacaggcccagtcctggctgcaagcacaatagcctgaatgggatttcaggttaggcagggtgggaggggaggctctctggctttagttttgttttgttttccaaatcaaggtaacttgctcccttctgcctacaggccttggtcttggcttgtcctcacccagtcggaactccctaccactttcaggagagtggttttaggcccgtggggctgttctgttccaagcagtgtgagaacatggctggtagaggctctagctgtgtgcggggcctgaaggggagtgggttctcgcccaaagagcatctgcccatttcccaccttcccttctcccaccagaagcttgcctgagctgtttggacaaaaatccaaaccccacttggctactctggcctggcttcagcttggaacccaatacctaggcttacaggccatcctgagccaggggcctctggaaattctcttcctgatggtcctttaggtttgggcacaaaatataattgcctctcccctctcccattttctctcttgggagcaatggtcacagtccctggtacctgaaaaggtacctaggtctaggcccttcttccctttcccttcctctcccctaccccagaactttggctccctttcccttctctctctggtagctccaggaggcctgtgatccagctccctgcctagcatccatgacctgttggatgttacctccaatcagtttcctgtcctacctgcctctttggcttggacctatatggccatgctctggctctacccttgggaagcctgatcccggtgtgtggcccagcttgttcaggccctgggatgctgcatctccaggcaactatgcactttcccggggagagaaccagtatgagaagtgggggcagggcacacattcatctttgtaggaaggtctggcctggggtcgggtgaaggagggcccaggtcagttctggggtcccagtgacctgctttgccattctcctggtgccgctgctgctccctgtttctggagctggatgttccccagctggcagttgagctgcctgagccaatgtgtctgtctttggtaactgagtgaaccataataaaggggaacatttggccctgtg

SEQ ID NO: 94901 - DNA, 3260 bp, Homo sapiens
cgaatcagccgggcccccagtcgctgccccatcaaggttcaggacaaagaggtgtgggcaggccactgggccagctggtaacatcatggcagagaaagtgaacaacttcccaccattgcccaaattcatcccgctgaagccatgtttctaccaagacttcgaggcagatattcctccccagcatgtcagcatgaccaagcgcctctactacctctggatgttgaacagcgtcacgctggccgtgaacctggtgggctgtctcgcgtggctgatcggaggcgggggagccaccaactttggcctcgcctttctctggctcatcctcttcacaccctgctcctacgtctgctggtttcggcccatttacaaggccttcaagactgacagctccttcagtttcatggcattcttctttaccttcatggctcagttggtcatcagcatcatccaggccgtgggcatcccaggctggggcgtctgcggctggattgctaccatctccttcttcggaacgaacattggctcggcggtggtgatgctaattcccactgtcatgttcacagtgatggccgtcttttccttcatcgccctcagcatggttcataaattttaccggggaagtggggggagtttcagcaaagctcaggaggagtggaccacaggggcctggaagaatccacatgtgcagcaggcagccagactcagtattccgccacccccaattacacgtactccaatgagatgtgaaccagccacgcctaccaggtggcagagctggggccattgggacagggggctcaagccacatcgtcatttgtggttaccaagcagggttcccccttcccttttctccttccctactttgtacaaaggaccagagttatatatatatatatatatgtatatgtctgtaccccagcccccacctttcagattctgctcttggcactcagctgtgggctgcacgtggagctgtcccgtgcggtagtagctgtgtctgtgtcccctcgtgaaatagtgtgcagtggaggtctcttgtggtgctagatgtgtgtttagagctaaaccagcccccaaccccaccctccacctgcccctcttgcctctggcccctctgaccctggcccagggacccctcacggggccaggggaggcatagcagaaagactggccccttcctagggttatgagctggaactgtttctactttcagtcttcctgggaagtaacagtacttagcactcttggtggtgggtgggagggtggctacaggccaggatattcccttgctcttttgatccctccaggcctcgcctccttcagcctcctcctccctcatctgttccctgatgtcacattccctgtgcaatcttcccttgcccatggtctgtctatctctttcctatgtggcttttctttgtcttccccaaggctgagtgtcccagttttatctgctcctgagactgagcccagatccccaaatctaatctgatttacagttcaaggaagctgatggggagctgggccttacccctgatgtaggaggggcacacagctgggggtgcagagcccacctgggtacctgacccccaggggatgaaaatgcaaggatgagtctgcttgggcctgagagtttgatctgcaggggcaggctcatcttttctctcccctgccttctcctccttctctccccagagcccccttgagcccctctgcctatgtccctctgcctcctccccatgcccccagttgctgtggcttgattctgctaccctgaccccaccatgtgccaggtggcatctgccttactgccttccctgaggagctgggacatgctgggcagttgtcagatgtaaaggcacagctggagcagagggcatgtcagtaatgattggtccctggggaaggtctggctggctccagcacagtgaggcatttaggtatctctcggtgaccgttggattcctggaagcagtagctgttctgtttggatctggtaggacagggctcagagggctaggcacggagggaaggtcagaggagaaggcaggcagggcccagtgagaggggagcatgccttcccccaccctggcttgctcttggtcacagggcggttctgggcacttgaactcagggcccaagcagaagcacaggcccagtcctggctgcaagcacaatagcctgaatgggatttcaggttaggcagggtgggaggggaggctctctggctttagttttgttttgttttccaaatcaaggtaacttgctcccttctgcctacaggccttggtcttggcttgtcctcacccagtcggaactccctaccactttcaggagagtggttttaggcccgtggggctgttctgttccaagcagtgtgagaacatggctggtagaggctctagctgtgtgcggggcctgaaggggagtgggttctcgcccaaagagcatctgcccatttcccaccttcccttctcccaccagaagcttgcctgagctgtttggacaaaaatccaaaccccacttggctactctggcctggcttcagcttggaacccaatacctaggcttacaggccatcctgagccaggggcctctggaaattctcttcctgatggtcctttaggtttgggcacaaaatataattgcctctcccctctcccattttctctcttgggagcaatggtcacagtccctggtacctgaaaaggtacctaggtctaggcccttcttccctttcccttcctctcccctaccccagaactttggctccctttcccttctctctctggtagctccaggaggcctgtgatccagctccctgcctagcatccatgacctgttggatgttacctccaatcagtttcctgtcctacctgcctctttggcttggacctatatggccatgctctggctctacccttgggaagcctgatcccggtgtgtggcccagcttgttcaggccctgggatgctgcatctccaggcaactatgcactttcccggggagagaaccagtatgagaagtgggggcagggcacacattcatctttgtaggaaggtctggcctggggtcgggtgaaggagggcccaggtcagttctggggtcccagtgacctgctttgccattctcctggtgccgctgctgctccctgtttctggagctggatgttccccagctggcagttgagctgcctgagccaatgtgtctgtctttggtaactgagtgaaccataataaaggggaacatttggccctgtg

SEQ ID NO: 94902 - DNA, 2898 bp, Homo sapiens
cgcggccggctccgcgccgcatcgctcgggtgcagcgcagctcagcgcagcgctgcggcctttcggcagccgaacggccgcggcagttcaggacaaagaggtgtgggcaggccactgggccagctggtaacatcatggcagagaaagtgaacaacttcccaccattgcccaaattcatcccgctgaagccatgtttctaccaagacttcgaggcagatattcctccccagcatgtcagcatgaccaagcgcctctactacctctggatgttgaacagcgtcacgctggccgtgaacctggtgggctgtctcgcgtggctgatcggaggcgggggagccaccaactttggcctcgcctttctctggctcatcctcttcacaccctgctcctacgtctgctggtttcggcccatttacaaggccttcaagactgacagctccttcagtttcatggcattcttctttaccttcatggctcagttggtcatcagcatcatccaggccgtgggcatcccaggctggggcgtctgcggctggattgctaccatctccttcttcggaacgaacattggctcggcggtggtgatgctaattcccactgtcatgttcacagtgatggccgtcttttccttcatcgccctcagcatggttcataaattttaccggggaagtggggggagtttcagcaaagctcaggaggagtggaccacaggggcctggaagaatccacatgtgcagcaggcagcccagaacgcagccatgggggcagcccagggtgccatgaatcagcctcagactcagtattccgccacccccaattacacgtactccaatgagatgtgaaccagccacgcctaccaggtggcagagctggggccattgggacagggggctcaagccacatcgtcatttgtggttaccaagcagggttcccccttcccttttctccttccctactttgtacaaaggaccagagttatatatatatatatatatgtatatgtctgtaccccagcccccacctttcagattctgctcttggcactcagctgtgggctgcacgtggagctgtcccgtgcggtagtagctgtgtctgtgtcccctcgtgaaatagtgtgcagtggaggtctcttgtggtgctagatgtgtgtttagagctaaaccagcccccaaccccaccctccacctgcccctcttgcctctggcccctctgaccctggcccagggacccctcacggggccaggggaggcatagcagaaagactggccccttcctagggttatgagctggaactgtttctactttcagtcttcctgggaagtaacagtacttagcactcttggtggtgggtgggagggtggctacaggccaggatattcccttgctcttttgatccctccaggcctcgcctccttcagcctcctcctccctcatctgttccctgatgtcacattccctgtgcaatcttcccttgcccatggtctgtctatctctttcctatgtggcttttctttgtcttccccaaggctgagtgtcccagttttatctgctcctgagactgagcccagatccccaaatctaatctgatttacagttcaaggaagctgatggggagctgggccttacccctgatgtaggaggggcacacagctgggggtgcagagcccacctgggtacctgacccccaggggatgaaaatgcaaggatgagtctgcttgggcctgagagtttgatctgcaggggcaggctcatcttttctctcccctgccttctcctccttctctccccagagcccccttgagcccctctgcctatgtccctctgcctcctccccatgcccccagttgctgtggcttgattctgctaccctgaccccaccatgtgccaggtggcatctgccttactgccttccctgaggagctgggacatgctgggcagttgtcagatgtaaaggcacagctggagcagagggcatgtcagtaatgattggtccctggggaaggtctggctggctccagcacagtgaggcatttaggtatctctcggtgaccgttggattcctggaagcagtagctgttctgtttggatctggtaggacagggctcagagggctaggcacggagggaaggtcagaggagaaggcaggcagggcccagtgagaggggagcatgccttcccccaccctggcttgctcttggtcacagggcggttctgggcacttgaactcagggcccaagcagaagcacaggcccagtcctggctgcaagcacaatagcctgaatgggatttcaggttaggcagggtgggaggggaggctctctggctttagttttgttttgttttccaaatcaaggtaacttgctcccttctgcctacaggccttggtcttggcttgtcctcacccagtcggaactccctaccactttcaggagagtggttttaggcccgtggggctgttctgttccaagcagtgtgagaacatggctggtagaggctctagctgtgtgcggggcctgaaggggagtgggttctcgcccaaagagcatctgcccatttcccaccttcccttctcccaccagaagcttgcctgagctgtttggacaaaaatccaaaccccacttggctactctggcctggcttcagcttggaacccaatacctaggcttacaggccatcctgagccaggggcctctggaaattctcttcctgatggtcctttaggtttgggcacaaaatataattgcctctcccctctcccattttctctcttgggagcaatggtcacagtccctggtacctgaaaaggtacctaggtctaggcccttcttccctttcccttcctctcccctaccccagggtgaaggctcccgggggatcctcagagtcgccagacaccag

SEQ ID NO: 94903 - DNA, 412 bp, Homo sapiens
gacaggtttaccagtagttaagtcattcagctaccagaagtgttactagtttctcatttaacaaacgtgcacttcctgttatgcacagggctgtatgatgctgctatggaatgaaagtgaacattcagaggtggcaaagcacggtggtaaaagcaaaggctgtggggccgacactcaggttcaaattcctgctcccccttgcgctagctgcctgcctttgagcaaactactaactcactcggatgctcagttttctcacctgcaagatgggggtaattctggtaaactactcatggtgttgtttgagcaactgaatgagtcacaatgtacaaagcaccaagcagggtgctcagcacgtagccaggtcctcacaggaggtaaactcttacgactgttagcaaagatttatcca

SEQ ID NO: 94904 - DNA, 829 bp, Homo sapiens
ataggttttcataaaggttgacataatttgaatcaaataatttaaattttaaaaacctccaaaaaaccaatttccaagtacaagagagttgtagtcctcactagagaattctaccaaacatttacacaagaattaatgatgattttacacaatgtcctcagaaaatagaagcgggaatatttattttatttatttaattagatggagtcttgctcagtcacccaggctggagtgcagtggtgtagtctcggctcaccgcaacctctgcctcccgggttcagatgattctcctgcgtcagcctcccaagtagctgggactgcaggcacatgccaccacactcggctaatttctgtatttttagtagagacggggtttcaccatgttggccaggctgttctccaactcctgacctcatgatctgtccacgttggtctcccaaagtgctgggattacaggtgtgagccaccgcacccggccaagagggaacatttcttaacacatttaaaaaattattttgatgccaaaatcatacagacagtacaaaaataatacaactacagacatatacctctcataaatttagtagcaaaaatctttaacaaaatactagcaaatagaaaacagtcatgtaaaaagtatacaccataataaccaagtgggatttatttgagttatacaagcaaggctggttcaacattcagaaatcgatcaatgtaattaacccagcataggctaaagaagaaaaattccataacatcagttaataatagagcaaaggatttgacaaaatgcaatatccatccatgataaaaactctccatactagac

SEQ ID NO: 94905 - DNA, 1022 bp, Homo sapiens
tttttagagtagaattttgcaggtaattttaaatctcaagccctatgaaggttactaaaaaaaaaaaaattcccaaaatagaaacattaaaaaggagaaataagatatttacttcaaaaaattactcctttggggtcttgcagtatgatatatatgagttactgctcagaatatatagactgtcctcctatcctgtgcactgggatgctcactaccacttcttcaaatccagctaaaagcatcacggcctcaatgaagcctacttcagccaggactgttcacgtgcctcctctctgctcgtgtcctacatattacctaagcagagctcaccaacaatatttttcatcaacagcttagagcagcgctgccaaataaaaataccatgtcggtcatgtaagtaatttaaaattttcttagtagccacttttaaaataggaaaaaggtgaaatcagtcaattttatttaacccgatacatccaaaatattatcactgcagtatacaatcaatataaaaaattacggagattttcttttccatgctcagtcttagaaatctgtggcatattttatatttgcagaacatcacaattcagactacccacatttcaaagattaatagccacatgtggctacaggctgctgtactatttaataaaaagtgcatatctagagtctagccccttgctttataaagtgtgatctaccatccagcggcatcagcatcacctgggatcttgttagaaatgtagaaaggcagcccatctcagaactactagaagaaataaatttaacaggatacccaggattggaatgcgtagcaaagactgagaagcagtaaattagatcacatatagcatgggagttttacagaattgctattgccattcaactatgatatggtattatcccactgactaatatagaacactatttaaataacaatagtttttctatgaatcatgttttctctacactgtccaatgcaattttctacaatgatgaaaatcttcatatatgtgctg

SEQ ID NO: 94906 - DNA, 2582 bp, Homo sapiens
gagaaacaagttggatgacctaacatcctgttagagactggctggaagaggaacccagaagtagactgcactgtttgaccctcaccggtcggtcgtatgcagagtggttgtgttcttgagctgaggaatgccggccttgttgcctgtttggctttgattacagtatttgtagcagaatgttgctatggagattcatgccaggtacgcagtgggaggtgatctagaagaccgtgtgccagccactcgtaggtaatcactggcgctcagaacatgctgagacaagagttctcgttggtttatttccttccccagctgtgtgagttttcagatttcatcattggaaatgatgtcttacccaatgatacaaaagcagaggaaatgcctttgtagaatttcttccaagggaagaatgaaagtagagaggtgacttagcttagctttgttgtctctagaatacgttacagtgtgtcaagggaaggcttttcaaagtatttgtcaagggattgtgaggaacgtagtccattactttgtcaaagagtttatgtgaaaagtagatatttgaataatttcttatatttcaagcagcgttacagctaatgtttcttttaaatcaaaccttttatctccaaggttaactaatggcacctcgaggttacatctgcagcccagtgtctaggatagtagaggaacatagtgcaaattcatgtttgtcatcagagctgggtgtggtggctgacacctgtaaatccagctactccgaaggctgaggtgggaggatctcttgagccccatgagtttgagaccagcctgggcgacatagtgagaccctgtctaaaagaaaaaaaacaaaagtggtctaacatgtttgccatcagacagtagttttcattaatgtgaacatgactgaggtcaagaagtttattcatgtacccagcctttgcggagcatctgtggtgtgccacttgggggatgtgaaaccagtaaaccacatagttttcatcatttaggatcatgcaggtgtacagggtacatgtgaaacagtagtgaggcccacacactggtggggggagatccagtaagcctttggaaggtggggggtcagcagggagtgtttcctggagaagatgaatgactcataagttatgattcagagaatgagttaagagttagccaggtaatgagggagaagggctcccaggcatatgggaggaacaaaggcacttagggaagaagccgggacagagtgtgtgtgcatacaggaatattataagtattgctggagggaccagggcagggtgtagtgggggctgaggcccaaaaggcagtcagggaccagatggcctcatatgccctgttaaggagcttgggcttgatcctctaggcagggagccgttggaggatttaagccagggagtgctgcggttggtcacactcgccatttatgtagatcgttttggcagccaggggaaggatggatttgagggggatgagattagaaagctgggatatgagttaggaggctgaaagatggttgataaaaatgatcgttgggcagccgagataactgacttcaaggacatatactggacttatagcagagcctgttgagtcttgcttttgcacacagttcaaataatcacttagtcatgtggtttatctgccagtggcaaatgttaagactgtggggaaaaactagaagaaccaataacatcatcaagaaataagtgataggaggcaaaagtcataaaagccgtacaaaaattggaaagttgactgttgaagcatcgtggttaagacaggatttgggttgctaggaaactttggggcaagtatttaaccttcctaagtgtcagtttcctcctctttaaaatgggagttagtaataccatccttattgagttattctgaggattaaataagatgatgcgtataaactattttacaccatgcctggcaagaaaacccagtaagtggaagctgttactgtgaatacattttgtggccttttgattagggtagtgttttccttagatctctaattttgtggatgttaattgtattataattacattaaaaagagttccatggtaaatcaatttgggaattaaagaggggtttgtttttttgagacagggtctctgtcgcccaggctagagcatggtggtgtgaccatagttcactgcagcctccatcaaacgagcctcctgagtagctgggattacgggcgcttgccactacgcctggctgacttttttgatttctagtgtagatgaggtcttgctatggtttcctaggctgttctcaaactcctgagctcaagcaatccttctgccttggcctctcgagtgttgggattgtaggcgtgagccaccacaccggccaagagaggttttgtttcttctgctagagtgtggtgaagctccagaggggcagcctacacagtatttctcgttcacacttgattgcaactcttagaaaagctcacaggactgagtccttgggggcacactttggcaaatgcttatttaggggagaaacatacccatctgcttccatagcccaagagtattgctctatcagag

SEQ ID NO: 94907 - DNA, 4472 bp, Homo sapiens
cctgcagcctccggagtcagtgccgcgcgcccgccgccccgcgccttcctgctcgccgcacctccgggagccggggcgcacccagcccgcagcgccgcctccccgcccgcgccgcctccgaccgcaggccgagggccgccactggccggggggaccgggcagcagcttgcggccgcggagccgggcaacgctggggactgcgccttttgtccccggaggtccctggaagtttgcggcaggacgcgcgcggggaggcggcggaggcagccccgacgtcgcggagaacagggcgcagagccggcatgggcatcgggcgcagcgaggggggccgccgcggggcagccctgggcgtgctgctggcgctgggcgcggcgcttctggccgtgggctcggccagcgagtacgactacgtgagcttccagtcggacatcggcccgtaccagagcgggcgcttctacaccaagccacctcagtgcgtggacatccccgcggacctgcggctgtgccacaacgtgggctacaagaagatggtgctgcccaacctgctggagcacgagaccatggcggaggtgaagcagcaggccagcagctgggtgcccctgctcaacaagaactgccacgccggcacccaggtcttcctctgctcgctcttcgcgcccgtctgcctggaccggcccatctacccgtgtcgctggctctgcgaggccgtgcgcgactcgtgcgagccggtcatgcagttcttcggcttctactggcccgagatgcttaagtgtgacaagttccccgagggggacgtctgcatcgccatgacgccgcccaatgccaccgaagcctccaagccccaaggcacaacggtgtgtcctccctgtgacaacgagttgaaatctgaggccatcattgaacatctctgtgccagcgagtttgcactgaggatgaaaataaaagaagtgaaaaaagaaaatggcgacaagaagattgtccccaagaagaagaagcccctgaagttggggcccatcaagaagaaggacctgaagaagcttgtgctgtacctgaagaatggggctgactgtccctgccaccagctggacaacctcagccaccacttcctcatcatgggccgcaaggtgaagagccagtacttgctgacggccatccacaagtgggacaagaaaaacaaggagttcaaaaacttcatgaagaaaatgaaaaaccatgagtgccccacctttcagtccgtgtttaagtgattctcccgggggcagggtggggagggagcctcgggtggggtgggagcgggggggacagtgcccgggaacccgtggtcacacacacgcactgccctgtcagtagtggacattgtaatccagtcggcttgttcttgcagcattcccgctccctttccctccatagccacgctccaaaccccagggtagccatggccgggtaaagcaagggccatttagattaggaaggtttttaagatccgcaatgtggagcagcagccactgcacaggaggaggtgacaaaccatttccaacagcaacacagccactaaaacacaaaaagggggattgggcggaaagtgagagccagcagcaaaaactacattttgcaacttgttggtgtggatctattggctgatctatgcctttcaactagaaaattctaatgattggcaagtcacgttgttttcaggtccagagtagtttctttctgtctgctttaaatggaaacagactcataccacacttacaattaaggtcaagcccagaaagtgataagtgcagggaggaaaagtgcaagtccattatctaatagtgacagcaaagggaccaggggagaggcattgccttctctgcccacagtctttccgtgtgattgtctttgaatctgaatcagccagtctcagatgccccaaagtttcggttcctatgagcccggggcatgatctgatccccaagacatgtggaggggcagcctgtgcctgcctttgtgtcagaaaaaggaaaccacagtgagcctgagagagacggcgattttcgggctgagaaggcagtagttttcaaaacacatagttaaaaaagaaacaaatgaaaaaaattttagaacagtccagcaaattgctagtcagggtgaattgtgaaattgggtgaagagcttaggattctaatctcatgttttttccttttcacatttttaaaagaacaatgacaaacacccacttatttttcaaggttttaaaacagtctacattgagcatttgaaaggtgtgctagaacaaggtctcctgatccgtccgaggctgcttcccagaggagcagctctccccaggcatttgccaagggaggcggatttccctggtagtgtagctgtgtggctttccttcctgaagagtccgtggttgccctagaacctaacaccccctagcaaaactcacagagctttccgtttttttctttcctgtaaagaaacatttcctttgaacttgattgcctatggatcaaagaaattcagaacagcctgcctgttcccccgcactttttacatatatttgtttcatttctgcagatggaaagttgacatgggtggggtgtccccatccagcgagagagtttcaaaagcaaaacatctctgcagtttttcccaagtaccctgagatacttcccaaagcccttatgtttaatcagcgatgtatataagccagttcacttagacaactttacccttcttgtccaatgtacaggaagtagttctaaaaaaaatgcatattaatttcttcccccaaagccggattcttaattctctgcaacactttgaggacatttatgattgtccctctgggccaatgcttatacccagtgaggatgctgcagtgaggctgtaaagtggccccctgcggccctagcctgacccggagaaaggatggtagattctgttaactcttgaagactccagtatgaaaatcagcatgcccgcctagttacctaccggagagttatcctgataaattaacctctcacagttagtgatcctgtccttttaacaccttttttgtggggttctctctgacctttcatcgtaaagtgctggggaccttaagtgatttgcctgtaattttggatgattaaaaaatgtgtatatatattagctaattagaaatattctacttctctgttgtcaaactgaaattcagagcaagttcctgagtgcgtggatctgggtcttagttctggttgattcactcaagagttcagtgctcatacgtatctgctcattttgacaaagtgcctcatgcaaccgggccctctctctgcggcagagtccttagtggaggggtttacctggaacataagtagttaccacagaatacggaagagcaggtgactgtgctgtgcagctctctaaatgggaattctcaggtaggaagcaacagcttcagaaagagctcaaaataaattggaaatgtgaatcgcagctgtgggttttaccaccgtctgtctcagagtcccaggaccttgagtgtcattagttactttattgaaggttttagacccatagcagctttgtctctgtcacatcagcaatttcagaaccaaaagggaggctctctgtaggcacagagctgcactatcacgagcctttgtttttctccacaaagtatctaacaaaaccaatgtgcagactgattggcctggtcattggtctccgagagaggaggtttgcctgtgatttgcctgtgatttcctaattatcgctagggccaaggtgggatttgtaaagctttacaataatcattctggatagagtcctgggaggtccttggcagaactcagttaaatctttgaagaatatttgtagttatcttagaagatagcatgggaggtgaggattccaaaaacattttatttttaaaatatcctgtgtaacacttggctcttggtacctgtgggttagcatcaagttctccccagggtagaattcaatcagagctccagtttgcatttggatgtgtaaattacagtaatcccatttcccaaacctaaaatctgtttttctcatcagactctgagtaactggttgctgtgtcataacttcatagatgcaggaggctcaggtgatctgtttgaggagagcaccctaggcagcctgcagggaataacatactggccgttctgacctgttgccagcagatacacaggacatggatgaaattcccgtttcctctagtttcttcctgtagtactcctcttttagatcctaagtctcttacaaaagctttgaatactgtgaaaatgttttacattccatttcatttgtgttgtttttttaactgcattttaccagatgttttgatgttatcgcttatgttaatagtaattcccgtacgtgttcattttattttcatgctttttcagccatgtatcaatattcacttgactaaaatcactcaattaatcaatgaaaaaaaaaaa

SEQ ID NO: 94908 - DNA, 344 bp, Homo sapiens
actttgagcaacaaccaaacaaaaaaagtctgaaaattgaaaagggactcagatttgagagaattgtccccactccccaccatatctttcctagtggcccttgtggcatttgggaagctggccccagggccaagtgctggtcttagctcagtcagcttcctgtccctcacgtgggctggccttgccaggtgccctcccctgccacccccctcagacacagtggagctggcctcaggctgtccaaccacagatccatgggacttccctagccctccacccctcttgccatttccgcacaccacactccctgcagaccctgctgtgtgtgggtcacccagggaagg

SEQ ID NO: 94909 - DNA, 758 bp, Homo sapiens
cgccaggagggggcttcccaggtgagcccgagacgggatcgaaactcctctccagtccacgaaaacgcccaagaataagttgttgagtaaaacccacccgtcctccttgtaaaccccccaatttcctttccaaaaccccatccctctcccaaataaatcacgagcggctctcttcccatgccaagcgcccttggcttcacaataagcccggaagattttaagcaacgatattgaggtttgggaagagggagcgtggggcgtgggattcgctgctgccctgggttcagtgttcttggttcttttcacgccaggcgtgataaagcaaaatattttaactgcaacctacaagcttgttttttatctttttttcccctaacttttttttttccttccaagaaacagatcaagaaaaactaattacaaggcacggcaccaaagttaaatgaaaatgtaatccggcaatagagagagaaaattaattttttaaaagatagatttgagttagaaacaaaaatacattgttctccctggtaacgtttgctaaacctatgctcgatttcgggctgaaaaatcagtagttacccagaactctgaggtcactctctggatgcgttttctttagaaattctaattcgaaaatgttcaagccttcatttggagctttgttttgttttctgtataaaaaggtttggggtgttttgcttttgtttgttttgttttctttttattcaaaaatactccttctctgtttagatata

SEQ ID NO: 94910 - DNA, 1561 bp, Homo sapiens
aatgacttaccatctctatccgcaatctttgacgtggaggagtccaccagtgctccctggactggctgttgttgtacacagcagccccacccctgccaggaggccttccgcctctgtggctttgccatctacccagccccccaggtctctactgcagtggtggagccctacaactccatcctgaccacccacaccacactggaacattcagattgtgctttcatggtggacaacgaagccatctatgacatctgccgcaggaaccttgacattgagcgccctacctataccaacctcaaccgcctcatcagtcagattgtgtcctcaatcactgcttctctccgctttgacggggccctcaatgtggacctcactgagttccagaccaacctggtgccctacccccgcatccacttcccgctggtcacctacgcgcccatcatctctgccgagaaagcctatcacgaacagctctctgtggccgagataaccagctcctgctttgagcccaacagccagatggtgaagtgcgacccgagacatggcaagtacatggcctgctgcatgctctaccggggcgacgtggtgcccaaggatgtgaatgtcgctattgctgccatcaagaccaagaggaccatccagtttgtagactggtgtcccacaggcttcaaggtgggcatcaactaccagcccccgaccgtggtccccgggggagacctggccaaggtgcagcgggccgtctgcatgctcagcaacaccacggccattgcggaggcctgggcccgcctcgaccacaagttcgacctcatgtacgccaagcgggcctttgtgcattggtatgtgggagaggggatggaagaaggagaattttctgaggccagggaagacttagctgccctggagaaggattatgaagaagtggggactgattcgtttgaagaagaaaatgaaggggaggaattttaaatatataccttccccttggctgtgtctctttatttatgctgtgccattcaaagcacatgttcaagagaacagaacactctccccgccccagcctgattcctgccttacccaggaggagggtgcctggccccagtacccagggtggcacgactgggctaagtggacactgagcttcatcaggccctccctgggtaggagcagctttgtgtcactaaagaaagtgagggccactgtctccggcgggtgaggctgcagcccagtttcacatgcgaggaggcctaatcaggagtttcaattccagatcgggctgggtccagccccaaaacatggcctgctggctggggagtgggaacactcagagaaaggggagatctgggcctgggaagattccggggcaggggtgagcggacgttcacatgagtgggtctatagcccgctccgggcatcatctagacttagcatgcattcactcccccatcacatattccaatacacaccctgccctaggcactgagagctggagagttggtgataagcgagacgaacacatttcctgccctcatacacacataaataaagtgaatgagatcatgtc

SEQ ID NO: 94911 - DNA, 2018 bp, Homo sapiens
aggcggctgtatctggagcagtcggggcgggcaggcccagctgagaggtgcgcgggcgaggacagcggcagcgatgcgggaatgcatatcagtccacgtgggccaagcgggagttcagattggcaatgcctgctgggagctcttctgcctggaacacggcatccaggcagacggcacttttgatgctcaagctagcaagatcaacgatgatgactccttcaccacctttttcagcgagactggcaatgggaagcatgtgccccgggccgtcatgatagatctggagcctactgtagtggatgaggttcgggcaggaacctaccgccagctcttccatccagagcagctgatcacaggaaaggaggatgcagccaacaactatgcccggggccactacacggtgggcaaggagagcattgacctggtgctggaccgcatacggaagctgacagatgcttgctctggcctgcagggcttcctgattttccacagttttggtgggggcactggctccggcttcacttctctgctgatggaacgcctctccctggattatggcaagaaatccaagctggagtttgccatctacccagccccccaggtctctactgcagtggtggagccctacaactccatcctgaccacccacaccacactggaacattcagattgtgctttcatggtggacaacgaagccatctatgacatctgccgcaggaaccttgacattgagcgccctacctataccaacctcaaccgcctcatcagtcagattgtgtcctcaatcactgcttctctccgctttgacggggccctcaatgtggacctcactgagttccagaccaacctggtgccctacccccgcatccacttcccgctggtcacctacgcgcccatcatctctgccgagaaagcctatcacgaacagctctctgtggccgagataaccagctcctgctttgagcccaacagccagatggtgaagtgcgacccgagacatggcaagtacatggcctgctgcatgctctaccggggcgacgtggtgcccaaggatgtgaatgtcgctattgctgccatcaagaccaagaggaccatccagtttgtagactggtgtcccacaggcttcaaggtgggcatcaactaccagcccccgaccgtggtccccgggggagacctggccaaggtgcagcgggccgtctgcatgctcagcaacaccacggccattgcggaggcctgggcccgcctcgaccacaagttcgacctcatgtacgccaagcgggcctttgtgcattggtatgtgggagaggggatggaagaaggagaattttctgaggccagggaagacttagctgccctggagaaggattatgaagaagtggggactgattcgtttgaagaagaaaatgaaggggaggaattttaaatatataccttccccttggctgtgtctctttatttatgctgtgccattcaaagcacatgttcaagagaacagaacactctccccgccccagcctgattcctgccttacccaggaggagggtgcctggccccagtacccagggtggcacgactgggctaagtggacactgagcttcatcaggccctccctgggtaggagcagctttgtgtcactaaagaaagtgagggccactgtctccggcgggtgaggctgcagcccagtttcacatgcgaggaggcctaatcaggagtttcaattccagatcgggctgggtccagccccaaaacatggcctgctggctggggagtgggaacactcagagaaaggggagatctgggcctgggaagattccggggcaggggtgagcggacgttcacatgagtgggtctatagcccgctccgggcatcatctagacttagcatgcattcactcccccatcacatattccaatacacaccctgccctaggcactgagagctggagagttggtgataagcgagacgaacacatttcctgccctcatacacacataaataaagtgaatgagatcatgtc

SEQ ID NO: 94912 - DNA, 525 bp, Homo sapiens
gtagagatgggtttttgctctgttgccctgcctgcttccactttctcttcagcttctcccttgccacctgctggcttccccagtcccatcccgcctgttgcatcccatagccccactcccacgcccctgaccatgacttgaagccatgccaagtgaccaagatgtcccatcctgagttatcctctggctgacttgtatcttcttctgtggctcctcctctttctgtgtccctcaggtgggcatcaactaccagcccccgaccgtggtccccgggggagacctggccaaggtgcagcgggccgtctgcatgctcagcaacaccacggccattgcggaggcctgggcccgcctcgaccacaagttcgacctcatgtacgccaagcgggcctttgtgcattggtatgtgggagaggggatggaagaaggagaattttctgaggccagggaagacttagctgccctggagaaggattatgaagaagtggggactgattcgtttgaagaagaaaatgaaggggaggaatt

SEQ ID NO: 94913 - DNA, 335 bp, Homo sapiens
taatgccaggctctgtagtagctggaatctgtgtaattttacttatcatatacaataatgccaagatgatatgcttatcaccactgtacagttgaggagagccagccacagacaggttaagcaacttgcccagggtcacacagcagtcaggactaaaacccaggtctggctggctgattgatccttttcgttcctaaccactcctctatagagcaccacacatttgcatatttagatatatttttgtcatgaatttggcgcaaacccaaagcctctccaggcctcagaccctgttctgtgaaatgagtgcaatcatgtctgctgtaccaactgta

SEQ ID NO: 94914 - DNA, 602 bp, Homo sapiens
tgcaatagtgagaacatgcttaacgtgtctcgtgacaatcttacattttagatggttttaatgcttactttaagatttggccacttatctgactttcatttttaagataagaaatttgaatagtaattacactttggaataaaaattttctcctaatttcctttcaggtttctgcactgatttgattgaaatatatccagagattgcaagccaaactgccaataagcatctgtcatttgcaattatttatctgtgtgaatcagaattttctgaatactctgcaaacaaaatacagaaataaactgcatgagttgatgttaggctacaattaacttttgaaaaattttggtatacataaaagtctcattttcctaattgattgctcttatatagtggagtttctttctcctaaacaaaaattttaaagcaactgttctaaattagttaggtgggaatatagacactcagcacaaactctaaccaagggcaaacaattcaagtgcaggcccctatgagagtgagtgaagagagattttgtaaacaaagaagatacagaaggcttttccacatttggtggccccttcgtaattcacagcaatata

SEQ ID NO: 94915 - DNA, 310 bp, Homo sapiens
caccactgcactccagcctgggcaacagagcgagactcctcaaaaaataataataataataggtgaattgatgaggaatgggcagatggatagaaatatatggaacaaagccactatagtaaaaacaaattgtaaaatctagctggtgtctctatttaaaaaaggatcttttggccaggcacagtggctcacacctgtaatcccagcactttgggaggccaaagtggatgaatcacttaatttcaggagtttgagaccagcctggccaacatagtgaaaccccatctctactaaaaatgcacaaaaaatt

SEQ ID NO: 94916 - DNA, 349 bp, Homo sapiens
ccatgataaaaagaagtggtaatagctggcatctttgtctggaaggcctgctgtgaccttaactgtaggttcctttctccagtgactcatcttgagattacccttctctcatacctccaacatttttgagacttggatattccaagcctgtgctaaccattcacttctttggctacactcagcagaagagaaatagaaagctgccaacctcttagactcaaacgaaatcattttcccatttgttaccctcagaaattggctctttccatccacaggttccacatccatggattcaaccaactgtgtattgtcagtattcaaaaaaataataaagtaaaaataaacaaac

SEQ ID NO: 94917 - DNA, 146 bp, Homo sapiens
tgatgttgtttcttgagaagaaagaaggaggaaccagacatgtgtcattcccagagagaaaatgaatcacaactcctgtagttacttggaaatctctgaggtgctaccctcaccccatctcctcacccattccaagagaaagggtt

SEQ ID NO: 94918 - DNA, 332 bp, Homo sapiens
agacatctatactctatagtcaggtctaacatatgaaataattaacttgtgtgttgaagtacaaaatactataatttgtcatttaagggaatgtaagatttagatgatccttaatgctccttgcaacttaaagattctgcgcctcactgacgttaagcttgtatgagacctgtagtctgttggaatacataagcagctgcctgtgttacacagttgtgaggtggtaatatacttgtgatgattttaaagagctctttctattgtcactgacaacagagtctaagaaaaacctgaattattgcataatcaaataagacctaatttccctttct

SEQ ID NO: 94919 - DNA, 401 bp, Homo sapiens
tggggtgggaggagaatgatgaaaaccacaaatacaatgatgacaacctctccagaagagctgagcagtggagaaacacgcaggctggttgaaagccaacacacttcccatggggttgggcagagtacccgagtctacacatttcaccatcatgcccaaaggcctcaaaaatgcagccccactcctgccagctcctaactccccctgcccaaaccaccagccaaccaagcaaccaacagcacccaggcgaaagctccatgacccgccctgccacccccttcataaagtgcagcccccggcttgcctgtgcttctgtgcccaggaacagagcagcccgtaatggctcacactggccgagcacttcctgtgtgctgggttctggccaaaggctgtactgaatc

SEQ ID NO: 94920 - DNA, 274 bp, Homo sapiens
ttcccactgcaatccaaatgccatgttaattatttttgtggtcaacatttctgacctgtccacaaaacagattatgaggggttaaggaaagactaatgtcttccagaaatatagggttaaaggtatagtctacctaaagcagtccctggctatattgtaggtagcattgagatacaatttgaatcaagaaagggacacctttgtctttcaggcaactaagtgatgacgatccatatctaccatatctgatttaattatacttgtattaattaaa

SEQ ID NO: 94921 - DNA, 669 bp, Homo sapiens
acctaggtacttgatccaggtatatgtcacattcccaactgttggctgggcccaagcaaattagtaaaataaattaggtgctgtgtgaaagtatacgccacaatcacacctgcgggaaggaccaggaataaatttcacaattctacgtatttcccagctttaggtctgagagtctacacttctgagctccagttcttctcttcactgctctgcgtcctctgttcctagaggccaagccactgtggccttgtgttctgcaggtatccgcagatttatggctaaaagaccgggatcccctggaagccgagaaatgggactgttgacattcagagatgtagtcatagaattctctctggaggagtggcaatgcctggatcacgctcagcagaatttatatagagatgtgatgttagagaactacagaaacctggtctccctgggtattgctgtctctaagccagacttgatcacctgtctggagcaaaataaagagccttggaatataaagagaaatgagatggtaaccaaacacccagttatgtgttctcatttcacccaagaccttccgccagagctaggcataaaagattcactccaaaaagtaataccaagaagatatggaaaaagtggacatgacaatttacaagtaaaaacatgtaaaagcatggg

SEQ ID NO: 94922 - DNA, 2365 bp, Homo sapiens
  misc_feature (4)..(4): n is a, c, g, or t
tttnttaagctccgaaatagtaatcttttggctcgacgccgaggaattccagaatgcattctgttggtcactcagcgtattacaaaataccctgtcttggtggaaaggatattgcagtacacaaaggaaagaactgaggaacataaagacttacgcaaagcgctttgcttaattaaagacatgattgcaacagtggatttaaaagtcaatgaatatgagaaaaaccaaaaatggcttgagatcctaaataagattgaaaacaaaacatacacgaagctcaaaaatggacatgtgtttaggaagcaggcactgatgagtgaagaaaggactctgttatatgatggccttgtttactggaaaactgctacaggtcgtttcaaagatatcctagctctacttctaactgatgtgctgctctttttacaagaaaaagaccagaaatacatctttgcagccgttgatcagaagccatcagttatttcccttcaaaagcttattgctagagaagttgctaatgaggagagaggaatgtttctgatcagtgcttcatctgctggtcctgagatgtatgaaattcacaccaattccaaggaggaacgcaataactggatgagacggatccagcaggctgtagaaagttgtcctgaagaaaaagggggaaggacaagtgaatctgatgaagacaagaggaaagctgaagccagagtggccaaaattcagcaatgtcaagaaatactcactaaccaagaccaacaaatttgtgcgtatttggaggagaagctgcatatctatgctgaacttggagaactgagcggatttgaggacgtccatctagagccccacctccttattaaacctgacccaggcgagcctccccaggcagcctcattactggcagcagcactgaaagaagctgagagcctacaagttgcagtgaaggcctcacagatgggcgccgtgagtcaatcatgtgaggacagttgtggagactctgtcttggcggacacactcagttctcatgatgtaccaggatcaccgactgcctcattagtcacaggagggagagaaggaagaggctgttcggatgtggatcccgggatccagggtgtggtaaccgacttggccgtctctgatgcaggggagaaggtggaatgtagaaattttccaggttcttcacaatcagagattatacaagccatacagaatttaacccgtctcttatacagccttcaggccgccttgaccattcaggacagccacattgagatccacaggctggttctccagcagcaggagggcctgtctctcggccactctatcctccgaggcggccccttgcaggaccagaagtctcgcgacgcggacaggcagcatgaggagctggccaatgtgcaccagcttcagcaccagctccagcaggagcagcggcgctggctgcgcaggtgtgagcagcagcagcgggcgcaggcgaccagggagagctggctgcaggagcgggagcgggagtgccagtcgcaggaggagctgctgctgcggagccggggcgagctggacctccagctccaggagtaccagcacagcctggagcggctgagggagggccagcgcctggtggagagggagcaggcgaggatgcgggcccagcagagcctgctgggccactggaagcacggccggcagaggagcctgcccgcggtgctccttccgggtggccccgaggtaatggaacttaatcgatctgagagtttatgtcatgaaaactcattcttcatcaatgaagctttagtacaaatgtcatttaacactttcaacaaactgaatccatcagttatccatcaggatgccacttaccctacaactcaatctcattctgacttggtgaggactagtgaacatcaagtagacctcaaggtggacccttctcagccttcgaatgtcagtcacaaactgtggacagccgctggttccggccatcagatacttcctttccatgaaagcagcaaggattcttgtaaaaatgatttggacacctcccacactgagtccccaaccccccatgactcaaattcacaccgccctcaactgcaggcgtttataacagaagcaaagctaaatctaccgacaaggacaatgaccagacaagatggggaaactggagatggagccaaagaaaatattgtttacctctaattgtgttgtcatttttccaaacaaaacaaaacactggcacttttgggagaaactttttgtctccattccttatgtatgtgtgattgtctgtgtccaaattgctttaagaataatatttaatatttcctggaagctcatttttttggcatgagtctaattaaattattgaaagcca

SEQ ID NO: 94923 - DNA, 562 bp, Homo sapiens
agtcacaggagacatttgtgcacacaatcgaacatatcttaatgatattgatgaatgattttgacacctattatgttcctttctcattgggcttggccattctgtggctgactatatgggcactgcatttcctaatcttagagagctctaacgccaagacatctgccttgtacatctcaggtggcctcctgtaacctgtgctgtctgtttcttgcagatttggacacctcccacactgagtccccaaccccccatgactcaaattcacaccgccctcaactgcaggcgtttataacagaagcaaagctaaatctaccgacaaggacaatgaccagacaagatggggaaactggagatggagccaaagaaaatattgtttacctctaattgtgttgtcatttttccaaacaaaacaaaacactggcacttttgggagaaactttttgtctccattccttatgtatgtgtgattgtctgtgtccaaattgctttaagaataatatttaatatttcctggaagctcatttttttggcatgagtctaattaaattattgaaagcca

SEQ ID NO: 94924 - DNA, 3473 bp, Homo sapiens
  misc_feature (4)..(4): n is a, c, g, or t
tttnttaagctccgaaatagtaatcttttggctcgacgccgaggaattccagaatgcattctgttggtcactcagcgtattacaaaataccctgtcttggtggaaaggatattgcagtacacaaaggaaagaactgaggaacataaagacttacgcaaagcgctttgcttaattaaagacatgattgcaacagtggatttaaaagtcaatgaatatgagaaaaaccaaaaatggcttgagatcctaaataagattgaaaacaaaacatacacgaagctcaaaaatggacatgtgtttaggaagcaggcactgatgagtgaagaaaggactctgttatatgatggccttgtttactggaaaactgctacaggtcgtttcaaagatatcctagctctacttctaactgatgtgctgctctttttacaagaaaaagaccagaaatacatctttgcagccgttgatcagaagccatcagttatttcccttcaaaagcttattgctagagaagttgctaatgaggagagaggaatgtttctgatcagtgcttcatctgctggtcctgagatgtatgaaattcacaccaattccaaggaggaacgcaataactggatgagacggatccagcaggctgtagaaagttgtcctgaagaaaaagggggaaggacaagtgaatctgatgaagacaagaggaaagctgaagccagagtggccaaaattcagcaatgtcaagaaatactcactaaccaagaccaacaaatttgtgcgtatttggaggagaagctgcatatctatgctgaacttggagaactgagcggatttgaggacgtccatctagagccccacctccttattaaacctgacccaggcgagcctccccaggcagcctcattactggcagcagcactgaaagaagcattagtcacaggagggagagaaggaagaggctgttcggatgtggatcccgggatccagggtgtggtaaccgacttggccgtctctgatgcaggggagaaggtggaatgtagaaattttccaggttcttcacaatcagagattatacaagccatacagaatttaacccgtctcttatacagccttcaggccgccttgaccattcaggacagccacattgagatccacaggctggttctccagcagcaggagggcctgtctctcggccactctatcctccgaggcggccccttgcaggaccagaagtctcgcgacgcggacaggcagcatgaggagctggccaatgtgcaccagcttcagcaccagctccagcaggagcagcggcgctggctgcgcaggtgtgagcagcagcagcgggcgcaggcgaccagggagagctggctgcaggagcgggagcgggagtgccagtcgcaggaggagctgctgctgcggagccggggcgagctggacctccagctccaggagtaccagcacagcctggagcggctgagggagggccagcgcctggtggagagggagcaggcgaggatgcgggcccagcagagcctgctgggccactggaagcacggccggcagaggagcctgcccgcggtgctccttccgggtggccccgaggtaatggaacttaatcgatctgagagtttatgtcatgaaaactcattcttcatcaatgaagctttagtacaaatgtcatttaacactttcaacaaactgaatccatcagttatccatcaggatgccacttaccctacaactcaatctcattctgacttggtgaggactagtgaacatcaagtagacctcaaggtggacccttctcagccttcgaatgtcagtcacaaactgtggacagccgctggttccggccatcagatacttcctttccatgaaagcagcaaggattcttgtaaaaatggctccagtatgacaaagtgcagttgtacgttgacatctcccccgggactgtggactggaaccacatctactttgaaagatttggacacctcccacactgagtccccaaccccccatgactcaaattcacaccgccctcaactgcaggcgtttataacagaagcaaagctaaatctaccgacaaggacaatgaccagacaagatggggaaactggagatggagccaaagaaaatattgtttacctctaattgtgttgtcatttttccaaacaaaacaaaacactggcacttttgggagaaactttttgtctccattccttatgtatgtgtgattgtctgtgtccaaattgctttaagaataatatttaatatttcctggaagctcatttttttggcatgagtctaattaaattattgaaagccaccctgtttgtataatctttaacttatcaaatctaatttcagatttctggaggagaaactaacttgaataagcaggactattttaaaagttgttttgacgctagagtaaaattccatgtcacattttctacccaatcatctggatttcaagattccttttaagatctcaatgaagcaatttggatttaaagagtggtattcacaaggggtgaactttcacagtcagggcagttgcctcagtgcccacataggcagaggaggatgtgggaaagggtttttctcagctagtttttgtgtgctcatttcttctgggagcattaaaagtggtgatctgttacagtcactattcaactgggcacgtgttgtgattggtcagtcactgagccagggatacagtccggacttgcttagtacctaagcctaatgctggtggggtttcaagacatggttcagcatcatcttttaacaaggcccagaggcccagagcccccatcaagtcattttgatgtaaatagtgaactttgttagagccctcacttctatcaatcagctgtcctgtccctgccagcacctggagcaccaactaccactccctggaaagaacccttccctgcagttttttaaggacaaaactgcccactcctcattaagtttgctgcctggatacacttttccacaaaggaaaactggcatatcctgccttccgagtagtatgggtctctgtgtgagaaaccaggagatattttcatcttgttcggaaatacttgtatgtattttggtgtcaataaatatcttgtacctcattattttactttgtaattttaacattatgtgtaggaccatagtaaaacattcatttcacacagacatctaatctcacctcgtgaaaagtgaaaataaaggaaaactattagattcatccaaaaatgcaacacctactgggagtgagatgtgataggaacagaaaaaaaaaaaaaaaaaatcacccggatctcaatagttttttctccctacttaaagttgttaagttggatatctacattgtgtttttacttaggcaagtccaatcctaatttttttaaaagccccttttgggggcagtctttttctgactttagctggctatttttgtaacaattacattaaaaattcggtgactgatc

SEQ ID NO: 94925 - DNA, 1569 bp, Homo sapiens
  misc_feature (61)..(61): n is a, c, g, or t
actaccttatgcaatgaacttcattttattctcggagataccgcagagagcaaaagtccantatttggacacctcccacactgagtccccaaccccccatgactcaaattcacaccgccctcaactgcaggcgtttataacagaagcaaagctaaatctaccgacaaggacaatgaccagacaagatggggaaactggagatggagccaaagaaaatattgtttacctctaattgtgttgtcatttttccaaacaaaacaaaacactggcacttttgggagaaactttttgtctccattccttatgtatgtgtgattgtctgtgtccaaattgctttaagaataatatttaatatttcctggaagctcatttttttggcatgagtctaattaaattattgaaagccaccctgtttgtataatctttaacttatcaaatctaatttcagatttctggaggagaaactaacttgaataagcaggactattttaaaagttgttttgacgctagagtaaaattccatgtcacattttctacccaatcatctggatttcaagattccttttaagatctcaatgaagcaatttggatttaaagagtggtattcacaaggggtgaactttcacagtcagggcagttgcctcagtgcccacataggcagaggaggatgtgggaaagggtttttctcagctagtttttgtgtgctcatttcttctgggagcattaaaagtggtgatctgttacagtcactattcaactgggcacgtgttgtgattggtcagtcactgagccagggatacagtccggacttgcttagtacctaagcctaatgctggtggggtttcaagacatggttcagcatcatcttttaacaaggcccagaggcccagagcccccatcaagtcattttgatgtaaatagtgaactttgttagagccctcacttctatcaatcagctgtcctgtccctgccagcacctggagcaccaactaccactccctggaaagaacccttccctgcagttttttaaggacaaaactgcccactcctcattaagtttgctgcctggatacacttttccacaaaggaaaactggcatatcctgccttccgagtagtatgggtctctgtgtgagaaaccaggagatattttcatcttgttcggaaatacttgtatgtattttggtgtcaataaatatcttgtacctcattattttactttgtaattttaacattatgtgtaggaccatagtaaaacattcatttcacacagacatctaatctcacctcgtgaaaagtgaaaataaaggaaaactattagattcatccaaaaatgcaacacctactgggagtgagatgtgataggaacagaaaaaaaaaaaaaaaaaatcacccggatctcaatagttttttctccctacttaaagttgttaagttggatatctacattgtgtttttacttaggcaagtccaatcctaatttttttaaaagccccttttgggggcagtctttttctgactttagctggctatttttgtaacaattacattaaaaattcggtgactgatc

SEQ ID NO: 94926 - DNA, 1724 bp, Homo sapiens
agtcacaggagacatttgtgcacacaatcgaacatatcttaatgatattgatgaatgattttgacacctattatgttcctttctcattgggcttggccattctgtggctgactatatgggcactgcatttcctaatcttagagagctctaacgccaagacatctgccttgtacatctcaggtggcctcctgtaacctgtgctgtctgtttcttgcagatttggacacctcccacactgagtccccaaccccccatgactcaaattcacaccgccctcaactgcaggcgtttataacagaagcaaagctaaatctaccgacaaggacaatgaccagacaagatggggaaactggagatggagccaaagaaaatattgtttacctctaattgtgttgtcatttttccaaacaaaacaaaacactggcacttttgggagaaactttttgtctccattccttatgtatgtgtgattgtctgtgtccaaattgctttaagaataatatttaatatttcctggaagctcatttttttggcatgagtctaattaaattattgaaagccaccctgtttgtataatctttaacttatcaaatctaatttcagatttctggaggagaaactaacttgaataagcaggactattttaaaagttgttttgacgctagagtaaaattccatgtcacattttctacccaatcatctggatttcaagattccttttaagatctcaatgaagcaatttggatttaaagagtggtattcacaaggggtgaactttcacagtcagggcagttgcctcagtgcccacataggcagaggaggatgtgggaaagggtttttctcagctagtttttgtgtgctcatttcttctgggagcattaaaagtggtgatctgttacagtcactattcaactgggcacgtgttgtgattggtcagtcactgagccagggatacagtccggacttgcttagtacctaagcctaatgctggtggggtttcaagacatggttcagcatcatcttttaacaaggcccagaggcccagagcccccatcaagtcattttgatgtaaatagtgaactttgttagagccctcacttctatcaatcagctgtcctgtccctgccagcacctggagcaccaactaccactccctggaaagaacccttccctgcagttttttaaggacaaaactgcccactcctcattaagtttgctgcctggatacacttttccacaaaggaaaactggcatatcctgccttccgagtagtatgggtctctgtgtgagaaaccaggagatattttcatcttgttcggaaatacttgtatgtattttggtgtcaataaatatcttgtacctcattattttactttgtaattttaacattatgtgtaggaccatagtaaaacattcatttcacacagacatctaatctcacctcgtgaaaagtgaaaataaaggaaaactattagattcatccaaaaatgcaacacctactgggagtgagatgtgataggaacagaaaaaaaaaaaaaaaaaatcacccggatctcaatagttttttctccctacttaaagttgttaagttggatatctacattgtgtttttacttaggcaagtccaatcctaatttttttaaaagccccttttgggggcagtctttttctgactttagctggctatttttgtaacaattacattaaaaattcggtgactgatc

SEQ ID NO: 94927 - DNA, 2725 bp, Homo sapiens
  misc_feature (4)..(4): n is a, c, g, or t
tttnttaagctccgaaatagtaatcttttggctcgacgccgaggaattccagaatgcattctgttggtcactcagcgtattacaaaataccctgtcttggtggaaaggatattgcagtacacaaaggaaagaactgaggaacataaagacttacgcaaagcgctttgcttaattaaagacatgattgcaacagtggatttaaaagtcaatgaatatgagaaaaaccaaaaatggcttgagatcctaaataagattgaaaacaaaacatacacgaagctcaaaaatggacatgtgtttaggaagcaggcactgatgagtgaagaaaggactctgttatatgatggccttgtttactggaaaactgctacaggtcgtttcaaagatatcctagctctacttctaactgatgtgctgctctttttacaagaaaaagaccagaaatacatctttgcagccgttgatcagaagccatcagttatttcccttcaaaagcttattgctagagaagttgctaatgaggagagaggaatgtttctgatcagtgcttcatctgctggtcctgagatgtatgaaattcacaccaattccaaggaggaacgcaataactggatgagacggatccagcaggctgtagaaagttgtcctgaagaaaaagggggaaggacaagtgaatctgatgaagacaagaggaaagctgaagccagagtggccaaaattcagcaatgtcaagaaatactcactaaccaagaccaacaaatttgtgcgtatttggaggagaagctgcatatctatgctgaacttggagaactgagcggatttgaggacgtccatctagagccccacctccttattaaacctgacccaggcgagcctccccaggcagcctcattactggcagcagcactgaaagaagctgagagcctacaagttgcagtgaaggcctcacagatgggcgccgtgagtcaatcatgtgaggacagttgtggagactctgtcttggcggacacactcagttctcatgatgtaccaggatcaccgactgcctcattagtcacaggagggagagaaggaagaggctgttcggatgtggatcccgggatccagggtgtggtaaccgacttggccgtctctgatgcaggggagaaggtggaatgtagaaattttccaggttcttcacaatcagagattatacaagccatacagaatttaacccgtctcttatacagccttcaggccgccttgaccattcaggacagccacattgagatccacaggctggttctccagcagcaggagggcctgtctctcggccactctatcctccgaggcggccccttgcaggaccagaagtctcgcgacgcggacaggcagcatgaggagctggccaatgtgcaccagcttcagcaccagctccagcaggagcagcggcgctggctgcgcaggtgtgagcagcagcagcgggcgcaggcgaccagggagagctggctgcaggagcgggagcgggagtgccagtcgcaggaggagctgctgctgcggagccggggcgagctggacctccagctccaggagtaccagcacagcctggagcggctgagggagggccagcgcctggtggagagggagcaggcgaggatgcgggcccagcagagcctgctgggccactggaagcacggccggcagaggagcctgcccgcggtgctccttccgggtggccccgaggtaatggaacttaatcgatctgagagtttatgtcatgaaaactcattcttcatcaatgaagctttagtacaaatgtcatttaacactttcaacaaactgaatccatcagttatccatcaggatgccacttaccctacaactcaatctcattctgacttggtgaggactagtgaacatcaagtagacctcaaggtggacccttctcagccttcgaatgtcagtcacaaactgtggacagccgctggttccggccatcagatacttcctttccatgaaagcagcaaggattcttgtaaaaatgatttggacacctcccacactgagtccccaaccccccatgactcaaattcacaccgccctcaactgcaggcgtttataacagaagcaaagctaaatctaccgacaaggacaatgaccagacaagatggggaaactggagatggagccaaagaaaatattgtttacctctaattgtgttgtcatttttccaaacaaaacaaaacactggcacttttgggagaaactttttgtctccattccttatgtatgtgtgattgtctgtgtccaaattgctttaagaataatatttaatatttcctggaagctcatttttttggcatgagtctaattaaattattgaaagccaaaaaaaaaaaaaaaaaaaaaaaaaaaaaaaaaaaggggggggggggttaaaaaatatcccccggggggggccccatttttcggtccccctttttttttgtaaaaaggggggggccccataagggagagggggatattaaaaaagaagggggacgggggggggggtgtttataaaaacgggtctgggtggggggaaaacggggtctggggggcttttgttgggaagagggacccttctttcggggggtggggccaattttgtggacattccttaggaaattttaagtcgggggaatttaactttggggttttggggtgtacccggattgtttgggggaaattggttccggatttttagata

SEQ ID NO: 94928 - DNA, 956 bp, Homo sapiens
tgactccgactcaccttttaactactcgtggccttcctttcccaaaatgaagattcgaagaaggacgtccaaacaagatcgctccttcgatatcctaaaaaaatccaagccgccctcgacattgcttgctgcaggccggctttcagacatgctgaatggaggtgatgaagtctacgctaactgtatggtgattgatcaggttggtgatttggatatcagctatattaatatagagggaatcactgccactaccagccctgaatccagaggttgcactctgtggcctcagagcagcaaacacacccttcctacagaaaccagtcccagtgtgtacccacttagtgaaaatgtcgaagggacacacctggagcaccaactaccactccctggaaagaacccttccctgcagttttttaaggacaaaactgcccactcctcattaagtttgctgcctggatacacttttccacaaaggaaaactggcatatcctgccttccgagtagtatgggtctctgtgtgagaaaccaggagatattttcatcttgttcggaaatacttgtatgtattttggtgtcaataaatatcttgtacctcattattttactttgtaattttaacattatgtgtaggaccatagtaaaacattcatttcacacagacatctaatctcacctcgtgaaaagtgaaaataaaggaaaactattagattcatccaaaaatgcaacacctactgggagtgagatgtgataggaacagaaaaaaaaaaaaaaaaaatcacccggatctcaatagttttttctccctacttaaagttgttaagttggatatctacattgtgtttttacttaggcaagtccaatcctaatttttttaaaagccccttttgggggcagtctttttctgactttagctggctatttttgtaacaattacattaaaaattcggtgactgatc

SEQ ID NO: 94929 - DNA, 524 bp, Homo sapiens
agtatagatggggtttcaccacattggccaggctggtcttgaactgctgacctcaagtgattcacctgcctcggcctcccaaagtgctgggattacaggagggagccgttgggcccggcctaaaccaccaattcttaaggatgagcatgcctataattcctctttttccatcctctcttttccataccgtctccattggagattgtatcaacttctacagctcttttgaaaagattggaagtggagaaaggtttacctagtactcttgcttcctttagctcatgttttacggagccttactttagctaggatgctgtttcatctgctcaccttcctattttatgtaggatcagaagccatcagttatttcccttcaaaagcttattgctagagaagttgctaatgaggagagaggaatgtttctgatcagtgcttcatctgctggtcctgagatgtatgaaattcacaccaattccaaggaggaacgcaataactggatgagacggatccagcaggctgtagaa

SEQ ID NO: 94930 - DNA, 2152 bp, Homo sapiens
  misc_feature (4)..(4): n is a, c, g, or t
tttnttaagctccgaaatagtaatcttttggctcgacgccgaggaattccagaatgcattctgttggtcactcagcgtattacaaaataccctgtcttggtggaaaggatattgcagtacacaaaggaaagaactgaggaacataaagacttacgcaaagcgctttgcttaattaaagacatgattgcaacagtggatttaaaagtcaatgaatatgagaaaaaccaaaaatggcttgagatcctaaataagattgaaaacaaaacatacacgaagctcaaaaatggacatgtgtttaggaagcaggcactgatgagtgaagaaaggactctgttatatgatggccttgtttactggaaaactgctacaggtcgtttcaaagatatcctagctctacttctaactgatgtgctgctctttttacaagaaaaagaccagaaatacatctttgcagccgttgatcagaagccatcagttatttcccttcaaaagcttattgctagagaagttgctaatgaggagagaggaatgtttctgatcagtgcttcatctgctggtcctgagatgtatgaaattcacaccaattccaaggaggaacgcaataactggatgagacggatccagcaggctgtagaaagttgtcctgaagaaaaagggggaaggacaagtgaatctgatgaagacaagaggaaagctgaagccagagtggccaaaattcagcaatgtcaagaaatactcactaaccaagaccaacaaatttgtgcgtatttggaggagaagctgcatatctatgctgaacttggagaactgagcggatttgaggacgtccatctagagccccacctccttattaaacctgacccaggcgagcctccccaggcagcctcattactggcagcagcactgaaagaagctgagagcctacaagttgcagtgaaggcctcacagatgggcgccgtgagtcaatcatgtgaggacagttgtggagactctgtcttggcggacacactcagttctcatgatgtaccaggatcaccgactgcctcattagtcacaggagggagagaaggaagaggctgttcggatgtggatcccgggatccagggtgtggtaaccgacttggccgtctctgatgcaggggagaaggtggaatgtagaaattttccaggttcttcacaatcagagattatacaagccatacagaatttaacccgtctcttatacagccttcaggccgccttgaccattcaggacagccacattgagatccacaggctggttctccagcagcaggagggcctgtctctcggccactctatcctccgaggcggccccttgcaggaccagaagtctcgcgacgcggacaggcagcatgaggagctggccaatgtgcaccagcttcagcaccagctccagcaggagcagcggcgctggctgcgcaggtgtgagcagcagcagcgggcgcaggcgaccagggagagctggctgcaggagcgggagcgggagtgccagtcgcaggaggagctgctgctgcggagccggggcgagctggacctccagctccaggagtaccagcacagcctggagcggctgagggagggccagcgcctggtggagagggagcaggcgaggatgcgggcccagcagagcctgctgggccactggaagcacggccggcagaggagcctgcccgcggtgctccttccgggtggccccgaggtaatggaacttaatcgatctgagagtttatgtcatgaaaactcattcttcatcaatgaagctttagtacaaatgtcatttaacactttcaacaaactgaatccatcagttatccatcaggatgccacttaccctacaactcaatctcattctgacttggtgaggactagtgaacatcaagtagacctcaaggtggacccttctcagccttcgaatgtcagtcacaaactgtggacagccgctggttccggccatcagatacttcctttccatgaaagcagcaaggattcttgtaaaaatggtaattaacactttaaacatcatctgtatagtttgaacaagaagttgtccctctgaatggttggctcttgtgtagagtgaatcaaagtcctccctagcatgggaataaatcggtactgatgagctggagttt

SEQ ID NO: 94931 - DNA, 2443 bp, Homo sapiens
  misc_feature (4)..(4): n is a, c, g, or t
tttnttaagctccgaaatagtaatcttttggctcgacgccgaggaattccagaatgcattctgttggtcactcagcgtattacaaaataccctgtcttggtggaaaggatattgcagtacacaaaggaaagaactgaggaacataaagacttacgcaaagcgctttgcttaattaaagacatgattgcaacagtggatttaaaagtcaatgaatatgagaaaaaccaaaaatggcttgagatcctaaataagattgaaaacaaaacatacacgaagctcaaaaatggacatgtgtttaggaagcaggcactgatgagtgaagaaaggactctgttatatgatggccttgtttactggaaaactgctacaggtcgtttcaaagatatcctagctctacttctaactgatgtgctgctctttttacaagaaaaagaccagaaatacatctttgcagccgttgatcagaagccatcagttatttcccttcaaaagcttattgctagagaagttgctaatgaggagagaggaatgtttctgatcagtgcttcatctgctggtcctgagatgtatgaaattcacaccaattccaaggaggaacgcaataactggatgagacggatccagcaggctgtagaaagttgtcctgaagaaaaagggggaaggacaagtgaatctgatgaagacaagaggaaagctgaagccagagtggccaaaattcagcaatgtcaagaaatactcactaaccaagaccaacaaatttgtgcgtatttggaggagaagctgcatatctatgctgaacttggagaactgagcggatttgaggacgtccatctagagccccacctccttattaaacctgacccaggcgagcctccccaggcagcctcattactggcagcagcactgaaagaagctgagagcctacaagttgcagtgaaggcctcacagatgggcgccgtgagtcaatcatgtgaggacagttgtggagactctgtcttggcggacacactcagttctcatgatgtaccaggatcaccgactgcctcattagtcacaggagggagagaaggaagaggctgttcggatgtggatcccgggatccagggtgtggtaaccgacttggccgtctctgatgcaggggagaaggtggaatgtagaaattttccaggttcttcacaatcagagattatacaagccatacagaatttaacccgtctcttatacagccttcaggccgccttgaccattcaggacagccacattgagatccacaggctggttctccagcagcaggagggcctgtctctcggccactctatcctccgaggcggccccttgcaggaccagaagtctcgcgacgcggacaggcagcatgaggagctggccaatgtgcaccagcttcagcaccagctccagcaggagcagcggcgctggctgcgcaggtgtgagcagcagcagcgggcgcaggcgaccagggagagctggctgcaggagcgggagcgggagtgccagtcgcaggaggagctgctgctgcggagccggggcgagctggacctccagctccaggagtaccagcacagcctggagcggctgagggagggccagcgcctggtggagagggagcaggcgaggatgcgggcccagcagagcctgctgggccactggaagcacggccggcagaggagcctgcccgcggtgctccttccgggtggccccgaggtaatggaacttaatcgatctgagagtttatgtcatgaaaactcattcttcatcaatgaagctttagtacaaatgtcatttaacactttcaacaaactgaatccatcagttatccatcaggatgccacttaccctacaactcaatctcattctgacttggtgaggactagtgaacatcaagtagacctcaaggtggacccttctcagccttcgaatgtcagtcacaaactgtggacagccgctggttccggccatcagatacttcctttccatgaaagcagcaaggattcttgtaaaaatggctccagtatgacaaagtgcagttgtacgttgacatctcccccgggactgtggactggaaccacatctactttgaaagatttggacacctcccacactgagtccccaaccccccatgactcaaattcacaccgccctcaactgcaggcgtttataacagaagcaaagctaaatctaccgacaaggacaatgaccagacaagatggggaaactggagatggagccaaagaaaatattgtttacctctaattgtgttgtcatttttccaaacaaaacaaaacactggcacttttgggagaaactttttgtctccattccttatgtatgtgtgattgtctgtgtccaaattgctttaagaataatatttaatatttcctggaagctcatttttttggcatgagtctaattaaattattgaaagcca

SEQ ID NO: 94932 - DNA, 959 bp, Homo sapiens
tgactccgactcaccttttaactactcgtggccttcctttcccaaaatgaagattcgaagaaggacgtccaaacaagatcgctccttcgatatcctaaaaaaatccaagccgccctcgacattgcttgctgcaggccggctttcagacatgctgaatggaggtgatgaagtctacgctaactgtatggtgattgatcaggttggtgatttggatatcagctatattaatatagagggaatcactgccactaccagccctgaatccagaggttgcactctgtggcctcagagcagcaaacacacccttcctacagaaaccagtcccagtgtgtacccacttagtgaaaatgtcgaagggacagcacacactgaagcccagcagtccttcatgtcaccatcaagttcgtgtgcttccaacttgaatctttcttttggttggcatggatttgaaaaggaacaaagtcatctaaagaaaagaagttctagccttgatgccttggacgccgacagtgaaggggaagggcattctgagccatcccacatctgttacactccagggtctcagagctcctcaagaactgggattcctagtggggatgaattggactcttttgagactaacactgaaccggattttaatatctccagggctgaatcccttcctctatcaagtaatctacagtcgaaggaatcactgctttctggagttcgctcacgttcttattcttgctcgtcacccaaaatttctttaggaaaaactcgtttggtgcgtgaattaacagtatgcagttcaagtgaagagcaaagagcttacagcttatcggagccaccaagagaaaacagaattcaggaagaagaatgggataaatacatcatacctgccaaatcagagtctgaaaaatataaagtgagtcgaactttcagtttcctcatgaataggatgactagccctcggaata

SEQ ID NO: 94933 - DNA, 425 bp, Homo sapiens
  misc_feature (7)..(8): n is a, c, g, or t
  misc_feature (116)..(116): n is a, c, g, or t
cctacgnntgttcttttaatagctttatctaatataacaataatcggaataattgttaaactggcttcccaaaactttagttgggggtactcttgcatttctgaagctctggcgtntggggaggtagtcactgacatttctttgagaaccctgtacatgtggccatgaaccctctgccaaagataaggaaactttatttaaagcttgaagattttgaaatgtggggcttaggctttaatggaaggcgaaaataatgcagtccgtgcttttaaacagaataaacaagtaggataacattaatcaataagtcttagttgaggttgcctcacagggaaatctatggcaccttacacattctccgtctgtgtaagggcatttgcttgttgttatttagatgtgactgacataatttggcaatctggttt

SEQ ID NO: 94934 - DNA, 222 bp, Homo sapiens
tttttggactgctcctgcaaggtagggctaccccataggcagagagtagctgaaaaattctgtatgtgtctatcacaagaagttgaggccgggcgcggtggctcacgcctgtaatcccagcactttgggaggccgaagccggcggatcacgaggtcaggagatcgagaccatcccagctaaaacggtgaaaccccgtctctactaaaaatacaaaaaattag

SEQ ID NO: 94935 - DNA, 668 bp, Homo sapiens
cacattagcacatgaagatgcgcttcattctgtttaatggccgtgtgtcattctattatgtagatgtgccgtaagtatttatccctcttcagttggtgggcagcatgtatgttatttccagtttttagtcattacaaaagatattgcagtgaacatccttgtacatatatcgttgtatagttgcgcaggtatatatgaaaaattcccagcagccaagctaaaaaatcgaagaatatgcacatttaaaattgagttagatattgctaaggttttcctgcaaagatattgtaatcatatatactcccaccaacagtgtatgacagtgctttcttccccacatcattgccagcactggtacgatcatactttaaaaactttgttggccgggcgcggtggctcacgcctgtaatcccagcacattgggaagccgaggcgggcggatcacctgaggtcaggagttcgagaccagcctggccaacatggtgaaaccccgtctctactaaaaaaacaaaaattagccgggcgtggtggcaggtgcctgtaatcctagctacttgggaggctgaggcaggagaatcacacgaacccaggaggcggaggttgcagtgagctgggatcgcaccattgcactctagcctgggtgacaagagcaacacttcatctcaaaa

SEQ ID NO: 94936 - DNA, 2677 bp, Homo sapiens
gcgtgcgtgcgtgcgtgcgtgtgtgtgtgtgtgtgcctctgctctttgtcctgagcccacgattccagagctggctggacccaaggaggtgaagagtcacttttcagccccaggaagggcaaagaagagagaaaatcagcctgtctgctctctccttggctcaacaaggcctctaacagtcttctgtcctctattctgcacacggcatatttgggaacgagaaacaaaagttttcccaaatgaagagaactcacttgtttattgtggggatttattttctgtcctcttgcagggcagaagaggggcttaatttccccacatatgatgggaaggaccgagtggtaagtctttccgagaagaacttcaagcaggttttaaagaaatatgacttgctttgcctctactaccatgagccggtgtcttcagataaggtcacgcaaaaacagttccaactgaaagaaatcgtgcttgagcttgtggcccaggtccttgaacataaagctataggctttgtgatggtggatgccaagaaagaagccaagcttgccaagaaactgggttttgatgaagaaggaagcctgtatattcttaagggtgatcgcacaatagagtttgatggcgagtttgcagctgatgtcttggtggagttcctcttggatctaattgaagacccagtggagatcatcagcagcaaactggaagtccaagccttcgaacgcattgaagactacatcaaactcattggctttttcaagagtgaggactcagaatactacaaggcttttgaagaagcagctgaacacttccagccttacatcaaattctttgccacctttgacaaaggggttgcaaagaaattatctttgaagatgaatgaggttgacttctatgagccatttatggatgagcccattgccatccccaacaaaccttacacagaagaggagctggtggagtttgtgaaggaacaccaaagacccactctacgtcgcctgcgcccagaagaaatgtttgaaacatgggaagatgatttgaatgggatccacattgtggcctttgcagagaagagtgatccagatggctacgaattcctggagatcctgaaacaggttgcccgggacaatactgacaaccccgatctgagcatcctgtggatcgacccggacgactttcctctgctcgttgcctactgggagaagactttcaagattgacctattcaggccacagattggggtggtgaatgtcacagatgctgacagtgtctggatggagattccagatgatgacgatcttccaactgctgaggagctggaggactggattgaggatgtgctttctggaaagataaacactgaagatgatgatgaagatgatgatgatgatgataattctgatgaagaggataatgatgacagtgatgacgatgatgatgaatagcccaactccaaacaattctgatgaaaacaaaatcacagcacccactaccatacagacagcacaaggtggcagcaagcaattctgccccacacccagccagctcctttcccttttccatcatctcttttcccactccctttgcgtcaggagcagcatcattcagcaaatgccttttcaaatgcagcaatcccacttagcagggacaggagaaaaattattcccatgttgactgtcttgactgtcacggaacagatcttgttctttgctggaccatcaagggtcatggcagtgcctgaacatggcagtctagggtgaacaatcccctaacacaagtttacttgtctttgattatgacagtaacaaaattgacagctttctaactcacaggcatagagtgaccttttaatcagagcccagggaagacacatgattaatgatttagctccctccatacctcgaacatcagttgggatccctcctccagccaagatgatccttcttagagaaggctcagccttggaagcaaacttataaatcatattctcatggctttgttaaacttatttcaagtgatggtcattcatatcactatgaacttggatattcaagcctttggatggctatggagaggccttgaaatgtgtacaggtgtcaccatcatttctagtatattaggaaactgggatgggaggttgatttgctctctaaacttccctctagttggcaagtctcacatattcatcagcaggagtggagggtgggggaaaactagaaagatgaaaacttttacatttttctgatgggttcatgtctctgattgggtcagctggcttcctagcctaagctgggatctgaataccccttctctgtagctgctagtgagccttcccatttagattaaagattgctttatccagcagtcaattaactctccagttatcagtactcccacaattggccagggcaacaataattggagttcatactgatgccctgaggcactgaaaaaaaaaaaaatcccaaagtgccttctgagctgtctaaaagttacattgtgcttggtagatttagtgttaagtgtgcagtataattttctaatttattttctcaatcttttagcacatgtgtaagacactgtgcaaattttttgaaaatagagcaatactttttgtggaatactagctaactaattctgtcattaaactcatattttgaaaatattcagacaatgttgaaaa

SEQ ID NO: 94937 - DNA, 1948 bp, Homo sapiens
gtgcaggcaaacagcaaccattctgccttgacaacacactgaacatgtggctgctttaatccagagagaaaatgtcttcctggctatcggctggctctccgagctctttatctgttgttgcaaagaaattatctttgaagatgaatgaggttgacttctatgagccatttatggatgagcccattgccatccccaacaaaccttacacagaagaggagctggtggagtttgtgaaggaacaccaaagacccactctacgtcgcctgcgcccagaagaaatgtttgaaacatgggaagatgatttgaatgggatccacattgtggcctttgcagagaagagtgatccagatggctacgaattcctggagatcctgaaacaggttgcccgggacaatactgacaaccccgatctgagcatcctgtggatcgacccggacgactttcctctgctcgttgcctactgggagaagactttcaagattgacctattcaggccacagattggggtggtgaatgtcacagatgctgacagtgtctggatggagattccagatgatgacgatcttccaactgctgaggagctggaggactggattgaggatgtgctttctggaaagataaacactgaagatgatgatgaagatgatgatgatgatgataattctgatgaagaggataatgatgacagtgatgacgatgatgatgaatagcccaactccaaacaattctgatgaaaacaaaatcacagcacccactaccatacagacagcacaaggtggcagcaagcaattctgccccacacccagccagctcctttcccttttccatcatctcttttcccactccctttgcgtcaggagcagcatcattcagcaaatgccttttcaaatgcagcaatcccacttagcagggacaggagaaaaattattcccatgttgactgtcttgactgtcacggaacagatcttgttctttgctggaccatcaagggtcatggcagtgcctgaacatggcagtctagggtgaacaatcccctaacacaagtttacttgtctttgattatgacagtaacaaaattgacagctttctaactcacaggcatagagtgaccttttaatcagagcccagggaagacacatgattaatgatttagctccctccatacctcgaacatcagttgggatccctcctccagccaagatgatccttcttagagaaggctcagccttggaagcaaacttataaatcatattctcatggctttgttaaacttatttcaagtgatggtcattcatatcactatgaacttggatattcaagcctttggatggctatggagaggccttgaaatgtgtacaggtgtcaccatcatttctagtatattaggaaactgggatgggaggttgatttgctctctaaacttccctctagttggcaagtctcacatattcatcagcaggagtggagggtgggggaaaactagaaagatgaaaacttttacatttttctgatgggttcatgtctctgattgggtcagctggcttcctagcctaagctgggatctgaataccccttctctgtagctgctagtgagccttcccatttagattaaagattgctttatccagcagtcaattaactctccagttatcagtactcccacaattggccagggcaacaataattggagttcatactgatgccctgaggcactgaaaaaaaaaaaaatcccaaagtgccttctgagctgtctaaaagttacattgtgcttggtagatttagtgttaagtgtgcagtataattttctaatttattttctcaatcttttagcacatgtgtaagacactgtgcaaattttttgaaaatagagcaatactttttgtggaatactagctaactaattctgtcattaaactcatattttgaaaatattcagacaatgttgaaaa

SEQ ID NO: 94938 - DNA, 2759 bp, Homo sapiens
gcgtgcgtgcgtgcgtgcgtgtgtgtgtgtgtgtgcctctgctctttgtcctgagcccacgattccagagctggctggacccaaggaggtgaagagtcacttttcagccccaggaagggcaaagaagagagaaaatcagcctgtctgctctctccttggctcaacaaggcctctaacagtcttctgtcctctattctgcacacggcatatttgggaacgagaaacaaaagttttcccaaatgaagagaactcacttgtttattgtggggatttattttctgtcctcttgcagggcagaagaggggcttaatttccccacatatgatgggaaggaccgagtggtaagtctttccgagaagaacttcaagcaggttttaaagaaatatgacttgctttgcctctactaccatgagccggtgtcttcagataaggtcacgcaaaaacagttccaactgaaagaaatcgtgcttgagcttgtggcccaggtccttgaacataaagctataggctttgtgatggtggatgccaagaaagaagccaagcttgccaagaaactgggttttgatgaagaaggaagcctgtatattcttaagggtgatcgcacaatagagtttgatggcgagtttgcagctgatgtcttggtggagttcctcttggatctaattgaagacccagtggagatcatcagcagcaaactggaagtccaagccttcgaacgcattgaagactacatcaaactcattggctttttcaagagtgaggactcagaatactacaaggcttttgaagaagcagctgaacacttccagccttacatcaaattctttgccacctttgacaaaggggtgctgtggctcacacctgtaatcccaacactttgggaggctgacgggggtggattgcatgagccttggagttggagaccagcctgggcaacatggttgcaaagaaattatctttgaagatgaatgaggttgacttctatgagccatttatggatgagcccattgccatccccaacaaaccttacacagaagaggagctggtggagtttgtgaaggaacaccaaagacccactctacgtcgcctgcgcccagaagaaatgtttgaaacatgggaagatgatttgaatgggatccacattgtggcctttgcagagaagagtgatccagatggctacgaattcctggagatcctgaaacaggttgcccgggacaatactgacaaccccgatctgagcatcctgtggatcgacccggacgactttcctctgctcgttgcctactgggagaagactttcaagattgacctattcaggccacagattggggtggtgaatgtcacagatgctgacagtgtctggatggagattccagatgatgacgatcttccaactgctgaggagctggaggactggattgaggatgtgctttctggaaagataaacactgaagatgatgatgaagatgatgatgatgatgataattctgatgaagaggataatgatgacagtgatgacgatgatgatgaatagcccaactccaaacaattctgatgaaaacaaaatcacagcacccactaccatacagacagcacaaggtggcagcaagcaattctgccccacacccagccagctcctttcccttttccatcatctcttttcccactccctttgcgtcaggagcagcatcattcagcaaatgccttttcaaatgcagcaatcccacttagcagggacaggagaaaaattattcccatgttgactgtcttgactgtcacggaacagatcttgttctttgctggaccatcaagggtcatggcagtgcctgaacatggcagtctagggtgaacaatcccctaacacaagtttacttgtctttgattatgacagtaacaaaattgacagctttctaactcacaggcatagagtgaccttttaatcagagcccagggaagacacatgattaatgatttagctccctccatacctcgaacatcagttgggatccctcctccagccaagatgatccttcttagagaaggctcagccttggaagcaaacttataaatcatattctcatggctttgttaaacttatttcaagtgatggtcattcatatcactatgaacttggatattcaagcctttggatggctatggagaggccttgaaatgtgtacaggtgtcaccatcatttctagtatattaggaaactgggatgggaggttgatttgctctctaaacttccctctagttggcaagtctcacatattcatcagcaggagtggagggtgggggaaaactagaaagatgaaaacttttacatttttctgatgggttcatgtctctgattgggtcagctggcttcctagcctaagctgggatctgaataccccttctctgtagctgctagtgagccttcccatttagattaaagattgctttatccagcagtcaattaactctccagttatcagtactcccacaattggccagggcaacaataattggagttcatactgatgccctgaggcactgaaaaaaaaaaaaaaaaaaacaccaacaaaactttgtggggggcctgggccccgaagaaagttttcaaacccttcgtgggggggcgggcccctgtggttagggcacctgtgccctagcgggtcccaaagaacaccctggccagacaaagtggtcgggttccccccaaaaaaaccccggggcccgcgcgttgacaaaccccagggtccggggcctccggctca

SEQ ID NO: 94939 - DNA, 2772 bp, Homo sapiens
gcgtgcgtgcgtgcgtgcgtgtgtgtgtgtgtgtgcctctgctctttgtcctgagcccacgattccagagctggctggacccaaggaggtgaagagtcacttttcagccccaggaagggcaaagaagagagaaaatcagcctgtctgctctctccttggctcaacaaggcctctaacagtcttctgtcctctattctgcacacggcatatttgggaacgagaaacaaaagttttcccaaatgaagagaactcacttgtttattgtggggatttattttctgtcctcttgcagggcagaagaggggcttaatttccccacatatgatgggaaggaccgagtggtaagtctttccgagaagaacttcaagcaggttttaaagaaatatgacttgctttgcctctactaccatgagccggtgtcttcagataaggtcacgcaaaaacagttccaactgaaagaaatcgtgcttgagcttgtggcccaggtccttgaacataaagctataggctttgtgatggtggatgccaagaaagaagccaagcttgccaagaaactgggttttgatgaagaaggaagcctgtatattcttaagggtgatcgcacaatagagtttgatggcgagtttgcagctgatgtcttggtggagttcctcttggatctaattgaagacccagtggagatcatcagcagcaaactggaagtccaagccttcgaacgcattgaagactacatcaaactcattggctttttcaagagtgaggactcagaatactacaaggcttttgaagaagcagctgaacacttccagccttacatcaaattctttgccacctttgacaaaggggtgctgtggctcacacctgtaatcccaacactttgggaggctgacgggggtggattgcatgagccttggagttggagaccagcctgggcaacatggttgcaaagaaattatctttgaagatgaatgaggttgacttctatgagccatttatggatgagcccattgccatccccaacaaaccttacacagaagaggagctggtggagtttgtgaaggaacaccaaagacccactctacgtcgcctgcgcccagaagaaatgtttgaaacatgggaagatgatttgaatgggatccacattgtggcctttgcagagaagagtgatccagatggctacgaattcctggagatcctgaaacaggttgcccgggacaatactgacaaccccgatctgagcatcctgtggatcgacccggacgactttcctctgctcgttgcctactgggagaagactttcaagattgacctattcaggccacagattggggtggtgaatgtcacagatgctgacagtgtctggatggagattccagatgatgacgatcttccaactgctgaggagctggaggactggattgaggatgtgctttctggaaagataaacactgaagatgatgatgaagatgatgatgatgatgataattctgatgaagaggataatgatgacagtgatgacgatgatgatgaatagcccaactccaaacaattctgatgaaaacaaaatcacagcacccactaccatacagacagcacaaggtggcagcaagcaattctgccccacacccagccagctcctttcccttttccatcatctcttttcccactccctttgcgtcaggagcagcatcattcagcaaatgccttttcaaatgcagcaatcccacttagcagggacaggagaaaaattattcccatgttgactgtcttgactgtcacggaacagatcttgttctttgctggaccatcaagggtcatggcagtgcctgaacatggcagtctagggtgaacaatcccctaacacaagtttacttgtctttgattatgacagtaacaaaattgacagctttctaactcacaggcatagagtgaccttttaatcagagcccagggaagacacatgattaatgatttagctccctccatacctcgaacatcagttgggatccctcctccagccaagatgatccttcttagagaaggctcagccttggaagcaaacttataaatcatattctcatggctttgttaaacttatttcaagtgatggtcattcatatcactatgaacttggatattcaagcctttggatggctatggagaggccttgaaatgtgtacaggtgtcaccatcatttctagtatattaggaaactgggatgggaggttgatttgctctctaaacttccctctagttggcaagtctcacatattcatcagcaggagtggagggtgggggaaaactagaaagatgaaaacttttacatttttctgatgggttcatgtctctgattgggtcagctggcttcctagcctaagctgggatctgaataccccttctctgtagctgctagtgagccttcccatttagattaaagattgctttatccagcagtcaattaactctccagttatcagtactcccacaattggccagggcaacaataattggagttcatactgatgccctgaggcactgaaaaaaaaaaaaatcccaaagtgccttctgagctgtctaaaagttacattgtgcttggtagatttagtgttaagtgtgcagtataattttctaatttattttctcaatcttttagcacatgtgtaagacactgtgcaaattttttgaaaatagagcaatactttttgtggaatactagctaactaattctgtcattaaactcatattttgaaaatattcagacaatgttgaaaa

SEQ ID NO: 94940 - DNA, 1367 bp, Homo sapiens
gcgtgcgtgcgtgcgtgcgtgtgtgtgtgtgtgtgcctctgctctttgtcctgagcccacgattccagagctggctggacccaaggaggtgaagagtcacttttcagccccaggaagggcaaagaagagagaaaatcagcctgtctgctctctccttggctcaacaaggcctctaacagtcttctgtcctctattctgcacacggcatatttgggaacgagaaacaaaactcctttcccttttccatcatctcttttcccactccctttgcgtcaggagcagcatcattcagcaaatgccttttcaaatgcagcaatcccacttagcagggacaggagaaaaattattcccatgttgactgtcttgactgtcacggaacagatcttgttctttgctggaccatcaagggtcatggcagtgcctgaacatggcagtctagggtgaacaatcccctaacacaagtttacttgtctttgattatgacagtaacaaaattgacagctttctaactcacaggcatagagtgaccttttaatcagagcccagggaagacacatgattaatgatttagctccctccatacctcgaacatcagttgggatccctcctccagccaagatgatccttcttagagaaggctcagccttggaagcaaacttataaatcatattctcatggctttgttaaacttatttcaagtgatggtcattcatatcactatgaacttggatattcaagcctttggatggctatggagaggccttgaaatgtgtacaggtgtcaccatcatttctagtatattaggaaactgggatgggaggttgatttgctctctaaacttccctctagttggcaagtctcacatattcatcagcaggagtggagggtgggggaaaactagaaagatgaaaacttttacatttttctgatgggttcatgtctctgattgggtcagctggcttcctagcctaagctgggatctgaataccccttctctgtagctgctagtgagccttcccatttagattaaagattgctttatccagcagtcaattaactctccagttatcagtactcccacaattggccagggcaacaataattggagttcatactgatgccctgaggcactgaaaaaaaaaaaaatcccaaagtgccttctgagctgtctaaaagttacattgtgcttggtagatttagtgttaagtgtgcagtataattttctaatttattttctcaatcttttagcacatgtgtaagacactgtgcaaattttttgaaaatagagcaatactttttgtggaatactagctaactaattctgtcattaaactcatattttgaaaatattcagacaatgttgaaaa

SEQ ID NO: 94941 - DNA, 177 bp, Homo sapiens
acagaaaacccctggcgaggaagaggtgtgatttgatcagggtggctgcatcagacaggcgttcagtacctttcccaccagagctggtgctgctcaggagctgagccaagtcagggcctcatgcagcccagctctcctgcctgtgagggagacccaggcgtcagtgagatgtccctt

SEQ ID NO: 94942 - DNA, 1260 bp, Homo sapiens
caggctaacattacaagggaaatgaaaataaaagaaacaggaaaatgaaataatacacatgattaataaggtgatatgaagatgatgtagcttaacattaatagatgaaaaagcagtttctttgtaatattacattatcaatgatcacaaatacagaaatctaacatttgtatagaattttaggaaatagggaactcttaaacactgggaaaatttactccagttttgggaaatttactcaaaatttagatcttgtatgtactttgccctggcagttccaatctgtaggaattattccaacggagtagttggacaaattgaattttatgtataagtatgtttcttacatagaaaatctatagctaatttatcacccccaactacttatgtatcaattgatttaaaaaaatagattggggggtgttcattaaatattaatttaggtctatttaggtcaggttctgggctagattctggagacacaaaagtgaataagacatagtccctgtccccttaaagctcataattcaaggataggcagatgagtaagcagacagcaacacactttgaaaggcgctattgttaaggtgtgttccaaatctgaggaacccaaagatacctcattctactgacctctcttcttaactagcagcttgagaaacaggtttgggatgccaatcaaagcatttgtaccacctaaccagactcccctgaagctactgagacagtctaatgtagtgtagtctagtgagacatatacatgcctcattttgtcttttgtgtatatcaaattttacataataaaacactttaaaataagatgtttttctgtctatggaaccagaaaaaacaagaaaaaaaggttggtgaccttgtgtgctccccaaacaaggatttgtggagagtgggcattctatactattgttggaaatgaaattagtacacactctatggagggcattctggtaatatctattgaaaactttaaagtgtatatatcatttgatccagtaattacacttttagaaatttattttaaggaaatagcagtataagtgtgcaaagacatacttctaaagatttttatttttataataattataagcctaaaatgttgggaaaaaaatcaattattcaacaagtgaaatttggttaaataagcttcagtattgacctgaaaaaatgtccacattgttaagcaaaaaaggaggaaacaataagaaagagaaaagtgtttcctgacagacaggagctggcctg

SEQ ID NO: 94943 - DNA, 422 bp, Homo sapiens
ggcatgggccactgtgcctggcccacattttattctttaaaaatgcctaaatgtggctgggtgtgttggctcatggtctctaccagtgagacccctggtctctaccaaaaataaaagaaattagccaggtgtgatggtgcatgactgtgggtcccagctacttgggagggtgaagtgggaggatcacttgagcccaggaggttgaggctgcagcaagccataatcacaccattgcactccagcctgggtgagtgagagcctgtcccccccaaaaaagtataaacgttcagaaagctactaatatcattctgtgttatattttcttaggctttttcaaccttcgtatatctgtactgttgaaaatacaatttcaaatagcaatttcaaatgacaatatgatgagggtgagtgcttaatggaga

SEQ ID NO: 94944 - DNA, 716 bp, Homo sapiens
tcatgtcatgattagaggaaccatttctatagttctataaggaaagcaatttcacaattttcgtatttgcagttaaatgtcatttaatagttaaaaacatttttgaaaatctgaataaacttaaggccctgatgctatggttaaggttcttgcctttttatactatatacagtagaaatgggaaagtgtaaattaaggtcatcttcatattatctcttttcataacttgaagaaaatgaagccacctctcagtcttccaaatgttaattaactgtgttactttgaccttttgtaagtgatcccattcagctagtaccaagctgaagattgatattcgttaatggttaatataaatttactgctctaggttaagcctaacatatgtaattgctactcagcctattactttttagtccattgggaatcactaaaaaaagtagaggctttagcttcattcctcggctgcttaaatcatattgtaatgttttaaattgttatgtcgtcctgtataaccttaggccccagtaactgattaatatgagtcagctttaagttaattacagatataaaaggtaatagacacataggcatccaatcttgggtcagtttaattttttaggggttgaatttacagaagtgagtaggaaattaaattgctttatttcttctaaaaccctgacacaaaatcataaggttagaacacattcagttgaaat

SEQ ID NO: 94945 - DNA, 351 bp, Homo sapiens
aggatgggaagtggcagcagctatgggagattgagtgggagttggtccaatgagtatatatattaaggaaaataaaagccagattaatgtaaagatgaaattaatgaggtgggcattctaggcttttggacttagagccttcaataaaaaacctgagctgggcagggtggctgatgcctgtaatcccaacactttgggaggccaagatgggaggattgtttcaggccgggagtttgacatcagcctgaacaccatagagagatctcatctgtacaaaaaataaaaacaaaaaatttagccaggcatggtggcttgtgtctatagtcccagctactcaggaggctcaggtgt

SEQ ID NO: 94946 - DNA, 422 bp, Homo sapiens
tatactttaagttttagggtacgtgtgcacaatgcgcaggttagttacatatgtatacatgtgccgtgctggtgcgctgcacccattaactcagaaatttaaaaaaatctgctttagaaaaacagatacgaaaattgataaagaaagatgacaagatggcggcttttcatgtttttaacttttaggatgtttacttatcctatgttctagccaagaaagccacagtccatgagagtctgttaggtaacacaggccttctccccttcattttatttatttatttatttatttatttatttatttatttatttatttatttttgagacagagtctcactctgttgcccaggctggagtccagtggccgatcttggctcactgcaagctccgcctccccagttcatgtcactctcctgcctcagc

SEQ ID NO: 94947 - DNA, 505 bp, Homo sapiens
gtgcttaggcctgtaaacctagggaaaatttgctccactggcagagaagctagaagactgtggggagctggggcaaactgtatttggaatcaggagacctggctgaggcgacaggttcagcactaattattcattaattatattattcaatatttatattattctgttgaactaactagttaacctctctaacctcagtatttacagttataatgtaaaagggaagatatctatgaagactggatgaaggcataaaagtaaaagagctttctttccaaatatcagtaaatgtacgttttggtttaatataaagaaatttggcagggctcagtagctcatacccataatcccagtgctttgggaagttgatgcggtaggatcacttatggctagaagtttgagatcagcctgggcaacacagcaagacccccatctctacaaaaaaatttttttgtttttttttttttgagacagagtctcgctctgttgccaggctggagtgcaa

SEQ ID NO: 94948 - DNA, 567 bp, Homo sapiens
cgtgggtcatcgctgactctagaggatacacggcagcatcggcccagagacaaagtatgtagtaagctttaaaagtgtaagcgtgttctaggggatagtgaagtcttctcacctccccattaactggccaagtggggcccacaggagagggccctgagtgtcaagctcctcactgaatgcacactgtaagggaatctatttttagatggcattagagctcaatatgcctgagggcaaaatgaggttcagtccctcttcactgatctcagtctctctgctcagggtttcataaaattacaactcggtccaacccaggagtctcagttaggagaagaaaacgtaaggactgggtaggtttcccatgaattcagagcagaagcagggctggcccaggcttcagctcacaggcatggcatggtggagggaactgaatcaggagtcagggggtctacttttgtgggccttgggcccagggtaaatctcttctgggcttcagctccctcacctacaaagcagggtgccataactgagggtcctaaggccggtgggctgtagaaggtgagggta

SEQ ID NO: 94949 - DNA, 543 bp, Homo sapiens
tatcccacccaagctcccgcctgttacaggcccttggttgacaatgggtgatgaattgccctgtgtgggggttatggcaggggcagcaaaggtggcaggacgtgggcccgccctaagagtgctcttgcaaatgcagaggacagcctggcctgagaagcgtgggtttgggcgaggagaaggatgcaggcttcagggttgattgtgatttagagagaggagagaagaatggggtggggaccctcagaagcaaggctagttgagctggttccaagaagacctggttgacctgcattggggtctggactaactataagcctctgtagggatggctccagttttaattttccatggatacatcatgctcagtaattttgagggatatcttagctcctgttttagtagctgcagattctctggggaaggagcagaggaggttccttccctcctgcacttgatatgctctggagggaggcagacaagaaataaactagcaaacaaaagggtaagaatatgtccagtggtgataatcgccgtcatggaaat

SEQ ID NO: 94950 - DNA, 173 bp, Homo sapiens
atagtaggactgaacttctgagaggttaagcgacatggcacagattacacagaagagaaagattttgaagatcagatgaagtagttaccttggaatactgcagcctgggcaacagtgttaagactctgtctcaaatataaataaataaataaataaataaaaataaagcacga

SEQ ID NO: 94951 - DNA, 217 bp, Homo sapiens
tgagctagaatggttgctgtattgaatcactatatttttttagcttcatgttagctttttgtgtgttagcatttgctttaaaatgatattaatcagccctctagtaggtagaaattcatctgagggtttcttcccttgttgtccatctcaataggatttccagaagacgtaagaaccctctctgtttctaaaaatattccaggctgggcgctgtggc

SEQ ID NO: 94952 - DNA, 681 bp, Homo sapiens
atcagctcgcttgaggccaggagttcaagaccagcctgggcaacatagcaaaactccgtctctacaaaaattagccagaagtggtggtgtgtgtgcctgtagtcttatcaggaggctggggcaagaggatcacttgagctggggaggtcacgttagagctgcagtgaactgtgacccccacacttcagcctggttgatagtgagatactgtctaaaaaaatatattagtaaaaactttataaggttgcgtttattctatttacctgctatataactaataccttgttttgattacattctaccaccttaccttgtgccttacatttttccgccacatttgtttctttttaatctcctttgcttttgcattgtttatgaaacaaactgtttatttttttctatatgtttattttgaagttttatacatttcactaacgtagttacttttcttttatacttctaataagtgattacctgaaagatcacgacatttgctaaagtttttactttacaacagtggcccagagtattttgtacgcccttgaatgttctttggatacttttcaaggatctagaaggtcaaaactattttcataataaaatgtagatggtatttgcctctttcactctcattcattcataggtataaagttaaagttttccagaagctaaacgatgtgt

SEQ ID NO: 94953 - DNA, 400 bp, Homo sapiens
ttcttcccttctacctttcctttccttcctttccttccttctcctttctctccttctctttatttctcccctttcttccttcctttctccctttattacttttccttccttcttcttccctttcttttttcttttctttctttccttccttctttctctttctcctcctctctgtctttccatttgccttcatccttttgcagcaactaagattcaaacttcataaacttttggccaggtgcagtggcctgtaataacagcactttgagaggcaaagacagaaggatcccttgaggccaggagttggagaacagcctgggcaacatagcaagatcccacttctaaaaaaagtaaataattttttttaattagccagacgtggtggcacatgtctgtggtc

SEQ ID NO: 94954 - DNA, 510 bp, Homo sapiens
gagtcaaaaagcctgagtctgagcctcagctttgctagttgtgtgatcttgggtatgtcacttaacctctttaagcttcaaaattgtcatctataacatgaggccaagaatgactggctcacagggctgttgtggggattaaaagagataagatatgtaaaagccattggtaatttataagatgctagaaatacaaagatttttattgtattcaaaatgattctatatttgttcatatctaagaatttacagatcatggtagcattgcctcctgtataagtcatttcacaaatatacatgggcaactaactgtccttagccaccaataaatcagggttaattttgtattttttgttttccttttaaagtttctctgtggctataatgatttacatgtcccactattaatctgaaggtcatatgttcagggacaagctttactgtgaaattctgtgccttgcctggttcttgtaatctgcttttgggaagctatatggaaggcttgagagt

SEQ ID NO: 94955 - DNA, 180 bp, Homo sapiens
gatgaaaatgttgtgaccagaggcttgccatttcctaactctatttgccagaggagcaatagttctgtattcgctaattttgtgttcacagagactttaaggaacatgactgttgggaataacaagaattaaaggtatttatttactttctctatatgattgtaatattatacccatact

SEQ ID NO: 94956 - DNA, 363 bp, Homo sapiens
acaactccgcagattcacagacatcctttcacttctataacttcgtgtatttgcttcgccagctcattacagatgtcctagcgcacggtgatatgctccacatttagcagctgaggacattttaggtccagcagatgtaaggtgaccgacccaaggtcacacagctagagaggggtggtgtcgagaatgcaggctgggaaggaagacgagagcactttttgtggcctaataaaacacagggcagcagagcccctgactcctcatagagatgggcagctcatctgtcatgttccttgcagaagcaaatgcttccacaaacacggatctctgcccgtgagactgctaggctatgtggggttcctc

SEQ ID NO: 94957 - DNA, 461 bp, Homo sapiens
ccataggccacactttgggttgcaaggatttagctattagttttgagagcagaaatcttagcttaaatttaggtgcctgccaacagtatgtttcatggaattctcattctggtacctaattaaaaatgtcagttgtatccagcaactgttgtattattcatgtgcatggaagttcatatctgaggaaagtacagtcaagaatgatcaacaaatatgtgtgatagatttagctaaaaagtagagataaacagtttttctcttaaatgcattcctaaaaactctctttgatcttcggctatcacacatacactgccagttgtgttggcatcttatttttacaaattgtgcaatatgtttctttaaaaattttaccagttgctaattgctgtacacaaggtcattgtgtgggctctaatagctgattgcagcctttaactagaaagtctgtttaagaggaaata

SEQ ID NO: 94958 - DNA, 322 bp, Homo sapiens
attctctctatgattaaaagcttcagaaacacgacctctggctccactcagaaagctgtctgatctcatatttgcatgatctttctcctttaacagaaagggaatttctttctgtgcagagcgtaagaaatacaaggctgagggttagaagcatgagttcccaggaagactgccaggagattagatcggatgatctctgaaatcctgtgatcttttcaaaattatgtttaatgactctaaatttgagggaattagtataaatcagccatgacaataattaattaattcaacatttattacataactgtaagctaagtggtat

SEQ ID NO: 94959 - DNA, 388 bp, Homo sapiens
ctgcttctgccacagacggaccatgcatgggaagaaactatttgagaatggctctccaaggggctggtcggccttgtctgcccactccctctacctttctttgttctgtttctttctcttcagtgttggtccattttccttttttcactgttgcgtgttagcacatcattactcttatctccatatatttggatgtttcctgcattatggtgagcttcagtaggtcttggatgagttagttgttctcattccaaaatgtaaatttctggtgtttagtaggtgctcagtaaagcttgagaaagatgaaagtgagagcccagaactagtataaaaatacggataccaccatagcatggtaattaaaggggtgattgtgaagatgaggtag

SEQ ID NO: 94960 - DNA, 149 bp, Homo sapiens
attaagagggcagggagcgattcacctcagaatagagatgggtaaaatctgataaatcagagttgtgccttttccagagtcagggaagctgggttagagagggtgagattccctcagcctgttggtgatctttgaaaagccctttgtcc

SEQ ID NO: 94961 - DNA, 459 bp, Homo sapiens
ctagcctaggcgacagagtgagactctgcctcaaaaaacaaacaaacaaataaccagatttaaagatttaaagcaccctaggacttttatcacaactcaattccagtacaatctcacgttgatgtctttgaaattctgaaccatttctgcagcaaaacgcctaattctccagagccctgagggcatccgtcaatgaaatcagctgatttataaacagaattcagtgattatgaaaacaatgcagtcataaaatgcttaaaaagcatagcattgttccaaggtttccttgtggacctgcaaacaggtactgtcatctagttccgaaacaagcgcattttttcagctttaaaaacaacacgcaaaatacaatagatccagtatgtgcatggttccctgttattgcatattctttcttccctaagtcaaatcactaatacctgtacctctggaacgatgtcc

SEQ ID NO: 94962 - DNA, 610 bp, Homo sapiens
gtaaagtatccaccaagttgaagaaacacagaatttggggctcaccatgttataagccccatgtatgtctatacgcaaaaacaacttctactgcaaactaagacagtaactctgctacctaacgagccacatatcggggcctgttccttctcttttaagccataagttcttactgtttcagcactaggtcgctcagcttcacttgcactgcaagtactaggagttttacatgtgtccacttaagggctttctgtgagcaggtctggccaaggttctcagtcagtgtcttggttaagatgctttcagccacaaggaaagaaaaaaagatcaactcagcatagtaaaacaataaagaaaatattttgacccaattgacaatccaaaatgaaagcagaccaaggtgtggttacttcagagattcagggatgttatcaaggacccaggttctttctctttttgctctgcaatccttggcatgccatgattacaaataccgtaggcaaacaaaactataactagcagaagaaaagggactgtttctttcctatgtacctctttccaaaagccaggaaactttttccagaaggtcttcccaccccatcccccgcca

SEQ ID NO: 94963 - DNA, 416 bp, Homo sapiens
gcagactcagcctccttcaggagcacccagtgctggacagttcctggatgggctctgcaggtggaggacaggctgagctggttccagctgcactggccctggttactcccaccccaccctgcctttctggggttgcagagcagaggttcccccctcccatctccagccttggcctgagacactcagccccttccactcccccagtgtcataactctcacatgggccttggcccagccccctaaacctgcaggatacccccttagtgcccctcaccaactcatcccacccagctgccttctggcttttccaggacactcataccagtgcctcctgagacctctggtggcacccctaagatctgagcatccccgaactctggagactacaggtgctaataaagcttccctgggccttt

SEQ ID NO: 94964 - DNA, 477 bp, Homo sapiens
tacaggggtgcaccactatgccaagctaatttgtaggaacagagtcttgctatgttacccaggctggtcttggaactcctggcctcaagcaatcctcctgccttagcctcccaaaatacagggattataggcatgagccacatgcctagctttataacattttctttattcatttatgtgttgatggacatttacattgttttcatatcttgtctattgtgaatattgcttcaagaaacataggagtgaagatatctcttcaatatgtgattttatgttctttggatatttaaccataggtaggattcctgaatcatatgatagttttatttttaattttttgatgaataatcatgctgttttccataatggctttaccaatttacattcccagtgacagtgtacaaggttccttttctctccatcattgataacatttgttttcttttgaatttttaataaacattaccctaacat

SEQ ID NO: 94965 - DNA, 1098 bp, Homo sapiens
aaaattagctgggtatggtggcgcatgcctgtaattccagctacttgtgaggctgaggcccgagaatcatttgaacccgggaggtggaggttgcagtgagctgagatcgcacccctgcactccagcctgggcgacaggagactctgtctcaaaaaaaaaaagaagaaagattaactgaatttaaaaaataacatattcccagaggttcactgtagggtgagcactgtgtcctgccacgtttggaatcgttttgtctttgaagaagtggagcctctcccagggctggctcggtgcccttgtctttccagcaacagcgttagttatagtcatctttgagactggcttttctttcatctctggagagagcttgattcgtcatcttattgctttgtctgaactaattttgtttagtagagcttttcaataaatagtttggattttttaaatgagtttaaaatatgctcatgtttctccaaattgctgattattcctttaggccttcgttagcccatcttaattttctcagaatctactcaaaacagatctgagtatttatacagatgtgcaagaaatttcttacattctcatggattttgagatgtagtgcttattagtcaaataatatctggaagttttcttcaacaaaataactctcgcagcacgttgagaggctgaggcaggattgaggccaggcattccagatcagcctgggcagcatagcaagaccccatctctacaaaaaaaaacccaaaactagatgggtgtggtgtgcagctacttggaaggttgaagtgggaggatcctttgagcccaggagtttgaggttacagtgagctatgattgcaccactgcatttccagcctaagccacagaatgagaccctgtctctataataaaagtttttaattagccaggtgtggtggtgcgtgcctgtagtcctagctgcttgggaggctcaggcaggaggatggctggaacccaggaggtcgaggctgcagtgagccattattgttccactgcactccagcctgggtgacagagcgagaccctgtctcaacaaacaaaacaaacaaaaaaacaaaaagaaagaactgcccc

SEQ ID NO: 94966 - DNA, 153 bp, Homo sapiens
tgcacacgagggccgcatcaccacgctgcggaagaaaaagaaggggaaggatggagccggggccaaggaggctgataagggcacaagcaaagccaaagcagaggaggatgaggaggccgaacgtatccttcctgggatcctcaatgacaccct

SEQ ID NO: 94967 - DNA, 324 bp, Homo sapiens
cacacactccaggaaaggaaaagcaagcacagtagttaacccctgatagtttattagtcattcttgctttgtcgctttattaccacgaaactggtcagtcatggacataaacaaaacgtgcaaggataaggcaggctttcactcacataaaaactgccaagggccaaccccattgtgaatcactacagaaaatcattacaaaatcttaaaacaacaacaacaacaacaaaaacccagcactttgaatcatagtatctcttcaacagatacactacaaaactttatcagaaacactatgtgagagatgaacagagctaggaggta

SEQ ID NO: 94968 - DNA, 792 bp, Homo sapiens
agcggttggatgagaggaactagaagcagctattgcaagctaccattttgagaacctgcccaaagaaagaaaagactgaagggatagaagattgcagaaagcatgatcggagaagagatattttacttttagtgaagctctatacacatttgtcttcctcactagatttgtatccctagaacctagaacagagtcagccaaagagcaggcactcaatacaaattgttgacttgctgctaaaattgtaacagagtacaaagaacatcctagaaattggagacaaaggggataagaaaacagagttaacttggaaagagaagacactcatctctgacaagactgaagatgattacacaacaccatcattgccaaccaagtcctttgggaatacaaaggttaaatcctaatcatcacaacagtctctaaaggaataaacctgatttacagattttgataacaaaatacttctcctctttccattttctacaatgcaaccaacagcaacatcaaagaggtttttaactgaagactctatgctctgtagttctttccacaaagagctgactgatatttgaagaagtgttttcatctatccaagaaaaatatgatgtctccatcccaagcctcactcttattcttaaatgtatgtattttatttgtggagaagctgtacaaggtaactgtgtacatcattctacggactcttcagtagttaacattgttagaagatggatctcactgcaacaggactgcaaaagtaacacgtcactgatcacgttggtcacggaagac

SEQ ID NO: 94969 - DNA, 596 bp, Homo sapiens
tggcttcatggccttctagcttcatacagcagatacagtttgaattttggatttcgttaaaaagaaaacacaacactatggaaaaggtagaaaatataatgagctccttgtactcatcattcaaattcaacatgtgttaactcatgacctctttataaatgtctgtgtttttatctctccctcttcccttcatgacctccttataaatttctgtgtttttatctgtccctcttccctttgattttttttttttttttttttttactcttgcccaggctggagtgcagtggtcatggcatacagcagtttcgacctccctgggctcaggtgatgccacctcagcctcccaaatagctgggactatatatggcacatatacccaccttgtgccgtgactataatttttctcgtgagttatttgggtcagaacgaacagggggctcttgtgcccaagtgtgtgtgccccaaggcgtgtgggctcctcaaaaaacactctctggtgggctctctaagagcaagactcaccacaccaaacctgtgtgggagatcctactcaaaaaatgtgagtgtgaaaatattcacgagggcacattaga

SEQ ID NO: 94970 - DNA, 817 bp, Homo sapiens
gaaggatagacaatggttttagattattcctgtagggaaatcctttgttatactttacttcccctgcactccctgttatgattaaaaattgttaaaggtgttatcagtaatatgcagagggctgtgtagtaactagctaatttaaattacaataacacatggtgaaatatgagggctttctgcatgacagcattacacatctgataaaatgttctgaggactcagagaccacgatgtgtaaaaaaaaaggaaatagaattaagtgagggtatgttatgcataatccaattatacctgattatgttggcatctgagaactgctgttgaggtgcactgtggtttctcagctgatggtcttgctgctgggaccaccatccaggcaagggcactagcctgcttctcccaggatattccaggtgtgctcattagctagttggtgggccctcagctccaggcagcctgactccatagcctgtgctccttacctttatattacatgaggaccaaggtcagtggaaaaatcatgatgcagcccaagtaacctcagcataaattttcatgtaatttattgaatagacagtaattcacattgttaaaaaatatgcatacacaaaggccatgcagtgaaaagtctcactccttctgtccagcatcaactccccactccagataaccacgtttactagtttcttcacatgcttccagaggtttctgtatacaaatatgaaaatattaatttatgttattttcccctcttttttatacacacaatttctgggttatcctgttgctcttcttcattcatatatataatcca

SEQ ID NO: 94971 - DNA, 408 bp, Homo sapiens
aagtgacaaagggttaaatttcatgatattaatcagactttttacaccctgagctagaaaaaggaagcctaacagaaaataagcaaaagatatgactaagcaattcacagaacagcaaatcaaaataaacagcaagcatatgaaaagatactttaggctgggcacagtggctcacacctgtagtaccagcattttgggaagctgagttgggcaaattgcttgagcccaggagtttgggattacaggtatgagccaccacactggctggtttccttcattttctgaaaaggattgctgtcacaattaccctcactatgccccccacaagtttctgcagatgcttctaatcagcatgatggtgaagtgcaggtatgcatgtatagtttaatgatataacccatattacca

SEQ ID NO: 94972 - DNA, 903 bp, Homo sapiens
gcctgcaagaggacagaggctcagagatgaagggccaggagcaggccagatagatctcaaccctgtttaggatttaacaactgaaaataagctccaagccaactaggaaggaagtcagcctctttcatttaccagagtccaaccatgatcgactacaaacaaacttgaggcttgataaaatcagagggagacaaagatccgaatcactgcttgtccacacactgcacagaggctgtggccagcacagctaagctaggacaagtaaattaaaaggtagtataaggattagaaaggagtaaaattatctgcatagaaaaacccaagagcccagttgcagtagtcccagctactcaggaggagtccaagagatcagcctggccaacatattgagaccctgtctctaaaaaaagaaaagaaaaagaaaacccaagagaataagactttagcaacgtaagatcaacatacaaatgcaaccgtactccttgacagcagaggttggcaaacattttctgcaaagagcagatattttcagctttgtgagccatacagtttcttttgtaatttattaacactccagttcttgcaggaatacagccacagacatacataaatgaatgggtgtagctgtgttccaataagactttatttacaaaagcagccagcaggccagatttggcccacaggcagtagtttgggactctttttttttttttttctttgaaacagggtcttgctctgttaccctgactggtgggcagtggcatggtcatggctcgctacagcctcgacctcctgggcttcagtgatactcccacctcagcctcctgaatagctgggactacaagctcatgccaccatgctcagataattttttaattaatttttagtagggatggggtctca

SEQ ID NO: 94973 - DNA, 258 bp, Homo sapiens
tataaatattctacatgtcaagtgatatagatttgcaactaacattgaacgcatagggaatttgcaaacttatgttacagtagttggatctatgtaatgctttaaatatcatttacttttttacttaaaaaagtgcttaaaggccaggcatggtgactcacacctgtaatcctagcactttgggggaccaaggcaggtggatcacttgaagcctggagtttgagaccagcctggccaacatggcaaaacccagtctct

SEQ ID NO: 94974 - DNA, 825 bp, Homo sapiens
agcggaatatcgttctgtagcccaggctggagtgccatggcatgatctcggctcactgtaacctccatctcttgggttccagtaattctcgtgcctcagcctcctgagcagctgagcttacaggcacacaccaccacacttggctaatttttgtatttttagtagagatggggtttcaccatgtttaccagtctggtctcgaactcctggcctcaagtaatttgcccatctcagccttccaaagtgctgggattacaggtgcgagctactgcacctggctaccaaatgtttttaatctaatacttagaaagaaatacttaggagagctactttatgaatatatcatggatctatctactcacctggatattctgaccatattagctgtcctacttgcaaaattattttattcttagctaggataaactttgctacccatgaagaactgttccattttatattttctgagataattaacgtgttgttcttttctccttgcctataagcaagctctgaaacaaattttacactagtcacagcaactatattaactatactctccctttgttgccctgattttctgtttttatttctggtttattaactaaatagtatatatccctagtttaagttatttatgtacagatacattcaatcaaaaagcaatcaaatctaagtttcctataaaaattagtgcatatacattattggccttttggtgtgcttgactatcagagcaaaagtattagaattacttttccctcaaggggaaatcttaaagacttcttaaagaaaaatttaaggaaattcaggctatttgaatcc

SEQ ID NO: 94975 - DNA, 753 bp, Homo sapiens
aaaggaaaattataggtcaatatccttcatagatgcaaaacttctgaatgaataatagcaaatcaatcattaaaaatagggcctcttgacagagttggaaatgtctcaaaatataaaaatgtttaaatattagaacatctattaatatcaccatgttatcagattgaagaagtaaaacttctatcattattcagcaggtgcaagaaaataattttttgtaattcagtcatttatcataagctcttatcaaactaggaatagaagggaactttcttaacttcatatagtgggtctaccagaaacatctagccagcattatatttaatggtgaaatgctaagagtcatccctttaaaatcataaataagatgagaaagtctatcatcactgtttctatttatcatggtgctggaggtcccattcagttctgcaagacaggaagaagaaatcaaaggtataaggattagaaaggaaaaatacaactctcatttttcataggtgatacgattacaaatgaaccaaagggaatctatagacagctttttagaacctacaagagagctcagcaaggatgctggatacaaatgaatacccagaaatcaccaaattttaatattcaactacagatgattataaaacatacttttaaaatgtcatctattgtggtgacaaaagataaatctattaagaatgtgcaatggctgggtgtggtggctcatgcctataatcccttcactttggaaggccaaggtgg

SEQ ID NO: 94976 - DNA, 584 bp, Homo sapiens
ttagctgggtgtggcagcgggcatctgtaatcccagctactcaggaggctgaggcacaagaatcgcttgaacccaggaggcggaggttgcagtgagccgagatcgcgccattgcactccagcctgggcgacagagggagactctgtctccgaaaaacaaacacaaccatactcttaggaagttttaccaaagattttgtaaatatcctgtatttatttcccatgaagtgtattatttcttcaatattaccaatgcaagtgaacacgggctttccttatagtggtcatatctctgcttttgaactagcaaaatcagcatgagtgtgatttttgaatagatagatttctgtgaaatgcagcaaatcccatataagaaatcttagcagtagaatatgaaatcaaaattgcaaaaaagcagttatgtctaaatatgcagcccaaagtttttcttaatatctgtagatacaggccaggcacagtggctcacgcctgtagtcccagcactttgggaagctgagaagggtggatcacttgagcccaggagtttgagaccagtggggcaacatggtgaaaccccatctctac

SEQ ID NO: 94977 - DNA, 677 bp, Homo sapiens
aaagcatagtttatagtacacaaggtggctcgagtatccaccatgattgtatacaattccccttttatcctaggcatggtttatttatgtttattgaagggtattacaggaggcaatttatttcagaatcccttggagcctaatcaatgttgataagcatcatgacagctaaaaagaatctcttttgttccctctagtggtgaaacactgcagtccaaagggaggtttattggtggacaatctcatatttagtgtcttcgttgtttacagtaaaggcagaaatctcagggtaaagaatcttggttttaggacctctgattatgacttaaaataagaacaagaaggtctctttggtcccagcctctacgactattgtaattacagagacatagcttgttaaccttttgagtttttcttgctcctgagttctctcaaaatgtttagctaaggtcacaaattgagtcatatctgtaactttctgtctcaattaatacattttaatttaactgtaacatttagtttaattaaactgttaagtccatttaaaaatgctcatgtcattttaatccatacaggaaatcctctgtttcatattttgagtgcagcatgttttacaaacagtgtttctaagcaaattctgtaatctgaaactggtttattcttttttattcagaagg

SEQ ID NO: 94978 - DNA, 317 bp, Homo sapiens
tacatgcaggcagcgtggatgcactggacaaaggagtgagtcatgtccagggcagtacagagcaggacagtgtgagagtttatcatgctactcagaatggcatgcaatttaaaacttataaattatttttttaaagcctatggattatttacttctggaattttccattcagtatttttggactgtagtcccccacagataactgaaactttgaaaagtaaaaccacagataaccggggactagtatatctgttatcatttggttaggttgcatcagagaacttgatttatattcctggccctcccaccaattatat

SEQ ID NO: 94979 - DNA, 1052 bp, Homo sapiens
cagttgaagaaatgaaatttgtcttttcagttatcaatatatatgctaaatattagaaagatcacatttacctcatgggtaactaaagctgggttttgtggaagatcattgtaattatctgaaactgtgactcttacttccttttttttttggagtctcactctgtcacccaggctggagtgcagtggcgccatcttggctcagtgaaaccaccgcctcccgggttcaagcgattctcctgcctcagcctcctaagtagctgggattacaagcacccaccaccatacccagctaattttttatattttttgtagagacggggtttcaccatgttggccacgctggcttcgaactcctgacctcaagtgatctgcctgccttggcctcccaaagtgctaggattaaaggcacgagccacccagcccggctgtgactcttactttcaaaacacattttataatatctataatgacaatagcttctactgaatactacttatgtgctaagcatttaaactctacatatgttatcacattcaagcatcacaattaacctgcgatgaattattactcacagtttatggataaagaaactagggctcacagggcattcttcacttcttaaaggtatattaccagtaagtgacagacttaggatttgcaaccaggttgaactccaaagcctggctcattatgcaggtataaacactgccttgtcttatatttcatgtttttctttgtgtgaaaggctgttataaagtgtaaataaaactaatgaaacttaataggatgtgattattcaagagtttataggagtgatttcaaattcatttgtattgtatcttatttttacattagaaatgcaaaaaatcattttataagattaaatctattgagaaacacattaaagttcttattgaacagttttatcctatatagttatctcttttatctgtgtaaatcctaattatgtgaccattctttcttaacctcaggatttttttttcctaacttaccagcatactttgccctccccctcctgcgaaccagtca

SEQ ID NO: 94980 - DNA, 312 bp, Homo sapiens
cttacttttatgcaggttgaaatattttggggggaaggatactgatgtctacagttaactttgaaatgcatcaaaaacaggatgtgataaagcacatgtggtaatcatgttaatggtagaggctagtagtgggtatataggtatttaccgtaaaattctttcggctttgctgtgcattggaaagtttcataaaaaatcatgggaaatggtctaggcgccgtggctcactggtgaatattgtcaatttcatgtggttcccctcaatttatgttttatttggtcaaaaagatccttccaggttcccaatctgta

SEQ ID NO: 94981 - DNA, 428 bp, Homo sapiens
tataactgtcaacctctgagcatgagatcctaagaatttaatcactcctgataggagaagtaaacatagcaccagggtgacataacagtttccctgggctctccagaactcgagtgtgaatcattctctctgacctaattaatgctgttcacagggccatgactggctctgagtgaggactgggtttgggacagcaaccccatgtgtcctgtgcacccattgtgggctcagacactatgctagtgctttacattggggatcccatgcaattcccccagcactcctgggcagttggtgttactgcttgcattttttaaaatttccatttttattttaaatttaggggatacacgtgcgggtttgttacaattgtacattgtgtggtactgaggtttgggattgatcctgtcacccagatggtgagcata

SEQ ID NO: 94982 - DNA, 262 bp, Homo sapiens
caaacttaactctagatttatgttattttaaaatttagcttcctgatccccttttgggacaaaacaactttctcattatactagataccctataatcacccaggaagttcacattaattgatgactaaatatttggctaaaggtctatcatggccttccaaagtgctgggattacaggcatgagccatcacacccagcctatccttaaaatatttttaactaaaccagatttagggtaaaataaagcccaaattggtattca

SEQ ID NO: 94983 - DNA, 361 bp, Homo sapiens
agaactgcccgacactgcaccactgcagggcaggaactaggtcttcttctcggagggagaggcagtgtttccagaatttgcaggctcataaaaatcacctgggacacttgtgaaacatacagatctcaaggccttgccccagacctgatgagttagaatctccagggaaggagcttggggtattcatgccccagcaagcttgggaacacagctaggagggatctatctagagaaccacttccttatgatagagacaaggtcatttaaagtcacaatgagataccacctcacacctattgggatggctattattcaataaaacaaaatataacaattgtttctgagggtgcagtatgttgga

SEQ ID NO: 94984 - DNA, 1269 bp, Homo sapiens
gactcttcttgcctcagatatgaggccagcttcctaagagattttgcttgctatcctacagacagttttaggggccctagaatcttctcagaatgagagtatgtgcccataggttagtcagctatgaccatgcagtattcccagcccccccgccccacgcctccaccatctgcttcctctgaatataccagattggctgtacaccaggatgttccgggaatccccaggagagcaacagaatgtgatggacccaaatatgatgcctcagtaactcattccaggatgtacaaactgtaactgtcaggatgctccttatagctaattaaaattcttctagttacatctattttctattagctctttctattttcagtgacatctaaaaggccaaaataatccctgtggtaccactgggtttttttctatggttttcagataggaacgaaaaaaaaatgctctagcttttctgtgttgtatctgcgatgctaaaatggcaaacagcccctctagcacctcatagctctatctatggtactgaggtggcccaagtggcttctgtggtagcccactgcactctccatggtactgaagggatgaccatttgttttaacatctctctggggtccaaaagagtcctgtgacttagaatcacaaacttttttcgagcaggaagggactaacactataaattagtccaatccccttattttactgatgagtaaactgggaggttaagtgatttagtaaaggttgtagggttatcaatgttcagactaggcctacaatagccttgtacccttcagtcctattctaattcaccttttgtgacactattcagtaagcctggctaggctcttagtcccaggaaaggatccagaggatgagagtgggtgccctaatttgaagctacagaaatacacatattaagtggtagtggaggtcgtctagtgacccttggacaaggacactttgttaattaatcatctgctaataataatcctatagcccagattccacatgtaacaggtacctgccccttcatggagttttaccacatccactaaatgtcaaaaattaaagaagccttggacctccagagccttttctctctgctgacaggcaggttgactcctggcacagttcttttctattaaagatccttaggcaaagtaatgcttgcatctttttctttctcagtaacccatttcagttttgtgatgcctattgtaaggaagttctttatatctcaaatatcctttcttagacaaa

SEQ ID NO: 94985 - DNA, 454 bp, Homo sapiens
tggccggtgtccagcacgcgcactaggaccgcccccggcgcccacctctagtctcccgcatacccggcgggcttcgggacgcctacaaatcggttccaggtaatcgcgcgcgttcctccggcagcacatcgccaggccgcgggcgaagggctcccacctcctggctcggccaactctggcagcttgttctgcacacatgacgtaacccggcattagatcaaactttctggcaccttgaacccactggggtgggtggagggatggagaagatgggagaatcctctccactgccaggcgcgccgggcccagactgactcaggggccgaatgatttcctcgcagttgaagaggaaaataaaaacctaaagcttccgcttcccagcccccctcacttcccccagcccgtgcgctctctctgcgcgcaccgggaaaagagaagggaaaattaaaattaa

SEQ ID NO: 94986 - DNA, 330 bp, Homo sapiens
aaaaacaaaaccaaaacccctttcttggctctaccacttctttcatccatttcacacagtcccctatgcagaagcactttttgaaagagttgtctgtggacgctttcttaccttctcctcattccactccagtcaggcttccatcccgtcactccatggagactgctcttgtcaactttaccagaactttcatttggcagctgcagtggtcacttcagttgtcatcttatcctttcacgaccttggcacaatggcattcaccctccttcttgaaatgctctttcccatctcttgccactcctctggcttcactgcttcccagtctccccc

SEQ ID NO: 94987 - DNA, 421 bp, Homo sapiens
taaaaatgccatttacatacacatttatttgttctttacaacactgtgagacagctgataggatatctaattcacaggtgaggtaattgtaacttgctctaagtcataccaatgatttgcggtagatttggaatgtgagatcaaggctatcttcctatgctctttgcactacattaaatataaatttctgggagattctccataggaatgcaaaagcatgtgacatagaatagcctttgcctgtaaggtatagcctatggagtttgagaaacaacagttacgtaaagaaatataatgctatgtagtttacggcaagggccacagaaagcatgcagcttcctcagttctatatgatcacggtattaaggtaaaaaaaaattgggcttttaagaaaaaggttgcttacttctcaagatcattg

SEQ ID NO: 94988 - DNA, 447 bp, Homo sapiens
agcataacgtcctcaaggttcatctgtgttgtaacatatgacgggatttccttcctttttaaggctgaacataacgcaatgttttgattttaaaatactcatgctctttaagccagaagttccatgtctaggaatatgtccttaaaaaaacacacgctggctgggcgcggtggctgacacctgtaatcccagcactttgggaggctgaggcgggcagatcacctgaagtcaggagttcaagactagcctggccaacatggtgaaactccatctccactaaaaatacaaaaattagccagtcgtggtggtacatgcctgaagtcccagctacttgggaggctgaggcacaagaattgcttgaacccgggaggtagagcaagactccatctcagaaaaaaagcaacaacaaacaaacaaacaaaaacccacacatcaatgaggccaaag

SEQ ID NO: 94989 - DNA, 590 bp, Homo sapiens
  misc_feature (590)..(590): n is a, c, g, or t
ggaaccacatttaggggagtaaacagtaaaacaaaggagtatgacagaaattgtgagacaaggctggcctaattcagtttcacagcctgcttttgaaaccccactctctgcagggtatgtggagatcatcaaatggcagtccctgtcaaggaactacacaatcaagttcagtggttctcaactcatagaaggtcctaaaatcacataagcataagcccctgcaccagacctactgagtcaggacctctgggtggtcagtaccctgactctgtggggcccaggcacagctattttttaaaagccacaggaggccaggtgtgatggctcacgcctgtaatcccagcactttgggtgcctgaggcaagaggatcacttgagccctggagttcaagaccagtctgggcaacatagcaaaacctcatctctataaaaaaattttaaaaattagcacatgcctgtaatcccagctactcgagaggctgaggcactagaatcacttgaacccaggaggtggaggttgcagcgagctgagatcgcaccactgcactccagcctgggcgacagaaaaagactctgtctcaaaaaaaaan

SEQ ID NO: 94990 - DNA, 537 bp, Homo sapiens
ctgggtttacaggcatgaacgagtgtgcccagccacatttttcatattttcatattagcgtgggatcccacaatatagaaagcgttgtctcctactcttttaatttaacatgatgtggtagttttctatgtaatcaagagactgttcaagaactgcactttaatggtcacacaatattccaccacataaatataccttaatatgtttaaccaaactctattggtggatatttggactgtttacaatttttcacaatgaaaatgctgctataaacatccttgttcataaatctttgttctgatctctggttattttccgagcagagattcctagaagtgccactgcagggccactgggtagacacatttctaagcttcttgattcgtatcatgcagctgcctttctgagagagtccgctggcccccacaccaaccccatttgtgagcacacccaccagtcccacgcaggtctattttctctgaccttaacacatcatgtgtcatcctaacattgtatccttgcctcagtagctcccct

SEQ ID NO: 94991 - DNA, 496 bp, Homo sapiens
tgttggtacaccaaaatgtgggaggcatgggttgcaggtgactgctggaggaatgttgctccacacgtcactttctccaagttccagggttggcatgcttgttggcttgccaggtgtgtagcttgagtcacaggaccacccaatgcctcatgccacgtagcaagacaacagcagaagcagagctagaactcatacttgggcttcctactcccacctctctgcttctgttcttgctgcctactgaagtaccttcctcggctttccctgccctgttaaaaccccaccgtcactaatgaagttcaaacaaggcctggagtttagttattggtactgcaccatggtcagtttcctggttgagataatgggctctggttatgtaagatgttatcgttgggggaagctgggtgaagggtacacaggaactctctgtactatttttacaacttcttttgaatctaaaattatttcaaaataaaaaggtttctttaaaaaataa

SEQ ID NO: 94992 - DNA, 784 bp, Homo sapiens
aaatttataaatagctaatgttaacctagatctaaagcttcctattctgaaatccaaacatgaagactaagaaaaatatgtacattttgaaacaaagcagaaaaatgaaacttcaacaatgtaaaagagggtaaaatgccagtagacagccactttcagcagtttctgtttacagtgcttttgctggctaccattgttgctgtaaataatatatgtatactgtgatttctttaacattagacaatactgttaactccccattatgaaagatgaggaatctaagatacttttattactttctgtctcttgtttctcatcctctctccatttactaatttctgtaaattgtattatcattatttgggctcctctagtagttatctttaaagctctaaataatatgtgtctcaacctgtcaactttagctctccactgtataaaagtacaccattcacctgtcctcctgcctttactttgctggtatgtaacctcattatgtttataatatcagggtttgtgggcaggcttggtggcgtacacctataatcccaacactttgtgaggccaaggcaggagaatcgcttgagcccaggagtttgagaccagtcagggcaacgtaatgagaccccatctctacaaaatataaaattagttggactgtagtcccagctacttgggaggctgaggtgggaggatcacctgagcccaggaggtcaaggttgcagtaagccgtgatcatgccactgcactcaagcctgggtgatagagcaagaccctgactctc

SEQ ID NO: 94993 - DNA, 414 bp, Homo sapiens
aaatttataaatagctaatgttaacctagatctaaagcttcctattctgaaatccaaacatgaagactaagaaaaatatgtacattttgaaacaaagcagaaaaatgaaacttcaacaatgtaaaagagggtaaaatgccagtagacagccactttcagcagtttctgtttacagtgcttttgctggctaccattgttgctgtaaataatatatgtatactgtgatttctttaacattagacaatactgttaactccccatctctacaaaatataaaattagttggactgtagtcccagctacttgggaggctgaggtgggaggatcacctgagcccaggaggtcaaggttgcagtaagccgtgatcatgccactgcactcaagcctgggtgatagagcaagaccctgactctc

SEQ ID NO: 94994 - DNA, 422 bp, Homo sapiens
acaggtacaactaaaccaagagagggaattcagttggcctcagagacaacacaggcccctgcaccaggacagaaggaagtaatcgctcctttctcttttaaatgtccaataagttcagagcaccacacccccacacagtgcctcagtgggcacctgtacgtacactccatgaggtggctattcctttaatccctaccatctgctccaaaatgtttatccaacagtttgccatggtgcttgaacttctatcatttgggtgcctctttggaacaggaaatttaactctgtctggtgaccgtgcacaggatttatagctgttgagcctcaggagccatcaggaactgagcttgctttctttccttctctggccctgcccattcactttctgtccaagagtggccctaaaccagaagaaacctccc

SEQ ID NO: 94995 - DNA, 858 bp, Homo sapiens
ctctgagcatgtccgctgagacacagtattctcctgtgatctgggacccagaataacaggaaagagaaactgatagatgttttcatcagcccaaggatgtatgtatcttacttgagtgaattcaacagtcccaggaccactgtagtgctgtaggtctgtgtaaagaaatgtagtgacagcacattaacctgagatcattgataccatcttggttcagcctcagttccccagataagtgaacaaatgaacaaaaatgcacttcagaaatattgaaattccaaggcactatttcatggacagtgctgaacaagtatagtttggcctattggtatgtatagacttagatcatatttattgtcaatgggcttgaattctgatttccacttttgaaagtttatttcactatgtatcattacattttattgggaccttgtgaaaactacctgccatgaaatactggattttcacataatttagaaaaaatttagaatgttttatgcctcagaatggtcaggaacttcccatttcttcccacagcttctataaaaaaaatttaaaaggaaggaggagctgaaataggggctatggtcttttaaacttataaatctggaatttttaatatttcattttaaggccttaaaccgaaacacaagctactaatcagtctttctaaatctgaccttcattgaaagcaactcagaaattaataatttgtgctgtggcttcaagtttaaatagattgtttgaagagaaatcatatgtcagggtttgcaggattacaggatttctaacttaaacccccaagaacaatgaaaaagttgacgtacatgtcactatgaataggcaccttctgttgga

SEQ ID NO: 94996 - DNA, 537 bp, Homo sapiens
gaaaaagaaaaacagccatcaaaccaaggcagtaagtgccaggatataggagacagatgaagcttgagagacccttatccggtccatctgcgctgcctaaagaagaatttagcaatttagtgcaccaacttttacaagaagtgtccaaggaattacattatttgaaaccagaggcgaacataattatgatagccatttgtgcgtgtggttaaacacacaccatgttaaaaatcatgccactgatagaactcccacacacaaatagtgcttaatcctttttttcattaatgatttgtaaattgttgaaaaattgtatactcgatgaaggactctggcagtgctgtttttaaataaatgatgtggcactgaccatgatcttctgtaagatgataaaactgttggaacagcgacagcctgccacagatgatgtcttcatgtcgcacctgtgttgcgcgggttgctggtccctgagaagctttgctcttaggattttccactcaccctgtcacctgtcagcctcgccttgatccctcaccc

SEQ ID NO: 94997 - DNA, 389 bp, Homo sapiens
ttttttggagaggataacatttagaaaaaaatctattgactaaacaaaaatcatttgacacatgaggtcaaaccttaatttagctgtaggaatcattgtcgtatcaatgtggaagtagaaatagcactaaaagaatgttctttttctcctgaaagatgcaccctctgacccactttgtgacacatagtgaggagttcagtaactataaatgttaccgatgactcttatccttggtttaactctgggttcttctaaatgcttatgtagagtacaaattatctgctgaagagtagccaaggttgccaagtgaacagcactgaagacgtcagaagggagtgaagtttggaagtgaaacagcagcctttaaatagcccgacaacacacatcat

SEQ ID NO: 94998 - DNA, 408 bp, Homo sapiens
ttaactcctactcatctttaaagtttcaggagtggtggcttatcctggatctccacagacagacccagaccccaggcttcaggaacacctttacccccttcttagtatcacctatcagagttctaatttcagtttgcatgattattaaatatttgtctttcctgctagagtgtaaactccatgagggcaggaccctttcattgcttgactatggattcctaatgcccaagagcctggcaggggctagtgtcaatcaccagcactatttgtcccttgctatgcgtcggggccttttccaacaccatgtgggcctgctcgtgctgttctcacacaagcagccctatgcagtgagcagtattgttctcatttacagaggaggaagtgatactcagagaggacggtcaccca

SEQ ID NO: 94999 - DNA, 597 bp, Homo sapiens
aaattatattccaatattttatctaaacttaagtgtggccagcattattggtttcagagttgcctaaacaacacagaatatccttaattcagtttgtaaaagagttttgaccagtgtaaaaaagtgaagacacagtttcatgtttcaagtttaaaatggaaagttaatatcatttgagcacttatgtgttttcatgtcttctacttaatctgtatgtgaaagtaaaatatttttaacaccattatttatgccatgtaaagtgggttctcagaagcacaagcacagatatttaccttctgaagacatttttggctataaaagtgcattggatggcaaacactatttgagtcaggtgttagaaatttattagatgtattatattacatagtagaataaggtccctttctcattttgtttttcctaaaaataagaaaaaaaagaagtgtgatagtaaactgtctttgctaatgtcctgccagatgtttaacttcaaattaagcaaaaagtaggtacaatatgatgatgatcctgatgatgatgatgatgatgatgatgaagaataaatggaatcaaaatgctagctttatttgacattaa

SEQ ID NO: 95000 - DNA, 481 bp, Homo sapiens
ttccccgtgacctacaagcacttatttagctgtgccagctcctgcactgctgctaaggtcccaagaaacccagatctctcacagagccatagaagcagagggctggagtatctgtgaggacaacaaccttgtctaacttcgcgacctcattcttgagcatttctactgatgagaaactcactacccccaattgcagctcattcaactttaaaattgctgctttttgaatcactgattgtgaatattaatttaaaaaaataagtaagaaaatgttttaaatgtgctgcctctttaaaaggtctcctctttgtgcaaccaaaacccacctctctagaatacagtttgtataactgaagctataatttcataccatgagtgctgctgttagcaataataatcatgcccggattttattaacaacagaagctgttgctcgtatgaaaaaacaaacattagttctaataaacatctgcattgagtc

SEQ ID NO: 95001 - DNA, 270 bp, Homo sapiens
acacctgagagagaaaaaggggccaaactagcactatctttgttaacagaaggagagactcaatgttatcaacaaatatgaatactgcagggcaccagaaaaatttcattgctaaatttatttgaatgtccacccaccattccagaacagcattgtccaagggaagtataacaaaagccacatatctagttttacattttctagcagtcatattttaaaaataggaaaaaaaggacttggcacagtggctcatgcccataatcccaacac

SEQ ID NO: 95002 - DNA, 228 bp, Homo sapiens
gaaaagggagtaccaacatgctacaacacggatgacccgtgaaaacactgttaagtgtttaacatagtgtttaggttagtgttttcttaagtgaagaagccagtccaaaaggccacgtattaatatcactgtattgacatgaggtgtttggaagaggcacatctggagagacagaaagtagattagtggttgcttagggctggggggttagtaggatatgaggagtca

SEQ ID NO: 95003 - DNA, 486 bp, Homo sapiens
aaaaatctctgtgcctcagtttccttatctttacaaccctggataagtagtgtctcctgggaaggattgtgggaaatgaggttatgtgtgtaacaacttttgcacagtgactagtgcccagaaagggctccagatgtgcacaagaaatggtggcccttttattaagaagatatatttaggactttaaaagttaggttaaggctgagcgtggtggctcacacctataatcccagcactttgagaggctaaggcaagtggatcacgaggtcaggagattgagaccatcctggctaacacggtgaaaccccatctctactaaaaataccaaaaattagccgggtgtggtggcaggtgcctgtagtcccagctactcgagaggctgaggcaggagaattgcttgaacccaggaggtggaggttgcagtgagccgagatcatgcgagtgcactccagcctgggtgacagagtgaggctctgtctcaagaaa

SEQ ID NO: 95004 - DNA, 221 bp, Homo sapiens
ctccgcaccccagcgcaactagccatttagaatgtttttacattggctgggcgcatgggggctcatgcctgtaatcccagcattttgggaggccaaggctggaggatcatttgaggtcaggagttcgagaccagcctggccaatgtggtgaaaccccgtctctattaaaaatacaaaagttagccaggcgtgatggtgcaagcctgtaaccccagctactc

SEQ ID NO: 95005 - DNA, 489 bp, Homo sapiens
tcctggactcaagtgatccacctgcctcagttccccaaagtgctgggattacgggcatgagctactgcacctggccatgaatagcctttattataggattttatattgttccagtggagctccctaagttgctgcttttcccgccataaatgtacatttaatgctcttagatcatactcagcacaaaatgactgttagctggaaaaatgactcccactcacatagtctattatattttttaattgaagtcatacttgcagcccaacttttcaggttaaatggtgttatgcaaaatattactgtttcgatgtctgagagcagtgcaggctttgggaagaagtgcaaaggccctgtaagtgtgggcttggtgtatgtttgaagggcagcagagagtgctcaggtgctggctgggagacctctcgccttgctctgtgcgatgactgtggggcctggggcaggagcagcctctgattcacacttaaaaatgta

SEQ ID NO: 95006 - DNA, 501 bp, Homo sapiens
tttttttttcaaaattacactaataccactgtcaacaaatataataaagttcaaacaacaaatgtaataaagtttgggatttcttcgcagttattttaatttttaccatgtatcgcagagggttacaaggataatgtgttccacctgtggttatattaccaacatgatatatagttatttgtcttgatatttaactttagcagtttattttaactaatccttgatttaatttttaacctaatcagatatgagtgtcacaaatcctgctcttcaatctacaatatttttaaagagctgctttatttctatccagtcaacctttcctaattttgcctaataaaaatcctaccatctatttctcttcttcctgtcttcaaggcaattcaaaatgagtccaaatgttactgtgaccttcagcaagtcaattaacttctctaggcctcaattttatcatcagtacttaacattcaatgacccataattcatacagaaataataatc

SEQ ID NO: 95007 - DNA, 468 bp, Homo sapiens
cattcaataactactggatggatggaggcattatgaagtttgccaagtttgttaacactactaaaggtttcaatgaatgtaaaaacagtggcagatgggtggttttcttgactgtgggaaaggtaaaatagtataaagtactagcaagtataaacacaggcatacctcattttattgcattttgctttactgtactttgcagatactgcattttttacaaattaaaggtttatggcaaccctccaacaaacaagtctgttaatgccaccccaaagtcatgtgctcattttgtgtctctgtgtcacattttggtaattcctgcaatatttcaaactttgtattattattatttctgttacagtgatctgtggtcagtgatctttgatgttactattttgaccgtttgtgggcaccacaaactgtgcccatataacatcagcgaacttaataaatggtgtgtgtgttcgg

SEQ ID NO: 95008 - DNA, 336 bp, Homo sapiens
aatattacgtgaatgttgtatgaaagtttattgtggctttattcatgaattgtaacatttaccttctgctttgtagccacaattactattattatgcttatttttctttacaagtctaaatattaactgttagtcctttcacctcacaaattccaaatcaaaagtatttttttcttattaaataaagaagttggttgcctggatgatatcttcaggtatatttttcttacgtttatgtaaaatacatagaacaaaatttaccatcttaatcatttttttaaaatttatttatttattttttcgagacggagtcttgctctgtcgccaaggctggag

SEQ ID NO: 95009 - DNA, 466 bp, Homo sapiens
agtcatcctctactttcgtaccctggccatccagttctcctcttcacaaacaatattaatagttttctttgtctctttgcatgcatagacatgcaagcatacacacacacattcttctcttttacactaatggtgacatactatatacaatattgcatattttgctttttttttttttacctattctgctttagaaatatttccatattagtacatcaaaaacttccttgtttttatttatttcagataatattccattatatagatacaccataatgtatttaaccagtctccaggatatcgttattataataaatgctgcaatgagtaacattgggaaaatgtcatttaacataattataatcaattcctagaaatagaattgcgggcccaaagggaatagttttatttttaatagacataaagctaggatgggacccaaggtcctatcctaaaaccaaacctg

SEQ ID NO: 95010 - DNA, 871 bp, Homo sapiens
tctgcctctatattcacatggcattctccctgtgtgtcttgtgtctcttcttatatggacatcagccatattggattaagcacccactctactccagtatgatttcatcttaatttaactaattacatctgcaatggcccaatatcaaataaagtcacattctgaagttctgagaagaacatgattttggggagtacactactcaatccaatacaataagaaacaaaaattttctcccatgttttcttccaaaaattatgtagttttaggttttatatttaggtctatagttcactttgagttaattttggtatactgtatgaggtatggattgaagttcatcacttttcatatatatatatttgttccaggaacatttgctgaaaagatgaccctttctctaccaaattgcctccgcacttttgtcaaaaatcaattaactgtatataggtgccagtttctgtgctttctgtttcattgatttgtctgtctttatatcagtgtcactctgttttgattactatagctttgtaaatgttgaagtcaggtagtgtaagttctctaactttgttcttcatttaaaaagttgttttgctattcttggtgctttgtatttctatatgaattttagagtaagcctgtcaatttgtaaatttaaaaaaataagagattttttactggggttgaattgaacctgcagatcaattttggcgaaaattggcatgttaatatggagtcttctgatccatgaacatagtacagctttcttttttttaagtctttagtttctcttggcaatgcttacattgtatgaatcttacatattttttaatcaggtttgtctttatttcatattttatgatattgtaac

SEQ ID NO: 95011 - DNA, 349 bp, Homo sapiens
aagaaaaacatgttagcaaaaactcattttccattgtctattttaaaggaaattttgatggaatattacatgttagttgttaaaccacagaattttcacaactcaaataatatacgtatatatgtactcacaagtatatatttagatgttcaaacacacgtatcttttcaccattgatagagaaggaatataattagccaacctatcataatatattcctttctctttcagaaaaaatatttctcaatatagattgtcagctgcgcttggtggctcatgaatgtgatcccagcttcggcttgggaggccagcctgagcaatatagtgagacctcatctctacaaaaaat

SEQ ID NO: 95012 - DNA, 344 bp, Homo sapiens
tctggagactgacttcagcaacacctttccccttttagttaataatttttttaattgtaagtctttctaaattttaaatttttaaaattttttcacctcttaatcagttctgttcatctttatttctattacttacctcttccttctactgcctttctcttggattctcttaggtaacaaaaataaaaaactcttgtatcgtactaaagaggcctcataagtaattcccaccaccccaccattgcacgtgaatttctttgttttttattttagagaaagagtctcactccttcacaaacacaatgccactcacaggctggagtgcagtggcataattattgctc

SEQ ID NO: 95013 - DNA, 346 bp, Homo sapiens
gggaggcggaggttgcagtgagccgagatcatgccactgcactccagcctgatcaacagagcgagattgtctcaaacaaacaaacaaaaaatgttctgccttacagagttcttaggtataaaagagaaggtgcctctaaagctcttggcaccgtgcctggcttatagtaagtgcttggtaaacgtcagctgctgctgttgtggtgttagtatcagcattgttgctgtgagaccctgcacttcccacttagccttggaaaaataagtcttcacgttaatgccatgggctaccgcttctcttttcagggcttcttggaggagggtggagatggagagacaggggggga

SEQ ID NO: 95014 - DNA, 451 bp, Homo sapiens
aaaaaccaatgggagaaatgtaccaaaaaccctcctacataaaaatggtgccaagtgaatttcaaaatagttcttgtaagaaaacaaaccgtgtttaaattaaggaagttttaatgcctgtttcaagatccattaacagaggaggctgggcatggtagctcatgcctataatcccagtactttgagaggctgaggtgggaggatcgcttgaggtcaggacttcaagaccagcccaggcaacatggagaaatcttgtttttacagaaaaaaaaacaaaaaacaaaagaaaataagaaaattagtctgctatggtagtgcacacctgtagttccagctactcgtggaggctgaggagggggacatcacttgagcacaggagtttgaggttacactaagttatgactgcactactgtactctatagcctgagtgacagagcaagattgtgtgtc

SEQ ID NO: 95015 - DNA, 364 bp, Homo sapiens
agtcctcccgcaggactctcaccctctttagacccagacactcacagttttgtccttttccaaggatgcaagcatcagagacccccatcccctagtacattcctctgttgagggctcaggaatacaggcctccaaaatgtccccagtcaagaaggcagcagttgagacctagtcccttcctctttcagatccagaagtctgggcaccttctctctcaggaccagagaccaagcccccagcccattctccttcagacccaggagttcactcttcttgctctgcttcccaagggtcccaggggcctggacctttaactcctagctcaaggatccatgaaccaaagcccccaggacctttctttaag

SEQ ID NO: 95016 - DNA, 287 bp, Homo sapiens
atgcaggagtatgcacatgtacacacacaggttcacgagcgtgcacacatgcctccacacatgcaggtacatgcacacgcacacacacagatacacgagcacgcacacacacctccacgcacatgcacacaggtacacgagcacacacgcacgcctccaggcacacacacaggtacatgagcacacacacgcctccacgcacacacacaggtacatgagctcgcacacacacctccacgcacatgcacacaggtacaccagcacacacacgcctccacgcacacaga

SEQ ID NO: 95017 - DNA, 247 bp, Homo sapiens
catcctaaaattcatatggaatctcaaaggaccccataaaaaatatttaagaagaacaaagttgtaggtctcacacttcctgatttcaaaccttagtctaacaaaactacagtaatcaaaacagtatggtatggacatgaagacaaagagactagtggaatagaatagccagcctagcctagaaataaacccttacctatatggtcaagcaattttttttttttttgagactgagtctcactctgtt

SEQ ID NO: 95018 - DNA, 512 bp, Homo sapiens
atttccatttcaataggaggcagaagacagcctggttttctgaagtgacagaaccttcaggctggtgagggctgtgaagggtcctacatttggaggcacgagaaacctgaagttgaatttctacttacattctagccatgatattgttctcaagcaattgcctttgccaggcttgtactctgttagaactctatcattactacactctttcaaacaaacaaaaccttaccaacctgtgcaacttacttcctaaacctgttcaacacccttcccgtaccacatgacatataccaaaaggtagagactaaaaataatctgcattcattactacttgaatggcatgaattgtttatcaaggtgtttttgtggttgttgtttgtttttgtttttttttgagacagggtctgtttctcccaggccagagtgcagtggcacgaacatggctcactgcagccttgacctcccgcctaagcaatcctcccacctcagcctcctgagtagctgggactgca

SEQ ID NO: 95019 - DNA, 694 bp, Homo sapiens
gtggtgggcaagcaaaagaaaacacattgtaaatacatgtcctaatgggaacgatgatccctttcttcaaagataaagccaaaaaagaattaaggtatctaagagtcctctgatggaaccttagctcggcaacactcgggggaaactaaagagaaaaggagggaggcagaaagagagagaggaagaggtaaagagagacttacagattggcaaattcacatacacagacatcaaagtgaatagtatcacttctgaacctgaataatgttaatactgacaaagaaagctcctgggactacagtagctagctattcatcaattaacaaaaggtgggttagacctattcagttagcaaactttaacaacaaaacataccatgtaagggttagaatttacttggagcagagaaggaaagaactagaatgtgaagacagaccaggcagccttatctttaataatgtcagataaagtaagcaagtgaactaactcagcaattctcaacaaccagaaagaagtcatggataaggcagaaaggagataagatggtggcattccctgtataaatgaagccactgatcatccctcaggaaatgaggtagggtacacttttcctgtcagacactgacaaatccaggacctcatcctgaaattcaataaattccttagaaattcctagaaccattaacaactgaat

SEQ ID NO: 95020 - DNA, 608 bp, Homo sapiens
tggccggaaggatgtcagctccaacagaacctccccactgtccagtaggatgtcagccccaacagaacccctactctggccagaaggatgtcagccccaacagaacctcccctctggctggaaggatgtcagccccagtggaacctcccctctggctggaaggatgtcagccccaatagaacctcccctctgcccagagacattccaacactgccataaacttctcccctacacaaaaacattccaagcttgtgataagccccctcaccctaaaaccaatatgtactcttagtctgtaagacagaatgctcctgactgaaattggccagaagcccgtgatccggtagttcatctgaaaactcatttaactgaatgctccaagggatgaccaagctgctacaacgctgcttcttccccttcaagtctagggatggtaacagcttcctgctgttgctagaccctgtatgcatcactacttattggttctcttaacctccccacacctctataagttgtcccttgtagccatctccaagccctagccgagtacacccttcatttcctgccagggtgctgactgcacattctctgcaagtccacgctcaact

SEQ ID NO: 95021 - DNA, 277 bp, Homo sapiens
agagacggggtttcaccatattggccaggctggtcctgaactcctgaactcgtgatccatccgctttggtctcccaaagtgttggcattacaggcgtgagccaccacacctgaccaatggtgctgatcattgctacacctcattaataatgctacaaattggtctggttgatagttgaaattacaatgctttggttgttttatatcttaaactgaaaaagggtcatttatttcaaagatattgctaaagcctaactagctattaaactatatttaat

SEQ ID NO: 95022 - DNA, 287 bp, Homo sapiens
agtctgcatttatttgggtgttttgcaagatgaagcaggaataaggtggccctggctacgtgtttgctgcttttcattttggggactgtgggtgagcaacaatagaactgtgtatatggtgattctggttatttttgaaaaaaggtcaacactggtattttactagaatactccaaaaagttaaaatatggagcactcaagaaggacttcctataaaaattttcacttatcacaattgtgctgttagtcgttcacagtattttaatagttttttgttgttgttgttg

SEQ ID NO: 95023 - DNA, 442 bp, Homo sapiens
agggagctactgaagattgaaagtagaagagtgattcggacttggtcagatttgtgttttggagggctcactttcacagctgtgaggagtggatatgagggggaaaggactgaagacggggtggccaccaagaaaactgttattcaggtaacagaggaagcaggtctgactaggacaggagaacttgattgtacaagcatcagcctggcagatgccaccaggccaactgagcccctgacaatagcaaagaacccctttctgataaataagaaaagtggctgccctcatggaagactcttgataagtacttcattgatttattggctttatatcattttgtcccaaacaagtacttacgggcacaaaggaagaaagaagagccaagaaaaaaaaatggaagatacacacaagataaacaaatgagtgaagaaatgatattttg

SEQ ID NO: 95024 - DNA, 208 bp, Homo sapiens
aaacttgaaacccacagacattgctggtaaaaatgtaacatggtttagctgctatagaaagaagtctgatagttactcaaaatgttaaacatagattatcgtatgactcagcatttccactcctaggtgtatggagtggaaatgaaaatgtgtatgcacacaaaaacttgtacatgaatgtttatagtattgttattcataataacca

SEQ ID NO: 95025 - DNA, 808 bp, Homo sapiens
ttcgggttgtcaggcagcgcgcgaggcggcgggcagctagcagctggcggacgcgacccggaggcggtgggggtgcggctgagccatgcccggtggcgcggcctgagcccctccacctgctgcaatcatgaaggacagcggggactccaaggaccagcaactcatggtggcgcttcgggtccggcccatcagcgtggcagagctggaggaaggagctaccctcatcgcccataaagtggatgagcagatggtggttctcatggacccaatggaggatcccgacgacatcctgcgggcgcatcgctcccgggagaagtcctacctgttcgacgtggcctttgacttcaccgccacccaggagatggtgtatcaggccaccaccaagagcctcatcgagggcgtcatctcaggctacaatgccactgtctttgcctatggccccacaggctgtgggaaaacctacaccatgctgggcacagaccaggagcctggcatctatgttcagaccctcaacgacctcttccgtgccatcgaggagaccagcaatgacatggagtatgaggtctccatgtcctacctggagatcatgcagctgctgatgaaggggaaccggcagaggacccaggagcccacggcgccaaccagacgtcctcccgctcccacgcggtactgcaggtgaccgtgcgccagcgcagccgggtcaagaacatcttgcaggaggtgcggaaggccgcctgttcatgatcgacctggctggctcagagcgcgcctcgaaaacacagaatcgtgggcagcgtattgaaggagg

SEQ ID NO: 95026 - DNA, 733 bp, Homo sapiens
aaggctgtcctggtctcgggcgttatggatagcccctccacctgctgcaatcatgaaggacagcggggactccaaggaccagcaactcatggtggcgcttcgggtccggcccatcagcgtggcagagctggaggaaggagctaccctcatcgcccataaagtggatgagcagatggtggttctcatggacccaatggaggatcccgacgacatcctgcgggcgcatcgctcccgggagaagtcctacctgttcgacgtggcctttgacttcaccgccacccaggagatggtgtatcaggccaccaccaagagcctcatcgagggcgtcatctcaggctacaatgccactgtctttgcctatggccccacaggctgtgggaaaacctacaccatgctgggcacagaccaggagcctggcatctatgttcagaccctcaacgacctcttccgtgccatcgaggagaccagcaatgacatggagtatgaggtctccatgtcctacctggagatcatgcagctgctgatgaaggggaaccggcagaggacccaggagcccacggcgccaaccagacgtcctcccgctcccacgcggtactgcaggtgaccgtgcgccagcgcagccgggtcaagaacatcttgcaggaggtgcggaaggccgcctgttcatgatcgacctggctggctcagagcgcgcctcgaaaacacagaatcgtgggcagcgtattgaaggagg

SEQ ID NO: 95027 - DNA, 724 bp, Homo sapiens
ttcgggttgtcaggcagcgcgcgaggcggcgggcagctagcagctggcggacgcgacccggaggcggtgggggtgcggctgagccatgcccggtggcgcggcctgagcccctccacctgctgcaatcatgaaggacagcggggactccaaggaccagcaactcatggtggcgcttcgggtccggcccatcagcgtggcagagctggaggaaggagctaccctcatcgcccataaagtggatgagcagatggtggttctcatggacccaatggaggatcccgacgacatcctgcgggcgcatcgctcccgggagaagtcctacctgttcgacgtggcctttgacttcaccgccacccaggagatggtgtatcaggccaccaccaagagcctcatcgagggcgtcatctcaggctacaatgccactgtctttgcctatggccccacaggctgtgggaaaacctacaccatgctgggcacagaccaggagcctggcatctatgttcagaccctcaacgacctcttccgtgccatcgaggagaccagcaatgacatggagtatgaggtctccatgtcctacctggagatctacaatgagatgatccgggacctgctgaacccctccctgggctacctggagctgcgggaggactctaagggggtgatccaggtggccggcatcaccgaagtctccaccatcaatgccaaggaggcgagttttgtgtgg

SEQ ID NO: 95028 - DNA, 614 bp, Homo sapiens
agcggctgtcttacagctgatccggttcttgcggcggtgcgtgctggcgccggagagttccgcgcgtgtcctcgggctgtccgcggggaagctggtccgggagtgggcgcccgcccgcctgccttgcgccttgcgcccccggcaccgcttccagaagggaaagtcgccgccgctcgcggtagacccgggcagcgcttccattccgcggagctggaaatagggatccagccatccgtgggtcaggaggaatggagactgtaccttccacatagattcacaagctgccatgcagtggccttggcttcagcgaaaggagcattcagacgcttccgtcagcctcccaggatggcagcccctgacctggcccacggaggtcatgcttctagggactcagtctgccttcatgaagaacagacacaggcagcaggatggtggctggctggcctgataaacttgttaccaggacgcggtgacctttgacgacgtggctgtggacttcacccaggaggaatggactttactggaccccatctcagagagacctctacagagatgtgatgctggaaaactacgagaacctggcctcagctaggacatcacctgttccaacccag

SEQ ID NO: 95029 - DNA, 174 bp, Homo sapiens
atattacacacagtgagactgagctctagggagaggcagaaccagaggcagaatccaggtttccacacctctggtctctaacactatcctcaaaactagccctttccaacctgttgcactagggttcacctaaaagaaaatgccaagatatcattatcacaggctttcaagagc

SEQ ID NO: 95030 - DNA, 132 bp, Homo sapiens
ggaaaacgagaaccctagctctcctttacaggtaaccctggccactccacagttcagtcattaaaaatgaatctgggccgggcacagtggctcacacctgtaatcccagcactttgggaggctaaggcagcg

SEQ ID NO: 95031 - DNA, 229 bp, Homo sapiens
aatcaccatcccattcccaagttaactcggatgttggacagattctcaaagaagtaatatcgtaaagatacagtcagttccagggacagcatagaaggtaaggggtggtttgaagcatccttgtcagccagaacttgggtctgtcccaacttttttgtcttaatatatctggacactactccttccctcaaactcacccactgcccacccccacctctgcttcccactc

SEQ ID NO: 95032 - DNA, 272 bp, Homo sapiens
agtagccctttcccccaggaagatgcatattgtaggcagaatgatagccctccaaagatgtctataccctcatgccccaaatctgtgaatatattacattacatgacaaaggacagttcagattgcagatggaattgaggtttcttatcagctgaccttaaaacagggagatcatcttggatcatctacacagattcagtgtaatcacaagggtccttaaatgtgcaagagggaagcagaagagtcagagcgatatgaggtgaaaaagactt

SEQ ID NO: 95033 - DNA, 464 bp, Homo sapiens
gggaaggtctctatgaagcacaaggatccagccgaaacaaggagtcagcttggcgaagagcgaagggaagagtgtctcaaacagggtgcagcaacggccaaggtccatgggtgggactgatccaggcttgtttgaggactgaaaaaggcagtgaggggaccagagcaaagtgatggaagatgaggtcagagaggtgggcagggatcatataggctcatgtagagcctcgagggccatactatgcaatctggatttcattccaagtgcagtgggaggacaggaaggttttgagtgagtgagtgacatgatttatgctttaagaaattactttagctgttctgtggaaaatgaattgcagaagggtgggaacagaagcaggagagcagctggaatctactgcagttgtccatgtaatggatggccccagagcttggacggtggcagtagggacagacggaagagca

SEQ ID NO: 95034 - DNA, 415 bp, Homo sapiens
ccattccttttcagacttagctttgggaggcagtgtgtcagcctggagtgcgggcgagtacttgaaagccttaagttctgtcttatgttgggttccctagaaggagagcttgagataggaattctgtgaaagtgattgatttgagttgtgactcatgcatccccgagagagggagacaggataatagggcaggggaggggacatttggcctcagtctgatcccctggggcactctgaagccacagagtaagtcctgccttggggcaagggtaagtagcccctcgtgtcccttggaagccagtcattggctgtgggagtgagggatttaccaggaggggtggagactgtagggcagcatgttggaggacagccctcctggaaaagggtgtaactgtaaactgagcagacaactgtc

SEQ ID NO: 95035 - DNA, 417 bp, Homo sapiens
taaattcatgcttacctcactattttagaactgaaacctaaaaatctgcttgcttccatttatggaaatgtttacaaacatcaggtttcctggttctggaaacaaactctgcaaagcctacatcttcataacggttagagaagaaatgcagaatccagtgctggtgaacagctttcccccatatctacccctggttaatatccatgatgtttagacatatatttttggtctaaggacaatgagcatggatttgttgtcctataacttgatatcccaaggaaaagaggggggaaggatgacatagctccaggcacaactattggaagaaaggatttgtattaggatgcggggtctgagaacactgtgggaagcaggctggcagtgtgcatatgcatgtgcatgtgtgtgtgtgtgtgc

SEQ ID NO: 95036 - DNA, 554 bp, Homo sapiens
ctctacaggagtatgattgggagaggttgagaagctgtcatagtgtccctgatgtgggagggcacaagcaaaggcccaggggcaaggaactgtccagtagattccagaagagagctaccattgcatacagcagagtgtacaataacagggtagtcagtacactgcatcaaggggctgaaggcaactgccttttggtttgagcatagtctgaaagcagtggagccactgaatcccacaaaagctggtaacctggacagctcaaaagtcacagccatcaggactttgcctggaatattctggcattattggcaaacatctatcttcccctaacaggttggctgctgtatactgagacccagtcggagatcagaaggcaggttcagtagaaacacgtaggactctactcatgtattaggcatgcattattattccatttgtttatttatactattaattagatagtagactttattcagatttctgtgtttcctttttttaaatagtcgagtttaccgaagttcttagaaactggatgattgcctccaataatgtgg

SEQ ID NO: 95037 - DNA, 485 bp, Homo sapiens
gtcagctgcatcatgggtgactcgtataggacccgtgcataatagagactggtgaagtgcggtgctgagatctgtcccgtcgttcaatcaaagtcgtgacgtgaaaagcagtgtagcagagactactcatagccaacctgatcacgattccccctgcttcctggttttccaggagttgacaatgtgcccaggctccaccgcagccagcagcagccagaggatacagttaaggccaaggtgatgtaagcagaagccatttgaggggagtttcccgagagcctttttagcactgtctgtccttagactctgctctgggcctcctgctttagagggcctcactcgaatgtctctctctctctctctctctctctctctctctctctcacacacacacacacacacacacacacacacacacacacagacacacacagagctatggtttgaatgtgtaccccaaagttcatgtgttggaagcttaatcc

SEQ ID NO: 95038 - DNA, 470 bp, Homo sapiens
gatacagtttcagggccgggcatggtggctcacgcctgtaatcccagcactttgggaggctgaggcgggcggatcacctgaggtcgggaagctcaagcaaactgcctgcctcccaaagtgctggcattacaggtgtaaggcactgtacccggcctgtccttcccctttgataacctggttctctctgatcactcactcaaatatatacacataaatccttctgacacaaaaacattctctccattcccattcttttataaaagtatcaagtgttgagacctccagttacaactctgttttacgaagcttcccaacacctgtccagtaactctaatgcaacacctcgagggcccagcctgccaggatctggagctctggtcttcacccccaagactctggaatccgggaatatgtccttccctagaacatgtgtctcactgactttagggaaataagaaccgcctggtact

SEQ ID NO: 95039 - DNA, 344 bp, Homo sapiens
ctacttgactgggtgcccagatatttggtcaaacattattacagatttgtctgtgaagtgttttggggtaagattaatatttgaattggtagatggaataacacagattgtcctccataatatgaatggccctcatccaatcagttgaaggcctgaatagaacaaaaaatctgagtaagctggaactgcccctgcctgactgctttgagctgggactttgatcttttcctgctttgggacatgaactaaaacatcggctcttgggtttttaccctgccagctttcggactcgaatgttcaccattgacttccctggttctcaggactttggacttaggctggaa

SEQ ID NO: 95040 - DNA, 179 bp, Homo sapiens
accttttccccctggctacagttttggtgggatgggcagttcaggtgtcctgccaacgagatactcttctcctggaatttgaattttgagtcatgggatacaaggactgacagtgattggcactgattcagcctggccgaggtgctctgaagaagccactcattagttcctgcctccca

SEQ ID NO: 95041 - DNA, 516 bp, Homo sapiens
agaggaaatataaaacagttgcttttagaaaacagtctgtccgtttctcaaaatgtcacacataccattaccatagaatccagaaattctactcctaggtgtatacccaggagaaatgaaaacagacctccatgtaaaaaaaatgaatgcaaatgtttatagcagcatggcagaattattcatggtaggcagaatgtggatgcaacccaacatctatcaactggtgaatgaagaaagaaaatgtggtatagtcatacttggaatattaatctgcaataaaaagaaaggaagtactgatgcatgctgttccatggataaaccttgaaaacgtcctataatatggatgaaccttgaaaacattatgctaaaagaagccagtccaaaaggccacatattatatgattccatttatatgaaatgttccagatcaatggagctagaaggtctattagtgtttgcctgaagctgctgaggggaaggtggagaatggagaatgacagctaatgggtaatcgaa

SEQ ID NO: 95042 - DNA, 709 bp, Homo sapiens
aggctggagtgcagtggtaccatcacagctcactgcagcctcaacctcctgggctctagtgatcctctcactttagcctcctgagtagttgggactagaggtgtgcaccccatgcctgaaaaacattttaattttgtgtagagacagagtattactatattgcccaggctggtcttgaactcctggactcaagcaatcctctcacctcagcctccccaagtgctgagattacagatatgagccaccatgcccagcatttttggaaggataaaatgagattggacaggtattatgaagcctattttacagatggaaaagctactactcataaatcttcctgaaatttgttcaagttagtcttttccaaacctcacatttctgactaaatgctagatattccgattcctcattaactgctcaatagttgatatttaagggccgggcttggtggctcaggcctataatcccagcactttgggaggctgaggcgggcggatcatgagctcagcagatcgagaccatcctggctaacatggtgaaaccccgtctctactaaaactacaaaaaattagctgggtgtggtggtgggcgcctgtagtcccagctactcaggaggctgaggcaggagattggcgtgaacctgggaggcagagcttgcagtgagcggagatcgtgccacagcctgggcgacagagcaagactccatctc

SEQ ID NO: 95043 - DNA, 586 bp, Homo sapiens
tccacccacccagacagacaccgaactggaaatacacccctaacctctaccccagataacctgacaagctgatcccctgcccacacacccagcaggtggctccaaggtcagagcctgcagaacacagatgcaatagagaaagactcagcgctgtggaaagacacccccacctccccacgacagtggccacagggccacccccaaccgcatgaacgggtgatgcggttgcatgctttttgttcactactcttgtacctgtgttgttacagaggcagataagcgactgaggactggcatgaggttctcagtagtgagatttctgtaggagtccatattgagtgtgttgttcccttcacttcccaagagaagtgaagatcagggactctagtaccattgtgtattttgcagtttcattgagactataattcgcataccataaaagtcatccagccgaagtgtacatttcagtggattttagtacatcacaaggtgtgggaccatcaccactcattgacatgaaaaggaaaccggtgcccaccagcagtgacgtccacatgtccccttcccctcggccccaaccgcatca

SEQ ID NO: 95044 - DNA, 390 bp, Homo sapiens
ctaacttgaacagtcaaggaatttattggaaggatattgggtagtttgagaattgaaatgaggctggtgaactatgctcagaaaataaccacaacaagaggtcagggagcggctgccaaagccaaggtcacccctcagaattggtctggtaacgatgctgccaggcacagctgcccctgaacatgcaatgccaaagccccagatcttgcacaacacagcagccagtggactctcatccttggtggcgcagctgttctgtgtactctcacctgctctcatctgtgtctttgcatcactcgtcatgattccaagtcccagaaggaatatctcgttagctgggctgggttagatgtctgagaccaagtgtggttggcaggtgggggtgtggga

SEQ ID NO: 95045 - DNA, 1506 bp, Homo sapiens
gtgtgatccttttgcgctcgttgccctgccggggccgtccgcatcgggcccccgctgttccgcttggccacagtggaccttcacttgtgctcgtgatgtgccacatctgctcccaccgggcatctgggtgtctcagctttattcgcgggtccgtggttcatgtgctcgggctccggcgccttgccgtcagaggctgccagcgcttccctccgcttcggtctgctgcgactctgctgccccccgcccggcaccagcggggccccgcgtgccccgtcagcctcagccgcctctcgctgggccctggcggctctggccacgtccaggggtcttccgcagcctgagcggcggggccgcctggggcgccgtggagtgcgactctggtacccctggagagcccgccctgctatgaggactgccctctagcttcccggtgctcattgtccacggatgacagcgcgctgccaggggtgatcgggcacggttgctctctgagacctccctcactggcccccagtagtggccccctccccaccattccaccatgggcttagatgcccgagtgattgttgtccaaaacaggcgggaaaacagaccagccacacacaaggggcaggggtgagggtgggggtgggggtccttaaacagactaaaatgcagttacctgtggtcattttggaggaagtggaagcctaagaatcgcccccagcatggcttcatcccccaagatggccgatgatctggcctgaaggcctctcacaaagggcaggagaagaagcttccagaaaggctgggatggaggaggagtcctgcggccagctgttgcctgcagcagaggctgcctgtggacacttccctaccggggctgaggccatgctgggagccccccccagtgacgcagaagcacaaattggaggcttggggccatgcccagccaggttggcttccctggggctgaagagctggctgtggtggcaccatggccttggccctgctactcacccaacattcccatcctcccctgataggcccctcctccttgcctgccctctctcccgctgctcagggccagtcactccccccacatgcagctacccctacaacctggggttccttctcagggcctcacctggtccccacatcccctggcctctgctcctgcctcccaaagtccatgtctgcctccatcagccacacacacgcagggacgcccgttccttgccctcccggacttatctactcttcactttcctgatgatccatggggcccaggcctagagggcatccgaggggctgggccttggccacagcctcttggatgatgtccttgctccaccacgcaggcccttgcttctcccatcaacgagtcttggcccaggggacactgaccctcccccagggaggagagaggagttccttccctttcaacgagggcttccacgccctctaaggggtggcggggaagggaggaggctgagaagatgcagattaaataaaggtatggaatgg

SEQ ID NO: 95046 - DNA, 1794 bp, Homo sapiens
gtgtgatccttttgcgctcgttgccctgccggggccgtccgcatcgggcccccgctgttccgcttggccacagtggaccttcacttgtgctcgtgatgtgccacatctgctcccaccgggcatctgggtgtctcagctttattcgcgggtccgtggttcatgtgctcgggctccggcgccttgccgtcagaggctgccagcgcttccctccgcttcggtctgctgcgactctgctgccccccgcccggcaccagcggggccccgcgtgccccgtcagcctcagccgcctctcgctgggccctggcggctctggccacgtccaggggtcttccgcagcctgagcggcggggccgcctggggcgccgtggagtgcgactctggtacccctggagagcccgccctgctatgaggactgccctctagcttcccggtgctcattgtccacggatgacagcgcgctgccaggggtgatcgggcacggttgctctctgagacctccctcactggcccccagtagtggccccctccccaccattccaccatgggcttagatgcccgagtgattgttgtccaaaacaggcgggaaaacagaccagccacacacaaggggcaggggtgagggtgggggtgggggtccttaaacagactaaaatgcagttacctgtggtcattttggaggaagtggaagcctaagaatcgcccccagcatggcttcatcccccaagatggccgatgatctggcctgaaggcctctcacaaagggcaggagaagaagcttccagaaaggctgggatggaggaggagtcctgcggccagctgttgcctgcagcagaggctgcctgtggacacttccctaccggggctgaggccatgctgggagccccccccagtgacgcagaagcacaaattggaggcttggggccatgcccagccaggttggcttccctggggctgaagagctggctgtggtggcaccatggccttggccctgctactcacccaacattcccatcctcccctgataggcccctcctccttgcctgccctctctcccgctgctcagggccagtcactccccccacatgcagctacccctacaacctggggttccttctcagggcctcacctggtccccacatcccctggcctctgctcctgcctcccaaagtccatgtctgcctccatcagccacacacacgcagggacgcccgttccttgccctcccggacttatctactcttcactttcctgatgatccatggggcccaggcctagagggcatccgaggggctgggccttggccacagcctcttggatgatgtccttgctccaccacgcaggcccttgcttctcccatcaacgagtcttggcccaggggacactgaccctcccccagggaggagagaggagttccttccctttcaacgagggcttccacgccctctaaggggtggcggggaagggaggaggctgagaagatgcagattaaataaaggtatggaatggaaggcctgtgcattcctggggcatgggtctaaggcctccactgcaagcattatgggcccccatggttcagggcacgatgaggggttctgggaagggactcagaattgggctccagtgttcccaggaaccaagtaagcagaggagaggaaacctcccctgcctagcctggggcctctgagactcaagtgtgaggcgctctgagcacctggctcccctgactccggtatctgggcctgggtcactgctaaggcattgtcaaggtggcccttgttccagctcagtgggaca

SEQ ID NO: 95047 - DNA, 1052 bp, Homo sapiens
attatcacggtgaactgcagctcggagggaggggtcaatataaaccacggacttgcaggtgtagaagtcacatgggactcatagagggtgcaaagtagaagattggagtcagagagggattcagatgatcaaagagaagttggggtgctccacccgacggggtgagggtgggggtgggggtccttaaacagactaaaatgcagttacctgtggtcattttggaggaagtggaagcctaagaatcgcccccagcatggcttcatcccccaagatggccgatgatctggcctgaaggcctctcacaaagggcaggagaagaagcttccagaaaggctgggatggaggaggagtcctgcggccagctgttgcctgcagcagaggctgcctgtggacacttccctaccggggctgaggccatgctgggagccccccccagtgacgcagaagcacaaattggaggcttggggccatgcccagccaggttggcttccctggggctgaagagctggctgtggtggcaccatggccttggccctgctactcacccaacattcccatcctcccctgataggcccctcctccttgcctgccctctctcccgctgctcagggccagtcactccccccacatgcagctacccctacaacctggggttccttctcagggcctcacctggtccccacatcccctggcctctgctcctgcctcccaaagtccatgtctgcctccatcagccacacacacgcagggacgcccgttccttgccctcccggacttatctactcttcactttcctgatgatccatggggcccaggcctagagggcatccgaggggctgggccttggccacagcctcttggatgatgtccttgctccaccacgcaggcccttgcttctcccatcaacgagtcttggcccaggggacactgaccctcccccagggaggagagaggagttccttccctttcaacgagggcttccacgccctctaaggggtggcggggaagggaggaggctgagaagatgcagattaaataaaggtatggaatgg

SEQ ID NO: 95048 - DNA, 722 bp, Homo sapiens
gggggagggatagcattaggagaaatacctaatgtagatgatgggttgatgggtgcagcaaaccaccatggcatgtgtatacctatgtaacaaacctgcacattctgcacatgtatcccagaacgtaaagtatagtaaaaacaaacaaacaaaataacaaaacataaatatctacaacattgtattttgactggcagaatggattagaaaatatgaactgcgtatatgctttctacaagaaactcacttcaagtataataataggcaagttgaaaataaaagaatgaaaaaagatatatgatgtaataattaaccaaaagaaagtaggagtggctatattgatatcacataaagcatacttcagagcaaagaaaagtaccagagtcaaggagagatattatgtaataatatagggtcagtccaccaaaaagacacagcaattgtaaatgtgtctgcaccaaataacagctgcaaactagtgaaacaggaaaagttccgttgtccccctctcaggtcatgcaatgtgggtgtggcttgcttcttcattccctgctgatcaaacctctagaggagcatacaaatgggcaagctgtgggcctccgaccccatggcagtgtctaggggtgaatgtttatagctgaacccccagtgggcatgtgttacagggtgcttttttagtttagccatccataggtggcttgtattagctcaattaggctcct

SEQ ID NO: 95049 - DNA, 489 bp, Homo sapiens
taacatcctttctggtatccccacccctccacattgtagcatggatcagtacttcattccttttatgtcctagtaatctgccacagtacaggcagaccacatttcgttgatccctaagaggctcctgtgagactggcctgcctcaggcactgcagtgcatgtgggaacctccctagggtgccaacccagtcgcctctttcgtaatcctgagaaggagaacgagaacgctgcgtctcttttcttttcctcgtctctttaaatgtgtgtgctttaacccaatgtctcagacacttcatgagctcctggtttctcctgtaaagtgggaacggtcaaatgtgaatccttaaaaaaaacccaaaaacccaaaactaaaaatctaaacccaaaactaaaaaactaaaaatatacttgattcctagtgatgacataagccagtcttcccagaacttgtaatacgggtgtctgggtggagactgaactgggtggggt

SEQ ID NO: 95050 - DNA, 326 bp, Homo sapiens
gcgaagtgccttgcctgggtcacccgccgtcatcctccggaagaccattccctcctgtatgttggtccagggcatccccagcccatcacacctctgggctcagggcttggcccccagggacatgctggaaacagccccagcctagaagcccatccggccgtaactgtgtttatttgcccaagcacagaaggacccactatttattgctttcttttgaaaactagctgagcctttgtgcaaaaaccaggcaggcacatcatcagtggcttaagcttgcaaaaagcacagacaagaaatttaaaaagaaaaatctttaaagctttgcc

SEQ ID NO: 95051 - DNA, 776 bp, Homo sapiens
cttattctgaatacaagaagaagcaatttacttattcatgaagggaattctcttttatactaattcttgtcataaaaaaacaaacttattattacagataattggtcaggtgcaaaacatttaaaactttgtatttaggtatataaatgtggctttttaagtctaaatttgactgtggagtgacccagaaattggcaaatcttattacagactcctgatgggaaaagaagccaattctgaagtaacaagttagttgtaagtttaacactgagagtcatctggcccatgctgtttaaagctttcttaattttgtgcctttcttagccttgatcttctacaagtcgttcatatttactcttgtacttgtaaatatcttgacatttttattgaggcacaatgttttgttttaagtttattaagagttgtgtataggccggtaaaattatgaactgctaagaaaaatatttctaatgaaattgtacatgtgagcagtaagtgaggttgatttatgggtacttgacaatggtatagtgaagtttgttattgcatagaatgcctttcatcagtatccagcccttgctcatattttacagcatttcccagattcagtcgaacattgacattcctgggtctcagcaggcccaagttaattcagtagtcatgggtggggctggcgtctgtgctgttcattacccaccttccctgtgactctgacgcagctgccccagctgccagggccaacagctgttgcgccattcctctctgctggggcttgg

SEQ ID NO: 95052 - DNA, 355 bp, Homo sapiens
atgaaaagctaaaaagctacatggatttgaaaacatgtaaattaacttgattagactttatccaaaaaggtaacattataatgcagttatattaaaattcttttaactgtaatcaaaatctatggcattataaaaattttcttaaaataacaagttagaatttaaatttttaaaatgctacttaaaatgccataattaaattacaaaactaaaaatgagtgctaaatgtgaagagattgataatgtagatttttttttctctctctgtttctctctgaggatattaatatttctaaaaaacaaaataaaagaaaattccttttctttttatctgtagtctttccctcagggccgt

SEQ ID NO: 95053 - DNA, 391 bp, Homo sapiens
gtgaaagcccctgtcacattcctctgactgcagcacatggggcctggtgcgggtgagtgtctgagtaggaatttgatgtcagatctacccctgccctttcctctcaggcaggagatctgcagagaatcactaagcaaactctacagcttgggcaaggtgcttttcacccccatctttcacccacttcacacccggatttttgttttgttttgagactccatttgaaaaaaaaaaaaaaaaccctgcataagatctgtagagataatagactccaacaggcgtgatttccaggcctggttagcccacatggcattttcctgcaagttagaaacacatgtcccttccaggggacctaacctcttgattgcacagtgtggcaggccaagcacca

SEQ ID NO: 95054 - DNA, 313 bp, Homo sapiens
cttcaatgctcccgggcctctgcctgcctccccaggctggcatgcctggtgtgtagagccagaaactgaataggctgctctctgttgaagagacactcaactgtggtcgcaacaagccaaacagaatgaaggtgctaagggaggcagcatgtctgcacagggacagttcaggctgacaacaggctccagctccggctctcctccaacttccccgagtgaccctggacaaatgcccccactccaccccagatcctatttcctcaacagagaacttctggactcagtcccctgtaaggaccctaccagctcagcc

SEQ ID NO: 95055 - DNA, 236 bp, Homo sapiens
ggaatgcaaagctgcagtgagctgattgtctcactgcattccattctgggcaacagagtgagatcctgcctataaaaaataaaagacttccacaagataggacatagacaaggtaggcaggaacaatccaagtagtaatggtggcttgtttcaaatagcagaagatggtaataactgattagactccagatatatatagtttgaatcaactgtgaatggtcaaggatgaccacaga

SEQ ID NO: 95056 - DNA, 435 bp, Homo sapiens
ctggtgacacagatgagattggctccaggcatatacacattggttagctggttctgcccaatccctgtctggagttgaatgttccatttagtcaagactgccaagcagcaacataactggattcattagcttgagttctgaaagctcctcttaaaagttgtttttgtattcatactactttaatatttagggacaggctgcaccattttctaggttgcaaaagtgatcactcagttttttttttattaggtgctattttagattcaaaaatattttattttttatgaactgttttgtgcctttgacctagttctcttttcactgggatatgtatcctaagaggatgaggtttatgatattaataatacctgcattattaattcctttcaaatgaaaccagctgtctctgttcccctccaacgtgtgtgtgcacac

SEQ ID NO: 95057 - DNA, 777 bp, Homo sapiens
gccaatttctcaagcaaatttgtcttgcccactgccccccgcaaccaatgtaatttttatcagagtttctttgccactttccttactcattgtgccttcctctcccctttctttcaaacccagctcgcttgcctcactcaaaacttgctaaaatccactgaccaccatatctcatgtatccaggaagctccttagagctgaaccagttttttactcaccctcttttcagaacccctgtactaagatttcagcatgtttgttgattcaaagttttcacattgtaccatacagtgggccttcccaacctgaaattgtaaactagtactcagggaaggaacatgccttccatccttatcattcctcagagcaagaactattgcaatttggatatggtagacgttgaataaatattattacttctattatattactttttttctttctttcagtcttaccatggttgggatgaaggagagtaatattcatatgcgttataacatctcccactttattgtaaatagtgccctgcctgaatacctgatggttttggaaaaggatgtactatagttctttctaaaaccctactttctcacaaaagagataaaattaaatactcatggcatgttgttacccaacagagtggtagcttctttttaggttttttggaatatccagctcgaaagacattgtagatgaatgaaagatgaatgactgaatataagctgagaaggcccatctccctctagctctcacctagatgcagttgcagctcaagat

SEQ ID NO: 95058 - DNA, 178 bp, Homo sapiens
ggagggagggcgtgagggattacccaagggaggggcgagtatcgcaaaataggccaagtcgctgccctctactcaactcgcagggcgggaggatggagacagagggatgcggcgggagggcgggacagcccagtcgccgccaaggaggcgaagcggggtcggggtagctcacccgccc

SEQ ID NO: 95059 - DNA, 584 bp, Homo sapiens
tcatcagggaaatgcaaatcgaaaccacaaggagataccacttcatacccactagggtatgaacaagtgttagcaaggatgtggaaaaaactgtatacattgctggtgaaaaataaaatggtgcagccaccagtgggcagttcttcaaaaggttacagagttaccatgtgacccagaagttctattcctaggtttatgcccaatagaaatgataacatatctacaaagaatttgtagataaatgttcataatatcaccactcataatagccaaaatgtcaaaacaacctaactgtccatcaactgatgaatggacaaacaaaatgtgatctatccacacaatggaagcctgttcagcaataaaaaggaatgaagtactgattcatgctacaacacggaggaatcctgagaatattatgctaagtgaaagcaaccaggcacaaaacaccatatattatatgattccatgtatacaaaatgtctagaataggcaagctgtaggcagagtaggtcagtggttgcccagggctgggagaagaaggggttagggtgtattgctgaagggtacggagtttccttttaggg

SEQ ID NO: 95060 - DNA, 758 bp, Homo sapiens
acattttacattgagtcagtgatccatttgagttagtttttttcctcatagacagtcgattattccagtcttgtttgttgaaaagactgtcctttctctacaaaattgccttggcaccttggttgaaaattaactgttctctcttcctgtttactagaagaatttttaaaagaccagtgttatttttttccttaagggattggtagaattcacatatgaactatttctaggctttgacttttctttttggggttttagtagtgaattcatttgctttagtagaaataggtacttcagattttcttttttgtcttgtgtcagttttttcaaagttgtgttttttcaaagaatttgtttacttctaaattgtcaaatttgtttgcatgaattcttattacccacttaatgtctatagggtgtgtagtgtgtacttcctaatattggtgatttgctttctctctttcacttggttcacatagctatagatttatcaatttgatcttttcaagaaacagcttttggttttaatttgtattgtttgttttcaattttattagtttcttttctgttatttattattccctttctattttgggtttactttacctttttctagctttttagggtggagtttatgccattcatattagaccttttctaataaaaatatcttaagactataaattttctttcaaaatcacctttagctgcatactacaaattttgacttttaaaatttttcatttagttaagaatgt

SEQ ID NO: 95061 - DNA, 194 bp, Homo sapiens
gagtactgtgcactttcatccagtaagtgccctaccacctgttggagagttgagcatgttttggaacatgtattgtttctctcctggaactgtcttttcttgccatttatttagggaggaacaaagggatgcaagtaaagactatcatgctgtttattaacatgcaagctttacagaggccactggcctgagat

SEQ ID NO: 95062 - DNA, 620 bp, Homo sapiens
  misc_feature (17)..(17): n is a, c, g, or t
  misc_feature (398)..(398): n is a, c, g, or t
cctagctgcaccctcantctcctcttctggaaagtgggattggaaaccacatctgcttctctcccaggactgctaggaagacaagattagatggcaggtctgttcttcccctggattgtaaactccctgatgtctgggtcatcccagctcatgagctgagctttcagtgggtgctcagtggaacaggtgctgaatggagtcaggctttagggaggccagcgtgtgttggaaggaaaatacctgtacagccaacttccttgagggttcgttcttttgcatcagggtgtctcaaactcctgcccttaaaacacctgcaagagaatcatctaggcggcttgctcgctctgcatgcaggccctttagaatcagagtcagaatacctggggctggagccacanaatgaaatgacatttcaacaagtttgtcatcacgtaagagagaatagataacttcactcttctctgcaacgaatcccaaaagtatataattgagctgactgcaaggtacttgacacgcaagagactccacaaatgggattcagcctctggaaagtggtggtagttccagatttatgtggatgttactttgtttttccctataaaatatattatttaaactat

SEQ ID NO: 95063 - DNA, 706 bp, Homo sapiens
agcctctgcagaggcgctggagctgggtcagtccgccgctcaccccgcggccgcaccttcccgccttctcaggtaactaagtgcgggtctcgggcctggcagaagcttcttcggccccgtgccctcgcctggccccgccccgtcggttgtgtgcttgtctcgtcctgcccccaggccctgccggtccccaccgttaggccggcgtccctgcccggccccgctgcgggctggcgccagctcaggaggacgccccgaagccgaggcctcggaagcaggtttttcccagaccttctcctgtcccgcgttccccctaggccggccgtagggaccagaccccaccctaagcccatagccggccttcgcgctccgggtgaccctggctggccctgtttgtctgtgggtcctgggatgcgccactcccggcaggaaggggcgccgccgaggcccggtctcagcctggaaccccgctcctgccgtcggggcgctttctgcggctgcccacacacgaccccaggcaaggggtgggggcgcgggaccctccatgacatggcggcggggcgctctcacttctttgaaaccagcgtaaactggacccgccccacctcccataccttgggggagccccgggaaaggctgtggcctgggggtctgcagggcgttggcagtggaggtggggagagaccccagccctttcctgtccccccca

SEQ ID NO: 95064 - DNA, 259 bp, Homo sapiens
caccaccacgcccagctaatttttgtatttttagtagagacggagtttcaccacgttggctaggatggtctccatctcttgacctcgtgatccgcccgcctcggcctcccaaagtgctgggattacaggcgtgagccacggcgcctggccccctaagtgattcttctgcactttaaagcttgagacatcctgccttaagacaccatcaatccatgaatagattgtgatatgtctttttgttttccctctcatgggttcc

SEQ ID NO: 95065 - DNA, 407 bp, Homo sapiens
atcaactgacagctcaagggaatgggggtttgtgccaagggaatgttgttttatgctttaagcttagatgaacctgtttattgcttgaggggagaagtcaggatttcagaaagaaaatgtgatattgtggtgttaggccaatgacatagatgttgagatagcccagggcgtggttgaggtaggcagccctgtggtagtgtgaactgcctgccttgatgatccatacttcttagctattaagtgctgatttgaccagctttgtctaggtttctttcaaaatggaggaacacagtggtagaagtcagcatgagggaattttattttatcattatttttttaaactgatagaattgcaaggagagtgatggaattttaaagcacatatatgtaaagcccttgtgaagtat

SEQ ID NO: 95066 - DNA, 338 bp, Homo sapiens
attctagaggaaccccttttgcggtgccctttccaagatgaatatagcttcactcaacaatatggaaggaggagaaagtagggtggggtgggaggatcttccatttctctatgtcttcattttatatggcttgtacctgtaacatacagggttcaaaagatgaattagaactgtctctgtgctagtgtttatgcagttcagtggaatagaatgggaggggaatcatccatgttcacaacactgggtggggcatgctctcttctgttgtttgttgttctgtgacttaaaccatatactgcaaaaggctaaaaaaaaaggacaaaactcatctaagcata

SEQ ID NO: 95067 - DNA, 469 bp, Homo sapiens
aaagaatataagaatagcagatctaaggagcagccactacttctgtcggggggaattgagcacccaaggaaaagctcatacccgaggctgagatccagagctctctggagacgctatggccttgactcactagacctcacggtggtgctgtgcccatagaattttctgccaagtcctccttcatttcatgcttgaaattagccctccagagtgccagaaaaattcatgtggaggtatctcactagaggactctgctacgaaactgctttgtgaggagggactgcagaagctgggcactgaggaaggtgtgtacactggaggggctgggtgctggagaagctgcctgtgctgcaggagcctgcggagccagcatacaggctctaggaagcaaaatcccattttcttctgcagtgtctctctatcgccctctactgatgatagagtttagcatggtagcagctgggaaagg

SEQ ID NO: 95068 - DNA, 392 bp, Homo sapiens
gtttgtgatgggaatatccaaggctgctagtcttcaggcagtgcttctagagtgacctttcattgccatttatttttattactttctaatagtgcctatttaaggccgtaaagagggaaactgtaatagtgaatggcttatctagtctttaatctctttgcatattttacaaactaaaaaataagttatatttgcaccttgattactgttcctcatgcttcttcacttgagtctcttgtctagaatattgcattggacttttaagtatgaaccactcccttttgataatcacactactttgtaataatgaagtataaaatctttccaacattataagttcttcacaatttgactttaagcagtctttcagatgttaccaatatcaaaaaagt

SEQ ID NO: 95069 - DNA, 269 bp, Homo sapiens
ggggaaaagaaaagttgtgcctagctgtctcctaggtgtccagcttgtgggatgggcagataatggagcagtcactgaaataaagaacatcaggggaaagcgtgggcttagttttggacatgtggacagggtttggctttggacaggcctctgagcacctagcgtcacacaggcaggtggactctcaggtcaggaagcagaggtttggggtcatctttcctccctatgcaggaaccctctatataagactttgtgagtcttgtctaagt

SEQ ID NO: 95070 - DNA, 245 bp, Homo sapiens
gaaaaaatactgtattgatggttaggtggcttgcaagctttgatggaggaatttgacttgcttaaaatcgggtacctgtgggtgtcttgaaagcaagccaggaagtttttctgcctcacttttgttttgaaagtgtcaaacttacagaaagattgaaagggtatgcatccttatactttttccctggattcacccctgttgttaacttttgctacattcatgttttctctatttacacttttttt

SEQ ID NO: 95071 - DNA, 691 bp, Homo sapiens
agcactatacgttccacctgtatgtttggaagagaaagaactatgctcactccttctgagctgtccctatttatttatttatttttggtctgatggctaaataaagattttttgtattcaagagaaataatttaatgagataaaatattatttcctaagaaaaatatatcagctgaaacctgggaaacatctagataatttaattgaaaatgattgacattctcaaacaaaaaagaaaagaaaatcagatacaccgctttcttctctccctatctgcggagcctgcctcctccaacctgcatagctgcatcccagtgcatgtgcacctgcctgcttggacacttcaatgactaacttctctgcaaatacatcaatagtttcattgccttcaggcttcttctatgtcttttaactcttgaaccttctggtgcattttagcttaccaaacagcacatgctgctttgtacttgtgttgttttatgtattcatttattgcacaaattttccttgagtgccttgttcatggaaggcgctattccaggaattttatgtgtagtttaagttacctccatctaaactataagattttcatataattcatctttgtagttctaccacaagcatattagtagattctaaataaacgttaactccatatttgtgtgcatgtagaaatatgtcatgtttatgt

SEQ ID NO: 95072 - DNA, 522 bp, Homo sapiens
agggggtcaaagtggtcgagtgtcgggaggaaggactgcttgtgtgcggggtgggggggggtggtggagagcgggggcggggattcagcgcgtgtatgtaaaggtgcagcccgtgtgctaggcgctgggtgcgcgcgcggtgtctgctcgggtgcgcgcgcgcgccgctgcccgcctgcccgccggcccgcctgctcgcctgctggggctgctccgtgggtttgacgggcgagcgggcgcggaggagctctgtccggaatcacatagataccatcgtggaaacagcagcgcaggtcacggcgccgcgggccctgcaccagacgctgggctctagagattatttctctttattcagaagcatacagttgtttgctgattgcaagaagatgtttctgtggctgtttctgattttgtcagccctgatttcttcgacaaatgcagattctgacatatcggtggaaatttgcaatgtgtgttcctgcgtgtcagttgagaatgtgctctatgtcaactgtgagaagg

SEQ ID NO: 95073 - DNA, 1042 bp, Homo sapiens
gtcaatttaattttcacatgccttctcatttcaggaaaggttgaatccaggtgctcaattgattttaggagataaaatttaatttataaattaggcacagtaagatattaacaacaataactaataacaaaatagaacaattatagaactatagtgtaataaaagttatgcaaatgtggtttctctctgtctctgtcaatatcttattgtattgtaccattggtaactgaaactgaagaaagcaaaaccacagaagagggttgactgctatactccagttggactgaggggaaggcactttagattaaagactaccaccgtgtaggaaagggacaattctcacgagagaaagtggaattcttttaccagaaacaggagaaggactcaagccatgtaaaacacacacaccatttcaccaacccataccattctgttttctactaaaaatgttaaactgttttccaatggtttctgtaggagaaaatttccagagttatatattctcctctgggtcatcaggttattatctcctgattttccatatttattttgtttgttttttagtatttattgctgatcccgtttttccactgcttacttatcctaaaaaagagatagatctgcccaaatccagcatcaacacagaaatgtgttttttttttttttctcgtcattttcatctacagtgtactcagttactatatgcaaaccttttgtaattctaagggaagggtatacaggtcccttcccaggatgtagccaacatgaattgattactgctatgttatcctgaaatgagataagttgctaaaccaatgtcatgtcttattattttctcaagcacatgcaaacatgtatttctgcctccattgatggatatggggcctaatgttgtgttattcagcatataattaataaatacataatcaacaatctaccctgcatctcaccttcgtgactgattaccttgatgatgatgattttgatactgcaatgtacatatgaatgtagaaataagtaaagggtgagcaggagattgtac

SEQ ID NO: 95074 - DNA, 304 bp, Homo sapiens
cgtcctctctctacctgccacctccacctctctccccctagagcaggtgcctgcagtgcttctcggactctgctcccatgacagctgccgagcggagcctagactcaggggctgggcctgctgggttcacagacgcttccctcacccttcccagctgtgtgaccttgcacaggtcactaggattccgtgtctcagtgtcctcatctgtacaatgggcacgatgacaggaggtctttttgaaatgaaagtgggttaatctgtgtgaggcatataaatggtatatggcaaacgtagaactatctat

SEQ ID NO: 95075 - DNA, 543 bp, Homo sapiens
gttggtttttggtttcttttgttgttgtttttaagacacagggtcttgctctgtcacccatgcctcctgtagtggtatgatcatagctactgcagcctcaacctcctgagctcgagggatcctcccacccagccaagtagctggggctacaggtgcacaccatcatgcccagctaattttttaagtagggtcttactgtgttgcctaggctggtctccaactcctagactcaagtgtttctcctgccttggcctctcaaagcactgagattacaagcatgatctaccttacctggccaacatttgggtattgatcagaaatctcaggacgtgggctggaggtttggtttgttctggggagaaatcagtaactaagtggtggtgaaagtgatcaagcgtcgatgaaaccacgtgggatagtggcagggtgtggagaagaaaatttctcatgtcctttaaaaaagaaaaatatttctggtggctgggcacagtggcatatgcctgtaatcccagcactttgggaagcagaagtgggaggaatgct

SEQ ID NO: 95076 - DNA, 502 bp, Homo sapiens
agtagggaaggagagaagtagggaaggaaggaaggaaatgaacaaatttacatgaagatgagaacatccaggggaacttacaccaccagtattttccattaacaggaacacgctaactagttattggagacagacgcactactgtaaaactatatactgtttccatggggtacaaccccttcttcctcctctgaaacacataattcctctggcccactgttgccagagacactgagtcttgtctttggataagttctggtgcccaaaagaatgagatgagacagtggatcccagaacaccagggcggcaacctttcgtgctgctcagtgtccactacagaagctgcccagctgcaggtgagggcctcagcccctgggtctgacatcgtccatttgtcattctcactggacttccctcctcgcactggctcccactcccccaggacctggtggacggccacgtgagaaggatacaaacaggccatgcccctttctttctcccc

SEQ ID NO: 95077 - DNA, 304 bp, Homo sapiens
ttcaagaccagtctgagctacacagcgagaccctgtctctacaaagtagttttagaaaattaaccaggcatggtggcacgtgcttgtagtcccagctattcaaggtgggccatgggggtaaaggggtactaaggcaggaggaatcccatgagtccgggaattcggggctgcagtgagctgtaactgcaccactgtactctagcctgagcagcagagcaagaccctgtctttgacaacaacagccaccttggccactgagtctctgatgagcttgcctcatagacatttcacatgtgttgtcaca

SEQ ID NO: 95078 - DNA, 705 bp, Homo sapiens
tctttgaaaaattttattaatcacataaatcccttggaggctgaaaatgtttcttgcttgacaaatcatacaagacatttcaaggccaatgcaatggctctaaatgcttgaagattttgctcctggtgacaatgtgggaaattgaagatggggggaggaaagttctatattacaggggatgctgaatatttcatttctttggacacatcttcatcaagacaccactagtaagtagtatggcacaagaaaaggagctttatacggtgtaccttttagtcagaaaaaaaaaacaggtttcttatgcatttaattgccatgcagaaaaaaactttaaggcagctcataattttctgcatctgattatcaacactgatctatatttacacttgagctttgtgtgtatggaatgggaaacagggtctcactcttgcccaggctagagtgcagtggtgtaatcaccactcactgcagccttgaccttcccaggctcaggtgatcctgccacctcagtctcctgagtagctcagactataggcgcacatccgcagctaatttttgcagagacagagtcttgccgtgctgcccaggctggtctcgaactcttaggctcaagtgatccacctgcatcggcctcccaaagtgctgggattacaggtgtgagccacagcgcccagcctagtgaagagatttaattaataaggggaa

SEQ ID NO: 95079 - DNA, 1048 bp, Homo sapiens
tagttttgatgaggtgaccaaagattacatggttatctcttggaagcctcctttagatgatggaggcagtaaaatcaccaattatattattgagaagaaggaagtgggtaaagacgtctggatgccagtgacatctgcaagtgctaaaacaacatgcaaagtttctaaactacttgaaggaaaagattatattttccggatacatgctgaaaatctgtatggaataagtgatcctctggtgtctgattcaatgaaagccaaagatcgtttcagggttcctgatgcacctgatcagccaattgttacagaagttaccaaagactctgcattagtaacctggaataagccacatgatggaggaaaacccatcacaaactacatcctggaaaagagagaaactatgtctaaacgatgggctagagttaccaaagatcctattcatccatacactaaatttagggttcctgatcttctagaaggatgtcagtatgaattccgggtttctgcagaaaatgaaattggtattggagatccaagcccaccatccaaaccagtctttgctaaagatccaattgctaaaccaagtccacctgttaatcctgaagcaatagatacaacatgcaattcagtcgatctaacttggcagccaccacgtcatgatggtgggagcaagattctgggttatattgttgagtaccagaaagttggagatgaagagtggagaagagccaatcacacccctgagtcatgtcctgaaactaaatataaagtcaccggtcttcgggacggtcaaacctataagtttagagtgttagcagtcaatgcagctggtgaatcagatccagctcatgttccggagccagtcctagtaaaagacaggcttgaaccccctgagttgattcttgatgccaacatggcaagagaacaacacattaaagttggtgatactctaagacttagtgccatcatcaaaggagtgccattcccataacacacattttgatatttatggagaggattcactatgcatgatccattggatgtccct

SEQ ID NO: 95080 - DNA, 454 bp, Homo sapiens
tataacaaaaaccattacagtatctttctcctcgagttataagcattggttttaacagctaaaacaatgcaagttgcagatttctcaagaagatggtttgaaaactctatagactacagtataaaataaggtattgaaaatactctcataaaatacgttctgaaaaaaattccaggttctacctcctaagagccataggatcttgggcaaatcaagggcaaattatttaacctctttgagatttagtctcttcatctataaaatgcagacaaaaatagtgcctgcaaggcagggcatggtgacccaggcctgtaatcctatcactttgggaggctgcggtgggaggattgcttgaacccaggagttcgagaccagcctggccaacacagtgagacctctacaaaataaaaaataaaaaaatcagctgggcgtggtggcacatgcctgtagtccc

SEQ ID NO: 95081 - DNA, 363 bp, Homo sapiens
tgagcaaggcctacttggccctggatagaaattgttttcaaagagaagggcagctgcttagagtgaacatgtctatggactttaaaaagaccccacgcaatttgactttgtggcaatagaaaacagtaaaaaacagggcatagcctagtttgttataagaaaaagcatccattttctatccttttagagtcttatttgattatggtgggagggaatgttttcaaatttcccatttctcaagaaatgttcatattaattgaggatttcccttcaataaatctcatgtcctcaattaggatctaggctagtaatgatgtttaattacttggttctcattggaaatggaaaattatgaaatggaaa

SEQ ID NO: 95082 - DNA, 136 bp, Homo sapiens
gagtagctgggactacattgtctttttattgttgatttctagggcctggcttgtgacttgcctatttatttcctttcctttcctttttttttatttgagatggagtctctgttgcctagagtggtggtgcaatctt

SEQ ID NO: 95083 - DNA, 1122 bp, Homo sapiens
tggaagtcctggttaatgcaataaaacaagaaaaggaaataaaaagtacactacttgggaaaggacatataacattaacattgtctctgctagctgatgacatgatcattcatgtagaaaatccaaaagaattgattacaaatctcctggaacctatatgcaattacagcaaggttgcaggatacaaggttattatatgaaagtaaactgctttcttatgtaacagtaataactcaaatttgaaattaaaacccaatgccatttatattagcaccccaaaatgaaatatttaggtaaaaattaagaaaatatacataagatctacatgagaactacagacctgattaaagaaatcaaagacccaaataaatggagagatatttcatattcatggataggaagactcaatattgtcaacatgtcagttcttcccaacctgatctatagattcaatgtaatcccaatcataatcccagcaatattttgtggatatttgataaactgattttaaagtttatatgcagaggcaaacaacctggaatagcaaacacaatattgaaggagaaaaccaacactgaaggaggaatgattgatagcactcatcctcaagatttaatataaagctataataagatagtgtggtattggcaaaagaatagacaaatgatcaatgaaacagaacagagtttagaaacagactcatatttagtcaactgatacctagcgaaaggacaaaggcaatacaatgtagtaaaaatagtctttttgacaaatgatgctggaataactggacatccacatgcaaaaaaaagaatctagacacagactttccacccttcacaaaaattaactcaaatggatcacagaactgaatgtaaaagtatacaactcctaaaagaaaacatagaaggaaatttagatggtcctctctttgacagtggcattttagatacaacaccaaaggcatagttcatgatccacaaaggtctctcccctcccatctctgaccccaaacaaccattaatctgttctccatttctataactgtatcattacatgaatgctatataaatggaattatatgtgatctttggggactggatttctttaaaacccagcatt

SEQ ID NO: 95084 - DNA, 261 bp, Homo sapiens
cttggtccatctggatgctgagactagacacagaagggtgcaaggacctgcctggcttttgaaacccctggagttgggcatgagcctgtgccaggtgcacctggtgctgcctagcctcctgtgcctcaagcccacaggagcccccttggaggcagagacctccccaggttacacagcaagggagctggagccaggcggaaactaggtctagtgggccacgccaccctaaggggcacagcttcggaaagtaggacatatgcg

SEQ ID NO: 95085 - DNA, 231 bp, Homo sapiens
cctgtgactgagccagttgcatagcagtttccatgccccagggcctcagtttcccctcaggcgatgtgctttcctgtgtacctcaatacacacattgtctccctctggtctgggccagccccatgaaaggagagttgagactgggtgccaggtgtctgtgagtcataagcatttgggttccaaattgtgtgtagatgaatacagatgtgttttgtgtgtgtgtgtgtgtgt

SEQ ID NO: 95086 - DNA, 637 bp, Homo sapiens
gctctcagccatctcaacaagaagatgtctttctgcaaaccaggaaaagagccctcaccagccatcagatctgctggcaccttgaacttggacttcccagcctccaggactcgactgaagactgacacagcccgatcgcctcggaagccccctgggccatcatggacgccgagcttcgggtaactcttacagtggaggacaggaatgtcaggcctctgagcccaagctaagccatcatatccccagtgacctgcacgtatatatcaagatggcctgaagcaactgaagatccacagaagtgaaaatagccttaactgatgacattccaccattgtgatttgtttctgccccaccttaactgatcaatgtactttgtaatctcccccacccttaagaaggttctttataatgtcacccacccttaagaagtttctttgtaattctccccacccttgagaatgtactttgtgagatccatcccctgcccccaaaacattgctcttaactctactgcctatcccaaaacctataagaaccaatgataatcccaccaccctttgctgactctcttttcggactcagcccgcctgcatccaggtgaaataaacagccttgttgctcaaaaaaataaaaataa

SEQ ID NO: 95087 - DNA, 367 bp, Homo sapiens
atgttttgtcctactcagtgcatcatataagaagttacatgaagttcatttaccttattattagtaatgttaactttgatcacttggctaaggtagcatctccactttgaagttactattctgtaattatcctgtgggaagatactttcatattatgcaaatatgttctttcccaacatatattcaccactaatcttagcatccctccaaggttctttcttcctacaattactatgatatttgcaaaatgatgattcttgcattttatgtctcctacatttaataaaatcttactgtaataaaatactgcccattctccccctttggtttatatttaatgtattatttatgtcaatatggattcatt

SEQ ID NO: 95088 - DNA, 732 bp, Homo sapiens
agcagaggcaacatggcggccttagcaagctatagctgcgagatttgaattactccactcgtagctattgcattcctgacgatggcctctgtggcttcgtgcgattcgcgtccgagctcagacgagctccctggagacccctcttcacaagaagaagatgaggactatgattttgaagatcgggtcagcgactcgggttcatattcctcagcgagtagcgattatgatgatcttgagcctgaatggctggacagtgtgcagaaaaatggagagctgttttatttggaattgagtgaggatgaagaagaaagcctccttcctgagacaccaactgtgaaccatgtcaggttcagtgaaaatgagattatcattgaagatgactacaaagaaagaaaaaagtatgaacccaaactcaagcagtttaccaaaattttaagaaggaaaagacttttacccaagcgctgcaataaaaaaaatagcaatgacaatggaccagtatccattctaaagcatcagtccaatcagaagacaggagtcattgtccaacagcgatacaaagatgtgaatgtttatgtaaaccccaaaaagctaactgttatcaaagccaaagagcagctcaagcttctggaagtgctggttggaattattcatcagaccaagtggagctggagaagaaccggaaagcagggtgatggagagaggcttgtggttcatggcctgctgccaggggga

SEQ ID NO: 95089 - DNA, 300 bp, Homo sapiens
gtagagatgggggtctctctatgttgcctattctggtcttgaactcttggcctcagcgtgatcacttgacaagaggggcagttcttagccactcatggaaaatggaatggatggacacagactcaggtcaaaagcccaccttggggctctagaactttcagtagtcaagctgcgggaggagggaaagccacagtggtgggcacaggtaggaggtgccttgaggccagcactccccaatcttcttcccaattcactccagactctcctagacccctagcagccggcagccttttgccactg

SEQ ID NO: 95090 - DNA, 391 bp, Homo sapiens
gaataggtgacattattatgcaaagtggtttcagttcccttgtcttgtttttggaatagtataagaggcctacaatacgaataaataaggcccatcacaagcctcaccaaaggacaaaactaatccacttctgaagaaggctctttgttgggccagatcaaatccttggacagaactgtactcttaatctctgtagtgaaagtggggggtagtttaagaatttattaaccttctaccttgagcaatccctcagaagtaagaggtgtcaggcctctgagccgaagctcagccattgtaacccctgtgacctgcacatatatgtccagatggcctgcaggagccaagaagtctggggcagccgaaaaaccacaaaggaaataaaacagccact

SEQ ID NO: 95091 - DNA, 188 bp, Homo sapiens
tctgataatcagcctctcctactgattgccttctttcagttcacgctatcttcactctggcttaaaaccagatgtgactcctccgtcttcagtccctttcatattaaagcctttcagtctcctttctgttcccccatttcctctttctccaactactgcaaaagttcctccctcaccactagtctcta

SEQ ID NO: 95092 - DNA, 514 bp, Homo sapiens
cgacattgtttctatgggaaaatgtgccccagaaggaacaaggtcttccttcctaccccacttcctacctccctgtgtaatgaagcctgtgtgtttattataggaagtgctgctcccaagtgtgggcggctgggctttgaggcagccttggacacttacccccaagggcagagatattctcacttctcctgtcccagctctggcagggaggggagtgggagcaggtggggagtctgtccctgacccaccttcttcagggctatcttctggggggtggggttctagcaagactggctacataatttctggggccctttggttcaaaaggcagaaaaataaaaatgctgctaagctagttaagaagacaactttttttcctcctgctctctctctcttgacttgttacagtgttttaaatatgtgatttaatgttattctacgtaagaaaaaagaaaaatttaaattactagcatgaatgttataattcatttttatactgtgcaaagccagtttt

SEQ ID NO: 95093 - DNA, 568 bp, Homo sapiens
ggtttctatgcaagttgcactaaagacaggctcattctctattactggactgtataaaatatagaaagctatctggcactttaacttcctttgcagtaaaccaggagataatgagattccaaattagctgaagaaataggcacagattaagttagttgcccaggggtctcataaattcagaggtgggcaaagaactgtaagagggctgcatctctgctagggatagtaagtgggaatcagcctcgggcctacttctgtcgcaccacaaggtggcaggattccccttgtctgaaacctgaaaggacaactgatttccatagtgtatatattatctttgagtttaggtgactgtgtcagactgcttgtctatgagactaacagtgtttccagaacctgataagtctatatctttttcgagatgttaaccagcaaaatattttccacatcagcttggtagtagcttttcaaaatattcagcccctatctccgtttgcttcgtgcaacagtggtgccagtagaaggtaataaagtcaaagaccagctttcagtaaaactaaaaatagctgtt

SEQ ID NO: 95094 - DNA, 375 bp, Homo sapiens
aacacaggtctcaataaagttaaaaaaatttgaaatcatacagaatatgctctctgatctcagaataaattagaaaatgcaattaaattggaaaacagtgacaaagatctgaaaaatctgtaaatttttggaaattaaacaatacacttccaaataagctatggattaaataaatcgtgataaattagaaaatattctaaatggaataaaaatgaacacaaaatataccaaaatttgtcagatgcaccaaaagtagtgcttattggaaaatttatcattttatttgcttatgatagaaagatcaaaatcagttatctagtcttctacattaagaagctagaaaaaattacaaattaaatgcaaagtaagtagaag

SEQ ID NO: 95095 - DNA, 367 bp, Homo sapiens
aaaattactccctggtcttgaattttgtctgatctcgcatggctgtgatgttttattcctagaccaatagatcccacgttattaggaatgctcatttttagcaggttgtgaaatcttatgtcctgcaaagaaaaaaataggaggaggaagagagacaaacacacagtagaaggaacaatcctggaaaactgatataggccatatcactctgaagtgtgttgtcagtaggcacatatgaaaatgtttcgtgtgtataaatcggtttctgttattttcttctgaagtttaagttgtctagtttgcatccccatggcttaagaaaatcacagcttaatatttagtaatttcaaattggacaataggggga

SEQ ID NO: 95096 - DNA, 463 bp, Homo sapiens
cagcctgggtgacagagcgagatccgtctcaaaaaaaaaaaccaaagaacaagtggggactgaacttcccaacctcctccttgctgtcttccctctctgctcagagctcctggcatgcgtcatcttacccttgggtgtcttcccatctctgtactcctggcatatttgacagtctgagggtcctcaaacttttccactccccttcctagccccaaactgtagttactgcctgacttcttgcctcaccacattcccccggccaaactacatgccccgtgaccacattccacacccttcatgcctcacatcattgtcctccagcacccactctccacatagacccacgttacctctgttattatataggaaagaatgtgaaatacagtggaaagagtatggattttggagtcaagcctggggtgaaattccagctctgacatctaccagtcctgtgatcccagct

SEQ ID NO: 95097 - DNA, 634 bp, Homo sapiens
  misc_feature (603)..(604): n is a, c, g, or t
ccagagtataatatactggtgaagtactccttgacctcgaggtgtcatcaaaaatgtgacttcccaagaaaagccttctcccagtttgttaaatcactctgcccttcttattgtctaatgctgcactctgtctcctttacaatattttctatgctgctttccttaagggtaggtgttatgtcagtttctgtcacctctgttgacagaagacttgaatgcaagacctagcatattgctaggcccaaaataggcactcaataaaaccatttgagtgagtggaagaatggatgaaggcaacatgctcatagggaaagagacaggccaaggcagggccattgctacacaatgtgatgggtaccaaggcagagaggtggggtgaggacattgtgttagtctgttttgagctgctataacagaataccacagactgggtaatttacaaagaacaggaatttgtttcctcacaggcctggaagtcaggaaatccaagatgaaggcactggcaggttcagttatctggtgaaggtctggtctttttgcttccaagatggcagtttgactgttgcgtattgaggagcgggggcagggactgcttcagtcganncggccgcgaatttagtagtagtagtcgacc

SEQ ID NO: 95098 - DNA, 352 bp, Homo sapiens
tagattacacatattaggaaataatggatttgtattccataggtatgcttgatctttataaagttccctgtctctggaaaaactaaaataaggcaaaacaatcttcttagtagagttatttttacaagaaagttgcaagccagttttagttcatcgattggataatttttcctgcttgctggaggtatttcagtattggtaatacctgaactatgagatgcatgaatgatgcattttaggaatttgtttctgtgtccataccaggcataatgaattaagttatctgttaaaaatacaggatttttgctcaatatacagttgtagaagaactcattgtccaaatttttaagac

SEQ ID NO: 95099 - DNA, 295 bp, Homo sapiens
cacttagacatttatagactcaaaaaagtagggcactcagtgttagcatgaacccagggagacgggcacttctgtgcacatgaaggggcatgagaaacccgcagcatggcagggggtgcagggggatggtggtgcaacttggccttacaaaggcataggttgagaggtgtaattccacctctgagaacataccctaaggacaagagacatgcaccaagatttataaatgagaatactcttcaccgcaccttctatcatcgtgagtgagtactatggaggtattacaattttttcc

SEQ ID NO: 95100 - DNA, 213 bp, Homo sapiens
aaggtcatgaggctggaacagccaggcagctcaggcgaactttattaaaatatcagttcttatttccctctccggagtagaagaaagtgtgggacaaagaactggaggagagtttgagaccagcctggccaacatgacgaaaccccgtctctactaaaaatacaaaaattagctggatgtggtgcacacctgtagtccccgctacctgggagg

SEQ ID NO: 95101 - DNA, 308 bp, Homo sapiens
ctggcctcatatcagagcccaggaggagatggtccacctaggaataagggttctaatagttaactctgaaactggaagcaagccagtgacaaggagttgaaactaaagaacacaggagacctccgtaaacgtccttccagcatagacctgaggttctgagcaactgtgggtaacgcacaaaccattattaaaaccaataaaataccattattttacaaaaaattaaattcaatgccttgaagccaattatttattctataataaattaaagctaataacatactattaaaaccaaaaaaatccttacc

SEQ ID NO: 95102 - DNA, 655 bp, Homo sapiens
ttcccagtgatacgaatatttccaggctcctacatgaagtaattacactgctatgaacacatttttgcacagaatataggtaaagcatgaacgggcattttaacagaagaatcacagtaccgctcacttctaaggcagtatttgtttcaggctttgcgaccaatcagcagttttcacacccagtcctggattcggtctctgctattttacacccaggcaagggcactgaggacagcacttgcaagcctctcttaggtagtacaggaagcataacattggcatctgcttctagggaggtctcaggaagcttttactcatggtgagtaaaatgatccacccccatgatccaaatacctcccaccagaccccacctccaacactggggattatatcctaacatgagatttgagcagggacaaatatctaaatgatatcaatgaccatccccaagacacatagtcatcagattccccagggtcaaaatgaaagaaaaaatattaaaggcagctagagagaagggtcaggtcacctacaaagggaaccacatcaggctaacagcaaacctttcagtagaaaccttataagccagaagagattaggagcctatattcagcattcttaaaaaacgtaaattccagctgagaatttcatatcc

SEQ ID NO: 95103 - DNA, 405 bp, Homo sapiens
acatgcttgaaaggggtgtgctggtctcagagggttgggtttctcagttggctgggcatcagctggccatgctttagttatttgatgggaggaaaaataagtgggaggtgaggagtaactcctgggctctgatgagtattcaaggcaagtacagatctggaaagcctgtatgcaaaggaggaactcactgaaaagtgctggcctgaggagggcagaagggagggctggggaagccagcagcgggagcaaaggagtaggctccaactgggtgaagatgttggtgtggtgcgttatgtaaaatatacaaattattattggaaataaccacgtctcagcagtgctagttctcagtttggagaatgggaaatcgaaaggatcagattcagagacggcaacttactcaag

SEQ ID NO: 95104 - DNA, 319 bp, Homo sapiens
gagggaatggactcgagggtgtgttcccggccgtcaccacctgagggcagtgtggcagcgcctctggaaggagactggactgaggcgacttgtaaatgctgagggaaaccgattgacaggaaaggaagccatacacttcttcaaggaggaaggtagtgagaggagaaacgtggatccctggggcttccactcttgcggaaagtatgaaaatctctggtttgcaaagttgctacattccctctgctactgacgtgattgtttttcttttggttaaggctgctttctacactttatttggacccagaaataatttaaatag

SEQ ID NO: 95105 - DNA, 374 bp, Homo sapiens
tgtgtgcgcgcgcgcacacacacaaggctgggagctgtgcggcaggcaccctggcttcgggaacccaaactagccagcttccctttctgggcctgctggcctaattcccagccgcagctgccattctgggcccccctccctgaggccatctccctgcagatttggcagcggggaaaggaggggccgagagaaggggagagaaccagagacaggactgagcgctaatctgatgtagatgatccggcagccttctccagcttggttcccctctgccatcagctctccaggtgactttccctgtgccctgcactctccccttctgctttcatctccttaagaaagtgcccagaaagttaaacccacacacaaacaca

SEQ ID NO: 95106 - DNA, 468 bp, Homo sapiens
ctcaccatgcccattttacagagggagaaactgaggcacagggaaggtagactcttatccaaggccacatagcaggtaaacaaacaaactaggactccaaccaaaccttgtgctctgtctcagccttaaaagaaaactcaataaacattctggcctttttgtttttgttttgagacctttattctgttacgcaggttggagtgcagtgtggtgatcacagctcactgcagcctcaaactcctaggctcaagcaaacctcctacctcagcctcacaagtagctgggactataggtgtgcaaccgccagagctggctatttttgtgtagagatggggtctcgctatgttgcccaggctgctgatctcaaactgctggcctcaagggaacctcctgccttggactcccaaagtgttgggattacaggtgtgagcctccatgttcagtccacattctgtactttttttttta

SEQ ID NO: 95107 - DNA, 652 bp, Homo sapiens
tgccaaagtctattgactatcctgatagcattccttgtcttagtgggatctgatgcagttgaccgtaaacctctacttggtggttctccgtgaccccacatatgcctggtttttgtcctttcttgtgggggctcctctgtggtatcctatgctgactccgccttttctccccttccctttccttggtaaagctccaggactcaggactccatcttctccttttctctctccattttcaatcctctggcgatctcattcagggtcctggcctgtttgacctctgcaactgggtttaatccatatctcacgcttcacatgttccaaatcagctcttgatccttcccctgccccaccccagtgctcctgcagtttgcttttctgctgtcttctctatctcgggcttatgcccatcctccccattgctcagcctaaaacctcgaatacactcttcacttccctttctctcacaccattcttgtggctttaccttcaaacatgcagcctttcctccctacctctactgctggtggccttgggtgagccactgccatctctcctgtaagtggtatctttgctgctaccgaccaacccacagggggatctctagagtgacctgaagcatgaagctggactgcgcggttaacgaagaagg

SEQ ID NO: 95108 - DNA, 632 bp, Homo sapiens
ggggaggatggtttcaggatgaaactgttccacttcagattattaggcattagattctcataaggagcatgcaacctatatccaaagcatgcagcctagatccctctcatgctcctatgagaatataatgctgtcactgatctgacaggaggtggagctcaggtgatgatgctcactcatctggcactcacttcctgctgtgtggcttggttcctaacaggccatagattggtaccattctgtggtctgggggttggggacccctggcctaatggatcatcttagtaaagttcagaggcatttaggaggaagacccatctgatgacatgcaaggaggaaatatctgtagacccctggagaagagggaaagcagtgcttttccatgtgtaagcttgggactgagggttggatttttgtggtaggtacatgactgggtggagaggatgacattcctcagttctccatttggctttcagtaggacacacttcaggagtcccacatcaggatggctttttttctccctgtggctaattaaaaccatcgtaagcccaaaagctaaactcaaaggcctttgagagccttccattgggctgcccaaagtccttagaggctggttggccaatgtaatgaa

SEQ ID NO: 95109 - DNA, 324 bp, Homo sapiens
ggaaaagtcagtgccaataaggaaggatggattagcagctcaagattcaagcagacaagacagtcctaagagtccaggtacaggggaaggtaaacaggaagaagcaggttcgagcaggcaagacatggcattgaagcccggggtgataagacttagcccgtggagttcgtggtggagacttctggatccacagaccaggtttgtaacagggtaagaatctcggctgaaagattaggagccacagtcctaaagcctgggtcagaaactgggtaacgaggtgggagccaagcacaggtgagcagcagcatctccctgtttctccat

SEQ ID NO: 95110 - DNA, 222 bp, Homo sapiens
ctctagcggatcttatggagaccaggctgagcccaaactgtgatatagacttagcccgtggagttcgtggtggagacttctggatccacagaccaggtttgtaacagggtaagaatctcggctgaaagattaggagccacagtcctaaagcctgggtcagaaactgggtaacgaggtgggagccaagcacaggtgagcagcagcatctccctgtttctccat

SEQ ID NO: 95111 - DNA, 1058 bp, Homo sapiens
aaaccaccttcactcatatataaaaattattatgtgctacactagatatttcaggagaattgataaaagaaagactgttgtattcatatgcttgtcttcctggctagaggatctgttttaattaatcagctcatggagtttggaaaatatttatagtatacatagctgagtgttcatgtaaattttgaatacgttcatcttttttttaaaaaaagattgaacttcaaaaccattttcttacatactcagtagaagttgttatgagccaacattttttgtgagctatactattttaaacatctaaagtaaattatttgacatataaaaagacttcttcatttaaaaatatatcttttaaaaataattttacaagtgatgggcatctcattttagaagaagaggcatcaatgacagcagttacagtaactcgatgctggaatatgtttttaaatacaagatgctgtgttcagcattgtacatacattatcaaattttattctgataatatgctgcatgatgtattaggctgggttctctcagacagaacctacacgtatacatatatatatatacacatgcatatacatacacatacagagagagagaaagagagagagagagagatctctacatttattagaggaattggatcatgcgattatgggggctgagaagttccaggataggttgtctgcaagctggagaaccagggaagagagtagagtagctttctccaagtcctgaagcttcagaactagggaaactgatggtataactctcagtcagaggccaacggcctgagaactcagacagccactttgcaactcctggaatcccaaggccagagagcctggagtttggatgtccgcatttttgttttatccatacccctgaccaattggatggtgcccacccgcattgagggtgggtgtccctctattaaatattttaactataattttaactgtgatataggcactgaattcttgttgctaataatctggtaagatccatctgaactatgaagtgagtacgtggaggaactcctacattttagg

SEQ ID NO: 95112 - DNA, 850 bp, Homo sapiens
aaaccaccttcactcatatataaaaattattatgtgctacactagatatttcaggagaattgataaaagaaagactgttgtattcatatgcttgtcttcctggctagaggatctgttttaattaatcagctcatggagtttggaaaatatttatagtatacatagctgagtgttcatgtaaattttgaatacgttcatcttttttttaaaaaaagattgaacttcaaaaccattttcttacatactcagtagaagttgttatgagccaacattttttgtgagctatactattttaaacatctaaagtaaattatttgacatataaaaagacttcttcatttaaaaatatatcttttaaaaataattttacaagtgatgggcatctcattttagaagaagaggcatcaatgacagcagttacagtaactcgatgctggaatatgtttttaaatacaagatgctgtgttcagcattgtacatacattatcaaattttattctgataatatgctgcatgatgtattaggctgggttctctcagacagaacctacacgtatacatatatatatatacacatgcatatacatacacatacagagagagagaaagagagagagagagagatctctacatttattagaggaattggatcatgcgattatgggggctgagaagttccaggataggttgtctgcaagctggagaaccagggaagagagtagagtagctttctccaagtcctgaagcttcagaactagggaaactgatggtataactctcagtcagaggttgcagtgagcagagatcgcaccaccactccagcctgcacgccagcgctaaatccgtctca

SEQ ID NO: 95113 - DNA, 881 bp, Homo sapiens
agtgggagtgataatggccacctcgtggggttgctagggactgaatgagacgatgctcaaagcaggggtaccatgcccggcacattccagcactcaacacctagcccctgctgtcactgtccttgtcattattaccagattcacaagcggagccggctaaggccaaggagctgtcctctgagatccgtttgctcccgctgctgggaatgaaaacgtcgctgacaccgggctctgcagagcagttttctgattagatggaggtaacccaagttccaaaaaccacagctgaggagcagcagctgacaagctggtttgcatggatgtggaaaactaccgcgttccagccgcctccagacagaaacaggacgcatagccaggtcccacggcagctccaaagagggccttgcacgccaagcggggcaccccccagcctgagggttcaccaaccacgcggaccacgcggaaacctagctgggcttctctctcccctcggggcgccagtgcgggaggcggtttctcccttggaagtggaagtcagatctgcttccaggttcccggtctagggccggtctagggcagctaagcctgcctgctccttcctttccatcctccctggtcaggggagcccaacagcaacgcgagggcacccgaccctctgcctgcacctggagggcgcccgggtccccccaagccacggccaggacgtcgcgtggtggggcagggaaaggggcgccgccgctgctggaaactagccctgtgcgctccgcccgcgctcccctcccggagatgtctcgagcgcctctggcgcgaacaaagcccggccgcccccgagaaacttccgtgcatgaaggtttcctccttgactcggcagcagcggccgc

SEQ ID NO: 95114 - DNA, 609 bp, Homo sapiens
taagctacatcttctcatcgtaaaaggtttggaatgttttaccgtttgattcgggaattcaggggtggggggcaccagggtcttagggcggcctgggagtgcgacccgaggctacgggcgccggggctagcaacctcctgtcagacgcggtctcctccgccggggacgaggaagcccaaacgggcgcaccaacttatttcacaccactctccacccagccccgcaaaaacgagaaacgtttgccattcccagtgagtttcaaggctgcaaatcctccggagaggtcctagatggtctctccgggtccgcgacgcgaccacagtacctactgcgacttctgttttcgcaccgcctttcccttcgcacggaaccctcccgaagtcagacattgccgagcgcccgcagagcagcttggagtggcggcgccggacccggctgtcgggcgggctcgggtcccggctgctccgggccgggcactgcgcgcaaggacgcgaccccgccgcccagcgcatctcccaccgactcccgggctgacgcgagggcagccccggggcgccggctgcgtggaggccgagcctcggtcacctccctcgtcacggacgcggccgc

SEQ ID NO: 95115 - DNA, 297 bp, Homo sapiens
caccatcaagcactcctgcaagaaaggaagaaaccctttctgcttagagctgtttattttacaactaacaaccaggaaaaaatatctatctggatggccgggtgcggtggctcacacctgtaatcccagcactttgggaggctgaggcgggtggatcacctgagcccaggagttcgagaccagcctggccaacatggtgtaaaccctgtctctactaaaaatacaaaaattagccaggcctggtgcgggcccctgtgatcccagctactcaggaggctgaggcaggacaattgcttg

SEQ ID NO: 95116 - DNA, 289 bp, Homo sapiens
tcactcttgtgaaggaatcattaatttgagtgttcctatttcccatcacatgcagattcagggggaaattcttccaaatctcctctcctgcctcttcttttacagtgtagaaatacctgcccaaatcaaacaaaactaacaaaagtagccaatctcatgaagctcatgttctatacacataggaaggccccttagcaccttactatcttagaagttattttgcacattaatattaatattgtgcaattggctatttggtgtctaaacccacagaagataagttaacagc

SEQ ID NO: 95117 - DNA, 300 bp, Homo sapiens
tcatctggtactcctattttgccttcgtcagtgtgcttaatggtatcaaatatttctttgacgatctgttcattttcctacattccttttactctttgtttttcaaattgcataatctctaatactagaagtagacattaattcgttcttgtaattctttcttctgccagctcaaatgtattgttgagcaccccttgtacatatttttttttttttttttgagacagagtctcgctctgtcaccgaggctggagtgcagtggcgcgatcttgggtcactgcaagctccacctccctggtt

SEQ ID NO: 95118 - DNA, 821 bp, Homo sapiens
aaagaaaaagtcaagtgagaagagatgaagatagggtaataggagtatcattagtgatcttaacagagatagtttagtggaatagatctgaagttggattctactggattgagtactgaaaggaagaaaggaaatgtggttatcctgaggttggtctattatttcaagactcttgactgtaattgggcagagagggaaacaagagtaactacggagagtggacatttcgttgtgcaggttttgtatattattaatggtagagacttaggtaagtttacttactaagagcaaagtagcaagtaggagcttatagacagagagagagtgagagggagaataatcaatgaaacaagtacctcagagaataagaaacatggtggccatagcaaaacatggcagaatgagtcttagacaggtatatgtatgtaacttggtaagtgttagtacaggaaatagggagatctcagctgaaactctggaatcagtgaggaacagaacaaattaagggaagggaaataaaattgaatgagttctttaccccaagtggtttctccaagcatgatcagaatccagggtaaatagaaaaatgaaataaacatatgaacttatgaaatgagacactaaacagaaacgtatttcctgaaattaaggaggttttcaagaagaaaattctcactccatttctgaaaattactcctccacctccaattccccatgaagagatcaatgcctaagagtctctgagataaattcagattttttaaaaaaggcatgtgcagacagtacaaatcacatgattaactaaaagcagacaggaacta

SEQ ID NO: 95119 - DNA, 417 bp, Homo sapiens
gctctgtcttttaattctcatattttaaaaaaatttctcaaaggttaacgtcactaatcataagcctaagattcctaatgatatttgtcactgaccctggaaatgagatgtttacagatggagttctctcatctgacaagataagtcaaagacaagacatcaaaattatgtcccttgcttttgtgctatgagagcaatttttagtgagtctttcatttataatatactgtattaggatggtctttaaaaattcctagccaatggtagtaaagcattagtggagcacctattctgtgcaagaaacatgataggtactttatgtaattgttttatcttcataataacttggtaatttaggtattgttattttacctataaagaaataaagactgagatgttaaaagatatacaatttgc

SEQ ID NO: 95120 - DNA, 461 bp, Homo sapiens
ccttttggtgtagtcctcagatcatgagtgagttctcacgatatctggttgtttaaaaatgtgtagtatctcccctctccttctgtcttgcacctgcttccaccatgtgaaacacctcgctcatcctttgccttctgccatgattgggagcttcctgggacctccccagaagcagaagcttctatgcttcatgcaaaacgataagccaattaaacctctttatttttttaaataaattatccagtctcaggtttctctttatagcaatgtgagagcgaactaatacacagggtcagggctctggcagggaaaacacagtgctacgttagggcagtaccacacaagtcctgcttctctgaggagatgggatcagatgactgtgttggaaagaacttcctcccttcttactttaaaaccacagcatgaagacatgagcagttttggaccctgttcttacttat

SEQ ID NO: 95121 - DNA, 114 bp, Homo sapiens
ctaaacatccggcacccttgctctgtccatcttttagtgtcgagttggggccactttactgttgaaaattgcttaattccatttgtgaaagttcctctgcccatccctatcccc

SEQ ID NO: 95122 - DNA, 158 bp, Homo sapiens
gcataatgccatcaacctttattgggacactgtcagaaccaaccctgtgaaatttcaccccttgtgcttattgtaagaatgatgttgaggatgttatttgttgcattacacaatgctgtactcaggggacccatgcaccaattattttctgtctcagt

SEQ ID NO: 95123 - DNA, 464 bp, Homo sapiens
gtccttttagaggagttccccgtgggataccaggcttctccctctgtggcttagtctgggaagccgggcatggggctgaaaatcaaggacttatacattcgggagcacaaaaggaaaaagcagtttgatacacttcaaaatatgttgttttgctgccttatttttcagtcttttaaaaacaagatattccaatccttatcttcctctatcttggaatctaggaatggtcctaggtaaagaagatccttcctcttgggggagccgctttaagagccatctctgcagtgctcttccctggatcatccttctttgggcctcataattgacccaaatttctctagcagcccatccaatcctagtatctcttcttaataatatcaaaagcctcgaggccgggcatggtggctcacgcctgtaatcccagcactttgggaggccaaggcaggtgagcgagattccatctc

SEQ ID NO: 95124 - DNA, 345 bp, Homo sapiens
cttcctgggttcgagcgattctcctgccacagcctcccgagtagctgggattacaggcgtgtaccaacacacccggctaattttttgcatttttagtagagatggagtttcactctattggccacgctggttcacaaactcctcaactcaagtgatccacccaccttggcctcccaaaatgctgggattacaggcgtgagccaccactcccggccaggtagtgacagtttttagaggctctgggtgcttggcccttgccttaaccgaatgctttaaaaggcctttgatctctgtcaataaaattgcaagtgtgtacacacatttgacttaacaatcataataata

SEQ ID NO: 95125 - DNA, 265 bp, Homo sapiens
gccttgtgaggagccccgtcatcactgtctctctgttgtctttcctacttcctgaacccttgactcaggtggttggcgtcctcatccacagttctcactgacctctaagctccaggaaggcagatctcacctctaagccttcacatcctttgctgtcacgcttgtgcccacaggtttctcattggctttggtcagccatgtgccagtgtagacagaaagcctggtcagaggactcggctttctgaccaggggccttcccatgggg

SEQ ID NO: 95126 - DNA, 798 bp, Homo sapiens
ccaaaaaggaaaagagaaggtgaggacacttacattttcacattttatttgatatatttatatgtggcttgaatctcttacattcatgcattacatgtgcaagtttgaaaataaagtgcaggtggattattttaaaatttggaggctgggcccggtggctcacacctgtaattccagcactttgagaggccaaggcaggaggatcacctgaggtcagaggtttgagatcagcctggtcaacatggcgaaaccccgtctctactaaaaatacaaaaattagctgggtgtggtggcgcgtgcctgtaatcccagctactcaggaggctgaggcaggagaatcacttgaacccaggaagcagaggttgcagtgaactgagacggtgccactgcattccagcctgggcaacaagagtgaaactccatctcaaaaaaaaaaaaaaatttggaaagcacacaaaacaaaaagaacaacataagtctctctcactgtcacactgctcagtggaagcactgttaaaaggctggtgcatgtgtttccagcacgcactaggagcactgaggaacactgcttcccctgcttgcccccaggaagggggcctggccaatgccctggactagacatctattctgctgtccagcatcacccatgccactgccctgccccaccctgagccactcctggagacacctcccagtgcagggagtctcccagaagctttgggccagcagaatgctcagctcccaagccaaaatgtccttctctttgttaactacaaaataaacatctccaggccccct

SEQ ID NO: 95127 - DNA, 369 bp, Homo sapiens
tggaaccttggagctctaaggaagcagcagccctcagagaagactctcttccacaaaactggtcacccagaagctgtgggttcactagttgattcattcattcattcaacaaacacttctggagcacctccttctattccaggctgcactggttctcagcacacagggttctccagtgaagggtaacctggccctgcctgcaaggagtttacacctgcttttccctactgcttctaacatattggcatcatcccccacctgggcacagagcctagcatcctagcaggagcacactcaaaatctgttgtttactgattgacttgtggtaaggaaacagcttataaaacacattattaaaataaattacgc

SEQ ID NO: 95128 - DNA, 323 bp, Homo sapiens
ctccaaattaggacactttggggagtgaaaggggtgctattgatagttacactacttggaggctataagtgaatttggtagaggaaggaaagttctgggatattgccacccttgaccttttggagaaatgtagacagcatctcccaggcatgacgcctagggatcgtgtttatctgtcatcagttggtgactccatgtttattgagcactggctataagccagacttggtgagggactgaaacaattacaagacacagttctgcactggaagaaataggaatcaacctaagatttcctgtcctgctaggtcatcaggttcctg

SEQ ID NO: 95129 - DNA, 572 bp, Homo sapiens
agggcacccaacatacacacagacttaacactgtgatggaaagaagggaagaaggtgggaaaagacaaaactcctctattaaagagggcaccaaaaaaactgcactcttaggtgaataatttgtgattcaggcagacaaggtcatatctgacatccatttaaatcgagcagctttttcactttcagtctcccacttgctcaagctttactcttttatttatgtggtgactgagagaaatttaattggcatttatgtttaacttaagagcaaaccaatcctccaatactgagacagaaaagataataaaaattggtatgaaactgagctagagtttaagggggaattggtggggtaggaacaaaagtaaataaataaatgaagacaagtttcacaagacccactgctaatgacaacggaaataaaggaataaaaaaagcatcagaaatcatcaaggcaggaggcagcataagattcagagacagcaataaagatctttaggataccacactgaggggtgtggagaggacaaccctgagactggtgtgcctgaacctcaaaacctccttagagt

SEQ ID NO: 95130 - DNA, 121 bp, Homo sapiens
gtaaaaagaaaaaagtatagtcctatcacatagataacttgataacattttgatgtattcccttccattttccaaatacgtatatacatgaaaatatagtaattcttctctagaaattgaa

SEQ ID NO: 95131 - DNA, 498 bp, Homo sapiens
caaggtcaagttgaatctggtacaacatgtccgttcggtgaagcatcagcagactgagggcctacggaagctccagctccaccagcaaggcctggcaccagaggaggacaacctcagtgagatcttttttgttaaagattgcccaccaaatgagcttgcatcttcttgccaaatcttctggagcgcttgtaatttcctctgtacagagcccaacaggctcatcagcagcagaagaaactgcctcattgggagccaggacttgtgatgatgatcttacagagcagcagttgagatcaacctcagaagaacaaagtgaggaggcagaaggagctattaagcctacagcagtggccgaggacgatgaaaaagacacaagtgagagagacaatagtgaaggcaaaaactctaataaagactctgggataatcacaccagagaaggaactaaaagttagtgtggcagggggtacccagccactcctgctggcaaaagaagagg

SEQ ID NO: 95132 - DNA, 448 bp, Homo sapiens
caaggtcaagttgaatctggtacaacatgtccgttcggtgaagcatcagcagactgagggcctacggaagctccagctccaccagcaaggcctggcaccagaggaggacaacctcagtgagatcttttttgttaaagattgcccaccaaatgagcttgaaactgcctcattgggagccaggacttgtgatgatgatcttacagagcagcagttgagatcaacctcaggtaatggttcctactccttctcaaaatatttccttgtcctaaatgagttgcttttgttactctcataattgatggaataaacattctctgggaacttctctaattagatctgatcatatgccttattcaaataagtaaaaagcaaaatgaaataaattcaataattggaagtatatgtaaattgactttacattttagagcagttttaggttcacagcaaa

SEQ ID NO: 95133 - DNA, 385 bp, Homo sapiens
acagtcccctctagtttacctctccctcaattcagtcctcacctttaatggctggcacctttactaatgtacaagaataagaactgtaaagaacaataatctgtttctttcttcacccagctttcttcagaaggacctgacttcagtacacataaatcatcctgcttggttgtgaatgcaattagttttactttcacaagaatcgtgtcctcttgttgatctctttccattttcttcatacttacatctactttctaataccgtcacacttcctttctaggcaacttctccctttttgccaacttcaggtggccaaagaaatatgctatcagtttcatctctcttgtttggaggctgatgtgctccctgaacatacagtcctaat

SEQ ID NO: 95134 - DNA, 249 bp, Homo sapiens
aatgttaagagcattacaaacggaaaattcatccaacaataagtaatttcttctacaaaatactatattctatgaaaatcaacctgtagcctcatatgtttgcattctggattcaaacaatgtttgatacaatatgaaaaagaatctggacctcacagagaaattatttgactaacttttcaatcttttcaatgtaaatgcaatgaaataaaaaagaatatcaaacatcaaatataggtattctttttt

SEQ ID NO: 95135 - DNA, 681 bp, Homo sapiens
tttctctataaacaaaccatgcatgggcttttaaaggagaaaaggaagagtggattgacagagaaaataactgtttaggatagaggttaggaaaagactgagagccagagaaaaggcatcaatcccagttgttaatccacgaggcatcccccagacccttctgtaaaggttaatgaaggcagtaaggcagttatctctgtttcgtgcactgatgcaatccaagcttccacggtttagcacatagtagacgctctataaatatttattgaatgttgaacgatgagagagtaattaaaaaccggtaagttgatatcataaatacaacgacaacggctcccctatcaaatgtttagtgttcccagagacagccccattgttctacatctcgttatactctggccttttcccgtttttgtcattcgaactcatatacatattgaaatcgaagcacacacaaatccctgaaatgacaaacttaaatgctatccaaaggaagttacattaggttgctgctttgaaaatgaagtcaactcctaatgggttagctgtttctgcagcattctttcccgccttcttggagttgaggtgagggattaaacaatcaaccttctctctcctttctctcattctcaaagtttttctcgccttttctttcctttcctttgcttcatttcttttccc

SEQ ID NO: 95136 - DNA, 277 bp, Homo sapiens
ttgcgattagggcagcgtgggctctggagccaggatgcctgggctcgaatcctgactcttccagatatgtgaccttgagcaggtgacttcactcttctgtgccttggctggcttctctcataaatagaggtgctaatctgcacatccttgataaagtcatggtgaggattaggcgaactcatatagatgaagtgcttaaaacaggggctgccagatcctagcaactgcacacacgtgagccagcatctttcttttttatttttatttttattttgag

SEQ ID NO: 95137 - DNA, 480 bp, Homo sapiens
taatttctcagccgggcgcaatgactcactcctgtgataccagcagtttggaggccgaggcaggtggctcacctgaggccaggagtttgagaccagtctaaccaacgtggagaaacctcatctctactagaaaatacaaaattagccaggcatggtggtgcatgcctgtaatcccagctactcgggaggctgaggtgggagaatcgcttgaacctgggaggcagaggttgtggttagccgagattgcaccattgcactccagcctgggcaacagagtgagactccatctcaaaaaaaaataaataaataaaataaaaagataatttcccatttgtcctttatagtatctattgaaatacattttctttgaaaacaaagtagcttgcattgatttttattttacatttttctagattataataaaatttcttgttcatataacgatatgtgagaataaaacatatctaagtctaattaaaa

SEQ ID NO: 95138 - DNA, 211 bp, Homo sapiens
taaaaagaaaaaaaaaattttaagtaaaatcacatactaatttcagaagaaaacaaaaactaaataagctatacaaaaccaaaacaaagtaacgtttacaaaaatgaaatgtattatgcctgccagctgtttgctcttttttgctctagaacaaacacatcttcatttttttttttttttttttttcgcaaaaaggcttgctgacctacag

SEQ ID NO: 95139 - DNA, 503 bp, Homo sapiens
gttttagatttaaaagagtatcatctaaaggatctgacattacagacaaaagagagatctgtctatggcagtgcagaaattttcccagtcattgcaagatttccagtttgaatgtattggtgatgctgaaacagatgatgaaattagtattgctcagtcactaaaagaatttgcaagactactcattgcagtagaagaagaaaggcgaagactggcaatgttttaagaggttttgctgccagcccccaaaaagcaggcgataaaaatgagaatagcctgacatttccatggcaaacttcttggtgttgttgtaactggagcttggatgaggatgagacaagccacattggagaatgatccaaaacgctaacgatgtattaattgcaccacttgagaaatttcgaaaagaacagataggtgcagcaaaagatggaaagaagaagtttgacaaagagagtgaaaaatattactctatccttgaaaagcatttaaatttgtccgca

SEQ ID NO: 95140 - DNA, 692 bp, Homo sapiens
cggccgccgctggcagcgcctgtgccatggggctgcccactctggagttcagcgattcctacttggacagcccagatttcagggagcgcttgcagtgtcacgagattgagctggagcgaaccaacaagttcatcaaggagctcattaaggacggctctctgctcattggggcgttgaggaatctgtctatggcagtgcagaaattttcccagtcattgcaagatttccagtttgaatgtattggtgatgctgaaacagatgatgaaattagtattgctcagtcactaaaagaatttgcaagactactcattgcagtagaagaagaaaggcgaagactgatccaaaacgctaacgatgtattaattgcaccacttgagaaatttcgaaaagaacagataggtgcagcaaaagtaagtgttacattttattattcttcagttattctcctgataattaaagatgacataatttcagatgttaacatttttgaaattagaatgaccttttaaaagattttgtacatcatttaaaactttttgcatagagacttaacaaagactggacttcttttagacataaaagatgttattattctactgagtagataagaagcatgttataaatgagttcttcctttcccaaaaattataggaaattaatgattttgaagacacggtgaaattatgaggagc

SEQ ID NO: 95141 - DNA, 814 bp, Homo sapiens
ataggctgggcatggttggctcacgcctgtaatcccagcactttgggaggccgaggcaagcagatcacctgaggccaggagtttgagatcagcctagccaacatgacgaaaccccgtgtctactaaaaataaaaaaattagccaagcatggtggcatgcgcttgtagtcccagctgctcaggaggctgaagcaggagaattacttgaactgaagcggaggttgcagtgagctgagatcacgccactgcacctccagcctgggtaacagagtgagactccgtctcaaagagaaaagaatgaagtaaatctactctgccctccagagagatcttccatgtccagtgcccttcccgctctcctgcaaaggcgccttctgcgggcgtcctttcggccgggagccctacccggaacaagtcatggttaatgcagttctcaggtctgctgctagcaaagcacttagtgttcatttctctaagatttatattttgcctttattcttgaagggtatttttgctggatatctagaattatgggttgactctttttttaatttatttttcttttttttttttttttttaacaatctaaagatttggtttttagcagtttgcacgtaggtgcctcggtgtgattttctttgcatttattgcactttggcatcttgaatctataaatttgtctttcaccaaatttgggaagttttagaccatgtcttcaaatgcatcttctgtccttagtccctgcccctctgtgctgcaatacacacgcatctgtgctgtccccgaggctcagggggctggggtttgttcatcac

SEQ ID NO: 95142 - DNA, 208 bp, Homo sapiens
aaatagcatcctcttcttgtttcattgatgataatgtcttttctctggatgtttcttccatctttatagtccatttgctcttacattttctttctctcatttgttttggtctcaatctaggatgctttcctcaaatataaatcaatacttggttggctgctcattaagattggattgggtggggtgtagggacacttcagacatgttt

SEQ ID NO: 95143 - DNA, 222 bp, Homo sapiens
ctggaaggaaagagggggcatgtgtgaacagagctgtctatgacataaggtaggaagcaatagagacacagcaaactgctgtcagagctctctggtcagctcagggtcttagaagggtaagcttcaagtcaatgagtagcatatattcaaggacagggaagctgaaggcacaaactagctgaggtgccattgcaaacattgagggaggaagtgatgagtgcc

SEQ ID NO: 95144 - DNA, 668 bp, Homo sapiens
gaatgtgcctgtgtctggtatacggggttcccatcacaggaagcacgtggctgcatctgatatacagggttcctactgcatgaagcacgtgcctgcatctaatataccgggttcccatcacatgaagcacgtgcctgcatctagtatactgggttcccatcacatgaagcacgtggctgagtctggtatatggggttcccatcatgggaagcaccaggctgcatctggtatacgggttcccattacaggaagcacgtgtctgtgtctggctgcggacggtatacagggttctcatcacggaaagcacgtggctgcatctggtataccaggttcccatcacaggaagaatgtgcctgtgtctggtatacggggttcccatcacaggaagcatgtggctgcatccgatatatggggttcctactgcatgaagcacgtgcctgcgtctagtataccgggttcccatcacaggaagcacgtggctgcatctggctgcgtctggtatctggggttcccatcatgggaagcacatgcctgcatctggtatactggtttcatttattttcctgcccttattctgtacctgaacccatcatctatttcttacgaatttttattttcatcaatatgtacacttctatcaacttcctaaaactctttgacacatatct

SEQ ID NO: 95145 - DNA, 315 bp, Homo sapiens
aacagctggttttttttagcaaattggctgtgatctgccttcctcccaggctgaggactggtctgcatggtagagggtcaggtgctcctgcgtctcactgagaatgactcacagctggagcatgcatcctgggcctcctgtgccctggccgcccatcctaggatgttgggcaggtaacagttgtaggtatgtggacttaccagtacatgttgacataccctttcagcctcattaatttttgtatcatatatttattcctagtgaccactgaaatactgtgtgctgatatctaggttcctcaacttaaatttccac

SEQ ID NO: 95146 - DNA, 550 bp, Homo sapiens
ccctctccacaggtaggcagcttacttctccacattgattttcatttgtctgcctgcacttagagaaccttacagaaccatgtggctggtgggtgagaatgactcccagcataaacggccctgcagtgcatgtgcggttctgagcctcatcctttccacaagtgcatcctggagagccagcacagcggccccactgggcccctgctcccctgtcctggcctcggcttcttctgtaacatccccttttctttcatataaacatcaacgcagatcagaaagtctccagggtgacgggcccctgagttccaagcattgcgagtacgtagccctgtggcctaaggtggtttttgttgttgttaatgtagacacggcctctgcctgtgcttcctgccacaggcagctatgccggctggacgtaagaagccaaacttctatgaggctacctaagggtttggcttttggactaagactcttgcagagtcagggaccaagtcgcgaggtcgtttatttggttaccatatttgatagcaactctgcagagtgctggtgt

SEQ ID NO: 95147 - DNA, 780 bp, Homo sapiens
tattgatattttcattgaggtttatttataccttaactctttccacaaactatttgagacagcttcaagaaaacacccttactgaatctatatgcatagggaaagatatggaaatgtataagactggtgaatgctttctggcttcccttagctaggtgagtccatgtaactaaattctggtcagctctggaggggtagatctaatttttgggaaagctccttagagggcagggagttcaccctttgtctgcccttttcccttcttgcatccctggaatgcagaaaacatggctgcaactctaacagccctcttgggccatgaagtgaccttgaagtctctctaggagccccattaagatgacagcagggcagagagacagaaatctgaattcttgacaacttaatggagccaccatatcagatctagactgcctatctcaggacttcttttacatgagagaatgagcagttgaagccactgtgacttctagactgttttacttggcaatttctaaagatatagaaggaaaattatatattcaaatctttatgaatgctaaaatcactgcgttataagagtattggcgacttctttttttctatttcccaaaattcataatgactacaaacatttttattattagaacaaagctttaaaatagcaactaagaaaatctaaggagaaattttaaaacactggaaaggaaaatatgtatgtcaacatacacaacaattatatatgtgataaagctttaatgcatgtgattatgctttaattaa

SEQ ID NO: 95148 - DNA, 321 bp, Homo sapiens
aggttgcagtgagccgagattgcaccactgcactccagcctgggtgaaagagtgagacttcgtctcaaaaataaataaataaataaataaataaataaacaaacatgtactacttttattgtcaaaaaagaacaaggtaatgttactttgtaaaaacttagtcattcccactcttaatttgccagggcaaggcaattggataattcatctcctttaaaggagttaagggctgataatgactaatgtgctaattcctcctaagtgtatttgcattctaaccaaggagcctttggacaggggtctacagactatggcctgtgg

SEQ ID NO: 95149 - DNA, 439 bp, Homo sapiens
tagctcatgcacaggtagaccgggcctaattgtcagagagttccagcagaacggcctccccactgacattcaccagcccgcctgcaccttcccccaactgcaacctcccccatactgctttgtcagtacacacacacccataaccaacccccacaatcgtttgatgggtcatgtgggatcaggtggaccttccttcccttcccctaccactggcaggtatttgcatatacaccccaccatgccatggctgccagtgtgagcacactctgccccctgctgtgccaccattgacaacatagatgcacataagaccagcagccctgcctgccattctgtgccacaattgccactggcacaattgcaaatgtggtgacctctagcaccactttcaccagtgctctacccctgcattgataccaccggcacaaacctgtgcctg

SEQ ID NO: 95150 - DNA, 292 bp, Homo sapiens
tcttggatgtggaacaagaactcaggacccaccaaacacaggtacaaagaaggctgtaatactgtggccctccacgctctgccagtggagggcagctaccccacgcgacgggaagcagcagcgggcgggagcaggggcgacaggacagacagagctgttaacatgccgccatccatggggctgcagatggtgggactaaaagagctattagcacacggtaacaccccctctgaggtttcagggttgcggacacccgtctgggcgccaccatgttcccctcagtgtgacatgc

SEQ ID NO: 95151 - DNA, 590 bp, Homo sapiens
acctcagaagctggagacgtggcaccacagcgagggccaccatgggggaccagaggctgcaggactggctgaggtccccgggcatggactccaagccctggtactgtaacaaacggccttccaagtgcttcgcgaagtgcaagcacaggcgcctgaggttcccacccatggacacccagaactgggtatttgtgaaggagggcatggacgacttccgctacggctgtccgtctcccgaagatactctcgtttgtcgccgtgacgagtttttactccccaaaatatctctcagaggtccccaagctgaccccaaaagcgggcagaaaaagctgctcaagaaagcggccctattttccaagctctctccagcccagctagcacggaaggcgttcgtagagcaagtggaagcccagctaatggccaagcatcccttggccatgtaccccaatctgggagaagatatgcctccagatctcctactacaggtgctgaaacacctggatcctgagagggagctggaggacgcttgggcttgttgtgagacccaggagaagacaacagaggtacccactgagcctggtaaacatccc

SEQ ID NO: 95152 - DNA, 332 bp, Homo sapiens
ggattttgagcttctcttgaaagacggaaagttctggcaacattgggcctggattccaacatggccatgatgactgggatgccctctccatgggccccatgctctcacccagcctggcctgtgcaggcgtttccgtttgtgtcggatagctccttgttggcacctgtcataaagcatttttcactttctctcttatctcaccttcgtgaggctgcaagcttccttttttatttctgtcttctctgctgtgtttttcctctctctagcatggagtcagtgcttggcatatcatagactctctttttttttttttattgaattgaaatataagc

SEQ ID NO: 95153 - DNA, 215 bp, Homo sapiens
tgctgggattacaggtgtgagccaccgcaccctgcccctggcctcacatctacgtcaagccttggtatctgtgaaatatctcttctctggtagtcctgaggttctgcttccctctcatagagtccctctgttggttgaggaatgatacggggaggacaatcccattgaaagcaaagagtcgacagagttttactttttagagttaatgtaagagg

SEQ ID NO: 95154 - DNA, 1126 bp, Homo sapiens
tgccctgcgcccgcaacccgagccgcacccgccgcggacggagcccatgcgcggggcgaaccgcgcgcccccgcccccgccccgccccggcctcggccccggccctggccccgggggcagtcgcgcctgtgaacggtggggcaggagaccctgtaggaggaccccgggccgcaggcccctgaggagcgatgacggaatataagctggtggtggtgggcgccggcggtgtgggcaagagtgcgctgaccatccagctgatccagaaccattttgtggacgaatacgaccccactatagaggattcctaccggaagcaggtggtcattgatggggagacgtgcctgttggacatcctggataccgccggccaggaggagtacagcgccatgcgggaccagtacatgcgcaccggggagggcttcctgtgtgtgtttgccatcaacaacaccaagtcttttgaggacatccaccagtacagggagcagatcaaacgggtgaaggactcggatgacgtgcccatggtgctggtggggaacaagtgtgacctggctgcacgcactgtggaatctcggcaggctcaggacctcgcccgaagctacggcatcccctacatcgagacctcggccaagacccggcagggcagccgctctggctctagctccagctccgggaccctctgggaccccccgggacccatgtgacccagcggcccctcgcgctggagtggaggatgccttctacacgttggtgcgtgagatccggcagcacaagctgcggaagctgaaccctcctgatgagagtggccccggctgcatgagctgcaagtgtgtgctctcctgacgcagcacaagctcaggacatggaggtgccggatgcaggaaggaggtgcagacggaaggaggaggaaggaaggacggaagcaaggaaggaaggaagggctgctggagcccagtcaccccgggaccgtgggccgaggtgactgcagaccctcccagggaggctgtgcacagactgtcttgaacatcccaaatgccaccggaaccccagcccttagctcccctcccaggcctctgtgggcccttgtcgggcacagatgggatcacagtaaattattggatggtcttga

SEQ ID NO: 95155 - DNA, 262 bp, Homo sapiens
gattatcaacagaaactttatttctcatcggttcaggaacaatcgaaggacggaagcaaggaaggaaggaagggctgctggagcccagtcaccccgggaccgtgggccgaggtgactgcagaccctcccagggaggctgtgcacagactgtcttgaacatcccaaatgccaccggaaccccagcccttagctcccctcccaggcctctgtgggcccttgtcgggcacagatgggatcacagtaaattattggatggtcttga

SEQ ID NO: 95156 - DNA, 1484 bp, Homo sapiens
cggccgcggccacggcacgcccgggcacccccgattcagcatcacaggtcgcggaccaggccgggggcctcagccccagtgccttttccctctccgggtctcccgcgccgcttctcggccccttcctgtcgctcagtccctgcttcccaggagctcctctgtcttctccagctttctgtggctgaaagatgcccccggttccccgccgggggtgcggggcgctgcccgggtctgccctcccctcggcggcgcctagtacgcagtaggcgctcagcaaatacttgtcggaggcaccagcgccgcggggcctgcaggctggcactagcctgcccgggcacgccgtggcgcgctccgccgtggccagacctgttctggaggacggtaacctcagccctcgggcgcctccctttagcctttctgccgacccagcagcttctaatttgggtgcgtggttgagagcgctcagctgtcagccctgcctttgagggctgggtcccttttcccatcactgggtcattaagagcaagtgggggcgaggcgacagccctcccgcacgctgggttgcagctgcacaggtggggcaggagaccctgtaggaggaccccgggccgcaggcccctgaggagcgatgacggaatataagctggtggtggtgggcgccggcggtgtgggcaagagtgcgctgaccatccagctgatccagaaccattttgtggacgaatacgaccccactatagaggattcctaccggaagcaggtggtcattgatggggagacgtgcctgttggacatcctggataccgccggccaggaggagtacagcgccatgcgggaccagtacatgcgcaccggggagggcttcctgtgtgtgtttgccatcaacaacaccaagtcttttgaggacatccaccagtacagggagcagatcaaacgggtgaaggactcggatgacgtgcccatggtgctggtggggaacaagtgtgacctggctgcacgcactgtggaatctcggcaggctcaggacctcgcccgaagctacggcatcccctacatcgagacctcggccaagacccggcagggagtggaggatgccttctacacgttggtgcgtgagatccggcagcacaagctgcggaagctgaaccctcctgatgagagtggccccggctgcatgagctgcaagtgtgtgctctcctgacgcagcacaagctcaggacatggaggtgccggatgcaggaaggaggtgcagacggaaggaggaggaaggaaggacggaagcaaggaaggaaggaagggctgctggagcccagtcaccccgggaccgtgggccgaggtgactgcagaccctcccagggaggctgtgcacagactgtcttgaacatcccaaatgccaccggaaccccagcccttagctcccctcccaggcctctgtgggcccttgtcgggcacagatgggatcacagtaaattattggatggtcttga

SEQ ID NO: 95157 - DNA, 1044 bp, Homo sapiens
tgccctgcgcccgcaacccgagccgcacccgccgcggacggagcccatgcgcggggcgaaccgcgcgcccccgcccccgccccgccccggcctcggccccggccctggccccgggggcagtcgcgcctgtgaacggtggggcaggagaccctgtaggaggaccccgggccgcaggcccctgaggagcgatgacggaatataagctggtggtggtgggcgccggcggtgtgggcaagagtgcgctgaccatccagctgatccagaaccattttgtggacgaatacgaccccactatagaggattcctaccggaagcaggtggtcattgatggggagacgtgcctgttggacatcctggataccgccggccaggaggagtacagcgccatgcgggaccagtacatgcgcaccggggagggcttcctgtgtgtgtttgccatcaacaacaccaagtcttttgaggacatccaccagtacagggagcagatcaaacgggtgaaggactcggatgacgtgcccatggtgctggtggggaacaagtgtgacctggctgcacgcactgtggaatctcggcaggctcaggacctcgcccgaagctacggcatcccctacatcgagacctcggccaagacccggcagggagtggaggatgccttctacacgttggtgcgtgagatccggcagcacaagctgcggaagctgaaccctcctgatgagagtggccccggctgcatgagctgcaagtgtgtgctctcctgacgcagcacaagctcaggacatggaggtgccggatgcaggaaggaggtgcagacggaaggaggaggaaggaaggacggaagcaaggaaggaaggaagggctgctggagcccagtcaccccgggaccgtgggccgaggtgactgcagaccctcccagggaggctgtgcacagactgtcttgaacatcccaaatgccaccggaaccccagcccttagctcccctcccaggcctctgtgggcccttgtcgggcacagatgggatcacagtaaattattggatggtcttga

SEQ ID NO: 95158 - DNA, 1662 bp, Homo sapiens
cggccgcggccacggcacgcccgggcacccccgattcagcatcacaggtcgcggaccaggccgggggcctcagccccagtgccttttccctctccgggtctcccgcgccgcttctcggccccttcctgtcgctcagtccctgcttcccaggagctcctctgtcttctccagctttctgtggctgaaagatgcccccggttccccgccgggggtgcggggcgctgcccgggtctgccctcccctcggcggcgcctagtacgcagtaggcgctcagcaaatacttgtcggaggcaccagcgccgcggggcctgcaggctggcactagcctgcccgggcacgccgtggcgcgctccgccgtggccagacctgttctggaggacggtaacctcagccctcgggcgcctccctttagcctttctgccgacccagcagcttctaatttgggtgcgtggttgagagcgctcagctgtcagccctgcctttgagggctgggtcccttttcccatcactgggtcattaagagcaagtgggggcgaggcgacagccctcccgcacgctgggttgcagctgcacaggtggggcaggagaccctgtaggaggaccccgggccgcaggcccctgaggagcgatgacggaatataagctggtggtggtgggcgccggcggtgtgggcaagagtgcgctgaccatccagctgatccagaaccattttgtggacgaatacgaccccactatagaggattcctaccggaagcaggtggtcattgatggggagacgtgcctgttggacatcctggataccgccggccaggaggagtacagcgccatgcgggaccagtacatgcgcaccggggagggcttcctgtgtgtgtttgccatcaacaacaccaagtcttttgaggacatccaccagtacagggagcagatcaaacgggtgaaggactcggatgacgtgcccatggtgctggtggggaacaagtgtgacctggctgcacgcactgtggaatctcggcaggctcaggacctcgcccgaagctacggcatcccctacatcgagacctcggccaagacccggcagggagtggaggatgccttctacacgttggtgcgtgagatccggcagcacaagctgcggaagctgaaccctcctgatgagagtggccccggctgcatgagctgcaagtgtgtgctctcctgacgcagcacaagctcaggacatggaggtgccggatgcaggaaggaggtgcagacggaaggaggaggaaggaaggacggaagcaaggaaggaaggaagggctgctggagcccagtcaccccgggaccgtgggccgaggtgactgcagaccctcccagggaggctgtgcacagactgtcttgaacatcccaaatgccaccggaaccccagcccttagctcccctcccaggcctctgtgggcccttgtcgggcacagatgggatcacagtaaattattggatggtcttgaaaaaaaccaaccacacccaacacaaacaacacacccgccgccccaagcacaccaggaccccaaacaaagcacacaaggagaaaggcacaaacagaacaagaaacacaaaatagcaacacagcggaacaacacacgaccccctaaggagacccacaaccgaaagacggaaaccccaaac

SEQ ID NO: 95159 - DNA, 1592 bp, Homo sapiens
cggccgcggccacggcacgcccgggcacccccgattcagcatcacaggtcgcggaccaggccgggggcctcagccccagtgccttttccctctccgggtctcccgcgccgcttctcggccccttcctgtcgctcagtccctgcttcccaggagctcctctgtcttctccagctttctgtggctgaaagatgcccccggttccccgccgggggtgcggggcgctgcccgggtctgccctcccctcggcggcgcctagtacgcagtaggcgctcagcaaatacttgtcggaggcaccagcgccgcggggcctgcaggctggcactagcctgcccgggcacgccgtggcgcgctccgccgtggccagacctgttctggaggacggtaacctcagccctcgggcgcctccctttagcctttctgccgacccagcagcttctaatttgggtgcgtggttgagagcgctcagctgtcagccctgcctttgagggctgggtcccttttcccatcactgggtcattaagagcaagtgggggcgaggcgacagccctcccgcacgctgggttgcagctgcacaggtggggcaggagaccctgtaggaggaccccgggccgcaggcccctgaggagcgatgacggaatataagctggtggtggtgggcgccggcggtgtgggcaagagtgcgctgaccatccagctgatccagaaccattttgtggacgaatacgaccccactatagaggattcctaccggaagcaggtggtcattgatggggagacgtgcctgttggacatcctggataccgccggccaggaggagtacagcgccatgcgggaccagtacatgcgcaccggggagggcttcctgtgtgtgtttgccatcaacaacaccaagtcttttgaggacatccaccagtacagggagcagatcaaacgggtgaaggactcggatgacgtgcccatggtgctggtggggaacaagtgtgacctggctgcacgcactgtggaatctcggcaggctcaggacctcgcccgaagctacggcatcccctacatcgagacctcggccaagacccggcagggagtggaggatgccttctacacgttggtgcgtgagatccggcagcacaagctgcggaagctgaaccctcctgatgagagtggccccggctgcatgagctgcaagtgtgtgctctcctgacgcaggtgagggggactcccagggcggccgccacgcccaccggatgaccccggctccccgcccctgccggtctcctggcctgcggtcagcagcctcccttgtgccccgcccagcacaagctcaggacatggaggtgccggatgcaggaaggaggtgcagacggaaggaggaggaaggaaggacggaagcaaggaaggaaggaagggctgctggagcccagtcaccccgggaccgtgggccgaggtgactgcagaccctcccagggaggctgtgcacagactgtcttgaacatcccaaatgccaccggaaccccagcccttagctcccctcccaggcctctgtgggcccttgtcgggcacagatgggatcacagtaaattattggatggtcttga

SEQ ID NO: 95160 - DNA, 1611 bp, Homo sapiens
cggccgcggccacggcacgcccgggcacccccgattcagcatcacaggtcgcggaccaggccgggggcctcagccccagtgccttttccctctccgggtctcccgcgccgcttctcggccccttcctgtcgctcagtccctgcttcccaggagctcctctgtcttctccagctttctgtggctgaaagatgcccccggttccccgccgggggtgcggggcgctgcccgggtctgccctcccctcggcggcgcctagtacgcagtaggcgctcagcaaatacttgtcggaggcaccagcgccgcggggcctgcaggctggcactagcctgcccgggcacgccgtggcgcgctccgccgtggccagacctgttctggaggacggtaacctcagccctcgggcgcctccctttagcctttctgccgacccagcagcttctaatttgggtgcgtggttgagagcgctcagctgtcagccctgcctttgagggctgggtcccttttcccatcactgggtcattaagagcaagtgggggcgaggcgacagccctcccgcacgctgggttgcagctgcacaggtggggcaggagaccctgtaggaggaccccgggccgcaggcccctgaggagcgatgacggaatataagctggtggtggtgggcgccggcggtgtgggcaagagtgcgctgaccatccagctgatccagaaccattttgtggacgaatacgaccccactatagaggattcctaccggaagcaggtggtcattgatggggagacgtgcctgttggacatcctggataccgccggccaggaggagtacagcgccatgcgggaccagtacatgcgcaccggggagggcttcctgtgtgtgtttgccatcaacaacaccaagtcttttgaggacatccaccagtacagggagcagatcaaacgggtgaaggactcggatgacgtgcccatggtgctggtggggaacaagtgtgacctggctgcacgcactgtggaatctcggcaggctcaggacctcgcccgaagctacggcatcccctacatcgagacctcggccaagacccggcagcctggggaagtggctggtggagtcgggagcttcgggccaggcaaggcttgatcccacagcagggagcccctcacccaggcaggcggccacaggccggtccctcctgatcccatccctcctttcccagggagtggaggatgccttctacacgttggtgcgtgagatccggcagcacaagctgcggaagctgaaccctcctgatgagagtggccccggctgcatgagctgcaagtgtgtgctctcctgacgcagcacaagctcaggacatggaggtgccggatgcaggaaggaggtgcagacggaaggaggaggaaggaaggacggaagcaaggaaggaaggaagggctgctggagcccagtcaccccgggaccgtgggccgaggtgactgcagaccctcccagggaggctgtgcacagactgtcttgaacatcccaaatgccaccggaaccccagcccttagctcccctcccaggcctctgtgggcccttgtcgggcacagatgggatcacagtaaattattggatggtcttga

SEQ ID NO: 95161 - DNA, 273 bp, Homo sapiens
gcttatgaacaacagaaatttatttcttatagttctaaggacggaagcaaggaaggaaggaagggctgctggagcccagtcaccccgggaccgtgggccgaggtgactgcagaccctcccagggaggctgtgcacagactgtcttgaacatcccaaatgccaccggaaccccagcccttagctcccctcccaggcctctgtgggcccttgtcgggcacagatgggatcacagtaaattattggatggtcttgaaaaaaaaaaagtcgtatcga

SEQ ID NO: 95162 - DNA, 431 bp, Homo sapiens
agagctgggtgcagggtggtcaaaccctggccagacctggagttcaggagggccccgggccaccctgacctttgaggggctgctgtagcatgatgcgggtggccctgggcacttcgagatggccagagtccagcttcccgtgtgtgtggtgggcctggggaagtggctggtggagtcgggagcttcgggccaggcaaggcttgatcccacagcagggagcccctcacccaggcaggcggccacaggccggtccctcctgatcccatccctcctttcccagggagtggaggatgccttctacacgttggtgcgtgagatccggcagcacaagctgcggaagctgaaccctcctgatgagagtggccccggctgcatgagctgcaagtgtgtgctctcctgacgcaggtgagggggactcccagggcggccgc

SEQ ID NO: 95163 - DNA, 948 bp, Homo sapiens
cggccgcggccacggcacgcccgggcacccccgattcagcatcacaggtcgcggaccaggccgggggcctcagccccagtgccttttccctctccgggtctcccgcgccgcttctcggccccttcctgtcgctcagtccctgcttcccaggagctcctctgtcttctccagctttctgtggctgaaagatgcccccggttccccgccgggggtgcggggcgctgcccgggtctgccctcccctcggcggcgcctagtacgcagtaggcgctcagcaaatacttgtcggaggcaccagcgccgcggggcctgcaggctggcactagcctgcccgggcacgccgtggcgcgctccgccgtggccagacctgttctggaggacggtaacctcagccctcgggcgcctccctttagcctttctgccgacccagcagcttctaatttgggtgcgtggttgagagcgctcagctgtcagccctgcctttgagggctgggtcccttttcccatcactgggacccatgtgacccagcggcccctcgcgctggagtggaggatgccttctacacgttggtgcgtgagatccggcagcacaagctgcggaagctgaaccctcctgatgagagtggccccggctgcatgagctgcaagtgtgtgctctcctgacgcagcacaagctcaggacatggaggtgccggatgcaggaaggaggtgcagacggaaggaggaggaaggaaggacggaagcaaggaaggaaggaagggctgctggagcccagtcaccccgggaccgtgggccgaggtgactgcagaccctcccagggaggctgtgcacagactgtcttgaacatcccaaatgccaccggaaccccagcccttagctcccctcccaggcctctgtgggcccttgtcgggcacagatgggatcacagtaaattattggatggtcttga

SEQ ID NO: 95164 - DNA, 1703 bp, Homo sapiens
cggccgcggccacggcacgcccgggcacccccgattcagcatcacaggtcgcggaccaggccgggggcctcagccccagtgccttttccctctccgggtctcccgcgccgcttctcggccccttcctgtcgctcagtccctgcttcccaggagctcctctgtcttctccagctttctgtggctgaaagatgcccccggttccccgccgggggtgcggggcgctgcccgggtctgccctcccctcggcggcgcctagtacgcagtaggcgctcagcaaatacttgtcggaggcaccagcgccgcggggcctgcaggctggcactagcctgcccgggcacgccgtggcgcgctccgccgtggccagacctgttctggaggacggtaacctcagccctcgggcgcctccctttagcctttctgccgacccagcagcttctaatttgggtgcgtggttgagagcgctcagctgtcagccctgcctttgagggctgggtcccttttcccatcactgggtcattaagagcaagtgggggcgaggcgacagccctcccgcacgctgggttgcagctgcacaggtggggcaggagaccctgtaggaggaccccgggccgcaggcccctgaggagcgatgacggaatataagctggtggtggtgggcgccggcggtgtgggcaagagtgcgctgaccatccagctgatccagaaccattttgtggacgaatacgaccccactatagaggattcctaccggaagcaggtggtcattgatggggagacgtgcctgttggacatcctggataccgccggccaggaggagtacagcgccatgcgggaccagtacatgcgcaccggggagggcttcctgtgtgtgtttgccatcaacaacaccaagtcttttgaggacatccaccagtacagggagcagatcaaacgggtgaaggactcggatgacgtgcccatggtgctggtggggaacaagtgtgacctggctgcacgcactgtggaatctcggcaggctcaggacctcgcccgaagctacggcatcccctacatcgagacctcggccaagacccggcagggagtggaggatgccttctacacgttggtgcgtgagatccggcagcacaagctgcggaagctgaaccctcctgatgagagtggccccggctgcatgagctgcaagtgtgtgctctcctgacgcagcacaagctcaggacatggaggtgccggatgcaggaaggaggtgcagacggaaggaggaggaaggaaggacggaagcaaggaaggaaggaagggctgctggagcccagtcaccccgggaccgtgggccgaggtgactgcagaccctcccagggaggctgtgcacagactgtcttgaacatcccaaatgccaccggaaccccagcccttagctcccctcccaggcctctgtgggcccttgtcgggcacagatgggatcacagtaaattattggatggtcttgaaaaaaaaaaaaaaaaaaaacaacaagcaaaaaaacaaacaaaagaaacacaaaaaaaacaaaacacagacggggaaaaaaaggggggaacagaaaaaaggaggaaaagacggcgcagagacgagtaagagaggagaaggacaagaaaagtagaaaggaggggagagagggggaccaaagagaggagcagatgacgcaagcacagggggacgacgtaaag

SEQ ID NO: 95165 - DNA, 1504 bp, Homo sapiens
cggccgcggccacggcacgcccgggcacccccgattcagcatcacaggtcgcggaccaggccgggggcctcagccccagtgccttttccctctccgggtctcccgcgccgcttctcggccccttcctgtcgctcagtccctgcttcccaggagctcctctgtcttctccagctttctgtggctgaaagatgcccccggttccccgccgggggtgcggggcgctgcccgggtctgccctcccctcggcggcgcctagtacgcagtaggcgctcagcaaatacttgtcggaggcaccagcgccgcggggcctgcaggctggcactagcctgcccgggcacgccgtggcgcgctccgccgtggccagacctgttctggaggacggtaacctcagccctcgggcgcctccctttagcctttctgccgacccagcagcttctaatttgggtgcgtggttgagagcgctcagctgtcagccctgcctttgagggctgggtcccttttcccatcactgggtcattaagagcaagtgggggcgaggcgacagccctcccgcacgctgggttgcagctgcacaggtggggcaggagaccctgtaggaggaccccgggccgcaggcccctgaggagcgatgacggaatataagctggtggtggtgggcgccggcggtgtgggcaagagtgcgctgaccatccagctgatccagaaccattttgtggacgaatacgaccccactatagaggattcctaccggaagcaggtggtcattgatggggagacgtgcctgttggacatcctggataccgccggccaggaggagtacagcgccatgcgggaccagtacatgcgcaccggggagggcttcctgtgtgtgtttgccatcaacaacaccaagtcttttgaggacatccaccagtacagggagcagatcaaacgggtgaaggactcggatgacgtgcccatggtgctggtggggaacaagtgtgacctggctgcacgcactgtggaatctcggcaggctcaggacctcgcccgaagctacggcatcccctacatcgagacctcggccaagacccggcagggagtggaggatgccttctacacgttggtgcgtgagatccggcagcacaagctgcggaagctgaaccctcctgatgagagtggccccggctgcatgagctgcaagtgtgtgctctcctgacgcagcacaagctcaggacatggaggtgccggatgcaggaaggaggtgcagacggaaggaggaggaaggaaggacggaagcaaggaaggaaggaagggctgctggagcccagtcaccccgggaccgtgggccgaggtgactgcagaccctcccagggaggctgtgcacagactgtcttgaacatcccaaatgccaccggaaccccagcccttagctcccctcccaggcctctgtgggcccttgtcgggcacagatgggatcacagtaaattattggatggtcttgaaaaaaaaaaagtcgtatcga

SEQ ID NO: 95166 - DNA, 1370 bp, Homo sapiens
cggccgcggccacggcacgcccgggcacccccgattcagcatcacaggtcgcggaccaggccgggggcctcagccccagtgccttttccctctccgggtctcccgcgccgcttctcggccccttcctgtcgctcagtccctgcttcccaggagctcctctgtcttctccagctttctgtggctgaaagatgcccccggttccccgccgggggtgcggggcgctgcccgggtctgccctcccctcggcggcgcctagtacgcagtaggcgctcagcaaatacttgtcggaggcaccagcgccgcggggcctgcaggctggcactagcctgcccgggcacgccgtggcgcgctccgccgtggccagacctgttctggaggacggtaacctcagccctcgggcgcctccctttagcctttctgccgacccagcagcttctaatttgggtgcgtggttgagagcgctcagctgtcagccctgcctttgagggctgggtcccttttcccatcactgggtcattaagagcaagtgggggcgaggcgacagccctcccgcacgctgggttgcagctgcacaggtggggcaggagaccctgtaggaggaccccgggccgcaggcccctgaggagcgatgacggaatataagctggtggtggtgggcgccggcggtgtgggcaagagtgcgctgaccatccagctgatccagaaccattttgtggacgaatacgaccccactatagaggattcctaccggaagcaggtggtcattgatggggagacgtgcctgttggacatcctggataccgccggccaggaggagtacagcgccatgcgggaccagtacatgcgcaccggggagggcttcctgtgtgtgtttgccatcaacaacaccaagtcttttgaggacatccaccagtacagggagcagatcaaacgggtgaaggactcggatgacgtgcccatggtgctggtggggaacaagtgtgacctggctgcacgcactgtggaatctcggcaggctcaggacctcgcccgaagctacggcatcccctacatcgagacctcggccaagacccggcagggagtggaggatgccttctacacgttggtgcgtgagatccggcagcacaagctgcggaagctgaaccctcctgatgagagtggccccggctgcatgagctgcaagtgtgtgctctcctgacgcagcacaagctcaggacatggagtgatcttccgtgcccagccaacagctggtgggaggaggggcagatgttagagcaggttgagtgaaggaaggatcccatcagagcataacccagatttcacaattatctccaccctggaaggggggcagggacatcaccaaaggcacg

SEQ ID NO: 95167 - DNA, 870 bp, Homo sapiens
agcgggaggacaaactgcctggcaaaccagcagggccaggcaaatgaggccaattggcagcaagggctgggatggagatgtcagagatttagaggctctcagggttggaagggggacctcaaatttcatctaggtcaatgctgtgtccccttacctgagtcctgtctataatatccctcccaatagtgggctaacctcagcttgaatgctcccgatgatggagcactcattacctcctgggaccacgaactcatcaatgggtggtgctgactgtgcaaaaaccctccttcattttgagcctaaatctgttttccaacatgaagagagaagacccccgcagtgggttcatccttcttctggctccagccctcagtgctgcgaaggagccgcaagtcactcttcatgaggaaacatgcccggtgtcttgggtgggggcagaggcaccactgatccacaaagatgtggtgtgattttttcctctcaggggactttgcttgggggaggggccactgggaagagccaagaagctgctagaaaaaaactgaagtcgttcctccttctcaagtgcgaagtgaacctgcagcagaacattagaaaccctgatgcaggctagctccgtctgtggggactgttacatgctggttctctgttgccagctccagggagtcagggtctaataggagccaccccaggtattccacttatagttatagctccaagcaggggtcatcagcagggtgactggaactccctgcggttccagagagccacagatgctcacccatgctggctttggtaggcagggagctcagtaagcctctccgaggctcaggattttgccagtttggaagagcactggatgatttggaa

SEQ ID NO: 95168 - DNA, 673 bp, Homo sapiens
agcggaaaaaaaaaaaaaatctacaagtgcatccttgacctctagctctaagtttacacgtctgtgggcaaagtcccacttgaatgtcctaacatctcaaattctaacaaccttgactttatctctcaagtatgattctgggttaggattagccacaagggaaatctgtgaagataggaaaggcagaagtgaagcagcagccattacagtctgaaggtcagtctaggacactaggcacatctcacgcacattggctgctcatctgctggctcaccctggtgcgaggagtagctaagtctagagctcttgcagttcctactgaatattctggtttctgcaagtctgggtgagacgcaggtgcagcgcatggctcctataagcacctgcaccaggctactgcaggcacctgcctcattgaggtgtaagtgataagagacagatgctcagtctagtttatccccatgggatccagattctcttggggggctccagttgtgttcctgcccatgttcactctagcttttctggcctaatgggtaagcagtactggatttacagaaatttcaagaccaataccagacacagagatgttagactccttcatagaccttttcccatgctcacaatttcatgagacttaacccctaaaaaaaaaaaaaaatctcttattcca

SEQ ID NO: 95169 - DNA, 387 bp, Homo sapiens
cttatcttgctgagaaaatgagaccggattttcttgttttgtttgtgttctccatctctaggactatgaatccttaaaaaaaaaacctcttttgcccttgagagctaatgtttctgtttaacatgagctgctttagctatttcttattgttccgaatgtacaattttaacacctttttatttaaaaatgctgcctaaaaatcctattaattacaattatttatttaagagttcatcttactgttaaaaagataaataaatgctgatagaaaaaatagcagaagatgggtgtttgcatcctaagactgagtaggctatacaaatgttaaaattcaattatgtattgactatcattttctttttaagatttggcattacagctcttatg

SEQ ID NO: 95170 - DNA, 459 bp, Homo sapiens
atctgccctgtaaattctggatggtaaatatgacaaaaactctctccttgacccagctctagtgagactgctctaagccctcttctcaacatggctcaaccttgggcttcagtgtacattttgttgggcctgcattgctcagttttagcaagagtccagttaagtgaaagagaatctcacagctttgatatcagattcttccatatctaaacaaattcctcatcccctaccttcaatatctgatcactctgccctgtttgcaccaagaatctaccctcacccttgatgtctcctcttaataattttccatccaccaatctctccccactcttcaaacctgctccttggctataagtccctaccccttcttgtcttatttgcaatagagctcagttctacactggggtctctttttcctgattgcaatagttcctgaataaaatctgtttttaccacttt

SEQ ID NO: 95171 - DNA, 372 bp, Homo sapiens
aaaaataattggcttgaactcaccagatggtataaaagcccaatttaaccatcttttgagtggaattaaagttctgttcttttcaatggacttggtaaaaactgctaatcaaccagccttccagtcaaggtatatagtcacacataataatttgacaaaatacaccattaggaaagtgattttgcagaaagaagctgtattgcttctcagtgctccatactttgatgtttagtattgaacaacatctccagataatctggacccatggacagatcacacacttcttgccattactgaatttgcagaaatagtactgaagtattctgctacatttttatatttgcattttttttgaaactttttttcattttt
